United States Patent Application Publication US 2015/0141320 A1 - sequence listing, part 22

SEQ ID NO: 740591 - DNA, 15 bp, Homo sapiens
aatttgcacagcttg

SEQ ID NO: 740592 - DNA, 15 bp, Homo sapiens
atttgcacagcttga

SEQ ID NO: 740593 - DNA, 15 bp, Homo sapiens
tttgcacagcttgat

SEQ ID NO: 740594 - DNA, 15 bp, Homo sapiens
ttgcacagcttgatt

SEQ ID NO: 740595 - DNA, 15 bp, Homo sapiens
tgcacagcttgattt

SEQ ID NO: 740596 - DNA, 15 bp, Homo sapiens
gcacagcttgattta

SEQ ID NO: 740597 - DNA, 15 bp, Homo sapiens
cacagcttgatttag

SEQ ID NO: 740598 - DNA, 15 bp, Homo sapiens
acagcttgatttagg

SEQ ID NO: 740599 - DNA, 15 bp, Homo sapiens
cagcttgatttaggg

SEQ ID NO: 740600 - DNA, 15 bp, Homo sapiens
agcttgatttaggga

SEQ ID NO: 740601 - DNA, 15 bp, Homo sapiens
gcttgatttagggat

SEQ ID NO: 740602 - DNA, 15 bp, Homo sapiens
cttgatttagggatt

SEQ ID NO: 740603 - DNA, 15 bp, Homo sapiens
ttgatttagggatta

SEQ ID NO: 740604 - DNA, 15 bp, Homo sapiens
tgatttagggattac

SEQ ID NO: 740605 - DNA, 15 bp, Homo sapiens
gatttagggattaca

SEQ ID NO: 740606 - DNA, 15 bp, Homo sapiens
atttagggattacac

SEQ ID NO: 740607 - DNA, 15 bp, Homo sapiens
tttagggattacact

SEQ ID NO: 740608 - DNA, 15 bp, Homo sapiens
ttagggattacactg

SEQ ID NO: 740609 - DNA, 15 bp, Homo sapiens
tagggattacactgc

SEQ ID NO: 740610 - DNA, 15 bp, Homo sapiens
agggattacactgct

SEQ ID NO: 740611 - DNA, 15 bp, Homo sapiens
gggattacactgctc

SEQ ID NO: 740612 - DNA, 15 bp, Homo sapiens
ggattacactgctcc

SEQ ID NO: 740613 - DNA, 15 bp, Homo sapiens
gattacactgctcca

SEQ ID NO: 740614 - DNA, 15 bp, Homo sapiens
attacactgctccat

SEQ ID NO: 740615 - DNA, 15 bp, Homo sapiens
ttacactgctccatg

SEQ ID NO: 740616 - DNA, 15 bp, Homo sapiens
tacactgctccatga

SEQ ID NO: 740617 - DNA, 15 bp, Homo sapiens
acactgctccatgaa

SEQ ID NO: 740618 - DNA, 15 bp, Homo sapiens
cactgctccatgaac

SEQ ID NO: 740619 - DNA, 15 bp, Homo sapiens
actgctccatgaaca

SEQ ID NO: 740620 - DNA, 15 bp, Homo sapiens
ctgctccatgaacaa

SEQ ID NO: 740621 - DNA, 15 bp, Homo sapiens
tgctccatgaacaac

SEQ ID NO: 740622 - DNA, 15 bp, Homo sapiens
gctccatgaacaact

SEQ ID NO: 740623 - DNA, 15 bp, Homo sapiens
ctccatgaacaactg

SEQ ID NO: 740624 - DNA, 15 bp, Homo sapiens
tccatgaacaactgg

SEQ ID NO: 740625 - DNA, 15 bp, Homo sapiens
ccatgaacaactggt

SEQ ID NO: 740626 - DNA, 15 bp, Homo sapiens
catgaacaactggta

SEQ ID NO: 740627 - DNA, 15 bp, Homo sapiens
atgaacaactggtaa

SEQ ID NO: 740628 - DNA, 15 bp, Homo sapiens
tgaacaactggtaag

SEQ ID NO: 740629 - DNA, 15 bp, Homo sapiens
gaacaactggtaagt

SEQ ID NO: 740630 - DNA, 15 bp, Homo sapiens
aacaactggtaagtt

SEQ ID NO: 740631 - DNA, 15 bp, Homo sapiens
acaactggtaagtta

SEQ ID NO: 740632 - DNA, 15 bp, Homo sapiens
caactggtaagttaa

SEQ ID NO: 740633 - DNA, 15 bp, Homo sapiens
aactggtaagttaac

SEQ ID NO: 740634 - DNA, 15 bp, Homo sapiens
actggtaagttaacc

SEQ ID NO: 740635 - DNA, 15 bp, Homo sapiens
ctggtaagttaaccc

SEQ ID NO: 740636 - DNA, 15 bp, Homo sapiens
tggtaagttaaccct

SEQ ID NO: 740637 - DNA, 15 bp, Homo sapiens
ggtaagttaaccctc

SEQ ID NO: 740638 - DNA, 15 bp, Homo sapiens
gtaagttaaccctcc

SEQ ID NO: 740639 - DNA, 15 bp, Homo sapiens
taagttaaccctcca

SEQ ID NO: 740640 - DNA, 15 bp, Homo sapiens
aagttaaccctccag

SEQ ID NO: 740641 - DNA, 15 bp, Homo sapiens
agttaaccctccagg

SEQ ID NO: 740642 - DNA, 15 bp, Homo sapiens
gttaaccctccagga

SEQ ID NO: 740643 - DNA, 15 bp, Homo sapiens
ttaaccctccaggaa

SEQ ID NO: 740644 - DNA, 15 bp, Homo sapiens
taaccctccaggaaa

SEQ ID NO: 740645 - DNA, 15 bp, Homo sapiens
aaccctccaggaaac

SEQ ID NO: 740646 - DNA, 15 bp, Homo sapiens
accctccaggaaact

SEQ ID NO: 740647 - DNA, 15 bp, Homo sapiens
ccctccaggaaactc

SEQ ID NO: 740648 - DNA, 15 bp, Homo sapiens
cctccaggaaactca

SEQ ID NO: 740649 - DNA, 15 bp, Homo sapiens
ctccaggaaactcag

SEQ ID NO: 740650 - DNA, 15 bp, Homo sapiens
tccaggaaactcagt

SEQ ID NO: 740651 - DNA, 15 bp, Homo sapiens
ccaggaaactcagtg

SEQ ID NO: 740652 - DNA, 15 bp, Homo sapiens
caggaaactcagtga

SEQ ID NO: 740653 - DNA, 15 bp, Homo sapiens
aggaaactcagtgat

SEQ ID NO: 740654 - DNA, 15 bp, Homo sapiens
ggaaactcagtgatt

SEQ ID NO: 740655 - DNA, 15 bp, Homo sapiens
gaaactcagtgattg

SEQ ID NO: 740656 - DNA, 15 bp, Homo sapiens
aaactcagtgattgt

SEQ ID NO: 740657 - DNA, 15 bp, Homo sapiens
aactcagtgattgtt

SEQ ID NO: 740658 - DNA, 15 bp, Homo sapiens
actcagtgattgttt

SEQ ID NO: 740659 - DNA, 15 bp, Homo sapiens
ctcagtgattgtttt

SEQ ID NO: 740660 - DNA, 15 bp, Homo sapiens
tcagtgattgtttta

SEQ ID NO: 740661 - DNA, 15 bp, Homo sapiens
cagtgattgttttaa

SEQ ID NO: 740662 - DNA, 15 bp, Homo sapiens
agtgattgttttaaa

SEQ ID NO: 740663 - DNA, 15 bp, Homo sapiens
gtgattgttttaaat

SEQ ID NO: 740664 - DNA, 15 bp, Homo sapiens
tgattgttttaaatg

SEQ ID NO: 740665 - DNA, 15 bp, Homo sapiens
gattgttttaaatgc

SEQ ID NO: 740666 - DNA, 15 bp, Homo sapiens
attgttttaaatgca

SEQ ID NO: 740667 - DNA, 15 bp, Homo sapiens
ttgttttaaatgcat

SEQ ID NO: 740668 - DNA, 15 bp, Homo sapiens
tgttttaaatgcatc

SEQ ID NO: 740669 - DNA, 15 bp, Homo sapiens
gttttaaatgcatct

SEQ ID NO: 740670 - DNA, 15 bp, Homo sapiens
ttttaaatgcatctc

SEQ ID NO: 740671 - DNA, 15 bp, Homo sapiens
tttaaatgcatctca

SEQ ID NO: 740672 - DNA, 15 bp, Homo sapiens
ttaaatgcatctcat

SEQ ID NO: 740673 - DNA, 15 bp, Homo sapiens
taaatgcatctcatc

SEQ ID NO: 740674 - DNA, 15 bp, Homo sapiens
aaatgcatctcatcc

SEQ ID NO: 740675 - DNA, 15 bp, Homo sapiens
aatgcatctcatccc

SEQ ID NO: 740676 - DNA, 15 bp, Homo sapiens
atgcatctcatcccc

SEQ ID NO: 740677 - DNA, 15 bp, Homo sapiens
tgcatctcatcccca

SEQ ID NO: 740678 - DNA, 15 bp, Homo sapiens
gcatctcatccccat

SEQ ID NO: 740679 - DNA, 15 bp, Homo sapiens
catctcatccccatt

SEQ ID NO: 740680 - DNA, 15 bp, Homo sapiens
atctcatccccatta

SEQ ID NO: 740681 - DNA, 15 bp, Homo sapiens
tctcatccccattaa

SEQ ID NO: 740682 - DNA, 15 bp, Homo sapiens
ctcatccccattaag

SEQ ID NO: 740683 - DNA, 15 bp, Homo sapiens
tcatccccattaaga

SEQ ID NO: 740684 - DNA, 15 bp, Homo sapiens
catccccattaagat

SEQ ID NO: 740685 - DNA, 15 bp, Homo sapiens
atccccattaagata

SEQ ID NO: 740686 - DNA, 15 bp, Homo sapiens
tccccattaagatat

SEQ ID NO: 740687 - DNA, 15 bp, Homo sapiens
ccccattaagatatg

SEQ ID NO: 740688 - DNA, 15 bp, Homo sapiens
cccattaagatatga

SEQ ID NO: 740689 - DNA, 15 bp, Homo sapiens
ccattaagatatgaa

SEQ ID NO: 740690 - DNA, 15 bp, Homo sapiens
cattaagatatgaac

SEQ ID NO: 740691 - DNA, 15 bp, Homo sapiens
attaagatatgaact

SEQ ID NO: 740692 - DNA, 15 bp, Homo sapiens
ttaagatatgaactc

SEQ ID NO: 740693 - DNA, 15 bp, Homo sapiens
taagatatgaactct

SEQ ID NO: 740694 - DNA, 15 bp, Homo sapiens
aagatatgaactctt

SEQ ID NO: 740695 - DNA, 15 bp, Homo sapiens
agatatgaactcttt

SEQ ID NO: 740696 - DNA, 15 bp, Homo sapiens
gatatgaactctttc

SEQ ID NO: 740697 - DNA, 15 bp, Homo sapiens
atatgaactctttcc

SEQ ID NO: 740698 - DNA, 15 bp, Homo sapiens
tatgaactctttccc

SEQ ID NO: 740699 - DNA, 15 bp, Homo sapiens
atgaactctttcccc

SEQ ID NO: 740700 - DNA, 15 bp, Homo sapiens
tgaactctttccccg

SEQ ID NO: 740701 - DNA, 15 bp, Homo sapiens
gaactctttccccgc

SEQ ID NO: 740702 - DNA, 15 bp, Homo sapiens
aactctttccccgcg

SEQ ID NO: 740703 - DNA, 15 bp, Homo sapiens
actctttccccgcgc

SEQ ID NO: 740704 - DNA, 15 bp, Homo sapiens
ctctttccccgcgcc

SEQ ID NO: 740705 - DNA, 15 bp, Homo sapiens
tctttccccgcgcct

SEQ ID NO: 740706 - DNA, 15 bp, Homo sapiens
ctttccccgcgcctt

SEQ ID NO: 740707 - DNA, 15 bp, Homo sapiens
tttccccgcgcctta

SEQ ID NO: 740708 - DNA, 15 bp, Homo sapiens
ttccccgcgccttaa

SEQ ID NO: 740709 - DNA, 15 bp, Homo sapiens
tccccgcgccttaac

SEQ ID NO: 740710 - DNA, 15 bp, Homo sapiens
ccccgcgccttaaca

SEQ ID NO: 740711 - DNA, 15 bp, Homo sapiens
cccgcgccttaacaa

SEQ ID NO: 740712 - DNA, 15 bp, Homo sapiens
ccgcgccttaacaag

SEQ ID NO: 740713 - DNA, 15 bp, Homo sapiens
cgcgccttaacaagt

SEQ ID NO: 740714 - DNA, 15 bp, Homo sapiens
gcgccttaacaagtg

SEQ ID NO: 740715 - DNA, 15 bp, Homo sapiens
cgccttaacaagtga

SEQ ID NO: 740716 - DNA, 15 bp, Homo sapiens
gccttaacaagtgaa

SEQ ID NO: 740717 - DNA, 15 bp, Homo sapiens
ccttaacaagtgaat

SEQ ID NO: 740718 - DNA, 15 bp, Homo sapiens
cttaacaagtgaatt

SEQ ID NO: 740719 - DNA, 15 bp, Homo sapiens
ttaacaagtgaattg

SEQ ID NO: 740720 - DNA, 15 bp, Homo sapiens
taacaagtgaattgt

SEQ ID NO: 740721 - DNA, 15 bp, Homo sapiens
aacaagtgaattgtg

SEQ ID NO: 740722 - DNA, 15 bp, Homo sapiens
acaagtgaattgtgt

SEQ ID NO: 740723 - DNA, 15 bp, Homo sapiens
caagtgaattgtgtg

SEQ ID NO: 740724 - DNA, 15 bp, Homo sapiens
aagtgaattgtgtgc

SEQ ID NO: 740725 - DNA, 15 bp, Homo sapiens
agtgaattgtgtgca

SEQ ID NO: 740726 - DNA, 15 bp, Homo sapiens
gtgaattgtgtgcat

SEQ ID NO: 740727 - DNA, 15 bp, Homo sapiens
tgaattgtgtgcata

SEQ ID NO: 740728 - DNA, 15 bp, Homo sapiens
gaattgtgtgcatat

SEQ ID NO: 740729 - DNA, 15 bp, Homo sapiens
aattgtgtgcatatg

SEQ ID NO: 740730 - DNA, 15 bp, Homo sapiens
attgtgtgcatatgc

SEQ ID NO: 740731 - DNA, 15 bp, Homo sapiens
ttgtgtgcatatgca

SEQ ID NO: 740732 - DNA, 15 bp, Homo sapiens
tgtgtgcatatgcag

SEQ ID NO: 740733 - DNA, 15 bp, Homo sapiens
gtgtgcatatgcagg

SEQ ID NO: 740734 - DNA, 15 bp, Homo sapiens
tgtgcatatgcagga

SEQ ID NO: 740735 - DNA, 15 bp, Homo sapiens
gtgcatatgcaggag

SEQ ID NO: 740736 - DNA, 15 bp, Homo sapiens
tgcatatgcaggagt

SEQ ID NO: 740737 - DNA, 15 bp, Homo sapiens
gcatatgcaggagtc

SEQ ID NO: 740738 - DNA, 15 bp, Homo sapiens
catatgcaggagtca

SEQ ID NO: 740739 - DNA, 15 bp, Homo sapiens
atatgcaggagtcat

SEQ ID NO: 740740 - DNA, 15 bp, Homo sapiens
tatgcaggagtcatc

SEQ ID NO: 740741 - DNA, 15 bp, Homo sapiens
atgcaggagtcatct

SEQ ID NO: 740742 - DNA, 15 bp, Homo sapiens
tgcaggagtcatctg

SEQ ID NO: 740743 - DNA, 15 bp, Homo sapiens
gcaggagtcatctgt

SEQ ID NO: 740744 - DNA, 15 bp, Homo sapiens
caggagtcatctgta

SEQ ID NO: 740745 - DNA, 15 bp, Homo sapiens
aggagtcatctgtaa

SEQ ID NO: 740746 - DNA, 15 bp, Homo sapiens
ggagtcatctgtaaa

SEQ ID NO: 740747 - DNA, 15 bp, Homo sapiens
gagtcatctgtaaac

SEQ ID NO: 740748 - DNA, 15 bp, Homo sapiens
agtcatctgtaaacc

SEQ ID NO: 740749 - DNA, 15 bp, Homo sapiens
gtcatctgtaaacct

SEQ ID NO: 740750 - DNA, 15 bp, Homo sapiens
tcatctgtaaacctc

SEQ ID NO: 740751 - DNA, 15 bp, Homo sapiens
catctgtaaacctca

SEQ ID NO: 740752 - DNA, 15 bp, Homo sapiens
atctgtaaacctcac

SEQ ID NO: 740753 - DNA, 15 bp, Homo sapiens
tctgtaaacctcact

SEQ ID NO: 740754 - DNA, 15 bp, Homo sapiens
ctgtaaacctcactt

SEQ ID NO: 740755 - DNA, 15 bp, Homo sapiens
tgtaaacctcacttg

SEQ ID NO: 740756 - DNA, 15 bp, Homo sapiens
gtaaacctcacttga

SEQ ID NO: 740757 - DNA, 15 bp, Homo sapiens
taaacctcacttgat

SEQ ID NO: 740758 - DNA, 15 bp, Homo sapiens
aaacctcacttgatg

SEQ ID NO: 740759 - DNA, 15 bp, Homo sapiens
aacctcacttgatgt

SEQ ID NO: 740760 - DNA, 15 bp, Homo sapiens
acctcacttgatgtt

SEQ ID NO: 740761 - DNA, 15 bp, Homo sapiens
cctcacttgatgttt

SEQ ID NO: 740762 - DNA, 15 bp, Homo sapiens
ctcacttgatgtttc

SEQ ID NO: 740763 - DNA, 15 bp, Homo sapiens
tcacttgatgtttcc

SEQ ID NO: 740764 - DNA, 15 bp, Homo sapiens
cacttgatgtttccc

SEQ ID NO: 740765 - DNA, 15 bp, Homo sapiens
acttgatgtttcccc

SEQ ID NO: 740766 - DNA, 15 bp, Homo sapiens
cttgatgtttcccct

SEQ ID NO: 740767 - DNA, 15 bp, Homo sapiens
ttgatgtttcccctc

SEQ ID NO: 740768 - DNA, 15 bp, Homo sapiens
tgatgtttcccctct

SEQ ID NO: 740769 - DNA, 15 bp, Homo sapiens
gatgtttcccctctg

SEQ ID NO: 740770 - DNA, 15 bp, Homo sapiens
atgtttcccctctga

SEQ ID NO: 740771 - DNA, 15 bp, Homo sapiens
tgtttcccctctgaa

SEQ ID NO: 740772 - DNA, 15 bp, Homo sapiens
gtttcccctctgaac

SEQ ID NO: 740773 - DNA, 15 bp, Homo sapiens
tttcccctctgaact

SEQ ID NO: 740774 - DNA, 15 bp, Homo sapiens
ttcccctctgaactc

SEQ ID NO: 740775 - DNA, 15 bp, Homo sapiens
tcccctctgaactct

SEQ ID NO: 740776 - DNA, 15 bp, Homo sapiens
cccctctgaactctg

SEQ ID NO: 740777 - DNA, 15 bp, Homo sapiens
ccctctgaactctga

SEQ ID NO: 740778 - DNA, 15 bp, Homo sapiens
cctctgaactctgat

SEQ ID NO: 740779 - DNA, 15 bp, Homo sapiens
ctctgaactctgatt

SEQ ID NO: 740780 - DNA, 15 bp, Homo sapiens
tctgaactctgattg

SEQ ID NO: 740781 - DNA, 15 bp, Homo sapiens
ctgaactctgattgg

SEQ ID NO: 740782 - DNA, 15 bp, Homo sapiens
tgaactctgattggt

SEQ ID NO: 740783 - DNA, 15 bp, Homo sapiens
gaactctgattggta

SEQ ID NO: 740784 - DNA, 15 bp, Homo sapiens
aactctgattggtat

SEQ ID NO: 740785 - DNA, 15 bp, Homo sapiens
actctgattggtata

SEQ ID NO: 740786 - DNA, 15 bp, Homo sapiens
ctctgattggtatac

SEQ ID NO: 740787 - DNA, 15 bp, Homo sapiens
tctgattggtatacc

SEQ ID NO: 740788 - DNA, 15 bp, Homo sapiens
ctgattggtatacct

SEQ ID NO: 740789 - DNA, 15 bp, Homo sapiens
tgattggtataccta

SEQ ID NO: 740790 - DNA, 15 bp, Homo sapiens
gattggtatacctac

SEQ ID NO: 740791 - DNA, 15 bp, Homo sapiens
attggtatacctaca

SEQ ID NO: 740792 - DNA, 15 bp, Homo sapiens
ttggtatacctacag

SEQ ID NO: 740793 - DNA, 15 bp, Homo sapiens
tggtatacctacagc

SEQ ID NO: 740794 - DNA, 15 bp, Homo sapiens
ggtatacctacagct

SEQ ID NO: 740795 - DNA, 15 bp, Homo sapiens
gtatacctacagcta

SEQ ID NO: 740796 - DNA, 15 bp, Homo sapiens
tatacctacagctat

SEQ ID NO: 740797 - DNA, 15 bp, Homo sapiens
atacctacagctatt

SEQ ID NO: 740798 - DNA, 15 bp, Homo sapiens
tacctacagctatta

SEQ ID NO: 740799 - DNA, 15 bp, Homo sapiens
acctacagctattat

SEQ ID NO: 740800 - DNA, 15 bp, Homo sapiens
cctacagctattatt

SEQ ID NO: 740801 - DNA, 15 bp, Homo sapiens
ctacagctattattt

SEQ ID NO: 740802 - DNA, 15 bp, Homo sapiens
tacagctattattta

SEQ ID NO: 740803 - DNA, 15 bp, Homo sapiens
acagctattatttac

SEQ ID NO: 740804 - DNA, 15 bp, Homo sapiens
cagctattatttact

SEQ ID NO: 740805 - DNA, 15 bp, Homo sapiens
agctattatttactt

SEQ ID NO: 740806 - DNA, 15 bp, Homo sapiens
gctattatttacttc

SEQ ID NO: 740807 - DNA, 15 bp, Homo sapiens
ctattatttacttca

SEQ ID NO: 740808 - DNA, 15 bp, Homo sapiens
tattatttacttcac

SEQ ID NO: 740809 - DNA, 15 bp, Homo sapiens
attatttacttcacc

SEQ ID NO: 740810 - DNA, 15 bp, Homo sapiens
ttatttacttcacct

SEQ ID NO: 740811 - DNA, 15 bp, Homo sapiens
tatttacttcacctc

SEQ ID NO: 740812 - DNA, 15 bp, Homo sapiens
atttacttcacctct

SEQ ID NO: 740813 - DNA, 15 bp, Homo sapiens
tttacttcacctcta

SEQ ID NO: 740814 - DNA, 15 bp, Homo sapiens
ttacttcacctctac

SEQ ID NO: 740815 - DNA, 15 bp, Homo sapiens
tacttcacctctact

SEQ ID NO: 740816 - DNA, 15 bp, Homo sapiens
acttcacctctactc

SEQ ID NO: 740817 - DNA, 15 bp, Homo sapiens
cttcacctctactca

SEQ ID NO: 740818 - DNA, 15 bp, Homo sapiens
ttcacctctactcag

SEQ ID NO: 740819 - DNA, 15 bp, Homo sapiens
tcacctctactcaga

SEQ ID NO: 740820 - DNA, 15 bp, Homo sapiens
cacctctactcagag

SEQ ID NO: 740821 - DNA, 15 bp, Homo sapiens
acctctactcagagt

SEQ ID NO: 740822 - DNA, 15 bp, Homo sapiens
cctctactcagagtt

SEQ ID NO: 740823 - DNA, 15 bp, Homo sapiens
ctctactcagagtta

SEQ ID NO: 740824 - DNA, 15 bp, Homo sapiens
tctactcagagttat

SEQ ID NO: 740825 - DNA, 15 bp, Homo sapiens
ctactcagagttatc

SEQ ID NO: 740826 - DNA, 15 bp, Homo sapiens
tactcagagttatcc

SEQ ID NO: 740827 - DNA, 15 bp, Homo sapiens
actcagagttatcca

SEQ ID NO: 740828 - DNA, 15 bp, Homo sapiens
ctcagagttatccag

SEQ ID NO: 740829 - DNA, 15 bp, Homo sapiens
tcagagttatccaga

SEQ ID NO: 740830 - DNA, 15 bp, Homo sapiens
cagagttatccagaa

SEQ ID NO: 740831 - DNA, 15 bp, Homo sapiens
agagttatccagaat

SEQ ID NO: 740832 - DNA, 15 bp, Homo sapiens
gagttatccagaatg

SEQ ID NO: 740833 - DNA, 15 bp, Homo sapiens
agttatccagaatgt

SEQ ID NO: 740834 - DNA, 15 bp, Homo sapiens
gttatccagaatgtt

SEQ ID NO: 740835 - DNA, 15 bp, Homo sapiens
ttatccagaatgtta

SEQ ID NO: 740836 - DNA, 15 bp, Homo sapiens
tatccagaatgttac

SEQ ID NO: 740837 - DNA, 15 bp, Homo sapiens
atccagaatgttacg

SEQ ID NO: 740838 - DNA, 15 bp, Homo sapiens
tccagaatgttacgc

SEQ ID NO: 740839 - DNA, 15 bp, Homo sapiens
ccagaatgttacgca

SEQ ID NO: 740840 - DNA, 15 bp, Homo sapiens
cagaatgttacgcat

SEQ ID NO: 740841 - DNA, 15 bp, Homo sapiens
agaatgttacgcata

SEQ ID NO: 740842 - DNA, 15 bp, Homo sapiens
gaatgttacgcatac

SEQ ID NO: 740843 - DNA, 15 bp, Homo sapiens
aatgttacgcataca

SEQ ID NO: 740844 - DNA, 15 bp, Homo sapiens
atgttacgcatacaa

SEQ ID NO: 740845 - DNA, 15 bp, Homo sapiens
tgttacgcatacaaa

SEQ ID NO: 740846 - DNA, 15 bp, Homo sapiens
gttacgcatacaaag

SEQ ID NO: 740847 - DNA, 15 bp, Homo sapiens
ttacgcatacaaagg

SEQ ID NO: 740848 - DNA, 15 bp, Homo sapiens
tacgcatacaaagga

SEQ ID NO: 740849 - DNA, 15 bp, Homo sapiens
acgcatacaaaggag

SEQ ID NO: 740850 - DNA, 15 bp, Homo sapiens
cgcatacaaaggagt

SEQ ID NO: 740851 - DNA, 15 bp, Homo sapiens
gcatacaaaggagta

SEQ ID NO: 740852 - DNA, 15 bp, Homo sapiens
catacaaaggagtat

SEQ ID NO: 740853 - DNA, 15 bp, Homo sapiens
atacaaaggagtata

SEQ ID NO: 740854 - DNA, 15 bp, Homo sapiens
tacaaaggagtataa

SEQ ID NO: 740855 - DNA, 15 bp, Homo sapiens
acaaaggagtataaa

SEQ ID NO: 740856 - DNA, 15 bp, Homo sapiens
caaaggagtataaat

SEQ ID NO: 740857 - DNA, 15 bp, Homo sapiens
aaaggagtataaata

SEQ ID NO: 740858 - DNA, 15 bp, Homo sapiens
aaggagtataaatag

SEQ ID NO: 740859 - DNA, 15 bp, Homo sapiens
aggagtataaatagg

SEQ ID NO: 740860 - DNA, 15 bp, Homo sapiens
ggagtataaataggg

SEQ ID NO: 740861 - DNA, 15 bp, Homo sapiens
gagtataaataggga

SEQ ID NO: 740862 - DNA, 15 bp, Homo sapiens
agtataaatagggaa

SEQ ID NO: 740863 - DNA, 15 bp, Homo sapiens
gtataaatagggaaa

SEQ ID NO: 740864 - DNA, 15 bp, Homo sapiens
tataaatagggaaag

SEQ ID NO: 740865 - DNA, 15 bp, Homo sapiens
ataaatagggaaagc

SEQ ID NO: 740866 - DNA, 15 bp, Homo sapiens
taaatagggaaagca

SEQ ID NO: 740867 - DNA, 15 bp, Homo sapiens
aaatagggaaagcag

SEQ ID NO: 740868 - DNA, 15 bp, Homo sapiens
aatagggaaagcagg

SEQ ID NO: 740869 - DNA, 15 bp, Homo sapiens
atagggaaagcaggt

SEQ ID NO: 740870 - DNA, 15 bp, Homo sapiens
tagggaaagcaggtt

SEQ ID NO: 740871 - DNA, 15 bp, Homo sapiens
agggaaagcaggtta

SEQ ID NO: 740872 - DNA, 15 bp, Homo sapiens
gggaaagcaggttat

SEQ ID NO: 740873 - DNA, 15 bp, Homo sapiens
ggaaagcaggttatc

SEQ ID NO: 740874 - DNA, 15 bp, Homo sapiens
gaaagcaggttatca

SEQ ID NO: 740875 - DNA, 15 bp, Homo sapiens
aaagcaggttatcaa

SEQ ID NO: 740876 - DNA, 15 bp, Homo sapiens
aagcaggttatcaaa

SEQ ID NO: 740877 - DNA, 15 bp, Homo sapiens
agcaggttatcaaac

SEQ ID NO: 740878 - DNA, 15 bp, Homo sapiens
gcaggttatcaaacg

SEQ ID NO: 740879 - DNA, 15 bp, Homo sapiens
caggttatcaaacgc

SEQ ID NO: 740880 - DNA, 15 bp, Homo sapiens
aggttatcaaacgcc

SEQ ID NO: 740881 - DNA, 15 bp, Homo sapiens
ggttatcaaacgccg

SEQ ID NO: 740882 - DNA, 15 bp, Homo sapiens
gttatcaaacgccgt

SEQ ID NO: 740883 - DNA, 15 bp, Homo sapiens
ttatcaaacgccgtg

SEQ ID NO: 740884 - DNA, 15 bp, Homo sapiens
tatcaaacgccgtgg

SEQ ID NO: 740885 - DNA, 15 bp, Homo sapiens
atcaaacgccgtgga

SEQ ID NO: 740886 - DNA, 15 bp, Homo sapiens
tcaaacgccgtggat

SEQ ID NO: 740887 - DNA, 15 bp, Homo sapiens
caaacgccgtggatg

SEQ ID NO: 740888 - DNA, 15 bp, Homo sapiens
aaacgccgtggatgg

SEQ ID NO: 740889 - DNA, 15 bp, Homo sapiens
aacgccgtggatggc

SEQ ID NO: 740890 - DNA, 15 bp, Homo sapiens
acgccgtggatggca

SEQ ID NO: 740891 - DNA, 15 bp, Homo sapiens
cgccgtggatggcat

SEQ ID NO: 740892 - DNA, 15 bp, Homo sapiens
gccgtggatggcatt

SEQ ID NO: 740893 - DNA, 15 bp, Homo sapiens
ccgtggatggcattt

SEQ ID NO: 740894 - DNA, 15 bp, Homo sapiens
cgtggatggcatttt

SEQ ID NO: 740895 - DNA, 15 bp, Homo sapiens
gtggatggcattttc

SEQ ID NO: 740896 - DNA, 15 bp, Homo sapiens
tggatggcattttcc

SEQ ID NO: 740897 - DNA, 15 bp, Homo sapiens
ggatggcattttccc

SEQ ID NO: 740898 - DNA, 15 bp, Homo sapiens
gatggcattttccca

SEQ ID NO: 740899 - DNA, 15 bp, Homo sapiens
atggcattttcccat

SEQ ID NO: 740900 - DNA, 15 bp, Homo sapiens
tggcattttcccatt

SEQ ID NO: 740901 - DNA, 15 bp, Homo sapiens
ggcattttcccatta

SEQ ID NO: 740902 - DNA, 15 bp, Homo sapiens
gcattttcccattac

SEQ ID NO: 740903 - DNA, 15 bp, Homo sapiens
cattttcccattaca

SEQ ID NO: 740904 - DNA, 15 bp, Homo sapiens
attttcccattacac

SEQ ID NO: 740905 - DNA, 15 bp, Homo sapiens
ttttcccattacacc

SEQ ID NO: 740906 - DNA, 15 bp, Homo sapiens
tttcccattacacct

SEQ ID NO: 740907 - DNA, 15 bp, Homo sapiens
ttcccattacaccta

SEQ ID NO: 740908 - DNA, 15 bp, Homo sapiens
tcccattacacctag

SEQ ID NO: 740909 - DNA, 15 bp, Homo sapiens
cccattacacctaga

SEQ ID NO: 740910 - DNA, 15 bp, Homo sapiens
ccattacacctagat

SEQ ID NO: 740911 - DNA, 15 bp, Homo sapiens
cattacacctagata

SEQ ID NO: 740912 - DNA, 15 bp, Homo sapiens
attacacctagatac

SEQ ID NO: 740913 - DNA, 15 bp, Homo sapiens
ttacacctagataca

SEQ ID NO: 740914 - DNA, 15 bp, Homo sapiens
tacacctagatacat

SEQ ID NO: 740915 - DNA, 15 bp, Homo sapiens
acacctagatacata

SEQ ID NO: 740916 - DNA, 15 bp, Homo sapiens
cacctagatacatat

SEQ ID NO: 740917 - DNA, 15 bp, Homo sapiens
acctagatacatatg

SEQ ID NO: 740918 - DNA, 15 bp, Homo sapiens
cctagatacatatga

SEQ ID NO: 740919 - DNA, 15 bp, Homo sapiens
ctagatacatatgaa

SEQ ID NO: 740920 - DNA, 15 bp, Homo sapiens
tagatacatatgaaa

SEQ ID NO: 740921 - DNA, 15 bp, Homo sapiens
agatacatatgaaaa

SEQ ID NO: 740922 - DNA, 15 bp, Homo sapiens
gatacatatgaaaaa

SEQ ID NO: 740923 - DNA, 15 bp, Homo sapiens
atacatatgaaaaaa

SEQ ID NO: 740924 - DNA, 15 bp, Homo sapiens
tacatatgaaaaaat

SEQ ID NO: 740925 - DNA, 15 bp, Homo sapiens
acatatgaaaaaatg

SEQ ID NO: 740926 - DNA, 15 bp, Homo sapiens
catatgaaaaaatgt

SEQ ID NO: 740927 - DNA, 15 bp, Homo sapiens
atatgaaaaaatgta

SEQ ID NO: 740928 - DNA, 15 bp, Homo sapiens
tatgaaaaaatgtac

SEQ ID NO: 740929 - DNA, 15 bp, Homo sapiens
atgaaaaaatgtaca

SEQ ID NO: 740930 - DNA, 15 bp, Homo sapiens
tgaaaaaatgtacaa

SEQ ID NO: 740931 - DNA, 15 bp, Homo sapiens
gaaaaaatgtacaaa

SEQ ID NO: 740932 - DNA, 15 bp, Homo sapiens
aaaaaatgtacaaac

SEQ ID NO: 740933 - DNA, 15 bp, Homo sapiens
aaaaatgtacaaacg

SEQ ID NO: 740934 - DNA, 15 bp, Homo sapiens
aaaatgtacaaacga

SEQ ID NO: 740935 - DNA, 15 bp, Homo sapiens
aaatgtacaaacgac

SEQ ID NO: 740936 - DNA, 15 bp, Homo sapiens
aatgtacaaacgact

SEQ ID NO: 740937 - DNA, 15 bp, Homo sapiens
atgtacaaacgacta

SEQ ID NO: 740938 - DNA, 15 bp, Homo sapiens
tgtacaaacgactag

SEQ ID NO: 740939 - DNA, 15 bp, Homo sapiens
gtacaaacgactaga

SEQ ID NO: 740940 - DNA, 15 bp, Homo sapiens
tacaaacgactagaa

SEQ ID NO: 740941 - DNA, 15 bp, Homo sapiens
acaaacgactagaat

SEQ ID NO: 740942 - DNA, 15 bp, Homo sapiens
caaacgactagaatg

SEQ ID NO: 740943 - DNA, 15 bp, Homo sapiens
aaacgactagaatga

SEQ ID NO: 740944 - DNA, 15 bp, Homo sapiens
aacgactagaatgat

SEQ ID NO: 740945 - DNA, 15 bp, Homo sapiens
acgactagaatgatt

SEQ ID NO: 740946 - DNA, 15 bp, Homo sapiens
cgactagaatgatta

SEQ ID NO: 740947 - DNA, 15 bp, Homo sapiens
gactagaatgattac

SEQ ID NO: 740948 - DNA, 15 bp, Homo sapiens
actagaatgattaca

SEQ ID NO: 740949 - DNA, 15 bp, Homo sapiens
ctagaatgattacac

SEQ ID NO: 740950 - DNA, 15 bp, Homo sapiens
tagaatgattacacc

SEQ ID NO: 740951 - DNA, 15 bp, Homo sapiens
agaatgattacacca

SEQ ID NO: 740952 - DNA, 15 bp, Homo sapiens
gaatgattacaccat

SEQ ID NO: 740953 - DNA, 15 bp, Homo sapiens
aatgattacaccata

SEQ ID NO: 740954 - DNA, 15 bp, Homo sapiens
atgattacaccatag

SEQ ID NO: 740955 - DNA, 15 bp, Homo sapiens
tgattacaccatagt

SEQ ID NO: 740956 - DNA, 15 bp, Homo sapiens
gattacaccatagtg

SEQ ID NO: 740957 - DNA, 15 bp, Homo sapiens
attacaccatagtga

SEQ ID NO: 740958 - DNA, 15 bp, Homo sapiens
ttacaccatagtgat

SEQ ID NO: 740959 - DNA, 15 bp, Homo sapiens
tacaccatagtgata

SEQ ID NO: 740960 - DNA, 15 bp, Homo sapiens
acaccatagtgataa

SEQ ID NO: 740961 - DNA, 15 bp, Homo sapiens
caccatagtgataac

SEQ ID NO: 740962 - DNA, 15 bp, Homo sapiens
accatagtgataaca

SEQ ID NO: 740963 - DNA, 15 bp, Homo sapiens
ccatagtgataacaa

SEQ ID NO: 740964 - DNA, 15 bp, Homo sapiens
catagtgataacaat

SEQ ID NO: 740965 - DNA, 15 bp, Homo sapiens
atagtgataacaatg

SEQ ID NO: 740966 - DNA, 15 bp, Homo sapiens
tagtgataacaatga

SEQ ID NO: 740967 - DNA, 15 bp, Homo sapiens
agtgataacaatgat

SEQ ID NO: 740968 - DNA, 15 bp, Homo sapiens
gtgataacaatgatt

SEQ ID NO: 740969 - DNA, 15 bp, Homo sapiens
tgataacaatgatta

SEQ ID NO: 740970 - DNA, 15 bp, Homo sapiens
gataacaatgattac

SEQ ID NO: 740971 - DNA, 15 bp, Homo sapiens
ataacaatgattact

SEQ ID NO: 740972 - DNA, 15 bp, Homo sapiens
taacaatgattacta

SEQ ID NO: 740973 - DNA, 15 bp, Homo sapiens
aacaatgattactac

SEQ ID NO: 740974 - DNA, 15 bp, Homo sapiens
acaatgattactact

SEQ ID NO: 740975 - DNA, 15 bp, Homo sapiens
caatgattactactg

SEQ ID NO: 740976 - DNA, 15 bp, Homo sapiens
aatgattactactgg

SEQ ID NO: 740977 - DNA, 15 bp, Homo sapiens
atgattactactggg

SEQ ID NO: 740978 - DNA, 15 bp, Homo sapiens
tgattactactgggt

SEQ ID NO: 740979 - DNA, 15 bp, Homo sapiens
gattactactgggta

SEQ ID NO: 740980 - DNA, 15 bp, Homo sapiens
attactactgggtac

SEQ ID NO: 740981 - DNA, 15 bp, Homo sapiens
ttactactgggtact

SEQ ID NO: 740982 - DNA, 15 bp, Homo sapiens
tactactgggtacta

SEQ ID NO: 740983 - DNA, 15 bp, Homo sapiens
actactgggtactaa

SEQ ID NO: 740984 - DNA, 15 bp, Homo sapiens
ctactgggtactaag

SEQ ID NO: 740985 - DNA, 15 bp, Homo sapiens
tactgggtactaaga

SEQ ID NO: 740986 - DNA, 15 bp, Homo sapiens
actgggtactaagat

SEQ ID NO: 740987 - DNA, 15 bp, Homo sapiens
ctgggtactaagata

SEQ ID NO: 740988 - DNA, 15 bp, Homo sapiens
tgggtactaagataa

SEQ ID NO: 740989 - DNA, 15 bp, Homo sapiens
gggtactaagataat

SEQ ID NO: 740990 - DNA, 15 bp, Homo sapiens
ggtactaagataatg

SEQ ID NO: 740991 - DNA, 15 bp, Homo sapiens
gtactaagataatgt

SEQ ID NO: 740992 - DNA, 15 bp, Homo sapiens
tactaagataatgta

SEQ ID NO: 740993 - DNA, 15 bp, Homo sapiens
actaagataatgtat

SEQ ID NO: 740994 - DNA, 15 bp, Homo sapiens
ctaagataatgtatt

SEQ ID NO: 740995 - DNA, 15 bp, Homo sapiens
taagataatgtattt

SEQ ID NO: 740996 - DNA, 15 bp, Homo sapiens
aagataatgtatttt

SEQ ID NO: 740997 - DNA, 15 bp, Homo sapiens
agataatgtatttta

SEQ ID NO: 740998 - DNA, 15 bp, Homo sapiens
gataatgtattttat

SEQ ID NO: 740999 - DNA, 15 bp, Homo sapiens
ataatgtattttata

SEQ ID NO: 741000 - DNA, 15 bp, Homo sapiens
taatgtattttataa

SEQ ID NO: 741001 - DNA, 15 bp, Homo sapiens
aatgtattttataat

SEQ ID NO: 741002 - DNA, 15 bp, Homo sapiens
atgtattttataatt

SEQ ID NO: 741003 - DNA, 15 bp, Homo sapiens
tgtattttataattt

SEQ ID NO: 741004 - DNA, 15 bp, Homo sapiens
gtattttataatttt

SEQ ID NO: 741005 - DNA, 15 bp, Homo sapiens
tattttataattttt

SEQ ID NO: 741006 - DNA, 15 bp, Homo sapiens
attttataatttttt

SEQ ID NO: 741007 - DNA, 15 bp, Homo sapiens
ttttataattttttc

SEQ ID NO: 741008 - DNA, 15 bp, Homo sapiens
tttataattttttcc

SEQ ID NO: 741009 - DNA, 15 bp, Homo sapiens
ttataattttttcct

SEQ ID NO: 741010 - DNA, 15 bp, Homo sapiens
tataattttttcctt

SEQ ID NO: 741011 - DNA, 15 bp, Homo sapiens
ataattttttccttt

SEQ ID NO: 741012 - DNA, 15 bp, Homo sapiens
taattttttcctttt

SEQ ID NO: 741013 - DNA, 15 bp, Homo sapiens
aattttttccttttg

SEQ ID NO: 741014 - DNA, 15 bp, Homo sapiens
attttttccttttgt

SEQ ID NO: 741015 - DNA, 15 bp, Homo sapiens
ttttttccttttgtt

SEQ ID NO: 741016 - DNA, 15 bp, Homo sapiens
tttttccttttgttt

SEQ ID NO: 741017 - DNA, 15 bp, Homo sapiens
ttttccttttgttta

SEQ ID NO: 741018 - DNA, 15 bp, Homo sapiens
tttccttttgtttat

SEQ ID NO: 741019 - DNA, 15 bp, Homo sapiens
ttccttttgtttatc

SEQ ID NO: 741020 - DNA, 15 bp, Homo sapiens
tccttttgtttatct

SEQ ID NO: 741021 - DNA, 15 bp, Homo sapiens
ccttttgtttatctc

SEQ ID NO: 741022 - DNA, 15 bp, Homo sapiens
cttttgtttatctct

SEQ ID NO: 741023 - DNA, 15 bp, Homo sapiens
ttttgtttatctctc

SEQ ID NO: 741024 - DNA, 15 bp, Homo sapiens
tttgtttatctctct

SEQ ID NO: 741025 - DNA, 15 bp, Homo sapiens
ttgtttatctctctt

SEQ ID NO: 741026 - DNA, 15 bp, Homo sapiens
tgtttatctctcttt

SEQ ID NO: 741027 - DNA, 15 bp, Homo sapiens
gtttatctctctttt

SEQ ID NO: 741028 - DNA, 15 bp, Homo sapiens
tttatctctcttttc

SEQ ID NO: 741029 - DNA, 15 bp, Homo sapiens
ttatctctcttttct

SEQ ID NO: 741030 - DNA, 15 bp, Homo sapiens
tatctctcttttctg

SEQ ID NO: 741031 - DNA, 15 bp, Homo sapiens
atctctcttttctgt

SEQ ID NO: 741032 - DNA, 15 bp, Homo sapiens
tctctcttttctgtt

SEQ ID NO: 741033 - DNA, 15 bp, Homo sapiens
ctctcttttctgttt

SEQ ID NO: 741034 - DNA, 15 bp, Homo sapiens
tctcttttctgtttt

SEQ ID NO: 741035 - DNA, 15 bp, Homo sapiens
ctcttttctgttttc

SEQ ID NO: 741036 - DNA, 15 bp, Homo sapiens
tcttttctgttttct

SEQ ID NO: 741037 - DNA, 15 bp, Homo sapiens
cttttctgttttcta

SEQ ID NO: 741038 - DNA, 15 bp, Homo sapiens
ttttctgttttctac

SEQ ID NO: 741039 - DNA, 15 bp, Homo sapiens
tttctgttttctaca

SEQ ID NO: 741040 - DNA, 15 bp, Homo sapiens
ttctgttttctacat

SEQ ID NO: 741041 - DNA, 15 bp, Homo sapiens
tctgttttctacatt

SEQ ID NO: 741042 - DNA, 15 bp, Homo sapiens
ctgttttctacattg

SEQ ID NO: 741043 - DNA, 15 bp, Homo sapiens
tgttttctacattga

SEQ ID NO: 741044 - DNA, 15 bp, Homo sapiens
gttttctacattgaa

SEQ ID NO: 741045 - DNA, 15 bp, Homo sapiens
ttttctacattgaaa

SEQ ID NO: 741046 - DNA, 15 bp, Homo sapiens
tttctacattgaaaa

SEQ ID NO: 741047 - DNA, 15 bp, Homo sapiens
ttctacattgaaaat

SEQ ID NO: 741048 - DNA, 15 bp, Homo sapiens
tctacattgaaaatg

SEQ ID NO: 741049 - DNA, 15 bp, Homo sapiens
ctacattgaaaatgt

SEQ ID NO: 741050 - DNA, 15 bp, Homo sapiens
tacattgaaaatgta

SEQ ID NO: 741051 - DNA, 15 bp, Homo sapiens
acattgaaaatgtat

SEQ ID NO: 741052 - DNA, 15 bp, Homo sapiens
cattgaaaatgtatt

SEQ ID NO: 741053 - DNA, 15 bp, Homo sapiens
attgaaaatgtatta

SEQ ID NO: 741054 - DNA, 15 bp, Homo sapiens
ttgaaaatgtattac

SEQ ID NO: 741055 - DNA, 15 bp, Homo sapiens
tgaaaatgtattact

SEQ ID NO: 741056 - DNA, 15 bp, Homo sapiens
gaaaatgtattactt

SEQ ID NO: 741057 - DNA, 15 bp, Homo sapiens
aaaatgtattacttg

SEQ ID NO: 741058 - DNA, 15 bp, Homo sapiens
aaatgtattacttgt

SEQ ID NO: 741059 - DNA, 15 bp, Homo sapiens
aatgtattacttgtt

SEQ ID NO: 741060 - DNA, 15 bp, Homo sapiens
atgtattacttgttt

SEQ ID NO: 741061 - DNA, 15 bp, Homo sapiens
tgtattacttgtttt

SEQ ID NO: 741062 - DNA, 15 bp, Homo sapiens
gtattacttgttttt

SEQ ID NO: 741063 - DNA, 15 bp, Homo sapiens
tattacttgttttta

SEQ ID NO: 741064 - DNA, 15 bp, Homo sapiens
attacttgtttttaa

SEQ ID NO: 741065 - DNA, 15 bp, Homo sapiens
ttacttgtttttaaa

SEQ ID NO: 741066 - DNA, 15 bp, Homo sapiens
tacttgtttttaaat

SEQ ID NO: 741067 - DNA, 15 bp, Homo sapiens
acttgtttttaaatt

SEQ ID NO: 741068 - DNA, 15 bp, Homo sapiens
cttgtttttaaatta

SEQ ID NO: 741069 - DNA, 15 bp, Homo sapiens
ttgtttttaaattaa

SEQ ID NO: 741070 - DNA, 15 bp, Homo sapiens
tgtttttaaattaaa

SEQ ID NO: 741071 - DNA, 15 bp, Homo sapiens
gtttttaaattaaaa

SEQ ID NO: 741072 - DNA, 15 bp, Homo sapiens
tttttaaattaaaaa

SEQ ID NO: 741073 - DNA, 15 bp, Homo sapiens
ttttaaattaaaaac

SEQ ID NO: 741074 - DNA, 15 bp, Homo sapiens
tttaaattaaaaaca

SEQ ID NO: 741075 - DNA, 15 bp, Homo sapiens
ttaaattaaaaacat

SEQ ID NO: 741076 - DNA, 15 bp, Homo sapiens
taaattaaaaacatt

SEQ ID NO: 741077 - DNA, 15 bp, Homo sapiens
aaattaaaaacattt

SEQ ID NO: 741078 - DNA, 15 bp, Homo sapiens
aattaaaaacattta

SEQ ID NO: 741079 - DNA, 15 bp, Homo sapiens
attaaaaacatttaa

SEQ ID NO: 741080 - DNA, 15 bp, Homo sapiens
ttaaaaacatttaat

SEQ ID NO: 741081 - DNA, 15 bp, Homo sapiens
taaaaacatttaatt

SEQ ID NO: 741082 - DNA, 15 bp, Homo sapiens
aaaaacatttaattt

SEQ ID NO: 741083 - DNA, 15 bp, Homo sapiens
aaaacatttaatttg

SEQ ID NO: 741084 - DNA, 15 bp, Homo sapiens
aaacatttaatttga

SEQ ID NO: 741085 - DNA, 15 bp, Homo sapiens
aacatttaatttgaa

SEQ ID NO: 741086 - DNA, 15 bp, Homo sapiens
acatttaatttgaat

SEQ ID NO: 741087 - DNA, 15 bp, Homo sapiens
catttaatttgaata

SEQ ID NO: 741088 - DNA, 15 bp, Homo sapiens
atttaatttgaatac

SEQ ID NO: 741089 - DNA, 15 bp, Homo sapiens
tttaatttgaatacc

SEQ ID NO: 741090 - DNA, 15 bp, Homo sapiens
ttaatttgaatacct

SEQ ID NO: 741091 - DNA, 15 bp, Homo sapiens
taatttgaatacctc

SEQ ID NO: 741092 - DNA, 15 bp, Homo sapiens
aatttgaatacctca

SEQ ID NO: 741093 - DNA, 15 bp, Homo sapiens
atttgaatacctcat

SEQ ID NO: 741094 - DNA, 15 bp, Homo sapiens
tttgaatacctcata

SEQ ID NO: 741095 - DNA, 15 bp, Homo sapiens
ttgaatacctcatat

SEQ ID NO: 741096 - DNA, 15 bp, Homo sapiens
tgaatacctcatatg

SEQ ID NO: 741097 - DNA, 15 bp, Homo sapiens
gaatacctcatatga

SEQ ID NO: 741098 - DNA, 15 bp, Homo sapiens
aatacctcatatgag

SEQ ID NO: 741099 - DNA, 15 bp, Homo sapiens
atacctcatatgagt

SEQ ID NO: 741100 - DNA, 15 bp, Homo sapiens
tacctcatatgagtg

SEQ ID NO: 741101 - DNA, 15 bp, Homo sapiens
acctcatatgagtgt

SEQ ID NO: 741102 - DNA, 15 bp, Homo sapiens
cctcatatgagtgtg

SEQ ID NO: 741103 - DNA, 15 bp, Homo sapiens
ctcatatgagtgtgg

SEQ ID NO: 741104 - DNA, 15 bp, Homo sapiens
tcatatgagtgtggc

SEQ ID NO: 741105 - DNA, 15 bp, Homo sapiens
catatgagtgtggcc

SEQ ID NO: 741106 - DNA, 15 bp, Homo sapiens
atatgagtgtggcct

SEQ ID NO: 741107 - DNA, 15 bp, Homo sapiens
tatgagtgtggcctt

SEQ ID NO: 741108 - DNA, 15 bp, Homo sapiens
atgagtgtggcctta

SEQ ID NO: 741109 - DNA, 15 bp, Homo sapiens
tgagtgtggccttac

SEQ ID NO: 741110 - DNA, 15 bp, Homo sapiens
gagtgtggccttaca

SEQ ID NO: 741111 - DNA, 15 bp, Homo sapiens
agtgtggccttacag

SEQ ID NO: 741112 - DNA, 15 bp, Homo sapiens
gtgtggccttacagg

SEQ ID NO: 741113 - DNA, 15 bp, Homo sapiens
tgtggccttacaggc

SEQ ID NO: 741114 - DNA, 15 bp, Homo sapiens
gtggccttacaggcc

SEQ ID NO: 741115 - DNA, 15 bp, Homo sapiens
tggccttacaggcct

SEQ ID NO: 741116 - DNA, 15 bp, Homo sapiens
ggccttacaggcctg

SEQ ID NO: 741117 - DNA, 15 bp, Homo sapiens
gccttacaggcctgg

SEQ ID NO: 741118 - DNA, 15 bp, Homo sapiens
ccttacaggcctggg

SEQ ID NO: 741119 - DNA, 15 bp, Homo sapiens
cttacaggcctgggt

SEQ ID NO: 741120 - DNA, 15 bp, Homo sapiens
ttacaggcctgggta

SEQ ID NO: 741121 - DNA, 15 bp, Homo sapiens
tacaggcctgggtac

SEQ ID NO: 741122 - DNA, 15 bp, Homo sapiens
acaggcctgggtacc

SEQ ID NO: 741123 - DNA, 15 bp, Homo sapiens
caggcctgggtaccc

SEQ ID NO: 741124 - DNA, 15 bp, Homo sapiens
aggcctgggtaccca

SEQ ID NO: 741125 - DNA, 15 bp, Homo sapiens
ggcctgggtacccag

SEQ ID NO: 741126 - DNA, 15 bp, Homo sapiens
gcctgggtacccagg

SEQ ID NO: 741127 - DNA, 15 bp, Homo sapiens
cctgggtacccagga

SEQ ID NO: 741128 - DNA, 15 bp, Homo sapiens
ctgggtacccaggaa

SEQ ID NO: 741129 - DNA, 15 bp, Homo sapiens
tgggtacccaggaag

SEQ ID NO: 741130 - DNA, 15 bp, Homo sapiens
gggtacccaggaagc

SEQ ID NO: 741131 - DNA, 15 bp, Homo sapiens
ggtacccaggaagcc

SEQ ID NO: 741132 - DNA, 15 bp, Homo sapiens
gtacccaggaagcct

SEQ ID NO: 741133 - DNA, 15 bp, Homo sapiens
tacccaggaagcctg

SEQ ID NO: 741134 - DNA, 15 bp, Homo sapiens
acccaggaagcctgg

SEQ ID NO: 741135 - DNA, 15 bp, Homo sapiens
cccaggaagcctggt

SEQ ID NO: 741136 - DNA, 15 bp, Homo sapiens
ccaggaagcctggtc

SEQ ID NO: 741137 - DNA, 15 bp, Homo sapiens
caggaagcctggtct

SEQ ID NO: 741138 - DNA, 15 bp, Homo sapiens
aggaagcctggtctg

SEQ ID NO: 741139 - DNA, 15 bp, Homo sapiens
ggaagcctggtctgg

SEQ ID NO: 741140 - DNA, 15 bp, Homo sapiens
gaagcctggtctggc

SEQ ID NO: 741141 - DNA, 15 bp, Homo sapiens
aagcctggtctggcc

SEQ ID NO: 741142 - DNA, 15 bp, Homo sapiens
agcctggtctggcct

SEQ ID NO: 741143 - DNA, 15 bp, Homo sapiens
gcctggtctggcctg

SEQ ID NO: 741144 - DNA, 15 bp, Homo sapiens
cctggtctggcctgt

SEQ ID NO: 741145 - DNA, 15 bp, Homo sapiens
ctggtctggcctgta

SEQ ID NO: 741146 - DNA, 15 bp, Homo sapiens
tggtctggcctgtat

SEQ ID NO: 741147 - DNA, 15 bp, Homo sapiens
ggtctggcctgtata

SEQ ID NO: 741148 - DNA, 15 bp, Homo sapiens
gtctggcctgtataa

SEQ ID NO: 741149 - DNA, 15 bp, Homo sapiens
tctggcctgtataat

SEQ ID NO: 741150 - DNA, 15 bp, Homo sapiens
ctggcctgtataata

SEQ ID NO: 741151 - DNA, 15 bp, Homo sapiens
tggcctgtataataa

SEQ ID NO: 741152 - DNA, 15 bp, Homo sapiens
ggcctgtataataat

SEQ ID NO: 741153 - DNA, 15 bp, Homo sapiens
gcctgtataataatt

SEQ ID NO: 741154 - DNA, 15 bp, Homo sapiens
cctgtataataatta

SEQ ID NO: 741155 - DNA, 15 bp, Homo sapiens
ctgtataataattaa

SEQ ID NO: 741156 - DNA, 15 bp, Homo sapiens
tgtataataattaag

SEQ ID NO: 741157 - DNA, 15 bp, Homo sapiens
gtataataattaaga

SEQ ID NO: 741158 - DNA, 15 bp, Homo sapiens
tataataattaagaa

SEQ ID NO: 741159 - DNA, 15 bp, Homo sapiens
ataataattaagaaa

SEQ ID NO: 741160 - DNA, 15 bp, Homo sapiens
taataattaagaaat

SEQ ID NO: 741161 - DNA, 15 bp, Homo sapiens
aataattaagaaata

SEQ ID NO: 741162 - DNA, 15 bp, Homo sapiens
ataattaagaaataa

SEQ ID NO: 741163 - DNA, 15 bp, Homo sapiens
taattaagaaataat

SEQ ID NO: 741164 - DNA, 15 bp, Homo sapiens
aattaagaaataatt

SEQ ID NO: 741165 - DNA, 15 bp, Homo sapiens
attaagaaataatta

SEQ ID NO: 741166 - DNA, 15 bp, Homo sapiens
ttaagaaataattaa

SEQ ID NO: 741167 - DNA, 15 bp, Homo sapiens
taagaaataattaat

SEQ ID NO: 741168 - DNA, 15 bp, Homo sapiens
aagaaataattaatt

SEQ ID NO: 741169 - DNA, 15 bp, Homo sapiens
agaaataattaattg

SEQ ID NO: 741170 - DNA, 15 bp, Homo sapiens
gaaataattaattgt

SEQ ID NO: 741171 - DNA, 15 bp, Homo sapiens
aaataattaattgta

SEQ ID NO: 741172 - DNA, 15 bp, Homo sapiens
aataattaattgtat

SEQ ID NO: 741173 - DNA, 15 bp, Homo sapiens
ataattaattgtata

SEQ ID NO: 741174 - DNA, 15 bp, Homo sapiens
taattaattgtataa

SEQ ID NO: 741175 - DNA, 15 bp, Homo sapiens
aattaattgtataat

SEQ ID NO: 741176 - DNA, 15 bp, Homo sapiens
attaattgtataata

SEQ ID NO: 741177 - DNA, 15 bp, Homo sapiens
ttaattgtataataa

SEQ ID NO: 741178 - DNA, 15 bp, Homo sapiens
taattgtataataat

SEQ ID NO: 741179 - DNA, 15 bp, Homo sapiens
aattgtataataatt

SEQ ID NO: 741180 - DNA, 15 bp, Homo sapiens
attgtataataattg

SEQ ID NO: 741181 - DNA, 15 bp, Homo sapiens
ttgtataataattgt

SEQ ID NO: 741182 - DNA, 15 bp, Homo sapiens
tgtataataattgtg

SEQ ID NO: 741183 - DNA, 15 bp, Homo sapiens
gtataataattgtgc

SEQ ID NO: 741184 - DNA, 15 bp, Homo sapiens
tataataattgtgct

SEQ ID NO: 741185 - DNA, 15 bp, Homo sapiens
ataataattgtgctt

SEQ ID NO: 741186 - DNA, 15 bp, Homo sapiens
taataattgtgcttg

SEQ ID NO: 741187 - DNA, 15 bp, Homo sapiens
aataattgtgcttgt

SEQ ID NO: 741188 - DNA, 15 bp, Homo sapiens
ataattgtgcttgta

SEQ ID NO: 741189 - DNA, 15 bp, Homo sapiens
taattgtgcttgtat

SEQ ID NO: 741190 - DNA, 15 bp, Homo sapiens
aattgtgcttgtata

SEQ ID NO: 741191 - DNA, 15 bp, Homo sapiens
attgtgcttgtataa

SEQ ID NO: 741192 - DNA, 15 bp, Homo sapiens
ttgtgcttgtataat

SEQ ID NO: 741193 - DNA, 15 bp, Homo sapiens
tgtgcttgtataata

SEQ ID NO: 741194 - DNA, 15 bp, Homo sapiens
gtgcttgtataataa

SEQ ID NO: 741195 - DNA, 15 bp, Homo sapiens
tgcttgtataataat

SEQ ID NO: 741196 - DNA, 15 bp, Homo sapiens
gcttgtataataatt

SEQ ID NO: 741197 - DNA, 15 bp, Homo sapiens
cttgtataataatta

SEQ ID NO: 741198 - DNA, 15 bp, Homo sapiens
ttgtataataattaa

SEQ ID NO: 741199 - DNA, 15 bp, Homo sapiens
aataattaagaaatc

SEQ ID NO: 741200 - DNA, 15 bp, Homo sapiens
ataattaagaaatct

SEQ ID NO: 741201 - DNA, 15 bp, Homo sapiens
taattaagaaatctg

SEQ ID NO: 741202 - DNA, 15 bp, Homo sapiens
aattaagaaatctgc

SEQ ID NO: 741203 - DNA, 15 bp, Homo sapiens
attaagaaatctgct

SEQ ID NO: 741204 - DNA, 15 bp, Homo sapiens
ttaagaaatctgcta

SEQ ID NO: 741205 - DNA, 15 bp, Homo sapiens
taagaaatctgctac

SEQ ID NO: 741206 - DNA, 15 bp, Homo sapiens
aagaaatctgctacc

SEQ ID NO: 741207 - DNA, 15 bp, Homo sapiens
agaaatctgctacct

SEQ ID NO: 741208 - DNA, 15 bp, Homo sapiens
gaaatctgctacctc

SEQ ID NO: 741209 - DNA, 15 bp, Homo sapiens
aaatctgctacctcc

SEQ ID NO: 741210 - DNA, 15 bp, Homo sapiens
aatctgctacctcct

SEQ ID NO: 741211 - DNA, 15 bp, Homo sapiens
atctgctacctcctt

SEQ ID NO: 741212 - DNA, 15 bp, Homo sapiens
tctgctacctccttt

SEQ ID NO: 741213 - DNA, 15 bp, Homo sapiens
ctgctacctcctttc

SEQ ID NO: 741214 - DNA, 15 bp, Homo sapiens
tgctacctcctttca

SEQ ID NO: 741215 - DNA, 15 bp, Homo sapiens
gctacctcctttcag

SEQ ID NO: 741216 - DNA, 15 bp, Homo sapiens
ctacctcctttcagg

SEQ ID NO: 741217 - DNA, 15 bp, Homo sapiens
tacctcctttcaggt

SEQ ID NO: 741218 - DNA, 15 bp, Homo sapiens
acctcctttcaggta

SEQ ID NO: 741219 - DNA, 15 bp, Homo sapiens
cctcctttcaggtag

SEQ ID NO: 741220 - DNA, 15 bp, Homo sapiens
ctcctttcaggtagc

SEQ ID NO: 741221 - DNA, 15 bp, Homo sapiens
tcctttcaggtagca

SEQ ID NO: 741222 - DNA, 15 bp, Homo sapiens
cctttcaggtagcag

SEQ ID NO: 741223 - DNA, 15 bp, Homo sapiens
ctttcaggtagcagc

SEQ ID NO: 741224 - DNA, 15 bp, Homo sapiens
tttcaggtagcagcc

SEQ ID NO: 741225 - DNA, 15 bp, Homo sapiens
ttcaggtagcagccc

SEQ ID NO: 741226 - DNA, 15 bp, Homo sapiens
tcaggtagcagccct

SEQ ID NO: 741227 - DNA, 15 bp, Homo sapiens
caggtagcagccctt

SEQ ID NO: 741228 - DNA, 15 bp, Homo sapiens
aggtagcagccctta

SEQ ID NO: 741229 - DNA, 15 bp, Homo sapiens
ggtagcagcccttac

SEQ ID NO: 741230 - DNA, 15 bp, Homo sapiens
gtagcagcccttacc

SEQ ID NO: 741231 - DNA, 15 bp, Homo sapiens
tagcagcccttacca

SEQ ID NO: 741232 - DNA, 15 bp, Homo sapiens
agcagcccttaccag

SEQ ID NO: 741233 - DNA, 15 bp, Homo sapiens
gcagcccttaccagg

SEQ ID NO: 741234 - DNA, 15 bp, Homo sapiens
cagcccttaccaggg

SEQ ID NO: 741235 - DNA, 15 bp, Homo sapiens
agcccttaccagggc

SEQ ID NO: 741236 - DNA, 15 bp, Homo sapiens
gcccttaccagggct

SEQ ID NO: 741237 - DNA, 15 bp, Homo sapiens
cccttaccagggctc

SEQ ID NO: 741238 - DNA, 15 bp, Homo sapiens
ccttaccagggctct

SEQ ID NO: 741239 - DNA, 15 bp, Homo sapiens
cttaccagggctcta

SEQ ID NO: 741240 - DNA, 15 bp, Homo sapiens
ttaccagggctctag

SEQ ID NO: 741241 - DNA, 15 bp, Homo sapiens
taccagggctctaga

SEQ ID NO: 741242 - DNA, 15 bp, Homo sapiens
accagggctctagaa

SEQ ID NO: 741243 - DNA, 15 bp, Homo sapiens
ccagggctctagaat

SEQ ID NO: 741244 - DNA, 15 bp, Homo sapiens
cagggctctagaatc

SEQ ID NO: 741245 - DNA, 15 bp, Homo sapiens
agggctctagaatct

SEQ ID NO: 741246 - DNA, 15 bp, Homo sapiens
gggctctagaatctc

SEQ ID NO: 741247 - DNA, 15 bp, Homo sapiens
ggctctagaatctcc

SEQ ID NO: 741248 - DNA, 15 bp, Homo sapiens
gctctagaatctcct

SEQ ID NO: 741249 - DNA, 15 bp, Homo sapiens
ctctagaatctcctg

SEQ ID NO: 741250 - DNA, 15 bp, Homo sapiens
tctagaatctcctga

SEQ ID NO: 741251 - DNA, 15 bp, Homo sapiens
ctagaatctcctgaa

SEQ ID NO: 741252 - DNA, 15 bp, Homo sapiens
tagaatctcctgaat

SEQ ID NO: 741253 - DNA, 15 bp, Homo sapiens
agaatctcctgaatc

SEQ ID NO: 741254 - DNA, 15 bp, Homo sapiens
gaatctcctgaatca

SEQ ID NO: 741255 - DNA, 15 bp, Homo sapiens
aatctcctgaatcag

SEQ ID NO: 741256 - DNA, 15 bp, Homo sapiens
atctcctgaatcagt

SEQ ID NO: 741257 - DNA, 15 bp, Homo sapiens
tctcctgaatcagtt

SEQ ID NO: 741258 - DNA, 15 bp, Homo sapiens
ctcctgaatcagttt

SEQ ID NO: 741259 - DNA, 15 bp, Homo sapiens
tcctgaatcagttta

SEQ ID NO: 741260 - DNA, 15 bp, Homo sapiens
cctgaatcagtttag

SEQ ID NO: 741261 - DNA, 15 bp, Homo sapiens
ctgaatcagtttagt

SEQ ID NO: 741262 - DNA, 15 bp, Homo sapiens
tgaatcagtttagtc

SEQ ID NO: 741263 - DNA, 15 bp, Homo sapiens
gaatcagtttagtct

SEQ ID NO: 741264 - DNA, 15 bp, Homo sapiens
aatcagtttagtctc

SEQ ID NO: 741265 - DNA, 15 bp, Homo sapiens
atcagtttagtctcc

SEQ ID NO: 741266 - DNA, 15 bp, Homo sapiens
tcagtttagtctccc

SEQ ID NO: 741267 - DNA, 15 bp, Homo sapiens
cagtttagtctccct

SEQ ID NO: 741268 - DNA, 15 bp, Homo sapiens
agtttagtctccctg

SEQ ID NO: 741269 - DNA, 15 bp, Homo sapiens
gtttagtctccctga

SEQ ID NO: 741270 - DNA, 15 bp, Homo sapiens
tttagtctccctgaa

SEQ ID NO: 741271 - DNA, 15 bp, Homo sapiens
ttagtctccctgaag

SEQ ID NO: 741272 - DNA, 15 bp, Homo sapiens
tagtctccctgaagc

SEQ ID NO: 741273 - DNA, 15 bp, Homo sapiens
agtctccctgaagcc

SEQ ID NO: 741274 - DNA, 15 bp, Homo sapiens
gtctccctgaagcca

SEQ ID NO: 741275 - DNA, 15 bp, Homo sapiens
tctccctgaagccac

SEQ ID NO: 741276 - DNA, 15 bp, Homo sapiens
ctccctgaagccact

SEQ ID NO: 741277 - DNA, 15 bp, Homo sapiens
tccctgaagccacta

SEQ ID NO: 741278 - DNA, 15 bp, Homo sapiens
ccctgaagccactaa

SEQ ID NO: 741279 - DNA, 15 bp, Homo sapiens
cctgaagccactaag

SEQ ID NO: 741280 - DNA, 15 bp, Homo sapiens
ctgaagccactaaga

SEQ ID NO: 741281 - DNA, 15 bp, Homo sapiens
tgaagccactaagat

SEQ ID NO: 741282 - DNA, 15 bp, Homo sapiens
gaagccactaagatc

SEQ ID NO: 741283 - DNA, 15 bp, Homo sapiens
aagccactaagatct

SEQ ID NO: 741284 - DNA, 15 bp, Homo sapiens
agccactaagatctg

SEQ ID NO: 741285 - DNA, 15 bp, Homo sapiens
gccactaagatctgg

SEQ ID NO: 741286 - DNA, 15 bp, Homo sapiens
ccactaagatctggg

SEQ ID NO: 741287 - DNA, 15 bp, Homo sapiens
cactaagatctgggc

SEQ ID NO: 741288 - DNA, 15 bp, Homo sapiens
actaagatctgggca

SEQ ID NO: 741289 - DNA, 15 bp, Homo sapiens
ctaagatctgggcat

SEQ ID NO: 741290 - DNA, 15 bp, Homo sapiens
taagatctgggcatg

SEQ ID NO: 741291 - DNA, 15 bp, Homo sapiens
aagatctgggcatgt

SEQ ID NO: 741292 - DNA, 15 bp, Homo sapiens
agatctgggcatgtc

SEQ ID NO: 741293 - DNA, 15 bp, Homo sapiens
gatctgggcatgtca

SEQ ID NO: 741294 - DNA, 15 bp, Homo sapiens
atctgggcatgtcaa

SEQ ID NO: 741295 - DNA, 15 bp, Homo sapiens
tctgggcatgtcaaa

SEQ ID NO: 741296 - DNA, 15 bp, Homo sapiens
ctgggcatgtcaaaa

SEQ ID NO: 741297 - DNA, 15 bp, Homo sapiens
tgggcatgtcaaaat

SEQ ID NO: 741298 - DNA, 15 bp, Homo sapiens
gggcatgtcaaaatg

SEQ ID NO: 741299 - DNA, 15 bp, Homo sapiens
ggcatgtcaaaatgg

SEQ ID NO: 741300 - DNA, 15 bp, Homo sapiens
gcatgtcaaaatggg

SEQ ID NO: 741301 - DNA, 15 bp, Homo sapiens
catgtcaaaatgggt

SEQ ID NO: 741302 - DNA, 15 bp, Homo sapiens
atgtcaaaatgggtg

SEQ ID NO: 741303 - DNA, 15 bp, Homo sapiens
tgtcaaaatgggtgg

SEQ ID NO: 741304 - DNA, 15 bp, Homo sapiens
gtcaaaatgggtggc

SEQ ID NO: 741305 - DNA, 15 bp, Homo sapiens
tcaaaatgggtggca

SEQ ID NO: 741306 - DNA, 15 bp, Homo sapiens
caaaatgggtggcac

SEQ ID NO: 741307 - DNA, 15 bp, Homo sapiens
aaaatgggtggcacc

SEQ ID NO: 741308 - DNA, 15 bp, Homo sapiens
aaatgggtggcaccc

SEQ ID NO: 741309 - DNA, 15 bp, Homo sapiens
aatgggtggcaccct

SEQ ID NO: 741310 - DNA, 15 bp, Homo sapiens
atgggtggcaccctg

SEQ ID NO: 741311 - DNA, 15 bp, Homo sapiens
tgggtggcaccctgc

SEQ ID NO: 741312 - DNA, 15 bp, Homo sapiens
gggtggcaccctgcc

SEQ ID NO: 741313 - DNA, 15 bp, Homo sapiens
ggtggcaccctgccc

SEQ ID NO: 741314 - DNA, 15 bp, Homo sapiens
gtggcaccctgccca

SEQ ID NO: 741315 - DNA, 15 bp, Homo sapiens
tggcaccctgcccag

SEQ ID NO: 741316 - DNA, 15 bp, Homo sapiens
ggcaccctgcccagt

SEQ ID NO: 741317 - DNA, 15 bp, Homo sapiens
gcaccctgcccagtc

SEQ ID NO: 741318 - DNA, 15 bp, Homo sapiens
caccctgcccagtca

SEQ ID NO: 741319 - DNA, 15 bp, Homo sapiens
accctgcccagtcaa

SEQ ID NO: 741320 - DNA, 15 bp, Homo sapiens
ccctgcccagtcaaa

SEQ ID NO: 741321 - DNA, 15 bp, Homo sapiens
cctgcccagtcaaag

SEQ ID NO: 741322 - DNA, 15 bp, Homo sapiens
ctgcccagtcaaagc

SEQ ID NO: 741323 - DNA, 15 bp, Homo sapiens
tgcccagtcaaagca

SEQ ID NO: 741324 - DNA, 15 bp, Homo sapiens
gcccagtcaaagcac

SEQ ID NO: 741325 - DNA, 15 bp, Homo sapiens
cccagtcaaagcact

SEQ ID NO: 741326 - DNA, 15 bp, Homo sapiens
ccagtcaaagcactt

SEQ ID NO: 741327 - DNA, 15 bp, Homo sapiens
cagtcaaagcacttc

SEQ ID NO: 741328 - DNA, 15 bp, Homo sapiens
agtcaaagcacttcc

SEQ ID NO: 741329 - DNA, 15 bp, Homo sapiens
gtcaaagcacttcca

SEQ ID NO: 741330 - DNA, 15 bp, Homo sapiens
tcaaagcacttccac

SEQ ID NO: 741331 - DNA, 15 bp, Homo sapiens
caaagcacttccact

SEQ ID NO: 741332 - DNA, 15 bp, Homo sapiens
aaagcacttccacta

SEQ ID NO: 741333 - DNA, 15 bp, Homo sapiens
aagcacttccactaa

SEQ ID NO: 741334 - DNA, 15 bp, Homo sapiens
agcacttccactaac

SEQ ID NO: 741335 - DNA, 15 bp, Homo sapiens
gcacttccactaaca

SEQ ID NO: 741336 - DNA, 15 bp, Homo sapiens
cacttccactaacag

SEQ ID NO: 741337 - DNA, 15 bp, Homo sapiens
acttccactaacagg

SEQ ID NO: 741338 - DNA, 15 bp, Homo sapiens
cttccactaacaggt

SEQ ID NO: 741339 - DNA, 15 bp, Homo sapiens
ttccactaacaggtc

SEQ ID NO: 741340 - DNA, 15 bp, Homo sapiens
tccactaacaggtcc

SEQ ID NO: 741341 - DNA, 15 bp, Homo sapiens
ccactaacaggtcct

SEQ ID NO: 741342 - DNA, 15 bp, Homo sapiens
cactaacaggtcctt

SEQ ID NO: 741343 - DNA, 15 bp, Homo sapiens
actaacaggtccttg

SEQ ID NO: 741344 - DNA, 15 bp, Homo sapiens
ctaacaggtccttgg

SEQ ID NO: 741345 - DNA, 15 bp, Homo sapiens
taacaggtccttggg

SEQ ID NO: 741346 - DNA, 15 bp, Homo sapiens
aacaggtccttgggt

SEQ ID NO: 741347 - DNA, 15 bp, Homo sapiens
acaggtccttgggtg

SEQ ID NO: 741348 - DNA, 15 bp, Homo sapiens
caggtccttgggtgg

SEQ ID NO: 741349 - DNA, 15 bp, Homo sapiens
aggtccttgggtggg

SEQ ID NO: 741350 - DNA, 15 bp, Homo sapiens
ggtccttgggtggga

SEQ ID NO: 741351 - DNA, 15 bp, Homo sapiens
gtccttgggtgggaa

SEQ ID NO: 741352 - DNA, 15 bp, Homo sapiens
tccttgggtgggaac

SEQ ID NO: 741353 - DNA, 15 bp, Homo sapiens
ccttgggtgggaact

SEQ ID NO: 741354 - DNA, 15 bp, Homo sapiens
cttgggtgggaacta

SEQ ID NO: 741355 - DNA, 15 bp, Homo sapiens
ttgggtgggaactag

SEQ ID NO: 741356 - DNA, 15 bp, Homo sapiens
tgggtgggaactaga

SEQ ID NO: 741357 - DNA, 15 bp, Homo sapiens
gggtgggaactagaa

SEQ ID NO: 741358 - DNA, 15 bp, Homo sapiens
ggtgggaactagaag

SEQ ID NO: 741359 - DNA, 15 bp, Homo sapiens
gtgggaactagaaga

SEQ ID NO: 741360 - DNA, 15 bp, Homo sapiens
tgggaactagaagac

SEQ ID NO: 741361 - DNA, 15 bp, Homo sapiens
gggaactagaagaca

SEQ ID NO: 741362 - DNA, 15 bp, Homo sapiens
ggaactagaagacag

SEQ ID NO: 741363 - DNA, 15 bp, Homo sapiens
gaactagaagacagc

SEQ ID NO: 741364 - DNA, 15 bp, Homo sapiens
aactagaagacagca

SEQ ID NO: 741365 - DNA, 15 bp, Homo sapiens
actagaagacagcat

SEQ ID NO: 741366 - DNA, 15 bp, Homo sapiens
ctagaagacagcatc

SEQ ID NO: 741367 - DNA, 15 bp, Homo sapiens
tagaagacagcatca

SEQ ID NO: 741368 - DNA, 15 bp, Homo sapiens
agaagacagcatcag

SEQ ID NO: 741369 - DNA, 15 bp, Homo sapiens
gaagacagcatcagg

SEQ ID NO: 741370 - DNA, 15 bp, Homo sapiens
aagacagcatcaggc

SEQ ID NO: 741371 - DNA, 15 bp, Homo sapiens
agacagcatcaggct

SEQ ID NO: 741372 - DNA, 15 bp, Homo sapiens
gacagcatcaggctt

SEQ ID NO: 741373 - DNA, 15 bp, Homo sapiens
acagcatcaggcttt

SEQ ID NO: 741374 - DNA, 15 bp, Homo sapiens
cagcatcaggctttt

SEQ ID NO: 741375 - DNA, 15 bp, Homo sapiens
agcatcaggcttttg

SEQ ID NO: 741376 - DNA, 15 bp, Homo sapiens
gcatcaggcttttgg

SEQ ID NO: 741377 - DNA, 15 bp, Homo sapiens
catcaggcttttggg

SEQ ID NO: 741378 - DNA, 15 bp, Homo sapiens
atcaggcttttgggc

SEQ ID NO: 741379 - DNA, 15 bp, Homo sapiens
tcaggcttttgggct

SEQ ID NO: 741380 - DNA, 15 bp, Homo sapiens
caggcttttgggctt

SEQ ID NO: 741381 - DNA, 15 bp, Homo sapiens
aggcttttgggcttt

SEQ ID NO: 741382 - DNA, 15 bp, Homo sapiens
ggcttttgggctttc

SEQ ID NO: 741383 - DNA, 15 bp, Homo sapiens
gcttttgggctttca

SEQ ID NO: 741384 - DNA, 15 bp, Homo sapiens
cttttgggctttcaa

SEQ ID NO: 741385 - DNA, 15 bp, Homo sapiens
ttttgggctttcaaa

SEQ ID NO: 741386 - DNA, 15 bp, Homo sapiens
tttgggctttcaaaa

SEQ ID NO: 741387 - DNA, 15 bp, Homo sapiens
ttgggctttcaaaaa

SEQ ID NO: 741388 - DNA, 15 bp, Homo sapiens
tgggctttcaaaaag

SEQ ID NO: 741389 - DNA, 15 bp, Homo sapiens
gggctttcaaaaagt

SEQ ID NO: 741390 - DNA, 15 bp, Homo sapiens
ggctttcaaaaagta

SEQ ID NO: 741391 - DNA, 15 bp, Homo sapiens
gctttcaaaaagtat

SEQ ID NO: 741392 - DNA, 15 bp, Homo sapiens
ctttcaaaaagtatt

SEQ ID NO: 741393 - DNA, 15 bp, Homo sapiens
tttcaaaaagtattt

SEQ ID NO: 741394 - DNA, 15 bp, Homo sapiens
ttcaaaaagtatttc

SEQ ID NO: 741395 - DNA, 15 bp, Homo sapiens
tcaaaaagtatttct

SEQ ID NO: 741396 - DNA, 15 bp, Homo sapiens
caaaaagtatttctt

SEQ ID NO: 741397 - DNA, 15 bp, Homo sapiens
aaaaagtatttctta

SEQ ID NO: 741398 - DNA, 15 bp, Homo sapiens
aaaagtatttcttaa

SEQ ID NO: 741399 - DNA, 15 bp, Homo sapiens
aaagtatttcttaat

SEQ ID NO: 741400 - DNA, 15 bp, Homo sapiens
aagtatttcttaatg

SEQ ID NO: 741401 - DNA, 15 bp, Homo sapiens
agtatttcttaatgt

SEQ ID NO: 741402 - DNA, 15 bp, Homo sapiens
gtatttcttaatgta

SEQ ID NO: 741403 - DNA, 15 bp, Homo sapiens
tatttcttaatgtag

SEQ ID NO: 741404 - DNA, 15 bp, Homo sapiens
atttcttaatgtaga

SEQ ID NO: 741405 - DNA, 15 bp, Homo sapiens
tttcttaatgtagag

SEQ ID NO: 741406 - DNA, 15 bp, Homo sapiens
ttcttaatgtagaga

SEQ ID NO: 741407 - DNA, 15 bp, Homo sapiens
tcttaatgtagagac

SEQ ID NO: 741408 - DNA, 15 bp, Homo sapiens
cttaatgtagagact

SEQ ID NO: 741409 - DNA, 15 bp, Homo sapiens
ttaatgtagagactc

SEQ ID NO: 741410 - DNA, 15 bp, Homo sapiens
taatgtagagactcc

SEQ ID NO: 741411 - DNA, 15 bp, Homo sapiens
aatgtagagactcct

SEQ ID NO: 741412 - DNA, 15 bp, Homo sapiens
atgtagagactccta

SEQ ID NO: 741413 - DNA, 15 bp, Homo sapiens
tgtagagactcctat

SEQ ID NO: 741414 - DNA, 15 bp, Homo sapiens
gtagagactcctatt

SEQ ID NO: 741415 - DNA, 15 bp, Homo sapiens
tagagactcctattc

SEQ ID NO: 741416 - DNA, 15 bp, Homo sapiens
agagactcctattcc

SEQ ID NO: 741417 - DNA, 15 bp, Homo sapiens
gagactcctattcct

SEQ ID NO: 741418 - DNA, 15 bp, Homo sapiens
agactcctattcctg

SEQ ID NO: 741419 - DNA, 15 bp, Homo sapiens
gactcctattcctgt

SEQ ID NO: 741420 - DNA, 15 bp, Homo sapiens
actcctattcctgta

SEQ ID NO: 741421 - DNA, 15 bp, Homo sapiens
ctcctattcctgtag

SEQ ID NO: 741422 - DNA, 15 bp, Homo sapiens
tcctattcctgtagt

SEQ ID NO: 741423 - DNA, 15 bp, Homo sapiens
cctattcctgtagtc

SEQ ID NO: 741424 - DNA, 15 bp, Homo sapiens
ctattcctgtagtcc

SEQ ID NO: 741425 - DNA, 15 bp, Homo sapiens
tattcctgtagtccc

SEQ ID NO: 741426 - DNA, 15 bp, Homo sapiens
attcctgtagtccca

SEQ ID NO: 741427 - DNA, 15 bp, Homo sapiens
ttcctgtagtcccat

SEQ ID NO: 741428 - DNA, 15 bp, Homo sapiens
tcctgtagtcccatt

SEQ ID NO: 741429 - DNA, 15 bp, Homo sapiens
cctgtagtcccatta

SEQ ID NO: 741430 - DNA, 15 bp, Homo sapiens
ctgtagtcccattaa

SEQ ID NO: 741431 - DNA, 15 bp, Homo sapiens
tgtagtcccattaac

SEQ ID NO: 741432 - DNA, 15 bp, Homo sapiens
gtagtcccattaaca

SEQ ID NO: 741433 - DNA, 15 bp, Homo sapiens
tagtcccattaacag

SEQ ID NO: 741434 - DNA, 15 bp, Homo sapiens
agtcccattaacagt

SEQ ID NO: 741435 - DNA, 15 bp, Homo sapiens
gtcccattaacagta

SEQ ID NO: 741436 - DNA, 15 bp, Homo sapiens
tcccattaacagtag

SEQ ID NO: 741437 - DNA, 15 bp, Homo sapiens
cccattaacagtaga

SEQ ID NO: 741438 - DNA, 15 bp, Homo sapiens
ccattaacagtagac

SEQ ID NO: 741439 - DNA, 15 bp, Homo sapiens
cattaacagtagact

SEQ ID NO: 741440 - DNA, 15 bp, Homo sapiens
attaacagtagactc

SEQ ID NO: 741441 - DNA, 15 bp, Homo sapiens
ttaacagtagactct

SEQ ID NO: 741442 - DNA, 15 bp, Homo sapiens
taacagtagactctt

SEQ ID NO: 741443 - DNA, 15 bp, Homo sapiens
aacagtagactcttg

SEQ ID NO: 741444 - DNA, 15 bp, Homo sapiens
acagtagactcttga

SEQ ID NO: 741445 - DNA, 15 bp, Homo sapiens
cagtagactcttgat

SEQ ID NO: 741446 - DNA, 15 bp, Homo sapiens
agtagactcttgatt

SEQ ID NO: 741447 - DNA, 15 bp, Homo sapiens
gtagactcttgatta

SEQ ID NO: 741448 - DNA, 15 bp, Homo sapiens
tagactcttgattaa

SEQ ID NO: 741449 - DNA, 15 bp, Homo sapiens
agactcttgattaat

SEQ ID NO: 741450 - DNA, 15 bp, Homo sapiens
gactcttgattaata

SEQ ID NO: 741451 - DNA, 15 bp, Homo sapiens
actcttgattaataa

SEQ ID NO: 741452 - DNA, 15 bp, Homo sapiens
ctcttgattaataag

SEQ ID NO: 741453 - DNA, 15 bp, Homo sapiens
tcttgattaataagc

SEQ ID NO: 741454 - DNA, 15 bp, Homo sapiens
cttgattaataagca

SEQ ID NO: 741455 - DNA, 15 bp, Homo sapiens
ttgattaataagcat

SEQ ID NO: 741456 - DNA, 15 bp, Homo sapiens
tgattaataagcatg

SEQ ID NO: 741457 - DNA, 15 bp, Homo sapiens
gattaataagcatgg

SEQ ID NO: 741458 - DNA, 15 bp, Homo sapiens
attaataagcatggc

SEQ ID NO: 741459 - DNA, 15 bp, Homo sapiens
ttaataagcatggct

SEQ ID NO: 741460 - DNA, 15 bp, Homo sapiens
taataagcatggcta

SEQ ID NO: 741461 - DNA, 15 bp, Homo sapiens
aataagcatggctaa

SEQ ID NO: 741462 - DNA, 15 bp, Homo sapiens
ataagcatggctaat

SEQ ID NO: 741463 - DNA, 15 bp, Homo sapiens
taagcatggctaatg

SEQ ID NO: 741464 - DNA, 15 bp, Homo sapiens
aagcatggctaatga

SEQ ID NO: 741465 - DNA, 15 bp, Homo sapiens
agcatggctaatgaa

SEQ ID NO: 741466 - DNA, 15 bp, Homo sapiens
gcatggctaatgaaa

SEQ ID NO: 741467 - DNA, 15 bp, Homo sapiens
catggctaatgaaaa

SEQ ID NO: 741468 - DNA, 15 bp, Homo sapiens
atggctaatgaaaat

SEQ ID NO: 741469 - DNA, 15 bp, Homo sapiens
tggctaatgaaaatc

SEQ ID NO: 741470 - DNA, 15 bp, Homo sapiens
ggctaatgaaaatcc

SEQ ID NO: 741471 - DNA, 15 bp, Homo sapiens
gctaatgaaaatcca

SEQ ID NO: 741472 - DNA, 15 bp, Homo sapiens
ctaatgaaaatccac

SEQ ID NO: 741473 - DNA, 15 bp, Homo sapiens
taatgaaaatccaca

SEQ ID NO: 741474 - DNA, 15 bp, Homo sapiens
aatgaaaatccacag

SEQ ID NO: 741475 - DNA, 15 bp, Homo sapiens
atgaaaatccacaga

SEQ ID NO: 741476 - DNA, 15 bp, Homo sapiens
tgaaaatccacagaa

SEQ ID NO: 741477 - DNA, 15 bp, Homo sapiens
gaaaatccacagaat

SEQ ID NO: 741478 - DNA, 15 bp, Homo sapiens
aaaatccacagaatc

SEQ ID NO: 741479 - DNA, 15 bp, Homo sapiens
aaatccacagaatca

SEQ ID NO: 741480 - DNA, 15 bp, Homo sapiens
aatccacagaatcac

SEQ ID NO: 741481 - DNA, 15 bp, Homo sapiens
atccacagaatcaca

SEQ ID NO: 741482 - DNA, 15 bp, Homo sapiens
tccacagaatcacag

SEQ ID NO: 741483 - DNA, 15 bp, Homo sapiens
ccacagaatcacaga

SEQ ID NO: 741484 - DNA, 15 bp, Homo sapiens
cacagaatcacagaa

SEQ ID NO: 741485 - DNA, 15 bp, Homo sapiens
acagaatcacagaac

SEQ ID NO: 741486 - DNA, 15 bp, Homo sapiens
cagaatcacagaacc

SEQ ID NO: 741487 - DNA, 15 bp, Homo sapiens
agaatcacagaacca

SEQ ID NO: 741488 - DNA, 15 bp, Homo sapiens
gaatcacagaaccac

SEQ ID NO: 741489 - DNA, 15 bp, Homo sapiens
aatcacagaaccaca

SEQ ID NO: 741490 - DNA, 15 bp, Homo sapiens
atcacagaaccacag

SEQ ID NO: 741491 - DNA, 15 bp, Homo sapiens
tcacagaaccacaga

SEQ ID NO: 741492 - DNA, 15 bp, Homo sapiens
cacagaaccacagaa

SEQ ID NO: 741493 - DNA, 15 bp, Homo sapiens
acagaaccacagaat

SEQ ID NO: 741494 - DNA, 15 bp, Homo sapiens
cagaaccacagaatc

SEQ ID NO: 741495 - DNA, 15 bp, Homo sapiens
agaaccacagaatcc

SEQ ID NO: 741496 - DNA, 15 bp, Homo sapiens
gaaccacagaatcct

SEQ ID NO: 741497 - DNA, 15 bp, Homo sapiens
aaccacagaatcctg

SEQ ID NO: 741498 - DNA, 15 bp, Homo sapiens
accacagaatcctgg

SEQ ID NO: 741499 - DNA, 15 bp, Homo sapiens
ccacagaatcctgga

SEQ ID NO: 741500 - DNA, 15 bp, Homo sapiens
cacagaatcctggag

SEQ ID NO: 741501 - DNA, 15 bp, Homo sapiens
acagaatcctggagc

SEQ ID NO: 741502 - DNA, 15 bp, Homo sapiens
cagaatcctggagct

SEQ ID NO: 741503 - DNA, 15 bp, Homo sapiens
agaatcctggagcta

SEQ ID NO: 741504 - DNA, 15 bp, Homo sapiens
gaatcctggagctag

SEQ ID NO: 741505 - DNA, 15 bp, Homo sapiens
aatcctggagctagg

SEQ ID NO: 741506 - DNA, 15 bp, Homo sapiens
atcctggagctagga

SEQ ID NO: 741507 - DNA, 15 bp, Homo sapiens
tcctggagctaggag

SEQ ID NO: 741508 - DNA, 15 bp, Homo sapiens
cctggagctaggagg

SEQ ID NO: 741509 - DNA, 15 bp, Homo sapiens
ctggagctaggaggg

SEQ ID NO: 741510 - DNA, 15 bp, Homo sapiens
tggagctaggaggga

SEQ ID NO: 741511 - DNA, 15 bp, Homo sapiens
ggagctaggagggaa

SEQ ID NO: 741512 - DNA, 15 bp, Homo sapiens
gagctaggagggaat

SEQ ID NO: 741513 - DNA, 15 bp, Homo sapiens
agctaggagggaatt

SEQ ID NO: 741514 - DNA, 15 bp, Homo sapiens
gctaggagggaattc

SEQ ID NO: 741515 - DNA, 15 bp, Homo sapiens
ctaggagggaattca

SEQ ID NO: 741516 - DNA, 15 bp, Homo sapiens
taggagggaattcag

SEQ ID NO: 741517 - DNA, 15 bp, Homo sapiens
aggagggaattcagc

SEQ ID NO: 741518 - DNA, 15 bp, Homo sapiens
ggagggaattcagca

SEQ ID NO: 741519 - DNA, 15 bp, Homo sapiens
gagggaattcagcaa

SEQ ID NO: 741520 - DNA, 15 bp, Homo sapiens
agggaattcagcaaa

SEQ ID NO: 741521 - DNA, 15 bp, Homo sapiens
gggaattcagcaaac

SEQ ID NO: 741522 - DNA, 15 bp, Homo sapiens
ggaattcagcaaacc

SEQ ID NO: 741523 - DNA, 15 bp, Homo sapiens
gaattcagcaaaccc

SEQ ID NO: 741524 - DNA, 15 bp, Homo sapiens
aattcagcaaacccc

SEQ ID NO: 741525 - DNA, 15 bp, Homo sapiens
attcagcaaacccct

SEQ ID NO: 741526 - DNA, 15 bp, Homo sapiens
ttcagcaaaccccta

SEQ ID NO: 741527 - DNA, 15 bp, Homo sapiens
tcagcaaacccctaa

SEQ ID NO: 741528 - DNA, 15 bp, Homo sapiens
cagcaaacccctaag

SEQ ID NO: 741529 - DNA, 15 bp, Homo sapiens
agcaaacccctaagg

SEQ ID NO: 741530 - DNA, 15 bp, Homo sapiens
gcaaacccctaaggt

SEQ ID NO: 741531 - DNA, 15 bp, Homo sapiens
caaacccctaaggtg

SEQ ID NO: 741532 - DNA, 15 bp, Homo sapiens
aaacccctaaggtgg

SEQ ID NO: 741533 - DNA, 15 bp, Homo sapiens
aacccctaaggtggg

SEQ ID NO: 741534 - DNA, 15 bp, Homo sapiens
acccctaaggtggga

SEQ ID NO: 741535 - DNA, 15 bp, Homo sapiens
cccctaaggtgggag

SEQ ID NO: 741536 - DNA, 15 bp, Homo sapiens
ccctaaggtgggaga

SEQ ID NO: 741537 - DNA, 15 bp, Homo sapiens
cctaaggtgggagag

SEQ ID NO: 741538 - DNA, 15 bp, Homo sapiens
ctaaggtgggagagt

SEQ ID NO: 741539 - DNA, 15 bp, Homo sapiens
taaggtgggagagta

SEQ ID NO: 741540 - DNA, 15 bp, Homo sapiens
aaggtgggagagtac

SEQ ID NO: 741541 - DNA, 15 bp, Homo sapiens
aggtgggagagtact

SEQ ID NO: 741542 - DNA, 15 bp, Homo sapiens
ggtgggagagtactt

SEQ ID NO: 741543 - DNA, 15 bp, Homo sapiens
gtgggagagtacttt

SEQ ID NO: 741544 - DNA, 15 bp, Homo sapiens
tgggagagtactttg

SEQ ID NO: 741545 - DNA, 15 bp, Homo sapiens
gggagagtactttgc

SEQ ID NO: 741546 - DNA, 15 bp, Homo sapiens
ggagagtactttgcc

SEQ ID NO: 741547 - DNA, 15 bp, Homo sapiens
gagagtactttgccc

SEQ ID NO: 741548 - DNA, 15 bp, Homo sapiens
agagtactttgcccc

SEQ ID NO: 741549 - DNA, 15 bp, Homo sapiens
gagtactttgcccca

SEQ ID NO: 741550 - DNA, 15 bp, Homo sapiens
agtactttgccccaa

SEQ ID NO: 741551 - DNA, 15 bp, Homo sapiens
gtactttgccccaaa

SEQ ID NO: 741552 - DNA, 15 bp, Homo sapiens
tactttgccccaaat

SEQ ID NO: 741553 - DNA, 15 bp, Homo sapiens
actttgccccaaatc

SEQ ID NO: 741554 - DNA, 15 bp, Homo sapiens
ctttgccccaaatcc

SEQ ID NO: 741555 - DNA, 15 bp, Homo sapiens
tttgccccaaatcct

SEQ ID NO: 741556 - DNA, 15 bp, Homo sapiens
ttgccccaaatcctc

SEQ ID NO: 741557 - DNA, 15 bp, Homo sapiens
tgccccaaatcctca

SEQ ID NO: 741558 - DNA, 15 bp, Homo sapiens
gccccaaatcctcag

SEQ ID NO: 741559 - DNA, 15 bp, Homo sapiens
ccccaaatcctcagt

SEQ ID NO: 741560 - DNA, 15 bp, Homo sapiens
cccaaatcctcagtt

SEQ ID NO: 741561 - DNA, 15 bp, Homo sapiens
ccaaatcctcagttc

SEQ ID NO: 741562 - DNA, 15 bp, Homo sapiens
caaatcctcagttca

SEQ ID NO: 741563 - DNA, 15 bp, Homo sapiens
aaatcctcagttcat

SEQ ID NO: 741564 - DNA, 15 bp, Homo sapiens
aatcctcagttcatc

SEQ ID NO: 741565 - DNA, 15 bp, Homo sapiens
atcctcagttcatcg

SEQ ID NO: 741566 - DNA, 15 bp, Homo sapiens
tcctcagttcatcgt

SEQ ID NO: 741567 - DNA, 15 bp, Homo sapiens
cctcagttcatcgtc

SEQ ID NO: 741568 - DNA, 15 bp, Homo sapiens
ctcagttcatcgtca

SEQ ID NO: 741569 - DNA, 15 bp, Homo sapiens
tcagttcatcgtcat

SEQ ID NO: 741570 - DNA, 15 bp, Homo sapiens
cagttcatcgtcatc

SEQ ID NO: 741571 - DNA, 15 bp, Homo sapiens
agttcatcgtcatct

SEQ ID NO: 741572 - DNA, 15 bp, Homo sapiens
gttcatcgtcatctg

SEQ ID NO: 741573 - DNA, 15 bp, Homo sapiens
ttcatcgtcatctga

SEQ ID NO: 741574 - DNA, 15 bp, Homo sapiens
tcatcgtcatctgaa

SEQ ID NO: 741575 - DNA, 15 bp, Homo sapiens
catcgtcatctgaac

SEQ ID NO: 741576 - DNA, 15 bp, Homo sapiens
atcgtcatctgaaca

SEQ ID NO: 741577 - DNA, 15 bp, Homo sapiens
tcgtcatctgaacac

SEQ ID NO: 741578 - DNA, 15 bp, Homo sapiens
cgtcatctgaacact

SEQ ID NO: 741579 - DNA, 15 bp, Homo sapiens
gtcatctgaacactt

SEQ ID NO: 741580 - DNA, 15 bp, Homo sapiens
tcatctgaacacttt

SEQ ID NO: 741581 - DNA, 15 bp, Homo sapiens
catctgaacactttc

SEQ ID NO: 741582 - DNA, 15 bp, Homo sapiens
atctgaacactttca

SEQ ID NO: 741583 - DNA, 15 bp, Homo sapiens
tctgaacactttcat

SEQ ID NO: 741584 - DNA, 15 bp, Homo sapiens
ctgaacactttcatc

SEQ ID NO: 741585 - DNA, 15 bp, Homo sapiens
tgaacactttcatct

SEQ ID NO: 741586 - DNA, 15 bp, Homo sapiens
gaacactttcatctg

SEQ ID NO: 741587 - DNA, 15 bp, Homo sapiens
aacactttcatctgc

SEQ ID NO: 741588 - DNA, 15 bp, Homo sapiens
acactttcatctgcc

SEQ ID NO: 741589 - DNA, 15 bp, Homo sapiens
cactttcatctgcca

SEQ ID NO: 741590 - DNA, 15 bp, Homo sapiens
actttcatctgccaa

SEQ ID NO: 741591 - DNA, 15 bp, Homo sapiens
ctttcatctgccaac

SEQ ID NO: 741592 - DNA, 15 bp, Homo sapiens
tttcatctgccaaca

SEQ ID NO: 741593 - DNA, 15 bp, Homo sapiens
ttcatctgccaacag

SEQ ID NO: 741594 - DNA, 15 bp, Homo sapiens
tcatctgccaacagc

SEQ ID NO: 741595 - DNA, 15 bp, Homo sapiens
catctgccaacagct

SEQ ID NO: 741596 - DNA, 15 bp, Homo sapiens
atctgccaacagcta

SEQ ID NO: 741597 - DNA, 15 bp, Homo sapiens
tctgccaacagctac

SEQ ID NO: 741598 - DNA, 15 bp, Homo sapiens
ctgccaacagctaca

SEQ ID NO: 741599 - DNA, 15 bp, Homo sapiens
tgccaacagctacac

SEQ ID NO: 741600 - DNA, 15 bp, Homo sapiens
gccaacagctacact

SEQ ID NO: 741601 - DNA, 15 bp, Homo sapiens
ccaacagctacactc

SEQ ID NO: 741602 - DNA, 15 bp, Homo sapiens
caacagctacactcc

SEQ ID NO: 741603 - DNA, 15 bp, Homo sapiens
aacagctacactccc

SEQ ID NO: 741604 - DNA, 15 bp, Homo sapiens
acagctacactccca

SEQ ID NO: 741605 - DNA, 15 bp, Homo sapiens
cagctacactcccaa

SEQ ID NO: 741606 - DNA, 15 bp, Homo sapiens
agctacactcccaag

SEQ ID NO: 741607 - DNA, 15 bp, Homo sapiens
gctacactcccaaga

SEQ ID NO: 741608 - DNA, 15 bp, Homo sapiens
ctacactcccaagac

SEQ ID NO: 741609 - DNA, 15 bp, Homo sapiens
tacactcccaagaca

SEQ ID NO: 741610 - DNA, 15 bp, Homo sapiens
acactcccaagacac

SEQ ID NO: 741611 - DNA, 15 bp, Homo sapiens
cactcccaagacaca

SEQ ID NO: 741612 - DNA, 15 bp, Homo sapiens
actcccaagacacaa

SEQ ID NO: 741613 - DNA, 15 bp, Homo sapiens
ctcccaagacacaag

SEQ ID NO: 741614 - DNA, 15 bp, Homo sapiens
tcccaagacacaaga

SEQ ID NO: 741615 - DNA, 15 bp, Homo sapiens
cccaagacacaagaa

SEQ ID NO: 741616 - DNA, 15 bp, Homo sapiens
ccaagacacaagaag

SEQ ID NO: 741617 - DNA, 15 bp, Homo sapiens
caagacacaagaagc

SEQ ID NO: 741618 - DNA, 15 bp, Homo sapiens
aagacacaagaagcc

SEQ ID NO: 741619 - DNA, 15 bp, Homo sapiens
agacacaagaagccg

SEQ ID NO: 741620 - DNA, 15 bp, Homo sapiens
gacacaagaagccga

SEQ ID NO: 741621 - DNA, 15 bp, Homo sapiens
acacaagaagccgag

SEQ ID NO: 741622 - DNA, 15 bp, Homo sapiens
cacaagaagccgagg

SEQ ID NO: 741623 - DNA, 15 bp, Homo sapiens
acaagaagccgagga

SEQ ID NO: 741624 - DNA, 15 bp, Homo sapiens
caagaagccgaggat

SEQ ID NO: 741625 - DNA, 15 bp, Homo sapiens
aagaagccgaggatt

SEQ ID NO: 741626 - DNA, 15 bp, Homo sapiens
agaagccgaggattt

SEQ ID NO: 741627 - DNA, 15 bp, Homo sapiens
gaagccgaggatttg

SEQ ID NO: 741628 - DNA, 15 bp, Homo sapiens
aagccgaggatttgg

SEQ ID NO: 741629 - DNA, 15 bp, Homo sapiens
agccgaggatttggc

SEQ ID NO: 741630 - DNA, 15 bp, Homo sapiens
gccgaggatttggca

SEQ ID NO: 741631 - DNA, 15 bp, Homo sapiens
ccgaggatttggcaa

SEQ ID NO: 741632 - DNA, 15 bp, Homo sapiens
cgaggatttggcaat

SEQ ID NO: 741633 - DNA, 15 bp, Homo sapiens
gaggatttggcaatg

SEQ ID NO: 741634 - DNA, 15 bp, Homo sapiens
aggatttggcaatgc

SEQ ID NO: 741635 - DNA, 15 bp, Homo sapiens
ggatttggcaatgca

SEQ ID NO: 741636 - DNA, 15 bp, Homo sapiens
gatttggcaatgcag

SEQ ID NO: 741637 - DNA, 15 bp, Homo sapiens
atttggcaatgcagt

SEQ ID NO: 741638 - DNA, 15 bp, Homo sapiens
tttggcaatgcagta

SEQ ID NO: 741639 - DNA, 15 bp, Homo sapiens
ttggcaatgcagtaa

SEQ ID NO: 741640 - DNA, 15 bp, Homo sapiens
tggcaatgcagtaaa

SEQ ID NO: 741641 - DNA, 15 bp, Homo sapiens
ggcaatgcagtaaaa

SEQ ID NO: 741642 - DNA, 15 bp, Homo sapiens
gcaatgcagtaaaaa

SEQ ID NO: 741643 - DNA, 15 bp, Homo sapiens
caatgcagtaaaaag

SEQ ID NO: 741644 - DNA, 15 bp, Homo sapiens
aatgcagtaaaaaga

SEQ ID NO: 741645 - DNA, 15 bp, Homo sapiens
atgcagtaaaaagac

SEQ ID NO: 741646 - DNA, 15 bp, Homo sapiens
tgcagtaaaaagaca

SEQ ID NO: 741647 - DNA, 15 bp, Homo sapiens
gcagtaaaaagacaa

SEQ ID NO: 741648 - DNA, 15 bp, Homo sapiens
cagtaaaaagacaag

SEQ ID NO: 741649 - DNA, 15 bp, Homo sapiens
agtaaaaagacaagc

SEQ ID NO: 741650 - DNA, 15 bp, Homo sapiens
gtaaaaagacaagcc

SEQ ID NO: 741651 - DNA, 15 bp, Homo sapiens
taaaaagacaagcct

SEQ ID NO: 741652 - DNA, 15 bp, Homo sapiens
aaaaagacaagccta

SEQ ID NO: 741653 - DNA, 15 bp, Homo sapiens
aaaagacaagcctaa

SEQ ID NO: 741654 - DNA, 15 bp, Homo sapiens
aaagacaagcctaat

SEQ ID NO: 741655 - DNA, 15 bp, Homo sapiens
aagacaagcctaatt

SEQ ID NO: 741656 - DNA, 15 bp, Homo sapiens
agacaagcctaattc

SEQ ID NO: 741657 - DNA, 15 bp, Homo sapiens
gacaagcctaattca

SEQ ID NO: 741658 - DNA, 15 bp, Homo sapiens
acaagcctaattcag

SEQ ID NO: 741659 - DNA, 15 bp, Homo sapiens
caagcctaattcagg

SEQ ID NO: 741660 - DNA, 15 bp, Homo sapiens
aagcctaattcaggg

SEQ ID NO: 741661 - DNA, 15 bp, Homo sapiens
agcctaattcaggga

SEQ ID NO: 741662 - DNA, 15 bp, Homo sapiens
gcctaattcagggaa

SEQ ID NO: 741663 - DNA, 15 bp, Homo sapiens
cctaattcagggaaa

SEQ ID NO: 741664 - DNA, 15 bp, Homo sapiens
ctaattcagggaaac

SEQ ID NO: 741665 - DNA, 15 bp, Homo sapiens
taattcagggaaacc

SEQ ID NO: 741666 - DNA, 15 bp, Homo sapiens
aattcagggaaaccc

SEQ ID NO: 741667 - DNA, 15 bp, Homo sapiens
attcagggaaaccct

SEQ ID NO: 741668 - DNA, 15 bp, Homo sapiens
ttcagggaaacccta

SEQ ID NO: 741669 - DNA, 15 bp, Homo sapiens
tcagggaaaccctac

SEQ ID NO: 741670 - DNA, 15 bp, Homo sapiens
cagggaaaccctaca

SEQ ID NO: 741671 - DNA, 15 bp, Homo sapiens
agggaaaccctacat

SEQ ID NO: 741672 - DNA, 15 bp, Homo sapiens
gggaaaccctacatt

SEQ ID NO: 741673 - DNA, 15 bp, Homo sapiens
ggaaaccctacattc

SEQ ID NO: 741674 - DNA, 15 bp, Homo sapiens
gaaaccctacattca

SEQ ID NO: 741675 - DNA, 15 bp, Homo sapiens
aaaccctacattcag

SEQ ID NO: 741676 - DNA, 15 bp, Homo sapiens
aaccctacattcagc

SEQ ID NO: 741677 - DNA, 15 bp, Homo sapiens
accctacattcagcc

SEQ ID NO: 741678 - DNA, 15 bp, Homo sapiens
ccctacattcagcca

SEQ ID NO: 741679 - DNA, 15 bp, Homo sapiens
cctacattcagccaa

SEQ ID NO: 741680 - DNA, 15 bp, Homo sapiens
ctacattcagccaaa

SEQ ID NO: 741681 - DNA, 15 bp, Homo sapiens
tacattcagccaaaa

SEQ ID NO: 741682 - DNA, 15 bp, Homo sapiens
acattcagccaaaat

SEQ ID NO: 741683 - DNA, 15 bp, Homo sapiens
cattcagccaaaatt

SEQ ID NO: 741684 - DNA, 15 bp, Homo sapiens
attcagccaaaattt

SEQ ID NO: 741685 - DNA, 15 bp, Homo sapiens
ttcagccaaaatttt

SEQ ID NO: 741686 - DNA, 15 bp, Homo sapiens
tcagccaaaattttt

SEQ ID NO: 741687 - DNA, 15 bp, Homo sapiens
cagccaaaatttttt

SEQ ID NO: 741688 - DNA, 15 bp, Homo sapiens
agccaaaattttttg

SEQ ID NO: 741689 - DNA, 15 bp, Homo sapiens
gccaaaattttttgc

SEQ ID NO: 741690 - DNA, 15 bp, Homo sapiens
ccaaaattttttgct

SEQ ID NO: 741691 - DNA, 15 bp, Homo sapiens
caaaattttttgctg

SEQ ID NO: 741692 - DNA, 15 bp, Homo sapiens
aaaattttttgctgg

SEQ ID NO: 741693 - DNA, 15 bp, Homo sapiens
aaattttttgctggc

SEQ ID NO: 741694 - DNA, 15 bp, Homo sapiens
aattttttgctggca

SEQ ID NO: 741695 - DNA, 15 bp, Homo sapiens
attttttgctggcag

SEQ ID NO: 741696 - DNA, 15 bp, Homo sapiens
ttttttgctggcagt

SEQ ID NO: 741697 - DNA, 15 bp, Homo sapiens
tttttgctggcagta

SEQ ID NO: 741698 - DNA, 15 bp, Homo sapiens
ttttgctggcagtat

SEQ ID NO: 741699 - DNA, 15 bp, Homo sapiens
tttgctggcagtata

SEQ ID NO: 741700 - DNA, 15 bp, Homo sapiens
ttgctggcagtataa

SEQ ID NO: 741701 - DNA, 15 bp, Homo sapiens
tgctggcagtataaa

SEQ ID NO: 741702 - DNA, 15 bp, Homo sapiens
gctggcagtataaaa

SEQ ID NO: 741703 - DNA, 15 bp, Homo sapiens
ctggcagtataaaac

SEQ ID NO: 741704 - DNA, 15 bp, Homo sapiens
tggcagtataaaacc

SEQ ID NO: 741705 - DNA, 15 bp, Homo sapiens
ggcagtataaaaccc

SEQ ID NO: 741706 - DNA, 15 bp, Homo sapiens
gcagtataaaacccc

SEQ ID NO: 741707 - DNA, 15 bp, Homo sapiens
cagtataaaaccccc

SEQ ID NO: 741708 - DNA, 15 bp, Homo sapiens
agtataaaaccccca

SEQ ID NO: 741709 - DNA, 15 bp, Homo sapiens
gtataaaacccccac

SEQ ID NO: 741710 - DNA, 15 bp, Homo sapiens
tataaaacccccact

SEQ ID NO: 741711 - DNA, 15 bp, Homo sapiens
ataaaacccccactt

SEQ ID NO: 741712 - DNA, 15 bp, Homo sapiens
taaaacccccacttc

SEQ ID NO: 741713 - DNA, 15 bp, Homo sapiens
aaaacccccacttcc

SEQ ID NO: 741714 - DNA, 15 bp, Homo sapiens
aaacccccacttcct

SEQ ID NO: 741715 - DNA, 15 bp, Homo sapiens
aacccccacttcctt

SEQ ID NO: 741716 - DNA, 15 bp, Homo sapiens
acccccacttccttc

SEQ ID NO: 741717 - DNA, 15 bp, Homo sapiens
cccccacttccttct

SEQ ID NO: 741718 - DNA, 15 bp, Homo sapiens
ccccacttccttctg

SEQ ID NO: 741719 - DNA, 15 bp, Homo sapiens
cccacttccttctga

SEQ ID NO: 741720 - DNA, 15 bp, Homo sapiens
ccacttccttctgaa

SEQ ID NO: 741721 - DNA, 15 bp, Homo sapiens
cacttccttctgaat

SEQ ID NO: 741722 - DNA, 15 bp, Homo sapiens
acttccttctgaatc

SEQ ID NO: 741723 - DNA, 15 bp, Homo sapiens
cttccttctgaatcc

SEQ ID NO: 741724 - DNA, 15 bp, Homo sapiens
ttccttctgaatcct

SEQ ID NO: 741725 - DNA, 15 bp, Homo sapiens
tccttctgaatcctg

SEQ ID NO: 741726 - DNA, 15 bp, Homo sapiens
ccttctgaatcctgc

SEQ ID NO: 741727 - DNA, 15 bp, Homo sapiens
cttctgaatcctgca

SEQ ID NO: 741728 - DNA, 15 bp, Homo sapiens
ttctgaatcctgcag

SEQ ID NO: 741729 - DNA, 15 bp, Homo sapiens
tctgaatcctgcagt

SEQ ID NO: 741730 - DNA, 15 bp, Homo sapiens
ctgaatcctgcagtc

SEQ ID NO: 741731 - DNA, 15 bp, Homo sapiens
tgaatcctgcagtct

SEQ ID NO: 741732 - DNA, 15 bp, Homo sapiens
gaatcctgcagtcta

SEQ ID NO: 741733 - DNA, 15 bp, Homo sapiens
aatcctgcagtctaa

SEQ ID NO: 741734 - DNA, 15 bp, Homo sapiens
atcctgcagtctaaa

SEQ ID NO: 741735 - DNA, 15 bp, Homo sapiens
tcctgcagtctaaat

SEQ ID NO: 741736 - DNA, 15 bp, Homo sapiens
cctgcagtctaaatc

SEQ ID NO: 741737 - DNA, 15 bp, Homo sapiens
ctgcagtctaaatca

SEQ ID NO: 741738 - DNA, 15 bp, Homo sapiens
tgcagtctaaatcaa

SEQ ID NO: 741739 - DNA, 15 bp, Homo sapiens
gcagtctaaatcaag

SEQ ID NO: 741740 - DNA, 15 bp, Homo sapiens
cagtctaaatcaagc

SEQ ID NO: 741741 - DNA, 15 bp, Homo sapiens
agtctaaatcaagcc

SEQ ID NO: 741742 - DNA, 15 bp, Homo sapiens
gtctaaatcaagcca

SEQ ID NO: 741743 - DNA, 15 bp, Homo sapiens
tctaaatcaagccaa

SEQ ID NO: 741744 - DNA, 15 bp, Homo sapiens
ctaaatcaagccaag

SEQ ID NO: 741745 - DNA, 15 bp, Homo sapiens
taaatcaagccaaga

SEQ ID NO: 741746 - DNA, 15 bp, Homo sapiens
aaatcaagccaagaa

SEQ ID NO: 741747 - DNA, 15 bp, Homo sapiens
aatcaagccaagaag

SEQ ID NO: 741748 - DNA, 15 bp, Homo sapiens
atcaagccaagaagg

SEQ ID NO: 741749 - DNA, 15 bp, Homo sapiens
tcaagccaagaaggg

SEQ ID NO: 741750 - DNA, 15 bp, Homo sapiens
caagccaagaagggc

SEQ ID NO: 741751 - DNA, 15 bp, Homo sapiens
aagccaagaagggca

SEQ ID NO: 741752 - DNA, 15 bp, Homo sapiens
agccaagaagggcaa

SEQ ID NO: 741753 - DNA, 15 bp, Homo sapiens
gccaagaagggcaac

SEQ ID NO: 741754 - DNA, 15 bp, Homo sapiens
ccaagaagggcaaca

SEQ ID NO: 741755 - DNA, 15 bp, Homo sapiens
caagaagggcaacag

SEQ ID NO: 741756 - DNA, 15 bp, Homo sapiens
aagaagggcaacagg

SEQ ID NO: 741757 - DNA, 15 bp, Homo sapiens
agaagggcaacaggg

SEQ ID NO: 741758 - DNA, 15 bp, Homo sapiens
gaagggcaacagggc

SEQ ID NO: 741759 - DNA, 15 bp, Homo sapiens
aagggcaacagggct

SEQ ID NO: 741760 - DNA, 15 bp, Homo sapiens
agggcaacagggctt

SEQ ID NO: 741761 - DNA, 15 bp, Homo sapiens
gggcaacagggcttt

SEQ ID NO: 741762 - DNA, 15 bp, Homo sapiens
ggcaacagggctttt

SEQ ID NO: 741763 - DNA, 15 bp, Homo sapiens
gcaacagggctttta

SEQ ID NO: 741764 - DNA, 15 bp, Homo sapiens
caacagggcttttac

SEQ ID NO: 741765 - DNA, 15 bp, Homo sapiens
aacagggcttttaca

SEQ ID NO: 741766 - DNA, 15 bp, Homo sapiens
acagggcttttacaa

SEQ ID NO: 741767 - DNA, 15 bp, Homo sapiens
cagggcttttacaag

SEQ ID NO: 741768 - DNA, 15 bp, Homo sapiens
agggcttttacaagc

SEQ ID NO: 741769 - DNA, 15 bp, Homo sapiens
gggcttttacaagcc

SEQ ID NO: 741770 - DNA, 15 bp, Homo sapiens
ggcttttacaagcct

SEQ ID NO: 741771 - DNA, 15 bp, Homo sapiens
gcttttacaagcctg

SEQ ID NO: 741772 - DNA, 15 bp, Homo sapiens
cttttacaagcctgg

SEQ ID NO: 741773 - DNA, 15 bp, Homo sapiens
ttttacaagcctggc

SEQ ID NO: 741774 - DNA, 15 bp, Homo sapiens
tttacaagcctggcc

SEQ ID NO: 741775 - DNA, 15 bp, Homo sapiens
ttacaagcctggcca

SEQ ID NO: 741776 - DNA, 15 bp, Homo sapiens
tacaagcctggccaa

SEQ ID NO: 741777 - DNA, 15 bp, Homo sapiens
acaagcctggccaac

SEQ ID NO: 741778 - DNA, 15 bp, Homo sapiens
caagcctggccaacc

SEQ ID NO: 741779 - DNA, 15 bp, Homo sapiens
aagcctggccaaccg

SEQ ID NO: 741780 - DNA, 15 bp, Homo sapiens
agcctggccaaccga

SEQ ID NO: 741781 - DNA, 15 bp, Homo sapiens
gcctggccaaccgat

SEQ ID NO: 741782 - DNA, 15 bp, Homo sapiens
cctggccaaccgatt

SEQ ID NO: 741783 - DNA, 15 bp, Homo sapiens
ctggccaaccgatta

SEQ ID NO: 741784 - DNA, 15 bp, Homo sapiens
tggccaaccgattac

SEQ ID NO: 741785 - DNA, 15 bp, Homo sapiens
ggccaaccgattacc

SEQ ID NO: 741786 - DNA, 15 bp, Homo sapiens
gccaaccgattaccc

SEQ ID NO: 741787 - DNA, 15 bp, Homo sapiens
ccaaccgattaccca

SEQ ID NO: 741788 - DNA, 15 bp, Homo sapiens
caaccgattacccac

SEQ ID NO: 741789 - DNA, 15 bp, Homo sapiens
aaccgattacccaca

SEQ ID NO: 741790 - DNA, 15 bp, Homo sapiens
accgattacccacac

SEQ ID NO: 741791 - DNA, 15 bp, Homo sapiens
ccgattacccacaca

SEQ ID NO: 741792 - DNA, 15 bp, Homo sapiens
cgattacccacacaa

SEQ ID NO: 741793 - DNA, 15 bp, Homo sapiens
gattacccacacaat

SEQ ID NO: 741794 - DNA, 15 bp, Homo sapiens
attacccacacaatg

SEQ ID NO: 741795 - DNA, 15 bp, Homo sapiens
ttacccacacaatgt

SEQ ID NO: 741796 - DNA, 15 bp, Homo sapiens
tacccacacaatgtc

SEQ ID NO: 741797 - DNA, 15 bp, Homo sapiens
acccacacaatgtca

SEQ ID NO: 741798 - DNA, 15 bp, Homo sapiens
cccacacaatgtcag

SEQ ID NO: 741799 - DNA, 15 bp, Homo sapiens
ccacacaatgtcaga

SEQ ID NO: 741800 - DNA, 15 bp, Homo sapiens
cacacaatgtcagac

SEQ ID NO: 741801 - DNA, 15 bp, Homo sapiens
acacaatgtcagaca

SEQ ID NO: 741802 - DNA, 15 bp, Homo sapiens
cacaatgtcagacag

SEQ ID NO: 741803 - DNA, 15 bp, Homo sapiens
acaatgtcagacaga

SEQ ID NO: 741804 - DNA, 15 bp, Homo sapiens
caatgtcagacagaa

SEQ ID NO: 741805 - DNA, 15 bp, Homo sapiens
aatgtcagacagaaa

SEQ ID NO: 741806 - DNA, 15 bp, Homo sapiens
atgtcagacagaaac

SEQ ID NO: 741807 - DNA, 15 bp, Homo sapiens
tgtcagacagaaaca

SEQ ID NO: 741808 - DNA, 15 bp, Homo sapiens
gtcagacagaaacag

SEQ ID NO: 741809 - DNA, 15 bp, Homo sapiens
tcagacagaaacagc

SEQ ID NO: 741810 - DNA, 15 bp, Homo sapiens
cagacagaaacagcc

SEQ ID NO: 741811 - DNA, 15 bp, Homo sapiens
agacagaaacagccc

SEQ ID NO: 741812 - DNA, 15 bp, Homo sapiens
gacagaaacagccca

SEQ ID NO: 741813 - DNA, 15 bp, Homo sapiens
acagaaacagcccag

SEQ ID NO: 741814 - DNA, 15 bp, Homo sapiens
cagaaacagcccagg

SEQ ID NO: 741815 - DNA, 15 bp, Homo sapiens
agaaacagcccagga

SEQ ID NO: 741816 - DNA, 15 bp, Homo sapiens
gaaacagcccaggac

SEQ ID NO: 741817 - DNA, 15 bp, Homo sapiens
aaacagcccaggact

SEQ ID NO: 741818 - DNA, 15 bp, Homo sapiens
aacagcccaggactc

SEQ ID NO: 741819 - DNA, 15 bp, Homo sapiens
acagcccaggactca

SEQ ID NO: 741820 - DNA, 15 bp, Homo sapiens
cagcccaggactcaa

SEQ ID NO: 741821 - DNA, 15 bp, Homo sapiens
agcccaggactcaaa

SEQ ID NO: 741822 - DNA, 15 bp, Homo sapiens
gcccaggactcaaat

SEQ ID NO: 741823 - DNA, 15 bp, Homo sapiens
cccaggactcaaatt

SEQ ID NO: 741824 - DNA, 15 bp, Homo sapiens
ccaggactcaaattt

SEQ ID NO: 741825 - DNA, 15 bp, Homo sapiens
caggactcaaatttc

SEQ ID NO: 741826 - DNA, 15 bp, Homo sapiens
aggactcaaatttcc

SEQ ID NO: 741827 - DNA, 15 bp, Homo sapiens
ggactcaaatttccc

SEQ ID NO: 741828 - DNA, 15 bp, Homo sapiens
gactcaaatttccct

SEQ ID NO: 741829 - DNA, 15 bp, Homo sapiens
actcaaatttccctc

SEQ ID NO: 741830 - DNA, 15 bp, Homo sapiens
ctcaaatttccctct

SEQ ID NO: 741831 - DNA, 15 bp, Homo sapiens
tcaaatttccctctg

SEQ ID NO: 741832 - DNA, 15 bp, Homo sapiens
caaatttccctctga

SEQ ID NO: 741833 - DNA, 15 bp, Homo sapiens
aaatttccctctgac

SEQ ID NO: 741834 - DNA, 15 bp, Homo sapiens
aatttccctctgaca

SEQ ID NO: 741835 - DNA, 15 bp, Homo sapiens
atttccctctgacac

SEQ ID NO: 741836 - DNA, 15 bp, Homo sapiens
tttccctctgacacc

SEQ ID NO: 741837 - DNA, 15 bp, Homo sapiens
ttccctctgacacct

SEQ ID NO: 741838 - DNA, 15 bp, Homo sapiens
tccctctgacacctg

SEQ ID NO: 741839 - DNA, 15 bp, Homo sapiens
ccctctgacacctga

SEQ ID NO: 741840 - DNA, 15 bp, Homo sapiens
cctctgacacctgac

SEQ ID NO: 741841 - DNA, 15 bp, Homo sapiens
ctctgacacctgacc

SEQ ID NO: 741842 - DNA, 15 bp, Homo sapiens
tctgacacctgacct

SEQ ID NO: 741843 - DNA, 15 bp, Homo sapiens
ctgacacctgacctg

SEQ ID NO: 741844 - DNA, 15 bp, Homo sapiens
tgacacctgacctgc

SEQ ID NO: 741845 - DNA, 15 bp, Homo sapiens
gacacctgacctgcc

SEQ ID NO: 741846 - DNA, 15 bp, Homo sapiens
acacctgacctgccc

SEQ ID NO: 741847 - DNA, 15 bp, Homo sapiens
cacctgacctgcccc

SEQ ID NO: 741848 - DNA, 15 bp, Homo sapiens
acctgacctgcccct

SEQ ID NO: 741849 - DNA, 15 bp, Homo sapiens
cctgacctgcccctg

SEQ ID NO: 741850 - DNA, 15 bp, Homo sapiens
ctgacctgcccctga

SEQ ID NO: 741851 - DNA, 15 bp, Homo sapiens
tgacctgcccctgac

SEQ ID NO: 741852 - DNA, 15 bp, Homo sapiens
gacctgcccctgact

SEQ ID NO: 741853 - DNA, 15 bp, Homo sapiens
acctgcccctgacta

SEQ ID NO: 741854 - DNA, 15 bp, Homo sapiens
cctgcccctgactac

SEQ ID NO: 741855 - DNA, 15 bp, Homo sapiens
ctgcccctgactaca

SEQ ID NO: 741856 - DNA, 15 bp, Homo sapiens
tgcccctgactacat

SEQ ID NO: 741857 - DNA, 15 bp, Homo sapiens
gcccctgactacata

SEQ ID NO: 741858 - DNA, 15 bp, Homo sapiens
cccctgactacatac

SEQ ID NO: 741859 - DNA, 15 bp, Homo sapiens
ccctgactacatacc

SEQ ID NO: 741860 - DNA, 15 bp, Homo sapiens
cctgactacatacct

SEQ ID NO: 741861 - DNA, 15 bp, Homo sapiens
ctgactacatacctg

SEQ ID NO: 741862 - DNA, 15 bp, Homo sapiens
tgactacatacctgg

SEQ ID NO: 741863 - DNA, 15 bp, Homo sapiens
gactacatacctggt

SEQ ID NO: 741864 - DNA, 15 bp, Homo sapiens
actacatacctggtg

SEQ ID NO: 741865 - DNA, 15 bp, Homo sapiens
ctacatacctggtgt

SEQ ID NO: 741866 - DNA, 15 bp, Homo sapiens
tacatacctggtgtc

SEQ ID NO: 741867 - DNA, 15 bp, Homo sapiens
acatacctggtgtct

SEQ ID NO: 741868 - DNA, 15 bp, Homo sapiens
catacctggtgtctt

SEQ ID NO: 741869 - DNA, 15 bp, Homo sapiens
atacctggtgtcttc

SEQ ID NO: 741870 - DNA, 15 bp, Homo sapiens
tacctggtgtcttca

SEQ ID NO: 741871 - DNA, 15 bp, Homo sapiens
acctggtgtcttcag

SEQ ID NO: 741872 - DNA, 15 bp, Homo sapiens
cctggtgtcttcagt

SEQ ID NO: 741873 - DNA, 15 bp, Homo sapiens
ctggtgtcttcagta

SEQ ID NO: 741874 - DNA, 15 bp, Homo sapiens
tggtgtcttcagtag

SEQ ID NO: 741875 - DNA, 15 bp, Homo sapiens
ggtgtcttcagtagt

SEQ ID NO: 741876 - DNA, 15 bp, Homo sapiens
gtgtcttcagtagtt

SEQ ID NO: 741877 - DNA, 15 bp, Homo sapiens
tgtcttcagtagttt

SEQ ID NO: 741878 - DNA, 15 bp, Homo sapiens
gtcttcagtagtttc

SEQ ID NO: 741879 - DNA, 15 bp, Homo sapiens
tcttcagtagtttca

SEQ ID NO: 741880 - DNA, 15 bp, Homo sapiens
cttcagtagtttcac

SEQ ID NO: 741881 - DNA, 15 bp, Homo sapiens
ttcagtagtttcact

SEQ ID NO: 741882 - DNA, 15 bp, Homo sapiens
tcagtagtttcactg

SEQ ID NO: 741883 - DNA, 15 bp, Homo sapiens
cagtagtttcactgg

SEQ ID NO: 741884 - DNA, 15 bp, Homo sapiens
agtagtttcactggg

SEQ ID NO: 741885 - DNA, 15 bp, Homo sapiens
gtagtttcactgggc

SEQ ID NO: 741886 - DNA, 15 bp, Homo sapiens
tagtttcactgggcc

SEQ ID NO: 741887 - DNA, 15 bp, Homo sapiens
agtttcactgggccc

SEQ ID NO: 741888 - DNA, 15 bp, Homo sapiens
gtttcactgggccca

SEQ ID NO: 741889 - DNA, 15 bp, Homo sapiens
tttcactgggcccat

SEQ ID NO: 741890 - DNA, 15 bp, Homo sapiens
ttcactgggcccatg

SEQ ID NO: 741891 - DNA, 15 bp, Homo sapiens
tcactgggcccatgg

SEQ ID NO: 741892 - DNA, 15 bp, Homo sapiens
cactgggcccatggt

SEQ ID NO: 741893 - DNA, 15 bp, Homo sapiens
actgggcccatggtg

SEQ ID NO: 741894 - DNA, 15 bp, Homo sapiens
ctgggcccatggtgg

SEQ ID NO: 741895 - DNA, 15 bp, Homo sapiens
tgggcccatggtgga

SEQ ID NO: 741896 - DNA, 15 bp, Homo sapiens
gggcccatggtggac

SEQ ID NO: 741897 - DNA, 15 bp, Homo sapiens
ggcccatggtggaca

SEQ ID NO: 741898 - DNA, 15 bp, Homo sapiens
gcccatggtggacaa

SEQ ID NO: 741899 - DNA, 15 bp, Homo sapiens
cccatggtggacaaa

SEQ ID NO: 741900 - DNA, 15 bp, Homo sapiens
ccatggtggacaaac

SEQ ID NO: 741901 - DNA, 15 bp, Homo sapiens
catggtggacaaact

SEQ ID NO: 741902 - DNA, 15 bp, Homo sapiens
atggtggacaaactt

SEQ ID NO: 741903 - DNA, 15 bp, Homo sapiens
tggtggacaaactta

SEQ ID NO: 741904 - DNA, 15 bp, Homo sapiens
ggtggacaaacttaa

SEQ ID NO: 741905 - DNA, 15 bp, Homo sapiens
gtggacaaacttaac

SEQ ID NO: 741906 - DNA, 15 bp, Homo sapiens
tggacaaacttaaca

SEQ ID NO: 741907 - DNA, 15 bp, Homo sapiens
ggacaaacttaacac

SEQ ID NO: 741908 - DNA, 15 bp, Homo sapiens
gacaaacttaacaca

SEQ ID NO: 741909 - DNA, 15 bp, Homo sapiens
acaaacttaacacag

SEQ ID NO: 741910 - DNA, 15 bp, Homo sapiens
caaacttaacacaga

SEQ ID NO: 741911 - DNA, 15 bp, Homo sapiens
aaacttaacacagag

SEQ ID NO: 741912 - DNA, 15 bp, Homo sapiens
aacttaacacagaga

SEQ ID NO: 741913 - DNA, 15 bp, Homo sapiens
acttaacacagagaa

SEQ ID NO: 741914 - DNA, 15 bp, Homo sapiens
cttaacacagagaaa

SEQ ID NO: 741915 - DNA, 15 bp, Homo sapiens
ttaacacagagaaag

SEQ ID NO: 741916 - DNA, 15 bp, Homo sapiens
taacacagagaaaga

SEQ ID NO: 741917 - DNA, 15 bp, Homo sapiens
aacacagagaaagaa

SEQ ID NO: 741918 - DNA, 15 bp, Homo sapiens
acacagagaaagaat

SEQ ID NO: 741919 - DNA, 15 bp, Homo sapiens
cacagagaaagaatg

SEQ ID NO: 741920 - DNA, 15 bp, Homo sapiens
acagagaaagaatgt

SEQ ID NO: 741921 - DNA, 15 bp, Homo sapiens
cagagaaagaatgtg

SEQ ID NO: 741922 - DNA, 15 bp, Homo sapiens
agagaaagaatgtgc

SEQ ID NO: 741923 - DNA, 15 bp, Homo sapiens
gagaaagaatgtgca

SEQ ID NO: 741924 - DNA, 15 bp, Homo sapiens
agaaagaatgtgcat

SEQ ID NO: 741925 - DNA, 15 bp, Homo sapiens
gaaagaatgtgcatg

SEQ ID NO: 741926 - DNA, 15 bp, Homo sapiens
aaagaatgtgcatga

SEQ ID NO: 741927 - DNA, 15 bp, Homo sapiens
aagaatgtgcatgac

SEQ ID NO: 741928 - DNA, 15 bp, Homo sapiens
agaatgtgcatgaca

SEQ ID NO: 741929 - DNA, 15 bp, Homo sapiens
gaatgtgcatgacag

SEQ ID NO: 741930 - DNA, 15 bp, Homo sapiens
aatgtgcatgacagc

SEQ ID NO: 741931 - DNA, 15 bp, Homo sapiens
atgtgcatgacagcc

SEQ ID NO: 741932 - DNA, 15 bp, Homo sapiens
tgtgcatgacagcct

SEQ ID NO: 741933 - DNA, 15 bp, Homo sapiens
gtgcatgacagcctc

SEQ ID NO: 741934 - DNA, 15 bp, Homo sapiens
tgcatgacagcctct

SEQ ID NO: 741935 - DNA, 15 bp, Homo sapiens
gcatgacagcctctc

SEQ ID NO: 741936 - DNA, 15 bp, Homo sapiens
catgacagcctctct

SEQ ID NO: 741937 - DNA, 15 bp, Homo sapiens
atgacagcctctcta

SEQ ID NO: 741938 - DNA, 15 bp, Homo sapiens
tgacagcctctctat

SEQ ID NO: 741939 - DNA, 15 bp, Homo sapiens
gacagcctctctatt

SEQ ID NO: 741940 - DNA, 15 bp, Homo sapiens
acagcctctctattg

SEQ ID NO: 741941 - DNA, 15 bp, Homo sapiens
cagcctctctattgg

SEQ ID NO: 741942 - DNA, 15 bp, Homo sapiens
agcctctctattggt

SEQ ID NO: 741943 - DNA, 15 bp, Homo sapiens
gcctctctattggtt

SEQ ID NO: 741944 - DNA, 15 bp, Homo sapiens
cctctctattggttg

SEQ ID NO: 741945 - DNA, 15 bp, Homo sapiens
ctctctattggttgt

SEQ ID NO: 741946 - DNA, 15 bp, Homo sapiens
tctctattggttgtc

SEQ ID NO: 741947 - DNA, 15 bp, Homo sapiens
ctctattggttgtcc

SEQ ID NO: 741948 - DNA, 15 bp, Homo sapiens
tctattggttgtcct

SEQ ID NO: 741949 - DNA, 15 bp, Homo sapiens
ctattggttgtccta

SEQ ID NO: 741950 - DNA, 15 bp, Homo sapiens
tattggttgtcctag

SEQ ID NO: 741951 - DNA, 15 bp, Homo sapiens
attggttgtcctaga

SEQ ID NO: 741952 - DNA, 15 bp, Homo sapiens
ttggttgtcctagag

SEQ ID NO: 741953 - DNA, 15 bp, Homo sapiens
tggttgtcctagaga

SEQ ID NO: 741954 - DNA, 15 bp, Homo sapiens
ggttgtcctagagag

SEQ ID NO: 741955 - DNA, 15 bp, Homo sapiens
gttgtcctagagaga

SEQ ID NO: 741956 - DNA, 15 bp, Homo sapiens
ttgtcctagagagat

SEQ ID NO: 741957 - DNA, 15 bp, Homo sapiens
tgtcctagagagata

SEQ ID NO: 741958 - DNA, 15 bp, Homo sapiens
gtcctagagagatag

SEQ ID NO: 741959 - DNA, 15 bp, Homo sapiens
tcctagagagatagg

SEQ ID NO: 741960 - DNA, 15 bp, Homo sapiens
cctagagagatagga

SEQ ID NO: 741961 - DNA, 15 bp, Homo sapiens
ctagagagataggag

SEQ ID NO: 741962 - DNA, 15 bp, Homo sapiens
tagagagataggagg

SEQ ID NO: 741963 - DNA, 15 bp, Homo sapiens
agagagataggagga

SEQ ID NO: 741964 - DNA, 15 bp, Homo sapiens
gagagataggaggat

SEQ ID NO: 741965 - DNA, 15 bp, Homo sapiens
agagataggaggatc

SEQ ID NO: 741966 - DNA, 15 bp, Homo sapiens
gagataggaggatct

SEQ ID NO: 741967 - DNA, 15 bp, Homo sapiens
agataggaggatctg

SEQ ID NO: 741968 - DNA, 15 bp, Homo sapiens
gataggaggatctga

SEQ ID NO: 741969 - DNA, 15 bp, Homo sapiens
ataggaggatctgag

SEQ ID NO: 741970 - DNA, 15 bp, Homo sapiens
taggaggatctgagg

SEQ ID NO: 741971 - DNA, 15 bp, Homo sapiens
aggaggatctgaggc

SEQ ID NO: 741972 - DNA, 15 bp, Homo sapiens
ggaggatctgaggca

SEQ ID NO: 741973 - DNA, 15 bp, Homo sapiens
gaggatctgaggcac

SEQ ID NO: 741974 - DNA, 15 bp, Homo sapiens
aggatctgaggcact

SEQ ID NO: 741975 - DNA, 15 bp, Homo sapiens
ggatctgaggcactt

SEQ ID NO: 741976 - DNA, 15 bp, Homo sapiens
gatctgaggcacttg

SEQ ID NO: 741977 - DNA, 15 bp, Homo sapiens
atctgaggcacttgg

SEQ ID NO: 741978 - DNA, 15 bp, Homo sapiens
tctgaggcacttggt

SEQ ID NO: 741979 - DNA, 15 bp, Homo sapiens
ctgaggcacttggtg

SEQ ID NO: 741980 - DNA, 15 bp, Homo sapiens
tgaggcacttggtgg

SEQ ID NO: 741981 - DNA, 15 bp, Homo sapiens
gaggcacttggtggc

SEQ ID NO: 741982 - DNA, 15 bp, Homo sapiens
aggcacttggtggca

SEQ ID NO: 741983 - DNA, 15 bp, Homo sapiens
ggcacttggtggcaa

SEQ ID NO: 741984 - DNA, 15 bp, Homo sapiens
gcacttggtggcaac

SEQ ID NO: 741985 - DNA, 15 bp, Homo sapiens
cacttggtggcaact

SEQ ID NO: 741986 - DNA, 15 bp, Homo sapiens
acttggtggcaactg

SEQ ID NO: 741987 - DNA, 15 bp, Homo sapiens
cttggtggcaactgc

SEQ ID NO: 741988 - DNA, 15 bp, Homo sapiens
ttggtggcaactgct

SEQ ID NO: 741989 - DNA, 15 bp, Homo sapiens
tggtggcaactgctt

SEQ ID NO: 741990 - DNA, 15 bp, Homo sapiens
ggtggcaactgctta

SEQ ID NO: 741991 - DNA, 15 bp, Homo sapiens
gtggcaactgcttag

SEQ ID NO: 741992 - DNA, 15 bp, Homo sapiens
tggcaactgcttagg

SEQ ID NO: 741993 - DNA, 15 bp, Homo sapiens
ggcaactgcttaggc

SEQ ID NO: 741994 - DNA, 15 bp, Homo sapiens
gcaactgcttaggca

SEQ ID NO: 741995 - DNA, 15 bp, Homo sapiens
caactgcttaggcag

SEQ ID NO: 741996 - DNA, 15 bp, Homo sapiens
aactgcttaggcagc

SEQ ID NO: 741997 - DNA, 15 bp, Homo sapiens
actgcttaggcagca

SEQ ID NO: 741998 - DNA, 15 bp, Homo sapiens
ctgcttaggcagcaa

SEQ ID NO: 741999 - DNA, 15 bp, Homo sapiens
tgcttaggcagcaag

SEQ ID NO: 742000 - DNA, 15 bp, Homo sapiens
gcttaggcagcaagc

SEQ ID NO: 742001 - DNA, 15 bp, Homo sapiens
cttaggcagcaagcc

SEQ ID NO: 742002 - DNA, 15 bp, Homo sapiens
ttaggcagcaagcct

SEQ ID NO: 742003 - DNA, 15 bp, Homo sapiens
taggcagcaagcctc

SEQ ID NO: 742004 - DNA, 15 bp, Homo sapiens
aggcagcaagcctcc

SEQ ID NO: 742005 - DNA, 15 bp, Homo sapiens
ggcagcaagcctcca

SEQ ID NO: 742006 - DNA, 15 bp, Homo sapiens
gcagcaagcctccaa

SEQ ID NO: 742007 - DNA, 15 bp, Homo sapiens
cagcaagcctccaaa

SEQ ID NO: 742008 - DNA, 15 bp, Homo sapiens
agcaagcctccaaac

SEQ ID NO: 742009 - DNA, 15 bp, Homo sapiens
gcaagcctccaaaca

SEQ ID NO: 742010 - DNA, 15 bp, Homo sapiens
caagcctccaaacaa

SEQ ID NO: 742011 - DNA, 15 bp, Homo sapiens
aagcctccaaacaag

SEQ ID NO: 742012 - DNA, 15 bp, Homo sapiens
agcctccaaacaagc

SEQ ID NO: 742013 - DNA, 15 bp, Homo sapiens
gcctccaaacaagcc

SEQ ID NO: 742014 - DNA, 15 bp, Homo sapiens
cctccaaacaagcct

SEQ ID NO: 742015 - DNA, 15 bp, Homo sapiens
ctccaaacaagcctt

SEQ ID NO: 742016 - DNA, 15 bp, Homo sapiens
tccaaacaagccttt

SEQ ID NO: 742017 - DNA, 15 bp, Homo sapiens
ccaaacaagccttta

SEQ ID NO: 742018 - DNA, 15 bp, Homo sapiens
caaacaagcctttag

SEQ ID NO: 742019 - DNA, 15 bp, Homo sapiens
aaacaagcctttagc

SEQ ID NO: 742020 - DNA, 15 bp, Homo sapiens
aacaagcctttagca

SEQ ID NO: 742021 - DNA, 15 bp, Homo sapiens
acaagcctttagcaa

SEQ ID NO: 742022 - DNA, 15 bp, Homo sapiens
caagcctttagcaat

SEQ ID NO: 742023 - DNA, 15 bp, Homo sapiens
aagcctttagcaata

SEQ ID NO: 742024 - DNA, 15 bp, Homo sapiens
agcctttagcaatag

SEQ ID NO: 742025 - DNA, 15 bp, Homo sapiens
gcctttagcaatagg

SEQ ID NO: 742026 - DNA, 15 bp, Homo sapiens
cctttagcaatagga

SEQ ID NO: 742027 - DNA, 15 bp, Homo sapiens
ctttagcaataggaa

SEQ ID NO: 742028 - DNA, 15 bp, Homo sapiens
tttagcaataggaag

SEQ ID NO: 742029 - DNA, 15 bp, Homo sapiens
ttagcaataggaagc

SEQ ID NO: 742030 - DNA, 15 bp, Homo sapiens
tagcaataggaagcc

SEQ ID NO: 742031 - DNA, 15 bp, Homo sapiens
agcaataggaagcca

SEQ ID NO: 742032 - DNA, 15 bp, Homo sapiens
gcaataggaagccat

SEQ ID NO: 742033 - DNA, 15 bp, Homo sapiens
caataggaagccatt

SEQ ID NO: 742034 - DNA, 15 bp, Homo sapiens
aataggaagccattt

SEQ ID NO: 742035 - DNA, 15 bp, Homo sapiens
ataggaagccatttc

SEQ ID NO: 742036 - DNA, 15 bp, Homo sapiens
taggaagccatttcc

SEQ ID NO: 742037 - DNA, 15 bp, Homo sapiens
aggaagccatttcca

SEQ ID NO: 742038 - DNA, 15 bp, Homo sapiens
ggaagccatttccac

SEQ ID NO: 742039 - DNA, 15 bp, Homo sapiens
gaagccatttccaca

SEQ ID NO: 742040 - DNA, 15 bp, Homo sapiens
aagccatttccacac

SEQ ID NO: 742041 - DNA, 15 bp, Homo sapiens
agccatttccacaca

SEQ ID NO: 742042 - DNA, 15 bp, Homo sapiens
gccatttccacacat

SEQ ID NO: 742043 - DNA, 15 bp, Homo sapiens
ccatttccacacatc

SEQ ID NO: 742044 - DNA, 15 bp, Homo sapiens
catttccacacatcc

SEQ ID NO: 742045 - DNA, 15 bp, Homo sapiens
atttccacacatcca

SEQ ID NO: 742046 - DNA, 15 bp, Homo sapiens
tttccacacatccag

SEQ ID NO: 742047 - DNA, 15 bp, Homo sapiens
ttccacacatccaga

SEQ ID NO: 742048 - DNA, 15 bp, Homo sapiens
tccacacatccagat

SEQ ID NO: 742049 - DNA, 15 bp, Homo sapiens
ccacacatccagatc

SEQ ID NO: 742050 - DNA, 15 bp, Homo sapiens
cacacatccagatca

SEQ ID NO: 742051 - DNA, 15 bp, Homo sapiens
acacatccagatcac

SEQ ID NO: 742052 - DNA, 15 bp, Homo sapiens
cacatccagatcact

SEQ ID NO: 742053 - DNA, 15 bp, Homo sapiens
acatccagatcactt

SEQ ID NO: 742054 - DNA, 15 bp, Homo sapiens
catccagatcacttg

SEQ ID NO: 742055 - DNA, 15 bp, Homo sapiens
atccagatcacttgc

SEQ ID NO: 742056 - DNA, 15 bp, Homo sapiens
tccagatcacttgcc

SEQ ID NO: 742057 - DNA, 15 bp, Homo sapiens
ccagatcacttgcca

SEQ ID NO: 742058 - DNA, 15 bp, Homo sapiens
cagatcacttgccaa

SEQ ID NO: 742059 - DNA, 15 bp, Homo sapiens
agatcacttgccaag

SEQ ID NO: 742060 - DNA, 15 bp, Homo sapiens
gatcacttgccaagc

SEQ ID NO: 742061 - DNA, 15 bp, Homo sapiens
atcacttgccaagct

SEQ ID NO: 742062 - DNA, 15 bp, Homo sapiens
tcacttgccaagctg

SEQ ID NO: 742063 - DNA, 15 bp, Homo sapiens
cacttgccaagctga

SEQ ID NO: 742064 - DNA, 15 bp, Homo sapiens
acttgccaagctgat

SEQ ID NO: 742065 - DNA, 15 bp, Homo sapiens
cttgccaagctgatg

SEQ ID NO: 742066 - DNA, 15 bp, Homo sapiens
ttgccaagctgatgg

SEQ ID NO: 742067 - DNA, 15 bp, Homo sapiens
tgccaagctgatggg

SEQ ID NO: 742068 - DNA, 15 bp, Homo sapiens
gccaagctgatgggt

SEQ ID NO: 742069 - DNA, 15 bp, Homo sapiens
ccaagctgatgggtg

SEQ ID NO: 742070 - DNA, 15 bp, Homo sapiens
caagctgatgggtgc

SEQ ID NO: 742071 - DNA, 15 bp, Homo sapiens
aagctgatgggtgcc

SEQ ID NO: 742072 - DNA, 15 bp, Homo sapiens
agctgatgggtgcct

SEQ ID NO: 742073 - DNA, 15 bp, Homo sapiens
gctgatgggtgcctt

SEQ ID NO: 742074 - DNA, 15 bp, Homo sapiens
ctgatgggtgccttc

SEQ ID NO: 742075 - DNA, 15 bp, Homo sapiens
tgatgggtgccttcc

SEQ ID NO: 742076 - DNA, 15 bp, Homo sapiens
gatgggtgccttccc

SEQ ID NO: 742077 - DNA, 15 bp, Homo sapiens
atgggtgccttccct

SEQ ID NO: 742078 - DNA, 15 bp, Homo sapiens
tgggtgccttccctc

SEQ ID NO: 742079 - DNA, 15 bp, Homo sapiens
gggtgccttccctcc

SEQ ID NO: 742080 - DNA, 15 bp, Homo sapiens
ggtgccttccctcct

SEQ ID NO: 742081 - DNA, 15 bp, Homo sapiens
gtgccttccctcctg

SEQ ID NO: 742082 - DNA, 15 bp, Homo sapiens
tgccttccctcctgt

SEQ ID NO: 742083 - DNA, 15 bp, Homo sapiens
gccttccctcctgtc

SEQ ID NO: 742084 - DNA, 15 bp, Homo sapiens
ccttccctcctgtcc

SEQ ID NO: 742085 - DNA, 15 bp, Homo sapiens
cttccctcctgtccc

SEQ ID NO: 742086 - DNA, 15 bp, Homo sapiens
ttccctcctgtcccc

SEQ ID NO: 742087 - DNA, 15 bp, Homo sapiens
tccctcctgtcccca

SEQ ID NO: 742088 - DNA, 15 bp, Homo sapiens
ccctcctgtccccac

SEQ ID NO: 742089 - DNA, 15 bp, Homo sapiens
cctcctgtccccacc

SEQ ID NO: 742090 - DNA, 15 bp, Homo sapiens
ctcctgtccccacct

SEQ ID NO: 742091 - DNA, 15 bp, Homo sapiens
tcctgtccccacctc

SEQ ID NO: 742092 - DNA, 15 bp, Homo sapiens
cctgtccccacctct

SEQ ID NO: 742093 - DNA, 15 bp, Homo sapiens
ctgtccccacctctc

SEQ ID NO: 742094 - DNA, 15 bp, Homo sapiens
tgtccccacctctcc

SEQ ID NO: 742095 - DNA, 15 bp, Homo sapiens
gtccccacctctccc

SEQ ID NO: 742096 - DNA, 15 bp, Homo sapiens
tccccacctctcccc

SEQ ID NO: 742097 - DNA, 15 bp, Homo sapiens
ccccacctctccccg

SEQ ID NO: 742098 - DNA, 15 bp, Homo sapiens
cccacctctccccga

SEQ ID NO: 742099 - DNA, 15 bp, Homo sapiens
ccacctctccccgac

SEQ ID NO: 742100 - DNA, 15 bp, Homo sapiens
cacctctccccgacc

SEQ ID NO: 742101 - DNA, 15 bp, Homo sapiens
acctctccccgaccc

SEQ ID NO: 742102 - DNA, 15 bp, Homo sapiens
cctctccccgacccc

SEQ ID NO: 742103 - DNA, 15 bp, Homo sapiens
ctctccccgaccccc

SEQ ID NO: 742104 - DNA, 15 bp, Homo sapiens
tctccccgacccccg

SEQ ID NO: 742105 - DNA, 15 bp, Homo sapiens
ctccccgacccccgt

SEQ ID NO: 742106 - DNA, 15 bp, Homo sapiens
tccccgacccccgtc

SEQ ID NO: 742107 - DNA, 15 bp, Homo sapiens
ccccgacccccgtct

SEQ ID NO: 742108 - DNA, 15 bp, Homo sapiens
cccgacccccgtctc

SEQ ID NO: 742109 - DNA, 15 bp, Homo sapiens
ccgacccccgtctca

SEQ ID NO: 742110 - DNA, 15 bp, Homo sapiens
cgacccccgtctcac

SEQ ID NO: 742111 - DNA, 15 bp, Homo sapiens
gacccccgtctcacc

SEQ ID NO: 742112 - DNA, 15 bp, Homo sapiens
acccccgtctcaccc

SEQ ID NO: 742113 - DNA, 15 bp, Homo sapiens
cccccgtctcaccca

SEQ ID NO: 742114 - DNA, 15 bp, Homo sapiens
ccccgtctcacccac

SEQ ID NO: 742115 - DNA, 15 bp, Homo sapiens
cccgtctcacccaca

SEQ ID NO: 742116 - DNA, 15 bp, Homo sapiens
ccgtctcacccacag

SEQ ID NO: 742117 - DNA, 15 bp, Homo sapiens
cgtctcacccacaga

SEQ ID NO: 742118 - DNA, 15 bp, Homo sapiens
gtctcacccacagaa

SEQ ID NO: 742119 - DNA, 15 bp, Homo sapiens
tctcacccacagaaa

SEQ ID NO: 742120 - DNA, 15 bp, Homo sapiens
ctcacccacagaaaa

SEQ ID NO: 742121 - DNA, 15 bp, Homo sapiens
tcacccacagaaaag

SEQ ID NO: 742122 - DNA, 15 bp, Homo sapiens
cacccacagaaaagt

SEQ ID NO: 742123 - DNA, 15 bp, Homo sapiens
acccacagaaaagta

SEQ ID NO: 742124 - DNA, 15 bp, Homo sapiens
cccacagaaaagtag

SEQ ID NO: 742125 - DNA, 15 bp, Homo sapiens
ccacagaaaagtagc

SEQ ID NO: 742126 - DNA, 15 bp, Homo sapiens
cacagaaaagtagca

SEQ ID NO: 742127 - DNA, 15 bp, Homo sapiens
acagaaaagtagcac

SEQ ID NO: 742128 - DNA, 15 bp, Homo sapiens
cagaaaagtagcaca

SEQ ID NO: 742129 - DNA, 15 bp, Homo sapiens
agaaaagtagcacat

SEQ ID NO: 742130 - DNA, 15 bp, Homo sapiens
gaaaagtagcacata

SEQ ID NO: 742131 - DNA, 15 bp, Homo sapiens
aaaagtagcacatag

SEQ ID NO: 742132 - DNA, 15 bp, Homo sapiens
aaagtagcacataga

SEQ ID NO: 742133 - DNA, 15 bp, Homo sapiens
aagtagcacatagaa

SEQ ID NO: 742134 - DNA, 15 bp, Homo sapiens
agtagcacatagaaa

SEQ ID NO: 742135 - DNA, 15 bp, Homo sapiens
gtagcacatagaaaa

SEQ ID NO: 742136 - DNA, 15 bp, Homo sapiens
tagcacatagaaaat

SEQ ID NO: 742137 - DNA, 15 bp, Homo sapiens
agcacatagaaaata

SEQ ID NO: 742138 - DNA, 15 bp, Homo sapiens
gcacatagaaaatat

SEQ ID NO: 742139 - DNA, 15 bp, Homo sapiens
cacatagaaaatatg

SEQ ID NO: 742140 - DNA, 15 bp, Homo sapiens
acatagaaaatatgg

SEQ ID NO: 742141 - DNA, 15 bp, Homo sapiens
catagaaaatatggc

SEQ ID NO: 742142 - DNA, 15 bp, Homo sapiens
atagaaaatatggct

SEQ ID NO: 742143 - DNA, 15 bp, Homo sapiens
tagaaaatatggctt

SEQ ID NO: 742144 - DNA, 15 bp, Homo sapiens
agaaaatatggcttc

SEQ ID NO: 742145 - DNA, 15 bp, Homo sapiens
gaaaatatggcttcc

SEQ ID NO: 742146 - DNA, 15 bp, Homo sapiens
aaaatatggcttcca

SEQ ID NO: 742147 - DNA, 15 bp, Homo sapiens
aaatatggcttccag

SEQ ID NO: 742148 - DNA, 15 bp, Homo sapiens
tgtctgtgcagagcc

SEQ ID NO: 742149 - DNA, 15 bp, Homo sapiens
gtctgtgcagagcct

SEQ ID NO: 742150 - DNA, 15 bp, Homo sapiens
tctgtgcagagcctt

SEQ ID NO: 742151 - DNA, 15 bp, Homo sapiens
ctgtgcagagccttt

SEQ ID NO: 742152 - DNA, 15 bp, Homo sapiens
tgtgcagagcctttt

SEQ ID NO: 742153 - DNA, 15 bp, Homo sapiens
gtgcagagccttttc

SEQ ID NO: 742154 - DNA, 15 bp, Homo sapiens
tgcagagccttttcc

SEQ ID NO: 742155 - DNA, 15 bp, Homo sapiens
gcagagccttttcct

SEQ ID NO: 742156 - DNA, 15 bp, Homo sapiens
cagagccttttccta

SEQ ID NO: 742157 - DNA, 15 bp, Homo sapiens
agagccttttcctaa

SEQ ID NO: 742158 - DNA, 15 bp, Homo sapiens
gagccttttcctaaa

SEQ ID NO: 742159 - DNA, 15 bp, Homo sapiens
agccttttcctaaat

SEQ ID NO: 742160 - DNA, 15 bp, Homo sapiens
gccttttcctaaatt

SEQ ID NO: 742161 - DNA, 15 bp, Homo sapiens
ccttttcctaaattt

SEQ ID NO: 742162 - DNA, 15 bp, Homo sapiens
cttttcctaaatttg

SEQ ID NO: 742163 - DNA, 15 bp, Homo sapiens
ttttcctaaatttgt

SEQ ID NO: 742164 - DNA, 15 bp, Homo sapiens
tttcctaaatttgta

SEQ ID NO: 742165 - DNA, 15 bp, Homo sapiens
ttcctaaatttgtaa

SEQ ID NO: 742166 - DNA, 15 bp, Homo sapiens
tcctaaatttgtaat

SEQ ID NO: 742167 - DNA, 15 bp, Homo sapiens
cctaaatttgtaatg

SEQ ID NO: 742168 - DNA, 15 bp, Homo sapiens
ctaaatttgtaatgc

SEQ ID NO: 742169 - DNA, 15 bp, Homo sapiens
taaatttgtaatgcc

SEQ ID NO: 742170 - DNA, 15 bp, Homo sapiens
aaatttgtaatgcca

SEQ ID NO: 742171 - DNA, 15 bp, Homo sapiens
aatttgtaatgccag

SEQ ID NO: 742172 - DNA, 15 bp, Homo sapiens
atttgtaatgccagg

SEQ ID NO: 742173 - DNA, 15 bp, Homo sapiens
tttgtaatgccaggg

SEQ ID NO: 742174 - DNA, 15 bp, Homo sapiens
ttgtaatgccagggg

SEQ ID NO: 742175 - DNA, 15 bp, Homo sapiens
tgtaatgccaggggc

SEQ ID NO: 742176 - DNA, 15 bp, Homo sapiens
gtaatgccaggggcc

SEQ ID NO: 742177 - DNA, 15 bp, Homo sapiens
taatgccaggggcca

SEQ ID NO: 742178 - DNA, 15 bp, Homo sapiens
aatgccaggggccaa

SEQ ID NO: 742179 - DNA, 15 bp, Homo sapiens
atgccaggggccaag

SEQ ID NO: 742180 - DNA, 15 bp, Homo sapiens
tgccaggggccaagt

SEQ ID NO: 742181 - DNA, 15 bp, Homo sapiens
gccaggggccaagtt

SEQ ID NO: 742182 - DNA, 15 bp, Homo sapiens
ccaggggccaagttt

SEQ ID NO: 742183 - DNA, 15 bp, Homo sapiens
caggggccaagtttt

SEQ ID NO: 742184 - DNA, 15 bp, Homo sapiens
aggggccaagttttc

SEQ ID NO: 742185 - DNA, 15 bp, Homo sapiens
ggggccaagttttct

SEQ ID NO: 742186 - DNA, 15 bp, Homo sapiens
gggccaagttttctg

SEQ ID NO: 742187 - DNA, 15 bp, Homo sapiens
ggccaagttttctgg

SEQ ID NO: 742188 - DNA, 15 bp, Homo sapiens
gccaagttttctgga

SEQ ID NO: 742189 - DNA, 15 bp, Homo sapiens
ccaagttttctggaa

SEQ ID NO: 742190 - DNA, 15 bp, Homo sapiens
caagttttctggaag

SEQ ID NO: 742191 - DNA, 15 bp, Homo sapiens
aagttttctggaagt

SEQ ID NO: 742192 - DNA, 15 bp, Homo sapiens
agttttctggaagtg

SEQ ID NO: 742193 - DNA, 15 bp, Homo sapiens
gttttctggaagtgg

SEQ ID NO: 742194 - DNA, 15 bp, Homo sapiens
ttttctggaagtggt

SEQ ID NO: 742195 - DNA, 15 bp, Homo sapiens
tttctggaagtggtg

SEQ ID NO: 742196 - DNA, 15 bp, Homo sapiens
ttctggaagtggtgc

SEQ ID NO: 742197 - DNA, 15 bp, Homo sapiens
tctggaagtggtgca

SEQ ID NO: 742198 - DNA, 15 bp, Homo sapiens
ctggaagtggtgcaa

SEQ ID NO: 742199 - DNA, 15 bp, Homo sapiens
tggaagtggtgcaaa

SEQ ID NO: 742200 - DNA, 15 bp, Homo sapiens
ggaagtggtgcaaaa

SEQ ID NO: 742201 - DNA, 15 bp, Homo sapiens
gaagtggtgcaaaag

SEQ ID NO: 742202 - DNA, 15 bp, Homo sapiens
aagtggtgcaaaagt

SEQ ID NO: 742203 - DNA, 15 bp, Homo sapiens
agtggtgcaaaagtt

SEQ ID NO: 742204 - DNA, 15 bp, Homo sapiens
gtggtgcaaaagttt

SEQ ID NO: 742205 - DNA, 15 bp, Homo sapiens
tggtgcaaaagtttg

SEQ ID NO: 742206 - DNA, 15 bp, Homo sapiens
ggtgcaaaagtttgt

SEQ ID NO: 742207 - DNA, 15 bp, Homo sapiens
gtgcaaaagtttgtg

SEQ ID NO: 742208 - DNA, 15 bp, Homo sapiens
tgcaaaagtttgtga

SEQ ID NO: 742209 - DNA, 15 bp, Homo sapiens
gcaaaagtttgtgaa

SEQ ID NO: 742210 - DNA, 15 bp, Homo sapiens
caaaagtttgtgaac

SEQ ID NO: 742211 - DNA, 15 bp, Homo sapiens
aaaagtttgtgaaca

SEQ ID NO: 742212 - DNA, 15 bp, Homo sapiens
aaagtttgtgaacaa

SEQ ID NO: 742213 - DNA, 15 bp, Homo sapiens
aagtttgtgaacaat

SEQ ID NO: 742214 - DNA, 15 bp, Homo sapiens
agtttgtgaacaatg

SEQ ID NO: 742215 - DNA, 15 bp, Homo sapiens
gtttgtgaacaatgt

SEQ ID NO: 742216 - DNA, 15 bp, Homo sapiens
tttgtgaacaatgtg

SEQ ID NO: 742217 - DNA, 15 bp, Homo sapiens
ttgtgaacaatgtgg

SEQ ID NO: 742218 - DNA, 15 bp, Homo sapiens
tgtgaacaatgtgga

SEQ ID NO: 742219 - DNA, 15 bp, Homo sapiens
gtgaacaatgtggaa

SEQ ID NO: 742220 - DNA, 15 bp, Homo sapiens
tgaacaatgtggaaa

SEQ ID NO: 742221 - DNA, 15 bp, Homo sapiens
gaacaatgtggaaat

SEQ ID NO: 742222 - DNA, 15 bp, Homo sapiens
aacaatgtggaaatg

SEQ ID NO: 742223 - DNA, 15 bp, Homo sapiens
acaatgtggaaatgg

SEQ ID NO: 742224 - DNA, 15 bp, Homo sapiens
caatgtggaaatggc

SEQ ID NO: 742225 - DNA, 15 bp, Homo sapiens
aatgtggaaatggcc

SEQ ID NO: 742226 - DNA, 15 bp, Homo sapiens
atgtggaaatggcca

SEQ ID NO: 742227 - DNA, 15 bp, Homo sapiens
tgtggaaatggccag

SEQ ID NO: 742228 - DNA, 15 bp, Homo sapiens
gtggaaatggccaga

SEQ ID NO: 742229 - DNA, 15 bp, Homo sapiens
tggaaatggccagag

SEQ ID NO: 742230 - DNA, 15 bp, Homo sapiens
ggaaatggccagaga

SEQ ID NO: 742231 - DNA, 15 bp, Homo sapiens
gaaatggccagagag

SEQ ID NO: 742232 - DNA, 15 bp, Homo sapiens
aaatggccagagaga

SEQ ID NO: 742233 - DNA, 15 bp, Homo sapiens
aatggccagagagaa

SEQ ID NO: 742234 - DNA, 15 bp, Homo sapiens
atggccagagagaac

SEQ ID NO: 742235 - DNA, 15 bp, Homo sapiens
tggccagagagaact

SEQ ID NO: 742236 - DNA, 15 bp, Homo sapiens
ggccagagagaactg

SEQ ID NO: 742237 - DNA, 15 bp, Homo sapiens
gccagagagaactgg

SEQ ID NO: 742238 - DNA, 15 bp, Homo sapiens
ccagagagaactggg

SEQ ID NO: 742239 - DNA, 15 bp, Homo sapiens
cagagagaactgggc

SEQ ID NO: 742240 - DNA, 15 bp, Homo sapiens
agagagaactgggca

SEQ ID NO: 742241 - DNA, 15 bp, Homo sapiens
gagagaactgggcaa

SEQ ID NO: 742242 - DNA, 15 bp, Homo sapiens
agagaactgggcaaa

SEQ ID NO: 742243 - DNA, 15 bp, Homo sapiens
gagaactgggcaaag

SEQ ID NO: 742244 - DNA, 15 bp, Homo sapiens
agaactgggcaaagg

SEQ ID NO: 742245 - DNA, 15 bp, Homo sapiens
gaactgggcaaaggc

SEQ ID NO: 742246 - DNA, 15 bp, Homo sapiens
aactgggcaaaggcc

SEQ ID NO: 742247 - DNA, 15 bp, Homo sapiens
actgggcaaaggcct

SEQ ID NO: 742248 - DNA, 15 bp, Homo sapiens
ctgggcaaaggcctg

SEQ ID NO: 742249 - DNA, 15 bp, Homo sapiens
tgggcaaaggcctgg

SEQ ID NO: 742250 - DNA, 15 bp, Homo sapiens
gggcaaaggcctggg

SEQ ID NO: 742251 - DNA, 15 bp, Homo sapiens
ggcaaaggcctggga

SEQ ID NO: 742252 - DNA, 15 bp, Homo sapiens
gcaaaggcctgggaa

SEQ ID NO: 742253 - DNA, 15 bp, Homo sapiens
caaaggcctgggaat

SEQ ID NO: 742254 - DNA, 15 bp, Homo sapiens
aaaggcctgggaatg

SEQ ID NO: 742255 - DNA, 15 bp, Homo sapiens
aaggcctgggaatgt

SEQ ID NO: 742256 - DNA, 15 bp, Homo sapiens
aggcctgggaatgtc

SEQ ID NO: 742257 - DNA, 15 bp, Homo sapiens
ggcctgggaatgtct

SEQ ID NO: 742258 - DNA, 15 bp, Homo sapiens
gcctgggaatgtcta

SEQ ID NO: 742259 - DNA, 15 bp, Homo sapiens
cctgggaatgtctat

SEQ ID NO: 742260 - DNA, 15 bp, Homo sapiens
ctgggaatgtctatt

SEQ ID NO: 742261 - DNA, 15 bp, Homo sapiens
tgggaatgtctattt

SEQ ID NO: 742262 - DNA, 15 bp, Homo sapiens
gggaatgtctatttc

SEQ ID NO: 742263 - DNA, 15 bp, Homo sapiens
ggaatgtctatttct

SEQ ID NO: 742264 - DNA, 15 bp, Homo sapiens
gaatgtctatttctg

SEQ ID NO: 742265 - DNA, 15 bp, Homo sapiens
aatgtctatttctgg

SEQ ID NO: 742266 - DNA, 15 bp, Homo sapiens
atgtctatttctggt

SEQ ID NO: 742267 - DNA, 15 bp, Homo sapiens
tgtctatttctggtg

SEQ ID NO: 742268 - DNA, 15 bp, Homo sapiens
gtctatttctggtgg

SEQ ID NO: 742269 - DNA, 15 bp, Homo sapiens
tctatttctggtgga

SEQ ID NO: 742270 - DNA, 15 bp, Homo sapiens
ctatttctggtggat

SEQ ID NO: 742271 - DNA, 15 bp, Homo sapiens
tatttctggtggatg

SEQ ID NO: 742272 - DNA, 15 bp, Homo sapiens
atttctggtggatgg

SEQ ID NO: 742273 - DNA, 15 bp, Homo sapiens
tttctggtggatggt

SEQ ID NO: 742274 - DNA, 15 bp, Homo sapiens
ttctggtggatggta

SEQ ID NO: 742275 - DNA, 15 bp, Homo sapiens
tctggtggatggtag

SEQ ID NO: 742276 - DNA, 15 bp, Homo sapiens
ctggtggatggtagc

SEQ ID NO: 742277 - DNA, 15 bp, Homo sapiens
tggtggatggtagca

SEQ ID NO: 742278 - DNA, 15 bp, Homo sapiens
ggtggatggtagcac

SEQ ID NO: 742279 - DNA, 15 bp, Homo sapiens
gtggatggtagcact

SEQ ID NO: 742280 - DNA, 15 bp, Homo sapiens
tggatggtagcactc

SEQ ID NO: 742281 - DNA, 15 bp, Homo sapiens
ggatggtagcactct

SEQ ID NO: 742282 - DNA, 15 bp, Homo sapiens
gatggtagcactctc

SEQ ID NO: 742283 - DNA, 15 bp, Homo sapiens
atggtagcactctct

SEQ ID NO: 742284 - DNA, 15 bp, Homo sapiens
tggtagcactctctc

SEQ ID NO: 742285 - DNA, 15 bp, Homo sapiens
ggtagcactctctca

SEQ ID NO: 742286 - DNA, 15 bp, Homo sapiens
gtagcactctctcag

SEQ ID NO: 742287 - DNA, 15 bp, Homo sapiens
tagcactctctcagt

SEQ ID NO: 742288 - DNA, 15 bp, Homo sapiens
agcactctctcagtg

SEQ ID NO: 742289 - DNA, 15 bp, Homo sapiens
gcactctctcagtgc

SEQ ID NO: 742290 - DNA, 15 bp, Homo sapiens
cactctctcagtgct

SEQ ID NO: 742291 - DNA, 15 bp, Homo sapiens
actctctcagtgctt

SEQ ID NO: 742292 - DNA, 15 bp, Homo sapiens
ctctctcagtgctta

SEQ ID NO: 742293 - DNA, 15 bp, Homo sapiens
tctctcagtgcttac

SEQ ID NO: 742294 - DNA, 15 bp, Homo sapiens
ctctcagtgcttacc

SEQ ID NO: 742295 - DNA, 15 bp, Homo sapiens
tctcagtgcttacca

SEQ ID NO: 742296 - DNA, 15 bp, Homo sapiens
ctcagtgcttaccag

SEQ ID NO: 742297 - DNA, 15 bp, Homo sapiens
tcagtgcttaccagc

SEQ ID NO: 742298 - DNA, 15 bp, Homo sapiens
cagtgcttaccagcc

SEQ ID NO: 742299 - DNA, 15 bp, Homo sapiens
agtgcttaccagcca

SEQ ID NO: 742300 - DNA, 15 bp, Homo sapiens
gtgcttaccagccag

SEQ ID NO: 742301 - DNA, 15 bp, Homo sapiens
tgcttaccagccagg

SEQ ID NO: 742302 - DNA, 15 bp, Homo sapiens
gcttaccagccaggc

SEQ ID NO: 742303 - DNA, 15 bp, Homo sapiens
cttaccagccaggcc

SEQ ID NO: 742304 - DNA, 15 bp, Homo sapiens
ttaccagccaggcca

SEQ ID NO: 742305 - DNA, 15 bp, Homo sapiens
taccagccaggccat

SEQ ID NO: 742306 - DNA, 15 bp, Homo sapiens
accagccaggccatt

SEQ ID NO: 742307 - DNA, 15 bp, Homo sapiens
ccagccaggccattc

SEQ ID NO: 742308 - DNA, 15 bp, Homo sapiens
cagccaggccattca

SEQ ID NO: 742309 - DNA, 15 bp, Homo sapiens
agccaggccattcag

SEQ ID NO: 742310 - DNA, 15 bp, Homo sapiens
gccaggccattcagg

SEQ ID NO: 742311 - DNA, 15 bp, Homo sapiens
ccaggccattcaggg

SEQ ID NO: 742312 - DNA, 15 bp, Homo sapiens
caggccattcaggga

SEQ ID NO: 742313 - DNA, 15 bp, Homo sapiens
aggccattcagggag

SEQ ID NO: 742314 - DNA, 15 bp, Homo sapiens
ggccattcagggagg

SEQ ID NO: 742315 - DNA, 15 bp, Homo sapiens
gccattcagggagga

SEQ ID NO: 742316 - DNA, 15 bp, Homo sapiens
ccattcagggaggag

SEQ ID NO: 742317 - DNA, 15 bp, Homo sapiens
cattcagggaggagg

SEQ ID NO: 742318 - DNA, 15 bp, Homo sapiens
attcagggaggaggt

SEQ ID NO: 742319 - DNA, 15 bp, Homo sapiens
ttcagggaggaggtg

SEQ ID NO: 742320 - DNA, 15 bp, Homo sapiens
tcagggaggaggtga

SEQ ID NO: 742321 - DNA, 15 bp, Homo sapiens
cagggaggaggtgag

SEQ ID NO: 742322 - DNA, 15 bp, Homo sapiens
agggaggaggtgaga

SEQ ID NO: 742323 - DNA, 15 bp, Homo sapiens
gggaggaggtgagag

SEQ ID NO: 742324 - DNA, 15 bp, Homo sapiens
ggaggaggtgagaga

SEQ ID NO: 742325 - DNA, 15 bp, Homo sapiens
gaggaggtgagagac

SEQ ID NO: 742326 - DNA, 15 bp, Homo sapiens
aggaggtgagagact

SEQ ID NO: 742327 - DNA, 15 bp, Homo sapiens
ggaggtgagagactg

SEQ ID NO: 742328 - DNA, 15 bp, Homo sapiens
gaggtgagagactgg

SEQ ID NO: 742329 - DNA, 15 bp, Homo sapiens
aggtgagagactggg

SEQ ID NO: 742330 - DNA, 15 bp, Homo sapiens
ggtgagagactgggg

SEQ ID NO: 742331 - DNA, 15 bp, Homo sapiens
gtgagagactgggga

SEQ ID NO: 742332 - DNA, 15 bp, Homo sapiens
tgagagactggggat

SEQ ID NO: 742333 - DNA, 15 bp, Homo sapiens
gagagactggggatt

SEQ ID NO: 742334 - DNA, 15 bp, Homo sapiens
agagactggggattg

SEQ ID NO: 742335 - DNA, 15 bp, Homo sapiens
gagactggggattgt

SEQ ID NO: 742336 - DNA, 15 bp, Homo sapiens
agactggggattgta

SEQ ID NO: 742337 - DNA, 15 bp, Homo sapiens
gactggggattgtag

SEQ ID NO: 742338 - DNA, 15 bp, Homo sapiens
actggggattgtagg

SEQ ID NO: 742339 - DNA, 15 bp, Homo sapiens
ctggggattgtagga

SEQ ID NO: 742340 - DNA, 15 bp, Homo sapiens
tggggattgtaggaa

SEQ ID NO: 742341 - DNA, 15 bp, Homo sapiens
ggggattgtaggaag

SEQ ID NO: 742342 - DNA, 15 bp, Homo sapiens
gggattgtaggaagg

SEQ ID NO: 742343 - DNA, 15 bp, Homo sapiens
ggattgtaggaagga

SEQ ID NO: 742344 - DNA, 15 bp, Homo sapiens
gattgtaggaaggaa

SEQ ID NO: 742345 - DNA, 15 bp, Homo sapiens
attgtaggaaggaaa

SEQ ID NO: 742346 - DNA, 15 bp, Homo sapiens
ttgtaggaaggaaag

SEQ ID NO: 742347 - DNA, 15 bp, Homo sapiens
tgtaggaaggaaagg

SEQ ID NO: 742348 - DNA, 15 bp, Homo sapiens
gtaggaaggaaagga

SEQ ID NO: 742349 - DNA, 15 bp, Homo sapiens
taggaaggaaaggat

SEQ ID NO: 742350 - DNA, 15 bp, Homo sapiens
aggaaggaaaggata

SEQ ID NO: 742351 - DNA, 15 bp, Homo sapiens
ggaaggaaaggatat

SEQ ID NO: 742352 - DNA, 15 bp, Homo sapiens
gaaggaaaggatatt

SEQ ID NO: 742353 - DNA, 15 bp, Homo sapiens
aaggaaaggatattg

SEQ ID NO: 742354 - DNA, 15 bp, Homo sapiens
aggaaaggatattga

SEQ ID NO: 742355 - DNA, 15 bp, Homo sapiens
ggaaaggatattgac

SEQ ID NO: 742356 - DNA, 15 bp, Homo sapiens
gaaaggatattgaca

SEQ ID NO: 742357 - DNA, 15 bp, Homo sapiens
aaaggatattgacat

SEQ ID NO: 742358 - DNA, 15 bp, Homo sapiens
aaggatattgacatc

SEQ ID NO: 742359 - DNA, 15 bp, Homo sapiens
aggatattgacatca

SEQ ID NO: 742360 - DNA, 15 bp, Homo sapiens
ggatattgacatcaa

SEQ ID NO: 742361 - DNA, 15 bp, Homo sapiens
gatattgacatcaac

SEQ ID NO: 742362 - DNA, 15 bp, Homo sapiens
atattgacatcaaca

SEQ ID NO: 742363 - DNA, 15 bp, Homo sapiens
tattgacatcaacac

SEQ ID NO: 742364 - DNA, 15 bp, Homo sapiens
attgacatcaacact

SEQ ID NO: 742365 - DNA, 15 bp, Homo sapiens
ttgacatcaacactg

SEQ ID NO: 742366 - DNA, 15 bp, Homo sapiens
tgacatcaacactga

SEQ ID NO: 742367 - DNA, 15 bp, Homo sapiens
gacatcaacactgag

SEQ ID NO: 742368 - DNA, 15 bp, Homo sapiens
acatcaacactgaga

SEQ ID NO: 742369 - DNA, 15 bp, Homo sapiens
catcaacactgagag

SEQ ID NO: 742370 - DNA, 15 bp, Homo sapiens
atcaacactgagagt

SEQ ID NO: 742371 - DNA, 15 bp, Homo sapiens
tcaacactgagagtt

SEQ ID NO: 742372 - DNA, 15 bp, Homo sapiens
caacactgagagttt

SEQ ID NO: 742373 - DNA, 15 bp, Homo sapiens
aacactgagagtttc

SEQ ID NO: 742374 - DNA, 15 bp, Homo sapiens
acactgagagtttct

SEQ ID NO: 742375 - DNA, 15 bp, Homo sapiens
cactgagagtttctg

SEQ ID NO: 742376 - DNA, 15 bp, Homo sapiens
actgagagtttctga

SEQ ID NO: 742377 - DNA, 15 bp, Homo sapiens
ctgagagtttctgat

SEQ ID NO: 742378 - DNA, 15 bp, Homo sapiens
tgagagtttctgatg

SEQ ID NO: 742379 - DNA, 15 bp, Homo sapiens
gagagtttctgatga

SEQ ID NO: 742380 - DNA, 15 bp, Homo sapiens
agagtttctgatgat

SEQ ID NO: 742381 - DNA, 15 bp, Homo sapiens
gagtttctgatgatt

SEQ ID NO: 742382 - DNA, 15 bp, Homo sapiens
agtttctgatgattc

SEQ ID NO: 742383 - DNA, 15 bp, Homo sapiens
gtttctgatgattcc

SEQ ID NO: 742384 - DNA, 15 bp, Homo sapiens
tttctgatgattcct

SEQ ID NO: 742385 - DNA, 15 bp, Homo sapiens
ttctgatgattcctg

SEQ ID NO: 742386 - DNA, 15 bp, Homo sapiens
tctgatgattcctga

SEQ ID NO: 742387 - DNA, 15 bp, Homo sapiens
ctgatgattcctgac

SEQ ID NO: 742388 - DNA, 15 bp, Homo sapiens
tgatgattcctgact

SEQ ID NO: 742389 - DNA, 15 bp, Homo sapiens
gatgattcctgacta

SEQ ID NO: 742390 - DNA, 15 bp, Homo sapiens
atgattcctgactaa

SEQ ID NO: 742391 - DNA, 15 bp, Homo sapiens
tgattcctgactaag

SEQ ID NO: 742392 - DNA, 15 bp, Homo sapiens
gattcctgactaagc

SEQ ID NO: 742393 - DNA, 15 bp, Homo sapiens
attcctgactaagcc

SEQ ID NO: 742394 - DNA, 15 bp, Homo sapiens
ttcctgactaagccg

SEQ ID NO: 742395 - DNA, 15 bp, Homo sapiens
tcctgactaagccga

SEQ ID NO: 742396 - DNA, 15 bp, Homo sapiens
cctgactaagccgag

SEQ ID NO: 742397 - DNA, 15 bp, Homo sapiens
ctgactaagccgagg

SEQ ID NO: 742398 - DNA, 15 bp, Homo sapiens
tgactaagccgaggc

SEQ ID NO: 742399 - DNA, 15 bp, Homo sapiens
gactaagccgaggct

SEQ ID NO: 742400 - DNA, 15 bp, Homo sapiens
actaagccgaggctt

SEQ ID NO: 742401 - DNA, 15 bp, Homo sapiens
ctaagccgaggcttt

SEQ ID NO: 742402 - DNA, 15 bp, Homo sapiens
taagccgaggctttg

SEQ ID NO: 742403 - DNA, 15 bp, Homo sapiens
aagccgaggctttgg

SEQ ID NO: 742404 - DNA, 15 bp, Homo sapiens
agccgaggctttgga

SEQ ID NO: 742405 - DNA, 15 bp, Homo sapiens
gccgaggctttggac

SEQ ID NO: 742406 - DNA, 15 bp, Homo sapiens
ccgaggctttggaca

SEQ ID NO: 742407 - DNA, 15 bp, Homo sapiens
cgaggctttggacag

SEQ ID NO: 742408 - DNA, 15 bp, Homo sapiens
gaggctttggacagc

SEQ ID NO: 742409 - DNA, 15 bp, Homo sapiens
aggctttggacagca

SEQ ID NO: 742410 - DNA, 15 bp, Homo sapiens
ggctttggacagcac

SEQ ID NO: 742411 - DNA, 15 bp, Homo sapiens
gctttggacagcaca

SEQ ID NO: 742412 - DNA, 15 bp, Homo sapiens
ctttggacagcacag

SEQ ID NO: 742413 - DNA, 15 bp, Homo sapiens
tttggacagcacaga

SEQ ID NO: 742414 - DNA, 15 bp, Homo sapiens
ttggacagcacagaa

SEQ ID NO: 742415 - DNA, 15 bp, Homo sapiens
tggacagcacagaag

SEQ ID NO: 742416 - DNA, 15 bp, Homo sapiens
ggacagcacagaagt

SEQ ID NO: 742417 - DNA, 15 bp, Homo sapiens
gacagcacagaagtt

SEQ ID NO: 742418 - DNA, 15 bp, Homo sapiens
acagcacagaagttg

SEQ ID NO: 742419 - DNA, 15 bp, Homo sapiens
cagcacagaagttgc

SEQ ID NO: 742420 - DNA, 15 bp, Homo sapiens
agcacagaagttgct

SEQ ID NO: 742421 - DNA, 15 bp, Homo sapiens
gcacagaagttgcta

SEQ ID NO: 742422 - DNA, 15 bp, Homo sapiens
cacagaagttgctaa

SEQ ID NO: 742423 - DNA, 15 bp, Homo sapiens
acagaagttgctaaa

SEQ ID NO: 742424 - DNA, 15 bp, Homo sapiens
cagaagttgctaaaa

SEQ ID NO: 742425 - DNA, 15 bp, Homo sapiens
agaagttgctaaaag

SEQ ID NO: 742426 - DNA, 15 bp, Homo sapiens
gaagttgctaaaagc

SEQ ID NO: 742427 - DNA, 15 bp, Homo sapiens
aagttgctaaaagct

SEQ ID NO: 742428 - DNA, 15 bp, Homo sapiens
agttgctaaaagctt

SEQ ID NO: 742429 - DNA, 15 bp, Homo sapiens
gttgctaaaagcttc

SEQ ID NO: 742430 - DNA, 15 bp, Homo sapiens
ttgctaaaagcttca

SEQ ID NO: 742431 - DNA, 15 bp, Homo sapiens
tgctaaaagcttcaa

SEQ ID NO: 742432 - DNA, 15 bp, Homo sapiens
gctaaaagcttcaat

SEQ ID NO: 742433 - DNA, 15 bp, Homo sapiens
ctaaaagcttcaatc

SEQ ID NO: 742434 - DNA, 15 bp, Homo sapiens
taaaagcttcaatca

SEQ ID NO: 742435 - DNA, 15 bp, Homo sapiens
aaaagcttcaatcag

SEQ ID NO: 742436 - DNA, 15 bp, Homo sapiens
aaagcttcaatcagc

SEQ ID NO: 742437 - DNA, 15 bp, Homo sapiens
aagcttcaatcagca

SEQ ID NO: 742438 - DNA, 15 bp, Homo sapiens
agcttcaatcagcag

SEQ ID NO: 742439 - DNA, 15 bp, Homo sapiens
gcttcaatcagcaga

SEQ ID NO: 742440 - DNA, 15 bp, Homo sapiens
cttcaatcagcagag

SEQ ID NO: 742441 - DNA, 15 bp, Homo sapiens
ttcaatcagcagagg

SEQ ID NO: 742442 - DNA, 15 bp, Homo sapiens
tcaatcagcagaggc

SEQ ID NO: 742443 - DNA, 15 bp, Homo sapiens
caatcagcagaggca

SEQ ID NO: 742444 - DNA, 15 bp, Homo sapiens
aatcagcagaggcag

SEQ ID NO: 742445 - DNA, 15 bp, Homo sapiens
atcagcagaggcagg

SEQ ID NO: 742446 - DNA, 15 bp, Homo sapiens
tcagcagaggcaggg

SEQ ID NO: 742447 - DNA, 15 bp, Homo sapiens
cagcagaggcagggg

SEQ ID NO: 742448 - DNA, 15 bp, Homo sapiens
agcagaggcaggggt

SEQ ID NO: 742449 - DNA, 15 bp, Homo sapiens
gcagaggcaggggtg

SEQ ID NO: 742450 - DNA, 15 bp, Homo sapiens
cagaggcaggggtga

SEQ ID NO: 742451 - DNA, 15 bp, Homo sapiens
agaggcaggggtgat

SEQ ID NO: 742452 - DNA, 15 bp, Homo sapiens
gaggcaggggtgatg

SEQ ID NO: 742453 - DNA, 15 bp, Homo sapiens
aggcaggggtgatga

SEQ ID NO: 742454 - DNA, 15 bp, Homo sapiens
ggcaggggtgatgaa

SEQ ID NO: 742455 - DNA, 15 bp, Homo sapiens
gcaggggtgatgaag

SEQ ID NO: 742456 - DNA, 15 bp, Homo sapiens
caggggtgatgaaga

SEQ ID NO: 742457 - DNA, 15 bp, Homo sapiens
aggggtgatgaagag

SEQ ID NO: 742458 - DNA, 15 bp, Homo sapiens
ggggtgatgaagaga

SEQ ID NO: 742459 - DNA, 15 bp, Homo sapiens
gggtgatgaagagag

SEQ ID NO: 742460 - DNA, 15 bp, Homo sapiens
ggtgatgaagagagc

SEQ ID NO: 742461 - DNA, 15 bp, Homo sapiens
gtgatgaagagagca

SEQ ID NO: 742462 - DNA, 15 bp, Homo sapiens
tgatgaagagagcag

SEQ ID NO: 742463 - DNA, 15 bp, Homo sapiens
gatgaagagagcagg

SEQ ID NO: 742464 - DNA, 15 bp, Homo sapiens
atgaagagagcagga

SEQ ID NO: 742465 - DNA, 15 bp, Homo sapiens
tgaagagagcaggag

SEQ ID NO: 742466 - DNA, 15 bp, Homo sapiens
gaagagagcaggaga

SEQ ID NO: 742467 - DNA, 15 bp, Homo sapiens
aagagagcaggagat

SEQ ID NO: 742468 - DNA, 15 bp, Homo sapiens
agagagcaggagatg

SEQ ID NO: 742469 - DNA, 15 bp, Homo sapiens
gagagcaggagatgg

SEQ ID NO: 742470 - DNA, 15 bp, Homo sapiens
agagcaggagatggc

SEQ ID NO: 742471 - DNA, 15 bp, Homo sapiens
gagcaggagatggca

SEQ ID NO: 742472 - DNA, 15 bp, Homo sapiens
agcaggagatggcat

SEQ ID NO: 742473 - DNA, 15 bp, Homo sapiens
gcaggagatggcatc

SEQ ID NO: 742474 - DNA, 15 bp, Homo sapiens
caggagatggcatct

SEQ ID NO: 742475 - DNA, 15 bp, Homo sapiens
aggagatggcatctg

SEQ ID NO: 742476 - DNA, 15 bp, Homo sapiens
ggagatggcatctga

SEQ ID NO: 742477 - DNA, 15 bp, Homo sapiens
gagatggcatctgag

SEQ ID NO: 742478 - DNA, 15 bp, Homo sapiens
agatggcatctgagg

SEQ ID NO: 742479 - DNA, 15 bp, Homo sapiens
gatggcatctgaggg

SEQ ID NO: 742480 - DNA, 15 bp, Homo sapiens
atggcatctgagggg

SEQ ID NO: 742481 - DNA, 15 bp, Homo sapiens
tggcatctgaggggc

SEQ ID NO: 742482 - DNA, 15 bp, Homo sapiens
ggcatctgaggggcc

SEQ ID NO: 742483 - DNA, 15 bp, Homo sapiens
gcatctgaggggcct

SEQ ID NO: 742484 - DNA, 15 bp, Homo sapiens
catctgaggggcctc

SEQ ID NO: 742485 - DNA, 15 bp, Homo sapiens
atctgaggggcctcc

SEQ ID NO: 742486 - DNA, 15 bp, Homo sapiens
tctgaggggcctcca

SEQ ID NO: 742487 - DNA, 15 bp, Homo sapiens
ctgaggggcctccaa

SEQ ID NO: 742488 - DNA, 15 bp, Homo sapiens
tgaggggcctccaag

SEQ ID NO: 742489 - DNA, 15 bp, Homo sapiens
gaggggcctccaagc

SEQ ID NO: 742490 - DNA, 15 bp, Homo sapiens
aggggcctccaagca

SEQ ID NO: 742491 - DNA, 15 bp, Homo sapiens
ggggcctccaagcac

SEQ ID NO: 742492 - DNA, 15 bp, Homo sapiens
gggcctccaagcacc

SEQ ID NO: 742493 - DNA, 15 bp, Homo sapiens
ggcctccaagcaccc

SEQ ID NO: 742494 - DNA, 15 bp, Homo sapiens
gcctccaagcaccct

SEQ ID NO: 742495 - DNA, 15 bp, Homo sapiens
cctccaagcaccctc

SEQ ID NO: 742496 - DNA, 15 bp, Homo sapiens
ctccaagcaccctct

SEQ ID NO: 742497 - DNA, 15 bp, Homo sapiens
tccaagcaccctctc

SEQ ID NO: 742498 - DNA, 15 bp, Homo sapiens
ccaagcaccctctcc

SEQ ID NO: 742499 - DNA, 15 bp, Homo sapiens
caagcaccctctcca

SEQ ID NO: 742500 - DNA, 15 bp, Homo sapiens
aagcaccctctccaa

SEQ ID NO: 742501 - DNA, 15 bp, Homo sapiens
agcaccctctccaaa

SEQ ID NO: 742502 - DNA, 15 bp, Homo sapiens
gcaccctctccaaag

SEQ ID NO: 742503 - DNA, 15 bp, Homo sapiens
caccctctccaaaga

SEQ ID NO: 742504 - DNA, 15 bp, Homo sapiens
accctctccaaagat

SEQ ID NO: 742505 - DNA, 15 bp, Homo sapiens
ccctctccaaagatg

SEQ ID NO: 742506 - DNA, 15 bp, Homo sapiens
cctctccaaagatgc

SEQ ID NO: 742507 - DNA, 15 bp, Homo sapiens
ctctccaaagatgct

SEQ ID NO: 742508 - DNA, 15 bp, Homo sapiens
tctccaaagatgctg

SEQ ID NO: 742509 - DNA, 15 bp, Homo sapiens
ctccaaagatgctga

SEQ ID NO: 742510 - DNA, 15 bp, Homo sapiens
tccaaagatgctgag

SEQ ID NO: 742511 - DNA, 15 bp, Homo sapiens
ccaaagatgctgagg

SEQ ID NO: 742512 - DNA, 15 bp, Homo sapiens
caaagatgctgaggt

SEQ ID NO: 742513 - DNA, 15 bp, Homo sapiens
aaagatgctgaggtg

SEQ ID NO: 742514 - DNA, 15 bp, Homo sapiens
aagatgctgaggtga

SEQ ID NO: 742515 - DNA, 15 bp, Homo sapiens
agatgctgaggtgat

SEQ ID NO: 742516 - DNA, 15 bp, Homo sapiens
gatgctgaggtgatg

SEQ ID NO: 742517 - DNA, 15 bp, Homo sapiens
atgctgaggtgatga

SEQ ID NO: 742518 - DNA, 15 bp, Homo sapiens
tgctgaggtgatgaa

SEQ ID NO: 742519 - DNA, 15 bp, Homo sapiens
gctgaggtgatgaag

SEQ ID NO: 742520 - DNA, 15 bp, Homo sapiens
ctgaggtgatgaagg

SEQ ID NO: 742521 - DNA, 15 bp, Homo sapiens
tgaggtgatgaaggt

SEQ ID NO: 742522 - DNA, 15 bp, Homo sapiens
gaggtgatgaaggtg

SEQ ID NO: 742523 - DNA, 15 bp, Homo sapiens
aggtgatgaaggtga

SEQ ID NO: 742524 - DNA, 15 bp, Homo sapiens
ggtgatgaaggtgat

SEQ ID NO: 742525 - DNA, 15 bp, Homo sapiens
gtgatgaaggtgatg

SEQ ID NO: 742526 - DNA, 15 bp, Homo sapiens
tgatgaaggtgatga

SEQ ID NO: 742527 - DNA, 15 bp, Homo sapiens
gatgaaggtgatgat

SEQ ID NO: 742528 - DNA, 15 bp, Homo sapiens
atgaaggtgatgatg

SEQ ID NO: 742529 - DNA, 15 bp, Homo sapiens
tgaaggtgatgatgg

SEQ ID NO: 742530 - DNA, 15 bp, Homo sapiens
gaaggtgatgatgga

SEQ ID NO: 742531 - DNA, 15 bp, Homo sapiens
aaggtgatgatggag

SEQ ID NO: 742532 - DNA, 15 bp, Homo sapiens
aggtgatgatggagg

SEQ ID NO: 742533 - DNA, 15 bp, Homo sapiens
ggtgatgatggagga

SEQ ID NO: 742534 - DNA, 15 bp, Homo sapiens
gtgatgatggaggag

SEQ ID NO: 742535 - DNA, 15 bp, Homo sapiens
tgatgatggaggaga

SEQ ID NO: 742536 - DNA, 15 bp, Homo sapiens
gatgatggaggagaa

SEQ ID NO: 742537 - DNA, 15 bp, Homo sapiens
atgatggaggagaaa

SEQ ID NO: 742538 - DNA, 15 bp, Homo sapiens
tgatggaggagaaaa

SEQ ID NO: 742539 - DNA, 15 bp, Homo sapiens
gatggaggagaaaaa

SEQ ID NO: 742540 - DNA, 15 bp, Homo sapiens
atggaggagaaaaag

SEQ ID NO: 742541 - DNA, 15 bp, Homo sapiens
tggaggagaaaaagc

SEQ ID NO: 742542 - DNA, 15 bp, Homo sapiens
ggaggagaaaaagct

SEQ ID NO: 742543 - DNA, 15 bp, Homo sapiens
gaggagaaaaagcta

SEQ ID NO: 742544 - DNA, 15 bp, Homo sapiens
aggagaaaaagctat

SEQ ID NO: 742545 - DNA, 15 bp, Homo sapiens
ggagaaaaagctata

SEQ ID NO: 742546 - DNA, 15 bp, Homo sapiens
gagaaaaagctatag

SEQ ID NO: 742547 - DNA, 15 bp, Homo sapiens
agaaaaagctataga

SEQ ID NO: 742548 - DNA, 15 bp, Homo sapiens
gaaaaagctatagat

SEQ ID NO: 742549 - DNA, 15 bp, Homo sapiens
aaaaagctatagatc

SEQ ID NO: 742550 - DNA, 15 bp, Homo sapiens
aaaagctatagatcc

SEQ ID NO: 742551 - DNA, 15 bp, Homo sapiens
aaagctatagatcct

SEQ ID NO: 742552 - DNA, 15 bp, Homo sapiens
aagctatagatcctg

SEQ ID NO: 742553 - DNA, 15 bp, Homo sapiens
agctatagatcctgc

SEQ ID NO: 742554 - DNA, 15 bp, Homo sapiens
gctatagatcctgca

SEQ ID NO: 742555 - DNA, 15 bp, Homo sapiens
ctatagatcctgcag

SEQ ID NO: 742556 - DNA, 15 bp, Homo sapiens
tatagatcctgcagt

SEQ ID NO: 742557 - DNA, 15 bp, Homo sapiens
atagatcctgcagtt

SEQ ID NO: 742558 - DNA, 15 bp, Homo sapiens
tagatcctgcagttg

SEQ ID NO: 742559 - DNA, 15 bp, Homo sapiens
agatcctgcagttgg

SEQ ID NO: 742560 - DNA, 15 bp, Homo sapiens
gatcctgcagttggg

SEQ ID NO: 742561 - DNA, 15 bp, Homo sapiens
atcctgcagttgggg

SEQ ID NO: 742562 - DNA, 15 bp, Homo sapiens
tcctgcagttggggt

SEQ ID NO: 742563 - DNA, 15 bp, Homo sapiens
cctgcagttggggtg

SEQ ID NO: 742564 - DNA, 15 bp, Homo sapiens
ctgcagttggggtga

SEQ ID NO: 742565 - DNA, 15 bp, Homo sapiens
tgcagttggggtgac

SEQ ID NO: 742566 - DNA, 15 bp, Homo sapiens
gcagttggggtgaca

SEQ ID NO: 742567 - DNA, 15 bp, Homo sapiens
cagttggggtgacag

SEQ ID NO: 742568 - DNA, 15 bp, Homo sapiens
agttggggtgacaga

SEQ ID NO: 742569 - DNA, 15 bp, Homo sapiens
gttggggtgacagaa

SEQ ID NO: 742570 - DNA, 15 bp, Homo sapiens
ttggggtgacagaag

SEQ ID NO: 742571 - DNA, 15 bp, Homo sapiens
tggggtgacagaagt

SEQ ID NO: 742572 - DNA, 15 bp, Homo sapiens
ggggtgacagaagtc

SEQ ID NO: 742573 - DNA, 15 bp, Homo sapiens
gggtgacagaagtca

SEQ ID NO: 742574 - DNA, 15 bp, Homo sapiens
ggtgacagaagtcac

SEQ ID NO: 742575 - DNA, 15 bp, Homo sapiens
gtgacagaagtcacg

SEQ ID NO: 742576 - DNA, 15 bp, Homo sapiens
tgacagaagtcacgg

SEQ ID NO: 742577 - DNA, 15 bp, Homo sapiens
gacagaagtcacggc

SEQ ID NO: 742578 - DNA, 15 bp, Homo sapiens
acagaagtcacggcc

SEQ ID NO: 742579 - DNA, 15 bp, Homo sapiens
cagaagtcacggcca

SEQ ID NO: 742580 - DNA, 15 bp, Homo sapiens
agaagtcacggccat

SEQ ID NO: 742581 - DNA, 15 bp, Homo sapiens
gaagtcacggccatc

SEQ ID NO: 742582 - DNA, 15 bp, Homo sapiens
aagtcacggccatcg

SEQ ID NO: 742583 - DNA, 15 bp, Homo sapiens
agtcacggccatcgg

SEQ ID NO: 742584 - DNA, 15 bp, Homo sapiens
gtcacggccatcggc

SEQ ID NO: 742585 - DNA, 15 bp, Homo sapiens
tcacggccatcggct

SEQ ID NO: 742586 - DNA, 15 bp, Homo sapiens
cacggccatcggctg

SEQ ID NO: 742587 - DNA, 15 bp, Homo sapiens
acggccatcggctgc

SEQ ID NO: 742588 - DNA, 15 bp, Homo sapiens
cggccatcggctgct

SEQ ID NO: 742589 - DNA, 15 bp, Homo sapiens
ggccatcggctgctt

SEQ ID NO: 742590 - DNA, 15 bp, Homo sapiens
gccatcggctgctta

SEQ ID NO: 742591 - DNA, 15 bp, Homo sapiens
ccatcggctgcttac

SEQ ID NO: 742592 - DNA, 15 bp, Homo sapiens
catcggctgcttacc

SEQ ID NO: 742593 - DNA, 15 bp, Homo sapiens
atcggctgcttacca

SEQ ID NO: 742594 - DNA, 15 bp, Homo sapiens
tcggctgcttaccag

SEQ ID NO: 742595 - DNA, 15 bp, Homo sapiens
cggctgcttaccagt

SEQ ID NO: 742596 - DNA, 15 bp, Homo sapiens
ggctgcttaccagta

SEQ ID NO: 742597 - DNA, 15 bp, Homo sapiens
gctgcttaccagtag

SEQ ID NO: 742598 - DNA, 15 bp, Homo sapiens
ctgcttaccagtaga

SEQ ID NO: 742599 - DNA, 15 bp, Homo sapiens
tgcttaccagtagac

SEQ ID NO: 742600 - DNA, 15 bp, Homo sapiens
gcttaccagtagacc

SEQ ID NO: 742601 - DNA, 15 bp, Homo sapiens
cttaccagtagaccc

SEQ ID NO: 742602 - DNA, 15 bp, Homo sapiens
ttaccagtagacccc

SEQ ID NO: 742603 - DNA, 15 bp, Homo sapiens
taccagtagacccca

SEQ ID NO: 742604 - DNA, 15 bp, Homo sapiens
accagtagaccccag

SEQ ID NO: 742605 - DNA, 15 bp, Homo sapiens
ccagtagaccccaga

SEQ ID NO: 742606 - DNA, 15 bp, Homo sapiens
cagtagaccccagac

SEQ ID NO: 742607 - DNA, 15 bp, Homo sapiens
agtagaccccagact

SEQ ID NO: 742608 - DNA, 15 bp, Homo sapiens
gtagaccccagactg

SEQ ID NO: 742609 - DNA, 15 bp, Homo sapiens
tagaccccagactgg

SEQ ID NO: 742610 - DNA, 15 bp, Homo sapiens
agaccccagactggc

SEQ ID NO: 742611 - DNA, 15 bp, Homo sapiens
gaccccagactggca

SEQ ID NO: 742612 - DNA, 15 bp, Homo sapiens
accccagactggcat

SEQ ID NO: 742613 - DNA, 15 bp, Homo sapiens
ccccagactggcatt

SEQ ID NO: 742614 - DNA, 15 bp, Homo sapiens
cccagactggcattt

SEQ ID NO: 742615 - DNA, 15 bp, Homo sapiens
ccagactggcatttc

SEQ ID NO: 742616 - DNA, 15 bp, Homo sapiens
cagactggcatttca

SEQ ID NO: 742617 - DNA, 15 bp, Homo sapiens
agactggcatttcag

SEQ ID NO: 742618 - DNA, 15 bp, Homo sapiens
gactggcatttcagg

SEQ ID NO: 742619 - DNA, 15 bp, Homo sapiens
actggcatttcaggg

SEQ ID NO: 742620 - DNA, 15 bp, Homo sapiens
ctggcatttcagggg

SEQ ID NO: 742621 - DNA, 15 bp, Homo sapiens
tggcatttcagggga

SEQ ID NO: 742622 - DNA, 15 bp, Homo sapiens
ggcatttcaggggaa

SEQ ID NO: 742623 - DNA, 15 bp, Homo sapiens
gcatttcaggggaat

SEQ ID NO: 742624 - DNA, 15 bp, Homo sapiens
catttcaggggaatc

SEQ ID NO: 742625 - DNA, 15 bp, Homo sapiens
atttcaggggaatcc

SEQ ID NO: 742626 - DNA, 15 bp, Homo sapiens
tttcaggggaatcca

SEQ ID NO: 742627 - DNA, 15 bp, Homo sapiens
ttcaggggaatccag

SEQ ID NO: 742628 - DNA, 15 bp, Homo sapiens
tcaggggaatccagg

SEQ ID NO: 742629 - DNA, 15 bp, Homo sapiens
caggggaatccaggc

SEQ ID NO: 742630 - DNA, 15 bp, Homo sapiens
aggggaatccaggct

SEQ ID NO: 742631 - DNA, 15 bp, Homo sapiens
ggggaatccaggctg

SEQ ID NO: 742632 - DNA, 15 bp, Homo sapiens
gggaatccaggctgt

SEQ ID NO: 742633 - DNA, 15 bp, Homo sapiens
ggaatccaggctgta

SEQ ID NO: 742634 - DNA, 15 bp, Homo sapiens
gaatccaggctgtag

SEQ ID NO: 742635 - DNA, 15 bp, Homo sapiens
aatccaggctgtagg

SEQ ID NO: 742636 - DNA, 15 bp, Homo sapiens
atccaggctgtaggg

SEQ ID NO: 742637 - DNA, 15 bp, Homo sapiens
tccaggctgtaggga

SEQ ID NO: 742638 - DNA, 15 bp, Homo sapiens
ccaggctgtagggaa

SEQ ID NO: 742639 - DNA, 15 bp, Homo sapiens
caggctgtagggaat

SEQ ID NO: 742640 - DNA, 15 bp, Homo sapiens
aggctgtagggaatg

SEQ ID NO: 742641 - DNA, 15 bp, Homo sapiens
ggctgtagggaatgt

SEQ ID NO: 742642 - DNA, 15 bp, Homo sapiens
gctgtagggaatgtc

SEQ ID NO: 742643 - DNA, 15 bp, Homo sapiens
ctgtagggaatgtct

SEQ ID NO: 742644 - DNA, 15 bp, Homo sapiens
tgtagggaatgtcta

SEQ ID NO: 742645 - DNA, 15 bp, Homo sapiens
gtagggaatgtctaa

SEQ ID NO: 742646 - DNA, 15 bp, Homo sapiens
tagggaatgtctaag

SEQ ID NO: 742647 - DNA, 15 bp, Homo sapiens
agggaatgtctaaga

SEQ ID NO: 742648 - DNA, 15 bp, Homo sapiens
gggaatgtctaagaa

SEQ ID NO: 742649 - DNA, 15 bp, Homo sapiens
ggaatgtctaagaag

SEQ ID NO: 742650 - DNA, 15 bp, Homo sapiens
gaatgtctaagaagg

SEQ ID NO: 742651 - DNA, 15 bp, Homo sapiens
aatgtctaagaaggc

SEQ ID NO: 742652 - DNA, 15 bp, Homo sapiens
atgtctaagaaggcc

SEQ ID NO: 742653 - DNA, 15 bp, Homo sapiens
tgtctaagaaggccc

SEQ ID NO: 742654 - DNA, 15 bp, Homo sapiens
gtctaagaaggcccc

SEQ ID NO: 742655 - DNA, 15 bp, Homo sapiens
tctaagaaggcccca

SEQ ID NO: 742656 - DNA, 15 bp, Homo sapiens
ctaagaaggccccag

SEQ ID NO: 742657 - DNA, 15 bp, Homo sapiens
taagaaggccccaga

SEQ ID NO: 742658 - DNA, 15 bp, Homo sapiens
aagaaggccccagag

SEQ ID NO: 742659 - DNA, 15 bp, Homo sapiens
agaaggccccagagg

SEQ ID NO: 742660 - DNA, 15 bp, Homo sapiens
gaaggccccagaggg

SEQ ID NO: 742661 - DNA, 15 bp, Homo sapiens
aaggccccagagggg

SEQ ID NO: 742662 - DNA, 15 bp, Homo sapiens
aggccccagagggga

SEQ ID NO: 742663 - DNA, 15 bp, Homo sapiens
ggccccagaggggat

SEQ ID NO: 742664 - DNA, 15 bp, Homo sapiens
gccccagaggggatt

SEQ ID NO: 742665 - DNA, 15 bp, Homo sapiens
ccccagaggggattt

SEQ ID NO: 742666 - DNA, 15 bp, Homo sapiens
cccagaggggatttg

SEQ ID NO: 742667 - DNA, 15 bp, Homo sapiens
ccagaggggatttgc

SEQ ID NO: 742668 - DNA, 15 bp, Homo sapiens
cagaggggatttgct

SEQ ID NO: 742669 - DNA, 15 bp, Homo sapiens
agaggggatttgctg

SEQ ID NO: 742670 - DNA, 15 bp, Homo sapiens
gaggggatttgctgg

SEQ ID NO: 742671 - DNA, 15 bp, Homo sapiens
aggggatttgctggt

SEQ ID NO: 742672 - DNA, 15 bp, Homo sapiens
ggggatttgctggtt

SEQ ID NO: 742673 - DNA, 15 bp, Homo sapiens
gggatttgctggttt

SEQ ID NO: 742674 - DNA, 15 bp, Homo sapiens
ggatttgctggtttg

SEQ ID NO: 742675 - DNA, 15 bp, Homo sapiens
gatttgctggtttgc

SEQ ID NO: 742676 - DNA, 15 bp, Homo sapiens
atttgctggtttgca

SEQ ID NO: 742677 - DNA, 15 bp, Homo sapiens
tttgctggtttgcaa

SEQ ID NO: 742678 - DNA, 15 bp, Homo sapiens
ttgctggtttgcaaa

SEQ ID NO: 742679 - DNA, 15 bp, Homo sapiens
tgctggtttgcaaaa

SEQ ID NO: 742680 - DNA, 15 bp, Homo sapiens
gctggtttgcaaaat

SEQ ID NO: 742681 - DNA, 15 bp, Homo sapiens
ctggtttgcaaaatt

SEQ ID NO: 742682 - DNA, 15 bp, Homo sapiens
tggtttgcaaaattt

SEQ ID NO: 742683 - DNA, 15 bp, Homo sapiens
ggtttgcaaaatttc

SEQ ID NO: 742684 - DNA, 15 bp, Homo sapiens
gtttgcaaaatttca

SEQ ID NO: 742685 - DNA, 15 bp, Homo sapiens
tttgcaaaatttcaa

SEQ ID NO: 742686 - DNA, 15 bp, Homo sapiens
ttgcaaaatttcaat

SEQ ID NO: 742687 - DNA, 15 bp, Homo sapiens
tgcaaaatttcaatt

SEQ ID NO: 742688 - DNA, 15 bp, Homo sapiens
gcaaaatttcaattt

SEQ ID NO: 742689 - DNA, 15 bp, Homo sapiens
caaaatttcaatttt

SEQ ID NO: 742690 - DNA, 15 bp, Homo sapiens
aaaatttcaattttg

SEQ ID NO: 742691 - DNA, 15 bp, Homo sapiens
aaatttcaattttgt

SEQ ID NO: 742692 - DNA, 15 bp, Homo sapiens
aatttcaattttgtg

SEQ ID NO: 742693 - DNA, 15 bp, Homo sapiens
atttcaattttgtgg

SEQ ID NO: 742694 - DNA, 15 bp, Homo sapiens
tttcaattttgtggg

SEQ ID NO: 742695 - DNA, 15 bp, Homo sapiens
ttcaattttgtgggt

SEQ ID NO: 742696 - DNA, 15 bp, Homo sapiens
tcaattttgtgggtg

SEQ ID NO: 742697 - DNA, 15 bp, Homo sapiens
caattttgtgggtga

SEQ ID NO: 742698 - DNA, 15 bp, Homo sapiens
aattttgtgggtgag

SEQ ID NO: 742699 - DNA, 15 bp, Homo sapiens
attttgtgggtgagg

SEQ ID NO: 742700 - DNA, 15 bp, Homo sapiens
ttttgtgggtgaggg

SEQ ID NO: 742701 - DNA, 15 bp, Homo sapiens
tttgtgggtgaggga

SEQ ID NO: 742702 - DNA, 15 bp, Homo sapiens
ttgtgggtgagggaa

SEQ ID NO: 742703 - DNA, 15 bp, Homo sapiens
tgtgggtgagggaat

SEQ ID NO: 742704 - DNA, 15 bp, Homo sapiens
gtgggtgagggaatc

SEQ ID NO: 742705 - DNA, 15 bp, Homo sapiens
tgggtgagggaatcc

SEQ ID NO: 742706 - DNA, 15 bp, Homo sapiens
gggtgagggaatcca

SEQ ID NO: 742707 - DNA, 15 bp, Homo sapiens
ggtgagggaatccat

SEQ ID NO: 742708 - DNA, 15 bp, Homo sapiens
gtgagggaatccatt

SEQ ID NO: 742709 - DNA, 15 bp, Homo sapiens
tgagggaatccattc

SEQ ID NO: 742710 - DNA, 15 bp, Homo sapiens
gagggaatccattct

SEQ ID NO: 742711 - DNA, 15 bp, Homo sapiens
agggaatccattctg

SEQ ID NO: 742712 - DNA, 15 bp, Homo sapiens
gggaatccattctgg

SEQ ID NO: 742713 - DNA, 15 bp, Homo sapiens
ggaatccattctgga

SEQ ID NO: 742714 - DNA, 15 bp, Homo sapiens
gaatccattctggag

SEQ ID NO: 742715 - DNA, 15 bp, Homo sapiens
aatccattctggagg

SEQ ID NO: 742716 - DNA, 15 bp, Homo sapiens
atccattctggaggt

SEQ ID NO: 742717 - DNA, 15 bp, Homo sapiens
tccattctggaggtt

SEQ ID NO: 742718 - DNA, 15 bp, Homo sapiens
ccattctggaggttt

SEQ ID NO: 742719 - DNA, 15 bp, Homo sapiens
cattctggaggtttc

SEQ ID NO: 742720 - DNA, 15 bp, Homo sapiens
attctggaggtttca

SEQ ID NO: 742721 - DNA, 15 bp, Homo sapiens
ttctggaggtttcat

SEQ ID NO: 742722 - DNA, 15 bp, Homo sapiens
tctggaggtttcata

SEQ ID NO: 742723 - DNA, 15 bp, Homo sapiens
ctggaggtttcatat

SEQ ID NO: 742724 - DNA, 15 bp, Homo sapiens
tggaggtttcatatc

SEQ ID NO: 742725 - DNA, 15 bp, Homo sapiens
ggaggtttcatatcc

SEQ ID NO: 742726 - DNA, 15 bp, Homo sapiens
gaggtttcatatccc

SEQ ID NO: 742727 - DNA, 15 bp, Homo sapiens
aggtttcatatccca

SEQ ID NO: 742728 - DNA, 15 bp, Homo sapiens
ggtttcatatcccac

SEQ ID NO: 742729 - DNA, 15 bp, Homo sapiens
gtttcatatcccact

SEQ ID NO: 742730 - DNA, 15 bp, Homo sapiens
tttcatatcccactg

SEQ ID NO: 742731 - DNA, 15 bp, Homo sapiens
ttcatatcccactgg

SEQ ID NO: 742732 - DNA, 15 bp, Homo sapiens
tcatatcccactggg

SEQ ID NO: 742733 - DNA, 15 bp, Homo sapiens
catatcccactgggg

SEQ ID NO: 742734 - DNA, 15 bp, Homo sapiens
atatcccactgggga

SEQ ID NO: 742735 - DNA, 15 bp, Homo sapiens
tatcccactggggag

SEQ ID NO: 742736 - DNA, 15 bp, Homo sapiens
atcccactggggaga

SEQ ID NO: 742737 - DNA, 15 bp, Homo sapiens
tcccactggggagac

SEQ ID NO: 742738 - DNA, 15 bp, Homo sapiens
cccactggggagaca

SEQ ID NO: 742739 - DNA, 15 bp, Homo sapiens
ccactggggagacag

SEQ ID NO: 742740 - DNA, 15 bp, Homo sapiens
cactggggagacagt

SEQ ID NO: 742741 - DNA, 15 bp, Homo sapiens
actggggagacagtc

SEQ ID NO: 742742 - DNA, 15 bp, Homo sapiens
ctggggagacagtcc

SEQ ID NO: 742743 - DNA, 15 bp, Homo sapiens
tggggagacagtcct

SEQ ID NO: 742744 - DNA, 15 bp, Homo sapiens
ggggagacagtccta

SEQ ID NO: 742745 - DNA, 15 bp, Homo sapiens
gggagacagtcctat

SEQ ID NO: 742746 - DNA, 15 bp, Homo sapiens
ggagacagtcctatc

SEQ ID NO: 742747 - DNA, 15 bp, Homo sapiens
gagacagtcctatcc

SEQ ID NO: 742748 - DNA, 15 bp, Homo sapiens
agacagtcctatcct

SEQ ID NO: 742749 - DNA, 15 bp, Homo sapiens
gacagtcctatcctt

SEQ ID NO: 742750 - DNA, 15 bp, Homo sapiens
acagtcctatccttt

SEQ ID NO: 742751 - DNA, 15 bp, Homo sapiens
cagtcctatcctttg

SEQ ID NO: 742752 - DNA, 15 bp, Homo sapiens
agtcctatcctttgc

SEQ ID NO: 742753 - DNA, 15 bp, Homo sapiens
gtcctatcctttgct

SEQ ID NO: 742754 - DNA, 15 bp, Homo sapiens
tcctatcctttgctg

SEQ ID NO: 742755 - DNA, 15 bp, Homo sapiens
cctatcctttgctgc

SEQ ID NO: 742756 - DNA, 15 bp, Homo sapiens
ctatcctttgctgcc

SEQ ID NO: 742757 - DNA, 15 bp, Homo sapiens
tatcctttgctgccc

SEQ ID NO: 742758 - DNA, 15 bp, Homo sapiens
atcctttgctgccct

SEQ ID NO: 742759 - DNA, 15 bp, Homo sapiens
tcctttgctgccctt

SEQ ID NO: 742760 - DNA, 15 bp, Homo sapiens
cctttgctgcccttt

SEQ ID NO: 742761 - DNA, 15 bp, Homo sapiens
ctttgctgccctttt

SEQ ID NO: 742762 - DNA, 15 bp, Homo sapiens
tttgctgcccttttt

SEQ ID NO: 742763 - DNA, 15 bp, Homo sapiens
ttgctgcccttttta

SEQ ID NO: 742764 - DNA, 15 bp, Homo sapiens
tgctgccctttttat

SEQ ID NO: 742765 - DNA, 15 bp, Homo sapiens
gctgccctttttatg

SEQ ID NO: 742766 - DNA, 15 bp, Homo sapiens
ctgccctttttatgt

SEQ ID NO: 742767 - DNA, 15 bp, Homo sapiens
tgccctttttatgtt

SEQ ID NO: 742768 - DNA, 15 bp, Homo sapiens
gccctttttatgttc

SEQ ID NO: 742769 - DNA, 15 bp, Homo sapiens
ccctttttatgttct

SEQ ID NO: 742770 - DNA, 15 bp, Homo sapiens
cctttttatgttctg

SEQ ID NO: 742771 - DNA, 15 bp, Homo sapiens
ctttttatgttctgg

SEQ ID NO: 742772 - DNA, 15 bp, Homo sapiens
tttttatgttctggg

SEQ ID NO: 742773 - DNA, 15 bp, Homo sapiens
ttttatgttctgggt

SEQ ID NO: 742774 - DNA, 15 bp, Homo sapiens
tttatgttctgggtg

SEQ ID NO: 742775 - DNA, 15 bp, Homo sapiens
ttatgttctgggtgt

SEQ ID NO: 742776 - DNA, 15 bp, Homo sapiens
tatgttctgggtgtt

SEQ ID NO: 742777 - DNA, 15 bp, Homo sapiens
atgttctgggtgttt

SEQ ID NO: 742778 - DNA, 15 bp, Homo sapiens
tgttctgggtgtttt

SEQ ID NO: 742779 - DNA, 15 bp, Homo sapiens
gttctgggtgtttta

SEQ ID NO: 742780 - DNA, 15 bp, Homo sapiens
ttctgggtgttttat

SEQ ID NO: 742781 - DNA, 15 bp, Homo sapiens
tctgggtgttttatt

SEQ ID NO: 742782 - DNA, 15 bp, Homo sapiens
ctgggtgttttattt

SEQ ID NO: 742783 - DNA, 15 bp, Homo sapiens
tgggtgttttatttt

SEQ ID NO: 742784 - DNA, 15 bp, Homo sapiens
gggtgttttattttt

SEQ ID NO: 742785 - DNA, 15 bp, Homo sapiens
ggtgttttattttta

SEQ ID NO: 742786 - DNA, 15 bp, Homo sapiens
gtgttttatttttaa

SEQ ID NO: 742787 - DNA, 15 bp, Homo sapiens
tgttttatttttaaa

SEQ ID NO: 742788 - DNA, 15 bp, Homo sapiens
gttttatttttaaat

SEQ ID NO: 742789 - DNA, 15 bp, Homo sapiens
ttttatttttaaatt

SEQ ID NO: 742790 - DNA, 15 bp, Homo sapiens
tttatttttaaattt

SEQ ID NO: 742791 - DNA, 15 bp, Homo sapiens
ttatttttaaatttc

SEQ ID NO: 742792 - DNA, 15 bp, Homo sapiens
tatttttaaatttca

SEQ ID NO: 742793 - DNA, 15 bp, Homo sapiens
atttttaaatttcaa

SEQ ID NO: 742794 - DNA, 15 bp, Homo sapiens
tttttaaatttcaaa

SEQ ID NO: 742795 - DNA, 15 bp, Homo sapiens
ttttaaatttcaaat

SEQ ID NO: 742796 - DNA, 15 bp, Homo sapiens
tttaaatttcaaatc

SEQ ID NO: 742797 - DNA, 15 bp, Homo sapiens
ttaaatttcaaatct

SEQ ID NO: 742798 - DNA, 15 bp, Homo sapiens
taaatttcaaatctt

SEQ ID NO: 742799 - DNA, 15 bp, Homo sapiens
aaatttcaaatcttg

SEQ ID NO: 742800 - DNA, 15 bp, Homo sapiens
aatttcaaatcttgg

SEQ ID NO: 742801 - DNA, 15 bp, Homo sapiens
atttcaaatcttggc

SEQ ID NO: 742802 - DNA, 15 bp, Homo sapiens
tttcaaatcttggcc

SEQ ID NO: 742803 - DNA, 15 bp, Homo sapiens
ttcaaatcttggcct

SEQ ID NO: 742804 - DNA, 15 bp, Homo sapiens
tcaaatcttggcctt

SEQ ID NO: 742805 - DNA, 15 bp, Homo sapiens
caaatcttggccttg

SEQ ID NO: 742806 - DNA, 15 bp, Homo sapiens
aaatcttggccttga

SEQ ID NO: 742807 - DNA, 15 bp, Homo sapiens
aatcttggccttgat

SEQ ID NO: 742808 - DNA, 15 bp, Homo sapiens
atcttggccttgatt

SEQ ID NO: 742809 - DNA, 15 bp, Homo sapiens
tcttggccttgattt

SEQ ID NO: 742810 - DNA, 15 bp, Homo sapiens
cttggccttgattta

SEQ ID NO: 742811 - DNA, 15 bp, Homo sapiens
ttggccttgatttaa

SEQ ID NO: 742812 - DNA, 15 bp, Homo sapiens
tggccttgatttaag

SEQ ID NO: 742813 - DNA, 15 bp, Homo sapiens
ggccttgatttaagg

SEQ ID NO: 742814 - DNA, 15 bp, Homo sapiens
gccttgatttaagga

SEQ ID NO: 742815 - DNA, 15 bp, Homo sapiens
ccttgatttaaggaa

SEQ ID NO: 742816 - DNA, 15 bp, Homo sapiens
cttgatttaaggaat

SEQ ID NO: 742817 - DNA, 15 bp, Homo sapiens
ttgatttaaggaatg

SEQ ID NO: 742818 - DNA, 15 bp, Homo sapiens
tgatttaaggaatgt

SEQ ID NO: 742819 - DNA, 15 bp, Homo sapiens
gatttaaggaatgtc

SEQ ID NO: 742820 - DNA, 15 bp, Homo sapiens
atttaaggaatgtcc

SEQ ID NO: 742821 - DNA, 15 bp, Homo sapiens
tttaaggaatgtcct

SEQ ID NO: 742822 - DNA, 15 bp, Homo sapiens
ttaaggaatgtcctt

SEQ ID NO: 742823 - DNA, 15 bp, Homo sapiens
taaggaatgtcctta

SEQ ID NO: 742824 - DNA, 15 bp, Homo sapiens
aaggaatgtccttaa

SEQ ID NO: 742825 - DNA, 15 bp, Homo sapiens
aggaatgtccttaac

SEQ ID NO: 742826 - DNA, 15 bp, Homo sapiens
ggaatgtccttaact

SEQ ID NO: 742827 - DNA, 15 bp, Homo sapiens
gaatgtccttaactt

SEQ ID NO: 742828 - DNA, 15 bp, Homo sapiens
aatgtccttaacttt

SEQ ID NO: 742829 - DNA, 15 bp, Homo sapiens
atgtccttaactttc

SEQ ID NO: 742830 - DNA, 15 bp, Homo sapiens
tgtccttaactttct

SEQ ID NO: 742831 - DNA, 15 bp, Homo sapiens
gtccttaactttctt

SEQ ID NO: 742832 - DNA, 15 bp, Homo sapiens
tccttaactttcttg

SEQ ID NO: 742833 - DNA, 15 bp, Homo sapiens
ccttaactttcttgg

SEQ ID NO: 742834 - DNA, 15 bp, Homo sapiens
cttaactttcttggc

SEQ ID NO: 742835 - DNA, 15 bp, Homo sapiens
ttaactttcttggca

SEQ ID NO: 742836 - DNA, 15 bp, Homo sapiens
taactttcttggcat

SEQ ID NO: 742837 - DNA, 15 bp, Homo sapiens
aactttcttggcatt

SEQ ID NO: 742838 - DNA, 15 bp, Homo sapiens
actttcttggcattg

SEQ ID NO: 742839 - DNA, 15 bp, Homo sapiens
ctttcttggcattgc

SEQ ID NO: 742840 - DNA, 15 bp, Homo sapiens
tttcttggcattgct

SEQ ID NO: 742841 - DNA, 15 bp, Homo sapiens
ttcttggcattgctg

SEQ ID NO: 742842 - DNA, 15 bp, Homo sapiens
tcttggcattgctga

SEQ ID NO: 742843 - DNA, 15 bp, Homo sapiens
cttggcattgctgag

SEQ ID NO: 742844 - DNA, 15 bp, Homo sapiens
ttggcattgctgagg

SEQ ID NO: 742845 - DNA, 15 bp, Homo sapiens
tggcattgctgaggc

SEQ ID NO: 742846 - DNA, 15 bp, Homo sapiens
ggcattgctgaggca

SEQ ID NO: 742847 - DNA, 15 bp, Homo sapiens
gcattgctgaggcac

SEQ ID NO: 742848 - DNA, 15 bp, Homo sapiens
cattgctgaggcaca

SEQ ID NO: 742849 - DNA, 15 bp, Homo sapiens
attgctgaggcacaa

SEQ ID NO: 742850 - DNA, 15 bp, Homo sapiens
ttgctgaggcacaaa

SEQ ID NO: 742851 - DNA, 15 bp, Homo sapiens
tgctgaggcacaaaa

SEQ ID NO: 742852 - DNA, 15 bp, Homo sapiens
gctgaggcacaaaag

SEQ ID NO: 742853 - DNA, 15 bp, Homo sapiens
ctgaggcacaaaagc

SEQ ID NO: 742854 - DNA, 15 bp, Homo sapiens
tgaggcacaaaagca

SEQ ID NO: 742855 - DNA, 15 bp, Homo sapiens
gaggcacaaaagcag

SEQ ID NO: 742856 - DNA, 15 bp, Homo sapiens
aggcacaaaagcagc

SEQ ID NO: 742857 - DNA, 15 bp, Homo sapiens
ggcacaaaagcagca

SEQ ID NO: 742858 - DNA, 15 bp, Homo sapiens
gcacaaaagcagcaa

SEQ ID NO: 742859 - DNA, 15 bp, Homo sapiens
cacaaaagcagcaaa

SEQ ID NO: 742860 - DNA, 15 bp, Homo sapiens
acaaaagcagcaaac

SEQ ID NO: 742861 - DNA, 15 bp, Homo sapiens
caaaagcagcaaact

SEQ ID NO: 742862 - DNA, 15 bp, Homo sapiens
aaaagcagcaaacta

SEQ ID NO: 742863 - DNA, 15 bp, Homo sapiens
aaagcagcaaactac

SEQ ID NO: 742864 - DNA, 15 bp, Homo sapiens
aagcagcaaactaca

SEQ ID NO: 742865 - DNA, 15 bp, Homo sapiens
agcagcaaactacag

SEQ ID NO: 742866 - DNA, 15 bp, Homo sapiens
gcagcaaactacagc

SEQ ID NO: 742867 - DNA, 15 bp, Homo sapiens
cagcaaactacagcc

SEQ ID NO: 742868 - DNA, 15 bp, Homo sapiens
agcaaactacagcca

SEQ ID NO: 742869 - DNA, 15 bp, Homo sapiens
gcaaactacagccat

SEQ ID NO: 742870 - DNA, 15 bp, Homo sapiens
caaactacagccatt

SEQ ID NO: 742871 - DNA, 15 bp, Homo sapiens
aaactacagccattg

SEQ ID NO: 742872 - DNA, 15 bp, Homo sapiens
aactacagccattga

SEQ ID NO: 742873 - DNA, 15 bp, Homo sapiens
actacagccattgag

SEQ ID NO: 742874 - DNA, 15 bp, Homo sapiens
ctacagccattgaga

SEQ ID NO: 742875 - DNA, 15 bp, Homo sapiens
tacagccattgagag

SEQ ID NO: 742876 - DNA, 15 bp, Homo sapiens
acagccattgagagg

SEQ ID NO: 742877 - DNA, 15 bp, Homo sapiens
cagccattgagaggc

SEQ ID NO: 742878 - DNA, 15 bp, Homo sapiens
agccattgagaggct

SEQ ID NO: 742879 - DNA, 15 bp, Homo sapiens
gccattgagaggcta

SEQ ID NO: 742880 - DNA, 15 bp, Homo sapiens
ccattgagaggctaa

SEQ ID NO: 742881 - DNA, 15 bp, Homo sapiens
cattgagaggctaat

SEQ ID NO: 742882 - DNA, 15 bp, Homo sapiens
attgagaggctaata

SEQ ID NO: 742883 - DNA, 15 bp, Homo sapiens
ttgagaggctaataa

SEQ ID NO: 742884 - DNA, 15 bp, Homo sapiens
tgagaggctaataaa

SEQ ID NO: 742885 - DNA, 15 bp, Homo sapiens
gagaggctaataaag

SEQ ID NO: 742886 - DNA, 15 bp, Homo sapiens
agaggctaataaagg

SEQ ID NO: 742887 - DNA, 15 bp, Homo sapiens
gaggctaataaagga

SEQ ID NO: 742888 - DNA, 15 bp, Homo sapiens
aggctaataaaggaa

SEQ ID NO: 742889 - DNA, 15 bp, Homo sapiens
ggctaataaaggaac

SEQ ID NO: 742890 - DNA, 15 bp, Homo sapiens
gctaataaaggaacc

SEQ ID NO: 742891 - DNA, 15 bp, Homo sapiens
ctaataaaggaacct

SEQ ID NO: 742892 - DNA, 15 bp, Homo sapiens
taataaaggaacctc

SEQ ID NO: 742893 - DNA, 15 bp, Homo sapiens
aataaaggaacctca

SEQ ID NO: 742894 - DNA, 15 bp, Homo sapiens
ataaaggaacctcaa

SEQ ID NO: 742895 - DNA, 15 bp, Homo sapiens
taaaggaacctcaat

SEQ ID NO: 742896 - DNA, 15 bp, Homo sapiens
aaaggaacctcaatg

SEQ ID NO: 742897 - DNA, 15 bp, Homo sapiens
aaggaacctcaatgc

SEQ ID NO: 742898 - DNA, 15 bp, Homo sapiens
aggaacctcaatgcc

SEQ ID NO: 742899 - DNA, 15 bp, Homo sapiens
ggaacctcaatgcca

SEQ ID NO: 742900 - DNA, 15 bp, Homo sapiens
gaacctcaatgccat

SEQ ID NO: 742901 - DNA, 15 bp, Homo sapiens
aacctcaatgccata

SEQ ID NO: 742902 - DNA, 15 bp, Homo sapiens
acctcaatgccatag

SEQ ID NO: 742903 - DNA, 15 bp, Homo sapiens
cctcaatgccatagt

SEQ ID NO: 742904 - DNA, 15 bp, Homo sapiens
ctcaatgccatagtc

SEQ ID NO: 742905 - DNA, 15 bp, Homo sapiens
tcaatgccatagtca

SEQ ID NO: 742906 - DNA, 15 bp, Homo sapiens
caatgccatagtcac

SEQ ID NO: 742907 - DNA, 15 bp, Homo sapiens
aatgccatagtcacc

SEQ ID NO: 742908 - DNA, 15 bp, Homo sapiens
atgccatagtcacct

SEQ ID NO: 742909 - DNA, 15 bp, Homo sapiens
tgccatagtcacctt

SEQ ID NO: 742910 - DNA, 15 bp, Homo sapiens
gccatagtcaccttc

SEQ ID NO: 742911 - DNA, 15 bp, Homo sapiens
ccatagtcaccttcc

SEQ ID NO: 742912 - DNA, 15 bp, Homo sapiens
catagtcaccttcct

SEQ ID NO: 742913 - DNA, 15 bp, Homo sapiens
atagtcaccttcctg

SEQ ID NO: 742914 - DNA, 15 bp, Homo sapiens
tagtcaccttcctgc

SEQ ID NO: 742915 - DNA, 15 bp, Homo sapiens
agtcaccttcctgcg

SEQ ID NO: 742916 - DNA, 15 bp, Homo sapiens
gtcaccttcctgcgc

SEQ ID NO: 742917 - DNA, 15 bp, Homo sapiens
tcaccttcctgcgca

SEQ ID NO: 742918 - DNA, 15 bp, Homo sapiens
caccttcctgcgcat

SEQ ID NO: 742919 - DNA, 15 bp, Homo sapiens
accttcctgcgcatc

SEQ ID NO: 742920 - DNA, 15 bp, Homo sapiens
ccttcctgcgcatcc

SEQ ID NO: 742921 - DNA, 15 bp, Homo sapiens
cttcctgcgcatccc

SEQ ID NO: 742922 - DNA, 15 bp, Homo sapiens
ttcctgcgcatcccc

SEQ ID NO: 742923 - DNA, 15 bp, Homo sapiens
tcctgcgcatcccca

SEQ ID NO: 742924 - DNA, 15 bp, Homo sapiens
cctgcgcatccccac

SEQ ID NO: 742925 - DNA, 15 bp, Homo sapiens
ctgcgcatccccaca

SEQ ID NO: 742926 - DNA, 15 bp, Homo sapiens
tgcgcatccccacag

SEQ ID NO: 742927 - DNA, 15 bp, Homo sapiens
gcgcatccccacagc

SEQ ID NO: 742928 - DNA, 15 bp, Homo sapiens
cgcatccccacagca

SEQ ID NO: 742929 - DNA, 15 bp, Homo sapiens
gcatccccacagcac

SEQ ID NO: 742930 - DNA, 15 bp, Homo sapiens
catccccacagcact

SEQ ID NO: 742931 - DNA, 15 bp, Homo sapiens
atccccacagcactt

SEQ ID NO: 742932 - DNA, 15 bp, Homo sapiens
tccccacagcacttc

SEQ ID NO: 742933 - DNA, 15 bp, Homo sapiens
ccccacagcacttct

SEQ ID NO: 742934 - DNA, 15 bp, Homo sapiens
cccacagcacttctg

SEQ ID NO: 742935 - DNA, 15 bp, Homo sapiens
ccacagcacttctgg

SEQ ID NO: 742936 - DNA, 15 bp, Homo sapiens
cacagcacttctggg

SEQ ID NO: 742937 - DNA, 15 bp, Homo sapiens
acagcacttctgggt

SEQ ID NO: 742938 - DNA, 15 bp, Homo sapiens
cagcacttctgggtc

SEQ ID NO: 742939 - DNA, 15 bp, Homo sapiens
agcacttctgggtcc

SEQ ID NO: 742940 - DNA, 15 bp, Homo sapiens
gcacttctgggtccc

SEQ ID NO: 742941 - DNA, 15 bp, Homo sapiens
cacttctgggtcccg

SEQ ID NO: 742942 - DNA, 15 bp, Homo sapiens
acttctgggtcccgc

SEQ ID NO: 742943 - DNA, 15 bp, Homo sapiens
cttctgggtcccgct

SEQ ID NO: 742944 - DNA, 15 bp, Homo sapiens
ttctgggtcccgctc

SEQ ID NO: 742945 - DNA, 15 bp, Homo sapiens
tctgggtcccgctcc

SEQ ID NO: 742946 - DNA, 15 bp, Homo sapiens
ctgggtcccgctccc

SEQ ID NO: 742947 - DNA, 15 bp, Homo sapiens
tgggtcccgctcccc

SEQ ID NO: 742948 - DNA, 15 bp, Homo sapiens
gggtcccgctccccc

SEQ ID NO: 742949 - DNA, 15 bp, Homo sapiens
ggtcccgctccccca

SEQ ID NO: 742950 - DNA, 15 bp, Homo sapiens
gtcccgctcccccaa

SEQ ID NO: 742951 - DNA, 15 bp, Homo sapiens
tcccgctcccccaac

SEQ ID NO: 742952 - DNA, 15 bp, Homo sapiens
cccgctcccccaacc

SEQ ID NO: 742953 - DNA, 15 bp, Homo sapiens
ccgctcccccaaccc

SEQ ID NO: 742954 - DNA, 15 bp, Homo sapiens
cgctcccccaaccca

SEQ ID NO: 742955 - DNA, 15 bp, Homo sapiens
gctcccccaacccag

SEQ ID NO: 742956 - DNA, 15 bp, Homo sapiens
ctcccccaacccagt

SEQ ID NO: 742957 - DNA, 15 bp, Homo sapiens
tcccccaacccagta

SEQ ID NO: 742958 - DNA, 15 bp, Homo sapiens
cccccaacccagtac

SEQ ID NO: 742959 - DNA, 15 bp, Homo sapiens
ccccaacccagtacc

SEQ ID NO: 742960 - DNA, 15 bp, Homo sapiens
cccaacccagtacca

SEQ ID NO: 742961 - DNA, 15 bp, Homo sapiens
ccaacccagtaccag

SEQ ID NO: 742962 - DNA, 15 bp, Homo sapiens
caacccagtaccaga

SEQ ID NO: 742963 - DNA, 15 bp, Homo sapiens
aacccagtaccagaa

SEQ ID NO: 742964 - DNA, 15 bp, Homo sapiens
acccagtaccagaaa

SEQ ID NO: 742965 - DNA, 15 bp, Homo sapiens
cccagtaccagaaaa

SEQ ID NO: 742966 - DNA, 15 bp, Homo sapiens
ccagtaccagaaaag

SEQ ID NO: 742967 - DNA, 15 bp, Homo sapiens
cagtaccagaaaagg

SEQ ID NO: 742968 - DNA, 15 bp, Homo sapiens
agtaccagaaaaggc

SEQ ID NO: 742969 - DNA, 15 bp, Homo sapiens
gtaccagaaaaggcc

SEQ ID NO: 742970 - DNA, 15 bp, Homo sapiens
taccagaaaaggccc

SEQ ID NO: 742971 - DNA, 15 bp, Homo sapiens
accagaaaaggccca

SEQ ID NO: 742972 - DNA, 15 bp, Homo sapiens
ccagaaaaggcccag

SEQ ID NO: 742973 - DNA, 15 bp, Homo sapiens
cagaaaaggcccagg

SEQ ID NO: 742974 - DNA, 15 bp, Homo sapiens
agaaaaggcccaggg

SEQ ID NO: 742975 - DNA, 15 bp, Homo sapiens
gaaaaggcccagggc

SEQ ID NO: 742976 - DNA, 15 bp, Homo sapiens
aaaaggcccagggcc

SEQ ID NO: 742977 - DNA, 15 bp, Homo sapiens
aaaggcccagggcct

SEQ ID NO: 742978 - DNA, 15 bp, Homo sapiens
aaggcccagggcctt

SEQ ID NO: 742979 - DNA, 15 bp, Homo sapiens
aggcccagggccttt

SEQ ID NO: 742980 - DNA, 15 bp, Homo sapiens
ggcccagggcctttg

SEQ ID NO: 742981 - DNA, 15 bp, Homo sapiens
gcccagggcctttgc

SEQ ID NO: 742982 - DNA, 15 bp, Homo sapiens
cccagggcctttgca

SEQ ID NO: 742983 - DNA, 15 bp, Homo sapiens
ccagggcctttgcat

SEQ ID NO: 742984 - DNA, 15 bp, Homo sapiens
cagggcctttgcatg

SEQ ID NO: 742985 - DNA, 15 bp, Homo sapiens
agggcctttgcatgc

SEQ ID NO: 742986 - DNA, 15 bp, Homo sapiens
gggcctttgcatgct

SEQ ID NO: 742987 - DNA, 15 bp, Homo sapiens
ggcctttgcatgctt

SEQ ID NO: 742988 - DNA, 15 bp, Homo sapiens
gcctttgcatgcttg

SEQ ID NO: 742989 - DNA, 15 bp, Homo sapiens
cctttgcatgcttgg

SEQ ID NO: 742990 - DNA, 15 bp, Homo sapiens
ctttgcatgcttggg

SEQ ID NO: 742991 - DNA, 15 bp, Homo sapiens
tttgcatgcttgggt

SEQ ID NO: 742992 - DNA, 15 bp, Homo sapiens
ttgcatgcttgggtc

SEQ ID NO: 742993 - DNA, 15 bp, Homo sapiens
tgcatgcttgggtct

SEQ ID NO: 742994 - DNA, 15 bp, Homo sapiens
gcatgcttgggtctg

SEQ ID NO: 742995 - DNA, 15 bp, Homo sapiens
catgcttgggtctgg

SEQ ID NO: 742996 - DNA, 15 bp, Homo sapiens
atgcttgggtctggt

SEQ ID NO: 742997 - DNA, 15 bp, Homo sapiens
tgcttgggtctggtg

SEQ ID NO: 742998 - DNA, 15 bp, Homo sapiens
gcttgggtctggtgt

SEQ ID NO: 742999 - DNA, 15 bp, Homo sapiens
cttgggtctggtgtg

SEQ ID NO: 743000 - DNA, 15 bp, Homo sapiens
ttgggtctggtgtgg

SEQ ID NO: 743001 - DNA, 15 bp, Homo sapiens
tgggtctggtgtggc

SEQ ID NO: 743002 - DNA, 15 bp, Homo sapiens
gggtctggtgtggca

SEQ ID NO: 743003 - DNA, 15 bp, Homo sapiens
ggtctggtgtggcag

SEQ ID NO: 743004 - DNA, 15 bp, Homo sapiens
gtctggtgtggcagg

SEQ ID NO: 743005 - DNA, 15 bp, Homo sapiens
tctggtgtggcaggg

SEQ ID NO: 743006 - DNA, 15 bp, Homo sapiens
ctggtgtggcaggga

SEQ ID NO: 743007 - DNA, 15 bp, Homo sapiens
tggtgtggcagggat

SEQ ID NO: 743008 - DNA, 15 bp, Homo sapiens
ggtgtggcagggatg

SEQ ID NO: 743009 - DNA, 15 bp, Homo sapiens
gtgtggcagggatgc

SEQ ID NO: 743010 - DNA, 15 bp, Homo sapiens
tgtggcagggatgca

SEQ ID NO: 743011 - DNA, 15 bp, Homo sapiens
gtggcagggatgcat

SEQ ID NO: 743012 - DNA, 15 bp, Homo sapiens
tggcagggatgcatt

SEQ ID NO: 743013 - DNA, 15 bp, Homo sapiens
ggcagggatgcattc

SEQ ID NO: 743014 - DNA, 15 bp, Homo sapiens
gcagggatgcattca

SEQ ID NO: 743015 - DNA, 15 bp, Homo sapiens
cagggatgcattcag

SEQ ID NO: 743016 - DNA, 15 bp, Homo sapiens
agggatgcattcaga

SEQ ID NO: 743017 - DNA, 15 bp, Homo sapiens
gggatgcattcagag

SEQ ID NO: 743018 - DNA, 15 bp, Homo sapiens
ggatgcattcagagt

SEQ ID NO: 743019 - DNA, 15 bp, Homo sapiens
gatgcattcagagtg

SEQ ID NO: 743020 - DNA, 15 bp, Homo sapiens
atgcattcagagtgg

SEQ ID NO: 743021 - DNA, 15 bp, Homo sapiens
tgcattcagagtggc

SEQ ID NO: 743022 - DNA, 15 bp, Homo sapiens
gcattcagagtggct

SEQ ID NO: 743023 - DNA, 15 bp, Homo sapiens
cattcagagtggctg

SEQ ID NO: 743024 - DNA, 15 bp, Homo sapiens
attcagagtggctga

SEQ ID NO: 743025 - DNA, 15 bp, Homo sapiens
ttcagagtggctgaa

SEQ ID NO: 743026 - DNA, 15 bp, Homo sapiens
tcagagtggctgaac

SEQ ID NO: 743027 - DNA, 15 bp, Homo sapiens
cagagtggctgaaca

SEQ ID NO: 743028 - DNA, 15 bp, Homo sapiens
agagtggctgaacac

SEQ ID NO: 743029 - DNA, 15 bp, Homo sapiens
gagtggctgaacaca

SEQ ID NO: 743030 - DNA, 15 bp, Homo sapiens
agtggctgaacacag

SEQ ID NO: 743031 - DNA, 15 bp, Homo sapiens
gtggctgaacacaga

SEQ ID NO: 743032 - DNA, 15 bp, Homo sapiens
tggctgaacacagag

SEQ ID NO: 743033 - DNA, 15 bp, Homo sapiens
ggctgaacacagagg

SEQ ID NO: 743034 - DNA, 15 bp, Homo sapiens
gctgaacacagaggc

SEQ ID NO: 743035 - DNA, 15 bp, Homo sapiens
ctgaacacagaggcc

SEQ ID NO: 743036 - DNA, 15 bp, Homo sapiens
tgaacacagaggccg

SEQ ID NO: 743037 - DNA, 15 bp, Homo sapiens
gaacacagaggccga

SEQ ID NO: 743038 - DNA, 15 bp, Homo sapiens
aacacagaggccgag

SEQ ID NO: 743039 - DNA, 15 bp, Homo sapiens
acacagaggccgagg

SEQ ID NO: 743040 - DNA, 15 bp, Homo sapiens
cacagaggccgaggt

SEQ ID NO: 743041 - DNA, 15 bp, Homo sapiens
acagaggccgaggtt

SEQ ID NO: 743042 - DNA, 15 bp, Homo sapiens
cagaggccgaggttg

SEQ ID NO: 743043 - DNA, 15 bp, Homo sapiens
agaggccgaggttgg

SEQ ID NO: 743044 - DNA, 15 bp, Homo sapiens
gaggccgaggttgga

SEQ ID NO: 743045 - DNA, 15 bp, Homo sapiens
aggccgaggttggag

SEQ ID NO: 743046 - DNA, 15 bp, Homo sapiens
ggccgaggttggagg

SEQ ID NO: 743047 - DNA, 15 bp, Homo sapiens
gccgaggttggaggt

SEQ ID NO: 743048 - DNA, 15 bp, Homo sapiens
ccgaggttggaggta

SEQ ID NO: 743049 - DNA, 15 bp, Homo sapiens
cgaggttggaggtac

SEQ ID NO: 743050 - DNA, 15 bp, Homo sapiens
gaggttggaggtact

SEQ ID NO: 743051 - DNA, 15 bp, Homo sapiens
aggttggaggtacta

SEQ ID NO: 743052 - DNA, 15 bp, Homo sapiens
ggttggaggtactat

SEQ ID NO: 743053 - DNA, 15 bp, Homo sapiens
gttggaggtactatg

SEQ ID NO: 743054 - DNA, 15 bp, Homo sapiens
ttggaggtactatgg

SEQ ID NO: 743055 - DNA, 15 bp, Homo sapiens
tggaggtactatggg

SEQ ID NO: 743056 - DNA, 15 bp, Homo sapiens
ggaggtactatggga

SEQ ID NO: 743057 - DNA, 15 bp, Homo sapiens
gaggtactatgggat

SEQ ID NO: 743058 - DNA, 15 bp, Homo sapiens
aggtactatgggatg

SEQ ID NO: 743059 - DNA, 15 bp, Homo sapiens
ggtactatgggatgg

SEQ ID NO: 743060 - DNA, 15 bp, Homo sapiens
gtactatgggatggt

SEQ ID NO: 743061 - DNA, 15 bp, Homo sapiens
tactatgggatggta

SEQ ID NO: 743062 - DNA, 15 bp, Homo sapiens
actatgggatggtat

SEQ ID NO: 743063 - DNA, 15 bp, Homo sapiens
ctatgggatggtatg

SEQ ID NO: 743064 - DNA, 15 bp, Homo sapiens
tatgggatggtatgg

SEQ ID NO: 743065 - DNA, 15 bp, Homo sapiens
atgggatggtatgga

SEQ ID NO: 743066 - DNA, 15 bp, Homo sapiens
tgggatggtatggag

SEQ ID NO: 743067 - DNA, 15 bp, Homo sapiens
gggatggtatggaga

SEQ ID NO: 743068 - DNA, 15 bp, Homo sapiens
ggatggtatggagag

SEQ ID NO: 743069 - DNA, 15 bp, Homo sapiens
gatggtatggagagg

SEQ ID NO: 743070 - DNA, 15 bp, Homo sapiens
atggtatggagagga

SEQ ID NO: 743071 - DNA, 15 bp, Homo sapiens
tggtatggagaggag

SEQ ID NO: 743072 - DNA, 15 bp, Homo sapiens
ggtatggagaggagg

SEQ ID NO: 743073 - DNA, 15 bp, Homo sapiens
gtatggagaggaggc

SEQ ID NO: 743074 - DNA, 15 bp, Homo sapiens
tatggagaggaggct

SEQ ID NO: 743075 - DNA, 15 bp, Homo sapiens
atggagaggaggctc

SEQ ID NO: 743076 - DNA, 15 bp, Homo sapiens
tggagaggaggctca

SEQ ID NO: 743077 - DNA, 15 bp, Homo sapiens
ggagaggaggctcag

SEQ ID NO: 743078 - DNA, 15 bp, Homo sapiens
gagaggaggctcaga

SEQ ID NO: 743079 - DNA, 15 bp, Homo sapiens
agaggaggctcagac

SEQ ID NO: 743080 - DNA, 15 bp, Homo sapiens
gaggaggctcagaca

SEQ ID NO: 743081 - DNA, 15 bp, Homo sapiens
aggaggctcagacaa

SEQ ID NO: 743082 - DNA, 15 bp, Homo sapiens
ggaggctcagacaat

SEQ ID NO: 743083 - DNA, 15 bp, Homo sapiens
gaggctcagacaatt

SEQ ID NO: 743084 - DNA, 15 bp, Homo sapiens
aggctcagacaattc

SEQ ID NO: 743085 - DNA, 15 bp, Homo sapiens
ggctcagacaattcc

SEQ ID NO: 743086 - DNA, 15 bp, Homo sapiens
gctcagacaattcca

SEQ ID NO: 743087 - DNA, 15 bp, Homo sapiens
ctcagacaattccat

SEQ ID NO: 743088 - DNA, 15 bp, Homo sapiens
tcagacaattccatt

SEQ ID NO: 743089 - DNA, 15 bp, Homo sapiens
cagacaattccattt

SEQ ID NO: 743090 - DNA, 15 bp, Homo sapiens
agacaattccatttt

SEQ ID NO: 743091 - DNA, 15 bp, Homo sapiens
gacaattccattttc

SEQ ID NO: 743092 - DNA, 15 bp, Homo sapiens
acaattccattttct

SEQ ID NO: 743093 - DNA, 15 bp, Homo sapiens
caattccattttctg

SEQ ID NO: 743094 - DNA, 15 bp, Homo sapiens
aattccattttctgg

SEQ ID NO: 743095 - DNA, 15 bp, Homo sapiens
attccattttctgga

SEQ ID NO: 743096 - DNA, 15 bp, Homo sapiens
ttccattttctggag

SEQ ID NO: 743097 - DNA, 15 bp, Homo sapiens
tccattttctggagc

SEQ ID NO: 743098 - DNA, 15 bp, Homo sapiens
ccattttctggagca

SEQ ID NO: 743099 - DNA, 15 bp, Homo sapiens
cattttctggagcac

SEQ ID NO: 743100 - DNA, 15 bp, Homo sapiens
attttctggagcaca

SEQ ID NO: 743101 - DNA, 15 bp, Homo sapiens
ttttctggagcacac

SEQ ID NO: 743102 - DNA, 15 bp, Homo sapiens
tttctggagcacact

SEQ ID NO: 743103 - DNA, 15 bp, Homo sapiens
ttctggagcacactt

SEQ ID NO: 743104 - DNA, 15 bp, Homo sapiens
tctggagcacacttt

SEQ ID NO: 743105 - DNA, 15 bp, Homo sapiens
ctggagcacactttc

SEQ ID NO: 743106 - DNA, 15 bp, Homo sapiens
tggagcacactttct

SEQ ID NO: 743107 - DNA, 15 bp, Homo sapiens
ggagcacactttctg

SEQ ID NO: 743108 - DNA, 15 bp, Homo sapiens
gagcacactttctgc

SEQ ID NO: 743109 - DNA, 15 bp, Homo sapiens
agcacactttctgca

SEQ ID NO: 743110 - DNA, 15 bp, Homo sapiens
gcacactttctgcag

SEQ ID NO: 743111 - DNA, 15 bp, Homo sapiens
cacactttctgcagc

SEQ ID NO: 743112 - DNA, 15 bp, Homo sapiens
acactttctgcagct

SEQ ID NO: 743113 - DNA, 15 bp, Homo sapiens
cactttctgcagctc

SEQ ID NO: 743114 - DNA, 15 bp, Homo sapiens
actttctgcagctcc

SEQ ID NO: 743115 - DNA, 15 bp, Homo sapiens
ctttctgcagctccc

SEQ ID NO: 743116 - DNA, 15 bp, Homo sapiens
tttctgcagctccct

SEQ ID NO: 743117 - DNA, 15 bp, Homo sapiens
ttctgcagctccctt

SEQ ID NO: 743118 - DNA, 15 bp, Homo sapiens
tctgcagctcccttt

SEQ ID NO: 743119 - DNA, 15 bp, Homo sapiens
ctgcagctccctttt

SEQ ID NO: 743120 - DNA, 15 bp, Homo sapiens
tgcagctccctttta

SEQ ID NO: 743121 - DNA, 15 bp, Homo sapiens
gcagctcccttttac

SEQ ID NO: 743122 - DNA, 15 bp, Homo sapiens
cagctcccttttaca

SEQ ID NO: 743123 - DNA, 15 bp, Homo sapiens
agctcccttttacat

SEQ ID NO: 743124 - DNA, 15 bp, Homo sapiens
gctcccttttacata

SEQ ID NO: 743125 - DNA, 15 bp, Homo sapiens
ctcccttttacatac

SEQ ID NO: 743126 - DNA, 15 bp, Homo sapiens
tcccttttacataca

SEQ ID NO: 743127 - DNA, 15 bp, Homo sapiens
cccttttacatacac

SEQ ID NO: 743128 - DNA, 15 bp, Homo sapiens
ccttttacatacact

SEQ ID NO: 743129 - DNA, 15 bp, Homo sapiens
cttttacatacactt

SEQ ID NO: 743130 - DNA, 15 bp, Homo sapiens
ttttacatacacttc

SEQ ID NO: 743131 - DNA, 15 bp, Homo sapiens
tttacatacacttct

SEQ ID NO: 743132 - DNA, 15 bp, Homo sapiens
ttacatacacttctt

SEQ ID NO: 743133 - DNA, 15 bp, Homo sapiens
tacatacacttcttt

SEQ ID NO: 743134 - DNA, 15 bp, Homo sapiens
acatacacttctttt

SEQ ID NO: 743135 - DNA, 15 bp, Homo sapiens
catacacttcttttt

SEQ ID NO: 743136 - DNA, 15 bp, Homo sapiens
atacacttctttttg

SEQ ID NO: 743137 - DNA, 15 bp, Homo sapiens
tacacttctttttga

SEQ ID NO: 743138 - DNA, 15 bp, Homo sapiens
acacttctttttgag

SEQ ID NO: 743139 - DNA, 15 bp, Homo sapiens
cacttctttttgaga

SEQ ID NO: 743140 - DNA, 15 bp, Homo sapiens
acttctttttgagaa

SEQ ID NO: 743141 - DNA, 15 bp, Homo sapiens
cttctttttgagaac

SEQ ID NO: 743142 - DNA, 15 bp, Homo sapiens
ttctttttgagaacc

SEQ ID NO: 743143 - DNA, 15 bp, Homo sapiens
tctttttgagaacca

SEQ ID NO: 743144 - DNA, 15 bp, Homo sapiens
ctttttgagaaccaa

SEQ ID NO: 743145 - DNA, 15 bp, Homo sapiens
tttttgagaaccaaa

SEQ ID NO: 743146 - DNA, 15 bp, Homo sapiens
ttttgagaaccaaat

SEQ ID NO: 743147 - DNA, 15 bp, Homo sapiens
tttgagaaccaaata

SEQ ID NO: 743148 - DNA, 15 bp, Homo sapiens
ttgagaaccaaatac

SEQ ID NO: 743149 - DNA, 15 bp, Homo sapiens
tgagaaccaaatact

SEQ ID NO: 743150 - DNA, 15 bp, Homo sapiens
gagaaccaaatactc

SEQ ID NO: 743151 - DNA, 15 bp, Homo sapiens
agaaccaaatactca

SEQ ID NO: 743152 - DNA, 15 bp, Homo sapiens
gaaccaaatactcaa

SEQ ID NO: 743153 - DNA, 15 bp, Homo sapiens
aaccaaatactcaag

SEQ ID NO: 743154 - DNA, 15 bp, Homo sapiens
accaaatactcaaga

SEQ ID NO: 743155 - DNA, 15 bp, Homo sapiens
ccaaatactcaagaa

SEQ ID NO: 743156 - DNA, 15 bp, Homo sapiens
caaatactcaagaac

SEQ ID NO: 743157 - DNA, 15 bp, Homo sapiens
aaatactcaagaact

SEQ ID NO: 743158 - DNA, 15 bp, Homo sapiens
aatactcaagaactc

SEQ ID NO: 743159 - DNA, 15 bp, Homo sapiens
atactcaagaactct

SEQ ID NO: 743160 - DNA, 15 bp, Homo sapiens
tactcaagaactctt

SEQ ID NO: 743161 - DNA, 15 bp, Homo sapiens
actcaagaactctta

SEQ ID NO: 743162 - DNA, 15 bp, Homo sapiens
ctcaagaactcttac

SEQ ID NO: 743163 - DNA, 15 bp, Homo sapiens
tcaagaactcttacc

SEQ ID NO: 743164 - DNA, 15 bp, Homo sapiens
caagaactcttacct

SEQ ID NO: 743165 - DNA, 15 bp, Homo sapiens
aagaactcttacctc

SEQ ID NO: 743166 - DNA, 15 bp, Homo sapiens
agaactcttacctca

SEQ ID NO: 743167 - DNA, 15 bp, Homo sapiens
gaactcttacctcat

SEQ ID NO: 743168 - DNA, 15 bp, Homo sapiens
aactcttacctcatt

SEQ ID NO: 743169 - DNA, 15 bp, Homo sapiens
actcttacctcattc

SEQ ID NO: 743170 - DNA, 15 bp, Homo sapiens
ctcttacctcattcc

SEQ ID NO: 743171 - DNA, 15 bp, Homo sapiens
tcttacctcattcca

SEQ ID NO: 743172 - DNA, 15 bp, Homo sapiens
cttacctcattccat

SEQ ID NO: 743173 - DNA, 15 bp, Homo sapiens
ttacctcattccatt

SEQ ID NO: 743174 - DNA, 15 bp, Homo sapiens
tacctcattccattt

SEQ ID NO: 743175 - DNA, 15 bp, Homo sapiens
acctcattccatttt

SEQ ID NO: 743176 - DNA, 15 bp, Homo sapiens
cctcattccattttc

SEQ ID NO: 743177 - DNA, 15 bp, Homo sapiens
ctcattccattttct

SEQ ID NO: 743178 - DNA, 15 bp, Homo sapiens
tcattccattttctc

SEQ ID NO: 743179 - DNA, 15 bp, Homo sapiens
cattccattttctcc

SEQ ID NO: 743180 - DNA, 15 bp, Homo sapiens
attccattttctcct

SEQ ID NO: 743181 - DNA, 15 bp, Homo sapiens
ttccattttctcctt

SEQ ID NO: 743182 - DNA, 15 bp, Homo sapiens
tccattttctccttt

SEQ ID NO: 743183 - DNA, 15 bp, Homo sapiens
ccattttctcctttg

SEQ ID NO: 743184 - DNA, 15 bp, Homo sapiens
cattttctcctttga

SEQ ID NO: 743185 - DNA, 15 bp, Homo sapiens
attttctcctttgac

SEQ ID NO: 743186 - DNA, 15 bp, Homo sapiens
ttttctcctttgact

SEQ ID NO: 743187 - DNA, 15 bp, Homo sapiens
tttctcctttgactt

SEQ ID NO: 743188 - DNA, 15 bp, Homo sapiens
ttctcctttgacttt

SEQ ID NO: 743189 - DNA, 15 bp, Homo sapiens
tctcctttgactttg

SEQ ID NO: 743190 - DNA, 15 bp, Homo sapiens
ctcctttgactttgg

SEQ ID NO: 743191 - DNA, 15 bp, Homo sapiens
tcctttgactttggc

SEQ ID NO: 743192 - DNA, 15 bp, Homo sapiens
cctttgactttggcc

SEQ ID NO: 743193 - DNA, 15 bp, Homo sapiens
ctttgactttggcct

SEQ ID NO: 743194 - DNA, 15 bp, Homo sapiens
tttgactttggcctt

SEQ ID NO: 743195 - DNA, 15 bp, Homo sapiens
ttgactttggccttg

SEQ ID NO: 743196 - DNA, 15 bp, Homo sapiens
tgactttggccttga

SEQ ID NO: 743197 - DNA, 15 bp, Homo sapiens
gactttggccttgac

SEQ ID NO: 743198 - DNA, 15 bp, Homo sapiens
actttggccttgact

SEQ ID NO: 743199 - DNA, 15 bp, Homo sapiens
ctttggccttgactc

SEQ ID NO: 743200 - DNA, 15 bp, Homo sapiens
tttggccttgactct

SEQ ID NO: 743201 - DNA, 15 bp, Homo sapiens
ttggccttgactctt

SEQ ID NO: 743202 - DNA, 15 bp, Homo sapiens
tggccttgactcttt

SEQ ID NO: 743203 - DNA, 15 bp, Homo sapiens
ggccttgactctttc

SEQ ID NO: 743204 - DNA, 15 bp, Homo sapiens
gccttgactctttct

SEQ ID NO: 743205 - DNA, 15 bp, Homo sapiens
ccttgactctttctt

SEQ ID NO: 743206 - DNA, 15 bp, Homo sapiens
cttgactctttctta

SEQ ID NO: 743207 - DNA, 15 bp, Homo sapiens
ttgactctttcttag

SEQ ID NO: 743208 - DNA, 15 bp, Homo sapiens
tgactctttcttagt

SEQ ID NO: 743209 - DNA, 15 bp, Homo sapiens
gactctttcttagtg

SEQ ID NO: 743210 - DNA, 15 bp, Homo sapiens
actctttcttagtgg

SEQ ID NO: 743211 - DNA, 15 bp, Homo sapiens
ctctttcttagtgga

SEQ ID NO: 743212 - DNA, 15 bp, Homo sapiens
tctttcttagtggat

SEQ ID NO: 743213 - DNA, 15 bp, Homo sapiens
ctttcttagtggatg

SEQ ID NO: 743214 - DNA, 15 bp, Homo sapiens
tttcttagtggatgt

SEQ ID NO: 743215 - DNA, 15 bp, Homo sapiens
ttcttagtggatgtg

SEQ ID NO: 743216 - DNA, 15 bp, Homo sapiens
tcttagtggatgtgt

SEQ ID NO: 743217 - DNA, 15 bp, Homo sapiens
cttagtggatgtgta

SEQ ID NO: 743218 - DNA, 15 bp, Homo sapiens
ttagtggatgtgtac

SEQ ID NO: 743219 - DNA, 15 bp, Homo sapiens
tagtggatgtgtact

SEQ ID NO: 743220 - DNA, 15 bp, Homo sapiens
agtggatgtgtactc

SEQ ID NO: 743221 - DNA, 15 bp, Homo sapiens
gtggatgtgtactct

SEQ ID NO: 743222 - DNA, 15 bp, Homo sapiens
tggatgtgtactcta

SEQ ID NO: 743223 - DNA, 15 bp, Homo sapiens
ggatgtgtactctaa

SEQ ID NO: 743224 - DNA, 15 bp, Homo sapiens
gatgtgtactctaaa

SEQ ID NO: 743225 - DNA, 15 bp, Homo sapiens
atgtgtactctaaac

SEQ ID NO: 743226 - DNA, 15 bp, Homo sapiens
tgtgtactctaaacc

SEQ ID NO: 743227 - DNA, 15 bp, Homo sapiens
gtgtactctaaaccc

SEQ ID NO: 743228 - DNA, 15 bp, Homo sapiens
tgtactctaaaccca

SEQ ID NO: 743229 - DNA, 15 bp, Homo sapiens
gtactctaaacccaa

SEQ ID NO: 743230 - DNA, 15 bp, Homo sapiens
tactctaaacccaat

SEQ ID NO: 743231 - DNA, 15 bp, Homo sapiens
actctaaacccaatg

SEQ ID NO: 743232 - DNA, 15 bp, Homo sapiens
ctctaaacccaatga

SEQ ID NO: 743233 - DNA, 15 bp, Homo sapiens
tctaaacccaatgaa

SEQ ID NO: 743234 - DNA, 15 bp, Homo sapiens
ctaaacccaatgaat

SEQ ID NO: 743235 - DNA, 15 bp, Homo sapiens
taaacccaatgaatg

SEQ ID NO: 743236 - DNA, 15 bp, Homo sapiens
aaacccaatgaatgt

SEQ ID NO: 743237 - DNA, 15 bp, Homo sapiens
aacccaatgaatgta

SEQ ID NO: 743238 - DNA, 15 bp, Homo sapiens
acccaatgaatgtat

SEQ ID NO: 743239 - DNA, 15 bp, Homo sapiens
cccaatgaatgtatt

SEQ ID NO: 743240 - DNA, 15 bp, Homo sapiens
ccaatgaatgtattc

SEQ ID NO: 743241 - DNA, 15 bp, Homo sapiens
caatgaatgtattcc

SEQ ID NO: 743242 - DNA, 15 bp, Homo sapiens
aatgaatgtattccg

SEQ ID NO: 743243 - DNA, 15 bp, Homo sapiens
atgaatgtattccga

SEQ ID NO: 743244 - DNA, 15 bp, Homo sapiens
tgaatgtattccgaa

SEQ ID NO: 743245 - DNA, 15 bp, Homo sapiens
gaatgtattccgaat

SEQ ID NO: 743246 - DNA, 15 bp, Homo sapiens
aatgtattccgaatc

SEQ ID NO: 743247 - DNA, 15 bp, Homo sapiens
atgtattccgaatca

SEQ ID NO: 743248 - DNA, 15 bp, Homo sapiens
tgtattccgaatcaa

SEQ ID NO: 743249 - DNA, 15 bp, Homo sapiens
gtattccgaatcaag

SEQ ID NO: 743250 - DNA, 15 bp, Homo sapiens
tattccgaatcaagc

SEQ ID NO: 743251 - DNA, 15 bp, Homo sapiens
attccgaatcaagca

SEQ ID NO: 743252 - DNA, 15 bp, Homo sapiens
ttccgaatcaagcaa

SEQ ID NO: 743253 - DNA, 15 bp, Homo sapiens
tccgaatcaagcaag

SEQ ID NO: 743254 - DNA, 15 bp, Homo sapiens
ccgaatcaagcaaga

SEQ ID NO: 743255 - DNA, 15 bp, Homo sapiens
cgaatcaagcaagag

SEQ ID NO: 743256 - DNA, 15 bp, Homo sapiens
gaatcaagcaagaga

SEQ ID NO: 743257 - DNA, 15 bp, Homo sapiens
aatcaagcaagagag

SEQ ID NO: 743258 - DNA, 15 bp, Homo sapiens
atcaagcaagagaga

SEQ ID NO: 743259 - DNA, 15 bp, Homo sapiens
tcaagcaagagagaa

SEQ ID NO: 743260 - DNA, 15 bp, Homo sapiens
caagcaagagagaag

SEQ ID NO: 743261 - DNA, 15 bp, Homo sapiens
aagcaagagagaagc

SEQ ID NO: 743262 - DNA, 15 bp, Homo sapiens
agcaagagagaagct

SEQ ID NO: 743263 - DNA, 15 bp, Homo sapiens
gcaagagagaagctt

SEQ ID NO: 743264 - DNA, 15 bp, Homo sapiens
caagagagaagcttc

SEQ ID NO: 743265 - DNA, 15 bp, Homo sapiens
aagagagaagcttca

SEQ ID NO: 743266 - DNA, 15 bp, Homo sapiens
agagagaagcttcaa

SEQ ID NO: 743267 - DNA, 15 bp, Homo sapiens
gagagaagcttcaaa

SEQ ID NO: 743268 - DNA, 15 bp, Homo sapiens
agagaagcttcaaac

SEQ ID NO: 743269 - DNA, 15 bp, Homo sapiens
gagaagcttcaaaca

SEQ ID NO: 743270 - DNA, 15 bp, Homo sapiens
agaagcttcaaacat

SEQ ID NO: 743271 - DNA, 15 bp, Homo sapiens
gaagcttcaaacatc

SEQ ID NO: 743272 - DNA, 15 bp, Homo sapiens
aagcttcaaacatcc

SEQ ID NO: 743273 - DNA, 15 bp, Homo sapiens
agcttcaaacatcct

SEQ ID NO: 743274 - DNA, 15 bp, Homo sapiens
gcttcaaacatcctc

SEQ ID NO: 743275 - DNA, 15 bp, Homo sapiens
cttcaaacatcctct

SEQ ID NO: 743276 - DNA, 15 bp, Homo sapiens
ttcaaacatcctctt

SEQ ID NO: 743277 - DNA, 15 bp, Homo sapiens
tcaaacatcctcttc

SEQ ID NO: 743278 - DNA, 15 bp, Homo sapiens
caaacatcctcttca

SEQ ID NO: 743279 - DNA, 15 bp, Homo sapiens
aaacatcctcttcag

SEQ ID NO: 743280 - DNA, 15 bp, Homo sapiens
aacatcctcttcagc

SEQ ID NO: 743281 - DNA, 15 bp, Homo sapiens
acatcctcttcagcc

SEQ ID NO: 743282 - DNA, 15 bp, Homo sapiens
catcctcttcagcct

SEQ ID NO: 743283 - DNA, 15 bp, Homo sapiens
atcctcttcagcctc

SEQ ID NO: 743284 - DNA, 15 bp, Homo sapiens
tcctcttcagcctct

SEQ ID NO: 743285 - DNA, 15 bp, Homo sapiens
cctcttcagcctctc

SEQ ID NO: 743286 - DNA, 15 bp, Homo sapiens
ctcttcagcctctct

SEQ ID NO: 743287 - DNA, 15 bp, Homo sapiens
tcttcagcctctctg

SEQ ID NO: 743288 - DNA, 15 bp, Homo sapiens
cttcagcctctctgc

SEQ ID NO: 743289 - DNA, 15 bp, Homo sapiens
ttcagcctctctgcc

SEQ ID NO: 743290 - DNA, 15 bp, Homo sapiens
tcagcctctctgccc

SEQ ID NO: 743291 - DNA, 15 bp, Homo sapiens
cagcctctctgccca

SEQ ID NO: 743292 - DNA, 15 bp, Homo sapiens
agcctctctgcccag

SEQ ID NO: 743293 - DNA, 15 bp, Homo sapiens
gcctctctgcccagc

SEQ ID NO: 743294 - DNA, 15 bp, Homo sapiens
cctctctgcccagct

SEQ ID NO: 743295 - DNA, 15 bp, Homo sapiens
ctctctgcccagctc

SEQ ID NO: 743296 - DNA, 15 bp, Homo sapiens
tctctgcccagctca

SEQ ID NO: 743297 - DNA, 15 bp, Homo sapiens
ctctgcccagctcag

SEQ ID NO: 743298 - DNA, 15 bp, Homo sapiens
tctgcccagctcagc

SEQ ID NO: 743299 - DNA, 15 bp, Homo sapiens
ctgcccagctcagcc

SEQ ID NO: 743300 - DNA, 15 bp, Homo sapiens
tgcccagctcagcct

SEQ ID NO: 743301 - DNA, 15 bp, Homo sapiens
gcccagctcagcctc

SEQ ID NO: 743302 - DNA, 15 bp, Homo sapiens
cccagctcagcctcc

SEQ ID NO: 743303 - DNA, 15 bp, Homo sapiens
ccagctcagcctccc

SEQ ID NO: 743304 - DNA, 15 bp, Homo sapiens
cagctcagcctccct

SEQ ID NO: 743305 - DNA, 15 bp, Homo sapiens
agctcagcctccctt

SEQ ID NO: 743306 - DNA, 15 bp, Homo sapiens
gctcagcctcccttg

SEQ ID NO: 743307 - DNA, 15 bp, Homo sapiens
ctcagcctcccttgc

SEQ ID NO: 743308 - DNA, 15 bp, Homo sapiens
tcagcctcccttgct

SEQ ID NO: 743309 - DNA, 15 bp, Homo sapiens
cagcctcccttgctc

SEQ ID NO: 743310 - DNA, 15 bp, Homo sapiens
agcctcccttgctcg

SEQ ID NO: 743311 - DNA, 15 bp, Homo sapiens
gcctcccttgctcgc

SEQ ID NO: 743312 - DNA, 15 bp, Homo sapiens
cctcccttgctcgct

SEQ ID NO: 743313 - DNA, 15 bp, Homo sapiens
ctcccttgctcgctc

SEQ ID NO: 743314 - DNA, 15 bp, Homo sapiens
tcccttgctcgctct

SEQ ID NO: 743315 - DNA, 15 bp, Homo sapiens
cccttgctcgctctt

SEQ ID NO: 743316 - DNA, 15 bp, Homo sapiens
ccttgctcgctcttc

SEQ ID NO: 743317 - DNA, 15 bp, Homo sapiens
cttgctcgctcttcc

SEQ ID NO: 743318 - DNA, 15 bp, Homo sapiens
ttgctcgctcttcct

SEQ ID NO: 743319 - DNA, 15 bp, Homo sapiens
tgctcgctcttcctt

SEQ ID NO: 743320 - DNA, 15 bp, Homo sapiens
gctcgctcttccttc

SEQ ID NO: 743321 - DNA, 15 bp, Homo sapiens
ctcgctcttccttcc

SEQ ID NO: 743322 - DNA, 15 bp, Homo sapiens
tcgctcttccttcca

SEQ ID NO: 743323 - DNA, 15 bp, Homo sapiens
cgctcttccttccag

SEQ ID NO: 743324 - DNA, 15 bp, Homo sapiens
gctcttccttccaga

SEQ ID NO: 743325 - DNA, 15 bp, Homo sapiens
ctcttccttccagag

SEQ ID NO: 743326 - DNA, 15 bp, Homo sapiens
tcttccttccagaga

SEQ ID NO: 743327 - DNA, 15 bp, Homo sapiens
cttccttccagagac

SEQ ID NO: 743328 - DNA, 15 bp, Homo sapiens
ttccttccagagacc

SEQ ID NO: 743329 - DNA, 15 bp, Homo sapiens
tccttccagagacct

SEQ ID NO: 743330 - DNA, 15 bp, Homo sapiens
ccttccagagacctc

SEQ ID NO: 743331 - DNA, 15 bp, Homo sapiens
cttccagagacctcc

SEQ ID NO: 743332 - DNA, 15 bp, Homo sapiens
ttccagagacctcca

SEQ ID NO: 743333 - DNA, 15 bp, Homo sapiens
tccagagacctccaa

SEQ ID NO: 743334 - DNA, 15 bp, Homo sapiens
ccagagacctccaag

SEQ ID NO: 743335 - DNA, 15 bp, Homo sapiens
cagagacctccaagg

SEQ ID NO: 743336 - DNA, 15 bp, Homo sapiens
agagacctccaagga

SEQ ID NO: 743337 - DNA, 15 bp, Homo sapiens
gagacctccaaggac

SEQ ID NO: 743338 - DNA, 15 bp, Homo sapiens
agacctccaaggaca

SEQ ID NO: 743339 - DNA, 15 bp, Homo sapiens
gacctccaaggacaa

SEQ ID NO: 743340 - DNA, 15 bp, Homo sapiens
acctccaaggacaag

SEQ ID NO: 743341 - DNA, 15 bp, Homo sapiens
cctccaaggacaagg

SEQ ID NO: 743342 - DNA, 15 bp, Homo sapiens
ctccaaggacaaggg

SEQ ID NO: 743343 - DNA, 15 bp, Homo sapiens
tccaaggacaagggc

SEQ ID NO: 743344 - DNA, 15 bp, Homo sapiens
ccaaggacaagggca

SEQ ID NO: 743345 - DNA, 15 bp, Homo sapiens
caaggacaagggcag

SEQ ID NO: 743346 - DNA, 15 bp, Homo sapiens
aaggacaagggcagg

SEQ ID NO: 743347 - DNA, 15 bp, Homo sapiens
aggacaagggcaggg

SEQ ID NO: 743348 - DNA, 15 bp, Homo sapiens
ggacaagggcagggc

SEQ ID NO: 743349 - DNA, 15 bp, Homo sapiens
gacaagggcagggct

SEQ ID NO: 743350 - DNA, 15 bp, Homo sapiens
acaagggcagggctg

SEQ ID NO: 743351 - DNA, 15 bp, Homo sapiens
caagggcagggctga

SEQ ID NO: 743352 - DNA, 15 bp, Homo sapiens
aagggcagggctgat

SEQ ID NO: 743353 - DNA, 15 bp, Homo sapiens
agggcagggctgatc

SEQ ID NO: 743354 - DNA, 15 bp, Homo sapiens
gggcagggctgatct

SEQ ID NO: 743355 - DNA, 15 bp, Homo sapiens
ggcagggctgatctg

SEQ ID NO: 743356 - DNA, 15 bp, Homo sapiens
gcagggctgatctga

SEQ ID NO: 743357 - DNA, 15 bp, Homo sapiens
cagggctgatctgac

SEQ ID NO: 743358 - DNA, 15 bp, Homo sapiens
agggctgatctgact

SEQ ID NO: 743359 - DNA, 15 bp, Homo sapiens
gggctgatctgactc

SEQ ID NO: 743360 - DNA, 15 bp, Homo sapiens
ggctgatctgactct

SEQ ID NO: 743361 - DNA, 15 bp, Homo sapiens
gctgatctgactctc

SEQ ID NO: 743362 - DNA, 15 bp, Homo sapiens
ctgatctgactctca

SEQ ID NO: 743363 - DNA, 15 bp, Homo sapiens
tgatctgactctcac

SEQ ID NO: 743364 - DNA, 15 bp, Homo sapiens
gatctgactctcacg

SEQ ID NO: 743365 - DNA, 15 bp, Homo sapiens
atctgactctcacgg

SEQ ID NO: 743366 - DNA, 15 bp, Homo sapiens
tctgactctcacgga

SEQ ID NO: 743367 - DNA, 15 bp, Homo sapiens
ctgactctcacggag

SEQ ID NO: 743368 - DNA, 15 bp, Homo sapiens
tgactctcacggaga

SEQ ID NO: 743369 - DNA, 15 bp, Homo sapiens
gactctcacggagac

SEQ ID NO: 743370 - DNA, 15 bp, Homo sapiens
actctcacggagaca

SEQ ID NO: 743371 - DNA, 15 bp, Homo sapiens
ctctcacggagacag

SEQ ID NO: 743372 - DNA, 15 bp, Homo sapiens
tctcacggagacagc

SEQ ID NO: 743373 - DNA, 15 bp, Homo sapiens
ctcacggagacagcc

SEQ ID NO: 743374 - DNA, 15 bp, Homo sapiens
tcacggagacagcct

SEQ ID NO: 743375 - DNA, 15 bp, Homo sapiens
cacggagacagcctc

SEQ ID NO: 743376 - DNA, 15 bp, Homo sapiens
acggagacagcctca

SEQ ID NO: 743377 - DNA, 15 bp, Homo sapiens
cggagacagcctcag

SEQ ID NO: 743378 - DNA, 15 bp, Homo sapiens
ggagacagcctcagg

SEQ ID NO: 743379 - DNA, 15 bp, Homo sapiens
gagacagcctcaggt

SEQ ID NO: 743380 - DNA, 15 bp, Homo sapiens
agacagcctcaggtg

SEQ ID NO: 743381 - DNA, 15 bp, Homo sapiens
gacagcctcaggtgt

SEQ ID NO: 743382 - DNA, 15 bp, Homo sapiens
acagcctcaggtgta

SEQ ID NO: 743383 - DNA, 15 bp, Homo sapiens
cagcctcaggtgtaa

SEQ ID NO: 743384 - DNA, 15 bp, Homo sapiens
agcctcaggtgtaaa

SEQ ID NO: 743385 - DNA, 15 bp, Homo sapiens
gcctcaggtgtaaag

SEQ ID NO: 743386 - DNA, 15 bp, Homo sapiens
cctcaggtgtaaagc

SEQ ID NO: 743387 - DNA, 15 bp, Homo sapiens
ctcaggtgtaaagct

SEQ ID NO: 743388 - DNA, 15 bp, Homo sapiens
tcaggtgtaaagcta

SEQ ID NO: 743389 - DNA, 15 bp, Homo sapiens
caggtgtaaagctaa

SEQ ID NO: 743390 - DNA, 15 bp, Homo sapiens
aggtgtaaagctaag

SEQ ID NO: 743391 - DNA, 15 bp, Homo sapiens
ggtgtaaagctaagg

SEQ ID NO: 743392 - DNA, 15 bp, Homo sapiens
gtgtaaagctaagga

SEQ ID NO: 743393 - DNA, 15 bp, Homo sapiens
tgtaaagctaaggat

SEQ ID NO: 743394 - DNA, 15 bp, Homo sapiens
gtaaagctaaggatg

SEQ ID NO: 743395 - DNA, 15 bp, Homo sapiens
taaagctaaggatgc

SEQ ID NO: 743396 - DNA, 15 bp, Homo sapiens
aaagctaaggatgct

SEQ ID NO: 743397 - DNA, 15 bp, Homo sapiens
aagctaaggatgcta

SEQ ID NO: 743398 - DNA, 15 bp, Homo sapiens
agctaaggatgctaa

SEQ ID NO: 743399 - DNA, 15 bp, Homo sapiens
gctaaggatgctaac

SEQ ID NO: 743400 - DNA, 15 bp, Homo sapiens
ctaaggatgctaact

SEQ ID NO: 743401 - DNA, 15 bp, Homo sapiens
taaggatgctaactt

SEQ ID NO: 743402 - DNA, 15 bp, Homo sapiens
aaggatgctaacttg

SEQ ID NO: 743403 - DNA, 15 bp, Homo sapiens
aggatgctaacttgg

SEQ ID NO: 743404 - DNA, 15 bp, Homo sapiens
ggatgctaacttggg

SEQ ID NO: 743405 - DNA, 15 bp, Homo sapiens
gatgctaacttgggc

SEQ ID NO: 743406 - DNA, 15 bp, Homo sapiens
atgctaacttgggcc

SEQ ID NO: 743407 - DNA, 15 bp, Homo sapiens
tgctaacttgggcct

SEQ ID NO: 743408 - DNA, 15 bp, Homo sapiens
gctaacttgggcctt

SEQ ID NO: 743409 - DNA, 15 bp, Homo sapiens
ctaacttgggccttt

SEQ ID NO: 743410 - DNA, 15 bp, Homo sapiens
taacttgggcctttt

SEQ ID NO: 743411 - DNA, 15 bp, Homo sapiens
aacttgggccttttc

SEQ ID NO: 743412 - DNA, 15 bp, Homo sapiens
acttgggccttttcc

SEQ ID NO: 743413 - DNA, 15 bp, Homo sapiens
cttgggccttttcca

SEQ ID NO: 743414 - DNA, 15 bp, Homo sapiens
ttgggccttttccat

SEQ ID NO: 743415 - DNA, 15 bp, Homo sapiens
tgggccttttccatg

SEQ ID NO: 743416 - DNA, 15 bp, Homo sapiens
gggccttttccatgg

SEQ ID NO: 743417 - DNA, 15 bp, Homo sapiens
ggccttttccatggg

SEQ ID NO: 743418 - DNA, 15 bp, Homo sapiens
gccttttccatggga

SEQ ID NO: 743419 - DNA, 15 bp, Homo sapiens
ccttttccatgggaa

SEQ ID NO: 743420 - DNA, 15 bp, Homo sapiens
cttttccatgggaag

SEQ ID NO: 743421 - DNA, 15 bp, Homo sapiens
ttttccatgggaaga

SEQ ID NO: 743422 - DNA, 15 bp, Homo sapiens
tttccatgggaagag

SEQ ID NO: 743423 - DNA, 15 bp, Homo sapiens
ttccatgggaagagc

SEQ ID NO: 743424 - DNA, 15 bp, Homo sapiens
tccatgggaagagct

SEQ ID NO: 743425 - DNA, 15 bp, Homo sapiens
ccatgggaagagctg

SEQ ID NO: 743426 - DNA, 15 bp, Homo sapiens
catgggaagagctga

SEQ ID NO: 743427 - DNA, 15 bp, Homo sapiens
atgggaagagctgaa

SEQ ID NO: 743428 - DNA, 15 bp, Homo sapiens
tgggaagagctgaaa

SEQ ID NO: 743429 - DNA, 15 bp, Homo sapiens
gggaagagctgaaag

SEQ ID NO: 743430 - DNA, 15 bp, Homo sapiens
ggaagagctgaaagg

SEQ ID NO: 743431 - DNA, 15 bp, Homo sapiens
gaagagctgaaagga

SEQ ID NO: 743432 - DNA, 15 bp, Homo sapiens
aagagctgaaaggaa

SEQ ID NO: 743433 - DNA, 15 bp, Homo sapiens
agagctgaaaggaac

SEQ ID NO: 743434 - DNA, 15 bp, Homo sapiens
gagctgaaaggaacc

SEQ ID NO: 743435 - DNA, 15 bp, Homo sapiens
agctgaaaggaacct

SEQ ID NO: 743436 - DNA, 15 bp, Homo sapiens
gctgaaaggaacctg

SEQ ID NO: 743437 - DNA, 15 bp, Homo sapiens
ctgaaaggaacctga

SEQ ID NO: 743438 - DNA, 15 bp, Homo sapiens
tgaaaggaacctgag

SEQ ID NO: 743439 - DNA, 15 bp, Homo sapiens
gaaaggaacctgaga

SEQ ID NO: 743440 - DNA, 15 bp, Homo sapiens
aaaggaacctgagaa

SEQ ID NO: 743441 - DNA, 15 bp, Homo sapiens
aaggaacctgagaat

SEQ ID NO: 743442 - DNA, 15 bp, Homo sapiens
aggaacctgagaatt

SEQ ID NO: 743443 - DNA, 15 bp, Homo sapiens
ggaacctgagaattc

SEQ ID NO: 743444 - DNA, 15 bp, Homo sapiens
gaacctgagaattcc

SEQ ID NO: 743445 - DNA, 15 bp, Homo sapiens
aacctgagaattcca

SEQ ID NO: 743446 - DNA, 15 bp, Homo sapiens
acctgagaattccaa

SEQ ID NO: 743447 - DNA, 15 bp, Homo sapiens
cctgagaattccaat

SEQ ID NO: 743448 - DNA, 15 bp, Homo sapiens
ctgagaattccaatt

SEQ ID NO: 743449 - DNA, 15 bp, Homo sapiens
tgagaattccaatta

SEQ ID NO: 743450 - DNA, 15 bp, Homo sapiens
gagaattccaattag

SEQ ID NO: 743451 - DNA, 15 bp, Homo sapiens
agaattccaattagg

SEQ ID NO: 743452 - DNA, 15 bp, Homo sapiens
gaattccaattaggc

SEQ ID NO: 743453 - DNA, 15 bp, Homo sapiens
aattccaattaggct

SEQ ID NO: 743454 - DNA, 15 bp, Homo sapiens
attccaattaggctt

SEQ ID NO: 743455 - DNA, 15 bp, Homo sapiens
ttccaattaggctta

SEQ ID NO: 743456 - DNA, 15 bp, Homo sapiens
tccaattaggcttaa

SEQ ID NO: 743457 - DNA, 15 bp, Homo sapiens
ccaattaggcttaaa

SEQ ID NO: 743458 - DNA, 15 bp, Homo sapiens
caattaggcttaaac

SEQ ID NO: 743459 - DNA, 15 bp, Homo sapiens
aattaggcttaaact

SEQ ID NO: 743460 - DNA, 15 bp, Homo sapiens
attaggcttaaacta

SEQ ID NO: 743461 - DNA, 15 bp, Homo sapiens
ttaggcttaaactaa

SEQ ID NO: 743462 - DNA, 15 bp, Homo sapiens
taggcttaaactaat

SEQ ID NO: 743463 - DNA, 15 bp, Homo sapiens
aggcttaaactaatg

SEQ ID NO: 743464 - DNA, 15 bp, Homo sapiens
ggcttaaactaatga

SEQ ID NO: 743465 - DNA, 15 bp, Homo sapiens
gcttaaactaatgag

SEQ ID NO: 743466 - DNA, 15 bp, Homo sapiens
cttaaactaatgagc

SEQ ID NO: 743467 - DNA, 15 bp, Homo sapiens
ttaaactaatgagct

SEQ ID NO: 743468 - DNA, 15 bp, Homo sapiens
taaactaatgagctg

SEQ ID NO: 743469 - DNA, 15 bp, Homo sapiens
aaactaatgagctgg

SEQ ID NO: 743470 - DNA, 15 bp, Homo sapiens
aactaatgagctgga

SEQ ID NO: 743471 - DNA, 15 bp, Homo sapiens
actaatgagctggaa

SEQ ID NO: 743472 - DNA, 15 bp, Homo sapiens
ctaatgagctggaaa

SEQ ID NO: 743473 - DNA, 15 bp, Homo sapiens
taatgagctggaaac

SEQ ID NO: 743474 - DNA, 15 bp, Homo sapiens
aatgagctggaaact

SEQ ID NO: 743475 - DNA, 15 bp, Homo sapiens
atgagctggaaactt

SEQ ID NO: 743476 - DNA, 15 bp, Homo sapiens
tgagctggaaacttt

SEQ ID NO: 743477 - DNA, 15 bp, Homo sapiens
gagctggaaactttg

SEQ ID NO: 743478 - DNA, 15 bp, Homo sapiens
agctggaaactttgg

SEQ ID NO: 743479 - DNA, 15 bp, Homo sapiens
gctggaaactttggg

SEQ ID NO: 743480 - DNA, 15 bp, Homo sapiens
ctggaaactttgggg

SEQ ID NO: 743481 - DNA, 15 bp, Homo sapiens
tggaaactttgggga

SEQ ID NO: 743482 - DNA, 15 bp, Homo sapiens
ggaaactttggggaa

SEQ ID NO: 743483 - DNA, 15 bp, Homo sapiens
gaaactttggggaaa

SEQ ID NO: 743484 - DNA, 15 bp, Homo sapiens
aaactttggggaaac

SEQ ID NO: 743485 - DNA, 15 bp, Homo sapiens
aactttggggaaacc

SEQ ID NO: 743486 - DNA, 15 bp, Homo sapiens
actttggggaaacca

SEQ ID NO: 743487 - DNA, 15 bp, Homo sapiens
ctttggggaaaccac

SEQ ID NO: 743488 - DNA, 15 bp, Homo sapiens
tttggggaaaccact

SEQ ID NO: 743489 - DNA, 15 bp, Homo sapiens
ttggggaaaccactg

SEQ ID NO: 743490 - DNA, 15 bp, Homo sapiens
tggggaaaccactgc

SEQ ID NO: 743491 - DNA, 15 bp, Homo sapiens
ggggaaaccactgca

SEQ ID NO: 743492 - DNA, 15 bp, Homo sapiens
gggaaaccactgcag

SEQ ID NO: 743493 - DNA, 15 bp, Homo sapiens
ggaaaccactgcagc

SEQ ID NO: 743494 - DNA, 15 bp, Homo sapiens
gaaaccactgcagca

SEQ ID NO: 743495 - DNA, 15 bp, Homo sapiens
aaaccactgcagcaa

SEQ ID NO: 743496 - DNA, 15 bp, Homo sapiens
aaccactgcagcaat

SEQ ID NO: 743497 - DNA, 15 bp, Homo sapiens
accactgcagcaatg

SEQ ID NO: 743498 - DNA, 15 bp, Homo sapiens
ccactgcagcaatga

SEQ ID NO: 743499 - DNA, 15 bp, Homo sapiens
cactgcagcaatgag

SEQ ID NO: 743500 - DNA, 15 bp, Homo sapiens
actgcagcaatgagg

SEQ ID NO: 743501 - DNA, 15 bp, Homo sapiens
ctgcagcaatgaggg

SEQ ID NO: 743502 - DNA, 15 bp, Homo sapiens
tgcagcaatgaggga

SEQ ID NO: 743503 - DNA, 15 bp, Homo sapiens
gcagcaatgagggaa

SEQ ID NO: 743504 - DNA, 15 bp, Homo sapiens
cagcaatgagggaag

SEQ ID NO: 743505 - DNA, 15 bp, Homo sapiens
agcaatgagggaaga

SEQ ID NO: 743506 - DNA, 15 bp, Homo sapiens
gcaatgagggaagag

SEQ ID NO: 743507 - DNA, 15 bp, Homo sapiens
caatgagggaagagc

SEQ ID NO: 743508 - DNA, 15 bp, Homo sapiens
aatgagggaagagcg

SEQ ID NO: 743509 - DNA, 15 bp, Homo sapiens
atgagggaagagcgt

SEQ ID NO: 743510 - DNA, 15 bp, Homo sapiens
tgagggaagagcgtg

SEQ ID NO: 743511 - DNA, 15 bp, Homo sapiens
gagggaagagcgtga

SEQ ID NO: 743512 - DNA, 15 bp, Homo sapiens
agggaagagcgtgat

SEQ ID NO: 743513 - DNA, 15 bp, Homo sapiens
gggaagagcgtgatc

SEQ ID NO: 743514 - DNA, 15 bp, Homo sapiens
ggaagagcgtgatca

SEQ ID NO: 743515 - DNA, 15 bp, Homo sapiens
gaagagcgtgatcat

SEQ ID NO: 743516 - DNA, 15 bp, Homo sapiens
aagagcgtgatcatc

SEQ ID NO: 743517 - DNA, 15 bp, Homo sapiens
agagcgtgatcatcc

SEQ ID NO: 743518 - DNA, 15 bp, Homo sapiens
gagcgtgatcatcct

SEQ ID NO: 743519 - DNA, 15 bp, Homo sapiens
agcgtgatcatcctc

SEQ ID NO: 743520 - DNA, 15 bp, Homo sapiens
gcgtgatcatcctcg

SEQ ID NO: 743521 - DNA, 15 bp, Homo sapiens
cgtgatcatcctcga

SEQ ID NO: 743522 - DNA, 15 bp, Homo sapiens
gtgatcatcctcgat

SEQ ID NO: 743523 - DNA, 15 bp, Homo sapiens
tgatcatcctcgatt

SEQ ID NO: 743524 - DNA, 15 bp, Homo sapiens
gatcatcctcgattt

SEQ ID NO: 743525 - DNA, 15 bp, Homo sapiens
atcatcctcgattta

SEQ ID NO: 743526 - DNA, 15 bp, Homo sapiens
tcatcctcgatttaa

SEQ ID NO: 743527 - DNA, 15 bp, Homo sapiens
catcctcgatttaat

SEQ ID NO: 743528 - DNA, 15 bp, Homo sapiens
atcctcgatttaatt

SEQ ID NO: 743529 - DNA, 15 bp, Homo sapiens
tcctcgatttaatta

SEQ ID NO: 743530 - DNA, 15 bp, Homo sapiens
cctcgatttaattag

SEQ ID NO: 743531 - DNA, 15 bp, Homo sapiens
ctcgatttaattagc

SEQ ID NO: 743532 - DNA, 15 bp, Homo sapiens
tcgatttaattagcg

SEQ ID NO: 743533 - DNA, 15 bp, Homo sapiens
cgatttaattagcgc

SEQ ID NO: 743534 - DNA, 15 bp, Homo sapiens
gatttaattagcgct

SEQ ID NO: 743535 - DNA, 15 bp, Homo sapiens
atttaattagcgctg

SEQ ID NO: 743536 - DNA, 15 bp, Homo sapiens
tttaattagcgctgg

SEQ ID NO: 743537 - DNA, 15 bp, Homo sapiens
ttaattagcgctgga

SEQ ID NO: 743538 - DNA, 15 bp, Homo sapiens
taattagcgctggaa

SEQ ID NO: 743539 - DNA, 15 bp, Homo sapiens
aattagcgctggaaa

SEQ ID NO: 743540 - DNA, 15 bp, Homo sapiens
attagcgctggaaaa

SEQ ID NO: 743541 - DNA, 15 bp, Homo sapiens
ttagcgctggaaaaa

SEQ ID NO: 743542 - DNA, 15 bp, Homo sapiens
tagcgctggaaaaac

SEQ ID NO: 743543 - DNA, 15 bp, Homo sapiens
agcgctggaaaaact

SEQ ID NO: 743544 - DNA, 15 bp, Homo sapiens
gcgctggaaaaactt

SEQ ID NO: 743545 - DNA, 15 bp, Homo sapiens
cgctggaaaaacttg

SEQ ID NO: 743546 - DNA, 15 bp, Homo sapiens
gctggaaaaacttgg

SEQ ID NO: 743547 - DNA, 15 bp, Homo sapiens
ctggaaaaacttggg

SEQ ID NO: 743548 - DNA, 15 bp, Homo sapiens
tggaaaaacttgggg

SEQ ID NO: 743549 - DNA, 15 bp, Homo sapiens
ggaaaaacttggggt

SEQ ID NO: 743550 - DNA, 15 bp, Homo sapiens
gaaaaacttggggtc

SEQ ID NO: 743551 - DNA, 15 bp, Homo sapiens
aaaaacttggggtcc

SEQ ID NO: 743552 - DNA, 15 bp, Homo sapiens
aaaacttggggtcca

SEQ ID NO: 743553 - DNA, 15 bp, Homo sapiens
aaacttggggtccag

SEQ ID NO: 743554 - DNA, 15 bp, Homo sapiens
aacttggggtccagc

SEQ ID NO: 743555 - DNA, 15 bp, Homo sapiens
acttggggtccagct

SEQ ID NO: 743556 - DNA, 15 bp, Homo sapiens
cttggggtccagctg

SEQ ID NO: 743557 - DNA, 15 bp, Homo sapiens
ttggggtccagctgg

SEQ ID NO: 743558 - DNA, 15 bp, Homo sapiens
tggggtccagctggt

SEQ ID NO: 743559 - DNA, 15 bp, Homo sapiens
ggggtccagctggta

SEQ ID NO: 743560 - DNA, 15 bp, Homo sapiens
gggtccagctggtag

SEQ ID NO: 743561 - DNA, 15 bp, Homo sapiens
ggtccagctggtagc

SEQ ID NO: 743562 - DNA, 15 bp, Homo sapiens
gtccagctggtagca

SEQ ID NO: 743563 - DNA, 15 bp, Homo sapiens
tccagctggtagcac

SEQ ID NO: 743564 - DNA, 15 bp, Homo sapiens
ccagctggtagcacg

SEQ ID NO: 743565 - DNA, 15 bp, Homo sapiens
cagctggtagcacga

SEQ ID NO: 743566 - DNA, 15 bp, Homo sapiens
agctggtagcacgag

SEQ ID NO: 743567 - DNA, 15 bp, Homo sapiens
gctggtagcacgagg

SEQ ID NO: 743568 - DNA, 15 bp, Homo sapiens
ctggtagcacgagga

SEQ ID NO: 743569 - DNA, 15 bp, Homo sapiens
tggtagcacgaggac

SEQ ID NO: 743570 - DNA, 15 bp, Homo sapiens
ggtagcacgaggacg

SEQ ID NO: 743571 - DNA, 15 bp, Homo sapiens
gtagcacgaggacgg

SEQ ID NO: 743572 - DNA, 15 bp, Homo sapiens
tagcacgaggacgga

SEQ ID NO: 743573 - DNA, 15 bp, Homo sapiens
agcacgaggacggac

SEQ ID NO: 743574 - DNA, 15 bp, Homo sapiens
gcacgaggacggacg

SEQ ID NO: 743575 - DNA, 15 bp, Homo sapiens
cacgaggacggacgc

SEQ ID NO: 743576 - DNA, 15 bp, Homo sapiens
acgaggacggacgct

SEQ ID NO: 743577 - DNA, 15 bp, Homo sapiens
cgaggacggacgctg

SEQ ID NO: 743578 - DNA, 15 bp, Homo sapiens
gaggacggacgctgt

SEQ ID NO: 743579 - DNA, 15 bp, Homo sapiens
aggacggacgctgtt

SEQ ID NO: 743580 - DNA, 15 bp, Homo sapiens
ggacggacgctgttc

SEQ ID NO: 743581 - DNA, 15 bp, Homo sapiens
gacggacgctgttca

SEQ ID NO: 743582 - DNA, 15 bp, Homo sapiens
acggacgctgttcag

SEQ ID NO: 743583 - DNA, 15 bp, Homo sapiens
cggacgctgttcagg

SEQ ID NO: 743584 - DNA, 15 bp, Homo sapiens
ggacgctgttcaggg

SEQ ID NO: 743585 - DNA, 15 bp, Homo sapiens
gacgctgttcagggg

SEQ ID NO: 743586 - DNA, 15 bp, Homo sapiens
acgctgttcaggggg

SEQ ID NO: 743587 - DNA, 15 bp, Homo sapiens
cgctgttcagggggc

SEQ ID NO: 743588 - DNA, 15 bp, Homo sapiens
gctgttcagggggcg

SEQ ID NO: 743589 - DNA, 15 bp, Homo sapiens
ctgttcagggggcgc

SEQ ID NO: 743590 - DNA, 15 bp, Homo sapiens
tgttcagggggcgca

SEQ ID NO: 743591 - DNA, 15 bp, Homo sapiens
gttcagggggcgcaa

SEQ ID NO: 743592 - DNA, 15 bp, Homo sapiens
ttcagggggcgcaaa

SEQ ID NO: 743593 - DNA, 15 bp, Homo sapiens
tcagggggcgcaaag

SEQ ID NO: 743594 - DNA, 15 bp, Homo sapiens
cagggggcgcaaagt

SEQ ID NO: 743595 - DNA, 15 bp, Homo sapiens
agggggcgcaaagtt

SEQ ID NO: 743596 - DNA, 15 bp, Homo sapiens
gggggcgcaaagttt

SEQ ID NO: 743597 - DNA, 15 bp, Homo sapiens
ggggcgcaaagtttc

SEQ ID NO: 743598 - DNA, 15 bp, Homo sapiens
gggcgcaaagtttct

SEQ ID NO: 743599 - DNA, 15 bp, Homo sapiens
ggcgcaaagtttctg

SEQ ID NO: 743600 - DNA, 15 bp, Homo sapiens
gcgcaaagtttctga

SEQ ID NO: 743601 - DNA, 15 bp, Homo sapiens
cgcaaagtttctgaa

SEQ ID NO: 743602 - DNA, 15 bp, Homo sapiens
gcaaagtttctgaaa

SEQ ID NO: 743603 - DNA, 15 bp, Homo sapiens
caaagtttctgaaag

SEQ ID NO: 743604 - DNA, 15 bp, Homo sapiens
aaagtttctgaaagt

SEQ ID NO: 743605 - DNA, 15 bp, Homo sapiens
aagtttctgaaagtg

SEQ ID NO: 743606 - DNA, 15 bp, Homo sapiens
agtttctgaaagtgt

SEQ ID NO: 743607 - DNA, 15 bp, Homo sapiens
gtttctgaaagtgtc

SEQ ID NO: 743608 - DNA, 15 bp, Homo sapiens
tttctgaaagtgtca

SEQ ID NO: 743609 - DNA, 15 bp, Homo sapiens
ttctgaaagtgtcag

SEQ ID NO: 743610 - DNA, 15 bp, Homo sapiens
tctgaaagtgtcaga

SEQ ID NO: 743611 - DNA, 15 bp, Homo sapiens
ctgaaagtgtcagaa

SEQ ID NO: 743612 - DNA, 15 bp, Homo sapiens
tgaaagtgtcagaag

SEQ ID NO: 743613 - DNA, 15 bp, Homo sapiens
gaaagtgtcagaagg

SEQ ID NO: 743614 - DNA, 15 bp, Homo sapiens
aaagtgtcagaaggg

SEQ ID NO: 743615 - DNA, 15 bp, Homo sapiens
aagtgtcagaagggg

SEQ ID NO: 743616 - DNA, 15 bp, Homo sapiens
agtgtcagaaggggg

SEQ ID NO: 743617 - DNA, 15 bp, Homo sapiens
gtgtcagaaggggga

SEQ ID NO: 743618 - DNA, 15 bp, Homo sapiens
tgtcagaagggggat

SEQ ID NO: 743619 - DNA, 15 bp, Homo sapiens
gtcagaagggggatt

SEQ ID NO: 743620 - DNA, 15 bp, Homo sapiens
tcagaagggggattc

SEQ ID NO: 743621 - DNA, 15 bp, Homo sapiens
cagaagggggattcc

SEQ ID NO: 743622 - DNA, 15 bp, Homo sapiens
agaagggggattccc

SEQ ID NO: 743623 - DNA, 15 bp, Homo sapiens
gaagggggattcccc

SEQ ID NO: 743624 - DNA, 15 bp, Homo sapiens
aagggggattcccct

SEQ ID NO: 743625 - DNA, 15 bp, Homo sapiens
agggggattcccctg

SEQ ID NO: 743626 - DNA, 15 bp, Homo sapiens
gggggattcccctgg

SEQ ID NO: 743627 - DNA, 15 bp, Homo sapiens
ggggattcccctggt

SEQ ID NO: 743628 - DNA, 15 bp, Homo sapiens
gggattcccctggtg

SEQ ID NO: 743629 - DNA, 15 bp, Homo sapiens
ggattcccctggtgg

SEQ ID NO: 743630 - DNA, 15 bp, Homo sapiens
gattcccctggtggt

SEQ ID NO: 743631 - DNA, 15 bp, Homo sapiens
attcccctggtggtg

SEQ ID NO: 743632 - DNA, 15 bp, Homo sapiens
ttcccctggtggtgt

SEQ ID NO: 743633 - DNA, 15 bp, Homo sapiens
tcccctggtggtgta

SEQ ID NO: 743634 - DNA, 15 bp, Homo sapiens
cccctggtggtgtac

SEQ ID NO: 743635 - DNA, 15 bp, Homo sapiens
ccctggtggtgtacg

SEQ ID NO: 743636 - DNA, 15 bp, Homo sapiens
cctggtggtgtacgg

SEQ ID NO: 743637 - DNA, 15 bp, Homo sapiens
ctggtggtgtacgga

SEQ ID NO: 743638 - DNA, 15 bp, Homo sapiens
tggtggtgtacggag

SEQ ID NO: 743639 - DNA, 15 bp, Homo sapiens
ggtggtgtacggaga

SEQ ID NO: 743640 - DNA, 15 bp, Homo sapiens
gtggtgtacggagac

SEQ ID NO: 743641 - DNA, 15 bp, Homo sapiens
tggtgtacggagaca

SEQ ID NO: 743642 - DNA, 15 bp, Homo sapiens
ggtgtacggagacac

SEQ ID NO: 743643 - DNA, 15 bp, Homo sapiens
gtgtacggagacacg

SEQ ID NO: 743644 - DNA, 15 bp, Homo sapiens
tgtacggagacacgc

SEQ ID NO: 743645 - DNA, 15 bp, Homo sapiens
gtacggagacacgct

SEQ ID NO: 743646 - DNA, 15 bp, Homo sapiens
tacggagacacgcta

SEQ ID NO: 743647 - DNA, 15 bp, Homo sapiens
acggagacacgctac

SEQ ID NO: 743648 - DNA, 15 bp, Homo sapiens
cggagacacgctacg

SEQ ID NO: 743649 - DNA, 15 bp, Homo sapiens
ggagacacgctacgg

SEQ ID NO: 743650 - DNA, 15 bp, Homo sapiens
gagacacgctacgga

SEQ ID NO: 743651 - DNA, 15 bp, Homo sapiens
agacacgctacggaa

SEQ ID NO: 743652 - DNA, 15 bp, Homo sapiens
gacacgctacggaac

SEQ ID NO: 743653 - DNA, 15 bp, Homo sapiens
acacgctacggaaca

SEQ ID NO: 743654 - DNA, 15 bp, Homo sapiens
cacgctacggaacaa

SEQ ID NO: 743655 - DNA, 15 bp, Homo sapiens
acgctacggaacaaa

SEQ ID NO: 743656 - DNA, 15 bp, Homo sapiens
cgctacggaacaaac

SEQ ID NO: 743657 - DNA, 15 bp, Homo sapiens
gctacggaacaaaca

SEQ ID NO: 743658 - DNA, 15 bp, Homo sapiens
ctacggaacaaacac

SEQ ID NO: 743659 - DNA, 15 bp, Homo sapiens
tacggaacaaacacg

SEQ ID NO: 743660 - DNA, 15 bp, Homo sapiens
acggaacaaacacgg

SEQ ID NO: 743661 - DNA, 15 bp, Homo sapiens
cggaacaaacacgga

SEQ ID NO: 743662 - DNA, 15 bp, Homo sapiens
ggaacaaacacggac

SEQ ID NO: 743663 - DNA, 15 bp, Homo sapiens
gaacaaacacggact

SEQ ID NO: 743664 - DNA, 15 bp, Homo sapiens
aacaaacacggactc

SEQ ID NO: 743665 - DNA, 15 bp, Homo sapiens
acaaacacggactcc

SEQ ID NO: 743666 - DNA, 15 bp, Homo sapiens
caaacacggactcct

SEQ ID NO: 743667 - DNA, 15 bp, Homo sapiens
aaacacggactcctt

SEQ ID NO: 743668 - DNA, 15 bp, Homo sapiens
aacacggactccttc

SEQ ID NO: 743669 - DNA, 15 bp, Homo sapiens
acacggactccttct

SEQ ID NO: 743670 - DNA, 15 bp, Homo sapiens
cacggactccttctt

SEQ ID NO: 743671 - DNA, 15 bp, Homo sapiens
acggactccttcttc

SEQ ID NO: 743672 - DNA, 15 bp, Homo sapiens
cggactccttcttca

SEQ ID NO: 743673 - DNA, 15 bp, Homo sapiens
ggactccttcttcat

SEQ ID NO: 743674 - DNA, 15 bp, Homo sapiens
gactccttcttcatc

SEQ ID NO: 743675 - DNA, 15 bp, Homo sapiens
actccttcttcatct

SEQ ID NO: 743676 - DNA, 15 bp, Homo sapiens
ctccttcttcatctt

SEQ ID NO: 743677 - DNA, 15 bp, Homo sapiens
tccttcttcatctta

SEQ ID NO: 743678 - DNA, 15 bp, Homo sapiens
ccttcttcatcttaa

SEQ ID NO: 743679 - DNA, 15 bp, Homo sapiens
cttcttcatcttaag

SEQ ID NO: 743680 - DNA, 15 bp, Homo sapiens
ttcttcatcttaagt

SEQ ID NO: 743681 - DNA, 15 bp, Homo sapiens
tcttcatcttaagtg

SEQ ID NO: 743682 - DNA, 15 bp, Homo sapiens
cttcatcttaagtgg

SEQ ID NO: 743683 - DNA, 15 bp, Homo sapiens
ttcatcttaagtggg

SEQ ID NO: 743684 - DNA, 15 bp, Homo sapiens
tcatcttaagtgggg

SEQ ID NO: 743685 - DNA, 15 bp, Homo sapiens
catcttaagtgggga

SEQ ID NO: 743686 - DNA, 15 bp, Homo sapiens
atcttaagtggggag

SEQ ID NO: 743687 - DNA, 15 bp, Homo sapiens
tcttaagtggggaga

SEQ ID NO: 743688 - DNA, 15 bp, Homo sapiens
cttaagtggggagaa

SEQ ID NO: 743689 - DNA, 15 bp, Homo sapiens
ttaagtggggagaag

SEQ ID NO: 743690 - DNA, 15 bp, Homo sapiens
taagtggggagaagg

SEQ ID NO: 743691 - DNA, 15 bp, Homo sapiens
aagtggggagaaggg

SEQ ID NO: 743692 - DNA, 15 bp, Homo sapiens
agtggggagaaggga

SEQ ID NO: 743693 - DNA, 15 bp, Homo sapiens
gtggggagaagggaa

SEQ ID NO: 743694 - DNA, 15 bp, Homo sapiens
tggggagaagggaag

SEQ ID NO: 743695 - DNA, 15 bp, Homo sapiens
ggggagaagggaaga

SEQ ID NO: 743696 - DNA, 15 bp, Homo sapiens
gggagaagggaagac

SEQ ID NO: 743697 - DNA, 15 bp, Homo sapiens
ggagaagggaagacc

SEQ ID NO: 743698 - DNA, 15 bp, Homo sapiens
gagaagggaagaccc

SEQ ID NO: 743699 - DNA, 15 bp, Homo sapiens
agaagggaagaccct

SEQ ID NO: 743700 - DNA, 15 bp, Homo sapiens
gaagggaagacccta

SEQ ID NO: 743701 - DNA, 15 bp, Homo sapiens
aagggaagaccctaa

SEQ ID NO: 743702 - DNA, 15 bp, Homo sapiens
agggaagaccctaaa

SEQ ID NO: 743703 - DNA, 15 bp, Homo sapiens
gggaagaccctaaat

SEQ ID NO: 743704 - DNA, 15 bp, Homo sapiens
ggaagaccctaaatg

SEQ ID NO: 743705 - DNA, 15 bp, Homo sapiens
gaagaccctaaatgg

SEQ ID NO: 743706 - DNA, 15 bp, Homo sapiens
aagaccctaaatggg

SEQ ID NO: 743707 - DNA, 15 bp, Homo sapiens
agaccctaaatgggg

SEQ ID NO: 743708 - DNA, 15 bp, Homo sapiens
gaccctaaatgggga

SEQ ID NO: 743709 - DNA, 15 bp, Homo sapiens
accctaaatggggaa

SEQ ID NO: 743710 - DNA, 15 bp, Homo sapiens
ccctaaatggggaac

SEQ ID NO: 743711 - DNA, 15 bp, Homo sapiens
cctaaatggggaacg

SEQ ID NO: 743712 - DNA, 15 bp, Homo sapiens
ctaaatggggaacgg

SEQ ID NO: 743713 - DNA, 15 bp, Homo sapiens
taaatggggaacggt

SEQ ID NO: 743714 - DNA, 15 bp, Homo sapiens
aaatggggaacggtg

SEQ ID NO: 743715 - DNA, 15 bp, Homo sapiens
aatggggaacggtga

SEQ ID NO: 743716 - DNA, 15 bp, Homo sapiens
atggggaacggtgag

SEQ ID NO: 743717 - DNA, 15 bp, Homo sapiens
tggggaacggtgagc

SEQ ID NO: 743718 - DNA, 15 bp, Homo sapiens
ggggaacggtgagcc

SEQ ID NO: 743719 - DNA, 15 bp, Homo sapiens
gggaacggtgagcca

SEQ ID NO: 743720 - DNA, 15 bp, Homo sapiens
ggaacggtgagccag

SEQ ID NO: 743721 - DNA, 15 bp, Homo sapiens
gaacggtgagccaga

SEQ ID NO: 743722 - DNA, 15 bp, Homo sapiens
aacggtgagccagaa

SEQ ID NO: 743723 - DNA, 15 bp, Homo sapiens
acggtgagccagaat

SEQ ID NO: 743724 - DNA, 15 bp, Homo sapiens
cggtgagccagaatg

SEQ ID NO: 743725 - DNA, 15 bp, Homo sapiens
ggtgagccagaatga

SEQ ID NO: 743726 - DNA, 15 bp, Homo sapiens
gtgagccagaatgaa

SEQ ID NO: 743727 - DNA, 15 bp, Homo sapiens
tgagccagaatgaag

SEQ ID NO: 743728 - DNA, 15 bp, Homo sapiens
gagccagaatgaagt

SEQ ID NO: 743729 - DNA, 15 bp, Homo sapiens
agccagaatgaagtc

SEQ ID NO: 743730 - DNA, 15 bp, Homo sapiens
gccagaatgaagtct

SEQ ID NO: 743731 - DNA, 15 bp, Homo sapiens
ccagaatgaagtctg

SEQ ID NO: 743732 - DNA, 15 bp, Homo sapiens
cagaatgaagtctgg

SEQ ID NO: 743733 - DNA, 15 bp, Homo sapiens
agaatgaagtctgga

SEQ ID NO: 743734 - DNA, 15 bp, Homo sapiens
gaatgaagtctggag

SEQ ID NO: 743735 - DNA, 15 bp, Homo sapiens
aatgaagtctggagt

SEQ ID NO: 743736 - DNA, 15 bp, Homo sapiens
atgaagtctggagtc

SEQ ID NO: 743737 - DNA, 15 bp, Homo sapiens
tgaagtctggagtcc

SEQ ID NO: 743738 - DNA, 15 bp, Homo sapiens
gaagtctggagtccc

SEQ ID NO: 743739 - DNA, 15 bp, Homo sapiens
aagtctggagtccct

SEQ ID NO: 743740 - DNA, 15 bp, Homo sapiens
agtctggagtccctc

SEQ ID NO: 743741 - DNA, 15 bp, Homo sapiens
gtctggagtccctct

SEQ ID NO: 743742 - DNA, 15 bp, Homo sapiens
tctggagtccctctt

SEQ ID NO: 743743 - DNA, 15 bp, Homo sapiens
ctggagtccctcttc

SEQ ID NO: 743744 - DNA, 15 bp, Homo sapiens
tggagtccctcttcc

SEQ ID NO: 743745 - DNA, 15 bp, Homo sapiens
ggagtccctcttccc

SEQ ID NO: 743746 - DNA, 15 bp, Homo sapiens
gagtccctcttcccc

SEQ ID NO: 743747 - DNA, 15 bp, Homo sapiens
agtccctcttccccc

SEQ ID NO: 743748 - DNA, 15 bp, Homo sapiens
gtccctcttccccca

SEQ ID NO: 743749 - DNA, 15 bp, Homo sapiens
tccctcttcccccat

SEQ ID NO: 743750 - DNA, 15 bp, Homo sapiens
ccctcttcccccatc

SEQ ID NO: 743751 - DNA, 15 bp, Homo sapiens
cctcttcccccatct

SEQ ID NO: 743752 - DNA, 15 bp, Homo sapiens
ctcttcccccatctg

SEQ ID NO: 743753 - DNA, 15 bp, Homo sapiens
tcttcccccatctgc

SEQ ID NO: 743754 - DNA, 15 bp, Homo sapiens
cttcccccatctgcc

SEQ ID NO: 743755 - DNA, 15 bp, Homo sapiens
ttcccccatctgccc

SEQ ID NO: 743756 - DNA, 15 bp, Homo sapiens
tcccccatctgccct

SEQ ID NO: 743757 - DNA, 15 bp, Homo sapiens
cccccatctgccctc

SEQ ID NO: 743758 - DNA, 15 bp, Homo sapiens
ccccatctgccctcc

SEQ ID NO: 743759 - DNA, 15 bp, Homo sapiens
cccatctgccctcct

SEQ ID NO: 743760 - DNA, 15 bp, Homo sapiens
ccatctgccctcctc

SEQ ID NO: 743761 - DNA, 15 bp, Homo sapiens
catctgccctcctca

SEQ ID NO: 743762 - DNA, 15 bp, Homo sapiens
atctgccctcctcac

SEQ ID NO: 743763 - DNA, 15 bp, Homo sapiens
tctgccctcctcacg

SEQ ID NO: 743764 - DNA, 15 bp, Homo sapiens
ctgccctcctcacgg

SEQ ID NO: 743765 - DNA, 15 bp, Homo sapiens
tgccctcctcacggg

SEQ ID NO: 743766 - DNA, 15 bp, Homo sapiens
gccctcctcacggga

SEQ ID NO: 743767 - DNA, 15 bp, Homo sapiens
ccctcctcacgggat

SEQ ID NO: 743768 - DNA, 15 bp, Homo sapiens
cctcctcacgggatg

SEQ ID NO: 743769 - DNA, 15 bp, Homo sapiens
ctcctcacgggatgg

SEQ ID NO: 743770 - DNA, 15 bp, Homo sapiens
tcctcacgggatgga

SEQ ID NO: 743771 - DNA, 15 bp, Homo sapiens
cctcacgggatggat

SEQ ID NO: 743772 - DNA, 15 bp, Homo sapiens
ctcacgggatggatg

SEQ ID NO: 743773 - DNA, 15 bp, Homo sapiens
tcacgggatggatgg

SEQ ID NO: 743774 - DNA, 15 bp, Homo sapiens
cacgggatggatgga

SEQ ID NO: 743775 - DNA, 15 bp, Homo sapiens
acgggatggatggag

SEQ ID NO: 743776 - DNA, 15 bp, Homo sapiens
cgggatggatggagt

SEQ ID NO: 743777 - DNA, 15 bp, Homo sapiens
gggatggatggagtc

SEQ ID NO: 743778 - DNA, 15 bp, Homo sapiens
ggatggatggagtct

SEQ ID NO: 743779 - DNA, 15 bp, Homo sapiens
gatggatggagtctg

SEQ ID NO: 743780 - DNA, 15 bp, Homo sapiens
atggatggagtctga

SEQ ID NO: 743781 - DNA, 15 bp, Homo sapiens
tggatggagtctgag

SEQ ID NO: 743782 - DNA, 15 bp, Homo sapiens
ggatggagtctgaga

SEQ ID NO: 743783 - DNA, 15 bp, Homo sapiens
gatggagtctgagac

SEQ ID NO: 743784 - DNA, 15 bp, Homo sapiens
atggagtctgagact

SEQ ID NO: 743785 - DNA, 15 bp, Homo sapiens
tggagtctgagacta

SEQ ID NO: 743786 - DNA, 15 bp, Homo sapiens
ggagtctgagactat

SEQ ID NO: 743787 - DNA, 15 bp, Homo sapiens
gagtctgagactata

SEQ ID NO: 743788 - DNA, 15 bp, Homo sapiens
agtctgagactatat

SEQ ID NO: 743789 - DNA, 15 bp, Homo sapiens
gtctgagactatatg

SEQ ID NO: 743790 - DNA, 15 bp, Homo sapiens
tctgagactatatga

SEQ ID NO: 743791 - DNA, 15 bp, Homo sapiens
ctgagactatatgag

SEQ ID NO: 743792 - DNA, 15 bp, Homo sapiens
tgagactatatgaga

SEQ ID NO: 743793 - DNA, 15 bp, Homo sapiens
gagactatatgagag

SEQ ID NO: 743794 - DNA, 15 bp, Homo sapiens
agactatatgagagg

SEQ ID NO: 743795 - DNA, 15 bp, Homo sapiens
gactatatgagagga

SEQ ID NO: 743796 - DNA, 15 bp, Homo sapiens
actatatgagaggaa

SEQ ID NO: 743797 - DNA, 15 bp, Homo sapiens
ctatatgagaggaaa

SEQ ID NO: 743798 - DNA, 15 bp, Homo sapiens
tatatgagaggaaag

SEQ ID NO: 743799 - DNA, 15 bp, Homo sapiens
atatgagaggaaagc

SEQ ID NO: 743800 - DNA, 15 bp, Homo sapiens
tatgagaggaaagca

SEQ ID NO: 743801 - DNA, 15 bp, Homo sapiens
atgagaggaaagcaa

SEQ ID NO: 743802 - DNA, 15 bp, Homo sapiens
tgagaggaaagcaac

SEQ ID NO: 743803 - DNA, 15 bp, Homo sapiens
gagaggaaagcaacc

SEQ ID NO: 743804 - DNA, 15 bp, Homo sapiens
agaggaaagcaaccc

SEQ ID NO: 743805 - DNA, 15 bp, Homo sapiens
gaggaaagcaaccct

SEQ ID NO: 743806 - DNA, 15 bp, Homo sapiens
aggaaagcaaccctt

SEQ ID NO: 743807 - DNA, 15 bp, Homo sapiens
ggaaagcaacccttc

SEQ ID NO: 743808 - DNA, 15 bp, Homo sapiens
gaaagcaacccttca

SEQ ID NO: 743809 - DNA, 15 bp, Homo sapiens
aaagcaacccttcag

SEQ ID NO: 743810 - DNA, 15 bp, Homo sapiens
aagcaacccttcagg

SEQ ID NO: 743811 - DNA, 15 bp, Homo sapiens
agcaacccttcaggg

SEQ ID NO: 743812 - DNA, 15 bp, Homo sapiens
gcaacccttcaggga

SEQ ID NO: 743813 - DNA, 15 bp, Homo sapiens
caacccttcagggaa

SEQ ID NO: 743814 - DNA, 15 bp, Homo sapiens
aacccttcagggaac

SEQ ID NO: 743815 - DNA, 15 bp, Homo sapiens
acccttcagggaact

SEQ ID NO: 743816 - DNA, 15 bp, Homo sapiens
cccttcagggaactc

SEQ ID NO: 743817 - DNA, 15 bp, Homo sapiens
ccttcagggaactct

SEQ ID NO: 743818 - DNA, 15 bp, Homo sapiens
cttcagggaactcta

SEQ ID NO: 743819 - DNA, 15 bp, Homo sapiens
ttcagggaactctat

SEQ ID NO: 743820 - DNA, 15 bp, Homo sapiens
tcagggaactctatt

SEQ ID NO: 743821 - DNA, 15 bp, Homo sapiens
cagggaactctattg

SEQ ID NO: 743822 - DNA, 15 bp, Homo sapiens
agggaactctattgt

SEQ ID NO: 743823 - DNA, 15 bp, Homo sapiens
gggaactctattgtc

SEQ ID NO: 743824 - DNA, 15 bp, Homo sapiens
ggaactctattgtct

SEQ ID NO: 743825 - DNA, 15 bp, Homo sapiens
gaactctattgtcta

SEQ ID NO: 743826 - DNA, 15 bp, Homo sapiens
aactctattgtctat

SEQ ID NO: 743827 - DNA, 15 bp, Homo sapiens
actctattgtctatc

SEQ ID NO: 743828 - DNA, 15 bp, Homo sapiens
ctctattgtctatcg

SEQ ID NO: 743829 - DNA, 15 bp, Homo sapiens
tctattgtctatcgg

SEQ ID NO: 743830 - DNA, 15 bp, Homo sapiens
ctattgtctatcggg

SEQ ID NO: 743831 - DNA, 15 bp, Homo sapiens
tattgtctatcgggg

SEQ ID NO: 743832 - DNA, 15 bp, Homo sapiens
attgtctatcggggc

SEQ ID NO: 743833 - DNA, 15 bp, Homo sapiens
ttgtctatcggggcc

SEQ ID NO: 743834 - DNA, 15 bp, Homo sapiens
tgtctatcggggcct

SEQ ID NO: 743835 - DNA, 15 bp, Homo sapiens
gtctatcggggcctg

SEQ ID NO: 743836 - DNA, 15 bp, Homo sapiens
tctatcggggcctgc

SEQ ID NO: 743837 - DNA, 15 bp, Homo sapiens
ctatcggggcctgca

SEQ ID NO: 743838 - DNA, 15 bp, Homo sapiens
tatcggggcctgcac

SEQ ID NO: 743839 - DNA, 15 bp, Homo sapiens
atcggggcctgcact

SEQ ID NO: 743840 - DNA, 15 bp, Homo sapiens
tcggggcctgcacta

SEQ ID NO: 743841 - DNA, 15 bp, Homo sapiens
cggggcctgcactat

SEQ ID NO: 743842 - DNA, 15 bp, Homo sapiens
ggggcctgcactatc

SEQ ID NO: 743843 - DNA, 15 bp, Homo sapiens
gggcctgcactatcc

SEQ ID NO: 743844 - DNA, 15 bp, Homo sapiens
ggcctgcactatccc

SEQ ID NO: 743845 - DNA, 15 bp, Homo sapiens
gcctgcactatcccc

SEQ ID NO: 743846 - DNA, 15 bp, Homo sapiens
cctgcactatcccca

SEQ ID NO: 743847 - DNA, 15 bp, Homo sapiens
ctgcactatccccag

SEQ ID NO: 743848 - DNA, 15 bp, Homo sapiens
tgcactatccccagg

SEQ ID NO: 743849 - DNA, 15 bp, Homo sapiens
gcactatccccaggc

SEQ ID NO: 743850 - DNA, 15 bp, Homo sapiens
cactatccccaggcc

SEQ ID NO: 743851 - DNA, 15 bp, Homo sapiens
actatccccaggcca

SEQ ID NO: 743852 - DNA, 15 bp, Homo sapiens
ctatccccaggccag

SEQ ID NO: 743853 - DNA, 15 bp, Homo sapiens
tatccccaggccagg

SEQ ID NO: 743854 - DNA, 15 bp, Homo sapiens
atccccaggccaggt

SEQ ID NO: 743855 - DNA, 15 bp, Homo sapiens
tccccaggccaggtc

SEQ ID NO: 743856 - DNA, 15 bp, Homo sapiens
ccccaggccaggtcg

SEQ ID NO: 743857 - DNA, 15 bp, Homo sapiens
cccaggccaggtcgt

SEQ ID NO: 743858 - DNA, 15 bp, Homo sapiens
ccaggccaggtcgtc

SEQ ID NO: 743859 - DNA, 15 bp, Homo sapiens
caggccaggtcgtcc

SEQ ID NO: 743860 - DNA, 15 bp, Homo sapiens
aggccaggtcgtcct

SEQ ID NO: 743861 - DNA, 15 bp, Homo sapiens
ggccaggtcgtcctt

SEQ ID NO: 743862 - DNA, 15 bp, Homo sapiens
gccaggtcgtccttg

SEQ ID NO: 743863 - DNA, 15 bp, Homo sapiens
ccaggtcgtccttga

SEQ ID NO: 743864 - DNA, 15 bp, Homo sapiens
caggtcgtccttgat

SEQ ID NO: 743865 - DNA, 15 bp, Homo sapiens
aggtcgtccttgatc

SEQ ID NO: 743866 - DNA, 15 bp, Homo sapiens
ggtcgtccttgatca

SEQ ID NO: 743867 - DNA, 15 bp, Homo sapiens
gtcgtccttgatcat

SEQ ID NO: 743868 - DNA, 15 bp, Homo sapiens
tcgtccttgatcatt

SEQ ID NO: 743869 - DNA, 15 bp, Homo sapiens
cgtccttgatcattt

SEQ ID NO: 743870 - DNA, 15 bp, Homo sapiens
gtccttgatcatttc

SEQ ID NO: 743871 - DNA, 15 bp, Homo sapiens
tccttgatcatttct

SEQ ID NO: 743872 - DNA, 15 bp, Homo sapiens
ccttgatcatttctg

SEQ ID NO: 743873 - DNA, 15 bp, Homo sapiens
cttgatcatttctgc

SEQ ID NO: 743874 - DNA, 15 bp, Homo sapiens
ttgatcatttctgcc

SEQ ID NO: 743875 - DNA, 15 bp, Homo sapiens
tgatcatttctgcct

SEQ ID NO: 743876 - DNA, 15 bp, Homo sapiens
gatcatttctgccta

SEQ ID NO: 743877 - DNA, 15 bp, Homo sapiens
atcatttctgcctac

SEQ ID NO: 743878 - DNA, 15 bp, Homo sapiens
tcatttctgcctact

SEQ ID NO: 743879 - DNA, 15 bp, Homo sapiens
catttctgcctactc

SEQ ID NO: 743880 - DNA, 15 bp, Homo sapiens
atttctgcctactct

SEQ ID NO: 743881 - DNA, 15 bp, Homo sapiens
tttctgcctactctt

SEQ ID NO: 743882 - DNA, 15 bp, Homo sapiens
ttctgcctactcttt

SEQ ID NO: 743883 - DNA, 15 bp, Homo sapiens
tctgcctactctttg

SEQ ID NO: 743884 - DNA, 15 bp, Homo sapiens
ctgcctactctttgt

SEQ ID NO: 743885 - DNA, 15 bp, Homo sapiens
tgcctactctttgtt

SEQ ID NO: 743886 - DNA, 15 bp, Homo sapiens
gcctactctttgttg

SEQ ID NO: 743887 - DNA, 15 bp, Homo sapiens
cctactctttgttgg

SEQ ID NO: 743888 - DNA, 15 bp, Homo sapiens
ctactctttgttggg

SEQ ID NO: 743889 - DNA, 15 bp, Homo sapiens
tactctttgttgggc

SEQ ID NO: 743890 - DNA, 15 bp, Homo sapiens
actctttgttgggca

SEQ ID NO: 743891 - DNA, 15 bp, Homo sapiens
ctctttgttgggcag

SEQ ID NO: 743892 - DNA, 15 bp, Homo sapiens
tctttgttgggcagc

SEQ ID NO: 743893 - DNA, 15 bp, Homo sapiens
ctttgttgggcagcc

SEQ ID NO: 743894 - DNA, 15 bp, Homo sapiens
tttgttgggcagcct

SEQ ID NO: 743895 - DNA, 15 bp, Homo sapiens
ttgttgggcagcctc

SEQ ID NO: 743896 - DNA, 15 bp, Homo sapiens
tgttgggcagcctct

SEQ ID NO: 743897 - DNA, 15 bp, Homo sapiens
gttgggcagcctctg

SEQ ID NO: 743898 - DNA, 15 bp, Homo sapiens
ttgggcagcctctgt

SEQ ID NO: 743899 - DNA, 15 bp, Homo sapiens
tgggcagcctctgtt

SEQ ID NO: 743900 - DNA, 15 bp, Homo sapiens
gggcagcctctgttg

SEQ ID NO: 743901 - DNA, 15 bp, Homo sapiens
ggcagcctctgttgc

SEQ ID NO: 743902 - DNA, 15 bp, Homo sapiens
gcagcctctgttgct

SEQ ID NO: 743903 - DNA, 15 bp, Homo sapiens
cagcctctgttgcta

SEQ ID NO: 743904 - DNA, 15 bp, Homo sapiens
agcctctgttgctaa

SEQ ID NO: 743905 - DNA, 15 bp, Homo sapiens
gcctctgttgctaat

SEQ ID NO: 743906 - DNA, 15 bp, Homo sapiens
cctctgttgctaata

SEQ ID NO: 743907 - DNA, 15 bp, Homo sapiens
ctctgttgctaataa

SEQ ID NO: 743908 - DNA, 15 bp, Homo sapiens
tctgttgctaataag

SEQ ID NO: 743909 - DNA, 15 bp, Homo sapiens
ctgttgctaataagg

SEQ ID NO: 743910 - DNA, 15 bp, Homo sapiens
tgttgctaataagga

SEQ ID NO: 743911 - DNA, 15 bp, Homo sapiens
gttgctaataaggaa

SEQ ID NO: 743912 - DNA, 15 bp, Homo sapiens
ttgctaataaggaaa

SEQ ID NO: 743913 - DNA, 15 bp, Homo sapiens
tgctaataaggaaaa

SEQ ID NO: 743914 - DNA, 15 bp, Homo sapiens
gctaataaggaaaaa

SEQ ID NO: 743915 - DNA, 15 bp, Homo sapiens
ctaataaggaaaaag

SEQ ID NO: 743916 - DNA, 15 bp, Homo sapiens
taataaggaaaaagg

SEQ ID NO: 743917 - DNA, 15 bp, Homo sapiens
aataaggaaaaagga

SEQ ID NO: 743918 - DNA, 15 bp, Homo sapiens
ataaggaaaaaggag

SEQ ID NO: 743919 - DNA, 15 bp, Homo sapiens
taaggaaaaaggaga

SEQ ID NO: 743920 - DNA, 15 bp, Homo sapiens
aaggaaaaaggagag

SEQ ID NO: 743921 - DNA, 15 bp, Homo sapiens
aggaaaaaggagaga

SEQ ID NO: 743922 - DNA, 15 bp, Homo sapiens
ggaaaaaggagagaa

SEQ ID NO: 743923 - DNA, 15 bp, Homo sapiens
gaaaaaggagagaaa

SEQ ID NO: 743924 - DNA, 15 bp, Homo sapiens
aaaaaggagagaaac

SEQ ID NO: 743925 - DNA, 15 bp, Homo sapiens
aaaaggagagaaacc

SEQ ID NO: 743926 - DNA, 15 bp, Homo sapiens
aaaggagagaaacca

SEQ ID NO: 743927 - DNA, 15 bp, Homo sapiens
aaggagagaaaccac

SEQ ID NO: 743928 - DNA, 15 bp, Homo sapiens
aggagagaaaccacc

SEQ ID NO: 743929 - DNA, 15 bp, Homo sapiens
ggagagaaaccacct

SEQ ID NO: 743930 - DNA, 15 bp, Homo sapiens
gagagaaaccacctg

SEQ ID NO: 743931 - DNA, 15 bp, Homo sapiens
agagaaaccacctgc

SEQ ID NO: 743932 - DNA, 15 bp, Homo sapiens
gagaaaccacctgct

SEQ ID NO: 743933 - DNA, 15 bp, Homo sapiens
agaaaccacctgctg

SEQ ID NO: 743934 - DNA, 15 bp, Homo sapiens
gaaaccacctgctgc

SEQ ID NO: 743935 - DNA, 15 bp, Homo sapiens
aaaccacctgctgct

SEQ ID NO: 743936 - DNA, 15 bp, Homo sapiens
aaccacctgctgctg

SEQ ID NO: 743937 - DNA, 15 bp, Homo sapiens
accacctgctgctgt

SEQ ID NO: 743938 - DNA, 15 bp, Homo sapiens
ccacctgctgctgtc

SEQ ID NO: 743939 - DNA, 15 bp, Homo sapiens
cacctgctgctgtca

SEQ ID NO: 743940 - DNA, 15 bp, Homo sapiens
acctgctgctgtcag

SEQ ID NO: 743941 - DNA, 15 bp, Homo sapiens
cctgctgctgtcaga

SEQ ID NO: 743942 - DNA, 15 bp, Homo sapiens
ctgctgctgtcagag

SEQ ID NO: 743943 - DNA, 15 bp, Homo sapiens
tgctgctgtcagagg

SEQ ID NO: 743944 - DNA, 15 bp, Homo sapiens
gctgctgtcagaggc

SEQ ID NO: 743945 - DNA, 15 bp, Homo sapiens
ctgctgtcagaggcc

SEQ ID NO: 743946 - DNA, 15 bp, Homo sapiens
tgctgtcagaggcca

SEQ ID NO: 743947 - DNA, 15 bp, Homo sapiens
gctgtcagaggccac

SEQ ID NO: 743948 - DNA, 15 bp, Homo sapiens
ctgtcagaggccaca

SEQ ID NO: 743949 - DNA, 15 bp, Homo sapiens
tgtcagaggccacag

SEQ ID NO: 743950 - DNA, 15 bp, Homo sapiens
gtcagaggccacaga

SEQ ID NO: 743951 - DNA, 15 bp, Homo sapiens
tcagaggccacagac

SEQ ID NO: 743952 - DNA, 15 bp, Homo sapiens
cagaggccacagacc

SEQ ID NO: 743953 - DNA, 15 bp, Homo sapiens
agaggccacagacca

SEQ ID NO: 743954 - DNA, 15 bp, Homo sapiens
gaggccacagaccac

SEQ ID NO: 743955 - DNA, 15 bp, Homo sapiens
aggccacagaccacc

SEQ ID NO: 743956 - DNA, 15 bp, Homo sapiens
ggccacagaccaccc

SEQ ID NO: 743957 - DNA, 15 bp, Homo sapiens
gccacagaccacccg

SEQ ID NO: 743958 - DNA, 15 bp, Homo sapiens
ccacagaccacccgc

SEQ ID NO: 743959 - DNA, 15 bp, Homo sapiens
cacagaccacccgct

SEQ ID NO: 743960 - DNA, 15 bp, Homo sapiens
acagaccacccgctg

SEQ ID NO: 743961 - DNA, 15 bp, Homo sapiens
cagaccacccgctgg

SEQ ID NO: 743962 - DNA, 15 bp, Homo sapiens
agaccacccgctggc

SEQ ID NO: 743963 - DNA, 15 bp, Homo sapiens
gaccacccgctggcc

SEQ ID NO: 743964 - DNA, 15 bp, Homo sapiens
accacccgctggcct

SEQ ID NO: 743965 - DNA, 15 bp, Homo sapiens
ccacccgctggcctt

SEQ ID NO: 743966 - DNA, 15 bp, Homo sapiens
cacccgctggccttc

SEQ ID NO: 743967 - DNA, 15 bp, Homo sapiens
acccgctggccttcc

SEQ ID NO: 743968 - DNA, 15 bp, Homo sapiens
cccgctggccttcct

SEQ ID NO: 743969 - DNA, 15 bp, Homo sapiens
ccgctggccttcctg

SEQ ID NO: 743970 - DNA, 15 bp, Homo sapiens
cgctggccttcctga

SEQ ID NO: 743971 - DNA, 15 bp, Homo sapiens
gctggccttcctgac

SEQ ID NO: 743972 - DNA, 15 bp, Homo sapiens
ctggccttcctgact

SEQ ID NO: 743973 - DNA, 15 bp, Homo sapiens
tggccttcctgactc

SEQ ID NO: 743974 - DNA, 15 bp, Homo sapiens
ggccttcctgactct

SEQ ID NO: 743975 - DNA, 15 bp, Homo sapiens
gccttcctgactcta

SEQ ID NO: 743976 - DNA, 15 bp, Homo sapiens
ccttcctgactctac

SEQ ID NO: 743977 - DNA, 15 bp, Homo sapiens
cttcctgactctacc

SEQ ID NO: 743978 - DNA, 15 bp, Homo sapiens
ttcctgactctaccc

SEQ ID NO: 743979 - DNA, 15 bp, Homo sapiens
tcctgactctaccct

SEQ ID NO: 743980 - DNA, 15 bp, Homo sapiens
cctgactctaccctc

SEQ ID NO: 743981 - DNA, 15 bp, Homo sapiens
ctgactctaccctcc

SEQ ID NO: 743982 - DNA, 15 bp, Homo sapiens
tgactctaccctcca

SEQ ID NO: 743983 - DNA, 15 bp, Homo sapiens
gactctaccctccag

SEQ ID NO: 743984 - DNA, 15 bp, Homo sapiens
actctaccctccagc

SEQ ID NO: 743985 - DNA, 15 bp, Homo sapiens
ctctaccctccagcc

SEQ ID NO: 743986 - DNA, 15 bp, Homo sapiens
tctaccctccagcca

SEQ ID NO: 743987 - DNA, 15 bp, Homo sapiens
ctaccctccagccac

SEQ ID NO: 743988 - DNA, 15 bp, Homo sapiens
taccctccagccaca

SEQ ID NO: 743989 - DNA, 15 bp, Homo sapiens
accctccagccacac

SEQ ID NO: 743990 - DNA, 15 bp, Homo sapiens
ccctccagccacacg

SEQ ID NO: 743991 - DNA, 15 bp, Homo sapiens
cctccagccacacgc

SEQ ID NO: 743992 - DNA, 15 bp, Homo sapiens
ctccagccacacgcg

SEQ ID NO: 743993 - DNA, 15 bp, Homo sapiens
tccagccacacgcgg

SEQ ID NO: 743994 - DNA, 15 bp, Homo sapiens
ccagccacacgcggg

SEQ ID NO: 743995 - DNA, 15 bp, Homo sapiens
cagccacacgcggga

SEQ ID NO: 743996 - DNA, 15 bp, Homo sapiens
agccacacgcgggac

SEQ ID NO: 743997 - DNA, 15 bp, Homo sapiens
gccacacgcgggacc

SEQ ID NO: 743998 - DNA, 15 bp, Homo sapiens
ccacacgcgggaccc

SEQ ID NO: 743999 - DNA, 15 bp, Homo sapiens
cacacgcgggaccct

SEQ ID NO: 744000 - DNA, 15 bp, Homo sapiens
acacgcgggaccctg

SEQ ID NO: 744001 - DNA, 15 bp, Homo sapiens
cacgcgggaccctgg

SEQ ID NO: 744002 - DNA, 15 bp, Homo sapiens
acgcgggaccctggg

SEQ ID NO: 744003 - DNA, 15 bp, Homo sapiens
cgcgggaccctgggc

SEQ ID NO: 744004 - DNA, 15 bp, Homo sapiens
gcgggaccctgggca

SEQ ID NO: 744005 - DNA, 15 bp, Homo sapiens
cgggaccctgggcac

SEQ ID NO: 744006 - DNA, 15 bp, Homo sapiens
gggaccctgggcaca

SEQ ID NO: 744007 - DNA, 15 bp, Homo sapiens
ggaccctgggcacat

SEQ ID NO: 744008 - DNA, 15 bp, Homo sapiens
gaccctgggcacata

SEQ ID NO: 744009 - DNA, 15 bp, Homo sapiens
accctgggcacatag

SEQ ID NO: 744010 - DNA, 15 bp, Homo sapiens
ccctgggcacatagg

SEQ ID NO: 744011 - DNA, 15 bp, Homo sapiens
cctgggcacataggt

SEQ ID NO: 744012 - DNA, 15 bp, Homo sapiens
ctgggcacataggta

SEQ ID NO: 744013 - DNA, 15 bp, Homo sapiens
tgggcacataggtag

SEQ ID NO: 744014 - DNA, 15 bp, Homo sapiens
gggcacataggtagc

SEQ ID NO: 744015 - DNA, 15 bp, Homo sapiens
ggcacataggtagca

SEQ ID NO: 744016 - DNA, 15 bp, Homo sapiens
gcacataggtagcag

SEQ ID NO: 744017 - DNA, 15 bp, Homo sapiens
cacataggtagcagg

SEQ ID NO: 744018 - DNA, 15 bp, Homo sapiens
acataggtagcagga

SEQ ID NO: 744019 - DNA, 15 bp, Homo sapiens
cataggtagcaggaa

SEQ ID NO: 744020 - DNA, 15 bp, Homo sapiens
ataggtagcaggaag

SEQ ID NO: 744021 - DNA, 15 bp, Homo sapiens
taggtagcaggaaga

SEQ ID NO: 744022 - DNA, 15 bp, Homo sapiens
aggtagcaggaagag

SEQ ID NO: 744023 - DNA, 15 bp, Homo sapiens
ggtagcaggaagagc

SEQ ID NO: 744024 - DNA, 15 bp, Homo sapiens
gtagcaggaagagcg

SEQ ID NO: 744025 - DNA, 15 bp, Homo sapiens
tagcaggaagagcga

SEQ ID NO: 744026 - DNA, 15 bp, Homo sapiens
agcaggaagagcgaa

SEQ ID NO: 744027 - DNA, 15 bp, Homo sapiens
gcaggaagagcgaag

SEQ ID NO: 744028 - DNA, 15 bp, Homo sapiens
caggaagagcgaagt

SEQ ID NO: 744029 - DNA, 15 bp, Homo sapiens
aggaagagcgaagta

SEQ ID NO: 744030 - DNA, 15 bp, Homo sapiens
ggaagagcgaagtag

SEQ ID NO: 744031 - DNA, 15 bp, Homo sapiens
gaagagcgaagtagg

SEQ ID NO: 744032 - DNA, 15 bp, Homo sapiens
aagagcgaagtaggg

SEQ ID NO: 744033 - DNA, 15 bp, Homo sapiens
agagcgaagtagggg

SEQ ID NO: 744034 - DNA, 15 bp, Homo sapiens
gagcgaagtaggggt

SEQ ID NO: 744035 - DNA, 15 bp, Homo sapiens
agcgaagtaggggtg

SEQ ID NO: 744036 - DNA, 15 bp, Homo sapiens
gcgaagtaggggtgg

SEQ ID NO: 744037 - DNA, 15 bp, Homo sapiens
cgaagtaggggtggg

SEQ ID NO: 744038 - DNA, 15 bp, Homo sapiens
gaagtaggggtgggt

SEQ ID NO: 744039 - DNA, 15 bp, Homo sapiens
aagtaggggtgggta

SEQ ID NO: 744040 - DNA, 15 bp, Homo sapiens
agtaggggtgggtag

SEQ ID NO: 744041 - DNA, 15 bp, Homo sapiens
gtaggggtgggtagc

SEQ ID NO: 744042 - DNA, 15 bp, Homo sapiens
taggggtgggtagct

SEQ ID NO: 744043 - DNA, 15 bp, Homo sapiens
aggggtgggtagctg

SEQ ID NO: 744044 - DNA, 15 bp, Homo sapiens
ggggtgggtagctgt

SEQ ID NO: 744045 - DNA, 15 bp, Homo sapiens
gggtgggtagctgtg

SEQ ID NO: 744046 - DNA, 15 bp, Homo sapiens
ggtgggtagctgtgt

SEQ ID NO: 744047 - DNA, 15 bp, Homo sapiens
gtgggtagctgtgtg

SEQ ID NO: 744048 - DNA, 15 bp, Homo sapiens
tgggtagctgtgtgt

SEQ ID NO: 744049 - DNA, 15 bp, Homo sapiens
gggtagctgtgtgta

SEQ ID NO: 744050 - DNA, 15 bp, Homo sapiens
ggtagctgtgtgtat

SEQ ID NO: 744051 - DNA, 15 bp, Homo sapiens
gtagctgtgtgtatc

SEQ ID NO: 744052 - DNA, 15 bp, Homo sapiens
tagctgtgtgtatcc

SEQ ID NO: 744053 - DNA, 15 bp, Homo sapiens
agctgtgtgtatcct

SEQ ID NO: 744054 - DNA, 15 bp, Homo sapiens
gctgtgtgtatcctg

SEQ ID NO: 744055 - DNA, 15 bp, Homo sapiens
ctgtgtgtatcctgg

SEQ ID NO: 744056 - DNA, 15 bp, Homo sapiens
tgtgtgtatcctggc

SEQ ID NO: 744057 - DNA, 15 bp, Homo sapiens
gtgtgtatcctggcg

SEQ ID NO: 744058 - DNA, 15 bp, Homo sapiens
tgtgtatcctggcgt

SEQ ID NO: 744059 - DNA, 15 bp, Homo sapiens
gtgtatcctggcgtg

SEQ ID NO: 744060 - DNA, 15 bp, Homo sapiens
tgtatcctggcgtgg

SEQ ID NO: 744061 - DNA, 15 bp, Homo sapiens
gtatcctggcgtggg

SEQ ID NO: 744062 - DNA, 15 bp, Homo sapiens
tatcctggcgtgggg

SEQ ID NO: 744063 - DNA, 15 bp, Homo sapiens
atcctggcgtggggt

SEQ ID NO: 744064 - DNA, 15 bp, Homo sapiens
tcctggcgtggggtc

SEQ ID NO: 744065 - DNA, 15 bp, Homo sapiens
cctggcgtggggtcc

SEQ ID NO: 744066 - DNA, 15 bp, Homo sapiens
ctggcgtggggtcct

SEQ ID NO: 744067 - DNA, 15 bp, Homo sapiens
tggcgtggggtcctc

SEQ ID NO: 744068 - DNA, 15 bp, Homo sapiens
ggcgtggggtcctcc

SEQ ID NO: 744069 - DNA, 15 bp, Homo sapiens
gcgtggggtcctcct

SEQ ID NO: 744070 - DNA, 15 bp, Homo sapiens
cgtggggtcctcctc

SEQ ID NO: 744071 - DNA, 15 bp, Homo sapiens
gtggggtcctcctca

SEQ ID NO: 744072 - DNA, 15 bp, Homo sapiens
tggggtcctcctcac

SEQ ID NO: 744073 - DNA, 15 bp, Homo sapiens
ggggtcctcctcact

SEQ ID NO: 744074 - DNA, 15 bp, Homo sapiens
gggtcctcctcactc

SEQ ID NO: 744075 - DNA, 15 bp, Homo sapiens
ggtcctcctcactcc

SEQ ID NO: 744076 - DNA, 15 bp, Homo sapiens
gtcctcctcactccc

SEQ ID NO: 744077 - DNA, 15 bp, Homo sapiens
tcctcctcactcccg

SEQ ID NO: 744078 - DNA, 15 bp, Homo sapiens
cctcctcactcccga

SEQ ID NO: 744079 - DNA, 15 bp, Homo sapiens
ctcctcactcccgaa

SEQ ID NO: 744080 - DNA, 15 bp, Homo sapiens
tcctcactcccgaag

SEQ ID NO: 744081 - DNA, 15 bp, Homo sapiens
cctcactcccgaagc

SEQ ID NO: 744082 - DNA, 15 bp, Homo sapiens
ctcactcccgaagcc

SEQ ID NO: 744083 - DNA, 15 bp, Homo sapiens
tcactcccgaagccc

SEQ ID NO: 744084 - DNA, 15 bp, Homo sapiens
cactcccgaagcccg

SEQ ID NO: 744085 - DNA, 15 bp, Homo sapiens
actcccgaagcccga

SEQ ID NO: 744086 - DNA, 15 bp, Homo sapiens
ctcccgaagcccgag

SEQ ID NO: 744087 - DNA, 15 bp, Homo sapiens
tcccgaagcccgagg

SEQ ID NO: 744088 - DNA, 15 bp, Homo sapiens
cccgaagcccgaggg

SEQ ID NO: 744089 - DNA, 15 bp, Homo sapiens
ccgaagcccgagggt

SEQ ID NO: 744090 - DNA, 15 bp, Homo sapiens
cgaagcccgagggtc

SEQ ID NO: 744091 - DNA, 15 bp, Homo sapiens
gaagcccgagggtcc

SEQ ID NO: 744092 - DNA, 15 bp, Homo sapiens
aagcccgagggtcct

SEQ ID NO: 744093 - DNA, 15 bp, Homo sapiens
agcccgagggtcctg

SEQ ID NO: 744094 - DNA, 15 bp, Homo sapiens
gcccgagggtcctgg

SEQ ID NO: 744095 - DNA, 15 bp, Homo sapiens
cccgagggtcctggg

SEQ ID NO: 744096 - DNA, 15 bp, Homo sapiens
ccgagggtcctgggg

SEQ ID NO: 744097 - DNA, 15 bp, Homo sapiens
cgagggtcctgggga

SEQ ID NO: 744098 - DNA, 15 bp, Homo sapiens
gagggtcctggggag

SEQ ID NO: 744099 - DNA, 15 bp, Homo sapiens
agggtcctggggagc

SEQ ID NO: 744100 - DNA, 15 bp, Homo sapiens
gggtcctggggagct

SEQ ID NO: 744101 - DNA, 15 bp, Homo sapiens
ggtcctggggagctc

SEQ ID NO: 744102 - DNA, 15 bp, Homo sapiens
gtcctggggagctca

SEQ ID NO: 744103 - DNA, 15 bp, Homo sapiens
tcctggggagctcag

SEQ ID NO: 744104 - DNA, 15 bp, Homo sapiens
cctggggagctcagc

SEQ ID NO: 744105 - DNA, 15 bp, Homo sapiens
ctggggagctcagcc

SEQ ID NO: 744106 - DNA, 15 bp, Homo sapiens
tggggagctcagcct

SEQ ID NO: 744107 - DNA, 15 bp, Homo sapiens
ggggagctcagcctg

SEQ ID NO: 744108 - DNA, 15 bp, Homo sapiens
gggagctcagcctgt

SEQ ID NO: 744109 - DNA, 15 bp, Homo sapiens
ggagctcagcctgtg

SEQ ID NO: 744110 - DNA, 15 bp, Homo sapiens
gagctcagcctgtgg

SEQ ID NO: 744111 - DNA, 15 bp, Homo sapiens
agctcagcctgtgga

SEQ ID NO: 744112 - DNA, 15 bp, Homo sapiens
gctcagcctgtggaa

SEQ ID NO: 744113 - DNA, 15 bp, Homo sapiens
ctcagcctgtggaat

SEQ ID NO: 744114 - DNA, 15 bp, Homo sapiens
tcagcctgtggaatc

SEQ ID NO: 744115 - DNA, 15 bp, Homo sapiens
cagcctgtggaatcc

SEQ ID NO: 744116 - DNA, 15 bp, Homo sapiens
agcctgtggaatcca

SEQ ID NO: 744117 - DNA, 15 bp, Homo sapiens
gcctgtggaatccag

SEQ ID NO: 744118 - DNA, 15 bp, Homo sapiens
cctgtggaatccagt

SEQ ID NO: 744119 - DNA, 15 bp, Homo sapiens
ctgtggaatccagtt

SEQ ID NO: 744120 - DNA, 15 bp, Homo sapiens
tgtggaatccagttg

SEQ ID NO: 744121 - DNA, 15 bp, Homo sapiens
gtggaatccagttga

SEQ ID NO: 744122 - DNA, 15 bp, Homo sapiens
tggaatccagttgac

SEQ ID NO: 744123 - DNA, 15 bp, Homo sapiens
ggaatccagttgaca

SEQ ID NO: 744124 - DNA, 15 bp, Homo sapiens
gaatccagttgacag

SEQ ID NO: 744125 - DNA, 15 bp, Homo sapiens
aatccagttgacagc

SEQ ID NO: 744126 - DNA, 15 bp, Homo sapiens
atccagttgacagct

SEQ ID NO: 744127 - DNA, 15 bp, Homo sapiens
tccagttgacagctg

SEQ ID NO: 744128 - DNA, 15 bp, Homo sapiens
ccagttgacagctgg

SEQ ID NO: 744129 - DNA, 15 bp, Homo sapiens
cagttgacagctggc

SEQ ID NO: 744130 - DNA, 15 bp, Homo sapiens
agttgacagctggcc

SEQ ID NO: 744131 - DNA, 15 bp, Homo sapiens
gttgacagctggcca

SEQ ID NO: 744132 - DNA, 15 bp, Homo sapiens
ttgacagctggccac

SEQ ID NO: 744133 - DNA, 15 bp, Homo sapiens
tgacagctggccact

SEQ ID NO: 744134 - DNA, 15 bp, Homo sapiens
gacagctggccactc

SEQ ID NO: 744135 - DNA, 15 bp, Homo sapiens
acagctggccactcc

SEQ ID NO: 744136 - DNA, 15 bp, Homo sapiens
cagctggccactcct

SEQ ID NO: 744137 - DNA, 15 bp, Homo sapiens
agctggccactcctc

SEQ ID NO: 744138 - DNA, 15 bp, Homo sapiens
gctggccactcctcc

SEQ ID NO: 744139 - DNA, 15 bp, Homo sapiens
ctggccactcctccc

SEQ ID NO: 744140 - DNA, 15 bp, Homo sapiens
tggccactcctcccc

SEQ ID NO: 744141 - DNA, 15 bp, Homo sapiens
ggccactcctcccct

SEQ ID NO: 744142 - DNA, 15 bp, Homo sapiens
gccactcctcccctc

SEQ ID NO: 744143 - DNA, 15 bp, Homo sapiens
ccactcctcccctcc

SEQ ID NO: 744144 - DNA, 15 bp, Homo sapiens
cactcctcccctccc

SEQ ID NO: 744145 - DNA, 15 bp, Homo sapiens
actcctcccctcccc

SEQ ID NO: 744146 - DNA, 15 bp, Homo sapiens
ctcctcccctcccca

SEQ ID NO: 744147 - DNA, 15 bp, Homo sapiens
tcctcccctccccac

SEQ ID NO: 744148 - DNA, 15 bp, Homo sapiens
cctcccctccccact

SEQ ID NO: 744149 - DNA, 15 bp, Homo sapiens
ctcccctccccactg

SEQ ID NO: 744150 - DNA, 15 bp, Homo sapiens
tcccctccccactgg

SEQ ID NO: 744151 - DNA, 15 bp, Homo sapiens
cccctccccactggg

SEQ ID NO: 744152 - DNA, 15 bp, Homo sapiens
ccctccccactgggg

SEQ ID NO: 744153 - DNA, 15 bp, Homo sapiens
cctccccactggggg

SEQ ID NO: 744154 - DNA, 15 bp, Homo sapiens
ctccccactgggggc

SEQ ID NO: 744155 - DNA, 15 bp, Homo sapiens
tccccactgggggct

SEQ ID NO: 744156 - DNA, 15 bp, Homo sapiens
ccccactgggggctc

SEQ ID NO: 744157 - DNA, 15 bp, Homo sapiens
cccactgggggctct

SEQ ID NO: 744158 - DNA, 15 bp, Homo sapiens
ccactgggggctctt

SEQ ID NO: 744159 - DNA, 15 bp, Homo sapiens
cactgggggctcttt

SEQ ID NO: 744160 - DNA, 15 bp, Homo sapiens
actgggggctctttg

SEQ ID NO: 744161 - DNA, 15 bp, Homo sapiens
ctgggggctctttgg

SEQ ID NO: 744162 - DNA, 15 bp, Homo sapiens
tgggggctctttggg

SEQ ID NO: 744163 - DNA, 15 bp, Homo sapiens
gggggctctttgggg

SEQ ID NO: 744164 - DNA, 15 bp, Homo sapiens
ggggctctttgggga

SEQ ID NO: 744165 - DNA, 15 bp, Homo sapiens
gggctctttggggaa

SEQ ID NO: 744166 - DNA, 15 bp, Homo sapiens
ggctctttggggaaa

SEQ ID NO: 744167 - DNA, 15 bp, Homo sapiens
gctctttggggaaaa

SEQ ID NO: 744168 - DNA, 15 bp, Homo sapiens
ctctttggggaaaaa

SEQ ID NO: 744169 - DNA, 15 bp, Homo sapiens
tctttggggaaaaaa

SEQ ID NO: 744170 - DNA, 15 bp, Homo sapiens
ctttggggaaaaaaa

SEQ ID NO: 744171 - DNA, 15 bp, Homo sapiens
tttggggaaaaaaac

SEQ ID NO: 744172 - DNA, 15 bp, Homo sapiens
ttggggaaaaaaacg

SEQ ID NO: 744173 - DNA, 15 bp, Homo sapiens
tggggaaaaaaacgg

SEQ ID NO: 744174 - DNA, 15 bp, Homo sapiens
ggggaaaaaaacggc

SEQ ID NO: 744175 - DNA, 15 bp, Homo sapiens
gggaaaaaaacggcc

SEQ ID NO: 744176 - DNA, 15 bp, Homo sapiens
ggaaaaaaacggcct

SEQ ID NO: 744177 - DNA, 15 bp, Homo sapiens
gaaaaaaacggcctg

SEQ ID NO: 744178 - DNA, 15 bp, Homo sapiens
aaaaaaacggcctga

SEQ ID NO: 744179 - DNA, 15 bp, Homo sapiens
aaaaaacggcctgac

SEQ ID NO: 744180 - DNA, 15 bp, Homo sapiens
aaaaacggcctgacc

SEQ ID NO: 744181 - DNA, 15 bp, Homo sapiens
aaaacggcctgaccg

SEQ ID NO: 744182 - DNA, 15 bp, Homo sapiens
aaacggcctgaccgg

SEQ ID NO: 744183 - DNA, 15 bp, Homo sapiens
aacggcctgaccggg

SEQ ID NO: 744184 - DNA, 15 bp, Homo sapiens
acggcctgaccgggg

SEQ ID NO: 744185 - DNA, 15 bp, Homo sapiens
cggcctgaccggggc

SEQ ID NO: 744186 - DNA, 15 bp, Homo sapiens
ggcctgaccggggcg

SEQ ID NO: 744187 - DNA, 15 bp, Homo sapiens
gcctgaccggggcgc

SEQ ID NO: 744188 - DNA, 15 bp, Homo sapiens
cctgaccggggcgcc

SEQ ID NO: 744189 - DNA, 15 bp, Homo sapiens
ctgaccggggcgccc

SEQ ID NO: 744190 - DNA, 15 bp, Homo sapiens
tgaccggggcgcccc

SEQ ID NO: 744191 - DNA, 15 bp, Homo sapiens
gaccggggcgccccg

SEQ ID NO: 744192 - DNA, 15 bp, Homo sapiens
accggggcgccccgc

SEQ ID NO: 744193 - DNA, 15 bp, Homo sapiens
ccggggcgccccgcc

SEQ ID NO: 744194 - DNA, 15 bp, Homo sapiens
cggggcgccccgccg

SEQ ID NO: 744195 - DNA, 15 bp, Homo sapiens
ggggcgccccgccgt

SEQ ID NO: 744196 - DNA, 15 bp, Homo sapiens
gggcgccccgccgtc

SEQ ID NO: 744197 - DNA, 15 bp, Homo sapiens
ggcgccccgccgtcc

SEQ ID NO: 744198 - DNA, 15 bp, Homo sapiens
gcgccccgccgtcct

SEQ ID NO: 744199 - DNA, 15 bp, Homo sapiens
cgccccgccgtcctc

SEQ ID NO: 744200 - DNA, 15 bp, Homo sapiens
gccccgccgtcctcc

SEQ ID NO: 744201 - DNA, 15 bp, Homo sapiens
ccccgccgtcctccc

SEQ ID NO: 744202 - DNA, 15 bp, Homo sapiens
cccgccgtcctccca

SEQ ID NO: 744203 - DNA, 15 bp, Homo sapiens
ccgccgtcctcccag

SEQ ID NO: 744204 - DNA, 15 bp, Homo sapiens
cgccgtcctcccagt

SEQ ID NO: 744205 - DNA, 15 bp, Homo sapiens
gccgtcctcccagtg

SEQ ID NO: 744206 - DNA, 15 bp, Homo sapiens
ccgtcctcccagtgt

SEQ ID NO: 744207 - DNA, 15 bp, Homo sapiens
cgtcctcccagtgta

SEQ ID NO: 744208 - DNA, 15 bp, Homo sapiens
gtcctcccagtgtac

SEQ ID NO: 744209 - DNA, 15 bp, Homo sapiens
tcctcccagtgtacc

SEQ ID NO: 744210 - DNA, 15 bp, Homo sapiens
cctcccagtgtaccc

SEQ ID NO: 744211 - DNA, 15 bp, Homo sapiens
ctcccagtgtacccc

SEQ ID NO: 744212 - DNA, 15 bp, Homo sapiens
tcccagtgtacccca

SEQ ID NO: 744213 - DNA, 15 bp, Homo sapiens
cccagtgtaccccac

SEQ ID NO: 744214 - DNA, 15 bp, Homo sapiens
ccagtgtaccccacc

SEQ ID NO: 744215 - DNA, 15 bp, Homo sapiens
cagtgtaccccaccg

SEQ ID NO: 744216 - DNA, 15 bp, Homo sapiens
agtgtaccccaccgc

SEQ ID NO: 744217 - DNA, 15 bp, Homo sapiens
gtgtaccccaccgct

SEQ ID NO: 744218 - DNA, 15 bp, Homo sapiens
tgtaccccaccgctc

SEQ ID NO: 744219 - DNA, 15 bp, Homo sapiens
gtaccccaccgctct

SEQ ID NO: 744220 - DNA, 15 bp, Homo sapiens
taccccaccgctctc

SEQ ID NO: 744221 - DNA, 15 bp, Homo sapiens
accccaccgctctcg

SEQ ID NO: 744222 - DNA, 15 bp, Homo sapiens
ccccaccgctctcgg

SEQ ID NO: 744223 - DNA, 15 bp, Homo sapiens
cccaccgctctcggc

SEQ ID NO: 744224 - DNA, 15 bp, Homo sapiens
ccaccgctctcggct

SEQ ID NO: 744225 - DNA, 15 bp, Homo sapiens
caccgctctcggctg

SEQ ID NO: 744226 - DNA, 15 bp, Homo sapiens
accgctctcggctgg

SEQ ID NO: 744227 - DNA, 15 bp, Homo sapiens
ccgctctcggctggg

SEQ ID NO: 744228 - DNA, 15 bp, Homo sapiens
cgctctcggctgggg

SEQ ID NO: 744229 - DNA, 15 bp, Homo sapiens
gctctcggctggggg

SEQ ID NO: 744230 - DNA, 15 bp, Homo sapiens
ctctcggctgggggc

SEQ ID NO: 744231 - DNA, 15 bp, Homo sapiens
tctcggctgggggcg

SEQ ID NO: 744232 - DNA, 15 bp, Homo sapiens
ctcggctgggggcgc

SEQ ID NO: 744233 - DNA, 15 bp, Homo sapiens
tcggctgggggcgca

SEQ ID NO: 744234 - DNA, 15 bp, Homo sapiens
cggctgggggcgcag

SEQ ID NO: 744235 - DNA, 15 bp, Homo sapiens
ggctgggggcgcagc

SEQ ID NO: 744236 - DNA, 15 bp, Homo sapiens
gctgggggcgcagca

SEQ ID NO: 744237 - DNA, 15 bp, Homo sapiens
ctgggggcgcagcac

SEQ ID NO: 744238 - DNA, 15 bp, Homo sapiens
tgggggcgcagcacc

SEQ ID NO: 744239 - DNA, 15 bp, Homo sapiens
gggggcgcagcacct

SEQ ID NO: 744240 - DNA, 15 bp, Homo sapiens
ggggcgcagcacctt

SEQ ID NO: 744241 - DNA, 15 bp, Homo sapiens
gggcgcagcaccttg

SEQ ID NO: 744242 - DNA, 15 bp, Homo sapiens
ggcgcagcaccttgg

SEQ ID NO: 744243 - DNA, 15 bp, Homo sapiens
gcgcagcaccttgga

SEQ ID NO: 744244 - DNA, 15 bp, Homo sapiens
cgcagcaccttggag

SEQ ID NO: 744245 - DNA, 15 bp, Homo sapiens
gcagcaccttggaga

SEQ ID NO: 744246 - DNA, 15 bp, Homo sapiens
cagcaccttggagag

SEQ ID NO: 744247 - DNA, 15 bp, Homo sapiens
agcaccttggagaga

SEQ ID NO: 744248 - DNA, 15 bp, Homo sapiens
gcaccttggagagag

SEQ ID NO: 744249 - DNA, 15 bp, Homo sapiens
caccttggagagagg

SEQ ID NO: 744250 - DNA, 15 bp, Homo sapiens
accttggagagaggc

SEQ ID NO: 744251 - DNA, 15 bp, Homo sapiens
ccttggagagaggcg

SEQ ID NO: 744252 - DNA, 15 bp, Homo sapiens
cttggagagaggcgc

SEQ ID NO: 744253 - DNA, 15 bp, Homo sapiens
ttggagagaggcgcc

SEQ ID NO: 744254 - DNA, 15 bp, Homo sapiens
tggagagaggcgcct

SEQ ID NO: 744255 - DNA, 15 bp, Homo sapiens
ggagagaggcgcctg

SEQ ID NO: 744256 - DNA, 15 bp, Homo sapiens
gagagaggcgcctgg

SEQ ID NO: 744257 - DNA, 15 bp, Homo sapiens
agagaggcgcctggc

SEQ ID NO: 744258 - DNA, 15 bp, Homo sapiens
gagaggcgcctggcc

SEQ ID NO: 744259 - DNA, 15 bp, Homo sapiens
agaggcgcctggccc

SEQ ID NO: 744260 - DNA, 15 bp, Homo sapiens
gaggcgcctggcccc

SEQ ID NO: 744261 - DNA, 15 bp, Homo sapiens
aggcgcctggccccg

SEQ ID NO: 744262 - DNA, 15 bp, Homo sapiens
ggcgcctggccccgc

SEQ ID NO: 744263 - DNA, 15 bp, Homo sapiens
gcgcctggccccgcg

SEQ ID NO: 744264 - DNA, 15 bp, Homo sapiens
cgcctggccccgcgc

SEQ ID NO: 744265 - DNA, 15 bp, Homo sapiens
gcctggccccgcgcc

SEQ ID NO: 744266 - DNA, 15 bp, Homo sapiens
cctggccccgcgcct

SEQ ID NO: 744267 - DNA, 15 bp, Homo sapiens
ctggccccgcgcctg

SEQ ID NO: 744268 - DNA, 15 bp, Homo sapiens
tggccccgcgcctgg

SEQ ID NO: 744269 - DNA, 15 bp, Homo sapiens
ggccccgcgcctggg

SEQ ID NO: 744270 - DNA, 15 bp, Homo sapiens
gccccgcgcctgggc

SEQ ID NO: 744271 - DNA, 15 bp, Homo sapiens
ccccgcgcctgggct

SEQ ID NO: 744272 - DNA, 15 bp, Homo sapiens
cccgcgcctgggctg

SEQ ID NO: 744273 - DNA, 15 bp, Homo sapiens
ccgcgcctgggctgg

SEQ ID NO: 744274 - DNA, 15 bp, Homo sapiens
cgcgcctgggctggg

SEQ ID NO: 744275 - DNA, 15 bp, Homo sapiens
gcgcctgggctgggg

SEQ ID NO: 744276 - DNA, 15 bp, Homo sapiens
cgcctgggctggggg

SEQ ID NO: 744277 - DNA, 15 bp, Homo sapiens
gcctgggctgggggc

SEQ ID NO: 744278 - DNA, 15 bp, Homo sapiens
cctgggctgggggcg

SEQ ID NO: 744279 - DNA, 15 bp, Homo sapiens
ctgggctgggggcgc

SEQ ID NO: 744280 - DNA, 15 bp, Homo sapiens
tgggctgggggcgct

SEQ ID NO: 744281 - DNA, 15 bp, Homo sapiens
gggctgggggcgctc

SEQ ID NO: 744282 - DNA, 15 bp, Homo sapiens
ggctgggggcgctct

SEQ ID NO: 744283 - DNA, 15 bp, Homo sapiens
gctgggggcgctcta

SEQ ID NO: 744284 - DNA, 15 bp, Homo sapiens
ctgggggcgctctac

SEQ ID NO: 744285 - DNA, 15 bp, Homo sapiens
tgggggcgctctacc

SEQ ID NO: 744286 - DNA, 15 bp, Homo sapiens
gggggcgctctacct

SEQ ID NO: 744287 - DNA, 15 bp, Homo sapiens
ggggcgctctacctt

SEQ ID NO: 744288 - DNA, 15 bp, Homo sapiens
gggcgctctaccttg

SEQ ID NO: 744289 - DNA, 15 bp, Homo sapiens
ggcgctctaccttgc

SEQ ID NO: 744290 - DNA, 15 bp, Homo sapiens
gcgctctaccttgcg

SEQ ID NO: 744291 - DNA, 15 bp, Homo sapiens
cgctctaccttgcgc

SEQ ID NO: 744292 - DNA, 15 bp, Homo sapiens
gctctaccttgcgcc

SEQ ID NO: 744293 - DNA, 15 bp, Homo sapiens
ctctaccttgcgccc

SEQ ID NO: 744294 - DNA, 15 bp, Homo sapiens
tctaccttgcgccct

SEQ ID NO: 744295 - DNA, 15 bp, Homo sapiens
ctaccttgcgccctg

SEQ ID NO: 744296 - DNA, 15 bp, Homo sapiens
taccttgcgccctgg

SEQ ID NO: 744297 - DNA, 15 bp, Homo sapiens
accttgcgccctggg

SEQ ID NO: 744298 - DNA, 15 bp, Homo sapiens
ccttgcgccctgggg

SEQ ID NO: 744299 - DNA, 15 bp, Homo sapiens
cttgcgccctggggg

SEQ ID NO: 744300 - DNA, 15 bp, Homo sapiens
ttgcgccctgggggt

SEQ ID NO: 744301 - DNA, 15 bp, Homo sapiens
tgcgccctgggggtc

SEQ ID NO: 744302 - DNA, 15 bp, Homo sapiens
gcgccctgggggtca

SEQ ID NO: 744303 - DNA, 15 bp, Homo sapiens
cgccctgggggtcag

SEQ ID NO: 744304 - DNA, 15 bp, Homo sapiens
gccctgggggtcagg

SEQ ID NO: 744305 - DNA, 15 bp, Homo sapiens
ccctgggggtcaggg

SEQ ID NO: 744306 - DNA, 15 bp, Homo sapiens
cctgggggtcagggg

SEQ ID NO: 744307 - DNA, 15 bp, Homo sapiens
ctgggggtcaggggc

SEQ ID NO: 744308 - DNA, 15 bp, Homo sapiens
tgggggtcaggggcg

SEQ ID NO: 744309 - DNA, 15 bp, Homo sapiens
gggggtcaggggcgc

SEQ ID NO: 744310 - DNA, 15 bp, Homo sapiens
ggggtcaggggcgct

SEQ ID NO: 744311 - DNA, 15 bp, Homo sapiens
gggtcaggggcgctt

SEQ ID NO: 744312 - DNA, 15 bp, Homo sapiens
ggtcaggggcgcttg

SEQ ID NO: 744313 - DNA, 15 bp, Homo sapiens
gtcaggggcgcttgc

SEQ ID NO: 744314 - DNA, 15 bp, Homo sapiens
tcaggggcgcttgcc

SEQ ID NO: 744315 - DNA, 15 bp, Homo sapiens
caggggcgcttgccg

SEQ ID NO: 744316 - DNA, 15 bp, Homo sapiens
aggggcgcttgccgg

SEQ ID NO: 744317 - DNA, 15 bp, Homo sapiens
ggggcgcttgccggg

SEQ ID NO: 744318 - DNA, 15 bp, Homo sapiens
gggcgcttgccgggc

SEQ ID NO: 744319 - DNA, 15 bp, Homo sapiens
ggcgcttgccgggcc

SEQ ID NO: 744320 - DNA, 15 bp, Homo sapiens
gcgcttgccgggccg

SEQ ID NO: 744321 - DNA, 15 bp, Homo sapiens
cgcttgccgggccgc

SEQ ID NO: 744322 - DNA, 15 bp, Homo sapiens
gcttgccgggccgct

SEQ ID NO: 744323 - DNA, 15 bp, Homo sapiens
cttgccgggccgctg

SEQ ID NO: 744324 - DNA, 15 bp, Homo sapiens
ttgccgggccgctgc

SEQ ID NO: 744325 - DNA, 15 bp, Homo sapiens
tgccgggccgctgcc

SEQ ID NO: 744326 - DNA, 15 bp, Homo sapiens
gccgggccgctgccg

SEQ ID NO: 744327 - DNA, 15 bp, Homo sapiens
ccgggccgctgccga

SEQ ID NO: 744328 - DNA, 15 bp, Homo sapiens
cgggccgctgccgag

SEQ ID NO: 744329 - DNA, 15 bp, Homo sapiens
gggccgctgccgagg

SEQ ID NO: 744330 - DNA, 15 bp, Homo sapiens
ggccgctgccgaggg

SEQ ID NO: 744331 - DNA, 15 bp, Homo sapiens
gccgctgccgagggg

SEQ ID NO: 744332 - DNA, 15 bp, Homo sapiens
ccgctgccgaggggc

SEQ ID NO: 744333 - DNA, 15 bp, Homo sapiens
cgctgccgaggggcc

SEQ ID NO: 744334 - DNA, 15 bp, Homo sapiens
gctgccgaggggccc

SEQ ID NO: 744335 - DNA, 15 bp, Homo sapiens
ctgccgaggggccct

SEQ ID NO: 744336 - DNA, 15 bp, Homo sapiens
tgccgaggggccctg

SEQ ID NO: 744337 - DNA, 15 bp, Homo sapiens
gccgaggggccctgc

SEQ ID NO: 744338 - DNA, 15 bp, Homo sapiens
ccgaggggccctgcc

SEQ ID NO: 744339 - DNA, 15 bp, Homo sapiens
cgaggggccctgccc

SEQ ID NO: 744340 - DNA, 15 bp, Homo sapiens
gaggggccctgccca

SEQ ID NO: 744341 - DNA, 15 bp, Homo sapiens
aggggccctgcccac

SEQ ID NO: 744342 - DNA, 15 bp, Homo sapiens
ggggccctgcccacc

SEQ ID NO: 744343 - DNA, 15 bp, Homo sapiens
gggccctgcccaccc

SEQ ID NO: 744344 - DNA, 15 bp, Homo sapiens
ggccctgcccacccc

SEQ ID NO: 744345 - DNA, 15 bp, Homo sapiens
gccctgcccacccct

SEQ ID NO: 744346 - DNA, 15 bp, Homo sapiens
ccctgcccacccctg

SEQ ID NO: 744347 - DNA, 15 bp, Homo sapiens
cctgcccacccctgc

SEQ ID NO: 744348 - DNA, 15 bp, Homo sapiens
ctgcccacccctgcc

SEQ ID NO: 744349 - DNA, 15 bp, Homo sapiens
tgcccacccctgccc

SEQ ID NO: 744350 - DNA, 15 bp, Homo sapiens
gcccacccctgccca

SEQ ID NO: 744351 - DNA, 15 bp, Homo sapiens
cccacccctgcccag

SEQ ID NO: 744352 - DNA, 15 bp, Homo sapiens
ccacccctgcccagc

SEQ ID NO: 744353 - DNA, 15 bp, Homo sapiens
cacccctgcccagcc

SEQ ID NO: 744354 - DNA, 15 bp, Homo sapiens
acccctgcccagccc

SEQ ID NO: 744355 - DNA, 15 bp, Homo sapiens
cccctgcccagcccg

SEQ ID NO: 744356 - DNA, 15 bp, Homo sapiens
ccctgcccagcccgg

SEQ ID NO: 744357 - DNA, 15 bp, Homo sapiens
cctgcccagcccgga

SEQ ID NO: 744358 - DNA, 15 bp, Homo sapiens
ctgcccagcccggag

SEQ ID NO: 744359 - DNA, 15 bp, Homo sapiens
tgcccagcccggagc

SEQ ID NO: 744360 - DNA, 15 bp, Homo sapiens
gcccagcccggagcc

SEQ ID NO: 744361 - DNA, 15 bp, Homo sapiens
cccagcccggagccc

SEQ ID NO: 744362 - DNA, 15 bp, Homo sapiens
ccagcccggagccca

SEQ ID NO: 744363 - DNA, 15 bp, Homo sapiens
cagcccggagcccag

SEQ ID NO: 744364 - DNA, 15 bp, Homo sapiens
agcccggagcccagg

SEQ ID NO: 744365 - DNA, 15 bp, Homo sapiens
gcccggagcccaggc

SEQ ID NO: 744366 - DNA, 15 bp, Homo sapiens
cccggagcccaggcg

SEQ ID NO: 744367 - DNA, 15 bp, Homo sapiens
ccggagcccaggcga

SEQ ID NO: 744368 - DNA, 15 bp, Homo sapiens
cggagcccaggcgag

SEQ ID NO: 744369 - DNA, 15 bp, Homo sapiens
ggagcccaggcgagc

SEQ ID NO: 744370 - DNA, 15 bp, Homo sapiens
gagcccaggcgagcc

SEQ ID NO: 744371 - DNA, 15 bp, Homo sapiens
agcccaggcgagcca

SEQ ID NO: 744372 - DNA, 15 bp, Homo sapiens
gcccaggcgagccag

SEQ ID NO: 744373 - DNA, 15 bp, Homo sapiens
cccaggcgagccagc

SEQ ID NO: 744374 - DNA, 15 bp, Homo sapiens
ccaggcgagccagcg

SEQ ID NO: 744375 - DNA, 15 bp, Homo sapiens
caggcgagccagcgc

SEQ ID NO: 744376 - DNA, 15 bp, Homo sapiens
aggcgagccagcgcg

SEQ ID NO: 744377 - DNA, 15 bp, Homo sapiens
ggcgagccagcgcgg

SEQ ID NO: 744378 - DNA, 15 bp, Homo sapiens
gcgagccagcgcggc

SEQ ID NO: 744379 - DNA, 15 bp, Homo sapiens
cgagccagcgcggcg

SEQ ID NO: 744380 - DNA, 15 bp, Homo sapiens
gagccagcgcggcga

SEQ ID NO: 744381 - DNA, 15 bp, Homo sapiens
agccagcgcggcgag

SEQ ID NO: 744382 - DNA, 15 bp, Homo sapiens
gccagcgcggcgagc

SEQ ID NO: 744383 - DNA, 15 bp, Homo sapiens
ccagcgcggcgagcc

SEQ ID NO: 744384 - DNA, 15 bp, Homo sapiens
cagcgcggcgagcct

SEQ ID NO: 744385 - DNA, 15 bp, Homo sapiens
agcgcggcgagcctc

SEQ ID NO: 744386 - DNA, 15 bp, Homo sapiens
gcgcggcgagcctcc

SEQ ID NO: 744387 - DNA, 15 bp, Homo sapiens
cgcggcgagcctcct

SEQ ID NO: 744388 - DNA, 15 bp, Homo sapiens
gcggcgagcctcctc

SEQ ID NO: 744389 - DNA, 15 bp, Homo sapiens
cggcgagcctcctcc

SEQ ID NO: 744390 - DNA, 15 bp, Homo sapiens
ggcgagcctcctccc

SEQ ID NO: 744391 - DNA, 15 bp, Homo sapiens
gcgagcctcctcccc

SEQ ID NO: 744392 - DNA, 15 bp, Homo sapiens
cgagcctcctcccct

SEQ ID NO: 744393 - DNA, 15 bp, Homo sapiens
gagcctcctcccctc

SEQ ID NO: 744394 - DNA, 15 bp, Homo sapiens
agcctcctcccctcc

SEQ ID NO: 744395 - DNA, 15 bp, Homo sapiens
gcctcctcccctccc

SEQ ID NO: 744396 - DNA, 15 bp, Homo sapiens
cctcctcccctcccg

SEQ ID NO: 744397 - DNA, 15 bp, Homo sapiens
ctcctcccctcccgc

SEQ ID NO: 744398 - DNA, 15 bp, Homo sapiens
tcctcccctcccgcc

SEQ ID NO: 744399 - DNA, 15 bp, Homo sapiens
cctcccctcccgcct

SEQ ID NO: 744400 - DNA, 15 bp, Homo sapiens
ctcccctcccgcctg

SEQ ID NO: 744401 - DNA, 15 bp, Homo sapiens
tcccctcccgcctgg

SEQ ID NO: 744402 - DNA, 15 bp, Homo sapiens
cccctcccgcctggg

SEQ ID NO: 744403 - DNA, 15 bp, Homo sapiens
ccctcccgcctgggt

SEQ ID NO: 744404 - DNA, 15 bp, Homo sapiens
cctcccgcctgggtc

SEQ ID NO: 744405 - DNA, 15 bp, Homo sapiens
ctcccgcctgggtcg

SEQ ID NO: 744406 - DNA, 15 bp, Homo sapiens
tcccgcctgggtcgt

SEQ ID NO: 744407 - DNA, 15 bp, Homo sapiens
cccgcctgggtcgtc

SEQ ID NO: 744408 - DNA, 15 bp, Homo sapiens
ccgcctgggtcgtcc

SEQ ID NO: 744409 - DNA, 15 bp, Homo sapiens
cgcctgggtcgtcct

SEQ ID NO: 744410 - DNA, 15 bp, Homo sapiens
gcctgggtcgtcctg

SEQ ID NO: 744411 - DNA, 15 bp, Homo sapiens
cctgggtcgtcctga

SEQ ID NO: 744412 - DNA, 15 bp, Homo sapiens
ctgggtcgtcctgag

SEQ ID NO: 744413 - DNA, 15 bp, Homo sapiens
tgggtcgtcctgagt

SEQ ID NO: 744414 - DNA, 15 bp, Homo sapiens
gggtcgtcctgagtc

SEQ ID NO: 744415 - DNA, 15 bp, Homo sapiens
ggtcgtcctgagtcc

SEQ ID NO: 744416 - DNA, 15 bp, Homo sapiens
gtcgtcctgagtccg

SEQ ID NO: 744417 - DNA, 15 bp, Homo sapiens
tcgtcctgagtccgc

SEQ ID NO: 744418 - DNA, 15 bp, Homo sapiens
cgtcctgagtccgcg

SEQ ID NO: 744419 - DNA, 15 bp, Homo sapiens
gtcctgagtccgcgc

SEQ ID NO: 744420 - DNA, 15 bp, Homo sapiens
tcctgagtccgcgcc

SEQ ID NO: 744421 - DNA, 15 bp, Homo sapiens
cctgagtccgcgccc

SEQ ID NO: 744422 - DNA, 15 bp, Homo sapiens
ctgagtccgcgcccg

SEQ ID NO: 744423 - DNA, 15 bp, Homo sapiens
tgagtccgcgcccgc

SEQ ID NO: 744424 - DNA, 15 bp, Homo sapiens
gagtccgcgcccgct

SEQ ID NO: 744425 - DNA, 15 bp, Homo sapiens
agtccgcgcccgctc

SEQ ID NO: 744426 - DNA, 15 bp, Homo sapiens
gtccgcgcccgctcc

SEQ ID NO: 744427 - DNA, 15 bp, Homo sapiens
tccgcgcccgctcca

SEQ ID NO: 744428 - DNA, 15 bp, Homo sapiens
ccgcgcccgctccag

SEQ ID NO: 744429 - DNA, 15 bp, Homo sapiens
cgcgcccgctccagt

SEQ ID NO: 744430 - DNA, 15 bp, Homo sapiens
gcgcccgctccagtt

SEQ ID NO: 744431 - DNA, 15 bp, Homo sapiens
cgcccgctccagttg

SEQ ID NO: 744432 - DNA, 15 bp, Homo sapiens
gcccgctccagttgc

SEQ ID NO: 744433 - DNA, 15 bp, Homo sapiens
cccgctccagttgct

SEQ ID NO: 744434 - DNA, 15 bp, Homo sapiens
ccgctccagttgctg

SEQ ID NO: 744435 - DNA, 15 bp, Homo sapiens
cgctccagttgctgc

SEQ ID NO: 744436 - DNA, 15 bp, Homo sapiens
gctccagttgctgca

SEQ ID NO: 744437 - DNA, 15 bp, Homo sapiens
ctccagttgctgcag

SEQ ID NO: 744438 - DNA, 15 bp, Homo sapiens
tccagttgctgcagc

SEQ ID NO: 744439 - DNA, 15 bp, Homo sapiens
ccagttgctgcagct

SEQ ID NO: 744440 - DNA, 15 bp, Homo sapiens
cagttgctgcagctg

SEQ ID NO: 744441 - DNA, 15 bp, Homo sapiens
agttgctgcagctgc

SEQ ID NO: 744442 - DNA, 15 bp, Homo sapiens
gttgctgcagctgct

SEQ ID NO: 744443 - DNA, 15 bp, Homo sapiens
ttgctgcagctgctg

SEQ ID NO: 744444 - DNA, 15 bp, Homo sapiens
tgctgcagctgctgc

SEQ ID NO: 744445 - DNA, 15 bp, Homo sapiens
gctgcagctgctgct

SEQ ID NO: 744446 - DNA, 15 bp, Homo sapiens
ctgcagctgctgctg

SEQ ID NO: 744447 - DNA, 15 bp, Homo sapiens
tgcagctgctgctgc

SEQ ID NO: 744448 - DNA, 15 bp, Homo sapiens
gcagctgctgctgct

SEQ ID NO: 744449 - DNA, 15 bp, Homo sapiens
cagctgctgctgctg

SEQ ID NO: 744450 - DNA, 15 bp, Homo sapiens
agctgctgctgctgg

SEQ ID NO: 744451 - DNA, 15 bp, Homo sapiens
gctgctgctgctggc

SEQ ID NO: 744452 - DNA, 15 bp, Homo sapiens
ctgctgctgctggcg

SEQ ID NO: 744453 - DNA, 15 bp, Homo sapiens
tgctgctgctggcgg

SEQ ID NO: 744454 - DNA, 15 bp, Homo sapiens
gctgctgctggcggc

SEQ ID NO: 744455 - DNA, 15 bp, Homo sapiens
ctgctgctggcggct

SEQ ID NO: 744456 - DNA, 15 bp, Homo sapiens
tgctgctggcggctg

SEQ ID NO: 744457 - DNA, 15 bp, Homo sapiens
gctgctggcggctgc

SEQ ID NO: 744458 - DNA, 15 bp, Homo sapiens
ctgctggcggctgcg

SEQ ID NO: 744459 - DNA, 15 bp, Homo sapiens
tgctggcggctgcgg

SEQ ID NO: 744460 - DNA, 15 bp, Homo sapiens
gctggcggctgcggg

SEQ ID NO: 744461 - DNA, 15 bp, Homo sapiens
ctggcggctgcgggg

SEQ ID NO: 744462 - DNA, 15 bp, Homo sapiens
tggcggctgcgggga

SEQ ID NO: 744463 - DNA, 15 bp, Homo sapiens
ggcggctgcggggag

SEQ ID NO: 744464 - DNA, 15 bp, Homo sapiens
gcggctgcggggagc

SEQ ID NO: 744465 - DNA, 15 bp, Homo sapiens
cggctgcggggagcg

SEQ ID NO: 744466 - DNA, 15 bp, Homo sapiens
ggctgcggggagcgc

SEQ ID NO: 744467 - DNA, 15 bp, Homo sapiens
gctgcggggagcgcg

SEQ ID NO: 744468 - DNA, 15 bp, Homo sapiens
ctgcggggagcgcgg

SEQ ID NO: 744469 - DNA, 15 bp, Homo sapiens
tgcggggagcgcggg

SEQ ID NO: 744470 - DNA, 15 bp, Homo sapiens
gcggggagcgcgggg

SEQ ID NO: 744471 - DNA, 15 bp, Homo sapiens
cggggagcgcggggc

SEQ ID NO: 744472 - DNA, 15 bp, Homo sapiens
ggggagcgcggggcg

SEQ ID NO: 744473 - DNA, 15 bp, Homo sapiens
gggagcgcggggcgc

SEQ ID NO: 744474 - DNA, 15 bp, Homo sapiens
ggagcgcggggcgcg

SEQ ID NO: 744475 - DNA, 15 bp, Homo sapiens
gagcgcggggcgcgc

SEQ ID NO: 744476 - DNA, 15 bp, Homo sapiens
agcgcggggcgcgcg

SEQ ID NO: 744477 - DNA, 15 bp, Homo sapiens
gcgcggggcgcgcgc

SEQ ID NO: 744478 - DNA, 15 bp, Homo sapiens
cgcggggcgcgcgcc

SEQ ID NO: 744479 - DNA, 15 bp, Homo sapiens
gcggggcgcgcgccg

SEQ ID NO: 744480 - DNA, 15 bp, Homo sapiens
cggggcgcgcgccga

SEQ ID NO: 744481 - DNA, 15 bp, Homo sapiens
ggggcgcgcgccgaa

SEQ ID NO: 744482 - DNA, 15 bp, Homo sapiens
gggcgcgcgccgaag

SEQ ID NO: 744483 - DNA, 15 bp, Homo sapiens
ggcgcgcgccgaaga

SEQ ID NO: 744484 - DNA, 15 bp, Homo sapiens
gcgcgcgccgaagag

SEQ ID NO: 744485 - DNA, 15 bp, Homo sapiens
cgcgcgccgaagagg

SEQ ID NO: 744486 - DNA, 15 bp, Homo sapiens
gcgcgccgaagaggc

SEQ ID NO: 744487 - DNA, 15 bp, Homo sapiens
cgcgccgaagaggct

SEQ ID NO: 744488 - DNA, 15 bp, Homo sapiens
gcgccgaagaggctt

SEQ ID NO: 744489 - DNA, 15 bp, Homo sapiens
cgccgaagaggcttg

SEQ ID NO: 744490 - DNA, 15 bp, Homo sapiens
gccgaagaggcttgg

SEQ ID NO: 744491 - DNA, 15 bp, Homo sapiens
ccgaagaggcttggg

SEQ ID NO: 744492 - DNA, 15 bp, Homo sapiens
cgaagaggcttgggc

SEQ ID NO: 744493 - DNA, 15 bp, Homo sapiens
gaagaggcttgggcg

SEQ ID NO: 744494 - DNA, 15 bp, Homo sapiens
aagaggcttgggcgg

SEQ ID NO: 744495 - DNA, 15 bp, Homo sapiens
agaggcttgggcggc

SEQ ID NO: 744496 - DNA, 15 bp, Homo sapiens
gaggcttgggcggcg

SEQ ID NO: 744497 - DNA, 15 bp, Homo sapiens
aggcttgggcggcga

SEQ ID NO: 744498 - DNA, 15 bp, Homo sapiens
ggcttgggcggcgag

SEQ ID NO: 744499 - DNA, 15 bp, Homo sapiens
gcttgggcggcgagg

SEQ ID NO: 744500 - DNA, 15 bp, Homo sapiens
cttgggcggcgagga

SEQ ID NO: 744501 - DNA, 15 bp, Homo sapiens
ttgggcggcgaggac

SEQ ID NO: 744502 - DNA, 15 bp, Homo sapiens
tgggcggcgaggacg

SEQ ID NO: 744503 - DNA, 15 bp, Homo sapiens
gggcggcgaggacgg

SEQ ID NO: 744504 - DNA, 15 bp, Homo sapiens
ggcggcgaggacggg

SEQ ID NO: 744505 - DNA, 15 bp, Homo sapiens
gcggcgaggacgggg

SEQ ID NO: 744506 - DNA, 15 bp, Homo sapiens
cggcgaggacgggga

SEQ ID NO: 744507 - DNA, 15 bp, Homo sapiens
ggcgaggacggggac

SEQ ID NO: 744508 - DNA, 15 bp, Homo sapiens
gcgaggacggggacg

SEQ ID NO: 744509 - DNA, 15 bp, Homo sapiens
cgaggacggggacga

SEQ ID NO: 744510 - DNA, 15 bp, Homo sapiens
gaggacggggacgag

SEQ ID NO: 744511 - DNA, 15 bp, Homo sapiens
aggacggggacgagg

SEQ ID NO: 744512 - DNA, 15 bp, Homo sapiens
ggacggggacgagga

SEQ ID NO: 744513 - DNA, 15 bp, Homo sapiens
gacggggacgaggag

SEQ ID NO: 744514 - DNA, 15 bp, Homo sapiens
acggggacgaggagg

SEQ ID NO: 744515 - DNA, 15 bp, Homo sapiens
cggggacgaggagga

SEQ ID NO: 744516 - DNA, 15 bp, Homo sapiens
ggggacgaggaggag

SEQ ID NO: 744517 - DNA, 15 bp, Homo sapiens
gggacgaggaggagt

SEQ ID NO: 744518 - DNA, 15 bp, Homo sapiens
ggacgaggaggagtc

SEQ ID NO: 744519 - DNA, 15 bp, Homo sapiens
gacgaggaggagtcg

SEQ ID NO: 744520 - DNA, 15 bp, Homo sapiens
acgaggaggagtcgg

SEQ ID NO: 744521 - DNA, 15 bp, Homo sapiens
cgaggaggagtcgga

SEQ ID NO: 744522 - DNA, 15 bp, Homo sapiens
gaggaggagtcggag

SEQ ID NO: 744523 - DNA, 15 bp, Homo sapiens
aggaggagtcggagg

SEQ ID NO: 744524 - DNA, 15 bp, Homo sapiens
ggaggagtcggaggc

SEQ ID NO: 744525 - DNA, 15 bp, Homo sapiens
gaggagtcggaggcg

SEQ ID NO: 744526 - DNA, 15 bp, Homo sapiens
aggagtcggaggcgg

SEQ ID NO: 744527 - DNA, 15 bp, Homo sapiens
ggagtcggaggcggc

SEQ ID NO: 744528 - DNA, 15 bp, Homo sapiens
gagtcggaggcggca

SEQ ID NO: 744529 - DNA, 15 bp, Homo sapiens
agtcggaggcggcaa

SEQ ID NO: 744530 - DNA, 15 bp, Homo sapiens
gtcggaggcggcaag

SEQ ID NO: 744531 - DNA, 15 bp, Homo sapiens
tcggaggcggcaagg

SEQ ID NO: 744532 - DNA, 15 bp, Homo sapiens
cggaggcggcaagga

SEQ ID NO: 744533 - DNA, 15 bp, Homo sapiens
ggaggcggcaaggag

SEQ ID NO: 744534 - DNA, 15 bp, Homo sapiens
gaggcggcaaggagg

SEQ ID NO: 744535 - DNA, 15 bp, Homo sapiens
aggcggcaaggagga

SEQ ID NO: 744536 - DNA, 15 bp, Homo sapiens
ggcggcaaggaggaa

SEQ ID NO: 744537 - DNA, 15 bp, Homo sapiens
gcggcaaggaggaag

SEQ ID NO: 744538 - DNA, 15 bp, Homo sapiens
cggcaaggaggaaga

SEQ ID NO: 744539 - DNA, 15 bp, Homo sapiens
ggcaaggaggaagag

SEQ ID NO: 744540 - DNA, 15 bp, Homo sapiens
gcaaggaggaagagc

SEQ ID NO: 744541 - DNA, 15 bp, Homo sapiens
caaggaggaagagcg

SEQ ID NO: 744542 - DNA, 15 bp, Homo sapiens
aaggaggaagagcga

SEQ ID NO: 744543 - DNA, 15 bp, Homo sapiens
aggaggaagagcgag

SEQ ID NO: 744544 - DNA, 15 bp, Homo sapiens
ggaggaagagcgagc

SEQ ID NO: 744545 - DNA, 15 bp, Homo sapiens
gaggaagagcgagcg

SEQ ID NO: 744546 - DNA, 15 bp, Homo sapiens
aggaagagcgagcgg

SEQ ID NO: 744547 - DNA, 15 bp, Homo sapiens
ggaagagcgagcgga

SEQ ID NO: 744548 - DNA, 15 bp, Homo sapiens
gaagagcgagcggag

SEQ ID NO: 744549 - DNA, 15 bp, Homo sapiens
aagagcgagcggagg

SEQ ID NO: 744550 - DNA, 15 bp, Homo sapiens
agagcgagcggaggc

SEQ ID NO: 744551 - DNA, 15 bp, Homo sapiens
gagcgagcggaggcc

SEQ ID NO: 744552 - DNA, 15 bp, Homo sapiens
agcgagcggaggccg

SEQ ID NO: 744553 - DNA, 15 bp, Homo sapiens
gcgagcggaggccga

SEQ ID NO: 744554 - DNA, 15 bp, Homo sapiens
cgagcggaggccgag

SEQ ID NO: 744555 - DNA, 15 bp, Homo sapiens
gagcggaggccgagg

SEQ ID NO: 744556 - DNA, 15 bp, Homo sapiens
agcggaggccgaggg

SEQ ID NO: 744557 - DNA, 15 bp, Homo sapiens
gcggaggccgagggg

SEQ ID NO: 744558 - DNA, 15 bp, Homo sapiens
cggaggccgaggggc

SEQ ID NO: 744559 - DNA, 15 bp, Homo sapiens
ggaggccgaggggct

SEQ ID NO: 744560 - DNA, 15 bp, Homo sapiens
gaggccgaggggctc

SEQ ID NO: 744561 - DNA, 15 bp, Homo sapiens
aggccgaggggctca

SEQ ID NO: 744562 - DNA, 15 bp, Homo sapiens
ggccgaggggctcag

SEQ ID NO: 744563 - DNA, 15 bp, Homo sapiens
gccgaggggctcagc

SEQ ID NO: 744564 - DNA, 15 bp, Homo sapiens
ccgaggggctcagcg

SEQ ID NO: 744565 - DNA, 15 bp, Homo sapiens
cgaggggctcagcgg

SEQ ID NO: 744566 - DNA, 15 bp, Homo sapiens
gaggggctcagcggc

SEQ ID NO: 744567 - DNA, 15 bp, Homo sapiens
aggggctcagcggcg

SEQ ID NO: 744568 - DNA, 15 bp, Homo sapiens
ggggctcagcggcgt

SEQ ID NO: 744569 - DNA, 15 bp, Homo sapiens
gggctcagcggcgtg

SEQ ID NO: 744570 - DNA, 15 bp, Homo sapiens
ggctcagcggcgtgg

SEQ ID NO: 744571 - DNA, 15 bp, Homo sapiens
gctcagcggcgtggc

SEQ ID NO: 744572 - DNA, 15 bp, Homo sapiens
ctcagcggcgtggcg

SEQ ID NO: 744573 - DNA, 15 bp, Homo sapiens
tcagcggcgtggcga

SEQ ID NO: 744574 - DNA, 15 bp, Homo sapiens
cagcggcgtggcgac

SEQ ID NO: 744575 - DNA, 15 bp, Homo sapiens
agcggcgtggcgaca

SEQ ID NO: 744576 - DNA, 15 bp, Homo sapiens
gcggcgtggcgacag

SEQ ID NO: 744577 - DNA, 15 bp, Homo sapiens
cggcgtggcgacagg

SEQ ID NO: 744578 - DNA, 15 bp, Homo sapiens
ggcgtggcgacagga

SEQ ID NO: 744579 - DNA, 15 bp, Homo sapiens
gcgtggcgacaggac

SEQ ID NO: 744580 - DNA, 15 bp, Homo sapiens
cgtggcgacaggact

SEQ ID NO: 744581 - DNA, 15 bp, Homo sapiens
gtggcgacaggacta

SEQ ID NO: 744582 - DNA, 15 bp, Homo sapiens
tggcgacaggactag

SEQ ID NO: 744583 - DNA, 15 bp, Homo sapiens
ggcgacaggactagg

SEQ ID NO: 744584 - DNA, 15 bp, Homo sapiens
gcgacaggactaggg

SEQ ID NO: 744585 - DNA, 15 bp, Homo sapiens
cgacaggactagggg

SEQ ID NO: 744586 - DNA, 15 bp, Homo sapiens
gacaggactaggggg

SEQ ID NO: 744587 - DNA, 15 bp, Homo sapiens
acaggactagggggt

SEQ ID NO: 744588 - DNA, 15 bp, Homo sapiens
caggactagggggtc

SEQ ID NO: 744589 - DNA, 15 bp, Homo sapiens
aggactagggggtcc

SEQ ID NO: 744590 - DNA, 15 bp, Homo sapiens
ggactagggggtccc

SEQ ID NO: 744591 - DNA, 15 bp, Homo sapiens
gactagggggtcccg

SEQ ID NO: 744592 - DNA, 15 bp, Homo sapiens
actagggggtcccga

SEQ ID NO: 744593 - DNA, 15 bp, Homo sapiens
ctagggggtcccgag

SEQ ID NO: 744594 - DNA, 15 bp, Homo sapiens
tagggggtcccgaga

SEQ ID NO: 744595 - DNA, 15 bp, Homo sapiens
agggggtcccgagaa

SEQ ID NO: 744596 - DNA, 15 bp, Homo sapiens
gggggtcccgagaac

SEQ ID NO: 744597 - DNA, 15 bp, Homo sapiens
ggggtcccgagaaca

SEQ ID NO: 744598 - DNA, 15 bp, Homo sapiens
gggtcccgagaacat

SEQ ID NO: 744599 - DNA, 15 bp, Homo sapiens
ggtcccgagaacatg

SEQ ID NO: 744600 - DNA, 15 bp, Homo sapiens
gtcccgagaacatgg

SEQ ID NO: 744601 - DNA, 15 bp, Homo sapiens
tcccgagaacatggg

SEQ ID NO: 744602 - DNA, 15 bp, Homo sapiens
cccgagaacatgggc

SEQ ID NO: 744603 - DNA, 15 bp, Homo sapiens
ccgagaacatgggct

SEQ ID NO: 744604 - DNA, 15 bp, Homo sapiens
cgagaacatgggcta

SEQ ID NO: 744605 - DNA, 15 bp, Homo sapiens
gagaacatgggctag

SEQ ID NO: 744606 - DNA, 15 bp, Homo sapiens
agaacatgggctagc

SEQ ID NO: 744607 - DNA, 15 bp, Homo sapiens
gaacatgggctagca

SEQ ID NO: 744608 - DNA, 15 bp, Homo sapiens
aacatgggctagcag

SEQ ID NO: 744609 - DNA, 15 bp, Homo sapiens
acatgggctagcagg

SEQ ID NO: 744610 - DNA, 15 bp, Homo sapiens
catgggctagcaggc

SEQ ID NO: 744611 - DNA, 15 bp, Homo sapiens
atgggctagcaggcg

SEQ ID NO: 744612 - DNA, 15 bp, Homo sapiens
tgggctagcaggcgg

SEQ ID NO: 744613 - DNA, 15 bp, Homo sapiens
gggctagcaggcggc

SEQ ID NO: 744614 - DNA, 15 bp, Homo sapiens
ggctagcaggcggcc

SEQ ID NO: 744615 - DNA, 15 bp, Homo sapiens
gctagcaggcggcca

SEQ ID NO: 744616 - DNA, 15 bp, Homo sapiens
ctagcaggcggccac

SEQ ID NO: 744617 - DNA, 15 bp, Homo sapiens
tagcaggcggccacg

SEQ ID NO: 744618 - DNA, 15 bp, Homo sapiens
agcaggcggccacgg

SEQ ID NO: 744619 - DNA, 15 bp, Homo sapiens
gcaggcggccacggg

SEQ ID NO: 744620 - DNA, 15 bp, Homo sapiens
caggcggccacgggc

SEQ ID NO: 744621 - DNA, 15 bp, Homo sapiens
aggcggccacgggcc

SEQ ID NO: 744622 - DNA, 15 bp, Homo sapiens
ggcggccacgggccg

SEQ ID NO: 744623 - DNA, 15 bp, Homo sapiens
gcggccacgggccgg

SEQ ID NO: 744624 - DNA, 15 bp, Homo sapiens
cggccacgggccggc

SEQ ID NO: 744625 - DNA, 15 bp, Homo sapiens
ggccacgggccggcg

SEQ ID NO: 744626 - DNA, 15 bp, Homo sapiens
gccacgggccggcgg

SEQ ID NO: 744627 - DNA, 15 bp, Homo sapiens
ccacgggccggcggc

SEQ ID NO: 744628 - DNA, 15 bp, Homo sapiens
cacgggccggcggcc

SEQ ID NO: 744629 - DNA, 15 bp, Homo sapiens
acgggccggcggccg

SEQ ID NO: 744630 - DNA, 15 bp, Homo sapiens
cgggccggcggccgg

SEQ ID NO: 744631 - DNA, 15 bp, Homo sapiens
gggccggcggccgga

SEQ ID NO: 744632 - DNA, 15 bp, Homo sapiens
ggccggcggccggac

SEQ ID NO: 744633 - DNA, 15 bp, Homo sapiens
gccggcggccggacg

SEQ ID NO: 744634 - DNA, 15 bp, Homo sapiens
ccggcggccggacgc

SEQ ID NO: 744635 - DNA, 15 bp, Homo sapiens
cggcggccggacgcg

SEQ ID NO: 744636 - DNA, 15 bp, Homo sapiens
ggcggccggacgcgg

SEQ ID NO: 744637 - DNA, 15 bp, Homo sapiens
gcggccggacgcggt

SEQ ID NO: 744638 - DNA, 15 bp, Homo sapiens
cggccggacgcggtg

SEQ ID NO: 744639 - DNA, 15 bp, Homo sapiens
ggccggacgcggtga

SEQ ID NO: 744640 - DNA, 15 bp, Homo sapiens
gccggacgcggtgaa

SEQ ID NO: 744641 - DNA, 15 bp, Homo sapiens
ccggacgcggtgaac

SEQ ID NO: 744642 - DNA, 15 bp, Homo sapiens
cggacgcggtgaacc

SEQ ID NO: 744643 - DNA, 15 bp, Homo sapiens
ggacgcggtgaacct

SEQ ID NO: 744644 - DNA, 15 bp, Homo sapiens
gacgcggtgaacctg

SEQ ID NO: 744645 - DNA, 15 bp, Homo sapiens
acgcggtgaacctgc

SEQ ID NO: 744646 - DNA, 15 bp, Homo sapiens
cgcggtgaacctgcc

SEQ ID NO: 744647 - DNA, 15 bp, Homo sapiens
gcggtgaacctgccg

SEQ ID NO: 744648 - DNA, 15 bp, Homo sapiens
cggtgaacctgccgc

SEQ ID NO: 744649 - DNA, 15 bp, Homo sapiens
ggtgaacctgccgcg

SEQ ID NO: 744650 - DNA, 15 bp, Homo sapiens
gtgaacctgccgcgg

SEQ ID NO: 744651 - DNA, 15 bp, Homo sapiens
tgaacctgccgcggc

SEQ ID NO: 744652 - DNA, 15 bp, Homo sapiens
gaacctgccgcggcc

SEQ ID NO: 744653 - DNA, 15 bp, Homo sapiens
aacctgccgcggccg

SEQ ID NO: 744654 - DNA, 15 bp, Homo sapiens
acctgccgcggccgg

SEQ ID NO: 744655 - DNA, 15 bp, Homo sapiens
cctgccgcggccggg

SEQ ID NO: 744656 - DNA, 15 bp, Homo sapiens
ctgccgcggccgggc

SEQ ID NO: 744657 - DNA, 15 bp, Homo sapiens
tgccgcggccgggcg

SEQ ID NO: 744658 - DNA, 15 bp, Homo sapiens
gccgcggccgggcgc

SEQ ID NO: 744659 - DNA, 15 bp, Homo sapiens
ccgcggccgggcgcg

SEQ ID NO: 744660 - DNA, 15 bp, Homo sapiens
cgcggccgggcgcgc

SEQ ID NO: 744661 - DNA, 15 bp, Homo sapiens
gcggccgggcgcgca

SEQ ID NO: 744662 - DNA, 15 bp, Homo sapiens
cggccgggcgcgcac

SEQ ID NO: 744663 - DNA, 15 bp, Homo sapiens
ggccgggcgcgcact

SEQ ID NO: 744664 - DNA, 15 bp, Homo sapiens
gccgggcgcgcactg

SEQ ID NO: 744665 - DNA, 15 bp, Homo sapiens
ccgggcgcgcactgg

SEQ ID NO: 744666 - DNA, 15 bp, Homo sapiens
cgggcgcgcactggc

SEQ ID NO: 744667 - DNA, 15 bp, Homo sapiens
gggcgcgcactggcg

SEQ ID NO: 744668 - DNA, 15 bp, Homo sapiens
ggcgcgcactggcgc

SEQ ID NO: 744669 - DNA, 15 bp, Homo sapiens
gcgcgcactggcgcg

SEQ ID NO: 744670 - DNA, 15 bp, Homo sapiens
cgcgcactggcgcgg

SEQ ID NO: 744671 - DNA, 15 bp, Homo sapiens
gcgcactggcgcggc

SEQ ID NO: 744672 - DNA, 15 bp, Homo sapiens
cgcactggcgcggcg

SEQ ID NO: 744673 - DNA, 15 bp, Homo sapiens
gcactggcgcggcga

SEQ ID NO: 744674 - DNA, 15 bp, Homo sapiens
cactggcgcggcgag

SEQ ID NO: 744675 - DNA, 15 bp, Homo sapiens
actggcgcggcgagc

SEQ ID NO: 744676 - DNA, 15 bp, Homo sapiens
ctggcgcggcgagcc

SEQ ID NO: 744677 - DNA, 15 bp, Homo sapiens
tggcgcggcgagccg

SEQ ID NO: 744678 - DNA, 15 bp, Homo sapiens
ggcgcggcgagccgg

SEQ ID NO: 744679 - DNA, 15 bp, Homo sapiens
gcgcggcgagccgga

SEQ ID NO: 744680 - DNA, 15 bp, Homo sapiens
cgcggcgagccggag

SEQ ID NO: 744681 - DNA, 15 bp, Homo sapiens
gcggcgagccggagc

SEQ ID NO: 744682 - DNA, 15 bp, Homo sapiens
cggcgagccggagcc

SEQ ID NO: 744683 - DNA, 15 bp, Homo sapiens
ggcgagccggagccg

SEQ ID NO: 744684 - DNA, 15 bp, Homo sapiens
gcgagccggagccga

SEQ ID NO: 744685 - DNA, 15 bp, Homo sapiens
cgagccggagccgag

SEQ ID NO: 744686 - DNA, 15 bp, Homo sapiens
gagccggagccgagc

SEQ ID NO: 744687 - DNA, 15 bp, Homo sapiens
agccggagccgagcg

SEQ ID NO: 744688 - DNA, 15 bp, Homo sapiens
gccggagccgagcgc

SEQ ID NO: 744689 - DNA, 15 bp, Homo sapiens
ccggagccgagcgca

SEQ ID NO: 744690 - DNA, 15 bp, Homo sapiens
cggagccgagcgcag

SEQ ID NO: 744691 - DNA, 15 bp, Homo sapiens
ggagccgagcgcagc

SEQ ID NO: 744692 - DNA, 15 bp, Homo sapiens
gagccgagcgcagcc

SEQ ID NO: 744693 - DNA, 15 bp, Homo sapiens
agccgagcgcagccg

SEQ ID NO: 744694 - DNA, 15 bp, Homo sapiens
gccgagcgcagccgg

SEQ ID NO: 744695 - DNA, 15 bp, Homo sapiens
ccgagcgcagccggg

SEQ ID NO: 744696 - DNA, 15 bp, Homo sapiens
cgagcgcagccgggg

SEQ ID NO: 744697 - DNA, 15 bp, Homo sapiens
gagcgcagccggggg

SEQ ID NO: 744698 - DNA, 15 bp, Homo sapiens
agcgcagccggggga

SEQ ID NO: 744699 - DNA, 15 bp, Homo sapiens
gcgcagccgggggag

SEQ ID NO: 744700 - DNA, 15 bp, Homo sapiens
cgcagccgggggagg

SEQ ID NO: 744701 - DNA, 15 bp, Homo sapiens
gcagccgggggagga

SEQ ID NO: 744702 - DNA, 15 bp, Homo sapiens
cagccgggggaggag

SEQ ID NO: 744703 - DNA, 15 bp, Homo sapiens
agccgggggaggagg

SEQ ID NO: 744704 - DNA, 15 bp, Homo sapiens
gccgggggaggaggg

SEQ ID NO: 744705 - DNA, 15 bp, Homo sapiens
ccgggggaggagggc

SEQ ID NO: 744706 - DNA, 15 bp, Homo sapiens
cgggggaggagggct

SEQ ID NO: 744707 - DNA, 15 bp, Homo sapiens
gggggaggagggctg

SEQ ID NO: 744708 - DNA, 15 bp, Homo sapiens
ggggaggagggctgg

SEQ ID NO: 744709 - DNA, 15 bp, Homo sapiens
gggaggagggctggc

SEQ ID NO: 744710 - DNA, 15 bp, Homo sapiens
ggaggagggctggcg

SEQ ID NO: 744711 - DNA, 15 bp, Homo sapiens
gaggagggctggcgc

SEQ ID NO: 744712 - DNA, 15 bp, Homo sapiens
aggagggctggcgca

SEQ ID NO: 744713 - DNA, 15 bp, Homo sapiens
ggagggctggcgcag

SEQ ID NO: 744714 - DNA, 15 bp, Homo sapiens
gagggctggcgcagg

SEQ ID NO: 744715 - DNA, 15 bp, Homo sapiens
agggctggcgcaggg

SEQ ID NO: 744716 - DNA, 15 bp, Homo sapiens
gggctggcgcagggg

SEQ ID NO: 744717 - DNA, 15 bp, Homo sapiens
ggctggcgcaggggc

SEQ ID NO: 744718 - DNA, 15 bp, Homo sapiens
gctggcgcaggggcg

SEQ ID NO: 744719 - DNA, 15 bp, Homo sapiens
ctggcgcaggggcgc

SEQ ID NO: 744720 - DNA, 15 bp, Homo sapiens
tggcgcaggggcgcc

SEQ ID NO: 744721 - DNA, 15 bp, Homo sapiens
ggcgcaggggcgccc

SEQ ID NO: 744722 - DNA, 15 bp, Homo sapiens
gcgcaggggcgcccg

SEQ ID NO: 744723 - DNA, 15 bp, Homo sapiens
cgcaggggcgcccgg

SEQ ID NO: 744724 - DNA, 15 bp, Homo sapiens
gcaggggcgcccggg

SEQ ID NO: 744725 - DNA, 15 bp, Homo sapiens
caggggcgcccgggc

SEQ ID NO: 744726 - DNA, 15 bp, Homo sapiens
aggggcgcccgggcg

SEQ ID NO: 744727 - DNA, 15 bp, Homo sapiens
ggggcgcccgggcgg

SEQ ID NO: 744728 - DNA, 15 bp, Homo sapiens
gggcgcccgggcgga

SEQ ID NO: 744729 - DNA, 15 bp, Homo sapiens
ggcgcccgggcggag

SEQ ID NO: 744730 - DNA, 15 bp, Homo sapiens
gcgcccgggcggagg

SEQ ID NO: 744731 - DNA, 15 bp, Homo sapiens
cgcccgggcggaggg

SEQ ID NO: 744732 - DNA, 15 bp, Homo sapiens
gcccgggcggagggg

SEQ ID NO: 744733 - DNA, 15 bp, Homo sapiens
cccgggcggaggggg

SEQ ID NO: 744734 - DNA, 15 bp, Homo sapiens
ccgggcggagggggc

SEQ ID NO: 744735 - DNA, 15 bp, Homo sapiens
cgggcggagggggcc

SEQ ID NO: 744736 - DNA, 15 bp, Homo sapiens
gggcggagggggccg

SEQ ID NO: 744737 - DNA, 15 bp, Homo sapiens
ggcggagggggccga

SEQ ID NO: 744738 - DNA, 15 bp, Homo sapiens
gcggagggggccgat

SEQ ID NO: 744739 - DNA, 15 bp, Homo sapiens
cggagggggccgatt

SEQ ID NO: 744740 - DNA, 15 bp, Homo sapiens
ggagggggccgatta

SEQ ID NO: 744741 - DNA, 15 bp, Homo sapiens
gagggggccgattat

SEQ ID NO: 744742 - DNA, 15 bp, Homo sapiens
agggggccgattatc

SEQ ID NO: 744743 - DNA, 15 bp, Homo sapiens
gggggccgattatcc

SEQ ID NO: 744744 - DNA, 15 bp, Homo sapiens
ggggccgattatcca

SEQ ID NO: 744745 - DNA, 15 bp, Homo sapiens
gggccgattatccat

SEQ ID NO: 744746 - DNA, 15 bp, Homo sapiens
ggccgattatccatt

SEQ ID NO: 744747 - DNA, 15 bp, Homo sapiens
gccgattatccatta

SEQ ID NO: 744748 - DNA, 15 bp, Homo sapiens
ccgattatccattat

SEQ ID NO: 744749 - DNA, 15 bp, Homo sapiens
cgattatccattatt

SEQ ID NO: 744750 - DNA, 15 bp, Homo sapiens
gattatccattatta

SEQ ID NO: 744751 - DNA, 15 bp, Homo sapiens
attatccattattaa

SEQ ID NO: 744752 - DNA, 15 bp, Homo sapiens
ttatccattattaac

SEQ ID NO: 744753 - DNA, 15 bp, Homo sapiens
tatccattattaacg

SEQ ID NO: 744754 - DNA, 15 bp, Homo sapiens
atccattattaacga

SEQ ID NO: 744755 - DNA, 15 bp, Homo sapiens
tccattattaacgag

SEQ ID NO: 744756 - DNA, 15 bp, Homo sapiens
ccattattaacgagt

SEQ ID NO: 744757 - DNA, 15 bp, Homo sapiens
cattattaacgagtt

SEQ ID NO: 744758 - DNA, 15 bp, Homo sapiens
attattaacgagtta

SEQ ID NO: 744759 - DNA, 15 bp, Homo sapiens
ttattaacgagttac

SEQ ID NO: 744760 - DNA, 15 bp, Homo sapiens
tattaacgagttacc

SEQ ID NO: 744761 - DNA, 15 bp, Homo sapiens
attaacgagttacca

SEQ ID NO: 744762 - DNA, 15 bp, Homo sapiens
ttaacgagttaccac

SEQ ID NO: 744763 - DNA, 15 bp, Homo sapiens
taacgagttaccacc

SEQ ID NO: 744764 - DNA, 15 bp, Homo sapiens
aacgagttaccacct

SEQ ID NO: 744765 - DNA, 15 bp, Homo sapiens
acgagttaccaccta

SEQ ID NO: 744766 - DNA, 15 bp, Homo sapiens
cgagttaccacctaa

SEQ ID NO: 744767 - DNA, 15 bp, Homo sapiens
gagttaccacctaat

SEQ ID NO: 744768 - DNA, 15 bp, Homo sapiens
agttaccacctaata

SEQ ID NO: 744769 - DNA, 15 bp, Homo sapiens
gttaccacctaataa

SEQ ID NO: 744770 - DNA, 15 bp, Homo sapiens
ttaccacctaataag

SEQ ID NO: 744771 - DNA, 15 bp, Homo sapiens
taccacctaataagc

SEQ ID NO: 744772 - DNA, 15 bp, Homo sapiens
accacctaataagcg

SEQ ID NO: 744773 - DNA, 15 bp, Homo sapiens
ccacctaataagcgg

SEQ ID NO: 744774 - DNA, 15 bp, Homo sapiens
cacctaataagcgga

SEQ ID NO: 744775 - DNA, 15 bp, Homo sapiens
acctaataagcggag

SEQ ID NO: 744776 - DNA, 15 bp, Homo sapiens
cctaataagcggaga

SEQ ID NO: 744777 - DNA, 15 bp, Homo sapiens
ctaataagcggagag

SEQ ID NO: 744778 - DNA, 15 bp, Homo sapiens
taataagcggagagc

SEQ ID NO: 744779 - DNA, 15 bp, Homo sapiens
aataagcggagagcg

SEQ ID NO: 744780 - DNA, 15 bp, Homo sapiens
ataagcggagagcgg

SEQ ID NO: 744781 - DNA, 15 bp, Homo sapiens
taagcggagagcggc

SEQ ID NO: 744782 - DNA, 15 bp, Homo sapiens
aagcggagagcggct

SEQ ID NO: 744783 - DNA, 15 bp, Homo sapiens
agcggagagcggctc

SEQ ID NO: 744784 - DNA, 15 bp, Homo sapiens
gcggagagcggctcg

SEQ ID NO: 744785 - DNA, 15 bp, Homo sapiens
cggagagcggctcgt

SEQ ID NO: 744786 - DNA, 15 bp, Homo sapiens
ggagagcggctcgtt

SEQ ID NO: 744787 - DNA, 15 bp, Homo sapiens
gagagcggctcgtta

SEQ ID NO: 744788 - DNA, 15 bp, Homo sapiens
agagcggctcgttag

SEQ ID NO: 744789 - DNA, 15 bp, Homo sapiens
gagcggctcgttagc

SEQ ID NO: 744790 - DNA, 15 bp, Homo sapiens
agcggctcgttagcc

SEQ ID NO: 744791 - DNA, 15 bp, Homo sapiens
gcggctcgttagccg

SEQ ID NO: 744792 - DNA, 15 bp, Homo sapiens
cggctcgttagccgc

SEQ ID NO: 744793 - DNA, 15 bp, Homo sapiens
ggctcgttagccgcg

SEQ ID NO: 744794 - DNA, 15 bp, Homo sapiens
gctcgttagccgcgc

SEQ ID NO: 744795 - DNA, 15 bp, Homo sapiens
ctcgttagccgcgcg

SEQ ID NO: 744796 - DNA, 15 bp, Homo sapiens
tcgttagccgcgcgg

SEQ ID NO: 744797 - DNA, 15 bp, Homo sapiens
cgttagccgcgcggg

SEQ ID NO: 744798 - DNA, 15 bp, Homo sapiens
gttagccgcgcggga

SEQ ID NO: 744799 - DNA, 15 bp, Homo sapiens
ttagccgcgcgggag

SEQ ID NO: 744800 - DNA, 15 bp, Homo sapiens
tagccgcgcgggagg

SEQ ID NO: 744801 - DNA, 15 bp, Homo sapiens
agccgcgcgggaggc

SEQ ID NO: 744802 - DNA, 15 bp, Homo sapiens
gccgcgcgggaggcg

SEQ ID NO: 744803 - DNA, 15 bp, Homo sapiens
ccgcgcgggaggcgc

SEQ ID NO: 744804 - DNA, 15 bp, Homo sapiens
cgcgcgggaggcgct

SEQ ID NO: 744805 - DNA, 15 bp, Homo sapiens
gcgcgggaggcgctc

SEQ ID NO: 744806 - DNA, 15 bp, Homo sapiens
cgcgggaggcgctcg

SEQ ID NO: 744807 - DNA, 15 bp, Homo sapiens
gcgggaggcgctcgg

SEQ ID NO: 744808 - DNA, 15 bp, Homo sapiens
cgggaggcgctcggg

SEQ ID NO: 744809 - DNA, 15 bp, Homo sapiens
gggaggcgctcgggg

SEQ ID NO: 744810 - DNA, 15 bp, Homo sapiens
ggaggcgctcgggga

SEQ ID NO: 744811 - DNA, 15 bp, Homo sapiens
gaggcgctcggggaa

SEQ ID NO: 744812 - DNA, 15 bp, Homo sapiens
aggcgctcggggaag

SEQ ID NO: 744813 - DNA, 15 bp, Homo sapiens
ggcgctcggggaagg

SEQ ID NO: 744814 - DNA, 15 bp, Homo sapiens
gcgctcggggaaggg

SEQ ID NO: 744815 - DNA, 15 bp, Homo sapiens
cgctcggggaagggg

SEQ ID NO: 744816 - DNA, 15 bp, Homo sapiens
gctcggggaaggggg

SEQ ID NO: 744817 - DNA, 15 bp, Homo sapiens
ctcggggaagggggt

SEQ ID NO: 744818 - DNA, 15 bp, Homo sapiens
tcggggaagggggtc

SEQ ID NO: 744819 - DNA, 15 bp, Homo sapiens
cggggaagggggtca

SEQ ID NO: 744820 - DNA, 15 bp, Homo sapiens
ggggaagggggtcac

SEQ ID NO: 744821 - DNA, 15 bp, Homo sapiens
gggaagggggtcacc

SEQ ID NO: 744822 - DNA, 15 bp, Homo sapiens
ggaagggggtcaccg

SEQ ID NO: 744823 - DNA, 15 bp, Homo sapiens
gaagggggtcaccgg

SEQ ID NO: 744824 - DNA, 15 bp, Homo sapiens
aagggggtcaccggc

SEQ ID NO: 744825 - DNA, 15 bp, Homo sapiens
agggggtcaccggcc

SEQ ID NO: 744826 - DNA, 15 bp, Homo sapiens
gggggtcaccggccg

SEQ ID NO: 744827 - DNA, 15 bp, Homo sapiens
ggggtcaccggccga

SEQ ID NO: 744828 - DNA, 15 bp, Homo sapiens
gggtcaccggccgag

SEQ ID NO: 744829 - DNA, 15 bp, Homo sapiens
ggtcaccggccgagc

SEQ ID NO: 744830 - DNA, 15 bp, Homo sapiens
gtcaccggccgagcg

SEQ ID NO: 744831 - DNA, 15 bp, Homo sapiens
tcaccggccgagcgc

SEQ ID NO: 744832 - DNA, 15 bp, Homo sapiens
caccggccgagcgca

SEQ ID NO: 744833 - DNA, 15 bp, Homo sapiens
accggccgagcgcag

SEQ ID NO: 744834 - DNA, 15 bp, Homo sapiens
ccggccgagcgcagc

SEQ ID NO: 744835 - DNA, 15 bp, Homo sapiens
cggccgagcgcagcg

SEQ ID NO: 744836 - DNA, 15 bp, Homo sapiens
ggccgagcgcagcgc

SEQ ID NO: 744837 - DNA, 15 bp, Homo sapiens
gccgagcgcagcgca

SEQ ID NO: 744838 - DNA, 15 bp, Homo sapiens
ccgagcgcagcgcac

SEQ ID NO: 744839 - DNA, 15 bp, Homo sapiens
cgagcgcagcgcaca

SEQ ID NO: 744840 - DNA, 15 bp, Homo sapiens
gagcgcagcgcacac

SEQ ID NO: 744841 - DNA, 15 bp, Homo sapiens
agcgcagcgcacacc

SEQ ID NO: 744842 - DNA, 15 bp, Homo sapiens
gcgcagcgcacaccc

SEQ ID NO: 744843 - DNA, 15 bp, Homo sapiens
cgcagcgcacacccg

SEQ ID NO: 744844 - DNA, 15 bp, Homo sapiens
gcagcgcacacccgt

SEQ ID NO: 744845 - DNA, 15 bp, Homo sapiens
cagcgcacacccgtg

SEQ ID NO: 744846 - DNA, 15 bp, Homo sapiens
agcgcacacccgtgg

SEQ ID NO: 744847 - DNA, 15 bp, Homo sapiens
gcgcacacccgtggc

SEQ ID NO: 744848 - DNA, 15 bp, Homo sapiens
cgcacacccgtggcg

SEQ ID NO: 744849 - DNA, 15 bp, Homo sapiens
gcacacccgtggcgc

SEQ ID NO: 744850 - DNA, 15 bp, Homo sapiens
cacacccgtggcgca

SEQ ID NO: 744851 - DNA, 15 bp, Homo sapiens
acacccgtggcgcac

SEQ ID NO: 744852 - DNA, 15 bp, Homo sapiens
cacccgtggcgcacg

SEQ ID NO: 744853 - DNA, 15 bp, Homo sapiens
acccgtggcgcacgg

SEQ ID NO: 744854 - DNA, 15 bp, Homo sapiens
cccgtggcgcacggc

SEQ ID NO: 744855 - DNA, 15 bp, Homo sapiens
ccgtggcgcacggcg

SEQ ID NO: 744856 - DNA, 15 bp, Homo sapiens
cgtggcgcacggcgg

SEQ ID NO: 744857 - DNA, 15 bp, Homo sapiens
gtggcgcacggcggg

SEQ ID NO: 744858 - DNA, 15 bp, Homo sapiens
tggcgcacggcgggc

SEQ ID NO: 744859 - DNA, 15 bp, Homo sapiens
ggcgcacggcgggcg

SEQ ID NO: 744860 - DNA, 15 bp, Homo sapiens
gcgcacggcgggcgg

SEQ ID NO: 744861 - DNA, 15 bp, Homo sapiens
cgcacggcgggcggc

SEQ ID NO: 744862 - DNA, 15 bp, Homo sapiens
gcacggcgggcggcg

SEQ ID NO: 744863 - DNA, 15 bp, Homo sapiens
cacggcgggcggcgc

SEQ ID NO: 744864 - DNA, 15 bp, Homo sapiens
acggcgggcggcgcg

SEQ ID NO: 744865 - DNA, 15 bp, Homo sapiens
cggcgggcggcgcgg

SEQ ID NO: 744866 - DNA, 15 bp, Homo sapiens
ggcgggcggcgcggc

SEQ ID NO: 744867 - DNA, 15 bp, Homo sapiens
gcgggcggcgcggcg

SEQ ID NO: 744868 - DNA, 15 bp, Homo sapiens
cgggcggcgcggcgc

SEQ ID NO: 744869 - DNA, 15 bp, Homo sapiens
gggcggcgcggcgcc

SEQ ID NO: 744870 - DNA, 15 bp, Homo sapiens
ggcggcgcggcgccg

SEQ ID NO: 744871 - DNA, 15 bp, Homo sapiens
gcggcgcggcgccga

SEQ ID NO: 744872 - DNA, 15 bp, Homo sapiens
cggcgcggcgccgag

SEQ ID NO: 744873 - DNA, 15 bp, Homo sapiens
ggcgcggcgccgagg

SEQ ID NO: 744874 - DNA, 15 bp, Homo sapiens
gcgcggcgccgagga

SEQ ID NO: 744875 - DNA, 15 bp, Homo sapiens
cgcggcgccgaggac

SEQ ID NO: 744876 - DNA, 15 bp, Homo sapiens
gcggcgccgaggaca

SEQ ID NO: 744877 - DNA, 15 bp, Homo sapiens
cggcgccgaggacac

SEQ ID NO: 744878 - DNA, 15 bp, Homo sapiens
ggcgccgaggacacc

SEQ ID NO: 744879 - DNA, 15 bp, Homo sapiens
gcgccgaggacaccc

SEQ ID NO: 744880 - DNA, 15 bp, Homo sapiens
cgccgaggacacccg

SEQ ID NO: 744881 - DNA, 15 bp, Homo sapiens
gccgaggacacccgg

SEQ ID NO: 744882 - DNA, 15 bp, Homo sapiens
ccgaggacacccggg

SEQ ID NO: 744883 - DNA, 15 bp, Homo sapiens
cgaggacacccggga

SEQ ID NO: 744884 - DNA, 15 bp, Homo sapiens
gaggacacccgggac

SEQ ID NO: 744885 - DNA, 15 bp, Homo sapiens
aggacacccgggacc

SEQ ID NO: 744886 - DNA, 15 bp, Homo sapiens
ggacacccgggaccg

SEQ ID NO: 744887 - DNA, 15 bp, Homo sapiens
gacacccgggaccgc

SEQ ID NO: 744888 - DNA, 15 bp, Homo sapiens
acacccgggaccgcg

SEQ ID NO: 744889 - DNA, 15 bp, Homo sapiens
cacccgggaccgcgc

SEQ ID NO: 744890 - DNA, 15 bp, Homo sapiens
acccgggaccgcgcg

SEQ ID NO: 744891 - DNA, 15 bp, Homo sapiens
cccgggaccgcgcgc

SEQ ID NO: 744892 - DNA, 15 bp, Homo sapiens
ccgggaccgcgcgcg

SEQ ID NO: 744893 - DNA, 15 bp, Homo sapiens
cgggaccgcgcgcgg

SEQ ID NO: 744894 - DNA, 15 bp, Homo sapiens
gggaccgcgcgcgga

SEQ ID NO: 744895 - DNA, 15 bp, Homo sapiens
ggaccgcgcgcggag

SEQ ID NO: 744896 - DNA, 15 bp, Homo sapiens
gaccgcgcgcggagc

SEQ ID NO: 744897 - DNA, 15 bp, Homo sapiens
accgcgcgcggagcc

SEQ ID NO: 744898 - DNA, 15 bp, Homo sapiens
ccgcgcgcggagccg

SEQ ID NO: 744899 - DNA, 15 bp, Homo sapiens
cgcgcgcggagccgg

SEQ ID NO: 744900 - DNA, 15 bp, Homo sapiens
gcgcgcggagccggg

SEQ ID NO: 744901 - DNA, 15 bp, Homo sapiens
cgcgcggagccgggg

SEQ ID NO: 744902 - DNA, 15 bp, Homo sapiens
gcgcggagccggggc

SEQ ID NO: 744903 - DNA, 15 bp, Homo sapiens
cgcggagccggggcg

SEQ ID NO: 744904 - DNA, 15 bp, Homo sapiens
gcggagccggggcgg

SEQ ID NO: 744905 - DNA, 15 bp, Homo sapiens
cggagccggggcggg

SEQ ID NO: 744906 - DNA, 15 bp, Homo sapiens
ggagccggggcgggc

SEQ ID NO: 744907 - DNA, 15 bp, Homo sapiens
gagccggggcgggcc

SEQ ID NO: 744908 - DNA, 15 bp, Homo sapiens
agccggggcgggccc

SEQ ID NO: 744909 - DNA, 15 bp, Homo sapiens
gccggggcgggcccg

SEQ ID NO: 744910 - DNA, 15 bp, Homo sapiens
ccggggcgggcccgg

SEQ ID NO: 744911 - DNA, 15 bp, Homo sapiens
cggggcgggcccggg

SEQ ID NO: 744912 - DNA, 15 bp, Homo sapiens
ggggcgggcccgggg

SEQ ID NO: 744913 - DNA, 15 bp, Homo sapiens
gggcgggcccggggg

SEQ ID NO: 744914 - DNA, 15 bp, Homo sapiens
ggcgggcccgggggc

SEQ ID NO: 744915 - DNA, 15 bp, Homo sapiens
gcgggcccgggggcg

SEQ ID NO: 744916 - DNA, 15 bp, Homo sapiens
cgggcccgggggcgg

SEQ ID NO: 744917 - DNA, 15 bp, Homo sapiens
gggcccgggggcggc

SEQ ID NO: 744918 - DNA, 15 bp, Homo sapiens
ggcccgggggcggcg

SEQ ID NO: 744919 - DNA, 15 bp, Homo sapiens
gcccgggggcggcgc

SEQ ID NO: 744920 - DNA, 15 bp, Homo sapiens
cccgggggcggcgca

SEQ ID NO: 744921 - DNA, 15 bp, Homo sapiens
ccgggggcggcgcag

SEQ ID NO: 744922 - DNA, 15 bp, Homo sapiens
cgggggcggcgcaga

SEQ ID NO: 744923 - DNA, 15 bp, Homo sapiens
gggggcggcgcagac

SEQ ID NO: 744924 - DNA, 15 bp, Homo sapiens
ggggcggcgcagacc

SEQ ID NO: 744925 - DNA, 15 bp, Homo sapiens
gggcggcgcagaccc

SEQ ID NO: 744926 - DNA, 15 bp, Homo sapiens
ggcggcgcagacccc

SEQ ID NO: 744927 - DNA, 15 bp, Homo sapiens
gcggcgcagaccccg

SEQ ID NO: 744928 - DNA, 15 bp, Homo sapiens
cggcgcagaccccgg

SEQ ID NO: 744929 - DNA, 15 bp, Homo sapiens
ggcgcagaccccggg

SEQ ID NO: 744930 - DNA, 15 bp, Homo sapiens
gcgcagaccccgggc

SEQ ID NO: 744931 - DNA, 15 bp, Homo sapiens
cgcagaccccgggcg

SEQ ID NO: 744932 - DNA, 15 bp, Homo sapiens
gcagaccccgggcgc

SEQ ID NO: 744933 - DNA, 15 bp, Homo sapiens
cagaccccgggcgcg

SEQ ID NO: 744934 - DNA, 15 bp, Homo sapiens
agaccccgggcgcgg

SEQ ID NO: 744935 - DNA, 15 bp, Homo sapiens
gaccccgggcgcggg

SEQ ID NO: 744936 - DNA, 15 bp, Homo sapiens
accccgggcgcgggc

SEQ ID NO: 744937 - DNA, 15 bp, Homo sapiens
ccccgggcgcgggcg

SEQ ID NO: 744938 - DNA, 15 bp, Homo sapiens
cccgggcgcgggcgg

SEQ ID NO: 744939 - DNA, 15 bp, Homo sapiens
ccgggcgcgggcggc

SEQ ID NO: 744940 - DNA, 15 bp, Homo sapiens
cgggcgcgggcggcc

SEQ ID NO: 744941 - DNA, 15 bp, Homo sapiens
gggcgcgggcggccc

SEQ ID NO: 744942 - DNA, 15 bp, Homo sapiens
ggcgcgggcggcccg

SEQ ID NO: 744943 - DNA, 15 bp, Homo sapiens
gcgcgggcggcccgc

SEQ ID NO: 744944 - DNA, 15 bp, Homo sapiens
cgcgggcggcccgcg

SEQ ID NO: 744945 - DNA, 15 bp, Homo sapiens
gcgggcggcccgcgg

SEQ ID NO: 744946 - DNA, 15 bp, Homo sapiens
cgggcggcccgcggc

SEQ ID NO: 744947 - DNA, 15 bp, Homo sapiens
gggcggcccgcggcg

SEQ ID NO: 744948 - DNA, 15 bp, Homo sapiens
ggcggcccgcggcgc

SEQ ID NO: 744949 - DNA, 15 bp, Homo sapiens
gcggcccgcggcgcc

SEQ ID NO: 744950 - DNA, 15 bp, Homo sapiens
cggcccgcggcgccc

SEQ ID NO: 744951 - DNA, 15 bp, Homo sapiens
ggcccgcggcgcccc

SEQ ID NO: 744952 - DNA, 15 bp, Homo sapiens
gcccgcggcgccccc

SEQ ID NO: 744953 - DNA, 15 bp, Homo sapiens
cccgcggcgccccct

SEQ ID NO: 744954 - DNA, 15 bp, Homo sapiens
ccgcggcgccccctg

SEQ ID NO: 744955 - DNA, 15 bp, Homo sapiens
cgcggcgccccctgg

SEQ ID NO: 744956 - DNA, 15 bp, Homo sapiens
gcggcgccccctggc

SEQ ID NO: 744957 - DNA, 15 bp, Homo sapiens
cggcgccccctggct

SEQ ID NO: 744958 - DNA, 15 bp, Homo sapiens
ggcgccccctggctc

SEQ ID NO: 744959 - DNA, 15 bp, Homo sapiens
gcgccccctggctct

SEQ ID NO: 744960 - DNA, 15 bp, Homo sapiens
cgccccctggctctc

SEQ ID NO: 744961 - DNA, 15 bp, Homo sapiens
gccccctggctctcg

SEQ ID NO: 744962 - DNA, 15 bp, Homo sapiens
ccccctggctctcgg

SEQ ID NO: 744963 - DNA, 15 bp, Homo sapiens
cccctggctctcggc

SEQ ID NO: 744964 - DNA, 15 bp, Homo sapiens
ccctggctctcggcg

SEQ ID NO: 744965 - DNA, 15 bp, Homo sapiens
cctggctctcggcgc

SEQ ID NO: 744966 - DNA, 15 bp, Homo sapiens
ctggctctcggcgct

SEQ ID NO: 744967 - DNA, 15 bp, Homo sapiens
tggctctcggcgctc

SEQ ID NO: 744968 - DNA, 15 bp, Homo sapiens
ggctctcggcgctcg

SEQ ID NO: 744969 - DNA, 15 bp, Homo sapiens
gctctcggcgctcgg

SEQ ID NO: 744970 - DNA, 15 bp, Homo sapiens
ctctcggcgctcggg

SEQ ID NO: 744971 - DNA, 15 bp, Homo sapiens
tctcggcgctcgggg

SEQ ID NO: 744972 - DNA, 15 bp, Homo sapiens
ctcggcgctcggggc

SEQ ID NO: 744973 - DNA, 15 bp, Homo sapiens
tcggcgctcggggcc

SEQ ID NO: 744974 - DNA, 15 bp, Homo sapiens
cggcgctcggggcca

SEQ ID NO: 744975 - DNA, 15 bp, Homo sapiens
ggcgctcggggccag

SEQ ID NO: 744976 - DNA, 15 bp, Homo sapiens
gcgctcggggccagc

SEQ ID NO: 744977 - DNA, 15 bp, Homo sapiens
cgctcggggccagcg

SEQ ID NO: 744978 - DNA, 15 bp, Homo sapiens
gctcggggccagcgc

SEQ ID NO: 744979 - DNA, 15 bp, Homo sapiens
ctcggggccagcgca

SEQ ID NO: 744980 - DNA, 15 bp, Homo sapiens
tcggggccagcgcag

SEQ ID NO: 744981 - DNA, 15 bp, Homo sapiens
cggggccagcgcagc

SEQ ID NO: 744982 - DNA, 15 bp, Homo sapiens
ggggccagcgcagcc

SEQ ID NO: 744983 - DNA, 15 bp, Homo sapiens
gggccagcgcagccc

SEQ ID NO: 744984 - DNA, 15 bp, Homo sapiens
ggccagcgcagcccg

SEQ ID NO: 744985 - DNA, 15 bp, Homo sapiens
gccagcgcagcccgg

SEQ ID NO: 744986 - DNA, 15 bp, Homo sapiens
ccagcgcagcccggg

SEQ ID NO: 744987 - DNA, 15 bp, Homo sapiens
cagcgcagcccgggg

SEQ ID NO: 744988 - DNA, 15 bp, Homo sapiens
agcgcagcccggggc

SEQ ID NO: 744989 - DNA, 15 bp, Homo sapiens
gcgcagcccggggcg

SEQ ID NO: 744990 - DNA, 15 bp, Homo sapiens
cgcagcccggggcga

SEQ ID NO: 744991 - DNA, 15 bp, Homo sapiens
gcagcccggggcgag

SEQ ID NO: 744992 - DNA, 15 bp, Homo sapiens
cagcccggggcgagc

SEQ ID NO: 744993 - DNA, 15 bp, Homo sapiens
agcccggggcgagcg

SEQ ID NO: 744994 - DNA, 15 bp, Homo sapiens
gcccggggcgagcgg

SEQ ID NO: 744995 - DNA, 15 bp, Homo sapiens
cccggggcgagcggg

SEQ ID NO: 744996 - DNA, 15 bp, Homo sapiens
ccggggcgagcgggg

SEQ ID NO: 744997 - DNA, 15 bp, Homo sapiens
cggggcgagcggggc

SEQ ID NO: 744998 - DNA, 15 bp, Homo sapiens
ggggcgagcggggcg

SEQ ID NO: 744999 - DNA, 15 bp, Homo sapiens
gggcgagcggggcgc

SEQ ID NO: 745000 - DNA, 15 bp, Homo sapiens
ggcgagcggggcgcg

SEQ ID NO: 745001 - DNA, 15 bp, Homo sapiens
gcgagcggggcgcgg

SEQ ID NO: 745002 - DNA, 15 bp, Homo sapiens
cgagcggggcgcggg

SEQ ID NO: 745003 - DNA, 15 bp, Homo sapiens
gagcggggcgcgggc

SEQ ID NO: 745004 - DNA, 15 bp, Homo sapiens
agcggggcgcgggcc

SEQ ID NO: 745005 - DNA, 15 bp, Homo sapiens
gcggggcgcgggccg

SEQ ID NO: 745006 - DNA, 15 bp, Homo sapiens
cggggcgcgggccgg

SEQ ID NO: 745007 - DNA, 15 bp, Homo sapiens
ggggcgcgggccggg

SEQ ID NO: 745008 - DNA, 15 bp, Homo sapiens
gggcgcgggccgggg

SEQ ID NO: 745009 - DNA, 15 bp, Homo sapiens
ggcgcgggccgggga

SEQ ID NO: 745010 - DNA, 15 bp, Homo sapiens
gcgcgggccggggag

SEQ ID NO: 745011 - DNA, 15 bp, Homo sapiens
cgcgggccggggagg

SEQ ID NO: 745012 - DNA, 15 bp, Homo sapiens
gcgggccggggaggg

SEQ ID NO: 745013 - DNA, 15 bp, Homo sapiens
cgggccggggagggg

SEQ ID NO: 745014 - DNA, 15 bp, Homo sapiens
gggccggggaggggg

SEQ ID NO: 745015 - DNA, 15 bp, Homo sapiens
ggccggggaggggga

SEQ ID NO: 745016 - DNA, 15 bp, Homo sapiens
gccggggagggggag

SEQ ID NO: 745017 - DNA, 15 bp, Homo sapiens
ccggggagggggagc

SEQ ID NO: 745018 - DNA, 15 bp, Homo sapiens
cggggagggggagct

SEQ ID NO: 745019 - DNA, 15 bp, Homo sapiens
ggggagggggagctg

SEQ ID NO: 745020 - DNA, 15 bp, Homo sapiens
gggagggggagctgc

SEQ ID NO: 745021 - DNA, 15 bp, Homo sapiens
ggagggggagctgcc

SEQ ID NO: 745022 - DNA, 15 bp, Homo sapiens
gagggggagctgccc

SEQ ID NO: 745023 - DNA, 15 bp, Homo sapiens
agggggagctgcccg

SEQ ID NO: 745024 - DNA, 15 bp, Homo sapiens
gggggagctgcccgc

SEQ ID NO: 745025 - DNA, 15 bp, Homo sapiens
ggggagctgcccgcg

SEQ ID NO: 745026 - DNA, 15 bp, Homo sapiens
gggagctgcccgcgc

SEQ ID NO: 745027 - DNA, 15 bp, Homo sapiens
ggagctgcccgcgca

SEQ ID NO: 745028 - DNA, 15 bp, Homo sapiens
gagctgcccgcgcac

SEQ ID NO: 745029 - DNA, 15 bp, Homo sapiens
agctgcccgcgcact

SEQ ID NO: 745030 - DNA, 15 bp, Homo sapiens
gctgcccgcgcactc

SEQ ID NO: 745031 - DNA, 15 bp, Homo sapiens
ctgcccgcgcactcc

SEQ ID NO: 745032 - DNA, 15 bp, Homo sapiens
tgcccgcgcactcca

SEQ ID NO: 745033 - DNA, 15 bp, Homo sapiens
gcccgcgcactccat

SEQ ID NO: 745034 - DNA, 15 bp, Homo sapiens
cccgcgcactccatc

SEQ ID NO: 745035 - DNA, 15 bp, Homo sapiens
ccgcgcactccatcc

SEQ ID NO: 745036 - DNA, 15 bp, Homo sapiens
cgcgcactccatccc

SEQ ID NO: 745037 - DNA, 15 bp, Homo sapiens
gcgcactccatcccc

SEQ ID NO: 745038 - DNA, 15 bp, Homo sapiens
cgcactccatccccc

SEQ ID NO: 745039 - DNA, 15 bp, Homo sapiens
gcactccatccccct

SEQ ID NO: 745040 - DNA, 15 bp, Homo sapiens
cactccatccccctc

SEQ ID NO: 745041 - DNA, 15 bp, Homo sapiens
actccatccccctcc

SEQ ID NO: 745042 - DNA, 15 bp, Homo sapiens
ctccatccccctccc

SEQ ID NO: 745043 - DNA, 15 bp, Homo sapiens
tccatccccctcccc

SEQ ID NO: 745044 - DNA, 15 bp, Homo sapiens
ccatccccctccccc

SEQ ID NO: 745045 - DNA, 15 bp, Homo sapiens
catccccctcccccc

SEQ ID NO: 745046 - DNA, 15 bp, Homo sapiens
atccccctccccccc

SEQ ID NO: 745047 - DNA, 15 bp, Homo sapiens
tccccctcccccccg

SEQ ID NO: 745048 - DNA, 15 bp, Homo sapiens
ccccctcccccccgg

SEQ ID NO: 745049 - DNA, 15 bp, Homo sapiens
cccctcccccccggg

SEQ ID NO: 745050 - DNA, 15 bp, Homo sapiens
ccctcccccccgggc

SEQ ID NO: 745051 - DNA, 15 bp, Homo sapiens
cctcccccccgggcg

SEQ ID NO: 745052 - DNA, 15 bp, Homo sapiens
ctcccccccgggcgg

SEQ ID NO: 745053 - DNA, 15 bp, Homo sapiens
tcccccccgggcggg

SEQ ID NO: 745054 - DNA, 15 bp, Homo sapiens
cccccccgggcgggc

SEQ ID NO: 745055 - DNA, 15 bp, Homo sapiens
ccccccgggcgggcg

SEQ ID NO: 745056 - DNA, 15 bp, Homo sapiens
cccccgggcgggcgg

SEQ ID NO: 745057 - DNA, 15 bp, Homo sapiens
ccccgggcgggcggc

SEQ ID NO: 745058 - DNA, 15 bp, Homo sapiens
cccgggcgggcggcg

SEQ ID NO: 745059 - DNA, 15 bp, Homo sapiens
ccgggcgggcggcgg

SEQ ID NO: 745060 - DNA, 15 bp, Homo sapiens
cgggcgggcggcggc

SEQ ID NO: 745061 - DNA, 15 bp, Homo sapiens
gggcgggcggcggcg

SEQ ID NO: 745062 - DNA, 15 bp, Homo sapiens
ggcgggcggcggcgg

SEQ ID NO: 745063 - DNA, 15 bp, Homo sapiens
gcgggcggcggcggc

SEQ ID NO: 745064 - DNA, 15 bp, Homo sapiens
cgggcggcggcggct

SEQ ID NO: 745065 - DNA, 15 bp, Homo sapiens
gggcggcggcggctc

SEQ ID NO: 745066 - DNA, 15 bp, Homo sapiens
ggcggcggcggctcg

SEQ ID NO: 745067 - DNA, 15 bp, Homo sapiens
gcggcggcggctcgc

SEQ ID NO: 745068 - DNA, 15 bp, Homo sapiens
cggcggcggctcgct

SEQ ID NO: 745069 - DNA, 15 bp, Homo sapiens
ggcggcggctcgctg

SEQ ID NO: 745070 - DNA, 15 bp, Homo sapiens
gcggcggctcgctgt

SEQ ID NO: 745071 - DNA, 15 bp, Homo sapiens
cggcggctcgctgta

SEQ ID NO: 745072 - DNA, 15 bp, Homo sapiens
ggcggctcgctgtat

SEQ ID NO: 745073 - DNA, 15 bp, Homo sapiens
gcggctcgctgtata

SEQ ID NO: 745074 - DNA, 15 bp, Homo sapiens
cggctcgctgtatat

SEQ ID NO: 745075 - DNA, 15 bp, Homo sapiens
ggctcgctgtatata

SEQ ID NO: 745076 - DNA, 15 bp, Homo sapiens
gctcgctgtatatat

SEQ ID NO: 745077 - DNA, 15 bp, Homo sapiens
ctcgctgtatatatc

SEQ ID NO: 745078 - DNA, 15 bp, Homo sapiens
tcgctgtatatatct

SEQ ID NO: 745079 - DNA, 15 bp, Homo sapiens
cgctgtatatatctc

SEQ ID NO: 745080 - DNA, 15 bp, Homo sapiens
gctgtatatatctcg

SEQ ID NO: 745081 - DNA, 15 bp, Homo sapiens
ctgtatatatctcgg

SEQ ID NO: 745082 - DNA, 15 bp, Homo sapiens
tgtatatatctcggc

SEQ ID NO: 745083 - DNA, 15 bp, Homo sapiens
gtatatatctcggcg

SEQ ID NO: 745084 - DNA, 15 bp, Homo sapiens
tatatatctcggcgc

SEQ ID NO: 745085 - DNA, 15 bp, Homo sapiens
atatatctcggcgca

SEQ ID NO: 745086 - DNA, 15 bp, Homo sapiens
tatatctcggcgcac

SEQ ID NO: 745087 - DNA, 15 bp, Homo sapiens
atatctcggcgcacc

SEQ ID NO: 745088 - DNA, 15 bp, Homo sapiens
tatctcggcgcaccc

SEQ ID NO: 745089 - DNA, 15 bp, Homo sapiens
atctcggcgcacccc

SEQ ID NO: 745090 - DNA, 15 bp, Homo sapiens
tctcggcgcaccccg

SEQ ID NO: 745091 - DNA, 15 bp, Homo sapiens
ctcggcgcaccccgc

SEQ ID NO: 745092 - DNA, 15 bp, Homo sapiens
tcggcgcaccccgcc

SEQ ID NO: 745093 - DNA, 15 bp, Homo sapiens
cggcgcaccccgcca

SEQ ID NO: 745094 - DNA, 15 bp, Homo sapiens
ggcgcaccccgccag

SEQ ID NO: 745095 - DNA, 15 bp, Homo sapiens
gcgcaccccgccagg

SEQ ID NO: 745096 - DNA, 15 bp, Homo sapiens
cgcaccccgccaggt

SEQ ID NO: 745097 - DNA, 15 bp, Homo sapiens
gcaccccgccaggtc

SEQ ID NO: 745098 - DNA, 15 bp, Homo sapiens
caccccgccaggtcg

SEQ ID NO: 745099 - DNA, 15 bp, Homo sapiens
accccgccaggtcgc

SEQ ID NO: 745100 - DNA, 15 bp, Homo sapiens
ccccgccaggtcgcg

SEQ ID NO: 745101 - DNA, 15 bp, Homo sapiens
cccgccaggtcgcgc

SEQ ID NO: 745102 - DNA, 15 bp, Homo sapiens
ccgccaggtcgcgca

SEQ ID NO: 745103 - DNA, 15 bp, Homo sapiens
cgccaggtcgcgcac

SEQ ID NO: 745104 - DNA, 15 bp, Homo sapiens
gccaggtcgcgcaca

SEQ ID NO: 745105 - DNA, 15 bp, Homo sapiens
ccaggtcgcgcacag

SEQ ID NO: 745106 - DNA, 15 bp, Homo sapiens
caggtcgcgcacagc

SEQ ID NO: 745107 - DNA, 15 bp, Homo sapiens
aggtcgcgcacagcg

SEQ ID NO: 745108 - DNA, 15 bp, Homo sapiens
ggtcgcgcacagcgc

SEQ ID NO: 745109 - DNA, 15 bp, Homo sapiens
gtcgcgcacagcgcc

SEQ ID NO: 745110 - DNA, 15 bp, Homo sapiens
tcgcgcacagcgccc

SEQ ID NO: 745111 - DNA, 15 bp, Homo sapiens
cgcgcacagcgcccc

SEQ ID NO: 745112 - DNA, 15 bp, Homo sapiens
gcgcacagcgccccg

SEQ ID NO: 745113 - DNA, 15 bp, Homo sapiens
cgcacagcgccccga

SEQ ID NO: 745114 - DNA, 15 bp, Homo sapiens
gcacagcgccccgag

SEQ ID NO: 745115 - DNA, 15 bp, Homo sapiens
cacagcgccccgagc

SEQ ID NO: 745116 - DNA, 15 bp, Homo sapiens
acagcgccccgagcc

SEQ ID NO: 745117 - DNA, 15 bp, Homo sapiens
cagcgccccgagccc

SEQ ID NO: 745118 - DNA, 15 bp, Homo sapiens
agcgccccgagccca

SEQ ID NO: 745119 - DNA, 15 bp, Homo sapiens
gcgccccgagcccag

SEQ ID NO: 745120 - DNA, 15 bp, Homo sapiens
cgccccgagcccagg

SEQ ID NO: 745121 - DNA, 15 bp, Homo sapiens
gccccgagcccaggc

SEQ ID NO: 745122 - DNA, 15 bp, Homo sapiens
ccccgagcccaggcg

SEQ ID NO: 745123 - DNA, 15 bp, Homo sapiens
cccgagcccaggcgc

SEQ ID NO: 745124 - DNA, 15 bp, Homo sapiens
ccgagcccaggcgcc

SEQ ID NO: 745125 - DNA, 15 bp, Homo sapiens
cgagcccaggcgcct

SEQ ID NO: 745126 - DNA, 15 bp, Homo sapiens
gagcccaggcgcctc

SEQ ID NO: 745127 - DNA, 15 bp, Homo sapiens
agcccaggcgcctcc

SEQ ID NO: 745128 - DNA, 15 bp, Homo sapiens
gcccaggcgcctccc

SEQ ID NO: 745129 - DNA, 15 bp, Homo sapiens
cccaggcgcctcccc

SEQ ID NO: 745130 - DNA, 15 bp, Homo sapiens
ccaggcgcctccccg

SEQ ID NO: 745131 - DNA, 15 bp, Homo sapiens
caggcgcctccccgc

SEQ ID NO: 745132 - DNA, 15 bp, Homo sapiens
aggcgcctccccgcc

SEQ ID NO: 745133 - DNA, 15 bp, Homo sapiens
ggcgcctccccgccc

SEQ ID NO: 745134 - DNA, 15 bp, Homo sapiens
gcgcctccccgcccc

SEQ ID NO: 745135 - DNA, 15 bp, Homo sapiens
cgcctccccgccccc

SEQ ID NO: 745136 - DNA, 15 bp, Homo sapiens
gcctccccgcccccc

SEQ ID NO: 745137 - DNA, 15 bp, Homo sapiens
cctccccgcccccct

SEQ ID NO: 745138 - DNA, 15 bp, Homo sapiens
ctccccgcccccctc

SEQ ID NO: 745139 - DNA, 15 bp, Homo sapiens
tccccgcccccctcc

SEQ ID NO: 745140 - DNA, 15 bp, Homo sapiens
ccccgcccccctccc

SEQ ID NO: 745141 - DNA, 15 bp, Homo sapiens
cccgcccccctcccg

SEQ ID NO: 745142 - DNA, 15 bp, Homo sapiens
ccgcccccctcccgc

SEQ ID NO: 745143 - DNA, 15 bp, Homo sapiens
cgcccccctcccgcg

SEQ ID NO: 745144 - DNA, 15 bp, Homo sapiens
gcccccctcccgcgc

SEQ ID NO: 745145 - DNA, 15 bp, Homo sapiens
cccccctcccgcgct

SEQ ID NO: 745146 - DNA, 15 bp, Homo sapiens
ccccctcccgcgctc

SEQ ID NO: 745147 - DNA, 15 bp, Homo sapiens
cccctcccgcgctcc

SEQ ID NO: 745148 - DNA, 15 bp, Homo sapiens
ccctcccgcgctccg

SEQ ID NO: 745149 - DNA, 15 bp, Homo sapiens
cctcccgcgctccgc

SEQ ID NO: 745150 - DNA, 15 bp, Homo sapiens
ctcccgcgctccgcg

SEQ ID NO: 745151 - DNA, 15 bp, Homo sapiens
tcccgcgctccgcgg

SEQ ID NO: 745152 - DNA, 15 bp, Homo sapiens
cccgcgctccgcggc

SEQ ID NO: 745153 - DNA, 15 bp, Homo sapiens
ccgcgctccgcggcg

SEQ ID NO: 745154 - DNA, 15 bp, Homo sapiens
cgcgctccgcggcgg

SEQ ID NO: 745155 - DNA, 15 bp, Homo sapiens
gcgctccgcggcggc

SEQ ID NO: 745156 - DNA, 15 bp, Homo sapiens
cgctccgcggcggcg

SEQ ID NO: 745157 - DNA, 15 bp, Homo sapiens
gctccgcggcggcgg

SEQ ID NO: 745158 - DNA, 15 bp, Homo sapiens
ctccgcggcggcggc

SEQ ID NO: 745159 - DNA, 15 bp, Homo sapiens
tccgcggcggcggcg

SEQ ID NO: 745160 - DNA, 15 bp, Homo sapiens
ccgcggcggcggcgg

SEQ ID NO: 745161 - DNA, 15 bp, Homo sapiens
cgcggcggcggcggc

SEQ ID NO: 745162 - DNA, 15 bp, Homo sapiens
gcggcggcggcggcg

SEQ ID NO: 745163 - DNA, 15 bp, Homo sapiens
cggcggcggcggcgg

SEQ ID NO: 745164 - DNA, 15 bp, Homo sapiens
ggcggcggcggcggc

SEQ ID NO: 745165 - DNA, 15 bp, Homo sapiens
gcggcggcggcggca

SEQ ID NO: 745166 - DNA, 15 bp, Homo sapiens
cggcggcggcggcag

SEQ ID NO: 745167 - DNA, 15 bp, Homo sapiens
ggcggcggcggcagc

SEQ ID NO: 745168 - DNA, 15 bp, Homo sapiens
gcggcggcggcagca

SEQ ID NO: 745169 - DNA, 15 bp, Homo sapiens
cggcggcggcagcag

SEQ ID NO: 745170 - DNA, 15 bp, Homo sapiens
ggcggcggcagcagt

SEQ ID NO: 745171 - DNA, 15 bp, Homo sapiens
gcggcggcagcagta

SEQ ID NO: 745172 - DNA, 15 bp, Homo sapiens
cggcggcagcagtag

SEQ ID NO: 745173 - DNA, 15 bp, Homo sapiens
ggcggcagcagtagc

SEQ ID NO: 745174 - DNA, 15 bp, Homo sapiens
gcggcagcagtagca

SEQ ID NO: 745175 - DNA, 15 bp, Homo sapiens
cggcagcagtagcag

SEQ ID NO: 745176 - DNA, 15 bp, Homo sapiens
ggcagcagtagcagc

SEQ ID NO: 745177 - DNA, 15 bp, Homo sapiens
gcagcagtagcagca

SEQ ID NO: 745178 - DNA, 15 bp, Homo sapiens
cagcagtagcagcaa

SEQ ID NO: 745179 - DNA, 15 bp, Homo sapiens
agcagtagcagcaat

SEQ ID NO: 745180 - DNA, 15 bp, Homo sapiens
gcagtagcagcaata

SEQ ID NO: 745181 - DNA, 15 bp, Homo sapiens
cagtagcagcaatat

SEQ ID NO: 745182 - DNA, 15 bp, Homo sapiens
agtagcagcaatatg

SEQ ID NO: 745183 - DNA, 15 bp, Homo sapiens
gtagcagcaatatgg

SEQ ID NO: 745184 - DNA, 15 bp, Homo sapiens
tagcagcaatatggc

SEQ ID NO: 745185 - DNA, 15 bp, Homo sapiens
agcagcaatatggct

SEQ ID NO: 745186 - DNA, 15 bp, Homo sapiens
gcagcaatatggctg

SEQ ID NO: 745187 - DNA, 15 bp, Homo sapiens
cagcaatatggctgt

SEQ ID NO: 745188 - DNA, 15 bp, Homo sapiens
agcaatatggctgtt

SEQ ID NO: 745189 - DNA, 15 bp, Homo sapiens
gcaatatggctgttg

SEQ ID NO: 745190 - DNA, 15 bp, Homo sapiens
caatatggctgttga

SEQ ID NO: 745191 - DNA, 15 bp, Homo sapiens
aatatggctgttgat

SEQ ID NO: 745192 - DNA, 15 bp, Homo sapiens
atatggctgttgatg

SEQ ID NO: 745193 - DNA, 15 bp, Homo sapiens
tatggctgttgatgg

SEQ ID NO: 745194 - DNA, 15 bp, Homo sapiens
atggctgttgatggg

SEQ ID NO: 745195 - DNA, 15 bp, Homo sapiens
tggctgttgatgggt

SEQ ID NO: 745196 - DNA, 15 bp, Homo sapiens
ggctgttgatgggtg

SEQ ID NO: 745197 - DNA, 15 bp, Homo sapiens
gctgttgatgggtgt

SEQ ID NO: 745198 - DNA, 15 bp, Homo sapiens
ctgttgatgggtgtt

SEQ ID NO: 745199 - DNA, 15 bp, Homo sapiens
tgttgatgggtgttt

SEQ ID NO: 745200 - DNA, 15 bp, Homo sapiens
gttgatgggtgtttg

SEQ ID NO: 745201 - DNA, 15 bp, Homo sapiens
ttgatgggtgtttgg

SEQ ID NO: 745202 - DNA, 15 bp, Homo sapiens
tgatgggtgtttggg

SEQ ID NO: 745203 - DNA, 15 bp, Homo sapiens
gatgggtgtttgggg

SEQ ID NO: 745204 - DNA, 15 bp, Homo sapiens
atgggtgtttggggt

SEQ ID NO: 745205 - DNA, 15 bp, Homo sapiens
tgggtgtttggggtg

SEQ ID NO: 745206 - DNA, 15 bp, Homo sapiens
gggtgtttggggtgg

SEQ ID NO: 745207 - DNA, 15 bp, Homo sapiens
ggtgtttggggtggc

SEQ ID NO: 745208 - DNA, 15 bp, Homo sapiens
gtgtttggggtggcg

SEQ ID NO: 745209 - DNA, 15 bp, Homo sapiens
tgtttggggtggcgc

SEQ ID NO: 745210 - DNA, 15 bp, Homo sapiens
gtttggggtggcgct

SEQ ID NO: 745211 - DNA, 15 bp, Homo sapiens
tttggggtggcgctg

SEQ ID NO: 745212 - DNA, 15 bp, Homo sapiens
ttggggtggcgctgg

SEQ ID NO: 745213 - DNA, 15 bp, Homo sapiens
tggggtggcgctggc

SEQ ID NO: 745214 - DNA, 15 bp, Homo sapiens
ggggtggcgctggcg

SEQ ID NO: 745215 - DNA, 15 bp, Homo sapiens
gggtggcgctggcgg

SEQ ID NO: 745216 - DNA, 15 bp, Homo sapiens
ggtggcgctggcggc

SEQ ID NO: 745217 - DNA, 15 bp, Homo sapiens
gtggcgctggcggcg

SEQ ID NO: 745218 - DNA, 15 bp, Homo sapiens
tggcgctggcggcgg

SEQ ID NO: 745219 - DNA, 15 bp, Homo sapiens
ggcgctggcggcggg

SEQ ID NO: 745220 - DNA, 15 bp, Homo sapiens
gcgctggcggcggga

SEQ ID NO: 745221 - DNA, 15 bp, Homo sapiens
cgctggcggcgggag

SEQ ID NO: 745222 - DNA, 15 bp, Homo sapiens
gctggcggcgggagg

SEQ ID NO: 745223 - DNA, 15 bp, Homo sapiens
ctggcggcgggagga

SEQ ID NO: 745224 - DNA, 15 bp, Homo sapiens
tggcggcgggaggag

SEQ ID NO: 745225 - DNA, 15 bp, Homo sapiens
ggcggcgggaggagc

SEQ ID NO: 745226 - DNA, 15 bp, Homo sapiens
gcggcgggaggagct

SEQ ID NO: 745227 - DNA, 15 bp, Homo sapiens
cggcgggaggagctc

SEQ ID NO: 745228 - DNA, 15 bp, Homo sapiens
ggcgggaggagctcc

SEQ ID NO: 745229 - DNA, 15 bp, Homo sapiens
gcgggaggagctccc

SEQ ID NO: 745230 - DNA, 15 bp, Homo sapiens
cgggaggagctcccc

SEQ ID NO: 745231 - DNA, 15 bp, Homo sapiens
gggaggagctccccc

SEQ ID NO: 745232 - DNA, 15 bp, Homo sapiens
ggaggagctcccccg

SEQ ID NO: 745233 - DNA, 15 bp, Homo sapiens
gaggagctcccccga

SEQ ID NO: 745234 - DNA, 15 bp, Homo sapiens
aggagctcccccgag

SEQ ID NO: 745235 - DNA, 15 bp, Homo sapiens
ggagctcccccgagc

SEQ ID NO: 745236 - DNA, 15 bp, Homo sapiens
gagctcccccgagcc

SEQ ID NO: 745237 - DNA, 15 bp, Homo sapiens
agctcccccgagccc

SEQ ID NO: 745238 - DNA, 15 bp, Homo sapiens
gctcccccgagcccc

SEQ ID NO: 745239 - DNA, 15 bp, Homo sapiens
ctcccccgagcccct

SEQ ID NO: 745240 - DNA, 15 bp, Homo sapiens
tcccccgagcccctg

SEQ ID NO: 745241 - DNA, 15 bp, Homo sapiens
cccccgagcccctgc

SEQ ID NO: 745242 - DNA, 15 bp, Homo sapiens
ccccgagcccctgcg

SEQ ID NO: 745243 - DNA, 15 bp, Homo sapiens
cccgagcccctgcgc

SEQ ID NO: 745244 - DNA, 15 bp, Homo sapiens
ccgagcccctgcgcc

SEQ ID NO: 745245 - DNA, 15 bp, Homo sapiens
cgagcccctgcgccg

SEQ ID NO: 745246 - DNA, 15 bp, Homo sapiens
gagcccctgcgccgg

SEQ ID NO: 745247 - DNA, 15 bp, Homo sapiens
agcccctgcgccggc

SEQ ID NO: 745248 - DNA, 15 bp, Homo sapiens
gcccctgcgccggct

SEQ ID NO: 745249 - DNA, 15 bp, Homo sapiens
cccctgcgccggctg

SEQ ID NO: 745250 - DNA, 15 bp, Homo sapiens
ccctgcgccggctgc

SEQ ID NO: 745251 - DNA, 15 bp, Homo sapiens
cctgcgccggctgcc

SEQ ID NO: 745252 - DNA, 15 bp, Homo sapiens
ctgcgccggctgccc

SEQ ID NO: 745253 - DNA, 15 bp, Homo sapiens
tgcgccggctgcccg

SEQ ID NO: 745254 - DNA, 15 bp, Homo sapiens
gcgccggctgcccgt

SEQ ID NO: 745255 - DNA, 15 bp, Homo sapiens
cgccggctgcccgtt

SEQ ID NO: 745256 - DNA, 15 bp, Homo sapiens
gccggctgcccgttg

SEQ ID NO: 745257 - DNA, 15 bp, Homo sapiens
ccggctgcccgttgc

SEQ ID NO: 745258 - DNA, 15 bp, Homo sapiens
cggctgcccgttgct

SEQ ID NO: 745259 - DNA, 15 bp, Homo sapiens
ggctgcccgttgcta

SEQ ID NO: 745260 - DNA, 15 bp, Homo sapiens
gctgcccgttgctag

SEQ ID NO: 745261 - DNA, 15 bp, Homo sapiens
ctgcccgttgctagc

SEQ ID NO: 745262 - DNA, 15 bp, Homo sapiens
tgcccgttgctagct

SEQ ID NO: 745263 - DNA, 15 bp, Homo sapiens
gcccgttgctagcta

SEQ ID NO: 745264 - DNA, 15 bp, Homo sapiens
cccgttgctagctat

SEQ ID NO: 745265 - DNA, 15 bp, Homo sapiens
ccgttgctagctatg

SEQ ID NO: 745266 - DNA, 15 bp, Homo sapiens
cgttgctagctatgg

SEQ ID NO: 745267 - DNA, 15 bp, Homo sapiens
gttgctagctatggc

SEQ ID NO: 745268 - DNA, 15 bp, Homo sapiens
ttgctagctatggca

SEQ ID NO: 745269 - DNA, 15 bp, Homo sapiens
tgctagctatggcaa

SEQ ID NO: 745270 - DNA, 15 bp, Homo sapiens
gctagctatggcaaa

SEQ ID NO: 745271 - DNA, 15 bp, Homo sapiens
ctagctatggcaaat

SEQ ID NO: 745272 - DNA, 15 bp, Homo sapiens
tagctatggcaaatg

SEQ ID NO: 745273 - DNA, 15 bp, Homo sapiens
agctatggcaaatgg

SEQ ID NO: 745274 - DNA, 15 bp, Homo sapiens
gctatggcaaatggt

SEQ ID NO: 745275 - DNA, 15 bp, Homo sapiens
ctatggcaaatggtg

SEQ ID NO: 745276 - DNA, 15 bp, Homo sapiens
tatggcaaatggtgg

SEQ ID NO: 745277 - DNA, 15 bp, Homo sapiens
atggcaaatggtggc

SEQ ID NO: 745278 - DNA, 15 bp, Homo sapiens
tggcaaatggtggcg

SEQ ID NO: 745279 - DNA, 15 bp, Homo sapiens
ggcaaatggtggcgg

SEQ ID NO: 745280 - DNA, 15 bp, Homo sapiens
gcaaatggtggcggc

SEQ ID NO: 745281 - DNA, 15 bp, Homo sapiens
caaatggtggcggcg

SEQ ID NO: 745282 - DNA, 15 bp, Homo sapiens
aaatggtggcggcgg

SEQ ID NO: 745283 - DNA, 15 bp, Homo sapiens
aatggtggcggcggc

SEQ ID NO: 745284 - DNA, 15 bp, Homo sapiens
atggtggcggcggcg

SEQ ID NO: 745285 - DNA, 15 bp, Homo sapiens
tggtggcggcggcgg

SEQ ID NO: 745286 - DNA, 15 bp, Homo sapiens
ggtggcggcggcggc

SEQ ID NO: 745287 - DNA, 15 bp, Homo sapiens
gtggcggcggcggcg

SEQ ID NO: 745288 - DNA, 15 bp, Homo sapiens
tggcggcggcggcgg

SEQ ID NO: 745289 - DNA, 15 bp, Homo sapiens
ggcggcggcagcagc

SEQ ID NO: 745290 - DNA, 15 bp, Homo sapiens
gcggcggcagcagcg

SEQ ID NO: 745291 - DNA, 15 bp, Homo sapiens
cggcggcagcagcgg

SEQ ID NO: 745292 - DNA, 15 bp, Homo sapiens
ggcggcagcagcggc

SEQ ID NO: 745293 - DNA, 15 bp, Homo sapiens
gcggcagcagcggcg

SEQ ID NO: 745294 - DNA, 15 bp, Homo sapiens
cggcagcagcggcgg

SEQ ID NO: 745295 - DNA, 15 bp, Homo sapiens
ggcagcagcggcggc

SEQ ID NO: 745296 - DNA, 15 bp, Homo sapiens
gcagcagcggcggcg

SEQ ID NO: 745297 - DNA, 15 bp, Homo sapiens
cagcagcggcggcgg

SEQ ID NO: 745298 - DNA, 15 bp, Homo sapiens
agcagcggcggcggc

SEQ ID NO: 745299 - DNA, 15 bp, Homo sapiens
gcagcggcggcggcg

SEQ ID NO: 745300 - DNA, 15 bp, Homo sapiens
cagcggcggcggcgg

SEQ ID NO: 745301 - DNA, 15 bp, Homo sapiens
agcggcggcggcggc

SEQ ID NO: 745302 - DNA, 15 bp, Homo sapiens
ggcggcggcggcgga

SEQ ID NO: 745303 - DNA, 15 bp, Homo sapiens
gcggcggcggcggag

SEQ ID NO: 745304 - DNA, 15 bp, Homo sapiens
cggcggcggcggagg

SEQ ID NO: 745305 - DNA, 15 bp, Homo sapiens
ggcggcggcggaggc

SEQ ID NO: 745306 - DNA, 15 bp, Homo sapiens
gcggcggcggaggca

SEQ ID NO: 745307 - DNA, 15 bp, Homo sapiens
cggcggcggaggcag

SEQ ID NO: 745308 - DNA, 15 bp, Homo sapiens
ggcggcggaggcagc

SEQ ID NO: 745309 - DNA, 15 bp, Homo sapiens
gcggcggaggcagca

SEQ ID NO: 745310 - DNA, 15 bp, Homo sapiens
cggcggaggcagcag

SEQ ID NO: 745311 - DNA, 15 bp, Homo sapiens
ggcggaggcagcagt

SEQ ID NO: 745312 - DNA, 15 bp, Homo sapiens
gcggaggcagcagtc

SEQ ID NO: 745313 - DNA, 15 bp, Homo sapiens
cggaggcagcagtct

SEQ ID NO: 745314 - DNA, 15 bp, Homo sapiens
ggaggcagcagtctt

SEQ ID NO: 745315 - DNA, 15 bp, Homo sapiens
gaggcagcagtctta

SEQ ID NO: 745316 - DNA, 15 bp, Homo sapiens
aggcagcagtcttag

SEQ ID NO: 745317 - DNA, 15 bp, Homo sapiens
ggcagcagtcttaga

SEQ ID NO: 745318 - DNA, 15 bp, Homo sapiens
gcagcagtcttagaa

SEQ ID NO: 745319 - DNA, 15 bp, Homo sapiens
cagcagtcttagaat

SEQ ID NO: 745320 - DNA, 15 bp, Homo sapiens
agcagtcttagaatg

SEQ ID NO: 745321 - DNA, 15 bp, Homo sapiens
gcagtcttagaatga

SEQ ID NO: 745322 - DNA, 15 bp, Homo sapiens
cagtcttagaatgag

SEQ ID NO: 745323 - DNA, 15 bp, Homo sapiens
agtcttagaatgagt

SEQ ID NO: 745324 - DNA, 15 bp, Homo sapiens
gtcttagaatgagta

SEQ ID NO: 745325 - DNA, 15 bp, Homo sapiens
tcttagaatgagtag

SEQ ID NO: 745326 - DNA, 15 bp, Homo sapiens
cttagaatgagtagc

SEQ ID NO: 745327 - DNA, 15 bp, Homo sapiens
ttagaatgagtagca

SEQ ID NO: 745328 - DNA, 15 bp, Homo sapiens
tagaatgagtagcaa

SEQ ID NO: 745329 - DNA, 15 bp, Homo sapiens
agaatgagtagcaat

SEQ ID NO: 745330 - DNA, 15 bp, Homo sapiens
gaatgagtagcaata

SEQ ID NO: 745331 - DNA, 15 bp, Homo sapiens
aatgagtagcaatat

SEQ ID NO: 745332 - DNA, 15 bp, Homo sapiens
atgagtagcaatatc

SEQ ID NO: 745333 - DNA, 15 bp, Homo sapiens
tgagtagcaatatcc

SEQ ID NO: 745334 - DNA, 15 bp, Homo sapiens
gagtagcaatatcca

SEQ ID NO: 745335 - DNA, 15 bp, Homo sapiens
agtagcaatatccac

SEQ ID NO: 745336 - DNA, 15 bp, Homo sapiens
gtagcaatatccacg

SEQ ID NO: 745337 - DNA, 15 bp, Homo sapiens
tagcaatatccacgc

SEQ ID NO: 745338 - DNA, 15 bp, Homo sapiens
agcaatatccacgcg

SEQ ID NO: 745339 - DNA, 15 bp, Homo sapiens
gcaatatccacgcga

SEQ ID NO: 745340 - DNA, 15 bp, Homo sapiens
caatatccacgcgaa

SEQ ID NO: 745341 - DNA, 15 bp, Homo sapiens
aatatccacgcgaac

SEQ ID NO: 745342 - DNA, 15 bp, Homo sapiens
atatccacgcgaacc

SEQ ID NO: 745343 - DNA, 15 bp, Homo sapiens
tatccacgcgaacca

SEQ ID NO: 745344 - DNA, 15 bp, Homo sapiens
atccacgcgaaccat

SEQ ID NO: 745345 - DNA, 15 bp, Homo sapiens
tccacgcgaaccatc

SEQ ID NO: 745346 - DNA, 15 bp, Homo sapiens
ccacgcgaaccatct

SEQ ID NO: 745347 - DNA, 15 bp, Homo sapiens
cacgcgaaccatctc

SEQ ID NO: 745348 - DNA, 15 bp, Homo sapiens
acgcgaaccatctca

SEQ ID NO: 745349 - DNA, 15 bp, Homo sapiens
cgcgaaccatctcag

SEQ ID NO: 745350 - DNA, 15 bp, Homo sapiens
gcgaaccatctcagc

SEQ ID NO: 745351 - DNA, 15 bp, Homo sapiens
cgaaccatctcagcc

SEQ ID NO: 745352 - DNA, 15 bp, Homo sapiens
gaaccatctcagcct

SEQ ID NO: 745353 - DNA, 15 bp, Homo sapiens
aaccatctcagccta

SEQ ID NO: 745354 - DNA, 15 bp, Homo sapiens
accatctcagcctag

SEQ ID NO: 745355 - DNA, 15 bp, Homo sapiens
ccatctcagcctaga

SEQ ID NO: 745356 - DNA, 15 bp, Homo sapiens
catctcagcctagac

SEQ ID NO: 745357 - DNA, 15 bp, Homo sapiens
atctcagcctagacg

SEQ ID NO: 745358 - DNA, 15 bp, Homo sapiens
tctcagcctagacgc

SEQ ID NO: 745359 - DNA, 15 bp, Homo sapiens
ctcagcctagacgcg

SEQ ID NO: 745360 - DNA, 15 bp, Homo sapiens
tcagcctagacgcgt

SEQ ID NO: 745361 - DNA, 15 bp, Homo sapiens
cagcctagacgcgtc

SEQ ID NO: 745362 - DNA, 15 bp, Homo sapiens
agcctagacgcgtcc

SEQ ID NO: 745363 - DNA, 15 bp, Homo sapiens
gcctagacgcgtcct

SEQ ID NO: 745364 - DNA, 15 bp, Homo sapiens
cctagacgcgtcctc

SEQ ID NO: 745365 - DNA, 15 bp, Homo sapiens
ctagacgcgtcctcc

SEQ ID NO: 745366 - DNA, 15 bp, Homo sapiens
tagacgcgtcctcct

SEQ ID NO: 745367 - DNA, 15 bp, Homo sapiens
agacgcgtcctcctc

SEQ ID NO: 745368 - DNA, 15 bp, Homo sapiens
gacgcgtcctcctcc

SEQ ID NO: 745369 - DNA, 15 bp, Homo sapiens
acgcgtcctcctcct

SEQ ID NO: 745370 - DNA, 15 bp, Homo sapiens
cgcgtcctcctcctc

SEQ ID NO: 745371 - DNA, 15 bp, Homo sapiens
gcgtcctcctcctcc

SEQ ID NO: 745372 - DNA, 15 bp, Homo sapiens
cgtcctcctcctcct

SEQ ID NO: 745373 - DNA, 15 bp, Homo sapiens
gtcctcctcctcctc

SEQ ID NO: 745374 - DNA, 15 bp, Homo sapiens
tcctcctcctcctcc

SEQ ID NO: 745375 - DNA, 15 bp, Homo sapiens
cctcctcctcctcct

SEQ ID NO: 745376 - DNA, 15 bp, Homo sapiens
ctcctcctcctcctc

SEQ ID NO: 745377 - DNA, 15 bp, Homo sapiens
tcctcctcctcctct

SEQ ID NO: 745378 - DNA, 15 bp, Homo sapiens
cctcctcctcctctt

SEQ ID NO: 745379 - DNA, 15 bp, Homo sapiens
ctcctcctcctcttc

SEQ ID NO: 745380 - DNA, 15 bp, Homo sapiens
tcctcctcctcttcc

SEQ ID NO: 745381 - DNA, 15 bp, Homo sapiens
cctcctcctcttcct

SEQ ID NO: 745382 - DNA, 15 bp, Homo sapiens
ctcctcctcttcctc

SEQ ID NO: 745383 - DNA, 15 bp, Homo sapiens
tcctcctcttcctct

SEQ ID NO: 745384 - DNA, 15 bp, Homo sapiens
cctcctcttcctctt

SEQ ID NO: 745385 - DNA, 15 bp, Homo sapiens
ctcctcttcctcttc

SEQ ID NO: 745386 - DNA, 15 bp, Homo sapiens
tcctcttcctcttct

SEQ ID NO: 745387 - DNA, 15 bp, Homo sapiens
cctcttcctcttctt

SEQ ID NO: 745388 - DNA, 15 bp, Homo sapiens
ctcttcctcttcttc

SEQ ID NO: 745389 - DNA, 15 bp, Homo sapiens
tcttcctcttcttct

SEQ ID NO: 745390 - DNA, 15 bp, Homo sapiens
cttcctcttcttctt

SEQ ID NO: 745391 - DNA, 15 bp, Homo sapiens
ttcctcttcttcttc

SEQ ID NO: 745392 - DNA, 15 bp, Homo sapiens
tcctcttcttcttct

SEQ ID NO: 745393 - DNA, 15 bp, Homo sapiens
cctcttcttcttctt

SEQ ID NO: 745394 - DNA, 15 bp, Homo sapiens
ctcttcttcttcttc

SEQ ID NO: 745395 - DNA, 15 bp, Homo sapiens
tcttcttcttcttcc

SEQ ID NO: 745396 - DNA, 15 bp, Homo sapiens
cttcttcttcttcct

SEQ ID NO: 745397 - DNA, 15 bp, Homo sapiens
ttcttcttcttcctc

SEQ ID NO: 745398 - DNA, 15 bp, Homo sapiens
tcttcttcttcctcc

SEQ ID NO: 745399 - DNA, 15 bp, Homo sapiens
cttcttcttcctcct

SEQ ID NO: 745400 - DNA, 15 bp, Homo sapiens
ttcttcttcctcctc

SEQ ID NO: 745401 - DNA, 15 bp, Homo sapiens
tcttcttcctcctcc

SEQ ID NO: 745402 - DNA, 15 bp, Homo sapiens
cttcttcctcctcct

SEQ ID NO: 745403 - DNA, 15 bp, Homo sapiens
ttcttcctcctcctc

SEQ ID NO: 745404 - DNA, 15 bp, Homo sapiens
tcttcctcctcctct

SEQ ID NO: 745405 - DNA, 15 bp, Homo sapiens
cttcctcctcctctt

SEQ ID NO: 745406 - DNA, 15 bp, Homo sapiens
ttcctcctcctcttc

SEQ ID NO: 745407 - DNA, 15 bp, Homo sapiens
tcctcctcttcctcc

SEQ ID NO: 745408 - DNA, 15 bp, Homo sapiens
cctcctcttcctcct

SEQ ID NO: 745409 - DNA, 15 bp, Homo sapiens
ctcctcttcctcctc

SEQ ID NO: 745410 - DNA, 15 bp, Homo sapiens
tcctcttcctcctcg

SEQ ID NO: 745411 - DNA, 15 bp, Homo sapiens
cctcttcctcctcgt

SEQ ID NO: 745412 - DNA, 15 bp, Homo sapiens
ctcttcctcctcgtc

SEQ ID NO: 745413 - DNA, 15 bp, Homo sapiens
tcttcctcctcgtcc

SEQ ID NO: 745414 - DNA, 15 bp, Homo sapiens
cttcctcctcgtcct

SEQ ID NO: 745415 - DNA, 15 bp, Homo sapiens
ttcctcctcgtcctc

SEQ ID NO: 745416 - DNA, 15 bp, Homo sapiens
tcctcctcgtcctcg

SEQ ID NO: 745417 - DNA, 15 bp, Homo sapiens
cctcctcgtcctcgg

SEQ ID NO: 745418 - DNA, 15 bp, Homo sapiens
ctcctcgtcctcggt

SEQ ID NO: 745419 - DNA, 15 bp, Homo sapiens
tcctcgtcctcggtc

SEQ ID NO: 745420 - DNA, 15 bp, Homo sapiens
cctcgtcctcggtcc

SEQ ID NO: 745421 - DNA, 15 bp, Homo sapiens
ctcgtcctcggtcca

SEQ ID NO: 745422 - DNA, 15 bp, Homo sapiens
tcgtcctcggtccac

SEQ ID NO: 745423 - DNA, 15 bp, Homo sapiens
cgtcctcggtccacg

SEQ ID NO: 745424 - DNA, 15 bp, Homo sapiens
gtcctcggtccacga

SEQ ID NO: 745425 - DNA, 15 bp, Homo sapiens
tcctcggtccacgag

SEQ ID NO: 745426 - DNA, 15 bp, Homo sapiens
cctcggtccacgagc

SEQ ID NO: 745427 - DNA, 15 bp, Homo sapiens
ctcggtccacgagcc

SEQ ID NO: 745428 - DNA, 15 bp, Homo sapiens
tcggtccacgagccc

SEQ ID NO: 745429 - DNA, 15 bp, Homo sapiens
cggtccacgagccca

SEQ ID NO: 745430 - DNA, 15 bp, Homo sapiens
ggtccacgagcccaa

SEQ ID NO: 745431 - DNA, 15 bp, Homo sapiens
gtccacgagcccaag

SEQ ID NO: 745432 - DNA, 15 bp, Homo sapiens
tccacgagcccaaga

SEQ ID NO: 745433 - DNA, 15 bp, Homo sapiens
ccacgagcccaagat

SEQ ID NO: 745434 - DNA, 15 bp, Homo sapiens
cacgagcccaagatg

SEQ ID NO: 745435 - DNA, 15 bp, Homo sapiens
acgagcccaagatgg

SEQ ID NO: 745436 - DNA, 15 bp, Homo sapiens
cgagcccaagatgga

SEQ ID NO: 745437 - DNA, 15 bp, Homo sapiens
gagcccaagatggat

SEQ ID NO: 745438 - DNA, 15 bp, Homo sapiens
agcccaagatggatg

SEQ ID NO: 745439 - DNA, 15 bp, Homo sapiens
gcccaagatggatgc

SEQ ID NO: 745440 - DNA, 15 bp, Homo sapiens
cccaagatggatgcg

SEQ ID NO: 745441 - DNA, 15 bp, Homo sapiens
ccaagatggatgcgc

SEQ ID NO: 745442 - DNA, 15 bp, Homo sapiens
caagatggatgcgct

SEQ ID NO: 745443 - DNA, 15 bp, Homo sapiens
aagatggatgcgctc

SEQ ID NO: 745444 - DNA, 15 bp, Homo sapiens
agatggatgcgctca

SEQ ID NO: 745445 - DNA, 15 bp, Homo sapiens
gatggatgcgctcat

SEQ ID NO: 745446 - DNA, 15 bp, Homo sapiens
atggatgcgctcatc

SEQ ID NO: 745447 - DNA, 15 bp, Homo sapiens
tggatgcgctcatca

SEQ ID NO: 745448 - DNA, 15 bp, Homo sapiens
ggatgcgctcatcat

SEQ ID NO: 745449 - DNA, 15 bp, Homo sapiens
gatgcgctcatcatc

SEQ ID NO: 745450 - DNA, 15 bp, Homo sapiens
atgcgctcatcatcc

SEQ ID NO: 745451 - DNA, 15 bp, Homo sapiens
tgcgctcatcatccc

SEQ ID NO: 745452 - DNA, 15 bp, Homo sapiens
gcgctcatcatcccg

SEQ ID NO: 745453 - DNA, 15 bp, Homo sapiens
cgctcatcatcccgg

SEQ ID NO: 745454 - DNA, 15 bp, Homo sapiens
gctcatcatcccggt

SEQ ID NO: 745455 - DNA, 15 bp, Homo sapiens
ctcatcatcccggtg

SEQ ID NO: 745456 - DNA, 15 bp, Homo sapiens
tcatcatcccggtga

SEQ ID NO: 745457 - DNA, 15 bp, Homo sapiens
catcatcccggtgac

SEQ ID NO: 745458 - DNA, 15 bp, Homo sapiens
atcatcccggtgacc

SEQ ID NO: 745459 - DNA, 15 bp, Homo sapiens
tcatcccggtgacca

SEQ ID NO: 745460 - DNA, 15 bp, Homo sapiens
catcccggtgaccat

SEQ ID NO: 745461 - DNA, 15 bp, Homo sapiens
atcccggtgaccatg

SEQ ID NO: 745462 - DNA, 15 bp, Homo sapiens
tcccggtgaccatgg

SEQ ID NO: 745463 - DNA, 15 bp, Homo sapiens
cccggtgaccatgga

SEQ ID NO: 745464 - DNA, 15 bp, Homo sapiens
ccggtgaccatggag

SEQ ID NO: 745465 - DNA, 15 bp, Homo sapiens
cggtgaccatggagg

SEQ ID NO: 745466 - DNA, 15 bp, Homo sapiens
ggtgaccatggaggt

SEQ ID NO: 745467 - DNA, 15 bp, Homo sapiens
gtgaccatggaggtg

SEQ ID NO: 745468 - DNA, 15 bp, Homo sapiens
tgaccatggaggtgc

SEQ ID NO: 745469 - DNA, 15 bp, Homo sapiens
gaccatggaggtgcc

SEQ ID NO: 745470 - DNA, 15 bp, Homo sapiens
accatggaggtgccg

SEQ ID NO: 745471 - DNA, 15 bp, Homo sapiens
ccatggaggtgccgt

SEQ ID NO: 745472 - DNA, 15 bp, Homo sapiens
catggaggtgccgtg

SEQ ID NO: 745473 - DNA, 15 bp, Homo sapiens
atggaggtgccgtgc

SEQ ID NO: 745474 - DNA, 15 bp, Homo sapiens
tggaggtgccgtgcg

SEQ ID NO: 745475 - DNA, 15 bp, Homo sapiens
ggaggtgccgtgcga

SEQ ID NO: 745476 - DNA, 15 bp, Homo sapiens
gaggtgccgtgcgac

SEQ ID NO: 745477 - DNA, 15 bp, Homo sapiens
aggtgccgtgcgaca

SEQ ID NO: 745478 - DNA, 15 bp, Homo sapiens
ggtgccgtgcgacag

SEQ ID NO: 745479 - DNA, 15 bp, Homo sapiens
gtgccgtgcgacagc

SEQ ID NO: 745480 - DNA, 15 bp, Homo sapiens
tgccgtgcgacagcc

SEQ ID NO: 745481 - DNA, 15 bp, Homo sapiens
gccgtgcgacagccg

SEQ ID NO: 745482 - DNA, 15 bp, Homo sapiens
ccgtgcgacagccgg

SEQ ID NO: 745483 - DNA, 15 bp, Homo sapiens
cgtgcgacagccggg

SEQ ID NO: 745484 - DNA, 15 bp, Homo sapiens
gtgcgacagccgggg

SEQ ID NO: 745485 - DNA, 15 bp, Homo sapiens
tgcgacagccggggc

SEQ ID NO: 745486 - DNA, 15 bp, Homo sapiens
gcgacagccggggcc

SEQ ID NO: 745487 - DNA, 15 bp, Homo sapiens
cgacagccggggcca

SEQ ID NO: 745488 - DNA, 15 bp, Homo sapiens
gacagccggggccaa

SEQ ID NO: 745489 - DNA, 15 bp, Homo sapiens
acagccggggccaac

SEQ ID NO: 745490 - DNA, 15 bp, Homo sapiens
cagccggggccaacg

SEQ ID NO: 745491 - DNA, 15 bp, Homo sapiens
agccggggccaacgc

SEQ ID NO: 745492 - DNA, 15 bp, Homo sapiens
gccggggccaacgca

SEQ ID NO: 745493 - DNA, 15 bp, Homo sapiens
ccggggccaacgcat

SEQ ID NO: 745494 - DNA, 15 bp, Homo sapiens
cggggccaacgcatg

SEQ ID NO: 745495 - DNA, 15 bp, Homo sapiens
ggggccaacgcatgt

SEQ ID NO: 745496 - DNA, 15 bp, Homo sapiens
gggccaacgcatgtg

SEQ ID NO: 745497 - DNA, 15 bp, Homo sapiens
ggccaacgcatgtgg

SEQ ID NO: 745498 - DNA, 15 bp, Homo sapiens
gccaacgcatgtggt

SEQ ID NO: 745499 - DNA, 15 bp, Homo sapiens
ccaacgcatgtggtg

SEQ ID NO: 745500 - DNA, 15 bp, Homo sapiens
caacgcatgtggtgg

SEQ ID NO: 745501 - DNA, 15 bp, Homo sapiens
aacgcatgtggtggg

SEQ ID NO: 745502 - DNA, 15 bp, Homo sapiens
acgcatgtggtgggc

SEQ ID NO: 745503 - DNA, 15 bp, Homo sapiens
cgcatgtggtgggct

SEQ ID NO: 745504 - DNA, 15 bp, Homo sapiens
gcatgtggtgggctt

SEQ ID NO: 745505 - DNA, 15 bp, Homo sapiens
catgtggtgggcttt

SEQ ID NO: 745506 - DNA, 15 bp, Homo sapiens
atgtggtgggctttc

SEQ ID NO: 745507 - DNA, 15 bp, Homo sapiens
tgtggtgggctttcc

SEQ ID NO: 745508 - DNA, 15 bp, Homo sapiens
gtggtgggctttcct

SEQ ID NO: 745509 - DNA, 15 bp, Homo sapiens
tggtgggctttcctg

SEQ ID NO: 745510 - DNA, 15 bp, Homo sapiens
ggtgggctttcctgg

SEQ ID NO: 745511 - DNA, 15 bp, Homo sapiens
gtgggctttcctggc

SEQ ID NO: 745512 - DNA, 15 bp, Homo sapiens
tgggctttcctggcc

SEQ ID NO: 745513 - DNA, 15 bp, Homo sapiens
gggctttcctggcct

SEQ ID NO: 745514 - DNA, 15 bp, Homo sapiens
ggctttcctggcctc

SEQ ID NO: 745515 - DNA, 15 bp, Homo sapiens
gctttcctggcctcc

SEQ ID NO: 745516 - DNA, 15 bp, Homo sapiens
ctttcctggcctcct

SEQ ID NO: 745517 - DNA, 15 bp, Homo sapiens
tttcctggcctcctc

SEQ ID NO: 745518 - DNA, 15 bp, Homo sapiens
ttcctggcctcctcc

SEQ ID NO: 745519 - DNA, 15 bp, Homo sapiens
tcctggcctcctcca

SEQ ID NO: 745520 - DNA, 15 bp, Homo sapiens
cctggcctcctccat

SEQ ID NO: 745521 - DNA, 15 bp, Homo sapiens
ctggcctcctccatg

SEQ ID NO: 745522 - DNA, 15 bp, Homo sapiens
tggcctcctccatgg

SEQ ID NO: 745523 - DNA, 15 bp, Homo sapiens
ggcctcctccatggt

SEQ ID NO: 745524 - DNA, 15 bp, Homo sapiens
gcctcctccatggtg

SEQ ID NO: 745525 - DNA, 15 bp, Homo sapiens
cctcctccatggtga

SEQ ID NO: 745526 - DNA, 15 bp, Homo sapiens
ctcctccatggtgac

SEQ ID NO: 745527 - DNA, 15 bp, Homo sapiens
tcctccatggtgact

SEQ ID NO: 745528 - DNA, 15 bp, Homo sapiens
cctccatggtgactt

SEQ ID NO: 745529 - DNA, 15 bp, Homo sapiens
ctccatggtgacttt

SEQ ID NO: 745530 - DNA, 15 bp, Homo sapiens
tccatggtgactttc

SEQ ID NO: 745531 - DNA, 15 bp, Homo sapiens
ccatggtgactttct

SEQ ID NO: 745532 - DNA, 15 bp, Homo sapiens
catggtgactttctt

SEQ ID NO: 745533 - DNA, 15 bp, Homo sapiens
atggtgactttcttc

SEQ ID NO: 745534 - DNA, 15 bp, Homo sapiens
tggtgactttcttcg

SEQ ID NO: 745535 - DNA, 15 bp, Homo sapiens
ggtgactttcttcgg

SEQ ID NO: 745536 - DNA, 15 bp, Homo sapiens
gtgactttcttcggg

SEQ ID NO: 745537 - DNA, 15 bp, Homo sapiens
tgactttcttcgggg

SEQ ID NO: 745538 - DNA, 15 bp, Homo sapiens
gactttcttcggggg

SEQ ID NO: 745539 - DNA, 15 bp, Homo sapiens
actttcttcgggggc

SEQ ID NO: 745540 - DNA, 15 bp, Homo sapiens
ctttcttcgggggcc

SEQ ID NO: 745541 - DNA, 15 bp, Homo sapiens
tttcttcgggggcct

SEQ ID NO: 745542 - DNA, 15 bp, Homo sapiens
ttcttcgggggcctc

SEQ ID NO: 745543 - DNA, 15 bp, Homo sapiens
tcttcgggggcctct

SEQ ID NO: 745544 - DNA, 15 bp, Homo sapiens
cttcgggggcctctt

SEQ ID NO: 745545 - DNA, 15 bp, Homo sapiens
ttcgggggcctcttc

SEQ ID NO: 745546 - DNA, 15 bp, Homo sapiens
tcgggggcctcttca

SEQ ID NO: 745547 - DNA, 15 bp, Homo sapiens
cgggggcctcttcat

SEQ ID NO: 745548 - DNA, 15 bp, Homo sapiens
gggggcctcttcatc

SEQ ID NO: 745549 - DNA, 15 bp, Homo sapiens
ggggcctcttcatca

SEQ ID NO: 745550 - DNA, 15 bp, Homo sapiens
gggcctcttcatcat

SEQ ID NO: 745551 - DNA, 15 bp, Homo sapiens
ggcctcttcatcatc

SEQ ID NO: 745552 - DNA, 15 bp, Homo sapiens
gcctcttcatcatct

SEQ ID NO: 745553 - DNA, 15 bp, Homo sapiens
cctcttcatcatctt

SEQ ID NO: 745554 - DNA, 15 bp, Homo sapiens
ctcttcatcatcttg

SEQ ID NO: 745555 - DNA, 15 bp, Homo sapiens
tcttcatcatcttgc

SEQ ID NO: 745556 - DNA, 15 bp, Homo sapiens
cttcatcatcttgct

SEQ ID NO: 745557 - DNA, 15 bp, Homo sapiens
ttcatcatcttgctc

SEQ ID NO: 745558 - DNA, 15 bp, Homo sapiens
tcatcatcttgctct

SEQ ID NO: 745559 - DNA, 15 bp, Homo sapiens
catcatcttgctctg

SEQ ID NO: 745560 - DNA, 15 bp, Homo sapiens
atcatcttgctctgg

SEQ ID NO: 745561 - DNA, 15 bp, Homo sapiens
tcatcttgctctggc

SEQ ID NO: 745562 - DNA, 15 bp, Homo sapiens
catcttgctctggcg

SEQ ID NO: 745563 - DNA, 15 bp, Homo sapiens
atcttgctctggcgg

SEQ ID NO: 745564 - DNA, 15 bp, Homo sapiens
tcttgctctggcgga

SEQ ID NO: 745565 - DNA, 15 bp, Homo sapiens
cttgctctggcggac

SEQ ID NO: 745566 - DNA, 15 bp, Homo sapiens
ttgctctggcggacg

SEQ ID NO: 745567 - DNA, 15 bp, Homo sapiens
tgctctggcggacgc

SEQ ID NO: 745568 - DNA, 15 bp, Homo sapiens
gctctggcggacgct

SEQ ID NO: 745569 - DNA, 15 bp, Homo sapiens
ctctggcggacgctc

SEQ ID NO: 745570 - DNA, 15 bp, Homo sapiens
tctggcggacgctca

SEQ ID NO: 745571 - DNA, 15 bp, Homo sapiens
ctggcggacgctcaa

SEQ ID NO: 745572 - DNA, 15 bp, Homo sapiens
tggcggacgctcaag

SEQ ID NO: 745573 - DNA, 15 bp, Homo sapiens
ggcggacgctcaagt

SEQ ID NO: 745574 - DNA, 15 bp, Homo sapiens
gcggacgctcaagta

SEQ ID NO: 745575 - DNA, 15 bp, Homo sapiens
cggacgctcaagtac

SEQ ID NO: 745576 - DNA, 15 bp, Homo sapiens
ggacgctcaagtacc

SEQ ID NO: 745577 - DNA, 15 bp, Homo sapiens
gacgctcaagtacct

SEQ ID NO: 745578 - DNA, 15 bp, Homo sapiens
acgctcaagtacctg

SEQ ID NO: 745579 - DNA, 15 bp, Homo sapiens
cgctcaagtacctgt

SEQ ID NO: 745580 - DNA, 15 bp, Homo sapiens
gctcaagtacctgtg

SEQ ID NO: 745581 - DNA, 15 bp, Homo sapiens
ctcaagtacctgtgg

SEQ ID NO: 745582 - DNA, 15 bp, Homo sapiens
tcaagtacctgtgga

SEQ ID NO: 745583 - DNA, 15 bp, Homo sapiens
caagtacctgtggac

SEQ ID NO: 745584 - DNA, 15 bp, Homo sapiens
aagtacctgtggacc

SEQ ID NO: 745585 - DNA, 15 bp, Homo sapiens
agtacctgtggaccg

SEQ ID NO: 745586 - DNA, 15 bp, Homo sapiens
gtacctgtggaccgt

SEQ ID NO: 745587 - DNA, 15 bp, Homo sapiens
tacctgtggaccgtg

SEQ ID NO: 745588 - DNA, 15 bp, Homo sapiens
acctgtggaccgtgt

SEQ ID NO: 745589 - DNA, 15 bp, Homo sapiens
cctgtggaccgtgtg

SEQ ID NO: 745590 - DNA, 15 bp, Homo sapiens
ctgtggaccgtgtgc

SEQ ID NO: 745591 - DNA, 15 bp, Homo sapiens
tgtggaccgtgtgct

SEQ ID NO: 745592 - DNA, 15 bp, Homo sapiens
gtggaccgtgtgctg

SEQ ID NO: 745593 - DNA, 15 bp, Homo sapiens
tggaccgtgtgctgc

SEQ ID NO: 745594 - DNA, 15 bp, Homo sapiens
ggaccgtgtgctgcc

SEQ ID NO: 745595 - DNA, 15 bp, Homo sapiens
gaccgtgtgctgcca

SEQ ID NO: 745596 - DNA, 15 bp, Homo sapiens
accgtgtgctgccac

SEQ ID NO: 745597 - DNA, 15 bp, Homo sapiens
ccgtgtgctgccact

SEQ ID NO: 745598 - DNA, 15 bp, Homo sapiens
cgtgtgctgccactg

SEQ ID NO: 745599 - DNA, 15 bp, Homo sapiens
gtgtgctgccactgc

SEQ ID NO: 745600 - DNA, 15 bp, Homo sapiens
tgtgctgccactgcg

SEQ ID NO: 745601 - DNA, 15 bp, Homo sapiens
gtgctgccactgcgg

SEQ ID NO: 745602 - DNA, 15 bp, Homo sapiens
tgctgccactgcggg

SEQ ID NO: 745603 - DNA, 15 bp, Homo sapiens
gctgccactgcgggg

SEQ ID NO: 745604 - DNA, 15 bp, Homo sapiens
ctgccactgcggggg

SEQ ID NO: 745605 - DNA, 15 bp, Homo sapiens
tgccactgcgggggc

SEQ ID NO: 745606 - DNA, 15 bp, Homo sapiens
gccactgcgggggca

SEQ ID NO: 745607 - DNA, 15 bp, Homo sapiens
ccactgcgggggcaa

SEQ ID NO: 745608 - DNA, 15 bp, Homo sapiens
cactgcgggggcaag

SEQ ID NO: 745609 - DNA, 15 bp, Homo sapiens
actgcgggggcaaga

SEQ ID NO: 745610 - DNA, 15 bp, Homo sapiens
ctgcgggggcaagac

SEQ ID NO: 745611 - DNA, 15 bp, Homo sapiens
tgcgggggcaagacg

SEQ ID NO: 745612 - DNA, 15 bp, Homo sapiens
gcgggggcaagacga

SEQ ID NO: 745613 - DNA, 15 bp, Homo sapiens
cgggggcaagacgaa

SEQ ID NO: 745614 - DNA, 15 bp, Homo sapiens
gggggcaagacgaag

SEQ ID NO: 745615 - DNA, 15 bp, Homo sapiens
ggggcaagacgaagg

SEQ ID NO: 745616 - DNA, 15 bp, Homo sapiens
gggcaagacgaaggt

SEQ ID NO: 745617 - DNA, 15 bp, Homo sapiens
ggcaagacgaaggta

SEQ ID NO: 745618 - DNA, 15 bp, Homo sapiens
gcaagacgaaggtaa

SEQ ID NO: 745619 - DNA, 15 bp, Homo sapiens
caagacgaaggtaac

SEQ ID NO: 745620 - DNA, 15 bp, Homo sapiens
aagacgaaggtaacg

SEQ ID NO: 745621 - DNA, 15 bp, Homo sapiens
agacgaaggtaacgc

SEQ ID NO: 745622 - DNA, 15 bp, Homo sapiens
gacgaaggtaacgcg

SEQ ID NO: 745623 - DNA, 15 bp, Homo sapiens
acgaaggtaacgcgc

SEQ ID NO: 745624 - DNA, 15 bp, Homo sapiens
cgaaggtaacgcgcg

SEQ ID NO: 745625 - DNA, 15 bp, Homo sapiens
gaaggtaacgcgcgc

SEQ ID NO: 745626 - DNA, 15 bp, Homo sapiens
aaggtaacgcgcgcc

SEQ ID NO: 745627 - DNA, 15 bp, Homo sapiens
aggtaacgcgcgccc

SEQ ID NO: 745628 - DNA, 15 bp, Homo sapiens
ggtaacgcgcgcccc

SEQ ID NO: 745629 - DNA, 15 bp, Homo sapiens
gtaacgcgcgccccg

SEQ ID NO: 745630 - DNA, 15 bp, Homo sapiens
taacgcgcgccccgg

SEQ ID NO: 745631 - DNA, 15 bp, Homo sapiens
aacgcgcgccccggg

SEQ ID NO: 745632 - DNA, 15 bp, Homo sapiens
acgcgcgccccgggc

SEQ ID NO: 745633 - DNA, 15 bp, Homo sapiens
cgcgcgccccgggcg

SEQ ID NO: 745634 - DNA, 15 bp, Homo sapiens
gcgcgccccgggcgc

SEQ ID NO: 745635 - DNA, 15 bp, Homo sapiens
cgcgccccgggcgcc

SEQ ID NO: 745636 - DNA, 15 bp, Homo sapiens
gcgccccgggcgccc

SEQ ID NO: 745637 - DNA, 15 bp, Homo sapiens
cgccccgggcgcccg

SEQ ID NO: 745638 - DNA, 15 bp, Homo sapiens
gccccgggcgcccgc

SEQ ID NO: 745639 - DNA, 15 bp, Homo sapiens
ccccgggcgcccgcc

SEQ ID NO: 745640 - DNA, 15 bp, Homo sapiens
cccgggcgcccgccc

SEQ ID NO: 745641 - DNA, 15 bp, Homo sapiens
ccgggcgcccgccct

SEQ ID NO: 745642 - DNA, 15 bp, Homo sapiens
cgggcgcccgccctc

SEQ ID NO: 745643 - DNA, 15 bp, Homo sapiens
gggcgcccgccctct

SEQ ID NO: 745644 - DNA, 15 bp, Homo sapiens
ggcgcccgccctctg

SEQ ID NO: 745645 - DNA, 15 bp, Homo sapiens
gcgcccgccctctgc

SEQ ID NO: 745646 - DNA, 15 bp, Homo sapiens
cgcccgccctctgcg

SEQ ID NO: 745647 - DNA, 15 bp, Homo sapiens
gcccgccctctgcgc

SEQ ID NO: 745648 - DNA, 15 bp, Homo sapiens
cccgccctctgcgcc

SEQ ID NO: 745649 - DNA, 15 bp, Homo sapiens
ccgccctctgcgcca

SEQ ID NO: 745650 - DNA, 15 bp, Homo sapiens
cgccctctgcgccag

SEQ ID NO: 745651 - DNA, 15 bp, Homo sapiens
gccctctgcgccagc

SEQ ID NO: 745652 - DNA, 15 bp, Homo sapiens
ccctctgcgccagcc

SEQ ID NO: 745653 - DNA, 15 bp, Homo sapiens
cctctgcgccagccc

SEQ ID NO: 745654 - DNA, 15 bp, Homo sapiens
ctctgcgccagcccc

SEQ ID NO: 745655 - DNA, 15 bp, Homo sapiens
tctgcgccagcccca

SEQ ID NO: 745656 - DNA, 15 bp, Homo sapiens
ctgcgccagccccac

SEQ ID NO: 745657 - DNA, 15 bp, Homo sapiens
tgcgccagccccacc

SEQ ID NO: 745658 - DNA, 15 bp, Homo sapiens
gcgccagccccaccg

SEQ ID NO: 745659 - DNA, 15 bp, Homo sapiens
cgccagccccaccgc

SEQ ID NO: 745660 - DNA, 15 bp, Homo sapiens
gccagccccaccgct

SEQ ID NO: 745661 - DNA, 15 bp, Homo sapiens
ccagccccaccgctt

SEQ ID NO: 745662 - DNA, 15 bp, Homo sapiens
cagccccaccgcttc

SEQ ID NO: 745663 - DNA, 15 bp, Homo sapiens
agccccaccgcttct

SEQ ID NO: 745664 - DNA, 15 bp, Homo sapiens
gccccaccgcttctc

SEQ ID NO: 745665 - DNA, 15 bp, Homo sapiens
ccccaccgcttctcg

SEQ ID NO: 745666 - DNA, 15 bp, Homo sapiens
cccaccgcttctcgg

SEQ ID NO: 745667 - DNA, 15 bp, Homo sapiens
ccaccgcttctcggc

SEQ ID NO: 745668 - DNA, 15 bp, Homo sapiens
caccgcttctcggcg

SEQ ID NO: 745669 - DNA, 15 bp, Homo sapiens
accgcttctcggcgt

SEQ ID NO: 745670 - DNA, 15 bp, Homo sapiens
ccgcttctcggcgtc

SEQ ID NO: 745671 - DNA, 15 bp, Homo sapiens
cgcttctcggcgtcc

SEQ ID NO: 745672 - DNA, 15 bp, Homo sapiens
gcttctcggcgtccc

SEQ ID NO: 745673 - DNA, 15 bp, Homo sapiens
cttctcggcgtcccc

SEQ ID NO: 745674 - DNA, 15 bp, Homo sapiens
ttctcggcgtcccct

SEQ ID NO: 745675 - DNA, 15 bp, Homo sapiens
tctcggcgtcccctg

SEQ ID NO: 745676 - DNA, 15 bp, Homo sapiens
ctcggcgtcccctgc

SEQ ID NO: 745677 - DNA, 15 bp, Homo sapiens
tcggcgtcccctgca

SEQ ID NO: 745678 - DNA, 15 bp, Homo sapiens
cggcgtcccctgcag

SEQ ID NO: 745679 - DNA, 15 bp, Homo sapiens
ggcgtcccctgcagc

SEQ ID NO: 745680 - DNA, 15 bp, Homo sapiens
gcgtcccctgcagcc

SEQ ID NO: 745681 - DNA, 15 bp, Homo sapiens
cgtcccctgcagccc

SEQ ID NO: 745682 - DNA, 15 bp, Homo sapiens
gtcccctgcagccca

SEQ ID NO: 745683 - DNA, 15 bp, Homo sapiens
tcccctgcagcccac

SEQ ID NO: 745684 - DNA, 15 bp, Homo sapiens
cccctgcagcccacc

SEQ ID NO: 745685 - DNA, 15 bp, Homo sapiens
ccctgcagcccacct

SEQ ID NO: 745686 - DNA, 15 bp, Homo sapiens
cctgcagcccacctc

SEQ ID NO: 745687 - DNA, 15 bp, Homo sapiens
ctgcagcccacctcc

SEQ ID NO: 745688 - DNA, 15 bp, Homo sapiens
tgcagcccacctcct

SEQ ID NO: 745689 - DNA, 15 bp, Homo sapiens
gcagcccacctcctc

SEQ ID NO: 745690 - DNA, 15 bp, Homo sapiens
cagcccacctcctcg

SEQ ID NO: 745691 - DNA, 15 bp, Homo sapiens
agcccacctcctcgc

SEQ ID NO: 745692 - DNA, 15 bp, Homo sapiens
gcccacctcctcgct

SEQ ID NO: 745693 - DNA, 15 bp, Homo sapiens
cccacctcctcgctc

SEQ ID NO: 745694 - DNA, 15 bp, Homo sapiens
ccacctcctcgctcc

SEQ ID NO: 745695 - DNA, 15 bp, Homo sapiens
cacctcctcgctccg

SEQ ID NO: 745696 - DNA, 15 bp, Homo sapiens
acctcctcgctccgc

SEQ ID NO: 745697 - DNA, 15 bp, Homo sapiens
cctcctcgctccgcg

SEQ ID NO: 745698 - DNA, 15 bp, Homo sapiens
ctcctcgctccgcgc

SEQ ID NO: 745699 - DNA, 15 bp, Homo sapiens
tcctcgctccgcgcc

SEQ ID NO: 745700 - DNA, 15 bp, Homo sapiens
cctcgctccgcgccg

SEQ ID NO: 745701 - DNA, 15 bp, Homo sapiens
ctcgctccgcgccgc

SEQ ID NO: 745702 - DNA, 15 bp, Homo sapiens
tcgctccgcgccgcg

SEQ ID NO: 745703 - DNA, 15 bp, Homo sapiens
cgctccgcgccgcgc

SEQ ID NO: 745704 - DNA, 15 bp, Homo sapiens
gctccgcgccgcgcc

SEQ ID NO: 745705 - DNA, 15 bp, Homo sapiens
ctccgcgccgcgccg

SEQ ID NO: 745706 - DNA, 15 bp, Homo sapiens
tccgcgccgcgccgt

SEQ ID NO: 745707 - DNA, 15 bp, Homo sapiens
ccgcgccgcgccgtg

SEQ ID NO: 745708 - DNA, 15 bp, Homo sapiens
cgcgccgcgccgtgc

SEQ ID NO: 745709 - DNA, 15 bp, Homo sapiens
gcgccgcgccgtgcc

SEQ ID NO: 745710 - DNA, 15 bp, Homo sapiens
cgccgcgccgtgcct

SEQ ID NO: 745711 - DNA, 15 bp, Homo sapiens
gccgcgccgtgcctc

SEQ ID NO: 745712 - DNA, 15 bp, Homo sapiens
ccgcgccgtgcctcc

SEQ ID NO: 745713 - DNA, 15 bp, Homo sapiens
cgcgccgtgcctccc

SEQ ID NO: 745714 - DNA, 15 bp, Homo sapiens
gcgccgtgcctccct

SEQ ID NO: 745715 - DNA, 15 bp, Homo sapiens
cgccgtgcctccctc

SEQ ID NO: 745716 - DNA, 15 bp, Homo sapiens
gccgtgcctccctcc

SEQ ID NO: 745717 - DNA, 15 bp, Homo sapiens
ccgtgcctccctcca

SEQ ID NO: 745718 - DNA, 15 bp, Homo sapiens
cgtgcctccctccat

SEQ ID NO: 745719 - DNA, 15 bp, Homo sapiens
gtgcctccctccatc

SEQ ID NO: 745720 - DNA, 15 bp, Homo sapiens
tgcctccctccatcc

SEQ ID NO: 745721 - DNA, 15 bp, Homo sapiens
gcctccctccatccc

SEQ ID NO: 745722 - DNA, 15 bp, Homo sapiens
cctccctccatcccc

SEQ ID NO: 745723 - DNA, 15 bp, Homo sapiens
ctccctccatccccg

SEQ ID NO: 745724 - DNA, 15 bp, Homo sapiens
tccctccatccccgc

SEQ ID NO: 745725 - DNA, 15 bp, Homo sapiens
ccctccatccccgcc

SEQ ID NO: 745726 - DNA, 15 bp, Homo sapiens
cctccatccccgcct

SEQ ID NO: 745727 - DNA, 15 bp, Homo sapiens
ctccatccccgcctg

SEQ ID NO: 745728 - DNA, 15 bp, Homo sapiens
tccatccccgcctgc

SEQ ID NO: 745729 - DNA, 15 bp, Homo sapiens
ccatccccgcctgcc

SEQ ID NO: 745730 - DNA, 15 bp, Homo sapiens
catccccgcctgcct

SEQ ID NO: 745731 - DNA, 15 bp, Homo sapiens
atccccgcctgcctt

SEQ ID NO: 745732 - DNA, 15 bp, Homo sapiens
tccccgcctgccttc

SEQ ID NO: 745733 - DNA, 15 bp, Homo sapiens
ccccgcctgccttcc

SEQ ID NO: 745734 - DNA, 15 bp, Homo sapiens
cccgcctgccttccc

SEQ ID NO: 745735 - DNA, 15 bp, Homo sapiens
ccgcctgccttcccc

SEQ ID NO: 745736 - DNA, 15 bp, Homo sapiens
cgcctgccttcccct

SEQ ID NO: 745737 - DNA, 15 bp, Homo sapiens
gcctgccttcccctc

SEQ ID NO: 745738 - DNA, 15 bp, Homo sapiens
cctgccttcccctcg

SEQ ID NO: 745739 - DNA, 15 bp, Homo sapiens
ctgccttcccctcgc

SEQ ID NO: 745740 - DNA, 15 bp, Homo sapiens
tgccttcccctcgcc

SEQ ID NO: 745741 - DNA, 15 bp, Homo sapiens
gccttcccctcgccg

SEQ ID NO: 745742 - DNA, 15 bp, Homo sapiens
ccttcccctcgccgc

SEQ ID NO: 745743 - DNA, 15 bp, Homo sapiens
cttcccctcgccgcc

SEQ ID NO: 745744 - DNA, 15 bp, Homo sapiens
ttcccctcgccgcct

SEQ ID NO: 745745 - DNA, 15 bp, Homo sapiens
tcccctcgccgcctt

SEQ ID NO: 745746 - DNA, 15 bp, Homo sapiens
cccctcgccgccttc

SEQ ID NO: 745747 - DNA, 15 bp, Homo sapiens
ccctcgccgccttcc

SEQ ID NO: 745748 - DNA, 15 bp, Homo sapiens
cctcgccgccttccc

SEQ ID NO: 745749 - DNA, 15 bp, Homo sapiens
ctcgccgccttccct

SEQ ID NO: 745750 - DNA, 15 bp, Homo sapiens
tcgccgccttccctt

SEQ ID NO: 745751 - DNA, 15 bp, Homo sapiens
cgccgccttcccttc

SEQ ID NO: 745752 - DNA, 15 bp, Homo sapiens
gccgccttcccttcc

SEQ ID NO: 745753 - DNA, 15 bp, Homo sapiens
ccgccttcccttccc

SEQ ID NO: 745754 - DNA, 15 bp, Homo sapiens
cgccttcccttccct

SEQ ID NO: 745755 - DNA, 15 bp, Homo sapiens
gccttcccttccctc

SEQ ID NO: 745756 - DNA, 15 bp, Homo sapiens
ccttcccttccctcg

SEQ ID NO: 745757 - DNA, 15 bp, Homo sapiens
cttcccttccctcgg

SEQ ID NO: 745758 - DNA, 15 bp, Homo sapiens
ttcccttccctcggc

SEQ ID NO: 745759 - DNA, 15 bp, Homo sapiens
tcccttccctcggct

SEQ ID NO: 745760 - DNA, 15 bp, Homo sapiens
cccttccctcggctc

SEQ ID NO: 745761 - DNA, 15 bp, Homo sapiens
ccttccctcggctct

SEQ ID NO: 745762 - DNA, 15 bp, Homo sapiens
cttccctcggctctc

SEQ ID NO: 745763 - DNA, 15 bp, Homo sapiens
ttccctcggctctcc

SEQ ID NO: 745764 - DNA, 15 bp, Homo sapiens
tccctcggctctccc

SEQ ID NO: 745765 - DNA, 15 bp, Homo sapiens
ccctcggctctcccg

SEQ ID NO: 745766 - DNA, 15 bp, Homo sapiens
cctcggctctcccgg

SEQ ID NO: 745767 - DNA, 15 bp, Homo sapiens
ctcggctctcccggt

SEQ ID NO: 745768 - DNA, 15 bp, Homo sapiens
tcggctctcccggtg

SEQ ID NO: 745769 - DNA, 15 bp, Homo sapiens
cggctctcccggtgc

SEQ ID NO: 745770 - DNA, 15 bp, Homo sapiens
ggctctcccggtgct

SEQ ID NO: 745771 - DNA, 15 bp, Homo sapiens
gctctcccggtgctc

SEQ ID NO: 745772 - DNA, 15 bp, Homo sapiens
ctctcccggtgctct

SEQ ID NO: 745773 - DNA, 15 bp, Homo sapiens
tctcccggtgctctc

SEQ ID NO: 745774 - DNA, 15 bp, Homo sapiens
ctcccggtgctctcg

SEQ ID NO: 745775 - DNA, 15 bp, Homo sapiens
tcccggtgctctcgg

SEQ ID NO: 745776 - DNA, 15 bp, Homo sapiens
cccggtgctctcgga

SEQ ID NO: 745777 - DNA, 15 bp, Homo sapiens
ccggtgctctcggat

SEQ ID NO: 745778 - DNA, 15 bp, Homo sapiens
cggtgctctcggatc

SEQ ID NO: 745779 - DNA, 15 bp, Homo sapiens
ggtgctctcggatcg

SEQ ID NO: 745780 - DNA, 15 bp, Homo sapiens
gtgctctcggatcgg

SEQ ID NO: 745781 - DNA, 15 bp, Homo sapiens
tgctctcggatcggg

SEQ ID NO: 745782 - DNA, 15 bp, Homo sapiens
gctctcggatcgggg

SEQ ID NO: 745783 - DNA, 15 bp, Homo sapiens
ctctcggatcggggc

SEQ ID NO: 745784 - DNA, 15 bp, Homo sapiens
tctcggatcggggca

SEQ ID NO: 745785 - DNA, 15 bp, Homo sapiens
ctcggatcggggcag

SEQ ID NO: 745786 - DNA, 15 bp, Homo sapiens
tcggatcggggcagc

SEQ ID NO: 745787 - DNA, 15 bp, Homo sapiens
cggatcggggcagcg

SEQ ID NO: 745788 - DNA, 15 bp, Homo sapiens
ggatcggggcagcgg

SEQ ID NO: 745789 - DNA, 15 bp, Homo sapiens
gatcggggcagcggg

SEQ ID NO: 745790 - DNA, 15 bp, Homo sapiens
atcggggcagcgggc

SEQ ID NO: 745791 - DNA, 15 bp, Homo sapiens
tcggggcagcgggcg

SEQ ID NO: 745792 - DNA, 15 bp, Homo sapiens
cggggcagcgggcgg

SEQ ID NO: 745793 - DNA, 15 bp, Homo sapiens
ggggcagcgggcggc

SEQ ID NO: 745794 - DNA, 15 bp, Homo sapiens
gggcagcgggcggcg

SEQ ID NO: 745795 - DNA, 15 bp, Homo sapiens
ggcagcgggcggcgc

SEQ ID NO: 745796 - DNA, 15 bp, Homo sapiens
gcagcgggcggcgcg

SEQ ID NO: 745797 - DNA, 15 bp, Homo sapiens
cagcgggcggcgcgc

SEQ ID NO: 745798 - DNA, 15 bp, Homo sapiens
agcgggcggcgcgcc

SEQ ID NO: 745799 - DNA, 15 bp, Homo sapiens
gcgggcggcgcgccg

SEQ ID NO: 745800 - DNA, 15 bp, Homo sapiens
cgggcggcgcgccgg

SEQ ID NO: 745801 - DNA, 15 bp, Homo sapiens
gggcggcgcgccggg

SEQ ID NO: 745802 - DNA, 15 bp, Homo sapiens
ggcggcgcgccgggg

SEQ ID NO: 745803 - DNA, 15 bp, Homo sapiens
gcggcgcgccggggg

SEQ ID NO: 745804 - DNA, 15 bp, Homo sapiens
cggcgcgccgggggt

SEQ ID NO: 745805 - DNA, 15 bp, Homo sapiens
ggcgcgccgggggtg

SEQ ID NO: 745806 - DNA, 15 bp, Homo sapiens
gcgcgccgggggtga

SEQ ID NO: 745807 - DNA, 15 bp, Homo sapiens
cgcgccgggggtgag

SEQ ID NO: 745808 - DNA, 15 bp, Homo sapiens
gcgccgggggtgagg

SEQ ID NO: 745809 - DNA, 15 bp, Homo sapiens
cgccgggggtgagga

SEQ ID NO: 745810 - DNA, 15 bp, Homo sapiens
gccgggggtgaggag

SEQ ID NO: 745811 - DNA, 15 bp, Homo sapiens
ccgggggtgaggagt

SEQ ID NO: 745812 - DNA, 15 bp, Homo sapiens
cgggggtgaggagtt

SEQ ID NO: 745813 - DNA, 15 bp, Homo sapiens
gggggtgaggagttg

SEQ ID NO: 745814 - DNA, 15 bp, Homo sapiens
ggggtgaggagttgc

SEQ ID NO: 745815 - DNA, 15 bp, Homo sapiens
gggtgaggagttgcc

SEQ ID NO: 745816 - DNA, 15 bp, Homo sapiens
ggtgaggagttgccc

SEQ ID NO: 745817 - DNA, 15 bp, Homo sapiens
gtgaggagttgcccc

SEQ ID NO: 745818 - DNA, 15 bp, Homo sapiens
tgaggagttgccccc

SEQ ID NO: 745819 - DNA, 15 bp, Homo sapiens
gaggagttgccccca

SEQ ID NO: 745820 - DNA, 15 bp, Homo sapiens
aggagttgcccccag

SEQ ID NO: 745821 - DNA, 15 bp, Homo sapiens
ggagttgcccccagc

SEQ ID NO: 745822 - DNA, 15 bp, Homo sapiens
gagttgcccccagcc

SEQ ID NO: 745823 - DNA, 15 bp, Homo sapiens
agttgcccccagcca

SEQ ID NO: 745824 - DNA, 15 bp, Homo sapiens
gttgcccccagccag

SEQ ID NO: 745825 - DNA, 15 bp, Homo sapiens
ttgcccccagccagt

SEQ ID NO: 745826 - DNA, 15 bp, Homo sapiens
tgcccccagccagtg

SEQ ID NO: 745827 - DNA, 15 bp, Homo sapiens
gcccccagccagtgc

SEQ ID NO: 745828 - DNA, 15 bp, Homo sapiens
cccccagccagtgcg

SEQ ID NO: 745829 - DNA, 15 bp, Homo sapiens
ccccagccagtgcgc

SEQ ID NO: 745830 - DNA, 15 bp, Homo sapiens
cccagccagtgcgct

SEQ ID NO: 745831 - DNA, 15 bp, Homo sapiens
ccagccagtgcgctc

SEQ ID NO: 745832 - DNA, 15 bp, Homo sapiens
cagccagtgcgctcc

SEQ ID NO: 745833 - DNA, 15 bp, Homo sapiens
agccagtgcgctccg

SEQ ID NO: 745834 - DNA, 15 bp, Homo sapiens
gccagtgcgctccgg

SEQ ID NO: 745835 - DNA, 15 bp, Homo sapiens
ccagtgcgctccggg

SEQ ID NO: 745836 - DNA, 15 bp, Homo sapiens
cagtgcgctccggga

SEQ ID NO: 745837 - DNA, 15 bp, Homo sapiens
agtgcgctccgggac

SEQ ID NO: 745838 - DNA, 15 bp, Homo sapiens
gtgcgctccgggacg

SEQ ID NO: 745839 - DNA, 15 bp, Homo sapiens
tgcgctccgggacgc

SEQ ID NO: 745840 - DNA, 15 bp, Homo sapiens
gcgctccgggacgcg

SEQ ID NO: 745841 - DNA, 15 bp, Homo sapiens
cgctccgggacgcgg

SEQ ID NO: 745842 - DNA, 15 bp, Homo sapiens
gctccgggacgcgga

SEQ ID NO: 745843 - DNA, 15 bp, Homo sapiens
ctccgggacgcggac

SEQ ID NO: 745844 - DNA, 15 bp, Homo sapiens
tccgggacgcggacg

SEQ ID NO: 745845 - DNA, 15 bp, Homo sapiens
ccgggacgcggacgc

SEQ ID NO: 745846 - DNA, 15 bp, Homo sapiens
cgggacgcggacgct

SEQ ID NO: 745847 - DNA, 15 bp, Homo sapiens
gggacgcggacgctc

SEQ ID NO: 745848 - DNA, 15 bp, Homo sapiens
ggacgcggacgctca

SEQ ID NO: 745849 - DNA, 15 bp, Homo sapiens
gacgcggacgctcaa

SEQ ID NO: 745850 - DNA, 15 bp, Homo sapiens
acgcggacgctcaat

SEQ ID NO: 745851 - DNA, 15 bp, Homo sapiens
cgcggacgctcaatc

SEQ ID NO: 745852 - DNA, 15 bp, Homo sapiens
gcggacgctcaatcc

SEQ ID NO: 745853 - DNA, 15 bp, Homo sapiens
cggacgctcaatcct

SEQ ID NO: 745854 - DNA, 15 bp, Homo sapiens
ggacgctcaatcctg

SEQ ID NO: 745855 - DNA, 15 bp, Homo sapiens
gacgctcaatcctgt

SEQ ID NO: 745856 - DNA, 15 bp, Homo sapiens
acgctcaatcctgtc

SEQ ID NO: 745857 - DNA, 15 bp, Homo sapiens
cgctcaatcctgtcc

SEQ ID NO: 745858 - DNA, 15 bp, Homo sapiens
gctcaatcctgtcct

SEQ ID NO: 745859 - DNA, 15 bp, Homo sapiens
ctcaatcctgtcctc

SEQ ID NO: 745860 - DNA, 15 bp, Homo sapiens
tcaatcctgtcctct

SEQ ID NO: 745861 - DNA, 15 bp, Homo sapiens
caatcctgtcctctt

SEQ ID NO: 745862 - DNA, 15 bp, Homo sapiens
aatcctgtcctcttg

SEQ ID NO: 745863 - DNA, 15 bp, Homo sapiens
atcctgtcctcttgt

SEQ ID NO: 745864 - DNA, 15 bp, Homo sapiens
tcctgtcctcttgtt

SEQ ID NO: 745865 - DNA, 15 bp, Homo sapiens
cctgtcctcttgttt

SEQ ID NO: 745866 - DNA, 15 bp, Homo sapiens
ctgtcctcttgttta

SEQ ID NO: 745867 - DNA, 15 bp, Homo sapiens
tgtcctcttgtttat

SEQ ID NO: 745868 - DNA, 15 bp, Homo sapiens
gtcctcttgtttatt

SEQ ID NO: 745869 - DNA, 15 bp, Homo sapiens
tcctcttgtttattg

SEQ ID NO: 745870 - DNA, 15 bp, Homo sapiens
cctcttgtttattgt

SEQ ID NO: 745871 - DNA, 15 bp, Homo sapiens
ctcttgtttattgta

SEQ ID NO: 745872 - DNA, 15 bp, Homo sapiens
tcttgtttattgtag

SEQ ID NO: 745873 - DNA, 15 bp, Homo sapiens
cttgtttattgtagg

SEQ ID NO: 745874 - DNA, 15 bp, Homo sapiens
ttgtttattgtaggg

SEQ ID NO: 745875 - DNA, 15 bp, Homo sapiens
tgtttattgtagggt

SEQ ID NO: 745876 - DNA, 15 bp, Homo sapiens
gtttattgtagggtt

SEQ ID NO: 745877 - DNA, 15 bp, Homo sapiens
tttattgtagggttg

SEQ ID NO: 745878 - DNA, 15 bp, Homo sapiens
ttattgtagggttgt

SEQ ID NO: 745879 - DNA, 15 bp, Homo sapiens
tattgtagggttgtt

SEQ ID NO: 745880 - DNA, 15 bp, Homo sapiens
attgtagggttgttg

SEQ ID NO: 745881 - DNA, 15 bp, Homo sapiens
ttgtagggttgttgg

SEQ ID NO: 745882 - DNA, 15 bp, Homo sapiens
tgtagggttgttggc

SEQ ID NO: 745883 - DNA, 15 bp, Homo sapiens
gtagggttgttggcg

SEQ ID NO: 745884 - DNA, 15 bp, Homo sapiens
tagggttgttggcgg

SEQ ID NO: 745885 - DNA, 15 bp, Homo sapiens
agggttgttggcggc

SEQ ID NO: 745886 - DNA, 15 bp, Homo sapiens
gggttgttggcggct

SEQ ID NO: 745887 - DNA, 15 bp, Homo sapiens
ggttgttggcggctg

SEQ ID NO: 745888 - DNA, 15 bp, Homo sapiens
gttgttggcggctgc

SEQ ID NO: 745889 - DNA, 15 bp, Homo sapiens
ttgttggcggctgcg

SEQ ID NO: 745890 - DNA, 15 bp, Homo sapiens
tgttggcggctgcgg

SEQ ID NO: 745891 - DNA, 15 bp, Homo sapiens
gttggcggctgcggc

SEQ ID NO: 745892 - DNA, 15 bp, Homo sapiens
ttggcggctgcggct

SEQ ID NO: 745893 - DNA, 15 bp, Homo sapiens
tggcggctgcggctg

SEQ ID NO: 745894 - DNA, 15 bp, Homo sapiens
ggcggctgcggctgg

SEQ ID NO: 745895 - DNA, 15 bp, Homo sapiens
gcggctgcggctggg

SEQ ID NO: 745896 - DNA, 15 bp, Homo sapiens
cggctgcggctgggg

SEQ ID NO: 745897 - DNA, 15 bp, Homo sapiens
ggctgcggctggggc

SEQ ID NO: 745898 - DNA, 15 bp, Homo sapiens
gctgcggctggggcc

SEQ ID NO: 745899 - DNA, 15 bp, Homo sapiens
ctgcggctggggccg

SEQ ID NO: 745900 - DNA, 15 bp, Homo sapiens
tgcggctggggccgg

SEQ ID NO: 745901 - DNA, 15 bp, Homo sapiens
gcggctggggccggg

SEQ ID NO: 745902 - DNA, 15 bp, Homo sapiens
cggctggggccgggg

SEQ ID NO: 745903 - DNA, 15 bp, Homo sapiens
ggctggggccggggt

SEQ ID NO: 745904 - DNA, 15 bp, Homo sapiens
gctggggccggggtc

SEQ ID NO: 745905 - DNA, 15 bp, Homo sapiens
ctggggccggggtcg

SEQ ID NO: 745906 - DNA, 15 bp, Homo sapiens
tggggccggggtcgg

SEQ ID NO: 745907 - DNA, 15 bp, Homo sapiens
ggggccggggtcggg

SEQ ID NO: 745908 - DNA, 15 bp, Homo sapiens
gggccggggtcgggg

SEQ ID NO: 745909 - DNA, 15 bp, Homo sapiens
ggccggggtcgggga

SEQ ID NO: 745910 - DNA, 15 bp, Homo sapiens
gccggggtcggggac

SEQ ID NO: 745911 - DNA, 15 bp, Homo sapiens
ccggggtcggggact

SEQ ID NO: 745912 - DNA, 15 bp, Homo sapiens
cggggtcggggactc

SEQ ID NO: 745913 - DNA, 15 bp, Homo sapiens
ggggtcggggactca

SEQ ID NO: 745914 - DNA, 15 bp, Homo sapiens
gggtcggggactcac

SEQ ID NO: 745915 - DNA, 15 bp, Homo sapiens
ggtcggggactcaca

SEQ ID NO: 745916 - DNA, 15 bp, Homo sapiens
gtcggggactcacag

SEQ ID NO: 745917 - DNA, 15 bp, Homo sapiens
tcggggactcacagg

SEQ ID NO: 745918 - DNA, 15 bp, Homo sapiens
cggggactcacaggc

SEQ ID NO: 745919 - DNA, 15 bp, Homo sapiens
ggggactcacaggct

SEQ ID NO: 745920 - DNA, 15 bp, Homo sapiens
gggactcacaggctc

SEQ ID NO: 745921 - DNA, 15 bp, Homo sapiens
ggactcacaggctcg

SEQ ID NO: 745922 - DNA, 15 bp, Homo sapiens
gactcacaggctcgg

SEQ ID NO: 745923 - DNA, 15 bp, Homo sapiens
actcacaggctcggg

SEQ ID NO: 745924 - DNA, 15 bp, Homo sapiens
ctcacaggctcgggt

SEQ ID NO: 745925 - DNA, 15 bp, Homo sapiens
tcacaggctcgggtg

SEQ ID NO: 745926 - DNA, 15 bp, Homo sapiens
cacaggctcgggtgc

SEQ ID NO: 745927 - DNA, 15 bp, Homo sapiens
acaggctcgggtgcc

SEQ ID NO: 745928 - DNA, 15 bp, Homo sapiens
caggctcgggtgccg

SEQ ID NO: 745929 - DNA, 15 bp, Homo sapiens
aggctcgggtgccgt

SEQ ID NO: 745930 - DNA, 15 bp, Homo sapiens
ggctcgggtgccgtg

SEQ ID NO: 745931 - DNA, 15 bp, Homo sapiens
gctcgggtgccgtgg

SEQ ID NO: 745932 - DNA, 15 bp, Homo sapiens
ctcgggtgccgtggt

SEQ ID NO: 745933 - DNA, 15 bp, Homo sapiens
tcgggtgccgtggtg

SEQ ID NO: 745934 - DNA, 15 bp, Homo sapiens
cgggtgccgtggtgc

SEQ ID NO: 745935 - DNA, 15 bp, Homo sapiens
gggtgccgtggtgcg

SEQ ID NO: 745936 - DNA, 15 bp, Homo sapiens
ggtgccgtggtgcgg

SEQ ID NO: 745937 - DNA, 15 bp, Homo sapiens
gtgccgtggtgcggg

SEQ ID NO: 745938 - DNA, 15 bp, Homo sapiens
tgccgtggtgcgggg

SEQ ID NO: 745939 - DNA, 15 bp, Homo sapiens
gccgtggtgcggggt

SEQ ID NO: 745940 - DNA, 15 bp, Homo sapiens
ccgtggtgcggggtg

SEQ ID NO: 745941 - DNA, 15 bp, Homo sapiens
cgtggtgcggggtgg

SEQ ID NO: 745942 - DNA, 15 bp, Homo sapiens
gtggtgcggggtggg

SEQ ID NO: 745943 - DNA, 15 bp, Homo sapiens
tggtgcggggtgggg

SEQ ID NO: 745944 - DNA, 15 bp, Homo sapiens
ggtgcggggtgggga

SEQ ID NO: 745945 - DNA, 15 bp, Homo sapiens
gtgcggggtggggac

SEQ ID NO: 745946 - DNA, 15 bp, Homo sapiens
tgcggggtggggaca

SEQ ID NO: 745947 - DNA, 15 bp, Homo sapiens
gcggggtggggacag

SEQ ID NO: 745948 - DNA, 15 bp, Homo sapiens
cggggtggggacagc

SEQ ID NO: 745949 - DNA, 15 bp, Homo sapiens
ggggtggggacagcc

SEQ ID NO: 745950 - DNA, 15 bp, Homo sapiens
gggtggggacagcca

SEQ ID NO: 745951 - DNA, 15 bp, Homo sapiens
ggtggggacagccaa

SEQ ID NO: 745952 - DNA, 15 bp, Homo sapiens
gtggggacagccaac

SEQ ID NO: 745953 - DNA, 15 bp, Homo sapiens
tggggacagccaact

SEQ ID NO: 745954 - DNA, 15 bp, Homo sapiens
ggggacagccaactc

SEQ ID NO: 745955 - DNA, 15 bp, Homo sapiens
gggacagccaactca

SEQ ID NO: 745956 - DNA, 15 bp, Homo sapiens
ggacagccaactcag

SEQ ID NO: 745957 - DNA, 15 bp, Homo sapiens
gacagccaactcagc

SEQ ID NO: 745958 - DNA, 15 bp, Homo sapiens
acagccaactcagcg

SEQ ID NO: 745959 - DNA, 15 bp, Homo sapiens
cagccaactcagcgg

SEQ ID NO: 745960 - DNA, 15 bp, Homo sapiens
agccaactcagcggg

SEQ ID NO: 745961 - DNA, 15 bp, Homo sapiens
gccaactcagcgggg

SEQ ID NO: 745962 - DNA, 15 bp, Homo sapiens
ccaactcagcgggga

SEQ ID NO: 745963 - DNA, 15 bp, Homo sapiens
caactcagcggggac

SEQ ID NO: 745964 - DNA, 15 bp, Homo sapiens
aactcagcggggacg

SEQ ID NO: 745965 - DNA, 15 bp, Homo sapiens
actcagcggggacgg

SEQ ID NO: 745966 - DNA, 15 bp, Homo sapiens
ctcagcggggacgga

SEQ ID NO: 745967 - DNA, 15 bp, Homo sapiens
tcagcggggacggag

SEQ ID NO: 745968 - DNA, 15 bp, Homo sapiens
cagcggggacggagg

SEQ ID NO: 745969 - DNA, 15 bp, Homo sapiens
agcggggacggagga

SEQ ID NO: 745970 - DNA, 15 bp, Homo sapiens
gcggggacggaggaa

SEQ ID NO: 745971 - DNA, 15 bp, Homo sapiens
cggggacggaggaag

SEQ ID NO: 745972 - DNA, 15 bp, Homo sapiens
ggggacggaggaagc

SEQ ID NO: 745973 - DNA, 15 bp, Homo sapiens
gggacggaggaagct

SEQ ID NO: 745974 - DNA, 15 bp, Homo sapiens
ggacggaggaagctg

SEQ ID NO: 745975 - DNA, 15 bp, Homo sapiens
gacggaggaagctgg

SEQ ID NO: 745976 - DNA, 15 bp, Homo sapiens
acggaggaagctggg

SEQ ID NO: 745977 - DNA, 15 bp, Homo sapiens
cggaggaagctgggg

SEQ ID NO: 745978 - DNA, 15 bp, Homo sapiens
ggaggaagctggggg

SEQ ID NO: 745979 - DNA, 15 bp, Homo sapiens
gaggaagctgggggc

SEQ ID NO: 745980 - DNA, 15 bp, Homo sapiens
aggaagctgggggca

SEQ ID NO: 745981 - DNA, 15 bp, Homo sapiens
ggaagctgggggcag

SEQ ID NO: 745982 - DNA, 15 bp, Homo sapiens
gaagctgggggcagc

SEQ ID NO: 745983 - DNA, 15 bp, Homo sapiens
aagctgggggcagct

SEQ ID NO: 745984 - DNA, 15 bp, Homo sapiens
agctgggggcagctg

SEQ ID NO: 745985 - DNA, 15 bp, Homo sapiens
gctgggggcagctgg

SEQ ID NO: 745986 - DNA, 15 bp, Homo sapiens
ctgggggcagctggg

SEQ ID NO: 745987 - DNA, 15 bp, Homo sapiens
tgggggcagctgggt

SEQ ID NO: 745988 - DNA, 15 bp, Homo sapiens
gggggcagctgggtg

SEQ ID NO: 745989 - DNA, 15 bp, Homo sapiens
ggggcagctgggtgc

SEQ ID NO: 745990 - DNA, 15 bp, Homo sapiens
gggcagctgggtgcg

SEQ ID NO: 745991 - DNA, 15 bp, Homo sapiens
ggcagctgggtgcgt

SEQ ID NO: 745992 - DNA, 15 bp, Homo sapiens
gcagctgggtgcgtg

SEQ ID NO: 745993 - DNA, 15 bp, Homo sapiens
cagctgggtgcgtgt

SEQ ID NO: 745994 - DNA, 15 bp, Homo sapiens
agctgggtgcgtgtt

SEQ ID NO: 745995 - DNA, 15 bp, Homo sapiens
gctgggtgcgtgttt

SEQ ID NO: 745996 - DNA, 15 bp, Homo sapiens
ctgggtgcgtgtttt

SEQ ID NO: 745997 - DNA, 15 bp, Homo sapiens
tgggtgcgtgttttg

SEQ ID NO: 745998 - DNA, 15 bp, Homo sapiens
gggtgcgtgttttgc

SEQ ID NO: 745999 - DNA, 15 bp, Homo sapiens
ggtgcgtgttttgca

SEQ ID NO: 746000 - DNA, 15 bp, Homo sapiens
gtgcgtgttttgcac

SEQ ID NO: 746001 - DNA, 15 bp, Homo sapiens
tgcgtgttttgcacc

SEQ ID NO: 746002 - DNA, 15 bp, Homo sapiens
gcgtgttttgcaccg

SEQ ID NO: 746003 - DNA, 15 bp, Homo sapiens
cgtgttttgcaccgc

SEQ ID NO: 746004 - DNA, 15 bp, Homo sapiens
gtgttttgcaccgct

SEQ ID NO: 746005 - DNA, 15 bp, Homo sapiens
tgttttgcaccgctc

SEQ ID NO: 746006 - DNA, 15 bp, Homo sapiens
gttttgcaccgctca

SEQ ID NO: 746007 - DNA, 15 bp, Homo sapiens
ttttgcaccgctcac

SEQ ID NO: 746008 - DNA, 15 bp, Homo sapiens
tttgcaccgctcacc

SEQ ID NO: 746009 - DNA, 15 bp, Homo sapiens
ttgcaccgctcacct

SEQ ID NO: 746010 - DNA, 15 bp, Homo sapiens
tgcaccgctcacctg

SEQ ID NO: 746011 - DNA, 15 bp, Homo sapiens
gcaccgctcacctgc

SEQ ID NO: 746012 - DNA, 15 bp, Homo sapiens
caccgctcacctgcc

SEQ ID NO: 746013 - DNA, 15 bp, Homo sapiens
accgctcacctgccg

SEQ ID NO: 746014 - DNA, 15 bp, Homo sapiens
ccgctcacctgccgg

SEQ ID NO: 746015 - DNA, 15 bp, Homo sapiens
cgctcacctgccggg

SEQ ID NO: 746016 - DNA, 15 bp, Homo sapiens
gctcacctgccgggg

SEQ ID NO: 746017 - DNA, 15 bp, Homo sapiens
ctcacctgccggggc

SEQ ID NO: 746018 - DNA, 15 bp, Homo sapiens
tcacctgccggggct

SEQ ID NO: 746019 - DNA, 15 bp, Homo sapiens
cacctgccggggctc

SEQ ID NO: 746020 - DNA, 15 bp, Homo sapiens
acctgccggggctcg

SEQ ID NO: 746021 - DNA, 15 bp, Homo sapiens
cctgccggggctcgg

SEQ ID NO: 746022 - DNA, 15 bp, Homo sapiens
ctgccggggctcggc

SEQ ID NO: 746023 - DNA, 15 bp, Homo sapiens
tgccggggctcggct

SEQ ID NO: 746024 - DNA, 15 bp, Homo sapiens
gccggggctcggctc

SEQ ID NO: 746025 - DNA, 15 bp, Homo sapiens
ccggggctcggctcc

SEQ ID NO: 746026 - DNA, 15 bp, Homo sapiens
cggggctcggctcct

SEQ ID NO: 746027 - DNA, 15 bp, Homo sapiens
ggggctcggctcctg

SEQ ID NO: 746028 - DNA, 15 bp, Homo sapiens
gggctcggctcctgg

SEQ ID NO: 746029 - DNA, 15 bp, Homo sapiens
ggctcggctcctggc

SEQ ID NO: 746030 - DNA, 15 bp, Homo sapiens
gctcggctcctggcg

SEQ ID NO: 746031 - DNA, 15 bp, Homo sapiens
ctcggctcctggcgg

SEQ ID NO: 746032 - DNA, 15 bp, Homo sapiens
tcggctcctggcggt

SEQ ID NO: 746033 - DNA, 15 bp, Homo sapiens
cggctcctggcggtg

SEQ ID NO: 746034 - DNA, 15 bp, Homo sapiens
ggctcctggcggtgg

SEQ ID NO: 746035 - DNA, 15 bp, Homo sapiens
gctcctggcggtggg

SEQ ID NO: 746036 - DNA, 15 bp, Homo sapiens
ctcctggcggtgggc

SEQ ID NO: 746037 - DNA, 15 bp, Homo sapiens
tcctggcggtgggcg

SEQ ID NO: 746038 - DNA, 15 bp, Homo sapiens
cctggcggtgggcga

SEQ ID NO: 746039 - DNA, 15 bp, Homo sapiens
ctggcggtgggcgag

SEQ ID NO: 746040 - DNA, 15 bp, Homo sapiens
tggcggtgggcgaga

SEQ ID NO: 746041 - DNA, 15 bp, Homo sapiens
ggcggtgggcgagag

SEQ ID NO: 746042 - DNA, 15 bp, Homo sapiens
gcggtgggcgagagg

SEQ ID NO: 746043 - DNA, 15 bp, Homo sapiens
cggtgggcgagaggg

SEQ ID NO: 746044 - DNA, 15 bp, Homo sapiens
ggtgggcgagaggga

SEQ ID NO: 746045 - DNA, 15 bp, Homo sapiens
gtgggcgagagggag

SEQ ID NO: 746046 - DNA, 15 bp, Homo sapiens
tgggcgagagggagc

SEQ ID NO: 746047 - DNA, 15 bp, Homo sapiens
gggcgagagggagca

SEQ ID NO: 746048 - DNA, 15 bp, Homo sapiens
ggcgagagggagcac

SEQ ID NO: 746049 - DNA, 15 bp, Homo sapiens
gcgagagggagcaca

SEQ ID NO: 746050 - DNA, 15 bp, Homo sapiens
cgagagggagcacat

SEQ ID NO: 746051 - DNA, 15 bp, Homo sapiens
gagagggagcacatc

SEQ ID NO: 746052 - DNA, 15 bp, Homo sapiens
agagggagcacatcc

SEQ ID NO: 746053 - DNA, 15 bp, Homo sapiens
gagggagcacatccg

SEQ ID NO: 746054 - DNA, 15 bp, Homo sapiens
agggagcacatccgc

SEQ ID NO: 746055 - DNA, 15 bp, Homo sapiens
gggagcacatccgcc

SEQ ID NO: 746056 - DNA, 15 bp, Homo sapiens
ggagcacatccgccc

SEQ ID NO: 746057 - DNA, 15 bp, Homo sapiens
gagcacatccgccca

SEQ ID NO: 746058 - DNA, 15 bp, Homo sapiens
agcacatccgcccat

SEQ ID NO: 746059 - DNA, 15 bp, Homo sapiens
gcacatccgcccata

SEQ ID NO: 746060 - DNA, 15 bp, Homo sapiens
cacatccgcccatac

SEQ ID NO: 746061 - DNA, 15 bp, Homo sapiens
acatccgcccatact

SEQ ID NO: 746062 - DNA, 15 bp, Homo sapiens
catccgcccatactt

SEQ ID NO: 746063 - DNA, 15 bp, Homo sapiens
atccgcccatacttt

SEQ ID NO: 746064 - DNA, 15 bp, Homo sapiens
tccgcccatacttta

SEQ ID NO: 746065 - DNA, 15 bp, Homo sapiens
ccgcccatactttag

SEQ ID NO: 746066 - DNA, 15 bp, Homo sapiens
cgcccatactttagg

SEQ ID NO: 746067 - DNA, 15 bp, Homo sapiens
gcccatactttagga

SEQ ID NO: 746068 - DNA, 15 bp, Homo sapiens
cccatactttaggaa

SEQ ID NO: 746069 - DNA, 15 bp, Homo sapiens
ccatactttaggaac

SEQ ID NO: 746070 - DNA, 15 bp, Homo sapiens
catactttaggaacc

SEQ ID NO: 746071 - DNA, 15 bp, Homo sapiens
atactttaggaacct

SEQ ID NO: 746072 - DNA, 15 bp, Homo sapiens
tactttaggaacctg

SEQ ID NO: 746073 - DNA, 15 bp, Homo sapiens
actttaggaacctgt

SEQ ID NO: 746074 - DNA, 15 bp, Homo sapiens
ctttaggaacctgtt

SEQ ID NO: 746075 - DNA, 15 bp, Homo sapiens
tttaggaacctgttg

SEQ ID NO: 746076 - DNA, 15 bp, Homo sapiens
ttaggaacctgttgg

SEQ ID NO: 746077 - DNA, 15 bp, Homo sapiens
taggaacctgttggg

SEQ ID NO: 746078 - DNA, 15 bp, Homo sapiens
aggaacctgttgggg

SEQ ID NO: 746079 - DNA, 15 bp, Homo sapiens
ggaacctgttgggga

SEQ ID NO: 746080 - DNA, 15 bp, Homo sapiens
gaacctgttggggag

SEQ ID NO: 746081 - DNA, 15 bp, Homo sapiens
aacctgttggggaga

SEQ ID NO: 746082 - DNA, 15 bp, Homo sapiens
acctgttggggagat

SEQ ID NO: 746083 - DNA, 15 bp, Homo sapiens
cctgttggggagatg

SEQ ID NO: 746084 - DNA, 15 bp, Homo sapiens
ctgttggggagatga

SEQ ID NO: 746085 - DNA, 15 bp, Homo sapiens
tgttggggagatgag

SEQ ID NO: 746086 - DNA, 15 bp, Homo sapiens
gttggggagatgagt

SEQ ID NO: 746087 - DNA, 15 bp, Homo sapiens
ttggggagatgagtt

SEQ ID NO: 746088 - DNA, 15 bp, Homo sapiens
tggggagatgagttc

SEQ ID NO: 746089 - DNA, 15 bp, Homo sapiens
ggggagatgagttcg

SEQ ID NO: 746090 - DNA, 15 bp, Homo sapiens
gggagatgagttcgt

SEQ ID NO: 746091 - DNA, 15 bp, Homo sapiens
ggagatgagttcgtg

SEQ ID NO: 746092 - DNA, 15 bp, Homo sapiens
gagatgagttcgtgg

SEQ ID NO: 746093 - DNA, 15 bp, Homo sapiens
agatgagttcgtggg

SEQ ID NO: 746094 - DNA, 15 bp, Homo sapiens
gatgagttcgtgggg

SEQ ID NO: 746095 - DNA, 15 bp, Homo sapiens
atgagttcgtggggt

SEQ ID NO: 746096 - DNA, 15 bp, Homo sapiens
tgagttcgtggggtc

SEQ ID NO: 746097 - DNA, 15 bp, Homo sapiens
gagttcgtggggtca

SEQ ID NO: 746098 - DNA, 15 bp, Homo sapiens
agttcgtggggtcag

SEQ ID NO: 746099 - DNA, 15 bp, Homo sapiens
gttcgtggggtcaga

SEQ ID NO: 746100 - DNA, 15 bp, Homo sapiens
ttcgtggggtcagaa

SEQ ID NO: 746101 - DNA, 15 bp, Homo sapiens
tcgtggggtcagaaa

SEQ ID NO: 746102 - DNA, 15 bp, Homo sapiens
cgtggggtcagaaag

SEQ ID NO: 746103 - DNA, 15 bp, Homo sapiens
gtggggtcagaaaga

SEQ ID NO: 746104 - DNA, 15 bp, Homo sapiens
tggggtcagaaagaa

SEQ ID NO: 746105 - DNA, 15 bp, Homo sapiens
ggggtcagaaagaag

SEQ ID NO: 746106 - DNA, 15 bp, Homo sapiens
gggtcagaaagaagg

SEQ ID NO: 746107 - DNA, 15 bp, Homo sapiens
ggtcagaaagaaggg

SEQ ID NO: 746108 - DNA, 15 bp, Homo sapiens
gtcagaaagaaggga

SEQ ID NO: 746109 - DNA, 15 bp, Homo sapiens
tcagaaagaagggaa

SEQ ID NO: 746110 - DNA, 15 bp, Homo sapiens
cagaaagaagggaaa

SEQ ID NO: 746111 - DNA, 15 bp, Homo sapiens
agaaagaagggaaaa

SEQ ID NO: 746112 - DNA, 15 bp, Homo sapiens
gaaagaagggaaaaa

SEQ ID NO: 746113 - DNA, 15 bp, Homo sapiens
aaagaagggaaaaat

SEQ ID NO: 746114 - DNA, 15 bp, Homo sapiens
aagaagggaaaaatc

SEQ ID NO: 746115 - DNA, 15 bp, Homo sapiens
agaagggaaaaatcc

SEQ ID NO: 746116 - DNA, 15 bp, Homo sapiens
gaagggaaaaatcct

SEQ ID NO: 746117 - DNA, 15 bp, Homo sapiens
aagggaaaaatcctt

SEQ ID NO: 746118 - DNA, 15 bp, Homo sapiens
agggaaaaatccttt

SEQ ID NO: 746119 - DNA, 15 bp, Homo sapiens
gggaaaaatcctttg

SEQ ID NO: 746120 - DNA, 15 bp, Homo sapiens
ggaaaaatcctttgg

SEQ ID NO: 746121 - DNA, 15 bp, Homo sapiens
gaaaaatcctttggg

SEQ ID NO: 746122 - DNA, 15 bp, Homo sapiens
aaaaatcctttgggc

SEQ ID NO: 746123 - DNA, 15 bp, Homo sapiens
aaaatcctttgggca

SEQ ID NO: 746124 - DNA, 15 bp, Homo sapiens
aaatcctttgggcaa

SEQ ID NO: 746125 - DNA, 15 bp, Homo sapiens
aatcctttgggcaag

SEQ ID NO: 746126 - DNA, 15 bp, Homo sapiens
atcctttgggcaagg

SEQ ID NO: 746127 - DNA, 15 bp, Homo sapiens
tcctttgggcaaggg

SEQ ID NO: 746128 - DNA, 15 bp, Homo sapiens
cctttgggcaaggga

SEQ ID NO: 746129 - DNA, 15 bp, Homo sapiens
ctttgggcaagggag

SEQ ID NO: 746130 - DNA, 15 bp, Homo sapiens
tttgggcaagggaga

SEQ ID NO: 746131 - DNA, 15 bp, Homo sapiens
ttgggcaagggagag

SEQ ID NO: 746132 - DNA, 15 bp, Homo sapiens
tgggcaagggagaga

SEQ ID NO: 746133 - DNA, 15 bp, Homo sapiens
gggcaagggagagaa

SEQ ID NO: 746134 - DNA, 15 bp, Homo sapiens
ggcaagggagagaat

SEQ ID NO: 746135 - DNA, 15 bp, Homo sapiens
gcaagggagagaata

SEQ ID NO: 746136 - DNA, 15 bp, Homo sapiens
caagggagagaataa

SEQ ID NO: 746137 - DNA, 15 bp, Homo sapiens
aagggagagaataat

SEQ ID NO: 746138 - DNA, 15 bp, Homo sapiens
agggagagaataatt

SEQ ID NO: 746139 - DNA, 15 bp, Homo sapiens
gggagagaataattt

SEQ ID NO: 746140 - DNA, 15 bp, Homo sapiens
ggagagaataatttt

SEQ ID NO: 746141 - DNA, 15 bp, Homo sapiens
gagagaataattttg

SEQ ID NO: 746142 - DNA, 15 bp, Homo sapiens
agagaataattttgc

SEQ ID NO: 746143 - DNA, 15 bp, Homo sapiens
gagaataattttgca

SEQ ID NO: 746144 - DNA, 15 bp, Homo sapiens
agaataattttgcac

SEQ ID NO: 746145 - DNA, 15 bp, Homo sapiens
gaataattttgcaca

SEQ ID NO: 746146 - DNA, 15 bp, Homo sapiens
aataattttgcacaa

SEQ ID NO: 746147 - DNA, 15 bp, Homo sapiens
ataattttgcacaag

SEQ ID NO: 746148 - DNA, 15 bp, Homo sapiens
taattttgcacaagg

SEQ ID NO: 746149 - DNA, 15 bp, Homo sapiens
aattttgcacaaggg

SEQ ID NO: 746150 - DNA, 15 bp, Homo sapiens
attttgcacaaggga

SEQ ID NO: 746151 - DNA, 15 bp, Homo sapiens
ttttgcacaagggaa

SEQ ID NO: 746152 - DNA, 15 bp, Homo sapiens
tttgcacaagggaat

SEQ ID NO: 746153 - DNA, 15 bp, Homo sapiens
ttgcacaagggaatc

SEQ ID NO: 746154 - DNA, 15 bp, Homo sapiens
tgcacaagggaatcc

SEQ ID NO: 746155 - DNA, 15 bp, Homo sapiens
gcacaagggaatccc

SEQ ID NO: 746156 - DNA, 15 bp, Homo sapiens
cacaagggaatcccg

SEQ ID NO: 746157 - DNA, 15 bp, Homo sapiens
acaagggaatcccgg

SEQ ID NO: 746158 - DNA, 15 bp, Homo sapiens
caagggaatcccggg

SEQ ID NO: 746159 - DNA, 15 bp, Homo sapiens
aagggaatcccgggg

SEQ ID NO: 746160 - DNA, 15 bp, Homo sapiens
agggaatcccggggg

SEQ ID NO: 746161 - DNA, 15 bp, Homo sapiens
gggaatcccggggga

SEQ ID NO: 746162 - DNA, 15 bp, Homo sapiens
ggaatcccgggggag

SEQ ID NO: 746163 - DNA, 15 bp, Homo sapiens
gaatcccgggggagg

SEQ ID NO: 746164 - DNA, 15 bp, Homo sapiens
aatcccgggggagga

SEQ ID NO: 746165 - DNA, 15 bp, Homo sapiens
atcccgggggaggag

SEQ ID NO: 746166 - DNA, 15 bp, Homo sapiens
tcccgggggaggagc

SEQ ID NO: 746167 - DNA, 15 bp, Homo sapiens
cccgggggaggagca

SEQ ID NO: 746168 - DNA, 15 bp, Homo sapiens
ccgggggaggagcat

SEQ ID NO: 746169 - DNA, 15 bp, Homo sapiens
cgggggaggagcatg

SEQ ID NO: 746170 - DNA, 15 bp, Homo sapiens
gggggaggagcatgg

SEQ ID NO: 746171 - DNA, 15 bp, Homo sapiens
ggggaggagcatggc

SEQ ID NO: 746172 - DNA, 15 bp, Homo sapiens
gggaggagcatggcc

SEQ ID NO: 746173 - DNA, 15 bp, Homo sapiens
ggaggagcatggccc

SEQ ID NO: 746174 - DNA, 15 bp, Homo sapiens
gaggagcatggcccg

SEQ ID NO: 746175 - DNA, 15 bp, Homo sapiens
aggagcatggcccga

SEQ ID NO: 746176 - DNA, 15 bp, Homo sapiens
ggagcatggcccgag

SEQ ID NO: 746177 - DNA, 15 bp, Homo sapiens
gagcatggcccgaga

SEQ ID NO: 746178 - DNA, 15 bp, Homo sapiens
agcatggcccgagat

SEQ ID NO: 746179 - DNA, 15 bp, Homo sapiens
gcatggcccgagata

SEQ ID NO: 746180 - DNA, 15 bp, Homo sapiens
catggcccgagataa

SEQ ID NO: 746181 - DNA, 15 bp, Homo sapiens
atggcccgagataac

SEQ ID NO: 746182 - DNA, 15 bp, Homo sapiens
tggcccgagataaca

SEQ ID NO: 746183 - DNA, 15 bp, Homo sapiens
ggcccgagataacag

SEQ ID NO: 746184 - DNA, 15 bp, Homo sapiens
gcccgagataacagg

SEQ ID NO: 746185 - DNA, 15 bp, Homo sapiens
cccgagataacaggg

SEQ ID NO: 746186 - DNA, 15 bp, Homo sapiens
ccgagataacagggg

SEQ ID NO: 746187 - DNA, 15 bp, Homo sapiens
cgagataacaggggg

SEQ ID NO: 746188 - DNA, 15 bp, Homo sapiens
gagataacaggggga

SEQ ID NO: 746189 - DNA, 15 bp, Homo sapiens
agataacagggggac

SEQ ID NO: 746190 - DNA, 15 bp, Homo sapiens
gataacagggggact

SEQ ID NO: 746191 - DNA, 15 bp, Homo sapiens
ataacagggggactt

SEQ ID NO: 746192 - DNA, 15 bp, Homo sapiens
taacagggggacttc

SEQ ID NO: 746193 - DNA, 15 bp, Homo sapiens
aacagggggacttcg

SEQ ID NO: 746194 - DNA, 15 bp, Homo sapiens
acagggggacttcga

SEQ ID NO: 746195 - DNA, 15 bp, Homo sapiens
cagggggacttcgag

SEQ ID NO: 746196 - DNA, 15 bp, Homo sapiens
agggggacttcgagg

SEQ ID NO: 746197 - DNA, 15 bp, Homo sapiens
gggggacttcgaggg

SEQ ID NO: 746198 - DNA, 15 bp, Homo sapiens
ggggacttcgagggg

SEQ ID NO: 746199 - DNA, 15 bp, Homo sapiens
gggacttcgaggggc

SEQ ID NO: 746200 - DNA, 15 bp, Homo sapiens
ggacttcgaggggcg

SEQ ID NO: 746201 - DNA, 15 bp, Homo sapiens
gacttcgaggggcga

SEQ ID NO: 746202 - DNA, 15 bp, Homo sapiens
acttcgaggggcgag

SEQ ID NO: 746203 - DNA, 15 bp, Homo sapiens
cttcgaggggcgaga

SEQ ID NO: 746204 - DNA, 15 bp, Homo sapiens
ttcgaggggcgagag

SEQ ID NO: 746205 - DNA, 15 bp, Homo sapiens
tcgaggggcgagaga

SEQ ID NO: 746206 - DNA, 15 bp, Homo sapiens
cgaggggcgagagaa

SEQ ID NO: 746207 - DNA, 15 bp, Homo sapiens
gaggggcgagagaag

SEQ ID NO: 746208 - DNA, 15 bp, Homo sapiens
aggggcgagagaagt

SEQ ID NO: 746209 - DNA, 15 bp, Homo sapiens
ggggcgagagaagtt

SEQ ID NO: 746210 - DNA, 15 bp, Homo sapiens
gggcgagagaagttg

SEQ ID NO: 746211 - DNA, 15 bp, Homo sapiens
ggcgagagaagttgg

SEQ ID NO: 746212 - DNA, 15 bp, Homo sapiens
gcgagagaagttggg

SEQ ID NO: 746213 - DNA, 15 bp, Homo sapiens
cgagagaagttgggg

SEQ ID NO: 746214 - DNA, 15 bp, Homo sapiens
gagagaagttgggga

SEQ ID NO: 746215 - DNA, 15 bp, Homo sapiens
agagaagttggggag

SEQ ID NO: 746216 - DNA, 15 bp, Homo sapiens
gagaagttggggaga

SEQ ID NO: 746217 - DNA, 15 bp, Homo sapiens
agaagttggggagat

SEQ ID NO: 746218 - DNA, 15 bp, Homo sapiens
gaagttggggagatc

SEQ ID NO: 746219 - DNA, 15 bp, Homo sapiens
aagttggggagatcc

SEQ ID NO: 746220 - DNA, 15 bp, Homo sapiens
agttggggagatcca

SEQ ID NO: 746221 - DNA, 15 bp, Homo sapiens
gttggggagatccat

SEQ ID NO: 746222 - DNA, 15 bp, Homo sapiens
ttggggagatccatc

SEQ ID NO: 746223 - DNA, 15 bp, Homo sapiens
tggggagatccatcc

SEQ ID NO: 746224 - DNA, 15 bp, Homo sapiens
ggggagatccatccc

SEQ ID NO: 746225 - DNA, 15 bp, Homo sapiens
gggagatccatccca

SEQ ID NO: 746226 - DNA, 15 bp, Homo sapiens
ggagatccatcccac

SEQ ID NO: 746227 - DNA, 15 bp, Homo sapiens
gagatccatcccact

SEQ ID NO: 746228 - DNA, 15 bp, Homo sapiens
agatccatcccacta

SEQ ID NO: 746229 - DNA, 15 bp, Homo sapiens
gatccatcccactat

SEQ ID NO: 746230 - DNA, 15 bp, Homo sapiens
atccatcccactatt

SEQ ID NO: 746231 - DNA, 15 bp, Homo sapiens
tccatcccactattg

SEQ ID NO: 746232 - DNA, 15 bp, Homo sapiens
ccatcccactattgg

SEQ ID NO: 746233 - DNA, 15 bp, Homo sapiens
catcccactattggg

SEQ ID NO: 746234 - DNA, 15 bp, Homo sapiens
atcccactattgggg

SEQ ID NO: 746235 - DNA, 15 bp, Homo sapiens
tcccactattggggg

SEQ ID NO: 746236 - DNA, 15 bp, Homo sapiens
cccactattgggggt

SEQ ID NO: 746237 - DNA, 15 bp, Homo sapiens
ccactattgggggta

SEQ ID NO: 746238 - DNA, 15 bp, Homo sapiens
cactattgggggtag

SEQ ID NO: 746239 - DNA, 15 bp, Homo sapiens
actattgggggtagc

SEQ ID NO: 746240 - DNA, 15 bp, Homo sapiens
ctattgggggtagcc

SEQ ID NO: 746241 - DNA, 15 bp, Homo sapiens
tattgggggtagccc

SEQ ID NO: 746242 - DNA, 15 bp, Homo sapiens
attgggggtagccca

SEQ ID NO: 746243 - DNA, 15 bp, Homo sapiens
ttgggggtagcccac

SEQ ID NO: 746244 - DNA, 15 bp, Homo sapiens
tgggggtagcccacg

SEQ ID NO: 746245 - DNA, 15 bp, Homo sapiens
gggggtagcccacgg

SEQ ID NO: 746246 - DNA, 15 bp, Homo sapiens
ggggtagcccacggg

SEQ ID NO: 746247 - DNA, 15 bp, Homo sapiens
gggtagcccacgggg

SEQ ID NO: 746248 - DNA, 15 bp, Homo sapiens
ggtagcccacggggc

SEQ ID NO: 746249 - DNA, 15 bp, Homo sapiens
gtagcccacggggct

SEQ ID NO: 746250 - DNA, 15 bp, Homo sapiens
tagcccacggggctg

SEQ ID NO: 746251 - DNA, 15 bp, Homo sapiens
agcccacggggctgc

SEQ ID NO: 746252 - DNA, 15 bp, Homo sapiens
gcccacggggctgcc

SEQ ID NO: 746253 - DNA, 15 bp, Homo sapiens
cccacggggctgcca

SEQ ID NO: 746254 - DNA, 15 bp, Homo sapiens
ccacggggctgccac

SEQ ID NO: 746255 - DNA, 15 bp, Homo sapiens
cacggggctgccact

SEQ ID NO: 746256 - DNA, 15 bp, Homo sapiens
acggggctgccactt

SEQ ID NO: 746257 - DNA, 15 bp, Homo sapiens
cggggctgccacttt

SEQ ID NO: 746258 - DNA, 15 bp, Homo sapiens
ggggctgccactttt

SEQ ID NO: 746259 - DNA, 15 bp, Homo sapiens
gggctgccacttttg

SEQ ID NO: 746260 - DNA, 15 bp, Homo sapiens
ggctgccacttttgg

SEQ ID NO: 746261 - DNA, 15 bp, Homo sapiens
gctgccacttttgga

SEQ ID NO: 746262 - DNA, 15 bp, Homo sapiens
ctgccacttttggaa

SEQ ID NO: 746263 - DNA, 15 bp, Homo sapiens
tgccacttttggaat

SEQ ID NO: 746264 - DNA, 15 bp, Homo sapiens
gccacttttggaatg

SEQ ID NO: 746265 - DNA, 15 bp, Homo sapiens
ccacttttggaatgt

SEQ ID NO: 746266 - DNA, 15 bp, Homo sapiens
cacttttggaatgtg

SEQ ID NO: 746267 - DNA, 15 bp, Homo sapiens
acttttggaatgtgt

SEQ ID NO: 746268 - DNA, 15 bp, Homo sapiens
cttttggaatgtgtc

SEQ ID NO: 746269 - DNA, 15 bp, Homo sapiens
ttttggaatgtgtcg

SEQ ID NO: 746270 - DNA, 15 bp, Homo sapiens
tttggaatgtgtcga

SEQ ID NO: 746271 - DNA, 15 bp, Homo sapiens
ttggaatgtgtcgag

SEQ ID NO: 746272 - DNA, 15 bp, Homo sapiens
tggaatgtgtcgagg

SEQ ID NO: 746273 - DNA, 15 bp, Homo sapiens
ggaatgtgtcgaggt

SEQ ID NO: 746274 - DNA, 15 bp, Homo sapiens
gaatgtgtcgaggtc

SEQ ID NO: 746275 - DNA, 15 bp, Homo sapiens
aatgtgtcgaggtcg

SEQ ID NO: 746276 - DNA, 15 bp, Homo sapiens
atgtgtcgaggtcgc

SEQ ID NO: 746277 - DNA, 15 bp, Homo sapiens
tgtgtcgaggtcgca

SEQ ID NO: 746278 - DNA, 15 bp, Homo sapiens
gtgtcgaggtcgcat

SEQ ID NO: 746279 - DNA, 15 bp, Homo sapiens
tgtcgaggtcgcata

SEQ ID NO: 746280 - DNA, 15 bp, Homo sapiens
gtcgaggtcgcatat

SEQ ID NO: 746281 - DNA, 15 bp, Homo sapiens
tcgaggtcgcatatc

SEQ ID NO: 746282 - DNA, 15 bp, Homo sapiens
cgaggtcgcatatct

SEQ ID NO: 746283 - DNA, 15 bp, Homo sapiens
gaggtcgcatatctg

SEQ ID NO: 746284 - DNA, 15 bp, Homo sapiens
aggtcgcatatctga

SEQ ID NO: 746285 - DNA, 15 bp, Homo sapiens
ggtcgcatatctgat

SEQ ID NO: 746286 - DNA, 15 bp, Homo sapiens
gtcgcatatctgatg

SEQ ID NO: 746287 - DNA, 15 bp, Homo sapiens
tcgcatatctgatgt

SEQ ID NO: 746288 - DNA, 15 bp, Homo sapiens
cgcatatctgatgta

SEQ ID NO: 746289 - DNA, 15 bp, Homo sapiens
gcatatctgatgtaa

SEQ ID NO: 746290 - DNA, 15 bp, Homo sapiens
catatctgatgtaac

SEQ ID NO: 746291 - DNA, 15 bp, Homo sapiens
atatctgatgtaacc

SEQ ID NO: 746292 - DNA, 15 bp, Homo sapiens
tatctgatgtaacct

SEQ ID NO: 746293 - DNA, 15 bp, Homo sapiens
atctgatgtaacctc

SEQ ID NO: 746294 - DNA, 15 bp, Homo sapiens
tctgatgtaacctcc

SEQ ID NO: 746295 - DNA, 15 bp, Homo sapiens
ctgatgtaacctccc

SEQ ID NO: 746296 - DNA, 15 bp, Homo sapiens
tgatgtaacctccca

SEQ ID NO: 746297 - DNA, 15 bp, Homo sapiens
gatgtaacctcccac

SEQ ID NO: 746298 - DNA, 15 bp, Homo sapiens
atgtaacctcccact

SEQ ID NO: 746299 - DNA, 15 bp, Homo sapiens
tgtaacctcccactc

SEQ ID NO: 746300 - DNA, 15 bp, Homo sapiens
gtaacctcccactcc

SEQ ID NO: 746301 - DNA, 15 bp, Homo sapiens
taacctcccactccg

SEQ ID NO: 746302 - DNA, 15 bp, Homo sapiens
aacctcccactccgt

SEQ ID NO: 746303 - DNA, 15 bp, Homo sapiens
acctcccactccgtc

SEQ ID NO: 746304 - DNA, 15 bp, Homo sapiens
cctcccactccgtcc

SEQ ID NO: 746305 - DNA, 15 bp, Homo sapiens
ctcccactccgtccc

SEQ ID NO: 746306 - DNA, 15 bp, Homo sapiens
tcccactccgtccct

SEQ ID NO: 746307 - DNA, 15 bp, Homo sapiens
cccactccgtccctt

SEQ ID NO: 746308 - DNA, 15 bp, Homo sapiens
ccactccgtccctta

SEQ ID NO: 746309 - DNA, 15 bp, Homo sapiens
cactccgtcccttag

SEQ ID NO: 746310 - DNA, 15 bp, Homo sapiens
actccgtcccttagg

SEQ ID NO: 746311 - DNA, 15 bp, Homo sapiens
ctccgtcccttaggt

SEQ ID NO: 746312 - DNA, 15 bp, Homo sapiens
tccgtcccttaggtg

SEQ ID NO: 746313 - DNA, 15 bp, Homo sapiens
ccgtcccttaggtgc

SEQ ID NO: 746314 - DNA, 15 bp, Homo sapiens
cgtcccttaggtgct

SEQ ID NO: 746315 - DNA, 15 bp, Homo sapiens
gtcccttaggtgctc

SEQ ID NO: 746316 - DNA, 15 bp, Homo sapiens
tcccttaggtgctct

SEQ ID NO: 746317 - DNA, 15 bp, Homo sapiens
cccttaggtgctcta

SEQ ID NO: 746318 - DNA, 15 bp, Homo sapiens
ccttaggtgctctag

SEQ ID NO: 746319 - DNA, 15 bp, Homo sapiens
cttaggtgctctagt

SEQ ID NO: 746320 - DNA, 15 bp, Homo sapiens
ttaggtgctctagtg

SEQ ID NO: 746321 - DNA, 15 bp, Homo sapiens
taggtgctctagtgg

SEQ ID NO: 746322 - DNA, 15 bp, Homo sapiens
aggtgctctagtgga

SEQ ID NO: 746323 - DNA, 15 bp, Homo sapiens
ggtgctctagtggaa

SEQ ID NO: 746324 - DNA, 15 bp, Homo sapiens
gtgctctagtggaac

SEQ ID NO: 746325 - DNA, 15 bp, Homo sapiens
tgctctagtggaaca

SEQ ID NO: 746326 - DNA, 15 bp, Homo sapiens
gctctagtggaacat

SEQ ID NO: 746327 - DNA, 15 bp, Homo sapiens
ctctagtggaacata

SEQ ID NO: 746328 - DNA, 15 bp, Homo sapiens
tctagtggaacatac

SEQ ID NO: 746329 - DNA, 15 bp, Homo sapiens
ctagtggaacatacc

SEQ ID NO: 746330 - DNA, 15 bp, Homo sapiens
tagtggaacataccc

SEQ ID NO: 746331 - DNA, 15 bp, Homo sapiens
agtggaacatacccc

SEQ ID NO: 746332 - DNA, 15 bp, Homo sapiens
gtggaacatacccca

SEQ ID NO: 746333 - DNA, 15 bp, Homo sapiens
tggaacataccccaa

SEQ ID NO: 746334 - DNA, 15 bp, Homo sapiens
ggaacataccccaag

SEQ ID NO: 746335 - DNA, 15 bp, Homo sapiens
gaacataccccaagt

SEQ ID NO: 746336 - DNA, 15 bp, Homo sapiens
aacataccccaagtt

SEQ ID NO: 746337 - DNA, 15 bp, Homo sapiens
acataccccaagttc

SEQ ID NO: 746338 - DNA, 15 bp, Homo sapiens
cataccccaagttct

SEQ ID NO: 746339 - DNA, 15 bp, Homo sapiens
ataccccaagttctt

SEQ ID NO: 746340 - DNA, 15 bp, Homo sapiens
taccccaagttcttc

SEQ ID NO: 746341 - DNA, 15 bp, Homo sapiens
accccaagttcttcg

SEQ ID NO: 746342 - DNA, 15 bp, Homo sapiens
ccccaagttcttcgg

SEQ ID NO: 746343 - DNA, 15 bp, Homo sapiens
cccaagttcttcggc

SEQ ID NO: 746344 - DNA, 15 bp, Homo sapiens
ccaagttcttcggcc

SEQ ID NO: 746345 - DNA, 15 bp, Homo sapiens
caagttcttcggcct

SEQ ID NO: 746346 - DNA, 15 bp, Homo sapiens
aagttcttcggcctc

SEQ ID NO: 746347 - DNA, 15 bp, Homo sapiens
agttcttcggcctct

SEQ ID NO: 746348 - DNA, 15 bp, Homo sapiens
gttcttcggcctctg

SEQ ID NO: 746349 - DNA, 15 bp, Homo sapiens
ttcttcggcctctgt

SEQ ID NO: 746350 - DNA, 15 bp, Homo sapiens
tcttcggcctctgtt

SEQ ID NO: 746351 - DNA, 15 bp, Homo sapiens
cttcggcctctgttc

SEQ ID NO: 746352 - DNA, 15 bp, Homo sapiens
ttcggcctctgttcc

SEQ ID NO: 746353 - DNA, 15 bp, Homo sapiens
tcggcctctgttcct

SEQ ID NO: 746354 - DNA, 15 bp, Homo sapiens
cggcctctgttcctt

SEQ ID NO: 746355 - DNA, 15 bp, Homo sapiens
ggcctctgttccttt

SEQ ID NO: 746356 - DNA, 15 bp, Homo sapiens
gcctctgttcctttg

SEQ ID NO: 746357 - DNA, 15 bp, Homo sapiens
cctctgttcctttgc

SEQ ID NO: 746358 - DNA, 15 bp, Homo sapiens
ctctgttcctttgcc

SEQ ID NO: 746359 - DNA, 15 bp, Homo sapiens
tctgttcctttgccc

SEQ ID NO: 746360 - DNA, 15 bp, Homo sapiens
ctgttcctttgcccc

SEQ ID NO: 746361 - DNA, 15 bp, Homo sapiens
tgttcctttgccccc

SEQ ID NO: 746362 - DNA, 15 bp, Homo sapiens
gttcctttgccccca

SEQ ID NO: 746363 - DNA, 15 bp, Homo sapiens
ttcctttgcccccag

SEQ ID NO: 746364 - DNA, 15 bp, Homo sapiens
tcctttgcccccagg

SEQ ID NO: 746365 - DNA, 15 bp, Homo sapiens
cctttgcccccaggc

SEQ ID NO: 746366 - DNA, 15 bp, Homo sapiens
ctttgcccccaggcc

SEQ ID NO: 746367 - DNA, 15 bp, Homo sapiens
tttgcccccaggcca

SEQ ID NO: 746368 - DNA, 15 bp, Homo sapiens
ttgcccccaggccac

SEQ ID NO: 746369 - DNA, 15 bp, Homo sapiens
tgcccccaggccacc

SEQ ID NO: 746370 - DNA, 15 bp, Homo sapiens
gcccccaggccaccc

SEQ ID NO: 746371 - DNA, 15 bp, Homo sapiens
cccccaggccaccca

SEQ ID NO: 746372 - DNA, 15 bp, Homo sapiens
ccccaggccacccac

SEQ ID NO: 746373 - DNA, 15 bp, Homo sapiens
cccaggccacccact

SEQ ID NO: 746374 - DNA, 15 bp, Homo sapiens
ccaggccacccactt

SEQ ID NO: 746375 - DNA, 15 bp, Homo sapiens
caggccacccacttt

SEQ ID NO: 746376 - DNA, 15 bp, Homo sapiens
aggccacccactttg

SEQ ID NO: 746377 - DNA, 15 bp, Homo sapiens
ggccacccactttgg

SEQ ID NO: 746378 - DNA, 15 bp, Homo sapiens
gccacccactttggg

SEQ ID NO: 746379 - DNA, 15 bp, Homo sapiens
ccacccactttgggt

SEQ ID NO: 746380 - DNA, 15 bp, Homo sapiens
cacccactttgggtc

SEQ ID NO: 746381 - DNA, 15 bp, Homo sapiens
acccactttgggtcc

SEQ ID NO: 746382 - DNA, 15 bp, Homo sapiens
cccactttgggtccc

SEQ ID NO: 746383 - DNA, 15 bp, Homo sapiens
ccactttgggtcccc

SEQ ID NO: 746384 - DNA, 15 bp, Homo sapiens
cactttgggtccccg

SEQ ID NO: 746385 - DNA, 15 bp, Homo sapiens
actttgggtccccgg

SEQ ID NO: 746386 - DNA, 15 bp, Homo sapiens
ctttgggtccccgga

SEQ ID NO: 746387 - DNA, 15 bp, Homo sapiens
tttgggtccccggaa

SEQ ID NO: 746388 - DNA, 15 bp, Homo sapiens
ttgggtccccggaaa

SEQ ID NO: 746389 - DNA, 15 bp, Homo sapiens
tgggtccccggaaat

SEQ ID NO: 746390 - DNA, 15 bp, Homo sapiens
gggtccccggaaatg

SEQ ID NO: 746391 - DNA, 15 bp, Homo sapiens
ggtccccggaaatgc

SEQ ID NO: 746392 - DNA, 15 bp, Homo sapiens
gtccccggaaatgcc

SEQ ID NO: 746393 - DNA, 15 bp, Homo sapiens
tccccggaaatgcca

SEQ ID NO: 746394 - DNA, 15 bp, Homo sapiens
ccccggaaatgccac

SEQ ID NO: 746395 - DNA, 15 bp, Homo sapiens
cccggaaatgccacc

SEQ ID NO: 746396 - DNA, 15 bp, Homo sapiens
ccggaaatgccacca

SEQ ID NO: 746397 - DNA, 15 bp, Homo sapiens
cggaaatgccaccag

SEQ ID NO: 746398 - DNA, 15 bp, Homo sapiens
ggaaatgccaccagc

SEQ ID NO: 746399 - DNA, 15 bp, Homo sapiens
gaaatgccaccagca

SEQ ID NO: 746400 - DNA, 15 bp, Homo sapiens
aaatgccaccagcag

SEQ ID NO: 746401 - DNA, 15 bp, Homo sapiens
aatgccaccagcagc

SEQ ID NO: 746402 - DNA, 15 bp, Homo sapiens
atgccaccagcagcg

SEQ ID NO: 746403 - DNA, 15 bp, Homo sapiens
tgccaccagcagcgc

SEQ ID NO: 746404 - DNA, 15 bp, Homo sapiens
gccaccagcagcgcg

SEQ ID NO: 746405 - DNA, 15 bp, Homo sapiens
ccaccagcagcgcgg

SEQ ID NO: 746406 - DNA, 15 bp, Homo sapiens
caccagcagcgcgga

SEQ ID NO: 746407 - DNA, 15 bp, Homo sapiens
accagcagcgcggag

SEQ ID NO: 746408 - DNA, 15 bp, Homo sapiens
ccagcagcgcggagc

SEQ ID NO: 746409 - DNA, 15 bp, Homo sapiens
cagcagcgcggagct

SEQ ID NO: 746410 - DNA, 15 bp, Homo sapiens
agcagcgcggagctg

SEQ ID NO: 746411 - DNA, 15 bp, Homo sapiens
gcagcgcggagctgg

SEQ ID NO: 746412 - DNA, 15 bp, Homo sapiens
cagcgcggagctgga

SEQ ID NO: 746413 - DNA, 15 bp, Homo sapiens
agcgcggagctggag

SEQ ID NO: 746414 - DNA, 15 bp, Homo sapiens
gcgcggagctggagc

SEQ ID NO: 746415 - DNA, 15 bp, Homo sapiens
cgcggagctggagcg

SEQ ID NO: 746416 - DNA, 15 bp, Homo sapiens
gcggagctggagcgg

SEQ ID NO: 746417 - DNA, 15 bp, Homo sapiens
cggagctggagcggg

SEQ ID NO: 746418 - DNA, 15 bp, Homo sapiens
ggagctggagcggga

SEQ ID NO: 746419 - DNA, 15 bp, Homo sapiens
gagctggagcgggag

SEQ ID NO: 746420 - DNA, 15 bp, Homo sapiens
agctggagcgggagt

SEQ ID NO: 746421 - DNA, 15 bp, Homo sapiens
gctggagcgggagtc

SEQ ID NO: 746422 - DNA, 15 bp, Homo sapiens
ctggagcgggagtcc

SEQ ID NO: 746423 - DNA, 15 bp, Homo sapiens
tggagcgggagtccg

SEQ ID NO: 746424 - DNA, 15 bp, Homo sapiens
ggagcgggagtccgc

SEQ ID NO: 746425 - DNA, 15 bp, Homo sapiens
gagcgggagtccgcc

SEQ ID NO: 746426 - DNA, 15 bp, Homo sapiens
agcgggagtccgcct

SEQ ID NO: 746427 - DNA, 15 bp, Homo sapiens
gcgggagtccgcctg

SEQ ID NO: 746428 - DNA, 15 bp, Homo sapiens
cgggagtccgcctga

SEQ ID NO: 746429 - DNA, 15 bp, Homo sapiens
gggagtccgcctgag

SEQ ID NO: 746430 - DNA, 15 bp, Homo sapiens
ggagtccgcctgagg

SEQ ID NO: 746431 - DNA, 15 bp, Homo sapiens
gagtccgcctgaggc

SEQ ID NO: 746432 - DNA, 15 bp, Homo sapiens
agtccgcctgaggcc

SEQ ID NO: 746433 - DNA, 15 bp, Homo sapiens
gtccgcctgaggccg

SEQ ID NO: 746434 - DNA, 15 bp, Homo sapiens
tccgcctgaggccgc

SEQ ID NO: 746435 - DNA, 15 bp, Homo sapiens
ccgcctgaggccgcg

SEQ ID NO: 746436 - DNA, 15 bp, Homo sapiens
cgcctgaggccgcgg

SEQ ID NO: 746437 - DNA, 15 bp, Homo sapiens
gcctgaggccgcggt

SEQ ID NO: 746438 - DNA, 15 bp, Homo sapiens
cctgaggccgcggtt

SEQ ID NO: 746439 - DNA, 15 bp, Homo sapiens
ctgaggccgcggttt

SEQ ID NO: 746440 - DNA, 15 bp, Homo sapiens
tgaggccgcggtttt

SEQ ID NO: 746441 - DNA, 15 bp, Homo sapiens
gaggccgcggtttta

SEQ ID NO: 746442 - DNA, 15 bp, Homo sapiens
aggccgcggttttac

SEQ ID NO: 746443 - DNA, 15 bp, Homo sapiens
ggccgcggttttacg

SEQ ID NO: 746444 - DNA, 15 bp, Homo sapiens
gccgcggttttacgc

SEQ ID NO: 746445 - DNA, 15 bp, Homo sapiens
ccgcggttttacgcg

SEQ ID NO: 746446 - DNA, 15 bp, Homo sapiens
cgcggttttacgcgg

SEQ ID NO: 746447 - DNA, 15 bp, Homo sapiens
gcggttttacgcgga

SEQ ID NO: 746448 - DNA, 15 bp, Homo sapiens
cggttttacgcggag

SEQ ID NO: 746449 - DNA, 15 bp, Homo sapiens
ggttttacgcggagc

SEQ ID NO: 746450 - DNA, 15 bp, Homo sapiens
gttttacgcggagcg

SEQ ID NO: 746451 - DNA, 15 bp, Homo sapiens
ttttacgcggagcgt

SEQ ID NO: 746452 - DNA, 15 bp, Homo sapiens
tttacgcggagcgtc

SEQ ID NO: 746453 - DNA, 15 bp, Homo sapiens
ttacgcggagcgtct

SEQ ID NO: 746454 - DNA, 15 bp, Homo sapiens
tacgcggagcgtctt

SEQ ID NO: 746455 - DNA, 15 bp, Homo sapiens
acgcggagcgtcttc

SEQ ID NO: 746456 - DNA, 15 bp, Homo sapiens
cgcggagcgtcttcc

SEQ ID NO: 746457 - DNA, 15 bp, Homo sapiens
gcggagcgtcttccc

SEQ ID NO: 746458 - DNA, 15 bp, Homo sapiens
cggagcgtcttccct

SEQ ID NO: 746459 - DNA, 15 bp, Homo sapiens
ggagcgtcttccctg

SEQ ID NO: 746460 - DNA, 15 bp, Homo sapiens
gagcgtcttccctgg

SEQ ID NO: 746461 - DNA, 15 bp, Homo sapiens
agcgtcttccctggc

SEQ ID NO: 746462 - DNA, 15 bp, Homo sapiens
gcgtcttccctggcg

SEQ ID NO: 746463 - DNA, 15 bp, Homo sapiens
cgtcttccctggcgc

SEQ ID NO: 746464 - DNA, 15 bp, Homo sapiens
gtcttccctggcgct

SEQ ID NO: 746465 - DNA, 15 bp, Homo sapiens
tcttccctggcgctc

SEQ ID NO: 746466 - DNA, 15 bp, Homo sapiens
cttccctggcgctcg

SEQ ID NO: 746467 - DNA, 15 bp, Homo sapiens
ttccctggcgctcga

SEQ ID NO: 746468 - DNA, 15 bp, Homo sapiens
tccctggcgctcgag

SEQ ID NO: 746469 - DNA, 15 bp, Homo sapiens
ccctggcgctcgagg

SEQ ID NO: 746470 - DNA, 15 bp, Homo sapiens
cctggcgctcgaggt

SEQ ID NO: 746471 - DNA, 15 bp, Homo sapiens
ctggcgctcgaggtg

SEQ ID NO: 746472 - DNA, 15 bp, Homo sapiens
tggcgctcgaggtgg

SEQ ID NO: 746473 - DNA, 15 bp, Homo sapiens
ggcgctcgaggtggc

SEQ ID NO: 746474 - DNA, 15 bp, Homo sapiens
gcgctcgaggtggct

SEQ ID NO: 746475 - DNA, 15 bp, Homo sapiens
cgctcgaggtggcta

SEQ ID NO: 746476 - DNA, 15 bp, Homo sapiens
gctcgaggtggctag

SEQ ID NO: 746477 - DNA, 15 bp, Homo sapiens
ctcgaggtggctaga

SEQ ID NO: 746478 - DNA, 15 bp, Homo sapiens
tcgaggtggctagat

SEQ ID NO: 746479 - DNA, 15 bp, Homo sapiens
cgaggtggctagatg

SEQ ID NO: 746480 - DNA, 15 bp, Homo sapiens
gaggtggctagatgt

SEQ ID NO: 746481 - DNA, 15 bp, Homo sapiens
aggtggctagatgtc

SEQ ID NO: 746482 - DNA, 15 bp, Homo sapiens
ggtggctagatgtcg

SEQ ID NO: 746483 - DNA, 15 bp, Homo sapiens
gtggctagatgtcgt

SEQ ID NO: 746484 - DNA, 15 bp, Homo sapiens
tggctagatgtcgtc

SEQ ID NO: 746485 - DNA, 15 bp, Homo sapiens
ggctagatgtcgtcg

SEQ ID NO: 746486 - DNA, 15 bp, Homo sapiens
gctagatgtcgtcgg

SEQ ID NO: 746487 - DNA, 15 bp, Homo sapiens
ctagatgtcgtcggc

SEQ ID NO: 746488 - DNA, 15 bp, Homo sapiens
tagatgtcgtcggct

SEQ ID NO: 746489 - DNA, 15 bp, Homo sapiens
agatgtcgtcggctt

SEQ ID NO: 746490 - DNA, 15 bp, Homo sapiens
gatgtcgtcggcttt

SEQ ID NO: 746491 - DNA, 15 bp, Homo sapiens
atgtcgtcggcttta

SEQ ID NO: 746492 - DNA, 15 bp, Homo sapiens
tgtcgtcggctttag

SEQ ID NO: 746493 - DNA, 15 bp, Homo sapiens
gtcgtcggctttagc

SEQ ID NO: 746494 - DNA, 15 bp, Homo sapiens
tcgtcggctttagct

SEQ ID NO: 746495 - DNA, 15 bp, Homo sapiens
cgtcggctttagcta

SEQ ID NO: 746496 - DNA, 15 bp, Homo sapiens
gtcggctttagctat

SEQ ID NO: 746497 - DNA, 15 bp, Homo sapiens
tcggctttagctatt

SEQ ID NO: 746498 - DNA, 15 bp, Homo sapiens
cggctttagctattc

SEQ ID NO: 746499 - DNA, 15 bp, Homo sapiens
ggctttagctattcc

SEQ ID NO: 746500 - DNA, 15 bp, Homo sapiens
gctttagctattcct

SEQ ID NO: 746501 - DNA, 15 bp, Homo sapiens
ctttagctattcctg

SEQ ID NO: 746502 - DNA, 15 bp, Homo sapiens
tttagctattcctgg

SEQ ID NO: 746503 - DNA, 15 bp, Homo sapiens
ttagctattcctggt

SEQ ID NO: 746504 - DNA, 15 bp, Homo sapiens
tagctattcctggtg

SEQ ID NO: 746505 - DNA, 15 bp, Homo sapiens
agctattcctggtgc

SEQ ID NO: 746506 - DNA, 15 bp, Homo sapiens
gctattcctggtgca

SEQ ID NO: 746507 - DNA, 15 bp, Homo sapiens
ctattcctggtgcag

SEQ ID NO: 746508 - DNA, 15 bp, Homo sapiens
tattcctggtgcaga

SEQ ID NO: 746509 - DNA, 15 bp, Homo sapiens
attcctggtgcagac

SEQ ID NO: 746510 - DNA, 15 bp, Homo sapiens
ttcctggtgcagacg

SEQ ID NO: 746511 - DNA, 15 bp, Homo sapiens
tcctggtgcagacgc

SEQ ID NO: 746512 - DNA, 15 bp, Homo sapiens
cctggtgcagacgcc

SEQ ID NO: 746513 - DNA, 15 bp, Homo sapiens
ctggtgcagacgccc

SEQ ID NO: 746514 - DNA, 15 bp, Homo sapiens
tggtgcagacgccca

SEQ ID NO: 746515 - DNA, 15 bp, Homo sapiens
ggtgcagacgcccac

SEQ ID NO: 746516 - DNA, 15 bp, Homo sapiens
gtgcagacgcccacc

SEQ ID NO: 746517 - DNA, 15 bp, Homo sapiens
tgcagacgcccaccg

SEQ ID NO: 746518 - DNA, 15 bp, Homo sapiens
gcagacgcccaccgg

SEQ ID NO: 746519 - DNA, 15 bp, Homo sapiens
cagacgcccaccggc

SEQ ID NO: 746520 - DNA, 15 bp, Homo sapiens
agacgcccaccggca

SEQ ID NO: 746521 - DNA, 15 bp, Homo sapiens
gacgcccaccggcac

SEQ ID NO: 746522 - DNA, 15 bp, Homo sapiens
acgcccaccggcact

SEQ ID NO: 746523 - DNA, 15 bp, Homo sapiens
cgcccaccggcactg

SEQ ID NO: 746524 - DNA, 15 bp, Homo sapiens
gcccaccggcactga

SEQ ID NO: 746525 - DNA, 15 bp, Homo sapiens
cccaccggcactgag

SEQ ID NO: 746526 - DNA, 15 bp, Homo sapiens
ccaccggcactgagg

SEQ ID NO: 746527 - DNA, 15 bp, Homo sapiens
caccggcactgaggc

SEQ ID NO: 746528 - DNA, 15 bp, Homo sapiens
accggcactgaggct

SEQ ID NO: 746529 - DNA, 15 bp, Homo sapiens
ccggcactgaggctg

SEQ ID NO: 746530 - DNA, 15 bp, Homo sapiens
cggcactgaggctgg

SEQ ID NO: 746531 - DNA, 15 bp, Homo sapiens
ggcactgaggctggc

SEQ ID NO: 746532 - DNA, 15 bp, Homo sapiens
gcactgaggctggcg

SEQ ID NO: 746533 - DNA, 15 bp, Homo sapiens
cactgaggctggcga

SEQ ID NO: 746534 - DNA, 15 bp, Homo sapiens
actgaggctggcgac

SEQ ID NO: 746535 - DNA, 15 bp, Homo sapiens
ctgaggctggcgaca

SEQ ID NO: 746536 - DNA, 15 bp, Homo sapiens
tgaggctggcgacac

SEQ ID NO: 746537 - DNA, 15 bp, Homo sapiens
gaggctggcgacacc

SEQ ID NO: 746538 - DNA, 15 bp, Homo sapiens
aggctggcgacacct

SEQ ID NO: 746539 - DNA, 15 bp, Homo sapiens
ggctggcgacacctt

SEQ ID NO: 746540 - DNA, 15 bp, Homo sapiens
gctggcgacaccttc

SEQ ID NO: 746541 - DNA, 15 bp, Homo sapiens
ctggcgacaccttcg

SEQ ID NO: 746542 - DNA, 15 bp, Homo sapiens
tggcgacaccttcga

SEQ ID NO: 746543 - DNA, 15 bp, Homo sapiens
ggcgacaccttcgat

SEQ ID NO: 746544 - DNA, 15 bp, Homo sapiens
gcgacaccttcgatg

SEQ ID NO: 746545 - DNA, 15 bp, Homo sapiens
cgacaccttcgatgt

SEQ ID NO: 746546 - DNA, 15 bp, Homo sapiens
gacaccttcgatgta

SEQ ID NO: 746547 - DNA, 15 bp, Homo sapiens
acaccttcgatgtat

SEQ ID NO: 746548 - DNA, 15 bp, Homo sapiens
caccttcgatgtatg

SEQ ID NO: 746549 - DNA, 15 bp, Homo sapiens
accttcgatgtatgg

SEQ ID NO: 746550 - DNA, 15 bp, Homo sapiens
ccttcgatgtatggt

SEQ ID NO: 746551 - DNA, 15 bp, Homo sapiens
cttcgatgtatggtt

SEQ ID NO: 746552 - DNA, 15 bp, Homo sapiens
ttcgatgtatggttg

SEQ ID NO: 746553 - DNA, 15 bp, Homo sapiens
tcgatgtatggttgc

SEQ ID NO: 746554 - DNA, 15 bp, Homo sapiens
cgatgtatggttgct

SEQ ID NO: 746555 - DNA, 15 bp, Homo sapiens
gatgtatggttgcta

SEQ ID NO: 746556 - DNA, 15 bp, Homo sapiens
atgtatggttgctag

SEQ ID NO: 746557 - DNA, 15 bp, Homo sapiens
tgtatggttgctagg

SEQ ID NO: 746558 - DNA, 15 bp, Homo sapiens
gtatggttgctaggc

SEQ ID NO: 746559 - DNA, 15 bp, Homo sapiens
tatggttgctaggct

SEQ ID NO: 746560 - DNA, 15 bp, Homo sapiens
atggttgctaggctc

SEQ ID NO: 746561 - DNA, 15 bp, Homo sapiens
tggttgctaggctca

SEQ ID NO: 746562 - DNA, 15 bp, Homo sapiens
ggttgctaggctcac

SEQ ID NO: 746563 - DNA, 15 bp, Homo sapiens
gttgctaggctcact

SEQ ID NO: 746564 - DNA, 15 bp, Homo sapiens
ttgctaggctcactg

SEQ ID NO: 746565 - DNA, 15 bp, Homo sapiens
tgctaggctcactgc

SEQ ID NO: 746566 - DNA, 15 bp, Homo sapiens
gctaggctcactgcc

SEQ ID NO: 746567 - DNA, 15 bp, Homo sapiens
ctaggctcactgcct

SEQ ID NO: 746568 - DNA, 15 bp, Homo sapiens
taggctcactgcctg

SEQ ID NO: 746569 - DNA, 15 bp, Homo sapiens
aggctcactgcctgg

SEQ ID NO: 746570 - DNA, 15 bp, Homo sapiens
ggctcactgcctggt

SEQ ID NO: 746571 - DNA, 15 bp, Homo sapiens
gctcactgcctggtc

SEQ ID NO: 746572 - DNA, 15 bp, Homo sapiens
ctcactgcctggtct

SEQ ID NO: 746573 - DNA, 15 bp, Homo sapiens
tcactgcctggtctg

SEQ ID NO: 746574 - DNA, 15 bp, Homo sapiens
cactgcctggtctgt

SEQ ID NO: 746575 - DNA, 15 bp, Homo sapiens
actgcctggtctgta

SEQ ID NO: 746576 - DNA, 15 bp, Homo sapiens
ctgcctggtctgtag

SEQ ID NO: 746577 - DNA, 15 bp, Homo sapiens
tgcctggtctgtagt

SEQ ID NO: 746578 - DNA, 15 bp, Homo sapiens
gcctggtctgtagtc

SEQ ID NO: 746579 - DNA, 15 bp, Homo sapiens
cctggtctgtagtcg

SEQ ID NO: 746580 - DNA, 15 bp, Homo sapiens
ctggtctgtagtcgt

SEQ ID NO: 746581 - DNA, 15 bp, Homo sapiens
tggtctgtagtcgtg

SEQ ID NO: 746582 - DNA, 15 bp, Homo sapiens
ggtctgtagtcgtgt

SEQ ID NO: 746583 - DNA, 15 bp, Homo sapiens
gtctgtagtcgtgtc

SEQ ID NO: 746584 - DNA, 15 bp, Homo sapiens
tctgtagtcgtgtcc

SEQ ID NO: 746585 - DNA, 15 bp, Homo sapiens
ctgtagtcgtgtccc

SEQ ID NO: 746586 - DNA, 15 bp, Homo sapiens
tgtagtcgtgtccct

SEQ ID NO: 746587 - DNA, 15 bp, Homo sapiens
gtagtcgtgtcccta

SEQ ID NO: 746588 - DNA, 15 bp, Homo sapiens
tagtcgtgtccctag

SEQ ID NO: 746589 - DNA, 15 bp, Homo sapiens
agtcgtgtccctaga

SEQ ID NO: 746590 - DNA, 15 bp, Homo sapiens
gtcgtgtccctagag

SEQ ID NO: 746591 - DNA, 15 bp, Homo sapiens
tcgtgtccctagaga

SEQ ID NO: 746592 - DNA, 15 bp, Homo sapiens
cgtgtccctagagat

SEQ ID NO: 746593 - DNA, 15 bp, Homo sapiens
gtgtccctagagatg

SEQ ID NO: 746594 - DNA, 15 bp, Homo sapiens
tgtccctagagatgt

SEQ ID NO: 746595 - DNA, 15 bp, Homo sapiens
gtccctagagatgtc

SEQ ID NO: 746596 - DNA, 15 bp, Homo sapiens
tccctagagatgtct

SEQ ID NO: 746597 - DNA, 15 bp, Homo sapiens
ccctagagatgtctt

SEQ ID NO: 746598 - DNA, 15 bp, Homo sapiens
cctagagatgtcttc

SEQ ID NO: 746599 - DNA, 15 bp, Homo sapiens
ctagagatgtcttcc

SEQ ID NO: 746600 - DNA, 15 bp, Homo sapiens
tagagatgtcttccc

SEQ ID NO: 746601 - DNA, 15 bp, Homo sapiens
agagatgtcttccct

SEQ ID NO: 746602 - DNA, 15 bp, Homo sapiens
gagatgtcttccctt

SEQ ID NO: 746603 - DNA, 15 bp, Homo sapiens
agatgtcttcccttc

SEQ ID NO: 746604 - DNA, 15 bp, Homo sapiens
gatgtcttcccttcc

SEQ ID NO: 746605 - DNA, 15 bp, Homo sapiens
atgtcttcccttccc

SEQ ID NO: 746606 - DNA, 15 bp, Homo sapiens
tgtcttcccttcccc

SEQ ID NO: 746607 - DNA, 15 bp, Homo sapiens
gtcttcccttcccca

SEQ ID NO: 746608 - DNA, 15 bp, Homo sapiens
tcttcccttccccac

SEQ ID NO: 746609 - DNA, 15 bp, Homo sapiens
cttcccttccccaca

SEQ ID NO: 746610 - DNA, 15 bp, Homo sapiens
ttcccttccccacag

SEQ ID NO: 746611 - DNA, 15 bp, Homo sapiens
tcccttccccacagc

SEQ ID NO: 746612 - DNA, 15 bp, Homo sapiens
cccttccccacagcc

SEQ ID NO: 746613 - DNA, 15 bp, Homo sapiens
ccttccccacagcca

SEQ ID NO: 746614 - DNA, 15 bp, Homo sapiens
cttccccacagccac

SEQ ID NO: 746615 - DNA, 15 bp, Homo sapiens
ttccccacagccact

SEQ ID NO: 746616 - DNA, 15 bp, Homo sapiens
tccccacagccactg

SEQ ID NO: 746617 - DNA, 15 bp, Homo sapiens
ccccacagccactgg

SEQ ID NO: 746618 - DNA, 15 bp, Homo sapiens
cccacagccactggc

SEQ ID NO: 746619 - DNA, 15 bp, Homo sapiens
ccacagccactggct

SEQ ID NO: 746620 - DNA, 15 bp, Homo sapiens
cacagccactggctg

SEQ ID NO: 746621 - DNA, 15 bp, Homo sapiens
acagccactggctgg

SEQ ID NO: 746622 - DNA, 15 bp, Homo sapiens
cagccactggctgga

SEQ ID NO: 746623 - DNA, 15 bp, Homo sapiens
agccactggctggag

SEQ ID NO: 746624 - DNA, 15 bp, Homo sapiens
gccactggctggagt

SEQ ID NO: 746625 - DNA, 15 bp, Homo sapiens
ccactggctggagtg

SEQ ID NO: 746626 - DNA, 15 bp, Homo sapiens
cactggctggagtgg

SEQ ID NO: 746627 - DNA, 15 bp, Homo sapiens
actggctggagtggg

SEQ ID NO: 746628 - DNA, 15 bp, Homo sapiens
ctggctggagtgggg

SEQ ID NO: 746629 - DNA, 15 bp, Homo sapiens
tggctggagtggggg

SEQ ID NO: 746630 - DNA, 15 bp, Homo sapiens
ggctggagtggggga

SEQ ID NO: 746631 - DNA, 15 bp, Homo sapiens
gctggagtgggggac

SEQ ID NO: 746632 - DNA, 15 bp, Homo sapiens
ctggagtgggggacc

SEQ ID NO: 746633 - DNA, 15 bp, Homo sapiens
tggagtgggggaccc

SEQ ID NO: 746634 - DNA, 15 bp, Homo sapiens
ggagtgggggacccg

SEQ ID NO: 746635 - DNA, 15 bp, Homo sapiens
gagtgggggacccga

SEQ ID NO: 746636 - DNA, 15 bp, Homo sapiens
agtgggggacccgac

SEQ ID NO: 746637 - DNA, 15 bp, Homo sapiens
gtgggggacccgaca

SEQ ID NO: 746638 - DNA, 15 bp, Homo sapiens
tgggggacccgacac

SEQ ID NO: 746639 - DNA, 15 bp, Homo sapiens
gggggacccgacact

SEQ ID NO: 746640 - DNA, 15 bp, Homo sapiens
ggggacccgacactg

SEQ ID NO: 746641 - DNA, 15 bp, Homo sapiens
gggacccgacactga

SEQ ID NO: 746642 - DNA, 15 bp, Homo sapiens
ggacccgacactgat

SEQ ID NO: 746643 - DNA, 15 bp, Homo sapiens
gacccgacactgata

SEQ ID NO: 746644 - DNA, 15 bp, Homo sapiens
acccgacactgatag

SEQ ID NO: 746645 - DNA, 15 bp, Homo sapiens
cccgacactgataga

SEQ ID NO: 746646 - DNA, 15 bp, Homo sapiens
ccgacactgatagaa

SEQ ID NO: 746647 - DNA, 15 bp, Homo sapiens
cgacactgatagaaa

SEQ ID NO: 746648 - DNA, 15 bp, Homo sapiens
gacactgatagaaaa

SEQ ID NO: 746649 - DNA, 15 bp, Homo sapiens
acactgatagaaaac

SEQ ID NO: 746650 - DNA, 15 bp, Homo sapiens
cactgatagaaaact

SEQ ID NO: 746651 - DNA, 15 bp, Homo sapiens
actgatagaaaactg

SEQ ID NO: 746652 - DNA, 15 bp, Homo sapiens
ctgatagaaaactgc

SEQ ID NO: 746653 - DNA, 15 bp, Homo sapiens
tgatagaaaactgca

SEQ ID NO: 746654 - DNA, 15 bp, Homo sapiens
gatagaaaactgcag

SEQ ID NO: 746655 - DNA, 15 bp, Homo sapiens
atagaaaactgcaga

SEQ ID NO: 746656 - DNA, 15 bp, Homo sapiens
tagaaaactgcagaa

SEQ ID NO: 746657 - DNA, 15 bp, Homo sapiens
agaaaactgcagaat

SEQ ID NO: 746658 - DNA, 15 bp, Homo sapiens
gaaaactgcagaata

SEQ ID NO: 746659 - DNA, 15 bp, Homo sapiens
aaaactgcagaataa

SEQ ID NO: 746660 - DNA, 15 bp, Homo sapiens
aaactgcagaataaa

SEQ ID NO: 746661 - DNA, 15 bp, Homo sapiens
aactgcagaataaaa

SEQ ID NO: 746662 - DNA, 15 bp, Homo sapiens
actgcagaataaaaa

SEQ ID NO: 746663 - DNA, 15 bp, Homo sapiens
ctgcagaataaaaaa

SEQ ID NO: 746664 - DNA, 15 bp, Homo sapiens
tgcagaataaaaaag

SEQ ID NO: 746665 - DNA, 15 bp, Homo sapiens
gcagaataaaaaaga

SEQ ID NO: 746666 - DNA, 15 bp, Homo sapiens
cagaataaaaaagaa

SEQ ID NO: 746667 - DNA, 15 bp, Homo sapiens
agaataaaaaagaaa

SEQ ID NO: 746668 - DNA, 15 bp, Homo sapiens
gaataaaaaagaaag

SEQ ID NO: 746669 - DNA, 15 bp, Homo sapiens
aataaaaaagaaaga

SEQ ID NO: 746670 - DNA, 15 bp, Homo sapiens
ataaaaaagaaagaa

SEQ ID NO: 746671 - DNA, 15 bp, Homo sapiens
taaaaaagaaagaac

SEQ ID NO: 746672 - DNA, 15 bp, Homo sapiens
aaaaaagaaagaact

SEQ ID NO: 746673 - DNA, 15 bp, Homo sapiens
aaaaagaaagaactg

SEQ ID NO: 746674 - DNA, 15 bp, Homo sapiens
aaaagaaagaactgg

SEQ ID NO: 746675 - DNA, 15 bp, Homo sapiens
aaagaaagaactgga

SEQ ID NO: 746676 - DNA, 15 bp, Homo sapiens
aagaaagaactggaa

SEQ ID NO: 746677 - DNA, 15 bp, Homo sapiens
agaaagaactggaaa

SEQ ID NO: 746678 - DNA, 15 bp, Homo sapiens
gaaagaactggaaaa

SEQ ID NO: 746679 - DNA, 15 bp, Homo sapiens
aaagaactggaaaaa

SEQ ID NO: 746680 - DNA, 15 bp, Homo sapiens
aagaactggaaaaaa

SEQ ID NO: 746681 - DNA, 15 bp, Homo sapiens
agaactggaaaaaag

SEQ ID NO: 746682 - DNA, 15 bp, Homo sapiens
gaactggaaaaaaga

SEQ ID NO: 746683 - DNA, 15 bp, Homo sapiens
aactggaaaaaagag

SEQ ID NO: 746684 - DNA, 15 bp, Homo sapiens
actggaaaaaagaga

SEQ ID NO: 746685 - DNA, 15 bp, Homo sapiens
ctggaaaaaagagag

SEQ ID NO: 746686 - DNA, 15 bp, Homo sapiens
tggaaaaaagagagt

SEQ ID NO: 746687 - DNA, 15 bp, Homo sapiens
ggaaaaaagagagtg

SEQ ID NO: 746688 - DNA, 15 bp, Homo sapiens
gaaaaaagagagtga

SEQ ID NO: 746689 - DNA, 15 bp, Homo sapiens
aaaaaagagagtgag

SEQ ID NO: 746690 - DNA, 15 bp, Homo sapiens
aaaaagagagtgagc

SEQ ID NO: 746691 - DNA, 15 bp, Homo sapiens
aaaagagagtgagcc

SEQ ID NO: 746692 - DNA, 15 bp, Homo sapiens
aaagagagtgagcca

SEQ ID NO: 746693 - DNA, 15 bp, Homo sapiens
aagagagtgagccag

SEQ ID NO: 746694 - DNA, 15 bp, Homo sapiens
agagagtgagccagc

SEQ ID NO: 746695 - DNA, 15 bp, Homo sapiens
gagagtgagccagct

SEQ ID NO: 746696 - DNA, 15 bp, Homo sapiens
agagtgagccagctg

SEQ ID NO: 746697 - DNA, 15 bp, Homo sapiens
gagtgagccagctgc

SEQ ID NO: 746698 - DNA, 15 bp, Homo sapiens
agtgagccagctgcc

SEQ ID NO: 746699 - DNA, 15 bp, Homo sapiens
gtgagccagctgcct

SEQ ID NO: 746700 - DNA, 15 bp, Homo sapiens
tgagccagctgcctt

SEQ ID NO: 746701 - DNA, 15 bp, Homo sapiens
gagccagctgccttc

SEQ ID NO: 746702 - DNA, 15 bp, Homo sapiens
agccagctgccttct

SEQ ID NO: 746703 - DNA, 15 bp, Homo sapiens
gccagctgccttctt

SEQ ID NO: 746704 - DNA, 15 bp, Homo sapiens
ccagctgccttcttt

SEQ ID NO: 746705 - DNA, 15 bp, Homo sapiens
cagctgccttctttc

SEQ ID NO: 746706 - DNA, 15 bp, Homo sapiens
agctgccttctttct

SEQ ID NO: 746707 - DNA, 15 bp, Homo sapiens
gctgccttctttctg

SEQ ID NO: 746708 - DNA, 15 bp, Homo sapiens
ctgccttctttctga

SEQ ID NO: 746709 - DNA, 15 bp, Homo sapiens
tgccttctttctgag

SEQ ID NO: 746710 - DNA, 15 bp, Homo sapiens
gccttctttctgagt

SEQ ID NO: 746711 - DNA, 15 bp, Homo sapiens
ccttctttctgagta

SEQ ID NO: 746712 - DNA, 15 bp, Homo sapiens
cttctttctgagtaa

SEQ ID NO: 746713 - DNA, 15 bp, Homo sapiens
ttctttctgagtaat

SEQ ID NO: 746714 - DNA, 15 bp, Homo sapiens
tctttctgagtaatt

SEQ ID NO: 746715 - DNA, 15 bp, Homo sapiens
ctttctgagtaattc

SEQ ID NO: 746716 - DNA, 15 bp, Homo sapiens
tttctgagtaattcc

SEQ ID NO: 746717 - DNA, 15 bp, Homo sapiens
ttctgagtaattccc

SEQ ID NO: 746718 - DNA, 15 bp, Homo sapiens
tctgagtaattccca

SEQ ID NO: 746719 - DNA, 15 bp, Homo sapiens
ctgagtaattcccat

SEQ ID NO: 746720 - DNA, 15 bp, Homo sapiens
tgagtaattcccatc

SEQ ID NO: 746721 - DNA, 15 bp, Homo sapiens
gagtaattcccatcc

SEQ ID NO: 746722 - DNA, 15 bp, Homo sapiens
agtaattcccatcct

SEQ ID NO: 746723 - DNA, 15 bp, Homo sapiens
gtaattcccatccta

SEQ ID NO: 746724 - DNA, 15 bp, Homo sapiens
taattcccatcctag

SEQ ID NO: 746725 - DNA, 15 bp, Homo sapiens
aattcccatcctagg

SEQ ID NO: 746726 - DNA, 15 bp, Homo sapiens
attcccatcctaggg

SEQ ID NO: 746727 - DNA, 15 bp, Homo sapiens
ttcccatcctagggg

SEQ ID NO: 746728 - DNA, 15 bp, Homo sapiens
tcccatcctagggga

SEQ ID NO: 746729 - DNA, 15 bp, Homo sapiens
cccatcctaggggac

SEQ ID NO: 746730 - DNA, 15 bp, Homo sapiens
ccatcctaggggact

SEQ ID NO: 746731 - DNA, 15 bp, Homo sapiens
catcctaggggactt

SEQ ID NO: 746732 - DNA, 15 bp, Homo sapiens
atcctaggggacttc

SEQ ID NO: 746733 - DNA, 15 bp, Homo sapiens
tcctaggggacttca

SEQ ID NO: 746734 - DNA, 15 bp, Homo sapiens
cctaggggacttcac

SEQ ID NO: 746735 - DNA, 15 bp, Homo sapiens
ctaggggacttcacg

SEQ ID NO: 746736 - DNA, 15 bp, Homo sapiens
taggggacttcacgc

SEQ ID NO: 746737 - DNA, 15 bp, Homo sapiens
aggggacttcacgcg

SEQ ID NO: 746738 - DNA, 15 bp, Homo sapiens
ggggacttcacgcgc

SEQ ID NO: 746739 - DNA, 15 bp, Homo sapiens
gggacttcacgcgcg

SEQ ID NO: 746740 - DNA, 15 bp, Homo sapiens
ggacttcacgcgcga

SEQ ID NO: 746741 - DNA, 15 bp, Homo sapiens
gacttcacgcgcgaa

SEQ ID NO: 746742 - DNA, 15 bp, Homo sapiens
acttcacgcgcgaac

SEQ ID NO: 746743 - DNA, 15 bp, Homo sapiens
cttcacgcgcgaacc

SEQ ID NO: 746744 - DNA, 15 bp, Homo sapiens
ttcacgcgcgaaccg

SEQ ID NO: 746745 - DNA, 15 bp, Homo sapiens
tcacgcgcgaaccgt

SEQ ID NO: 746746 - DNA, 15 bp, Homo sapiens
cacgcgcgaaccgtt

SEQ ID NO: 746747 - DNA, 15 bp, Homo sapiens
acgcgcgaaccgttt

SEQ ID NO: 746748 - DNA, 15 bp, Homo sapiens
cgcgcgaaccgtttt

SEQ ID NO: 746749 - DNA, 15 bp, Homo sapiens
gcgcgaaccgttttg

SEQ ID NO: 746750 - DNA, 15 bp, Homo sapiens
cgcgaaccgttttgg

SEQ ID NO: 746751 - DNA, 15 bp, Homo sapiens
gcgaaccgttttgga

SEQ ID NO: 746752 - DNA, 15 bp, Homo sapiens
cgaaccgttttggag

SEQ ID NO: 746753 - DNA, 15 bp, Homo sapiens
gaaccgttttggagg

SEQ ID NO: 746754 - DNA, 15 bp, Homo sapiens
aaccgttttggaggg

SEQ ID NO: 746755 - DNA, 15 bp, Homo sapiens
accgttttggaggga

SEQ ID NO: 746756 - DNA, 15 bp, Homo sapiens
ccgttttggagggaa

SEQ ID NO: 746757 - DNA, 15 bp, Homo sapiens
cgttttggagggaag

SEQ ID NO: 746758 - DNA, 15 bp, Homo sapiens
gttttggagggaagg

SEQ ID NO: 746759 - DNA, 15 bp, Homo sapiens
ttttggagggaaggg

SEQ ID NO: 746760 - DNA, 15 bp, Homo sapiens
tttggagggaaggga

SEQ ID NO: 746761 - DNA, 15 bp, Homo sapiens
ttggagggaagggaa

SEQ ID NO: 746762 - DNA, 15 bp, Homo sapiens
tggagggaagggaaa

SEQ ID NO: 746763 - DNA, 15 bp, Homo sapiens
ggagggaagggaaat

SEQ ID NO: 746764 - DNA, 15 bp, Homo sapiens
gagggaagggaaatc

SEQ ID NO: 746765 - DNA, 15 bp, Homo sapiens
agggaagggaaatcc

SEQ ID NO: 746766 - DNA, 15 bp, Homo sapiens
gggaagggaaatcca

SEQ ID NO: 746767 - DNA, 15 bp, Homo sapiens
ggaagggaaatccag

SEQ ID NO: 746768 - DNA, 15 bp, Homo sapiens
gaagggaaatccagg

SEQ ID NO: 746769 - DNA, 15 bp, Homo sapiens
aagggaaatccaggg

SEQ ID NO: 746770 - DNA, 15 bp, Homo sapiens
agggaaatccagggg

SEQ ID NO: 746771 - DNA, 15 bp, Homo sapiens
gggaaatccagggga

SEQ ID NO: 746772 - DNA, 15 bp, Homo sapiens
ggaaatccaggggaa

SEQ ID NO: 746773 - DNA, 15 bp, Homo sapiens
gaaatccaggggaat

SEQ ID NO: 746774 - DNA, 15 bp, Homo sapiens
aaatccaggggaata

SEQ ID NO: 746775 - DNA, 15 bp, Homo sapiens
aatccaggggaatag

SEQ ID NO: 746776 - DNA, 15 bp, Homo sapiens
atccaggggaatagt

SEQ ID NO: 746777 - DNA, 15 bp, Homo sapiens
tccaggggaatagtg

SEQ ID NO: 746778 - DNA, 15 bp, Homo sapiens
ccaggggaatagtgc

SEQ ID NO: 746779 - DNA, 15 bp, Homo sapiens
caggggaatagtgca

SEQ ID NO: 746780 - DNA, 15 bp, Homo sapiens
aggggaatagtgcag

SEQ ID NO: 746781 - DNA, 15 bp, Homo sapiens
ggggaatagtgcagg

SEQ ID NO: 746782 - DNA, 15 bp, Homo sapiens
gggaatagtgcaggg

SEQ ID NO: 746783 - DNA, 15 bp, Homo sapiens
ggaatagtgcagggt

SEQ ID NO: 746784 - DNA, 15 bp, Homo sapiens
gaatagtgcagggta

SEQ ID NO: 746785 - DNA, 15 bp, Homo sapiens
aatagtgcagggtag

SEQ ID NO: 746786 - DNA, 15 bp, Homo sapiens
atagtgcagggtaga

SEQ ID NO: 746787 - DNA, 15 bp, Homo sapiens
tagtgcagggtagat

SEQ ID NO: 746788 - DNA, 15 bp, Homo sapiens
agtgcagggtagata

SEQ ID NO: 746789 - DNA, 15 bp, Homo sapiens
gtgcagggtagatac

SEQ ID NO: 746790 - DNA, 15 bp, Homo sapiens
tgcagggtagataca

SEQ ID NO: 746791 - DNA, 15 bp, Homo sapiens
gcagggtagatacac

SEQ ID NO: 746792 - DNA, 15 bp, Homo sapiens
cagggtagatacaca

SEQ ID NO: 746793 - DNA, 15 bp, Homo sapiens
agggtagatacacat

SEQ ID NO: 746794 - DNA, 15 bp, Homo sapiens
gggtagatacacatt

SEQ ID NO: 746795 - DNA, 15 bp, Homo sapiens
ggtagatacacattg

SEQ ID NO: 746796 - DNA, 15 bp, Homo sapiens
gtagatacacattgc

SEQ ID NO: 746797 - DNA, 15 bp, Homo sapiens
tagatacacattgca

SEQ ID NO: 746798 - DNA, 15 bp, Homo sapiens
agatacacattgcag

SEQ ID NO: 746799 - DNA, 15 bp, Homo sapiens
gatacacattgcagc

SEQ ID NO: 746800 - DNA, 15 bp, Homo sapiens
atacacattgcagcc

SEQ ID NO: 746801 - DNA, 15 bp, Homo sapiens
tacacattgcagcct

SEQ ID NO: 746802 - DNA, 15 bp, Homo sapiens
acacattgcagcctc

SEQ ID NO: 746803 - DNA, 15 bp, Homo sapiens
cacattgcagcctcc

SEQ ID NO: 746804 - DNA, 15 bp, Homo sapiens
acattgcagcctcca

SEQ ID NO: 746805 - DNA, 15 bp, Homo sapiens
cattgcagcctccac

SEQ ID NO: 746806 - DNA, 15 bp, Homo sapiens
attgcagcctccaca

SEQ ID NO: 746807 - DNA, 15 bp, Homo sapiens
ttgcagcctccacat

SEQ ID NO: 746808 - DNA, 15 bp, Homo sapiens
tgcagcctccacatg

SEQ ID NO: 746809 - DNA, 15 bp, Homo sapiens
gcagcctccacatgt

SEQ ID NO: 746810 - DNA, 15 bp, Homo sapiens
cagcctccacatgtt

SEQ ID NO: 746811 - DNA, 15 bp, Homo sapiens
agcctccacatgttc

SEQ ID NO: 746812 - DNA, 15 bp, Homo sapiens
gcctccacatgttca

SEQ ID NO: 746813 - DNA, 15 bp, Homo sapiens
cctccacatgttcac

SEQ ID NO: 746814 - DNA, 15 bp, Homo sapiens
ctccacatgttcaca

SEQ ID NO: 746815 - DNA, 15 bp, Homo sapiens
tccacatgttcacat

SEQ ID NO: 746816 - DNA, 15 bp, Homo sapiens
ccacatgttcacatc

SEQ ID NO: 746817 - DNA, 15 bp, Homo sapiens
cacatgttcacatct

SEQ ID NO: 746818 - DNA, 15 bp, Homo sapiens
acatgttcacatctt

SEQ ID NO: 746819 - DNA, 15 bp, Homo sapiens
catgttcacatcttt

SEQ ID NO: 746820 - DNA, 15 bp, Homo sapiens
atgttcacatctttt

SEQ ID NO: 746821 - DNA, 15 bp, Homo sapiens
tgttcacatcttttc

SEQ ID NO: 746822 - DNA, 15 bp, Homo sapiens
gttcacatcttttct

SEQ ID NO: 746823 - DNA, 15 bp, Homo sapiens
ttcacatcttttcta

SEQ ID NO: 746824 - DNA, 15 bp, Homo sapiens
tcacatcttttctag

SEQ ID NO: 746825 - DNA, 15 bp, Homo sapiens
cacatcttttctagt

SEQ ID NO: 746826 - DNA, 15 bp, Homo sapiens
acatcttttctagta

SEQ ID NO: 746827 - DNA, 15 bp, Homo sapiens
catcttttctagtaa

SEQ ID NO: 746828 - DNA, 15 bp, Homo sapiens
atcttttctagtaaa

SEQ ID NO: 746829 - DNA, 15 bp, Homo sapiens
tcttttctagtaaag

SEQ ID NO: 746830 - DNA, 15 bp, Homo sapiens
cttttctagtaaagt

SEQ ID NO: 746831 - DNA, 15 bp, Homo sapiens
ttttctagtaaagtt

SEQ ID NO: 746832 - DNA, 15 bp, Homo sapiens
tttctagtaaagtta

SEQ ID NO: 746833 - DNA, 15 bp, Homo sapiens
ttctagtaaagttaa

SEQ ID NO: 746834 - DNA, 15 bp, Homo sapiens
tctagtaaagttaaa

SEQ ID NO: 746835 - DNA, 15 bp, Homo sapiens
ctagtaaagttaaac

SEQ ID NO: 746836 - DNA, 15 bp, Homo sapiens
tagtaaagttaaacc

SEQ ID NO: 746837 - DNA, 15 bp, Homo sapiens
agtaaagttaaaccg

SEQ ID NO: 746838 - DNA, 15 bp, Homo sapiens
gtaaagttaaaccga

SEQ ID NO: 746839 - DNA, 15 bp, Homo sapiens
taaagttaaaccgag

SEQ ID NO: 746840 - DNA, 15 bp, Homo sapiens
aaagttaaaccgagg

SEQ ID NO: 746841 - DNA, 15 bp, Homo sapiens
aagttaaaccgagga

SEQ ID NO: 746842 - DNA, 15 bp, Homo sapiens
agttaaaccgaggac

SEQ ID NO: 746843 - DNA, 15 bp, Homo sapiens
gttaaaccgaggacc

SEQ ID NO: 746844 - DNA, 15 bp, Homo sapiens
ttaaaccgaggaccc

SEQ ID NO: 746845 - DNA, 15 bp, Homo sapiens
taaaccgaggacccc

SEQ ID NO: 746846 - DNA, 15 bp, Homo sapiens
aaaccgaggacccct

SEQ ID NO: 746847 - DNA, 15 bp, Homo sapiens
aaccgaggacccctc

SEQ ID NO: 746848 - DNA, 15 bp, Homo sapiens
accgaggacccctca

SEQ ID NO: 746849 - DNA, 15 bp, Homo sapiens
ccgaggacccctcaa

SEQ ID NO: 746850 - DNA, 15 bp, Homo sapiens
cgaggacccctcaaa

SEQ ID NO: 746851 - DNA, 15 bp, Homo sapiens
gaggacccctcaaac

SEQ ID NO: 746852 - DNA, 15 bp, Homo sapiens
aggacccctcaaact

SEQ ID NO: 746853 - DNA, 15 bp, Homo sapiens
ggacccctcaaactt

SEQ ID NO: 746854 - DNA, 15 bp, Homo sapiens
gacccctcaaacttc

SEQ ID NO: 746855 - DNA, 15 bp, Homo sapiens
acccctcaaacttct

SEQ ID NO: 746856 - DNA, 15 bp, Homo sapiens
cccctcaaacttcta

SEQ ID NO: 746857 - DNA, 15 bp, Homo sapiens
ccctcaaacttctac

SEQ ID NO: 746858 - DNA, 15 bp, Homo sapiens
cctcaaacttctaca

SEQ ID NO: 746859 - DNA, 15 bp, Homo sapiens
ctcaaacttctacag

SEQ ID NO: 746860 - DNA, 15 bp, Homo sapiens
tcaaacttctacagg

SEQ ID NO: 746861 - DNA, 15 bp, Homo sapiens
caaacttctacaggg

SEQ ID NO: 746862 - DNA, 15 bp, Homo sapiens
aaacttctacagggc

SEQ ID NO: 746863 - DNA, 15 bp, Homo sapiens
aacttctacagggca

SEQ ID NO: 746864 - DNA, 15 bp, Homo sapiens
acttctacagggcac

SEQ ID NO: 746865 - DNA, 15 bp, Homo sapiens
cttctacagggcaca

SEQ ID NO: 746866 - DNA, 15 bp, Homo sapiens
ttctacagggcacag

SEQ ID NO: 746867 - DNA, 15 bp, Homo sapiens
tctacagggcacagc

SEQ ID NO: 746868 - DNA, 15 bp, Homo sapiens
ctacagggcacagca

SEQ ID NO: 746869 - DNA, 15 bp, Homo sapiens
tacagggcacagcaa

SEQ ID NO: 746870 - DNA, 15 bp, Homo sapiens
acagggcacagcaac

SEQ ID NO: 746871 - DNA, 15 bp, Homo sapiens
cagggcacagcaact

SEQ ID NO: 746872 - DNA, 15 bp, Homo sapiens
agggcacagcaactt

SEQ ID NO: 746873 - DNA, 15 bp, Homo sapiens
gggcacagcaacttg

SEQ ID NO: 746874 - DNA, 15 bp, Homo sapiens
ggcacagcaacttgt

SEQ ID NO: 746875 - DNA, 15 bp, Homo sapiens
gcacagcaacttgta

SEQ ID NO: 746876 - DNA, 15 bp, Homo sapiens
cacagcaacttgtag

SEQ ID NO: 746877 - DNA, 15 bp, Homo sapiens
acagcaacttgtagc

SEQ ID NO: 746878 - DNA, 15 bp, Homo sapiens
cagcaacttgtagca

SEQ ID NO: 746879 - DNA, 15 bp, Homo sapiens
agcaacttgtagcag

SEQ ID NO: 746880 - DNA, 15 bp, Homo sapiens
gcaacttgtagcagc

SEQ ID NO: 746881 - DNA, 15 bp, Homo sapiens
caacttgtagcagcc

SEQ ID NO: 746882 - DNA, 15 bp, Homo sapiens
aacttgtagcagcct

SEQ ID NO: 746883 - DNA, 15 bp, Homo sapiens
acttgtagcagcctc

SEQ ID NO: 746884 - DNA, 15 bp, Homo sapiens
cttgtagcagcctcc

SEQ ID NO: 746885 - DNA, 15 bp, Homo sapiens
ttgtagcagcctcct

SEQ ID NO: 746886 - DNA, 15 bp, Homo sapiens
tgtagcagcctcctt

SEQ ID NO: 746887 - DNA, 15 bp, Homo sapiens
gtagcagcctccttg

SEQ ID NO: 746888 - DNA, 15 bp, Homo sapiens
tagcagcctccttgg

SEQ ID NO: 746889 - DNA, 15 bp, Homo sapiens
agcagcctccttggc

SEQ ID NO: 746890 - DNA, 15 bp, Homo sapiens
gcagcctccttggcg

SEQ ID NO: 746891 - DNA, 15 bp, Homo sapiens
cagcctccttggcgg

SEQ ID NO: 746892 - DNA, 15 bp, Homo sapiens
agcctccttggcggc

SEQ ID NO: 746893 - DNA, 15 bp, Homo sapiens
gcctccttggcggct

SEQ ID NO: 746894 - DNA, 15 bp, Homo sapiens
cctccttggcggctg

SEQ ID NO: 746895 - DNA, 15 bp, Homo sapiens
ctccttggcggctga

SEQ ID NO: 746896 - DNA, 15 bp, Homo sapiens
tccttggcggctgag

SEQ ID NO: 746897 - DNA, 15 bp, Homo sapiens
ccttggcggctgaga

SEQ ID NO: 746898 - DNA, 15 bp, Homo sapiens
cttggcggctgagag

SEQ ID NO: 746899 - DNA, 15 bp, Homo sapiens
ttggcggctgagaga

SEQ ID NO: 746900 - DNA, 15 bp, Homo sapiens
tggcggctgagagaa

SEQ ID NO: 746901 - DNA, 15 bp, Homo sapiens
ggcggctgagagaag

SEQ ID NO: 746902 - DNA, 15 bp, Homo sapiens
gcggctgagagaagt

SEQ ID NO: 746903 - DNA, 15 bp, Homo sapiens
cggctgagagaagta

SEQ ID NO: 746904 - DNA, 15 bp, Homo sapiens
ggctgagagaagtag

SEQ ID NO: 746905 - DNA, 15 bp, Homo sapiens
gctgagagaagtagg

SEQ ID NO: 746906 - DNA, 15 bp, Homo sapiens
ctgagagaagtaggg

SEQ ID NO: 746907 - DNA, 15 bp, Homo sapiens
tgagagaagtaggga

SEQ ID NO: 746908 - DNA, 15 bp, Homo sapiens
gagagaagtagggaa

SEQ ID NO: 746909 - DNA, 15 bp, Homo sapiens
agagaagtagggaag

SEQ ID NO: 746910 - DNA, 15 bp, Homo sapiens
gagaagtagggaagc

SEQ ID NO: 746911 - DNA, 15 bp, Homo sapiens
agaagtagggaagcc

SEQ ID NO: 746912 - DNA, 15 bp, Homo sapiens
gaagtagggaagcct

SEQ ID NO: 746913 - DNA, 15 bp, Homo sapiens
aagtagggaagcctg

SEQ ID NO: 746914 - DNA, 15 bp, Homo sapiens
agtagggaagcctgg

SEQ ID NO: 746915 - DNA, 15 bp, Homo sapiens
gtagggaagcctggg

SEQ ID NO: 746916 - DNA, 15 bp, Homo sapiens
tagggaagcctgggg

SEQ ID NO: 746917 - DNA, 15 bp, Homo sapiens
agggaagcctggggc

SEQ ID NO: 746918 - DNA, 15 bp, Homo sapiens
gggaagcctggggct

SEQ ID NO: 746919 - DNA, 15 bp, Homo sapiens
ggaagcctggggcta

SEQ ID NO: 746920 - DNA, 15 bp, Homo sapiens
gaagcctggggctat

SEQ ID NO: 746921 - DNA, 15 bp, Homo sapiens
aagcctggggctatg

SEQ ID NO: 746922 - DNA, 15 bp, Homo sapiens
agcctggggctatgg

SEQ ID NO: 746923 - DNA, 15 bp, Homo sapiens
gcctggggctatggg

SEQ ID NO: 746924 - DNA, 15 bp, Homo sapiens
cctggggctatgggt

SEQ ID NO: 746925 - DNA, 15 bp, Homo sapiens
ctggggctatgggtg

SEQ ID NO: 746926 - DNA, 15 bp, Homo sapiens
tggggctatgggtga

SEQ ID NO: 746927 - DNA, 15 bp, Homo sapiens
ggggctatgggtgaa

SEQ ID NO: 746928 - DNA, 15 bp, Homo sapiens
gggctatgggtgaag

SEQ ID NO: 746929 - DNA, 15 bp, Homo sapiens
ggctatgggtgaagg

SEQ ID NO: 746930 - DNA, 15 bp, Homo sapiens
gctatgggtgaaggc

SEQ ID NO: 746931 - DNA, 15 bp, Homo sapiens
ctatgggtgaaggct

SEQ ID NO: 746932 - DNA, 15 bp, Homo sapiens
tatgggtgaaggctg

SEQ ID NO: 746933 - DNA, 15 bp, Homo sapiens
atgggtgaaggctgg

SEQ ID NO: 746934 - DNA, 15 bp, Homo sapiens
tgggtgaaggctggc

SEQ ID NO: 746935 - DNA, 15 bp, Homo sapiens
gggtgaaggctggct

SEQ ID NO: 746936 - DNA, 15 bp, Homo sapiens
ggtgaaggctggcta

SEQ ID NO: 746937 - DNA, 15 bp, Homo sapiens
gtgaaggctggctat

SEQ ID NO: 746938 - DNA, 15 bp, Homo sapiens
tgaaggctggctatg

SEQ ID NO: 746939 - DNA, 15 bp, Homo sapiens
gaaggctggctatga

SEQ ID NO: 746940 - DNA, 15 bp, Homo sapiens
aaggctggctatgaa

SEQ ID NO: 746941 - DNA, 15 bp, Homo sapiens
aggctggctatgaaa

SEQ ID NO: 746942 - DNA, 15 bp, Homo sapiens
ggctggctatgaaaa

SEQ ID NO: 746943 - DNA, 15 bp, Homo sapiens
gctggctatgaaaac

SEQ ID NO: 746944 - DNA, 15 bp, Homo sapiens
ctggctatgaaaaca

SEQ ID NO: 746945 - DNA, 15 bp, Homo sapiens
tggctatgaaaacac

SEQ ID NO: 746946 - DNA, 15 bp, Homo sapiens
ggctatgaaaacacc

SEQ ID NO: 746947 - DNA, 15 bp, Homo sapiens
gctatgaaaacacca

SEQ ID NO: 746948 - DNA, 15 bp, Homo sapiens
ctatgaaaacaccag

SEQ ID NO: 746949 - DNA, 15 bp, Homo sapiens
tatgaaaacaccagg

SEQ ID NO: 746950 - DNA, 15 bp, Homo sapiens
atgaaaacaccaggg

SEQ ID NO: 746951 - DNA, 15 bp, Homo sapiens
tgaaaacaccagggg

SEQ ID NO: 746952 - DNA, 15 bp, Homo sapiens
gaaaacaccaggggg

SEQ ID NO: 746953 - DNA, 15 bp, Homo sapiens
aaaacaccagggggg

SEQ ID NO: 746954 - DNA, 15 bp, Homo sapiens
aaacaccagggggga

SEQ ID NO: 746955 - DNA, 15 bp, Homo sapiens
aacaccaggggggaa

SEQ ID NO: 746956 - DNA, 15 bp, Homo sapiens
acaccaggggggaag

SEQ ID NO: 746957 - DNA, 15 bp, Homo sapiens
caccaggggggaagg

SEQ ID NO: 746958 - DNA, 15 bp, Homo sapiens
accaggggggaagga

SEQ ID NO: 746959 - DNA, 15 bp, Homo sapiens
ccaggggggaaggag

SEQ ID NO: 746960 - DNA, 15 bp, Homo sapiens
caggggggaaggagc

SEQ ID NO: 746961 - DNA, 15 bp, Homo sapiens
aggggggaaggagcc

SEQ ID NO: 746962 - DNA, 15 bp, Homo sapiens
ggggggaaggagcct

SEQ ID NO: 746963 - DNA, 15 bp, Homo sapiens
gggggaaggagcctg

SEQ ID NO: 746964 - DNA, 15 bp, Homo sapiens
ggggaaggagcctgt

SEQ ID NO: 746965 - DNA, 15 bp, Homo sapiens
gggaaggagcctgtc

SEQ ID NO: 746966 - DNA, 15 bp, Homo sapiens
ggaaggagcctgtct

SEQ ID NO: 746967 - DNA, 15 bp, Homo sapiens
gaaggagcctgtctc

SEQ ID NO: 746968 - DNA, 15 bp, Homo sapiens
aaggagcctgtctct

SEQ ID NO: 746969 - DNA, 15 bp, Homo sapiens
aggagcctgtctctc

SEQ ID NO: 746970 - DNA, 15 bp, Homo sapiens
ggagcctgtctctcc

SEQ ID NO: 746971 - DNA, 15 bp, Homo sapiens
gagcctgtctctcct

SEQ ID NO: 746972 - DNA, 15 bp, Homo sapiens
agcctgtctctcctg

SEQ ID NO: 746973 - DNA, 15 bp, Homo sapiens
gcctgtctctcctga

SEQ ID NO: 746974 - DNA, 15 bp, Homo sapiens
cctgtctctcctgat

SEQ ID NO: 746975 - DNA, 15 bp, Homo sapiens
ctgtctctcctgatc

SEQ ID NO: 746976 - DNA, 15 bp, Homo sapiens
tgtctctcctgatca

SEQ ID NO: 746977 - DNA, 15 bp, Homo sapiens
gtctctcctgatcat

SEQ ID NO: 746978 - DNA, 15 bp, Homo sapiens
tctctcctgatcatt

SEQ ID NO: 746979 - DNA, 15 bp, Homo sapiens
ctctcctgatcatta

SEQ ID NO: 746980 - DNA, 15 bp, Homo sapiens
tctcctgatcattaa

SEQ ID NO: 746981 - DNA, 15 bp, Homo sapiens
ctcctgatcattaat

SEQ ID NO: 746982 - DNA, 15 bp, Homo sapiens
tcctgatcattaatt

SEQ ID NO: 746983 - DNA, 15 bp, Homo sapiens
cctgatcattaatta

SEQ ID NO: 746984 - DNA, 15 bp, Homo sapiens
ctgatcattaattat

SEQ ID NO: 746985 - DNA, 15 bp, Homo sapiens
tgatcattaattata

SEQ ID NO: 746986 - DNA, 15 bp, Homo sapiens
gatcattaattatac

SEQ ID NO: 746987 - DNA, 15 bp, Homo sapiens
atcattaattataca

SEQ ID NO: 746988 - DNA, 15 bp, Homo sapiens
tcattaattatacat

SEQ ID NO: 746989 - DNA, 15 bp, Homo sapiens
cattaattatacatc

SEQ ID NO: 746990 - DNA, 15 bp, Homo sapiens
attaattatacatcc

SEQ ID NO: 746991 - DNA, 15 bp, Homo sapiens
ttaattatacatcct

SEQ ID NO: 746992 - DNA, 15 bp, Homo sapiens
taattatacatcctg

SEQ ID NO: 746993 - DNA, 15 bp, Homo sapiens
aattatacatcctgt

SEQ ID NO: 746994 - DNA, 15 bp, Homo sapiens
attatacatcctgtt

SEQ ID NO: 746995 - DNA, 15 bp, Homo sapiens
ttatacatcctgttg

SEQ ID NO: 746996 - DNA, 15 bp, Homo sapiens
tatacatcctgttgg

SEQ ID NO: 746997 - DNA, 15 bp, Homo sapiens
atacatcctgttggg

SEQ ID NO: 746998 - DNA, 15 bp, Homo sapiens
tacatcctgttgggt

SEQ ID NO: 746999 - DNA, 15 bp, Homo sapiens
acatcctgttgggtg

SEQ ID NO: 747000 - DNA, 15 bp, Homo sapiens
catcctgttgggtgc

SEQ ID NO: 747001 - DNA, 15 bp, Homo sapiens
atcctgttgggtgct

SEQ ID NO: 747002 - DNA, 15 bp, Homo sapiens
tcctgttgggtgctg

SEQ ID NO: 747003 - DNA, 15 bp, Homo sapiens
cctgttgggtgctgg

SEQ ID NO: 747004 - DNA, 15 bp, Homo sapiens
ctgttgggtgctgga

SEQ ID NO: 747005 - DNA, 15 bp, Homo sapiens
tgttgggtgctggag

SEQ ID NO: 747006 - DNA, 15 bp, Homo sapiens
gttgggtgctggagc

SEQ ID NO: 747007 - DNA, 15 bp, Homo sapiens
ttgggtgctggagct

SEQ ID NO: 747008 - DNA, 15 bp, Homo sapiens
tgggtgctggagctc

SEQ ID NO: 747009 - DNA, 15 bp, Homo sapiens
gggtgctggagctca

SEQ ID NO: 747010 - DNA, 15 bp, Homo sapiens
ggtgctggagctcag

SEQ ID NO: 747011 - DNA, 15 bp, Homo sapiens
gtgctggagctcagc

SEQ ID NO: 747012 - DNA, 15 bp, Homo sapiens
tgctggagctcagct

SEQ ID NO: 747013 - DNA, 15 bp, Homo sapiens
gctggagctcagctg

SEQ ID NO: 747014 - DNA, 15 bp, Homo sapiens
ctggagctcagctgt

SEQ ID NO: 747015 - DNA, 15 bp, Homo sapiens
tggagctcagctgtg

SEQ ID NO: 747016 - DNA, 15 bp, Homo sapiens
ggagctcagctgtgt

SEQ ID NO: 747017 - DNA, 15 bp, Homo sapiens
gagctcagctgtgtt

SEQ ID NO: 747018 - DNA, 15 bp, Homo sapiens
agctcagctgtgttt

SEQ ID NO: 747019 - DNA, 15 bp, Homo sapiens
gctcagctgtgtttt

SEQ ID NO: 747020 - DNA, 15 bp, Homo sapiens
ctcagctgtgttttg

SEQ ID NO: 747021 - DNA, 15 bp, Homo sapiens
tcagctgtgttttgt

SEQ ID NO: 747022 - DNA, 15 bp, Homo sapiens
cagctgtgttttgtg

SEQ ID NO: 747023 - DNA, 15 bp, Homo sapiens
agctgtgttttgtgg

SEQ ID NO: 747024 - DNA, 15 bp, Homo sapiens
gctgtgttttgtggc

SEQ ID NO: 747025 - DNA, 15 bp, Homo sapiens
ctgtgttttgtggca

SEQ ID NO: 747026 - DNA, 15 bp, Homo sapiens
tgtgttttgtggcag

SEQ ID NO: 747027 - DNA, 15 bp, Homo sapiens
gtgttttgtggcagc

SEQ ID NO: 747028 - DNA, 15 bp, Homo sapiens
tgttttgtggcagca

SEQ ID NO: 747029 - DNA, 15 bp, Homo sapiens
gttttgtggcagcac

SEQ ID NO: 747030 - DNA, 15 bp, Homo sapiens
ttttgtggcagcaca

SEQ ID NO: 747031 - DNA, 15 bp, Homo sapiens
tttgtggcagcacat

SEQ ID NO: 747032 - DNA, 15 bp, Homo sapiens
ttgtggcagcacatt

SEQ ID NO: 747033 - DNA, 15 bp, Homo sapiens
tgtggcagcacattt

SEQ ID NO: 747034 - DNA, 15 bp, Homo sapiens
gtggcagcacatttg

SEQ ID NO: 747035 - DNA, 15 bp, Homo sapiens
tggcagcacatttgt

SEQ ID NO: 747036 - DNA, 15 bp, Homo sapiens
ggcagcacatttgtg

SEQ ID NO: 747037 - DNA, 15 bp, Homo sapiens
gcagcacatttgtgt

SEQ ID NO: 747038 - DNA, 15 bp, Homo sapiens
cagcacatttgtgtt

SEQ ID NO: 747039 - DNA, 15 bp, Homo sapiens
agcacatttgtgttt

SEQ ID NO: 747040 - DNA, 15 bp, Homo sapiens
gcacatttgtgtttt

SEQ ID NO: 747041 - DNA, 15 bp, Homo sapiens
cacatttgtgttttg

SEQ ID NO: 747042 - DNA, 15 bp, Homo sapiens
acatttgtgttttgg

SEQ ID NO: 747043 - DNA, 15 bp, Homo sapiens
catttgtgttttgga

SEQ ID NO: 747044 - DNA, 15 bp, Homo sapiens
atttgtgttttggaa

SEQ ID NO: 747045 - DNA, 15 bp, Homo sapiens
tttgtgttttggaaa

SEQ ID NO: 747046 - DNA, 15 bp, Homo sapiens
ttgtgttttggaaaa

SEQ ID NO: 747047 - DNA, 15 bp, Homo sapiens
tgtgttttggaaaat

SEQ ID NO: 747048 - DNA, 15 bp, Homo sapiens
gtgttttggaaaata

SEQ ID NO: 747049 - DNA, 15 bp, Homo sapiens
tgttttggaaaatac

SEQ ID NO: 747050 - DNA, 15 bp, Homo sapiens
gttttggaaaatact

SEQ ID NO: 747051 - DNA, 15 bp, Homo sapiens
ttttggaaaatactg

SEQ ID NO: 747052 - DNA, 15 bp, Homo sapiens
tttggaaaatactgg

SEQ ID NO: 747053 - DNA, 15 bp, Homo sapiens
ttggaaaatactggt

SEQ ID NO: 747054 - DNA, 15 bp, Homo sapiens
tggaaaatactggtg

SEQ ID NO: 747055 - DNA, 15 bp, Homo sapiens
ggaaaatactggtgt

SEQ ID NO: 747056 - DNA, 15 bp, Homo sapiens
gaaaatactggtgta

SEQ ID NO: 747057 - DNA, 15 bp, Homo sapiens
aaaatactggtgtat

SEQ ID NO: 747058 - DNA, 15 bp, Homo sapiens
aaatactggtgtatt

SEQ ID NO: 747059 - DNA, 15 bp, Homo sapiens
aatactggtgtattg

SEQ ID NO: 747060 - DNA, 15 bp, Homo sapiens
atactggtgtattgg

SEQ ID NO: 747061 - DNA, 15 bp, Homo sapiens
tactggtgtattgga

SEQ ID NO: 747062 - DNA, 15 bp, Homo sapiens
actggtgtattggaa

SEQ ID NO: 747063 - DNA, 15 bp, Homo sapiens
ctggtgtattggaac

SEQ ID NO: 747064 - DNA, 15 bp, Homo sapiens
tggtgtattggaaca

SEQ ID NO: 747065 - DNA, 15 bp, Homo sapiens
ggtgtattggaacaa

SEQ ID NO: 747066 - DNA, 15 bp, Homo sapiens
gtgtattggaacaaa

SEQ ID NO: 747067 - DNA, 15 bp, Homo sapiens
tgtattggaacaaag

SEQ ID NO: 747068 - DNA, 15 bp, Homo sapiens
gtattggaacaaagg

SEQ ID NO: 747069 - DNA, 15 bp, Homo sapiens
tattggaacaaaggg

SEQ ID NO: 747070 - DNA, 15 bp, Homo sapiens
attggaacaaaggga

SEQ ID NO: 747071 - DNA, 15 bp, Homo sapiens
ttggaacaaagggag

SEQ ID NO: 747072 - DNA, 15 bp, Homo sapiens
tggaacaaagggaga

SEQ ID NO: 747073 - DNA, 15 bp, Homo sapiens
ggaacaaagggagaa

SEQ ID NO: 747074 - DNA, 15 bp, Homo sapiens
gaacaaagggagaaa

SEQ ID NO: 747075 - DNA, 15 bp, Homo sapiens
aacaaagggagaaat

SEQ ID NO: 747076 - DNA, 15 bp, Homo sapiens
acaaagggagaaata

SEQ ID NO: 747077 - DNA, 15 bp, Homo sapiens
caaagggagaaatat

SEQ ID NO: 747078 - DNA, 15 bp, Homo sapiens
aaagggagaaatatg

SEQ ID NO: 747079 - DNA, 15 bp, Homo sapiens
aagggagaaatatga

SEQ ID NO: 747080 - DNA, 15 bp, Homo sapiens
agggagaaatatgaa

SEQ ID NO: 747081 - DNA, 15 bp, Homo sapiens
gggagaaatatgaaa

SEQ ID NO: 747082 - DNA, 15 bp, Homo sapiens
ggagaaatatgaaaa

SEQ ID NO: 747083 - DNA, 15 bp, Homo sapiens
gagaaatatgaaaac

SEQ ID NO: 747084 - DNA, 15 bp, Homo sapiens
agaaatatgaaaacc

SEQ ID NO: 747085 - DNA, 15 bp, Homo sapiens
gaaatatgaaaacca

SEQ ID NO: 747086 - DNA, 15 bp, Homo sapiens
aaatatgaaaaccat

SEQ ID NO: 747087 - DNA, 15 bp, Homo sapiens
aatatgaaaaccatc

SEQ ID NO: 747088 - DNA, 15 bp, Homo sapiens
atatgaaaaccatca

SEQ ID NO: 747089 - DNA, 15 bp, Homo sapiens
tatgaaaaccatcat

SEQ ID NO: 747090 - DNA, 15 bp, Homo sapiens
atgaaaaccatcatt

SEQ ID NO: 747091 - DNA, 15 bp, Homo sapiens
tgaaaaccatcattc

SEQ ID NO: 747092 - DNA, 15 bp, Homo sapiens
gaaaaccatcattct

SEQ ID NO: 747093 - DNA, 15 bp, Homo sapiens
aaaaccatcattctc

SEQ ID NO: 747094 - DNA, 15 bp, Homo sapiens
aaaccatcattctct

SEQ ID NO: 747095 - DNA, 15 bp, Homo sapiens
aaccatcattctctt

SEQ ID NO: 747096 - DNA, 15 bp, Homo sapiens
accatcattctcttc

SEQ ID NO: 747097 - DNA, 15 bp, Homo sapiens
ccatcattctcttcg

SEQ ID NO: 747098 - DNA, 15 bp, Homo sapiens
catcattctcttcgt

SEQ ID NO: 747099 - DNA, 15 bp, Homo sapiens
atcattctcttcgtc

SEQ ID NO: 747100 - DNA, 15 bp, Homo sapiens
tcattctcttcgtca

SEQ ID NO: 747101 - DNA, 15 bp, Homo sapiens
cattctcttcgtcat

SEQ ID NO: 747102 - DNA, 15 bp, Homo sapiens
attctcttcgtcatt

SEQ ID NO: 747103 - DNA, 15 bp, Homo sapiens
ttctcttcgtcattc

SEQ ID NO: 747104 - DNA, 15 bp, Homo sapiens
tctcttcgtcattct

SEQ ID NO: 747105 - DNA, 15 bp, Homo sapiens
ctcttcgtcattctc

SEQ ID NO: 747106 - DNA, 15 bp, Homo sapiens
tcttcgtcattctct

SEQ ID NO: 747107 - DNA, 15 bp, Homo sapiens
cttcgtcattctctg

SEQ ID NO: 747108 - DNA, 15 bp, Homo sapiens
ttcgtcattctctgg

SEQ ID NO: 747109 - DNA, 15 bp, Homo sapiens
tcgtcattctctggc

SEQ ID NO: 747110 - DNA, 15 bp, Homo sapiens
cgtcattctctggct

SEQ ID NO: 747111 - DNA, 15 bp, Homo sapiens
gtcattctctggctt

SEQ ID NO: 747112 - DNA, 15 bp, Homo sapiens
tcattctctggcttc

SEQ ID NO: 747113 - DNA, 15 bp, Homo sapiens
cattctctggcttct

SEQ ID NO: 747114 - DNA, 15 bp, Homo sapiens
attctctggcttctc

SEQ ID NO: 747115 - DNA, 15 bp, Homo sapiens
ttctctggcttctcc

SEQ ID NO: 747116 - DNA, 15 bp, Homo sapiens
tctctggcttctccg

SEQ ID NO: 747117 - DNA, 15 bp, Homo sapiens
ctctggcttctccgg

SEQ ID NO: 747118 - DNA, 15 bp, Homo sapiens
tctggcttctccgga

SEQ ID NO: 747119 - DNA, 15 bp, Homo sapiens
ctggcttctccggag

SEQ ID NO: 747120 - DNA, 15 bp, Homo sapiens
tggcttctccggagg

SEQ ID NO: 747121 - DNA, 15 bp, Homo sapiens
ggcttctccggaggc

SEQ ID NO: 747122 - DNA, 15 bp, Homo sapiens
gcttctccggaggcc

SEQ ID NO: 747123 - DNA, 15 bp, Homo sapiens
cttctccggaggcct

SEQ ID NO: 747124 - DNA, 15 bp, Homo sapiens
ttctccggaggcctg

SEQ ID NO: 747125 - DNA, 15 bp, Homo sapiens
tctccggaggcctgc

SEQ ID NO: 747126 - DNA, 15 bp, Homo sapiens
ctccggaggcctgca

SEQ ID NO: 747127 - DNA, 15 bp, Homo sapiens
tccggaggcctgcag

SEQ ID NO: 747128 - DNA, 15 bp, Homo sapiens
ccggaggcctgcagg

SEQ ID NO: 747129 - DNA, 15 bp, Homo sapiens
cggaggcctgcaggt

SEQ ID NO: 747130 - DNA, 15 bp, Homo sapiens
ggaggcctgcaggtg

SEQ ID NO: 747131 - DNA, 15 bp, Homo sapiens
gaggcctgcaggtgc

SEQ ID NO: 747132 - DNA, 15 bp, Homo sapiens
aggcctgcaggtgct

SEQ ID NO: 747133 - DNA, 15 bp, Homo sapiens
ggcctgcaggtgctg

SEQ ID NO: 747134 - DNA, 15 bp, Homo sapiens
gcctgcaggtgctgg

SEQ ID NO: 747135 - DNA, 15 bp, Homo sapiens
cctgcaggtgctggt

SEQ ID NO: 747136 - DNA, 15 bp, Homo sapiens
ctgcaggtgctggtc

SEQ ID NO: 747137 - DNA, 15 bp, Homo sapiens
tgcaggtgctggtcg

SEQ ID NO: 747138 - DNA, 15 bp, Homo sapiens
gcaggtgctggtcgg

SEQ ID NO: 747139 - DNA, 15 bp, Homo sapiens
caggtgctggtcgga

SEQ ID NO: 747140 - DNA, 15 bp, Homo sapiens
aggtgctggtcggag

SEQ ID NO: 747141 - DNA, 15 bp, Homo sapiens
ggtgctggtcggaga

SEQ ID NO: 747142 - DNA, 15 bp, Homo sapiens
gtgctggtcggagag

SEQ ID NO: 747143 - DNA, 15 bp, Homo sapiens
tgctggtcggagagt

SEQ ID NO: 747144 - DNA, 15 bp, Homo sapiens
gctggtcggagagtt

SEQ ID NO: 747145 - DNA, 15 bp, Homo sapiens
ctggtcggagagttt

SEQ ID NO: 747146 - DNA, 15 bp, Homo sapiens
tggtcggagagtttt

SEQ ID NO: 747147 - DNA, 15 bp, Homo sapiens
ggtcggagagttttc

SEQ ID NO: 747148 - DNA, 15 bp, Homo sapiens
gtcggagagttttct

SEQ ID NO: 747149 - DNA, 15 bp, Homo sapiens
tcggagagttttctt

SEQ ID NO: 747150 - DNA, 15 bp, Homo sapiens
cggagagttttcttt

SEQ ID NO: 747151 - DNA, 15 bp, Homo sapiens
ggagagttttctttg

SEQ ID NO: 747152 - DNA, 15 bp, Homo sapiens
gagagttttctttgg

SEQ ID NO: 747153 - DNA, 15 bp, Homo sapiens
agagttttctttgga

SEQ ID NO: 747154 - DNA, 15 bp, Homo sapiens
gagttttctttggaa

SEQ ID NO: 747155 - DNA, 15 bp, Homo sapiens
agttttctttggaat

SEQ ID NO: 747156 - DNA, 15 bp, Homo sapiens
gttttctttggaatt

SEQ ID NO: 747157 - DNA, 15 bp, Homo sapiens
ttttctttggaatta

SEQ ID NO: 747158 - DNA, 15 bp, Homo sapiens
tttctttggaattac

SEQ ID NO: 747159 - DNA, 15 bp, Homo sapiens
ttctttggaattacc

SEQ ID NO: 747160 - DNA, 15 bp, Homo sapiens
tctttggaattacct

SEQ ID NO: 747161 - DNA, 15 bp, Homo sapiens
ctttggaattacctt

SEQ ID NO: 747162 - DNA, 15 bp, Homo sapiens
tttggaattaccttc

SEQ ID NO: 747163 - DNA, 15 bp, Homo sapiens
ttggaattaccttct

SEQ ID NO: 747164 - DNA, 15 bp, Homo sapiens
tggaattaccttctc

SEQ ID NO: 747165 - DNA, 15 bp, Homo sapiens
ggaattaccttctca

SEQ ID NO: 747166 - DNA, 15 bp, Homo sapiens
gaattaccttctcag

SEQ ID NO: 747167 - DNA, 15 bp, Homo sapiens
aattaccttctcagc

SEQ ID NO: 747168 - DNA, 15 bp, Homo sapiens
attaccttctcagcc

SEQ ID NO: 747169 - DNA, 15 bp, Homo sapiens
ttaccttctcagccg

SEQ ID NO: 747170 - DNA, 15 bp, Homo sapiens
taccttctcagccgt

SEQ ID NO: 747171 - DNA, 15 bp, Homo sapiens
accttctcagccgta

SEQ ID NO: 747172 - DNA, 15 bp, Homo sapiens
ccttctcagccgtag

SEQ ID NO: 747173 - DNA, 15 bp, Homo sapiens
cttctcagccgtaga

SEQ ID NO: 747174 - DNA, 15 bp, Homo sapiens
ttctcagccgtagag

SEQ ID NO: 747175 - DNA, 15 bp, Homo sapiens
tctcagccgtagagg

SEQ ID NO: 747176 - DNA, 15 bp, Homo sapiens
ctcagccgtagaggt

SEQ ID NO: 747177 - DNA, 15 bp, Homo sapiens
tcagccgtagaggtt

SEQ ID NO: 747178 - DNA, 15 bp, Homo sapiens
cagccgtagaggttt

SEQ ID NO: 747179 - DNA, 15 bp, Homo sapiens
agccgtagaggtttc

SEQ ID NO: 747180 - DNA, 15 bp, Homo sapiens
gccgtagaggtttct

SEQ ID NO: 747181 - DNA, 15 bp, Homo sapiens
ccgtagaggtttctt

SEQ ID NO: 747182 - DNA, 15 bp, Homo sapiens
cgtagaggtttcttc

SEQ ID NO: 747183 - DNA, 15 bp, Homo sapiens
gtagaggtttcttct

SEQ ID NO: 747184 - DNA, 15 bp, Homo sapiens
tagaggtttcttctt

SEQ ID NO: 747185 - DNA, 15 bp, Homo sapiens
agaggtttcttctta

SEQ ID NO: 747186 - DNA, 15 bp, Homo sapiens
gaggtttcttcttat

SEQ ID NO: 747187 - DNA, 15 bp, Homo sapiens
aggtttcttcttatt

SEQ ID NO: 747188 - DNA, 15 bp, Homo sapiens
ggtttcttcttattt

SEQ ID NO: 747189 - DNA, 15 bp, Homo sapiens
gtttcttcttatttg

SEQ ID NO: 747190 - DNA, 15 bp, Homo sapiens
tttcttcttatttgt

SEQ ID NO: 747191 - DNA, 15 bp, Homo sapiens
ttcttcttatttgtt

SEQ ID NO: 747192 - DNA, 15 bp, Homo sapiens
tcttcttatttgtta

SEQ ID NO: 747193 - DNA, 15 bp, Homo sapiens
cttcttatttgttaa

SEQ ID NO: 747194 - DNA, 15 bp, Homo sapiens
ttcttatttgttaag

SEQ ID NO: 747195 - DNA, 15 bp, Homo sapiens
tcttatttgttaagg

SEQ ID NO: 747196 - DNA, 15 bp, Homo sapiens
cttatttgttaagga

SEQ ID NO: 747197 - DNA, 15 bp, Homo sapiens
ttatttgttaaggag

SEQ ID NO: 747198 - DNA, 15 bp, Homo sapiens
tatttgttaaggagg

SEQ ID NO: 747199 - DNA, 15 bp, Homo sapiens
atttgttaaggaggc

SEQ ID NO: 747200 - DNA, 15 bp, Homo sapiens
tttgttaaggaggca

SEQ ID NO: 747201 - DNA, 15 bp, Homo sapiens
ttgttaaggaggcaa

SEQ ID NO: 747202 - DNA, 15 bp, Homo sapiens
tgttaaggaggcaaa

SEQ ID NO: 747203 - DNA, 15 bp, Homo sapiens
gttaaggaggcaaac

SEQ ID NO: 747204 - DNA, 15 bp, Homo sapiens
ttaaggaggcaaacc

SEQ ID NO: 747205 - DNA, 15 bp, Homo sapiens
taaggaggcaaacct

SEQ ID NO: 747206 - DNA, 15 bp, Homo sapiens
aaggaggcaaacctc

SEQ ID NO: 747207 - DNA, 15 bp, Homo sapiens
aggaggcaaacctcc

SEQ ID NO: 747208 - DNA, 15 bp, Homo sapiens
ggaggcaaacctccc

SEQ ID NO: 747209 - DNA, 15 bp, Homo sapiens
gaggcaaacctccca

SEQ ID NO: 747210 - DNA, 15 bp, Homo sapiens
aggcaaacctcccac

SEQ ID NO: 747211 - DNA, 15 bp, Homo sapiens
ggcaaacctcccacc

SEQ ID NO: 747212 - DNA, 15 bp, Homo sapiens
gcaaacctcccacct

SEQ ID NO: 747213 - DNA, 15 bp, Homo sapiens
caaacctcccacctt

SEQ ID NO: 747214 - DNA, 15 bp, Homo sapiens
aaacctcccaccttc

SEQ ID NO: 747215 - DNA, 15 bp, Homo sapiens
aacctcccaccttcc

SEQ ID NO: 747216 - DNA, 15 bp, Homo sapiens
acctcccaccttcca

SEQ ID NO: 747217 - DNA, 15 bp, Homo sapiens
cctcccaccttccag

SEQ ID NO: 747218 - DNA, 15 bp, Homo sapiens
ctcccaccttccaga

SEQ ID NO: 747219 - DNA, 15 bp, Homo sapiens
tcccaccttccagag

SEQ ID NO: 747220 - DNA, 15 bp, Homo sapiens
cccaccttccagaga

SEQ ID NO: 747221 - DNA, 15 bp, Homo sapiens
ccaccttccagagaa

SEQ ID NO: 747222 - DNA, 15 bp, Homo sapiens
caccttccagagaag

SEQ ID NO: 747223 - DNA, 15 bp, Homo sapiens
accttccagagaagc

SEQ ID NO: 747224 - DNA, 15 bp, Homo sapiens
ccttccagagaagcc

SEQ ID NO: 747225 - DNA, 15 bp, Homo sapiens
cttccagagaagccc

SEQ ID NO: 747226 - DNA, 15 bp, Homo sapiens
ttccagagaagccct

SEQ ID NO: 747227 - DNA, 15 bp, Homo sapiens
tccagagaagccctc

SEQ ID NO: 747228 - DNA, 15 bp, Homo sapiens
ccagagaagccctca

SEQ ID NO: 747229 - DNA, 15 bp, Homo sapiens
cagagaagccctcag

SEQ ID NO: 747230 - DNA, 15 bp, Homo sapiens
agagaagccctcagg

SEQ ID NO: 747231 - DNA, 15 bp, Homo sapiens
gagaagccctcaggt

SEQ ID NO: 747232 - DNA, 15 bp, Homo sapiens
agaagccctcaggtt

SEQ ID NO: 747233 - DNA, 15 bp, Homo sapiens
gaagccctcaggtta

SEQ ID NO: 747234 - DNA, 15 bp, Homo sapiens
aagccctcaggttaa

SEQ ID NO: 747235 - DNA, 15 bp, Homo sapiens
agccctcaggttaag

SEQ ID NO: 747236 - DNA, 15 bp, Homo sapiens
gccctcaggttaagc

SEQ ID NO: 747237 - DNA, 15 bp, Homo sapiens
ccctcaggttaagca

SEQ ID NO: 747238 - DNA, 15 bp, Homo sapiens
cctcaggttaagcaa

SEQ ID NO: 747239 - DNA, 15 bp, Homo sapiens
ctcaggttaagcaaa

SEQ ID NO: 747240 - DNA, 15 bp, Homo sapiens
tcaggttaagcaaag

SEQ ID NO: 747241 - DNA, 15 bp, Homo sapiens
caggttaagcaaagc

SEQ ID NO: 747242 - DNA, 15 bp, Homo sapiens
aggttaagcaaagcc

SEQ ID NO: 747243 - DNA, 15 bp, Homo sapiens
ggttaagcaaagccc

SEQ ID NO: 747244 - DNA, 15 bp, Homo sapiens
gttaagcaaagccct

SEQ ID NO: 747245 - DNA, 15 bp, Homo sapiens
ttaagcaaagcccta

SEQ ID NO: 747246 - DNA, 15 bp, Homo sapiens
taagcaaagccctat

SEQ ID NO: 747247 - DNA, 15 bp, Homo sapiens
aagcaaagccctata

SEQ ID NO: 747248 - DNA, 15 bp, Homo sapiens
agcaaagccctatac

SEQ ID NO: 747249 - DNA, 15 bp, Homo sapiens
gcaaagccctataca

SEQ ID NO: 747250 - DNA, 15 bp, Homo sapiens
caaagccctatacac

SEQ ID NO: 747251 - DNA, 15 bp, Homo sapiens
aaagccctatacacc

SEQ ID NO: 747252 - DNA, 15 bp, Homo sapiens
aagccctatacacca

SEQ ID NO: 747253 - DNA, 15 bp, Homo sapiens
agccctatacaccag

SEQ ID NO: 747254 - DNA, 15 bp, Homo sapiens
gccctatacaccaga

SEQ ID NO: 747255 - DNA, 15 bp, Homo sapiens
ccctatacaccagat

SEQ ID NO: 747256 - DNA, 15 bp, Homo sapiens
cctatacaccagatc

SEQ ID NO: 747257 - DNA, 15 bp, Homo sapiens
ctatacaccagatcc

SEQ ID NO: 747258 - DNA, 15 bp, Homo sapiens
tatacaccagatccc

SEQ ID NO: 747259 - DNA, 15 bp, Homo sapiens
atacaccagatccct

SEQ ID NO: 747260 - DNA, 15 bp, Homo sapiens
tacaccagatccctg

SEQ ID NO: 747261 - DNA, 15 bp, Homo sapiens
acaccagatccctga

SEQ ID NO: 747262 - DNA, 15 bp, Homo sapiens
caccagatccctgac

SEQ ID NO: 747263 - DNA, 15 bp, Homo sapiens
accagatccctgact

SEQ ID NO: 747264 - DNA, 15 bp, Homo sapiens
ccagatccctgacta

SEQ ID NO: 747265 - DNA, 15 bp, Homo sapiens
cagatccctgactag

SEQ ID NO: 747266 - DNA, 15 bp, Homo sapiens
agatccctgactagc

SEQ ID NO: 747267 - DNA, 15 bp, Homo sapiens
gatccctgactagcc

SEQ ID NO: 747268 - DNA, 15 bp, Homo sapiens
atccctgactagcct

SEQ ID NO: 747269 - DNA, 15 bp, Homo sapiens
tccctgactagcctt

SEQ ID NO: 747270 - DNA, 15 bp, Homo sapiens
ccctgactagccttc

SEQ ID NO: 747271 - DNA, 15 bp, Homo sapiens
cctgactagccttcc

SEQ ID NO: 747272 - DNA, 15 bp, Homo sapiens
ctgactagccttcct

SEQ ID NO: 747273 - DNA, 15 bp, Homo sapiens
tgactagccttcctg

SEQ ID NO: 747274 - DNA, 15 bp, Homo sapiens
gactagccttcctgc

SEQ ID NO: 747275 - DNA, 15 bp, Homo sapiens
actagccttcctgct

SEQ ID NO: 747276 - DNA, 15 bp, Homo sapiens
ctagccttcctgctg

SEQ ID NO: 747277 - DNA, 15 bp, Homo sapiens
tagccttcctgctga

SEQ ID NO: 747278 - DNA, 15 bp, Homo sapiens
agccttcctgctgag

SEQ ID NO: 747279 - DNA, 15 bp, Homo sapiens
gccttcctgctgaga

SEQ ID NO: 747280 - DNA, 15 bp, Homo sapiens
ccttcctgctgagaa

SEQ ID NO: 747281 - DNA, 15 bp, Homo sapiens
cttcctgctgagaac

SEQ ID NO: 747282 - DNA, 15 bp, Homo sapiens
ttcctgctgagaaca

SEQ ID NO: 747283 - DNA, 15 bp, Homo sapiens
tcctgctgagaacag

SEQ ID NO: 747284 - DNA, 15 bp, Homo sapiens
cctgctgagaacagc

SEQ ID NO: 747285 - DNA, 15 bp, Homo sapiens
ctgctgagaacagct

SEQ ID NO: 747286 - DNA, 15 bp, Homo sapiens
tgctgagaacagctt

SEQ ID NO: 747287 - DNA, 15 bp, Homo sapiens
gctgagaacagctta

SEQ ID NO: 747288 - DNA, 15 bp, Homo sapiens
ctgagaacagcttat

SEQ ID NO: 747289 - DNA, 15 bp, Homo sapiens
tgagaacagcttatt

SEQ ID NO: 747290 - DNA, 15 bp, Homo sapiens
gagaacagcttattc

SEQ ID NO: 747291 - DNA, 15 bp, Homo sapiens
agaacagcttattcc

SEQ ID NO: 747292 - DNA, 15 bp, Homo sapiens
gaacagcttattcct

SEQ ID NO: 747293 - DNA, 15 bp, Homo sapiens
aacagcttattcctg

SEQ ID NO: 747294 - DNA, 15 bp, Homo sapiens
acagcttattcctgg

SEQ ID NO: 747295 - DNA, 15 bp, Homo sapiens
cagcttattcctgga

SEQ ID NO: 747296 - DNA, 15 bp, Homo sapiens
agcttattcctggag

SEQ ID NO: 747297 - DNA, 15 bp, Homo sapiens
gcttattcctggagc

SEQ ID NO: 747298 - DNA, 15 bp, Homo sapiens
cttattcctggagcc

SEQ ID NO: 747299 - DNA, 15 bp, Homo sapiens
ttattcctggagcct

SEQ ID NO: 747300 - DNA, 15 bp, Homo sapiens
tattcctggagcctt

SEQ ID NO: 747301 - DNA, 15 bp, Homo sapiens
attcctggagccttc

SEQ ID NO: 747302 - DNA, 15 bp, Homo sapiens
ttcctggagccttca

SEQ ID NO: 747303 - DNA, 15 bp, Homo sapiens
tcctggagccttcaa

SEQ ID NO: 747304 - DNA, 15 bp, Homo sapiens
cctggagccttcaaa

SEQ ID NO: 747305 - DNA, 15 bp, Homo sapiens
ctggagccttcaaat

SEQ ID NO: 747306 - DNA, 15 bp, Homo sapiens
tggagccttcaaatt

SEQ ID NO: 747307 - DNA, 15 bp, Homo sapiens
ggagccttcaaattc

SEQ ID NO: 747308 - DNA, 15 bp, Homo sapiens
gagccttcaaattcc

SEQ ID NO: 747309 - DNA, 15 bp, Homo sapiens
agccttcaaattccc

SEQ ID NO: 747310 - DNA, 15 bp, Homo sapiens
gccttcaaattccca

SEQ ID NO: 747311 - DNA, 15 bp, Homo sapiens
ccttcaaattcccac

SEQ ID NO: 747312 - DNA, 15 bp, Homo sapiens
cttcaaattcccaca

SEQ ID NO: 747313 - DNA, 15 bp, Homo sapiens
ttcaaattcccacat

SEQ ID NO: 747314 - DNA, 15 bp, Homo sapiens
tcaaattcccacatt

SEQ ID NO: 747315 - DNA, 15 bp, Homo sapiens
caaattcccacattc

SEQ ID NO: 747316 - DNA, 15 bp, Homo sapiens
aaattcccacattcc

SEQ ID NO: 747317 - DNA, 15 bp, Homo sapiens
aattcccacattccc

SEQ ID NO: 747318 - DNA, 15 bp, Homo sapiens
attcccacattccct

SEQ ID NO: 747319 - DNA, 15 bp, Homo sapiens
ttcccacattccctc

SEQ ID NO: 747320 - DNA, 15 bp, Homo sapiens
tcccacattccctct

SEQ ID NO: 747321 - DNA, 15 bp, Homo sapiens
cccacattccctctc

SEQ ID NO: 747322 - DNA, 15 bp, Homo sapiens
ccacattccctctct

SEQ ID NO: 747323 - DNA, 15 bp, Homo sapiens
cacattccctctctc

SEQ ID NO: 747324 - DNA, 15 bp, Homo sapiens
acattccctctctcc

SEQ ID NO: 747325 - DNA, 15 bp, Homo sapiens
cattccctctctcca

SEQ ID NO: 747326 - DNA, 15 bp, Homo sapiens
attccctctctccat

SEQ ID NO: 747327 - DNA, 15 bp, Homo sapiens
ttccctctctccatc

SEQ ID NO: 747328 - DNA, 15 bp, Homo sapiens
tccctctctccatcc

SEQ ID NO: 747329 - DNA, 15 bp, Homo sapiens
ccctctctccatcct

SEQ ID NO: 747330 - DNA, 15 bp, Homo sapiens
cctctctccatcctt

SEQ ID NO: 747331 - DNA, 15 bp, Homo sapiens
ctctctccatccttc

SEQ ID NO: 747332 - DNA, 15 bp, Homo sapiens
tctctccatccttct

SEQ ID NO: 747333 - DNA, 15 bp, Homo sapiens
ctctccatccttctc

SEQ ID NO: 747334 - DNA, 15 bp, Homo sapiens
tctccatccttctcc

SEQ ID NO: 747335 - DNA, 15 bp, Homo sapiens
ctccatccttctcct

SEQ ID NO: 747336 - DNA, 15 bp, Homo sapiens
tccatccttctcctc

SEQ ID NO: 747337 - DNA, 15 bp, Homo sapiens
ccatccttctcctcc

SEQ ID NO: 747338 - DNA, 15 bp, Homo sapiens
catccttctcctcca

SEQ ID NO: 747339 - DNA, 15 bp, Homo sapiens
atccttctcctccac

SEQ ID NO: 747340 - DNA, 15 bp, Homo sapiens
tccttctcctccacc

SEQ ID NO: 747341 - DNA, 15 bp, Homo sapiens
ccttctcctccacct

SEQ ID NO: 747342 - DNA, 15 bp, Homo sapiens
cttctcctccacctc

SEQ ID NO: 747343 - DNA, 15 bp, Homo sapiens
ttctcctccacctcc

SEQ ID NO: 747344 - DNA, 15 bp, Homo sapiens
tctcctccacctccc

SEQ ID NO: 747345 - DNA, 15 bp, Homo sapiens
ctcctccacctcccc

SEQ ID NO: 747346 - DNA, 15 bp, Homo sapiens
tcctccacctccccc

SEQ ID NO: 747347 - DNA, 15 bp, Homo sapiens
cctccacctccccca

SEQ ID NO: 747348 - DNA, 15 bp, Homo sapiens
ctccacctcccccaa

SEQ ID NO: 747349 - DNA, 15 bp, Homo sapiens
tccacctcccccaac

SEQ ID NO: 747350 - DNA, 15 bp, Homo sapiens
ccacctcccccaaca

SEQ ID NO: 747351 - DNA, 15 bp, Homo sapiens
cacctcccccaacag

SEQ ID NO: 747352 - DNA, 15 bp, Homo sapiens
acctcccccaacagt

SEQ ID NO: 747353 - DNA, 15 bp, Homo sapiens
cctcccccaacagtc

SEQ ID NO: 747354 - DNA, 15 bp, Homo sapiens
ctcccccaacagtct

SEQ ID NO: 747355 - DNA, 15 bp, Homo sapiens
tcccccaacagtctc

SEQ ID NO: 747356 - DNA, 15 bp, Homo sapiens
cccccaacagtctcg

SEQ ID NO: 747357 - DNA, 15 bp, Homo sapiens
ccccaacagtctcgg

SEQ ID NO: 747358 - DNA, 15 bp, Homo sapiens
cccaacagtctcggg

SEQ ID NO: 747359 - DNA, 15 bp, Homo sapiens
ccaacagtctcggga

SEQ ID NO: 747360 - DNA, 15 bp, Homo sapiens
caacagtctcgggaa

SEQ ID NO: 747361 - DNA, 15 bp, Homo sapiens
aacagtctcgggaat

SEQ ID NO: 747362 - DNA, 15 bp, Homo sapiens
acagtctcgggaatt

SEQ ID NO: 747363 - DNA, 15 bp, Homo sapiens
cagtctcgggaattt

SEQ ID NO: 747364 - DNA, 15 bp, Homo sapiens
agtctcgggaatttt

SEQ ID NO: 747365 - DNA, 15 bp, Homo sapiens
gtctcgggaattttg

SEQ ID NO: 747366 - DNA, 15 bp, Homo sapiens
tctcgggaattttgt

SEQ ID NO: 747367 - DNA, 15 bp, Homo sapiens
ctcgggaattttgtt

SEQ ID NO: 747368 - DNA, 15 bp, Homo sapiens
tcgggaattttgttc

SEQ ID NO: 747369 - DNA, 15 bp, Homo sapiens
cgggaattttgttcc

SEQ ID NO: 747370 - DNA, 15 bp, Homo sapiens
gggaattttgttccc

SEQ ID NO: 747371 - DNA, 15 bp, Homo sapiens
ggaattttgttcccc

SEQ ID NO: 747372 - DNA, 15 bp, Homo sapiens
gaattttgttccccg

SEQ ID NO: 747373 - DNA, 15 bp, Homo sapiens
aattttgttccccgg

SEQ ID NO: 747374 - DNA, 15 bp, Homo sapiens
attttgttccccggt

SEQ ID NO: 747375 - DNA, 15 bp, Homo sapiens
ttttgttccccggtt

SEQ ID NO: 747376 - DNA, 15 bp, Homo sapiens
tttgttccccggttt

SEQ ID NO: 747377 - DNA, 15 bp, Homo sapiens
ttgttccccggttta

SEQ ID NO: 747378 - DNA, 15 bp, Homo sapiens
tgttccccggtttac

SEQ ID NO: 747379 - DNA, 15 bp, Homo sapiens
gttccccggtttact

SEQ ID NO: 747380 - DNA, 15 bp, Homo sapiens
ttccccggtttactg

SEQ ID NO: 747381 - DNA, 15 bp, Homo sapiens
tccccggtttactga

SEQ ID NO: 747382 - DNA, 15 bp, Homo sapiens
ccccggtttactgag

SEQ ID NO: 747383 - DNA, 15 bp, Homo sapiens
cccggtttactgaga

SEQ ID NO: 747384 - DNA, 15 bp, Homo sapiens
ccggtttactgagat

SEQ ID NO: 747385 - DNA, 15 bp, Homo sapiens
cggtttactgagatt

SEQ ID NO: 747386 - DNA, 15 bp, Homo sapiens
ggtttactgagattc

SEQ ID NO: 747387 - DNA, 15 bp, Homo sapiens
gtttactgagattca

SEQ ID NO: 747388 - DNA, 15 bp, Homo sapiens
tttactgagattcag

SEQ ID NO: 747389 - DNA, 15 bp, Homo sapiens
ttactgagattcagc

SEQ ID NO: 747390 - DNA, 15 bp, Homo sapiens
tactgagattcagcg

SEQ ID NO: 747391 - DNA, 15 bp, Homo sapiens
actgagattcagcga

SEQ ID NO: 747392 - DNA, 15 bp, Homo sapiens
ctgagattcagcgac

SEQ ID NO: 747393 - DNA, 15 bp, Homo sapiens
tgagattcagcgact

SEQ ID NO: 747394 - DNA, 15 bp, Homo sapiens
gagattcagcgactg

SEQ ID NO: 747395 - DNA, 15 bp, Homo sapiens
agattcagcgactgt

SEQ ID NO: 747396 - DNA, 15 bp, Homo sapiens
gattcagcgactgtc

SEQ ID NO: 747397 - DNA, 15 bp, Homo sapiens
attcagcgactgtct

SEQ ID NO: 747398 - DNA, 15 bp, Homo sapiens
ttcagcgactgtctt

SEQ ID NO: 747399 - DNA, 15 bp, Homo sapiens
tcagcgactgtcttt

SEQ ID NO: 747400 - DNA, 15 bp, Homo sapiens
cagcgactgtcttta

SEQ ID NO: 747401 - DNA, 15 bp, Homo sapiens
agcgactgtctttag

SEQ ID NO: 747402 - DNA, 15 bp, Homo sapiens
gcgactgtctttagg

SEQ ID NO: 747403 - DNA, 15 bp, Homo sapiens
cgactgtctttaggg

SEQ ID NO: 747404 - DNA, 15 bp, Homo sapiens
gactgtctttagggg

SEQ ID NO: 747405 - DNA, 15 bp, Homo sapiens
actgtctttagggga

SEQ ID NO: 747406 - DNA, 15 bp, Homo sapiens
ctgtctttaggggaa

SEQ ID NO: 747407 - DNA, 15 bp, Homo sapiens
tgtctttaggggaaa

SEQ ID NO: 747408 - DNA, 15 bp, Homo sapiens
gtctttaggggaaag

SEQ ID NO: 747409 - DNA, 15 bp, Homo sapiens
tctttaggggaaaga

SEQ ID NO: 747410 - DNA, 15 bp, Homo sapiens
ctttaggggaaagat

SEQ ID NO: 747411 - DNA, 15 bp, Homo sapiens
tttaggggaaagata

SEQ ID NO: 747412 - DNA, 15 bp, Homo sapiens
ttaggggaaagatag

SEQ ID NO: 747413 - DNA, 15 bp, Homo sapiens
taggggaaagatagc

SEQ ID NO: 747414 - DNA, 15 bp, Homo sapiens
aggggaaagatagct

SEQ ID NO: 747415 - DNA, 15 bp, Homo sapiens
ggggaaagatagctc

SEQ ID NO: 747416 - DNA, 15 bp, Homo sapiens
gggaaagatagctca

SEQ ID NO: 747417 - DNA, 15 bp, Homo sapiens
ggaaagatagctcat

SEQ ID NO: 747418 - DNA, 15 bp, Homo sapiens
gaaagatagctcata

SEQ ID NO: 747419 - DNA, 15 bp, Homo sapiens
aaagatagctcatag

SEQ ID NO: 747420 - DNA, 15 bp, Homo sapiens
aagatagctcatagt

SEQ ID NO: 747421 - DNA, 15 bp, Homo sapiens
agatagctcatagtt

SEQ ID NO: 747422 - DNA, 15 bp, Homo sapiens
gatagctcatagttg

SEQ ID NO: 747423 - DNA, 15 bp, Homo sapiens
atagctcatagttgt

SEQ ID NO: 747424 - DNA, 15 bp, Homo sapiens
tagctcatagttgtg

SEQ ID NO: 747425 - DNA, 15 bp, Homo sapiens
agctcatagttgtgt

SEQ ID NO: 747426 - DNA, 15 bp, Homo sapiens
gctcatagttgtgtg

SEQ ID NO: 747427 - DNA, 15 bp, Homo sapiens
ctcatagttgtgtgc

SEQ ID NO: 747428 - DNA, 15 bp, Homo sapiens
tcatagttgtgtgcc

SEQ ID NO: 747429 - DNA, 15 bp, Homo sapiens
catagttgtgtgcct

SEQ ID NO: 747430 - DNA, 15 bp, Homo sapiens
atagttgtgtgcctc

SEQ ID NO: 747431 - DNA, 15 bp, Homo sapiens
tagttgtgtgcctct

SEQ ID NO: 747432 - DNA, 15 bp, Homo sapiens
agttgtgtgcctctg

SEQ ID NO: 747433 - DNA, 15 bp, Homo sapiens
gttgtgtgcctctga

SEQ ID NO: 747434 - DNA, 15 bp, Homo sapiens
ttgtgtgcctctgaa

SEQ ID NO: 747435 - DNA, 15 bp, Homo sapiens
tgtgtgcctctgaaa

SEQ ID NO: 747436 - DNA, 15 bp, Homo sapiens
gtgtgcctctgaaat

SEQ ID NO: 747437 - DNA, 15 bp, Homo sapiens
tgtgcctctgaaatg

SEQ ID NO: 747438 - DNA, 15 bp, Homo sapiens
gtgcctctgaaatgt

SEQ ID NO: 747439 - DNA, 15 bp, Homo sapiens
tgcctctgaaatgtt

SEQ ID NO: 747440 - DNA, 15 bp, Homo sapiens
gcctctgaaatgttc

SEQ ID NO: 747441 - DNA, 15 bp, Homo sapiens
cctctgaaatgttcc

SEQ ID NO: 747442 - DNA, 15 bp, Homo sapiens
ctctgaaatgttccc

SEQ ID NO: 747443 - DNA, 15 bp, Homo sapiens
tctgaaatgttccct

SEQ ID NO: 747444 - DNA, 15 bp, Homo sapiens
ctgaaatgttcccta

SEQ ID NO: 747445 - DNA, 15 bp, Homo sapiens
tgaaatgttccctag

SEQ ID NO: 747446 - DNA, 15 bp, Homo sapiens
gaaatgttccctaga

SEQ ID NO: 747447 - DNA, 15 bp, Homo sapiens
aaatgttccctagat

SEQ ID NO: 747448 - DNA, 15 bp, Homo sapiens
aatgttccctagata

SEQ ID NO: 747449 - DNA, 15 bp, Homo sapiens
atgttccctagatag

SEQ ID NO: 747450 - DNA, 15 bp, Homo sapiens
tgttccctagataga

SEQ ID NO: 747451 - DNA, 15 bp, Homo sapiens
gttccctagatagag

SEQ ID NO: 747452 - DNA, 15 bp, Homo sapiens
acagcttgctttctt

SEQ ID NO: 747453 - DNA, 15 bp, Homo sapiens
cagcttgctttcttt

SEQ ID NO: 747454 - DNA, 15 bp, Homo sapiens
agcttgctttctttc

SEQ ID NO: 747455 - DNA, 15 bp, Homo sapiens
gcttgctttctttca

SEQ ID NO: 747456 - DNA, 15 bp, Homo sapiens
cttgctttctttcag

SEQ ID NO: 747457 - DNA, 15 bp, Homo sapiens
ttgctttctttcagg

SEQ ID NO: 747458 - DNA, 15 bp, Homo sapiens
tgctttctttcaggc

SEQ ID NO: 747459 - DNA, 15 bp, Homo sapiens
gctttctttcaggca

SEQ ID NO: 747460 - DNA, 15 bp, Homo sapiens
ctttctttcaggcag

SEQ ID NO: 747461 - DNA, 15 bp, Homo sapiens
tttctttcaggcagg

SEQ ID NO: 747462 - DNA, 15 bp, Homo sapiens
ttctttcaggcaggg

SEQ ID NO: 747463 - DNA, 15 bp, Homo sapiens
tctttcaggcagggg

SEQ ID NO: 747464 - DNA, 15 bp, Homo sapiens
ctttcaggcaggggg

SEQ ID NO: 747465 - DNA, 15 bp, Homo sapiens
tttcaggcagggggc

SEQ ID NO: 747466 - DNA, 15 bp, Homo sapiens
ttcaggcagggggca

SEQ ID NO: 747467 - DNA, 15 bp, Homo sapiens
tcaggcagggggcaa

SEQ ID NO: 747468 - DNA, 15 bp, Homo sapiens
caggcagggggcaat

SEQ ID NO: 747469 - DNA, 15 bp, Homo sapiens
aggcagggggcaatt

SEQ ID NO: 747470 - DNA, 15 bp, Homo sapiens
ggcagggggcaattt

SEQ ID NO: 747471 - DNA, 15 bp, Homo sapiens
gcagggggcaatttt

SEQ ID NO: 747472 - DNA, 15 bp, Homo sapiens
cagggggcaattttt

SEQ ID NO: 747473 - DNA, 15 bp, Homo sapiens
agggggcaattttta

SEQ ID NO: 747474 - DNA, 15 bp, Homo sapiens
gggggcaatttttat

SEQ ID NO: 747475 - DNA, 15 bp, Homo sapiens
ggggcaatttttatc

SEQ ID NO: 747476 - DNA, 15 bp, Homo sapiens
gggcaatttttatca

SEQ ID NO: 747477 - DNA, 15 bp, Homo sapiens
ggcaatttttatcat

SEQ ID NO: 747478 - DNA, 15 bp, Homo sapiens
gcaatttttatcata

SEQ ID NO: 747479 - DNA, 15 bp, Homo sapiens
caatttttatcataa

SEQ ID NO: 747480 - DNA, 15 bp, Homo sapiens
aatttttatcataat

SEQ ID NO: 747481 - DNA, 15 bp, Homo sapiens
atttttatcataatg

SEQ ID NO: 747482 - DNA, 15 bp, Homo sapiens
tttttatcataatga

SEQ ID NO: 747483 - DNA, 15 bp, Homo sapiens
ttttatcataatgaa

SEQ ID NO: 747484 - DNA, 15 bp, Homo sapiens
tttatcataatgaaa

SEQ ID NO: 747485 - DNA, 15 bp, Homo sapiens
ttatcataatgaaaa

SEQ ID NO: 747486 - DNA, 15 bp, Homo sapiens
tatcataatgaaaac

SEQ ID NO: 747487 - DNA, 15 bp, Homo sapiens
atcataatgaaaact

SEQ ID NO: 747488 - DNA, 15 bp, Homo sapiens
tcataatgaaaactt

SEQ ID NO: 747489 - DNA, 15 bp, Homo sapiens
cataatgaaaacttt

SEQ ID NO: 747490 - DNA, 15 bp, Homo sapiens
ataatgaaaactttt

SEQ ID NO: 747491 - DNA, 15 bp, Homo sapiens
taatgaaaacttttt

SEQ ID NO: 747492 - DNA, 15 bp, Homo sapiens
aatgaaaactttttc

SEQ ID NO: 747493 - DNA, 15 bp, Homo sapiens
atgaaaactttttcc

SEQ ID NO: 747494 - DNA, 15 bp, Homo sapiens
tgaaaactttttcca

SEQ ID NO: 747495 - DNA, 15 bp, Homo sapiens
gaaaactttttccat

SEQ ID NO: 747496 - DNA, 15 bp, Homo sapiens
aaaactttttccatg

SEQ ID NO: 747497 - DNA, 15 bp, Homo sapiens
aaactttttccatga

SEQ ID NO: 747498 - DNA, 15 bp, Homo sapiens
aactttttccatgat

SEQ ID NO: 747499 - DNA, 15 bp, Homo sapiens
actttttccatgatt

SEQ ID NO: 747500 - DNA, 15 bp, Homo sapiens
ctttttccatgattg

SEQ ID NO: 747501 - DNA, 15 bp, Homo sapiens
tttttccatgattga

SEQ ID NO: 747502 - DNA, 15 bp, Homo sapiens
ttttccatgattgaa

SEQ ID NO: 747503 - DNA, 15 bp, Homo sapiens
tttccatgattgaaa

SEQ ID NO: 747504 - DNA, 15 bp, Homo sapiens
ttccatgattgaaaa

SEQ ID NO: 747505 - DNA, 15 bp, Homo sapiens
tccatgattgaaaat

SEQ ID NO: 747506 - DNA, 15 bp, Homo sapiens
ccatgattgaaaata

SEQ ID NO: 747507 - DNA, 15 bp, Homo sapiens
catgattgaaaataa

SEQ ID NO: 747508 - DNA, 15 bp, Homo sapiens
atgattgaaaataag

SEQ ID NO: 747509 - DNA, 15 bp, Homo sapiens
tgattgaaaataagt

SEQ ID NO: 747510 - DNA, 15 bp, Homo sapiens
gattgaaaataagtt

SEQ ID NO: 747511 - DNA, 15 bp, Homo sapiens
attgaaaataagttg

SEQ ID NO: 747512 - DNA, 15 bp, Homo sapiens
ttgaaaataagttgt

SEQ ID NO: 747513 - DNA, 15 bp, Homo sapiens
tgaaaataagttgtg

SEQ ID NO: 747514 - DNA, 15 bp, Homo sapiens
gaaaataagttgtgg

SEQ ID NO: 747515 - DNA, 15 bp, Homo sapiens
aaaataagttgtggt

SEQ ID NO: 747516 - DNA, 15 bp, Homo sapiens
aaataagttgtggtg

SEQ ID NO: 747517 - DNA, 15 bp, Homo sapiens
aataagttgtggtgt

SEQ ID NO: 747518 - DNA, 15 bp, Homo sapiens
ataagttgtggtgtt

SEQ ID NO: 747519 - DNA, 15 bp, Homo sapiens
taagttgtggtgttt

SEQ ID NO: 747520 - DNA, 15 bp, Homo sapiens
aagttgtggtgtttt

SEQ ID NO: 747521 - DNA, 15 bp, Homo sapiens
agttgtggtgttttt

SEQ ID NO: 747522 - DNA, 15 bp, Homo sapiens
gttgtggtgtttttg

SEQ ID NO: 747523 - DNA, 15 bp, Homo sapiens
ttgtggtgtttttgt

SEQ ID NO: 747524 - DNA, 15 bp, Homo sapiens
tgtggtgtttttgtg

SEQ ID NO: 747525 - DNA, 15 bp, Homo sapiens
gtggtgtttttgtga

SEQ ID NO: 747526 - DNA, 15 bp, Homo sapiens
tggtgtttttgtgaa

SEQ ID NO: 747527 - DNA, 15 bp, Homo sapiens
ggtgtttttgtgaac

SEQ ID NO: 747528 - DNA, 15 bp, Homo sapiens
gtgtttttgtgaacc

SEQ ID NO: 747529 - DNA, 15 bp, Homo sapiens
tgtttttgtgaacct

SEQ ID NO: 747530 - DNA, 15 bp, Homo sapiens
gtttttgtgaacctg

SEQ ID NO: 747531 - DNA, 15 bp, Homo sapiens
tttttgtgaacctgg

SEQ ID NO: 747532 - DNA, 15 bp, Homo sapiens
ttttgtgaacctggg

SEQ ID NO: 747533 - DNA, 15 bp, Homo sapiens
tttgtgaacctgggg

SEQ ID NO: 747534 - DNA, 15 bp, Homo sapiens
ttgtgaacctggggt

SEQ ID NO: 747535 - DNA, 15 bp, Homo sapiens
tgtgaacctggggtc

SEQ ID NO: 747536 - DNA, 15 bp, Homo sapiens
gtgaacctggggtcc

SEQ ID NO: 747537 - DNA, 15 bp, Homo sapiens
tgaacctggggtcct

SEQ ID NO: 747538 - DNA, 15 bp, Homo sapiens
gaacctggggtccta

SEQ ID NO: 747539 - DNA, 15 bp, Homo sapiens
aacctggggtcctaa

SEQ ID NO: 747540 - DNA, 15 bp, Homo sapiens
acctggggtcctaaa

SEQ ID NO: 747541 - DNA, 15 bp, Homo sapiens
cctggggtcctaaac

SEQ ID NO: 747542 - DNA, 15 bp, Homo sapiens
ctggggtcctaaaca

SEQ ID NO: 747543 - DNA, 15 bp, Homo sapiens
tggggtcctaaacac

SEQ ID NO: 747544 - DNA, 15 bp, Homo sapiens
ggggtcctaaacaca

SEQ ID NO: 747545 - DNA, 15 bp, Homo sapiens
gggtcctaaacacag

SEQ ID NO: 747546 - DNA, 15 bp, Homo sapiens
ggtcctaaacacagc

SEQ ID NO: 747547 - DNA, 15 bp, Homo sapiens
gtcctaaacacagct

SEQ ID NO: 747548 - DNA, 15 bp, Homo sapiens
tcctaaacacagctt

SEQ ID NO: 747549 - DNA, 15 bp, Homo sapiens
cctaaacacagcttc

SEQ ID NO: 747550 - DNA, 15 bp, Homo sapiens
ctaaacacagcttcc

SEQ ID NO: 747551 - DNA, 15 bp, Homo sapiens
taaacacagcttcca

SEQ ID NO: 747552 - DNA, 15 bp, Homo sapiens
aaacacagcttccaa

SEQ ID NO: 747553 - DNA, 15 bp, Homo sapiens
aacacagcttccaaa

SEQ ID NO: 747554 - DNA, 15 bp, Homo sapiens
acacagcttccaaag

SEQ ID NO: 747555 - DNA, 15 bp, Homo sapiens
cacagcttccaaagt

SEQ ID NO: 747556 - DNA, 15 bp, Homo sapiens
acagcttccaaagtc

SEQ ID NO: 747557 - DNA, 15 bp, Homo sapiens
cagcttccaaagtct

SEQ ID NO: 747558 - DNA, 15 bp, Homo sapiens
agcttccaaagtctt

SEQ ID NO: 747559 - DNA, 15 bp, Homo sapiens
gcttccaaagtcttt

SEQ ID NO: 747560 - DNA, 15 bp, Homo sapiens
cttccaaagtctttt

SEQ ID NO: 747561 - DNA, 15 bp, Homo sapiens
ttccaaagtcttttt

SEQ ID NO: 747562 - DNA, 15 bp, Homo sapiens
tccaaagtcttttta

SEQ ID NO: 747563 - DNA, 15 bp, Homo sapiens
ccaaagtctttttat

SEQ ID NO: 747564 - DNA, 15 bp, Homo sapiens
caaagtctttttatg

SEQ ID NO: 747565 - DNA, 15 bp, Homo sapiens
aaagtctttttatgt

SEQ ID NO: 747566 - DNA, 15 bp, Homo sapiens
aagtctttttatgtt

SEQ ID NO: 747567 - DNA, 15 bp, Homo sapiens
agtctttttatgtta

SEQ ID NO: 747568 - DNA, 15 bp, Homo sapiens
gtctttttatgttag

SEQ ID NO: 747569 - DNA, 15 bp, Homo sapiens
tctttttatgttagg

SEQ ID NO: 747570 - DNA, 15 bp, Homo sapiens
ctttttatgttaggg

SEQ ID NO: 747571 - DNA, 15 bp, Homo sapiens
tttttatgttagggg

SEQ ID NO: 747572 - DNA, 15 bp, Homo sapiens
ttttatgttaggggg

SEQ ID NO: 747573 - DNA, 15 bp, Homo sapiens
tttatgttagggggt

SEQ ID NO: 747574 - DNA, 15 bp, Homo sapiens
ttatgttagggggta

SEQ ID NO: 747575 - DNA, 15 bp, Homo sapiens
tatgttagggggtac

SEQ ID NO: 747576 - DNA, 15 bp, Homo sapiens
atgttagggggtaca

SEQ ID NO: 747577 - DNA, 15 bp, Homo sapiens
tgttagggggtacat

SEQ ID NO: 747578 - DNA, 15 bp, Homo sapiens
gttagggggtacata

SEQ ID NO: 747579 - DNA, 15 bp, Homo sapiens
ttagggggtacataa

SEQ ID NO: 747580 - DNA, 15 bp, Homo sapiens
tagggggtacataaa

SEQ ID NO: 747581 - DNA, 15 bp, Homo sapiens
agggggtacataaat

SEQ ID NO: 747582 - DNA, 15 bp, Homo sapiens
gggggtacataaatg

SEQ ID NO: 747583 - DNA, 15 bp, Homo sapiens
ggggtacataaatgc

SEQ ID NO: 747584 - DNA, 15 bp, Homo sapiens
gggtacataaatgca

SEQ ID NO: 747585 - DNA, 15 bp, Homo sapiens
ggtacataaatgcaa

SEQ ID NO: 747586 - DNA, 15 bp, Homo sapiens
gtacataaatgcaat

SEQ ID NO: 747587 - DNA, 15 bp, Homo sapiens
tacataaatgcaatt

SEQ ID NO: 747588 - DNA, 15 bp, Homo sapiens
acataaatgcaattg

SEQ ID NO: 747589 - DNA, 15 bp, Homo sapiens
cataaatgcaattgc

SEQ ID NO: 747590 - DNA, 15 bp, Homo sapiens
ataaatgcaattgca

SEQ ID NO: 747591 - DNA, 15 bp, Homo sapiens
taaatgcaattgcag

SEQ ID NO: 747592 - DNA, 15 bp, Homo sapiens
aaatgcaattgcagt

SEQ ID NO: 747593 - DNA, 15 bp, Homo sapiens
aatgcaattgcagtg

SEQ ID NO: 747594 - DNA, 15 bp, Homo sapiens
atgcaattgcagtgt

SEQ ID NO: 747595 - DNA, 15 bp, Homo sapiens
tgcaattgcagtgtc

SEQ ID NO: 747596 - DNA, 15 bp, Homo sapiens
gcaattgcagtgtct

SEQ ID NO: 747597 - DNA, 15 bp, Homo sapiens
caattgcagtgtctg

SEQ ID NO: 747598 - DNA, 15 bp, Homo sapiens
aattgcagtgtctgt

SEQ ID NO: 747599 - DNA, 15 bp, Homo sapiens
attgcagtgtctgta

SEQ ID NO: 747600 - DNA, 15 bp, Homo sapiens
ttgcagtgtctgtaa

SEQ ID NO: 747601 - DNA, 15 bp, Homo sapiens
tgcagtgtctgtaat

SEQ ID NO: 747602 - DNA, 15 bp, Homo sapiens
gcagtgtctgtaatg

SEQ ID NO: 747603 - DNA, 15 bp, Homo sapiens
cagtgtctgtaatga

SEQ ID NO: 747604 - DNA, 15 bp, Homo sapiens
agtgtctgtaatgaa

SEQ ID NO: 747605 - DNA, 15 bp, Homo sapiens
gtgtctgtaatgaaa

SEQ ID NO: 747606 - DNA, 15 bp, Homo sapiens
tgtctgtaatgaaat

SEQ ID NO: 747607 - DNA, 15 bp, Homo sapiens
gtctgtaatgaaatg

SEQ ID NO: 747608 - DNA, 15 bp, Homo sapiens
tctgtaatgaaatgc

SEQ ID NO: 747609 - DNA, 15 bp, Homo sapiens
ctgtaatgaaatgct

SEQ ID NO: 747610 - DNA, 15 bp, Homo sapiens
tgtaatgaaatgcta

SEQ ID NO: 747611 - DNA, 15 bp, Homo sapiens
gtaatgaaatgctaa

SEQ ID NO: 747612 - DNA, 15 bp, Homo sapiens
taatgaaatgctaat

SEQ ID NO: 747613 - DNA, 15 bp, Homo sapiens
aatgaaatgctaatc

SEQ ID NO: 747614 - DNA, 15 bp, Homo sapiens
atgaaatgctaatcc

SEQ ID NO: 747615 - DNA, 15 bp, Homo sapiens
tgaaatgctaatccc

SEQ ID NO: 747616 - DNA, 15 bp, Homo sapiens
gaaatgctaatccca

SEQ ID NO: 747617 - DNA, 15 bp, Homo sapiens
aaatgctaatcccat

SEQ ID NO: 747618 - DNA, 15 bp, Homo sapiens
aatgctaatcccatc

SEQ ID NO: 747619 - DNA, 15 bp, Homo sapiens
atgctaatcccatcg

SEQ ID NO: 747620 - DNA, 15 bp, Homo sapiens
tgctaatcccatcgc

SEQ ID NO: 747621 - DNA, 15 bp, Homo sapiens
gctaatcccatcgca

SEQ ID NO: 747622 - DNA, 15 bp, Homo sapiens
ctaatcccatcgcac

SEQ ID NO: 747623 - DNA, 15 bp, Homo sapiens
taatcccatcgcaca

SEQ ID NO: 747624 - DNA, 15 bp, Homo sapiens
aatcccatcgcacac

SEQ ID NO: 747625 - DNA, 15 bp, Homo sapiens
atcccatcgcacaca

SEQ ID NO: 747626 - DNA, 15 bp, Homo sapiens
tcccatcgcacacac

SEQ ID NO: 747627 - DNA, 15 bp, Homo sapiens
cccatcgcacacaca

SEQ ID NO: 747628 - DNA, 15 bp, Homo sapiens
ccatcgcacacacaa

SEQ ID NO: 747629 - DNA, 15 bp, Homo sapiens
catcgcacacacaaa

SEQ ID NO: 747630 - DNA, 15 bp, Homo sapiens
atcgcacacacaaag

SEQ ID NO: 747631 - DNA, 15 bp, Homo sapiens
tcgcacacacaaagg

SEQ ID NO: 747632 - DNA, 15 bp, Homo sapiens
cgcacacacaaagga

SEQ ID NO: 747633 - DNA, 15 bp, Homo sapiens
gcacacacaaaggat

SEQ ID NO: 747634 - DNA, 15 bp, Homo sapiens
cacacacaaaggatc

SEQ ID NO: 747635 - DNA, 15 bp, Homo sapiens
acacacaaaggatct

SEQ ID NO: 747636 - DNA, 15 bp, Homo sapiens
cacacaaaggatctc

SEQ ID NO: 747637 - DNA, 15 bp, Homo sapiens
acacaaaggatctcc

SEQ ID NO: 747638 - DNA, 15 bp, Homo sapiens
cacaaaggatctcct

SEQ ID NO: 747639 - DNA, 15 bp, Homo sapiens
acaaaggatctccta

SEQ ID NO: 747640 - DNA, 15 bp, Homo sapiens
caaaggatctcctaa

SEQ ID NO: 747641 - DNA, 15 bp, Homo sapiens
aaaggatctcctaaa

SEQ ID NO: 747642 - DNA, 15 bp, Homo sapiens
aaggatctcctaaat

SEQ ID NO: 747643 - DNA, 15 bp, Homo sapiens
aggatctcctaaatg

SEQ ID NO: 747644 - DNA, 15 bp, Homo sapiens
ggatctcctaaatga

SEQ ID NO: 747645 - DNA, 15 bp, Homo sapiens
gatctcctaaatgat

SEQ ID NO: 747646 - DNA, 15 bp, Homo sapiens
atctcctaaatgatg

SEQ ID NO: 747647 - DNA, 15 bp, Homo sapiens
tctcctaaatgatga

SEQ ID NO: 747648 - DNA, 15 bp, Homo sapiens
ctcctaaatgatgag

SEQ ID NO: 747649 - DNA, 15 bp, Homo sapiens
tcctaaatgatgagc

SEQ ID NO: 747650 - DNA, 15 bp, Homo sapiens
cctaaatgatgagca

SEQ ID NO: 747651 - DNA, 15 bp, Homo sapiens
ctaaatgatgagcaa

SEQ ID NO: 747652 - DNA, 15 bp, Homo sapiens
taaatgatgagcaag

SEQ ID NO: 747653 - DNA, 15 bp, Homo sapiens
aaatgatgagcaagc

SEQ ID NO: 747654 - DNA, 15 bp, Homo sapiens
aatgatgagcaagca

SEQ ID NO: 747655 - DNA, 15 bp, Homo sapiens
atgatgagcaagcat

SEQ ID NO: 747656 - DNA, 15 bp, Homo sapiens
tgatgagcaagcata

SEQ ID NO: 747657 - DNA, 15 bp, Homo sapiens
gatgagcaagcataa

SEQ ID NO: 747658 - DNA, 15 bp, Homo sapiens
atgagcaagcataac

SEQ ID NO: 747659 - DNA, 15 bp, Homo sapiens
tgagcaagcataact

SEQ ID NO: 747660 - DNA, 15 bp, Homo sapiens
gagcaagcataactt

SEQ ID NO: 747661 - DNA, 15 bp, Homo sapiens
agcaagcataacttc

SEQ ID NO: 747662 - DNA, 15 bp, Homo sapiens
gcaagcataacttct

SEQ ID NO: 747663 - DNA, 15 bp, Homo sapiens
caagcataacttctg

SEQ ID NO: 747664 - DNA, 15 bp, Homo sapiens
aagcataacttctgt

SEQ ID NO: 747665 - DNA, 15 bp, Homo sapiens
agcataacttctgtc

SEQ ID NO: 747666 - DNA, 15 bp, Homo sapiens
gcataacttctgtca

SEQ ID NO: 747667 - DNA, 15 bp, Homo sapiens
cataacttctgtcag

SEQ ID NO: 747668 - DNA, 15 bp, Homo sapiens
ataacttctgtcagt

SEQ ID NO: 747669 - DNA, 15 bp, Homo sapiens
taacttctgtcagtt

SEQ ID NO: 747670 - DNA, 15 bp, Homo sapiens
aacttctgtcagttt

SEQ ID NO: 747671 - DNA, 15 bp, Homo sapiens
acttctgtcagttta

SEQ ID NO: 747672 - DNA, 15 bp, Homo sapiens
cttctgtcagtttac

SEQ ID NO: 747673 - DNA, 15 bp, Homo sapiens
ttctgtcagtttact

SEQ ID NO: 747674 - DNA, 15 bp, Homo sapiens
tctgtcagtttactc

SEQ ID NO: 747675 - DNA, 15 bp, Homo sapiens
ctgtcagtttactca

SEQ ID NO: 747676 - DNA, 15 bp, Homo sapiens
tgtcagtttactcaa

SEQ ID NO: 747677 - DNA, 15 bp, Homo sapiens
gtcagtttactcaag

SEQ ID NO: 747678 - DNA, 15 bp, Homo sapiens
tcagtttactcaaga

SEQ ID NO: 747679 - DNA, 15 bp, Homo sapiens
cagtttactcaagaa

SEQ ID NO: 747680 - DNA, 15 bp, Homo sapiens
agtttactcaagaaa

SEQ ID NO: 747681 - DNA, 15 bp, Homo sapiens
gtttactcaagaaaa

SEQ ID NO: 747682 - DNA, 15 bp, Homo sapiens
tttactcaagaaaat

SEQ ID NO: 747683 - DNA, 15 bp, Homo sapiens
ttactcaagaaaata

SEQ ID NO: 747684 - DNA, 15 bp, Homo sapiens
tactcaagaaaatag

SEQ ID NO: 747685 - DNA, 15 bp, Homo sapiens
actcaagaaaatagg

SEQ ID NO: 747686 - DNA, 15 bp, Homo sapiens
ctcaagaaaataggt

SEQ ID NO: 747687 - DNA, 15 bp, Homo sapiens
tcaagaaaataggtt

SEQ ID NO: 747688 - DNA, 15 bp, Homo sapiens
caagaaaataggttt

SEQ ID NO: 747689 - DNA, 15 bp, Homo sapiens
aagaaaataggtttt

SEQ ID NO: 747690 - DNA, 15 bp, Homo sapiens
agaaaataggttttt

SEQ ID NO: 747691 - DNA, 15 bp, Homo sapiens
gaaaataggtttttg

SEQ ID NO: 747692 - DNA, 15 bp, Homo sapiens
aaaataggtttttgg

SEQ ID NO: 747693 - DNA, 15 bp, Homo sapiens
aaataggtttttggc

SEQ ID NO: 747694 - DNA, 15 bp, Homo sapiens
aataggtttttggca

SEQ ID NO: 747695 - DNA, 15 bp, Homo sapiens
ataggtttttggcaa

SEQ ID NO: 747696 - DNA, 15 bp, Homo sapiens
taggtttttggcaac

SEQ ID NO: 747697 - DNA, 15 bp, Homo sapiens
aggtttttggcaacg

SEQ ID NO: 747698 - DNA, 15 bp, Homo sapiens
ggtttttggcaacga

SEQ ID NO: 747699 - DNA, 15 bp, Homo sapiens
gtttttggcaacgat

SEQ ID NO: 747700 - DNA, 15 bp, Homo sapiens
tttttggcaacgatt

SEQ ID NO: 747701 - DNA, 15 bp, Homo sapiens
ttttggcaacgatta

SEQ ID NO: 747702 - DNA, 15 bp, Homo sapiens
tttggcaacgattag

SEQ ID NO: 747703 - DNA, 15 bp, Homo sapiens
ttggcaacgattaga

SEQ ID NO: 747704 - DNA, 15 bp, Homo sapiens
tggcaacgattagaa

SEQ ID NO: 747705 - DNA, 15 bp, Homo sapiens
ggcaacgattagaaa

SEQ ID NO: 747706 - DNA, 15 bp, Homo sapiens
gcaacgattagaaaa

SEQ ID NO: 747707 - DNA, 15 bp, Homo sapiens
caacgattagaaaaa

SEQ ID NO: 747708 - DNA, 15 bp, Homo sapiens
aacgattagaaaaaa

SEQ ID NO: 747709 - DNA, 15 bp, Homo sapiens
acgattagaaaaaac

SEQ ID NO: 747710 - DNA, 15 bp, Homo sapiens
cgattagaaaaaaca

SEQ ID NO: 747711 - DNA, 15 bp, Homo sapiens
gattagaaaaaacaa

SEQ ID NO: 747712 - DNA, 15 bp, Homo sapiens
attagaaaaaacaat

SEQ ID NO: 747713 - DNA, 15 bp, Homo sapiens
ttagaaaaaacaatt

SEQ ID NO: 747714 - DNA, 15 bp, Homo sapiens
tagaaaaaacaattc

SEQ ID NO: 747715 - DNA, 15 bp, Homo sapiens
agaaaaaacaattcg

SEQ ID NO: 747716 - DNA, 15 bp, Homo sapiens
gaaaaaacaattcgt

SEQ ID NO: 747717 - DNA, 15 bp, Homo sapiens
aaaaaacaattcgta

SEQ ID NO: 747718 - DNA, 15 bp, Homo sapiens
aaaaacaattcgtaa

SEQ ID NO: 747719 - DNA, 15 bp, Homo sapiens
aaaacaattcgtaaa

SEQ ID NO: 747720 - DNA, 15 bp, Homo sapiens
aaacaattcgtaaat

SEQ ID NO: 747721 - DNA, 15 bp, Homo sapiens
aacaattcgtaaata

SEQ ID NO: 747722 - DNA, 15 bp, Homo sapiens
acaattcgtaaatat

SEQ ID NO: 747723 - DNA, 15 bp, Homo sapiens
caattcgtaaatatt

SEQ ID NO: 747724 - DNA, 15 bp, Homo sapiens
aattcgtaaatattt

SEQ ID NO: 747725 - DNA, 15 bp, Homo sapiens
attcgtaaatatttg

SEQ ID NO: 747726 - DNA, 15 bp, Homo sapiens
ttcgtaaatatttgg

SEQ ID NO: 747727 - DNA, 15 bp, Homo sapiens
tcgtaaatatttggc

SEQ ID NO: 747728 - DNA, 15 bp, Homo sapiens
cgtaaatatttggct

SEQ ID NO: 747729 - DNA, 15 bp, Homo sapiens
gtaaatatttggcta

SEQ ID NO: 747730 - DNA, 15 bp, Homo sapiens
taaatatttggctat

SEQ ID NO: 747731 - DNA, 15 bp, Homo sapiens
aaatatttggctatg

SEQ ID NO: 747732 - DNA, 15 bp, Homo sapiens
aatatttggctatgt

SEQ ID NO: 747733 - DNA, 15 bp, Homo sapiens
atatttggctatgtt

SEQ ID NO: 747734 - DNA, 15 bp, Homo sapiens
tatttggctatgttt

SEQ ID NO: 747735 - DNA, 15 bp, Homo sapiens
atttggctatgtttt

SEQ ID NO: 747736 - DNA, 15 bp, Homo sapiens
tttggctatgttttg

SEQ ID NO: 747737 - DNA, 15 bp, Homo sapiens
ttggctatgttttgt

SEQ ID NO: 747738 - DNA, 15 bp, Homo sapiens
tggctatgttttgta

SEQ ID NO: 747739 - DNA, 15 bp, Homo sapiens
ggctatgttttgtag

SEQ ID NO: 747740 - DNA, 15 bp, Homo sapiens
gctatgttttgtagc

SEQ ID NO: 747741 - DNA, 15 bp, Homo sapiens
ctatgttttgtagcc

SEQ ID NO: 747742 - DNA, 15 bp, Homo sapiens
tatgttttgtagccc

SEQ ID NO: 747743 - DNA, 15 bp, Homo sapiens
atgttttgtagcccc

SEQ ID NO: 747744 - DNA, 15 bp, Homo sapiens
tgttttgtagcccca

SEQ ID NO: 747745 - DNA, 15 bp, Homo sapiens
gttttgtagccccaa

SEQ ID NO: 747746 - DNA, 15 bp, Homo sapiens
ttttgtagccccaag

SEQ ID NO: 747747 - DNA, 15 bp, Homo sapiens
tttgtagccccaaga

SEQ ID NO: 747748 - DNA, 15 bp, Homo sapiens
ttgtagccccaagac

SEQ ID NO: 747749 - DNA, 15 bp, Homo sapiens
tgtagccccaagacc

SEQ ID NO: 747750 - DNA, 15 bp, Homo sapiens
gtagccccaagacct

SEQ ID NO: 747751 - DNA, 15 bp, Homo sapiens
tagccccaagacctg

SEQ ID NO: 747752 - DNA, 15 bp, Homo sapiens
agccccaagacctgc

SEQ ID NO: 747753 - DNA, 15 bp, Homo sapiens
gccccaagacctgct

SEQ ID NO: 747754 - DNA, 15 bp, Homo sapiens
ccccaagacctgctg

SEQ ID NO: 747755 - DNA, 15 bp, Homo sapiens
cccaagacctgctga

SEQ ID NO: 747756 - DNA, 15 bp, Homo sapiens
ccaagacctgctgag

SEQ ID NO: 747757 - DNA, 15 bp, Homo sapiens
caagacctgctgagt

SEQ ID NO: 747758 - DNA, 15 bp, Homo sapiens
aagacctgctgagtg

SEQ ID NO: 747759 - DNA, 15 bp, Homo sapiens
agacctgctgagtgg

SEQ ID NO: 747760 - DNA, 15 bp, Homo sapiens
gacctgctgagtgga

SEQ ID NO: 747761 - DNA, 15 bp, Homo sapiens
acctgctgagtggac

SEQ ID NO: 747762 - DNA, 15 bp, Homo sapiens
cctgctgagtggaca

SEQ ID NO: 747763 - DNA, 15 bp, Homo sapiens
ctgctgagtggacat

SEQ ID NO: 747764 - DNA, 15 bp, Homo sapiens
tgctgagtggacata

SEQ ID NO: 747765 - DNA, 15 bp, Homo sapiens
gctgagtggacataa

SEQ ID NO: 747766 - DNA, 15 bp, Homo sapiens
ctgagtggacataac

SEQ ID NO: 747767 - DNA, 15 bp, Homo sapiens
tgagtggacataact

SEQ ID NO: 747768 - DNA, 15 bp, Homo sapiens
gagtggacataactg

SEQ ID NO: 747769 - DNA, 15 bp, Homo sapiens
agtggacataactgg

SEQ ID NO: 747770 - DNA, 15 bp, Homo sapiens
gtggacataactgga

SEQ ID NO: 747771 - DNA, 15 bp, Homo sapiens
tggacataactggaa

SEQ ID NO: 747772 - DNA, 15 bp, Homo sapiens
ggacataactggaag

SEQ ID NO: 747773 - DNA, 15 bp, Homo sapiens
gacataactggaagt

SEQ ID NO: 747774 - DNA, 15 bp, Homo sapiens
acataactggaagtg

SEQ ID NO: 747775 - DNA, 15 bp, Homo sapiens
cataactggaagtga

SEQ ID NO: 747776 - DNA, 15 bp, Homo sapiens
ataactggaagtgag

SEQ ID NO: 747777 - DNA, 15 bp, Homo sapiens
taactggaagtgagt

SEQ ID NO: 747778 - DNA, 15 bp, Homo sapiens
aactggaagtgagtt

SEQ ID NO: 747779 - DNA, 15 bp, Homo sapiens
actggaagtgagttg

SEQ ID NO: 747780 - DNA, 15 bp, Homo sapiens
ctggaagtgagttgc

SEQ ID NO: 747781 - DNA, 15 bp, Homo sapiens
tggaagtgagttgct

SEQ ID NO: 747782 - DNA, 15 bp, Homo sapiens
ggaagtgagttgctg

SEQ ID NO: 747783 - DNA, 15 bp, Homo sapiens
gaagtgagttgctgt

SEQ ID NO: 747784 - DNA, 15 bp, Homo sapiens
aagtgagttgctgta

SEQ ID NO: 747785 - DNA, 15 bp, Homo sapiens
agtgagttgctgtaa

SEQ ID NO: 747786 - DNA, 15 bp, Homo sapiens
gtgagttgctgtaag

SEQ ID NO: 747787 - DNA, 15 bp, Homo sapiens
tgagttgctgtaaga

SEQ ID NO: 747788 - DNA, 15 bp, Homo sapiens
gagttgctgtaagaa

SEQ ID NO: 747789 - DNA, 15 bp, Homo sapiens
agttgctgtaagaaa

SEQ ID NO: 747790 - DNA, 15 bp, Homo sapiens
gttgctgtaagaaat

SEQ ID NO: 747791 - DNA, 15 bp, Homo sapiens
ttgctgtaagaaatc

SEQ ID NO: 747792 - DNA, 15 bp, Homo sapiens
tgctgtaagaaatct

SEQ ID NO: 747793 - DNA, 15 bp, Homo sapiens
gctgtaagaaatctg

SEQ ID NO: 747794 - DNA, 15 bp, Homo sapiens
ctgtaagaaatctgc

SEQ ID NO: 747795 - DNA, 15 bp, Homo sapiens
tgtaagaaatctgcc

SEQ ID NO: 747796 - DNA, 15 bp, Homo sapiens
gtaagaaatctgcca

SEQ ID NO: 747797 - DNA, 15 bp, Homo sapiens
taagaaatctgccag

SEQ ID NO: 747798 - DNA, 15 bp, Homo sapiens
aagaaatctgccagg

SEQ ID NO: 747799 - DNA, 15 bp, Homo sapiens
agaaatctgccaggg

SEQ ID NO: 747800 - DNA, 15 bp, Homo sapiens
gaaatctgccaggga

SEQ ID NO: 747801 - DNA, 15 bp, Homo sapiens
aaatctgccagggat

SEQ ID NO: 747802 - DNA, 15 bp, Homo sapiens
aatctgccagggatg

SEQ ID NO: 747803 - DNA, 15 bp, Homo sapiens
atctgccagggatga

SEQ ID NO: 747804 - DNA, 15 bp, Homo sapiens
tctgccagggatgag

SEQ ID NO: 747805 - DNA, 15 bp, Homo sapiens
ctgccagggatgaga

SEQ ID NO: 747806 - DNA, 15 bp, Homo sapiens
tgccagggatgagag

SEQ ID NO: 747807 - DNA, 15 bp, Homo sapiens
gccagggatgagagg

SEQ ID NO: 747808 - DNA, 15 bp, Homo sapiens
ccagggatgagaggt

SEQ ID NO: 747809 - DNA, 15 bp, Homo sapiens
cagggatgagaggtg

SEQ ID NO: 747810 - DNA, 15 bp, Homo sapiens
agggatgagaggtga

SEQ ID NO: 747811 - DNA, 15 bp, Homo sapiens
gggatgagaggtgat

SEQ ID NO: 747812 - DNA, 15 bp, Homo sapiens
ggatgagaggtgatg

SEQ ID NO: 747813 - DNA, 15 bp, Homo sapiens
gatgagaggtgatgg

SEQ ID NO: 747814 - DNA, 15 bp, Homo sapiens
atgagaggtgatggt

SEQ ID NO: 747815 - DNA, 15 bp, Homo sapiens
tgagaggtgatggtg

SEQ ID NO: 747816 - DNA, 15 bp, Homo sapiens
gagaggtgatggtgg

SEQ ID NO: 747817 - DNA, 15 bp, Homo sapiens
agaggtgatggtggt

SEQ ID NO: 747818 - DNA, 15 bp, Homo sapiens
gaggtgatggtggtt

SEQ ID NO: 747819 - DNA, 15 bp, Homo sapiens
aggtgatggtggttt

SEQ ID NO: 747820 - DNA, 15 bp, Homo sapiens
ggtgatggtggtttg

SEQ ID NO: 747821 - DNA, 15 bp, Homo sapiens
gtgatggtggtttgt

SEQ ID NO: 747822 - DNA, 15 bp, Homo sapiens
tgatggtggtttgtt

SEQ ID NO: 747823 - DNA, 15 bp, Homo sapiens
gatggtggtttgttt

SEQ ID NO: 747824 - DNA, 15 bp, Homo sapiens
atggtggtttgtttg

SEQ ID NO: 747825 - DNA, 15 bp, Homo sapiens
tggtggtttgtttgg

SEQ ID NO: 747826 - DNA, 15 bp, Homo sapiens
ggtggtttgtttgga

SEQ ID NO: 747827 - DNA, 15 bp, Homo sapiens
gtggtttgtttggaa

SEQ ID NO: 747828 - DNA, 15 bp, Homo sapiens
tggtttgtttggaag

SEQ ID NO: 747829 - DNA, 15 bp, Homo sapiens
ggtttgtttggaaga

SEQ ID NO: 747830 - DNA, 15 bp, Homo sapiens
gtttgtttggaagat

SEQ ID NO: 747831 - DNA, 15 bp, Homo sapiens
tttgtttggaagatg

SEQ ID NO: 747832 - DNA, 15 bp, Homo sapiens
ttgtttggaagatgt

SEQ ID NO: 747833 - DNA, 15 bp, Homo sapiens
tgtttggaagatgtg

SEQ ID NO: 747834 - DNA, 15 bp, Homo sapiens
gtttggaagatgtga

SEQ ID NO: 747835 - DNA, 15 bp, Homo sapiens
tttggaagatgtgag

SEQ ID NO: 747836 - DNA, 15 bp, Homo sapiens
ttggaagatgtgagg

SEQ ID NO: 747837 - DNA, 15 bp, Homo sapiens
tggaagatgtgaggc

SEQ ID NO: 747838 - DNA, 15 bp, Homo sapiens
ggaagatgtgaggcc

SEQ ID NO: 747839 - DNA, 15 bp, Homo sapiens
gaagatgtgaggcca

SEQ ID NO: 747840 - DNA, 15 bp, Homo sapiens
aagatgtgaggccag

SEQ ID NO: 747841 - DNA, 15 bp, Homo sapiens
agatgtgaggccagt

SEQ ID NO: 747842 - DNA, 15 bp, Homo sapiens
gatgtgaggccagta

SEQ ID NO: 747843 - DNA, 15 bp, Homo sapiens
atgtgaggccagtat

SEQ ID NO: 747844 - DNA, 15 bp, Homo sapiens
tgtgaggccagtata

SEQ ID NO: 747845 - DNA, 15 bp, Homo sapiens
gtgaggccagtatag

SEQ ID NO: 747846 - DNA, 15 bp, Homo sapiens
tgaggccagtataga

SEQ ID NO: 747847 - DNA, 15 bp, Homo sapiens
gaggccagtatagaa

SEQ ID NO: 747848 - DNA, 15 bp, Homo sapiens
aggccagtatagaat

SEQ ID NO: 747849 - DNA, 15 bp, Homo sapiens
ggccagtatagaatg

SEQ ID NO: 747850 - DNA, 15 bp, Homo sapiens
gccagtatagaatga

SEQ ID NO: 747851 - DNA, 15 bp, Homo sapiens
ccagtatagaatgag

SEQ ID NO: 747852 - DNA, 15 bp, Homo sapiens
cagtatagaatgagt

SEQ ID NO: 747853 - DNA, 15 bp, Homo sapiens
agtatagaatgagtg

SEQ ID NO: 747854 - DNA, 15 bp, Homo sapiens
gtatagaatgagtgc

SEQ ID NO: 747855 - DNA, 15 bp, Homo sapiens
tatagaatgagtgca

SEQ ID NO: 747856 - DNA, 15 bp, Homo sapiens
atagaatgagtgcag

SEQ ID NO: 747857 - DNA, 15 bp, Homo sapiens
tagaatgagtgcagg

SEQ ID NO: 747858 - DNA, 15 bp, Homo sapiens
agaatgagtgcaggt

SEQ ID NO: 747859 - DNA, 15 bp, Homo sapiens
gaatgagtgcaggtt

SEQ ID NO: 747860 - DNA, 15 bp, Homo sapiens
aatgagtgcaggttc

SEQ ID NO: 747861 - DNA, 15 bp, Homo sapiens
atgagtgcaggttcc

SEQ ID NO: 747862 - DNA, 15 bp, Homo sapiens
tgagtgcaggttcct

SEQ ID NO: 747863 - DNA, 15 bp, Homo sapiens
gagtgcaggttcctt

SEQ ID NO: 747864 - DNA, 15 bp, Homo sapiens
agtgcaggttccttt

SEQ ID NO: 747865 - DNA, 15 bp, Homo sapiens
gtgcaggttcctttt

SEQ ID NO: 747866 - DNA, 15 bp, Homo sapiens
tgcaggttccttttg

SEQ ID NO: 747867 - DNA, 15 bp, Homo sapiens
gcaggttccttttga

SEQ ID NO: 747868 - DNA, 15 bp, Homo sapiens
caggttccttttgat

SEQ ID NO: 747869 - DNA, 15 bp, Homo sapiens
aggttccttttgata

SEQ ID NO: 747870 - DNA, 15 bp, Homo sapiens
ggttccttttgatac

SEQ ID NO: 747871 - DNA, 15 bp, Homo sapiens
gttccttttgatacc

SEQ ID NO: 747872 - DNA, 15 bp, Homo sapiens
ttccttttgataccg

SEQ ID NO: 747873 - DNA, 15 bp, Homo sapiens
tccttttgataccgt

SEQ ID NO: 747874 - DNA, 15 bp, Homo sapiens
ccttttgataccgta

SEQ ID NO: 747875 - DNA, 15 bp, Homo sapiens
cttttgataccgtaa

SEQ ID NO: 747876 - DNA, 15 bp, Homo sapiens
ttttgataccgtaag

SEQ ID NO: 747877 - DNA, 15 bp, Homo sapiens
tttgataccgtaagt

SEQ ID NO: 747878 - DNA, 15 bp, Homo sapiens
ttgataccgtaagtc

SEQ ID NO: 747879 - DNA, 15 bp, Homo sapiens
tgataccgtaagtcc

SEQ ID NO: 747880 - DNA, 15 bp, Homo sapiens
gataccgtaagtcca

SEQ ID NO: 747881 - DNA, 15 bp, Homo sapiens
ataccgtaagtccat

SEQ ID NO: 747882 - DNA, 15 bp, Homo sapiens
taccgtaagtccatt

SEQ ID NO: 747883 - DNA, 15 bp, Homo sapiens
accgtaagtccattt

SEQ ID NO: 747884 - DNA, 15 bp, Homo sapiens
ccgtaagtccatttt

SEQ ID NO: 747885 - DNA, 15 bp, Homo sapiens
cgtaagtccatttta

SEQ ID NO: 747886 - DNA, 15 bp, Homo sapiens
gtaagtccattttaa

SEQ ID NO: 747887 - DNA, 15 bp, Homo sapiens
taagtccattttaaa

SEQ ID NO: 747888 - DNA, 15 bp, Homo sapiens
aagtccattttaaag

SEQ ID NO: 747889 - DNA, 15 bp, Homo sapiens
agtccattttaaagc

SEQ ID NO: 747890 - DNA, 15 bp, Homo sapiens
gtccattttaaagca

SEQ ID NO: 747891 - DNA, 15 bp, Homo sapiens
tccattttaaagcac

SEQ ID NO: 747892 - DNA, 15 bp, Homo sapiens
ccattttaaagcaca

SEQ ID NO: 747893 - DNA, 15 bp, Homo sapiens
cattttaaagcacac

SEQ ID NO: 747894 - DNA, 15 bp, Homo sapiens
attttaaagcacacc

SEQ ID NO: 747895 - DNA, 15 bp, Homo sapiens
ttttaaagcacacct

SEQ ID NO: 747896 - DNA, 15 bp, Homo sapiens
tttaaagcacaccta

SEQ ID NO: 747897 - DNA, 15 bp, Homo sapiens
ttaaagcacacctag

SEQ ID NO: 747898 - DNA, 15 bp, Homo sapiens
taaagcacacctaga

SEQ ID NO: 747899 - DNA, 15 bp, Homo sapiens
aaagcacacctagaa

SEQ ID NO: 747900 - DNA, 15 bp, Homo sapiens
aagcacacctagaat

SEQ ID NO: 747901 - DNA, 15 bp, Homo sapiens
agcacacctagaatc

SEQ ID NO: 747902 - DNA, 15 bp, Homo sapiens
gcacacctagaatct

SEQ ID NO: 747903 - DNA, 15 bp, Homo sapiens
cacacctagaatctc

SEQ ID NO: 747904 - DNA, 15 bp, Homo sapiens
acacctagaatctct

SEQ ID NO: 747905 - DNA, 15 bp, Homo sapiens
cacctagaatctctt

SEQ ID NO: 747906 - DNA, 15 bp, Homo sapiens
acctagaatctcttg

SEQ ID NO: 747907 - DNA, 15 bp, Homo sapiens
cctagaatctcttga

SEQ ID NO: 747908 - DNA, 15 bp, Homo sapiens
ctagaatctcttgat

SEQ ID NO: 747909 - DNA, 15 bp, Homo sapiens
tagaatctcttgata

SEQ ID NO: 747910 - DNA, 15 bp, Homo sapiens
agaatctcttgatac

SEQ ID NO: 747911 - DNA, 15 bp, Homo sapiens
gaatctcttgatacc

SEQ ID NO: 747912 - DNA, 15 bp, Homo sapiens
aatctcttgatacct

SEQ ID NO: 747913 - DNA, 15 bp, Homo sapiens
atctcttgatacctg

SEQ ID NO: 747914 - DNA, 15 bp, Homo sapiens
tctcttgatacctgc

SEQ ID NO: 747915 - DNA, 15 bp, Homo sapiens
ctcttgatacctgcc

SEQ ID NO: 747916 - DNA, 15 bp, Homo sapiens
tcttgatacctgccc

SEQ ID NO: 747917 - DNA, 15 bp, Homo sapiens
cttgatacctgcccc

SEQ ID NO: 747918 - DNA, 15 bp, Homo sapiens
ttgatacctgcccct

SEQ ID NO: 747919 - DNA, 15 bp, Homo sapiens
tgatacctgccccta

SEQ ID NO: 747920 - DNA, 15 bp, Homo sapiens
gatacctgcccctag

SEQ ID NO: 747921 - DNA, 15 bp, Homo sapiens
atacctgcccctaga

SEQ ID NO: 747922 - DNA, 15 bp, Homo sapiens
tacctgcccctagat

SEQ ID NO: 747923 - DNA, 15 bp, Homo sapiens
acctgcccctagatt

SEQ ID NO: 747924 - DNA, 15 bp, Homo sapiens
cctgcccctagattt

SEQ ID NO: 747925 - DNA, 15 bp, Homo sapiens
ctgcccctagatttg

SEQ ID NO: 747926 - DNA, 15 bp, Homo sapiens
tgcccctagatttgc

SEQ ID NO: 747927 - DNA, 15 bp, Homo sapiens
gcccctagatttgct

SEQ ID NO: 747928 - DNA, 15 bp, Homo sapiens
cccctagatttgctc

SEQ ID NO: 747929 - DNA, 15 bp, Homo sapiens
ccctagatttgctca

SEQ ID NO: 747930 - DNA, 15 bp, Homo sapiens
cctagatttgctcac

SEQ ID NO: 747931 - DNA, 15 bp, Homo sapiens
ctagatttgctcact

SEQ ID NO: 747932 - DNA, 15 bp, Homo sapiens
tagatttgctcactt

SEQ ID NO: 747933 - DNA, 15 bp, Homo sapiens
agatttgctcactta

SEQ ID NO: 747934 - DNA, 15 bp, Homo sapiens
gatttgctcacttaa

SEQ ID NO: 747935 - DNA, 15 bp, Homo sapiens
atttgctcacttaag

SEQ ID NO: 747936 - DNA, 15 bp, Homo sapiens
tttgctcacttaagc

SEQ ID NO: 747937 - DNA, 15 bp, Homo sapiens
ttgctcacttaagcc

SEQ ID NO: 747938 - DNA, 15 bp, Homo sapiens
tgctcacttaagcca

SEQ ID NO: 747939 - DNA, 15 bp, Homo sapiens
gctcacttaagccat

SEQ ID NO: 747940 - DNA, 15 bp, Homo sapiens
ctcacttaagccata

SEQ ID NO: 747941 - DNA, 15 bp, Homo sapiens
tcacttaagccatag

SEQ ID NO: 747942 - DNA, 15 bp, Homo sapiens
cacttaagccatagg

SEQ ID NO: 747943 - DNA, 15 bp, Homo sapiens
acttaagccataggt

SEQ ID NO: 747944 - DNA, 15 bp, Homo sapiens
cttaagccataggta

SEQ ID NO: 747945 - DNA, 15 bp, Homo sapiens
ttaagccataggtag

SEQ ID NO: 747946 - DNA, 15 bp, Homo sapiens
taagccataggtagc

SEQ ID NO: 747947 - DNA, 15 bp, Homo sapiens
aagccataggtagcc

SEQ ID NO: 747948 - DNA, 15 bp, Homo sapiens
agccataggtagcca

SEQ ID NO: 747949 - DNA, 15 bp, Homo sapiens
gccataggtagccag

SEQ ID NO: 747950 - DNA, 15 bp, Homo sapiens
ccataggtagccagc

SEQ ID NO: 747951 - DNA, 15 bp, Homo sapiens
cataggtagccagct

SEQ ID NO: 747952 - DNA, 15 bp, Homo sapiens
ataggtagccagctc

SEQ ID NO: 747953 - DNA, 15 bp, Homo sapiens
taggtagccagctca

SEQ ID NO: 747954 - DNA, 15 bp, Homo sapiens
aggtagccagctcat

SEQ ID NO: 747955 - DNA, 15 bp, Homo sapiens
ggtagccagctcatt

SEQ ID NO: 747956 - DNA, 15 bp, Homo sapiens
gtagccagctcatta

SEQ ID NO: 747957 - DNA, 15 bp, Homo sapiens
tagccagctcattat

SEQ ID NO: 747958 - DNA, 15 bp, Homo sapiens
agccagctcattata

SEQ ID NO: 747959 - DNA, 15 bp, Homo sapiens
gccagctcattatat

SEQ ID NO: 747960 - DNA, 15 bp, Homo sapiens
ccagctcattatatg

SEQ ID NO: 747961 - DNA, 15 bp, Homo sapiens
cagctcattatatgc

SEQ ID NO: 747962 - DNA, 15 bp, Homo sapiens
agctcattatatgca

SEQ ID NO: 747963 - DNA, 15 bp, Homo sapiens
gctcattatatgcag

SEQ ID NO: 747964 - DNA, 15 bp, Homo sapiens
ctcattatatgcagt

SEQ ID NO: 747965 - DNA, 15 bp, Homo sapiens
tcattatatgcagta

SEQ ID NO: 747966 - DNA, 15 bp, Homo sapiens
cattatatgcagtaa

SEQ ID NO: 747967 - DNA, 15 bp, Homo sapiens
attatatgcagtaac

SEQ ID NO: 747968 - DNA, 15 bp, Homo sapiens
ttatatgcagtaacg

SEQ ID NO: 747969 - DNA, 15 bp, Homo sapiens
tatatgcagtaacgg

SEQ ID NO: 747970 - DNA, 15 bp, Homo sapiens
atatgcagtaacggt

SEQ ID NO: 747971 - DNA, 15 bp, Homo sapiens
tatgcagtaacggta

SEQ ID NO: 747972 - DNA, 15 bp, Homo sapiens
atgcagtaacggtaa

SEQ ID NO: 747973 - DNA, 15 bp, Homo sapiens
tgcagtaacggtaag

SEQ ID NO: 747974 - DNA, 15 bp, Homo sapiens
gcagtaacggtaagt

SEQ ID NO: 747975 - DNA, 15 bp, Homo sapiens
cagtaacggtaagtt

SEQ ID NO: 747976 - DNA, 15 bp, Homo sapiens
agtaacggtaagtta

SEQ ID NO: 747977 - DNA, 15 bp, Homo sapiens
gtaacggtaagttag

SEQ ID NO: 747978 - DNA, 15 bp, Homo sapiens
taacggtaagttagg

SEQ ID NO: 747979 - DNA, 15 bp, Homo sapiens
aacggtaagttaggc

SEQ ID NO: 747980 - DNA, 15 bp, Homo sapiens
acggtaagttaggcc

SEQ ID NO: 747981 - DNA, 15 bp, Homo sapiens
cggtaagttaggcct

SEQ ID NO: 747982 - DNA, 15 bp, Homo sapiens
ggtaagttaggcctt

SEQ ID NO: 747983 - DNA, 15 bp, Homo sapiens
gtaagttaggccttt

SEQ ID NO: 747984 - DNA, 15 bp, Homo sapiens
taagttaggcctttt

SEQ ID NO: 747985 - DNA, 15 bp, Homo sapiens
aagttaggcctttta

SEQ ID NO: 747986 - DNA, 15 bp, Homo sapiens
agttaggccttttaa

SEQ ID NO: 747987 - DNA, 15 bp, Homo sapiens
gttaggccttttaaa

SEQ ID NO: 747988 - DNA, 15 bp, Homo sapiens
ttaggccttttaaaa

SEQ ID NO: 747989 - DNA, 15 bp, Homo sapiens
taggccttttaaaag

SEQ ID NO: 747990 - DNA, 15 bp, Homo sapiens
aggccttttaaaagc

SEQ ID NO: 747991 - DNA, 15 bp, Homo sapiens
ggccttttaaaagct

SEQ ID NO: 747992 - DNA, 15 bp, Homo sapiens
gccttttaaaagctt

SEQ ID NO: 747993 - DNA, 15 bp, Homo sapiens
ccttttaaaagcttt

SEQ ID NO: 747994 - DNA, 15 bp, Homo sapiens
cttttaaaagctttt

SEQ ID NO: 747995 - DNA, 15 bp, Homo sapiens
ttttaaaagcttttc

SEQ ID NO: 747996 - DNA, 15 bp, Homo sapiens
tttaaaagcttttct

SEQ ID NO: 747997 - DNA, 15 bp, Homo sapiens
ttaaaagcttttctt

SEQ ID NO: 747998 - DNA, 15 bp, Homo sapiens
taaaagcttttcttt

SEQ ID NO: 747999 - DNA, 15 bp, Homo sapiens
aaaagcttttctttc

SEQ ID NO: 748000 - DNA, 15 bp, Homo sapiens
aaagcttttctttct

SEQ ID NO: 748001 - DNA, 15 bp, Homo sapiens
aagcttttctttcta

SEQ ID NO: 748002 - DNA, 15 bp, Homo sapiens
agcttttctttctat

SEQ ID NO: 748003 - DNA, 15 bp, Homo sapiens
gcttttctttctatg

SEQ ID NO: 748004 - DNA, 15 bp, Homo sapiens
cttttctttctatgc

SEQ ID NO: 748005 - DNA, 15 bp, Homo sapiens
ttttctttctatgct

SEQ ID NO: 748006 - DNA, 15 bp, Homo sapiens
tttctttctatgctt

SEQ ID NO: 748007 - DNA, 15 bp, Homo sapiens
ttctttctatgcttg

SEQ ID NO: 748008 - DNA, 15 bp, Homo sapiens
tctttctatgcttga

SEQ ID NO: 748009 - DNA, 15 bp, Homo sapiens
ctttctatgcttgag

SEQ ID NO: 748010 - DNA, 15 bp, Homo sapiens
tttctatgcttgagg

SEQ ID NO: 748011 - DNA, 15 bp, Homo sapiens
ttctatgcttgaggt

SEQ ID NO: 748012 - DNA, 15 bp, Homo sapiens
tctatgcttgaggtc

SEQ ID NO: 748013 - DNA, 15 bp, Homo sapiens
ctatgcttgaggtct

SEQ ID NO: 748014 - DNA, 15 bp, Homo sapiens
tatgcttgaggtctg

SEQ ID NO: 748015 - DNA, 15 bp, Homo sapiens
atgcttgaggtctgt

SEQ ID NO: 748016 - DNA, 15 bp, Homo sapiens
tgcttgaggtctgta

SEQ ID NO: 748017 - DNA, 15 bp, Homo sapiens
gcttgaggtctgtat

SEQ ID NO: 748018 - DNA, 15 bp, Homo sapiens
cttgaggtctgtatt

SEQ ID NO: 748019 - DNA, 15 bp, Homo sapiens
ttgaggtctgtattt

SEQ ID NO: 748020 - DNA, 15 bp, Homo sapiens
tgaggtctgtatttt

SEQ ID NO: 748021 - DNA, 15 bp, Homo sapiens
gaggtctgtattttt

SEQ ID NO: 748022 - DNA, 15 bp, Homo sapiens
aggtctgtattttta

SEQ ID NO: 748023 - DNA, 15 bp, Homo sapiens
ggtctgtatttttat

SEQ ID NO: 748024 - DNA, 15 bp, Homo sapiens
gtctgtatttttatt

SEQ ID NO: 748025 - DNA, 15 bp, Homo sapiens
tctgtatttttattg

SEQ ID NO: 748026 - DNA, 15 bp, Homo sapiens
ctgtatttttattgc

SEQ ID NO: 748027 - DNA, 15 bp, Homo sapiens
tgtatttttattgca

SEQ ID NO: 748028 - DNA, 15 bp, Homo sapiens
gtatttttattgcaa

SEQ ID NO: 748029 - DNA, 15 bp, Homo sapiens
tatttttattgcaat

SEQ ID NO: 748030 - DNA, 15 bp, Homo sapiens
atttttattgcaatt

SEQ ID NO: 748031 - DNA, 15 bp, Homo sapiens
tttttattgcaattg

SEQ ID NO: 748032 - DNA, 15 bp, Homo sapiens
ttttattgcaattgt

SEQ ID NO: 748033 - DNA, 15 bp, Homo sapiens
tttattgcaattgtg

SEQ ID NO: 748034 - DNA, 15 bp, Homo sapiens
ttattgcaattgtgt

SEQ ID NO: 748035 - DNA, 15 bp, Homo sapiens
tattgcaattgtgtg

SEQ ID NO: 748036 - DNA, 15 bp, Homo sapiens
attgcaattgtgtgt

SEQ ID NO: 748037 - DNA, 15 bp, Homo sapiens
ttgcaattgtgtgtg

SEQ ID NO: 748038 - DNA, 15 bp, Homo sapiens
tgcaattgtgtgtgt

SEQ ID NO: 748039 - DNA, 15 bp, Homo sapiens
gcaattgtgtgtgtg

SEQ ID NO: 748040 - DNA, 15 bp, Homo sapiens
caattgtgtgtgtgt

SEQ ID NO: 748041 - DNA, 15 bp, Homo sapiens
aattgtgtgtgtgtg

SEQ ID NO: 748042 - DNA, 15 bp, Homo sapiens
attgtgtgtgtgtgt

SEQ ID NO: 748043 - DNA, 15 bp, Homo sapiens
ttgtgtgtgtgtgtg

SEQ ID NO: 748044 - DNA, 15 bp, Homo sapiens
tgtgtgtgtgtgtgt

SEQ ID NO: 748045 - DNA, 15 bp, Homo sapiens
gtgtgtgtgtgtgtg

SEQ ID NO: 748046 - DNA, 15 bp, Homo sapiens
gtgtgtgtgtgtgtt

SEQ ID NO: 748047 - DNA, 15 bp, Homo sapiens
tgtgtgtgtgtgttt

SEQ ID NO: 748048 - DNA, 15 bp, Homo sapiens
gtgtgtgtgtgtttg

SEQ ID NO: 748049 - DNA, 15 bp, Homo sapiens
tgtgtgtgtgtttgt

SEQ ID NO: 748050 - DNA, 15 bp, Homo sapiens
gtgtgtgtgtttgtc

SEQ ID NO: 748051 - DNA, 15 bp, Homo sapiens
tgtgtgtgtttgtct

SEQ ID NO: 748052 - DNA, 15 bp, Homo sapiens
gtgtgtgtttgtctt

SEQ ID NO: 748053 - DNA, 15 bp, Homo sapiens
tgtgtgtttgtcttt

SEQ ID NO: 748054 - DNA, 15 bp, Homo sapiens
gtgtgtttgtctttt

SEQ ID NO: 748055 - DNA, 15 bp, Homo sapiens
tgtgtttgtcttttt

SEQ ID NO: 748056 - DNA, 15 bp, Homo sapiens
gtgtttgtctttttt

SEQ ID NO: 748057 - DNA, 15 bp, Homo sapiens
tgtttgtcttttttt

SEQ ID NO: 748058 - DNA, 15 bp, Homo sapiens
gtttgtctttttttc

SEQ ID NO: 748059 - DNA, 15 bp, Homo sapiens
tttgtctttttttct

SEQ ID NO: 748060 - DNA, 15 bp, Homo sapiens
ttgtctttttttctt

SEQ ID NO: 748061 - DNA, 15 bp, Homo sapiens
tgtctttttttcttt

SEQ ID NO: 748062 - DNA, 15 bp, Homo sapiens
gtctttttttctttt

SEQ ID NO: 748063 - DNA, 15 bp, Homo sapiens
tctttttttcttttt

SEQ ID NO: 748064 - DNA, 15 bp, Homo sapiens
ctttttttctttttt

SEQ ID NO: 748065 - DNA, 15 bp, Homo sapiens
tttttttcttttttc

SEQ ID NO: 748066 - DNA, 15 bp, Homo sapiens
ttttttcttttttct

SEQ ID NO: 748067 - DNA, 15 bp, Homo sapiens
ttcttttttctttcc

SEQ ID NO: 748068 - DNA, 15 bp, Homo sapiens
tcttttttctttcca

SEQ ID NO: 748069 - DNA, 15 bp, Homo sapiens
cttttttctttccaa

SEQ ID NO: 748070 - DNA, 15 bp, Homo sapiens
ttttttctttccaag

SEQ ID NO: 748071 - DNA, 15 bp, Homo sapiens
tttttctttccaagt

SEQ ID NO: 748072 - DNA, 15 bp, Homo sapiens
ttttctttccaagta

SEQ ID NO: 748073 - DNA, 15 bp, Homo sapiens
tttctttccaagtat

SEQ ID NO: 748074 - DNA, 15 bp, Homo sapiens
ttctttccaagtatt

SEQ ID NO: 748075 - DNA, 15 bp, Homo sapiens
tctttccaagtattt

SEQ ID NO: 748076 - DNA, 15 bp, Homo sapiens
ctttccaagtatttg

SEQ ID NO: 748077 - DNA, 15 bp, Homo sapiens
tttccaagtatttgg

SEQ ID NO: 748078 - DNA, 15 bp, Homo sapiens
ttccaagtatttggt

SEQ ID NO: 748079 - DNA, 15 bp, Homo sapiens
tccaagtatttggta

SEQ ID NO: 748080 - DNA, 15 bp, Homo sapiens
ccaagtatttggtag

SEQ ID NO: 748081 - DNA, 15 bp, Homo sapiens
caagtatttggtagt

SEQ ID NO: 748082 - DNA, 15 bp, Homo sapiens
aagtatttggtagtt

SEQ ID NO: 748083 - DNA, 15 bp, Homo sapiens
agtatttggtagttt

SEQ ID NO: 748084 - DNA, 15 bp, Homo sapiens
gtatttggtagtttt

SEQ ID NO: 748085 - DNA, 15 bp, Homo sapiens
tatttggtagttttg

SEQ ID NO: 748086 - DNA, 15 bp, Homo sapiens
atttggtagttttgt

SEQ ID NO: 748087 - DNA, 15 bp, Homo sapiens
tttggtagttttgtc

SEQ ID NO: 748088 - DNA, 15 bp, Homo sapiens
ttggtagttttgtca

SEQ ID NO: 748089 - DNA, 15 bp, Homo sapiens
tggtagttttgtcaa

SEQ ID NO: 748090 - DNA, 15 bp, Homo sapiens
ggtagttttgtcaag

SEQ ID NO: 748091 - DNA, 15 bp, Homo sapiens
gtagttttgtcaaga

SEQ ID NO: 748092 - DNA, 15 bp, Homo sapiens
tagttttgtcaagac

SEQ ID NO: 748093 - DNA, 15 bp, Homo sapiens
agttttgtcaagact

SEQ ID NO: 748094 - DNA, 15 bp, Homo sapiens
gttttgtcaagactc

SEQ ID NO: 748095 - DNA, 15 bp, Homo sapiens
ttttgtcaagactcg

SEQ ID NO: 748096 - DNA, 15 bp, Homo sapiens
tttgtcaagactcga

SEQ ID NO: 748097 - DNA, 15 bp, Homo sapiens
ttgtcaagactcgat

SEQ ID NO: 748098 - DNA, 15 bp, Homo sapiens
tgtcaagactcgata

SEQ ID NO: 748099 - DNA, 15 bp, Homo sapiens
gtcaagactcgatac

SEQ ID NO: 748100 - DNA, 15 bp, Homo sapiens
tcaagactcgataca

SEQ ID NO: 748101 - DNA, 15 bp, Homo sapiens
caagactcgatacac

SEQ ID NO: 748102 - DNA, 15 bp, Homo sapiens
aagactcgatacaca

SEQ ID NO: 748103 - DNA, 15 bp, Homo sapiens
agactcgatacacag

SEQ ID NO: 748104 - DNA, 15 bp, Homo sapiens
gactcgatacacagg

SEQ ID NO: 748105 - DNA, 15 bp, Homo sapiens
actcgatacacaggc

SEQ ID NO: 748106 - DNA, 15 bp, Homo sapiens
ctcgatacacaggca

SEQ ID NO: 748107 - DNA, 15 bp, Homo sapiens
tcgatacacaggcat

SEQ ID NO: 748108 - DNA, 15 bp, Homo sapiens
cgatacacaggcatg

SEQ ID NO: 748109 - DNA, 15 bp, Homo sapiens
gatacacaggcatgt

SEQ ID NO: 748110 - DNA, 15 bp, Homo sapiens
atacacaggcatgta

SEQ ID NO: 748111 - DNA, 15 bp, Homo sapiens
tacacaggcatgtat

SEQ ID NO: 748112 - DNA, 15 bp, Homo sapiens
acacaggcatgtatt

SEQ ID NO: 748113 - DNA, 15 bp, Homo sapiens
cacaggcatgtattt

SEQ ID NO: 748114 - DNA, 15 bp, Homo sapiens
acaggcatgtatttg

SEQ ID NO: 748115 - DNA, 15 bp, Homo sapiens
caggcatgtatttgg

SEQ ID NO: 748116 - DNA, 15 bp, Homo sapiens
aggcatgtatttggc

SEQ ID NO: 748117 - DNA, 15 bp, Homo sapiens
ggcatgtatttggct

SEQ ID NO: 748118 - DNA, 15 bp, Homo sapiens
gcatgtatttggctt

SEQ ID NO: 748119 - DNA, 15 bp, Homo sapiens
catgtatttggctta

SEQ ID NO: 748120 - DNA, 15 bp, Homo sapiens
atgtatttggcttaa

SEQ ID NO: 748121 - DNA, 15 bp, Homo sapiens
tgtatttggcttaag

SEQ ID NO: 748122 - DNA, 15 bp, Homo sapiens
gtatttggcttaagc

SEQ ID NO: 748123 - DNA, 15 bp, Homo sapiens
tatttggcttaagct

SEQ ID NO: 748124 - DNA, 15 bp, Homo sapiens
atttggcttaagctt

SEQ ID NO: 748125 - DNA, 15 bp, Homo sapiens
tttggcttaagctta

SEQ ID NO: 748126 - DNA, 15 bp, Homo sapiens
ttggcttaagcttag

SEQ ID NO: 748127 - DNA, 15 bp, Homo sapiens
tggcttaagcttaga

SEQ ID NO: 748128 - DNA, 15 bp, Homo sapiens
ggcttaagcttagaa

SEQ ID NO: 748129 - DNA, 15 bp, Homo sapiens
gcttaagcttagaat

SEQ ID NO: 748130 - DNA, 15 bp, Homo sapiens
cttaagcttagaata

SEQ ID NO: 748131 - DNA, 15 bp, Homo sapiens
ttaagcttagaataa

SEQ ID NO: 748132 - DNA, 15 bp, Homo sapiens
taagcttagaataat

SEQ ID NO: 748133 - DNA, 15 bp, Homo sapiens
aagcttagaataata

SEQ ID NO: 748134 - DNA, 15 bp, Homo sapiens
agcttagaataataa

SEQ ID NO: 748135 - DNA, 15 bp, Homo sapiens
gcttagaataataat

SEQ ID NO: 748136 - DNA, 15 bp, Homo sapiens
cttagaataataatt

SEQ ID NO: 748137 - DNA, 15 bp, Homo sapiens
ttagaataataattt

SEQ ID NO: 748138 - DNA, 15 bp, Homo sapiens
tagaataataatttt

SEQ ID NO: 748139 - DNA, 15 bp, Homo sapiens
agaataataattttt

SEQ ID NO: 748140 - DNA, 15 bp, Homo sapiens
gaataataatttttg

SEQ ID NO: 748141 - DNA, 15 bp, Homo sapiens
aataataatttttgt

SEQ ID NO: 748142 - DNA, 15 bp, Homo sapiens
ataataatttttgtg

SEQ ID NO: 748143 - DNA, 15 bp, Homo sapiens
taataatttttgtgc

SEQ ID NO: 748144 - DNA, 15 bp, Homo sapiens
aataatttttgtgct

SEQ ID NO: 748145 - DNA, 15 bp, Homo sapiens
ataatttttgtgcta

SEQ ID NO: 748146 - DNA, 15 bp, Homo sapiens
taatttttgtgctag

SEQ ID NO: 748147 - DNA, 15 bp, Homo sapiens
aatttttgtgctaga

SEQ ID NO: 748148 - DNA, 15 bp, Homo sapiens
atttttgtgctagat

SEQ ID NO: 748149 - DNA, 15 bp, Homo sapiens
tttttgtgctagatt

SEQ ID NO: 748150 - DNA, 15 bp, Homo sapiens
ttttgtgctagattt

SEQ ID NO: 748151 - DNA, 15 bp, Homo sapiens
tttgtgctagatttc

SEQ ID NO: 748152 - DNA, 15 bp, Homo sapiens
ttgtgctagatttcc

SEQ ID NO: 748153 - DNA, 15 bp, Homo sapiens
tgtgctagatttccc

SEQ ID NO: 748154 - DNA, 15 bp, Homo sapiens
gtgctagatttccca

SEQ ID NO: 748155 - DNA, 15 bp, Homo sapiens
tgctagatttcccaa

SEQ ID NO: 748156 - DNA, 15 bp, Homo sapiens
gctagatttcccaag

SEQ ID NO: 748157 - DNA, 15 bp, Homo sapiens
ctagatttcccaaga

SEQ ID NO: 748158 - DNA, 15 bp, Homo sapiens
tagatttcccaagaa

SEQ ID NO: 748159 - DNA, 15 bp, Homo sapiens
agatttcccaagaaa

SEQ ID NO: 748160 - DNA, 15 bp, Homo sapiens
gatttcccaagaaaa

SEQ ID NO: 748161 - DNA, 15 bp, Homo sapiens
atttcccaagaaaac

SEQ ID NO: 748162 - DNA, 15 bp, Homo sapiens
tttcccaagaaaaca

SEQ ID NO: 748163 - DNA, 15 bp, Homo sapiens
ttcccaagaaaacat

SEQ ID NO: 748164 - DNA, 15 bp, Homo sapiens
tcccaagaaaacata

SEQ ID NO: 748165 - DNA, 15 bp, Homo sapiens
cccaagaaaacatag

SEQ ID NO: 748166 - DNA, 15 bp, Homo sapiens
ccaagaaaacatagg

SEQ ID NO: 748167 - DNA, 15 bp, Homo sapiens
caagaaaacataggc

SEQ ID NO: 748168 - DNA, 15 bp, Homo sapiens
aagaaaacataggct

SEQ ID NO: 748169 - DNA, 15 bp, Homo sapiens
agaaaacataggctg

SEQ ID NO: 748170 - DNA, 15 bp, Homo sapiens
gaaaacataggctgc

SEQ ID NO: 748171 - DNA, 15 bp, Homo sapiens
aaaacataggctgcc

SEQ ID NO: 748172 - DNA, 15 bp, Homo sapiens
aaacataggctgcct

SEQ ID NO: 748173 - DNA, 15 bp, Homo sapiens
aacataggctgcctt

SEQ ID NO: 748174 - DNA, 15 bp, Homo sapiens
acataggctgccttt

SEQ ID NO: 748175 - DNA, 15 bp, Homo sapiens
cataggctgcctttc

SEQ ID NO: 748176 - DNA, 15 bp, Homo sapiens
ataggctgcctttcc

SEQ ID NO: 748177 - DNA, 15 bp, Homo sapiens
taggctgcctttcca

SEQ ID NO: 748178 - DNA, 15 bp, Homo sapiens
aggctgcctttccag

SEQ ID NO: 748179 - DNA, 15 bp, Homo sapiens
ggctgcctttccaga

SEQ ID NO: 748180 - DNA, 15 bp, Homo sapiens
gctgcctttccagaa

SEQ ID NO: 748181 - DNA, 15 bp, Homo sapiens
ctgcctttccagaaa

SEQ ID NO: 748182 - DNA, 15 bp, Homo sapiens
tgcctttccagaaaa

SEQ ID NO: 748183 - DNA, 15 bp, Homo sapiens
gcctttccagaaaat

SEQ ID NO: 748184 - DNA, 15 bp, Homo sapiens
cctttccagaaaatt

SEQ ID NO: 748185 - DNA, 15 bp, Homo sapiens
ctttccagaaaattc

SEQ ID NO: 748186 - DNA, 15 bp, Homo sapiens
tttccagaaaattct

SEQ ID NO: 748187 - DNA, 15 bp, Homo sapiens
ttccagaaaattcta

SEQ ID NO: 748188 - DNA, 15 bp, Homo sapiens
tccagaaaattctac

SEQ ID NO: 748189 - DNA, 15 bp, Homo sapiens
ccagaaaattctacc

SEQ ID NO: 748190 - DNA, 15 bp, Homo sapiens
cagaaaattctacca

SEQ ID NO: 748191 - DNA, 15 bp, Homo sapiens
agaaaattctaccag

SEQ ID NO: 748192 - DNA, 15 bp, Homo sapiens
gaaaattctaccagc

SEQ ID NO: 748193 - DNA, 15 bp, Homo sapiens
aaaattctaccagcc

SEQ ID NO: 748194 - DNA, 15 bp, Homo sapiens
aaattctaccagccc

SEQ ID NO: 748195 - DNA, 15 bp, Homo sapiens
aattctaccagccct

SEQ ID NO: 748196 - DNA, 15 bp, Homo sapiens
attctaccagccctc

SEQ ID NO: 748197 - DNA, 15 bp, Homo sapiens
ttctaccagccctca

SEQ ID NO: 748198 - DNA, 15 bp, Homo sapiens
tctaccagccctcag

SEQ ID NO: 748199 - DNA, 15 bp, Homo sapiens
ctaccagccctcaga

SEQ ID NO: 748200 - DNA, 15 bp, Homo sapiens
taccagccctcagat

SEQ ID NO: 748201 - DNA, 15 bp, Homo sapiens
accagccctcagatg

SEQ ID NO: 748202 - DNA, 15 bp, Homo sapiens
ccagccctcagatgg

SEQ ID NO: 748203 - DNA, 15 bp, Homo sapiens
cagccctcagatggg

SEQ ID NO: 748204 - DNA, 15 bp, Homo sapiens
agccctcagatgggt

SEQ ID NO: 748205 - DNA, 15 bp, Homo sapiens
gccctcagatgggtt

SEQ ID NO: 748206 - DNA, 15 bp, Homo sapiens
ccctcagatgggttc

SEQ ID NO: 748207 - DNA, 15 bp, Homo sapiens
cctcagatgggttca

SEQ ID NO: 748208 - DNA, 15 bp, Homo sapiens
ctcagatgggttcac

SEQ ID NO: 748209 - DNA, 15 bp, Homo sapiens
tcagatgggttcacc

SEQ ID NO: 748210 - DNA, 15 bp, Homo sapiens
cagatgggttcaccc

SEQ ID NO: 748211 - DNA, 15 bp, Homo sapiens
agatgggttcaccct

SEQ ID NO: 748212 - DNA, 15 bp, Homo sapiens
gatgggttcaccctc

SEQ ID NO: 748213 - DNA, 15 bp, Homo sapiens
atgggttcaccctca

SEQ ID NO: 748214 - DNA, 15 bp, Homo sapiens
tgggttcaccctcac

SEQ ID NO: 748215 - DNA, 15 bp, Homo sapiens
gggttcaccctcacc

SEQ ID NO: 748216 - DNA, 15 bp, Homo sapiens
ggttcaccctcaccc

SEQ ID NO: 748217 - DNA, 15 bp, Homo sapiens
gttcaccctcaccct

SEQ ID NO: 748218 - DNA, 15 bp, Homo sapiens
ttcaccctcaccctc

SEQ ID NO: 748219 - DNA, 15 bp, Homo sapiens
tcaccctcaccctcc

SEQ ID NO: 748220 - DNA, 15 bp, Homo sapiens
caccctcaccctcct

SEQ ID NO: 748221 - DNA, 15 bp, Homo sapiens
accctcaccctcctt

SEQ ID NO: 748222 - DNA, 15 bp, Homo sapiens
ccctcaccctccttc

SEQ ID NO: 748223 - DNA, 15 bp, Homo sapiens
cctcaccctccttca

SEQ ID NO: 748224 - DNA, 15 bp, Homo sapiens
ctcaccctccttcag

SEQ ID NO: 748225 - DNA, 15 bp, Homo sapiens
tcaccctccttcagc

SEQ ID NO: 748226 - DNA, 15 bp, Homo sapiens
caccctccttcagcc

SEQ ID NO: 748227 - DNA, 15 bp, Homo sapiens
accctccttcagccc

SEQ ID NO: 748228 - DNA, 15 bp, Homo sapiens
ccctccttcagcccc

SEQ ID NO: 748229 - DNA, 15 bp, Homo sapiens
cctccttcagcccca

SEQ ID NO: 748230 - DNA, 15 bp, Homo sapiens
ctccttcagccccaa

SEQ ID NO: 748231 - DNA, 15 bp, Homo sapiens
tccttcagccccaag

SEQ ID NO: 748232 - DNA, 15 bp, Homo sapiens
ccttcagccccaaga

SEQ ID NO: 748233 - DNA, 15 bp, Homo sapiens
cttcagccccaagat

SEQ ID NO: 748234 - DNA, 15 bp, Homo sapiens
ttcagccccaagatg

SEQ ID NO: 748235 - DNA, 15 bp, Homo sapiens
tcagccccaagatgg

SEQ ID NO: 748236 - DNA, 15 bp, Homo sapiens
cagccccaagatggt

SEQ ID NO: 748237 - DNA, 15 bp, Homo sapiens
agccccaagatggtt

SEQ ID NO: 748238 - DNA, 15 bp, Homo sapiens
gccccaagatggttt

SEQ ID NO: 748239 - DNA, 15 bp, Homo sapiens
ccccaagatggtttg

SEQ ID NO: 748240 - DNA, 15 bp, Homo sapiens
cccaagatggtttga

SEQ ID NO: 748241 - DNA, 15 bp, Homo sapiens
ccaagatggtttgat

SEQ ID NO: 748242 - DNA, 15 bp, Homo sapiens
caagatggtttgatc

SEQ ID NO: 748243 - DNA, 15 bp, Homo sapiens
aagatggtttgatca

SEQ ID NO: 748244 - DNA, 15 bp, Homo sapiens
agatggtttgatcaa

SEQ ID NO: 748245 - DNA, 15 bp, Homo sapiens
gatggtttgatcaag

SEQ ID NO: 748246 - DNA, 15 bp, Homo sapiens
atggtttgatcaaga

SEQ ID NO: 748247 - DNA, 15 bp, Homo sapiens
tggtttgatcaagag

SEQ ID NO: 748248 - DNA, 15 bp, Homo sapiens
ggtttgatcaagagc

SEQ ID NO: 748249 - DNA, 15 bp, Homo sapiens
gtttgatcaagagct

SEQ ID NO: 748250 - DNA, 15 bp, Homo sapiens
tttgatcaagagctg

SEQ ID NO: 748251 - DNA, 15 bp, Homo sapiens
ttgatcaagagctgg

SEQ ID NO: 748252 - DNA, 15 bp, Homo sapiens
tgatcaagagctgga

SEQ ID NO: 748253 - DNA, 15 bp, Homo sapiens
gatcaagagctggag

SEQ ID NO: 748254 - DNA, 15 bp, Homo sapiens
atcaagagctggagt

SEQ ID NO: 748255 - DNA, 15 bp, Homo sapiens
tcaagagctggagtc

SEQ ID NO: 748256 - DNA, 15 bp, Homo sapiens
caagagctggagtcc

SEQ ID NO: 748257 - DNA, 15 bp, Homo sapiens
aagagctggagtcca

SEQ ID NO: 748258 - DNA, 15 bp, Homo sapiens
agagctggagtccag

SEQ ID NO: 748259 - DNA, 15 bp, Homo sapiens
gagctggagtccaga

SEQ ID NO: 748260 - DNA, 15 bp, Homo sapiens
agctggagtccagag

SEQ ID NO: 748261 - DNA, 15 bp, Homo sapiens
gctggagtccagagg

SEQ ID NO: 748262 - DNA, 15 bp, Homo sapiens
ctggagtccagagga

SEQ ID NO: 748263 - DNA, 15 bp, Homo sapiens
tggagtccagaggaa

SEQ ID NO: 748264 - DNA, 15 bp, Homo sapiens
ggagtccagaggaaa

SEQ ID NO: 748265 - DNA, 15 bp, Homo sapiens
gagtccagaggaaag

SEQ ID NO: 748266 - DNA, 15 bp, Homo sapiens
agtccagaggaaagc

SEQ ID NO: 748267 - DNA, 15 bp, Homo sapiens
gtccagaggaaagca

SEQ ID NO: 748268 - DNA, 15 bp, Homo sapiens
tccagaggaaagcag

SEQ ID NO: 748269 - DNA, 15 bp, Homo sapiens
ccagaggaaagcagg

SEQ ID NO: 748270 - DNA, 15 bp, Homo sapiens
cagaggaaagcaggt

SEQ ID NO: 748271 - DNA, 15 bp, Homo sapiens
agaggaaagcaggtc

SEQ ID NO: 748272 - DNA, 15 bp, Homo sapiens
gaggaaagcaggtct

SEQ ID NO: 748273 - DNA, 15 bp, Homo sapiens
aggaaagcaggtctg

SEQ ID NO: 748274 - DNA, 15 bp, Homo sapiens
ggaaagcaggtctga

SEQ ID NO: 748275 - DNA, 15 bp, Homo sapiens
gaaagcaggtctgaa

SEQ ID NO: 748276 - DNA, 15 bp, Homo sapiens
aaagcaggtctgaaa

SEQ ID NO: 748277 - DNA, 15 bp, Homo sapiens
aagcaggtctgaaat

SEQ ID NO: 748278 - DNA, 15 bp, Homo sapiens
agcaggtctgaaatt

SEQ ID NO: 748279 - DNA, 15 bp, Homo sapiens
gcaggtctgaaattc

SEQ ID NO: 748280 - DNA, 15 bp, Homo sapiens
caggtctgaaattct

SEQ ID NO: 748281 - DNA, 15 bp, Homo sapiens
aggtctgaaattctg

SEQ ID NO: 748282 - DNA, 15 bp, Homo sapiens
ggtctgaaattctgt

SEQ ID NO: 748283 - DNA, 15 bp, Homo sapiens
gtctgaaattctgtg

SEQ ID NO: 748284 - DNA, 15 bp, Homo sapiens
tctgaaattctgtgg

SEQ ID NO: 748285 - DNA, 15 bp, Homo sapiens
ctgaaattctgtggg

SEQ ID NO: 748286 - DNA, 15 bp, Homo sapiens
tgaaattctgtggga

SEQ ID NO: 748287 - DNA, 15 bp, Homo sapiens
gaaattctgtgggag

SEQ ID NO: 748288 - DNA, 15 bp, Homo sapiens
aaattctgtgggaga

SEQ ID NO: 748289 - DNA, 15 bp, Homo sapiens
aattctgtgggagat

SEQ ID NO: 748290 - DNA, 15 bp, Homo sapiens
attctgtgggagata

SEQ ID NO: 748291 - DNA, 15 bp, Homo sapiens
ttctgtgggagataa

SEQ ID NO: 748292 - DNA, 15 bp, Homo sapiens
tctgtgggagataaa

SEQ ID NO: 748293 - DNA, 15 bp, Homo sapiens
ctgtgggagataaaa

SEQ ID NO: 748294 - DNA, 15 bp, Homo sapiens
tgtgggagataaaat

SEQ ID NO: 748295 - DNA, 15 bp, Homo sapiens
gtgggagataaaatt

SEQ ID NO: 748296 - DNA, 15 bp, Homo sapiens
tgggagataaaattc

SEQ ID NO: 748297 - DNA, 15 bp, Homo sapiens
gggagataaaattca

SEQ ID NO: 748298 - DNA, 15 bp, Homo sapiens
ggagataaaattcag

SEQ ID NO: 748299 - DNA, 15 bp, Homo sapiens
gagataaaattcagc

SEQ ID NO: 748300 - DNA, 15 bp, Homo sapiens
agataaaattcagca

SEQ ID NO: 748301 - DNA, 15 bp, Homo sapiens
gataaaattcagcaa

SEQ ID NO: 748302 - DNA, 15 bp, Homo sapiens
ataaaattcagcaag

SEQ ID NO: 748303 - DNA, 15 bp, Homo sapiens
taaaattcagcaagg

SEQ ID NO: 748304 - DNA, 15 bp, Homo sapiens
aaaattcagcaagga

SEQ ID NO: 748305 - DNA, 15 bp, Homo sapiens
aaattcagcaaggag

SEQ ID NO: 748306 - DNA, 15 bp, Homo sapiens
aattcagcaaggagc

SEQ ID NO: 748307 - DNA, 15 bp, Homo sapiens
attcagcaaggagct

SEQ ID NO: 748308 - DNA, 15 bp, Homo sapiens
ttcagcaaggagctc

SEQ ID NO: 748309 - DNA, 15 bp, Homo sapiens
tcagcaaggagctcc

SEQ ID NO: 748310 - DNA, 15 bp, Homo sapiens
cagcaaggagctcca

SEQ ID NO: 748311 - DNA, 15 bp, Homo sapiens
agcaaggagctccaa

SEQ ID NO: 748312 - DNA, 15 bp, Homo sapiens
gcaaggagctccaat

SEQ ID NO: 748313 - DNA, 15 bp, Homo sapiens
caaggagctccaatt

SEQ ID NO: 748314 - DNA, 15 bp, Homo sapiens
aaggagctccaattt

SEQ ID NO: 748315 - DNA, 15 bp, Homo sapiens
aggagctccaatttc

SEQ ID NO: 748316 - DNA, 15 bp, Homo sapiens
ggagctccaatttca

SEQ ID NO: 748317 - DNA, 15 bp, Homo sapiens
gagctccaatttcat

SEQ ID NO: 748318 - DNA, 15 bp, Homo sapiens
agctccaatttcatg

SEQ ID NO: 748319 - DNA, 15 bp, Homo sapiens
gctccaatttcatga

SEQ ID NO: 748320 - DNA, 15 bp, Homo sapiens
ctccaatttcatgag

SEQ ID NO: 748321 - DNA, 15 bp, Homo sapiens
tccaatttcatgagc

SEQ ID NO: 748322 - DNA, 15 bp, Homo sapiens
ccaatttcatgagcg

SEQ ID NO: 748323 - DNA, 15 bp, Homo sapiens
caatttcatgagcgt

SEQ ID NO: 748324 - DNA, 15 bp, Homo sapiens
aatttcatgagcgtt

SEQ ID NO: 748325 - DNA, 15 bp, Homo sapiens
atttcatgagcgttt

SEQ ID NO: 748326 - DNA, 15 bp, Homo sapiens
tttcatgagcgtttg

SEQ ID NO: 748327 - DNA, 15 bp, Homo sapiens
ttcatgagcgtttgg

SEQ ID NO: 748328 - DNA, 15 bp, Homo sapiens
tcatgagcgtttggt

SEQ ID NO: 748329 - DNA, 15 bp, Homo sapiens
catgagcgtttggtc

SEQ ID NO: 748330 - DNA, 15 bp, Homo sapiens
atgagcgtttggtct

SEQ ID NO: 748331 - DNA, 15 bp, Homo sapiens
tgagcgtttggtctc

SEQ ID NO: 748332 - DNA, 15 bp, Homo sapiens
gagcgtttggtctct

SEQ ID NO: 748333 - DNA, 15 bp, Homo sapiens
agcgtttggtctctg

SEQ ID NO: 748334 - DNA, 15 bp, Homo sapiens
gcgtttggtctctgg

SEQ ID NO: 748335 - DNA, 15 bp, Homo sapiens
cgtttggtctctggg

SEQ ID NO: 748336 - DNA, 15 bp, Homo sapiens
gtttggtctctggga

SEQ ID NO: 748337 - DNA, 15 bp, Homo sapiens
tttggtctctgggat

SEQ ID NO: 748338 - DNA, 15 bp, Homo sapiens
ttggtctctgggatc

SEQ ID NO: 748339 - DNA, 15 bp, Homo sapiens
tggtctctgggatcg

SEQ ID NO: 748340 - DNA, 15 bp, Homo sapiens
ggtctctgggatcgc

SEQ ID NO: 748341 - DNA, 15 bp, Homo sapiens
gtctctgggatcgca

SEQ ID NO: 748342 - DNA, 15 bp, Homo sapiens
tctctgggatcgcac

SEQ ID NO: 748343 - DNA, 15 bp, Homo sapiens
ctctgggatcgcacc

SEQ ID NO: 748344 - DNA, 15 bp, Homo sapiens
tctgggatcgcacca

SEQ ID NO: 748345 - DNA, 15 bp, Homo sapiens
ctgggatcgcaccaa

SEQ ID NO: 748346 - DNA, 15 bp, Homo sapiens
tgggatcgcaccaaa

SEQ ID NO: 748347 - DNA, 15 bp, Homo sapiens
gggatcgcaccaaac

SEQ ID NO: 748348 - DNA, 15 bp, Homo sapiens
ggatcgcaccaaacc

SEQ ID NO: 748349 - DNA, 15 bp, Homo sapiens
gatcgcaccaaacct

SEQ ID NO: 748350 - DNA, 15 bp, Homo sapiens
atcgcaccaaacctt

SEQ ID NO: 748351 - DNA, 15 bp, Homo sapiens
tcgcaccaaaccttt

SEQ ID NO: 748352 - DNA, 15 bp, Homo sapiens
cgcaccaaacctttt

SEQ ID NO: 748353 - DNA, 15 bp, Homo sapiens
gcaccaaaccttttt

SEQ ID NO: 748354 - DNA, 15 bp, Homo sapiens
caccaaacctttttg

SEQ ID NO: 748355 - DNA, 15 bp, Homo sapiens
accaaacctttttga

SEQ ID NO: 748356 - DNA, 15 bp, Homo sapiens
ccaaacctttttgat

SEQ ID NO: 748357 - DNA, 15 bp, Homo sapiens
caaacctttttgatc

SEQ ID NO: 748358 - DNA, 15 bp, Homo sapiens
aaacctttttgatca

SEQ ID NO: 748359 - DNA, 15 bp, Homo sapiens
aacctttttgatcaa

SEQ ID NO: 748360 - DNA, 15 bp, Homo sapiens
acctttttgatcaaa

SEQ ID NO: 748361 - DNA, 15 bp, Homo sapiens
cctttttgatcaaag

SEQ ID NO: 748362 - DNA, 15 bp, Homo sapiens
ctttttgatcaaagg

SEQ ID NO: 748363 - DNA, 15 bp, Homo sapiens
tttttgatcaaagga

SEQ ID NO: 748364 - DNA, 15 bp, Homo sapiens
ttttgatcaaaggaa

SEQ ID NO: 748365 - DNA, 15 bp, Homo sapiens
tttgatcaaaggaac

SEQ ID NO: 748366 - DNA, 15 bp, Homo sapiens
ttgatcaaaggaacc

SEQ ID NO: 748367 - DNA, 15 bp, Homo sapiens
tgatcaaaggaaccc

SEQ ID NO: 748368 - DNA, 15 bp, Homo sapiens
gatcaaaggaaccca

SEQ ID NO: 748369 - DNA, 15 bp, Homo sapiens
atcaaaggaacccaa

SEQ ID NO: 748370 - DNA, 15 bp, Homo sapiens
tcaaaggaacccaag

SEQ ID NO: 748371 - DNA, 15 bp, Homo sapiens
caaaggaacccaaga

SEQ ID NO: 748372 - DNA, 15 bp, Homo sapiens
aaaggaacccaagac

SEQ ID NO: 748373 - DNA, 15 bp, Homo sapiens
aaggaacccaagact

SEQ ID NO: 748374 - DNA, 15 bp, Homo sapiens
aggaacccaagactg

SEQ ID NO: 748375 - DNA, 15 bp, Homo sapiens
ggaacccaagactgt

SEQ ID NO: 748376 - DNA, 15 bp, Homo sapiens
gaacccaagactgtg

SEQ ID NO: 748377 - DNA, 15 bp, Homo sapiens
aacccaagactgtgg

SEQ ID NO: 748378 - DNA, 15 bp, Homo sapiens
acccaagactgtgga

SEQ ID NO: 748379 - DNA, 15 bp, Homo sapiens
cccaagactgtggac

SEQ ID NO: 748380 - DNA, 15 bp, Homo sapiens
ccaagactgtggaca

SEQ ID NO: 748381 - DNA, 15 bp, Homo sapiens
caagactgtggacat

SEQ ID NO: 748382 - DNA, 15 bp, Homo sapiens
aagactgtggacatg

SEQ ID NO: 748383 - DNA, 15 bp, Homo sapiens
agactgtggacatgc

SEQ ID NO: 748384 - DNA, 15 bp, Homo sapiens
gactgtggacatgca

SEQ ID NO: 748385 - DNA, 15 bp, Homo sapiens
actgtggacatgcat

SEQ ID NO: 748386 - DNA, 15 bp, Homo sapiens
ctgtggacatgcatc

SEQ ID NO: 748387 - DNA, 15 bp, Homo sapiens
tgtggacatgcatcg

SEQ ID NO: 748388 - DNA, 15 bp, Homo sapiens
gtggacatgcatcgt

SEQ ID NO: 748389 - DNA, 15 bp, Homo sapiens
tggacatgcatcgtg

SEQ ID NO: 748390 - DNA, 15 bp, Homo sapiens
ggacatgcatcgtgg

SEQ ID NO: 748391 - DNA, 15 bp, Homo sapiens
gacatgcatcgtggg

SEQ ID NO: 748392 - DNA, 15 bp, Homo sapiens
acatgcatcgtggga

SEQ ID NO: 748393 - DNA, 15 bp, Homo sapiens
catgcatcgtgggac

SEQ ID NO: 748394 - DNA, 15 bp, Homo sapiens
atgcatcgtgggaca

SEQ ID NO: 748395 - DNA, 15 bp, Homo sapiens
tgcatcgtgggacat

SEQ ID NO: 748396 - DNA, 15 bp, Homo sapiens
gcatcgtgggacatc

SEQ ID NO: 748397 - DNA, 15 bp, Homo sapiens
catcgtgggacatct

SEQ ID NO: 748398 - DNA, 15 bp, Homo sapiens
atcgtgggacatctc

SEQ ID NO: 748399 - DNA, 15 bp, Homo sapiens
tcgtgggacatctct

SEQ ID NO: 748400 - DNA, 15 bp, Homo sapiens
cgtgggacatctctt

SEQ ID NO: 748401 - DNA, 15 bp, Homo sapiens
gtgggacatctcttc

SEQ ID NO: 748402 - DNA, 15 bp, Homo sapiens
tgggacatctcttca

SEQ ID NO: 748403 - DNA, 15 bp, Homo sapiens
gggacatctcttcat

SEQ ID NO: 748404 - DNA, 15 bp, Homo sapiens
ggacatctcttcatt

SEQ ID NO: 748405 - DNA, 15 bp, Homo sapiens
gacatctcttcatta

SEQ ID NO: 748406 - DNA, 15 bp, Homo sapiens
acatctcttcattag

SEQ ID NO: 748407 - DNA, 15 bp, Homo sapiens
catctcttcattagt

SEQ ID NO: 748408 - DNA, 15 bp, Homo sapiens
atctcttcattagta

SEQ ID NO: 748409 - DNA, 15 bp, Homo sapiens
tctcttcattagtac

SEQ ID NO: 748410 - DNA, 15 bp, Homo sapiens
ctcttcattagtacc

SEQ ID NO: 748411 - DNA, 15 bp, Homo sapiens
tcttcattagtacct

SEQ ID NO: 748412 - DNA, 15 bp, Homo sapiens
cttcattagtacctt

SEQ ID NO: 748413 - DNA, 15 bp, Homo sapiens
ttcattagtaccttt

SEQ ID NO: 748414 - DNA, 15 bp, Homo sapiens
tcattagtacctttg

SEQ ID NO: 748415 - DNA, 15 bp, Homo sapiens
cattagtacctttgg

SEQ ID NO: 748416 - DNA, 15 bp, Homo sapiens
attagtacctttggc

SEQ ID NO: 748417 - DNA, 15 bp, Homo sapiens
ttagtacctttggcc

SEQ ID NO: 748418 - DNA, 15 bp, Homo sapiens
tagtacctttggcct

SEQ ID NO: 748419 - DNA, 15 bp, Homo sapiens
agtacctttggcctc

SEQ ID NO: 748420 - DNA, 15 bp, Homo sapiens
gtacctttggcctct

SEQ ID NO: 748421 - DNA, 15 bp, Homo sapiens
tacctttggcctctg

SEQ ID NO: 748422 - DNA, 15 bp, Homo sapiens
acctttggcctctga

SEQ ID NO: 748423 - DNA, 15 bp, Homo sapiens
cctttggcctctgaa

SEQ ID NO: 748424 - DNA, 15 bp, Homo sapiens
ctttggcctctgaat

SEQ ID NO: 748425 - DNA, 15 bp, Homo sapiens
tttggcctctgaatc

SEQ ID NO: 748426 - DNA, 15 bp, Homo sapiens
ttggcctctgaatct

SEQ ID NO: 748427 - DNA, 15 bp, Homo sapiens
tggcctctgaatctc

SEQ ID NO: 748428 - DNA, 15 bp, Homo sapiens
ggcctctgaatctca

SEQ ID NO: 748429 - DNA, 15 bp, Homo sapiens
gcctctgaatctcaa

SEQ ID NO: 748430 - DNA, 15 bp, Homo sapiens
cctctgaatctcaaa

SEQ ID NO: 748431 - DNA, 15 bp, Homo sapiens
ctctgaatctcaaac

SEQ ID NO: 748432 - DNA, 15 bp, Homo sapiens
tctgaatctcaaaca

SEQ ID NO: 748433 - DNA, 15 bp, Homo sapiens
ctgaatctcaaacag

SEQ ID NO: 748434 - DNA, 15 bp, Homo sapiens
tgaatctcaaacagt

SEQ ID NO: 748435 - DNA, 15 bp, Homo sapiens
gaatctcaaacagtg

SEQ ID NO: 748436 - DNA, 15 bp, Homo sapiens
aatctcaaacagtga

SEQ ID NO: 748437 - DNA, 15 bp, Homo sapiens
atctcaaacagtgaa

SEQ ID NO: 748438 - DNA, 15 bp, Homo sapiens
tctcaaacagtgaat

SEQ ID NO: 748439 - DNA, 15 bp, Homo sapiens
ctcaaacagtgaatg

SEQ ID NO: 748440 - DNA, 15 bp, Homo sapiens
tcaaacagtgaatga

SEQ ID NO: 748441 - DNA, 15 bp, Homo sapiens
caaacagtgaatgac

SEQ ID NO: 748442 - DNA, 15 bp, Homo sapiens
aaacagtgaatgact

SEQ ID NO: 748443 - DNA, 15 bp, Homo sapiens
aacagtgaatgactt

SEQ ID NO: 748444 - DNA, 15 bp, Homo sapiens
acagtgaatgacttt

SEQ ID NO: 748445 - DNA, 15 bp, Homo sapiens
cagtgaatgacttta

SEQ ID NO: 748446 - DNA, 15 bp, Homo sapiens
agtgaatgactttag

SEQ ID NO: 748447 - DNA, 15 bp, Homo sapiens
gtgaatgactttagt

SEQ ID NO: 748448 - DNA, 15 bp, Homo sapiens
tgaatgactttagtc

SEQ ID NO: 748449 - DNA, 15 bp, Homo sapiens
gaatgactttagtct

SEQ ID NO: 748450 - DNA, 15 bp, Homo sapiens
aatgactttagtctt

SEQ ID NO: 748451 - DNA, 15 bp, Homo sapiens
atgactttagtcttt

SEQ ID NO: 748452 - DNA, 15 bp, Homo sapiens
tgactttagtctttt

SEQ ID NO: 748453 - DNA, 15 bp, Homo sapiens
gactttagtcttttg

SEQ ID NO: 748454 - DNA, 15 bp, Homo sapiens
actttagtcttttga

SEQ ID NO: 748455 - DNA, 15 bp, Homo sapiens
ctttagtcttttgaa

SEQ ID NO: 748456 - DNA, 15 bp, Homo sapiens
tttagtcttttgaaa

SEQ ID NO: 748457 - DNA, 15 bp, Homo sapiens
ttagtcttttgaaaa

SEQ ID NO: 748458 - DNA, 15 bp, Homo sapiens
tagtcttttgaaaag

SEQ ID NO: 748459 - DNA, 15 bp, Homo sapiens
agtcttttgaaaaga

SEQ ID NO: 748460 - DNA, 15 bp, Homo sapiens
gtcttttgaaaagag

SEQ ID NO: 748461 - DNA, 15 bp, Homo sapiens
tcttttgaaaagagt

SEQ ID NO: 748462 - DNA, 15 bp, Homo sapiens
cttttgaaaagagtg

SEQ ID NO: 748463 - DNA, 15 bp, Homo sapiens
ttttgaaaagagtgg

SEQ ID NO: 748464 - DNA, 15 bp, Homo sapiens
tttgaaaagagtggc

SEQ ID NO: 748465 - DNA, 15 bp, Homo sapiens
ttgaaaagagtggca

SEQ ID NO: 748466 - DNA, 15 bp, Homo sapiens
tgaaaagagtggcat

SEQ ID NO: 748467 - DNA, 15 bp, Homo sapiens
gaaaagagtggcatg

SEQ ID NO: 748468 - DNA, 15 bp, Homo sapiens
aaaagagtggcatgt

SEQ ID NO: 748469 - DNA, 15 bp, Homo sapiens
aaagagtggcatgtg

SEQ ID NO: 748470 - DNA, 15 bp, Homo sapiens
aagagtggcatgtgg

SEQ ID NO: 748471 - DNA, 15 bp, Homo sapiens
agagtggcatgtgga

SEQ ID NO: 748472 - DNA, 15 bp, Homo sapiens
gagtggcatgtggac

SEQ ID NO: 748473 - DNA, 15 bp, Homo sapiens
agtggcatgtggact

SEQ ID NO: 748474 - DNA, 15 bp, Homo sapiens
gtggcatgtggactt

SEQ ID NO: 748475 - DNA, 15 bp, Homo sapiens
tggcatgtggacttt

SEQ ID NO: 748476 - DNA, 15 bp, Homo sapiens
ggcatgtggactttt

SEQ ID NO: 748477 - DNA, 15 bp, Homo sapiens
gcatgtggacttttt

SEQ ID NO: 748478 - DNA, 15 bp, Homo sapiens
catgtggactttttc

SEQ ID NO: 748479 - DNA, 15 bp, Homo sapiens
atgtggactttttca

SEQ ID NO: 748480 - DNA, 15 bp, Homo sapiens
tgtggactttttcag

SEQ ID NO: 748481 - DNA, 15 bp, Homo sapiens
gtggactttttcaga

SEQ ID NO: 748482 - DNA, 15 bp, Homo sapiens
tggactttttcagaa

SEQ ID NO: 748483 - DNA, 15 bp, Homo sapiens
ggactttttcagaaa

SEQ ID NO: 748484 - DNA, 15 bp, Homo sapiens
gactttttcagaaag

SEQ ID NO: 748485 - DNA, 15 bp, Homo sapiens
actttttcagaaagt

SEQ ID NO: 748486 - DNA, 15 bp, Homo sapiens
ctttttcagaaagtg

SEQ ID NO: 748487 - DNA, 15 bp, Homo sapiens
tttttcagaaagtga

SEQ ID NO: 748488 - DNA, 15 bp, Homo sapiens
ttttcagaaagtgaa

SEQ ID NO: 748489 - DNA, 15 bp, Homo sapiens
tttcagaaagtgaag

SEQ ID NO: 748490 - DNA, 15 bp, Homo sapiens
ttcagaaagtgaaga

SEQ ID NO: 748491 - DNA, 15 bp, Homo sapiens
tcagaaagtgaagaa

SEQ ID NO: 748492 - DNA, 15 bp, Homo sapiens
cagaaagtgaagaag

SEQ ID NO: 748493 - DNA, 15 bp, Homo sapiens
agaaagtgaagaaga

SEQ ID NO: 748494 - DNA, 15 bp, Homo sapiens
gaaagtgaagaagaa

SEQ ID NO: 748495 - DNA, 15 bp, Homo sapiens
aaagtgaagaagaaa

SEQ ID NO: 748496 - DNA, 15 bp, Homo sapiens
aagtgaagaagaaaa

SEQ ID NO: 748497 - DNA, 15 bp, Homo sapiens
agtgaagaagaaaac

SEQ ID NO: 748498 - DNA, 15 bp, Homo sapiens
gtgaagaagaaaaca

SEQ ID NO: 748499 - DNA, 15 bp, Homo sapiens
tgaagaagaaaacat

SEQ ID NO: 748500 - DNA, 15 bp, Homo sapiens
gaagaagaaaacatt

SEQ ID NO: 748501 - DNA, 15 bp, Homo sapiens
aagaagaaaacatta

SEQ ID NO: 748502 - DNA, 15 bp, Homo sapiens
agaagaaaacattac

SEQ ID NO: 748503 - DNA, 15 bp, Homo sapiens
gaagaaaacattaca

SEQ ID NO: 748504 - DNA, 15 bp, Homo sapiens
aagaaaacattacaa

SEQ ID NO: 748505 - DNA, 15 bp, Homo sapiens
agaaaacattacaat

SEQ ID NO: 748506 - DNA, 15 bp, Homo sapiens
gaaaacattacaatt

SEQ ID NO: 748507 - DNA, 15 bp, Homo sapiens
aaaacattacaattt

SEQ ID NO: 748508 - DNA, 15 bp, Homo sapiens
aaacattacaatttc

SEQ ID NO: 748509 - DNA, 15 bp, Homo sapiens
aacattacaatttcc

SEQ ID NO: 748510 - DNA, 15 bp, Homo sapiens
acattacaatttcct

SEQ ID NO: 748511 - DNA, 15 bp, Homo sapiens
cattacaatttcctc

SEQ ID NO: 748512 - DNA, 15 bp, Homo sapiens
attacaatttcctcc

SEQ ID NO: 748513 - DNA, 15 bp, Homo sapiens
ttacaatttcctcct

SEQ ID NO: 748514 - DNA, 15 bp, Homo sapiens
tacaatttcctcctg

SEQ ID NO: 748515 - DNA, 15 bp, Homo sapiens
acaatttcctcctgt

SEQ ID NO: 748516 - DNA, 15 bp, Homo sapiens
caatttcctcctgtt

SEQ ID NO: 748517 - DNA, 15 bp, Homo sapiens
aatttcctcctgttg

SEQ ID NO: 748518 - DNA, 15 bp, Homo sapiens
atttcctcctgttgg

SEQ ID NO: 748519 - DNA, 15 bp, Homo sapiens
tttcctcctgttggg

SEQ ID NO: 748520 - DNA, 15 bp, Homo sapiens
ttcctcctgttggga

SEQ ID NO: 748521 - DNA, 15 bp, Homo sapiens
tcctcctgttgggaa

SEQ ID NO: 748522 - DNA, 15 bp, Homo sapiens
cctcctgttgggaac

SEQ ID NO: 748523 - DNA, 15 bp, Homo sapiens
ctcctgttgggaact

SEQ ID NO: 748524 - DNA, 15 bp, Homo sapiens
tcctgttgggaactt

SEQ ID NO: 748525 - DNA, 15 bp, Homo sapiens
cctgttgggaacttg

SEQ ID NO: 748526 - DNA, 15 bp, Homo sapiens
ctgttgggaacttgg

SEQ ID NO: 748527 - DNA, 15 bp, Homo sapiens
tgttgggaacttggt

SEQ ID NO: 748528 - DNA, 15 bp, Homo sapiens
gttgggaacttggtc

SEQ ID NO: 748529 - DNA, 15 bp, Homo sapiens
ttgggaacttggtca

SEQ ID NO: 748530 - DNA, 15 bp, Homo sapiens
tgggaacttggtcac

SEQ ID NO: 748531 - DNA, 15 bp, Homo sapiens
gggaacttggtcaca

SEQ ID NO: 748532 - DNA, 15 bp, Homo sapiens
ggaacttggtcacag

SEQ ID NO: 748533 - DNA, 15 bp, Homo sapiens
gaacttggtcacagt

SEQ ID NO: 748534 - DNA, 15 bp, Homo sapiens
aacttggtcacagtc

SEQ ID NO: 748535 - DNA, 15 bp, Homo sapiens
acttggtcacagtca

SEQ ID NO: 748536 - DNA, 15 bp, Homo sapiens
cttggtcacagtcat

SEQ ID NO: 748537 - DNA, 15 bp, Homo sapiens
ttggtcacagtcatt

SEQ ID NO: 748538 - DNA, 15 bp, Homo sapiens
tggtcacagtcattc

SEQ ID NO: 748539 - DNA, 15 bp, Homo sapiens
ggtcacagtcattcc

SEQ ID NO: 748540 - DNA, 15 bp, Homo sapiens
gtcacagtcattcca

SEQ ID NO: 748541 - DNA, 15 bp, Homo sapiens
tcacagtcattccag

SEQ ID NO: 748542 - DNA, 15 bp, Homo sapiens
cacagtcattccagt

SEQ ID NO: 748543 - DNA, 15 bp, Homo sapiens
acagtcattccagta

SEQ ID NO: 748544 - DNA, 15 bp, Homo sapiens
cagtcattccagtac

SEQ ID NO: 748545 - DNA, 15 bp, Homo sapiens
agtcattccagtact

SEQ ID NO: 748546 - DNA, 15 bp, Homo sapiens
gtcattccagtactg

SEQ ID NO: 748547 - DNA, 15 bp, Homo sapiens
tcattccagtactgt

SEQ ID NO: 748548 - DNA, 15 bp, Homo sapiens
cattccagtactgtg

SEQ ID NO: 748549 - DNA, 15 bp, Homo sapiens
attccagtactgtgt

SEQ ID NO: 748550 - DNA, 15 bp, Homo sapiens
ttccagtactgtgtt

SEQ ID NO: 748551 - DNA, 15 bp, Homo sapiens
tccagtactgtgttc

SEQ ID NO: 748552 - DNA, 15 bp, Homo sapiens
ccagtactgtgttct

SEQ ID NO: 748553 - DNA, 15 bp, Homo sapiens
cagtactgtgttctt

SEQ ID NO: 748554 - DNA, 15 bp, Homo sapiens
agtactgtgttcttt

SEQ ID NO: 748555 - DNA, 15 bp, Homo sapiens
gtactgtgttctttg

SEQ ID NO: 748556 - DNA, 15 bp, Homo sapiens
tactgtgttctttgc

SEQ ID NO: 748557 - DNA, 15 bp, Homo sapiens
actgtgttctttgct

SEQ ID NO: 748558 - DNA, 15 bp, Homo sapiens
ctgtgttctttgctg

SEQ ID NO: 748559 - DNA, 15 bp, Homo sapiens
tgtgttctttgctgt

SEQ ID NO: 748560 - DNA, 15 bp, Homo sapiens
gtgttctttgctgta

SEQ ID NO: 748561 - DNA, 15 bp, Homo sapiens
tgttctttgctgtac

SEQ ID NO: 748562 - DNA, 15 bp, Homo sapiens
gttctttgctgtact

SEQ ID NO: 748563 - DNA, 15 bp, Homo sapiens
ttctttgctgtactt

SEQ ID NO: 748564 - DNA, 15 bp, Homo sapiens
tctttgctgtacttt

SEQ ID NO: 748565 - DNA, 15 bp, Homo sapiens
ctttgctgtactttt

SEQ ID NO: 748566 - DNA, 15 bp, Homo sapiens
tttgctgtacttttt

SEQ ID NO: 748567 - DNA, 15 bp, Homo sapiens
ttgctgtactttttc

SEQ ID NO: 748568 - DNA, 15 bp, Homo sapiens
tgctgtactttttca

SEQ ID NO: 748569 - DNA, 15 bp, Homo sapiens
gctgtactttttcac

SEQ ID NO: 748570 - DNA, 15 bp, Homo sapiens
ctgtactttttcaca

SEQ ID NO: 748571 - DNA, 15 bp, Homo sapiens
tgtactttttcacat

SEQ ID NO: 748572 - DNA, 15 bp, Homo sapiens
gtactttttcacatt

SEQ ID NO: 748573 - DNA, 15 bp, Homo sapiens
tactttttcacatta

SEQ ID NO: 748574 - DNA, 15 bp, Homo sapiens
actttttcacattat

SEQ ID NO: 748575 - DNA, 15 bp, Homo sapiens
ctttttcacattatt

SEQ ID NO: 748576 - DNA, 15 bp, Homo sapiens
tttttcacattattg

SEQ ID NO: 748577 - DNA, 15 bp, Homo sapiens
ttttcacattattgt

SEQ ID NO: 748578 - DNA, 15 bp, Homo sapiens
tttcacattattgtt

SEQ ID NO: 748579 - DNA, 15 bp, Homo sapiens
ttcacattattgttt

SEQ ID NO: 748580 - DNA, 15 bp, Homo sapiens
tcacattattgtttt

SEQ ID NO: 748581 - DNA, 15 bp, Homo sapiens
cacattattgttttt

SEQ ID NO: 748582 - DNA, 15 bp, Homo sapiens
acattattgtttttt

SEQ ID NO: 748583 - DNA, 15 bp, Homo sapiens
cattattgttttttt

SEQ ID NO: 748584 - DNA, 15 bp, Homo sapiens
attattgtttttttc

SEQ ID NO: 748585 - DNA, 15 bp, Homo sapiens
ttattgtttttttcc

SEQ ID NO: 748586 - DNA, 15 bp, Homo sapiens
tattgtttttttcct

SEQ ID NO: 748587 - DNA, 15 bp, Homo sapiens
attgtttttttcctt

SEQ ID NO: 748588 - DNA, 15 bp, Homo sapiens
ttgtttttttccttg

SEQ ID NO: 748589 - DNA, 15 bp, Homo sapiens
tgtttttttccttgt

SEQ ID NO: 748590 - DNA, 15 bp, Homo sapiens
gtttttttccttgtg

SEQ ID NO: 748591 - DNA, 15 bp, Homo sapiens
tttttttccttgtgg

SEQ ID NO: 748592 - DNA, 15 bp, Homo sapiens
ttttttccttgtggg

SEQ ID NO: 748593 - DNA, 15 bp, Homo sapiens
tttttccttgtggga

SEQ ID NO: 748594 - DNA, 15 bp, Homo sapiens
ttttccttgtgggat

SEQ ID NO: 748595 - DNA, 15 bp, Homo sapiens
tttccttgtgggatt

SEQ ID NO: 748596 - DNA, 15 bp, Homo sapiens
ttccttgtgggattt

SEQ ID NO: 748597 - DNA, 15 bp, Homo sapiens
tccttgtgggatttc

SEQ ID NO: 748598 - DNA, 15 bp, Homo sapiens
ccttgtgggatttca

SEQ ID NO: 748599 - DNA, 15 bp, Homo sapiens
cttgtgggatttcat

SEQ ID NO: 748600 - DNA, 15 bp, Homo sapiens
ttgtgggatttcatc

SEQ ID NO: 748601 - DNA, 15 bp, Homo sapiens
tgtgggatttcatca

SEQ ID NO: 748602 - DNA, 15 bp, Homo sapiens
gtgggatttcatcag

SEQ ID NO: 748603 - DNA, 15 bp, Homo sapiens
tgggatttcatcaga

SEQ ID NO: 748604 - DNA, 15 bp, Homo sapiens
gggatttcatcagag

SEQ ID NO: 748605 - DNA, 15 bp, Homo sapiens
ggatttcatcagagc

SEQ ID NO: 748606 - DNA, 15 bp, Homo sapiens
gatttcatcagagct

SEQ ID NO: 748607 - DNA, 15 bp, Homo sapiens
atttcatcagagctc

SEQ ID NO: 748608 - DNA, 15 bp, Homo sapiens
tttcatcagagctct

SEQ ID NO: 748609 - DNA, 15 bp, Homo sapiens
ttcatcagagctctc

SEQ ID NO: 748610 - DNA, 15 bp, Homo sapiens
tcatcagagctctct

SEQ ID NO: 748611 - DNA, 15 bp, Homo sapiens
catcagagctctcta

SEQ ID NO: 748612 - DNA, 15 bp, Homo sapiens
atcagagctctctat

SEQ ID NO: 748613 - DNA, 15 bp, Homo sapiens
tcagagctctctatt

SEQ ID NO: 748614 - DNA, 15 bp, Homo sapiens
cagagctctctattc

SEQ ID NO: 748615 - DNA, 15 bp, Homo sapiens
agagctctctattca

SEQ ID NO: 748616 - DNA, 15 bp, Homo sapiens
gagctctctattcac

SEQ ID NO: 748617 - DNA, 15 bp, Homo sapiens
agctctctattcact

SEQ ID NO: 748618 - DNA, 15 bp, Homo sapiens
gctctctattcactt

SEQ ID NO: 748619 - DNA, 15 bp, Homo sapiens
ctctctattcacttg

SEQ ID NO: 748620 - DNA, 15 bp, Homo sapiens
tctctattcacttgg

SEQ ID NO: 748621 - DNA, 15 bp, Homo sapiens
ctctattcacttggg

SEQ ID NO: 748622 - DNA, 15 bp, Homo sapiens
tctattcacttgggt

SEQ ID NO: 748623 - DNA, 15 bp, Homo sapiens
ctattcacttgggtg

SEQ ID NO: 748624 - DNA, 15 bp, Homo sapiens
tattcacttgggtgt

SEQ ID NO: 748625 - DNA, 15 bp, Homo sapiens
attcacttgggtgtg

SEQ ID NO: 748626 - DNA, 15 bp, Homo sapiens
ttcacttgggtgtga

SEQ ID NO: 748627 - DNA, 15 bp, Homo sapiens
tcacttgggtgtgac

SEQ ID NO: 748628 - DNA, 15 bp, Homo sapiens
cacttgggtgtgacg

SEQ ID NO: 748629 - DNA, 15 bp, Homo sapiens
acttgggtgtgacgt

SEQ ID NO: 748630 - DNA, 15 bp, Homo sapiens
cttgggtgtgacgtt

SEQ ID NO: 748631 - DNA, 15 bp, Homo sapiens
ttgggtgtgacgttg

SEQ ID NO: 748632 - DNA, 15 bp, Homo sapiens
tgggtgtgacgttgt

SEQ ID NO: 748633 - DNA, 15 bp, Homo sapiens
gggtgtgacgttgtg

SEQ ID NO: 748634 - DNA, 15 bp, Homo sapiens
ggtgtgacgttgtga

SEQ ID NO: 748635 - DNA, 15 bp, Homo sapiens
gtgtgacgttgtgaa

SEQ ID NO: 748636 - DNA, 15 bp, Homo sapiens
tgtgacgttgtgaag

SEQ ID NO: 748637 - DNA, 15 bp, Homo sapiens
gtgacgttgtgaagt

SEQ ID NO: 748638 - DNA, 15 bp, Homo sapiens
tgacgttgtgaagtt

SEQ ID NO: 748639 - DNA, 15 bp, Homo sapiens
gacgttgtgaagttc

SEQ ID NO: 748640 - DNA, 15 bp, Homo sapiens
acgttgtgaagttca

SEQ ID NO: 748641 - DNA, 15 bp, Homo sapiens
cgttgtgaagttcaa

SEQ ID NO: 748642 - DNA, 15 bp, Homo sapiens
gttgtgaagttcaat

SEQ ID NO: 748643 - DNA, 15 bp, Homo sapiens
ttgtgaagttcaatc

SEQ ID NO: 748644 - DNA, 15 bp, Homo sapiens
tgtgaagttcaatcc

SEQ ID NO: 748645 - DNA, 15 bp, Homo sapiens
gtgaagttcaatcct

SEQ ID NO: 748646 - DNA, 15 bp, Homo sapiens
tgaagttcaatcctg

SEQ ID NO: 748647 - DNA, 15 bp, Homo sapiens
gaagttcaatcctgt

SEQ ID NO: 748648 - DNA, 15 bp, Homo sapiens
aagttcaatcctgtc

SEQ ID NO: 748649 - DNA, 15 bp, Homo sapiens
agttcaatcctgtca

SEQ ID NO: 748650 - DNA, 15 bp, Homo sapiens
gttcaatcctgtcat

SEQ ID NO: 748651 - DNA, 15 bp, Homo sapiens
ttcaatcctgtcata

SEQ ID NO: 748652 - DNA, 15 bp, Homo sapiens
tcaatcctgtcatag

SEQ ID NO: 748653 - DNA, 15 bp, Homo sapiens
caatcctgtcataga

SEQ ID NO: 748654 - DNA, 15 bp, Homo sapiens
aatcctgtcatagac

SEQ ID NO: 748655 - DNA, 15 bp, Homo sapiens
atcctgtcatagact

SEQ ID NO: 748656 - DNA, 15 bp, Homo sapiens
tcctgtcatagacta

SEQ ID NO: 748657 - DNA, 15 bp, Homo sapiens
cctgtcatagactat

SEQ ID NO: 748658 - DNA, 15 bp, Homo sapiens
ctgtcatagactata

SEQ ID NO: 748659 - DNA, 15 bp, Homo sapiens
tgtcatagactatat

SEQ ID NO: 748660 - DNA, 15 bp, Homo sapiens
gtcatagactatatt

SEQ ID NO: 748661 - DNA, 15 bp, Homo sapiens
tcatagactatattg

SEQ ID NO: 748662 - DNA, 15 bp, Homo sapiens
catagactatattga

SEQ ID NO: 748663 - DNA, 15 bp, Homo sapiens
atagactatattgaa

SEQ ID NO: 748664 - DNA, 15 bp, Homo sapiens
tagactatattgaat

SEQ ID NO: 748665 - DNA, 15 bp, Homo sapiens
agactatattgaata

SEQ ID NO: 748666 - DNA, 15 bp, Homo sapiens
gactatattgaatag

SEQ ID NO: 748667 - DNA, 15 bp, Homo sapiens
actatattgaatagg

SEQ ID NO: 748668 - DNA, 15 bp, Homo sapiens
ctatattgaataggg

SEQ ID NO: 748669 - DNA, 15 bp, Homo sapiens
tatattgaataggga

SEQ ID NO: 748670 - DNA, 15 bp, Homo sapiens
atattgaatagggag

SEQ ID NO: 748671 - DNA, 15 bp, Homo sapiens
tattgaatagggagc

SEQ ID NO: 748672 - DNA, 15 bp, Homo sapiens
attgaatagggagct

SEQ ID NO: 748673 - DNA, 15 bp, Homo sapiens
ttgaatagggagctg

SEQ ID NO: 748674 - DNA, 15 bp, Homo sapiens
tgaatagggagctgc

SEQ ID NO: 748675 - DNA, 15 bp, Homo sapiens
gaatagggagctgct

SEQ ID NO: 748676 - DNA, 15 bp, Homo sapiens
aatagggagctgctc

SEQ ID NO: 748677 - DNA, 15 bp, Homo sapiens
atagggagctgctct

SEQ ID NO: 748678 - DNA, 15 bp, Homo sapiens
tagggagctgctctg

SEQ ID NO: 748679 - DNA, 15 bp, Homo sapiens
agggagctgctctgg

SEQ ID NO: 748680 - DNA, 15 bp, Homo sapiens
gggagctgctctggt

SEQ ID NO: 748681 - DNA, 15 bp, Homo sapiens
ggagctgctctggta

SEQ ID NO: 748682 - DNA, 15 bp, Homo sapiens
gagctgctctggtag

SEQ ID NO: 748683 - DNA, 15 bp, Homo sapiens
agctgctctggtagc

SEQ ID NO: 748684 - DNA, 15 bp, Homo sapiens
gctgctctggtagcc

SEQ ID NO: 748685 - DNA, 15 bp, Homo sapiens
ctgctctggtagcct

SEQ ID NO: 748686 - DNA, 15 bp, Homo sapiens
tgctctggtagcctg

SEQ ID NO: 748687 - DNA, 15 bp, Homo sapiens
gctctggtagcctga

SEQ ID NO: 748688 - DNA, 15 bp, Homo sapiens
ctctggtagcctgaa

SEQ ID NO: 748689 - DNA, 15 bp, Homo sapiens
tctggtagcctgaat

SEQ ID NO: 748690 - DNA, 15 bp, Homo sapiens
ctggtagcctgaata

SEQ ID NO: 748691 - DNA, 15 bp, Homo sapiens
tggtagcctgaataa

SEQ ID NO: 748692 - DNA, 15 bp, Homo sapiens
ggtagcctgaataaa

SEQ ID NO: 748693 - DNA, 15 bp, Homo sapiens
gtagcctgaataaag

SEQ ID NO: 748694 - DNA, 15 bp, Homo sapiens
tagcctgaataaagc

SEQ ID NO: 748695 - DNA, 15 bp, Homo sapiens
agcctgaataaagcc

SEQ ID NO: 748696 - DNA, 15 bp, Homo sapiens
gcctgaataaagcca

SEQ ID NO: 748697 - DNA, 15 bp, Homo sapiens
cctgaataaagccat

SEQ ID NO: 748698 - DNA, 15 bp, Homo sapiens
ctgaataaagccatg

SEQ ID NO: 748699 - DNA, 15 bp, Homo sapiens
tgaataaagccatga

SEQ ID NO: 748700 - DNA, 15 bp, Homo sapiens
gaataaagccatgac

SEQ ID NO: 748701 - DNA, 15 bp, Homo sapiens
aataaagccatgact

SEQ ID NO: 748702 - DNA, 15 bp, Homo sapiens
ataaagccatgactt

SEQ ID NO: 748703 - DNA, 15 bp, Homo sapiens
taaagccatgacttt

SEQ ID NO: 748704 - DNA, 15 bp, Homo sapiens
aaagccatgactttg

SEQ ID NO: 748705 - DNA, 15 bp, Homo sapiens
aagccatgactttga

SEQ ID NO: 748706 - DNA, 15 bp, Homo sapiens
agccatgactttgaa

SEQ ID NO: 748707 - DNA, 15 bp, Homo sapiens
gccatgactttgaag

SEQ ID NO: 748708 - DNA, 15 bp, Homo sapiens
ccatgactttgaaga

SEQ ID NO: 748709 - DNA, 15 bp, Homo sapiens
catgactttgaagaa

SEQ ID NO: 748710 - DNA, 15 bp, Homo sapiens
atgactttgaagaag

SEQ ID NO: 748711 - DNA, 15 bp, Homo sapiens
tgactttgaagaagt

SEQ ID NO: 748712 - DNA, 15 bp, Homo sapiens
gactttgaagaagtt

SEQ ID NO: 748713 - DNA, 15 bp, Homo sapiens
actttgaagaagtta

SEQ ID NO: 748714 - DNA, 15 bp, Homo sapiens
ctttgaagaagttat

SEQ ID NO: 748715 - DNA, 15 bp, Homo sapiens
tttgaagaagttatt

SEQ ID NO: 748716 - DNA, 15 bp, Homo sapiens
ttgaagaagttattt

SEQ ID NO: 748717 - DNA, 15 bp, Homo sapiens
tgaagaagttattta

SEQ ID NO: 748718 - DNA, 15 bp, Homo sapiens
gaagaagttatttaa

SEQ ID NO: 748719 - DNA, 15 bp, Homo sapiens
aagaagttatttaac

SEQ ID NO: 748720 - DNA, 15 bp, Homo sapiens
agaagttatttaacc

SEQ ID NO: 748721 - DNA, 15 bp, Homo sapiens
gaagttatttaacct

SEQ ID NO: 748722 - DNA, 15 bp, Homo sapiens
aagttatttaacctc

SEQ ID NO: 748723 - DNA, 15 bp, Homo sapiens
agttatttaacctct

SEQ ID NO: 748724 - DNA, 15 bp, Homo sapiens
gttatttaacctctc

SEQ ID NO: 748725 - DNA, 15 bp, Homo sapiens
ttatttaacctctct

SEQ ID NO: 748726 - DNA, 15 bp, Homo sapiens
tatttaacctctctg

SEQ ID NO: 748727 - DNA, 15 bp, Homo sapiens
atttaacctctctgg

SEQ ID NO: 748728 - DNA, 15 bp, Homo sapiens
tttaacctctctggt

SEQ ID NO: 748729 - DNA, 15 bp, Homo sapiens
ttaacctctctggtg

SEQ ID NO: 748730 - DNA, 15 bp, Homo sapiens
taacctctctggtgt

SEQ ID NO: 748731 - DNA, 15 bp, Homo sapiens
aacctctctggtgtc

SEQ ID NO: 748732 - DNA, 15 bp, Homo sapiens
acctctctggtgtct

SEQ ID NO: 748733 - DNA, 15 bp, Homo sapiens
cctctctggtgtcta

SEQ ID NO: 748734 - DNA, 15 bp, Homo sapiens
ctctctggtgtctat

SEQ ID NO: 748735 - DNA, 15 bp, Homo sapiens
tctctggtgtctatc

SEQ ID NO: 748736 - DNA, 15 bp, Homo sapiens
ctctggtgtctatct

SEQ ID NO: 748737 - DNA, 15 bp, Homo sapiens
tctggtgtctatctt

SEQ ID NO: 748738 - DNA, 15 bp, Homo sapiens
ctggtgtctatcttt

SEQ ID NO: 748739 - DNA, 15 bp, Homo sapiens
tggtgtctatctttc

SEQ ID NO: 748740 - DNA, 15 bp, Homo sapiens
ggtgtctatctttcc

SEQ ID NO: 748741 - DNA, 15 bp, Homo sapiens
gtgtctatctttcct

SEQ ID NO: 748742 - DNA, 15 bp, Homo sapiens
tgtctatctttcctt

SEQ ID NO: 748743 - DNA, 15 bp, Homo sapiens
gtctatctttccttg

SEQ ID NO: 748744 - DNA, 15 bp, Homo sapiens
tctatctttccttgt

SEQ ID NO: 748745 - DNA, 15 bp, Homo sapiens
ctatctttccttgtg

SEQ ID NO: 748746 - DNA, 15 bp, Homo sapiens
tatctttccttgtgt

SEQ ID NO: 748747 - DNA, 15 bp, Homo sapiens
atctttccttgtgta

SEQ ID NO: 748748 - DNA, 15 bp, Homo sapiens
tctttccttgtgtat

SEQ ID NO: 748749 - DNA, 15 bp, Homo sapiens
ctttccttgtgtata

SEQ ID NO: 748750 - DNA, 15 bp, Homo sapiens
tttccttgtgtataa

SEQ ID NO: 748751 - DNA, 15 bp, Homo sapiens
ttccttgtgtataaa

SEQ ID NO: 748752 - DNA, 15 bp, Homo sapiens
tccttgtgtataaaa

SEQ ID NO: 748753 - DNA, 15 bp, Homo sapiens
ccttgtgtataaaat

SEQ ID NO: 748754 - DNA, 15 bp, Homo sapiens
cttgtgtataaaatg

SEQ ID NO: 748755 - DNA, 15 bp, Homo sapiens
ttgtgtataaaatgt

SEQ ID NO: 748756 - DNA, 15 bp, Homo sapiens
tgtgtataaaatgtg

SEQ ID NO: 748757 - DNA, 15 bp, Homo sapiens
gtgtataaaatgtgg

SEQ ID NO: 748758 - DNA, 15 bp, Homo sapiens
tgtataaaatgtggg

SEQ ID NO: 748759 - DNA, 15 bp, Homo sapiens
gtataaaatgtgggg

SEQ ID NO: 748760 - DNA, 15 bp, Homo sapiens
tataaaatgtgggga

SEQ ID NO: 748761 - DNA, 15 bp, Homo sapiens
ataaaatgtggggat

SEQ ID NO: 748762 - DNA, 15 bp, Homo sapiens
taaaatgtggggatt

SEQ ID NO: 748763 - DNA, 15 bp, Homo sapiens
aaaatgtggggattg

SEQ ID NO: 748764 - DNA, 15 bp, Homo sapiens
aaatgtggggattga

SEQ ID NO: 748765 - DNA, 15 bp, Homo sapiens
aatgtggggattgaa

SEQ ID NO: 748766 - DNA, 15 bp, Homo sapiens
atgtggggattgaat

SEQ ID NO: 748767 - DNA, 15 bp, Homo sapiens
tgtggggattgaatt

SEQ ID NO: 748768 - DNA, 15 bp, Homo sapiens
gtggggattgaattc

SEQ ID NO: 748769 - DNA, 15 bp, Homo sapiens
tggggattgaattct

SEQ ID NO: 748770 - DNA, 15 bp, Homo sapiens
ggggattgaattctg

SEQ ID NO: 748771 - DNA, 15 bp, Homo sapiens
gggattgaattctgt

SEQ ID NO: 748772 - DNA, 15 bp, Homo sapiens
ggattgaattctgtg

SEQ ID NO: 748773 - DNA, 15 bp, Homo sapiens
gattgaattctgtga

SEQ ID NO: 748774 - DNA, 15 bp, Homo sapiens
attgaattctgtgag

SEQ ID NO: 748775 - DNA, 15 bp, Homo sapiens
ttgaattctgtgagt

SEQ ID NO: 748776 - DNA, 15 bp, Homo sapiens
tgaattctgtgagtt

SEQ ID NO: 748777 - DNA, 15 bp, Homo sapiens
gaattctgtgagttc

SEQ ID NO: 748778 - DNA, 15 bp, Homo sapiens
aattctgtgagttct

SEQ ID NO: 748779 - DNA, 15 bp, Homo sapiens
attctgtgagttcta

SEQ ID NO: 748780 - DNA, 15 bp, Homo sapiens
ttctgtgagttctaa

SEQ ID NO: 748781 - DNA, 15 bp, Homo sapiens
tctgtgagttctaat

SEQ ID NO: 748782 - DNA, 15 bp, Homo sapiens
ctgtgagttctaatg

SEQ ID NO: 748783 - DNA, 15 bp, Homo sapiens
tgtgagttctaatgt

SEQ ID NO: 748784 - DNA, 15 bp, Homo sapiens
gtgagttctaatgtc

SEQ ID NO: 748785 - DNA, 15 bp, Homo sapiens
tgagttctaatgtcc

SEQ ID NO: 748786 - DNA, 15 bp, Homo sapiens
gagttctaatgtccc

SEQ ID NO: 748787 - DNA, 15 bp, Homo sapiens
agttctaatgtccct

SEQ ID NO: 748788 - DNA, 15 bp, Homo sapiens
gttctaatgtccctt

SEQ ID NO: 748789 - DNA, 15 bp, Homo sapiens
ttctaatgtcccttc

SEQ ID NO: 748790 - DNA, 15 bp, Homo sapiens
tctaatgtcccttcc

SEQ ID NO: 748791 - DNA, 15 bp, Homo sapiens
ctaatgtcccttcct

SEQ ID NO: 748792 - DNA, 15 bp, Homo sapiens
taatgtcccttcctg

SEQ ID NO: 748793 - DNA, 15 bp, Homo sapiens
aatgtcccttcctgc

SEQ ID NO: 748794 - DNA, 15 bp, Homo sapiens
atgtcccttcctgct

SEQ ID NO: 748795 - DNA, 15 bp, Homo sapiens
tgtcccttcctgctc

SEQ ID NO: 748796 - DNA, 15 bp, Homo sapiens
gtcccttcctgctct

SEQ ID NO: 748797 - DNA, 15 bp, Homo sapiens
tcccttcctgctctg

SEQ ID NO: 748798 - DNA, 15 bp, Homo sapiens
cccttcctgctctgt

SEQ ID NO: 748799 - DNA, 15 bp, Homo sapiens
ccttcctgctctgtg

SEQ ID NO: 748800 - DNA, 15 bp, Homo sapiens
cttcctgctctgtga

SEQ ID NO: 748801 - DNA, 15 bp, Homo sapiens
ttcctgctctgtgat

SEQ ID NO: 748802 - DNA, 15 bp, Homo sapiens
tcctgctctgtgatt

SEQ ID NO: 748803 - DNA, 15 bp, Homo sapiens
cctgctctgtgattc

SEQ ID NO: 748804 - DNA, 15 bp, Homo sapiens
ctgctctgtgattcg

SEQ ID NO: 748805 - DNA, 15 bp, Homo sapiens
tgctctgtgattcga

SEQ ID NO: 748806 - DNA, 15 bp, Homo sapiens
gctctgtgattcgat

SEQ ID NO: 748807 - DNA, 15 bp, Homo sapiens
ctctgtgattcgata

SEQ ID NO: 748808 - DNA, 15 bp, Homo sapiens
tctgtgattcgatat

SEQ ID NO: 748809 - DNA, 15 bp, Homo sapiens
ctgtgattcgatata

SEQ ID NO: 748810 - DNA, 15 bp, Homo sapiens
tgtgattcgatatag

SEQ ID NO: 748811 - DNA, 15 bp, Homo sapiens
gtgattcgatatagg

SEQ ID NO: 748812 - DNA, 15 bp, Homo sapiens
tgattcgatatagga

SEQ ID NO: 748813 - DNA, 15 bp, Homo sapiens
gattcgatataggag

SEQ ID NO: 748814 - DNA, 15 bp, Homo sapiens
attcgatataggaga

SEQ ID NO: 748815 - DNA, 15 bp, Homo sapiens
ttcgatataggagag

SEQ ID NO: 748816 - DNA, 15 bp, Homo sapiens
tcgatataggagaga

SEQ ID NO: 748817 - DNA, 15 bp, Homo sapiens
cgatataggagagag

SEQ ID NO: 748818 - DNA, 15 bp, Homo sapiens
gatataggagagagg

SEQ ID NO: 748819 - DNA, 15 bp, Homo sapiens
atataggagagaggg

SEQ ID NO: 748820 - DNA, 15 bp, Homo sapiens
tataggagagaggga

SEQ ID NO: 748821 - DNA, 15 bp, Homo sapiens
ataggagagagggag

SEQ ID NO: 748822 - DNA, 15 bp, Homo sapiens
taggagagagggagg

SEQ ID NO: 748823 - DNA, 15 bp, Homo sapiens
aggagagagggagga

SEQ ID NO: 748824 - DNA, 15 bp, Homo sapiens
ggagagagggaggag

SEQ ID NO: 748825 - DNA, 15 bp, Homo sapiens
gagagagggaggagt

SEQ ID NO: 748826 - DNA, 15 bp, Homo sapiens
agagagggaggagtt

SEQ ID NO: 748827 - DNA, 15 bp, Homo sapiens
gagagggaggagttg

SEQ ID NO: 748828 - DNA, 15 bp, Homo sapiens
agagggaggagttga

SEQ ID NO: 748829 - DNA, 15 bp, Homo sapiens
gagggaggagttgag

SEQ ID NO: 748830 - DNA, 15 bp, Homo sapiens
agggaggagttgagg

SEQ ID NO: 748831 - DNA, 15 bp, Homo sapiens
gggaggagttgagga

SEQ ID NO: 748832 - DNA, 15 bp, Homo sapiens
ggaggagttgaggaa

SEQ ID NO: 748833 - DNA, 15 bp, Homo sapiens
gaggagttgaggaat

SEQ ID NO: 748834 - DNA, 15 bp, Homo sapiens
aggagttgaggaatg

SEQ ID NO: 748835 - DNA, 15 bp, Homo sapiens
ggagttgaggaatga

SEQ ID NO: 748836 - DNA, 15 bp, Homo sapiens
gagttgaggaatgag

SEQ ID NO: 748837 - DNA, 15 bp, Homo sapiens
agttgaggaatgagg

SEQ ID NO: 748838 - DNA, 15 bp, Homo sapiens
gttgaggaatgaggg

SEQ ID NO: 748839 - DNA, 15 bp, Homo sapiens
ttgaggaatgagggt

SEQ ID NO: 748840 - DNA, 15 bp, Homo sapiens
tgaggaatgagggtt

SEQ ID NO: 748841 - DNA, 15 bp, Homo sapiens
gaggaatgagggtta

SEQ ID NO: 748842 - DNA, 15 bp, Homo sapiens
aggaatgagggttaa

SEQ ID NO: 748843 - DNA, 15 bp, Homo sapiens
ggaatgagggttaaa

SEQ ID NO: 748844 - DNA, 15 bp, Homo sapiens
gaatgagggttaaag

SEQ ID NO: 748845 - DNA, 15 bp, Homo sapiens
aatgagggttaaagt

SEQ ID NO: 748846 - DNA, 15 bp, Homo sapiens
atgagggttaaagtt

SEQ ID NO: 748847 - DNA, 15 bp, Homo sapiens
tgagggttaaagttt

SEQ ID NO: 748848 - DNA, 15 bp, Homo sapiens
gagggttaaagtttc

SEQ ID NO: 748849 - DNA, 15 bp, Homo sapiens
agggttaaagtttct

SEQ ID NO: 748850 - DNA, 15 bp, Homo sapiens
gggttaaagtttcta

SEQ ID NO: 748851 - DNA, 15 bp, Homo sapiens
ggttaaagtttctag

SEQ ID NO: 748852 - DNA, 15 bp, Homo sapiens
gttaaagtttctagc

SEQ ID NO: 748853 - DNA, 15 bp, Homo sapiens
ttaaagtttctagct

SEQ ID NO: 748854 - DNA, 15 bp, Homo sapiens
taaagtttctagctc

SEQ ID NO: 748855 - DNA, 15 bp, Homo sapiens
aaagtttctagctca

SEQ ID NO: 748856 - DNA, 15 bp, Homo sapiens
aagtttctagctcag

SEQ ID NO: 748857 - DNA, 15 bp, Homo sapiens
agtttctagctcaga

SEQ ID NO: 748858 - DNA, 15 bp, Homo sapiens
gtttctagctcagaa

SEQ ID NO: 748859 - DNA, 15 bp, Homo sapiens
tttctagctcagaat

SEQ ID NO: 748860 - DNA, 15 bp, Homo sapiens
ttctagctcagaatg

SEQ ID NO: 748861 - DNA, 15 bp, Homo sapiens
tctagctcagaatgt

SEQ ID NO: 748862 - DNA, 15 bp, Homo sapiens
ctagctcagaatgtg

SEQ ID NO: 748863 - DNA, 15 bp, Homo sapiens
tagctcagaatgtgt

SEQ ID NO: 748864 - DNA, 15 bp, Homo sapiens
agctcagaatgtgtt

SEQ ID NO: 748865 - DNA, 15 bp, Homo sapiens
gctcagaatgtgttt

SEQ ID NO: 748866 - DNA, 15 bp, Homo sapiens
ctcagaatgtgtttt

SEQ ID NO: 748867 - DNA, 15 bp, Homo sapiens
tcagaatgtgttttg

SEQ ID NO: 748868 - DNA, 15 bp, Homo sapiens
cagaatgtgttttgc

SEQ ID NO: 748869 - DNA, 15 bp, Homo sapiens
agaatgtgttttgca

SEQ ID NO: 748870 - DNA, 15 bp, Homo sapiens
gaatgtgttttgcag

SEQ ID NO: 748871 - DNA, 15 bp, Homo sapiens
aatgtgttttgcagt

SEQ ID NO: 748872 - DNA, 15 bp, Homo sapiens
atgtgttttgcagtt

SEQ ID NO: 748873 - DNA, 15 bp, Homo sapiens
tgtgttttgcagttc

SEQ ID NO: 748874 - DNA, 15 bp, Homo sapiens
gtgttttgcagttcc

SEQ ID NO: 748875 - DNA, 15 bp, Homo sapiens
tgttttgcagttccc

SEQ ID NO: 748876 - DNA, 15 bp, Homo sapiens
gttttgcagttccct

SEQ ID NO: 748877 - DNA, 15 bp, Homo sapiens
ttttgcagttcccta

SEQ ID NO: 748878 - DNA, 15 bp, Homo sapiens
tttgcagttccctag

SEQ ID NO: 748879 - DNA, 15 bp, Homo sapiens
ttgcagttccctagc

SEQ ID NO: 748880 - DNA, 15 bp, Homo sapiens
tgcagttccctagca

SEQ ID NO: 748881 - DNA, 15 bp, Homo sapiens
gcagttccctagcaa

SEQ ID NO: 748882 - DNA, 15 bp, Homo sapiens
cagttccctagcaat

SEQ ID NO: 748883 - DNA, 15 bp, Homo sapiens
agttccctagcaatt

SEQ ID NO: 748884 - DNA, 15 bp, Homo sapiens
gttccctagcaattc

SEQ ID NO: 748885 - DNA, 15 bp, Homo sapiens
ttccctagcaattcc

SEQ ID NO: 748886 - DNA, 15 bp, Homo sapiens
tccctagcaattcct

SEQ ID NO: 748887 - DNA, 15 bp, Homo sapiens
ccctagcaattcctt

SEQ ID NO: 748888 - DNA, 15 bp, Homo sapiens
cctagcaattccttt

SEQ ID NO: 748889 - DNA, 15 bp, Homo sapiens
ctagcaattccttta

SEQ ID NO: 748890 - DNA, 15 bp, Homo sapiens
tagcaattcctttag

SEQ ID NO: 748891 - DNA, 15 bp, Homo sapiens
agcaattcctttagg

SEQ ID NO: 748892 - DNA, 15 bp, Homo sapiens
gcaattcctttagga

SEQ ID NO: 748893 - DNA, 15 bp, Homo sapiens
caattcctttaggaa

SEQ ID NO: 748894 - DNA, 15 bp, Homo sapiens
aattcctttaggaat

SEQ ID NO: 748895 - DNA, 15 bp, Homo sapiens
attcctttaggaatt

SEQ ID NO: 748896 - DNA, 15 bp, Homo sapiens
ttcctttaggaattc

SEQ ID NO: 748897 - DNA, 15 bp, Homo sapiens
tcctttaggaattca

SEQ ID NO: 748898 - DNA, 15 bp, Homo sapiens
cctttaggaattcag

SEQ ID NO: 748899 - DNA, 15 bp, Homo sapiens
ctttaggaattcagc

SEQ ID NO: 748900 - DNA, 15 bp, Homo sapiens
tttaggaattcagcc

SEQ ID NO: 748901 - DNA, 15 bp, Homo sapiens
ttaggaattcagcct

SEQ ID NO: 748902 - DNA, 15 bp, Homo sapiens
taggaattcagcctt

SEQ ID NO: 748903 - DNA, 15 bp, Homo sapiens
aggaattcagccttg

SEQ ID NO: 748904 - DNA, 15 bp, Homo sapiens
ggaattcagccttgg

SEQ ID NO: 748905 - DNA, 15 bp, Homo sapiens
gaattcagccttggg

SEQ ID NO: 748906 - DNA, 15 bp, Homo sapiens
aattcagccttggga

SEQ ID NO: 748907 - DNA, 15 bp, Homo sapiens
attcagccttgggac

SEQ ID NO: 748908 - DNA, 15 bp, Homo sapiens
ttcagccttgggaca

SEQ ID NO: 748909 - DNA, 15 bp, Homo sapiens
tcagccttgggacag

SEQ ID NO: 748910 - DNA, 15 bp, Homo sapiens
cagccttgggacagt

SEQ ID NO: 748911 - DNA, 15 bp, Homo sapiens
agccttgggacagtt

SEQ ID NO: 748912 - DNA, 15 bp, Homo sapiens
gccttgggacagtta

SEQ ID NO: 748913 - DNA, 15 bp, Homo sapiens
ccttgggacagttac

SEQ ID NO: 748914 - DNA, 15 bp, Homo sapiens
cttgggacagttaca

SEQ ID NO: 748915 - DNA, 15 bp, Homo sapiens
ttgggacagttacat

SEQ ID NO: 748916 - DNA, 15 bp, Homo sapiens
tgggacagttacata

SEQ ID NO: 748917 - DNA, 15 bp, Homo sapiens
gggacagttacatat

SEQ ID NO: 748918 - DNA, 15 bp, Homo sapiens
ggacagttacatatc

SEQ ID NO: 748919 - DNA, 15 bp, Homo sapiens
gacagttacatatct

SEQ ID NO: 748920 - DNA, 15 bp, Homo sapiens
acagttacatatctt

SEQ ID NO: 748921 - DNA, 15 bp, Homo sapiens
cagttacatatcttt

SEQ ID NO: 748922 - DNA, 15 bp, Homo sapiens
agttacatatcttta

SEQ ID NO: 748923 - DNA, 15 bp, Homo sapiens
gttacatatctttat

SEQ ID NO: 748924 - DNA, 15 bp, Homo sapiens
ttacatatctttatt

SEQ ID NO: 748925 - DNA, 15 bp, Homo sapiens
tacatatctttattt

SEQ ID NO: 748926 - DNA, 15 bp, Homo sapiens
acatatctttatttc

SEQ ID NO: 748927 - DNA, 15 bp, Homo sapiens
catatctttatttcc

SEQ ID NO: 748928 - DNA, 15 bp, Homo sapiens
atatctttatttcca

SEQ ID NO: 748929 - DNA, 15 bp, Homo sapiens
tatctttatttccat

SEQ ID NO: 748930 - DNA, 15 bp, Homo sapiens
atctttatttccatc

SEQ ID NO: 748931 - DNA, 15 bp, Homo sapiens
tctttatttccatct

SEQ ID NO: 748932 - DNA, 15 bp, Homo sapiens
ctttatttccatctt

SEQ ID NO: 748933 - DNA, 15 bp, Homo sapiens
tttatttccatcttc

SEQ ID NO: 748934 - DNA, 15 bp, Homo sapiens
ttatttccatcttct

SEQ ID NO: 748935 - DNA, 15 bp, Homo sapiens
tatttccatcttctg

SEQ ID NO: 748936 - DNA, 15 bp, Homo sapiens
atttccatcttctgc

SEQ ID NO: 748937 - DNA, 15 bp, Homo sapiens
tttccatcttctgct

SEQ ID NO: 748938 - DNA, 15 bp, Homo sapiens
ttccatcttctgctc

SEQ ID NO: 748939 - DNA, 15 bp, Homo sapiens
tccatcttctgctcg

SEQ ID NO: 748940 - DNA, 15 bp, Homo sapiens
ccatcttctgctcgt

SEQ ID NO: 748941 - DNA, 15 bp, Homo sapiens
catcttctgctcgtc

SEQ ID NO: 748942 - DNA, 15 bp, Homo sapiens
atcttctgctcgtct

SEQ ID NO: 748943 - DNA, 15 bp, Homo sapiens
tcttctgctcgtctt

SEQ ID NO: 748944 - DNA, 15 bp, Homo sapiens
cttctgctcgtcttc

SEQ ID NO: 748945 - DNA, 15 bp, Homo sapiens
ttctgctcgtcttcc

SEQ ID NO: 748946 - DNA, 15 bp, Homo sapiens
tctgctcgtcttcca

SEQ ID NO: 748947 - DNA, 15 bp, Homo sapiens
ctgctcgtcttccag

SEQ ID NO: 748948 - DNA, 15 bp, Homo sapiens
tgctcgtcttccagc

SEQ ID NO: 748949 - DNA, 15 bp, Homo sapiens
gctcgtcttccagca

SEQ ID NO: 748950 - DNA, 15 bp, Homo sapiens
ctcgtcttccagcat

SEQ ID NO: 748951 - DNA, 15 bp, Homo sapiens
tcgtcttccagcatg

SEQ ID NO: 748952 - DNA, 15 bp, Homo sapiens
cgtcttccagcatgt

SEQ ID NO: 748953 - DNA, 15 bp, Homo sapiens
gtcttccagcatgtg

SEQ ID NO: 748954 - DNA, 15 bp, Homo sapiens
tcttccagcatgtgg

SEQ ID NO: 748955 - DNA, 15 bp, Homo sapiens
cttccagcatgtggt

SEQ ID NO: 748956 - DNA, 15 bp, Homo sapiens
ttccagcatgtggtc

SEQ ID NO: 748957 - DNA, 15 bp, Homo sapiens
tccagcatgtggtct

SEQ ID NO: 748958 - DNA, 15 bp, Homo sapiens
ccagcatgtggtcta

SEQ ID NO: 748959 - DNA, 15 bp, Homo sapiens
cagcatgtggtctac

SEQ ID NO: 748960 - DNA, 15 bp, Homo sapiens
agcatgtggtctact

SEQ ID NO: 748961 - DNA, 15 bp, Homo sapiens
gcatgtggtctactt

SEQ ID NO: 748962 - DNA, 15 bp, Homo sapiens
catgtggtctacttc

SEQ ID NO: 748963 - DNA, 15 bp, Homo sapiens
atgtggtctacttct

SEQ ID NO: 748964 - DNA, 15 bp, Homo sapiens
tgtggtctacttctc

SEQ ID NO: 748965 - DNA, 15 bp, Homo sapiens
gtggtctacttctct

SEQ ID NO: 748966 - DNA, 15 bp, Homo sapiens
tggtctacttctctt

SEQ ID NO: 748967 - DNA, 15 bp, Homo sapiens
ggtctacttctcttt

SEQ ID NO: 748968 - DNA, 15 bp, Homo sapiens
gtctacttctcttta

SEQ ID NO: 748969 - DNA, 15 bp, Homo sapiens
tctacttctctttaa

SEQ ID NO: 748970 - DNA, 15 bp, Homo sapiens
ctacttctctttaaa

SEQ ID NO: 748971 - DNA, 15 bp, Homo sapiens
tacttctctttaaat

SEQ ID NO: 748972 - DNA, 15 bp, Homo sapiens
acttctctttaaata

SEQ ID NO: 748973 - DNA, 15 bp, Homo sapiens
cttctctttaaataa

SEQ ID NO: 748974 - DNA, 15 bp, Homo sapiens
ttctctttaaataac

SEQ ID NO: 748975 - DNA, 15 bp, Homo sapiens
tctctttaaataact

SEQ ID NO: 748976 - DNA, 15 bp, Homo sapiens
ctctttaaataactg

SEQ ID NO: 748977 - DNA, 15 bp, Homo sapiens
tctttaaataactgg

SEQ ID NO: 748978 - DNA, 15 bp, Homo sapiens
ctttaaataactggg

SEQ ID NO: 748979 - DNA, 15 bp, Homo sapiens
tttaaataactgggg

SEQ ID NO: 748980 - DNA, 15 bp, Homo sapiens
ttaaataactgggga

SEQ ID NO: 748981 - DNA, 15 bp, Homo sapiens
taaataactggggaa

SEQ ID NO: 748982 - DNA, 15 bp, Homo sapiens
aaataactggggaaa

SEQ ID NO: 748983 - DNA, 15 bp, Homo sapiens
aataactggggaaac

SEQ ID NO: 748984 - DNA, 15 bp, Homo sapiens
ataactggggaaact

SEQ ID NO: 748985 - DNA, 15 bp, Homo sapiens
taactggggaaactg

SEQ ID NO: 748986 - DNA, 15 bp, Homo sapiens
aactggggaaactga

SEQ ID NO: 748987 - DNA, 15 bp, Homo sapiens
actggggaaactgag

SEQ ID NO: 748988 - DNA, 15 bp, Homo sapiens
ctggggaaactgagg

SEQ ID NO: 748989 - DNA, 15 bp, Homo sapiens
tggggaaactgaggc

SEQ ID NO: 748990 - DNA, 15 bp, Homo sapiens
ggggaaactgaggcc

SEQ ID NO: 748991 - DNA, 15 bp, Homo sapiens
gggaaactgaggcca

SEQ ID NO: 748992 - DNA, 15 bp, Homo sapiens
ggaaactgaggccaa

SEQ ID NO: 748993 - DNA, 15 bp, Homo sapiens
gaaactgaggccaac

SEQ ID NO: 748994 - DNA, 15 bp, Homo sapiens
aaactgaggccaact

SEQ ID NO: 748995 - DNA, 15 bp, Homo sapiens
aactgaggccaactt

SEQ ID NO: 748996 - DNA, 15 bp, Homo sapiens
actgaggccaacttc

SEQ ID NO: 748997 - DNA, 15 bp, Homo sapiens
ctgaggccaacttcc

SEQ ID NO: 748998 - DNA, 15 bp, Homo sapiens
tgaggccaacttcct

SEQ ID NO: 748999 - DNA, 15 bp, Homo sapiens
gaggccaacttcctg

SEQ ID NO: 749000 - DNA, 15 bp, Homo sapiens
aggccaacttcctgt

SEQ ID NO: 749001 - DNA, 15 bp, Homo sapiens
ggccaacttcctgtt

SEQ ID NO: 749002 - DNA, 15 bp, Homo sapiens
gccaacttcctgttg

SEQ ID NO: 749003 - DNA, 15 bp, Homo sapiens
ccaacttcctgttgg

SEQ ID NO: 749004 - DNA, 15 bp, Homo sapiens
caacttcctgttgga

SEQ ID NO: 749005 - DNA, 15 bp, Homo sapiens
aacttcctgttggag

SEQ ID NO: 749006 - DNA, 15 bp, Homo sapiens
acttcctgttggagc

SEQ ID NO: 749007 - DNA, 15 bp, Homo sapiens
cttcctgttggagct

SEQ ID NO: 749008 - DNA, 15 bp, Homo sapiens
ttcctgttggagctg

SEQ ID NO: 749009 - DNA, 15 bp, Homo sapiens
tcctgttggagctgt

SEQ ID NO: 749010 - DNA, 15 bp, Homo sapiens
cctgttggagctgtg

SEQ ID NO: 749011 - DNA, 15 bp, Homo sapiens
ctgttggagctgtgg

SEQ ID NO: 749012 - DNA, 15 bp, Homo sapiens
tgttggagctgtggt

SEQ ID NO: 749013 - DNA, 15 bp, Homo sapiens
gttggagctgtggtt

SEQ ID NO: 749014 - DNA, 15 bp, Homo sapiens
ttggagctgtggttt

SEQ ID NO: 749015 - DNA, 15 bp, Homo sapiens
tggagctgtggtttg

SEQ ID NO: 749016 - DNA, 15 bp, Homo sapiens
ggagctgtggtttgt

SEQ ID NO: 749017 - DNA, 15 bp, Homo sapiens
gagctgtggtttgtt

SEQ ID NO: 749018 - DNA, 15 bp, Homo sapiens
agctgtggtttgttg

SEQ ID NO: 749019 - DNA, 15 bp, Homo sapiens
gctgtggtttgttga

SEQ ID NO: 749020 - DNA, 15 bp, Homo sapiens
ctgtggtttgttgag

SEQ ID NO: 749021 - DNA, 15 bp, Homo sapiens
tgtggtttgttgagg

SEQ ID NO: 749022 - DNA, 15 bp, Homo sapiens
gtggtttgttgaggg

SEQ ID NO: 749023 - DNA, 15 bp, Homo sapiens
tggtttgttgagggg

SEQ ID NO: 749024 - DNA, 15 bp, Homo sapiens
ggtttgttgaggggc

SEQ ID NO: 749025 - DNA, 15 bp, Homo sapiens
gtttgttgaggggcc

SEQ ID NO: 749026 - DNA, 15 bp, Homo sapiens
tttgttgaggggcct

SEQ ID NO: 749027 - DNA, 15 bp, Homo sapiens
ttgttgaggggcctg

SEQ ID NO: 749028 - DNA, 15 bp, Homo sapiens
tgttgaggggcctga

SEQ ID NO: 749029 - DNA, 15 bp, Homo sapiens
gttgaggggcctgag

SEQ ID NO: 749030 - DNA, 15 bp, Homo sapiens
ttgaggggcctgagt

SEQ ID NO: 749031 - DNA, 15 bp, Homo sapiens
tgaggggcctgagtg

SEQ ID NO: 749032 - DNA, 15 bp, Homo sapiens
gaggggcctgagtgt

SEQ ID NO: 749033 - DNA, 15 bp, Homo sapiens
aggggcctgagtgtg

SEQ ID NO: 749034 - DNA, 15 bp, Homo sapiens
ggggcctgagtgtgg

SEQ ID NO: 749035 - DNA, 15 bp, Homo sapiens
gggcctgagtgtggc

SEQ ID NO: 749036 - DNA, 15 bp, Homo sapiens
ggcctgagtgtggct

SEQ ID NO: 749037 - DNA, 15 bp, Homo sapiens
gcctgagtgtggctg

SEQ ID NO: 749038 - DNA, 15 bp, Homo sapiens
cctgagtgtggctgg

SEQ ID NO: 749039 - DNA, 15 bp, Homo sapiens
ctgagtgtggctggg

SEQ ID NO: 749040 - DNA, 15 bp, Homo sapiens
tgagtgtggctgggc

SEQ ID NO: 749041 - DNA, 15 bp, Homo sapiens
gagtgtggctgggca

SEQ ID NO: 749042 - DNA, 15 bp, Homo sapiens
agtgtggctgggcat

SEQ ID NO: 749043 - DNA, 15 bp, Homo sapiens
gtgtggctgggcata

SEQ ID NO: 749044 - DNA, 15 bp, Homo sapiens
tgtggctgggcatag

SEQ ID NO: 749045 - DNA, 15 bp, Homo sapiens
gtggctgggcataga

SEQ ID NO: 749046 - DNA, 15 bp, Homo sapiens
tggctgggcatagag

SEQ ID NO: 749047 - DNA, 15 bp, Homo sapiens
ggctgggcatagagt

SEQ ID NO: 749048 - DNA, 15 bp, Homo sapiens
gctgggcatagagtt

SEQ ID NO: 749049 - DNA, 15 bp, Homo sapiens
ctgggcatagagtta

SEQ ID NO: 749050 - DNA, 15 bp, Homo sapiens
tgggcatagagttat

SEQ ID NO: 749051 - DNA, 15 bp, Homo sapiens
gggcatagagttatt

SEQ ID NO: 749052 - DNA, 15 bp, Homo sapiens
ggcatagagttattt

SEQ ID NO: 749053 - DNA, 15 bp, Homo sapiens
gcatagagttatttc

SEQ ID NO: 749054 - DNA, 15 bp, Homo sapiens
catagagttatttcc

SEQ ID NO: 749055 - DNA, 15 bp, Homo sapiens
atagagttatttcca

SEQ ID NO: 749056 - DNA, 15 bp, Homo sapiens
tagagttatttccat

SEQ ID NO: 749057 - DNA, 15 bp, Homo sapiens
agagttatttccatt

SEQ ID NO: 749058 - DNA, 15 bp, Homo sapiens
gagttatttccattc

SEQ ID NO: 749059 - DNA, 15 bp, Homo sapiens
agttatttccattct

SEQ ID NO: 749060 - DNA, 15 bp, Homo sapiens
gttatttccattctc

SEQ ID NO: 749061 - DNA, 15 bp, Homo sapiens
ttatttccattctca

SEQ ID NO: 749062 - DNA, 15 bp, Homo sapiens
tatttccattctcag

SEQ ID NO: 749063 - DNA, 15 bp, Homo sapiens
atttccattctcagt

SEQ ID NO: 749064 - DNA, 15 bp, Homo sapiens
tttccattctcagtt

SEQ ID NO: 749065 - DNA, 15 bp, Homo sapiens
ttccattctcagttt

SEQ ID NO: 749066 - DNA, 15 bp, Homo sapiens
tccattctcagtttg

SEQ ID NO: 749067 - DNA, 15 bp, Homo sapiens
ccattctcagtttga

SEQ ID NO: 749068 - DNA, 15 bp, Homo sapiens
cattctcagtttgag

SEQ ID NO: 749069 - DNA, 15 bp, Homo sapiens
attctcagtttgagc

SEQ ID NO: 749070 - DNA, 15 bp, Homo sapiens
ttctcagtttgagct

SEQ ID NO: 749071 - DNA, 15 bp, Homo sapiens
tctcagtttgagctg

SEQ ID NO: 749072 - DNA, 15 bp, Homo sapiens
ctcagtttgagctgt

SEQ ID NO: 749073 - DNA, 15 bp, Homo sapiens
tcagtttgagctgtt

SEQ ID NO: 749074 - DNA, 15 bp, Homo sapiens
cagtttgagctgttg

SEQ ID NO: 749075 - DNA, 15 bp, Homo sapiens
agtttgagctgttgg

SEQ ID NO: 749076 - DNA, 15 bp, Homo sapiens
gtttgagctgttggc

SEQ ID NO: 749077 - DNA, 15 bp, Homo sapiens
tttgagctgttggcc

SEQ ID NO: 749078 - DNA, 15 bp, Homo sapiens
ttgagctgttggcct

SEQ ID NO: 749079 - DNA, 15 bp, Homo sapiens
tgagctgttggcctt

SEQ ID NO: 749080 - DNA, 15 bp, Homo sapiens
gagctgttggccttg

SEQ ID NO: 749081 - DNA, 15 bp, Homo sapiens
agctgttggccttgt

SEQ ID NO: 749082 - DNA, 15 bp, Homo sapiens
gctgttggccttgta

SEQ ID NO: 749083 - DNA, 15 bp, Homo sapiens
ctgttggccttgtag

SEQ ID NO: 749084 - DNA, 15 bp, Homo sapiens
tgttggccttgtaga

SEQ ID NO: 749085 - DNA, 15 bp, Homo sapiens
gttggccttgtagaa

SEQ ID NO: 749086 - DNA, 15 bp, Homo sapiens
ttggccttgtagaag

SEQ ID NO: 749087 - DNA, 15 bp, Homo sapiens
tggccttgtagaagc

SEQ ID NO: 749088 - DNA, 15 bp, Homo sapiens
ggccttgtagaagct

SEQ ID NO: 749089 - DNA, 15 bp, Homo sapiens
gccttgtagaagctt

SEQ ID NO: 749090 - DNA, 15 bp, Homo sapiens
ccttgtagaagcttg

SEQ ID NO: 749091 - DNA, 15 bp, Homo sapiens
cttgtagaagcttgg

SEQ ID NO: 749092 - DNA, 15 bp, Homo sapiens
ttgtagaagcttggg

SEQ ID NO: 749093 - DNA, 15 bp, Homo sapiens
tgtagaagcttgggc

SEQ ID NO: 749094 - DNA, 15 bp, Homo sapiens
gtagaagcttgggct

SEQ ID NO: 749095 - DNA, 15 bp, Homo sapiens
tagaagcttgggctt

SEQ ID NO: 749096 - DNA, 15 bp, Homo sapiens
agaagcttgggcttg

SEQ ID NO: 749097 - DNA, 15 bp, Homo sapiens
gaagcttgggcttga

SEQ ID NO: 749098 - DNA, 15 bp, Homo sapiens
aagcttgggcttgat

SEQ ID NO: 749099 - DNA, 15 bp, Homo sapiens
agcttgggcttgatc

SEQ ID NO: 749100 - DNA, 15 bp, Homo sapiens
gcttgggcttgatca

SEQ ID NO: 749101 - DNA, 15 bp, Homo sapiens
cttgggcttgatcaa

SEQ ID NO: 749102 - DNA, 15 bp, Homo sapiens
ttgggcttgatcaag

SEQ ID NO: 749103 - DNA, 15 bp, Homo sapiens
tgggcttgatcaagg

SEQ ID NO: 749104 - DNA, 15 bp, Homo sapiens
gggcttgatcaagga

SEQ ID NO: 749105 - DNA, 15 bp, Homo sapiens
ggcttgatcaaggat

SEQ ID NO: 749106 - DNA, 15 bp, Homo sapiens
gcttgatcaaggatg

SEQ ID NO: 749107 - DNA, 15 bp, Homo sapiens
cttgatcaaggatgg

SEQ ID NO: 749108 - DNA, 15 bp, Homo sapiens
ttgatcaaggatggt

SEQ ID NO: 749109 - DNA, 15 bp, Homo sapiens
tgatcaaggatggtc

SEQ ID NO: 749110 - DNA, 15 bp, Homo sapiens
gatcaaggatggtct

SEQ ID NO: 749111 - DNA, 15 bp, Homo sapiens
atcaaggatggtctg

SEQ ID NO: 749112 - DNA, 15 bp, Homo sapiens
tcaaggatggtctgc

SEQ ID NO: 749113 - DNA, 15 bp, Homo sapiens
caaggatggtctgcg

SEQ ID NO: 749114 - DNA, 15 bp, Homo sapiens
aaggatggtctgcgt

SEQ ID NO: 749115 - DNA, 15 bp, Homo sapiens
aggatggtctgcgtg

SEQ ID NO: 749116 - DNA, 15 bp, Homo sapiens
ggatggtctgcgtgt

SEQ ID NO: 749117 - DNA, 15 bp, Homo sapiens
gatggtctgcgtgta

SEQ ID NO: 749118 - DNA, 15 bp, Homo sapiens
atggtctgcgtgtaa

SEQ ID NO: 749119 - DNA, 15 bp, Homo sapiens
tggtctgcgtgtaat

SEQ ID NO: 749120 - DNA, 15 bp, Homo sapiens
ggtctgcgtgtaatg

SEQ ID NO: 749121 - DNA, 15 bp, Homo sapiens
gtctgcgtgtaatga

SEQ ID NO: 749122 - DNA, 15 bp, Homo sapiens
tctgcgtgtaatgaa

SEQ ID NO: 749123 - DNA, 15 bp, Homo sapiens
ctgcgtgtaatgaat

SEQ ID NO: 749124 - DNA, 15 bp, Homo sapiens
tgcgtgtaatgaatt

SEQ ID NO: 749125 - DNA, 15 bp, Homo sapiens
gcgtgtaatgaatta

SEQ ID NO: 749126 - DNA, 15 bp, Homo sapiens
cgtgtaatgaattat

SEQ ID NO: 749127 - DNA, 15 bp, Homo sapiens
gtgtaatgaattatc

SEQ ID NO: 749128 - DNA, 15 bp, Homo sapiens
tgtaatgaattatcg

SEQ ID NO: 749129 - DNA, 15 bp, Homo sapiens
gtaatgaattatcga

SEQ ID NO: 749130 - DNA, 15 bp, Homo sapiens
taatgaattatcgag

SEQ ID NO: 749131 - DNA, 15 bp, Homo sapiens
aatgaattatcgaga

SEQ ID NO: 749132 - DNA, 15 bp, Homo sapiens
atgaattatcgagat

SEQ ID NO: 749133 - DNA, 15 bp, Homo sapiens
tgaattatcgagatg

SEQ ID NO: 749134 - DNA, 15 bp, Homo sapiens
gaattatcgagatgt

SEQ ID NO: 749135 - DNA, 15 bp, Homo sapiens
aattatcgagatgtt

SEQ ID NO: 749136 - DNA, 15 bp, Homo sapiens
attatcgagatgttg

SEQ ID NO: 749137 - DNA, 15 bp, Homo sapiens
ttatcgagatgttgt

SEQ ID NO: 749138 - DNA, 15 bp, Homo sapiens
tatcgagatgttgtc

SEQ ID NO: 749139 - DNA, 15 bp, Homo sapiens
atcgagatgttgtct

SEQ ID NO: 749140 - DNA, 15 bp, Homo sapiens
tcgagatgttgtctc

SEQ ID NO: 749141 - DNA, 15 bp, Homo sapiens
cgagatgttgtctcc

SEQ ID NO: 749142 - DNA, 15 bp, Homo sapiens
gagatgttgtctcca

SEQ ID NO: 749143 - DNA, 15 bp, Homo sapiens
agatgttgtctccat

SEQ ID NO: 749144 - DNA, 15 bp, Homo sapiens
gatgttgtctccatg

SEQ ID NO: 749145 - DNA, 15 bp, Homo sapiens
atgttgtctccatgg

SEQ ID NO: 749146 - DNA, 15 bp, Homo sapiens
tgttgtctccatggc

SEQ ID NO: 749147 - DNA, 15 bp, Homo sapiens
gttgtctccatggct

SEQ ID NO: 749148 - DNA, 15 bp, Homo sapiens
ttgtctccatggctg

SEQ ID NO: 749149 - DNA, 15 bp, Homo sapiens
tgtctccatggctgt

SEQ ID NO: 749150 - DNA, 15 bp, Homo sapiens
gtctccatggctgtg

SEQ ID NO: 749151 - DNA, 15 bp, Homo sapiens
tctccatggctgtgc

SEQ ID NO: 749152 - DNA, 15 bp, Homo sapiens
ctccatggctgtgcc

SEQ ID NO: 749153 - DNA, 15 bp, Homo sapiens
tccatggctgtgcct

SEQ ID NO: 749154 - DNA, 15 bp, Homo sapiens
ccatggctgtgcctg

SEQ ID NO: 749155 - DNA, 15 bp, Homo sapiens
catggctgtgcctga

SEQ ID NO: 749156 - DNA, 15 bp, Homo sapiens
atggctgtgcctgag

SEQ ID NO: 749157 - DNA, 15 bp, Homo sapiens
tggctgtgcctgaga

SEQ ID NO: 749158 - DNA, 15 bp, Homo sapiens
ggctgtgcctgagaa

SEQ ID NO: 749159 - DNA, 15 bp, Homo sapiens
gctgtgcctgagaaa

SEQ ID NO: 749160 - DNA, 15 bp, Homo sapiens
ctgtgcctgagaaaa

SEQ ID NO: 749161 - DNA, 15 bp, Homo sapiens
tgtgcctgagaaaac

SEQ ID NO: 749162 - DNA, 15 bp, Homo sapiens
gtgcctgagaaaaca

SEQ ID NO: 749163 - DNA, 15 bp, Homo sapiens
tgcctgagaaaacaa

SEQ ID NO: 749164 - DNA, 15 bp, Homo sapiens
gcctgagaaaacaac

SEQ ID NO: 749165 - DNA, 15 bp, Homo sapiens
cctgagaaaacaaca

SEQ ID NO: 749166 - DNA, 15 bp, Homo sapiens
ctgagaaaacaacac

SEQ ID NO: 749167 - DNA, 15 bp, Homo sapiens
tgagaaaacaacacg

SEQ ID NO: 749168 - DNA, 15 bp, Homo sapiens
gagaaaacaacacgt

SEQ ID NO: 749169 - DNA, 15 bp, Homo sapiens
agaaaacaacacgtt

SEQ ID NO: 749170 - DNA, 15 bp, Homo sapiens
gaaaacaacacgttt

SEQ ID NO: 749171 - DNA, 15 bp, Homo sapiens
aaaacaacacgtttt

SEQ ID NO: 749172 - DNA, 15 bp, Homo sapiens
aaacaacacgttttc

SEQ ID NO: 749173 - DNA, 15 bp, Homo sapiens
aacaacacgttttct

SEQ ID NO: 749174 - DNA, 15 bp, Homo sapiens
acaacacgttttctc

SEQ ID NO: 749175 - DNA, 15 bp, Homo sapiens
caacacgttttctct

SEQ ID NO: 749176 - DNA, 15 bp, Homo sapiens
aacacgttttctctg

SEQ ID NO: 749177 - DNA, 15 bp, Homo sapiens
acacgttttctctgt

SEQ ID NO: 749178 - DNA, 15 bp, Homo sapiens
cacgttttctctgtc

SEQ ID NO: 749179 - DNA, 15 bp, Homo sapiens
acgttttctctgtca

SEQ ID NO: 749180 - DNA, 15 bp, Homo sapiens
cgttttctctgtcag

SEQ ID NO: 749181 - DNA, 15 bp, Homo sapiens
gttttctctgtcagg

SEQ ID NO: 749182 - DNA, 15 bp, Homo sapiens
ttttctctgtcaggc

SEQ ID NO: 749183 - DNA, 15 bp, Homo sapiens
tttctctgtcaggct

SEQ ID NO: 749184 - DNA, 15 bp, Homo sapiens
ttctctgtcaggctc

SEQ ID NO: 749185 - DNA, 15 bp, Homo sapiens
tctctgtcaggctcg

SEQ ID NO: 749186 - DNA, 15 bp, Homo sapiens
ctctgtcaggctcgt

SEQ ID NO: 749187 - DNA, 15 bp, Homo sapiens
tctgtcaggctcgtg

SEQ ID NO: 749188 - DNA, 15 bp, Homo sapiens
ctgtcaggctcgtga

SEQ ID NO: 749189 - DNA, 15 bp, Homo sapiens
tgtcaggctcgtgac

SEQ ID NO: 749190 - DNA, 15 bp, Homo sapiens
gtcaggctcgtgact

SEQ ID NO: 749191 - DNA, 15 bp, Homo sapiens
tcaggctcgtgacta

SEQ ID NO: 749192 - DNA, 15 bp, Homo sapiens
caggctcgtgactaa

SEQ ID NO: 749193 - DNA, 15 bp, Homo sapiens
aggctcgtgactaat

SEQ ID NO: 749194 - DNA, 15 bp, Homo sapiens
ggctcgtgactaata

SEQ ID NO: 749195 - DNA, 15 bp, Homo sapiens
gctcgtgactaatat

SEQ ID NO: 749196 - DNA, 15 bp, Homo sapiens
ctcgtgactaatata

SEQ ID NO: 749197 - DNA, 15 bp, Homo sapiens
tcgtgactaatataa

SEQ ID NO: 749198 - DNA, 15 bp, Homo sapiens
cgtgactaatataaa

SEQ ID NO: 749199 - DNA, 15 bp, Homo sapiens
gtgactaatataaat

SEQ ID NO: 749200 - DNA, 15 bp, Homo sapiens
tgactaatataaata

SEQ ID NO: 749201 - DNA, 15 bp, Homo sapiens
gactaatataaatat

SEQ ID NO: 749202 - DNA, 15 bp, Homo sapiens
actaatataaatatc

SEQ ID NO: 749203 - DNA, 15 bp, Homo sapiens
ctaatataaatatca

SEQ ID NO: 749204 - DNA, 15 bp, Homo sapiens
taatataaatatcag

SEQ ID NO: 749205 - DNA, 15 bp, Homo sapiens
aatataaatatcaga

SEQ ID NO: 749206 - DNA, 15 bp, Homo sapiens
atataaatatcagat

SEQ ID NO: 749207 - DNA, 15 bp, Homo sapiens
tataaatatcagatc

SEQ ID NO: 749208 - DNA, 15 bp, Homo sapiens
ataaatatcagatcc

SEQ ID NO: 749209 - DNA, 15 bp, Homo sapiens
taaatatcagatccc

SEQ ID NO: 749210 - DNA, 15 bp, Homo sapiens
aaatatcagatccca

SEQ ID NO: 749211 - DNA, 15 bp, Homo sapiens
aatatcagatcccat

SEQ ID NO: 749212 - DNA, 15 bp, Homo sapiens
atatcagatcccatt

SEQ ID NO: 749213 - DNA, 15 bp, Homo sapiens
tatcagatcccatta

SEQ ID NO: 749214 - DNA, 15 bp, Homo sapiens
atcagatcccattac

SEQ ID NO: 749215 - DNA, 15 bp, Homo sapiens
tcagatcccattaca

SEQ ID NO: 749216 - DNA, 15 bp, Homo sapiens
cagatcccattacag

SEQ ID NO: 749217 - DNA, 15 bp, Homo sapiens
agatcccattacagc

SEQ ID NO: 749218 - DNA, 15 bp, Homo sapiens
gatcccattacagct

SEQ ID NO: 749219 - DNA, 15 bp, Homo sapiens
atcccattacagctt

SEQ ID NO: 749220 - DNA, 15 bp, Homo sapiens
tcccattacagcttg

SEQ ID NO: 749221 - DNA, 15 bp, Homo sapiens
cccattacagcttgg

SEQ ID NO: 749222 - DNA, 15 bp, Homo sapiens
ccattacagcttggt

SEQ ID NO: 749223 - DNA, 15 bp, Homo sapiens
cattacagcttggta

SEQ ID NO: 749224 - DNA, 15 bp, Homo sapiens
attacagcttggtaa

SEQ ID NO: 749225 - DNA, 15 bp, Homo sapiens
ttacagcttggtaat

SEQ ID NO: 749226 - DNA, 15 bp, Homo sapiens
tacagcttggtaatt

SEQ ID NO: 749227 - DNA, 15 bp, Homo sapiens
acagcttggtaatta

SEQ ID NO: 749228 - DNA, 15 bp, Homo sapiens
cagcttggtaattac

SEQ ID NO: 749229 - DNA, 15 bp, Homo sapiens
agcttggtaattacc

SEQ ID NO: 749230 - DNA, 15 bp, Homo sapiens
gcttggtaattaccc

SEQ ID NO: 749231 - DNA, 15 bp, Homo sapiens
cttggtaattaccca

SEQ ID NO: 749232 - DNA, 15 bp, Homo sapiens
ttggtaattacccag

SEQ ID NO: 749233 - DNA, 15 bp, Homo sapiens
tggtaattacccagg

SEQ ID NO: 749234 - DNA, 15 bp, Homo sapiens
ggtaattacccaggg

SEQ ID NO: 749235 - DNA, 15 bp, Homo sapiens
gtaattacccagggt

SEQ ID NO: 749236 - DNA, 15 bp, Homo sapiens
taattacccagggtc

SEQ ID NO: 749237 - DNA, 15 bp, Homo sapiens
aattacccagggtct

SEQ ID NO: 749238 - DNA, 15 bp, Homo sapiens
attacccagggtctg

SEQ ID NO: 749239 - DNA, 15 bp, Homo sapiens
ttacccagggtctgg

SEQ ID NO: 749240 - DNA, 15 bp, Homo sapiens
tacccagggtctggc

SEQ ID NO: 749241 - DNA, 15 bp, Homo sapiens
acccagggtctggcc

SEQ ID NO: 749242 - DNA, 15 bp, Homo sapiens
cccagggtctggcct

SEQ ID NO: 749243 - DNA, 15 bp, Homo sapiens
ccagggtctggcctg

SEQ ID NO: 749244 - DNA, 15 bp, Homo sapiens
cagggtctggcctga

SEQ ID NO: 749245 - DNA, 15 bp, Homo sapiens
agggtctggcctgac

SEQ ID NO: 749246 - DNA, 15 bp, Homo sapiens
gggtctggcctgacg

SEQ ID NO: 749247 - DNA, 15 bp, Homo sapiens
ggtctggcctgacgc

SEQ ID NO: 749248 - DNA, 15 bp, Homo sapiens
gtctggcctgacgca

SEQ ID NO: 749249 - DNA, 15 bp, Homo sapiens
tctggcctgacgcag

SEQ ID NO: 749250 - DNA, 15 bp, Homo sapiens
ctggcctgacgcagt

SEQ ID NO: 749251 - DNA, 15 bp, Homo sapiens
tggcctgacgcagtc

SEQ ID NO: 749252 - DNA, 15 bp, Homo sapiens
ggcctgacgcagtca

SEQ ID NO: 749253 - DNA, 15 bp, Homo sapiens
gcctgacgcagtcaa

SEQ ID NO: 749254 - DNA, 15 bp, Homo sapiens
cctgacgcagtcaat

SEQ ID NO: 749255 - DNA, 15 bp, Homo sapiens
ctgacgcagtcaatc

SEQ ID NO: 749256 - DNA, 15 bp, Homo sapiens
tgacgcagtcaatca

SEQ ID NO: 749257 - DNA, 15 bp, Homo sapiens
gacgcagtcaatcag

SEQ ID NO: 749258 - DNA, 15 bp, Homo sapiens
acgcagtcaatcagg

SEQ ID NO: 749259 - DNA, 15 bp, Homo sapiens
cgcagtcaatcaggg

SEQ ID NO: 749260 - DNA, 15 bp, Homo sapiens
gcagtcaatcagggc

SEQ ID NO: 749261 - DNA, 15 bp, Homo sapiens
cagtcaatcagggct

SEQ ID NO: 749262 - DNA, 15 bp, Homo sapiens
agtcaatcagggctg

SEQ ID NO: 749263 - DNA, 15 bp, Homo sapiens
gtcaatcagggctgg

SEQ ID NO: 749264 - DNA, 15 bp, Homo sapiens
tcaatcagggctgga

SEQ ID NO: 749265 - DNA, 15 bp, Homo sapiens
caatcagggctggag

SEQ ID NO: 749266 - DNA, 15 bp, Homo sapiens
aatcagggctggagc

SEQ ID NO: 749267 - DNA, 15 bp, Homo sapiens
atcagggctggagct

SEQ ID NO: 749268 - DNA, 15 bp, Homo sapiens
tcagggctggagctt

SEQ ID NO: 749269 - DNA, 15 bp, Homo sapiens
cagggctggagcttc

SEQ ID NO: 749270 - DNA, 15 bp, Homo sapiens
agggctggagcttca

SEQ ID NO: 749271 - DNA, 15 bp, Homo sapiens
gggctggagcttcag

SEQ ID NO: 749272 - DNA, 15 bp, Homo sapiens
ggctggagcttcagt

SEQ ID NO: 749273 - DNA, 15 bp, Homo sapiens
gctggagcttcagtg

SEQ ID NO: 749274 - DNA, 15 bp, Homo sapiens
ctggagcttcagtgc

SEQ ID NO: 749275 - DNA, 15 bp, Homo sapiens
tggagcttcagtgcc

SEQ ID NO: 749276 - DNA, 15 bp, Homo sapiens
ggagcttcagtgccg

SEQ ID NO: 749277 - DNA, 15 bp, Homo sapiens
gagcttcagtgccgt

SEQ ID NO: 749278 - DNA, 15 bp, Homo sapiens
agcttcagtgccgtg

SEQ ID NO: 749279 - DNA, 15 bp, Homo sapiens
gcttcagtgccgtgg

SEQ ID NO: 749280 - DNA, 15 bp, Homo sapiens
cttcagtgccgtgga

SEQ ID NO: 749281 - DNA, 15 bp, Homo sapiens
ttcagtgccgtggag

SEQ ID NO: 749282 - DNA, 15 bp, Homo sapiens
tcagtgccgtggagc

SEQ ID NO: 749283 - DNA, 15 bp, Homo sapiens
cagtgccgtggagct

SEQ ID NO: 749284 - DNA, 15 bp, Homo sapiens
agtgccgtggagctc

SEQ ID NO: 749285 - DNA, 15 bp, Homo sapiens
gtgccgtggagctct

SEQ ID NO: 749286 - DNA, 15 bp, Homo sapiens
tgccgtggagctctt

SEQ ID NO: 749287 - DNA, 15 bp, Homo sapiens
gccgtggagctcttg

SEQ ID NO: 749288 - DNA, 15 bp, Homo sapiens
ccgtggagctcttga

SEQ ID NO: 749289 - DNA, 15 bp, Homo sapiens
cgtggagctcttgat

SEQ ID NO: 749290 - DNA, 15 bp, Homo sapiens
gtggagctcttgatt

SEQ ID NO: 749291 - DNA, 15 bp, Homo sapiens
tggagctcttgattc

SEQ ID NO: 749292 - DNA, 15 bp, Homo sapiens
ggagctcttgattcc

SEQ ID NO: 749293 - DNA, 15 bp, Homo sapiens
gagctcttgattcca

SEQ ID NO: 749294 - DNA, 15 bp, Homo sapiens
agctcttgattccag

SEQ ID NO: 749295 - DNA, 15 bp, Homo sapiens
gctcttgattccaga

SEQ ID NO: 749296 - DNA, 15 bp, Homo sapiens
ctcttgattccagat

SEQ ID NO: 749297 - DNA, 15 bp, Homo sapiens
tcttgattccagatt

SEQ ID NO: 749298 - DNA, 15 bp, Homo sapiens
cttgattccagattg

SEQ ID NO: 749299 - DNA, 15 bp, Homo sapiens
ttgattccagattgg

SEQ ID NO: 749300 - DNA, 15 bp, Homo sapiens
tgattccagattggc

SEQ ID NO: 749301 - DNA, 15 bp, Homo sapiens
gattccagattggcc

SEQ ID NO: 749302 - DNA, 15 bp, Homo sapiens
attccagattggccc

SEQ ID NO: 749303 - DNA, 15 bp, Homo sapiens
ttccagattggccct

SEQ ID NO: 749304 - DNA, 15 bp, Homo sapiens
tccagattggccctt

SEQ ID NO: 749305 - DNA, 15 bp, Homo sapiens
ccagattggcccttg

SEQ ID NO: 749306 - DNA, 15 bp, Homo sapiens
cagattggcccttgt

SEQ ID NO: 749307 - DNA, 15 bp, Homo sapiens
agattggcccttgtg

SEQ ID NO: 749308 - DNA, 15 bp, Homo sapiens
gattggcccttgtgc

SEQ ID NO: 749309 - DNA, 15 bp, Homo sapiens
attggcccttgtgcc

SEQ ID NO: 749310 - DNA, 15 bp, Homo sapiens
ttggcccttgtgcct

SEQ ID NO: 749311 - DNA, 15 bp, Homo sapiens
tggcccttgtgcctc

SEQ ID NO: 749312 - DNA, 15 bp, Homo sapiens
ggcccttgtgcctca

SEQ ID NO: 749313 - DNA, 15 bp, Homo sapiens
gcccttgtgcctcat

SEQ ID NO: 749314 - DNA, 15 bp, Homo sapiens
cccttgtgcctcatc

SEQ ID NO: 749315 - DNA, 15 bp, Homo sapiens
ccttgtgcctcatct

SEQ ID NO: 749316 - DNA, 15 bp, Homo sapiens
cttgtgcctcatctc

SEQ ID NO: 749317 - DNA, 15 bp, Homo sapiens
ttgtgcctcatctca

SEQ ID NO: 749318 - DNA, 15 bp, Homo sapiens
tgtgcctcatctcat

SEQ ID NO: 749319 - DNA, 15 bp, Homo sapiens
gtgcctcatctcatc

SEQ ID NO: 749320 - DNA, 15 bp, Homo sapiens
tgcctcatctcatcc

SEQ ID NO: 749321 - DNA, 15 bp, Homo sapiens
gcctcatctcatcct

SEQ ID NO: 749322 - DNA, 15 bp, Homo sapiens
cctcatctcatcctg

SEQ ID NO: 749323 - DNA, 15 bp, Homo sapiens
ctcatctcatcctgt

SEQ ID NO: 749324 - DNA, 15 bp, Homo sapiens
tcatctcatcctgtc

SEQ ID NO: 749325 - DNA, 15 bp, Homo sapiens
catctcatcctgtcc

SEQ ID NO: 749326 - DNA, 15 bp, Homo sapiens
atctcatcctgtcct

SEQ ID NO: 749327 - DNA, 15 bp, Homo sapiens
tctcatcctgtcctg

SEQ ID NO: 749328 - DNA, 15 bp, Homo sapiens
ctcatcctgtcctgg

SEQ ID NO: 749329 - DNA, 15 bp, Homo sapiens
tcatcctgtcctggg

SEQ ID NO: 749330 - DNA, 15 bp, Homo sapiens
catcctgtcctgggg

SEQ ID NO: 749331 - DNA, 15 bp, Homo sapiens
atcctgtcctgggga

SEQ ID NO: 749332 - DNA, 15 bp, Homo sapiens
tcctgtcctggggat

SEQ ID NO: 749333 - DNA, 15 bp, Homo sapiens
cctgtcctggggatt

SEQ ID NO: 749334 - DNA, 15 bp, Homo sapiens
ctgtcctggggattg

SEQ ID NO: 749335 - DNA, 15 bp, Homo sapiens
tgtcctggggattgg

SEQ ID NO: 749336 - DNA, 15 bp, Homo sapiens
gtcctggggattggc

SEQ ID NO: 749337 - DNA, 15 bp, Homo sapiens
tcctggggattggct

SEQ ID NO: 749338 - DNA, 15 bp, Homo sapiens
cctggggattggctg

SEQ ID NO: 749339 - DNA, 15 bp, Homo sapiens
ctggggattggctgc

SEQ ID NO: 749340 - DNA, 15 bp, Homo sapiens
tggggattggctgca

SEQ ID NO: 749341 - DNA, 15 bp, Homo sapiens
ggggattggctgcac

SEQ ID NO: 749342 - DNA, 15 bp, Homo sapiens
gggattggctgcacc

SEQ ID NO: 749343 - DNA, 15 bp, Homo sapiens
ggattggctgcacca

SEQ ID NO: 749344 - DNA, 15 bp, Homo sapiens
gattggctgcaccag

SEQ ID NO: 749345 - DNA, 15 bp, Homo sapiens
attggctgcaccaga

SEQ ID NO: 749346 - DNA, 15 bp, Homo sapiens
ttggctgcaccagat

SEQ ID NO: 749347 - DNA, 15 bp, Homo sapiens
tggctgcaccagatg

SEQ ID NO: 749348 - DNA, 15 bp, Homo sapiens
ggctgcaccagatga

SEQ ID NO: 749349 - DNA, 15 bp, Homo sapiens
gctgcaccagatgac

SEQ ID NO: 749350 - DNA, 15 bp, Homo sapiens
ctgcaccagatgacc

SEQ ID NO: 749351 - DNA, 15 bp, Homo sapiens
tgcaccagatgacct

SEQ ID NO: 749352 - DNA, 15 bp, Homo sapiens
gcaccagatgacctt

SEQ ID NO: 749353 - DNA, 15 bp, Homo sapiens
caccagatgaccttg

SEQ ID NO: 749354 - DNA, 15 bp, Homo sapiens
accagatgaccttga

SEQ ID NO: 749355 - DNA, 15 bp, Homo sapiens
ccagatgaccttgag

SEQ ID NO: 749356 - DNA, 15 bp, Homo sapiens
cagatgaccttgaga

SEQ ID NO: 749357 - DNA, 15 bp, Homo sapiens
agatgaccttgagat

SEQ ID NO: 749358 - DNA, 15 bp, Homo sapiens
gatgaccttgagata

SEQ ID NO: 749359 - DNA, 15 bp, Homo sapiens
atgaccttgagatac

SEQ ID NO: 749360 - DNA, 15 bp, Homo sapiens
tgaccttgagatact

SEQ ID NO: 749361 - DNA, 15 bp, Homo sapiens
gaccttgagatactc

SEQ ID NO: 749362 - DNA, 15 bp, Homo sapiens
accttgagatactcc

SEQ ID NO: 749363 - DNA, 15 bp, Homo sapiens
ccttgagatactcct

SEQ ID NO: 749364 - DNA, 15 bp, Homo sapiens
cttgagatactcctt

SEQ ID NO: 749365 - DNA, 15 bp, Homo sapiens
ttgagatactccttt

SEQ ID NO: 749366 - DNA, 15 bp, Homo sapiens
tgagatactcctttt

SEQ ID NO: 749367 - DNA, 15 bp, Homo sapiens
gagatactccttttt

SEQ ID NO: 749368 - DNA, 15 bp, Homo sapiens
agatactcctttttg

SEQ ID NO: 749369 - DNA, 15 bp, Homo sapiens
gatactcctttttga

SEQ ID NO: 749370 - DNA, 15 bp, Homo sapiens
atactcctttttgag

SEQ ID NO: 749371 - DNA, 15 bp, Homo sapiens
tactcctttttgagc

SEQ ID NO: 749372 - DNA, 15 bp, Homo sapiens
actcctttttgagca

SEQ ID NO: 749373 - DNA, 15 bp, Homo sapiens
ctcctttttgagcag

SEQ ID NO: 749374 - DNA, 15 bp, Homo sapiens
tcctttttgagcaga

SEQ ID NO: 749375 - DNA, 15 bp, Homo sapiens
cctttttgagcagat

SEQ ID NO: 749376 - DNA, 15 bp, Homo sapiens
ctttttgagcagatc

SEQ ID NO: 749377 - DNA, 15 bp, Homo sapiens
tttttgagcagatca

SEQ ID NO: 749378 - DNA, 15 bp, Homo sapiens
ttttgagcagatcac

SEQ ID NO: 749379 - DNA, 15 bp, Homo sapiens
tttgagcagatcact

SEQ ID NO: 749380 - DNA, 15 bp, Homo sapiens
ttgagcagatcactt

SEQ ID NO: 749381 - DNA, 15 bp, Homo sapiens
tgagcagatcacttg

SEQ ID NO: 749382 - DNA, 15 bp, Homo sapiens
gagcagatcacttgg

SEQ ID NO: 749383 - DNA, 15 bp, Homo sapiens
agcagatcacttggg

SEQ ID NO: 749384 - DNA, 15 bp, Homo sapiens
gcagatcacttgggg

SEQ ID NO: 749385 - DNA, 15 bp, Homo sapiens
cagatcacttggggt

SEQ ID NO: 749386 - DNA, 15 bp, Homo sapiens
agatcacttggggtg

SEQ ID NO: 749387 - DNA, 15 bp, Homo sapiens
gatcacttggggtgg

SEQ ID NO: 749388 - DNA, 15 bp, Homo sapiens
atcacttggggtggc

SEQ ID NO: 749389 - DNA, 15 bp, Homo sapiens
tcacttggggtggcc

SEQ ID NO: 749390 - DNA, 15 bp, Homo sapiens
cacttggggtggcct

SEQ ID NO: 749391 - DNA, 15 bp, Homo sapiens
acttggggtggcctt

SEQ ID NO: 749392 - DNA, 15 bp, Homo sapiens
cttggggtggccttg

SEQ ID NO: 749393 - DNA, 15 bp, Homo sapiens
ttggggtggccttgg

SEQ ID NO: 749394 - DNA, 15 bp, Homo sapiens
tggggtggccttgga

SEQ ID NO: 749395 - DNA, 15 bp, Homo sapiens
ggggtggccttggag

SEQ ID NO: 749396 - DNA, 15 bp, Homo sapiens
gggtggccttggagg

SEQ ID NO: 749397 - DNA, 15 bp, Homo sapiens
ggtggccttggagga

SEQ ID NO: 749398 - DNA, 15 bp, Homo sapiens
gtggccttggaggag

SEQ ID NO: 749399 - DNA, 15 bp, Homo sapiens
tggccttggaggagt

SEQ ID NO: 749400 - DNA, 15 bp, Homo sapiens
ggccttggaggagtt

SEQ ID NO: 749401 - DNA, 15 bp, Homo sapiens
gccttggaggagttc

SEQ ID NO: 749402 - DNA, 15 bp, Homo sapiens
ccttggaggagttct

SEQ ID NO: 749403 - DNA, 15 bp, Homo sapiens
cttggaggagttctt

SEQ ID NO: 749404 - DNA, 15 bp, Homo sapiens
ttggaggagttcttg

SEQ ID NO: 749405 - DNA, 15 bp, Homo sapiens
tggaggagttcttgg

SEQ ID NO: 749406 - DNA, 15 bp, Homo sapiens
ggaggagttcttggg

SEQ ID NO: 749407 - DNA, 15 bp, Homo sapiens
gaggagttcttgggt

SEQ ID NO: 749408 - DNA, 15 bp, Homo sapiens
aggagttcttgggtc

SEQ ID NO: 749409 - DNA, 15 bp, Homo sapiens
ggagttcttgggtcc

SEQ ID NO: 749410 - DNA, 15 bp, Homo sapiens
gagttcttgggtcct

SEQ ID NO: 749411 - DNA, 15 bp, Homo sapiens
agttcttgggtccta

SEQ ID NO: 749412 - DNA, 15 bp, Homo sapiens
gttcttgggtcctag

SEQ ID NO: 749413 - DNA, 15 bp, Homo sapiens
ttcttgggtcctagt

SEQ ID NO: 749414 - DNA, 15 bp, Homo sapiens
tcttgggtcctagtc

SEQ ID NO: 749415 - DNA, 15 bp, Homo sapiens
cttgggtcctagtca

SEQ ID NO: 749416 - DNA, 15 bp, Homo sapiens
ttgggtcctagtcac

SEQ ID NO: 749417 - DNA, 15 bp, Homo sapiens
tgggtcctagtcacg

SEQ ID NO: 749418 - DNA, 15 bp, Homo sapiens
gggtcctagtcacgg

SEQ ID NO: 749419 - DNA, 15 bp, Homo sapiens
ggtcctagtcacggg

SEQ ID NO: 749420 - DNA, 15 bp, Homo sapiens
gtcctagtcacgggg

SEQ ID NO: 749421 - DNA, 15 bp, Homo sapiens
tcctagtcacggggg

SEQ ID NO: 749422 - DNA, 15 bp, Homo sapiens
cctagtcacggggga

SEQ ID NO: 749423 - DNA, 15 bp, Homo sapiens
ctagtcacgggggag

SEQ ID NO: 749424 - DNA, 15 bp, Homo sapiens
tagtcacgggggagc

SEQ ID NO: 749425 - DNA, 15 bp, Homo sapiens
agtcacgggggagct

SEQ ID NO: 749426 - DNA, 15 bp, Homo sapiens
gtcacgggggagctc

SEQ ID NO: 749427 - DNA, 15 bp, Homo sapiens
tcacgggggagctcc

SEQ ID NO: 749428 - DNA, 15 bp, Homo sapiens
cacgggggagctcca

SEQ ID NO: 749429 - DNA, 15 bp, Homo sapiens
acgggggagctccag

SEQ ID NO: 749430 - DNA, 15 bp, Homo sapiens
cgggggagctccagc

SEQ ID NO: 749431 - DNA, 15 bp, Homo sapiens
gggggagctccagct

SEQ ID NO: 749432 - DNA, 15 bp, Homo sapiens
ggggagctccagctg

SEQ ID NO: 749433 - DNA, 15 bp, Homo sapiens
gggagctccagctga

SEQ ID NO: 749434 - DNA, 15 bp, Homo sapiens
ggagctccagctgac

SEQ ID NO: 749435 - DNA, 15 bp, Homo sapiens
gagctccagctgacc

SEQ ID NO: 749436 - DNA, 15 bp, Homo sapiens
agctccagctgacct

SEQ ID NO: 749437 - DNA, 15 bp, Homo sapiens
gctccagctgacctg

SEQ ID NO: 749438 - DNA, 15 bp, Homo sapiens
ctccagctgacctgc

SEQ ID NO: 749439 - DNA, 15 bp, Homo sapiens
tccagctgacctgcc

SEQ ID NO: 749440 - DNA, 15 bp, Homo sapiens
ccagctgacctgccc

SEQ ID NO: 749441 - DNA, 15 bp, Homo sapiens
cagctgacctgccct

SEQ ID NO: 749442 - DNA, 15 bp, Homo sapiens
agctgacctgccctt

SEQ ID NO: 749443 - DNA, 15 bp, Homo sapiens
gctgacctgcccttg

SEQ ID NO: 749444 - DNA, 15 bp, Homo sapiens
ctgacctgcccttgt

SEQ ID NO: 749445 - DNA, 15 bp, Homo sapiens
tgacctgcccttgtc

SEQ ID NO: 749446 - DNA, 15 bp, Homo sapiens
gacctgcccttgtcc

SEQ ID NO: 749447 - DNA, 15 bp, Homo sapiens
acctgcccttgtcca

SEQ ID NO: 749448 - DNA, 15 bp, Homo sapiens
cctgcccttgtccag

SEQ ID NO: 749449 - DNA, 15 bp, Homo sapiens
ctgcccttgtccaga

SEQ ID NO: 749450 - DNA, 15 bp, Homo sapiens
tgcccttgtccagag

SEQ ID NO: 749451 - DNA, 15 bp, Homo sapiens
gcccttgtccagaga

SEQ ID NO: 749452 - DNA, 15 bp, Homo sapiens
cccttgtccagagag

SEQ ID NO: 749453 - DNA, 15 bp, Homo sapiens
ccttgtccagagagc

SEQ ID NO: 749454 - DNA, 15 bp, Homo sapiens
cttgtccagagagct

SEQ ID NO: 749455 - DNA, 15 bp, Homo sapiens
ttgtccagagagctc

SEQ ID NO: 749456 - DNA, 15 bp, Homo sapiens
tgtccagagagctcg

SEQ ID NO: 749457 - DNA, 15 bp, Homo sapiens
gtccagagagctcgt

SEQ ID NO: 749458 - DNA, 15 bp, Homo sapiens
tccagagagctcgtg

SEQ ID NO: 749459 - DNA, 15 bp, Homo sapiens
ccagagagctcgtgc

SEQ ID NO: 749460 - DNA, 15 bp, Homo sapiens
cagagagctcgtgct

SEQ ID NO: 749461 - DNA, 15 bp, Homo sapiens
agagagctcgtgctc

SEQ ID NO: 749462 - DNA, 15 bp, Homo sapiens
gagagctcgtgctcc

SEQ ID NO: 749463 - DNA, 15 bp, Homo sapiens
agagctcgtgctcct

SEQ ID NO: 749464 - DNA, 15 bp, Homo sapiens
gagctcgtgctcctc

SEQ ID NO: 749465 - DNA, 15 bp, Homo sapiens
agctcgtgctcctca

SEQ ID NO: 749466 - DNA, 15 bp, Homo sapiens
gctcgtgctcctcat

SEQ ID NO: 749467 - DNA, 15 bp, Homo sapiens
ctcgtgctcctcatt

SEQ ID NO: 749468 - DNA, 15 bp, Homo sapiens
tcgtgctcctcattc

SEQ ID NO: 749469 - DNA, 15 bp, Homo sapiens
cgtgctcctcattcc

SEQ ID NO: 749470 - DNA, 15 bp, Homo sapiens
gtgctcctcattcct

SEQ ID NO: 749471 - DNA, 15 bp, Homo sapiens
tgctcctcattcctt

SEQ ID NO: 749472 - DNA, 15 bp, Homo sapiens
gctcctcattccttg

SEQ ID NO: 749473 - DNA, 15 bp, Homo sapiens
ctcctcattccttgc

SEQ ID NO: 749474 - DNA, 15 bp, Homo sapiens
tcctcattccttgct

SEQ ID NO: 749475 - DNA, 15 bp, Homo sapiens
cctcattccttgctc

SEQ ID NO: 749476 - DNA, 15 bp, Homo sapiens
ctcattccttgctct

SEQ ID NO: 749477 - DNA, 15 bp, Homo sapiens
tcattccttgctctc

SEQ ID NO: 749478 - DNA, 15 bp, Homo sapiens
cattccttgctctct

SEQ ID NO: 749479 - DNA, 15 bp, Homo sapiens
attccttgctctctc

SEQ ID NO: 749480 - DNA, 15 bp, Homo sapiens
ttccttgctctctct

SEQ ID NO: 749481 - DNA, 15 bp, Homo sapiens
tccttgctctctctc

SEQ ID NO: 749482 - DNA, 15 bp, Homo sapiens
ccttgctctctctct

SEQ ID NO: 749483 - DNA, 15 bp, Homo sapiens
cttgctctctctctc

SEQ ID NO: 749484 - DNA, 15 bp, Homo sapiens
ttgctctctctctct

SEQ ID NO: 749485 - DNA, 15 bp, Homo sapiens
tgctctctctctctc

SEQ ID NO: 749486 - DNA, 15 bp, Homo sapiens
gctctctctctctct

SEQ ID NO: 749487 - DNA, 15 bp, Homo sapiens
ctctctctctctctc

SEQ ID NO: 749488 - DNA, 15 bp, Homo sapiens
tctctctctctctcc

SEQ ID NO: 749489 - DNA, 15 bp, Homo sapiens
ctctctctctctcct

SEQ ID NO: 749490 - DNA, 15 bp, Homo sapiens
tctctctctctcctt

SEQ ID NO: 749491 - DNA, 15 bp, Homo sapiens
ctctctctctccttt

SEQ ID NO: 749492 - DNA, 15 bp, Homo sapiens
tctctctctcctttt

SEQ ID NO: 749493 - DNA, 15 bp, Homo sapiens
ctctctctcctttta

SEQ ID NO: 749494 - DNA, 15 bp, Homo sapiens
tctctctccttttat

SEQ ID NO: 749495 - DNA, 15 bp, Homo sapiens
ctctctccttttatt

SEQ ID NO: 749496 - DNA, 15 bp, Homo sapiens
tctctccttttatta

SEQ ID NO: 749497 - DNA, 15 bp, Homo sapiens
ctctccttttattaa

SEQ ID NO: 749498 - DNA, 15 bp, Homo sapiens
tctccttttattaat

SEQ ID NO: 749499 - DNA, 15 bp, Homo sapiens
ctccttttattaatt

SEQ ID NO: 749500 - DNA, 15 bp, Homo sapiens
tccttttattaattt

SEQ ID NO: 749501 - DNA, 15 bp, Homo sapiens
ccttttattaatttt

SEQ ID NO: 749502 - DNA, 15 bp, Homo sapiens
cttttattaattttt

SEQ ID NO: 749503 - DNA, 15 bp, Homo sapiens
ttttattaatttttt

SEQ ID NO: 749504 - DNA, 15 bp, Homo sapiens
tttattaattttttt

SEQ ID NO: 749505 - DNA, 15 bp, Homo sapiens
ttattaatttttttt

SEQ ID NO: 749506 - DNA, 15 bp, Homo sapiens
tattaattttttttt

SEQ ID NO: 749507 - DNA, 15 bp, Homo sapiens
attaatttttttttt

SEQ ID NO: 749508 - DNA, 15 bp, Homo sapiens
ttaattttttttttt

SEQ ID NO: 749509 - DNA, 15 bp, Homo sapiens
taatttttttttttg

SEQ ID NO: 749510 - DNA, 15 bp, Homo sapiens
aatttttttttttga

SEQ ID NO: 749511 - DNA, 15 bp, Homo sapiens
atttttttttttgag

SEQ ID NO: 749512 - DNA, 15 bp, Homo sapiens
agtctcgctctgtca

SEQ ID NO: 749513 - DNA, 15 bp, Homo sapiens
gtctcgctctgtcac

SEQ ID NO: 749514 - DNA, 15 bp, Homo sapiens
tctcgctctgtcacc

SEQ ID NO: 749515 - DNA, 15 bp, Homo sapiens
ctcgctctgtcaccc

SEQ ID NO: 749516 - DNA, 15 bp, Homo sapiens
tcgctctgtcaccca

SEQ ID NO: 749517 - DNA, 15 bp, Homo sapiens
cgctctgtcacccag

SEQ ID NO: 749518 - DNA, 15 bp, Homo sapiens
gctctgtcacccagg

SEQ ID NO: 749519 - DNA, 15 bp, Homo sapiens
ctctgtcacccaggc

SEQ ID NO: 749520 - DNA, 15 bp, Homo sapiens
tctgtcacccaggct

SEQ ID NO: 749521 - DNA, 15 bp, Homo sapiens
ctgtcacccaggctg

SEQ ID NO: 749522 - DNA, 15 bp, Homo sapiens
tgtcacccaggctgg

SEQ ID NO: 749523 - DNA, 15 bp, Homo sapiens
gtcacccaggctgga

SEQ ID NO: 749524 - DNA, 15 bp, Homo sapiens
tcacccaggctggag

SEQ ID NO: 749525 - DNA, 15 bp, Homo sapiens
cacccaggctggagt

SEQ ID NO: 749526 - DNA, 15 bp, Homo sapiens
acccaggctggagtg

SEQ ID NO: 749527 - DNA, 15 bp, Homo sapiens
aggctggagtgcagc

SEQ ID NO: 749528 - DNA, 15 bp, Homo sapiens
ggctggagtgcagcg

SEQ ID NO: 749529 - DNA, 15 bp, Homo sapiens
gctggagtgcagcgg

SEQ ID NO: 749530 - DNA, 15 bp, Homo sapiens
ctggagtgcagcggc

SEQ ID NO: 749531 - DNA, 15 bp, Homo sapiens
tggagtgcagcggca

SEQ ID NO: 749532 - DNA, 15 bp, Homo sapiens
ggagtgcagcggcac

SEQ ID NO: 749533 - DNA, 15 bp, Homo sapiens
gagtgcagcggcacg

SEQ ID NO: 749534 - DNA, 15 bp, Homo sapiens
agtgcagcggcacga

SEQ ID NO: 749535 - DNA, 15 bp, Homo sapiens
gtgcagcggcacgat

SEQ ID NO: 749536 - DNA, 15 bp, Homo sapiens
tgcagcggcacgatc

SEQ ID NO: 749537 - DNA, 15 bp, Homo sapiens
gcagcggcacgatct

SEQ ID NO: 749538 - DNA, 15 bp, Homo sapiens
cagcggcacgatctt

SEQ ID NO: 749539 - DNA, 15 bp, Homo sapiens
agcggcacgatcttg

SEQ ID NO: 749540 - DNA, 15 bp, Homo sapiens
gcggcacgatcttgg

SEQ ID NO: 749541 - DNA, 15 bp, Homo sapiens
cggcacgatcttggc

SEQ ID NO: 749542 - DNA, 15 bp, Homo sapiens
ggcacgatcttggct

SEQ ID NO: 749543 - DNA, 15 bp, Homo sapiens
gcacgatcttggctc

SEQ ID NO: 749544 - DNA, 15 bp, Homo sapiens
cacgatcttggctca

SEQ ID NO: 749545 - DNA, 15 bp, Homo sapiens
acgatcttggctcac

SEQ ID NO: 749546 - DNA, 15 bp, Homo sapiens
cgatcttggctcact

SEQ ID NO: 749547 - DNA, 15 bp, Homo sapiens
gatcttggctcactg

SEQ ID NO: 749548 - DNA, 15 bp, Homo sapiens
atcttggctcactgc

SEQ ID NO: 749549 - DNA, 15 bp, Homo sapiens
tcttggctcactgca

SEQ ID NO: 749550 - DNA, 15 bp, Homo sapiens
cttggctcactgcag

SEQ ID NO: 749551 - DNA, 15 bp, Homo sapiens
ttggctcactgcagc

SEQ ID NO: 749552 - DNA, 15 bp, Homo sapiens
tggctcactgcagcc

SEQ ID NO: 749553 - DNA, 15 bp, Homo sapiens
ggctcactgcagcct

SEQ ID NO: 749554 - DNA, 15 bp, Homo sapiens
gctcactgcagcctg

SEQ ID NO: 749555 - DNA, 15 bp, Homo sapiens
ctcactgcagcctgc

SEQ ID NO: 749556 - DNA, 15 bp, Homo sapiens
tcactgcagcctgcg

SEQ ID NO: 749557 - DNA, 15 bp, Homo sapiens
cactgcagcctgcgc

SEQ ID NO: 749558 - DNA, 15 bp, Homo sapiens
actgcagcctgcgcc

SEQ ID NO: 749559 - DNA, 15 bp, Homo sapiens
ctgcagcctgcgcct

SEQ ID NO: 749560 - DNA, 15 bp, Homo sapiens
tgcagcctgcgcctc

SEQ ID NO: 749561 - DNA, 15 bp, Homo sapiens
gcagcctgcgcctcc

SEQ ID NO: 749562 - DNA, 15 bp, Homo sapiens
cagcctgcgcctcct

SEQ ID NO: 749563 - DNA, 15 bp, Homo sapiens
agcctgcgcctcctg

SEQ ID NO: 749564 - DNA, 15 bp, Homo sapiens
gcctgcgcctcctgg

SEQ ID NO: 749565 - DNA, 15 bp, Homo sapiens
cctgcgcctcctggg

SEQ ID NO: 749566 - DNA, 15 bp, Homo sapiens
ctgcgcctcctgggt

SEQ ID NO: 749567 - DNA, 15 bp, Homo sapiens
tgcgcctcctgggtt

SEQ ID NO: 749568 - DNA, 15 bp, Homo sapiens
gcgcctcctgggttc

SEQ ID NO: 749569 - DNA, 15 bp, Homo sapiens
cgcctcctgggttca

SEQ ID NO: 749570 - DNA, 15 bp, Homo sapiens
gcctcctgggttcaa

SEQ ID NO: 749571 - DNA, 15 bp, Homo sapiens
cctcctgggttcaag

SEQ ID NO: 749572 - DNA, 15 bp, Homo sapiens
ctcctgggttcaagc

SEQ ID NO: 749573 - DNA, 15 bp, Homo sapiens
tcctgggttcaagca

SEQ ID NO: 749574 - DNA, 15 bp, Homo sapiens
cctgggttcaagcaa

SEQ ID NO: 749575 - DNA, 15 bp, Homo sapiens
ctgggttcaagcaat

SEQ ID NO: 749576 - DNA, 15 bp, Homo sapiens
tgggttcaagcaatt

SEQ ID NO: 749577 - DNA, 15 bp, Homo sapiens
gggttcaagcaattc

SEQ ID NO: 749578 - DNA, 15 bp, Homo sapiens
ggttcaagcaattct

SEQ ID NO: 749579 - DNA, 15 bp, Homo sapiens
ctgggactacaggcg

SEQ ID NO: 749580 - DNA, 15 bp, Homo sapiens
tgggactacaggcgc

SEQ ID NO: 749581 - DNA, 15 bp, Homo sapiens
gggactacaggcgca

SEQ ID NO: 749582 - DNA, 15 bp, Homo sapiens
ggactacaggcgcac

SEQ ID NO: 749583 - DNA, 15 bp, Homo sapiens
gactacaggcgcacg

SEQ ID NO: 749584 - DNA, 15 bp, Homo sapiens
actacaggcgcacgc

SEQ ID NO: 749585 - DNA, 15 bp, Homo sapiens
ctacaggcgcacgct

SEQ ID NO: 749586 - DNA, 15 bp, Homo sapiens
tacaggcgcacgctg

SEQ ID NO: 749587 - DNA, 15 bp, Homo sapiens
acaggcgcacgctgc

SEQ ID NO: 749588 - DNA, 15 bp, Homo sapiens
caggcgcacgctgcc

SEQ ID NO: 749589 - DNA, 15 bp, Homo sapiens
aggcgcacgctgcca

SEQ ID NO: 749590 - DNA, 15 bp, Homo sapiens
ggcgcacgctgccac

SEQ ID NO: 749591 - DNA, 15 bp, Homo sapiens
gcgcacgctgccaca

SEQ ID NO: 749592 - DNA, 15 bp, Homo sapiens
cgcacgctgccacac

SEQ ID NO: 749593 - DNA, 15 bp, Homo sapiens
gcacgctgccacacc

SEQ ID NO: 749594 - DNA, 15 bp, Homo sapiens
cacgctgccacacct

SEQ ID NO: 749595 - DNA, 15 bp, Homo sapiens
acgctgccacacctg

SEQ ID NO: 749596 - DNA, 15 bp, Homo sapiens
cgctgccacacctgg

SEQ ID NO: 749597 - DNA, 15 bp, Homo sapiens
gctgccacacctggc

SEQ ID NO: 749598 - DNA, 15 bp, Homo sapiens
ctgccacacctggct

SEQ ID NO: 749599 - DNA, 15 bp, Homo sapiens
tgccacacctggcta

SEQ ID NO: 749600 - DNA, 15 bp, Homo sapiens
gccacacctggctaa

SEQ ID NO: 749601 - DNA, 15 bp, Homo sapiens
ggctaatttttgtat

SEQ ID NO: 749602 - DNA, 15 bp, Homo sapiens
gctaatttttgtatt

SEQ ID NO: 749603 - DNA, 15 bp, Homo sapiens
ctaatttttgtattt

SEQ ID NO: 749604 - DNA, 15 bp, Homo sapiens
taatttttgtatttt

SEQ ID NO: 749605 - DNA, 15 bp, Homo sapiens
aatttttgtatttta

SEQ ID NO: 749606 - DNA, 15 bp, Homo sapiens
atttttgtattttaa

SEQ ID NO: 749607 - DNA, 15 bp, Homo sapiens
tttttgtattttaag

SEQ ID NO: 749608 - DNA, 15 bp, Homo sapiens
ttttgtattttaagt

SEQ ID NO: 749609 - DNA, 15 bp, Homo sapiens
tttgtattttaagta

SEQ ID NO: 749610 - DNA, 15 bp, Homo sapiens
ttgtattttaagtag

SEQ ID NO: 749611 - DNA, 15 bp, Homo sapiens
tgtattttaagtaga

SEQ ID NO: 749612 - DNA, 15 bp, Homo sapiens
gtattttaagtagag

SEQ ID NO: 749613 - DNA, 15 bp, Homo sapiens
tattttaagtagaga

SEQ ID NO: 749614 - DNA, 15 bp, Homo sapiens
attttaagtagagac

SEQ ID NO: 749615 - DNA, 15 bp, Homo sapiens
ttttaagtagagacg

SEQ ID NO: 749616 - DNA, 15 bp, Homo sapiens
tttaagtagagacgg

SEQ ID NO: 749617 - DNA, 15 bp, Homo sapiens
ttaagtagagacggg

SEQ ID NO: 749618 - DNA, 15 bp, Homo sapiens
taagtagagacgggg

SEQ ID NO: 749619 - DNA, 15 bp, Homo sapiens
aagtagagacggggt

SEQ ID NO: 749620 - DNA, 15 bp, Homo sapiens
agtagagacggggtt

SEQ ID NO: 749621 - DNA, 15 bp, Homo sapiens
gtagagacggggttt

SEQ ID NO: 749622 - DNA, 15 bp, Homo sapiens
tagagacggggtttc

SEQ ID NO: 749623 - DNA, 15 bp, Homo sapiens
agagacggggtttca

SEQ ID NO: 749624 - DNA, 15 bp, Homo sapiens
gagacggggtttcac

SEQ ID NO: 749625 - DNA, 15 bp, Homo sapiens
agacggggtttcacc

SEQ ID NO: 749626 - DNA, 15 bp, Homo sapiens
gacggggtttcacca

SEQ ID NO: 749627 - DNA, 15 bp, Homo sapiens
acggggtttcaccac

SEQ ID NO: 749628 - DNA, 15 bp, Homo sapiens
cggggtttcaccaca

SEQ ID NO: 749629 - DNA, 15 bp, Homo sapiens
ggggtttcaccacat

SEQ ID NO: 749630 - DNA, 15 bp, Homo sapiens
gggtttcaccacatt

SEQ ID NO: 749631 - DNA, 15 bp, Homo sapiens
ggtttcaccacattg

SEQ ID NO: 749632 - DNA, 15 bp, Homo sapiens
gtttcaccacattgg

SEQ ID NO: 749633 - DNA, 15 bp, Homo sapiens
tttcaccacattggc

SEQ ID NO: 749634 - DNA, 15 bp, Homo sapiens
ttcaccacattggcc

SEQ ID NO: 749635 - DNA, 15 bp, Homo sapiens
tcaccacattggcca

SEQ ID NO: 749636 - DNA, 15 bp, Homo sapiens
caccacattggccag

SEQ ID NO: 749637 - DNA, 15 bp, Homo sapiens
accacattggccagg

SEQ ID NO: 749638 - DNA, 15 bp, Homo sapiens
ccacattggccagga

SEQ ID NO: 749639 - DNA, 15 bp, Homo sapiens
cacattggccaggat

SEQ ID NO: 749640 - DNA, 15 bp, Homo sapiens
acattggccaggatt

SEQ ID NO: 749641 - DNA, 15 bp, Homo sapiens
cattggccaggattg

SEQ ID NO: 749642 - DNA, 15 bp, Homo sapiens
attggccaggattgt

SEQ ID NO: 749643 - DNA, 15 bp, Homo sapiens
ttggccaggattgtc

SEQ ID NO: 749644 - DNA, 15 bp, Homo sapiens
tggccaggattgtct

SEQ ID NO: 749645 - DNA, 15 bp, Homo sapiens
ggccaggattgtctt

SEQ ID NO: 749646 - DNA, 15 bp, Homo sapiens
gccaggattgtcttg

SEQ ID NO: 749647 - DNA, 15 bp, Homo sapiens
ccaggattgtcttga

SEQ ID NO: 749648 - DNA, 15 bp, Homo sapiens
caggattgtcttgat

SEQ ID NO: 749649 - DNA, 15 bp, Homo sapiens
aggattgtcttgatc

SEQ ID NO: 749650 - DNA, 15 bp, Homo sapiens
ggattgtcttgatct

SEQ ID NO: 749651 - DNA, 15 bp, Homo sapiens
gattgtcttgatctc

SEQ ID NO: 749652 - DNA, 15 bp, Homo sapiens
attgtcttgatctcc

SEQ ID NO: 749653 - DNA, 15 bp, Homo sapiens
ttgtcttgatctcct

SEQ ID NO: 749654 - DNA, 15 bp, Homo sapiens
tgtcttgatctcctg

SEQ ID NO: 749655 - DNA, 15 bp, Homo sapiens
tgatctcctgacctt

SEQ ID NO: 749656 - DNA, 15 bp, Homo sapiens
gatctcctgaccttg

SEQ ID NO: 749657 - DNA, 15 bp, Homo sapiens
atctcctgaccttgt

SEQ ID NO: 749658 - DNA, 15 bp, Homo sapiens
tctcctgaccttgtg

SEQ ID NO: 749659 - DNA, 15 bp, Homo sapiens
ctcctgaccttgtga

SEQ ID NO: 749660 - DNA, 15 bp, Homo sapiens
tcctgaccttgtgat

SEQ ID NO: 749661 - DNA, 15 bp, Homo sapiens
cctgaccttgtgatt

SEQ ID NO: 749662 - DNA, 15 bp, Homo sapiens
ctgaccttgtgattc

SEQ ID NO: 749663 - DNA, 15 bp, Homo sapiens
tgaccttgtgattcg

SEQ ID NO: 749664 - DNA, 15 bp, Homo sapiens
gaccttgtgattcgc

SEQ ID NO: 749665 - DNA, 15 bp, Homo sapiens
accttgtgattcgcc

SEQ ID NO: 749666 - DNA, 15 bp, Homo sapiens
ccttgtgattcgccc

SEQ ID NO: 749667 - DNA, 15 bp, Homo sapiens
cttgtgattcgccca

SEQ ID NO: 749668 - DNA, 15 bp, Homo sapiens
ttgtgattcgcccac

SEQ ID NO: 749669 - DNA, 15 bp, Homo sapiens
tgtgattcgcccacc

SEQ ID NO: 749670 - DNA, 15 bp, Homo sapiens
gtgattcgcccacct

SEQ ID NO: 749671 - DNA, 15 bp, Homo sapiens
tgattcgcccacctt

SEQ ID NO: 749672 - DNA, 15 bp, Homo sapiens
gattcgcccaccttg

SEQ ID NO: 749673 - DNA, 15 bp, Homo sapiens
attcgcccaccttgg

SEQ ID NO: 749674 - DNA, 15 bp, Homo sapiens
ttcgcccaccttggc

SEQ ID NO: 749675 - DNA, 15 bp, Homo sapiens
tcgcccaccttggcc

SEQ ID NO: 749676 - DNA, 15 bp, Homo sapiens
cgcccaccttggcct

SEQ ID NO: 749677 - DNA, 15 bp, Homo sapiens
gcccaccttggcctc

SEQ ID NO: 749678 - DNA, 15 bp, Homo sapiens
cccaccttggcctcc

SEQ ID NO: 749679 - DNA, 15 bp, Homo sapiens
ccaccttggcctccc

SEQ ID NO: 749680 - DNA, 15 bp, Homo sapiens
caccttggcctccca

SEQ ID NO: 749681 - DNA, 15 bp, Homo sapiens
accttggcctcccaa

SEQ ID NO: 749682 - DNA, 15 bp, Homo sapiens
attacaggcgtgagg

SEQ ID NO: 749683 - DNA, 15 bp, Homo sapiens
ttacaggcgtgaggc

SEQ ID NO: 749684 - DNA, 15 bp, Homo sapiens
tacaggcgtgaggca

SEQ ID NO: 749685 - DNA, 15 bp, Homo sapiens
acaggcgtgaggcac

SEQ ID NO: 749686 - DNA, 15 bp, Homo sapiens
caggcgtgaggcacg

SEQ ID NO: 749687 - DNA, 15 bp, Homo sapiens
aggcgtgaggcacgg

SEQ ID NO: 749688 - DNA, 15 bp, Homo sapiens
ggcgtgaggcacggc

SEQ ID NO: 749689 - DNA, 15 bp, Homo sapiens
gcgtgaggcacggcg

SEQ ID NO: 749690 - DNA, 15 bp, Homo sapiens
cgtgaggcacggcgt

SEQ ID NO: 749691 - DNA, 15 bp, Homo sapiens
gtgaggcacggcgtc

SEQ ID NO: 749692 - DNA, 15 bp, Homo sapiens
tgaggcacggcgtcc

SEQ ID NO: 749693 - DNA, 15 bp, Homo sapiens
gaggcacggcgtcca

SEQ ID NO: 749694 - DNA, 15 bp, Homo sapiens
aggcacggcgtccag

SEQ ID NO: 749695 - DNA, 15 bp, Homo sapiens
ggcacggcgtccagc

SEQ ID NO: 749696 - DNA, 15 bp, Homo sapiens
gcacggcgtccagcc

SEQ ID NO: 749697 - DNA, 15 bp, Homo sapiens
cacggcgtccagccc

SEQ ID NO: 749698 - DNA, 15 bp, Homo sapiens
acggcgtccagcccc

SEQ ID NO: 749699 - DNA, 15 bp, Homo sapiens
cggcgtccagcccct

SEQ ID NO: 749700 - DNA, 15 bp, Homo sapiens
ggcgtccagcccctg

SEQ ID NO: 749701 - DNA, 15 bp, Homo sapiens
gcgtccagcccctgg

SEQ ID NO: 749702 - DNA, 15 bp, Homo sapiens
cgtccagcccctggc

SEQ ID NO: 749703 - DNA, 15 bp, Homo sapiens
gtccagcccctggcc

SEQ ID NO: 749704 - DNA, 15 bp, Homo sapiens
tccagcccctggccc

SEQ ID NO: 749705 - DNA, 15 bp, Homo sapiens
ccagcccctggccct

SEQ ID NO: 749706 - DNA, 15 bp, Homo sapiens
cagcccctggccctc

SEQ ID NO: 749707 - DNA, 15 bp, Homo sapiens
agcccctggccctct

SEQ ID NO: 749708 - DNA, 15 bp, Homo sapiens
gcccctggccctctt

SEQ ID NO: 749709 - DNA, 15 bp, Homo sapiens
cccctggccctcttt

SEQ ID NO: 749710 - DNA, 15 bp, Homo sapiens
ccctggccctcttta

SEQ ID NO: 749711 - DNA, 15 bp, Homo sapiens
cctggccctctttat

SEQ ID NO: 749712 - DNA, 15 bp, Homo sapiens
ctggccctctttatg

SEQ ID NO: 749713 - DNA, 15 bp, Homo sapiens
tggccctctttatgg

SEQ ID NO: 749714 - DNA, 15 bp, Homo sapiens
ggccctctttatgga

SEQ ID NO: 749715 - DNA, 15 bp, Homo sapiens
gccctctttatggaa

SEQ ID NO: 749716 - DNA, 15 bp, Homo sapiens
ccctctttatggaaa

SEQ ID NO: 749717 - DNA, 15 bp, Homo sapiens
cctctttatggaaat

SEQ ID NO: 749718 - DNA, 15 bp, Homo sapiens
ctctttatggaaatg

SEQ ID NO: 749719 - DNA, 15 bp, Homo sapiens
tctttatggaaatgc

SEQ ID NO: 749720 - DNA, 15 bp, Homo sapiens
ctttatggaaatgca

SEQ ID NO: 749721 - DNA, 15 bp, Homo sapiens
tttatggaaatgcac

SEQ ID NO: 749722 - DNA, 15 bp, Homo sapiens
ttatggaaatgcaca

SEQ ID NO: 749723 - DNA, 15 bp, Homo sapiens
tatggaaatgcacac

SEQ ID NO: 749724 - DNA, 15 bp, Homo sapiens
atggaaatgcacact

SEQ ID NO: 749725 - DNA, 15 bp, Homo sapiens
tggaaatgcacactt

SEQ ID NO: 749726 - DNA, 15 bp, Homo sapiens
ggaaatgcacacttt

SEQ ID NO: 749727 - DNA, 15 bp, Homo sapiens
gaaatgcacacttta

SEQ ID NO: 749728 - DNA, 15 bp, Homo sapiens
aaatgcacactttag

SEQ ID NO: 749729 - DNA, 15 bp, Homo sapiens
aatgcacactttagt

SEQ ID NO: 749730 - DNA, 15 bp, Homo sapiens
atgcacactttagta

SEQ ID NO: 749731 - DNA, 15 bp, Homo sapiens
tgcacactttagtac

SEQ ID NO: 749732 - DNA, 15 bp, Homo sapiens
gcacactttagtaca

SEQ ID NO: 749733 - DNA, 15 bp, Homo sapiens
cacactttagtacaa

SEQ ID NO: 749734 - DNA, 15 bp, Homo sapiens
acactttagtacaag

SEQ ID NO: 749735 - DNA, 15 bp, Homo sapiens
cactttagtacaaga

SEQ ID NO: 749736 - DNA, 15 bp, Homo sapiens
actttagtacaagac

SEQ ID NO: 749737 - DNA, 15 bp, Homo sapiens
ctttagtacaagact

SEQ ID NO: 749738 - DNA, 15 bp, Homo sapiens
tttagtacaagactc

SEQ ID NO: 749739 - DNA, 15 bp, Homo sapiens
ttagtacaagactct

SEQ ID NO: 749740 - DNA, 15 bp, Homo sapiens
tagtacaagactctg

SEQ ID NO: 749741 - DNA, 15 bp, Homo sapiens
agtacaagactctgc

SEQ ID NO: 749742 - DNA, 15 bp, Homo sapiens
gtacaagactctgca

SEQ ID NO: 749743 - DNA, 15 bp, Homo sapiens
tacaagactctgcaa

SEQ ID NO: 749744 - DNA, 15 bp, Homo sapiens
acaagactctgcaat

SEQ ID NO: 749745 - DNA, 15 bp, Homo sapiens
caagactctgcaatc

SEQ ID NO: 749746 - DNA, 15 bp, Homo sapiens
aagactctgcaatca

SEQ ID NO: 749747 - DNA, 15 bp, Homo sapiens
agactctgcaatcag

SEQ ID NO: 749748 - DNA, 15 bp, Homo sapiens
gactctgcaatcagg

SEQ ID NO: 749749 - DNA, 15 bp, Homo sapiens
actctgcaatcaggc

SEQ ID NO: 749750 - DNA, 15 bp, Homo sapiens
ctctgcaatcaggca

SEQ ID NO: 749751 - DNA, 15 bp, Homo sapiens
tctgcaatcaggcaa

SEQ ID NO: 749752 - DNA, 15 bp, Homo sapiens
ctgcaatcaggcaaa

SEQ ID NO: 749753 - DNA, 15 bp, Homo sapiens
tgcaatcaggcaaac

SEQ ID NO: 749754 - DNA, 15 bp, Homo sapiens
gcaatcaggcaaacc

SEQ ID NO: 749755 - DNA, 15 bp, Homo sapiens
caatcaggcaaaccc

SEQ ID NO: 749756 - DNA, 15 bp, Homo sapiens
aatcaggcaaaccca

SEQ ID NO: 749757 - DNA, 15 bp, Homo sapiens
atcaggcaaacccaa

SEQ ID NO: 749758 - DNA, 15 bp, Homo sapiens
tcaggcaaacccaag

SEQ ID NO: 749759 - DNA, 15 bp, Homo sapiens
caggcaaacccaagt

SEQ ID NO: 749760 - DNA, 15 bp, Homo sapiens
aggcaaacccaagtt

SEQ ID NO: 749761 - DNA, 15 bp, Homo sapiens
ggcaaacccaagttc

SEQ ID NO: 749762 - DNA, 15 bp, Homo sapiens
gcaaacccaagttca

SEQ ID NO: 749763 - DNA, 15 bp, Homo sapiens
caaacccaagttcaa

SEQ ID NO: 749764 - DNA, 15 bp, Homo sapiens
aaacccaagttcaaa

SEQ ID NO: 749765 - DNA, 15 bp, Homo sapiens
aacccaagttcaaat

SEQ ID NO: 749766 - DNA, 15 bp, Homo sapiens
acccaagttcaaatc

SEQ ID NO: 749767 - DNA, 15 bp, Homo sapiens
cccaagttcaaatca

SEQ ID NO: 749768 - DNA, 15 bp, Homo sapiens
ccaagttcaaatcat

SEQ ID NO: 749769 - DNA, 15 bp, Homo sapiens
caagttcaaatcatg

SEQ ID NO: 749770 - DNA, 15 bp, Homo sapiens
aagttcaaatcatgg

SEQ ID NO: 749771 - DNA, 15 bp, Homo sapiens
agttcaaatcatgga

SEQ ID NO: 749772 - DNA, 15 bp, Homo sapiens
gttcaaatcatggat

SEQ ID NO: 749773 - DNA, 15 bp, Homo sapiens
ttcaaatcatggatc

SEQ ID NO: 749774 - DNA, 15 bp, Homo sapiens
tcaaatcatggatct

SEQ ID NO: 749775 - DNA, 15 bp, Homo sapiens
caaatcatggatctc

SEQ ID NO: 749776 - DNA, 15 bp, Homo sapiens
aaatcatggatctca

SEQ ID NO: 749777 - DNA, 15 bp, Homo sapiens
aatcatggatctcac

SEQ ID NO: 749778 - DNA, 15 bp, Homo sapiens
atcatggatctcaca

SEQ ID NO: 749779 - DNA, 15 bp, Homo sapiens
tcatggatctcacat

SEQ ID NO: 749780 - DNA, 15 bp, Homo sapiens
catggatctcacatt

SEQ ID NO: 749781 - DNA, 15 bp, Homo sapiens
atggatctcacattt

SEQ ID NO: 749782 - DNA, 15 bp, Homo sapiens
tggatctcacattta

SEQ ID NO: 749783 - DNA, 15 bp, Homo sapiens
ggatctcacatttat

SEQ ID NO: 749784 - DNA, 15 bp, Homo sapiens
gatctcacatttatt

SEQ ID NO: 749785 - DNA, 15 bp, Homo sapiens
atctcacatttatta

SEQ ID NO: 749786 - DNA, 15 bp, Homo sapiens
tctcacatttattag

SEQ ID NO: 749787 - DNA, 15 bp, Homo sapiens
ctcacatttattagc

SEQ ID NO: 749788 - DNA, 15 bp, Homo sapiens
tcacatttattagca

SEQ ID NO: 749789 - DNA, 15 bp, Homo sapiens
cacatttattagcag

SEQ ID NO: 749790 - DNA, 15 bp, Homo sapiens
acatttattagcagg

SEQ ID NO: 749791 - DNA, 15 bp, Homo sapiens
catttattagcaggg

SEQ ID NO: 749792 - DNA, 15 bp, Homo sapiens
atttattagcagggc

SEQ ID NO: 749793 - DNA, 15 bp, Homo sapiens
tttattagcagggca

SEQ ID NO: 749794 - DNA, 15 bp, Homo sapiens
ttattagcagggcat

SEQ ID NO: 749795 - DNA, 15 bp, Homo sapiens
tattagcagggcatc

SEQ ID NO: 749796 - DNA, 15 bp, Homo sapiens
attagcagggcatct

SEQ ID NO: 749797 - DNA, 15 bp, Homo sapiens
ttagcagggcatctt

SEQ ID NO: 749798 - DNA, 15 bp, Homo sapiens
tagcagggcatcttt

SEQ ID NO: 749799 - DNA, 15 bp, Homo sapiens
agcagggcatctttg

SEQ ID NO: 749800 - DNA, 15 bp, Homo sapiens
gcagggcatctttga

SEQ ID NO: 749801 - DNA, 15 bp, Homo sapiens
cagggcatctttgac

SEQ ID NO: 749802 - DNA, 15 bp, Homo sapiens
agggcatctttgact

SEQ ID NO: 749803 - DNA, 15 bp, Homo sapiens
gggcatctttgactg

SEQ ID NO: 749804 - DNA, 15 bp, Homo sapiens
ggcatctttgactgc

SEQ ID NO: 749805 - DNA, 15 bp, Homo sapiens
gcatctttgactgcc

SEQ ID NO: 749806 - DNA, 15 bp, Homo sapiens
catctttgactgcca

SEQ ID NO: 749807 - DNA, 15 bp, Homo sapiens
atctttgactgccaa

SEQ ID NO: 749808 - DNA, 15 bp, Homo sapiens
tctttgactgccaac

SEQ ID NO: 749809 - DNA, 15 bp, Homo sapiens
ctttgactgccaacc

SEQ ID NO: 749810 - DNA, 15 bp, Homo sapiens
tttgactgccaacca

SEQ ID NO: 749811 - DNA, 15 bp, Homo sapiens
ttgactgccaaccat

SEQ ID NO: 749812 - DNA, 15 bp, Homo sapiens
tgactgccaaccatg

SEQ ID NO: 749813 - DNA, 15 bp, Homo sapiens
gactgccaaccatgt

SEQ ID NO: 749814 - DNA, 15 bp, Homo sapiens
actgccaaccatgtt

SEQ ID NO: 749815 - DNA, 15 bp, Homo sapiens
ctgccaaccatgttg

SEQ ID NO: 749816 - DNA, 15 bp, Homo sapiens
tgccaaccatgttga

SEQ ID NO: 749817 - DNA, 15 bp, Homo sapiens
gccaaccatgttgag

SEQ ID NO: 749818 - DNA, 15 bp, Homo sapiens
ccaaccatgttgagc

SEQ ID NO: 749819 - DNA, 15 bp, Homo sapiens
caaccatgttgagct

SEQ ID NO: 749820 - DNA, 15 bp, Homo sapiens
aaccatgttgagctt

SEQ ID NO: 749821 - DNA, 15 bp, Homo sapiens
accatgttgagcttt

SEQ ID NO: 749822 - DNA, 15 bp, Homo sapiens
ccatgttgagctttg

SEQ ID NO: 749823 - DNA, 15 bp, Homo sapiens
catgttgagctttgg

SEQ ID NO: 749824 - DNA, 15 bp, Homo sapiens
atgttgagctttggt

SEQ ID NO: 749825 - DNA, 15 bp, Homo sapiens
tgttgagctttggtt

SEQ ID NO: 749826 - DNA, 15 bp, Homo sapiens
gttgagctttggtta

SEQ ID NO: 749827 - DNA, 15 bp, Homo sapiens
ttgagctttggttac

SEQ ID NO: 749828 - DNA, 15 bp, Homo sapiens
tgagctttggttaca

SEQ ID NO: 749829 - DNA, 15 bp, Homo sapiens
gagctttggttacat

SEQ ID NO: 749830 - DNA, 15 bp, Homo sapiens
agctttggttacatc

SEQ ID NO: 749831 - DNA, 15 bp, Homo sapiens
gctttggttacatca

SEQ ID NO: 749832 - DNA, 15 bp, Homo sapiens
ctttggttacatcac

SEQ ID NO: 749833 - DNA, 15 bp, Homo sapiens
tttggttacatcacc

SEQ ID NO: 749834 - DNA, 15 bp, Homo sapiens
ttggttacatcacct

SEQ ID NO: 749835 - DNA, 15 bp, Homo sapiens
tggttacatcaccta

SEQ ID NO: 749836 - DNA, 15 bp, Homo sapiens
ggttacatcacctat

SEQ ID NO: 749837 - DNA, 15 bp, Homo sapiens
gttacatcacctata

SEQ ID NO: 749838 - DNA, 15 bp, Homo sapiens
ttacatcacctatac

SEQ ID NO: 749839 - DNA, 15 bp, Homo sapiens
tacatcacctatacc

SEQ ID NO: 749840 - DNA, 15 bp, Homo sapiens
acatcacctatacca

SEQ ID NO: 749841 - DNA, 15 bp, Homo sapiens
catcacctataccaa

SEQ ID NO: 749842 - DNA, 15 bp, Homo sapiens
atcacctataccaag

SEQ ID NO: 749843 - DNA, 15 bp, Homo sapiens
tcacctataccaaga

SEQ ID NO: 749844 - DNA, 15 bp, Homo sapiens
cacctataccaagag

SEQ ID NO: 749845 - DNA, 15 bp, Homo sapiens
acctataccaagagc

SEQ ID NO: 749846 - DNA, 15 bp, Homo sapiens
cctataccaagagca

SEQ ID NO: 749847 - DNA, 15 bp, Homo sapiens
ctataccaagagcat

SEQ ID NO: 749848 - DNA, 15 bp, Homo sapiens
tataccaagagcata

SEQ ID NO: 749849 - DNA, 15 bp, Homo sapiens
ataccaagagcatac

SEQ ID NO: 749850 - DNA, 15 bp, Homo sapiens
taccaagagcatact

SEQ ID NO: 749851 - DNA, 15 bp, Homo sapiens
accaagagcatactg

SEQ ID NO: 749852 - DNA, 15 bp, Homo sapiens
ccaagagcatactga

SEQ ID NO: 749853 - DNA, 15 bp, Homo sapiens
caagagcatactgat

SEQ ID NO: 749854 - DNA, 15 bp, Homo sapiens
aagagcatactgatg

SEQ ID NO: 749855 - DNA, 15 bp, Homo sapiens
agagcatactgatgc

SEQ ID NO: 749856 - DNA, 15 bp, Homo sapiens
gagcatactgatgct

SEQ ID NO: 749857 - DNA, 15 bp, Homo sapiens
agcatactgatgctt

SEQ ID NO: 749858 - DNA, 15 bp, Homo sapiens
gcatactgatgctta

SEQ ID NO: 749859 - DNA, 15 bp, Homo sapiens
catactgatgcttac

SEQ ID NO: 749860 - DNA, 15 bp, Homo sapiens
atactgatgcttact

SEQ ID NO: 749861 - DNA, 15 bp, Homo sapiens
tactgatgcttactt

SEQ ID NO: 749862 - DNA, 15 bp, Homo sapiens
actgatgcttacttt

SEQ ID NO: 749863 - DNA, 15 bp, Homo sapiens
ctgatgcttactttg

SEQ ID NO: 749864 - DNA, 15 bp, Homo sapiens
tgatgcttactttgt

SEQ ID NO: 749865 - DNA, 15 bp, Homo sapiens
gatgcttactttgta

SEQ ID NO: 749866 - DNA, 15 bp, Homo sapiens
atgcttactttgtag

SEQ ID NO: 749867 - DNA, 15 bp, Homo sapiens
tgcttactttgtagg

SEQ ID NO: 749868 - DNA, 15 bp, Homo sapiens
gcttactttgtaggg

SEQ ID NO: 749869 - DNA, 15 bp, Homo sapiens
cttactttgtagggt

SEQ ID NO: 749870 - DNA, 15 bp, Homo sapiens
ttactttgtagggtt

SEQ ID NO: 749871 - DNA, 15 bp, Homo sapiens
tactttgtagggttc

SEQ ID NO: 749872 - DNA, 15 bp, Homo sapiens
actttgtagggttct

SEQ ID NO: 749873 - DNA, 15 bp, Homo sapiens
ctttgtagggttctt

SEQ ID NO: 749874 - DNA, 15 bp, Homo sapiens
tttgtagggttctta

SEQ ID NO: 749875 - DNA, 15 bp, Homo sapiens
ttgtagggttcttat

SEQ ID NO: 749876 - DNA, 15 bp, Homo sapiens
tgtagggttcttata

SEQ ID NO: 749877 - DNA, 15 bp, Homo sapiens
gtagggttcttatag

SEQ ID NO: 749878 - DNA, 15 bp, Homo sapiens
tagggttcttatagg

SEQ ID NO: 749879 - DNA, 15 bp, Homo sapiens
agggttcttataggg

SEQ ID NO: 749880 - DNA, 15 bp, Homo sapiens
gggttcttataggga

SEQ ID NO: 749881 - DNA, 15 bp, Homo sapiens
ggttcttatagggag

SEQ ID NO: 749882 - DNA, 15 bp, Homo sapiens
gttcttatagggagc

SEQ ID NO: 749883 - DNA, 15 bp, Homo sapiens
ttcttatagggagca

SEQ ID NO: 749884 - DNA, 15 bp, Homo sapiens
tcttatagggagcag

SEQ ID NO: 749885 - DNA, 15 bp, Homo sapiens
cttatagggagcagg

SEQ ID NO: 749886 - DNA, 15 bp, Homo sapiens
ttatagggagcagga

SEQ ID NO: 749887 - DNA, 15 bp, Homo sapiens
tatagggagcaggaa

SEQ ID NO: 749888 - DNA, 15 bp, Homo sapiens
atagggagcaggaat

SEQ ID NO: 749889 - DNA, 15 bp, Homo sapiens
tagggagcaggaata

SEQ ID NO: 749890 - DNA, 15 bp, Homo sapiens
agggagcaggaataa

SEQ ID NO: 749891 - DNA, 15 bp, Homo sapiens
gggagcaggaataat

SEQ ID NO: 749892 - DNA, 15 bp, Homo sapiens
ggagcaggaataatg

SEQ ID NO: 749893 - DNA, 15 bp, Homo sapiens
gagcaggaataatgg

SEQ ID NO: 749894 - DNA, 15 bp, Homo sapiens
agcaggaataatggg

SEQ ID NO: 749895 - DNA, 15 bp, Homo sapiens
gcaggaataatgggc

SEQ ID NO: 749896 - DNA, 15 bp, Homo sapiens
caggaataatgggca

SEQ ID NO: 749897 - DNA, 15 bp, Homo sapiens
aggaataatgggcac

SEQ ID NO: 749898 - DNA, 15 bp, Homo sapiens
ggaataatgggcaca

SEQ ID NO: 749899 - DNA, 15 bp, Homo sapiens
gaataatgggcacat

SEQ ID NO: 749900 - DNA, 15 bp, Homo sapiens
aataatgggcacata

SEQ ID NO: 749901 - DNA, 15 bp, Homo sapiens
ataatgggcacatag

SEQ ID NO: 749902 - DNA, 15 bp, Homo sapiens
taatgggcacatagc

SEQ ID NO: 749903 - DNA, 15 bp, Homo sapiens
aatgggcacatagca

SEQ ID NO: 749904 - DNA, 15 bp, Homo sapiens
atgggcacatagcac

SEQ ID NO: 749905 - DNA, 15 bp, Homo sapiens
tgggcacatagcacc

SEQ ID NO: 749906 - DNA, 15 bp, Homo sapiens
gggcacatagcaccc

SEQ ID NO: 749907 - DNA, 15 bp, Homo sapiens
ggcacatagcaccct

SEQ ID NO: 749908 - DNA, 15 bp, Homo sapiens
gcacatagcaccctg

SEQ ID NO: 749909 - DNA, 15 bp, Homo sapiens
cacatagcaccctgc

SEQ ID NO: 749910 - DNA, 15 bp, Homo sapiens
acatagcaccctgca

SEQ ID NO: 749911 - DNA, 15 bp, Homo sapiens
catagcaccctgcaa

SEQ ID NO: 749912 - DNA, 15 bp, Homo sapiens
atagcaccctgcaaa

SEQ ID NO: 749913 - DNA, 15 bp, Homo sapiens
tagcaccctgcaaat

SEQ ID NO: 749914 - DNA, 15 bp, Homo sapiens
agcaccctgcaaatg

SEQ ID NO: 749915 - DNA, 15 bp, Homo sapiens
gcaccctgcaaatgc

SEQ ID NO: 749916 - DNA, 15 bp, Homo sapiens
caccctgcaaatgcc

SEQ ID NO: 749917 - DNA, 15 bp, Homo sapiens
accctgcaaatgcca

SEQ ID NO: 749918 - DNA, 15 bp, Homo sapiens
ccctgcaaatgccag

SEQ ID NO: 749919 - DNA, 15 bp, Homo sapiens
cctgcaaatgccaga

SEQ ID NO: 749920 - DNA, 15 bp, Homo sapiens
ctgcaaatgccagac

SEQ ID NO: 749921 - DNA, 15 bp, Homo sapiens
tgcaaatgccagaca

SEQ ID NO: 749922 - DNA, 15 bp, Homo sapiens
gcaaatgccagacac

SEQ ID NO: 749923 - DNA, 15 bp, Homo sapiens
caaatgccagacact

SEQ ID NO: 749924 - DNA, 15 bp, Homo sapiens
aaatgccagacactt

SEQ ID NO: 749925 - DNA, 15 bp, Homo sapiens
aatgccagacactta

SEQ ID NO: 749926 - DNA, 15 bp, Homo sapiens
atgccagacacttag

SEQ ID NO: 749927 - DNA, 15 bp, Homo sapiens
tgccagacacttagc

SEQ ID NO: 749928 - DNA, 15 bp, Homo sapiens
gccagacacttagca

SEQ ID NO: 749929 - DNA, 15 bp, Homo sapiens
ccagacacttagcag

SEQ ID NO: 749930 - DNA, 15 bp, Homo sapiens
cagacacttagcagg

SEQ ID NO: 749931 - DNA, 15 bp, Homo sapiens
agacacttagcaggc

SEQ ID NO: 749932 - DNA, 15 bp, Homo sapiens
gacacttagcaggcc

SEQ ID NO: 749933 - DNA, 15 bp, Homo sapiens
acacttagcaggcct

SEQ ID NO: 749934 - DNA, 15 bp, Homo sapiens
cacttagcaggcctc

SEQ ID NO: 749935 - DNA, 15 bp, Homo sapiens
acttagcaggcctct

SEQ ID NO: 749936 - DNA, 15 bp, Homo sapiens
cttagcaggcctctt

SEQ ID NO: 749937 - DNA, 15 bp, Homo sapiens
ttagcaggcctcttg

SEQ ID NO: 749938 - DNA, 15 bp, Homo sapiens
tagcaggcctcttgt

SEQ ID NO: 749939 - DNA, 15 bp, Homo sapiens
agcaggcctcttgta

SEQ ID NO: 749940 - DNA, 15 bp, Homo sapiens
gcaggcctcttgtaa

SEQ ID NO: 749941 - DNA, 15 bp, Homo sapiens
caggcctcttgtaag

SEQ ID NO: 749942 - DNA, 15 bp, Homo sapiens
aggcctcttgtaagt

SEQ ID NO: 749943 - DNA, 15 bp, Homo sapiens
ggcctcttgtaagtg

SEQ ID NO: 749944 - DNA, 15 bp, Homo sapiens
gcctcttgtaagtgg

SEQ ID NO: 749945 - DNA, 15 bp, Homo sapiens
cctcttgtaagtggt

SEQ ID NO: 749946 - DNA, 15 bp, Homo sapiens
ctcttgtaagtggta

SEQ ID NO: 749947 - DNA, 15 bp, Homo sapiens
tcttgtaagtggtaa

SEQ ID NO: 749948 - DNA, 15 bp, Homo sapiens
cttgtaagtggtaac

SEQ ID NO: 749949 - DNA, 15 bp, Homo sapiens
ttgtaagtggtaact

SEQ ID NO: 749950 - DNA, 15 bp, Homo sapiens
tgtaagtggtaacta

SEQ ID NO: 749951 - DNA, 15 bp, Homo sapiens
gtaagtggtaactat

SEQ ID NO: 749952 - DNA, 15 bp, Homo sapiens
taagtggtaactatc

SEQ ID NO: 749953 - DNA, 15 bp, Homo sapiens
aagtggtaactatca

SEQ ID NO: 749954 - DNA, 15 bp, Homo sapiens
agtggtaactatcat

SEQ ID NO: 749955 - DNA, 15 bp, Homo sapiens
gtggtaactatcata

SEQ ID NO: 749956 - DNA, 15 bp, Homo sapiens
tggtaactatcatag

SEQ ID NO: 749957 - DNA, 15 bp, Homo sapiens
ggtaactatcatagc

SEQ ID NO: 749958 - DNA, 15 bp, Homo sapiens
gtaactatcatagct

SEQ ID NO: 749959 - DNA, 15 bp, Homo sapiens
taactatcatagctt

SEQ ID NO: 749960 - DNA, 15 bp, Homo sapiens
aactatcatagcttc

SEQ ID NO: 749961 - DNA, 15 bp, Homo sapiens
actatcatagcttca

SEQ ID NO: 749962 - DNA, 15 bp, Homo sapiens
ctatcatagcttcat

SEQ ID NO: 749963 - DNA, 15 bp, Homo sapiens
tatcatagcttcatg

SEQ ID NO: 749964 - DNA, 15 bp, Homo sapiens
atcatagcttcatga

SEQ ID NO: 749965 - DNA, 15 bp, Homo sapiens
tcatagcttcatgaa

SEQ ID NO: 749966 - DNA, 15 bp, Homo sapiens
catagcttcatgaag

SEQ ID NO: 749967 - DNA, 15 bp, Homo sapiens
atagcttcatgaagt

SEQ ID NO: 749968 - DNA, 15 bp, Homo sapiens
tagcttcatgaagtg

SEQ ID NO: 749969 - DNA, 15 bp, Homo sapiens
agcttcatgaagtgc

SEQ ID NO: 749970 - DNA, 15 bp, Homo sapiens
gcttcatgaagtgct

SEQ ID NO: 749971 - DNA, 15 bp, Homo sapiens
cttcatgaagtgctg

SEQ ID NO: 749972 - DNA, 15 bp, Homo sapiens
ttcatgaagtgctga

SEQ ID NO: 749973 - DNA, 15 bp, Homo sapiens
tcatgaagtgctgag

SEQ ID NO: 749974 - DNA, 15 bp, Homo sapiens
catgaagtgctgagt

SEQ ID NO: 749975 - DNA, 15 bp, Homo sapiens
atgaagtgctgagtt

SEQ ID NO: 749976 - DNA, 15 bp, Homo sapiens
tgaagtgctgagttt

SEQ ID NO: 749977 - DNA, 15 bp, Homo sapiens
gaagtgctgagttta

SEQ ID NO: 749978 - DNA, 15 bp, Homo sapiens
aagtgctgagtttat

SEQ ID NO: 749979 - DNA, 15 bp, Homo sapiens
agtgctgagtttatt

SEQ ID NO: 749980 - DNA, 15 bp, Homo sapiens
gtgctgagtttattt

SEQ ID NO: 749981 - DNA, 15 bp, Homo sapiens
tgctgagtttatttt

SEQ ID NO: 749982 - DNA, 15 bp, Homo sapiens
gctgagtttattttc

SEQ ID NO: 749983 - DNA, 15 bp, Homo sapiens
ctgagtttattttcc

SEQ ID NO: 749984 - DNA, 15 bp, Homo sapiens
tgagtttattttccc

SEQ ID NO: 749985 - DNA, 15 bp, Homo sapiens
gagtttattttccct

SEQ ID NO: 749986 - DNA, 15 bp, Homo sapiens
agtttattttccctt

SEQ ID NO: 749987 - DNA, 15 bp, Homo sapiens
gtttattttcccttt

SEQ ID NO: 749988 - DNA, 15 bp, Homo sapiens
tttattttccctttg

SEQ ID NO: 749989 - DNA, 15 bp, Homo sapiens
ttattttccctttga

SEQ ID NO: 749990 - DNA, 15 bp, Homo sapiens
tattttccctttgat

SEQ ID NO: 749991 - DNA, 15 bp, Homo sapiens
attttccctttgatt

SEQ ID NO: 749992 - DNA, 15 bp, Homo sapiens
ttttccctttgattc

SEQ ID NO: 749993 - DNA, 15 bp, Homo sapiens
tttccctttgattca

SEQ ID NO: 749994 - DNA, 15 bp, Homo sapiens
ttccctttgattcat

SEQ ID NO: 749995 - DNA, 15 bp, Homo sapiens
tccctttgattcatt

SEQ ID NO: 749996 - DNA, 15 bp, Homo sapiens
ccctttgattcattg

SEQ ID NO: 749997 - DNA, 15 bp, Homo sapiens
cctttgattcattga

SEQ ID NO: 749998 - DNA, 15 bp, Homo sapiens
ctttgattcattgaa

SEQ ID NO: 749999 - DNA, 15 bp, Homo sapiens
tttgattcattgaac

SEQ ID NO: 750000 - DNA, 15 bp, Homo sapiens
ttgattcattgaact

SEQ ID NO: 750001 - DNA, 15 bp, Homo sapiens
tgattcattgaactt

SEQ ID NO: 750002 - DNA, 15 bp, Homo sapiens
gattcattgaactta

SEQ ID NO: 750003 - DNA, 15 bp, Homo sapiens
attcattgaacttat

SEQ ID NO: 750004 - DNA, 15 bp, Homo sapiens
ttcattgaacttata

SEQ ID NO: 750005 - DNA, 15 bp, Homo sapiens
tcattgaacttatag

SEQ ID NO: 750006 - DNA, 15 bp, Homo sapiens
cattgaacttatagc

SEQ ID NO: 750007 - DNA, 15 bp, Homo sapiens
attgaacttatagcc

SEQ ID NO: 750008 - DNA, 15 bp, Homo sapiens
ttgaacttatagccc

SEQ ID NO: 750009 - DNA, 15 bp, Homo sapiens
tgaacttatagcccc

SEQ ID NO: 750010 - DNA, 15 bp, Homo sapiens
gaacttatagcccct

SEQ ID NO: 750011 - DNA, 15 bp, Homo sapiens
aacttatagcccctg

SEQ ID NO: 750012 - DNA, 15 bp, Homo sapiens
acttatagcccctga

SEQ ID NO: 750013 - DNA, 15 bp, Homo sapiens
cttatagcccctgaa

SEQ ID NO: 750014 - DNA, 15 bp, Homo sapiens
ttatagcccctgaag

SEQ ID NO: 750015 - DNA, 15 bp, Homo sapiens
tatagcccctgaagg

SEQ ID NO: 750016 - DNA, 15 bp, Homo sapiens
atagcccctgaaggg

SEQ ID NO: 750017 - DNA, 15 bp, Homo sapiens
tagcccctgaagggc

SEQ ID NO: 750018 - DNA, 15 bp, Homo sapiens
agcccctgaagggcg

SEQ ID NO: 750019 - DNA, 15 bp, Homo sapiens
gcccctgaagggcgc

SEQ ID NO: 750020 - DNA, 15 bp, Homo sapiens
cccctgaagggcgca

SEQ ID NO: 750021 - DNA, 15 bp, Homo sapiens
ccctgaagggcgcag

SEQ ID NO: 750022 - DNA, 15 bp, Homo sapiens
cctgaagggcgcaga

SEQ ID NO: 750023 - DNA, 15 bp, Homo sapiens
ctgaagggcgcagac

SEQ ID NO: 750024 - DNA, 15 bp, Homo sapiens
tgaagggcgcagact

SEQ ID NO: 750025 - DNA, 15 bp, Homo sapiens
gaagggcgcagacta

SEQ ID NO: 750026 - DNA, 15 bp, Homo sapiens
aagggcgcagactat

SEQ ID NO: 750027 - DNA, 15 bp, Homo sapiens
agggcgcagactata

SEQ ID NO: 750028 - DNA, 15 bp, Homo sapiens
gggcgcagactataa

SEQ ID NO: 750029 - DNA, 15 bp, Homo sapiens
ggcgcagactataac

SEQ ID NO: 750030 - DNA, 15 bp, Homo sapiens
gcgcagactataaca

SEQ ID NO: 750031 - DNA, 15 bp, Homo sapiens
cgcagactataacaa

SEQ ID NO: 750032 - DNA, 15 bp, Homo sapiens
gcagactataacaaa

SEQ ID NO: 750033 - DNA, 15 bp, Homo sapiens
cagactataacaaat

SEQ ID NO: 750034 - DNA, 15 bp, Homo sapiens
agactataacaaata

SEQ ID NO: 750035 - DNA, 15 bp, Homo sapiens
gactataacaaataa

SEQ ID NO: 750036 - DNA, 15 bp, Homo sapiens
actataacaaataaa

SEQ ID NO: 750037 - DNA, 15 bp, Homo sapiens
ctataacaaataaag

SEQ ID NO: 750038 - DNA, 15 bp, Homo sapiens
tataacaaataaagt

SEQ ID NO: 750039 - DNA, 15 bp, Homo sapiens
ataacaaataaagtt

SEQ ID NO: 750040 - DNA, 15 bp, Homo sapiens
taacaaataaagttt

SEQ ID NO: 750041 - DNA, 15 bp, Homo sapiens
aacaaataaagtttt

SEQ ID NO: 750042 - DNA, 15 bp, Homo sapiens
acaaataaagttttt

SEQ ID NO: 750043 - DNA, 15 bp, Homo sapiens
caaataaagtttttg

SEQ ID NO: 750044 - DNA, 15 bp, Homo sapiens
aaataaagtttttga

SEQ ID NO: 750045 - DNA, 15 bp, Homo sapiens
aataaagtttttgag

SEQ ID NO: 750046 - DNA, 15 bp, Homo sapiens
ataaagtttttgagc

SEQ ID NO: 750047 - DNA, 15 bp, Homo sapiens
taaagtttttgagcc

SEQ ID NO: 750048 - DNA, 15 bp, Homo sapiens
aaagtttttgagcca

SEQ ID NO: 750049 - DNA, 15 bp, Homo sapiens
aagtttttgagccaa

SEQ ID NO: 750050 - DNA, 15 bp, Homo sapiens
agtttttgagccaaa

SEQ ID NO: 750051 - DNA, 15 bp, Homo sapiens
gtttttgagccaaaa

SEQ ID NO: 750052 - DNA, 15 bp, Homo sapiens
tttttgagccaaaag

SEQ ID NO: 750053 - DNA, 15 bp, Homo sapiens
ttttgagccaaaagg

SEQ ID NO: 750054 - DNA, 15 bp, Homo sapiens
tttgagccaaaagga

SEQ ID NO: 750055 - DNA, 15 bp, Homo sapiens
ttgagccaaaaggag

SEQ ID NO: 750056 - DNA, 15 bp, Homo sapiens
tgagccaaaaggagg

SEQ ID NO: 750057 - DNA, 15 bp, Homo sapiens
gagccaaaaggaggc

SEQ ID NO: 750058 - DNA, 15 bp, Homo sapiens
agccaaaaggaggct

SEQ ID NO: 750059 - DNA, 15 bp, Homo sapiens
gccaaaaggaggctt

SEQ ID NO: 750060 - DNA, 15 bp, Homo sapiens
ccaaaaggaggcttt

SEQ ID NO: 750061 - DNA, 15 bp, Homo sapiens
caaaaggaggcttta

SEQ ID NO: 750062 - DNA, 15 bp, Homo sapiens
aaaaggaggctttag

SEQ ID NO: 750063 - DNA, 15 bp, Homo sapiens
aaaggaggctttaga

SEQ ID NO: 750064 - DNA, 15 bp, Homo sapiens
aaggaggctttagat

SEQ ID NO: 750065 - DNA, 15 bp, Homo sapiens
aggaggctttagatc

SEQ ID NO: 750066 - DNA, 15 bp, Homo sapiens
ggaggctttagatcc

SEQ ID NO: 750067 - DNA, 15 bp, Homo sapiens
gaggctttagatcct

SEQ ID NO: 750068 - DNA, 15 bp, Homo sapiens
aggctttagatcctg

SEQ ID NO: 750069 - DNA, 15 bp, Homo sapiens
ggctttagatcctga

SEQ ID NO: 750070 - DNA, 15 bp, Homo sapiens
gctttagatcctgaa

SEQ ID NO: 750071 - DNA, 15 bp, Homo sapiens
ctttagatcctgaag

SEQ ID NO: 750072 - DNA, 15 bp, Homo sapiens
tttagatcctgaagt

SEQ ID NO: 750073 - DNA, 15 bp, Homo sapiens
ttagatcctgaagta

SEQ ID NO: 750074 - DNA, 15 bp, Homo sapiens
tagatcctgaagtat

SEQ ID NO: 750075 - DNA, 15 bp, Homo sapiens
agatcctgaagtata

SEQ ID NO: 750076 - DNA, 15 bp, Homo sapiens
gatcctgaagtatac

SEQ ID NO: 750077 - DNA, 15 bp, Homo sapiens
atcctgaagtatact

SEQ ID NO: 750078 - DNA, 15 bp, Homo sapiens
tcctgaagtatactg

SEQ ID NO: 750079 - DNA, 15 bp, Homo sapiens
cctgaagtatactgt

SEQ ID NO: 750080 - DNA, 15 bp, Homo sapiens
ctgaagtatactgtc

SEQ ID NO: 750081 - DNA, 15 bp, Homo sapiens
tgaagtatactgtca

SEQ ID NO: 750082 - DNA, 15 bp, Homo sapiens
gaagtatactgtcat

SEQ ID NO: 750083 - DNA, 15 bp, Homo sapiens
aagtatactgtcata

SEQ ID NO: 750084 - DNA, 15 bp, Homo sapiens
agtatactgtcatag

SEQ ID NO: 750085 - DNA, 15 bp, Homo sapiens
gtatactgtcataga

SEQ ID NO: 750086 - DNA, 15 bp, Homo sapiens
tatactgtcatagat

SEQ ID NO: 750087 - DNA, 15 bp, Homo sapiens
atactgtcatagatc

SEQ ID NO: 750088 - DNA, 15 bp, Homo sapiens
tactgtcatagatca

SEQ ID NO: 750089 - DNA, 15 bp, Homo sapiens
actgtcatagatcaa

SEQ ID NO: 750090 - DNA, 15 bp, Homo sapiens
ctgtcatagatcaaa

SEQ ID NO: 750091 - DNA, 15 bp, Homo sapiens
tgtcatagatcaaaa

SEQ ID NO: 750092 - DNA, 15 bp, Homo sapiens
gtcatagatcaaaaa

SEQ ID NO: 750093 - DNA, 15 bp, Homo sapiens
tcatagatcaaaaaa

SEQ ID NO: 750094 - DNA, 15 bp, Homo sapiens
catagatcaaaaaac

SEQ ID NO: 750095 - DNA, 15 bp, Homo sapiens
atagatcaaaaaacc

SEQ ID NO: 750096 - DNA, 15 bp, Homo sapiens
tagatcaaaaaacca

SEQ ID NO: 750097 - DNA, 15 bp, Homo sapiens
agatcaaaaaaccat

SEQ ID NO: 750098 - DNA, 15 bp, Homo sapiens
gatcaaaaaaccatt

SEQ ID NO: 750099 - DNA, 15 bp, Homo sapiens
atcaaaaaaccattt

SEQ ID NO: 750100 - DNA, 15 bp, Homo sapiens
tcaaaaaaccattta

SEQ ID NO: 750101 - DNA, 15 bp, Homo sapiens
caaaaaaccatttag

SEQ ID NO: 750102 - DNA, 15 bp, Homo sapiens
aaaaaaccatttaga

SEQ ID NO: 750103 - DNA, 15 bp, Homo sapiens
aaaaaccatttagag

SEQ ID NO: 750104 - DNA, 15 bp, Homo sapiens
aaaaccatttagagt

SEQ ID NO: 750105 - DNA, 15 bp, Homo sapiens
aaaccatttagagtc

SEQ ID NO: 750106 - DNA, 15 bp, Homo sapiens
aaccatttagagtca

SEQ ID NO: 750107 - DNA, 15 bp, Homo sapiens
accatttagagtcag

SEQ ID NO: 750108 - DNA, 15 bp, Homo sapiens
ccatttagagtcaga

SEQ ID NO: 750109 - DNA, 15 bp, Homo sapiens
catttagagtcagac

SEQ ID NO: 750110 - DNA, 15 bp, Homo sapiens
atttagagtcagact

SEQ ID NO: 750111 - DNA, 15 bp, Homo sapiens
tttagagtcagactg

SEQ ID NO: 750112 - DNA, 15 bp, Homo sapiens
ttagagtcagactga

SEQ ID NO: 750113 - DNA, 15 bp, Homo sapiens
tagagtcagactgag

SEQ ID NO: 750114 - DNA, 15 bp, Homo sapiens
agagtcagactgaga

SEQ ID NO: 750115 - DNA, 15 bp, Homo sapiens
gagtcagactgagac

SEQ ID NO: 750116 - DNA, 15 bp, Homo sapiens
agtcagactgagaca

SEQ ID NO: 750117 - DNA, 15 bp, Homo sapiens
gtcagactgagacat

SEQ ID NO: 750118 - DNA, 15 bp, Homo sapiens
tcagactgagacatg

SEQ ID NO: 750119 - DNA, 15 bp, Homo sapiens
cagactgagacatgg

SEQ ID NO: 750120 - DNA, 15 bp, Homo sapiens
agactgagacatggg

SEQ ID NO: 750121 - DNA, 15 bp, Homo sapiens
gactgagacatgggc

SEQ ID NO: 750122 - DNA, 15 bp, Homo sapiens
actgagacatgggct

SEQ ID NO: 750123 - DNA, 15 bp, Homo sapiens
ctgagacatgggctt

SEQ ID NO: 750124 - DNA, 15 bp, Homo sapiens
tgagacatgggctta

SEQ ID NO: 750125 - DNA, 15 bp, Homo sapiens
gagacatgggcttat

SEQ ID NO: 750126 - DNA, 15 bp, Homo sapiens
agacatgggcttatg

SEQ ID NO: 750127 - DNA, 15 bp, Homo sapiens
gacatgggcttatgg

SEQ ID NO: 750128 - DNA, 15 bp, Homo sapiens
acatgggcttatggc

SEQ ID NO: 750129 - DNA, 15 bp, Homo sapiens
catgggcttatggct

SEQ ID NO: 750130 - DNA, 15 bp, Homo sapiens
atgggcttatggctc

SEQ ID NO: 750131 - DNA, 15 bp, Homo sapiens
tgggcttatggctct

SEQ ID NO: 750132 - DNA, 15 bp, Homo sapiens
gggcttatggctctt

SEQ ID NO: 750133 - DNA, 15 bp, Homo sapiens
ggcttatggctcttg

SEQ ID NO: 750134 - DNA, 15 bp, Homo sapiens
gcttatggctcttgg

SEQ ID NO: 750135 - DNA, 15 bp, Homo sapiens
cttatggctcttggc

SEQ ID NO: 750136 - DNA, 15 bp, Homo sapiens
ttatggctcttggct

SEQ ID NO: 750137 - DNA, 15 bp, Homo sapiens
tatggctcttggctg

SEQ ID NO: 750138 - DNA, 15 bp, Homo sapiens
atggctcttggctgt

SEQ ID NO: 750139 - DNA, 15 bp, Homo sapiens
tggctcttggctgtt

SEQ ID NO: 750140 - DNA, 15 bp, Homo sapiens
ggctcttggctgttg

SEQ ID NO: 750141 - DNA, 15 bp, Homo sapiens
gctcttggctgttgc

SEQ ID NO: 750142 - DNA, 15 bp, Homo sapiens
ctcttggctgttgca

SEQ ID NO: 750143 - DNA, 15 bp, Homo sapiens
tcttggctgttgcaa

SEQ ID NO: 750144 - DNA, 15 bp, Homo sapiens
cttggctgttgcaag

SEQ ID NO: 750145 - DNA, 15 bp, Homo sapiens
ttggctgttgcaagg

SEQ ID NO: 750146 - DNA, 15 bp, Homo sapiens
tggctgttgcaaggc

SEQ ID NO: 750147 - DNA, 15 bp, Homo sapiens
ggctgttgcaaggct

SEQ ID NO: 750148 - DNA, 15 bp, Homo sapiens
gctgttgcaaggctg

SEQ ID NO: 750149 - DNA, 15 bp, Homo sapiens
ctgttgcaaggctgg

SEQ ID NO: 750150 - DNA, 15 bp, Homo sapiens
tgttgcaaggctgga

SEQ ID NO: 750151 - DNA, 15 bp, Homo sapiens
gttgcaaggctggaa

SEQ ID NO: 750152 - DNA, 15 bp, Homo sapiens
ttgcaaggctggaaa

SEQ ID NO: 750153 - DNA, 15 bp, Homo sapiens
tgcaaggctggaaag

SEQ ID NO: 750154 - DNA, 15 bp, Homo sapiens
gcaaggctggaaagt

SEQ ID NO: 750155 - DNA, 15 bp, Homo sapiens
caaggctggaaagtt

SEQ ID NO: 750156 - DNA, 15 bp, Homo sapiens
aaggctggaaagtta

SEQ ID NO: 750157 - DNA, 15 bp, Homo sapiens
aggctggaaagttag

SEQ ID NO: 750158 - DNA, 15 bp, Homo sapiens
ggctggaaagttagg

SEQ ID NO: 750159 - DNA, 15 bp, Homo sapiens
gctggaaagttaggg

SEQ ID NO: 750160 - DNA, 15 bp, Homo sapiens
ctggaaagttagggc

SEQ ID NO: 750161 - DNA, 15 bp, Homo sapiens
tggaaagttagggca

SEQ ID NO: 750162 - DNA, 15 bp, Homo sapiens
ggaaagttagggcag

SEQ ID NO: 750163 - DNA, 15 bp, Homo sapiens
gaaagttagggcagg

SEQ ID NO: 750164 - DNA, 15 bp, Homo sapiens
aaagttagggcaggg

SEQ ID NO: 750165 - DNA, 15 bp, Homo sapiens
aagttagggcagggc

SEQ ID NO: 750166 - DNA, 15 bp, Homo sapiens
agttagggcagggca

SEQ ID NO: 750167 - DNA, 15 bp, Homo sapiens
gttagggcagggcag

SEQ ID NO: 750168 - DNA, 15 bp, Homo sapiens
ttagggcagggcagc

SEQ ID NO: 750169 - DNA, 15 bp, Homo sapiens
tagggcagggcagca

SEQ ID NO: 750170 - DNA, 15 bp, Homo sapiens
agggcagggcagcag

SEQ ID NO: 750171 - DNA, 15 bp, Homo sapiens
gggcagggcagcaga

SEQ ID NO: 750172 - DNA, 15 bp, Homo sapiens
ggcagggcagcagag

SEQ ID NO: 750173 - DNA, 15 bp, Homo sapiens
gcagggcagcagagg

SEQ ID NO: 750174 - DNA, 15 bp, Homo sapiens
cagggcagcagaggt

SEQ ID NO: 750175 - DNA, 15 bp, Homo sapiens
agggcagcagaggta

SEQ ID NO: 750176 - DNA, 15 bp, Homo sapiens
gggcagcagaggtag

SEQ ID NO: 750177 - DNA, 15 bp, Homo sapiens
ggcagcagaggtagg

SEQ ID NO: 750178 - DNA, 15 bp, Homo sapiens
gcagcagaggtaggc

SEQ ID NO: 750179 - DNA, 15 bp, Homo sapiens
cagcagaggtaggct

SEQ ID NO: 750180 - DNA, 15 bp, Homo sapiens
agcagaggtaggctt

SEQ ID NO: 750181 - DNA, 15 bp, Homo sapiens
gcagaggtaggcttc

SEQ ID NO: 750182 - DNA, 15 bp, Homo sapiens
cagaggtaggcttca

SEQ ID NO: 750183 - DNA, 15 bp, Homo sapiens
agaggtaggcttcac

SEQ ID NO: 750184 - DNA, 15 bp, Homo sapiens
gaggtaggcttcacg

SEQ ID NO: 750185 - DNA, 15 bp, Homo sapiens
aggtaggcttcacgg

SEQ ID NO: 750186 - DNA, 15 bp, Homo sapiens
ggtaggcttcacgga

SEQ ID NO: 750187 - DNA, 15 bp, Homo sapiens
gtaggcttcacggat

SEQ ID NO: 750188 - DNA, 15 bp, Homo sapiens
taggcttcacggatg

SEQ ID NO: 750189 - DNA, 15 bp, Homo sapiens
aggcttcacggatgg

SEQ ID NO: 750190 - DNA, 15 bp, Homo sapiens
ggcttcacggatggg

SEQ ID NO: 750191 - DNA, 15 bp, Homo sapiens
gcttcacggatgggg

SEQ ID NO: 750192 - DNA, 15 bp, Homo sapiens
cttcacggatggggt

SEQ ID NO: 750193 - DNA, 15 bp, Homo sapiens
ttcacggatggggtc

SEQ ID NO: 750194 - DNA, 15 bp, Homo sapiens
tcacggatggggtcc

SEQ ID NO: 750195 - DNA, 15 bp, Homo sapiens
cacggatggggtcct

SEQ ID NO: 750196 - DNA, 15 bp, Homo sapiens
acggatggggtcctg

SEQ ID NO: 750197 - DNA, 15 bp, Homo sapiens
cggatggggtcctgg

SEQ ID NO: 750198 - DNA, 15 bp, Homo sapiens
ggatggggtcctggc

SEQ ID NO: 750199 - DNA, 15 bp, Homo sapiens
gatggggtcctggca

SEQ ID NO: 750200 - DNA, 15 bp, Homo sapiens
atggggtcctggcag

SEQ ID NO: 750201 - DNA, 15 bp, Homo sapiens
tggggtcctggcagg

SEQ ID NO: 750202 - DNA, 15 bp, Homo sapiens
ggggtcctggcagga

SEQ ID NO: 750203 - DNA, 15 bp, Homo sapiens
gggtcctggcaggat

SEQ ID NO: 750204 - DNA, 15 bp, Homo sapiens
ggtcctggcaggatg

SEQ ID NO: 750205 - DNA, 15 bp, Homo sapiens
gtcctggcaggatgg

SEQ ID NO: 750206 - DNA, 15 bp, Homo sapiens
tcctggcaggatggt

SEQ ID NO: 750207 - DNA, 15 bp, Homo sapiens
cctggcaggatggtt

SEQ ID NO: 750208 - DNA, 15 bp, Homo sapiens
ctggcaggatggtta

SEQ ID NO: 750209 - DNA, 15 bp, Homo sapiens
tggcaggatggttac

SEQ ID NO: 750210 - DNA, 15 bp, Homo sapiens
ggcaggatggttaca

SEQ ID NO: 750211 - DNA, 15 bp, Homo sapiens
gcaggatggttacag

SEQ ID NO: 750212 - DNA, 15 bp, Homo sapiens
caggatggttacagt

SEQ ID NO: 750213 - DNA, 15 bp, Homo sapiens
aggatggttacagtt

SEQ ID NO: 750214 - DNA, 15 bp, Homo sapiens
ggatggttacagttt

SEQ ID NO: 750215 - DNA, 15 bp, Homo sapiens
gatggttacagtttt

SEQ ID NO: 750216 - DNA, 15 bp, Homo sapiens
atggttacagttttg

SEQ ID NO: 750217 - DNA, 15 bp, Homo sapiens
tggttacagttttga

SEQ ID NO: 750218 - DNA, 15 bp, Homo sapiens
ggttacagttttgat

SEQ ID NO: 750219 - DNA, 15 bp, Homo sapiens
gttacagttttgatg

SEQ ID NO: 750220 - DNA, 15 bp, Homo sapiens
ttacagttttgatgg

SEQ ID NO: 750221 - DNA, 15 bp, Homo sapiens
tacagttttgatggt

SEQ ID NO: 750222 - DNA, 15 bp, Homo sapiens
acagttttgatggtg

SEQ ID NO: 750223 - DNA, 15 bp, Homo sapiens
cagttttgatggtgg

SEQ ID NO: 750224 - DNA, 15 bp, Homo sapiens
agttttgatggtggg

SEQ ID NO: 750225 - DNA, 15 bp, Homo sapiens
gttttgatggtgggg

SEQ ID NO: 750226 - DNA, 15 bp, Homo sapiens
ttttgatggtggggt

SEQ ID NO: 750227 - DNA, 15 bp, Homo sapiens
tttgatggtggggta

SEQ ID NO: 750228 - DNA, 15 bp, Homo sapiens
ttgatggtggggtat

SEQ ID NO: 750229 - DNA, 15 bp, Homo sapiens
tgatggtggggtatc

SEQ ID NO: 750230 - DNA, 15 bp, Homo sapiens
gatggtggggtatca

SEQ ID NO: 750231 - DNA, 15 bp, Homo sapiens
atggtggggtatcag

SEQ ID NO: 750232 - DNA, 15 bp, Homo sapiens
tggtggggtatcagt

SEQ ID NO: 750233 - DNA, 15 bp, Homo sapiens
ggtggggtatcagtg

SEQ ID NO: 750234 - DNA, 15 bp, Homo sapiens
gtggggtatcagtgg

SEQ ID NO: 750235 - DNA, 15 bp, Homo sapiens
tggggtatcagtgga

SEQ ID NO: 750236 - DNA, 15 bp, Homo sapiens
ggggtatcagtggac

SEQ ID NO: 750237 - DNA, 15 bp, Homo sapiens
gggtatcagtggacg

SEQ ID NO: 750238 - DNA, 15 bp, Homo sapiens
ggtatcagtggacga

SEQ ID NO: 750239 - DNA, 15 bp, Homo sapiens
gtatcagtggacgaa

SEQ ID NO: 750240 - DNA, 15 bp, Homo sapiens
tatcagtggacgaac

SEQ ID NO: 750241 - DNA, 15 bp, Homo sapiens
atcagtggacgaaca

SEQ ID NO: 750242 - DNA, 15 bp, Homo sapiens
tcagtggacgaacat

SEQ ID NO: 750243 - DNA, 15 bp, Homo sapiens
cagtggacgaacatc

SEQ ID NO: 750244 - DNA, 15 bp, Homo sapiens
agtggacgaacatcg

SEQ ID NO: 750245 - DNA, 15 bp, Homo sapiens
gtggacgaacatcga

SEQ ID NO: 750246 - DNA, 15 bp, Homo sapiens
tggacgaacatcgac

SEQ ID NO: 750247 - DNA, 15 bp, Homo sapiens
ggacgaacatcgaca

SEQ ID NO: 750248 - DNA, 15 bp, Homo sapiens
gacgaacatcgacag

SEQ ID NO: 750249 - DNA, 15 bp, Homo sapiens
acgaacatcgacagt

SEQ ID NO: 750250 - DNA, 15 bp, Homo sapiens
cgaacatcgacagta

SEQ ID NO: 750251 - DNA, 15 bp, Homo sapiens
gaacatcgacagtat

SEQ ID NO: 750252 - DNA, 15 bp, Homo sapiens
aacatcgacagtatg

SEQ ID NO: 750253 - DNA, 15 bp, Homo sapiens
acatcgacagtatgg

SEQ ID NO: 750254 - DNA, 15 bp, Homo sapiens
catcgacagtatggg

SEQ ID NO: 750255 - DNA, 15 bp, Homo sapiens
atcgacagtatgggg

SEQ ID NO: 750256 - DNA, 15 bp, Homo sapiens
tcgacagtatggggg

SEQ ID NO: 750257 - DNA, 15 bp, Homo sapiens
cgacagtatggggga

SEQ ID NO: 750258 - DNA, 15 bp, Homo sapiens
gacagtatgggggac

SEQ ID NO: 750259 - DNA, 15 bp, Homo sapiens
acagtatgggggacc

SEQ ID NO: 750260 - DNA, 15 bp, Homo sapiens
cagtatgggggacca

SEQ ID NO: 750261 - DNA, 15 bp, Homo sapiens
agtatgggggaccag

SEQ ID NO: 750262 - DNA, 15 bp, Homo sapiens
gtatgggggaccagg

SEQ ID NO: 750263 - DNA, 15 bp, Homo sapiens
tatgggggaccagga

SEQ ID NO: 750264 - DNA, 15 bp, Homo sapiens
atgggggaccaggag

SEQ ID NO: 750265 - DNA, 15 bp, Homo sapiens
tgggggaccaggagc

SEQ ID NO: 750266 - DNA, 15 bp, Homo sapiens
gggggaccaggagct

SEQ ID NO: 750267 - DNA, 15 bp, Homo sapiens
ggggaccaggagctg

SEQ ID NO: 750268 - DNA, 15 bp, Homo sapiens
gggaccaggagctgc

SEQ ID NO: 750269 - DNA, 15 bp, Homo sapiens
ggaccaggagctgct

SEQ ID NO: 750270 - DNA, 15 bp, Homo sapiens
gaccaggagctgctg

SEQ ID NO: 750271 - DNA, 15 bp, Homo sapiens
accaggagctgctgg

SEQ ID NO: 750272 - DNA, 15 bp, Homo sapiens
ccaggagctgctggg

SEQ ID NO: 750273 - DNA, 15 bp, Homo sapiens
caggagctgctgggc

SEQ ID NO: 750274 - DNA, 15 bp, Homo sapiens
aggagctgctgggct

SEQ ID NO: 750275 - DNA, 15 bp, Homo sapiens
ggagctgctgggctg

SEQ ID NO: 750276 - DNA, 15 bp, Homo sapiens
gagctgctgggctgg

SEQ ID NO: 750277 - DNA, 15 bp, Homo sapiens
agctgctgggctggc

SEQ ID NO: 750278 - DNA, 15 bp, Homo sapiens
gctgctgggctggca

SEQ ID NO: 750279 - DNA, 15 bp, Homo sapiens
ctgctgggctggcag

SEQ ID NO: 750280 - DNA, 15 bp, Homo sapiens
tgctgggctggcaga

SEQ ID NO: 750281 - DNA, 15 bp, Homo sapiens
gctgggctggcagaa

SEQ ID NO: 750282 - DNA, 15 bp, Homo sapiens
ctgggctggcagaag

SEQ ID NO: 750283 - DNA, 15 bp, Homo sapiens
tgggctggcagaagg

SEQ ID NO: 750284 - DNA, 15 bp, Homo sapiens
gggctggcagaaggg

SEQ ID NO: 750285 - DNA, 15 bp, Homo sapiens
ggctggcagaaggga

SEQ ID NO: 750286 - DNA, 15 bp, Homo sapiens
gctggcagaagggaa

SEQ ID NO: 750287 - DNA, 15 bp, Homo sapiens
ctggcagaagggaaa

SEQ ID NO: 750288 - DNA, 15 bp, Homo sapiens
tggcagaagggaaac

SEQ ID NO: 750289 - DNA, 15 bp, Homo sapiens
ggcagaagggaaaca

SEQ ID NO: 750290 - DNA, 15 bp, Homo sapiens
gcagaagggaaacac

SEQ ID NO: 750291 - DNA, 15 bp, Homo sapiens
cagaagggaaacact

SEQ ID NO: 750292 - DNA, 15 bp, Homo sapiens
agaagggaaacactg

SEQ ID NO: 750293 - DNA, 15 bp, Homo sapiens
gaagggaaacactgt

SEQ ID NO: 750294 - DNA, 15 bp, Homo sapiens
aagggaaacactgtg

SEQ ID NO: 750295 - DNA, 15 bp, Homo sapiens
agggaaacactgtgg

SEQ ID NO: 750296 - DNA, 15 bp, Homo sapiens
gggaaacactgtggc

SEQ ID NO: 750297 - DNA, 15 bp, Homo sapiens
ggaaacactgtggca

SEQ ID NO: 750298 - DNA, 15 bp, Homo sapiens
gaaacactgtggcat

SEQ ID NO: 750299 - DNA, 15 bp, Homo sapiens
aaacactgtggcatt

SEQ ID NO: 750300 - DNA, 15 bp, Homo sapiens
aacactgtggcattt

SEQ ID NO: 750301 - DNA, 15 bp, Homo sapiens
acactgtggcatttg

SEQ ID NO: 750302 - DNA, 15 bp, Homo sapiens
cactgtggcatttgg

SEQ ID NO: 750303 - DNA, 15 bp, Homo sapiens
actgtggcatttggt

SEQ ID NO: 750304 - DNA, 15 bp, Homo sapiens
ctgtggcatttggtg

SEQ ID NO: 750305 - DNA, 15 bp, Homo sapiens
tgtggcatttggtgg

SEQ ID NO: 750306 - DNA, 15 bp, Homo sapiens
gtggcatttggtggg

SEQ ID NO: 750307 - DNA, 15 bp, Homo sapiens
tggcatttggtgggc

SEQ ID NO: 750308 - DNA, 15 bp, Homo sapiens
ggcatttggtgggca

SEQ ID NO: 750309 - DNA, 15 bp, Homo sapiens
gcatttggtgggcag

SEQ ID NO: 750310 - DNA, 15 bp, Homo sapiens
catttggtgggcagg

SEQ ID NO: 750311 - DNA, 15 bp, Homo sapiens
atttggtgggcaggt

SEQ ID NO: 750312 - DNA, 15 bp, Homo sapiens
tttggtgggcaggta

SEQ ID NO: 750313 - DNA, 15 bp, Homo sapiens
ttggtgggcaggtat

SEQ ID NO: 750314 - DNA, 15 bp, Homo sapiens
tggtgggcaggtatg

SEQ ID NO: 750315 - DNA, 15 bp, Homo sapiens
ggtgggcaggtatgg

SEQ ID NO: 750316 - DNA, 15 bp, Homo sapiens
gtgggcaggtatggt

SEQ ID NO: 750317 - DNA, 15 bp, Homo sapiens
tgggcaggtatggtt

SEQ ID NO: 750318 - DNA, 15 bp, Homo sapiens
gggcaggtatggttg

SEQ ID NO: 750319 - DNA, 15 bp, Homo sapiens
ggcaggtatggttgt

SEQ ID NO: 750320 - DNA, 15 bp, Homo sapiens
gcaggtatggttgtc

SEQ ID NO: 750321 - DNA, 15 bp, Homo sapiens
caggtatggttgtcc

SEQ ID NO: 750322 - DNA, 15 bp, Homo sapiens
aggtatggttgtcca

SEQ ID NO: 750323 - DNA, 15 bp, Homo sapiens
ggtatggttgtccag

SEQ ID NO: 750324 - DNA, 15 bp, Homo sapiens
gtatggttgtccagc

SEQ ID NO: 750325 - DNA, 15 bp, Homo sapiens
tatggttgtccagca

SEQ ID NO: 750326 - DNA, 15 bp, Homo sapiens
atggttgtccagcat

SEQ ID NO: 750327 - DNA, 15 bp, Homo sapiens
tggttgtccagcatt

SEQ ID NO: 750328 - DNA, 15 bp, Homo sapiens
ggttgtccagcattg

SEQ ID NO: 750329 - DNA, 15 bp, Homo sapiens
gttgtccagcattgt

SEQ ID NO: 750330 - DNA, 15 bp, Homo sapiens
ttgtccagcattgta

SEQ ID NO: 750331 - DNA, 15 bp, Homo sapiens
tgtccagcattgtac

SEQ ID NO: 750332 - DNA, 15 bp, Homo sapiens
gtccagcattgtacc

SEQ ID NO: 750333 - DNA, 15 bp, Homo sapiens
tccagcattgtaccc

SEQ ID NO: 750334 - DNA, 15 bp, Homo sapiens
ccagcattgtaccct

SEQ ID NO: 750335 - DNA, 15 bp, Homo sapiens
cagcattgtaccctt

SEQ ID NO: 750336 - DNA, 15 bp, Homo sapiens
agcattgtacccttg

SEQ ID NO: 750337 - DNA, 15 bp, Homo sapiens
gcattgtacccttga

SEQ ID NO: 750338 - DNA, 15 bp, Homo sapiens
cattgtacccttgag

SEQ ID NO: 750339 - DNA, 15 bp, Homo sapiens
attgtacccttgagg

SEQ ID NO: 750340 - DNA, 15 bp, Homo sapiens
ttgtacccttgagga

SEQ ID NO: 750341 - DNA, 15 bp, Homo sapiens
tgtacccttgaggag

SEQ ID NO: 750342 - DNA, 15 bp, Homo sapiens
gtacccttgaggagg

SEQ ID NO: 750343 - DNA, 15 bp, Homo sapiens
tacccttgaggaggg

SEQ ID NO: 750344 - DNA, 15 bp, Homo sapiens
acccttgaggaggga

SEQ ID NO: 750345 - DNA, 15 bp, Homo sapiens
cccttgaggagggac

SEQ ID NO: 750346 - DNA, 15 bp, Homo sapiens
ccttgaggagggaca

SEQ ID NO: 750347 - DNA, 15 bp, Homo sapiens
cttgaggagggacaa

SEQ ID NO: 750348 - DNA, 15 bp, Homo sapiens
ttgaggagggacaaa

SEQ ID NO: 750349 - DNA, 15 bp, Homo sapiens
tgaggagggacaaat

SEQ ID NO: 750350 - DNA, 15 bp, Homo sapiens
gaggagggacaaatt

SEQ ID NO: 750351 - DNA, 15 bp, Homo sapiens
aggagggacaaattc

SEQ ID NO: 750352 - DNA, 15 bp, Homo sapiens
ggagggacaaattcc

SEQ ID NO: 750353 - DNA, 15 bp, Homo sapiens
gagggacaaattcca

SEQ ID NO: 750354 - DNA, 15 bp, Homo sapiens
agggacaaattccat

SEQ ID NO: 750355 - DNA, 15 bp, Homo sapiens
gggacaaattccatc

SEQ ID NO: 750356 - DNA, 15 bp, Homo sapiens
ggacaaattccatcc

SEQ ID NO: 750357 - DNA, 15 bp, Homo sapiens
gacaaattccatccc

SEQ ID NO: 750358 - DNA, 15 bp, Homo sapiens
acaaattccatccct

SEQ ID NO: 750359 - DNA, 15 bp, Homo sapiens
caaattccatccctg

SEQ ID NO: 750360 - DNA, 15 bp, Homo sapiens
aaattccatccctgt

SEQ ID NO: 750361 - DNA, 15 bp, Homo sapiens
aattccatccctgtt

SEQ ID NO: 750362 - DNA, 15 bp, Homo sapiens
attccatccctgtta

SEQ ID NO: 750363 - DNA, 15 bp, Homo sapiens
ttccatccctgttat

SEQ ID NO: 750364 - DNA, 15 bp, Homo sapiens
tccatccctgttatc

SEQ ID NO: 750365 - DNA, 15 bp, Homo sapiens
ccatccctgttatcc

SEQ ID NO: 750366 - DNA, 15 bp, Homo sapiens
catccctgttatccc

SEQ ID NO: 750367 - DNA, 15 bp, Homo sapiens
atccctgttatccca

SEQ ID NO: 750368 - DNA, 15 bp, Homo sapiens
tccctgttatcccaa

SEQ ID NO: 750369 - DNA, 15 bp, Homo sapiens
ccctgttatcccaag

SEQ ID NO: 750370 - DNA, 15 bp, Homo sapiens
cctgttatcccaagt

SEQ ID NO: 750371 - DNA, 15 bp, Homo sapiens
ctgttatcccaagtc

SEQ ID NO: 750372 - DNA, 15 bp, Homo sapiens
tgttatcccaagtcc

SEQ ID NO: 750373 - DNA, 15 bp, Homo sapiens
gttatcccaagtcca

SEQ ID NO: 750374 - DNA, 15 bp, Homo sapiens
ttatcccaagtccag

SEQ ID NO: 750375 - DNA, 15 bp, Homo sapiens
tatcccaagtccaga

SEQ ID NO: 750376 - DNA, 15 bp, Homo sapiens
atcccaagtccagaa

SEQ ID NO: 750377 - DNA, 15 bp, Homo sapiens
tcccaagtccagaac

SEQ ID NO: 750378 - DNA, 15 bp, Homo sapiens
cccaagtccagaact

SEQ ID NO: 750379 - DNA, 15 bp, Homo sapiens
ccaagtccagaactc

SEQ ID NO: 750380 - DNA, 15 bp, Homo sapiens
caagtccagaactca

SEQ ID NO: 750381 - DNA, 15 bp, Homo sapiens
aagtccagaactcat

SEQ ID NO: 750382 - DNA, 15 bp, Homo sapiens
agtccagaactcata

SEQ ID NO: 750383 - DNA, 15 bp, Homo sapiens
gtccagaactcatag

SEQ ID NO: 750384 - DNA, 15 bp, Homo sapiens
tccagaactcataga

SEQ ID NO: 750385 - DNA, 15 bp, Homo sapiens
ccagaactcatagac

SEQ ID NO: 750386 - DNA, 15 bp, Homo sapiens
cagaactcatagacc

SEQ ID NO: 750387 - DNA, 15 bp, Homo sapiens
agaactcatagacct

SEQ ID NO: 750388 - DNA, 15 bp, Homo sapiens
gaactcatagacctg

SEQ ID NO: 750389 - DNA, 15 bp, Homo sapiens
aactcatagacctgt

SEQ ID NO: 750390 - DNA, 15 bp, Homo sapiens
actcatagacctgtc

SEQ ID NO: 750391 - DNA, 15 bp, Homo sapiens
ctcatagacctgtct

SEQ ID NO: 750392 - DNA, 15 bp, Homo sapiens
tcatagacctgtctc

SEQ ID NO: 750393 - DNA, 15 bp, Homo sapiens
catagacctgtctcc

SEQ ID NO: 750394 - DNA, 15 bp, Homo sapiens
atagacctgtctccc

SEQ ID NO: 750395 - DNA, 15 bp, Homo sapiens
tagacctgtctccca

SEQ ID NO: 750396 - DNA, 15 bp, Homo sapiens
agacctgtctcccaa

SEQ ID NO: 750397 - DNA, 15 bp, Homo sapiens
gacctgtctcccaag

SEQ ID NO: 750398 - DNA, 15 bp, Homo sapiens
acctgtctcccaagt

SEQ ID NO: 750399 - DNA, 15 bp, Homo sapiens
cctgtctcccaagtg

SEQ ID NO: 750400 - DNA, 15 bp, Homo sapiens
ctgtctcccaagtga

SEQ ID NO: 750401 - DNA, 15 bp, Homo sapiens
tgtctcccaagtgat

SEQ ID NO: 750402 - DNA, 15 bp, Homo sapiens
gtctcccaagtgatg

SEQ ID NO: 750403 - DNA, 15 bp, Homo sapiens
tctcccaagtgatgt

SEQ ID NO: 750404 - DNA, 15 bp, Homo sapiens
ctcccaagtgatgtc

SEQ ID NO: 750405 - DNA, 15 bp, Homo sapiens
tcccaagtgatgtca

SEQ ID NO: 750406 - DNA, 15 bp, Homo sapiens
cccaagtgatgtcac

SEQ ID NO: 750407 - DNA, 15 bp, Homo sapiens
ccaagtgatgtcacg

SEQ ID NO: 750408 - DNA, 15 bp, Homo sapiens
caagtgatgtcacgg

SEQ ID NO: 750409 - DNA, 15 bp, Homo sapiens
aagtgatgtcacggt

SEQ ID NO: 750410 - DNA, 15 bp, Homo sapiens
agtgatgtcacggtc

SEQ ID NO: 750411 - DNA, 15 bp, Homo sapiens
gtgatgtcacggtct

SEQ ID NO: 750412 - DNA, 15 bp, Homo sapiens
tgatgtcacggtctc

SEQ ID NO: 750413 - DNA, 15 bp, Homo sapiens
gatgtcacggtctct

SEQ ID NO: 750414 - DNA, 15 bp, Homo sapiens
atgtcacggtctctt

SEQ ID NO: 750415 - DNA, 15 bp, Homo sapiens
tgtcacggtctcttg

SEQ ID NO: 750416 - DNA, 15 bp, Homo sapiens
gtcacggtctcttgg

SEQ ID NO: 750417 - DNA, 15 bp, Homo sapiens
tcacggtctcttggc

SEQ ID NO: 750418 - DNA, 15 bp, Homo sapiens
cacggtctcttggcc

SEQ ID NO: 750419 - DNA, 15 bp, Homo sapiens
acggtctcttggcca

SEQ ID NO: 750420 - DNA, 15 bp, Homo sapiens
cggtctcttggccag

SEQ ID NO: 750421 - DNA, 15 bp, Homo sapiens
ggtctcttggccagg

SEQ ID NO: 750422 - DNA, 15 bp, Homo sapiens
gtctcttggccagga

SEQ ID NO: 750423 - DNA, 15 bp, Homo sapiens
tctcttggccaggac

SEQ ID NO: 750424 - DNA, 15 bp, Homo sapiens
ctcttggccaggaca

SEQ ID NO: 750425 - DNA, 15 bp, Homo sapiens
tcttggccaggacac

SEQ ID NO: 750426 - DNA, 15 bp, Homo sapiens
cttggccaggacact

SEQ ID NO: 750427 - DNA, 15 bp, Homo sapiens
ttggccaggacactc

SEQ ID NO: 750428 - DNA, 15 bp, Homo sapiens
tggccaggacactca

SEQ ID NO: 750429 - DNA, 15 bp, Homo sapiens
ggccaggacactcac

SEQ ID NO: 750430 - DNA, 15 bp, Homo sapiens
gccaggacactcact

SEQ ID NO: 750431 - DNA, 15 bp, Homo sapiens
ccaggacactcactg

SEQ ID NO: 750432 - DNA, 15 bp, Homo sapiens
caggacactcactgt

SEQ ID NO: 750433 - DNA, 15 bp, Homo sapiens
aggacactcactgtc

SEQ ID NO: 750434 - DNA, 15 bp, Homo sapiens
ggacactcactgtct

SEQ ID NO: 750435 - DNA, 15 bp, Homo sapiens
gacactcactgtcta

SEQ ID NO: 750436 - DNA, 15 bp, Homo sapiens
acactcactgtctac

SEQ ID NO: 750437 - DNA, 15 bp, Homo sapiens
cactcactgtctacc

SEQ ID NO: 750438 - DNA, 15 bp, Homo sapiens
actcactgtctaccc

SEQ ID NO: 750439 - DNA, 15 bp, Homo sapiens
ctcactgtctaccca

SEQ ID NO: 750440 - DNA, 15 bp, Homo sapiens
tcactgtctacccag

SEQ ID NO: 750441 - DNA, 15 bp, Homo sapiens
cactgtctacccaga

SEQ ID NO: 750442 - DNA, 15 bp, Homo sapiens
actgtctacccagac

SEQ ID NO: 750443 - DNA, 15 bp, Homo sapiens
ctgtctacccagacc

SEQ ID NO: 750444 - DNA, 15 bp, Homo sapiens
tgtctacccagacca

SEQ ID NO: 750445 - DNA, 15 bp, Homo sapiens
gtctacccagaccag

SEQ ID NO: 750446 - DNA, 15 bp, Homo sapiens
tctacccagaccagc

SEQ ID NO: 750447 - DNA, 15 bp, Homo sapiens
ctacccagaccagct

SEQ ID NO: 750448 - DNA, 15 bp, Homo sapiens
tacccagaccagctt

SEQ ID NO: 750449 - DNA, 15 bp, Homo sapiens
acccagaccagcttt

SEQ ID NO: 750450 - DNA, 15 bp, Homo sapiens
cccagaccagctttt

SEQ ID NO: 750451 - DNA, 15 bp, Homo sapiens
ccagaccagcttttc

SEQ ID NO: 750452 - DNA, 15 bp, Homo sapiens
cagaccagcttttcc

SEQ ID NO: 750453 - DNA, 15 bp, Homo sapiens
agaccagcttttcca

SEQ ID NO: 750454 - DNA, 15 bp, Homo sapiens
gaccagcttttccaa

SEQ ID NO: 750455 - DNA, 15 bp, Homo sapiens
accagcttttccaag

SEQ ID NO: 750456 - DNA, 15 bp, Homo sapiens
ccagcttttccaaga

SEQ ID NO: 750457 - DNA, 15 bp, Homo sapiens
cagcttttccaagac

SEQ ID NO: 750458 - DNA, 15 bp, Homo sapiens
agcttttccaagaca

SEQ ID NO: 750459 - DNA, 15 bp, Homo sapiens
gcttttccaagacac

SEQ ID NO: 750460 - DNA, 15 bp, Homo sapiens
cttttccaagacacc

SEQ ID NO: 750461 - DNA, 15 bp, Homo sapiens
ttttccaagacaccc

SEQ ID NO: 750462 - DNA, 15 bp, Homo sapiens
tttccaagacacccc

SEQ ID NO: 750463 - DNA, 15 bp, Homo sapiens
ttccaagacaccccc

SEQ ID NO: 750464 - DNA, 15 bp, Homo sapiens
tccaagacaccccct

SEQ ID NO: 750465 - DNA, 15 bp, Homo sapiens
ccaagacacccccta

SEQ ID NO: 750466 - DNA, 15 bp, Homo sapiens
caagacaccccctag

SEQ ID NO: 750467 - DNA, 15 bp, Homo sapiens
aagacaccccctagg

SEQ ID NO: 750468 - DNA, 15 bp, Homo sapiens
agacaccccctaggc

SEQ ID NO: 750469 - DNA, 15 bp, Homo sapiens
gacaccccctaggcc

SEQ ID NO: 750470 - DNA, 15 bp, Homo sapiens
acaccccctaggcca

SEQ ID NO: 750471 - DNA, 15 bp, Homo sapiens
caccccctaggccag

SEQ ID NO: 750472 - DNA, 15 bp, Homo sapiens
accccctaggccagg

SEQ ID NO: 750473 - DNA, 15 bp, Homo sapiens
ccccctaggccaggt

SEQ ID NO: 750474 - DNA, 15 bp, Homo sapiens
cccctaggccaggtt

SEQ ID NO: 750475 - DNA, 15 bp, Homo sapiens
ccctaggccaggttt

SEQ ID NO: 750476 - DNA, 15 bp, Homo sapiens
cctaggccaggtttc

SEQ ID NO: 750477 - DNA, 15 bp, Homo sapiens
ctaggccaggtttcc

SEQ ID NO: 750478 - DNA, 15 bp, Homo sapiens
taggccaggtttccc

SEQ ID NO: 750479 - DNA, 15 bp, Homo sapiens
aggccaggtttcccc

SEQ ID NO: 750480 - DNA, 15 bp, Homo sapiens
ggccaggtttcccca

SEQ ID NO: 750481 - DNA, 15 bp, Homo sapiens
gccaggtttccccaa

SEQ ID NO: 750482 - DNA, 15 bp, Homo sapiens
ccaggtttccccaag

SEQ ID NO: 750483 - DNA, 15 bp, Homo sapiens
caggtttccccaagt

SEQ ID NO: 750484 - DNA, 15 bp, Homo sapiens
aggtttccccaagtg

SEQ ID NO: 750485 - DNA, 15 bp, Homo sapiens
ggtttccccaagtgt

SEQ ID NO: 750486 - DNA, 15 bp, Homo sapiens
gtttccccaagtgtg

SEQ ID NO: 750487 - DNA, 15 bp, Homo sapiens
tttccccaagtgtgt

SEQ ID NO: 750488 - DNA, 15 bp, Homo sapiens
ttccccaagtgtgtt

SEQ ID NO: 750489 - DNA, 15 bp, Homo sapiens
tccccaagtgtgttc

SEQ ID NO: 750490 - DNA, 15 bp, Homo sapiens
ccccaagtgtgttct

SEQ ID NO: 750491 - DNA, 15 bp, Homo sapiens
cccaagtgtgttctg

SEQ ID NO: 750492 - DNA, 15 bp, Homo sapiens
ccaagtgtgttctgt

SEQ ID NO: 750493 - DNA, 15 bp, Homo sapiens
caagtgtgttctgtg

SEQ ID NO: 750494 - DNA, 15 bp, Homo sapiens
aagtgtgttctgtgg

SEQ ID NO: 750495 - DNA, 15 bp, Homo sapiens
agtgtgttctgtggc

SEQ ID NO: 750496 - DNA, 15 bp, Homo sapiens
gtgtgttctgtggca

SEQ ID NO: 750497 - DNA, 15 bp, Homo sapiens
tgtgttctgtggcac

SEQ ID NO: 750498 - DNA, 15 bp, Homo sapiens
gtgttctgtggcaca

SEQ ID NO: 750499 - DNA, 15 bp, Homo sapiens
tgttctgtggcacac

SEQ ID NO: 750500 - DNA, 15 bp, Homo sapiens
gttctgtggcacacc

SEQ ID NO: 750501 - DNA, 15 bp, Homo sapiens
ttctgtggcacacct

SEQ ID NO: 750502 - DNA, 15 bp, Homo sapiens
tctgtggcacacctg

SEQ ID NO: 750503 - DNA, 15 bp, Homo sapiens
ctgtggcacacctgc

SEQ ID NO: 750504 - DNA, 15 bp, Homo sapiens
tgtggcacacctgcc

SEQ ID NO: 750505 - DNA, 15 bp, Homo sapiens
gtggcacacctgcct

SEQ ID NO: 750506 - DNA, 15 bp, Homo sapiens
tggcacacctgcctt

SEQ ID NO: 750507 - DNA, 15 bp, Homo sapiens
ggcacacctgccttt

SEQ ID NO: 750508 - DNA, 15 bp, Homo sapiens
gcacacctgcctttt

SEQ ID NO: 750509 - DNA, 15 bp, Homo sapiens
cacacctgcctttta

SEQ ID NO: 750510 - DNA, 15 bp, Homo sapiens
acacctgccttttaa

SEQ ID NO: 750511 - DNA, 15 bp, Homo sapiens
cacctgccttttaaa

SEQ ID NO: 750512 - DNA, 15 bp, Homo sapiens
acctgccttttaaat

SEQ ID NO: 750513 - DNA, 15 bp, Homo sapiens
cctgccttttaaatt

SEQ ID NO: 750514 - DNA, 15 bp, Homo sapiens
ctgccttttaaatta

SEQ ID NO: 750515 - DNA, 15 bp, Homo sapiens
tgccttttaaattac

SEQ ID NO: 750516 - DNA, 15 bp, Homo sapiens
gccttttaaattacc

SEQ ID NO: 750517 - DNA, 15 bp, Homo sapiens
ccttttaaattacct

SEQ ID NO: 750518 - DNA, 15 bp, Homo sapiens
cttttaaattacctt

SEQ ID NO: 750519 - DNA, 15 bp, Homo sapiens
ttttaaattaccttg

SEQ ID NO: 750520 - DNA, 15 bp, Homo sapiens
tttaaattaccttgt

SEQ ID NO: 750521 - DNA, 15 bp, Homo sapiens
ttaaattaccttgtg

SEQ ID NO: 750522 - DNA, 15 bp, Homo sapiens
taaattaccttgtga

SEQ ID NO: 750523 - DNA, 15 bp, Homo sapiens
aaattaccttgtgaa

SEQ ID NO: 750524 - DNA, 15 bp, Homo sapiens
aattaccttgtgaaa

SEQ ID NO: 750525 - DNA, 15 bp, Homo sapiens
attaccttgtgaaaa

SEQ ID NO: 750526 - DNA, 15 bp, Homo sapiens
ttaccttgtgaaaaa

SEQ ID NO: 750527 - DNA, 15 bp, Homo sapiens
taccttgtgaaaaaa

SEQ ID NO: 750528 - DNA, 15 bp, Homo sapiens
accttgtgaaaaaaa

SEQ ID NO: 750529 - DNA, 15 bp, Homo sapiens
ccttgtgaaaaaaaa

SEQ ID NO: 750530 - DNA, 15 bp, Homo sapiens
cttgtgaaaaaaaat

SEQ ID NO: 750531 - DNA, 15 bp, Homo sapiens
ttgtgaaaaaaaatc

SEQ ID NO: 750532 - DNA, 15 bp, Homo sapiens
tgtgaaaaaaaatca

SEQ ID NO: 750533 - DNA, 15 bp, Homo sapiens
gtgaaaaaaaatcag

SEQ ID NO: 750534 - DNA, 15 bp, Homo sapiens
tgaaaaaaaatcagc

SEQ ID NO: 750535 - DNA, 15 bp, Homo sapiens
gaaaaaaaatcagca

SEQ ID NO: 750536 - DNA, 15 bp, Homo sapiens
aaaaaaaatcagcag

SEQ ID NO: 750537 - DNA, 15 bp, Homo sapiens
aaaaaaatcagcagg

SEQ ID NO: 750538 - DNA, 15 bp, Homo sapiens
aaaaaatcagcaggc

SEQ ID NO: 750539 - DNA, 15 bp, Homo sapiens
aaaaatcagcaggca

SEQ ID NO: 750540 - DNA, 15 bp, Homo sapiens
aaaatcagcaggcat

SEQ ID NO: 750541 - DNA, 15 bp, Homo sapiens
aaatcagcaggcatg

SEQ ID NO: 750542 - DNA, 15 bp, Homo sapiens
aatcagcaggcatgg

SEQ ID NO: 750543 - DNA, 15 bp, Homo sapiens
atcagcaggcatggc

SEQ ID NO: 750544 - DNA, 15 bp, Homo sapiens
tcagcaggcatggcg

SEQ ID NO: 750545 - DNA, 15 bp, Homo sapiens
cagcaggcatggcgt

SEQ ID NO: 750546 - DNA, 15 bp, Homo sapiens
agcaggcatggcgtg

SEQ ID NO: 750547 - DNA, 15 bp, Homo sapiens
gcaggcatggcgtgg

SEQ ID NO: 750548 - DNA, 15 bp, Homo sapiens
caggcatggcgtggc

SEQ ID NO: 750549 - DNA, 15 bp, Homo sapiens
aggcatggcgtggct

SEQ ID NO: 750550 - DNA, 15 bp, Homo sapiens
ggcatggcgtggctg

SEQ ID NO: 750551 - DNA, 15 bp, Homo sapiens
gcatggcgtggctga

SEQ ID NO: 750552 - DNA, 15 bp, Homo sapiens
catggcgtggctgag

SEQ ID NO: 750553 - DNA, 15 bp, Homo sapiens
atggcgtggctgagc

SEQ ID NO: 750554 - DNA, 15 bp, Homo sapiens
tggcgtggctgagct

SEQ ID NO: 750555 - DNA, 15 bp, Homo sapiens
ggcgtggctgagctt

SEQ ID NO: 750556 - DNA, 15 bp, Homo sapiens
gcgtggctgagcttc

SEQ ID NO: 750557 - DNA, 15 bp, Homo sapiens
cgtggctgagcttcc

SEQ ID NO: 750558 - DNA, 15 bp, Homo sapiens
gtggctgagcttccc

SEQ ID NO: 750559 - DNA, 15 bp, Homo sapiens
tggctgagcttcccc

SEQ ID NO: 750560 - DNA, 15 bp, Homo sapiens
ggctgagcttcccct

SEQ ID NO: 750561 - DNA, 15 bp, Homo sapiens
gctgagcttcccctt

SEQ ID NO: 750562 - DNA, 15 bp, Homo sapiens
ctgagcttccccttt

SEQ ID NO: 750563 - DNA, 15 bp, Homo sapiens
tgagcttcccctttg

SEQ ID NO: 750564 - DNA, 15 bp, Homo sapiens
gagcttcccctttgg

SEQ ID NO: 750565 - DNA, 15 bp, Homo sapiens
agcttcccctttgga

SEQ ID NO: 750566 - DNA, 15 bp, Homo sapiens
gcttcccctttggag

SEQ ID NO: 750567 - DNA, 15 bp, Homo sapiens
cttcccctttggagg

SEQ ID NO: 750568 - DNA, 15 bp, Homo sapiens
ttcccctttggaggg

SEQ ID NO: 750569 - DNA, 15 bp, Homo sapiens
tcccctttggagggc

SEQ ID NO: 750570 - DNA, 15 bp, Homo sapiens
cccctttggagggcc

SEQ ID NO: 750571 - DNA, 15 bp, Homo sapiens
ccctttggagggcca

SEQ ID NO: 750572 - DNA, 15 bp, Homo sapiens
cctttggagggccac

SEQ ID NO: 750573 - DNA, 15 bp, Homo sapiens
ctttggagggccaca

SEQ ID NO: 750574 - DNA, 15 bp, Homo sapiens
tttggagggccacat

SEQ ID NO: 750575 - DNA, 15 bp, Homo sapiens
ttggagggccacatc

SEQ ID NO: 750576 - DNA, 15 bp, Homo sapiens
tggagggccacatca

SEQ ID NO: 750577 - DNA, 15 bp, Homo sapiens
ggagggccacatcac

SEQ ID NO: 750578 - DNA, 15 bp, Homo sapiens
gagggccacatcaca

SEQ ID NO: 750579 - DNA, 15 bp, Homo sapiens
agggccacatcacag

SEQ ID NO: 750580 - DNA, 15 bp, Homo sapiens
gggccacatcacagg

SEQ ID NO: 750581 - DNA, 15 bp, Homo sapiens
ggccacatcacaggc

SEQ ID NO: 750582 - DNA, 15 bp, Homo sapiens
gccacatcacaggct

SEQ ID NO: 750583 - DNA, 15 bp, Homo sapiens
ccacatcacaggctt

SEQ ID NO: 750584 - DNA, 15 bp, Homo sapiens
cacatcacaggcttg

SEQ ID NO: 750585 - DNA, 15 bp, Homo sapiens
acatcacaggcttgg

SEQ ID NO: 750586 - DNA, 15 bp, Homo sapiens
catcacaggcttggc

SEQ ID NO: 750587 - DNA, 15 bp, Homo sapiens
atcacaggcttggcg

SEQ ID NO: 750588 - DNA, 15 bp, Homo sapiens
tcacaggcttggcgg

SEQ ID NO: 750589 - DNA, 15 bp, Homo sapiens
cacaggcttggcggc

SEQ ID NO: 750590 - DNA, 15 bp, Homo sapiens
acaggcttggcggca

SEQ ID NO: 750591 - DNA, 15 bp, Homo sapiens
caggcttggcggcat

SEQ ID NO: 750592 - DNA, 15 bp, Homo sapiens
aggcttggcggcatc

SEQ ID NO: 750593 - DNA, 15 bp, Homo sapiens
ggcttggcggcatcc

SEQ ID NO: 750594 - DNA, 15 bp, Homo sapiens
gcttggcggcatcct

SEQ ID NO: 750595 - DNA, 15 bp, Homo sapiens
cttggcggcatcctg

SEQ ID NO: 750596 - DNA, 15 bp, Homo sapiens
ttggcggcatcctgc

SEQ ID NO: 750597 - DNA, 15 bp, Homo sapiens
tggcggcatcctgct

SEQ ID NO: 750598 - DNA, 15 bp, Homo sapiens
ggcggcatcctgctg

SEQ ID NO: 750599 - DNA, 15 bp, Homo sapiens
gcggcatcctgctgg

SEQ ID NO: 750600 - DNA, 15 bp, Homo sapiens
cggcatcctgctggt

SEQ ID NO: 750601 - DNA, 15 bp, Homo sapiens
ggcatcctgctggta

SEQ ID NO: 750602 - DNA, 15 bp, Homo sapiens
gcatcctgctggtag

SEQ ID NO: 750603 - DNA, 15 bp, Homo sapiens
catcctgctggtaga

SEQ ID NO: 750604 - DNA, 15 bp, Homo sapiens
atcctgctggtagag

SEQ ID NO: 750605 - DNA, 15 bp, Homo sapiens
tcctgctggtagaga

SEQ ID NO: 750606 - DNA, 15 bp, Homo sapiens
cctgctggtagagaa

SEQ ID NO: 750607 - DNA, 15 bp, Homo sapiens
ctgctggtagagaaa

SEQ ID NO: 750608 - DNA, 15 bp, Homo sapiens
tgctggtagagaaag

SEQ ID NO: 750609 - DNA, 15 bp, Homo sapiens
gctggtagagaaagt

SEQ ID NO: 750610 - DNA, 15 bp, Homo sapiens
ctggtagagaaagtg

SEQ ID NO: 750611 - DNA, 15 bp, Homo sapiens
tggtagagaaagtgg

SEQ ID NO: 750612 - DNA, 15 bp, Homo sapiens
ggtagagaaagtggt

SEQ ID NO: 750613 - DNA, 15 bp, Homo sapiens
gtagagaaagtggtt

SEQ ID NO: 750614 - DNA, 15 bp, Homo sapiens
tagagaaagtggtta

SEQ ID NO: 750615 - DNA, 15 bp, Homo sapiens
agagaaagtggttaa

SEQ ID NO: 750616 - DNA, 15 bp, Homo sapiens
gagaaagtggttaaa

SEQ ID NO: 750617 - DNA, 15 bp, Homo sapiens
agaaagtggttaaaa

SEQ ID NO: 750618 - DNA, 15 bp, Homo sapiens
gaaagtggttaaaat

SEQ ID NO: 750619 - DNA, 15 bp, Homo sapiens
aaagtggttaaaatg

SEQ ID NO: 750620 - DNA, 15 bp, Homo sapiens
aagtggttaaaatgc

SEQ ID NO: 750621 - DNA, 15 bp, Homo sapiens
agtggttaaaatgcc

SEQ ID NO: 750622 - DNA, 15 bp, Homo sapiens
gtggttaaaatgccc

SEQ ID NO: 750623 - DNA, 15 bp, Homo sapiens
tggttaaaatgccct

SEQ ID NO: 750624 - DNA, 15 bp, Homo sapiens
ggttaaaatgccctc

SEQ ID NO: 750625 - DNA, 15 bp, Homo sapiens
gttaaaatgccctca

SEQ ID NO: 750626 - DNA, 15 bp, Homo sapiens
ttaaaatgccctcaa

SEQ ID NO: 750627 - DNA, 15 bp, Homo sapiens
taaaatgccctcaaa

SEQ ID NO: 750628 - DNA, 15 bp, Homo sapiens
aaaatgccctcaaat

SEQ ID NO: 750629 - DNA, 15 bp, Homo sapiens
aaatgccctcaaatg

SEQ ID NO: 750630 - DNA, 15 bp, Homo sapiens
aatgccctcaaatgt

SEQ ID NO: 750631 - DNA, 15 bp, Homo sapiens
atgccctcaaatgtg

SEQ ID NO: 750632 - DNA, 15 bp, Homo sapiens
tgccctcaaatgtgc

SEQ ID NO: 750633 - DNA, 15 bp, Homo sapiens
gccctcaaatgtgct

SEQ ID NO: 750634 - DNA, 15 bp, Homo sapiens
ccctcaaatgtgcta

SEQ ID NO: 750635 - DNA, 15 bp, Homo sapiens
cctcaaatgtgctac

SEQ ID NO: 750636 - DNA, 15 bp, Homo sapiens
ctcaaatgtgctacc

SEQ ID NO: 750637 - DNA, 15 bp, Homo sapiens
tcaaatgtgctacct

SEQ ID NO: 750638 - DNA, 15 bp, Homo sapiens
caaatgtgctacctg

SEQ ID NO: 750639 - DNA, 15 bp, Homo sapiens
aaatgtgctacctgt

SEQ ID NO: 750640 - DNA, 15 bp, Homo sapiens
aatgtgctacctgtg

SEQ ID NO: 750641 - DNA, 15 bp, Homo sapiens
atgtgctacctgtga

SEQ ID NO: 750642 - DNA, 15 bp, Homo sapiens
tgtgctacctgtgag

SEQ ID NO: 750643 - DNA, 15 bp, Homo sapiens
gtgctacctgtgagc

SEQ ID NO: 750644 - DNA, 15 bp, Homo sapiens
tgctacctgtgagca

SEQ ID NO: 750645 - DNA, 15 bp, Homo sapiens
gctacctgtgagcag

SEQ ID NO: 750646 - DNA, 15 bp, Homo sapiens
ctacctgtgagcagt

SEQ ID NO: 750647 - DNA, 15 bp, Homo sapiens
tacctgtgagcagtc

SEQ ID NO: 750648 - DNA, 15 bp, Homo sapiens
acctgtgagcagtct

SEQ ID NO: 750649 - DNA, 15 bp, Homo sapiens
cctgtgagcagtctt

SEQ ID NO: 750650 - DNA, 15 bp, Homo sapiens
ctgtgagcagtcttg

SEQ ID NO: 750651 - DNA, 15 bp, Homo sapiens
tgtgagcagtcttgc

SEQ ID NO: 750652 - DNA, 15 bp, Homo sapiens
gtgagcagtcttgct

SEQ ID NO: 750653 - DNA, 15 bp, Homo sapiens
tgagcagtcttgctt

SEQ ID NO: 750654 - DNA, 15 bp, Homo sapiens
gagcagtcttgcttc

SEQ ID NO: 750655 - DNA, 15 bp, Homo sapiens
agcagtcttgcttca

SEQ ID NO: 750656 - DNA, 15 bp, Homo sapiens
gcagtcttgcttcag

SEQ ID NO: 750657 - DNA, 15 bp, Homo sapiens
cagtcttgcttcagt

SEQ ID NO: 750658 - DNA, 15 bp, Homo sapiens
agtcttgcttcagtg

SEQ ID NO: 750659 - DNA, 15 bp, Homo sapiens
gtcttgcttcagtgt

SEQ ID NO: 750660 - DNA, 15 bp, Homo sapiens
tcttgcttcagtgtc

SEQ ID NO: 750661 - DNA, 15 bp, Homo sapiens
cttgcttcagtgtca

SEQ ID NO: 750662 - DNA, 15 bp, Homo sapiens
ttgcttcagtgtcag

SEQ ID NO: 750663 - DNA, 15 bp, Homo sapiens
tgcttcagtgtcagg

SEQ ID NO: 750664 - DNA, 15 bp, Homo sapiens
gcttcagtgtcaggg

SEQ ID NO: 750665 - DNA, 15 bp, Homo sapiens
cttcagtgtcagggg

SEQ ID NO: 750666 - DNA, 15 bp, Homo sapiens
ttcagtgtcaggggt

SEQ ID NO: 750667 - DNA, 15 bp, Homo sapiens
tcagtgtcaggggtg

SEQ ID NO: 750668 - DNA, 15 bp, Homo sapiens
cagtgtcaggggtgc

SEQ ID NO: 750669 - DNA, 15 bp, Homo sapiens
agtgtcaggggtgct

SEQ ID NO: 750670 - DNA, 15 bp, Homo sapiens
gtgtcaggggtgctg

SEQ ID NO: 750671 - DNA, 15 bp, Homo sapiens
tgtcaggggtgctgt

SEQ ID NO: 750672 - DNA, 15 bp, Homo sapiens
gtcaggggtgctgtg

SEQ ID NO: 750673 - DNA, 15 bp, Homo sapiens
tcaggggtgctgtgc

SEQ ID NO: 750674 - DNA, 15 bp, Homo sapiens
caggggtgctgtgca

SEQ ID NO: 750675 - DNA, 15 bp, Homo sapiens
aggggtgctgtgcag

SEQ ID NO: 750676 - DNA, 15 bp, Homo sapiens
ggggtgctgtgcagt

SEQ ID NO: 750677 - DNA, 15 bp, Homo sapiens
gggtgctgtgcagtg

SEQ ID NO: 750678 - DNA, 15 bp, Homo sapiens
ggtgctgtgcagtgc

SEQ ID NO: 750679 - DNA, 15 bp, Homo sapiens
gtgctgtgcagtgcc

SEQ ID NO: 750680 - DNA, 15 bp, Homo sapiens
tgctgtgcagtgccc

SEQ ID NO: 750681 - DNA, 15 bp, Homo sapiens
gctgtgcagtgccca

SEQ ID NO: 750682 - DNA, 15 bp, Homo sapiens
ctgtgcagtgcccaa

SEQ ID NO: 750683 - DNA, 15 bp, Homo sapiens
tgtgcagtgcccaag

SEQ ID NO: 750684 - DNA, 15 bp, Homo sapiens
gtgcagtgcccaagg

SEQ ID NO: 750685 - DNA, 15 bp, Homo sapiens
tgcagtgcccaaggt

SEQ ID NO: 750686 - DNA, 15 bp, Homo sapiens
gcagtgcccaaggtt

SEQ ID NO: 750687 - DNA, 15 bp, Homo sapiens
cagtgcccaaggttc

SEQ ID NO: 750688 - DNA, 15 bp, Homo sapiens
agtgcccaaggttca

SEQ ID NO: 750689 - DNA, 15 bp, Homo sapiens
gtgcccaaggttcag

SEQ ID NO: 750690 - DNA, 15 bp, Homo sapiens
tgcccaaggttcagc

SEQ ID NO: 750691 - DNA, 15 bp, Homo sapiens
gcccaaggttcagcc

SEQ ID NO: 750692 - DNA, 15 bp, Homo sapiens
cccaaggttcagcct

SEQ ID NO: 750693 - DNA, 15 bp, Homo sapiens
ccaaggttcagcctg

SEQ ID NO: 750694 - DNA, 15 bp, Homo sapiens
caaggttcagcctgt

SEQ ID NO: 750695 - DNA, 15 bp, Homo sapiens
aaggttcagcctgtg

SEQ ID NO: 750696 - DNA, 15 bp, Homo sapiens
aggttcagcctgtga

SEQ ID NO: 750697 - DNA, 15 bp, Homo sapiens
ggttcagcctgtgat

SEQ ID NO: 750698 - DNA, 15 bp, Homo sapiens
gttcagcctgtgatc

SEQ ID NO: 750699 - DNA, 15 bp, Homo sapiens
ttcagcctgtgatcc

SEQ ID NO: 750700 - DNA, 15 bp, Homo sapiens
tcagcctgtgatcct

SEQ ID NO: 750701 - DNA, 15 bp, Homo sapiens
cagcctgtgatcctg

SEQ ID NO: 750702 - DNA, 15 bp, Homo sapiens
agcctgtgatcctgg

SEQ ID NO: 750703 - DNA, 15 bp, Homo sapiens
gcctgtgatcctggg

SEQ ID NO: 750704 - DNA, 15 bp, Homo sapiens
cctgtgatcctgggc

SEQ ID NO: 750705 - DNA, 15 bp, Homo sapiens
ctgtgatcctgggca

SEQ ID NO: 750706 - DNA, 15 bp, Homo sapiens
tgtgatcctgggcaa

SEQ ID NO: 750707 - DNA, 15 bp, Homo sapiens
gtgatcctgggcaaa

SEQ ID NO: 750708 - DNA, 15 bp, Homo sapiens
tgatcctgggcaaag

SEQ ID NO: 750709 - DNA, 15 bp, Homo sapiens
gatcctgggcaaaga

SEQ ID NO: 750710 - DNA, 15 bp, Homo sapiens
atcctgggcaaagac

SEQ ID NO: 750711 - DNA, 15 bp, Homo sapiens
tcctgggcaaagacg

SEQ ID NO: 750712 - DNA, 15 bp, Homo sapiens
cctgggcaaagacgt

SEQ ID NO: 750713 - DNA, 15 bp, Homo sapiens
ctgggcaaagacgtc

SEQ ID NO: 750714 - DNA, 15 bp, Homo sapiens
tgggcaaagacgtca

SEQ ID NO: 750715 - DNA, 15 bp, Homo sapiens
gggcaaagacgtcat

SEQ ID NO: 750716 - DNA, 15 bp, Homo sapiens
ggcaaagacgtcatg

SEQ ID NO: 750717 - DNA, 15 bp, Homo sapiens
gcaaagacgtcatgc

SEQ ID NO: 750718 - DNA, 15 bp, Homo sapiens
caaagacgtcatgcc

SEQ ID NO: 750719 - DNA, 15 bp, Homo sapiens
aaagacgtcatgcct

SEQ ID NO: 750720 - DNA, 15 bp, Homo sapiens
aagacgtcatgcctt

SEQ ID NO: 750721 - DNA, 15 bp, Homo sapiens
agacgtcatgccttt

SEQ ID NO: 750722 - DNA, 15 bp, Homo sapiens
gacgtcatgcctttg

SEQ ID NO: 750723 - DNA, 15 bp, Homo sapiens
acgtcatgcctttgt

SEQ ID NO: 750724 - DNA, 15 bp, Homo sapiens
cgtcatgcctttgtg

SEQ ID NO: 750725 - DNA, 15 bp, Homo sapiens
gtcatgcctttgtgc

SEQ ID NO: 750726 - DNA, 15 bp, Homo sapiens
tcatgcctttgtgcc

SEQ ID NO: 750727 - DNA, 15 bp, Homo sapiens
catgcctttgtgcct

SEQ ID NO: 750728 - DNA, 15 bp, Homo sapiens
atgcctttgtgcctc

SEQ ID NO: 750729 - DNA, 15 bp, Homo sapiens
tgcctttgtgcctca

SEQ ID NO: 750730 - DNA, 15 bp, Homo sapiens
gcctttgtgcctcag

SEQ ID NO: 750731 - DNA, 15 bp, Homo sapiens
cctttgtgcctcagt

SEQ ID NO: 750732 - DNA, 15 bp, Homo sapiens
ctttgtgcctcagtt

SEQ ID NO: 750733 - DNA, 15 bp, Homo sapiens
tttgtgcctcagttt

SEQ ID NO: 750734 - DNA, 15 bp, Homo sapiens
ttgtgcctcagtttc

SEQ ID NO: 750735 - DNA, 15 bp, Homo sapiens
tgtgcctcagtttcc

SEQ ID NO: 750736 - DNA, 15 bp, Homo sapiens
gtgcctcagtttcct

SEQ ID NO: 750737 - DNA, 15 bp, Homo sapiens
tgcctcagtttcctc

SEQ ID NO: 750738 - DNA, 15 bp, Homo sapiens
gcctcagtttcctca

SEQ ID NO: 750739 - DNA, 15 bp, Homo sapiens
cctcagtttcctcac

SEQ ID NO: 750740 - DNA, 15 bp, Homo sapiens
ctcagtttcctcacc

SEQ ID NO: 750741 - DNA, 15 bp, Homo sapiens
tcagtttcctcacct

SEQ ID NO: 750742 - DNA, 15 bp, Homo sapiens
cagtttcctcacctg

SEQ ID NO: 750743 - DNA, 15 bp, Homo sapiens
agtttcctcacctgc

SEQ ID NO: 750744 - DNA, 15 bp, Homo sapiens
gtttcctcacctgca

SEQ ID NO: 750745 - DNA, 15 bp, Homo sapiens
tttcctcacctgcaa

SEQ ID NO: 750746 - DNA, 15 bp, Homo sapiens
ttcctcacctgcaaa

SEQ ID NO: 750747 - DNA, 15 bp, Homo sapiens
tcctcacctgcaaat

SEQ ID NO: 750748 - DNA, 15 bp, Homo sapiens
cctcacctgcaaatt

SEQ ID NO: 750749 - DNA, 15 bp, Homo sapiens
ctcacctgcaaattg

SEQ ID NO: 750750 - DNA, 15 bp, Homo sapiens
tcacctgcaaattga

SEQ ID NO: 750751 - DNA, 15 bp, Homo sapiens
cacctgcaaattgag

SEQ ID NO: 750752 - DNA, 15 bp, Homo sapiens
acctgcaaattgagg

SEQ ID NO: 750753 - DNA, 15 bp, Homo sapiens
cctgcaaattgaggt

SEQ ID NO: 750754 - DNA, 15 bp, Homo sapiens
ctgcaaattgaggtc

SEQ ID NO: 750755 - DNA, 15 bp, Homo sapiens
tgcaaattgaggtct

SEQ ID NO: 750756 - DNA, 15 bp, Homo sapiens
gcaaattgaggtctg

SEQ ID NO: 750757 - DNA, 15 bp, Homo sapiens
caaattgaggtctgt

SEQ ID NO: 750758 - DNA, 15 bp, Homo sapiens
aaattgaggtctgtg

SEQ ID NO: 750759 - DNA, 15 bp, Homo sapiens
aattgaggtctgtga

SEQ ID NO: 750760 - DNA, 15 bp, Homo sapiens
attgaggtctgtgat

SEQ ID NO: 750761 - DNA, 15 bp, Homo sapiens
ttgaggtctgtgata

SEQ ID NO: 750762 - DNA, 15 bp, Homo sapiens
tgaggtctgtgatag

SEQ ID NO: 750763 - DNA, 15 bp, Homo sapiens
gaggtctgtgataga

SEQ ID NO: 750764 - DNA, 15 bp, Homo sapiens
aggtctgtgatagag

SEQ ID NO: 750765 - DNA, 15 bp, Homo sapiens
ggtctgtgatagagc

SEQ ID NO: 750766 - DNA, 15 bp, Homo sapiens
gtctgtgatagagca

SEQ ID NO: 750767 - DNA, 15 bp, Homo sapiens
tctgtgatagagcac

SEQ ID NO: 750768 - DNA, 15 bp, Homo sapiens
ctgtgatagagcaca

SEQ ID NO: 750769 - DNA, 15 bp, Homo sapiens
tgtgatagagcacag

SEQ ID NO: 750770 - DNA, 15 bp, Homo sapiens
gtgatagagcacagc

SEQ ID NO: 750771 - DNA, 15 bp, Homo sapiens
tgatagagcacagcc

SEQ ID NO: 750772 - DNA, 15 bp, Homo sapiens
gatagagcacagcct

SEQ ID NO: 750773 - DNA, 15 bp, Homo sapiens
atagagcacagcctc

SEQ ID NO: 750774 - DNA, 15 bp, Homo sapiens
tagagcacagcctca

SEQ ID NO: 750775 - DNA, 15 bp, Homo sapiens
agagcacagcctcat

SEQ ID NO: 750776 - DNA, 15 bp, Homo sapiens
gagcacagcctcatg

SEQ ID NO: 750777 - DNA, 15 bp, Homo sapiens
agcacagcctcatgg

SEQ ID NO: 750778 - DNA, 15 bp, Homo sapiens
gcacagcctcatggg

SEQ ID NO: 750779 - DNA, 15 bp, Homo sapiens
cacagcctcatgggg

SEQ ID NO: 750780 - DNA, 15 bp, Homo sapiens
acagcctcatggggt

SEQ ID NO: 750781 - DNA, 15 bp, Homo sapiens
cagcctcatggggtg

SEQ ID NO: 750782 - DNA, 15 bp, Homo sapiens
agcctcatggggtgg

SEQ ID NO: 750783 - DNA, 15 bp, Homo sapiens
gcctcatggggtggt

SEQ ID NO: 750784 - DNA, 15 bp, Homo sapiens
cctcatggggtggtt

SEQ ID NO: 750785 - DNA, 15 bp, Homo sapiens
ctcatggggtggttt

SEQ ID NO: 750786 - DNA, 15 bp, Homo sapiens
tcatggggtggtttt

SEQ ID NO: 750787 - DNA, 15 bp, Homo sapiens
catggggtggttttt

SEQ ID NO: 750788 - DNA, 15 bp, Homo sapiens
atggggtggtttttt

SEQ ID NO: 750789 - DNA, 15 bp, Homo sapiens
tggggtggttttttt

SEQ ID NO: 750790 - DNA, 15 bp, Homo sapiens
ggggtggtttttttc

SEQ ID NO: 750791 - DNA, 15 bp, Homo sapiens
gggtggtttttttca

SEQ ID NO: 750792 - DNA, 15 bp, Homo sapiens
ggtggtttttttcac

SEQ ID NO: 750793 - DNA, 15 bp, Homo sapiens
gtggtttttttcacc

SEQ ID NO: 750794 - DNA, 15 bp, Homo sapiens
tggtttttttcacca

SEQ ID NO: 750795 - DNA, 15 bp, Homo sapiens
ggtttttttcaccaa

SEQ ID NO: 750796 - DNA, 15 bp, Homo sapiens
gtttttttcaccaac

SEQ ID NO: 750797 - DNA, 15 bp, Homo sapiens
tttttttcaccaacc

SEQ ID NO: 750798 - DNA, 15 bp, Homo sapiens
ttttttcaccaaccc

SEQ ID NO: 750799 - DNA, 15 bp, Homo sapiens
tttttcaccaacccc

SEQ ID NO: 750800 - DNA, 15 bp, Homo sapiens
ttttcaccaacccca

SEQ ID NO: 750801 - DNA, 15 bp, Homo sapiens
tttcaccaaccccat

SEQ ID NO: 750802 - DNA, 15 bp, Homo sapiens
ttcaccaaccccatt

SEQ ID NO: 750803 - DNA, 15 bp, Homo sapiens
tcaccaaccccattt

SEQ ID NO: 750804 - DNA, 15 bp, Homo sapiens
caccaaccccatttt

SEQ ID NO: 750805 - DNA, 15 bp, Homo sapiens
accaaccccatttta

SEQ ID NO: 750806 - DNA, 15 bp, Homo sapiens
ccaaccccattttat

SEQ ID NO: 750807 - DNA, 15 bp, Homo sapiens
caaccccattttata

SEQ ID NO: 750808 - DNA, 15 bp, Homo sapiens
aaccccattttatag

SEQ ID NO: 750809 - DNA, 15 bp, Homo sapiens
accccattttatagc

SEQ ID NO: 750810 - DNA, 15 bp, Homo sapiens
ccccattttatagca

SEQ ID NO: 750811 - DNA, 15 bp, Homo sapiens
cccattttatagcat

SEQ ID NO: 750812 - DNA, 15 bp, Homo sapiens
ccattttatagcatt

SEQ ID NO: 750813 - DNA, 15 bp, Homo sapiens
cattttatagcattt

SEQ ID NO: 750814 - DNA, 15 bp, Homo sapiens
attttatagcatttc

SEQ ID NO: 750815 - DNA, 15 bp, Homo sapiens
ttttatagcatttcc

SEQ ID NO: 750816 - DNA, 15 bp, Homo sapiens
tttatagcatttcct

SEQ ID NO: 750817 - DNA, 15 bp, Homo sapiens
ttatagcatttccta

SEQ ID NO: 750818 - DNA, 15 bp, Homo sapiens
tatagcatttcctag

SEQ ID NO: 750819 - DNA, 15 bp, Homo sapiens
atagcatttcctagg

SEQ ID NO: 750820 - DNA, 15 bp, Homo sapiens
tagcatttcctagga

SEQ ID NO: 750821 - DNA, 15 bp, Homo sapiens
agcatttcctaggag

SEQ ID NO: 750822 - DNA, 15 bp, Homo sapiens
gcatttcctaggagg

SEQ ID NO: 750823 - DNA, 15 bp, Homo sapiens
catttcctaggagga

SEQ ID NO: 750824 - DNA, 15 bp, Homo sapiens
atttcctaggaggac

SEQ ID NO: 750825 - DNA, 15 bp, Homo sapiens
tttcctaggaggaca

SEQ ID NO: 750826 - DNA, 15 bp, Homo sapiens
ttcctaggaggacac

SEQ ID NO: 750827 - DNA, 15 bp, Homo sapiens
tcctaggaggacact

SEQ ID NO: 750828 - DNA, 15 bp, Homo sapiens
cctaggaggacactg

SEQ ID NO: 750829 - DNA, 15 bp, Homo sapiens
ctaggaggacactga

SEQ ID NO: 750830 - DNA, 15 bp, Homo sapiens
taggaggacactgag

SEQ ID NO: 750831 - DNA, 15 bp, Homo sapiens
aggaggacactgaga

SEQ ID NO: 750832 - DNA, 15 bp, Homo sapiens
ggaggacactgagaa

SEQ ID NO: 750833 - DNA, 15 bp, Homo sapiens
gaggacactgagaac

SEQ ID NO: 750834 - DNA, 15 bp, Homo sapiens
aggacactgagaacc

SEQ ID NO: 750835 - DNA, 15 bp, Homo sapiens
ggacactgagaacct

SEQ ID NO: 750836 - DNA, 15 bp, Homo sapiens
gacactgagaaccta

SEQ ID NO: 750837 - DNA, 15 bp, Homo sapiens
acactgagaacctat

SEQ ID NO: 750838 - DNA, 15 bp, Homo sapiens
cactgagaacctatg

SEQ ID NO: 750839 - DNA, 15 bp, Homo sapiens
actgagaacctatgg

SEQ ID NO: 750840 - DNA, 15 bp, Homo sapiens
ctgagaacctatggc

SEQ ID NO: 750841 - DNA, 15 bp, Homo sapiens
tgagaacctatggcc

SEQ ID NO: 750842 - DNA, 15 bp, Homo sapiens
gagaacctatggcct

SEQ ID NO: 750843 - DNA, 15 bp, Homo sapiens
agaacctatggcctc

SEQ ID NO: 750844 - DNA, 15 bp, Homo sapiens
gaacctatggcctcc

SEQ ID NO: 750845 - DNA, 15 bp, Homo sapiens
aacctatggcctccc

SEQ ID NO: 750846 - DNA, 15 bp, Homo sapiens
acctatggcctccct

SEQ ID NO: 750847 - DNA, 15 bp, Homo sapiens
cctatggcctccctt

SEQ ID NO: 750848 - DNA, 15 bp, Homo sapiens
ctatggcctcccttt

SEQ ID NO: 750849 - DNA, 15 bp, Homo sapiens
tatggcctccctttg

SEQ ID NO: 750850 - DNA, 15 bp, Homo sapiens
atggcctccctttgg

SEQ ID NO: 750851 - DNA, 15 bp, Homo sapiens
tggcctccctttggg

SEQ ID NO: 750852 - DNA, 15 bp, Homo sapiens
ggcctccctttggga

SEQ ID NO: 750853 - DNA, 15 bp, Homo sapiens
gcctccctttgggag

SEQ ID NO: 750854 - DNA, 15 bp, Homo sapiens
cctccctttgggagc

SEQ ID NO: 750855 - DNA, 15 bp, Homo sapiens
ctccctttgggagcc

SEQ ID NO: 750856 - DNA, 15 bp, Homo sapiens
tccctttgggagcct

SEQ ID NO: 750857 - DNA, 15 bp, Homo sapiens
ccctttgggagcctt

SEQ ID NO: 750858 - DNA, 15 bp, Homo sapiens
cctttgggagccttg

SEQ ID NO: 750859 - DNA, 15 bp, Homo sapiens
ctttgggagccttgg

SEQ ID NO: 750860 - DNA, 15 bp, Homo sapiens
tttgggagccttggg

SEQ ID NO: 750861 - DNA, 15 bp, Homo sapiens
ttgggagccttgggc

SEQ ID NO: 750862 - DNA, 15 bp, Homo sapiens
tgggagccttgggct

SEQ ID NO: 750863 - DNA, 15 bp, Homo sapiens
gggagccttgggcta

SEQ ID NO: 750864 - DNA, 15 bp, Homo sapiens
ggagccttgggctag

SEQ ID NO: 750865 - DNA, 15 bp, Homo sapiens
gagccttgggctagc

SEQ ID NO: 750866 - DNA, 15 bp, Homo sapiens
agccttgggctagcc

SEQ ID NO: 750867 - DNA, 15 bp, Homo sapiens
gccttgggctagccc

SEQ ID NO: 750868 - DNA, 15 bp, Homo sapiens
ccttgggctagccct

SEQ ID NO: 750869 - DNA, 15 bp, Homo sapiens
cttgggctagccctg

SEQ ID NO: 750870 - DNA, 15 bp, Homo sapiens
ttgggctagccctgc

SEQ ID NO: 750871 - DNA, 15 bp, Homo sapiens
tgggctagccctgct

SEQ ID NO: 750872 - DNA, 15 bp, Homo sapiens
gggctagccctgctt

SEQ ID NO: 750873 - DNA, 15 bp, Homo sapiens
ggctagccctgcttc

SEQ ID NO: 750874 - DNA, 15 bp, Homo sapiens
gctagccctgcttct

SEQ ID NO: 750875 - DNA, 15 bp, Homo sapiens
ctagccctgcttcta

SEQ ID NO: 750876 - DNA, 15 bp, Homo sapiens
tagccctgcttctag

SEQ ID NO: 750877 - DNA, 15 bp, Homo sapiens
agccctgcttctagg

SEQ ID NO: 750878 - DNA, 15 bp, Homo sapiens
gccctgcttctaggt

SEQ ID NO: 750879 - DNA, 15 bp, Homo sapiens
ccctgcttctaggtg

SEQ ID NO: 750880 - DNA, 15 bp, Homo sapiens
cctgcttctaggtgc

SEQ ID NO: 750881 - DNA, 15 bp, Homo sapiens
ctgcttctaggtgcc

SEQ ID NO: 750882 - DNA, 15 bp, Homo sapiens
tgcttctaggtgccc

SEQ ID NO: 750883 - DNA, 15 bp, Homo sapiens
gcttctaggtgccca

SEQ ID NO: 750884 - DNA, 15 bp, Homo sapiens
cttctaggtgcccag

SEQ ID NO: 750885 - DNA, 15 bp, Homo sapiens
ttctaggtgcccagg

SEQ ID NO: 750886 - DNA, 15 bp, Homo sapiens
tctaggtgcccagga

SEQ ID NO: 750887 - DNA, 15 bp, Homo sapiens
ctaggtgcccaggaa

SEQ ID NO: 750888 - DNA, 15 bp, Homo sapiens
taggtgcccaggaaa

SEQ ID NO: 750889 - DNA, 15 bp, Homo sapiens
aggtgcccaggaaac

SEQ ID NO: 750890 - DNA, 15 bp, Homo sapiens
ggtgcccaggaaact

SEQ ID NO: 750891 - DNA, 15 bp, Homo sapiens
gtgcccaggaaactt

SEQ ID NO: 750892 - DNA, 15 bp, Homo sapiens
tgcccaggaaacttg

SEQ ID NO: 750893 - DNA, 15 bp, Homo sapiens
gcccaggaaacttga

SEQ ID NO: 750894 - DNA, 15 bp, Homo sapiens
cccaggaaacttgac

SEQ ID NO: 750895 - DNA, 15 bp, Homo sapiens
ccaggaaacttgacc

SEQ ID NO: 750896 - DNA, 15 bp, Homo sapiens
caggaaacttgacca

SEQ ID NO: 750897 - DNA, 15 bp, Homo sapiens
aggaaacttgaccaa

SEQ ID NO: 750898 - DNA, 15 bp, Homo sapiens
ggaaacttgaccaaa

SEQ ID NO: 750899 - DNA, 15 bp, Homo sapiens
gaaacttgaccaaac

SEQ ID NO: 750900 - DNA, 15 bp, Homo sapiens
aaacttgaccaaaca

SEQ ID NO: 750901 - DNA, 15 bp, Homo sapiens
aacttgaccaaacat

SEQ ID NO: 750902 - DNA, 15 bp, Homo sapiens
acttgaccaaacata

SEQ ID NO: 750903 - DNA, 15 bp, Homo sapiens
cttgaccaaacatac

SEQ ID NO: 750904 - DNA, 15 bp, Homo sapiens
ttgaccaaacataca

SEQ ID NO: 750905 - DNA, 15 bp, Homo sapiens
tgaccaaacatacaa

SEQ ID NO: 750906 - DNA, 15 bp, Homo sapiens
gaccaaacatacaac

SEQ ID NO: 750907 - DNA, 15 bp, Homo sapiens
accaaacatacaaca

SEQ ID NO: 750908 - DNA, 15 bp, Homo sapiens
ccaaacatacaacag

SEQ ID NO: 750909 - DNA, 15 bp, Homo sapiens
caaacatacaacagg

SEQ ID NO: 750910 - DNA, 15 bp, Homo sapiens
aaacatacaacagga

SEQ ID NO: 750911 - DNA, 15 bp, Homo sapiens
aacatacaacaggag

SEQ ID NO: 750912 - DNA, 15 bp, Homo sapiens
acatacaacaggagg

SEQ ID NO: 750913 - DNA, 15 bp, Homo sapiens
catacaacaggagga

SEQ ID NO: 750914 - DNA, 15 bp, Homo sapiens
atacaacaggaggaa

SEQ ID NO: 750915 - DNA, 15 bp, Homo sapiens
tacaacaggaggaaa

SEQ ID NO: 750916 - DNA, 15 bp, Homo sapiens
acaacaggaggaaaa

SEQ ID NO: 750917 - DNA, 15 bp, Homo sapiens
caacaggaggaaaag

SEQ ID NO: 750918 - DNA, 15 bp, Homo sapiens
aacaggaggaaaaga

SEQ ID NO: 750919 - DNA, 15 bp, Homo sapiens
acaggaggaaaagaa

SEQ ID NO: 750920 - DNA, 15 bp, Homo sapiens
caggaggaaaagaag

SEQ ID NO: 750921 - DNA, 15 bp, Homo sapiens
aggaggaaaagaaga

SEQ ID NO: 750922 - DNA, 15 bp, Homo sapiens
ggaggaaaagaagag

SEQ ID NO: 750923 - DNA, 15 bp, Homo sapiens
gaggaaaagaagagc

SEQ ID NO: 750924 - DNA, 15 bp, Homo sapiens
aggaaaagaagagct

SEQ ID NO: 750925 - DNA, 15 bp, Homo sapiens
ggaaaagaagagctg

SEQ ID NO: 750926 - DNA, 15 bp, Homo sapiens
gaaaagaagagctgc

SEQ ID NO: 750927 - DNA, 15 bp, Homo sapiens
aaaagaagagctgcc

SEQ ID NO: 750928 - DNA, 15 bp, Homo sapiens
aaagaagagctgcct

SEQ ID NO: 750929 - DNA, 15 bp, Homo sapiens
aagaagagctgcctg

SEQ ID NO: 750930 - DNA, 15 bp, Homo sapiens
agaagagctgcctgc

SEQ ID NO: 750931 - DNA, 15 bp, Homo sapiens
gaagagctgcctgcc

SEQ ID NO: 750932 - DNA, 15 bp, Homo sapiens
aagagctgcctgccc

SEQ ID NO: 750933 - DNA, 15 bp, Homo sapiens
agagctgcctgcccc

SEQ ID NO: 750934 - DNA, 15 bp, Homo sapiens
gagctgcctgccccc

SEQ ID NO: 750935 - DNA, 15 bp, Homo sapiens
agctgcctgccccct

SEQ ID NO: 750936 - DNA, 15 bp, Homo sapiens
gctgcctgccccctg

SEQ ID NO: 750937 - DNA, 15 bp, Homo sapiens
ctgcctgccccctgc

SEQ ID NO: 750938 - DNA, 15 bp, Homo sapiens
tgcctgccccctgct

SEQ ID NO: 750939 - DNA, 15 bp, Homo sapiens
gcctgccccctgctg

SEQ ID NO: 750940 - DNA, 15 bp, Homo sapiens
cctgccccctgctgt

SEQ ID NO: 750941 - DNA, 15 bp, Homo sapiens
ctgccccctgctgtt

SEQ ID NO: 750942 - DNA, 15 bp, Homo sapiens
tgccccctgctgttt

SEQ ID NO: 750943 - DNA, 15 bp, Homo sapiens
gccccctgctgtttg

SEQ ID NO: 750944 - DNA, 15 bp, Homo sapiens
ccccctgctgtttgg

SEQ ID NO: 750945 - DNA, 15 bp, Homo sapiens
cccctgctgtttggc

SEQ ID NO: 750946 - DNA, 15 bp, Homo sapiens
ccctgctgtttggcc

SEQ ID NO: 750947 - DNA, 15 bp, Homo sapiens
cctgctgtttggcct

SEQ ID NO: 750948 - DNA, 15 bp, Homo sapiens
ctgctgtttggcctg

SEQ ID NO: 750949 - DNA, 15 bp, Homo sapiens
tgctgtttggcctgg

SEQ ID NO: 750950 - DNA, 15 bp, Homo sapiens
gctgtttggcctggg

SEQ ID NO: 750951 - DNA, 15 bp, Homo sapiens
ctgtttggcctgggg

SEQ ID NO: 750952 - DNA, 15 bp, Homo sapiens
tgtttggcctggggg

SEQ ID NO: 750953 - DNA, 15 bp, Homo sapiens
gtttggcctggggga

SEQ ID NO: 750954 - DNA, 15 bp, Homo sapiens
tttggcctgggggat

SEQ ID NO: 750955 - DNA, 15 bp, Homo sapiens
ttggcctgggggata

SEQ ID NO: 750956 - DNA, 15 bp, Homo sapiens
tggcctgggggataa

SEQ ID NO: 750957 - DNA, 15 bp, Homo sapiens
ggcctgggggataaa

SEQ ID NO: 750958 - DNA, 15 bp, Homo sapiens
gcctgggggataaag

SEQ ID NO: 750959 - DNA, 15 bp, Homo sapiens
cctgggggataaagc

SEQ ID NO: 750960 - DNA, 15 bp, Homo sapiens
ctgggggataaagca

SEQ ID NO: 750961 - DNA, 15 bp, Homo sapiens
tgggggataaagcat

SEQ ID NO: 750962 - DNA, 15 bp, Homo sapiens
gggggataaagcatt

SEQ ID NO: 750963 - DNA, 15 bp, Homo sapiens
ggggataaagcattc

SEQ ID NO: 750964 - DNA, 15 bp, Homo sapiens
gggataaagcattcc

SEQ ID NO: 750965 - DNA, 15 bp, Homo sapiens
ggataaagcattcca

SEQ ID NO: 750966 - DNA, 15 bp, Homo sapiens
gataaagcattccaa

SEQ ID NO: 750967 - DNA, 15 bp, Homo sapiens
ataaagcattccaat

SEQ ID NO: 750968 - DNA, 15 bp, Homo sapiens
taaagcattccaatg

SEQ ID NO: 750969 - DNA, 15 bp, Homo sapiens
aaagcattccaatgg

SEQ ID NO: 750970 - DNA, 15 bp, Homo sapiens
aagcattccaatggt

SEQ ID NO: 750971 - DNA, 15 bp, Homo sapiens
agcattccaatggta

SEQ ID NO: 750972 - DNA, 15 bp, Homo sapiens
gcattccaatggtaa

SEQ ID NO: 750973 - DNA, 15 bp, Homo sapiens
cattccaatggtaag

SEQ ID NO: 750974 - DNA, 15 bp, Homo sapiens
attccaatggtaagt

SEQ ID NO: 750975 - DNA, 15 bp, Homo sapiens
ttccaatggtaagtc

SEQ ID NO: 750976 - DNA, 15 bp, Homo sapiens
tccaatggtaagtcc

SEQ ID NO: 750977 - DNA, 15 bp, Homo sapiens
ccaatggtaagtcca

SEQ ID NO: 750978 - DNA, 15 bp, Homo sapiens
caatggtaagtccaa

SEQ ID NO: 750979 - DNA, 15 bp, Homo sapiens
aatggtaagtccaaa

SEQ ID NO: 750980 - DNA, 15 bp, Homo sapiens
atggtaagtccaaat

SEQ ID NO: 750981 - DNA, 15 bp, Homo sapiens
tggtaagtccaaatg

SEQ ID NO: 750982 - DNA, 15 bp, Homo sapiens
ggtaagtccaaatgg

SEQ ID NO: 750983 - DNA, 15 bp, Homo sapiens
gtaagtccaaatgga

SEQ ID NO: 750984 - DNA, 15 bp, Homo sapiens
taagtccaaatggac

SEQ ID NO: 750985 - DNA, 15 bp, Homo sapiens
aagtccaaatggacc

SEQ ID NO: 750986 - DNA, 15 bp, Homo sapiens
agtccaaatggacct

SEQ ID NO: 750987 - DNA, 15 bp, Homo sapiens
gtccaaatggacctt

SEQ ID NO: 750988 - DNA, 15 bp, Homo sapiens
tccaaatggaccttc

SEQ ID NO: 750989 - DNA, 15 bp, Homo sapiens
ccaaatggaccttct

SEQ ID NO: 750990 - DNA, 15 bp, Homo sapiens
caaatggaccttctc

SEQ ID NO: 750991 - DNA, 15 bp, Homo sapiens
aaatggaccttctct

SEQ ID NO: 750992 - DNA, 15 bp, Homo sapiens
aatggaccttctctt

SEQ ID NO: 750993 - DNA, 15 bp, Homo sapiens
atggaccttctcttt

SEQ ID NO: 750994 - DNA, 15 bp, Homo sapiens
tggaccttctctttg

SEQ ID NO: 750995 - DNA, 15 bp, Homo sapiens
ggaccttctctttgc

SEQ ID NO: 750996 - DNA, 15 bp, Homo sapiens
gaccttctctttgcc

SEQ ID NO: 750997 - DNA, 15 bp, Homo sapiens
accttctctttgcct

SEQ ID NO: 750998 - DNA, 15 bp, Homo sapiens
ccttctctttgcctc

SEQ ID NO: 750999 - DNA, 15 bp, Homo sapiens
cttctctttgcctca

SEQ ID NO: 751000 - DNA, 15 bp, Homo sapiens
ttctctttgcctcac

SEQ ID NO: 751001 - DNA, 15 bp, Homo sapiens
tctctttgcctcaca

SEQ ID NO: 751002 - DNA, 15 bp, Homo sapiens
ctctttgcctcacag

SEQ ID NO: 751003 - DNA, 15 bp, Homo sapiens
tctttgcctcacagc

SEQ ID NO: 751004 - DNA, 15 bp, Homo sapiens
ctttgcctcacagct

SEQ ID NO: 751005 - DNA, 15 bp, Homo sapiens
tttgcctcacagcta

SEQ ID NO: 751006 - DNA, 15 bp, Homo sapiens
ttgcctcacagctat

SEQ ID NO: 751007 - DNA, 15 bp, Homo sapiens
tgcctcacagctatt

SEQ ID NO: 751008 - DNA, 15 bp, Homo sapiens
gcctcacagctattt

SEQ ID NO: 751009 - DNA, 15 bp, Homo sapiens
cctcacagctatttt

SEQ ID NO: 751010 - DNA, 15 bp, Homo sapiens
ctcacagctattttg

SEQ ID NO: 751011 - DNA, 15 bp, Homo sapiens
tcacagctattttgt

SEQ ID NO: 751012 - DNA, 15 bp, Homo sapiens
cacagctattttgtt

SEQ ID NO: 751013 - DNA, 15 bp, Homo sapiens
acagctattttgttc

SEQ ID NO: 751014 - DNA, 15 bp, Homo sapiens
cagctattttgttcc

SEQ ID NO: 751015 - DNA, 15 bp, Homo sapiens
agctattttgttccc

SEQ ID NO: 751016 - DNA, 15 bp, Homo sapiens
gctattttgttccct

SEQ ID NO: 751017 - DNA, 15 bp, Homo sapiens
ctattttgttccctg

SEQ ID NO: 751018 - DNA, 15 bp, Homo sapiens
tattttgttccctgg

SEQ ID NO: 751019 - DNA, 15 bp, Homo sapiens
attttgttccctgga

SEQ ID NO: 751020 - DNA, 15 bp, Homo sapiens
ttttgttccctggat

SEQ ID NO: 751021 - DNA, 15 bp, Homo sapiens
tttgttccctggatg

SEQ ID NO: 751022 - DNA, 15 bp, Homo sapiens
ttgttccctggatgg

SEQ ID NO: 751023 - DNA, 15 bp, Homo sapiens
tgttccctggatggg

SEQ ID NO: 751024 - DNA, 15 bp, Homo sapiens
gttccctggatgggg

SEQ ID NO: 751025 - DNA, 15 bp, Homo sapiens
ttccctggatgggga

SEQ ID NO: 751026 - DNA, 15 bp, Homo sapiens
tccctggatggggac

SEQ ID NO: 751027 - DNA, 15 bp, Homo sapiens
ccctggatggggaca

SEQ ID NO: 751028 - DNA, 15 bp, Homo sapiens
cctggatggggacat

SEQ ID NO: 751029 - DNA, 15 bp, Homo sapiens
ctggatggggacatt

SEQ ID NO: 751030 - DNA, 15 bp, Homo sapiens
tggatggggacattc

SEQ ID NO: 751031 - DNA, 15 bp, Homo sapiens
ggatggggacattca

SEQ ID NO: 751032 - DNA, 15 bp, Homo sapiens
gatggggacattcat

SEQ ID NO: 751033 - DNA, 15 bp, Homo sapiens
atggggacattcatt

SEQ ID NO: 751034 - DNA, 15 bp, Homo sapiens
tggggacattcattg

SEQ ID NO: 751035 - DNA, 15 bp, Homo sapiens
ggggacattcattgg

SEQ ID NO: 751036 - DNA, 15 bp, Homo sapiens
gggacattcattggt

SEQ ID NO: 751037 - DNA, 15 bp, Homo sapiens
ggacattcattggtg

SEQ ID NO: 751038 - DNA, 15 bp, Homo sapiens
gacattcattggtgg

SEQ ID NO: 751039 - DNA, 15 bp, Homo sapiens
acattcattggtggc

SEQ ID NO: 751040 - DNA, 15 bp, Homo sapiens
cattcattggtggct

SEQ ID NO: 751041 - DNA, 15 bp, Homo sapiens
attcattggtggctg

SEQ ID NO: 751042 - DNA, 15 bp, Homo sapiens
ttcattggtggctga

SEQ ID NO: 751043 - DNA, 15 bp, Homo sapiens
tcattggtggctgat

SEQ ID NO: 751044 - DNA, 15 bp, Homo sapiens
cattggtggctgata

SEQ ID NO: 751045 - DNA, 15 bp, Homo sapiens
attggtggctgatag

SEQ ID NO: 751046 - DNA, 15 bp, Homo sapiens
ttggtggctgatagc

SEQ ID NO: 751047 - DNA, 15 bp, Homo sapiens
tggtggctgatagcc

SEQ ID NO: 751048 - DNA, 15 bp, Homo sapiens
ggtggctgatagcca

SEQ ID NO: 751049 - DNA, 15 bp, Homo sapiens
gtggctgatagccag

SEQ ID NO: 751050 - DNA, 15 bp, Homo sapiens
tggctgatagccagg

SEQ ID NO: 751051 - DNA, 15 bp, Homo sapiens
ggctgatagccagga

SEQ ID NO: 751052 - DNA, 15 bp, Homo sapiens
gctgatagccaggag

SEQ ID NO: 751053 - DNA, 15 bp, Homo sapiens
ctgatagccaggagt

SEQ ID NO: 751054 - DNA, 15 bp, Homo sapiens
tgatagccaggagta

SEQ ID NO: 751055 - DNA, 15 bp, Homo sapiens
gatagccaggagtaa

SEQ ID NO: 751056 - DNA, 15 bp, Homo sapiens
atagccaggagtaag

SEQ ID NO: 751057 - DNA, 15 bp, Homo sapiens
tagccaggagtaagt

SEQ ID NO: 751058 - DNA, 15 bp, Homo sapiens
agccaggagtaagtg

SEQ ID NO: 751059 - DNA, 15 bp, Homo sapiens
gccaggagtaagtgc

SEQ ID NO: 751060 - DNA, 15 bp, Homo sapiens
ccaggagtaagtgct

SEQ ID NO: 751061 - DNA, 15 bp, Homo sapiens
caggagtaagtgctt

SEQ ID NO: 751062 - DNA, 15 bp, Homo sapiens
aggagtaagtgcttg

SEQ ID NO: 751063 - DNA, 15 bp, Homo sapiens
ggagtaagtgcttgc

SEQ ID NO: 751064 - DNA, 15 bp, Homo sapiens
gagtaagtgcttgct

SEQ ID NO: 751065 - DNA, 15 bp, Homo sapiens
agtaagtgcttgctt

SEQ ID NO: 751066 - DNA, 15 bp, Homo sapiens
gtaagtgcttgcttt

SEQ ID NO: 751067 - DNA, 15 bp, Homo sapiens
taagtgcttgctttg

SEQ ID NO: 751068 - DNA, 15 bp, Homo sapiens
aagtgcttgctttgg

SEQ ID NO: 751069 - DNA, 15 bp, Homo sapiens
agtgcttgctttggg

SEQ ID NO: 751070 - DNA, 15 bp, Homo sapiens
gtgcttgctttgggg

SEQ ID NO: 751071 - DNA, 15 bp, Homo sapiens
tgcttgctttggggc

SEQ ID NO: 751072 - DNA, 15 bp, Homo sapiens
gcttgctttggggct

SEQ ID NO: 751073 - DNA, 15 bp, Homo sapiens
cttgctttggggctg

SEQ ID NO: 751074 - DNA, 15 bp, Homo sapiens
ttgctttggggctgt

SEQ ID NO: 751075 - DNA, 15 bp, Homo sapiens
tgctttggggctgtc

SEQ ID NO: 751076 - DNA, 15 bp, Homo sapiens
gctttggggctgtct

SEQ ID NO: 751077 - DNA, 15 bp, Homo sapiens
ctttggggctgtctc

SEQ ID NO: 751078 - DNA, 15 bp, Homo sapiens
tttggggctgtctct

SEQ ID NO: 751079 - DNA, 15 bp, Homo sapiens
ttggggctgtctctc

SEQ ID NO: 751080 - DNA, 15 bp, Homo sapiens
tggggctgtctctct

SEQ ID NO: 751081 - DNA, 15 bp, Homo sapiens
ggggctgtctctctc

SEQ ID NO: 751082 - DNA, 15 bp, Homo sapiens
gggctgtctctctct

SEQ ID NO: 751083 - DNA, 15 bp, Homo sapiens
ggctgtctctctctt

SEQ ID NO: 751084 - DNA, 15 bp, Homo sapiens
gctgtctctctcttt

SEQ ID NO: 751085 - DNA, 15 bp, Homo sapiens
ctgtctctctctttc

SEQ ID NO: 751086 - DNA, 15 bp, Homo sapiens
tgtctctctctttct

SEQ ID NO: 751087 - DNA, 15 bp, Homo sapiens
gtctctctctttctc

SEQ ID NO: 751088 - DNA, 15 bp, Homo sapiens
tctctctctttctct

SEQ ID NO: 751089 - DNA, 15 bp, Homo sapiens
ctctctctttctctc

SEQ ID NO: 751090 - DNA, 15 bp, Homo sapiens
tctctctttctctct

SEQ ID NO: 751091 - DNA, 15 bp, Homo sapiens
ctctctttctctctc

SEQ ID NO: 751092 - DNA, 15 bp, Homo sapiens
tctctttctctctct

SEQ ID NO: 751093 - DNA, 15 bp, Homo sapiens
ctctttctctctctc

SEQ ID NO: 751094 - DNA, 15 bp, Homo sapiens
tctttctctctctct

SEQ ID NO: 751095 - DNA, 15 bp, Homo sapiens
ctttctctctctctc

SEQ ID NO: 751096 - DNA, 15 bp, Homo sapiens
tttctctctctctca

SEQ ID NO: 751097 - DNA, 15 bp, Homo sapiens
ttctctctctctcat

SEQ ID NO: 751098 - DNA, 15 bp, Homo sapiens
tctctctctctcatc

SEQ ID NO: 751099 - DNA, 15 bp, Homo sapiens
ctctctctctcatca

SEQ ID NO: 751100 - DNA, 15 bp, Homo sapiens
tctctctctcatcag

SEQ ID NO: 751101 - DNA, 15 bp, Homo sapiens
ctctctctcatcagg

SEQ ID NO: 751102 - DNA, 15 bp, Homo sapiens
tctctctcatcaggg

SEQ ID NO: 751103 - DNA, 15 bp, Homo sapiens
ctctctcatcagggc

SEQ ID NO: 751104 - DNA, 15 bp, Homo sapiens
tctctcatcagggca

SEQ ID NO: 751105 - DNA, 15 bp, Homo sapiens
ctctcatcagggcat

SEQ ID NO: 751106 - DNA, 15 bp, Homo sapiens
tctcatcagggcatg

SEQ ID NO: 751107 - DNA, 15 bp, Homo sapiens
ctcatcagggcatga

SEQ ID NO: 751108 - DNA, 15 bp, Homo sapiens
tcatcagggcatgag

SEQ ID NO: 751109 - DNA, 15 bp, Homo sapiens
catcagggcatgaga

SEQ ID NO: 751110 - DNA, 15 bp, Homo sapiens
atcagggcatgagag

SEQ ID NO: 751111 - DNA, 15 bp, Homo sapiens
tcagggcatgagagg

SEQ ID NO: 751112 - DNA, 15 bp, Homo sapiens
cagggcatgagaggc

SEQ ID NO: 751113 - DNA, 15 bp, Homo sapiens
agggcatgagaggcc

SEQ ID NO: 751114 - DNA, 15 bp, Homo sapiens
gggcatgagaggcct

SEQ ID NO: 751115 - DNA, 15 bp, Homo sapiens
ggcatgagaggcctg

SEQ ID NO: 751116 - DNA, 15 bp, Homo sapiens
gcatgagaggcctgg

SEQ ID NO: 751117 - DNA, 15 bp, Homo sapiens
catgagaggcctggt

SEQ ID NO: 751118 - DNA, 15 bp, Homo sapiens
atgagaggcctggtg

SEQ ID NO: 751119 - DNA, 15 bp, Homo sapiens
tgagaggcctggtgc

SEQ ID NO: 751120 - DNA, 15 bp, Homo sapiens
gagaggcctggtgca

SEQ ID NO: 751121 - DNA, 15 bp, Homo sapiens
agaggcctggtgcag

SEQ ID NO: 751122 - DNA, 15 bp, Homo sapiens
gaggcctggtgcaga

SEQ ID NO: 751123 - DNA, 15 bp, Homo sapiens
aggcctggtgcagaa

SEQ ID NO: 751124 - DNA, 15 bp, Homo sapiens
ggcctggtgcagaaa

SEQ ID NO: 751125 - DNA, 15 bp, Homo sapiens
gcctggtgcagaaac

SEQ ID NO: 751126 - DNA, 15 bp, Homo sapiens
cctggtgcagaaaca

SEQ ID NO: 751127 - DNA, 15 bp, Homo sapiens
ctggtgcagaaacag

SEQ ID NO: 751128 - DNA, 15 bp, Homo sapiens
tggtgcagaaacagt

SEQ ID NO: 751129 - DNA, 15 bp, Homo sapiens
ggtgcagaaacagtt

SEQ ID NO: 751130 - DNA, 15 bp, Homo sapiens
gtgcagaaacagtta

SEQ ID NO: 751131 - DNA, 15 bp, Homo sapiens
tgcagaaacagttac

SEQ ID NO: 751132 - DNA, 15 bp, Homo sapiens
gcagaaacagttaca

SEQ ID NO: 751133 - DNA, 15 bp, Homo sapiens
cagaaacagttacat

SEQ ID NO: 751134 - DNA, 15 bp, Homo sapiens
agaaacagttacatt

SEQ ID NO: 751135 - DNA, 15 bp, Homo sapiens
gaaacagttacattg

SEQ ID NO: 751136 - DNA, 15 bp, Homo sapiens
aaacagttacattgg

SEQ ID NO: 751137 - DNA, 15 bp, Homo sapiens
aacagttacattggc

SEQ ID NO: 751138 - DNA, 15 bp, Homo sapiens
acagttacattggca

SEQ ID NO: 751139 - DNA, 15 bp, Homo sapiens
cagttacattggcat

SEQ ID NO: 751140 - DNA, 15 bp, Homo sapiens
agttacattggcatt

SEQ ID NO: 751141 - DNA, 15 bp, Homo sapiens
gttacattggcattc

SEQ ID NO: 751142 - DNA, 15 bp, Homo sapiens
ttacattggcattcg

SEQ ID NO: 751143 - DNA, 15 bp, Homo sapiens
tacattggcattcga

SEQ ID NO: 751144 - DNA, 15 bp, Homo sapiens
acattggcattcgat

SEQ ID NO: 751145 - DNA, 15 bp, Homo sapiens
cattggcattcgatt

SEQ ID NO: 751146 - DNA, 15 bp, Homo sapiens
attggcattcgattg

SEQ ID NO: 751147 - DNA, 15 bp, Homo sapiens
ttggcattcgattgc

SEQ ID NO: 751148 - DNA, 15 bp, Homo sapiens
tggcattcgattgca

SEQ ID NO: 751149 - DNA, 15 bp, Homo sapiens
ggcattcgattgcaa

SEQ ID NO: 751150 - DNA, 15 bp, Homo sapiens
gcattcgattgcaat

SEQ ID NO: 751151 - DNA, 15 bp, Homo sapiens
cattcgattgcaatg

SEQ ID NO: 751152 - DNA, 15 bp, Homo sapiens
attcgattgcaatgc

SEQ ID NO: 751153 - DNA, 15 bp, Homo sapiens
ttcgattgcaatgcc

SEQ ID NO: 751154 - DNA, 15 bp, Homo sapiens
tcgattgcaatgcca

SEQ ID NO: 751155 - DNA, 15 bp, Homo sapiens
cgattgcaatgccag

SEQ ID NO: 751156 - DNA, 15 bp, Homo sapiens
gattgcaatgccagg

SEQ ID NO: 751157 - DNA, 15 bp, Homo sapiens
attgcaatgccagga

SEQ ID NO: 751158 - DNA, 15 bp, Homo sapiens
ttgcaatgccaggac

SEQ ID NO: 751159 - DNA, 15 bp, Homo sapiens
tgcaatgccaggacc

SEQ ID NO: 751160 - DNA, 15 bp, Homo sapiens
gcaatgccaggacct

SEQ ID NO: 751161 - DNA, 15 bp, Homo sapiens
caatgccaggacctc

SEQ ID NO: 751162 - DNA, 15 bp, Homo sapiens
aatgccaggacctcc

SEQ ID NO: 751163 - DNA, 15 bp, Homo sapiens
atgccaggacctcct

SEQ ID NO: 751164 - DNA, 15 bp, Homo sapiens
tgccaggacctcctt

SEQ ID NO: 751165 - DNA, 15 bp, Homo sapiens
gccaggacctccttc

SEQ ID NO: 751166 - DNA, 15 bp, Homo sapiens
ccaggacctccttcc

SEQ ID NO: 751167 - DNA, 15 bp, Homo sapiens
caggacctccttccc

SEQ ID NO: 751168 - DNA, 15 bp, Homo sapiens
aggacctccttccca

SEQ ID NO: 751169 - DNA, 15 bp, Homo sapiens
ggacctccttcccaa

SEQ ID NO: 751170 - DNA, 15 bp, Homo sapiens
gacctccttcccaaa

SEQ ID NO: 751171 - DNA, 15 bp, Homo sapiens
acctccttcccaaag

SEQ ID NO: 751172 - DNA, 15 bp, Homo sapiens
cctccttcccaaagt

SEQ ID NO: 751173 - DNA, 15 bp, Homo sapiens
ctccttcccaaagtg

SEQ ID NO: 751174 - DNA, 15 bp, Homo sapiens
tccttcccaaagtgg

SEQ ID NO: 751175 - DNA, 15 bp, Homo sapiens
ccttcccaaagtggg

SEQ ID NO: 751176 - DNA, 15 bp, Homo sapiens
cttcccaaagtgggc

SEQ ID NO: 751177 - DNA, 15 bp, Homo sapiens
ttcccaaagtgggcg

SEQ ID NO: 751178 - DNA, 15 bp, Homo sapiens
tcccaaagtgggcgt

SEQ ID NO: 751179 - DNA, 15 bp, Homo sapiens
cccaaagtgggcgtc

SEQ ID NO: 751180 - DNA, 15 bp, Homo sapiens
ccaaagtgggcgtcc

SEQ ID NO: 751181 - DNA, 15 bp, Homo sapiens
caaagtgggcgtccc

SEQ ID NO: 751182 - DNA, 15 bp, Homo sapiens
aaagtgggcgtcccg

SEQ ID NO: 751183 - DNA, 15 bp, Homo sapiens
aagtgggcgtcccgg

SEQ ID NO: 751184 - DNA, 15 bp, Homo sapiens
agtgggcgtcccggc

SEQ ID NO: 751185 - DNA, 15 bp, Homo sapiens
gtgggcgtcccggct

SEQ ID NO: 751186 - DNA, 15 bp, Homo sapiens
tgggcgtcccggctc

SEQ ID NO: 751187 - DNA, 15 bp, Homo sapiens
gggcgtcccggctca

SEQ ID NO: 751188 - DNA, 15 bp, Homo sapiens
ggcgtcccggctcac

SEQ ID NO: 751189 - DNA, 15 bp, Homo sapiens
gcgtcccggctcaca

SEQ ID NO: 751190 - DNA, 15 bp, Homo sapiens
cgtcccggctcacac

SEQ ID NO: 751191 - DNA, 15 bp, Homo sapiens
gtcccggctcacact

SEQ ID NO: 751192 - DNA, 15 bp, Homo sapiens
tcccggctcacactg

SEQ ID NO: 751193 - DNA, 15 bp, Homo sapiens
cccggctcacactgg

SEQ ID NO: 751194 - DNA, 15 bp, Homo sapiens
ccggctcacactggc

SEQ ID NO: 751195 - DNA, 15 bp, Homo sapiens
cggctcacactggca

SEQ ID NO: 751196 - DNA, 15 bp, Homo sapiens
ggctcacactggcag

SEQ ID NO: 751197 - DNA, 15 bp, Homo sapiens
gctcacactggcagt

SEQ ID NO: 751198 - DNA, 15 bp, Homo sapiens
ctcacactggcagtg

SEQ ID NO: 751199 - DNA, 15 bp, Homo sapiens
tcacactggcagtga

SEQ ID NO: 751200 - DNA, 15 bp, Homo sapiens
cacactggcagtgac

SEQ ID NO: 751201 - DNA, 15 bp, Homo sapiens
acactggcagtgacc

SEQ ID NO: 751202 - DNA, 15 bp, Homo sapiens
cactggcagtgacca

SEQ ID NO: 751203 - DNA, 15 bp, Homo sapiens
actggcagtgaccat

SEQ ID NO: 751204 - DNA, 15 bp, Homo sapiens
ctggcagtgaccatg

SEQ ID NO: 751205 - DNA, 15 bp, Homo sapiens
tggcagtgaccatgc

SEQ ID NO: 751206 - DNA, 15 bp, Homo sapiens
ggcagtgaccatgct

SEQ ID NO: 751207 - DNA, 15 bp, Homo sapiens
gcagtgaccatgcta

SEQ ID NO: 751208 - DNA, 15 bp, Homo sapiens
cagtgaccatgctaa

SEQ ID NO: 751209 - DNA, 15 bp, Homo sapiens
agtgaccatgctaat

SEQ ID NO: 751210 - DNA, 15 bp, Homo sapiens
gtgaccatgctaatc

SEQ ID NO: 751211 - DNA, 15 bp, Homo sapiens
tgaccatgctaatct

SEQ ID NO: 751212 - DNA, 15 bp, Homo sapiens
gaccatgctaatctg

SEQ ID NO: 751213 - DNA, 15 bp, Homo sapiens
accatgctaatctgt

SEQ ID NO: 751214 - DNA, 15 bp, Homo sapiens
ccatgctaatctgtg

SEQ ID NO: 751215 - DNA, 15 bp, Homo sapiens
catgctaatctgtga

SEQ ID NO: 751216 - DNA, 15 bp, Homo sapiens
atgctaatctgtgaa

SEQ ID NO: 751217 - DNA, 15 bp, Homo sapiens
tgctaatctgtgaat

SEQ ID NO: 751218 - DNA, 15 bp, Homo sapiens
gctaatctgtgaatc

SEQ ID NO: 751219 - DNA, 15 bp, Homo sapiens
ctaatctgtgaatca

SEQ ID NO: 751220 - DNA, 15 bp, Homo sapiens
taatctgtgaatcac

SEQ ID NO: 751221 - DNA, 15 bp, Homo sapiens
aatctgtgaatcaca

SEQ ID NO: 751222 - DNA, 15 bp, Homo sapiens
atctgtgaatcacag

SEQ ID NO: 751223 - DNA, 15 bp, Homo sapiens
tctgtgaatcacagc

SEQ ID NO: 751224 - DNA, 15 bp, Homo sapiens
ctgtgaatcacagca

SEQ ID NO: 751225 - DNA, 15 bp, Homo sapiens
tgtgaatcacagcag

SEQ ID NO: 751226 - DNA, 15 bp, Homo sapiens
gtgaatcacagcagc

SEQ ID NO: 751227 - DNA, 15 bp, Homo sapiens
tgaatcacagcagcc

SEQ ID NO: 751228 - DNA, 15 bp, Homo sapiens
gaatcacagcagcca

SEQ ID NO: 751229 - DNA, 15 bp, Homo sapiens
aatcacagcagccaa

SEQ ID NO: 751230 - DNA, 15 bp, Homo sapiens
atcacagcagccaat

SEQ ID NO: 751231 - DNA, 15 bp, Homo sapiens
tcacagcagccaata

SEQ ID NO: 751232 - DNA, 15 bp, Homo sapiens
cacagcagccaatac

SEQ ID NO: 751233 - DNA, 15 bp, Homo sapiens
acagcagccaatacc

SEQ ID NO: 751234 - DNA, 15 bp, Homo sapiens
cagcagccaatacca

SEQ ID NO: 751235 - DNA, 15 bp, Homo sapiens
agcagccaataccac

SEQ ID NO: 751236 - DNA, 15 bp, Homo sapiens
gcagccaataccacc

SEQ ID NO: 751237 - DNA, 15 bp, Homo sapiens
cagccaataccacct

SEQ ID NO: 751238 - DNA, 15 bp, Homo sapiens
agccaataccacctt

SEQ ID NO: 751239 - DNA, 15 bp, Homo sapiens
gccaataccaccttg

SEQ ID NO: 751240 - DNA, 15 bp, Homo sapiens
ccaataccaccttgc

SEQ ID NO: 751241 - DNA, 15 bp, Homo sapiens
caataccaccttgcc

SEQ ID NO: 751242 - DNA, 15 bp, Homo sapiens
aataccaccttgcca

SEQ ID NO: 751243 - DNA, 15 bp, Homo sapiens
ataccaccttgccaa

SEQ ID NO: 751244 - DNA, 15 bp, Homo sapiens
taccaccttgccaag

SEQ ID NO: 751245 - DNA, 15 bp, Homo sapiens
accaccttgccaagc

SEQ ID NO: 751246 - DNA, 15 bp, Homo sapiens
ccaccttgccaagct

SEQ ID NO: 751247 - DNA, 15 bp, Homo sapiens
caccttgccaagctg

SEQ ID NO: 751248 - DNA, 15 bp, Homo sapiens
accttgccaagctgc

SEQ ID NO: 751249 - DNA, 15 bp, Homo sapiens
ccttgccaagctgca

SEQ ID NO: 751250 - DNA, 15 bp, Homo sapiens
cttgccaagctgcag

SEQ ID NO: 751251 - DNA, 15 bp, Homo sapiens
ttgccaagctgcaga

SEQ ID NO: 751252 - DNA, 15 bp, Homo sapiens
tgccaagctgcagat

SEQ ID NO: 751253 - DNA, 15 bp, Homo sapiens
gccaagctgcagatc

SEQ ID NO: 751254 - DNA, 15 bp, Homo sapiens
ccaagctgcagatcc

SEQ ID NO: 751255 - DNA, 15 bp, Homo sapiens
caagctgcagatccc

SEQ ID NO: 751256 - DNA, 15 bp, Homo sapiens
aagctgcagatcccc

SEQ ID NO: 751257 - DNA, 15 bp, Homo sapiens
agctgcagatcccct

SEQ ID NO: 751258 - DNA, 15 bp, Homo sapiens
gctgcagatcccctg

SEQ ID NO: 751259 - DNA, 15 bp, Homo sapiens
ctgcagatcccctgg

SEQ ID NO: 751260 - DNA, 15 bp, Homo sapiens
tgcagatcccctgga

SEQ ID NO: 751261 - DNA, 15 bp, Homo sapiens
gcagatcccctggaa

SEQ ID NO: 751262 - DNA, 15 bp, Homo sapiens
cagatcccctggaag

SEQ ID NO: 751263 - DNA, 15 bp, Homo sapiens
agatcccctggaagg

SEQ ID NO: 751264 - DNA, 15 bp, Homo sapiens
gatcccctggaaggt

SEQ ID NO: 751265 - DNA, 15 bp, Homo sapiens
atcccctggaaggtc

SEQ ID NO: 751266 - DNA, 15 bp, Homo sapiens
tcccctggaaggtcg

SEQ ID NO: 751267 - DNA, 15 bp, Homo sapiens
cccctggaaggtcgc

SEQ ID NO: 751268 - DNA, 15 bp, Homo sapiens
ccctggaaggtcgcc

SEQ ID NO: 751269 - DNA, 15 bp, Homo sapiens
cctggaaggtcgcct

SEQ ID NO: 751270 - DNA, 15 bp, Homo sapiens
ctggaaggtcgcctt

SEQ ID NO: 751271 - DNA, 15 bp, Homo sapiens
tggaaggtcgccttt

SEQ ID NO: 751272 - DNA, 15 bp, Homo sapiens
ggaaggtcgcctttg

SEQ ID NO: 751273 - DNA, 15 bp, Homo sapiens
gaaggtcgcctttgt

SEQ ID NO: 751274 - DNA, 15 bp, Homo sapiens
aaggtcgcctttgtg

SEQ ID NO: 751275 - DNA, 15 bp, Homo sapiens
aggtcgcctttgtgg

SEQ ID NO: 751276 - DNA, 15 bp, Homo sapiens
ggtcgcctttgtggt

SEQ ID NO: 751277 - DNA, 15 bp, Homo sapiens
gtcgcctttgtggtt

SEQ ID NO: 751278 - DNA, 15 bp, Homo sapiens
tcgcctttgtggttc

SEQ ID NO: 751279 - DNA, 15 bp, Homo sapiens
cgcctttgtggttcc

SEQ ID NO: 751280 - DNA, 15 bp, Homo sapiens
gcctttgtggttcca

SEQ ID NO: 751281 - DNA, 15 bp, Homo sapiens
cctttgtggttccag

SEQ ID NO: 751282 - DNA, 15 bp, Homo sapiens
ctttgtggttccagt

SEQ ID NO: 751283 - DNA, 15 bp, Homo sapiens
tttgtggttccagtg

SEQ ID NO: 751284 - DNA, 15 bp, Homo sapiens
ttgtggttccagtga

SEQ ID NO: 751285 - DNA, 15 bp, Homo sapiens
tgtggttccagtgaa

SEQ ID NO: 751286 - DNA, 15 bp, Homo sapiens
gtggttccagtgaaa

SEQ ID NO: 751287 - DNA, 15 bp, Homo sapiens
tggttccagtgaaag

SEQ ID NO: 751288 - DNA, 15 bp, Homo sapiens
ggttccagtgaaagg

SEQ ID NO: 751289 - DNA, 15 bp, Homo sapiens
gttccagtgaaaggg

SEQ ID NO: 751290 - DNA, 15 bp, Homo sapiens
ttccagtgaaagggc

SEQ ID NO: 751291 - DNA, 15 bp, Homo sapiens
tccagtgaaagggct

SEQ ID NO: 751292 - DNA, 15 bp, Homo sapiens
ccagtgaaagggctg

SEQ ID NO: 751293 - DNA, 15 bp, Homo sapiens
cagtgaaagggctgt

SEQ ID NO: 751294 - DNA, 15 bp, Homo sapiens
agtgaaagggctgtt

SEQ ID NO: 751295 - DNA, 15 bp, Homo sapiens
gtgaaagggctgttt

SEQ ID NO: 751296 - DNA, 15 bp, Homo sapiens
tgaaagggctgtttg

SEQ ID NO: 751297 - DNA, 15 bp, Homo sapiens
gaaagggctgtttgt

SEQ ID NO: 751298 - DNA, 15 bp, Homo sapiens
aaagggctgtttgtg

SEQ ID NO: 751299 - DNA, 15 bp, Homo sapiens
aagggctgtttgtgc

SEQ ID NO: 751300 - DNA, 15 bp, Homo sapiens
agggctgtttgtgct

SEQ ID NO: 751301 - DNA, 15 bp, Homo sapiens
gggctgtttgtgctg

SEQ ID NO: 751302 - DNA, 15 bp, Homo sapiens
ggctgtttgtgctgt

SEQ ID NO: 751303 - DNA, 15 bp, Homo sapiens
gctgtttgtgctgtg

SEQ ID NO: 751304 - DNA, 15 bp, Homo sapiens
ctgtttgtgctgtga

SEQ ID NO: 751305 - DNA, 15 bp, Homo sapiens
tgtttgtgctgtgat

SEQ ID NO: 751306 - DNA, 15 bp, Homo sapiens
gtttgtgctgtgatg

SEQ ID NO: 751307 - DNA, 15 bp, Homo sapiens
tttgtgctgtgatgc

SEQ ID NO: 751308 - DNA, 15 bp, Homo sapiens
ttgtgctgtgatgcc

SEQ ID NO: 751309 - DNA, 15 bp, Homo sapiens
tgtgctgtgatgcca

SEQ ID NO: 751310 - DNA, 15 bp, Homo sapiens
gtgctgtgatgccag

SEQ ID NO: 751311 - DNA, 15 bp, Homo sapiens
tgctgtgatgccagg

SEQ ID NO: 751312 - DNA, 15 bp, Homo sapiens
gctgtgatgccaggc

SEQ ID NO: 751313 - DNA, 15 bp, Homo sapiens
ctgtgatgccaggcc

SEQ ID NO: 751314 - DNA, 15 bp, Homo sapiens
tgtgatgccaggccc

SEQ ID NO: 751315 - DNA, 15 bp, Homo sapiens
gtgatgccaggccct

SEQ ID NO: 751316 - DNA, 15 bp, Homo sapiens
tgatgccaggccctg

SEQ ID NO: 751317 - DNA, 15 bp, Homo sapiens
gatgccaggccctgg

SEQ ID NO: 751318 - DNA, 15 bp, Homo sapiens
atgccaggccctggg

SEQ ID NO: 751319 - DNA, 15 bp, Homo sapiens
tgccaggccctgggc

SEQ ID NO: 751320 - DNA, 15 bp, Homo sapiens
gccaggccctgggcc

SEQ ID NO: 751321 - DNA, 15 bp, Homo sapiens
ccaggccctgggccg

SEQ ID NO: 751322 - DNA, 15 bp, Homo sapiens
caggccctgggccgt

SEQ ID NO: 751323 - DNA, 15 bp, Homo sapiens
aggccctgggccgtg

SEQ ID NO: 751324 - DNA, 15 bp, Homo sapiens
ggccctgggccgtgt

SEQ ID NO: 751325 - DNA, 15 bp, Homo sapiens
gccctgggccgtgtg

SEQ ID NO: 751326 - DNA, 15 bp, Homo sapiens
ccctgggccgtgtgg

SEQ ID NO: 751327 - DNA, 15 bp, Homo sapiens
cctgggccgtgtggg

SEQ ID NO: 751328 - DNA, 15 bp, Homo sapiens
ctgggccgtgtgggg

SEQ ID NO: 751329 - DNA, 15 bp, Homo sapiens
tgggccgtgtgggga

SEQ ID NO: 751330 - DNA, 15 bp, Homo sapiens
gggccgtgtggggaa

SEQ ID NO: 751331 - DNA, 15 bp, Homo sapiens
ggccgtgtggggaac

SEQ ID NO: 751332 - DNA, 15 bp, Homo sapiens
gccgtgtggggaaca

SEQ ID NO: 751333 - DNA, 15 bp, Homo sapiens
ccgtgtggggaacac

SEQ ID NO: 751334 - DNA, 15 bp, Homo sapiens
cgtgtggggaacact

SEQ ID NO: 751335 - DNA, 15 bp, Homo sapiens
gtgtggggaacactg

SEQ ID NO: 751336 - DNA, 15 bp, Homo sapiens
tgtggggaacactgg

SEQ ID NO: 751337 - DNA, 15 bp, Homo sapiens
gtggggaacactggg

SEQ ID NO: 751338 - DNA, 15 bp, Homo sapiens
tggggaacactgggt

SEQ ID NO: 751339 - DNA, 15 bp, Homo sapiens
ggggaacactgggtc

SEQ ID NO: 751340 - DNA, 15 bp, Homo sapiens
gggaacactgggtcc

SEQ ID NO: 751341 - DNA, 15 bp, Homo sapiens
ggaacactgggtccc

SEQ ID NO: 751342 - DNA, 15 bp, Homo sapiens
gaacactgggtccct

SEQ ID NO: 751343 - DNA, 15 bp, Homo sapiens
aacactgggtccctt

SEQ ID NO: 751344 - DNA, 15 bp, Homo sapiens
acactgggtcccttg

SEQ ID NO: 751345 - DNA, 15 bp, Homo sapiens
cactgggtcccttgg

SEQ ID NO: 751346 - DNA, 15 bp, Homo sapiens
actgggtcccttgga

SEQ ID NO: 751347 - DNA, 15 bp, Homo sapiens
ctgggtcccttggag

SEQ ID NO: 751348 - DNA, 15 bp, Homo sapiens
tgggtcccttggaga

SEQ ID NO: 751349 - DNA, 15 bp, Homo sapiens
gggtcccttggagac

SEQ ID NO: 751350 - DNA, 15 bp, Homo sapiens
ggtcccttggagaca

SEQ ID NO: 751351 - DNA, 15 bp, Homo sapiens
gtcccttggagacat

SEQ ID NO: 751352 - DNA, 15 bp, Homo sapiens
tcccttggagacatc

SEQ ID NO: 751353 - DNA, 15 bp, Homo sapiens
cccttggagacatcc

SEQ ID NO: 751354 - DNA, 15 bp, Homo sapiens
ccttggagacatccc

SEQ ID NO: 751355 - DNA, 15 bp, Homo sapiens
cttggagacatccct

SEQ ID NO: 751356 - DNA, 15 bp, Homo sapiens
ttggagacatccctg

SEQ ID NO: 751357 - DNA, 15 bp, Homo sapiens
tggagacatccctgg

SEQ ID NO: 751358 - DNA, 15 bp, Homo sapiens
ggagacatccctggg

SEQ ID NO: 751359 - DNA, 15 bp, Homo sapiens
gagacatccctgggg

SEQ ID NO: 751360 - DNA, 15 bp, Homo sapiens
agacatccctgggga

SEQ ID NO: 751361 - DNA, 15 bp, Homo sapiens
gacatccctggggat

SEQ ID NO: 751362 - DNA, 15 bp, Homo sapiens
acatccctggggatc

SEQ ID NO: 751363 - DNA, 15 bp, Homo sapiens
catccctggggatca

SEQ ID NO: 751364 - DNA, 15 bp, Homo sapiens
atccctggggatcag

SEQ ID NO: 751365 - DNA, 15 bp, Homo sapiens
tccctggggatcaga

SEQ ID NO: 751366 - DNA, 15 bp, Homo sapiens
ccctggggatcagac

SEQ ID NO: 751367 - DNA, 15 bp, Homo sapiens
cctggggatcagaca

SEQ ID NO: 751368 - DNA, 15 bp, Homo sapiens
ctggggatcagacag

SEQ ID NO: 751369 - DNA, 15 bp, Homo sapiens
tggggatcagacagg

SEQ ID NO: 751370 - DNA, 15 bp, Homo sapiens
ggggatcagacaggg

SEQ ID NO: 751371 - DNA, 15 bp, Homo sapiens
gggatcagacagggc

SEQ ID NO: 751372 - DNA, 15 bp, Homo sapiens
ggatcagacagggcc

SEQ ID NO: 751373 - DNA, 15 bp, Homo sapiens
gatcagacagggcca

SEQ ID NO: 751374 - DNA, 15 bp, Homo sapiens
atcagacagggccat

SEQ ID NO: 751375 - DNA, 15 bp, Homo sapiens
tcagacagggccatg

SEQ ID NO: 751376 - DNA, 15 bp, Homo sapiens
cagacagggccatgc

SEQ ID NO: 751377 - DNA, 15 bp, Homo sapiens
agacagggccatgcc

SEQ ID NO: 751378 - DNA, 15 bp, Homo sapiens
gacagggccatgcct

SEQ ID NO: 751379 - DNA, 15 bp, Homo sapiens
acagggccatgcctt

SEQ ID NO: 751380 - DNA, 15 bp, Homo sapiens
cagggccatgccttt

SEQ ID NO: 751381 - DNA, 15 bp, Homo sapiens
agggccatgcctttc

SEQ ID NO: 751382 - DNA, 15 bp, Homo sapiens
gggccatgcctttct

SEQ ID NO: 751383 - DNA, 15 bp, Homo sapiens
ggccatgcctttctg

SEQ ID NO: 751384 - DNA, 15 bp, Homo sapiens
gccatgcctttctgt

SEQ ID NO: 751385 - DNA, 15 bp, Homo sapiens
ccatgcctttctgtg

SEQ ID NO: 751386 - DNA, 15 bp, Homo sapiens
catgcctttctgtgc

SEQ ID NO: 751387 - DNA, 15 bp, Homo sapiens
atgcctttctgtgca

SEQ ID NO: 751388 - DNA, 15 bp, Homo sapiens
tgcctttctgtgcac

SEQ ID NO: 751389 - DNA, 15 bp, Homo sapiens
gcctttctgtgcaca

SEQ ID NO: 751390 - DNA, 15 bp, Homo sapiens
cctttctgtgcacag

SEQ ID NO: 751391 - DNA, 15 bp, Homo sapiens
ctttctgtgcacagt

SEQ ID NO: 751392 - DNA, 15 bp, Homo sapiens
tttctgtgcacagtc

SEQ ID NO: 751393 - DNA, 15 bp, Homo sapiens
ttctgtgcacagtca

SEQ ID NO: 751394 - DNA, 15 bp, Homo sapiens
tctgtgcacagtcag

SEQ ID NO: 751395 - DNA, 15 bp, Homo sapiens
tcttgaactcctgat

SEQ ID NO: 751396 - DNA, 15 bp, Homo sapiens
cttgaactcctgatc

SEQ ID NO: 751397 - DNA, 15 bp, Homo sapiens
ttgaactcctgatct

SEQ ID NO: 751398 - DNA, 15 bp, Homo sapiens
tgaactcctgatctc

SEQ ID NO: 751399 - DNA, 15 bp, Homo sapiens
gaactcctgatctca

SEQ ID NO: 751400 - DNA, 15 bp, Homo sapiens
aactcctgatctcaa

SEQ ID NO: 751401 - DNA, 15 bp, Homo sapiens
actcctgatctcaag

SEQ ID NO: 751402 - DNA, 15 bp, Homo sapiens
ctcctgatctcaagt

SEQ ID NO: 751403 - DNA, 15 bp, Homo sapiens
tcctgatctcaagta

SEQ ID NO: 751404 - DNA, 15 bp, Homo sapiens
cctgatctcaagtac

SEQ ID NO: 751405 - DNA, 15 bp, Homo sapiens
ctgatctcaagtact

SEQ ID NO: 751406 - DNA, 15 bp, Homo sapiens
tgatctcaagtactc

SEQ ID NO: 751407 - DNA, 15 bp, Homo sapiens
gatctcaagtactcc

SEQ ID NO: 751408 - DNA, 15 bp, Homo sapiens
atctcaagtactcca

SEQ ID NO: 751409 - DNA, 15 bp, Homo sapiens
tctcaagtactccac

SEQ ID NO: 751410 - DNA, 15 bp, Homo sapiens
ctcaagtactccacc

SEQ ID NO: 751411 - DNA, 15 bp, Homo sapiens
tcaagtactccacct

SEQ ID NO: 751412 - DNA, 15 bp, Homo sapiens
caagtactccacctg

SEQ ID NO: 751413 - DNA, 15 bp, Homo sapiens
aagtactccacctgc

SEQ ID NO: 751414 - DNA, 15 bp, Homo sapiens
agtactccacctgcc

SEQ ID NO: 751415 - DNA, 15 bp, Homo sapiens
gtactccacctgcct

SEQ ID NO: 751416 - DNA, 15 bp, Homo sapiens
tactccacctgcctc

SEQ ID NO: 751417 - DNA, 15 bp, Homo sapiens
actccacctgcctcg

SEQ ID NO: 751418 - DNA, 15 bp, Homo sapiens
ctccacctgcctcgg

SEQ ID NO: 751419 - DNA, 15 bp, Homo sapiens
tccacctgcctcggc

SEQ ID NO: 751420 - DNA, 15 bp, Homo sapiens
ccacctgcctcggcc

SEQ ID NO: 751421 - DNA, 15 bp, Homo sapiens
cacctgcctcggcct

SEQ ID NO: 751422 - DNA, 15 bp, Homo sapiens
acctgcctcggcctc

SEQ ID NO: 751423 - DNA, 15 bp, Homo sapiens
cctgcctcggcctcc

SEQ ID NO: 751424 - DNA, 15 bp, Homo sapiens
ctgcctcggcctccc

SEQ ID NO: 751425 - DNA, 15 bp, Homo sapiens
tgcctcggcctccca

SEQ ID NO: 751426 - DNA, 15 bp, Homo sapiens
gcctcggcctcccag

SEQ ID NO: 751427 - DNA, 15 bp, Homo sapiens
cctcggcctcccaga

SEQ ID NO: 751428 - DNA, 15 bp, Homo sapiens
ctcggcctcccagag

SEQ ID NO: 751429 - DNA, 15 bp, Homo sapiens
tcggcctcccagagt

SEQ ID NO: 751430 - DNA, 15 bp, Homo sapiens
cggcctcccagagtg

SEQ ID NO: 751431 - DNA, 15 bp, Homo sapiens
ggcctcccagagtgc

SEQ ID NO: 751432 - DNA, 15 bp, Homo sapiens
gcctcccagagtgct

SEQ ID NO: 751433 - DNA, 15 bp, Homo sapiens
cctcccagagtgctg

SEQ ID NO: 751434 - DNA, 15 bp, Homo sapiens
ctcccagagtgctgg

SEQ ID NO: 751435 - DNA, 15 bp, Homo sapiens
tcccagagtgctggg

SEQ ID NO: 751436 - DNA, 15 bp, Homo sapiens
cccagagtgctggga

SEQ ID NO: 751437 - DNA, 15 bp, Homo sapiens
ccagagtgctgggat

SEQ ID NO: 751438 - DNA, 15 bp, Homo sapiens
cagagtgctgggatt

SEQ ID NO: 751439 - DNA, 15 bp, Homo sapiens
agagtgctgggatta

SEQ ID NO: 751440 - DNA, 15 bp, Homo sapiens
gagtgctgggattac

SEQ ID NO: 751441 - DNA, 15 bp, Homo sapiens
tgggattacaggtgt

SEQ ID NO: 751442 - DNA, 15 bp, Homo sapiens
gggattacaggtgtg

SEQ ID NO: 751443 - DNA, 15 bp, Homo sapiens
ggattacaggtgtga

SEQ ID NO: 751444 - DNA, 15 bp, Homo sapiens
gattacaggtgtgag

SEQ ID NO: 751445 - DNA, 15 bp, Homo sapiens
attacaggtgtgagc

SEQ ID NO: 751446 - DNA, 15 bp, Homo sapiens
ttacaggtgtgagcc

SEQ ID NO: 751447 - DNA, 15 bp, Homo sapiens
tacaggtgtgagcca

SEQ ID NO: 751448 - DNA, 15 bp, Homo sapiens
acaggtgtgagccac

SEQ ID NO: 751449 - DNA, 15 bp, Homo sapiens
caggtgtgagccact

SEQ ID NO: 751450 - DNA, 15 bp, Homo sapiens
aggtgtgagccactg

SEQ ID NO: 751451 - DNA, 15 bp, Homo sapiens
ggtgtgagccactgc

SEQ ID NO: 751452 - DNA, 15 bp, Homo sapiens
gtgtgagccactgca

SEQ ID NO: 751453 - DNA, 15 bp, Homo sapiens
tgtgagccactgcac

SEQ ID NO: 751454 - DNA, 15 bp, Homo sapiens
gtgagccactgcacc

SEQ ID NO: 751455 - DNA, 15 bp, Homo sapiens
tgagccactgcaccc

SEQ ID NO: 751456 - DNA, 15 bp, Homo sapiens
gagccactgcaccca

SEQ ID NO: 751457 - DNA, 15 bp, Homo sapiens
agccactgcacccag

SEQ ID NO: 751458 - DNA, 15 bp, Homo sapiens
gccactgcacccagc

SEQ ID NO: 751459 - DNA, 15 bp, Homo sapiens
ccactgcacccagct

SEQ ID NO: 751460 - DNA, 15 bp, Homo sapiens
cactgcacccagctg

SEQ ID NO: 751461 - DNA, 15 bp, Homo sapiens
actgcacccagctgt

SEQ ID NO: 751462 - DNA, 15 bp, Homo sapiens
ctgcacccagctgtt

SEQ ID NO: 751463 - DNA, 15 bp, Homo sapiens
tgcacccagctgttc

SEQ ID NO: 751464 - DNA, 15 bp, Homo sapiens
gcacccagctgttcc

SEQ ID NO: 751465 - DNA, 15 bp, Homo sapiens
cacccagctgttcca

SEQ ID NO: 751466 - DNA, 15 bp, Homo sapiens
acccagctgttccaa

SEQ ID NO: 751467 - DNA, 15 bp, Homo sapiens
cccagctgttccaag

SEQ ID NO: 751468 - DNA, 15 bp, Homo sapiens
ccagctgttccaagt

SEQ ID NO: 751469 - DNA, 15 bp, Homo sapiens
cagctgttccaagta

SEQ ID NO: 751470 - DNA, 15 bp, Homo sapiens
agctgttccaagtac

SEQ ID NO: 751471 - DNA, 15 bp, Homo sapiens
gctgttccaagtact

SEQ ID NO: 751472 - DNA, 15 bp, Homo sapiens
ctgttccaagtactt

SEQ ID NO: 751473 - DNA, 15 bp, Homo sapiens
tgttccaagtacttc

SEQ ID NO: 751474 - DNA, 15 bp, Homo sapiens
gttccaagtacttct

SEQ ID NO: 751475 - DNA, 15 bp, Homo sapiens
ttccaagtacttctt

SEQ ID NO: 751476 - DNA, 15 bp, Homo sapiens
tccaagtacttctta

SEQ ID NO: 751477 - DNA, 15 bp, Homo sapiens
ccaagtacttcttac

SEQ ID NO: 751478 - DNA, 15 bp, Homo sapiens
caagtacttcttaca

SEQ ID NO: 751479 - DNA, 15 bp, Homo sapiens
aagtacttcttacaa

SEQ ID NO: 751480 - DNA, 15 bp, Homo sapiens
agtacttcttacaaa

SEQ ID NO: 751481 - DNA, 15 bp, Homo sapiens
gtacttcttacaaaa

SEQ ID NO: 751482 - DNA, 15 bp, Homo sapiens
tacttcttacaaaat

SEQ ID NO: 751483 - DNA, 15 bp, Homo sapiens
acttcttacaaaata

SEQ ID NO: 751484 - DNA, 15 bp, Homo sapiens
cttcttacaaaataa

SEQ ID NO: 751485 - DNA, 15 bp, Homo sapiens
ttcttacaaaataaa

SEQ ID NO: 751486 - DNA, 15 bp, Homo sapiens
tcttacaaaataaac

SEQ ID NO: 751487 - DNA, 15 bp, Homo sapiens
cttacaaaataaact

SEQ ID NO: 751488 - DNA, 15 bp, Homo sapiens
ttacaaaataaacta

SEQ ID NO: 751489 - DNA, 15 bp, Homo sapiens
tacaaaataaactaa

SEQ ID NO: 751490 - DNA, 15 bp, Homo sapiens
acaaaataaactaaa

SEQ ID NO: 751491 - DNA, 15 bp, Homo sapiens
caaaataaactaaaa

SEQ ID NO: 751492 - DNA, 15 bp, Homo sapiens
aaaataaactaaaaa

SEQ ID NO: 751493 - DNA, 15 bp, Homo sapiens
aaataaactaaaaat

SEQ ID NO: 751494 - DNA, 15 bp, Homo sapiens
aataaactaaaaatt

SEQ ID NO: 751495 - DNA, 15 bp, Homo sapiens
ataaactaaaaattt

SEQ ID NO: 751496 - DNA, 15 bp, Homo sapiens
taaactaaaaattta

SEQ ID NO: 751497 - DNA, 15 bp, Homo sapiens
aaactaaaaatttag

SEQ ID NO: 751498 - DNA, 15 bp, Homo sapiens
aactaaaaatttaga

SEQ ID NO: 751499 - DNA, 15 bp, Homo sapiens
actaaaaatttagac

SEQ ID NO: 751500 - DNA, 15 bp, Homo sapiens
ctaaaaatttagaca

SEQ ID NO: 751501 - DNA, 15 bp, Homo sapiens
taaaaatttagacaa

SEQ ID NO: 751502 - DNA, 15 bp, Homo sapiens
aaaaatttagacaat

SEQ ID NO: 751503 - DNA, 15 bp, Homo sapiens
aaaatttagacaata

SEQ ID NO: 751504 - DNA, 15 bp, Homo sapiens
aaatttagacaatag

SEQ ID NO: 751505 - DNA, 15 bp, Homo sapiens
aatttagacaatagt

SEQ ID NO: 751506 - DNA, 15 bp, Homo sapiens
atttagacaatagtg

SEQ ID NO: 751507 - DNA, 15 bp, Homo sapiens
tttagacaatagtga

SEQ ID NO: 751508 - DNA, 15 bp, Homo sapiens
ttagacaatagtgat

SEQ ID NO: 751509 - DNA, 15 bp, Homo sapiens
tagacaatagtgatt

SEQ ID NO: 751510 - DNA, 15 bp, Homo sapiens
agacaatagtgattg

SEQ ID NO: 751511 - DNA, 15 bp, Homo sapiens
gacaatagtgattgc

SEQ ID NO: 751512 - DNA, 15 bp, Homo sapiens
acaatagtgattgcc

SEQ ID NO: 751513 - DNA, 15 bp, Homo sapiens
caatagtgattgcca

SEQ ID NO: 751514 - DNA, 15 bp, Homo sapiens
aatagtgattgccac

SEQ ID NO: 751515 - DNA, 15 bp, Homo sapiens
atagtgattgccacc

SEQ ID NO: 751516 - DNA, 15 bp, Homo sapiens
tagtgattgccaccg

SEQ ID NO: 751517 - DNA, 15 bp, Homo sapiens
agtgattgccaccgt

SEQ ID NO: 751518 - DNA, 15 bp, Homo sapiens
gtgattgccaccgta

SEQ ID NO: 751519 - DNA, 15 bp, Homo sapiens
tgattgccaccgtag

SEQ ID NO: 751520 - DNA, 15 bp, Homo sapiens
gattgccaccgtagt

SEQ ID NO: 751521 - DNA, 15 bp, Homo sapiens
attgccaccgtagta

SEQ ID NO: 751522 - DNA, 15 bp, Homo sapiens
ttgccaccgtagtac

SEQ ID NO: 751523 - DNA, 15 bp, Homo sapiens
tgccaccgtagtact

SEQ ID NO: 751524 - DNA, 15 bp, Homo sapiens
gccaccgtagtactg

SEQ ID NO: 751525 - DNA, 15 bp, Homo sapiens
ccaccgtagtactga

SEQ ID NO: 751526 - DNA, 15 bp, Homo sapiens
caccgtagtactgaa

SEQ ID NO: 751527 - DNA, 15 bp, Homo sapiens
accgtagtactgaat

SEQ ID NO: 751528 - DNA, 15 bp, Homo sapiens
ccgtagtactgaata

SEQ ID NO: 751529 - DNA, 15 bp, Homo sapiens
cgtagtactgaatac

SEQ ID NO: 751530 - DNA, 15 bp, Homo sapiens
gtagtactgaatact

SEQ ID NO: 751531 - DNA, 15 bp, Homo sapiens
tagtactgaatactt

SEQ ID NO: 751532 - DNA, 15 bp, Homo sapiens
agtactgaatacttg

SEQ ID NO: 751533 - DNA, 15 bp, Homo sapiens
gtactgaatacttga

SEQ ID NO: 751534 - DNA, 15 bp, Homo sapiens
tactgaatacttgat

SEQ ID NO: 751535 - DNA, 15 bp, Homo sapiens
actgaatacttgatt

SEQ ID NO: 751536 - DNA, 15 bp, Homo sapiens
ctgaatacttgattt

SEQ ID NO: 751537 - DNA, 15 bp, Homo sapiens
tgaatacttgattta

SEQ ID NO: 751538 - DNA, 15 bp, Homo sapiens
gaatacttgatttat

SEQ ID NO: 751539 - DNA, 15 bp, Homo sapiens
aatacttgatttatg

SEQ ID NO: 751540 - DNA, 15 bp, Homo sapiens
atacttgatttatga

SEQ ID NO: 751541 - DNA, 15 bp, Homo sapiens
tacttgatttatgac

SEQ ID NO: 751542 - DNA, 15 bp, Homo sapiens
acttgatttatgacc

SEQ ID NO: 751543 - DNA, 15 bp, Homo sapiens
cttgatttatgacca

SEQ ID NO: 751544 - DNA, 15 bp, Homo sapiens
ttgatttatgaccat

SEQ ID NO: 751545 - DNA, 15 bp, Homo sapiens
tgatttatgaccatg

SEQ ID NO: 751546 - DNA, 15 bp, Homo sapiens
gatttatgaccatgg

SEQ ID NO: 751547 - DNA, 15 bp, Homo sapiens
atttatgaccatgga

SEQ ID NO: 751548 - DNA, 15 bp, Homo sapiens
tttatgaccatggac

SEQ ID NO: 751549 - DNA, 15 bp, Homo sapiens
ttatgaccatggact

SEQ ID NO: 751550 - DNA, 15 bp, Homo sapiens
tatgaccatggacta

SEQ ID NO: 751551 - DNA, 15 bp, Homo sapiens
atgaccatggactag

SEQ ID NO: 751552 - DNA, 15 bp, Homo sapiens
tgaccatggactaga

SEQ ID NO: 751553 - DNA, 15 bp, Homo sapiens
gaccatggactagat

SEQ ID NO: 751554 - DNA, 15 bp, Homo sapiens
accatggactagata

SEQ ID NO: 751555 - DNA, 15 bp, Homo sapiens
ccatggactagatat

SEQ ID NO: 751556 - DNA, 15 bp, Homo sapiens
catggactagatatg

SEQ ID NO: 751557 - DNA, 15 bp, Homo sapiens
atggactagatatgg

SEQ ID NO: 751558 - DNA, 15 bp, Homo sapiens
tggactagatatggc

SEQ ID NO: 751559 - DNA, 15 bp, Homo sapiens
ggactagatatggca

SEQ ID NO: 751560 - DNA, 15 bp, Homo sapiens
gactagatatggcag

SEQ ID NO: 751561 - DNA, 15 bp, Homo sapiens
actagatatggcaga

SEQ ID NO: 751562 - DNA, 15 bp, Homo sapiens
ctagatatggcagag

SEQ ID NO: 751563 - DNA, 15 bp, Homo sapiens
tagatatggcagagg

SEQ ID NO: 751564 - DNA, 15 bp, Homo sapiens
agatatggcagaggt

SEQ ID NO: 751565 - DNA, 15 bp, Homo sapiens
gatatggcagaggtt

SEQ ID NO: 751566 - DNA, 15 bp, Homo sapiens
atatggcagaggttt

SEQ ID NO: 751567 - DNA, 15 bp, Homo sapiens
tatggcagaggtttt

SEQ ID NO: 751568 - DNA, 15 bp, Homo sapiens
atggcagaggttttt

SEQ ID NO: 751569 - DNA, 15 bp, Homo sapiens
tggcagaggttttta

SEQ ID NO: 751570 - DNA, 15 bp, Homo sapiens
ggcagaggtttttaa

SEQ ID NO: 751571 - DNA, 15 bp, Homo sapiens
gcagaggtttttaaa

SEQ ID NO: 751572 - DNA, 15 bp, Homo sapiens
cagaggtttttaaaa

SEQ ID NO: 751573 - DNA, 15 bp, Homo sapiens
agaggtttttaaaac

SEQ ID NO: 751574 - DNA, 15 bp, Homo sapiens
gaggtttttaaaact

SEQ ID NO: 751575 - DNA, 15 bp, Homo sapiens
aggtttttaaaactc

SEQ ID NO: 751576 - DNA, 15 bp, Homo sapiens
ggtttttaaaactct

SEQ ID NO: 751577 - DNA, 15 bp, Homo sapiens
gtttttaaaactctg

SEQ ID NO: 751578 - DNA, 15 bp, Homo sapiens
tttttaaaactctgt

SEQ ID NO: 751579 - DNA, 15 bp, Homo sapiens
ttttaaaactctgtg

SEQ ID NO: 751580 - DNA, 15 bp, Homo sapiens
tttaaaactctgtga

SEQ ID NO: 751581 - DNA, 15 bp, Homo sapiens
ttaaaactctgtgaa

SEQ ID NO: 751582 - DNA, 15 bp, Homo sapiens
taaaactctgtgaac

SEQ ID NO: 751583 - DNA, 15 bp, Homo sapiens
aaaactctgtgaacc

SEQ ID NO: 751584 - DNA, 15 bp, Homo sapiens
aaactctgtgaacct

SEQ ID NO: 751585 - DNA, 15 bp, Homo sapiens
aactctgtgaacctt

SEQ ID NO: 751586 - DNA, 15 bp, Homo sapiens
actctgtgaaccttt

SEQ ID NO: 751587 - DNA, 15 bp, Homo sapiens
ctctgtgaacctttt

SEQ ID NO: 751588 - DNA, 15 bp, Homo sapiens
tctgtgaaccttttc

SEQ ID NO: 751589 - DNA, 15 bp, Homo sapiens
ctgtgaaccttttca

SEQ ID NO: 751590 - DNA, 15 bp, Homo sapiens
tgtgaaccttttcat

SEQ ID NO: 751591 - DNA, 15 bp, Homo sapiens
gtgaaccttttcatt

SEQ ID NO: 751592 - DNA, 15 bp, Homo sapiens
tgaaccttttcattt

SEQ ID NO: 751593 - DNA, 15 bp, Homo sapiens
gaaccttttcatttt

SEQ ID NO: 751594 - DNA, 15 bp, Homo sapiens
aaccttttcattttc

SEQ ID NO: 751595 - DNA, 15 bp, Homo sapiens
accttttcattttcc

SEQ ID NO: 751596 - DNA, 15 bp, Homo sapiens
ccttttcattttccc

SEQ ID NO: 751597 - DNA, 15 bp, Homo sapiens
cttttcattttcccg

SEQ ID NO: 751598 - DNA, 15 bp, Homo sapiens
ttttcattttcccgt

SEQ ID NO: 751599 - DNA, 15 bp, Homo sapiens
tttcattttcccgtg

SEQ ID NO: 751600 - DNA, 15 bp, Homo sapiens
ttcattttcccgtga

SEQ ID NO: 751601 - DNA, 15 bp, Homo sapiens
tcattttcccgtgac

SEQ ID NO: 751602 - DNA, 15 bp, Homo sapiens
cattttcccgtgaca

SEQ ID NO: 751603 - DNA, 15 bp, Homo sapiens
attttcccgtgacag

SEQ ID NO: 751604 - DNA, 15 bp, Homo sapiens
ttttcccgtgacagg

SEQ ID NO: 751605 - DNA, 15 bp, Homo sapiens
tttcccgtgacaggc

SEQ ID NO: 751606 - DNA, 15 bp, Homo sapiens
ttcccgtgacaggca

SEQ ID NO: 751607 - DNA, 15 bp, Homo sapiens
tcccgtgacaggcaa

SEQ ID NO: 751608 - DNA, 15 bp, Homo sapiens
cccgtgacaggcaat

SEQ ID NO: 751609 - DNA, 15 bp, Homo sapiens
ccgtgacaggcaatg

SEQ ID NO: 751610 - DNA, 15 bp, Homo sapiens
cgtgacaggcaatgc

SEQ ID NO: 751611 - DNA, 15 bp, Homo sapiens
gtgacaggcaatgca

SEQ ID NO: 751612 - DNA, 15 bp, Homo sapiens
tgacaggcaatgcaa

SEQ ID NO: 751613 - DNA, 15 bp, Homo sapiens
gacaggcaatgcaag

SEQ ID NO: 751614 - DNA, 15 bp, Homo sapiens
acaggcaatgcaagt

SEQ ID NO: 751615 - DNA, 15 bp, Homo sapiens
caggcaatgcaagtg

SEQ ID NO: 751616 - DNA, 15 bp, Homo sapiens
aggcaatgcaagtgc

SEQ ID NO: 751617 - DNA, 15 bp, Homo sapiens
ggcaatgcaagtgct

SEQ ID NO: 751618 - DNA, 15 bp, Homo sapiens
gcaatgcaagtgctg

SEQ ID NO: 751619 - DNA, 15 bp, Homo sapiens
caatgcaagtgctgt

SEQ ID NO: 751620 - DNA, 15 bp, Homo sapiens
aatgcaagtgctgta

SEQ ID NO: 751621 - DNA, 15 bp, Homo sapiens
atgcaagtgctgtat

SEQ ID NO: 751622 - DNA, 15 bp, Homo sapiens
tgcaagtgctgtatt

SEQ ID NO: 751623 - DNA, 15 bp, Homo sapiens
gcaagtgctgtattt

SEQ ID NO: 751624 - DNA, 15 bp, Homo sapiens
caagtgctgtatttt

SEQ ID NO: 751625 - DNA, 15 bp, Homo sapiens
aagtgctgtattttt

SEQ ID NO: 751626 - DNA, 15 bp, Homo sapiens
agtgctgtattttta

SEQ ID NO: 751627 - DNA, 15 bp, Homo sapiens
gtgctgtatttttaa

SEQ ID NO: 751628 - DNA, 15 bp, Homo sapiens
tgctgtatttttaat

SEQ ID NO: 751629 - DNA, 15 bp, Homo sapiens
gctgtatttttaatt

SEQ ID NO: 751630 - DNA, 15 bp, Homo sapiens
ctgtatttttaattg

SEQ ID NO: 751631 - DNA, 15 bp, Homo sapiens
tgtatttttaattgg

SEQ ID NO: 751632 - DNA, 15 bp, Homo sapiens
gtatttttaattggt

SEQ ID NO: 751633 - DNA, 15 bp, Homo sapiens
tatttttaattggtc

SEQ ID NO: 751634 - DNA, 15 bp, Homo sapiens
atttttaattggtcc

SEQ ID NO: 751635 - DNA, 15 bp, Homo sapiens
tttttaattggtccc

SEQ ID NO: 751636 - DNA, 15 bp, Homo sapiens
ttttaattggtccct

SEQ ID NO: 751637 - DNA, 15 bp, Homo sapiens
tttaattggtccctt

SEQ ID NO: 751638 - DNA, 15 bp, Homo sapiens
ttaattggtcccttt

SEQ ID NO: 751639 - DNA, 15 bp, Homo sapiens
taattggtccctttt

SEQ ID NO: 751640 - DNA, 15 bp, Homo sapiens
aattggtcccttttt

SEQ ID NO: 751641 - DNA, 15 bp, Homo sapiens
attggtcccttttta

SEQ ID NO: 751642 - DNA, 15 bp, Homo sapiens
ttggtccctttttaa

SEQ ID NO: 751643 - DNA, 15 bp, Homo sapiens
tggtccctttttaaa

SEQ ID NO: 751644 - DNA, 15 bp, Homo sapiens
ggtccctttttaaag

SEQ ID NO: 751645 - DNA, 15 bp, Homo sapiens
gtccctttttaaagt

SEQ ID NO: 751646 - DNA, 15 bp, Homo sapiens
tccctttttaaagtc

SEQ ID NO: 751647 - DNA, 15 bp, Homo sapiens
ccctttttaaagtca

SEQ ID NO: 751648 - DNA, 15 bp, Homo sapiens
cctttttaaagtcag

SEQ ID NO: 751649 - DNA, 15 bp, Homo sapiens
ctttttaaagtcagg

SEQ ID NO: 751650 - DNA, 15 bp, Homo sapiens
tttttaaagtcagga

SEQ ID NO: 751651 - DNA, 15 bp, Homo sapiens
ttttaaagtcaggag

SEQ ID NO: 751652 - DNA, 15 bp, Homo sapiens
tttaaagtcaggaga

SEQ ID NO: 751653 - DNA, 15 bp, Homo sapiens
ttaaagtcaggagat

SEQ ID NO: 751654 - DNA, 15 bp, Homo sapiens
taaagtcaggagatg

SEQ ID NO: 751655 - DNA, 15 bp, Homo sapiens
aaagtcaggagatga

SEQ ID NO: 751656 - DNA, 15 bp, Homo sapiens
aagtcaggagatgaa

SEQ ID NO: 751657 - DNA, 15 bp, Homo sapiens
agtcaggagatgaaa

SEQ ID NO: 751658 - DNA, 15 bp, Homo sapiens
gtcaggagatgaaat

SEQ ID NO: 751659 - DNA, 15 bp, Homo sapiens
tcaggagatgaaatg

SEQ ID NO: 751660 - DNA, 15 bp, Homo sapiens
caggagatgaaatgt

SEQ ID NO: 751661 - DNA, 15 bp, Homo sapiens
aggagatgaaatgtt

SEQ ID NO: 751662 - DNA, 15 bp, Homo sapiens
ggagatgaaatgtta

SEQ ID NO: 751663 - DNA, 15 bp, Homo sapiens
gagatgaaatgttat

SEQ ID NO: 751664 - DNA, 15 bp, Homo sapiens
agatgaaatgttatc

SEQ ID NO: 751665 - DNA, 15 bp, Homo sapiens
gatgaaatgttatca

SEQ ID NO: 751666 - DNA, 15 bp, Homo sapiens
atgaaatgttatcat

SEQ ID NO: 751667 - DNA, 15 bp, Homo sapiens
tgaaatgttatcatg

SEQ ID NO: 751668 - DNA, 15 bp, Homo sapiens
gaaatgttatcatgc

SEQ ID NO: 751669 - DNA, 15 bp, Homo sapiens
aaatgttatcatgca

SEQ ID NO: 751670 - DNA, 15 bp, Homo sapiens
aatgttatcatgcaa

SEQ ID NO: 751671 - DNA, 15 bp, Homo sapiens
atgttatcatgcaaa

SEQ ID NO: 751672 - DNA, 15 bp, Homo sapiens
tgttatcatgcaaat

SEQ ID NO: 751673 - DNA, 15 bp, Homo sapiens
gttatcatgcaaatc

SEQ ID NO: 751674 - DNA, 15 bp, Homo sapiens
ttatcatgcaaatct

SEQ ID NO: 751675 - DNA, 15 bp, Homo sapiens
tatcatgcaaatctc

SEQ ID NO: 751676 - DNA, 15 bp, Homo sapiens
atcatgcaaatctct

SEQ ID NO: 751677 - DNA, 15 bp, Homo sapiens
tcatgcaaatctctc

SEQ ID NO: 751678 - DNA, 15 bp, Homo sapiens
catgcaaatctctcc

SEQ ID NO: 751679 - DNA, 15 bp, Homo sapiens
atgcaaatctctcct

SEQ ID NO: 751680 - DNA, 15 bp, Homo sapiens
tgcaaatctctccta

SEQ ID NO: 751681 - DNA, 15 bp, Homo sapiens
gcaaatctctcctaa

SEQ ID NO: 751682 - DNA, 15 bp, Homo sapiens
caaatctctcctaag

SEQ ID NO: 751683 - DNA, 15 bp, Homo sapiens
aaatctctcctaagt

SEQ ID NO: 751684 - DNA, 15 bp, Homo sapiens
aatctctcctaagtt

SEQ ID NO: 751685 - DNA, 15 bp, Homo sapiens
atctctcctaagttg

SEQ ID NO: 751686 - DNA, 15 bp, Homo sapiens
tctctcctaagttgc

SEQ ID NO: 751687 - DNA, 15 bp, Homo sapiens
ctctcctaagttgca

SEQ ID NO: 751688 - DNA, 15 bp, Homo sapiens
tctcctaagttgcat

SEQ ID NO: 751689 - DNA, 15 bp, Homo sapiens
ctcctaagttgcatg

SEQ ID NO: 751690 - DNA, 15 bp, Homo sapiens
tcctaagttgcatgg

SEQ ID NO: 751691 - DNA, 15 bp, Homo sapiens
cctaagttgcatgga

SEQ ID NO: 751692 - DNA, 15 bp, Homo sapiens
ctaagttgcatggaa

SEQ ID NO: 751693 - DNA, 15 bp, Homo sapiens
taagttgcatggaaa

SEQ ID NO: 751694 - DNA, 15 bp, Homo sapiens
aagttgcatggaaac

SEQ ID NO: 751695 - DNA, 15 bp, Homo sapiens
agttgcatggaaact

SEQ ID NO: 751696 - DNA, 15 bp, Homo sapiens
gttgcatggaaacta

SEQ ID NO: 751697 - DNA, 15 bp, Homo sapiens
ttgcatggaaactaa

SEQ ID NO: 751698 - DNA, 15 bp, Homo sapiens
tgcatggaaactaat

SEQ ID NO: 751699 - DNA, 15 bp, Homo sapiens
gcatggaaactaata

SEQ ID NO: 751700 - DNA, 15 bp, Homo sapiens
catggaaactaataa

SEQ ID NO: 751701 - DNA, 15 bp, Homo sapiens
atggaaactaataaa

SEQ ID NO: 751702 - DNA, 15 bp, Homo sapiens
tggaaactaataaaa

SEQ ID NO: 751703 - DNA, 15 bp, Homo sapiens
ggaaactaataaaat

SEQ ID NO: 751704 - DNA, 15 bp, Homo sapiens
gaaactaataaaatc

SEQ ID NO: 751705 - DNA, 15 bp, Homo sapiens
aaactaataaaatca

SEQ ID NO: 751706 - DNA, 15 bp, Homo sapiens
aactaataaaatcac

SEQ ID NO: 751707 - DNA, 15 bp, Homo sapiens
actaataaaatcacg

SEQ ID NO: 751708 - DNA, 15 bp, Homo sapiens
ctaataaaatcacga

SEQ ID NO: 751709 - DNA, 15 bp, Homo sapiens
taataaaatcacgaa

SEQ ID NO: 751710 - DNA, 15 bp, Homo sapiens
aataaaatcacgaag

SEQ ID NO: 751711 - DNA, 15 bp, Homo sapiens
ataaaatcacgaagg

SEQ ID NO: 751712 - DNA, 15 bp, Homo sapiens
taaaatcacgaaggt

SEQ ID NO: 751713 - DNA, 15 bp, Homo sapiens
aaaatcacgaaggtt

SEQ ID NO: 751714 - DNA, 15 bp, Homo sapiens
aaatcacgaaggttt

SEQ ID NO: 751715 - DNA, 15 bp, Homo sapiens
aatcacgaaggtttc

SEQ ID NO: 751716 - DNA, 15 bp, Homo sapiens
atcacgaaggtttct

SEQ ID NO: 751717 - DNA, 15 bp, Homo sapiens
tcacgaaggtttcta

SEQ ID NO: 751718 - DNA, 15 bp, Homo sapiens
cacgaaggtttctat

SEQ ID NO: 751719 - DNA, 15 bp, Homo sapiens
acgaaggtttctatt

SEQ ID NO: 751720 - DNA, 15 bp, Homo sapiens
cgaaggtttctattt

SEQ ID NO: 751721 - DNA, 15 bp, Homo sapiens
gaaggtttctatttg

SEQ ID NO: 751722 - DNA, 15 bp, Homo sapiens
aaggtttctatttgt

SEQ ID NO: 751723 - DNA, 15 bp, Homo sapiens
aggtttctatttgta

SEQ ID NO: 751724 - DNA, 15 bp, Homo sapiens
ggtttctatttgtac

SEQ ID NO: 751725 - DNA, 15 bp, Homo sapiens
gtttctatttgtact

SEQ ID NO: 751726 - DNA, 15 bp, Homo sapiens
tttctatttgtactc

SEQ ID NO: 751727 - DNA, 15 bp, Homo sapiens
ttctatttgtactct

SEQ ID NO: 751728 - DNA, 15 bp, Homo sapiens
tctatttgtactcta

SEQ ID NO: 751729 - DNA, 15 bp, Homo sapiens
ctatttgtactctac

SEQ ID NO: 751730 - DNA, 15 bp, Homo sapiens
tatttgtactctacg

SEQ ID NO: 751731 - DNA, 15 bp, Homo sapiens
atttgtactctacga

SEQ ID NO: 751732 - DNA, 15 bp, Homo sapiens
tttgtactctacgaa

SEQ ID NO: 751733 - DNA, 15 bp, Homo sapiens
ttgtactctacgaac

SEQ ID NO: 751734 - DNA, 15 bp, Homo sapiens
tgtactctacgaaca

SEQ ID NO: 751735 - DNA, 15 bp, Homo sapiens
gtactctacgaacac

SEQ ID NO: 751736 - DNA, 15 bp, Homo sapiens
tactctacgaacaca

SEQ ID NO: 751737 - DNA, 15 bp, Homo sapiens
actctacgaacacag

SEQ ID NO: 751738 - DNA, 15 bp, Homo sapiens
ctctacgaacacaga

SEQ ID NO: 751739 - DNA, 15 bp, Homo sapiens
tctacgaacacagac

SEQ ID NO: 751740 - DNA, 15 bp, Homo sapiens
ctacgaacacagact

SEQ ID NO: 751741 - DNA, 15 bp, Homo sapiens
tacgaacacagactg

SEQ ID NO: 751742 - DNA, 15 bp, Homo sapiens
acgaacacagactgt

SEQ ID NO: 751743 - DNA, 15 bp, Homo sapiens
cgaacacagactgta

SEQ ID NO: 751744 - DNA, 15 bp, Homo sapiens
gaacacagactgtaa

SEQ ID NO: 751745 - DNA, 15 bp, Homo sapiens
aacacagactgtaat

SEQ ID NO: 751746 - DNA, 15 bp, Homo sapiens
acacagactgtaatg

SEQ ID NO: 751747 - DNA, 15 bp, Homo sapiens
cacagactgtaatga

SEQ ID NO: 751748 - DNA, 15 bp, Homo sapiens
acagactgtaatgaa

SEQ ID NO: 751749 - DNA, 15 bp, Homo sapiens
cagactgtaatgaaa

SEQ ID NO: 751750 - DNA, 15 bp, Homo sapiens
agactgtaatgaaac

SEQ ID NO: 751751 - DNA, 15 bp, Homo sapiens
gactgtaatgaaact

SEQ ID NO: 751752 - DNA, 15 bp, Homo sapiens
actgtaatgaaacta

SEQ ID NO: 751753 - DNA, 15 bp, Homo sapiens
ctgtaatgaaactaa

SEQ ID NO: 751754 - DNA, 15 bp, Homo sapiens
tgtaatgaaactaaa

SEQ ID NO: 751755 - DNA, 15 bp, Homo sapiens
gtaatgaaactaaaa

SEQ ID NO: 751756 - DNA, 15 bp, Homo sapiens
taatgaaactaaaac

SEQ ID NO: 751757 - DNA, 15 bp, Homo sapiens
aatgaaactaaaaca

SEQ ID NO: 751758 - DNA, 15 bp, Homo sapiens
atgaaactaaaacag

SEQ ID NO: 751759 - DNA, 15 bp, Homo sapiens
tgaaactaaaacagc

SEQ ID NO: 751760 - DNA, 15 bp, Homo sapiens
gaaactaaaacagct

SEQ ID NO: 751761 - DNA, 15 bp, Homo sapiens
aaactaaaacagcta

SEQ ID NO: 751762 - DNA, 15 bp, Homo sapiens
aactaaaacagctat

SEQ ID NO: 751763 - DNA, 15 bp, Homo sapiens
actaaaacagctatc

SEQ ID NO: 751764 - DNA, 15 bp, Homo sapiens
ctaaaacagctatct

SEQ ID NO: 751765 - DNA, 15 bp, Homo sapiens
taaaacagctatctc

SEQ ID NO: 751766 - DNA, 15 bp, Homo sapiens
aaaacagctatctcc

SEQ ID NO: 751767 - DNA, 15 bp, Homo sapiens
aaacagctatctcca

SEQ ID NO: 751768 - DNA, 15 bp, Homo sapiens
aacagctatctccag

SEQ ID NO: 751769 - DNA, 15 bp, Homo sapiens
acagctatctccagg

SEQ ID NO: 751770 - DNA, 15 bp, Homo sapiens
cagctatctccaggg

SEQ ID NO: 751771 - DNA, 15 bp, Homo sapiens
agctatctccaggga

SEQ ID NO: 751772 - DNA, 15 bp, Homo sapiens
gctatctccagggat

SEQ ID NO: 751773 - DNA, 15 bp, Homo sapiens
ctatctccagggatg

SEQ ID NO: 751774 - DNA, 15 bp, Homo sapiens
tatctccagggatga

SEQ ID NO: 751775 - DNA, 15 bp, Homo sapiens
atctccagggatgat

SEQ ID NO: 751776 - DNA, 15 bp, Homo sapiens
tctccagggatgatg

SEQ ID NO: 751777 - DNA, 15 bp, Homo sapiens
ctccagggatgatgc

SEQ ID NO: 751778 - DNA, 15 bp, Homo sapiens
tccagggatgatgct

SEQ ID NO: 751779 - DNA, 15 bp, Homo sapiens
ccagggatgatgcta

SEQ ID NO: 751780 - DNA, 15 bp, Homo sapiens
cagggatgatgctat

SEQ ID NO: 751781 - DNA, 15 bp, Homo sapiens
agggatgatgctatt

SEQ ID NO: 751782 - DNA, 15 bp, Homo sapiens
gggatgatgctattt

SEQ ID NO: 751783 - DNA, 15 bp, Homo sapiens
ggatgatgctattta

SEQ ID NO: 751784 - DNA, 15 bp, Homo sapiens
gatgatgctatttaa

SEQ ID NO: 751785 - DNA, 15 bp, Homo sapiens
atgatgctatttaaa

SEQ ID NO: 751786 - DNA, 15 bp, Homo sapiens
tgatgctatttaaat

SEQ ID NO: 751787 - DNA, 15 bp, Homo sapiens
gatgctatttaaatt

SEQ ID NO: 751788 - DNA, 15 bp, Homo sapiens
atgctatttaaattc

SEQ ID NO: 751789 - DNA, 15 bp, Homo sapiens
tgctatttaaattct

SEQ ID NO: 751790 - DNA, 15 bp, Homo sapiens
gctatttaaattcta

SEQ ID NO: 751791 - DNA, 15 bp, Homo sapiens
ctatttaaattctag

SEQ ID NO: 751792 - DNA, 15 bp, Homo sapiens
tatttaaattctagg

SEQ ID NO: 751793 - DNA, 15 bp, Homo sapiens
atttaaattctaggc

SEQ ID NO: 751794 - DNA, 15 bp, Homo sapiens
tttaaattctaggca

SEQ ID NO: 751795 - DNA, 15 bp, Homo sapiens
ttaaattctaggcag

SEQ ID NO: 751796 - DNA, 15 bp, Homo sapiens
taaattctaggcagg

SEQ ID NO: 751797 - DNA, 15 bp, Homo sapiens
aaattctaggcaggg

SEQ ID NO: 751798 - DNA, 15 bp, Homo sapiens
attctaggcagggct

SEQ ID NO: 751799 - DNA, 15 bp, Homo sapiens
ttctaggcagggctt

SEQ ID NO: 751800 - DNA, 15 bp, Homo sapiens
tctaggcagggcttt

SEQ ID NO: 751801 - DNA, 15 bp, Homo sapiens
ctaggcagggcttta

SEQ ID NO: 751802 - DNA, 15 bp, Homo sapiens
taggcagggctttaa

SEQ ID NO: 751803 - DNA, 15 bp, Homo sapiens
aggcagggctttaaa

SEQ ID NO: 751804 - DNA, 15 bp, Homo sapiens
ggcagggctttaaaa

SEQ ID NO: 751805 - DNA, 15 bp, Homo sapiens
gcagggctttaaaat

SEQ ID NO: 751806 - DNA, 15 bp, Homo sapiens
cagggctttaaaatg

SEQ ID NO: 751807 - DNA, 15 bp, Homo sapiens
agggctttaaaatga

SEQ ID NO: 751808 - DNA, 15 bp, Homo sapiens
gggctttaaaatgat

SEQ ID NO: 751809 - DNA, 15 bp, Homo sapiens
ggctttaaaatgatt

SEQ ID NO: 751810 - DNA, 15 bp, Homo sapiens
gctttaaaatgattt

SEQ ID NO: 751811 - DNA, 15 bp, Homo sapiens
ctttaaaatgatttt

SEQ ID NO: 751812 - DNA, 15 bp, Homo sapiens
tttaaaatgattttc

SEQ ID NO: 751813 - DNA, 15 bp, Homo sapiens
ttaaaatgattttca

SEQ ID NO: 751814 - DNA, 15 bp, Homo sapiens
taaaatgattttcat

SEQ ID NO: 751815 - DNA, 15 bp, Homo sapiens
aaaatgattttcatg

SEQ ID NO: 751816 - DNA, 15 bp, Homo sapiens
aaatgattttcatgg

SEQ ID NO: 751817 - DNA, 15 bp, Homo sapiens
aatgattttcatggt

SEQ ID NO: 751818 - DNA, 15 bp, Homo sapiens
atgattttcatggtg

SEQ ID NO: 751819 - DNA, 15 bp, Homo sapiens
tgattttcatggtga

SEQ ID NO: 751820 - DNA, 15 bp, Homo sapiens
gattttcatggtgaa

SEQ ID NO: 751821 - DNA, 15 bp, Homo sapiens
attttcatggtgaaa

SEQ ID NO: 751822 - DNA, 15 bp, Homo sapiens
ttttcatggtgaaaa

SEQ ID NO: 751823 - DNA, 15 bp, Homo sapiens
tttcatggtgaaaac

SEQ ID NO: 751824 - DNA, 15 bp, Homo sapiens
ttcatggtgaaaaca

SEQ ID NO: 751825 - DNA, 15 bp, Homo sapiens
tcatggtgaaaacag

SEQ ID NO: 751826 - DNA, 15 bp, Homo sapiens
catggtgaaaacaga

SEQ ID NO: 751827 - DNA, 15 bp, Homo sapiens
atggtgaaaacagaa

SEQ ID NO: 751828 - DNA, 15 bp, Homo sapiens
tggtgaaaacagaaa

SEQ ID NO: 751829 - DNA, 15 bp, Homo sapiens
ggtgaaaacagaaac

SEQ ID NO: 751830 - DNA, 15 bp, Homo sapiens
gtgaaaacagaaact

SEQ ID NO: 751831 - DNA, 15 bp, Homo sapiens
tgaaaacagaaacta

SEQ ID NO: 751832 - DNA, 15 bp, Homo sapiens
gaaaacagaaactag

SEQ ID NO: 751833 - DNA, 15 bp, Homo sapiens
aaaacagaaactagc

SEQ ID NO: 751834 - DNA, 15 bp, Homo sapiens
aaacagaaactagca

SEQ ID NO: 751835 - DNA, 15 bp, Homo sapiens
aacagaaactagcaa

SEQ ID NO: 751836 - DNA, 15 bp, Homo sapiens
acagaaactagcaac

SEQ ID NO: 751837 - DNA, 15 bp, Homo sapiens
cagaaactagcaact

SEQ ID NO: 751838 - DNA, 15 bp, Homo sapiens
agaaactagcaactg

SEQ ID NO: 751839 - DNA, 15 bp, Homo sapiens
gaaactagcaactga

SEQ ID NO: 751840 - DNA, 15 bp, Homo sapiens
aaactagcaactgag

SEQ ID NO: 751841 - DNA, 15 bp, Homo sapiens
aactagcaactgaga

SEQ ID NO: 751842 - DNA, 15 bp, Homo sapiens
actagcaactgagat

SEQ ID NO: 751843 - DNA, 15 bp, Homo sapiens
ctagcaactgagatg

SEQ ID NO: 751844 - DNA, 15 bp, Homo sapiens
tagcaactgagatgt

SEQ ID NO: 751845 - DNA, 15 bp, Homo sapiens
agcaactgagatgtt

SEQ ID NO: 751846 - DNA, 15 bp, Homo sapiens
gcaactgagatgttc

SEQ ID NO: 751847 - DNA, 15 bp, Homo sapiens
caactgagatgttcc

SEQ ID NO: 751848 - DNA, 15 bp, Homo sapiens
aactgagatgttcct

SEQ ID NO: 751849 - DNA, 15 bp, Homo sapiens
actgagatgttcctg

SEQ ID NO: 751850 - DNA, 15 bp, Homo sapiens
ctgagatgttcctgt

SEQ ID NO: 751851 - DNA, 15 bp, Homo sapiens
tgagatgttcctgtt

SEQ ID NO: 751852 - DNA, 15 bp, Homo sapiens
gagatgttcctgttc

SEQ ID NO: 751853 - DNA, 15 bp, Homo sapiens
agatgttcctgttct

SEQ ID NO: 751854 - DNA, 15 bp, Homo sapiens
gatgttcctgttctt

SEQ ID NO: 751855 - DNA, 15 bp, Homo sapiens
atgttcctgttcttt

SEQ ID NO: 751856 - DNA, 15 bp, Homo sapiens
tgttcctgttctttc

SEQ ID NO: 751857 - DNA, 15 bp, Homo sapiens
gttcctgttctttct

SEQ ID NO: 751858 - DNA, 15 bp, Homo sapiens
ttcctgttctttctt

SEQ ID NO: 751859 - DNA, 15 bp, Homo sapiens
tcctgttctttcttc

SEQ ID NO: 751860 - DNA, 15 bp, Homo sapiens
cctgttctttcttcc

SEQ ID NO: 751861 - DNA, 15 bp, Homo sapiens
ctgttctttcttcct

SEQ ID NO: 751862 - DNA, 15 bp, Homo sapiens
tgttctttcttcctc

SEQ ID NO: 751863 - DNA, 15 bp, Homo sapiens
gttctttcttcctca

SEQ ID NO: 751864 - DNA, 15 bp, Homo sapiens
ttctttcttcctcat

SEQ ID NO: 751865 - DNA, 15 bp, Homo sapiens
tctttcttcctcatc

SEQ ID NO: 751866 - DNA, 15 bp, Homo sapiens
ctttcttcctcatct

SEQ ID NO: 751867 - DNA, 15 bp, Homo sapiens
tttcttcctcatctc

SEQ ID NO: 751868 - DNA, 15 bp, Homo sapiens
ttcttcctcatctca

SEQ ID NO: 751869 - DNA, 15 bp, Homo sapiens
tcttcctcatctcac

SEQ ID NO: 751870 - DNA, 15 bp, Homo sapiens
cttcctcatctcacc

SEQ ID NO: 751871 - DNA, 15 bp, Homo sapiens
ttcctcatctcacca

SEQ ID NO: 751872 - DNA, 15 bp, Homo sapiens
tcctcatctcaccag

SEQ ID NO: 751873 - DNA, 15 bp, Homo sapiens
cctcatctcaccagt

SEQ ID NO: 751874 - DNA, 15 bp, Homo sapiens
ctcatctcaccagtg

SEQ ID NO: 751875 - DNA, 15 bp, Homo sapiens
tcatctcaccagtgc

SEQ ID NO: 751876 - DNA, 15 bp, Homo sapiens
catctcaccagtgcc

SEQ ID NO: 751877 - DNA, 15 bp, Homo sapiens
atctcaccagtgcct

SEQ ID NO: 751878 - DNA, 15 bp, Homo sapiens
tctcaccagtgcctg

SEQ ID NO: 751879 - DNA, 15 bp, Homo sapiens
ctcaccagtgcctgt

SEQ ID NO: 751880 - DNA, 15 bp, Homo sapiens
tcaccagtgcctgtt

SEQ ID NO: 751881 - DNA, 15 bp, Homo sapiens
caccagtgcctgttc

SEQ ID NO: 751882 - DNA, 15 bp, Homo sapiens
accagtgcctgttca

SEQ ID NO: 751883 - DNA, 15 bp, Homo sapiens
ccagtgcctgttcac

SEQ ID NO: 751884 - DNA, 15 bp, Homo sapiens
cagtgcctgttcacc

SEQ ID NO: 751885 - DNA, 15 bp, Homo sapiens
agtgcctgttcaccc

SEQ ID NO: 751886 - DNA, 15 bp, Homo sapiens
gtgcctgttcaccca

SEQ ID NO: 751887 - DNA, 15 bp, Homo sapiens
tgcctgttcacccat

SEQ ID NO: 751888 - DNA, 15 bp, Homo sapiens
gcctgttcacccatg

SEQ ID NO: 751889 - DNA, 15 bp, Homo sapiens
cctgttcacccatgt

SEQ ID NO: 751890 - DNA, 15 bp, Homo sapiens
ctgttcacccatgtt

SEQ ID NO: 751891 - DNA, 15 bp, Homo sapiens
tgttcacccatgttc

SEQ ID NO: 751892 - DNA, 15 bp, Homo sapiens
gttcacccatgttcc

SEQ ID NO: 751893 - DNA, 15 bp, Homo sapiens
ttcacccatgttcct

SEQ ID NO: 751894 - DNA, 15 bp, Homo sapiens
tcacccatgttcctt

SEQ ID NO: 751895 - DNA, 15 bp, Homo sapiens
cacccatgttccttt

SEQ ID NO: 751896 - DNA, 15 bp, Homo sapiens
acccatgttcctttt

SEQ ID NO: 751897 - DNA, 15 bp, Homo sapiens
cccatgttccttttt

SEQ ID NO: 751898 - DNA, 15 bp, Homo sapiens
ccatgttccttttta

SEQ ID NO: 751899 - DNA, 15 bp, Homo sapiens
catgttcctttttac

SEQ ID NO: 751900 - DNA, 15 bp, Homo sapiens
atgttcctttttact

SEQ ID NO: 751901 - DNA, 15 bp, Homo sapiens
tgttcctttttactt

SEQ ID NO: 751902 - DNA, 15 bp, Homo sapiens
gttcctttttacttc

SEQ ID NO: 751903 - DNA, 15 bp, Homo sapiens
ttcctttttacttcc

SEQ ID NO: 751904 - DNA, 15 bp, Homo sapiens
tcctttttacttcct

SEQ ID NO: 751905 - DNA, 15 bp, Homo sapiens
cctttttacttcctg

SEQ ID NO: 751906 - DNA, 15 bp, Homo sapiens
ctttttacttcctga

SEQ ID NO: 751907 - DNA, 15 bp, Homo sapiens
tttttacttcctgac

SEQ ID NO: 751908 - DNA, 15 bp, Homo sapiens
ttttacttcctgacc

SEQ ID NO: 751909 - DNA, 15 bp, Homo sapiens
tttacttcctgacct

SEQ ID NO: 751910 - DNA, 15 bp, Homo sapiens
ttacttcctgacctc

SEQ ID NO: 751911 - DNA, 15 bp, Homo sapiens
tacttcctgacctca

SEQ ID NO: 751912 - DNA, 15 bp, Homo sapiens
acttcctgacctcag

SEQ ID NO: 751913 - DNA, 15 bp, Homo sapiens
cttcctgacctcaga

SEQ ID NO: 751914 - DNA, 15 bp, Homo sapiens
ttcctgacctcagaa

SEQ ID NO: 751915 - DNA, 15 bp, Homo sapiens
tcctgacctcagaaa

SEQ ID NO: 751916 - DNA, 15 bp, Homo sapiens
cctgacctcagaaaa

SEQ ID NO: 751917 - DNA, 15 bp, Homo sapiens
ctgacctcagaaaat

SEQ ID NO: 751918 - DNA, 15 bp, Homo sapiens
tgacctcagaaaatg

SEQ ID NO: 751919 - DNA, 15 bp, Homo sapiens
gacctcagaaaatga

SEQ ID NO: 751920 - DNA, 15 bp, Homo sapiens
acctcagaaaatgaa

SEQ ID NO: 751921 - DNA, 15 bp, Homo sapiens
cctcagaaaatgaat

SEQ ID NO: 751922 - DNA, 15 bp, Homo sapiens
ctcagaaaatgaatg

SEQ ID NO: 751923 - DNA, 15 bp, Homo sapiens
tcagaaaatgaatgt

SEQ ID NO: 751924 - DNA, 15 bp, Homo sapiens
cagaaaatgaatgta

SEQ ID NO: 751925 - DNA, 15 bp, Homo sapiens
agaaaatgaatgtaa

SEQ ID NO: 751926 - DNA, 15 bp, Homo sapiens
gaaaatgaatgtaaa

SEQ ID NO: 751927 - DNA, 15 bp, Homo sapiens
aaaatgaatgtaaag

SEQ ID NO: 751928 - DNA, 15 bp, Homo sapiens
aaatgaatgtaaagc

SEQ ID NO: 751929 - DNA, 15 bp, Homo sapiens
aatgaatgtaaagca

SEQ ID NO: 751930 - DNA, 15 bp, Homo sapiens
atgaatgtaaagcaa

SEQ ID NO: 751931 - DNA, 15 bp, Homo sapiens
tgaatgtaaagcaag

SEQ ID NO: 751932 - DNA, 15 bp, Homo sapiens
gaatgtaaagcaaga

SEQ ID NO: 751933 - DNA, 15 bp, Homo sapiens
aatgtaaagcaagaa

SEQ ID NO: 751934 - DNA, 15 bp, Homo sapiens
atgtaaagcaagaac

SEQ ID NO: 751935 - DNA, 15 bp, Homo sapiens
tgtaaagcaagaacc

SEQ ID NO: 751936 - DNA, 15 bp, Homo sapiens
gtaaagcaagaacct

SEQ ID NO: 751937 - DNA, 15 bp, Homo sapiens
taaagcaagaacctc

SEQ ID NO: 751938 - DNA, 15 bp, Homo sapiens
aaagcaagaacctcc

SEQ ID NO: 751939 - DNA, 15 bp, Homo sapiens
aagcaagaacctccg

SEQ ID NO: 751940 - DNA, 15 bp, Homo sapiens
agcaagaacctccgg

SEQ ID NO: 751941 - DNA, 15 bp, Homo sapiens
gcaagaacctccggt

SEQ ID NO: 751942 - DNA, 15 bp, Homo sapiens
caagaacctccggtc

SEQ ID NO: 751943 - DNA, 15 bp, Homo sapiens
aagaacctccggtct

SEQ ID NO: 751944 - DNA, 15 bp, Homo sapiens
agaacctccggtctc

SEQ ID NO: 751945 - DNA, 15 bp, Homo sapiens
gaacctccggtctct

SEQ ID NO: 751946 - DNA, 15 bp, Homo sapiens
aacctccggtctcta

SEQ ID NO: 751947 - DNA, 15 bp, Homo sapiens
acctccggtctctaa

SEQ ID NO: 751948 - DNA, 15 bp, Homo sapiens
cctccggtctctaag

SEQ ID NO: 751949 - DNA, 15 bp, Homo sapiens
ctccggtctctaaga

SEQ ID NO: 751950 - DNA, 15 bp, Homo sapiens
tccggtctctaagat

SEQ ID NO: 751951 - DNA, 15 bp, Homo sapiens
ccggtctctaagata

SEQ ID NO: 751952 - DNA, 15 bp, Homo sapiens
cggtctctaagatag

SEQ ID NO: 751953 - DNA, 15 bp, Homo sapiens
ggtctctaagatagc

SEQ ID NO: 751954 - DNA, 15 bp, Homo sapiens
gtctctaagatagcc

SEQ ID NO: 751955 - DNA, 15 bp, Homo sapiens
tctctaagatagcct

SEQ ID NO: 751956 - DNA, 15 bp, Homo sapiens
ctctaagatagcctg

SEQ ID NO: 751957 - DNA, 15 bp, Homo sapiens
tctaagatagcctgt

SEQ ID NO: 751958 - DNA, 15 bp, Homo sapiens
ctaagatagcctgtc

SEQ ID NO: 751959 - DNA, 15 bp, Homo sapiens
taagatagcctgtct

SEQ ID NO: 751960 - DNA, 15 bp, Homo sapiens
aagatagcctgtcta

SEQ ID NO: 751961 - DNA, 15 bp, Homo sapiens
agatagcctgtctat

SEQ ID NO: 751962 - DNA, 15 bp, Homo sapiens
gatagcctgtctatc

SEQ ID NO: 751963 - DNA, 15 bp, Homo sapiens
atagcctgtctatca

SEQ ID NO: 751964 - DNA, 15 bp, Homo sapiens
tagcctgtctatcac

SEQ ID NO: 751965 - DNA, 15 bp, Homo sapiens
agcctgtctatcact

SEQ ID NO: 751966 - DNA, 15 bp, Homo sapiens
gcctgtctatcactg

SEQ ID NO: 751967 - DNA, 15 bp, Homo sapiens
cctgtctatcactgg

SEQ ID NO: 751968 - DNA, 15 bp, Homo sapiens
ctgtctatcactggt

SEQ ID NO: 751969 - DNA, 15 bp, Homo sapiens
tgtctatcactggtt

SEQ ID NO: 751970 - DNA, 15 bp, Homo sapiens
gtctatcactggttt

SEQ ID NO: 751971 - DNA, 15 bp, Homo sapiens
tctatcactggtttt

SEQ ID NO: 751972 - DNA, 15 bp, Homo sapiens
ctatcactggtttta

SEQ ID NO: 751973 - DNA, 15 bp, Homo sapiens
tatcactggttttag

SEQ ID NO: 751974 - DNA, 15 bp, Homo sapiens
atcactggttttaga

SEQ ID NO: 751975 - DNA, 15 bp, Homo sapiens
tcactggttttagaa

SEQ ID NO: 751976 - DNA, 15 bp, Homo sapiens
cactggttttagaaa

SEQ ID NO: 751977 - DNA, 15 bp, Homo sapiens
actggttttagaaaa

SEQ ID NO: 751978 - DNA, 15 bp, Homo sapiens
ctggttttagaaaac

SEQ ID NO: 751979 - DNA, 15 bp, Homo sapiens
tggttttagaaaaca

SEQ ID NO: 751980 - DNA, 15 bp, Homo sapiens
ggttttagaaaacag

SEQ ID NO: 751981 - DNA, 15 bp, Homo sapiens
gttttagaaaacagc

SEQ ID NO: 751982 - DNA, 15 bp, Homo sapiens
ttttagaaaacagca

SEQ ID NO: 751983 - DNA, 15 bp, Homo sapiens
tttagaaaacagcaa

SEQ ID NO: 751984 - DNA, 15 bp, Homo sapiens
ttagaaaacagcaat

SEQ ID NO: 751985 - DNA, 15 bp, Homo sapiens
tagaaaacagcaatg

SEQ ID NO: 751986 - DNA, 15 bp, Homo sapiens
agaaaacagcaatga

SEQ ID NO: 751987 - DNA, 15 bp, Homo sapiens
gaaaacagcaatgat

SEQ ID NO: 751988 - DNA, 15 bp, Homo sapiens
aaaacagcaatgatt

SEQ ID NO: 751989 - DNA, 15 bp, Homo sapiens
aaacagcaatgattc

SEQ ID NO: 751990 - DNA, 15 bp, Homo sapiens
aacagcaatgattcc

SEQ ID NO: 751991 - DNA, 15 bp, Homo sapiens
acagcaatgattcct

SEQ ID NO: 751992 - DNA, 15 bp, Homo sapiens
cagcaatgattcctc

SEQ ID NO: 751993 - DNA, 15 bp, Homo sapiens
agcaatgattcctcc

SEQ ID NO: 751994 - DNA, 15 bp, Homo sapiens
gcaatgattcctcct

SEQ ID NO: 751995 - DNA, 15 bp, Homo sapiens
caatgattcctcctc

SEQ ID NO: 751996 - DNA, 15 bp, Homo sapiens
aatgattcctcctca

SEQ ID NO: 751997 - DNA, 15 bp, Homo sapiens
atgattcctcctcag

SEQ ID NO: 751998 - DNA, 15 bp, Homo sapiens
tgattcctcctcagg

SEQ ID NO: 751999 - DNA, 15 bp, Homo sapiens
gattcctcctcaggt

SEQ ID NO: 752000 - DNA, 15 bp, Homo sapiens
attcctcctcaggtc

SEQ ID NO: 752001 - DNA, 15 bp, Homo sapiens
ttcctcctcaggtct

SEQ ID NO: 752002 - DNA, 15 bp, Homo sapiens
tcctcctcaggtctt

SEQ ID NO: 752003 - DNA, 15 bp, Homo sapiens
cctcctcaggtcttg

SEQ ID NO: 752004 - DNA, 15 bp, Homo sapiens
ctcctcaggtcttgc

SEQ ID NO: 752005 - DNA, 15 bp, Homo sapiens
tcctcaggtcttgca

SEQ ID NO: 752006 - DNA, 15 bp, Homo sapiens
cctcaggtcttgcat

SEQ ID NO: 752007 - DNA, 15 bp, Homo sapiens
ctcaggtcttgcatt

SEQ ID NO: 752008 - DNA, 15 bp, Homo sapiens
tcaggtcttgcattt

SEQ ID NO: 752009 - DNA, 15 bp, Homo sapiens
caggtcttgcattta

SEQ ID NO: 752010 - DNA, 15 bp, Homo sapiens
aggtcttgcatttat

SEQ ID NO: 752011 - DNA, 15 bp, Homo sapiens
ggtcttgcatttatt

SEQ ID NO: 752012 - DNA, 15 bp, Homo sapiens
gtcttgcatttattt

SEQ ID NO: 752013 - DNA, 15 bp, Homo sapiens
tcttgcatttatttt

SEQ ID NO: 752014 - DNA, 15 bp, Homo sapiens
cttgcatttattttc

SEQ ID NO: 752015 - DNA, 15 bp, Homo sapiens
ttgcatttattttca

SEQ ID NO: 752016 - DNA, 15 bp, Homo sapiens
tgcatttattttcag

SEQ ID NO: 752017 - DNA, 15 bp, Homo sapiens
gcatttattttcaga

SEQ ID NO: 752018 - DNA, 15 bp, Homo sapiens
catttattttcagac

SEQ ID NO: 752019 - DNA, 15 bp, Homo sapiens
atttattttcagact

SEQ ID NO: 752020 - DNA, 15 bp, Homo sapiens
tttattttcagactt

SEQ ID NO: 752021 - DNA, 15 bp, Homo sapiens
ttattttcagactta

SEQ ID NO: 752022 - DNA, 15 bp, Homo sapiens
tattttcagacttat

SEQ ID NO: 752023 - DNA, 15 bp, Homo sapiens
attttcagacttatt

SEQ ID NO: 752024 - DNA, 15 bp, Homo sapiens
ttttcagacttattg

SEQ ID NO: 752025 - DNA, 15 bp, Homo sapiens
tttcagacttattgg

SEQ ID NO: 752026 - DNA, 15 bp, Homo sapiens
ttcagacttattggt

SEQ ID NO: 752027 - DNA, 15 bp, Homo sapiens
tcagacttattggta

SEQ ID NO: 752028 - DNA, 15 bp, Homo sapiens
cagacttattggtac

SEQ ID NO: 752029 - DNA, 15 bp, Homo sapiens
agacttattggtact

SEQ ID NO: 752030 - DNA, 15 bp, Homo sapiens
gacttattggtactt

SEQ ID NO: 752031 - DNA, 15 bp, Homo sapiens
acttattggtacttt

SEQ ID NO: 752032 - DNA, 15 bp, Homo sapiens
cttattggtactttt

SEQ ID NO: 752033 - DNA, 15 bp, Homo sapiens
ttattggtacttttg

SEQ ID NO: 752034 - DNA, 15 bp, Homo sapiens
tattggtacttttgt

SEQ ID NO: 752035 - DNA, 15 bp, Homo sapiens
attggtacttttgtt

SEQ ID NO: 752036 - DNA, 15 bp, Homo sapiens
ttggtacttttgttt

SEQ ID NO: 752037 - DNA, 15 bp, Homo sapiens
tggtacttttgtttt

SEQ ID NO: 752038 - DNA, 15 bp, Homo sapiens
ggtacttttgttttg

SEQ ID NO: 752039 - DNA, 15 bp, Homo sapiens
gtacttttgttttgg

SEQ ID NO: 752040 - DNA, 15 bp, Homo sapiens
tacttttgttttggg

SEQ ID NO: 752041 - DNA, 15 bp, Homo sapiens
acttttgttttggga

SEQ ID NO: 752042 - DNA, 15 bp, Homo sapiens
cttttgttttgggaa

SEQ ID NO: 752043 - DNA, 15 bp, Homo sapiens
ttttgttttgggaag

SEQ ID NO: 752044 - DNA, 15 bp, Homo sapiens
tttgttttgggaagt

SEQ ID NO: 752045 - DNA, 15 bp, Homo sapiens
ttgttttgggaagtc

SEQ ID NO: 752046 - DNA, 15 bp, Homo sapiens
tgttttgggaagtct

SEQ ID NO: 752047 - DNA, 15 bp, Homo sapiens
gttttgggaagtctt

SEQ ID NO: 752048 - DNA, 15 bp, Homo sapiens
ttttgggaagtcttt

SEQ ID NO: 752049 - DNA, 15 bp, Homo sapiens
tttgggaagtctttc

SEQ ID NO: 752050 - DNA, 15 bp, Homo sapiens
ttgggaagtctttct

SEQ ID NO: 752051 - DNA, 15 bp, Homo sapiens
tgggaagtctttctg

SEQ ID NO: 752052 - DNA, 15 bp, Homo sapiens
gggaagtctttctgt

SEQ ID NO: 752053 - DNA, 15 bp, Homo sapiens
ggaagtctttctgtg

SEQ ID NO: 752054 - DNA, 15 bp, Homo sapiens
gaagtctttctgtgg

SEQ ID NO: 752055 - DNA, 15 bp, Homo sapiens
aagtctttctgtggg

SEQ ID NO: 752056 - DNA, 15 bp, Homo sapiens
agtctttctgtggga

SEQ ID NO: 752057 - DNA, 15 bp, Homo sapiens
gtctttctgtgggaa

SEQ ID NO: 752058 - DNA, 15 bp, Homo sapiens
tctttctgtgggaat

SEQ ID NO: 752059 - DNA, 15 bp, Homo sapiens
ctttctgtgggaatt

SEQ ID NO: 752060 - DNA, 15 bp, Homo sapiens
tttctgtgggaattg

SEQ ID NO: 752061 - DNA, 15 bp, Homo sapiens
ttctgtgggaattgg

SEQ ID NO: 752062 - DNA, 15 bp, Homo sapiens
tctgtgggaattgga

SEQ ID NO: 752063 - DNA, 15 bp, Homo sapiens
ctgtgggaattggag

SEQ ID NO: 752064 - DNA, 15 bp, Homo sapiens
tgtgggaattggagt

SEQ ID NO: 752065 - DNA, 15 bp, Homo sapiens
gtgggaattggagtt

SEQ ID NO: 752066 - DNA, 15 bp, Homo sapiens
tgggaattggagtta

SEQ ID NO: 752067 - DNA, 15 bp, Homo sapiens
gggaattggagttac

SEQ ID NO: 752068 - DNA, 15 bp, Homo sapiens
ggaattggagttact

SEQ ID NO: 752069 - DNA, 15 bp, Homo sapiens
gaattggagttacta

SEQ ID NO: 752070 - DNA, 15 bp, Homo sapiens
aattggagttactat

SEQ ID NO: 752071 - DNA, 15 bp, Homo sapiens
attggagttactatt

SEQ ID NO: 752072 - DNA, 15 bp, Homo sapiens
ttggagttactattt

SEQ ID NO: 752073 - DNA, 15 bp, Homo sapiens
tggagttactatttt

SEQ ID NO: 752074 - DNA, 15 bp, Homo sapiens
ggagttactattttc

SEQ ID NO: 752075 - DNA, 15 bp, Homo sapiens
gagttactattttct

SEQ ID NO: 752076 - DNA, 15 bp, Homo sapiens
agttactattttctt

SEQ ID NO: 752077 - DNA, 15 bp, Homo sapiens
gttactattttctta

SEQ ID NO: 752078 - DNA, 15 bp, Homo sapiens
ttactattttcttag

SEQ ID NO: 752079 - DNA, 15 bp, Homo sapiens
tactattttcttagg

SEQ ID NO: 752080 - DNA, 15 bp, Homo sapiens
actattttcttaggg

SEQ ID NO: 752081 - DNA, 15 bp, Homo sapiens
ctattttcttagggg

SEQ ID NO: 752082 - DNA, 15 bp, Homo sapiens
tattttcttagggga

SEQ ID NO: 752083 - DNA, 15 bp, Homo sapiens
attttcttaggggaa

SEQ ID NO: 752084 - DNA, 15 bp, Homo sapiens
ttttcttaggggaaa

SEQ ID NO: 752085 - DNA, 15 bp, Homo sapiens
tttcttaggggaaaa

SEQ ID NO: 752086 - DNA, 15 bp, Homo sapiens
ttcttaggggaaaaa

SEQ ID NO: 752087 - DNA, 15 bp, Homo sapiens
tcttaggggaaaaaa

SEQ ID NO: 752088 - DNA, 15 bp, Homo sapiens
cttaggggaaaaaaa

SEQ ID NO: 752089 - DNA, 15 bp, Homo sapiens
ttaggggaaaaaaaa

SEQ ID NO: 752090 - DNA, 15 bp, Homo sapiens
taggggaaaaaaaat

SEQ ID NO: 752091 - DNA, 15 bp, Homo sapiens
aggggaaaaaaaatc

SEQ ID NO: 752092 - DNA, 15 bp, Homo sapiens
ggggaaaaaaaatca

SEQ ID NO: 752093 - DNA, 15 bp, Homo sapiens
gggaaaaaaaatcag

SEQ ID NO: 752094 - DNA, 15 bp, Homo sapiens
ggaaaaaaaatcaga

SEQ ID NO: 752095 - DNA, 15 bp, Homo sapiens
gaaaaaaaatcagaa

SEQ ID NO: 752096 - DNA, 15 bp, Homo sapiens
aaaaaaaatcagaac

SEQ ID NO: 752097 - DNA, 15 bp, Homo sapiens
aaaaaaatcagaaca

SEQ ID NO: 752098 - DNA, 15 bp, Homo sapiens
aaaaaatcagaacaa

SEQ ID NO: 752099 - DNA, 15 bp, Homo sapiens
aaaaatcagaacaaa

SEQ ID NO: 752100 - DNA, 15 bp, Homo sapiens
aaaatcagaacaaac

SEQ ID NO: 752101 - DNA, 15 bp, Homo sapiens
aaatcagaacaaact

SEQ ID NO: 752102 - DNA, 15 bp, Homo sapiens
aatcagaacaaactt

SEQ ID NO: 752103 - DNA, 15 bp, Homo sapiens
atcagaacaaacttg

SEQ ID NO: 752104 - DNA, 15 bp, Homo sapiens
tcagaacaaacttgt

SEQ ID NO: 752105 - DNA, 15 bp, Homo sapiens
cagaacaaacttgtt

SEQ ID NO: 752106 - DNA, 15 bp, Homo sapiens
agaacaaacttgttt

SEQ ID NO: 752107 - DNA, 15 bp, Homo sapiens
gaacaaacttgtttg

SEQ ID NO: 752108 - DNA, 15 bp, Homo sapiens
aacaaacttgtttga

SEQ ID NO: 752109 - DNA, 15 bp, Homo sapiens
acaaacttgtttgag

SEQ ID NO: 752110 - DNA, 15 bp, Homo sapiens
caaacttgtttgagt

SEQ ID NO: 752111 - DNA, 15 bp, Homo sapiens
aaacttgtttgagtg

SEQ ID NO: 752112 - DNA, 15 bp, Homo sapiens
aacttgtttgagtgg

SEQ ID NO: 752113 - DNA, 15 bp, Homo sapiens
acttgtttgagtggc

SEQ ID NO: 752114 - DNA, 15 bp, Homo sapiens
cttgtttgagtggct

SEQ ID NO: 752115 - DNA, 15 bp, Homo sapiens
ttgtttgagtggctt

SEQ ID NO: 752116 - DNA, 15 bp, Homo sapiens
tgtttgagtggcttc

SEQ ID NO: 752117 - DNA, 15 bp, Homo sapiens
gtttgagtggcttct

SEQ ID NO: 752118 - DNA, 15 bp, Homo sapiens
tttgagtggcttcta

SEQ ID NO: 752119 - DNA, 15 bp, Homo sapiens
ttgagtggcttctat

SEQ ID NO: 752120 - DNA, 15 bp, Homo sapiens
tgagtggcttctatg

SEQ ID NO: 752121 - DNA, 15 bp, Homo sapiens
gagtggcttctatgc

SEQ ID NO: 752122 - DNA, 15 bp, Homo sapiens
agtggcttctatgca

SEQ ID NO: 752123 - DNA, 15 bp, Homo sapiens
gtggcttctatgcat

SEQ ID NO: 752124 - DNA, 15 bp, Homo sapiens
tggcttctatgcatt

SEQ ID NO: 752125 - DNA, 15 bp, Homo sapiens
ggcttctatgcatta

SEQ ID NO: 752126 - DNA, 15 bp, Homo sapiens
gcttctatgcattaa

SEQ ID NO: 752127 - DNA, 15 bp, Homo sapiens
cttctatgcattaag

SEQ ID NO: 752128 - DNA, 15 bp, Homo sapiens
ttctatgcattaagc

SEQ ID NO: 752129 - DNA, 15 bp, Homo sapiens
tctatgcattaagca

SEQ ID NO: 752130 - DNA, 15 bp, Homo sapiens
ctatgcattaagcat

SEQ ID NO: 752131 - DNA, 15 bp, Homo sapiens
tatgcattaagcatt

SEQ ID NO: 752132 - DNA, 15 bp, Homo sapiens
atgcattaagcattg

SEQ ID NO: 752133 - DNA, 15 bp, Homo sapiens
tgcattaagcattgt

SEQ ID NO: 752134 - DNA, 15 bp, Homo sapiens
gcattaagcattgtt

SEQ ID NO: 752135 - DNA, 15 bp, Homo sapiens
cattaagcattgttt

SEQ ID NO: 752136 - DNA, 15 bp, Homo sapiens
attaagcattgtttt

SEQ ID NO: 752137 - DNA, 15 bp, Homo sapiens
ttaagcattgtttta

SEQ ID NO: 752138 - DNA, 15 bp, Homo sapiens
taagcattgttttaa

SEQ ID NO: 752139 - DNA, 15 bp, Homo sapiens
aagcattgttttaag

SEQ ID NO: 752140 - DNA, 15 bp, Homo sapiens
agcattgttttaagc

SEQ ID NO: 752141 - DNA, 15 bp, Homo sapiens
gcattgttttaagct

SEQ ID NO: 752142 - DNA, 15 bp, Homo sapiens
cattgttttaagctc

SEQ ID NO: 752143 - DNA, 15 bp, Homo sapiens
attgttttaagctcc

SEQ ID NO: 752144 - DNA, 15 bp, Homo sapiens
ttgttttaagctcct

SEQ ID NO: 752145 - DNA, 15 bp, Homo sapiens
tgttttaagctcctt

SEQ ID NO: 752146 - DNA, 15 bp, Homo sapiens
gttttaagctcctta

SEQ ID NO: 752147 - DNA, 15 bp, Homo sapiens
ttttaagctccttat

SEQ ID NO: 752148 - DNA, 15 bp, Homo sapiens
tttaagctccttatg

SEQ ID NO: 752149 - DNA, 15 bp, Homo sapiens
ttaagctccttatgt

SEQ ID NO: 752150 - DNA, 15 bp, Homo sapiens
taagctccttatgtt

SEQ ID NO: 752151 - DNA, 15 bp, Homo sapiens
aagctccttatgttt

SEQ ID NO: 752152 - DNA, 15 bp, Homo sapiens
agctccttatgttta

SEQ ID NO: 752153 - DNA, 15 bp, Homo sapiens
gctccttatgtttat

SEQ ID NO: 752154 - DNA, 15 bp, Homo sapiens
ctccttatgtttatt

SEQ ID NO: 752155 - DNA, 15 bp, Homo sapiens
tccttatgtttattc

SEQ ID NO: 752156 - DNA, 15 bp, Homo sapiens
ccttatgtttattct

SEQ ID NO: 752157 - DNA, 15 bp, Homo sapiens
cttatgtttattctg

SEQ ID NO: 752158 - DNA, 15 bp, Homo sapiens
ttatgtttattctgt

SEQ ID NO: 752159 - DNA, 15 bp, Homo sapiens
tatgtttattctgtt

SEQ ID NO: 752160 - DNA, 15 bp, Homo sapiens
atgtttattctgtta

SEQ ID NO: 752161 - DNA, 15 bp, Homo sapiens
tgtttattctgttat

SEQ ID NO: 752162 - DNA, 15 bp, Homo sapiens
gtttattctgttatt

SEQ ID NO: 752163 - DNA, 15 bp, Homo sapiens
tttattctgttattt

SEQ ID NO: 752164 - DNA, 15 bp, Homo sapiens
ttattctgttattta

SEQ ID NO: 752165 - DNA, 15 bp, Homo sapiens
tattctgttatttaa

SEQ ID NO: 752166 - DNA, 15 bp, Homo sapiens
attctgttatttaat

SEQ ID NO: 752167 - DNA, 15 bp, Homo sapiens
ttctgttatttaatc

SEQ ID NO: 752168 - DNA, 15 bp, Homo sapiens
tctgttatttaatcc

SEQ ID NO: 752169 - DNA, 15 bp, Homo sapiens
ctgttatttaatcct

SEQ ID NO: 752170 - DNA, 15 bp, Homo sapiens
tgttatttaatcctc

SEQ ID NO: 752171 - DNA, 15 bp, Homo sapiens
gttatttaatcctca

SEQ ID NO: 752172 - DNA, 15 bp, Homo sapiens
ttatttaatcctcaa

SEQ ID NO: 752173 - DNA, 15 bp, Homo sapiens
tatttaatcctcaaa

SEQ ID NO: 752174 - DNA, 15 bp, Homo sapiens
atttaatcctcaaaa

SEQ ID NO: 752175 - DNA, 15 bp, Homo sapiens
tttaatcctcaaaac

SEQ ID NO: 752176 - DNA, 15 bp, Homo sapiens
ttaatcctcaaaaca

SEQ ID NO: 752177 - DNA, 15 bp, Homo sapiens
taatcctcaaaacaa

SEQ ID NO: 752178 - DNA, 15 bp, Homo sapiens
aatcctcaaaacaat

SEQ ID NO: 752179 - DNA, 15 bp, Homo sapiens
atcctcaaaacaatc

SEQ ID NO: 752180 - DNA, 15 bp, Homo sapiens
tcctcaaaacaatcc

SEQ ID NO: 752181 - DNA, 15 bp, Homo sapiens
cctcaaaacaatcct

SEQ ID NO: 752182 - DNA, 15 bp, Homo sapiens
ctcaaaacaatcctg

SEQ ID NO: 752183 - DNA, 15 bp, Homo sapiens
tcaaaacaatcctgt

SEQ ID NO: 752184 - DNA, 15 bp, Homo sapiens
caaaacaatcctgtg

SEQ ID NO: 752185 - DNA, 15 bp, Homo sapiens
aaaacaatcctgtga

SEQ ID NO: 752186 - DNA, 15 bp, Homo sapiens
aaacaatcctgtgat

SEQ ID NO: 752187 - DNA, 15 bp, Homo sapiens
aacaatcctgtgatg

SEQ ID NO: 752188 - DNA, 15 bp, Homo sapiens
acaatcctgtgatgt

SEQ ID NO: 752189 - DNA, 15 bp, Homo sapiens
caatcctgtgatgta

SEQ ID NO: 752190 - DNA, 15 bp, Homo sapiens
aatcctgtgatgtag

SEQ ID NO: 752191 - DNA, 15 bp, Homo sapiens
atcctgtgatgtagt

SEQ ID NO: 752192 - DNA, 15 bp, Homo sapiens
tcctgtgatgtagtc

SEQ ID NO: 752193 - DNA, 15 bp, Homo sapiens
cctgtgatgtagtcc

SEQ ID NO: 752194 - DNA, 15 bp, Homo sapiens
ctgtgatgtagtccc

SEQ ID NO: 752195 - DNA, 15 bp, Homo sapiens
tgtgatgtagtcccc

SEQ ID NO: 752196 - DNA, 15 bp, Homo sapiens
gtgatgtagtcccct

SEQ ID NO: 752197 - DNA, 15 bp, Homo sapiens
tgatgtagtcccctt

SEQ ID NO: 752198 - DNA, 15 bp, Homo sapiens
gatgtagtccccttt

SEQ ID NO: 752199 - DNA, 15 bp, Homo sapiens
atgtagtcccctttt

SEQ ID NO: 752200 - DNA, 15 bp, Homo sapiens
tgtagtcccctttta

SEQ ID NO: 752201 - DNA, 15 bp, Homo sapiens
gtagtccccttttaa

SEQ ID NO: 752202 - DNA, 15 bp, Homo sapiens
tagtccccttttaaa

SEQ ID NO: 752203 - DNA, 15 bp, Homo sapiens
agtccccttttaaat

SEQ ID NO: 752204 - DNA, 15 bp, Homo sapiens
gtccccttttaaatt

SEQ ID NO: 752205 - DNA, 15 bp, Homo sapiens
tccccttttaaattc

SEQ ID NO: 752206 - DNA, 15 bp, Homo sapiens
ccccttttaaattcc

SEQ ID NO: 752207 - DNA, 15 bp, Homo sapiens
cccttttaaattccc

SEQ ID NO: 752208 - DNA, 15 bp, Homo sapiens
ccttttaaattccca

SEQ ID NO: 752209 - DNA, 15 bp, Homo sapiens
cttttaaattcccat

SEQ ID NO: 752210 - DNA, 15 bp, Homo sapiens
ttttaaattcccatt

SEQ ID NO: 752211 - DNA, 15 bp, Homo sapiens
tttaaattcccattt

SEQ ID NO: 752212 - DNA, 15 bp, Homo sapiens
ttaaattcccatttt

SEQ ID NO: 752213 - DNA, 15 bp, Homo sapiens
taaattcccatttta

SEQ ID NO: 752214 - DNA, 15 bp, Homo sapiens
aaattcccattttac

SEQ ID NO: 752215 - DNA, 15 bp, Homo sapiens
aattcccattttaca

SEQ ID NO: 752216 - DNA, 15 bp, Homo sapiens
attcccattttacag

SEQ ID NO: 752217 - DNA, 15 bp, Homo sapiens
ttcccattttacagg

SEQ ID NO: 752218 - DNA, 15 bp, Homo sapiens
tcccattttacaggt

SEQ ID NO: 752219 - DNA, 15 bp, Homo sapiens
cccattttacaggtt

SEQ ID NO: 752220 - DNA, 15 bp, Homo sapiens
ccattttacaggtta

SEQ ID NO: 752221 - DNA, 15 bp, Homo sapiens
cattttacaggttag

SEQ ID NO: 752222 - DNA, 15 bp, Homo sapiens
attttacaggttaga

SEQ ID NO: 752223 - DNA, 15 bp, Homo sapiens
ttttacaggttagaa

SEQ ID NO: 752224 - DNA, 15 bp, Homo sapiens
tttacaggttagaaa

SEQ ID NO: 752225 - DNA, 15 bp, Homo sapiens
ttacaggttagaaaa

SEQ ID NO: 752226 - DNA, 15 bp, Homo sapiens
tacaggttagaaaat

SEQ ID NO: 752227 - DNA, 15 bp, Homo sapiens
acaggttagaaaatg

SEQ ID NO: 752228 - DNA, 15 bp, Homo sapiens
caggttagaaaatgg

SEQ ID NO: 752229 - DNA, 15 bp, Homo sapiens
aggttagaaaatgga

SEQ ID NO: 752230 - DNA, 15 bp, Homo sapiens
ggttagaaaatggat

SEQ ID NO: 752231 - DNA, 15 bp, Homo sapiens
gttagaaaatggatg

SEQ ID NO: 752232 - DNA, 15 bp, Homo sapiens
ttagaaaatggatgc

SEQ ID NO: 752233 - DNA, 15 bp, Homo sapiens
tagaaaatggatgca

SEQ ID NO: 752234 - DNA, 15 bp, Homo sapiens
agaaaatggatgcat

SEQ ID NO: 752235 - DNA, 15 bp, Homo sapiens
gaaaatggatgcata

SEQ ID NO: 752236 - DNA, 15 bp, Homo sapiens
aaaatggatgcatag

SEQ ID NO: 752237 - DNA, 15 bp, Homo sapiens
aaatggatgcataga

SEQ ID NO: 752238 - DNA, 15 bp, Homo sapiens
aatggatgcatagag

SEQ ID NO: 752239 - DNA, 15 bp, Homo sapiens
atggatgcatagaga

SEQ ID NO: 752240 - DNA, 15 bp, Homo sapiens
tggatgcatagagaa

SEQ ID NO: 752241 - DNA, 15 bp, Homo sapiens
ggatgcatagagaat

SEQ ID NO: 752242 - DNA, 15 bp, Homo sapiens
gatgcatagagaatg

SEQ ID NO: 752243 - DNA, 15 bp, Homo sapiens
atgcatagagaatga

SEQ ID NO: 752244 - DNA, 15 bp, Homo sapiens
tgcatagagaatgag

SEQ ID NO: 752245 - DNA, 15 bp, Homo sapiens
gcatagagaatgaga

SEQ ID NO: 752246 - DNA, 15 bp, Homo sapiens
catagagaatgagaa

SEQ ID NO: 752247 - DNA, 15 bp, Homo sapiens
atagagaatgagaat

SEQ ID NO: 752248 - DNA, 15 bp, Homo sapiens
tagagaatgagaatg

SEQ ID NO: 752249 - DNA, 15 bp, Homo sapiens
agagaatgagaatgt

SEQ ID NO: 752250 - DNA, 15 bp, Homo sapiens
gagaatgagaatgtt

SEQ ID NO: 752251 - DNA, 15 bp, Homo sapiens
agaatgagaatgttt

SEQ ID NO: 752252 - DNA, 15 bp, Homo sapiens
gaatgagaatgtttt

SEQ ID NO: 752253 - DNA, 15 bp, Homo sapiens
aatgagaatgttttt

SEQ ID NO: 752254 - DNA, 15 bp, Homo sapiens
atgagaatgtttttc

SEQ ID NO: 752255 - DNA, 15 bp, Homo sapiens
tgagaatgtttttct

SEQ ID NO: 752256 - DNA, 15 bp, Homo sapiens
gagaatgtttttctt

SEQ ID NO: 752257 - DNA, 15 bp, Homo sapiens
agaatgtttttcttt

SEQ ID NO: 752258 - DNA, 15 bp, Homo sapiens
gaatgtttttctttt

SEQ ID NO: 752259 - DNA, 15 bp, Homo sapiens
aatgtttttcttttt

SEQ ID NO: 752260 - DNA, 15 bp, Homo sapiens
atgtttttctttttt

SEQ ID NO: 752261 - DNA, 15 bp, Homo sapiens
tgtttttcttttttt

SEQ ID NO: 752262 - DNA, 15 bp, Homo sapiens
gtttttctttttttg

SEQ ID NO: 752263 - DNA, 15 bp, Homo sapiens
tttttctttttttgg

SEQ ID NO: 752264 - DNA, 15 bp, Homo sapiens
ttttctttttttgga

SEQ ID NO: 752265 - DNA, 15 bp, Homo sapiens
tttctttttttggat

SEQ ID NO: 752266 - DNA, 15 bp, Homo sapiens
ttctttttttggata

SEQ ID NO: 752267 - DNA, 15 bp, Homo sapiens
tctttttttggataa

SEQ ID NO: 752268 - DNA, 15 bp, Homo sapiens
ctttttttggataac

SEQ ID NO: 752269 - DNA, 15 bp, Homo sapiens
tttttttggataaca

SEQ ID NO: 752270 - DNA, 15 bp, Homo sapiens
ttttttggataacaa

SEQ ID NO: 752271 - DNA, 15 bp, Homo sapiens
tttttggataacaaa

SEQ ID NO: 752272 - DNA, 15 bp, Homo sapiens
ttttggataacaaac

SEQ ID NO: 752273 - DNA, 15 bp, Homo sapiens
tttggataacaaact

SEQ ID NO: 752274 - DNA, 15 bp, Homo sapiens
ttggataacaaactt

SEQ ID NO: 752275 - DNA, 15 bp, Homo sapiens
tggataacaaacttt

SEQ ID NO: 752276 - DNA, 15 bp, Homo sapiens
ggataacaaactttg

SEQ ID NO: 752277 - DNA, 15 bp, Homo sapiens
gataacaaactttga

SEQ ID NO: 752278 - DNA, 15 bp, Homo sapiens
ataacaaactttgag

SEQ ID NO: 752279 - DNA, 15 bp, Homo sapiens
taacaaactttgagt

SEQ ID NO: 752280 - DNA, 15 bp, Homo sapiens
aacaaactttgagtg

SEQ ID NO: 752281 - DNA, 15 bp, Homo sapiens
acaaactttgagtga

SEQ ID NO: 752282 - DNA, 15 bp, Homo sapiens
caaactttgagtgat

SEQ ID NO: 752283 - DNA, 15 bp, Homo sapiens
aaactttgagtgatt

SEQ ID NO: 752284 - DNA, 15 bp, Homo sapiens
aactttgagtgatta

SEQ ID NO: 752285 - DNA, 15 bp, Homo sapiens
actttgagtgattac

SEQ ID NO: 752286 - DNA, 15 bp, Homo sapiens
ctttgagtgattact

SEQ ID NO: 752287 - DNA, 15 bp, Homo sapiens
tttgagtgattactg

SEQ ID NO: 752288 - DNA, 15 bp, Homo sapiens
ttgagtgattactgt

SEQ ID NO: 752289 - DNA, 15 bp, Homo sapiens
tgagtgattactgtg

SEQ ID NO: 752290 - DNA, 15 bp, Homo sapiens
gagtgattactgtgt

SEQ ID NO: 752291 - DNA, 15 bp, Homo sapiens
agtgattactgtgtg

SEQ ID NO: 752292 - DNA, 15 bp, Homo sapiens
gtgattactgtgtgt

SEQ ID NO: 752293 - DNA, 15 bp, Homo sapiens
tgattactgtgtgtc

SEQ ID NO: 752294 - DNA, 15 bp, Homo sapiens
gattactgtgtgtct

SEQ ID NO: 752295 - DNA, 15 bp, Homo sapiens
attactgtgtgtctg

SEQ ID NO: 752296 - DNA, 15 bp, Homo sapiens
ttactgtgtgtctgg

SEQ ID NO: 752297 - DNA, 15 bp, Homo sapiens
tactgtgtgtctggt

SEQ ID NO: 752298 - DNA, 15 bp, Homo sapiens
actgtgtgtctggtt

SEQ ID NO: 752299 - DNA, 15 bp, Homo sapiens
ctgtgtgtctggttg

SEQ ID NO: 752300 - DNA, 15 bp, Homo sapiens
tgtgtgtctggttgt

SEQ ID NO: 752301 - DNA, 15 bp, Homo sapiens
gtgtgtctggttgtt

SEQ ID NO: 752302 - DNA, 15 bp, Homo sapiens
tgtgtctggttgttt

SEQ ID NO: 752303 - DNA, 15 bp, Homo sapiens
gtgtctggttgtttt

SEQ ID NO: 752304 - DNA, 15 bp, Homo sapiens
tgtctggttgttttt

SEQ ID NO: 752305 - DNA, 15 bp, Homo sapiens
gtctggttgttttta

SEQ ID NO: 752306 - DNA, 15 bp, Homo sapiens
tctggttgtttttaa

SEQ ID NO: 752307 - DNA, 15 bp, Homo sapiens
ctggttgtttttaaa

SEQ ID NO: 752308 - DNA, 15 bp, Homo sapiens
tggttgtttttaaac

SEQ ID NO: 752309 - DNA, 15 bp, Homo sapiens
ggttgtttttaaact

SEQ ID NO: 752310 - DNA, 15 bp, Homo sapiens
gttgtttttaaacta

SEQ ID NO: 752311 - DNA, 15 bp, Homo sapiens
ttgtttttaaactat

SEQ ID NO: 752312 - DNA, 15 bp, Homo sapiens
tgtttttaaactata

SEQ ID NO: 752313 - DNA, 15 bp, Homo sapiens
gtttttaaactatat

SEQ ID NO: 752314 - DNA, 15 bp, Homo sapiens
tttttaaactatatg

SEQ ID NO: 752315 - DNA, 15 bp, Homo sapiens
ttttaaactatatgt

SEQ ID NO: 752316 - DNA, 15 bp, Homo sapiens
tttaaactatatgta

SEQ ID NO: 752317 - DNA, 15 bp, Homo sapiens
ttaaactatatgtat

SEQ ID NO: 752318 - DNA, 15 bp, Homo sapiens
taaactatatgtatt

SEQ ID NO: 752319 - DNA, 15 bp, Homo sapiens
aaactatatgtatta

SEQ ID NO: 752320 - DNA, 15 bp, Homo sapiens
aactatatgtattat

SEQ ID NO: 752321 - DNA, 15 bp, Homo sapiens
actatatgtattata

SEQ ID NO: 752322 - DNA, 15 bp, Homo sapiens
ctatatgtattatat

SEQ ID NO: 752323 - DNA, 15 bp, Homo sapiens
tatatgtattatata

SEQ ID NO: 752324 - DNA, 15 bp, Homo sapiens
atatgtattatataa

SEQ ID NO: 752325 - DNA, 15 bp, Homo sapiens
tatgtattatataat

SEQ ID NO: 752326 - DNA, 15 bp, Homo sapiens
atgtattatataatc

SEQ ID NO: 752327 - DNA, 15 bp, Homo sapiens
tgtattatataatcc

SEQ ID NO: 752328 - DNA, 15 bp, Homo sapiens
gtattatataatcct

SEQ ID NO: 752329 - DNA, 15 bp, Homo sapiens
tattatataatcctc

SEQ ID NO: 752330 - DNA, 15 bp, Homo sapiens
attatataatcctca

SEQ ID NO: 752331 - DNA, 15 bp, Homo sapiens
ttatataatcctcac

SEQ ID NO: 752332 - DNA, 15 bp, Homo sapiens
tatataatcctcaca

SEQ ID NO: 752333 - DNA, 15 bp, Homo sapiens
atataatcctcacaa

SEQ ID NO: 752334 - DNA, 15 bp, Homo sapiens
tataatcctcacaac

SEQ ID NO: 752335 - DNA, 15 bp, Homo sapiens
ataatcctcacaaca

SEQ ID NO: 752336 - DNA, 15 bp, Homo sapiens
taatcctcacaacaa

SEQ ID NO: 752337 - DNA, 15 bp, Homo sapiens
aatcctcacaacaac

SEQ ID NO: 752338 - DNA, 15 bp, Homo sapiens
atcctcacaacaacc

SEQ ID NO: 752339 - DNA, 15 bp, Homo sapiens
tcctcacaacaaccc

SEQ ID NO: 752340 - DNA, 15 bp, Homo sapiens
cctcacaacaaccca

SEQ ID NO: 752341 - DNA, 15 bp, Homo sapiens
ctcacaacaacccag

SEQ ID NO: 752342 - DNA, 15 bp, Homo sapiens
tcacaacaacccagt

SEQ ID NO: 752343 - DNA, 15 bp, Homo sapiens
cacaacaacccagtg

SEQ ID NO: 752344 - DNA, 15 bp, Homo sapiens
acaacaacccagtga

SEQ ID NO: 752345 - DNA, 15 bp, Homo sapiens
caacaacccagtgaa

SEQ ID NO: 752346 - DNA, 15 bp, Homo sapiens
aacaacccagtgaat

SEQ ID NO: 752347 - DNA, 15 bp, Homo sapiens
acaacccagtgaatt

SEQ ID NO: 752348 - DNA, 15 bp, Homo sapiens
caacccagtgaattc

SEQ ID NO: 752349 - DNA, 15 bp, Homo sapiens
aacccagtgaattcg

SEQ ID NO: 752350 - DNA, 15 bp, Homo sapiens
acccagtgaattcgg

SEQ ID NO: 752351 - DNA, 15 bp, Homo sapiens
cccagtgaattcggt

SEQ ID NO: 752352 - DNA, 15 bp, Homo sapiens
ccagtgaattcggtg

SEQ ID NO: 752353 - DNA, 15 bp, Homo sapiens
cagtgaattcggtgg

SEQ ID NO: 752354 - DNA, 15 bp, Homo sapiens
agtgaattcggtggt

SEQ ID NO: 752355 - DNA, 15 bp, Homo sapiens
gtgaattcggtggta

SEQ ID NO: 752356 - DNA, 15 bp, Homo sapiens
tgaattcggtggtat

SEQ ID NO: 752357 - DNA, 15 bp, Homo sapiens
gaattcggtggtatt

SEQ ID NO: 752358 - DNA, 15 bp, Homo sapiens
aattcggtggtatta

SEQ ID NO: 752359 - DNA, 15 bp, Homo sapiens
attcggtggtattat

SEQ ID NO: 752360 - DNA, 15 bp, Homo sapiens
ttcggtggtattatt

SEQ ID NO: 752361 - DNA, 15 bp, Homo sapiens
tcggtggtattatta

SEQ ID NO: 752362 - DNA, 15 bp, Homo sapiens
cggtggtattattat

SEQ ID NO: 752363 - DNA, 15 bp, Homo sapiens
ggtggtattattatc

SEQ ID NO: 752364 - DNA, 15 bp, Homo sapiens
gtggtattattatcc

SEQ ID NO: 752365 - DNA, 15 bp, Homo sapiens
tggtattattatcct

SEQ ID NO: 752366 - DNA, 15 bp, Homo sapiens
ggtattattatcctc

SEQ ID NO: 752367 - DNA, 15 bp, Homo sapiens
gtattattatcctca

SEQ ID NO: 752368 - DNA, 15 bp, Homo sapiens
tattattatcctcac

SEQ ID NO: 752369 - DNA, 15 bp, Homo sapiens
attattatcctcact

SEQ ID NO: 752370 - DNA, 15 bp, Homo sapiens
ttattatcctcactt

SEQ ID NO: 752371 - DNA, 15 bp, Homo sapiens
tattatcctcactta

SEQ ID NO: 752372 - DNA, 15 bp, Homo sapiens
attatcctcacttat

SEQ ID NO: 752373 - DNA, 15 bp, Homo sapiens
ttatcctcacttatg

SEQ ID NO: 752374 - DNA, 15 bp, Homo sapiens
tatcctcacttatgg

SEQ ID NO: 752375 - DNA, 15 bp, Homo sapiens
atcctcacttatgga

SEQ ID NO: 752376 - DNA, 15 bp, Homo sapiens
tcctcacttatggat

SEQ ID NO: 752377 - DNA, 15 bp, Homo sapiens
cctcacttatggatt

SEQ ID NO: 752378 - DNA, 15 bp, Homo sapiens
ctcacttatggatta

SEQ ID NO: 752379 - DNA, 15 bp, Homo sapiens
tcacttatggattag

SEQ ID NO: 752380 - DNA, 15 bp, Homo sapiens
cacttatggattaga

SEQ ID NO: 752381 - DNA, 15 bp, Homo sapiens
acttatggattagaa

SEQ ID NO: 752382 - DNA, 15 bp, Homo sapiens
cttatggattagaaa

SEQ ID NO: 752383 - DNA, 15 bp, Homo sapiens
ttatggattagaaaa

SEQ ID NO: 752384 - DNA, 15 bp, Homo sapiens
tatggattagaaaac

SEQ ID NO: 752385 - DNA, 15 bp, Homo sapiens
atggattagaaaact

SEQ ID NO: 752386 - DNA, 15 bp, Homo sapiens
tggattagaaaactg

SEQ ID NO: 752387 - DNA, 15 bp, Homo sapiens
ggattagaaaactga

SEQ ID NO: 752388 - DNA, 15 bp, Homo sapiens
gattagaaaactgag

SEQ ID NO: 752389 - DNA, 15 bp, Homo sapiens
attagaaaactgagg

SEQ ID NO: 752390 - DNA, 15 bp, Homo sapiens
ttagaaaactgaggc

SEQ ID NO: 752391 - DNA, 15 bp, Homo sapiens
tagaaaactgaggca

SEQ ID NO: 752392 - DNA, 15 bp, Homo sapiens
agaaaactgaggcac

SEQ ID NO: 752393 - DNA, 15 bp, Homo sapiens
gaaaactgaggcaca

SEQ ID NO: 752394 - DNA, 15 bp, Homo sapiens
aaaactgaggcacag

SEQ ID NO: 752395 - DNA, 15 bp, Homo sapiens
aaactgaggcacaga

SEQ ID NO: 752396 - DNA, 15 bp, Homo sapiens
aactgaggcacagag

SEQ ID NO: 752397 - DNA, 15 bp, Homo sapiens
actgaggcacagaga

SEQ ID NO: 752398 - DNA, 15 bp, Homo sapiens
ctgaggcacagagag

SEQ ID NO: 752399 - DNA, 15 bp, Homo sapiens
tgaggcacagagagg

SEQ ID NO: 752400 - DNA, 15 bp, Homo sapiens
gaggcacagagaggt

SEQ ID NO: 752401 - DNA, 15 bp, Homo sapiens
aggcacagagaggtt

SEQ ID NO: 752402 - DNA, 15 bp, Homo sapiens
ggcacagagaggttg

SEQ ID NO: 752403 - DNA, 15 bp, Homo sapiens
gcacagagaggttga

SEQ ID NO: 752404 - DNA, 15 bp, Homo sapiens
cacagagaggttgag

SEQ ID NO: 752405 - DNA, 15 bp, Homo sapiens
acagagaggttgagt

SEQ ID NO: 752406 - DNA, 15 bp, Homo sapiens
cagagaggttgagta

SEQ ID NO: 752407 - DNA, 15 bp, Homo sapiens
agagaggttgagtaa

SEQ ID NO: 752408 - DNA, 15 bp, Homo sapiens
gagaggttgagtaac

SEQ ID NO: 752409 - DNA, 15 bp, Homo sapiens
agaggttgagtaact

SEQ ID NO: 752410 - DNA, 15 bp, Homo sapiens
gaggttgagtaactg

SEQ ID NO: 752411 - DNA, 15 bp, Homo sapiens
aggttgagtaactgc

SEQ ID NO: 752412 - DNA, 15 bp, Homo sapiens
ggttgagtaactgct

SEQ ID NO: 752413 - DNA, 15 bp, Homo sapiens
gttgagtaactgctc

SEQ ID NO: 752414 - DNA, 15 bp, Homo sapiens
ttgagtaactgctca

SEQ ID NO: 752415 - DNA, 15 bp, Homo sapiens
tgagtaactgctcag

SEQ ID NO: 752416 - DNA, 15 bp, Homo sapiens
gagtaactgctcagg

SEQ ID NO: 752417 - DNA, 15 bp, Homo sapiens
agtaactgctcaggg

SEQ ID NO: 752418 - DNA, 15 bp, Homo sapiens
gtaactgctcagggt

SEQ ID NO: 752419 - DNA, 15 bp, Homo sapiens
taactgctcagggtc

SEQ ID NO: 752420 - DNA, 15 bp, Homo sapiens
aactgctcagggtca

SEQ ID NO: 752421 - DNA, 15 bp, Homo sapiens
actgctcagggtcac

SEQ ID NO: 752422 - DNA, 15 bp, Homo sapiens
ctgctcagggtcaca

SEQ ID NO: 752423 - DNA, 15 bp, Homo sapiens
tgctcagggtcacac

SEQ ID NO: 752424 - DNA, 15 bp, Homo sapiens
gctcagggtcacaca

SEQ ID NO: 752425 - DNA, 15 bp, Homo sapiens
ctcagggtcacacac

SEQ ID NO: 752426 - DNA, 15 bp, Homo sapiens
tcagggtcacacaca

SEQ ID NO: 752427 - DNA, 15 bp, Homo sapiens
cagggtcacacacag

SEQ ID NO: 752428 - DNA, 15 bp, Homo sapiens
agggtcacacacagg

SEQ ID NO: 752429 - DNA, 15 bp, Homo sapiens
gggtcacacacaggt

SEQ ID NO: 752430 - DNA, 15 bp, Homo sapiens
ggtcacacacaggtg

SEQ ID NO: 752431 - DNA, 15 bp, Homo sapiens
gtcacacacaggtga

SEQ ID NO: 752432 - DNA, 15 bp, Homo sapiens
tcacacacaggtgag

SEQ ID NO: 752433 - DNA, 15 bp, Homo sapiens
cacacacaggtgagg

SEQ ID NO: 752434 - DNA, 15 bp, Homo sapiens
acacacaggtgagga

SEQ ID NO: 752435 - DNA, 15 bp, Homo sapiens
cacacaggtgaggag

SEQ ID NO: 752436 - DNA, 15 bp, Homo sapiens
acacaggtgaggagc

SEQ ID NO: 752437 - DNA, 15 bp, Homo sapiens
cacaggtgaggagca

SEQ ID NO: 752438 - DNA, 15 bp, Homo sapiens
acaggtgaggagcag

SEQ ID NO: 752439 - DNA, 15 bp, Homo sapiens
caggtgaggagcaga

SEQ ID NO: 752440 - DNA, 15 bp, Homo sapiens
aggtgaggagcagag

SEQ ID NO: 752441 - DNA, 15 bp, Homo sapiens
ggtgaggagcagagc

SEQ ID NO: 752442 - DNA, 15 bp, Homo sapiens
gtgaggagcagagcc

SEQ ID NO: 752443 - DNA, 15 bp, Homo sapiens
tgaggagcagagcca

SEQ ID NO: 752444 - DNA, 15 bp, Homo sapiens
gaggagcagagccag

SEQ ID NO: 752445 - DNA, 15 bp, Homo sapiens
aggagcagagccagt

SEQ ID NO: 752446 - DNA, 15 bp, Homo sapiens
ggagcagagccagtt

SEQ ID NO: 752447 - DNA, 15 bp, Homo sapiens
gagcagagccagttt

SEQ ID NO: 752448 - DNA, 15 bp, Homo sapiens
agcagagccagttta

SEQ ID NO: 752449 - DNA, 15 bp, Homo sapiens
gcagagccagtttaa

SEQ ID NO: 752450 - DNA, 15 bp, Homo sapiens
cagagccagtttaaa

SEQ ID NO: 752451 - DNA, 15 bp, Homo sapiens
agagccagtttaaat

SEQ ID NO: 752452 - DNA, 15 bp, Homo sapiens
gagccagtttaaatc

SEQ ID NO: 752453 - DNA, 15 bp, Homo sapiens
agccagtttaaatcc

SEQ ID NO: 752454 - DNA, 15 bp, Homo sapiens
gccagtttaaatcca

SEQ ID NO: 752455 - DNA, 15 bp, Homo sapiens
ccagtttaaatccag

SEQ ID NO: 752456 - DNA, 15 bp, Homo sapiens
cagtttaaatccagg

SEQ ID NO: 752457 - DNA, 15 bp, Homo sapiens
agtttaaatccaggc

SEQ ID NO: 752458 - DNA, 15 bp, Homo sapiens
gtttaaatccaggca

SEQ ID NO: 752459 - DNA, 15 bp, Homo sapiens
tttaaatccaggcag

SEQ ID NO: 752460 - DNA, 15 bp, Homo sapiens
ttaaatccaggcagg

SEQ ID NO: 752461 - DNA, 15 bp, Homo sapiens
taaatccaggcaggt

SEQ ID NO: 752462 - DNA, 15 bp, Homo sapiens
aaatccaggcaggtg

SEQ ID NO: 752463 - DNA, 15 bp, Homo sapiens
aatccaggcaggtgg

SEQ ID NO: 752464 - DNA, 15 bp, Homo sapiens
atccaggcaggtggg

SEQ ID NO: 752465 - DNA, 15 bp, Homo sapiens
tccaggcaggtgggc

SEQ ID NO: 752466 - DNA, 15 bp, Homo sapiens
ccaggcaggtgggct

SEQ ID NO: 752467 - DNA, 15 bp, Homo sapiens
caggcaggtgggctg

SEQ ID NO: 752468 - DNA, 15 bp, Homo sapiens
aggcaggtgggctgt

SEQ ID NO: 752469 - DNA, 15 bp, Homo sapiens
ggcaggtgggctgtg

SEQ ID NO: 752470 - DNA, 15 bp, Homo sapiens
gcaggtgggctgtgg

SEQ ID NO: 752471 - DNA, 15 bp, Homo sapiens
caggtgggctgtgga

SEQ ID NO: 752472 - DNA, 15 bp, Homo sapiens
aggtgggctgtggat

SEQ ID NO: 752473 - DNA, 15 bp, Homo sapiens
ggtgggctgtggatc

SEQ ID NO: 752474 - DNA, 15 bp, Homo sapiens
gtgggctgtggatcc

SEQ ID NO: 752475 - DNA, 15 bp, Homo sapiens
tgggctgtggatccc

SEQ ID NO: 752476 - DNA, 15 bp, Homo sapiens
gggctgtggatccca

SEQ ID NO: 752477 - DNA, 15 bp, Homo sapiens
ggctgtggatcccat

SEQ ID NO: 752478 - DNA, 15 bp, Homo sapiens
gctgtggatcccatg

SEQ ID NO: 752479 - DNA, 15 bp, Homo sapiens
ctgtggatcccatgc

SEQ ID NO: 752480 - DNA, 15 bp, Homo sapiens
tgtggatcccatgca

SEQ ID NO: 752481 - DNA, 15 bp, Homo sapiens
gtggatcccatgcac

SEQ ID NO: 752482 - DNA, 15 bp, Homo sapiens
tggatcccatgcacc

SEQ ID NO: 752483 - DNA, 15 bp, Homo sapiens
ggatcccatgcacct

SEQ ID NO: 752484 - DNA, 15 bp, Homo sapiens
gatcccatgcaccta

SEQ ID NO: 752485 - DNA, 15 bp, Homo sapiens
atcccatgcacctaa

SEQ ID NO: 752486 - DNA, 15 bp, Homo sapiens
tcccatgcacctaat

SEQ ID NO: 752487 - DNA, 15 bp, Homo sapiens
cccatgcacctaatc

SEQ ID NO: 752488 - DNA, 15 bp, Homo sapiens
ccatgcacctaatcc

SEQ ID NO: 752489 - DNA, 15 bp, Homo sapiens
catgcacctaatccc

SEQ ID NO: 752490 - DNA, 15 bp, Homo sapiens
atgcacctaatccca

SEQ ID NO: 752491 - DNA, 15 bp, Homo sapiens
tgcacctaatcccac

SEQ ID NO: 752492 - DNA, 15 bp, Homo sapiens
gcacctaatcccaca

SEQ ID NO: 752493 - DNA, 15 bp, Homo sapiens
cacctaatcccacac

SEQ ID NO: 752494 - DNA, 15 bp, Homo sapiens
acctaatcccacact

SEQ ID NO: 752495 - DNA, 15 bp, Homo sapiens
cctaatcccacactg

SEQ ID NO: 752496 - DNA, 15 bp, Homo sapiens
ctaatcccacactgt

SEQ ID NO: 752497 - DNA, 15 bp, Homo sapiens
taatcccacactgta

SEQ ID NO: 752498 - DNA, 15 bp, Homo sapiens
aatcccacactgtac

SEQ ID NO: 752499 - DNA, 15 bp, Homo sapiens
atcccacactgtaca

SEQ ID NO: 752500 - DNA, 15 bp, Homo sapiens
tcccacactgtacac

SEQ ID NO: 752501 - DNA, 15 bp, Homo sapiens
cccacactgtacacc

SEQ ID NO: 752502 - DNA, 15 bp, Homo sapiens
ccacactgtacacct

SEQ ID NO: 752503 - DNA, 15 bp, Homo sapiens
cacactgtacacctc

SEQ ID NO: 752504 - DNA, 15 bp, Homo sapiens
acactgtacacctca

SEQ ID NO: 752505 - DNA, 15 bp, Homo sapiens
cactgtacacctcat

SEQ ID NO: 752506 - DNA, 15 bp, Homo sapiens
actgtacacctcatt

SEQ ID NO: 752507 - DNA, 15 bp, Homo sapiens
ctgtacacctcattt

SEQ ID NO: 752508 - DNA, 15 bp, Homo sapiens
tgtacacctcattta

SEQ ID NO: 752509 - DNA, 15 bp, Homo sapiens
gtacacctcatttat

SEQ ID NO: 752510 - DNA, 15 bp, Homo sapiens
tacacctcatttata

SEQ ID NO: 752511 - DNA, 15 bp, Homo sapiens
acacctcatttatac

SEQ ID NO: 752512 - DNA, 15 bp, Homo sapiens
cacctcatttatacc

SEQ ID NO: 752513 - DNA, 15 bp, Homo sapiens
acctcatttatacct

SEQ ID NO: 752514 - DNA, 15 bp, Homo sapiens
cctcatttatacctc

SEQ ID NO: 752515 - DNA, 15 bp, Homo sapiens
ctcatttatacctcc

SEQ ID NO: 752516 - DNA, 15 bp, Homo sapiens
tcatttatacctcct

SEQ ID NO: 752517 - DNA, 15 bp, Homo sapiens
catttatacctcctt

SEQ ID NO: 752518 - DNA, 15 bp, Homo sapiens
atttatacctcctta

SEQ ID NO: 752519 - DNA, 15 bp, Homo sapiens
tttatacctccttag

SEQ ID NO: 752520 - DNA, 15 bp, Homo sapiens
ttatacctccttagc

SEQ ID NO: 752521 - DNA, 15 bp, Homo sapiens
tatacctccttagct

SEQ ID NO: 752522 - DNA, 15 bp, Homo sapiens
atacctccttagctc

SEQ ID NO: 752523 - DNA, 15 bp, Homo sapiens
tacctccttagctct

SEQ ID NO: 752524 - DNA, 15 bp, Homo sapiens
acctccttagctctt

SEQ ID NO: 752525 - DNA, 15 bp, Homo sapiens
cctccttagctcttc

SEQ ID NO: 752526 - DNA, 15 bp, Homo sapiens
ctccttagctcttcc

SEQ ID NO: 752527 - DNA, 15 bp, Homo sapiens
tccttagctcttcct

SEQ ID NO: 752528 - DNA, 15 bp, Homo sapiens
ccttagctcttcctg

SEQ ID NO: 752529 - DNA, 15 bp, Homo sapiens
cttagctcttcctgg

SEQ ID NO: 752530 - DNA, 15 bp, Homo sapiens
ttagctcttcctggc

SEQ ID NO: 752531 - DNA, 15 bp, Homo sapiens
tagctcttcctggcc

SEQ ID NO: 752532 - DNA, 15 bp, Homo sapiens
agctcttcctggcca

SEQ ID NO: 752533 - DNA, 15 bp, Homo sapiens
gctcttcctggccac

SEQ ID NO: 752534 - DNA, 15 bp, Homo sapiens
ctcttcctggccaca

SEQ ID NO: 752535 - DNA, 15 bp, Homo sapiens
tcttcctggccacag

SEQ ID NO: 752536 - DNA, 15 bp, Homo sapiens
cttcctggccacagt

SEQ ID NO: 752537 - DNA, 15 bp, Homo sapiens
ttcctggccacagtg

SEQ ID NO: 752538 - DNA, 15 bp, Homo sapiens
tcctggccacagtgt

SEQ ID NO: 752539 - DNA, 15 bp, Homo sapiens
cctggccacagtgtg

SEQ ID NO: 752540 - DNA, 15 bp, Homo sapiens
ctggccacagtgtga

SEQ ID NO: 752541 - DNA, 15 bp, Homo sapiens
tggccacagtgtgag

SEQ ID NO: 752542 - DNA, 15 bp, Homo sapiens
ggccacagtgtgagg

SEQ ID NO: 752543 - DNA, 15 bp, Homo sapiens
gccacagtgtgaggg

SEQ ID NO: 752544 - DNA, 15 bp, Homo sapiens
ccacagtgtgaggga

SEQ ID NO: 752545 - DNA, 15 bp, Homo sapiens
cacagtgtgagggaa

SEQ ID NO: 752546 - DNA, 15 bp, Homo sapiens
acagtgtgagggaaa

SEQ ID NO: 752547 - DNA, 15 bp, Homo sapiens
cagtgtgagggaaac

SEQ ID NO: 752548 - DNA, 15 bp, Homo sapiens
agtgtgagggaaact

SEQ ID NO: 752549 - DNA, 15 bp, Homo sapiens
gtgtgagggaaactc

SEQ ID NO: 752550 - DNA, 15 bp, Homo sapiens
tgtgagggaaactct

SEQ ID NO: 752551 - DNA, 15 bp, Homo sapiens
gtgagggaaactctg

SEQ ID NO: 752552 - DNA, 15 bp, Homo sapiens
tgagggaaactctga

SEQ ID NO: 752553 - DNA, 15 bp, Homo sapiens
gagggaaactctgat

SEQ ID NO: 752554 - DNA, 15 bp, Homo sapiens
agggaaactctgatg

SEQ ID NO: 752555 - DNA, 15 bp, Homo sapiens
gggaaactctgatga

SEQ ID NO: 752556 - DNA, 15 bp, Homo sapiens
ggaaactctgatgac

SEQ ID NO: 752557 - DNA, 15 bp, Homo sapiens
gaaactctgatgaca

SEQ ID NO: 752558 - DNA, 15 bp, Homo sapiens
aaactctgatgacat

SEQ ID NO: 752559 - DNA, 15 bp, Homo sapiens
aactctgatgacata

SEQ ID NO: 752560 - DNA, 15 bp, Homo sapiens
actctgatgacatag

SEQ ID NO: 752561 - DNA, 15 bp, Homo sapiens
ctctgatgacataga

SEQ ID NO: 752562 - DNA, 15 bp, Homo sapiens
tctgatgacatagac

SEQ ID NO: 752563 - DNA, 15 bp, Homo sapiens
ctgatgacatagaca

SEQ ID NO: 752564 - DNA, 15 bp, Homo sapiens
tgatgacatagacag

SEQ ID NO: 752565 - DNA, 15 bp, Homo sapiens
gatgacatagacagg

SEQ ID NO: 752566 - DNA, 15 bp, Homo sapiens
atgacatagacagga

SEQ ID NO: 752567 - DNA, 15 bp, Homo sapiens
tgacatagacaggac

SEQ ID NO: 752568 - DNA, 15 bp, Homo sapiens
gacatagacaggact

SEQ ID NO: 752569 - DNA, 15 bp, Homo sapiens
acatagacaggactg

SEQ ID NO: 752570 - DNA, 15 bp, Homo sapiens
catagacaggactga

SEQ ID NO: 752571 - DNA, 15 bp, Homo sapiens
atagacaggactgaa

SEQ ID NO: 752572 - DNA, 15 bp, Homo sapiens
tagacaggactgaaa

SEQ ID NO: 752573 - DNA, 15 bp, Homo sapiens
agacaggactgaaaa

SEQ ID NO: 752574 - DNA, 15 bp, Homo sapiens
gacaggactgaaaag

SEQ ID NO: 752575 - DNA, 15 bp, Homo sapiens
acaggactgaaaaga

SEQ ID NO: 752576 - DNA, 15 bp, Homo sapiens
caggactgaaaagag

SEQ ID NO: 752577 - DNA, 15 bp, Homo sapiens
aggactgaaaagagg

SEQ ID NO: 752578 - DNA, 15 bp, Homo sapiens
ggactgaaaagagga

SEQ ID NO: 752579 - DNA, 15 bp, Homo sapiens
gactgaaaagaggag

SEQ ID NO: 752580 - DNA, 15 bp, Homo sapiens
actgaaaagaggagt

SEQ ID NO: 752581 - DNA, 15 bp, Homo sapiens
ctgaaaagaggagtg

SEQ ID NO: 752582 - DNA, 15 bp, Homo sapiens
tgaaaagaggagtgg

SEQ ID NO: 752583 - DNA, 15 bp, Homo sapiens
gaaaagaggagtggt

SEQ ID NO: 752584 - DNA, 15 bp, Homo sapiens
aaaagaggagtggtg

SEQ ID NO: 752585 - DNA, 15 bp, Homo sapiens
aaagaggagtggtgt

SEQ ID NO: 752586 - DNA, 15 bp, Homo sapiens
aagaggagtggtgtg

SEQ ID NO: 752587 - DNA, 15 bp, Homo sapiens
agaggagtggtgtgt

SEQ ID NO: 752588 - DNA, 15 bp, Homo sapiens
gaggagtggtgtgtt

SEQ ID NO: 752589 - DNA, 15 bp, Homo sapiens
aggagtggtgtgttg

SEQ ID NO: 752590 - DNA, 15 bp, Homo sapiens
ggagtggtgtgttgt

SEQ ID NO: 752591 - DNA, 15 bp, Homo sapiens
gagtggtgtgttgtt

SEQ ID NO: 752592 - DNA, 15 bp, Homo sapiens
agtggtgtgttgttc

SEQ ID NO: 752593 - DNA, 15 bp, Homo sapiens
gtggtgtgttgttcc

SEQ ID NO: 752594 - DNA, 15 bp, Homo sapiens
tggtgtgttgttcct

SEQ ID NO: 752595 - DNA, 15 bp, Homo sapiens
ggtgtgttgttcctg

SEQ ID NO: 752596 - DNA, 15 bp, Homo sapiens
gtgtgttgttcctgg

SEQ ID NO: 752597 - DNA, 15 bp, Homo sapiens
tgtgttgttcctgga

SEQ ID NO: 752598 - DNA, 15 bp, Homo sapiens
gtgttgttcctggag

SEQ ID NO: 752599 - DNA, 15 bp, Homo sapiens
tgttgttcctggaga

SEQ ID NO: 752600 - DNA, 15 bp, Homo sapiens
gttgttcctggagag

SEQ ID NO: 752601 - DNA, 15 bp, Homo sapiens
ttgttcctggagaga

SEQ ID NO: 752602 - DNA, 15 bp, Homo sapiens
tgttcctggagagat

SEQ ID NO: 752603 - DNA, 15 bp, Homo sapiens
gttcctggagagatg

SEQ ID NO: 752604 - DNA, 15 bp, Homo sapiens
ttcctggagagatgt

SEQ ID NO: 752605 - DNA, 15 bp, Homo sapiens
tcctggagagatgtg

SEQ ID NO: 752606 - DNA, 15 bp, Homo sapiens
cctggagagatgtga

SEQ ID NO: 752607 - DNA, 15 bp, Homo sapiens
ctggagagatgtgag

SEQ ID NO: 752608 - DNA, 15 bp, Homo sapiens
tggagagatgtgagg

SEQ ID NO: 752609 - DNA, 15 bp, Homo sapiens
ggagagatgtgaggt

SEQ ID NO: 752610 - DNA, 15 bp, Homo sapiens
gagagatgtgaggtc

SEQ ID NO: 752611 - DNA, 15 bp, Homo sapiens
agagatgtgaggtcc

SEQ ID NO: 752612 - DNA, 15 bp, Homo sapiens
gagatgtgaggtccc

SEQ ID NO: 752613 - DNA, 15 bp, Homo sapiens
agatgtgaggtccct

SEQ ID NO: 752614 - DNA, 15 bp, Homo sapiens
gatgtgaggtccctt

SEQ ID NO: 752615 - DNA, 15 bp, Homo sapiens
atgtgaggtcccttg

SEQ ID NO: 752616 - DNA, 15 bp, Homo sapiens
tgtgaggtcccttga

SEQ ID NO: 752617 - DNA, 15 bp, Homo sapiens
gtgaggtcccttgac

SEQ ID NO: 752618 - DNA, 15 bp, Homo sapiens
tgaggtcccttgaca

SEQ ID NO: 752619 - DNA, 15 bp, Homo sapiens
gaggtcccttgacaa

SEQ ID NO: 752620 - DNA, 15 bp, Homo sapiens
aggtcccttgacaag

SEQ ID NO: 752621 - DNA, 15 bp, Homo sapiens
ggtcccttgacaagt

SEQ ID NO: 752622 - DNA, 15 bp, Homo sapiens
gtcccttgacaagtt

SEQ ID NO: 752623 - DNA, 15 bp, Homo sapiens
tcccttgacaagttc

SEQ ID NO: 752624 - DNA, 15 bp, Homo sapiens
cccttgacaagttca

SEQ ID NO: 752625 - DNA, 15 bp, Homo sapiens
ccttgacaagttcag

SEQ ID NO: 752626 - DNA, 15 bp, Homo sapiens
cttgacaagttcaga

SEQ ID NO: 752627 - DNA, 15 bp, Homo sapiens
ttgacaagttcagag

SEQ ID NO: 752628 - DNA, 15 bp, Homo sapiens
tgacaagttcagaga

SEQ ID NO: 752629 - DNA, 15 bp, Homo sapiens
gacaagttcagagag

SEQ ID NO: 752630 - DNA, 15 bp, Homo sapiens
acaagttcagagagt

SEQ ID NO: 752631 - DNA, 15 bp, Homo sapiens
caagttcagagagtt

SEQ ID NO: 752632 - DNA, 15 bp, Homo sapiens
aagttcagagagttt

SEQ ID NO: 752633 - DNA, 15 bp, Homo sapiens
agttcagagagtttt

SEQ ID NO: 752634 - DNA, 15 bp, Homo sapiens
gttcagagagttttg

SEQ ID NO: 752635 - DNA, 15 bp, Homo sapiens
ttcagagagttttgt

SEQ ID NO: 752636 - DNA, 15 bp, Homo sapiens
tcagagagttttgta

SEQ ID NO: 752637 - DNA, 15 bp, Homo sapiens
cagagagttttgtac

SEQ ID NO: 752638 - DNA, 15 bp, Homo sapiens
agagagttttgtact

SEQ ID NO: 752639 - DNA, 15 bp, Homo sapiens
gagagttttgtacta

SEQ ID NO: 752640 - DNA, 15 bp, Homo sapiens
agagttttgtactac

SEQ ID NO: 752641 - DNA, 15 bp, Homo sapiens
gagttttgtactact

SEQ ID NO: 752642 - DNA, 15 bp, Homo sapiens
agttttgtactactg

SEQ ID NO: 752643 - DNA, 15 bp, Homo sapiens
gttttgtactactga

SEQ ID NO: 752644 - DNA, 15 bp, Homo sapiens
ttttgtactactgaa

SEQ ID NO: 752645 - DNA, 15 bp, Homo sapiens
tttgtactactgaat

SEQ ID NO: 752646 - DNA, 15 bp, Homo sapiens
ttgtactactgaatt

SEQ ID NO: 752647 - DNA, 15 bp, Homo sapiens
tgtactactgaattc

SEQ ID NO: 752648 - DNA, 15 bp, Homo sapiens
gtactactgaattct

SEQ ID NO: 752649 - DNA, 15 bp, Homo sapiens
tactactgaattctc

SEQ ID NO: 752650 - DNA, 15 bp, Homo sapiens
actactgaattctca

SEQ ID NO: 752651 - DNA, 15 bp, Homo sapiens
ctactgaattctcag

SEQ ID NO: 752652 - DNA, 15 bp, Homo sapiens
tactgaattctcagg

SEQ ID NO: 752653 - DNA, 15 bp, Homo sapiens
actgaattctcaggt

SEQ ID NO: 752654 - DNA, 15 bp, Homo sapiens
ctgaattctcaggta

SEQ ID NO: 752655 - DNA, 15 bp, Homo sapiens
tgaattctcaggtat

SEQ ID NO: 752656 - DNA, 15 bp, Homo sapiens
gaattctcaggtatg

SEQ ID NO: 752657 - DNA, 15 bp, Homo sapiens
aattctcaggtatgt

SEQ ID NO: 752658 - DNA, 15 bp, Homo sapiens
attctcaggtatgtc

SEQ ID NO: 752659 - DNA, 15 bp, Homo sapiens
ttctcaggtatgtca

SEQ ID NO: 752660 - DNA, 15 bp, Homo sapiens
tctcaggtatgtcaa

SEQ ID NO: 752661 - DNA, 15 bp, Homo sapiens
ctcaggtatgtcaat

SEQ ID NO: 752662 - DNA, 15 bp, Homo sapiens
tcaggtatgtcaatt

SEQ ID NO: 752663 - DNA, 15 bp, Homo sapiens
caggtatgtcaattc

SEQ ID NO: 752664 - DNA, 15 bp, Homo sapiens
aggtatgtcaattcc

SEQ ID NO: 752665 - DNA, 15 bp, Homo sapiens
ggtatgtcaattccc

SEQ ID NO: 752666 - DNA, 15 bp, Homo sapiens
gtatgtcaattccca

SEQ ID NO: 752667 - DNA, 15 bp, Homo sapiens
tatgtcaattcccag

SEQ ID NO: 752668 - DNA, 15 bp, Homo sapiens
atgtcaattcccagg

SEQ ID NO: 752669 - DNA, 15 bp, Homo sapiens
tgtcaattcccagga

SEQ ID NO: 752670 - DNA, 15 bp, Homo sapiens
gtcaattcccaggat

SEQ ID NO: 752671 - DNA, 15 bp, Homo sapiens
tcaattcccaggatg

SEQ ID NO: 752672 - DNA, 15 bp, Homo sapiens
caattcccaggatga

SEQ ID NO: 752673 - DNA, 15 bp, Homo sapiens
aattcccaggatgag

SEQ ID NO: 752674 - DNA, 15 bp, Homo sapiens
attcccaggatgaga

SEQ ID NO: 752675 - DNA, 15 bp, Homo sapiens
ttcccaggatgagaa

SEQ ID NO: 752676 - DNA, 15 bp, Homo sapiens
tcccaggatgagaag

SEQ ID NO: 752677 - DNA, 15 bp, Homo sapiens
cccaggatgagaagg

SEQ ID NO: 752678 - DNA, 15 bp, Homo sapiens
ccaggatgagaagga

SEQ ID NO: 752679 - DNA, 15 bp, Homo sapiens
caggatgagaaggaa

SEQ ID NO: 752680 - DNA, 15 bp, Homo sapiens
aggatgagaaggaac

SEQ ID NO: 752681 - DNA, 15 bp, Homo sapiens
ggatgagaaggaacc

SEQ ID NO: 752682 - DNA, 15 bp, Homo sapiens
gatgagaaggaacct

SEQ ID NO: 752683 - DNA, 15 bp, Homo sapiens
atgagaaggaacctt

SEQ ID NO: 752684 - DNA, 15 bp, Homo sapiens
tgagaaggaacctta

SEQ ID NO: 752685 - DNA, 15 bp, Homo sapiens
gagaaggaaccttaa

SEQ ID NO: 752686 - DNA, 15 bp, Homo sapiens
agaaggaaccttaaa

SEQ ID NO: 752687 - DNA, 15 bp, Homo sapiens
gaaggaaccttaaat

SEQ ID NO: 752688 - DNA, 15 bp, Homo sapiens
aaggaaccttaaatg

SEQ ID NO: 752689 - DNA, 15 bp, Homo sapiens
aggaaccttaaatgt

SEQ ID NO: 752690 - DNA, 15 bp, Homo sapiens
ggaaccttaaatgtt

SEQ ID NO: 752691 - DNA, 15 bp, Homo sapiens
gaaccttaaatgttg

SEQ ID NO: 752692 - DNA, 15 bp, Homo sapiens
aaccttaaatgttgt

SEQ ID NO: 752693 - DNA, 15 bp, Homo sapiens
accttaaatgttgtc

SEQ ID NO: 752694 - DNA, 15 bp, Homo sapiens
ccttaaatgttgtct

SEQ ID NO: 752695 - DNA, 15 bp, Homo sapiens
cttaaatgttgtcta

SEQ ID NO: 752696 - DNA, 15 bp, Homo sapiens
ttaaatgttgtctag

SEQ ID NO: 752697 - DNA, 15 bp, Homo sapiens
taaatgttgtctagt

SEQ ID NO: 752698 - DNA, 15 bp, Homo sapiens
aaatgttgtctagtt

SEQ ID NO: 752699 - DNA, 15 bp, Homo sapiens
aatgttgtctagttc

SEQ ID NO: 752700 - DNA, 15 bp, Homo sapiens
atgttgtctagttct

SEQ ID NO: 752701 - DNA, 15 bp, Homo sapiens
tgttgtctagttcta

SEQ ID NO: 752702 - DNA, 15 bp, Homo sapiens
gttgtctagttctat

SEQ ID NO: 752703 - DNA, 15 bp, Homo sapiens
ttgtctagttctatt

SEQ ID NO: 752704 - DNA, 15 bp, Homo sapiens
tgtctagttctatta

SEQ ID NO: 752705 - DNA, 15 bp, Homo sapiens
gtctagttctattac

SEQ ID NO: 752706 - DNA, 15 bp, Homo sapiens
tctagttctattaca

SEQ ID NO: 752707 - DNA, 15 bp, Homo sapiens
ctagttctattacat

SEQ ID NO: 752708 - DNA, 15 bp, Homo sapiens
tagttctattacatt

SEQ ID NO: 752709 - DNA, 15 bp, Homo sapiens
agttctattacattc

SEQ ID NO: 752710 - DNA, 15 bp, Homo sapiens
gttctattacattcc

SEQ ID NO: 752711 - DNA, 15 bp, Homo sapiens
ttctattacattccc

SEQ ID NO: 752712 - DNA, 15 bp, Homo sapiens
tctattacattccct

SEQ ID NO: 752713 - DNA, 15 bp, Homo sapiens
ctattacattccctg

SEQ ID NO: 752714 - DNA, 15 bp, Homo sapiens
tattacattccctga

SEQ ID NO: 752715 - DNA, 15 bp, Homo sapiens
attacattccctgag

SEQ ID NO: 752716 - DNA, 15 bp, Homo sapiens
ttacattccctgagt

SEQ ID NO: 752717 - DNA, 15 bp, Homo sapiens
tacattccctgagtc

SEQ ID NO: 752718 - DNA, 15 bp, Homo sapiens
acattccctgagtct

SEQ ID NO: 752719 - DNA, 15 bp, Homo sapiens
cattccctgagtctt

SEQ ID NO: 752720 - DNA, 15 bp, Homo sapiens
attccctgagtctta

SEQ ID NO: 752721 - DNA, 15 bp, Homo sapiens
ttccctgagtcttag

SEQ ID NO: 752722 - DNA, 15 bp, Homo sapiens
tccctgagtcttagt

SEQ ID NO: 752723 - DNA, 15 bp, Homo sapiens
ccctgagtcttagtt

SEQ ID NO: 752724 - DNA, 15 bp, Homo sapiens
cctgagtcttagttt

SEQ ID NO: 752725 - DNA, 15 bp, Homo sapiens
ctgagtcttagtttt

SEQ ID NO: 752726 - DNA, 15 bp, Homo sapiens
tgagtcttagttttt

SEQ ID NO: 752727 - DNA, 15 bp, Homo sapiens
gagtcttagtttttc

SEQ ID NO: 752728 - DNA, 15 bp, Homo sapiens
agtcttagtttttct

SEQ ID NO: 752729 - DNA, 15 bp, Homo sapiens
gtcttagtttttctt

SEQ ID NO: 752730 - DNA, 15 bp, Homo sapiens
tcttagtttttcttg

SEQ ID NO: 752731 - DNA, 15 bp, Homo sapiens
cttagtttttcttgc

SEQ ID NO: 752732 - DNA, 15 bp, Homo sapiens
ttagtttttcttgct

SEQ ID NO: 752733 - DNA, 15 bp, Homo sapiens
tagtttttcttgctg

SEQ ID NO: 752734 - DNA, 15 bp, Homo sapiens
agtttttcttgctgg

SEQ ID NO: 752735 - DNA, 15 bp, Homo sapiens
gtttttcttgctgga

SEQ ID NO: 752736 - DNA, 15 bp, Homo sapiens
tttttcttgctggaa

SEQ ID NO: 752737 - DNA, 15 bp, Homo sapiens
ttttcttgctggaaa

SEQ ID NO: 752738 - DNA, 15 bp, Homo sapiens
tttcttgctggaaaa

SEQ ID NO: 752739 - DNA, 15 bp, Homo sapiens
ttcttgctggaaaat

SEQ ID NO: 752740 - DNA, 15 bp, Homo sapiens
tcttgctggaaaatg

SEQ ID NO: 752741 - DNA, 15 bp, Homo sapiens
cttgctggaaaatgg

SEQ ID NO: 752742 - DNA, 15 bp, Homo sapiens
ttgctggaaaatggg

SEQ ID NO: 752743 - DNA, 15 bp, Homo sapiens
tgctggaaaatggga

SEQ ID NO: 752744 - DNA, 15 bp, Homo sapiens
gctggaaaatgggat

SEQ ID NO: 752745 - DNA, 15 bp, Homo sapiens
ctggaaaatgggata

SEQ ID NO: 752746 - DNA, 15 bp, Homo sapiens
tggaaaatgggataa

SEQ ID NO: 752747 - DNA, 15 bp, Homo sapiens
ggaaaatgggataat

SEQ ID NO: 752748 - DNA, 15 bp, Homo sapiens
gaaaatgggataatc

SEQ ID NO: 752749 - DNA, 15 bp, Homo sapiens
aaaatgggataatca

SEQ ID NO: 752750 - DNA, 15 bp, Homo sapiens
aaatgggataatcac

SEQ ID NO: 752751 - DNA, 15 bp, Homo sapiens
aatgggataatcacc

SEQ ID NO: 752752 - DNA, 15 bp, Homo sapiens
atgggataatcacct

SEQ ID NO: 752753 - DNA, 15 bp, Homo sapiens
tgggataatcacctt

SEQ ID NO: 752754 - DNA, 15 bp, Homo sapiens
gggataatcaccttt

SEQ ID NO: 752755 - DNA, 15 bp, Homo sapiens
ggataatcacctttt

SEQ ID NO: 752756 - DNA, 15 bp, Homo sapiens
gataatcaccttttc

SEQ ID NO: 752757 - DNA, 15 bp, Homo sapiens
ataatcaccttttct

SEQ ID NO: 752758 - DNA, 15 bp, Homo sapiens
taatcaccttttctc

SEQ ID NO: 752759 - DNA, 15 bp, Homo sapiens
aatcaccttttctct

SEQ ID NO: 752760 - DNA, 15 bp, Homo sapiens
atcaccttttctcta

SEQ ID NO: 752761 - DNA, 15 bp, Homo sapiens
tcaccttttctctac

SEQ ID NO: 752762 - DNA, 15 bp, Homo sapiens
caccttttctctacc

SEQ ID NO: 752763 - DNA, 15 bp, Homo sapiens
accttttctctacct

SEQ ID NO: 752764 - DNA, 15 bp, Homo sapiens
ccttttctctacctg

SEQ ID NO: 752765 - DNA, 15 bp, Homo sapiens
cttttctctacctga

SEQ ID NO: 752766 - DNA, 15 bp, Homo sapiens
ttttctctacctgac

SEQ ID NO: 752767 - DNA, 15 bp, Homo sapiens
tttctctacctgaca

SEQ ID NO: 752768 - DNA, 15 bp, Homo sapiens
ttctctacctgacag

SEQ ID NO: 752769 - DNA, 15 bp, Homo sapiens
tctctacctgacagg

SEQ ID NO: 752770 - DNA, 15 bp, Homo sapiens
ctctacctgacaggc

SEQ ID NO: 752771 - DNA, 15 bp, Homo sapiens
tctacctgacaggca

SEQ ID NO: 752772 - DNA, 15 bp, Homo sapiens
ctacctgacaggcag

SEQ ID NO: 752773 - DNA, 15 bp, Homo sapiens
tacctgacaggcagt

SEQ ID NO: 752774 - DNA, 15 bp, Homo sapiens
acctgacaggcagtg

SEQ ID NO: 752775 - DNA, 15 bp, Homo sapiens
cctgacaggcagtgg

SEQ ID NO: 752776 - DNA, 15 bp, Homo sapiens
ctgacaggcagtggg

SEQ ID NO: 752777 - DNA, 15 bp, Homo sapiens
tgacaggcagtgggc

SEQ ID NO: 752778 - DNA, 15 bp, Homo sapiens
gacaggcagtgggct

SEQ ID NO: 752779 - DNA, 15 bp, Homo sapiens
acaggcagtgggcta

SEQ ID NO: 752780 - DNA, 15 bp, Homo sapiens
caggcagtgggctat

SEQ ID NO: 752781 - DNA, 15 bp, Homo sapiens
aggcagtgggctata

SEQ ID NO: 752782 - DNA, 15 bp, Homo sapiens
ggcagtgggctatat

SEQ ID NO: 752783 - DNA, 15 bp, Homo sapiens
gcagtgggctatata

SEQ ID NO: 752784 - DNA, 15 bp, Homo sapiens
cagtgggctatatac

SEQ ID NO: 752785 - DNA, 15 bp, Homo sapiens
agtgggctatataca

SEQ ID NO: 752786 - DNA, 15 bp, Homo sapiens
gtgggctatatacag

SEQ ID NO: 752787 - DNA, 15 bp, Homo sapiens
tgggctatatacagt

SEQ ID NO: 752788 - DNA, 15 bp, Homo sapiens
gggctatatacagtc

SEQ ID NO: 752789 - DNA, 15 bp, Homo sapiens
ggctatatacagtca

SEQ ID NO: 752790 - DNA, 15 bp, Homo sapiens
gctatatacagtcat

SEQ ID NO: 752791 - DNA, 15 bp, Homo sapiens
ctatatacagtcatg

SEQ ID NO: 752792 - DNA, 15 bp, Homo sapiens
tatatacagtcatgc

SEQ ID NO: 752793 - DNA, 15 bp, Homo sapiens
atatacagtcatgca

SEQ ID NO: 752794 - DNA, 15 bp, Homo sapiens
tatacagtcatgcag

SEQ ID NO: 752795 - DNA, 15 bp, Homo sapiens
atacagtcatgcagg

SEQ ID NO: 752796 - DNA, 15 bp, Homo sapiens
tacagtcatgcaggt

SEQ ID NO: 752797 - DNA, 15 bp, Homo sapiens
acagtcatgcaggtt

SEQ ID NO: 752798 - DNA, 15 bp, Homo sapiens
cagtcatgcaggtta

SEQ ID NO: 752799 - DNA, 15 bp, Homo sapiens
agtcatgcaggttac

SEQ ID NO: 752800 - DNA, 15 bp, Homo sapiens
gtcatgcaggttact

SEQ ID NO: 752801 - DNA, 15 bp, Homo sapiens
tcatgcaggttactc

SEQ ID NO: 752802 - DNA, 15 bp, Homo sapiens
catgcaggttactca

SEQ ID NO: 752803 - DNA, 15 bp, Homo sapiens
atgcaggttactcaa

SEQ ID NO: 752804 - DNA, 15 bp, Homo sapiens
tgcaggttactcaat

SEQ ID NO: 752805 - DNA, 15 bp, Homo sapiens
gcaggttactcaatg

SEQ ID NO: 752806 - DNA, 15 bp, Homo sapiens
caggttactcaatgt

SEQ ID NO: 752807 - DNA, 15 bp, Homo sapiens
aggttactcaatgta

SEQ ID NO: 752808 - DNA, 15 bp, Homo sapiens
ggttactcaatgtac

SEQ ID NO: 752809 - DNA, 15 bp, Homo sapiens
gttactcaatgtaca

SEQ ID NO: 752810 - DNA, 15 bp, Homo sapiens
ttactcaatgtacaa

SEQ ID NO: 752811 - DNA, 15 bp, Homo sapiens
tactcaatgtacaac

SEQ ID NO: 752812 - DNA, 15 bp, Homo sapiens
actcaatgtacaact

SEQ ID NO: 752813 - DNA, 15 bp, Homo sapiens
ctcaatgtacaactc

SEQ ID NO: 752814 - DNA, 15 bp, Homo sapiens
tcaatgtacaactcc

SEQ ID NO: 752815 - DNA, 15 bp, Homo sapiens
caatgtacaactcca

SEQ ID NO: 752816 - DNA, 15 bp, Homo sapiens
aatgtacaactccag

SEQ ID NO: 752817 - DNA, 15 bp, Homo sapiens
atgtacaactccagg

SEQ ID NO: 752818 - DNA, 15 bp, Homo sapiens
tgtacaactccagga

SEQ ID NO: 752819 - DNA, 15 bp, Homo sapiens
gtacaactccaggac

SEQ ID NO: 752820 - DNA, 15 bp, Homo sapiens
tacaactccaggact

SEQ ID NO: 752821 - DNA, 15 bp, Homo sapiens
acaactccaggactg

SEQ ID NO: 752822 - DNA, 15 bp, Homo sapiens
caactccaggactgc

SEQ ID NO: 752823 - DNA, 15 bp, Homo sapiens
aactccaggactgct

SEQ ID NO: 752824 - DNA, 15 bp, Homo sapiens
actccaggactgcta

SEQ ID NO: 752825 - DNA, 15 bp, Homo sapiens
ctccaggactgctat

SEQ ID NO: 752826 - DNA, 15 bp, Homo sapiens
tccaggactgctatg

SEQ ID NO: 752827 - DNA, 15 bp, Homo sapiens
ccaggactgctatga

SEQ ID NO: 752828 - DNA, 15 bp, Homo sapiens
caggactgctatgag

SEQ ID NO: 752829 - DNA, 15 bp, Homo sapiens
aggactgctatgaga

SEQ ID NO: 752830 - DNA, 15 bp, Homo sapiens
ggactgctatgagat

SEQ ID NO: 752831 - DNA, 15 bp, Homo sapiens
gactgctatgagatt

SEQ ID NO: 752832 - DNA, 15 bp, Homo sapiens
actgctatgagattc

SEQ ID NO: 752833 - DNA, 15 bp, Homo sapiens
ctgctatgagattca

SEQ ID NO: 752834 - DNA, 15 bp, Homo sapiens
tgctatgagattcac

SEQ ID NO: 752835 - DNA, 15 bp, Homo sapiens
gctatgagattcaca

SEQ ID NO: 752836 - DNA, 15 bp, Homo sapiens
ctatgagattcacat

SEQ ID NO: 752837 - DNA, 15 bp, Homo sapiens
tatgagattcacatc

SEQ ID NO: 752838 - DNA, 15 bp, Homo sapiens
atgagattcacatca

SEQ ID NO: 752839 - DNA, 15 bp, Homo sapiens
tgagattcacatcag

SEQ ID NO: 752840 - DNA, 15 bp, Homo sapiens
gagattcacatcaga

SEQ ID NO: 752841 - DNA, 15 bp, Homo sapiens
agattcacatcagat

SEQ ID NO: 752842 - DNA, 15 bp, Homo sapiens
gattcacatcagatg

SEQ ID NO: 752843 - DNA, 15 bp, Homo sapiens
attcacatcagatga

SEQ ID NO: 752844 - DNA, 15 bp, Homo sapiens
ttcacatcagatgac

SEQ ID NO: 752845 - DNA, 15 bp, Homo sapiens
tcacatcagatgaca

SEQ ID NO: 752846 - DNA, 15 bp, Homo sapiens
cacatcagatgacat

SEQ ID NO: 752847 - DNA, 15 bp, Homo sapiens
acatcagatgacata

SEQ ID NO: 752848 - DNA, 15 bp, Homo sapiens
catcagatgacatat

SEQ ID NO: 752849 - DNA, 15 bp, Homo sapiens
atcagatgacatata

SEQ ID NO: 752850 - DNA, 15 bp, Homo sapiens
tcagatgacatataa

SEQ ID NO: 752851 - DNA, 15 bp, Homo sapiens
cagatgacatataaa

SEQ ID NO: 752852 - DNA, 15 bp, Homo sapiens
agatgacatataaat

SEQ ID NO: 752853 - DNA, 15 bp, Homo sapiens
gatgacatataaatg

SEQ ID NO: 752854 - DNA, 15 bp, Homo sapiens
atgacatataaatgt

SEQ ID NO: 752855 - DNA, 15 bp, Homo sapiens
tgacatataaatgta

SEQ ID NO: 752856 - DNA, 15 bp, Homo sapiens
gacatataaatgtat

SEQ ID NO: 752857 - DNA, 15 bp, Homo sapiens
acatataaatgtatt

SEQ ID NO: 752858 - DNA, 15 bp, Homo sapiens
catataaatgtattt

SEQ ID NO: 752859 - DNA, 15 bp, Homo sapiens
atataaatgtatttt

SEQ ID NO: 752860 - DNA, 15 bp, Homo sapiens
tataaatgtatttta

SEQ ID NO: 752861 - DNA, 15 bp, Homo sapiens
ataaatgtattttat

SEQ ID NO: 752862 - DNA, 15 bp, Homo sapiens
taaatgtattttatg

SEQ ID NO: 752863 - DNA, 15 bp, Homo sapiens
aaatgtattttatga

SEQ ID NO: 752864 - DNA, 15 bp, Homo sapiens
aatgtattttatgaa

SEQ ID NO: 752865 - DNA, 15 bp, Homo sapiens
atgtattttatgaac

SEQ ID NO: 752866 - DNA, 15 bp, Homo sapiens
tgtattttatgaacc

SEQ ID NO: 752867 - DNA, 15 bp, Homo sapiens
gtattttatgaacca

SEQ ID NO: 752868 - DNA, 15 bp, Homo sapiens
tattttatgaaccac

SEQ ID NO: 752869 - DNA, 15 bp, Homo sapiens
attttatgaaccaca

SEQ ID NO: 752870 - DNA, 15 bp, Homo sapiens
ttttatgaaccacag

SEQ ID NO: 752871 - DNA, 15 bp, Homo sapiens
tttatgaaccacagc

SEQ ID NO: 752872 - DNA, 15 bp, Homo sapiens
ttatgaaccacagca

SEQ ID NO: 752873 - DNA, 15 bp, Homo sapiens
tatgaaccacagcac

SEQ ID NO: 752874 - DNA, 15 bp, Homo sapiens
atgaaccacagcaca

SEQ ID NO: 752875 - DNA, 15 bp, Homo sapiens
tgaaccacagcacat

SEQ ID NO: 752876 - DNA, 15 bp, Homo sapiens
gaaccacagcacatg

SEQ ID NO: 752877 - DNA, 15 bp, Homo sapiens
aaccacagcacatgt

SEQ ID NO: 752878 - DNA, 15 bp, Homo sapiens
accacagcacatgtg

SEQ ID NO: 752879 - DNA, 15 bp, Homo sapiens
ccacagcacatgtgc

SEQ ID NO: 752880 - DNA, 15 bp, Homo sapiens
cacagcacatgtgcc

SEQ ID NO: 752881 - DNA, 15 bp, Homo sapiens
acagcacatgtgcca

SEQ ID NO: 752882 - DNA, 15 bp, Homo sapiens
cagcacatgtgccac

SEQ ID NO: 752883 - DNA, 15 bp, Homo sapiens
agcacatgtgccaca

SEQ ID NO: 752884 - DNA, 15 bp, Homo sapiens
gcacatgtgccacat

SEQ ID NO: 752885 - DNA, 15 bp, Homo sapiens
cacatgtgccacatc

SEQ ID NO: 752886 - DNA, 15 bp, Homo sapiens
acatgtgccacatct

SEQ ID NO: 752887 - DNA, 15 bp, Homo sapiens
catgtgccacatctc

SEQ ID NO: 752888 - DNA, 15 bp, Homo sapiens
atgtgccacatctct

SEQ ID NO: 752889 - DNA, 15 bp, Homo sapiens
tgtgccacatctctg

SEQ ID NO: 752890 - DNA, 15 bp, Homo sapiens
gtgccacatctctgt

SEQ ID NO: 752891 - DNA, 15 bp, Homo sapiens
tgccacatctctgtg

SEQ ID NO: 752892 - DNA, 15 bp, Homo sapiens
gccacatctctgtgc

SEQ ID NO: 752893 - DNA, 15 bp, Homo sapiens
ccacatctctgtgct

SEQ ID NO: 752894 - DNA, 15 bp, Homo sapiens
cacatctctgtgctg

SEQ ID NO: 752895 - DNA, 15 bp, Homo sapiens
acatctctgtgctgg

SEQ ID NO: 752896 - DNA, 15 bp, Homo sapiens
catctctgtgctggg

SEQ ID NO: 752897 - DNA, 15 bp, Homo sapiens
atctctgtgctgggg

SEQ ID NO: 752898 - DNA, 15 bp, Homo sapiens
tctctgtgctggggg

SEQ ID NO: 752899 - DNA, 15 bp, Homo sapiens
ctctgtgctgggggg

SEQ ID NO: 752900 - DNA, 15 bp, Homo sapiens
tctgtgctggggggt

SEQ ID NO: 752901 - DNA, 15 bp, Homo sapiens
ctgtgctggggggta

SEQ ID NO: 752902 - DNA, 15 bp, Homo sapiens
tgtgctggggggtat

SEQ ID NO: 752903 - DNA, 15 bp, Homo sapiens
gtgctggggggtatg

SEQ ID NO: 752904 - DNA, 15 bp, Homo sapiens
tgctggggggtatgt

SEQ ID NO: 752905 - DNA, 15 bp, Homo sapiens
gctggggggtatgtg

SEQ ID NO: 752906 - DNA, 15 bp, Homo sapiens
ctggggggtatgtgg

SEQ ID NO: 752907 - DNA, 15 bp, Homo sapiens
tggggggtatgtgga

SEQ ID NO: 752908 - DNA, 15 bp, Homo sapiens
ggggggtatgtggag

SEQ ID NO: 752909 - DNA, 15 bp, Homo sapiens
gggggtatgtggagg

SEQ ID NO: 752910 - DNA, 15 bp, Homo sapiens
ggggtatgtggaggc

SEQ ID NO: 752911 - DNA, 15 bp, Homo sapiens
gggtatgtggaggca

SEQ ID NO: 752912 - DNA, 15 bp, Homo sapiens
ggtatgtggaggcac

SEQ ID NO: 752913 - DNA, 15 bp, Homo sapiens
gtatgtggaggcaca

SEQ ID NO: 752914 - DNA, 15 bp, Homo sapiens
tatgtggaggcacag

SEQ ID NO: 752915 - DNA, 15 bp, Homo sapiens
atgtggaggcacaga

SEQ ID NO: 752916 - DNA, 15 bp, Homo sapiens
tgtggaggcacagaa

SEQ ID NO: 752917 - DNA, 15 bp, Homo sapiens
gtggaggcacagaat

SEQ ID NO: 752918 - DNA, 15 bp, Homo sapiens
tggaggcacagaatc

SEQ ID NO: 752919 - DNA, 15 bp, Homo sapiens
ggaggcacagaatca

SEQ ID NO: 752920 - DNA, 15 bp, Homo sapiens
gaggcacagaatcaa

SEQ ID NO: 752921 - DNA, 15 bp, Homo sapiens
aggcacagaatcaat

SEQ ID NO: 752922 - DNA, 15 bp, Homo sapiens
ggcacagaatcaata

SEQ ID NO: 752923 - DNA, 15 bp, Homo sapiens
gcacagaatcaatat

SEQ ID NO: 752924 - DNA, 15 bp, Homo sapiens
cacagaatcaatatt

SEQ ID NO: 752925 - DNA, 15 bp, Homo sapiens
acagaatcaatattg

SEQ ID NO: 752926 - DNA, 15 bp, Homo sapiens
cagaatcaatattgg

SEQ ID NO: 752927 - DNA, 15 bp, Homo sapiens
agaatcaatattggg

SEQ ID NO: 752928 - DNA, 15 bp, Homo sapiens
gaatcaatattgggt

SEQ ID NO: 752929 - DNA, 15 bp, Homo sapiens
aatcaatattgggtc

SEQ ID NO: 752930 - DNA, 15 bp, Homo sapiens
atcaatattgggtca

SEQ ID NO: 752931 - DNA, 15 bp, Homo sapiens
tcaatattgggtcat

SEQ ID NO: 752932 - DNA, 15 bp, Homo sapiens
caatattgggtcatt

SEQ ID NO: 752933 - DNA, 15 bp, Homo sapiens
aatattgggtcattt

SEQ ID NO: 752934 - DNA, 15 bp, Homo sapiens
atattgggtcatttt

SEQ ID NO: 752935 - DNA, 15 bp, Homo sapiens
tattgggtcattttt

SEQ ID NO: 752936 - DNA, 15 bp, Homo sapiens
attgggtcatttttc

SEQ ID NO: 752937 - DNA, 15 bp, Homo sapiens
ttgggtcatttttct

SEQ ID NO: 752938 - DNA, 15 bp, Homo sapiens
tgggtcatttttctg

SEQ ID NO: 752939 - DNA, 15 bp, Homo sapiens
gggtcatttttctga

SEQ ID NO: 752940 - DNA, 15 bp, Homo sapiens
ggtcatttttctgag

SEQ ID NO: 752941 - DNA, 15 bp, Homo sapiens
gtcatttttctgagt

SEQ ID NO: 752942 - DNA, 15 bp, Homo sapiens
tcatttttctgagtg

SEQ ID NO: 752943 - DNA, 15 bp, Homo sapiens
catttttctgagtgt

SEQ ID NO: 752944 - DNA, 15 bp, Homo sapiens
atttttctgagtgtc

SEQ ID NO: 752945 - DNA, 15 bp, Homo sapiens
tttttctgagtgtca

SEQ ID NO: 752946 - DNA, 15 bp, Homo sapiens
ttttctgagtgtcaa

SEQ ID NO: 752947 - DNA, 15 bp, Homo sapiens
tttctgagtgtcaac

SEQ ID NO: 752948 - DNA, 15 bp, Homo sapiens
ttctgagtgtcaaca

SEQ ID NO: 752949 - DNA, 15 bp, Homo sapiens
tctgagtgtcaacag

SEQ ID NO: 752950 - DNA, 15 bp, Homo sapiens
ctgagtgtcaacagt

SEQ ID NO: 752951 - DNA, 15 bp, Homo sapiens
tgagtgtcaacagtc

SEQ ID NO: 752952 - DNA, 15 bp, Homo sapiens
gagtgtcaacagtct

SEQ ID NO: 752953 - DNA, 15 bp, Homo sapiens
agtgtcaacagtctt

SEQ ID NO: 752954 - DNA, 15 bp, Homo sapiens
gtgtcaacagtcttc

SEQ ID NO: 752955 - DNA, 15 bp, Homo sapiens
tgtcaacagtcttcc

SEQ ID NO: 752956 - DNA, 15 bp, Homo sapiens
gtcaacagtcttcca

SEQ ID NO: 752957 - DNA, 15 bp, Homo sapiens
tcaacagtcttccat

SEQ ID NO: 752958 - DNA, 15 bp, Homo sapiens
caacagtcttccatg

SEQ ID NO: 752959 - DNA, 15 bp, Homo sapiens
aacagtcttccatga

SEQ ID NO: 752960 - DNA, 15 bp, Homo sapiens
acagtcttccatgaa

SEQ ID NO: 752961 - DNA, 15 bp, Homo sapiens
cagtcttccatgaag

SEQ ID NO: 752962 - DNA, 15 bp, Homo sapiens
agtcttccatgaagt

SEQ ID NO: 752963 - DNA, 15 bp, Homo sapiens
gtcttccatgaagtt

SEQ ID NO: 752964 - DNA, 15 bp, Homo sapiens
tcttccatgaagttt

SEQ ID NO: 752965 - DNA, 15 bp, Homo sapiens
cttccatgaagtttt

SEQ ID NO: 752966 - DNA, 15 bp, Homo sapiens
ttccatgaagttttg

SEQ ID NO: 752967 - DNA, 15 bp, Homo sapiens
tccatgaagttttgg

SEQ ID NO: 752968 - DNA, 15 bp, Homo sapiens
ccatgaagttttgga

SEQ ID NO: 752969 - DNA, 15 bp, Homo sapiens
catgaagttttggag

SEQ ID NO: 752970 - DNA, 15 bp, Homo sapiens
atgaagttttggaga

SEQ ID NO: 752971 - DNA, 15 bp, Homo sapiens
tgaagttttggagaa

SEQ ID NO: 752972 - DNA, 15 bp, Homo sapiens
gaagttttggagaaa

SEQ ID NO: 752973 - DNA, 15 bp, Homo sapiens
aagttttggagaaaa

SEQ ID NO: 752974 - DNA, 15 bp, Homo sapiens
agttttggagaaaaa

SEQ ID NO: 752975 - DNA, 15 bp, Homo sapiens
gttttggagaaaaac

SEQ ID NO: 752976 - DNA, 15 bp, Homo sapiens
ttttggagaaaaaca

SEQ ID NO: 752977 - DNA, 15 bp, Homo sapiens
tttggagaaaaacac

SEQ ID NO: 752978 - DNA, 15 bp, Homo sapiens
ttggagaaaaacact

SEQ ID NO: 752979 - DNA, 15 bp, Homo sapiens
tggagaaaaacacta

SEQ ID NO: 752980 - DNA, 15 bp, Homo sapiens
ggagaaaaacactat

SEQ ID NO: 752981 - DNA, 15 bp, Homo sapiens
gagaaaaacactatt

SEQ ID NO: 752982 - DNA, 15 bp, Homo sapiens
agaaaaacactattt

SEQ ID NO: 752983 - DNA, 15 bp, Homo sapiens
gaaaaacactatttt

SEQ ID NO: 752984 - DNA, 15 bp, Homo sapiens
aaaaacactattttt

SEQ ID NO: 752985 - DNA, 15 bp, Homo sapiens
aaaacactatttttc

SEQ ID NO: 752986 - DNA, 15 bp, Homo sapiens
aaacactatttttct

SEQ ID NO: 752987 - DNA, 15 bp, Homo sapiens
aacactatttttctc

SEQ ID NO: 752988 - DNA, 15 bp, Homo sapiens
acactatttttctct

SEQ ID NO: 752989 - DNA, 15 bp, Homo sapiens
cactatttttctcta

SEQ ID NO: 752990 - DNA, 15 bp, Homo sapiens
actatttttctctaa

SEQ ID NO: 752991 - DNA, 15 bp, Homo sapiens
ctatttttctctaaa

SEQ ID NO: 752992 - DNA, 15 bp, Homo sapiens
tatttttctctaaaa

SEQ ID NO: 752993 - DNA, 15 bp, Homo sapiens
atttttctctaaaac

SEQ ID NO: 752994 - DNA, 15 bp, Homo sapiens
tttttctctaaaacc

SEQ ID NO: 752995 - DNA, 15 bp, Homo sapiens
ttttctctaaaacct

SEQ ID NO: 752996 - DNA, 15 bp, Homo sapiens
tttctctaaaacctc

SEQ ID NO: 752997 - DNA, 15 bp, Homo sapiens
ttctctaaaacctcc

SEQ ID NO: 752998 - DNA, 15 bp, Homo sapiens
tctctaaaacctcca

SEQ ID NO: 752999 - DNA, 15 bp, Homo sapiens
ctctaaaacctccac

SEQ ID NO: 753000 - DNA, 15 bp, Homo sapiens
tctaaaacctccacc

SEQ ID NO: 753001 - DNA, 15 bp, Homo sapiens
ctaaaacctccacct

SEQ ID NO: 753002 - DNA, 15 bp, Homo sapiens
taaaacctccacctc

SEQ ID NO: 753003 - DNA, 15 bp, Homo sapiens
aaaacctccacctcc

SEQ ID NO: 753004 - DNA, 15 bp, Homo sapiens
aaacctccacctcct

SEQ ID NO: 753005 - DNA, 15 bp, Homo sapiens
aacctccacctcctg

SEQ ID NO: 753006 - DNA, 15 bp, Homo sapiens
acctccacctcctgg

SEQ ID NO: 753007 - DNA, 15 bp, Homo sapiens
cctccacctcctggg

SEQ ID NO: 753008 - DNA, 15 bp, Homo sapiens
ctccacctcctgggc

SEQ ID NO: 753009 - DNA, 15 bp, Homo sapiens
tccacctcctgggct

SEQ ID NO: 753010 - DNA, 15 bp, Homo sapiens
ccacctcctgggctc

SEQ ID NO: 753011 - DNA, 15 bp, Homo sapiens
cacctcctgggctca

SEQ ID NO: 753012 - DNA, 15 bp, Homo sapiens
acctcctgggctcaa

SEQ ID NO: 753013 - DNA, 15 bp, Homo sapiens
cctcctgggctcaag

SEQ ID NO: 753014 - DNA, 15 bp, Homo sapiens
ctcctgggctcaagc

SEQ ID NO: 753015 - DNA, 15 bp, Homo sapiens
tcctgggctcaagca

SEQ ID NO: 753016 - DNA, 15 bp, Homo sapiens
cctgggctcaagcaa

SEQ ID NO: 753017 - DNA, 15 bp, Homo sapiens
ctgggctcaagcaat

SEQ ID NO: 753018 - DNA, 15 bp, Homo sapiens
tgggctcaagcaatc

SEQ ID NO: 753019 - DNA, 15 bp, Homo sapiens
gggctcaagcaatct

SEQ ID NO: 753020 - DNA, 15 bp, Homo sapiens
ggctcaagcaatctc

SEQ ID NO: 753021 - DNA, 15 bp, Homo sapiens
gctcaagcaatctcc

SEQ ID NO: 753022 - DNA, 15 bp, Homo sapiens
ctcaagcaatctccc

SEQ ID NO: 753023 - DNA, 15 bp, Homo sapiens
tcaagcaatctccca

SEQ ID NO: 753024 - DNA, 15 bp, Homo sapiens
caagcaatctcccac

SEQ ID NO: 753025 - DNA, 15 bp, Homo sapiens
aagcaatctcccacc

SEQ ID NO: 753026 - DNA, 15 bp, Homo sapiens
agcaatctcccacct

SEQ ID NO: 753027 - DNA, 15 bp, Homo sapiens
gcaatctcccacctc

SEQ ID NO: 753028 - DNA, 15 bp, Homo sapiens
caatctcccacctca

SEQ ID NO: 753029 - DNA, 15 bp, Homo sapiens
aatctcccacctcag

SEQ ID NO: 753030 - DNA, 15 bp, Homo sapiens
atctcccacctcagc

SEQ ID NO: 753031 - DNA, 15 bp, Homo sapiens
tctcccacctcagcc

SEQ ID NO: 753032 - DNA, 15 bp, Homo sapiens
ctcccacctcagcct

SEQ ID NO: 753033 - DNA, 15 bp, Homo sapiens
tcccacctcagcctc

SEQ ID NO: 753034 - DNA, 15 bp, Homo sapiens
cccacctcagcctcc

SEQ ID NO: 753035 - DNA, 15 bp, Homo sapiens
ccacctcagcctcct

SEQ ID NO: 753036 - DNA, 15 bp, Homo sapiens
cacctcagcctcctg

SEQ ID NO: 753037 - DNA, 15 bp, Homo sapiens
acctcagcctcctga

SEQ ID NO: 753038 - DNA, 15 bp, Homo sapiens
ctgagtagctgggac

SEQ ID NO: 753039 - DNA, 15 bp, Homo sapiens
tgagtagctgggact

SEQ ID NO: 753040 - DNA, 15 bp, Homo sapiens
gagtagctgggactt

SEQ ID NO: 753041 - DNA, 15 bp, Homo sapiens
agtagctgggacttg

SEQ ID NO: 753042 - DNA, 15 bp, Homo sapiens
gtagctgggacttgc

SEQ ID NO: 753043 - DNA, 15 bp, Homo sapiens
tagctgggacttgca

SEQ ID NO: 753044 - DNA, 15 bp, Homo sapiens
agctgggacttgcag

SEQ ID NO: 753045 - DNA, 15 bp, Homo sapiens
gctgggacttgcagg

SEQ ID NO: 753046 - DNA, 15 bp, Homo sapiens
ctgggacttgcaggc

SEQ ID NO: 753047 - DNA, 15 bp, Homo sapiens
tgggacttgcaggca

SEQ ID NO: 753048 - DNA, 15 bp, Homo sapiens
gggacttgcaggcat

SEQ ID NO: 753049 - DNA, 15 bp, Homo sapiens
ggacttgcaggcatg

SEQ ID NO: 753050 - DNA, 15 bp, Homo sapiens
gacttgcaggcatgt

SEQ ID NO: 753051 - DNA, 15 bp, Homo sapiens
acttgcaggcatgtg

SEQ ID NO: 753052 - DNA, 15 bp, Homo sapiens
cttgcaggcatgtga

SEQ ID NO: 753053 - DNA, 15 bp, Homo sapiens
ttgcaggcatgtgac

SEQ ID NO: 753054 - DNA, 15 bp, Homo sapiens
tgcaggcatgtgact

SEQ ID NO: 753055 - DNA, 15 bp, Homo sapiens
gcaggcatgtgacta

SEQ ID NO: 753056 - DNA, 15 bp, Homo sapiens
caggcatgtgactac

SEQ ID NO: 753057 - DNA, 15 bp, Homo sapiens
aggcatgtgactaca

SEQ ID NO: 753058 - DNA, 15 bp, Homo sapiens
ggcatgtgactacag

SEQ ID NO: 753059 - DNA, 15 bp, Homo sapiens
gcatgtgactacagg

SEQ ID NO: 753060 - DNA, 15 bp, Homo sapiens
catgtgactacaggc

SEQ ID NO: 753061 - DNA, 15 bp, Homo sapiens
atgtgactacaggca

SEQ ID NO: 753062 - DNA, 15 bp, Homo sapiens
tgtgactacaggcat

SEQ ID NO: 753063 - DNA, 15 bp, Homo sapiens
gtgactacaggcatg

SEQ ID NO: 753064 - DNA, 15 bp, Homo sapiens
tgactacaggcatgc

SEQ ID NO: 753065 - DNA, 15 bp, Homo sapiens
gactacaggcatgca

SEQ ID NO: 753066 - DNA, 15 bp, Homo sapiens
actacaggcatgcac

SEQ ID NO: 753067 - DNA, 15 bp, Homo sapiens
ctacaggcatgcacc

SEQ ID NO: 753068 - DNA, 15 bp, Homo sapiens
tacaggcatgcacca

SEQ ID NO: 753069 - DNA, 15 bp, Homo sapiens
acaggcatgcaccat

SEQ ID NO: 753070 - DNA, 15 bp, Homo sapiens
caggcatgcaccatc

SEQ ID NO: 753071 - DNA, 15 bp, Homo sapiens
aggcatgcaccatca

SEQ ID NO: 753072 - DNA, 15 bp, Homo sapiens
ggcatgcaccatcat

SEQ ID NO: 753073 - DNA, 15 bp, Homo sapiens
gcatgcaccatcatg

SEQ ID NO: 753074 - DNA, 15 bp, Homo sapiens
catgcaccatcatgc

SEQ ID NO: 753075 - DNA, 15 bp, Homo sapiens
atgcaccatcatgcc

SEQ ID NO: 753076 - DNA, 15 bp, Homo sapiens
tgcaccatcatgcct

SEQ ID NO: 753077 - DNA, 15 bp, Homo sapiens
gcaccatcatgcctg

SEQ ID NO: 753078 - DNA, 15 bp, Homo sapiens
caccatcatgcctgg

SEQ ID NO: 753079 - DNA, 15 bp, Homo sapiens
accatcatgcctggc

SEQ ID NO: 753080 - DNA, 15 bp, Homo sapiens
ccatcatgcctggct

SEQ ID NO: 753081 - DNA, 15 bp, Homo sapiens
catcatgcctggcta

SEQ ID NO: 753082 - DNA, 15 bp, Homo sapiens
atcatgcctggctaa

SEQ ID NO: 753083 - DNA, 15 bp, Homo sapiens
tcatgcctggctaat

SEQ ID NO: 753084 - DNA, 15 bp, Homo sapiens
cctggctaatttttt

SEQ ID NO: 753085 - DNA, 15 bp, Homo sapiens
ctggctaattttttg

SEQ ID NO: 753086 - DNA, 15 bp, Homo sapiens
tggctaattttttgt

SEQ ID NO: 753087 - DNA, 15 bp, Homo sapiens
ttttttgtatttttg

SEQ ID NO: 753088 - DNA, 15 bp, Homo sapiens
tttttgtatttttgg

SEQ ID NO: 753089 - DNA, 15 bp, Homo sapiens
ttttgtatttttggt

SEQ ID NO: 753090 - DNA, 15 bp, Homo sapiens
tttgtatttttggtg

SEQ ID NO: 753091 - DNA, 15 bp, Homo sapiens
ttgtatttttggtgg

SEQ ID NO: 753092 - DNA, 15 bp, Homo sapiens
tgtatttttggtgga

SEQ ID NO: 753093 - DNA, 15 bp, Homo sapiens
gtatttttggtggag

SEQ ID NO: 753094 - DNA, 15 bp, Homo sapiens
tatttttggtggaga

SEQ ID NO: 753095 - DNA, 15 bp, Homo sapiens
atttttggtggagat

SEQ ID NO: 753096 - DNA, 15 bp, Homo sapiens
tttttggtggagatg

SEQ ID NO: 753097 - DNA, 15 bp, Homo sapiens
ttttggtggagatgg

SEQ ID NO: 753098 - DNA, 15 bp, Homo sapiens
tttggtggagatgga

SEQ ID NO: 753099 - DNA, 15 bp, Homo sapiens
ttggtggagatggag

SEQ ID NO: 753100 - DNA, 15 bp, Homo sapiens
tggtggagatggagt

SEQ ID NO: 753101 - DNA, 15 bp, Homo sapiens
ggtggagatggagtt

SEQ ID NO: 753102 - DNA, 15 bp, Homo sapiens
gtggagatggagttt

SEQ ID NO: 753103 - DNA, 15 bp, Homo sapiens
tggagatggagtttc

SEQ ID NO: 753104 - DNA, 15 bp, Homo sapiens
ggagatggagtttcg

SEQ ID NO: 753105 - DNA, 15 bp, Homo sapiens
gagatggagtttcgc

SEQ ID NO: 753106 - DNA, 15 bp, Homo sapiens
agatggagtttcgcc

SEQ ID NO: 753107 - DNA, 15 bp, Homo sapiens
gatggagtttcgcca

SEQ ID NO: 753108 - DNA, 15 bp, Homo sapiens
atggagtttcgccat

SEQ ID NO: 753109 - DNA, 15 bp, Homo sapiens
tggagtttcgccatg

SEQ ID NO: 753110 - DNA, 15 bp, Homo sapiens
ggagtttcgccatgt

SEQ ID NO: 753111 - DNA, 15 bp, Homo sapiens
gagtttcgccatgtt

SEQ ID NO: 753112 - DNA, 15 bp, Homo sapiens
agtttcgccatgttg

SEQ ID NO: 753113 - DNA, 15 bp, Homo sapiens
gtttcgccatgttgc

SEQ ID NO: 753114 - DNA, 15 bp, Homo sapiens
tttcgccatgttgcc

SEQ ID NO: 753115 - DNA, 15 bp, Homo sapiens
ttcgccatgttgccc

SEQ ID NO: 753116 - DNA, 15 bp, Homo sapiens
tcgccatgttgccca

SEQ ID NO: 753117 - DNA, 15 bp, Homo sapiens
cgccatgttgcccag

SEQ ID NO: 753118 - DNA, 15 bp, Homo sapiens
gccatgttgcccagg

SEQ ID NO: 753119 - DNA, 15 bp, Homo sapiens
ccatgttgcccaggc

SEQ ID NO: 753120 - DNA, 15 bp, Homo sapiens
catgttgcccaggct

SEQ ID NO: 753121 - DNA, 15 bp, Homo sapiens
atgttgcccaggctg

SEQ ID NO: 753122 - DNA, 15 bp, Homo sapiens
gttgcccaggctggt

SEQ ID NO: 753123 - DNA, 15 bp, Homo sapiens
ttgcccaggctggtc

SEQ ID NO: 753124 - DNA, 15 bp, Homo sapiens
tgcccaggctggtct

SEQ ID NO: 753125 - DNA, 15 bp, Homo sapiens
gcccaggctggtctc

SEQ ID NO: 753126 - DNA, 15 bp, Homo sapiens
cccaggctggtctct

SEQ ID NO: 753127 - DNA, 15 bp, Homo sapiens
ccaggctggtctcta

SEQ ID NO: 753128 - DNA, 15 bp, Homo sapiens
caggctggtctctaa

SEQ ID NO: 753129 - DNA, 15 bp, Homo sapiens
aggctggtctctaac

SEQ ID NO: 753130 - DNA, 15 bp, Homo sapiens
ggctggtctctaact

SEQ ID NO: 753131 - DNA, 15 bp, Homo sapiens
gctggtctctaactc

SEQ ID NO: 753132 - DNA, 15 bp, Homo sapiens
ctggtctctaactct

SEQ ID NO: 753133 - DNA, 15 bp, Homo sapiens
tggtctctaactctt

SEQ ID NO: 753134 - DNA, 15 bp, Homo sapiens
ggtctctaactcttg

SEQ ID NO: 753135 - DNA, 15 bp, Homo sapiens
gtctctaactcttga

SEQ ID NO: 753136 - DNA, 15 bp, Homo sapiens
tctctaactcttgag

SEQ ID NO: 753137 - DNA, 15 bp, Homo sapiens
ctctaactcttgagc

SEQ ID NO: 753138 - DNA, 15 bp, Homo sapiens
tctaactcttgagct

SEQ ID NO: 753139 - DNA, 15 bp, Homo sapiens
ctaactcttgagctc

SEQ ID NO: 753140 - DNA, 15 bp, Homo sapiens
taactcttgagctca

SEQ ID NO: 753141 - DNA, 15 bp, Homo sapiens
aactcttgagctcaa

SEQ ID NO: 753142 - DNA, 15 bp, Homo sapiens
actcttgagctcaag

SEQ ID NO: 753143 - DNA, 15 bp, Homo sapiens
ctcttgagctcaagt

SEQ ID NO: 753144 - DNA, 15 bp, Homo sapiens
tcttgagctcaagtg

SEQ ID NO: 753145 - DNA, 15 bp, Homo sapiens
cttgagctcaagtgg

SEQ ID NO: 753146 - DNA, 15 bp, Homo sapiens
ttgagctcaagtggt

SEQ ID NO: 753147 - DNA, 15 bp, Homo sapiens
tgagctcaagtggtc

SEQ ID NO: 753148 - DNA, 15 bp, Homo sapiens
gagctcaagtggtcc

SEQ ID NO: 753149 - DNA, 15 bp, Homo sapiens
agctcaagtggtcca

SEQ ID NO: 753150 - DNA, 15 bp, Homo sapiens
gctcaagtggtccac

SEQ ID NO: 753151 - DNA, 15 bp, Homo sapiens
ctcaagtggtccacc

SEQ ID NO: 753152 - DNA, 15 bp, Homo sapiens
tcaagtggtccacct

SEQ ID NO: 753153 - DNA, 15 bp, Homo sapiens
caagtggtccacctg

SEQ ID NO: 753154 - DNA, 15 bp, Homo sapiens
aagtggtccacctgc

SEQ ID NO: 753155 - DNA, 15 bp, Homo sapiens
agtggtccacctgcc

SEQ ID NO: 753156 - DNA, 15 bp, Homo sapiens
gtggtccacctgcct

SEQ ID NO: 753157 - DNA, 15 bp, Homo sapiens
tggtccacctgcctc

SEQ ID NO: 753158 - DNA, 15 bp, Homo sapiens
ggtccacctgcctcg

SEQ ID NO: 753159 - DNA, 15 bp, Homo sapiens
gtccacctgcctcgg

SEQ ID NO: 753160 - DNA, 15 bp, Homo sapiens
cacctgcctcggccc

SEQ ID NO: 753161 - DNA, 15 bp, Homo sapiens
acctgcctcggcccc

SEQ ID NO: 753162 - DNA, 15 bp, Homo sapiens
cctgcctcggccccc

SEQ ID NO: 753163 - DNA, 15 bp, Homo sapiens
ctgcctcggccccca

SEQ ID NO: 753164 - DNA, 15 bp, Homo sapiens
tgcctcggcccccaa

SEQ ID NO: 753165 - DNA, 15 bp, Homo sapiens
gcctcggcccccaaa

SEQ ID NO: 753166 - DNA, 15 bp, Homo sapiens
cctcggcccccaaag

SEQ ID NO: 753167 - DNA, 15 bp, Homo sapiens
ctcggcccccaaagt

SEQ ID NO: 753168 - DNA, 15 bp, Homo sapiens
tcggcccccaaagtg

SEQ ID NO: 753169 - DNA, 15 bp, Homo sapiens
cggcccccaaagtgc

SEQ ID NO: 753170 - DNA, 15 bp, Homo sapiens
ggcccccaaagtgct

SEQ ID NO: 753171 - DNA, 15 bp, Homo sapiens
gcccccaaagtgctg

SEQ ID NO: 753172 - DNA, 15 bp, Homo sapiens
cccccaaagtgctgg

SEQ ID NO: 753173 - DNA, 15 bp, Homo sapiens
ccccaaagtgctgga

SEQ ID NO: 753174 - DNA, 15 bp, Homo sapiens
cccaaagtgctggaa

SEQ ID NO: 753175 - DNA, 15 bp, Homo sapiens
ccaaagtgctggaat

SEQ ID NO: 753176 - DNA, 15 bp, Homo sapiens
caaagtgctggaatt

SEQ ID NO: 753177 - DNA, 15 bp, Homo sapiens
aaagtgctggaatta

SEQ ID NO: 753178 - DNA, 15 bp, Homo sapiens
aagtgctggaattac

SEQ ID NO: 753179 - DNA, 15 bp, Homo sapiens
agtgctggaattaca

SEQ ID NO: 753180 - DNA, 15 bp, Homo sapiens
gtgctggaattacag

SEQ ID NO: 753181 - DNA, 15 bp, Homo sapiens
tgctggaattacagg

SEQ ID NO: 753182 - DNA, 15 bp, Homo sapiens
gctggaattacaggc

SEQ ID NO: 753183 - DNA, 15 bp, Homo sapiens
ctggaattacaggcg

SEQ ID NO: 753184 - DNA, 15 bp, Homo sapiens
tggaattacaggcgt

SEQ ID NO: 753185 - DNA, 15 bp, Homo sapiens
ggaattacaggcgtg

SEQ ID NO: 753186 - DNA, 15 bp, Homo sapiens
gaattacaggcgtga

SEQ ID NO: 753187 - DNA, 15 bp, Homo sapiens
aattacaggcgtgag

SEQ ID NO: 753188 - DNA, 15 bp, Homo sapiens
ccactgtgcccagca

SEQ ID NO: 753189 - DNA, 15 bp, Homo sapiens
cactgtgcccagcag

SEQ ID NO: 753190 - DNA, 15 bp, Homo sapiens
actgtgcccagcaga

SEQ ID NO: 753191 - DNA, 15 bp, Homo sapiens
ctgtgcccagcagaa

SEQ ID NO: 753192 - DNA, 15 bp, Homo sapiens
tgtgcccagcagaaa

SEQ ID NO: 753193 - DNA, 15 bp, Homo sapiens
gtgcccagcagaaaa

SEQ ID NO: 753194 - DNA, 15 bp, Homo sapiens
tgcccagcagaaaaa

SEQ ID NO: 753195 - DNA, 15 bp, Homo sapiens
gcccagcagaaaaac

SEQ ID NO: 753196 - DNA, 15 bp, Homo sapiens
cccagcagaaaaaca

SEQ ID NO: 753197 - DNA, 15 bp, Homo sapiens
ccagcagaaaaacac

SEQ ID NO: 753198 - DNA, 15 bp, Homo sapiens
cagcagaaaaacact

SEQ ID NO: 753199 - DNA, 15 bp, Homo sapiens
agcagaaaaacacta

SEQ ID NO: 753200 - DNA, 15 bp, Homo sapiens
gcagaaaaacactat

SEQ ID NO: 753201 - DNA, 15 bp, Homo sapiens
cagaaaaacactatt

SEQ ID NO: 753202 - DNA, 15 bp, Homo sapiens
aaaacactatttttg

SEQ ID NO: 753203 - DNA, 15 bp, Homo sapiens
aaacactatttttgg

SEQ ID NO: 753204 - DNA, 15 bp, Homo sapiens
aacactatttttggt

SEQ ID NO: 753205 - DNA, 15 bp, Homo sapiens
acactatttttggta

SEQ ID NO: 753206 - DNA, 15 bp, Homo sapiens
cactatttttggtat

SEQ ID NO: 753207 - DNA, 15 bp, Homo sapiens
actatttttggtatt

SEQ ID NO: 753208 - DNA, 15 bp, Homo sapiens
ctatttttggtatta

SEQ ID NO: 753209 - DNA, 15 bp, Homo sapiens
tatttttggtattaa

SEQ ID NO: 753210 - DNA, 15 bp, Homo sapiens
atttttggtattaac

SEQ ID NO: 753211 - DNA, 15 bp, Homo sapiens
tttttggtattaaca

SEQ ID NO: 753212 - DNA, 15 bp, Homo sapiens
ttttggtattaacac

SEQ ID NO: 753213 - DNA, 15 bp, Homo sapiens
tttggtattaacact

SEQ ID NO: 753214 - DNA, 15 bp, Homo sapiens
ttggtattaacactt

SEQ ID NO: 753215 - DNA, 15 bp, Homo sapiens
tggtattaacactta

SEQ ID NO: 753216 - DNA, 15 bp, Homo sapiens
ggtattaacacttac

SEQ ID NO: 753217 - DNA, 15 bp, Homo sapiens
gtattaacacttaca

SEQ ID NO: 753218 - DNA, 15 bp, Homo sapiens
tattaacacttacac

SEQ ID NO: 753219 - DNA, 15 bp, Homo sapiens
attaacacttacact

SEQ ID NO: 753220 - DNA, 15 bp, Homo sapiens
ttaacacttacactg

SEQ ID NO: 753221 - DNA, 15 bp, Homo sapiens
taacacttacactgt

SEQ ID NO: 753222 - DNA, 15 bp, Homo sapiens
aacacttacactgta

SEQ ID NO: 753223 - DNA, 15 bp, Homo sapiens
acacttacactgtac

SEQ ID NO: 753224 - DNA, 15 bp, Homo sapiens
cacttacactgtaca

SEQ ID NO: 753225 - DNA, 15 bp, Homo sapiens
acttacactgtacac

SEQ ID NO: 753226 - DNA, 15 bp, Homo sapiens
cttacactgtacaca

SEQ ID NO: 753227 - DNA, 15 bp, Homo sapiens
ttacactgtacacag

SEQ ID NO: 753228 - DNA, 15 bp, Homo sapiens
tacactgtacacaga

SEQ ID NO: 753229 - DNA, 15 bp, Homo sapiens
acactgtacacagag

SEQ ID NO: 753230 - DNA, 15 bp, Homo sapiens
cactgtacacagagt

SEQ ID NO: 753231 - DNA, 15 bp, Homo sapiens
actgtacacagagta

SEQ ID NO: 753232 - DNA, 15 bp, Homo sapiens
ctgtacacagagtat

SEQ ID NO: 753233 - DNA, 15 bp, Homo sapiens
tgtacacagagtata

SEQ ID NO: 753234 - DNA, 15 bp, Homo sapiens
gtacacagagtatat

SEQ ID NO: 753235 - DNA, 15 bp, Homo sapiens
tacacagagtatatt

SEQ ID NO: 753236 - DNA, 15 bp, Homo sapiens
acacagagtatattg

SEQ ID NO: 753237 - DNA, 15 bp, Homo sapiens
cacagagtatattgg

SEQ ID NO: 753238 - DNA, 15 bp, Homo sapiens
acagagtatattgga

SEQ ID NO: 753239 - DNA, 15 bp, Homo sapiens
cagagtatattggag

SEQ ID NO: 753240 - DNA, 15 bp, Homo sapiens
agagtatattggagg

SEQ ID NO: 753241 - DNA, 15 bp, Homo sapiens
gagtatattggaggt

SEQ ID NO: 753242 - DNA, 15 bp, Homo sapiens
agtatattggaggta

SEQ ID NO: 753243 - DNA, 15 bp, Homo sapiens
gtatattggaggtag

SEQ ID NO: 753244 - DNA, 15 bp, Homo sapiens
tatattggaggtagg

SEQ ID NO: 753245 - DNA, 15 bp, Homo sapiens
atattggaggtagga

SEQ ID NO: 753246 - DNA, 15 bp, Homo sapiens
tattggaggtaggat

SEQ ID NO: 753247 - DNA, 15 bp, Homo sapiens
attggaggtaggatg

SEQ ID NO: 753248 - DNA, 15 bp, Homo sapiens
ttggaggtaggatgc

SEQ ID NO: 753249 - DNA, 15 bp, Homo sapiens
tggaggtaggatgca

SEQ ID NO: 753250 - DNA, 15 bp, Homo sapiens
ggaggtaggatgcag

SEQ ID NO: 753251 - DNA, 15 bp, Homo sapiens
gaggtaggatgcaga

SEQ ID NO: 753252 - DNA, 15 bp, Homo sapiens
aggtaggatgcagaa

SEQ ID NO: 753253 - DNA, 15 bp, Homo sapiens
ggtaggatgcagaat

SEQ ID NO: 753254 - DNA, 15 bp, Homo sapiens
gtaggatgcagaatt

SEQ ID NO: 753255 - DNA, 15 bp, Homo sapiens
taggatgcagaattt

SEQ ID NO: 753256 - DNA, 15 bp, Homo sapiens
aggatgcagaattta

SEQ ID NO: 753257 - DNA, 15 bp, Homo sapiens
ggatgcagaatttaa

SEQ ID NO: 753258 - DNA, 15 bp, Homo sapiens
gatgcagaatttaag

SEQ ID NO: 753259 - DNA, 15 bp, Homo sapiens
atgcagaatttaagt

SEQ ID NO: 753260 - DNA, 15 bp, Homo sapiens
tgcagaatttaagta

SEQ ID NO: 753261 - DNA, 15 bp, Homo sapiens
gcagaatttaagtag

SEQ ID NO: 753262 - DNA, 15 bp, Homo sapiens
cagaatttaagtagg

SEQ ID NO: 753263 - DNA, 15 bp, Homo sapiens
agaatttaagtaggt

SEQ ID NO: 753264 - DNA, 15 bp, Homo sapiens
gaatttaagtaggtt

SEQ ID NO: 753265 - DNA, 15 bp, Homo sapiens
aatttaagtaggttt

SEQ ID NO: 753266 - DNA, 15 bp, Homo sapiens
atttaagtaggtttt

SEQ ID NO: 753267 - DNA, 15 bp, Homo sapiens
tttaagtaggttttt

SEQ ID NO: 753268 - DNA, 15 bp, Homo sapiens
ttaagtaggttttta

SEQ ID NO: 753269 - DNA, 15 bp, Homo sapiens
taagtaggtttttaa

SEQ ID NO: 753270 - DNA, 15 bp, Homo sapiens
aagtaggtttttaaa

SEQ ID NO: 753271 - DNA, 15 bp, Homo sapiens
agtaggtttttaaaa

SEQ ID NO: 753272 - DNA, 15 bp, Homo sapiens
gtaggtttttaaaaa

SEQ ID NO: 753273 - DNA, 15 bp, Homo sapiens
taggtttttaaaaac

SEQ ID NO: 753274 - DNA, 15 bp, Homo sapiens
aggtttttaaaaact

SEQ ID NO: 753275 - DNA, 15 bp, Homo sapiens
ggtttttaaaaactt

SEQ ID NO: 753276 - DNA, 15 bp, Homo sapiens
gtttttaaaaacttg

SEQ ID NO: 753277 - DNA, 15 bp, Homo sapiens
tttttaaaaacttga

SEQ ID NO: 753278 - DNA, 15 bp, Homo sapiens
ttttaaaaacttgag

SEQ ID NO: 753279 - DNA, 15 bp, Homo sapiens
tttaaaaacttgaga

SEQ ID NO: 753280 - DNA, 15 bp, Homo sapiens
ttaaaaacttgagag

SEQ ID NO: 753281 - DNA, 15 bp, Homo sapiens
taaaaacttgagaga

SEQ ID NO: 753282 - DNA, 15 bp, Homo sapiens
aaaaacttgagagag

SEQ ID NO: 753283 - DNA, 15 bp, Homo sapiens
aaaacttgagagagg

SEQ ID NO: 753284 - DNA, 15 bp, Homo sapiens
aaacttgagagaggg

SEQ ID NO: 753285 - DNA, 15 bp, Homo sapiens
aacttgagagagggg

SEQ ID NO: 753286 - DNA, 15 bp, Homo sapiens
acttgagagaggggt

SEQ ID NO: 753287 - DNA, 15 bp, Homo sapiens
cttgagagaggggtg

SEQ ID NO: 753288 - DNA, 15 bp, Homo sapiens
ttgagagaggggtgt

SEQ ID NO: 753289 - DNA, 15 bp, Homo sapiens
tgagagaggggtgtg

SEQ ID NO: 753290 - DNA, 15 bp, Homo sapiens
gagagaggggtgtgt

SEQ ID NO: 753291 - DNA, 15 bp, Homo sapiens
agagaggggtgtgtg

SEQ ID NO: 753292 - DNA, 15 bp, Homo sapiens
gagaggggtgtgtgt

SEQ ID NO: 753293 - DNA, 15 bp, Homo sapiens
agaggggtgtgtgtg

SEQ ID NO: 753294 - DNA, 15 bp, Homo sapiens
gaggggtgtgtgtgt

SEQ ID NO: 753295 - DNA, 15 bp, Homo sapiens
aggggtgtgtgtgtg

SEQ ID NO: 753296 - DNA, 15 bp, Homo sapiens
ggggtgtgtgtgtgt

SEQ ID NO: 753297 - DNA, 15 bp, Homo sapiens
gggtgtgtgtgtgtg

SEQ ID NO: 753298 - DNA, 15 bp, Homo sapiens
ggtgtgtgtgtgtgt

SEQ ID NO: 753299 - DNA, 15 bp, Homo sapiens
gtgtgtgtgtgtgta

SEQ ID NO: 753300 - DNA, 15 bp, Homo sapiens
tgtgtgtgtgtgtac

SEQ ID NO: 753301 - DNA, 15 bp, Homo sapiens
gtgtgtgtgtgtaca

SEQ ID NO: 753302 - DNA, 15 bp, Homo sapiens
tgtgtgtgtgtacat

SEQ ID NO: 753303 - DNA, 15 bp, Homo sapiens
gtgtgtgtgtacatg

SEQ ID NO: 753304 - DNA, 15 bp, Homo sapiens
tgtgtgtgtacatgt

SEQ ID NO: 753305 - DNA, 15 bp, Homo sapiens
gtgtgtgtacatgta

SEQ ID NO: 753306 - DNA, 15 bp, Homo sapiens
tgtgtgtacatgtac

SEQ ID NO: 753307 - DNA, 15 bp, Homo sapiens
gtgtgtacatgtacg

SEQ ID NO: 753308 - DNA, 15 bp, Homo sapiens
tgtgtacatgtacgt

SEQ ID NO: 753309 - DNA, 15 bp, Homo sapiens
gtgtacatgtacgta

SEQ ID NO: 753310 - DNA, 15 bp, Homo sapiens
tgtacatgtacgtat

SEQ ID NO: 753311 - DNA, 15 bp, Homo sapiens
gtacatgtacgtatg

SEQ ID NO: 753312 - DNA, 15 bp, Homo sapiens
tacatgtacgtatgt

SEQ ID NO: 753313 - DNA, 15 bp, Homo sapiens
acatgtacgtatgtg

SEQ ID NO: 753314 - DNA, 15 bp, Homo sapiens
catgtacgtatgtgt

SEQ ID NO: 753315 - DNA, 15 bp, Homo sapiens
atgtacgtatgtgtg

SEQ ID NO: 753316 - DNA, 15 bp, Homo sapiens
tgtacgtatgtgtga

SEQ ID NO: 753317 - DNA, 15 bp, Homo sapiens
gtacgtatgtgtgag

SEQ ID NO: 753318 - DNA, 15 bp, Homo sapiens
tacgtatgtgtgaga

SEQ ID NO: 753319 - DNA, 15 bp, Homo sapiens
acgtatgtgtgagat

SEQ ID NO: 753320 - DNA, 15 bp, Homo sapiens
cgtatgtgtgagatg

SEQ ID NO: 753321 - DNA, 15 bp, Homo sapiens
gtatgtgtgagatgc

SEQ ID NO: 753322 - DNA, 15 bp, Homo sapiens
tatgtgtgagatgca

SEQ ID NO: 753323 - DNA, 15 bp, Homo sapiens
atgtgtgagatgcac

SEQ ID NO: 753324 - DNA, 15 bp, Homo sapiens
tgtgtgagatgcaca

SEQ ID NO: 753325 - DNA, 15 bp, Homo sapiens
gtgtgagatgcacac

SEQ ID NO: 753326 - DNA, 15 bp, Homo sapiens
tgtgagatgcacaca

SEQ ID NO: 753327 - DNA, 15 bp, Homo sapiens
gtgagatgcacacag

SEQ ID NO: 753328 - DNA, 15 bp, Homo sapiens
tgagatgcacacaga

SEQ ID NO: 753329 - DNA, 15 bp, Homo sapiens
gagatgcacacagat

SEQ ID NO: 753330 - DNA, 15 bp, Homo sapiens
agatgcacacagatt

SEQ ID NO: 753331 - DNA, 15 bp, Homo sapiens
gatgcacacagattc

SEQ ID NO: 753332 - DNA, 15 bp, Homo sapiens
atgcacacagattca

SEQ ID NO: 753333 - DNA, 15 bp, Homo sapiens
tgcacacagattcaa

SEQ ID NO: 753334 - DNA, 15 bp, Homo sapiens
gcacacagattcaag

SEQ ID NO: 753335 - DNA, 15 bp, Homo sapiens
cacacagattcaaga

SEQ ID NO: 753336 - DNA, 15 bp, Homo sapiens
acacagattcaagag

SEQ ID NO: 753337 - DNA, 15 bp, Homo sapiens
cacagattcaagaga

SEQ ID NO: 753338 - DNA, 15 bp, Homo sapiens
acagattcaagagag

SEQ ID NO: 753339 - DNA, 15 bp, Homo sapiens
cagattcaagagagc

SEQ ID NO: 753340 - DNA, 15 bp, Homo sapiens
agattcaagagagca

SEQ ID NO: 753341 - DNA, 15 bp, Homo sapiens
gattcaagagagcat

SEQ ID NO: 753342 - DNA, 15 bp, Homo sapiens
attcaagagagcatg

SEQ ID NO: 753343 - DNA, 15 bp, Homo sapiens
ttcaagagagcatgg

SEQ ID NO: 753344 - DNA, 15 bp, Homo sapiens
tcaagagagcatggg

SEQ ID NO: 753345 - DNA, 15 bp, Homo sapiens
caagagagcatgggg

SEQ ID NO: 753346 - DNA, 15 bp, Homo sapiens
aagagagcatggggg

SEQ ID NO: 753347 - DNA, 15 bp, Homo sapiens
agagagcatggggga

SEQ ID NO: 753348 - DNA, 15 bp, Homo sapiens
gagagcatgggggac

SEQ ID NO: 753349 - DNA, 15 bp, Homo sapiens
agagcatgggggacc

SEQ ID NO: 753350 - DNA, 15 bp, Homo sapiens
gagcatgggggacca

SEQ ID NO: 753351 - DNA, 15 bp, Homo sapiens
agcatgggggaccag

SEQ ID NO: 753352 - DNA, 15 bp, Homo sapiens
gcatgggggaccagc

SEQ ID NO: 753353 - DNA, 15 bp, Homo sapiens
catgggggaccagca

SEQ ID NO: 753354 - DNA, 15 bp, Homo sapiens
atgggggaccagcaa

SEQ ID NO: 753355 - DNA, 15 bp, Homo sapiens
tgggggaccagcaaa

SEQ ID NO: 753356 - DNA, 15 bp, Homo sapiens
gggggaccagcaaag

SEQ ID NO: 753357 - DNA, 15 bp, Homo sapiens
ggggaccagcaaagt

SEQ ID NO: 753358 - DNA, 15 bp, Homo sapiens
gggaccagcaaagtt

SEQ ID NO: 753359 - DNA, 15 bp, Homo sapiens
ggaccagcaaagttt

SEQ ID NO: 753360 - DNA, 15 bp, Homo sapiens
gaccagcaaagtttg

SEQ ID NO: 753361 - DNA, 15 bp, Homo sapiens
accagcaaagtttgc

SEQ ID NO: 753362 - DNA, 15 bp, Homo sapiens
ccagcaaagtttgca

SEQ ID NO: 753363 - DNA, 15 bp, Homo sapiens
cagcaaagtttgcac

SEQ ID NO: 753364 - DNA, 15 bp, Homo sapiens
agcaaagtttgcacc

SEQ ID NO: 753365 - DNA, 15 bp, Homo sapiens
gcaaagtttgcaccc

SEQ ID NO: 753366 - DNA, 15 bp, Homo sapiens
caaagtttgcaccca

SEQ ID NO: 753367 - DNA, 15 bp, Homo sapiens
aaagtttgcacccac

SEQ ID NO: 753368 - DNA, 15 bp, Homo sapiens
aagtttgcacccacc

SEQ ID NO: 753369 - DNA, 15 bp, Homo sapiens
agtttgcacccacca

SEQ ID NO: 753370 - DNA, 15 bp, Homo sapiens
gtttgcacccaccag

SEQ ID NO: 753371 - DNA, 15 bp, Homo sapiens
tttgcacccaccagc

SEQ ID NO: 753372 - DNA, 15 bp, Homo sapiens
ttgcacccaccagcg

SEQ ID NO: 753373 - DNA, 15 bp, Homo sapiens
tgcacccaccagcga

SEQ ID NO: 753374 - DNA, 15 bp, Homo sapiens
gcacccaccagcgaa

SEQ ID NO: 753375 - DNA, 15 bp, Homo sapiens
cacccaccagcgaag

SEQ ID NO: 753376 - DNA, 15 bp, Homo sapiens
acccaccagcgaagt

SEQ ID NO: 753377 - DNA, 15 bp, Homo sapiens
cccaccagcgaagtc

SEQ ID NO: 753378 - DNA, 15 bp, Homo sapiens
ccaccagcgaagtct

SEQ ID NO: 753379 - DNA, 15 bp, Homo sapiens
caccagcgaagtctc

SEQ ID NO: 753380 - DNA, 15 bp, Homo sapiens
accagcgaagtctca

SEQ ID NO: 753381 - DNA, 15 bp, Homo sapiens
ccagcgaagtctcat

SEQ ID NO: 753382 - DNA, 15 bp, Homo sapiens
cagcgaagtctcatc

SEQ ID NO: 753383 - DNA, 15 bp, Homo sapiens
agcgaagtctcatca

SEQ ID NO: 753384 - DNA, 15 bp, Homo sapiens
gcgaagtctcatcat

SEQ ID NO: 753385 - DNA, 15 bp, Homo sapiens
cgaagtctcatcatt

SEQ ID NO: 753386 - DNA, 15 bp, Homo sapiens
gaagtctcatcatta

SEQ ID NO: 753387 - DNA, 15 bp, Homo sapiens
aagtctcatcattaa

SEQ ID NO: 753388 - DNA, 15 bp, Homo sapiens
agtctcatcattaaa

SEQ ID NO: 753389 - DNA, 15 bp, Homo sapiens
gtctcatcattaaac

SEQ ID NO: 753390 - DNA, 15 bp, Homo sapiens
tctcatcattaaacc

SEQ ID NO: 753391 - DNA, 15 bp, Homo sapiens
ctcatcattaaacca

SEQ ID NO: 753392 - DNA, 15 bp, Homo sapiens
tcatcattaaaccat

SEQ ID NO: 753393 - DNA, 15 bp, Homo sapiens
catcattaaaccatg

SEQ ID NO: 753394 - DNA, 15 bp, Homo sapiens
atcattaaaccatgg

SEQ ID NO: 753395 - DNA, 15 bp, Homo sapiens
tcattaaaccatggg

SEQ ID NO: 753396 - DNA, 15 bp, Homo sapiens
cattaaaccatgggc

SEQ ID NO: 753397 - DNA, 15 bp, Homo sapiens
attaaaccatgggcc

SEQ ID NO: 753398 - DNA, 15 bp, Homo sapiens
ttaaaccatgggcct

SEQ ID NO: 753399 - DNA, 15 bp, Homo sapiens
taaaccatgggcctg

SEQ ID NO: 753400 - DNA, 15 bp, Homo sapiens
aaaccatgggcctgt

SEQ ID NO: 753401 - DNA, 15 bp, Homo sapiens
aaccatgggcctgtg

SEQ ID NO: 753402 - DNA, 15 bp, Homo sapiens
accatgggcctgtgc

SEQ ID NO: 753403 - DNA, 15 bp, Homo sapiens
ccatgggcctgtgca

SEQ ID NO: 753404 - DNA, 15 bp, Homo sapiens
catgggcctgtgcaa

SEQ ID NO: 753405 - DNA, 15 bp, Homo sapiens
atgggcctgtgcaac

SEQ ID NO: 753406 - DNA, 15 bp, Homo sapiens
tgggcctgtgcaacc

SEQ ID NO: 753407 - DNA, 15 bp, Homo sapiens
gggcctgtgcaacct

SEQ ID NO: 753408 - DNA, 15 bp, Homo sapiens
ggcctgtgcaacctg

SEQ ID NO: 753409 - DNA, 15 bp, Homo sapiens
gcctgtgcaacctgg

SEQ ID NO: 753410 - DNA, 15 bp, Homo sapiens
cctgtgcaacctggt

SEQ ID NO: 753411 - DNA, 15 bp, Homo sapiens
ctgtgcaacctggtg

SEQ ID NO: 753412 - DNA, 15 bp, Homo sapiens
tgtgcaacctggtgt

SEQ ID NO: 753413 - DNA, 15 bp, Homo sapiens
gtgcaacctggtgtg

SEQ ID NO: 753414 - DNA, 15 bp, Homo sapiens
tgcaacctggtgtgg

SEQ ID NO: 753415 - DNA, 15 bp, Homo sapiens
gcaacctggtgtgga

SEQ ID NO: 753416 - DNA, 15 bp, Homo sapiens
caacctggtgtggaa

SEQ ID NO: 753417 - DNA, 15 bp, Homo sapiens
aacctggtgtggaat

SEQ ID NO: 753418 - DNA, 15 bp, Homo sapiens
acctggtgtggaatg

SEQ ID NO: 753419 - DNA, 15 bp, Homo sapiens
cctggtgtggaatga

SEQ ID NO: 753420 - DNA, 15 bp, Homo sapiens
ctggtgtggaatgat

SEQ ID NO: 753421 - DNA, 15 bp, Homo sapiens
tggtgtggaatgatg

SEQ ID NO: 753422 - DNA, 15 bp, Homo sapiens
ggtgtggaatgatgc

SEQ ID NO: 753423 - DNA, 15 bp, Homo sapiens
gtgtggaatgatgcc

SEQ ID NO: 753424 - DNA, 15 bp, Homo sapiens
tgtggaatgatgcct

SEQ ID NO: 753425 - DNA, 15 bp, Homo sapiens
gtggaatgatgcctt

SEQ ID NO: 753426 - DNA, 15 bp, Homo sapiens
tggaatgatgcctta

SEQ ID NO: 753427 - DNA, 15 bp, Homo sapiens
ggaatgatgccttat

SEQ ID NO: 753428 - DNA, 15 bp, Homo sapiens
gaatgatgccttatt

SEQ ID NO: 753429 - DNA, 15 bp, Homo sapiens
aatgatgccttatta

SEQ ID NO: 753430 - DNA, 15 bp, Homo sapiens
atgatgccttattat

SEQ ID NO: 753431 - DNA, 15 bp, Homo sapiens
tgatgccttattatc

SEQ ID NO: 753432 - DNA, 15 bp, Homo sapiens
gatgccttattatcc

SEQ ID NO: 753433 - DNA, 15 bp, Homo sapiens
atgccttattatccc

SEQ ID NO: 753434 - DNA, 15 bp, Homo sapiens
tgccttattatccca

SEQ ID NO: 753435 - DNA, 15 bp, Homo sapiens
gccttattatcccac

SEQ ID NO: 753436 - DNA, 15 bp, Homo sapiens
ccttattatcccaca

SEQ ID NO: 753437 - DNA, 15 bp, Homo sapiens
cttattatcccacat

SEQ ID NO: 753438 - DNA, 15 bp, Homo sapiens
ttattatcccacatg

SEQ ID NO: 753439 - DNA, 15 bp, Homo sapiens
tattatcccacatga

SEQ ID NO: 753440 - DNA, 15 bp, Homo sapiens
attatcccacatgag

SEQ ID NO: 753441 - DNA, 15 bp, Homo sapiens
ttatcccacatgaga

SEQ ID NO: 753442 - DNA, 15 bp, Homo sapiens
tatcccacatgagat

SEQ ID NO: 753443 - DNA, 15 bp, Homo sapiens
atcccacatgagata

SEQ ID NO: 753444 - DNA, 15 bp, Homo sapiens
tcccacatgagatat

SEQ ID NO: 753445 - DNA, 15 bp, Homo sapiens
cccacatgagatatg

SEQ ID NO: 753446 - DNA, 15 bp, Homo sapiens
ccacatgagatatgc

SEQ ID NO: 753447 - DNA, 15 bp, Homo sapiens
cacatgagatatgct

SEQ ID NO: 753448 - DNA, 15 bp, Homo sapiens
acatgagatatgctc

SEQ ID NO: 753449 - DNA, 15 bp, Homo sapiens
catgagatatgctca

SEQ ID NO: 753450 - DNA, 15 bp, Homo sapiens
atgagatatgctcat

SEQ ID NO: 753451 - DNA, 15 bp, Homo sapiens
tgagatatgctcata

SEQ ID NO: 753452 - DNA, 15 bp, Homo sapiens
gagatatgctcatat

SEQ ID NO: 753453 - DNA, 15 bp, Homo sapiens
agatatgctcatatc

SEQ ID NO: 753454 - DNA, 15 bp, Homo sapiens
gatatgctcatatct

SEQ ID NO: 753455 - DNA, 15 bp, Homo sapiens
atatgctcatatctc

SEQ ID NO: 753456 - DNA, 15 bp, Homo sapiens
tatgctcatatctca

SEQ ID NO: 753457 - DNA, 15 bp, Homo sapiens
atgctcatatctcaa

SEQ ID NO: 753458 - DNA, 15 bp, Homo sapiens
tgctcatatctcaaa

SEQ ID NO: 753459 - DNA, 15 bp, Homo sapiens
gctcatatctcaaac

SEQ ID NO: 753460 - DNA, 15 bp, Homo sapiens
ctcatatctcaaact

SEQ ID NO: 753461 - DNA, 15 bp, Homo sapiens
tcatatctcaaactc

SEQ ID NO: 753462 - DNA, 15 bp, Homo sapiens
catatctcaaactct

SEQ ID NO: 753463 - DNA, 15 bp, Homo sapiens
atatctcaaactctg

SEQ ID NO: 753464 - DNA, 15 bp, Homo sapiens
tatctcaaactctga

SEQ ID NO: 753465 - DNA, 15 bp, Homo sapiens
atctcaaactctgaa

SEQ ID NO: 753466 - DNA, 15 bp, Homo sapiens
tctcaaactctgaaa

SEQ ID NO: 753467 - DNA, 15 bp, Homo sapiens
ctcaaactctgaaac

SEQ ID NO: 753468 - DNA, 15 bp, Homo sapiens
tcaaactctgaaact

SEQ ID NO: 753469 - DNA, 15 bp, Homo sapiens
caaactctgaaactg

SEQ ID NO: 753470 - DNA, 15 bp, Homo sapiens
aaactctgaaactgt

SEQ ID NO: 753471 - DNA, 15 bp, Homo sapiens
aactctgaaactgtg

SEQ ID NO: 753472 - DNA, 15 bp, Homo sapiens
actctgaaactgtgt

SEQ ID NO: 753473 - DNA, 15 bp, Homo sapiens
ctctgaaactgtgtt

SEQ ID NO: 753474 - DNA, 15 bp, Homo sapiens
tctgaaactgtgtta

SEQ ID NO: 753475 - DNA, 15 bp, Homo sapiens
ctgaaactgtgttag

SEQ ID NO: 753476 - DNA, 15 bp, Homo sapiens
tgaaactgtgttagt

SEQ ID NO: 753477 - DNA, 15 bp, Homo sapiens
gaaactgtgttagta

SEQ ID NO: 753478 - DNA, 15 bp, Homo sapiens
aaactgtgttagtaa

SEQ ID NO: 753479 - DNA, 15 bp, Homo sapiens
aactgtgttagtaaa

SEQ ID NO: 753480 - DNA, 15 bp, Homo sapiens
actgtgttagtaaaa

SEQ ID NO: 753481 - DNA, 15 bp, Homo sapiens
ctgtgttagtaaaag

SEQ ID NO: 753482 - DNA, 15 bp, Homo sapiens
tgtgttagtaaaaga

SEQ ID NO: 753483 - DNA, 15 bp, Homo sapiens
gtgttagtaaaagaa

SEQ ID NO: 753484 - DNA, 15 bp, Homo sapiens
tgttagtaaaagaat

SEQ ID NO: 753485 - DNA, 15 bp, Homo sapiens
gttagtaaaagaatg

SEQ ID NO: 753486 - DNA, 15 bp, Homo sapiens
ttagtaaaagaatgg

SEQ ID NO: 753487 - DNA, 15 bp, Homo sapiens
tagtaaaagaatggg

SEQ ID NO: 753488 - DNA, 15 bp, Homo sapiens
agtaaaagaatggga

SEQ ID NO: 753489 - DNA, 15 bp, Homo sapiens
gtaaaagaatgggaa

SEQ ID NO: 753490 - DNA, 15 bp, Homo sapiens
taaaagaatgggaat

SEQ ID NO: 753491 - DNA, 15 bp, Homo sapiens
aaaagaatgggaatt

SEQ ID NO: 753492 - DNA, 15 bp, Homo sapiens
aaagaatgggaattc

SEQ ID NO: 753493 - DNA, 15 bp, Homo sapiens
aagaatgggaattct

SEQ ID NO: 753494 - DNA, 15 bp, Homo sapiens
agaatgggaattctg

SEQ ID NO: 753495 - DNA, 15 bp, Homo sapiens
gaatgggaattctgt

SEQ ID NO: 753496 - DNA, 15 bp, Homo sapiens
aatgggaattctgtg

SEQ ID NO: 753497 - DNA, 15 bp, Homo sapiens
atgggaattctgtga

SEQ ID NO: 753498 - DNA, 15 bp, Homo sapiens
tgggaattctgtgaa

SEQ ID NO: 753499 - DNA, 15 bp, Homo sapiens
gggaattctgtgaaa

SEQ ID NO: 753500 - DNA, 15 bp, Homo sapiens
ggaattctgtgaaag

SEQ ID NO: 753501 - DNA, 15 bp, Homo sapiens
gaattctgtgaaaga

SEQ ID NO: 753502 - DNA, 15 bp, Homo sapiens
aattctgtgaaagag

SEQ ID NO: 753503 - DNA, 15 bp, Homo sapiens
attctgtgaaagaga

SEQ ID NO: 753504 - DNA, 15 bp, Homo sapiens
ttctgtgaaagagaa

SEQ ID NO: 753505 - DNA, 15 bp, Homo sapiens
tctgtgaaagagaaa

SEQ ID NO: 753506 - DNA, 15 bp, Homo sapiens
ctgtgaaagagaaat

SEQ ID NO: 753507 - DNA, 15 bp, Homo sapiens
tgtgaaagagaaata

SEQ ID NO: 753508 - DNA, 15 bp, Homo sapiens
gtgaaagagaaataa

SEQ ID NO: 753509 - DNA, 15 bp, Homo sapiens
tgaaagagaaataaa

SEQ ID NO: 753510 - DNA, 15 bp, Homo sapiens
gaaagagaaataaat

SEQ ID NO: 753511 - DNA, 15 bp, Homo sapiens
aaagagaaataaata

SEQ ID NO: 753512 - DNA, 15 bp, Homo sapiens
aagagaaataaatat

SEQ ID NO: 753513 - DNA, 15 bp, Homo sapiens
agagaaataaatata

SEQ ID NO: 753514 - DNA, 15 bp, Homo sapiens
gagaaataaatatat

SEQ ID NO: 753515 - DNA, 15 bp, Homo sapiens
agaaataaatatatc

SEQ ID NO: 753516 - DNA, 15 bp, Homo sapiens
gaaataaatatatcc

SEQ ID NO: 753517 - DNA, 15 bp, Homo sapiens
aaataaatatatcca

SEQ ID NO: 753518 - DNA, 15 bp, Homo sapiens
aataaatatatccaa

SEQ ID NO: 753519 - DNA, 15 bp, Homo sapiens
ataaatatatccaaa

SEQ ID NO: 753520 - DNA, 15 bp, Homo sapiens
taaatatatccaaat

SEQ ID NO: 753521 - DNA, 15 bp, Homo sapiens
aaatatatccaaatt

SEQ ID NO: 753522 - DNA, 15 bp, Homo sapiens
aatatatccaaattc

SEQ ID NO: 753523 - DNA, 15 bp, Homo sapiens
atatatccaaattcc

SEQ ID NO: 753524 - DNA, 15 bp, Homo sapiens
tatatccaaattcca

SEQ ID NO: 753525 - DNA, 15 bp, Homo sapiens
atatccaaattccag

SEQ ID NO: 753526 - DNA, 15 bp, Homo sapiens
tatccaaattccagg

SEQ ID NO: 753527 - DNA, 15 bp, Homo sapiens
atccaaattccaggt

SEQ ID NO: 753528 - DNA, 15 bp, Homo sapiens
tccaaattccaggtc

SEQ ID NO: 753529 - DNA, 15 bp, Homo sapiens
ccaaattccaggtct

SEQ ID NO: 753530 - DNA, 15 bp, Homo sapiens
caaattccaggtctg

SEQ ID NO: 753531 - DNA, 15 bp, Homo sapiens
aaattccaggtctgt

SEQ ID NO: 753532 - DNA, 15 bp, Homo sapiens
aattccaggtctgtt

SEQ ID NO: 753533 - DNA, 15 bp, Homo sapiens
attccaggtctgtta

SEQ ID NO: 753534 - DNA, 15 bp, Homo sapiens
ttccaggtctgttaa

SEQ ID NO: 753535 - DNA, 15 bp, Homo sapiens
tccaggtctgttaaa

SEQ ID NO: 753536 - DNA, 15 bp, Homo sapiens
ccaggtctgttaaaa

SEQ ID NO: 753537 - DNA, 15 bp, Homo sapiens
caggtctgttaaaat

SEQ ID NO: 753538 - DNA, 15 bp, Homo sapiens
aggtctgttaaaatt

SEQ ID NO: 753539 - DNA, 15 bp, Homo sapiens
ggtctgttaaaattt

SEQ ID NO: 753540 - DNA, 15 bp, Homo sapiens
gtctgttaaaattta

SEQ ID NO: 753541 - DNA, 15 bp, Homo sapiens
tctgttaaaatttag

SEQ ID NO: 753542 - DNA, 15 bp, Homo sapiens
ctgttaaaatttagc

SEQ ID NO: 753543 - DNA, 15 bp, Homo sapiens
tgttaaaatttagcg

SEQ ID NO: 753544 - DNA, 15 bp, Homo sapiens
gttaaaatttagcgc

SEQ ID NO: 753545 - DNA, 15 bp, Homo sapiens
ttaaaatttagcgca

SEQ ID NO: 753546 - DNA, 15 bp, Homo sapiens
taaaatttagcgcac

SEQ ID NO: 753547 - DNA, 15 bp, Homo sapiens
aaaatttagcgcact

SEQ ID NO: 753548 - DNA, 15 bp, Homo sapiens
aaatttagcgcactt

SEQ ID NO: 753549 - DNA, 15 bp, Homo sapiens
aatttagcgcacttg

SEQ ID NO: 753550 - DNA, 15 bp, Homo sapiens
atttagcgcacttgg

SEQ ID NO: 753551 - DNA, 15 bp, Homo sapiens
tttagcgcacttgga

SEQ ID NO: 753552 - DNA, 15 bp, Homo sapiens
ttagcgcacttggat

SEQ ID NO: 753553 - DNA, 15 bp, Homo sapiens
tagcgcacttggatg

SEQ ID NO: 753554 - DNA, 15 bp, Homo sapiens
agcgcacttggatgt

SEQ ID NO: 753555 - DNA, 15 bp, Homo sapiens
gcgcacttggatgtt

SEQ ID NO: 753556 - DNA, 15 bp, Homo sapiens
cgcacttggatgttg

SEQ ID NO: 753557 - DNA, 15 bp, Homo sapiens
gcacttggatgttgg

SEQ ID NO: 753558 - DNA, 15 bp, Homo sapiens
cacttggatgttggt

SEQ ID NO: 753559 - DNA, 15 bp, Homo sapiens
acttggatgttggtg

SEQ ID NO: 753560 - DNA, 15 bp, Homo sapiens
cttggatgttggtgc

SEQ ID NO: 753561 - DNA, 15 bp, Homo sapiens
ttggatgttggtgcg

SEQ ID NO: 753562 - DNA, 15 bp, Homo sapiens
tggatgttggtgcga

SEQ ID NO: 753563 - DNA, 15 bp, Homo sapiens
ggatgttggtgcgac

SEQ ID NO: 753564 - DNA, 15 bp, Homo sapiens
gatgttggtgcgaca

SEQ ID NO: 753565 - DNA, 15 bp, Homo sapiens
atgttggtgcgacag

SEQ ID NO: 753566 - DNA, 15 bp, Homo sapiens
tgttggtgcgacaga

SEQ ID NO: 753567 - DNA, 15 bp, Homo sapiens
gttggtgcgacagag

SEQ ID NO: 753568 - DNA, 15 bp, Homo sapiens
ttggtgcgacagaga

SEQ ID NO: 753569 - DNA, 15 bp, Homo sapiens
tggtgcgacagagaa

SEQ ID NO: 753570 - DNA, 15 bp, Homo sapiens
ggtgcgacagagaat

SEQ ID NO: 753571 - DNA, 15 bp, Homo sapiens
gtgcgacagagaatt

SEQ ID NO: 753572 - DNA, 15 bp, Homo sapiens
tgcgacagagaattt

SEQ ID NO: 753573 - DNA, 15 bp, Homo sapiens
gcgacagagaattta

SEQ ID NO: 753574 - DNA, 15 bp, Homo sapiens
cgacagagaatttaa

SEQ ID NO: 753575 - DNA, 15 bp, Homo sapiens
gacagagaatttaat

SEQ ID NO: 753576 - DNA, 15 bp, Homo sapiens
acagagaatttaatc

SEQ ID NO: 753577 - DNA, 15 bp, Homo sapiens
cagagaatttaatct

SEQ ID NO: 753578 - DNA, 15 bp, Homo sapiens
agagaatttaatctg

SEQ ID NO: 753579 - DNA, 15 bp, Homo sapiens
gagaatttaatctgc

SEQ ID NO: 753580 - DNA, 15 bp, Homo sapiens
agaatttaatctgca

SEQ ID NO: 753581 - DNA, 15 bp, Homo sapiens
gaatttaatctgcac

SEQ ID NO: 753582 - DNA, 15 bp, Homo sapiens
aatttaatctgcaca

SEQ ID NO: 753583 - DNA, 15 bp, Homo sapiens
atttaatctgcacac

SEQ ID NO: 753584 - DNA, 15 bp, Homo sapiens
tttaatctgcacact

SEQ ID NO: 753585 - DNA, 15 bp, Homo sapiens
ttaatctgcacactc

SEQ ID NO: 753586 - DNA, 15 bp, Homo sapiens
taatctgcacactca

SEQ ID NO: 753587 - DNA, 15 bp, Homo sapiens
aatctgcacactcag

SEQ ID NO: 753588 - DNA, 15 bp, Homo sapiens
atctgcacactcaga

SEQ ID NO: 753589 - DNA, 15 bp, Homo sapiens
tctgcacactcagaa

SEQ ID NO: 753590 - DNA, 15 bp, Homo sapiens
ctgcacactcagaag

SEQ ID NO: 753591 - DNA, 15 bp, Homo sapiens
tgcacactcagaaga

SEQ ID NO: 753592 - DNA, 15 bp, Homo sapiens
gcacactcagaagaa

SEQ ID NO: 753593 - DNA, 15 bp, Homo sapiens
cacactcagaagaag

SEQ ID NO: 753594 - DNA, 15 bp, Homo sapiens
acactcagaagaagg

SEQ ID NO: 753595 - DNA, 15 bp, Homo sapiens
cactcagaagaaggt

SEQ ID NO: 753596 - DNA, 15 bp, Homo sapiens
actcagaagaaggta

SEQ ID NO: 753597 - DNA, 15 bp, Homo sapiens
ctcagaagaaggtag

SEQ ID NO: 753598 - DNA, 15 bp, Homo sapiens
tcagaagaaggtagt

SEQ ID NO: 753599 - DNA, 15 bp, Homo sapiens
cagaagaaggtagtg

SEQ ID NO: 753600 - DNA, 15 bp, Homo sapiens
agaagaaggtagtgg

SEQ ID NO: 753601 - DNA, 15 bp, Homo sapiens
gaagaaggtagtggt

SEQ ID NO: 753602 - DNA, 15 bp, Homo sapiens
aagaaggtagtggtt

SEQ ID NO: 753603 - DNA, 15 bp, Homo sapiens
agaaggtagtggtta

SEQ ID NO: 753604 - DNA, 15 bp, Homo sapiens
gaaggtagtggttaa

SEQ ID NO: 753605 - DNA, 15 bp, Homo sapiens
aaggtagtggttaac

SEQ ID NO: 753606 - DNA, 15 bp, Homo sapiens
aggtagtggttaact

SEQ ID NO: 753607 - DNA, 15 bp, Homo sapiens
ggtagtggttaactc

SEQ ID NO: 753608 - DNA, 15 bp, Homo sapiens
gtagtggttaactca

SEQ ID NO: 753609 - DNA, 15 bp, Homo sapiens
tagtggttaactcat

SEQ ID NO: 753610 - DNA, 15 bp, Homo sapiens
agtggttaactcatt

SEQ ID NO: 753611 - DNA, 15 bp, Homo sapiens
gtggttaactcattc

SEQ ID NO: 753612 - DNA, 15 bp, Homo sapiens
tggttaactcattca

SEQ ID NO: 753613 - DNA, 15 bp, Homo sapiens
ggttaactcattcag

SEQ ID NO: 753614 - DNA, 15 bp, Homo sapiens
gttaactcattcagt

SEQ ID NO: 753615 - DNA, 15 bp, Homo sapiens
ttaactcattcagtg

SEQ ID NO: 753616 - DNA, 15 bp, Homo sapiens
taactcattcagtgg

SEQ ID NO: 753617 - DNA, 15 bp, Homo sapiens
aactcattcagtggt

SEQ ID NO: 753618 - DNA, 15 bp, Homo sapiens
actcattcagtggtt

SEQ ID NO: 753619 - DNA, 15 bp, Homo sapiens
ctcattcagtggtta

SEQ ID NO: 753620 - DNA, 15 bp, Homo sapiens
tcattcagtggttat

SEQ ID NO: 753621 - DNA, 15 bp, Homo sapiens
cattcagtggttatg

SEQ ID NO: 753622 - DNA, 15 bp, Homo sapiens
attcagtggttatga

SEQ ID NO: 753623 - DNA, 15 bp, Homo sapiens
ttcagtggttatgaa

SEQ ID NO: 753624 - DNA, 15 bp, Homo sapiens
tcagtggttatgaat

SEQ ID NO: 753625 - DNA, 15 bp, Homo sapiens
cagtggttatgaatc

SEQ ID NO: 753626 - DNA, 15 bp, Homo sapiens
agtggttatgaatct

SEQ ID NO: 753627 - DNA, 15 bp, Homo sapiens
gtggttatgaatctt

SEQ ID NO: 753628 - DNA, 15 bp, Homo sapiens
tggttatgaatcttc

SEQ ID NO: 753629 - DNA, 15 bp, Homo sapiens
ggttatgaatcttcc

SEQ ID NO: 753630 - DNA, 15 bp, Homo sapiens
gttatgaatcttcct

SEQ ID NO: 753631 - DNA, 15 bp, Homo sapiens
ttatgaatcttcctt

SEQ ID NO: 753632 - DNA, 15 bp, Homo sapiens
tatgaatcttccttg

SEQ ID NO: 753633 - DNA, 15 bp, Homo sapiens
atgaatcttccttgc

SEQ ID NO: 753634 - DNA, 15 bp, Homo sapiens
tgaatcttccttgcc

SEQ ID NO: 753635 - DNA, 15 bp, Homo sapiens
gaatcttccttgcct

SEQ ID NO: 753636 - DNA, 15 bp, Homo sapiens
aatcttccttgcctt

SEQ ID NO: 753637 - DNA, 15 bp, Homo sapiens
atcttccttgcctta

SEQ ID NO: 753638 - DNA, 15 bp, Homo sapiens
tcttccttgccttag

SEQ ID NO: 753639 - DNA, 15 bp, Homo sapiens
cttccttgccttaga

SEQ ID NO: 753640 - DNA, 15 bp, Homo sapiens
ttccttgccttagaa

SEQ ID NO: 753641 - DNA, 15 bp, Homo sapiens
tccttgccttagaaa

SEQ ID NO: 753642 - DNA, 15 bp, Homo sapiens
ccttgccttagaaag

SEQ ID NO: 753643 - DNA, 15 bp, Homo sapiens
cttgccttagaaaga

SEQ ID NO: 753644 - DNA, 15 bp, Homo sapiens
ttgccttagaaagat

SEQ ID NO: 753645 - DNA, 15 bp, Homo sapiens
tgccttagaaagatc

SEQ ID NO: 753646 - DNA, 15 bp, Homo sapiens
gccttagaaagatca

SEQ ID NO: 753647 - DNA, 15 bp, Homo sapiens
ccttagaaagatcaa

SEQ ID NO: 753648 - DNA, 15 bp, Homo sapiens
cttagaaagatcaat

SEQ ID NO: 753649 - DNA, 15 bp, Homo sapiens
ttagaaagatcaatt

SEQ ID NO: 753650 - DNA, 15 bp, Homo sapiens
tagaaagatcaattc

SEQ ID NO: 753651 - DNA, 15 bp, Homo sapiens
agaaagatcaattcc

SEQ ID NO: 753652 - DNA, 15 bp, Homo sapiens
gaaagatcaattcct

SEQ ID NO: 753653 - DNA, 15 bp, Homo sapiens
aaagatcaattcctt

SEQ ID NO: 753654 - DNA, 15 bp, Homo sapiens
aagatcaattccttg

SEQ ID NO: 753655 - DNA, 15 bp, Homo sapiens
agatcaattccttgt

SEQ ID NO: 753656 - DNA, 15 bp, Homo sapiens
gatcaattccttgtg

SEQ ID NO: 753657 - DNA, 15 bp, Homo sapiens
atcaattccttgtgc

SEQ ID NO: 753658 - DNA, 15 bp, Homo sapiens
tcaattccttgtgcc

SEQ ID NO: 753659 - DNA, 15 bp, Homo sapiens
caattccttgtgcct

SEQ ID NO: 753660 - DNA, 15 bp, Homo sapiens
aattccttgtgcctc

SEQ ID NO: 753661 - DNA, 15 bp, Homo sapiens
attccttgtgcctct

SEQ ID NO: 753662 - DNA, 15 bp, Homo sapiens
ttccttgtgcctctc

SEQ ID NO: 753663 - DNA, 15 bp, Homo sapiens
tccttgtgcctctcc

SEQ ID NO: 753664 - DNA, 15 bp, Homo sapiens
ccttgtgcctctcca

SEQ ID NO: 753665 - DNA, 15 bp, Homo sapiens
cttgtgcctctccac

SEQ ID NO: 753666 - DNA, 15 bp, Homo sapiens
ttgtgcctctccacc

SEQ ID NO: 753667 - DNA, 15 bp, Homo sapiens
tgtgcctctccacct

SEQ ID NO: 753668 - DNA, 15 bp, Homo sapiens
gtgcctctccacctc

SEQ ID NO: 753669 - DNA, 15 bp, Homo sapiens
tgcctctccacctcc

SEQ ID NO: 753670 - DNA, 15 bp, Homo sapiens
gcctctccacctccg

SEQ ID NO: 753671 - DNA, 15 bp, Homo sapiens
cctctccacctccgt

SEQ ID NO: 753672 - DNA, 15 bp, Homo sapiens
ctctccacctccgtg

SEQ ID NO: 753673 - DNA, 15 bp, Homo sapiens
tctccacctccgtgg

SEQ ID NO: 753674 - DNA, 15 bp, Homo sapiens
ctccacctccgtggc

SEQ ID NO: 753675 - DNA, 15 bp, Homo sapiens
tccacctccgtggcc

SEQ ID NO: 753676 - DNA, 15 bp, Homo sapiens
ccacctccgtggcct

SEQ ID NO: 753677 - DNA, 15 bp, Homo sapiens
cacctccgtggcctg

SEQ ID NO: 753678 - DNA, 15 bp, Homo sapiens
acctccgtggcctgg

SEQ ID NO: 753679 - DNA, 15 bp, Homo sapiens
cctccgtggcctgga

SEQ ID NO: 753680 - DNA, 15 bp, Homo sapiens
ctccgtggcctggaa

SEQ ID NO: 753681 - DNA, 15 bp, Homo sapiens
tccgtggcctggaaa

SEQ ID NO: 753682 - DNA, 15 bp, Homo sapiens
ccgtggcctggaaat

SEQ ID NO: 753683 - DNA, 15 bp, Homo sapiens
cgtggcctggaaata

SEQ ID NO: 753684 - DNA, 15 bp, Homo sapiens
gtggcctggaaatac

SEQ ID NO: 753685 - DNA, 15 bp, Homo sapiens
tggcctggaaataca

SEQ ID NO: 753686 - DNA, 15 bp, Homo sapiens
ggcctggaaatacat

SEQ ID NO: 753687 - DNA, 15 bp, Homo sapiens
gcctggaaatacatt

SEQ ID NO: 753688 - DNA, 15 bp, Homo sapiens
cctggaaatacatta

SEQ ID NO: 753689 - DNA, 15 bp, Homo sapiens
ctggaaatacattat

SEQ ID NO: 753690 - DNA, 15 bp, Homo sapiens
tggaaatacattatt

SEQ ID NO: 753691 - DNA, 15 bp, Homo sapiens
ggaaatacattatta

SEQ ID NO: 753692 - DNA, 15 bp, Homo sapiens
gaaatacattattat

SEQ ID NO: 753693 - DNA, 15 bp, Homo sapiens
aaatacattattata

SEQ ID NO: 753694 - DNA, 15 bp, Homo sapiens
aatacattattatat

SEQ ID NO: 753695 - DNA, 15 bp, Homo sapiens
atacattattatatt

SEQ ID NO: 753696 - DNA, 15 bp, Homo sapiens
tacattattatattt

SEQ ID NO: 753697 - DNA, 15 bp, Homo sapiens
acattattatatttc

SEQ ID NO: 753698 - DNA, 15 bp, Homo sapiens
cattattatatttca

SEQ ID NO: 753699 - DNA, 15 bp, Homo sapiens
attattatatttcaa

SEQ ID NO: 753700 - DNA, 15 bp, Homo sapiens
ttattatatttcaat

SEQ ID NO: 753701 - DNA, 15 bp, Homo sapiens
tattatatttcaata

SEQ ID NO: 753702 - DNA, 15 bp, Homo sapiens
attatatttcaatat

SEQ ID NO: 753703 - DNA, 15 bp, Homo sapiens
ttatatttcaatatg

SEQ ID NO: 753704 - DNA, 15 bp, Homo sapiens
tatatttcaatatgg

SEQ ID NO: 753705 - DNA, 15 bp, Homo sapiens
atatttcaatatggc

SEQ ID NO: 753706 - DNA, 15 bp, Homo sapiens
tatttcaatatggct

SEQ ID NO: 753707 - DNA, 15 bp, Homo sapiens
atttcaatatggctc

SEQ ID NO: 753708 - DNA, 15 bp, Homo sapiens
tttcaatatggctct

SEQ ID NO: 753709 - DNA, 15 bp, Homo sapiens
ttcaatatggctctc

SEQ ID NO: 753710 - DNA, 15 bp, Homo sapiens
tcaatatggctctct

SEQ ID NO: 753711 - DNA, 15 bp, Homo sapiens
caatatggctctctt

SEQ ID NO: 753712 - DNA, 15 bp, Homo sapiens
aatatggctctcttt

SEQ ID NO: 753713 - DNA, 15 bp, Homo sapiens
atatggctctctttc

SEQ ID NO: 753714 - DNA, 15 bp, Homo sapiens
tatggctctctttct

SEQ ID NO: 753715 - DNA, 15 bp, Homo sapiens
atggctctctttcta

SEQ ID NO: 753716 - DNA, 15 bp, Homo sapiens
tggctctctttctag

SEQ ID NO: 753717 - DNA, 15 bp, Homo sapiens
ggctctctttctagg

SEQ ID NO: 753718 - DNA, 15 bp, Homo sapiens
gctctctttctaggc

SEQ ID NO: 753719 - DNA, 15 bp, Homo sapiens
ctctctttctaggcc

SEQ ID NO: 753720 - DNA, 15 bp, Homo sapiens
tctctttctaggcca

SEQ ID NO: 753721 - DNA, 15 bp, Homo sapiens
ctctttctaggccat

SEQ ID NO: 753722 - DNA, 15 bp, Homo sapiens
tctttctaggccatt

SEQ ID NO: 753723 - DNA, 15 bp, Homo sapiens
ctttctaggccattg

SEQ ID NO: 753724 - DNA, 15 bp, Homo sapiens
tttctaggccattgc

SEQ ID NO: 753725 - DNA, 15 bp, Homo sapiens
ttctaggccattgcg

SEQ ID NO: 753726 - DNA, 15 bp, Homo sapiens
tctaggccattgcgc

SEQ ID NO: 753727 - DNA, 15 bp, Homo sapiens
ctaggccattgcgca

SEQ ID NO: 753728 - DNA, 15 bp, Homo sapiens
taggccattgcgcat

SEQ ID NO: 753729 - DNA, 15 bp, Homo sapiens
aggccattgcgcatt

SEQ ID NO: 753730 - DNA, 15 bp, Homo sapiens
ggccattgcgcattg

SEQ ID NO: 753731 - DNA, 15 bp, Homo sapiens
gccattgcgcattgt

SEQ ID NO: 753732 - DNA, 15 bp, Homo sapiens
ccattgcgcattgtg

SEQ ID NO: 753733 - DNA, 15 bp, Homo sapiens
cattgcgcattgtgg

SEQ ID NO: 753734 - DNA, 15 bp, Homo sapiens
attgcgcattgtggc

SEQ ID NO: 753735 - DNA, 15 bp, Homo sapiens
ttgcgcattgtggcc

SEQ ID NO: 753736 - DNA, 15 bp, Homo sapiens
tgcgcattgtggccg

SEQ ID NO: 753737 - DNA, 15 bp, Homo sapiens
gcgcattgtggccgt

SEQ ID NO: 753738 - DNA, 15 bp, Homo sapiens
cgcattgtggccgtg

SEQ ID NO: 753739 - DNA, 15 bp, Homo sapiens
gcattgtggccgtgt

SEQ ID NO: 753740 - DNA, 15 bp, Homo sapiens
cattgtggccgtgtg

SEQ ID NO: 753741 - DNA, 15 bp, Homo sapiens
attgtggccgtgtgc

SEQ ID NO: 753742 - DNA, 15 bp, Homo sapiens
ttgtggccgtgtgcc

SEQ ID NO: 753743 - DNA, 15 bp, Homo sapiens
tgtggccgtgtgcct

SEQ ID NO: 753744 - DNA, 15 bp, Homo sapiens
gtggccgtgtgcctg

SEQ ID NO: 753745 - DNA, 15 bp, Homo sapiens
tggccgtgtgcctgc

SEQ ID NO: 753746 - DNA, 15 bp, Homo sapiens
ggccgtgtgcctgcc

SEQ ID NO: 753747 - DNA, 15 bp, Homo sapiens
gccgtgtgcctgcca

SEQ ID NO: 753748 - DNA, 15 bp, Homo sapiens
ccgtgtgcctgccaa

SEQ ID NO: 753749 - DNA, 15 bp, Homo sapiens
cgtgtgcctgccaaa

SEQ ID NO: 753750 - DNA, 15 bp, Homo sapiens
gtgtgcctgccaaac

SEQ ID NO: 753751 - DNA, 15 bp, Homo sapiens
tgtgcctgccaaacc

SEQ ID NO: 753752 - DNA, 15 bp, Homo sapiens
gtgcctgccaaaccc

SEQ ID NO: 753753 - DNA, 15 bp, Homo sapiens
tgcctgccaaacccc

SEQ ID NO: 753754 - DNA, 15 bp, Homo sapiens
gcctgccaaaccccg

SEQ ID NO: 753755 - DNA, 15 bp, Homo sapiens
cctgccaaaccccgt

SEQ ID NO: 753756 - DNA, 15 bp, Homo sapiens
ctgccaaaccccgtg

SEQ ID NO: 753757 - DNA, 15 bp, Homo sapiens
tgccaaaccccgtgc

SEQ ID NO: 753758 - DNA, 15 bp, Homo sapiens
gccaaaccccgtgca

SEQ ID NO: 753759 - DNA, 15 bp, Homo sapiens
ccaaaccccgtgcat

SEQ ID NO: 753760 - DNA, 15 bp, Homo sapiens
caaaccccgtgcatg

SEQ ID NO: 753761 - DNA, 15 bp, Homo sapiens
aaaccccgtgcatgg

SEQ ID NO: 753762 - DNA, 15 bp, Homo sapiens
aaccccgtgcatgga

SEQ ID NO: 753763 - DNA, 15 bp, Homo sapiens
accccgtgcatggaa

SEQ ID NO: 753764 - DNA, 15 bp, Homo sapiens
ccccgtgcatggaat

SEQ ID NO: 753765 - DNA, 15 bp, Homo sapiens
cccgtgcatggaata

SEQ ID NO: 753766 - DNA, 15 bp, Homo sapiens
ccgtgcatggaatat

SEQ ID NO: 753767 - DNA, 15 bp, Homo sapiens
cgtgcatggaatatt

SEQ ID NO: 753768 - DNA, 15 bp, Homo sapiens
gtgcatggaatattt

SEQ ID NO: 753769 - DNA, 15 bp, Homo sapiens
tgcatggaatatttg

SEQ ID NO: 753770 - DNA, 15 bp, Homo sapiens
gcatggaatatttgg

SEQ ID NO: 753771 - DNA, 15 bp, Homo sapiens
catggaatatttgga

SEQ ID NO: 753772 - DNA, 15 bp, Homo sapiens
atggaatatttggaa

SEQ ID NO: 753773 - DNA, 15 bp, Homo sapiens
tggaatatttggaag

SEQ ID NO: 753774 - DNA, 15 bp, Homo sapiens
ggaatatttggaagc

SEQ ID NO: 753775 - DNA, 15 bp, Homo sapiens
gaatatttggaagca

SEQ ID NO: 753776 - DNA, 15 bp, Homo sapiens
aatatttggaagcag

SEQ ID NO: 753777 - DNA, 15 bp, Homo sapiens
atatttggaagcagg

SEQ ID NO: 753778 - DNA, 15 bp, Homo sapiens
tatttggaagcagga

SEQ ID NO: 753779 - DNA, 15 bp, Homo sapiens
atttggaagcaggag

SEQ ID NO: 753780 - DNA, 15 bp, Homo sapiens
tttggaagcaggaga

SEQ ID NO: 753781 - DNA, 15 bp, Homo sapiens
ttggaagcaggagac

SEQ ID NO: 753782 - DNA, 15 bp, Homo sapiens
tggaagcaggagaca

SEQ ID NO: 753783 - DNA, 15 bp, Homo sapiens
ggaagcaggagacaa

SEQ ID NO: 753784 - DNA, 15 bp, Homo sapiens
gaagcaggagacaaa

SEQ ID NO: 753785 - DNA, 15 bp, Homo sapiens
aagcaggagacaaat

SEQ ID NO: 753786 - DNA, 15 bp, Homo sapiens
agcaggagacaaatt

SEQ ID NO: 753787 - DNA, 15 bp, Homo sapiens
gcaggagacaaattg

SEQ ID NO: 753788 - DNA, 15 bp, Homo sapiens
caggagacaaattgg

SEQ ID NO: 753789 - DNA, 15 bp, Homo sapiens
aggagacaaattggt

SEQ ID NO: 753790 - DNA, 15 bp, Homo sapiens
ggagacaaattggtt

SEQ ID NO: 753791 - DNA, 15 bp, Homo sapiens
gagacaaattggtta

SEQ ID NO: 753792 - DNA, 15 bp, Homo sapiens
agacaaattggttag

SEQ ID NO: 753793 - DNA, 15 bp, Homo sapiens
gacaaattggttagt

SEQ ID NO: 753794 - DNA, 15 bp, Homo sapiens
acaaattggttagtt

SEQ ID NO: 753795 - DNA, 15 bp, Homo sapiens
caaattggttagtta

SEQ ID NO: 753796 - DNA, 15 bp, Homo sapiens
aaattggttagttag

SEQ ID NO: 753797 - DNA, 15 bp, Homo sapiens
aattggttagttagc

SEQ ID NO: 753798 - DNA, 15 bp, Homo sapiens
attggttagttagca

SEQ ID NO: 753799 - DNA, 15 bp, Homo sapiens
ttggttagttagcaa

SEQ ID NO: 753800 - DNA, 15 bp, Homo sapiens
tggttagttagcaaa

SEQ ID NO: 753801 - DNA, 15 bp, Homo sapiens
ggttagttagcaaat

SEQ ID NO: 753802 - DNA, 15 bp, Homo sapiens
gttagttagcaaatc

SEQ ID NO: 753803 - DNA, 15 bp, Homo sapiens
ttagttagcaaatct

SEQ ID NO: 753804 - DNA, 15 bp, Homo sapiens
tagttagcaaatctt

SEQ ID NO: 753805 - DNA, 15 bp, Homo sapiens
agttagcaaatcttt

SEQ ID NO: 753806 - DNA, 15 bp, Homo sapiens
gttagcaaatcttta

SEQ ID NO: 753807 - DNA, 15 bp, Homo sapiens
ttagcaaatctttat

SEQ ID NO: 753808 - DNA, 15 bp, Homo sapiens
tagcaaatctttatt

SEQ ID NO: 753809 - DNA, 15 bp, Homo sapiens
agcaaatctttatta

SEQ ID NO: 753810 - DNA, 15 bp, Homo sapiens
gcaaatctttattag

SEQ ID NO: 753811 - DNA, 15 bp, Homo sapiens
caaatctttattagc

SEQ ID NO: 753812 - DNA, 15 bp, Homo sapiens
aaatctttattagca

SEQ ID NO: 753813 - DNA, 15 bp, Homo sapiens
aatctttattagcat

SEQ ID NO: 753814 - DNA, 15 bp, Homo sapiens
atctttattagcatg

SEQ ID NO: 753815 - DNA, 15 bp, Homo sapiens
tctttattagcatgg

SEQ ID NO: 753816 - DNA, 15 bp, Homo sapiens
ctttattagcatggc

SEQ ID NO: 753817 - DNA, 15 bp, Homo sapiens
tttattagcatggct

SEQ ID NO: 753818 - DNA, 15 bp, Homo sapiens
ttattagcatggctg

SEQ ID NO: 753819 - DNA, 15 bp, Homo sapiens
tattagcatggctgg

SEQ ID NO: 753820 - DNA, 15 bp, Homo sapiens
attagcatggctggc

SEQ ID NO: 753821 - DNA, 15 bp, Homo sapiens
ttagcatggctggcc

SEQ ID NO: 753822 - DNA, 15 bp, Homo sapiens
tagcatggctggcct

SEQ ID NO: 753823 - DNA, 15 bp, Homo sapiens
agcatggctggcctt

SEQ ID NO: 753824 - DNA, 15 bp, Homo sapiens
gcatggctggccttt

SEQ ID NO: 753825 - DNA, 15 bp, Homo sapiens
catggctggcctttt

SEQ ID NO: 753826 - DNA, 15 bp, Homo sapiens
atggctggccttttc

SEQ ID NO: 753827 - DNA, 15 bp, Homo sapiens
tggctggccttttcc

SEQ ID NO: 753828 - DNA, 15 bp, Homo sapiens
ggctggccttttccc

SEQ ID NO: 753829 - DNA, 15 bp, Homo sapiens
gctggccttttcccg

SEQ ID NO: 753830 - DNA, 15 bp, Homo sapiens
ctggccttttcccgg

SEQ ID NO: 753831 - DNA, 15 bp, Homo sapiens
tggccttttcccggg

SEQ ID NO: 753832 - DNA, 15 bp, Homo sapiens
ggccttttcccgggg

SEQ ID NO: 753833 - DNA, 15 bp, Homo sapiens
gccttttcccgggga

SEQ ID NO: 753834 - DNA, 15 bp, Homo sapiens
ccttttcccggggat

SEQ ID NO: 753835 - DNA, 15 bp, Homo sapiens
cttttcccggggata

SEQ ID NO: 753836 - DNA, 15 bp, Homo sapiens
ttttcccggggatat

SEQ ID NO: 753837 - DNA, 15 bp, Homo sapiens
tttcccggggatatg

SEQ ID NO: 753838 - DNA, 15 bp, Homo sapiens
ttcccggggatatgg

SEQ ID NO: 753839 - DNA, 15 bp, Homo sapiens
tcccggggatatggg

SEQ ID NO: 753840 - DNA, 15 bp, Homo sapiens
cccggggatatgggg

SEQ ID NO: 753841 - DNA, 15 bp, Homo sapiens
ccggggatatggggt

SEQ ID NO: 753842 - DNA, 15 bp, Homo sapiens
cggggatatggggtc

SEQ ID NO: 753843 - DNA, 15 bp, Homo sapiens
ggggatatggggtca

SEQ ID NO: 753844 - DNA, 15 bp, Homo sapiens
gggatatggggtcat

SEQ ID NO: 753845 - DNA, 15 bp, Homo sapiens
ggatatggggtcatg

SEQ ID NO: 753846 - DNA, 15 bp, Homo sapiens
gatatggggtcatgt

SEQ ID NO: 753847 - DNA, 15 bp, Homo sapiens
atatggggtcatgta

SEQ ID NO: 753848 - DNA, 15 bp, Homo sapiens
tatggggtcatgtaa

SEQ ID NO: 753849 - DNA, 15 bp, Homo sapiens
atggggtcatgtaag

SEQ ID NO: 753850 - DNA, 15 bp, Homo sapiens
tggggtcatgtaaga

SEQ ID NO: 753851 - DNA, 15 bp, Homo sapiens
ggggtcatgtaagac

SEQ ID NO: 753852 - DNA, 15 bp, Homo sapiens
gggtcatgtaagaca

SEQ ID NO: 753853 - DNA, 15 bp, Homo sapiens
ggtcatgtaagacat

SEQ ID NO: 753854 - DNA, 15 bp, Homo sapiens
gtcatgtaagacatc

SEQ ID NO: 753855 - DNA, 15 bp, Homo sapiens
tcatgtaagacatca

SEQ ID NO: 753856 - DNA, 15 bp, Homo sapiens
catgtaagacatcat

SEQ ID NO: 753857 - DNA, 15 bp, Homo sapiens
atgtaagacatcatt

SEQ ID NO: 753858 - DNA, 15 bp, Homo sapiens
tgtaagacatcattt

SEQ ID NO: 753859 - DNA, 15 bp, Homo sapiens
gtaagacatcatttc

SEQ ID NO: 753860 - DNA, 15 bp, Homo sapiens
taagacatcatttcc

SEQ ID NO: 753861 - DNA, 15 bp, Homo sapiens
aagacatcatttcct

SEQ ID NO: 753862 - DNA, 15 bp, Homo sapiens
agacatcatttcctc

SEQ ID NO: 753863 - DNA, 15 bp, Homo sapiens
gacatcatttcctct

SEQ ID NO: 753864 - DNA, 15 bp, Homo sapiens
acatcatttcctctc

SEQ ID NO: 753865 - DNA, 15 bp, Homo sapiens
catcatttcctctct

SEQ ID NO: 753866 - DNA, 15 bp, Homo sapiens
atcatttcctctctg

SEQ ID NO: 753867 - DNA, 15 bp, Homo sapiens
tcatttcctctctgg

SEQ ID NO: 753868 - DNA, 15 bp, Homo sapiens
catttcctctctggc

SEQ ID NO: 753869 - DNA, 15 bp, Homo sapiens
atttcctctctggca

SEQ ID NO: 753870 - DNA, 15 bp, Homo sapiens
tttcctctctggcaa

SEQ ID NO: 753871 - DNA, 15 bp, Homo sapiens
ttcctctctggcaat

SEQ ID NO: 753872 - DNA, 15 bp, Homo sapiens
tcctctctggcaata

SEQ ID NO: 753873 - DNA, 15 bp, Homo sapiens
cctctctggcaatac

SEQ ID NO: 753874 - DNA, 15 bp, Homo sapiens
ctctctggcaatacc

SEQ ID NO: 753875 - DNA, 15 bp, Homo sapiens
tctctggcaataccg

SEQ ID NO: 753876 - DNA, 15 bp, Homo sapiens
ctctggcaataccgg

SEQ ID NO: 753877 - DNA, 15 bp, Homo sapiens
tctggcaataccggt

SEQ ID NO: 753878 - DNA, 15 bp, Homo sapiens
ctggcaataccggta

SEQ ID NO: 753879 - DNA, 15 bp, Homo sapiens
tggcaataccggtaa

SEQ ID NO: 753880 - DNA, 15 bp, Homo sapiens
ggcaataccggtaac

SEQ ID NO: 753881 - DNA, 15 bp, Homo sapiens
gcaataccggtaacc

SEQ ID NO: 753882 - DNA, 15 bp, Homo sapiens
caataccggtaacca

SEQ ID NO: 753883 - DNA, 15 bp, Homo sapiens
aataccggtaaccac

SEQ ID NO: 753884 - DNA, 15 bp, Homo sapiens
ataccggtaaccaca

SEQ ID NO: 753885 - DNA, 15 bp, Homo sapiens
taccggtaaccacat

SEQ ID NO: 753886 - DNA, 15 bp, Homo sapiens
accggtaaccacatt

SEQ ID NO: 753887 - DNA, 15 bp, Homo sapiens
ccggtaaccacattg

SEQ ID NO: 753888 - DNA, 15 bp, Homo sapiens
cggtaaccacattgc

SEQ ID NO: 753889 - DNA, 15 bp, Homo sapiens
ggtaaccacattgca

SEQ ID NO: 753890 - DNA, 15 bp, Homo sapiens
gtaaccacattgcat

SEQ ID NO: 753891 - DNA, 15 bp, Homo sapiens
taaccacattgcatg

SEQ ID NO: 753892 - DNA, 15 bp, Homo sapiens
aaccacattgcatga

SEQ ID NO: 753893 - DNA, 15 bp, Homo sapiens
accacattgcatgat

SEQ ID NO: 753894 - DNA, 15 bp, Homo sapiens
ccacattgcatgatt

SEQ ID NO: 753895 - DNA, 15 bp, Homo sapiens
cacattgcatgattc

SEQ ID NO: 753896 - DNA, 15 bp, Homo sapiens
acattgcatgattcc

SEQ ID NO: 753897 - DNA, 15 bp, Homo sapiens
cattgcatgattcca

SEQ ID NO: 753898 - DNA, 15 bp, Homo sapiens
attgcatgattccag

SEQ ID NO: 753899 - DNA, 15 bp, Homo sapiens
ttgcatgattccagg

SEQ ID NO: 753900 - DNA, 15 bp, Homo sapiens
tgcatgattccaggg

SEQ ID NO: 753901 - DNA, 15 bp, Homo sapiens
gcatgattccagggc

SEQ ID NO: 753902 - DNA, 15 bp, Homo sapiens
catgattccagggcg

SEQ ID NO: 753903 - DNA, 15 bp, Homo sapiens
atgattccagggcgc

SEQ ID NO: 753904 - DNA, 15 bp, Homo sapiens
tgattccagggcgcc

SEQ ID NO: 753905 - DNA, 15 bp, Homo sapiens
gattccagggcgcca

SEQ ID NO: 753906 - DNA, 15 bp, Homo sapiens
attccagggcgccac

SEQ ID NO: 753907 - DNA, 15 bp, Homo sapiens
ttccagggcgccact

SEQ ID NO: 753908 - DNA, 15 bp, Homo sapiens
tccagggcgccactc

SEQ ID NO: 753909 - DNA, 15 bp, Homo sapiens
ccagggcgccactca

SEQ ID NO: 753910 - DNA, 15 bp, Homo sapiens
cagggcgccactcac

SEQ ID NO: 753911 - DNA, 15 bp, Homo sapiens
agggcgccactcaca

SEQ ID NO: 753912 - DNA, 15 bp, Homo sapiens
gggcgccactcacat

SEQ ID NO: 753913 - DNA, 15 bp, Homo sapiens
ggcgccactcacatc

SEQ ID NO: 753914 - DNA, 15 bp, Homo sapiens
gcgccactcacatcc

SEQ ID NO: 753915 - DNA, 15 bp, Homo sapiens
cgccactcacatcct

SEQ ID NO: 753916 - DNA, 15 bp, Homo sapiens
gccactcacatcctg

SEQ ID NO: 753917 - DNA, 15 bp, Homo sapiens
ccactcacatcctgg

SEQ ID NO: 753918 - DNA, 15 bp, Homo sapiens
cactcacatcctggt

SEQ ID NO: 753919 - DNA, 15 bp, Homo sapiens
actcacatcctggtc

SEQ ID NO: 753920 - DNA, 15 bp, Homo sapiens
ctcacatcctggtca

SEQ ID NO: 753921 - DNA, 15 bp, Homo sapiens
tcacatcctggtcat

SEQ ID NO: 753922 - DNA, 15 bp, Homo sapiens
cacatcctggtcatg

SEQ ID NO: 753923 - DNA, 15 bp, Homo sapiens
acatcctggtcatga

SEQ ID NO: 753924 - DNA, 15 bp, Homo sapiens
catcctggtcatgaa

SEQ ID NO: 753925 - DNA, 15 bp, Homo sapiens
atcctggtcatgaat

SEQ ID NO: 753926 - DNA, 15 bp, Homo sapiens
tcctggtcatgaatg

SEQ ID NO: 753927 - DNA, 15 bp, Homo sapiens
cctggtcatgaatga

SEQ ID NO: 753928 - DNA, 15 bp, Homo sapiens
ctggtcatgaatgaa

SEQ ID NO: 753929 - DNA, 15 bp, Homo sapiens
tggtcatgaatgaag

SEQ ID NO: 753930 - DNA, 15 bp, Homo sapiens
ggtcatgaatgaagc

SEQ ID NO: 753931 - DNA, 15 bp, Homo sapiens
gtcatgaatgaagcc

SEQ ID NO: 753932 - DNA, 15 bp, Homo sapiens
tcatgaatgaagccc

SEQ ID NO: 753933 - DNA, 15 bp, Homo sapiens
catgaatgaagccct

SEQ ID NO: 753934 - DNA, 15 bp, Homo sapiens
atgaatgaagccctc

SEQ ID NO: 753935 - DNA, 15 bp, Homo sapiens
tgaatgaagccctct

SEQ ID NO: 753936 - DNA, 15 bp, Homo sapiens
gaatgaagccctctg

SEQ ID NO: 753937 - DNA, 15 bp, Homo sapiens
aatgaagccctctgg

SEQ ID NO: 753938 - DNA, 15 bp, Homo sapiens
atgaagccctctgga

SEQ ID NO: 753939 - DNA, 15 bp, Homo sapiens
tgaagccctctggag

SEQ ID NO: 753940 - DNA, 15 bp, Homo sapiens
gaagccctctggagt

SEQ ID NO: 753941 - DNA, 15 bp, Homo sapiens
aagccctctggagtt

SEQ ID NO: 753942 - DNA, 15 bp, Homo sapiens
agccctctggagttg

SEQ ID NO: 753943 - DNA, 15 bp, Homo sapiens
gccctctggagttgt

SEQ ID NO: 753944 - DNA, 15 bp, Homo sapiens
ccctctggagttgtg

SEQ ID NO: 753945 - DNA, 15 bp, Homo sapiens
cctctggagttgtgc

SEQ ID NO: 753946 - DNA, 15 bp, Homo sapiens
ctctggagttgtgca

SEQ ID NO: 753947 - DNA, 15 bp, Homo sapiens
tctggagttgtgcag

SEQ ID NO: 753948 - DNA, 15 bp, Homo sapiens
ctggagttgtgcagt

SEQ ID NO: 753949 - DNA, 15 bp, Homo sapiens
tggagttgtgcagtg

SEQ ID NO: 753950 - DNA, 15 bp, Homo sapiens
ggagttgtgcagtgc

SEQ ID NO: 753951 - DNA, 15 bp, Homo sapiens
gagttgtgcagtgca

SEQ ID NO: 753952 - DNA, 15 bp, Homo sapiens
agttgtgcagtgcac

SEQ ID NO: 753953 - DNA, 15 bp, Homo sapiens
gttgtgcagtgcaca

SEQ ID NO: 753954 - DNA, 15 bp, Homo sapiens
ttgtgcagtgcacag

SEQ ID NO: 753955 - DNA, 15 bp, Homo sapiens
tgtgcagtgcacagc

SEQ ID NO: 753956 - DNA, 15 bp, Homo sapiens
gtgcagtgcacagcc

SEQ ID NO: 753957 - DNA, 15 bp, Homo sapiens
tgcagtgcacagcct

SEQ ID NO: 753958 - DNA, 15 bp, Homo sapiens
gcagtgcacagcctg

SEQ ID NO: 753959 - DNA, 15 bp, Homo sapiens
cagtgcacagcctgc

SEQ ID NO: 753960 - DNA, 15 bp, Homo sapiens
agtgcacagcctgca

SEQ ID NO: 753961 - DNA, 15 bp, Homo sapiens
gtgcacagcctgcat

SEQ ID NO: 753962 - DNA, 15 bp, Homo sapiens
tgcacagcctgcatg

SEQ ID NO: 753963 - DNA, 15 bp, Homo sapiens
gcacagcctgcatgc

SEQ ID NO: 753964 - DNA, 15 bp, Homo sapiens
cacagcctgcatgcc

SEQ ID NO: 753965 - DNA, 15 bp, Homo sapiens
acagcctgcatgccc

SEQ ID NO: 753966 - DNA, 15 bp, Homo sapiens
cagcctgcatgccca

SEQ ID NO: 753967 - DNA, 15 bp, Homo sapiens
agcctgcatgcccat

SEQ ID NO: 753968 - DNA, 15 bp, Homo sapiens
gcctgcatgcccata

SEQ ID NO: 753969 - DNA, 15 bp, Homo sapiens
cctgcatgcccatat

SEQ ID NO: 753970 - DNA, 15 bp, Homo sapiens
ctgcatgcccatata

SEQ ID NO: 753971 - DNA, 15 bp, Homo sapiens
tgcatgcccatatac

SEQ ID NO: 753972 - DNA, 15 bp, Homo sapiens
gcatgcccatataca

SEQ ID NO: 753973 - DNA, 15 bp, Homo sapiens
catgcccatatacat

SEQ ID NO: 753974 - DNA, 15 bp, Homo sapiens
atgcccatatacatt

SEQ ID NO: 753975 - DNA, 15 bp, Homo sapiens
tgcccatatacattg

SEQ ID NO: 753976 - DNA, 15 bp, Homo sapiens
gcccatatacattgt

SEQ ID NO: 753977 - DNA, 15 bp, Homo sapiens
cccatatacattgtc

SEQ ID NO: 753978 - DNA, 15 bp, Homo sapiens
ccatatacattgtct

SEQ ID NO: 753979 - DNA, 15 bp, Homo sapiens
catatacattgtctt

SEQ ID NO: 753980 - DNA, 15 bp, Homo sapiens
atatacattgtcttt

SEQ ID NO: 753981 - DNA, 15 bp, Homo sapiens
tatacattgtctttt

SEQ ID NO: 753982 - DNA, 15 bp, Homo sapiens
atacattgtcttttc

SEQ ID NO: 753983 - DNA, 15 bp, Homo sapiens
tacattgtcttttct

SEQ ID NO: 753984 - DNA, 15 bp, Homo sapiens
acattgtcttttcta

SEQ ID NO: 753985 - DNA, 15 bp, Homo sapiens
cattgtcttttctag

SEQ ID NO: 753986 - DNA, 15 bp, Homo sapiens
attgtcttttctagg

SEQ ID NO: 753987 - DNA, 15 bp, Homo sapiens
ttgtcttttctaggc

SEQ ID NO: 753988 - DNA, 15 bp, Homo sapiens
tgtcttttctaggca

SEQ ID NO: 753989 - DNA, 15 bp, Homo sapiens
gtcttttctaggcat

SEQ ID NO: 753990 - DNA, 15 bp, Homo sapiens
tcttttctaggcatc

SEQ ID NO: 753991 - DNA, 15 bp, Homo sapiens
cttttctaggcatct

SEQ ID NO: 753992 - DNA, 15 bp, Homo sapiens
ttttctaggcatcta

SEQ ID NO: 753993 - DNA, 15 bp, Homo sapiens
tttctaggcatctag

SEQ ID NO: 753994 - DNA, 15 bp, Homo sapiens
ttctaggcatctagc

SEQ ID NO: 753995 - DNA, 15 bp, Homo sapiens
tctaggcatctagct

SEQ ID NO: 753996 - DNA, 15 bp, Homo sapiens
ctaggcatctagctg

SEQ ID NO: 753997 - DNA, 15 bp, Homo sapiens
taggcatctagctgt

SEQ ID NO: 753998 - DNA, 15 bp, Homo sapiens
aggcatctagctgtg

SEQ ID NO: 753999 - DNA, 15 bp, Homo sapiens
ggcatctagctgtgt

SEQ ID NO: 754000 - DNA, 15 bp, Homo sapiens
gcatctagctgtgtt

SEQ ID NO: 754001 - DNA, 15 bp, Homo sapiens
catctagctgtgttt

SEQ ID NO: 754002 - DNA, 15 bp, Homo sapiens
atctagctgtgtttg

SEQ ID NO: 754003 - DNA, 15 bp, Homo sapiens
tctagctgtgtttgt

SEQ ID NO: 754004 - DNA, 15 bp, Homo sapiens
ctagctgtgtttgtg

SEQ ID NO: 754005 - DNA, 15 bp, Homo sapiens
tagctgtgtttgtgt

SEQ ID NO: 754006 - DNA, 15 bp, Homo sapiens
agctgtgtttgtgta

SEQ ID NO: 754007 - DNA, 15 bp, Homo sapiens
gctgtgtttgtgtaa

SEQ ID NO: 754008 - DNA, 15 bp, Homo sapiens
ctgtgtttgtgtaaa

SEQ ID NO: 754009 - DNA, 15 bp, Homo sapiens
tgtgtttgtgtaaaa

SEQ ID NO: 754010 - DNA, 15 bp, Homo sapiens
gtgtttgtgtaaaac

SEQ ID NO: 754011 - DNA, 15 bp, Homo sapiens
tgtttgtgtaaaacc

SEQ ID NO: 754012 - DNA, 15 bp, Homo sapiens
gtttgtgtaaaaccc

SEQ ID NO: 754013 - DNA, 15 bp, Homo sapiens
tttgtgtaaaaccct

SEQ ID NO: 754014 - DNA, 15 bp, Homo sapiens
ttgtgtaaaaccctt

SEQ ID NO: 754015 - DNA, 15 bp, Homo sapiens
tgtgtaaaaccctta

SEQ ID NO: 754016 - DNA, 15 bp, Homo sapiens
gtgtaaaacccttac

SEQ ID NO: 754017 - DNA, 15 bp, Homo sapiens
tgtaaaacccttaca

SEQ ID NO: 754018 - DNA, 15 bp, Homo sapiens
gtaaaacccttacac

SEQ ID NO: 754019 - DNA, 15 bp, Homo sapiens
taaaacccttacaca

SEQ ID NO: 754020 - DNA, 15 bp, Homo sapiens
aaaacccttacacaa

SEQ ID NO: 754021 - DNA, 15 bp, Homo sapiens
aaacccttacacaac

SEQ ID NO: 754022 - DNA, 15 bp, Homo sapiens
aacccttacacaaca

SEQ ID NO: 754023 - DNA, 15 bp, Homo sapiens
acccttacacaacaa

SEQ ID NO: 754024 - DNA, 15 bp, Homo sapiens
cccttacacaacaaa

SEQ ID NO: 754025 - DNA, 15 bp, Homo sapiens
ccttacacaacaaat

SEQ ID NO: 754026 - DNA, 15 bp, Homo sapiens
cttacacaacaaatt

SEQ ID NO: 754027 - DNA, 15 bp, Homo sapiens
ttacacaacaaatta

SEQ ID NO: 754028 - DNA, 15 bp, Homo sapiens
tacacaacaaattaa

SEQ ID NO: 754029 - DNA, 15 bp, Homo sapiens
acacaacaaattaaa

SEQ ID NO: 754030 - DNA, 15 bp, Homo sapiens
cacaacaaattaaaa

SEQ ID NO: 754031 - DNA, 15 bp, Homo sapiens
acaacaaattaaaaa

SEQ ID NO: 754032 - DNA, 15 bp, Homo sapiens
caacaaattaaaaac

SEQ ID NO: 754033 - DNA, 15 bp, Homo sapiens
aacaaattaaaaaca

SEQ ID NO: 754034 - DNA, 15 bp, Homo sapiens
acaaattaaaaacac

SEQ ID NO: 754035 - DNA, 15 bp, Homo sapiens
caaattaaaaacaca

SEQ ID NO: 754036 - DNA, 15 bp, Homo sapiens
aaattaaaaacacag

SEQ ID NO: 754037 - DNA, 15 bp, Homo sapiens
aattaaaaacacagt

SEQ ID NO: 754038 - DNA, 15 bp, Homo sapiens
attaaaaacacagtg

SEQ ID NO: 754039 - DNA, 15 bp, Homo sapiens
ttaaaaacacagtgc

SEQ ID NO: 754040 - DNA, 15 bp, Homo sapiens
taaaaacacagtgca

SEQ ID NO: 754041 - DNA, 15 bp, Homo sapiens
aaaaacacagtgcaa

SEQ ID NO: 754042 - DNA, 15 bp, Homo sapiens
aaaacacagtgcaaa

SEQ ID NO: 754043 - DNA, 15 bp, Homo sapiens
aaacacagtgcaaag

SEQ ID NO: 754044 - DNA, 15 bp, Homo sapiens
aacacagtgcaaagc

SEQ ID NO: 754045 - DNA, 15 bp, Homo sapiens
acacagtgcaaagcc

SEQ ID NO: 754046 - DNA, 15 bp, Homo sapiens
cacagtgcaaagccc

SEQ ID NO: 754047 - DNA, 15 bp, Homo sapiens
acagtgcaaagccca

SEQ ID NO: 754048 - DNA, 15 bp, Homo sapiens
cagtgcaaagcccat

SEQ ID NO: 754049 - DNA, 15 bp, Homo sapiens
agtgcaaagcccata

SEQ ID NO: 754050 - DNA, 15 bp, Homo sapiens
gtgcaaagcccataa

SEQ ID NO: 754051 - DNA, 15 bp, Homo sapiens
tgcaaagcccataat

SEQ ID NO: 754052 - DNA, 15 bp, Homo sapiens
gcaaagcccataatt

SEQ ID NO: 754053 - DNA, 15 bp, Homo sapiens
caaagcccataattc

SEQ ID NO: 754054 - DNA, 15 bp, Homo sapiens
aaagcccataattct

SEQ ID NO: 754055 - DNA, 15 bp, Homo sapiens
aagcccataattctt

SEQ ID NO: 754056 - DNA, 15 bp, Homo sapiens
agcccataattctta

SEQ ID NO: 754057 - DNA, 15 bp, Homo sapiens
gcccataattcttaa

SEQ ID NO: 754058 - DNA, 15 bp, Homo sapiens
cccataattcttaat

SEQ ID NO: 754059 - DNA, 15 bp, Homo sapiens
ccataattcttaatg

SEQ ID NO: 754060 - DNA, 15 bp, Homo sapiens
cataattcttaatgg

SEQ ID NO: 754061 - DNA, 15 bp, Homo sapiens
ataattcttaatggc

SEQ ID NO: 754062 - DNA, 15 bp, Homo sapiens
taattcttaatggca

SEQ ID NO: 754063 - DNA, 15 bp, Homo sapiens
aattcttaatggcaa

SEQ ID NO: 754064 - DNA, 15 bp, Homo sapiens
attcttaatggcaat

SEQ ID NO: 754065 - DNA, 15 bp, Homo sapiens
ttcttaatggcaatg

SEQ ID NO: 754066 - DNA, 15 bp, Homo sapiens
tcttaatggcaatgt

SEQ ID NO: 754067 - DNA, 15 bp, Homo sapiens
cttaatggcaatgtg

SEQ ID NO: 754068 - DNA, 15 bp, Homo sapiens
ttaatggcaatgtga

SEQ ID NO: 754069 - DNA, 15 bp, Homo sapiens
taatggcaatgtgaa

SEQ ID NO: 754070 - DNA, 15 bp, Homo sapiens
aatggcaatgtgaat

SEQ ID NO: 754071 - DNA, 15 bp, Homo sapiens
atggcaatgtgaata

SEQ ID NO: 754072 - DNA, 15 bp, Homo sapiens
tggcaatgtgaataa

SEQ ID NO: 754073 - DNA, 15 bp, Homo sapiens
ggcaatgtgaataac

SEQ ID NO: 754074 - DNA, 15 bp, Homo sapiens
gcaatgtgaataaca

SEQ ID NO: 754075 - DNA, 15 bp, Homo sapiens
caatgtgaataacag

SEQ ID NO: 754076 - DNA, 15 bp, Homo sapiens
aatgtgaataacaga

SEQ ID NO: 754077 - DNA, 15 bp, Homo sapiens
atgtgaataacagaa

SEQ ID NO: 754078 - DNA, 15 bp, Homo sapiens
tgtgaataacagaaa

SEQ ID NO: 754079 - DNA, 15 bp, Homo sapiens
gtgaataacagaaac

SEQ ID NO: 754080 - DNA, 15 bp, Homo sapiens
tgaataacagaaaca

SEQ ID NO: 754081 - DNA, 15 bp, Homo sapiens
gaataacagaaacat

SEQ ID NO: 754082 - DNA, 15 bp, Homo sapiens
aataacagaaacatc

SEQ ID NO: 754083 - DNA, 15 bp, Homo sapiens
ataacagaaacatca

SEQ ID NO: 754084 - DNA, 15 bp, Homo sapiens
taacagaaacatcaa

SEQ ID NO: 754085 - DNA, 15 bp, Homo sapiens
aacagaaacatcaag

SEQ ID NO: 754086 - DNA, 15 bp, Homo sapiens
acagaaacatcaaga

SEQ ID NO: 754087 - DNA, 15 bp, Homo sapiens
cagaaacatcaagaa

SEQ ID NO: 754088 - DNA, 15 bp, Homo sapiens
agaaacatcaagaat

SEQ ID NO: 754089 - DNA, 15 bp, Homo sapiens
gaaacatcaagaatt

SEQ ID NO: 754090 - DNA, 15 bp, Homo sapiens
aaacatcaagaattt

SEQ ID NO: 754091 - DNA, 15 bp, Homo sapiens
aacatcaagaatttg

SEQ ID NO: 754092 - DNA, 15 bp, Homo sapiens
acatcaagaatttgg

SEQ ID NO: 754093 - DNA, 15 bp, Homo sapiens
catcaagaatttggg

SEQ ID NO: 754094 - DNA, 15 bp, Homo sapiens
atcaagaatttgggt

SEQ ID NO: 754095 - DNA, 15 bp, Homo sapiens
tcaagaatttgggtt

SEQ ID NO: 754096 - DNA, 15 bp, Homo sapiens
caagaatttgggttt

SEQ ID NO: 754097 - DNA, 15 bp, Homo sapiens
aagaatttgggtttc

SEQ ID NO: 754098 - DNA, 15 bp, Homo sapiens
agaatttgggtttcc

SEQ ID NO: 754099 - DNA, 15 bp, Homo sapiens
gaatttgggtttcca

SEQ ID NO: 754100 - DNA, 15 bp, Homo sapiens
aatttgggtttccaa

SEQ ID NO: 754101 - DNA, 15 bp, Homo sapiens
atttgggtttccaaa

SEQ ID NO: 754102 - DNA, 15 bp, Homo sapiens
tttgggtttccaaaa

SEQ ID NO: 754103 - DNA, 15 bp, Homo sapiens
ttgggtttccaaaaa

SEQ ID NO: 754104 - DNA, 15 bp, Homo sapiens
tgggtttccaaaaat

SEQ ID NO: 754105 - DNA, 15 bp, Homo sapiens
gggtttccaaaaatg

SEQ ID NO: 754106 - DNA, 15 bp, Homo sapiens
ggtttccaaaaatgg

SEQ ID NO: 754107 - DNA, 15 bp, Homo sapiens
gtttccaaaaatggg

SEQ ID NO: 754108 - DNA, 15 bp, Homo sapiens
tttccaaaaatgggg

SEQ ID NO: 754109 - DNA, 15 bp, Homo sapiens
ttccaaaaatgggga

SEQ ID NO: 754110 - DNA, 15 bp, Homo sapiens
tccaaaaatggggag

SEQ ID NO: 754111 - DNA, 15 bp, Homo sapiens
ccaaaaatggggaga

SEQ ID NO: 754112 - DNA, 15 bp, Homo sapiens
caaaaatggggagaa

SEQ ID NO: 754113 - DNA, 15 bp, Homo sapiens
aaaaatggggagaaa

SEQ ID NO: 754114 - DNA, 15 bp, Homo sapiens
aaaatggggagaaaa

SEQ ID NO: 754115 - DNA, 15 bp, Homo sapiens
aaatggggagaaaac

SEQ ID NO: 754116 - DNA, 15 bp, Homo sapiens
aatggggagaaaaca

SEQ ID NO: 754117 - DNA, 15 bp, Homo sapiens
atggggagaaaacag

SEQ ID NO: 754118 - DNA, 15 bp, Homo sapiens
tggggagaaaacaga

SEQ ID NO: 754119 - DNA, 15 bp, Homo sapiens
ggggagaaaacagaa

SEQ ID NO: 754120 - DNA, 15 bp, Homo sapiens
gggagaaaacagaac

SEQ ID NO: 754121 - DNA, 15 bp, Homo sapiens
ggagaaaacagaact

SEQ ID NO: 754122 - DNA, 15 bp, Homo sapiens
gagaaaacagaactg

SEQ ID NO: 754123 - DNA, 15 bp, Homo sapiens
agaaaacagaactgg

SEQ ID NO: 754124 - DNA, 15 bp, Homo sapiens
gaaaacagaactggc

SEQ ID NO: 754125 - DNA, 15 bp, Homo sapiens
aaaacagaactggcc

SEQ ID NO: 754126 - DNA, 15 bp, Homo sapiens
aaacagaactggccg

SEQ ID NO: 754127 - DNA, 15 bp, Homo sapiens
aacagaactggccgt

SEQ ID NO: 754128 - DNA, 15 bp, Homo sapiens
acagaactggccgta

SEQ ID NO: 754129 - DNA, 15 bp, Homo sapiens
cagaactggccgtag

SEQ ID NO: 754130 - DNA, 15 bp, Homo sapiens
agaactggccgtaga

SEQ ID NO: 754131 - DNA, 15 bp, Homo sapiens
gaactggccgtagag

SEQ ID NO: 754132 - DNA, 15 bp, Homo sapiens
aactggccgtagagg

SEQ ID NO: 754133 - DNA, 15 bp, Homo sapiens
actggccgtagaggg

SEQ ID NO: 754134 - DNA, 15 bp, Homo sapiens
ctggccgtagaggga

SEQ ID NO: 754135 - DNA, 15 bp, Homo sapiens
tggccgtagagggag

SEQ ID NO: 754136 - DNA, 15 bp, Homo sapiens
ggccgtagagggagt

SEQ ID NO: 754137 - DNA, 15 bp, Homo sapiens
gccgtagagggagtg

SEQ ID NO: 754138 - DNA, 15 bp, Homo sapiens
ccgtagagggagtgg

SEQ ID NO: 754139 - DNA, 15 bp, Homo sapiens
cgtagagggagtggc

SEQ ID NO: 754140 - DNA, 15 bp, Homo sapiens
gtagagggagtggcc

SEQ ID NO: 754141 - DNA, 15 bp, Homo sapiens
tagagggagtggcca

SEQ ID NO: 754142 - DNA, 15 bp, Homo sapiens
agagggagtggccag

SEQ ID NO: 754143 - DNA, 15 bp, Homo sapiens
gagggagtggccaga

SEQ ID NO: 754144 - DNA, 15 bp, Homo sapiens
agggagtggccagag

SEQ ID NO: 754145 - DNA, 15 bp, Homo sapiens
gggagtggccagaga

SEQ ID NO: 754146 - DNA, 15 bp, Homo sapiens
ggagtggccagagag

SEQ ID NO: 754147 - DNA, 15 bp, Homo sapiens
gagtggccagagaga

SEQ ID NO: 754148 - DNA, 15 bp, Homo sapiens
agtggccagagagaa

SEQ ID NO: 754149 - DNA, 15 bp, Homo sapiens
gtggccagagagaac

SEQ ID NO: 754150 - DNA, 15 bp, Homo sapiens
tggccagagagaacc

SEQ ID NO: 754151 - DNA, 15 bp, Homo sapiens
ggccagagagaaccc

SEQ ID NO: 754152 - DNA, 15 bp, Homo sapiens
gccagagagaaccca

SEQ ID NO: 754153 - DNA, 15 bp, Homo sapiens
ccagagagaacccac

SEQ ID NO: 754154 - DNA, 15 bp, Homo sapiens
cagagagaacccact

SEQ ID NO: 754155 - DNA, 15 bp, Homo sapiens
agagagaacccactg

SEQ ID NO: 754156 - DNA, 15 bp, Homo sapiens
gagagaacccactgg

SEQ ID NO: 754157 - DNA, 15 bp, Homo sapiens
agagaacccactggg

SEQ ID NO: 754158 - DNA, 15 bp, Homo sapiens
gagaacccactgggg

SEQ ID NO: 754159 - DNA, 15 bp, Homo sapiens
agaacccactgggga

SEQ ID NO: 754160 - DNA, 15 bp, Homo sapiens
gaacccactggggat

SEQ ID NO: 754161 - DNA, 15 bp, Homo sapiens
aacccactggggatg

SEQ ID NO: 754162 - DNA, 15 bp, Homo sapiens
acccactggggatgt

SEQ ID NO: 754163 - DNA, 15 bp, Homo sapiens
cccactggggatgtg

SEQ ID NO: 754164 - DNA, 15 bp, Homo sapiens
ccactggggatgtgg

SEQ ID NO: 754165 - DNA, 15 bp, Homo sapiens
cactggggatgtggg

SEQ ID NO: 754166 - DNA, 15 bp, Homo sapiens
actggggatgtgggg

SEQ ID NO: 754167 - DNA, 15 bp, Homo sapiens
ctggggatgtggggt

SEQ ID NO: 754168 - DNA, 15 bp, Homo sapiens
tggggatgtggggtt

SEQ ID NO: 754169 - DNA, 15 bp, Homo sapiens
ggggatgtggggtta

SEQ ID NO: 754170 - DNA, 15 bp, Homo sapiens
gggatgtggggttat

SEQ ID NO: 754171 - DNA, 15 bp, Homo sapiens
ggatgtggggttatg

SEQ ID NO: 754172 - DNA, 15 bp, Homo sapiens
gatgtggggttatga

SEQ ID NO: 754173 - DNA, 15 bp, Homo sapiens
atgtggggttatgac

SEQ ID NO: 754174 - DNA, 15 bp, Homo sapiens
tgtggggttatgacg

SEQ ID NO: 754175 - DNA, 15 bp, Homo sapiens
gtggggttatgacgg

SEQ ID NO: 754176 - DNA, 15 bp, Homo sapiens
tggggttatgacggc

SEQ ID NO: 754177 - DNA, 15 bp, Homo sapiens
ggggttatgacggca

SEQ ID NO: 754178 - DNA, 15 bp, Homo sapiens
gggttatgacggcag

SEQ ID NO: 754179 - DNA, 15 bp, Homo sapiens
ggttatgacggcagc

SEQ ID NO: 754180 - DNA, 15 bp, Homo sapiens
gttatgacggcagcc

SEQ ID NO: 754181 - DNA, 15 bp, Homo sapiens
ttatgacggcagccc

SEQ ID NO: 754182 - DNA, 15 bp, Homo sapiens
tatgacggcagcccc

SEQ ID NO: 754183 - DNA, 15 bp, Homo sapiens
atgacggcagcccca

SEQ ID NO: 754184 - DNA, 15 bp, Homo sapiens
tgacggcagccccag

SEQ ID NO: 754185 - DNA, 15 bp, Homo sapiens
gacggcagccccagc

SEQ ID NO: 754186 - DNA, 15 bp, Homo sapiens
acggcagccccagca

SEQ ID NO: 754187 - DNA, 15 bp, Homo sapiens
cggcagccccagcat

SEQ ID NO: 754188 - DNA, 15 bp, Homo sapiens
ggcagccccagcata

SEQ ID NO: 754189 - DNA, 15 bp, Homo sapiens
gcagccccagcatat

SEQ ID NO: 754190 - DNA, 15 bp, Homo sapiens
cagccccagcatatc

SEQ ID NO: 754191 - DNA, 15 bp, Homo sapiens
agccccagcatatcc

SEQ ID NO: 754192 - DNA, 15 bp, Homo sapiens
gccccagcatatcct

SEQ ID NO: 754193 - DNA, 15 bp, Homo sapiens
ccccagcatatcctc

SEQ ID NO: 754194 - DNA, 15 bp, Homo sapiens
cccagcatatcctcc

SEQ ID NO: 754195 - DNA, 15 bp, Homo sapiens
ccagcatatcctcca

SEQ ID NO: 754196 - DNA, 15 bp, Homo sapiens
cagcatatcctccaa

SEQ ID NO: 754197 - DNA, 15 bp, Homo sapiens
agcatatcctccaaa

SEQ ID NO: 754198 - DNA, 15 bp, Homo sapiens
gcatatcctccaaat

SEQ ID NO: 754199 - DNA, 15 bp, Homo sapiens
catatcctccaaatc

SEQ ID NO: 754200 - DNA, 15 bp, Homo sapiens
atatcctccaaatcc

SEQ ID NO: 754201 - DNA, 15 bp, Homo sapiens
tatcctccaaatcca

SEQ ID NO: 754202 - DNA, 15 bp, Homo sapiens
atcctccaaatccag

SEQ ID NO: 754203 - DNA, 15 bp, Homo sapiens
tcctccaaatccagc

SEQ ID NO: 754204 - DNA, 15 bp, Homo sapiens
cctccaaatccagcc

SEQ ID NO: 754205 - DNA, 15 bp, Homo sapiens
ctccaaatccagcct

SEQ ID NO: 754206 - DNA, 15 bp, Homo sapiens
tccaaatccagcctc

SEQ ID NO: 754207 - DNA, 15 bp, Homo sapiens
ccaaatccagcctct

SEQ ID NO: 754208 - DNA, 15 bp, Homo sapiens
caaatccagcctctg

SEQ ID NO: 754209 - DNA, 15 bp, Homo sapiens
aaatccagcctctgc

SEQ ID NO: 754210 - DNA, 15 bp, Homo sapiens
aatccagcctctgca

SEQ ID NO: 754211 - DNA, 15 bp, Homo sapiens
atccagcctctgcaa

SEQ ID NO: 754212 - DNA, 15 bp, Homo sapiens
tccagcctctgcaac

SEQ ID NO: 754213 - DNA, 15 bp, Homo sapiens
ccagcctctgcaaca

SEQ ID NO: 754214 - DNA, 15 bp, Homo sapiens
cagcctctgcaacag

SEQ ID NO: 754215 - DNA, 15 bp, Homo sapiens
agcctctgcaacagg

SEQ ID NO: 754216 - DNA, 15 bp, Homo sapiens
gcctctgcaacaggc

SEQ ID NO: 754217 - DNA, 15 bp, Homo sapiens
cctctgcaacaggcg

SEQ ID NO: 754218 - DNA, 15 bp, Homo sapiens
ctctgcaacaggcgc

SEQ ID NO: 754219 - DNA, 15 bp, Homo sapiens
tctgcaacaggcgct

SEQ ID NO: 754220 - DNA, 15 bp, Homo sapiens
ctgcaacaggcgctc

SEQ ID NO: 754221 - DNA, 15 bp, Homo sapiens
tgcaacaggcgctct

SEQ ID NO: 754222 - DNA, 15 bp, Homo sapiens
gcaacaggcgctctc

SEQ ID NO: 754223 - DNA, 15 bp, Homo sapiens
caacaggcgctctcc

SEQ ID NO: 754224 - DNA, 15 bp, Homo sapiens
aacaggcgctctccc

SEQ ID NO: 754225 - DNA, 15 bp, Homo sapiens
acaggcgctctccct

SEQ ID NO: 754226 - DNA, 15 bp, Homo sapiens
caggcgctctcccta

SEQ ID NO: 754227 - DNA, 15 bp, Homo sapiens
aggcgctctccctaa

SEQ ID NO: 754228 - DNA, 15 bp, Homo sapiens
ggcgctctccctaac

SEQ ID NO: 754229 - DNA, 15 bp, Homo sapiens
gcgctctccctaact

SEQ ID NO: 754230 - DNA, 15 bp, Homo sapiens
cgctctccctaactt

SEQ ID NO: 754231 - DNA, 15 bp, Homo sapiens
gctctccctaacttc

SEQ ID NO: 754232 - DNA, 15 bp, Homo sapiens
ctctccctaacttct

SEQ ID NO: 754233 - DNA, 15 bp, Homo sapiens
tctccctaacttctg

SEQ ID NO: 754234 - DNA, 15 bp, Homo sapiens
ctccctaacttctga

SEQ ID NO: 754235 - DNA, 15 bp, Homo sapiens
tccctaacttctgat

SEQ ID NO: 754236 - DNA, 15 bp, Homo sapiens
ccctaacttctgatc

SEQ ID NO: 754237 - DNA, 15 bp, Homo sapiens
cctaacttctgatca

SEQ ID NO: 754238 - DNA, 15 bp, Homo sapiens
ctaacttctgatcac

SEQ ID NO: 754239 - DNA, 15 bp, Homo sapiens
taacttctgatcact

SEQ ID NO: 754240 - DNA, 15 bp, Homo sapiens
aacttctgatcactg

SEQ ID NO: 754241 - DNA, 15 bp, Homo sapiens
acttctgatcactgt

SEQ ID NO: 754242 - DNA, 15 bp, Homo sapiens
cttctgatcactgtg

SEQ ID NO: 754243 - DNA, 15 bp, Homo sapiens
ttctgatcactgtgc

SEQ ID NO: 754244 - DNA, 15 bp, Homo sapiens
tctgatcactgtgca

SEQ ID NO: 754245 - DNA, 15 bp, Homo sapiens
ctgatcactgtgcag

SEQ ID NO: 754246 - DNA, 15 bp, Homo sapiens
tgatcactgtgcagc

SEQ ID NO: 754247 - DNA, 15 bp, Homo sapiens
gatcactgtgcagct

SEQ ID NO: 754248 - DNA, 15 bp, Homo sapiens
atcactgtgcagctc

SEQ ID NO: 754249 - DNA, 15 bp, Homo sapiens
tcactgtgcagctcc

SEQ ID NO: 754250 - DNA, 15 bp, Homo sapiens
cactgtgcagctcct

SEQ ID NO: 754251 - DNA, 15 bp, Homo sapiens
actgtgcagctcctg

SEQ ID NO: 754252 - DNA, 15 bp, Homo sapiens
ctgtgcagctcctga

SEQ ID NO: 754253 - DNA, 15 bp, Homo sapiens
tgtgcagctcctgac

SEQ ID NO: 754254 - DNA, 15 bp, Homo sapiens
gtgcagctcctgaca

SEQ ID NO: 754255 - DNA, 15 bp, Homo sapiens
tgcagctcctgacat

SEQ ID NO: 754256 - DNA, 15 bp, Homo sapiens
gcagctcctgacatg

SEQ ID NO: 754257 - DNA, 15 bp, Homo sapiens
cagctcctgacatga

SEQ ID NO: 754258 - DNA, 15 bp, Homo sapiens
agctcctgacatgat

SEQ ID NO: 754259 - DNA, 15 bp, Homo sapiens
gctcctgacatgata

SEQ ID NO: 754260 - DNA, 15 bp, Homo sapiens
ctcctgacatgatac

SEQ ID NO: 754261 - DNA, 15 bp, Homo sapiens
tcctgacatgataca

SEQ ID NO: 754262 - DNA, 15 bp, Homo sapiens
cctgacatgatacaa

SEQ ID NO: 754263 - DNA, 15 bp, Homo sapiens
ctgacatgatacaag

SEQ ID NO: 754264 - DNA, 15 bp, Homo sapiens
tgacatgatacaaga

SEQ ID NO: 754265 - DNA, 15 bp, Homo sapiens
gacatgatacaagag

SEQ ID NO: 754266 - DNA, 15 bp, Homo sapiens
acatgatacaagagg

SEQ ID NO: 754267 - DNA, 15 bp, Homo sapiens
catgatacaagaggc

SEQ ID NO: 754268 - DNA, 15 bp, Homo sapiens
atgatacaagaggcc

SEQ ID NO: 754269 - DNA, 15 bp, Homo sapiens
tgatacaagaggcct

SEQ ID NO: 754270 - DNA, 15 bp, Homo sapiens
gatacaagaggcctc

SEQ ID NO: 754271 - DNA, 15 bp, Homo sapiens
atacaagaggcctcc

SEQ ID NO: 754272 - DNA, 15 bp, Homo sapiens
tacaagaggcctccc

SEQ ID NO: 754273 - DNA, 15 bp, Homo sapiens
acaagaggcctccca

SEQ ID NO: 754274 - DNA, 15 bp, Homo sapiens
caagaggcctcccag

SEQ ID NO: 754275 - DNA, 15 bp, Homo sapiens
aagaggcctcccagg

SEQ ID NO: 754276 - DNA, 15 bp, Homo sapiens
agaggcctcccaggc

SEQ ID NO: 754277 - DNA, 15 bp, Homo sapiens
gaggcctcccaggcc

SEQ ID NO: 754278 - DNA, 15 bp, Homo sapiens
aggcctcccaggcct

SEQ ID NO: 754279 - DNA, 15 bp, Homo sapiens
ggcctcccaggcctc

SEQ ID NO: 754280 - DNA, 15 bp, Homo sapiens
gcctcccaggcctct

SEQ ID NO: 754281 - DNA, 15 bp, Homo sapiens
cctcccaggcctctg

SEQ ID NO: 754282 - DNA, 15 bp, Homo sapiens
ctcccaggcctctgt

SEQ ID NO: 754283 - DNA, 15 bp, Homo sapiens
tcccaggcctctgtg

SEQ ID NO: 754284 - DNA, 15 bp, Homo sapiens
cccaggcctctgtgc

SEQ ID NO: 754285 - DNA, 15 bp, Homo sapiens
ccaggcctctgtgcc

SEQ ID NO: 754286 - DNA, 15 bp, Homo sapiens
caggcctctgtgcct

SEQ ID NO: 754287 - DNA, 15 bp, Homo sapiens
aggcctctgtgcctg

SEQ ID NO: 754288 - DNA, 15 bp, Homo sapiens
ggcctctgtgcctgt

SEQ ID NO: 754289 - DNA, 15 bp, Homo sapiens
gcctctgtgcctgtt

SEQ ID NO: 754290 - DNA, 15 bp, Homo sapiens
cctctgtgcctgttc

SEQ ID NO: 754291 - DNA, 15 bp, Homo sapiens
ctctgtgcctgttct

SEQ ID NO: 754292 - DNA, 15 bp, Homo sapiens
tctgtgcctgttcta

SEQ ID NO: 754293 - DNA, 15 bp, Homo sapiens
ctgtgcctgttctaa

SEQ ID NO: 754294 - DNA, 15 bp, Homo sapiens
tgtgcctgttctaag

SEQ ID NO: 754295 - DNA, 15 bp, Homo sapiens
gtgcctgttctaagc

SEQ ID NO: 754296 - DNA, 15 bp, Homo sapiens
tgcctgttctaagca

SEQ ID NO: 754297 - DNA, 15 bp, Homo sapiens
gcctgttctaagcat

SEQ ID NO: 754298 - DNA, 15 bp, Homo sapiens
cctgttctaagcatg

SEQ ID NO: 754299 - DNA, 15 bp, Homo sapiens
ctgttctaagcatga

SEQ ID NO: 754300 - DNA, 15 bp, Homo sapiens
tgttctaagcatgag

SEQ ID NO: 754301 - DNA, 15 bp, Homo sapiens
gttctaagcatgagc

SEQ ID NO: 754302 - DNA, 15 bp, Homo sapiens
ttctaagcatgagcc

SEQ ID NO: 754303 - DNA, 15 bp, Homo sapiens
tctaagcatgagcct

SEQ ID NO: 754304 - DNA, 15 bp, Homo sapiens
ctaagcatgagcctt

SEQ ID NO: 754305 - DNA, 15 bp, Homo sapiens
taagcatgagccttg

SEQ ID NO: 754306 - DNA, 15 bp, Homo sapiens
aagcatgagccttgg

SEQ ID NO: 754307 - DNA, 15 bp, Homo sapiens
agcatgagccttgga

SEQ ID NO: 754308 - DNA, 15 bp, Homo sapiens
gcatgagccttggag

SEQ ID NO: 754309 - DNA, 15 bp, Homo sapiens
catgagccttggaga

SEQ ID NO: 754310 - DNA, 15 bp, Homo sapiens
atgagccttggagaa

SEQ ID NO: 754311 - DNA, 15 bp, Homo sapiens
tgagccttggagaag

SEQ ID NO: 754312 - DNA, 15 bp, Homo sapiens
gagccttggagaaga

SEQ ID NO: 754313 - DNA, 15 bp, Homo sapiens
agccttggagaagag

SEQ ID NO: 754314 - DNA, 15 bp, Homo sapiens
gccttggagaagaga

SEQ ID NO: 754315 - DNA, 15 bp, Homo sapiens
ccttggagaagagag

SEQ ID NO: 754316 - DNA, 15 bp, Homo sapiens
cttggagaagagaga

SEQ ID NO: 754317 - DNA, 15 bp, Homo sapiens
ttggagaagagagaa

SEQ ID NO: 754318 - DNA, 15 bp, Homo sapiens
tggagaagagagaat

SEQ ID NO: 754319 - DNA, 15 bp, Homo sapiens
ggagaagagagaatg

SEQ ID NO: 754320 - DNA, 15 bp, Homo sapiens
gagaagagagaatgc

SEQ ID NO: 754321 - DNA, 15 bp, Homo sapiens
agaagagagaatgct

SEQ ID NO: 754322 - DNA, 15 bp, Homo sapiens
gaagagagaatgctc

SEQ ID NO: 754323 - DNA, 15 bp, Homo sapiens
aagagagaatgctca

SEQ ID NO: 754324 - DNA, 15 bp, Homo sapiens
agagagaatgctcag

SEQ ID NO: 754325 - DNA, 15 bp, Homo sapiens
gagagaatgctcagt

SEQ ID NO: 754326 - DNA, 15 bp, Homo sapiens
agagaatgctcagtg

SEQ ID NO: 754327 - DNA, 15 bp, Homo sapiens
gagaatgctcagtgc

SEQ ID NO: 754328 - DNA, 15 bp, Homo sapiens
agaatgctcagtgcc

SEQ ID NO: 754329 - DNA, 15 bp, Homo sapiens
gaatgctcagtgcca

SEQ ID NO: 754330 - DNA, 15 bp, Homo sapiens
aatgctcagtgccag

SEQ ID NO: 754331 - DNA, 15 bp, Homo sapiens
atgctcagtgccagc

SEQ ID NO: 754332 - DNA, 15 bp, Homo sapiens
tgctcagtgccagct

SEQ ID NO: 754333 - DNA, 15 bp, Homo sapiens
gctcagtgccagctc

SEQ ID NO: 754334 - DNA, 15 bp, Homo sapiens
ctcagtgccagctca

SEQ ID NO: 754335 - DNA, 15 bp, Homo sapiens
tcagtgccagctcat

SEQ ID NO: 754336 - DNA, 15 bp, Homo sapiens
cagtgccagctcatg

SEQ ID NO: 754337 - DNA, 15 bp, Homo sapiens
agtgccagctcatgt

SEQ ID NO: 754338 - DNA, 15 bp, Homo sapiens
gtgccagctcatgtg

SEQ ID NO: 754339 - DNA, 15 bp, Homo sapiens
tgccagctcatgtgt

SEQ ID NO: 754340 - DNA, 15 bp, Homo sapiens
gccagctcatgtgta

SEQ ID NO: 754341 - DNA, 15 bp, Homo sapiens
ccagctcatgtgtat

SEQ ID NO: 754342 - DNA, 15 bp, Homo sapiens
cagctcatgtgtatc

SEQ ID NO: 754343 - DNA, 15 bp, Homo sapiens
agctcatgtgtatcc

SEQ ID NO: 754344 - DNA, 15 bp, Homo sapiens
gctcatgtgtatccc

SEQ ID NO: 754345 - DNA, 15 bp, Homo sapiens
ctcatgtgtatccca

SEQ ID NO: 754346 - DNA, 15 bp, Homo sapiens
tcatgtgtatcccat

SEQ ID NO: 754347 - DNA, 15 bp, Homo sapiens
catgtgtatcccatg

SEQ ID NO: 754348 - DNA, 15 bp, Homo sapiens
atgtgtatcccatgg

SEQ ID NO: 754349 - DNA, 15 bp, Homo sapiens
tgtgtatcccatgga

SEQ ID NO: 754350 - DNA, 15 bp, Homo sapiens
gtgtatcccatggac

SEQ ID NO: 754351 - DNA, 15 bp, Homo sapiens
tgtatcccatggaca

SEQ ID NO: 754352 - DNA, 15 bp, Homo sapiens
gtatcccatggacaa

SEQ ID NO: 754353 - DNA, 15 bp, Homo sapiens
tatcccatggacaag

SEQ ID NO: 754354 - DNA, 15 bp, Homo sapiens
atcccatggacaagg

SEQ ID NO: 754355 - DNA, 15 bp, Homo sapiens
tcccatggacaagga

SEQ ID NO: 754356 - DNA, 15 bp, Homo sapiens
cccatggacaaggac

SEQ ID NO: 754357 - DNA, 15 bp, Homo sapiens
ccatggacaaggact

SEQ ID NO: 754358 - DNA, 15 bp, Homo sapiens
catggacaaggacta

SEQ ID NO: 754359 - DNA, 15 bp, Homo sapiens
atggacaaggactaa

SEQ ID NO: 754360 - DNA, 15 bp, Homo sapiens
tggacaaggactaat

SEQ ID NO: 754361 - DNA, 15 bp, Homo sapiens
ggacaaggactaata

SEQ ID NO: 754362 - DNA, 15 bp, Homo sapiens
gacaaggactaatag

SEQ ID NO: 754363 - DNA, 15 bp, Homo sapiens
acaaggactaatagg

SEQ ID NO: 754364 - DNA, 15 bp, Homo sapiens
caaggactaatagga

SEQ ID NO: 754365 - DNA, 15 bp, Homo sapiens
aaggactaataggac

SEQ ID NO: 754366 - DNA, 15 bp, Homo sapiens
aggactaataggacc

SEQ ID NO: 754367 - DNA, 15 bp, Homo sapiens
ggactaataggaccc

SEQ ID NO: 754368 - DNA, 15 bp, Homo sapiens
gactaataggaccct

SEQ ID NO: 754369 - DNA, 15 bp, Homo sapiens
actaataggaccctg

SEQ ID NO: 754370 - DNA, 15 bp, Homo sapiens
ctaataggaccctga

SEQ ID NO: 754371 - DNA, 15 bp, Homo sapiens
taataggaccctgag

SEQ ID NO: 754372 - DNA, 15 bp, Homo sapiens
aataggaccctgagg

SEQ ID NO: 754373 - DNA, 15 bp, Homo sapiens
ataggaccctgagga

SEQ ID NO: 754374 - DNA, 15 bp, Homo sapiens
taggaccctgaggac

SEQ ID NO: 754375 - DNA, 15 bp, Homo sapiens
aggaccctgaggact

SEQ ID NO: 754376 - DNA, 15 bp, Homo sapiens
ggaccctgaggactt

SEQ ID NO: 754377 - DNA, 15 bp, Homo sapiens
gaccctgaggactta

SEQ ID NO: 754378 - DNA, 15 bp, Homo sapiens
accctgaggacttag

SEQ ID NO: 754379 - DNA, 15 bp, Homo sapiens
ccctgaggacttaga

SEQ ID NO: 754380 - DNA, 15 bp, Homo sapiens
cctgaggacttagaa

SEQ ID NO: 754381 - DNA, 15 bp, Homo sapiens
ctgaggacttagaaa

SEQ ID NO: 754382 - DNA, 15 bp, Homo sapiens
tgaggacttagaaaa

SEQ ID NO: 754383 - DNA, 15 bp, Homo sapiens
gaggacttagaaaag

SEQ ID NO: 754384 - DNA, 15 bp, Homo sapiens
aggacttagaaaagc

SEQ ID NO: 754385 - DNA, 15 bp, Homo sapiens
ggacttagaaaagcc

SEQ ID NO: 754386 - DNA, 15 bp, Homo sapiens
gacttagaaaagcct

SEQ ID NO: 754387 - DNA, 15 bp, Homo sapiens
acttagaaaagcctt

SEQ ID NO: 754388 - DNA, 15 bp, Homo sapiens
cttagaaaagccttc

SEQ ID NO: 754389 - DNA, 15 bp, Homo sapiens
ttagaaaagccttct

SEQ ID NO: 754390 - DNA, 15 bp, Homo sapiens
tagaaaagccttctc

SEQ ID NO: 754391 - DNA, 15 bp, Homo sapiens
agaaaagccttctct

SEQ ID NO: 754392 - DNA, 15 bp, Homo sapiens
gaaaagccttctctg

SEQ ID NO: 754393 - DNA, 15 bp, Homo sapiens
aaaagccttctctgt

SEQ ID NO: 754394 - DNA, 15 bp, Homo sapiens
aaagccttctctgtt

SEQ ID NO: 754395 - DNA, 15 bp, Homo sapiens
aagccttctctgttg

SEQ ID NO: 754396 - DNA, 15 bp, Homo sapiens
agccttctctgttgc

SEQ ID NO: 754397 - DNA, 15 bp, Homo sapiens
gccttctctgttgcc

SEQ ID NO: 754398 - DNA, 15 bp, Homo sapiens
ccttctctgttgcca

SEQ ID NO: 754399 - DNA, 15 bp, Homo sapiens
cttctctgttgccaa

SEQ ID NO: 754400 - DNA, 15 bp, Homo sapiens
ttctctgttgccaac

SEQ ID NO: 754401 - DNA, 15 bp, Homo sapiens
tctctgttgccaact

SEQ ID NO: 754402 - DNA, 15 bp, Homo sapiens
ctctgttgccaactg

SEQ ID NO: 754403 - DNA, 15 bp, Homo sapiens
tctgttgccaactgt

SEQ ID NO: 754404 - DNA, 15 bp, Homo sapiens
ctgttgccaactgtg

SEQ ID NO: 754405 - DNA, 15 bp, Homo sapiens
tgttgccaactgtgc

SEQ ID NO: 754406 - DNA, 15 bp, Homo sapiens
gttgccaactgtgct

SEQ ID NO: 754407 - DNA, 15 bp, Homo sapiens
ttgccaactgtgcta

SEQ ID NO: 754408 - DNA, 15 bp, Homo sapiens
tgccaactgtgctat

SEQ ID NO: 754409 - DNA, 15 bp, Homo sapiens
gccaactgtgctatt

SEQ ID NO: 754410 - DNA, 15 bp, Homo sapiens
ccaactgtgctattt

SEQ ID NO: 754411 - DNA, 15 bp, Homo sapiens
caactgtgctatttt

SEQ ID NO: 754412 - DNA, 15 bp, Homo sapiens
aactgtgctattttt

SEQ ID NO: 754413 - DNA, 15 bp, Homo sapiens
actgtgctattttta

SEQ ID NO: 754414 - DNA, 15 bp, Homo sapiens
ctgtgctatttttac

SEQ ID NO: 754415 - DNA, 15 bp, Homo sapiens
tgtgctatttttacc

SEQ ID NO: 754416 - DNA, 15 bp, Homo sapiens
gtgctatttttacct

SEQ ID NO: 754417 - DNA, 15 bp, Homo sapiens
tgctatttttacctc

SEQ ID NO: 754418 - DNA, 15 bp, Homo sapiens
gctatttttacctcc

SEQ ID NO: 754419 - DNA, 15 bp, Homo sapiens
ctatttttacctccc

SEQ ID NO: 754420 - DNA, 15 bp, Homo sapiens
tatttttacctccct

SEQ ID NO: 754421 - DNA, 15 bp, Homo sapiens
atttttacctccctc

SEQ ID NO: 754422 - DNA, 15 bp, Homo sapiens
tttttacctccctcc

SEQ ID NO: 754423 - DNA, 15 bp, Homo sapiens
ttttacctccctccc

SEQ ID NO: 754424 - DNA, 15 bp, Homo sapiens
tttacctccctccca

SEQ ID NO: 754425 - DNA, 15 bp, Homo sapiens
ttacctccctcccac

SEQ ID NO: 754426 - DNA, 15 bp, Homo sapiens
tacctccctcccaca

SEQ ID NO: 754427 - DNA, 15 bp, Homo sapiens
acctccctcccacag

SEQ ID NO: 754428 - DNA, 15 bp, Homo sapiens
cctccctcccacagc

SEQ ID NO: 754429 - DNA, 15 bp, Homo sapiens
ctccctcccacagct

SEQ ID NO: 754430 - DNA, 15 bp, Homo sapiens
tccctcccacagctc

SEQ ID NO: 754431 - DNA, 15 bp, Homo sapiens
ccctcccacagctcc

SEQ ID NO: 754432 - DNA, 15 bp, Homo sapiens
cctcccacagctcct

SEQ ID NO: 754433 - DNA, 15 bp, Homo sapiens
ctcccacagctcctg

SEQ ID NO: 754434 - DNA, 15 bp, Homo sapiens
tcccacagctcctgc

SEQ ID NO: 754435 - DNA, 15 bp, Homo sapiens
cccacagctcctgct

SEQ ID NO: 754436 - DNA, 15 bp, Homo sapiens
ccacagctcctgctt

SEQ ID NO: 754437 - DNA, 15 bp, Homo sapiens
cacagctcctgcttt

SEQ ID NO: 754438 - DNA, 15 bp, Homo sapiens
acagctcctgctttc

SEQ ID NO: 754439 - DNA, 15 bp, Homo sapiens
cagctcctgctttcc

SEQ ID NO: 754440 - DNA, 15 bp, Homo sapiens
agctcctgctttccc

SEQ ID NO: 754441 - DNA, 15 bp, Homo sapiens
gctcctgctttcccc

SEQ ID NO: 754442 - DNA, 15 bp, Homo sapiens
ctcctgctttcccca

SEQ ID NO: 754443 - DNA, 15 bp, Homo sapiens
tcctgctttccccag

SEQ ID NO: 754444 - DNA, 15 bp, Homo sapiens
cctgctttccccagg

SEQ ID NO: 754445 - DNA, 15 bp, Homo sapiens
ctgctttccccaggt

SEQ ID NO: 754446 - DNA, 15 bp, Homo sapiens
tgctttccccaggta

SEQ ID NO: 754447 - DNA, 15 bp, Homo sapiens
gctttccccaggtat

SEQ ID NO: 754448 - DNA, 15 bp, Homo sapiens
ctttccccaggtatt

SEQ ID NO: 754449 - DNA, 15 bp, Homo sapiens
tttccccaggtattt

SEQ ID NO: 754450 - DNA, 15 bp, Homo sapiens
ttccccaggtatttg

SEQ ID NO: 754451 - DNA, 15 bp, Homo sapiens
tccccaggtatttgt

SEQ ID NO: 754452 - DNA, 15 bp, Homo sapiens
ccccaggtatttgtc

SEQ ID NO: 754453 - DNA, 15 bp, Homo sapiens
cccaggtatttgtca

SEQ ID NO: 754454 - DNA, 15 bp, Homo sapiens
ccaggtatttgtcag

SEQ ID NO: 754455 - DNA, 15 bp, Homo sapiens
caggtatttgtcagc

SEQ ID NO: 754456 - DNA, 15 bp, Homo sapiens
aggtatttgtcagca

SEQ ID NO: 754457 - DNA, 15 bp, Homo sapiens
ggtatttgtcagcag

SEQ ID NO: 754458 - DNA, 15 bp, Homo sapiens
gtatttgtcagcaga

SEQ ID NO: 754459 - DNA, 15 bp, Homo sapiens
tatttgtcagcagag

SEQ ID NO: 754460 - DNA, 15 bp, Homo sapiens
atttgtcagcagagc

SEQ ID NO: 754461 - DNA, 15 bp, Homo sapiens
tttgtcagcagagcg

SEQ ID NO: 754462 - DNA, 15 bp, Homo sapiens
ttgtcagcagagcgt

SEQ ID NO: 754463 - DNA, 15 bp, Homo sapiens
tgtcagcagagcgtc

SEQ ID NO: 754464 - DNA, 15 bp, Homo sapiens
gtcagcagagcgtct

SEQ ID NO: 754465 - DNA, 15 bp, Homo sapiens
tcagcagagcgtctt

SEQ ID NO: 754466 - DNA, 15 bp, Homo sapiens
cagcagagcgtcttg

SEQ ID NO: 754467 - DNA, 15 bp, Homo sapiens
agcagagcgtcttgc

SEQ ID NO: 754468 - DNA, 15 bp, Homo sapiens
gcagagcgtcttgca

SEQ ID NO: 754469 - DNA, 15 bp, Homo sapiens
cagagcgtcttgcac

SEQ ID NO: 754470 - DNA, 15 bp, Homo sapiens
agagcgtcttgcacc

SEQ ID NO: 754471 - DNA, 15 bp, Homo sapiens
gagcgtcttgcacct

SEQ ID NO: 754472 - DNA, 15 bp, Homo sapiens
agcgtcttgcacctg

SEQ ID NO: 754473 - DNA, 15 bp, Homo sapiens
gcgtcttgcacctgc

SEQ ID NO: 754474 - DNA, 15 bp, Homo sapiens
cgtcttgcacctgca

SEQ ID NO: 754475 - DNA, 15 bp, Homo sapiens
gtcttgcacctgcat

SEQ ID NO: 754476 - DNA, 15 bp, Homo sapiens
tcttgcacctgcatg

SEQ ID NO: 754477 - DNA, 15 bp, Homo sapiens
cttgcacctgcatgg

SEQ ID NO: 754478 - DNA, 15 bp, Homo sapiens
ttgcacctgcatgga

SEQ ID NO: 754479 - DNA, 15 bp, Homo sapiens
tgcacctgcatggaa

SEQ ID NO: 754480 - DNA, 15 bp, Homo sapiens
gcacctgcatggaaa

SEQ ID NO: 754481 - DNA, 15 bp, Homo sapiens
cacctgcatggaaag

SEQ ID NO: 754482 - DNA, 15 bp, Homo sapiens
acctgcatggaaagt

SEQ ID NO: 754483 - DNA, 15 bp, Homo sapiens
cctgcatggaaagtg

SEQ ID NO: 754484 - DNA, 15 bp, Homo sapiens
ctgcatggaaagtgg

SEQ ID NO: 754485 - DNA, 15 bp, Homo sapiens
tgcatggaaagtggc

SEQ ID NO: 754486 - DNA, 15 bp, Homo sapiens
gcatggaaagtggca

SEQ ID NO: 754487 - DNA, 15 bp, Homo sapiens
catggaaagtggcag

SEQ ID NO: 754488 - DNA, 15 bp, Homo sapiens
atggaaagtggcagt

SEQ ID NO: 754489 - DNA, 15 bp, Homo sapiens
tggaaagtggcagtt

SEQ ID NO: 754490 - DNA, 15 bp, Homo sapiens
ggaaagtggcagttg

SEQ ID NO: 754491 - DNA, 15 bp, Homo sapiens
gaaagtggcagttgg

SEQ ID NO: 754492 - DNA, 15 bp, Homo sapiens
aaagtggcagttggg

SEQ ID NO: 754493 - DNA, 15 bp, Homo sapiens
aagtggcagttgggg

SEQ ID NO: 754494 - DNA, 15 bp, Homo sapiens
agtggcagttggggc

SEQ ID NO: 754495 - DNA, 15 bp, Homo sapiens
gtggcagttggggcc

SEQ ID NO: 754496 - DNA, 15 bp, Homo sapiens
tggcagttggggccc

SEQ ID NO: 754497 - DNA, 15 bp, Homo sapiens
ggcagttggggccca

SEQ ID NO: 754498 - DNA, 15 bp, Homo sapiens
gcagttggggcccag

SEQ ID NO: 754499 - DNA, 15 bp, Homo sapiens
cagttggggcccagg

SEQ ID NO: 754500 - DNA, 15 bp, Homo sapiens
agttggggcccagga

SEQ ID NO: 754501 - DNA, 15 bp, Homo sapiens
gttggggcccaggat

SEQ ID NO: 754502 - DNA, 15 bp, Homo sapiens
ttggggcccaggatg

SEQ ID NO: 754503 - DNA, 15 bp, Homo sapiens
tggggcccaggatgg

SEQ ID NO: 754504 - DNA, 15 bp, Homo sapiens
ggggcccaggatggc

SEQ ID NO: 754505 - DNA, 15 bp, Homo sapiens
gggcccaggatggcc

SEQ ID NO: 754506 - DNA, 15 bp, Homo sapiens
ggcccaggatggcct

SEQ ID NO: 754507 - DNA, 15 bp, Homo sapiens
gcccaggatggcctt

SEQ ID NO: 754508 - DNA, 15 bp, Homo sapiens
cccaggatggccttg

SEQ ID NO: 754509 - DNA, 15 bp, Homo sapiens
ccaggatggccttgt

SEQ ID NO: 754510 - DNA, 15 bp, Homo sapiens
caggatggccttgtg

SEQ ID NO: 754511 - DNA, 15 bp, Homo sapiens
aggatggccttgtgc

SEQ ID NO: 754512 - DNA, 15 bp, Homo sapiens
ggatggccttgtgct

SEQ ID NO: 754513 - DNA, 15 bp, Homo sapiens
gatggccttgtgctg

SEQ ID NO: 754514 - DNA, 15 bp, Homo sapiens
atggccttgtgctgt

SEQ ID NO: 754515 - DNA, 15 bp, Homo sapiens
tggccttgtgctgtg

SEQ ID NO: 754516 - DNA, 15 bp, Homo sapiens
ggccttgtgctgtgc

SEQ ID NO: 754517 - DNA, 15 bp, Homo sapiens
gccttgtgctgtgca

SEQ ID NO: 754518 - DNA, 15 bp, Homo sapiens
ccttgtgctgtgcag

SEQ ID NO: 754519 - DNA, 15 bp, Homo sapiens
cttgtgctgtgcagg

SEQ ID NO: 754520 - DNA, 15 bp, Homo sapiens
ttgtgctgtgcaggc

SEQ ID NO: 754521 - DNA, 15 bp, Homo sapiens
tgtgctgtgcaggcc

SEQ ID NO: 754522 - DNA, 15 bp, Homo sapiens
gtgctgtgcaggcca

SEQ ID NO: 754523 - DNA, 15 bp, Homo sapiens
tgctgtgcaggccac

SEQ ID NO: 754524 - DNA, 15 bp, Homo sapiens
gctgtgcaggccaca

SEQ ID NO: 754525 - DNA, 15 bp, Homo sapiens
ctgtgcaggccacag

SEQ ID NO: 754526 - DNA, 15 bp, Homo sapiens
tgtgcaggccacagc

SEQ ID NO: 754527 - DNA, 15 bp, Homo sapiens
gtgcaggccacagca

SEQ ID NO: 754528 - DNA, 15 bp, Homo sapiens
tgcaggccacagcag

SEQ ID NO: 754529 - DNA, 15 bp, Homo sapiens
gcaggccacagcagt

SEQ ID NO: 754530 - DNA, 15 bp, Homo sapiens
caggccacagcagtc

SEQ ID NO: 754531 - DNA, 15 bp, Homo sapiens
aggccacagcagtct

SEQ ID NO: 754532 - DNA, 15 bp, Homo sapiens
ggccacagcagtctc

SEQ ID NO: 754533 - DNA, 15 bp, Homo sapiens
gccacagcagtctcc

SEQ ID NO: 754534 - DNA, 15 bp, Homo sapiens
ccacagcagtctcct

SEQ ID NO: 754535 - DNA, 15 bp, Homo sapiens
cacagcagtctcctt

SEQ ID NO: 754536 - DNA, 15 bp, Homo sapiens
acagcagtctcctta

SEQ ID NO: 754537 - DNA, 15 bp, Homo sapiens
cagcagtctccttac

SEQ ID NO: 754538 - DNA, 15 bp, Homo sapiens
agcagtctccttacc

SEQ ID NO: 754539 - DNA, 15 bp, Homo sapiens
gcagtctccttacca

SEQ ID NO: 754540 - DNA, 15 bp, Homo sapiens
cagtctccttaccag

SEQ ID NO: 754541 - DNA, 15 bp, Homo sapiens
agtctccttaccagg

SEQ ID NO: 754542 - DNA, 15 bp, Homo sapiens
gtctccttaccaggc

SEQ ID NO: 754543 - DNA, 15 bp, Homo sapiens
tctccttaccaggcc

SEQ ID NO: 754544 - DNA, 15 bp, Homo sapiens
ctccttaccaggcct

SEQ ID NO: 754545 - DNA, 15 bp, Homo sapiens
tccttaccaggcctg

SEQ ID NO: 754546 - DNA, 15 bp, Homo sapiens
ccttaccaggcctgg

SEQ ID NO: 754547 - DNA, 15 bp, Homo sapiens
cttaccaggcctggc

SEQ ID NO: 754548 - DNA, 15 bp, Homo sapiens
ttaccaggcctggcg

SEQ ID NO: 754549 - DNA, 15 bp, Homo sapiens
taccaggcctggcgg

SEQ ID NO: 754550 - DNA, 15 bp, Homo sapiens
accaggcctggcggc

SEQ ID NO: 754551 - DNA, 15 bp, Homo sapiens
ccaggcctggcggcc

SEQ ID NO: 754552 - DNA, 15 bp, Homo sapiens
caggcctggcggcca

SEQ ID NO: 754553 - DNA, 15 bp, Homo sapiens
aggcctggcggccag

SEQ ID NO: 754554 - DNA, 15 bp, Homo sapiens
ggcctggcggccagg

SEQ ID NO: 754555 - DNA, 15 bp, Homo sapiens
gcctggcggccaggc

SEQ ID NO: 754556 - DNA, 15 bp, Homo sapiens
cctggcggccaggcc

SEQ ID NO: 754557 - DNA, 15 bp, Homo sapiens
ctggcggccaggccc

SEQ ID NO: 754558 - DNA, 15 bp, Homo sapiens
tggcggccaggcccg

SEQ ID NO: 754559 - DNA, 15 bp, Homo sapiens
ggcggccaggcccgg

SEQ ID NO: 754560 - DNA, 15 bp, Homo sapiens
gcggccaggcccggc

SEQ ID NO: 754561 - DNA, 15 bp, Homo sapiens
cggccaggcccggcg

SEQ ID NO: 754562 - DNA, 15 bp, Homo sapiens
ggccaggcccggcgg

SEQ ID NO: 754563 - DNA, 15 bp, Homo sapiens
gccaggcccggcggc

SEQ ID NO: 754564 - DNA, 15 bp, Homo sapiens
ccaggcccggcggcc

SEQ ID NO: 754565 - DNA, 15 bp, Homo sapiens
caggcccggcggcca

SEQ ID NO: 754566 - DNA, 15 bp, Homo sapiens
aggcccggcggccag

SEQ ID NO: 754567 - DNA, 15 bp, Homo sapiens
ggcccggcggccagg

SEQ ID NO: 754568 - DNA, 15 bp, Homo sapiens
gcccggcggccaggc

SEQ ID NO: 754569 - DNA, 15 bp, Homo sapiens
cccggcggccaggcc

SEQ ID NO: 754570 - DNA, 15 bp, Homo sapiens
ccggcggccaggccc

SEQ ID NO: 754571 - DNA, 15 bp, Homo sapiens
cggcggccaggccca

SEQ ID NO: 754572 - DNA, 15 bp, Homo sapiens
ggcggccaggcccag

SEQ ID NO: 754573 - DNA, 15 bp, Homo sapiens
gcggccaggcccagc

SEQ ID NO: 754574 - DNA, 15 bp, Homo sapiens
cggccaggcccagcc

SEQ ID NO: 754575 - DNA, 15 bp, Homo sapiens
ggccaggcccagcct

SEQ ID NO: 754576 - DNA, 15 bp, Homo sapiens
gccaggcccagcctc

SEQ ID NO: 754577 - DNA, 15 bp, Homo sapiens
ccaggcccagcctct

SEQ ID NO: 754578 - DNA, 15 bp, Homo sapiens
caggcccagcctctg

SEQ ID NO: 754579 - DNA, 15 bp, Homo sapiens
aggcccagcctctga

SEQ ID NO: 754580 - DNA, 15 bp, Homo sapiens
ggcccagcctctgag

SEQ ID NO: 754581 - DNA, 15 bp, Homo sapiens
gcccagcctctgagg

SEQ ID NO: 754582 - DNA, 15 bp, Homo sapiens
cccagcctctgaggc

SEQ ID NO: 754583 - DNA, 15 bp, Homo sapiens
ccagcctctgaggct

SEQ ID NO: 754584 - DNA, 15 bp, Homo sapiens
cagcctctgaggctg

SEQ ID NO: 754585 - DNA, 15 bp, Homo sapiens
agcctctgaggctgg

SEQ ID NO: 754586 - DNA, 15 bp, Homo sapiens
gcctctgaggctggc

SEQ ID NO: 754587 - DNA, 15 bp, Homo sapiens
cctctgaggctggca

SEQ ID NO: 754588 - DNA, 15 bp, Homo sapiens
ctctgaggctggcag

SEQ ID NO: 754589 - DNA, 15 bp, Homo sapiens
tctgaggctggcagg

SEQ ID NO: 754590 - DNA, 15 bp, Homo sapiens
ctgaggctggcaggc

SEQ ID NO: 754591 - DNA, 15 bp, Homo sapiens
tgaggctggcaggct

SEQ ID NO: 754592 - DNA, 15 bp, Homo sapiens
gaggctggcaggctg

SEQ ID NO: 754593 - DNA, 15 bp, Homo sapiens
aggctggcaggctgt

SEQ ID NO: 754594 - DNA, 15 bp, Homo sapiens
ggctggcaggctgtg

SEQ ID NO: 754595 - DNA, 15 bp, Homo sapiens
gctggcaggctgtgg

SEQ ID NO: 754596 - DNA, 15 bp, Homo sapiens
ctggcaggctgtggt

SEQ ID NO: 754597 - DNA, 15 bp, Homo sapiens
tggcaggctgtggtg

SEQ ID NO: 754598 - DNA, 15 bp, Homo sapiens
ggcaggctgtggtga

SEQ ID NO: 754599 - DNA, 15 bp, Homo sapiens
gcaggctgtggtgag

SEQ ID NO: 754600 - DNA, 15 bp, Homo sapiens
caggctgtggtgagg

SEQ ID NO: 754601 - DNA, 15 bp, Homo sapiens
aggctgtggtgagga

SEQ ID NO: 754602 - DNA, 15 bp, Homo sapiens
ggctgtggtgaggat

SEQ ID NO: 754603 - DNA, 15 bp, Homo sapiens
gctgtggtgaggatg

SEQ ID NO: 754604 - DNA, 15 bp, Homo sapiens
ctgtggtgaggatgg

SEQ ID NO: 754605 - DNA, 15 bp, Homo sapiens
tgtggtgaggatggt

SEQ ID NO: 754606 - DNA, 15 bp, Homo sapiens
gtggtgaggatggtt

SEQ ID NO: 754607 - DNA, 15 bp, Homo sapiens
tggtgaggatggttg

SEQ ID NO: 754608 - DNA, 15 bp, Homo sapiens
ggtgaggatggttgc

SEQ ID NO: 754609 - DNA, 15 bp, Homo sapiens
gtgaggatggttgca

SEQ ID NO: 754610 - DNA, 15 bp, Homo sapiens
tgaggatggttgcat

SEQ ID NO: 754611 - DNA, 15 bp, Homo sapiens
gaggatggttgcata

SEQ ID NO: 754612 - DNA, 15 bp, Homo sapiens
aggatggttgcataa

SEQ ID NO: 754613 - DNA, 15 bp, Homo sapiens
ggatggttgcataac

SEQ ID NO: 754614 - DNA, 15 bp, Homo sapiens
gatggttgcataact

SEQ ID NO: 754615 - DNA, 15 bp, Homo sapiens
atggttgcataactg

SEQ ID NO: 754616 - DNA, 15 bp, Homo sapiens
tggttgcataactgg

SEQ ID NO: 754617 - DNA, 15 bp, Homo sapiens
ggttgcataactggc

SEQ ID NO: 754618 - DNA, 15 bp, Homo sapiens
gttgcataactggcc

SEQ ID NO: 754619 - DNA, 15 bp, Homo sapiens
ttgcataactggcct

SEQ ID NO: 754620 - DNA, 15 bp, Homo sapiens
tgcataactggcctt

SEQ ID NO: 754621 - DNA, 15 bp, Homo sapiens
gcataactggccttt

SEQ ID NO: 754622 - DNA, 15 bp, Homo sapiens
cataactggcctttc

SEQ ID NO: 754623 - DNA, 15 bp, Homo sapiens
ataactggcctttct

SEQ ID NO: 754624 - DNA, 15 bp, Homo sapiens
taactggcctttctg

SEQ ID NO: 754625 - DNA, 15 bp, Homo sapiens
aactggcctttctgc

SEQ ID NO: 754626 - DNA, 15 bp, Homo sapiens
actggcctttctgcc

SEQ ID NO: 754627 - DNA, 15 bp, Homo sapiens
ctggcctttctgccg

SEQ ID NO: 754628 - DNA, 15 bp, Homo sapiens
tggcctttctgccgc

SEQ ID NO: 754629 - DNA, 15 bp, Homo sapiens
ggcctttctgccgct

SEQ ID NO: 754630 - DNA, 15 bp, Homo sapiens
gcctttctgccgctg

SEQ ID NO: 754631 - DNA, 15 bp, Homo sapiens
cctttctgccgctgg

SEQ ID NO: 754632 - DNA, 15 bp, Homo sapiens
ctttctgccgctggt

SEQ ID NO: 754633 - DNA, 15 bp, Homo sapiens
tttctgccgctggtt

SEQ ID NO: 754634 - DNA, 15 bp, Homo sapiens
ttctgccgctggttc

SEQ ID NO: 754635 - DNA, 15 bp, Homo sapiens
tctgccgctggttct

SEQ ID NO: 754636 - DNA, 15 bp, Homo sapiens
ctgccgctggttctg

SEQ ID NO: 754637 - DNA, 15 bp, Homo sapiens
tgccgctggttctgg

SEQ ID NO: 754638 - DNA, 15 bp, Homo sapiens
gccgctggttctggg

SEQ ID NO: 754639 - DNA, 15 bp, Homo sapiens
ccgctggttctgggt

SEQ ID NO: 754640 - DNA, 15 bp, Homo sapiens
cgctggttctgggtg

SEQ ID NO: 754641 - DNA, 15 bp, Homo sapiens
gctggttctgggtga

SEQ ID NO: 754642 - DNA, 15 bp, Homo sapiens
ctggttctgggtgag

SEQ ID NO: 754643 - DNA, 15 bp, Homo sapiens
tggttctgggtgagg

SEQ ID NO: 754644 - DNA, 15 bp, Homo sapiens
ggttctgggtgaggt

SEQ ID NO: 754645 - DNA, 15 bp, Homo sapiens
gttctgggtgaggtc

SEQ ID NO: 754646 - DNA, 15 bp, Homo sapiens
ttctgggtgaggtcg

SEQ ID NO: 754647 - DNA, 15 bp, Homo sapiens
tctgggtgaggtcga

SEQ ID NO: 754648 - DNA, 15 bp, Homo sapiens
ctgggtgaggtcgag

SEQ ID NO: 754649 - DNA, 15 bp, Homo sapiens
tgggtgaggtcgagc

SEQ ID NO: 754650 - DNA, 15 bp, Homo sapiens
gggtgaggtcgagcc

SEQ ID NO: 754651 - DNA, 15 bp, Homo sapiens
ggtgaggtcgagcca

SEQ ID NO: 754652 - DNA, 15 bp, Homo sapiens
gtgaggtcgagccag

SEQ ID NO: 754653 - DNA, 15 bp, Homo sapiens
tgaggtcgagccaga

SEQ ID NO: 754654 - DNA, 15 bp, Homo sapiens
gaggtcgagccagag

SEQ ID NO: 754655 - DNA, 15 bp, Homo sapiens
aggtcgagccagaga

SEQ ID NO: 754656 - DNA, 15 bp, Homo sapiens
ggtcgagccagagaa

SEQ ID NO: 754657 - DNA, 15 bp, Homo sapiens
gtcgagccagagaaa

SEQ ID NO: 754658 - DNA, 15 bp, Homo sapiens
tcgagccagagaaaa

SEQ ID NO: 754659 - DNA, 15 bp, Homo sapiens
cgagccagagaaaac

SEQ ID NO: 754660 - DNA, 15 bp, Homo sapiens
gagccagagaaaaca

SEQ ID NO: 754661 - DNA, 15 bp, Homo sapiens
agccagagaaaacag

SEQ ID NO: 754662 - DNA, 15 bp, Homo sapiens
gccagagaaaacagt

SEQ ID NO: 754663 - DNA, 15 bp, Homo sapiens
ccagagaaaacagtt

SEQ ID NO: 754664 - DNA, 15 bp, Homo sapiens
cagagaaaacagttc

SEQ ID NO: 754665 - DNA, 15 bp, Homo sapiens
agagaaaacagttct

SEQ ID NO: 754666 - DNA, 15 bp, Homo sapiens
gagaaaacagttctg

SEQ ID NO: 754667 - DNA, 15 bp, Homo sapiens
agaaaacagttctgc

SEQ ID NO: 754668 - DNA, 15 bp, Homo sapiens
gaaaacagttctgca

SEQ ID NO: 754669 - DNA, 15 bp, Homo sapiens
aaaacagttctgcag

SEQ ID NO: 754670 - DNA, 15 bp, Homo sapiens
aaacagttctgcagt

SEQ ID NO: 754671 - DNA, 15 bp, Homo sapiens
aacagttctgcagtc

SEQ ID NO: 754672 - DNA, 15 bp, Homo sapiens
acagttctgcagtcg

SEQ ID NO: 754673 - DNA, 15 bp, Homo sapiens
cagttctgcagtcga

SEQ ID NO: 754674 - DNA, 15 bp, Homo sapiens
agttctgcagtcgac

SEQ ID NO: 754675 - DNA, 15 bp, Homo sapiens
gttctgcagtcgaca

SEQ ID NO: 754676 - DNA, 15 bp, Homo sapiens
ttctgcagtcgacag

SEQ ID NO: 754677 - DNA, 15 bp, Homo sapiens
tctgcagtcgacagc

SEQ ID NO: 754678 - DNA, 15 bp, Homo sapiens
ctgcagtcgacagcc

SEQ ID NO: 754679 - DNA, 15 bp, Homo sapiens
tgcagtcgacagccc

SEQ ID NO: 754680 - DNA, 15 bp, Homo sapiens
gcagtcgacagcccc

SEQ ID NO: 754681 - DNA, 15 bp, Homo sapiens
cagtcgacagcccct

SEQ ID NO: 754682 - DNA, 15 bp, Homo sapiens
agtcgacagcccctc

SEQ ID NO: 754683 - DNA, 15 bp, Homo sapiens
gtcgacagcccctcc

SEQ ID NO: 754684 - DNA, 15 bp, Homo sapiens
tcgacagcccctcct

SEQ ID NO: 754685 - DNA, 15 bp, Homo sapiens
cgacagcccctcctg

SEQ ID NO: 754686 - DNA, 15 bp, Homo sapiens
gacagcccctcctgg

SEQ ID NO: 754687 - DNA, 15 bp, Homo sapiens
acagcccctcctggg

SEQ ID NO: 754688 - DNA, 15 bp, Homo sapiens
cagcccctcctgggc

SEQ ID NO: 754689 - DNA, 15 bp, Homo sapiens
agcccctcctgggca

SEQ ID NO: 754690 - DNA, 15 bp, Homo sapiens
gcccctcctgggcac

SEQ ID NO: 754691 - DNA, 15 bp, Homo sapiens
cccctcctgggcact

SEQ ID NO: 754692 - DNA, 15 bp, Homo sapiens
ccctcctgggcactg

SEQ ID NO: 754693 - DNA, 15 bp, Homo sapiens
cctcctgggcactgg

SEQ ID NO: 754694 - DNA, 15 bp, Homo sapiens
ctcctgggcactggt

SEQ ID NO: 754695 - DNA, 15 bp, Homo sapiens
tcctgggcactggtg

SEQ ID NO: 754696 - DNA, 15 bp, Homo sapiens
cctgggcactggtgc

SEQ ID NO: 754697 - DNA, 15 bp, Homo sapiens
ctgggcactggtgca

SEQ ID NO: 754698 - DNA, 15 bp, Homo sapiens
tgggcactggtgcaa

SEQ ID NO: 754699 - DNA, 15 bp, Homo sapiens
gggcactggtgcaac

SEQ ID NO: 754700 - DNA, 15 bp, Homo sapiens
ggcactggtgcaaca

SEQ ID NO: 754701 - DNA, 15 bp, Homo sapiens
gcactggtgcaacag

SEQ ID NO: 754702 - DNA, 15 bp, Homo sapiens
cactggtgcaacaga

SEQ ID NO: 754703 - DNA, 15 bp, Homo sapiens
actggtgcaacagac

SEQ ID NO: 754704 - DNA, 15 bp, Homo sapiens
ctggtgcaacagaca

SEQ ID NO: 754705 - DNA, 15 bp, Homo sapiens
tggtgcaacagacag

SEQ ID NO: 754706 - DNA, 15 bp, Homo sapiens
ggtgcaacagacagg

SEQ ID NO: 754707 - DNA, 15 bp, Homo sapiens
gtgcaacagacaggc

SEQ ID NO: 754708 - DNA, 15 bp, Homo sapiens
tgcaacagacaggct

SEQ ID NO: 754709 - DNA, 15 bp, Homo sapiens
gcaacagacaggctt

SEQ ID NO: 754710 - DNA, 15 bp, Homo sapiens
caacagacaggcttg

SEQ ID NO: 754711 - DNA, 15 bp, Homo sapiens
aacagacaggcttgt

SEQ ID NO: 754712 - DNA, 15 bp, Homo sapiens
acagacaggcttgtg

SEQ ID NO: 754713 - DNA, 15 bp, Homo sapiens
cagacaggcttgtgg

SEQ ID NO: 754714 - DNA, 15 bp, Homo sapiens
agacaggcttgtggg

SEQ ID NO: 754715 - DNA, 15 bp, Homo sapiens
gacaggcttgtgggc

SEQ ID NO: 754716 - DNA, 15 bp, Homo sapiens
acaggcttgtgggcc

SEQ ID NO: 754717 - DNA, 15 bp, Homo sapiens
caggcttgtgggcct

SEQ ID NO: 754718 - DNA, 15 bp, Homo sapiens
aggcttgtgggcctg

SEQ ID NO: 754719 - DNA, 15 bp, Homo sapiens
ggcttgtgggcctgg

SEQ ID NO: 754720 - DNA, 15 bp, Homo sapiens
gcttgtgggcctggt

SEQ ID NO: 754721 - DNA, 15 bp, Homo sapiens
cttgtgggcctggtg

SEQ ID NO: 754722 - DNA, 15 bp, Homo sapiens
ttgtgggcctggtgc

SEQ ID NO: 754723 - DNA, 15 bp, Homo sapiens
tgtgggcctggtgct

SEQ ID NO: 754724 - DNA, 15 bp, Homo sapiens
gtgggcctggtgctg

SEQ ID NO: 754725 - DNA, 15 bp, Homo sapiens
tgggcctggtgctga

SEQ ID NO: 754726 - DNA, 15 bp, Homo sapiens
gggcctggtgctgac

SEQ ID NO: 754727 - DNA, 15 bp, Homo sapiens
ggcctggtgctgacc

SEQ ID NO: 754728 - DNA, 15 bp, Homo sapiens
gcctggtgctgaccc

SEQ ID NO: 754729 - DNA, 15 bp, Homo sapiens
cctggtgctgacccc

SEQ ID NO: 754730 - DNA, 15 bp, Homo sapiens
ctggtgctgacccct

SEQ ID NO: 754731 - DNA, 15 bp, Homo sapiens
tggtgctgacccctc

SEQ ID NO: 754732 - DNA, 15 bp, Homo sapiens
ggtgctgacccctca

SEQ ID NO: 754733 - DNA, 15 bp, Homo sapiens
gtgctgacccctcac

SEQ ID NO: 754734 - DNA, 15 bp, Homo sapiens
tgctgacccctcacg

SEQ ID NO: 754735 - DNA, 15 bp, Homo sapiens
gctgacccctcacgg

SEQ ID NO: 754736 - DNA, 15 bp, Homo sapiens
ctgacccctcacggt

SEQ ID NO: 754737 - DNA, 15 bp, Homo sapiens
tgacccctcacggtc

SEQ ID NO: 754738 - DNA, 15 bp, Homo sapiens
gacccctcacggtca

SEQ ID NO: 754739 - DNA, 15 bp, Homo sapiens
acccctcacggtcag

SEQ ID NO: 754740 - DNA, 15 bp, Homo sapiens
cccctcacggtcagg

SEQ ID NO: 754741 - DNA, 15 bp, Homo sapiens
ccctcacggtcagga

SEQ ID NO: 754742 - DNA, 15 bp, Homo sapiens
cctcacggtcaggag

SEQ ID NO: 754743 - DNA, 15 bp, Homo sapiens
ctcacggtcaggagc

SEQ ID NO: 754744 - DNA, 15 bp, Homo sapiens
tcacggtcaggagcc

SEQ ID NO: 754745 - DNA, 15 bp, Homo sapiens
cacggtcaggagcca

SEQ ID NO: 754746 - DNA, 15 bp, Homo sapiens
acggtcaggagccac

SEQ ID NO: 754747 - DNA, 15 bp, Homo sapiens
cggtcaggagccacc

SEQ ID NO: 754748 - DNA, 15 bp, Homo sapiens
ggtcaggagccaccc

SEQ ID NO: 754749 - DNA, 15 bp, Homo sapiens
gtcaggagccaccct

SEQ ID NO: 754750 - DNA, 15 bp, Homo sapiens
tcaggagccaccctt

SEQ ID NO: 754751 - DNA, 15 bp, Homo sapiens
caggagccacccttg

SEQ ID NO: 754752 - DNA, 15 bp, Homo sapiens
aggagccacccttgc

SEQ ID NO: 754753 - DNA, 15 bp, Homo sapiens
ggagccacccttgct

SEQ ID NO: 754754 - DNA, 15 bp, Homo sapiens
gagccacccttgctc

SEQ ID NO: 754755 - DNA, 15 bp, Homo sapiens
agccacccttgctct

SEQ ID NO: 754756 - DNA, 15 bp, Homo sapiens
gccacccttgctctt

SEQ ID NO: 754757 - DNA, 15 bp, Homo sapiens
ccacccttgctcttg

SEQ ID NO: 754758 - DNA, 15 bp, Homo sapiens
cacccttgctcttga

SEQ ID NO: 754759 - DNA, 15 bp, Homo sapiens
acccttgctcttgag

SEQ ID NO: 754760 - DNA, 15 bp, Homo sapiens
cccttgctcttgagc

SEQ ID NO: 754761 - DNA, 15 bp, Homo sapiens
ccttgctcttgagct

SEQ ID NO: 754762 - DNA, 15 bp, Homo sapiens
cttgctcttgagctg

SEQ ID NO: 754763 - DNA, 15 bp, Homo sapiens
ttgctcttgagctgc

SEQ ID NO: 754764 - DNA, 15 bp, Homo sapiens
tgctcttgagctgct

SEQ ID NO: 754765 - DNA, 15 bp, Homo sapiens
gctcttgagctgctg

SEQ ID NO: 754766 - DNA, 15 bp, Homo sapiens
ctcttgagctgctga

SEQ ID NO: 754767 - DNA, 15 bp, Homo sapiens
tcttgagctgctgat

SEQ ID NO: 754768 - DNA, 15 bp, Homo sapiens
cttgagctgctgatc

SEQ ID NO: 754769 - DNA, 15 bp, Homo sapiens
ttgagctgctgatca

SEQ ID NO: 754770 - DNA, 15 bp, Homo sapiens
tgagctgctgatcat

SEQ ID NO: 754771 - DNA, 15 bp, Homo sapiens
gagctgctgatcatc

SEQ ID NO: 754772 - DNA, 15 bp, Homo sapiens
agctgctgatcatca

SEQ ID NO: 754773 - DNA, 15 bp, Homo sapiens
gctgctgatcatcac

SEQ ID NO: 754774 - DNA, 15 bp, Homo sapiens
ctgctgatcatcact

SEQ ID NO: 754775 - DNA, 15 bp, Homo sapiens
tgctgatcatcactg

SEQ ID NO: 754776 - DNA, 15 bp, Homo sapiens
gctgatcatcactgc

SEQ ID NO: 754777 - DNA, 15 bp, Homo sapiens
ctgatcatcactgca

SEQ ID NO: 754778 - DNA, 15 bp, Homo sapiens
tgatcatcactgcag

SEQ ID NO: 754779 - DNA, 15 bp, Homo sapiens
gatcatcactgcaga

SEQ ID NO: 754780 - DNA, 15 bp, Homo sapiens
atcatcactgcagag

SEQ ID NO: 754781 - DNA, 15 bp, Homo sapiens
tcatcactgcagagt

SEQ ID NO: 754782 - DNA, 15 bp, Homo sapiens
catcactgcagagtg

SEQ ID NO: 754783 - DNA, 15 bp, Homo sapiens
atcactgcagagtgc

SEQ ID NO: 754784 - DNA, 15 bp, Homo sapiens
tcactgcagagtgcc

SEQ ID NO: 754785 - DNA, 15 bp, Homo sapiens
cactgcagagtgccc

SEQ ID NO: 754786 - DNA, 15 bp, Homo sapiens
actgcagagtgccca

SEQ ID NO: 754787 - DNA, 15 bp, Homo sapiens
ctgcagagtgcccag

SEQ ID NO: 754788 - DNA, 15 bp, Homo sapiens
tgcagagtgcccagg

SEQ ID NO: 754789 - DNA, 15 bp, Homo sapiens
gcagagtgcccaggt

SEQ ID NO: 754790 - DNA, 15 bp, Homo sapiens
cagagtgcccaggtc

SEQ ID NO: 754791 - DNA, 15 bp, Homo sapiens
agagtgcccaggtct

SEQ ID NO: 754792 - DNA, 15 bp, Homo sapiens
gagtgcccaggtctg

SEQ ID NO: 754793 - DNA, 15 bp, Homo sapiens
agtgcccaggtctga

SEQ ID NO: 754794 - DNA, 15 bp, Homo sapiens
gtgcccaggtctgat

SEQ ID NO: 754795 - DNA, 15 bp, Homo sapiens
tgcccaggtctgatc

SEQ ID NO: 754796 - DNA, 15 bp, Homo sapiens
gcccaggtctgatca

SEQ ID NO: 754797 - DNA, 15 bp, Homo sapiens
cccaggtctgatcaa

SEQ ID NO: 754798 - DNA, 15 bp, Homo sapiens
ccaggtctgatcaac

SEQ ID NO: 754799 - DNA, 15 bp, Homo sapiens
caggtctgatcaaca

SEQ ID NO: 754800 - DNA, 15 bp, Homo sapiens
aggtctgatcaacat

SEQ ID NO: 754801 - DNA, 15 bp, Homo sapiens
ggtctgatcaacatc

SEQ ID NO: 754802 - DNA, 15 bp, Homo sapiens
gtctgatcaacatcc

SEQ ID NO: 754803 - DNA, 15 bp, Homo sapiens
tctgatcaacatccc

SEQ ID NO: 754804 - DNA, 15 bp, Homo sapiens
ctgatcaacatccct

SEQ ID NO: 754805 - DNA, 15 bp, Homo sapiens
tgatcaacatccctg

SEQ ID NO: 754806 - DNA, 15 bp, Homo sapiens
gatcaacatccctgc

SEQ ID NO: 754807 - DNA, 15 bp, Homo sapiens
atcaacatccctgct

SEQ ID NO: 754808 - DNA, 15 bp, Homo sapiens
tcaacatccctgctg

SEQ ID NO: 754809 - DNA, 15 bp, Homo sapiens
caacatccctgctgg

SEQ ID NO: 754810 - DNA, 15 bp, Homo sapiens
aacatccctgctggg

SEQ ID NO: 754811 - DNA, 15 bp, Homo sapiens
acatccctgctggga

SEQ ID NO: 754812 - DNA, 15 bp, Homo sapiens
catccctgctgggaa

SEQ ID NO: 754813 - DNA, 15 bp, Homo sapiens
atccctgctgggaaa

SEQ ID NO: 754814 - DNA, 15 bp, Homo sapiens
tccctgctgggaaaa

SEQ ID NO: 754815 - DNA, 15 bp, Homo sapiens
ccctgctgggaaaag

SEQ ID NO: 754816 - DNA, 15 bp, Homo sapiens
cctgctgggaaaagc

SEQ ID NO: 754817 - DNA, 15 bp, Homo sapiens
ctgctgggaaaagcg

SEQ ID NO: 754818 - DNA, 15 bp, Homo sapiens
tgctgggaaaagcgg

SEQ ID NO: 754819 - DNA, 15 bp, Homo sapiens
gctgggaaaagcgga

SEQ ID NO: 754820 - DNA, 15 bp, Homo sapiens
ctgggaaaagcggag

SEQ ID NO: 754821 - DNA, 15 bp, Homo sapiens
tgggaaaagcggaga

SEQ ID NO: 754822 - DNA, 15 bp, Homo sapiens
gggaaaagcggagat

SEQ ID NO: 754823 - DNA, 15 bp, Homo sapiens
ggaaaagcggagatg

SEQ ID NO: 754824 - DNA, 15 bp, Homo sapiens
gaaaagcggagatga

SEQ ID NO: 754825 - DNA, 15 bp, Homo sapiens
aaaagcggagatgac

SEQ ID NO: 754826 - DNA, 15 bp, Homo sapiens
aaagcggagatgacc

SEQ ID NO: 754827 - DNA, 15 bp, Homo sapiens
aagcggagatgacct

SEQ ID NO: 754828 - DNA, 15 bp, Homo sapiens
agcggagatgacctg

SEQ ID NO: 754829 - DNA, 15 bp, Homo sapiens
gcggagatgacctgg

SEQ ID NO: 754830 - DNA, 15 bp, Homo sapiens
cggagatgacctggc

SEQ ID NO: 754831 - DNA, 15 bp, Homo sapiens
ggagatgacctggcg

SEQ ID NO: 754832 - DNA, 15 bp, Homo sapiens
gagatgacctggcgt

SEQ ID NO: 754833 - DNA, 15 bp, Homo sapiens
agatgacctggcgtg

SEQ ID NO: 754834 - DNA, 15 bp, Homo sapiens
gatgacctggcgtgg

SEQ ID NO: 754835 - DNA, 15 bp, Homo sapiens
atgacctggcgtggt

SEQ ID NO: 754836 - DNA, 15 bp, Homo sapiens
tgacctggcgtggtc

SEQ ID NO: 754837 - DNA, 15 bp, Homo sapiens
gacctggcgtggtcc

SEQ ID NO: 754838 - DNA, 15 bp, Homo sapiens
acctggcgtggtcca

SEQ ID NO: 754839 - DNA, 15 bp, Homo sapiens
cctggcgtggtccat

SEQ ID NO: 754840 - DNA, 15 bp, Homo sapiens
ctggcgtggtccata

SEQ ID NO: 754841 - DNA, 15 bp, Homo sapiens
tggcgtggtccatag

SEQ ID NO: 754842 - DNA, 15 bp, Homo sapiens
ggcgtggtccatagt

SEQ ID NO: 754843 - DNA, 15 bp, Homo sapiens
gcgtggtccatagtg

SEQ ID NO: 754844 - DNA, 15 bp, Homo sapiens
cgtggtccatagtga

SEQ ID NO: 754845 - DNA, 15 bp, Homo sapiens
gtggtccatagtgat

SEQ ID NO: 754846 - DNA, 15 bp, Homo sapiens
tggtccatagtgatc

SEQ ID NO: 754847 - DNA, 15 bp, Homo sapiens
ggtccatagtgatcc

SEQ ID NO: 754848 - DNA, 15 bp, Homo sapiens
gtccatagtgatcca

SEQ ID NO: 754849 - DNA, 15 bp, Homo sapiens
tccatagtgatccaa

SEQ ID NO: 754850 - DNA, 15 bp, Homo sapiens
ccatagtgatccaaa

SEQ ID NO: 754851 - DNA, 15 bp, Homo sapiens
catagtgatccaaat

SEQ ID NO: 754852 - DNA, 15 bp, Homo sapiens
atagtgatccaaatg

SEQ ID NO: 754853 - DNA, 15 bp, Homo sapiens
tagtgatccaaatgt

SEQ ID NO: 754854 - DNA, 15 bp, Homo sapiens
agtgatccaaatgtg

SEQ ID NO: 754855 - DNA, 15 bp, Homo sapiens
gtgatccaaatgtga

SEQ ID NO: 754856 - DNA, 15 bp, Homo sapiens
tgatccaaatgtgat

SEQ ID NO: 754857 - DNA, 15 bp, Homo sapiens
gatccaaatgtgata

SEQ ID NO: 754858 - DNA, 15 bp, Homo sapiens
atccaaatgtgatag

SEQ ID NO: 754859 - DNA, 15 bp, Homo sapiens
tccaaatgtgataga

SEQ ID NO: 754860 - DNA, 15 bp, Homo sapiens
ccaaatgtgatagaa

SEQ ID NO: 754861 - DNA, 15 bp, Homo sapiens
caaatgtgatagaag

SEQ ID NO: 754862 - DNA, 15 bp, Homo sapiens
aaatgtgatagaagg

SEQ ID NO: 754863 - DNA, 15 bp, Homo sapiens
aatgtgatagaaggc

SEQ ID NO: 754864 - DNA, 15 bp, Homo sapiens
atgtgatagaaggct

SEQ ID NO: 754865 - DNA, 15 bp, Homo sapiens
tgtgatagaaggctg

SEQ ID NO: 754866 - DNA, 15 bp, Homo sapiens
gtgatagaaggctgg

SEQ ID NO: 754867 - DNA, 15 bp, Homo sapiens
tgatagaaggctggg

SEQ ID NO: 754868 - DNA, 15 bp, Homo sapiens
gatagaaggctgggg

SEQ ID NO: 754869 - DNA, 15 bp, Homo sapiens
atagaaggctggggg

SEQ ID NO: 754870 - DNA, 15 bp, Homo sapiens
tagaaggctgggggt

SEQ ID NO: 754871 - DNA, 15 bp, Homo sapiens
agaaggctgggggtg

SEQ ID NO: 754872 - DNA, 15 bp, Homo sapiens
gaaggctgggggtgg

SEQ ID NO: 754873 - DNA, 15 bp, Homo sapiens
aaggctgggggtggc

SEQ ID NO: 754874 - DNA, 15 bp, Homo sapiens
aggctgggggtggcc

SEQ ID NO: 754875 - DNA, 15 bp, Homo sapiens
ggctgggggtggccc

SEQ ID NO: 754876 - DNA, 15 bp, Homo sapiens
gctgggggtggcccc

SEQ ID NO: 754877 - DNA, 15 bp, Homo sapiens
ctgggggtggcccca

SEQ ID NO: 754878 - DNA, 15 bp, Homo sapiens
tgggggtggccccag

SEQ ID NO: 754879 - DNA, 15 bp, Homo sapiens
gggggtggccccagt

SEQ ID NO: 754880 - DNA, 15 bp, Homo sapiens
ggggtggccccagtg

SEQ ID NO: 754881 - DNA, 15 bp, Homo sapiens
gggtggccccagtga

SEQ ID NO: 754882 - DNA, 15 bp, Homo sapiens
ggtggccccagtgat

SEQ ID NO: 754883 - DNA, 15 bp, Homo sapiens
gtggccccagtgatg

SEQ ID NO: 754884 - DNA, 15 bp, Homo sapiens
tggccccagtgatgg

SEQ ID NO: 754885 - DNA, 15 bp, Homo sapiens
ggccccagtgatggc

SEQ ID NO: 754886 - DNA, 15 bp, Homo sapiens
gccccagtgatggcc

SEQ ID NO: 754887 - DNA, 15 bp, Homo sapiens
ccccagtgatggcct

SEQ ID NO: 754888 - DNA, 15 bp, Homo sapiens
cccagtgatggccta

SEQ ID NO: 754889 - DNA, 15 bp, Homo sapiens
ccagtgatggcctac

SEQ ID NO: 754890 - DNA, 15 bp, Homo sapiens
cagtgatggcctact

SEQ ID NO: 754891 - DNA, 15 bp, Homo sapiens
agtgatggcctactc

SEQ ID NO: 754892 - DNA, 15 bp, Homo sapiens
gtgatggcctactcc

SEQ ID NO: 754893 - DNA, 15 bp, Homo sapiens
tgatggcctactcct

SEQ ID NO: 754894 - DNA, 15 bp, Homo sapiens
gatggcctactcctt

SEQ ID NO: 754895 - DNA, 15 bp, Homo sapiens
atggcctactccttc

SEQ ID NO: 754896 - DNA, 15 bp, Homo sapiens
tggcctactccttcc

SEQ ID NO: 754897 - DNA, 15 bp, Homo sapiens
ggcctactccttccc

SEQ ID NO: 754898 - DNA, 15 bp, Homo sapiens
gcctactccttccct

SEQ ID NO: 754899 - DNA, 15 bp, Homo sapiens
cctactccttccctt

SEQ ID NO: 754900 - DNA, 15 bp, Homo sapiens
ctactccttcccttc

SEQ ID NO: 754901 - DNA, 15 bp, Homo sapiens
tactccttcccttcc

SEQ ID NO: 754902 - DNA, 15 bp, Homo sapiens
actccttcccttcca

SEQ ID NO: 754903 - DNA, 15 bp, Homo sapiens
ctccttcccttccaa

SEQ ID NO: 754904 - DNA, 15 bp, Homo sapiens
tccttcccttccaac

SEQ ID NO: 754905 - DNA, 15 bp, Homo sapiens
ccttcccttccaacc

SEQ ID NO: 754906 - DNA, 15 bp, Homo sapiens
cttcccttccaaccc

SEQ ID NO: 754907 - DNA, 15 bp, Homo sapiens
ttcccttccaaccct

SEQ ID NO: 754908 - DNA, 15 bp, Homo sapiens
tcccttccaaccctc

SEQ ID NO: 754909 - DNA, 15 bp, Homo sapiens
cccttccaaccctcc

SEQ ID NO: 754910 - DNA, 15 bp, Homo sapiens
ccttccaaccctcca

SEQ ID NO: 754911 - DNA, 15 bp, Homo sapiens
cttccaaccctccac

SEQ ID NO: 754912 - DNA, 15 bp, Homo sapiens
ttccaaccctccacc

SEQ ID NO: 754913 - DNA, 15 bp, Homo sapiens
tccaaccctccacct

SEQ ID NO: 754914 - DNA, 15 bp, Homo sapiens
ccaaccctccacctc

SEQ ID NO: 754915 - DNA, 15 bp, Homo sapiens
caaccctccacctcc

SEQ ID NO: 754916 - DNA, 15 bp, Homo sapiens
aaccctccacctcct

SEQ ID NO: 754917 - DNA, 15 bp, Homo sapiens
accctccacctcctc

SEQ ID NO: 754918 - DNA, 15 bp, Homo sapiens
ccctccacctcctcc

SEQ ID NO: 754919 - DNA, 15 bp, Homo sapiens
cctccacctcctcca

SEQ ID NO: 754920 - DNA, 15 bp, Homo sapiens
ctccacctcctccat

SEQ ID NO: 754921 - DNA, 15 bp, Homo sapiens
tccacctcctccatc

SEQ ID NO: 754922 - DNA, 15 bp, Homo sapiens
ccacctcctccatcc

SEQ ID NO: 754923 - DNA, 15 bp, Homo sapiens
cacctcctccatcct

SEQ ID NO: 754924 - DNA, 15 bp, Homo sapiens
acctcctccatcctc

SEQ ID NO: 754925 - DNA, 15 bp, Homo sapiens
cctcctccatcctcc

SEQ ID NO: 754926 - DNA, 15 bp, Homo sapiens
ctcctccatcctcca

SEQ ID NO: 754927 - DNA, 15 bp, Homo sapiens
tcctccatcctccaa

SEQ ID NO: 754928 - DNA, 15 bp, Homo sapiens
cctccatcctccaag

SEQ ID NO: 754929 - DNA, 15 bp, Homo sapiens
ctccatcctccaagt

SEQ ID NO: 754930 - DNA, 15 bp, Homo sapiens
tccatcctccaagtc

SEQ ID NO: 754931 - DNA, 15 bp, Homo sapiens
ccatcctccaagtct

SEQ ID NO: 754932 - DNA, 15 bp, Homo sapiens
catcctccaagtctt

SEQ ID NO: 754933 - DNA, 15 bp, Homo sapiens
atcctccaagtctta

SEQ ID NO: 754934 - DNA, 15 bp, Homo sapiens
tcctccaagtcttag

SEQ ID NO: 754935 - DNA, 15 bp, Homo sapiens
cctccaagtcttagc

SEQ ID NO: 754936 - DNA, 15 bp, Homo sapiens
ctccaagtcttagct

SEQ ID NO: 754937 - DNA, 15 bp, Homo sapiens
tccaagtcttagctc

SEQ ID NO: 754938 - DNA, 15 bp, Homo sapiens
ccaagtcttagctca

SEQ ID NO: 754939 - DNA, 15 bp, Homo sapiens
caagtcttagctcat

SEQ ID NO: 754940 - DNA, 15 bp, Homo sapiens
aagtcttagctcatc

SEQ ID NO: 754941 - DNA, 15 bp, Homo sapiens
agtcttagctcatct

SEQ ID NO: 754942 - DNA, 15 bp, Homo sapiens
gtcttagctcatctt

SEQ ID NO: 754943 - DNA, 15 bp, Homo sapiens
tcttagctcatcttg

SEQ ID NO: 754944 - DNA, 15 bp, Homo sapiens
cttagctcatcttgc

SEQ ID NO: 754945 - DNA, 15 bp, Homo sapiens
ttagctcatcttgct

SEQ ID NO: 754946 - DNA, 15 bp, Homo sapiens
tagctcatcttgctg

SEQ ID NO: 754947 - DNA, 15 bp, Homo sapiens
agctcatcttgctgg

SEQ ID NO: 754948 - DNA, 15 bp, Homo sapiens
gctcatcttgctggg

SEQ ID NO: 754949 - DNA, 15 bp, Homo sapiens
ctcatcttgctggga

SEQ ID NO: 754950 - DNA, 15 bp, Homo sapiens
tcatcttgctgggaa

SEQ ID NO: 754951 - DNA, 15 bp, Homo sapiens
catcttgctgggaat

SEQ ID NO: 754952 - DNA, 15 bp, Homo sapiens
atcttgctgggaatg

SEQ ID NO: 754953 - DNA, 15 bp, Homo sapiens
tcttgctgggaatgc

SEQ ID NO: 754954 - DNA, 15 bp, Homo sapiens
cttgctgggaatgcc

SEQ ID NO: 754955 - DNA, 15 bp, Homo sapiens
ttgctgggaatgccg

SEQ ID NO: 754956 - DNA, 15 bp, Homo sapiens
tgctgggaatgccgc

SEQ ID NO: 754957 - DNA, 15 bp, Homo sapiens
gctgggaatgccgcc

SEQ ID NO: 754958 - DNA, 15 bp, Homo sapiens
ctgggaatgccgcct

SEQ ID NO: 754959 - DNA, 15 bp, Homo sapiens
tgggaatgccgcctt

SEQ ID NO: 754960 - DNA, 15 bp, Homo sapiens
gggaatgccgccttc

SEQ ID NO: 754961 - DNA, 15 bp, Homo sapiens
ggaatgccgccttcc

SEQ ID NO: 754962 - DNA, 15 bp, Homo sapiens
gaatgccgccttcct

SEQ ID NO: 754963 - DNA, 15 bp, Homo sapiens
aatgccgccttcctg

SEQ ID NO: 754964 - DNA, 15 bp, Homo sapiens
atgccgccttcctgg

SEQ ID NO: 754965 - DNA, 15 bp, Homo sapiens
tgccgccttcctggg

SEQ ID NO: 754966 - DNA, 15 bp, Homo sapiens
gccgccttcctggga

SEQ ID NO: 754967 - DNA, 15 bp, Homo sapiens
ccgccttcctgggaa

SEQ ID NO: 754968 - DNA, 15 bp, Homo sapiens
cgccttcctgggaag

SEQ ID NO: 754969 - DNA, 15 bp, Homo sapiens
gccttcctgggaagc

SEQ ID NO: 754970 - DNA, 15 bp, Homo sapiens
ccttcctgggaagcc

SEQ ID NO: 754971 - DNA, 15 bp, Homo sapiens
cttcctgggaagcct

SEQ ID NO: 754972 - DNA, 15 bp, Homo sapiens
ttcctgggaagcctt

SEQ ID NO: 754973 - DNA, 15 bp, Homo sapiens
tcctgggaagccttc

SEQ ID NO: 754974 - DNA, 15 bp, Homo sapiens
cctgggaagccttct

SEQ ID NO: 754975 - DNA, 15 bp, Homo sapiens
ctgggaagccttctc

SEQ ID NO: 754976 - DNA, 15 bp, Homo sapiens
tgggaagccttctct

SEQ ID NO: 754977 - DNA, 15 bp, Homo sapiens
gggaagccttctcta

SEQ ID NO: 754978 - DNA, 15 bp, Homo sapiens
ggaagccttctctac

SEQ ID NO: 754979 - DNA, 15 bp, Homo sapiens
gaagccttctctacc

SEQ ID NO: 754980 - DNA, 15 bp, Homo sapiens
aagccttctctacct

SEQ ID NO: 754981 - DNA, 15 bp, Homo sapiens
agccttctctaccta

SEQ ID NO: 754982 - DNA, 15 bp, Homo sapiens
gccttctctacctac

SEQ ID NO: 754983 - DNA, 15 bp, Homo sapiens
ccttctctacctacc

SEQ ID NO: 754984 - DNA, 15 bp, Homo sapiens
cttctctacctaccc

SEQ ID NO: 754985 - DNA, 15 bp, Homo sapiens
ttctctacctaccct

SEQ ID NO: 754986 - DNA, 15 bp, Homo sapiens
tctctacctacccta

SEQ ID NO: 754987 - DNA, 15 bp, Homo sapiens
ctctacctaccctag

SEQ ID NO: 754988 - DNA, 15 bp, Homo sapiens
tctacctaccctagt

SEQ ID NO: 754989 - DNA, 15 bp, Homo sapiens
ctacctaccctagtc

SEQ ID NO: 754990 - DNA, 15 bp, Homo sapiens
tacctaccctagtca

SEQ ID NO: 754991 - DNA, 15 bp, Homo sapiens
acctaccctagtcag

SEQ ID NO: 754992 - DNA, 15 bp, Homo sapiens
cctaccctagtcagc

SEQ ID NO: 754993 - DNA, 15 bp, Homo sapiens
ctaccctagtcagct

SEQ ID NO: 754994 - DNA, 15 bp, Homo sapiens
taccctagtcagctt

SEQ ID NO: 754995 - DNA, 15 bp, Homo sapiens
accctagtcagcttt

SEQ ID NO: 754996 - DNA, 15 bp, Homo sapiens
ccctagtcagctttc

SEQ ID NO: 754997 - DNA, 15 bp, Homo sapiens
cctagtcagctttct

SEQ ID NO: 754998 - DNA, 15 bp, Homo sapiens
ctagtcagctttctc

SEQ ID NO: 754999 - DNA, 15 bp, Homo sapiens
tagtcagctttctct

SEQ ID NO: 755000 - DNA, 15 bp, Homo sapiens
agtcagctttctctg

SEQ ID NO: 755001 - DNA, 15 bp, Homo sapiens
gtcagctttctctgc

SEQ ID NO: 755002 - DNA, 15 bp, Homo sapiens
tcagctttctctgcc

SEQ ID NO: 755003 - DNA, 15 bp, Homo sapiens
cagctttctctgcct

SEQ ID NO: 755004 - DNA, 15 bp, Homo sapiens
agctttctctgcctc

SEQ ID NO: 755005 - DNA, 15 bp, Homo sapiens
gctttctctgcctct

SEQ ID NO: 755006 - DNA, 15 bp, Homo sapiens
ctttctctgcctctc

SEQ ID NO: 755007 - DNA, 15 bp, Homo sapiens
tttctctgcctctcc

SEQ ID NO: 755008 - DNA, 15 bp, Homo sapiens
ttctctgcctctccc

SEQ ID NO: 755009 - DNA, 15 bp, Homo sapiens
tctctgcctctccct

SEQ ID NO: 755010 - DNA, 15 bp, Homo sapiens
ctctgcctctccctt

SEQ ID NO: 755011 - DNA, 15 bp, Homo sapiens
tctgcctctcccttc

SEQ ID NO: 755012 - DNA, 15 bp, Homo sapiens
ctgcctctcccttcc

SEQ ID NO: 755013 - DNA, 15 bp, Homo sapiens
tgcctctcccttccc

SEQ ID NO: 755014 - DNA, 15 bp, Homo sapiens
gcctctcccttccct

SEQ ID NO: 755015 - DNA, 15 bp, Homo sapiens
cctctcccttccctg

SEQ ID NO: 755016 - DNA, 15 bp, Homo sapiens
ctctcccttccctga

SEQ ID NO: 755017 - DNA, 15 bp, Homo sapiens
tctcccttccctgat

SEQ ID NO: 755018 - DNA, 15 bp, Homo sapiens
ctcccttccctgatg

SEQ ID NO: 755019 - DNA, 15 bp, Homo sapiens
tcccttccctgatgc

SEQ ID NO: 755020 - DNA, 15 bp, Homo sapiens
cccttccctgatgcg

SEQ ID NO: 755021 - DNA, 15 bp, Homo sapiens
ccttccctgatgcgt

SEQ ID NO: 755022 - DNA, 15 bp, Homo sapiens
cttccctgatgcgtc

SEQ ID NO: 755023 - DNA, 15 bp, Homo sapiens
ttccctgatgcgtcc

SEQ ID NO: 755024 - DNA, 15 bp, Homo sapiens
tccctgatgcgtcct

SEQ ID NO: 755025 - DNA, 15 bp, Homo sapiens
ccctgatgcgtcctc

SEQ ID NO: 755026 - DNA, 15 bp, Homo sapiens
cctgatgcgtcctct

SEQ ID NO: 755027 - DNA, 15 bp, Homo sapiens
ctgatgcgtcctctc

SEQ ID NO: 755028 - DNA, 15 bp, Homo sapiens
tgatgcgtcctctct

SEQ ID NO: 755029 - DNA, 15 bp, Homo sapiens
gatgcgtcctctctg

SEQ ID NO: 755030 - DNA, 15 bp, Homo sapiens
atgcgtcctctctgt

SEQ ID NO: 755031 - DNA, 15 bp, Homo sapiens
tgcgtcctctctgtt

SEQ ID NO: 755032 - DNA, 15 bp, Homo sapiens
gcgtcctctctgttt

SEQ ID NO: 755033 - DNA, 15 bp, Homo sapiens
cgtcctctctgtttg

SEQ ID NO: 755034 - DNA, 15 bp, Homo sapiens
gtcctctctgtttgt

SEQ ID NO: 755035 - DNA, 15 bp, Homo sapiens
tcctctctgtttgtc

SEQ ID NO: 755036 - DNA, 15 bp, Homo sapiens
cctctctgtttgtcc

SEQ ID NO: 755037 - DNA, 15 bp, Homo sapiens
ctctctgtttgtcct

SEQ ID NO: 755038 - DNA, 15 bp, Homo sapiens
tctctgtttgtcctt

SEQ ID NO: 755039 - DNA, 15 bp, Homo sapiens
ctctgtttgtccttc

SEQ ID NO: 755040 - DNA, 15 bp, Homo sapiens
tctgtttgtccttcc

SEQ ID NO: 755041 - DNA, 15 bp, Homo sapiens
ctgtttgtccttcca

SEQ ID NO: 755042 - DNA, 15 bp, Homo sapiens
tgtttgtccttccat

SEQ ID NO: 755043 - DNA, 15 bp, Homo sapiens
gtttgtccttccatc

SEQ ID NO: 755044 - DNA, 15 bp, Homo sapiens
tttgtccttccatcc

SEQ ID NO: 755045 - DNA, 15 bp, Homo sapiens
ttgtccttccatcct

SEQ ID NO: 755046 - DNA, 15 bp, Homo sapiens
tgtccttccatcctg

SEQ ID NO: 755047 - DNA, 15 bp, Homo sapiens
gtccttccatcctgg

SEQ ID NO: 755048 - DNA, 15 bp, Homo sapiens
tccttccatcctggg

SEQ ID NO: 755049 - DNA, 15 bp, Homo sapiens
ccttccatcctgggt

SEQ ID NO: 755050 - DNA, 15 bp, Homo sapiens
cttccatcctgggtg

SEQ ID NO: 755051 - DNA, 15 bp, Homo sapiens
ttccatcctgggtgg

SEQ ID NO: 755052 - DNA, 15 bp, Homo sapiens
tccatcctgggtggg

SEQ ID NO: 755053 - DNA, 15 bp, Homo sapiens
ccatcctgggtgggg

SEQ ID NO: 755054 - DNA, 15 bp, Homo sapiens
catcctgggtgggga

SEQ ID NO: 755055 - DNA, 15 bp, Homo sapiens
atcctgggtggggag

SEQ ID NO: 755056 - DNA, 15 bp, Homo sapiens
tcctgggtggggagc

SEQ ID NO: 755057 - DNA, 15 bp, Homo sapiens
cctgggtggggagca

SEQ ID NO: 755058 - DNA, 15 bp, Homo sapiens
ctgggtggggagcag

SEQ ID NO: 755059 - DNA, 15 bp, Homo sapiens
tgggtggggagcagc

SEQ ID NO: 755060 - DNA, 15 bp, Homo sapiens
gggtggggagcagcc

SEQ ID NO: 755061 - DNA, 15 bp, Homo sapiens
ggtggggagcagccg

SEQ ID NO: 755062 - DNA, 15 bp, Homo sapiens
gtggggagcagccgt

SEQ ID NO: 755063 - DNA, 15 bp, Homo sapiens
tggggagcagccgtc

SEQ ID NO: 755064 - DNA, 15 bp, Homo sapiens
ggggagcagccgtct

SEQ ID NO: 755065 - DNA, 15 bp, Homo sapiens
gggagcagccgtctg

SEQ ID NO: 755066 - DNA, 15 bp, Homo sapiens
ggagcagccgtctga

SEQ ID NO: 755067 - DNA, 15 bp, Homo sapiens
gagcagccgtctgat

SEQ ID NO: 755068 - DNA, 15 bp, Homo sapiens
agcagccgtctgatg

SEQ ID NO: 755069 - DNA, 15 bp, Homo sapiens
gcagccgtctgatgc

SEQ ID NO: 755070 - DNA, 15 bp, Homo sapiens
cagccgtctgatgct

SEQ ID NO: 755071 - DNA, 15 bp, Homo sapiens
agccgtctgatgctg

SEQ ID NO: 755072 - DNA, 15 bp, Homo sapiens
gccgtctgatgctgc

SEQ ID NO: 755073 - DNA, 15 bp, Homo sapiens
ccgtctgatgctgca

SEQ ID NO: 755074 - DNA, 15 bp, Homo sapiens
cgtctgatgctgcag

SEQ ID NO: 755075 - DNA, 15 bp, Homo sapiens
gtctgatgctgcagc

SEQ ID NO: 755076 - DNA, 15 bp, Homo sapiens
tctgatgctgcagcc

SEQ ID NO: 755077 - DNA, 15 bp, Homo sapiens
ctgatgctgcagccc

SEQ ID NO: 755078 - DNA, 15 bp, Homo sapiens
tgatgctgcagccct

SEQ ID NO: 755079 - DNA, 15 bp, Homo sapiens
gatgctgcagcccta

SEQ ID NO: 755080 - DNA, 15 bp, Homo sapiens
atgctgcagccctat

SEQ ID NO: 755081 - DNA, 15 bp, Homo sapiens
tgctgcagccctatt

SEQ ID NO: 755082 - DNA, 15 bp, Homo sapiens
gctgcagccctattt

SEQ ID NO: 755083 - DNA, 15 bp, Homo sapiens
ctgcagccctatttt

SEQ ID NO: 755084 - DNA, 15 bp, Homo sapiens
tgcagccctattttc

SEQ ID NO: 755085 - DNA, 15 bp, Homo sapiens
gcagccctattttct

SEQ ID NO: 755086 - DNA, 15 bp, Homo sapiens
cagccctattttcta

SEQ ID NO: 755087 - DNA, 15 bp, Homo sapiens
agccctattttctat

SEQ ID NO: 755088 - DNA, 15 bp, Homo sapiens
gccctattttctata

SEQ ID NO: 755089 - DNA, 15 bp, Homo sapiens
ccctattttctatac

SEQ ID NO: 755090 - DNA, 15 bp, Homo sapiens
cctattttctataca

SEQ ID NO: 755091 - DNA, 15 bp, Homo sapiens
ctattttctatacag

SEQ ID NO: 755092 - DNA, 15 bp, Homo sapiens
tattttctatacagg

SEQ ID NO: 755093 - DNA, 15 bp, Homo sapiens
attttctatacaggc

SEQ ID NO: 755094 - DNA, 15 bp, Homo sapiens
ttttctatacaggca

SEQ ID NO: 755095 - DNA, 15 bp, Homo sapiens
tttctatacaggcat

SEQ ID NO: 755096 - DNA, 15 bp, Homo sapiens
ttctatacaggcatc

SEQ ID NO: 755097 - DNA, 15 bp, Homo sapiens
tctatacaggcatcc

SEQ ID NO: 755098 - DNA, 15 bp, Homo sapiens
ctatacaggcatcct

SEQ ID NO: 755099 - DNA, 15 bp, Homo sapiens
tatacaggcatcctg

SEQ ID NO: 755100 - DNA, 15 bp, Homo sapiens
atacaggcatcctgt

SEQ ID NO: 755101 - DNA, 15 bp, Homo sapiens
tacaggcatcctgtc

SEQ ID NO: 755102 - DNA, 15 bp, Homo sapiens
acaggcatcctgtct

SEQ ID NO: 755103 - DNA, 15 bp, Homo sapiens
caggcatcctgtctc

SEQ ID NO: 755104 - DNA, 15 bp, Homo sapiens
aggcatcctgtctcc

SEQ ID NO: 755105 - DNA, 15 bp, Homo sapiens
ggcatcctgtctcct

SEQ ID NO: 755106 - DNA, 15 bp, Homo sapiens
gcatcctgtctcctc

SEQ ID NO: 755107 - DNA, 15 bp, Homo sapiens
catcctgtctcctct

SEQ ID NO: 755108 - DNA, 15 bp, Homo sapiens
atcctgtctcctctg

SEQ ID NO: 755109 - DNA, 15 bp, Homo sapiens
tcctgtctcctctgc

SEQ ID NO: 755110 - DNA, 15 bp, Homo sapiens
cctgtctcctctgca

SEQ ID NO: 755111 - DNA, 15 bp, Homo sapiens
ctgtctcctctgcag

SEQ ID NO: 755112 - DNA, 15 bp, Homo sapiens
tgtctcctctgcaga

SEQ ID NO: 755113 - DNA, 15 bp, Homo sapiens
gtctcctctgcagac

SEQ ID NO: 755114 - DNA, 15 bp, Homo sapiens
tctcctctgcagaca

SEQ ID NO: 755115 - DNA, 15 bp, Homo sapiens
ctcctctgcagacag

SEQ ID NO: 755116 - DNA, 15 bp, Homo sapiens
tcctctgcagacagc

SEQ ID NO: 755117 - DNA, 15 bp, Homo sapiens
cctctgcagacagct

SEQ ID NO: 755118 - DNA, 15 bp, Homo sapiens
ctctgcagacagctc

SEQ ID NO: 755119 - DNA, 15 bp, Homo sapiens
tctgcagacagctcc

SEQ ID NO: 755120 - DNA, 15 bp, Homo sapiens
ctgcagacagctcct

SEQ ID NO: 755121 - DNA, 15 bp, Homo sapiens
tgcagacagctcctt

SEQ ID NO: 755122 - DNA, 15 bp, Homo sapiens
gcagacagctccttg

SEQ ID NO: 755123 - DNA, 15 bp, Homo sapiens
cagacagctccttgt

SEQ ID NO: 755124 - DNA, 15 bp, Homo sapiens
agacagctccttgtg

SEQ ID NO: 755125 - DNA, 15 bp, Homo sapiens
gacagctccttgtgg

SEQ ID NO: 755126 - DNA, 15 bp, Homo sapiens
acagctccttgtgga

SEQ ID NO: 755127 - DNA, 15 bp, Homo sapiens
cagctccttgtggac

SEQ ID NO: 755128 - DNA, 15 bp, Homo sapiens
agctccttgtggaca

SEQ ID NO: 755129 - DNA, 15 bp, Homo sapiens
gctccttgtggacag

SEQ ID NO: 755130 - DNA, 15 bp, Homo sapiens
ctccttgtggacagg

SEQ ID NO: 755131 - DNA, 15 bp, Homo sapiens
tccttgtggacaggg

SEQ ID NO: 755132 - DNA, 15 bp, Homo sapiens
ccttgtggacagggc

SEQ ID NO: 755133 - DNA, 15 bp, Homo sapiens
cttgtggacagggct

SEQ ID NO: 755134 - DNA, 15 bp, Homo sapiens
ttgtggacagggctg

SEQ ID NO: 755135 - DNA, 15 bp, Homo sapiens
tgtggacagggctgg

SEQ ID NO: 755136 - DNA, 15 bp, Homo sapiens
gtggacagggctggt

SEQ ID NO: 755137 - DNA, 15 bp, Homo sapiens
tggacagggctggtc

SEQ ID NO: 755138 - DNA, 15 bp, Homo sapiens
ggacagggctggtcc

SEQ ID NO: 755139 - DNA, 15 bp, Homo sapiens
gacagggctggtcct

SEQ ID NO: 755140 - DNA, 15 bp, Homo sapiens
acagggctggtcctg

SEQ ID NO: 755141 - DNA, 15 bp, Homo sapiens
cagggctggtcctgg

SEQ ID NO: 755142 - DNA, 15 bp, Homo sapiens
agggctggtcctggt

SEQ ID NO: 755143 - DNA, 15 bp, Homo sapiens
gggctggtcctggtt

SEQ ID NO: 755144 - DNA, 15 bp, Homo sapiens
ggctggtcctggttt

SEQ ID NO: 755145 - DNA, 15 bp, Homo sapiens
gctggtcctggtttc

SEQ ID NO: 755146 - DNA, 15 bp, Homo sapiens
ctggtcctggtttct

SEQ ID NO: 755147 - DNA, 15 bp, Homo sapiens
tggtcctggtttctt

SEQ ID NO: 755148 - DNA, 15 bp, Homo sapiens
ggtcctggtttcttt

SEQ ID NO: 755149 - DNA, 15 bp, Homo sapiens
gtcctggtttctttc

SEQ ID NO: 755150 - DNA, 15 bp, Homo sapiens
tcctggtttctttct

SEQ ID NO: 755151 - DNA, 15 bp, Homo sapiens
cctggtttctttctg

SEQ ID NO: 755152 - DNA, 15 bp, Homo sapiens
ctggtttctttctgg

SEQ ID NO: 755153 - DNA, 15 bp, Homo sapiens
tggtttctttctgga

SEQ ID NO: 755154 - DNA, 15 bp, Homo sapiens
ggtttctttctggat

SEQ ID NO: 755155 - DNA, 15 bp, Homo sapiens
gtttctttctggatc

SEQ ID NO: 755156 - DNA, 15 bp, Homo sapiens
tttctttctggatct

SEQ ID NO: 755157 - DNA, 15 bp, Homo sapiens
ttctttctggatctg

SEQ ID NO: 755158 - DNA, 15 bp, Homo sapiens
tctttctggatctgt

SEQ ID NO: 755159 - DNA, 15 bp, Homo sapiens
ctttctggatctgtg

SEQ ID NO: 755160 - DNA, 15 bp, Homo sapiens
tttctggatctgtgc

SEQ ID NO: 755161 - DNA, 15 bp, Homo sapiens
ttctggatctgtgcc

SEQ ID NO: 755162 - DNA, 15 bp, Homo sapiens
tctggatctgtgcct

SEQ ID NO: 755163 - DNA, 15 bp, Homo sapiens
ctggatctgtgcctg

SEQ ID NO: 755164 - DNA, 15 bp, Homo sapiens
tggatctgtgcctgg

SEQ ID NO: 755165 - DNA, 15 bp, Homo sapiens
ggatctgtgcctggc

SEQ ID NO: 755166 - DNA, 15 bp, Homo sapiens
gatctgtgcctggca

SEQ ID NO: 755167 - DNA, 15 bp, Homo sapiens
atctgtgcctggcag

SEQ ID NO: 755168 - DNA, 15 bp, Homo sapiens
tctgtgcctggcagg

SEQ ID NO: 755169 - DNA, 15 bp, Homo sapiens
ctgtgcctggcaggt

SEQ ID NO: 755170 - DNA, 15 bp, Homo sapiens
tgtgcctggcaggtg

SEQ ID NO: 755171 - DNA, 15 bp, Homo sapiens
gtgcctggcaggtgg

SEQ ID NO: 755172 - DNA, 15 bp, Homo sapiens
tgcctggcaggtggt

SEQ ID NO: 755173 - DNA, 15 bp, Homo sapiens
gcctggcaggtggtc

SEQ ID NO: 755174 - DNA, 15 bp, Homo sapiens
cctggcaggtggtcc

SEQ ID NO: 755175 - DNA, 15 bp, Homo sapiens
ctggcaggtggtcct

SEQ ID NO: 755176 - DNA, 15 bp, Homo sapiens
tggcaggtggtccta

SEQ ID NO: 755177 - DNA, 15 bp, Homo sapiens
ggcaggtggtcctag

SEQ ID NO: 755178 - DNA, 15 bp, Homo sapiens
gcaggtggtcctaga

SEQ ID NO: 755179 - DNA, 15 bp, Homo sapiens
caggtggtcctagag

SEQ ID NO: 755180 - DNA, 15 bp, Homo sapiens
aggtggtcctagagg

SEQ ID NO: 755181 - DNA, 15 bp, Homo sapiens
ggtggtcctagaggg

SEQ ID NO: 755182 - DNA, 15 bp, Homo sapiens
gtggtcctagagggc

SEQ ID NO: 755183 - DNA, 15 bp, Homo sapiens
tggtcctagagggca

SEQ ID NO: 755184 - DNA, 15 bp, Homo sapiens
ggtcctagagggcag

SEQ ID NO: 755185 - DNA, 15 bp, Homo sapiens
gtcctagagggcagt

SEQ ID NO: 755186 - DNA, 15 bp, Homo sapiens
tcctagagggcagtg

SEQ ID NO: 755187 - DNA, 15 bp, Homo sapiens
cctagagggcagtga

SEQ ID NO: 755188 - DNA, 15 bp, Homo sapiens
ctagagggcagtgac

SEQ ID NO: 755189 - DNA, 15 bp, Homo sapiens
tagagggcagtgacc

SEQ ID NO: 755190 - DNA, 15 bp, Homo sapiens
agagggcagtgacca

SEQ ID NO: 755191 - DNA, 15 bp, Homo sapiens
gagggcagtgaccag

SEQ ID NO: 755192 - DNA, 15 bp, Homo sapiens
agggcagtgaccagg

SEQ ID NO: 755193 - DNA, 15 bp, Homo sapiens
gggcagtgaccaggg

SEQ ID NO: 755194 - DNA, 15 bp, Homo sapiens
ggcagtgaccagggg

SEQ ID NO: 755195 - DNA, 15 bp, Homo sapiens
gcagtgaccaggggt

SEQ ID NO: 755196 - DNA, 15 bp, Homo sapiens
cagtgaccaggggtc

SEQ ID NO: 755197 - DNA, 15 bp, Homo sapiens
agtgaccaggggtcg

SEQ ID NO: 755198 - DNA, 15 bp, Homo sapiens
gtgaccaggggtcgc

SEQ ID NO: 755199 - DNA, 15 bp, Homo sapiens
tgaccaggggtcgct

SEQ ID NO: 755200 - DNA, 15 bp, Homo sapiens
gaccaggggtcgctc

SEQ ID NO: 755201 - DNA, 15 bp, Homo sapiens
accaggggtcgctca

SEQ ID NO: 755202 - DNA, 15 bp, Homo sapiens
ccaggggtcgctcaa

SEQ ID NO: 755203 - DNA, 15 bp, Homo sapiens
caggggtcgctcaat

SEQ ID NO: 755204 - DNA, 15 bp, Homo sapiens
aggggtcgctcaatg

SEQ ID NO: 755205 - DNA, 15 bp, Homo sapiens
ggggtcgctcaatgt

SEQ ID NO: 755206 - DNA, 15 bp, Homo sapiens
gggtcgctcaatgtg

SEQ ID NO: 755207 - DNA, 15 bp, Homo sapiens
ggtcgctcaatgtgg

SEQ ID NO: 755208 - DNA, 15 bp, Homo sapiens
gtcgctcaatgtggt

SEQ ID NO: 755209 - DNA, 15 bp, Homo sapiens
tcgctcaatgtggtg

SEQ ID NO: 755210 - DNA, 15 bp, Homo sapiens
cgctcaatgtggtgg

SEQ ID NO: 755211 - DNA, 15 bp, Homo sapiens
gctcaatgtggtggc

SEQ ID NO: 755212 - DNA, 15 bp, Homo sapiens
ctcaatgtggtggct

SEQ ID NO: 755213 - DNA, 15 bp, Homo sapiens
tcaatgtggtggctg

SEQ ID NO: 755214 - DNA, 15 bp, Homo sapiens
caatgtggtggctgg

SEQ ID NO: 755215 - DNA, 15 bp, Homo sapiens
aatgtggtggctggt

SEQ ID NO: 755216 - DNA, 15 bp, Homo sapiens
atgtggtggctggtc

SEQ ID NO: 755217 - DNA, 15 bp, Homo sapiens
tgtggtggctggtca

SEQ ID NO: 755218 - DNA, 15 bp, Homo sapiens
gtggtggctggtcat

SEQ ID NO: 755219 - DNA, 15 bp, Homo sapiens
tggtggctggtcatc

SEQ ID NO: 755220 - DNA, 15 bp, Homo sapiens
aggatcatttaggaa

SEQ ID NO: 755221 - DNA, 15 bp, Homo sapiens
ggatcatttaggaat

SEQ ID NO: 755222 - DNA, 15 bp, Homo sapiens
gatcatttaggaatt

SEQ ID NO: 755223 - DNA, 15 bp, Homo sapiens
atcatttaggaattt

SEQ ID NO: 755224 - DNA, 15 bp, Homo sapiens
tcatttaggaatttt

SEQ ID NO: 755225 - DNA, 15 bp, Homo sapiens
catttaggaattttt

SEQ ID NO: 755226 - DNA, 15 bp, Homo sapiens
atttaggaattttta

SEQ ID NO: 755227 - DNA, 15 bp, Homo sapiens
tttaggaatttttat

SEQ ID NO: 755228 - DNA, 15 bp, Homo sapiens
ttaggaatttttatt

SEQ ID NO: 755229 - DNA, 15 bp, Homo sapiens
taggaatttttattc

SEQ ID NO: 755230 - DNA, 15 bp, Homo sapiens
aggaatttttattcc

SEQ ID NO: 755231 - DNA, 15 bp, Homo sapiens
ggaatttttattcct

SEQ ID NO: 755232 - DNA, 15 bp, Homo sapiens
gaatttttattcctt

SEQ ID NO: 755233 - DNA, 15 bp, Homo sapiens
aatttttattcctta

SEQ ID NO: 755234 - DNA, 15 bp, Homo sapiens
atttttattccttaa

SEQ ID NO: 755235 - DNA, 15 bp, Homo sapiens
tttttattccttaat

SEQ ID NO: 755236 - DNA, 15 bp, Homo sapiens
ttttattccttaatt

SEQ ID NO: 755237 - DNA, 15 bp, Homo sapiens
tttattccttaattg

SEQ ID NO: 755238 - DNA, 15 bp, Homo sapiens
ttattccttaattga

SEQ ID NO: 755239 - DNA, 15 bp, Homo sapiens
tattccttaattgac

SEQ ID NO: 755240 - DNA, 15 bp, Homo sapiens
attccttaattgaca

SEQ ID NO: 755241 - DNA, 15 bp, Homo sapiens
ttccttaattgacat

SEQ ID NO: 755242 - DNA, 15 bp, Homo sapiens
tccttaattgacatt

SEQ ID NO: 755243 - DNA, 15 bp, Homo sapiens
ccttaattgacattc

SEQ ID NO: 755244 - DNA, 15 bp, Homo sapiens
cttaattgacattca

SEQ ID NO: 755245 - DNA, 15 bp, Homo sapiens
ttaattgacattcaa

SEQ ID NO: 755246 - DNA, 15 bp, Homo sapiens
taattgacattcaaa

SEQ ID NO: 755247 - DNA, 15 bp, Homo sapiens
aattgacattcaaaa

SEQ ID NO: 755248 - DNA, 15 bp, Homo sapiens
attgacattcaaaac

SEQ ID NO: 755249 - DNA, 15 bp, Homo sapiens
ttgacattcaaaact

SEQ ID NO: 755250 - DNA, 15 bp, Homo sapiens
tgacattcaaaactt

SEQ ID NO: 755251 - DNA, 15 bp, Homo sapiens
gacattcaaaacttg

SEQ ID NO: 755252 - DNA, 15 bp, Homo sapiens
acattcaaaacttga

SEQ ID NO: 755253 - DNA, 15 bp, Homo sapiens
cattcaaaacttgat

SEQ ID NO: 755254 - DNA, 15 bp, Homo sapiens
attcaaaacttgatg

SEQ ID NO: 755255 - DNA, 15 bp, Homo sapiens
ttcaaaacttgatgg

SEQ ID NO: 755256 - DNA, 15 bp, Homo sapiens
tcaaaacttgatggt

SEQ ID NO: 755257 - DNA, 15 bp, Homo sapiens
caaaacttgatggta

SEQ ID NO: 755258 - DNA, 15 bp, Homo sapiens
aaaacttgatggtag

SEQ ID NO: 755259 - DNA, 15 bp, Homo sapiens
aaacttgatggtaga

SEQ ID NO: 755260 - DNA, 15 bp, Homo sapiens
aacttgatggtagag

SEQ ID NO: 755261 - DNA, 15 bp, Homo sapiens
acttgatggtagagg

SEQ ID NO: 755262 - DNA, 15 bp, Homo sapiens
cttgatggtagaggt

SEQ ID NO: 755263 - DNA, 15 bp, Homo sapiens
ttgatggtagaggtg

SEQ ID NO: 755264 - DNA, 15 bp, Homo sapiens
tgatggtagaggtga

SEQ ID NO: 755265 - DNA, 15 bp, Homo sapiens
gatggtagaggtgag

SEQ ID NO: 755266 - DNA, 15 bp, Homo sapiens
atggtagaggtgagg

SEQ ID NO: 755267 - DNA, 15 bp, Homo sapiens
tggtagaggtgagga

SEQ ID NO: 755268 - DNA, 15 bp, Homo sapiens
ggtagaggtgaggag

SEQ ID NO: 755269 - DNA, 15 bp, Homo sapiens
gtagaggtgaggaga

SEQ ID NO: 755270 - DNA, 15 bp, Homo sapiens
tagaggtgaggagag

SEQ ID NO: 755271 - DNA, 15 bp, Homo sapiens
agaggtgaggagagg

SEQ ID NO: 755272 - DNA, 15 bp, Homo sapiens
gaggtgaggagaggc

SEQ ID NO: 755273 - DNA, 15 bp, Homo sapiens
aggtgaggagaggcc

SEQ ID NO: 755274 - DNA, 15 bp, Homo sapiens
ggtgaggagaggccc

SEQ ID NO: 755275 - DNA, 15 bp, Homo sapiens
gtgaggagaggccca

SEQ ID NO: 755276 - DNA, 15 bp, Homo sapiens
tgaggagaggcccag

SEQ ID NO: 755277 - DNA, 15 bp, Homo sapiens
gaggagaggcccagg

SEQ ID NO: 755278 - DNA, 15 bp, Homo sapiens
aggagaggcccaggg

SEQ ID NO: 755279 - DNA, 15 bp, Homo sapiens
ggagaggcccaggga

SEQ ID NO: 755280 - DNA, 15 bp, Homo sapiens
gagaggcccagggag

SEQ ID NO: 755281 - DNA, 15 bp, Homo sapiens
agaggcccagggagc

SEQ ID NO: 755282 - DNA, 15 bp, Homo sapiens
gaggcccagggagct

SEQ ID NO: 755283 - DNA, 15 bp, Homo sapiens
aggcccagggagctt

SEQ ID NO: 755284 - DNA, 15 bp, Homo sapiens
ggcccagggagcttg

SEQ ID NO: 755285 - DNA, 15 bp, Homo sapiens
gcccagggagcttgg

SEQ ID NO: 755286 - DNA, 15 bp, Homo sapiens
cccagggagcttggg

SEQ ID NO: 755287 - DNA, 15 bp, Homo sapiens
ccagggagcttggga

SEQ ID NO: 755288 - DNA, 15 bp, Homo sapiens
cagggagcttgggag

SEQ ID NO: 755289 - DNA, 15 bp, Homo sapiens
agggagcttgggaga

SEQ ID NO: 755290 - DNA, 15 bp, Homo sapiens
gggagcttgggagag

SEQ ID NO: 755291 - DNA, 15 bp, Homo sapiens
ggagcttgggagagg

SEQ ID NO: 755292 - DNA, 15 bp, Homo sapiens
gagcttgggagaggc

SEQ ID NO: 755293 - DNA, 15 bp, Homo sapiens
agcttgggagaggcc

SEQ ID NO: 755294 - DNA, 15 bp, Homo sapiens
gcttgggagaggcca

SEQ ID NO: 755295 - DNA, 15 bp, Homo sapiens
cttgggagaggccac

SEQ ID NO: 755296 - DNA, 15 bp, Homo sapiens
ttgggagaggccacg

SEQ ID NO: 755297 - DNA, 15 bp, Homo sapiens
tgggagaggccacgt

SEQ ID NO: 755298 - DNA, 15 bp, Homo sapiens
gggagaggccacgtt

SEQ ID NO: 755299 - DNA, 15 bp, Homo sapiens
ggagaggccacgttg

SEQ ID NO: 755300 - DNA, 15 bp, Homo sapiens
gagaggccacgttgt

SEQ ID NO: 755301 - DNA, 15 bp, Homo sapiens
agaggccacgttgtt

SEQ ID NO: 755302 - DNA, 15 bp, Homo sapiens
gaggccacgttgttt

SEQ ID NO: 755303 - DNA, 15 bp, Homo sapiens
aggccacgttgtttg

SEQ ID NO: 755304 - DNA, 15 bp, Homo sapiens
ggccacgttgtttgt

SEQ ID NO: 755305 - DNA, 15 bp, Homo sapiens
gccacgttgtttgtg

SEQ ID NO: 755306 - DNA, 15 bp, Homo sapiens
ccacgttgtttgtgc

SEQ ID NO: 755307 - DNA, 15 bp, Homo sapiens
cacgttgtttgtgca

SEQ ID NO: 755308 - DNA, 15 bp, Homo sapiens
acgttgtttgtgcag

SEQ ID NO: 755309 - DNA, 15 bp, Homo sapiens
cgttgtttgtgcagt

SEQ ID NO: 755310 - DNA, 15 bp, Homo sapiens
gttgtttgtgcagtt

SEQ ID NO: 755311 - DNA, 15 bp, Homo sapiens
ttgtttgtgcagttg

SEQ ID NO: 755312 - DNA, 15 bp, Homo sapiens
tgtttgtgcagttgg

SEQ ID NO: 755313 - DNA, 15 bp, Homo sapiens
gtttgtgcagttgga

SEQ ID NO: 755314 - DNA, 15 bp, Homo sapiens
tttgtgcagttggaa

SEQ ID NO: 755315 - DNA, 15 bp, Homo sapiens
ttgtgcagttggaag

SEQ ID NO: 755316 - DNA, 15 bp, Homo sapiens
tgtgcagttggaaga

SEQ ID NO: 755317 - DNA, 15 bp, Homo sapiens
gtgcagttggaagac

SEQ ID NO: 755318 - DNA, 15 bp, Homo sapiens
tgcagttggaagact

SEQ ID NO: 755319 - DNA, 15 bp, Homo sapiens
gcagttggaagactc

SEQ ID NO: 755320 - DNA, 15 bp, Homo sapiens
cagttggaagactct

SEQ ID NO: 755321 - DNA, 15 bp, Homo sapiens
agttggaagactctg

SEQ ID NO: 755322 - DNA, 15 bp, Homo sapiens
gttggaagactctgg

SEQ ID NO: 755323 - DNA, 15 bp, Homo sapiens
ttggaagactctggg

SEQ ID NO: 755324 - DNA, 15 bp, Homo sapiens
tggaagactctgggc

SEQ ID NO: 755325 - DNA, 15 bp, Homo sapiens
ggaagactctgggca

SEQ ID NO: 755326 - DNA, 15 bp, Homo sapiens
gaagactctgggcag

SEQ ID NO: 755327 - DNA, 15 bp, Homo sapiens
aagactctgggcagg

SEQ ID NO: 755328 - DNA, 15 bp, Homo sapiens
agactctgggcagga

SEQ ID NO: 755329 - DNA, 15 bp, Homo sapiens
gactctgggcaggaa

SEQ ID NO: 755330 - DNA, 15 bp, Homo sapiens
actctgggcaggaaa

SEQ ID NO: 755331 - DNA, 15 bp, Homo sapiens
ctctgggcaggaaag

SEQ ID NO: 755332 - DNA, 15 bp, Homo sapiens
tctgggcaggaaagg

SEQ ID NO: 755333 - DNA, 15 bp, Homo sapiens
ctgggcaggaaagga

SEQ ID NO: 755334 - DNA, 15 bp, Homo sapiens
tgggcaggaaaggag

SEQ ID NO: 755335 - DNA, 15 bp, Homo sapiens
gggcaggaaaggagc

SEQ ID NO: 755336 - DNA, 15 bp, Homo sapiens
ggcaggaaaggagca

SEQ ID NO: 755337 - DNA, 15 bp, Homo sapiens
gcaggaaaggagcac

SEQ ID NO: 755338 - DNA, 15 bp, Homo sapiens
caggaaaggagcacc

SEQ ID NO: 755339 - DNA, 15 bp, Homo sapiens
aggaaaggagcacca

SEQ ID NO: 755340 - DNA, 15 bp, Homo sapiens
ggaaaggagcaccac

SEQ ID NO: 755341 - DNA, 15 bp, Homo sapiens
gaaaggagcaccaca

SEQ ID NO: 755342 - DNA, 15 bp, Homo sapiens
aaaggagcaccacat

SEQ ID NO: 755343 - DNA, 15 bp, Homo sapiens
aaggagcaccacatc

SEQ ID NO: 755344 - DNA, 15 bp, Homo sapiens
aggagcaccacatcc

SEQ ID NO: 755345 - DNA, 15 bp, Homo sapiens
ggagcaccacatcca

SEQ ID NO: 755346 - DNA, 15 bp, Homo sapiens
gagcaccacatccaa

SEQ ID NO: 755347 - DNA, 15 bp, Homo sapiens
agcaccacatccaag

SEQ ID NO: 755348 - DNA, 15 bp, Homo sapiens
gcaccacatccaagt

SEQ ID NO: 755349 - DNA, 15 bp, Homo sapiens
caccacatccaagtc

SEQ ID NO: 755350 - DNA, 15 bp, Homo sapiens
accacatccaagtca

SEQ ID NO: 755351 - DNA, 15 bp, Homo sapiens
ccacatccaagtcag

SEQ ID NO: 755352 - DNA, 15 bp, Homo sapiens
cacatccaagtcaga

SEQ ID NO: 755353 - DNA, 15 bp, Homo sapiens
acatccaagtcagag

SEQ ID NO: 755354 - DNA, 15 bp, Homo sapiens
catccaagtcagaga

SEQ ID NO: 755355 - DNA, 15 bp, Homo sapiens
atccaagtcagagaa

SEQ ID NO: 755356 - DNA, 15 bp, Homo sapiens
tccaagtcagagaac

SEQ ID NO: 755357 - DNA, 15 bp, Homo sapiens
ccaagtcagagaaca

SEQ ID NO: 755358 - DNA, 15 bp, Homo sapiens
caagtcagagaacac

SEQ ID NO: 755359 - DNA, 15 bp, Homo sapiens
aagtcagagaacacg

SEQ ID NO: 755360 - DNA, 15 bp, Homo sapiens
agtcagagaacacgg

SEQ ID NO: 755361 - DNA, 15 bp, Homo sapiens
gtcagagaacacggg

SEQ ID NO: 755362 - DNA, 15 bp, Homo sapiens
tcagagaacacggga

SEQ ID NO: 755363 - DNA, 15 bp, Homo sapiens
cagagaacacgggaa

SEQ ID NO: 755364 - DNA, 15 bp, Homo sapiens
agagaacacgggaac

SEQ ID NO: 755365 - DNA, 15 bp, Homo sapiens
gagaacacgggaaca

SEQ ID NO: 755366 - DNA, 15 bp, Homo sapiens
agaacacgggaacaa

SEQ ID NO: 755367 - DNA, 15 bp, Homo sapiens
gaacacgggaacaag

SEQ ID NO: 755368 - DNA, 15 bp, Homo sapiens
aacacgggaacaaga

SEQ ID NO: 755369 - DNA, 15 bp, Homo sapiens
acacgggaacaagaa

SEQ ID NO: 755370 - DNA, 15 bp, Homo sapiens
cacgggaacaagaag

SEQ ID NO: 755371 - DNA, 15 bp, Homo sapiens
acgggaacaagaagg

SEQ ID NO: 755372 - DNA, 15 bp, Homo sapiens
cgggaacaagaaggg

SEQ ID NO: 755373 - DNA, 15 bp, Homo sapiens
gggaacaagaagggc

SEQ ID NO: 755374 - DNA, 15 bp, Homo sapiens
ggaacaagaagggcc

SEQ ID NO: 755375 - DNA, 15 bp, Homo sapiens
gaacaagaagggccg

SEQ ID NO: 755376 - DNA, 15 bp, Homo sapiens
aacaagaagggccgt

SEQ ID NO: 755377 - DNA, 15 bp, Homo sapiens
acaagaagggccgtc

SEQ ID NO: 755378 - DNA, 15 bp, Homo sapiens
caagaagggccgtcc

SEQ ID NO: 755379 - DNA, 15 bp, Homo sapiens
aagaagggccgtcca

SEQ ID NO: 755380 - DNA, 15 bp, Homo sapiens
agaagggccgtccat

SEQ ID NO: 755381 - DNA, 15 bp, Homo sapiens
gaagggccgtccatg

SEQ ID NO: 755382 - DNA, 15 bp, Homo sapiens
aagggccgtccatgt

SEQ ID NO: 755383 - DNA, 15 bp, Homo sapiens
agggccgtccatgtg

SEQ ID NO: 755384 - DNA, 15 bp, Homo sapiens
gggccgtccatgtgc

SEQ ID NO: 755385 - DNA, 15 bp, Homo sapiens
ggccgtccatgtgct

SEQ ID NO: 755386 - DNA, 15 bp, Homo sapiens
gccgtccatgtgctt

SEQ ID NO: 755387 - DNA, 15 bp, Homo sapiens
ccgtccatgtgcttc

SEQ ID NO: 755388 - DNA, 15 bp, Homo sapiens
cgtccatgtgcttct

SEQ ID NO: 755389 - DNA, 15 bp, Homo sapiens
gtccatgtgcttctg

SEQ ID NO: 755390 - DNA, 15 bp, Homo sapiens
tccatgtgcttctga

SEQ ID NO: 755391 - DNA, 15 bp, Homo sapiens
ccatgtgcttctgat

SEQ ID NO: 755392 - DNA, 15 bp, Homo sapiens
catgtgcttctgatt

SEQ ID NO: 755393 - DNA, 15 bp, Homo sapiens
atgtgcttctgattc

SEQ ID NO: 755394 - DNA, 15 bp, Homo sapiens
tgtgcttctgattca

SEQ ID NO: 755395 - DNA, 15 bp, Homo sapiens
gtgcttctgattcag

SEQ ID NO: 755396 - DNA, 15 bp, Homo sapiens
tgcttctgattcagc

SEQ ID NO: 755397 - DNA, 15 bp, Homo sapiens
gcttctgattcagcc

SEQ ID NO: 755398 - DNA, 15 bp, Homo sapiens
cttctgattcagccc

SEQ ID NO: 755399 - DNA, 15 bp, Homo sapiens
ttctgattcagcccc

SEQ ID NO: 755400 - DNA, 15 bp, Homo sapiens
tctgattcagcccca

SEQ ID NO: 755401 - DNA, 15 bp, Homo sapiens
ctgattcagccccat

SEQ ID NO: 755402 - DNA, 15 bp, Homo sapiens
tgattcagccccatc

SEQ ID NO: 755403 - DNA, 15 bp, Homo sapiens
gattcagccccatcg

SEQ ID NO: 755404 - DNA, 15 bp, Homo sapiens
attcagccccatcgt

SEQ ID NO: 755405 - DNA, 15 bp, Homo sapiens
ttcagccccatcgtt

SEQ ID NO: 755406 - DNA, 15 bp, Homo sapiens
tcagccccatcgttt

SEQ ID NO: 755407 - DNA, 15 bp, Homo sapiens
cagccccatcgtttt

SEQ ID NO: 755408 - DNA, 15 bp, Homo sapiens
agccccatcgtttta

SEQ ID NO: 755409 - DNA, 15 bp, Homo sapiens
gccccatcgttttaa

SEQ ID NO: 755410 - DNA, 15 bp, Homo sapiens
ccccatcgttttaac

SEQ ID NO: 755411 - DNA, 15 bp, Homo sapiens
cccatcgttttaact

SEQ ID NO: 755412 - DNA, 15 bp, Homo sapiens
ccatcgttttaactg

SEQ ID NO: 755413 - DNA, 15 bp, Homo sapiens
catcgttttaactga

SEQ ID NO: 755414 - DNA, 15 bp, Homo sapiens
atcgttttaactgag

SEQ ID NO: 755415 - DNA, 15 bp, Homo sapiens
tcgttttaactgaga

SEQ ID NO: 755416 - DNA, 15 bp, Homo sapiens
cgttttaactgagac

SEQ ID NO: 755417 - DNA, 15 bp, Homo sapiens
gttttaactgagacc

SEQ ID NO: 755418 - DNA, 15 bp, Homo sapiens
ttttaactgagacct

SEQ ID NO: 755419 - DNA, 15 bp, Homo sapiens
tttaactgagaccta

SEQ ID NO: 755420 - DNA, 15 bp, Homo sapiens
ttaactgagacctag

SEQ ID NO: 755421 - DNA, 15 bp, Homo sapiens
taactgagacctaga

SEQ ID NO: 755422 - DNA, 15 bp, Homo sapiens
aactgagacctagaa

SEQ ID NO: 755423 - DNA, 15 bp, Homo sapiens
actgagacctagaaa

SEQ ID NO: 755424 - DNA, 15 bp, Homo sapiens
ctgagacctagaaaa

SEQ ID NO: 755425 - DNA, 15 bp, Homo sapiens
tgagacctagaaaac

SEQ ID NO: 755426 - DNA, 15 bp, Homo sapiens
gagacctagaaaact

SEQ ID NO: 755427 - DNA, 15 bp, Homo sapiens
agacctagaaaacta

SEQ ID NO: 755428 - DNA, 15 bp, Homo sapiens
gacctagaaaactaa

SEQ ID NO: 755429 - DNA, 15 bp, Homo sapiens
acctagaaaactaag

SEQ ID NO: 755430 - DNA, 15 bp, Homo sapiens
cctagaaaactaagt

SEQ ID NO: 755431 - DNA, 15 bp, Homo sapiens
ctagaaaactaagta

SEQ ID NO: 755432 - DNA, 15 bp, Homo sapiens
tagaaaactaagtac

SEQ ID NO: 755433 - DNA, 15 bp, Homo sapiens
agaaaactaagtact

SEQ ID NO: 755434 - DNA, 15 bp, Homo sapiens
gaaaactaagtactt

SEQ ID NO: 755435 - DNA, 15 bp, Homo sapiens
aaaactaagtacttg

SEQ ID NO: 755436 - DNA, 15 bp, Homo sapiens
aaactaagtacttgt

SEQ ID NO: 755437 - DNA, 15 bp, Homo sapiens
aactaagtacttgtc

SEQ ID NO: 755438 - DNA, 15 bp, Homo sapiens
actaagtacttgtcc

SEQ ID NO: 755439 - DNA, 15 bp, Homo sapiens
ctaagtacttgtcct

SEQ ID NO: 755440 - DNA, 15 bp, Homo sapiens
taagtacttgtccta

SEQ ID NO: 755441 - DNA, 15 bp, Homo sapiens
aagtacttgtcctac

SEQ ID NO: 755442 - DNA, 15 bp, Homo sapiens
agtacttgtcctact

SEQ ID NO: 755443 - DNA, 15 bp, Homo sapiens
gtacttgtcctactc

SEQ ID NO: 755444 - DNA, 15 bp, Homo sapiens
tacttgtcctactcc

SEQ ID NO: 755445 - DNA, 15 bp, Homo sapiens
acttgtcctactcca

SEQ ID NO: 755446 - DNA, 15 bp, Homo sapiens
cttgtcctactccag

SEQ ID NO: 755447 - DNA, 15 bp, Homo sapiens
ttgtcctactccagt

SEQ ID NO: 755448 - DNA, 15 bp, Homo sapiens
tgtcctactccagtg

SEQ ID NO: 755449 - DNA, 15 bp, Homo sapiens
gtcctactccagtgc

SEQ ID NO: 755450 - DNA, 15 bp, Homo sapiens
tcctactccagtgct

SEQ ID NO: 755451 - DNA, 15 bp, Homo sapiens
cctactccagtgctg

SEQ ID NO: 755452 - DNA, 15 bp, Homo sapiens
ctactccagtgctgc

SEQ ID NO: 755453 - DNA, 15 bp, Homo sapiens
tactccagtgctgcc

SEQ ID NO: 755454 - DNA, 15 bp, Homo sapiens
actccagtgctgcct

SEQ ID NO: 755455 - DNA, 15 bp, Homo sapiens
ctccagtgctgcctc

SEQ ID NO: 755456 - DNA, 15 bp, Homo sapiens
tccagtgctgcctcc

SEQ ID NO: 755457 - DNA, 15 bp, Homo sapiens
ccagtgctgcctccc

SEQ ID NO: 755458 - DNA, 15 bp, Homo sapiens
cagtgctgcctcccc

SEQ ID NO: 755459 - DNA, 15 bp, Homo sapiens
agtgctgcctcccca

SEQ ID NO: 755460 - DNA, 15 bp, Homo sapiens
gtgctgcctccccag

SEQ ID NO: 755461 - DNA, 15 bp, Homo sapiens
tgctgcctccccagt

SEQ ID NO: 755462 - DNA, 15 bp, Homo sapiens
gctgcctccccagtc

SEQ ID NO: 755463 - DNA, 15 bp, Homo sapiens
ctgcctccccagtca

SEQ ID NO: 755464 - DNA, 15 bp, Homo sapiens
tgcctccccagtcat

SEQ ID NO: 755465 - DNA, 15 bp, Homo sapiens
gcctccccagtcatc

SEQ ID NO: 755466 - DNA, 15 bp, Homo sapiens
cctccccagtcatcc

SEQ ID NO: 755467 - DNA, 15 bp, Homo sapiens
ctccccagtcatcca

SEQ ID NO: 755468 - DNA, 15 bp, Homo sapiens
tccccagtcatccat

SEQ ID NO: 755469 - DNA, 15 bp, Homo sapiens
ccccagtcatccatg

SEQ ID NO: 755470 - DNA, 15 bp, Homo sapiens
cccagtcatccatgg

SEQ ID NO: 755471 - DNA, 15 bp, Homo sapiens
ccagtcatccatggc

SEQ ID NO: 755472 - DNA, 15 bp, Homo sapiens
cagtcatccatggcc

SEQ ID NO: 755473 - DNA, 15 bp, Homo sapiens
agtcatccatggcca

SEQ ID NO: 755474 - DNA, 15 bp, Homo sapiens
gtcatccatggccag

SEQ ID NO: 755475 - DNA, 15 bp, Homo sapiens
tcatccatggccaga

SEQ ID NO: 755476 - DNA, 15 bp, Homo sapiens
catccatggccagac

SEQ ID NO: 755477 - DNA, 15 bp, Homo sapiens
atccatggccagact

SEQ ID NO: 755478 - DNA, 15 bp, Homo sapiens
tccatggccagacta

SEQ ID NO: 755479 - DNA, 15 bp, Homo sapiens
ccatggccagactaa

SEQ ID NO: 755480 - DNA, 15 bp, Homo sapiens
catggccagactaaa

SEQ ID NO: 755481 - DNA, 15 bp, Homo sapiens
atggccagactaaat

SEQ ID NO: 755482 - DNA, 15 bp, Homo sapiens
tggccagactaaatt

SEQ ID NO: 755483 - DNA, 15 bp, Homo sapiens
ggccagactaaatta

SEQ ID NO: 755484 - DNA, 15 bp, Homo sapiens
gccagactaaattac

SEQ ID NO: 755485 - DNA, 15 bp, Homo sapiens
ccagactaaattact

SEQ ID NO: 755486 - DNA, 15 bp, Homo sapiens
cagactaaattactc

SEQ ID NO: 755487 - DNA, 15 bp, Homo sapiens
agactaaattactct

SEQ ID NO: 755488 - DNA, 15 bp, Homo sapiens
gactaaattactcta

SEQ ID NO: 755489 - DNA, 15 bp, Homo sapiens
actaaattactctat

SEQ ID NO: 755490 - DNA, 15 bp, Homo sapiens
ctaaattactctatc

SEQ ID NO: 755491 - DNA, 15 bp, Homo sapiens
taaattactctatct

SEQ ID NO: 755492 - DNA, 15 bp, Homo sapiens
aaattactctatctt

SEQ ID NO: 755493 - DNA, 15 bp, Homo sapiens
aattactctatcttt

SEQ ID NO: 755494 - DNA, 15 bp, Homo sapiens
attactctatctttc

SEQ ID NO: 755495 - DNA, 15 bp, Homo sapiens
ttactctatctttcc

SEQ ID NO: 755496 - DNA, 15 bp, Homo sapiens
tactctatctttcct

SEQ ID NO: 755497 - DNA, 15 bp, Homo sapiens
actctatctttcctt

SEQ ID NO: 755498 - DNA, 15 bp, Homo sapiens
ctctatctttccttt

SEQ ID NO: 755499 - DNA, 15 bp, Homo sapiens
tctatctttcctttg

SEQ ID NO: 755500 - DNA, 15 bp, Homo sapiens
ctatctttcctttgg

SEQ ID NO: 755501 - DNA, 15 bp, Homo sapiens
tatctttcctttggg

SEQ ID NO: 755502 - DNA, 15 bp, Homo sapiens
atctttcctttgggc

SEQ ID NO: 755503 - DNA, 15 bp, Homo sapiens
tctttcctttgggct

SEQ ID NO: 755504 - DNA, 15 bp, Homo sapiens
ctttcctttgggctg

SEQ ID NO: 755505 - DNA, 15 bp, Homo sapiens
tttcctttgggctgc

SEQ ID NO: 755506 - DNA, 15 bp, Homo sapiens
ttcctttgggctgca

SEQ ID NO: 755507 - DNA, 15 bp, Homo sapiens
tcctttgggctgcaa

SEQ ID NO: 755508 - DNA, 15 bp, Homo sapiens
cctttgggctgcaaa

SEQ ID NO: 755509 - DNA, 15 bp, Homo sapiens
ctttgggctgcaaag

SEQ ID NO: 755510 - DNA, 15 bp, Homo sapiens
tttgggctgcaaagt

SEQ ID NO: 755511 - DNA, 15 bp, Homo sapiens
ttgggctgcaaagtc

SEQ ID NO: 755512 - DNA, 15 bp, Homo sapiens
tgggctgcaaagtcg

SEQ ID NO: 755513 - DNA, 15 bp, Homo sapiens
gggctgcaaagtcgt

SEQ ID NO: 755514 - DNA, 15 bp, Homo sapiens
ggctgcaaagtcgtt

SEQ ID NO: 755515 - DNA, 15 bp, Homo sapiens
gctgcaaagtcgttt

SEQ ID NO: 755516 - DNA, 15 bp, Homo sapiens
ctgcaaagtcgtttt

SEQ ID NO: 755517 - DNA, 15 bp, Homo sapiens
tgcaaagtcgtttta

SEQ ID NO: 755518 - DNA, 15 bp, Homo sapiens
gcaaagtcgttttat

SEQ ID NO: 755519 - DNA, 15 bp, Homo sapiens
caaagtcgttttatt

SEQ ID NO: 755520 - DNA, 15 bp, Homo sapiens
aaagtcgttttattt

SEQ ID NO: 755521 - DNA, 15 bp, Homo sapiens
aagtcgttttattta

SEQ ID NO: 755522 - DNA, 15 bp, Homo sapiens
agtcgttttatttat

SEQ ID NO: 755523 - DNA, 15 bp, Homo sapiens
gtcgttttatttata

SEQ ID NO: 755524 - DNA, 15 bp, Homo sapiens
tcgttttatttataa

SEQ ID NO: 755525 - DNA, 15 bp, Homo sapiens
cgttttatttataac

SEQ ID NO: 755526 - DNA, 15 bp, Homo sapiens
gttttatttataaca

SEQ ID NO: 755527 - DNA, 15 bp, Homo sapiens
ttttatttataacac

SEQ ID NO: 755528 - DNA, 15 bp, Homo sapiens
tttatttataacaca

SEQ ID NO: 755529 - DNA, 15 bp, Homo sapiens
ttatttataacacac

SEQ ID NO: 755530 - DNA, 15 bp, Homo sapiens
tatttataacacacc

SEQ ID NO: 755531 - DNA, 15 bp, Homo sapiens
atttataacacacct

SEQ ID NO: 755532 - DNA, 15 bp, Homo sapiens
tttataacacacctc

SEQ ID NO: 755533 - DNA, 15 bp, Homo sapiens
ttataacacacctct

SEQ ID NO: 755534 - DNA, 15 bp, Homo sapiens
tataacacacctctc

SEQ ID NO: 755535 - DNA, 15 bp, Homo sapiens
ataacacacctctct

SEQ ID NO: 755536 - DNA, 15 bp, Homo sapiens
taacacacctctctt

SEQ ID NO: 755537 - DNA, 15 bp, Homo sapiens
aacacacctctcttg

SEQ ID NO: 755538 - DNA, 15 bp, Homo sapiens
acacacctctcttgt

SEQ ID NO: 755539 - DNA, 15 bp, Homo sapiens
cacacctctcttgtt

SEQ ID NO: 755540 - DNA, 15 bp, Homo sapiens
acacctctcttgttt

SEQ ID NO: 755541 - DNA, 15 bp, Homo sapiens
cacctctcttgtttt

SEQ ID NO: 755542 - DNA, 15 bp, Homo sapiens
acctctcttgtttta

SEQ ID NO: 755543 - DNA, 15 bp, Homo sapiens
cctctcttgttttat

SEQ ID NO: 755544 - DNA, 15 bp, Homo sapiens
ctctcttgttttata

SEQ ID NO: 755545 - DNA, 15 bp, Homo sapiens
tctcttgttttataa

SEQ ID NO: 755546 - DNA, 15 bp, Homo sapiens
ctcttgttttataag

SEQ ID NO: 755547 - DNA, 15 bp, Homo sapiens
tcttgttttataagt

SEQ ID NO: 755548 - DNA, 15 bp, Homo sapiens
cttgttttataagta

SEQ ID NO: 755549 - DNA, 15 bp, Homo sapiens
ttgttttataagtag

SEQ ID NO: 755550 - DNA, 15 bp, Homo sapiens
tgttttataagtagc

SEQ ID NO: 755551 - DNA, 15 bp, Homo sapiens
gttttataagtagcc

SEQ ID NO: 755552 - DNA, 15 bp, Homo sapiens
ttttataagtagcca

SEQ ID NO: 755553 - DNA, 15 bp, Homo sapiens
tttataagtagccat

SEQ ID NO: 755554 - DNA, 15 bp, Homo sapiens
ttataagtagccatg

SEQ ID NO: 755555 - DNA, 15 bp, Homo sapiens
tataagtagccatga

SEQ ID NO: 755556 - DNA, 15 bp, Homo sapiens
ataagtagccatgaa

SEQ ID NO: 755557 - DNA, 15 bp, Homo sapiens
taagtagccatgaag

SEQ ID NO: 755558 - DNA, 15 bp, Homo sapiens
aagtagccatgaagg

SEQ ID NO: 755559 - DNA, 15 bp, Homo sapiens
agtagccatgaaggg

SEQ ID NO: 755560 - DNA, 15 bp, Homo sapiens
gtagccatgaagggg

SEQ ID NO: 755561 - DNA, 15 bp, Homo sapiens
tagccatgaaggggt

SEQ ID NO: 755562 - DNA, 15 bp, Homo sapiens
agccatgaaggggtt

SEQ ID NO: 755563 - DNA, 15 bp, Homo sapiens
gccatgaaggggttt

SEQ ID NO: 755564 - DNA, 15 bp, Homo sapiens
ccatgaaggggtttg

SEQ ID NO: 755565 - DNA, 15 bp, Homo sapiens
catgaaggggtttgt

SEQ ID NO: 755566 - DNA, 15 bp, Homo sapiens
atgaaggggtttgtt

SEQ ID NO: 755567 - DNA, 15 bp, Homo sapiens
tgaaggggtttgttt

SEQ ID NO: 755568 - DNA, 15 bp, Homo sapiens
gaaggggtttgtttt

SEQ ID NO: 755569 - DNA, 15 bp, Homo sapiens
aaggggtttgtttta

SEQ ID NO: 755570 - DNA, 15 bp, Homo sapiens
aggggtttgttttac

SEQ ID NO: 755571 - DNA, 15 bp, Homo sapiens
ggggtttgttttacc

SEQ ID NO: 755572 - DNA, 15 bp, Homo sapiens
gggtttgttttaccc

SEQ ID NO: 755573 - DNA, 15 bp, Homo sapiens
ggtttgttttaccca

SEQ ID NO: 755574 - DNA, 15 bp, Homo sapiens
gtttgttttacccac

SEQ ID NO: 755575 - DNA, 15 bp, Homo sapiens
tttgttttacccact

SEQ ID NO: 755576 - DNA, 15 bp, Homo sapiens
ttgttttacccacta

SEQ ID NO: 755577 - DNA, 15 bp, Homo sapiens
tgttttacccactag

SEQ ID NO: 755578 - DNA, 15 bp, Homo sapiens
gttttacccactaga

SEQ ID NO: 755579 - DNA, 15 bp, Homo sapiens
ttttacccactagat

SEQ ID NO: 755580 - DNA, 15 bp, Homo sapiens
tttacccactagatt

SEQ ID NO: 755581 - DNA, 15 bp, Homo sapiens
ttacccactagatta

SEQ ID NO: 755582 - DNA, 15 bp, Homo sapiens
tacccactagattag

SEQ ID NO: 755583 - DNA, 15 bp, Homo sapiens
acccactagattagg

SEQ ID NO: 755584 - DNA, 15 bp, Homo sapiens
cccactagattaggg

SEQ ID NO: 755585 - DNA, 15 bp, Homo sapiens
ccactagattaggga

SEQ ID NO: 755586 - DNA, 15 bp, Homo sapiens
cactagattagggat

SEQ ID NO: 755587 - DNA, 15 bp, Homo sapiens
actagattagggatt

SEQ ID NO: 755588 - DNA, 15 bp, Homo sapiens
ctagattagggattg

SEQ ID NO: 755589 - DNA, 15 bp, Homo sapiens
tagattagggattgg

SEQ ID NO: 755590 - DNA, 15 bp, Homo sapiens
agattagggattggt

SEQ ID NO: 755591 - DNA, 15 bp, Homo sapiens
gattagggattggta

SEQ ID NO: 755592 - DNA, 15 bp, Homo sapiens
attagggattggtac

SEQ ID NO: 755593 - DNA, 15 bp, Homo sapiens
ttagggattggtaca

SEQ ID NO: 755594 - DNA, 15 bp, Homo sapiens
tagggattggtacat

SEQ ID NO: 755595 - DNA, 15 bp, Homo sapiens
agggattggtacatt

SEQ ID NO: 755596 - DNA, 15 bp, Homo sapiens
gggattggtacatta

SEQ ID NO: 755597 - DNA, 15 bp, Homo sapiens
ggattggtacattac

SEQ ID NO: 755598 - DNA, 15 bp, Homo sapiens
gattggtacattaca

SEQ ID NO: 755599 - DNA, 15 bp, Homo sapiens
attggtacattacag

SEQ ID NO: 755600 - DNA, 15 bp, Homo sapiens
ttggtacattacagg

SEQ ID NO: 755601 - DNA, 15 bp, Homo sapiens
tggtacattacaggt

SEQ ID NO: 755602 - DNA, 15 bp, Homo sapiens
ggtacattacaggtc

SEQ ID NO: 755603 - DNA, 15 bp, Homo sapiens
gtacattacaggtcg

SEQ ID NO: 755604 - DNA, 15 bp, Homo sapiens
tacattacaggtcga

SEQ ID NO: 755605 - DNA, 15 bp, Homo sapiens
acattacaggtcgaa

SEQ ID NO: 755606 - DNA, 15 bp, Homo sapiens
cattacaggtcgaat

SEQ ID NO: 755607 - DNA, 15 bp, Homo sapiens
attacaggtcgaatc

SEQ ID NO: 755608 - DNA, 15 bp, Homo sapiens
ttacaggtcgaatcc

SEQ ID NO: 755609 - DNA, 15 bp, Homo sapiens
tacaggtcgaatccg

SEQ ID NO: 755610 - DNA, 15 bp, Homo sapiens
acaggtcgaatccgg

SEQ ID NO: 755611 - DNA, 15 bp, Homo sapiens
caggtcgaatccggc

SEQ ID NO: 755612 - DNA, 15 bp, Homo sapiens
aggtcgaatccggcc

SEQ ID NO: 755613 - DNA, 15 bp, Homo sapiens
ggtcgaatccggccc

SEQ ID NO: 755614 - DNA, 15 bp, Homo sapiens
gtcgaatccggccca

SEQ ID NO: 755615 - DNA, 15 bp, Homo sapiens
tcgaatccggcccac

SEQ ID NO: 755616 - DNA, 15 bp, Homo sapiens
cgaatccggcccact

SEQ ID NO: 755617 - DNA, 15 bp, Homo sapiens
gaatccggcccactg

SEQ ID NO: 755618 - DNA, 15 bp, Homo sapiens
aatccggcccactgc

SEQ ID NO: 755619 - DNA, 15 bp, Homo sapiens
atccggcccactgca

SEQ ID NO: 755620 - DNA, 15 bp, Homo sapiens
tccggcccactgcat

SEQ ID NO: 755621 - DNA, 15 bp, Homo sapiens
ccggcccactgcatg

SEQ ID NO: 755622 - DNA, 15 bp, Homo sapiens
cggcccactgcatgt

SEQ ID NO: 755623 - DNA, 15 bp, Homo sapiens
ggcccactgcatgtt

SEQ ID NO: 755624 - DNA, 15 bp, Homo sapiens
gcccactgcatgttt

SEQ ID NO: 755625 - DNA, 15 bp, Homo sapiens
cccactgcatgtttt

SEQ ID NO: 755626 - DNA, 15 bp, Homo sapiens
ccactgcatgttttg

SEQ ID NO: 755627 - DNA, 15 bp, Homo sapiens
cactgcatgttttgt

SEQ ID NO: 755628 - DNA, 15 bp, Homo sapiens
actgcatgttttgta

SEQ ID NO: 755629 - DNA, 15 bp, Homo sapiens
ctgcatgttttgtaa

SEQ ID NO: 755630 - DNA, 15 bp, Homo sapiens
tgcatgttttgtaaa

SEQ ID NO: 755631 - DNA, 15 bp, Homo sapiens
gcatgttttgtaaat

SEQ ID NO: 755632 - DNA, 15 bp, Homo sapiens
catgttttgtaaata

SEQ ID NO: 755633 - DNA, 15 bp, Homo sapiens
atgttttgtaaataa

SEQ ID NO: 755634 - DNA, 15 bp, Homo sapiens
tgttttgtaaataaa

SEQ ID NO: 755635 - DNA, 15 bp, Homo sapiens
gttttgtaaataaag

SEQ ID NO: 755636 - DNA, 15 bp, Homo sapiens
ttttgtaaataaagt

SEQ ID NO: 755637 - DNA, 15 bp, Homo sapiens
tttgtaaataaagtt

SEQ ID NO: 755638 - DNA, 15 bp, Homo sapiens
ttgtaaataaagttt

SEQ ID NO: 755639 - DNA, 15 bp, Homo sapiens
tgtaaataaagtttt

SEQ ID NO: 755640 - DNA, 15 bp, Homo sapiens
gtaaataaagtttta

SEQ ID NO: 755641 - DNA, 15 bp, Homo sapiens
taaataaagttttat

SEQ ID NO: 755642 - DNA, 15 bp, Homo sapiens
aaataaagttttatt

SEQ ID NO: 755643 - DNA, 15 bp, Homo sapiens
aataaagttttattg

SEQ ID NO: 755644 - DNA, 15 bp, Homo sapiens
ataaagttttattgg

SEQ ID NO: 755645 - DNA, 15 bp, Homo sapiens
taaagttttattgga

SEQ ID NO: 755646 - DNA, 15 bp, Homo sapiens
aaagttttattggaa

SEQ ID NO: 755647 - DNA, 15 bp, Homo sapiens
aagttttattggaac

SEQ ID NO: 755648 - DNA, 15 bp, Homo sapiens
agttttattggaaca

SEQ ID NO: 755649 - DNA, 15 bp, Homo sapiens
gttttattggaacac

SEQ ID NO: 755650 - DNA, 15 bp, Homo sapiens
ttttattggaacaca

SEQ ID NO: 755651 - DNA, 15 bp, Homo sapiens
tttattggaacacag

SEQ ID NO: 755652 - DNA, 15 bp, Homo sapiens
ttattggaacacaga

SEQ ID NO: 755653 - DNA, 15 bp, Homo sapiens
tattggaacacagat

SEQ ID NO: 755654 - DNA, 15 bp, Homo sapiens
attggaacacagata

SEQ ID NO: 755655 - DNA, 15 bp, Homo sapiens
ttggaacacagatat

SEQ ID NO: 755656 - DNA, 15 bp, Homo sapiens
tggaacacagatatg

SEQ ID NO: 755657 - DNA, 15 bp, Homo sapiens
ggaacacagatatgc

SEQ ID NO: 755658 - DNA, 15 bp, Homo sapiens
gaacacagatatgct

SEQ ID NO: 755659 - DNA, 15 bp, Homo sapiens
aacacagatatgctc

SEQ ID NO: 755660 - DNA, 15 bp, Homo sapiens
acacagatatgctca

SEQ ID NO: 755661 - DNA, 15 bp, Homo sapiens
cacagatatgctcat

SEQ ID NO: 755662 - DNA, 15 bp, Homo sapiens
acagatatgctcatt

SEQ ID NO: 755663 - DNA, 15 bp, Homo sapiens
cagatatgctcattt

SEQ ID NO: 755664 - DNA, 15 bp, Homo sapiens
agatatgctcatttg

SEQ ID NO: 755665 - DNA, 15 bp, Homo sapiens
gatatgctcatttgt

SEQ ID NO: 755666 - DNA, 15 bp, Homo sapiens
atatgctcatttgtt

SEQ ID NO: 755667 - DNA, 15 bp, Homo sapiens
tatgctcatttgttc

SEQ ID NO: 755668 - DNA, 15 bp, Homo sapiens
atgctcatttgttcg

SEQ ID NO: 755669 - DNA, 15 bp, Homo sapiens
tgctcatttgttcgt

SEQ ID NO: 755670 - DNA, 15 bp, Homo sapiens
gctcatttgttcgtg

SEQ ID NO: 755671 - DNA, 15 bp, Homo sapiens
ctcatttgttcgtgt

SEQ ID NO: 755672 - DNA, 15 bp, Homo sapiens
tcatttgttcgtgta

SEQ ID NO: 755673 - DNA, 15 bp, Homo sapiens
catttgttcgtgtat

SEQ ID NO: 755674 - DNA, 15 bp, Homo sapiens
atttgttcgtgtatt

SEQ ID NO: 755675 - DNA, 15 bp, Homo sapiens
tttgttcgtgtattg

SEQ ID NO: 755676 - DNA, 15 bp, Homo sapiens
ttgttcgtgtattgt

SEQ ID NO: 755677 - DNA, 15 bp, Homo sapiens
tgttcgtgtattgtg

SEQ ID NO: 755678 - DNA, 15 bp, Homo sapiens
gttcgtgtattgtgc

SEQ ID NO: 755679 - DNA, 15 bp, Homo sapiens
ttcgtgtattgtgca

SEQ ID NO: 755680 - DNA, 15 bp, Homo sapiens
tcgtgtattgtgcat

SEQ ID NO: 755681 - DNA, 15 bp, Homo sapiens
cgtgtattgtgcatg

SEQ ID NO: 755682 - DNA, 15 bp, Homo sapiens
gtgtattgtgcatgg

SEQ ID NO: 755683 - DNA, 15 bp, Homo sapiens
tgtattgtgcatggc

SEQ ID NO: 755684 - DNA, 15 bp, Homo sapiens
gtattgtgcatggcc

SEQ ID NO: 755685 - DNA, 15 bp, Homo sapiens
tattgtgcatggcca

SEQ ID NO: 755686 - DNA, 15 bp, Homo sapiens
attgtgcatggccac

SEQ ID NO: 755687 - DNA, 15 bp, Homo sapiens
ttgtgcatggccact

SEQ ID NO: 755688 - DNA, 15 bp, Homo sapiens
tgtgcatggccactt

SEQ ID NO: 755689 - DNA, 15 bp, Homo sapiens
gtgcatggccacttt

SEQ ID NO: 755690 - DNA, 15 bp, Homo sapiens
tgcatggccactttt

SEQ ID NO: 755691 - DNA, 15 bp, Homo sapiens
gcatggccacttttg

SEQ ID NO: 755692 - DNA, 15 bp, Homo sapiens
catggccacttttgt

SEQ ID NO: 755693 - DNA, 15 bp, Homo sapiens
atggccacttttgtg

SEQ ID NO: 755694 - DNA, 15 bp, Homo sapiens
tggccacttttgtgc

SEQ ID NO: 755695 - DNA, 15 bp, Homo sapiens
ggccacttttgtgct

SEQ ID NO: 755696 - DNA, 15 bp, Homo sapiens
gccacttttgtgcta

SEQ ID NO: 755697 - DNA, 15 bp, Homo sapiens
ccacttttgtgctat

SEQ ID NO: 755698 - DNA, 15 bp, Homo sapiens
cacttttgtgctatg

SEQ ID NO: 755699 - DNA, 15 bp, Homo sapiens
acttttgtgctatgt

SEQ ID NO: 755700 - DNA, 15 bp, Homo sapiens
cttttgtgctatgtc

SEQ ID NO: 755701 - DNA, 15 bp, Homo sapiens
ttttgtgctatgtca

SEQ ID NO: 755702 - DNA, 15 bp, Homo sapiens
tttgtgctatgtcag

SEQ ID NO: 755703 - DNA, 15 bp, Homo sapiens
ttgtgctatgtcaga

SEQ ID NO: 755704 - DNA, 15 bp, Homo sapiens
tgtgctatgtcagag

SEQ ID NO: 755705 - DNA, 15 bp, Homo sapiens
gtgctatgtcagagg

SEQ ID NO: 755706 - DNA, 15 bp, Homo sapiens
tgctatgtcagaggt

SEQ ID NO: 755707 - DNA, 15 bp, Homo sapiens
gctatgtcagaggtg

SEQ ID NO: 755708 - DNA, 15 bp, Homo sapiens
ctatgtcagaggtga

SEQ ID NO: 755709 - DNA, 15 bp, Homo sapiens
tatgtcagaggtgag

SEQ ID NO: 755710 - DNA, 15 bp, Homo sapiens
atgtcagaggtgagc

SEQ ID NO: 755711 - DNA, 15 bp, Homo sapiens
tgtcagaggtgagca

SEQ ID NO: 755712 - DNA, 15 bp, Homo sapiens
gtcagaggtgagcat

SEQ ID NO: 755713 - DNA, 15 bp, Homo sapiens
tcagaggtgagcatt

SEQ ID NO: 755714 - DNA, 15 bp, Homo sapiens
cagaggtgagcattt

SEQ ID NO: 755715 - DNA, 15 bp, Homo sapiens
agaggtgagcatttg

SEQ ID NO: 755716 - DNA, 15 bp, Homo sapiens
gaggtgagcatttgc

SEQ ID NO: 755717 - DNA, 15 bp, Homo sapiens
aggtgagcatttgct

SEQ ID NO: 755718 - DNA, 15 bp, Homo sapiens
ggtgagcatttgcta

SEQ ID NO: 755719 - DNA, 15 bp, Homo sapiens
gtgagcatttgctac

SEQ ID NO: 755720 - DNA, 15 bp, Homo sapiens
tgagcatttgctaca

SEQ ID NO: 755721 - DNA, 15 bp, Homo sapiens
gagcatttgctacag

SEQ ID NO: 755722 - DNA, 15 bp, Homo sapiens
agcatttgctacaga

SEQ ID NO: 755723 - DNA, 15 bp, Homo sapiens
gcatttgctacagag

SEQ ID NO: 755724 - DNA, 15 bp, Homo sapiens
catttgctacagaga

SEQ ID NO: 755725 - DNA, 15 bp, Homo sapiens
atttgctacagagac

SEQ ID NO: 755726 - DNA, 15 bp, Homo sapiens
tttgctacagagact

SEQ ID NO: 755727 - DNA, 15 bp, Homo sapiens
ttgctacagagacta

SEQ ID NO: 755728 - DNA, 15 bp, Homo sapiens
tgctacagagactaa

SEQ ID NO: 755729 - DNA, 15 bp, Homo sapiens
gctacagagactaac

SEQ ID NO: 755730 - DNA, 15 bp, Homo sapiens
ctacagagactaact

SEQ ID NO: 755731 - DNA, 15 bp, Homo sapiens
tacagagactaactg

SEQ ID NO: 755732 - DNA, 15 bp, Homo sapiens
acagagactaactgg

SEQ ID NO: 755733 - DNA, 15 bp, Homo sapiens
cagagactaactggc

SEQ ID NO: 755734 - DNA, 15 bp, Homo sapiens
agagactaactggcc

SEQ ID NO: 755735 - DNA, 15 bp, Homo sapiens
gagactaactggcct

SEQ ID NO: 755736 - DNA, 15 bp, Homo sapiens
agactaactggcctg

SEQ ID NO: 755737 - DNA, 15 bp, Homo sapiens
gactaactggcctgc

SEQ ID NO: 755738 - DNA, 15 bp, Homo sapiens
actaactggcctgca

SEQ ID NO: 755739 - DNA, 15 bp, Homo sapiens
ctaactggcctgcac

SEQ ID NO: 755740 - DNA, 15 bp, Homo sapiens
taactggcctgcaca

SEQ ID NO: 755741 - DNA, 15 bp, Homo sapiens
aactggcctgcacag

SEQ ID NO: 755742 - DNA, 15 bp, Homo sapiens
actggcctgcacagt

SEQ ID NO: 755743 - DNA, 15 bp, Homo sapiens
ctggcctgcacagtc

SEQ ID NO: 755744 - DNA, 15 bp, Homo sapiens
tggcctgcacagtct

SEQ ID NO: 755745 - DNA, 15 bp, Homo sapiens
ggcctgcacagtctg

SEQ ID NO: 755746 - DNA, 15 bp, Homo sapiens
gcctgcacagtctga

SEQ ID NO: 755747 - DNA, 15 bp, Homo sapiens
cctgcacagtctgaa

SEQ ID NO: 755748 - DNA, 15 bp, Homo sapiens
ctgcacagtctgaag

SEQ ID NO: 755749 - DNA, 15 bp, Homo sapiens
tgcacagtctgaagt

SEQ ID NO: 755750 - DNA, 15 bp, Homo sapiens
gcacagtctgaagta

SEQ ID NO: 755751 - DNA, 15 bp, Homo sapiens
cacagtctgaagtat

SEQ ID NO: 755752 - DNA, 15 bp, Homo sapiens
acagtctgaagtatt

SEQ ID NO: 755753 - DNA, 15 bp, Homo sapiens
cagtctgaagtattc

SEQ ID NO: 755754 - DNA, 15 bp, Homo sapiens
agtctgaagtattca

SEQ ID NO: 755755 - DNA, 15 bp, Homo sapiens
gtctgaagtattcac

SEQ ID NO: 755756 - DNA, 15 bp, Homo sapiens
tctgaagtattcact

SEQ ID NO: 755757 - DNA, 15 bp, Homo sapiens
ctgaagtattcacta

SEQ ID NO: 755758 - DNA, 15 bp, Homo sapiens
tgaagtattcactat

SEQ ID NO: 755759 - DNA, 15 bp, Homo sapiens
gaagtattcactatc

SEQ ID NO: 755760 - DNA, 15 bp, Homo sapiens
aagtattcactatcc

SEQ ID NO: 755761 - DNA, 15 bp, Homo sapiens
agtattcactatccg

SEQ ID NO: 755762 - DNA, 15 bp, Homo sapiens
gtattcactatccgg

SEQ ID NO: 755763 - DNA, 15 bp, Homo sapiens
tattcactatccggt

SEQ ID NO: 755764 - DNA, 15 bp, Homo sapiens
attcactatccggtt

SEQ ID NO: 755765 - DNA, 15 bp, Homo sapiens
ttcactatccggttc

SEQ ID NO: 755766 - DNA, 15 bp, Homo sapiens
tcactatccggttct

SEQ ID NO: 755767 - DNA, 15 bp, Homo sapiens
cactatccggttctt

SEQ ID NO: 755768 - DNA, 15 bp, Homo sapiens
actatccggttcttc

SEQ ID NO: 755769 - DNA, 15 bp, Homo sapiens
ctatccggttcttca

SEQ ID NO: 755770 - DNA, 15 bp, Homo sapiens
tatccggttcttcac

SEQ ID NO: 755771 - DNA, 15 bp, Homo sapiens
atccggttcttcaca

SEQ ID NO: 755772 - DNA, 15 bp, Homo sapiens
tccggttcttcacag

SEQ ID NO: 755773 - DNA, 15 bp, Homo sapiens
ccggttcttcacaga

SEQ ID NO: 755774 - DNA, 15 bp, Homo sapiens
cggttcttcacagaa

SEQ ID NO: 755775 - DNA, 15 bp, Homo sapiens
ggttcttcacagaaa

SEQ ID NO: 755776 - DNA, 15 bp, Homo sapiens
gttcttcacagaaaa

SEQ ID NO: 755777 - DNA, 15 bp, Homo sapiens
ttcttcacagaaaat

SEQ ID NO: 755778 - DNA, 15 bp, Homo sapiens
tcttcacagaaaatg

SEQ ID NO: 755779 - DNA, 15 bp, Homo sapiens
cttcacagaaaatgt

SEQ ID NO: 755780 - DNA, 15 bp, Homo sapiens
ttcacagaaaatgtt

SEQ ID NO: 755781 - DNA, 15 bp, Homo sapiens
tcacagaaaatgttt

SEQ ID NO: 755782 - DNA, 15 bp, Homo sapiens
cacagaaaatgtttg

SEQ ID NO: 755783 - DNA, 15 bp, Homo sapiens
acagaaaatgtttgc

SEQ ID NO: 755784 - DNA, 15 bp, Homo sapiens
cagaaaatgtttgcc

SEQ ID NO: 755785 - DNA, 15 bp, Homo sapiens
agaaaatgtttgcca

SEQ ID NO: 755786 - DNA, 15 bp, Homo sapiens
gaaaatgtttgccag

SEQ ID NO: 755787 - DNA, 15 bp, Homo sapiens
aaaatgtttgccagc

SEQ ID NO: 755788 - DNA, 15 bp, Homo sapiens
aaatgtttgccagct

SEQ ID NO: 755789 - DNA, 15 bp, Homo sapiens
aatgtttgccagctc

SEQ ID NO: 755790 - DNA, 15 bp, Homo sapiens
atgtttgccagctcc

SEQ ID NO: 755791 - DNA, 15 bp, Homo sapiens
tgtttgccagctcct

SEQ ID NO: 755792 - DNA, 15 bp, Homo sapiens
gtttgccagctcctc

SEQ ID NO: 755793 - DNA, 15 bp, Homo sapiens
tttgccagctcctcc

SEQ ID NO: 755794 - DNA, 15 bp, Homo sapiens
ttgccagctcctccc

SEQ ID NO: 755795 - DNA, 15 bp, Homo sapiens
tgccagctcctcccc

SEQ ID NO: 755796 - DNA, 15 bp, Homo sapiens
gccagctcctcccct

SEQ ID NO: 755797 - DNA, 15 bp, Homo sapiens
ccagctcctcccctg

SEQ ID NO: 755798 - DNA, 15 bp, Homo sapiens
cagctcctcccctgg

SEQ ID NO: 755799 - DNA, 15 bp, Homo sapiens
agctcctcccctggg

SEQ ID NO: 755800 - DNA, 15 bp, Homo sapiens
gctcctcccctggga

SEQ ID NO: 755801 - DNA, 15 bp, Homo sapiens
ctcctcccctgggag

SEQ ID NO: 755802 - DNA, 15 bp, Homo sapiens
tcctcccctgggagg

SEQ ID NO: 755803 - DNA, 15 bp, Homo sapiens
cctcccctgggaggt

SEQ ID NO: 755804 - DNA, 15 bp, Homo sapiens
ctcccctgggaggtg

SEQ ID NO: 755805 - DNA, 15 bp, Homo sapiens
tcccctgggaggtga

SEQ ID NO: 755806 - DNA, 15 bp, Homo sapiens
cccctgggaggtgag

SEQ ID NO: 755807 - DNA, 15 bp, Homo sapiens
ccctgggaggtgagc

SEQ ID NO: 755808 - DNA, 15 bp, Homo sapiens
cctgggaggtgagct

SEQ ID NO: 755809 - DNA, 15 bp, Homo sapiens
ctgggaggtgagctc

SEQ ID NO: 755810 - DNA, 15 bp, Homo sapiens
tgggaggtgagctcc

SEQ ID NO: 755811 - DNA, 15 bp, Homo sapiens
gggaggtgagctccc

SEQ ID NO: 755812 - DNA, 15 bp, Homo sapiens
ggaggtgagctccct

SEQ ID NO: 755813 - DNA, 15 bp, Homo sapiens
gaggtgagctccctg

SEQ ID NO: 755814 - DNA, 15 bp, Homo sapiens
aggtgagctccctga

SEQ ID NO: 755815 - DNA, 15 bp, Homo sapiens
ggtgagctccctgag

SEQ ID NO: 755816 - DNA, 15 bp, Homo sapiens
gtgagctccctgagg

SEQ ID NO: 755817 - DNA, 15 bp, Homo sapiens
tgagctccctgaggg

SEQ ID NO: 755818 - DNA, 15 bp, Homo sapiens
gagctccctgagggc

SEQ ID NO: 755819 - DNA, 15 bp, Homo sapiens
agctccctgagggca

SEQ ID NO: 755820 - DNA, 15 bp, Homo sapiens
gctccctgagggcag

SEQ ID NO: 755821 - DNA, 15 bp, Homo sapiens
ctccctgagggcagg

SEQ ID NO: 755822 - DNA, 15 bp, Homo sapiens
tccctgagggcagga

SEQ ID NO: 755823 - DNA, 15 bp, Homo sapiens
ccctgagggcaggaa

SEQ ID NO: 755824 - DNA, 15 bp, Homo sapiens
cctgagggcaggaac

SEQ ID NO: 755825 - DNA, 15 bp, Homo sapiens
ctgagggcaggaacg

SEQ ID NO: 755826 - DNA, 15 bp, Homo sapiens
tgagggcaggaacgg

SEQ ID NO: 755827 - DNA, 15 bp, Homo sapiens
gagggcaggaacggc

SEQ ID NO: 755828 - DNA, 15 bp, Homo sapiens
agggcaggaacggca

SEQ ID NO: 755829 - DNA, 15 bp, Homo sapiens
gggcaggaacggcac

SEQ ID NO: 755830 - DNA, 15 bp, Homo sapiens
ggcaggaacggcact

SEQ ID NO: 755831 - DNA, 15 bp, Homo sapiens
gcaggaacggcactc

SEQ ID NO: 755832 - DNA, 15 bp, Homo sapiens
caggaacggcactcc

SEQ ID NO: 755833 - DNA, 15 bp, Homo sapiens
aggaacggcactccg

SEQ ID NO: 755834 - DNA, 15 bp, Homo sapiens
ggaacggcactccgt

SEQ ID NO: 755835 - DNA, 15 bp, Homo sapiens
gaacggcactccgtt

SEQ ID NO: 755836 - DNA, 15 bp, Homo sapiens
aacggcactccgttt

SEQ ID NO: 755837 - DNA, 15 bp, Homo sapiens
acggcactccgttta

SEQ ID NO: 755838 - DNA, 15 bp, Homo sapiens
cggcactccgtttat

SEQ ID NO: 755839 - DNA, 15 bp, Homo sapiens
ggcactccgtttatc

SEQ ID NO: 755840 - DNA, 15 bp, Homo sapiens
gcactccgtttatct

SEQ ID NO: 755841 - DNA, 15 bp, Homo sapiens
cactccgtttatctt

SEQ ID NO: 755842 - DNA, 15 bp, Homo sapiens
actccgtttatcttg

SEQ ID NO: 755843 - DNA, 15 bp, Homo sapiens
ctccgtttatcttgc

SEQ ID NO: 755844 - DNA, 15 bp, Homo sapiens
tccgtttatcttgct

SEQ ID NO: 755845 - DNA, 15 bp, Homo sapiens
ccgtttatcttgctg

SEQ ID NO: 755846 - DNA, 15 bp, Homo sapiens
cgtttatcttgctgc

SEQ ID NO: 755847 - DNA, 15 bp, Homo sapiens
gtttatcttgctgct

SEQ ID NO: 755848 - DNA, 15 bp, Homo sapiens
tttatcttgctgctt

SEQ ID NO: 755849 - DNA, 15 bp, Homo sapiens
ttatcttgctgcttc

SEQ ID NO: 755850 - DNA, 15 bp, Homo sapiens
tatcttgctgcttct

SEQ ID NO: 755851 - DNA, 15 bp, Homo sapiens
atcttgctgcttctt

SEQ ID NO: 755852 - DNA, 15 bp, Homo sapiens
tcttgctgcttcttg

SEQ ID NO: 755853 - DNA, 15 bp, Homo sapiens
cttgctgcttcttgt

SEQ ID NO: 755854 - DNA, 15 bp, Homo sapiens
ttgctgcttcttgtt

SEQ ID NO: 755855 - DNA, 15 bp, Homo sapiens
tgctgcttcttgttt

SEQ ID NO: 755856 - DNA, 15 bp, Homo sapiens
gctgcttcttgtttc

SEQ ID NO: 755857 - DNA, 15 bp, Homo sapiens
ctgcttcttgtttct

SEQ ID NO: 755858 - DNA, 15 bp, Homo sapiens
tgcttcttgtttctt

SEQ ID NO: 755859 - DNA, 15 bp, Homo sapiens
gcttcttgtttcttg

SEQ ID NO: 755860 - DNA, 15 bp, Homo sapiens
cttcttgtttcttgc

SEQ ID NO: 755861 - DNA, 15 bp, Homo sapiens
ttcttgtttcttgct

SEQ ID NO: 755862 - DNA, 15 bp, Homo sapiens
tcttgtttcttgctg

SEQ ID NO: 755863 - DNA, 15 bp, Homo sapiens
cttgtttcttgctgg

SEQ ID NO: 755864 - DNA, 15 bp, Homo sapiens
ttgtttcttgctggt

SEQ ID NO: 755865 - DNA, 15 bp, Homo sapiens
tgtttcttgctggta

SEQ ID NO: 755866 - DNA, 15 bp, Homo sapiens
gtttcttgctggtag

SEQ ID NO: 755867 - DNA, 15 bp, Homo sapiens
tttcttgctggtagt

SEQ ID NO: 755868 - DNA, 15 bp, Homo sapiens
ttcttgctggtagta

SEQ ID NO: 755869 - DNA, 15 bp, Homo sapiens
tcttgctggtagtag

SEQ ID NO: 755870 - DNA, 15 bp, Homo sapiens
cttgctggtagtagg

SEQ ID NO: 755871 - DNA, 15 bp, Homo sapiens
ttgctggtagtaggc

SEQ ID NO: 755872 - DNA, 15 bp, Homo sapiens
tgctggtagtaggca

SEQ ID NO: 755873 - DNA, 15 bp, Homo sapiens
gctggtagtaggcac

SEQ ID NO: 755874 - DNA, 15 bp, Homo sapiens
ctggtagtaggcact

SEQ ID NO: 755875 - DNA, 15 bp, Homo sapiens
tggtagtaggcactc

SEQ ID NO: 755876 - DNA, 15 bp, Homo sapiens
ggtagtaggcactca

SEQ ID NO: 755877 - DNA, 15 bp, Homo sapiens
gtagtaggcactcaa

SEQ ID NO: 755878 - DNA, 15 bp, Homo sapiens
tagtaggcactcaat

SEQ ID NO: 755879 - DNA, 15 bp, Homo sapiens
agtaggcactcaata

SEQ ID NO: 755880 - DNA, 15 bp, Homo sapiens
gtaggcactcaataa

SEQ ID NO: 755881 - DNA, 15 bp, Homo sapiens
taggcactcaataaa

SEQ ID NO: 755882 - DNA, 15 bp, Homo sapiens
aggcactcaataaat

SEQ ID NO: 755883 - DNA, 15 bp, Homo sapiens
ggcactcaataaatg

SEQ ID NO: 755884 - DNA, 15 bp, Homo sapiens
gcactcaataaatgt

SEQ ID NO: 755885 - DNA, 15 bp, Homo sapiens
cactcaataaatgta

SEQ ID NO: 755886 - DNA, 15 bp, Homo sapiens
actcaataaatgtat

SEQ ID NO: 755887 - DNA, 15 bp, Homo sapiens
ctcaataaatgtatg

SEQ ID NO: 755888 - DNA, 15 bp, Homo sapiens
tcaataaatgtatgt

SEQ ID NO: 755889 - DNA, 15 bp, Homo sapiens
caataaatgtatgtt

SEQ ID NO: 755890 - DNA, 15 bp, Homo sapiens
aataaatgtatgttg

SEQ ID NO: 755891 - DNA, 15 bp, Homo sapiens
ataaatgtatgttga

SEQ ID NO: 755892 - DNA, 15 bp, Homo sapiens
taaatgtatgttgaa

SEQ ID NO: 755893 - DNA, 15 bp, Homo sapiens
aaatgtatgttgaat

SEQ ID NO: 755894 - DNA, 15 bp, Homo sapiens
aatgtatgttgaata

SEQ ID NO: 755895 - DNA, 15 bp, Homo sapiens
atgtatgttgaatag

SEQ ID NO: 755896 - DNA, 15 bp, Homo sapiens
tgtatgttgaatagg

SEQ ID NO: 755897 - DNA, 15 bp, Homo sapiens
gtatgttgaataggc

SEQ ID NO: 755898 - DNA, 15 bp, Homo sapiens
tatgttgaataggct

SEQ ID NO: 755899 - DNA, 15 bp, Homo sapiens
atgttgaataggctt

SEQ ID NO: 755900 - DNA, 15 bp, Homo sapiens
tgttgaataggcttg

SEQ ID NO: 755901 - DNA, 15 bp, Homo sapiens
gttgaataggcttga

SEQ ID NO: 755902 - DNA, 15 bp, Homo sapiens
ttgaataggcttgaa

SEQ ID NO: 755903 - DNA, 15 bp, Homo sapiens
tgaataggcttgaaa

SEQ ID NO: 755904 - DNA, 15 bp, Homo sapiens
gaataggcttgaaat

SEQ ID NO: 755905 - DNA, 15 bp, Homo sapiens
aataggcttgaaatg

SEQ ID NO: 755906 - DNA, 15 bp, Homo sapiens
ataggcttgaaatgc

SEQ ID NO: 755907 - DNA, 15 bp, Homo sapiens
taggcttgaaatgca

SEQ ID NO: 755908 - DNA, 15 bp, Homo sapiens
aggcttgaaatgcag

SEQ ID NO: 755909 - DNA, 15 bp, Homo sapiens
ggcttgaaatgcagt

SEQ ID NO: 755910 - DNA, 15 bp, Homo sapiens
gcttgaaatgcagtg

SEQ ID NO: 755911 - DNA, 15 bp, Homo sapiens
cttgaaatgcagtgg

SEQ ID NO: 755912 - DNA, 15 bp, Homo sapiens
ttgaaatgcagtgga

SEQ ID NO: 755913 - DNA, 15 bp, Homo sapiens
tgaaatgcagtggat

SEQ ID NO: 755914 - DNA, 15 bp, Homo sapiens
gaaatgcagtggatt

SEQ ID NO: 755915 - DNA, 15 bp, Homo sapiens
aaatgcagtggattg

SEQ ID NO: 755916 - DNA, 15 bp, Homo sapiens
aatgcagtggattga

SEQ ID NO: 755917 - DNA, 15 bp, Homo sapiens
atgcagtggattgat

SEQ ID NO: 755918 - DNA, 15 bp, Homo sapiens
tgcagtggattgatt

SEQ ID NO: 755919 - DNA, 15 bp, Homo sapiens
gcagtggattgattt

SEQ ID NO: 755920 - DNA, 15 bp, Homo sapiens
cagtggattgatttg

SEQ ID NO: 755921 - DNA, 15 bp, Homo sapiens
agtggattgatttgt

SEQ ID NO: 755922 - DNA, 15 bp, Homo sapiens
gtggattgatttgtc

SEQ ID NO: 755923 - DNA, 15 bp, Homo sapiens
tggattgatttgtca

SEQ ID NO: 755924 - DNA, 15 bp, Homo sapiens
ggattgatttgtcaa

SEQ ID NO: 755925 - DNA, 15 bp, Homo sapiens
gattgatttgtcaaa

SEQ ID NO: 755926 - DNA, 15 bp, Homo sapiens
attgatttgtcaaag

SEQ ID NO: 755927 - DNA, 15 bp, Homo sapiens
ttgatttgtcaaaga

SEQ ID NO: 755928 - DNA, 15 bp, Homo sapiens
tgatttgtcaaagat

SEQ ID NO: 755929 - DNA, 15 bp, Homo sapiens
gatttgtcaaagatg

SEQ ID NO: 755930 - DNA, 15 bp, Homo sapiens
atttgtcaaagatga

SEQ ID NO: 755931 - DNA, 15 bp, Homo sapiens
tttgtcaaagatgag

SEQ ID NO: 755932 - DNA, 15 bp, Homo sapiens
ttgtcaaagatgagc

SEQ ID NO: 755933 - DNA, 15 bp, Homo sapiens
tgtcaaagatgagcg

SEQ ID NO: 755934 - DNA, 15 bp, Homo sapiens
gtcaaagatgagcgc

SEQ ID NO: 755935 - DNA, 15 bp, Homo sapiens
tcaaagatgagcgcc

SEQ ID NO: 755936 - DNA, 15 bp, Homo sapiens
caaagatgagcgcca

SEQ ID NO: 755937 - DNA, 15 bp, Homo sapiens
aaagatgagcgccag

SEQ ID NO: 755938 - DNA, 15 bp, Homo sapiens
aagatgagcgccagc

SEQ ID NO: 755939 - DNA, 15 bp, Homo sapiens
agatgagcgccagcc

SEQ ID NO: 755940 - DNA, 15 bp, Homo sapiens
gatgagcgccagcca

SEQ ID NO: 755941 - DNA, 15 bp, Homo sapiens
atgagcgccagccac

SEQ ID NO: 755942 - DNA, 15 bp, Homo sapiens
tgagcgccagccaca

SEQ ID NO: 755943 - DNA, 15 bp, Homo sapiens
gagcgccagccacat

SEQ ID NO: 755944 - DNA, 15 bp, Homo sapiens
agcgccagccacatg

SEQ ID NO: 755945 - DNA, 15 bp, Homo sapiens
gcgccagccacatgg

SEQ ID NO: 755946 - DNA, 15 bp, Homo sapiens
cgccagccacatggc

SEQ ID NO: 755947 - DNA, 15 bp, Homo sapiens
gccagccacatggct

SEQ ID NO: 755948 - DNA, 15 bp, Homo sapiens
ccagccacatggctg

SEQ ID NO: 755949 - DNA, 15 bp, Homo sapiens
cagccacatggctgt

SEQ ID NO: 755950 - DNA, 15 bp, Homo sapiens
agccacatggctgtt

SEQ ID NO: 755951 - DNA, 15 bp, Homo sapiens
gccacatggctgttc

SEQ ID NO: 755952 - DNA, 15 bp, Homo sapiens
ccacatggctgttct

SEQ ID NO: 755953 - DNA, 15 bp, Homo sapiens
cacatggctgttctg

SEQ ID NO: 755954 - DNA, 15 bp, Homo sapiens
acatggctgttctgg

SEQ ID NO: 755955 - DNA, 15 bp, Homo sapiens
catggctgttctggc

SEQ ID NO: 755956 - DNA, 15 bp, Homo sapiens
atggctgttctggct

SEQ ID NO: 755957 - DNA, 15 bp, Homo sapiens
tggctgttctggctt

SEQ ID NO: 755958 - DNA, 15 bp, Homo sapiens
ggctgttctggcttc

SEQ ID NO: 755959 - DNA, 15 bp, Homo sapiens
gctgttctggcttcc

SEQ ID NO: 755960 - DNA, 15 bp, Homo sapiens
ctgttctggcttccc

SEQ ID NO: 755961 - DNA, 15 bp, Homo sapiens
tgttctggcttcccc

SEQ ID NO: 755962 - DNA, 15 bp, Homo sapiens
gttctggcttcccca

SEQ ID NO: 755963 - DNA, 15 bp, Homo sapiens
ttctggcttccccag

SEQ ID NO: 755964 - DNA, 15 bp, Homo sapiens
tctggcttccccagg

SEQ ID NO: 755965 - DNA, 15 bp, Homo sapiens
ctggcttccccaggt

SEQ ID NO: 755966 - DNA, 15 bp, Homo sapiens
tggcttccccaggtt

SEQ ID NO: 755967 - DNA, 15 bp, Homo sapiens
ggcttccccaggttt

SEQ ID NO: 755968 - DNA, 15 bp, Homo sapiens
gcttccccaggtttc

SEQ ID NO: 755969 - DNA, 15 bp, Homo sapiens
cttccccaggtttcc

SEQ ID NO: 755970 - DNA, 15 bp, Homo sapiens
ttccccaggtttcct

SEQ ID NO: 755971 - DNA, 15 bp, Homo sapiens
tccccaggtttcctc

SEQ ID NO: 755972 - DNA, 15 bp, Homo sapiens
ccccaggtttcctct

SEQ ID NO: 755973 - DNA, 15 bp, Homo sapiens
cccaggtttcctctt

SEQ ID NO: 755974 - DNA, 15 bp, Homo sapiens
ccaggtttcctcttg

SEQ ID NO: 755975 - DNA, 15 bp, Homo sapiens
caggtttcctcttgc

SEQ ID NO: 755976 - DNA, 15 bp, Homo sapiens
aggtttcctcttgct

SEQ ID NO: 755977 - DNA, 15 bp, Homo sapiens
ggtttcctcttgctg

SEQ ID NO: 755978 - DNA, 15 bp, Homo sapiens
gtttcctcttgctgt

SEQ ID NO: 755979 - DNA, 15 bp, Homo sapiens
tttcctcttgctgtt

SEQ ID NO: 755980 - DNA, 15 bp, Homo sapiens
ttcctcttgctgttt

SEQ ID NO: 755981 - DNA, 15 bp, Homo sapiens
tcctcttgctgtttg

SEQ ID NO: 755982 - DNA, 15 bp, Homo sapiens
cctcttgctgtttgg

SEQ ID NO: 755983 - DNA, 15 bp, Homo sapiens
ctcttgctgtttggc

SEQ ID NO: 755984 - DNA, 15 bp, Homo sapiens
tcttgctgtttggcc

SEQ ID NO: 755985 - DNA, 15 bp, Homo sapiens
cttgctgtttggcca

SEQ ID NO: 755986 - DNA, 15 bp, Homo sapiens
ttgctgtttggccac

SEQ ID NO: 755987 - DNA, 15 bp, Homo sapiens
tgctgtttggccact

SEQ ID NO: 755988 - DNA, 15 bp, Homo sapiens
gctgtttggccactt

SEQ ID NO: 755989 - DNA, 15 bp, Homo sapiens
ctgtttggccacttt

SEQ ID NO: 755990 - DNA, 15 bp, Homo sapiens
tgtttggccactttg

SEQ ID NO: 755991 - DNA, 15 bp, Homo sapiens
gtttggccactttgt

SEQ ID NO: 755992 - DNA, 15 bp, Homo sapiens
tttggccactttgtg

SEQ ID NO: 755993 - DNA, 15 bp, Homo sapiens
ttggccactttgtgc

SEQ ID NO: 755994 - DNA, 15 bp, Homo sapiens
tggccactttgtgct

SEQ ID NO: 755995 - DNA, 15 bp, Homo sapiens
ggccactttgtgctc

SEQ ID NO: 755996 - DNA, 15 bp, Homo sapiens
gccactttgtgctcc

SEQ ID NO: 755997 - DNA, 15 bp, Homo sapiens
ccactttgtgctcca

SEQ ID NO: 755998 - DNA, 15 bp, Homo sapiens
cactttgtgctccag

SEQ ID NO: 755999 - DNA, 15 bp, Homo sapiens
actttgtgctccagt

SEQ ID NO: 756000 - DNA, 15 bp, Homo sapiens
ctttgtgctccagtt

SEQ ID NO: 756001 - DNA, 15 bp, Homo sapiens
tttgtgctccagttt

SEQ ID NO: 756002 - DNA, 15 bp, Homo sapiens
ttgtgctccagtttt

SEQ ID NO: 756003 - DNA, 15 bp, Homo sapiens
tgtgctccagttttc

SEQ ID NO: 756004 - DNA, 15 bp, Homo sapiens
gtgctccagttttct

SEQ ID NO: 756005 - DNA, 15 bp, Homo sapiens
tgctccagttttctc

SEQ ID NO: 756006 - DNA, 15 bp, Homo sapiens
gctccagttttctct

SEQ ID NO: 756007 - DNA, 15 bp, Homo sapiens
ctccagttttctctc

SEQ ID NO: 756008 - DNA, 15 bp, Homo sapiens
tccagttttctctct

SEQ ID NO: 756009 - DNA, 15 bp, Homo sapiens
ccagttttctctcta

SEQ ID NO: 756010 - DNA, 15 bp, Homo sapiens
cagttttctctctac

SEQ ID NO: 756011 - DNA, 15 bp, Homo sapiens
agttttctctctaca

SEQ ID NO: 756012 - DNA, 15 bp, Homo sapiens
gttttctctctacag

SEQ ID NO: 756013 - DNA, 15 bp, Homo sapiens
ttttctctctacaga

SEQ ID NO: 756014 - DNA, 15 bp, Homo sapiens
tttctctctacagaa

SEQ ID NO: 756015 - DNA, 15 bp, Homo sapiens
ttctctctacagaaa

SEQ ID NO: 756016 - DNA, 15 bp, Homo sapiens
tctctctacagaaag

SEQ ID NO: 756017 - DNA, 15 bp, Homo sapiens
ctctctacagaaaga

SEQ ID NO: 756018 - DNA, 15 bp, Homo sapiens
tctctacagaaagaa

SEQ ID NO: 756019 - DNA, 15 bp, Homo sapiens
ctctacagaaagaag

SEQ ID NO: 756020 - DNA, 15 bp, Homo sapiens
tctacagaaagaaga

SEQ ID NO: 756021 - DNA, 15 bp, Homo sapiens
ctacagaaagaagat

SEQ ID NO: 756022 - DNA, 15 bp, Homo sapiens
tacagaaagaagata

SEQ ID NO: 756023 - DNA, 15 bp, Homo sapiens
acagaaagaagataa

SEQ ID NO: 756024 - DNA, 15 bp, Homo sapiens
cagaaagaagataat

SEQ ID NO: 756025 - DNA, 15 bp, Homo sapiens
agaaagaagataata

SEQ ID NO: 756026 - DNA, 15 bp, Homo sapiens
gaaagaagataatat

SEQ ID NO: 756027 - DNA, 15 bp, Homo sapiens
aaagaagataatatt

SEQ ID NO: 756028 - DNA, 15 bp, Homo sapiens
aagaagataatatta

SEQ ID NO: 756029 - DNA, 15 bp, Homo sapiens
agaagataatattat

SEQ ID NO: 756030 - DNA, 15 bp, Homo sapiens
gaagataatattatc

SEQ ID NO: 756031 - DNA, 15 bp, Homo sapiens
aagataatattatct

SEQ ID NO: 756032 - DNA, 15 bp, Homo sapiens
agataatattatcta

SEQ ID NO: 756033 - DNA, 15 bp, Homo sapiens
gataatattatctat

SEQ ID NO: 756034 - DNA, 15 bp, Homo sapiens
ataatattatctatc

SEQ ID NO: 756035 - DNA, 15 bp, Homo sapiens
taatattatctatct

SEQ ID NO: 756036 - DNA, 15 bp, Homo sapiens
aatattatctatctt

SEQ ID NO: 756037 - DNA, 15 bp, Homo sapiens
atattatctatcttg

SEQ ID NO: 756038 - DNA, 15 bp, Homo sapiens
tattatctatcttgc

SEQ ID NO: 756039 - DNA, 15 bp, Homo sapiens
attatctatcttgct

SEQ ID NO: 756040 - DNA, 15 bp, Homo sapiens
ttatctatcttgctg

SEQ ID NO: 756041 - DNA, 15 bp, Homo sapiens
tatctatcttgctga

SEQ ID NO: 756042 - DNA, 15 bp, Homo sapiens
atctatcttgctgag

SEQ ID NO: 756043 - DNA, 15 bp, Homo sapiens
tctatcttgctgagt

SEQ ID NO: 756044 - DNA, 15 bp, Homo sapiens
ctatcttgctgagtt

SEQ ID NO: 756045 - DNA, 15 bp, Homo sapiens
tatcttgctgagttc

SEQ ID NO: 756046 - DNA, 15 bp, Homo sapiens
atcttgctgagttcg

SEQ ID NO: 756047 - DNA, 15 bp, Homo sapiens
tcttgctgagttcgt

SEQ ID NO: 756048 - DNA, 15 bp, Homo sapiens
cttgctgagttcgtt

SEQ ID NO: 756049 - DNA, 15 bp, Homo sapiens
ttgctgagttcgttg

SEQ ID NO: 756050 - DNA, 15 bp, Homo sapiens
tgctgagttcgttga

SEQ ID NO: 756051 - DNA, 15 bp, Homo sapiens
gctgagttcgttgat

SEQ ID NO: 756052 - DNA, 15 bp, Homo sapiens
ctgagttcgttgatc

SEQ ID NO: 756053 - DNA, 15 bp, Homo sapiens
tgagttcgttgatct

SEQ ID NO: 756054 - DNA, 15 bp, Homo sapiens
gagttcgttgatctg

SEQ ID NO: 756055 - DNA, 15 bp, Homo sapiens
agttcgttgatctgt

SEQ ID NO: 756056 - DNA, 15 bp, Homo sapiens
gttcgttgatctgtg

SEQ ID NO: 756057 - DNA, 15 bp, Homo sapiens
ttcgttgatctgtgg

SEQ ID NO: 756058 - DNA, 15 bp, Homo sapiens
tcgttgatctgtggt

SEQ ID NO: 756059 - DNA, 15 bp, Homo sapiens
cgttgatctgtggtg

SEQ ID NO: 756060 - DNA, 15 bp, Homo sapiens
gttgatctgtggtga

SEQ ID NO: 756061 - DNA, 15 bp, Homo sapiens
ttgatctgtggtgag

SEQ ID NO: 756062 - DNA, 15 bp, Homo sapiens
tgatctgtggtgagg

SEQ ID NO: 756063 - DNA, 15 bp, Homo sapiens
gatctgtggtgaggg

SEQ ID NO: 756064 - DNA, 15 bp, Homo sapiens
atctgtggtgagggt

SEQ ID NO: 756065 - DNA, 15 bp, Homo sapiens
tctgtggtgagggta

SEQ ID NO: 756066 - DNA, 15 bp, Homo sapiens
ctgtggtgagggtag

SEQ ID NO: 756067 - DNA, 15 bp, Homo sapiens
tgtggtgagggtaga

SEQ ID NO: 756068 - DNA, 15 bp, Homo sapiens
gtggtgagggtagaa

SEQ ID NO: 756069 - DNA, 15 bp, Homo sapiens
tggtgagggtagaac

SEQ ID NO: 756070 - DNA, 15 bp, Homo sapiens
ggtgagggtagaaca

SEQ ID NO: 756071 - DNA, 15 bp, Homo sapiens
gtgagggtagaacag

SEQ ID NO: 756072 - DNA, 15 bp, Homo sapiens
tgagggtagaacagg

SEQ ID NO: 756073 - DNA, 15 bp, Homo sapiens
gagggtagaacagga

SEQ ID NO: 756074 - DNA, 15 bp, Homo sapiens
agggtagaacaggat

SEQ ID NO: 756075 - DNA, 15 bp, Homo sapiens
gggtagaacaggata

SEQ ID NO: 756076 - DNA, 15 bp, Homo sapiens
ggtagaacaggatat

SEQ ID NO: 756077 - DNA, 15 bp, Homo sapiens
gtagaacaggatatt

SEQ ID NO: 756078 - DNA, 15 bp, Homo sapiens
tagaacaggatatta

SEQ ID NO: 756079 - DNA, 15 bp, Homo sapiens
agaacaggatattaa

SEQ ID NO: 756080 - DNA, 15 bp, Homo sapiens
gaacaggatattaaa

SEQ ID NO: 756081 - DNA, 15 bp, Homo sapiens
aacaggatattaaaa

SEQ ID NO: 756082 - DNA, 15 bp, Homo sapiens
acaggatattaaaat

SEQ ID NO: 756083 - DNA, 15 bp, Homo sapiens
caggatattaaaata

SEQ ID NO: 756084 - DNA, 15 bp, Homo sapiens
aggatattaaaatat

SEQ ID NO: 756085 - DNA, 15 bp, Homo sapiens
ggatattaaaatatc

SEQ ID NO: 756086 - DNA, 15 bp, Homo sapiens
gatattaaaatatct

SEQ ID NO: 756087 - DNA, 15 bp, Homo sapiens
atattaaaatatctt

SEQ ID NO: 756088 - DNA, 15 bp, Homo sapiens
tattaaaatatctta

SEQ ID NO: 756089 - DNA, 15 bp, Homo sapiens
attaaaatatcttac

SEQ ID NO: 756090 - DNA, 15 bp, Homo sapiens
ttaaaatatcttact

SEQ ID NO: 756091 - DNA, 15 bp, Homo sapiens
taaaatatcttacta

SEQ ID NO: 756092 - DNA, 15 bp, Homo sapiens
aaaatatcttactag

SEQ ID NO: 756093 - DNA, 15 bp, Homo sapiens
aaatatcttactaga

SEQ ID NO: 756094 - DNA, 15 bp, Homo sapiens
aatatcttactagaa

SEQ ID NO: 756095 - DNA, 15 bp, Homo sapiens
atatcttactagaac

SEQ ID NO: 756096 - DNA, 15 bp, Homo sapiens
tatcttactagaacc

SEQ ID NO: 756097 - DNA, 15 bp, Homo sapiens
atcttactagaacct

SEQ ID NO: 756098 - DNA, 15 bp, Homo sapiens
tcttactagaacctt

SEQ ID NO: 756099 - DNA, 15 bp, Homo sapiens
cttactagaaccttg

SEQ ID NO: 756100 - DNA, 15 bp, Homo sapiens
ttactagaaccttgg

SEQ ID NO: 756101 - DNA, 15 bp, Homo sapiens
tactagaaccttggg

SEQ ID NO: 756102 - DNA, 15 bp, Homo sapiens
actagaaccttgggc

SEQ ID NO: 756103 - DNA, 15 bp, Homo sapiens
ctagaaccttgggcc

SEQ ID NO: 756104 - DNA, 15 bp, Homo sapiens
tagaaccttgggccc

SEQ ID NO: 756105 - DNA, 15 bp, Homo sapiens
agaaccttgggccca

SEQ ID NO: 756106 - DNA, 15 bp, Homo sapiens
gaaccttgggcccag

SEQ ID NO: 756107 - DNA, 15 bp, Homo sapiens
aaccttgggcccagc

SEQ ID NO: 756108 - DNA, 15 bp, Homo sapiens
accttgggcccagct

SEQ ID NO: 756109 - DNA, 15 bp, Homo sapiens
ccttgggcccagctt

SEQ ID NO: 756110 - DNA, 15 bp, Homo sapiens
cttgggcccagcttc

SEQ ID NO: 756111 - DNA, 15 bp, Homo sapiens
ttgggcccagcttcc

SEQ ID NO: 756112 - DNA, 15 bp, Homo sapiens
tgggcccagcttccg

SEQ ID NO: 756113 - DNA, 15 bp, Homo sapiens
gggcccagcttccgg

SEQ ID NO: 756114 - DNA, 15 bp, Homo sapiens
ggcccagcttccggt

SEQ ID NO: 756115 - DNA, 15 bp, Homo sapiens
gcccagcttccggtc

SEQ ID NO: 756116 - DNA, 15 bp, Homo sapiens
cccagcttccggtct

SEQ ID NO: 756117 - DNA, 15 bp, Homo sapiens
ccagcttccggtctt

SEQ ID NO: 756118 - DNA, 15 bp, Homo sapiens
cagcttccggtcttc

SEQ ID NO: 756119 - DNA, 15 bp, Homo sapiens
agcttccggtcttcc

SEQ ID NO: 756120 - DNA, 15 bp, Homo sapiens
gcttccggtcttcct

SEQ ID NO: 756121 - DNA, 15 bp, Homo sapiens
cttccggtcttcctg

SEQ ID NO: 756122 - DNA, 15 bp, Homo sapiens
ttccggtcttcctga

SEQ ID NO: 756123 - DNA, 15 bp, Homo sapiens
tccggtcttcctgat

SEQ ID NO: 756124 - DNA, 15 bp, Homo sapiens
ccggtcttcctgatg

SEQ ID NO: 756125 - DNA, 15 bp, Homo sapiens
cggtcttcctgatgg

SEQ ID NO: 756126 - DNA, 15 bp, Homo sapiens
ggtcttcctgatggt

SEQ ID NO: 756127 - DNA, 15 bp, Homo sapiens
gtcttcctgatggtt

SEQ ID NO: 756128 - DNA, 15 bp, Homo sapiens
tcttcctgatggttt

SEQ ID NO: 756129 - DNA, 15 bp, Homo sapiens
cttcctgatggtttc

SEQ ID NO: 756130 - DNA, 15 bp, Homo sapiens
ttcctgatggtttca

SEQ ID NO: 756131 - DNA, 15 bp, Homo sapiens
tcctgatggtttcaa

SEQ ID NO: 756132 - DNA, 15 bp, Homo sapiens
cctgatggtttcaat

SEQ ID NO: 756133 - DNA, 15 bp, Homo sapiens
ctgatggtttcaatc

SEQ ID NO: 756134 - DNA, 15 bp, Homo sapiens
tgatggtttcaatcc

SEQ ID NO: 756135 - DNA, 15 bp, Homo sapiens
gatggtttcaatcca

SEQ ID NO: 756136 - DNA, 15 bp, Homo sapiens
atggtttcaatccag

SEQ ID NO: 756137 - DNA, 15 bp, Homo sapiens
tggtttcaatccagg

SEQ ID NO: 756138 - DNA, 15 bp, Homo sapiens
ggtttcaatccaggc

SEQ ID NO: 756139 - DNA, 15 bp, Homo sapiens
gtttcaatccaggcc

SEQ ID NO: 756140 - DNA, 15 bp, Homo sapiens
tttcaatccaggcct

SEQ ID NO: 756141 - DNA, 15 bp, Homo sapiens
ttcaatccaggccta

SEQ ID NO: 756142 - DNA, 15 bp, Homo sapiens
tcaatccaggcctag

SEQ ID NO: 756143 - DNA, 15 bp, Homo sapiens
caatccaggcctagc

SEQ ID NO: 756144 - DNA, 15 bp, Homo sapiens
aatccaggcctagca

SEQ ID NO: 756145 - DNA, 15 bp, Homo sapiens
atccaggcctagcac

SEQ ID NO: 756146 - DNA, 15 bp, Homo sapiens
tccaggcctagcacg

SEQ ID NO: 756147 - DNA, 15 bp, Homo sapiens
ccaggcctagcacgg

SEQ ID NO: 756148 - DNA, 15 bp, Homo sapiens
caggcctagcacggg

SEQ ID NO: 756149 - DNA, 15 bp, Homo sapiens
aggcctagcacggga

SEQ ID NO: 756150 - DNA, 15 bp, Homo sapiens
ggcctagcacgggac

SEQ ID NO: 756151 - DNA, 15 bp, Homo sapiens
gcctagcacgggacc

SEQ ID NO: 756152 - DNA, 15 bp, Homo sapiens
cctagcacgggacct

SEQ ID NO: 756153 - DNA, 15 bp, Homo sapiens
ctagcacgggacctc

SEQ ID NO: 756154 - DNA, 15 bp, Homo sapiens
tagcacgggacctct

SEQ ID NO: 756155 - DNA, 15 bp, Homo sapiens
agcacgggacctctg

SEQ ID NO: 756156 - DNA, 15 bp, Homo sapiens
gcacgggacctctgt

SEQ ID NO: 756157 - DNA, 15 bp, Homo sapiens
cacgggacctctgtc

SEQ ID NO: 756158 - DNA, 15 bp, Homo sapiens
acgggacctctgtct

SEQ ID NO: 756159 - DNA, 15 bp, Homo sapiens
cgggacctctgtcta

SEQ ID NO: 756160 - DNA, 15 bp, Homo sapiens
gggacctctgtctaa

SEQ ID NO: 756161 - DNA, 15 bp, Homo sapiens
ggacctctgtctaaa

SEQ ID NO: 756162 - DNA, 15 bp, Homo sapiens
gacctctgtctaaaa

SEQ ID NO: 756163 - DNA, 15 bp, Homo sapiens
acctctgtctaaaat

SEQ ID NO: 756164 - DNA, 15 bp, Homo sapiens
cctctgtctaaaatt

SEQ ID NO: 756165 - DNA, 15 bp, Homo sapiens
ctctgtctaaaattc

SEQ ID NO: 756166 - DNA, 15 bp, Homo sapiens
tctgtctaaaattct

SEQ ID NO: 756167 - DNA, 15 bp, Homo sapiens
ctgtctaaaattctc

SEQ ID NO: 756168 - DNA, 15 bp, Homo sapiens
tgtctaaaattctct

SEQ ID NO: 756169 - DNA, 15 bp, Homo sapiens
gtctaaaattctctg

SEQ ID NO: 756170 - DNA, 15 bp, Homo sapiens
tctaaaattctctgc

SEQ ID NO: 756171 - DNA, 15 bp, Homo sapiens
ctaaaattctctgct

SEQ ID NO: 756172 - DNA, 15 bp, Homo sapiens
taaaattctctgctc

SEQ ID NO: 756173 - DNA, 15 bp, Homo sapiens
aaaattctctgctct

SEQ ID NO: 756174 - DNA, 15 bp, Homo sapiens
aaattctctgctctc

SEQ ID NO: 756175 - DNA, 15 bp, Homo sapiens
aattctctgctctca

SEQ ID NO: 756176 - DNA, 15 bp, Homo sapiens
attctctgctctcat

SEQ ID NO: 756177 - DNA, 15 bp, Homo sapiens
ttctctgctctcatg

SEQ ID NO: 756178 - DNA, 15 bp, Homo sapiens
tctctgctctcatgg

SEQ ID NO: 756179 - DNA, 15 bp, Homo sapiens
ctctgctctcatggc

SEQ ID NO: 756180 - DNA, 15 bp, Homo sapiens
tctgctctcatggcc

SEQ ID NO: 756181 - DNA, 15 bp, Homo sapiens
ctgctctcatggccc

SEQ ID NO: 756182 - DNA, 15 bp, Homo sapiens
tgctctcatggccct

SEQ ID NO: 756183 - DNA, 15 bp, Homo sapiens
gctctcatggccctg

SEQ ID NO: 756184 - DNA, 15 bp, Homo sapiens
ctctcatggccctgc

SEQ ID NO: 756185 - DNA, 15 bp, Homo sapiens
tctcatggccctgcc

SEQ ID NO: 756186 - DNA, 15 bp, Homo sapiens
ctcatggccctgcca

SEQ ID NO: 756187 - DNA, 15 bp, Homo sapiens
tcatggccctgccat

SEQ ID NO: 756188 - DNA, 15 bp, Homo sapiens
catggccctgccatt

SEQ ID NO: 756189 - DNA, 15 bp, Homo sapiens
atggccctgccattc

SEQ ID NO: 756190 - DNA, 15 bp, Homo sapiens
tggccctgccattcc

SEQ ID NO: 756191 - DNA, 15 bp, Homo sapiens
ggccctgccattcct

SEQ ID NO: 756192 - DNA, 15 bp, Homo sapiens
gccctgccattcctg

SEQ ID NO: 756193 - DNA, 15 bp, Homo sapiens
ccctgccattcctga

SEQ ID NO: 756194 - DNA, 15 bp, Homo sapiens
cctgccattcctgag

SEQ ID NO: 756195 - DNA, 15 bp, Homo sapiens
ctgccattcctgagg

SEQ ID NO: 756196 - DNA, 15 bp, Homo sapiens
tgccattcctgaggc

SEQ ID NO: 756197 - DNA, 15 bp, Homo sapiens
gccattcctgaggca

SEQ ID NO: 756198 - DNA, 15 bp, Homo sapiens
ccattcctgaggcac

SEQ ID NO: 756199 - DNA, 15 bp, Homo sapiens
cattcctgaggcacc

SEQ ID NO: 756200 - DNA, 15 bp, Homo sapiens
attcctgaggcaccc

SEQ ID NO: 756201 - DNA, 15 bp, Homo sapiens
ttcctgaggcaccct

SEQ ID NO: 756202 - DNA, 15 bp, Homo sapiens
tcctgaggcaccctt

SEQ ID NO: 756203 - DNA, 15 bp, Homo sapiens
cctgaggcacccttt

SEQ ID NO: 756204 - DNA, 15 bp, Homo sapiens
ctgaggcaccctttg

SEQ ID NO: 756205 - DNA, 15 bp, Homo sapiens
tgaggcaccctttgc

SEQ ID NO: 756206 - DNA, 15 bp, Homo sapiens
gaggcaccctttgcc

SEQ ID NO: 756207 - DNA, 15 bp, Homo sapiens
aggcaccctttgcct

SEQ ID NO: 756208 - DNA, 15 bp, Homo sapiens
ggcaccctttgcctc

SEQ ID NO: 756209 - DNA, 15 bp, Homo sapiens
gcaccctttgcctcc

SEQ ID NO: 756210 - DNA, 15 bp, Homo sapiens
caccctttgcctcca

SEQ ID NO: 756211 - DNA, 15 bp, Homo sapiens
accctttgcctccag

SEQ ID NO: 756212 - DNA, 15 bp, Homo sapiens
ccctttgcctccagg

SEQ ID NO: 756213 - DNA, 15 bp, Homo sapiens
cctttgcctccaggc

SEQ ID NO: 756214 - DNA, 15 bp, Homo sapiens
ctttgcctccaggct

SEQ ID NO: 756215 - DNA, 15 bp, Homo sapiens
tttgcctccaggcta

SEQ ID NO: 756216 - DNA, 15 bp, Homo sapiens
ttgcctccaggctaa

SEQ ID NO: 756217 - DNA, 15 bp, Homo sapiens
tgcctccaggctaaa

SEQ ID NO: 756218 - DNA, 15 bp, Homo sapiens
gcctccaggctaaag

SEQ ID NO: 756219 - DNA, 15 bp, Homo sapiens
cctccaggctaaagt

SEQ ID NO: 756220 - DNA, 15 bp, Homo sapiens
ctccaggctaaagta

SEQ ID NO: 756221 - DNA, 15 bp, Homo sapiens
tccaggctaaagtaa

SEQ ID NO: 756222 - DNA, 15 bp, Homo sapiens
ccaggctaaagtaaa

SEQ ID NO: 756223 - DNA, 15 bp, Homo sapiens
caggctaaagtaaac

SEQ ID NO: 756224 - DNA, 15 bp, Homo sapiens
aggctaaagtaaaca

SEQ ID NO: 756225 - DNA, 15 bp, Homo sapiens
ggctaaagtaaacac

SEQ ID NO: 756226 - DNA, 15 bp, Homo sapiens
gctaaagtaaacacc

SEQ ID NO: 756227 - DNA, 15 bp, Homo sapiens
ctaaagtaaacacct

SEQ ID NO: 756228 - DNA, 15 bp, Homo sapiens
taaagtaaacacctg

SEQ ID NO: 756229 - DNA, 15 bp, Homo sapiens
aaagtaaacacctgt

SEQ ID NO: 756230 - DNA, 15 bp, Homo sapiens
aagtaaacacctgtc

SEQ ID NO: 756231 - DNA, 15 bp, Homo sapiens
agtaaacacctgtca

SEQ ID NO: 756232 - DNA, 15 bp, Homo sapiens
gtaaacacctgtcat

SEQ ID NO: 756233 - DNA, 15 bp, Homo sapiens
taaacacctgtcatt

SEQ ID NO: 756234 - DNA, 15 bp, Homo sapiens
aaacacctgtcattc

SEQ ID NO: 756235 - DNA, 15 bp, Homo sapiens
aacacctgtcattca

SEQ ID NO: 756236 - DNA, 15 bp, Homo sapiens
acacctgtcattcat

SEQ ID NO: 756237 - DNA, 15 bp, Homo sapiens
cacctgtcattcatg

SEQ ID NO: 756238 - DNA, 15 bp, Homo sapiens
acctgtcattcatga

SEQ ID NO: 756239 - DNA, 15 bp, Homo sapiens
cctgtcattcatgat

SEQ ID NO: 756240 - DNA, 15 bp, Homo sapiens
ctgtcattcatgatc

SEQ ID NO: 756241 - DNA, 15 bp, Homo sapiens
tgtcattcatgatcc

SEQ ID NO: 756242 - DNA, 15 bp, Homo sapiens
gtcattcatgatcct

SEQ ID NO: 756243 - DNA, 15 bp, Homo sapiens
tcattcatgatcctc

SEQ ID NO: 756244 - DNA, 15 bp, Homo sapiens
cattcatgatcctcc

SEQ ID NO: 756245 - DNA, 15 bp, Homo sapiens
attcatgatcctcct

SEQ ID NO: 756246 - DNA, 15 bp, Homo sapiens
ttcatgatcctcctt

SEQ ID NO: 756247 - DNA, 15 bp, Homo sapiens
tcatgatcctcctta

SEQ ID NO: 756248 - DNA, 15 bp, Homo sapiens
catgatcctccttac

SEQ ID NO: 756249 - DNA, 15 bp, Homo sapiens
atgatcctccttact

SEQ ID NO: 756250 - DNA, 15 bp, Homo sapiens
tgatcctccttactt

SEQ ID NO: 756251 - DNA, 15 bp, Homo sapiens
gatcctccttacttt

SEQ ID NO: 756252 - DNA, 15 bp, Homo sapiens
atcctccttactttg

SEQ ID NO: 756253 - DNA, 15 bp, Homo sapiens
tcctccttactttga

SEQ ID NO: 756254 - DNA, 15 bp, Homo sapiens
cctccttactttgat

SEQ ID NO: 756255 - DNA, 15 bp, Homo sapiens
ctccttactttgata

SEQ ID NO: 756256 - DNA, 15 bp, Homo sapiens
tccttactttgatat

SEQ ID NO: 756257 - DNA, 15 bp, Homo sapiens
ccttactttgatatg

SEQ ID NO: 756258 - DNA, 15 bp, Homo sapiens
cttactttgatatga

SEQ ID NO: 756259 - DNA, 15 bp, Homo sapiens
ttactttgatatgat

SEQ ID NO: 756260 - DNA, 15 bp, Homo sapiens
tactttgatatgata

SEQ ID NO: 756261 - DNA, 15 bp, Homo sapiens
actttgatatgataa

SEQ ID NO: 756262 - DNA, 15 bp, Homo sapiens
ctttgatatgataaa

SEQ ID NO: 756263 - DNA, 15 bp, Homo sapiens
tttgatatgataaaa

SEQ ID NO: 756264 - DNA, 15 bp, Homo sapiens
ttgatatgataaaat

SEQ ID NO: 756265 - DNA, 15 bp, Homo sapiens
tgatatgataaaata

SEQ ID NO: 756266 - DNA, 15 bp, Homo sapiens
gatatgataaaatat

SEQ ID NO: 756267 - DNA, 15 bp, Homo sapiens
atatgataaaatatc

SEQ ID NO: 756268 - DNA, 15 bp, Homo sapiens
tatgataaaatatca

SEQ ID NO: 756269 - DNA, 15 bp, Homo sapiens
atgataaaatatcag

SEQ ID NO: 756270 - DNA, 15 bp, Homo sapiens
tgataaaatatcagg

SEQ ID NO: 756271 - DNA, 15 bp, Homo sapiens
gataaaatatcaggg

SEQ ID NO: 756272 - DNA, 15 bp, Homo sapiens
ataaaatatcagggc

SEQ ID NO: 756273 - DNA, 15 bp, Homo sapiens
taaaatatcagggcc

SEQ ID NO: 756274 - DNA, 15 bp, Homo sapiens
aaaatatcagggccc

SEQ ID NO: 756275 - DNA, 15 bp, Homo sapiens
aaatatcagggccca

SEQ ID NO: 756276 - DNA, 15 bp, Homo sapiens
aatatcagggcccag

SEQ ID NO: 756277 - DNA, 15 bp, Homo sapiens
atatcagggcccaga

SEQ ID NO: 756278 - DNA, 15 bp, Homo sapiens
tatcagggcccagac

SEQ ID NO: 756279 - DNA, 15 bp, Homo sapiens
atcagggcccagact

SEQ ID NO: 756280 - DNA, 15 bp, Homo sapiens
tcagggcccagactg

SEQ ID NO: 756281 - DNA, 15 bp, Homo sapiens
cagggcccagactgc

SEQ ID NO: 756282 - DNA, 15 bp, Homo sapiens
agggcccagactgca

SEQ ID NO: 756283 - DNA, 15 bp, Homo sapiens
gggcccagactgcag

SEQ ID NO: 756284 - DNA, 15 bp, Homo sapiens
ggcccagactgcagt

SEQ ID NO: 756285 - DNA, 15 bp, Homo sapiens
gcccagactgcagtc

SEQ ID NO: 756286 - DNA, 15 bp, Homo sapiens
cccagactgcagtcc

SEQ ID NO: 756287 - DNA, 15 bp, Homo sapiens
ccagactgcagtccc

SEQ ID NO: 756288 - DNA, 15 bp, Homo sapiens
cagactgcagtccca

SEQ ID NO: 756289 - DNA, 15 bp, Homo sapiens
agactgcagtcccac

SEQ ID NO: 756290 - DNA, 15 bp, Homo sapiens
gactgcagtcccacg

SEQ ID NO: 756291 - DNA, 15 bp, Homo sapiens
actgcagtcccacgg

SEQ ID NO: 756292 - DNA, 15 bp, Homo sapiens
ctgcagtcccacggc

SEQ ID NO: 756293 - DNA, 15 bp, Homo sapiens
tgcagtcccacggcc

SEQ ID NO: 756294 - DNA, 15 bp, Homo sapiens
gcagtcccacggccc

SEQ ID NO: 756295 - DNA, 15 bp, Homo sapiens
cagtcccacggccct

SEQ ID NO: 756296 - DNA, 15 bp, Homo sapiens
agtcccacggccctg

SEQ ID NO: 756297 - DNA, 15 bp, Homo sapiens
gtcccacggccctgg

SEQ ID NO: 756298 - DNA, 15 bp, Homo sapiens
tcccacggccctgga

SEQ ID NO: 756299 - DNA, 15 bp, Homo sapiens
cccacggccctggac

SEQ ID NO: 756300 - DNA, 15 bp, Homo sapiens
ccacggccctggact

SEQ ID NO: 756301 - DNA, 15 bp, Homo sapiens
cacggccctggactc

SEQ ID NO: 756302 - DNA, 15 bp, Homo sapiens
acggccctggactcc

SEQ ID NO: 756303 - DNA, 15 bp, Homo sapiens
cggccctggactcca

SEQ ID NO: 756304 - DNA, 15 bp, Homo sapiens
ggccctggactccag

SEQ ID NO: 756305 - DNA, 15 bp, Homo sapiens
gccctggactccaga

SEQ ID NO: 756306 - DNA, 15 bp, Homo sapiens
ccctggactccagac

SEQ ID NO: 756307 - DNA, 15 bp, Homo sapiens
cctggactccagacc

SEQ ID NO: 756308 - DNA, 15 bp, Homo sapiens
ctggactccagacct

SEQ ID NO: 756309 - DNA, 15 bp, Homo sapiens
tggactccagaccta

SEQ ID NO: 756310 - DNA, 15 bp, Homo sapiens
ggactccagacctac

SEQ ID NO: 756311 - DNA, 15 bp, Homo sapiens
gactccagacctacc

SEQ ID NO: 756312 - DNA, 15 bp, Homo sapiens
actccagacctacct

SEQ ID NO: 756313 - DNA, 15 bp, Homo sapiens
ctccagacctacctg

SEQ ID NO: 756314 - DNA, 15 bp, Homo sapiens
tccagacctacctgt

SEQ ID NO: 756315 - DNA, 15 bp, Homo sapiens
ccagacctacctgtc

SEQ ID NO: 756316 - DNA, 15 bp, Homo sapiens
cagacctacctgtct

SEQ ID NO: 756317 - DNA, 15 bp, Homo sapiens
agacctacctgtctg

SEQ ID NO: 756318 - DNA, 15 bp, Homo sapiens
gacctacctgtctgt

SEQ ID NO: 756319 - DNA, 15 bp, Homo sapiens
acctacctgtctgtc

SEQ ID NO: 756320 - DNA, 15 bp, Homo sapiens
cctacctgtctgtct

SEQ ID NO: 756321 - DNA, 15 bp, Homo sapiens
ctacctgtctgtctt

SEQ ID NO: 756322 - DNA, 15 bp, Homo sapiens
tacctgtctgtcttg

SEQ ID NO: 756323 - DNA, 15 bp, Homo sapiens
acctgtctgtcttga

SEQ ID NO: 756324 - DNA, 15 bp, Homo sapiens
cctgtctgtcttgat

SEQ ID NO: 756325 - DNA, 15 bp, Homo sapiens
ctgtctgtcttgatc

SEQ ID NO: 756326 - DNA, 15 bp, Homo sapiens
tgtctgtcttgatct

SEQ ID NO: 756327 - DNA, 15 bp, Homo sapiens
gtctgtcttgatctc

SEQ ID NO: 756328 - DNA, 15 bp, Homo sapiens
tctgtcttgatctct

SEQ ID NO: 756329 - DNA, 15 bp, Homo sapiens
ctgtcttgatctctc

SEQ ID NO: 756330 - DNA, 15 bp, Homo sapiens
tgtcttgatctctca

SEQ ID NO: 756331 - DNA, 15 bp, Homo sapiens
gtcttgatctctcaa

SEQ ID NO: 756332 - DNA, 15 bp, Homo sapiens
tcttgatctctcaat

SEQ ID NO: 756333 - DNA, 15 bp, Homo sapiens
cttgatctctcaatc

SEQ ID NO: 756334 - DNA, 15 bp, Homo sapiens
ttgatctctcaatcc

SEQ ID NO: 756335 - DNA, 15 bp, Homo sapiens
tgatctctcaatcct

SEQ ID NO: 756336 - DNA, 15 bp, Homo sapiens
gatctctcaatcctc

SEQ ID NO: 756337 - DNA, 15 bp, Homo sapiens
atctctcaatcctct

SEQ ID NO: 756338 - DNA, 15 bp, Homo sapiens
tctctcaatcctcta

SEQ ID NO: 756339 - DNA, 15 bp, Homo sapiens
ctctcaatcctctag

SEQ ID NO: 756340 - DNA, 15 bp, Homo sapiens
tctcaatcctctagg

SEQ ID NO: 756341 - DNA, 15 bp, Homo sapiens
ctcaatcctctaggg

SEQ ID NO: 756342 - DNA, 15 bp, Homo sapiens
tcaatcctctagggc

SEQ ID NO: 756343 - DNA, 15 bp, Homo sapiens
caatcctctagggca

SEQ ID NO: 756344 - DNA, 15 bp, Homo sapiens
aatcctctagggcag

SEQ ID NO: 756345 - DNA, 15 bp, Homo sapiens
atcctctagggcagc

SEQ ID NO: 756346 - DNA, 15 bp, Homo sapiens
tcctctagggcagcc

SEQ ID NO: 756347 - DNA, 15 bp, Homo sapiens
cctctagggcagcct

SEQ ID NO: 756348 - DNA, 15 bp, Homo sapiens
ctctagggcagcctt

SEQ ID NO: 756349 - DNA, 15 bp, Homo sapiens
tctagggcagccttc

SEQ ID NO: 756350 - DNA, 15 bp, Homo sapiens
ctagggcagccttct

SEQ ID NO: 756351 - DNA, 15 bp, Homo sapiens
tagggcagccttctc

SEQ ID NO: 756352 - DNA, 15 bp, Homo sapiens
agggcagccttctcc

SEQ ID NO: 756353 - DNA, 15 bp, Homo sapiens
gggcagccttctcct

SEQ ID NO: 756354 - DNA, 15 bp, Homo sapiens
ggcagccttctccta

SEQ ID NO: 756355 - DNA, 15 bp, Homo sapiens
gcagccttctcctac

SEQ ID NO: 756356 - DNA, 15 bp, Homo sapiens
cagccttctcctaca

SEQ ID NO: 756357 - DNA, 15 bp, Homo sapiens
agccttctcctacat

SEQ ID NO: 756358 - DNA, 15 bp, Homo sapiens
gccttctcctacatc

SEQ ID NO: 756359 - DNA, 15 bp, Homo sapiens
ccttctcctacatcc

SEQ ID NO: 756360 - DNA, 15 bp, Homo sapiens
cttctcctacatcca

SEQ ID NO: 756361 - DNA, 15 bp, Homo sapiens
ttctcctacatccag

SEQ ID NO: 756362 - DNA, 15 bp, Homo sapiens
tctcctacatccaga

SEQ ID NO: 756363 - DNA, 15 bp, Homo sapiens
ctcctacatccagaa

SEQ ID NO: 756364 - DNA, 15 bp, Homo sapiens
tcctacatccagaat

SEQ ID NO: 756365 - DNA, 15 bp, Homo sapiens
cctacatccagaatt

SEQ ID NO: 756366 - DNA, 15 bp, Homo sapiens
ctacatccagaattt

SEQ ID NO: 756367 - DNA, 15 bp, Homo sapiens
tacatccagaatttt

SEQ ID NO: 756368 - DNA, 15 bp, Homo sapiens
acatccagaattttc

SEQ ID NO: 756369 - DNA, 15 bp, Homo sapiens
catccagaattttct

SEQ ID NO: 756370 - DNA, 15 bp, Homo sapiens
atccagaattttctg

SEQ ID NO: 756371 - DNA, 15 bp, Homo sapiens
tccagaattttctgc

SEQ ID NO: 756372 - DNA, 15 bp, Homo sapiens
ccagaattttctgca

SEQ ID NO: 756373 - DNA, 15 bp, Homo sapiens
cagaattttctgcat

SEQ ID NO: 756374 - DNA, 15 bp, Homo sapiens
agaattttctgcatt

SEQ ID NO: 756375 - DNA, 15 bp, Homo sapiens
gaattttctgcattc

SEQ ID NO: 756376 - DNA, 15 bp, Homo sapiens
aattttctgcattct

SEQ ID NO: 756377 - DNA, 15 bp, Homo sapiens
attttctgcattctg

SEQ ID NO: 756378 - DNA, 15 bp, Homo sapiens
ttttctgcattctgt

SEQ ID NO: 756379 - DNA, 15 bp, Homo sapiens
tttctgcattctgtc

SEQ ID NO: 756380 - DNA, 15 bp, Homo sapiens
ttctgcattctgtcc

SEQ ID NO: 756381 - DNA, 15 bp, Homo sapiens
tctgcattctgtccc

SEQ ID NO: 756382 - DNA, 15 bp, Homo sapiens
ctgcattctgtcccc

SEQ ID NO: 756383 - DNA, 15 bp, Homo sapiens
tgcattctgtcccct

SEQ ID NO: 756384 - DNA, 15 bp, Homo sapiens
gcattctgtccccta

SEQ ID NO: 756385 - DNA, 15 bp, Homo sapiens
cattctgtcccctac

SEQ ID NO: 756386 - DNA, 15 bp, Homo sapiens
attctgtcccctaca

SEQ ID NO: 756387 - DNA, 15 bp, Homo sapiens
ttctgtcccctacat

SEQ ID NO: 756388 - DNA, 15 bp, Homo sapiens
tctgtcccctacatg

SEQ ID NO: 756389 - DNA, 15 bp, Homo sapiens
ctgtcccctacatga

SEQ ID NO: 756390 - DNA, 15 bp, Homo sapiens
tgtcccctacatgaa

SEQ ID NO: 756391 - DNA, 15 bp, Homo sapiens
gtcccctacatgaat

SEQ ID NO: 756392 - DNA, 15 bp, Homo sapiens
tcccctacatgaata

SEQ ID NO: 756393 - DNA, 15 bp, Homo sapiens
cccctacatgaatat

SEQ ID NO: 756394 - DNA, 15 bp, Homo sapiens
ccctacatgaatatt

SEQ ID NO: 756395 - DNA, 15 bp, Homo sapiens
cctacatgaatattg

SEQ ID NO: 756396 - DNA, 15 bp, Homo sapiens
ctacatgaatattgc

SEQ ID NO: 756397 - DNA, 15 bp, Homo sapiens
tacatgaatattgca

SEQ ID NO: 756398 - DNA, 15 bp, Homo sapiens
acatgaatattgcac

SEQ ID NO: 756399 - DNA, 15 bp, Homo sapiens
catgaatattgcact

SEQ ID NO: 756400 - DNA, 15 bp, Homo sapiens
atgaatattgcactt

SEQ ID NO: 756401 - DNA, 15 bp, Homo sapiens
tgaatattgcacttg

SEQ ID NO: 756402 - DNA, 15 bp, Homo sapiens
gaatattgcacttgt

SEQ ID NO: 756403 - DNA, 15 bp, Homo sapiens
aatattgcacttgtt

SEQ ID NO: 756404 - DNA, 15 bp, Homo sapiens
atattgcacttgttc

SEQ ID NO: 756405 - DNA, 15 bp, Homo sapiens
tattgcacttgttct

SEQ ID NO: 756406 - DNA, 15 bp, Homo sapiens
attgcacttgttctt

SEQ ID NO: 756407 - DNA, 15 bp, Homo sapiens
ttgcacttgttcttg

SEQ ID NO: 756408 - DNA, 15 bp, Homo sapiens
tgcacttgttcttgg

SEQ ID NO: 756409 - DNA, 15 bp, Homo sapiens
gcacttgttcttggg

SEQ ID NO: 756410 - DNA, 15 bp, Homo sapiens
cacttgttcttggga

SEQ ID NO: 756411 - DNA, 15 bp, Homo sapiens
acttgttcttgggac

SEQ ID NO: 756412 - DNA, 15 bp, Homo sapiens
cttgttcttgggacc

SEQ ID NO: 756413 - DNA, 15 bp, Homo sapiens
ttgttcttgggaccc

SEQ ID NO: 756414 - DNA, 15 bp, Homo sapiens
tgttcttgggaccct

SEQ ID NO: 756415 - DNA, 15 bp, Homo sapiens
gttcttgggacccta

SEQ ID NO: 756416 - DNA, 15 bp, Homo sapiens
ttcttgggaccctat

SEQ ID NO: 756417 - DNA, 15 bp, Homo sapiens
tcttgggaccctatc

SEQ ID NO: 756418 - DNA, 15 bp, Homo sapiens
cttgggaccctatcc

SEQ ID NO: 756419 - DNA, 15 bp, Homo sapiens
ttgggaccctatccc

SEQ ID NO: 756420 - DNA, 15 bp, Homo sapiens
tgggaccctatcccc

SEQ ID NO: 756421 - DNA, 15 bp, Homo sapiens
gggaccctatccccc

SEQ ID NO: 756422 - DNA, 15 bp, Homo sapiens
ggaccctatccccct

SEQ ID NO: 756423 - DNA, 15 bp, Homo sapiens
gaccctatccccctc

SEQ ID NO: 756424 - DNA, 15 bp, Homo sapiens
accctatccccctct

SEQ ID NO: 756425 - DNA, 15 bp, Homo sapiens
ccctatccccctctc

SEQ ID NO: 756426 - DNA, 15 bp, Homo sapiens
cctatccccctctcc

SEQ ID NO: 756427 - DNA, 15 bp, Homo sapiens
ctatccccctctccc

SEQ ID NO: 756428 - DNA, 15 bp, Homo sapiens
tatccccctctccct

SEQ ID NO: 756429 - DNA, 15 bp, Homo sapiens
atccccctctccctc

SEQ ID NO: 756430 - DNA, 15 bp, Homo sapiens
tccccctctccctcc

SEQ ID NO: 756431 - DNA, 15 bp, Homo sapiens
ccccctctccctcct

SEQ ID NO: 756432 - DNA, 15 bp, Homo sapiens
cccctctccctccta

SEQ ID NO: 756433 - DNA, 15 bp, Homo sapiens
ccctctccctcctaa

SEQ ID NO: 756434 - DNA, 15 bp, Homo sapiens
cctctccctcctaac

SEQ ID NO: 756435 - DNA, 15 bp, Homo sapiens
ctctccctcctaact

SEQ ID NO: 756436 - DNA, 15 bp, Homo sapiens
tctccctcctaactt

SEQ ID NO: 756437 - DNA, 15 bp, Homo sapiens
ctccctcctaacttc

SEQ ID NO: 756438 - DNA, 15 bp, Homo sapiens
tccctcctaacttcc

SEQ ID NO: 756439 - DNA, 15 bp, Homo sapiens
ccctcctaacttcct

SEQ ID NO: 756440 - DNA, 15 bp, Homo sapiens
cctcctaacttccta

SEQ ID NO: 756441 - DNA, 15 bp, Homo sapiens
ctcctaacttcctac

SEQ ID NO: 756442 - DNA, 15 bp, Homo sapiens
tcctaacttcctacc

SEQ ID NO: 756443 - DNA, 15 bp, Homo sapiens
cctaacttcctacct

SEQ ID NO: 756444 - DNA, 15 bp, Homo sapiens
ctaacttcctacctt

SEQ ID NO: 756445 - DNA, 15 bp, Homo sapiens
taacttcctaccttg

SEQ ID NO: 756446 - DNA, 15 bp, Homo sapiens
aacttcctaccttgc

SEQ ID NO: 756447 - DNA, 15 bp, Homo sapiens
acttcctaccttgcc

SEQ ID NO: 756448 - DNA, 15 bp, Homo sapiens
cttcctaccttgccc

SEQ ID NO: 756449 - DNA, 15 bp, Homo sapiens
ttcctaccttgcccc

SEQ ID NO: 756450 - DNA, 15 bp, Homo sapiens
tcctaccttgcccct

SEQ ID NO: 756451 - DNA, 15 bp, Homo sapiens
cctaccttgcccctt

SEQ ID NO: 756452 - DNA, 15 bp, Homo sapiens
ctaccttgccccttt

SEQ ID NO: 756453 - DNA, 15 bp, Homo sapiens
taccttgcccctttc

SEQ ID NO: 756454 - DNA, 15 bp, Homo sapiens
accttgcccctttct

SEQ ID NO: 756455 - DNA, 15 bp, Homo sapiens
ccttgcccctttctg

SEQ ID NO: 756456 - DNA, 15 bp, Homo sapiens
cttgcccctttctgc

SEQ ID NO: 756457 - DNA, 15 bp, Homo sapiens
ttgcccctttctgcc

SEQ ID NO: 756458 - DNA, 15 bp, Homo sapiens
tgcccctttctgcct

SEQ ID NO: 756459 - DNA, 15 bp, Homo sapiens
gcccctttctgcctt

SEQ ID NO: 756460 - DNA, 15 bp, Homo sapiens
cccctttctgccttt

SEQ ID NO: 756461 - DNA, 15 bp, Homo sapiens
ccctttctgcctttc

SEQ ID NO: 756462 - DNA, 15 bp, Homo sapiens
cctttctgcctttct

SEQ ID NO: 756463 - DNA, 15 bp, Homo sapiens
ctttctgcctttctg

SEQ ID NO: 756464 - DNA, 15 bp, Homo sapiens
tttctgcctttctgc

SEQ ID NO: 756465 - DNA, 15 bp, Homo sapiens
ttctgcctttctgct

SEQ ID NO: 756466 - DNA, 15 bp, Homo sapiens
tctgcctttctgctc

SEQ ID NO: 756467 - DNA, 15 bp, Homo sapiens
ctgcctttctgctct

SEQ ID NO: 756468 - DNA, 15 bp, Homo sapiens
tgcctttctgctctc

SEQ ID NO: 756469 - DNA, 15 bp, Homo sapiens
gcctttctgctctca

SEQ ID NO: 756470 - DNA, 15 bp, Homo sapiens
cctttctgctctcag

SEQ ID NO: 756471 - DNA, 15 bp, Homo sapiens
ctttctgctctcagc

SEQ ID NO: 756472 - DNA, 15 bp, Homo sapiens
tttctgctctcagcc

SEQ ID NO: 756473 - DNA, 15 bp, Homo sapiens
ttctgctctcagcct

SEQ ID NO: 756474 - DNA, 15 bp, Homo sapiens
tctgctctcagcctc

SEQ ID NO: 756475 - DNA, 15 bp, Homo sapiens
ctgctctcagcctcc

SEQ ID NO: 756476 - DNA, 15 bp, Homo sapiens
tgctctcagcctcct

SEQ ID NO: 756477 - DNA, 15 bp, Homo sapiens
gctctcagcctcctg

SEQ ID NO: 756478 - DNA, 15 bp, Homo sapiens
ctctcagcctcctgt

SEQ ID NO: 756479 - DNA, 15 bp, Homo sapiens
tctcagcctcctgtc

SEQ ID NO: 756480 - DNA, 15 bp, Homo sapiens
ctcagcctcctgtct

SEQ ID NO: 756481 - DNA, 15 bp, Homo sapiens
tcagcctcctgtctg

SEQ ID NO: 756482 - DNA, 15 bp, Homo sapiens
cagcctcctgtctgc

SEQ ID NO: 756483 - DNA, 15 bp, Homo sapiens
agcctcctgtctgcc

SEQ ID NO: 756484 - DNA, 15 bp, Homo sapiens
gcctcctgtctgccc

SEQ ID NO: 756485 - DNA, 15 bp, Homo sapiens
cctcctgtctgccct

SEQ ID NO: 756486 - DNA, 15 bp, Homo sapiens
ctcctgtctgccctt

SEQ ID NO: 756487 - DNA, 15 bp, Homo sapiens
tcctgtctgcccttg

SEQ ID NO: 756488 - DNA, 15 bp, Homo sapiens
cctgtctgcccttgc

SEQ ID NO: 756489 - DNA, 15 bp, Homo sapiens
ctgtctgcccttgca

SEQ ID NO: 756490 - DNA, 15 bp, Homo sapiens
tgtctgcccttgcag

SEQ ID NO: 756491 - DNA, 15 bp, Homo sapiens
gtctgcccttgcagg

SEQ ID NO: 756492 - DNA, 15 bp, Homo sapiens
tctgcccttgcaggt

SEQ ID NO: 756493 - DNA, 15 bp, Homo sapiens
ctgcccttgcaggtc

SEQ ID NO: 756494 - DNA, 15 bp, Homo sapiens
tgcccttgcaggtct

SEQ ID NO: 756495 - DNA, 15 bp, Homo sapiens
gcccttgcaggtctc

SEQ ID NO: 756496 - DNA, 15 bp, Homo sapiens
cccttgcaggtctct

SEQ ID NO: 756497 - DNA, 15 bp, Homo sapiens
ccttgcaggtctctt

SEQ ID NO: 756498 - DNA, 15 bp, Homo sapiens
cttgcaggtctcttt

SEQ ID NO: 756499 - DNA, 15 bp, Homo sapiens
ttgcaggtctctttt

SEQ ID NO: 756500 - DNA, 15 bp, Homo sapiens
tgcaggtctctttta

SEQ ID NO: 756501 - DNA, 15 bp, Homo sapiens
gcaggtctcttttat

SEQ ID NO: 756502 - DNA, 15 bp, Homo sapiens
caggtctcttttatg

SEQ ID NO: 756503 - DNA, 15 bp, Homo sapiens
aggtctcttttatgt

SEQ ID NO: 756504 - DNA, 15 bp, Homo sapiens
ggtctcttttatgtc

SEQ ID NO: 756505 - DNA, 15 bp, Homo sapiens
gtctcttttatgtct

SEQ ID NO: 756506 - DNA, 15 bp, Homo sapiens
tctcttttatgtctg

SEQ ID NO: 756507 - DNA, 15 bp, Homo sapiens
ctcttttatgtctga

SEQ ID NO: 756508 - DNA, 15 bp, Homo sapiens
tcttttatgtctgac

SEQ ID NO: 756509 - DNA, 15 bp, Homo sapiens
cttttatgtctgacc

SEQ ID NO: 756510 - DNA, 15 bp, Homo sapiens
ttttatgtctgacct

SEQ ID NO: 756511 - DNA, 15 bp, Homo sapiens
tttatgtctgacctt

SEQ ID NO: 756512 - DNA, 15 bp, Homo sapiens
ttatgtctgaccttg

SEQ ID NO: 756513 - DNA, 15 bp, Homo sapiens
tatgtctgaccttgc

SEQ ID NO: 756514 - DNA, 15 bp, Homo sapiens
atgtctgaccttgct

SEQ ID NO: 756515 - DNA, 15 bp, Homo sapiens
tgtctgaccttgctg

SEQ ID NO: 756516 - DNA, 15 bp, Homo sapiens
gtctgaccttgctgg

SEQ ID NO: 756517 - DNA, 15 bp, Homo sapiens
tctgaccttgctgga

SEQ ID NO: 756518 - DNA, 15 bp, Homo sapiens
ctgaccttgctggag

SEQ ID NO: 756519 - DNA, 15 bp, Homo sapiens
tgaccttgctggagt

SEQ ID NO: 756520 - DNA, 15 bp, Homo sapiens
gaccttgctggagtc

SEQ ID NO: 756521 - DNA, 15 bp, Homo sapiens
accttgctggagtcc

SEQ ID NO: 756522 - DNA, 15 bp, Homo sapiens
ccttgctggagtcct

SEQ ID NO: 756523 - DNA, 15 bp, Homo sapiens
cttgctggagtcctt

SEQ ID NO: 756524 - DNA, 15 bp, Homo sapiens
ttgctggagtccttt

SEQ ID NO: 756525 - DNA, 15 bp, Homo sapiens
tgctggagtcctttg

SEQ ID NO: 756526 - DNA, 15 bp, Homo sapiens
gctggagtcctttga

SEQ ID NO: 756527 - DNA, 15 bp, Homo sapiens
ctggagtcctttgac

SEQ ID NO: 756528 - DNA, 15 bp, Homo sapiens
tggagtcctttgacc

SEQ ID NO: 756529 - DNA, 15 bp, Homo sapiens
ggagtcctttgacct

SEQ ID NO: 756530 - DNA, 15 bp, Homo sapiens
gagtcctttgacctc

SEQ ID NO: 756531 - DNA, 15 bp, Homo sapiens
agtcctttgacctcg

SEQ ID NO: 756532 - DNA, 15 bp, Homo sapiens
gtcctttgacctcgg

SEQ ID NO: 756533 - DNA, 15 bp, Homo sapiens
tcctttgacctcggc

SEQ ID NO: 756534 - DNA, 15 bp, Homo sapiens
cctttgacctcggcc

SEQ ID NO: 756535 - DNA, 15 bp, Homo sapiens
ctttgacctcggcca

SEQ ID NO: 756536 - DNA, 15 bp, Homo sapiens
tttgacctcggccaa

SEQ ID NO: 756537 - DNA, 15 bp, Homo sapiens
ttgacctcggccaac

SEQ ID NO: 756538 - DNA, 15 bp, Homo sapiens
tgacctcggccaaca

SEQ ID NO: 756539 - DNA, 15 bp, Homo sapiens
gacctcggccaacag

SEQ ID NO: 756540 - DNA, 15 bp, Homo sapiens
acctcggccaacagg

SEQ ID NO: 756541 - DNA, 15 bp, Homo sapiens
cctcggccaacagga

SEQ ID NO: 756542 - DNA, 15 bp, Homo sapiens
ctcggccaacaggag

SEQ ID NO: 756543 - DNA, 15 bp, Homo sapiens
tcggccaacaggagt

SEQ ID NO: 756544 - DNA, 15 bp, Homo sapiens
cggccaacaggagtg

SEQ ID NO: 756545 - DNA, 15 bp, Homo sapiens
ggccaacaggagtga

SEQ ID NO: 756546 - DNA, 15 bp, Homo sapiens
gccaacaggagtgac

SEQ ID NO: 756547 - DNA, 15 bp, Homo sapiens
ccaacaggagtgact

SEQ ID NO: 756548 - DNA, 15 bp, Homo sapiens
caacaggagtgactg

SEQ ID NO: 756549 - DNA, 15 bp, Homo sapiens
aacaggagtgactgt

SEQ ID NO: 756550 - DNA, 15 bp, Homo sapiens
acaggagtgactgtc

SEQ ID NO: 756551 - DNA, 15 bp, Homo sapiens
caggagtgactgtct

SEQ ID NO: 756552 - DNA, 15 bp, Homo sapiens
aggagtgactgtctc

SEQ ID NO: 756553 - DNA, 15 bp, Homo sapiens
ggagtgactgtctca

SEQ ID NO: 756554 - DNA, 15 bp, Homo sapiens
gagtgactgtctcat

SEQ ID NO: 756555 - DNA, 15 bp, Homo sapiens
agtgactgtctcatt

SEQ ID NO: 756556 - DNA, 15 bp, Homo sapiens
gtgactgtctcattt

SEQ ID NO: 756557 - DNA, 15 bp, Homo sapiens
tgactgtctcatttg

SEQ ID NO: 756558 - DNA, 15 bp, Homo sapiens
gactgtctcatttgc

SEQ ID NO: 756559 - DNA, 15 bp, Homo sapiens
actgtctcatttgcc

SEQ ID NO: 756560 - DNA, 15 bp, Homo sapiens
ctgtctcatttgcca

SEQ ID NO: 756561 - DNA, 15 bp, Homo sapiens
tgtctcatttgccac

SEQ ID NO: 756562 - DNA, 15 bp, Homo sapiens
gtctcatttgccact

SEQ ID NO: 756563 - DNA, 15 bp, Homo sapiens
tctcatttgccactt

SEQ ID NO: 756564 - DNA, 15 bp, Homo sapiens
ctcatttgccactta

SEQ ID NO: 756565 - DNA, 15 bp, Homo sapiens
tcatttgccacttag

SEQ ID NO: 756566 - DNA, 15 bp, Homo sapiens
catttgccacttagg

SEQ ID NO: 756567 - DNA, 15 bp, Homo sapiens
atttgccacttaggc

SEQ ID NO: 756568 - DNA, 15 bp, Homo sapiens
tttgccacttaggca

SEQ ID NO: 756569 - DNA, 15 bp, Homo sapiens
ttgccacttaggcac

SEQ ID NO: 756570 - DNA, 15 bp, Homo sapiens
tgccacttaggcact

SEQ ID NO: 756571 - DNA, 15 bp, Homo sapiens
gccacttaggcactg

SEQ ID NO: 756572 - DNA, 15 bp, Homo sapiens
ccacttaggcactgt

SEQ ID NO: 756573 - DNA, 15 bp, Homo sapiens
cacttaggcactgtc

SEQ ID NO: 756574 - DNA, 15 bp, Homo sapiens
acttaggcactgtct

SEQ ID NO: 756575 - DNA, 15 bp, Homo sapiens
cttaggcactgtctt

SEQ ID NO: 756576 - DNA, 15 bp, Homo sapiens
ttaggcactgtctta

SEQ ID NO: 756577 - DNA, 15 bp, Homo sapiens
taggcactgtcttag

SEQ ID NO: 756578 - DNA, 15 bp, Homo sapiens
aggcactgtcttagg

SEQ ID NO: 756579 - DNA, 15 bp, Homo sapiens
ggcactgtcttaggt

SEQ ID NO: 756580 - DNA, 15 bp, Homo sapiens
gcactgtcttaggtt

SEQ ID NO: 756581 - DNA, 15 bp, Homo sapiens
cactgtcttaggttt

SEQ ID NO: 756582 - DNA, 15 bp, Homo sapiens
actgtcttaggtttt

SEQ ID NO: 756583 - DNA, 15 bp, Homo sapiens
ctgtcttaggtttta

SEQ ID NO: 756584 - DNA, 15 bp, Homo sapiens
tgtcttaggttttaa

SEQ ID NO: 756585 - DNA, 15 bp, Homo sapiens
gtcttaggttttaaa

SEQ ID NO: 756586 - DNA, 15 bp, Homo sapiens
tcttaggttttaaat

SEQ ID NO: 756587 - DNA, 15 bp, Homo sapiens
cttaggttttaaatt

SEQ ID NO: 756588 - DNA, 15 bp, Homo sapiens
ttaggttttaaattt

SEQ ID NO: 756589 - DNA, 15 bp, Homo sapiens
ggttttaaattttta

SEQ ID NO: 756590 - DNA, 15 bp, Homo sapiens
gttttaaatttttaa

SEQ ID NO: 756591 - DNA, 15 bp, Homo sapiens
ttttaaatttttaat

SEQ ID NO: 756592 - DNA, 15 bp, Homo sapiens
tttaaatttttaatc

SEQ ID NO: 756593 - DNA, 15 bp, Homo sapiens
ttaaatttttaatct

SEQ ID NO: 756594 - DNA, 15 bp, Homo sapiens
taaatttttaatctt

SEQ ID NO: 756595 - DNA, 15 bp, Homo sapiens
aaatttttaatcttt

SEQ ID NO: 756596 - DNA, 15 bp, Homo sapiens
aatttttaatctttg

SEQ ID NO: 756597 - DNA, 15 bp, Homo sapiens
atttttaatctttgt

SEQ ID NO: 756598 - DNA, 15 bp, Homo sapiens
tttttaatctttgtg

SEQ ID NO: 756599 - DNA, 15 bp, Homo sapiens
ttttaatctttgtgg

SEQ ID NO: 756600 - DNA, 15 bp, Homo sapiens
tttaatctttgtggc

SEQ ID NO: 756601 - DNA, 15 bp, Homo sapiens
ttaatctttgtggct

SEQ ID NO: 756602 - DNA, 15 bp, Homo sapiens
taatctttgtggctg

SEQ ID NO: 756603 - DNA, 15 bp, Homo sapiens
aatctttgtggctgc

SEQ ID NO: 756604 - DNA, 15 bp, Homo sapiens
atctttgtggctgct

SEQ ID NO: 756605 - DNA, 15 bp, Homo sapiens
tctttgtggctgctt

SEQ ID NO: 756606 - DNA, 15 bp, Homo sapiens
ctttgtggctgcttg

SEQ ID NO: 756607 - DNA, 15 bp, Homo sapiens
tttgtggctgcttgt

SEQ ID NO: 756608 - DNA, 15 bp, Homo sapiens
ttgtggctgcttgtt

SEQ ID NO: 756609 - DNA, 15 bp, Homo sapiens
tgtggctgcttgtta

SEQ ID NO: 756610 - DNA, 15 bp, Homo sapiens
gtggctgcttgttaa

SEQ ID NO: 756611 - DNA, 15 bp, Homo sapiens
tggctgcttgttaaa

SEQ ID NO: 756612 - DNA, 15 bp, Homo sapiens
ggctgcttgttaaaa

SEQ ID NO: 756613 - DNA, 15 bp, Homo sapiens
gctgcttgttaaaaa

SEQ ID NO: 756614 - DNA, 15 bp, Homo sapiens
ctgcttgttaaaaat

SEQ ID NO: 756615 - DNA, 15 bp, Homo sapiens
tgcttgttaaaaata

SEQ ID NO: 756616 - DNA, 15 bp, Homo sapiens
gcttgttaaaaatac

SEQ ID NO: 756617 - DNA, 15 bp, Homo sapiens
cttgttaaaaataca

SEQ ID NO: 756618 - DNA, 15 bp, Homo sapiens
ttgttaaaaatacag

SEQ ID NO: 756619 - DNA, 15 bp, Homo sapiens
tgttaaaaatacagg

SEQ ID NO: 756620 - DNA, 15 bp, Homo sapiens
gttaaaaatacaggg

SEQ ID NO: 756621 - DNA, 15 bp, Homo sapiens
ttaaaaatacaggga

SEQ ID NO: 756622 - DNA, 15 bp, Homo sapiens
taaaaatacagggac

SEQ ID NO: 756623 - DNA, 15 bp, Homo sapiens
aaaaatacagggacc

SEQ ID NO: 756624 - DNA, 15 bp, Homo sapiens
aaaatacagggaccc

SEQ ID NO: 756625 - DNA, 15 bp, Homo sapiens
aaatacagggaccca

SEQ ID NO: 756626 - DNA, 15 bp, Homo sapiens
aatacagggacccag

SEQ ID NO: 756627 - DNA, 15 bp, Homo sapiens
atacagggacccagg

SEQ ID NO: 756628 - DNA, 15 bp, Homo sapiens
tacagggacccaggc

SEQ ID NO: 756629 - DNA, 15 bp, Homo sapiens
acagggacccaggct

SEQ ID NO: 756630 - DNA, 15 bp, Homo sapiens
cagggacccaggctt

SEQ ID NO: 756631 - DNA, 15 bp, Homo sapiens
agggacccaggcttc

SEQ ID NO: 756632 - DNA, 15 bp, Homo sapiens
gggacccaggcttca

SEQ ID NO: 756633 - DNA, 15 bp, Homo sapiens
ggacccaggcttcat

SEQ ID NO: 756634 - DNA, 15 bp, Homo sapiens
gacccaggcttcatt

SEQ ID NO: 756635 - DNA, 15 bp, Homo sapiens
acccaggcttcattc

SEQ ID NO: 756636 - DNA, 15 bp, Homo sapiens
cccaggcttcattcc

SEQ ID NO: 756637 - DNA, 15 bp, Homo sapiens
ccaggcttcattccc

SEQ ID NO: 756638 - DNA, 15 bp, Homo sapiens
caggcttcattccca

SEQ ID NO: 756639 - DNA, 15 bp, Homo sapiens
aggcttcattcccat

SEQ ID NO: 756640 - DNA, 15 bp, Homo sapiens
ggcttcattcccatg

SEQ ID NO: 756641 - DNA, 15 bp, Homo sapiens
gcttcattcccatgg

SEQ ID NO: 756642 - DNA, 15 bp, Homo sapiens
cttcattcccatgga

SEQ ID NO: 756643 - DNA, 15 bp, Homo sapiens
ttcattcccatggaa

SEQ ID NO: 756644 - DNA, 15 bp, Homo sapiens
tcattcccatggaat

SEQ ID NO: 756645 - DNA, 15 bp, Homo sapiens
cattcccatggaatt

SEQ ID NO: 756646 - DNA, 15 bp, Homo sapiens
attcccatggaatta

SEQ ID NO: 756647 - DNA, 15 bp, Homo sapiens
ttcccatggaattag

SEQ ID NO: 756648 - DNA, 15 bp, Homo sapiens
tcccatggaattaga

SEQ ID NO: 756649 - DNA, 15 bp, Homo sapiens
cccatggaattagaa

SEQ ID NO: 756650 - DNA, 15 bp, Homo sapiens
ccatggaattagaat

SEQ ID NO: 756651 - DNA, 15 bp, Homo sapiens
catggaattagaatc

SEQ ID NO: 756652 - DNA, 15 bp, Homo sapiens
atggaattagaatct

SEQ ID NO: 756653 - DNA, 15 bp, Homo sapiens
tggaattagaatctc

SEQ ID NO: 756654 - DNA, 15 bp, Homo sapiens
ggaattagaatctcc

SEQ ID NO: 756655 - DNA, 15 bp, Homo sapiens
gaattagaatctcca

SEQ ID NO: 756656 - DNA, 15 bp, Homo sapiens
aattagaatctccaa

SEQ ID NO: 756657 - DNA, 15 bp, Homo sapiens
attagaatctccaaa

SEQ ID NO: 756658 - DNA, 15 bp, Homo sapiens
ttagaatctccaaag

SEQ ID NO: 756659 - DNA, 15 bp, Homo sapiens
tagaatctccaaaga

SEQ ID NO: 756660 - DNA, 15 bp, Homo sapiens
agaatctccaaagat

SEQ ID NO: 756661 - DNA, 15 bp, Homo sapiens
gaatctccaaagatg

SEQ ID NO: 756662 - DNA, 15 bp, Homo sapiens
aatctccaaagatgt

SEQ ID NO: 756663 - DNA, 15 bp, Homo sapiens
atctccaaagatgtg

SEQ ID NO: 756664 - DNA, 15 bp, Homo sapiens
tctccaaagatgtga

SEQ ID NO: 756665 - DNA, 15 bp, Homo sapiens
ctccaaagatgtgat

SEQ ID NO: 756666 - DNA, 15 bp, Homo sapiens
tccaaagatgtgatc

SEQ ID NO: 756667 - DNA, 15 bp, Homo sapiens
ccaaagatgtgatcc

SEQ ID NO: 756668 - DNA, 15 bp, Homo sapiens
caaagatgtgatcca

SEQ ID NO: 756669 - DNA, 15 bp, Homo sapiens
aaagatgtgatccag

SEQ ID NO: 756670 - DNA, 15 bp, Homo sapiens
aagatgtgatccagg

SEQ ID NO: 756671 - DNA, 15 bp, Homo sapiens
agatgtgatccaggc

SEQ ID NO: 756672 - DNA, 15 bp, Homo sapiens
gatgtgatccaggcc

SEQ ID NO: 756673 - DNA, 15 bp, Homo sapiens
atgtgatccaggccc

SEQ ID NO: 756674 - DNA, 15 bp, Homo sapiens
tgtgatccaggcccc

SEQ ID NO: 756675 - DNA, 15 bp, Homo sapiens
gtgatccaggcccct

SEQ ID NO: 756676 - DNA, 15 bp, Homo sapiens
tgatccaggcccctt

SEQ ID NO: 756677 - DNA, 15 bp, Homo sapiens
gatccaggccccttt

SEQ ID NO: 756678 - DNA, 15 bp, Homo sapiens
atccaggcccctttg

SEQ ID NO: 756679 - DNA, 15 bp, Homo sapiens
ccaggcccctttgac

SEQ ID NO: 756680 - DNA, 15 bp, Homo sapiens
caggcccctttgact

SEQ ID NO: 756681 - DNA, 15 bp, Homo sapiens
aggcccctttgactt

SEQ ID NO: 756682 - DNA, 15 bp, Homo sapiens
ggcccctttgacttt

SEQ ID NO: 756683 - DNA, 15 bp, Homo sapiens
gcccctttgactttt

SEQ ID NO: 756684 - DNA, 15 bp, Homo sapiens
cccctttgactttta

SEQ ID NO: 756685 - DNA, 15 bp, Homo sapiens
ccctttgacttttaa

SEQ ID NO: 756686 - DNA, 15 bp, Homo sapiens
cctttgacttttaat

SEQ ID NO: 756687 - DNA, 15 bp, Homo sapiens
ctttgacttttaata

SEQ ID NO: 756688 - DNA, 15 bp, Homo sapiens
tttgacttttaataa

SEQ ID NO: 756689 - DNA, 15 bp, Homo sapiens
ttgacttttaataag

SEQ ID NO: 756690 - DNA, 15 bp, Homo sapiens
tgacttttaataagc

SEQ ID NO: 756691 - DNA, 15 bp, Homo sapiens
gacttttaataagct

SEQ ID NO: 756692 - DNA, 15 bp, Homo sapiens
acttttaataagctc

SEQ ID NO: 756693 - DNA, 15 bp, Homo sapiens
cttttaataagctcc

SEQ ID NO: 756694 - DNA, 15 bp, Homo sapiens
ttttaataagctcct

SEQ ID NO: 756695 - DNA, 15 bp, Homo sapiens
tttaataagctccta

SEQ ID NO: 756696 - DNA, 15 bp, Homo sapiens
ttaataagctcctaa

SEQ ID NO: 756697 - DNA, 15 bp, Homo sapiens
taataagctcctaat

SEQ ID NO: 756698 - DNA, 15 bp, Homo sapiens
aataagctcctaatg

SEQ ID NO: 756699 - DNA, 15 bp, Homo sapiens
ataagctcctaatgt

SEQ ID NO: 756700 - DNA, 15 bp, Homo sapiens
taagctcctaatgtg

SEQ ID NO: 756701 - DNA, 15 bp, Homo sapiens
aagctcctaatgtgg

SEQ ID NO: 756702 - DNA, 15 bp, Homo sapiens
agctcctaatgtggt

SEQ ID NO: 756703 - DNA, 15 bp, Homo sapiens
gctcctaatgtggtt

SEQ ID NO: 756704 - DNA, 15 bp, Homo sapiens
ctcctaatgtggttg

SEQ ID NO: 756705 - DNA, 15 bp, Homo sapiens
tcctaatgtggttgt

SEQ ID NO: 756706 - DNA, 15 bp, Homo sapiens
cctaatgtggttgtg

SEQ ID NO: 756707 - DNA, 15 bp, Homo sapiens
ctaatgtggttgtga

SEQ ID NO: 756708 - DNA, 15 bp, Homo sapiens
taatgtggttgtgat

SEQ ID NO: 756709 - DNA, 15 bp, Homo sapiens
aatgtggttgtgatt

SEQ ID NO: 756710 - DNA, 15 bp, Homo sapiens
atgtggttgtgatta

SEQ ID NO: 756711 - DNA, 15 bp, Homo sapiens
tgtggttgtgattat

SEQ ID NO: 756712 - DNA, 15 bp, Homo sapiens
gtggttgtgattatg

SEQ ID NO: 756713 - DNA, 15 bp, Homo sapiens
tggttgtgattatga

SEQ ID NO: 756714 - DNA, 15 bp, Homo sapiens
ggttgtgattatgat

SEQ ID NO: 756715 - DNA, 15 bp, Homo sapiens
gttgtgattatgatc

SEQ ID NO: 756716 - DNA, 15 bp, Homo sapiens
ttgtgattatgatca

SEQ ID NO: 756717 - DNA, 15 bp, Homo sapiens
tgtgattatgatcaa

SEQ ID NO: 756718 - DNA, 15 bp, Homo sapiens
gtgattatgatcaaa

SEQ ID NO: 756719 - DNA, 15 bp, Homo sapiens
tgattatgatcaaag

SEQ ID NO: 756720 - DNA, 15 bp, Homo sapiens
gattatgatcaaagt

SEQ ID NO: 756721 - DNA, 15 bp, Homo sapiens
attatgatcaaagtt

SEQ ID NO: 756722 - DNA, 15 bp, Homo sapiens
ttatgatcaaagttt

SEQ ID NO: 756723 - DNA, 15 bp, Homo sapiens
tatgatcaaagtttg

SEQ ID NO: 756724 - DNA, 15 bp, Homo sapiens
atgatcaaagtttga

SEQ ID NO: 756725 - DNA, 15 bp, Homo sapiens
tgatcaaagtttgag

SEQ ID NO: 756726 - DNA, 15 bp, Homo sapiens
gatcaaagtttgagg

SEQ ID NO: 756727 - DNA, 15 bp, Homo sapiens
atcaaagtttgagga

SEQ ID NO: 756728 - DNA, 15 bp, Homo sapiens
tcaaagtttgaggaa

SEQ ID NO: 756729 - DNA, 15 bp, Homo sapiens
caaagtttgaggaag

SEQ ID NO: 756730 - DNA, 15 bp, Homo sapiens
aaagtttgaggaaga

SEQ ID NO: 756731 - DNA, 15 bp, Homo sapiens
aagtttgaggaagac

SEQ ID NO: 756732 - DNA, 15 bp, Homo sapiens
agtttgaggaagact

SEQ ID NO: 756733 - DNA, 15 bp, Homo sapiens
gtttgaggaagacta

SEQ ID NO: 756734 - DNA, 15 bp, Homo sapiens
tttgaggaagactaa

SEQ ID NO: 756735 - DNA, 15 bp, Homo sapiens
ttgaggaagactaac

SEQ ID NO: 756736 - DNA, 15 bp, Homo sapiens
tgaggaagactaact

SEQ ID NO: 756737 - DNA, 15 bp, Homo sapiens
gaggaagactaactt

SEQ ID NO: 756738 - DNA, 15 bp, Homo sapiens
aggaagactaactta

SEQ ID NO: 756739 - DNA, 15 bp, Homo sapiens
ggaagactaacttaa

SEQ ID NO: 756740 - DNA, 15 bp, Homo sapiens
gaagactaacttaaa

SEQ ID NO: 756741 - DNA, 15 bp, Homo sapiens
aagactaacttaaaa

SEQ ID NO: 756742 - DNA, 15 bp, Homo sapiens
agactaacttaaaat

SEQ ID NO: 756743 - DNA, 15 bp, Homo sapiens
gactaacttaaaata

SEQ ID NO: 756744 - DNA, 15 bp, Homo sapiens
actaacttaaaatag

SEQ ID NO: 756745 - DNA, 15 bp, Homo sapiens
ctaacttaaaataga

SEQ ID NO: 756746 - DNA, 15 bp, Homo sapiens
taacttaaaatagag

SEQ ID NO: 756747 - DNA, 15 bp, Homo sapiens
aacttaaaatagagt

SEQ ID NO: 756748 - DNA, 15 bp, Homo sapiens
acttaaaatagagtg

SEQ ID NO: 756749 - DNA, 15 bp, Homo sapiens
cttaaaatagagtgc

SEQ ID NO: 756750 - DNA, 15 bp, Homo sapiens
ttaaaatagagtgct

SEQ ID NO: 756751 - DNA, 15 bp, Homo sapiens
taaaatagagtgctt

SEQ ID NO: 756752 - DNA, 15 bp, Homo sapiens
aaaatagagtgcttt

SEQ ID NO: 756753 - DNA, 15 bp, Homo sapiens
aaatagagtgctttg

SEQ ID NO: 756754 - DNA, 15 bp, Homo sapiens
aatagagtgctttgc

SEQ ID NO: 756755 - DNA, 15 bp, Homo sapiens
atagagtgctttgca

SEQ ID NO: 756756 - DNA, 15 bp, Homo sapiens
tagagtgctttgcag

SEQ ID NO: 756757 - DNA, 15 bp, Homo sapiens
agagtgctttgcagt

SEQ ID NO: 756758 - DNA, 15 bp, Homo sapiens
gagtgctttgcagta

SEQ ID NO: 756759 - DNA, 15 bp, Homo sapiens
agtgctttgcagtat

SEQ ID NO: 756760 - DNA, 15 bp, Homo sapiens
gtgctttgcagtatt

SEQ ID NO: 756761 - DNA, 15 bp, Homo sapiens
tgctttgcagtatta

SEQ ID NO: 756762 - DNA, 15 bp, Homo sapiens
gctttgcagtattat

SEQ ID NO: 756763 - DNA, 15 bp, Homo sapiens
ctttgcagtattatt

SEQ ID NO: 756764 - DNA, 15 bp, Homo sapiens
tttgcagtattattt

SEQ ID NO: 756765 - DNA, 15 bp, Homo sapiens
ttgcagtattatttc

SEQ ID NO: 756766 - DNA, 15 bp, Homo sapiens
tgcagtattatttct

SEQ ID NO: 756767 - DNA, 15 bp, Homo sapiens
gcagtattatttctc

SEQ ID NO: 756768 - DNA, 15 bp, Homo sapiens
cagtattatttctct

SEQ ID NO: 756769 - DNA, 15 bp, Homo sapiens
agtattatttctctt

SEQ ID NO: 756770 - DNA, 15 bp, Homo sapiens
gtattatttctcttt

SEQ ID NO: 756771 - DNA, 15 bp, Homo sapiens
tattatttctctttc

SEQ ID NO: 756772 - DNA, 15 bp, Homo sapiens
attatttctctttct

SEQ ID NO: 756773 - DNA, 15 bp, Homo sapiens
ttatttctctttctg

SEQ ID NO: 756774 - DNA, 15 bp, Homo sapiens
tatttctctttctgt

SEQ ID NO: 756775 - DNA, 15 bp, Homo sapiens
atttctctttctgtg

SEQ ID NO: 756776 - DNA, 15 bp, Homo sapiens
tttctctttctgtgg

SEQ ID NO: 756777 - DNA, 15 bp, Homo sapiens
ttctctttctgtggg

SEQ ID NO: 756778 - DNA, 15 bp, Homo sapiens
tctctttctgtggga

SEQ ID NO: 756779 - DNA, 15 bp, Homo sapiens
ctctttctgtgggac

SEQ ID NO: 756780 - DNA, 15 bp, Homo sapiens
tctttctgtgggact

SEQ ID NO: 756781 - DNA, 15 bp, Homo sapiens
ctttctgtgggactc

SEQ ID NO: 756782 - DNA, 15 bp, Homo sapiens
tttctgtgggactct

SEQ ID NO: 756783 - DNA, 15 bp, Homo sapiens
ttctgtgggactctg

SEQ ID NO: 756784 - DNA, 15 bp, Homo sapiens
tctgtgggactctgc

SEQ ID NO: 756785 - DNA, 15 bp, Homo sapiens
ctgtgggactctgct

SEQ ID NO: 756786 - DNA, 15 bp, Homo sapiens
tgtgggactctgctt

SEQ ID NO: 756787 - DNA, 15 bp, Homo sapiens
gtgggactctgctta

SEQ ID NO: 756788 - DNA, 15 bp, Homo sapiens
tgggactctgcttat

SEQ ID NO: 756789 - DNA, 15 bp, Homo sapiens
gggactctgcttatg

SEQ ID NO: 756790 - DNA, 15 bp, Homo sapiens
ggactctgcttatgt

SEQ ID NO: 756791 - DNA, 15 bp, Homo sapiens
gactctgcttatgtc

SEQ ID NO: 756792 - DNA, 15 bp, Homo sapiens
actctgcttatgtct

SEQ ID NO: 756793 - DNA, 15 bp, Homo sapiens
ctctgcttatgtctc

SEQ ID NO: 756794 - DNA, 15 bp, Homo sapiens
tctgcttatgtctcc

SEQ ID NO: 756795 - DNA, 15 bp, Homo sapiens
ctgcttatgtctcca

SEQ ID NO: 756796 - DNA, 15 bp, Homo sapiens
tgcttatgtctccaa

SEQ ID NO: 756797 - DNA, 15 bp, Homo sapiens
gcttatgtctccaaa

SEQ ID NO: 756798 - DNA, 15 bp, Homo sapiens
cttatgtctccaaat

SEQ ID NO: 756799 - DNA, 15 bp, Homo sapiens
ttatgtctccaaata

SEQ ID NO: 756800 - DNA, 15 bp, Homo sapiens
tatgtctccaaataa

SEQ ID NO: 756801 - DNA, 15 bp, Homo sapiens
atgtctccaaataaa

SEQ ID NO: 756802 - DNA, 15 bp, Homo sapiens
tgtctccaaataaac

SEQ ID NO: 756803 - DNA, 15 bp, Homo sapiens
gtctccaaataaact

SEQ ID NO: 756804 - DNA, 15 bp, Homo sapiens
tctccaaataaacta

SEQ ID NO: 756805 - DNA, 15 bp, Homo sapiens
ctccaaataaactat

SEQ ID NO: 756806 - DNA, 15 bp, Homo sapiens
tccaaataaactata

SEQ ID NO: 756807 - DNA, 15 bp, Homo sapiens
ccaaataaactataa

SEQ ID NO: 756808 - DNA, 15 bp, Homo sapiens
caaataaactataaa

SEQ ID NO: 756809 - DNA, 15 bp, Homo sapiens
aaataaactataaac

SEQ ID NO: 756810 - DNA, 15 bp, Homo sapiens
aataaactataaaca

SEQ ID NO: 756811 - DNA, 15 bp, Homo sapiens
ataaactataaacat

SEQ ID NO: 756812 - DNA, 15 bp, Homo sapiens
taaactataaacatc

SEQ ID NO: 756813 - DNA, 15 bp, Homo sapiens
aaactataaacatct

SEQ ID NO: 756814 - DNA, 15 bp, Homo sapiens
aactataaacatctt

SEQ ID NO: 756815 - DNA, 15 bp, Homo sapiens
actataaacatcttg

SEQ ID NO: 756816 - DNA, 15 bp, Homo sapiens
ctataaacatcttga

SEQ ID NO: 756817 - DNA, 15 bp, Homo sapiens
tataaacatcttgaa

SEQ ID NO: 756818 - DNA, 15 bp, Homo sapiens
ataaacatcttgaag

SEQ ID NO: 756819 - DNA, 15 bp, Homo sapiens
taaacatcttgaagg

SEQ ID NO: 756820 - DNA, 15 bp, Homo sapiens
aaacatcttgaaggc

SEQ ID NO: 756821 - DNA, 15 bp, Homo sapiens
aacatcttgaaggca

SEQ ID NO: 756822 - DNA, 15 bp, Homo sapiens
acatcttgaaggcag

SEQ ID NO: 756823 - DNA, 15 bp, Homo sapiens
catcttgaaggcaga

SEQ ID NO: 756824 - DNA, 15 bp, Homo sapiens
atcttgaaggcagat

SEQ ID NO: 756825 - DNA, 15 bp, Homo sapiens
tcttgaaggcagatc

SEQ ID NO: 756826 - DNA, 15 bp, Homo sapiens
cttgaaggcagatct

SEQ ID NO: 756827 - DNA, 15 bp, Homo sapiens
ttgaaggcagatctg

SEQ ID NO: 756828 - DNA, 15 bp, Homo sapiens
tgaaggcagatctgg

SEQ ID NO: 756829 - DNA, 15 bp, Homo sapiens
gaaggcagatctggg

SEQ ID NO: 756830 - DNA, 15 bp, Homo sapiens
aaggcagatctgggc

SEQ ID NO: 756831 - DNA, 15 bp, Homo sapiens
aggcagatctgggcc

SEQ ID NO: 756832 - DNA, 15 bp, Homo sapiens
ggcagatctgggcct

SEQ ID NO: 756833 - DNA, 15 bp, Homo sapiens
gcagatctgggcctt

SEQ ID NO: 756834 - DNA, 15 bp, Homo sapiens
cagatctgggcctta

SEQ ID NO: 756835 - DNA, 15 bp, Homo sapiens
agatctgggccttat

SEQ ID NO: 756836 - DNA, 15 bp, Homo sapiens
gatctgggccttatt

SEQ ID NO: 756837 - DNA, 15 bp, Homo sapiens
atctgggccttattt

SEQ ID NO: 756838 - DNA, 15 bp, Homo sapiens
tctgggccttatttt

SEQ ID NO: 756839 - DNA, 15 bp, Homo sapiens
ctgggccttattttc

SEQ ID NO: 756840 - DNA, 15 bp, Homo sapiens
tgggccttattttct

SEQ ID NO: 756841 - DNA, 15 bp, Homo sapiens
gggccttattttctt

SEQ ID NO: 756842 - DNA, 15 bp, Homo sapiens
ggccttattttcttt

SEQ ID NO: 756843 - DNA, 15 bp, Homo sapiens
gccttattttctttt

SEQ ID NO: 756844 - DNA, 15 bp, Homo sapiens
ccttattttcttttc

SEQ ID NO: 756845 - DNA, 15 bp, Homo sapiens
cttattttcttttca

SEQ ID NO: 756846 - DNA, 15 bp, Homo sapiens
ttattttcttttcag

SEQ ID NO: 756847 - DNA, 15 bp, Homo sapiens
tattttcttttcaga

SEQ ID NO: 756848 - DNA, 15 bp, Homo sapiens
attttcttttcagag

SEQ ID NO: 756849 - DNA, 15 bp, Homo sapiens
ttttcttttcagagt

SEQ ID NO: 756850 - DNA, 15 bp, Homo sapiens
tttcttttcagagtg

SEQ ID NO: 756851 - DNA, 15 bp, Homo sapiens
ttcttttcagagtgg

SEQ ID NO: 756852 - DNA, 15 bp, Homo sapiens
tcttttcagagtggc

SEQ ID NO: 756853 - DNA, 15 bp, Homo sapiens
cttttcagagtggca

SEQ ID NO: 756854 - DNA, 15 bp, Homo sapiens
ttttcagagtggcac

SEQ ID NO: 756855 - DNA, 15 bp, Homo sapiens
tttcagagtggcaca

SEQ ID NO: 756856 - DNA, 15 bp, Homo sapiens
ttcagagtggcacat

SEQ ID NO: 756857 - DNA, 15 bp, Homo sapiens
tcagagtggcacata

SEQ ID NO: 756858 - DNA, 15 bp, Homo sapiens
cagagtggcacatat

SEQ ID NO: 756859 - DNA, 15 bp, Homo sapiens
agagtggcacatata

SEQ ID NO: 756860 - DNA, 15 bp, Homo sapiens
gagtggcacatatat

SEQ ID NO: 756861 - DNA, 15 bp, Homo sapiens
agtggcacatatatc

SEQ ID NO: 756862 - DNA, 15 bp, Homo sapiens
gtggcacatatatct

SEQ ID NO: 756863 - DNA, 15 bp, Homo sapiens
tggcacatatatctg

SEQ ID NO: 756864 - DNA, 15 bp, Homo sapiens
ggcacatatatctga

SEQ ID NO: 756865 - DNA, 15 bp, Homo sapiens
gcacatatatctgaa

SEQ ID NO: 756866 - DNA, 15 bp, Homo sapiens
cacatatatctgaag

SEQ ID NO: 756867 - DNA, 15 bp, Homo sapiens
acatatatctgaaga

SEQ ID NO: 756868 - DNA, 15 bp, Homo sapiens
catatatctgaagac

SEQ ID NO: 756869 - DNA, 15 bp, Homo sapiens
atatatctgaagact

SEQ ID NO: 756870 - DNA, 15 bp, Homo sapiens
tatatctgaagactg

SEQ ID NO: 756871 - DNA, 15 bp, Homo sapiens
atatctgaagactgg

SEQ ID NO: 756872 - DNA, 15 bp, Homo sapiens
tatctgaagactggg

SEQ ID NO: 756873 - DNA, 15 bp, Homo sapiens
atctgaagactgggg

SEQ ID NO: 756874 - DNA, 15 bp, Homo sapiens
tctgaagactggggc

SEQ ID NO: 756875 - DNA, 15 bp, Homo sapiens
ctgaagactggggcc

SEQ ID NO: 756876 - DNA, 15 bp, Homo sapiens
tgaagactggggccg

SEQ ID NO: 756877 - DNA, 15 bp, Homo sapiens
gaagactggggccgt

SEQ ID NO: 756878 - DNA, 15 bp, Homo sapiens
aagactggggccgtg

SEQ ID NO: 756879 - DNA, 15 bp, Homo sapiens
agactggggccgtga

SEQ ID NO: 756880 - DNA, 15 bp, Homo sapiens
gactggggccgtgag

SEQ ID NO: 756881 - DNA, 15 bp, Homo sapiens
actggggccgtgaga

SEQ ID NO: 756882 - DNA, 15 bp, Homo sapiens
ctggggccgtgagat

SEQ ID NO: 756883 - DNA, 15 bp, Homo sapiens
tggggccgtgagatg

SEQ ID NO: 756884 - DNA, 15 bp, Homo sapiens
ggggccgtgagatga

SEQ ID NO: 756885 - DNA, 15 bp, Homo sapiens
gggccgtgagatgat

SEQ ID NO: 756886 - DNA, 15 bp, Homo sapiens
ggccgtgagatgatc

SEQ ID NO: 756887 - DNA, 15 bp, Homo sapiens
gccgtgagatgatct

SEQ ID NO: 756888 - DNA, 15 bp, Homo sapiens
ccgtgagatgatctg

SEQ ID NO: 756889 - DNA, 15 bp, Homo sapiens
cgtgagatgatctgt

SEQ ID NO: 756890 - DNA, 15 bp, Homo sapiens
gtgagatgatctgtc

SEQ ID NO: 756891 - DNA, 15 bp, Homo sapiens
tgagatgatctgtcg

SEQ ID NO: 756892 - DNA, 15 bp, Homo sapiens
gagatgatctgtcgg

SEQ ID NO: 756893 - DNA, 15 bp, Homo sapiens
agatgatctgtcggt

SEQ ID NO: 756894 - DNA, 15 bp, Homo sapiens
gatgatctgtcggtg

SEQ ID NO: 756895 - DNA, 15 bp, Homo sapiens
atgatctgtcggtga

SEQ ID NO: 756896 - DNA, 15 bp, Homo sapiens
tgatctgtcggtgag

SEQ ID NO: 756897 - DNA, 15 bp, Homo sapiens
gatctgtcggtgaga

SEQ ID NO: 756898 - DNA, 15 bp, Homo sapiens
atctgtcggtgagat

SEQ ID NO: 756899 - DNA, 15 bp, Homo sapiens
tctgtcggtgagata

SEQ ID NO: 756900 - DNA, 15 bp, Homo sapiens
ctgtcggtgagataa

SEQ ID NO: 756901 - DNA, 15 bp, Homo sapiens
tgtcggtgagataac

SEQ ID NO: 756902 - DNA, 15 bp, Homo sapiens
gtcggtgagataact

SEQ ID NO: 756903 - DNA, 15 bp, Homo sapiens
tcggtgagataactc

SEQ ID NO: 756904 - DNA, 15 bp, Homo sapiens
cggtgagataactcc

SEQ ID NO: 756905 - DNA, 15 bp, Homo sapiens
ggtgagataactcca

SEQ ID NO: 756906 - DNA, 15 bp, Homo sapiens
gtgagataactccac

SEQ ID NO: 756907 - DNA, 15 bp, Homo sapiens
tgagataactccacc

SEQ ID NO: 756908 - DNA, 15 bp, Homo sapiens
gagataactccacct

SEQ ID NO: 756909 - DNA, 15 bp, Homo sapiens
agataactccacctg

SEQ ID NO: 756910 - DNA, 15 bp, Homo sapiens
gataactccacctgg

SEQ ID NO: 756911 - DNA, 15 bp, Homo sapiens
ataactccacctggg

SEQ ID NO: 756912 - DNA, 15 bp, Homo sapiens
taactccacctgggg

SEQ ID NO: 756913 - DNA, 15 bp, Homo sapiens
aactccacctggggc

SEQ ID NO: 756914 - DNA, 15 bp, Homo sapiens
actccacctggggcc

SEQ ID NO: 756915 - DNA, 15 bp, Homo sapiens
ctccacctggggccc

SEQ ID NO: 756916 - DNA, 15 bp, Homo sapiens
tccacctggggccct

SEQ ID NO: 756917 - DNA, 15 bp, Homo sapiens
ccacctggggccctg

SEQ ID NO: 756918 - DNA, 15 bp, Homo sapiens
cacctggggccctgc

SEQ ID NO: 756919 - DNA, 15 bp, Homo sapiens
acctggggccctgca

SEQ ID NO: 756920 - DNA, 15 bp, Homo sapiens
cctggggccctgcat

SEQ ID NO: 756921 - DNA, 15 bp, Homo sapiens
ctggggccctgcatc

SEQ ID NO: 756922 - DNA, 15 bp, Homo sapiens
tggggccctgcatct

SEQ ID NO: 756923 - DNA, 15 bp, Homo sapiens
ggggccctgcatctg

SEQ ID NO: 756924 - DNA, 15 bp, Homo sapiens
gggccctgcatctga

SEQ ID NO: 756925 - DNA, 15 bp, Homo sapiens
ggccctgcatctgat

SEQ ID NO: 756926 - DNA, 15 bp, Homo sapiens
gccctgcatctgata

SEQ ID NO: 756927 - DNA, 15 bp, Homo sapiens
ccctgcatctgatag

SEQ ID NO: 756928 - DNA, 15 bp, Homo sapiens
cctgcatctgatagg

SEQ ID NO: 756929 - DNA, 15 bp, Homo sapiens
ctgcatctgataggc

SEQ ID NO: 756930 - DNA, 15 bp, Homo sapiens
tgcatctgataggcg

SEQ ID NO: 756931 - DNA, 15 bp, Homo sapiens
gcatctgataggcgc

SEQ ID NO: 756932 - DNA, 15 bp, Homo sapiens
catctgataggcgct

SEQ ID NO: 756933 - DNA, 15 bp, Homo sapiens
atctgataggcgctc

SEQ ID NO: 756934 - DNA, 15 bp, Homo sapiens
tctgataggcgctca

SEQ ID NO: 756935 - DNA, 15 bp, Homo sapiens
ctgataggcgctcag

SEQ ID NO: 756936 - DNA, 15 bp, Homo sapiens
tgataggcgctcagt

SEQ ID NO: 756937 - DNA, 15 bp, Homo sapiens
gataggcgctcagta

SEQ ID NO: 756938 - DNA, 15 bp, Homo sapiens
ataggcgctcagtaa

SEQ ID NO: 756939 - DNA, 15 bp, Homo sapiens
taggcgctcagtaag

SEQ ID NO: 756940 - DNA, 15 bp, Homo sapiens
aggcgctcagtaagt

SEQ ID NO: 756941 - DNA, 15 bp, Homo sapiens
ggcgctcagtaagtg

SEQ ID NO: 756942 - DNA, 15 bp, Homo sapiens
gcgctcagtaagtgt

SEQ ID NO: 756943 - DNA, 15 bp, Homo sapiens
cgctcagtaagtgtt

SEQ ID NO: 756944 - DNA, 15 bp, Homo sapiens
gctcagtaagtgttt

SEQ ID NO: 756945 - DNA, 15 bp, Homo sapiens
ctcagtaagtgtttg

SEQ ID NO: 756946 - DNA, 15 bp, Homo sapiens
tcagtaagtgtttgc

SEQ ID NO: 756947 - DNA, 15 bp, Homo sapiens
cagtaagtgtttgct

SEQ ID NO: 756948 - DNA, 15 bp, Homo sapiens
agtaagtgtttgctt

SEQ ID NO: 756949 - DNA, 15 bp, Homo sapiens
gtaagtgtttgcttg

SEQ ID NO: 756950 - DNA, 15 bp, Homo sapiens
taagtgtttgcttgt

SEQ ID NO: 756951 - DNA, 15 bp, Homo sapiens
aagtgtttgcttgtt

SEQ ID NO: 756952 - DNA, 15 bp, Homo sapiens
agtgtttgcttgttg

SEQ ID NO: 756953 - DNA, 15 bp, Homo sapiens
gtgtttgcttgttga

SEQ ID NO: 756954 - DNA, 15 bp, Homo sapiens
tgtttgcttgttgat

SEQ ID NO: 756955 - DNA, 15 bp, Homo sapiens
gtttgcttgttgatc

SEQ ID NO: 756956 - DNA, 15 bp, Homo sapiens
tttgcttgttgatca

SEQ ID NO: 756957 - DNA, 15 bp, Homo sapiens
ttgcttgttgatcaa

SEQ ID NO: 756958 - DNA, 15 bp, Homo sapiens
tgcttgttgatcaat

SEQ ID NO: 756959 - DNA, 15 bp, Homo sapiens
gcttgttgatcaata

SEQ ID NO: 756960 - DNA, 15 bp, Homo sapiens
cttgttgatcaataa

SEQ ID NO: 756961 - DNA, 15 bp, Homo sapiens
ttgttgatcaataaa

SEQ ID NO: 756962 - DNA, 15 bp, Homo sapiens
tgttgatcaataaaa

SEQ ID NO: 756963 - DNA, 15 bp, Homo sapiens
gttgatcaataaaag

SEQ ID NO: 756964 - DNA, 15 bp, Homo sapiens
ttgatcaataaaaga

SEQ ID NO: 756965 - DNA, 15 bp, Homo sapiens
tgatcaataaaagac

SEQ ID NO: 756966 - DNA, 15 bp, Homo sapiens
gatcaataaaagaca

SEQ ID NO: 756967 - DNA, 15 bp, Homo sapiens
atcaataaaagacat

SEQ ID NO: 756968 - DNA, 15 bp, Homo sapiens
tcaataaaagacatg

SEQ ID NO: 756969 - DNA, 15 bp, Homo sapiens
caataaaagacatga

SEQ ID NO: 756970 - DNA, 15 bp, Homo sapiens
aataaaagacatgaa

SEQ ID NO: 756971 - DNA, 15 bp, Homo sapiens
ataaaagacatgaaa

SEQ ID NO: 756972 - DNA, 15 bp, Homo sapiens
taaaagacatgaaag

SEQ ID NO: 756973 - DNA, 15 bp, Homo sapiens
aaaagacatgaaagc

SEQ ID NO: 756974 - DNA, 15 bp, Homo sapiens
aaagacatgaaagca

SEQ ID NO: 756975 - DNA, 15 bp, Homo sapiens
aagacatgaaagcac

SEQ ID NO: 756976 - DNA, 15 bp, Homo sapiens
agacatgaaagcacc

SEQ ID NO: 756977 - DNA, 15 bp, Homo sapiens
gacatgaaagcacct

SEQ ID NO: 756978 - DNA, 15 bp, Homo sapiens
acatgaaagcacctg

SEQ ID NO: 756979 - DNA, 15 bp, Homo sapiens
catgaaagcacctgg

SEQ ID NO: 756980 - DNA, 15 bp, Homo sapiens
atgaaagcacctggg

SEQ ID NO: 756981 - DNA, 15 bp, Homo sapiens
tgaaagcacctggga

SEQ ID NO: 756982 - DNA, 15 bp, Homo sapiens
gaaagcacctgggaa

SEQ ID NO: 756983 - DNA, 15 bp, Homo sapiens
aaagcacctgggaaa

SEQ ID NO: 756984 - DNA, 15 bp, Homo sapiens
aagcacctgggaaag

SEQ ID NO: 756985 - DNA, 15 bp, Homo sapiens
agcacctgggaaagc

SEQ ID NO: 756986 - DNA, 15 bp, Homo sapiens
gcacctgggaaagca

SEQ ID NO: 756987 - DNA, 15 bp, Homo sapiens
cacctgggaaagcaa

SEQ ID NO: 756988 - DNA, 15 bp, Homo sapiens
acctgggaaagcaaa

SEQ ID NO: 756989 - DNA, 15 bp, Homo sapiens
cctgggaaagcaaaa

SEQ ID NO: 756990 - DNA, 15 bp, Homo sapiens
ctgggaaagcaaaac

SEQ ID NO: 756991 - DNA, 15 bp, Homo sapiens
tgggaaagcaaaaca

SEQ ID NO: 756992 - DNA, 15 bp, Homo sapiens
gggaaagcaaaacag

SEQ ID NO: 756993 - DNA, 15 bp, Homo sapiens
ggaaagcaaaacagc

SEQ ID NO: 756994 - DNA, 15 bp, Homo sapiens
gaaagcaaaacagcc

SEQ ID NO: 756995 - DNA, 15 bp, Homo sapiens
aaagcaaaacagcct

SEQ ID NO: 756996 - DNA, 15 bp, Homo sapiens
aagcaaaacagcctc

SEQ ID NO: 756997 - DNA, 15 bp, Homo sapiens
agcaaaacagcctct

SEQ ID NO: 756998 - DNA, 15 bp, Homo sapiens
gcaaaacagcctctg

SEQ ID NO: 756999 - DNA, 15 bp, Homo sapiens
caaaacagcctctgc

SEQ ID NO: 757000 - DNA, 15 bp, Homo sapiens
aaaacagcctctgca

SEQ ID NO: 757001 - DNA, 15 bp, Homo sapiens
aaacagcctctgcaa

SEQ ID NO: 757002 - DNA, 15 bp, Homo sapiens
aacagcctctgcaaa

SEQ ID NO: 757003 - DNA, 15 bp, Homo sapiens
acagcctctgcaaag

SEQ ID NO: 757004 - DNA, 15 bp, Homo sapiens
cagcctctgcaaagc

SEQ ID NO: 757005 - DNA, 15 bp, Homo sapiens
agcctctgcaaagca

SEQ ID NO: 757006 - DNA, 15 bp, Homo sapiens
gcctctgcaaagcag

SEQ ID NO: 757007 - DNA, 15 bp, Homo sapiens
cctctgcaaagcagg

SEQ ID NO: 757008 - DNA, 15 bp, Homo sapiens
ctctgcaaagcaggg

SEQ ID NO: 757009 - DNA, 15 bp, Homo sapiens
tctgcaaagcagggc

SEQ ID NO: 757010 - DNA, 15 bp, Homo sapiens
ctgcaaagcagggca

SEQ ID NO: 757011 - DNA, 15 bp, Homo sapiens
tgcaaagcagggcat

SEQ ID NO: 757012 - DNA, 15 bp, Homo sapiens
gcaaagcagggcatt

SEQ ID NO: 757013 - DNA, 15 bp, Homo sapiens
caaagcagggcatta

SEQ ID NO: 757014 - DNA, 15 bp, Homo sapiens
aaagcagggcattat

SEQ ID NO: 757015 - DNA, 15 bp, Homo sapiens
aagcagggcattatt

SEQ ID NO: 757016 - DNA, 15 bp, Homo sapiens
agcagggcattatta

SEQ ID NO: 757017 - DNA, 15 bp, Homo sapiens
gcagggcattattac

SEQ ID NO: 757018 - DNA, 15 bp, Homo sapiens
cagggcattattact

SEQ ID NO: 757019 - DNA, 15 bp, Homo sapiens
agggcattattactg

SEQ ID NO: 757020 - DNA, 15 bp, Homo sapiens
gggcattattactgg

SEQ ID NO: 757021 - DNA, 15 bp, Homo sapiens
ggcattattactggg

SEQ ID NO: 757022 - DNA, 15 bp, Homo sapiens
gcattattactggga

SEQ ID NO: 757023 - DNA, 15 bp, Homo sapiens
cattattactgggag

SEQ ID NO: 757024 - DNA, 15 bp, Homo sapiens
attattactgggagc

SEQ ID NO: 757025 - DNA, 15 bp, Homo sapiens
ttattactgggagca

SEQ ID NO: 757026 - DNA, 15 bp, Homo sapiens
tattactgggagcag

SEQ ID NO: 757027 - DNA, 15 bp, Homo sapiens
attactgggagcaga

SEQ ID NO: 757028 - DNA, 15 bp, Homo sapiens
ttactgggagcagat

SEQ ID NO: 757029 - DNA, 15 bp, Homo sapiens
tactgggagcagatc

SEQ ID NO: 757030 - DNA, 15 bp, Homo sapiens
actgggagcagatct

SEQ ID NO: 757031 - DNA, 15 bp, Homo sapiens
ctgggagcagatctg

SEQ ID NO: 757032 - DNA, 15 bp, Homo sapiens
tgggagcagatctga

SEQ ID NO: 757033 - DNA, 15 bp, Homo sapiens
gggagcagatctgat

SEQ ID NO: 757034 - DNA, 15 bp, Homo sapiens
ggagcagatctgatg

SEQ ID NO: 757035 - DNA, 15 bp, Homo sapiens
gagcagatctgatgt

SEQ ID NO: 757036 - DNA, 15 bp, Homo sapiens
agcagatctgatgtg

SEQ ID NO: 757037 - DNA, 15 bp, Homo sapiens
gcagatctgatgtgt

SEQ ID NO: 757038 - DNA, 15 bp, Homo sapiens
cagatctgatgtgta

SEQ ID NO: 757039 - DNA, 15 bp, Homo sapiens
agatctgatgtgtac

SEQ ID NO: 757040 - DNA, 15 bp, Homo sapiens
gatctgatgtgtacc

SEQ ID NO: 757041 - DNA, 15 bp, Homo sapiens
atctgatgtgtacct

SEQ ID NO: 757042 - DNA, 15 bp, Homo sapiens
tctgatgtgtacctt

SEQ ID NO: 757043 - DNA, 15 bp, Homo sapiens
ctgatgtgtaccttc

SEQ ID NO: 757044 - DNA, 15 bp, Homo sapiens
tgatgtgtaccttcc

SEQ ID NO: 757045 - DNA, 15 bp, Homo sapiens
gatgtgtaccttcca

SEQ ID NO: 757046 - DNA, 15 bp, Homo sapiens
atgtgtaccttccac

SEQ ID NO: 757047 - DNA, 15 bp, Homo sapiens
tgtgtaccttccaca

SEQ ID NO: 757048 - DNA, 15 bp, Homo sapiens
gtgtaccttccacag

SEQ ID NO: 757049 - DNA, 15 bp, Homo sapiens
tgtaccttccacaga

SEQ ID NO: 757050 - DNA, 15 bp, Homo sapiens
gtaccttccacagat

SEQ ID NO: 757051 - DNA, 15 bp, Homo sapiens
taccttccacagatt

SEQ ID NO: 757052 - DNA, 15 bp, Homo sapiens
accttccacagattc

SEQ ID NO: 757053 - DNA, 15 bp, Homo sapiens
ccttccacagattcc

SEQ ID NO: 757054 - DNA, 15 bp, Homo sapiens
cttccacagattcca

SEQ ID NO: 757055 - DNA, 15 bp, Homo sapiens
ttccacagattccac

SEQ ID NO: 757056 - DNA, 15 bp, Homo sapiens
tccacagattccact

SEQ ID NO: 757057 - DNA, 15 bp, Homo sapiens
ccacagattccactg

SEQ ID NO: 757058 - DNA, 15 bp, Homo sapiens
cacagattccactga

SEQ ID NO: 757059 - DNA, 15 bp, Homo sapiens
acagattccactgaa

SEQ ID NO: 757060 - DNA, 15 bp, Homo sapiens
cagattccactgaag

SEQ ID NO: 757061 - DNA, 15 bp, Homo sapiens
agattccactgaagg

SEQ ID NO: 757062 - DNA, 15 bp, Homo sapiens
gattccactgaaggt

SEQ ID NO: 757063 - DNA, 15 bp, Homo sapiens
attccactgaaggtg

SEQ ID NO: 757064 - DNA, 15 bp, Homo sapiens
ttccactgaaggtgt

SEQ ID NO: 757065 - DNA, 15 bp, Homo sapiens
tccactgaaggtgtc

SEQ ID NO: 757066 - DNA, 15 bp, Homo sapiens
ccactgaaggtgtcc

SEQ ID NO: 757067 - DNA, 15 bp, Homo sapiens
cactgaaggtgtcct

SEQ ID NO: 757068 - DNA, 15 bp, Homo sapiens
actgaaggtgtcctc

SEQ ID NO: 757069 - DNA, 15 bp, Homo sapiens
ctgaaggtgtcctca

SEQ ID NO: 757070 - DNA, 15 bp, Homo sapiens
tgaaggtgtcctcag

SEQ ID NO: 757071 - DNA, 15 bp, Homo sapiens
gaaggtgtcctcaga

SEQ ID NO: 757072 - DNA, 15 bp, Homo sapiens
aaggtgtcctcagag

SEQ ID NO: 757073 - DNA, 15 bp, Homo sapiens
aggtgtcctcagagc

SEQ ID NO: 757074 - DNA, 15 bp, Homo sapiens
ggtgtcctcagagca

SEQ ID NO: 757075 - DNA, 15 bp, Homo sapiens
gtgtcctcagagcac

SEQ ID NO: 757076 - DNA, 15 bp, Homo sapiens
tgtcctcagagcacc

SEQ ID NO: 757077 - DNA, 15 bp, Homo sapiens
gtcctcagagcaccg

SEQ ID NO: 757078 - DNA, 15 bp, Homo sapiens
tcctcagagcaccgg

SEQ ID NO: 757079 - DNA, 15 bp, Homo sapiens
cctcagagcaccgga

SEQ ID NO: 757080 - DNA, 15 bp, Homo sapiens
ctcagagcaccggac

SEQ ID NO: 757081 - DNA, 15 bp, Homo sapiens
tcagagcaccggaca

SEQ ID NO: 757082 - DNA, 15 bp, Homo sapiens
cagagcaccggacac

SEQ ID NO: 757083 - DNA, 15 bp, Homo sapiens
agagcaccggacact

SEQ ID NO: 757084 - DNA, 15 bp, Homo sapiens
gagcaccggacactc

SEQ ID NO: 757085 - DNA, 15 bp, Homo sapiens
agcaccggacactca

SEQ ID NO: 757086 - DNA, 15 bp, Homo sapiens
gcaccggacactcag

SEQ ID NO: 757087 - DNA, 15 bp, Homo sapiens
caccggacactcagg

SEQ ID NO: 757088 - DNA, 15 bp, Homo sapiens
accggacactcaggg

SEQ ID NO: 757089 - DNA, 15 bp, Homo sapiens
ccggacactcagggg

SEQ ID NO: 757090 - DNA, 15 bp, Homo sapiens
cggacactcaggggc

SEQ ID NO: 757091 - DNA, 15 bp, Homo sapiens
ggacactcaggggcc

SEQ ID NO: 757092 - DNA, 15 bp, Homo sapiens
gacactcaggggccc

SEQ ID NO: 757093 - DNA, 15 bp, Homo sapiens
acactcaggggcccg

SEQ ID NO: 757094 - DNA, 15 bp, Homo sapiens
cactcaggggcccgc

SEQ ID NO: 757095 - DNA, 15 bp, Homo sapiens
actcaggggcccgca

SEQ ID NO: 757096 - DNA, 15 bp, Homo sapiens
ctcaggggcccgcag

SEQ ID NO: 757097 - DNA, 15 bp, Homo sapiens
tcaggggcccgcagc

SEQ ID NO: 757098 - DNA, 15 bp, Homo sapiens
caggggcccgcagcc

SEQ ID NO: 757099 - DNA, 15 bp, Homo sapiens
aggggcccgcagccc

SEQ ID NO: 757100 - DNA, 15 bp, Homo sapiens
ggggcccgcagccca

SEQ ID NO: 757101 - DNA, 15 bp, Homo sapiens
gggcccgcagcccag

SEQ ID NO: 757102 - DNA, 15 bp, Homo sapiens
ggcccgcagcccaga

SEQ ID NO: 757103 - DNA, 15 bp, Homo sapiens
gcccgcagcccagac

SEQ ID NO: 757104 - DNA, 15 bp, Homo sapiens
cccgcagcccagaca

SEQ ID NO: 757105 - DNA, 15 bp, Homo sapiens
ccgcagcccagacac

SEQ ID NO: 757106 - DNA, 15 bp, Homo sapiens
cgcagcccagacaca

SEQ ID NO: 757107 - DNA, 15 bp, Homo sapiens
gcagcccagacacag

SEQ ID NO: 757108 - DNA, 15 bp, Homo sapiens
cagcccagacacaga

SEQ ID NO: 757109 - DNA, 15 bp, Homo sapiens
agcccagacacagaa

SEQ ID NO: 757110 - DNA, 15 bp, Homo sapiens
gcccagacacagaaa

SEQ ID NO: 757111 - DNA, 15 bp, Homo sapiens
cccagacacagaaag

SEQ ID NO: 757112 - DNA, 15 bp, Homo sapiens
ccagacacagaaagt

SEQ ID NO: 757113 - DNA, 15 bp, Homo sapiens
cagacacagaaagtc

SEQ ID NO: 757114 - DNA, 15 bp, Homo sapiens
agacacagaaagtcc

SEQ ID NO: 757115 - DNA, 15 bp, Homo sapiens
gacacagaaagtcca

SEQ ID NO: 757116 - DNA, 15 bp, Homo sapiens
acacagaaagtccac

SEQ ID NO: 757117 - DNA, 15 bp, Homo sapiens
cacagaaagtccact

SEQ ID NO: 757118 - DNA, 15 bp, Homo sapiens
acagaaagtccactc

SEQ ID NO: 757119 - DNA, 15 bp, Homo sapiens
cagaaagtccactct

SEQ ID NO: 757120 - DNA, 15 bp, Homo sapiens
agaaagtccactctg

SEQ ID NO: 757121 - DNA, 15 bp, Homo sapiens
gaaagtccactctgc

SEQ ID NO: 757122 - DNA, 15 bp, Homo sapiens
aaagtccactctgct

SEQ ID NO: 757123 - DNA, 15 bp, Homo sapiens
aagtccactctgctg

SEQ ID NO: 757124 - DNA, 15 bp, Homo sapiens
agtccactctgctga

SEQ ID NO: 757125 - DNA, 15 bp, Homo sapiens
gtccactctgctgag

SEQ ID NO: 757126 - DNA, 15 bp, Homo sapiens
tccactctgctgaga

SEQ ID NO: 757127 - DNA, 15 bp, Homo sapiens
ccactctgctgagaa

SEQ ID NO: 757128 - DNA, 15 bp, Homo sapiens
cactctgctgagaaa

SEQ ID NO: 757129 - DNA, 15 bp, Homo sapiens
actctgctgagaaat

SEQ ID NO: 757130 - DNA, 15 bp, Homo sapiens
ctctgctgagaaatg

SEQ ID NO: 757131 - DNA, 15 bp, Homo sapiens
tctgctgagaaatgc

SEQ ID NO: 757132 - DNA, 15 bp, Homo sapiens
ctgctgagaaatgct

SEQ ID NO: 757133 - DNA, 15 bp, Homo sapiens
tgctgagaaatgctc

SEQ ID NO: 757134 - DNA, 15 bp, Homo sapiens
gctgagaaatgctca

SEQ ID NO: 757135 - DNA, 15 bp, Homo sapiens
ctgagaaatgctcac

SEQ ID NO: 757136 - DNA, 15 bp, Homo sapiens
tgagaaatgctcacc

SEQ ID NO: 757137 - DNA, 15 bp, Homo sapiens
gagaaatgctcacca

SEQ ID NO: 757138 - DNA, 15 bp, Homo sapiens
agaaatgctcaccaa

SEQ ID NO: 757139 - DNA, 15 bp, Homo sapiens
gaaatgctcaccaag

SEQ ID NO: 757140 - DNA, 15 bp, Homo sapiens
aaatgctcaccaagc

SEQ ID NO: 757141 - DNA, 15 bp, Homo sapiens
aatgctcaccaagca

SEQ ID NO: 757142 - DNA, 15 bp, Homo sapiens
atgctcaccaagcag

SEQ ID NO: 757143 - DNA, 15 bp, Homo sapiens
tgctcaccaagcaga

SEQ ID NO: 757144 - DNA, 15 bp, Homo sapiens
gctcaccaagcagaa

SEQ ID NO: 757145 - DNA, 15 bp, Homo sapiens
ctcaccaagcagaat

SEQ ID NO: 757146 - DNA, 15 bp, Homo sapiens
tcaccaagcagaatc

SEQ ID NO: 757147 - DNA, 15 bp, Homo sapiens
caccaagcagaatcc

SEQ ID NO: 757148 - DNA, 15 bp, Homo sapiens
accaagcagaatccc

SEQ ID NO: 757149 - DNA, 15 bp, Homo sapiens
ccaagcagaatccct

SEQ ID NO: 757150 - DNA, 15 bp, Homo sapiens
caagcagaatccctc

SEQ ID NO: 757151 - DNA, 15 bp, Homo sapiens
aagcagaatccctca

SEQ ID NO: 757152 - DNA, 15 bp, Homo sapiens
agcagaatccctcac

SEQ ID NO: 757153 - DNA, 15 bp, Homo sapiens
gcagaatccctcaca

SEQ ID NO: 757154 - DNA, 15 bp, Homo sapiens
cagaatccctcacac

SEQ ID NO: 757155 - DNA, 15 bp, Homo sapiens
agaatccctcacact

SEQ ID NO: 757156 - DNA, 15 bp, Homo sapiens
gaatccctcacactc

SEQ ID NO: 757157 - DNA, 15 bp, Homo sapiens
aatccctcacactct

SEQ ID NO: 757158 - DNA, 15 bp, Homo sapiens
atccctcacactctc

SEQ ID NO: 757159 - DNA, 15 bp, Homo sapiens
tccctcacactctct

SEQ ID NO: 757160 - DNA, 15 bp, Homo sapiens
ccctcacactctcta

SEQ ID NO: 757161 - DNA, 15 bp, Homo sapiens
cctcacactctctag

SEQ ID NO: 757162 - DNA, 15 bp, Homo sapiens
ctcacactctctagc

SEQ ID NO: 757163 - DNA, 15 bp, Homo sapiens
tcacactctctagct

SEQ ID NO: 757164 - DNA, 15 bp, Homo sapiens
cacactctctagctt

SEQ ID NO: 757165 - DNA, 15 bp, Homo sapiens
acactctctagcttt

SEQ ID NO: 757166 - DNA, 15 bp, Homo sapiens
cactctctagctttg

SEQ ID NO: 757167 - DNA, 15 bp, Homo sapiens
actctctagctttgt

SEQ ID NO: 757168 - DNA, 15 bp, Homo sapiens
ctctctagctttgtt

SEQ ID NO: 757169 - DNA, 15 bp, Homo sapiens
tctctagctttgttt

SEQ ID NO: 757170 - DNA, 15 bp, Homo sapiens
ctctagctttgtttt

SEQ ID NO: 757171 - DNA, 15 bp, Homo sapiens
tctagctttgttttc

SEQ ID NO: 757172 - DNA, 15 bp, Homo sapiens
ctagctttgttttct

SEQ ID NO: 757173 - DNA, 15 bp, Homo sapiens
tagctttgttttctt

SEQ ID NO: 757174 - DNA, 15 bp, Homo sapiens
agctttgttttcttt

SEQ ID NO: 757175 - DNA, 15 bp, Homo sapiens
gctttgttttctttg

SEQ ID NO: 757176 - DNA, 15 bp, Homo sapiens
ctttgttttctttga

SEQ ID NO: 757177 - DNA, 15 bp, Homo sapiens
tttgttttctttgat

SEQ ID NO: 757178 - DNA, 15 bp, Homo sapiens
ttgttttctttgatc

SEQ ID NO: 757179 - DNA, 15 bp, Homo sapiens
tgttttctttgatct

SEQ ID NO: 757180 - DNA, 15 bp, Homo sapiens
gttttctttgatctc

SEQ ID NO: 757181 - DNA, 15 bp, Homo sapiens
ttttctttgatctct

SEQ ID NO: 757182 - DNA, 15 bp, Homo sapiens
tttctttgatctctc

SEQ ID NO: 757183 - DNA, 15 bp, Homo sapiens
ttctttgatctctct

SEQ ID NO: 757184 - DNA, 15 bp, Homo sapiens
tctttgatctctctg

SEQ ID NO: 757185 - DNA, 15 bp, Homo sapiens
ctttgatctctctga

SEQ ID NO: 757186 - DNA, 15 bp, Homo sapiens
tttgatctctctgag

SEQ ID NO: 757187 - DNA, 15 bp, Homo sapiens
ttgatctctctgagc

SEQ ID NO: 757188 - DNA, 15 bp, Homo sapiens
tgatctctctgagct

SEQ ID NO: 757189 - DNA, 15 bp, Homo sapiens
gatctctctgagctt

SEQ ID NO: 757190 - DNA, 15 bp, Homo sapiens
atctctctgagctta

SEQ ID NO: 757191 - DNA, 15 bp, Homo sapiens
tctctctgagcttag

SEQ ID NO: 757192 - DNA, 15 bp, Homo sapiens
ctctctgagcttagg

SEQ ID NO: 757193 - DNA, 15 bp, Homo sapiens
tctctgagcttagga

SEQ ID NO: 757194 - DNA, 15 bp, Homo sapiens
ctctgagcttaggag

SEQ ID NO: 757195 - DNA, 15 bp, Homo sapiens
tctgagcttaggagg

SEQ ID NO: 757196 - DNA, 15 bp, Homo sapiens
ctgagcttaggagga

SEQ ID NO: 757197 - DNA, 15 bp, Homo sapiens
tgagcttaggaggaa

SEQ ID NO: 757198 - DNA, 15 bp, Homo sapiens
gagcttaggaggaaa

SEQ ID NO: 757199 - DNA, 15 bp, Homo sapiens
agcttaggaggaaag

SEQ ID NO: 757200 - DNA, 15 bp, Homo sapiens
gcttaggaggaaagg

SEQ ID NO: 757201 - DNA, 15 bp, Homo sapiens
cttaggaggaaaggc

SEQ ID NO: 757202 - DNA, 15 bp, Homo sapiens
ttaggaggaaaggct

SEQ ID NO: 757203 - DNA, 15 bp, Homo sapiens
taggaggaaaggctc

SEQ ID NO: 757204 - DNA, 15 bp, Homo sapiens
aggaggaaaggctcc

SEQ ID NO: 757205 - DNA, 15 bp, Homo sapiens
ggaggaaaggctcct

SEQ ID NO: 757206 - DNA, 15 bp, Homo sapiens
gaggaaaggctcctg

SEQ ID NO: 757207 - DNA, 15 bp, Homo sapiens
aggaaaggctcctgt

SEQ ID NO: 757208 - DNA, 15 bp, Homo sapiens
ggaaaggctcctgtt

SEQ ID NO: 757209 - DNA, 15 bp, Homo sapiens
gaaaggctcctgttc

SEQ ID NO: 757210 - DNA, 15 bp, Homo sapiens
aaaggctcctgttcc

SEQ ID NO: 757211 - DNA, 15 bp, Homo sapiens
aaggctcctgttccc

SEQ ID NO: 757212 - DNA, 15 bp, Homo sapiens
aggctcctgttccct

SEQ ID NO: 757213 - DNA, 15 bp, Homo sapiens
ggctcctgttccctc

SEQ ID NO: 757214 - DNA, 15 bp, Homo sapiens
gctcctgttccctcc

SEQ ID NO: 757215 - DNA, 15 bp, Homo sapiens
ctcctgttccctccc

SEQ ID NO: 757216 - DNA, 15 bp, Homo sapiens
tcctgttccctccct

SEQ ID NO: 757217 - DNA, 15 bp, Homo sapiens
cctgttccctccctc

SEQ ID NO: 757218 - DNA, 15 bp, Homo sapiens
ctgttccctccctct

SEQ ID NO: 757219 - DNA, 15 bp, Homo sapiens
tgttccctccctctt

SEQ ID NO: 757220 - DNA, 15 bp, Homo sapiens
gttccctccctcttg

SEQ ID NO: 757221 - DNA, 15 bp, Homo sapiens
ttccctccctcttgg

SEQ ID NO: 757222 - DNA, 15 bp, Homo sapiens
tccctccctcttggc

SEQ ID NO: 757223 - DNA, 15 bp, Homo sapiens
ccctccctcttggct

SEQ ID NO: 757224 - DNA, 15 bp, Homo sapiens
cctccctcttggctt

SEQ ID NO: 757225 - DNA, 15 bp, Homo sapiens
ctccctcttggctta

SEQ ID NO: 757226 - DNA, 15 bp, Homo sapiens
tccctcttggcttat

SEQ ID NO: 757227 - DNA, 15 bp, Homo sapiens
ccctcttggcttatc

SEQ ID NO: 757228 - DNA, 15 bp, Homo sapiens
cctcttggcttatcc

SEQ ID NO: 757229 - DNA, 15 bp, Homo sapiens
ctcttggcttatccc

SEQ ID NO: 757230 - DNA, 15 bp, Homo sapiens
tcttggcttatccca

SEQ ID NO: 757231 - DNA, 15 bp, Homo sapiens
cttggcttatcccaa

SEQ ID NO: 757232 - DNA, 15 bp, Homo sapiens
ttggcttatcccaat

SEQ ID NO: 757233 - DNA, 15 bp, Homo sapiens
tggcttatcccaata

SEQ ID NO: 757234 - DNA, 15 bp, Homo sapiens
ggcttatcccaataa

SEQ ID NO: 757235 - DNA, 15 bp, Homo sapiens
gcttatcccaataat

SEQ ID NO: 757236 - DNA, 15 bp, Homo sapiens
cttatcccaataatg

SEQ ID NO: 757237 - DNA, 15 bp, Homo sapiens
ttatcccaataatgc

SEQ ID NO: 757238 - DNA, 15 bp, Homo sapiens
tatcccaataatgca

SEQ ID NO: 757239 - DNA, 15 bp, Homo sapiens
atcccaataatgcaa

SEQ ID NO: 757240 - DNA, 15 bp, Homo sapiens
tcccaataatgcaaa

SEQ ID NO: 757241 - DNA, 15 bp, Homo sapiens
cccaataatgcaaag

SEQ ID NO: 757242 - DNA, 15 bp, Homo sapiens
ccaataatgcaaagc

SEQ ID NO: 757243 - DNA, 15 bp, Homo sapiens
caataatgcaaagcc

SEQ ID NO: 757244 - DNA, 15 bp, Homo sapiens
aataatgcaaagcca

SEQ ID NO: 757245 - DNA, 15 bp, Homo sapiens
ataatgcaaagccat

SEQ ID NO: 757246 - DNA, 15 bp, Homo sapiens
taatgcaaagccata

SEQ ID NO: 757247 - DNA, 15 bp, Homo sapiens
aatgcaaagccatag

SEQ ID NO: 757248 - DNA, 15 bp, Homo sapiens
atgcaaagccataga

SEQ ID NO: 757249 - DNA, 15 bp, Homo sapiens
tgcaaagccatagaa

SEQ ID NO: 757250 - DNA, 15 bp, Homo sapiens
gcaaagccatagaag

SEQ ID NO: 757251 - DNA, 15 bp, Homo sapiens
caaagccatagaagt

SEQ ID NO: 757252 - DNA, 15 bp, Homo sapiens
aaagccatagaagtg

SEQ ID NO: 757253 - DNA, 15 bp, Homo sapiens
aagccatagaagtgc

SEQ ID NO: 757254 - DNA, 15 bp, Homo sapiens
agccatagaagtgca

SEQ ID NO: 757255 - DNA, 15 bp, Homo sapiens
gccatagaagtgcag

SEQ ID NO: 757256 - DNA, 15 bp, Homo sapiens
ccatagaagtgcagg

SEQ ID NO: 757257 - DNA, 15 bp, Homo sapiens
catagaagtgcaggc

SEQ ID NO: 757258 - DNA, 15 bp, Homo sapiens
atagaagtgcaggct

SEQ ID NO: 757259 - DNA, 15 bp, Homo sapiens
tagaagtgcaggctg

SEQ ID NO: 757260 - DNA, 15 bp, Homo sapiens
agaagtgcaggctgc

SEQ ID NO: 757261 - DNA, 15 bp, Homo sapiens
gaagtgcaggctgct

SEQ ID NO: 757262 - DNA, 15 bp, Homo sapiens
aagtgcaggctgctg

SEQ ID NO: 757263 - DNA, 15 bp, Homo sapiens
agtgcaggctgctgg

SEQ ID NO: 757264 - DNA, 15 bp, Homo sapiens
gtgcaggctgctggg

SEQ ID NO: 757265 - DNA, 15 bp, Homo sapiens
tgcaggctgctgggg

SEQ ID NO: 757266 - DNA, 15 bp, Homo sapiens
gcaggctgctgggga

SEQ ID NO: 757267 - DNA, 15 bp, Homo sapiens
caggctgctggggaa

SEQ ID NO: 757268 - DNA, 15 bp, Homo sapiens
aggctgctggggaaa

SEQ ID NO: 757269 - DNA, 15 bp, Homo sapiens
ggctgctggggaaaa

SEQ ID NO: 757270 - DNA, 15 bp, Homo sapiens
gctgctggggaaaag

SEQ ID NO: 757271 - DNA, 15 bp, Homo sapiens
ctgctggggaaaagt

SEQ ID NO: 757272 - DNA, 15 bp, Homo sapiens
tgctggggaaaagtt

SEQ ID NO: 757273 - DNA, 15 bp, Homo sapiens
gctggggaaaagttt

SEQ ID NO: 757274 - DNA, 15 bp, Homo sapiens
ctggggaaaagtttg

SEQ ID NO: 757275 - DNA, 15 bp, Homo sapiens
tggggaaaagtttgt

SEQ ID NO: 757276 - DNA, 15 bp, Homo sapiens
ggggaaaagtttgtt

SEQ ID NO: 757277 - DNA, 15 bp, Homo sapiens
gggaaaagtttgttt

SEQ ID NO: 757278 - DNA, 15 bp, Homo sapiens
ggaaaagtttgtttg

SEQ ID NO: 757279 - DNA, 15 bp, Homo sapiens
gaaaagtttgtttgg

SEQ ID NO: 757280 - DNA, 15 bp, Homo sapiens
aaaagtttgtttgga

SEQ ID NO: 757281 - DNA, 15 bp, Homo sapiens
aaagtttgtttggac

SEQ ID NO: 757282 - DNA, 15 bp, Homo sapiens
aagtttgtttggaca

SEQ ID NO: 757283 - DNA, 15 bp, Homo sapiens
agtttgtttggacac

SEQ ID NO: 757284 - DNA, 15 bp, Homo sapiens
gtttgtttggacact

SEQ ID NO: 757285 - DNA, 15 bp, Homo sapiens
tttgtttggacactt

SEQ ID NO: 757286 - DNA, 15 bp, Homo sapiens
ttgtttggacactta

SEQ ID NO: 757287 - DNA, 15 bp, Homo sapiens
tgtttggacacttaa

SEQ ID NO: 757288 - DNA, 15 bp, Homo sapiens
gtttggacacttaag

SEQ ID NO: 757289 - DNA, 15 bp, Homo sapiens
tttggacacttaaga

SEQ ID NO: 757290 - DNA, 15 bp, Homo sapiens
ttggacacttaagaa

SEQ ID NO: 757291 - DNA, 15 bp, Homo sapiens
tggacacttaagaat

SEQ ID NO: 757292 - DNA, 15 bp, Homo sapiens
ggacacttaagaatg

SEQ ID NO: 757293 - DNA, 15 bp, Homo sapiens
gacacttaagaatgt

SEQ ID NO: 757294 - DNA, 15 bp, Homo sapiens
acacttaagaatgta

SEQ ID NO: 757295 - DNA, 15 bp, Homo sapiens
cacttaagaatgtag

SEQ ID NO: 757296 - DNA, 15 bp, Homo sapiens
acttaagaatgtaga

SEQ ID NO: 757297 - DNA, 15 bp, Homo sapiens
cttaagaatgtagaa

SEQ ID NO: 757298 - DNA, 15 bp, Homo sapiens
ttaagaatgtagaaa

SEQ ID NO: 757299 - DNA, 15 bp, Homo sapiens
taagaatgtagaaaa

SEQ ID NO: 757300 - DNA, 15 bp, Homo sapiens
aagaatgtagaaaag

SEQ ID NO: 757301 - DNA, 15 bp, Homo sapiens
agaatgtagaaaagg

SEQ ID NO: 757302 - DNA, 15 bp, Homo sapiens
gaatgtagaaaaggg

SEQ ID NO: 757303 - DNA, 15 bp, Homo sapiens
aatgtagaaaagggt

SEQ ID NO: 757304 - DNA, 15 bp, Homo sapiens
atgtagaaaagggtt

SEQ ID NO: 757305 - DNA, 15 bp, Homo sapiens
tgtagaaaagggttt

SEQ ID NO: 757306 - DNA, 15 bp, Homo sapiens
gtagaaaagggttta

SEQ ID NO: 757307 - DNA, 15 bp, Homo sapiens
tagaaaagggtttag

SEQ ID NO: 757308 - DNA, 15 bp, Homo sapiens
agaaaagggtttagc

SEQ ID NO: 757309 - DNA, 15 bp, Homo sapiens
gaaaagggtttagct

SEQ ID NO: 757310 - DNA, 15 bp, Homo sapiens
aaaagggtttagctt

SEQ ID NO: 757311 - DNA, 15 bp, Homo sapiens
aaagggtttagcttg

SEQ ID NO: 757312 - DNA, 15 bp, Homo sapiens
aagggtttagcttgt

SEQ ID NO: 757313 - DNA, 15 bp, Homo sapiens
agggtttagcttgta

SEQ ID NO: 757314 - DNA, 15 bp, Homo sapiens
gggtttagcttgtat

SEQ ID NO: 757315 - DNA, 15 bp, Homo sapiens
ggtttagcttgtata

SEQ ID NO: 757316 - DNA, 15 bp, Homo sapiens
gtttagcttgtataa

SEQ ID NO: 757317 - DNA, 15 bp, Homo sapiens
tttagcttgtataaa

SEQ ID NO: 757318 - DNA, 15 bp, Homo sapiens
ttagcttgtataaag

SEQ ID NO: 757319 - DNA, 15 bp, Homo sapiens
tagcttgtataaaga

SEQ ID NO: 757320 - DNA, 15 bp, Homo sapiens
agcttgtataaagag

SEQ ID NO: 757321 - DNA, 15 bp, Homo sapiens
gcttgtataaagagt

SEQ ID NO: 757322 - DNA, 15 bp, Homo sapiens
cttgtataaagagtt

SEQ ID NO: 757323 - DNA, 15 bp, Homo sapiens
ttgtataaagagttt

SEQ ID NO: 757324 - DNA, 15 bp, Homo sapiens
tgtataaagagtttt

SEQ ID NO: 757325 - DNA, 15 bp, Homo sapiens
gtataaagagttttg

SEQ ID NO: 757326 - DNA, 15 bp, Homo sapiens
tataaagagttttgc

SEQ ID NO: 757327 - DNA, 15 bp, Homo sapiens
ataaagagttttgct

SEQ ID NO: 757328 - DNA, 15 bp, Homo sapiens
taaagagttttgctt

SEQ ID NO: 757329 - DNA, 15 bp, Homo sapiens
aaagagttttgcttt

SEQ ID NO: 757330 - DNA, 15 bp, Homo sapiens
aagagttttgctttc

SEQ ID NO: 757331 - DNA, 15 bp, Homo sapiens
agagttttgctttct

SEQ ID NO: 757332 - DNA, 15 bp, Homo sapiens
gagttttgctttctc

SEQ ID NO: 757333 - DNA, 15 bp, Homo sapiens
agttttgctttctca

SEQ ID NO: 757334 - DNA, 15 bp, Homo sapiens
gttttgctttctcat

SEQ ID NO: 757335 - DNA, 15 bp, Homo sapiens
ttttgctttctcatt

SEQ ID NO: 757336 - DNA, 15 bp, Homo sapiens
tttgctttctcatta

SEQ ID NO: 757337 - DNA, 15 bp, Homo sapiens
ttgctttctcattat

SEQ ID NO: 757338 - DNA, 15 bp, Homo sapiens
tgctttctcattata

SEQ ID NO: 757339 - DNA, 15 bp, Homo sapiens
gctttctcattataa

SEQ ID NO: 757340 - DNA, 15 bp, Homo sapiens
ctttctcattataat

SEQ ID NO: 757341 - DNA, 15 bp, Homo sapiens
tttctcattataatg

SEQ ID NO: 757342 - DNA, 15 bp, Homo sapiens
ttctcattataatgc

SEQ ID NO: 757343 - DNA, 15 bp, Homo sapiens
tctcattataatgct

SEQ ID NO: 757344 - DNA, 15 bp, Homo sapiens
ctcattataatgctt

SEQ ID NO: 757345 - DNA, 15 bp, Homo sapiens
tcattataatgcttg

SEQ ID NO: 757346 - DNA, 15 bp, Homo sapiens
cattataatgcttgg

SEQ ID NO: 757347 - DNA, 15 bp, Homo sapiens
attataatgcttgga

SEQ ID NO: 757348 - DNA, 15 bp, Homo sapiens
ttataatgcttggag

SEQ ID NO: 757349 - DNA, 15 bp, Homo sapiens
ggccgtgatattaat

SEQ ID NO: 757350 - DNA, 15 bp, Homo sapiens
gccgtgatattaata

SEQ ID NO: 757351 - DNA, 15 bp, Homo sapiens
ccgtgatattaatac

SEQ ID NO: 757352 - DNA, 15 bp, Homo sapiens
cgtgatattaatact

SEQ ID NO: 757353 - DNA, 15 bp, Homo sapiens
gtgatattaatactc

SEQ ID NO: 757354 - DNA, 15 bp, Homo sapiens
tgatattaatactct

SEQ ID NO: 757355 - DNA, 15 bp, Homo sapiens
gatattaatactctt

SEQ ID NO: 757356 - DNA, 15 bp, Homo sapiens
atattaatactcttt

SEQ ID NO: 757357 - DNA, 15 bp, Homo sapiens
tattaatactcttta

SEQ ID NO: 757358 - DNA, 15 bp, Homo sapiens
attaatactctttac

SEQ ID NO: 757359 - DNA, 15 bp, Homo sapiens
ttaatactctttaca

SEQ ID NO: 757360 - DNA, 15 bp, Homo sapiens
taatactctttacag

SEQ ID NO: 757361 - DNA, 15 bp, Homo sapiens
aatactctttacagt

SEQ ID NO: 757362 - DNA, 15 bp, Homo sapiens
atactctttacagtc

SEQ ID NO: 757363 - DNA, 15 bp, Homo sapiens
tactctttacagtct

SEQ ID NO: 757364 - DNA, 15 bp, Homo sapiens
actctttacagtctt

SEQ ID NO: 757365 - DNA, 15 bp, Homo sapiens
ctctttacagtcttc

SEQ ID NO: 757366 - DNA, 15 bp, Homo sapiens
tctttacagtcttcc

SEQ ID NO: 757367 - DNA, 15 bp, Homo sapiens
ctttacagtcttccc

SEQ ID NO: 757368 - DNA, 15 bp, Homo sapiens
tttacagtcttccct

SEQ ID NO: 757369 - DNA, 15 bp, Homo sapiens
ttacagtcttccctc

SEQ ID NO: 757370 - DNA, 15 bp, Homo sapiens
tacagtcttccctcg

SEQ ID NO: 757371 - DNA, 15 bp, Homo sapiens
acagtcttccctcga

SEQ ID NO: 757372 - DNA, 15 bp, Homo sapiens
cagtcttccctcgat

SEQ ID NO: 757373 - DNA, 15 bp, Homo sapiens
agtcttccctcgatt

SEQ ID NO: 757374 - DNA, 15 bp, Homo sapiens
gtcttccctcgatta

SEQ ID NO: 757375 - DNA, 15 bp, Homo sapiens
tcttccctcgattat

SEQ ID NO: 757376 - DNA, 15 bp, Homo sapiens
cttccctcgattatc

SEQ ID NO: 757377 - DNA, 15 bp, Homo sapiens
ttccctcgattatcc

SEQ ID NO: 757378 - DNA, 15 bp, Homo sapiens
tccctcgattatcca

SEQ ID NO: 757379 - DNA, 15 bp, Homo sapiens
ccctcgattatccag

SEQ ID NO: 757380 - DNA, 15 bp, Homo sapiens
cctcgattatccagg

SEQ ID NO: 757381 - DNA, 15 bp, Homo sapiens
ctcgattatccaggc

SEQ ID NO: 757382 - DNA, 15 bp, Homo sapiens
tcgattatccaggct

SEQ ID NO: 757383 - DNA, 15 bp, Homo sapiens
cgattatccaggcta

SEQ ID NO: 757384 - DNA, 15 bp, Homo sapiens
gattatccaggctaa

SEQ ID NO: 757385 - DNA, 15 bp, Homo sapiens
attatccaggctaat

SEQ ID NO: 757386 - DNA, 15 bp, Homo sapiens
ttatccaggctaatg

SEQ ID NO: 757387 - DNA, 15 bp, Homo sapiens
tatccaggctaatgg

SEQ ID NO: 757388 - DNA, 15 bp, Homo sapiens
atccaggctaatgga

SEQ ID NO: 757389 - DNA, 15 bp, Homo sapiens
tccaggctaatggaa

SEQ ID NO: 757390 - DNA, 15 bp, Homo sapiens
ccaggctaatggaaa

SEQ ID NO: 757391 - DNA, 15 bp, Homo sapiens
caggctaatggaaag

SEQ ID NO: 757392 - DNA, 15 bp, Homo sapiens
aggctaatggaaaga

SEQ ID NO: 757393 - DNA, 15 bp, Homo sapiens
ggctaatggaaagag

SEQ ID NO: 757394 - DNA, 15 bp, Homo sapiens
gctaatggaaagaga

SEQ ID NO: 757395 - DNA, 15 bp, Homo sapiens
ctaatggaaagagaa

SEQ ID NO: 757396 - DNA, 15 bp, Homo sapiens
taatggaaagagaac

SEQ ID NO: 757397 - DNA, 15 bp, Homo sapiens
aatggaaagagaacc

SEQ ID NO: 757398 - DNA, 15 bp, Homo sapiens
atggaaagagaacca

SEQ ID NO: 757399 - DNA, 15 bp, Homo sapiens
tggaaagagaaccag

SEQ ID NO: 757400 - DNA, 15 bp, Homo sapiens
ggaaagagaaccagt

SEQ ID NO: 757401 - DNA, 15 bp, Homo sapiens
gaaagagaaccagtg

SEQ ID NO: 757402 - DNA, 15 bp, Homo sapiens
aaagagaaccagtgc

SEQ ID NO: 757403 - DNA, 15 bp, Homo sapiens
aagagaaccagtgcc

SEQ ID NO: 757404 - DNA, 15 bp, Homo sapiens
agagaaccagtgccc

SEQ ID NO: 757405 - DNA, 15 bp, Homo sapiens
gagaaccagtgcccg

SEQ ID NO: 757406 - DNA, 15 bp, Homo sapiens
agaaccagtgcccgc

SEQ ID NO: 757407 - DNA, 15 bp, Homo sapiens
gaaccagtgcccgca

SEQ ID NO: 757408 - DNA, 15 bp, Homo sapiens
aaccagtgcccgcaa

SEQ ID NO: 757409 - DNA, 15 bp, Homo sapiens
accagtgcccgcaaa

SEQ ID NO: 757410 - DNA, 15 bp, Homo sapiens
ccagtgcccgcaaat

SEQ ID NO: 757411 - DNA, 15 bp, Homo sapiens
cagtgcccgcaaata

SEQ ID NO: 757412 - DNA, 15 bp, Homo sapiens
agtgcccgcaaataa

SEQ ID NO: 757413 - DNA, 15 bp, Homo sapiens
gtgcccgcaaataat

SEQ ID NO: 757414 - DNA, 15 bp, Homo sapiens
tgcccgcaaataatc

SEQ ID NO: 757415 - DNA, 15 bp, Homo sapiens
gcccgcaaataatca

SEQ ID NO: 757416 - DNA, 15 bp, Homo sapiens
cccgcaaataatcat

SEQ ID NO: 757417 - DNA, 15 bp, Homo sapiens
ccgcaaataatcata

SEQ ID NO: 757418 - DNA, 15 bp, Homo sapiens
cgcaaataatcataa

SEQ ID NO: 757419 - DNA, 15 bp, Homo sapiens
gcaaataatcataaa

SEQ ID NO: 757420 - DNA, 15 bp, Homo sapiens
caaataatcataaaa

SEQ ID NO: 757421 - DNA, 15 bp, Homo sapiens
aaataatcataaaac

SEQ ID NO: 757422 - DNA, 15 bp, Homo sapiens
aataatcataaaaca

SEQ ID NO: 757423 - DNA, 15 bp, Homo sapiens
ataatcataaaacaa

SEQ ID NO: 757424 - DNA, 15 bp, Homo sapiens
taatcataaaacaaa

SEQ ID NO: 757425 - DNA, 15 bp, Homo sapiens
aatcataaaacaaaa

SEQ ID NO: 757426 - DNA, 15 bp, Homo sapiens
atcataaaacaaaaa

SEQ ID NO: 757427 - DNA, 15 bp, Homo sapiens
tcataaaacaaaaaa

SEQ ID NO: 757428 - DNA, 15 bp, Homo sapiens
cataaaacaaaaaaa

SEQ ID NO: 757429 - DNA, 15 bp, Homo sapiens
ataaaacaaaaaaaa

SEQ ID NO: 757430 - DNA, 15 bp, Homo sapiens
taaaacaaaaaaaaa

SEQ ID NO: 757431 - DNA, 15 bp, Homo sapiens
aaaacaaaaaaaaaa

SEQ ID NO: 757432 - DNA, 15 bp, Homo sapiens
aaacaaaaaaaaaat

SEQ ID NO: 757433 - DNA, 15 bp, Homo sapiens
aacaaaaaaaaaatc

SEQ ID NO: 757434 - DNA, 15 bp, Homo sapiens
acaaaaaaaaaatca

SEQ ID NO: 757435 - DNA, 15 bp, Homo sapiens
caaaaaaaaaatcaa

SEQ ID NO: 757436 - DNA, 15 bp, Homo sapiens
aaaaaaaaaatcaat

SEQ ID NO: 757437 - DNA, 15 bp, Homo sapiens
aaaaaaaaatcaatt

SEQ ID NO: 757438 - DNA, 15 bp, Homo sapiens
aaaaaaaatcaatta

SEQ ID NO: 757439 - DNA, 15 bp, Homo sapiens
aaaaaaatcaattat

SEQ ID NO: 757440 - DNA, 15 bp, Homo sapiens
aaaaaatcaattatc

SEQ ID NO: 757441 - DNA, 15 bp, Homo sapiens
aaaaatcaattatct

SEQ ID NO: 757442 - DNA, 15 bp, Homo sapiens
aaaatcaattatctt

SEQ ID NO: 757443 - DNA, 15 bp, Homo sapiens
aaatcaattatcttc

SEQ ID NO: 757444 - DNA, 15 bp, Homo sapiens
aatcaattatcttct

SEQ ID NO: 757445 - DNA, 15 bp, Homo sapiens
atcaattatcttctc

SEQ ID NO: 757446 - DNA, 15 bp, Homo sapiens
tcaattatcttctca

SEQ ID NO: 757447 - DNA, 15 bp, Homo sapiens
caattatcttctcag

SEQ ID NO: 757448 - DNA, 15 bp, Homo sapiens
aattatcttctcagt

SEQ ID NO: 757449 - DNA, 15 bp, Homo sapiens
attatcttctcagtg

SEQ ID NO: 757450 - DNA, 15 bp, Homo sapiens
ttatcttctcagtgg

SEQ ID NO: 757451 - DNA, 15 bp, Homo sapiens
tatcttctcagtgga

SEQ ID NO: 757452 - DNA, 15 bp, Homo sapiens
atcttctcagtggag

SEQ ID NO: 757453 - DNA, 15 bp, Homo sapiens
tcttctcagtggagt

SEQ ID NO: 757454 - DNA, 15 bp, Homo sapiens
cttctcagtggagtg

SEQ ID NO: 757455 - DNA, 15 bp, Homo sapiens
ttctcagtggagtgt

SEQ ID NO: 757456 - DNA, 15 bp, Homo sapiens
tctcagtggagtgtt

SEQ ID NO: 757457 - DNA, 15 bp, Homo sapiens
ctcagtggagtgttg

SEQ ID NO: 757458 - DNA, 15 bp, Homo sapiens
tcagtggagtgttga

SEQ ID NO: 757459 - DNA, 15 bp, Homo sapiens
cagtggagtgttgac

SEQ ID NO: 757460 - DNA, 15 bp, Homo sapiens
agtggagtgttgact

SEQ ID NO: 757461 - DNA, 15 bp, Homo sapiens
gtggagtgttgactg

SEQ ID NO: 757462 - DNA, 15 bp, Homo sapiens
tggagtgttgactga

SEQ ID NO: 757463 - DNA, 15 bp, Homo sapiens
ggagtgttgactgac

SEQ ID NO: 757464 - DNA, 15 bp, Homo sapiens
gagtgttgactgaca

SEQ ID NO: 757465 - DNA, 15 bp, Homo sapiens
agtgttgactgacac

SEQ ID NO: 757466 - DNA, 15 bp, Homo sapiens
gtgttgactgacacg

SEQ ID NO: 757467 - DNA, 15 bp, Homo sapiens
tgttgactgacacgt

SEQ ID NO: 757468 - DNA, 15 bp, Homo sapiens
gttgactgacacgtg

SEQ ID NO: 757469 - DNA, 15 bp, Homo sapiens
ttgactgacacgtgg

SEQ ID NO: 757470 - DNA, 15 bp, Homo sapiens
tgactgacacgtggg

SEQ ID NO: 757471 - DNA, 15 bp, Homo sapiens
gactgacacgtgggt

SEQ ID NO: 757472 - DNA, 15 bp, Homo sapiens
actgacacgtgggtc

SEQ ID NO: 757473 - DNA, 15 bp, Homo sapiens
ctgacacgtgggtcc

SEQ ID NO: 757474 - DNA, 15 bp, Homo sapiens
tgacacgtgggtcct

SEQ ID NO: 757475 - DNA, 15 bp, Homo sapiens
gacacgtgggtccta

SEQ ID NO: 757476 - DNA, 15 bp, Homo sapiens
acacgtgggtcctac

SEQ ID NO: 757477 - DNA, 15 bp, Homo sapiens
cacgtgggtcctacg

SEQ ID NO: 757478 - DNA, 15 bp, Homo sapiens
acgtgggtcctacgc

SEQ ID NO: 757479 - DNA, 15 bp, Homo sapiens
cgtgggtcctacgcc

SEQ ID NO: 757480 - DNA, 15 bp, Homo sapiens
gtgggtcctacgcct

SEQ ID NO: 757481 - DNA, 15 bp, Homo sapiens
tgggtcctacgcctt

SEQ ID NO: 757482 - DNA, 15 bp, Homo sapiens
gggtcctacgccttt

SEQ ID NO: 757483 - DNA, 15 bp, Homo sapiens
ggtcctacgcctttt

SEQ ID NO: 757484 - DNA, 15 bp, Homo sapiens
gtcctacgcctttta

SEQ ID NO: 757485 - DNA, 15 bp, Homo sapiens
tcctacgccttttat

SEQ ID NO: 757486 - DNA, 15 bp, Homo sapiens
cctacgccttttatg

SEQ ID NO: 757487 - DNA, 15 bp, Homo sapiens
ctacgccttttatga

SEQ ID NO: 757488 - DNA, 15 bp, Homo sapiens
tacgccttttatgag

SEQ ID NO: 757489 - DNA, 15 bp, Homo sapiens
acgccttttatgagg

SEQ ID NO: 757490 - DNA, 15 bp, Homo sapiens
cgccttttatgaggc

SEQ ID NO: 757491 - DNA, 15 bp, Homo sapiens
gccttttatgaggct

SEQ ID NO: 757492 - DNA, 15 bp, Homo sapiens
ccttttatgaggctg

SEQ ID NO: 757493 - DNA, 15 bp, Homo sapiens
cttttatgaggctgg

SEQ ID NO: 757494 - DNA, 15 bp, Homo sapiens
ttttatgaggctggc

SEQ ID NO: 757495 - DNA, 15 bp, Homo sapiens
tttatgaggctggcc

SEQ ID NO: 757496 - DNA, 15 bp, Homo sapiens
ttatgaggctggcct

SEQ ID NO: 757497 - DNA, 15 bp, Homo sapiens
tatgaggctggcctt

SEQ ID NO: 757498 - DNA, 15 bp, Homo sapiens
atgaggctggccttc

SEQ ID NO: 757499 - DNA, 15 bp, Homo sapiens
tgaggctggccttca

SEQ ID NO: 757500 - DNA, 15 bp, Homo sapiens
gaggctggccttcaa

SEQ ID NO: 757501 - DNA, 15 bp, Homo sapiens
aggctggccttcaaa

SEQ ID NO: 757502 - DNA, 15 bp, Homo sapiens
ggctggccttcaaac

SEQ ID NO: 757503 - DNA, 15 bp, Homo sapiens
gctggccttcaaaca

SEQ ID NO: 757504 - DNA, 15 bp, Homo sapiens
ctggccttcaaacac

SEQ ID NO: 757505 - DNA, 15 bp, Homo sapiens
tggccttcaaacaca

SEQ ID NO: 757506 - DNA, 15 bp, Homo sapiens
ggccttcaaacacag

SEQ ID NO: 757507 - DNA, 15 bp, Homo sapiens
gccttcaaacacagc

SEQ ID NO: 757508 - DNA, 15 bp, Homo sapiens
ccttcaaacacagct

SEQ ID NO: 757509 - DNA, 15 bp, Homo sapiens
cttcaaacacagctg

SEQ ID NO: 757510 - DNA, 15 bp, Homo sapiens
ttcaaacacagctgc

SEQ ID NO: 757511 - DNA, 15 bp, Homo sapiens
tcaaacacagctgca

SEQ ID NO: 757512 - DNA, 15 bp, Homo sapiens
caaacacagctgcat

SEQ ID NO: 757513 - DNA, 15 bp, Homo sapiens
aaacacagctgcatc

SEQ ID NO: 757514 - DNA, 15 bp, Homo sapiens
aacacagctgcatct

SEQ ID NO: 757515 - DNA, 15 bp, Homo sapiens
acacagctgcatctt

SEQ ID NO: 757516 - DNA, 15 bp, Homo sapiens
cacagctgcatcttt

SEQ ID NO: 757517 - DNA, 15 bp, Homo sapiens
acagctgcatctttg

SEQ ID NO: 757518 - DNA, 15 bp, Homo sapiens
cagctgcatctttgg

SEQ ID NO: 757519 - DNA, 15 bp, Homo sapiens
agctgcatctttggt

SEQ ID NO: 757520 - DNA, 15 bp, Homo sapiens
gctgcatctttggtg

SEQ ID NO: 757521 - DNA, 15 bp, Homo sapiens
ctgcatctttggtga

SEQ ID NO: 757522 - DNA, 15 bp, Homo sapiens
tgcatctttggtgat

SEQ ID NO: 757523 - DNA, 15 bp, Homo sapiens
gcatctttggtgata

SEQ ID NO: 757524 - DNA, 15 bp, Homo sapiens
catctttggtgatat

SEQ ID NO: 757525 - DNA, 15 bp, Homo sapiens
atctttggtgatatt

SEQ ID NO: 757526 - DNA, 15 bp, Homo sapiens
tctttggtgatattt

SEQ ID NO: 757527 - DNA, 15 bp, Homo sapiens
ctttggtgatatttc

SEQ ID NO: 757528 - DNA, 15 bp, Homo sapiens
tttggtgatatttca

SEQ ID NO: 757529 - DNA, 15 bp, Homo sapiens
ttggtgatatttcag

SEQ ID NO: 757530 - DNA, 15 bp, Homo sapiens
tggtgatatttcaga

SEQ ID NO: 757531 - DNA, 15 bp, Homo sapiens
ggtgatatttcagaa

SEQ ID NO: 757532 - DNA, 15 bp, Homo sapiens
gtgatatttcagaaa

SEQ ID NO: 757533 - DNA, 15 bp, Homo sapiens
tgatatttcagaaag

SEQ ID NO: 757534 - DNA, 15 bp, Homo sapiens
gatatttcagaaagc

SEQ ID NO: 757535 - DNA, 15 bp, Homo sapiens
atatttcagaaagcg

SEQ ID NO: 757536 - DNA, 15 bp, Homo sapiens
tatttcagaaagcgt

SEQ ID NO: 757537 - DNA, 15 bp, Homo sapiens
atttcagaaagcgtg

SEQ ID NO: 757538 - DNA, 15 bp, Homo sapiens
tttcagaaagcgtga

SEQ ID NO: 757539 - DNA, 15 bp, Homo sapiens
ttcagaaagcgtgag

SEQ ID NO: 757540 - DNA, 15 bp, Homo sapiens
tcagaaagcgtgagg

SEQ ID NO: 757541 - DNA, 15 bp, Homo sapiens
cagaaagcgtgaggt

SEQ ID NO: 757542 - DNA, 15 bp, Homo sapiens
agaaagcgtgaggtg

SEQ ID NO: 757543 - DNA, 15 bp, Homo sapiens
gaaagcgtgaggtgg

SEQ ID NO: 757544 - DNA, 15 bp, Homo sapiens
aaagcgtgaggtggg

SEQ ID NO: 757545 - DNA, 15 bp, Homo sapiens
aagcgtgaggtggga

SEQ ID NO: 757546 - DNA, 15 bp, Homo sapiens
agcgtgaggtgggaa

SEQ ID NO: 757547 - DNA, 15 bp, Homo sapiens
gcgtgaggtgggaaa

SEQ ID NO: 757548 - DNA, 15 bp, Homo sapiens
cgtgaggtgggaaat

SEQ ID NO: 757549 - DNA, 15 bp, Homo sapiens
gtgaggtgggaaata

SEQ ID NO: 757550 - DNA, 15 bp, Homo sapiens
tgaggtgggaaataa

SEQ ID NO: 757551 - DNA, 15 bp, Homo sapiens
gaggtgggaaataat

SEQ ID NO: 757552 - DNA, 15 bp, Homo sapiens
aggtgggaaataatc

SEQ ID NO: 757553 - DNA, 15 bp, Homo sapiens
ggtgggaaataatcc

SEQ ID NO: 757554 - DNA, 15 bp, Homo sapiens
gtgggaaataatccc

SEQ ID NO: 757555 - DNA, 15 bp, Homo sapiens
tgggaaataatccct

SEQ ID NO: 757556 - DNA, 15 bp, Homo sapiens
gggaaataatccctg

SEQ ID NO: 757557 - DNA, 15 bp, Homo sapiens
ggaaataatccctgt

SEQ ID NO: 757558 - DNA, 15 bp, Homo sapiens
gaaataatccctgtt

SEQ ID NO: 757559 - DNA, 15 bp, Homo sapiens
aaataatccctgttt

SEQ ID NO: 757560 - DNA, 15 bp, Homo sapiens
aataatccctgtttt

SEQ ID NO: 757561 - DNA, 15 bp, Homo sapiens
ataatccctgttttg

SEQ ID NO: 757562 - DNA, 15 bp, Homo sapiens
taatccctgttttgc

SEQ ID NO: 757563 - DNA, 15 bp, Homo sapiens
aatccctgttttgca

SEQ ID NO: 757564 - DNA, 15 bp, Homo sapiens
atccctgttttgcaa

SEQ ID NO: 757565 - DNA, 15 bp, Homo sapiens
tccctgttttgcaag

SEQ ID NO: 757566 - DNA, 15 bp, Homo sapiens
ccctgttttgcaagt

SEQ ID NO: 757567 - DNA, 15 bp, Homo sapiens
cctgttttgcaagtc

SEQ ID NO: 757568 - DNA, 15 bp, Homo sapiens
ctgttttgcaagtca

SEQ ID NO: 757569 - DNA, 15 bp, Homo sapiens
tgttttgcaagtcaa

SEQ ID NO: 757570 - DNA, 15 bp, Homo sapiens
gttttgcaagtcaag

SEQ ID NO: 757571 - DNA, 15 bp, Homo sapiens
ttttgcaagtcaagg

SEQ ID NO: 757572 - DNA, 15 bp, Homo sapiens
tttgcaagtcaagga

SEQ ID NO: 757573 - DNA, 15 bp, Homo sapiens
ttgcaagtcaaggat

SEQ ID NO: 757574 - DNA, 15 bp, Homo sapiens
tgcaagtcaaggatg

SEQ ID NO: 757575 - DNA, 15 bp, Homo sapiens
gcaagtcaaggatgg

SEQ ID NO: 757576 - DNA, 15 bp, Homo sapiens
caagtcaaggatgga

SEQ ID NO: 757577 - DNA, 15 bp, Homo sapiens
aagtcaaggatggag

SEQ ID NO: 757578 - DNA, 15 bp, Homo sapiens
agtcaaggatggaga

SEQ ID NO: 757579 - DNA, 15 bp, Homo sapiens
gtcaaggatggagaa

SEQ ID NO: 757580 - DNA, 15 bp, Homo sapiens
tcaaggatggagaag

SEQ ID NO: 757581 - DNA, 15 bp, Homo sapiens
caaggatggagaagg

SEQ ID NO: 757582 - DNA, 15 bp, Homo sapiens
aaggatggagaagga

SEQ ID NO: 757583 - DNA, 15 bp, Homo sapiens
aggatggagaaggag

SEQ ID NO: 757584 - DNA, 15 bp, Homo sapiens
ggatggagaaggagc

SEQ ID NO: 757585 - DNA, 15 bp, Homo sapiens
gatggagaaggagcc

SEQ ID NO: 757586 - DNA, 15 bp, Homo sapiens
atggagaaggagcct

SEQ ID NO: 757587 - DNA, 15 bp, Homo sapiens
tggagaaggagcctt

SEQ ID NO: 757588 - DNA, 15 bp, Homo sapiens
ggagaaggagccttt

SEQ ID NO: 757589 - DNA, 15 bp, Homo sapiens
gagaaggagcctttc

SEQ ID NO: 757590 - DNA, 15 bp, Homo sapiens
agaaggagcctttca

SEQ ID NO: 757591 - DNA, 15 bp, Homo sapiens
gaaggagcctttcat

SEQ ID NO: 757592 - DNA, 15 bp, Homo sapiens
aaggagcctttcatc

SEQ ID NO: 757593 - DNA, 15 bp, Homo sapiens
aggagcctttcatct

SEQ ID NO: 757594 - DNA, 15 bp, Homo sapiens
ggagcctttcatctc

SEQ ID NO: 757595 - DNA, 15 bp, Homo sapiens
gagcctttcatctct

SEQ ID NO: 757596 - DNA, 15 bp, Homo sapiens
agcctttcatctctg

SEQ ID NO: 757597 - DNA, 15 bp, Homo sapiens
gcctttcatctctgg

SEQ ID NO: 757598 - DNA, 15 bp, Homo sapiens
cctttcatctctgga

SEQ ID NO: 757599 - DNA, 15 bp, Homo sapiens
ctttcatctctggat

SEQ ID NO: 757600 - DNA, 15 bp, Homo sapiens
tttcatctctggata

SEQ ID NO: 757601 - DNA, 15 bp, Homo sapiens
ttcatctctggatag

SEQ ID NO: 757602 - DNA, 15 bp, Homo sapiens
tcatctctggataga

SEQ ID NO: 757603 - DNA, 15 bp, Homo sapiens
catctctggatagag

SEQ ID NO: 757604 - DNA, 15 bp, Homo sapiens
atctctggatagaga

SEQ ID NO: 757605 - DNA, 15 bp, Homo sapiens
tctctggatagagat

SEQ ID NO: 757606 - DNA, 15 bp, Homo sapiens
ctctggatagagatg

SEQ ID NO: 757607 - DNA, 15 bp, Homo sapiens
tctggatagagatgg

SEQ ID NO: 757608 - DNA, 15 bp, Homo sapiens
ctggatagagatggt

SEQ ID NO: 757609 - DNA, 15 bp, Homo sapiens
tggatagagatggtg

SEQ ID NO: 757610 - DNA, 15 bp, Homo sapiens
ggatagagatggtgt

SEQ ID NO: 757611 - DNA, 15 bp, Homo sapiens
gatagagatggtgtg

SEQ ID NO: 757612 - DNA, 15 bp, Homo sapiens
atagagatggtgtgt

SEQ ID NO: 757613 - DNA, 15 bp, Homo sapiens
tagagatggtgtgtg

SEQ ID NO: 757614 - DNA, 15 bp, Homo sapiens
agagatggtgtgtgg

SEQ ID NO: 757615 - DNA, 15 bp, Homo sapiens
gagatggtgtgtgga

SEQ ID NO: 757616 - DNA, 15 bp, Homo sapiens
agatggtgtgtggat

SEQ ID NO: 757617 - DNA, 15 bp, Homo sapiens
gatggtgtgtggata

SEQ ID NO: 757618 - DNA, 15 bp, Homo sapiens
atggtgtgtggatat

SEQ ID NO: 757619 - DNA, 15 bp, Homo sapiens
tggtgtgtggatatc

SEQ ID NO: 757620 - DNA, 15 bp, Homo sapiens
ggtgtgtggatatca

SEQ ID NO: 757621 - DNA, 15 bp, Homo sapiens
gtgtgtggatatcac

SEQ ID NO: 757622 - DNA, 15 bp, Homo sapiens
tgtgtggatatcacc

SEQ ID NO: 757623 - DNA, 15 bp, Homo sapiens
gtgtggatatcacca

SEQ ID NO: 757624 - DNA, 15 bp, Homo sapiens
tgtggatatcaccag

SEQ ID NO: 757625 - DNA, 15 bp, Homo sapiens
gtggatatcaccagc

SEQ ID NO: 757626 - DNA, 15 bp, Homo sapiens
tggatatcaccagct

SEQ ID NO: 757627 - DNA, 15 bp, Homo sapiens
ggatatcaccagctg

SEQ ID NO: 757628 - DNA, 15 bp, Homo sapiens
gatatcaccagctgc

SEQ ID NO: 757629 - DNA, 15 bp, Homo sapiens
atatcaccagctgcc

SEQ ID NO: 757630 - DNA, 15 bp, Homo sapiens
tatcaccagctgcca

SEQ ID NO: 757631 - DNA, 15 bp, Homo sapiens
atcaccagctgccaa

SEQ ID NO: 757632 - DNA, 15 bp, Homo sapiens
tcaccagctgccaat

SEQ ID NO: 757633 - DNA, 15 bp, Homo sapiens
caccagctgccaatg

SEQ ID NO: 757634 - DNA, 15 bp, Homo sapiens
accagctgccaatgg

SEQ ID NO: 757635 - DNA, 15 bp, Homo sapiens
ccagctgccaatgga

SEQ ID NO: 757636 - DNA, 15 bp, Homo sapiens
cagctgccaatggag

SEQ ID NO: 757637 - DNA, 15 bp, Homo sapiens
agctgccaatggagg

SEQ ID NO: 757638 - DNA, 15 bp, Homo sapiens
gctgccaatggaggg

SEQ ID NO: 757639 - DNA, 15 bp, Homo sapiens
ctgccaatggagggg

SEQ ID NO: 757640 - DNA, 15 bp, Homo sapiens
tgccaatggaggggt

SEQ ID NO: 757641 - DNA, 15 bp, Homo sapiens
gccaatggaggggtc

SEQ ID NO: 757642 - DNA, 15 bp, Homo sapiens
ccaatggaggggtca

SEQ ID NO: 757643 - DNA, 15 bp, Homo sapiens
caatggaggggtcag

SEQ ID NO: 757644 - DNA, 15 bp, Homo sapiens
aatggaggggtcagt

SEQ ID NO: 757645 - DNA, 15 bp, Homo sapiens
atggaggggtcagtg

SEQ ID NO: 757646 - DNA, 15 bp, Homo sapiens
tggaggggtcagtgc

SEQ ID NO: 757647 - DNA, 15 bp, Homo sapiens
ggaggggtcagtgct

SEQ ID NO: 757648 - DNA, 15 bp, Homo sapiens
gaggggtcagtgctg

SEQ ID NO: 757649 - DNA, 15 bp, Homo sapiens
aggggtcagtgctgt

SEQ ID NO: 757650 - DNA, 15 bp, Homo sapiens
ggggtcagtgctgtt

SEQ ID NO: 757651 - DNA, 15 bp, Homo sapiens
gggtcagtgctgtta

SEQ ID NO: 757652 - DNA, 15 bp, Homo sapiens
ggtcagtgctgttat

SEQ ID NO: 757653 - DNA, 15 bp, Homo sapiens
gtcagtgctgttatt

SEQ ID NO: 757654 - DNA, 15 bp, Homo sapiens
tcagtgctgttattc

SEQ ID NO: 757655 - DNA, 15 bp, Homo sapiens
cagtgctgttattct

SEQ ID NO: 757656 - DNA, 15 bp, Homo sapiens
agtgctgttattctc

SEQ ID NO: 757657 - DNA, 15 bp, Homo sapiens
gtgctgttattctct

SEQ ID NO: 757658 - DNA, 15 bp, Homo sapiens
tgctgttattctctt

SEQ ID NO: 757659 - DNA, 15 bp, Homo sapiens
gctgttattctcttt

SEQ ID NO: 757660 - DNA, 15 bp, Homo sapiens
ctgttattctctttc

SEQ ID NO: 757661 - DNA, 15 bp, Homo sapiens
tgttattctctttcc

SEQ ID NO: 757662 - DNA, 15 bp, Homo sapiens
gttattctctttcct

SEQ ID NO: 757663 - DNA, 15 bp, Homo sapiens
ttattctctttccta

SEQ ID NO: 757664 - DNA, 15 bp, Homo sapiens
tattctctttcctaa

SEQ ID NO: 757665 - DNA, 15 bp, Homo sapiens
attctctttcctaaa

SEQ ID NO: 757666 - DNA, 15 bp, Homo sapiens
ttctctttcctaaag

SEQ ID NO: 757667 - DNA, 15 bp, Homo sapiens
tctctttcctaaagc

SEQ ID NO: 757668 - DNA, 15 bp, Homo sapiens
ctctttcctaaagca

SEQ ID NO: 757669 - DNA, 15 bp, Homo sapiens
tctttcctaaagcaa

SEQ ID NO: 757670 - DNA, 15 bp, Homo sapiens
ctttcctaaagcaac

SEQ ID NO: 757671 - DNA, 15 bp, Homo sapiens
tttcctaaagcaact

SEQ ID NO: 757672 - DNA, 15 bp, Homo sapiens
ttcctaaagcaactc

SEQ ID NO: 757673 - DNA, 15 bp, Homo sapiens
tcctaaagcaactcg

SEQ ID NO: 757674 - DNA, 15 bp, Homo sapiens
cctaaagcaactcgg

SEQ ID NO: 757675 - DNA, 15 bp, Homo sapiens
ctaaagcaactcggg

SEQ ID NO: 757676 - DNA, 15 bp, Homo sapiens
taaagcaactcgggg

SEQ ID NO: 757677 - DNA, 15 bp, Homo sapiens
aaagcaactcggggg

SEQ ID NO: 757678 - DNA, 15 bp, Homo sapiens
aagcaactcgggggt

SEQ ID NO: 757679 - DNA, 15 bp, Homo sapiens
agcaactcgggggtg

SEQ ID NO: 757680 - DNA, 15 bp, Homo sapiens
gcaactcgggggtga

SEQ ID NO: 757681 - DNA, 15 bp, Homo sapiens
caactcgggggtgat

SEQ ID NO: 757682 - DNA, 15 bp, Homo sapiens
aactcgggggtgatg

SEQ ID NO: 757683 - DNA, 15 bp, Homo sapiens
actcgggggtgatgg

SEQ ID NO: 757684 - DNA, 15 bp, Homo sapiens
ctcgggggtgatgga

SEQ ID NO: 757685 - DNA, 15 bp, Homo sapiens
tcgggggtgatggag

SEQ ID NO: 757686 - DNA, 15 bp, Homo sapiens
cgggggtgatggaga

SEQ ID NO: 757687 - DNA, 15 bp, Homo sapiens
gggggtgatggagaa

SEQ ID NO: 757688 - DNA, 15 bp, Homo sapiens
ggggtgatggagaag

SEQ ID NO: 757689 - DNA, 15 bp, Homo sapiens
gggtgatggagaagg

SEQ ID NO: 757690 - DNA, 15 bp, Homo sapiens
ggtgatggagaaggt

SEQ ID NO: 757691 - DNA, 15 bp, Homo sapiens
gtgatggagaaggtt

SEQ ID NO: 757692 - DNA, 15 bp, Homo sapiens
tgatggagaaggttg

SEQ ID NO: 757693 - DNA, 15 bp, Homo sapiens
gatggagaaggttgc

SEQ ID NO: 757694 - DNA, 15 bp, Homo sapiens
atggagaaggttgcc

SEQ ID NO: 757695 - DNA, 15 bp, Homo sapiens
tggagaaggttgcct

SEQ ID NO: 757696 - DNA, 15 bp, Homo sapiens
ggagaaggttgcctt

SEQ ID NO: 757697 - DNA, 15 bp, Homo sapiens
gagaaggttgcctta

SEQ ID NO: 757698 - DNA, 15 bp, Homo sapiens
agaaggttgccttaa

SEQ ID NO: 757699 - DNA, 15 bp, Homo sapiens
gaaggttgccttaat

SEQ ID NO: 757700 - DNA, 15 bp, Homo sapiens
aaggttgccttaatc

SEQ ID NO: 757701 - DNA, 15 bp, Homo sapiens
aggttgccttaatcc

SEQ ID NO: 757702 - DNA, 15 bp, Homo sapiens
ggttgccttaatccc

SEQ ID NO: 757703 - DNA, 15 bp, Homo sapiens
gttgccttaatcccc

SEQ ID NO: 757704 - DNA, 15 bp, Homo sapiens
ttgccttaatcccct

SEQ ID NO: 757705 - DNA, 15 bp, Homo sapiens
tgccttaatcccctc

SEQ ID NO: 757706 - DNA, 15 bp, Homo sapiens
gccttaatcccctct

SEQ ID NO: 757707 - DNA, 15 bp, Homo sapiens
ccttaatcccctctg

SEQ ID NO: 757708 - DNA, 15 bp, Homo sapiens
cttaatcccctctga

SEQ ID NO: 757709 - DNA, 15 bp, Homo sapiens
ttaatcccctctgag

SEQ ID NO: 757710 - DNA, 15 bp, Homo sapiens
taatcccctctgagc

SEQ ID NO: 757711 - DNA, 15 bp, Homo sapiens
aatcccctctgagca

SEQ ID NO: 757712 - DNA, 15 bp, Homo sapiens
atcccctctgagcat

SEQ ID NO: 757713 - DNA, 15 bp, Homo sapiens
tcccctctgagcatt

SEQ ID NO: 757714 - DNA, 15 bp, Homo sapiens
cccctctgagcattt

SEQ ID NO: 757715 - DNA, 15 bp, Homo sapiens
ccctctgagcatttc

SEQ ID NO: 757716 - DNA, 15 bp, Homo sapiens
cctctgagcatttca

SEQ ID NO: 757717 - DNA, 15 bp, Homo sapiens
ctctgagcatttcac

SEQ ID NO: 757718 - DNA, 15 bp, Homo sapiens
tctgagcatttcact

SEQ ID NO: 757719 - DNA, 15 bp, Homo sapiens
ctgagcatttcactg

SEQ ID NO: 757720 - DNA, 15 bp, Homo sapiens
tgagcatttcactgg

SEQ ID NO: 757721 - DNA, 15 bp, Homo sapiens
gagcatttcactggc

SEQ ID NO: 757722 - DNA, 15 bp, Homo sapiens
agcatttcactggct

SEQ ID NO: 757723 - DNA, 15 bp, Homo sapiens
gcatttcactggctg

SEQ ID NO: 757724 - DNA, 15 bp, Homo sapiens
catttcactggctga

SEQ ID NO: 757725 - DNA, 15 bp, Homo sapiens
atttcactggctgat

SEQ ID NO: 757726 - DNA, 15 bp, Homo sapiens
tttcactggctgatg

SEQ ID NO: 757727 - DNA, 15 bp, Homo sapiens
ttcactggctgatgt

SEQ ID NO: 757728 - DNA, 15 bp, Homo sapiens
tcactggctgatgtg

SEQ ID NO: 757729 - DNA, 15 bp, Homo sapiens
cactggctgatgtgg

SEQ ID NO: 757730 - DNA, 15 bp, Homo sapiens
actggctgatgtgga

SEQ ID NO: 757731 - DNA, 15 bp, Homo sapiens
ctggctgatgtggac

SEQ ID NO: 757732 - DNA, 15 bp, Homo sapiens
tggctgatgtggact

SEQ ID NO: 757733 - DNA, 15 bp, Homo sapiens
ggctgatgtggactc

SEQ ID NO: 757734 - DNA, 15 bp, Homo sapiens
gctgatgtggactca

SEQ ID NO: 757735 - DNA, 15 bp, Homo sapiens
ctgatgtggactcat

SEQ ID NO: 757736 - DNA, 15 bp, Homo sapiens
tgatgtggactcatg

SEQ ID NO: 757737 - DNA, 15 bp, Homo sapiens
gatgtggactcatgg

SEQ ID NO: 757738 - DNA, 15 bp, Homo sapiens
atgtggactcatgga

SEQ ID NO: 757739 - DNA, 15 bp, Homo sapiens
tgtggactcatggaa

SEQ ID NO: 757740 - DNA, 15 bp, Homo sapiens
gtggactcatggaaa

SEQ ID NO: 757741 - DNA, 15 bp, Homo sapiens
tggactcatggaaaa

SEQ ID NO: 757742 - DNA, 15 bp, Homo sapiens
ggactcatggaaaat

SEQ ID NO: 757743 - DNA, 15 bp, Homo sapiens
gactcatggaaaatg

SEQ ID NO: 757744 - DNA, 15 bp, Homo sapiens
actcatggaaaatgt

SEQ ID NO: 757745 - DNA, 15 bp, Homo sapiens
ctcatggaaaatgtc

SEQ ID NO: 757746 - DNA, 15 bp, Homo sapiens
tcatggaaaatgtca

SEQ ID NO: 757747 - DNA, 15 bp, Homo sapiens
catggaaaatgtcag

SEQ ID NO: 757748 - DNA, 15 bp, Homo sapiens
atggaaaatgtcagc

SEQ ID NO: 757749 - DNA, 15 bp, Homo sapiens
tggaaaatgtcagcg

SEQ ID NO: 757750 - DNA, 15 bp, Homo sapiens
ggaaaatgtcagcgt

SEQ ID NO: 757751 - DNA, 15 bp, Homo sapiens
gaaaatgtcagcgtg

SEQ ID NO: 757752 - DNA, 15 bp, Homo sapiens
aaaatgtcagcgtgc

SEQ ID NO: 757753 - DNA, 15 bp, Homo sapiens
aaatgtcagcgtgct

SEQ ID NO: 757754 - DNA, 15 bp, Homo sapiens
aatgtcagcgtgctg

SEQ ID NO: 757755 - DNA, 15 bp, Homo sapiens
atgtcagcgtgctgg

SEQ ID NO: 757756 - DNA, 15 bp, Homo sapiens
tgtcagcgtgctggc

SEQ ID NO: 757757 - DNA, 15 bp, Homo sapiens
gtcagcgtgctggcc

SEQ ID NO: 757758 - DNA, 15 bp, Homo sapiens
tcagcgtgctggccc

SEQ ID NO: 757759 - DNA, 15 bp, Homo sapiens
cagcgtgctggccca

SEQ ID NO: 757760 - DNA, 15 bp, Homo sapiens
agcgtgctggcccag

SEQ ID NO: 757761 - DNA, 15 bp, Homo sapiens
gcgtgctggcccagg

SEQ ID NO: 757762 - DNA, 15 bp, Homo sapiens
cgtgctggcccaggc

SEQ ID NO: 757763 - DNA, 15 bp, Homo sapiens
gtgctggcccaggcc

SEQ ID NO: 757764 - DNA, 15 bp, Homo sapiens
tgctggcccaggcca

SEQ ID NO: 757765 - DNA, 15 bp, Homo sapiens
gctggcccaggccag

SEQ ID NO: 757766 - DNA, 15 bp, Homo sapiens
ctggcccaggccagg

SEQ ID NO: 757767 - DNA, 15 bp, Homo sapiens
tggcccaggccaggc

SEQ ID NO: 757768 - DNA, 15 bp, Homo sapiens
ggcccaggccaggcg

SEQ ID NO: 757769 - DNA, 15 bp, Homo sapiens
gcccaggccaggcgg

SEQ ID NO: 757770 - DNA, 15 bp, Homo sapiens
cccaggccaggcggg

SEQ ID NO: 757771 - DNA, 15 bp, Homo sapiens
ccaggccaggcgggc

SEQ ID NO: 757772 - DNA, 15 bp, Homo sapiens
caggccaggcgggct

SEQ ID NO: 757773 - DNA, 15 bp, Homo sapiens
aggccaggcgggctg

SEQ ID NO: 757774 - DNA, 15 bp, Homo sapiens
ggccaggcgggctga

SEQ ID NO: 757775 - DNA, 15 bp, Homo sapiens
gccaggcgggctgaa

SEQ ID NO: 757776 - DNA, 15 bp, Homo sapiens
ccaggcgggctgaag

SEQ ID NO: 757777 - DNA, 15 bp, Homo sapiens
caggcgggctgaagc

SEQ ID NO: 757778 - DNA, 15 bp, Homo sapiens
aggcgggctgaagcc

SEQ ID NO: 757779 - DNA, 15 bp, Homo sapiens
ggcgggctgaagcca

SEQ ID NO: 757780 - DNA, 15 bp, Homo sapiens
gcgggctgaagccag

SEQ ID NO: 757781 - DNA, 15 bp, Homo sapiens
cgggctgaagccagt

SEQ ID NO: 757782 - DNA, 15 bp, Homo sapiens
gggctgaagccagtg

SEQ ID NO: 757783 - DNA, 15 bp, Homo sapiens
ggctgaagccagtgt

SEQ ID NO: 757784 - DNA, 15 bp, Homo sapiens
gctgaagccagtgtg

SEQ ID NO: 757785 - DNA, 15 bp, Homo sapiens
ctgaagccagtgtgt

SEQ ID NO: 757786 - DNA, 15 bp, Homo sapiens
tgaagccagtgtgtc

SEQ ID NO: 757787 - DNA, 15 bp, Homo sapiens
gaagccagtgtgtct

SEQ ID NO: 757788 - DNA, 15 bp, Homo sapiens
aagccagtgtgtctt

SEQ ID NO: 757789 - DNA, 15 bp, Homo sapiens
agccagtgtgtctta

SEQ ID NO: 757790 - DNA, 15 bp, Homo sapiens
gccagtgtgtcttac

SEQ ID NO: 757791 - DNA, 15 bp, Homo sapiens
ccagtgtgtcttaca

SEQ ID NO: 757792 - DNA, 15 bp, Homo sapiens
cagtgtgtcttacag

SEQ ID NO: 757793 - DNA, 15 bp, Homo sapiens
agtgtgtcttacagc

SEQ ID NO: 757794 - DNA, 15 bp, Homo sapiens
gtgtgtcttacagct

SEQ ID NO: 757795 - DNA, 15 bp, Homo sapiens
tgtgtcttacagctc

SEQ ID NO: 757796 - DNA, 15 bp, Homo sapiens
gtgtcttacagctct

SEQ ID NO: 757797 - DNA, 15 bp, Homo sapiens
tgtcttacagctctg

SEQ ID NO: 757798 - DNA, 15 bp, Homo sapiens
gtcttacagctctgt

SEQ ID NO: 757799 - DNA, 15 bp, Homo sapiens
tcttacagctctgtg

SEQ ID NO: 757800 - DNA, 15 bp, Homo sapiens
cttacagctctgtgg

SEQ ID NO: 757801 - DNA, 15 bp, Homo sapiens
ttacagctctgtgga

SEQ ID NO: 757802 - DNA, 15 bp, Homo sapiens
tacagctctgtggag

SEQ ID NO: 757803 - DNA, 15 bp, Homo sapiens
acagctctgtggagc

SEQ ID NO: 757804 - DNA, 15 bp, Homo sapiens
cagctctgtggagca

SEQ ID NO: 757805 - DNA, 15 bp, Homo sapiens
agctctgtggagcag

SEQ ID NO: 757806 - DNA, 15 bp, Homo sapiens
gctctgtggagcaga

SEQ ID NO: 757807 - DNA, 15 bp, Homo sapiens
ctctgtggagcagac

SEQ ID NO: 757808 - DNA, 15 bp, Homo sapiens
tctgtggagcagacg

SEQ ID NO: 757809 - DNA, 15 bp, Homo sapiens
ctgtggagcagacgt

SEQ ID NO: 757810 - DNA, 15 bp, Homo sapiens
tgtggagcagacgtg

SEQ ID NO: 757811 - DNA, 15 bp, Homo sapiens
gtggagcagacgtgg

SEQ ID NO: 757812 - DNA, 15 bp, Homo sapiens
tggagcagacgtggt

SEQ ID NO: 757813 - DNA, 15 bp, Homo sapiens
ggagcagacgtggtg

SEQ ID NO: 757814 - DNA, 15 bp, Homo sapiens
gagcagacgtggtgt

SEQ ID NO: 757815 - DNA, 15 bp, Homo sapiens
agcagacgtggtgtg

SEQ ID NO: 757816 - DNA, 15 bp, Homo sapiens
gcagacgtggtgtgt

SEQ ID NO: 757817 - DNA, 15 bp, Homo sapiens
cagacgtggtgtgtg

SEQ ID NO: 757818 - DNA, 15 bp, Homo sapiens
agacgtggtgtgtgg

SEQ ID NO: 757819 - DNA, 15 bp, Homo sapiens
gacgtggtgtgtggc

SEQ ID NO: 757820 - DNA, 15 bp, Homo sapiens
acgtggtgtgtggct

SEQ ID NO: 757821 - DNA, 15 bp, Homo sapiens
cgtggtgtgtggctt

SEQ ID NO: 757822 - DNA, 15 bp, Homo sapiens
gtggtgtgtggcttg

SEQ ID NO: 757823 - DNA, 15 bp, Homo sapiens
tggtgtgtggcttga

SEQ ID NO: 757824 - DNA, 15 bp, Homo sapiens
ggtgtgtggcttgaa

SEQ ID NO: 757825 - DNA, 15 bp, Homo sapiens
gtgtgtggcttgaat

SEQ ID NO: 757826 - DNA, 15 bp, Homo sapiens
tgtgtggcttgaatg

SEQ ID NO: 757827 - DNA, 15 bp, Homo sapiens
gtgtggcttgaatgg

SEQ ID NO: 757828 - DNA, 15 bp, Homo sapiens
tgtggcttgaatgga

SEQ ID NO: 757829 - DNA, 15 bp, Homo sapiens
gtggcttgaatggaa

SEQ ID NO: 757830 - DNA, 15 bp, Homo sapiens
tggcttgaatggaaa

SEQ ID NO: 757831 - DNA, 15 bp, Homo sapiens
ggcttgaatggaaag

SEQ ID NO: 757832 - DNA, 15 bp, Homo sapiens
gcttgaatggaaagg

SEQ ID NO: 757833 - DNA, 15 bp, Homo sapiens
cttgaatggaaaggt

SEQ ID NO: 757834 - DNA, 15 bp, Homo sapiens
ttgaatggaaaggtc

SEQ ID NO: 757835 - DNA, 15 bp, Homo sapiens
tgaatggaaaggtca

SEQ ID NO: 757836 - DNA, 15 bp, Homo sapiens
gaatggaaaggtcat

SEQ ID NO: 757837 - DNA, 15 bp, Homo sapiens
aatggaaaggtcata

SEQ ID NO: 757838 - DNA, 15 bp, Homo sapiens
atggaaaggtcataa

SEQ ID NO: 757839 - DNA, 15 bp, Homo sapiens
tggaaaggtcataaa

SEQ ID NO: 757840 - DNA, 15 bp, Homo sapiens
ggaaaggtcataaag

SEQ ID NO: 757841 - DNA, 15 bp, Homo sapiens
gaaaggtcataaagg

SEQ ID NO: 757842 - DNA, 15 bp, Homo sapiens
aaaggtcataaaggc

SEQ ID NO: 757843 - DNA, 15 bp, Homo sapiens
aaggtcataaaggcc

SEQ ID NO: 757844 - DNA, 15 bp, Homo sapiens
aggtcataaaggcct

SEQ ID NO: 757845 - DNA, 15 bp, Homo sapiens
ggtcataaaggcctg

SEQ ID NO: 757846 - DNA, 15 bp, Homo sapiens
gtcataaaggcctgg

SEQ ID NO: 757847 - DNA, 15 bp, Homo sapiens
tcataaaggcctggg

SEQ ID NO: 757848 - DNA, 15 bp, Homo sapiens
cataaaggcctggga

SEQ ID NO: 757849 - DNA, 15 bp, Homo sapiens
ataaaggcctgggac

SEQ ID NO: 757850 - DNA, 15 bp, Homo sapiens
taaaggcctgggaca

SEQ ID NO: 757851 - DNA, 15 bp, Homo sapiens
aaaggcctgggacaa

SEQ ID NO: 757852 - DNA, 15 bp, Homo sapiens
aaggcctgggacaag

SEQ ID NO: 757853 - DNA, 15 bp, Homo sapiens
aggcctgggacaagt

SEQ ID NO: 757854 - DNA, 15 bp, Homo sapiens
ggcctgggacaagtg

SEQ ID NO: 757855 - DNA, 15 bp, Homo sapiens
gcctgggacaagtga

SEQ ID NO: 757856 - DNA, 15 bp, Homo sapiens
cctgggacaagtgag

SEQ ID NO: 757857 - DNA, 15 bp, Homo sapiens
ctgggacaagtgagt

SEQ ID NO: 757858 - DNA, 15 bp, Homo sapiens
tgggacaagtgagtg

SEQ ID NO: 757859 - DNA, 15 bp, Homo sapiens
gggacaagtgagtgg

SEQ ID NO: 757860 - DNA, 15 bp, Homo sapiens
ggacaagtgagtgga

SEQ ID NO: 757861 - DNA, 15 bp, Homo sapiens
gacaagtgagtggac

SEQ ID NO: 757862 - DNA, 15 bp, Homo sapiens
acaagtgagtggacg

SEQ ID NO: 757863 - DNA, 15 bp, Homo sapiens
caagtgagtggacgg

SEQ ID NO: 757864 - DNA, 15 bp, Homo sapiens
aagtgagtggacgga

SEQ ID NO: 757865 - DNA, 15 bp, Homo sapiens
agtgagtggacggag

SEQ ID NO: 757866 - DNA, 15 bp, Homo sapiens
gtgagtggacggagc

SEQ ID NO: 757867 - DNA, 15 bp, Homo sapiens
tgagtggacggagcc

SEQ ID NO: 757868 - DNA, 15 bp, Homo sapiens
gagtggacggagcca

SEQ ID NO: 757869 - DNA, 15 bp, Homo sapiens
agtggacggagccaa

SEQ ID NO: 757870 - DNA, 15 bp, Homo sapiens
gtggacggagccaat

SEQ ID NO: 757871 - DNA, 15 bp, Homo sapiens
tggacggagccaatg

SEQ ID NO: 757872 - DNA, 15 bp, Homo sapiens
ggacggagccaatgg

SEQ ID NO: 757873 - DNA, 15 bp, Homo sapiens
gacggagccaatggc

SEQ ID NO: 757874 - DNA, 15 bp, Homo sapiens
acggagccaatggca

SEQ ID NO: 757875 - DNA, 15 bp, Homo sapiens
cggagccaatggcac

SEQ ID NO: 757876 - DNA, 15 bp, Homo sapiens
ggagccaatggcact

SEQ ID NO: 757877 - DNA, 15 bp, Homo sapiens
gagccaatggcactg

SEQ ID NO: 757878 - DNA, 15 bp, Homo sapiens
agccaatggcactgt

SEQ ID NO: 757879 - DNA, 15 bp, Homo sapiens
gccaatggcactgtc

SEQ ID NO: 757880 - DNA, 15 bp, Homo sapiens
ccaatggcactgtct

SEQ ID NO: 757881 - DNA, 15 bp, Homo sapiens
caatggcactgtctg

SEQ ID NO: 757882 - DNA, 15 bp, Homo sapiens
aatggcactgtctgg

SEQ ID NO: 757883 - DNA, 15 bp, Homo sapiens
atggcactgtctggt

SEQ ID NO: 757884 - DNA, 15 bp, Homo sapiens
tggcactgtctggta

SEQ ID NO: 757885 - DNA, 15 bp, Homo sapiens
ggcactgtctggtaa

SEQ ID NO: 757886 - DNA, 15 bp, Homo sapiens
gcactgtctggtaac

SEQ ID NO: 757887 - DNA, 15 bp, Homo sapiens
cactgtctggtaaca

SEQ ID NO: 757888 - DNA, 15 bp, Homo sapiens
actgtctggtaacac

SEQ ID NO: 757889 - DNA, 15 bp, Homo sapiens
ctgtctggtaacact

SEQ ID NO: 757890 - DNA, 15 bp, Homo sapiens
tgtctggtaacacta

SEQ ID NO: 757891 - DNA, 15 bp, Homo sapiens
gtctggtaacactat

SEQ ID NO: 757892 - DNA, 15 bp, Homo sapiens
tctggtaacactata

SEQ ID NO: 757893 - DNA, 15 bp, Homo sapiens
ctggtaacactatat

SEQ ID NO: 757894 - DNA, 15 bp, Homo sapiens
tggtaacactatatg

SEQ ID NO: 757895 - DNA, 15 bp, Homo sapiens
ggtaacactatatgg

SEQ ID NO: 757896 - DNA, 15 bp, Homo sapiens
gtaacactatatgga

SEQ ID NO: 757897 - DNA, 15 bp, Homo sapiens
taacactatatggaa

SEQ ID NO: 757898 - DNA, 15 bp, Homo sapiens
aacactatatggaag

SEQ ID NO: 757899 - DNA, 15 bp, Homo sapiens
acactatatggaaga

SEQ ID NO: 757900 - DNA, 15 bp, Homo sapiens
cactatatggaagat

SEQ ID NO: 757901 - DNA, 15 bp, Homo sapiens
actatatggaagatg

SEQ ID NO: 757902 - DNA, 15 bp, Homo sapiens
ctatatggaagatga

SEQ ID NO: 757903 - DNA, 15 bp, Homo sapiens
tatatggaagatgaa

SEQ ID NO: 757904 - DNA, 15 bp, Homo sapiens
atatggaagatgaaa

SEQ ID NO: 757905 - DNA, 15 bp, Homo sapiens
tatggaagatgaaat

SEQ ID NO: 757906 - DNA, 15 bp, Homo sapiens
atggaagatgaaatt

SEQ ID NO: 757907 - DNA, 15 bp, Homo sapiens
tggaagatgaaattg

SEQ ID NO: 757908 - DNA, 15 bp, Homo sapiens
ggaagatgaaattgt

SEQ ID NO: 757909 - DNA, 15 bp, Homo sapiens
gaagatgaaattgta

SEQ ID NO: 757910 - DNA, 15 bp, Homo sapiens
aagatgaaattgtag

SEQ ID NO: 757911 - DNA, 15 bp, Homo sapiens
agatgaaattgtagt

SEQ ID NO: 757912 - DNA, 15 bp, Homo sapiens
gatgaaattgtagtg

SEQ ID NO: 757913 - DNA, 15 bp, Homo sapiens
atgaaattgtagtgt

SEQ ID NO: 757914 - DNA, 15 bp, Homo sapiens
tgaaattgtagtgtg

SEQ ID NO: 757915 - DNA, 15 bp, Homo sapiens
gaaattgtagtgtgg

SEQ ID NO: 757916 - DNA, 15 bp, Homo sapiens
aaattgtagtgtgga

SEQ ID NO: 757917 - DNA, 15 bp, Homo sapiens
aattgtagtgtggag

SEQ ID NO: 757918 - DNA, 15 bp, Homo sapiens
attgtagtgtggagc

SEQ ID NO: 757919 - DNA, 15 bp, Homo sapiens
ttgtagtgtggagct

SEQ ID NO: 757920 - DNA, 15 bp, Homo sapiens
tgtagtgtggagctg

SEQ ID NO: 757921 - DNA, 15 bp, Homo sapiens
gtagtgtggagctga

SEQ ID NO: 757922 - DNA, 15 bp, Homo sapiens
tagtgtggagctgag

SEQ ID NO: 757923 - DNA, 15 bp, Homo sapiens
agtgtggagctgaga

SEQ ID NO: 757924 - DNA, 15 bp, Homo sapiens
gtgtggagctgagag

SEQ ID NO: 757925 - DNA, 15 bp, Homo sapiens
tgtggagctgagagg

SEQ ID NO: 757926 - DNA, 15 bp, Homo sapiens
gtggagctgagaggt

SEQ ID NO: 757927 - DNA, 15 bp, Homo sapiens
tggagctgagaggtg

SEQ ID NO: 757928 - DNA, 15 bp, Homo sapiens
ggagctgagaggtgc

SEQ ID NO: 757929 - DNA, 15 bp, Homo sapiens
gagctgagaggtgca

SEQ ID NO: 757930 - DNA, 15 bp, Homo sapiens
agctgagaggtgcag

SEQ ID NO: 757931 - DNA, 15 bp, Homo sapiens
gctgagaggtgcagg

SEQ ID NO: 757932 - DNA, 15 bp, Homo sapiens
ctgagaggtgcaggg

SEQ ID NO: 757933 - DNA, 15 bp, Homo sapiens
tgagaggtgcagggc

SEQ ID NO: 757934 - DNA, 15 bp, Homo sapiens
gagaggtgcagggct

SEQ ID NO: 757935 - DNA, 15 bp, Homo sapiens
agaggtgcagggctg

SEQ ID NO: 757936 - DNA, 15 bp, Homo sapiens
gaggtgcagggctgg

SEQ ID NO: 757937 - DNA, 15 bp, Homo sapiens
aggtgcagggctggg

SEQ ID NO: 757938 - DNA, 15 bp, Homo sapiens
ggtgcagggctgggg

SEQ ID NO: 757939 - DNA, 15 bp, Homo sapiens
gtgcagggctgggga

SEQ ID NO: 757940 - DNA, 15 bp, Homo sapiens
tgcagggctggggaa

SEQ ID NO: 757941 - DNA, 15 bp, Homo sapiens
gcagggctggggaaa

SEQ ID NO: 757942 - DNA, 15 bp, Homo sapiens
cagggctggggaaag

SEQ ID NO: 757943 - DNA, 15 bp, Homo sapiens
agggctggggaaaga

SEQ ID NO: 757944 - DNA, 15 bp, Homo sapiens
gggctggggaaagag

SEQ ID NO: 757945 - DNA, 15 bp, Homo sapiens
ggctggggaaagaga

SEQ ID NO: 757946 - DNA, 15 bp, Homo sapiens
gctggggaaagagac

SEQ ID NO: 757947 - DNA, 15 bp, Homo sapiens
ctggggaaagagacc

SEQ ID NO: 757948 - DNA, 15 bp, Homo sapiens
tggggaaagagacct

SEQ ID NO: 757949 - DNA, 15 bp, Homo sapiens
ggggaaagagacctc

SEQ ID NO: 757950 - DNA, 15 bp, Homo sapiens
gggaaagagacctca

SEQ ID NO: 757951 - DNA, 15 bp, Homo sapiens
ggaaagagacctcag

SEQ ID NO: 757952 - DNA, 15 bp, Homo sapiens
gaaagagacctcagc

SEQ ID NO: 757953 - DNA, 15 bp, Homo sapiens
aaagagacctcagca

SEQ ID NO: 757954 - DNA, 15 bp, Homo sapiens
aagagacctcagcat

SEQ ID NO: 757955 - DNA, 15 bp, Homo sapiens
agagacctcagcatt

SEQ ID NO: 757956 - DNA, 15 bp, Homo sapiens
gagacctcagcattt

SEQ ID NO: 757957 - DNA, 15 bp, Homo sapiens
agacctcagcatttt

SEQ ID NO: 757958 - DNA, 15 bp, Homo sapiens
gacctcagcattttc

SEQ ID NO: 757959 - DNA, 15 bp, Homo sapiens
acctcagcattttcc

SEQ ID NO: 757960 - DNA, 15 bp, Homo sapiens
cctcagcattttcca

SEQ ID NO: 757961 - DNA, 15 bp, Homo sapiens
ctcagcattttccat

SEQ ID NO: 757962 - DNA, 15 bp, Homo sapiens
tcagcattttccatg

SEQ ID NO: 757963 - DNA, 15 bp, Homo sapiens
cagcattttccatga

SEQ ID NO: 757964 - DNA, 15 bp, Homo sapiens
agcattttccatgat

SEQ ID NO: 757965 - DNA, 15 bp, Homo sapiens
gcattttccatgatt

SEQ ID NO: 757966 - DNA, 15 bp, Homo sapiens
cattttccatgatta

SEQ ID NO: 757967 - DNA, 15 bp, Homo sapiens
attttccatgattaa

SEQ ID NO: 757968 - DNA, 15 bp, Homo sapiens
ttttccatgattaac

SEQ ID NO: 757969 - DNA, 15 bp, Homo sapiens
tttccatgattaact

SEQ ID NO: 757970 - DNA, 15 bp, Homo sapiens
ttccatgattaactt

SEQ ID NO: 757971 - DNA, 15 bp, Homo sapiens
tccatgattaacttt

SEQ ID NO: 757972 - DNA, 15 bp, Homo sapiens
ccatgattaactttc

SEQ ID NO: 757973 - DNA, 15 bp, Homo sapiens
catgattaactttct

SEQ ID NO: 757974 - DNA, 15 bp, Homo sapiens
atgattaactttcta

SEQ ID NO: 757975 - DNA, 15 bp, Homo sapiens
tgattaactttctaa

SEQ ID NO: 757976 - DNA, 15 bp, Homo sapiens
gattaactttctaat

SEQ ID NO: 757977 - DNA, 15 bp, Homo sapiens
attaactttctaata

SEQ ID NO: 757978 - DNA, 15 bp, Homo sapiens
ttaactttctaatag

SEQ ID NO: 757979 - DNA, 15 bp, Homo sapiens
taactttctaatagt

SEQ ID NO: 757980 - DNA, 15 bp, Homo sapiens
aactttctaatagta

SEQ ID NO: 757981 - DNA, 15 bp, Homo sapiens
actttctaatagtaa

SEQ ID NO: 757982 - DNA, 15 bp, Homo sapiens
ctttctaatagtaac

SEQ ID NO: 757983 - DNA, 15 bp, Homo sapiens
tttctaatagtaacc

SEQ ID NO: 757984 - DNA, 15 bp, Homo sapiens
ttctaatagtaacca

SEQ ID NO: 757985 - DNA, 15 bp, Homo sapiens
tctaatagtaaccat

SEQ ID NO: 757986 - DNA, 15 bp, Homo sapiens
ctaatagtaaccatg

SEQ ID NO: 757987 - DNA, 15 bp, Homo sapiens
taatagtaaccatgc

SEQ ID NO: 757988 - DNA, 15 bp, Homo sapiens
aatagtaaccatgcg

SEQ ID NO: 757989 - DNA, 15 bp, Homo sapiens
atagtaaccatgcgt

SEQ ID NO: 757990 - DNA, 15 bp, Homo sapiens
tagtaaccatgcgtg

SEQ ID NO: 757991 - DNA, 15 bp, Homo sapiens
agtaaccatgcgtgg

SEQ ID NO: 757992 - DNA, 15 bp, Homo sapiens
gtaaccatgcgtgga

SEQ ID NO: 757993 - DNA, 15 bp, Homo sapiens
taaccatgcgtggac

SEQ ID NO: 757994 - DNA, 15 bp, Homo sapiens
aaccatgcgtggaca

SEQ ID NO: 757995 - DNA, 15 bp, Homo sapiens
accatgcgtggacag

SEQ ID NO: 757996 - DNA, 15 bp, Homo sapiens
ccatgcgtggacagt

SEQ ID NO: 757997 - DNA, 15 bp, Homo sapiens
catgcgtggacagtg

SEQ ID NO: 757998 - DNA, 15 bp, Homo sapiens
atgcgtggacagtgg

SEQ ID NO: 757999 - DNA, 15 bp, Homo sapiens
tgcgtggacagtggg

SEQ ID NO: 758000 - DNA, 15 bp, Homo sapiens
gcgtggacagtgggt

SEQ ID NO: 758001 - DNA, 15 bp, Homo sapiens
cgtggacagtgggtg

SEQ ID NO: 758002 - DNA, 15 bp, Homo sapiens
gtggacagtgggtgc

SEQ ID NO: 758003 - DNA, 15 bp, Homo sapiens
tggacagtgggtgct

SEQ ID NO: 758004 - DNA, 15 bp, Homo sapiens
ggacagtgggtgctg

SEQ ID NO: 758005 - DNA, 15 bp, Homo sapiens
gacagtgggtgctgg

SEQ ID NO: 758006 - DNA, 15 bp, Homo sapiens
acagtgggtgctggg

SEQ ID NO: 758007 - DNA, 15 bp, Homo sapiens
cagtgggtgctgggc

SEQ ID NO: 758008 - DNA, 15 bp, Homo sapiens
agtgggtgctgggca

SEQ ID NO: 758009 - DNA, 15 bp, Homo sapiens
gtgggtgctgggcag

SEQ ID NO: 758010 - DNA, 15 bp, Homo sapiens
tgggtgctgggcagc

SEQ ID NO: 758011 - DNA, 15 bp, Homo sapiens
gggtgctgggcagca

SEQ ID NO: 758012 - DNA, 15 bp, Homo sapiens
ggtgctgggcagcag

SEQ ID NO: 758013 - DNA, 15 bp, Homo sapiens
gtgctgggcagcagg

SEQ ID NO: 758014 - DNA, 15 bp, Homo sapiens
tgctgggcagcaggg

SEQ ID NO: 758015 - DNA, 15 bp, Homo sapiens
gctgggcagcaggga

SEQ ID NO: 758016 - DNA, 15 bp, Homo sapiens
ctgggcagcagggag

SEQ ID NO: 758017 - DNA, 15 bp, Homo sapiens
tgggcagcagggaga

SEQ ID NO: 758018 - DNA, 15 bp, Homo sapiens
gggcagcagggagac

SEQ ID NO: 758019 - DNA, 15 bp, Homo sapiens
ggcagcagggagaca

SEQ ID NO: 758020 - DNA, 15 bp, Homo sapiens
gcagcagggagacag

SEQ ID NO: 758021 - DNA, 15 bp, Homo sapiens
cagcagggagacagt

SEQ ID NO: 758022 - DNA, 15 bp, Homo sapiens
agcagggagacagtc

SEQ ID NO: 758023 - DNA, 15 bp, Homo sapiens
gcagggagacagtct

SEQ ID NO: 758024 - DNA, 15 bp, Homo sapiens
cagggagacagtctt

SEQ ID NO: 758025 - DNA, 15 bp, Homo sapiens
agggagacagtcttc

SEQ ID NO: 758026 - DNA, 15 bp, Homo sapiens
gggagacagtcttct

SEQ ID NO: 758027 - DNA, 15 bp, Homo sapiens
ggagacagtcttctc

SEQ ID NO: 758028 - DNA, 15 bp, Homo sapiens
gagacagtcttctcc

SEQ ID NO: 758029 - DNA, 15 bp, Homo sapiens
agacagtcttctcca

SEQ ID NO: 758030 - DNA, 15 bp, Homo sapiens
gacagtcttctccaa

SEQ ID NO: 758031 - DNA, 15 bp, Homo sapiens
acagtcttctccaag

SEQ ID NO: 758032 - DNA, 15 bp, Homo sapiens
cagtcttctccaagc

SEQ ID NO: 758033 - DNA, 15 bp, Homo sapiens
agtcttctccaagcg

SEQ ID NO: 758034 - DNA, 15 bp, Homo sapiens
gtcttctccaagcgt

SEQ ID NO: 758035 - DNA, 15 bp, Homo sapiens
tcttctccaagcgtg

SEQ ID NO: 758036 - DNA, 15 bp, Homo sapiens
cttctccaagcgtgc

SEQ ID NO: 758037 - DNA, 15 bp, Homo sapiens
ttctccaagcgtgca

SEQ ID NO: 758038 - DNA, 15 bp, Homo sapiens
tctccaagcgtgcat

SEQ ID NO: 758039 - DNA, 15 bp, Homo sapiens
ctccaagcgtgcatt

SEQ ID NO: 758040 - DNA, 15 bp, Homo sapiens
tccaagcgtgcattc

SEQ ID NO: 758041 - DNA, 15 bp, Homo sapiens
ccaagcgtgcattca

SEQ ID NO: 758042 - DNA, 15 bp, Homo sapiens
caagcgtgcattcat

SEQ ID NO: 758043 - DNA, 15 bp, Homo sapiens
aagcgtgcattcata

SEQ ID NO: 758044 - DNA, 15 bp, Homo sapiens
agcgtgcattcatac

SEQ ID NO: 758045 - DNA, 15 bp, Homo sapiens
gcgtgcattcataca

SEQ ID NO: 758046 - DNA, 15 bp, Homo sapiens
cgtgcattcatacag

SEQ ID NO: 758047 - DNA, 15 bp, Homo sapiens
gtgcattcatacagt

SEQ ID NO: 758048 - DNA, 15 bp, Homo sapiens
tgcattcatacagtg

SEQ ID NO: 758049 - DNA, 15 bp, Homo sapiens
gcattcatacagtgc

SEQ ID NO: 758050 - DNA, 15 bp, Homo sapiens
cattcatacagtgca

SEQ ID NO: 758051 - DNA, 15 bp, Homo sapiens
attcatacagtgcag

SEQ ID NO: 758052 - DNA, 15 bp, Homo sapiens
ttcatacagtgcagg

SEQ ID NO: 758053 - DNA, 15 bp, Homo sapiens
tcatacagtgcaggc

SEQ ID NO: 758054 - DNA, 15 bp, Homo sapiens
catacagtgcaggcg

SEQ ID NO: 758055 - DNA, 15 bp, Homo sapiens
atacagtgcaggcgg

SEQ ID NO: 758056 - DNA, 15 bp, Homo sapiens
tacagtgcaggcggc

SEQ ID NO: 758057 - DNA, 15 bp, Homo sapiens
acagtgcaggcggct

SEQ ID NO: 758058 - DNA, 15 bp, Homo sapiens
cagtgcaggcggctt

SEQ ID NO: 758059 - DNA, 15 bp, Homo sapiens
agtgcaggcggcttc

SEQ ID NO: 758060 - DNA, 15 bp, Homo sapiens
gtgcaggcggcttcc

SEQ ID NO: 758061 - DNA, 15 bp, Homo sapiens
tgcaggcggcttccc

SEQ ID NO: 758062 - DNA, 15 bp, Homo sapiens
gcaggcggcttccca

SEQ ID NO: 758063 - DNA, 15 bp, Homo sapiens
caggcggcttcccac

SEQ ID NO: 758064 - DNA, 15 bp, Homo sapiens
aggcggcttcccact

SEQ ID NO: 758065 - DNA, 15 bp, Homo sapiens
ggcggcttcccacta

SEQ ID NO: 758066 - DNA, 15 bp, Homo sapiens
gcggcttcccactat

SEQ ID NO: 758067 - DNA, 15 bp, Homo sapiens
cggcttcccactatc

SEQ ID NO: 758068 - DNA, 15 bp, Homo sapiens
ggcttcccactatct

SEQ ID NO: 758069 - DNA, 15 bp, Homo sapiens
gcttcccactatctt

SEQ ID NO: 758070 - DNA, 15 bp, Homo sapiens
cttcccactatcttt

SEQ ID NO: 758071 - DNA, 15 bp, Homo sapiens
ttcccactatctttg

SEQ ID NO: 758072 - DNA, 15 bp, Homo sapiens
tcccactatctttgg

SEQ ID NO: 758073 - DNA, 15 bp, Homo sapiens
cccactatctttggg

SEQ ID NO: 758074 - DNA, 15 bp, Homo sapiens
ccactatctttgggt

SEQ ID NO: 758075 - DNA, 15 bp, Homo sapiens
cactatctttgggtt

SEQ ID NO: 758076 - DNA, 15 bp, Homo sapiens
actatctttgggttt

SEQ ID NO: 758077 - DNA, 15 bp, Homo sapiens
ctatctttgggtttt

SEQ ID NO: 758078 - DNA, 15 bp, Homo sapiens
tatctttgggttttc

SEQ ID NO: 758079 - DNA, 15 bp, Homo sapiens
atctttgggttttct

SEQ ID NO: 758080 - DNA, 15 bp, Homo sapiens
tctttgggttttctc

SEQ ID NO: 758081 - DNA, 15 bp, Homo sapiens
ctttgggttttctcc

SEQ ID NO: 758082 - DNA, 15 bp, Homo sapiens
tttgggttttctcca

SEQ ID NO: 758083 - DNA, 15 bp, Homo sapiens
ttgggttttctccat

SEQ ID NO: 758084 - DNA, 15 bp, Homo sapiens
tgggttttctccatt

SEQ ID NO: 758085 - DNA, 15 bp, Homo sapiens
gggttttctccattt

SEQ ID NO: 758086 - DNA, 15 bp, Homo sapiens
ggttttctccatttt

SEQ ID NO: 758087 - DNA, 15 bp, Homo sapiens
gttttctccattttg

SEQ ID NO: 758088 - DNA, 15 bp, Homo sapiens
ttttctccattttgt

SEQ ID NO: 758089 - DNA, 15 bp, Homo sapiens
tttctccattttgtc

SEQ ID NO: 758090 - DNA, 15 bp, Homo sapiens
ttctccattttgtct

SEQ ID NO: 758091 - DNA, 15 bp, Homo sapiens
tctccattttgtctg

SEQ ID NO: 758092 - DNA, 15 bp, Homo sapiens
ctccattttgtctga

SEQ ID NO: 758093 - DNA, 15 bp, Homo sapiens
tccattttgtctgag

SEQ ID NO: 758094 - DNA, 15 bp, Homo sapiens
ccattttgtctgagg

SEQ ID NO: 758095 - DNA, 15 bp, Homo sapiens
cattttgtctgaggc

SEQ ID NO: 758096 - DNA, 15 bp, Homo sapiens
attttgtctgaggca

SEQ ID NO: 758097 - DNA, 15 bp, Homo sapiens
ttttgtctgaggcag

SEQ ID NO: 758098 - DNA, 15 bp, Homo sapiens
tttgtctgaggcagg

SEQ ID NO: 758099 - DNA, 15 bp, Homo sapiens
ttgtctgaggcaggg

SEQ ID NO: 758100 - DNA, 15 bp, Homo sapiens
tgtctgaggcaggga

SEQ ID NO: 758101 - DNA, 15 bp, Homo sapiens
gtctgaggcagggat

SEQ ID NO: 758102 - DNA, 15 bp, Homo sapiens
tctgaggcagggatc

SEQ ID NO: 758103 - DNA, 15 bp, Homo sapiens
ctgaggcagggatca

SEQ ID NO: 758104 - DNA, 15 bp, Homo sapiens
tgaggcagggatcag

SEQ ID NO: 758105 - DNA, 15 bp, Homo sapiens
gaggcagggatcaga

SEQ ID NO: 758106 - DNA, 15 bp, Homo sapiens
aggcagggatcagaa

SEQ ID NO: 758107 - DNA, 15 bp, Homo sapiens
ggcagggatcagaac

SEQ ID NO: 758108 - DNA, 15 bp, Homo sapiens
gcagggatcagaaca

SEQ ID NO: 758109 - DNA, 15 bp, Homo sapiens
cagggatcagaacat

SEQ ID NO: 758110 - DNA, 15 bp, Homo sapiens
agggatcagaacata

SEQ ID NO: 758111 - DNA, 15 bp, Homo sapiens
gggatcagaacatag

SEQ ID NO: 758112 - DNA, 15 bp, Homo sapiens
ggatcagaacataga

SEQ ID NO: 758113 - DNA, 15 bp, Homo sapiens
gatcagaacatagac

SEQ ID NO: 758114 - DNA, 15 bp, Homo sapiens
atcagaacatagacc

SEQ ID NO: 758115 - DNA, 15 bp, Homo sapiens
tcagaacatagacct

SEQ ID NO: 758116 - DNA, 15 bp, Homo sapiens
cagaacatagaccta

SEQ ID NO: 758117 - DNA, 15 bp, Homo sapiens
agaacatagacctat

SEQ ID NO: 758118 - DNA, 15 bp, Homo sapiens
gaacatagacctatt

SEQ ID NO: 758119 - DNA, 15 bp, Homo sapiens
aacatagacctattg

SEQ ID NO: 758120 - DNA, 15 bp, Homo sapiens
acatagacctattgt

SEQ ID NO: 758121 - DNA, 15 bp, Homo sapiens
catagacctattgtc

SEQ ID NO: 758122 - DNA, 15 bp, Homo sapiens
atagacctattgtct

SEQ ID NO: 758123 - DNA, 15 bp, Homo sapiens
tagacctattgtctt

SEQ ID NO: 758124 - DNA, 15 bp, Homo sapiens
agacctattgtcttt

SEQ ID NO: 758125 - DNA, 15 bp, Homo sapiens
gacctattgtctttg

SEQ ID NO: 758126 - DNA, 15 bp, Homo sapiens
acctattgtctttga

SEQ ID NO: 758127 - DNA, 15 bp, Homo sapiens
cctattgtctttgat

SEQ ID NO: 758128 - DNA, 15 bp, Homo sapiens
ctattgtctttgatg

SEQ ID NO: 758129 - DNA, 15 bp, Homo sapiens
tattgtctttgatgg

SEQ ID NO: 758130 - DNA, 15 bp, Homo sapiens
attgtctttgatggc

SEQ ID NO: 758131 - DNA, 15 bp, Homo sapiens
ttgtctttgatggca

SEQ ID NO: 758132 - DNA, 15 bp, Homo sapiens
tgtctttgatggcaa

SEQ ID NO: 758133 - DNA, 15 bp, Homo sapiens
gtctttgatggcaaa

SEQ ID NO: 758134 - DNA, 15 bp, Homo sapiens
tctttgatggcaaag

SEQ ID NO: 758135 - DNA, 15 bp, Homo sapiens
ctttgatggcaaagt

SEQ ID NO: 758136 - DNA, 15 bp, Homo sapiens
tttgatggcaaagtg

SEQ ID NO: 758137 - DNA, 15 bp, Homo sapiens
ttgatggcaaagtga

SEQ ID NO: 758138 - DNA, 15 bp, Homo sapiens
tgatggcaaagtgag

SEQ ID NO: 758139 - DNA, 15 bp, Homo sapiens
gatggcaaagtgagg

SEQ ID NO: 758140 - DNA, 15 bp, Homo sapiens
atggcaaagtgagga

SEQ ID NO: 758141 - DNA, 15 bp, Homo sapiens
tggcaaagtgaggag

SEQ ID NO: 758142 - DNA, 15 bp, Homo sapiens
ggcaaagtgaggagg

SEQ ID NO: 758143 - DNA, 15 bp, Homo sapiens
gcaaagtgaggaggc

SEQ ID NO: 758144 - DNA, 15 bp, Homo sapiens
caaagtgaggaggca

SEQ ID NO: 758145 - DNA, 15 bp, Homo sapiens
aaagtgaggaggcag

SEQ ID NO: 758146 - DNA, 15 bp, Homo sapiens
aagtgaggaggcagc

SEQ ID NO: 758147 - DNA, 15 bp, Homo sapiens
agtgaggaggcagcc

SEQ ID NO: 758148 - DNA, 15 bp, Homo sapiens
gtgaggaggcagcca

SEQ ID NO: 758149 - DNA, 15 bp, Homo sapiens
tgaggaggcagccaa

SEQ ID NO: 758150 - DNA, 15 bp, Homo sapiens
gaggaggcagccaac

SEQ ID NO: 758151 - DNA, 15 bp, Homo sapiens
aggaggcagccaact

SEQ ID NO: 758152 - DNA, 15 bp, Homo sapiens
ggaggcagccaactt

SEQ ID NO: 758153 - DNA, 15 bp, Homo sapiens
gaggcagccaacttc

SEQ ID NO: 758154 - DNA, 15 bp, Homo sapiens
aggcagccaacttca

SEQ ID NO: 758155 - DNA, 15 bp, Homo sapiens
ggcagccaacttcat

SEQ ID NO: 758156 - DNA, 15 bp, Homo sapiens
gcagccaacttcatg

SEQ ID NO: 758157 - DNA, 15 bp, Homo sapiens
cagccaacttcatgt

SEQ ID NO: 758158 - DNA, 15 bp, Homo sapiens
agccaacttcatgtc

SEQ ID NO: 758159 - DNA, 15 bp, Homo sapiens
gccaacttcatgtcc

SEQ ID NO: 758160 - DNA, 15 bp, Homo sapiens
ccaacttcatgtcct

SEQ ID NO: 758161 - DNA, 15 bp, Homo sapiens
caacttcatgtcctc

SEQ ID NO: 758162 - DNA, 15 bp, Homo sapiens
aacttcatgtcctcc

SEQ ID NO: 758163 - DNA, 15 bp, Homo sapiens
acttcatgtcctcct

SEQ ID NO: 758164 - DNA, 15 bp, Homo sapiens
cttcatgtcctccta

SEQ ID NO: 758165 - DNA, 15 bp, Homo sapiens
ttcatgtcctcctaa

SEQ ID NO: 758166 - DNA, 15 bp, Homo sapiens
tcatgtcctcctaat

SEQ ID NO: 758167 - DNA, 15 bp, Homo sapiens
catgtcctcctaatt

SEQ ID NO: 758168 - DNA, 15 bp, Homo sapiens
atgtcctcctaattg

SEQ ID NO: 758169 - DNA, 15 bp, Homo sapiens
tgtcctcctaattga

SEQ ID NO: 758170 - DNA, 15 bp, Homo sapiens
gtcctcctaattgac

SEQ ID NO: 758171 - DNA, 15 bp, Homo sapiens
tcctcctaattgact

SEQ ID NO: 758172 - DNA, 15 bp, Homo sapiens
cctcctaattgactc

SEQ ID NO: 758173 - DNA, 15 bp, Homo sapiens
ctcctaattgactca

SEQ ID NO: 758174 - DNA, 15 bp, Homo sapiens
tcctaattgactcat

SEQ ID NO: 758175 - DNA, 15 bp, Homo sapiens
cctaattgactcatt

SEQ ID NO: 758176 - DNA, 15 bp, Homo sapiens
ctaattgactcattt

SEQ ID NO: 758177 - DNA, 15 bp, Homo sapiens
taattgactcatttc

SEQ ID NO: 758178 - DNA, 15 bp, Homo sapiens
aattgactcatttcc

SEQ ID NO: 758179 - DNA, 15 bp, Homo sapiens
attgactcatttcct

SEQ ID NO: 758180 - DNA, 15 bp, Homo sapiens
ttgactcatttcctc

SEQ ID NO: 758181 - DNA, 15 bp, Homo sapiens
tgactcatttcctcc

SEQ ID NO: 758182 - DNA, 15 bp, Homo sapiens
gactcatttcctccc

SEQ ID NO: 758183 - DNA, 15 bp, Homo sapiens
actcatttcctcccc

SEQ ID NO: 758184 - DNA, 15 bp, Homo sapiens
ctcatttcctccccg

SEQ ID NO: 758185 - DNA, 15 bp, Homo sapiens
tcatttcctccccgc

SEQ ID NO: 758186 - DNA, 15 bp, Homo sapiens
catttcctccccgct

SEQ ID NO: 758187 - DNA, 15 bp, Homo sapiens
atttcctccccgctg

SEQ ID NO: 758188 - DNA, 15 bp, Homo sapiens
tttcctccccgctgg

SEQ ID NO: 758189 - DNA, 15 bp, Homo sapiens
ttcctccccgctgga

SEQ ID NO: 758190 - DNA, 15 bp, Homo sapiens
tcctccccgctggag

SEQ ID NO: 758191 - DNA, 15 bp, Homo sapiens
cctccccgctggagt

SEQ ID NO: 758192 - DNA, 15 bp, Homo sapiens
ctccccgctggagtc

SEQ ID NO: 758193 - DNA, 15 bp, Homo sapiens
tccccgctggagtcc

SEQ ID NO: 758194 - DNA, 15 bp, Homo sapiens
ccccgctggagtccc

SEQ ID NO: 758195 - DNA, 15 bp, Homo sapiens
cccgctggagtcccc

SEQ ID NO: 758196 - DNA, 15 bp, Homo sapiens
ccgctggagtcccca

SEQ ID NO: 758197 - DNA, 15 bp, Homo sapiens
cgctggagtccccaa

SEQ ID NO: 758198 - DNA, 15 bp, Homo sapiens
gctggagtccccaaa

SEQ ID NO: 758199 - DNA, 15 bp, Homo sapiens
ctggagtccccaaag

SEQ ID NO: 758200 - DNA, 15 bp, Homo sapiens
tggagtccccaaagc

SEQ ID NO: 758201 - DNA, 15 bp, Homo sapiens
ggagtccccaaagca

SEQ ID NO: 758202 - DNA, 15 bp, Homo sapiens
gagtccccaaagcat

SEQ ID NO: 758203 - DNA, 15 bp, Homo sapiens
agtccccaaagcata

SEQ ID NO: 758204 - DNA, 15 bp, Homo sapiens
gtccccaaagcatag

SEQ ID NO: 758205 - DNA, 15 bp, Homo sapiens
tccccaaagcatagg

SEQ ID NO: 758206 - DNA, 15 bp, Homo sapiens
ccccaaagcataggt

SEQ ID NO: 758207 - DNA, 15 bp, Homo sapiens
cccaaagcataggtg

SEQ ID NO: 758208 - DNA, 15 bp, Homo sapiens
ccaaagcataggtga

SEQ ID NO: 758209 - DNA, 15 bp, Homo sapiens
caaagcataggtgac

SEQ ID NO: 758210 - DNA, 15 bp, Homo sapiens
aaagcataggtgacc

SEQ ID NO: 758211 - DNA, 15 bp, Homo sapiens
aagcataggtgacca

SEQ ID NO: 758212 - DNA, 15 bp, Homo sapiens
agcataggtgaccaa

SEQ ID NO: 758213 - DNA, 15 bp, Homo sapiens
gcataggtgaccaag

SEQ ID NO: 758214 - DNA, 15 bp, Homo sapiens
cataggtgaccaaga

SEQ ID NO: 758215 - DNA, 15 bp, Homo sapiens
ataggtgaccaagag

SEQ ID NO: 758216 - DNA, 15 bp, Homo sapiens
taggtgaccaagagc

SEQ ID NO: 758217 - DNA, 15 bp, Homo sapiens
aggtgaccaagagct

SEQ ID NO: 758218 - DNA, 15 bp, Homo sapiens
ggtgaccaagagctc

SEQ ID NO: 758219 - DNA, 15 bp, Homo sapiens
gtgaccaagagctcc

SEQ ID NO: 758220 - DNA, 15 bp, Homo sapiens
tgaccaagagctccc

SEQ ID NO: 758221 - DNA, 15 bp, Homo sapiens
gaccaagagctccct

SEQ ID NO: 758222 - DNA, 15 bp, Homo sapiens
accaagagctccctc

SEQ ID NO: 758223 - DNA, 15 bp, Homo sapiens
ccaagagctccctct

SEQ ID NO: 758224 - DNA, 15 bp, Homo sapiens
caagagctccctctc

SEQ ID NO: 758225 - DNA, 15 bp, Homo sapiens
aagagctccctctca

SEQ ID NO: 758226 - DNA, 15 bp, Homo sapiens
agagctccctctcag

SEQ ID NO: 758227 - DNA, 15 bp, Homo sapiens
gagctccctctcagc

SEQ ID NO: 758228 - DNA, 15 bp, Homo sapiens
agctccctctcagct

SEQ ID NO: 758229 - DNA, 15 bp, Homo sapiens
gctccctctcagctc

SEQ ID NO: 758230 - DNA, 15 bp, Homo sapiens
ctccctctcagctct

SEQ ID NO: 758231 - DNA, 15 bp, Homo sapiens
tccctctcagctcta

SEQ ID NO: 758232 - DNA, 15 bp, Homo sapiens
ccctctcagctctaa

SEQ ID NO: 758233 - DNA, 15 bp, Homo sapiens
cctctcagctctaag

SEQ ID NO: 758234 - DNA, 15 bp, Homo sapiens
ctctcagctctaagt

SEQ ID NO: 758235 - DNA, 15 bp, Homo sapiens
tctcagctctaagtc

SEQ ID NO: 758236 - DNA, 15 bp, Homo sapiens
ctcagctctaagtca

SEQ ID NO: 758237 - DNA, 15 bp, Homo sapiens
tcagctctaagtcat

SEQ ID NO: 758238 - DNA, 15 bp, Homo sapiens
cagctctaagtcatg

SEQ ID NO: 758239 - DNA, 15 bp, Homo sapiens
agctctaagtcatga

SEQ ID NO: 758240 - DNA, 15 bp, Homo sapiens
gctctaagtcatgaa

SEQ ID NO: 758241 - DNA, 15 bp, Homo sapiens
ctctaagtcatgaag

SEQ ID NO: 758242 - DNA, 15 bp, Homo sapiens
tctaagtcatgaaga

SEQ ID NO: 758243 - DNA, 15 bp, Homo sapiens
ctaagtcatgaagaa

SEQ ID NO: 758244 - DNA, 15 bp, Homo sapiens
taagtcatgaagaaa

SEQ ID NO: 758245 - DNA, 15 bp, Homo sapiens
aagtcatgaagaaac

SEQ ID NO: 758246 - DNA, 15 bp, Homo sapiens
agtcatgaagaaacg

SEQ ID NO: 758247 - DNA, 15 bp, Homo sapiens
gtcatgaagaaacgg

SEQ ID NO: 758248 - DNA, 15 bp, Homo sapiens
tcatgaagaaacgga

SEQ ID NO: 758249 - DNA, 15 bp, Homo sapiens
catgaagaaacggat

SEQ ID NO: 758250 - DNA, 15 bp, Homo sapiens
atgaagaaacggatg

SEQ ID NO: 758251 - DNA, 15 bp, Homo sapiens
tgaagaaacggatgc

SEQ ID NO: 758252 - DNA, 15 bp, Homo sapiens
gaagaaacggatgct

SEQ ID NO: 758253 - DNA, 15 bp, Homo sapiens
aagaaacggatgctt

SEQ ID NO: 758254 - DNA, 15 bp, Homo sapiens
agaaacggatgctta

SEQ ID NO: 758255 - DNA, 15 bp, Homo sapiens
gaaacggatgcttag

SEQ ID NO: 758256 - DNA, 15 bp, Homo sapiens
aaacggatgcttaga

SEQ ID NO: 758257 - DNA, 15 bp, Homo sapiens
aacggatgcttagag

SEQ ID NO: 758258 - DNA, 15 bp, Homo sapiens
acggatgcttagaga

SEQ ID NO: 758259 - DNA, 15 bp, Homo sapiens
cggatgcttagagag

SEQ ID NO: 758260 - DNA, 15 bp, Homo sapiens
ggatgcttagagagg

SEQ ID NO: 758261 - DNA, 15 bp, Homo sapiens
gatgcttagagaggt

SEQ ID NO: 758262 - DNA, 15 bp, Homo sapiens
atgcttagagaggtt

SEQ ID NO: 758263 - DNA, 15 bp, Homo sapiens
tgcttagagaggtta

SEQ ID NO: 758264 - DNA, 15 bp, Homo sapiens
gcttagagaggttac

SEQ ID NO: 758265 - DNA, 15 bp, Homo sapiens
cttagagaggttacc

SEQ ID NO: 758266 - DNA, 15 bp, Homo sapiens
ttagagaggttaccc

SEQ ID NO: 758267 - DNA, 15 bp, Homo sapiens
tagagaggttaccca

SEQ ID NO: 758268 - DNA, 15 bp, Homo sapiens
agagaggttacccag

SEQ ID NO: 758269 - DNA, 15 bp, Homo sapiens
gagaggttacccaga

SEQ ID NO: 758270 - DNA, 15 bp, Homo sapiens
agaggttacccagaa

SEQ ID NO: 758271 - DNA, 15 bp, Homo sapiens
gaggttacccagaag

SEQ ID NO: 758272 - DNA, 15 bp, Homo sapiens
aggttacccagaagc

SEQ ID NO: 758273 - DNA, 15 bp, Homo sapiens
ggttacccagaagct

SEQ ID NO: 758274 - DNA, 15 bp, Homo sapiens
gttacccagaagctg

SEQ ID NO: 758275 - DNA, 15 bp, Homo sapiens
ttacccagaagctgg

SEQ ID NO: 758276 - DNA, 15 bp, Homo sapiens
tacccagaagctggg

SEQ ID NO: 758277 - DNA, 15 bp, Homo sapiens
acccagaagctgggg

SEQ ID NO: 758278 - DNA, 15 bp, Homo sapiens
cccagaagctgggga

SEQ ID NO: 758279 - DNA, 15 bp, Homo sapiens
ccagaagctggggac

SEQ ID NO: 758280 - DNA, 15 bp, Homo sapiens
cagaagctggggaca

SEQ ID NO: 758281 - DNA, 15 bp, Homo sapiens
agaagctggggacag

SEQ ID NO: 758282 - DNA, 15 bp, Homo sapiens
gaagctggggacaga

SEQ ID NO: 758283 - DNA, 15 bp, Homo sapiens
aagctggggacagag

SEQ ID NO: 758284 - DNA, 15 bp, Homo sapiens
agctggggacagagc

SEQ ID NO: 758285 - DNA, 15 bp, Homo sapiens
gctggggacagagct

SEQ ID NO: 758286 - DNA, 15 bp, Homo sapiens
ctggggacagagctg

SEQ ID NO: 758287 - DNA, 15 bp, Homo sapiens
tggggacagagctgg

SEQ ID NO: 758288 - DNA, 15 bp, Homo sapiens
ggggacagagctggc

SEQ ID NO: 758289 - DNA, 15 bp, Homo sapiens
gggacagagctggca

SEQ ID NO: 758290 - DNA, 15 bp, Homo sapiens
ggacagagctggcac

SEQ ID NO: 758291 - DNA, 15 bp, Homo sapiens
gacagagctggcacc

SEQ ID NO: 758292 - DNA, 15 bp, Homo sapiens
acagagctggcacca

SEQ ID NO: 758293 - DNA, 15 bp, Homo sapiens
cagagctggcaccac

SEQ ID NO: 758294 - DNA, 15 bp, Homo sapiens
agagctggcaccaca

SEQ ID NO: 758295 - DNA, 15 bp, Homo sapiens
gagctggcaccacac

SEQ ID NO: 758296 - DNA, 15 bp, Homo sapiens
agctggcaccacacc

SEQ ID NO: 758297 - DNA, 15 bp, Homo sapiens
gctggcaccacaccc

SEQ ID NO: 758298 - DNA, 15 bp, Homo sapiens
ctggcaccacaccca

SEQ ID NO: 758299 - DNA, 15 bp, Homo sapiens
tggcaccacacccag

SEQ ID NO: 758300 - DNA, 15 bp, Homo sapiens
ggcaccacacccagg

SEQ ID NO: 758301 - DNA, 15 bp, Homo sapiens
gcaccacacccaggc

SEQ ID NO: 758302 - DNA, 15 bp, Homo sapiens
caccacacccaggcc

SEQ ID NO: 758303 - DNA, 15 bp, Homo sapiens
accacacccaggcct

SEQ ID NO: 758304 - DNA, 15 bp, Homo sapiens
ccacacccaggcctc

SEQ ID NO: 758305 - DNA, 15 bp, Homo sapiens
cacacccaggcctcc

SEQ ID NO: 758306 - DNA, 15 bp, Homo sapiens
acacccaggcctcct

SEQ ID NO: 758307 - DNA, 15 bp, Homo sapiens
cacccaggcctcctc

SEQ ID NO: 758308 - DNA, 15 bp, Homo sapiens
acccaggcctcctcc

SEQ ID NO: 758309 - DNA, 15 bp, Homo sapiens
cccaggcctcctccc

SEQ ID NO: 758310 - DNA, 15 bp, Homo sapiens
ccaggcctcctccct

SEQ ID NO: 758311 - DNA, 15 bp, Homo sapiens
caggcctcctccctt

SEQ ID NO: 758312 - DNA, 15 bp, Homo sapiens
aggcctcctcccttc

SEQ ID NO: 758313 - DNA, 15 bp, Homo sapiens
ggcctcctcccttcc

SEQ ID NO: 758314 - DNA, 15 bp, Homo sapiens
gcctcctcccttcca

SEQ ID NO: 758315 - DNA, 15 bp, Homo sapiens
cctcctcccttccag

SEQ ID NO: 758316 - DNA, 15 bp, Homo sapiens
ctcctcccttccagt

SEQ ID NO: 758317 - DNA, 15 bp, Homo sapiens
tcctcccttccagtc

SEQ ID NO: 758318 - DNA, 15 bp, Homo sapiens
cctcccttccagtcc

SEQ ID NO: 758319 - DNA, 15 bp, Homo sapiens
ctcccttccagtcct

SEQ ID NO: 758320 - DNA, 15 bp, Homo sapiens
tcccttccagtcctg

SEQ ID NO: 758321 - DNA, 15 bp, Homo sapiens
cccttccagtcctgt

SEQ ID NO: 758322 - DNA, 15 bp, Homo sapiens
ccttccagtcctgtg

SEQ ID NO: 758323 - DNA, 15 bp, Homo sapiens
cttccagtcctgtgc

SEQ ID NO: 758324 - DNA, 15 bp, Homo sapiens
ttccagtcctgtgct

SEQ ID NO: 758325 - DNA, 15 bp, Homo sapiens
tccagtcctgtgctt

SEQ ID NO: 758326 - DNA, 15 bp, Homo sapiens
ccagtcctgtgcttg

SEQ ID NO: 758327 - DNA, 15 bp, Homo sapiens
cagtcctgtgcttgg

SEQ ID NO: 758328 - DNA, 15 bp, Homo sapiens
agtcctgtgcttggg

SEQ ID NO: 758329 - DNA, 15 bp, Homo sapiens
gtcctgtgcttgggc

SEQ ID NO: 758330 - DNA, 15 bp, Homo sapiens
tcctgtgcttgggca

SEQ ID NO: 758331 - DNA, 15 bp, Homo sapiens
cctgtgcttgggcag

SEQ ID NO: 758332 - DNA, 15 bp, Homo sapiens
ctgtgcttgggcagg

SEQ ID NO: 758333 - DNA, 15 bp, Homo sapiens
tgtgcttgggcaggc

SEQ ID NO: 758334 - DNA, 15 bp, Homo sapiens
gtgcttgggcaggca

SEQ ID NO: 758335 - DNA, 15 bp, Homo sapiens
tgcttgggcaggcag

SEQ ID NO: 758336 - DNA, 15 bp, Homo sapiens
gcttgggcaggcagc

SEQ ID NO: 758337 - DNA, 15 bp, Homo sapiens
cttgggcaggcagcc

SEQ ID NO: 758338 - DNA, 15 bp, Homo sapiens
ttgggcaggcagcct

SEQ ID NO: 758339 - DNA, 15 bp, Homo sapiens
tgggcaggcagcctg

SEQ ID NO: 758340 - DNA, 15 bp, Homo sapiens
gggcaggcagcctgt

SEQ ID NO: 758341 - DNA, 15 bp, Homo sapiens
ggcaggcagcctgtg

SEQ ID NO: 758342 - DNA, 15 bp, Homo sapiens
gcaggcagcctgtgg

SEQ ID NO: 758343 - DNA, 15 bp, Homo sapiens
caggcagcctgtggg

SEQ ID NO: 758344 - DNA, 15 bp, Homo sapiens
aggcagcctgtgggc

SEQ ID NO: 758345 - DNA, 15 bp, Homo sapiens
ggcagcctgtgggct

SEQ ID NO: 758346 - DNA, 15 bp, Homo sapiens
gcagcctgtgggctt

SEQ ID NO: 758347 - DNA, 15 bp, Homo sapiens
cagcctgtgggcttc

SEQ ID NO: 758348 - DNA, 15 bp, Homo sapiens
agcctgtgggcttct

SEQ ID NO: 758349 - DNA, 15 bp, Homo sapiens
gcctgtgggcttctt

SEQ ID NO: 758350 - DNA, 15 bp, Homo sapiens
cctgtgggcttcttc

SEQ ID NO: 758351 - DNA, 15 bp, Homo sapiens
ctgtgggcttcttcc

SEQ ID NO: 758352 - DNA, 15 bp, Homo sapiens
tgtgggcttcttcct

SEQ ID NO: 758353 - DNA, 15 bp, Homo sapiens
gtgggcttcttcctt

SEQ ID NO: 758354 - DNA, 15 bp, Homo sapiens
tgggcttcttccttc

SEQ ID NO: 758355 - DNA, 15 bp, Homo sapiens
gggcttcttccttcg

SEQ ID NO: 758356 - DNA, 15 bp, Homo sapiens
ggcttcttccttcgg

SEQ ID NO: 758357 - DNA, 15 bp, Homo sapiens
gcttcttccttcggc

SEQ ID NO: 758358 - DNA, 15 bp, Homo sapiens
cttcttccttcggcc

SEQ ID NO: 758359 - DNA, 15 bp, Homo sapiens
ttcttccttcggccc

SEQ ID NO: 758360 - DNA, 15 bp, Homo sapiens
tcttccttcggccct

SEQ ID NO: 758361 - DNA, 15 bp, Homo sapiens
cttccttcggccctg

SEQ ID NO: 758362 - DNA, 15 bp, Homo sapiens
ttccttcggccctgt

SEQ ID NO: 758363 - DNA, 15 bp, Homo sapiens
tccttcggccctgtc

SEQ ID NO: 758364 - DNA, 15 bp, Homo sapiens
ccttcggccctgtcc

SEQ ID NO: 758365 - DNA, 15 bp, Homo sapiens
cttcggccctgtccc

SEQ ID NO: 758366 - DNA, 15 bp, Homo sapiens
ttcggccctgtcccc

SEQ ID NO: 758367 - DNA, 15 bp, Homo sapiens
tcggccctgtcccct

SEQ ID NO: 758368 - DNA, 15 bp, Homo sapiens
cggccctgtcccctt

SEQ ID NO: 758369 - DNA, 15 bp, Homo sapiens
ggccctgtccccttc

SEQ ID NO: 758370 - DNA, 15 bp, Homo sapiens
gccctgtccccttcc

SEQ ID NO: 758371 - DNA, 15 bp, Homo sapiens
ccctgtccccttccc

SEQ ID NO: 758372 - DNA, 15 bp, Homo sapiens
cctgtccccttccct

SEQ ID NO: 758373 - DNA, 15 bp, Homo sapiens
ctgtccccttccctc

SEQ ID NO: 758374 - DNA, 15 bp, Homo sapiens
tgtccccttccctca

SEQ ID NO: 758375 - DNA, 15 bp, Homo sapiens
gtccccttccctcag

SEQ ID NO: 758376 - DNA, 15 bp, Homo sapiens
tccccttccctcagt

SEQ ID NO: 758377 - DNA, 15 bp, Homo sapiens
ccccttccctcagta

SEQ ID NO: 758378 - DNA, 15 bp, Homo sapiens
cccttccctcagtac

SEQ ID NO: 758379 - DNA, 15 bp, Homo sapiens
ccttccctcagtact

SEQ ID NO: 758380 - DNA, 15 bp, Homo sapiens
cttccctcagtacta

SEQ ID NO: 758381 - DNA, 15 bp, Homo sapiens
ttccctcagtactaa

SEQ ID NO: 758382 - DNA, 15 bp, Homo sapiens
tccctcagtactaac

SEQ ID NO: 758383 - DNA, 15 bp, Homo sapiens
ccctcagtactaaca

SEQ ID NO: 758384 - DNA, 15 bp, Homo sapiens
cctcagtactaacac

SEQ ID NO: 758385 - DNA, 15 bp, Homo sapiens
ctcagtactaacacg

SEQ ID NO: 758386 - DNA, 15 bp, Homo sapiens
tcagtactaacacgt

SEQ ID NO: 758387 - DNA, 15 bp, Homo sapiens
cagtactaacacgtg

SEQ ID NO: 758388 - DNA, 15 bp, Homo sapiens
agtactaacacgtgc

SEQ ID NO: 758389 - DNA, 15 bp, Homo sapiens
gtactaacacgtgct

SEQ ID NO: 758390 - DNA, 15 bp, Homo sapiens
tactaacacgtgctc

SEQ ID NO: 758391 - DNA, 15 bp, Homo sapiens
actaacacgtgctcc

SEQ ID NO: 758392 - DNA, 15 bp, Homo sapiens
ctaacacgtgctcct

SEQ ID NO: 758393 - DNA, 15 bp, Homo sapiens
taacacgtgctccta

SEQ ID NO: 758394 - DNA, 15 bp, Homo sapiens
aacacgtgctcctag

SEQ ID NO: 758395 - DNA, 15 bp, Homo sapiens
acacgtgctcctaga

SEQ ID NO: 758396 - DNA, 15 bp, Homo sapiens
cacgtgctcctagat

SEQ ID NO: 758397 - DNA, 15 bp, Homo sapiens
acgtgctcctagatt

SEQ ID NO: 758398 - DNA, 15 bp, Homo sapiens
cgtgctcctagattt

SEQ ID NO: 758399 - DNA, 15 bp, Homo sapiens
gtgctcctagatttc

SEQ ID NO: 758400 - DNA, 15 bp, Homo sapiens
tgctcctagatttct

SEQ ID NO: 758401 - DNA, 15 bp, Homo sapiens
gctcctagatttctg

SEQ ID NO: 758402 - DNA, 15 bp, Homo sapiens
ctcctagatttctga

SEQ ID NO: 758403 - DNA, 15 bp, Homo sapiens
tcctagatttctgag

SEQ ID NO: 758404 - DNA, 15 bp, Homo sapiens
cctagatttctgagc

SEQ ID NO: 758405 - DNA, 15 bp, Homo sapiens
ctagatttctgagca

SEQ ID NO: 758406 - DNA, 15 bp, Homo sapiens
tagatttctgagcag

SEQ ID NO: 758407 - DNA, 15 bp, Homo sapiens
agatttctgagcagc

SEQ ID NO: 758408 - DNA, 15 bp, Homo sapiens
gatttctgagcagcc

SEQ ID NO: 758409 - DNA, 15 bp, Homo sapiens
atttctgagcagccc

SEQ ID NO: 758410 - DNA, 15 bp, Homo sapiens
tttctgagcagcccc

SEQ ID NO: 758411 - DNA, 15 bp, Homo sapiens
ttctgagcagcccct

SEQ ID NO: 758412 - DNA, 15 bp, Homo sapiens
tctgagcagccccta

SEQ ID NO: 758413 - DNA, 15 bp, Homo sapiens
ctgagcagcccctag

SEQ ID NO: 758414 - DNA, 15 bp, Homo sapiens
tgagcagcccctaga

SEQ ID NO: 758415 - DNA, 15 bp, Homo sapiens
gagcagcccctagag

SEQ ID NO: 758416 - DNA, 15 bp, Homo sapiens
agcagcccctagaga

SEQ ID NO: 758417 - DNA, 15 bp, Homo sapiens
gcagcccctagagag

SEQ ID NO: 758418 - DNA, 15 bp, Homo sapiens
cagcccctagagaga

SEQ ID NO: 758419 - DNA, 15 bp, Homo sapiens
agcccctagagagaa

SEQ ID NO: 758420 - DNA, 15 bp, Homo sapiens
gcccctagagagaag

SEQ ID NO: 758421 - DNA, 15 bp, Homo sapiens
cccctagagagaagt

SEQ ID NO: 758422 - DNA, 15 bp, Homo sapiens
ccctagagagaagtg

SEQ ID NO: 758423 - DNA, 15 bp, Homo sapiens
cctagagagaagtga

SEQ ID NO: 758424 - DNA, 15 bp, Homo sapiens
ctagagagaagtgac

SEQ ID NO: 758425 - DNA, 15 bp, Homo sapiens
tagagagaagtgacg

SEQ ID NO: 758426 - DNA, 15 bp, Homo sapiens
agagagaagtgacgg

SEQ ID NO: 758427 - DNA, 15 bp, Homo sapiens
gagagaagtgacgga

SEQ ID NO: 758428 - DNA, 15 bp, Homo sapiens
agagaagtgacggat

SEQ ID NO: 758429 - DNA, 15 bp, Homo sapiens
gagaagtgacggatt

SEQ ID NO: 758430 - DNA, 15 bp, Homo sapiens
agaagtgacggattc

SEQ ID NO: 758431 - DNA, 15 bp, Homo sapiens
gaagtgacggattca

SEQ ID NO: 758432 - DNA, 15 bp, Homo sapiens
aagtgacggattcat

SEQ ID NO: 758433 - DNA, 15 bp, Homo sapiens
agtgacggattcata

SEQ ID NO: 758434 - DNA, 15 bp, Homo sapiens
gtgacggattcatac

SEQ ID NO: 758435 - DNA, 15 bp, Homo sapiens
tgacggattcatact

SEQ ID NO: 758436 - DNA, 15 bp, Homo sapiens
gacggattcatacta

SEQ ID NO: 758437 - DNA, 15 bp, Homo sapiens
acggattcatactag

SEQ ID NO: 758438 - DNA, 15 bp, Homo sapiens
cggattcatactaga

SEQ ID NO: 758439 - DNA, 15 bp, Homo sapiens
ggattcatactagag

SEQ ID NO: 758440 - DNA, 15 bp, Homo sapiens
gattcatactagagt

SEQ ID NO: 758441 - DNA, 15 bp, Homo sapiens
attcatactagagtg

SEQ ID NO: 758442 - DNA, 15 bp, Homo sapiens
ttcatactagagtgt

SEQ ID NO: 758443 - DNA, 15 bp, Homo sapiens
tcatactagagtgtt

SEQ ID NO: 758444 - DNA, 15 bp, Homo sapiens
catactagagtgttc

SEQ ID NO: 758445 - DNA, 15 bp, Homo sapiens
atactagagtgttca

SEQ ID NO: 758446 - DNA, 15 bp, Homo sapiens
tactagagtgttcat

SEQ ID NO: 758447 - DNA, 15 bp, Homo sapiens
actagagtgttcatg

SEQ ID NO: 758448 - DNA, 15 bp, Homo sapiens
ctagagtgttcatga

SEQ ID NO: 758449 - DNA, 15 bp, Homo sapiens
tagagtgttcatgac

SEQ ID NO: 758450 - DNA, 15 bp, Homo sapiens
agagtgttcatgact

SEQ ID NO: 758451 - DNA, 15 bp, Homo sapiens
gagtgttcatgactt

SEQ ID NO: 758452 - DNA, 15 bp, Homo sapiens
agtgttcatgacttc

SEQ ID NO: 758453 - DNA, 15 bp, Homo sapiens
gtgttcatgacttca

SEQ ID NO: 758454 - DNA, 15 bp, Homo sapiens
tgttcatgacttcat

SEQ ID NO: 758455 - DNA, 15 bp, Homo sapiens
gttcatgacttcatg

SEQ ID NO: 758456 - DNA, 15 bp, Homo sapiens
ttcatgacttcatgt

SEQ ID NO: 758457 - DNA, 15 bp, Homo sapiens
tcatgacttcatgta

SEQ ID NO: 758458 - DNA, 15 bp, Homo sapiens
catgacttcatgtat

SEQ ID NO: 758459 - DNA, 15 bp, Homo sapiens
atgacttcatgtatc

SEQ ID NO: 758460 - DNA, 15 bp, Homo sapiens
tgacttcatgtatca

SEQ ID NO: 758461 - DNA, 15 bp, Homo sapiens
gacttcatgtatcac

SEQ ID NO: 758462 - DNA, 15 bp, Homo sapiens
acttcatgtatcact

SEQ ID NO: 758463 - DNA, 15 bp, Homo sapiens
cttcatgtatcactt

SEQ ID NO: 758464 - DNA, 15 bp, Homo sapiens
ttcatgtatcacttg

SEQ ID NO: 758465 - DNA, 15 bp, Homo sapiens
tcatgtatcacttgc

SEQ ID NO: 758466 - DNA, 15 bp, Homo sapiens
catgtatcacttgcc

SEQ ID NO: 758467 - DNA, 15 bp, Homo sapiens
atgtatcacttgcct

SEQ ID NO: 758468 - DNA, 15 bp, Homo sapiens
tgtatcacttgcctg

SEQ ID NO: 758469 - DNA, 15 bp, Homo sapiens
gtatcacttgcctga

SEQ ID NO: 758470 - DNA, 15 bp, Homo sapiens
tatcacttgcctgag

SEQ ID NO: 758471 - DNA, 15 bp, Homo sapiens
atcacttgcctgaga

SEQ ID NO: 758472 - DNA, 15 bp, Homo sapiens
tcacttgcctgagag

SEQ ID NO: 758473 - DNA, 15 bp, Homo sapiens
cacttgcctgagagt

SEQ ID NO: 758474 - DNA, 15 bp, Homo sapiens
acttgcctgagagta

SEQ ID NO: 758475 - DNA, 15 bp, Homo sapiens
cttgcctgagagtat

SEQ ID NO: 758476 - DNA, 15 bp, Homo sapiens
ttgcctgagagtatt

SEQ ID NO: 758477 - DNA, 15 bp, Homo sapiens
tgcctgagagtattt

SEQ ID NO: 758478 - DNA, 15 bp, Homo sapiens
gcctgagagtatttt

SEQ ID NO: 758479 - DNA, 15 bp, Homo sapiens
cctgagagtattttt

SEQ ID NO: 758480 - DNA, 15 bp, Homo sapiens
ctgagagtattttta

SEQ ID NO: 758481 - DNA, 15 bp, Homo sapiens
tgagagtatttttaa

SEQ ID NO: 758482 - DNA, 15 bp, Homo sapiens
gagagtatttttaaa

SEQ ID NO: 758483 - DNA, 15 bp, Homo sapiens
agagtatttttaaat

SEQ ID NO: 758484 - DNA, 15 bp, Homo sapiens
gagtatttttaaatg

SEQ ID NO: 758485 - DNA, 15 bp, Homo sapiens
agtatttttaaatgg

SEQ ID NO: 758486 - DNA, 15 bp, Homo sapiens
gtatttttaaatgga

SEQ ID NO: 758487 - DNA, 15 bp, Homo sapiens
tatttttaaatggat

SEQ ID NO: 758488 - DNA, 15 bp, Homo sapiens
atttttaaatggatg

SEQ ID NO: 758489 - DNA, 15 bp, Homo sapiens
tttttaaatggatgc

SEQ ID NO: 758490 - DNA, 15 bp, Homo sapiens
ttttaaatggatgct

SEQ ID NO: 758491 - DNA, 15 bp, Homo sapiens
tttaaatggatgctg

SEQ ID NO: 758492 - DNA, 15 bp, Homo sapiens
ttaaatggatgctgg

SEQ ID NO: 758493 - DNA, 15 bp, Homo sapiens
taaatggatgctggg

SEQ ID NO: 758494 - DNA, 15 bp, Homo sapiens
aaatggatgctgggg

SEQ ID NO: 758495 - DNA, 15 bp, Homo sapiens
aatggatgctggggg

SEQ ID NO: 758496 - DNA, 15 bp, Homo sapiens
atggatgctggggga

SEQ ID NO: 758497 - DNA, 15 bp, Homo sapiens
tggatgctgggggag

SEQ ID NO: 758498 - DNA, 15 bp, Homo sapiens
ggatgctgggggagg

SEQ ID NO: 758499 - DNA, 15 bp, Homo sapiens
gatgctgggggaggg

SEQ ID NO: 758500 - DNA, 15 bp, Homo sapiens
atgctgggggagggc

SEQ ID NO: 758501 - DNA, 15 bp, Homo sapiens
tgctgggggagggca

SEQ ID NO: 758502 - DNA, 15 bp, Homo sapiens
gctgggggagggcat

SEQ ID NO: 758503 - DNA, 15 bp, Homo sapiens
ctgggggagggcatt

SEQ ID NO: 758504 - DNA, 15 bp, Homo sapiens
tgggggagggcattg

SEQ ID NO: 758505 - DNA, 15 bp, Homo sapiens
gggggagggcattgc

SEQ ID NO: 758506 - DNA, 15 bp, Homo sapiens
ggggagggcattgct

SEQ ID NO: 758507 - DNA, 15 bp, Homo sapiens
gggagggcattgctt

SEQ ID NO: 758508 - DNA, 15 bp, Homo sapiens
ggagggcattgctta

SEQ ID NO: 758509 - DNA, 15 bp, Homo sapiens
gagggcattgcttaa

SEQ ID NO: 758510 - DNA, 15 bp, Homo sapiens
agggcattgcttaac

SEQ ID NO: 758511 - DNA, 15 bp, Homo sapiens
gggcattgcttaacc

SEQ ID NO: 758512 - DNA, 15 bp, Homo sapiens
ggcattgcttaaccc

SEQ ID NO: 758513 - DNA, 15 bp, Homo sapiens
gcattgcttaaccca

SEQ ID NO: 758514 - DNA, 15 bp, Homo sapiens
cattgcttaacccaa

SEQ ID NO: 758515 - DNA, 15 bp, Homo sapiens
attgcttaacccaaa

SEQ ID NO: 758516 - DNA, 15 bp, Homo sapiens
ttgcttaacccaaag

SEQ ID NO: 758517 - DNA, 15 bp, Homo sapiens
tgcttaacccaaagg

SEQ ID NO: 758518 - DNA, 15 bp, Homo sapiens
gcttaacccaaagga

SEQ ID NO: 758519 - DNA, 15 bp, Homo sapiens
cttaacccaaaggaa

SEQ ID NO: 758520 - DNA, 15 bp, Homo sapiens
ttaacccaaaggaac

SEQ ID NO: 758521 - DNA, 15 bp, Homo sapiens
taacccaaaggaaca

SEQ ID NO: 758522 - DNA, 15 bp, Homo sapiens
aacccaaaggaacaa

SEQ ID NO: 758523 - DNA, 15 bp, Homo sapiens
acccaaaggaacaag

SEQ ID NO: 758524 - DNA, 15 bp, Homo sapiens
cccaaaggaacaaga

SEQ ID NO: 758525 - DNA, 15 bp, Homo sapiens
ccaaaggaacaagaa

SEQ ID NO: 758526 - DNA, 15 bp, Homo sapiens
caaaggaacaagaag

SEQ ID NO: 758527 - DNA, 15 bp, Homo sapiens
aaaggaacaagaagt

SEQ ID NO: 758528 - DNA, 15 bp, Homo sapiens
aaggaacaagaagtg

SEQ ID NO: 758529 - DNA, 15 bp, Homo sapiens
aggaacaagaagtgg

SEQ ID NO: 758530 - DNA, 15 bp, Homo sapiens
ggaacaagaagtgga

SEQ ID NO: 758531 - DNA, 15 bp, Homo sapiens
gaacaagaagtggac

SEQ ID NO: 758532 - DNA, 15 bp, Homo sapiens
aacaagaagtggact

SEQ ID NO: 758533 - DNA, 15 bp, Homo sapiens
acaagaagtggacta

SEQ ID NO: 758534 - DNA, 15 bp, Homo sapiens
caagaagtggactat

SEQ ID NO: 758535 - DNA, 15 bp, Homo sapiens
aagaagtggactatg

SEQ ID NO: 758536 - DNA, 15 bp, Homo sapiens
agaagtggactatga

SEQ ID NO: 758537 - DNA, 15 bp, Homo sapiens
gaagtggactatgaa

SEQ ID NO: 758538 - DNA, 15 bp, Homo sapiens
aagtggactatgaaa

SEQ ID NO: 758539 - DNA, 15 bp, Homo sapiens
agtggactatgaaat

SEQ ID NO: 758540 - DNA, 15 bp, Homo sapiens
gtggactatgaaatt

SEQ ID NO: 758541 - DNA, 15 bp, Homo sapiens
tggactatgaaattt

SEQ ID NO: 758542 - DNA, 15 bp, Homo sapiens
ggactatgaaatttc

SEQ ID NO: 758543 - DNA, 15 bp, Homo sapiens
gactatgaaatttca

SEQ ID NO: 758544 - DNA, 15 bp, Homo sapiens
actatgaaatttcag

SEQ ID NO: 758545 - DNA, 15 bp, Homo sapiens
ctatgaaatttcagt

SEQ ID NO: 758546 - DNA, 15 bp, Homo sapiens
tatgaaatttcagtc

SEQ ID NO: 758547 - DNA, 15 bp, Homo sapiens
atgaaatttcagtcc

SEQ ID NO: 758548 - DNA, 15 bp, Homo sapiens
tgaaatttcagtccc

SEQ ID NO: 758549 - DNA, 15 bp, Homo sapiens
gaaatttcagtccca

SEQ ID NO: 758550 - DNA, 15 bp, Homo sapiens
aaatttcagtcccag

SEQ ID NO: 758551 - DNA, 15 bp, Homo sapiens
aatttcagtcccagg

SEQ ID NO: 758552 - DNA, 15 bp, Homo sapiens
atttcagtcccaggg

SEQ ID NO: 758553 - DNA, 15 bp, Homo sapiens
tttcagtcccagggc

SEQ ID NO: 758554 - DNA, 15 bp, Homo sapiens
ttcagtcccagggcc

SEQ ID NO: 758555 - DNA, 15 bp, Homo sapiens
tcagtcccagggcct

SEQ ID NO: 758556 - DNA, 15 bp, Homo sapiens
cagtcccagggcctg

SEQ ID NO: 758557 - DNA, 15 bp, Homo sapiens
agtcccagggcctgc

SEQ ID NO: 758558 - DNA, 15 bp, Homo sapiens
gtcccagggcctgcc

SEQ ID NO: 758559 - DNA, 15 bp, Homo sapiens
tcccagggcctgcca

SEQ ID NO: 758560 - DNA, 15 bp, Homo sapiens
cccagggcctgccat

SEQ ID NO: 758561 - DNA, 15 bp, Homo sapiens
ccagggcctgccatg

SEQ ID NO: 758562 - DNA, 15 bp, Homo sapiens
cagggcctgccatgt

SEQ ID NO: 758563 - DNA, 15 bp, Homo sapiens
gggcctgccatgtgt

SEQ ID NO: 758564 - DNA, 15 bp, Homo sapiens
ggcctgccatgtgtt

SEQ ID NO: 758565 - DNA, 15 bp, Homo sapiens
gcctgccatgtgttg

SEQ ID NO: 758566 - DNA, 15 bp, Homo sapiens
cctgccatgtgttgg

SEQ ID NO: 758567 - DNA, 15 bp, Homo sapiens
ctgccatgtgttggc

SEQ ID NO: 758568 - DNA, 15 bp, Homo sapiens
tgccatgtgttggcc

SEQ ID NO: 758569 - DNA, 15 bp, Homo sapiens
gccatgtgttggcct

SEQ ID NO: 758570 - DNA, 15 bp, Homo sapiens
ccatgtgttggcctg

SEQ ID NO: 758571 - DNA, 15 bp, Homo sapiens
catgtgttggcctgt

SEQ ID NO: 758572 - DNA, 15 bp, Homo sapiens
atgtgttggcctgtt

SEQ ID NO: 758573 - DNA, 15 bp, Homo sapiens
tgtgttggcctgttc

SEQ ID NO: 758574 - DNA, 15 bp, Homo sapiens
gtgttggcctgttct

SEQ ID NO: 758575 - DNA, 15 bp, Homo sapiens
tgttggcctgttctg

SEQ ID NO: 758576 - DNA, 15 bp, Homo sapiens
gttggcctgttctgg

SEQ ID NO: 758577 - DNA, 15 bp, Homo sapiens
ttggcctgttctggg

SEQ ID NO: 758578 - DNA, 15 bp, Homo sapiens
tggcctgttctgggt

SEQ ID NO: 758579 - DNA, 15 bp, Homo sapiens
ggcctgttctgggtg

SEQ ID NO: 758580 - DNA, 15 bp, Homo sapiens
gcctgttctgggtgc

SEQ ID NO: 758581 - DNA, 15 bp, Homo sapiens
cctgttctgggtgct

SEQ ID NO: 758582 - DNA, 15 bp, Homo sapiens
ctgttctgggtgctg

SEQ ID NO: 758583 - DNA, 15 bp, Homo sapiens
tgttctgggtgctga

SEQ ID NO: 758584 - DNA, 15 bp, Homo sapiens
gttctgggtgctgaa

SEQ ID NO: 758585 - DNA, 15 bp, Homo sapiens
ttctgggtgctgaag

SEQ ID NO: 758586 - DNA, 15 bp, Homo sapiens
tctgggtgctgaaga

SEQ ID NO: 758587 - DNA, 15 bp, Homo sapiens
ctgggtgctgaagat

SEQ ID NO: 758588 - DNA, 15 bp, Homo sapiens
tgggtgctgaagata

SEQ ID NO: 758589 - DNA, 15 bp, Homo sapiens
gggtgctgaagatat

SEQ ID NO: 758590 - DNA, 15 bp, Homo sapiens
ggtgctgaagatata

SEQ ID NO: 758591 - DNA, 15 bp, Homo sapiens
gtgctgaagatatag

SEQ ID NO: 758592 - DNA, 15 bp, Homo sapiens
tgctgaagatatagt

SEQ ID NO: 758593 - DNA, 15 bp, Homo sapiens
gctgaagatatagtg

SEQ ID NO: 758594 - DNA, 15 bp, Homo sapiens
ctgaagatatagtgg

SEQ ID NO: 758595 - DNA, 15 bp, Homo sapiens
tgaagatatagtggt

SEQ ID NO: 758596 - DNA, 15 bp, Homo sapiens
gaagatatagtggtc

SEQ ID NO: 758597 - DNA, 15 bp, Homo sapiens
aagatatagtggtca

SEQ ID NO: 758598 - DNA, 15 bp, Homo sapiens
agatatagtggtcag

SEQ ID NO: 758599 - DNA, 15 bp, Homo sapiens
gatatagtggtcagc

SEQ ID NO: 758600 - DNA, 15 bp, Homo sapiens
atatagtggtcagca

SEQ ID NO: 758601 - DNA, 15 bp, Homo sapiens
tatagtggtcagcaa

SEQ ID NO: 758602 - DNA, 15 bp, Homo sapiens
atagtggtcagcaag

SEQ ID NO: 758603 - DNA, 15 bp, Homo sapiens
tagtggtcagcaaga

SEQ ID NO: 758604 - DNA, 15 bp, Homo sapiens
agtggtcagcaagac

SEQ ID NO: 758605 - DNA, 15 bp, Homo sapiens
gtggtcagcaagaca

SEQ ID NO: 758606 - DNA, 15 bp, Homo sapiens
tggtcagcaagacac

SEQ ID NO: 758607 - DNA, 15 bp, Homo sapiens
ggtcagcaagacaca

SEQ ID NO: 758608 - DNA, 15 bp, Homo sapiens
gtcagcaagacacac

SEQ ID NO: 758609 - DNA, 15 bp, Homo sapiens
tcagcaagacacaca

SEQ ID NO: 758610 - DNA, 15 bp, Homo sapiens
cagcaagacacacat

SEQ ID NO: 758611 - DNA, 15 bp, Homo sapiens
agcaagacacacatc

SEQ ID NO: 758612 - DNA, 15 bp, Homo sapiens
gcaagacacacatcc

SEQ ID NO: 758613 - DNA, 15 bp, Homo sapiens
caagacacacatcct

SEQ ID NO: 758614 - DNA, 15 bp, Homo sapiens
aagacacacatcctc

SEQ ID NO: 758615 - DNA, 15 bp, Homo sapiens
agacacacatcctct

SEQ ID NO: 758616 - DNA, 15 bp, Homo sapiens
gacacacatcctctc

SEQ ID NO: 758617 - DNA, 15 bp, Homo sapiens
acacacatcctctct

SEQ ID NO: 758618 - DNA, 15 bp, Homo sapiens
cacacatcctctctc

SEQ ID NO: 758619 - DNA, 15 bp, Homo sapiens
acacatcctctctcc

SEQ ID NO: 758620 - DNA, 15 bp, Homo sapiens
cacatcctctctcct

SEQ ID NO: 758621 - DNA, 15 bp, Homo sapiens
acatcctctctcctt

SEQ ID NO: 758622 - DNA, 15 bp, Homo sapiens
catcctctctccttt

SEQ ID NO: 758623 - DNA, 15 bp, Homo sapiens
atcctctctcctttg

SEQ ID NO: 758624 - DNA, 15 bp, Homo sapiens
tcctctctcctttga

SEQ ID NO: 758625 - DNA, 15 bp, Homo sapiens
cctctctcctttgag

SEQ ID NO: 758626 - DNA, 15 bp, Homo sapiens
ctctctcctttgaga

SEQ ID NO: 758627 - DNA, 15 bp, Homo sapiens
tctctcctttgagac

SEQ ID NO: 758628 - DNA, 15 bp, Homo sapiens
ctctcctttgagacc

SEQ ID NO: 758629 - DNA, 15 bp, Homo sapiens
tctcctttgagacct

SEQ ID NO: 758630 - DNA, 15 bp, Homo sapiens
ctcctttgagacctc

SEQ ID NO: 758631 - DNA, 15 bp, Homo sapiens
tcctttgagacctca

SEQ ID NO: 758632 - DNA, 15 bp, Homo sapiens
cctttgagacctcat

SEQ ID NO: 758633 - DNA, 15 bp, Homo sapiens
ctttgagacctcata

SEQ ID NO: 758634 - DNA, 15 bp, Homo sapiens
tttgagacctcatat

SEQ ID NO: 758635 - DNA, 15 bp, Homo sapiens
ttgagacctcatatt

SEQ ID NO: 758636 - DNA, 15 bp, Homo sapiens
tgagacctcatattt

SEQ ID NO: 758637 - DNA, 15 bp, Homo sapiens
gagacctcatatttc

SEQ ID NO: 758638 - DNA, 15 bp, Homo sapiens
agacctcatatttca

SEQ ID NO: 758639 - DNA, 15 bp, Homo sapiens
gacctcatatttcac

SEQ ID NO: 758640 - DNA, 15 bp, Homo sapiens
acctcatatttcact

SEQ ID NO: 758641 - DNA, 15 bp, Homo sapiens
cctcatatttcactg

SEQ ID NO: 758642 - DNA, 15 bp, Homo sapiens
ctcatatttcactgg

SEQ ID NO: 758643 - DNA, 15 bp, Homo sapiens
tcatatttcactggg

SEQ ID NO: 758644 - DNA, 15 bp, Homo sapiens
catatttcactgggg

SEQ ID NO: 758645 - DNA, 15 bp, Homo sapiens
atatttcactggggg

SEQ ID NO: 758646 - DNA, 15 bp, Homo sapiens
tatttcactggggga

SEQ ID NO: 758647 - DNA, 15 bp, Homo sapiens
atttcactgggggag

SEQ ID NO: 758648 - DNA, 15 bp, Homo sapiens
tttcactgggggagg

SEQ ID NO: 758649 - DNA, 15 bp, Homo sapiens
ttcactgggggaggc

SEQ ID NO: 758650 - DNA, 15 bp, Homo sapiens
tcactgggggaggca

SEQ ID NO: 758651 - DNA, 15 bp, Homo sapiens
cactgggggaggcag

SEQ ID NO: 758652 - DNA, 15 bp, Homo sapiens
actgggggaggcaga

SEQ ID NO: 758653 - DNA, 15 bp, Homo sapiens
ctgggggaggcagaa

SEQ ID NO: 758654 - DNA, 15 bp, Homo sapiens
tgggggaggcagaaa

SEQ ID NO: 758655 - DNA, 15 bp, Homo sapiens
gggggaggcagaaac

SEQ ID NO: 758656 - DNA, 15 bp, Homo sapiens
ggggaggcagaaaca

SEQ ID NO: 758657 - DNA, 15 bp, Homo sapiens
gggaggcagaaacat

SEQ ID NO: 758658 - DNA, 15 bp, Homo sapiens
ggaggcagaaacata

SEQ ID NO: 758659 - DNA, 15 bp, Homo sapiens
gaggcagaaacatag

SEQ ID NO: 758660 - DNA, 15 bp, Homo sapiens
aggcagaaacatagt

SEQ ID NO: 758661 - DNA, 15 bp, Homo sapiens
ggcagaaacatagta

SEQ ID NO: 758662 - DNA, 15 bp, Homo sapiens
gcagaaacatagtaa

SEQ ID NO: 758663 - DNA, 15 bp, Homo sapiens
cagaaacatagtaaa

SEQ ID NO: 758664 - DNA, 15 bp, Homo sapiens
agaaacatagtaaat

SEQ ID NO: 758665 - DNA, 15 bp, Homo sapiens
gaaacatagtaaata

SEQ ID NO: 758666 - DNA, 15 bp, Homo sapiens
aaacatagtaaataa

SEQ ID NO: 758667 - DNA, 15 bp, Homo sapiens
aacatagtaaataaa

SEQ ID NO: 758668 - DNA, 15 bp, Homo sapiens
acatagtaaataaat

SEQ ID NO: 758669 - DNA, 15 bp, Homo sapiens
catagtaaataaata

SEQ ID NO: 758670 - DNA, 15 bp, Homo sapiens
atagtaaataaataa

SEQ ID NO: 758671 - DNA, 15 bp, Homo sapiens
tagtaaataaataat

SEQ ID NO: 758672 - DNA, 15 bp, Homo sapiens
agtaaataaataata

SEQ ID NO: 758673 - DNA, 15 bp, Homo sapiens
gtaaataaataataa

SEQ ID NO: 758674 - DNA, 15 bp, Homo sapiens
taaataaataataaa

SEQ ID NO: 758675 - DNA, 15 bp, Homo sapiens
aaataaataataaac

SEQ ID NO: 758676 - DNA, 15 bp, Homo sapiens
aataaataataaact

SEQ ID NO: 758677 - DNA, 15 bp, Homo sapiens
ataaataataaacta

SEQ ID NO: 758678 - DNA, 15 bp, Homo sapiens
taaataataaactaa

SEQ ID NO: 758679 - DNA, 15 bp, Homo sapiens
aaataataaactaac

SEQ ID NO: 758680 - DNA, 15 bp, Homo sapiens
aataataaactaact

SEQ ID NO: 758681 - DNA, 15 bp, Homo sapiens
ataataaactaactt

SEQ ID NO: 758682 - DNA, 15 bp, Homo sapiens
taataaactaacttc

SEQ ID NO: 758683 - DNA, 15 bp, Homo sapiens
aataaactaacttca

SEQ ID NO: 758684 - DNA, 15 bp, Homo sapiens
ataaactaacttcag

SEQ ID NO: 758685 - DNA, 15 bp, Homo sapiens
taaactaacttcaga

SEQ ID NO: 758686 - DNA, 15 bp, Homo sapiens
aaactaacttcagat

SEQ ID NO: 758687 - DNA, 15 bp, Homo sapiens
aactaacttcagata

SEQ ID NO: 758688 - DNA, 15 bp, Homo sapiens
actaacttcagataa

SEQ ID NO: 758689 - DNA, 15 bp, Homo sapiens
ctaacttcagataat

SEQ ID NO: 758690 - DNA, 15 bp, Homo sapiens
taacttcagataatg

SEQ ID NO: 758691 - DNA, 15 bp, Homo sapiens
aacttcagataatga

SEQ ID NO: 758692 - DNA, 15 bp, Homo sapiens
acttcagataatgag

SEQ ID NO: 758693 - DNA, 15 bp, Homo sapiens
cttcagataatgaga

SEQ ID NO: 758694 - DNA, 15 bp, Homo sapiens
ttcagataatgagaa

SEQ ID NO: 758695 - DNA, 15 bp, Homo sapiens
tcagataatgagaac

SEQ ID NO: 758696 - DNA, 15 bp, Homo sapiens
cagataatgagaact

SEQ ID NO: 758697 - DNA, 15 bp, Homo sapiens
agataatgagaactg

SEQ ID NO: 758698 - DNA, 15 bp, Homo sapiens
gataatgagaactgg

SEQ ID NO: 758699 - DNA, 15 bp, Homo sapiens
ataatgagaactggt

SEQ ID NO: 758700 - DNA, 15 bp, Homo sapiens
taatgagaactggtt

SEQ ID NO: 758701 - DNA, 15 bp, Homo sapiens
aatgagaactggttt

SEQ ID NO: 758702 - DNA, 15 bp, Homo sapiens
atgagaactggtttt

SEQ ID NO: 758703 - DNA, 15 bp, Homo sapiens
tgagaactggtttta

SEQ ID NO: 758704 - DNA, 15 bp, Homo sapiens
gagaactggttttag

SEQ ID NO: 758705 - DNA, 15 bp, Homo sapiens
agaactggttttaga

SEQ ID NO: 758706 - DNA, 15 bp, Homo sapiens
gaactggttttagaa

SEQ ID NO: 758707 - DNA, 15 bp, Homo sapiens
aactggttttagaat

SEQ ID NO: 758708 - DNA, 15 bp, Homo sapiens
actggttttagaata

SEQ ID NO: 758709 - DNA, 15 bp, Homo sapiens
ctggttttagaatat

SEQ ID NO: 758710 - DNA, 15 bp, Homo sapiens
tggttttagaatatg

SEQ ID NO: 758711 - DNA, 15 bp, Homo sapiens
ggttttagaatatga

SEQ ID NO: 758712 - DNA, 15 bp, Homo sapiens
gttttagaatatgaa

SEQ ID NO: 758713 - DNA, 15 bp, Homo sapiens
ttttagaatatgaaa

SEQ ID NO: 758714 - DNA, 15 bp, Homo sapiens
tttagaatatgaaac

SEQ ID NO: 758715 - DNA, 15 bp, Homo sapiens
ttagaatatgaaaca

SEQ ID NO: 758716 - DNA, 15 bp, Homo sapiens
tagaatatgaaacag

SEQ ID NO: 758717 - DNA, 15 bp, Homo sapiens
agaatatgaaacagg

SEQ ID NO: 758718 - DNA, 15 bp, Homo sapiens
gaatatgaaacaggc

SEQ ID NO: 758719 - DNA, 15 bp, Homo sapiens
aatatgaaacaggct

SEQ ID NO: 758720 - DNA, 15 bp, Homo sapiens
atatgaaacaggcta

SEQ ID NO: 758721 - DNA, 15 bp, Homo sapiens
tatgaaacaggctaa

SEQ ID NO: 758722 - DNA, 15 bp, Homo sapiens
atgaaacaggctaag

SEQ ID NO: 758723 - DNA, 15 bp, Homo sapiens
tgaaacaggctaagg

SEQ ID NO: 758724 - DNA, 15 bp, Homo sapiens
gaaacaggctaaggg

SEQ ID NO: 758725 - DNA, 15 bp, Homo sapiens
aaacaggctaagggg

SEQ ID NO: 758726 - DNA, 15 bp, Homo sapiens
aacaggctaagggga

SEQ ID NO: 758727 - DNA, 15 bp, Homo sapiens
acaggctaaggggat

SEQ ID NO: 758728 - DNA, 15 bp, Homo sapiens
caggctaaggggata

SEQ ID NO: 758729 - DNA, 15 bp, Homo sapiens
aggctaaggggatag

SEQ ID NO: 758730 - DNA, 15 bp, Homo sapiens
ggctaaggggatagt

SEQ ID NO: 758731 - DNA, 15 bp, Homo sapiens
gctaaggggatagtg

SEQ ID NO: 758732 - DNA, 15 bp, Homo sapiens
ctaaggggatagtga

SEQ ID NO: 758733 - DNA, 15 bp, Homo sapiens
taaggggatagtgat

SEQ ID NO: 758734 - DNA, 15 bp, Homo sapiens
aaggggatagtgatg

SEQ ID NO: 758735 - DNA, 15 bp, Homo sapiens
aggggatagtgatgt

SEQ ID NO: 758736 - DNA, 15 bp, Homo sapiens
ggggatagtgatgtg

SEQ ID NO: 758737 - DNA, 15 bp, Homo sapiens
gggatagtgatgtga

SEQ ID NO: 758738 - DNA, 15 bp, Homo sapiens
ggatagtgatgtgag

SEQ ID NO: 758739 - DNA, 15 bp, Homo sapiens
gatagtgatgtgagt

SEQ ID NO: 758740 - DNA, 15 bp, Homo sapiens
atagtgatgtgagtg

SEQ ID NO: 758741 - DNA, 15 bp, Homo sapiens
tagtgatgtgagtgc

SEQ ID NO: 758742 - DNA, 15 bp, Homo sapiens
agtgatgtgagtgca

SEQ ID NO: 758743 - DNA, 15 bp, Homo sapiens
gtgatgtgagtgcaa

SEQ ID NO: 758744 - DNA, 15 bp, Homo sapiens
tgatgtgagtgcaat

SEQ ID NO: 758745 - DNA, 15 bp, Homo sapiens
gatgtgagtgcaatg

SEQ ID NO: 758746 - DNA, 15 bp, Homo sapiens
atgtgagtgcaatgg

SEQ ID NO: 758747 - DNA, 15 bp, Homo sapiens
tgtgagtgcaatggg

SEQ ID NO: 758748 - DNA, 15 bp, Homo sapiens
gtgagtgcaatgggg

SEQ ID NO: 758749 - DNA, 15 bp, Homo sapiens
tgagtgcaatgggga

SEQ ID NO: 758750 - DNA, 15 bp, Homo sapiens
gagtgcaatggggaa

SEQ ID NO: 758751 - DNA, 15 bp, Homo sapiens
agtgcaatggggaac

SEQ ID NO: 758752 - DNA, 15 bp, Homo sapiens
gtgcaatggggaacc

SEQ ID NO: 758753 - DNA, 15 bp, Homo sapiens
tgcaatggggaacct

SEQ ID NO: 758754 - DNA, 15 bp, Homo sapiens
gcaatggggaacctg

SEQ ID NO: 758755 - DNA, 15 bp, Homo sapiens
caatggggaacctgt

SEQ ID NO: 758756 - DNA, 15 bp, Homo sapiens
aatggggaacctgtt

SEQ ID NO: 758757 - DNA, 15 bp, Homo sapiens
atggggaacctgttt

SEQ ID NO: 758758 - DNA, 15 bp, Homo sapiens
tggggaacctgtttt

SEQ ID NO: 758759 - DNA, 15 bp, Homo sapiens
ggggaacctgtttta

SEQ ID NO: 758760 - DNA, 15 bp, Homo sapiens
gggaacctgttttat

SEQ ID NO: 758761 - DNA, 15 bp, Homo sapiens
ggaacctgttttatg

SEQ ID NO: 758762 - DNA, 15 bp, Homo sapiens
gaacctgttttatgt

SEQ ID NO: 758763 - DNA, 15 bp, Homo sapiens
aacctgttttatgta

SEQ ID NO: 758764 - DNA, 15 bp, Homo sapiens
acctgttttatgtag

SEQ ID NO: 758765 - DNA, 15 bp, Homo sapiens
cctgttttatgtagt

SEQ ID NO: 758766 - DNA, 15 bp, Homo sapiens
ctgttttatgtagtt

SEQ ID NO: 758767 - DNA, 15 bp, Homo sapiens
tgttttatgtagttg

SEQ ID NO: 758768 - DNA, 15 bp, Homo sapiens
gttttatgtagttgg

SEQ ID NO: 758769 - DNA, 15 bp, Homo sapiens
ttttatgtagttggc

SEQ ID NO: 758770 - DNA, 15 bp, Homo sapiens
tttatgtagttggcc

SEQ ID NO: 758771 - DNA, 15 bp, Homo sapiens
ttatgtagttggcca

SEQ ID NO: 758772 - DNA, 15 bp, Homo sapiens
tatgtagttggccag

SEQ ID NO: 758773 - DNA, 15 bp, Homo sapiens
atgtagttggccagg

SEQ ID NO: 758774 - DNA, 15 bp, Homo sapiens
tgtagttggccaggg

SEQ ID NO: 758775 - DNA, 15 bp, Homo sapiens
gtagttggccaggga

SEQ ID NO: 758776 - DNA, 15 bp, Homo sapiens
tagttggccagggag

SEQ ID NO: 758777 - DNA, 15 bp, Homo sapiens
agttggccagggagg

SEQ ID NO: 758778 - DNA, 15 bp, Homo sapiens
gttggccagggaggg

SEQ ID NO: 758779 - DNA, 15 bp, Homo sapiens
ttggccagggagggt

SEQ ID NO: 758780 - DNA, 15 bp, Homo sapiens
tggccagggagggtc

SEQ ID NO: 758781 - DNA, 15 bp, Homo sapiens
ggccagggagggtct

SEQ ID NO: 758782 - DNA, 15 bp, Homo sapiens
gccagggagggtctt

SEQ ID NO: 758783 - DNA, 15 bp, Homo sapiens
ccagggagggtcttt

SEQ ID NO: 758784 - DNA, 15 bp, Homo sapiens
cagggagggtctttc

SEQ ID NO: 758785 - DNA, 15 bp, Homo sapiens
agggagggtctttct

SEQ ID NO: 758786 - DNA, 15 bp, Homo sapiens
gggagggtctttcta

SEQ ID NO: 758787 - DNA, 15 bp, Homo sapiens
ggagggtctttctaa

SEQ ID NO: 758788 - DNA, 15 bp, Homo sapiens
gagggtctttctaag

SEQ ID NO: 758789 - DNA, 15 bp, Homo sapiens
agggtctttctaagg

SEQ ID NO: 758790 - DNA, 15 bp, Homo sapiens
gggtctttctaagga

SEQ ID NO: 758791 - DNA, 15 bp, Homo sapiens
ggtctttctaaggaa

SEQ ID NO: 758792 - DNA, 15 bp, Homo sapiens
gtctttctaaggaag

SEQ ID NO: 758793 - DNA, 15 bp, Homo sapiens
tctttctaaggaagt

SEQ ID NO: 758794 - DNA, 15 bp, Homo sapiens
ctttctaaggaagtg

SEQ ID NO: 758795 - DNA, 15 bp, Homo sapiens
tttctaaggaagtgg

SEQ ID NO: 758796 - DNA, 15 bp, Homo sapiens
ttctaaggaagtggc

SEQ ID NO: 758797 - DNA, 15 bp, Homo sapiens
tctaaggaagtggcc

SEQ ID NO: 758798 - DNA, 15 bp, Homo sapiens
ctaaggaagtggcca

SEQ ID NO: 758799 - DNA, 15 bp, Homo sapiens
taaggaagtggccaa

SEQ ID NO: 758800 - DNA, 15 bp, Homo sapiens
aaggaagtggccaat

SEQ ID NO: 758801 - DNA, 15 bp, Homo sapiens
aggaagtggccaatg

SEQ ID NO: 758802 - DNA, 15 bp, Homo sapiens
ggaagtggccaatga

SEQ ID NO: 758803 - DNA, 15 bp, Homo sapiens
gaagtggccaatgag

SEQ ID NO: 758804 - DNA, 15 bp, Homo sapiens
aagtggccaatgagt

SEQ ID NO: 758805 - DNA, 15 bp, Homo sapiens
agtggccaatgagtg

SEQ ID NO: 758806 - DNA, 15 bp, Homo sapiens
gtggccaatgagtgg

SEQ ID NO: 758807 - DNA, 15 bp, Homo sapiens
tggccaatgagtgga

SEQ ID NO: 758808 - DNA, 15 bp, Homo sapiens
ggccaatgagtggaa

SEQ ID NO: 758809 - DNA, 15 bp, Homo sapiens
gccaatgagtggaac

SEQ ID NO: 758810 - DNA, 15 bp, Homo sapiens
ccaatgagtggaaca

SEQ ID NO: 758811 - DNA, 15 bp, Homo sapiens
caatgagtggaacaa

SEQ ID NO: 758812 - DNA, 15 bp, Homo sapiens
aatgagtggaacaag

SEQ ID NO: 758813 - DNA, 15 bp, Homo sapiens
atgagtggaacaaga

SEQ ID NO: 758814 - DNA, 15 bp, Homo sapiens
tgagtggaacaagat

SEQ ID NO: 758815 - DNA, 15 bp, Homo sapiens
gagtggaacaagatc

SEQ ID NO: 758816 - DNA, 15 bp, Homo sapiens
agtggaacaagatca

SEQ ID NO: 758817 - DNA, 15 bp, Homo sapiens
gtggaacaagatcaa

SEQ ID NO: 758818 - DNA, 15 bp, Homo sapiens
tggaacaagatcaac

SEQ ID NO: 758819 - DNA, 15 bp, Homo sapiens
ggaacaagatcaact

SEQ ID NO: 758820 - DNA, 15 bp, Homo sapiens
gaacaagatcaactt

SEQ ID NO: 758821 - DNA, 15 bp, Homo sapiens
aacaagatcaacttg

SEQ ID NO: 758822 - DNA, 15 bp, Homo sapiens
acaagatcaacttgc

SEQ ID NO: 758823 - DNA, 15 bp, Homo sapiens
caagatcaacttgcc

SEQ ID NO: 758824 - DNA, 15 bp, Homo sapiens
aagatcaacttgcct

SEQ ID NO: 758825 - DNA, 15 bp, Homo sapiens
agatcaacttgcctg

SEQ ID NO: 758826 - DNA, 15 bp, Homo sapiens
gatcaacttgcctgg

SEQ ID NO: 758827 - DNA, 15 bp, Homo sapiens
atcaacttgcctgga

SEQ ID NO: 758828 - DNA, 15 bp, Homo sapiens
tcaacttgcctggaa

SEQ ID NO: 758829 - DNA, 15 bp, Homo sapiens
caacttgcctggaaa

SEQ ID NO: 758830 - DNA, 15 bp, Homo sapiens
aacttgcctggaaaa

SEQ ID NO: 758831 - DNA, 15 bp, Homo sapiens
acttgcctggaaaag

SEQ ID NO: 758832 - DNA, 15 bp, Homo sapiens
cttgcctggaaaagg

SEQ ID NO: 758833 - DNA, 15 bp, Homo sapiens
ttgcctggaaaagga

SEQ ID NO: 758834 - DNA, 15 bp, Homo sapiens
tgcctggaaaaggaa

SEQ ID NO: 758835 - DNA, 15 bp, Homo sapiens
gcctggaaaaggaaa

SEQ ID NO: 758836 - DNA, 15 bp, Homo sapiens
cctggaaaaggaaac

SEQ ID NO: 758837 - DNA, 15 bp, Homo sapiens
ctggaaaaggaaact

SEQ ID NO: 758838 - DNA, 15 bp, Homo sapiens
tggaaaaggaaacta

SEQ ID NO: 758839 - DNA, 15 bp, Homo sapiens
ggaaaaggaaactat

SEQ ID NO: 758840 - DNA, 15 bp, Homo sapiens
gaaaaggaaactatg

SEQ ID NO: 758841 - DNA, 15 bp, Homo sapiens
aaaaggaaactatgg

SEQ ID NO: 758842 - DNA, 15 bp, Homo sapiens
aaaggaaactatggg

SEQ ID NO: 758843 - DNA, 15 bp, Homo sapiens
aaggaaactatgggg

SEQ ID NO: 758844 - DNA, 15 bp, Homo sapiens
aggaaactatggggg

SEQ ID NO: 758845 - DNA, 15 bp, Homo sapiens
ggaaactatggggga

SEQ ID NO: 758846 - DNA, 15 bp, Homo sapiens
gaaactatgggggat

SEQ ID NO: 758847 - DNA, 15 bp, Homo sapiens
aaactatgggggatc

SEQ ID NO: 758848 - DNA, 15 bp, Homo sapiens
aactatgggggatct

SEQ ID NO: 758849 - DNA, 15 bp, Homo sapiens
actatgggggatctt

SEQ ID NO: 758850 - DNA, 15 bp, Homo sapiens
ctatgggggatcttt

SEQ ID NO: 758851 - DNA, 15 bp, Homo sapiens
tatgggggatctttg

SEQ ID NO: 758852 - DNA, 15 bp, Homo sapiens
atgggggatctttga

SEQ ID NO: 758853 - DNA, 15 bp, Homo sapiens
tgggggatctttgag

SEQ ID NO: 758854 - DNA, 15 bp, Homo sapiens
gggggatctttgagg

SEQ ID NO: 758855 - DNA, 15 bp, Homo sapiens
ggggatctttgaggg

SEQ ID NO: 758856 - DNA, 15 bp, Homo sapiens
gggatctttgaggga

SEQ ID NO: 758857 - DNA, 15 bp, Homo sapiens
ggatctttgagggaa

SEQ ID NO: 758858 - DNA, 15 bp, Homo sapiens
gatctttgagggaac

SEQ ID NO: 758859 - DNA, 15 bp, Homo sapiens
atctttgagggaaca

SEQ ID NO: 758860 - DNA, 15 bp, Homo sapiens
tctttgagggaacag

SEQ ID NO: 758861 - DNA, 15 bp, Homo sapiens
ctttgagggaacagt

SEQ ID NO: 758862 - DNA, 15 bp, Homo sapiens
tttgagggaacagta

SEQ ID NO: 758863 - DNA, 15 bp, Homo sapiens
ttgagggaacagtac

SEQ ID NO: 758864 - DNA, 15 bp, Homo sapiens
tgagggaacagtact

SEQ ID NO: 758865 - DNA, 15 bp, Homo sapiens
gagggaacagtactt

SEQ ID NO: 758866 - DNA, 15 bp, Homo sapiens
agggaacagtacttc

SEQ ID NO: 758867 - DNA, 15 bp, Homo sapiens
gggaacagtacttca

SEQ ID NO: 758868 - DNA, 15 bp, Homo sapiens
ggaacagtacttcag

SEQ ID NO: 758869 - DNA, 15 bp, Homo sapiens
gaacagtacttcagg

SEQ ID NO: 758870 - DNA, 15 bp, Homo sapiens
aacagtacttcaggt

SEQ ID NO: 758871 - DNA, 15 bp, Homo sapiens
acagtacttcaggtg

SEQ ID NO: 758872 - DNA, 15 bp, Homo sapiens
cagtacttcaggtgt

SEQ ID NO: 758873 - DNA, 15 bp, Homo sapiens
agtacttcaggtgtg

SEQ ID NO: 758874 - DNA, 15 bp, Homo sapiens
gtacttcaggtgtgt

SEQ ID NO: 758875 - DNA, 15 bp, Homo sapiens
tacttcaggtgtgtg

SEQ ID NO: 758876 - DNA, 15 bp, Homo sapiens
acttcaggtgtgtgg

SEQ ID NO: 758877 - DNA, 15 bp, Homo sapiens
cttcaggtgtgtgga

SEQ ID NO: 758878 - DNA, 15 bp, Homo sapiens
ttcaggtgtgtggaa

SEQ ID NO: 758879 - DNA, 15 bp, Homo sapiens
tcaggtgtgtggaac

SEQ ID NO: 758880 - DNA, 15 bp, Homo sapiens
caggtgtgtggaaca

SEQ ID NO: 758881 - DNA, 15 bp, Homo sapiens
aggtgtgtggaacag

SEQ ID NO: 758882 - DNA, 15 bp, Homo sapiens
ggtgtgtggaacagc

SEQ ID NO: 758883 - DNA, 15 bp, Homo sapiens
gtgtgtggaacagca

SEQ ID NO: 758884 - DNA, 15 bp, Homo sapiens
tgtgtggaacagcag

SEQ ID NO: 758885 - DNA, 15 bp, Homo sapiens
gtgtggaacagcagc

SEQ ID NO: 758886 - DNA, 15 bp, Homo sapiens
tgtggaacagcagct

SEQ ID NO: 758887 - DNA, 15 bp, Homo sapiens
gtggaacagcagctg

SEQ ID NO: 758888 - DNA, 15 bp, Homo sapiens
tggaacagcagctgt

SEQ ID NO: 758889 - DNA, 15 bp, Homo sapiens
ggaacagcagctgtg

SEQ ID NO: 758890 - DNA, 15 bp, Homo sapiens
gaacagcagctgtga

SEQ ID NO: 758891 - DNA, 15 bp, Homo sapiens
aacagcagctgtgaa

SEQ ID NO: 758892 - DNA, 15 bp, Homo sapiens
acagcagctgtgaag

SEQ ID NO: 758893 - DNA, 15 bp, Homo sapiens
cagcagctgtgaagc

SEQ ID NO: 758894 - DNA, 15 bp, Homo sapiens
agcagctgtgaagcc

SEQ ID NO: 758895 - DNA, 15 bp, Homo sapiens
gcagctgtgaagcct

SEQ ID NO: 758896 - DNA, 15 bp, Homo sapiens
cagctgtgaagcctc

SEQ ID NO: 758897 - DNA, 15 bp, Homo sapiens
agctgtgaagcctct

SEQ ID NO: 758898 - DNA, 15 bp, Homo sapiens
gctgtgaagcctctg

SEQ ID NO: 758899 - DNA, 15 bp, Homo sapiens
ctgtgaagcctctgg

SEQ ID NO: 758900 - DNA, 15 bp, Homo sapiens
tgtgaagcctctggg

SEQ ID NO: 758901 - DNA, 15 bp, Homo sapiens
gtgaagcctctgggg

SEQ ID NO: 758902 - DNA, 15 bp, Homo sapiens
tgaagcctctgggga

SEQ ID NO: 758903 - DNA, 15 bp, Homo sapiens
gaagcctctggggag

SEQ ID NO: 758904 - DNA, 15 bp, Homo sapiens
aagcctctggggagg

SEQ ID NO: 758905 - DNA, 15 bp, Homo sapiens
agcctctggggaggg

SEQ ID NO: 758906 - DNA, 15 bp, Homo sapiens
gcctctggggaggga

SEQ ID NO: 758907 - DNA, 15 bp, Homo sapiens
cctctggggagggaa

SEQ ID NO: 758908 - DNA, 15 bp, Homo sapiens
ctctggggagggaac

SEQ ID NO: 758909 - DNA, 15 bp, Homo sapiens
tctggggagggaacg

SEQ ID NO: 758910 - DNA, 15 bp, Homo sapiens
ctggggagggaacga

SEQ ID NO: 758911 - DNA, 15 bp, Homo sapiens
tggggagggaacgag

SEQ ID NO: 758912 - DNA, 15 bp, Homo sapiens
ggggagggaacgagg

SEQ ID NO: 758913 - DNA, 15 bp, Homo sapiens
gggagggaacgaggc

SEQ ID NO: 758914 - DNA, 15 bp, Homo sapiens
ggagggaacgaggct

SEQ ID NO: 758915 - DNA, 15 bp, Homo sapiens
gagggaacgaggctg

SEQ ID NO: 758916 - DNA, 15 bp, Homo sapiens
agggaacgaggctgg

SEQ ID NO: 758917 - DNA, 15 bp, Homo sapiens
gggaacgaggctggc

SEQ ID NO: 758918 - DNA, 15 bp, Homo sapiens
ggaacgaggctggct

SEQ ID NO: 758919 - DNA, 15 bp, Homo sapiens
gaacgaggctggctg

SEQ ID NO: 758920 - DNA, 15 bp, Homo sapiens
aacgaggctggctgc

SEQ ID NO: 758921 - DNA, 15 bp, Homo sapiens
acgaggctggctgct

SEQ ID NO: 758922 - DNA, 15 bp, Homo sapiens
cgaggctggctgctg

SEQ ID NO: 758923 - DNA, 15 bp, Homo sapiens
gaggctggctgctgg

SEQ ID NO: 758924 - DNA, 15 bp, Homo sapiens
aggctggctgctgga

SEQ ID NO: 758925 - DNA, 15 bp, Homo sapiens
ggctggctgctggag

SEQ ID NO: 758926 - DNA, 15 bp, Homo sapiens
gctggctgctggaga

SEQ ID NO: 758927 - DNA, 15 bp, Homo sapiens
ctggctgctggagag

SEQ ID NO: 758928 - DNA, 15 bp, Homo sapiens
tggctgctggagagt

SEQ ID NO: 758929 - DNA, 15 bp, Homo sapiens
ggctgctggagagtt

SEQ ID NO: 758930 - DNA, 15 bp, Homo sapiens
gctgctggagagttt

SEQ ID NO: 758931 - DNA, 15 bp, Homo sapiens
ctgctggagagtttc

SEQ ID NO: 758932 - DNA, 15 bp, Homo sapiens
tgctggagagtttcc

SEQ ID NO: 758933 - DNA, 15 bp, Homo sapiens
gctggagagtttcct

SEQ ID NO: 758934 - DNA, 15 bp, Homo sapiens
ctggagagtttcctt

SEQ ID NO: 758935 - DNA, 15 bp, Homo sapiens
tggagagtttccttg

SEQ ID NO: 758936 - DNA, 15 bp, Homo sapiens
ggagagtttccttgg

SEQ ID NO: 758937 - DNA, 15 bp, Homo sapiens
gagagtttccttggc

SEQ ID NO: 758938 - DNA, 15 bp, Homo sapiens
agagtttccttggct

SEQ ID NO: 758939 - DNA, 15 bp, Homo sapiens
gagtttccttggcta

SEQ ID NO: 758940 - DNA, 15 bp, Homo sapiens
agtttccttggctac

SEQ ID NO: 758941 - DNA, 15 bp, Homo sapiens
gtttccttggctacc

SEQ ID NO: 758942 - DNA, 15 bp, Homo sapiens
tttccttggctaccc

SEQ ID NO: 758943 - DNA, 15 bp, Homo sapiens
ttccttggctaccct

SEQ ID NO: 758944 - DNA, 15 bp, Homo sapiens
tccttggctaccctg

SEQ ID NO: 758945 - DNA, 15 bp, Homo sapiens
ccttggctaccctga

SEQ ID NO: 758946 - DNA, 15 bp, Homo sapiens
cttggctaccctgat

SEQ ID NO: 758947 - DNA, 15 bp, Homo sapiens
ttggctaccctgatt

SEQ ID NO: 758948 - DNA, 15 bp, Homo sapiens
tggctaccctgatta

SEQ ID NO: 758949 - DNA, 15 bp, Homo sapiens
ggctaccctgattaa

SEQ ID NO: 758950 - DNA, 15 bp, Homo sapiens
gctaccctgattaac

SEQ ID NO: 758951 - DNA, 15 bp, Homo sapiens
ctaccctgattaacg

SEQ ID NO: 758952 - DNA, 15 bp, Homo sapiens
taccctgattaacgg

SEQ ID NO: 758953 - DNA, 15 bp, Homo sapiens
accctgattaacggc

SEQ ID NO: 758954 - DNA, 15 bp, Homo sapiens
ccctgattaacggcc

SEQ ID NO: 758955 - DNA, 15 bp, Homo sapiens
cctgattaacggccc

SEQ ID NO: 758956 - DNA, 15 bp, Homo sapiens
ctgattaacggcccc

SEQ ID NO: 758957 - DNA, 15 bp, Homo sapiens
tgattaacggcccct

SEQ ID NO: 758958 - DNA, 15 bp, Homo sapiens
gattaacggcccctc

SEQ ID NO: 758959 - DNA, 15 bp, Homo sapiens
attaacggcccctct

SEQ ID NO: 758960 - DNA, 15 bp, Homo sapiens
ttaacggcccctctt

SEQ ID NO: 758961 - DNA, 15 bp, Homo sapiens
taacggcccctcttc

SEQ ID NO: 758962 - DNA, 15 bp, Homo sapiens
aacggcccctcttcc

SEQ ID NO: 758963 - DNA, 15 bp, Homo sapiens
acggcccctcttcct

SEQ ID NO: 758964 - DNA, 15 bp, Homo sapiens
cggcccctcttcctg

SEQ ID NO: 758965 - DNA, 15 bp, Homo sapiens
ggcccctcttcctgc

SEQ ID NO: 758966 - DNA, 15 bp, Homo sapiens
gcccctcttcctgcc

SEQ ID NO: 758967 - DNA, 15 bp, Homo sapiens
cccctcttcctgcct

SEQ ID NO: 758968 - DNA, 15 bp, Homo sapiens
ccctcttcctgcctc

SEQ ID NO: 758969 - DNA, 15 bp, Homo sapiens
cctcttcctgcctcc

SEQ ID NO: 758970 - DNA, 15 bp, Homo sapiens
ctcttcctgcctccc

SEQ ID NO: 758971 - DNA, 15 bp, Homo sapiens
tcttcctgcctccct

SEQ ID NO: 758972 - DNA, 15 bp, Homo sapiens
cttcctgcctccctt

SEQ ID NO: 758973 - DNA, 15 bp, Homo sapiens
ttcctgcctcccttc

SEQ ID NO: 758974 - DNA, 15 bp, Homo sapiens
tcctgcctcccttcc

SEQ ID NO: 758975 - DNA, 15 bp, Homo sapiens
cctgcctcccttccc

SEQ ID NO: 758976 - DNA, 15 bp, Homo sapiens
ctgcctcccttccct

SEQ ID NO: 758977 - DNA, 15 bp, Homo sapiens
tgcctcccttcccta

SEQ ID NO: 758978 - DNA, 15 bp, Homo sapiens
gcctcccttccctat

SEQ ID NO: 758979 - DNA, 15 bp, Homo sapiens
cctcccttccctatt

SEQ ID NO: 758980 - DNA, 15 bp, Homo sapiens
ctcccttccctattt

SEQ ID NO: 758981 - DNA, 15 bp, Homo sapiens
tcccttccctatttt

SEQ ID NO: 758982 - DNA, 15 bp, Homo sapiens
cccttccctatttta

SEQ ID NO: 758983 - DNA, 15 bp, Homo sapiens
ccttccctattttat

SEQ ID NO: 758984 - DNA, 15 bp, Homo sapiens
cttccctattttatt

SEQ ID NO: 758985 - DNA, 15 bp, Homo sapiens
ttccctattttatta

SEQ ID NO: 758986 - DNA, 15 bp, Homo sapiens
tccctattttattat

SEQ ID NO: 758987 - DNA, 15 bp, Homo sapiens
ccctattttattatt

SEQ ID NO: 758988 - DNA, 15 bp, Homo sapiens
cctattttattattt

SEQ ID NO: 758989 - DNA, 15 bp, Homo sapiens
ctattttattatttt

SEQ ID NO: 758990 - DNA, 15 bp, Homo sapiens
tattttattattttc

SEQ ID NO: 758991 - DNA, 15 bp, Homo sapiens
attttattattttct

SEQ ID NO: 758992 - DNA, 15 bp, Homo sapiens
ttttattattttctc

SEQ ID NO: 758993 - DNA, 15 bp, Homo sapiens
tttattattttctct

SEQ ID NO: 758994 - DNA, 15 bp, Homo sapiens
ttattattttctctg

SEQ ID NO: 758995 - DNA, 15 bp, Homo sapiens
tattattttctctgg

SEQ ID NO: 758996 - DNA, 15 bp, Homo sapiens
attattttctctggg

SEQ ID NO: 758997 - DNA, 15 bp, Homo sapiens
ttattttctctgggg

SEQ ID NO: 758998 - DNA, 15 bp, Homo sapiens
tattttctctggggc

SEQ ID NO: 758999 - DNA, 15 bp, Homo sapiens
attttctctggggca

SEQ ID NO: 759000 - DNA, 15 bp, Homo sapiens
ttttctctggggcat

SEQ ID NO: 759001 - DNA, 15 bp, Homo sapiens
tttctctggggcatt

SEQ ID NO: 759002 - DNA, 15 bp, Homo sapiens
ttctctggggcattt

SEQ ID NO: 759003 - DNA, 15 bp, Homo sapiens
tctctggggcatttg

SEQ ID NO: 759004 - DNA, 15 bp, Homo sapiens
ctctggggcatttgt

SEQ ID NO: 759005 - DNA, 15 bp, Homo sapiens
tctggggcatttgtc

SEQ ID NO: 759006 - DNA, 15 bp, Homo sapiens
ctggggcatttgtca

SEQ ID NO: 759007 - DNA, 15 bp, Homo sapiens
tggggcatttgtcac

SEQ ID NO: 759008 - DNA, 15 bp, Homo sapiens
ggggcatttgtcacc

SEQ ID NO: 759009 - DNA, 15 bp, Homo sapiens
gggcatttgtcacca

SEQ ID NO: 759010 - DNA, 15 bp, Homo sapiens
ggcatttgtcaccat

SEQ ID NO: 759011 - DNA, 15 bp, Homo sapiens
gcatttgtcaccatc

SEQ ID NO: 759012 - DNA, 15 bp, Homo sapiens
catttgtcaccatct

SEQ ID NO: 759013 - DNA, 15 bp, Homo sapiens
atttgtcaccatctt

SEQ ID NO: 759014 - DNA, 15 bp, Homo sapiens
tttgtcaccatctta

SEQ ID NO: 759015 - DNA, 15 bp, Homo sapiens
ttgtcaccatcttat

SEQ ID NO: 759016 - DNA, 15 bp, Homo sapiens
tgtcaccatcttata

SEQ ID NO: 759017 - DNA, 15 bp, Homo sapiens
gtcaccatcttatat

SEQ ID NO: 759018 - DNA, 15 bp, Homo sapiens
tcaccatcttatatt

SEQ ID NO: 759019 - DNA, 15 bp, Homo sapiens
caccatcttatattt

SEQ ID NO: 759020 - DNA, 15 bp, Homo sapiens
accatcttatatttg

SEQ ID NO: 759021 - DNA, 15 bp, Homo sapiens
ccatcttatatttgt

SEQ ID NO: 759022 - DNA, 15 bp, Homo sapiens
catcttatatttgtc

SEQ ID NO: 759023 - DNA, 15 bp, Homo sapiens
atcttatatttgtct

SEQ ID NO: 759024 - DNA, 15 bp, Homo sapiens
tcttatatttgtctt

SEQ ID NO: 759025 - DNA, 15 bp, Homo sapiens
cttatatttgtctta

SEQ ID NO: 759026 - DNA, 15 bp, Homo sapiens
ttatatttgtcttaa

SEQ ID NO: 759027 - DNA, 15 bp, Homo sapiens
tatatttgtcttaac

SEQ ID NO: 759028 - DNA, 15 bp, Homo sapiens
atatttgtcttaaca

SEQ ID NO: 759029 - DNA, 15 bp, Homo sapiens
tatttgtcttaacac

SEQ ID NO: 759030 - DNA, 15 bp, Homo sapiens
atttgtcttaacaca

SEQ ID NO: 759031 - DNA, 15 bp, Homo sapiens
tttgtcttaacacac

SEQ ID NO: 759032 - DNA, 15 bp, Homo sapiens
ttgtcttaacacacc

SEQ ID NO: 759033 - DNA, 15 bp, Homo sapiens
tgtcttaacacacct

SEQ ID NO: 759034 - DNA, 15 bp, Homo sapiens
gtcttaacacacctt

SEQ ID NO: 759035 - DNA, 15 bp, Homo sapiens
tcttaacacacctta

SEQ ID NO: 759036 - DNA, 15 bp, Homo sapiens
cttaacacaccttat

SEQ ID NO: 759037 - DNA, 15 bp, Homo sapiens
ttaacacaccttata

SEQ ID NO: 759038 - DNA, 15 bp, Homo sapiens
taacacaccttatat

SEQ ID NO: 759039 - DNA, 15 bp, Homo sapiens
aacacaccttatatt

SEQ ID NO: 759040 - DNA, 15 bp, Homo sapiens
acacaccttatattt

SEQ ID NO: 759041 - DNA, 15 bp, Homo sapiens
cacaccttatatttc

SEQ ID NO: 759042 - DNA, 15 bp, Homo sapiens
acaccttatatttct

SEQ ID NO: 759043 - DNA, 15 bp, Homo sapiens
caccttatatttctc

SEQ ID NO: 759044 - DNA, 15 bp, Homo sapiens
accttatatttctct

SEQ ID NO: 759045 - DNA, 15 bp, Homo sapiens
ccttatatttctctt

SEQ ID NO: 759046 - DNA, 15 bp, Homo sapiens
cttatatttctctta

SEQ ID NO: 759047 - DNA, 15 bp, Homo sapiens
ttatatttctcttat

SEQ ID NO: 759048 - DNA, 15 bp, Homo sapiens
tatatttctcttatc

SEQ ID NO: 759049 - DNA, 15 bp, Homo sapiens
atatttctcttatca

SEQ ID NO: 759050 - DNA, 15 bp, Homo sapiens
tatttctcttatcag

SEQ ID NO: 759051 - DNA, 15 bp, Homo sapiens
atttctcttatcagt

SEQ ID NO: 759052 - DNA, 15 bp, Homo sapiens
tttctcttatcagtt

SEQ ID NO: 759053 - DNA, 15 bp, Homo sapiens
ttctcttatcagttt

SEQ ID NO: 759054 - DNA, 15 bp, Homo sapiens
tctcttatcagtttg

SEQ ID NO: 759055 - DNA, 15 bp, Homo sapiens
ctcttatcagtttgg

SEQ ID NO: 759056 - DNA, 15 bp, Homo sapiens
tcttatcagtttggc

SEQ ID NO: 759057 - DNA, 15 bp, Homo sapiens
cttatcagtttggct

SEQ ID NO: 759058 - DNA, 15 bp, Homo sapiens
ttatcagtttggctt

SEQ ID NO: 759059 - DNA, 15 bp, Homo sapiens
tatcagtttggctta

SEQ ID NO: 759060 - DNA, 15 bp, Homo sapiens
atcagtttggcttat

SEQ ID NO: 759061 - DNA, 15 bp, Homo sapiens
tcagtttggcttatc

SEQ ID NO: 759062 - DNA, 15 bp, Homo sapiens
cagtttggcttatcg

SEQ ID NO: 759063 - DNA, 15 bp, Homo sapiens
agtttggcttatcgc

SEQ ID NO: 759064 - DNA, 15 bp, Homo sapiens
gtttggcttatcgcc

SEQ ID NO: 759065 - DNA, 15 bp, Homo sapiens
tttggcttatcgcct

SEQ ID NO: 759066 - DNA, 15 bp, Homo sapiens
ttggcttatcgcctg

SEQ ID NO: 759067 - DNA, 15 bp, Homo sapiens
tggcttatcgcctgt

SEQ ID NO: 759068 - DNA, 15 bp, Homo sapiens
ggcttatcgcctgtt

SEQ ID NO: 759069 - DNA, 15 bp, Homo sapiens
gcttatcgcctgttt

SEQ ID NO: 759070 - DNA, 15 bp, Homo sapiens
cttatcgcctgtttc

SEQ ID NO: 759071 - DNA, 15 bp, Homo sapiens
ttatcgcctgtttcc

SEQ ID NO: 759072 - DNA, 15 bp, Homo sapiens
tatcgcctgtttcct

SEQ ID NO: 759073 - DNA, 15 bp, Homo sapiens
atcgcctgtttcctc

SEQ ID NO: 759074 - DNA, 15 bp, Homo sapiens
tcgcctgtttcctca

SEQ ID NO: 759075 - DNA, 15 bp, Homo sapiens
cgcctgtttcctcaa

SEQ ID NO: 759076 - DNA, 15 bp, Homo sapiens
gcctgtttcctcaac

SEQ ID NO: 759077 - DNA, 15 bp, Homo sapiens
cctgtttcctcaact

SEQ ID NO: 759078 - DNA, 15 bp, Homo sapiens
ctgtttcctcaacta

SEQ ID NO: 759079 - DNA, 15 bp, Homo sapiens
tgtttcctcaactac

SEQ ID NO: 759080 - DNA, 15 bp, Homo sapiens
gtttcctcaactaca

SEQ ID NO: 759081 - DNA, 15 bp, Homo sapiens
tttcctcaactacaa

SEQ ID NO: 759082 - DNA, 15 bp, Homo sapiens
ttcctcaactacaat

SEQ ID NO: 759083 - DNA, 15 bp, Homo sapiens
tcctcaactacaatg

SEQ ID NO: 759084 - DNA, 15 bp, Homo sapiens
cctcaactacaatgt

SEQ ID NO: 759085 - DNA, 15 bp, Homo sapiens
ctcaactacaatgtc

SEQ ID NO: 759086 - DNA, 15 bp, Homo sapiens
tcaactacaatgtct

SEQ ID NO: 759087 - DNA, 15 bp, Homo sapiens
caactacaatgtctg

SEQ ID NO: 759088 - DNA, 15 bp, Homo sapiens
aactacaatgtctgt

SEQ ID NO: 759089 - DNA, 15 bp, Homo sapiens
actacaatgtctgtt

SEQ ID NO: 759090 - DNA, 15 bp, Homo sapiens
ctacaatgtctgttg

SEQ ID NO: 759091 - DNA, 15 bp, Homo sapiens
tacaatgtctgttgc

SEQ ID NO: 759092 - DNA, 15 bp, Homo sapiens
acaatgtctgttgca

SEQ ID NO: 759093 - DNA, 15 bp, Homo sapiens
caatgtctgttgcat

SEQ ID NO: 759094 - DNA, 15 bp, Homo sapiens
aatgtctgttgcatg

SEQ ID NO: 759095 - DNA, 15 bp, Homo sapiens
atgtctgttgcatgg

SEQ ID NO: 759096 - DNA, 15 bp, Homo sapiens
tgtctgttgcatgga

SEQ ID NO: 759097 - DNA, 15 bp, Homo sapiens
gtctgttgcatggag

SEQ ID NO: 759098 - DNA, 15 bp, Homo sapiens
tctgttgcatggagg

SEQ ID NO: 759099 - DNA, 15 bp, Homo sapiens
ctgttgcatggaggc

SEQ ID NO: 759100 - DNA, 15 bp, Homo sapiens
tgttgcatggaggca

SEQ ID NO: 759101 - DNA, 15 bp, Homo sapiens
gttgcatggaggcag

SEQ ID NO: 759102 - DNA, 15 bp, Homo sapiens
ttgcatggaggcagt

SEQ ID NO: 759103 - DNA, 15 bp, Homo sapiens
tgcatggaggcagta

SEQ ID NO: 759104 - DNA, 15 bp, Homo sapiens
gcatggaggcagtac

SEQ ID NO: 759105 - DNA, 15 bp, Homo sapiens
catggaggcagtact

SEQ ID NO: 759106 - DNA, 15 bp, Homo sapiens
atggaggcagtactt

SEQ ID NO: 759107 - DNA, 15 bp, Homo sapiens
tggaggcagtacttt

SEQ ID NO: 759108 - DNA, 15 bp, Homo sapiens
ggaggcagtacttta

SEQ ID NO: 759109 - DNA, 15 bp, Homo sapiens
gaggcagtactttac

SEQ ID NO: 759110 - DNA, 15 bp, Homo sapiens
aggcagtactttacc

SEQ ID NO: 759111 - DNA, 15 bp, Homo sapiens
ggcagtactttacct

SEQ ID NO: 759112 - DNA, 15 bp, Homo sapiens
gcagtactttacctg

SEQ ID NO: 759113 - DNA, 15 bp, Homo sapiens
cagtactttacctgt

SEQ ID NO: 759114 - DNA, 15 bp, Homo sapiens
agtactttacctgtg

SEQ ID NO: 759115 - DNA, 15 bp, Homo sapiens
gtactttacctgtgt

SEQ ID NO: 759116 - DNA, 15 bp, Homo sapiens
tactttacctgtgtt

SEQ ID NO: 759117 - DNA, 15 bp, Homo sapiens
actttacctgtgttt

SEQ ID NO: 759118 - DNA, 15 bp, Homo sapiens
ctttacctgtgtttt

SEQ ID NO: 759119 - DNA, 15 bp, Homo sapiens
tttacctgtgttttt

SEQ ID NO: 759120 - DNA, 15 bp, Homo sapiens
ttacctgtgtttttc

SEQ ID NO: 759121 - DNA, 15 bp, Homo sapiens
tacctgtgtttttca

SEQ ID NO: 759122 - DNA, 15 bp, Homo sapiens
acctgtgtttttcag

SEQ ID NO: 759123 - DNA, 15 bp, Homo sapiens
cctgtgtttttcagt

SEQ ID NO: 759124 - DNA, 15 bp, Homo sapiens
ctgtgtttttcagtt

SEQ ID NO: 759125 - DNA, 15 bp, Homo sapiens
tgtgtttttcagttc

SEQ ID NO: 759126 - DNA, 15 bp, Homo sapiens
gtgtttttcagttct

SEQ ID NO: 759127 - DNA, 15 bp, Homo sapiens
tgtttttcagttcta

SEQ ID NO: 759128 - DNA, 15 bp, Homo sapiens
gtttttcagttctac

SEQ ID NO: 759129 - DNA, 15 bp, Homo sapiens
tttttcagttctaca

SEQ ID NO: 759130 - DNA, 15 bp, Homo sapiens
ttttcagttctacac

SEQ ID NO: 759131 - DNA, 15 bp, Homo sapiens
tttcagttctacacc

SEQ ID NO: 759132 - DNA, 15 bp, Homo sapiens
ttcagttctacaccc

SEQ ID NO: 759133 - DNA, 15 bp, Homo sapiens
tcagttctacaccct

SEQ ID NO: 759134 - DNA, 15 bp, Homo sapiens
cagttctacacccta

SEQ ID NO: 759135 - DNA, 15 bp, Homo sapiens
agttctacaccctag

SEQ ID NO: 759136 - DNA, 15 bp, Homo sapiens
gttctacaccctagg

SEQ ID NO: 759137 - DNA, 15 bp, Homo sapiens
ttctacaccctagga

SEQ ID NO: 759138 - DNA, 15 bp, Homo sapiens
tctacaccctaggaa

SEQ ID NO: 759139 - DNA, 15 bp, Homo sapiens
ctacaccctaggaat

SEQ ID NO: 759140 - DNA, 15 bp, Homo sapiens
tacaccctaggaatg

SEQ ID NO: 759141 - DNA, 15 bp, Homo sapiens
acaccctaggaatgt

SEQ ID NO: 759142 - DNA, 15 bp, Homo sapiens
caccctaggaatgtg

SEQ ID NO: 759143 - DNA, 15 bp, Homo sapiens
accctaggaatgtgc

SEQ ID NO: 759144 - DNA, 15 bp, Homo sapiens
ccctaggaatgtgcc

SEQ ID NO: 759145 - DNA, 15 bp, Homo sapiens
cctaggaatgtgcct

SEQ ID NO: 759146 - DNA, 15 bp, Homo sapiens
ctaggaatgtgcctg

SEQ ID NO: 759147 - DNA, 15 bp, Homo sapiens
taggaatgtgcctgg

SEQ ID NO: 759148 - DNA, 15 bp, Homo sapiens
aggaatgtgcctggg

SEQ ID NO: 759149 - DNA, 15 bp, Homo sapiens
ggaatgtgcctggga

SEQ ID NO: 759150 - DNA, 15 bp, Homo sapiens
gaatgtgcctgggaa

SEQ ID NO: 759151 - DNA, 15 bp, Homo sapiens
aatgtgcctgggaaa

SEQ ID NO: 759152 - DNA, 15 bp, Homo sapiens
atgtgcctgggaaat

SEQ ID NO: 759153 - DNA, 15 bp, Homo sapiens
tgtgcctgggaaata

SEQ ID NO: 759154 - DNA, 15 bp, Homo sapiens
gtgcctgggaaatag

SEQ ID NO: 759155 - DNA, 15 bp, Homo sapiens
tgcctgggaaatagt

SEQ ID NO: 759156 - DNA, 15 bp, Homo sapiens
gcctgggaaatagtg

SEQ ID NO: 759157 - DNA, 15 bp, Homo sapiens
cctgggaaatagtgg

SEQ ID NO: 759158 - DNA, 15 bp, Homo sapiens
ctgggaaatagtggt

SEQ ID NO: 759159 - DNA, 15 bp, Homo sapiens
tgggaaatagtggtg

SEQ ID NO: 759160 - DNA, 15 bp, Homo sapiens
gggaaatagtggtgc

SEQ ID NO: 759161 - DNA, 15 bp, Homo sapiens
ggaaatagtggtgct

SEQ ID NO: 759162 - DNA, 15 bp, Homo sapiens
gaaatagtggtgctt

SEQ ID NO: 759163 - DNA, 15 bp, Homo sapiens
aaatagtggtgcttg

SEQ ID NO: 759164 - DNA, 15 bp, Homo sapiens
aatagtggtgcttga

SEQ ID NO: 759165 - DNA, 15 bp, Homo sapiens
atagtggtgcttgat

SEQ ID NO: 759166 - DNA, 15 bp, Homo sapiens
tagtggtgcttgata

SEQ ID NO: 759167 - DNA, 15 bp, Homo sapiens
agtggtgcttgatac

SEQ ID NO: 759168 - DNA, 15 bp, Homo sapiens
gtggtgcttgatacc

SEQ ID NO: 759169 - DNA, 15 bp, Homo sapiens
tggtgcttgatacct

SEQ ID NO: 759170 - DNA, 15 bp, Homo sapiens
ggtgcttgatacctc

SEQ ID NO: 759171 - DNA, 15 bp, Homo sapiens
gtgcttgatacctcc

SEQ ID NO: 759172 - DNA, 15 bp, Homo sapiens
tgcttgatacctcct

SEQ ID NO: 759173 - DNA, 15 bp, Homo sapiens
gcttgatacctcctt

SEQ ID NO: 759174 - DNA, 15 bp, Homo sapiens
cttgatacctccttg

SEQ ID NO: 759175 - DNA, 15 bp, Homo sapiens
ttgatacctccttgt

SEQ ID NO: 759176 - DNA, 15 bp, Homo sapiens
tgatacctccttgtt

SEQ ID NO: 759177 - DNA, 15 bp, Homo sapiens
gatacctccttgttg

SEQ ID NO: 759178 - DNA, 15 bp, Homo sapiens
atacctccttgttga

SEQ ID NO: 759179 - DNA, 15 bp, Homo sapiens
tacctccttgttgaa

SEQ ID NO: 759180 - DNA, 15 bp, Homo sapiens
acctccttgttgaat

SEQ ID NO: 759181 - DNA, 15 bp, Homo sapiens
cctccttgttgaatg

SEQ ID NO: 759182 - DNA, 15 bp, Homo sapiens
ctccttgttgaatgg

SEQ ID NO: 759183 - DNA, 15 bp, Homo sapiens
tccttgttgaatggg

SEQ ID NO: 759184 - DNA, 15 bp, Homo sapiens
ccttgttgaatgggg

SEQ ID NO: 759185 - DNA, 15 bp, Homo sapiens
cttgttgaatgggga

SEQ ID NO: 759186 - DNA, 15 bp, Homo sapiens
ttgttgaatggggaa

SEQ ID NO: 759187 - DNA, 15 bp, Homo sapiens
tgttgaatggggaaa

SEQ ID NO: 759188 - DNA, 15 bp, Homo sapiens
gttgaatggggaaat

SEQ ID NO: 759189 - DNA, 15 bp, Homo sapiens
ttgaatggggaaatg

SEQ ID NO: 759190 - DNA, 15 bp, Homo sapiens
tgaatggggaaatga

SEQ ID NO: 759191 - DNA, 15 bp, Homo sapiens
gaatggggaaatgaa

SEQ ID NO: 759192 - DNA, 15 bp, Homo sapiens
aatggggaaatgaac

SEQ ID NO: 759193 - DNA, 15 bp, Homo sapiens
atggggaaatgaaca

SEQ ID NO: 759194 - DNA, 15 bp, Homo sapiens
tggggaaatgaacaa

SEQ ID NO: 759195 - DNA, 15 bp, Homo sapiens
ggggaaatgaacaaa

SEQ ID NO: 759196 - DNA, 15 bp, Homo sapiens
gggaaatgaacaaat

SEQ ID NO: 759197 - DNA, 15 bp, Homo sapiens
ggaaatgaacaaatg

SEQ ID NO: 759198 - DNA, 15 bp, Homo sapiens
gaaatgaacaaatgc

SEQ ID NO: 759199 - DNA, 15 bp, Homo sapiens
aaatgaacaaatgca

SEQ ID NO: 759200 - DNA, 15 bp, Homo sapiens
aatgaacaaatgcat

SEQ ID NO: 759201 - DNA, 15 bp, Homo sapiens
atgaacaaatgcatg

SEQ ID NO: 759202 - DNA, 15 bp, Homo sapiens
tgaacaaatgcatgg

SEQ ID NO: 759203 - DNA, 15 bp, Homo sapiens
gaacaaatgcatgga

SEQ ID NO: 759204 - DNA, 15 bp, Homo sapiens
aacaaatgcatggac

SEQ ID NO: 759205 - DNA, 15 bp, Homo sapiens
acaaatgcatggact

SEQ ID NO: 759206 - DNA, 15 bp, Homo sapiens
caaatgcatggactc

SEQ ID NO: 759207 - DNA, 15 bp, Homo sapiens
aaatgcatggactca

SEQ ID NO: 759208 - DNA, 15 bp, Homo sapiens
aatgcatggactcag

SEQ ID NO: 759209 - DNA, 15 bp, Homo sapiens
atgcatggactcagc

SEQ ID NO: 759210 - DNA, 15 bp, Homo sapiens
tgcatggactcagca

SEQ ID NO: 759211 - DNA, 15 bp, Homo sapiens
gcatggactcagcaa

SEQ ID NO: 759212 - DNA, 15 bp, Homo sapiens
catggactcagcaag

SEQ ID NO: 759213 - DNA, 15 bp, Homo sapiens
atggactcagcaagc

SEQ ID NO: 759214 - DNA, 15 bp, Homo sapiens
tggactcagcaagca

SEQ ID NO: 759215 - DNA, 15 bp, Homo sapiens
ggactcagcaagcaa

SEQ ID NO: 759216 - DNA, 15 bp, Homo sapiens
gactcagcaagcaag

SEQ ID NO: 759217 - DNA, 15 bp, Homo sapiens
actcagcaagcaagg

SEQ ID NO: 759218 - DNA, 15 bp, Homo sapiens
ctcagcaagcaaggc

SEQ ID NO: 759219 - DNA, 15 bp, Homo sapiens
tcagcaagcaaggca

SEQ ID NO: 759220 - DNA, 15 bp, Homo sapiens
cagcaagcaaggcag

SEQ ID NO: 759221 - DNA, 15 bp, Homo sapiens
agcaagcaaggcaga

SEQ ID NO: 759222 - DNA, 15 bp, Homo sapiens
gcaagcaaggcagac

SEQ ID NO: 759223 - DNA, 15 bp, Homo sapiens
caagcaaggcagacg

SEQ ID NO: 759224 - DNA, 15 bp, Homo sapiens
aagcaaggcagacgg

SEQ ID NO: 759225 - DNA, 15 bp, Homo sapiens
agcaaggcagacggt

SEQ ID NO: 759226 - DNA, 15 bp, Homo sapiens
gcaaggcagacggtg

SEQ ID NO: 759227 - DNA, 15 bp, Homo sapiens
caaggcagacggtgg

SEQ ID NO: 759228 - DNA, 15 bp, Homo sapiens
aaggcagacggtggg

SEQ ID NO: 759229 - DNA, 15 bp, Homo sapiens
aggcagacggtggga

SEQ ID NO: 759230 - DNA, 15 bp, Homo sapiens
ggcagacggtgggag

SEQ ID NO: 759231 - DNA, 15 bp, Homo sapiens
gcagacggtgggagg

SEQ ID NO: 759232 - DNA, 15 bp, Homo sapiens
cagacggtgggagga

SEQ ID NO: 759233 - DNA, 15 bp, Homo sapiens
agacggtgggaggag

SEQ ID NO: 759234 - DNA, 15 bp, Homo sapiens
gacggtgggaggaga

SEQ ID NO: 759235 - DNA, 15 bp, Homo sapiens
acggtgggaggagat

SEQ ID NO: 759236 - DNA, 15 bp, Homo sapiens
cggtgggaggagatg

SEQ ID NO: 759237 - DNA, 15 bp, Homo sapiens
ggtgggaggagatgt

SEQ ID NO: 759238 - DNA, 15 bp, Homo sapiens
gtgggaggagatgtg

SEQ ID NO: 759239 - DNA, 15 bp, Homo sapiens
tgggaggagatgtga

SEQ ID NO: 759240 - DNA, 15 bp, Homo sapiens
gggaggagatgtgac

SEQ ID NO: 759241 - DNA, 15 bp, Homo sapiens
ggaggagatgtgacc

SEQ ID NO: 759242 - DNA, 15 bp, Homo sapiens
gaggagatgtgacca

SEQ ID NO: 759243 - DNA, 15 bp, Homo sapiens
aggagatgtgaccag

SEQ ID NO: 759244 - DNA, 15 bp, Homo sapiens
ggagatgtgaccagg

SEQ ID NO: 759245 - DNA, 15 bp, Homo sapiens
gagatgtgaccagga

SEQ ID NO: 759246 - DNA, 15 bp, Homo sapiens
agatgtgaccaggaa

SEQ ID NO: 759247 - DNA, 15 bp, Homo sapiens
gatgtgaccaggaag

SEQ ID NO: 759248 - DNA, 15 bp, Homo sapiens
atgtgaccaggaaga

SEQ ID NO: 759249 - DNA, 15 bp, Homo sapiens
tgtgaccaggaagat

SEQ ID NO: 759250 - DNA, 15 bp, Homo sapiens
gtgaccaggaagatg

SEQ ID NO: 759251 - DNA, 15 bp, Homo sapiens
tgaccaggaagatgg

SEQ ID NO: 759252 - DNA, 15 bp, Homo sapiens
gaccaggaagatggg

SEQ ID NO: 759253 - DNA, 15 bp, Homo sapiens
accaggaagatgggc

SEQ ID NO: 759254 - DNA, 15 bp, Homo sapiens
ccaggaagatgggca

SEQ ID NO: 759255 - DNA, 15 bp, Homo sapiens
caggaagatgggcag

SEQ ID NO: 759256 - DNA, 15 bp, Homo sapiens
aggaagatgggcagg

SEQ ID NO: 759257 - DNA, 15 bp, Homo sapiens
ggaagatgggcagga

SEQ ID NO: 759258 - DNA, 15 bp, Homo sapiens
gaagatgggcaggag

SEQ ID NO: 759259 - DNA, 15 bp, Homo sapiens
aagatgggcaggagt

SEQ ID NO: 759260 - DNA, 15 bp, Homo sapiens
agatgggcaggagtc

SEQ ID NO: 759261 - DNA, 15 bp, Homo sapiens
gatgggcaggagtcg

SEQ ID NO: 759262 - DNA, 15 bp, Homo sapiens
atgggcaggagtcgg

SEQ ID NO: 759263 - DNA, 15 bp, Homo sapiens
tgggcaggagtcgga

SEQ ID NO: 759264 - DNA, 15 bp, Homo sapiens
gggcaggagtcggag

SEQ ID NO: 759265 - DNA, 15 bp, Homo sapiens
ggcaggagtcggagg

SEQ ID NO: 759266 - DNA, 15 bp, Homo sapiens
gcaggagtcggaggg

SEQ ID NO: 759267 - DNA, 15 bp, Homo sapiens
caggagtcggagggg

SEQ ID NO: 759268 - DNA, 15 bp, Homo sapiens
aggagtcggaggggg

SEQ ID NO: 759269 - DNA, 15 bp, Homo sapiens
ggagtcggaggggga

SEQ ID NO: 759270 - DNA, 15 bp, Homo sapiens
gagtcggagggggag

SEQ ID NO: 759271 - DNA, 15 bp, Homo sapiens
agtcggagggggaga

SEQ ID NO: 759272 - DNA, 15 bp, Homo sapiens
gtcggagggggagag

SEQ ID NO: 759273 - DNA, 15 bp, Homo sapiens
tcggagggggagagg

SEQ ID NO: 759274 - DNA, 15 bp, Homo sapiens
cggagggggagaggc

SEQ ID NO: 759275 - DNA, 15 bp, Homo sapiens
ggagggggagaggct

SEQ ID NO: 759276 - DNA, 15 bp, Homo sapiens
gagggggagaggctg

SEQ ID NO: 759277 - DNA, 15 bp, Homo sapiens
agggggagaggctga

SEQ ID NO: 759278 - DNA, 15 bp, Homo sapiens
gggggagaggctgag

SEQ ID NO: 759279 - DNA, 15 bp, Homo sapiens
ggggagaggctgaga

SEQ ID NO: 759280 - DNA, 15 bp, Homo sapiens
gggagaggctgagaa

SEQ ID NO: 759281 - DNA, 15 bp, Homo sapiens
ggagaggctgagaac

SEQ ID NO: 759282 - DNA, 15 bp, Homo sapiens
gagaggctgagaaca

SEQ ID NO: 759283 - DNA, 15 bp, Homo sapiens
agaggctgagaacac

SEQ ID NO: 759284 - DNA, 15 bp, Homo sapiens
gaggctgagaacacg

SEQ ID NO: 759285 - DNA, 15 bp, Homo sapiens
aggctgagaacacgg

SEQ ID NO: 759286 - DNA, 15 bp, Homo sapiens
ggctgagaacacggg

SEQ ID NO: 759287 - DNA, 15 bp, Homo sapiens
gctgagaacacgggc

SEQ ID NO: 759288 - DNA, 15 bp, Homo sapiens
ctgagaacacgggcc

SEQ ID NO: 759289 - DNA, 15 bp, Homo sapiens
tgagaacacgggccc

SEQ ID NO: 759290 - DNA, 15 bp, Homo sapiens
gagaacacgggccct

SEQ ID NO: 759291 - DNA, 15 bp, Homo sapiens
agaacacgggccctt

SEQ ID NO: 759292 - DNA, 15 bp, Homo sapiens
gaacacgggcccttc

SEQ ID NO: 759293 - DNA, 15 bp, Homo sapiens
aacacgggcccttca

SEQ ID NO: 759294 - DNA, 15 bp, Homo sapiens
acacgggcccttcag

SEQ ID NO: 759295 - DNA, 15 bp, Homo sapiens
cacgggcccttcagt

SEQ ID NO: 759296 - DNA, 15 bp, Homo sapiens
acgggcccttcagtg

SEQ ID NO: 759297 - DNA, 15 bp, Homo sapiens
cgggcccttcagtgt

SEQ ID NO: 759298 - DNA, 15 bp, Homo sapiens
gggcccttcagtgtc

SEQ ID NO: 759299 - DNA, 15 bp, Homo sapiens
ggcccttcagtgtct

SEQ ID NO: 759300 - DNA, 15 bp, Homo sapiens
gcccttcagtgtctg

SEQ ID NO: 759301 - DNA, 15 bp, Homo sapiens
cccttcagtgtctgt

SEQ ID NO: 759302 - DNA, 15 bp, Homo sapiens
ccttcagtgtctgtg

SEQ ID NO: 759303 - DNA, 15 bp, Homo sapiens
cttcagtgtctgtgt

SEQ ID NO: 759304 - DNA, 15 bp, Homo sapiens
ttcagtgtctgtgtc

SEQ ID NO: 759305 - DNA, 15 bp, Homo sapiens
tcagtgtctgtgtcc

SEQ ID NO: 759306 - DNA, 15 bp, Homo sapiens
cagtgtctgtgtcct

SEQ ID NO: 759307 - DNA, 15 bp, Homo sapiens
agtgtctgtgtcctt

SEQ ID NO: 759308 - DNA, 15 bp, Homo sapiens
gtgtctgtgtccttg

SEQ ID NO: 759309 - DNA, 15 bp, Homo sapiens
tgtctgtgtccttgt

SEQ ID NO: 759310 - DNA, 15 bp, Homo sapiens
gtctgtgtccttgtc

SEQ ID NO: 759311 - DNA, 15 bp, Homo sapiens
tctgtgtccttgtct

SEQ ID NO: 759312 - DNA, 15 bp, Homo sapiens
ctgtgtccttgtctc

SEQ ID NO: 759313 - DNA, 15 bp, Homo sapiens
tgtgtccttgtctca

SEQ ID NO: 759314 - DNA, 15 bp, Homo sapiens
gtgtccttgtctcac

SEQ ID NO: 759315 - DNA, 15 bp, Homo sapiens
tgtccttgtctcact

SEQ ID NO: 759316 - DNA, 15 bp, Homo sapiens
gtccttgtctcactg

SEQ ID NO: 759317 - DNA, 15 bp, Homo sapiens
tccttgtctcactgc

SEQ ID NO: 759318 - DNA, 15 bp, Homo sapiens
ccttgtctcactgct

SEQ ID NO: 759319 - DNA, 15 bp, Homo sapiens
cttgtctcactgctg

SEQ ID NO: 759320 - DNA, 15 bp, Homo sapiens
ttgtctcactgctgc

SEQ ID NO: 759321 - DNA, 15 bp, Homo sapiens
tgtctcactgctgct

SEQ ID NO: 759322 - DNA, 15 bp, Homo sapiens
gtctcactgctgctg

SEQ ID NO: 759323 - DNA, 15 bp, Homo sapiens
tctcactgctgctgg

SEQ ID NO: 759324 - DNA, 15 bp, Homo sapiens
ctcactgctgctggg

SEQ ID NO: 759325 - DNA, 15 bp, Homo sapiens
tcactgctgctggga

SEQ ID NO: 759326 - DNA, 15 bp, Homo sapiens
cactgctgctgggag

SEQ ID NO: 759327 - DNA, 15 bp, Homo sapiens
actgctgctgggagg

SEQ ID NO: 759328 - DNA, 15 bp, Homo sapiens
ctgctgctgggaggg

SEQ ID NO: 759329 - DNA, 15 bp, Homo sapiens
tgctgctgggagggg

SEQ ID NO: 759330 - DNA, 15 bp, Homo sapiens
gctgctgggaggggc

SEQ ID NO: 759331 - DNA, 15 bp, Homo sapiens
ctgctgggaggggct

SEQ ID NO: 759332 - DNA, 15 bp, Homo sapiens
tgctgggaggggctg

SEQ ID NO: 759333 - DNA, 15 bp, Homo sapiens
gctgggaggggctgg

SEQ ID NO: 759334 - DNA, 15 bp, Homo sapiens
ctgggaggggctggc

SEQ ID NO: 759335 - DNA, 15 bp, Homo sapiens
tgggaggggctggca

SEQ ID NO: 759336 - DNA, 15 bp, Homo sapiens
gggaggggctggcag

SEQ ID NO: 759337 - DNA, 15 bp, Homo sapiens
ggaggggctggcaga

SEQ ID NO: 759338 - DNA, 15 bp, Homo sapiens
gaggggctggcagaa

SEQ ID NO: 759339 - DNA, 15 bp, Homo sapiens
aggggctggcagaaa

SEQ ID NO: 759340 - DNA, 15 bp, Homo sapiens
ggggctggcagaaac

SEQ ID NO: 759341 - DNA, 15 bp, Homo sapiens
gggctggcagaaact

SEQ ID NO: 759342 - DNA, 15 bp, Homo sapiens
ggctggcagaaactg

SEQ ID NO: 759343 - DNA, 15 bp, Homo sapiens
gctggcagaaactgg

SEQ ID NO: 759344 - DNA, 15 bp, Homo sapiens
ctggcagaaactggc

SEQ ID NO: 759345 - DNA, 15 bp, Homo sapiens
tggcagaaactggcc

SEQ ID NO: 759346 - DNA, 15 bp, Homo sapiens
ggcagaaactggcct

SEQ ID NO: 759347 - DNA, 15 bp, Homo sapiens
gcagaaactggcctt

SEQ ID NO: 759348 - DNA, 15 bp, Homo sapiens
cagaaactggccttc

SEQ ID NO: 759349 - DNA, 15 bp, Homo sapiens
agaaactggccttct

SEQ ID NO: 759350 - DNA, 15 bp, Homo sapiens
gaaactggccttctt

SEQ ID NO: 759351 - DNA, 15 bp, Homo sapiens
aaactggccttcttg

SEQ ID NO: 759352 - DNA, 15 bp, Homo sapiens
aactggccttcttgc

SEQ ID NO: 759353 - DNA, 15 bp, Homo sapiens
actggccttcttgcc

SEQ ID NO: 759354 - DNA, 15 bp, Homo sapiens
ctggccttcttgccc

SEQ ID NO: 759355 - DNA, 15 bp, Homo sapiens
tggccttcttgcccc

SEQ ID NO: 759356 - DNA, 15 bp, Homo sapiens
ggccttcttgcccca

SEQ ID NO: 759357 - DNA, 15 bp, Homo sapiens
gccttcttgccccat

SEQ ID NO: 759358 - DNA, 15 bp, Homo sapiens
ccttcttgccccatg

SEQ ID NO: 759359 - DNA, 15 bp, Homo sapiens
cttcttgccccatga

SEQ ID NO: 759360 - DNA, 15 bp, Homo sapiens
ttcttgccccatgag

SEQ ID NO: 759361 - DNA, 15 bp, Homo sapiens
tcttgccccatgagc

SEQ ID NO: 759362 - DNA, 15 bp, Homo sapiens
cttgccccatgagcc

SEQ ID NO: 759363 - DNA, 15 bp, Homo sapiens
ttgccccatgagccc

SEQ ID NO: 759364 - DNA, 15 bp, Homo sapiens
tgccccatgagcccc

SEQ ID NO: 759365 - DNA, 15 bp, Homo sapiens
gccccatgagcccca

SEQ ID NO: 759366 - DNA, 15 bp, Homo sapiens
ccccatgagccccaa

SEQ ID NO: 759367 - DNA, 15 bp, Homo sapiens
cccatgagccccaac

SEQ ID NO: 759368 - DNA, 15 bp, Homo sapiens
ccatgagccccaact

SEQ ID NO: 759369 - DNA, 15 bp, Homo sapiens
catgagccccaactc

SEQ ID NO: 759370 - DNA, 15 bp, Homo sapiens
atgagccccaactca

SEQ ID NO: 759371 - DNA, 15 bp, Homo sapiens
tgagccccaactcag

SEQ ID NO: 759372 - DNA, 15 bp, Homo sapiens
gagccccaactcagc

SEQ ID NO: 759373 - DNA, 15 bp, Homo sapiens
agccccaactcagca

SEQ ID NO: 759374 - DNA, 15 bp, Homo sapiens
gccccaactcagcag

SEQ ID NO: 759375 - DNA, 15 bp, Homo sapiens
ccccaactcagcaga

SEQ ID NO: 759376 - DNA, 15 bp, Homo sapiens
cccaactcagcagaa

SEQ ID NO: 759377 - DNA, 15 bp, Homo sapiens
ccaactcagcagaac

SEQ ID NO: 759378 - DNA, 15 bp, Homo sapiens
caactcagcagaacc

SEQ ID NO: 759379 - DNA, 15 bp, Homo sapiens
aactcagcagaacca

SEQ ID NO: 759380 - DNA, 15 bp, Homo sapiens
actcagcagaaccac

SEQ ID NO: 759381 - DNA, 15 bp, Homo sapiens
ctcagcagaaccacc

SEQ ID NO: 759382 - DNA, 15 bp, Homo sapiens
tcagcagaaccaccc

SEQ ID NO: 759383 - DNA, 15 bp, Homo sapiens
cagcagaaccaccca

SEQ ID NO: 759384 - DNA, 15 bp, Homo sapiens
agcagaaccacccag

SEQ ID NO: 759385 - DNA, 15 bp, Homo sapiens
gcagaaccacccagc

SEQ ID NO: 759386 - DNA, 15 bp, Homo sapiens
cagaaccacccagca

SEQ ID NO: 759387 - DNA, 15 bp, Homo sapiens
agaaccacccagcag

SEQ ID NO: 759388 - DNA, 15 bp, Homo sapiens
gaaccacccagcagg

SEQ ID NO: 759389 - DNA, 15 bp, Homo sapiens
aaccacccagcaggt

SEQ ID NO: 759390 - DNA, 15 bp, Homo sapiens
accacccagcaggtc

SEQ ID NO: 759391 - DNA, 15 bp, Homo sapiens
ccacccagcaggtct

SEQ ID NO: 759392 - DNA, 15 bp, Homo sapiens
cacccagcaggtctt

SEQ ID NO: 759393 - DNA, 15 bp, Homo sapiens
acccagcaggtctta

SEQ ID NO: 759394 - DNA, 15 bp, Homo sapiens
cccagcaggtcttag

SEQ ID NO: 759395 - DNA, 15 bp, Homo sapiens
ccagcaggtcttagc

SEQ ID NO: 759396 - DNA, 15 bp, Homo sapiens
cagcaggtcttagca

SEQ ID NO: 759397 - DNA, 15 bp, Homo sapiens
agcaggtcttagcat

SEQ ID NO: 759398 - DNA, 15 bp, Homo sapiens
gcaggtcttagcatc

SEQ ID NO: 759399 - DNA, 15 bp, Homo sapiens
caggtcttagcatcc

SEQ ID NO: 759400 - DNA, 15 bp, Homo sapiens
aggtcttagcatccc

SEQ ID NO: 759401 - DNA, 15 bp, Homo sapiens
ggtcttagcatcccc

SEQ ID NO: 759402 - DNA, 15 bp, Homo sapiens
gtcttagcatcccca

SEQ ID NO: 759403 - DNA, 15 bp, Homo sapiens
tcttagcatccccag

SEQ ID NO: 759404 - DNA, 15 bp, Homo sapiens
cttagcatccccagc

SEQ ID NO: 759405 - DNA, 15 bp, Homo sapiens
ttagcatccccagcc

SEQ ID NO: 759406 - DNA, 15 bp, Homo sapiens
tagcatccccagcct

SEQ ID NO: 759407 - DNA, 15 bp, Homo sapiens
agcatccccagcctg

SEQ ID NO: 759408 - DNA, 15 bp, Homo sapiens
gcatccccagcctgg

SEQ ID NO: 759409 - DNA, 15 bp, Homo sapiens
catccccagcctggc

SEQ ID NO: 759410 - DNA, 15 bp, Homo sapiens
atccccagcctggct

SEQ ID NO: 759411 - DNA, 15 bp, Homo sapiens
tccccagcctggctg

SEQ ID NO: 759412 - DNA, 15 bp, Homo sapiens
ccccagcctggctgc

SEQ ID NO: 759413 - DNA, 15 bp, Homo sapiens
cccagcctggctgct

SEQ ID NO: 759414 - DNA, 15 bp, Homo sapiens
ccagcctggctgctc

SEQ ID NO: 759415 - DNA, 15 bp, Homo sapiens
cagcctggctgctcc

SEQ ID NO: 759416 - DNA, 15 bp, Homo sapiens
agcctggctgctccc

SEQ ID NO: 759417 - DNA, 15 bp, Homo sapiens
gcctggctgctccca

SEQ ID NO: 759418 - DNA, 15 bp, Homo sapiens
cctggctgctcccag

SEQ ID NO: 759419 - DNA, 15 bp, Homo sapiens
ctggctgctcccagt

SEQ ID NO: 759420 - DNA, 15 bp, Homo sapiens
tggctgctcccagtg

SEQ ID NO: 759421 - DNA, 15 bp, Homo sapiens
ggctgctcccagtgg

SEQ ID NO: 759422 - DNA, 15 bp, Homo sapiens
gctgctcccagtgga

SEQ ID NO: 759423 - DNA, 15 bp, Homo sapiens
ctgctcccagtggat

SEQ ID NO: 759424 - DNA, 15 bp, Homo sapiens
tgctcccagtggatg

SEQ ID NO: 759425 - DNA, 15 bp, Homo sapiens
gctcccagtggatgc

SEQ ID NO: 759426 - DNA, 15 bp, Homo sapiens
ctcccagtggatgca

SEQ ID NO: 759427 - DNA, 15 bp, Homo sapiens
tcccagtggatgcaa

SEQ ID NO: 759428 - DNA, 15 bp, Homo sapiens
cccagtggatgcaat

SEQ ID NO: 759429 - DNA, 15 bp, Homo sapiens
ccagtggatgcaatg

SEQ ID NO: 759430 - DNA, 15 bp, Homo sapiens
cagtggatgcaatgc

SEQ ID NO: 759431 - DNA, 15 bp, Homo sapiens
agtggatgcaatgct

SEQ ID NO: 759432 - DNA, 15 bp, Homo sapiens
gtggatgcaatgctc

SEQ ID NO: 759433 - DNA, 15 bp, Homo sapiens
tggatgcaatgctca

SEQ ID NO: 759434 - DNA, 15 bp, Homo sapiens
ggatgcaatgctcat

SEQ ID NO: 759435 - DNA, 15 bp, Homo sapiens
gatgcaatgctcatt

SEQ ID NO: 759436 - DNA, 15 bp, Homo sapiens
atgcaatgctcatta

SEQ ID NO: 759437 - DNA, 15 bp, Homo sapiens
tgcaatgctcattaa

SEQ ID NO: 759438 - DNA, 15 bp, Homo sapiens
gcaatgctcattaac

SEQ ID NO: 759439 - DNA, 15 bp, Homo sapiens
caatgctcattaacc

SEQ ID NO: 759440 - DNA, 15 bp, Homo sapiens
aatgctcattaacca

SEQ ID NO: 759441 - DNA, 15 bp, Homo sapiens
atgctcattaaccat

SEQ ID NO: 759442 - DNA, 15 bp, Homo sapiens
tgctcattaaccatg

SEQ ID NO: 759443 - DNA, 15 bp, Homo sapiens
gctcattaaccatgg

SEQ ID NO: 759444 - DNA, 15 bp, Homo sapiens
ctcattaaccatgga

SEQ ID NO: 759445 - DNA, 15 bp, Homo sapiens
tcattaaccatggag

SEQ ID NO: 759446 - DNA, 15 bp, Homo sapiens
cattaaccatggagc

SEQ ID NO: 759447 - DNA, 15 bp, Homo sapiens
attaaccatggagct

SEQ ID NO: 759448 - DNA, 15 bp, Homo sapiens
ttaaccatggagctg

SEQ ID NO: 759449 - DNA, 15 bp, Homo sapiens
taaccatggagctgg

SEQ ID NO: 759450 - DNA, 15 bp, Homo sapiens
aaccatggagctggt

SEQ ID NO: 759451 - DNA, 15 bp, Homo sapiens
accatggagctggta

SEQ ID NO: 759452 - DNA, 15 bp, Homo sapiens
ccatggagctggtaa

SEQ ID NO: 759453 - DNA, 15 bp, Homo sapiens
catggagctggtaat

SEQ ID NO: 759454 - DNA, 15 bp, Homo sapiens
atggagctggtaata

SEQ ID NO: 759455 - DNA, 15 bp, Homo sapiens
tggagctggtaataa

SEQ ID NO: 759456 - DNA, 15 bp, Homo sapiens
ggagctggtaataac

SEQ ID NO: 759457 - DNA, 15 bp, Homo sapiens
gagctggtaataaca

SEQ ID NO: 759458 - DNA, 15 bp, Homo sapiens
agctggtaataacac

SEQ ID NO: 759459 - DNA, 15 bp, Homo sapiens
gctggtaataacacg

SEQ ID NO: 759460 - DNA, 15 bp, Homo sapiens
ctggtaataacacgc

SEQ ID NO: 759461 - DNA, 15 bp, Homo sapiens
tggtaataacacgcc

SEQ ID NO: 759462 - DNA, 15 bp, Homo sapiens
ggtaataacacgccc

SEQ ID NO: 759463 - DNA, 15 bp, Homo sapiens
gtaataacacgccca

SEQ ID NO: 759464 - DNA, 15 bp, Homo sapiens
taataacacgcccat

SEQ ID NO: 759465 - DNA, 15 bp, Homo sapiens
aataacacgcccatg

SEQ ID NO: 759466 - DNA, 15 bp, Homo sapiens
ataacacgcccatgt

SEQ ID NO: 759467 - DNA, 15 bp, Homo sapiens
taacacgcccatgtc

SEQ ID NO: 759468 - DNA, 15 bp, Homo sapiens
aacacgcccatgtcc

SEQ ID NO: 759469 - DNA, 15 bp, Homo sapiens
acacgcccatgtcct

SEQ ID NO: 759470 - DNA, 15 bp, Homo sapiens
cacgcccatgtcctg

SEQ ID NO: 759471 - DNA, 15 bp, Homo sapiens
acgcccatgtcctgc

SEQ ID NO: 759472 - DNA, 15 bp, Homo sapiens
cgcccatgtcctgca

SEQ ID NO: 759473 - DNA, 15 bp, Homo sapiens
gcccatgtcctgcac

SEQ ID NO: 759474 - DNA, 15 bp, Homo sapiens
cccatgtcctgcact

SEQ ID NO: 759475 - DNA, 15 bp, Homo sapiens
ccatgtcctgcactg

SEQ ID NO: 759476 - DNA, 15 bp, Homo sapiens
catgtcctgcactgc

SEQ ID NO: 759477 - DNA, 15 bp, Homo sapiens
atgtcctgcactgca

SEQ ID NO: 759478 - DNA, 15 bp, Homo sapiens
tgtcctgcactgcac

SEQ ID NO: 759479 - DNA, 15 bp, Homo sapiens
gtcctgcactgcact

SEQ ID NO: 759480 - DNA, 15 bp, Homo sapiens
tcctgcactgcactg

SEQ ID NO: 759481 - DNA, 15 bp, Homo sapiens
cctgcactgcactgg

SEQ ID NO: 759482 - DNA, 15 bp, Homo sapiens
ctgcactgcactggt

SEQ ID NO: 759483 - DNA, 15 bp, Homo sapiens
tgcactgcactggtg

SEQ ID NO: 759484 - DNA, 15 bp, Homo sapiens
gcactgcactggtgc

SEQ ID NO: 759485 - DNA, 15 bp, Homo sapiens
cactgcactggtgcc

SEQ ID NO: 759486 - DNA, 15 bp, Homo sapiens
actgcactggtgcct

SEQ ID NO: 759487 - DNA, 15 bp, Homo sapiens
ctgcactggtgcctc

SEQ ID NO: 759488 - DNA, 15 bp, Homo sapiens
tgcactggtgcctca

SEQ ID NO: 759489 - DNA, 15 bp, Homo sapiens
gcactggtgcctcaa

SEQ ID NO: 759490 - DNA, 15 bp, Homo sapiens
cactggtgcctcaaa

SEQ ID NO: 759491 - DNA, 15 bp, Homo sapiens
actggtgcctcaaat

SEQ ID NO: 759492 - DNA, 15 bp, Homo sapiens
ctggtgcctcaaatc

SEQ ID NO: 759493 - DNA, 15 bp, Homo sapiens
tggtgcctcaaatct

SEQ ID NO: 759494 - DNA, 15 bp, Homo sapiens
ggtgcctcaaatcta

SEQ ID NO: 759495 - DNA, 15 bp, Homo sapiens
gtgcctcaaatctat

SEQ ID NO: 759496 - DNA, 15 bp, Homo sapiens
tgcctcaaatctatg

SEQ ID NO: 759497 - DNA, 15 bp, Homo sapiens
gcctcaaatctatgt

SEQ ID NO: 759498 - DNA, 15 bp, Homo sapiens
cctcaaatctatgtg

SEQ ID NO: 759499 - DNA, 15 bp, Homo sapiens
ctcaaatctatgtgt

SEQ ID NO: 759500 - DNA, 15 bp, Homo sapiens
tcaaatctatgtgtt

SEQ ID NO: 759501 - DNA, 15 bp, Homo sapiens
caaatctatgtgttc

SEQ ID NO: 759502 - DNA, 15 bp, Homo sapiens
aaatctatgtgttca

SEQ ID NO: 759503 - DNA, 15 bp, Homo sapiens
aatctatgtgttcag

SEQ ID NO: 759504 - DNA, 15 bp, Homo sapiens
atctatgtgttcagc

SEQ ID NO: 759505 - DNA, 15 bp, Homo sapiens
tctatgtgttcagcc

SEQ ID NO: 759506 - DNA, 15 bp, Homo sapiens
ctatgtgttcagcct

SEQ ID NO: 759507 - DNA, 15 bp, Homo sapiens
tatgtgttcagcctt

SEQ ID NO: 759508 - DNA, 15 bp, Homo sapiens
atgtgttcagccttg

SEQ ID NO: 759509 - DNA, 15 bp, Homo sapiens
tgtgttcagccttgg

SEQ ID NO: 759510 - DNA, 15 bp, Homo sapiens
gtgttcagccttggt

SEQ ID NO: 759511 - DNA, 15 bp, Homo sapiens
tgttcagccttggtg

SEQ ID NO: 759512 - DNA, 15 bp, Homo sapiens
gttcagccttggtgt

SEQ ID NO: 759513 - DNA, 15 bp, Homo sapiens
ttcagccttggtgta

SEQ ID NO: 759514 - DNA, 15 bp, Homo sapiens
tcagccttggtgtaa

SEQ ID NO: 759515 - DNA, 15 bp, Homo sapiens
cagccttggtgtaaa

SEQ ID NO: 759516 - DNA, 15 bp, Homo sapiens
agccttggtgtaaaa

SEQ ID NO: 759517 - DNA, 15 bp, Homo sapiens
gccttggtgtaaaat

SEQ ID NO: 759518 - DNA, 15 bp, Homo sapiens
ccttggtgtaaaatc

SEQ ID NO: 759519 - DNA, 15 bp, Homo sapiens
cttggtgtaaaatca

SEQ ID NO: 759520 - DNA, 15 bp, Homo sapiens
ttggtgtaaaatcac

SEQ ID NO: 759521 - DNA, 15 bp, Homo sapiens
tggtgtaaaatcact

SEQ ID NO: 759522 - DNA, 15 bp, Homo sapiens
ggtgtaaaatcacta

SEQ ID NO: 759523 - DNA, 15 bp, Homo sapiens
gtgtaaaatcactag

SEQ ID NO: 759524 - DNA, 15 bp, Homo sapiens
tgtaaaatcactagg

SEQ ID NO: 759525 - DNA, 15 bp, Homo sapiens
gtaaaatcactagga

SEQ ID NO: 759526 - DNA, 15 bp, Homo sapiens
taaaatcactaggag

SEQ ID NO: 759527 - DNA, 15 bp, Homo sapiens
aaaatcactaggagc

SEQ ID NO: 759528 - DNA, 15 bp, Homo sapiens
aaatcactaggagcc

SEQ ID NO: 759529 - DNA, 15 bp, Homo sapiens
aatcactaggagcca

SEQ ID NO: 759530 - DNA, 15 bp, Homo sapiens
atcactaggagccag

SEQ ID NO: 759531 - DNA, 15 bp, Homo sapiens
tcactaggagccagg

SEQ ID NO: 759532 - DNA, 15 bp, Homo sapiens
cactaggagccaggg

SEQ ID NO: 759533 - DNA, 15 bp, Homo sapiens
actaggagccaggga

SEQ ID NO: 759534 - DNA, 15 bp, Homo sapiens
ctaggagccagggac

SEQ ID NO: 759535 - DNA, 15 bp, Homo sapiens
taggagccagggaca

SEQ ID NO: 759536 - DNA, 15 bp, Homo sapiens
aggagccagggacag

SEQ ID NO: 759537 - DNA, 15 bp, Homo sapiens
ggagccagggacaga

SEQ ID NO: 759538 - DNA, 15 bp, Homo sapiens
gagccagggacagag

SEQ ID NO: 759539 - DNA, 15 bp, Homo sapiens
agccagggacagagg

SEQ ID NO: 759540 - DNA, 15 bp, Homo sapiens
gccagggacagaggg

SEQ ID NO: 759541 - DNA, 15 bp, Homo sapiens
ccagggacagaggga

SEQ ID NO: 759542 - DNA, 15 bp, Homo sapiens
cagggacagagggat

SEQ ID NO: 759543 - DNA, 15 bp, Homo sapiens
agggacagagggatt

SEQ ID NO: 759544 - DNA, 15 bp, Homo sapiens
gggacagagggattc

SEQ ID NO: 759545 - DNA, 15 bp, Homo sapiens
ggacagagggattcc

SEQ ID NO: 759546 - DNA, 15 bp, Homo sapiens
gacagagggattcca

SEQ ID NO: 759547 - DNA, 15 bp, Homo sapiens
acagagggattccag

SEQ ID NO: 759548 - DNA, 15 bp, Homo sapiens
cagagggattccagg

SEQ ID NO: 759549 - DNA, 15 bp, Homo sapiens
agagggattccaggg

SEQ ID NO: 759550 - DNA, 15 bp, Homo sapiens
gagggattccaggga

SEQ ID NO: 759551 - DNA, 15 bp, Homo sapiens
agggattccagggac

SEQ ID NO: 759552 - DNA, 15 bp, Homo sapiens
gggattccagggacc

SEQ ID NO: 759553 - DNA, 15 bp, Homo sapiens
ggattccagggaccc

SEQ ID NO: 759554 - DNA, 15 bp, Homo sapiens
gattccagggacccc

SEQ ID NO: 759555 - DNA, 15 bp, Homo sapiens
attccagggacccca

SEQ ID NO: 759556 - DNA, 15 bp, Homo sapiens
ttccagggaccccac

SEQ ID NO: 759557 - DNA, 15 bp, Homo sapiens
tccagggaccccacg

SEQ ID NO: 759558 - DNA, 15 bp, Homo sapiens
ccagggaccccacgc

SEQ ID NO: 759559 - DNA, 15 bp, Homo sapiens
cagggaccccacgcc

SEQ ID NO: 759560 - DNA, 15 bp, Homo sapiens
agggaccccacgccc

SEQ ID NO: 759561 - DNA, 15 bp, Homo sapiens
gggaccccacgccca

SEQ ID NO: 759562 - DNA, 15 bp, Homo sapiens
ggaccccacgcccag

SEQ ID NO: 759563 - DNA, 15 bp, Homo sapiens
gaccccacgcccagg

SEQ ID NO: 759564 - DNA, 15 bp, Homo sapiens
accccacgcccaggg

SEQ ID NO: 759565 - DNA, 15 bp, Homo sapiens
ccccacgcccagggg

SEQ ID NO: 759566 - DNA, 15 bp, Homo sapiens
cccacgcccaggggg

SEQ ID NO: 759567 - DNA, 15 bp, Homo sapiens
ccacgcccagggggc

SEQ ID NO: 759568 - DNA, 15 bp, Homo sapiens
cacgcccagggggcc

SEQ ID NO: 759569 - DNA, 15 bp, Homo sapiens
acgcccagggggcct

SEQ ID NO: 759570 - DNA, 15 bp, Homo sapiens
cgcccagggggcctg

SEQ ID NO: 759571 - DNA, 15 bp, Homo sapiens
gcccagggggcctga

SEQ ID NO: 759572 - DNA, 15 bp, Homo sapiens
cccagggggcctgag

SEQ ID NO: 759573 - DNA, 15 bp, Homo sapiens
ccagggggcctgaga

SEQ ID NO: 759574 - DNA, 15 bp, Homo sapiens
cagggggcctgagag

SEQ ID NO: 759575 - DNA, 15 bp, Homo sapiens
agggggcctgagagg

SEQ ID NO: 759576 - DNA, 15 bp, Homo sapiens
gggggcctgagaggc

SEQ ID NO: 759577 - DNA, 15 bp, Homo sapiens
ggggcctgagaggct

SEQ ID NO: 759578 - DNA, 15 bp, Homo sapiens
gggcctgagaggctc

SEQ ID NO: 759579 - DNA, 15 bp, Homo sapiens
ggcctgagaggctca

SEQ ID NO: 759580 - DNA, 15 bp, Homo sapiens
gcctgagaggctcat

SEQ ID NO: 759581 - DNA, 15 bp, Homo sapiens
cctgagaggctcatc

SEQ ID NO: 759582 - DNA, 15 bp, Homo sapiens
ctgagaggctcatcc

SEQ ID NO: 759583 - DNA, 15 bp, Homo sapiens
tgagaggctcatcct

SEQ ID NO: 759584 - DNA, 15 bp, Homo sapiens
gagaggctcatcctt

SEQ ID NO: 759585 - DNA, 15 bp, Homo sapiens
agaggctcatccttc

SEQ ID NO: 759586 - DNA, 15 bp, Homo sapiens
gaggctcatccttcg

SEQ ID NO: 759587 - DNA, 15 bp, Homo sapiens
aggctcatccttcgt

SEQ ID NO: 759588 - DNA, 15 bp, Homo sapiens
ggctcatccttcgtg

SEQ ID NO: 759589 - DNA, 15 bp, Homo sapiens
gctcatccttcgtgt

SEQ ID NO: 759590 - DNA, 15 bp, Homo sapiens
ctcatccttcgtgtc

SEQ ID NO: 759591 - DNA, 15 bp, Homo sapiens
tcatccttcgtgtca

SEQ ID NO: 759592 - DNA, 15 bp, Homo sapiens
catccttcgtgtcag

SEQ ID NO: 759593 - DNA, 15 bp, Homo sapiens
atccttcgtgtcagc

SEQ ID NO: 759594 - DNA, 15 bp, Homo sapiens
tccttcgtgtcagct

SEQ ID NO: 759595 - DNA, 15 bp, Homo sapiens
ccttcgtgtcagctt

SEQ ID NO: 759596 - DNA, 15 bp, Homo sapiens
cttcgtgtcagcttg

SEQ ID NO: 759597 - DNA, 15 bp, Homo sapiens
ttcgtgtcagcttgt

SEQ ID NO: 759598 - DNA, 15 bp, Homo sapiens
tcgtgtcagcttgtg

SEQ ID NO: 759599 - DNA, 15 bp, Homo sapiens
cgtgtcagcttgtgt

SEQ ID NO: 759600 - DNA, 15 bp, Homo sapiens
gtgtcagcttgtgtt

SEQ ID NO: 759601 - DNA, 15 bp, Homo sapiens
tgtcagcttgtgttt

SEQ ID NO: 759602 - DNA, 15 bp, Homo sapiens
gtcagcttgtgtttt

SEQ ID NO: 759603 - DNA, 15 bp, Homo sapiens
tcagcttgtgttttc

SEQ ID NO: 759604 - DNA, 15 bp, Homo sapiens
cagcttgtgttttcc

SEQ ID NO: 759605 - DNA, 15 bp, Homo sapiens
agcttgtgttttcca

SEQ ID NO: 759606 - DNA, 15 bp, Homo sapiens
gcttgtgttttccag

SEQ ID NO: 759607 - DNA, 15 bp, Homo sapiens
cttgtgttttccagg

SEQ ID NO: 759608 - DNA, 15 bp, Homo sapiens
ttgtgttttccaggg

SEQ ID NO: 759609 - DNA, 15 bp, Homo sapiens
tgtgttttccagggg

SEQ ID NO: 759610 - DNA, 15 bp, Homo sapiens
gtgttttccaggggt

SEQ ID NO: 759611 - DNA, 15 bp, Homo sapiens
tgttttccaggggtg

SEQ ID NO: 759612 - DNA, 15 bp, Homo sapiens
gttttccaggggtgg

SEQ ID NO: 759613 - DNA, 15 bp, Homo sapiens
ttttccaggggtggt

SEQ ID NO: 759614 - DNA, 15 bp, Homo sapiens
tttccaggggtggtt

SEQ ID NO: 759615 - DNA, 15 bp, Homo sapiens
ttccaggggtggttt

SEQ ID NO: 759616 - DNA, 15 bp, Homo sapiens
tccaggggtggtttt

SEQ ID NO: 759617 - DNA, 15 bp, Homo sapiens
ccaggggtggttttg

SEQ ID NO: 759618 - DNA, 15 bp, Homo sapiens
caggggtggttttgc

SEQ ID NO: 759619 - DNA, 15 bp, Homo sapiens
aggggtggttttgcc

SEQ ID NO: 759620 - DNA, 15 bp, Homo sapiens
ggggtggttttgcct

SEQ ID NO: 759621 - DNA, 15 bp, Homo sapiens
gggtggttttgcctg

SEQ ID NO: 759622 - DNA, 15 bp, Homo sapiens
ggtggttttgcctgc

SEQ ID NO: 759623 - DNA, 15 bp, Homo sapiens
gtggttttgcctgcc

SEQ ID NO: 759624 - DNA, 15 bp, Homo sapiens
tggttttgcctgccc

SEQ ID NO: 759625 - DNA, 15 bp, Homo sapiens
ggttttgcctgcccg

SEQ ID NO: 759626 - DNA, 15 bp, Homo sapiens
gttttgcctgcccgg

SEQ ID NO: 759627 - DNA, 15 bp, Homo sapiens
ttttgcctgcccggt

SEQ ID NO: 759628 - DNA, 15 bp, Homo sapiens
tttgcctgcccggtt

SEQ ID NO: 759629 - DNA, 15 bp, Homo sapiens
ttgcctgcccggtta

SEQ ID NO: 759630 - DNA, 15 bp, Homo sapiens
tgcctgcccggttac

SEQ ID NO: 759631 - DNA, 15 bp, Homo sapiens
gcctgcccggttact

SEQ ID NO: 759632 - DNA, 15 bp, Homo sapiens
cctgcccggttactg

SEQ ID NO: 759633 - DNA, 15 bp, Homo sapiens
ctgcccggttactgc

SEQ ID NO: 759634 - DNA, 15 bp, Homo sapiens
tgcccggttactgct

SEQ ID NO: 759635 - DNA, 15 bp, Homo sapiens
gcccggttactgctg

SEQ ID NO: 759636 - DNA, 15 bp, Homo sapiens
cccggttactgctgt

SEQ ID NO: 759637 - DNA, 15 bp, Homo sapiens
ccggttactgctgtg

SEQ ID NO: 759638 - DNA, 15 bp, Homo sapiens
cggttactgctgtgg

SEQ ID NO: 759639 - DNA, 15 bp, Homo sapiens
ggttactgctgtgga

SEQ ID NO: 759640 - DNA, 15 bp, Homo sapiens
gttactgctgtggaa

SEQ ID NO: 759641 - DNA, 15 bp, Homo sapiens
ttactgctgtggaat

SEQ ID NO: 759642 - DNA, 15 bp, Homo sapiens
tactgctgtggaatt

SEQ ID NO: 759643 - DNA, 15 bp, Homo sapiens
actgctgtggaattg

SEQ ID NO: 759644 - DNA, 15 bp, Homo sapiens
ctgctgtggaattgc

SEQ ID NO: 759645 - DNA, 15 bp, Homo sapiens
tgctgtggaattgcc

SEQ ID NO: 759646 - DNA, 15 bp, Homo sapiens
gctgtggaattgcct

SEQ ID NO: 759647 - DNA, 15 bp, Homo sapiens
ctgtggaattgcctc

SEQ ID NO: 759648 - DNA, 15 bp, Homo sapiens
tgtggaattgcctct

SEQ ID NO: 759649 - DNA, 15 bp, Homo sapiens
gtggaattgcctctg

SEQ ID NO: 759650 - DNA, 15 bp, Homo sapiens
tggaattgcctctgg

SEQ ID NO: 759651 - DNA, 15 bp, Homo sapiens
ggaattgcctctggc

SEQ ID NO: 759652 - DNA, 15 bp, Homo sapiens
gaattgcctctggcc

SEQ ID NO: 759653 - DNA, 15 bp, Homo sapiens
aattgcctctggccc

SEQ ID NO: 759654 - DNA, 15 bp, Homo sapiens
attgcctctggccca

SEQ ID NO: 759655 - DNA, 15 bp, Homo sapiens
ttgcctctggcccat

SEQ ID NO: 759656 - DNA, 15 bp, Homo sapiens
tgcctctggcccatt

SEQ ID NO: 759657 - DNA, 15 bp, Homo sapiens
gcctctggcccattt

SEQ ID NO: 759658 - DNA, 15 bp, Homo sapiens
cctctggcccattta

SEQ ID NO: 759659 - DNA, 15 bp, Homo sapiens
ctctggcccatttat

SEQ ID NO: 759660 - DNA, 15 bp, Homo sapiens
tctggcccatttatg

SEQ ID NO: 759661 - DNA, 15 bp, Homo sapiens
ctggcccatttatgg

SEQ ID NO: 759662 - DNA, 15 bp, Homo sapiens
tggcccatttatggt

SEQ ID NO: 759663 - DNA, 15 bp, Homo sapiens
ggcccatttatggtg

SEQ ID NO: 759664 - DNA, 15 bp, Homo sapiens
gcccatttatggtgg

SEQ ID NO: 759665 - DNA, 15 bp, Homo sapiens
cccatttatggtgga

SEQ ID NO: 759666 - DNA, 15 bp, Homo sapiens
ccatttatggtggag

SEQ ID NO: 759667 - DNA, 15 bp, Homo sapiens
catttatggtggagg

SEQ ID NO: 759668 - DNA, 15 bp, Homo sapiens
atttatggtggaggc

SEQ ID NO: 759669 - DNA, 15 bp, Homo sapiens
tttatggtggaggcc

SEQ ID NO: 759670 - DNA, 15 bp, Homo sapiens
ttatggtggaggcct

SEQ ID NO: 759671 - DNA, 15 bp, Homo sapiens
tatggtggaggcctg

SEQ ID NO: 759672 - DNA, 15 bp, Homo sapiens
atggtggaggcctgg

SEQ ID NO: 759673 - DNA, 15 bp, Homo sapiens
tggtggaggcctggg

SEQ ID NO: 759674 - DNA, 15 bp, Homo sapiens
ggtggaggcctgggt

SEQ ID NO: 759675 - DNA, 15 bp, Homo sapiens
gtggaggcctgggtt

SEQ ID NO: 759676 - DNA, 15 bp, Homo sapiens
tggaggcctgggttc

SEQ ID NO: 759677 - DNA, 15 bp, Homo sapiens
ggaggcctgggttcc

SEQ ID NO: 759678 - DNA, 15 bp, Homo sapiens
gaggcctgggttccg

SEQ ID NO: 759679 - DNA, 15 bp, Homo sapiens
aggcctgggttccgg

SEQ ID NO: 759680 - DNA, 15 bp, Homo sapiens
ggcctgggttccggt

SEQ ID NO: 759681 - DNA, 15 bp, Homo sapiens
gcctgggttccggtg

SEQ ID NO: 759682 - DNA, 15 bp, Homo sapiens
cctgggttccggtga

SEQ ID NO: 759683 - DNA, 15 bp, Homo sapiens
ctgggttccggtgac

SEQ ID NO: 759684 - DNA, 15 bp, Homo sapiens
tgggttccggtgaca

SEQ ID NO: 759685 - DNA, 15 bp, Homo sapiens
gggttccggtgacac

SEQ ID NO: 759686 - DNA, 15 bp, Homo sapiens
ggttccggtgacact

SEQ ID NO: 759687 - DNA, 15 bp, Homo sapiens
gttccggtgacactg

SEQ ID NO: 759688 - DNA, 15 bp, Homo sapiens
ttccggtgacactgc

SEQ ID NO: 759689 - DNA, 15 bp, Homo sapiens
tccggtgacactgct

SEQ ID NO: 759690 - DNA, 15 bp, Homo sapiens
ccggtgacactgctt

SEQ ID NO: 759691 - DNA, 15 bp, Homo sapiens
cggtgacactgcttt

SEQ ID NO: 759692 - DNA, 15 bp, Homo sapiens
ggtgacactgctttc

SEQ ID NO: 759693 - DNA, 15 bp, Homo sapiens
gtgacactgctttct

SEQ ID NO: 759694 - DNA, 15 bp, Homo sapiens
tgacactgctttctt

SEQ ID NO: 759695 - DNA, 15 bp, Homo sapiens
gacactgctttcttt

SEQ ID NO: 759696 - DNA, 15 bp, Homo sapiens
acactgctttctttc

SEQ ID NO: 759697 - DNA, 15 bp, Homo sapiens
cactgctttctttct

SEQ ID NO: 759698 - DNA, 15 bp, Homo sapiens
actgctttctttctg

SEQ ID NO: 759699 - DNA, 15 bp, Homo sapiens
ctgctttctttctgt

SEQ ID NO: 759700 - DNA, 15 bp, Homo sapiens
tgctttctttctgta

SEQ ID NO: 759701 - DNA, 15 bp, Homo sapiens
gctttctttctgtac

SEQ ID NO: 759702 - DNA, 15 bp, Homo sapiens
ctttctttctgtaca

SEQ ID NO: 759703 - DNA, 15 bp, Homo sapiens
tttctttctgtacac

SEQ ID NO: 759704 - DNA, 15 bp, Homo sapiens
ttctttctgtacacc

SEQ ID NO: 759705 - DNA, 15 bp, Homo sapiens
tctttctgtacacct

SEQ ID NO: 759706 - DNA, 15 bp, Homo sapiens
ctttctgtacacctt

SEQ ID NO: 759707 - DNA, 15 bp, Homo sapiens
tttctgtacaccttg

SEQ ID NO: 759708 - DNA, 15 bp, Homo sapiens
ttctgtacaccttga

SEQ ID NO: 759709 - DNA, 15 bp, Homo sapiens
tctgtacaccttgaa

SEQ ID NO: 759710 - DNA, 15 bp, Homo sapiens
ctgtacaccttgaat

SEQ ID NO: 759711 - DNA, 15 bp, Homo sapiens
tgtacaccttgaatg

SEQ ID NO: 759712 - DNA, 15 bp, Homo sapiens
gtacaccttgaatga

SEQ ID NO: 759713 - DNA, 15 bp, Homo sapiens
tacaccttgaatgag

SEQ ID NO: 759714 - DNA, 15 bp, Homo sapiens
acaccttgaatgagg

SEQ ID NO: 759715 - DNA, 15 bp, Homo sapiens
caccttgaatgaggt

SEQ ID NO: 759716 - DNA, 15 bp, Homo sapiens
accttgaatgaggtc

SEQ ID NO: 759717 - DNA, 15 bp, Homo sapiens
ccttgaatgaggtca

SEQ ID NO: 759718 - DNA, 15 bp, Homo sapiens
cttgaatgaggtcag

SEQ ID NO: 759719 - DNA, 15 bp, Homo sapiens
ttgaatgaggtcagg

SEQ ID NO: 759720 - DNA, 15 bp, Homo sapiens
tgaatgaggtcaggc

SEQ ID NO: 759721 - DNA, 15 bp, Homo sapiens
gaatgaggtcaggca

SEQ ID NO: 759722 - DNA, 15 bp, Homo sapiens
aatgaggtcaggcag

SEQ ID NO: 759723 - DNA, 15 bp, Homo sapiens
atgaggtcaggcagc

SEQ ID NO: 759724 - DNA, 15 bp, Homo sapiens
tgaggtcaggcagct

SEQ ID NO: 759725 - DNA, 15 bp, Homo sapiens
gaggtcaggcagctc

SEQ ID NO: 759726 - DNA, 15 bp, Homo sapiens
aggtcaggcagctct

SEQ ID NO: 759727 - DNA, 15 bp, Homo sapiens
ggtcaggcagctctt

SEQ ID NO: 759728 - DNA, 15 bp, Homo sapiens
gtcaggcagctcttc

SEQ ID NO: 759729 - DNA, 15 bp, Homo sapiens
tcaggcagctcttca

SEQ ID NO: 759730 - DNA, 15 bp, Homo sapiens
caggcagctcttcat

SEQ ID NO: 759731 - DNA, 15 bp, Homo sapiens
aggcagctcttcata

SEQ ID NO: 759732 - DNA, 15 bp, Homo sapiens
ggcagctcttcatag

SEQ ID NO: 759733 - DNA, 15 bp, Homo sapiens
gcagctcttcataga

SEQ ID NO: 759734 - DNA, 15 bp, Homo sapiens
cagctcttcatagag

SEQ ID NO: 759735 - DNA, 15 bp, Homo sapiens
agctcttcatagagg

SEQ ID NO: 759736 - DNA, 15 bp, Homo sapiens
gctcttcatagaggg

SEQ ID NO: 759737 - DNA, 15 bp, Homo sapiens
ctcttcatagaggga

SEQ ID NO: 759738 - DNA, 15 bp, Homo sapiens
tcttcatagagggag

SEQ ID NO: 759739 - DNA, 15 bp, Homo sapiens
cttcatagagggagg

SEQ ID NO: 759740 - DNA, 15 bp, Homo sapiens
ttcatagagggagga

SEQ ID NO: 759741 - DNA, 15 bp, Homo sapiens
tcatagagggaggaa

SEQ ID NO: 759742 - DNA, 15 bp, Homo sapiens
catagagggaggaac

SEQ ID NO: 759743 - DNA, 15 bp, Homo sapiens
atagagggaggaact

SEQ ID NO: 759744 - DNA, 15 bp, Homo sapiens
tagagggaggaactc

SEQ ID NO: 759745 - DNA, 15 bp, Homo sapiens
agagggaggaactct

SEQ ID NO: 759746 - DNA, 15 bp, Homo sapiens
gagggaggaactctt

SEQ ID NO: 759747 - DNA, 15 bp, Homo sapiens
agggaggaactcttc

SEQ ID NO: 759748 - DNA, 15 bp, Homo sapiens
gggaggaactcttcc

SEQ ID NO: 759749 - DNA, 15 bp, Homo sapiens
ggaggaactcttcct

SEQ ID NO: 759750 - DNA, 15 bp, Homo sapiens
gaggaactcttcctg

SEQ ID NO: 759751 - DNA, 15 bp, Homo sapiens
aggaactcttcctgg

SEQ ID NO: 759752 - DNA, 15 bp, Homo sapiens
ggaactcttcctgga

SEQ ID NO: 759753 - DNA, 15 bp, Homo sapiens
gaactcttcctggag

SEQ ID NO: 759754 - DNA, 15 bp, Homo sapiens
aactcttcctggagt

SEQ ID NO: 759755 - DNA, 15 bp, Homo sapiens
actcttcctggagtg

SEQ ID NO: 759756 - DNA, 15 bp, Homo sapiens
ctcttcctggagtgc

SEQ ID NO: 759757 - DNA, 15 bp, Homo sapiens
tcttcctggagtgcc

SEQ ID NO: 759758 - DNA, 15 bp, Homo sapiens
cttcctggagtgcca

SEQ ID NO: 759759 - DNA, 15 bp, Homo sapiens
ttcctggagtgccaa

SEQ ID NO: 759760 - DNA, 15 bp, Homo sapiens
tcctggagtgccaag

SEQ ID NO: 759761 - DNA, 15 bp, Homo sapiens
cctggagtgccaagg

SEQ ID NO: 759762 - DNA, 15 bp, Homo sapiens
ctggagtgccaaggg

SEQ ID NO: 759763 - DNA, 15 bp, Homo sapiens
tggagtgccaagggt

SEQ ID NO: 759764 - DNA, 15 bp, Homo sapiens
ggagtgccaagggta

SEQ ID NO: 759765 - DNA, 15 bp, Homo sapiens
gagtgccaagggtag

SEQ ID NO: 759766 - DNA, 15 bp, Homo sapiens
agtgccaagggtagg

SEQ ID NO: 759767 - DNA, 15 bp, Homo sapiens
gtgccaagggtaggg

SEQ ID NO: 759768 - DNA, 15 bp, Homo sapiens
tgccaagggtagggt

SEQ ID NO: 759769 - DNA, 15 bp, Homo sapiens
gccaagggtagggtc

SEQ ID NO: 759770 - DNA, 15 bp, Homo sapiens
ccaagggtagggtct

SEQ ID NO: 759771 - DNA, 15 bp, Homo sapiens
caagggtagggtctg

SEQ ID NO: 759772 - DNA, 15 bp, Homo sapiens
aagggtagggtctgc

SEQ ID NO: 759773 - DNA, 15 bp, Homo sapiens
agggtagggtctgcc

SEQ ID NO: 759774 - DNA, 15 bp, Homo sapiens
gggtagggtctgcct

SEQ ID NO: 759775 - DNA, 15 bp, Homo sapiens
ggtagggtctgccta

SEQ ID NO: 759776 - DNA, 15 bp, Homo sapiens
gtagggtctgcctag

SEQ ID NO: 759777 - DNA, 15 bp, Homo sapiens
tagggtctgcctagt

SEQ ID NO: 759778 - DNA, 15 bp, Homo sapiens
agggtctgcctagtc

SEQ ID NO: 759779 - DNA, 15 bp, Homo sapiens
gggtctgcctagtcc

SEQ ID NO: 759780 - DNA, 15 bp, Homo sapiens
ggtctgcctagtccc

SEQ ID NO: 759781 - DNA, 15 bp, Homo sapiens
gtctgcctagtccca

SEQ ID NO: 759782 - DNA, 15 bp, Homo sapiens
tctgcctagtcccag

SEQ ID NO: 759783 - DNA, 15 bp, Homo sapiens
ctgcctagtcccagt

SEQ ID NO: 759784 - DNA, 15 bp, Homo sapiens
tgcctagtcccagtc

SEQ ID NO: 759785 - DNA, 15 bp, Homo sapiens
gcctagtcccagtct

SEQ ID NO: 759786 - DNA, 15 bp, Homo sapiens
cctagtcccagtctc

SEQ ID NO: 759787 - DNA, 15 bp, Homo sapiens
ctagtcccagtctct

SEQ ID NO: 759788 - DNA, 15 bp, Homo sapiens
tagtcccagtctctc

SEQ ID NO: 759789 - DNA, 15 bp, Homo sapiens
agtcccagtctctcc

SEQ ID NO: 759790 - DNA, 15 bp, Homo sapiens
gtcccagtctctcca

SEQ ID NO: 759791 - DNA, 15 bp, Homo sapiens
tcccagtctctccag

SEQ ID NO: 759792 - DNA, 15 bp, Homo sapiens
cccagtctctccagc

SEQ ID NO: 759793 - DNA, 15 bp, Homo sapiens
ccagtctctccagcc

SEQ ID NO: 759794 - DNA, 15 bp, Homo sapiens
cagtctctccagcct

SEQ ID NO: 759795 - DNA, 15 bp, Homo sapiens
agtctctccagcctg

SEQ ID NO: 759796 - DNA, 15 bp, Homo sapiens
gtctctccagcctga

SEQ ID NO: 759797 - DNA, 15 bp, Homo sapiens
tctctccagcctgag

SEQ ID NO: 759798 - DNA, 15 bp, Homo sapiens
ctctccagcctgagt

SEQ ID NO: 759799 - DNA, 15 bp, Homo sapiens
tctccagcctgagtt

SEQ ID NO: 759800 - DNA, 15 bp, Homo sapiens
ctccagcctgagttt

SEQ ID NO: 759801 - DNA, 15 bp, Homo sapiens
tccagcctgagtttg

SEQ ID NO: 759802 - DNA, 15 bp, Homo sapiens
ccagcctgagtttgc

SEQ ID NO: 759803 - DNA, 15 bp, Homo sapiens
cagcctgagtttgca

SEQ ID NO: 759804 - DNA, 15 bp, Homo sapiens
agcctgagtttgcat

SEQ ID NO: 759805 - DNA, 15 bp, Homo sapiens
gcctgagtttgcatc

SEQ ID NO: 759806 - DNA, 15 bp, Homo sapiens
cctgagtttgcatca

SEQ ID NO: 759807 - DNA, 15 bp, Homo sapiens
ctgagtttgcatcag

SEQ ID NO: 759808 - DNA, 15 bp, Homo sapiens
tgagtttgcatcagg

SEQ ID NO: 759809 - DNA, 15 bp, Homo sapiens
gagtttgcatcaggg

SEQ ID NO: 759810 - DNA, 15 bp, Homo sapiens
agtttgcatcaggga

SEQ ID NO: 759811 - DNA, 15 bp, Homo sapiens
gtttgcatcagggag

SEQ ID NO: 759812 - DNA, 15 bp, Homo sapiens
tttgcatcagggaga

SEQ ID NO: 759813 - DNA, 15 bp, Homo sapiens
ttgcatcagggagaa

SEQ ID NO: 759814 - DNA, 15 bp, Homo sapiens
tgcatcagggagaaa

SEQ ID NO: 759815 - DNA, 15 bp, Homo sapiens
gcatcagggagaaaa

SEQ ID NO: 759816 - DNA, 15 bp, Homo sapiens
catcagggagaaaaa

SEQ ID NO: 759817 - DNA, 15 bp, Homo sapiens
atcagggagaaaaag

SEQ ID NO: 759818 - DNA, 15 bp, Homo sapiens
tcagggagaaaaagc

SEQ ID NO: 759819 - DNA, 15 bp, Homo sapiens
cagggagaaaaagca

SEQ ID NO: 759820 - DNA, 15 bp, Homo sapiens
agggagaaaaagcac

SEQ ID NO: 759821 - DNA, 15 bp, Homo sapiens
gggagaaaaagcacc

SEQ ID NO: 759822 - DNA, 15 bp, Homo sapiens
ggagaaaaagcacca

SEQ ID NO: 759823 - DNA, 15 bp, Homo sapiens
gagaaaaagcaccag

SEQ ID NO: 759824 - DNA, 15 bp, Homo sapiens
agaaaaagcaccagc

SEQ ID NO: 759825 - DNA, 15 bp, Homo sapiens
gaaaaagcaccagca

SEQ ID NO: 759826 - DNA, 15 bp, Homo sapiens
aaaaagcaccagcac

SEQ ID NO: 759827 - DNA, 15 bp, Homo sapiens
aaaagcaccagcacc

SEQ ID NO: 759828 - DNA, 15 bp, Homo sapiens
aaagcaccagcacct

SEQ ID NO: 759829 - DNA, 15 bp, Homo sapiens
aagcaccagcacctt

SEQ ID NO: 759830 - DNA, 15 bp, Homo sapiens
agcaccagcaccttt

SEQ ID NO: 759831 - DNA, 15 bp, Homo sapiens
gcaccagcacctttt

SEQ ID NO: 759832 - DNA, 15 bp, Homo sapiens
caccagcaccttttt

SEQ ID NO: 759833 - DNA, 15 bp, Homo sapiens
accagcacctttttc

SEQ ID NO: 759834 - DNA, 15 bp, Homo sapiens
ccagcacctttttca

SEQ ID NO: 759835 - DNA, 15 bp, Homo sapiens
cagcacctttttcac

SEQ ID NO: 759836 - DNA, 15 bp, Homo sapiens
agcacctttttcacc

SEQ ID NO: 759837 - DNA, 15 bp, Homo sapiens
gcacctttttcacca

SEQ ID NO: 759838 - DNA, 15 bp, Homo sapiens
cacctttttcaccaa

SEQ ID NO: 759839 - DNA, 15 bp, Homo sapiens
acctttttcaccaat

SEQ ID NO: 759840 - DNA, 15 bp, Homo sapiens
cctttttcaccaatg

SEQ ID NO: 759841 - DNA, 15 bp, Homo sapiens
ctttttcaccaatgc

SEQ ID NO: 759842 - DNA, 15 bp, Homo sapiens
tttttcaccaatgcg

SEQ ID NO: 759843 - DNA, 15 bp, Homo sapiens
ttttcaccaatgcgc

SEQ ID NO: 759844 - DNA, 15 bp, Homo sapiens
tttcaccaatgcgcc

SEQ ID NO: 759845 - DNA, 15 bp, Homo sapiens
ttcaccaatgcgccc

SEQ ID NO: 759846 - DNA, 15 bp, Homo sapiens
tcaccaatgcgccct

SEQ ID NO: 759847 - DNA, 15 bp, Homo sapiens
caccaatgcgccctt

SEQ ID NO: 759848 - DNA, 15 bp, Homo sapiens
accaatgcgcccttc

SEQ ID NO: 759849 - DNA, 15 bp, Homo sapiens
ccaatgcgcccttcc

SEQ ID NO: 759850 - DNA, 15 bp, Homo sapiens
caatgcgcccttccc

SEQ ID NO: 759851 - DNA, 15 bp, Homo sapiens
aatgcgcccttcccc

SEQ ID NO: 759852 - DNA, 15 bp, Homo sapiens
atgcgcccttcccca

SEQ ID NO: 759853 - DNA, 15 bp, Homo sapiens
tgcgcccttccccac

SEQ ID NO: 759854 - DNA, 15 bp, Homo sapiens
gcgcccttccccaca

SEQ ID NO: 759855 - DNA, 15 bp, Homo sapiens
cgcccttccccacat

SEQ ID NO: 759856 - DNA, 15 bp, Homo sapiens
gcccttccccacatt

SEQ ID NO: 759857 - DNA, 15 bp, Homo sapiens
cccttccccacattc

SEQ ID NO: 759858 - DNA, 15 bp, Homo sapiens
ccttccccacattca

SEQ ID NO: 759859 - DNA, 15 bp, Homo sapiens
cttccccacattcac

SEQ ID NO: 759860 - DNA, 15 bp, Homo sapiens
ttccccacattcaca

SEQ ID NO: 759861 - DNA, 15 bp, Homo sapiens
tccccacattcacac

SEQ ID NO: 759862 - DNA, 15 bp, Homo sapiens
ccccacattcacaca

SEQ ID NO: 759863 - DNA, 15 bp, Homo sapiens
cccacattcacacac

SEQ ID NO: 759864 - DNA, 15 bp, Homo sapiens
ccacattcacacacg

SEQ ID NO: 759865 - DNA, 15 bp, Homo sapiens
cacattcacacacgc

SEQ ID NO: 759866 - DNA, 15 bp, Homo sapiens
acattcacacacgca

SEQ ID NO: 759867 - DNA, 15 bp, Homo sapiens
cattcacacacgcat

SEQ ID NO: 759868 - DNA, 15 bp, Homo sapiens
attcacacacgcatg

SEQ ID NO: 759869 - DNA, 15 bp, Homo sapiens
ttcacacacgcatgt

SEQ ID NO: 759870 - DNA, 15 bp, Homo sapiens
tcacacacgcatgtt

SEQ ID NO: 759871 - DNA, 15 bp, Homo sapiens
cacacacgcatgttc

SEQ ID NO: 759872 - DNA, 15 bp, Homo sapiens
acacacgcatgttca

SEQ ID NO: 759873 - DNA, 15 bp, Homo sapiens
cacacgcatgttcac

SEQ ID NO: 759874 - DNA, 15 bp, Homo sapiens
acacgcatgttcaca

SEQ ID NO: 759875 - DNA, 15 bp, Homo sapiens
cacgcatgttcacat

SEQ ID NO: 759876 - DNA, 15 bp, Homo sapiens
acgcatgttcacatg

SEQ ID NO: 759877 - DNA, 15 bp, Homo sapiens
cgcatgttcacatgc

SEQ ID NO: 759878 - DNA, 15 bp, Homo sapiens
gcatgttcacatgca

SEQ ID NO: 759879 - DNA, 15 bp, Homo sapiens
catgttcacatgcat

SEQ ID NO: 759880 - DNA, 15 bp, Homo sapiens
atgttcacatgcatg

SEQ ID NO: 759881 - DNA, 15 bp, Homo sapiens
tgttcacatgcatgc

SEQ ID NO: 759882 - DNA, 15 bp, Homo sapiens
gttcacatgcatgca

SEQ ID NO: 759883 - DNA, 15 bp, Homo sapiens
ttcacatgcatgcac

SEQ ID NO: 759884 - DNA, 15 bp, Homo sapiens
tcacatgcatgcaca

SEQ ID NO: 759885 - DNA, 15 bp, Homo sapiens
cacatgcatgcacat

SEQ ID NO: 759886 - DNA, 15 bp, Homo sapiens
acatgcatgcacatg

SEQ ID NO: 759887 - DNA, 15 bp, Homo sapiens
catgcatgcacatgt

SEQ ID NO: 759888 - DNA, 15 bp, Homo sapiens
atgcatgcacatgta

SEQ ID NO: 759889 - DNA, 15 bp, Homo sapiens
tgcatgcacatgtat

SEQ ID NO: 759890 - DNA, 15 bp, Homo sapiens
gcatgcacatgtatg

SEQ ID NO: 759891 - DNA, 15 bp, Homo sapiens
catgcacatgtatgc

SEQ ID NO: 759892 - DNA, 15 bp, Homo sapiens
atgcacatgtatgca

SEQ ID NO: 759893 - DNA, 15 bp, Homo sapiens
tgcacatgtatgcag

SEQ ID NO: 759894 - DNA, 15 bp, Homo sapiens
gcacatgtatgcagg

SEQ ID NO: 759895 - DNA, 15 bp, Homo sapiens
cacatgtatgcaggc

SEQ ID NO: 759896 - DNA, 15 bp, Homo sapiens
acatgtatgcaggcc

SEQ ID NO: 759897 - DNA, 15 bp, Homo sapiens
catgtatgcaggccg

SEQ ID NO: 759898 - DNA, 15 bp, Homo sapiens
atgtatgcaggccgg

SEQ ID NO: 759899 - DNA, 15 bp, Homo sapiens
tgtatgcaggccggc

SEQ ID NO: 759900 - DNA, 15 bp, Homo sapiens
gtatgcaggccggct

SEQ ID NO: 759901 - DNA, 15 bp, Homo sapiens
tatgcaggccggctt

SEQ ID NO: 759902 - DNA, 15 bp, Homo sapiens
atgcaggccggcttc

SEQ ID NO: 759903 - DNA, 15 bp, Homo sapiens
tgcaggccggcttcc

SEQ ID NO: 759904 - DNA, 15 bp, Homo sapiens
gcaggccggcttccc

SEQ ID NO: 759905 - DNA, 15 bp, Homo sapiens
caggccggcttcccc

SEQ ID NO: 759906 - DNA, 15 bp, Homo sapiens
aggccggcttcccct

SEQ ID NO: 759907 - DNA, 15 bp, Homo sapiens
ggccggcttcccctc

SEQ ID NO: 759908 - DNA, 15 bp, Homo sapiens
gccggcttcccctca

SEQ ID NO: 759909 - DNA, 15 bp, Homo sapiens
ccggcttcccctcac

SEQ ID NO: 759910 - DNA, 15 bp, Homo sapiens
cggcttcccctcacc

SEQ ID NO: 759911 - DNA, 15 bp, Homo sapiens
ggcttcccctcacct

SEQ ID NO: 759912 - DNA, 15 bp, Homo sapiens
gcttcccctcacctt

SEQ ID NO: 759913 - DNA, 15 bp, Homo sapiens
cttcccctcaccttt

SEQ ID NO: 759914 - DNA, 15 bp, Homo sapiens
ttcccctcacctttt

SEQ ID NO: 759915 - DNA, 15 bp, Homo sapiens
tcccctcaccttttg

SEQ ID NO: 759916 - DNA, 15 bp, Homo sapiens
cccctcaccttttgt

SEQ ID NO: 759917 - DNA, 15 bp, Homo sapiens
ccctcaccttttgtt

SEQ ID NO: 759918 - DNA, 15 bp, Homo sapiens
cctcaccttttgttt

SEQ ID NO: 759919 - DNA, 15 bp, Homo sapiens
ctcaccttttgtttt

SEQ ID NO: 759920 - DNA, 15 bp, Homo sapiens
tcaccttttgttttt

SEQ ID NO: 759921 - DNA, 15 bp, Homo sapiens
caccttttgtttttt

SEQ ID NO: 759922 - DNA, 15 bp, Homo sapiens
accttttgttttttt

SEQ ID NO: 759923 - DNA, 15 bp, Homo sapiens
ccttttgtttttttt

SEQ ID NO: 759924 - DNA, 15 bp, Homo sapiens
cttttgttttttttt

SEQ ID NO: 759925 - DNA, 15 bp, Homo sapiens
ttttgtttttttttt

SEQ ID NO: 759926 - DNA, 15 bp, Homo sapiens
tttgttttttttttt

SEQ ID NO: 759927 - DNA, 15 bp, Homo sapiens
ttgtttttttttttt

SEQ ID NO: 759928 - DNA, 15 bp, Homo sapiens
tgttttttttttttt

SEQ ID NO: 759929 - DNA, 15 bp, Homo sapiens
gtttttttttttttt

SEQ ID NO: 759930 - DNA, 15 bp, Homo sapiens
tttttttttttttgt

SEQ ID NO: 759931 - DNA, 15 bp, Homo sapiens
tttttttttttgtaa

SEQ ID NO: 759932 - DNA, 15 bp, Homo sapiens
ttttttttttgtaaa

SEQ ID NO: 759933 - DNA, 15 bp, Homo sapiens
tttttttttgtaaaa

SEQ ID NO: 759934 - DNA, 15 bp, Homo sapiens
ttttttttgtaaaaa

SEQ ID NO: 759935 - DNA, 15 bp, Homo sapiens
tttttttgtaaaaaa

SEQ ID NO: 759936 - DNA, 15 bp, Homo sapiens
ttttttgtaaaaaac

SEQ ID NO: 759937 - DNA, 15 bp, Homo sapiens
tttttgtaaaaaaca

SEQ ID NO: 759938 - DNA, 15 bp, Homo sapiens
ttttgtaaaaaacac

SEQ ID NO: 759939 - DNA, 15 bp, Homo sapiens
tttgtaaaaaacaca

SEQ ID NO: 759940 - DNA, 15 bp, Homo sapiens
ttgtaaaaaacacac

SEQ ID NO: 759941 - DNA, 15 bp, Homo sapiens
tgtaaaaaacacaca

SEQ ID NO: 759942 - DNA, 15 bp, Homo sapiens
gtaaaaaacacacat

SEQ ID NO: 759943 - DNA, 15 bp, Homo sapiens
taaaaaacacacatc

SEQ ID NO: 759944 - DNA, 15 bp, Homo sapiens
aaaaaacacacatcc

SEQ ID NO: 759945 - DNA, 15 bp, Homo sapiens
aaaaacacacatccc

SEQ ID NO: 759946 - DNA, 15 bp, Homo sapiens
aaaacacacatccct

SEQ ID NO: 759947 - DNA, 15 bp, Homo sapiens
aaacacacatcccta

SEQ ID NO: 759948 - DNA, 15 bp, Homo sapiens
aacacacatccctat

SEQ ID NO: 759949 - DNA, 15 bp, Homo sapiens
acacacatccctatg

SEQ ID NO: 759950 - DNA, 15 bp, Homo sapiens
cacacatccctatgt

SEQ ID NO: 759951 - DNA, 15 bp, Homo sapiens
acacatccctatgtc

SEQ ID NO: 759952 - DNA, 15 bp, Homo sapiens
cacatccctatgtcc

SEQ ID NO: 759953 - DNA, 15 bp, Homo sapiens
acatccctatgtcca

SEQ ID NO: 759954 - DNA, 15 bp, Homo sapiens
catccctatgtccac

SEQ ID NO: 759955 - DNA, 15 bp, Homo sapiens
atccctatgtccaca

SEQ ID NO: 759956 - DNA, 15 bp, Homo sapiens
tccctatgtccacaa

SEQ ID NO: 759957 - DNA, 15 bp, Homo sapiens
ccctatgtccacaaa

SEQ ID NO: 759958 - DNA, 15 bp, Homo sapiens
cctatgtccacaaac

SEQ ID NO: 759959 - DNA, 15 bp, Homo sapiens
ctatgtccacaaaca

SEQ ID NO: 759960 - DNA, 15 bp, Homo sapiens
tatgtccacaaacac

SEQ ID NO: 759961 - DNA, 15 bp, Homo sapiens
atgtccacaaacacc

SEQ ID NO: 759962 - DNA, 15 bp, Homo sapiens
tgtccacaaacaccc

SEQ ID NO: 759963 - DNA, 15 bp, Homo sapiens
gtccacaaacaccct

SEQ ID NO: 759964 - DNA, 15 bp, Homo sapiens
tccacaaacaccctc

SEQ ID NO: 759965 - DNA, 15 bp, Homo sapiens
ccacaaacaccctca

SEQ ID NO: 759966 - DNA, 15 bp, Homo sapiens
cacaaacaccctcac

SEQ ID NO: 759967 - DNA, 15 bp, Homo sapiens
acaaacaccctcacc

SEQ ID NO: 759968 - DNA, 15 bp, Homo sapiens
caaacaccctcaccc

SEQ ID NO: 759969 - DNA, 15 bp, Homo sapiens
aaacaccctcaccct

SEQ ID NO: 759970 - DNA, 15 bp, Homo sapiens
aacaccctcaccctc

SEQ ID NO: 759971 - DNA, 15 bp, Homo sapiens
acaccctcaccctca

SEQ ID NO: 759972 - DNA, 15 bp, Homo sapiens
caccctcaccctcac

SEQ ID NO: 759973 - DNA, 15 bp, Homo sapiens
accctcaccctcact

SEQ ID NO: 759974 - DNA, 15 bp, Homo sapiens
ccctcaccctcactt

SEQ ID NO: 759975 - DNA, 15 bp, Homo sapiens
cctcaccctcacttc

SEQ ID NO: 759976 - DNA, 15 bp, Homo sapiens
ctcaccctcacttcc

SEQ ID NO: 759977 - DNA, 15 bp, Homo sapiens
tcaccctcacttcct

SEQ ID NO: 759978 - DNA, 15 bp, Homo sapiens
caccctcacttcctc

SEQ ID NO: 759979 - DNA, 15 bp, Homo sapiens
accctcacttcctcc

SEQ ID NO: 759980 - DNA, 15 bp, Homo sapiens
ccctcacttcctccc

SEQ ID NO: 759981 - DNA, 15 bp, Homo sapiens
cctcacttcctccct

SEQ ID NO: 759982 - DNA, 15 bp, Homo sapiens
ctcacttcctccctc

SEQ ID NO: 759983 - DNA, 15 bp, Homo sapiens
tcacttcctccctca

SEQ ID NO: 759984 - DNA, 15 bp, Homo sapiens
cacttcctccctcat

SEQ ID NO: 759985 - DNA, 15 bp, Homo sapiens
acttcctccctcatc

SEQ ID NO: 759986 - DNA, 15 bp, Homo sapiens
cttcctccctcatcc

SEQ ID NO: 759987 - DNA, 15 bp, Homo sapiens
ttcctccctcatcca

SEQ ID NO: 759988 - DNA, 15 bp, Homo sapiens
tcctccctcatccac

SEQ ID NO: 759989 - DNA, 15 bp, Homo sapiens
cctccctcatccaca

SEQ ID NO: 759990 - DNA, 15 bp, Homo sapiens
ctccctcatccacag

SEQ ID NO: 759991 - DNA, 15 bp, Homo sapiens
tccctcatccacaga

SEQ ID NO: 759992 - DNA, 15 bp, Homo sapiens
ccctcatccacagac

SEQ ID NO: 759993 - DNA, 15 bp, Homo sapiens
cctcatccacagaca

SEQ ID NO: 759994 - DNA, 15 bp, Homo sapiens
ctcatccacagacac

SEQ ID NO: 759995 - DNA, 15 bp, Homo sapiens
tcatccacagacacc

SEQ ID NO: 759996 - DNA, 15 bp, Homo sapiens
catccacagacacct

SEQ ID NO: 759997 - DNA, 15 bp, Homo sapiens
atccacagacacctg

SEQ ID NO: 759998 - DNA, 15 bp, Homo sapiens
tccacagacacctgt

SEQ ID NO: 759999 - DNA, 15 bp, Homo sapiens
ccacagacacctgtt

SEQ ID NO: 760000 - DNA, 15 bp, Homo sapiens
cacagacacctgttc

SEQ ID NO: 760001 - DNA, 15 bp, Homo sapiens
acagacacctgttcc

SEQ ID NO: 760002 - DNA, 15 bp, Homo sapiens
cagacacctgttccc

SEQ ID NO: 760003 - DNA, 15 bp, Homo sapiens
agacacctgttcccc

SEQ ID NO: 760004 - DNA, 15 bp, Homo sapiens
gacacctgttcccca

SEQ ID NO: 760005 - DNA, 15 bp, Homo sapiens
acacctgttccccag

SEQ ID NO: 760006 - DNA, 15 bp, Homo sapiens
cacctgttccccagt

SEQ ID NO: 760007 - DNA, 15 bp, Homo sapiens
acctgttccccagtg

SEQ ID NO: 760008 - DNA, 15 bp, Homo sapiens
cctgttccccagtga

SEQ ID NO: 760009 - DNA, 15 bp, Homo sapiens
ctgttccccagtgat

SEQ ID NO: 760010 - DNA, 15 bp, Homo sapiens
tgttccccagtgatg

SEQ ID NO: 760011 - DNA, 15 bp, Homo sapiens
gttccccagtgatgc

SEQ ID NO: 760012 - DNA, 15 bp, Homo sapiens
ttccccagtgatgca

SEQ ID NO: 760013 - DNA, 15 bp, Homo sapiens
tccccagtgatgcac

SEQ ID NO: 760014 - DNA, 15 bp, Homo sapiens
ccccagtgatgcaca

SEQ ID NO: 760015 - DNA, 15 bp, Homo sapiens
cccagtgatgcacat

SEQ ID NO: 760016 - DNA, 15 bp, Homo sapiens
ccagtgatgcacatt

SEQ ID NO: 760017 - DNA, 15 bp, Homo sapiens
cagtgatgcacattt

SEQ ID NO: 760018 - DNA, 15 bp, Homo sapiens
agtgatgcacatttg

SEQ ID NO: 760019 - DNA, 15 bp, Homo sapiens
gtgatgcacatttgc

SEQ ID NO: 760020 - DNA, 15 bp, Homo sapiens
tgatgcacatttgct

SEQ ID NO: 760021 - DNA, 15 bp, Homo sapiens
gatgcacatttgctc

SEQ ID NO: 760022 - DNA, 15 bp, Homo sapiens
atgcacatttgctca

SEQ ID NO: 760023 - DNA, 15 bp, Homo sapiens
tgcacatttgctcac

SEQ ID NO: 760024 - DNA, 15 bp, Homo sapiens
gcacatttgctcaca

SEQ ID NO: 760025 - DNA, 15 bp, Homo sapiens
aagagactgtgatcc

SEQ ID NO: 760026 - DNA, 15 bp, Homo sapiens
agagactgtgatcct

SEQ ID NO: 760027 - DNA, 15 bp, Homo sapiens
gagactgtgatcctc

SEQ ID NO: 760028 - DNA, 15 bp, Homo sapiens
agactgtgatcctct

SEQ ID NO: 760029 - DNA, 15 bp, Homo sapiens
gactgtgatcctctg

SEQ ID NO: 760030 - DNA, 15 bp, Homo sapiens
actgtgatcctctga

SEQ ID NO: 760031 - DNA, 15 bp, Homo sapiens
ctgtgatcctctgaa

SEQ ID NO: 760032 - DNA, 15 bp, Homo sapiens
tgtgatcctctgaag

SEQ ID NO: 760033 - DNA, 15 bp, Homo sapiens
gtgatcctctgaagc

SEQ ID NO: 760034 - DNA, 15 bp, Homo sapiens
tgatcctctgaagcc

SEQ ID NO: 760035 - DNA, 15 bp, Homo sapiens
gatcctctgaagccc

SEQ ID NO: 760036 - DNA, 15 bp, Homo sapiens
atcctctgaagcccc

SEQ ID NO: 760037 - DNA, 15 bp, Homo sapiens
tcctctgaagcccct

SEQ ID NO: 760038 - DNA, 15 bp, Homo sapiens
cctctgaagcccctg

SEQ ID NO: 760039 - DNA, 15 bp, Homo sapiens
ctctgaagcccctgg

SEQ ID NO: 760040 - DNA, 15 bp, Homo sapiens
tctgaagcccctgga

SEQ ID NO: 760041 - DNA, 15 bp, Homo sapiens
ctgaagcccctggat

SEQ ID NO: 760042 - DNA, 15 bp, Homo sapiens
tgaagcccctggata

SEQ ID NO: 760043 - DNA, 15 bp, Homo sapiens
gaagcccctggatat

SEQ ID NO: 760044 - DNA, 15 bp, Homo sapiens
aagcccctggatatg

SEQ ID NO: 760045 - DNA, 15 bp, Homo sapiens
agcccctggatatgt

SEQ ID NO: 760046 - DNA, 15 bp, Homo sapiens
gcccctggatatgtc

SEQ ID NO: 760047 - DNA, 15 bp, Homo sapiens
cccctggatatgtca

SEQ ID NO: 760048 - DNA, 15 bp, Homo sapiens
ccctggatatgtcaa

SEQ ID NO: 760049 - DNA, 15 bp, Homo sapiens
cctggatatgtcaaa

SEQ ID NO: 760050 - DNA, 15 bp, Homo sapiens
ctggatatgtcaaat

SEQ ID NO: 760051 - DNA, 15 bp, Homo sapiens
tggatatgtcaaatt

SEQ ID NO: 760052 - DNA, 15 bp, Homo sapiens
ggatatgtcaaattc

SEQ ID NO: 760053 - DNA, 15 bp, Homo sapiens
gatatgtcaaattca

SEQ ID NO: 760054 - DNA, 15 bp, Homo sapiens
atatgtcaaattcat

SEQ ID NO: 760055 - DNA, 15 bp, Homo sapiens
tatgtcaaattcatc

SEQ ID NO: 760056 - DNA, 15 bp, Homo sapiens
atgtcaaattcatct

SEQ ID NO: 760057 - DNA, 15 bp, Homo sapiens
tgtcaaattcatctc

SEQ ID NO: 760058 - DNA, 15 bp, Homo sapiens
gtcaaattcatctca

SEQ ID NO: 760059 - DNA, 15 bp, Homo sapiens
tcaaattcatctcag

SEQ ID NO: 760060 - DNA, 15 bp, Homo sapiens
caaattcatctcagt

SEQ ID NO: 760061 - DNA, 15 bp, Homo sapiens
aaattcatctcagtg

SEQ ID NO: 760062 - DNA, 15 bp, Homo sapiens
aattcatctcagtgg

SEQ ID NO: 760063 - DNA, 15 bp, Homo sapiens
attcatctcagtggc

SEQ ID NO: 760064 - DNA, 15 bp, Homo sapiens
ttcatctcagtggcc

SEQ ID NO: 760065 - DNA, 15 bp, Homo sapiens
tcatctcagtggcct

SEQ ID NO: 760066 - DNA, 15 bp, Homo sapiens
catctcagtggcctt

SEQ ID NO: 760067 - DNA, 15 bp, Homo sapiens
atctcagtggcctta

SEQ ID NO: 760068 - DNA, 15 bp, Homo sapiens
tctcagtggccttat

SEQ ID NO: 760069 - DNA, 15 bp, Homo sapiens
ctcagtggccttatg

SEQ ID NO: 760070 - DNA, 15 bp, Homo sapiens
tcagtggccttatgc

SEQ ID NO: 760071 - DNA, 15 bp, Homo sapiens
cagtggccttatgca

SEQ ID NO: 760072 - DNA, 15 bp, Homo sapiens
agtggccttatgcac

SEQ ID NO: 760073 - DNA, 15 bp, Homo sapiens
gtggccttatgcacc

SEQ ID NO: 760074 - DNA, 15 bp, Homo sapiens
tggccttatgcaccc

SEQ ID NO: 760075 - DNA, 15 bp, Homo sapiens
ggccttatgcaccct

SEQ ID NO: 760076 - DNA, 15 bp, Homo sapiens
gccttatgcaccctt

SEQ ID NO: 760077 - DNA, 15 bp, Homo sapiens
ccttatgcacccttc

SEQ ID NO: 760078 - DNA, 15 bp, Homo sapiens
cttatgcacccttcg

SEQ ID NO: 760079 - DNA, 15 bp, Homo sapiens
ttatgcacccttcgc

SEQ ID NO: 760080 - DNA, 15 bp, Homo sapiens
tatgcacccttcgca

SEQ ID NO: 760081 - DNA, 15 bp, Homo sapiens
atgcacccttcgcat

SEQ ID NO: 760082 - DNA, 15 bp, Homo sapiens
tgcacccttcgcatg

SEQ ID NO: 760083 - DNA, 15 bp, Homo sapiens
gcacccttcgcatgc

SEQ ID NO: 760084 - DNA, 15 bp, Homo sapiens
cacccttcgcatgca

SEQ ID NO: 760085 - DNA, 15 bp, Homo sapiens
acccttcgcatgcac

SEQ ID NO: 760086 - DNA, 15 bp, Homo sapiens
cccttcgcatgcacc

SEQ ID NO: 760087 - DNA, 15 bp, Homo sapiens
ccttcgcatgcacct

SEQ ID NO: 760088 - DNA, 15 bp, Homo sapiens
cttcgcatgcacctg

SEQ ID NO: 760089 - DNA, 15 bp, Homo sapiens
ttcgcatgcacctgg

SEQ ID NO: 760090 - DNA, 15 bp, Homo sapiens
tcgcatgcacctggt

SEQ ID NO: 760091 - DNA, 15 bp, Homo sapiens
cgcatgcacctggta

SEQ ID NO: 760092 - DNA, 15 bp, Homo sapiens
gcatgcacctggtat

SEQ ID NO: 760093 - DNA, 15 bp, Homo sapiens
catgcacctggtata

SEQ ID NO: 760094 - DNA, 15 bp, Homo sapiens
atgcacctggtatag

SEQ ID NO: 760095 - DNA, 15 bp, Homo sapiens
tgcacctggtatagg

SEQ ID NO: 760096 - DNA, 15 bp, Homo sapiens
gcacctggtataggc

SEQ ID NO: 760097 - DNA, 15 bp, Homo sapiens
cacctggtataggcc

SEQ ID NO: 760098 - DNA, 15 bp, Homo sapiens
acctggtataggcca

SEQ ID NO: 760099 - DNA, 15 bp, Homo sapiens
cctggtataggccag

SEQ ID NO: 760100 - DNA, 15 bp, Homo sapiens
ctggtataggccagt

SEQ ID NO: 760101 - DNA, 15 bp, Homo sapiens
tggtataggccagtg

SEQ ID NO: 760102 - DNA, 15 bp, Homo sapiens
ggtataggccagtgc

SEQ ID NO: 760103 - DNA, 15 bp, Homo sapiens
gtataggccagtgct

SEQ ID NO: 760104 - DNA, 15 bp, Homo sapiens
tataggccagtgctc

SEQ ID NO: 760105 - DNA, 15 bp, Homo sapiens
ataggccagtgctca

SEQ ID NO: 760106 - DNA, 15 bp, Homo sapiens
taggccagtgctcag

SEQ ID NO: 760107 - DNA, 15 bp, Homo sapiens
aggccagtgctcaga

SEQ ID NO: 760108 - DNA, 15 bp, Homo sapiens
ggccagtgctcagaa

SEQ ID NO: 760109 - DNA, 15 bp, Homo sapiens
gccagtgctcagaaa

SEQ ID NO: 760110 - DNA, 15 bp, Homo sapiens
ccagtgctcagaaaa

SEQ ID NO: 760111 - DNA, 15 bp, Homo sapiens
cagtgctcagaaaac

SEQ ID NO: 760112 - DNA, 15 bp, Homo sapiens
agtgctcagaaaaca

SEQ ID NO: 760113 - DNA, 15 bp, Homo sapiens
gtgctcagaaaacat

SEQ ID NO: 760114 - DNA, 15 bp, Homo sapiens
tgctcagaaaacatt

SEQ ID NO: 760115 - DNA, 15 bp, Homo sapiens
gctcagaaaacattt

SEQ ID NO: 760116 - DNA, 15 bp, Homo sapiens
ctcagaaaacatttg

SEQ ID NO: 760117 - DNA, 15 bp, Homo sapiens
tcagaaaacatttgc

SEQ ID NO: 760118 - DNA, 15 bp, Homo sapiens
cagaaaacatttgct

SEQ ID NO: 760119 - DNA, 15 bp, Homo sapiens
agaaaacatttgctc

SEQ ID NO: 760120 - DNA, 15 bp, Homo sapiens
gaaaacatttgctcc

SEQ ID NO: 760121 - DNA, 15 bp, Homo sapiens
aaaacatttgctcct

SEQ ID NO: 760122 - DNA, 15 bp, Homo sapiens
aaacatttgctcctg

SEQ ID NO: 760123 - DNA, 15 bp, Homo sapiens
aacatttgctcctgg

SEQ ID NO: 760124 - DNA, 15 bp, Homo sapiens
acatttgctcctgga

SEQ ID NO: 760125 - DNA, 15 bp, Homo sapiens
catttgctcctggag

SEQ ID NO: 760126 - DNA, 15 bp, Homo sapiens
atttgctcctggaga

SEQ ID NO: 760127 - DNA, 15 bp, Homo sapiens
tttgctcctggagaa

SEQ ID NO: 760128 - DNA, 15 bp, Homo sapiens
ttgctcctggagaag

SEQ ID NO: 760129 - DNA, 15 bp, Homo sapiens
tgctcctggagaagt

SEQ ID NO: 760130 - DNA, 15 bp, Homo sapiens
gctcctggagaagtt

SEQ ID NO: 760131 - DNA, 15 bp, Homo sapiens
ctcctggagaagttg

SEQ ID NO: 760132 - DNA, 15 bp, Homo sapiens
tcctggagaagttgc

SEQ ID NO: 760133 - DNA, 15 bp, Homo sapiens
cctggagaagttgct

SEQ ID NO: 760134 - DNA, 15 bp, Homo sapiens
ctggagaagttgctg

SEQ ID NO: 760135 - DNA, 15 bp, Homo sapiens
tggagaagttgctgg

SEQ ID NO: 760136 - DNA, 15 bp, Homo sapiens
ggagaagttgctggt

SEQ ID NO: 760137 - DNA, 15 bp, Homo sapiens
gagaagttgctggtt

SEQ ID NO: 760138 - DNA, 15 bp, Homo sapiens
agaagttgctggttc

SEQ ID NO: 760139 - DNA, 15 bp, Homo sapiens
gaagttgctggttca

SEQ ID NO: 760140 - DNA, 15 bp, Homo sapiens
aagttgctggttcag

SEQ ID NO: 760141 - DNA, 15 bp, Homo sapiens
agttgctggttcagt

SEQ ID NO: 760142 - DNA, 15 bp, Homo sapiens
gttgctggttcagtt

SEQ ID NO: 760143 - DNA, 15 bp, Homo sapiens
ttgctggttcagttc

SEQ ID NO: 760144 - DNA, 15 bp, Homo sapiens
tgctggttcagttct

SEQ ID NO: 760145 - DNA, 15 bp, Homo sapiens
gctggttcagttctg

SEQ ID NO: 760146 - DNA, 15 bp, Homo sapiens
ctggttcagttctgt

SEQ ID NO: 760147 - DNA, 15 bp, Homo sapiens
tggttcagttctgtg

SEQ ID NO: 760148 - DNA, 15 bp, Homo sapiens
ggttcagttctgtgt

SEQ ID NO: 760149 - DNA, 15 bp, Homo sapiens
gttcagttctgtgtg

SEQ ID NO: 760150 - DNA, 15 bp, Homo sapiens
ttcagttctgtgtgg

SEQ ID NO: 760151 - DNA, 15 bp, Homo sapiens
tcagttctgtgtgga

SEQ ID NO: 760152 - DNA, 15 bp, Homo sapiens
cagttctgtgtggag

SEQ ID NO: 760153 - DNA, 15 bp, Homo sapiens
agttctgtgtggagc

SEQ ID NO: 760154 - DNA, 15 bp, Homo sapiens
gttctgtgtggagct

SEQ ID NO: 760155 - DNA, 15 bp, Homo sapiens
ttctgtgtggagctg

SEQ ID NO: 760156 - DNA, 15 bp, Homo sapiens
tctgtgtggagctgc

SEQ ID NO: 760157 - DNA, 15 bp, Homo sapiens
ctgtgtggagctgct

SEQ ID NO: 760158 - DNA, 15 bp, Homo sapiens
tgtgtggagctgctc

SEQ ID NO: 760159 - DNA, 15 bp, Homo sapiens
gtgtggagctgctct

SEQ ID NO: 760160 - DNA, 15 bp, Homo sapiens
tgtggagctgctctg

SEQ ID NO: 760161 - DNA, 15 bp, Homo sapiens
gtggagctgctctgt

SEQ ID NO: 760162 - DNA, 15 bp, Homo sapiens
tggagctgctctgtg

SEQ ID NO: 760163 - DNA, 15 bp, Homo sapiens
ggagctgctctgtgt

SEQ ID NO: 760164 - DNA, 15 bp, Homo sapiens
gagctgctctgtgtt

SEQ ID NO: 760165 - DNA, 15 bp, Homo sapiens
agctgctctgtgttc

SEQ ID NO: 760166 - DNA, 15 bp, Homo sapiens
gctgctctgtgttcc

SEQ ID NO: 760167 - DNA, 15 bp, Homo sapiens
ctgctctgtgttcca

SEQ ID NO: 760168 - DNA, 15 bp, Homo sapiens
tgctctgtgttccaa

SEQ ID NO: 760169 - DNA, 15 bp, Homo sapiens
gctctgtgttccaag

SEQ ID NO: 760170 - DNA, 15 bp, Homo sapiens
ctctgtgttccaaga

SEQ ID NO: 760171 - DNA, 15 bp, Homo sapiens
tctgtgttccaagat

SEQ ID NO: 760172 - DNA, 15 bp, Homo sapiens
ctgtgttccaagatc

SEQ ID NO: 760173 - DNA, 15 bp, Homo sapiens
tgtgttccaagatct

SEQ ID NO: 760174 - DNA, 15 bp, Homo sapiens
gtgttccaagatctg

SEQ ID NO: 760175 - DNA, 15 bp, Homo sapiens
tgttccaagatctgc

SEQ ID NO: 760176 - DNA, 15 bp, Homo sapiens
gttccaagatctgcg

SEQ ID NO: 760177 - DNA, 15 bp, Homo sapiens
ttccaagatctgcgc

SEQ ID NO: 760178 - DNA, 15 bp, Homo sapiens
tccaagatctgcgct

SEQ ID NO: 760179 - DNA, 15 bp, Homo sapiens
ccaagatctgcgctg

SEQ ID NO: 760180 - DNA, 15 bp, Homo sapiens
caagatctgcgctgg

SEQ ID NO: 760181 - DNA, 15 bp, Homo sapiens
aagatctgcgctggc

SEQ ID NO: 760182 - DNA, 15 bp, Homo sapiens
agatctgcgctggct

SEQ ID NO: 760183 - DNA, 15 bp, Homo sapiens
gatctgcgctggctg

SEQ ID NO: 760184 - DNA, 15 bp, Homo sapiens
atctgcgctggctgc

SEQ ID NO: 760185 - DNA, 15 bp, Homo sapiens
tctgcgctggctgca

SEQ ID NO: 760186 - DNA, 15 bp, Homo sapiens
ctgcgctggctgcag

SEQ ID NO: 760187 - DNA, 15 bp, Homo sapiens
tgcgctggctgcagg

SEQ ID NO: 760188 - DNA, 15 bp, Homo sapiens
gcgctggctgcaggg

SEQ ID NO: 760189 - DNA, 15 bp, Homo sapiens
cgctggctgcaggga

SEQ ID NO: 760190 - DNA, 15 bp, Homo sapiens
gctggctgcagggat

SEQ ID NO: 760191 - DNA, 15 bp, Homo sapiens
ctggctgcagggata

SEQ ID NO: 760192 - DNA, 15 bp, Homo sapiens
tggctgcagggataa

SEQ ID NO: 760193 - DNA, 15 bp, Homo sapiens
ggctgcagggataac

SEQ ID NO: 760194 - DNA, 15 bp, Homo sapiens
gctgcagggataaca

SEQ ID NO: 760195 - DNA, 15 bp, Homo sapiens
ctgcagggataacag

SEQ ID NO: 760196 - DNA, 15 bp, Homo sapiens
tgcagggataacagg

SEQ ID NO: 760197 - DNA, 15 bp, Homo sapiens
gcagggataacaggg

SEQ ID NO: 760198 - DNA, 15 bp, Homo sapiens
cagggataacaggga

SEQ ID NO: 760199 - DNA, 15 bp, Homo sapiens
agggataacagggat

SEQ ID NO: 760200 - DNA, 15 bp, Homo sapiens
gggataacagggatg

SEQ ID NO: 760201 - DNA, 15 bp, Homo sapiens
ggataacagggatgg

SEQ ID NO: 760202 - DNA, 15 bp, Homo sapiens
gataacagggatgga

SEQ ID NO: 760203 - DNA, 15 bp, Homo sapiens
ataacagggatggaa

SEQ ID NO: 760204 - DNA, 15 bp, Homo sapiens
taacagggatggaag

SEQ ID NO: 760205 - DNA, 15 bp, Homo sapiens
aacagggatggaaga

SEQ ID NO: 760206 - DNA, 15 bp, Homo sapiens
acagggatggaagag

SEQ ID NO: 760207 - DNA, 15 bp, Homo sapiens
cagggatggaagaga

SEQ ID NO: 760208 - DNA, 15 bp, Homo sapiens
agggatggaagagaa

SEQ ID NO: 760209 - DNA, 15 bp, Homo sapiens
gggatggaagagaac

SEQ ID NO: 760210 - DNA, 15 bp, Homo sapiens
ggatggaagagaacc

SEQ ID NO: 760211 - DNA, 15 bp, Homo sapiens
gatggaagagaacca

SEQ ID NO: 760212 - DNA, 15 bp, Homo sapiens
atggaagagaaccag

SEQ ID NO: 760213 - DNA, 15 bp, Homo sapiens
tggaagagaaccagc

SEQ ID NO: 760214 - DNA, 15 bp, Homo sapiens
ggaagagaaccagcc

SEQ ID NO: 760215 - DNA, 15 bp, Homo sapiens
gaagagaaccagccc

SEQ ID NO: 760216 - DNA, 15 bp, Homo sapiens
aagagaaccagccct

SEQ ID NO: 760217 - DNA, 15 bp, Homo sapiens
agagaaccagccctt

SEQ ID NO: 760218 - DNA, 15 bp, Homo sapiens
gagaaccagcccttc

SEQ ID NO: 760219 - DNA, 15 bp, Homo sapiens
agaaccagcccttct

SEQ ID NO: 760220 - DNA, 15 bp, Homo sapiens
gaaccagcccttctc

SEQ ID NO: 760221 - DNA, 15 bp, Homo sapiens
aaccagcccttctct

SEQ ID NO: 760222 - DNA, 15 bp, Homo sapiens
accagcccttctctt

SEQ ID NO: 760223 - DNA, 15 bp, Homo sapiens
ccagcccttctcttg

SEQ ID NO: 760224 - DNA, 15 bp, Homo sapiens
cagcccttctcttga

SEQ ID NO: 760225 - DNA, 15 bp, Homo sapiens
agcccttctcttgag

SEQ ID NO: 760226 - DNA, 15 bp, Homo sapiens
gcccttctcttgagg

SEQ ID NO: 760227 - DNA, 15 bp, Homo sapiens
cccttctcttgagga

SEQ ID NO: 760228 - DNA, 15 bp, Homo sapiens
ccttctcttgaggag

SEQ ID NO: 760229 - DNA, 15 bp, Homo sapiens
cttctcttgaggagc

SEQ ID NO: 760230 - DNA, 15 bp, Homo sapiens
ttctcttgaggagct

SEQ ID NO: 760231 - DNA, 15 bp, Homo sapiens
tctcttgaggagctc

SEQ ID NO: 760232 - DNA, 15 bp, Homo sapiens
ctcttgaggagctcc

SEQ ID NO: 760233 - DNA, 15 bp, Homo sapiens
tcttgaggagctccc

SEQ ID NO: 760234 - DNA, 15 bp, Homo sapiens
cttgaggagctccct

SEQ ID NO: 760235 - DNA, 15 bp, Homo sapiens
ttgaggagctccctg

SEQ ID NO: 760236 - DNA, 15 bp, Homo sapiens
tgaggagctccctgc

SEQ ID NO: 760237 - DNA, 15 bp, Homo sapiens
gaggagctccctgct

SEQ ID NO: 760238 - DNA, 15 bp, Homo sapiens
aggagctccctgcta

SEQ ID NO: 760239 - DNA, 15 bp, Homo sapiens
ggagctccctgctag

SEQ ID NO: 760240 - DNA, 15 bp, Homo sapiens
gagctccctgctagt

SEQ ID NO: 760241 - DNA, 15 bp, Homo sapiens
agctccctgctagtg

SEQ ID NO: 760242 - DNA, 15 bp, Homo sapiens
gctccctgctagtga

SEQ ID NO: 760243 - DNA, 15 bp, Homo sapiens
ctccctgctagtgag

SEQ ID NO: 760244 - DNA, 15 bp, Homo sapiens
tccctgctagtgagg

SEQ ID NO: 760245 - DNA, 15 bp, Homo sapiens
ccctgctagtgaggg

SEQ ID NO: 760246 - DNA, 15 bp, Homo sapiens
cctgctagtgagggt

SEQ ID NO: 760247 - DNA, 15 bp, Homo sapiens
ctgctagtgagggtc

SEQ ID NO: 760248 - DNA, 15 bp, Homo sapiens
tgctagtgagggtca

SEQ ID NO: 760249 - DNA, 15 bp, Homo sapiens
gctagtgagggtcaa

SEQ ID NO: 760250 - DNA, 15 bp, Homo sapiens
ctagtgagggtcaat

SEQ ID NO: 760251 - DNA, 15 bp, Homo sapiens
tagtgagggtcaatc

SEQ ID NO: 760252 - DNA, 15 bp, Homo sapiens
agtgagggtcaatca

SEQ ID NO: 760253 - DNA, 15 bp, Homo sapiens
gtgagggtcaatcaa

SEQ ID NO: 760254 - DNA, 15 bp, Homo sapiens
tgagggtcaatcaag

SEQ ID NO: 760255 - DNA, 15 bp, Homo sapiens
gagggtcaatcaagt

SEQ ID NO: 760256 - DNA, 15 bp, Homo sapiens
agggtcaatcaagtg

SEQ ID NO: 760257 - DNA, 15 bp, Homo sapiens
gggtcaatcaagtgc

SEQ ID NO: 760258 - DNA, 15 bp, Homo sapiens
ggtcaatcaagtgcc

SEQ ID NO: 760259 - DNA, 15 bp, Homo sapiens
gtcaatcaagtgcct

SEQ ID NO: 760260 - DNA, 15 bp, Homo sapiens
tcaatcaagtgcctg

SEQ ID NO: 760261 - DNA, 15 bp, Homo sapiens
caatcaagtgcctgg

SEQ ID NO: 760262 - DNA, 15 bp, Homo sapiens
aatcaagtgcctgga

SEQ ID NO: 760263 - DNA, 15 bp, Homo sapiens
atcaagtgcctggaa

SEQ ID NO: 760264 - DNA, 15 bp, Homo sapiens
tcaagtgcctggaag

SEQ ID NO: 760265 - DNA, 15 bp, Homo sapiens
caagtgcctggaagt

SEQ ID NO: 760266 - DNA, 15 bp, Homo sapiens
aagtgcctggaagtt

SEQ ID NO: 760267 - DNA, 15 bp, Homo sapiens
agtgcctggaagttg

SEQ ID NO: 760268 - DNA, 15 bp, Homo sapiens
gtgcctggaagttgt

SEQ ID NO: 760269 - DNA, 15 bp, Homo sapiens
tgcctggaagttgtg

SEQ ID NO: 760270 - DNA, 15 bp, Homo sapiens
gcctggaagttgtgt

SEQ ID NO: 760271 - DNA, 15 bp, Homo sapiens
cctggaagttgtgtg

SEQ ID NO: 760272 - DNA, 15 bp, Homo sapiens
ctggaagttgtgtgt

SEQ ID NO: 760273 - DNA, 15 bp, Homo sapiens
tggaagttgtgtgtg

SEQ ID NO: 760274 - DNA, 15 bp, Homo sapiens
ggaagttgtgtgtgg

SEQ ID NO: 760275 - DNA, 15 bp, Homo sapiens
gaagttgtgtgtggg

SEQ ID NO: 760276 - DNA, 15 bp, Homo sapiens
aagttgtgtgtgggc

SEQ ID NO: 760277 - DNA, 15 bp, Homo sapiens
agttgtgtgtgggca

SEQ ID NO: 760278 - DNA, 15 bp, Homo sapiens
gttgtgtgtgggcat

SEQ ID NO: 760279 - DNA, 15 bp, Homo sapiens
ttgtgtgtgggcatg

SEQ ID NO: 760280 - DNA, 15 bp, Homo sapiens
tgtgtgtgggcatgc

SEQ ID NO: 760281 - DNA, 15 bp, Homo sapiens
gtgtgtgggcatgca

SEQ ID NO: 760282 - DNA, 15 bp, Homo sapiens
tgtgtgggcatgcag

SEQ ID NO: 760283 - DNA, 15 bp, Homo sapiens
gtgtgggcatgcaga

SEQ ID NO: 760284 - DNA, 15 bp, Homo sapiens
tgtgggcatgcagag

SEQ ID NO: 760285 - DNA, 15 bp, Homo sapiens
gtgggcatgcagagt

SEQ ID NO: 760286 - DNA, 15 bp, Homo sapiens
tgggcatgcagagtg

SEQ ID NO: 760287 - DNA, 15 bp, Homo sapiens
gggcatgcagagtgc

SEQ ID NO: 760288 - DNA, 15 bp, Homo sapiens
ggcatgcagagtgca

SEQ ID NO: 760289 - DNA, 15 bp, Homo sapiens
gcatgcagagtgcat

SEQ ID NO: 760290 - DNA, 15 bp, Homo sapiens
catgcagagtgcatg

SEQ ID NO: 760291 - DNA, 15 bp, Homo sapiens
atgcagagtgcatga

SEQ ID NO: 760292 - DNA, 15 bp, Homo sapiens
tgcagagtgcatgat

SEQ ID NO: 760293 - DNA, 15 bp, Homo sapiens
gcagagtgcatgata

SEQ ID NO: 760294 - DNA, 15 bp, Homo sapiens
cagagtgcatgatat

SEQ ID NO: 760295 - DNA, 15 bp, Homo sapiens
agagtgcatgatatg

SEQ ID NO: 760296 - DNA, 15 bp, Homo sapiens
gagtgcatgatatgc

SEQ ID NO: 760297 - DNA, 15 bp, Homo sapiens
agtgcatgatatgcc

SEQ ID NO: 760298 - DNA, 15 bp, Homo sapiens
gtgcatgatatgcca

SEQ ID NO: 760299 - DNA, 15 bp, Homo sapiens
tgcatgatatgccag

SEQ ID NO: 760300 - DNA, 15 bp, Homo sapiens
gcatgatatgccagg

SEQ ID NO: 760301 - DNA, 15 bp, Homo sapiens
catgatatgccaggt

SEQ ID NO: 760302 - DNA, 15 bp, Homo sapiens
atgatatgccaggtg

SEQ ID NO: 760303 - DNA, 15 bp, Homo sapiens
tgatatgccaggtgc

SEQ ID NO: 760304 - DNA, 15 bp, Homo sapiens
gatatgccaggtgcc

SEQ ID NO: 760305 - DNA, 15 bp, Homo sapiens
atatgccaggtgccg

SEQ ID NO: 760306 - DNA, 15 bp, Homo sapiens
tatgccaggtgccgg

SEQ ID NO: 760307 - DNA, 15 bp, Homo sapiens
atgccaggtgccggg

SEQ ID NO: 760308 - DNA, 15 bp, Homo sapiens
tgccaggtgccggga

SEQ ID NO: 760309 - DNA, 15 bp, Homo sapiens
gccaggtgccgggaa

SEQ ID NO: 760310 - DNA, 15 bp, Homo sapiens
ccaggtgccgggaag

SEQ ID NO: 760311 - DNA, 15 bp, Homo sapiens
caggtgccgggaagc

SEQ ID NO: 760312 - DNA, 15 bp, Homo sapiens
aggtgccgggaagcc

SEQ ID NO: 760313 - DNA, 15 bp, Homo sapiens
ggtgccgggaagcct

SEQ ID NO: 760314 - DNA, 15 bp, Homo sapiens
gtgccgggaagcctc

SEQ ID NO: 760315 - DNA, 15 bp, Homo sapiens
tgccgggaagcctcc

SEQ ID NO: 760316 - DNA, 15 bp, Homo sapiens
gccgggaagcctccc

SEQ ID NO: 760317 - DNA, 15 bp, Homo sapiens
ccgggaagcctccca

SEQ ID NO: 760318 - DNA, 15 bp, Homo sapiens
cgggaagcctcccag

SEQ ID NO: 760319 - DNA, 15 bp, Homo sapiens
gggaagcctcccagc

SEQ ID NO: 760320 - DNA, 15 bp, Homo sapiens
ggaagcctcccagcc

SEQ ID NO: 760321 - DNA, 15 bp, Homo sapiens
gaagcctcccagccc

SEQ ID NO: 760322 - DNA, 15 bp, Homo sapiens
aagcctcccagccca

SEQ ID NO: 760323 - DNA, 15 bp, Homo sapiens
agcctcccagcccag

SEQ ID NO: 760324 - DNA, 15 bp, Homo sapiens
gcctcccagcccagg

SEQ ID NO: 760325 - DNA, 15 bp, Homo sapiens
cctcccagcccaggg

SEQ ID NO: 760326 - DNA, 15 bp, Homo sapiens
ctcccagcccagggg

SEQ ID NO: 760327 - DNA, 15 bp, Homo sapiens
tcccagcccaggggc

SEQ ID NO: 760328 - DNA, 15 bp, Homo sapiens
cccagcccaggggct

SEQ ID NO: 760329 - DNA, 15 bp, Homo sapiens
ccagcccaggggctg

SEQ ID NO: 760330 - DNA, 15 bp, Homo sapiens
cagcccaggggctgg

SEQ ID NO: 760331 - DNA, 15 bp, Homo sapiens
agcccaggggctgga

SEQ ID NO: 760332 - DNA, 15 bp, Homo sapiens
gcccaggggctggag

SEQ ID NO: 760333 - DNA, 15 bp, Homo sapiens
cccaggggctggagg

SEQ ID NO: 760334 - DNA, 15 bp, Homo sapiens
ccaggggctggaggg

SEQ ID NO: 760335 - DNA, 15 bp, Homo sapiens
caggggctggaggga

SEQ ID NO: 760336 - DNA, 15 bp, Homo sapiens
aggggctggagggag

SEQ ID NO: 760337 - DNA, 15 bp, Homo sapiens
ggggctggagggagg

SEQ ID NO: 760338 - DNA, 15 bp, Homo sapiens
gggctggagggaggg

SEQ ID NO: 760339 - DNA, 15 bp, Homo sapiens
ggctggagggagggg

SEQ ID NO: 760340 - DNA, 15 bp, Homo sapiens
gctggagggaggggc

SEQ ID NO: 760341 - DNA, 15 bp, Homo sapiens
ctggagggaggggca

SEQ ID NO: 760342 - DNA, 15 bp, Homo sapiens
tggagggaggggcac

SEQ ID NO: 760343 - DNA, 15 bp, Homo sapiens
ggagggaggggcact

SEQ ID NO: 760344 - DNA, 15 bp, Homo sapiens
gagggaggggcactg

SEQ ID NO: 760345 - DNA, 15 bp, Homo sapiens
agggaggggcactgc

SEQ ID NO: 760346 - DNA, 15 bp, Homo sapiens
gggaggggcactgct

SEQ ID NO: 760347 - DNA, 15 bp, Homo sapiens
ggaggggcactgctt

SEQ ID NO: 760348 - DNA, 15 bp, Homo sapiens
gaggggcactgctta

SEQ ID NO: 760349 - DNA, 15 bp, Homo sapiens
aggggcactgcttag

SEQ ID NO: 760350 - DNA, 15 bp, Homo sapiens
ggggcactgcttagt

SEQ ID NO: 760351 - DNA, 15 bp, Homo sapiens
gggcactgcttagtg

SEQ ID NO: 760352 - DNA, 15 bp, Homo sapiens
ggcactgcttagtgg

SEQ ID NO: 760353 - DNA, 15 bp, Homo sapiens
gcactgcttagtggg

SEQ ID NO: 760354 - DNA, 15 bp, Homo sapiens
cactgcttagtgggc

SEQ ID NO: 760355 - DNA, 15 bp, Homo sapiens
actgcttagtgggca

SEQ ID NO: 760356 - DNA, 15 bp, Homo sapiens
ctgcttagtgggcag

SEQ ID NO: 760357 - DNA, 15 bp, Homo sapiens
tgcttagtgggcagc

SEQ ID NO: 760358 - DNA, 15 bp, Homo sapiens
gcttagtgggcagct

SEQ ID NO: 760359 - DNA, 15 bp, Homo sapiens
cttagtgggcagctc

SEQ ID NO: 760360 - DNA, 15 bp, Homo sapiens
ttagtgggcagctct

SEQ ID NO: 760361 - DNA, 15 bp, Homo sapiens
tagtgggcagctctt

SEQ ID NO: 760362 - DNA, 15 bp, Homo sapiens
agtgggcagctcttt

SEQ ID NO: 760363 - DNA, 15 bp, Homo sapiens
gtgggcagctctttg

SEQ ID NO: 760364 - DNA, 15 bp, Homo sapiens
tgggcagctctttgg

SEQ ID NO: 760365 - DNA, 15 bp, Homo sapiens
gggcagctctttgga

SEQ ID NO: 760366 - DNA, 15 bp, Homo sapiens
ggcagctctttggag

SEQ ID NO: 760367 - DNA, 15 bp, Homo sapiens
gcagctctttggagg

SEQ ID NO: 760368 - DNA, 15 bp, Homo sapiens
cagctctttggagga

SEQ ID NO: 760369 - DNA, 15 bp, Homo sapiens
agctctttggaggag

SEQ ID NO: 760370 - DNA, 15 bp, Homo sapiens
gctctttggaggagc

SEQ ID NO: 760371 - DNA, 15 bp, Homo sapiens
ctctttggaggagct

SEQ ID NO: 760372 - DNA, 15 bp, Homo sapiens
tctttggaggagctg

SEQ ID NO: 760373 - DNA, 15 bp, Homo sapiens
ctttggaggagctga

SEQ ID NO: 760374 - DNA, 15 bp, Homo sapiens
tttggaggagctgat

SEQ ID NO: 760375 - DNA, 15 bp, Homo sapiens
ttggaggagctgatg

SEQ ID NO: 760376 - DNA, 15 bp, Homo sapiens
tggaggagctgatgc

SEQ ID NO: 760377 - DNA, 15 bp, Homo sapiens
ggaggagctgatgct

SEQ ID NO: 760378 - DNA, 15 bp, Homo sapiens
gaggagctgatgctt

SEQ ID NO: 760379 - DNA, 15 bp, Homo sapiens
aggagctgatgcttg

SEQ ID NO: 760380 - DNA, 15 bp, Homo sapiens
ggagctgatgcttga

SEQ ID NO: 760381 - DNA, 15 bp, Homo sapiens
gagctgatgcttgaa

SEQ ID NO: 760382 - DNA, 15 bp, Homo sapiens
agctgatgcttgaac

SEQ ID NO: 760383 - DNA, 15 bp, Homo sapiens
gctgatgcttgaaca

SEQ ID NO: 760384 - DNA, 15 bp, Homo sapiens
ctgatgcttgaacag

SEQ ID NO: 760385 - DNA, 15 bp, Homo sapiens
tgatgcttgaacaga

SEQ ID NO: 760386 - DNA, 15 bp, Homo sapiens
gatgcttgaacagag

SEQ ID NO: 760387 - DNA, 15 bp, Homo sapiens
atgcttgaacagagt

SEQ ID NO: 760388 - DNA, 15 bp, Homo sapiens
tgcttgaacagagtc

SEQ ID NO: 760389 - DNA, 15 bp, Homo sapiens
gcttgaacagagtct

SEQ ID NO: 760390 - DNA, 15 bp, Homo sapiens
cttgaacagagtctt

SEQ ID NO: 760391 - DNA, 15 bp, Homo sapiens
ttgaacagagtcttc

SEQ ID NO: 760392 - DNA, 15 bp, Homo sapiens
tgaacagagtcttca

SEQ ID NO: 760393 - DNA, 15 bp, Homo sapiens
gaacagagtcttcag

SEQ ID NO: 760394 - DNA, 15 bp, Homo sapiens
aacagagtcttcagg

SEQ ID NO: 760395 - DNA, 15 bp, Homo sapiens
acagagtcttcagga

SEQ ID NO: 760396 - DNA, 15 bp, Homo sapiens
cagagtcttcaggaa

SEQ ID NO: 760397 - DNA, 15 bp, Homo sapiens
agagtcttcaggaag

SEQ ID NO: 760398 - DNA, 15 bp, Homo sapiens
gagtcttcaggaagg

SEQ ID NO: 760399 - DNA, 15 bp, Homo sapiens
agtcttcaggaagga

SEQ ID NO: 760400 - DNA, 15 bp, Homo sapiens
gtcttcaggaaggag

SEQ ID NO: 760401 - DNA, 15 bp, Homo sapiens
tcttcaggaaggaga

SEQ ID NO: 760402 - DNA, 15 bp, Homo sapiens
cttcaggaaggagag

SEQ ID NO: 760403 - DNA, 15 bp, Homo sapiens
ttcaggaaggagagg

SEQ ID NO: 760404 - DNA, 15 bp, Homo sapiens
tcaggaaggagagga

SEQ ID NO: 760405 - DNA, 15 bp, Homo sapiens
caggaaggagaggag

SEQ ID NO: 760406 - DNA, 15 bp, Homo sapiens
aggaaggagaggagt

SEQ ID NO: 760407 - DNA, 15 bp, Homo sapiens
ggaaggagaggagtt

SEQ ID NO: 760408 - DNA, 15 bp, Homo sapiens
gaaggagaggagtta

SEQ ID NO: 760409 - DNA, 15 bp, Homo sapiens
aaggagaggagttag

SEQ ID NO: 760410 - DNA, 15 bp, Homo sapiens
aggagaggagttagc

SEQ ID NO: 760411 - DNA, 15 bp, Homo sapiens
ggagaggagttagcc

SEQ ID NO: 760412 - DNA, 15 bp, Homo sapiens
gagaggagttagccc

SEQ ID NO: 760413 - DNA, 15 bp, Homo sapiens
agaggagttagccct

SEQ ID NO: 760414 - DNA, 15 bp, Homo sapiens
gaggagttagccctg

SEQ ID NO: 760415 - DNA, 15 bp, Homo sapiens
aggagttagccctgg

SEQ ID NO: 760416 - DNA, 15 bp, Homo sapiens
ggagttagccctggg

SEQ ID NO: 760417 - DNA, 15 bp, Homo sapiens
gagttagccctgggt

SEQ ID NO: 760418 - DNA, 15 bp, Homo sapiens
agttagccctgggtg

SEQ ID NO: 760419 - DNA, 15 bp, Homo sapiens
gttagccctgggtgg

SEQ ID NO: 760420 - DNA, 15 bp, Homo sapiens
ttagccctgggtggg

SEQ ID NO: 760421 - DNA, 15 bp, Homo sapiens
tagccctgggtgggg

SEQ ID NO: 760422 - DNA, 15 bp, Homo sapiens
agccctgggtgggga

SEQ ID NO: 760423 - DNA, 15 bp, Homo sapiens
gccctgggtggggag

SEQ ID NO: 760424 - DNA, 15 bp, Homo sapiens
ccctgggtggggagg

SEQ ID NO: 760425 - DNA, 15 bp, Homo sapiens
cctgggtggggaggc

SEQ ID NO: 760426 - DNA, 15 bp, Homo sapiens
ctgggtggggaggca

SEQ ID NO: 760427 - DNA, 15 bp, Homo sapiens
tgggtggggaggcag

SEQ ID NO: 760428 - DNA, 15 bp, Homo sapiens
gggtggggaggcaga

SEQ ID NO: 760429 - DNA, 15 bp, Homo sapiens
ggtggggaggcagag

SEQ ID NO: 760430 - DNA, 15 bp, Homo sapiens
gtggggaggcagaga

SEQ ID NO: 760431 - DNA, 15 bp, Homo sapiens
tggggaggcagagaa

SEQ ID NO: 760432 - DNA, 15 bp, Homo sapiens
ggggaggcagagaag

SEQ ID NO: 760433 - DNA, 15 bp, Homo sapiens
gggaggcagagaagg

SEQ ID NO: 760434 - DNA, 15 bp, Homo sapiens
ggaggcagagaagga

SEQ ID NO: 760435 - DNA, 15 bp, Homo sapiens
gaggcagagaaggaa

SEQ ID NO: 760436 - DNA, 15 bp, Homo sapiens
aggcagagaaggaaa

SEQ ID NO: 760437 - DNA, 15 bp, Homo sapiens
ggcagagaaggaaag

SEQ ID NO: 760438 - DNA, 15 bp, Homo sapiens
gcagagaaggaaaga

SEQ ID NO: 760439 - DNA, 15 bp, Homo sapiens
cagagaaggaaagag

SEQ ID NO: 760440 - DNA, 15 bp, Homo sapiens
agagaaggaaagaga

SEQ ID NO: 760441 - DNA, 15 bp, Homo sapiens
gagaaggaaagagac

SEQ ID NO: 760442 - DNA, 15 bp, Homo sapiens
agaaggaaagagaca

SEQ ID NO: 760443 - DNA, 15 bp, Homo sapiens
gaaggaaagagacac

SEQ ID NO: 760444 - DNA, 15 bp, Homo sapiens
aaggaaagagacact

SEQ ID NO: 760445 - DNA, 15 bp, Homo sapiens
aggaaagagacactg

SEQ ID NO: 760446 - DNA, 15 bp, Homo sapiens
ggaaagagacactga

SEQ ID NO: 760447 - DNA, 15 bp, Homo sapiens
gaaagagacactgaa

SEQ ID NO: 760448 - DNA, 15 bp, Homo sapiens
aaagagacactgaaa

SEQ ID NO: 760449 - DNA, 15 bp, Homo sapiens
aagagacactgaaag

SEQ ID NO: 760450 - DNA, 15 bp, Homo sapiens
agagacactgaaagc

SEQ ID NO: 760451 - DNA, 15 bp, Homo sapiens
gagacactgaaagcc

SEQ ID NO: 760452 - DNA, 15 bp, Homo sapiens
agacactgaaagccg

SEQ ID NO: 760453 - DNA, 15 bp, Homo sapiens
gacactgaaagccga

SEQ ID NO: 760454 - DNA, 15 bp, Homo sapiens
acactgaaagccgag

SEQ ID NO: 760455 - DNA, 15 bp, Homo sapiens
cactgaaagccgagg

SEQ ID NO: 760456 - DNA, 15 bp, Homo sapiens
actgaaagccgaggg

SEQ ID NO: 760457 - DNA, 15 bp, Homo sapiens
ctgaaagccgagggg

SEQ ID NO: 760458 - DNA, 15 bp, Homo sapiens
tgaaagccgaggggt

SEQ ID NO: 760459 - DNA, 15 bp, Homo sapiens
gaaagccgaggggtg

SEQ ID NO: 760460 - DNA, 15 bp, Homo sapiens
aaagccgaggggtga

SEQ ID NO: 760461 - DNA, 15 bp, Homo sapiens
aagccgaggggtgaa

SEQ ID NO: 760462 - DNA, 15 bp, Homo sapiens
agccgaggggtgaac

SEQ ID NO: 760463 - DNA, 15 bp, Homo sapiens
gccgaggggtgaacc

SEQ ID NO: 760464 - DNA, 15 bp, Homo sapiens
ccgaggggtgaacca

SEQ ID NO: 760465 - DNA, 15 bp, Homo sapiens
cgaggggtgaaccac

SEQ ID NO: 760466 - DNA, 15 bp, Homo sapiens
gaggggtgaaccaca

SEQ ID NO: 760467 - DNA, 15 bp, Homo sapiens
aggggtgaaccacaa

SEQ ID NO: 760468 - DNA, 15 bp, Homo sapiens
ggggtgaaccacaaa

SEQ ID NO: 760469 - DNA, 15 bp, Homo sapiens
gggtgaaccacaaat

SEQ ID NO: 760470 - DNA, 15 bp, Homo sapiens
ggtgaaccacaaata

SEQ ID NO: 760471 - DNA, 15 bp, Homo sapiens
gtgaaccacaaatat

SEQ ID NO: 760472 - DNA, 15 bp, Homo sapiens
tgaaccacaaatatt

SEQ ID NO: 760473 - DNA, 15 bp, Homo sapiens
gaaccacaaatattt

SEQ ID NO: 760474 - DNA, 15 bp, Homo sapiens
aaccacaaatatttg

SEQ ID NO: 760475 - DNA, 15 bp, Homo sapiens
accacaaatatttgg

SEQ ID NO: 760476 - DNA, 15 bp, Homo sapiens
ccacaaatatttggg

SEQ ID NO: 760477 - DNA, 15 bp, Homo sapiens
cacaaatatttggga

SEQ ID NO: 760478 - DNA, 15 bp, Homo sapiens
acaaatatttgggaa

SEQ ID NO: 760479 - DNA, 15 bp, Homo sapiens
caaatatttgggaaa

SEQ ID NO: 760480 - DNA, 15 bp, Homo sapiens
aaatatttgggaaat

SEQ ID NO: 760481 - DNA, 15 bp, Homo sapiens
aatatttgggaaatg

SEQ ID NO: 760482 - DNA, 15 bp, Homo sapiens
atatttgggaaatgg

SEQ ID NO: 760483 - DNA, 15 bp, Homo sapiens
tatttgggaaatggc

SEQ ID NO: 760484 - DNA, 15 bp, Homo sapiens
atttgggaaatggca

SEQ ID NO: 760485 - DNA, 15 bp, Homo sapiens
tttgggaaatggcac

SEQ ID NO: 760486 - DNA, 15 bp, Homo sapiens
ttgggaaatggcacc

SEQ ID NO: 760487 - DNA, 15 bp, Homo sapiens
tgggaaatggcacca

SEQ ID NO: 760488 - DNA, 15 bp, Homo sapiens
gggaaatggcaccag

SEQ ID NO: 760489 - DNA, 15 bp, Homo sapiens
ggaaatggcaccagc

SEQ ID NO: 760490 - DNA, 15 bp, Homo sapiens
gaaatggcaccagca

SEQ ID NO: 760491 - DNA, 15 bp, Homo sapiens
aaatggcaccagcaa

SEQ ID NO: 760492 - DNA, 15 bp, Homo sapiens
aatggcaccagcaag

SEQ ID NO: 760493 - DNA, 15 bp, Homo sapiens
atggcaccagcaagg

SEQ ID NO: 760494 - DNA, 15 bp, Homo sapiens
tggcaccagcaaggt

SEQ ID NO: 760495 - DNA, 15 bp, Homo sapiens
ggcaccagcaaggtg

SEQ ID NO: 760496 - DNA, 15 bp, Homo sapiens
gcaccagcaaggtgt

SEQ ID NO: 760497 - DNA, 15 bp, Homo sapiens
caccagcaaggtgta

SEQ ID NO: 760498 - DNA, 15 bp, Homo sapiens
accagcaaggtgtac

SEQ ID NO: 760499 - DNA, 15 bp, Homo sapiens
ccagcaaggtgtaca

SEQ ID NO: 760500 - DNA, 15 bp, Homo sapiens
cagcaaggtgtacag

SEQ ID NO: 760501 - DNA, 15 bp, Homo sapiens
agcaaggtgtacagc

SEQ ID NO: 760502 - DNA, 15 bp, Homo sapiens
gcaaggtgtacagca

SEQ ID NO: 760503 - DNA, 15 bp, Homo sapiens
caaggtgtacagcag

SEQ ID NO: 760504 - DNA, 15 bp, Homo sapiens
aaggtgtacagcagg

SEQ ID NO: 760505 - DNA, 15 bp, Homo sapiens
aggtgtacagcaggg

SEQ ID NO: 760506 - DNA, 15 bp, Homo sapiens
ggtgtacagcagggg

SEQ ID NO: 760507 - DNA, 15 bp, Homo sapiens
gtgtacagcaggggt

SEQ ID NO: 760508 - DNA, 15 bp, Homo sapiens
tgtacagcaggggtt

SEQ ID NO: 760509 - DNA, 15 bp, Homo sapiens
gtacagcaggggttt

SEQ ID NO: 760510 - DNA, 15 bp, Homo sapiens
tacagcaggggtttc

SEQ ID NO: 760511 - DNA, 15 bp, Homo sapiens
acagcaggggtttcc

SEQ ID NO: 760512 - DNA, 15 bp, Homo sapiens
cagcaggggtttcca

SEQ ID NO: 760513 - DNA, 15 bp, Homo sapiens
agcaggggtttccaa

SEQ ID NO: 760514 - DNA, 15 bp, Homo sapiens
gcaggggtttccaaa

SEQ ID NO: 760515 - DNA, 15 bp, Homo sapiens
caggggtttccaaag

SEQ ID NO: 760516 - DNA, 15 bp, Homo sapiens
aggggtttccaaaga

SEQ ID NO: 760517 - DNA, 15 bp, Homo sapiens
ggggtttccaaagag

SEQ ID NO: 760518 - DNA, 15 bp, Homo sapiens
gggtttccaaagagt

SEQ ID NO: 760519 - DNA, 15 bp, Homo sapiens
ggtttccaaagagtt

SEQ ID NO: 760520 - DNA, 15 bp, Homo sapiens
gtttccaaagagttc

SEQ ID NO: 760521 - DNA, 15 bp, Homo sapiens
tttccaaagagttcc

SEQ ID NO: 760522 - DNA, 15 bp, Homo sapiens
ttccaaagagttcct

SEQ ID NO: 760523 - DNA, 15 bp, Homo sapiens
tccaaagagttcctg

SEQ ID NO: 760524 - DNA, 15 bp, Homo sapiens
ccaaagagttcctga

SEQ ID NO: 760525 - DNA, 15 bp, Homo sapiens
caaagagttcctgat

SEQ ID NO: 760526 - DNA, 15 bp, Homo sapiens
aaagagttcctgatt

SEQ ID NO: 760527 - DNA, 15 bp, Homo sapiens
aagagttcctgattc

SEQ ID NO: 760528 - DNA, 15 bp, Homo sapiens
agagttcctgattcc

SEQ ID NO: 760529 - DNA, 15 bp, Homo sapiens
gagttcctgattccc

SEQ ID NO: 760530 - DNA, 15 bp, Homo sapiens
agttcctgattccct

SEQ ID NO: 760531 - DNA, 15 bp, Homo sapiens
gttcctgattccctc

SEQ ID NO: 760532 - DNA, 15 bp, Homo sapiens
ttcctgattccctcc

SEQ ID NO: 760533 - DNA, 15 bp, Homo sapiens
tcctgattccctcct

SEQ ID NO: 760534 - DNA, 15 bp, Homo sapiens
cctgattccctcctc

SEQ ID NO: 760535 - DNA, 15 bp, Homo sapiens
ctgattccctcctca

SEQ ID NO: 760536 - DNA, 15 bp, Homo sapiens
tgattccctcctcaa

SEQ ID NO: 760537 - DNA, 15 bp, Homo sapiens
gattccctcctcaaa

SEQ ID NO: 760538 - DNA, 15 bp, Homo sapiens
attccctcctcaaag

SEQ ID NO: 760539 - DNA, 15 bp, Homo sapiens
ttccctcctcaaagt

SEQ ID NO: 760540 - DNA, 15 bp, Homo sapiens
tccctcctcaaagtg

SEQ ID NO: 760541 - DNA, 15 bp, Homo sapiens
ccctcctcaaagtga

SEQ ID NO: 760542 - DNA, 15 bp, Homo sapiens
cctcctcaaagtgat

SEQ ID NO: 760543 - DNA, 15 bp, Homo sapiens
ctcctcaaagtgatg

SEQ ID NO: 760544 - DNA, 15 bp, Homo sapiens
tcctcaaagtgatgg

SEQ ID NO: 760545 - DNA, 15 bp, Homo sapiens
cctcaaagtgatggg

SEQ ID NO: 760546 - DNA, 15 bp, Homo sapiens
ctcaaagtgatggga

SEQ ID NO: 760547 - DNA, 15 bp, Homo sapiens
tcaaagtgatgggag

SEQ ID NO: 760548 - DNA, 15 bp, Homo sapiens
caaagtgatgggagc

SEQ ID NO: 760549 - DNA, 15 bp, Homo sapiens
aaagtgatgggagcc

SEQ ID NO: 760550 - DNA, 15 bp, Homo sapiens
aagtgatgggagcca

SEQ ID NO: 760551 - DNA, 15 bp, Homo sapiens
agtgatgggagccac

SEQ ID NO: 760552 - DNA, 15 bp, Homo sapiens
gtgatgggagccaca

SEQ ID NO: 760553 - DNA, 15 bp, Homo sapiens
tgatgggagccacac

SEQ ID NO: 760554 - DNA, 15 bp, Homo sapiens
gatgggagccacact

SEQ ID NO: 760555 - DNA, 15 bp, Homo sapiens
atgggagccacactt

SEQ ID NO: 760556 - DNA, 15 bp, Homo sapiens
tgggagccacacttc

SEQ ID NO: 760557 - DNA, 15 bp, Homo sapiens
gggagccacacttcc

SEQ ID NO: 760558 - DNA, 15 bp, Homo sapiens
ggagccacacttcct

SEQ ID NO: 760559 - DNA, 15 bp, Homo sapiens
gagccacacttcctg

SEQ ID NO: 760560 - DNA, 15 bp, Homo sapiens
agccacacttcctgg

SEQ ID NO: 760561 - DNA, 15 bp, Homo sapiens
gccacacttcctggc

SEQ ID NO: 760562 - DNA, 15 bp, Homo sapiens
ccacacttcctggct

SEQ ID NO: 760563 - DNA, 15 bp, Homo sapiens
cacacttcctggctt

SEQ ID NO: 760564 - DNA, 15 bp, Homo sapiens
acacttcctggctta

SEQ ID NO: 760565 - DNA, 15 bp, Homo sapiens
cacttcctggcttat

SEQ ID NO: 760566 - DNA, 15 bp, Homo sapiens
acttcctggcttatc

SEQ ID NO: 760567 - DNA, 15 bp, Homo sapiens
cttcctggcttatca

SEQ ID NO: 760568 - DNA, 15 bp, Homo sapiens
ttcctggcttatcag

SEQ ID NO: 760569 - DNA, 15 bp, Homo sapiens
tcctggcttatcagt

SEQ ID NO: 760570 - DNA, 15 bp, Homo sapiens
cctggcttatcagtt

SEQ ID NO: 760571 - DNA, 15 bp, Homo sapiens
ctggcttatcagttg

SEQ ID NO: 760572 - DNA, 15 bp, Homo sapiens
tggcttatcagttgg

SEQ ID NO: 760573 - DNA, 15 bp, Homo sapiens
ggcttatcagttggt

SEQ ID NO: 760574 - DNA, 15 bp, Homo sapiens
gcttatcagttggtc

SEQ ID NO: 760575 - DNA, 15 bp, Homo sapiens
cttatcagttggtcc

SEQ ID NO: 760576 - DNA, 15 bp, Homo sapiens
ttatcagttggtcct

SEQ ID NO: 760577 - DNA, 15 bp, Homo sapiens
tatcagttggtcctt

SEQ ID NO: 760578 - DNA, 15 bp, Homo sapiens
atcagttggtccttg

SEQ ID NO: 760579 - DNA, 15 bp, Homo sapiens
tcagttggtccttgc

SEQ ID NO: 760580 - DNA, 15 bp, Homo sapiens
cagttggtccttgcc

SEQ ID NO: 760581 - DNA, 15 bp, Homo sapiens
agttggtccttgccc

SEQ ID NO: 760582 - DNA, 15 bp, Homo sapiens
gttggtccttgccct

SEQ ID NO: 760583 - DNA, 15 bp, Homo sapiens
ttggtccttgccctc

SEQ ID NO: 760584 - DNA, 15 bp, Homo sapiens
tggtccttgccctct

SEQ ID NO: 760585 - DNA, 15 bp, Homo sapiens
ggtccttgccctctg

SEQ ID NO: 760586 - DNA, 15 bp, Homo sapiens
gtccttgccctctgg

SEQ ID NO: 760587 - DNA, 15 bp, Homo sapiens
tccttgccctctggc

SEQ ID NO: 760588 - DNA, 15 bp, Homo sapiens
ccttgccctctggct

SEQ ID NO: 760589 - DNA, 15 bp, Homo sapiens
cttgccctctggctg

SEQ ID NO: 760590 - DNA, 15 bp, Homo sapiens
ttgccctctggctgg

SEQ ID NO: 760591 - DNA, 15 bp, Homo sapiens
tgccctctggctggt

SEQ ID NO: 760592 - DNA, 15 bp, Homo sapiens
gccctctggctggtg

SEQ ID NO: 760593 - DNA, 15 bp, Homo sapiens
ccctctggctggtgc

SEQ ID NO: 760594 - DNA, 15 bp, Homo sapiens
cctctggctggtgct

SEQ ID NO: 760595 - DNA, 15 bp, Homo sapiens
ctctggctggtgctg

SEQ ID NO: 760596 - DNA, 15 bp, Homo sapiens
tctggctggtgctgt

SEQ ID NO: 760597 - DNA, 15 bp, Homo sapiens
ctggctggtgctgtg

SEQ ID NO: 760598 - DNA, 15 bp, Homo sapiens
tggctggtgctgtgt

SEQ ID NO: 760599 - DNA, 15 bp, Homo sapiens
ggctggtgctgtgtg

SEQ ID NO: 760600 - DNA, 15 bp, Homo sapiens
gctggtgctgtgtgt

SEQ ID NO: 760601 - DNA, 15 bp, Homo sapiens
ctggtgctgtgtgtc

SEQ ID NO: 760602 - DNA, 15 bp, Homo sapiens
tggtgctgtgtgtct

SEQ ID NO: 760603 - DNA, 15 bp, Homo sapiens
ggtgctgtgtgtctg

SEQ ID NO: 760604 - DNA, 15 bp, Homo sapiens
gtgctgtgtgtctga

SEQ ID NO: 760605 - DNA, 15 bp, Homo sapiens
tgctgtgtgtctgag

SEQ ID NO: 760606 - DNA, 15 bp, Homo sapiens
gctgtgtgtctgaga

SEQ ID NO: 760607 - DNA, 15 bp, Homo sapiens
ctgtgtgtctgagag

SEQ ID NO: 760608 - DNA, 15 bp, Homo sapiens
tgtgtgtctgagagg

SEQ ID NO: 760609 - DNA, 15 bp, Homo sapiens
gtgtgtctgagaggc

SEQ ID NO: 760610 - DNA, 15 bp, Homo sapiens
tgtgtctgagaggca

SEQ ID NO: 760611 - DNA, 15 bp, Homo sapiens
gtgtctgagaggcag

SEQ ID NO: 760612 - DNA, 15 bp, Homo sapiens
tgtctgagaggcagc

SEQ ID NO: 760613 - DNA, 15 bp, Homo sapiens
gtctgagaggcagcc

SEQ ID NO: 760614 - DNA, 15 bp, Homo sapiens
tctgagaggcagcct

SEQ ID NO: 760615 - DNA, 15 bp, Homo sapiens
ctgagaggcagccta

SEQ ID NO: 760616 - DNA, 15 bp, Homo sapiens
tgagaggcagcctag

SEQ ID NO: 760617 - DNA, 15 bp, Homo sapiens
gagaggcagcctagg

SEQ ID NO: 760618 - DNA, 15 bp, Homo sapiens
agaggcagcctagga

SEQ ID NO: 760619 - DNA, 15 bp, Homo sapiens
gaggcagcctaggaa

SEQ ID NO: 760620 - DNA, 15 bp, Homo sapiens
aggcagcctaggaag

SEQ ID NO: 760621 - DNA, 15 bp, Homo sapiens
ggcagcctaggaaga

SEQ ID NO: 760622 - DNA, 15 bp, Homo sapiens
gcagcctaggaagac

SEQ ID NO: 760623 - DNA, 15 bp, Homo sapiens
cagcctaggaagacc

SEQ ID NO: 760624 - DNA, 15 bp, Homo sapiens
agcctaggaagacct

SEQ ID NO: 760625 - DNA, 15 bp, Homo sapiens
gcctaggaagacctc

SEQ ID NO: 760626 - DNA, 15 bp, Homo sapiens
cctaggaagacctct

SEQ ID NO: 760627 - DNA, 15 bp, Homo sapiens
ctaggaagacctctc

SEQ ID NO: 760628 - DNA, 15 bp, Homo sapiens
taggaagacctctct

SEQ ID NO: 760629 - DNA, 15 bp, Homo sapiens
aggaagacctctctg

SEQ ID NO: 760630 - DNA, 15 bp, Homo sapiens
ggaagacctctctgg

SEQ ID NO: 760631 - DNA, 15 bp, Homo sapiens
gaagacctctctggg

SEQ ID NO: 760632 - DNA, 15 bp, Homo sapiens
aagacctctctgggg

SEQ ID NO: 760633 - DNA, 15 bp, Homo sapiens
agacctctctgggga

SEQ ID NO: 760634 - DNA, 15 bp, Homo sapiens
gacctctctggggag

SEQ ID NO: 760635 - DNA, 15 bp, Homo sapiens
acctctctggggaga

SEQ ID NO: 760636 - DNA, 15 bp, Homo sapiens
cctctctggggagaa

SEQ ID NO: 760637 - DNA, 15 bp, Homo sapiens
ctctctggggagaag

SEQ ID NO: 760638 - DNA, 15 bp, Homo sapiens
tctctggggagaagc

SEQ ID NO: 760639 - DNA, 15 bp, Homo sapiens
ctctggggagaagca

SEQ ID NO: 760640 - DNA, 15 bp, Homo sapiens
tctggggagaagcag

SEQ ID NO: 760641 - DNA, 15 bp, Homo sapiens
ctggggagaagcaga

SEQ ID NO: 760642 - DNA, 15 bp, Homo sapiens
tggggagaagcagag

SEQ ID NO: 760643 - DNA, 15 bp, Homo sapiens
ggggagaagcagaga

SEQ ID NO: 760644 - DNA, 15 bp, Homo sapiens
gggagaagcagagaa

SEQ ID NO: 760645 - DNA, 15 bp, Homo sapiens
ggagaagcagagaaa

SEQ ID NO: 760646 - DNA, 15 bp, Homo sapiens
gagaagcagagaaag

SEQ ID NO: 760647 - DNA, 15 bp, Homo sapiens
agaagcagagaaaga

SEQ ID NO: 760648 - DNA, 15 bp, Homo sapiens
gaagcagagaaagat

SEQ ID NO: 760649 - DNA, 15 bp, Homo sapiens
aagcagagaaagata

SEQ ID NO: 760650 - DNA, 15 bp, Homo sapiens
agcagagaaagatag

SEQ ID NO: 760651 - DNA, 15 bp, Homo sapiens
gcagagaaagatagc

SEQ ID NO: 760652 - DNA, 15 bp, Homo sapiens
cagagaaagatagcg

SEQ ID NO: 760653 - DNA, 15 bp, Homo sapiens
agagaaagatagcga

SEQ ID NO: 760654 - DNA, 15 bp, Homo sapiens
gagaaagatagcgac

SEQ ID NO: 760655 - DNA, 15 bp, Homo sapiens
agaaagatagcgacc

SEQ ID NO: 760656 - DNA, 15 bp, Homo sapiens
gaaagatagcgacct

SEQ ID NO: 760657 - DNA, 15 bp, Homo sapiens
aaagatagcgacctc

SEQ ID NO: 760658 - DNA, 15 bp, Homo sapiens
aagatagcgacctct

SEQ ID NO: 760659 - DNA, 15 bp, Homo sapiens
agatagcgacctctg

SEQ ID NO: 760660 - DNA, 15 bp, Homo sapiens
gatagcgacctctga

SEQ ID NO: 760661 - DNA, 15 bp, Homo sapiens
atagcgacctctgaa

SEQ ID NO: 760662 - DNA, 15 bp, Homo sapiens
tagcgacctctgaac

SEQ ID NO: 760663 - DNA, 15 bp, Homo sapiens
agcgacctctgaacg

SEQ ID NO: 760664 - DNA, 15 bp, Homo sapiens
gcgacctctgaacgt

SEQ ID NO: 760665 - DNA, 15 bp, Homo sapiens
cgacctctgaacgtg

SEQ ID NO: 760666 - DNA, 15 bp, Homo sapiens
gacctctgaacgtgc

SEQ ID NO: 760667 - DNA, 15 bp, Homo sapiens
acctctgaacgtgct

SEQ ID NO: 760668 - DNA, 15 bp, Homo sapiens
cctctgaacgtgctc

SEQ ID NO: 760669 - DNA, 15 bp, Homo sapiens
ctctgaacgtgctcc

SEQ ID NO: 760670 - DNA, 15 bp, Homo sapiens
tctgaacgtgctccc

SEQ ID NO: 760671 - DNA, 15 bp, Homo sapiens
ctgaacgtgctcccc

SEQ ID NO: 760672 - DNA, 15 bp, Homo sapiens
tgaacgtgctcccca

SEQ ID NO: 760673 - DNA, 15 bp, Homo sapiens
gaacgtgctccccag

SEQ ID NO: 760674 - DNA, 15 bp, Homo sapiens
aacgtgctccccaga

SEQ ID NO: 760675 - DNA, 15 bp, Homo sapiens
acgtgctccccagaa

SEQ ID NO: 760676 - DNA, 15 bp, Homo sapiens
cgtgctccccagaat

SEQ ID NO: 760677 - DNA, 15 bp, Homo sapiens
gtgctccccagaatt

SEQ ID NO: 760678 - DNA, 15 bp, Homo sapiens
tgctccccagaattc

SEQ ID NO: 760679 - DNA, 15 bp, Homo sapiens
gctccccagaattca

SEQ ID NO: 760680 - DNA, 15 bp, Homo sapiens
ctccccagaattcag

SEQ ID NO: 760681 - DNA, 15 bp, Homo sapiens
tccccagaattcagt

SEQ ID NO: 760682 - DNA, 15 bp, Homo sapiens
ccccagaattcagtc

SEQ ID NO: 760683 - DNA, 15 bp, Homo sapiens
cccagaattcagtca

SEQ ID NO: 760684 - DNA, 15 bp, Homo sapiens
ccagaattcagtcac

SEQ ID NO: 760685 - DNA, 15 bp, Homo sapiens
cagaattcagtcacc

SEQ ID NO: 760686 - DNA, 15 bp, Homo sapiens
agaattcagtcaccc

SEQ ID NO: 760687 - DNA, 15 bp, Homo sapiens
gaattcagtcacccc

SEQ ID NO: 760688 - DNA, 15 bp, Homo sapiens
aattcagtcacccca

SEQ ID NO: 760689 - DNA, 15 bp, Homo sapiens
attcagtcaccccat

SEQ ID NO: 760690 - DNA, 15 bp, Homo sapiens
ttcagtcaccccatc

SEQ ID NO: 760691 - DNA, 15 bp, Homo sapiens
tcagtcaccccatcc

SEQ ID NO: 760692 - DNA, 15 bp, Homo sapiens
cagtcaccccatcct

SEQ ID NO: 760693 - DNA, 15 bp, Homo sapiens
agtcaccccatccta

SEQ ID NO: 760694 - DNA, 15 bp, Homo sapiens
gtcaccccatcctac

SEQ ID NO: 760695 - DNA, 15 bp, Homo sapiens
tcaccccatcctacc

SEQ ID NO: 760696 - DNA, 15 bp, Homo sapiens
caccccatcctacct

SEQ ID NO: 760697 - DNA, 15 bp, Homo sapiens
accccatcctaccta

SEQ ID NO: 760698 - DNA, 15 bp, Homo sapiens
ccccatcctacctat

SEQ ID NO: 760699 - DNA, 15 bp, Homo sapiens
cccatcctacctatg

SEQ ID NO: 760700 - DNA, 15 bp, Homo sapiens
ccatcctacctatga

SEQ ID NO: 760701 - DNA, 15 bp, Homo sapiens
catcctacctatgag

SEQ ID NO: 760702 - DNA, 15 bp, Homo sapiens
atcctacctatgaga

SEQ ID NO: 760703 - DNA, 15 bp, Homo sapiens
tcctacctatgagag

SEQ ID NO: 760704 - DNA, 15 bp, Homo sapiens
cctacctatgagagg

SEQ ID NO: 760705 - DNA, 15 bp, Homo sapiens
ctacctatgagaggg

SEQ ID NO: 760706 - DNA, 15 bp, Homo sapiens
tacctatgagagggg

SEQ ID NO: 760707 - DNA, 15 bp, Homo sapiens
acctatgagagggga

SEQ ID NO: 760708 - DNA, 15 bp, Homo sapiens
cctatgagaggggac

SEQ ID NO: 760709 - DNA, 15 bp, Homo sapiens
ctatgagaggggaca

SEQ ID NO: 760710 - DNA, 15 bp, Homo sapiens
tatgagaggggacaa

SEQ ID NO: 760711 - DNA, 15 bp, Homo sapiens
atgagaggggacaaa

SEQ ID NO: 760712 - DNA, 15 bp, Homo sapiens
tgagaggggacaaac

SEQ ID NO: 760713 - DNA, 15 bp, Homo sapiens
gagaggggacaaact

SEQ ID NO: 760714 - DNA, 15 bp, Homo sapiens
agaggggacaaactg

SEQ ID NO: 760715 - DNA, 15 bp, Homo sapiens
gaggggacaaactgg

SEQ ID NO: 760716 - DNA, 15 bp, Homo sapiens
aggggacaaactggc

SEQ ID NO: 760717 - DNA, 15 bp, Homo sapiens
ggggacaaactggca

SEQ ID NO: 760718 - DNA, 15 bp, Homo sapiens
gggacaaactggcag

SEQ ID NO: 760719 - DNA, 15 bp, Homo sapiens
ggacaaactggcagt

SEQ ID NO: 760720 - DNA, 15 bp, Homo sapiens
gacaaactggcagtc

SEQ ID NO: 760721 - DNA, 15 bp, Homo sapiens
acaaactggcagtct

SEQ ID NO: 760722 - DNA, 15 bp, Homo sapiens
caaactggcagtcta

SEQ ID NO: 760723 - DNA, 15 bp, Homo sapiens
aaactggcagtctac

SEQ ID NO: 760724 - DNA, 15 bp, Homo sapiens
aactggcagtctaca

SEQ ID NO: 760725 - DNA, 15 bp, Homo sapiens
actggcagtctacag

SEQ ID NO: 760726 - DNA, 15 bp, Homo sapiens
ctggcagtctacagg

SEQ ID NO: 760727 - DNA, 15 bp, Homo sapiens
tggcagtctacaggt

SEQ ID NO: 760728 - DNA, 15 bp, Homo sapiens
ggcagtctacaggtg

SEQ ID NO: 760729 - DNA, 15 bp, Homo sapiens
gcagtctacaggtgt

SEQ ID NO: 760730 - DNA, 15 bp, Homo sapiens
cagtctacaggtgtg

SEQ ID NO: 760731 - DNA, 15 bp, Homo sapiens
agtctacaggtgtgt

SEQ ID NO: 760732 - DNA, 15 bp, Homo sapiens
gtctacaggtgtgtt

SEQ ID NO: 760733 - DNA, 15 bp, Homo sapiens
tctacaggtgtgttt

SEQ ID NO: 760734 - DNA, 15 bp, Homo sapiens
ctacaggtgtgtttg

SEQ ID NO: 760735 - DNA, 15 bp, Homo sapiens
tacaggtgtgtttgg

SEQ ID NO: 760736 - DNA, 15 bp, Homo sapiens
acaggtgtgtttggt

SEQ ID NO: 760737 - DNA, 15 bp, Homo sapiens
caggtgtgtttggtt

SEQ ID NO: 760738 - DNA, 15 bp, Homo sapiens
tggatggtgatgata

SEQ ID NO: 760739 - DNA, 15 bp, Homo sapiens
ggatggtgatgatag

SEQ ID NO: 760740 - DNA, 15 bp, Homo sapiens
gatggtgatgatagt

SEQ ID NO: 760741 - DNA, 15 bp, Homo sapiens
atggtgatgatagtt

SEQ ID NO: 760742 - DNA, 15 bp, Homo sapiens
tggtgatgatagttg

SEQ ID NO: 760743 - DNA, 15 bp, Homo sapiens
ggtgatgatagttgc

SEQ ID NO: 760744 - DNA, 15 bp, Homo sapiens
gtgatgatagttgca

SEQ ID NO: 760745 - DNA, 15 bp, Homo sapiens
tgatgatagttgcac

SEQ ID NO: 760746 - DNA, 15 bp, Homo sapiens
gatgatagttgcacc

SEQ ID NO: 760747 - DNA, 15 bp, Homo sapiens
atgatagttgcacca

SEQ ID NO: 760748 - DNA, 15 bp, Homo sapiens
tgatagttgcaccac

SEQ ID NO: 760749 - DNA, 15 bp, Homo sapiens
gatagttgcaccaca

SEQ ID NO: 760750 - DNA, 15 bp, Homo sapiens
atagttgcaccacaa

SEQ ID NO: 760751 - DNA, 15 bp, Homo sapiens
tagttgcaccacaat

SEQ ID NO: 760752 - DNA, 15 bp, Homo sapiens
agttgcaccacaatg

SEQ ID NO: 760753 - DNA, 15 bp, Homo sapiens
gttgcaccacaatgt

SEQ ID NO: 760754 - DNA, 15 bp, Homo sapiens
ttgcaccacaatgtg

SEQ ID NO: 760755 - DNA, 15 bp, Homo sapiens
tgcaccacaatgtga

SEQ ID NO: 760756 - DNA, 15 bp, Homo sapiens
gcaccacaatgtgaa

SEQ ID NO: 760757 - DNA, 15 bp, Homo sapiens
caccacaatgtgaat

SEQ ID NO: 760758 - DNA, 15 bp, Homo sapiens
accacaatgtgaatg

SEQ ID NO: 760759 - DNA, 15 bp, Homo sapiens
ccacaatgtgaatgt

SEQ ID NO: 760760 - DNA, 15 bp, Homo sapiens
cacaatgtgaatgta

SEQ ID NO: 760761 - DNA, 15 bp, Homo sapiens
acaatgtgaatgtac

SEQ ID NO: 760762 - DNA, 15 bp, Homo sapiens
caatgtgaatgtact

SEQ ID NO: 760763 - DNA, 15 bp, Homo sapiens
aatgtgaatgtactt

SEQ ID NO: 760764 - DNA, 15 bp, Homo sapiens
atgtgaatgtacttc

SEQ ID NO: 760765 - DNA, 15 bp, Homo sapiens
tgtgaatgtacttcg

SEQ ID NO: 760766 - DNA, 15 bp, Homo sapiens
gtgaatgtacttcgt

SEQ ID NO: 760767 - DNA, 15 bp, Homo sapiens
tgaatgtacttcgtg

SEQ ID NO: 760768 - DNA, 15 bp, Homo sapiens
gaatgtacttcgtgc

SEQ ID NO: 760769 - DNA, 15 bp, Homo sapiens
aatgtacttcgtgct

SEQ ID NO: 760770 - DNA, 15 bp, Homo sapiens
atgtacttcgtgcta

SEQ ID NO: 760771 - DNA, 15 bp, Homo sapiens
tgtacttcgtgctat

SEQ ID NO: 760772 - DNA, 15 bp, Homo sapiens
gtacttcgtgctata

SEQ ID NO: 760773 - DNA, 15 bp, Homo sapiens
tacttcgtgctatag

SEQ ID NO: 760774 - DNA, 15 bp, Homo sapiens
acttcgtgctataga

SEQ ID NO: 760775 - DNA, 15 bp, Homo sapiens
cttcgtgctatagaa

SEQ ID NO: 760776 - DNA, 15 bp, Homo sapiens
ttcgtgctatagaac

SEQ ID NO: 760777 - DNA, 15 bp, Homo sapiens
tcgtgctatagaact

SEQ ID NO: 760778 - DNA, 15 bp, Homo sapiens
cgtgctatagaacta

SEQ ID NO: 760779 - DNA, 15 bp, Homo sapiens
gtgctatagaactag

SEQ ID NO: 760780 - DNA, 15 bp, Homo sapiens
tgctatagaactaga

SEQ ID NO: 760781 - DNA, 15 bp, Homo sapiens
gctatagaactagac

SEQ ID NO: 760782 - DNA, 15 bp, Homo sapiens
ctatagaactagaca

SEQ ID NO: 760783 - DNA, 15 bp, Homo sapiens
tatagaactagacac

SEQ ID NO: 760784 - DNA, 15 bp, Homo sapiens
atagaactagacact

SEQ ID NO: 760785 - DNA, 15 bp, Homo sapiens
tagaactagacactt

SEQ ID NO: 760786 - DNA, 15 bp, Homo sapiens
agaactagacactta

SEQ ID NO: 760787 - DNA, 15 bp, Homo sapiens
gaactagacacttag

SEQ ID NO: 760788 - DNA, 15 bp, Homo sapiens
aactagacacttagt

SEQ ID NO: 760789 - DNA, 15 bp, Homo sapiens
actagacacttagtt

SEQ ID NO: 760790 - DNA, 15 bp, Homo sapiens
ctagacacttagttc

SEQ ID NO: 760791 - DNA, 15 bp, Homo sapiens
tagacacttagttca

SEQ ID NO: 760792 - DNA, 15 bp, Homo sapiens
agacacttagttcaa

SEQ ID NO: 760793 - DNA, 15 bp, Homo sapiens
gacacttagttcaat

SEQ ID NO: 760794 - DNA, 15 bp, Homo sapiens
acacttagttcaata

SEQ ID NO: 760795 - DNA, 15 bp, Homo sapiens
cacttagttcaatac

SEQ ID NO: 760796 - DNA, 15 bp, Homo sapiens
acttagttcaatacc

SEQ ID NO: 760797 - DNA, 15 bp, Homo sapiens
cttagttcaatacca

SEQ ID NO: 760798 - DNA, 15 bp, Homo sapiens
ttagttcaataccag

SEQ ID NO: 760799 - DNA, 15 bp, Homo sapiens
tagttcaataccagc

SEQ ID NO: 760800 - DNA, 15 bp, Homo sapiens
agttcaataccagcc

SEQ ID NO: 760801 - DNA, 15 bp, Homo sapiens
gttcaataccagcct

SEQ ID NO: 760802 - DNA, 15 bp, Homo sapiens
ttcaataccagccta

SEQ ID NO: 760803 - DNA, 15 bp, Homo sapiens
tcaataccagcctag

SEQ ID NO: 760804 - DNA, 15 bp, Homo sapiens
caataccagcctagg

SEQ ID NO: 760805 - DNA, 15 bp, Homo sapiens
aataccagcctaggc

SEQ ID NO: 760806 - DNA, 15 bp, Homo sapiens
ataccagcctaggca

SEQ ID NO: 760807 - DNA, 15 bp, Homo sapiens
taccagcctaggcaa

SEQ ID NO: 760808 - DNA, 15 bp, Homo sapiens
accagcctaggcaac

SEQ ID NO: 760809 - DNA, 15 bp, Homo sapiens
ccagcctaggcaacg

SEQ ID NO: 760810 - DNA, 15 bp, Homo sapiens
cagcctaggcaacgt

SEQ ID NO: 760811 - DNA, 15 bp, Homo sapiens
agcctaggcaacgta

SEQ ID NO: 760812 - DNA, 15 bp, Homo sapiens
gcctaggcaacgtag

SEQ ID NO: 760813 - DNA, 15 bp, Homo sapiens
cctaggcaacgtagt

SEQ ID NO: 760814 - DNA, 15 bp, Homo sapiens
ctaggcaacgtagtg

SEQ ID NO: 760815 - DNA, 15 bp, Homo sapiens
taggcaacgtagtga

SEQ ID NO: 760816 - DNA, 15 bp, Homo sapiens
aggcaacgtagtgag

SEQ ID NO: 760817 - DNA, 15 bp, Homo sapiens
ggcaacgtagtgaga

SEQ ID NO: 760818 - DNA, 15 bp, Homo sapiens
gcaacgtagtgagat

SEQ ID NO: 760819 - DNA, 15 bp, Homo sapiens
caacgtagtgagatc

SEQ ID NO: 760820 - DNA, 15 bp, Homo sapiens
aacgtagtgagatca

SEQ ID NO: 760821 - DNA, 15 bp, Homo sapiens
acgtagtgagatcat

SEQ ID NO: 760822 - DNA, 15 bp, Homo sapiens
cgtagtgagatcatg

SEQ ID NO: 760823 - DNA, 15 bp, Homo sapiens
gtagtgagatcatgc

SEQ ID NO: 760824 - DNA, 15 bp, Homo sapiens
tagtgagatcatgcc

SEQ ID NO: 760825 - DNA, 15 bp, Homo sapiens
agtgagatcatgcct

SEQ ID NO: 760826 - DNA, 15 bp, Homo sapiens
gtgagatcatgcctt

SEQ ID NO: 760827 - DNA, 15 bp, Homo sapiens
tgagatcatgccttt

SEQ ID NO: 760828 - DNA, 15 bp, Homo sapiens
gagatcatgccttta

SEQ ID NO: 760829 - DNA, 15 bp, Homo sapiens
agatcatgcctttac

SEQ ID NO: 760830 - DNA, 15 bp, Homo sapiens
gatcatgcctttaca

SEQ ID NO: 760831 - DNA, 15 bp, Homo sapiens
atcatgcctttacaa

SEQ ID NO: 760832 - DNA, 15 bp, Homo sapiens
tcatgcctttacaaa

SEQ ID NO: 760833 - DNA, 15 bp, Homo sapiens
catgcctttacaaaa

SEQ ID NO: 760834 - DNA, 15 bp, Homo sapiens
atgcctttacaaaaa

SEQ ID NO: 760835 - DNA, 15 bp, Homo sapiens
tgcctttacaaaaag

SEQ ID NO: 760836 - DNA, 15 bp, Homo sapiens
gcctttacaaaaaga

SEQ ID NO: 760837 - DNA, 15 bp, Homo sapiens
cctttacaaaaagaa

SEQ ID NO: 760838 - DNA, 15 bp, Homo sapiens
ctttacaaaaagaaa

SEQ ID NO: 760839 - DNA, 15 bp, Homo sapiens
tttacaaaaagaaaa

SEQ ID NO: 760840 - DNA, 15 bp, Homo sapiens
ttacaaaaagaaaaa

SEQ ID NO: 760841 - DNA, 15 bp, Homo sapiens
tacaaaaagaaaaaa

SEQ ID NO: 760842 - DNA, 15 bp, Homo sapiens
acaaaaagaaaaaaa

SEQ ID NO: 760843 - DNA, 15 bp, Homo sapiens
caaaaagaaaaaaag

SEQ ID NO: 760844 - DNA, 15 bp, Homo sapiens
aaaaagaaaaaaaga

SEQ ID NO: 760845 - DNA, 15 bp, Homo sapiens
aaaagaaaaaaagag

SEQ ID NO: 760846 - DNA, 15 bp, Homo sapiens
aaagaaaaaaagaga

SEQ ID NO: 760847 - DNA, 15 bp, Homo sapiens
aagaaaaaaagagag

SEQ ID NO: 760848 - DNA, 15 bp, Homo sapiens
agaaaaaaagagaga

SEQ ID NO: 760849 - DNA, 15 bp, Homo sapiens
gaaaaaaagagagag

SEQ ID NO: 760850 - DNA, 15 bp, Homo sapiens
aaaaaaagagagaga

SEQ ID NO: 760851 - DNA, 15 bp, Homo sapiens
aaaaaagagagagag

SEQ ID NO: 760852 - DNA, 15 bp, Homo sapiens
aaaaagagagagaga

SEQ ID NO: 760853 - DNA, 15 bp, Homo sapiens
aaaagagagagagag

SEQ ID NO: 760854 - DNA, 15 bp, Homo sapiens
aaagagagagagagg

SEQ ID NO: 760855 - DNA, 15 bp, Homo sapiens
aagagagagagaggg

SEQ ID NO: 760856 - DNA, 15 bp, Homo sapiens
agagagagagaggga

SEQ ID NO: 760857 - DNA, 15 bp, Homo sapiens
gagagagagagggag

SEQ ID NO: 760858 - DNA, 15 bp, Homo sapiens
agagagagagggaga

SEQ ID NO: 760859 - DNA, 15 bp, Homo sapiens
gagagagagggagag

SEQ ID NO: 760860 - DNA, 15 bp, Homo sapiens
agagagagggagaga

SEQ ID NO: 760861 - DNA, 15 bp, Homo sapiens
gagagagggagagag

SEQ ID NO: 760862 - DNA, 15 bp, Homo sapiens
agagagggagagagc

SEQ ID NO: 760863 - DNA, 15 bp, Homo sapiens
gagagggagagagca

SEQ ID NO: 760864 - DNA, 15 bp, Homo sapiens
agagggagagagcac

SEQ ID NO: 760865 - DNA, 15 bp, Homo sapiens
gagggagagagcacc

SEQ ID NO: 760866 - DNA, 15 bp, Homo sapiens
agggagagagcacct

SEQ ID NO: 760867 - DNA, 15 bp, Homo sapiens
gggagagagcacctc

SEQ ID NO: 760868 - DNA, 15 bp, Homo sapiens
ggagagagcacctct

SEQ ID NO: 760869 - DNA, 15 bp, Homo sapiens
gagagagcacctcta

SEQ ID NO: 760870 - DNA, 15 bp, Homo sapiens
agagagcacctctac

SEQ ID NO: 760871 - DNA, 15 bp, Homo sapiens
gagagcacctctaca

SEQ ID NO: 760872 - DNA, 15 bp, Homo sapiens
agagcacctctacaa

SEQ ID NO: 760873 - DNA, 15 bp, Homo sapiens
gagcacctctacaaa

SEQ ID NO: 760874 - DNA, 15 bp, Homo sapiens
agcacctctacaaaa

SEQ ID NO: 760875 - DNA, 15 bp, Homo sapiens
gcacctctacaaaaa

SEQ ID NO: 760876 - DNA, 15 bp, Homo sapiens
cacctctacaaaaaa

SEQ ID NO: 760877 - DNA, 15 bp, Homo sapiens
acctctacaaaaaaa

SEQ ID NO: 760878 - DNA, 15 bp, Homo sapiens
cctctacaaaaaaaa

SEQ ID NO: 760879 - DNA, 15 bp, Homo sapiens
ctctacaaaaaaaaa

SEQ ID NO: 760880 - DNA, 15 bp, Homo sapiens
tctacaaaaaaaaaa

SEQ ID NO: 760881 - DNA, 15 bp, Homo sapiens
ctacaaaaaaaaaaa

SEQ ID NO: 760882 - DNA, 15 bp, Homo sapiens
tacaaaaaaaaaaaa

SEQ ID NO: 760883 - DNA, 15 bp, Homo sapiens
acaaaaaaaaaaaaa

SEQ ID NO: 760884 - DNA, 15 bp, Homo sapiens
aaaaaaaaaaaagaa

SEQ ID NO: 760885 - DNA, 15 bp, Homo sapiens
aaaaaaaaaaagaaa

SEQ ID NO: 760886 - DNA, 15 bp, Homo sapiens
aaaaaaaaaagaaaa

SEQ ID NO: 760887 - DNA, 15 bp, Homo sapiens
aaaaaaaaagaaaag

SEQ ID NO: 760888 - DNA, 15 bp, Homo sapiens
aaaaaaaagaaaaga

SEQ ID NO: 760889 - DNA, 15 bp, Homo sapiens
aaaaaaagaaaagaa

SEQ ID NO: 760890 - DNA, 15 bp, Homo sapiens
aaaaaagaaaagaaa

SEQ ID NO: 760891 - DNA, 15 bp, Homo sapiens
aaaaagaaaagaaaa

SEQ ID NO: 760892 - DNA, 15 bp, Homo sapiens
aaaagaaaagaaaaa

SEQ ID NO: 760893 - DNA, 15 bp, Homo sapiens
aaagaaaagaaaaaa

SEQ ID NO: 760894 - DNA, 15 bp, Homo sapiens
aagaaaagaaaaaaa

SEQ ID NO: 760895 - DNA, 15 bp, Homo sapiens
agaaaagaaaaaaaa

SEQ ID NO: 760896 - DNA, 15 bp, Homo sapiens
gaaaagaaaaaaaaa

SEQ ID NO: 760897 - DNA, 15 bp, Homo sapiens
aaaagaaaaaaaaaa

SEQ ID NO: 760898 - DNA, 15 bp, Homo sapiens
aaagaaaaaaaaaag

SEQ ID NO: 760899 - DNA, 15 bp, Homo sapiens
aagaaaaaaaaaaga

SEQ ID NO: 760900 - DNA, 15 bp, Homo sapiens
agaaaaaaaaaagaa

SEQ ID NO: 760901 - DNA, 15 bp, Homo sapiens
gaaaaaaaaaagaaa

SEQ ID NO: 760902 - DNA, 15 bp, Homo sapiens
aaaaaaaaagaaaaa

SEQ ID NO: 760903 - DNA, 15 bp, Homo sapiens
aaaaaaaagaaaaag

SEQ ID NO: 760904 - DNA, 15 bp, Homo sapiens
aaaaaaagaaaaagg

SEQ ID NO: 760905 - DNA, 15 bp, Homo sapiens
aaaaaagaaaaagga

SEQ ID NO: 760906 - DNA, 15 bp, Homo sapiens
aaaaagaaaaaggaa

SEQ ID NO: 760907 - DNA, 15 bp, Homo sapiens
aaaagaaaaaggaaa

SEQ ID NO: 760908 - DNA, 15 bp, Homo sapiens
aaagaaaaaggaaaa

SEQ ID NO: 760909 - DNA, 15 bp, Homo sapiens
aagaaaaaggaaaag

SEQ ID NO: 760910 - DNA, 15 bp, Homo sapiens
agaaaaaggaaaagt

SEQ ID NO: 760911 - DNA, 15 bp, Homo sapiens
gaaaaaggaaaagtg

SEQ ID NO: 760912 - DNA, 15 bp, Homo sapiens
aaaaaggaaaagtgg

SEQ ID NO: 760913 - DNA, 15 bp, Homo sapiens
aaaaggaaaagtggt

SEQ ID NO: 760914 - DNA, 15 bp, Homo sapiens
aaaggaaaagtggtt

SEQ ID NO: 760915 - DNA, 15 bp, Homo sapiens
aaggaaaagtggttc

SEQ ID NO: 760916 - DNA, 15 bp, Homo sapiens
aggaaaagtggttcc

SEQ ID NO: 760917 - DNA, 15 bp, Homo sapiens
ggaaaagtggttcca

SEQ ID NO: 760918 - DNA, 15 bp, Homo sapiens
gaaaagtggttccaa

SEQ ID NO: 760919 - DNA, 15 bp, Homo sapiens
aaaagtggttccaat

SEQ ID NO: 760920 - DNA, 15 bp, Homo sapiens
aaagtggttccaatg

SEQ ID NO: 760921 - DNA, 15 bp, Homo sapiens
aagtggttccaatgg

SEQ ID NO: 760922 - DNA, 15 bp, Homo sapiens
agtggttccaatggt

SEQ ID NO: 760923 - DNA, 15 bp, Homo sapiens
gtggttccaatggta

SEQ ID NO: 760924 - DNA, 15 bp, Homo sapiens
tggttccaatggtaa

SEQ ID NO: 760925 - DNA, 15 bp, Homo sapiens
ggttccaatggtaaa

SEQ ID NO: 760926 - DNA, 15 bp, Homo sapiens
gttccaatggtaaat

SEQ ID NO: 760927 - DNA, 15 bp, Homo sapiens
ttccaatggtaaatt

SEQ ID NO: 760928 - DNA, 15 bp, Homo sapiens
tccaatggtaaattt

SEQ ID NO: 760929 - DNA, 15 bp, Homo sapiens
ccaatggtaaatttt

SEQ ID NO: 760930 - DNA, 15 bp, Homo sapiens
caatggtaaatttta

SEQ ID NO: 760931 - DNA, 15 bp, Homo sapiens
aatggtaaattttat

SEQ ID NO: 760932 - DNA, 15 bp, Homo sapiens
atggtaaattttatg

SEQ ID NO: 760933 - DNA, 15 bp, Homo sapiens
tggtaaattttatgt

SEQ ID NO: 760934 - DNA, 15 bp, Homo sapiens
ggtaaattttatgtg

SEQ ID NO: 760935 - DNA, 15 bp, Homo sapiens
gtaaattttatgtga

SEQ ID NO: 760936 - DNA, 15 bp, Homo sapiens
taaattttatgtgat

SEQ ID NO: 760937 - DNA, 15 bp, Homo sapiens
aaattttatgtgata

SEQ ID NO: 760938 - DNA, 15 bp, Homo sapiens
aattttatgtgatat

SEQ ID NO: 760939 - DNA, 15 bp, Homo sapiens
attttatgtgatatt

SEQ ID NO: 760940 - DNA, 15 bp, Homo sapiens
ttttatgtgatattt

SEQ ID NO: 760941 - DNA, 15 bp, Homo sapiens
tttatgtgatattta

SEQ ID NO: 760942 - DNA, 15 bp, Homo sapiens
ttatgtgatatttat

SEQ ID NO: 760943 - DNA, 15 bp, Homo sapiens
tatgtgatatttatt

SEQ ID NO: 760944 - DNA, 15 bp, Homo sapiens
atgtgatatttattt

SEQ ID NO: 760945 - DNA, 15 bp, Homo sapiens
tgtgatatttatttt

SEQ ID NO: 760946 - DNA, 15 bp, Homo sapiens
gtgatatttattttg

SEQ ID NO: 760947 - DNA, 15 bp, Homo sapiens
tgatatttattttgc

SEQ ID NO: 760948 - DNA, 15 bp, Homo sapiens
gatatttattttgcc

SEQ ID NO: 760949 - DNA, 15 bp, Homo sapiens
atatttattttgcca

SEQ ID NO: 760950 - DNA, 15 bp, Homo sapiens
tatttattttgccac

SEQ ID NO: 760951 - DNA, 15 bp, Homo sapiens
atttattttgccaca

SEQ ID NO: 760952 - DNA, 15 bp, Homo sapiens
tttattttgccacaa

SEQ ID NO: 760953 - DNA, 15 bp, Homo sapiens
ttattttgccacaat

SEQ ID NO: 760954 - DNA, 15 bp, Homo sapiens
tattttgccacaata

SEQ ID NO: 760955 - DNA, 15 bp, Homo sapiens
attttgccacaataa

SEQ ID NO: 760956 - DNA, 15 bp, Homo sapiens
ttttgccacaataaa

SEQ ID NO: 760957 - DNA, 15 bp, Homo sapiens
tttgccacaataaaa

SEQ ID NO: 760958 - DNA, 15 bp, Homo sapiens
ttgccacaataaaaa

SEQ ID NO: 760959 - DNA, 15 bp, Homo sapiens
tgccacaataaaaag

SEQ ID NO: 760960 - DNA, 15 bp, Homo sapiens
gccacaataaaaaga

SEQ ID NO: 760961 - DNA, 15 bp, Homo sapiens
ccacaataaaaagag

SEQ ID NO: 760962 - DNA, 15 bp, Homo sapiens
cacaataaaaagagc

SEQ ID NO: 760963 - DNA, 15 bp, Homo sapiens
acaataaaaagagca

SEQ ID NO: 760964 - DNA, 15 bp, Homo sapiens
caataaaaagagcat

SEQ ID NO: 760965 - DNA, 15 bp, Homo sapiens
aataaaaagagcata

SEQ ID NO: 760966 - DNA, 15 bp, Homo sapiens
ataaaaagagcataa

SEQ ID NO: 760967 - DNA, 15 bp, Homo sapiens
taaaaagagcataaa

SEQ ID NO: 760968 - DNA, 15 bp, Homo sapiens
aaaaagagcataaaa

SEQ ID NO: 760969 - DNA, 15 bp, Homo sapiens
aaaagagcataaaag

SEQ ID NO: 760970 - DNA, 15 bp, Homo sapiens
aaagagcataaaagt

SEQ ID NO: 760971 - DNA, 15 bp, Homo sapiens
aagagcataaaagtc

SEQ ID NO: 760972 - DNA, 15 bp, Homo sapiens
agagcataaaagtca

SEQ ID NO: 760973 - DNA, 15 bp, Homo sapiens
gagcataaaagtcaa

SEQ ID NO: 760974 - DNA, 15 bp, Homo sapiens
agcataaaagtcaaa

SEQ ID NO: 760975 - DNA, 15 bp, Homo sapiens
gcataaaagtcaaag

SEQ ID NO: 760976 - DNA, 15 bp, Homo sapiens
cataaaagtcaaagc

SEQ ID NO: 760977 - DNA, 15 bp, Homo sapiens
ataaaagtcaaagca

SEQ ID NO: 760978 - DNA, 15 bp, Homo sapiens
taaaagtcaaagcag

SEQ ID NO: 760979 - DNA, 15 bp, Homo sapiens
aaaagtcaaagcagg

SEQ ID NO: 760980 - DNA, 15 bp, Homo sapiens
aaagtcaaagcaggc

SEQ ID NO: 760981 - DNA, 15 bp, Homo sapiens
aagtcaaagcaggct

SEQ ID NO: 760982 - DNA, 15 bp, Homo sapiens
agtcaaagcaggctg

SEQ ID NO: 760983 - DNA, 15 bp, Homo sapiens
gtcaaagcaggctga

SEQ ID NO: 760984 - DNA, 15 bp, Homo sapiens
tcaaagcaggctgag

SEQ ID NO: 760985 - DNA, 15 bp, Homo sapiens
caaagcaggctgagt

SEQ ID NO: 760986 - DNA, 15 bp, Homo sapiens
aaagcaggctgagtg

SEQ ID NO: 760987 - DNA, 15 bp, Homo sapiens
aagcaggctgagtgg

SEQ ID NO: 760988 - DNA, 15 bp, Homo sapiens
agcaggctgagtggg

SEQ ID NO: 760989 - DNA, 15 bp, Homo sapiens
gcaggctgagtgggg

SEQ ID NO: 760990 - DNA, 15 bp, Homo sapiens
caggctgagtggggg

SEQ ID NO: 760991 - DNA, 15 bp, Homo sapiens
aggctgagtgggggg

SEQ ID NO: 760992 - DNA, 15 bp, Homo sapiens
ggctgagtgggggga

SEQ ID NO: 760993 - DNA, 15 bp, Homo sapiens
gctgagtggggggac

SEQ ID NO: 760994 - DNA, 15 bp, Homo sapiens
ctgagtggggggact

SEQ ID NO: 760995 - DNA, 15 bp, Homo sapiens
tgagtggggggactc

SEQ ID NO: 760996 - DNA, 15 bp, Homo sapiens
gagtggggggactcg

SEQ ID NO: 760997 - DNA, 15 bp, Homo sapiens
agtggggggactcgc

SEQ ID NO: 760998 - DNA, 15 bp, Homo sapiens
gtggggggactcgcg

SEQ ID NO: 760999 - DNA, 15 bp, Homo sapiens
tggggggactcgcgc

SEQ ID NO: 761000 - DNA, 15 bp, Homo sapiens
ggggggactcgcgcc

SEQ ID NO: 761001 - DNA, 15 bp, Homo sapiens
gggggactcgcgcct

SEQ ID NO: 761002 - DNA, 15 bp, Homo sapiens
ggggactcgcgcctc

SEQ ID NO: 761003 - DNA, 15 bp, Homo sapiens
gggactcgcgcctct

SEQ ID NO: 761004 - DNA, 15 bp, Homo sapiens
ggactcgcgcctcta

SEQ ID NO: 761005 - DNA, 15 bp, Homo sapiens
gactcgcgcctctaa

SEQ ID NO: 761006 - DNA, 15 bp, Homo sapiens
actcgcgcctctaat

SEQ ID NO: 761007 - DNA, 15 bp, Homo sapiens
ctcgcgcctctaatc

SEQ ID NO: 761008 - DNA, 15 bp, Homo sapiens
tcgcgcctctaatcc

SEQ ID NO: 761009 - DNA, 15 bp, Homo sapiens
cgcgcctctaatcct

SEQ ID NO: 761010 - DNA, 15 bp, Homo sapiens
gcgcctctaatcctg

SEQ ID NO: 761011 - DNA, 15 bp, Homo sapiens
cgcctctaatcctgg

SEQ ID NO: 761012 - DNA, 15 bp, Homo sapiens
gcctctaatcctgga

SEQ ID NO: 761013 - DNA, 15 bp, Homo sapiens
cctctaatcctggaa

SEQ ID NO: 761014 - DNA, 15 bp, Homo sapiens
ctctaatcctggaac

SEQ ID NO: 761015 - DNA, 15 bp, Homo sapiens
tctaatcctggaact

SEQ ID NO: 761016 - DNA, 15 bp, Homo sapiens
ctaatcctggaactt

SEQ ID NO: 761017 - DNA, 15 bp, Homo sapiens
taatcctggaacttt

SEQ ID NO: 761018 - DNA, 15 bp, Homo sapiens
aatcctggaactttg

SEQ ID NO: 761019 - DNA, 15 bp, Homo sapiens
atcctggaactttgg

SEQ ID NO: 761020 - DNA, 15 bp, Homo sapiens
tcctggaactttggg

SEQ ID NO: 761021 - DNA, 15 bp, Homo sapiens
cctggaactttggga

SEQ ID NO: 761022 - DNA, 15 bp, Homo sapiens
ctggaactttgggag

SEQ ID NO: 761023 - DNA, 15 bp, Homo sapiens
tggaactttgggagg

SEQ ID NO: 761024 - DNA, 15 bp, Homo sapiens
ggaactttgggaggc

SEQ ID NO: 761025 - DNA, 15 bp, Homo sapiens
gaactttgggaggcc

SEQ ID NO: 761026 - DNA, 15 bp, Homo sapiens
aactttgggaggccg

SEQ ID NO: 761027 - DNA, 15 bp, Homo sapiens
tgggaggccgaggca

SEQ ID NO: 761028 - DNA, 15 bp, Homo sapiens
gggaggccgaggcag

SEQ ID NO: 761029 - DNA, 15 bp, Homo sapiens
ggaggccgaggcagg

SEQ ID NO: 761030 - DNA, 15 bp, Homo sapiens
gaggccgaggcaggc

SEQ ID NO: 761031 - DNA, 15 bp, Homo sapiens
aggccgaggcaggca

SEQ ID NO: 761032 - DNA, 15 bp, Homo sapiens
ggccgaggcaggcag

SEQ ID NO: 761033 - DNA, 15 bp, Homo sapiens
gccgaggcaggcaga

SEQ ID NO: 761034 - DNA, 15 bp, Homo sapiens
ccgaggcaggcagac

SEQ ID NO: 761035 - DNA, 15 bp, Homo sapiens
cgaggcaggcagact

SEQ ID NO: 761036 - DNA, 15 bp, Homo sapiens
gaggcaggcagactg

SEQ ID NO: 761037 - DNA, 15 bp, Homo sapiens
aggcaggcagactgc

SEQ ID NO: 761038 - DNA, 15 bp, Homo sapiens
ggcaggcagactgct

SEQ ID NO: 761039 - DNA, 15 bp, Homo sapiens
gcaggcagactgctt

SEQ ID NO: 761040 - DNA, 15 bp, Homo sapiens
caggcagactgcttg

SEQ ID NO: 761041 - DNA, 15 bp, Homo sapiens
aggcagactgcttga

SEQ ID NO: 761042 - DNA, 15 bp, Homo sapiens
ggcagactgcttgag

SEQ ID NO: 761043 - DNA, 15 bp, Homo sapiens
gcagactgcttgagc

SEQ ID NO: 761044 - DNA, 15 bp, Homo sapiens
cagactgcttgagcc

SEQ ID NO: 761045 - DNA, 15 bp, Homo sapiens
agactgcttgagcct

SEQ ID NO: 761046 - DNA, 15 bp, Homo sapiens
gactgcttgagccta

SEQ ID NO: 761047 - DNA, 15 bp, Homo sapiens
actgcttgagcctag

SEQ ID NO: 761048 - DNA, 15 bp, Homo sapiens
ctgcttgagcctagg

SEQ ID NO: 761049 - DNA, 15 bp, Homo sapiens
tgcttgagcctagga

SEQ ID NO: 761050 - DNA, 15 bp, Homo sapiens
gcttgagcctaggag

SEQ ID NO: 761051 - DNA, 15 bp, Homo sapiens
gcctaggagtttgaa

SEQ ID NO: 761052 - DNA, 15 bp, Homo sapiens
cctaggagtttgaaa

SEQ ID NO: 761053 - DNA, 15 bp, Homo sapiens
ctaggagtttgaaac

SEQ ID NO: 761054 - DNA, 15 bp, Homo sapiens
taggagtttgaaacc

SEQ ID NO: 761055 - DNA, 15 bp, Homo sapiens
aggagtttgaaacca

SEQ ID NO: 761056 - DNA, 15 bp, Homo sapiens
ggagtttgaaaccac

SEQ ID NO: 761057 - DNA, 15 bp, Homo sapiens
gagtttgaaaccacc

SEQ ID NO: 761058 - DNA, 15 bp, Homo sapiens
agtttgaaaccaccc

SEQ ID NO: 761059 - DNA, 15 bp, Homo sapiens
gtttgaaaccaccct

SEQ ID NO: 761060 - DNA, 15 bp, Homo sapiens
tttgaaaccaccctg

SEQ ID NO: 761061 - DNA, 15 bp, Homo sapiens
ttgaaaccaccctgg

SEQ ID NO: 761062 - DNA, 15 bp, Homo sapiens
tgaaaccaccctggg

SEQ ID NO: 761063 - DNA, 15 bp, Homo sapiens
gaaaccaccctgggt

SEQ ID NO: 761064 - DNA, 15 bp, Homo sapiens
aaaccaccctgggta

SEQ ID NO: 761065 - DNA, 15 bp, Homo sapiens
aaccaccctgggtaa

SEQ ID NO: 761066 - DNA, 15 bp, Homo sapiens
accaccctgggtaac

SEQ ID NO: 761067 - DNA, 15 bp, Homo sapiens
ccaccctgggtaaca

SEQ ID NO: 761068 - DNA, 15 bp, Homo sapiens
caccctgggtaacat

SEQ ID NO: 761069 - DNA, 15 bp, Homo sapiens
accctgggtaacatg

SEQ ID NO: 761070 - DNA, 15 bp, Homo sapiens
ccctgggtaacatga

SEQ ID NO: 761071 - DNA, 15 bp, Homo sapiens
cctgggtaacatgat

SEQ ID NO: 761072 - DNA, 15 bp, Homo sapiens
ctgggtaacatgatg

SEQ ID NO: 761073 - DNA, 15 bp, Homo sapiens
tgggtaacatgatga

SEQ ID NO: 761074 - DNA, 15 bp, Homo sapiens
gggtaacatgatgaa

SEQ ID NO: 761075 - DNA, 15 bp, Homo sapiens
ggtaacatgatgaaa

SEQ ID NO: 761076 - DNA, 15 bp, Homo sapiens
gtaacatgatgaaac

SEQ ID NO: 761077 - DNA, 15 bp, Homo sapiens
taacatgatgaaacc

SEQ ID NO: 761078 - DNA, 15 bp, Homo sapiens
aacatgatgaaaccc

SEQ ID NO: 761079 - DNA, 15 bp, Homo sapiens
acatgatgaaacccc

SEQ ID NO: 761080 - DNA, 15 bp, Homo sapiens
catgatgaaacccca

SEQ ID NO: 761081 - DNA, 15 bp, Homo sapiens
atgatgaaaccccat

SEQ ID NO: 761082 - DNA, 15 bp, Homo sapiens
tgatgaaaccccatc

SEQ ID NO: 761083 - DNA, 15 bp, Homo sapiens
gatgaaaccccatct

SEQ ID NO: 761084 - DNA, 15 bp, Homo sapiens
atgaaaccccatctc

SEQ ID NO: 761085 - DNA, 15 bp, Homo sapiens
aaccccatctctaca

SEQ ID NO: 761086 - DNA, 15 bp, Homo sapiens
accccatctctacaa

SEQ ID NO: 761087 - DNA, 15 bp, Homo sapiens
ccccatctctacaaa

SEQ ID NO: 761088 - DNA, 15 bp, Homo sapiens
cccatctctacaaaa

SEQ ID NO: 761089 - DNA, 15 bp, Homo sapiens
ccatctctacaaaaa

SEQ ID NO: 761090 - DNA, 15 bp, Homo sapiens
catctctacaaaaat

SEQ ID NO: 761091 - DNA, 15 bp, Homo sapiens
atctctacaaaaatt

SEQ ID NO: 761092 - DNA, 15 bp, Homo sapiens
tctctacaaaaatta

SEQ ID NO: 761093 - DNA, 15 bp, Homo sapiens
ctctacaaaaattac

SEQ ID NO: 761094 - DNA, 15 bp, Homo sapiens
tctacaaaaattaca

SEQ ID NO: 761095 - DNA, 15 bp, Homo sapiens
ctacaaaaattacaa

SEQ ID NO: 761096 - DNA, 15 bp, Homo sapiens
tacaaaaattacaaa

SEQ ID NO: 761097 - DNA, 15 bp, Homo sapiens
acaaaaattacaaaa

SEQ ID NO: 761098 - DNA, 15 bp, Homo sapiens
caaaaattacaaaaa

SEQ ID NO: 761099 - DNA, 15 bp, Homo sapiens
aaaaattacaaaaaa

SEQ ID NO: 761100 - DNA, 15 bp, Homo sapiens
aaaattacaaaaaaa

SEQ ID NO: 761101 - DNA, 15 bp, Homo sapiens
aaattacaaaaaaaa

SEQ ID NO: 761102 - DNA, 15 bp, Homo sapiens
aattacaaaaaaaaa

SEQ ID NO: 761103 - DNA, 15 bp, Homo sapiens
attacaaaaaaaaaa

SEQ ID NO: 761104 - DNA, 15 bp, Homo sapiens
ttacaaaaaaaaaaa

SEQ ID NO: 761105 - DNA, 15 bp, Homo sapiens
aaaaaaaaaaatagc

SEQ ID NO: 761106 - DNA, 15 bp, Homo sapiens
aaaaaaaaaatagcc

SEQ ID NO: 761107 - DNA, 15 bp, Homo sapiens
aaaaaaaaatagcca

SEQ ID NO: 761108 - DNA, 15 bp, Homo sapiens
aaaaaaaatagccag

SEQ ID NO: 761109 - DNA, 15 bp, Homo sapiens
aaaaaaatagccagg

SEQ ID NO: 761110 - DNA, 15 bp, Homo sapiens
aaaaaatagccaggc

SEQ ID NO: 761111 - DNA, 15 bp, Homo sapiens
aaaaatagccaggca

SEQ ID NO: 761112 - DNA, 15 bp, Homo sapiens
aaaatagccaggcat

SEQ ID NO: 761113 - DNA, 15 bp, Homo sapiens
aaatagccaggcatg

SEQ ID NO: 761114 - DNA, 15 bp, Homo sapiens
aatagccaggcatgg

SEQ ID NO: 761115 - DNA, 15 bp, Homo sapiens
atagccaggcatggt

SEQ ID NO: 761116 - DNA, 15 bp, Homo sapiens
agccaggcatggtga

SEQ ID NO: 761117 - DNA, 15 bp, Homo sapiens
gccaggcatggtgat

SEQ ID NO: 761118 - DNA, 15 bp, Homo sapiens
ccaggcatggtgatg

SEQ ID NO: 761119 - DNA, 15 bp, Homo sapiens
caggcatggtgatgc

SEQ ID NO: 761120 - DNA, 15 bp, Homo sapiens
aggcatggtgatgcg

SEQ ID NO: 761121 - DNA, 15 bp, Homo sapiens
ggcatggtgatgcgt

SEQ ID NO: 761122 - DNA, 15 bp, Homo sapiens
gcatggtgatgcgta

SEQ ID NO: 761123 - DNA, 15 bp, Homo sapiens
catggtgatgcgtat

SEQ ID NO: 761124 - DNA, 15 bp, Homo sapiens
atggtgatgcgtatc

SEQ ID NO: 761125 - DNA, 15 bp, Homo sapiens
tggtgatgcgtatct

SEQ ID NO: 761126 - DNA, 15 bp, Homo sapiens
ggtgatgcgtatctg

SEQ ID NO: 761127 - DNA, 15 bp, Homo sapiens
gtgatgcgtatctgt

SEQ ID NO: 761128 - DNA, 15 bp, Homo sapiens
tgatgcgtatctgta

SEQ ID NO: 761129 - DNA, 15 bp, Homo sapiens
gatgcgtatctgtag

SEQ ID NO: 761130 - DNA, 15 bp, Homo sapiens
atgcgtatctgtagt

SEQ ID NO: 761131 - DNA, 15 bp, Homo sapiens
tgcgtatctgtagtc

SEQ ID NO: 761132 - DNA, 15 bp, Homo sapiens
gcgtatctgtagtcc

SEQ ID NO: 761133 - DNA, 15 bp, Homo sapiens
cgtatctgtagtccc

SEQ ID NO: 761134 - DNA, 15 bp, Homo sapiens
gtatctgtagtccca

SEQ ID NO: 761135 - DNA, 15 bp, Homo sapiens
tatctgtagtcccag

SEQ ID NO: 761136 - DNA, 15 bp, Homo sapiens
atctgtagtcccagc

SEQ ID NO: 761137 - DNA, 15 bp, Homo sapiens
tctgtagtcccagct

SEQ ID NO: 761138 - DNA, 15 bp, Homo sapiens
agtcccagctactta

SEQ ID NO: 761139 - DNA, 15 bp, Homo sapiens
gtcccagctacttag

SEQ ID NO: 761140 - DNA, 15 bp, Homo sapiens
tcccagctacttagg

SEQ ID NO: 761141 - DNA, 15 bp, Homo sapiens
cccagctacttagga

SEQ ID NO: 761142 - DNA, 15 bp, Homo sapiens
ccagctacttaggag

SEQ ID NO: 761143 - DNA, 15 bp, Homo sapiens
cagctacttaggagg

SEQ ID NO: 761144 - DNA, 15 bp, Homo sapiens
agctacttaggaggt

SEQ ID NO: 761145 - DNA, 15 bp, Homo sapiens
gctacttaggaggtt

SEQ ID NO: 761146 - DNA, 15 bp, Homo sapiens
ctacttaggaggttg

SEQ ID NO: 761147 - DNA, 15 bp, Homo sapiens
tacttaggaggttga

SEQ ID NO: 761148 - DNA, 15 bp, Homo sapiens
acttaggaggttgag

SEQ ID NO: 761149 - DNA, 15 bp, Homo sapiens
cttaggaggttgagg

SEQ ID NO: 761150 - DNA, 15 bp, Homo sapiens
ttaggaggttgaggt

SEQ ID NO: 761151 - DNA, 15 bp, Homo sapiens
taggaggttgaggtg

SEQ ID NO: 761152 - DNA, 15 bp, Homo sapiens
aggaggttgaggtgg

SEQ ID NO: 761153 - DNA, 15 bp, Homo sapiens
ggaggttgaggtggg

SEQ ID NO: 761154 - DNA, 15 bp, Homo sapiens
gaggttgaggtggga

SEQ ID NO: 761155 - DNA, 15 bp, Homo sapiens
aggttgaggtgggag

SEQ ID NO: 761156 - DNA, 15 bp, Homo sapiens
ggttgaggtgggagg

SEQ ID NO: 761157 - DNA, 15 bp, Homo sapiens
gttgaggtgggagga

SEQ ID NO: 761158 - DNA, 15 bp, Homo sapiens
ttgaggtgggaggat

SEQ ID NO: 761159 - DNA, 15 bp, Homo sapiens
tgaggtgggaggatt

SEQ ID NO: 761160 - DNA, 15 bp, Homo sapiens
gaggtgggaggattg

SEQ ID NO: 761161 - DNA, 15 bp, Homo sapiens
aggtgggaggattgc

SEQ ID NO: 761162 - DNA, 15 bp, Homo sapiens
ggtgggaggattgct

SEQ ID NO: 761163 - DNA, 15 bp, Homo sapiens
gtgggaggattgctt

SEQ ID NO: 761164 - DNA, 15 bp, Homo sapiens
tgggaggattgcttg

SEQ ID NO: 761165 - DNA, 15 bp, Homo sapiens
gggaggattgcttga

SEQ ID NO: 761166 - DNA, 15 bp, Homo sapiens
ggaggattgcttgag

SEQ ID NO: 761167 - DNA, 15 bp, Homo sapiens
gaggattgcttgagc

SEQ ID NO: 761168 - DNA, 15 bp, Homo sapiens
aggattgcttgagcc

SEQ ID NO: 761169 - DNA, 15 bp, Homo sapiens
ggattgcttgagccc

SEQ ID NO: 761170 - DNA, 15 bp, Homo sapiens
gattgcttgagccca

SEQ ID NO: 761171 - DNA, 15 bp, Homo sapiens
attgcttgagcccag

SEQ ID NO: 761172 - DNA, 15 bp, Homo sapiens
ttgcttgagcccagg

SEQ ID NO: 761173 - DNA, 15 bp, Homo sapiens
tgcttgagcccaggg

SEQ ID NO: 761174 - DNA, 15 bp, Homo sapiens
gcttgagcccagggg

SEQ ID NO: 761175 - DNA, 15 bp, Homo sapiens
cttgagcccaggggg

SEQ ID NO: 761176 - DNA, 15 bp, Homo sapiens
ttgagcccagggggt

SEQ ID NO: 761177 - DNA, 15 bp, Homo sapiens
tgagcccagggggtt

SEQ ID NO: 761178 - DNA, 15 bp, Homo sapiens
gagcccagggggttg

SEQ ID NO: 761179 - DNA, 15 bp, Homo sapiens
agcccagggggttgc

SEQ ID NO: 761180 - DNA, 15 bp, Homo sapiens
gcccagggggttgcg

SEQ ID NO: 761181 - DNA, 15 bp, Homo sapiens
cccagggggttgcgg

SEQ ID NO: 761182 - DNA, 15 bp, Homo sapiens
ccagggggttgcggt

SEQ ID NO: 761183 - DNA, 15 bp, Homo sapiens
cagggggttgcggtt

SEQ ID NO: 761184 - DNA, 15 bp, Homo sapiens
agggggttgcggttc

SEQ ID NO: 761185 - DNA, 15 bp, Homo sapiens
gggggttgcggttca

SEQ ID NO: 761186 - DNA, 15 bp, Homo sapiens
ggggttgcggttcag

SEQ ID NO: 761187 - DNA, 15 bp, Homo sapiens
gggttgcggttcagt

SEQ ID NO: 761188 - DNA, 15 bp, Homo sapiens
ggttgcggttcagtg

SEQ ID NO: 761189 - DNA, 15 bp, Homo sapiens
gttgcggttcagtga

SEQ ID NO: 761190 - DNA, 15 bp, Homo sapiens
ttgcggttcagtgag

SEQ ID NO: 761191 - DNA, 15 bp, Homo sapiens
tgcggttcagtgagc

SEQ ID NO: 761192 - DNA, 15 bp, Homo sapiens
gcggttcagtgagct

SEQ ID NO: 761193 - DNA, 15 bp, Homo sapiens
cggttcagtgagctg

SEQ ID NO: 761194 - DNA, 15 bp, Homo sapiens
ggttcagtgagctga

SEQ ID NO: 761195 - DNA, 15 bp, Homo sapiens
gttcagtgagctgag

SEQ ID NO: 761196 - DNA, 15 bp, Homo sapiens
ttcagtgagctgaga

SEQ ID NO: 761197 - DNA, 15 bp, Homo sapiens
tcagtgagctgagat

SEQ ID NO: 761198 - DNA, 15 bp, Homo sapiens
cagtgagctgagatc

SEQ ID NO: 761199 - DNA, 15 bp, Homo sapiens
agtgagctgagatcg

SEQ ID NO: 761200 - DNA, 15 bp, Homo sapiens
gtgagctgagatcgt

SEQ ID NO: 761201 - DNA, 15 bp, Homo sapiens
tgagctgagatcgtg

SEQ ID NO: 761202 - DNA, 15 bp, Homo sapiens
gagctgagatcgtgc

SEQ ID NO: 761203 - DNA, 15 bp, Homo sapiens
agctgagatcgtgcc

SEQ ID NO: 761204 - DNA, 15 bp, Homo sapiens
gctgagatcgtgcca

SEQ ID NO: 761205 - DNA, 15 bp, Homo sapiens
ctgagatcgtgccac

SEQ ID NO: 761206 - DNA, 15 bp, Homo sapiens
tgagatcgtgccact

SEQ ID NO: 761207 - DNA, 15 bp, Homo sapiens
gagatcgtgccactg

SEQ ID NO: 761208 - DNA, 15 bp, Homo sapiens
agatcgtgccactgc

SEQ ID NO: 761209 - DNA, 15 bp, Homo sapiens
gatcgtgccactgca

SEQ ID NO: 761210 - DNA, 15 bp, Homo sapiens
atcgtgccactgcat

SEQ ID NO: 761211 - DNA, 15 bp, Homo sapiens
tcgtgccactgcatt

SEQ ID NO: 761212 - DNA, 15 bp, Homo sapiens
cgtgccactgcattg

SEQ ID NO: 761213 - DNA, 15 bp, Homo sapiens
gtgccactgcattgc

SEQ ID NO: 761214 - DNA, 15 bp, Homo sapiens
tgccactgcattgcc

SEQ ID NO: 761215 - DNA, 15 bp, Homo sapiens
gccactgcattgccg

SEQ ID NO: 761216 - DNA, 15 bp, Homo sapiens
ccactgcattgccgg

SEQ ID NO: 761217 - DNA, 15 bp, Homo sapiens
cactgcattgccggc

SEQ ID NO: 761218 - DNA, 15 bp, Homo sapiens
actgcattgccggct

SEQ ID NO: 761219 - DNA, 15 bp, Homo sapiens
ctgcattgccggctg

SEQ ID NO: 761220 - DNA, 15 bp, Homo sapiens
tgcattgccggctgg

SEQ ID NO: 761221 - DNA, 15 bp, Homo sapiens
gcattgccggctggg

SEQ ID NO: 761222 - DNA, 15 bp, Homo sapiens
cattgccggctgggt

SEQ ID NO: 761223 - DNA, 15 bp, Homo sapiens
attgccggctgggtg

SEQ ID NO: 761224 - DNA, 15 bp, Homo sapiens
ttgccggctgggtga

SEQ ID NO: 761225 - DNA, 15 bp, Homo sapiens
tgccggctgggtgat

SEQ ID NO: 761226 - DNA, 15 bp, Homo sapiens
gccggctgggtgata

SEQ ID NO: 761227 - DNA, 15 bp, Homo sapiens
ccggctgggtgatac

SEQ ID NO: 761228 - DNA, 15 bp, Homo sapiens
cggctgggtgataca

SEQ ID NO: 761229 - DNA, 15 bp, Homo sapiens
ggctgggtgatacag

SEQ ID NO: 761230 - DNA, 15 bp, Homo sapiens
gctgggtgatacagt

SEQ ID NO: 761231 - DNA, 15 bp, Homo sapiens
ctgggtgatacagtg

SEQ ID NO: 761232 - DNA, 15 bp, Homo sapiens
tgggtgatacagtga

SEQ ID NO: 761233 - DNA, 15 bp, Homo sapiens
gggtgatacagtgat

SEQ ID NO: 761234 - DNA, 15 bp, Homo sapiens
ggtgatacagtgata

SEQ ID NO: 761235 - DNA, 15 bp, Homo sapiens
gtgatacagtgatac

SEQ ID NO: 761236 - DNA, 15 bp, Homo sapiens
tgatacagtgatacc

SEQ ID NO: 761237 - DNA, 15 bp, Homo sapiens
gatacagtgataccc

SEQ ID NO: 761238 - DNA, 15 bp, Homo sapiens
atacagtgataccct

SEQ ID NO: 761239 - DNA, 15 bp, Homo sapiens
tacagtgataccctg

SEQ ID NO: 761240 - DNA, 15 bp, Homo sapiens
acagtgataccctgt

SEQ ID NO: 761241 - DNA, 15 bp, Homo sapiens
cagtgataccctgtc

SEQ ID NO: 761242 - DNA, 15 bp, Homo sapiens
agtgataccctgtct

SEQ ID NO: 761243 - DNA, 15 bp, Homo sapiens
gtgataccctgtctc

SEQ ID NO: 761244 - DNA, 15 bp, Homo sapiens
tgataccctgtctca

SEQ ID NO: 761245 - DNA, 15 bp, Homo sapiens
gataccctgtctcaa

SEQ ID NO: 761246 - DNA, 15 bp, Homo sapiens
ataccctgtctcaaa

SEQ ID NO: 761247 - DNA, 15 bp, Homo sapiens
taccctgtctcaaaa

SEQ ID NO: 761248 - DNA, 15 bp, Homo sapiens
accctgtctcaaaat

SEQ ID NO: 761249 - DNA, 15 bp, Homo sapiens
ccctgtctcaaaata

SEQ ID NO: 761250 - DNA, 15 bp, Homo sapiens
cctgtctcaaaataa

SEQ ID NO: 761251 - DNA, 15 bp, Homo sapiens
ctgtctcaaaataaa

SEQ ID NO: 761252 - DNA, 15 bp, Homo sapiens
tgtctcaaaataaaa

SEQ ID NO: 761253 - DNA, 15 bp, Homo sapiens
gtctcaaaataaaat

SEQ ID NO: 761254 - DNA, 15 bp, Homo sapiens
tctcaaaataaaatc

SEQ ID NO: 761255 - DNA, 15 bp, Homo sapiens
ctcaaaataaaatca

SEQ ID NO: 761256 - DNA, 15 bp, Homo sapiens
tcaaaataaaatcaa

SEQ ID NO: 761257 - DNA, 15 bp, Homo sapiens
caaaataaaatcaaa

SEQ ID NO: 761258 - DNA, 15 bp, Homo sapiens
aaaataaaatcaaat

SEQ ID NO: 761259 - DNA, 15 bp, Homo sapiens
aaataaaatcaaata

SEQ ID NO: 761260 - DNA, 15 bp, Homo sapiens
aataaaatcaaataa

SEQ ID NO: 761261 - DNA, 15 bp, Homo sapiens
ataaaatcaaataaa

SEQ ID NO: 761262 - DNA, 15 bp, Homo sapiens
taaaatcaaataaaa

SEQ ID NO: 761263 - DNA, 15 bp, Homo sapiens
aaaatcaaataaaaa

SEQ ID NO: 761264 - DNA, 15 bp, Homo sapiens
aaatcaaataaaaat

SEQ ID NO: 761265 - DNA, 15 bp, Homo sapiens
aatcaaataaaaatg

SEQ ID NO: 761266 - DNA, 15 bp, Homo sapiens
atcaaataaaaatga

SEQ ID NO: 761267 - DNA, 15 bp, Homo sapiens
tcaaataaaaatgaa

SEQ ID NO: 761268 - DNA, 15 bp, Homo sapiens
caaataaaaatgaaa

SEQ ID NO: 761269 - DNA, 15 bp, Homo sapiens
aaataaaaatgaaag

SEQ ID NO: 761270 - DNA, 15 bp, Homo sapiens
aataaaaatgaaagc

SEQ ID NO: 761271 - DNA, 15 bp, Homo sapiens
ataaaaatgaaagca

SEQ ID NO: 761272 - DNA, 15 bp, Homo sapiens
taaaaatgaaagcag

SEQ ID NO: 761273 - DNA, 15 bp, Homo sapiens
aaaaatgaaagcagc

SEQ ID NO: 761274 - DNA, 15 bp, Homo sapiens
aaaatgaaagcagca

SEQ ID NO: 761275 - DNA, 15 bp, Homo sapiens
aaatgaaagcagcag

SEQ ID NO: 761276 - DNA, 15 bp, Homo sapiens
aatgaaagcagcagt

SEQ ID NO: 761277 - DNA, 15 bp, Homo sapiens
atgaaagcagcagtt

SEQ ID NO: 761278 - DNA, 15 bp, Homo sapiens
tgaaagcagcagtta

SEQ ID NO: 761279 - DNA, 15 bp, Homo sapiens
gaaagcagcagttaa

SEQ ID NO: 761280 - DNA, 15 bp, Homo sapiens
aaagcagcagttaaa

SEQ ID NO: 761281 - DNA, 15 bp, Homo sapiens
aagcagcagttaaat

SEQ ID NO: 761282 - DNA, 15 bp, Homo sapiens
agcagcagttaaatc

SEQ ID NO: 761283 - DNA, 15 bp, Homo sapiens
gcagcagttaaatcc

SEQ ID NO: 761284 - DNA, 15 bp, Homo sapiens
cagcagttaaatcct

SEQ ID NO: 761285 - DNA, 15 bp, Homo sapiens
agcagttaaatccta

SEQ ID NO: 761286 - DNA, 15 bp, Homo sapiens
gcagttaaatcctag

SEQ ID NO: 761287 - DNA, 15 bp, Homo sapiens
cagttaaatcctaga

SEQ ID NO: 761288 - DNA, 15 bp, Homo sapiens
agttaaatcctagag

SEQ ID NO: 761289 - DNA, 15 bp, Homo sapiens
gttaaatcctagaga

SEQ ID NO: 761290 - DNA, 15 bp, Homo sapiens
ttaaatcctagagat

SEQ ID NO: 761291 - DNA, 15 bp, Homo sapiens
taaatcctagagatg

SEQ ID NO: 761292 - DNA, 15 bp, Homo sapiens
aaatcctagagatga

SEQ ID NO: 761293 - DNA, 15 bp, Homo sapiens
aatcctagagatgat

SEQ ID NO: 761294 - DNA, 15 bp, Homo sapiens
atcctagagatgatt

SEQ ID NO: 761295 - DNA, 15 bp, Homo sapiens
tcctagagatgattg

SEQ ID NO: 761296 - DNA, 15 bp, Homo sapiens
cctagagatgattgc

SEQ ID NO: 761297 - DNA, 15 bp, Homo sapiens
ctagagatgattgct

SEQ ID NO: 761298 - DNA, 15 bp, Homo sapiens
tagagatgattgctg

SEQ ID NO: 761299 - DNA, 15 bp, Homo sapiens
agagatgattgctgt

SEQ ID NO: 761300 - DNA, 15 bp, Homo sapiens
gagatgattgctgtt

SEQ ID NO: 761301 - DNA, 15 bp, Homo sapiens
agatgattgctgttc

SEQ ID NO: 761302 - DNA, 15 bp, Homo sapiens
gatgattgctgttca

SEQ ID NO: 761303 - DNA, 15 bp, Homo sapiens
atgattgctgttcat

SEQ ID NO: 761304 - DNA, 15 bp, Homo sapiens
tgattgctgttcata

SEQ ID NO: 761305 - DNA, 15 bp, Homo sapiens
gattgctgttcatat

SEQ ID NO: 761306 - DNA, 15 bp, Homo sapiens
attgctgttcatatt

SEQ ID NO: 761307 - DNA, 15 bp, Homo sapiens
ttgctgttcatattt

SEQ ID NO: 761308 - DNA, 15 bp, Homo sapiens
tgctgttcatatttg

SEQ ID NO: 761309 - DNA, 15 bp, Homo sapiens
gctgttcatatttga

SEQ ID NO: 761310 - DNA, 15 bp, Homo sapiens
ctgttcatatttgaa

SEQ ID NO: 761311 - DNA, 15 bp, Homo sapiens
tgttcatatttgaat

SEQ ID NO: 761312 - DNA, 15 bp, Homo sapiens
gttcatatttgaatg

SEQ ID NO: 761313 - DNA, 15 bp, Homo sapiens
ttcatatttgaatgt

SEQ ID NO: 761314 - DNA, 15 bp, Homo sapiens
tcatatttgaatgtt

SEQ ID NO: 761315 - DNA, 15 bp, Homo sapiens
catatttgaatgttt

SEQ ID NO: 761316 - DNA, 15 bp, Homo sapiens
atatttgaatgtttt

SEQ ID NO: 761317 - DNA, 15 bp, Homo sapiens
tatttgaatgtttta

SEQ ID NO: 761318 - DNA, 15 bp, Homo sapiens
atttgaatgttttat

SEQ ID NO: 761319 - DNA, 15 bp, Homo sapiens
tttgaatgttttatg

SEQ ID NO: 761320 - DNA, 15 bp, Homo sapiens
ttgaatgttttatgt

SEQ ID NO: 761321 - DNA, 15 bp, Homo sapiens
tgaatgttttatgtc

SEQ ID NO: 761322 - DNA, 15 bp, Homo sapiens
gaatgttttatgtca

SEQ ID NO: 761323 - DNA, 15 bp, Homo sapiens
aatgttttatgtcac

SEQ ID NO: 761324 - DNA, 15 bp, Homo sapiens
atgttttatgtcact

SEQ ID NO: 761325 - DNA, 15 bp, Homo sapiens
tgttttatgtcactc

SEQ ID NO: 761326 - DNA, 15 bp, Homo sapiens
gttttatgtcactct

SEQ ID NO: 761327 - DNA, 15 bp, Homo sapiens
ttttatgtcactctt

SEQ ID NO: 761328 - DNA, 15 bp, Homo sapiens
tttatgtcactcttt

SEQ ID NO: 761329 - DNA, 15 bp, Homo sapiens
ttatgtcactctttt

SEQ ID NO: 761330 - DNA, 15 bp, Homo sapiens
tatgtcactcttttc

SEQ ID NO: 761331 - DNA, 15 bp, Homo sapiens
atgtcactcttttct

SEQ ID NO: 761332 - DNA, 15 bp, Homo sapiens
tgtcactcttttctc

SEQ ID NO: 761333 - DNA, 15 bp, Homo sapiens
gtcactcttttctct

SEQ ID NO: 761334 - DNA, 15 bp, Homo sapiens
tcactcttttctcta

SEQ ID NO: 761335 - DNA, 15 bp, Homo sapiens
cactcttttctctat

SEQ ID NO: 761336 - DNA, 15 bp, Homo sapiens
actcttttctctatg

SEQ ID NO: 761337 - DNA, 15 bp, Homo sapiens
ctcttttctctatgc

SEQ ID NO: 761338 - DNA, 15 bp, Homo sapiens
tcttttctctatgca

SEQ ID NO: 761339 - DNA, 15 bp, Homo sapiens
cttttctctatgcat

SEQ ID NO: 761340 - DNA, 15 bp, Homo sapiens
ttttctctatgcatt

SEQ ID NO: 761341 - DNA, 15 bp, Homo sapiens
tttctctatgcattt

SEQ ID NO: 761342 - DNA, 15 bp, Homo sapiens
ttctctatgcattta

SEQ ID NO: 761343 - DNA, 15 bp, Homo sapiens
tctctatgcatttag

SEQ ID NO: 761344 - DNA, 15 bp, Homo sapiens
ctctatgcatttaga

SEQ ID NO: 761345 - DNA, 15 bp, Homo sapiens
tctatgcatttagat

SEQ ID NO: 761346 - DNA, 15 bp, Homo sapiens
ctatgcatttagatg

SEQ ID NO: 761347 - DNA, 15 bp, Homo sapiens
tatgcatttagatgc

SEQ ID NO: 761348 - DNA, 15 bp, Homo sapiens
atgcatttagatgca

SEQ ID NO: 761349 - DNA, 15 bp, Homo sapiens
tgcatttagatgcat

SEQ ID NO: 761350 - DNA, 15 bp, Homo sapiens
gcatttagatgcata

SEQ ID NO: 761351 - DNA, 15 bp, Homo sapiens
catttagatgcatac

SEQ ID NO: 761352 - DNA, 15 bp, Homo sapiens
atttagatgcataca

SEQ ID NO: 761353 - DNA, 15 bp, Homo sapiens
tttagatgcatacat

SEQ ID NO: 761354 - DNA, 15 bp, Homo sapiens
ttagatgcatacata

SEQ ID NO: 761355 - DNA, 15 bp, Homo sapiens
tagatgcatacataa

SEQ ID NO: 761356 - DNA, 15 bp, Homo sapiens
agatgcatacataaa

SEQ ID NO: 761357 - DNA, 15 bp, Homo sapiens
gatgcatacataaat

SEQ ID NO: 761358 - DNA, 15 bp, Homo sapiens
atgcatacataaata

SEQ ID NO: 761359 - DNA, 15 bp, Homo sapiens
tgcatacataaatat

SEQ ID NO: 761360 - DNA, 15 bp, Homo sapiens
gcatacataaatatc

SEQ ID NO: 761361 - DNA, 15 bp, Homo sapiens
catacataaatatct

SEQ ID NO: 761362 - DNA, 15 bp, Homo sapiens
atacataaatatctt

SEQ ID NO: 761363 - DNA, 15 bp, Homo sapiens
tacataaatatcttc

SEQ ID NO: 761364 - DNA, 15 bp, Homo sapiens
acataaatatcttcc

SEQ ID NO: 761365 - DNA, 15 bp, Homo sapiens
cataaatatcttcct

SEQ ID NO: 761366 - DNA, 15 bp, Homo sapiens
ataaatatcttcctg

SEQ ID NO: 761367 - DNA, 15 bp, Homo sapiens
taaatatcttcctgt

SEQ ID NO: 761368 - DNA, 15 bp, Homo sapiens
aaatatcttcctgtt

SEQ ID NO: 761369 - DNA, 15 bp, Homo sapiens
aatatcttcctgttt

SEQ ID NO: 761370 - DNA, 15 bp, Homo sapiens
atatcttcctgtttt

SEQ ID NO: 761371 - DNA, 15 bp, Homo sapiens
tatcttcctgtttta

SEQ ID NO: 761372 - DNA, 15 bp, Homo sapiens
atcttcctgttttat

SEQ ID NO: 761373 - DNA, 15 bp, Homo sapiens
tcttcctgttttatc

SEQ ID NO: 761374 - DNA, 15 bp, Homo sapiens
cttcctgttttatca

SEQ ID NO: 761375 - DNA, 15 bp, Homo sapiens
ttcctgttttatcaa

SEQ ID NO: 761376 - DNA, 15 bp, Homo sapiens
tcctgttttatcaat

SEQ ID NO: 761377 - DNA, 15 bp, Homo sapiens
cctgttttatcaata

SEQ ID NO: 761378 - DNA, 15 bp, Homo sapiens
ctgttttatcaataa

SEQ ID NO: 761379 - DNA, 15 bp, Homo sapiens
tgttttatcaataat

SEQ ID NO: 761380 - DNA, 15 bp, Homo sapiens
gttttatcaataatt

SEQ ID NO: 761381 - DNA, 15 bp, Homo sapiens
ttttatcaataattc

SEQ ID NO: 761382 - DNA, 15 bp, Homo sapiens
tttatcaataattct

SEQ ID NO: 761383 - DNA, 15 bp, Homo sapiens
ttatcaataattctt

SEQ ID NO: 761384 - DNA, 15 bp, Homo sapiens
tatcaataattcttt

SEQ ID NO: 761385 - DNA, 15 bp, Homo sapiens
atcaataattctttg

SEQ ID NO: 761386 - DNA, 15 bp, Homo sapiens
tcaataattctttga

SEQ ID NO: 761387 - DNA, 15 bp, Homo sapiens
caataattctttgaa

SEQ ID NO: 761388 - DNA, 15 bp, Homo sapiens
aataattctttgaag

SEQ ID NO: 761389 - DNA, 15 bp, Homo sapiens
ataattctttgaagc

SEQ ID NO: 761390 - DNA, 15 bp, Homo sapiens
taattctttgaagct

SEQ ID NO: 761391 - DNA, 15 bp, Homo sapiens
aattctttgaagcta

SEQ ID NO: 761392 - DNA, 15 bp, Homo sapiens
attctttgaagctat

SEQ ID NO: 761393 - DNA, 15 bp, Homo sapiens
ttctttgaagctatg

SEQ ID NO: 761394 - DNA, 15 bp, Homo sapiens
tctttgaagctatgc

SEQ ID NO: 761395 - DNA, 15 bp, Homo sapiens
ctttgaagctatgct

SEQ ID NO: 761396 - DNA, 15 bp, Homo sapiens
tttgaagctatgctt

SEQ ID NO: 761397 - DNA, 15 bp, Homo sapiens
ttgaagctatgcttt

SEQ ID NO: 761398 - DNA, 15 bp, Homo sapiens
tgaagctatgctttt

SEQ ID NO: 761399 - DNA, 15 bp, Homo sapiens
gaagctatgctttta

SEQ ID NO: 761400 - DNA, 15 bp, Homo sapiens
aagctatgcttttaa

SEQ ID NO: 761401 - DNA, 15 bp, Homo sapiens
agctatgcttttaaa

SEQ ID NO: 761402 - DNA, 15 bp, Homo sapiens
gctatgcttttaaat

SEQ ID NO: 761403 - DNA, 15 bp, Homo sapiens
ctatgcttttaaatg

SEQ ID NO: 761404 - DNA, 15 bp, Homo sapiens
tatgcttttaaatga

SEQ ID NO: 761405 - DNA, 15 bp, Homo sapiens
atgcttttaaatgat

SEQ ID NO: 761406 - DNA, 15 bp, Homo sapiens
tgcttttaaatgatg

SEQ ID NO: 761407 - DNA, 15 bp, Homo sapiens
gcttttaaatgatgc

SEQ ID NO: 761408 - DNA, 15 bp, Homo sapiens
cttttaaatgatgca

SEQ ID NO: 761409 - DNA, 15 bp, Homo sapiens
ttttaaatgatgcat

SEQ ID NO: 761410 - DNA, 15 bp, Homo sapiens
tttaaatgatgcata

SEQ ID NO: 761411 - DNA, 15 bp, Homo sapiens
ttaaatgatgcatat

SEQ ID NO: 761412 - DNA, 15 bp, Homo sapiens
taaatgatgcatatt

SEQ ID NO: 761413 - DNA, 15 bp, Homo sapiens
aaatgatgcatatta

SEQ ID NO: 761414 - DNA, 15 bp, Homo sapiens
aatgatgcatattag

SEQ ID NO: 761415 - DNA, 15 bp, Homo sapiens
atgatgcatattagt

SEQ ID NO: 761416 - DNA, 15 bp, Homo sapiens
tgatgcatattagtt

SEQ ID NO: 761417 - DNA, 15 bp, Homo sapiens
gatgcatattagttt

SEQ ID NO: 761418 - DNA, 15 bp, Homo sapiens
atgcatattagtttc

SEQ ID NO: 761419 - DNA, 15 bp, Homo sapiens
tgcatattagtttcc

SEQ ID NO: 761420 - DNA, 15 bp, Homo sapiens
gcatattagtttccc

SEQ ID NO: 761421 - DNA, 15 bp, Homo sapiens
catattagtttccca

SEQ ID NO: 761422 - DNA, 15 bp, Homo sapiens
atattagtttcccaa

SEQ ID NO: 761423 - DNA, 15 bp, Homo sapiens
tattagtttcccaag

SEQ ID NO: 761424 - DNA, 15 bp, Homo sapiens
attagtttcccaagt

SEQ ID NO: 761425 - DNA, 15 bp, Homo sapiens
ttagtttcccaagta

SEQ ID NO: 761426 - DNA, 15 bp, Homo sapiens
tagtttcccaagtag

SEQ ID NO: 761427 - DNA, 15 bp, Homo sapiens
agtttcccaagtaga

SEQ ID NO: 761428 - DNA, 15 bp, Homo sapiens
gtttcccaagtagat

SEQ ID NO: 761429 - DNA, 15 bp, Homo sapiens
tttcccaagtagata

SEQ ID NO: 761430 - DNA, 15 bp, Homo sapiens
ttcccaagtagatac

SEQ ID NO: 761431 - DNA, 15 bp, Homo sapiens
tcccaagtagataca

SEQ ID NO: 761432 - DNA, 15 bp, Homo sapiens
cccaagtagatacac

SEQ ID NO: 761433 - DNA, 15 bp, Homo sapiens
ccaagtagatacact

SEQ ID NO: 761434 - DNA, 15 bp, Homo sapiens
caagtagatacactg

SEQ ID NO: 761435 - DNA, 15 bp, Homo sapiens
aagtagatacactgc

SEQ ID NO: 761436 - DNA, 15 bp, Homo sapiens
agtagatacactgca

SEQ ID NO: 761437 - DNA, 15 bp, Homo sapiens
gtagatacactgcag

SEQ ID NO: 761438 - DNA, 15 bp, Homo sapiens
tagatacactgcagt

SEQ ID NO: 761439 - DNA, 15 bp, Homo sapiens
agatacactgcagtt

SEQ ID NO: 761440 - DNA, 15 bp, Homo sapiens
gatacactgcagttt

SEQ ID NO: 761441 - DNA, 15 bp, Homo sapiens
atacactgcagttta

SEQ ID NO: 761442 - DNA, 15 bp, Homo sapiens
tacactgcagtttac

SEQ ID NO: 761443 - DNA, 15 bp, Homo sapiens
acactgcagtttact

SEQ ID NO: 761444 - DNA, 15 bp, Homo sapiens
cactgcagtttactt

SEQ ID NO: 761445 - DNA, 15 bp, Homo sapiens
actgcagtttactta

SEQ ID NO: 761446 - DNA, 15 bp, Homo sapiens
ctgcagtttacttaa

SEQ ID NO: 761447 - DNA, 15 bp, Homo sapiens
tgcagtttacttaac

SEQ ID NO: 761448 - DNA, 15 bp, Homo sapiens
gcagtttacttaacc

SEQ ID NO: 761449 - DNA, 15 bp, Homo sapiens
cagtttacttaacca

SEQ ID NO: 761450 - DNA, 15 bp, Homo sapiens
agtttacttaaccat

SEQ ID NO: 761451 - DNA, 15 bp, Homo sapiens
gtttacttaaccatc

SEQ ID NO: 761452 - DNA, 15 bp, Homo sapiens
tttacttaaccatct

SEQ ID NO: 761453 - DNA, 15 bp, Homo sapiens
ttacttaaccatctc

SEQ ID NO: 761454 - DNA, 15 bp, Homo sapiens
tacttaaccatctcc

SEQ ID NO: 761455 - DNA, 15 bp, Homo sapiens
acttaaccatctccc

SEQ ID NO: 761456 - DNA, 15 bp, Homo sapiens
cttaaccatctccct

SEQ ID NO: 761457 - DNA, 15 bp, Homo sapiens
ttaaccatctcccta

SEQ ID NO: 761458 - DNA, 15 bp, Homo sapiens
taaccatctccctat

SEQ ID NO: 761459 - DNA, 15 bp, Homo sapiens
aaccatctccctatt

SEQ ID NO: 761460 - DNA, 15 bp, Homo sapiens
accatctccctattg

SEQ ID NO: 761461 - DNA, 15 bp, Homo sapiens
ccatctccctattgt

SEQ ID NO: 761462 - DNA, 15 bp, Homo sapiens
catctccctattgtt

SEQ ID NO: 761463 - DNA, 15 bp, Homo sapiens
atctccctattgttg

SEQ ID NO: 761464 - DNA, 15 bp, Homo sapiens
tctccctattgttgg

SEQ ID NO: 761465 - DNA, 15 bp, Homo sapiens
ctccctattgttggt

SEQ ID NO: 761466 - DNA, 15 bp, Homo sapiens
tccctattgttggtc

SEQ ID NO: 761467 - DNA, 15 bp, Homo sapiens
ccctattgttggtcc

SEQ ID NO: 761468 - DNA, 15 bp, Homo sapiens
cctattgttggtcct

SEQ ID NO: 761469 - DNA, 15 bp, Homo sapiens
ctattgttggtcctc

SEQ ID NO: 761470 - DNA, 15 bp, Homo sapiens
tattgttggtcctct

SEQ ID NO: 761471 - DNA, 15 bp, Homo sapiens
attgttggtcctctg

SEQ ID NO: 761472 - DNA, 15 bp, Homo sapiens
ttgttggtcctctga

SEQ ID NO: 761473 - DNA, 15 bp, Homo sapiens
tgttggtcctctgag

SEQ ID NO: 761474 - DNA, 15 bp, Homo sapiens
gttggtcctctgagt

SEQ ID NO: 761475 - DNA, 15 bp, Homo sapiens
ttggtcctctgagtt

SEQ ID NO: 761476 - DNA, 15 bp, Homo sapiens
tggtcctctgagtta

SEQ ID NO: 761477 - DNA, 15 bp, Homo sapiens
ggtcctctgagttat

SEQ ID NO: 761478 - DNA, 15 bp, Homo sapiens
gtcctctgagttatt

SEQ ID NO: 761479 - DNA, 15 bp, Homo sapiens
tcctctgagttattt

SEQ ID NO: 761480 - DNA, 15 bp, Homo sapiens
cctctgagttatttt

SEQ ID NO: 761481 - DNA, 15 bp, Homo sapiens
ctctgagttattttc

SEQ ID NO: 761482 - DNA, 15 bp, Homo sapiens
tctgagttattttca

SEQ ID NO: 761483 - DNA, 15 bp, Homo sapiens
ctgagttattttcag

SEQ ID NO: 761484 - DNA, 15 bp, Homo sapiens
tgagttattttcagt

SEQ ID NO: 761485 - DNA, 15 bp, Homo sapiens
gagttattttcagtt

SEQ ID NO: 761486 - DNA, 15 bp, Homo sapiens
agttattttcagttt

SEQ ID NO: 761487 - DNA, 15 bp, Homo sapiens
gttattttcagtttt

SEQ ID NO: 761488 - DNA, 15 bp, Homo sapiens
ttattttcagttttt

SEQ ID NO: 761489 - DNA, 15 bp, Homo sapiens
tattttcagtttttc

SEQ ID NO: 761490 - DNA, 15 bp, Homo sapiens
attttcagtttttca

SEQ ID NO: 761491 - DNA, 15 bp, Homo sapiens
ttttcagtttttcag

SEQ ID NO: 761492 - DNA, 15 bp, Homo sapiens
tttcagtttttcagt

SEQ ID NO: 761493 - DNA, 15 bp, Homo sapiens
ttcagtttttcagtg

SEQ ID NO: 761494 - DNA, 15 bp, Homo sapiens
tcagtttttcagtgt

SEQ ID NO: 761495 - DNA, 15 bp, Homo sapiens
cagtttttcagtgtt

SEQ ID NO: 761496 - DNA, 15 bp, Homo sapiens
agtttttcagtgttt

SEQ ID NO: 761497 - DNA, 15 bp, Homo sapiens
gtttttcagtgtttc

SEQ ID NO: 761498 - DNA, 15 bp, Homo sapiens
tttttcagtgtttca

SEQ ID NO: 761499 - DNA, 15 bp, Homo sapiens
ttttcagtgtttcag

SEQ ID NO: 761500 - DNA, 15 bp, Homo sapiens
tttcagtgtttcagg

SEQ ID NO: 761501 - DNA, 15 bp, Homo sapiens
ttcagtgtttcaggt

SEQ ID NO: 761502 - DNA, 15 bp, Homo sapiens
tcagtgtttcaggtt

SEQ ID NO: 761503 - DNA, 15 bp, Homo sapiens
cagtgtttcaggttg

SEQ ID NO: 761504 - DNA, 15 bp, Homo sapiens
agtgtttcaggttgc

SEQ ID NO: 761505 - DNA, 15 bp, Homo sapiens
gtgtttcaggttgca

SEQ ID NO: 761506 - DNA, 15 bp, Homo sapiens
tgtttcaggttgcac

SEQ ID NO: 761507 - DNA, 15 bp, Homo sapiens
gtttcaggttgcact

SEQ ID NO: 761508 - DNA, 15 bp, Homo sapiens
tttcaggttgcactg

SEQ ID NO: 761509 - DNA, 15 bp, Homo sapiens
ttcaggttgcactgc

SEQ ID NO: 761510 - DNA, 15 bp, Homo sapiens
tcaggttgcactgca

SEQ ID NO: 761511 - DNA, 15 bp, Homo sapiens
caggttgcactgcag

SEQ ID NO: 761512 - DNA, 15 bp, Homo sapiens
aggttgcactgcagt

SEQ ID NO: 761513 - DNA, 15 bp, Homo sapiens
ggttgcactgcagtc

SEQ ID NO: 761514 - DNA, 15 bp, Homo sapiens
gttgcactgcagtca

SEQ ID NO: 761515 - DNA, 15 bp, Homo sapiens
ttgcactgcagtcaa

SEQ ID NO: 761516 - DNA, 15 bp, Homo sapiens
tgcactgcagtcaag

SEQ ID NO: 761517 - DNA, 15 bp, Homo sapiens
gcactgcagtcaaga

SEQ ID NO: 761518 - DNA, 15 bp, Homo sapiens
cactgcagtcaagaa

SEQ ID NO: 761519 - DNA, 15 bp, Homo sapiens
actgcagtcaagaac

SEQ ID NO: 761520 - DNA, 15 bp, Homo sapiens
ctgcagtcaagaact

SEQ ID NO: 761521 - DNA, 15 bp, Homo sapiens
tgcagtcaagaactg

SEQ ID NO: 761522 - DNA, 15 bp, Homo sapiens
gcagtcaagaactga

SEQ ID NO: 761523 - DNA, 15 bp, Homo sapiens
cagtcaagaactgaa

SEQ ID NO: 761524 - DNA, 15 bp, Homo sapiens
agtcaagaactgaat

SEQ ID NO: 761525 - DNA, 15 bp, Homo sapiens
gtcaagaactgaata

SEQ ID NO: 761526 - DNA, 15 bp, Homo sapiens
tcaagaactgaatat

SEQ ID NO: 761527 - DNA, 15 bp, Homo sapiens
caagaactgaatatg

SEQ ID NO: 761528 - DNA, 15 bp, Homo sapiens
aagaactgaatatgt

SEQ ID NO: 761529 - DNA, 15 bp, Homo sapiens
agaactgaatatgtc

SEQ ID NO: 761530 - DNA, 15 bp, Homo sapiens
gaactgaatatgtcc

SEQ ID NO: 761531 - DNA, 15 bp, Homo sapiens
aactgaatatgtcca

SEQ ID NO: 761532 - DNA, 15 bp, Homo sapiens
actgaatatgtccat

SEQ ID NO: 761533 - DNA, 15 bp, Homo sapiens
ctgaatatgtccatt

SEQ ID NO: 761534 - DNA, 15 bp, Homo sapiens
tgaatatgtccattt

SEQ ID NO: 761535 - DNA, 15 bp, Homo sapiens
gaatatgtccatttt

SEQ ID NO: 761536 - DNA, 15 bp, Homo sapiens
aatatgtccattttt

SEQ ID NO: 761537 - DNA, 15 bp, Homo sapiens
atatgtccattttta

SEQ ID NO: 761538 - DNA, 15 bp, Homo sapiens
tatgtccatttttat

SEQ ID NO: 761539 - DNA, 15 bp, Homo sapiens
atgtccatttttatt

SEQ ID NO: 761540 - DNA, 15 bp, Homo sapiens
tgtccatttttattt

SEQ ID NO: 761541 - DNA, 15 bp, Homo sapiens
gtccatttttattta

SEQ ID NO: 761542 - DNA, 15 bp, Homo sapiens
tccatttttatttac

SEQ ID NO: 761543 - DNA, 15 bp, Homo sapiens
ccatttttatttaca

SEQ ID NO: 761544 - DNA, 15 bp, Homo sapiens
catttttatttacat

SEQ ID NO: 761545 - DNA, 15 bp, Homo sapiens
atttttatttacatc

SEQ ID NO: 761546 - DNA, 15 bp, Homo sapiens
tttttatttacatca

SEQ ID NO: 761547 - DNA, 15 bp, Homo sapiens
ttttatttacatcac

SEQ ID NO: 761548 - DNA, 15 bp, Homo sapiens
tttatttacatcaca

SEQ ID NO: 761549 - DNA, 15 bp, Homo sapiens
ttatttacatcacag

SEQ ID NO: 761550 - DNA, 15 bp, Homo sapiens
tatttacatcacaga

SEQ ID NO: 761551 - DNA, 15 bp, Homo sapiens
atttacatcacagac

SEQ ID NO: 761552 - DNA, 15 bp, Homo sapiens
tttacatcacagact

SEQ ID NO: 761553 - DNA, 15 bp, Homo sapiens
ttacatcacagactt

SEQ ID NO: 761554 - DNA, 15 bp, Homo sapiens
tacatcacagacttg

SEQ ID NO: 761555 - DNA, 15 bp, Homo sapiens
acatcacagacttgt

SEQ ID NO: 761556 - DNA, 15 bp, Homo sapiens
catcacagacttgtt

SEQ ID NO: 761557 - DNA, 15 bp, Homo sapiens
atcacagacttgttt

SEQ ID NO: 761558 - DNA, 15 bp, Homo sapiens
tcacagacttgtttc

SEQ ID NO: 761559 - DNA, 15 bp, Homo sapiens
cacagacttgtttct

SEQ ID NO: 761560 - DNA, 15 bp, Homo sapiens
acagacttgtttctt

SEQ ID NO: 761561 - DNA, 15 bp, Homo sapiens
cagacttgtttcttt

SEQ ID NO: 761562 - DNA, 15 bp, Homo sapiens
agacttgtttcttta

SEQ ID NO: 761563 - DNA, 15 bp, Homo sapiens
gacttgtttctttag

SEQ ID NO: 761564 - DNA, 15 bp, Homo sapiens
acttgtttctttagg

SEQ ID NO: 761565 - DNA, 15 bp, Homo sapiens
cttgtttctttagga

SEQ ID NO: 761566 - DNA, 15 bp, Homo sapiens
ttgtttctttaggac

SEQ ID NO: 761567 - DNA, 15 bp, Homo sapiens
tgtttctttaggaca

SEQ ID NO: 761568 - DNA, 15 bp, Homo sapiens
gtttctttaggacag

SEQ ID NO: 761569 - DNA, 15 bp, Homo sapiens
tttctttaggacaga

SEQ ID NO: 761570 - DNA, 15 bp, Homo sapiens
ttctttaggacagat

SEQ ID NO: 761571 - DNA, 15 bp, Homo sapiens
tctttaggacagatt

SEQ ID NO: 761572 - DNA, 15 bp, Homo sapiens
ctttaggacagattc

SEQ ID NO: 761573 - DNA, 15 bp, Homo sapiens
tttaggacagattcc

SEQ ID NO: 761574 - DNA, 15 bp, Homo sapiens
ttaggacagattcct

SEQ ID NO: 761575 - DNA, 15 bp, Homo sapiens
taggacagattccta

SEQ ID NO: 761576 - DNA, 15 bp, Homo sapiens
aggacagattcctag

SEQ ID NO: 761577 - DNA, 15 bp, Homo sapiens
ggacagattcctaga

SEQ ID NO: 761578 - DNA, 15 bp, Homo sapiens
gacagattcctagaa

SEQ ID NO: 761579 - DNA, 15 bp, Homo sapiens
acagattcctagaag

SEQ ID NO: 761580 - DNA, 15 bp, Homo sapiens
cagattcctagaagc

SEQ ID NO: 761581 - DNA, 15 bp, Homo sapiens
agattcctagaagca

SEQ ID NO: 761582 - DNA, 15 bp, Homo sapiens
gattcctagaagcag

SEQ ID NO: 761583 - DNA, 15 bp, Homo sapiens
attcctagaagcaga

SEQ ID NO: 761584 - DNA, 15 bp, Homo sapiens
ttcctagaagcagaa

SEQ ID NO: 761585 - DNA, 15 bp, Homo sapiens
tcctagaagcagaat

SEQ ID NO: 761586 - DNA, 15 bp, Homo sapiens
cctagaagcagaatt

SEQ ID NO: 761587 - DNA, 15 bp, Homo sapiens
ctagaagcagaattg

SEQ ID NO: 761588 - DNA, 15 bp, Homo sapiens
tagaagcagaattgc

SEQ ID NO: 761589 - DNA, 15 bp, Homo sapiens
agaagcagaattgct

SEQ ID NO: 761590 - DNA, 15 bp, Homo sapiens
gaagcagaattgctg

SEQ ID NO: 761591 - DNA, 15 bp, Homo sapiens
aagcagaattgctgg

SEQ ID NO: 761592 - DNA, 15 bp, Homo sapiens
agcagaattgctggg

SEQ ID NO: 761593 - DNA, 15 bp, Homo sapiens
gcagaattgctgggc

SEQ ID NO: 761594 - DNA, 15 bp, Homo sapiens
cagaattgctgggcc

SEQ ID NO: 761595 - DNA, 15 bp, Homo sapiens
agaattgctgggcca

SEQ ID NO: 761596 - DNA, 15 bp, Homo sapiens
gaattgctgggccaa

SEQ ID NO: 761597 - DNA, 15 bp, Homo sapiens
aattgctgggccaaa

SEQ ID NO: 761598 - DNA, 15 bp, Homo sapiens
attgctgggccaaag

SEQ ID NO: 761599 - DNA, 15 bp, Homo sapiens
ttgctgggccaaagg

SEQ ID NO: 761600 - DNA, 15 bp, Homo sapiens
tgctgggccaaagga

SEQ ID NO: 761601 - DNA, 15 bp, Homo sapiens
gctgggccaaaggat

SEQ ID NO: 761602 - DNA, 15 bp, Homo sapiens
ctgggccaaaggatg

SEQ ID NO: 761603 - DNA, 15 bp, Homo sapiens
tgggccaaaggatgc

SEQ ID NO: 761604 - DNA, 15 bp, Homo sapiens
gggccaaaggatgca

SEQ ID NO: 761605 - DNA, 15 bp, Homo sapiens
ggccaaaggatgcac

SEQ ID NO: 761606 - DNA, 15 bp, Homo sapiens
gccaaaggatgcaca

SEQ ID NO: 761607 - DNA, 15 bp, Homo sapiens
ccaaaggatgcacat

SEQ ID NO: 761608 - DNA, 15 bp, Homo sapiens
caaaggatgcacatg

SEQ ID NO: 761609 - DNA, 15 bp, Homo sapiens
aaaggatgcacatgt

SEQ ID NO: 761610 - DNA, 15 bp, Homo sapiens
aaggatgcacatgtt

SEQ ID NO: 761611 - DNA, 15 bp, Homo sapiens
aggatgcacatgttt

SEQ ID NO: 761612 - DNA, 15 bp, Homo sapiens
ggatgcacatgtttt

SEQ ID NO: 761613 - DNA, 15 bp, Homo sapiens
gatgcacatgttttt

SEQ ID NO: 761614 - DNA, 15 bp, Homo sapiens
atgcacatgtttttt

SEQ ID NO: 761615 - DNA, 15 bp, Homo sapiens
tgcacatgtttttta

SEQ ID NO: 761616 - DNA, 15 bp, Homo sapiens
gcacatgttttttaa

SEQ ID NO: 761617 - DNA, 15 bp, Homo sapiens
cacatgttttttaag

SEQ ID NO: 761618 - DNA, 15 bp, Homo sapiens
acatgttttttaaga

SEQ ID NO: 761619 - DNA, 15 bp, Homo sapiens
catgttttttaagat

SEQ ID NO: 761620 - DNA, 15 bp, Homo sapiens
atgttttttaagatt

SEQ ID NO: 761621 - DNA, 15 bp, Homo sapiens
tgttttttaagattc

SEQ ID NO: 761622 - DNA, 15 bp, Homo sapiens
gttttttaagattct

SEQ ID NO: 761623 - DNA, 15 bp, Homo sapiens
ttttttaagattctc

SEQ ID NO: 761624 - DNA, 15 bp, Homo sapiens
tttttaagattctct

SEQ ID NO: 761625 - DNA, 15 bp, Homo sapiens
ttttaagattctcta

SEQ ID NO: 761626 - DNA, 15 bp, Homo sapiens
tttaagattctctat

SEQ ID NO: 761627 - DNA, 15 bp, Homo sapiens
ttaagattctctata

SEQ ID NO: 761628 - DNA, 15 bp, Homo sapiens
taagattctctatac

SEQ ID NO: 761629 - DNA, 15 bp, Homo sapiens
aagattctctataca

SEQ ID NO: 761630 - DNA, 15 bp, Homo sapiens
agattctctatacat

SEQ ID NO: 761631 - DNA, 15 bp, Homo sapiens
gattctctatacatt

SEQ ID NO: 761632 - DNA, 15 bp, Homo sapiens
attctctatacattg

SEQ ID NO: 761633 - DNA, 15 bp, Homo sapiens
ttctctatacattgc

SEQ ID NO: 761634 - DNA, 15 bp, Homo sapiens
tctctatacattgcc

SEQ ID NO: 761635 - DNA, 15 bp, Homo sapiens
ctctatacattgcca

SEQ ID NO: 761636 - DNA, 15 bp, Homo sapiens
tctatacattgccaa

SEQ ID NO: 761637 - DNA, 15 bp, Homo sapiens
ctatacattgccaag

SEQ ID NO: 761638 - DNA, 15 bp, Homo sapiens
tatacattgccaagt

SEQ ID NO: 761639 - DNA, 15 bp, Homo sapiens
atacattgccaagtt

SEQ ID NO: 761640 - DNA, 15 bp, Homo sapiens
tacattgccaagttg

SEQ ID NO: 761641 - DNA, 15 bp, Homo sapiens
acattgccaagttgc

SEQ ID NO: 761642 - DNA, 15 bp, Homo sapiens
cattgccaagttgct

SEQ ID NO: 761643 - DNA, 15 bp, Homo sapiens
attgccaagttgctt

SEQ ID NO: 761644 - DNA, 15 bp, Homo sapiens
ttgccaagttgcttt

SEQ ID NO: 761645 - DNA, 15 bp, Homo sapiens
tgccaagttgctttc

SEQ ID NO: 761646 - DNA, 15 bp, Homo sapiens
gccaagttgctttcc

SEQ ID NO: 761647 - DNA, 15 bp, Homo sapiens
ccaagttgctttcca

SEQ ID NO: 761648 - DNA, 15 bp, Homo sapiens
caagttgctttccag

SEQ ID NO: 761649 - DNA, 15 bp, Homo sapiens
aagttgctttccaga

SEQ ID NO: 761650 - DNA, 15 bp, Homo sapiens
agttgctttccagaa

SEQ ID NO: 761651 - DNA, 15 bp, Homo sapiens
gttgctttccagaaa

SEQ ID NO: 761652 - DNA, 15 bp, Homo sapiens
ttgctttccagaaag

SEQ ID NO: 761653 - DNA, 15 bp, Homo sapiens
tgctttccagaaagg

SEQ ID NO: 761654 - DNA, 15 bp, Homo sapiens
gctttccagaaaggt

SEQ ID NO: 761655 - DNA, 15 bp, Homo sapiens
ctttccagaaaggtc

SEQ ID NO: 761656 - DNA, 15 bp, Homo sapiens
tttccagaaaggtca

SEQ ID NO: 761657 - DNA, 15 bp, Homo sapiens
ttccagaaaggtcat

SEQ ID NO: 761658 - DNA, 15 bp, Homo sapiens
tccagaaaggtcatg

SEQ ID NO: 761659 - DNA, 15 bp, Homo sapiens
ccagaaaggtcatgc

SEQ ID NO: 761660 - DNA, 15 bp, Homo sapiens
cagaaaggtcatgca

SEQ ID NO: 761661 - DNA, 15 bp, Homo sapiens
agaaaggtcatgcag

SEQ ID NO: 761662 - DNA, 15 bp, Homo sapiens
gaaaggtcatgcagc

SEQ ID NO: 761663 - DNA, 15 bp, Homo sapiens
aaaggtcatgcagct

SEQ ID NO: 761664 - DNA, 15 bp, Homo sapiens
aaggtcatgcagctt

SEQ ID NO: 761665 - DNA, 15 bp, Homo sapiens
aggtcatgcagcttt

SEQ ID NO: 761666 - DNA, 15 bp, Homo sapiens
ggtcatgcagctttc

SEQ ID NO: 761667 - DNA, 15 bp, Homo sapiens
gtcatgcagctttca

SEQ ID NO: 761668 - DNA, 15 bp, Homo sapiens
tcatgcagctttcat

SEQ ID NO: 761669 - DNA, 15 bp, Homo sapiens
catgcagctttcatg

SEQ ID NO: 761670 - DNA, 15 bp, Homo sapiens
atgcagctttcatga

SEQ ID NO: 761671 - DNA, 15 bp, Homo sapiens
tgcagctttcatgaa

SEQ ID NO: 761672 - DNA, 15 bp, Homo sapiens
gcagctttcatgaaa

SEQ ID NO: 761673 - DNA, 15 bp, Homo sapiens
cagctttcatgaaat

SEQ ID NO: 761674 - DNA, 15 bp, Homo sapiens
agctttcatgaaatc

SEQ ID NO: 761675 - DNA, 15 bp, Homo sapiens
gctttcatgaaatct

SEQ ID NO: 761676 - DNA, 15 bp, Homo sapiens
ctttcatgaaatctc

SEQ ID NO: 761677 - DNA, 15 bp, Homo sapiens
tttcatgaaatctca

SEQ ID NO: 761678 - DNA, 15 bp, Homo sapiens
ttcatgaaatctcac

SEQ ID NO: 761679 - DNA, 15 bp, Homo sapiens
tcatgaaatctcacc

SEQ ID NO: 761680 - DNA, 15 bp, Homo sapiens
catgaaatctcacca

SEQ ID NO: 761681 - DNA, 15 bp, Homo sapiens
atgaaatctcaccaa

SEQ ID NO: 761682 - DNA, 15 bp, Homo sapiens
tgaaatctcaccaaa

SEQ ID NO: 761683 - DNA, 15 bp, Homo sapiens
gaaatctcaccaaaa

SEQ ID NO: 761684 - DNA, 15 bp, Homo sapiens
aaatctcaccaaaag

SEQ ID NO: 761685 - DNA, 15 bp, Homo sapiens
aatctcaccaaaagt

SEQ ID NO: 761686 - DNA, 15 bp, Homo sapiens
atctcaccaaaagtg

SEQ ID NO: 761687 - DNA, 15 bp, Homo sapiens
tctcaccaaaagtgt

SEQ ID NO: 761688 - DNA, 15 bp, Homo sapiens
ctcaccaaaagtgtg

SEQ ID NO: 761689 - DNA, 15 bp, Homo sapiens
tcaccaaaagtgtgt

SEQ ID NO: 761690 - DNA, 15 bp, Homo sapiens
caccaaaagtgtgtg

SEQ ID NO: 761691 - DNA, 15 bp, Homo sapiens
accaaaagtgtgtga

SEQ ID NO: 761692 - DNA, 15 bp, Homo sapiens
ccaaaagtgtgtgag

SEQ ID NO: 761693 - DNA, 15 bp, Homo sapiens
caaaagtgtgtgaga

SEQ ID NO: 761694 - DNA, 15 bp, Homo sapiens
aaaagtgtgtgagaa

SEQ ID NO: 761695 - DNA, 15 bp, Homo sapiens
aaagtgtgtgagaaa

SEQ ID NO: 761696 - DNA, 15 bp, Homo sapiens
aagtgtgtgagaaag

SEQ ID NO: 761697 - DNA, 15 bp, Homo sapiens
agtgtgtgagaaagt

SEQ ID NO: 761698 - DNA, 15 bp, Homo sapiens
gtgtgtgagaaagtg

SEQ ID NO: 761699 - DNA, 15 bp, Homo sapiens
tgtgtgagaaagtgg

SEQ ID NO: 761700 - DNA, 15 bp, Homo sapiens
gtgtgagaaagtggc

SEQ ID NO: 761701 - DNA, 15 bp, Homo sapiens
tgtgagaaagtggct

SEQ ID NO: 761702 - DNA, 15 bp, Homo sapiens
gtgagaaagtggctt

SEQ ID NO: 761703 - DNA, 15 bp, Homo sapiens
tgagaaagtggcttt

SEQ ID NO: 761704 - DNA, 15 bp, Homo sapiens
gagaaagtggctttt

SEQ ID NO: 761705 - DNA, 15 bp, Homo sapiens
agaaagtggcttttc

SEQ ID NO: 761706 - DNA, 15 bp, Homo sapiens
gaaagtggcttttct

SEQ ID NO: 761707 - DNA, 15 bp, Homo sapiens
aaagtggcttttctg

SEQ ID NO: 761708 - DNA, 15 bp, Homo sapiens
aagtggcttttctgt

SEQ ID NO: 761709 - DNA, 15 bp, Homo sapiens
agtggcttttctgtt

SEQ ID NO: 761710 - DNA, 15 bp, Homo sapiens
gtggcttttctgtta

SEQ ID NO: 761711 - DNA, 15 bp, Homo sapiens
tggcttttctgttag

SEQ ID NO: 761712 - DNA, 15 bp, Homo sapiens
ggcttttctgttagc

SEQ ID NO: 761713 - DNA, 15 bp, Homo sapiens
gcttttctgttagct

SEQ ID NO: 761714 - DNA, 15 bp, Homo sapiens
cttttctgttagctt

SEQ ID NO: 761715 - DNA, 15 bp, Homo sapiens
ttttctgttagcttt

SEQ ID NO: 761716 - DNA, 15 bp, Homo sapiens
tttctgttagctttc

SEQ ID NO: 761717 - DNA, 15 bp, Homo sapiens
ttctgttagctttcc

SEQ ID NO: 761718 - DNA, 15 bp, Homo sapiens
tctgttagctttcct

SEQ ID NO: 761719 - DNA, 15 bp, Homo sapiens
ctgttagctttcctt

SEQ ID NO: 761720 - DNA, 15 bp, Homo sapiens
tgttagctttccttc

SEQ ID NO: 761721 - DNA, 15 bp, Homo sapiens
gttagctttccttcc

SEQ ID NO: 761722 - DNA, 15 bp, Homo sapiens
ttagctttccttccc

SEQ ID NO: 761723 - DNA, 15 bp, Homo sapiens
tagctttccttccct

SEQ ID NO: 761724 - DNA, 15 bp, Homo sapiens
agctttccttccctt

SEQ ID NO: 761725 - DNA, 15 bp, Homo sapiens
gctttccttcccttt

SEQ ID NO: 761726 - DNA, 15 bp, Homo sapiens
ctttccttccctttt

SEQ ID NO: 761727 - DNA, 15 bp, Homo sapiens
tttccttcccttttc

SEQ ID NO: 761728 - DNA, 15 bp, Homo sapiens
ttccttcccttttca

SEQ ID NO: 761729 - DNA, 15 bp, Homo sapiens
tccttcccttttcaa

SEQ ID NO: 761730 - DNA, 15 bp, Homo sapiens
ccttcccttttcaag

SEQ ID NO: 761731 - DNA, 15 bp, Homo sapiens
cttcccttttcaaga

SEQ ID NO: 761732 - DNA, 15 bp, Homo sapiens
ttcccttttcaagag

SEQ ID NO: 761733 - DNA, 15 bp, Homo sapiens
tcccttttcaagagg

SEQ ID NO: 761734 - DNA, 15 bp, Homo sapiens
cccttttcaagaggg

SEQ ID NO: 761735 - DNA, 15 bp, Homo sapiens
ccttttcaagaggga

SEQ ID NO: 761736 - DNA, 15 bp, Homo sapiens
cttttcaagagggag

SEQ ID NO: 761737 - DNA, 15 bp, Homo sapiens
ttttcaagagggagc

SEQ ID NO: 761738 - DNA, 15 bp, Homo sapiens
tttcaagagggagct

SEQ ID NO: 761739 - DNA, 15 bp, Homo sapiens
ttcaagagggagctc

SEQ ID NO: 761740 - DNA, 15 bp, Homo sapiens
tcaagagggagctca

SEQ ID NO: 761741 - DNA, 15 bp, Homo sapiens
caagagggagctcag

SEQ ID NO: 761742 - DNA, 15 bp, Homo sapiens
aagagggagctcagg

SEQ ID NO: 761743 - DNA, 15 bp, Homo sapiens
agagggagctcaggg

SEQ ID NO: 761744 - DNA, 15 bp, Homo sapiens
gagggagctcagggg

SEQ ID NO: 761745 - DNA, 15 bp, Homo sapiens
agggagctcagggga

SEQ ID NO: 761746 - DNA, 15 bp, Homo sapiens
gggagctcaggggat

SEQ ID NO: 761747 - DNA, 15 bp, Homo sapiens
ggagctcaggggatg

SEQ ID NO: 761748 - DNA, 15 bp, Homo sapiens
gagctcaggggatgc

SEQ ID NO: 761749 - DNA, 15 bp, Homo sapiens
agctcaggggatgca

SEQ ID NO: 761750 - DNA, 15 bp, Homo sapiens
gctcaggggatgcag

SEQ ID NO: 761751 - DNA, 15 bp, Homo sapiens
ctcaggggatgcaga

SEQ ID NO: 761752 - DNA, 15 bp, Homo sapiens
tcaggggatgcagag

SEQ ID NO: 761753 - DNA, 15 bp, Homo sapiens
caggggatgcagaga

SEQ ID NO: 761754 - DNA, 15 bp, Homo sapiens
aggggatgcagagaa

SEQ ID NO: 761755 - DNA, 15 bp, Homo sapiens
ggggatgcagagaaa

SEQ ID NO: 761756 - DNA, 15 bp, Homo sapiens
gggatgcagagaaaa

SEQ ID NO: 761757 - DNA, 15 bp, Homo sapiens
ggatgcagagaaaaa

SEQ ID NO: 761758 - DNA, 15 bp, Homo sapiens
gatgcagagaaaaac

SEQ ID NO: 761759 - DNA, 15 bp, Homo sapiens
atgcagagaaaaaca

SEQ ID NO: 761760 - DNA, 15 bp, Homo sapiens
tgcagagaaaaacag

SEQ ID NO: 761761 - DNA, 15 bp, Homo sapiens
gcagagaaaaacagg

SEQ ID NO: 761762 - DNA, 15 bp, Homo sapiens
cagagaaaaacagga

SEQ ID NO: 761763 - DNA, 15 bp, Homo sapiens
agagaaaaacaggaa

SEQ ID NO: 761764 - DNA, 15 bp, Homo sapiens
gagaaaaacaggaag

SEQ ID NO: 761765 - DNA, 15 bp, Homo sapiens
agaaaaacaggaagg

SEQ ID NO: 761766 - DNA, 15 bp, Homo sapiens
gaaaaacaggaaggc

SEQ ID NO: 761767 - DNA, 15 bp, Homo sapiens
aaaaacaggaaggca

SEQ ID NO: 761768 - DNA, 15 bp, Homo sapiens
aaaacaggaaggcag

SEQ ID NO: 761769 - DNA, 15 bp, Homo sapiens
aaacaggaaggcagt

SEQ ID NO: 761770 - DNA, 15 bp, Homo sapiens
aacaggaaggcagtc

SEQ ID NO: 761771 - DNA, 15 bp, Homo sapiens
acaggaaggcagtct

SEQ ID NO: 761772 - DNA, 15 bp, Homo sapiens
caggaaggcagtctg

SEQ ID NO: 761773 - DNA, 15 bp, Homo sapiens
aggaaggcagtctgg

SEQ ID NO: 761774 - DNA, 15 bp, Homo sapiens
ggaaggcagtctggt

SEQ ID NO: 761775 - DNA, 15 bp, Homo sapiens
gaaggcagtctggtc

SEQ ID NO: 761776 - DNA, 15 bp, Homo sapiens
aaggcagtctggtcc

SEQ ID NO: 761777 - DNA, 15 bp, Homo sapiens
aggcagtctggtccc

SEQ ID NO: 761778 - DNA, 15 bp, Homo sapiens
ggcagtctggtccct

SEQ ID NO: 761779 - DNA, 15 bp, Homo sapiens
gcagtctggtccctt

SEQ ID NO: 761780 - DNA, 15 bp, Homo sapiens
cagtctggtcccttc

SEQ ID NO: 761781 - DNA, 15 bp, Homo sapiens
agtctggtcccttca

SEQ ID NO: 761782 - DNA, 15 bp, Homo sapiens
gtctggtcccttcag

SEQ ID NO: 761783 - DNA, 15 bp, Homo sapiens
tctggtcccttcaga

SEQ ID NO: 761784 - DNA, 15 bp, Homo sapiens
ctggtcccttcagat

SEQ ID NO: 761785 - DNA, 15 bp, Homo sapiens
tggtcccttcagatc

SEQ ID NO: 761786 - DNA, 15 bp, Homo sapiens
ggtcccttcagatct

SEQ ID NO: 761787 - DNA, 15 bp, Homo sapiens
gtcccttcagatctt

SEQ ID NO: 761788 - DNA, 15 bp, Homo sapiens
tcccttcagatcttg

SEQ ID NO: 761789 - DNA, 15 bp, Homo sapiens
cccttcagatcttgg

SEQ ID NO: 761790 - DNA, 15 bp, Homo sapiens
ccttcagatcttgga

SEQ ID NO: 761791 - DNA, 15 bp, Homo sapiens
cttcagatcttggag

SEQ ID NO: 761792 - DNA, 15 bp, Homo sapiens
ttcagatcttggagc

SEQ ID NO: 761793 - DNA, 15 bp, Homo sapiens
tcagatcttggagct

SEQ ID NO: 761794 - DNA, 15 bp, Homo sapiens
cagatcttggagctg

SEQ ID NO: 761795 - DNA, 15 bp, Homo sapiens
agatcttggagctgg

SEQ ID NO: 761796 - DNA, 15 bp, Homo sapiens
gatcttggagctggg

SEQ ID NO: 761797 - DNA, 15 bp, Homo sapiens
atcttggagctgggt

SEQ ID NO: 761798 - DNA, 15 bp, Homo sapiens
tcttggagctgggtc

SEQ ID NO: 761799 - DNA, 15 bp, Homo sapiens
cttggagctgggtca

SEQ ID NO: 761800 - DNA, 15 bp, Homo sapiens
ttggagctgggtcat

SEQ ID NO: 761801 - DNA, 15 bp, Homo sapiens
tggagctgggtcata

SEQ ID NO: 761802 - DNA, 15 bp, Homo sapiens
ggagctgggtcatag

SEQ ID NO: 761803 - DNA, 15 bp, Homo sapiens
gagctgggtcatagc

SEQ ID NO: 761804 - DNA, 15 bp, Homo sapiens
agctgggtcatagct

SEQ ID NO: 761805 - DNA, 15 bp, Homo sapiens
gctgggtcatagctt

SEQ ID NO: 761806 - DNA, 15 bp, Homo sapiens
ctgggtcatagcttg

SEQ ID NO: 761807 - DNA, 15 bp, Homo sapiens
tgggtcatagcttgg

SEQ ID NO: 761808 - DNA, 15 bp, Homo sapiens
gggtcatagcttggg

SEQ ID NO: 761809 - DNA, 15 bp, Homo sapiens
ggtcatagcttgggc

SEQ ID NO: 761810 - DNA, 15 bp, Homo sapiens
gtcatagcttgggca

SEQ ID NO: 761811 - DNA, 15 bp, Homo sapiens
tcatagcttgggcat

SEQ ID NO: 761812 - DNA, 15 bp, Homo sapiens
catagcttgggcatg

SEQ ID NO: 761813 - DNA, 15 bp, Homo sapiens
atagcttgggcatgt

SEQ ID NO: 761814 - DNA, 15 bp, Homo sapiens
tagcttgggcatgtt

SEQ ID NO: 761815 - DNA, 15 bp, Homo sapiens
agcttgggcatgttg

SEQ ID NO: 761816 - DNA, 15 bp, Homo sapiens
gcttgggcatgttgt

SEQ ID NO: 761817 - DNA, 15 bp, Homo sapiens
cttgggcatgttgtc

SEQ ID NO: 761818 - DNA, 15 bp, Homo sapiens
ttgggcatgttgtct

SEQ ID NO: 761819 - DNA, 15 bp, Homo sapiens
tgggcatgttgtctc

SEQ ID NO: 761820 - DNA, 15 bp, Homo sapiens
gggcatgttgtctct

SEQ ID NO: 761821 - DNA, 15 bp, Homo sapiens
ggcatgttgtctctt

SEQ ID NO: 761822 - DNA, 15 bp, Homo sapiens
gcatgttgtctcttg

SEQ ID NO: 761823 - DNA, 15 bp, Homo sapiens
catgttgtctcttgg

SEQ ID NO: 761824 - DNA, 15 bp, Homo sapiens
atgttgtctcttggg

SEQ ID NO: 761825 - DNA, 15 bp, Homo sapiens
tgttgtctcttgggc

SEQ ID NO: 761826 - DNA, 15 bp, Homo sapiens
gttgtctcttgggca

SEQ ID NO: 761827 - DNA, 15 bp, Homo sapiens
ttgtctcttgggcag

SEQ ID NO: 761828 - DNA, 15 bp, Homo sapiens
tgtctcttgggcagt

SEQ ID NO: 761829 - DNA, 15 bp, Homo sapiens
gtctcttgggcagtg

SEQ ID NO: 761830 - DNA, 15 bp, Homo sapiens
tctcttgggcagtga

SEQ ID NO: 761831 - DNA, 15 bp, Homo sapiens
ctcttgggcagtgaa

SEQ ID NO: 761832 - DNA, 15 bp, Homo sapiens
tcttgggcagtgaat

SEQ ID NO: 761833 - DNA, 15 bp, Homo sapiens
cttgggcagtgaatg

SEQ ID NO: 761834 - DNA, 15 bp, Homo sapiens
ttgggcagtgaatgg

SEQ ID NO: 761835 - DNA, 15 bp, Homo sapiens
tgggcagtgaatggg

SEQ ID NO: 761836 - DNA, 15 bp, Homo sapiens
gggcagtgaatgggc

SEQ ID NO: 761837 - DNA, 15 bp, Homo sapiens
ggcagtgaatgggca

SEQ ID NO: 761838 - DNA, 15 bp, Homo sapiens
gcagtgaatgggcac

SEQ ID NO: 761839 - DNA, 15 bp, Homo sapiens
cagtgaatgggcacc

SEQ ID NO: 761840 - DNA, 15 bp, Homo sapiens
agtgaatgggcacct

SEQ ID NO: 761841 - DNA, 15 bp, Homo sapiens
gtgaatgggcacctc

SEQ ID NO: 761842 - DNA, 15 bp, Homo sapiens
tgaatgggcacctcg

SEQ ID NO: 761843 - DNA, 15 bp, Homo sapiens
gaatgggcacctcgt

SEQ ID NO: 761844 - DNA, 15 bp, Homo sapiens
aatgggcacctcgtt

SEQ ID NO: 761845 - DNA, 15 bp, Homo sapiens
atgggcacctcgtta

SEQ ID NO: 761846 - DNA, 15 bp, Homo sapiens
tgggcacctcgttag

SEQ ID NO: 761847 - DNA, 15 bp, Homo sapiens
gggcacctcgttaga

SEQ ID NO: 761848 - DNA, 15 bp, Homo sapiens
ggcacctcgttagag

SEQ ID NO: 761849 - DNA, 15 bp, Homo sapiens
gcacctcgttagagc

SEQ ID NO: 761850 - DNA, 15 bp, Homo sapiens
cacctcgttagagca

SEQ ID NO: 761851 - DNA, 15 bp, Homo sapiens
acctcgttagagcac

SEQ ID NO: 761852 - DNA, 15 bp, Homo sapiens
cctcgttagagcact

SEQ ID NO: 761853 - DNA, 15 bp, Homo sapiens
ctcgttagagcactg

SEQ ID NO: 761854 - DNA, 15 bp, Homo sapiens
tcgttagagcactgg

SEQ ID NO: 761855 - DNA, 15 bp, Homo sapiens
cgttagagcactggg

SEQ ID NO: 761856 - DNA, 15 bp, Homo sapiens
gttagagcactggga

SEQ ID NO: 761857 - DNA, 15 bp, Homo sapiens
ttagagcactgggac

SEQ ID NO: 761858 - DNA, 15 bp, Homo sapiens
tagagcactgggaca

SEQ ID NO: 761859 - DNA, 15 bp, Homo sapiens
agagcactgggacag

SEQ ID NO: 761860 - DNA, 15 bp, Homo sapiens
gagcactgggacagg

SEQ ID NO: 761861 - DNA, 15 bp, Homo sapiens
agcactgggacaggg

SEQ ID NO: 761862 - DNA, 15 bp, Homo sapiens
gcactgggacagggc

SEQ ID NO: 761863 - DNA, 15 bp, Homo sapiens
cactgggacagggct

SEQ ID NO: 761864 - DNA, 15 bp, Homo sapiens
actgggacagggctg

SEQ ID NO: 761865 - DNA, 15 bp, Homo sapiens
ctgggacagggctga

SEQ ID NO: 761866 - DNA, 15 bp, Homo sapiens
tgggacagggctgat

SEQ ID NO: 761867 - DNA, 15 bp, Homo sapiens
gggacagggctgatt

SEQ ID NO: 761868 - DNA, 15 bp, Homo sapiens
ggacagggctgattg

SEQ ID NO: 761869 - DNA, 15 bp, Homo sapiens
gacagggctgattgg

SEQ ID NO: 761870 - DNA, 15 bp, Homo sapiens
acagggctgattggc

SEQ ID NO: 761871 - DNA, 15 bp, Homo sapiens
cagggctgattggca

SEQ ID NO: 761872 - DNA, 15 bp, Homo sapiens
agggctgattggcac

SEQ ID NO: 761873 - DNA, 15 bp, Homo sapiens
gggctgattggcact

SEQ ID NO: 761874 - DNA, 15 bp, Homo sapiens
ggctgattggcactc

SEQ ID NO: 761875 - DNA, 15 bp, Homo sapiens
gctgattggcactct

SEQ ID NO: 761876 - DNA, 15 bp, Homo sapiens
ctgattggcactctg

SEQ ID NO: 761877 - DNA, 15 bp, Homo sapiens
tgattggcactctgg

SEQ ID NO: 761878 - DNA, 15 bp, Homo sapiens
gattggcactctggc

SEQ ID NO: 761879 - DNA, 15 bp, Homo sapiens
attggcactctggcc

SEQ ID NO: 761880 - DNA, 15 bp, Homo sapiens
ttggcactctggcca

SEQ ID NO: 761881 - DNA, 15 bp, Homo sapiens
tggcactctggccac

SEQ ID NO: 761882 - DNA, 15 bp, Homo sapiens
ggcactctggccacc

SEQ ID NO: 761883 - DNA, 15 bp, Homo sapiens
gcactctggccaccc

SEQ ID NO: 761884 - DNA, 15 bp, Homo sapiens
cactctggccaccca

SEQ ID NO: 761885 - DNA, 15 bp, Homo sapiens
actctggccacccag

SEQ ID NO: 761886 - DNA, 15 bp, Homo sapiens
ctctggccacccagg

SEQ ID NO: 761887 - DNA, 15 bp, Homo sapiens
tctggccacccagga

SEQ ID NO: 761888 - DNA, 15 bp, Homo sapiens
ctggccacccaggag

SEQ ID NO: 761889 - DNA, 15 bp, Homo sapiens
tggccacccaggagc

SEQ ID NO: 761890 - DNA, 15 bp, Homo sapiens
ggccacccaggagcg

SEQ ID NO: 761891 - DNA, 15 bp, Homo sapiens
gccacccaggagcgt

SEQ ID NO: 761892 - DNA, 15 bp, Homo sapiens
ccacccaggagcgtg

SEQ ID NO: 761893 - DNA, 15 bp, Homo sapiens
cacccaggagcgtgg

SEQ ID NO: 761894 - DNA, 15 bp, Homo sapiens
acccaggagcgtgga

SEQ ID NO: 761895 - DNA, 15 bp, Homo sapiens
cccaggagcgtggag

SEQ ID NO: 761896 - DNA, 15 bp, Homo sapiens
ccaggagcgtggagc

SEQ ID NO: 761897 - DNA, 15 bp, Homo sapiens
caggagcgtggagcc

SEQ ID NO: 761898 - DNA, 15 bp, Homo sapiens
aggagcgtggagcct

SEQ ID NO: 761899 - DNA, 15 bp, Homo sapiens
ggagcgtggagcctg

SEQ ID NO: 761900 - DNA, 15 bp, Homo sapiens
gagcgtggagcctgc

SEQ ID NO: 761901 - DNA, 15 bp, Homo sapiens
agcgtggagcctgcc

SEQ ID NO: 761902 - DNA, 15 bp, Homo sapiens
gcgtggagcctgcct

SEQ ID NO: 761903 - DNA, 15 bp, Homo sapiens
cgtggagcctgcctg

SEQ ID NO: 761904 - DNA, 15 bp, Homo sapiens
gtggagcctgcctgc

SEQ ID NO: 761905 - DNA, 15 bp, Homo sapiens
tggagcctgcctgca

SEQ ID NO: 761906 - DNA, 15 bp, Homo sapiens
ggagcctgcctgcag

SEQ ID NO: 761907 - DNA, 15 bp, Homo sapiens
gagcctgcctgcagg

SEQ ID NO: 761908 - DNA, 15 bp, Homo sapiens
agcctgcctgcagga

SEQ ID NO: 761909 - DNA, 15 bp, Homo sapiens
gcctgcctgcaggaa

SEQ ID NO: 761910 - DNA, 15 bp, Homo sapiens
cctgcctgcaggaaa

SEQ ID NO: 761911 - DNA, 15 bp, Homo sapiens
ctgcctgcaggaaag

SEQ ID NO: 761912 - DNA, 15 bp, Homo sapiens
tgcctgcaggaaaga

SEQ ID NO: 761913 - DNA, 15 bp, Homo sapiens
gcctgcaggaaagaa

SEQ ID NO: 761914 - DNA, 15 bp, Homo sapiens
cctgcaggaaagaac

SEQ ID NO: 761915 - DNA, 15 bp, Homo sapiens
ctgcaggaaagaaca

SEQ ID NO: 761916 - DNA, 15 bp, Homo sapiens
tgcaggaaagaacag

SEQ ID NO: 761917 - DNA, 15 bp, Homo sapiens
gcaggaaagaacagt

SEQ ID NO: 761918 - DNA, 15 bp, Homo sapiens
caggaaagaacagtc

SEQ ID NO: 761919 - DNA, 15 bp, Homo sapiens
aggaaagaacagtca

SEQ ID NO: 761920 - DNA, 15 bp, Homo sapiens
ggaaagaacagtcag

SEQ ID NO: 761921 - DNA, 15 bp, Homo sapiens
gaaagaacagtcagt

SEQ ID NO: 761922 - DNA, 15 bp, Homo sapiens
aaagaacagtcagtt

SEQ ID NO: 761923 - DNA, 15 bp, Homo sapiens
aagaacagtcagttc

SEQ ID NO: 761924 - DNA, 15 bp, Homo sapiens
agaacagtcagttca

SEQ ID NO: 761925 - DNA, 15 bp, Homo sapiens
gaacagtcagttcat

SEQ ID NO: 761926 - DNA, 15 bp, Homo sapiens
aacagtcagttcatg

SEQ ID NO: 761927 - DNA, 15 bp, Homo sapiens
acagtcagttcatgg

SEQ ID NO: 761928 - DNA, 15 bp, Homo sapiens
cagtcagttcatgga

SEQ ID NO: 761929 - DNA, 15 bp, Homo sapiens
agtcagttcatggat

SEQ ID NO: 761930 - DNA, 15 bp, Homo sapiens
gtcagttcatggata

SEQ ID NO: 761931 - DNA, 15 bp, Homo sapiens
tcagttcatggataa

SEQ ID NO: 761932 - DNA, 15 bp, Homo sapiens
cagttcatggataat

SEQ ID NO: 761933 - DNA, 15 bp, Homo sapiens
agttcatggataatc

SEQ ID NO: 761934 - DNA, 15 bp, Homo sapiens
gttcatggataatcc

SEQ ID NO: 761935 - DNA, 15 bp, Homo sapiens
ttcatggataatccc

SEQ ID NO: 761936 - DNA, 15 bp, Homo sapiens
tcatggataatccct

SEQ ID NO: 761937 - DNA, 15 bp, Homo sapiens
catggataatccctt

SEQ ID NO: 761938 - DNA, 15 bp, Homo sapiens
atggataatcccttg

SEQ ID NO: 761939 - DNA, 15 bp, Homo sapiens
tggataatcccttga

SEQ ID NO: 761940 - DNA, 15 bp, Homo sapiens
ggataatcccttgat

SEQ ID NO: 761941 - DNA, 15 bp, Homo sapiens
gataatcccttgata

SEQ ID NO: 761942 - DNA, 15 bp, Homo sapiens
ataatcccttgatat

SEQ ID NO: 761943 - DNA, 15 bp, Homo sapiens
taatcccttgatatt

SEQ ID NO: 761944 - DNA, 15 bp, Homo sapiens
aatcccttgatattg

SEQ ID NO: 761945 - DNA, 15 bp, Homo sapiens
atcccttgatattgg

SEQ ID NO: 761946 - DNA, 15 bp, Homo sapiens
tcccttgatattggt

SEQ ID NO: 761947 - DNA, 15 bp, Homo sapiens
cccttgatattggtg

SEQ ID NO: 761948 - DNA, 15 bp, Homo sapiens
ccttgatattggtgc

SEQ ID NO: 761949 - DNA, 15 bp, Homo sapiens
cttgatattggtgct

SEQ ID NO: 761950 - DNA, 15 bp, Homo sapiens
ttgatattggtgctc

SEQ ID NO: 761951 - DNA, 15 bp, Homo sapiens
tgatattggtgctct

SEQ ID NO: 761952 - DNA, 15 bp, Homo sapiens
gatattggtgctctg

SEQ ID NO: 761953 - DNA, 15 bp, Homo sapiens
atattggtgctctgg

SEQ ID NO: 761954 - DNA, 15 bp, Homo sapiens
tattggtgctctggt

SEQ ID NO: 761955 - DNA, 15 bp, Homo sapiens
attggtgctctggtt

SEQ ID NO: 761956 - DNA, 15 bp, Homo sapiens
ttggtgctctggttc

SEQ ID NO: 761957 - DNA, 15 bp, Homo sapiens
tggtgctctggttct

SEQ ID NO: 761958 - DNA, 15 bp, Homo sapiens
ggtgctctggttcta

SEQ ID NO: 761959 - DNA, 15 bp, Homo sapiens
gtgctctggttctag

SEQ ID NO: 761960 - DNA, 15 bp, Homo sapiens
tgctctggttctagt

SEQ ID NO: 761961 - DNA, 15 bp, Homo sapiens
gctctggttctagtc

SEQ ID NO: 761962 - DNA, 15 bp, Homo sapiens
ctctggttctagtcc

SEQ ID NO: 761963 - DNA, 15 bp, Homo sapiens
tctggttctagtcca

SEQ ID NO: 761964 - DNA, 15 bp, Homo sapiens
ctggttctagtccag

SEQ ID NO: 761965 - DNA, 15 bp, Homo sapiens
tggttctagtccaga

SEQ ID NO: 761966 - DNA, 15 bp, Homo sapiens
ggttctagtccagag

SEQ ID NO: 761967 - DNA, 15 bp, Homo sapiens
gttctagtccagaga

SEQ ID NO: 761968 - DNA, 15 bp, Homo sapiens
ttctagtccagagat

SEQ ID NO: 761969 - DNA, 15 bp, Homo sapiens
tctagtccagagatt

SEQ ID NO: 761970 - DNA, 15 bp, Homo sapiens
ctagtccagagattt

SEQ ID NO: 761971 - DNA, 15 bp, Homo sapiens
tagtccagagatttt

SEQ ID NO: 761972 - DNA, 15 bp, Homo sapiens
agtccagagattttt

SEQ ID NO: 761973 - DNA, 15 bp, Homo sapiens
gtccagagattttta

SEQ ID NO: 761974 - DNA, 15 bp, Homo sapiens
tccagagatttttat

SEQ ID NO: 761975 - DNA, 15 bp, Homo sapiens
ccagagatttttatc

SEQ ID NO: 761976 - DNA, 15 bp, Homo sapiens
cagagatttttatca

SEQ ID NO: 761977 - DNA, 15 bp, Homo sapiens
agagatttttatcag

SEQ ID NO: 761978 - DNA, 15 bp, Homo sapiens
gagatttttatcagg

SEQ ID NO: 761979 - DNA, 15 bp, Homo sapiens
agatttttatcaggg

SEQ ID NO: 761980 - DNA, 15 bp, Homo sapiens
gatttttatcagggc

SEQ ID NO: 761981 - DNA, 15 bp, Homo sapiens
atttttatcagggct

SEQ ID NO: 761982 - DNA, 15 bp, Homo sapiens
tttttatcagggctg

SEQ ID NO: 761983 - DNA, 15 bp, Homo sapiens
ttttatcagggctga

SEQ ID NO: 761984 - DNA, 15 bp, Homo sapiens
tttatcagggctgac

SEQ ID NO: 761985 - DNA, 15 bp, Homo sapiens
ttatcagggctgact

SEQ ID NO: 761986 - DNA, 15 bp, Homo sapiens
tatcagggctgactg

SEQ ID NO: 761987 - DNA, 15 bp, Homo sapiens
atcagggctgactgc

SEQ ID NO: 761988 - DNA, 15 bp, Homo sapiens
tcagggctgactgca

SEQ ID NO: 761989 - DNA, 15 bp, Homo sapiens
cagggctgactgcaa

SEQ ID NO: 761990 - DNA, 15 bp, Homo sapiens
agggctgactgcaag

SEQ ID NO: 761991 - DNA, 15 bp, Homo sapiens
gggctgactgcaagt

SEQ ID NO: 761992 - DNA, 15 bp, Homo sapiens
ggctgactgcaagtt

SEQ ID NO: 761993 - DNA, 15 bp, Homo sapiens
gctgactgcaagttc

SEQ ID NO: 761994 - DNA, 15 bp, Homo sapiens
ctgactgcaagttca

SEQ ID NO: 761995 - DNA, 15 bp, Homo sapiens
tgactgcaagttcag

SEQ ID NO: 761996 - DNA, 15 bp, Homo sapiens
gactgcaagttcagc

SEQ ID NO: 761997 - DNA, 15 bp, Homo sapiens
actgcaagttcagct

SEQ ID NO: 761998 - DNA, 15 bp, Homo sapiens
ctgcaagttcagctc

SEQ ID NO: 761999 - DNA, 15 bp, Homo sapiens
tgcaagttcagctct

SEQ ID NO: 762000 - DNA, 15 bp, Homo sapiens
gcaagttcagctctg

SEQ ID NO: 762001 - DNA, 15 bp, Homo sapiens
caagttcagctctgg

SEQ ID NO: 762002 - DNA, 15 bp, Homo sapiens
aagttcagctctggg

SEQ ID NO: 762003 - DNA, 15 bp, Homo sapiens
agttcagctctggga

SEQ ID NO: 762004 - DNA, 15 bp, Homo sapiens
gttcagctctgggat

SEQ ID NO: 762005 - DNA, 15 bp, Homo sapiens
ttcagctctgggatg

SEQ ID NO: 762006 - DNA, 15 bp, Homo sapiens
tcagctctgggatgg

SEQ ID NO: 762007 - DNA, 15 bp, Homo sapiens
cagctctgggatggg

SEQ ID NO: 762008 - DNA, 15 bp, Homo sapiens
agctctgggatgggg

SEQ ID NO: 762009 - DNA, 15 bp, Homo sapiens
gctctgggatggggc

SEQ ID NO: 762010 - DNA, 15 bp, Homo sapiens
ctctgggatggggca

SEQ ID NO: 762011 - DNA, 15 bp, Homo sapiens
tctgggatggggcag

SEQ ID NO: 762012 - DNA, 15 bp, Homo sapiens
ctgggatggggcagt

SEQ ID NO: 762013 - DNA, 15 bp, Homo sapiens
tgggatggggcagtg

SEQ ID NO: 762014 - DNA, 15 bp, Homo sapiens
gggatggggcagtgg

SEQ ID NO: 762015 - DNA, 15 bp, Homo sapiens
ggatggggcagtggg

SEQ ID NO: 762016 - DNA, 15 bp, Homo sapiens
gatggggcagtgggg

SEQ ID NO: 762017 - DNA, 15 bp, Homo sapiens
atggggcagtggggg

SEQ ID NO: 762018 - DNA, 15 bp, Homo sapiens
tggggcagtgggggt

SEQ ID NO: 762019 - DNA, 15 bp, Homo sapiens
ggggcagtgggggta

SEQ ID NO: 762020 - DNA, 15 bp, Homo sapiens
gggcagtgggggtag

SEQ ID NO: 762021 - DNA, 15 bp, Homo sapiens
ggcagtgggggtagt

SEQ ID NO: 762022 - DNA, 15 bp, Homo sapiens
gcagtgggggtagtc

SEQ ID NO: 762023 - DNA, 15 bp, Homo sapiens
cagtgggggtagtct

SEQ ID NO: 762024 - DNA, 15 bp, Homo sapiens
agtgggggtagtctg

SEQ ID NO: 762025 - DNA, 15 bp, Homo sapiens
gtgggggtagtctgc

SEQ ID NO: 762026 - DNA, 15 bp, Homo sapiens
tgggggtagtctgct

SEQ ID NO: 762027 - DNA, 15 bp, Homo sapiens
gggggtagtctgctg

SEQ ID NO: 762028 - DNA, 15 bp, Homo sapiens
ggggtagtctgctga

SEQ ID NO: 762029 - DNA, 15 bp, Homo sapiens
gggtagtctgctgag

SEQ ID NO: 762030 - DNA, 15 bp, Homo sapiens
ggtagtctgctgagc

SEQ ID NO: 762031 - DNA, 15 bp, Homo sapiens
gtagtctgctgagct

SEQ ID NO: 762032 - DNA, 15 bp, Homo sapiens
tagtctgctgagctg

SEQ ID NO: 762033 - DNA, 15 bp, Homo sapiens
agtctgctgagctgg

SEQ ID NO: 762034 - DNA, 15 bp, Homo sapiens
gtctgctgagctggt

SEQ ID NO: 762035 - DNA, 15 bp, Homo sapiens
tctgctgagctggtc

SEQ ID NO: 762036 - DNA, 15 bp, Homo sapiens
ctgctgagctggtca

SEQ ID NO: 762037 - DNA, 15 bp, Homo sapiens
tgctgagctggtcag

SEQ ID NO: 762038 - DNA, 15 bp, Homo sapiens
gctgagctggtcaga

SEQ ID NO: 762039 - DNA, 15 bp, Homo sapiens
ctgagctggtcagac

SEQ ID NO: 762040 - DNA, 15 bp, Homo sapiens
tgagctggtcagact

SEQ ID NO: 762041 - DNA, 15 bp, Homo sapiens
gagctggtcagactg

SEQ ID NO: 762042 - DNA, 15 bp, Homo sapiens
agctggtcagactga

SEQ ID NO: 762043 - DNA, 15 bp, Homo sapiens
gctggtcagactgag

SEQ ID NO: 762044 - DNA, 15 bp, Homo sapiens
ctggtcagactgagc

SEQ ID NO: 762045 - DNA, 15 bp, Homo sapiens
tggtcagactgagct

SEQ ID NO: 762046 - DNA, 15 bp, Homo sapiens
ggtcagactgagctt

SEQ ID NO: 762047 - DNA, 15 bp, Homo sapiens
gtcagactgagcttc

SEQ ID NO: 762048 - DNA, 15 bp, Homo sapiens
tcagactgagcttcc

SEQ ID NO: 762049 - DNA, 15 bp, Homo sapiens
cagactgagcttcct

SEQ ID NO: 762050 - DNA, 15 bp, Homo sapiens
agactgagcttcctg

SEQ ID NO: 762051 - DNA, 15 bp, Homo sapiens
gactgagcttcctga

SEQ ID NO: 762052 - DNA, 15 bp, Homo sapiens
actgagcttcctgat

SEQ ID NO: 762053 - DNA, 15 bp, Homo sapiens
ctgagcttcctgatt

SEQ ID NO: 762054 - DNA, 15 bp, Homo sapiens
tgagcttcctgattc

SEQ ID NO: 762055 - DNA, 15 bp, Homo sapiens
gagcttcctgattcg

SEQ ID NO: 762056 - DNA, 15 bp, Homo sapiens
agcttcctgattcgg

SEQ ID NO: 762057 - DNA, 15 bp, Homo sapiens
gcttcctgattcggt

SEQ ID NO: 762058 - DNA, 15 bp, Homo sapiens
cttcctgattcggtc

SEQ ID NO: 762059 - DNA, 15 bp, Homo sapiens
ttcctgattcggtcc

SEQ ID NO: 762060 - DNA, 15 bp, Homo sapiens
tcctgattcggtcct

SEQ ID NO: 762061 - DNA, 15 bp, Homo sapiens
cctgattcggtcctc

SEQ ID NO: 762062 - DNA, 15 bp, Homo sapiens
ctgattcggtcctca

SEQ ID NO: 762063 - DNA, 15 bp, Homo sapiens
tgattcggtcctcag

SEQ ID NO: 762064 - DNA, 15 bp, Homo sapiens
gattcggtcctcagg

SEQ ID NO: 762065 - DNA, 15 bp, Homo sapiens
attcggtcctcaggt

SEQ ID NO: 762066 - DNA, 15 bp, Homo sapiens
ttcggtcctcaggtc

SEQ ID NO: 762067 - DNA, 15 bp, Homo sapiens
tcggtcctcaggtca

SEQ ID NO: 762068 - DNA, 15 bp, Homo sapiens
cggtcctcaggtcat

SEQ ID NO: 762069 - DNA, 15 bp, Homo sapiens
ggtcctcaggtcatt

SEQ ID NO: 762070 - DNA, 15 bp, Homo sapiens
gtcctcaggtcattt

SEQ ID NO: 762071 - DNA, 15 bp, Homo sapiens
tcctcaggtcatttc

SEQ ID NO: 762072 - DNA, 15 bp, Homo sapiens
cctcaggtcatttca

SEQ ID NO: 762073 - DNA, 15 bp, Homo sapiens
ctcaggtcatttcaa

SEQ ID NO: 762074 - DNA, 15 bp, Homo sapiens
tcaggtcatttcaag

SEQ ID NO: 762075 - DNA, 15 bp, Homo sapiens
caggtcatttcaagg

SEQ ID NO: 762076 - DNA, 15 bp, Homo sapiens
aggtcatttcaaggg

SEQ ID NO: 762077 - DNA, 15 bp, Homo sapiens
ggtcatttcaaggga

SEQ ID NO: 762078 - DNA, 15 bp, Homo sapiens
gtcatttcaagggaa

SEQ ID NO: 762079 - DNA, 15 bp, Homo sapiens
tcatttcaagggaac

SEQ ID NO: 762080 - DNA, 15 bp, Homo sapiens
catttcaagggaaca

SEQ ID NO: 762081 - DNA, 15 bp, Homo sapiens
atttcaagggaacac

SEQ ID NO: 762082 - DNA, 15 bp, Homo sapiens
tttcaagggaacaca

SEQ ID NO: 762083 - DNA, 15 bp, Homo sapiens
ttcaagggaacacat

SEQ ID NO: 762084 - DNA, 15 bp, Homo sapiens
tcaagggaacacatt

SEQ ID NO: 762085 - DNA, 15 bp, Homo sapiens
caagggaacacattg

SEQ ID NO: 762086 - DNA, 15 bp, Homo sapiens
aagggaacacattgg

SEQ ID NO: 762087 - DNA, 15 bp, Homo sapiens
agggaacacattgga

SEQ ID NO: 762088 - DNA, 15 bp, Homo sapiens
gggaacacattggaa

SEQ ID NO: 762089 - DNA, 15 bp, Homo sapiens
ggaacacattggaaa

SEQ ID NO: 762090 - DNA, 15 bp, Homo sapiens
gaacacattggaaag

SEQ ID NO: 762091 - DNA, 15 bp, Homo sapiens
aacacattggaaagt

SEQ ID NO: 762092 - DNA, 15 bp, Homo sapiens
acacattggaaagtc

SEQ ID NO: 762093 - DNA, 15 bp, Homo sapiens
cacattggaaagtca

SEQ ID NO: 762094 - DNA, 15 bp, Homo sapiens
acattggaaagtcat

SEQ ID NO: 762095 - DNA, 15 bp, Homo sapiens
cattggaaagtcatc

SEQ ID NO: 762096 - DNA, 15 bp, Homo sapiens
attggaaagtcatct

SEQ ID NO: 762097 - DNA, 15 bp, Homo sapiens
ttggaaagtcatctc

SEQ ID NO: 762098 - DNA, 15 bp, Homo sapiens
gaaagtcatctccac

SEQ ID NO: 762099 - DNA, 15 bp, Homo sapiens
aaagtcatctccacg

SEQ ID NO: 762100 - DNA, 15 bp, Homo sapiens
aagtcatctccacgt

SEQ ID NO: 762101 - DNA, 15 bp, Homo sapiens
agtcatctccacgtt

SEQ ID NO: 762102 - DNA, 15 bp, Homo sapiens
gtcatctccacgttg

SEQ ID NO: 762103 - DNA, 15 bp, Homo sapiens
tcatctccacgttgc

SEQ ID NO: 762104 - DNA, 15 bp, Homo sapiens
catctccacgttgct

SEQ ID NO: 762105 - DNA, 15 bp, Homo sapiens
atctccacgttgctc

SEQ ID NO: 762106 - DNA, 15 bp, Homo sapiens
tctccacgttgctct

SEQ ID NO: 762107 - DNA, 15 bp, Homo sapiens
ctccacgttgctctt

SEQ ID NO: 762108 - DNA, 15 bp, Homo sapiens
tccacgttgctcttc

SEQ ID NO: 762109 - DNA, 15 bp, Homo sapiens
ccacgttgctcttct

SEQ ID NO: 762110 - DNA, 15 bp, Homo sapiens
cacgttgctcttctc

SEQ ID NO: 762111 - DNA, 15 bp, Homo sapiens
acgttgctcttctcc

SEQ ID NO: 762112 - DNA, 15 bp, Homo sapiens
cgttgctcttctcca

SEQ ID NO: 762113 - DNA, 15 bp, Homo sapiens
gttgctcttctccat

SEQ ID NO: 762114 - DNA, 15 bp, Homo sapiens
ttgctcttctccatt

SEQ ID NO: 762115 - DNA, 15 bp, Homo sapiens
tgctcttctccattg

SEQ ID NO: 762116 - DNA, 15 bp, Homo sapiens
gctcttctccattgt

SEQ ID NO: 762117 - DNA, 15 bp, Homo sapiens
ctcttctccattgta

SEQ ID NO: 762118 - DNA, 15 bp, Homo sapiens
tcttctccattgtac

SEQ ID NO: 762119 - DNA, 15 bp, Homo sapiens
cttctccattgtacg

SEQ ID NO: 762120 - DNA, 15 bp, Homo sapiens
ttctccattgtacgc

SEQ ID NO: 762121 - DNA, 15 bp, Homo sapiens
tctccattgtacgca

SEQ ID NO: 762122 - DNA, 15 bp, Homo sapiens
ctccattgtacgcaa

SEQ ID NO: 762123 - DNA, 15 bp, Homo sapiens
tccattgtacgcaat

SEQ ID NO: 762124 - DNA, 15 bp, Homo sapiens
ccattgtacgcaata

SEQ ID NO: 762125 - DNA, 15 bp, Homo sapiens
cattgtacgcaatac

SEQ ID NO: 762126 - DNA, 15 bp, Homo sapiens
attgtacgcaataca

SEQ ID NO: 762127 - DNA, 15 bp, Homo sapiens
ttgtacgcaatacaa

SEQ ID NO: 762128 - DNA, 15 bp, Homo sapiens
tgtacgcaatacaac

SEQ ID NO: 762129 - DNA, 15 bp, Homo sapiens
gtacgcaatacaaca

SEQ ID NO: 762130 - DNA, 15 bp, Homo sapiens
tacgcaatacaacat

SEQ ID NO: 762131 - DNA, 15 bp, Homo sapiens
acgcaatacaacatt

SEQ ID NO: 762132 - DNA, 15 bp, Homo sapiens
cgcaatacaacattt

SEQ ID NO: 762133 - DNA, 15 bp, Homo sapiens
gcaatacaacatttt

SEQ ID NO: 762134 - DNA, 15 bp, Homo sapiens
caatacaacatttta

SEQ ID NO: 762135 - DNA, 15 bp, Homo sapiens
aatacaacattttaa

SEQ ID NO: 762136 - DNA, 15 bp, Homo sapiens
atacaacattttaag

SEQ ID NO: 762137 - DNA, 15 bp, Homo sapiens
tacaacattttaagg

SEQ ID NO: 762138 - DNA, 15 bp, Homo sapiens
acaacattttaagga

SEQ ID NO: 762139 - DNA, 15 bp, Homo sapiens
caacattttaaggaa

SEQ ID NO: 762140 - DNA, 15 bp, Homo sapiens
aacattttaaggaac

SEQ ID NO: 762141 - DNA, 15 bp, Homo sapiens
acattttaaggaaca

SEQ ID NO: 762142 - DNA, 15 bp, Homo sapiens
cattttaaggaacaa

SEQ ID NO: 762143 - DNA, 15 bp, Homo sapiens
attttaaggaacaaa

SEQ ID NO: 762144 - DNA, 15 bp, Homo sapiens
ttttaaggaacaaac

SEQ ID NO: 762145 - DNA, 15 bp, Homo sapiens
tttaaggaacaaaca

SEQ ID NO: 762146 - DNA, 15 bp, Homo sapiens
ttaaggaacaaacag

SEQ ID NO: 762147 - DNA, 15 bp, Homo sapiens
taaggaacaaacagt

SEQ ID NO: 762148 - DNA, 15 bp, Homo sapiens
aaggaacaaacagta

SEQ ID NO: 762149 - DNA, 15 bp, Homo sapiens
aggaacaaacagtac

SEQ ID NO: 762150 - DNA, 15 bp, Homo sapiens
ggaacaaacagtacc

SEQ ID NO: 762151 - DNA, 15 bp, Homo sapiens
gaacaaacagtacct

SEQ ID NO: 762152 - DNA, 15 bp, Homo sapiens
aacaaacagtacctt

SEQ ID NO: 762153 - DNA, 15 bp, Homo sapiens
acaaacagtaccttc

SEQ ID NO: 762154 - DNA, 15 bp, Homo sapiens
caaacagtaccttct

SEQ ID NO: 762155 - DNA, 15 bp, Homo sapiens
aaacagtaccttctt

SEQ ID NO: 762156 - DNA, 15 bp, Homo sapiens
aacagtaccttcttc

SEQ ID NO: 762157 - DNA, 15 bp, Homo sapiens
acagtaccttcttcc

SEQ ID NO: 762158 - DNA, 15 bp, Homo sapiens
cagtaccttcttcct

SEQ ID NO: 762159 - DNA, 15 bp, Homo sapiens
agtaccttcttcctc

SEQ ID NO: 762160 - DNA, 15 bp, Homo sapiens
gtaccttcttcctca

SEQ ID NO: 762161 - DNA, 15 bp, Homo sapiens
taccttcttcctcat

SEQ ID NO: 762162 - DNA, 15 bp, Homo sapiens
accttcttcctcatg

SEQ ID NO: 762163 - DNA, 15 bp, Homo sapiens
ccttcttcctcatga

SEQ ID NO: 762164 - DNA, 15 bp, Homo sapiens
cttcttcctcatgaa

SEQ ID NO: 762165 - DNA, 15 bp, Homo sapiens
ttcttcctcatgaac

SEQ ID NO: 762166 - DNA, 15 bp, Homo sapiens
tcttcctcatgaaca

SEQ ID NO: 762167 - DNA, 15 bp, Homo sapiens
cttcctcatgaacat

SEQ ID NO: 762168 - DNA, 15 bp, Homo sapiens
ttcctcatgaacatt

SEQ ID NO: 762169 - DNA, 15 bp, Homo sapiens
tcctcatgaacatta

SEQ ID NO: 762170 - DNA, 15 bp, Homo sapiens
cctcatgaacattat

SEQ ID NO: 762171 - DNA, 15 bp, Homo sapiens
ctcatgaacattatt

SEQ ID NO: 762172 - DNA, 15 bp, Homo sapiens
tcatgaacattattc

SEQ ID NO: 762173 - DNA, 15 bp, Homo sapiens
catgaacattattct

SEQ ID NO: 762174 - DNA, 15 bp, Homo sapiens
atgaacattattctg

SEQ ID NO: 762175 - DNA, 15 bp, Homo sapiens
tgaacattattctgt

SEQ ID NO: 762176 - DNA, 15 bp, Homo sapiens
gaacattattctgtt

SEQ ID NO: 762177 - DNA, 15 bp, Homo sapiens
aacattattctgttt

SEQ ID NO: 762178 - DNA, 15 bp, Homo sapiens
acattattctgttta

SEQ ID NO: 762179 - DNA, 15 bp, Homo sapiens
cattattctgtttaa

SEQ ID NO: 762180 - DNA, 15 bp, Homo sapiens
attattctgtttaac

SEQ ID NO: 762181 - DNA, 15 bp, Homo sapiens
ttattctgtttaaca

SEQ ID NO: 762182 - DNA, 15 bp, Homo sapiens
tattctgtttaacag

SEQ ID NO: 762183 - DNA, 15 bp, Homo sapiens
attctgtttaacagg

SEQ ID NO: 762184 - DNA, 15 bp, Homo sapiens
ttctgtttaacaggg

SEQ ID NO: 762185 - DNA, 15 bp, Homo sapiens
tctgtttaacaggga

SEQ ID NO: 762186 - DNA, 15 bp, Homo sapiens
ctgtttaacagggag

SEQ ID NO: 762187 - DNA, 15 bp, Homo sapiens
tgtttaacagggagc

SEQ ID NO: 762188 - DNA, 15 bp, Homo sapiens
gtttaacagggagcc

SEQ ID NO: 762189 - DNA, 15 bp, Homo sapiens
tttaacagggagcca

SEQ ID NO: 762190 - DNA, 15 bp, Homo sapiens
ttaacagggagccaa

SEQ ID NO: 762191 - DNA, 15 bp, Homo sapiens
taacagggagccaaa

SEQ ID NO: 762192 - DNA, 15 bp, Homo sapiens
aacagggagccaaac

SEQ ID NO: 762193 - DNA, 15 bp, Homo sapiens
acagggagccaaacg

SEQ ID NO: 762194 - DNA, 15 bp, Homo sapiens
cagggagccaaacga

SEQ ID NO: 762195 - DNA, 15 bp, Homo sapiens
agggagccaaacgaa

SEQ ID NO: 762196 - DNA, 15 bp, Homo sapiens
gggagccaaacgaag

SEQ ID NO: 762197 - DNA, 15 bp, Homo sapiens
ggagccaaacgaagt

SEQ ID NO: 762198 - DNA, 15 bp, Homo sapiens
gagccaaacgaagtt

SEQ ID NO: 762199 - DNA, 15 bp, Homo sapiens
agccaaacgaagttg

SEQ ID NO: 762200 - DNA, 15 bp, Homo sapiens
gccaaacgaagttgc

SEQ ID NO: 762201 - DNA, 15 bp, Homo sapiens
ccaaacgaagttgca

SEQ ID NO: 762202 - DNA, 15 bp, Homo sapiens
caaacgaagttgcaa

SEQ ID NO: 762203 - DNA, 15 bp, Homo sapiens
aaacgaagttgcaag

SEQ ID NO: 762204 - DNA, 15 bp, Homo sapiens
aacgaagttgcaaga

SEQ ID NO: 762205 - DNA, 15 bp, Homo sapiens
acgaagttgcaagag

SEQ ID NO: 762206 - DNA, 15 bp, Homo sapiens
cgaagttgcaagagt

SEQ ID NO: 762207 - DNA, 15 bp, Homo sapiens
gaagttgcaagagtc

SEQ ID NO: 762208 - DNA, 15 bp, Homo sapiens
aagttgcaagagtcc

SEQ ID NO: 762209 - DNA, 15 bp, Homo sapiens
agttgcaagagtcct

SEQ ID NO: 762210 - DNA, 15 bp, Homo sapiens
gttgcaagagtcctc

SEQ ID NO: 762211 - DNA, 15 bp, Homo sapiens
ttgcaagagtcctca

SEQ ID NO: 762212 - DNA, 15 bp, Homo sapiens
tgcaagagtcctcat

SEQ ID NO: 762213 - DNA, 15 bp, Homo sapiens
gcaagagtcctcatt

SEQ ID NO: 762214 - DNA, 15 bp, Homo sapiens
caagagtcctcattt

SEQ ID NO: 762215 - DNA, 15 bp, Homo sapiens
aagagtcctcatttt

SEQ ID NO: 762216 - DNA, 15 bp, Homo sapiens
agagtcctcattttc

SEQ ID NO: 762217 - DNA, 15 bp, Homo sapiens
gagtcctcattttcc

SEQ ID NO: 762218 - DNA, 15 bp, Homo sapiens
agtcctcattttccc

SEQ ID NO: 762219 - DNA, 15 bp, Homo sapiens
gtcctcattttccca

SEQ ID NO: 762220 - DNA, 15 bp, Homo sapiens
tcctcattttcccat

SEQ ID NO: 762221 - DNA, 15 bp, Homo sapiens
cctcattttcccatg

SEQ ID NO: 762222 - DNA, 15 bp, Homo sapiens
ctcattttcccatgg

SEQ ID NO: 762223 - DNA, 15 bp, Homo sapiens
tcattttcccatggt

SEQ ID NO: 762224 - DNA, 15 bp, Homo sapiens
cattttcccatggtg

SEQ ID NO: 762225 - DNA, 15 bp, Homo sapiens
attttcccatggtgt

SEQ ID NO: 762226 - DNA, 15 bp, Homo sapiens
ttttcccatggtgtt

SEQ ID NO: 762227 - DNA, 15 bp, Homo sapiens
tttcccatggtgttc

SEQ ID NO: 762228 - DNA, 15 bp, Homo sapiens
ttcccatggtgttcc

SEQ ID NO: 762229 - DNA, 15 bp, Homo sapiens
tcccatggtgttcca

SEQ ID NO: 762230 - DNA, 15 bp, Homo sapiens
cccatggtgttccat

SEQ ID NO: 762231 - DNA, 15 bp, Homo sapiens
ccatggtgttccata

SEQ ID NO: 762232 - DNA, 15 bp, Homo sapiens
catggtgttccatag

SEQ ID NO: 762233 - DNA, 15 bp, Homo sapiens
atggtgttccataga

SEQ ID NO: 762234 - DNA, 15 bp, Homo sapiens
tggtgttccatagag

SEQ ID NO: 762235 - DNA, 15 bp, Homo sapiens
ggtgttccatagagc

SEQ ID NO: 762236 - DNA, 15 bp, Homo sapiens
gtgttccatagagct

SEQ ID NO: 762237 - DNA, 15 bp, Homo sapiens
tgttccatagagctg

SEQ ID NO: 762238 - DNA, 15 bp, Homo sapiens
gttccatagagctgt

SEQ ID NO: 762239 - DNA, 15 bp, Homo sapiens
ttccatagagctgtt

SEQ ID NO: 762240 - DNA, 15 bp, Homo sapiens
tccatagagctgttt

SEQ ID NO: 762241 - DNA, 15 bp, Homo sapiens
ccatagagctgtttg

SEQ ID NO: 762242 - DNA, 15 bp, Homo sapiens
catagagctgtttgt

SEQ ID NO: 762243 - DNA, 15 bp, Homo sapiens
atagagctgtttgta

SEQ ID NO: 762244 - DNA, 15 bp, Homo sapiens
tagagctgtttgtat

SEQ ID NO: 762245 - DNA, 15 bp, Homo sapiens
agagctgtttgtatt

SEQ ID NO: 762246 - DNA, 15 bp, Homo sapiens
gagctgtttgtattt

SEQ ID NO: 762247 - DNA, 15 bp, Homo sapiens
agctgtttgtatttt

SEQ ID NO: 762248 - DNA, 15 bp, Homo sapiens
gctgtttgtattttt

SEQ ID NO: 762249 - DNA, 15 bp, Homo sapiens
ctgtttgtattttta

SEQ ID NO: 762250 - DNA, 15 bp, Homo sapiens
tgtttgtatttttaa

SEQ ID NO: 762251 - DNA, 15 bp, Homo sapiens
gtttgtatttttaat

SEQ ID NO: 762252 - DNA, 15 bp, Homo sapiens
tttgtatttttaata

SEQ ID NO: 762253 - DNA, 15 bp, Homo sapiens
ttgtatttttaataa

SEQ ID NO: 762254 - DNA, 15 bp, Homo sapiens
tgtatttttaataaa

SEQ ID NO: 762255 - DNA, 15 bp, Homo sapiens
gtatttttaataaaa

SEQ ID NO: 762256 - DNA, 15 bp, Homo sapiens
tatttttaataaaaa

SEQ ID NO: 762257 - DNA, 15 bp, Homo sapiens
atttttaataaaaaa

SEQ ID NO: 762258 - DNA, 15 bp, Homo sapiens
tttttaataaaaaac

SEQ ID NO: 762259 - DNA, 15 bp, Homo sapiens
ttttaataaaaaact

SEQ ID NO: 762260 - DNA, 15 bp, Homo sapiens
tttaataaaaaacta

SEQ ID NO: 762261 - DNA, 15 bp, Homo sapiens
ttaataaaaaactaa

SEQ ID NO: 762262 - DNA, 15 bp, Homo sapiens
taataaaaaactaat

SEQ ID NO: 762263 - DNA, 15 bp, Homo sapiens
aataaaaaactaata

SEQ ID NO: 762264 - DNA, 15 bp, Homo sapiens
ataaaaaactaataa

SEQ ID NO: 762265 - DNA, 15 bp, Homo sapiens
taaaaaactaataat

SEQ ID NO: 762266 - DNA, 15 bp, Homo sapiens
aaaaaactaataatt

SEQ ID NO: 762267 - DNA, 15 bp, Homo sapiens
aaaaactaataattc

SEQ ID NO: 762268 - DNA, 15 bp, Homo sapiens
aaaactaataattca

SEQ ID NO: 762269 - DNA, 15 bp, Homo sapiens
aaactaataattcag

SEQ ID NO: 762270 - DNA, 15 bp, Homo sapiens
aactaataattcaga

SEQ ID NO: 762271 - DNA, 15 bp, Homo sapiens
actaataattcagag

SEQ ID NO: 762272 - DNA, 15 bp, Homo sapiens
ctaataattcagagg

SEQ ID NO: 762273 - DNA, 15 bp, Homo sapiens
taataattcagaggc

SEQ ID NO: 762274 - DNA, 15 bp, Homo sapiens
aataattcagaggct

SEQ ID NO: 762275 - DNA, 15 bp, Homo sapiens
ataattcagaggctg

SEQ ID NO: 762276 - DNA, 15 bp, Homo sapiens
taattcagaggctgc

SEQ ID NO: 762277 - DNA, 15 bp, Homo sapiens
aattcagaggctgca

SEQ ID NO: 762278 - DNA, 15 bp, Homo sapiens
attcagaggctgcaa

SEQ ID NO: 762279 - DNA, 15 bp, Homo sapiens
ttcagaggctgcaaa

SEQ ID NO: 762280 - DNA, 15 bp, Homo sapiens
tcagaggctgcaaag

SEQ ID NO: 762281 - DNA, 15 bp, Homo sapiens
cagaggctgcaaagc

SEQ ID NO: 762282 - DNA, 15 bp, Homo sapiens
agaggctgcaaagca

SEQ ID NO: 762283 - DNA, 15 bp, Homo sapiens
gaggctgcaaagcat

SEQ ID NO: 762284 - DNA, 15 bp, Homo sapiens
aggctgcaaagcatt

SEQ ID NO: 762285 - DNA, 15 bp, Homo sapiens
ggctgcaaagcattt

SEQ ID NO: 762286 - DNA, 15 bp, Homo sapiens
gctgcaaagcatttg

SEQ ID NO: 762287 - DNA, 15 bp, Homo sapiens
ctgcaaagcatttgt

SEQ ID NO: 762288 - DNA, 15 bp, Homo sapiens
tgcaaagcatttgtt

SEQ ID NO: 762289 - DNA, 15 bp, Homo sapiens
gcaaagcatttgttt

SEQ ID NO: 762290 - DNA, 15 bp, Homo sapiens
caaagcatttgtttt

SEQ ID NO: 762291 - DNA, 15 bp, Homo sapiens
aaagcatttgttttt

SEQ ID NO: 762292 - DNA, 15 bp, Homo sapiens
aagcatttgttttta

SEQ ID NO: 762293 - DNA, 15 bp, Homo sapiens
agcatttgtttttaa

SEQ ID NO: 762294 - DNA, 15 bp, Homo sapiens
gcatttgtttttaaa

SEQ ID NO: 762295 - DNA, 15 bp, Homo sapiens
catttgtttttaaat

SEQ ID NO: 762296 - DNA, 15 bp, Homo sapiens
atttgtttttaaatt

SEQ ID NO: 762297 - DNA, 15 bp, Homo sapiens
tttgtttttaaattt

SEQ ID NO: 762298 - DNA, 15 bp, Homo sapiens
ttgtttttaaattta

SEQ ID NO: 762299 - DNA, 15 bp, Homo sapiens
tgtttttaaatttaa

SEQ ID NO: 762300 - DNA, 15 bp, Homo sapiens
gtttttaaatttaaa

SEQ ID NO: 762301 - DNA, 15 bp, Homo sapiens
tttttaaatttaaaa

SEQ ID NO: 762302 - DNA, 15 bp, Homo sapiens
ttttaaatttaaaaa

SEQ ID NO: 762303 - DNA, 15 bp, Homo sapiens
tttaaatttaaaaat

SEQ ID NO: 762304 - DNA, 15 bp, Homo sapiens
ttaaatttaaaaatg

SEQ ID NO: 762305 - DNA, 15 bp, Homo sapiens
taaatttaaaaatgt

SEQ ID NO: 762306 - DNA, 15 bp, Homo sapiens
aaatttaaaaatgtt

SEQ ID NO: 762307 - DNA, 15 bp, Homo sapiens
aatttaaaaatgttt

SEQ ID NO: 762308 - DNA, 15 bp, Homo sapiens
atttaaaaatgtttt

SEQ ID NO: 762309 - DNA, 15 bp, Homo sapiens
tttaaaaatgtttta

SEQ ID NO: 762310 - DNA, 15 bp, Homo sapiens
ttaaaaatgttttat

SEQ ID NO: 762311 - DNA, 15 bp, Homo sapiens
taaaaatgttttata

SEQ ID NO: 762312 - DNA, 15 bp, Homo sapiens
aaaaatgttttatag

SEQ ID NO: 762313 - DNA, 15 bp, Homo sapiens
aaaatgttttataga

SEQ ID NO: 762314 - DNA, 15 bp, Homo sapiens
aaatgttttatagac

SEQ ID NO: 762315 - DNA, 15 bp, Homo sapiens
aatgttttatagact

SEQ ID NO: 762316 - DNA, 15 bp, Homo sapiens
atgttttatagacta

SEQ ID NO: 762317 - DNA, 15 bp, Homo sapiens
tgttttatagactat

SEQ ID NO: 762318 - DNA, 15 bp, Homo sapiens
gttttatagactatg

SEQ ID NO: 762319 - DNA, 15 bp, Homo sapiens
ttttatagactatgg

SEQ ID NO: 762320 - DNA, 15 bp, Homo sapiens
tttatagactatgga

SEQ ID NO: 762321 - DNA, 15 bp, Homo sapiens
ttatagactatggaa

SEQ ID NO: 762322 - DNA, 15 bp, Homo sapiens
tatagactatggaaa

SEQ ID NO: 762323 - DNA, 15 bp, Homo sapiens
atagactatggaaac

SEQ ID NO: 762324 - DNA, 15 bp, Homo sapiens
tagactatggaaaca

SEQ ID NO: 762325 - DNA, 15 bp, Homo sapiens
agactatggaaacaa

SEQ ID NO: 762326 - DNA, 15 bp, Homo sapiens
gactatggaaacaaa

SEQ ID NO: 762327 - DNA, 15 bp, Homo sapiens
actatggaaacaaaa

SEQ ID NO: 762328 - DNA, 15 bp, Homo sapiens
ctatggaaacaaaag

SEQ ID NO: 762329 - DNA, 15 bp, Homo sapiens
tatggaaacaaaagt

SEQ ID NO: 762330 - DNA, 15 bp, Homo sapiens
atggaaacaaaagtt

SEQ ID NO: 762331 - DNA, 15 bp, Homo sapiens
tggaaacaaaagttt

SEQ ID NO: 762332 - DNA, 15 bp, Homo sapiens
ggaaacaaaagtttg

SEQ ID NO: 762333 - DNA, 15 bp, Homo sapiens
gaaacaaaagtttgc

SEQ ID NO: 762334 - DNA, 15 bp, Homo sapiens
aaacaaaagtttgct

SEQ ID NO: 762335 - DNA, 15 bp, Homo sapiens
aacaaaagtttgctt

SEQ ID NO: 762336 - DNA, 15 bp, Homo sapiens
acaaaagtttgcttc

SEQ ID NO: 762337 - DNA, 15 bp, Homo sapiens
caaaagtttgcttcc

SEQ ID NO: 762338 - DNA, 15 bp, Homo sapiens
aaaagtttgcttccc

SEQ ID NO: 762339 - DNA, 15 bp, Homo sapiens
aaagtttgcttcccc

SEQ ID NO: 762340 - DNA, 15 bp, Homo sapiens
aagtttgcttcccct

SEQ ID NO: 762341 - DNA, 15 bp, Homo sapiens
agtttgcttcccctg

SEQ ID NO: 762342 - DNA, 15 bp, Homo sapiens
gtttgcttcccctgc

SEQ ID NO: 762343 - DNA, 15 bp, Homo sapiens
tttgcttcccctgcc

SEQ ID NO: 762344 - DNA, 15 bp, Homo sapiens
ttgcttcccctgccc

SEQ ID NO: 762345 - DNA, 15 bp, Homo sapiens
tgcttcccctgccca

SEQ ID NO: 762346 - DNA, 15 bp, Homo sapiens
gcttcccctgcccat

SEQ ID NO: 762347 - DNA, 15 bp, Homo sapiens
cttcccctgcccatt

SEQ ID NO: 762348 - DNA, 15 bp, Homo sapiens
ttcccctgcccattt

SEQ ID NO: 762349 - DNA, 15 bp, Homo sapiens
tcccctgcccatttg

SEQ ID NO: 762350 - DNA, 15 bp, Homo sapiens
cccctgcccatttgg

SEQ ID NO: 762351 - DNA, 15 bp, Homo sapiens
ccctgcccatttggg

SEQ ID NO: 762352 - DNA, 15 bp, Homo sapiens
cctgcccatttggga

SEQ ID NO: 762353 - DNA, 15 bp, Homo sapiens
ctgcccatttgggaa

SEQ ID NO: 762354 - DNA, 15 bp, Homo sapiens
tgcccatttgggaaa

SEQ ID NO: 762355 - DNA, 15 bp, Homo sapiens
gcccatttgggaaac

SEQ ID NO: 762356 - DNA, 15 bp, Homo sapiens
cccatttgggaaaca

SEQ ID NO: 762357 - DNA, 15 bp, Homo sapiens
ccatttgggaaacag

SEQ ID NO: 762358 - DNA, 15 bp, Homo sapiens
catttgggaaacaga

SEQ ID NO: 762359 - DNA, 15 bp, Homo sapiens
atttgggaaacagag

SEQ ID NO: 762360 - DNA, 15 bp, Homo sapiens
tttgggaaacagagc

SEQ ID NO: 762361 - DNA, 15 bp, Homo sapiens
ttgggaaacagagca

SEQ ID NO: 762362 - DNA, 15 bp, Homo sapiens
tgggaaacagagcac

SEQ ID NO: 762363 - DNA, 15 bp, Homo sapiens
gggaaacagagcact

SEQ ID NO: 762364 - DNA, 15 bp, Homo sapiens
ggaaacagagcactg

SEQ ID NO: 762365 - DNA, 15 bp, Homo sapiens
gaaacagagcactgc

SEQ ID NO: 762366 - DNA, 15 bp, Homo sapiens
aaacagagcactgct

SEQ ID NO: 762367 - DNA, 15 bp, Homo sapiens
aacagagcactgctc

SEQ ID NO: 762368 - DNA, 15 bp, Homo sapiens
acagagcactgctct

SEQ ID NO: 762369 - DNA, 15 bp, Homo sapiens
cagagcactgctctc

SEQ ID NO: 762370 - DNA, 15 bp, Homo sapiens
agagcactgctctca

SEQ ID NO: 762371 - DNA, 15 bp, Homo sapiens
gagcactgctctcat

SEQ ID NO: 762372 - DNA, 15 bp, Homo sapiens
agcactgctctcatt

SEQ ID NO: 762373 - DNA, 15 bp, Homo sapiens
gcactgctctcattc

SEQ ID NO: 762374 - DNA, 15 bp, Homo sapiens
cactgctctcattct

SEQ ID NO: 762375 - DNA, 15 bp, Homo sapiens
actgctctcattctt

SEQ ID NO: 762376 - DNA, 15 bp, Homo sapiens
ctgctctcattctta

SEQ ID NO: 762377 - DNA, 15 bp, Homo sapiens
tgctctcattcttag

SEQ ID NO: 762378 - DNA, 15 bp, Homo sapiens
gctctcattcttagg

SEQ ID NO: 762379 - DNA, 15 bp, Homo sapiens
ctctcattcttaggg

SEQ ID NO: 762380 - DNA, 15 bp, Homo sapiens
tctcattcttagggg

SEQ ID NO: 762381 - DNA, 15 bp, Homo sapiens
ctcattcttagggga

SEQ ID NO: 762382 - DNA, 15 bp, Homo sapiens
tcattcttaggggac

SEQ ID NO: 762383 - DNA, 15 bp, Homo sapiens
cattcttaggggaca

SEQ ID NO: 762384 - DNA, 15 bp, Homo sapiens
attcttaggggacag

SEQ ID NO: 762385 - DNA, 15 bp, Homo sapiens
ttcttaggggacagc

SEQ ID NO: 762386 - DNA, 15 bp, Homo sapiens
tcttaggggacagca

SEQ ID NO: 762387 - DNA, 15 bp, Homo sapiens
cttaggggacagcat

SEQ ID NO: 762388 - DNA, 15 bp, Homo sapiens
ttaggggacagcata

SEQ ID NO: 762389 - DNA, 15 bp, Homo sapiens
taggggacagcatac

SEQ ID NO: 762390 - DNA, 15 bp, Homo sapiens
aggggacagcataca

SEQ ID NO: 762391 - DNA, 15 bp, Homo sapiens
ggggacagcatacac

SEQ ID NO: 762392 - DNA, 15 bp, Homo sapiens
gggacagcatacaca

SEQ ID NO: 762393 - DNA, 15 bp, Homo sapiens
ggacagcatacacat

SEQ ID NO: 762394 - DNA, 15 bp, Homo sapiens
gacagcatacacatg

SEQ ID NO: 762395 - DNA, 15 bp, Homo sapiens
acagcatacacatgg

SEQ ID NO: 762396 - DNA, 15 bp, Homo sapiens
cagcatacacatggg

SEQ ID NO: 762397 - DNA, 15 bp, Homo sapiens
agcatacacatgggt

SEQ ID NO: 762398 - DNA, 15 bp, Homo sapiens
gcatacacatgggtc

SEQ ID NO: 762399 - DNA, 15 bp, Homo sapiens
catacacatgggtct

SEQ ID NO: 762400 - DNA, 15 bp, Homo sapiens
atacacatgggtctg

SEQ ID NO: 762401 - DNA, 15 bp, Homo sapiens
tacacatgggtctgg

SEQ ID NO: 762402 - DNA, 15 bp, Homo sapiens
acacatgggtctggg

SEQ ID NO: 762403 - DNA, 15 bp, Homo sapiens
cacatgggtctggga

SEQ ID NO: 762404 - DNA, 15 bp, Homo sapiens
acatgggtctgggat

SEQ ID NO: 762405 - DNA, 15 bp, Homo sapiens
catgggtctgggatg

SEQ ID NO: 762406 - DNA, 15 bp, Homo sapiens
atgggtctgggatgc

SEQ ID NO: 762407 - DNA, 15 bp, Homo sapiens
tgggtctgggatgca

SEQ ID NO: 762408 - DNA, 15 bp, Homo sapiens
gggtctgggatgcat

SEQ ID NO: 762409 - DNA, 15 bp, Homo sapiens
ggtctgggatgcatg

SEQ ID NO: 762410 - DNA, 15 bp, Homo sapiens
gtctgggatgcatgg

SEQ ID NO: 762411 - DNA, 15 bp, Homo sapiens
tctgggatgcatggc

SEQ ID NO: 762412 - DNA, 15 bp, Homo sapiens
ctgggatgcatggcc

SEQ ID NO: 762413 - DNA, 15 bp, Homo sapiens
tgggatgcatggcct

SEQ ID NO: 762414 - DNA, 15 bp, Homo sapiens
gggatgcatggcctg

SEQ ID NO: 762415 - DNA, 15 bp, Homo sapiens
ggatgcatggcctgc

SEQ ID NO: 762416 - DNA, 15 bp, Homo sapiens
gatgcatggcctgct

SEQ ID NO: 762417 - DNA, 15 bp, Homo sapiens
atgcatggcctgctc

SEQ ID NO: 762418 - DNA, 15 bp, Homo sapiens
tgcatggcctgctcc

SEQ ID NO: 762419 - DNA, 15 bp, Homo sapiens
gcatggcctgctcct

SEQ ID NO: 762420 - DNA, 15 bp, Homo sapiens
catggcctgctcctc

SEQ ID NO: 762421 - DNA, 15 bp, Homo sapiens
atggcctgctcctct

SEQ ID NO: 762422 - DNA, 15 bp, Homo sapiens
tggcctgctcctctg

SEQ ID NO: 762423 - DNA, 15 bp, Homo sapiens
ggcctgctcctctgg

SEQ ID NO: 762424 - DNA, 15 bp, Homo sapiens
gcctgctcctctgga

SEQ ID NO: 762425 - DNA, 15 bp, Homo sapiens
cctgctcctctggaa

SEQ ID NO: 762426 - DNA, 15 bp, Homo sapiens
ctgctcctctggaag

SEQ ID NO: 762427 - DNA, 15 bp, Homo sapiens
tgctcctctggaagg

SEQ ID NO: 762428 - DNA, 15 bp, Homo sapiens
gctcctctggaagga

SEQ ID NO: 762429 - DNA, 15 bp, Homo sapiens
ctcctctggaaggaa

SEQ ID NO: 762430 - DNA, 15 bp, Homo sapiens
tcctctggaaggaag

SEQ ID NO: 762431 - DNA, 15 bp, Homo sapiens
cctctggaaggaagt

SEQ ID NO: 762432 - DNA, 15 bp, Homo sapiens
ctctggaaggaagtt

SEQ ID NO: 762433 - DNA, 15 bp, Homo sapiens
tctggaaggaagttt

SEQ ID NO: 762434 - DNA, 15 bp, Homo sapiens
ctggaaggaagtttt

SEQ ID NO: 762435 - DNA, 15 bp, Homo sapiens
tggaaggaagttttg

SEQ ID NO: 762436 - DNA, 15 bp, Homo sapiens
ggaaggaagttttgc

SEQ ID NO: 762437 - DNA, 15 bp, Homo sapiens
gaaggaagttttgcc

SEQ ID NO: 762438 - DNA, 15 bp, Homo sapiens
aaggaagttttgcca

SEQ ID NO: 762439 - DNA, 15 bp, Homo sapiens
aggaagttttgccat

SEQ ID NO: 762440 - DNA, 15 bp, Homo sapiens
ggaagttttgccatg

SEQ ID NO: 762441 - DNA, 15 bp, Homo sapiens
gaagttttgccatgg

SEQ ID NO: 762442 - DNA, 15 bp, Homo sapiens
aagttttgccatggg

SEQ ID NO: 762443 - DNA, 15 bp, Homo sapiens
agttttgccatgggc

SEQ ID NO: 762444 - DNA, 15 bp, Homo sapiens
gttttgccatgggcg

SEQ ID NO: 762445 - DNA, 15 bp, Homo sapiens
ttttgccatgggcgg

SEQ ID NO: 762446 - DNA, 15 bp, Homo sapiens
tttgccatgggcggc

SEQ ID NO: 762447 - DNA, 15 bp, Homo sapiens
ttgccatgggcggct

SEQ ID NO: 762448 - DNA, 15 bp, Homo sapiens
tgccatgggcggctg

SEQ ID NO: 762449 - DNA, 15 bp, Homo sapiens
gccatgggcggctgg

SEQ ID NO: 762450 - DNA, 15 bp, Homo sapiens
ccatgggcggctgga

SEQ ID NO: 762451 - DNA, 15 bp, Homo sapiens
catgggcggctggag

SEQ ID NO: 762452 - DNA, 15 bp, Homo sapiens
atgggcggctggagg

SEQ ID NO: 762453 - DNA, 15 bp, Homo sapiens
tgggcggctggaggg

SEQ ID NO: 762454 - DNA, 15 bp, Homo sapiens
gggcggctggagggg

SEQ ID NO: 762455 - DNA, 15 bp, Homo sapiens
ggcggctggaggggc

SEQ ID NO: 762456 - DNA, 15 bp, Homo sapiens
gcggctggaggggct

SEQ ID NO: 762457 - DNA, 15 bp, Homo sapiens
cggctggaggggctt

SEQ ID NO: 762458 - DNA, 15 bp, Homo sapiens
ggctggaggggcttc

SEQ ID NO: 762459 - DNA, 15 bp, Homo sapiens
gctggaggggcttca

SEQ ID NO: 762460 - DNA, 15 bp, Homo sapiens
ctggaggggcttcaa

SEQ ID NO: 762461 - DNA, 15 bp, Homo sapiens
tggaggggcttcaaa

SEQ ID NO: 762462 - DNA, 15 bp, Homo sapiens
ggaggggcttcaaac

SEQ ID NO: 762463 - DNA, 15 bp, Homo sapiens
gaggggcttcaaaca

SEQ ID NO: 762464 - DNA, 15 bp, Homo sapiens
aggggcttcaaacac

SEQ ID NO: 762465 - DNA, 15 bp, Homo sapiens
ggggcttcaaacact

SEQ ID NO: 762466 - DNA, 15 bp, Homo sapiens
gggcttcaaacactg

SEQ ID NO: 762467 - DNA, 15 bp, Homo sapiens
ggcttcaaacactga

SEQ ID NO: 762468 - DNA, 15 bp, Homo sapiens
gcttcaaacactgag

SEQ ID NO: 762469 - DNA, 15 bp, Homo sapiens
cttcaaacactgagc

SEQ ID NO: 762470 - DNA, 15 bp, Homo sapiens
ttcaaacactgagcc

SEQ ID NO: 762471 - DNA, 15 bp, Homo sapiens
tcaaacactgagcca

SEQ ID NO: 762472 - DNA, 15 bp, Homo sapiens
caaacactgagccag

SEQ ID NO: 762473 - DNA, 15 bp, Homo sapiens
aaacactgagccaga

SEQ ID NO: 762474 - DNA, 15 bp, Homo sapiens
aacactgagccagag

SEQ ID NO: 762475 - DNA, 15 bp, Homo sapiens
acactgagccagaga

SEQ ID NO: 762476 - DNA, 15 bp, Homo sapiens
cactgagccagagag

SEQ ID NO: 762477 - DNA, 15 bp, Homo sapiens
actgagccagagaga

SEQ ID NO: 762478 - DNA, 15 bp, Homo sapiens
ctgagccagagagag

SEQ ID NO: 762479 - DNA, 15 bp, Homo sapiens
tgagccagagagagg

SEQ ID NO: 762480 - DNA, 15 bp, Homo sapiens
gagccagagagaggg

SEQ ID NO: 762481 - DNA, 15 bp, Homo sapiens
agccagagagagggt

SEQ ID NO: 762482 - DNA, 15 bp, Homo sapiens
gccagagagagggtt

SEQ ID NO: 762483 - DNA, 15 bp, Homo sapiens
ccagagagagggtta

SEQ ID NO: 762484 - DNA, 15 bp, Homo sapiens
cagagagagggttag

SEQ ID NO: 762485 - DNA, 15 bp, Homo sapiens
agagagagggttagg

SEQ ID NO: 762486 - DNA, 15 bp, Homo sapiens
gagagagggttagga

SEQ ID NO: 762487 - DNA, 15 bp, Homo sapiens
agagagggttaggag

SEQ ID NO: 762488 - DNA, 15 bp, Homo sapiens
gagagggttaggagc

SEQ ID NO: 762489 - DNA, 15 bp, Homo sapiens
agagggttaggagct

SEQ ID NO: 762490 - DNA, 15 bp, Homo sapiens
gagggttaggagctg

SEQ ID NO: 762491 - DNA, 15 bp, Homo sapiens
agggttaggagctga

SEQ ID NO: 762492 - DNA, 15 bp, Homo sapiens
gggttaggagctgag

SEQ ID NO: 762493 - DNA, 15 bp, Homo sapiens
ggttaggagctgagg

SEQ ID NO: 762494 - DNA, 15 bp, Homo sapiens
gttaggagctgaggg

SEQ ID NO: 762495 - DNA, 15 bp, Homo sapiens
ttaggagctgagggc

SEQ ID NO: 762496 - DNA, 15 bp, Homo sapiens
taggagctgagggct

SEQ ID NO: 762497 - DNA, 15 bp, Homo sapiens
aggagctgagggctt

SEQ ID NO: 762498 - DNA, 15 bp, Homo sapiens
ggagctgagggcttc

SEQ ID NO: 762499 - DNA, 15 bp, Homo sapiens
gagctgagggcttca

SEQ ID NO: 762500 - DNA, 15 bp, Homo sapiens
agctgagggcttcat

SEQ ID NO: 762501 - DNA, 15 bp, Homo sapiens
gctgagggcttcata

SEQ ID NO: 762502 - DNA, 15 bp, Homo sapiens
ctgagggcttcatag

SEQ ID NO: 762503 - DNA, 15 bp, Homo sapiens
tgagggcttcatagg

SEQ ID NO: 762504 - DNA, 15 bp, Homo sapiens
gagggcttcatagga

SEQ ID NO: 762505 - DNA, 15 bp, Homo sapiens
agggcttcataggaa

SEQ ID NO: 762506 - DNA, 15 bp, Homo sapiens
gggcttcataggaac

SEQ ID NO: 762507 - DNA, 15 bp, Homo sapiens
ggcttcataggaaca

SEQ ID NO: 762508 - DNA, 15 bp, Homo sapiens
gcttcataggaacat

SEQ ID NO: 762509 - DNA, 15 bp, Homo sapiens
cttcataggaacatc

SEQ ID NO: 762510 - DNA, 15 bp, Homo sapiens
ttcataggaacatct

SEQ ID NO: 762511 - DNA, 15 bp, Homo sapiens
tcataggaacatctg

SEQ ID NO: 762512 - DNA, 15 bp, Homo sapiens
cataggaacatctgt

SEQ ID NO: 762513 - DNA, 15 bp, Homo sapiens
ataggaacatctgtc

SEQ ID NO: 762514 - DNA, 15 bp, Homo sapiens
taggaacatctgtct

SEQ ID NO: 762515 - DNA, 15 bp, Homo sapiens
aggaacatctgtctt

SEQ ID NO: 762516 - DNA, 15 bp, Homo sapiens
ggaacatctgtcttt

SEQ ID NO: 762517 - DNA, 15 bp, Homo sapiens
gaacatctgtctttt

SEQ ID NO: 762518 - DNA, 15 bp, Homo sapiens
aacatctgtctttta

SEQ ID NO: 762519 - DNA, 15 bp, Homo sapiens
acatctgtcttttac

SEQ ID NO: 762520 - DNA, 15 bp, Homo sapiens
catctgtcttttact

SEQ ID NO: 762521 - DNA, 15 bp, Homo sapiens
atctgtcttttactc

SEQ ID NO: 762522 - DNA, 15 bp, Homo sapiens
tctgtcttttactct

SEQ ID NO: 762523 - DNA, 15 bp, Homo sapiens
ctgtcttttactctc

SEQ ID NO: 762524 - DNA, 15 bp, Homo sapiens
tgtcttttactctct

SEQ ID NO: 762525 - DNA, 15 bp, Homo sapiens
gtcttttactctctc

SEQ ID NO: 762526 - DNA, 15 bp, Homo sapiens
tcttttactctctct

SEQ ID NO: 762527 - DNA, 15 bp, Homo sapiens
cttttactctctctc

SEQ ID NO: 762528 - DNA, 15 bp, Homo sapiens
ttttactctctctct

SEQ ID NO: 762529 - DNA, 15 bp, Homo sapiens
tttactctctctctt

SEQ ID NO: 762530 - DNA, 15 bp, Homo sapiens
ttactctctctcttc

SEQ ID NO: 762531 - DNA, 15 bp, Homo sapiens
tactctctctcttca

SEQ ID NO: 762532 - DNA, 15 bp, Homo sapiens
actctctctcttcat

SEQ ID NO: 762533 - DNA, 15 bp, Homo sapiens
ctctctctcttcata

SEQ ID NO: 762534 - DNA, 15 bp, Homo sapiens
tctctctcttcatat

SEQ ID NO: 762535 - DNA, 15 bp, Homo sapiens
ctctctcttcatatt

SEQ ID NO: 762536 - DNA, 15 bp, Homo sapiens
tctctcttcatattt

SEQ ID NO: 762537 - DNA, 15 bp, Homo sapiens
ctctcttcatatttc

SEQ ID NO: 762538 - DNA, 15 bp, Homo sapiens
tctcttcatatttca

SEQ ID NO: 762539 - DNA, 15 bp, Homo sapiens
ctcttcatatttcaa

SEQ ID NO: 762540 - DNA, 15 bp, Homo sapiens
tcttcatatttcaaa

SEQ ID NO: 762541 - DNA, 15 bp, Homo sapiens
cttcatatttcaaag

SEQ ID NO: 762542 - DNA, 15 bp, Homo sapiens
ttcatatttcaaagc

SEQ ID NO: 762543 - DNA, 15 bp, Homo sapiens
tcatatttcaaagct

SEQ ID NO: 762544 - DNA, 15 bp, Homo sapiens
catatttcaaagctc

SEQ ID NO: 762545 - DNA, 15 bp, Homo sapiens
atatttcaaagctct

SEQ ID NO: 762546 - DNA, 15 bp, Homo sapiens
tatttcaaagctctc

SEQ ID NO: 762547 - DNA, 15 bp, Homo sapiens
atttcaaagctctct

SEQ ID NO: 762548 - DNA, 15 bp, Homo sapiens
tttcaaagctctctc

SEQ ID NO: 762549 - DNA, 15 bp, Homo sapiens
ttcaaagctctctct

SEQ ID NO: 762550 - DNA, 15 bp, Homo sapiens
tcaaagctctctctc

SEQ ID NO: 762551 - DNA, 15 bp, Homo sapiens
caaagctctctctct

SEQ ID NO: 762552 - DNA, 15 bp, Homo sapiens
aaagctctctctctc

SEQ ID NO: 762553 - DNA, 15 bp, Homo sapiens
aagctctctctctct

SEQ ID NO: 762554 - DNA, 15 bp, Homo sapiens
agctctctctctctc

SEQ ID NO: 762555 - DNA, 15 bp, Homo sapiens
gctctctctctctcc

SEQ ID NO: 762556 - DNA, 15 bp, Homo sapiens
ctctctctctctccc

SEQ ID NO: 762557 - DNA, 15 bp, Homo sapiens
tctctctctctccct

SEQ ID NO: 762558 - DNA, 15 bp, Homo sapiens
ctctctctctccctc

SEQ ID NO: 762559 - DNA, 15 bp, Homo sapiens
tctctctctccctct

SEQ ID NO: 762560 - DNA, 15 bp, Homo sapiens
ctctctctccctctc

SEQ ID NO: 762561 - DNA, 15 bp, Homo sapiens
tctctctccctctct

SEQ ID NO: 762562 - DNA, 15 bp, Homo sapiens
ctctctccctctcta

SEQ ID NO: 762563 - DNA, 15 bp, Homo sapiens
tctctccctctctaa

SEQ ID NO: 762564 - DNA, 15 bp, Homo sapiens
ctctccctctctaac

SEQ ID NO: 762565 - DNA, 15 bp, Homo sapiens
tctccctctctaaca

SEQ ID NO: 762566 - DNA, 15 bp, Homo sapiens
ctccctctctaacac

SEQ ID NO: 762567 - DNA, 15 bp, Homo sapiens
tccctctctaacaca

SEQ ID NO: 762568 - DNA, 15 bp, Homo sapiens
ccctctctaacacac

SEQ ID NO: 762569 - DNA, 15 bp, Homo sapiens
cctctctaacacaca

SEQ ID NO: 762570 - DNA, 15 bp, Homo sapiens
ctctctaacacacac

SEQ ID NO: 762571 - DNA, 15 bp, Homo sapiens
tctctaacacacaca

SEQ ID NO: 762572 - DNA, 15 bp, Homo sapiens
ctctaacacacacac

SEQ ID NO: 762573 - DNA, 15 bp, Homo sapiens
tctaacacacacaca

SEQ ID NO: 762574 - DNA, 15 bp, Homo sapiens
ctaacacacacacac

SEQ ID NO: 762575 - DNA, 15 bp, Homo sapiens
taacacacacacaca

SEQ ID NO: 762576 - DNA, 15 bp, Homo sapiens
aacacacacacacac

SEQ ID NO: 762577 - DNA, 15 bp, Homo sapiens
acacacacacacact

SEQ ID NO: 762578 - DNA, 15 bp, Homo sapiens
cacacacacacactc

SEQ ID NO: 762579 - DNA, 15 bp, Homo sapiens
acacacacacactct

SEQ ID NO: 762580 - DNA, 15 bp, Homo sapiens
cacacacacactctc

SEQ ID NO: 762581 - DNA, 15 bp, Homo sapiens
acacacacactctct

SEQ ID NO: 762582 - DNA, 15 bp, Homo sapiens
cacacacactctctc

SEQ ID NO: 762583 - DNA, 15 bp, Homo sapiens
acacacactctctct

SEQ ID NO: 762584 - DNA, 15 bp, Homo sapiens
cacacactctctctc

SEQ ID NO: 762585 - DNA, 15 bp, Homo sapiens
acacactctctctct

SEQ ID NO: 762586 - DNA, 15 bp, Homo sapiens
cacactctctctctc

SEQ ID NO: 762587 - DNA, 15 bp, Homo sapiens
acactctctctctct

SEQ ID NO: 762588 - DNA, 15 bp, Homo sapiens
cactctctctctctc

SEQ ID NO: 762589 - DNA, 15 bp, Homo sapiens
actctctctctctct

SEQ ID NO: 762590 - DNA, 15 bp, Homo sapiens
ctctctctctctttc

SEQ ID NO: 762591 - DNA, 15 bp, Homo sapiens
tctctctctctttct

SEQ ID NO: 762592 - DNA, 15 bp, Homo sapiens
ctctctctctttctc

SEQ ID NO: 762593 - DNA, 15 bp, Homo sapiens
tttctctctctctcg

SEQ ID NO: 762594 - DNA, 15 bp, Homo sapiens
ttctctctctctcgg

SEQ ID NO: 762595 - DNA, 15 bp, Homo sapiens
tctctctctctcgga

SEQ ID NO: 762596 - DNA, 15 bp, Homo sapiens
ctctctctctcggaa

SEQ ID NO: 762597 - DNA, 15 bp, Homo sapiens
tctctctctcggaac

SEQ ID NO: 762598 - DNA, 15 bp, Homo sapiens
ctctctctcggaaca

SEQ ID NO: 762599 - DNA, 15 bp, Homo sapiens
tctctctcggaacat

SEQ ID NO: 762600 - DNA, 15 bp, Homo sapiens
ctctctcggaacatc

SEQ ID NO: 762601 - DNA, 15 bp, Homo sapiens
tctctcggaacatct

SEQ ID NO: 762602 - DNA, 15 bp, Homo sapiens
ctctcggaacatctt

SEQ ID NO: 762603 - DNA, 15 bp, Homo sapiens
tctcggaacatcttt

SEQ ID NO: 762604 - DNA, 15 bp, Homo sapiens
ctcggaacatctttc

SEQ ID NO: 762605 - DNA, 15 bp, Homo sapiens
tcggaacatctttct

SEQ ID NO: 762606 - DNA, 15 bp, Homo sapiens
cggaacatctttctc

SEQ ID NO: 762607 - DNA, 15 bp, Homo sapiens
ggaacatctttctct

SEQ ID NO: 762608 - DNA, 15 bp, Homo sapiens
gaacatctttctctc

SEQ ID NO: 762609 - DNA, 15 bp, Homo sapiens
aacatctttctctct

SEQ ID NO: 762610 - DNA, 15 bp, Homo sapiens
acatctttctctctc

SEQ ID NO: 762611 - DNA, 15 bp, Homo sapiens
catctttctctctct

SEQ ID NO: 762612 - DNA, 15 bp, Homo sapiens
atctttctctctctt

SEQ ID NO: 762613 - DNA, 15 bp, Homo sapiens
tctttctctctcttt

SEQ ID NO: 762614 - DNA, 15 bp, Homo sapiens
ctttctctctctttc

SEQ ID NO: 762615 - DNA, 15 bp, Homo sapiens
tttctctctctttct

SEQ ID NO: 762616 - DNA, 15 bp, Homo sapiens
ttctctctctttctt

SEQ ID NO: 762617 - DNA, 15 bp, Homo sapiens
tctctctctttcttc

SEQ ID NO: 762618 - DNA, 15 bp, Homo sapiens
ctctctctttcttca

SEQ ID NO: 762619 - DNA, 15 bp, Homo sapiens
tctctctttcttcat

SEQ ID NO: 762620 - DNA, 15 bp, Homo sapiens
ctctctttcttcata

SEQ ID NO: 762621 - DNA, 15 bp, Homo sapiens
tctctttcttcatat

SEQ ID NO: 762622 - DNA, 15 bp, Homo sapiens
ctctttcttcatatt

SEQ ID NO: 762623 - DNA, 15 bp, Homo sapiens
tctttcttcatattt

SEQ ID NO: 762624 - DNA, 15 bp, Homo sapiens
ctttcttcatatttc

SEQ ID NO: 762625 - DNA, 15 bp, Homo sapiens
tttcttcatatttca

SEQ ID NO: 762626 - DNA, 15 bp, Homo sapiens
ttcttcatatttcaa

SEQ ID NO: 762627 - DNA, 15 bp, Homo sapiens
ctccctctctaacaa

SEQ ID NO: 762628 - DNA, 15 bp, Homo sapiens
tccctctctaacaaa

SEQ ID NO: 762629 - DNA, 15 bp, Homo sapiens
ccctctctaacaaac

SEQ ID NO: 762630 - DNA, 15 bp, Homo sapiens
cctctctaacaaaca

SEQ ID NO: 762631 - DNA, 15 bp, Homo sapiens
ctctctaacaaacac

SEQ ID NO: 762632 - DNA, 15 bp, Homo sapiens
tctctaacaaacaca

SEQ ID NO: 762633 - DNA, 15 bp, Homo sapiens
ctctaacaaacacac

SEQ ID NO: 762634 - DNA, 15 bp, Homo sapiens
tctaacaaacacaca

SEQ ID NO: 762635 - DNA, 15 bp, Homo sapiens
ctaacaaacacacac

SEQ ID NO: 762636 - DNA, 15 bp, Homo sapiens
taacaaacacacaca

SEQ ID NO: 762637 - DNA, 15 bp, Homo sapiens
aacaaacacacacac

SEQ ID NO: 762638 - DNA, 15 bp, Homo sapiens
acaaacacacacaca

SEQ ID NO: 762639 - DNA, 15 bp, Homo sapiens
caaacacacacacac

SEQ ID NO: 762640 - DNA, 15 bp, Homo sapiens
aaacacacacacaca

SEQ ID NO: 762641 - DNA, 15 bp, Homo sapiens
tctctctctctctcg

SEQ ID NO: 762642 - DNA, 15 bp, Homo sapiens
ctctctctctctcgg

SEQ ID NO: 762643 - DNA, 15 bp, Homo sapiens
ctctcggaacatctc

SEQ ID NO: 762644 - DNA, 15 bp, Homo sapiens
tctcggaacatctct

SEQ ID NO: 762645 - DNA, 15 bp, Homo sapiens
ctcggaacatctctc

SEQ ID NO: 762646 - DNA, 15 bp, Homo sapiens
tcggaacatctctct

SEQ ID NO: 762647 - DNA, 15 bp, Homo sapiens
cggaacatctctctt

SEQ ID NO: 762648 - DNA, 15 bp, Homo sapiens
ggaacatctctcttt

SEQ ID NO: 762649 - DNA, 15 bp, Homo sapiens
gaacatctctctttc

SEQ ID NO: 762650 - DNA, 15 bp, Homo sapiens
aacatctctctttcc

SEQ ID NO: 762651 - DNA, 15 bp, Homo sapiens
acatctctctttccc

SEQ ID NO: 762652 - DNA, 15 bp, Homo sapiens
catctctctttccct

SEQ ID NO: 762653 - DNA, 15 bp, Homo sapiens
atctctctttccctc

SEQ ID NO: 762654 - DNA, 15 bp, Homo sapiens
tctctctttccctct

SEQ ID NO: 762655 - DNA, 15 bp, Homo sapiens
ctctctttccctctc

SEQ ID NO: 762656 - DNA, 15 bp, Homo sapiens
tctctttccctctct

SEQ ID NO: 762657 - DNA, 15 bp, Homo sapiens
ctctttccctctctc

SEQ ID NO: 762658 - DNA, 15 bp, Homo sapiens
tctttccctctctct

SEQ ID NO: 762659 - DNA, 15 bp, Homo sapiens
ctttccctctctctc

SEQ ID NO: 762660 - DNA, 15 bp, Homo sapiens
tttccctctctctct

SEQ ID NO: 762661 - DNA, 15 bp, Homo sapiens
ttccctctctctctt

SEQ ID NO: 762662 - DNA, 15 bp, Homo sapiens
tccctctctctcttc

SEQ ID NO: 762663 - DNA, 15 bp, Homo sapiens
ccctctctctcttca

SEQ ID NO: 762664 - DNA, 15 bp, Homo sapiens
cctctctctcttcat

SEQ ID NO: 762665 - DNA, 15 bp, Homo sapiens
ctctctccctctctg

SEQ ID NO: 762666 - DNA, 15 bp, Homo sapiens
tctctccctctctgt

SEQ ID NO: 762667 - DNA, 15 bp, Homo sapiens
ctctccctctctgtc

SEQ ID NO: 762668 - DNA, 15 bp, Homo sapiens
tctccctctctgtct

SEQ ID NO: 762669 - DNA, 15 bp, Homo sapiens
ctccctctctgtctc

SEQ ID NO: 762670 - DNA, 15 bp, Homo sapiens
tccctctctgtctct

SEQ ID NO: 762671 - DNA, 15 bp, Homo sapiens
ccctctctgtctctc

SEQ ID NO: 762672 - DNA, 15 bp, Homo sapiens
cctctctgtctctct

SEQ ID NO: 762673 - DNA, 15 bp, Homo sapiens
ctctctgtctctctc

SEQ ID NO: 762674 - DNA, 15 bp, Homo sapiens
tctctgtctctctcc

SEQ ID NO: 762675 - DNA, 15 bp, Homo sapiens
ctctgtctctctccc

SEQ ID NO: 762676 - DNA, 15 bp, Homo sapiens
tctgtctctctccct

SEQ ID NO: 762677 - DNA, 15 bp, Homo sapiens
ctgtctctctccctc

SEQ ID NO: 762678 - DNA, 15 bp, Homo sapiens
tgtctctctccctct

SEQ ID NO: 762679 - DNA, 15 bp, Homo sapiens
gtctctctccctctc

SEQ ID NO: 762680 - DNA, 15 bp, Homo sapiens
ctctctctctctcta

SEQ ID NO: 762681 - DNA, 15 bp, Homo sapiens
tctctctctctctag

SEQ ID NO: 762682 - DNA, 15 bp, Homo sapiens
ctctctctctctagg

SEQ ID NO: 762683 - DNA, 15 bp, Homo sapiens
tctctctctctagga

SEQ ID NO: 762684 - DNA, 15 bp, Homo sapiens
ctctctctctaggaa

SEQ ID NO: 762685 - DNA, 15 bp, Homo sapiens
tctctctctaggaac

SEQ ID NO: 762686 - DNA, 15 bp, Homo sapiens
ctctctctaggaaca

SEQ ID NO: 762687 - DNA, 15 bp, Homo sapiens
tctctctaggaacat

SEQ ID NO: 762688 - DNA, 15 bp, Homo sapiens
ctctctaggaacatc

SEQ ID NO: 762689 - DNA, 15 bp, Homo sapiens
tctctaggaacatct

SEQ ID NO: 762690 - DNA, 15 bp, Homo sapiens
ctctaggaacatctc

SEQ ID NO: 762691 - DNA, 15 bp, Homo sapiens
tctaggaacatctct

SEQ ID NO: 762692 - DNA, 15 bp, Homo sapiens
ctaggaacatctctc

SEQ ID NO: 762693 - DNA, 15 bp, Homo sapiens
taggaacatctctct

SEQ ID NO: 762694 - DNA, 15 bp, Homo sapiens
aggaacatctctctt

SEQ ID NO: 762695 - DNA, 15 bp, Homo sapiens
tctttccctctctcc

SEQ ID NO: 762696 - DNA, 15 bp, Homo sapiens
ctttccctctctcca

SEQ ID NO: 762697 - DNA, 15 bp, Homo sapiens
tttccctctctccat

SEQ ID NO: 762698 - DNA, 15 bp, Homo sapiens
ttccctctctccatg

SEQ ID NO: 762699 - DNA, 15 bp, Homo sapiens
tccctctctccatgt

SEQ ID NO: 762700 - DNA, 15 bp, Homo sapiens
ccctctctccatgtt

SEQ ID NO: 762701 - DNA, 15 bp, Homo sapiens
cctctctccatgttt

SEQ ID NO: 762702 - DNA, 15 bp, Homo sapiens
ctctctccatgtttc

SEQ ID NO: 762703 - DNA, 15 bp, Homo sapiens
tctctccatgtttca

SEQ ID NO: 762704 - DNA, 15 bp, Homo sapiens
ctctccatgtttcaa

SEQ ID NO: 762705 - DNA, 15 bp, Homo sapiens
tctccatgtttcaaa

SEQ ID NO: 762706 - DNA, 15 bp, Homo sapiens
ctccatgtttcaaaa

SEQ ID NO: 762707 - DNA, 15 bp, Homo sapiens
tccatgtttcaaaac

SEQ ID NO: 762708 - DNA, 15 bp, Homo sapiens
ccatgtttcaaaact

SEQ ID NO: 762709 - DNA, 15 bp, Homo sapiens
catgtttcaaaactc

SEQ ID NO: 762710 - DNA, 15 bp, Homo sapiens
atgtttcaaaactct

SEQ ID NO: 762711 - DNA, 15 bp, Homo sapiens
tgtttcaaaactctg

SEQ ID NO: 762712 - DNA, 15 bp, Homo sapiens
gtttcaaaactctgt

SEQ ID NO: 762713 - DNA, 15 bp, Homo sapiens
tttcaaaactctgtc

SEQ ID NO: 762714 - DNA, 15 bp, Homo sapiens
ttcaaaactctgtct

SEQ ID NO: 762715 - DNA, 15 bp, Homo sapiens
tcaaaactctgtctc

SEQ ID NO: 762716 - DNA, 15 bp, Homo sapiens
caaaactctgtctct

SEQ ID NO: 762717 - DNA, 15 bp, Homo sapiens
aaaactctgtctctc

SEQ ID NO: 762718 - DNA, 15 bp, Homo sapiens
aaactctgtctctct

SEQ ID NO: 762719 - DNA, 15 bp, Homo sapiens
aactctgtctctctc

SEQ ID NO: 762720 - DNA, 15 bp, Homo sapiens
actctgtctctctct

SEQ ID NO: 762721 - DNA, 15 bp, Homo sapiens
ctctgtctctctcta

SEQ ID NO: 762722 - DNA, 15 bp, Homo sapiens
tctgtctctctctaa

SEQ ID NO: 762723 - DNA, 15 bp, Homo sapiens
ctgtctctctctaac

SEQ ID NO: 762724 - DNA, 15 bp, Homo sapiens
tgtctctctctaact

SEQ ID NO: 762725 - DNA, 15 bp, Homo sapiens
gtctctctctaactc

SEQ ID NO: 762726 - DNA, 15 bp, Homo sapiens
tctctctctaactct

SEQ ID NO: 762727 - DNA, 15 bp, Homo sapiens
ctctctctaactctc

SEQ ID NO: 762728 - DNA, 15 bp, Homo sapiens
tctctctaactctct

SEQ ID NO: 762729 - DNA, 15 bp, Homo sapiens
ctctctaactctctc

SEQ ID NO: 762730 - DNA, 15 bp, Homo sapiens
tctctaactctctct

SEQ ID NO: 762731 - DNA, 15 bp, Homo sapiens
ctctaactctctctc

SEQ ID NO: 762732 - DNA, 15 bp, Homo sapiens
tctaactctctctct

SEQ ID NO: 762733 - DNA, 15 bp, Homo sapiens
ctaactctctctctc

SEQ ID NO: 762734 - DNA, 15 bp, Homo sapiens
taactctctctctct

SEQ ID NO: 762735 - DNA, 15 bp, Homo sapiens
aactctctctctctc

SEQ ID NO: 762736 - DNA, 15 bp, Homo sapiens
ctctttctctctctg

SEQ ID NO: 762737 - DNA, 15 bp, Homo sapiens
tctttctctctctgt

SEQ ID NO: 762738 - DNA, 15 bp, Homo sapiens
ctttctctctctgtc

SEQ ID NO: 762739 - DNA, 15 bp, Homo sapiens
tttctctctctgtct

SEQ ID NO: 762740 - DNA, 15 bp, Homo sapiens
ttctctctctgtctc

SEQ ID NO: 762741 - DNA, 15 bp, Homo sapiens
tctctctctgtctct

SEQ ID NO: 762742 - DNA, 15 bp, Homo sapiens
ctctctctgtctctc

SEQ ID NO: 762743 - DNA, 15 bp, Homo sapiens
tctctctgtctctct

SEQ ID NO: 762744 - DNA, 15 bp, Homo sapiens
ctctctgtctctctg

SEQ ID NO: 762745 - DNA, 15 bp, Homo sapiens
tctctgtctctctga

SEQ ID NO: 762746 - DNA, 15 bp, Homo sapiens
ctctgtctctctgat

SEQ ID NO: 762747 - DNA, 15 bp, Homo sapiens
tctgtctctctgata

SEQ ID NO: 762748 - DNA, 15 bp, Homo sapiens
ctgtctctctgatag

SEQ ID NO: 762749 - DNA, 15 bp, Homo sapiens
tgtctctctgataga

SEQ ID NO: 762750 - DNA, 15 bp, Homo sapiens
gtctctctgatagat

SEQ ID NO: 762751 - DNA, 15 bp, Homo sapiens
tctctctgatagatg

SEQ ID NO: 762752 - DNA, 15 bp, Homo sapiens
ctctctgatagatgc

SEQ ID NO: 762753 - DNA, 15 bp, Homo sapiens
tctctgatagatgca

SEQ ID NO: 762754 - DNA, 15 bp, Homo sapiens
ctctgatagatgcat

SEQ ID NO: 762755 - DNA, 15 bp, Homo sapiens
tctgatagatgcata

SEQ ID NO: 762756 - DNA, 15 bp, Homo sapiens
ctgatagatgcatac

SEQ ID NO: 762757 - DNA, 15 bp, Homo sapiens
tgatagatgcataca

SEQ ID NO: 762758 - DNA, 15 bp, Homo sapiens
gatagatgcatacag

SEQ ID NO: 762759 - DNA, 15 bp, Homo sapiens
atagatgcatacaga

SEQ ID NO: 762760 - DNA, 15 bp, Homo sapiens
tagatgcatacagat

SEQ ID NO: 762761 - DNA, 15 bp, Homo sapiens
agatgcatacagatt

SEQ ID NO: 762762 - DNA, 15 bp, Homo sapiens
gatgcatacagattt

SEQ ID NO: 762763 - DNA, 15 bp, Homo sapiens
atgcatacagatttg

SEQ ID NO: 762764 - DNA, 15 bp, Homo sapiens
tgcatacagatttgg

SEQ ID NO: 762765 - DNA, 15 bp, Homo sapiens
gcatacagatttggt

SEQ ID NO: 762766 - DNA, 15 bp, Homo sapiens
catacagatttggta

SEQ ID NO: 762767 - DNA, 15 bp, Homo sapiens
atacagatttggtat

SEQ ID NO: 762768 - DNA, 15 bp, Homo sapiens
tacagatttggtatt

SEQ ID NO: 762769 - DNA, 15 bp, Homo sapiens
acagatttggtattt

SEQ ID NO: 762770 - DNA, 15 bp, Homo sapiens
cagatttggtattta

SEQ ID NO: 762771 - DNA, 15 bp, Homo sapiens
agatttggtatttaa

SEQ ID NO: 762772 - DNA, 15 bp, Homo sapiens
gatttggtatttaaa

SEQ ID NO: 762773 - DNA, 15 bp, Homo sapiens
atttggtatttaaaa

SEQ ID NO: 762774 - DNA, 15 bp, Homo sapiens
tttggtatttaaaaa

SEQ ID NO: 762775 - DNA, 15 bp, Homo sapiens
ttggtatttaaaaac

SEQ ID NO: 762776 - DNA, 15 bp, Homo sapiens
tggtatttaaaaaca

SEQ ID NO: 762777 - DNA, 15 bp, Homo sapiens
ggtatttaaaaacat

SEQ ID NO: 762778 - DNA, 15 bp, Homo sapiens
gtatttaaaaacatc

SEQ ID NO: 762779 - DNA, 15 bp, Homo sapiens
tatttaaaaacatca

SEQ ID NO: 762780 - DNA, 15 bp, Homo sapiens
atttaaaaacatcaa

SEQ ID NO: 762781 - DNA, 15 bp, Homo sapiens
tttaaaaacatcaac

SEQ ID NO: 762782 - DNA, 15 bp, Homo sapiens
ttaaaaacatcaact

SEQ ID NO: 762783 - DNA, 15 bp, Homo sapiens
taaaaacatcaactc

SEQ ID NO: 762784 - DNA, 15 bp, Homo sapiens
aaaaacatcaactct

SEQ ID NO: 762785 - DNA, 15 bp, Homo sapiens
aaaacatcaactctg

SEQ ID NO: 762786 - DNA, 15 bp, Homo sapiens
aaacatcaactctga

SEQ ID NO: 762787 - DNA, 15 bp, Homo sapiens
aacatcaactctgac

SEQ ID NO: 762788 - DNA, 15 bp, Homo sapiens
acatcaactctgact

SEQ ID NO: 762789 - DNA, 15 bp, Homo sapiens
catcaactctgactg

SEQ ID NO: 762790 - DNA, 15 bp, Homo sapiens
atcaactctgactgt

SEQ ID NO: 762791 - DNA, 15 bp, Homo sapiens
tcaactctgactgtg

SEQ ID NO: 762792 - DNA, 15 bp, Homo sapiens
caactctgactgtgt

SEQ ID NO: 762793 - DNA, 15 bp, Homo sapiens
aactctgactgtgtt

SEQ ID NO: 762794 - DNA, 15 bp, Homo sapiens
actctgactgtgttc

SEQ ID NO: 762795 - DNA, 15 bp, Homo sapiens
ctctgactgtgttct

SEQ ID NO: 762796 - DNA, 15 bp, Homo sapiens
tctgactgtgttctt

SEQ ID NO: 762797 - DNA, 15 bp, Homo sapiens
ctgactgtgttcttg

SEQ ID NO: 762798 - DNA, 15 bp, Homo sapiens
tgactgtgttcttgg

SEQ ID NO: 762799 - DNA, 15 bp, Homo sapiens
gactgtgttcttggt

SEQ ID NO: 762800 - DNA, 15 bp, Homo sapiens
actgtgttcttggtt

SEQ ID NO: 762801 - DNA, 15 bp, Homo sapiens
ctgtgttcttggttt

SEQ ID NO: 762802 - DNA, 15 bp, Homo sapiens
tgtgttcttggtttc

SEQ ID NO: 762803 - DNA, 15 bp, Homo sapiens
gtgttcttggtttct

SEQ ID NO: 762804 - DNA, 15 bp, Homo sapiens
tgttcttggtttctc

SEQ ID NO: 762805 - DNA, 15 bp, Homo sapiens
gttcttggtttctct

SEQ ID NO: 762806 - DNA, 15 bp, Homo sapiens
ttcttggtttctctc

SEQ ID NO: 762807 - DNA, 15 bp, Homo sapiens
tcttggtttctctct

SEQ ID NO: 762808 - DNA, 15 bp, Homo sapiens
cttggtttctctcta

SEQ ID NO: 762809 - DNA, 15 bp, Homo sapiens
ttggtttctctctaa

SEQ ID NO: 762810 - DNA, 15 bp, Homo sapiens
tggtttctctctaag

SEQ ID NO: 762811 - DNA, 15 bp, Homo sapiens
ggtttctctctaagt

SEQ ID NO: 762812 - DNA, 15 bp, Homo sapiens
gtttctctctaagta

SEQ ID NO: 762813 - DNA, 15 bp, Homo sapiens
tttctctctaagtat

SEQ ID NO: 762814 - DNA, 15 bp, Homo sapiens
ttctctctaagtata

SEQ ID NO: 762815 - DNA, 15 bp, Homo sapiens
tctctctaagtataa

SEQ ID NO: 762816 - DNA, 15 bp, Homo sapiens
ctctctaagtataag

SEQ ID NO: 762817 - DNA, 15 bp, Homo sapiens
tctctaagtataaga

SEQ ID NO: 762818 - DNA, 15 bp, Homo sapiens
ctctaagtataagaa

SEQ ID NO: 762819 - DNA, 15 bp, Homo sapiens
tctaagtataagaag

SEQ ID NO: 762820 - DNA, 15 bp, Homo sapiens
ctaagtataagaagc

SEQ ID NO: 762821 - DNA, 15 bp, Homo sapiens
taagtataagaagcc

SEQ ID NO: 762822 - DNA, 15 bp, Homo sapiens
aagtataagaagcca

SEQ ID NO: 762823 - DNA, 15 bp, Homo sapiens
agtataagaagccaa

SEQ ID NO: 762824 - DNA, 15 bp, Homo sapiens
gtataagaagccaac

SEQ ID NO: 762825 - DNA, 15 bp, Homo sapiens
tataagaagccaaca

SEQ ID NO: 762826 - DNA, 15 bp, Homo sapiens
ataagaagccaacaa

SEQ ID NO: 762827 - DNA, 15 bp, Homo sapiens
taagaagccaacaag

SEQ ID NO: 762828 - DNA, 15 bp, Homo sapiens
aagaagccaacaagg

SEQ ID NO: 762829 - DNA, 15 bp, Homo sapiens
agaagccaacaaggc

SEQ ID NO: 762830 - DNA, 15 bp, Homo sapiens
gaagccaacaaggct

SEQ ID NO: 762831 - DNA, 15 bp, Homo sapiens
aagccaacaaggctc

SEQ ID NO: 762832 - DNA, 15 bp, Homo sapiens
agccaacaaggctcc

SEQ ID NO: 762833 - DNA, 15 bp, Homo sapiens
gccaacaaggctcct

SEQ ID NO: 762834 - DNA, 15 bp, Homo sapiens
ccaacaaggctcctt

SEQ ID NO: 762835 - DNA, 15 bp, Homo sapiens
caacaaggctccttg

SEQ ID NO: 762836 - DNA, 15 bp, Homo sapiens
aacaaggctccttga

SEQ ID NO: 762837 - DNA, 15 bp, Homo sapiens
acaaggctccttgaa

SEQ ID NO: 762838 - DNA, 15 bp, Homo sapiens
caaggctccttgaag

SEQ ID NO: 762839 - DNA, 15 bp, Homo sapiens
aaggctccttgaaga

SEQ ID NO: 762840 - DNA, 15 bp, Homo sapiens
aggctccttgaagat

SEQ ID NO: 762841 - DNA, 15 bp, Homo sapiens
ggctccttgaagatt

SEQ ID NO: 762842 - DNA, 15 bp, Homo sapiens
gctccttgaagattc

SEQ ID NO: 762843 - DNA, 15 bp, Homo sapiens
ctccttgaagattcc

SEQ ID NO: 762844 - DNA, 15 bp, Homo sapiens
tccttgaagattccc

SEQ ID NO: 762845 - DNA, 15 bp, Homo sapiens
ccttgaagattccct

SEQ ID NO: 762846 - DNA, 15 bp, Homo sapiens
cttgaagattccctc

SEQ ID NO: 762847 - DNA, 15 bp, Homo sapiens
ttgaagattccctct

SEQ ID NO: 762848 - DNA, 15 bp, Homo sapiens
tgaagattccctctt

SEQ ID NO: 762849 - DNA, 15 bp, Homo sapiens
gaagattccctcttt

SEQ ID NO: 762850 - DNA, 15 bp, Homo sapiens
aagattccctctttt

SEQ ID NO: 762851 - DNA, 15 bp, Homo sapiens
agattccctcttttg

SEQ ID NO: 762852 - DNA, 15 bp, Homo sapiens
gattccctcttttga

SEQ ID NO: 762853 - DNA, 15 bp, Homo sapiens
attccctcttttgat

SEQ ID NO: 762854 - DNA, 15 bp, Homo sapiens
ttccctcttttgata

SEQ ID NO: 762855 - DNA, 15 bp, Homo sapiens
tccctcttttgatat

SEQ ID NO: 762856 - DNA, 15 bp, Homo sapiens
ccctcttttgatatt

SEQ ID NO: 762857 - DNA, 15 bp, Homo sapiens
cctcttttgatatta

SEQ ID NO: 762858 - DNA, 15 bp, Homo sapiens
ctcttttgatattag

SEQ ID NO: 762859 - DNA, 15 bp, Homo sapiens
tcttttgatattaga

SEQ ID NO: 762860 - DNA, 15 bp, Homo sapiens
cttttgatattagaa

SEQ ID NO: 762861 - DNA, 15 bp, Homo sapiens
ttttgatattagaat

SEQ ID NO: 762862 - DNA, 15 bp, Homo sapiens
tttgatattagaatg

SEQ ID NO: 762863 - DNA, 15 bp, Homo sapiens
ttgatattagaatga

SEQ ID NO: 762864 - DNA, 15 bp, Homo sapiens
tgatattagaatgat

SEQ ID NO: 762865 - DNA, 15 bp, Homo sapiens
gatattagaatgatc

SEQ ID NO: 762866 - DNA, 15 bp, Homo sapiens
atattagaatgatct

SEQ ID NO: 762867 - DNA, 15 bp, Homo sapiens
tattagaatgatctt

SEQ ID NO: 762868 - DNA, 15 bp, Homo sapiens
attagaatgatcttg

SEQ ID NO: 762869 - DNA, 15 bp, Homo sapiens
ttagaatgatcttga

SEQ ID NO: 762870 - DNA, 15 bp, Homo sapiens
tagaatgatcttgaa

SEQ ID NO: 762871 - DNA, 15 bp, Homo sapiens
agaatgatcttgaaa

SEQ ID NO: 762872 - DNA, 15 bp, Homo sapiens
gaatgatcttgaaag

SEQ ID NO: 762873 - DNA, 15 bp, Homo sapiens
aatgatcttgaaagg

SEQ ID NO: 762874 - DNA, 15 bp, Homo sapiens
atgatcttgaaagga

SEQ ID NO: 762875 - DNA, 15 bp, Homo sapiens
tgatcttgaaaggag

SEQ ID NO: 762876 - DNA, 15 bp, Homo sapiens
gatcttgaaaggagc

SEQ ID NO: 762877 - DNA, 15 bp, Homo sapiens
atcttgaaaggagct

SEQ ID NO: 762878 - DNA, 15 bp, Homo sapiens
tcttgaaaggagctc

SEQ ID NO: 762879 - DNA, 15 bp, Homo sapiens
cttgaaaggagctct

SEQ ID NO: 762880 - DNA, 15 bp, Homo sapiens
ttgaaaggagctcta

SEQ ID NO: 762881 - DNA, 15 bp, Homo sapiens
tgaaaggagctctaa

SEQ ID NO: 762882 - DNA, 15 bp, Homo sapiens
gaaaggagctctaac

SEQ ID NO: 762883 - DNA, 15 bp, Homo sapiens
aaaggagctctaacc

SEQ ID NO: 762884 - DNA, 15 bp, Homo sapiens
aaggagctctaacca

SEQ ID NO: 762885 - DNA, 15 bp, Homo sapiens
aggagctctaaccat

SEQ ID NO: 762886 - DNA, 15 bp, Homo sapiens
ggagctctaaccata

SEQ ID NO: 762887 - DNA, 15 bp, Homo sapiens
gagctctaaccatac

SEQ ID NO: 762888 - DNA, 15 bp, Homo sapiens
agctctaaccatacc

SEQ ID NO: 762889 - DNA, 15 bp, Homo sapiens
gctctaaccataccc

SEQ ID NO: 762890 - DNA, 15 bp, Homo sapiens
ctctaaccataccca

SEQ ID NO: 762891 - DNA, 15 bp, Homo sapiens
tctaaccatacccag

SEQ ID NO: 762892 - DNA, 15 bp, Homo sapiens
ctaaccatacccaga

SEQ ID NO: 762893 - DNA, 15 bp, Homo sapiens
taaccatacccagag

SEQ ID NO: 762894 - DNA, 15 bp, Homo sapiens
aaccatacccagagt

SEQ ID NO: 762895 - DNA, 15 bp, Homo sapiens
accatacccagagta

SEQ ID NO: 762896 - DNA, 15 bp, Homo sapiens
ccatacccagagtag

SEQ ID NO: 762897 - DNA, 15 bp, Homo sapiens
catacccagagtagg

SEQ ID NO: 762898 - DNA, 15 bp, Homo sapiens
atacccagagtaggg

SEQ ID NO: 762899 - DNA, 15 bp, Homo sapiens
tacccagagtagggg

SEQ ID NO: 762900 - DNA, 15 bp, Homo sapiens
acccagagtaggggg

SEQ ID NO: 762901 - DNA, 15 bp, Homo sapiens
cccagagtagggggg

SEQ ID NO: 762902 - DNA, 15 bp, Homo sapiens
ccagagtaggggggc

SEQ ID NO: 762903 - DNA, 15 bp, Homo sapiens
cagagtaggggggct

SEQ ID NO: 762904 - DNA, 15 bp, Homo sapiens
agagtaggggggctc

SEQ ID NO: 762905 - DNA, 15 bp, Homo sapiens
gagtaggggggctcc

SEQ ID NO: 762906 - DNA, 15 bp, Homo sapiens
agtaggggggctccc

SEQ ID NO: 762907 - DNA, 15 bp, Homo sapiens
gtaggggggctccct

SEQ ID NO: 762908 - DNA, 15 bp, Homo sapiens
taggggggctccctt

SEQ ID NO: 762909 - DNA, 15 bp, Homo sapiens
aggggggctccctta

SEQ ID NO: 762910 - DNA, 15 bp, Homo sapiens
ggggggctcccttag

SEQ ID NO: 762911 - DNA, 15 bp, Homo sapiens
gggggctcccttagg

SEQ ID NO: 762912 - DNA, 15 bp, Homo sapiens
ggggctcccttaggt

SEQ ID NO: 762913 - DNA, 15 bp, Homo sapiens
gggctcccttaggtt

SEQ ID NO: 762914 - DNA, 15 bp, Homo sapiens
ggctcccttaggttg

SEQ ID NO: 762915 - DNA, 15 bp, Homo sapiens
gctcccttaggttga

SEQ ID NO: 762916 - DNA, 15 bp, Homo sapiens
ctcccttaggttgaa

SEQ ID NO: 762917 - DNA, 15 bp, Homo sapiens
tcccttaggttgaac

SEQ ID NO: 762918 - DNA, 15 bp, Homo sapiens
cccttaggttgaacc

SEQ ID NO: 762919 - DNA, 15 bp, Homo sapiens
ccttaggttgaaccc

SEQ ID NO: 762920 - DNA, 15 bp, Homo sapiens
cttaggttgaacccc

SEQ ID NO: 762921 - DNA, 15 bp, Homo sapiens
ttaggttgaacccct

SEQ ID NO: 762922 - DNA, 15 bp, Homo sapiens
taggttgaaccccta

SEQ ID NO: 762923 - DNA, 15 bp, Homo sapiens
aggttgaacccctag

SEQ ID NO: 762924 - DNA, 15 bp, Homo sapiens
ggttgaacccctaga

SEQ ID NO: 762925 - DNA, 15 bp, Homo sapiens
gttgaacccctagat

SEQ ID NO: 762926 - DNA, 15 bp, Homo sapiens
ttgaacccctagatg

SEQ ID NO: 762927 - DNA, 15 bp, Homo sapiens
tgaacccctagatgt

SEQ ID NO: 762928 - DNA, 15 bp, Homo sapiens
gaacccctagatgtg

SEQ ID NO: 762929 - DNA, 15 bp, Homo sapiens
aacccctagatgtgc

SEQ ID NO: 762930 - DNA, 15 bp, Homo sapiens
acccctagatgtgct

SEQ ID NO: 762931 - DNA, 15 bp, Homo sapiens
cccctagatgtgctg

SEQ ID NO: 762932 - DNA, 15 bp, Homo sapiens
ccctagatgtgctgc

SEQ ID NO: 762933 - DNA, 15 bp, Homo sapiens
cctagatgtgctgca

SEQ ID NO: 762934 - DNA, 15 bp, Homo sapiens
ctagatgtgctgcag

SEQ ID NO: 762935 - DNA, 15 bp, Homo sapiens
tagatgtgctgcagc

SEQ ID NO: 762936 - DNA, 15 bp, Homo sapiens
agatgtgctgcagcc

SEQ ID NO: 762937 - DNA, 15 bp, Homo sapiens
gatgtgctgcagcca

SEQ ID NO: 762938 - DNA, 15 bp, Homo sapiens
atgtgctgcagccag

SEQ ID NO: 762939 - DNA, 15 bp, Homo sapiens
tgtgctgcagccagt

SEQ ID NO: 762940 - DNA, 15 bp, Homo sapiens
gtgctgcagccagtg

SEQ ID NO: 762941 - DNA, 15 bp, Homo sapiens
tgctgcagccagtgg

SEQ ID NO: 762942 - DNA, 15 bp, Homo sapiens
gctgcagccagtggg

SEQ ID NO: 762943 - DNA, 15 bp, Homo sapiens
ctgcagccagtgggg

SEQ ID NO: 762944 - DNA, 15 bp, Homo sapiens
tgcagccagtgggga

SEQ ID NO: 762945 - DNA, 15 bp, Homo sapiens
gcagccagtggggag

SEQ ID NO: 762946 - DNA, 15 bp, Homo sapiens
cagccagtggggaga

SEQ ID NO: 762947 - DNA, 15 bp, Homo sapiens
agccagtggggagat

SEQ ID NO: 762948 - DNA, 15 bp, Homo sapiens
gccagtggggagatg

SEQ ID NO: 762949 - DNA, 15 bp, Homo sapiens
ccagtggggagatgc

SEQ ID NO: 762950 - DNA, 15 bp, Homo sapiens
cagtggggagatgct

SEQ ID NO: 762951 - DNA, 15 bp, Homo sapiens
agtggggagatgctg

SEQ ID NO: 762952 - DNA, 15 bp, Homo sapiens
gtggggagatgctgg

SEQ ID NO: 762953 - DNA, 15 bp, Homo sapiens
tggggagatgctgga

SEQ ID NO: 762954 - DNA, 15 bp, Homo sapiens
ggggagatgctggaa

SEQ ID NO: 762955 - DNA, 15 bp, Homo sapiens
gggagatgctggaag

SEQ ID NO: 762956 - DNA, 15 bp, Homo sapiens
ggagatgctggaaga

SEQ ID NO: 762957 - DNA, 15 bp, Homo sapiens
gagatgctggaagaa

SEQ ID NO: 762958 - DNA, 15 bp, Homo sapiens
agatgctggaagaaa

SEQ ID NO: 762959 - DNA, 15 bp, Homo sapiens
gatgctggaagaaac

SEQ ID NO: 762960 - DNA, 15 bp, Homo sapiens
atgctggaagaaaca

SEQ ID NO: 762961 - DNA, 15 bp, Homo sapiens
tgctggaagaaacag

SEQ ID NO: 762962 - DNA, 15 bp, Homo sapiens
gctggaagaaacaga

SEQ ID NO: 762963 - DNA, 15 bp, Homo sapiens
ctggaagaaacagat

SEQ ID NO: 762964 - DNA, 15 bp, Homo sapiens
tggaagaaacagatt

SEQ ID NO: 762965 - DNA, 15 bp, Homo sapiens
ggaagaaacagattg

SEQ ID NO: 762966 - DNA, 15 bp, Homo sapiens
gaagaaacagattga

SEQ ID NO: 762967 - DNA, 15 bp, Homo sapiens
aagaaacagattgaa

SEQ ID NO: 762968 - DNA, 15 bp, Homo sapiens
agaaacagattgaat

SEQ ID NO: 762969 - DNA, 15 bp, Homo sapiens
gaaacagattgaatc

SEQ ID NO: 762970 - DNA, 15 bp, Homo sapiens
aaacagattgaatca

SEQ ID NO: 762971 - DNA, 15 bp, Homo sapiens
aacagattgaatcat

SEQ ID NO: 762972 - DNA, 15 bp, Homo sapiens
acagattgaatcatg

SEQ ID NO: 762973 - DNA, 15 bp, Homo sapiens
cagattgaatcatgg

SEQ ID NO: 762974 - DNA, 15 bp, Homo sapiens
agattgaatcatgga

SEQ ID NO: 762975 - DNA, 15 bp, Homo sapiens
gattgaatcatggac

SEQ ID NO: 762976 - DNA, 15 bp, Homo sapiens
attgaatcatggacc

SEQ ID NO: 762977 - DNA, 15 bp, Homo sapiens
ttgaatcatggacct

SEQ ID NO: 762978 - DNA, 15 bp, Homo sapiens
tgaatcatggacctg

SEQ ID NO: 762979 - DNA, 15 bp, Homo sapiens
gaatcatggacctgc

SEQ ID NO: 762980 - DNA, 15 bp, Homo sapiens
aatcatggacctgcc

SEQ ID NO: 762981 - DNA, 15 bp, Homo sapiens
atcatggacctgccc

SEQ ID NO: 762982 - DNA, 15 bp, Homo sapiens
tcatggacctgccca

SEQ ID NO: 762983 - DNA, 15 bp, Homo sapiens
catggacctgcccat

SEQ ID NO: 762984 - DNA, 15 bp, Homo sapiens
atggacctgcccatc

SEQ ID NO: 762985 - DNA, 15 bp, Homo sapiens
tggacctgcccatca

SEQ ID NO: 762986 - DNA, 15 bp, Homo sapiens
ggacctgcccatcag

SEQ ID NO: 762987 - DNA, 15 bp, Homo sapiens
gacctgcccatcagg

SEQ ID NO: 762988 - DNA, 15 bp, Homo sapiens
acctgcccatcaggg

SEQ ID NO: 762989 - DNA, 15 bp, Homo sapiens
cctgcccatcagggt

SEQ ID NO: 762990 - DNA, 15 bp, Homo sapiens
ctgcccatcagggtc

SEQ ID NO: 762991 - DNA, 15 bp, Homo sapiens
tgcccatcagggtca

SEQ ID NO: 762992 - DNA, 15 bp, Homo sapiens
gcccatcagggtcat

SEQ ID NO: 762993 - DNA, 15 bp, Homo sapiens
cccatcagggtcatc

SEQ ID NO: 762994 - DNA, 15 bp, Homo sapiens
ccatcagggtcatct

SEQ ID NO: 762995 - DNA, 15 bp, Homo sapiens
catcagggtcatctg

SEQ ID NO: 762996 - DNA, 15 bp, Homo sapiens
atcagggtcatctga

SEQ ID NO: 762997 - DNA, 15 bp, Homo sapiens
tcagggtcatctgag

SEQ ID NO: 762998 - DNA, 15 bp, Homo sapiens
cagggtcatctgagg

SEQ ID NO: 762999 - DNA, 15 bp, Homo sapiens
agggtcatctgagga

SEQ ID NO: 763000 - DNA, 15 bp, Homo sapiens
gggtcatctgaggag

SEQ ID NO: 763001 - DNA, 15 bp, Homo sapiens
ggtcatctgaggagt

SEQ ID NO: 763002 - DNA, 15 bp, Homo sapiens
gtcatctgaggagtc

SEQ ID NO: 763003 - DNA, 15 bp, Homo sapiens
tcatctgaggagtct

SEQ ID NO: 763004 - DNA, 15 bp, Homo sapiens
catctgaggagtctc

SEQ ID NO: 763005 - DNA, 15 bp, Homo sapiens
atctgaggagtctca

SEQ ID NO: 763006 - DNA, 15 bp, Homo sapiens
tctgaggagtctcac

SEQ ID NO: 763007 - DNA, 15 bp, Homo sapiens
ctgaggagtctcact

SEQ ID NO: 763008 - DNA, 15 bp, Homo sapiens
tgaggagtctcactg

SEQ ID NO: 763009 - DNA, 15 bp, Homo sapiens
gaggagtctcactgt

SEQ ID NO: 763010 - DNA, 15 bp, Homo sapiens
aggagtctcactgtt

SEQ ID NO: 763011 - DNA, 15 bp, Homo sapiens
ggagtctcactgttg

SEQ ID NO: 763012 - DNA, 15 bp, Homo sapiens
gagtctcactgttgg

SEQ ID NO: 763013 - DNA, 15 bp, Homo sapiens
agtctcactgttggt

SEQ ID NO: 763014 - DNA, 15 bp, Homo sapiens
gtctcactgttggtg

SEQ ID NO: 763015 - DNA, 15 bp, Homo sapiens
tctcactgttggtgg

SEQ ID NO: 763016 - DNA, 15 bp, Homo sapiens
ctcactgttggtggt

SEQ ID NO: 763017 - DNA, 15 bp, Homo sapiens
tcactgttggtggtt

SEQ ID NO: 763018 - DNA, 15 bp, Homo sapiens
cactgttggtggttt

SEQ ID NO: 763019 - DNA, 15 bp, Homo sapiens
actgttggtggtttc

SEQ ID NO: 763020 - DNA, 15 bp, Homo sapiens
ctgttggtggtttca

SEQ ID NO: 763021 - DNA, 15 bp, Homo sapiens
tgttggtggtttcag

SEQ ID NO: 763022 - DNA, 15 bp, Homo sapiens
gttggtggtttcaga

SEQ ID NO: 763023 - DNA, 15 bp, Homo sapiens
ttggtggtttcagat

SEQ ID NO: 763024 - DNA, 15 bp, Homo sapiens
tggtggtttcagatc

SEQ ID NO: 763025 - DNA, 15 bp, Homo sapiens
ggtggtttcagatct

SEQ ID NO: 763026 - DNA, 15 bp, Homo sapiens
gtggtttcagatctt

SEQ ID NO: 763027 - DNA, 15 bp, Homo sapiens
tggtttcagatcttc

SEQ ID NO: 763028 - DNA, 15 bp, Homo sapiens
ggtttcagatcttcc

SEQ ID NO: 763029 - DNA, 15 bp, Homo sapiens
gtttcagatcttcca

SEQ ID NO: 763030 - DNA, 15 bp, Homo sapiens
tttcagatcttccag

SEQ ID NO: 763031 - DNA, 15 bp, Homo sapiens
ttcagatcttccaga

SEQ ID NO: 763032 - DNA, 15 bp, Homo sapiens
tcagatcttccagaa

SEQ ID NO: 763033 - DNA, 15 bp, Homo sapiens
cagatcttccagaag

SEQ ID NO: 763034 - DNA, 15 bp, Homo sapiens
agatcttccagaaga

SEQ ID NO: 763035 - DNA, 15 bp, Homo sapiens
gatcttccagaagaa

SEQ ID NO: 763036 - DNA, 15 bp, Homo sapiens
atcttccagaagaaa

SEQ ID NO: 763037 - DNA, 15 bp, Homo sapiens
tcttccagaagaaac

SEQ ID NO: 763038 - DNA, 15 bp, Homo sapiens
cttccagaagaaact

SEQ ID NO: 763039 - DNA, 15 bp, Homo sapiens
ttccagaagaaactc

SEQ ID NO: 763040 - DNA, 15 bp, Homo sapiens
tccagaagaaactct

SEQ ID NO: 763041 - DNA, 15 bp, Homo sapiens
ccagaagaaactcta

SEQ ID NO: 763042 - DNA, 15 bp, Homo sapiens
cagaagaaactctaa

SEQ ID NO: 763043 - DNA, 15 bp, Homo sapiens
agaagaaactctaat

SEQ ID NO: 763044 - DNA, 15 bp, Homo sapiens
gaagaaactctaatt

SEQ ID NO: 763045 - DNA, 15 bp, Homo sapiens
aagaaactctaatta

SEQ ID NO: 763046 - DNA, 15 bp, Homo sapiens
agaaactctaattag

SEQ ID NO: 763047 - DNA, 15 bp, Homo sapiens
gaaactctaattagc

SEQ ID NO: 763048 - DNA, 15 bp, Homo sapiens
aaactctaattagct

SEQ ID NO: 763049 - DNA, 15 bp, Homo sapiens
aactctaattagctc

SEQ ID NO: 763050 - DNA, 15 bp, Homo sapiens
actctaattagctct

SEQ ID NO: 763051 - DNA, 15 bp, Homo sapiens
ctctaattagctcta

SEQ ID NO: 763052 - DNA, 15 bp, Homo sapiens
tctaattagctctac

SEQ ID NO: 763053 - DNA, 15 bp, Homo sapiens
ctaattagctctaca

SEQ ID NO: 763054 - DNA, 15 bp, Homo sapiens
taattagctctacac

SEQ ID NO: 763055 - DNA, 15 bp, Homo sapiens
aattagctctacaca

SEQ ID NO: 763056 - DNA, 15 bp, Homo sapiens
attagctctacacaa

SEQ ID NO: 763057 - DNA, 15 bp, Homo sapiens
ttagctctacacaag

SEQ ID NO: 763058 - DNA, 15 bp, Homo sapiens
tagctctacacaaga

SEQ ID NO: 763059 - DNA, 15 bp, Homo sapiens
agctctacacaagag

SEQ ID NO: 763060 - DNA, 15 bp, Homo sapiens
gctctacacaagagc

SEQ ID NO: 763061 - DNA, 15 bp, Homo sapiens
ctctacacaagagcc

SEQ ID NO: 763062 - DNA, 15 bp, Homo sapiens
tctacacaagagcca

SEQ ID NO: 763063 - DNA, 15 bp, Homo sapiens
ctacacaagagccag

SEQ ID NO: 763064 - DNA, 15 bp, Homo sapiens
tacacaagagccaga

SEQ ID NO: 763065 - DNA, 15 bp, Homo sapiens
acacaagagccagag

SEQ ID NO: 763066 - DNA, 15 bp, Homo sapiens
cacaagagccagagg

SEQ ID NO: 763067 - DNA, 15 bp, Homo sapiens
acaagagccagaggg

SEQ ID NO: 763068 - DNA, 15 bp, Homo sapiens
caagagccagagggg

SEQ ID NO: 763069 - DNA, 15 bp, Homo sapiens
aagagccagaggggt

SEQ ID NO: 763070 - DNA, 15 bp, Homo sapiens
agagccagaggggtt

SEQ ID NO: 763071 - DNA, 15 bp, Homo sapiens
gagccagaggggtta

SEQ ID NO: 763072 - DNA, 15 bp, Homo sapiens
agccagaggggttag

SEQ ID NO: 763073 - DNA, 15 bp, Homo sapiens
gccagaggggttagt

SEQ ID NO: 763074 - DNA, 15 bp, Homo sapiens
ccagaggggttagtc

SEQ ID NO: 763075 - DNA, 15 bp, Homo sapiens
cagaggggttagtca

SEQ ID NO: 763076 - DNA, 15 bp, Homo sapiens
agaggggttagtcac

SEQ ID NO: 763077 - DNA, 15 bp, Homo sapiens
gaggggttagtcacc

SEQ ID NO: 763078 - DNA, 15 bp, Homo sapiens
aggggttagtcacca

SEQ ID NO: 763079 - DNA, 15 bp, Homo sapiens
ggggttagtcaccaa

SEQ ID NO: 763080 - DNA, 15 bp, Homo sapiens
gggttagtcaccaaa

SEQ ID NO: 763081 - DNA, 15 bp, Homo sapiens
ggttagtcaccaaag

SEQ ID NO: 763082 - DNA, 15 bp, Homo sapiens
gttagtcaccaaaga

SEQ ID NO: 763083 - DNA, 15 bp, Homo sapiens
ttagtcaccaaagag

SEQ ID NO: 763084 - DNA, 15 bp, Homo sapiens
tagtcaccaaagagt

SEQ ID NO: 763085 - DNA, 15 bp, Homo sapiens
agtcaccaaagagtg

SEQ ID NO: 763086 - DNA, 15 bp, Homo sapiens
gtcaccaaagagtga

SEQ ID NO: 763087 - DNA, 15 bp, Homo sapiens
tcaccaaagagtgat

SEQ ID NO: 763088 - DNA, 15 bp, Homo sapiens
caccaaagagtgatt

SEQ ID NO: 763089 - DNA, 15 bp, Homo sapiens
accaaagagtgattc

SEQ ID NO: 763090 - DNA, 15 bp, Homo sapiens
ccaaagagtgattca

SEQ ID NO: 763091 - DNA, 15 bp, Homo sapiens
caaagagtgattcac

SEQ ID NO: 763092 - DNA, 15 bp, Homo sapiens
aaagagtgattcacc

SEQ ID NO: 763093 - DNA, 15 bp, Homo sapiens
aagagtgattcaccc

SEQ ID NO: 763094 - DNA, 15 bp, Homo sapiens
agagtgattcacccc

SEQ ID NO: 763095 - DNA, 15 bp, Homo sapiens
gagtgattcacccca

SEQ ID NO: 763096 - DNA, 15 bp, Homo sapiens
agtgattcaccccat

SEQ ID NO: 763097 - DNA, 15 bp, Homo sapiens
gtgattcaccccatc

SEQ ID NO: 763098 - DNA, 15 bp, Homo sapiens
tgattcaccccatca

SEQ ID NO: 763099 - DNA, 15 bp, Homo sapiens
gattcaccccatcac

SEQ ID NO: 763100 - DNA, 15 bp, Homo sapiens
attcaccccatcact

SEQ ID NO: 763101 - DNA, 15 bp, Homo sapiens
ttcaccccatcactc

SEQ ID NO: 763102 - DNA, 15 bp, Homo sapiens
tcaccccatcactct

SEQ ID NO: 763103 - DNA, 15 bp, Homo sapiens
caccccatcactctt

SEQ ID NO: 763104 - DNA, 15 bp, Homo sapiens
accccatcactcttt

SEQ ID NO: 763105 - DNA, 15 bp, Homo sapiens
ccccatcactctttg

SEQ ID NO: 763106 - DNA, 15 bp, Homo sapiens
cccatcactctttgg

SEQ ID NO: 763107 - DNA, 15 bp, Homo sapiens
ccatcactctttggt

SEQ ID NO: 763108 - DNA, 15 bp, Homo sapiens
catcactctttggtg

SEQ ID NO: 763109 - DNA, 15 bp, Homo sapiens
atcactctttggtga

SEQ ID NO: 763110 - DNA, 15 bp, Homo sapiens
tcactctttggtgaa

SEQ ID NO: 763111 - DNA, 15 bp, Homo sapiens
cactctttggtgaat

SEQ ID NO: 763112 - DNA, 15 bp, Homo sapiens
actctttggtgaatt

SEQ ID NO: 763113 - DNA, 15 bp, Homo sapiens
ctctttggtgaattt

SEQ ID NO: 763114 - DNA, 15 bp, Homo sapiens
tctttggtgaattta

SEQ ID NO: 763115 - DNA, 15 bp, Homo sapiens
ctttggtgaatttaa

SEQ ID NO: 763116 - DNA, 15 bp, Homo sapiens
tttggtgaatttaac

SEQ ID NO: 763117 - DNA, 15 bp, Homo sapiens
ttggtgaatttaacc

SEQ ID NO: 763118 - DNA, 15 bp, Homo sapiens
tggtgaatttaacca

SEQ ID NO: 763119 - DNA, 15 bp, Homo sapiens
ggtgaatttaaccaa

SEQ ID NO: 763120 - DNA, 15 bp, Homo sapiens
gtgaatttaaccaaa

SEQ ID NO: 763121 - DNA, 15 bp, Homo sapiens
tgaatttaaccaaat

SEQ ID NO: 763122 - DNA, 15 bp, Homo sapiens
gaatttaaccaaatt

SEQ ID NO: 763123 - DNA, 15 bp, Homo sapiens
aatttaaccaaattt

SEQ ID NO: 763124 - DNA, 15 bp, Homo sapiens
atttaaccaaattta

SEQ ID NO: 763125 - DNA, 15 bp, Homo sapiens
tttaaccaaatttaa

SEQ ID NO: 763126 - DNA, 15 bp, Homo sapiens
ttaaccaaatttaaa

SEQ ID NO: 763127 - DNA, 15 bp, Homo sapiens
taaccaaatttaaat

SEQ ID NO: 763128 - DNA, 15 bp, Homo sapiens
aaccaaatttaaatg

SEQ ID NO: 763129 - DNA, 15 bp, Homo sapiens
accaaatttaaatgg

SEQ ID NO: 763130 - DNA, 15 bp, Homo sapiens
ccaaatttaaatggt

SEQ ID NO: 763131 - DNA, 15 bp, Homo sapiens
caaatttaaatggtg

SEQ ID NO: 763132 - DNA, 15 bp, Homo sapiens
aaatttaaatggtga

SEQ ID NO: 763133 - DNA, 15 bp, Homo sapiens
aatttaaatggtgat

SEQ ID NO: 763134 - DNA, 15 bp, Homo sapiens
atttaaatggtgata

SEQ ID NO: 763135 - DNA, 15 bp, Homo sapiens
tttaaatggtgatag

SEQ ID NO: 763136 - DNA, 15 bp, Homo sapiens
ttaaatggtgatagg

SEQ ID NO: 763137 - DNA, 15 bp, Homo sapiens
taaatggtgataggg

SEQ ID NO: 763138 - DNA, 15 bp, Homo sapiens
aaatggtgataggga

SEQ ID NO: 763139 - DNA, 15 bp, Homo sapiens
aatggtgatagggaa

SEQ ID NO: 763140 - DNA, 15 bp, Homo sapiens
atggtgatagggaat

SEQ ID NO: 763141 - DNA, 15 bp, Homo sapiens
tggtgatagggaatt

SEQ ID NO: 763142 - DNA, 15 bp, Homo sapiens
ggtgatagggaattc

SEQ ID NO: 763143 - DNA, 15 bp, Homo sapiens
gtgatagggaattcc

SEQ ID NO: 763144 - DNA, 15 bp, Homo sapiens
tgatagggaattcct

SEQ ID NO: 763145 - DNA, 15 bp, Homo sapiens
gatagggaattcctt

SEQ ID NO: 763146 - DNA, 15 bp, Homo sapiens
atagggaattccttt

SEQ ID NO: 763147 - DNA, 15 bp, Homo sapiens
tagggaattcctttt

SEQ ID NO: 763148 - DNA, 15 bp, Homo sapiens
agggaattcctttta

SEQ ID NO: 763149 - DNA, 15 bp, Homo sapiens
gggaattccttttac

SEQ ID NO: 763150 - DNA, 15 bp, Homo sapiens
ggaattccttttaca

SEQ ID NO: 763151 - DNA, 15 bp, Homo sapiens
gaattccttttacaa

SEQ ID NO: 763152 - DNA, 15 bp, Homo sapiens
aattccttttacaat

SEQ ID NO: 763153 - DNA, 15 bp, Homo sapiens
attccttttacaatt

SEQ ID NO: 763154 - DNA, 15 bp, Homo sapiens
ttccttttacaattc

SEQ ID NO: 763155 - DNA, 15 bp, Homo sapiens
tccttttacaattcc

SEQ ID NO: 763156 - DNA, 15 bp, Homo sapiens
ccttttacaattccc

SEQ ID NO: 763157 - DNA, 15 bp, Homo sapiens
cttttacaattccct

SEQ ID NO: 763158 - DNA, 15 bp, Homo sapiens
ttttacaattcccta

SEQ ID NO: 763159 - DNA, 15 bp, Homo sapiens
tttacaattccctaa

SEQ ID NO: 763160 - DNA, 15 bp, Homo sapiens
ttacaattccctaag

SEQ ID NO: 763161 - DNA, 15 bp, Homo sapiens
tacaattccctaaga

SEQ ID NO: 763162 - DNA, 15 bp, Homo sapiens
acaattccctaagag

SEQ ID NO: 763163 - DNA, 15 bp, Homo sapiens
caattccctaagagg

SEQ ID NO: 763164 - DNA, 15 bp, Homo sapiens
aattccctaagagga

SEQ ID NO: 763165 - DNA, 15 bp, Homo sapiens
attccctaagaggaa

SEQ ID NO: 763166 - DNA, 15 bp, Homo sapiens
ttccctaagaggaaa

SEQ ID NO: 763167 - DNA, 15 bp, Homo sapiens
tccctaagaggaaat

SEQ ID NO: 763168 - DNA, 15 bp, Homo sapiens
ccctaagaggaaatg

SEQ ID NO: 763169 - DNA, 15 bp, Homo sapiens
cctaagaggaaatga

SEQ ID NO: 763170 - DNA, 15 bp, Homo sapiens
ctaagaggaaatgag

SEQ ID NO: 763171 - DNA, 15 bp, Homo sapiens
taagaggaaatgaga

SEQ ID NO: 763172 - DNA, 15 bp, Homo sapiens
aagaggaaatgagag

SEQ ID NO: 763173 - DNA, 15 bp, Homo sapiens
agaggaaatgagaga

SEQ ID NO: 763174 - DNA, 15 bp, Homo sapiens
gaggaaatgagagaa

SEQ ID NO: 763175 - DNA, 15 bp, Homo sapiens
aggaaatgagagaaa

SEQ ID NO: 763176 - DNA, 15 bp, Homo sapiens
ggaaatgagagaaag

SEQ ID NO: 763177 - DNA, 15 bp, Homo sapiens
gaaatgagagaaaga

SEQ ID NO: 763178 - DNA, 15 bp, Homo sapiens
aaatgagagaaagag

SEQ ID NO: 763179 - DNA, 15 bp, Homo sapiens
aatgagagaaagagt

SEQ ID NO: 763180 - DNA, 15 bp, Homo sapiens
atgagagaaagagtt

SEQ ID NO: 763181 - DNA, 15 bp, Homo sapiens
tgagagaaagagttg

SEQ ID NO: 763182 - DNA, 15 bp, Homo sapiens
gagagaaagagttgg

SEQ ID NO: 763183 - DNA, 15 bp, Homo sapiens
agagaaagagttggt

SEQ ID NO: 763184 - DNA, 15 bp, Homo sapiens
gagaaagagttggtc

SEQ ID NO: 763185 - DNA, 15 bp, Homo sapiens
agaaagagttggtct

SEQ ID NO: 763186 - DNA, 15 bp, Homo sapiens
gaaagagttggtctt

SEQ ID NO: 763187 - DNA, 15 bp, Homo sapiens
aaagagttggtcttt

SEQ ID NO: 763188 - DNA, 15 bp, Homo sapiens
aagagttggtctttc

SEQ ID NO: 763189 - DNA, 15 bp, Homo sapiens
agagttggtctttcc

SEQ ID NO: 763190 - DNA, 15 bp, Homo sapiens
gagttggtctttccc

SEQ ID NO: 763191 - DNA, 15 bp, Homo sapiens
agttggtctttccca

SEQ ID NO: 763192 - DNA, 15 bp, Homo sapiens
gttggtctttcccaa

SEQ ID NO: 763193 - DNA, 15 bp, Homo sapiens
ttggtctttcccaag

SEQ ID NO: 763194 - DNA, 15 bp, Homo sapiens
tggtctttcccaagc

SEQ ID NO: 763195 - DNA, 15 bp, Homo sapiens
ggtctttcccaagca

SEQ ID NO: 763196 - DNA, 15 bp, Homo sapiens
gtctttcccaagcag

SEQ ID NO: 763197 - DNA, 15 bp, Homo sapiens
tctttcccaagcagc

SEQ ID NO: 763198 - DNA, 15 bp, Homo sapiens
ctttcccaagcagca

SEQ ID NO: 763199 - DNA, 15 bp, Homo sapiens
tttcccaagcagcat

SEQ ID NO: 763200 - DNA, 15 bp, Homo sapiens
ttcccaagcagcatg

SEQ ID NO: 763201 - DNA, 15 bp, Homo sapiens
tcccaagcagcatgg

SEQ ID NO: 763202 - DNA, 15 bp, Homo sapiens
cccaagcagcatggt

SEQ ID NO: 763203 - DNA, 15 bp, Homo sapiens
ccaagcagcatggtt

SEQ ID NO: 763204 - DNA, 15 bp, Homo sapiens
caagcagcatggttt

SEQ ID NO: 763205 - DNA, 15 bp, Homo sapiens
aagcagcatggtttt

SEQ ID NO: 763206 - DNA, 15 bp, Homo sapiens
agcagcatggttttc

SEQ ID NO: 763207 - DNA, 15 bp, Homo sapiens
gcagcatggttttca

SEQ ID NO: 763208 - DNA, 15 bp, Homo sapiens
cagcatggttttcag

SEQ ID NO: 763209 - DNA, 15 bp, Homo sapiens
agcatggttttcagg

SEQ ID NO: 763210 - DNA, 15 bp, Homo sapiens
gcatggttttcaggg

SEQ ID NO: 763211 - DNA, 15 bp, Homo sapiens
catggttttcaggga

SEQ ID NO: 763212 - DNA, 15 bp, Homo sapiens
atggttttcagggac

SEQ ID NO: 763213 - DNA, 15 bp, Homo sapiens
tggttttcagggact

SEQ ID NO: 763214 - DNA, 15 bp, Homo sapiens
ggttttcagggactt

SEQ ID NO: 763215 - DNA, 15 bp, Homo sapiens
gttttcagggacttg

SEQ ID NO: 763216 - DNA, 15 bp, Homo sapiens
ttttcagggacttgc

SEQ ID NO: 763217 - DNA, 15 bp, Homo sapiens
tttcagggacttgct

SEQ ID NO: 763218 - DNA, 15 bp, Homo sapiens
ttcagggacttgctt

SEQ ID NO: 763219 - DNA, 15 bp, Homo sapiens
tcagggacttgcttc

SEQ ID NO: 763220 - DNA, 15 bp, Homo sapiens
cagggacttgcttct

SEQ ID NO: 763221 - DNA, 15 bp, Homo sapiens
agggacttgcttctc

SEQ ID NO: 763222 - DNA, 15 bp, Homo sapiens
gggacttgcttctcc

SEQ ID NO: 763223 - DNA, 15 bp, Homo sapiens
ggacttgcttctcct

SEQ ID NO: 763224 - DNA, 15 bp, Homo sapiens
gacttgcttctcctg

SEQ ID NO: 763225 - DNA, 15 bp, Homo sapiens
acttgcttctcctgg

SEQ ID NO: 763226 - DNA, 15 bp, Homo sapiens
cttgcttctcctggt

SEQ ID NO: 763227 - DNA, 15 bp, Homo sapiens
ttgcttctcctggtg

SEQ ID NO: 763228 - DNA, 15 bp, Homo sapiens
tgcttctcctggtgc

SEQ ID NO: 763229 - DNA, 15 bp, Homo sapiens
gcttctcctggtgcc

SEQ ID NO: 763230 - DNA, 15 bp, Homo sapiens
cttctcctggtgcct

SEQ ID NO: 763231 - DNA, 15 bp, Homo sapiens
ttctcctggtgcctt

SEQ ID NO: 763232 - DNA, 15 bp, Homo sapiens
tctcctggtgccttc

SEQ ID NO: 763233 - DNA, 15 bp, Homo sapiens
ctcctggtgccttct

SEQ ID NO: 763234 - DNA, 15 bp, Homo sapiens
tcctggtgccttctc

SEQ ID NO: 763235 - DNA, 15 bp, Homo sapiens
cctggtgccttctct

SEQ ID NO: 763236 - DNA, 15 bp, Homo sapiens
ctggtgccttctcta

SEQ ID NO: 763237 - DNA, 15 bp, Homo sapiens
tggtgccttctctag

SEQ ID NO: 763238 - DNA, 15 bp, Homo sapiens
ggtgccttctctagt

SEQ ID NO: 763239 - DNA, 15 bp, Homo sapiens
gtgccttctctagtc

SEQ ID NO: 763240 - DNA, 15 bp, Homo sapiens
tgccttctctagtca

SEQ ID NO: 763241 - DNA, 15 bp, Homo sapiens
gccttctctagtcag

SEQ ID NO: 763242 - DNA, 15 bp, Homo sapiens
ccttctctagtcagt

SEQ ID NO: 763243 - DNA, 15 bp, Homo sapiens
cttctctagtcagtt

SEQ ID NO: 763244 - DNA, 15 bp, Homo sapiens
ttctctagtcagttg

SEQ ID NO: 763245 - DNA, 15 bp, Homo sapiens
tctctagtcagttgc

SEQ ID NO: 763246 - DNA, 15 bp, Homo sapiens
ctctagtcagttgcc

SEQ ID NO: 763247 - DNA, 15 bp, Homo sapiens
tctagtcagttgcca

SEQ ID NO: 763248 - DNA, 15 bp, Homo sapiens
ctagtcagttgccaa

SEQ ID NO: 763249 - DNA, 15 bp, Homo sapiens
tagtcagttgccaaa

SEQ ID NO: 763250 - DNA, 15 bp, Homo sapiens
agtcagttgccaaat

SEQ ID NO: 763251 - DNA, 15 bp, Homo sapiens
gtcagttgccaaatc

SEQ ID NO: 763252 - DNA, 15 bp, Homo sapiens
tcagttgccaaatcc

SEQ ID NO: 763253 - DNA, 15 bp, Homo sapiens
cagttgccaaatcct

SEQ ID NO: 763254 - DNA, 15 bp, Homo sapiens
agttgccaaatcctc

SEQ ID NO: 763255 - DNA, 15 bp, Homo sapiens
gttgccaaatcctcg

SEQ ID NO: 763256 - DNA, 15 bp, Homo sapiens
ttgccaaatcctcgt

SEQ ID NO: 763257 - DNA, 15 bp, Homo sapiens
tgccaaatcctcgtg

SEQ ID NO: 763258 - DNA, 15 bp, Homo sapiens
gccaaatcctcgtgg

SEQ ID NO: 763259 - DNA, 15 bp, Homo sapiens
ccaaatcctcgtggc

SEQ ID NO: 763260 - DNA, 15 bp, Homo sapiens
caaatcctcgtggct

SEQ ID NO: 763261 - DNA, 15 bp, Homo sapiens
aaatcctcgtggctc

SEQ ID NO: 763262 - DNA, 15 bp, Homo sapiens
aatcctcgtggctca

SEQ ID NO: 763263 - DNA, 15 bp, Homo sapiens
atcctcgtggctcaa

SEQ ID NO: 763264 - DNA, 15 bp, Homo sapiens
tcctcgtggctcaac

SEQ ID NO: 763265 - DNA, 15 bp, Homo sapiens
cctcgtggctcaact

SEQ ID NO: 763266 - DNA, 15 bp, Homo sapiens
ctcgtggctcaactc

SEQ ID NO: 763267 - DNA, 15 bp, Homo sapiens
tcgtggctcaactct

SEQ ID NO: 763268 - DNA, 15 bp, Homo sapiens
cgtggctcaactctt

SEQ ID NO: 763269 - DNA, 15 bp, Homo sapiens
gtggctcaactcttc

SEQ ID NO: 763270 - DNA, 15 bp, Homo sapiens
tggctcaactcttct

SEQ ID NO: 763271 - DNA, 15 bp, Homo sapiens
ggctcaactcttctc

SEQ ID NO: 763272 - DNA, 15 bp, Homo sapiens
gctcaactcttctcc

SEQ ID NO: 763273 - DNA, 15 bp, Homo sapiens
ctcaactcttctcca

SEQ ID NO: 763274 - DNA, 15 bp, Homo sapiens
tcaactcttctccac

SEQ ID NO: 763275 - DNA, 15 bp, Homo sapiens
caactcttctccact

SEQ ID NO: 763276 - DNA, 15 bp, Homo sapiens
aactcttctccactg

SEQ ID NO: 763277 - DNA, 15 bp, Homo sapiens
actcttctccactgc

SEQ ID NO: 763278 - DNA, 15 bp, Homo sapiens
ctcttctccactgct

SEQ ID NO: 763279 - DNA, 15 bp, Homo sapiens
tcttctccactgctg

SEQ ID NO: 763280 - DNA, 15 bp, Homo sapiens
cttctccactgctgc

SEQ ID NO: 763281 - DNA, 15 bp, Homo sapiens
ttctccactgctgct

SEQ ID NO: 763282 - DNA, 15 bp, Homo sapiens
tctccactgctgctg

SEQ ID NO: 763283 - DNA, 15 bp, Homo sapiens
ctccactgctgctgt

SEQ ID NO: 763284 - DNA, 15 bp, Homo sapiens
tccactgctgctgtc

SEQ ID NO: 763285 - DNA, 15 bp, Homo sapiens
ccactgctgctgtct

SEQ ID NO: 763286 - DNA, 15 bp, Homo sapiens
cactgctgctgtctc

SEQ ID NO: 763287 - DNA, 15 bp, Homo sapiens
actgctgctgtctct

SEQ ID NO: 763288 - DNA, 15 bp, Homo sapiens
ctgctgctgtctctt

SEQ ID NO: 763289 - DNA, 15 bp, Homo sapiens
tgctgctgtctcttt

SEQ ID NO: 763290 - DNA, 15 bp, Homo sapiens
gctgctgtctctttt

SEQ ID NO: 763291 - DNA, 15 bp, Homo sapiens
ctgctgtctcttttc

SEQ ID NO: 763292 - DNA, 15 bp, Homo sapiens
tgctgtctcttttct

SEQ ID NO: 763293 - DNA, 15 bp, Homo sapiens
gctgtctcttttcta

SEQ ID NO: 763294 - DNA, 15 bp, Homo sapiens
ctgtctcttttctag

SEQ ID NO: 763295 - DNA, 15 bp, Homo sapiens
tgtctcttttctagt

SEQ ID NO: 763296 - DNA, 15 bp, Homo sapiens
gtctcttttctagtt

SEQ ID NO: 763297 - DNA, 15 bp, Homo sapiens
tctcttttctagttc

SEQ ID NO: 763298 - DNA, 15 bp, Homo sapiens
ctcttttctagttca

SEQ ID NO: 763299 - DNA, 15 bp, Homo sapiens
tcttttctagttcag

SEQ ID NO: 763300 - DNA, 15 bp, Homo sapiens
cttttctagttcagg

SEQ ID NO: 763301 - DNA, 15 bp, Homo sapiens
ttttctagttcaggc

SEQ ID NO: 763302 - DNA, 15 bp, Homo sapiens
tttctagttcaggct

SEQ ID NO: 763303 - DNA, 15 bp, Homo sapiens
ttctagttcaggctt

SEQ ID NO: 763304 - DNA, 15 bp, Homo sapiens
tctagttcaggcttc

SEQ ID NO: 763305 - DNA, 15 bp, Homo sapiens
ctagttcaggcttcc

SEQ ID NO: 763306 - DNA, 15 bp, Homo sapiens
tagttcaggcttcca

SEQ ID NO: 763307 - DNA, 15 bp, Homo sapiens
agttcaggcttccat

SEQ ID NO: 763308 - DNA, 15 bp, Homo sapiens
gttcaggcttccatt

SEQ ID NO: 763309 - DNA, 15 bp, Homo sapiens
ttcaggcttccattg

SEQ ID NO: 763310 - DNA, 15 bp, Homo sapiens
tcaggcttccattgc

SEQ ID NO: 763311 - DNA, 15 bp, Homo sapiens
caggcttccattgct

SEQ ID NO: 763312 - DNA, 15 bp, Homo sapiens
aggcttccattgctg

SEQ ID NO: 763313 - DNA, 15 bp, Homo sapiens
ggcttccattgctgc

SEQ ID NO: 763314 - DNA, 15 bp, Homo sapiens
gcttccattgctgct

SEQ ID NO: 763315 - DNA, 15 bp, Homo sapiens
cttccattgctgctt

SEQ ID NO: 763316 - DNA, 15 bp, Homo sapiens
ttccattgctgcttg

SEQ ID NO: 763317 - DNA, 15 bp, Homo sapiens
tccattgctgcttgc

SEQ ID NO: 763318 - DNA, 15 bp, Homo sapiens
ccattgctgcttgct

SEQ ID NO: 763319 - DNA, 15 bp, Homo sapiens
cattgctgcttgctt

SEQ ID NO: 763320 - DNA, 15 bp, Homo sapiens
attgctgcttgcttg

SEQ ID NO: 763321 - DNA, 15 bp, Homo sapiens
ttgctgcttgcttgg

SEQ ID NO: 763322 - DNA, 15 bp, Homo sapiens
tgctgcttgcttgga

SEQ ID NO: 763323 - DNA, 15 bp, Homo sapiens
gctgcttgcttggac

SEQ ID NO: 763324 - DNA, 15 bp, Homo sapiens
ctgcttgcttggact

SEQ ID NO: 763325 - DNA, 15 bp, Homo sapiens
tgcttgcttggactc

SEQ ID NO: 763326 - DNA, 15 bp, Homo sapiens
gcttgcttggactct

SEQ ID NO: 763327 - DNA, 15 bp, Homo sapiens
cttgcttggactctt

SEQ ID NO: 763328 - DNA, 15 bp, Homo sapiens
ttgcttggactcttg

SEQ ID NO: 763329 - DNA, 15 bp, Homo sapiens
tgcttggactcttgc

SEQ ID NO: 763330 - DNA, 15 bp, Homo sapiens
gcttggactcttgca

SEQ ID NO: 763331 - DNA, 15 bp, Homo sapiens
cttggactcttgcag

SEQ ID NO: 763332 - DNA, 15 bp, Homo sapiens
ttggactcttgcagt

SEQ ID NO: 763333 - DNA, 15 bp, Homo sapiens
tggactcttgcagta

SEQ ID NO: 763334 - DNA, 15 bp, Homo sapiens
ggactcttgcagtac

SEQ ID NO: 763335 - DNA, 15 bp, Homo sapiens
gactcttgcagtact

SEQ ID NO: 763336 - DNA, 15 bp, Homo sapiens
actcttgcagtactc

SEQ ID NO: 763337 - DNA, 15 bp, Homo sapiens
ctcttgcagtactct

SEQ ID NO: 763338 - DNA, 15 bp, Homo sapiens
tcttgcagtactctt

SEQ ID NO: 763339 - DNA, 15 bp, Homo sapiens
cttgcagtactcttc

SEQ ID NO: 763340 - DNA, 15 bp, Homo sapiens
ttgcagtactcttcc

SEQ ID NO: 763341 - DNA, 15 bp, Homo sapiens
tgcagtactcttcca

SEQ ID NO: 763342 - DNA, 15 bp, Homo sapiens
gcagtactcttccag

SEQ ID NO: 763343 - DNA, 15 bp, Homo sapiens
cagtactcttccagc

SEQ ID NO: 763344 - DNA, 15 bp, Homo sapiens
agtactcttccagct

SEQ ID NO: 763345 - DNA, 15 bp, Homo sapiens
gtactcttccagctg

SEQ ID NO: 763346 - DNA, 15 bp, Homo sapiens
tactcttccagctgg

SEQ ID NO: 763347 - DNA, 15 bp, Homo sapiens
actcttccagctggt

SEQ ID NO: 763348 - DNA, 15 bp, Homo sapiens
ctcttccagctggtc

SEQ ID NO: 763349 - DNA, 15 bp, Homo sapiens
tcttccagctggtct

SEQ ID NO: 763350 - DNA, 15 bp, Homo sapiens
cttccagctggtctc

SEQ ID NO: 763351 - DNA, 15 bp, Homo sapiens
ttccagctggtctcg

SEQ ID NO: 763352 - DNA, 15 bp, Homo sapiens
tccagctggtctcgt

SEQ ID NO: 763353 - DNA, 15 bp, Homo sapiens
ccagctggtctcgtg

SEQ ID NO: 763354 - DNA, 15 bp, Homo sapiens
cagctggtctcgtga

SEQ ID NO: 763355 - DNA, 15 bp, Homo sapiens
agctggtctcgtgac

SEQ ID NO: 763356 - DNA, 15 bp, Homo sapiens
gctggtctcgtgact

SEQ ID NO: 763357 - DNA, 15 bp, Homo sapiens
ctggtctcgtgactc

SEQ ID NO: 763358 - DNA, 15 bp, Homo sapiens
tggtctcgtgactct

SEQ ID NO: 763359 - DNA, 15 bp, Homo sapiens
ggtctcgtgactctg

SEQ ID NO: 763360 - DNA, 15 bp, Homo sapiens
gtctcgtgactctgt

SEQ ID NO: 763361 - DNA, 15 bp, Homo sapiens
tctcgtgactctgtc

SEQ ID NO: 763362 - DNA, 15 bp, Homo sapiens
ctcgtgactctgtca

SEQ ID NO: 763363 - DNA, 15 bp, Homo sapiens
tcgtgactctgtcat

SEQ ID NO: 763364 - DNA, 15 bp, Homo sapiens
cgtgactctgtcatt

SEQ ID NO: 763365 - DNA, 15 bp, Homo sapiens
gtgactctgtcattt

SEQ ID NO: 763366 - DNA, 15 bp, Homo sapiens
tgactctgtcatttc

SEQ ID NO: 763367 - DNA, 15 bp, Homo sapiens
gactctgtcatttct

SEQ ID NO: 763368 - DNA, 15 bp, Homo sapiens
actctgtcatttctg

SEQ ID NO: 763369 - DNA, 15 bp, Homo sapiens
ctctgtcatttctga

SEQ ID NO: 763370 - DNA, 15 bp, Homo sapiens
tctgtcatttctgat

SEQ ID NO: 763371 - DNA, 15 bp, Homo sapiens
ctgtcatttctgatt

SEQ ID NO: 763372 - DNA, 15 bp, Homo sapiens
tgtcatttctgatta

SEQ ID NO: 763373 - DNA, 15 bp, Homo sapiens
gtcatttctgattag

SEQ ID NO: 763374 - DNA, 15 bp, Homo sapiens
tcatttctgattagt

SEQ ID NO: 763375 - DNA, 15 bp, Homo sapiens
catttctgattagtc

SEQ ID NO: 763376 - DNA, 15 bp, Homo sapiens
atttctgattagtca

SEQ ID NO: 763377 - DNA, 15 bp, Homo sapiens
tttctgattagtcat

SEQ ID NO: 763378 - DNA, 15 bp, Homo sapiens
ttctgattagtcata

SEQ ID NO: 763379 - DNA, 15 bp, Homo sapiens
tctgattagtcatac

SEQ ID NO: 763380 - DNA, 15 bp, Homo sapiens
ctgattagtcataca

SEQ ID NO: 763381 - DNA, 15 bp, Homo sapiens
tgattagtcatacat

SEQ ID NO: 763382 - DNA, 15 bp, Homo sapiens
gattagtcatacatc

SEQ ID NO: 763383 - DNA, 15 bp, Homo sapiens
attagtcatacatct

SEQ ID NO: 763384 - DNA, 15 bp, Homo sapiens
ttagtcatacatctt

SEQ ID NO: 763385 - DNA, 15 bp, Homo sapiens
tagtcatacatctta

SEQ ID NO: 763386 - DNA, 15 bp, Homo sapiens
agtcatacatcttac

SEQ ID NO: 763387 - DNA, 15 bp, Homo sapiens
gtcatacatcttact

SEQ ID NO: 763388 - DNA, 15 bp, Homo sapiens
tcatacatcttacta

SEQ ID NO: 763389 - DNA, 15 bp, Homo sapiens
catacatcttactac

SEQ ID NO: 763390 - DNA, 15 bp, Homo sapiens
atacatcttactacc

SEQ ID NO: 763391 - DNA, 15 bp, Homo sapiens
tacatcttactaccc

SEQ ID NO: 763392 - DNA, 15 bp, Homo sapiens
acatcttactaccca

SEQ ID NO: 763393 - DNA, 15 bp, Homo sapiens
catcttactacccac

SEQ ID NO: 763394 - DNA, 15 bp, Homo sapiens
atcttactacccact

SEQ ID NO: 763395 - DNA, 15 bp, Homo sapiens
tcttactacccactt

SEQ ID NO: 763396 - DNA, 15 bp, Homo sapiens
cttactacccactta

SEQ ID NO: 763397 - DNA, 15 bp, Homo sapiens
ttactacccacttaa

SEQ ID NO: 763398 - DNA, 15 bp, Homo sapiens
tactacccacttaaa

SEQ ID NO: 763399 - DNA, 15 bp, Homo sapiens
actacccacttaaac

SEQ ID NO: 763400 - DNA, 15 bp, Homo sapiens
ctacccacttaaact

SEQ ID NO: 763401 - DNA, 15 bp, Homo sapiens
tacccacttaaactt

SEQ ID NO: 763402 - DNA, 15 bp, Homo sapiens
acccacttaaacttt

SEQ ID NO: 763403 - DNA, 15 bp, Homo sapiens
cccacttaaactttc

SEQ ID NO: 763404 - DNA, 15 bp, Homo sapiens
ccacttaaactttct

SEQ ID NO: 763405 - DNA, 15 bp, Homo sapiens
cacttaaactttcta

SEQ ID NO: 763406 - DNA, 15 bp, Homo sapiens
acttaaactttctaa

SEQ ID NO: 763407 - DNA, 15 bp, Homo sapiens
cttaaactttctaaa

SEQ ID NO: 763408 - DNA, 15 bp, Homo sapiens
ttaaactttctaaat

SEQ ID NO: 763409 - DNA, 15 bp, Homo sapiens
taaactttctaaatg

SEQ ID NO: 763410 - DNA, 15 bp, Homo sapiens
aaactttctaaatgt

SEQ ID NO: 763411 - DNA, 15 bp, Homo sapiens
aactttctaaatgtt

SEQ ID NO: 763412 - DNA, 15 bp, Homo sapiens
actttctaaatgtta

SEQ ID NO: 763413 - DNA, 15 bp, Homo sapiens
ctttctaaatgttag

SEQ ID NO: 763414 - DNA, 15 bp, Homo sapiens
tttctaaatgttagc

SEQ ID NO: 763415 - DNA, 15 bp, Homo sapiens
ttctaaatgttagct

SEQ ID NO: 763416 - DNA, 15 bp, Homo sapiens
tctaaatgttagcta

SEQ ID NO: 763417 - DNA, 15 bp, Homo sapiens
ctaaatgttagctaa

SEQ ID NO: 763418 - DNA, 15 bp, Homo sapiens
taaatgttagctaat

SEQ ID NO: 763419 - DNA, 15 bp, Homo sapiens
aaatgttagctaatt

SEQ ID NO: 763420 - DNA, 15 bp, Homo sapiens
aatgttagctaatta

SEQ ID NO: 763421 - DNA, 15 bp, Homo sapiens
atgttagctaattac

SEQ ID NO: 763422 - DNA, 15 bp, Homo sapiens
tgttagctaattact

SEQ ID NO: 763423 - DNA, 15 bp, Homo sapiens
gttagctaattactt

SEQ ID NO: 763424 - DNA, 15 bp, Homo sapiens
ttagctaattacttc

SEQ ID NO: 763425 - DNA, 15 bp, Homo sapiens
tagctaattacttca

SEQ ID NO: 763426 - DNA, 15 bp, Homo sapiens
agctaattacttcac

SEQ ID NO: 763427 - DNA, 15 bp, Homo sapiens
gctaattacttcact

SEQ ID NO: 763428 - DNA, 15 bp, Homo sapiens
ctaattacttcactt

SEQ ID NO: 763429 - DNA, 15 bp, Homo sapiens
taattacttcacttt

SEQ ID NO: 763430 - DNA, 15 bp, Homo sapiens
aattacttcactttc

SEQ ID NO: 763431 - DNA, 15 bp, Homo sapiens
attacttcactttcc

SEQ ID NO: 763432 - DNA, 15 bp, Homo sapiens
ttacttcactttcct

SEQ ID NO: 763433 - DNA, 15 bp, Homo sapiens
tacttcactttcctc

SEQ ID NO: 763434 - DNA, 15 bp, Homo sapiens
acttcactttcctcc

SEQ ID NO: 763435 - DNA, 15 bp, Homo sapiens
cttcactttcctcca

SEQ ID NO: 763436 - DNA, 15 bp, Homo sapiens
ttcactttcctccac

SEQ ID NO: 763437 - DNA, 15 bp, Homo sapiens
tcactttcctccaca

SEQ ID NO: 763438 - DNA, 15 bp, Homo sapiens
cactttcctccacaa

SEQ ID NO: 763439 - DNA, 15 bp, Homo sapiens
actttcctccacaaa

SEQ ID NO: 763440 - DNA, 15 bp, Homo sapiens
ctttcctccacaaat

SEQ ID NO: 763441 - DNA, 15 bp, Homo sapiens
tttcctccacaaata

SEQ ID NO: 763442 - DNA, 15 bp, Homo sapiens
ttcctccacaaatac

SEQ ID NO: 763443 - DNA, 15 bp, Homo sapiens
tcctccacaaatact

SEQ ID NO: 763444 - DNA, 15 bp, Homo sapiens
cctccacaaatactc

SEQ ID NO: 763445 - DNA, 15 bp, Homo sapiens
ctccacaaatactct

SEQ ID NO: 763446 - DNA, 15 bp, Homo sapiens
tccacaaatactctt

SEQ ID NO: 763447 - DNA, 15 bp, Homo sapiens
ccacaaatactcttt

SEQ ID NO: 763448 - DNA, 15 bp, Homo sapiens
cacaaatactctttc

SEQ ID NO: 763449 - DNA, 15 bp, Homo sapiens
acaaatactctttca

SEQ ID NO: 763450 - DNA, 15 bp, Homo sapiens
caaatactctttcat

SEQ ID NO: 763451 - DNA, 15 bp, Homo sapiens
aaatactctttcatg

SEQ ID NO: 763452 - DNA, 15 bp, Homo sapiens
aatactctttcatgg

SEQ ID NO: 763453 - DNA, 15 bp, Homo sapiens
atactctttcatggc

SEQ ID NO: 763454 - DNA, 15 bp, Homo sapiens
tactctttcatggct

SEQ ID NO: 763455 - DNA, 15 bp, Homo sapiens
actctttcatggctc

SEQ ID NO: 763456 - DNA, 15 bp, Homo sapiens
ctctttcatggctcc

SEQ ID NO: 763457 - DNA, 15 bp, Homo sapiens
tctttcatggctcct

SEQ ID NO: 763458 - DNA, 15 bp, Homo sapiens
ctttcatggctcctc

SEQ ID NO: 763459 - DNA, 15 bp, Homo sapiens
tttcatggctcctca

SEQ ID NO: 763460 - DNA, 15 bp, Homo sapiens
ttcatggctcctcat

SEQ ID NO: 763461 - DNA, 15 bp, Homo sapiens
tcatggctcctcatt

SEQ ID NO: 763462 - DNA, 15 bp, Homo sapiens
catggctcctcatta

SEQ ID NO: 763463 - DNA, 15 bp, Homo sapiens
atggctcctcattaa

SEQ ID NO: 763464 - DNA, 15 bp, Homo sapiens
tggctcctcattaac

SEQ ID NO: 763465 - DNA, 15 bp, Homo sapiens
ggctcctcattaacc

SEQ ID NO: 763466 - DNA, 15 bp, Homo sapiens
gctcctcattaacca

SEQ ID NO: 763467 - DNA, 15 bp, Homo sapiens
ctcctcattaaccaa

SEQ ID NO: 763468 - DNA, 15 bp, Homo sapiens
tcctcattaaccaaa

SEQ ID NO: 763469 - DNA, 15 bp, Homo sapiens
cctcattaaccaaag

SEQ ID NO: 763470 - DNA, 15 bp, Homo sapiens
ctcattaaccaaagg

SEQ ID NO: 763471 - DNA, 15 bp, Homo sapiens
tcattaaccaaagga

SEQ ID NO: 763472 - DNA, 15 bp, Homo sapiens
cattaaccaaaggaa

SEQ ID NO: 763473 - DNA, 15 bp, Homo sapiens
attaaccaaaggaaa

SEQ ID NO: 763474 - DNA, 15 bp, Homo sapiens
ttaaccaaaggaaaa

SEQ ID NO: 763475 - DNA, 15 bp, Homo sapiens
taaccaaaggaaaac

SEQ ID NO: 763476 - DNA, 15 bp, Homo sapiens
aaccaaaggaaaaca

SEQ ID NO: 763477 - DNA, 15 bp, Homo sapiens
accaaaggaaaacaa

SEQ ID NO: 763478 - DNA, 15 bp, Homo sapiens
ccaaaggaaaacaaa

SEQ ID NO: 763479 - DNA, 15 bp, Homo sapiens
caaaggaaaacaaaa

SEQ ID NO: 763480 - DNA, 15 bp, Homo sapiens
aaaggaaaacaaaaa

SEQ ID NO: 763481 - DNA, 15 bp, Homo sapiens
aaggaaaacaaaaag

SEQ ID NO: 763482 - DNA, 15 bp, Homo sapiens
aggaaaacaaaaagt

SEQ ID NO: 763483 - DNA, 15 bp, Homo sapiens
ggaaaacaaaaagtc

SEQ ID NO: 763484 - DNA, 15 bp, Homo sapiens
gaaaacaaaaagtcc

SEQ ID NO: 763485 - DNA, 15 bp, Homo sapiens
aaaacaaaaagtcca

SEQ ID NO: 763486 - DNA, 15 bp, Homo sapiens
aaacaaaaagtccaa

SEQ ID NO: 763487 - DNA, 15 bp, Homo sapiens
aacaaaaagtccaaa

SEQ ID NO: 763488 - DNA, 15 bp, Homo sapiens
acaaaaagtccaaac

SEQ ID NO: 763489 - DNA, 15 bp, Homo sapiens
caaaaagtccaaact

SEQ ID NO: 763490 - DNA, 15 bp, Homo sapiens
aaaaagtccaaactt

SEQ ID NO: 763491 - DNA, 15 bp, Homo sapiens
aaaagtccaaacttc

SEQ ID NO: 763492 - DNA, 15 bp, Homo sapiens
aaagtccaaacttct

SEQ ID NO: 763493 - DNA, 15 bp, Homo sapiens
aagtccaaacttctc

SEQ ID NO: 763494 - DNA, 15 bp, Homo sapiens
agtccaaacttctct

SEQ ID NO: 763495 - DNA, 15 bp, Homo sapiens
gtccaaacttctctt

SEQ ID NO: 763496 - DNA, 15 bp, Homo sapiens
tccaaacttctcttc

SEQ ID NO: 763497 - DNA, 15 bp, Homo sapiens
ccaaacttctcttct

SEQ ID NO: 763498 - DNA, 15 bp, Homo sapiens
caaacttctcttctt

SEQ ID NO: 763499 - DNA, 15 bp, Homo sapiens
aaacttctcttcttg

SEQ ID NO: 763500 - DNA, 15 bp, Homo sapiens
aacttctcttcttgg

SEQ ID NO: 763501 - DNA, 15 bp, Homo sapiens
acttctcttcttggt

SEQ ID NO: 763502 - DNA, 15 bp, Homo sapiens
cttctcttcttggtg

SEQ ID NO: 763503 - DNA, 15 bp, Homo sapiens
ttctcttcttggtgc

SEQ ID NO: 763504 - DNA, 15 bp, Homo sapiens
tctcttcttggtgct

SEQ ID NO: 763505 - DNA, 15 bp, Homo sapiens
ctcttcttggtgctc

SEQ ID NO: 763506 - DNA, 15 bp, Homo sapiens
tcttcttggtgctca

SEQ ID NO: 763507 - DNA, 15 bp, Homo sapiens
cttcttggtgctcaa

SEQ ID NO: 763508 - DNA, 15 bp, Homo sapiens
ttcttggtgctcaaa

SEQ ID NO: 763509 - DNA, 15 bp, Homo sapiens
tcttggtgctcaaag

SEQ ID NO: 763510 - DNA, 15 bp, Homo sapiens
cttggtgctcaaaga

SEQ ID NO: 763511 - DNA, 15 bp, Homo sapiens
ttggtgctcaaagat

SEQ ID NO: 763512 - DNA, 15 bp, Homo sapiens
tggtgctcaaagatc

SEQ ID NO: 763513 - DNA, 15 bp, Homo sapiens
ggtgctcaaagatct

SEQ ID NO: 763514 - DNA, 15 bp, Homo sapiens
gtgctcaaagatctc

SEQ ID NO: 763515 - DNA, 15 bp, Homo sapiens
tgctcaaagatctcc

SEQ ID NO: 763516 - DNA, 15 bp, Homo sapiens
gctcaaagatctcca

SEQ ID NO: 763517 - DNA, 15 bp, Homo sapiens
ctcaaagatctccat

SEQ ID NO: 763518 - DNA, 15 bp, Homo sapiens
tcaaagatctccatc

SEQ ID NO: 763519 - DNA, 15 bp, Homo sapiens
caaagatctccatca

SEQ ID NO: 763520 - DNA, 15 bp, Homo sapiens
aaagatctccatcat

SEQ ID NO: 763521 - DNA, 15 bp, Homo sapiens
aagatctccatcatt

SEQ ID NO: 763522 - DNA, 15 bp, Homo sapiens
agatctccatcattc

SEQ ID NO: 763523 - DNA, 15 bp, Homo sapiens
gatctccatcattcc

SEQ ID NO: 763524 - DNA, 15 bp, Homo sapiens
atctccatcattcct

SEQ ID NO: 763525 - DNA, 15 bp, Homo sapiens
tctccatcattcctc

SEQ ID NO: 763526 - DNA, 15 bp, Homo sapiens
ctccatcattcctcc

SEQ ID NO: 763527 - DNA, 15 bp, Homo sapiens
tccatcattcctccc

SEQ ID NO: 763528 - DNA, 15 bp, Homo sapiens
ccatcattcctccct

SEQ ID NO: 763529 - DNA, 15 bp, Homo sapiens
catcattcctccctg

SEQ ID NO: 763530 - DNA, 15 bp, Homo sapiens
atcattcctccctgt

SEQ ID NO: 763531 - DNA, 15 bp, Homo sapiens
tcattcctccctgtg

SEQ ID NO: 763532 - DNA, 15 bp, Homo sapiens
cattcctccctgtgt

SEQ ID NO: 763533 - DNA, 15 bp, Homo sapiens
attcctccctgtgtt

SEQ ID NO: 763534 - DNA, 15 bp, Homo sapiens
ttcctccctgtgttc

SEQ ID NO: 763535 - DNA, 15 bp, Homo sapiens
tcctccctgtgttcc

SEQ ID NO: 763536 - DNA, 15 bp, Homo sapiens
cctccctgtgttcct

SEQ ID NO: 763537 - DNA, 15 bp, Homo sapiens
ctccctgtgttcctg

SEQ ID NO: 763538 - DNA, 15 bp, Homo sapiens
tccctgtgttcctgg

SEQ ID NO: 763539 - DNA, 15 bp, Homo sapiens
ccctgtgttcctggg

SEQ ID NO: 763540 - DNA, 15 bp, Homo sapiens
cctgtgttcctgggc

SEQ ID NO: 763541 - DNA, 15 bp, Homo sapiens
ctgtgttcctgggct

SEQ ID NO: 763542 - DNA, 15 bp, Homo sapiens
tgtgttcctgggctg

SEQ ID NO: 763543 - DNA, 15 bp, Homo sapiens
gtgttcctgggctgc

SEQ ID NO: 763544 - DNA, 15 bp, Homo sapiens
tgttcctgggctgca

SEQ ID NO: 763545 - DNA, 15 bp, Homo sapiens
gttcctgggctgcaa

SEQ ID NO: 763546 - DNA, 15 bp, Homo sapiens
ttcctgggctgcaac

SEQ ID NO: 763547 - DNA, 15 bp, Homo sapiens
tcctgggctgcaacc

SEQ ID NO: 763548 - DNA, 15 bp, Homo sapiens
cctgggctgcaaccc

SEQ ID NO: 763549 - DNA, 15 bp, Homo sapiens
ctgggctgcaaccca

SEQ ID NO: 763550 - DNA, 15 bp, Homo sapiens
tgggctgcaacccac

SEQ ID NO: 763551 - DNA, 15 bp, Homo sapiens
gggctgcaacccaca

SEQ ID NO: 763552 - DNA, 15 bp, Homo sapiens
ggctgcaacccacat

SEQ ID NO: 763553 - DNA, 15 bp, Homo sapiens
gctgcaacccacata

SEQ ID NO: 763554 - DNA, 15 bp, Homo sapiens
ctgcaacccacataa

SEQ ID NO: 763555 - DNA, 15 bp, Homo sapiens
tgcaacccacataac

SEQ ID NO: 763556 - DNA, 15 bp, Homo sapiens
gcaacccacataact

SEQ ID NO: 763557 - DNA, 15 bp, Homo sapiens
caacccacataacta

SEQ ID NO: 763558 - DNA, 15 bp, Homo sapiens
aacccacataactag

SEQ ID NO: 763559 - DNA, 15 bp, Homo sapiens
acccacataactagt

SEQ ID NO: 763560 - DNA, 15 bp, Homo sapiens
cccacataactagtc

SEQ ID NO: 763561 - DNA, 15 bp, Homo sapiens
ccacataactagtca

SEQ ID NO: 763562 - DNA, 15 bp, Homo sapiens
cacataactagtcac

SEQ ID NO: 763563 - DNA, 15 bp, Homo sapiens
acataactagtcacc

SEQ ID NO: 763564 - DNA, 15 bp, Homo sapiens
cataactagtcaccc

SEQ ID NO: 763565 - DNA, 15 bp, Homo sapiens
ataactagtcacccc

SEQ ID NO: 763566 - DNA, 15 bp, Homo sapiens
taactagtcacccct

SEQ ID NO: 763567 - DNA, 15 bp, Homo sapiens
aactagtcaccccta

SEQ ID NO: 763568 - DNA, 15 bp, Homo sapiens
actagtcacccctat

SEQ ID NO: 763569 - DNA, 15 bp, Homo sapiens
ctagtcacccctatc

SEQ ID NO: 763570 - DNA, 15 bp, Homo sapiens
tagtcacccctatct

SEQ ID NO: 763571 - DNA, 15 bp, Homo sapiens
agtcacccctatctc

SEQ ID NO: 763572 - DNA, 15 bp, Homo sapiens
gtcacccctatctcc

SEQ ID NO: 763573 - DNA, 15 bp, Homo sapiens
tcacccctatctcct

SEQ ID NO: 763574 - DNA, 15 bp, Homo sapiens
cacccctatctcctg

SEQ ID NO: 763575 - DNA, 15 bp, Homo sapiens
acccctatctcctgc

SEQ ID NO: 763576 - DNA, 15 bp, Homo sapiens
cccctatctcctgcc

SEQ ID NO: 763577 - DNA, 15 bp, Homo sapiens
ccctatctcctgcct

SEQ ID NO: 763578 - DNA, 15 bp, Homo sapiens
cctatctcctgcctt

SEQ ID NO: 763579 - DNA, 15 bp, Homo sapiens
ctatctcctgcctta

SEQ ID NO: 763580 - DNA, 15 bp, Homo sapiens
tatctcctgccttat

SEQ ID NO: 763581 - DNA, 15 bp, Homo sapiens
atctcctgccttatg

SEQ ID NO: 763582 - DNA, 15 bp, Homo sapiens
tctcctgccttatgt

SEQ ID NO: 763583 - DNA, 15 bp, Homo sapiens
ctcctgccttatgtg

SEQ ID NO: 763584 - DNA, 15 bp, Homo sapiens
tcctgccttatgtgg

SEQ ID NO: 763585 - DNA, 15 bp, Homo sapiens
cctgccttatgtggg

SEQ ID NO: 763586 - DNA, 15 bp, Homo sapiens
ctgccttatgtggga

SEQ ID NO: 763587 - DNA, 15 bp, Homo sapiens
tgccttatgtgggag

SEQ ID NO: 763588 - DNA, 15 bp, Homo sapiens
gccttatgtgggagt

SEQ ID NO: 763589 - DNA, 15 bp, Homo sapiens
ccttatgtgggagtt

SEQ ID NO: 763590 - DNA, 15 bp, Homo sapiens
cttatgtgggagttc

SEQ ID NO: 763591 - DNA, 15 bp, Homo sapiens
ttatgtgggagttca

SEQ ID NO: 763592 - DNA, 15 bp, Homo sapiens
tatgtgggagttcat

SEQ ID NO: 763593 - DNA, 15 bp, Homo sapiens
atgtgggagttcatt

SEQ ID NO: 763594 - DNA, 15 bp, Homo sapiens
tgtgggagttcattt

SEQ ID NO: 763595 - DNA, 15 bp, Homo sapiens
gtgggagttcatttt

SEQ ID NO: 763596 - DNA, 15 bp, Homo sapiens
tgggagttcatttta

SEQ ID NO: 763597 - DNA, 15 bp, Homo sapiens
gggagttcattttat

SEQ ID NO: 763598 - DNA, 15 bp, Homo sapiens
ggagttcattttatc

SEQ ID NO: 763599 - DNA, 15 bp, Homo sapiens
gagttcattttatct

SEQ ID NO: 763600 - DNA, 15 bp, Homo sapiens
agttcattttatctt

SEQ ID NO: 763601 - DNA, 15 bp, Homo sapiens
gttcattttatcttt

SEQ ID NO: 763602 - DNA, 15 bp, Homo sapiens
ttcattttatctttt

SEQ ID NO: 763603 - DNA, 15 bp, Homo sapiens
tcattttatcttttc

SEQ ID NO: 763604 - DNA, 15 bp, Homo sapiens
cattttatcttttct

SEQ ID NO: 763605 - DNA, 15 bp, Homo sapiens
attttatcttttctg

SEQ ID NO: 763606 - DNA, 15 bp, Homo sapiens
ttttatcttttctgc

SEQ ID NO: 763607 - DNA, 15 bp, Homo sapiens
tttatcttttctgct

SEQ ID NO: 763608 - DNA, 15 bp, Homo sapiens
ttatcttttctgctt

SEQ ID NO: 763609 - DNA, 15 bp, Homo sapiens
tatcttttctgcttt

SEQ ID NO: 763610 - DNA, 15 bp, Homo sapiens
atcttttctgctttc

SEQ ID NO: 763611 - DNA, 15 bp, Homo sapiens
tcttttctgctttct

SEQ ID NO: 763612 - DNA, 15 bp, Homo sapiens
cttttctgctttctt

SEQ ID NO: 763613 - DNA, 15 bp, Homo sapiens
ttttctgctttcttg

SEQ ID NO: 763614 - DNA, 15 bp, Homo sapiens
tttctgctttcttgt

SEQ ID NO: 763615 - DNA, 15 bp, Homo sapiens
ttctgctttcttgtc

SEQ ID NO: 763616 - DNA, 15 bp, Homo sapiens
tctgctttcttgtct

SEQ ID NO: 763617 - DNA, 15 bp, Homo sapiens
ctgctttcttgtctg

SEQ ID NO: 763618 - DNA, 15 bp, Homo sapiens
tgctttcttgtctgt

SEQ ID NO: 763619 - DNA, 15 bp, Homo sapiens
gctttcttgtctgtg

SEQ ID NO: 763620 - DNA, 15 bp, Homo sapiens
ctttcttgtctgtgt

SEQ ID NO: 763621 - DNA, 15 bp, Homo sapiens
tttcttgtctgtgta

SEQ ID NO: 763622 - DNA, 15 bp, Homo sapiens
ttcttgtctgtgtat

SEQ ID NO: 763623 - DNA, 15 bp, Homo sapiens
tcttgtctgtgtatc

SEQ ID NO: 763624 - DNA, 15 bp, Homo sapiens
cttgtctgtgtatcc

SEQ ID NO: 763625 - DNA, 15 bp, Homo sapiens
ttgtctgtgtatcct

SEQ ID NO: 763626 - DNA, 15 bp, Homo sapiens
tgtctgtgtatcctg

SEQ ID NO: 763627 - DNA, 15 bp, Homo sapiens
gtctgtgtatcctga

SEQ ID NO: 763628 - DNA, 15 bp, Homo sapiens
tctgtgtatcctgaa

SEQ ID NO: 763629 - DNA, 15 bp, Homo sapiens
ctgtgtatcctgaaa

SEQ ID NO: 763630 - DNA, 15 bp, Homo sapiens
tgtgtatcctgaaat

SEQ ID NO: 763631 - DNA, 15 bp, Homo sapiens
gtgtatcctgaaatt

SEQ ID NO: 763632 - DNA, 15 bp, Homo sapiens
tgtatcctgaaattc

SEQ ID NO: 763633 - DNA, 15 bp, Homo sapiens
gtatcctgaaattcc

SEQ ID NO: 763634 - DNA, 15 bp, Homo sapiens
tatcctgaaattcca

SEQ ID NO: 763635 - DNA, 15 bp, Homo sapiens
atcctgaaattccac

SEQ ID NO: 763636 - DNA, 15 bp, Homo sapiens
tcctgaaattccact

SEQ ID NO: 763637 - DNA, 15 bp, Homo sapiens
cctgaaattccactc

SEQ ID NO: 763638 - DNA, 15 bp, Homo sapiens
ctgaaattccactca

SEQ ID NO: 763639 - DNA, 15 bp, Homo sapiens
tgaaattccactcat

SEQ ID NO: 763640 - DNA, 15 bp, Homo sapiens
gaaattccactcatt

SEQ ID NO: 763641 - DNA, 15 bp, Homo sapiens
aaattccactcattc

SEQ ID NO: 763642 - DNA, 15 bp, Homo sapiens
aattccactcattct

SEQ ID NO: 763643 - DNA, 15 bp, Homo sapiens
attccactcattctt

SEQ ID NO: 763644 - DNA, 15 bp, Homo sapiens
ttccactcattcttc

SEQ ID NO: 763645 - DNA, 15 bp, Homo sapiens
tccactcattcttca

SEQ ID NO: 763646 - DNA, 15 bp, Homo sapiens
ccactcattcttcat

SEQ ID NO: 763647 - DNA, 15 bp, Homo sapiens
cactcattcttcatg

SEQ ID NO: 763648 - DNA, 15 bp, Homo sapiens
actcattcttcatgg

SEQ ID NO: 763649 - DNA, 15 bp, Homo sapiens
ctcattcttcatggc

SEQ ID NO: 763650 - DNA, 15 bp, Homo sapiens
tcattcttcatggcc

SEQ ID NO: 763651 - DNA, 15 bp, Homo sapiens
cattcttcatggcct

SEQ ID NO: 763652 - DNA, 15 bp, Homo sapiens
attcttcatggcctg

SEQ ID NO: 763653 - DNA, 15 bp, Homo sapiens
ttcttcatggcctgg

SEQ ID NO: 763654 - DNA, 15 bp, Homo sapiens
tcttcatggcctggg

SEQ ID NO: 763655 - DNA, 15 bp, Homo sapiens
cttcatggcctgggg

SEQ ID NO: 763656 - DNA, 15 bp, Homo sapiens
ttcatggcctggggc

SEQ ID NO: 763657 - DNA, 15 bp, Homo sapiens
tcatggcctggggct

SEQ ID NO: 763658 - DNA, 15 bp, Homo sapiens
catggcctggggcta

SEQ ID NO: 763659 - DNA, 15 bp, Homo sapiens
atggcctggggctaa

SEQ ID NO: 763660 - DNA, 15 bp, Homo sapiens
tggcctggggctaaa

SEQ ID NO: 763661 - DNA, 15 bp, Homo sapiens
ggcctggggctaaag

SEQ ID NO: 763662 - DNA, 15 bp, Homo sapiens
gcctggggctaaagc

SEQ ID NO: 763663 - DNA, 15 bp, Homo sapiens
cctggggctaaagcc

SEQ ID NO: 763664 - DNA, 15 bp, Homo sapiens
ctggggctaaagcca

SEQ ID NO: 763665 - DNA, 15 bp, Homo sapiens
tggggctaaagccag

SEQ ID NO: 763666 - DNA, 15 bp, Homo sapiens
ggggctaaagccagg

SEQ ID NO: 763667 - DNA, 15 bp, Homo sapiens
gggctaaagccagga

SEQ ID NO: 763668 - DNA, 15 bp, Homo sapiens
ggctaaagccaggaa

SEQ ID NO: 763669 - DNA, 15 bp, Homo sapiens
gctaaagccaggaag

SEQ ID NO: 763670 - DNA, 15 bp, Homo sapiens
ctaaagccaggaagc

SEQ ID NO: 763671 - DNA, 15 bp, Homo sapiens
taaagccaggaagct

SEQ ID NO: 763672 - DNA, 15 bp, Homo sapiens
aaagccaggaagctt

SEQ ID NO: 763673 - DNA, 15 bp, Homo sapiens
aagccaggaagcttc

SEQ ID NO: 763674 - DNA, 15 bp, Homo sapiens
agccaggaagcttct

SEQ ID NO: 763675 - DNA, 15 bp, Homo sapiens
gccaggaagcttctg

SEQ ID NO: 763676 - DNA, 15 bp, Homo sapiens
ccaggaagcttctgt

SEQ ID NO: 763677 - DNA, 15 bp, Homo sapiens
caggaagcttctgtt

SEQ ID NO: 763678 - DNA, 15 bp, Homo sapiens
aggaagcttctgttt

SEQ ID NO: 763679 - DNA, 15 bp, Homo sapiens
ggaagcttctgtttt

SEQ ID NO: 763680 - DNA, 15 bp, Homo sapiens
gaagcttctgttttt

SEQ ID NO: 763681 - DNA, 15 bp, Homo sapiens
aagcttctgtttttg

SEQ ID NO: 763682 - DNA, 15 bp, Homo sapiens
agcttctgtttttga

SEQ ID NO: 763683 - DNA, 15 bp, Homo sapiens
gcttctgtttttgat

SEQ ID NO: 763684 - DNA, 15 bp, Homo sapiens
cttctgtttttgatg

SEQ ID NO: 763685 - DNA, 15 bp, Homo sapiens
ttctgtttttgatgt

SEQ ID NO: 763686 - DNA, 15 bp, Homo sapiens
tctgtttttgatgtt

SEQ ID NO: 763687 - DNA, 15 bp, Homo sapiens
ctgtttttgatgttc

SEQ ID NO: 763688 - DNA, 15 bp, Homo sapiens
tgtttttgatgttct

SEQ ID NO: 763689 - DNA, 15 bp, Homo sapiens
gtttttgatgttcta

SEQ ID NO: 763690 - DNA, 15 bp, Homo sapiens
tttttgatgttctaa

SEQ ID NO: 763691 - DNA, 15 bp, Homo sapiens
ttttgatgttctaag

SEQ ID NO: 763692 - DNA, 15 bp, Homo sapiens
tttgatgttctaagt

SEQ ID NO: 763693 - DNA, 15 bp, Homo sapiens
ttgatgttctaagtt

SEQ ID NO: 763694 - DNA, 15 bp, Homo sapiens
tgatgttctaagtta

SEQ ID NO: 763695 - DNA, 15 bp, Homo sapiens
gatgttctaagttag

SEQ ID NO: 763696 - DNA, 15 bp, Homo sapiens
atgttctaagttaga

SEQ ID NO: 763697 - DNA, 15 bp, Homo sapiens
tgttctaagttagaa

SEQ ID NO: 763698 - DNA, 15 bp, Homo sapiens
gttctaagttagaag

SEQ ID NO: 763699 - DNA, 15 bp, Homo sapiens
ttctaagttagaagt

SEQ ID NO: 763700 - DNA, 15 bp, Homo sapiens
tctaagttagaagta

SEQ ID NO: 763701 - DNA, 15 bp, Homo sapiens
ctaagttagaagtaa

SEQ ID NO: 763702 - DNA, 15 bp, Homo sapiens
taagttagaagtaac

SEQ ID NO: 763703 - DNA, 15 bp, Homo sapiens
aagttagaagtaaca

SEQ ID NO: 763704 - DNA, 15 bp, Homo sapiens
agttagaagtaacat

SEQ ID NO: 763705 - DNA, 15 bp, Homo sapiens
gttagaagtaacatc

SEQ ID NO: 763706 - DNA, 15 bp, Homo sapiens
ttagaagtaacatct

SEQ ID NO: 763707 - DNA, 15 bp, Homo sapiens
tagaagtaacatctc

SEQ ID NO: 763708 - DNA, 15 bp, Homo sapiens
agaagtaacatctct

SEQ ID NO: 763709 - DNA, 15 bp, Homo sapiens
gaagtaacatctctc

SEQ ID NO: 763710 - DNA, 15 bp, Homo sapiens
aagtaacatctctct

SEQ ID NO: 763711 - DNA, 15 bp, Homo sapiens
agtaacatctctctc

SEQ ID NO: 763712 - DNA, 15 bp, Homo sapiens
gtaacatctctctcc

SEQ ID NO: 763713 - DNA, 15 bp, Homo sapiens
taacatctctctcct

SEQ ID NO: 763714 - DNA, 15 bp, Homo sapiens
aacatctctctcctc

SEQ ID NO: 763715 - DNA, 15 bp, Homo sapiens
acatctctctcctct

SEQ ID NO: 763716 - DNA, 15 bp, Homo sapiens
catctctctcctcta

SEQ ID NO: 763717 - DNA, 15 bp, Homo sapiens
atctctctcctctaa

SEQ ID NO: 763718 - DNA, 15 bp, Homo sapiens
tctctctcctctaac

SEQ ID NO: 763719 - DNA, 15 bp, Homo sapiens
ctctctcctctaact

SEQ ID NO: 763720 - DNA, 15 bp, Homo sapiens
tctctcctctaacta

SEQ ID NO: 763721 - DNA, 15 bp, Homo sapiens
ctctcctctaactaa

SEQ ID NO: 763722 - DNA, 15 bp, Homo sapiens
tctcctctaactaat

SEQ ID NO: 763723 - DNA, 15 bp, Homo sapiens
ctcctctaactaatg

SEQ ID NO: 763724 - DNA, 15 bp, Homo sapiens
tcctctaactaatga

SEQ ID NO: 763725 - DNA, 15 bp, Homo sapiens
cctctaactaatgag

SEQ ID NO: 763726 - DNA, 15 bp, Homo sapiens
ctctaactaatgagc

SEQ ID NO: 763727 - DNA, 15 bp, Homo sapiens
tctaactaatgagct

SEQ ID NO: 763728 - DNA, 15 bp, Homo sapiens
ctaactaatgagctt

SEQ ID NO: 763729 - DNA, 15 bp, Homo sapiens
taactaatgagcttc

SEQ ID NO: 763730 - DNA, 15 bp, Homo sapiens
aactaatgagcttcc

SEQ ID NO: 763731 - DNA, 15 bp, Homo sapiens
actaatgagcttccc

SEQ ID NO: 763732 - DNA, 15 bp, Homo sapiens
ctaatgagcttcccc

SEQ ID NO: 763733 - DNA, 15 bp, Homo sapiens
taatgagcttccccc

SEQ ID NO: 763734 - DNA, 15 bp, Homo sapiens
aatgagcttcccccc

SEQ ID NO: 763735 - DNA, 15 bp, Homo sapiens
atgagcttcccccca

SEQ ID NO: 763736 - DNA, 15 bp, Homo sapiens
tgagcttccccccaa

SEQ ID NO: 763737 - DNA, 15 bp, Homo sapiens
gagcttccccccaac

SEQ ID NO: 763738 - DNA, 15 bp, Homo sapiens
agcttccccccaacc

SEQ ID NO: 763739 - DNA, 15 bp, Homo sapiens
gcttccccccaacca

SEQ ID NO: 763740 - DNA, 15 bp, Homo sapiens
cttccccccaaccaa

SEQ ID NO: 763741 - DNA, 15 bp, Homo sapiens
ttccccccaaccaaa

SEQ ID NO: 763742 - DNA, 15 bp, Homo sapiens
tccccccaaccaaag

SEQ ID NO: 763743 - DNA, 15 bp, Homo sapiens
ccccccaaccaaagc

SEQ ID NO: 763744 - DNA, 15 bp, Homo sapiens
cccccaaccaaagct

SEQ ID NO: 763745 - DNA, 15 bp, Homo sapiens
ccccaaccaaagctt

SEQ ID NO: 763746 - DNA, 15 bp, Homo sapiens
cccaaccaaagcttc

SEQ ID NO: 763747 - DNA, 15 bp, Homo sapiens
ccaaccaaagcttct

SEQ ID NO: 763748 - DNA, 15 bp, Homo sapiens
caaccaaagcttcta

SEQ ID NO: 763749 - DNA, 15 bp, Homo sapiens
aaccaaagcttctac

SEQ ID NO: 763750 - DNA, 15 bp, Homo sapiens
accaaagcttctacc

SEQ ID NO: 763751 - DNA, 15 bp, Homo sapiens
ccaaagcttctaccc

SEQ ID NO: 763752 - DNA, 15 bp, Homo sapiens
caaagcttctacccc

SEQ ID NO: 763753 - DNA, 15 bp, Homo sapiens
aaagcttctacccca

SEQ ID NO: 763754 - DNA, 15 bp, Homo sapiens
aagcttctaccccat

SEQ ID NO: 763755 - DNA, 15 bp, Homo sapiens
tgacaagctccatga

SEQ ID NO: 763756 - DNA, 15 bp, Homo sapiens
gacaagctccatgag

SEQ ID NO: 763757 - DNA, 15 bp, Homo sapiens
acaagctccatgagt

SEQ ID NO: 763758 - DNA, 15 bp, Homo sapiens
caagctccatgagtc

SEQ ID NO: 763759 - DNA, 15 bp, Homo sapiens
aagctccatgagtca

SEQ ID NO: 763760 - DNA, 15 bp, Homo sapiens
agctccatgagtcac

SEQ ID NO: 763761 - DNA, 15 bp, Homo sapiens
gctccatgagtcact

SEQ ID NO: 763762 - DNA, 15 bp, Homo sapiens
ctccatgagtcactc

SEQ ID NO: 763763 - DNA, 15 bp, Homo sapiens
tccatgagtcactca

SEQ ID NO: 763764 - DNA, 15 bp, Homo sapiens
ccatgagtcactcaa

SEQ ID NO: 763765 - DNA, 15 bp, Homo sapiens
catgagtcactcaac

SEQ ID NO: 763766 - DNA, 15 bp, Homo sapiens
atgagtcactcaact

SEQ ID NO: 763767 - DNA, 15 bp, Homo sapiens
tgagtcactcaactg

SEQ ID NO: 763768 - DNA, 15 bp, Homo sapiens
gagtcactcaactgg

SEQ ID NO: 763769 - DNA, 15 bp, Homo sapiens
agtcactcaactggc

SEQ ID NO: 763770 - DNA, 15 bp, Homo sapiens
gtcactcaactggcc

SEQ ID NO: 763771 - DNA, 15 bp, Homo sapiens
tcactcaactggccg

SEQ ID NO: 763772 - DNA, 15 bp, Homo sapiens
cactcaactggccgc

SEQ ID NO: 763773 - DNA, 15 bp, Homo sapiens
actcaactggccgct

SEQ ID NO: 763774 - DNA, 15 bp, Homo sapiens
ctcaactggccgctc

SEQ ID NO: 763775 - DNA, 15 bp, Homo sapiens
tcaactggccgctcc

SEQ ID NO: 763776 - DNA, 15 bp, Homo sapiens
caactggccgctcca

SEQ ID NO: 763777 - DNA, 15 bp, Homo sapiens
aactggccgctccag

SEQ ID NO: 763778 - DNA, 15 bp, Homo sapiens
actggccgctccagc

SEQ ID NO: 763779 - DNA, 15 bp, Homo sapiens
ctggccgctccagcc

SEQ ID NO: 763780 - DNA, 15 bp, Homo sapiens
tggccgctccagcca

SEQ ID NO: 763781 - DNA, 15 bp, Homo sapiens
ggccgctccagccag

SEQ ID NO: 763782 - DNA, 15 bp, Homo sapiens
gccgctccagccaga

SEQ ID NO: 763783 - DNA, 15 bp, Homo sapiens
ccgctccagccagag

SEQ ID NO: 763784 - DNA, 15 bp, Homo sapiens
cgctccagccagaga

SEQ ID NO: 763785 - DNA, 15 bp, Homo sapiens
gctccagccagagag

SEQ ID NO: 763786 - DNA, 15 bp, Homo sapiens
ctccagccagagagc

SEQ ID NO: 763787 - DNA, 15 bp, Homo sapiens
tccagccagagagca

SEQ ID NO: 763788 - DNA, 15 bp, Homo sapiens
ccagccagagagcat

SEQ ID NO: 763789 - DNA, 15 bp, Homo sapiens
cagccagagagcatc

SEQ ID NO: 763790 - DNA, 15 bp, Homo sapiens
agccagagagcatca

SEQ ID NO: 763791 - DNA, 15 bp, Homo sapiens
gccagagagcatcaa

SEQ ID NO: 763792 - DNA, 15 bp, Homo sapiens
ccagagagcatcaag

SEQ ID NO: 763793 - DNA, 15 bp, Homo sapiens
cagagagcatcaagg

SEQ ID NO: 763794 - DNA, 15 bp, Homo sapiens
agagagcatcaagga

SEQ ID NO: 763795 - DNA, 15 bp, Homo sapiens
gagagcatcaaggag

SEQ ID NO: 763796 - DNA, 15 bp, Homo sapiens
agagcatcaaggagg

SEQ ID NO: 763797 - DNA, 15 bp, Homo sapiens
gagcatcaaggaggg

SEQ ID NO: 763798 - DNA, 15 bp, Homo sapiens
agcatcaaggagggg

SEQ ID NO: 763799 - DNA, 15 bp, Homo sapiens
gcatcaaggaggggt

SEQ ID NO: 763800 - DNA, 15 bp, Homo sapiens
catcaaggaggggtt

SEQ ID NO: 763801 - DNA, 15 bp, Homo sapiens
atcaaggaggggttt

SEQ ID NO: 763802 - DNA, 15 bp, Homo sapiens
tcaaggaggggttta

SEQ ID NO: 763803 - DNA, 15 bp, Homo sapiens
caaggaggggtttat

SEQ ID NO: 763804 - DNA, 15 bp, Homo sapiens
aaggaggggtttatg

SEQ ID NO: 763805 - DNA, 15 bp, Homo sapiens
aggaggggtttatga

SEQ ID NO: 763806 - DNA, 15 bp, Homo sapiens
ggaggggtttatgac

SEQ ID NO: 763807 - DNA, 15 bp, Homo sapiens
gaggggtttatgaca

SEQ ID NO: 763808 - DNA, 15 bp, Homo sapiens
aggggtttatgacac

SEQ ID NO: 763809 - DNA, 15 bp, Homo sapiens
ggggtttatgacact

SEQ ID NO: 763810 - DNA, 15 bp, Homo sapiens
gggtttatgacactg

SEQ ID NO: 763811 - DNA, 15 bp, Homo sapiens
ggtttatgacactgc

SEQ ID NO: 763812 - DNA, 15 bp, Homo sapiens
gtttatgacactgcc

SEQ ID NO: 763813 - DNA, 15 bp, Homo sapiens
tttatgacactgcct

SEQ ID NO: 763814 - DNA, 15 bp, Homo sapiens
ttatgacactgcctc

SEQ ID NO: 763815 - DNA, 15 bp, Homo sapiens
tatgacactgcctca

SEQ ID NO: 763816 - DNA, 15 bp, Homo sapiens
atgacactgcctcat

SEQ ID NO: 763817 - DNA, 15 bp, Homo sapiens
tgacactgcctcatg

SEQ ID NO: 763818 - DNA, 15 bp, Homo sapiens
gacactgcctcatgc

SEQ ID NO: 763819 - DNA, 15 bp, Homo sapiens
acactgcctcatgca

SEQ ID NO: 763820 - DNA, 15 bp, Homo sapiens
cactgcctcatgcag

SEQ ID NO: 763821 - DNA, 15 bp, Homo sapiens
actgcctcatgcagc

SEQ ID NO: 763822 - DNA, 15 bp, Homo sapiens
ctgcctcatgcagca

SEQ ID NO: 763823 - DNA, 15 bp, Homo sapiens
tgcctcatgcagcag

SEQ ID NO: 763824 - DNA, 15 bp, Homo sapiens
gcctcatgcagcagt

SEQ ID NO: 763825 - DNA, 15 bp, Homo sapiens
cctcatgcagcagtg

SEQ ID NO: 763826 - DNA, 15 bp, Homo sapiens
ctcatgcagcagtga

SEQ ID NO: 763827 - DNA, 15 bp, Homo sapiens
tcatgcagcagtgat

SEQ ID NO: 763828 - DNA, 15 bp, Homo sapiens
catgcagcagtgatc

SEQ ID NO: 763829 - DNA, 15 bp, Homo sapiens
atgcagcagtgatca

SEQ ID NO: 763830 - DNA, 15 bp, Homo sapiens
tgcagcagtgatcag

SEQ ID NO: 763831 - DNA, 15 bp, Homo sapiens
gcagcagtgatcagc

SEQ ID NO: 763832 - DNA, 15 bp, Homo sapiens
cagcagtgatcagcc

SEQ ID NO: 763833 - DNA, 15 bp, Homo sapiens
agcagtgatcagcca

SEQ ID NO: 763834 - DNA, 15 bp, Homo sapiens
gcagtgatcagccat

SEQ ID NO: 763835 - DNA, 15 bp, Homo sapiens
cagtgatcagccatg

SEQ ID NO: 763836 - DNA, 15 bp, Homo sapiens
agtgatcagccatga

SEQ ID NO: 763837 - DNA, 15 bp, Homo sapiens
gtgatcagccatgag

SEQ ID NO: 763838 - DNA, 15 bp, Homo sapiens
tgatcagccatgagg

SEQ ID NO: 763839 - DNA, 15 bp, Homo sapiens
gatcagccatgaggt

SEQ ID NO: 763840 - DNA, 15 bp, Homo sapiens
atcagccatgaggtg

SEQ ID NO: 763841 - DNA, 15 bp, Homo sapiens
tcagccatgaggtgg

SEQ ID NO: 763842 - DNA, 15 bp, Homo sapiens
cagccatgaggtggc

SEQ ID NO: 763843 - DNA, 15 bp, Homo sapiens
agccatgaggtggca

SEQ ID NO: 763844 - DNA, 15 bp, Homo sapiens
gccatgaggtggcat

SEQ ID NO: 763845 - DNA, 15 bp, Homo sapiens
ccatgaggtggcatc

SEQ ID NO: 763846 - DNA, 15 bp, Homo sapiens
catgaggtggcatcc

SEQ ID NO: 763847 - DNA, 15 bp, Homo sapiens
atgaggtggcatcca

SEQ ID NO: 763848 - DNA, 15 bp, Homo sapiens
tgaggtggcatccat

SEQ ID NO: 763849 - DNA, 15 bp, Homo sapiens
gaggtggcatccatc

SEQ ID NO: 763850 - DNA, 15 bp, Homo sapiens
aggtggcatccatcc

SEQ ID NO: 763851 - DNA, 15 bp, Homo sapiens
ggtggcatccatcca

SEQ ID NO: 763852 - DNA, 15 bp, Homo sapiens
gtggcatccatccat

SEQ ID NO: 763853 - DNA, 15 bp, Homo sapiens
tggcatccatccatt

SEQ ID NO: 763854 - DNA, 15 bp, Homo sapiens
ggcatccatccattg

SEQ ID NO: 763855 - DNA, 15 bp, Homo sapiens
gcatccatccattgt

SEQ ID NO: 763856 - DNA, 15 bp, Homo sapiens
catccatccattgtc

SEQ ID NO: 763857 - DNA, 15 bp, Homo sapiens
atccatccattgtca

SEQ ID NO: 763858 - DNA, 15 bp, Homo sapiens
tccatccattgtcag

SEQ ID NO: 763859 - DNA, 15 bp, Homo sapiens
ccatccattgtcagg

SEQ ID NO: 763860 - DNA, 15 bp, Homo sapiens
catccattgtcaggg

SEQ ID NO: 763861 - DNA, 15 bp, Homo sapiens
atccattgtcagggg

SEQ ID NO: 763862 - DNA, 15 bp, Homo sapiens
tccattgtcagggga

SEQ ID NO: 763863 - DNA, 15 bp, Homo sapiens
ccattgtcaggggac

SEQ ID NO: 763864 - DNA, 15 bp, Homo sapiens
cattgtcaggggaca

SEQ ID NO: 763865 - DNA, 15 bp, Homo sapiens
attgtcaggggacag

SEQ ID NO: 763866 - DNA, 15 bp, Homo sapiens
ttgtcaggggacagt

SEQ ID NO: 763867 - DNA, 15 bp, Homo sapiens
tgtcaggggacagtc

SEQ ID NO: 763868 - DNA, 15 bp, Homo sapiens
gtcaggggacagtcc

SEQ ID NO: 763869 - DNA, 15 bp, Homo sapiens
tcaggggacagtcca

SEQ ID NO: 763870 - DNA, 15 bp, Homo sapiens
caggggacagtccat

SEQ ID NO: 763871 - DNA, 15 bp, Homo sapiens
aggggacagtccatc

SEQ ID NO: 763872 - DNA, 15 bp, Homo sapiens
ggggacagtccatcc

SEQ ID NO: 763873 - DNA, 15 bp, Homo sapiens
gggacagtccatcct

SEQ ID NO: 763874 - DNA, 15 bp, Homo sapiens
ggacagtccatcctc

SEQ ID NO: 763875 - DNA, 15 bp, Homo sapiens
gacagtccatcctcc

SEQ ID NO: 763876 - DNA, 15 bp, Homo sapiens
acagtccatcctcct

SEQ ID NO: 763877 - DNA, 15 bp, Homo sapiens
cagtccatcctcctc

SEQ ID NO: 763878 - DNA, 15 bp, Homo sapiens
agtccatcctcctca

SEQ ID NO: 763879 - DNA, 15 bp, Homo sapiens
gtccatcctcctcag

SEQ ID NO: 763880 - DNA, 15 bp, Homo sapiens
tccatcctcctcagg

SEQ ID NO: 763881 - DNA, 15 bp, Homo sapiens
ccatcctcctcaggc

SEQ ID NO: 763882 - DNA, 15 bp, Homo sapiens
catcctcctcaggca

SEQ ID NO: 763883 - DNA, 15 bp, Homo sapiens
atcctcctcaggcac

SEQ ID NO: 763884 - DNA, 15 bp, Homo sapiens
tcctcctcaggcaca

SEQ ID NO: 763885 - DNA, 15 bp, Homo sapiens
cctcctcaggcacat

SEQ ID NO: 763886 - DNA, 15 bp, Homo sapiens
ctcctcaggcacatg

SEQ ID NO: 763887 - DNA, 15 bp, Homo sapiens
tcctcaggcacatgc

SEQ ID NO: 763888 - DNA, 15 bp, Homo sapiens
cctcaggcacatgca

SEQ ID NO: 763889 - DNA, 15 bp, Homo sapiens
ctcaggcacatgcac

SEQ ID NO: 763890 - DNA, 15 bp, Homo sapiens
tcaggcacatgcaca

SEQ ID NO: 763891 - DNA, 15 bp, Homo sapiens
caggcacatgcacag

SEQ ID NO: 763892 - DNA, 15 bp, Homo sapiens
aggcacatgcacaga

SEQ ID NO: 763893 - DNA, 15 bp, Homo sapiens
ggcacatgcacagag

SEQ ID NO: 763894 - DNA, 15 bp, Homo sapiens
gcacatgcacagagg

SEQ ID NO: 763895 - DNA, 15 bp, Homo sapiens
cacatgcacagagga

SEQ ID NO: 763896 - DNA, 15 bp, Homo sapiens
acatgcacagaggat

SEQ ID NO: 763897 - DNA, 15 bp, Homo sapiens
catgcacagaggatt

SEQ ID NO: 763898 - DNA, 15 bp, Homo sapiens
atgcacagaggattg

SEQ ID NO: 763899 - DNA, 15 bp, Homo sapiens
tgcacagaggattgg

SEQ ID NO: 763900 - DNA, 15 bp, Homo sapiens
gcacagaggattggg

SEQ ID NO: 763901 - DNA, 15 bp, Homo sapiens
cacagaggattgggt

SEQ ID NO: 763902 - DNA, 15 bp, Homo sapiens
acagaggattgggtg

SEQ ID NO: 763903 - DNA, 15 bp, Homo sapiens
cagaggattgggtgc

SEQ ID NO: 763904 - DNA, 15 bp, Homo sapiens
agaggattgggtgca

SEQ ID NO: 763905 - DNA, 15 bp, Homo sapiens
gaggattgggtgcag

SEQ ID NO: 763906 - DNA, 15 bp, Homo sapiens
aggattgggtgcaga

SEQ ID NO: 763907 - DNA, 15 bp, Homo sapiens
ggattgggtgcagag

SEQ ID NO: 763908 - DNA, 15 bp, Homo sapiens
gattgggtgcagagg

SEQ ID NO: 763909 - DNA, 15 bp, Homo sapiens
attgggtgcagagga

SEQ ID NO: 763910 - DNA, 15 bp, Homo sapiens
ttgggtgcagaggag

SEQ ID NO: 763911 - DNA, 15 bp, Homo sapiens
tgggtgcagaggagt

SEQ ID NO: 763912 - DNA, 15 bp, Homo sapiens
gggtgcagaggagtt

SEQ ID NO: 763913 - DNA, 15 bp, Homo sapiens
ggtgcagaggagttc

SEQ ID NO: 763914 - DNA, 15 bp, Homo sapiens
gtgcagaggagttca

SEQ ID NO: 763915 - DNA, 15 bp, Homo sapiens
tgcagaggagttcac

SEQ ID NO: 763916 - DNA, 15 bp, Homo sapiens
gcagaggagttcacc

SEQ ID NO: 763917 - DNA, 15 bp, Homo sapiens
cagaggagttcaccc

SEQ ID NO: 763918 - DNA, 15 bp, Homo sapiens
agaggagttcaccct

SEQ ID NO: 763919 - DNA, 15 bp, Homo sapiens
gaggagttcaccctc

SEQ ID NO: 763920 - DNA, 15 bp, Homo sapiens
aggagttcaccctca

SEQ ID NO: 763921 - DNA, 15 bp, Homo sapiens
ggagttcaccctcaa

SEQ ID NO: 763922 - DNA, 15 bp, Homo sapiens
gagttcaccctcaac

SEQ ID NO: 763923 - DNA, 15 bp, Homo sapiens
agttcaccctcaaca

SEQ ID NO: 763924 - DNA, 15 bp, Homo sapiens
gttcaccctcaacac

SEQ ID NO: 763925 - DNA, 15 bp, Homo sapiens
ttcaccctcaacacc

SEQ ID NO: 763926 - DNA, 15 bp, Homo sapiens
tcaccctcaacacct

SEQ ID NO: 763927 - DNA, 15 bp, Homo sapiens
caccctcaacacctc

SEQ ID NO: 763928 - DNA, 15 bp, Homo sapiens
accctcaacacctct

SEQ ID NO: 763929 - DNA, 15 bp, Homo sapiens
ccctcaacacctctg

SEQ ID NO: 763930 - DNA, 15 bp, Homo sapiens
cctcaacacctctgg

SEQ ID NO: 763931 - DNA, 15 bp, Homo sapiens
ctcaacacctctggg

SEQ ID NO: 763932 - DNA, 15 bp, Homo sapiens
tcaacacctctgggt

SEQ ID NO: 763933 - DNA, 15 bp, Homo sapiens
caacacctctgggtg

SEQ ID NO: 763934 - DNA, 15 bp, Homo sapiens
aacacctctgggtgt

SEQ ID NO: 763935 - DNA, 15 bp, Homo sapiens
acacctctgggtgtt

SEQ ID NO: 763936 - DNA, 15 bp, Homo sapiens
cacctctgggtgttg

SEQ ID NO: 763937 - DNA, 15 bp, Homo sapiens
acctctgggtgttgg

SEQ ID NO: 763938 - DNA, 15 bp, Homo sapiens
cctctgggtgttggg

SEQ ID NO: 763939 - DNA, 15 bp, Homo sapiens
ctctgggtgttggga

SEQ ID NO: 763940 - DNA, 15 bp, Homo sapiens
tctgggtgttgggag

SEQ ID NO: 763941 - DNA, 15 bp, Homo sapiens
ctgggtgttgggagg

SEQ ID NO: 763942 - DNA, 15 bp, Homo sapiens
tgggtgttgggaggc

SEQ ID NO: 763943 - DNA, 15 bp, Homo sapiens
gggtgttgggaggca

SEQ ID NO: 763944 - DNA, 15 bp, Homo sapiens
ggtgttgggaggcag

SEQ ID NO: 763945 - DNA, 15 bp, Homo sapiens
gtgttgggaggcagg

SEQ ID NO: 763946 - DNA, 15 bp, Homo sapiens
tgttgggaggcagga

SEQ ID NO: 763947 - DNA, 15 bp, Homo sapiens
gttgggaggcaggag

SEQ ID NO: 763948 - DNA, 15 bp, Homo sapiens
ttgggaggcaggaga

SEQ ID NO: 763949 - DNA, 15 bp, Homo sapiens
tgggaggcaggagag

SEQ ID NO: 763950 - DNA, 15 bp, Homo sapiens
gggaggcaggagagc

SEQ ID NO: 763951 - DNA, 15 bp, Homo sapiens
ggaggcaggagagca

SEQ ID NO: 763952 - DNA, 15 bp, Homo sapiens
gaggcaggagagcag

SEQ ID NO: 763953 - DNA, 15 bp, Homo sapiens
aggcaggagagcagt

SEQ ID NO: 763954 - DNA, 15 bp, Homo sapiens
ggcaggagagcagtg

SEQ ID NO: 763955 - DNA, 15 bp, Homo sapiens
gcaggagagcagtgg

SEQ ID NO: 763956 - DNA, 15 bp, Homo sapiens
caggagagcagtggg

SEQ ID NO: 763957 - DNA, 15 bp, Homo sapiens
aggagagcagtgggg

SEQ ID NO: 763958 - DNA, 15 bp, Homo sapiens
ggagagcagtggggc

SEQ ID NO: 763959 - DNA, 15 bp, Homo sapiens
gagagcagtggggct

SEQ ID NO: 763960 - DNA, 15 bp, Homo sapiens
agagcagtggggctg

SEQ ID NO: 763961 - DNA, 15 bp, Homo sapiens
gagcagtggggctgg

SEQ ID NO: 763962 - DNA, 15 bp, Homo sapiens
agcagtggggctgga

SEQ ID NO: 763963 - DNA, 15 bp, Homo sapiens
gcagtggggctggag

SEQ ID NO: 763964 - DNA, 15 bp, Homo sapiens
cagtggggctggagg

SEQ ID NO: 763965 - DNA, 15 bp, Homo sapiens
agtggggctggaggc

SEQ ID NO: 763966 - DNA, 15 bp, Homo sapiens
gtggggctggaggca

SEQ ID NO: 763967 - DNA, 15 bp, Homo sapiens
tggggctggaggcac

SEQ ID NO: 763968 - DNA, 15 bp, Homo sapiens
ggggctggaggcaca

SEQ ID NO: 763969 - DNA, 15 bp, Homo sapiens
gggctggaggcacag

SEQ ID NO: 763970 - DNA, 15 bp, Homo sapiens
ggctggaggcacagc

SEQ ID NO: 763971 - DNA, 15 bp, Homo sapiens
gctggaggcacagct

SEQ ID NO: 763972 - DNA, 15 bp, Homo sapiens
ctggaggcacagctc

SEQ ID NO: 763973 - DNA, 15 bp, Homo sapiens
tggaggcacagctct

SEQ ID NO: 763974 - DNA, 15 bp, Homo sapiens
ggaggcacagctctg

SEQ ID NO: 763975 - DNA, 15 bp, Homo sapiens
gaggcacagctctgc

SEQ ID NO: 763976 - DNA, 15 bp, Homo sapiens
aggcacagctctgcc

SEQ ID NO: 763977 - DNA, 15 bp, Homo sapiens
ggcacagctctgcca

SEQ ID NO: 763978 - DNA, 15 bp, Homo sapiens
gcacagctctgccaa

SEQ ID NO: 763979 - DNA, 15 bp, Homo sapiens
cacagctctgccaag

SEQ ID NO: 763980 - DNA, 15 bp, Homo sapiens
acagctctgccaagc

SEQ ID NO: 763981 - DNA, 15 bp, Homo sapiens
cagctctgccaagca

SEQ ID NO: 763982 - DNA, 15 bp, Homo sapiens
agctctgccaagcat

SEQ ID NO: 763983 - DNA, 15 bp, Homo sapiens
gctctgccaagcatt

SEQ ID NO: 763984 - DNA, 15 bp, Homo sapiens
ctctgccaagcattc

SEQ ID NO: 763985 - DNA, 15 bp, Homo sapiens
tctgccaagcattcc

SEQ ID NO: 763986 - DNA, 15 bp, Homo sapiens
ctgccaagcattcct

SEQ ID NO: 763987 - DNA, 15 bp, Homo sapiens
tgccaagcattcctg

SEQ ID NO: 763988 - DNA, 15 bp, Homo sapiens
gccaagcattcctga

SEQ ID NO: 763989 - DNA, 15 bp, Homo sapiens
ccaagcattcctgaa

SEQ ID NO: 763990 - DNA, 15 bp, Homo sapiens
caagcattcctgaac

SEQ ID NO: 763991 - DNA, 15 bp, Homo sapiens
aagcattcctgaacc

SEQ ID NO: 763992 - DNA, 15 bp, Homo sapiens
agcattcctgaacca

SEQ ID NO: 763993 - DNA, 15 bp, Homo sapiens
gcattcctgaaccaa

SEQ ID NO: 763994 - DNA, 15 bp, Homo sapiens
cattcctgaaccaaa

SEQ ID NO: 763995 - DNA, 15 bp, Homo sapiens
attcctgaaccaaag

SEQ ID NO: 763996 - DNA, 15 bp, Homo sapiens
ttcctgaaccaaagc

SEQ ID NO: 763997 - DNA, 15 bp, Homo sapiens
tcctgaaccaaagca

SEQ ID NO: 763998 - DNA, 15 bp, Homo sapiens
cctgaaccaaagcaa

SEQ ID NO: 763999 - DNA, 15 bp, Homo sapiens
ctgaaccaaagcaag

SEQ ID NO: 764000 - DNA, 15 bp, Homo sapiens
tgaaccaaagcaagc

SEQ ID NO: 764001 - DNA, 15 bp, Homo sapiens
gaaccaaagcaagcc

SEQ ID NO: 764002 - DNA, 15 bp, Homo sapiens
aaccaaagcaagcca

SEQ ID NO: 764003 - DNA, 15 bp, Homo sapiens
accaaagcaagccat

SEQ ID NO: 764004 - DNA, 15 bp, Homo sapiens
ccaaagcaagccatc

SEQ ID NO: 764005 - DNA, 15 bp, Homo sapiens
caaagcaagccatca

SEQ ID NO: 764006 - DNA, 15 bp, Homo sapiens
aaagcaagccatcaa

SEQ ID NO: 764007 - DNA, 15 bp, Homo sapiens
aagcaagccatcaat

SEQ ID NO: 764008 - DNA, 15 bp, Homo sapiens
agcaagccatcaatg

SEQ ID NO: 764009 - DNA, 15 bp, Homo sapiens
gcaagccatcaatga

SEQ ID NO: 764010 - DNA, 15 bp, Homo sapiens
caagccatcaatgag

SEQ ID NO: 764011 - DNA, 15 bp, Homo sapiens
aagccatcaatgagt

SEQ ID NO: 764012 - DNA, 15 bp, Homo sapiens
agccatcaatgagtg

SEQ ID NO: 764013 - DNA, 15 bp, Homo sapiens
gccatcaatgagtgc

SEQ ID NO: 764014 - DNA, 15 bp, Homo sapiens
ccatcaatgagtgct

SEQ ID NO: 764015 - DNA, 15 bp, Homo sapiens
catcaatgagtgctc

SEQ ID NO: 764016 - DNA, 15 bp, Homo sapiens
atcaatgagtgctca

SEQ ID NO: 764017 - DNA, 15 bp, Homo sapiens
tcaatgagtgctcac

SEQ ID NO: 764018 - DNA, 15 bp, Homo sapiens
caatgagtgctcaca

SEQ ID NO: 764019 - DNA, 15 bp, Homo sapiens
aatgagtgctcacac

SEQ ID NO: 764020 - DNA, 15 bp, Homo sapiens
atgagtgctcacacc

SEQ ID NO: 764021 - DNA, 15 bp, Homo sapiens
tgagtgctcacaccg

SEQ ID NO: 764022 - DNA, 15 bp, Homo sapiens
gagtgctcacaccgt

SEQ ID NO: 764023 - DNA, 15 bp, Homo sapiens
agtgctcacaccgtg

SEQ ID NO: 764024 - DNA, 15 bp, Homo sapiens
gtgctcacaccgtgc

SEQ ID NO: 764025 - DNA, 15 bp, Homo sapiens
tgctcacaccgtgca

SEQ ID NO: 764026 - DNA, 15 bp, Homo sapiens
gctcacaccgtgcag

SEQ ID NO: 764027 - DNA, 15 bp, Homo sapiens
ctcacaccgtgcagg

SEQ ID NO: 764028 - DNA, 15 bp, Homo sapiens
tcacaccgtgcaggc

SEQ ID NO: 764029 - DNA, 15 bp, Homo sapiens
cacaccgtgcaggca

SEQ ID NO: 764030 - DNA, 15 bp, Homo sapiens
acaccgtgcaggcac

SEQ ID NO: 764031 - DNA, 15 bp, Homo sapiens
caccgtgcaggcact

SEQ ID NO: 764032 - DNA, 15 bp, Homo sapiens
accgtgcaggcactg

SEQ ID NO: 764033 - DNA, 15 bp, Homo sapiens
ccgtgcaggcactgt

SEQ ID NO: 764034 - DNA, 15 bp, Homo sapiens
cgtgcaggcactgtg

SEQ ID NO: 764035 - DNA, 15 bp, Homo sapiens
gtgcaggcactgtga

SEQ ID NO: 764036 - DNA, 15 bp, Homo sapiens
tgcaggcactgtgag

SEQ ID NO: 764037 - DNA, 15 bp, Homo sapiens
gcaggcactgtgagc

SEQ ID NO: 764038 - DNA, 15 bp, Homo sapiens
caggcactgtgagcc

SEQ ID NO: 764039 - DNA, 15 bp, Homo sapiens
aggcactgtgagcct

SEQ ID NO: 764040 - DNA, 15 bp, Homo sapiens
ggcactgtgagcctg

SEQ ID NO: 764041 - DNA, 15 bp, Homo sapiens
gcactgtgagcctgt

SEQ ID NO: 764042 - DNA, 15 bp, Homo sapiens
cactgtgagcctgtg

SEQ ID NO: 764043 - DNA, 15 bp, Homo sapiens
actgtgagcctgtgt

SEQ ID NO: 764044 - DNA, 15 bp, Homo sapiens
ctgtgagcctgtgtc

SEQ ID NO: 764045 - DNA, 15 bp, Homo sapiens
tgtgagcctgtgtcc

SEQ ID NO: 764046 - DNA, 15 bp, Homo sapiens
gtgagcctgtgtcca

SEQ ID NO: 764047 - DNA, 15 bp, Homo sapiens
tgagcctgtgtccac

SEQ ID NO: 764048 - DNA, 15 bp, Homo sapiens
gagcctgtgtccaca

SEQ ID NO: 764049 - DNA, 15 bp, Homo sapiens
agcctgtgtccacat

SEQ ID NO: 764050 - DNA, 15 bp, Homo sapiens
gcctgtgtccacatg

SEQ ID NO: 764051 - DNA, 15 bp, Homo sapiens
cctgtgtccacatga

SEQ ID NO: 764052 - DNA, 15 bp, Homo sapiens
ctgtgtccacatgat

SEQ ID NO: 764053 - DNA, 15 bp, Homo sapiens
tgtgtccacatgatc

SEQ ID NO: 764054 - DNA, 15 bp, Homo sapiens
gtgtccacatgatct

SEQ ID NO: 764055 - DNA, 15 bp, Homo sapiens
tgtccacatgatctc

SEQ ID NO: 764056 - DNA, 15 bp, Homo sapiens
gtccacatgatctca

SEQ ID NO: 764057 - DNA, 15 bp, Homo sapiens
tccacatgatctcat

SEQ ID NO: 764058 - DNA, 15 bp, Homo sapiens
ccacatgatctcatc

SEQ ID NO: 764059 - DNA, 15 bp, Homo sapiens
cacatgatctcatct

SEQ ID NO: 764060 - DNA, 15 bp, Homo sapiens
acatgatctcatctt

SEQ ID NO: 764061 - DNA, 15 bp, Homo sapiens
catgatctcatcttg

SEQ ID NO: 764062 - DNA, 15 bp, Homo sapiens
atgatctcatcttgt

SEQ ID NO: 764063 - DNA, 15 bp, Homo sapiens
tgatctcatcttgtc

SEQ ID NO: 764064 - DNA, 15 bp, Homo sapiens
gatctcatcttgtcc

SEQ ID NO: 764065 - DNA, 15 bp, Homo sapiens
atctcatcttgtcct

SEQ ID NO: 764066 - DNA, 15 bp, Homo sapiens
tctcatcttgtcctc

SEQ ID NO: 764067 - DNA, 15 bp, Homo sapiens
ctcatcttgtcctca

SEQ ID NO: 764068 - DNA, 15 bp, Homo sapiens
tcatcttgtcctcag

SEQ ID NO: 764069 - DNA, 15 bp, Homo sapiens
catcttgtcctcagg

SEQ ID NO: 764070 - DNA, 15 bp, Homo sapiens
atcttgtcctcaggg

SEQ ID NO: 764071 - DNA, 15 bp, Homo sapiens
tcttgtcctcagggc

SEQ ID NO: 764072 - DNA, 15 bp, Homo sapiens
cttgtcctcagggcc

SEQ ID NO: 764073 - DNA, 15 bp, Homo sapiens
ttgtcctcagggcca

SEQ ID NO: 764074 - DNA, 15 bp, Homo sapiens
tgtcctcagggccat

SEQ ID NO: 764075 - DNA, 15 bp, Homo sapiens
gtcctcagggccatg

SEQ ID NO: 764076 - DNA, 15 bp, Homo sapiens
tcctcagggccatgc

SEQ ID NO: 764077 - DNA, 15 bp, Homo sapiens
cctcagggccatgcc

SEQ ID NO: 764078 - DNA, 15 bp, Homo sapiens
ctcagggccatgcca

SEQ ID NO: 764079 - DNA, 15 bp, Homo sapiens
tcagggccatgccaa

SEQ ID NO: 764080 - DNA, 15 bp, Homo sapiens
cagggccatgccaag

SEQ ID NO: 764081 - DNA, 15 bp, Homo sapiens
agggccatgccaaga

SEQ ID NO: 764082 - DNA, 15 bp, Homo sapiens
gggccatgccaagag

SEQ ID NO: 764083 - DNA, 15 bp, Homo sapiens
ggccatgccaagagg

SEQ ID NO: 764084 - DNA, 15 bp, Homo sapiens
gccatgccaagagga

SEQ ID NO: 764085 - DNA, 15 bp, Homo sapiens
ccatgccaagaggag

SEQ ID NO: 764086 - DNA, 15 bp, Homo sapiens
catgccaagaggagg

SEQ ID NO: 764087 - DNA, 15 bp, Homo sapiens
atgccaagaggaggc

SEQ ID NO: 764088 - DNA, 15 bp, Homo sapiens
tgccaagaggaggca

SEQ ID NO: 764089 - DNA, 15 bp, Homo sapiens
gccaagaggaggcac

SEQ ID NO: 764090 - DNA, 15 bp, Homo sapiens
ccaagaggaggcact

SEQ ID NO: 764091 - DNA, 15 bp, Homo sapiens
caagaggaggcacta

SEQ ID NO: 764092 - DNA, 15 bp, Homo sapiens
aagaggaggcactat

SEQ ID NO: 764093 - DNA, 15 bp, Homo sapiens
agaggaggcactatt

SEQ ID NO: 764094 - DNA, 15 bp, Homo sapiens
gaggaggcactattc

SEQ ID NO: 764095 - DNA, 15 bp, Homo sapiens
aggaggcactattct

SEQ ID NO: 764096 - DNA, 15 bp, Homo sapiens
ggaggcactattctt

SEQ ID NO: 764097 - DNA, 15 bp, Homo sapiens
gaggcactattcttc

SEQ ID NO: 764098 - DNA, 15 bp, Homo sapiens
aggcactattcttct

SEQ ID NO: 764099 - DNA, 15 bp, Homo sapiens
ggcactattcttctt

SEQ ID NO: 764100 - DNA, 15 bp, Homo sapiens
gcactattcttcttc

SEQ ID NO: 764101 - DNA, 15 bp, Homo sapiens
cactattcttcttct

SEQ ID NO: 764102 - DNA, 15 bp, Homo sapiens
actattcttcttctt

SEQ ID NO: 764103 - DNA, 15 bp, Homo sapiens
ctattcttcttcttc

SEQ ID NO: 764104 - DNA, 15 bp, Homo sapiens
tattcttcttcttct

SEQ ID NO: 764105 - DNA, 15 bp, Homo sapiens
attcttcttcttctc

SEQ ID NO: 764106 - DNA, 15 bp, Homo sapiens
ttcttcttcttctca

SEQ ID NO: 764107 - DNA, 15 bp, Homo sapiens
tcttcttcttctcag

SEQ ID NO: 764108 - DNA, 15 bp, Homo sapiens
cttcttcttctcagt

SEQ ID NO: 764109 - DNA, 15 bp, Homo sapiens
ttcttcttctcagtt

SEQ ID NO: 764110 - DNA, 15 bp, Homo sapiens
tcttcttctcagttt

SEQ ID NO: 764111 - DNA, 15 bp, Homo sapiens
cttcttctcagttta

SEQ ID NO: 764112 - DNA, 15 bp, Homo sapiens
ttcttctcagtttat

SEQ ID NO: 764113 - DNA, 15 bp, Homo sapiens
tcttctcagtttatg

SEQ ID NO: 764114 - DNA, 15 bp, Homo sapiens
cttctcagtttatgg

SEQ ID NO: 764115 - DNA, 15 bp, Homo sapiens
ttctcagtttatgga

SEQ ID NO: 764116 - DNA, 15 bp, Homo sapiens
tctcagtttatggat

SEQ ID NO: 764117 - DNA, 15 bp, Homo sapiens
ctcagtttatggatg

SEQ ID NO: 764118 - DNA, 15 bp, Homo sapiens
tcagtttatggatga

SEQ ID NO: 764119 - DNA, 15 bp, Homo sapiens
cagtttatggatgat

SEQ ID NO: 764120 - DNA, 15 bp, Homo sapiens
agtttatggatgatg

SEQ ID NO: 764121 - DNA, 15 bp, Homo sapiens
gtttatggatgatga

SEQ ID NO: 764122 - DNA, 15 bp, Homo sapiens
tttatggatgatgat

SEQ ID NO: 764123 - DNA, 15 bp, Homo sapiens
ttatggatgatgata

SEQ ID NO: 764124 - DNA, 15 bp, Homo sapiens
tatggatgatgataa

SEQ ID NO: 764125 - DNA, 15 bp, Homo sapiens
atggatgatgataat

SEQ ID NO: 764126 - DNA, 15 bp, Homo sapiens
tggatgatgataatg

SEQ ID NO: 764127 - DNA, 15 bp, Homo sapiens
ggatgatgataatgg

SEQ ID NO: 764128 - DNA, 15 bp, Homo sapiens
gatgatgataatgga

SEQ ID NO: 764129 - DNA, 15 bp, Homo sapiens
atgatgataatggag

SEQ ID NO: 764130 - DNA, 15 bp, Homo sapiens
tgatgataatggagg

SEQ ID NO: 764131 - DNA, 15 bp, Homo sapiens
gatgataatggaggc

SEQ ID NO: 764132 - DNA, 15 bp, Homo sapiens
atgataatggaggca

SEQ ID NO: 764133 - DNA, 15 bp, Homo sapiens
tgataatggaggcat

SEQ ID NO: 764134 - DNA, 15 bp, Homo sapiens
gataatggaggcata

SEQ ID NO: 764135 - DNA, 15 bp, Homo sapiens
ataatggaggcatag

SEQ ID NO: 764136 - DNA, 15 bp, Homo sapiens
taatggaggcataga

SEQ ID NO: 764137 - DNA, 15 bp, Homo sapiens
aatggaggcatagag

SEQ ID NO: 764138 - DNA, 15 bp, Homo sapiens
atggaggcatagaga

SEQ ID NO: 764139 - DNA, 15 bp, Homo sapiens
tggaggcatagagag

SEQ ID NO: 764140 - DNA, 15 bp, Homo sapiens
ggaggcatagagagg

SEQ ID NO: 764141 - DNA, 15 bp, Homo sapiens
gaggcatagagaggt

SEQ ID NO: 764142 - DNA, 15 bp, Homo sapiens
aggcatagagaggtt

SEQ ID NO: 764143 - DNA, 15 bp, Homo sapiens
ggcatagagaggtta

SEQ ID NO: 764144 - DNA, 15 bp, Homo sapiens
gcatagagaggttaa

SEQ ID NO: 764145 - DNA, 15 bp, Homo sapiens
catagagaggttaag

SEQ ID NO: 764146 - DNA, 15 bp, Homo sapiens
atagagaggttaagc

SEQ ID NO: 764147 - DNA, 15 bp, Homo sapiens
tagagaggttaagca

SEQ ID NO: 764148 - DNA, 15 bp, Homo sapiens
agagaggttaagcaa

SEQ ID NO: 764149 - DNA, 15 bp, Homo sapiens
gagaggttaagcaac

SEQ ID NO: 764150 - DNA, 15 bp, Homo sapiens
agaggttaagcaact

SEQ ID NO: 764151 - DNA, 15 bp, Homo sapiens
gaggttaagcaactt

SEQ ID NO: 764152 - DNA, 15 bp, Homo sapiens
aggttaagcaacttg

SEQ ID NO: 764153 - DNA, 15 bp, Homo sapiens
ggttaagcaacttgt

SEQ ID NO: 764154 - DNA, 15 bp, Homo sapiens
gttaagcaacttgtt

SEQ ID NO: 764155 - DNA, 15 bp, Homo sapiens
ttaagcaacttgttt

SEQ ID NO: 764156 - DNA, 15 bp, Homo sapiens
taagcaacttgtttg

SEQ ID NO: 764157 - DNA, 15 bp, Homo sapiens
aagcaacttgtttga

SEQ ID NO: 764158 - DNA, 15 bp, Homo sapiens
agcaacttgtttgat

SEQ ID NO: 764159 - DNA, 15 bp, Homo sapiens
gcaacttgtttgatg

SEQ ID NO: 764160 - DNA, 15 bp, Homo sapiens
caacttgtttgatgt

SEQ ID NO: 764161 - DNA, 15 bp, Homo sapiens
aacttgtttgatgtc

SEQ ID NO: 764162 - DNA, 15 bp, Homo sapiens
acttgtttgatgtca

SEQ ID NO: 764163 - DNA, 15 bp, Homo sapiens
cttgtttgatgtcac

SEQ ID NO: 764164 - DNA, 15 bp, Homo sapiens
ttgtttgatgtcacc

SEQ ID NO: 764165 - DNA, 15 bp, Homo sapiens
tgtttgatgtcaccc

SEQ ID NO: 764166 - DNA, 15 bp, Homo sapiens
gtttgatgtcaccca

SEQ ID NO: 764167 - DNA, 15 bp, Homo sapiens
tttgatgtcacccaa

SEQ ID NO: 764168 - DNA, 15 bp, Homo sapiens
ttgatgtcacccaac

SEQ ID NO: 764169 - DNA, 15 bp, Homo sapiens
tgatgtcacccaaca

SEQ ID NO: 764170 - DNA, 15 bp, Homo sapiens
gatgtcacccaacaa

SEQ ID NO: 764171 - DNA, 15 bp, Homo sapiens
atgtcacccaacaat

SEQ ID NO: 764172 - DNA, 15 bp, Homo sapiens
tgtcacccaacaatg

SEQ ID NO: 764173 - DNA, 15 bp, Homo sapiens
gtcacccaacaatgc

SEQ ID NO: 764174 - DNA, 15 bp, Homo sapiens
tcacccaacaatgct

SEQ ID NO: 764175 - DNA, 15 bp, Homo sapiens
cacccaacaatgctg

SEQ ID NO: 764176 - DNA, 15 bp, Homo sapiens
acccaacaatgctga

SEQ ID NO: 764177 - DNA, 15 bp, Homo sapiens
cccaacaatgctgaa

SEQ ID NO: 764178 - DNA, 15 bp, Homo sapiens
ccaacaatgctgaaa

SEQ ID NO: 764179 - DNA, 15 bp, Homo sapiens
caacaatgctgaaat

SEQ ID NO: 764180 - DNA, 15 bp, Homo sapiens
aacaatgctgaaatg

SEQ ID NO: 764181 - DNA, 15 bp, Homo sapiens
acaatgctgaaatgg

SEQ ID NO: 764182 - DNA, 15 bp, Homo sapiens
caatgctgaaatggg

SEQ ID NO: 764183 - DNA, 15 bp, Homo sapiens
aatgctgaaatgggg

SEQ ID NO: 764184 - DNA, 15 bp, Homo sapiens
atgctgaaatggggc

SEQ ID NO: 764185 - DNA, 15 bp, Homo sapiens
tgctgaaatggggca

SEQ ID NO: 764186 - DNA, 15 bp, Homo sapiens
gctgaaatggggcag

SEQ ID NO: 764187 - DNA, 15 bp, Homo sapiens
ctgaaatggggcagg

SEQ ID NO: 764188 - DNA, 15 bp, Homo sapiens
tgaaatggggcagga

SEQ ID NO: 764189 - DNA, 15 bp, Homo sapiens
gaaatggggcaggat

SEQ ID NO: 764190 - DNA, 15 bp, Homo sapiens
aaatggggcaggatt

SEQ ID NO: 764191 - DNA, 15 bp, Homo sapiens
aatggggcaggattt

SEQ ID NO: 764192 - DNA, 15 bp, Homo sapiens
atggggcaggatttg

SEQ ID NO: 764193 - DNA, 15 bp, Homo sapiens
tggggcaggatttgg

SEQ ID NO: 764194 - DNA, 15 bp, Homo sapiens
ggggcaggatttggc

SEQ ID NO: 764195 - DNA, 15 bp, Homo sapiens
gggcaggatttggcc

SEQ ID NO: 764196 - DNA, 15 bp, Homo sapiens
ggcaggatttggccc

SEQ ID NO: 764197 - DNA, 15 bp, Homo sapiens
gcaggatttggccct

SEQ ID NO: 764198 - DNA, 15 bp, Homo sapiens
caggatttggccctg

SEQ ID NO: 764199 - DNA, 15 bp, Homo sapiens
aggatttggccctgg

SEQ ID NO: 764200 - DNA, 15 bp, Homo sapiens
ggatttggccctggc

SEQ ID NO: 764201 - DNA, 15 bp, Homo sapiens
gatttggccctggcc

SEQ ID NO: 764202 - DNA, 15 bp, Homo sapiens
atttggccctggccc

SEQ ID NO: 764203 - DNA, 15 bp, Homo sapiens
tttggccctggccct

SEQ ID NO: 764204 - DNA, 15 bp, Homo sapiens
ttggccctggccctc

SEQ ID NO: 764205 - DNA, 15 bp, Homo sapiens
tggccctggccctcc

SEQ ID NO: 764206 - DNA, 15 bp, Homo sapiens
ggccctggccctcca

SEQ ID NO: 764207 - DNA, 15 bp, Homo sapiens
gccctggccctccag

SEQ ID NO: 764208 - DNA, 15 bp, Homo sapiens
ccctggccctccaga

SEQ ID NO: 764209 - DNA, 15 bp, Homo sapiens
cctggccctccagag

SEQ ID NO: 764210 - DNA, 15 bp, Homo sapiens
ctggccctccagagc

SEQ ID NO: 764211 - DNA, 15 bp, Homo sapiens
tggccctccagagcc

SEQ ID NO: 764212 - DNA, 15 bp, Homo sapiens
ggccctccagagcct

SEQ ID NO: 764213 - DNA, 15 bp, Homo sapiens
gccctccagagccta

SEQ ID NO: 764214 - DNA, 15 bp, Homo sapiens
ccctccagagcctat

SEQ ID NO: 764215 - DNA, 15 bp, Homo sapiens
cctccagagcctatg

SEQ ID NO: 764216 - DNA, 15 bp, Homo sapiens
ctccagagcctatgg

SEQ ID NO: 764217 - DNA, 15 bp, Homo sapiens
tccagagcctatggg

SEQ ID NO: 764218 - DNA, 15 bp, Homo sapiens
ccagagcctatgggc

SEQ ID NO: 764219 - DNA, 15 bp, Homo sapiens
cagagcctatgggct

SEQ ID NO: 764220 - DNA, 15 bp, Homo sapiens
agagcctatgggctt

SEQ ID NO: 764221 - DNA, 15 bp, Homo sapiens
gagcctatgggctta

SEQ ID NO: 764222 - DNA, 15 bp, Homo sapiens
agcctatgggcttaa

SEQ ID NO: 764223 - DNA, 15 bp, Homo sapiens
gcctatgggcttaat

SEQ ID NO: 764224 - DNA, 15 bp, Homo sapiens
cctatgggcttaatt

SEQ ID NO: 764225 - DNA, 15 bp, Homo sapiens
ctatgggcttaattg

SEQ ID NO: 764226 - DNA, 15 bp, Homo sapiens
tatgggcttaattgt

SEQ ID NO: 764227 - DNA, 15 bp, Homo sapiens
atgggcttaattgtt

SEQ ID NO: 764228 - DNA, 15 bp, Homo sapiens
tgggcttaattgttg

SEQ ID NO: 764229 - DNA, 15 bp, Homo sapiens
gggcttaattgttgc

SEQ ID NO: 764230 - DNA, 15 bp, Homo sapiens
ggcttaattgttgcc

SEQ ID NO: 764231 - DNA, 15 bp, Homo sapiens
gcttaattgttgcct

SEQ ID NO: 764232 - DNA, 15 bp, Homo sapiens
cttaattgttgcctt

SEQ ID NO: 764233 - DNA, 15 bp, Homo sapiens
ttaattgttgccttg

SEQ ID NO: 764234 - DNA, 15 bp, Homo sapiens
taattgttgccttgg

SEQ ID NO: 764235 - DNA, 15 bp, Homo sapiens
aattgttgccttggt

SEQ ID NO: 764236 - DNA, 15 bp, Homo sapiens
attgttgccttggtg

SEQ ID NO: 764237 - DNA, 15 bp, Homo sapiens
ttgttgccttggtgg

SEQ ID NO: 764238 - DNA, 15 bp, Homo sapiens
tgttgccttggtggg

SEQ ID NO: 764239 - DNA, 15 bp, Homo sapiens
gttgccttggtgggt

SEQ ID NO: 764240 - DNA, 15 bp, Homo sapiens
ttgccttggtgggtc

SEQ ID NO: 764241 - DNA, 15 bp, Homo sapiens
tgccttggtgggtct

SEQ ID NO: 764242 - DNA, 15 bp, Homo sapiens
gccttggtgggtctt

SEQ ID NO: 764243 - DNA, 15 bp, Homo sapiens
ccttggtgggtctta

SEQ ID NO: 764244 - DNA, 15 bp, Homo sapiens
cttggtgggtcttag

SEQ ID NO: 764245 - DNA, 15 bp, Homo sapiens
ttggtgggtcttagc

SEQ ID NO: 764246 - DNA, 15 bp, Homo sapiens
tggtgggtcttagcc

SEQ ID NO: 764247 - DNA, 15 bp, Homo sapiens
ggtgggtcttagcct

SEQ ID NO: 764248 - DNA, 15 bp, Homo sapiens
gtgggtcttagcctt

SEQ ID NO: 764249 - DNA, 15 bp, Homo sapiens
tgggtcttagccttg

SEQ ID NO: 764250 - DNA, 15 bp, Homo sapiens
gggtcttagccttga

SEQ ID NO: 764251 - DNA, 15 bp, Homo sapiens
ggtcttagccttgag

SEQ ID NO: 764252 - DNA, 15 bp, Homo sapiens
gtcttagccttgagc

SEQ ID NO: 764253 - DNA, 15 bp, Homo sapiens
tcttagccttgagcc

SEQ ID NO: 764254 - DNA, 15 bp, Homo sapiens
cttagccttgagcct

SEQ ID NO: 764255 - DNA, 15 bp, Homo sapiens
ttagccttgagcctg

SEQ ID NO: 764256 - DNA, 15 bp, Homo sapiens
tagccttgagcctgc

SEQ ID NO: 764257 - DNA, 15 bp, Homo sapiens
agccttgagcctgca

SEQ ID NO: 764258 - DNA, 15 bp, Homo sapiens
gccttgagcctgcat

SEQ ID NO: 764259 - DNA, 15 bp, Homo sapiens
ccttgagcctgcatt

SEQ ID NO: 764260 - DNA, 15 bp, Homo sapiens
cttgagcctgcatta

SEQ ID NO: 764261 - DNA, 15 bp, Homo sapiens
ttgagcctgcattag

SEQ ID NO: 764262 - DNA, 15 bp, Homo sapiens
tgagcctgcattaga

SEQ ID NO: 764263 - DNA, 15 bp, Homo sapiens
gagcctgcattagaa

SEQ ID NO: 764264 - DNA, 15 bp, Homo sapiens
agcctgcattagaac

SEQ ID NO: 764265 - DNA, 15 bp, Homo sapiens
gcctgcattagaaca

SEQ ID NO: 764266 - DNA, 15 bp, Homo sapiens
cctgcattagaacaa

SEQ ID NO: 764267 - DNA, 15 bp, Homo sapiens
ctgcattagaacaac

SEQ ID NO: 764268 - DNA, 15 bp, Homo sapiens
tgcattagaacaacc

SEQ ID NO: 764269 - DNA, 15 bp, Homo sapiens
gcattagaacaacct

SEQ ID NO: 764270 - DNA, 15 bp, Homo sapiens
cattagaacaacctg

SEQ ID NO: 764271 - DNA, 15 bp, Homo sapiens
attagaacaacctgg

SEQ ID NO: 764272 - DNA, 15 bp, Homo sapiens
ttagaacaacctgga

SEQ ID NO: 764273 - DNA, 15 bp, Homo sapiens
tagaacaacctggag

SEQ ID NO: 764274 - DNA, 15 bp, Homo sapiens
agaacaacctggagg

SEQ ID NO: 764275 - DNA, 15 bp, Homo sapiens
gaacaacctggaggg

SEQ ID NO: 764276 - DNA, 15 bp, Homo sapiens
aacaacctggagggc

SEQ ID NO: 764277 - DNA, 15 bp, Homo sapiens
acaacctggagggct

SEQ ID NO: 764278 - DNA, 15 bp, Homo sapiens
caacctggagggctt

SEQ ID NO: 764279 - DNA, 15 bp, Homo sapiens
aacctggagggcttg

SEQ ID NO: 764280 - DNA, 15 bp, Homo sapiens
acctggagggcttgg

SEQ ID NO: 764281 - DNA, 15 bp, Homo sapiens
cctggagggcttggc

SEQ ID NO: 764282 - DNA, 15 bp, Homo sapiens
ctggagggcttggcc

SEQ ID NO: 764283 - DNA, 15 bp, Homo sapiens
tggagggcttggccc

SEQ ID NO: 764284 - DNA, 15 bp, Homo sapiens
ggagggcttggcccc

SEQ ID NO: 764285 - DNA, 15 bp, Homo sapiens
gagggcttggcccca

SEQ ID NO: 764286 - DNA, 15 bp, Homo sapiens
agggcttggccccac

SEQ ID NO: 764287 - DNA, 15 bp, Homo sapiens
gggcttggccccact

SEQ ID NO: 764288 - DNA, 15 bp, Homo sapiens
ggcttggccccactc

SEQ ID NO: 764289 - DNA, 15 bp, Homo sapiens
gcttggccccactcc

SEQ ID NO: 764290 - DNA, 15 bp, Homo sapiens
cttggccccactcca

SEQ ID NO: 764291 - DNA, 15 bp, Homo sapiens
ttggccccactccag

SEQ ID NO: 764292 - DNA, 15 bp, Homo sapiens
tggccccactccaga

SEQ ID NO: 764293 - DNA, 15 bp, Homo sapiens
ggccccactccagag

SEQ ID NO: 764294 - DNA, 15 bp, Homo sapiens
gccccactccagagt

SEQ ID NO: 764295 - DNA, 15 bp, Homo sapiens
ccccactccagagtt

SEQ ID NO: 764296 - DNA, 15 bp, Homo sapiens
cccactccagagttt

SEQ ID NO: 764297 - DNA, 15 bp, Homo sapiens
ccactccagagtttc

SEQ ID NO: 764298 - DNA, 15 bp, Homo sapiens
cactccagagtttct

SEQ ID NO: 764299 - DNA, 15 bp, Homo sapiens
actccagagtttctg

SEQ ID NO: 764300 - DNA, 15 bp, Homo sapiens
ctccagagtttctga

SEQ ID NO: 764301 - DNA, 15 bp, Homo sapiens
tccagagtttctgat

SEQ ID NO: 764302 - DNA, 15 bp, Homo sapiens
ccagagtttctgatt

SEQ ID NO: 764303 - DNA, 15 bp, Homo sapiens
cagagtttctgattt

SEQ ID NO: 764304 - DNA, 15 bp, Homo sapiens
agagtttctgatttc

SEQ ID NO: 764305 - DNA, 15 bp, Homo sapiens
gagtttctgatttcg

SEQ ID NO: 764306 - DNA, 15 bp, Homo sapiens
agtttctgatttcgg

SEQ ID NO: 764307 - DNA, 15 bp, Homo sapiens
gtttctgatttcggt

SEQ ID NO: 764308 - DNA, 15 bp, Homo sapiens
tttctgatttcggtc

SEQ ID NO: 764309 - DNA, 15 bp, Homo sapiens
ttctgatttcggtca

SEQ ID NO: 764310 - DNA, 15 bp, Homo sapiens
tctgatttcggtcag

SEQ ID NO: 764311 - DNA, 15 bp, Homo sapiens
ctgatttcggtcagg

SEQ ID NO: 764312 - DNA, 15 bp, Homo sapiens
tgatttcggtcaggt

SEQ ID NO: 764313 - DNA, 15 bp, Homo sapiens
gatttcggtcaggtc

SEQ ID NO: 764314 - DNA, 15 bp, Homo sapiens
atttcggtcaggtct

SEQ ID NO: 764315 - DNA, 15 bp, Homo sapiens
tttcggtcaggtctg

SEQ ID NO: 764316 - DNA, 15 bp, Homo sapiens
ttcggtcaggtctgc

SEQ ID NO: 764317 - DNA, 15 bp, Homo sapiens
tcggtcaggtctgcg

SEQ ID NO: 764318 - DNA, 15 bp, Homo sapiens
cggtcaggtctgcga

SEQ ID NO: 764319 - DNA, 15 bp, Homo sapiens
ggtcaggtctgcgat

SEQ ID NO: 764320 - DNA, 15 bp, Homo sapiens
gtcaggtctgcgata

SEQ ID NO: 764321 - DNA, 15 bp, Homo sapiens
tcaggtctgcgatag

SEQ ID NO: 764322 - DNA, 15 bp, Homo sapiens
caggtctgcgatagg

SEQ ID NO: 764323 - DNA, 15 bp, Homo sapiens
aggtctgcgataggt

SEQ ID NO: 764324 - DNA, 15 bp, Homo sapiens
ggtctgcgataggtc

SEQ ID NO: 764325 - DNA, 15 bp, Homo sapiens
gtctgcgataggtct

SEQ ID NO: 764326 - DNA, 15 bp, Homo sapiens
tctgcgataggtctg

SEQ ID NO: 764327 - DNA, 15 bp, Homo sapiens
ctgcgataggtctga

SEQ ID NO: 764328 - DNA, 15 bp, Homo sapiens
tgcgataggtctgag

SEQ ID NO: 764329 - DNA, 15 bp, Homo sapiens
gcgataggtctgaga

SEQ ID NO: 764330 - DNA, 15 bp, Homo sapiens
cgataggtctgagaa

SEQ ID NO: 764331 - DNA, 15 bp, Homo sapiens
gataggtctgagaat

SEQ ID NO: 764332 - DNA, 15 bp, Homo sapiens
ataggtctgagaatg

SEQ ID NO: 764333 - DNA, 15 bp, Homo sapiens
taggtctgagaatgt

SEQ ID NO: 764334 - DNA, 15 bp, Homo sapiens
aggtctgagaatgtg

SEQ ID NO: 764335 - DNA, 15 bp, Homo sapiens
ggtctgagaatgtgt

SEQ ID NO: 764336 - DNA, 15 bp, Homo sapiens
gtctgagaatgtgtg

SEQ ID NO: 764337 - DNA, 15 bp, Homo sapiens
tctgagaatgtgtgt

SEQ ID NO: 764338 - DNA, 15 bp, Homo sapiens
ctgagaatgtgtgtt

SEQ ID NO: 764339 - DNA, 15 bp, Homo sapiens
tgagaatgtgtgttt

SEQ ID NO: 764340 - DNA, 15 bp, Homo sapiens
gagaatgtgtgtttt

SEQ ID NO: 764341 - DNA, 15 bp, Homo sapiens
agaatgtgtgttttt

SEQ ID NO: 764342 - DNA, 15 bp, Homo sapiens
gaatgtgtgttttta

SEQ ID NO: 764343 - DNA, 15 bp, Homo sapiens
aatgtgtgtttttaa

SEQ ID NO: 764344 - DNA, 15 bp, Homo sapiens
atgtgtgtttttaat

SEQ ID NO: 764345 - DNA, 15 bp, Homo sapiens
tgtgtgtttttaata

SEQ ID NO: 764346 - DNA, 15 bp, Homo sapiens
gtgtgtttttaataa

SEQ ID NO: 764347 - DNA, 15 bp, Homo sapiens
tgtgtttttaataag

SEQ ID NO: 764348 - DNA, 15 bp, Homo sapiens
gtgtttttaataagt

SEQ ID NO: 764349 - DNA, 15 bp, Homo sapiens
tgtttttaataagtt

SEQ ID NO: 764350 - DNA, 15 bp, Homo sapiens
gtttttaataagttt

SEQ ID NO: 764351 - DNA, 15 bp, Homo sapiens
tttttaataagtttc

SEQ ID NO: 764352 - DNA, 15 bp, Homo sapiens
ttttaataagtttcc

SEQ ID NO: 764353 - DNA, 15 bp, Homo sapiens
tttaataagtttcca

SEQ ID NO: 764354 - DNA, 15 bp, Homo sapiens
ttaataagtttccat

SEQ ID NO: 764355 - DNA, 15 bp, Homo sapiens
taataagtttccatt

SEQ ID NO: 764356 - DNA, 15 bp, Homo sapiens
aataagtttccattt

SEQ ID NO: 764357 - DNA, 15 bp, Homo sapiens
ataagtttccatttg

SEQ ID NO: 764358 - DNA, 15 bp, Homo sapiens
taagtttccatttga

SEQ ID NO: 764359 - DNA, 15 bp, Homo sapiens
aagtttccatttgag

SEQ ID NO: 764360 - DNA, 15 bp, Homo sapiens
agtttccatttgagg

SEQ ID NO: 764361 - DNA, 15 bp, Homo sapiens
gtttccatttgaggt

SEQ ID NO: 764362 - DNA, 15 bp, Homo sapiens
tttccatttgaggta

SEQ ID NO: 764363 - DNA, 15 bp, Homo sapiens
ttccatttgaggtaa

SEQ ID NO: 764364 - DNA, 15 bp, Homo sapiens
tccatttgaggtaaa

SEQ ID NO: 764365 - DNA, 15 bp, Homo sapiens
ccatttgaggtaaag

SEQ ID NO: 764366 - DNA, 15 bp, Homo sapiens
catttgaggtaaagc

SEQ ID NO: 764367 - DNA, 15 bp, Homo sapiens
atttgaggtaaagcc

SEQ ID NO: 764368 - DNA, 15 bp, Homo sapiens
tttgaggtaaagccc

SEQ ID NO: 764369 - DNA, 15 bp, Homo sapiens
ttgaggtaaagccca

SEQ ID NO: 764370 - DNA, 15 bp, Homo sapiens
tgaggtaaagcccag

SEQ ID NO: 764371 - DNA, 15 bp, Homo sapiens
gaggtaaagcccagg

SEQ ID NO: 764372 - DNA, 15 bp, Homo sapiens
aggtaaagcccaggg

SEQ ID NO: 764373 - DNA, 15 bp, Homo sapiens
ggtaaagcccaggga

SEQ ID NO: 764374 - DNA, 15 bp, Homo sapiens
gtaaagcccagggac

SEQ ID NO: 764375 - DNA, 15 bp, Homo sapiens
taaagcccagggacc

SEQ ID NO: 764376 - DNA, 15 bp, Homo sapiens
aaagcccagggacca

SEQ ID NO: 764377 - DNA, 15 bp, Homo sapiens
aagcccagggaccac

SEQ ID NO: 764378 - DNA, 15 bp, Homo sapiens
agcccagggaccaca

SEQ ID NO: 764379 - DNA, 15 bp, Homo sapiens
gcccagggaccacac

SEQ ID NO: 764380 - DNA, 15 bp, Homo sapiens
cccagggaccacact

SEQ ID NO: 764381 - DNA, 15 bp, Homo sapiens
ccagggaccacacta

SEQ ID NO: 764382 - DNA, 15 bp, Homo sapiens
cagggaccacactag

SEQ ID NO: 764383 - DNA, 15 bp, Homo sapiens
agggaccacactagt

SEQ ID NO: 764384 - DNA, 15 bp, Homo sapiens
gggaccacactagtc

SEQ ID NO: 764385 - DNA, 15 bp, Homo sapiens
ggaccacactagtct

SEQ ID NO: 764386 - DNA, 15 bp, Homo sapiens
gaccacactagtctg

SEQ ID NO: 764387 - DNA, 15 bp, Homo sapiens
accacactagtctgt

SEQ ID NO: 764388 - DNA, 15 bp, Homo sapiens
ccacactagtctgtg

SEQ ID NO: 764389 - DNA, 15 bp, Homo sapiens
cacactagtctgtgc

SEQ ID NO: 764390 - DNA, 15 bp, Homo sapiens
acactagtctgtgct

SEQ ID NO: 764391 - DNA, 15 bp, Homo sapiens
cactagtctgtgctg

SEQ ID NO: 764392 - DNA, 15 bp, Homo sapiens
actagtctgtgctgt

SEQ ID NO: 764393 - DNA, 15 bp, Homo sapiens
ctagtctgtgctgta

SEQ ID NO: 764394 - DNA, 15 bp, Homo sapiens
tagtctgtgctgtac

SEQ ID NO: 764395 - DNA, 15 bp, Homo sapiens
agtctgtgctgtact

SEQ ID NO: 764396 - DNA, 15 bp, Homo sapiens
gtctgtgctgtactg

SEQ ID NO: 764397 - DNA, 15 bp, Homo sapiens
tctgtgctgtactga

SEQ ID NO: 764398 - DNA, 15 bp, Homo sapiens
ctgtgctgtactgac

SEQ ID NO: 764399 - DNA, 15 bp, Homo sapiens
gtgctgtactgactc

SEQ ID NO: 764400 - DNA, 15 bp, Homo sapiens
tgctgtactgactca

SEQ ID NO: 764401 - DNA, 15 bp, Homo sapiens
gctgtactgactcat

SEQ ID NO: 764402 - DNA, 15 bp, Homo sapiens
ctgtactgactcatc

SEQ ID NO: 764403 - DNA, 15 bp, Homo sapiens
tgtactgactcatca

SEQ ID NO: 764404 - DNA, 15 bp, Homo sapiens
gtactgactcatcat

SEQ ID NO: 764405 - DNA, 15 bp, Homo sapiens
tactgactcatcatc

SEQ ID NO: 764406 - DNA, 15 bp, Homo sapiens
actgactcatcatcc

SEQ ID NO: 764407 - DNA, 15 bp, Homo sapiens
ctgactcatcatccc

SEQ ID NO: 764408 - DNA, 15 bp, Homo sapiens
tgactcatcatcccg

SEQ ID NO: 764409 - DNA, 15 bp, Homo sapiens
gactcatcatcccgt

SEQ ID NO: 764410 - DNA, 15 bp, Homo sapiens
actcatcatcccgtc

SEQ ID NO: 764411 - DNA, 15 bp, Homo sapiens
ctcatcatcccgtct

SEQ ID NO: 764412 - DNA, 15 bp, Homo sapiens
tcatcatcccgtctc

SEQ ID NO: 764413 - DNA, 15 bp, Homo sapiens
catcatcccgtctca

SEQ ID NO: 764414 - DNA, 15 bp, Homo sapiens
atcatcccgtctcag

SEQ ID NO: 764415 - DNA, 15 bp, Homo sapiens
tcatcccgtctcagt

SEQ ID NO: 764416 - DNA, 15 bp, Homo sapiens
catcccgtctcagtt

SEQ ID NO: 764417 - DNA, 15 bp, Homo sapiens
atcccgtctcagttt

SEQ ID NO: 764418 - DNA, 15 bp, Homo sapiens
tcccgtctcagtttc

SEQ ID NO: 764419 - DNA, 15 bp, Homo sapiens
cccgtctcagtttcc

SEQ ID NO: 764420 - DNA, 15 bp, Homo sapiens
ccgtctcagtttcca

SEQ ID NO: 764421 - DNA, 15 bp, Homo sapiens
cgtctcagtttccaa

SEQ ID NO: 764422 - DNA, 15 bp, Homo sapiens
gtctcagtttccaac

SEQ ID NO: 764423 - DNA, 15 bp, Homo sapiens
tctcagtttccaacc

SEQ ID NO: 764424 - DNA, 15 bp, Homo sapiens
ctcagtttccaacct

SEQ ID NO: 764425 - DNA, 15 bp, Homo sapiens
tcagtttccaacctc

SEQ ID NO: 764426 - DNA, 15 bp, Homo sapiens
cagtttccaacctcc

SEQ ID NO: 764427 - DNA, 15 bp, Homo sapiens
agtttccaacctcca

SEQ ID NO: 764428 - DNA, 15 bp, Homo sapiens
gtttccaacctccaa

SEQ ID NO: 764429 - DNA, 15 bp, Homo sapiens
tttccaacctccaaa

SEQ ID NO: 764430 - DNA, 15 bp, Homo sapiens
ttccaacctccaaaa

SEQ ID NO: 764431 - DNA, 15 bp, Homo sapiens
tccaacctccaaaac

SEQ ID NO: 764432 - DNA, 15 bp, Homo sapiens
ccaacctccaaaacc

SEQ ID NO: 764433 - DNA, 15 bp, Homo sapiens
caacctccaaaacca

SEQ ID NO: 764434 - DNA, 15 bp, Homo sapiens
aacctccaaaaccag

SEQ ID NO: 764435 - DNA, 15 bp, Homo sapiens
acctccaaaaccaga

SEQ ID NO: 764436 - DNA, 15 bp, Homo sapiens
cctccaaaaccagag

SEQ ID NO: 764437 - DNA, 15 bp, Homo sapiens
ctccaaaaccagagg

SEQ ID NO: 764438 - DNA, 15 bp, Homo sapiens
tccaaaaccagaggg

SEQ ID NO: 764439 - DNA, 15 bp, Homo sapiens
ccaaaaccagagggt

SEQ ID NO: 764440 - DNA, 15 bp, Homo sapiens
caaaaccagagggtt

SEQ ID NO: 764441 - DNA, 15 bp, Homo sapiens
aaaaccagagggttg

SEQ ID NO: 764442 - DNA, 15 bp, Homo sapiens
aaaccagagggttga

SEQ ID NO: 764443 - DNA, 15 bp, Homo sapiens
aaccagagggttgag

SEQ ID NO: 764444 - DNA, 15 bp, Homo sapiens
accagagggttgagc

SEQ ID NO: 764445 - DNA, 15 bp, Homo sapiens
ccagagggttgagct

SEQ ID NO: 764446 - DNA, 15 bp, Homo sapiens
cagagggttgagctt

SEQ ID NO: 764447 - DNA, 15 bp, Homo sapiens
agagggttgagcttt

SEQ ID NO: 764448 - DNA, 15 bp, Homo sapiens
gagggttgagctttc

SEQ ID NO: 764449 - DNA, 15 bp, Homo sapiens
agggttgagctttct

SEQ ID NO: 764450 - DNA, 15 bp, Homo sapiens
gggttgagctttcta

SEQ ID NO: 764451 - DNA, 15 bp, Homo sapiens
ggttgagctttctac

SEQ ID NO: 764452 - DNA, 15 bp, Homo sapiens
gttgagctttctacc

SEQ ID NO: 764453 - DNA, 15 bp, Homo sapiens
ttgagctttctacca

SEQ ID NO: 764454 - DNA, 15 bp, Homo sapiens
tgagctttctaccag

SEQ ID NO: 764455 - DNA, 15 bp, Homo sapiens
gagctttctaccagt

SEQ ID NO: 764456 - DNA, 15 bp, Homo sapiens
agctttctaccagtt

SEQ ID NO: 764457 - DNA, 15 bp, Homo sapiens
gctttctaccagttc

SEQ ID NO: 764458 - DNA, 15 bp, Homo sapiens
ctttctaccagttct

SEQ ID NO: 764459 - DNA, 15 bp, Homo sapiens
tttctaccagttctc

SEQ ID NO: 764460 - DNA, 15 bp, Homo sapiens
ttctaccagttctct

SEQ ID NO: 764461 - DNA, 15 bp, Homo sapiens
tctaccagttctctc

SEQ ID NO: 764462 - DNA, 15 bp, Homo sapiens
ctaccagttctctcc

SEQ ID NO: 764463 - DNA, 15 bp, Homo sapiens
taccagttctctcca

SEQ ID NO: 764464 - DNA, 15 bp, Homo sapiens
accagttctctccag

SEQ ID NO: 764465 - DNA, 15 bp, Homo sapiens
ccagttctctccagt

SEQ ID NO: 764466 - DNA, 15 bp, Homo sapiens
cagttctctccagtt

SEQ ID NO: 764467 - DNA, 15 bp, Homo sapiens
agttctctccagttg

SEQ ID NO: 764468 - DNA, 15 bp, Homo sapiens
gttctctccagttga

SEQ ID NO: 764469 - DNA, 15 bp, Homo sapiens
ttctctccagttgac

SEQ ID NO: 764470 - DNA, 15 bp, Homo sapiens
tctctccagttgacc

SEQ ID NO: 764471 - DNA, 15 bp, Homo sapiens
ctctccagttgacca

SEQ ID NO: 764472 - DNA, 15 bp, Homo sapiens
tctccagttgaccag

SEQ ID NO: 764473 - DNA, 15 bp, Homo sapiens
ctccagttgaccagt

SEQ ID NO: 764474 - DNA, 15 bp, Homo sapiens
tccagttgaccagtt

SEQ ID NO: 764475 - DNA, 15 bp, Homo sapiens
ccagttgaccagtta

SEQ ID NO: 764476 - DNA, 15 bp, Homo sapiens
cagttgaccagttaa

SEQ ID NO: 764477 - DNA, 15 bp, Homo sapiens
agttgaccagttaac

SEQ ID NO: 764478 - DNA, 15 bp, Homo sapiens
gttgaccagttaacg

SEQ ID NO: 764479 - DNA, 15 bp, Homo sapiens
ttgaccagttaacgc

SEQ ID NO: 764480 - DNA, 15 bp, Homo sapiens
tgaccagttaacgca

SEQ ID NO: 764481 - DNA, 15 bp, Homo sapiens
gaccagttaacgcag

SEQ ID NO: 764482 - DNA, 15 bp, Homo sapiens
accagttaacgcaga

SEQ ID NO: 764483 - DNA, 15 bp, Homo sapiens
ccagttaacgcagaa

SEQ ID NO: 764484 - DNA, 15 bp, Homo sapiens
cagttaacgcagaaa

SEQ ID NO: 764485 - DNA, 15 bp, Homo sapiens
agttaacgcagaaat

SEQ ID NO: 764486 - DNA, 15 bp, Homo sapiens
gttaacgcagaaatt

SEQ ID NO: 764487 - DNA, 15 bp, Homo sapiens
ttaacgcagaaattc

SEQ ID NO: 764488 - DNA, 15 bp, Homo sapiens
taacgcagaaattcc

SEQ ID NO: 764489 - DNA, 15 bp, Homo sapiens
aacgcagaaattcca

SEQ ID NO: 764490 - DNA, 15 bp, Homo sapiens
acgcagaaattccag

SEQ ID NO: 764491 - DNA, 15 bp, Homo sapiens
cgcagaaattccagc

SEQ ID NO: 764492 - DNA, 15 bp, Homo sapiens
gcagaaattccagcc

SEQ ID NO: 764493 - DNA, 15 bp, Homo sapiens
cagaaattccagcct

SEQ ID NO: 764494 - DNA, 15 bp, Homo sapiens
agaaattccagcctt

SEQ ID NO: 764495 - DNA, 15 bp, Homo sapiens
gaaattccagccttc

SEQ ID NO: 764496 - DNA, 15 bp, Homo sapiens
aaattccagccttct

SEQ ID NO: 764497 - DNA, 15 bp, Homo sapiens
aattccagccttcta

SEQ ID NO: 764498 - DNA, 15 bp, Homo sapiens
attccagccttctaa

SEQ ID NO: 764499 - DNA, 15 bp, Homo sapiens
ttccagccttctaat

SEQ ID NO: 764500 - DNA, 15 bp, Homo sapiens
tccagccttctaatc

SEQ ID NO: 764501 - DNA, 15 bp, Homo sapiens
ccagccttctaatca

SEQ ID NO: 764502 - DNA, 15 bp, Homo sapiens
cagccttctaatcac

SEQ ID NO: 764503 - DNA, 15 bp, Homo sapiens
agccttctaatcacc

SEQ ID NO: 764504 - DNA, 15 bp, Homo sapiens
gccttctaatcaccc

SEQ ID NO: 764505 - DNA, 15 bp, Homo sapiens
ccttctaatcaccca

SEQ ID NO: 764506 - DNA, 15 bp, Homo sapiens
cttctaatcacccat

SEQ ID NO: 764507 - DNA, 15 bp, Homo sapiens
ttctaatcacccata

SEQ ID NO: 764508 - DNA, 15 bp, Homo sapiens
tctaatcacccataa

SEQ ID NO: 764509 - DNA, 15 bp, Homo sapiens
ctaatcacccataat

SEQ ID NO: 764510 - DNA, 15 bp, Homo sapiens
taatcacccataatt

SEQ ID NO: 764511 - DNA, 15 bp, Homo sapiens
aatcacccataatta

SEQ ID NO: 764512 - DNA, 15 bp, Homo sapiens
atcacccataattat

SEQ ID NO: 764513 - DNA, 15 bp, Homo sapiens
tcacccataattatg

SEQ ID NO: 764514 - DNA, 15 bp, Homo sapiens
cacccataattatgt

SEQ ID NO: 764515 - DNA, 15 bp, Homo sapiens
acccataattatgtt

SEQ ID NO: 764516 - DNA, 15 bp, Homo sapiens
cccataattatgttt

SEQ ID NO: 764517 - DNA, 15 bp, Homo sapiens
ccataattatgttta

SEQ ID NO: 764518 - DNA, 15 bp, Homo sapiens
cataattatgtttag

SEQ ID NO: 764519 - DNA, 15 bp, Homo sapiens
ataattatgtttagt

SEQ ID NO: 764520 - DNA, 15 bp, Homo sapiens
taattatgtttagtt

SEQ ID NO: 764521 - DNA, 15 bp, Homo sapiens
aattatgtttagttt

SEQ ID NO: 764522 - DNA, 15 bp, Homo sapiens
attatgtttagtttt

SEQ ID NO: 764523 - DNA, 15 bp, Homo sapiens
ttatgtttagttttg

SEQ ID NO: 764524 - DNA, 15 bp, Homo sapiens
tatgtttagttttgg

SEQ ID NO: 764525 - DNA, 15 bp, Homo sapiens
atgtttagttttgga

SEQ ID NO: 764526 - DNA, 15 bp, Homo sapiens
tgtttagttttggac

SEQ ID NO: 764527 - DNA, 15 bp, Homo sapiens
gtttagttttggaca

SEQ ID NO: 764528 - DNA, 15 bp, Homo sapiens
tttagttttggacaa

SEQ ID NO: 764529 - DNA, 15 bp, Homo sapiens
ttagttttggacaac

SEQ ID NO: 764530 - DNA, 15 bp, Homo sapiens
tagttttggacaact

SEQ ID NO: 764531 - DNA, 15 bp, Homo sapiens
agttttggacaactt

SEQ ID NO: 764532 - DNA, 15 bp, Homo sapiens
gttttggacaactta

SEQ ID NO: 764533 - DNA, 15 bp, Homo sapiens
ttttggacaacttaa

SEQ ID NO: 764534 - DNA, 15 bp, Homo sapiens
tttggacaacttaat

SEQ ID NO: 764535 - DNA, 15 bp, Homo sapiens
ttggacaacttaata

SEQ ID NO: 764536 - DNA, 15 bp, Homo sapiens
tggacaacttaatat

SEQ ID NO: 764537 - DNA, 15 bp, Homo sapiens
ggacaacttaatata

SEQ ID NO: 764538 - DNA, 15 bp, Homo sapiens
gacaacttaatatat

SEQ ID NO: 764539 - DNA, 15 bp, Homo sapiens
acaacttaatatatg

SEQ ID NO: 764540 - DNA, 15 bp, Homo sapiens
caacttaatatatga

SEQ ID NO: 764541 - DNA, 15 bp, Homo sapiens
aacttaatatatgag

SEQ ID NO: 764542 - DNA, 15 bp, Homo sapiens
acttaatatatgaga

SEQ ID NO: 764543 - DNA, 15 bp, Homo sapiens
cttaatatatgagag

SEQ ID NO: 764544 - DNA, 15 bp, Homo sapiens
ttaatatatgagaga

SEQ ID NO: 764545 - DNA, 15 bp, Homo sapiens
taatatatgagagag

SEQ ID NO: 764546 - DNA, 15 bp, Homo sapiens
aatatatgagagagc

SEQ ID NO: 764547 - DNA, 15 bp, Homo sapiens
atatatgagagagca

SEQ ID NO: 764548 - DNA, 15 bp, Homo sapiens
tatatgagagagcaa

SEQ ID NO: 764549 - DNA, 15 bp, Homo sapiens
atatgagagagcaat

SEQ ID NO: 764550 - DNA, 15 bp, Homo sapiens
tatgagagagcaata

SEQ ID NO: 764551 - DNA, 15 bp, Homo sapiens
atgagagagcaatag

SEQ ID NO: 764552 - DNA, 15 bp, Homo sapiens
tgagagagcaatagt

SEQ ID NO: 764553 - DNA, 15 bp, Homo sapiens
gagagagcaatagta

SEQ ID NO: 764554 - DNA, 15 bp, Homo sapiens
agagagcaatagtac

SEQ ID NO: 764555 - DNA, 15 bp, Homo sapiens
gagagcaatagtact

SEQ ID NO: 764556 - DNA, 15 bp, Homo sapiens
agagcaatagtactt

SEQ ID NO: 764557 - DNA, 15 bp, Homo sapiens
gagcaatagtacttc

SEQ ID NO: 764558 - DNA, 15 bp, Homo sapiens
agcaatagtacttca

SEQ ID NO: 764559 - DNA, 15 bp, Homo sapiens
gcaatagtacttcag

SEQ ID NO: 764560 - DNA, 15 bp, Homo sapiens
caatagtacttcagt

SEQ ID NO: 764561 - DNA, 15 bp, Homo sapiens
aatagtacttcagta

SEQ ID NO: 764562 - DNA, 15 bp, Homo sapiens
atagtacttcagtaa

SEQ ID NO: 764563 - DNA, 15 bp, Homo sapiens
tagtacttcagtaaa

SEQ ID NO: 764564 - DNA, 15 bp, Homo sapiens
agtacttcagtaaac

SEQ ID NO: 764565 - DNA, 15 bp, Homo sapiens
gtacttcagtaaact

SEQ ID NO: 764566 - DNA, 15 bp, Homo sapiens
tacttcagtaaactc

SEQ ID NO: 764567 - DNA, 15 bp, Homo sapiens
acttcagtaaactcc

SEQ ID NO: 764568 - DNA, 15 bp, Homo sapiens
cttcagtaaactcct

SEQ ID NO: 764569 - DNA, 15 bp, Homo sapiens
ttcagtaaactcctc

SEQ ID NO: 764570 - DNA, 15 bp, Homo sapiens
tcagtaaactcctct

SEQ ID NO: 764571 - DNA, 15 bp, Homo sapiens
cagtaaactcctcta

SEQ ID NO: 764572 - DNA, 15 bp, Homo sapiens
agtaaactcctctac

SEQ ID NO: 764573 - DNA, 15 bp, Homo sapiens
gtaaactcctctact

SEQ ID NO: 764574 - DNA, 15 bp, Homo sapiens
taaactcctctactg

SEQ ID NO: 764575 - DNA, 15 bp, Homo sapiens
aaactcctctactgc

SEQ ID NO: 764576 - DNA, 15 bp, Homo sapiens
aactcctctactgct

SEQ ID NO: 764577 - DNA, 15 bp, Homo sapiens
actcctctactgcta

SEQ ID NO: 764578 - DNA, 15 bp, Homo sapiens
ctcctctactgctac

SEQ ID NO: 764579 - DNA, 15 bp, Homo sapiens
tcctctactgctact

SEQ ID NO: 764580 - DNA, 15 bp, Homo sapiens
cctctactgctactg

SEQ ID NO: 764581 - DNA, 15 bp, Homo sapiens
ctctactgctactgg

SEQ ID NO: 764582 - DNA, 15 bp, Homo sapiens
tctactgctactggg

SEQ ID NO: 764583 - DNA, 15 bp, Homo sapiens
ctactgctactgggt

SEQ ID NO: 764584 - DNA, 15 bp, Homo sapiens
tactgctactgggtt

SEQ ID NO: 764585 - DNA, 15 bp, Homo sapiens
actgctactgggttt

SEQ ID NO: 764586 - DNA, 15 bp, Homo sapiens
ctgctactgggtttc

SEQ ID NO: 764587 - DNA, 15 bp, Homo sapiens
tgctactgggtttct

SEQ ID NO: 764588 - DNA, 15 bp, Homo sapiens
gctactgggtttctg

SEQ ID NO: 764589 - DNA, 15 bp, Homo sapiens
ctactgggtttctgt

SEQ ID NO: 764590 - DNA, 15 bp, Homo sapiens
tactgggtttctgtc

SEQ ID NO: 764591 - DNA, 15 bp, Homo sapiens
actgggtttctgtca

SEQ ID NO: 764592 - DNA, 15 bp, Homo sapiens
ctgggtttctgtcac

SEQ ID NO: 764593 - DNA, 15 bp, Homo sapiens
tgggtttctgtcact

SEQ ID NO: 764594 - DNA, 15 bp, Homo sapiens
gggtttctgtcactt

SEQ ID NO: 764595 - DNA, 15 bp, Homo sapiens
ggtttctgtcacttg

SEQ ID NO: 764596 - DNA, 15 bp, Homo sapiens
gtttctgtcacttgt

SEQ ID NO: 764597 - DNA, 15 bp, Homo sapiens
tttctgtcacttgtc

SEQ ID NO: 764598 - DNA, 15 bp, Homo sapiens
ttctgtcacttgtct

SEQ ID NO: 764599 - DNA, 15 bp, Homo sapiens
tctgtcacttgtctc

SEQ ID NO: 764600 - DNA, 15 bp, Homo sapiens
ctgtcacttgtctcc

SEQ ID NO: 764601 - DNA, 15 bp, Homo sapiens
tgtcacttgtctcct

SEQ ID NO: 764602 - DNA, 15 bp, Homo sapiens
gtcacttgtctcctc

SEQ ID NO: 764603 - DNA, 15 bp, Homo sapiens
tcacttgtctcctct

SEQ ID NO: 764604 - DNA, 15 bp, Homo sapiens
cacttgtctcctctt

SEQ ID NO: 764605 - DNA, 15 bp, Homo sapiens
acttgtctcctctta

SEQ ID NO: 764606 - DNA, 15 bp, Homo sapiens
cttgtctcctcttat

SEQ ID NO: 764607 - DNA, 15 bp, Homo sapiens
ttgtctcctcttatt

SEQ ID NO: 764608 - DNA, 15 bp, Homo sapiens
tgtctcctcttattt

SEQ ID NO: 764609 - DNA, 15 bp, Homo sapiens
gtctcctcttatttt

SEQ ID NO: 764610 - DNA, 15 bp, Homo sapiens
tctcctcttattttt

SEQ ID NO: 764611 - DNA, 15 bp, Homo sapiens
ctcctcttatttttg

SEQ ID NO: 764612 - DNA, 15 bp, Homo sapiens
tcctcttatttttga

SEQ ID NO: 764613 - DNA, 15 bp, Homo sapiens
cctcttatttttgac

SEQ ID NO: 764614 - DNA, 15 bp, Homo sapiens
ctcttatttttgaca

SEQ ID NO: 764615 - DNA, 15 bp, Homo sapiens
tcttatttttgacaa

SEQ ID NO: 764616 - DNA, 15 bp, Homo sapiens
cttatttttgacaat

SEQ ID NO: 764617 - DNA, 15 bp, Homo sapiens
ttatttttgacaatt

SEQ ID NO: 764618 - DNA, 15 bp, Homo sapiens
tatttttgacaattt

SEQ ID NO: 764619 - DNA, 15 bp, Homo sapiens
atttttgacaatttg

SEQ ID NO: 764620 - DNA, 15 bp, Homo sapiens
tttttgacaatttga

SEQ ID NO: 764621 - DNA, 15 bp, Homo sapiens
ttttgacaatttgat

SEQ ID NO: 764622 - DNA, 15 bp, Homo sapiens
tttgacaatttgatg

SEQ ID NO: 764623 - DNA, 15 bp, Homo sapiens
ttgacaatttgatgt

SEQ ID NO: 764624 - DNA, 15 bp, Homo sapiens
tgacaatttgatgtt

SEQ ID NO: 764625 - DNA, 15 bp, Homo sapiens
gacaatttgatgttt

SEQ ID NO: 764626 - DNA, 15 bp, Homo sapiens
acaatttgatgtttt

SEQ ID NO: 764627 - DNA, 15 bp, Homo sapiens
caatttgatgttttg

SEQ ID NO: 764628 - DNA, 15 bp, Homo sapiens
aatttgatgttttgt

SEQ ID NO: 764629 - DNA, 15 bp, Homo sapiens
atttgatgttttgtg

SEQ ID NO: 764630 - DNA, 15 bp, Homo sapiens
tttgatgttttgtgt

SEQ ID NO: 764631 - DNA, 15 bp, Homo sapiens
ttgatgttttgtgtt

SEQ ID NO: 764632 - DNA, 15 bp, Homo sapiens
tgatgttttgtgttg

SEQ ID NO: 764633 - DNA, 15 bp, Homo sapiens
gatgttttgtgttgt

SEQ ID NO: 764634 - DNA, 15 bp, Homo sapiens
atgttttgtgttgtg

SEQ ID NO: 764635 - DNA, 15 bp, Homo sapiens
tgttttgtgttgtga

SEQ ID NO: 764636 - DNA, 15 bp, Homo sapiens
gttttgtgttgtgag

SEQ ID NO: 764637 - DNA, 15 bp, Homo sapiens
ttttgtgttgtgagg

SEQ ID NO: 764638 - DNA, 15 bp, Homo sapiens
tttgtgttgtgaggc

SEQ ID NO: 764639 - DNA, 15 bp, Homo sapiens
ttgtgttgtgaggct

SEQ ID NO: 764640 - DNA, 15 bp, Homo sapiens
tgtgttgtgaggctt

SEQ ID NO: 764641 - DNA, 15 bp, Homo sapiens
gtgttgtgaggcttc

SEQ ID NO: 764642 - DNA, 15 bp, Homo sapiens
tgttgtgaggcttcc

SEQ ID NO: 764643 - DNA, 15 bp, Homo sapiens
gttgtgaggcttcct

SEQ ID NO: 764644 - DNA, 15 bp, Homo sapiens
ttgtgaggcttcctt

SEQ ID NO: 764645 - DNA, 15 bp, Homo sapiens
tgtgaggcttccttt

SEQ ID NO: 764646 - DNA, 15 bp, Homo sapiens
gtgaggcttcctttg

SEQ ID NO: 764647 - DNA, 15 bp, Homo sapiens
tgaggcttcctttgt

SEQ ID NO: 764648 - DNA, 15 bp, Homo sapiens
gaggcttcctttgtg

SEQ ID NO: 764649 - DNA, 15 bp, Homo sapiens
aggcttcctttgtgc

SEQ ID NO: 764650 - DNA, 15 bp, Homo sapiens
ggcttcctttgtgcc

SEQ ID NO: 764651 - DNA, 15 bp, Homo sapiens
gcttcctttgtgcct

SEQ ID NO: 764652 - DNA, 15 bp, Homo sapiens
cttcctttgtgccta

SEQ ID NO: 764653 - DNA, 15 bp, Homo sapiens
ttcctttgtgcctaa

SEQ ID NO: 764654 - DNA, 15 bp, Homo sapiens
tcctttgtgcctaaa

SEQ ID NO: 764655 - DNA, 15 bp, Homo sapiens
cctttgtgcctaaaa

SEQ ID NO: 764656 - DNA, 15 bp, Homo sapiens
ctttgtgcctaaaag

SEQ ID NO: 764657 - DNA, 15 bp, Homo sapiens
tttgtgcctaaaagt

SEQ ID NO: 764658 - DNA, 15 bp, Homo sapiens
ttgtgcctaaaagtc

SEQ ID NO: 764659 - DNA, 15 bp, Homo sapiens
tgtgcctaaaagtca

SEQ ID NO: 764660 - DNA, 15 bp, Homo sapiens
gtgcctaaaagtcat

SEQ ID NO: 764661 - DNA, 15 bp, Homo sapiens
tgcctaaaagtcatt

SEQ ID NO: 764662 - DNA, 15 bp, Homo sapiens
gcctaaaagtcattg

SEQ ID NO: 764663 - DNA, 15 bp, Homo sapiens
cctaaaagtcattga

SEQ ID NO: 764664 - DNA, 15 bp, Homo sapiens
ctaaaagtcattgac

SEQ ID NO: 764665 - DNA, 15 bp, Homo sapiens
taaaagtcattgact

SEQ ID NO: 764666 - DNA, 15 bp, Homo sapiens
aaaagtcattgactt

SEQ ID NO: 764667 - DNA, 15 bp, Homo sapiens
aaagtcattgacttt

SEQ ID NO: 764668 - DNA, 15 bp, Homo sapiens
aagtcattgactttt

SEQ ID NO: 764669 - DNA, 15 bp, Homo sapiens
agtcattgactttta

SEQ ID NO: 764670 - DNA, 15 bp, Homo sapiens
gtcattgacttttag

SEQ ID NO: 764671 - DNA, 15 bp, Homo sapiens
tcattgacttttaga

SEQ ID NO: 764672 - DNA, 15 bp, Homo sapiens
cattgacttttagat

SEQ ID NO: 764673 - DNA, 15 bp, Homo sapiens
attgacttttagata

SEQ ID NO: 764674 - DNA, 15 bp, Homo sapiens
ttgacttttagatac

SEQ ID NO: 764675 - DNA, 15 bp, Homo sapiens
tgacttttagatact

SEQ ID NO: 764676 - DNA, 15 bp, Homo sapiens
gacttttagatactc

SEQ ID NO: 764677 - DNA, 15 bp, Homo sapiens
acttttagatactca

SEQ ID NO: 764678 - DNA, 15 bp, Homo sapiens
cttttagatactcac

SEQ ID NO: 764679 - DNA, 15 bp, Homo sapiens
ttttagatactcact

SEQ ID NO: 764680 - DNA, 15 bp, Homo sapiens
tttagatactcactt

SEQ ID NO: 764681 - DNA, 15 bp, Homo sapiens
ttagatactcacttt

SEQ ID NO: 764682 - DNA, 15 bp, Homo sapiens
tagatactcactttg

SEQ ID NO: 764683 - DNA, 15 bp, Homo sapiens
agatactcactttgg

SEQ ID NO: 764684 - DNA, 15 bp, Homo sapiens
gatactcactttgga

SEQ ID NO: 764685 - DNA, 15 bp, Homo sapiens
atactcactttggat

SEQ ID NO: 764686 - DNA, 15 bp, Homo sapiens
tactcactttggatt

SEQ ID NO: 764687 - DNA, 15 bp, Homo sapiens
actcactttggatta

SEQ ID NO: 764688 - DNA, 15 bp, Homo sapiens
ctcactttggattat

SEQ ID NO: 764689 - DNA, 15 bp, Homo sapiens
tcactttggattatc

SEQ ID NO: 764690 - DNA, 15 bp, Homo sapiens
cactttggattatct

SEQ ID NO: 764691 - DNA, 15 bp, Homo sapiens
actttggattatctc

SEQ ID NO: 764692 - DNA, 15 bp, Homo sapiens
ctttggattatctcc

SEQ ID NO: 764693 - DNA, 15 bp, Homo sapiens
tttggattatctcca

SEQ ID NO: 764694 - DNA, 15 bp, Homo sapiens
ttggattatctccat

SEQ ID NO: 764695 - DNA, 15 bp, Homo sapiens
tggattatctccatc

SEQ ID NO: 764696 - DNA, 15 bp, Homo sapiens
ggattatctccatca

SEQ ID NO: 764697 - DNA, 15 bp, Homo sapiens
gattatctccatcaa

SEQ ID NO: 764698 - DNA, 15 bp, Homo sapiens
attatctccatcaat

SEQ ID NO: 764699 - DNA, 15 bp, Homo sapiens
ttatctccatcaatg

SEQ ID NO: 764700 - DNA, 15 bp, Homo sapiens
tatctccatcaatgt

SEQ ID NO: 764701 - DNA, 15 bp, Homo sapiens
atctccatcaatgtg

SEQ ID NO: 764702 - DNA, 15 bp, Homo sapiens
tctccatcaatgtga

SEQ ID NO: 764703 - DNA, 15 bp, Homo sapiens
ctccatcaatgtgaa

SEQ ID NO: 764704 - DNA, 15 bp, Homo sapiens
tccatcaatgtgaaa

SEQ ID NO: 764705 - DNA, 15 bp, Homo sapiens
ccatcaatgtgaaac

SEQ ID NO: 764706 - DNA, 15 bp, Homo sapiens
catcaatgtgaaacc

SEQ ID NO: 764707 - DNA, 15 bp, Homo sapiens
atcaatgtgaaacct

SEQ ID NO: 764708 - DNA, 15 bp, Homo sapiens
tcaatgtgaaacctc

SEQ ID NO: 764709 - DNA, 15 bp, Homo sapiens
caatgtgaaacctcc

SEQ ID NO: 764710 - DNA, 15 bp, Homo sapiens
aatgtgaaacctcct

SEQ ID NO: 764711 - DNA, 15 bp, Homo sapiens
atgtgaaacctcctg

SEQ ID NO: 764712 - DNA, 15 bp, Homo sapiens
tgtgaaacctcctgt

SEQ ID NO: 764713 - DNA, 15 bp, Homo sapiens
gtgaaacctcctgtg

SEQ ID NO: 764714 - DNA, 15 bp, Homo sapiens
tgaaacctcctgtgt

SEQ ID NO: 764715 - DNA, 15 bp, Homo sapiens
gaaacctcctgtgtt

SEQ ID NO: 764716 - DNA, 15 bp, Homo sapiens
aaacctcctgtgttg

SEQ ID NO: 764717 - DNA, 15 bp, Homo sapiens
aacctcctgtgttgc

SEQ ID NO: 764718 - DNA, 15 bp, Homo sapiens
acctcctgtgttgcc

SEQ ID NO: 764719 - DNA, 15 bp, Homo sapiens
cctcctgtgttgcct

SEQ ID NO: 764720 - DNA, 15 bp, Homo sapiens
ctcctgtgttgcctt

SEQ ID NO: 764721 - DNA, 15 bp, Homo sapiens
tcctgtgttgcctta

SEQ ID NO: 764722 - DNA, 15 bp, Homo sapiens
cctgtgttgccttat

SEQ ID NO: 764723 - DNA, 15 bp, Homo sapiens
ctgtgttgccttatt

SEQ ID NO: 764724 - DNA, 15 bp, Homo sapiens
tgtgttgccttattt

SEQ ID NO: 764725 - DNA, 15 bp, Homo sapiens
gtgttgccttattta

SEQ ID NO: 764726 - DNA, 15 bp, Homo sapiens
tgttgccttatttaa

SEQ ID NO: 764727 - DNA, 15 bp, Homo sapiens
gttgccttatttaat

SEQ ID NO: 764728 - DNA, 15 bp, Homo sapiens
ttgccttatttaatg

SEQ ID NO: 764729 - DNA, 15 bp, Homo sapiens
tgccttatttaatgt

SEQ ID NO: 764730 - DNA, 15 bp, Homo sapiens
gccttatttaatgtc

SEQ ID NO: 764731 - DNA, 15 bp, Homo sapiens
ccttatttaatgtct

SEQ ID NO: 764732 - DNA, 15 bp, Homo sapiens
cttatttaatgtctt

SEQ ID NO: 764733 - DNA, 15 bp, Homo sapiens
ttatttaatgtcttt

SEQ ID NO: 764734 - DNA, 15 bp, Homo sapiens
tatttaatgtctttt

SEQ ID NO: 764735 - DNA, 15 bp, Homo sapiens
atttaatgtcttttg

SEQ ID NO: 764736 - DNA, 15 bp, Homo sapiens
tttaatgtcttttgc

SEQ ID NO: 764737 - DNA, 15 bp, Homo sapiens
ttaatgtcttttgcc

SEQ ID NO: 764738 - DNA, 15 bp, Homo sapiens
taatgtcttttgcct

SEQ ID NO: 764739 - DNA, 15 bp, Homo sapiens
aatgtcttttgcctt

SEQ ID NO: 764740 - DNA, 15 bp, Homo sapiens
atgtcttttgccttg

SEQ ID NO: 764741 - DNA, 15 bp, Homo sapiens
tgtcttttgccttga

SEQ ID NO: 764742 - DNA, 15 bp, Homo sapiens
gtcttttgccttgaa

SEQ ID NO: 764743 - DNA, 15 bp, Homo sapiens
tcttttgccttgaat

SEQ ID NO: 764744 - DNA, 15 bp, Homo sapiens
cttttgccttgaatt

SEQ ID NO: 764745 - DNA, 15 bp, Homo sapiens
ttttgccttgaattt

SEQ ID NO: 764746 - DNA, 15 bp, Homo sapiens
tttgccttgaatttc

SEQ ID NO: 764747 - DNA, 15 bp, Homo sapiens
ttgccttgaatttca

SEQ ID NO: 764748 - DNA, 15 bp, Homo sapiens
tgccttgaatttcac

SEQ ID NO: 764749 - DNA, 15 bp, Homo sapiens
gccttgaatttcact

SEQ ID NO: 764750 - DNA, 15 bp, Homo sapiens
ccttgaatttcactt

SEQ ID NO: 764751 - DNA, 15 bp, Homo sapiens
cttgaatttcacttg

SEQ ID NO: 764752 - DNA, 15 bp, Homo sapiens
ttgaatttcacttgc

SEQ ID NO: 764753 - DNA, 15 bp, Homo sapiens
tgaatttcacttgct

SEQ ID NO: 764754 - DNA, 15 bp, Homo sapiens
gaatttcacttgctt

SEQ ID NO: 764755 - DNA, 15 bp, Homo sapiens
aatttcacttgcttg

SEQ ID NO: 764756 - DNA, 15 bp, Homo sapiens
atttcacttgcttgg

SEQ ID NO: 764757 - DNA, 15 bp, Homo sapiens
tttcacttgcttgga

SEQ ID NO: 764758 - DNA, 15 bp, Homo sapiens
ttcacttgcttggat

SEQ ID NO: 764759 - DNA, 15 bp, Homo sapiens
tcacttgcttggata

SEQ ID NO: 764760 - DNA, 15 bp, Homo sapiens
cacttgcttggatac

SEQ ID NO: 764761 - DNA, 15 bp, Homo sapiens
acttgcttggatacc

SEQ ID NO: 764762 - DNA, 15 bp, Homo sapiens
cttgcttggatacca

SEQ ID NO: 764763 - DNA, 15 bp, Homo sapiens
ttgcttggataccat

SEQ ID NO: 764764 - DNA, 15 bp, Homo sapiens
tgcttggataccatt

SEQ ID NO: 764765 - DNA, 15 bp, Homo sapiens
gcttggataccattg

SEQ ID NO: 764766 - DNA, 15 bp, Homo sapiens
cttggataccattgc

SEQ ID NO: 764767 - DNA, 15 bp, Homo sapiens
ttggataccattgcc

SEQ ID NO: 764768 - DNA, 15 bp, Homo sapiens
tggataccattgcct

SEQ ID NO: 764769 - DNA, 15 bp, Homo sapiens
ggataccattgcctt

SEQ ID NO: 764770 - DNA, 15 bp, Homo sapiens
gataccattgccttt

SEQ ID NO: 764771 - DNA, 15 bp, Homo sapiens
ataccattgccttta

SEQ ID NO: 764772 - DNA, 15 bp, Homo sapiens
taccattgcctttaa

SEQ ID NO: 764773 - DNA, 15 bp, Homo sapiens
accattgcctttaac

SEQ ID NO: 764774 - DNA, 15 bp, Homo sapiens
ccattgcctttaact

SEQ ID NO: 764775 - DNA, 15 bp, Homo sapiens
cattgcctttaactt

SEQ ID NO: 764776 - DNA, 15 bp, Homo sapiens
attgcctttaacttg

SEQ ID NO: 764777 - DNA, 15 bp, Homo sapiens
ttgcctttaacttgg

SEQ ID NO: 764778 - DNA, 15 bp, Homo sapiens
tgcctttaacttggc

SEQ ID NO: 764779 - DNA, 15 bp, Homo sapiens
gcctttaacttggca

SEQ ID NO: 764780 - DNA, 15 bp, Homo sapiens
cctttaacttggcat

SEQ ID NO: 764781 - DNA, 15 bp, Homo sapiens
ctttaacttggcatc

SEQ ID NO: 764782 - DNA, 15 bp, Homo sapiens
tttaacttggcatca

SEQ ID NO: 764783 - DNA, 15 bp, Homo sapiens
ttaacttggcatcac

SEQ ID NO: 764784 - DNA, 15 bp, Homo sapiens
taacttggcatcact

SEQ ID NO: 764785 - DNA, 15 bp, Homo sapiens
aacttggcatcactc

SEQ ID NO: 764786 - DNA, 15 bp, Homo sapiens
acttggcatcactcc

SEQ ID NO: 764787 - DNA, 15 bp, Homo sapiens
cttggcatcactcct

SEQ ID NO: 764788 - DNA, 15 bp, Homo sapiens
ttggcatcactcctt

SEQ ID NO: 764789 - DNA, 15 bp, Homo sapiens
tggcatcactcctta

SEQ ID NO: 764790 - DNA, 15 bp, Homo sapiens
ggcatcactccttag

SEQ ID NO: 764791 - DNA, 15 bp, Homo sapiens
gcatcactccttagc

SEQ ID NO: 764792 - DNA, 15 bp, Homo sapiens
catcactccttagct

SEQ ID NO: 764793 - DNA, 15 bp, Homo sapiens
atcactccttagctt

SEQ ID NO: 764794 - DNA, 15 bp, Homo sapiens
tcactccttagcttg

SEQ ID NO: 764795 - DNA, 15 bp, Homo sapiens
cactccttagcttgc

SEQ ID NO: 764796 - DNA, 15 bp, Homo sapiens
actccttagcttgct

SEQ ID NO: 764797 - DNA, 15 bp, Homo sapiens
ctccttagcttgctt

SEQ ID NO: 764798 - DNA, 15 bp, Homo sapiens
tccttagcttgcttt

SEQ ID NO: 764799 - DNA, 15 bp, Homo sapiens
ccttagcttgctttt

SEQ ID NO: 764800 - DNA, 15 bp, Homo sapiens
cttagcttgcttttt

SEQ ID NO: 764801 - DNA, 15 bp, Homo sapiens
ttagcttgcttttta

SEQ ID NO: 764802 - DNA, 15 bp, Homo sapiens
tagcttgctttttac

SEQ ID NO: 764803 - DNA, 15 bp, Homo sapiens
agcttgctttttaca

SEQ ID NO: 764804 - DNA, 15 bp, Homo sapiens
gcttgctttttacag

SEQ ID NO: 764805 - DNA, 15 bp, Homo sapiens
cttgctttttacagt

SEQ ID NO: 764806 - DNA, 15 bp, Homo sapiens
ttgctttttacagtt

SEQ ID NO: 764807 - DNA, 15 bp, Homo sapiens
tgctttttacagttt

SEQ ID NO: 764808 - DNA, 15 bp, Homo sapiens
gctttttacagtttg

SEQ ID NO: 764809 - DNA, 15 bp, Homo sapiens
ctttttacagtttgg

SEQ ID NO: 764810 - DNA, 15 bp, Homo sapiens
tttttacagtttggt

SEQ ID NO: 764811 - DNA, 15 bp, Homo sapiens
ttttacagtttggta

SEQ ID NO: 764812 - DNA, 15 bp, Homo sapiens
tttacagtttggtag

SEQ ID NO: 764813 - DNA, 15 bp, Homo sapiens
ttacagtttggtaga

SEQ ID NO: 764814 - DNA, 15 bp, Homo sapiens
tacagtttggtagag

SEQ ID NO: 764815 - DNA, 15 bp, Homo sapiens
acagtttggtagaga

SEQ ID NO: 764816 - DNA, 15 bp, Homo sapiens
cagtttggtagagat

SEQ ID NO: 764817 - DNA, 15 bp, Homo sapiens
agtttggtagagatg

SEQ ID NO: 764818 - DNA, 15 bp, Homo sapiens
gtttggtagagatgg

SEQ ID NO: 764819 - DNA, 15 bp, Homo sapiens
tttggtagagatggt

SEQ ID NO: 764820 - DNA, 15 bp, Homo sapiens
ttggtagagatggtg

SEQ ID NO: 764821 - DNA, 15 bp, Homo sapiens
tggtagagatggtgt

SEQ ID NO: 764822 - DNA, 15 bp, Homo sapiens
ggtagagatggtgtc

SEQ ID NO: 764823 - DNA, 15 bp, Homo sapiens
gtagagatggtgtct

SEQ ID NO: 764824 - DNA, 15 bp, Homo sapiens
tagagatggtgtctc

SEQ ID NO: 764825 - DNA, 15 bp, Homo sapiens
agagatggtgtctca

SEQ ID NO: 764826 - DNA, 15 bp, Homo sapiens
gagatggtgtctcac

SEQ ID NO: 764827 - DNA, 15 bp, Homo sapiens
agatggtgtctcact

SEQ ID NO: 764828 - DNA, 15 bp, Homo sapiens
gatggtgtctcacta

SEQ ID NO: 764829 - DNA, 15 bp, Homo sapiens
atggtgtctcactat

SEQ ID NO: 764830 - DNA, 15 bp, Homo sapiens
tggtgtctcactata

SEQ ID NO: 764831 - DNA, 15 bp, Homo sapiens
ggtgtctcactatat

SEQ ID NO: 764832 - DNA, 15 bp, Homo sapiens
gtgtctcactatatt

SEQ ID NO: 764833 - DNA, 15 bp, Homo sapiens
tgtctcactatattg

SEQ ID NO: 764834 - DNA, 15 bp, Homo sapiens
gtctcactatattgc

SEQ ID NO: 764835 - DNA, 15 bp, Homo sapiens
tctcactatattgcc

SEQ ID NO: 764836 - DNA, 15 bp, Homo sapiens
ctcactatattgccc

SEQ ID NO: 764837 - DNA, 15 bp, Homo sapiens
tcactatattgccct

SEQ ID NO: 764838 - DNA, 15 bp, Homo sapiens
cactatattgccctg

SEQ ID NO: 764839 - DNA, 15 bp, Homo sapiens
actatattgccctgg

SEQ ID NO: 764840 - DNA, 15 bp, Homo sapiens
ctatattgccctggc

SEQ ID NO: 764841 - DNA, 15 bp, Homo sapiens
tatattgccctggct

SEQ ID NO: 764842 - DNA, 15 bp, Homo sapiens
atattgccctggctg

SEQ ID NO: 764843 - DNA, 15 bp, Homo sapiens
tattgccctggctgg

SEQ ID NO: 764844 - DNA, 15 bp, Homo sapiens
attgccctggctggt

SEQ ID NO: 764845 - DNA, 15 bp, Homo sapiens
ttgccctggctggtt

SEQ ID NO: 764846 - DNA, 15 bp, Homo sapiens
gccctggctggtttc

SEQ ID NO: 764847 - DNA, 15 bp, Homo sapiens
ccctggctggtttca

SEQ ID NO: 764848 - DNA, 15 bp, Homo sapiens
cctggctggtttcaa

SEQ ID NO: 764849 - DNA, 15 bp, Homo sapiens
ctggctggtttcaaa

SEQ ID NO: 764850 - DNA, 15 bp, Homo sapiens
tggctggtttcaaac

SEQ ID NO: 764851 - DNA, 15 bp, Homo sapiens
ggctggtttcaaact

SEQ ID NO: 764852 - DNA, 15 bp, Homo sapiens
gctggtttcaaactc

SEQ ID NO: 764853 - DNA, 15 bp, Homo sapiens
ctggtttcaaactcc

SEQ ID NO: 764854 - DNA, 15 bp, Homo sapiens
tggtttcaaactcct

SEQ ID NO: 764855 - DNA, 15 bp, Homo sapiens
ggtttcaaactcctg

SEQ ID NO: 764856 - DNA, 15 bp, Homo sapiens
gtttcaaactcctgg

SEQ ID NO: 764857 - DNA, 15 bp, Homo sapiens
tttcaaactcctggc

SEQ ID NO: 764858 - DNA, 15 bp, Homo sapiens
ttcaaactcctggcc

SEQ ID NO: 764859 - DNA, 15 bp, Homo sapiens
tcaaactcctggcct

SEQ ID NO: 764860 - DNA, 15 bp, Homo sapiens
caaactcctggcctc

SEQ ID NO: 764861 - DNA, 15 bp, Homo sapiens
aaactcctggcctca

SEQ ID NO: 764862 - DNA, 15 bp, Homo sapiens
cctcaagtgatcctg

SEQ ID NO: 764863 - DNA, 15 bp, Homo sapiens
ctcaagtgatcctgc

SEQ ID NO: 764864 - DNA, 15 bp, Homo sapiens
tcaagtgatcctgcc

SEQ ID NO: 764865 - DNA, 15 bp, Homo sapiens
caagtgatcctgcca

SEQ ID NO: 764866 - DNA, 15 bp, Homo sapiens
aagtgatcctgccac

SEQ ID NO: 764867 - DNA, 15 bp, Homo sapiens
agtgatcctgccacc

SEQ ID NO: 764868 - DNA, 15 bp, Homo sapiens
gtgatcctgccacct

SEQ ID NO: 764869 - DNA, 15 bp, Homo sapiens
tgatcctgccacctc

SEQ ID NO: 764870 - DNA, 15 bp, Homo sapiens
gatcctgccacctcg

SEQ ID NO: 764871 - DNA, 15 bp, Homo sapiens
atcctgccacctcgg

SEQ ID NO: 764872 - DNA, 15 bp, Homo sapiens
tcctgccacctcggc

SEQ ID NO: 764873 - DNA, 15 bp, Homo sapiens
cctgccacctcggcc

SEQ ID NO: 764874 - DNA, 15 bp, Homo sapiens
ctgccacctcggcct

SEQ ID NO: 764875 - DNA, 15 bp, Homo sapiens
tgccacctcggcctc

SEQ ID NO: 764876 - DNA, 15 bp, Homo sapiens
gccacctcggcctcc

SEQ ID NO: 764877 - DNA, 15 bp, Homo sapiens
cacctcggcctccca

SEQ ID NO: 764878 - DNA, 15 bp, Homo sapiens
acctcggcctcccaa

SEQ ID NO: 764879 - DNA, 15 bp, Homo sapiens
tcggcctcccaaagc

SEQ ID NO: 764880 - DNA, 15 bp, Homo sapiens
cggcctcccaaagca

SEQ ID NO: 764881 - DNA, 15 bp, Homo sapiens
ggcctcccaaagcag

SEQ ID NO: 764882 - DNA, 15 bp, Homo sapiens
gcctcccaaagcagt

SEQ ID NO: 764883 - DNA, 15 bp, Homo sapiens
cctcccaaagcagtg

SEQ ID NO: 764884 - DNA, 15 bp, Homo sapiens
ctcccaaagcagtgg

SEQ ID NO: 764885 - DNA, 15 bp, Homo sapiens
tcccaaagcagtggg

SEQ ID NO: 764886 - DNA, 15 bp, Homo sapiens
cccaaagcagtggga

SEQ ID NO: 764887 - DNA, 15 bp, Homo sapiens
ccaaagcagtgggat

SEQ ID NO: 764888 - DNA, 15 bp, Homo sapiens
caaagcagtgggatt

SEQ ID NO: 764889 - DNA, 15 bp, Homo sapiens
aaagcagtgggatta

SEQ ID NO: 764890 - DNA, 15 bp, Homo sapiens
aagcagtgggattac

SEQ ID NO: 764891 - DNA, 15 bp, Homo sapiens
agcagtgggattaca

SEQ ID NO: 764892 - DNA, 15 bp, Homo sapiens
gcagtgggattacag

SEQ ID NO: 764893 - DNA, 15 bp, Homo sapiens
cagtgggattacagg

SEQ ID NO: 764894 - DNA, 15 bp, Homo sapiens
agtgggattacaggt

SEQ ID NO: 764895 - DNA, 15 bp, Homo sapiens
gtgggattacaggtg

SEQ ID NO: 764896 - DNA, 15 bp, Homo sapiens
aagaagcagaaataa

SEQ ID NO: 764897 - DNA, 15 bp, Homo sapiens
agaagcagaaataaa

SEQ ID NO: 764898 - DNA, 15 bp, Homo sapiens
gaagcagaaataaaa

SEQ ID NO: 764899 - DNA, 15 bp, Homo sapiens
aagcagaaataaaac

SEQ ID NO: 764900 - DNA, 15 bp, Homo sapiens
agcagaaataaaacc

SEQ ID NO: 764901 - DNA, 15 bp, Homo sapiens
gcagaaataaaacct

SEQ ID NO: 764902 - DNA, 15 bp, Homo sapiens
cagaaataaaacctc

SEQ ID NO: 764903 - DNA, 15 bp, Homo sapiens
agaaataaaacctcc

SEQ ID NO: 764904 - DNA, 15 bp, Homo sapiens
gaaataaaacctccc

SEQ ID NO: 764905 - DNA, 15 bp, Homo sapiens
aaataaaacctccca

SEQ ID NO: 764906 - DNA, 15 bp, Homo sapiens
aataaaacctcccat

SEQ ID NO: 764907 - DNA, 15 bp, Homo sapiens
ataaaacctcccata

SEQ ID NO: 764908 - DNA, 15 bp, Homo sapiens
taaaacctcccataa

SEQ ID NO: 764909 - DNA, 15 bp, Homo sapiens
aaaacctcccataat

SEQ ID NO: 764910 - DNA, 15 bp, Homo sapiens
aaacctcccataatc

SEQ ID NO: 764911 - DNA, 15 bp, Homo sapiens
aacctcccataatca

SEQ ID NO: 764912 - DNA, 15 bp, Homo sapiens
acctcccataatcac

SEQ ID NO: 764913 - DNA, 15 bp, Homo sapiens
cctcccataatcaca

SEQ ID NO: 764914 - DNA, 15 bp, Homo sapiens
ctcccataatcacaa

SEQ ID NO: 764915 - DNA, 15 bp, Homo sapiens
tcccataatcacaac

SEQ ID NO: 764916 - DNA, 15 bp, Homo sapiens
cccataatcacaaca

SEQ ID NO: 764917 - DNA, 15 bp, Homo sapiens
ccataatcacaacag

SEQ ID NO: 764918 - DNA, 15 bp, Homo sapiens
cataatcacaacaga

SEQ ID NO: 764919 - DNA, 15 bp, Homo sapiens
ataatcacaacagaa

SEQ ID NO: 764920 - DNA, 15 bp, Homo sapiens
taatcacaacagaaa

SEQ ID NO: 764921 - DNA, 15 bp, Homo sapiens
aatcacaacagaaac

SEQ ID NO: 764922 - DNA, 15 bp, Homo sapiens
atcacaacagaaaca

SEQ ID NO: 764923 - DNA, 15 bp, Homo sapiens
tcacaacagaaacat

SEQ ID NO: 764924 - DNA, 15 bp, Homo sapiens
cacaacagaaacatc

SEQ ID NO: 764925 - DNA, 15 bp, Homo sapiens
acaacagaaacatct

SEQ ID NO: 764926 - DNA, 15 bp, Homo sapiens
caacagaaacatcta

SEQ ID NO: 764927 - DNA, 15 bp, Homo sapiens
aacagaaacatctac

SEQ ID NO: 764928 - DNA, 15 bp, Homo sapiens
acagaaacatctact

SEQ ID NO: 764929 - DNA, 15 bp, Homo sapiens
cagaaacatctacta

SEQ ID NO: 764930 - DNA, 15 bp, Homo sapiens
agaaacatctactac

SEQ ID NO: 764931 - DNA, 15 bp, Homo sapiens
gaaacatctactact

SEQ ID NO: 764932 - DNA, 15 bp, Homo sapiens
aaacatctactactg

SEQ ID NO: 764933 - DNA, 15 bp, Homo sapiens
aacatctactactgt

SEQ ID NO: 764934 - DNA, 15 bp, Homo sapiens
acatctactactgtt

SEQ ID NO: 764935 - DNA, 15 bp, Homo sapiens
catctactactgttc

SEQ ID NO: 764936 - DNA, 15 bp, Homo sapiens
atctactactgttca

SEQ ID NO: 764937 - DNA, 15 bp, Homo sapiens
tctactactgttcat

SEQ ID NO: 764938 - DNA, 15 bp, Homo sapiens
ctactactgttcatg

SEQ ID NO: 764939 - DNA, 15 bp, Homo sapiens
tactactgttcatga

SEQ ID NO: 764940 - DNA, 15 bp, Homo sapiens
actactgttcatgat

SEQ ID NO: 764941 - DNA, 15 bp, Homo sapiens
ctactgttcatgatt

SEQ ID NO: 764942 - DNA, 15 bp, Homo sapiens
tactgttcatgattc

SEQ ID NO: 764943 - DNA, 15 bp, Homo sapiens
actgttcatgattcg

SEQ ID NO: 764944 - DNA, 15 bp, Homo sapiens
ctgttcatgattcgt

SEQ ID NO: 764945 - DNA, 15 bp, Homo sapiens
tgttcatgattcgtt

SEQ ID NO: 764946 - DNA, 15 bp, Homo sapiens
gttcatgattcgttt

SEQ ID NO: 764947 - DNA, 15 bp, Homo sapiens
ttcatgattcgtttt

SEQ ID NO: 764948 - DNA, 15 bp, Homo sapiens
tcatgattcgtttta

SEQ ID NO: 764949 - DNA, 15 bp, Homo sapiens
catgattcgttttat

SEQ ID NO: 764950 - DNA, 15 bp, Homo sapiens
atgattcgttttatt

SEQ ID NO: 764951 - DNA, 15 bp, Homo sapiens
tgattcgttttattt

SEQ ID NO: 764952 - DNA, 15 bp, Homo sapiens
gattcgttttatttt

SEQ ID NO: 764953 - DNA, 15 bp, Homo sapiens
attcgttttattttc

SEQ ID NO: 764954 - DNA, 15 bp, Homo sapiens
ttcgttttattttcc

SEQ ID NO: 764955 - DNA, 15 bp, Homo sapiens
tcgttttattttccc

SEQ ID NO: 764956 - DNA, 15 bp, Homo sapiens
cgttttattttcccc

SEQ ID NO: 764957 - DNA, 15 bp, Homo sapiens
gttttattttccccc

SEQ ID NO: 764958 - DNA, 15 bp, Homo sapiens
ttttattttccccca

SEQ ID NO: 764959 - DNA, 15 bp, Homo sapiens
tttattttcccccaa

SEQ ID NO: 764960 - DNA, 15 bp, Homo sapiens
ttattttcccccaaa

SEQ ID NO: 764961 - DNA, 15 bp, Homo sapiens
tattttcccccaaat

SEQ ID NO: 764962 - DNA, 15 bp, Homo sapiens
attttcccccaaata

SEQ ID NO: 764963 - DNA, 15 bp, Homo sapiens
ttttcccccaaatat

SEQ ID NO: 764964 - DNA, 15 bp, Homo sapiens
tttcccccaaatata

SEQ ID NO: 764965 - DNA, 15 bp, Homo sapiens
ttcccccaaatatat

SEQ ID NO: 764966 - DNA, 15 bp, Homo sapiens
tcccccaaatatatt

SEQ ID NO: 764967 - DNA, 15 bp, Homo sapiens
cccccaaatatatta

SEQ ID NO: 764968 - DNA, 15 bp, Homo sapiens
ccccaaatatattac

SEQ ID NO: 764969 - DNA, 15 bp, Homo sapiens
cccaaatatattact

SEQ ID NO: 764970 - DNA, 15 bp, Homo sapiens
ccaaatatattactg

SEQ ID NO: 764971 - DNA, 15 bp, Homo sapiens
caaatatattactgt

SEQ ID NO: 764972 - DNA, 15 bp, Homo sapiens
aaatatattactgtg

SEQ ID NO: 764973 - DNA, 15 bp, Homo sapiens
aatatattactgtgc

SEQ ID NO: 764974 - DNA, 15 bp, Homo sapiens
atatattactgtgca

SEQ ID NO: 764975 - DNA, 15 bp, Homo sapiens
tatattactgtgcat

SEQ ID NO: 764976 - DNA, 15 bp, Homo sapiens
atattactgtgcatt

SEQ ID NO: 764977 - DNA, 15 bp, Homo sapiens
tattactgtgcattt

SEQ ID NO: 764978 - DNA, 15 bp, Homo sapiens
attactgtgcatttt

SEQ ID NO: 764979 - DNA, 15 bp, Homo sapiens
ttactgtgcattttt

SEQ ID NO: 764980 - DNA, 15 bp, Homo sapiens
tactgtgcatttttc

SEQ ID NO: 764981 - DNA, 15 bp, Homo sapiens
actgtgcatttttct

SEQ ID NO: 764982 - DNA, 15 bp, Homo sapiens
ctgtgcatttttctt

SEQ ID NO: 764983 - DNA, 15 bp, Homo sapiens
tgtgcatttttcttt

SEQ ID NO: 764984 - DNA, 15 bp, Homo sapiens
gtgcatttttcttta

SEQ ID NO: 764985 - DNA, 15 bp, Homo sapiens
tgcatttttctttat

SEQ ID NO: 764986 - DNA, 15 bp, Homo sapiens
gcatttttctttata

SEQ ID NO: 764987 - DNA, 15 bp, Homo sapiens
catttttctttataa

SEQ ID NO: 764988 - DNA, 15 bp, Homo sapiens
atttttctttataat

SEQ ID NO: 764989 - DNA, 15 bp, Homo sapiens
tttttctttataatg

SEQ ID NO: 764990 - DNA, 15 bp, Homo sapiens
ttttctttataatgc

SEQ ID NO: 764991 - DNA, 15 bp, Homo sapiens
tttctttataatgcc

SEQ ID NO: 764992 - DNA, 15 bp, Homo sapiens
ttctttataatgccg

SEQ ID NO: 764993 - DNA, 15 bp, Homo sapiens
tctttataatgccga

SEQ ID NO: 764994 - DNA, 15 bp, Homo sapiens
ctttataatgccgag

SEQ ID NO: 764995 - DNA, 15 bp, Homo sapiens
tttataatgccgaga

SEQ ID NO: 764996 - DNA, 15 bp, Homo sapiens
ttataatgccgagat

SEQ ID NO: 764997 - DNA, 15 bp, Homo sapiens
tataatgccgagatc

SEQ ID NO: 764998 - DNA, 15 bp, Homo sapiens
ataatgccgagatcc

SEQ ID NO: 764999 - DNA, 15 bp, Homo sapiens
taatgccgagatcct

SEQ ID NO: 765000 - DNA, 15 bp, Homo sapiens
aatgccgagatccta

SEQ ID NO: 765001 - DNA, 15 bp, Homo sapiens
atgccgagatcctag

SEQ ID NO: 765002 - DNA, 15 bp, Homo sapiens
tgccgagatcctaga

SEQ ID NO: 765003 - DNA, 15 bp, Homo sapiens
gccgagatcctagaa

SEQ ID NO: 765004 - DNA, 15 bp, Homo sapiens
ccgagatcctagaat

SEQ ID NO: 765005 - DNA, 15 bp, Homo sapiens
cgagatcctagaata

SEQ ID NO: 765006 - DNA, 15 bp, Homo sapiens
gagatcctagaatat

SEQ ID NO: 765007 - DNA, 15 bp, Homo sapiens
agatcctagaatatg

SEQ ID NO: 765008 - DNA, 15 bp, Homo sapiens
gatcctagaatatgt

SEQ ID NO: 765009 - DNA, 15 bp, Homo sapiens
atcctagaatatgtg

SEQ ID NO: 765010 - DNA, 15 bp, Homo sapiens
tcctagaatatgtgc

SEQ ID NO: 765011 - DNA, 15 bp, Homo sapiens
cctagaatatgtgcg

SEQ ID NO: 765012 - DNA, 15 bp, Homo sapiens
ctagaatatgtgcga

SEQ ID NO: 765013 - DNA, 15 bp, Homo sapiens
tagaatatgtgcgat

SEQ ID NO: 765014 - DNA, 15 bp, Homo sapiens
agaatatgtgcgatt

SEQ ID NO: 765015 - DNA, 15 bp, Homo sapiens
gaatatgtgcgattt

SEQ ID NO: 765016 - DNA, 15 bp, Homo sapiens
aatatgtgcgattta

SEQ ID NO: 765017 - DNA, 15 bp, Homo sapiens
atatgtgcgatttag

SEQ ID NO: 765018 - DNA, 15 bp, Homo sapiens
tatgtgcgatttagt

SEQ ID NO: 765019 - DNA, 15 bp, Homo sapiens
atgtgcgatttagtg

SEQ ID NO: 765020 - DNA, 15 bp, Homo sapiens
tgtgcgatttagtgt

SEQ ID NO: 765021 - DNA, 15 bp, Homo sapiens
gtgcgatttagtgtt

SEQ ID NO: 765022 - DNA, 15 bp, Homo sapiens
tgcgatttagtgttc

SEQ ID NO: 765023 - DNA, 15 bp, Homo sapiens
gcgatttagtgttct

SEQ ID NO: 765024 - DNA, 15 bp, Homo sapiens
cgatttagtgttctg

SEQ ID NO: 765025 - DNA, 15 bp, Homo sapiens
gatttagtgttctgc

SEQ ID NO: 765026 - DNA, 15 bp, Homo sapiens
atttagtgttctgct

SEQ ID NO: 765027 - DNA, 15 bp, Homo sapiens
tttagtgttctgctt

SEQ ID NO: 765028 - DNA, 15 bp, Homo sapiens
ttagtgttctgcttt

SEQ ID NO: 765029 - DNA, 15 bp, Homo sapiens
tagtgttctgctttt

SEQ ID NO: 765030 - DNA, 15 bp, Homo sapiens
agtgttctgcttttc

SEQ ID NO: 765031 - DNA, 15 bp, Homo sapiens
gtgttctgcttttct

SEQ ID NO: 765032 - DNA, 15 bp, Homo sapiens
tgttctgcttttctt

SEQ ID NO: 765033 - DNA, 15 bp, Homo sapiens
gttctgcttttcttc

SEQ ID NO: 765034 - DNA, 15 bp, Homo sapiens
ttctgcttttcttct

SEQ ID NO: 765035 - DNA, 15 bp, Homo sapiens
tctgcttttcttctt

SEQ ID NO: 765036 - DNA, 15 bp, Homo sapiens
ctgcttttcttctta

SEQ ID NO: 765037 - DNA, 15 bp, Homo sapiens
tgcttttcttcttaa

SEQ ID NO: 765038 - DNA, 15 bp, Homo sapiens
gcttttcttcttaac

SEQ ID NO: 765039 - DNA, 15 bp, Homo sapiens
cttttcttcttaaca

SEQ ID NO: 765040 - DNA, 15 bp, Homo sapiens
ttttcttcttaacat

SEQ ID NO: 765041 - DNA, 15 bp, Homo sapiens
tttcttcttaacatt

SEQ ID NO: 765042 - DNA, 15 bp, Homo sapiens
ttcttcttaacatta

SEQ ID NO: 765043 - DNA, 15 bp, Homo sapiens
tcttcttaacattac

SEQ ID NO: 765044 - DNA, 15 bp, Homo sapiens
cttcttaacattacg

SEQ ID NO: 765045 - DNA, 15 bp, Homo sapiens
ttcttaacattacgt

SEQ ID NO: 765046 - DNA, 15 bp, Homo sapiens
tcttaacattacgtt

SEQ ID NO: 765047 - DNA, 15 bp, Homo sapiens
cttaacattacgtta

SEQ ID NO: 765048 - DNA, 15 bp, Homo sapiens
ttaacattacgttat

SEQ ID NO: 765049 - DNA, 15 bp, Homo sapiens
taacattacgttatc

SEQ ID NO: 765050 - DNA, 15 bp, Homo sapiens
aacattacgttatca

SEQ ID NO: 765051 - DNA, 15 bp, Homo sapiens
acattacgttatcag

SEQ ID NO: 765052 - DNA, 15 bp, Homo sapiens
cattacgttatcagc

SEQ ID NO: 765053 - DNA, 15 bp, Homo sapiens
attacgttatcagca

SEQ ID NO: 765054 - DNA, 15 bp, Homo sapiens
ttacgttatcagcat

SEQ ID NO: 765055 - DNA, 15 bp, Homo sapiens
tacgttatcagcatt

SEQ ID NO: 765056 - DNA, 15 bp, Homo sapiens
acgttatcagcattt

SEQ ID NO: 765057 - DNA, 15 bp, Homo sapiens
cgttatcagcatttc

SEQ ID NO: 765058 - DNA, 15 bp, Homo sapiens
gttatcagcatttcc

SEQ ID NO: 765059 - DNA, 15 bp, Homo sapiens
ttatcagcatttcca

SEQ ID NO: 765060 - DNA, 15 bp, Homo sapiens
tatcagcatttccaa

SEQ ID NO: 765061 - DNA, 15 bp, Homo sapiens
atcagcatttccaag

SEQ ID NO: 765062 - DNA, 15 bp, Homo sapiens
tcagcatttccaagt

SEQ ID NO: 765063 - DNA, 15 bp, Homo sapiens
cagcatttccaagtg

SEQ ID NO: 765064 - DNA, 15 bp, Homo sapiens
agcatttccaagtga

SEQ ID NO: 765065 - DNA, 15 bp, Homo sapiens
gcatttccaagtgac

SEQ ID NO: 765066 - DNA, 15 bp, Homo sapiens
catttccaagtgaca

SEQ ID NO: 765067 - DNA, 15 bp, Homo sapiens
atttccaagtgacac

SEQ ID NO: 765068 - DNA, 15 bp, Homo sapiens
tttccaagtgacact

SEQ ID NO: 765069 - DNA, 15 bp, Homo sapiens
ttccaagtgacactg

SEQ ID NO: 765070 - DNA, 15 bp, Homo sapiens
tccaagtgacactgg

SEQ ID NO: 765071 - DNA, 15 bp, Homo sapiens
ccaagtgacactggg

SEQ ID NO: 765072 - DNA, 15 bp, Homo sapiens
caagtgacactggga

SEQ ID NO: 765073 - DNA, 15 bp, Homo sapiens
aagtgacactgggac

SEQ ID NO: 765074 - DNA, 15 bp, Homo sapiens
agtgacactgggact

SEQ ID NO: 765075 - DNA, 15 bp, Homo sapiens
gtgacactgggactc

SEQ ID NO: 765076 - DNA, 15 bp, Homo sapiens
tgacactgggactct

SEQ ID NO: 765077 - DNA, 15 bp, Homo sapiens
gacactgggactcta

SEQ ID NO: 765078 - DNA, 15 bp, Homo sapiens
acactgggactctat

SEQ ID NO: 765079 - DNA, 15 bp, Homo sapiens
cactgggactctata

SEQ ID NO: 765080 - DNA, 15 bp, Homo sapiens
actgggactctataa

SEQ ID NO: 765081 - DNA, 15 bp, Homo sapiens
ctgggactctataaa

SEQ ID NO: 765082 - DNA, 15 bp, Homo sapiens
tgggactctataaac

SEQ ID NO: 765083 - DNA, 15 bp, Homo sapiens
gggactctataaaca

SEQ ID NO: 765084 - DNA, 15 bp, Homo sapiens
ggactctataaacat

SEQ ID NO: 765085 - DNA, 15 bp, Homo sapiens
gactctataaacata

SEQ ID NO: 765086 - DNA, 15 bp, Homo sapiens
actctataaacatat

SEQ ID NO: 765087 - DNA, 15 bp, Homo sapiens
ctctataaacatatt

SEQ ID NO: 765088 - DNA, 15 bp, Homo sapiens
tctataaacatattt

SEQ ID NO: 765089 - DNA, 15 bp, Homo sapiens
ctataaacatatttt

SEQ ID NO: 765090 - DNA, 15 bp, Homo sapiens
tataaacatatttta

SEQ ID NO: 765091 - DNA, 15 bp, Homo sapiens
ataaacatattttaa

SEQ ID NO: 765092 - DNA, 15 bp, Homo sapiens
taaacatattttaaa

SEQ ID NO: 765093 - DNA, 15 bp, Homo sapiens
aaacatattttaaat

SEQ ID NO: 765094 - DNA, 15 bp, Homo sapiens
aacatattttaaatg

SEQ ID NO: 765095 - DNA, 15 bp, Homo sapiens
acatattttaaatga

SEQ ID NO: 765096 - DNA, 15 bp, Homo sapiens
catattttaaatgac

SEQ ID NO: 765097 - DNA, 15 bp, Homo sapiens
atattttaaatgact

SEQ ID NO: 765098 - DNA, 15 bp, Homo sapiens
tattttaaatgacta

SEQ ID NO: 765099 - DNA, 15 bp, Homo sapiens
attttaaatgactat

SEQ ID NO: 765100 - DNA, 15 bp, Homo sapiens
ttttaaatgactata

SEQ ID NO: 765101 - DNA, 15 bp, Homo sapiens
tttaaatgactatat

SEQ ID NO: 765102 - DNA, 15 bp, Homo sapiens
ttaaatgactatatc

SEQ ID NO: 765103 - DNA, 15 bp, Homo sapiens
taaatgactatatct

SEQ ID NO: 765104 - DNA, 15 bp, Homo sapiens
aaatgactatatctt

SEQ ID NO: 765105 - DNA, 15 bp, Homo sapiens
aatgactatatctta

SEQ ID NO: 765106 - DNA, 15 bp, Homo sapiens
atgactatatcttat

SEQ ID NO: 765107 - DNA, 15 bp, Homo sapiens
tgactatatcttata

SEQ ID NO: 765108 - DNA, 15 bp, Homo sapiens
gactatatcttatat

SEQ ID NO: 765109 - DNA, 15 bp, Homo sapiens
actatatcttatatg

SEQ ID NO: 765110 - DNA, 15 bp, Homo sapiens
ctatatcttatatgg

SEQ ID NO: 765111 - DNA, 15 bp, Homo sapiens
tatatcttatatgga

SEQ ID NO: 765112 - DNA, 15 bp, Homo sapiens
atatcttatatggat

SEQ ID NO: 765113 - DNA, 15 bp, Homo sapiens
tatcttatatggatg

SEQ ID NO: 765114 - DNA, 15 bp, Homo sapiens
atcttatatggatgc

SEQ ID NO: 765115 - DNA, 15 bp, Homo sapiens
tcttatatggatgct

SEQ ID NO: 765116 - DNA, 15 bp, Homo sapiens
cttatatggatgctc

SEQ ID NO: 765117 - DNA, 15 bp, Homo sapiens
ttatatggatgctca

SEQ ID NO: 765118 - DNA, 15 bp, Homo sapiens
tatatggatgctcac

SEQ ID NO: 765119 - DNA, 15 bp, Homo sapiens
atatggatgctcact

SEQ ID NO: 765120 - DNA, 15 bp, Homo sapiens
tatggatgctcactc

SEQ ID NO: 765121 - DNA, 15 bp, Homo sapiens
atggatgctcactcc

SEQ ID NO: 765122 - DNA, 15 bp, Homo sapiens
tggatgctcactcct

SEQ ID NO: 765123 - DNA, 15 bp, Homo sapiens
ggatgctcactcctt

SEQ ID NO: 765124 - DNA, 15 bp, Homo sapiens
gatgctcactccttt

SEQ ID NO: 765125 - DNA, 15 bp, Homo sapiens
atgctcactcctttt

SEQ ID NO: 765126 - DNA, 15 bp, Homo sapiens
tgctcactccttttc

SEQ ID NO: 765127 - DNA, 15 bp, Homo sapiens
gctcactccttttcc

SEQ ID NO: 765128 - DNA, 15 bp, Homo sapiens
ctcactccttttcct

SEQ ID NO: 765129 - DNA, 15 bp, Homo sapiens
tcactccttttcctt

SEQ ID NO: 765130 - DNA, 15 bp, Homo sapiens
cactccttttcctta

SEQ ID NO: 765131 - DNA, 15 bp, Homo sapiens
actccttttccttat

SEQ ID NO: 765132 - DNA, 15 bp, Homo sapiens
ctccttttccttata

SEQ ID NO: 765133 - DNA, 15 bp, Homo sapiens
tccttttccttatat

SEQ ID NO: 765134 - DNA, 15 bp, Homo sapiens
ccttttccttatatt

SEQ ID NO: 765135 - DNA, 15 bp, Homo sapiens
cttttccttatattt

SEQ ID NO: 765136 - DNA, 15 bp, Homo sapiens
ttttccttatatttg

SEQ ID NO: 765137 - DNA, 15 bp, Homo sapiens
tttccttatatttgc

SEQ ID NO: 765138 - DNA, 15 bp, Homo sapiens
ttccttatatttgct

SEQ ID NO: 765139 - DNA, 15 bp, Homo sapiens
tccttatatttgctc

SEQ ID NO: 765140 - DNA, 15 bp, Homo sapiens
ccttatatttgctct

SEQ ID NO: 765141 - DNA, 15 bp, Homo sapiens
cttatatttgctctt

SEQ ID NO: 765142 - DNA, 15 bp, Homo sapiens
ttatatttgctcttt

SEQ ID NO: 765143 - DNA, 15 bp, Homo sapiens
tatatttgctcttta

SEQ ID NO: 765144 - DNA, 15 bp, Homo sapiens
atatttgctctttac

SEQ ID NO: 765145 - DNA, 15 bp, Homo sapiens
tatttgctctttact

SEQ ID NO: 765146 - DNA, 15 bp, Homo sapiens
atttgctctttactt

SEQ ID NO: 765147 - DNA, 15 bp, Homo sapiens
tttgctctttacttt

SEQ ID NO: 765148 - DNA, 15 bp, Homo sapiens
ttgctctttactttt

SEQ ID NO: 765149 - DNA, 15 bp, Homo sapiens
tgctctttacttttt

SEQ ID NO: 765150 - DNA, 15 bp, Homo sapiens
gctctttactttttc

SEQ ID NO: 765151 - DNA, 15 bp, Homo sapiens
ctctttactttttcc

SEQ ID NO: 765152 - DNA, 15 bp, Homo sapiens
tctttactttttcct

SEQ ID NO: 765153 - DNA, 15 bp, Homo sapiens
ctttactttttcctc

SEQ ID NO: 765154 - DNA, 15 bp, Homo sapiens
tttactttttcctct

SEQ ID NO: 765155 - DNA, 15 bp, Homo sapiens
ttactttttcctctt

SEQ ID NO: 765156 - DNA, 15 bp, Homo sapiens
tactttttcctcttt

SEQ ID NO: 765157 - DNA, 15 bp, Homo sapiens
actttttcctctttt

SEQ ID NO: 765158 - DNA, 15 bp, Homo sapiens
ctttttcctcttttt

SEQ ID NO: 765159 - DNA, 15 bp, Homo sapiens
tttttcctctttttt

SEQ ID NO: 765160 - DNA, 15 bp, Homo sapiens
ttttcctcttttttg

SEQ ID NO: 765161 - DNA, 15 bp, Homo sapiens
tttcctcttttttgc

SEQ ID NO: 765162 - DNA, 15 bp, Homo sapiens
ttcctcttttttgct

SEQ ID NO: 765163 - DNA, 15 bp, Homo sapiens
tcctcttttttgcta

SEQ ID NO: 765164 - DNA, 15 bp, Homo sapiens
cctcttttttgctat

SEQ ID NO: 765165 - DNA, 15 bp, Homo sapiens
ctcttttttgctatt

SEQ ID NO: 765166 - DNA, 15 bp, Homo sapiens
tcttttttgctatta

SEQ ID NO: 765167 - DNA, 15 bp, Homo sapiens
cttttttgctattat

SEQ ID NO: 765168 - DNA, 15 bp, Homo sapiens
ttttttgctattata

SEQ ID NO: 765169 - DNA, 15 bp, Homo sapiens
tttttgctattataa

SEQ ID NO: 765170 - DNA, 15 bp, Homo sapiens
ttttgctattataaa

SEQ ID NO: 765171 - DNA, 15 bp, Homo sapiens
tttgctattataaat

SEQ ID NO: 765172 - DNA, 15 bp, Homo sapiens
ttgctattataaata

SEQ ID NO: 765173 - DNA, 15 bp, Homo sapiens
tgctattataaatag

SEQ ID NO: 765174 - DNA, 15 bp, Homo sapiens
gctattataaatagc

SEQ ID NO: 765175 - DNA, 15 bp, Homo sapiens
ctattataaatagca

SEQ ID NO: 765176 - DNA, 15 bp, Homo sapiens
tattataaatagcat

SEQ ID NO: 765177 - DNA, 15 bp, Homo sapiens
attataaatagcatt

SEQ ID NO: 765178 - DNA, 15 bp, Homo sapiens
ttataaatagcattg

SEQ ID NO: 765179 - DNA, 15 bp, Homo sapiens
tataaatagcattgt

SEQ ID NO: 765180 - DNA, 15 bp, Homo sapiens
ataaatagcattgta

SEQ ID NO: 765181 - DNA, 15 bp, Homo sapiens
taaatagcattgtac

SEQ ID NO: 765182 - DNA, 15 bp, Homo sapiens
aaatagcattgtact

SEQ ID NO: 765183 - DNA, 15 bp, Homo sapiens
aatagcattgtactg

SEQ ID NO: 765184 - DNA, 15 bp, Homo sapiens
atagcattgtactga

SEQ ID NO: 765185 - DNA, 15 bp, Homo sapiens
tagcattgtactgaa

SEQ ID NO: 765186 - DNA, 15 bp, Homo sapiens
agcattgtactgaaa

SEQ ID NO: 765187 - DNA, 15 bp, Homo sapiens
gcattgtactgaaat

SEQ ID NO: 765188 - DNA, 15 bp, Homo sapiens
cattgtactgaaatc

SEQ ID NO: 765189 - DNA, 15 bp, Homo sapiens
attgtactgaaatcc

SEQ ID NO: 765190 - DNA, 15 bp, Homo sapiens
ttgtactgaaatcct

SEQ ID NO: 765191 - DNA, 15 bp, Homo sapiens
tgtactgaaatcctt

SEQ ID NO: 765192 - DNA, 15 bp, Homo sapiens
gtactgaaatccttc

SEQ ID NO: 765193 - DNA, 15 bp, Homo sapiens
tactgaaatccttct

SEQ ID NO: 765194 - DNA, 15 bp, Homo sapiens
actgaaatccttctg

SEQ ID NO: 765195 - DNA, 15 bp, Homo sapiens
ctgaaatccttctgc

SEQ ID NO: 765196 - DNA, 15 bp, Homo sapiens
tgaaatccttctgca

SEQ ID NO: 765197 - DNA, 15 bp, Homo sapiens
gaaatccttctgcag

SEQ ID NO: 765198 - DNA, 15 bp, Homo sapiens
aaatccttctgcagg

SEQ ID NO: 765199 - DNA, 15 bp, Homo sapiens
aatccttctgcaggg

SEQ ID NO: 765200 - DNA, 15 bp, Homo sapiens
atccttctgcagggt

SEQ ID NO: 765201 - DNA, 15 bp, Homo sapiens
tccttctgcagggtt

SEQ ID NO: 765202 - DNA, 15 bp, Homo sapiens
ccttctgcagggtta

SEQ ID NO: 765203 - DNA, 15 bp, Homo sapiens
cttctgcagggttat

SEQ ID NO: 765204 - DNA, 15 bp, Homo sapiens
ttctgcagggttatg

SEQ ID NO: 765205 - DNA, 15 bp, Homo sapiens
tctgcagggttatgt

SEQ ID NO: 765206 - DNA, 15 bp, Homo sapiens
ctgcagggttatgta

SEQ ID NO: 765207 - DNA, 15 bp, Homo sapiens
tgcagggttatgtac

SEQ ID NO: 765208 - DNA, 15 bp, Homo sapiens
gcagggttatgtaca

SEQ ID NO: 765209 - DNA, 15 bp, Homo sapiens
cagggttatgtacat

SEQ ID NO: 765210 - DNA, 15 bp, Homo sapiens
agggttatgtacatt

SEQ ID NO: 765211 - DNA, 15 bp, Homo sapiens
gggttatgtacatta

SEQ ID NO: 765212 - DNA, 15 bp, Homo sapiens
ggttatgtacattac

SEQ ID NO: 765213 - DNA, 15 bp, Homo sapiens
gttatgtacattacc

SEQ ID NO: 765214 - DNA, 15 bp, Homo sapiens
ttatgtacattacct

SEQ ID NO: 765215 - DNA, 15 bp, Homo sapiens
tatgtacattacctc

SEQ ID NO: 765216 - DNA, 15 bp, Homo sapiens
atgtacattacctca

SEQ ID NO: 765217 - DNA, 15 bp, Homo sapiens
tgtacattacctcat

SEQ ID NO: 765218 - DNA, 15 bp, Homo sapiens
gtacattacctcatt

SEQ ID NO: 765219 - DNA, 15 bp, Homo sapiens
tacattacctcattg

SEQ ID NO: 765220 - DNA, 15 bp, Homo sapiens
acattacctcattgg

SEQ ID NO: 765221 - DNA, 15 bp, Homo sapiens
cattacctcattggt

SEQ ID NO: 765222 - DNA, 15 bp, Homo sapiens
attacctcattggtt

SEQ ID NO: 765223 - DNA, 15 bp, Homo sapiens
ttacctcattggttt

SEQ ID NO: 765224 - DNA, 15 bp, Homo sapiens
tacctcattggttta

SEQ ID NO: 765225 - DNA, 15 bp, Homo sapiens
acctcattggtttat

SEQ ID NO: 765226 - DNA, 15 bp, Homo sapiens
cctcattggtttatt

SEQ ID NO: 765227 - DNA, 15 bp, Homo sapiens
ctcattggtttattt

SEQ ID NO: 765228 - DNA, 15 bp, Homo sapiens
tcattggtttattta

SEQ ID NO: 765229 - DNA, 15 bp, Homo sapiens
cattggtttatttat

SEQ ID NO: 765230 - DNA, 15 bp, Homo sapiens
attggtttatttatt

SEQ ID NO: 765231 - DNA, 15 bp, Homo sapiens
ttggtttatttattt

SEQ ID NO: 765232 - DNA, 15 bp, Homo sapiens
tggtttatttattta

SEQ ID NO: 765233 - DNA, 15 bp, Homo sapiens
ggtttatttatttaa

SEQ ID NO: 765234 - DNA, 15 bp, Homo sapiens
gtttatttatttaac

SEQ ID NO: 765235 - DNA, 15 bp, Homo sapiens
tttatttatttaaca

SEQ ID NO: 765236 - DNA, 15 bp, Homo sapiens
ttatttatttaacag

SEQ ID NO: 765237 - DNA, 15 bp, Homo sapiens
tatttatttaacaga

SEQ ID NO: 765238 - DNA, 15 bp, Homo sapiens
atttatttaacagac

SEQ ID NO: 765239 - DNA, 15 bp, Homo sapiens
tttatttaacagact

SEQ ID NO: 765240 - DNA, 15 bp, Homo sapiens
ttatttaacagactt

SEQ ID NO: 765241 - DNA, 15 bp, Homo sapiens
tatttaacagacttt

SEQ ID NO: 765242 - DNA, 15 bp, Homo sapiens
atttaacagactttg

SEQ ID NO: 765243 - DNA, 15 bp, Homo sapiens
tttaacagactttga

SEQ ID NO: 765244 - DNA, 15 bp, Homo sapiens
ttaacagactttgag

SEQ ID NO: 765245 - DNA, 15 bp, Homo sapiens
taacagactttgagt

SEQ ID NO: 765246 - DNA, 15 bp, Homo sapiens
aacagactttgagta

SEQ ID NO: 765247 - DNA, 15 bp, Homo sapiens
acagactttgagtat

SEQ ID NO: 765248 - DNA, 15 bp, Homo sapiens
cagactttgagtatc

SEQ ID NO: 765249 - DNA, 15 bp, Homo sapiens
agactttgagtatct

SEQ ID NO: 765250 - DNA, 15 bp, Homo sapiens
gactttgagtatcta

SEQ ID NO: 765251 - DNA, 15 bp, Homo sapiens
actttgagtatctac

SEQ ID NO: 765252 - DNA, 15 bp, Homo sapiens
ctttgagtatctaca

SEQ ID NO: 765253 - DNA, 15 bp, Homo sapiens
tttgagtatctacaa

SEQ ID NO: 765254 - DNA, 15 bp, Homo sapiens
ttgagtatctacaat

SEQ ID NO: 765255 - DNA, 15 bp, Homo sapiens
tgagtatctacaatg

SEQ ID NO: 765256 - DNA, 15 bp, Homo sapiens
gagtatctacaatgt

SEQ ID NO: 765257 - DNA, 15 bp, Homo sapiens
agtatctacaatgtg

SEQ ID NO: 765258 - DNA, 15 bp, Homo sapiens
gtatctacaatgtgc

SEQ ID NO: 765259 - DNA, 15 bp, Homo sapiens
tatctacaatgtgca

SEQ ID NO: 765260 - DNA, 15 bp, Homo sapiens
atctacaatgtgcaa

SEQ ID NO: 765261 - DNA, 15 bp, Homo sapiens
tctacaatgtgcaat

SEQ ID NO: 765262 - DNA, 15 bp, Homo sapiens
ctacaatgtgcaata

SEQ ID NO: 765263 - DNA, 15 bp, Homo sapiens
tacaatgtgcaatac

SEQ ID NO: 765264 - DNA, 15 bp, Homo sapiens
acaatgtgcaataca

SEQ ID NO: 765265 - DNA, 15 bp, Homo sapiens
caatgtgcaatacaa

SEQ ID NO: 765266 - DNA, 15 bp, Homo sapiens
aatgtgcaatacaat

SEQ ID NO: 765267 - DNA, 15 bp, Homo sapiens
atgtgcaatacaatg

SEQ ID NO: 765268 - DNA, 15 bp, Homo sapiens
tgtgcaatacaatgt

SEQ ID NO: 765269 - DNA, 15 bp, Homo sapiens
gtgcaatacaatgtg

SEQ ID NO: 765270 - DNA, 15 bp, Homo sapiens
tgcaatacaatgtgc

SEQ ID NO: 765271 - DNA, 15 bp, Homo sapiens
gcaatacaatgtgct

SEQ ID NO: 765272 - DNA, 15 bp, Homo sapiens
caatacaatgtgctt

SEQ ID NO: 765273 - DNA, 15 bp, Homo sapiens
aatacaatgtgcttt

SEQ ID NO: 765274 - DNA, 15 bp, Homo sapiens
atacaatgtgctttt

SEQ ID NO: 765275 - DNA, 15 bp, Homo sapiens
tacaatgtgctttta

SEQ ID NO: 765276 - DNA, 15 bp, Homo sapiens
acaatgtgcttttag

SEQ ID NO: 765277 - DNA, 15 bp, Homo sapiens
caatgtgcttttagt

SEQ ID NO: 765278 - DNA, 15 bp, Homo sapiens
aatgtgcttttagtt

SEQ ID NO: 765279 - DNA, 15 bp, Homo sapiens
atgtgcttttagttc

SEQ ID NO: 765280 - DNA, 15 bp, Homo sapiens
tgtgcttttagttct

SEQ ID NO: 765281 - DNA, 15 bp, Homo sapiens
gtgcttttagttctg

SEQ ID NO: 765282 - DNA, 15 bp, Homo sapiens
tgcttttagttctga

SEQ ID NO: 765283 - DNA, 15 bp, Homo sapiens
gcttttagttctgag

SEQ ID NO: 765284 - DNA, 15 bp, Homo sapiens
cttttagttctgaga

SEQ ID NO: 765285 - DNA, 15 bp, Homo sapiens
ttttagttctgagag

SEQ ID NO: 765286 - DNA, 15 bp, Homo sapiens
tttagttctgagagg

SEQ ID NO: 765287 - DNA, 15 bp, Homo sapiens
ttagttctgagagga

SEQ ID NO: 765288 - DNA, 15 bp, Homo sapiens
tagttctgagaggaa

SEQ ID NO: 765289 - DNA, 15 bp, Homo sapiens
agttctgagaggaaa

SEQ ID NO: 765290 - DNA, 15 bp, Homo sapiens
gttctgagaggaaac

SEQ ID NO: 765291 - DNA, 15 bp, Homo sapiens
ttctgagaggaaacc

SEQ ID NO: 765292 - DNA, 15 bp, Homo sapiens
tctgagaggaaacca

SEQ ID NO: 765293 - DNA, 15 bp, Homo sapiens
ctgagaggaaaccat

SEQ ID NO: 765294 - DNA, 15 bp, Homo sapiens
tgagaggaaaccatc

SEQ ID NO: 765295 - DNA, 15 bp, Homo sapiens
gagaggaaaccatct

SEQ ID NO: 765296 - DNA, 15 bp, Homo sapiens
agaggaaaccatctg

SEQ ID NO: 765297 - DNA, 15 bp, Homo sapiens
gaggaaaccatctga

SEQ ID NO: 765298 - DNA, 15 bp, Homo sapiens
aggaaaccatctgaa

SEQ ID NO: 765299 - DNA, 15 bp, Homo sapiens
ggaaaccatctgaaa

SEQ ID NO: 765300 - DNA, 15 bp, Homo sapiens
gaaaccatctgaaat

SEQ ID NO: 765301 - DNA, 15 bp, Homo sapiens
aaaccatctgaaata

SEQ ID NO: 765302 - DNA, 15 bp, Homo sapiens
aaccatctgaaatag

SEQ ID NO: 765303 - DNA, 15 bp, Homo sapiens
accatctgaaatagc

SEQ ID NO: 765304 - DNA, 15 bp, Homo sapiens
ccatctgaaatagca

SEQ ID NO: 765305 - DNA, 15 bp, Homo sapiens
catctgaaatagcaa

SEQ ID NO: 765306 - DNA, 15 bp, Homo sapiens
atctgaaatagcaaa

SEQ ID NO: 765307 - DNA, 15 bp, Homo sapiens
tctgaaatagcaaaa

SEQ ID NO: 765308 - DNA, 15 bp, Homo sapiens
ctgaaatagcaaaaa

SEQ ID NO: 765309 - DNA, 15 bp, Homo sapiens
tgaaatagcaaaaag

SEQ ID NO: 765310 - DNA, 15 bp, Homo sapiens
gaaatagcaaaaaga

SEQ ID NO: 765311 - DNA, 15 bp, Homo sapiens
aaatagcaaaaagag

SEQ ID NO: 765312 - DNA, 15 bp, Homo sapiens
aatagcaaaaagaga

SEQ ID NO: 765313 - DNA, 15 bp, Homo sapiens
atagcaaaaagagac

SEQ ID NO: 765314 - DNA, 15 bp, Homo sapiens
tagcaaaaagagaca

SEQ ID NO: 765315 - DNA, 15 bp, Homo sapiens
agcaaaaagagacat

SEQ ID NO: 765316 - DNA, 15 bp, Homo sapiens
gcaaaaagagacata

SEQ ID NO: 765317 - DNA, 15 bp, Homo sapiens
caaaaagagacataa

SEQ ID NO: 765318 - DNA, 15 bp, Homo sapiens
aaaaagagacataaa

SEQ ID NO: 765319 - DNA, 15 bp, Homo sapiens
aaaagagacataaat

SEQ ID NO: 765320 - DNA, 15 bp, Homo sapiens
aaagagacataaatg

SEQ ID NO: 765321 - DNA, 15 bp, Homo sapiens
aagagacataaatga

SEQ ID NO: 765322 - DNA, 15 bp, Homo sapiens
agagacataaatgaa

SEQ ID NO: 765323 - DNA, 15 bp, Homo sapiens
gagacataaatgaaa

SEQ ID NO: 765324 - DNA, 15 bp, Homo sapiens
agacataaatgaaat

SEQ ID NO: 765325 - DNA, 15 bp, Homo sapiens
gacataaatgaaata

SEQ ID NO: 765326 - DNA, 15 bp, Homo sapiens
acataaatgaaatac

SEQ ID NO: 765327 - DNA, 15 bp, Homo sapiens
cataaatgaaatacc

SEQ ID NO: 765328 - DNA, 15 bp, Homo sapiens
ataaatgaaatacct

SEQ ID NO: 765329 - DNA, 15 bp, Homo sapiens
taaatgaaatacctc

SEQ ID NO: 765330 - DNA, 15 bp, Homo sapiens
aaatgaaatacctca

SEQ ID NO: 765331 - DNA, 15 bp, Homo sapiens
aatgaaatacctcac

SEQ ID NO: 765332 - DNA, 15 bp, Homo sapiens
atgaaatacctcaca

SEQ ID NO: 765333 - DNA, 15 bp, Homo sapiens
tgaaatacctcacat

SEQ ID NO: 765334 - DNA, 15 bp, Homo sapiens
gaaatacctcacatg

SEQ ID NO: 765335 - DNA, 15 bp, Homo sapiens
aaatacctcacatgt

SEQ ID NO: 765336 - DNA, 15 bp, Homo sapiens
aatacctcacatgta

SEQ ID NO: 765337 - DNA, 15 bp, Homo sapiens
atacctcacatgtag

SEQ ID NO: 765338 - DNA, 15 bp, Homo sapiens
tacctcacatgtaga

SEQ ID NO: 765339 - DNA, 15 bp, Homo sapiens
acctcacatgtagag

SEQ ID NO: 765340 - DNA, 15 bp, Homo sapiens
cctcacatgtagagt

SEQ ID NO: 765341 - DNA, 15 bp, Homo sapiens
ctcacatgtagagtt

SEQ ID NO: 765342 - DNA, 15 bp, Homo sapiens
tcacatgtagagttt

SEQ ID NO: 765343 - DNA, 15 bp, Homo sapiens
cacatgtagagtttt

SEQ ID NO: 765344 - DNA, 15 bp, Homo sapiens
acatgtagagttttg

SEQ ID NO: 765345 - DNA, 15 bp, Homo sapiens
catgtagagttttgt

SEQ ID NO: 765346 - DNA, 15 bp, Homo sapiens
atgtagagttttgtg

SEQ ID NO: 765347 - DNA, 15 bp, Homo sapiens
tgtagagttttgtga

SEQ ID NO: 765348 - DNA, 15 bp, Homo sapiens
gtagagttttgtgat

SEQ ID NO: 765349 - DNA, 15 bp, Homo sapiens
tagagttttgtgata

SEQ ID NO: 765350 - DNA, 15 bp, Homo sapiens
agagttttgtgatac

SEQ ID NO: 765351 - DNA, 15 bp, Homo sapiens
gagttttgtgatact

SEQ ID NO: 765352 - DNA, 15 bp, Homo sapiens
agttttgtgatactc

SEQ ID NO: 765353 - DNA, 15 bp, Homo sapiens
gttttgtgatactct

SEQ ID NO: 765354 - DNA, 15 bp, Homo sapiens
ttttgtgatactctt

SEQ ID NO: 765355 - DNA, 15 bp, Homo sapiens
tttgtgatactcttt

SEQ ID NO: 765356 - DNA, 15 bp, Homo sapiens
ttgtgatactctttt

SEQ ID NO: 765357 - DNA, 15 bp, Homo sapiens
tgtgatactcttttt

SEQ ID NO: 765358 - DNA, 15 bp, Homo sapiens
gtgatactctttttt

SEQ ID NO: 765359 - DNA, 15 bp, Homo sapiens
tgatactctttttta

SEQ ID NO: 765360 - DNA, 15 bp, Homo sapiens
gatactcttttttat

SEQ ID NO: 765361 - DNA, 15 bp, Homo sapiens
atactcttttttata

SEQ ID NO: 765362 - DNA, 15 bp, Homo sapiens
tactcttttttatag

SEQ ID NO: 765363 - DNA, 15 bp, Homo sapiens
actcttttttatagt

SEQ ID NO: 765364 - DNA, 15 bp, Homo sapiens
ctcttttttatagta

SEQ ID NO: 765365 - DNA, 15 bp, Homo sapiens
tcttttttatagtaa

SEQ ID NO: 765366 - DNA, 15 bp, Homo sapiens
cttttttatagtaag

SEQ ID NO: 765367 - DNA, 15 bp, Homo sapiens
ttttttatagtaagt

SEQ ID NO: 765368 - DNA, 15 bp, Homo sapiens
tttttatagtaagta

SEQ ID NO: 765369 - DNA, 15 bp, Homo sapiens
ttttatagtaagtat

SEQ ID NO: 765370 - DNA, 15 bp, Homo sapiens
tttatagtaagtata

SEQ ID NO: 765371 - DNA, 15 bp, Homo sapiens
ttatagtaagtatac

SEQ ID NO: 765372 - DNA, 15 bp, Homo sapiens
tatagtaagtatacc

SEQ ID NO: 765373 - DNA, 15 bp, Homo sapiens
atagtaagtatacct

SEQ ID NO: 765374 - DNA, 15 bp, Homo sapiens
tagtaagtatacctg

SEQ ID NO: 765375 - DNA, 15 bp, Homo sapiens
agtaagtatacctgg

SEQ ID NO: 765376 - DNA, 15 bp, Homo sapiens
gtaagtatacctggc

SEQ ID NO: 765377 - DNA, 15 bp, Homo sapiens
taagtatacctggct

SEQ ID NO: 765378 - DNA, 15 bp, Homo sapiens
aagtatacctggctt

SEQ ID NO: 765379 - DNA, 15 bp, Homo sapiens
agtatacctggcttg

SEQ ID NO: 765380 - DNA, 15 bp, Homo sapiens
gtatacctggcttgg

SEQ ID NO: 765381 - DNA, 15 bp, Homo sapiens
tatacctggcttgga

SEQ ID NO: 765382 - DNA, 15 bp, Homo sapiens
atacctggcttggag

SEQ ID NO: 765383 - DNA, 15 bp, Homo sapiens
tacctggcttggagt

SEQ ID NO: 765384 - DNA, 15 bp, Homo sapiens
acctggcttggagta

SEQ ID NO: 765385 - DNA, 15 bp, Homo sapiens
cctggcttggagtaa

SEQ ID NO: 765386 - DNA, 15 bp, Homo sapiens
ctggcttggagtaac

SEQ ID NO: 765387 - DNA, 15 bp, Homo sapiens
tggcttggagtaaca

SEQ ID NO: 765388 - DNA, 15 bp, Homo sapiens
ggcttggagtaacac

SEQ ID NO: 765389 - DNA, 15 bp, Homo sapiens
gcttggagtaacact

SEQ ID NO: 765390 - DNA, 15 bp, Homo sapiens
cttggagtaacactg

SEQ ID NO: 765391 - DNA, 15 bp, Homo sapiens
ttggagtaacactgt

SEQ ID NO: 765392 - DNA, 15 bp, Homo sapiens
tggagtaacactgtg

SEQ ID NO: 765393 - DNA, 15 bp, Homo sapiens
ggagtaacactgtgg

SEQ ID NO: 765394 - DNA, 15 bp, Homo sapiens
gagtaacactgtggg

SEQ ID NO: 765395 - DNA, 15 bp, Homo sapiens
agtaacactgtgggc

SEQ ID NO: 765396 - DNA, 15 bp, Homo sapiens
gtaacactgtgggcc

SEQ ID NO: 765397 - DNA, 15 bp, Homo sapiens
taacactgtgggccg

SEQ ID NO: 765398 - DNA, 15 bp, Homo sapiens
aacactgtgggccgg

SEQ ID NO: 765399 - DNA, 15 bp, Homo sapiens
acactgtgggccggt

SEQ ID NO: 765400 - DNA, 15 bp, Homo sapiens
cactgtgggccggtt

SEQ ID NO: 765401 - DNA, 15 bp, Homo sapiens
actgtgggccggtta

SEQ ID NO: 765402 - DNA, 15 bp, Homo sapiens
ctgtgggccggttaa

SEQ ID NO: 765403 - DNA, 15 bp, Homo sapiens
tgtgggccggttaat

SEQ ID NO: 765404 - DNA, 15 bp, Homo sapiens
gtgggccggttaatt

SEQ ID NO: 765405 - DNA, 15 bp, Homo sapiens
tgggccggttaattg

SEQ ID NO: 765406 - DNA, 15 bp, Homo sapiens
gggccggttaattgt

SEQ ID NO: 765407 - DNA, 15 bp, Homo sapiens
ggccggttaattgtt

SEQ ID NO: 765408 - DNA, 15 bp, Homo sapiens
gccggttaattgttc

SEQ ID NO: 765409 - DNA, 15 bp, Homo sapiens
ccggttaattgttct

SEQ ID NO: 765410 - DNA, 15 bp, Homo sapiens
cggttaattgttctg

SEQ ID NO: 765411 - DNA, 15 bp, Homo sapiens
ggttaattgttctgg

SEQ ID NO: 765412 - DNA, 15 bp, Homo sapiens
gttaattgttctggg

SEQ ID NO: 765413 - DNA, 15 bp, Homo sapiens
ttaattgttctgggc

SEQ ID NO: 765414 - DNA, 15 bp, Homo sapiens
taattgttctgggcc

SEQ ID NO: 765415 - DNA, 15 bp, Homo sapiens
aattgttctgggcct

SEQ ID NO: 765416 - DNA, 15 bp, Homo sapiens
attgttctgggcctg

SEQ ID NO: 765417 - DNA, 15 bp, Homo sapiens
ttgttctgggcctga

SEQ ID NO: 765418 - DNA, 15 bp, Homo sapiens
tgttctgggcctgaa

SEQ ID NO: 765419 - DNA, 15 bp, Homo sapiens
gttctgggcctgaat

SEQ ID NO: 765420 - DNA, 15 bp, Homo sapiens
ttctgggcctgaatt

SEQ ID NO: 765421 - DNA, 15 bp, Homo sapiens
tctgggcctgaattt

SEQ ID NO: 765422 - DNA, 15 bp, Homo sapiens
ctgggcctgaatttc

SEQ ID NO: 765423 - DNA, 15 bp, Homo sapiens
tgggcctgaatttct

SEQ ID NO: 765424 - DNA, 15 bp, Homo sapiens
gggcctgaatttctg

SEQ ID NO: 765425 - DNA, 15 bp, Homo sapiens
ggcctgaatttctgc

SEQ ID NO: 765426 - DNA, 15 bp, Homo sapiens
gcctgaatttctgca

SEQ ID NO: 765427 - DNA, 15 bp, Homo sapiens
cctgaatttctgcat

SEQ ID NO: 765428 - DNA, 15 bp, Homo sapiens
ctgaatttctgcatc

SEQ ID NO: 765429 - DNA, 15 bp, Homo sapiens
tgaatttctgcatct

SEQ ID NO: 765430 - DNA, 15 bp, Homo sapiens
gaatttctgcatctt

SEQ ID NO: 765431 - DNA, 15 bp, Homo sapiens
aatttctgcatcttt

SEQ ID NO: 765432 - DNA, 15 bp, Homo sapiens
atttctgcatcttta

SEQ ID NO: 765433 - DNA, 15 bp, Homo sapiens
tttctgcatctttag

SEQ ID NO: 765434 - DNA, 15 bp, Homo sapiens
ttctgcatctttagt

SEQ ID NO: 765435 - DNA, 15 bp, Homo sapiens
tctgcatctttagtc

SEQ ID NO: 765436 - DNA, 15 bp, Homo sapiens
ctgcatctttagtca

SEQ ID NO: 765437 - DNA, 15 bp, Homo sapiens
tgcatctttagtcac

SEQ ID NO: 765438 - DNA, 15 bp, Homo sapiens
gcatctttagtcact

SEQ ID NO: 765439 - DNA, 15 bp, Homo sapiens
catctttagtcacta

SEQ ID NO: 765440 - DNA, 15 bp, Homo sapiens
atctttagtcactag

SEQ ID NO: 765441 - DNA, 15 bp, Homo sapiens
tctttagtcactaga

SEQ ID NO: 765442 - DNA, 15 bp, Homo sapiens
ctttagtcactagat

SEQ ID NO: 765443 - DNA, 15 bp, Homo sapiens
tttagtcactagatg

SEQ ID NO: 765444 - DNA, 15 bp, Homo sapiens
ttagtcactagatgg

SEQ ID NO: 765445 - DNA, 15 bp, Homo sapiens
tagtcactagatggt

SEQ ID NO: 765446 - DNA, 15 bp, Homo sapiens
agtcactagatggtt

SEQ ID NO: 765447 - DNA, 15 bp, Homo sapiens
gtcactagatggttt

SEQ ID NO: 765448 - DNA, 15 bp, Homo sapiens
tcactagatggtttc

SEQ ID NO: 765449 - DNA, 15 bp, Homo sapiens
cactagatggtttct

SEQ ID NO: 765450 - DNA, 15 bp, Homo sapiens
actagatggtttcta

SEQ ID NO: 765451 - DNA, 15 bp, Homo sapiens
ctagatggtttctaa

SEQ ID NO: 765452 - DNA, 15 bp, Homo sapiens
tagatggtttctaag

SEQ ID NO: 765453 - DNA, 15 bp, Homo sapiens
agatggtttctaagc

SEQ ID NO: 765454 - DNA, 15 bp, Homo sapiens
gatggtttctaagct

SEQ ID NO: 765455 - DNA, 15 bp, Homo sapiens
atggtttctaagctg

SEQ ID NO: 765456 - DNA, 15 bp, Homo sapiens
tggtttctaagctgc

SEQ ID NO: 765457 - DNA, 15 bp, Homo sapiens
ggtttctaagctgcc

SEQ ID NO: 765458 - DNA, 15 bp, Homo sapiens
gtttctaagctgcct

SEQ ID NO: 765459 - DNA, 15 bp, Homo sapiens
tttctaagctgcctc

SEQ ID NO: 765460 - DNA, 15 bp, Homo sapiens
ttctaagctgcctct

SEQ ID NO: 765461 - DNA, 15 bp, Homo sapiens
tctaagctgcctctt

SEQ ID NO: 765462 - DNA, 15 bp, Homo sapiens
ctaagctgcctcttg

SEQ ID NO: 765463 - DNA, 15 bp, Homo sapiens
taagctgcctcttgt

SEQ ID NO: 765464 - DNA, 15 bp, Homo sapiens
aagctgcctcttgtc

SEQ ID NO: 765465 - DNA, 15 bp, Homo sapiens
agctgcctcttgtct

SEQ ID NO: 765466 - DNA, 15 bp, Homo sapiens
gctgcctcttgtctc

SEQ ID NO: 765467 - DNA, 15 bp, Homo sapiens
ctgcctcttgtctcc

SEQ ID NO: 765468 - DNA, 15 bp, Homo sapiens
tgcctcttgtctcca

SEQ ID NO: 765469 - DNA, 15 bp, Homo sapiens
gcctcttgtctccag

SEQ ID NO: 765470 - DNA, 15 bp, Homo sapiens
cctcttgtctccagc

SEQ ID NO: 765471 - DNA, 15 bp, Homo sapiens
ctcttgtctccagca

SEQ ID NO: 765472 - DNA, 15 bp, Homo sapiens
tcttgtctccagcac

SEQ ID NO: 765473 - DNA, 15 bp, Homo sapiens
cttgtctccagcact

SEQ ID NO: 765474 - DNA, 15 bp, Homo sapiens
ttgtctccagcactc

SEQ ID NO: 765475 - DNA, 15 bp, Homo sapiens
tgtctccagcactct

SEQ ID NO: 765476 - DNA, 15 bp, Homo sapiens
gtctccagcactctg

SEQ ID NO: 765477 - DNA, 15 bp, Homo sapiens
tctccagcactctgt

SEQ ID NO: 765478 - DNA, 15 bp, Homo sapiens
ctccagcactctgtg

SEQ ID NO: 765479 - DNA, 15 bp, Homo sapiens
tccagcactctgtgg

SEQ ID NO: 765480 - DNA, 15 bp, Homo sapiens
ccagcactctgtggt

SEQ ID NO: 765481 - DNA, 15 bp, Homo sapiens
cagcactctgtggtc

SEQ ID NO: 765482 - DNA, 15 bp, Homo sapiens
agcactctgtggtcc

SEQ ID NO: 765483 - DNA, 15 bp, Homo sapiens
gcactctgtggtcct

SEQ ID NO: 765484 - DNA, 15 bp, Homo sapiens
cactctgtggtcctg

SEQ ID NO: 765485 - DNA, 15 bp, Homo sapiens
actctgtggtcctga

SEQ ID NO: 765486 - DNA, 15 bp, Homo sapiens
ctctgtggtcctgac

SEQ ID NO: 765487 - DNA, 15 bp, Homo sapiens
tctgtggtcctgact

SEQ ID NO: 765488 - DNA, 15 bp, Homo sapiens
ctgtggtcctgactg

SEQ ID NO: 765489 - DNA, 15 bp, Homo sapiens
tgtggtcctgactgc

SEQ ID NO: 765490 - DNA, 15 bp, Homo sapiens
gtggtcctgactgca

SEQ ID NO: 765491 - DNA, 15 bp, Homo sapiens
tggtcctgactgcaa

SEQ ID NO: 765492 - DNA, 15 bp, Homo sapiens
ggtcctgactgcaaa

SEQ ID NO: 765493 - DNA, 15 bp, Homo sapiens
gtcctgactgcaaat

SEQ ID NO: 765494 - DNA, 15 bp, Homo sapiens
tcctgactgcaaatg

SEQ ID NO: 765495 - DNA, 15 bp, Homo sapiens
cctgactgcaaatgt

SEQ ID NO: 765496 - DNA, 15 bp, Homo sapiens
ctgactgcaaatgta

SEQ ID NO: 765497 - DNA, 15 bp, Homo sapiens
tgactgcaaatgtaa

SEQ ID NO: 765498 - DNA, 15 bp, Homo sapiens
gactgcaaatgtaag

SEQ ID NO: 765499 - DNA, 15 bp, Homo sapiens
actgcaaatgtaaga

SEQ ID NO: 765500 - DNA, 15 bp, Homo sapiens
ctgcaaatgtaagaa

SEQ ID NO: 765501 - DNA, 15 bp, Homo sapiens
tgcaaatgtaagaat

SEQ ID NO: 765502 - DNA, 15 bp, Homo sapiens
gcaaatgtaagaatc

SEQ ID NO: 765503 - DNA, 15 bp, Homo sapiens
caaatgtaagaatca

SEQ ID NO: 765504 - DNA, 15 bp, Homo sapiens
aaatgtaagaatcac

SEQ ID NO: 765505 - DNA, 15 bp, Homo sapiens
aatgtaagaatcacc

SEQ ID NO: 765506 - DNA, 15 bp, Homo sapiens
atgtaagaatcaccg

SEQ ID NO: 765507 - DNA, 15 bp, Homo sapiens
tgtaagaatcaccgt

SEQ ID NO: 765508 - DNA, 15 bp, Homo sapiens
gtaagaatcaccgta

SEQ ID NO: 765509 - DNA, 15 bp, Homo sapiens
taagaatcaccgtag

SEQ ID NO: 765510 - DNA, 15 bp, Homo sapiens
aagaatcaccgtagc

SEQ ID NO: 765511 - DNA, 15 bp, Homo sapiens
agaatcaccgtagca

SEQ ID NO: 765512 - DNA, 15 bp, Homo sapiens
gaatcaccgtagcat

SEQ ID NO: 765513 - DNA, 15 bp, Homo sapiens
aatcaccgtagcatt

SEQ ID NO: 765514 - DNA, 15 bp, Homo sapiens
atcaccgtagcattc

SEQ ID NO: 765515 - DNA, 15 bp, Homo sapiens
tcaccgtagcattca

SEQ ID NO: 765516 - DNA, 15 bp, Homo sapiens
caccgtagcattcat

SEQ ID NO: 765517 - DNA, 15 bp, Homo sapiens
accgtagcattcatc

SEQ ID NO: 765518 - DNA, 15 bp, Homo sapiens
ccgtagcattcatct

SEQ ID NO: 765519 - DNA, 15 bp, Homo sapiens
cgtagcattcatcta

SEQ ID NO: 765520 - DNA, 15 bp, Homo sapiens
gtagcattcatctat

SEQ ID NO: 765521 - DNA, 15 bp, Homo sapiens
tagcattcatctatc

SEQ ID NO: 765522 - DNA, 15 bp, Homo sapiens
agcattcatctatcc

SEQ ID NO: 765523 - DNA, 15 bp, Homo sapiens
gcattcatctatcct

SEQ ID NO: 765524 - DNA, 15 bp, Homo sapiens
cattcatctatcctt

SEQ ID NO: 765525 - DNA, 15 bp, Homo sapiens
attcatctatccttg

SEQ ID NO: 765526 - DNA, 15 bp, Homo sapiens
ttcatctatccttgt

SEQ ID NO: 765527 - DNA, 15 bp, Homo sapiens
tcatctatccttgtg

SEQ ID NO: 765528 - DNA, 15 bp, Homo sapiens
catctatccttgtga

SEQ ID NO: 765529 - DNA, 15 bp, Homo sapiens
atctatccttgtgac

SEQ ID NO: 765530 - DNA, 15 bp, Homo sapiens
tctatccttgtgact

SEQ ID NO: 765531 - DNA, 15 bp, Homo sapiens
ctatccttgtgactc

SEQ ID NO: 765532 - DNA, 15 bp, Homo sapiens
tatccttgtgactca

SEQ ID NO: 765533 - DNA, 15 bp, Homo sapiens
atccttgtgactcac

SEQ ID NO: 765534 - DNA, 15 bp, Homo sapiens
tccttgtgactcact

SEQ ID NO: 765535 - DNA, 15 bp, Homo sapiens
ccttgtgactcacta

SEQ ID NO: 765536 - DNA, 15 bp, Homo sapiens
cttgtgactcactag

SEQ ID NO: 765537 - DNA, 15 bp, Homo sapiens
ttgtgactcactagg

SEQ ID NO: 765538 - DNA, 15 bp, Homo sapiens
tgtgactcactaggg

SEQ ID NO: 765539 - DNA, 15 bp, Homo sapiens
gtgactcactagggc

SEQ ID NO: 765540 - DNA, 15 bp, Homo sapiens
tgactcactagggct

SEQ ID NO: 765541 - DNA, 15 bp, Homo sapiens
gactcactagggctg

SEQ ID NO: 765542 - DNA, 15 bp, Homo sapiens
actcactagggctgt

SEQ ID NO: 765543 - DNA, 15 bp, Homo sapiens
ctcactagggctgtt

SEQ ID NO: 765544 - DNA, 15 bp, Homo sapiens
tcactagggctgttt

SEQ ID NO: 765545 - DNA, 15 bp, Homo sapiens
cactagggctgtttg

SEQ ID NO: 765546 - DNA, 15 bp, Homo sapiens
actagggctgtttgt

SEQ ID NO: 765547 - DNA, 15 bp, Homo sapiens
ctagggctgtttgtg

SEQ ID NO: 765548 - DNA, 15 bp, Homo sapiens
tagggctgtttgtgt

SEQ ID NO: 765549 - DNA, 15 bp, Homo sapiens
agggctgtttgtgtt

SEQ ID NO: 765550 - DNA, 15 bp, Homo sapiens
gggctgtttgtgttt

SEQ ID NO: 765551 - DNA, 15 bp, Homo sapiens
ggctgtttgtgtttg

SEQ ID NO: 765552 - DNA, 15 bp, Homo sapiens
gctgtttgtgtttgg

SEQ ID NO: 765553 - DNA, 15 bp, Homo sapiens
ctgtttgtgtttgga

SEQ ID NO: 765554 - DNA, 15 bp, Homo sapiens
tgtttgtgtttggag

SEQ ID NO: 765555 - DNA, 15 bp, Homo sapiens
gtttgtgtttggagc

SEQ ID NO: 765556 - DNA, 15 bp, Homo sapiens
tttgtgtttggagca

SEQ ID NO: 765557 - DNA, 15 bp, Homo sapiens
ttgtgtttggagcat

SEQ ID NO: 765558 - DNA, 15 bp, Homo sapiens
tgtgtttggagcatt

SEQ ID NO: 765559 - DNA, 15 bp, Homo sapiens
gtgtttggagcattc

SEQ ID NO: 765560 - DNA, 15 bp, Homo sapiens
tgtttggagcattcc

SEQ ID NO: 765561 - DNA, 15 bp, Homo sapiens
gtttggagcattcct

SEQ ID NO: 765562 - DNA, 15 bp, Homo sapiens
tttggagcattcctg

SEQ ID NO: 765563 - DNA, 15 bp, Homo sapiens
ttggagcattcctgg

SEQ ID NO: 765564 - DNA, 15 bp, Homo sapiens
tggagcattcctggt

SEQ ID NO: 765565 - DNA, 15 bp, Homo sapiens
ggagcattcctggtg

SEQ ID NO: 765566 - DNA, 15 bp, Homo sapiens
gagcattcctggtgc

SEQ ID NO: 765567 - DNA, 15 bp, Homo sapiens
agcattcctggtgca

SEQ ID NO: 765568 - DNA, 15 bp, Homo sapiens
gcattcctggtgcac

SEQ ID NO: 765569 - DNA, 15 bp, Homo sapiens
cattcctggtgcaca

SEQ ID NO: 765570 - DNA, 15 bp, Homo sapiens
attcctggtgcacag

SEQ ID NO: 765571 - DNA, 15 bp, Homo sapiens
ttcctggtgcacaga

SEQ ID NO: 765572 - DNA, 15 bp, Homo sapiens
tcctggtgcacagat

SEQ ID NO: 765573 - DNA, 15 bp, Homo sapiens
cctggtgcacagatg

SEQ ID NO: 765574 - DNA, 15 bp, Homo sapiens
ctggtgcacagatga

SEQ ID NO: 765575 - DNA, 15 bp, Homo sapiens
tggtgcacagatgat

SEQ ID NO: 765576 - DNA, 15 bp, Homo sapiens
ggtgcacagatgatg

SEQ ID NO: 765577 - DNA, 15 bp, Homo sapiens
gtgcacagatgatgt

SEQ ID NO: 765578 - DNA, 15 bp, Homo sapiens
tgcacagatgatgtg

SEQ ID NO: 765579 - DNA, 15 bp, Homo sapiens
gcacagatgatgtgt

SEQ ID NO: 765580 - DNA, 15 bp, Homo sapiens
cacagatgatgtgtt

SEQ ID NO: 765581 - DNA, 15 bp, Homo sapiens
acagatgatgtgttg

SEQ ID NO: 765582 - DNA, 15 bp, Homo sapiens
cagatgatgtgttga

SEQ ID NO: 765583 - DNA, 15 bp, Homo sapiens
agatgatgtgttgat

SEQ ID NO: 765584 - DNA, 15 bp, Homo sapiens
gatgatgtgttgatg

SEQ ID NO: 765585 - DNA, 15 bp, Homo sapiens
atgatgtgttgatgg

SEQ ID NO: 765586 - DNA, 15 bp, Homo sapiens
tgatgtgttgatgga

SEQ ID NO: 765587 - DNA, 15 bp, Homo sapiens
gatgtgttgatggac

SEQ ID NO: 765588 - DNA, 15 bp, Homo sapiens
atgtgttgatggact

SEQ ID NO: 765589 - DNA, 15 bp, Homo sapiens
tgtgttgatggactt

SEQ ID NO: 765590 - DNA, 15 bp, Homo sapiens
gtgttgatggacttg

SEQ ID NO: 765591 - DNA, 15 bp, Homo sapiens
tgttgatggacttgg

SEQ ID NO: 765592 - DNA, 15 bp, Homo sapiens
gttgatggacttgga

SEQ ID NO: 765593 - DNA, 15 bp, Homo sapiens
ttgatggacttggac

SEQ ID NO: 765594 - DNA, 15 bp, Homo sapiens
tgatggacttggaca

SEQ ID NO: 765595 - DNA, 15 bp, Homo sapiens
gatggacttggacac

SEQ ID NO: 765596 - DNA, 15 bp, Homo sapiens
atggacttggacaca

SEQ ID NO: 765597 - DNA, 15 bp, Homo sapiens
tggacttggacacag

SEQ ID NO: 765598 - DNA, 15 bp, Homo sapiens
ggacttggacacagt

SEQ ID NO: 765599 - DNA, 15 bp, Homo sapiens
gacttggacacagtc

SEQ ID NO: 765600 - DNA, 15 bp, Homo sapiens
acttggacacagtct

SEQ ID NO: 765601 - DNA, 15 bp, Homo sapiens
cttggacacagtctg

SEQ ID NO: 765602 - DNA, 15 bp, Homo sapiens
ttggacacagtctgt

SEQ ID NO: 765603 - DNA, 15 bp, Homo sapiens
tggacacagtctgtt

SEQ ID NO: 765604 - DNA, 15 bp, Homo sapiens
ggacacagtctgttc

SEQ ID NO: 765605 - DNA, 15 bp, Homo sapiens
gacacagtctgttct

SEQ ID NO: 765606 - DNA, 15 bp, Homo sapiens
acacagtctgttctc

SEQ ID NO: 765607 - DNA, 15 bp, Homo sapiens
cacagtctgttctct

SEQ ID NO: 765608 - DNA, 15 bp, Homo sapiens
acagtctgttctctt

SEQ ID NO: 765609 - DNA, 15 bp, Homo sapiens
cagtctgttctcttc

SEQ ID NO: 765610 - DNA, 15 bp, Homo sapiens
agtctgttctcttcc

SEQ ID NO: 765611 - DNA, 15 bp, Homo sapiens
gtctgttctcttccc

SEQ ID NO: 765612 - DNA, 15 bp, Homo sapiens
tctgttctcttcccc

SEQ ID NO: 765613 - DNA, 15 bp, Homo sapiens
ctgttctcttcccct

SEQ ID NO: 765614 - DNA, 15 bp, Homo sapiens
tgttctcttcccctc

SEQ ID NO: 765615 - DNA, 15 bp, Homo sapiens
gttctcttcccctct

SEQ ID NO: 765616 - DNA, 15 bp, Homo sapiens
ttctcttcccctctc

SEQ ID NO: 765617 - DNA, 15 bp, Homo sapiens
tctcttcccctctca

SEQ ID NO: 765618 - DNA, 15 bp, Homo sapiens
ctcttcccctctcag

SEQ ID NO: 765619 - DNA, 15 bp, Homo sapiens
tcttcccctctcagt

SEQ ID NO: 765620 - DNA, 15 bp, Homo sapiens
cttcccctctcagtc

SEQ ID NO: 765621 - DNA, 15 bp, Homo sapiens
ttcccctctcagtca

SEQ ID NO: 765622 - DNA, 15 bp, Homo sapiens
tcccctctcagtcat

SEQ ID NO: 765623 - DNA, 15 bp, Homo sapiens
cccctctcagtcatg

SEQ ID NO: 765624 - DNA, 15 bp, Homo sapiens
ccctctcagtcatga

SEQ ID NO: 765625 - DNA, 15 bp, Homo sapiens
cctctcagtcatgag

SEQ ID NO: 765626 - DNA, 15 bp, Homo sapiens
ctctcagtcatgagc

SEQ ID NO: 765627 - DNA, 15 bp, Homo sapiens
tctcagtcatgagca

SEQ ID NO: 765628 - DNA, 15 bp, Homo sapiens
ctcagtcatgagcag

SEQ ID NO: 765629 - DNA, 15 bp, Homo sapiens
tcagtcatgagcaga

SEQ ID NO: 765630 - DNA, 15 bp, Homo sapiens
cagtcatgagcagag

SEQ ID NO: 765631 - DNA, 15 bp, Homo sapiens
agtcatgagcagagc

SEQ ID NO: 765632 - DNA, 15 bp, Homo sapiens
gtcatgagcagagcg

SEQ ID NO: 765633 - DNA, 15 bp, Homo sapiens
tcatgagcagagcgt

SEQ ID NO: 765634 - DNA, 15 bp, Homo sapiens
catgagcagagcgtt

SEQ ID NO: 765635 - DNA, 15 bp, Homo sapiens
atgagcagagcgttc

SEQ ID NO: 765636 - DNA, 15 bp, Homo sapiens
tgagcagagcgttca

SEQ ID NO: 765637 - DNA, 15 bp, Homo sapiens
gagcagagcgttcat

SEQ ID NO: 765638 - DNA, 15 bp, Homo sapiens
agcagagcgttcatc

SEQ ID NO: 765639 - DNA, 15 bp, Homo sapiens
gcagagcgttcatct

SEQ ID NO: 765640 - DNA, 15 bp, Homo sapiens
cagagcgttcatctg

SEQ ID NO: 765641 - DNA, 15 bp, Homo sapiens
agagcgttcatctgc

SEQ ID NO: 765642 - DNA, 15 bp, Homo sapiens
gagcgttcatctgct

SEQ ID NO: 765643 - DNA, 15 bp, Homo sapiens
agcgttcatctgctc

SEQ ID NO: 765644 - DNA, 15 bp, Homo sapiens
gcgttcatctgctca

SEQ ID NO: 765645 - DNA, 15 bp, Homo sapiens
cgttcatctgctcag

SEQ ID NO: 765646 - DNA, 15 bp, Homo sapiens
gttcatctgctcagt

SEQ ID NO: 765647 - DNA, 15 bp, Homo sapiens
ttcatctgctcagtg

SEQ ID NO: 765648 - DNA, 15 bp, Homo sapiens
tcatctgctcagtgc

SEQ ID NO: 765649 - DNA, 15 bp, Homo sapiens
catctgctcagtgct

SEQ ID NO: 765650 - DNA, 15 bp, Homo sapiens
atctgctcagtgctt

SEQ ID NO: 765651 - DNA, 15 bp, Homo sapiens
tctgctcagtgcttc

SEQ ID NO: 765652 - DNA, 15 bp, Homo sapiens
ctgctcagtgcttct

SEQ ID NO: 765653 - DNA, 15 bp, Homo sapiens
tgctcagtgcttctt

SEQ ID NO: 765654 - DNA, 15 bp, Homo sapiens
gctcagtgcttcttt

SEQ ID NO: 765655 - DNA, 15 bp, Homo sapiens
ctcagtgcttctttt

SEQ ID NO: 765656 - DNA, 15 bp, Homo sapiens
tcagtgcttcttttt

SEQ ID NO: 765657 - DNA, 15 bp, Homo sapiens
cagtgcttcttttta

SEQ ID NO: 765658 - DNA, 15 bp, Homo sapiens
agtgcttctttttaa

SEQ ID NO: 765659 - DNA, 15 bp, Homo sapiens
gtgcttctttttaat

SEQ ID NO: 765660 - DNA, 15 bp, Homo sapiens
tgcttctttttaata

SEQ ID NO: 765661 - DNA, 15 bp, Homo sapiens
gcttctttttaataa

SEQ ID NO: 765662 - DNA, 15 bp, Homo sapiens
cttctttttaataag

SEQ ID NO: 765663 - DNA, 15 bp, Homo sapiens
ttctttttaataagt

SEQ ID NO: 765664 - DNA, 15 bp, Homo sapiens
tctttttaataagta

SEQ ID NO: 765665 - DNA, 15 bp, Homo sapiens
ctttttaataagtag

SEQ ID NO: 765666 - DNA, 15 bp, Homo sapiens
tttttaataagtagt

SEQ ID NO: 765667 - DNA, 15 bp, Homo sapiens
ttttaataagtagtt

SEQ ID NO: 765668 - DNA, 15 bp, Homo sapiens
tttaataagtagttc

SEQ ID NO: 765669 - DNA, 15 bp, Homo sapiens
ttaataagtagttca

SEQ ID NO: 765670 - DNA, 15 bp, Homo sapiens
taataagtagttcag

SEQ ID NO: 765671 - DNA, 15 bp, Homo sapiens
aataagtagttcagg

SEQ ID NO: 765672 - DNA, 15 bp, Homo sapiens
ataagtagttcaggg

SEQ ID NO: 765673 - DNA, 15 bp, Homo sapiens
taagtagttcagggg

SEQ ID NO: 765674 - DNA, 15 bp, Homo sapiens
aagtagttcaggggt

SEQ ID NO: 765675 - DNA, 15 bp, Homo sapiens
agtagttcaggggtt

SEQ ID NO: 765676 - DNA, 15 bp, Homo sapiens
gtagttcaggggttg

SEQ ID NO: 765677 - DNA, 15 bp, Homo sapiens
tagttcaggggttga

SEQ ID NO: 765678 - DNA, 15 bp, Homo sapiens
agttcaggggttgac

SEQ ID NO: 765679 - DNA, 15 bp, Homo sapiens
gttcaggggttgact

SEQ ID NO: 765680 - DNA, 15 bp, Homo sapiens
ttcaggggttgactg

SEQ ID NO: 765681 - DNA, 15 bp, Homo sapiens
tcaggggttgactgc

SEQ ID NO: 765682 - DNA, 15 bp, Homo sapiens
caggggttgactgca

SEQ ID NO: 765683 - DNA, 15 bp, Homo sapiens
aggggttgactgcag

SEQ ID NO: 765684 - DNA, 15 bp, Homo sapiens
ggggttgactgcagc

SEQ ID NO: 765685 - DNA, 15 bp, Homo sapiens
gggttgactgcagct

SEQ ID NO: 765686 - DNA, 15 bp, Homo sapiens
ggttgactgcagctc

SEQ ID NO: 765687 - DNA, 15 bp, Homo sapiens
gttgactgcagctca

SEQ ID NO: 765688 - DNA, 15 bp, Homo sapiens
ttgactgcagctcag

SEQ ID NO: 765689 - DNA, 15 bp, Homo sapiens
tgactgcagctcagc

SEQ ID NO: 765690 - DNA, 15 bp, Homo sapiens
gactgcagctcagct

SEQ ID NO: 765691 - DNA, 15 bp, Homo sapiens
actgcagctcagctc

SEQ ID NO: 765692 - DNA, 15 bp, Homo sapiens
ctgcagctcagctct

SEQ ID NO: 765693 - DNA, 15 bp, Homo sapiens
tgcagctcagctctg

SEQ ID NO: 765694 - DNA, 15 bp, Homo sapiens
gcagctcagctctgt

SEQ ID NO: 765695 - DNA, 15 bp, Homo sapiens
cagctcagctctgtt

SEQ ID NO: 765696 - DNA, 15 bp, Homo sapiens
agctcagctctgttg

SEQ ID NO: 765697 - DNA, 15 bp, Homo sapiens
gctcagctctgttgg

SEQ ID NO: 765698 - DNA, 15 bp, Homo sapiens
ctcagctctgttggg

SEQ ID NO: 765699 - DNA, 15 bp, Homo sapiens
tcagctctgttggga

SEQ ID NO: 765700 - DNA, 15 bp, Homo sapiens
cagctctgttgggaa

SEQ ID NO: 765701 - DNA, 15 bp, Homo sapiens
agctctgttgggaat

SEQ ID NO: 765702 - DNA, 15 bp, Homo sapiens
gctctgttgggaatt

SEQ ID NO: 765703 - DNA, 15 bp, Homo sapiens
ctctgttgggaatta

SEQ ID NO: 765704 - DNA, 15 bp, Homo sapiens
tctgttgggaattaa

SEQ ID NO: 765705 - DNA, 15 bp, Homo sapiens
ctgttgggaattaac

SEQ ID NO: 765706 - DNA, 15 bp, Homo sapiens
tgttgggaattaaca

SEQ ID NO: 765707 - DNA, 15 bp, Homo sapiens
gttgggaattaacac

SEQ ID NO: 765708 - DNA, 15 bp, Homo sapiens
ttgggaattaacaca

SEQ ID NO: 765709 - DNA, 15 bp, Homo sapiens
tgggaattaacacag

SEQ ID NO: 765710 - DNA, 15 bp, Homo sapiens
gggaattaacacaga

SEQ ID NO: 765711 - DNA, 15 bp, Homo sapiens
ggaattaacacagac

SEQ ID NO: 765712 - DNA, 15 bp, Homo sapiens
gaattaacacagaca

SEQ ID NO: 765713 - DNA, 15 bp, Homo sapiens
aattaacacagacat

SEQ ID NO: 765714 - DNA, 15 bp, Homo sapiens
attaacacagacata

SEQ ID NO: 765715 - DNA, 15 bp, Homo sapiens
ttaacacagacataa

SEQ ID NO: 765716 - DNA, 15 bp, Homo sapiens
taacacagacataat

SEQ ID NO: 765717 - DNA, 15 bp, Homo sapiens
aacacagacataata

SEQ ID NO: 765718 - DNA, 15 bp, Homo sapiens
acacagacataatag

SEQ ID NO: 765719 - DNA, 15 bp, Homo sapiens
cacagacataataga

SEQ ID NO: 765720 - DNA, 15 bp, Homo sapiens
acagacataatagac

SEQ ID NO: 765721 - DNA, 15 bp, Homo sapiens
cagacataatagact

SEQ ID NO: 765722 - DNA, 15 bp, Homo sapiens
agacataatagactt

SEQ ID NO: 765723 - DNA, 15 bp, Homo sapiens
gacataatagacttt

SEQ ID NO: 765724 - DNA, 15 bp, Homo sapiens
acataatagactttt

SEQ ID NO: 765725 - DNA, 15 bp, Homo sapiens
cataatagactttta

SEQ ID NO: 765726 - DNA, 15 bp, Homo sapiens
ataatagacttttat

SEQ ID NO: 765727 - DNA, 15 bp, Homo sapiens
taatagacttttata

SEQ ID NO: 765728 - DNA, 15 bp, Homo sapiens
aatagacttttataa

SEQ ID NO: 765729 - DNA, 15 bp, Homo sapiens
atagacttttataaa

SEQ ID NO: 765730 - DNA, 15 bp, Homo sapiens
tagacttttataaaa

SEQ ID NO: 765731 - DNA, 15 bp, Homo sapiens
agacttttataaaag

SEQ ID NO: 765732 - DNA, 15 bp, Homo sapiens
gacttttataaaagt

SEQ ID NO: 765733 - DNA, 15 bp, Homo sapiens
acttttataaaagtg

SEQ ID NO: 765734 - DNA, 15 bp, Homo sapiens
cttttataaaagtgt

SEQ ID NO: 765735 - DNA, 15 bp, Homo sapiens
ttttataaaagtgtg

SEQ ID NO: 765736 - DNA, 15 bp, Homo sapiens
tttataaaagtgtga

SEQ ID NO: 765737 - DNA, 15 bp, Homo sapiens
ttataaaagtgtgag

SEQ ID NO: 765738 - DNA, 15 bp, Homo sapiens
tataaaagtgtgagc

SEQ ID NO: 765739 - DNA, 15 bp, Homo sapiens
ataaaagtgtgagca

SEQ ID NO: 765740 - DNA, 15 bp, Homo sapiens
taaaagtgtgagcag

SEQ ID NO: 765741 - DNA, 15 bp, Homo sapiens
aaaagtgtgagcaga

SEQ ID NO: 765742 - DNA, 15 bp, Homo sapiens
aaagtgtgagcagag

SEQ ID NO: 765743 - DNA, 15 bp, Homo sapiens
aagtgtgagcagagc

SEQ ID NO: 765744 - DNA, 15 bp, Homo sapiens
agtgtgagcagagca

SEQ ID NO: 765745 - DNA, 15 bp, Homo sapiens
gtgtgagcagagcaa

SEQ ID NO: 765746 - DNA, 15 bp, Homo sapiens
tgtgagcagagcaac

SEQ ID NO: 765747 - DNA, 15 bp, Homo sapiens
gtgagcagagcaact

SEQ ID NO: 765748 - DNA, 15 bp, Homo sapiens
tgagcagagcaacta

SEQ ID NO: 765749 - DNA, 15 bp, Homo sapiens
gagcagagcaactaa

SEQ ID NO: 765750 - DNA, 15 bp, Homo sapiens
agcagagcaactaag

SEQ ID NO: 765751 - DNA, 15 bp, Homo sapiens
gcagagcaactaagc

SEQ ID NO: 765752 - DNA, 15 bp, Homo sapiens
cagagcaactaagcc

SEQ ID NO: 765753 - DNA, 15 bp, Homo sapiens
agagcaactaagcca

SEQ ID NO: 765754 - DNA, 15 bp, Homo sapiens
gagcaactaagccag

SEQ ID NO: 765755 - DNA, 15 bp, Homo sapiens
agcaactaagccagt

SEQ ID NO: 765756 - DNA, 15 bp, Homo sapiens
gcaactaagccagta

SEQ ID NO: 765757 - DNA, 15 bp, Homo sapiens
caactaagccagtac

SEQ ID NO: 765758 - DNA, 15 bp, Homo sapiens
aactaagccagtaca

SEQ ID NO: 765759 - DNA, 15 bp, Homo sapiens
actaagccagtacag

SEQ ID NO: 765760 - DNA, 15 bp, Homo sapiens
ctaagccagtacaga

SEQ ID NO: 765761 - DNA, 15 bp, Homo sapiens
taagccagtacagac

SEQ ID NO: 765762 - DNA, 15 bp, Homo sapiens
aagccagtacagact

SEQ ID NO: 765763 - DNA, 15 bp, Homo sapiens
agccagtacagactc

SEQ ID NO: 765764 - DNA, 15 bp, Homo sapiens
gccagtacagactct

SEQ ID NO: 765765 - DNA, 15 bp, Homo sapiens
ccagtacagactctt

SEQ ID NO: 765766 - DNA, 15 bp, Homo sapiens
cagtacagactcttt

SEQ ID NO: 765767 - DNA, 15 bp, Homo sapiens
agtacagactctttg

SEQ ID NO: 765768 - DNA, 15 bp, Homo sapiens
gtacagactctttgc

SEQ ID NO: 765769 - DNA, 15 bp, Homo sapiens
tacagactctttgcc

SEQ ID NO: 765770 - DNA, 15 bp, Homo sapiens
acagactctttgcca

SEQ ID NO: 765771 - DNA, 15 bp, Homo sapiens
cagactctttgccac

SEQ ID NO: 765772 - DNA, 15 bp, Homo sapiens
agactctttgccaca

SEQ ID NO: 765773 - DNA, 15 bp, Homo sapiens
gactctttgccacat

SEQ ID NO: 765774 - DNA, 15 bp, Homo sapiens
actctttgccacatc

SEQ ID NO: 765775 - DNA, 15 bp, Homo sapiens
ctctttgccacatcc

SEQ ID NO: 765776 - DNA, 15 bp, Homo sapiens
tctttgccacatcct

SEQ ID NO: 765777 - DNA, 15 bp, Homo sapiens
ctttgccacatcctg

SEQ ID NO: 765778 - DNA, 15 bp, Homo sapiens
tttgccacatcctga

SEQ ID NO: 765779 - DNA, 15 bp, Homo sapiens
ttgccacatcctgac

SEQ ID NO: 765780 - DNA, 15 bp, Homo sapiens
tgccacatcctgaca

SEQ ID NO: 765781 - DNA, 15 bp, Homo sapiens
gccacatcctgacat

SEQ ID NO: 765782 - DNA, 15 bp, Homo sapiens
ccacatcctgacatg

SEQ ID NO: 765783 - DNA, 15 bp, Homo sapiens
cacatcctgacatgc

SEQ ID NO: 765784 - DNA, 15 bp, Homo sapiens
acatcctgacatgct

SEQ ID NO: 765785 - DNA, 15 bp, Homo sapiens
catcctgacatgcta

SEQ ID NO: 765786 - DNA, 15 bp, Homo sapiens
atcctgacatgctaa

SEQ ID NO: 765787 - DNA, 15 bp, Homo sapiens
tcctgacatgctaag

SEQ ID NO: 765788 - DNA, 15 bp, Homo sapiens
cctgacatgctaaga

SEQ ID NO: 765789 - DNA, 15 bp, Homo sapiens
ctgacatgctaagag

SEQ ID NO: 765790 - DNA, 15 bp, Homo sapiens
tgacatgctaagaga

SEQ ID NO: 765791 - DNA, 15 bp, Homo sapiens
gacatgctaagagag

SEQ ID NO: 765792 - DNA, 15 bp, Homo sapiens
acatgctaagagaga

SEQ ID NO: 765793 - DNA, 15 bp, Homo sapiens
catgctaagagagag

SEQ ID NO: 765794 - DNA, 15 bp, Homo sapiens
atgctaagagagagg

SEQ ID NO: 765795 - DNA, 15 bp, Homo sapiens
tgctaagagagaggt

SEQ ID NO: 765796 - DNA, 15 bp, Homo sapiens
gctaagagagaggtc

SEQ ID NO: 765797 - DNA, 15 bp, Homo sapiens
ctaagagagaggtcc

SEQ ID NO: 765798 - DNA, 15 bp, Homo sapiens
taagagagaggtccc

SEQ ID NO: 765799 - DNA, 15 bp, Homo sapiens
gtgtgtagtgtgagt

SEQ ID NO: 765800 - DNA, 15 bp, Homo sapiens
tgtgtagtgtgagtt

SEQ ID NO: 765801 - DNA, 15 bp, Homo sapiens
gtgtagtgtgagttg

SEQ ID NO: 765802 - DNA, 15 bp, Homo sapiens
tgtagtgtgagttgc

SEQ ID NO: 765803 - DNA, 15 bp, Homo sapiens
gtagtgtgagttgca

SEQ ID NO: 765804 - DNA, 15 bp, Homo sapiens
tagtgtgagttgcat

SEQ ID NO: 765805 - DNA, 15 bp, Homo sapiens
agtgtgagttgcatt

SEQ ID NO: 765806 - DNA, 15 bp, Homo sapiens
gtgtgagttgcattg

SEQ ID NO: 765807 - DNA, 15 bp, Homo sapiens
tgtgagttgcattgt

SEQ ID NO: 765808 - DNA, 15 bp, Homo sapiens
gtgagttgcattgtg

SEQ ID NO: 765809 - DNA, 15 bp, Homo sapiens
tgagttgcattgtgt

SEQ ID NO: 765810 - DNA, 15 bp, Homo sapiens
gagttgcattgtgtg

SEQ ID NO: 765811 - DNA, 15 bp, Homo sapiens
agttgcattgtgtgt

SEQ ID NO: 765812 - DNA, 15 bp, Homo sapiens
gttgcattgtgtgtg

SEQ ID NO: 765813 - DNA, 15 bp, Homo sapiens
ttgcattgtgtgtgg

SEQ ID NO: 765814 - DNA, 15 bp, Homo sapiens
tgcattgtgtgtggt

SEQ ID NO: 765815 - DNA, 15 bp, Homo sapiens
gcattgtgtgtggtg

SEQ ID NO: 765816 - DNA, 15 bp, Homo sapiens
cattgtgtgtggtgc

SEQ ID NO: 765817 - DNA, 15 bp, Homo sapiens
attgtgtgtggtgct

SEQ ID NO: 765818 - DNA, 15 bp, Homo sapiens
ttgtgtgtggtgctt

SEQ ID NO: 765819 - DNA, 15 bp, Homo sapiens
tgtgtgtggtgcttg

SEQ ID NO: 765820 - DNA, 15 bp, Homo sapiens
gtgtgtggtgcttgg

SEQ ID NO: 765821 - DNA, 15 bp, Homo sapiens
tgtgtggtgcttggt

SEQ ID NO: 765822 - DNA, 15 bp, Homo sapiens
gtgtggtgcttggtg

SEQ ID NO: 765823 - DNA, 15 bp, Homo sapiens
tgtggtgcttggtgt

SEQ ID NO: 765824 - DNA, 15 bp, Homo sapiens
gtggtgcttggtgtg

SEQ ID NO: 765825 - DNA, 15 bp, Homo sapiens
tggtgcttggtgtgt

SEQ ID NO: 765826 - DNA, 15 bp, Homo sapiens
ggtgcttggtgtgtg

SEQ ID NO: 765827 - DNA, 15 bp, Homo sapiens
gtgcttggtgtgtgt

SEQ ID NO: 765828 - DNA, 15 bp, Homo sapiens
tgcttggtgtgtgta

SEQ ID NO: 765829 - DNA, 15 bp, Homo sapiens
gcttggtgtgtgtat

SEQ ID NO: 765830 - DNA, 15 bp, Homo sapiens
cttggtgtgtgtatg

SEQ ID NO: 765831 - DNA, 15 bp, Homo sapiens
ttggtgtgtgtatgt

SEQ ID NO: 765832 - DNA, 15 bp, Homo sapiens
gtgtgatgtgtgtta

SEQ ID NO: 765833 - DNA, 15 bp, Homo sapiens
tgtgatgtgtgttat

SEQ ID NO: 765834 - DNA, 15 bp, Homo sapiens
gtgatgtgtgttatg

SEQ ID NO: 765835 - DNA, 15 bp, Homo sapiens
tgatgtgtgttatgt

SEQ ID NO: 765836 - DNA, 15 bp, Homo sapiens
gatgtgtgttatgtg

SEQ ID NO: 765837 - DNA, 15 bp, Homo sapiens
atgtgtgttatgtgg

SEQ ID NO: 765838 - DNA, 15 bp, Homo sapiens
tgtgtgttatgtggt

SEQ ID NO: 765839 - DNA, 15 bp, Homo sapiens
gtgtgttatgtggtg

SEQ ID NO: 765840 - DNA, 15 bp, Homo sapiens
tgtgttatgtggtgt

SEQ ID NO: 765841 - DNA, 15 bp, Homo sapiens
gtgttatgtggtgtg

SEQ ID NO: 765842 - DNA, 15 bp, Homo sapiens
tgttatgtggtgtgt

SEQ ID NO: 765843 - DNA, 15 bp, Homo sapiens
gttatgtggtgtgtg

SEQ ID NO: 765844 - DNA, 15 bp, Homo sapiens
atgtggtgtgtgtgg

SEQ ID NO: 765845 - DNA, 15 bp, Homo sapiens
tgtggtgtgtgtggt

SEQ ID NO: 765846 - DNA, 15 bp, Homo sapiens
gtggtgtgtgtggta

SEQ ID NO: 765847 - DNA, 15 bp, Homo sapiens
tggtgtgtgtggtaa

SEQ ID NO: 765848 - DNA, 15 bp, Homo sapiens
ggtgtgtgtggtaag

SEQ ID NO: 765849 - DNA, 15 bp, Homo sapiens
gtgtgtgtggtaagt

SEQ ID NO: 765850 - DNA, 15 bp, Homo sapiens
tgtgtgtggtaagta

SEQ ID NO: 765851 - DNA, 15 bp, Homo sapiens
gtgtgtggtaagtag

SEQ ID NO: 765852 - DNA, 15 bp, Homo sapiens
tgtgtggtaagtagt

SEQ ID NO: 765853 - DNA, 15 bp, Homo sapiens
gtgtggtaagtagtg

SEQ ID NO: 765854 - DNA, 15 bp, Homo sapiens
tgtggtaagtagtgt

SEQ ID NO: 765855 - DNA, 15 bp, Homo sapiens
gtggtaagtagtgtg

SEQ ID NO: 765856 - DNA, 15 bp, Homo sapiens
tggtaagtagtgtgt

SEQ ID NO: 765857 - DNA, 15 bp, Homo sapiens
ggtaagtagtgtgtg

SEQ ID NO: 765858 - DNA, 15 bp, Homo sapiens
gtaagtagtgtgtgt

SEQ ID NO: 765859 - DNA, 15 bp, Homo sapiens
taagtagtgtgtgtt

SEQ ID NO: 765860 - DNA, 15 bp, Homo sapiens
aagtagtgtgtgttg

SEQ ID NO: 765861 - DNA, 15 bp, Homo sapiens
agtagtgtgtgttgt

SEQ ID NO: 765862 - DNA, 15 bp, Homo sapiens
gtagtgtgtgttgtg

SEQ ID NO: 765863 - DNA, 15 bp, Homo sapiens
tagtgtgtgttgtgt

SEQ ID NO: 765864 - DNA, 15 bp, Homo sapiens
agtgtgtgttgtgtt

SEQ ID NO: 765865 - DNA, 15 bp, Homo sapiens
gtgtgtgttgtgtta

SEQ ID NO: 765866 - DNA, 15 bp, Homo sapiens
tgtgtgttgtgttac

SEQ ID NO: 765867 - DNA, 15 bp, Homo sapiens
gtgtgttgtgttaca

SEQ ID NO: 765868 - DNA, 15 bp, Homo sapiens
tgtgttgtgttacat

SEQ ID NO: 765869 - DNA, 15 bp, Homo sapiens
gtgttgtgttacatg

SEQ ID NO: 765870 - DNA, 15 bp, Homo sapiens
tgttgtgttacatgt

SEQ ID NO: 765871 - DNA, 15 bp, Homo sapiens
gttgtgttacatgtg

SEQ ID NO: 765872 - DNA, 15 bp, Homo sapiens
ttgtgttacatgtgt

SEQ ID NO: 765873 - DNA, 15 bp, Homo sapiens
tgtgttacatgtgtt

SEQ ID NO: 765874 - DNA, 15 bp, Homo sapiens
gtgttacatgtgttg

SEQ ID NO: 765875 - DNA, 15 bp, Homo sapiens
tgttacatgtgttgt

SEQ ID NO: 765876 - DNA, 15 bp, Homo sapiens
gttacatgtgttgtg

SEQ ID NO: 765877 - DNA, 15 bp, Homo sapiens
ttacatgtgttgtgt

SEQ ID NO: 765878 - DNA, 15 bp, Homo sapiens
tacatgtgttgtgtt

SEQ ID NO: 765879 - DNA, 15 bp, Homo sapiens
acatgtgttgtgttg

SEQ ID NO: 765880 - DNA, 15 bp, Homo sapiens
catgtgttgtgttgt

SEQ ID NO: 765881 - DNA, 15 bp, Homo sapiens
atgtgttgtgttgtg

SEQ ID NO: 765882 - DNA, 15 bp, Homo sapiens
tgtgttgtgttgtgt

SEQ ID NO: 765883 - DNA, 15 bp, Homo sapiens
gtgttgtgttgtgtg

SEQ ID NO: 765884 - DNA, 15 bp, Homo sapiens
tgttgtgttgtgtgt

SEQ ID NO: 765885 - DNA, 15 bp, Homo sapiens
gttgtgttgtgtgtg

SEQ ID NO: 765886 - DNA, 15 bp, Homo sapiens
ttgtgttgtgtgtgt

SEQ ID NO: 765887 - DNA, 15 bp, Homo sapiens
tgtgttgtgtgtgta

SEQ ID NO: 765888 - DNA, 15 bp, Homo sapiens
gtgttgtgtgtgtag

SEQ ID NO: 765889 - DNA, 15 bp, Homo sapiens
tgttgtgtgtgtagt

SEQ ID NO: 765890 - DNA, 15 bp, Homo sapiens
gttgtgtgtgtagtg

SEQ ID NO: 765891 - DNA, 15 bp, Homo sapiens
ttgtgtgtgtagtgt

SEQ ID NO: 765892 - DNA, 15 bp, Homo sapiens
tgtagtgtgagttgt

SEQ ID NO: 765893 - DNA, 15 bp, Homo sapiens
gtagtgtgagttgtg

SEQ ID NO: 765894 - DNA, 15 bp, Homo sapiens
tagtgtgagttgtgt

SEQ ID NO: 765895 - DNA, 15 bp, Homo sapiens
agtgtgagttgtgtg

SEQ ID NO: 765896 - DNA, 15 bp, Homo sapiens
gtgtgagttgtgtgt

SEQ ID NO: 765897 - DNA, 15 bp, Homo sapiens
tgtgagttgtgtgtg

SEQ ID NO: 765898 - DNA, 15 bp, Homo sapiens
gtgagttgtgtgtgg

SEQ ID NO: 765899 - DNA, 15 bp, Homo sapiens
tgagttgtgtgtggt

SEQ ID NO: 765900 - DNA, 15 bp, Homo sapiens
gagttgtgtgtggtg

SEQ ID NO: 765901 - DNA, 15 bp, Homo sapiens
agttgtgtgtggtgt

SEQ ID NO: 765902 - DNA, 15 bp, Homo sapiens
gttgtgtgtggtgtg

SEQ ID NO: 765903 - DNA, 15 bp, Homo sapiens
ttgtgtgtggtgtgc

SEQ ID NO: 765904 - DNA, 15 bp, Homo sapiens
tgtgtgtggtgtgca

SEQ ID NO: 765905 - DNA, 15 bp, Homo sapiens
gtgtgtggtgtgcac

SEQ ID NO: 765906 - DNA, 15 bp, Homo sapiens
tgtgtggtgtgcact

SEQ ID NO: 765907 - DNA, 15 bp, Homo sapiens
gtgtggtgtgcactg

SEQ ID NO: 765908 - DNA, 15 bp, Homo sapiens
tgtggtgtgcactgt

SEQ ID NO: 765909 - DNA, 15 bp, Homo sapiens
gtggtgtgcactgtg

SEQ ID NO: 765910 - DNA, 15 bp, Homo sapiens
tggtgtgcactgtgt

SEQ ID NO: 765911 - DNA, 15 bp, Homo sapiens
ggtgtgcactgtgta

SEQ ID NO: 765912 - DNA, 15 bp, Homo sapiens
gtgtgcactgtgtag

SEQ ID NO: 765913 - DNA, 15 bp, Homo sapiens
tgtgcactgtgtagt

SEQ ID NO: 765914 - DNA, 15 bp, Homo sapiens
gtgcactgtgtagtg

SEQ ID NO: 765915 - DNA, 15 bp, Homo sapiens
tgcactgtgtagtgt

SEQ ID NO: 765916 - DNA, 15 bp, Homo sapiens
gcactgtgtagtgtg

SEQ ID NO: 765917 - DNA, 15 bp, Homo sapiens
cactgtgtagtgtgt

SEQ ID NO: 765918 - DNA, 15 bp, Homo sapiens
actgtgtagtgtgtg

SEQ ID NO: 765919 - DNA, 15 bp, Homo sapiens
ctgtgtagtgtgtgt

SEQ ID NO: 765920 - DNA, 15 bp, Homo sapiens
tgtgtagtgtgtgtt

SEQ ID NO: 765921 - DNA, 15 bp, Homo sapiens
gtgtagtgtgtgttg

SEQ ID NO: 765922 - DNA, 15 bp, Homo sapiens
tgtagtgtgtgttgt

SEQ ID NO: 765923 - DNA, 15 bp, Homo sapiens
tgtgttacatgtgtg

SEQ ID NO: 765924 - DNA, 15 bp, Homo sapiens
gtgttacatgtgtgg

SEQ ID NO: 765925 - DNA, 15 bp, Homo sapiens
tgttacatgtgtggt

SEQ ID NO: 765926 - DNA, 15 bp, Homo sapiens
gttacatgtgtggtg

SEQ ID NO: 765927 - DNA, 15 bp, Homo sapiens
ttacatgtgtggtgt

SEQ ID NO: 765928 - DNA, 15 bp, Homo sapiens
tacatgtgtggtgtg

SEQ ID NO: 765929 - DNA, 15 bp, Homo sapiens
acatgtgtggtgtgt

SEQ ID NO: 765930 - DNA, 15 bp, Homo sapiens
catgtgtggtgtgta

SEQ ID NO: 765931 - DNA, 15 bp, Homo sapiens
atgtgtggtgtgtat

SEQ ID NO: 765932 - DNA, 15 bp, Homo sapiens
tgtgtggtgtgtatt

SEQ ID NO: 765933 - DNA, 15 bp, Homo sapiens
gtgtggtgtgtattg

SEQ ID NO: 765934 - DNA, 15 bp, Homo sapiens
tgtggtgtgtattgt

SEQ ID NO: 765935 - DNA, 15 bp, Homo sapiens
gtggtgtgtattgtg

SEQ ID NO: 765936 - DNA, 15 bp, Homo sapiens
tggtgtgtattgtgt

SEQ ID NO: 765937 - DNA, 15 bp, Homo sapiens
ggtgtgtattgtgtg

SEQ ID NO: 765938 - DNA, 15 bp, Homo sapiens
gtgtgtattgtgtgt

SEQ ID NO: 765939 - DNA, 15 bp, Homo sapiens
tgtgtattgtgtgtt

SEQ ID NO: 765940 - DNA, 15 bp, Homo sapiens
gtgtattgtgtgttg

SEQ ID NO: 765941 - DNA, 15 bp, Homo sapiens
tgtattgtgtgttgt

SEQ ID NO: 765942 - DNA, 15 bp, Homo sapiens
gtattgtgtgttgta

SEQ ID NO: 765943 - DNA, 15 bp, Homo sapiens
tattgtgtgttgtat

SEQ ID NO: 765944 - DNA, 15 bp, Homo sapiens
attgtgtgttgtatg

SEQ ID NO: 765945 - DNA, 15 bp, Homo sapiens
ttgtgtgttgtatgt

SEQ ID NO: 765946 - DNA, 15 bp, Homo sapiens
tgtgtgttgtatgtg

SEQ ID NO: 765947 - DNA, 15 bp, Homo sapiens
gtgtgttgtatgtgc

SEQ ID NO: 765948 - DNA, 15 bp, Homo sapiens
tgtgttgtatgtgcg

SEQ ID NO: 765949 - DNA, 15 bp, Homo sapiens
gtgttgtatgtgcgt

SEQ ID NO: 765950 - DNA, 15 bp, Homo sapiens
tgttgtatgtgcgtt

SEQ ID NO: 765951 - DNA, 15 bp, Homo sapiens
gttgtatgtgcgttg

SEQ ID NO: 765952 - DNA, 15 bp, Homo sapiens
ttgtatgtgcgttgt

SEQ ID NO: 765953 - DNA, 15 bp, Homo sapiens
tgtatgtgcgttgtg

SEQ ID NO: 765954 - DNA, 15 bp, Homo sapiens
gtatgtgcgttgtgt

SEQ ID NO: 765955 - DNA, 15 bp, Homo sapiens
tatgtgcgttgtgtg

SEQ ID NO: 765956 - DNA, 15 bp, Homo sapiens
atgtgcgttgtgtgt

SEQ ID NO: 765957 - DNA, 15 bp, Homo sapiens
tgtgcgttgtgtgtg

SEQ ID NO: 765958 - DNA, 15 bp, Homo sapiens
gtgcgttgtgtgtgt

SEQ ID NO: 765959 - DNA, 15 bp, Homo sapiens
tgcgttgtgtgtgta

SEQ ID NO: 765960 - DNA, 15 bp, Homo sapiens
gcgttgtgtgtgtag

SEQ ID NO: 765961 - DNA, 15 bp, Homo sapiens
cgttgtgtgtgtagt

SEQ ID NO: 765962 - DNA, 15 bp, Homo sapiens
agtgtgagttgtgtt

SEQ ID NO: 765963 - DNA, 15 bp, Homo sapiens
gtgtgagttgtgtta

SEQ ID NO: 765964 - DNA, 15 bp, Homo sapiens
tgtgagttgtgttat

SEQ ID NO: 765965 - DNA, 15 bp, Homo sapiens
gtgagttgtgttatg

SEQ ID NO: 765966 - DNA, 15 bp, Homo sapiens
tgagttgtgttatgt

SEQ ID NO: 765967 - DNA, 15 bp, Homo sapiens
gagttgtgttatgtg

SEQ ID NO: 765968 - DNA, 15 bp, Homo sapiens
agttgtgttatgtgt

SEQ ID NO: 765969 - DNA, 15 bp, Homo sapiens
gttgtgttatgtgtg

SEQ ID NO: 765970 - DNA, 15 bp, Homo sapiens
ttgtgttatgtgtgt

SEQ ID NO: 765971 - DNA, 15 bp, Homo sapiens
gtgttatgtgtgtaa

SEQ ID NO: 765972 - DNA, 15 bp, Homo sapiens
tgttatgtgtgtaat

SEQ ID NO: 765973 - DNA, 15 bp, Homo sapiens
gttatgtgtgtaatg

SEQ ID NO: 765974 - DNA, 15 bp, Homo sapiens
ttatgtgtgtaatgt

SEQ ID NO: 765975 - DNA, 15 bp, Homo sapiens
tatgtgtgtaatgtg

SEQ ID NO: 765976 - DNA, 15 bp, Homo sapiens
atgtgtgtaatgtgt

SEQ ID NO: 765977 - DNA, 15 bp, Homo sapiens
tgtgtgtaatgtgtg

SEQ ID NO: 765978 - DNA, 15 bp, Homo sapiens
gtgtgtaatgtgtgt

SEQ ID NO: 765979 - DNA, 15 bp, Homo sapiens
tgtgtaatgtgtgtt

SEQ ID NO: 765980 - DNA, 15 bp, Homo sapiens
gtgtaatgtgtgttg

SEQ ID NO: 765981 - DNA, 15 bp, Homo sapiens
tgtaatgtgtgttgt

SEQ ID NO: 765982 - DNA, 15 bp, Homo sapiens
gtaatgtgtgttgtg

SEQ ID NO: 765983 - DNA, 15 bp, Homo sapiens
taatgtgtgttgtgt

SEQ ID NO: 765984 - DNA, 15 bp, Homo sapiens
aatgtgtgttgtgta

SEQ ID NO: 765985 - DNA, 15 bp, Homo sapiens
atgtgtgttgtgtag

SEQ ID NO: 765986 - DNA, 15 bp, Homo sapiens
tgtgtgttgtgtagt

SEQ ID NO: 765987 - DNA, 15 bp, Homo sapiens
gtgtgttgtgtagtg

SEQ ID NO: 765988 - DNA, 15 bp, Homo sapiens
tgtgttgtgtagtgt

SEQ ID NO: 765989 - DNA, 15 bp, Homo sapiens
gtgttgtgtagtgtg

SEQ ID NO: 765990 - DNA, 15 bp, Homo sapiens
tgttgtgtagtgtgt

SEQ ID NO: 765991 - DNA, 15 bp, Homo sapiens
gttgtgtagtgtgtg

SEQ ID NO: 765992 - DNA, 15 bp, Homo sapiens
ttgtgtagtgtgtgt

SEQ ID NO: 765993 - DNA, 15 bp, Homo sapiens
tgtagtgtgtgttgc

SEQ ID NO: 765994 - DNA, 15 bp, Homo sapiens
gtagtgtgtgttgca

SEQ ID NO: 765995 - DNA, 15 bp, Homo sapiens
tagtgtgtgttgcat

SEQ ID NO: 765996 - DNA, 15 bp, Homo sapiens
agtgtgtgttgcatg

SEQ ID NO: 765997 - DNA, 15 bp, Homo sapiens
gtgtgtgttgcatgt

SEQ ID NO: 765998 - DNA, 15 bp, Homo sapiens
tgtgtgttgcatgtg

SEQ ID NO: 765999 - DNA, 15 bp, Homo sapiens
gtgtgttgcatgtgt

SEQ ID NO: 766000 - DNA, 15 bp, Homo sapiens
tgtgttgcatgtgtg

SEQ ID NO: 766001 - DNA, 15 bp, Homo sapiens
gtgttgcatgtgtgg

SEQ ID NO: 766002 - DNA, 15 bp, Homo sapiens
tgttgcatgtgtggt

SEQ ID NO: 766003 - DNA, 15 bp, Homo sapiens
gttgcatgtgtggtg

SEQ ID NO: 766004 - DNA, 15 bp, Homo sapiens
ttgcatgtgtggtgt

SEQ ID NO: 766005 - DNA, 15 bp, Homo sapiens
tgcatgtgtggtgtg

SEQ ID NO: 766006 - DNA, 15 bp, Homo sapiens
gcatgtgtggtgtgt

SEQ ID NO: 766007 - DNA, 15 bp, Homo sapiens
gtattgtgtgttgtg

SEQ ID NO: 766008 - DNA, 15 bp, Homo sapiens
tattgtgtgttgtgt

SEQ ID NO: 766009 - DNA, 15 bp, Homo sapiens
attgtgtgttgtgtg

SEQ ID NO: 766010 - DNA, 15 bp, Homo sapiens
ttgtgtgttgtgtgt

SEQ ID NO: 766011 - DNA, 15 bp, Homo sapiens
tgtgtgttgtgtgtg

SEQ ID NO: 766012 - DNA, 15 bp, Homo sapiens
gtgtgttgtgtgtgg

SEQ ID NO: 766013 - DNA, 15 bp, Homo sapiens
tgtgttgtgtgtggt

SEQ ID NO: 766014 - DNA, 15 bp, Homo sapiens
gtgttgtgtgtggtg

SEQ ID NO: 766015 - DNA, 15 bp, Homo sapiens
tgttgtgtgtggtgt

SEQ ID NO: 766016 - DNA, 15 bp, Homo sapiens
ttgtgtgtggtgtgt

SEQ ID NO: 766017 - DNA, 15 bp, Homo sapiens
tgtggtgtgtgtgta

SEQ ID NO: 766018 - DNA, 15 bp, Homo sapiens
gtggtgtgtgtgtag

SEQ ID NO: 766019 - DNA, 15 bp, Homo sapiens
gtagtgtgagttgtt

SEQ ID NO: 766020 - DNA, 15 bp, Homo sapiens
tagtgtgagttgtta

SEQ ID NO: 766021 - DNA, 15 bp, Homo sapiens
agtgtgagttgttat

SEQ ID NO: 766022 - DNA, 15 bp, Homo sapiens
gtgtgagttgttatg

SEQ ID NO: 766023 - DNA, 15 bp, Homo sapiens
tgtgagttgttatgt

SEQ ID NO: 766024 - DNA, 15 bp, Homo sapiens
gtgagttgttatgtg

SEQ ID NO: 766025 - DNA, 15 bp, Homo sapiens
tgagttgttatgtgt

SEQ ID NO: 766026 - DNA, 15 bp, Homo sapiens
gagttgttatgtgtg

SEQ ID NO: 766027 - DNA, 15 bp, Homo sapiens
agttgttatgtgtgt

SEQ ID NO: 766028 - DNA, 15 bp, Homo sapiens
gttgttatgtgtgtg

SEQ ID NO: 766029 - DNA, 15 bp, Homo sapiens
ttgttatgtgtgtgg

SEQ ID NO: 766030 - DNA, 15 bp, Homo sapiens
tgttatgtgtgtggt

SEQ ID NO: 766031 - DNA, 15 bp, Homo sapiens
gttatgtgtgtggtg

SEQ ID NO: 766032 - DNA, 15 bp, Homo sapiens
ttatgtgtgtggtgt

SEQ ID NO: 766033 - DNA, 15 bp, Homo sapiens
tatgtgtgtggtgtg

SEQ ID NO: 766034 - DNA, 15 bp, Homo sapiens
tgtgtgtggtgtgta

SEQ ID NO: 766035 - DNA, 15 bp, Homo sapiens
gtgtgtggtgtgtag

SEQ ID NO: 766036 - DNA, 15 bp, Homo sapiens
tgtgtggtgtgtagt

SEQ ID NO: 766037 - DNA, 15 bp, Homo sapiens
gtgtggtgtgtagtg

SEQ ID NO: 766038 - DNA, 15 bp, Homo sapiens
tgtggtgtgtagtgt

SEQ ID NO: 766039 - DNA, 15 bp, Homo sapiens
gtggtgtgtagtgtg

SEQ ID NO: 766040 - DNA, 15 bp, Homo sapiens
tggtgtgtagtgtga

SEQ ID NO: 766041 - DNA, 15 bp, Homo sapiens
ggtgtgtagtgtgag

SEQ ID NO: 766042 - DNA, 15 bp, Homo sapiens
gtgtagtgtgagtta

SEQ ID NO: 766043 - DNA, 15 bp, Homo sapiens
tgtagtgtgagttat

SEQ ID NO: 766044 - DNA, 15 bp, Homo sapiens
gtagtgtgagttatg

SEQ ID NO: 766045 - DNA, 15 bp, Homo sapiens
tagtgtgagttatgt

SEQ ID NO: 766046 - DNA, 15 bp, Homo sapiens
agtgtgagttatgta

SEQ ID NO: 766047 - DNA, 15 bp, Homo sapiens
gtgtgagttatgtaa

SEQ ID NO: 766048 - DNA, 15 bp, Homo sapiens
tgtgagttatgtaac

SEQ ID NO: 766049 - DNA, 15 bp, Homo sapiens
gtgagttatgtaaca

SEQ ID NO: 766050 - DNA, 15 bp, Homo sapiens
tgagttatgtaacat

SEQ ID NO: 766051 - DNA, 15 bp, Homo sapiens
gagttatgtaacatg

SEQ ID NO: 766052 - DNA, 15 bp, Homo sapiens
agttatgtaacatgt

SEQ ID NO: 766053 - DNA, 15 bp, Homo sapiens
gttatgtaacatgtc

SEQ ID NO: 766054 - DNA, 15 bp, Homo sapiens
ttatgtaacatgtct

SEQ ID NO: 766055 - DNA, 15 bp, Homo sapiens
tatgtaacatgtctg

SEQ ID NO: 766056 - DNA, 15 bp, Homo sapiens
atgtaacatgtctgg

SEQ ID NO: 766057 - DNA, 15 bp, Homo sapiens
tgtaacatgtctggt

SEQ ID NO: 766058 - DNA, 15 bp, Homo sapiens
gtaacatgtctggtg

SEQ ID NO: 766059 - DNA, 15 bp, Homo sapiens
taacatgtctggtgt

SEQ ID NO: 766060 - DNA, 15 bp, Homo sapiens
aacatgtctggtgtg

SEQ ID NO: 766061 - DNA, 15 bp, Homo sapiens
acatgtctggtgtgt

SEQ ID NO: 766062 - DNA, 15 bp, Homo sapiens
catgtctggtgtgta

SEQ ID NO: 766063 - DNA, 15 bp, Homo sapiens
atgtctggtgtgtat

SEQ ID NO: 766064 - DNA, 15 bp, Homo sapiens
tgtctggtgtgtatt

SEQ ID NO: 766065 - DNA, 15 bp, Homo sapiens
gtctggtgtgtattg

SEQ ID NO: 766066 - DNA, 15 bp, Homo sapiens
tctggtgtgtattgt

SEQ ID NO: 766067 - DNA, 15 bp, Homo sapiens
ctggtgtgtattgtg

SEQ ID NO: 766068 - DNA, 15 bp, Homo sapiens
attgtgtgttgtata

SEQ ID NO: 766069 - DNA, 15 bp, Homo sapiens
ttgtgtgttgtatat

SEQ ID NO: 766070 - DNA, 15 bp, Homo sapiens
tgtgtgttgtatatg

SEQ ID NO: 766071 - DNA, 15 bp, Homo sapiens
gtgtgttgtatatgt

SEQ ID NO: 766072 - DNA, 15 bp, Homo sapiens
tgtgttgtatatgtg

SEQ ID NO: 766073 - DNA, 15 bp, Homo sapiens
gtgttgtatatgtgt

SEQ ID NO: 766074 - DNA, 15 bp, Homo sapiens
tgttgtatatgtgtt

SEQ ID NO: 766075 - DNA, 15 bp, Homo sapiens
gttgtatatgtgttg

SEQ ID NO: 766076 - DNA, 15 bp, Homo sapiens
ttgtatatgtgttgt

SEQ ID NO: 766077 - DNA, 15 bp, Homo sapiens
tgtatatgtgttgtg

SEQ ID NO: 766078 - DNA, 15 bp, Homo sapiens
gtatatgtgttgtgt

SEQ ID NO: 766079 - DNA, 15 bp, Homo sapiens
tatatgtgttgtgtg

SEQ ID NO: 766080 - DNA, 15 bp, Homo sapiens
atatgtgttgtgtgt

SEQ ID NO: 766081 - DNA, 15 bp, Homo sapiens
tatgtgttgtgtgtg

SEQ ID NO: 766082 - DNA, 15 bp, Homo sapiens
atgtgttgtgtgtgt

SEQ ID NO: 766083 - DNA, 15 bp, Homo sapiens
gttgtgtgtgtagta

SEQ ID NO: 766084 - DNA, 15 bp, Homo sapiens
ttgtgtgtgtagtat

SEQ ID NO: 766085 - DNA, 15 bp, Homo sapiens
gtgtgtgtagtatga

SEQ ID NO: 766086 - DNA, 15 bp, Homo sapiens
tgtgtgtagtatgag

SEQ ID NO: 766087 - DNA, 15 bp, Homo sapiens
gtgtgtagtatgagt

SEQ ID NO: 766088 - DNA, 15 bp, Homo sapiens
tgtgtagtatgagtt

SEQ ID NO: 766089 - DNA, 15 bp, Homo sapiens
gtgtagtatgagttg

SEQ ID NO: 766090 - DNA, 15 bp, Homo sapiens
tgtagtatgagttgt

SEQ ID NO: 766091 - DNA, 15 bp, Homo sapiens
gtagtatgagttgtg

SEQ ID NO: 766092 - DNA, 15 bp, Homo sapiens
tagtatgagttgtgt

SEQ ID NO: 766093 - DNA, 15 bp, Homo sapiens
agtatgagttgtgtt

SEQ ID NO: 766094 - DNA, 15 bp, Homo sapiens
gtatgagttgtgtta

SEQ ID NO: 766095 - DNA, 15 bp, Homo sapiens
tatgagttgtgttat

SEQ ID NO: 766096 - DNA, 15 bp, Homo sapiens
atgagttgtgttatg

SEQ ID NO: 766097 - DNA, 15 bp, Homo sapiens
gagttgtgttatgta

SEQ ID NO: 766098 - DNA, 15 bp, Homo sapiens
agttgtgttatgtat

SEQ ID NO: 766099 - DNA, 15 bp, Homo sapiens
gttgtgttatgtatg

SEQ ID NO: 766100 - DNA, 15 bp, Homo sapiens
ttgtgttatgtatgt

SEQ ID NO: 766101 - DNA, 15 bp, Homo sapiens
tgtgttatgtatgtg

SEQ ID NO: 766102 - DNA, 15 bp, Homo sapiens
gtgttatgtatgtgg

SEQ ID NO: 766103 - DNA, 15 bp, Homo sapiens
tgttatgtatgtggt

SEQ ID NO: 766104 - DNA, 15 bp, Homo sapiens
gttatgtatgtggtg

SEQ ID NO: 766105 - DNA, 15 bp, Homo sapiens
ttatgtatgtggtgt

SEQ ID NO: 766106 - DNA, 15 bp, Homo sapiens
tatgtatgtggtgtg

SEQ ID NO: 766107 - DNA, 15 bp, Homo sapiens
atgtatgtggtgtgc

SEQ ID NO: 766108 - DNA, 15 bp, Homo sapiens
tgtatgtggtgtgca

SEQ ID NO: 766109 - DNA, 15 bp, Homo sapiens
gtatgtggtgtgcag

SEQ ID NO: 766110 - DNA, 15 bp, Homo sapiens
tatgtggtgtgcagt

SEQ ID NO: 766111 - DNA, 15 bp, Homo sapiens
atgtggtgtgcagtg

SEQ ID NO: 766112 - DNA, 15 bp, Homo sapiens
tgtggtgtgcagtgt

SEQ ID NO: 766113 - DNA, 15 bp, Homo sapiens
gtggtgtgcagtgtg

SEQ ID NO: 766114 - DNA, 15 bp, Homo sapiens
tggtgtgcagtgtgt

SEQ ID NO: 766115 - DNA, 15 bp, Homo sapiens
ggtgtgcagtgtgta

SEQ ID NO: 766116 - DNA, 15 bp, Homo sapiens
gtgtgcagtgtgtag

SEQ ID NO: 766117 - DNA, 15 bp, Homo sapiens
tgtgcagtgtgtagt

SEQ ID NO: 766118 - DNA, 15 bp, Homo sapiens
gtgcagtgtgtagtg

SEQ ID NO: 766119 - DNA, 15 bp, Homo sapiens
tgcagtgtgtagtgt

SEQ ID NO: 766120 - DNA, 15 bp, Homo sapiens
gcagtgtgtagtgtg

SEQ ID NO: 766121 - DNA, 15 bp, Homo sapiens
cagtgtgtagtgtgt

SEQ ID NO: 766122 - DNA, 15 bp, Homo sapiens
agtgtgtagtgtgtg

SEQ ID NO: 766123 - DNA, 15 bp, Homo sapiens
gtgttacatgtgtgt

SEQ ID NO: 766124 - DNA, 15 bp, Homo sapiens
tgttacatgtgtgtt

SEQ ID NO: 766125 - DNA, 15 bp, Homo sapiens
gttacatgtgtgttg

SEQ ID NO: 766126 - DNA, 15 bp, Homo sapiens
ttacatgtgtgttgt

SEQ ID NO: 766127 - DNA, 15 bp, Homo sapiens
tacatgtgtgttgtg

SEQ ID NO: 766128 - DNA, 15 bp, Homo sapiens
acatgtgtgttgtgt

SEQ ID NO: 766129 - DNA, 15 bp, Homo sapiens
catgtgtgttgtgtg

SEQ ID NO: 766130 - DNA, 15 bp, Homo sapiens
atgtgtgttgtgtgg

SEQ ID NO: 766131 - DNA, 15 bp, Homo sapiens
tgtgtgttgtgtggt

SEQ ID NO: 766132 - DNA, 15 bp, Homo sapiens
gtgtgttgtgtggtg

SEQ ID NO: 766133 - DNA, 15 bp, Homo sapiens
tgtgttgtgtggtgt

SEQ ID NO: 766134 - DNA, 15 bp, Homo sapiens
gtgttgtgtggtgtg

SEQ ID NO: 766135 - DNA, 15 bp, Homo sapiens
tgttgtgtggtgtgt

SEQ ID NO: 766136 - DNA, 15 bp, Homo sapiens
gttgtgtggtgtgtg

SEQ ID NO: 766137 - DNA, 15 bp, Homo sapiens
ttgtgtggtgtgtgt

SEQ ID NO: 766138 - DNA, 15 bp, Homo sapiens
gtggtgtgtgtatgg

SEQ ID NO: 766139 - DNA, 15 bp, Homo sapiens
tggtgtgtgtatggt

SEQ ID NO: 766140 - DNA, 15 bp, Homo sapiens
ggtgtgtgtatggtg

SEQ ID NO: 766141 - DNA, 15 bp, Homo sapiens
gtgtgtgtatggtgt

SEQ ID NO: 766142 - DNA, 15 bp, Homo sapiens
tgtgtgtatggtgtg

SEQ ID NO: 766143 - DNA, 15 bp, Homo sapiens
gtgtgtatggtgtgc

SEQ ID NO: 766144 - DNA, 15 bp, Homo sapiens
tgtgtatggtgtgcg

SEQ ID NO: 766145 - DNA, 15 bp, Homo sapiens
gtgtatggtgtgcgt

SEQ ID NO: 766146 - DNA, 15 bp, Homo sapiens
tgtatggtgtgcgtc

SEQ ID NO: 766147 - DNA, 15 bp, Homo sapiens
gtatggtgtgcgtct

SEQ ID NO: 766148 - DNA, 15 bp, Homo sapiens
tatggtgtgcgtcta

SEQ ID NO: 766149 - DNA, 15 bp, Homo sapiens
atggtgtgcgtctat

SEQ ID NO: 766150 - DNA, 15 bp, Homo sapiens
tggtgtgcgtctatc

SEQ ID NO: 766151 - DNA, 15 bp, Homo sapiens
ggtgtgcgtctatcc

SEQ ID NO: 766152 - DNA, 15 bp, Homo sapiens
gtgtgcgtctatcca

SEQ ID NO: 766153 - DNA, 15 bp, Homo sapiens
tgtgcgtctatccat

SEQ ID NO: 766154 - DNA, 15 bp, Homo sapiens
gtgcgtctatccatt

SEQ ID NO: 766155 - DNA, 15 bp, Homo sapiens
tgcgtctatccattg

SEQ ID NO: 766156 - DNA, 15 bp, Homo sapiens
gcgtctatccattgg

SEQ ID NO: 766157 - DNA, 15 bp, Homo sapiens
cgtctatccattgga

SEQ ID NO: 766158 - DNA, 15 bp, Homo sapiens
gtctatccattggat

SEQ ID NO: 766159 - DNA, 15 bp, Homo sapiens
tctatccattggatg

SEQ ID NO: 766160 - DNA, 15 bp, Homo sapiens
ctatccattggatga

SEQ ID NO: 766161 - DNA, 15 bp, Homo sapiens
tatccattggatgag

SEQ ID NO: 766162 - DNA, 15 bp, Homo sapiens
atccattggatgagc

SEQ ID NO: 766163 - DNA, 15 bp, Homo sapiens
tccattggatgagcc

SEQ ID NO: 766164 - DNA, 15 bp, Homo sapiens
ccattggatgagccg

SEQ ID NO: 766165 - DNA, 15 bp, Homo sapiens
cattggatgagccgg

SEQ ID NO: 766166 - DNA, 15 bp, Homo sapiens
attggatgagccggg

SEQ ID NO: 766167 - DNA, 15 bp, Homo sapiens
ttggatgagccgggc

SEQ ID NO: 766168 - DNA, 15 bp, Homo sapiens
tggatgagccgggct

SEQ ID NO: 766169 - DNA, 15 bp, Homo sapiens
ggatgagccgggctg

SEQ ID NO: 766170 - DNA, 15 bp, Homo sapiens
gatgagccgggctgc

SEQ ID NO: 766171 - DNA, 15 bp, Homo sapiens
atgagccgggctgcc

SEQ ID NO: 766172 - DNA, 15 bp, Homo sapiens
tgagccgggctgcct

SEQ ID NO: 766173 - DNA, 15 bp, Homo sapiens
gagccgggctgcctc

SEQ ID NO: 766174 - DNA, 15 bp, Homo sapiens
agccgggctgcctct

SEQ ID NO: 766175 - DNA, 15 bp, Homo sapiens
gccgggctgcctctc

SEQ ID NO: 766176 - DNA, 15 bp, Homo sapiens
ccgggctgcctctct

SEQ ID NO: 766177 - DNA, 15 bp, Homo sapiens
cgggctgcctctctg

SEQ ID NO: 766178 - DNA, 15 bp, Homo sapiens
gggctgcctctctga

SEQ ID NO: 766179 - DNA, 15 bp, Homo sapiens
ggctgcctctctgag

SEQ ID NO: 766180 - DNA, 15 bp, Homo sapiens
gctgcctctctgagg

SEQ ID NO: 766181 - DNA, 15 bp, Homo sapiens
ctgcctctctgaggg

SEQ ID NO: 766182 - DNA, 15 bp, Homo sapiens
tgcctctctgagggc

SEQ ID NO: 766183 - DNA, 15 bp, Homo sapiens
gcctctctgagggca

SEQ ID NO: 766184 - DNA, 15 bp, Homo sapiens
cctctctgagggcag

SEQ ID NO: 766185 - DNA, 15 bp, Homo sapiens
ctctctgagggcagg

SEQ ID NO: 766186 - DNA, 15 bp, Homo sapiens
tctctgagggcagga

SEQ ID NO: 766187 - DNA, 15 bp, Homo sapiens
ctctgagggcaggag

SEQ ID NO: 766188 - DNA, 15 bp, Homo sapiens
tctgagggcaggagg

SEQ ID NO: 766189 - DNA, 15 bp, Homo sapiens
ctgagggcaggaggc

SEQ ID NO: 766190 - DNA, 15 bp, Homo sapiens
tgagggcaggaggcc

SEQ ID NO: 766191 - DNA, 15 bp, Homo sapiens
gagggcaggaggccc

SEQ ID NO: 766192 - DNA, 15 bp, Homo sapiens
agggcaggaggccct

SEQ ID NO: 766193 - DNA, 15 bp, Homo sapiens
gggcaggaggccctc

SEQ ID NO: 766194 - DNA, 15 bp, Homo sapiens
ggcaggaggccctct

SEQ ID NO: 766195 - DNA, 15 bp, Homo sapiens
gcaggaggccctctt

SEQ ID NO: 766196 - DNA, 15 bp, Homo sapiens
caggaggccctcttg

SEQ ID NO: 766197 - DNA, 15 bp, Homo sapiens
aggaggccctcttgc

SEQ ID NO: 766198 - DNA, 15 bp, Homo sapiens
ggaggccctcttgcc

SEQ ID NO: 766199 - DNA, 15 bp, Homo sapiens
gaggccctcttgcct

SEQ ID NO: 766200 - DNA, 15 bp, Homo sapiens
aggccctcttgcctg

SEQ ID NO: 766201 - DNA, 15 bp, Homo sapiens
ggccctcttgcctgc

SEQ ID NO: 766202 - DNA, 15 bp, Homo sapiens
gccctcttgcctgct

SEQ ID NO: 766203 - DNA, 15 bp, Homo sapiens
ccctcttgcctgctt

SEQ ID NO: 766204 - DNA, 15 bp, Homo sapiens
cctcttgcctgcttc

SEQ ID NO: 766205 - DNA, 15 bp, Homo sapiens
ctcttgcctgcttca

SEQ ID NO: 766206 - DNA, 15 bp, Homo sapiens
tcttgcctgcttcat

SEQ ID NO: 766207 - DNA, 15 bp, Homo sapiens
cttgcctgcttcatt

SEQ ID NO: 766208 - DNA, 15 bp, Homo sapiens
ttgcctgcttcattc

SEQ ID NO: 766209 - DNA, 15 bp, Homo sapiens
tgcctgcttcattcc

SEQ ID NO: 766210 - DNA, 15 bp, Homo sapiens
gcctgcttcattccc

SEQ ID NO: 766211 - DNA, 15 bp, Homo sapiens
cctgcttcattcccc

SEQ ID NO: 766212 - DNA, 15 bp, Homo sapiens
ctgcttcattcccca

SEQ ID NO: 766213 - DNA, 15 bp, Homo sapiens
tgcttcattccccac

SEQ ID NO: 766214 - DNA, 15 bp, Homo sapiens
gcttcattccccacc

SEQ ID NO: 766215 - DNA, 15 bp, Homo sapiens
cttcattccccaccc

SEQ ID NO: 766216 - DNA, 15 bp, Homo sapiens
ttcattccccacccc

SEQ ID NO: 766217 - DNA, 15 bp, Homo sapiens
tcattccccaccccg

SEQ ID NO: 766218 - DNA, 15 bp, Homo sapiens
cattccccaccccgg

SEQ ID NO: 766219 - DNA, 15 bp, Homo sapiens
attccccaccccggt

SEQ ID NO: 766220 - DNA, 15 bp, Homo sapiens
ttccccaccccggtt

SEQ ID NO: 766221 - DNA, 15 bp, Homo sapiens
tccccaccccggttt

SEQ ID NO: 766222 - DNA, 15 bp, Homo sapiens
ccccaccccggtttt

SEQ ID NO: 766223 - DNA, 15 bp, Homo sapiens
cccaccccggttttc

SEQ ID NO: 766224 - DNA, 15 bp, Homo sapiens
ccaccccggttttct

SEQ ID NO: 766225 - DNA, 15 bp, Homo sapiens
caccccggttttctc

SEQ ID NO: 766226 - DNA, 15 bp, Homo sapiens
accccggttttctcc

SEQ ID NO: 766227 - DNA, 15 bp, Homo sapiens
ccccggttttctcct

SEQ ID NO: 766228 - DNA, 15 bp, Homo sapiens
cccggttttctcctc

SEQ ID NO: 766229 - DNA, 15 bp, Homo sapiens
ccggttttctcctca

SEQ ID NO: 766230 - DNA, 15 bp, Homo sapiens
cggttttctcctcac

SEQ ID NO: 766231 - DNA, 15 bp, Homo sapiens
ggttttctcctcact

SEQ ID NO: 766232 - DNA, 15 bp, Homo sapiens
gttttctcctcactg

SEQ ID NO: 766233 - DNA, 15 bp, Homo sapiens
ttttctcctcactgc

SEQ ID NO: 766234 - DNA, 15 bp, Homo sapiens
tttctcctcactgcc

SEQ ID NO: 766235 - DNA, 15 bp, Homo sapiens
ttctcctcactgcct

SEQ ID NO: 766236 - DNA, 15 bp, Homo sapiens
tctcctcactgcctc

SEQ ID NO: 766237 - DNA, 15 bp, Homo sapiens
ctcctcactgcctca

SEQ ID NO: 766238 - DNA, 15 bp, Homo sapiens
tcctcactgcctcag

SEQ ID NO: 766239 - DNA, 15 bp, Homo sapiens
cctcactgcctcagc

SEQ ID NO: 766240 - DNA, 15 bp, Homo sapiens
ctcactgcctcagct

SEQ ID NO: 766241 - DNA, 15 bp, Homo sapiens
tcactgcctcagctg

SEQ ID NO: 766242 - DNA, 15 bp, Homo sapiens
cactgcctcagctgg

SEQ ID NO: 766243 - DNA, 15 bp, Homo sapiens
actgcctcagctggc

SEQ ID NO: 766244 - DNA, 15 bp, Homo sapiens
ctgcctcagctggca

SEQ ID NO: 766245 - DNA, 15 bp, Homo sapiens
tgcctcagctggcat

SEQ ID NO: 766246 - DNA, 15 bp, Homo sapiens
gcctcagctggcata

SEQ ID NO: 766247 - DNA, 15 bp, Homo sapiens
cctcagctggcatag

SEQ ID NO: 766248 - DNA, 15 bp, Homo sapiens
ctcagctggcatagt

SEQ ID NO: 766249 - DNA, 15 bp, Homo sapiens
tcagctggcatagtt

SEQ ID NO: 766250 - DNA, 15 bp, Homo sapiens
cagctggcatagttg

SEQ ID NO: 766251 - DNA, 15 bp, Homo sapiens
agctggcatagttgt

SEQ ID NO: 766252 - DNA, 15 bp, Homo sapiens
gctggcatagttgtg

SEQ ID NO: 766253 - DNA, 15 bp, Homo sapiens
ctggcatagttgtgc

SEQ ID NO: 766254 - DNA, 15 bp, Homo sapiens
tggcatagttgtgct

SEQ ID NO: 766255 - DNA, 15 bp, Homo sapiens
ggcatagttgtgctt

SEQ ID NO: 766256 - DNA, 15 bp, Homo sapiens
gcatagttgtgcttg

SEQ ID NO: 766257 - DNA, 15 bp, Homo sapiens
catagttgtgcttga

SEQ ID NO: 766258 - DNA, 15 bp, Homo sapiens
atagttgtgcttgat

SEQ ID NO: 766259 - DNA, 15 bp, Homo sapiens
tagttgtgcttgatt

SEQ ID NO: 766260 - DNA, 15 bp, Homo sapiens
agttgtgcttgattt

SEQ ID NO: 766261 - DNA, 15 bp, Homo sapiens
gttgtgcttgattta

SEQ ID NO: 766262 - DNA, 15 bp, Homo sapiens
ttgtgcttgatttag

SEQ ID NO: 766263 - DNA, 15 bp, Homo sapiens
tgtgcttgatttagc

SEQ ID NO: 766264 - DNA, 15 bp, Homo sapiens
gtgcttgatttagct

SEQ ID NO: 766265 - DNA, 15 bp, Homo sapiens
tgcttgatttagctc

SEQ ID NO: 766266 - DNA, 15 bp, Homo sapiens
gcttgatttagctca

SEQ ID NO: 766267 - DNA, 15 bp, Homo sapiens
cttgatttagctcaa

SEQ ID NO: 766268 - DNA, 15 bp, Homo sapiens
ttgatttagctcaag

SEQ ID NO: 766269 - DNA, 15 bp, Homo sapiens
tgatttagctcaagg

SEQ ID NO: 766270 - DNA, 15 bp, Homo sapiens
gatttagctcaagga

SEQ ID NO: 766271 - DNA, 15 bp, Homo sapiens
atttagctcaaggaa

SEQ ID NO: 766272 - DNA, 15 bp, Homo sapiens
tttagctcaaggaac

SEQ ID NO: 766273 - DNA, 15 bp, Homo sapiens
ttagctcaaggaaca

SEQ ID NO: 766274 - DNA, 15 bp, Homo sapiens
tagctcaaggaacaa

SEQ ID NO: 766275 - DNA, 15 bp, Homo sapiens
agctcaaggaacaaa

SEQ ID NO: 766276 - DNA, 15 bp, Homo sapiens
gctcaaggaacaaag

SEQ ID NO: 766277 - DNA, 15 bp, Homo sapiens
ctcaaggaacaaagt

SEQ ID NO: 766278 - DNA, 15 bp, Homo sapiens
tcaaggaacaaagta

SEQ ID NO: 766279 - DNA, 15 bp, Homo sapiens
caaggaacaaagtaa

SEQ ID NO: 766280 - DNA, 15 bp, Homo sapiens
aaggaacaaagtaag

SEQ ID NO: 766281 - DNA, 15 bp, Homo sapiens
aggaacaaagtaaga

SEQ ID NO: 766282 - DNA, 15 bp, Homo sapiens
ggaacaaagtaagag

SEQ ID NO: 766283 - DNA, 15 bp, Homo sapiens
gaacaaagtaagaga

SEQ ID NO: 766284 - DNA, 15 bp, Homo sapiens
aacaaagtaagagaa

SEQ ID NO: 766285 - DNA, 15 bp, Homo sapiens
acaaagtaagagaat

SEQ ID NO: 766286 - DNA, 15 bp, Homo sapiens
caaagtaagagaatc

SEQ ID NO: 766287 - DNA, 15 bp, Homo sapiens
aaagtaagagaatcc

SEQ ID NO: 766288 - DNA, 15 bp, Homo sapiens
aagtaagagaatcca

SEQ ID NO: 766289 - DNA, 15 bp, Homo sapiens
agtaagagaatccaa

SEQ ID NO: 766290 - DNA, 15 bp, Homo sapiens
gtaagagaatccaag

SEQ ID NO: 766291 - DNA, 15 bp, Homo sapiens
taagagaatccaagt

SEQ ID NO: 766292 - DNA, 15 bp, Homo sapiens
aagagaatccaagtt

SEQ ID NO: 766293 - DNA, 15 bp, Homo sapiens
agagaatccaagttt

SEQ ID NO: 766294 - DNA, 15 bp, Homo sapiens
gagaatccaagtttt

SEQ ID NO: 766295 - DNA, 15 bp, Homo sapiens
agaatccaagttttt

SEQ ID NO: 766296 - DNA, 15 bp, Homo sapiens
gaatccaagtttttg

SEQ ID NO: 766297 - DNA, 15 bp, Homo sapiens
aatccaagtttttgg

SEQ ID NO: 766298 - DNA, 15 bp, Homo sapiens
atccaagtttttgga

SEQ ID NO: 766299 - DNA, 15 bp, Homo sapiens
tccaagtttttggac

SEQ ID NO: 766300 - DNA, 15 bp, Homo sapiens
ccaagtttttggaca

SEQ ID NO: 766301 - DNA, 15 bp, Homo sapiens
caagtttttggacaa

SEQ ID NO: 766302 - DNA, 15 bp, Homo sapiens
aagtttttggacaaa

SEQ ID NO: 766303 - DNA, 15 bp, Homo sapiens
agtttttggacaaaa

SEQ ID NO: 766304 - DNA, 15 bp, Homo sapiens
gtttttggacaaaac

SEQ ID NO: 766305 - DNA, 15 bp, Homo sapiens
tttttggacaaaaca

SEQ ID NO: 766306 - DNA, 15 bp, Homo sapiens
ttttggacaaaacaa

SEQ ID NO: 766307 - DNA, 15 bp, Homo sapiens
tttggacaaaacaaa

SEQ ID NO: 766308 - DNA, 15 bp, Homo sapiens
ttggacaaaacaaat

SEQ ID NO: 766309 - DNA, 15 bp, Homo sapiens
tggacaaaacaaatg

SEQ ID NO: 766310 - DNA, 15 bp, Homo sapiens
ggacaaaacaaatgc

SEQ ID NO: 766311 - DNA, 15 bp, Homo sapiens
gacaaaacaaatgcc

SEQ ID NO: 766312 - DNA, 15 bp, Homo sapiens
acaaaacaaatgcct

SEQ ID NO: 766313 - DNA, 15 bp, Homo sapiens
caaaacaaatgccta

SEQ ID NO: 766314 - DNA, 15 bp, Homo sapiens
aaaacaaatgcctag

SEQ ID NO: 766315 - DNA, 15 bp, Homo sapiens
aaacaaatgcctaga

SEQ ID NO: 766316 - DNA, 15 bp, Homo sapiens
aacaaatgcctagaa

SEQ ID NO: 766317 - DNA, 15 bp, Homo sapiens
acaaatgcctagaaa

SEQ ID NO: 766318 - DNA, 15 bp, Homo sapiens
caaatgcctagaaat

SEQ ID NO: 766319 - DNA, 15 bp, Homo sapiens
aaatgcctagaaatt

SEQ ID NO: 766320 - DNA, 15 bp, Homo sapiens
aatgcctagaaattg

SEQ ID NO: 766321 - DNA, 15 bp, Homo sapiens
atgcctagaaattgt

SEQ ID NO: 766322 - DNA, 15 bp, Homo sapiens
tgcctagaaattgtg

SEQ ID NO: 766323 - DNA, 15 bp, Homo sapiens
gcctagaaattgtgc

SEQ ID NO: 766324 - DNA, 15 bp, Homo sapiens
cctagaaattgtgct

SEQ ID NO: 766325 - DNA, 15 bp, Homo sapiens
ctagaaattgtgctt

SEQ ID NO: 766326 - DNA, 15 bp, Homo sapiens
tagaaattgtgcttc

SEQ ID NO: 766327 - DNA, 15 bp, Homo sapiens
agaaattgtgcttct

SEQ ID NO: 766328 - DNA, 15 bp, Homo sapiens
gaaattgtgcttcta

SEQ ID NO: 766329 - DNA, 15 bp, Homo sapiens
aaattgtgcttctaa

SEQ ID NO: 766330 - DNA, 15 bp, Homo sapiens
aattgtgcttctaaa

SEQ ID NO: 766331 - DNA, 15 bp, Homo sapiens
attgtgcttctaaag

SEQ ID NO: 766332 - DNA, 15 bp, Homo sapiens
ttgtgcttctaaaga

SEQ ID NO: 766333 - DNA, 15 bp, Homo sapiens
tgtgcttctaaagaa

SEQ ID NO: 766334 - DNA, 15 bp, Homo sapiens
gtgcttctaaagaag

SEQ ID NO: 766335 - DNA, 15 bp, Homo sapiens
tgcttctaaagaagt

SEQ ID NO: 766336 - DNA, 15 bp, Homo sapiens
gcttctaaagaagta

SEQ ID NO: 766337 - DNA, 15 bp, Homo sapiens
cttctaaagaagtag

SEQ ID NO: 766338 - DNA, 15 bp, Homo sapiens
ttctaaagaagtagt

SEQ ID NO: 766339 - DNA, 15 bp, Homo sapiens
tctaaagaagtagtt

SEQ ID NO: 766340 - DNA, 15 bp, Homo sapiens
ctaaagaagtagttt

SEQ ID NO: 766341 - DNA, 15 bp, Homo sapiens
taaagaagtagtttt

SEQ ID NO: 766342 - DNA, 15 bp, Homo sapiens
aaagaagtagttttt

SEQ ID NO: 766343 - DNA, 15 bp, Homo sapiens
aagaagtagtttttg

SEQ ID NO: 766344 - DNA, 15 bp, Homo sapiens
agaagtagtttttga

SEQ ID NO: 766345 - DNA, 15 bp, Homo sapiens
gaagtagtttttgat

SEQ ID NO: 766346 - DNA, 15 bp, Homo sapiens
aagtagtttttgatg

SEQ ID NO: 766347 - DNA, 15 bp, Homo sapiens
agtagtttttgatgg

SEQ ID NO: 766348 - DNA, 15 bp, Homo sapiens
gtagtttttgatggc

SEQ ID NO: 766349 - DNA, 15 bp, Homo sapiens
tagtttttgatggct

SEQ ID NO: 766350 - DNA, 15 bp, Homo sapiens
agtttttgatggctc

SEQ ID NO: 766351 - DNA, 15 bp, Homo sapiens
gtttttgatggctct

SEQ ID NO: 766352 - DNA, 15 bp, Homo sapiens
tttttgatggctctt

SEQ ID NO: 766353 - DNA, 15 bp, Homo sapiens
ttttgatggctcttg

SEQ ID NO: 766354 - DNA, 15 bp, Homo sapiens
tttgatggctcttgt

SEQ ID NO: 766355 - DNA, 15 bp, Homo sapiens
ttgatggctcttgta

SEQ ID NO: 766356 - DNA, 15 bp, Homo sapiens
tgatggctcttgtag

SEQ ID NO: 766357 - DNA, 15 bp, Homo sapiens
gatggctcttgtaga

SEQ ID NO: 766358 - DNA, 15 bp, Homo sapiens
atggctcttgtagag

SEQ ID NO: 766359 - DNA, 15 bp, Homo sapiens
tggctcttgtagaga

SEQ ID NO: 766360 - DNA, 15 bp, Homo sapiens
ggctcttgtagagaa

SEQ ID NO: 766361 - DNA, 15 bp, Homo sapiens
gctcttgtagagaaa

SEQ ID NO: 766362 - DNA, 15 bp, Homo sapiens
ctcttgtagagaaac

SEQ ID NO: 766363 - DNA, 15 bp, Homo sapiens
tcttgtagagaaacc

SEQ ID NO: 766364 - DNA, 15 bp, Homo sapiens
cttgtagagaaaccc

SEQ ID NO: 766365 - DNA, 15 bp, Homo sapiens
ttgtagagaaaccct

SEQ ID NO: 766366 - DNA, 15 bp, Homo sapiens
tgtagagaaaccctg

SEQ ID NO: 766367 - DNA, 15 bp, Homo sapiens
gtagagaaaccctgg

SEQ ID NO: 766368 - DNA, 15 bp, Homo sapiens
tagagaaaccctggt

SEQ ID NO: 766369 - DNA, 15 bp, Homo sapiens
agagaaaccctggtt

SEQ ID NO: 766370 - DNA, 15 bp, Homo sapiens
gagaaaccctggttg

SEQ ID NO: 766371 - DNA, 15 bp, Homo sapiens
agaaaccctggttgc

SEQ ID NO: 766372 - DNA, 15 bp, Homo sapiens
gaaaccctggttgct

SEQ ID NO: 766373 - DNA, 15 bp, Homo sapiens
aaaccctggttgctt

SEQ ID NO: 766374 - DNA, 15 bp, Homo sapiens
aaccctggttgcttg

SEQ ID NO: 766375 - DNA, 15 bp, Homo sapiens
accctggttgcttga

SEQ ID NO: 766376 - DNA, 15 bp, Homo sapiens
ccctggttgcttgaa

SEQ ID NO: 766377 - DNA, 15 bp, Homo sapiens
cctggttgcttgaaa

SEQ ID NO: 766378 - DNA, 15 bp, Homo sapiens
ctggttgcttgaaat

SEQ ID NO: 766379 - DNA, 15 bp, Homo sapiens
tggttgcttgaaatg

SEQ ID NO: 766380 - DNA, 15 bp, Homo sapiens
ggttgcttgaaatga

SEQ ID NO: 766381 - DNA, 15 bp, Homo sapiens
gttgcttgaaatgag

SEQ ID NO: 766382 - DNA, 15 bp, Homo sapiens
ttgcttgaaatgagg

SEQ ID NO: 766383 - DNA, 15 bp, Homo sapiens
tgcttgaaatgaggt

SEQ ID NO: 766384 - DNA, 15 bp, Homo sapiens
gcttgaaatgaggtg

SEQ ID NO: 766385 - DNA, 15 bp, Homo sapiens
cttgaaatgaggtga

SEQ ID NO: 766386 - DNA, 15 bp, Homo sapiens
ttgaaatgaggtgag

SEQ ID NO: 766387 - DNA, 15 bp, Homo sapiens
tgaaatgaggtgaga

SEQ ID NO: 766388 - DNA, 15 bp, Homo sapiens
gaaatgaggtgagag

SEQ ID NO: 766389 - DNA, 15 bp, Homo sapiens
aaatgaggtgagagt

SEQ ID NO: 766390 - DNA, 15 bp, Homo sapiens
aatgaggtgagagtt

SEQ ID NO: 766391 - DNA, 15 bp, Homo sapiens
atgaggtgagagttt

SEQ ID NO: 766392 - DNA, 15 bp, Homo sapiens
tgaggtgagagtttc

SEQ ID NO: 766393 - DNA, 15 bp, Homo sapiens
gaggtgagagtttcc

SEQ ID NO: 766394 - DNA, 15 bp, Homo sapiens
aggtgagagtttccc

SEQ ID NO: 766395 - DNA, 15 bp, Homo sapiens
ggtgagagtttccca

SEQ ID NO: 766396 - DNA, 15 bp, Homo sapiens
gtgagagtttcccaa

SEQ ID NO: 766397 - DNA, 15 bp, Homo sapiens
tgagagtttcccaag

SEQ ID NO: 766398 - DNA, 15 bp, Homo sapiens
gagagtttcccaagt

SEQ ID NO: 766399 - DNA, 15 bp, Homo sapiens
agagtttcccaagtt

SEQ ID NO: 766400 - DNA, 15 bp, Homo sapiens
gagtttcccaagtta

SEQ ID NO: 766401 - DNA, 15 bp, Homo sapiens
agtttcccaagttag

SEQ ID NO: 766402 - DNA, 15 bp, Homo sapiens
gtttcccaagttaga

SEQ ID NO: 766403 - DNA, 15 bp, Homo sapiens
tttcccaagttagac

SEQ ID NO: 766404 - DNA, 15 bp, Homo sapiens
ttcccaagttagacc

SEQ ID NO: 766405 - DNA, 15 bp, Homo sapiens
tcccaagttagaccc

SEQ ID NO: 766406 - DNA, 15 bp, Homo sapiens
cccaagttagacccc

SEQ ID NO: 766407 - DNA, 15 bp, Homo sapiens
ccaagttagacccca

SEQ ID NO: 766408 - DNA, 15 bp, Homo sapiens
caagttagaccccag

SEQ ID NO: 766409 - DNA, 15 bp, Homo sapiens
aagttagaccccagt

SEQ ID NO: 766410 - DNA, 15 bp, Homo sapiens
agttagaccccagta

SEQ ID NO: 766411 - DNA, 15 bp, Homo sapiens
gttagaccccagtaa

SEQ ID NO: 766412 - DNA, 15 bp, Homo sapiens
ttagaccccagtaag

SEQ ID NO: 766413 - DNA, 15 bp, Homo sapiens
tagaccccagtaaga

SEQ ID NO: 766414 - DNA, 15 bp, Homo sapiens
agaccccagtaagat

SEQ ID NO: 766415 - DNA, 15 bp, Homo sapiens
gaccccagtaagatg

SEQ ID NO: 766416 - DNA, 15 bp, Homo sapiens
accccagtaagatgg

SEQ ID NO: 766417 - DNA, 15 bp, Homo sapiens
ccccagtaagatggc

SEQ ID NO: 766418 - DNA, 15 bp, Homo sapiens
cccagtaagatggcg

SEQ ID NO: 766419 - DNA, 15 bp, Homo sapiens
ccagtaagatggcgg

SEQ ID NO: 766420 - DNA, 15 bp, Homo sapiens
cagtaagatggcgga

SEQ ID NO: 766421 - DNA, 15 bp, Homo sapiens
agtaagatggcggag

SEQ ID NO: 766422 - DNA, 15 bp, Homo sapiens
gtaagatggcggagc

SEQ ID NO: 766423 - DNA, 15 bp, Homo sapiens
taagatggcggagcc

SEQ ID NO: 766424 - DNA, 15 bp, Homo sapiens
aagatggcggagcct

SEQ ID NO: 766425 - DNA, 15 bp, Homo sapiens
agatggcggagcctg

SEQ ID NO: 766426 - DNA, 15 bp, Homo sapiens
gatggcggagcctgc

SEQ ID NO: 766427 - DNA, 15 bp, Homo sapiens
atggcggagcctgca

SEQ ID NO: 766428 - DNA, 15 bp, Homo sapiens
tggcggagcctgcac

SEQ ID NO: 766429 - DNA, 15 bp, Homo sapiens
ggcggagcctgcaca

SEQ ID NO: 766430 - DNA, 15 bp, Homo sapiens
gcggagcctgcacac

SEQ ID NO: 766431 - DNA, 15 bp, Homo sapiens
cggagcctgcacaca

SEQ ID NO: 766432 - DNA, 15 bp, Homo sapiens
ggagcctgcacacag

SEQ ID NO: 766433 - DNA, 15 bp, Homo sapiens
gagcctgcacacagg

SEQ ID NO: 766434 - DNA, 15 bp, Homo sapiens
agcctgcacacaggc

SEQ ID NO: 766435 - DNA, 15 bp, Homo sapiens
gcctgcacacaggct

SEQ ID NO: 766436 - DNA, 15 bp, Homo sapiens
cctgcacacaggctt

SEQ ID NO: 766437 - DNA, 15 bp, Homo sapiens
ctgcacacaggcttt

SEQ ID NO: 766438 - DNA, 15 bp, Homo sapiens
tgcacacaggcttta

SEQ ID NO: 766439 - DNA, 15 bp, Homo sapiens
gcacacaggctttaa

SEQ ID NO: 766440 - DNA, 15 bp, Homo sapiens
cacacaggctttaaa

SEQ ID NO: 766441 - DNA, 15 bp, Homo sapiens
acacaggctttaaaa

SEQ ID NO: 766442 - DNA, 15 bp, Homo sapiens
cacaggctttaaaaa

SEQ ID NO: 766443 - DNA, 15 bp, Homo sapiens
acaggctttaaaaat

SEQ ID NO: 766444 - DNA, 15 bp, Homo sapiens
caggctttaaaaatg

SEQ ID NO: 766445 - DNA, 15 bp, Homo sapiens
aggctttaaaaatga

SEQ ID NO: 766446 - DNA, 15 bp, Homo sapiens
ggctttaaaaatgat

SEQ ID NO: 766447 - DNA, 15 bp, Homo sapiens
gctttaaaaatgatt

SEQ ID NO: 766448 - DNA, 15 bp, Homo sapiens
ctttaaaaatgatta

SEQ ID NO: 766449 - DNA, 15 bp, Homo sapiens
tttaaaaatgattaa

SEQ ID NO: 766450 - DNA, 15 bp, Homo sapiens
ttaaaaatgattaaa

SEQ ID NO: 766451 - DNA, 15 bp, Homo sapiens
taaaaatgattaaat

SEQ ID NO: 766452 - DNA, 15 bp, Homo sapiens
aaaaatgattaaatt

SEQ ID NO: 766453 - DNA, 15 bp, Homo sapiens
aaaatgattaaatta

SEQ ID NO: 766454 - DNA, 15 bp, Homo sapiens
aaatgattaaattac

SEQ ID NO: 766455 - DNA, 15 bp, Homo sapiens
aatgattaaattact

SEQ ID NO: 766456 - DNA, 15 bp, Homo sapiens
atgattaaattactc

SEQ ID NO: 766457 - DNA, 15 bp, Homo sapiens
tgattaaattactcg

SEQ ID NO: 766458 - DNA, 15 bp, Homo sapiens
gattaaattactcgt

SEQ ID NO: 766459 - DNA, 15 bp, Homo sapiens
attaaattactcgtt

SEQ ID NO: 766460 - DNA, 15 bp, Homo sapiens
ttaaattactcgttc

SEQ ID NO: 766461 - DNA, 15 bp, Homo sapiens
taaattactcgttca

SEQ ID NO: 766462 - DNA, 15 bp, Homo sapiens
aaattactcgttcag

SEQ ID NO: 766463 - DNA, 15 bp, Homo sapiens
aattactcgttcagt

SEQ ID NO: 766464 - DNA, 15 bp, Homo sapiens
attactcgttcagta

SEQ ID NO: 766465 - DNA, 15 bp, Homo sapiens
ttactcgttcagtat

SEQ ID NO: 766466 - DNA, 15 bp, Homo sapiens
tactcgttcagtatg

SEQ ID NO: 766467 - DNA, 15 bp, Homo sapiens
actcgttcagtatga

SEQ ID NO: 766468 - DNA, 15 bp, Homo sapiens
ctcgttcagtatgat

SEQ ID NO: 766469 - DNA, 15 bp, Homo sapiens
tcgttcagtatgatc

SEQ ID NO: 766470 - DNA, 15 bp, Homo sapiens
cgttcagtatgatca

SEQ ID NO: 766471 - DNA, 15 bp, Homo sapiens
gttcagtatgatcag

SEQ ID NO: 766472 - DNA, 15 bp, Homo sapiens
ttcagtatgatcagg

SEQ ID NO: 766473 - DNA, 15 bp, Homo sapiens
tcagtatgatcagga

SEQ ID NO: 766474 - DNA, 15 bp, Homo sapiens
cagtatgatcaggat

SEQ ID NO: 766475 - DNA, 15 bp, Homo sapiens
agtatgatcaggatt

SEQ ID NO: 766476 - DNA, 15 bp, Homo sapiens
gtatgatcaggatta

SEQ ID NO: 766477 - DNA, 15 bp, Homo sapiens
tatgatcaggattat

SEQ ID NO: 766478 - DNA, 15 bp, Homo sapiens
atgatcaggattatg

SEQ ID NO: 766479 - DNA, 15 bp, Homo sapiens
tgatcaggattatgg

SEQ ID NO: 766480 - DNA, 15 bp, Homo sapiens
gatcaggattatggt

SEQ ID NO: 766481 - DNA, 15 bp, Homo sapiens
atcaggattatggtc

SEQ ID NO: 766482 - DNA, 15 bp, Homo sapiens
tcaggattatggtca

SEQ ID NO: 766483 - DNA, 15 bp, Homo sapiens
caggattatggtcaa

SEQ ID NO: 766484 - DNA, 15 bp, Homo sapiens
aggattatggtcaag

SEQ ID NO: 766485 - DNA, 15 bp, Homo sapiens
ggattatggtcaagt

SEQ ID NO: 766486 - DNA, 15 bp, Homo sapiens
gattatggtcaagtg

SEQ ID NO: 766487 - DNA, 15 bp, Homo sapiens
attatggtcaagtgc

SEQ ID NO: 766488 - DNA, 15 bp, Homo sapiens
ttatggtcaagtgcc

SEQ ID NO: 766489 - DNA, 15 bp, Homo sapiens
tatggtcaagtgcct

SEQ ID NO: 766490 - DNA, 15 bp, Homo sapiens
atggtcaagtgcctt

SEQ ID NO: 766491 - DNA, 15 bp, Homo sapiens
tggtcaagtgccttc

SEQ ID NO: 766492 - DNA, 15 bp, Homo sapiens
ggtcaagtgccttct

SEQ ID NO: 766493 - DNA, 15 bp, Homo sapiens
gtcaagtgccttctt

SEQ ID NO: 766494 - DNA, 15 bp, Homo sapiens
tcaagtgccttcttt

SEQ ID NO: 766495 - DNA, 15 bp, Homo sapiens
caagtgccttctttc

SEQ ID NO: 766496 - DNA, 15 bp, Homo sapiens
aagtgccttctttct

SEQ ID NO: 766497 - DNA, 15 bp, Homo sapiens
agtgccttctttctg

SEQ ID NO: 766498 - DNA, 15 bp, Homo sapiens
gtgccttctttctgc

SEQ ID NO: 766499 - DNA, 15 bp, Homo sapiens
tgccttctttctgct

SEQ ID NO: 766500 - DNA, 15 bp, Homo sapiens
gccttctttctgctc

SEQ ID NO: 766501 - DNA, 15 bp, Homo sapiens
ccttctttctgctct

SEQ ID NO: 766502 - DNA, 15 bp, Homo sapiens
cttctttctgctctt

SEQ ID NO: 766503 - DNA, 15 bp, Homo sapiens
ttctttctgctcttc

SEQ ID NO: 766504 - DNA, 15 bp, Homo sapiens
tctttctgctcttct

SEQ ID NO: 766505 - DNA, 15 bp, Homo sapiens
ctttctgctcttctg

SEQ ID NO: 766506 - DNA, 15 bp, Homo sapiens
tttctgctcttctgt

SEQ ID NO: 766507 - DNA, 15 bp, Homo sapiens
ttctgctcttctgtc

SEQ ID NO: 766508 - DNA, 15 bp, Homo sapiens
tctgctcttctgtct

SEQ ID NO: 766509 - DNA, 15 bp, Homo sapiens
ctgctcttctgtctg

SEQ ID NO: 766510 - DNA, 15 bp, Homo sapiens
tgctcttctgtctga

SEQ ID NO: 766511 - DNA, 15 bp, Homo sapiens
gctcttctgtctgac

SEQ ID NO: 766512 - DNA, 15 bp, Homo sapiens
ctcttctgtctgact

SEQ ID NO: 766513 - DNA, 15 bp, Homo sapiens
tcttctgtctgactt

SEQ ID NO: 766514 - DNA, 15 bp, Homo sapiens
cttctgtctgacttg

SEQ ID NO: 766515 - DNA, 15 bp, Homo sapiens
ttctgtctgacttgc

SEQ ID NO: 766516 - DNA, 15 bp, Homo sapiens
tctgtctgacttgca

SEQ ID NO: 766517 - DNA, 15 bp, Homo sapiens
ctgtctgacttgcag

SEQ ID NO: 766518 - DNA, 15 bp, Homo sapiens
tgtctgacttgcagc

SEQ ID NO: 766519 - DNA, 15 bp, Homo sapiens
gtctgacttgcagct

SEQ ID NO: 766520 - DNA, 15 bp, Homo sapiens
tctgacttgcagcta

SEQ ID NO: 766521 - DNA, 15 bp, Homo sapiens
ctgacttgcagctaa

SEQ ID NO: 766522 - DNA, 15 bp, Homo sapiens
tgacttgcagctaaa

SEQ ID NO: 766523 - DNA, 15 bp, Homo sapiens
gacttgcagctaaaa

SEQ ID NO: 766524 - DNA, 15 bp, Homo sapiens
acttgcagctaaaaa

SEQ ID NO: 766525 - DNA, 15 bp, Homo sapiens
cttgcagctaaaaat

SEQ ID NO: 766526 - DNA, 15 bp, Homo sapiens
ttgcagctaaaaata

SEQ ID NO: 766527 - DNA, 15 bp, Homo sapiens
tgcagctaaaaataa

SEQ ID NO: 766528 - DNA, 15 bp, Homo sapiens
gcagctaaaaataaa

SEQ ID NO: 766529 - DNA, 15 bp, Homo sapiens
cagctaaaaataaaa

SEQ ID NO: 766530 - DNA, 15 bp, Homo sapiens
agctaaaaataaaag

SEQ ID NO: 766531 - DNA, 15 bp, Homo sapiens
gctaaaaataaaagt

SEQ ID NO: 766532 - DNA, 15 bp, Homo sapiens
ctaaaaataaaagtc

SEQ ID NO: 766533 - DNA, 15 bp, Homo sapiens
taaaaataaaagtca

SEQ ID NO: 766534 - DNA, 15 bp, Homo sapiens
aaaaataaaagtcag

SEQ ID NO: 766535 - DNA, 15 bp, Homo sapiens
aaaataaaagtcagg

SEQ ID NO: 766536 - DNA, 15 bp, Homo sapiens
aaataaaagtcagga

SEQ ID NO: 766537 - DNA, 15 bp, Homo sapiens
aataaaagtcaggaa

SEQ ID NO: 766538 - DNA, 15 bp, Homo sapiens
ataaaagtcaggaat

SEQ ID NO: 766539 - DNA, 15 bp, Homo sapiens
taaaagtcaggaatt

SEQ ID NO: 766540 - DNA, 15 bp, Homo sapiens
aaaagtcaggaatta

SEQ ID NO: 766541 - DNA, 15 bp, Homo sapiens
aaagtcaggaattag

SEQ ID NO: 766542 - DNA, 15 bp, Homo sapiens
aagtcaggaattaga

SEQ ID NO: 766543 - DNA, 15 bp, Homo sapiens
agtcaggaattagat

SEQ ID NO: 766544 - DNA, 15 bp, Homo sapiens
gtcaggaattagatt

SEQ ID NO: 766545 - DNA, 15 bp, Homo sapiens
tcaggaattagattc

SEQ ID NO: 766546 - DNA, 15 bp, Homo sapiens
caggaattagattct

SEQ ID NO: 766547 - DNA, 15 bp, Homo sapiens
aggaattagattctt

SEQ ID NO: 766548 - DNA, 15 bp, Homo sapiens
ggaattagattcttc

SEQ ID NO: 766549 - DNA, 15 bp, Homo sapiens
gaattagattcttct

SEQ ID NO: 766550 - DNA, 15 bp, Homo sapiens
aattagattcttctt

SEQ ID NO: 766551 - DNA, 15 bp, Homo sapiens
attagattcttcttt

SEQ ID NO: 766552 - DNA, 15 bp, Homo sapiens
ttagattcttctttt

SEQ ID NO: 766553 - DNA, 15 bp, Homo sapiens
tagattcttcttttt

SEQ ID NO: 766554 - DNA, 15 bp, Homo sapiens
agattcttctttttc

SEQ ID NO: 766555 - DNA, 15 bp, Homo sapiens
gattcttctttttct

SEQ ID NO: 766556 - DNA, 15 bp, Homo sapiens
attcttctttttctt

SEQ ID NO: 766557 - DNA, 15 bp, Homo sapiens
ttcttctttttcttc

SEQ ID NO: 766558 - DNA, 15 bp, Homo sapiens
tcttctttttcttct

SEQ ID NO: 766559 - DNA, 15 bp, Homo sapiens
cttctttttcttctc

SEQ ID NO: 766560 - DNA, 15 bp, Homo sapiens
ttctttttcttctcc

SEQ ID NO: 766561 - DNA, 15 bp, Homo sapiens
tctttttcttctcca

SEQ ID NO: 766562 - DNA, 15 bp, Homo sapiens
ctttttcttctccac

SEQ ID NO: 766563 - DNA, 15 bp, Homo sapiens
tttttcttctccact

SEQ ID NO: 766564 - DNA, 15 bp, Homo sapiens
ttttcttctccactg

SEQ ID NO: 766565 - DNA, 15 bp, Homo sapiens
tttcttctccactga

SEQ ID NO: 766566 - DNA, 15 bp, Homo sapiens
ttcttctccactgaa

SEQ ID NO: 766567 - DNA, 15 bp, Homo sapiens
tcttctccactgaag

SEQ ID NO: 766568 - DNA, 15 bp, Homo sapiens
cttctccactgaaga

SEQ ID NO: 766569 - DNA, 15 bp, Homo sapiens
ttctccactgaagag

SEQ ID NO: 766570 - DNA, 15 bp, Homo sapiens
tctccactgaagagc

SEQ ID NO: 766571 - DNA, 15 bp, Homo sapiens
ctccactgaagagca

SEQ ID NO: 766572 - DNA, 15 bp, Homo sapiens
tccactgaagagcac

SEQ ID NO: 766573 - DNA, 15 bp, Homo sapiens
ccactgaagagcacc

SEQ ID NO: 766574 - DNA, 15 bp, Homo sapiens
cactgaagagcaccc

SEQ ID NO: 766575 - DNA, 15 bp, Homo sapiens
actgaagagcaccct

SEQ ID NO: 766576 - DNA, 15 bp, Homo sapiens
ctgaagagcaccctt

SEQ ID NO: 766577 - DNA, 15 bp, Homo sapiens
tgaagagcacccttt

SEQ ID NO: 766578 - DNA, 15 bp, Homo sapiens
gaagagcaccctttg

SEQ ID NO: 766579 - DNA, 15 bp, Homo sapiens
aagagcaccctttgt

SEQ ID NO: 766580 - DNA, 15 bp, Homo sapiens
agagcaccctttgtg

SEQ ID NO: 766581 - DNA, 15 bp, Homo sapiens
gagcaccctttgtgg

SEQ ID NO: 766582 - DNA, 15 bp, Homo sapiens
agcaccctttgtggt

SEQ ID NO: 766583 - DNA, 15 bp, Homo sapiens
gcaccctttgtggtc

SEQ ID NO: 766584 - DNA, 15 bp, Homo sapiens
caccctttgtggtcg

SEQ ID NO: 766585 - DNA, 15 bp, Homo sapiens
accctttgtggtcgc

SEQ ID NO: 766586 - DNA, 15 bp, Homo sapiens
ccctttgtggtcgct

SEQ ID NO: 766587 - DNA, 15 bp, Homo sapiens
cctttgtggtcgctg

SEQ ID NO: 766588 - DNA, 15 bp, Homo sapiens
ctttgtggtcgctgg

SEQ ID NO: 766589 - DNA, 15 bp, Homo sapiens
tttgtggtcgctggc

SEQ ID NO: 766590 - DNA, 15 bp, Homo sapiens
ttgtggtcgctggcg

SEQ ID NO: 766591 - DNA, 15 bp, Homo sapiens
tgtggtcgctggcgc

SEQ ID NO: 766592 - DNA, 15 bp, Homo sapiens
gtggtcgctggcgct

SEQ ID NO: 766593 - DNA, 15 bp, Homo sapiens
tggtcgctggcgctg

SEQ ID NO: 766594 - DNA, 15 bp, Homo sapiens
ggtcgctggcgctgg

SEQ ID NO: 766595 - DNA, 15 bp, Homo sapiens
gtcgctggcgctggt

SEQ ID NO: 766596 - DNA, 15 bp, Homo sapiens
tcgctggcgctggtt

SEQ ID NO: 766597 - DNA, 15 bp, Homo sapiens
cgctggcgctggtta

SEQ ID NO: 766598 - DNA, 15 bp, Homo sapiens
gctggcgctggttag

SEQ ID NO: 766599 - DNA, 15 bp, Homo sapiens
ctggcgctggttagg

SEQ ID NO: 766600 - DNA, 15 bp, Homo sapiens
tggcgctggttagga

SEQ ID NO: 766601 - DNA, 15 bp, Homo sapiens
ggcgctggttaggag

SEQ ID NO: 766602 - DNA, 15 bp, Homo sapiens
gcgctggttaggagg

SEQ ID NO: 766603 - DNA, 15 bp, Homo sapiens
cgctggttaggagga

SEQ ID NO: 766604 - DNA, 15 bp, Homo sapiens
gctggttaggaggag

SEQ ID NO: 766605 - DNA, 15 bp, Homo sapiens
ctggttaggaggaga

SEQ ID NO: 766606 - DNA, 15 bp, Homo sapiens
tggttaggaggagat

SEQ ID NO: 766607 - DNA, 15 bp, Homo sapiens
ggttaggaggagatc

SEQ ID NO: 766608 - DNA, 15 bp, Homo sapiens
gttaggaggagatcc

SEQ ID NO: 766609 - DNA, 15 bp, Homo sapiens
ttaggaggagatccc

SEQ ID NO: 766610 - DNA, 15 bp, Homo sapiens
taggaggagatcccc

SEQ ID NO: 766611 - DNA, 15 bp, Homo sapiens
aggaggagatcccct

SEQ ID NO: 766612 - DNA, 15 bp, Homo sapiens
ggaggagatcccctg

SEQ ID NO: 766613 - DNA, 15 bp, Homo sapiens
gaggagatcccctgc

SEQ ID NO: 766614 - DNA, 15 bp, Homo sapiens
aggagatcccctgcc

SEQ ID NO: 766615 - DNA, 15 bp, Homo sapiens
ggagatcccctgccc

SEQ ID NO: 766616 - DNA, 15 bp, Homo sapiens
gagatcccctgccca

SEQ ID NO: 766617 - DNA, 15 bp, Homo sapiens
agatcccctgcccag

SEQ ID NO: 766618 - DNA, 15 bp, Homo sapiens
gatcccctgcccaga

SEQ ID NO: 766619 - DNA, 15 bp, Homo sapiens
atcccctgcccagag

SEQ ID NO: 766620 - DNA, 15 bp, Homo sapiens
tcccctgcccagagc

SEQ ID NO: 766621 - DNA, 15 bp, Homo sapiens
cccctgcccagagcc

SEQ ID NO: 766622 - DNA, 15 bp, Homo sapiens
ccctgcccagagccc

SEQ ID NO: 766623 - DNA, 15 bp, Homo sapiens
cctgcccagagccct

SEQ ID NO: 766624 - DNA, 15 bp, Homo sapiens
ctgcccagagccctc

SEQ ID NO: 766625 - DNA, 15 bp, Homo sapiens
tgcccagagccctca

SEQ ID NO: 766626 - DNA, 15 bp, Homo sapiens
gcccagagccctcat

SEQ ID NO: 766627 - DNA, 15 bp, Homo sapiens
cccagagccctcatg

SEQ ID NO: 766628 - DNA, 15 bp, Homo sapiens
ccagagccctcatgt

SEQ ID NO: 766629 - DNA, 15 bp, Homo sapiens
cagagccctcatgtg

SEQ ID NO: 766630 - DNA, 15 bp, Homo sapiens
agagccctcatgtgg

SEQ ID NO: 766631 - DNA, 15 bp, Homo sapiens
gagccctcatgtggg

SEQ ID NO: 766632 - DNA, 15 bp, Homo sapiens
agccctcatgtgggg

SEQ ID NO: 766633 - DNA, 15 bp, Homo sapiens
gccctcatgtgggga

SEQ ID NO: 766634 - DNA, 15 bp, Homo sapiens
ccctcatgtggggac

SEQ ID NO: 766635 - DNA, 15 bp, Homo sapiens
cctcatgtggggaca

SEQ ID NO: 766636 - DNA, 15 bp, Homo sapiens
ctcatgtggggacag

SEQ ID NO: 766637 - DNA, 15 bp, Homo sapiens
tcatgtggggacagg

SEQ ID NO: 766638 - DNA, 15 bp, Homo sapiens
catgtggggacagga

SEQ ID NO: 766639 - DNA, 15 bp, Homo sapiens
atgtggggacaggat

SEQ ID NO: 766640 - DNA, 15 bp, Homo sapiens
tgtggggacaggatc

SEQ ID NO: 766641 - DNA, 15 bp, Homo sapiens
gtggggacaggatct

SEQ ID NO: 766642 - DNA, 15 bp, Homo sapiens
tggggacaggatctt

SEQ ID NO: 766643 - DNA, 15 bp, Homo sapiens
ggggacaggatcttc

SEQ ID NO: 766644 - DNA, 15 bp, Homo sapiens
gggacaggatcttcc

SEQ ID NO: 766645 - DNA, 15 bp, Homo sapiens
ggacaggatcttccg

SEQ ID NO: 766646 - DNA, 15 bp, Homo sapiens
gacaggatcttccgg

SEQ ID NO: 766647 - DNA, 15 bp, Homo sapiens
acaggatcttccggc

SEQ ID NO: 766648 - DNA, 15 bp, Homo sapiens
caggatcttccggca

SEQ ID NO: 766649 - DNA, 15 bp, Homo sapiens
aggatcttccggcag

SEQ ID NO: 766650 - DNA, 15 bp, Homo sapiens
ggatcttccggcagc

SEQ ID NO: 766651 - DNA, 15 bp, Homo sapiens
gatcttccggcagca

SEQ ID NO: 766652 - DNA, 15 bp, Homo sapiens
atcttccggcagcac

SEQ ID NO: 766653 - DNA, 15 bp, Homo sapiens
tcttccggcagcact

SEQ ID NO: 766654 - DNA, 15 bp, Homo sapiens
cttccggcagcactg

SEQ ID NO: 766655 - DNA, 15 bp, Homo sapiens
ttccggcagcactgg

SEQ ID NO: 766656 - DNA, 15 bp, Homo sapiens
tccggcagcactggg

SEQ ID NO: 766657 - DNA, 15 bp, Homo sapiens
ccggcagcactgggt

SEQ ID NO: 766658 - DNA, 15 bp, Homo sapiens
cggcagcactgggtg

SEQ ID NO: 766659 - DNA, 15 bp, Homo sapiens
ggcagcactgggtgt

SEQ ID NO: 766660 - DNA, 15 bp, Homo sapiens
gcagcactgggtgtt

SEQ ID NO: 766661 - DNA, 15 bp, Homo sapiens
cagcactgggtgttc

SEQ ID NO: 766662 - DNA, 15 bp, Homo sapiens
agcactgggtgttca

SEQ ID NO: 766663 - DNA, 15 bp, Homo sapiens
gcactgggtgttcaa

SEQ ID NO: 766664 - DNA, 15 bp, Homo sapiens
cactgggtgttcaag

SEQ ID NO: 766665 - DNA, 15 bp, Homo sapiens
actgggtgttcaagg

SEQ ID NO: 766666 - DNA, 15 bp, Homo sapiens
ctgggtgttcaaggt

SEQ ID NO: 766667 - DNA, 15 bp, Homo sapiens
tgggtgttcaaggta

SEQ ID NO: 766668 - DNA, 15 bp, Homo sapiens
gggtgttcaaggtag

SEQ ID NO: 766669 - DNA, 15 bp, Homo sapiens
ggtgttcaaggtagg

SEQ ID NO: 766670 - DNA, 15 bp, Homo sapiens
gtgttcaaggtaggg

SEQ ID NO: 766671 - DNA, 15 bp, Homo sapiens
tgttcaaggtagggt

SEQ ID NO: 766672 - DNA, 15 bp, Homo sapiens
gttcaaggtagggtg

SEQ ID NO: 766673 - DNA, 15 bp, Homo sapiens
ttcaaggtagggtgc

SEQ ID NO: 766674 - DNA, 15 bp, Homo sapiens
tcaaggtagggtgcc

SEQ ID NO: 766675 - DNA, 15 bp, Homo sapiens
caaggtagggtgccg

SEQ ID NO: 766676 - DNA, 15 bp, Homo sapiens
aaggtagggtgccgg

SEQ ID NO: 766677 - DNA, 15 bp, Homo sapiens
aggtagggtgccggg

SEQ ID NO: 766678 - DNA, 15 bp, Homo sapiens
ggtagggtgccgggc

SEQ ID NO: 766679 - DNA, 15 bp, Homo sapiens
gtagggtgccgggcc

SEQ ID NO: 766680 - DNA, 15 bp, Homo sapiens
tagggtgccgggcct

SEQ ID NO: 766681 - DNA, 15 bp, Homo sapiens
agggtgccgggcctt

SEQ ID NO: 766682 - DNA, 15 bp, Homo sapiens
gggtgccgggccttt

SEQ ID NO: 766683 - DNA, 15 bp, Homo sapiens
ggtgccgggcctttg

SEQ ID NO: 766684 - DNA, 15 bp, Homo sapiens
gtgccgggcctttgg

SEQ ID NO: 766685 - DNA, 15 bp, Homo sapiens
tgccgggcctttggt

SEQ ID NO: 766686 - DNA, 15 bp, Homo sapiens
gccgggcctttggtt

SEQ ID NO: 766687 - DNA, 15 bp, Homo sapiens
ccgggcctttggttt

SEQ ID NO: 766688 - DNA, 15 bp, Homo sapiens
cgggcctttggttta

SEQ ID NO: 766689 - DNA, 15 bp, Homo sapiens
gggcctttggtttac

SEQ ID NO: 766690 - DNA, 15 bp, Homo sapiens
ggcctttggtttaca

SEQ ID NO: 766691 - DNA, 15 bp, Homo sapiens
gcctttggtttacat

SEQ ID NO: 766692 - DNA, 15 bp, Homo sapiens
cctttggtttacatt

SEQ ID NO: 766693 - DNA, 15 bp, Homo sapiens
ctttggtttacattt

SEQ ID NO: 766694 - DNA, 15 bp, Homo sapiens
tttggtttacatttc

SEQ ID NO: 766695 - DNA, 15 bp, Homo sapiens
ttggtttacatttct

SEQ ID NO: 766696 - DNA, 15 bp, Homo sapiens
tggtttacatttctg

SEQ ID NO: 766697 - DNA, 15 bp, Homo sapiens
ggtttacatttctgg

SEQ ID NO: 766698 - DNA, 15 bp, Homo sapiens
gtttacatttctgga

SEQ ID NO: 766699 - DNA, 15 bp, Homo sapiens
tttacatttctggat

SEQ ID NO: 766700 - DNA, 15 bp, Homo sapiens
ttacatttctggatg

SEQ ID NO: 766701 - DNA, 15 bp, Homo sapiens
tacatttctggatga

SEQ ID NO: 766702 - DNA, 15 bp, Homo sapiens
acatttctggatgaa

SEQ ID NO: 766703 - DNA, 15 bp, Homo sapiens
catttctggatgaag

SEQ ID NO: 766704 - DNA, 15 bp, Homo sapiens
atttctggatgaagc

SEQ ID NO: 766705 - DNA, 15 bp, Homo sapiens
tttctggatgaagct

SEQ ID NO: 766706 - DNA, 15 bp, Homo sapiens
ttctggatgaagctc

SEQ ID NO: 766707 - DNA, 15 bp, Homo sapiens
tctggatgaagctct

SEQ ID NO: 766708 - DNA, 15 bp, Homo sapiens
ctggatgaagctctt

SEQ ID NO: 766709 - DNA, 15 bp, Homo sapiens
tggatgaagctcttc

SEQ ID NO: 766710 - DNA, 15 bp, Homo sapiens
ggatgaagctcttct

SEQ ID NO: 766711 - DNA, 15 bp, Homo sapiens
gatgaagctcttctg

SEQ ID NO: 766712 - DNA, 15 bp, Homo sapiens
atgaagctcttctgc

SEQ ID NO: 766713 - DNA, 15 bp, Homo sapiens
tgaagctcttctgct

SEQ ID NO: 766714 - DNA, 15 bp, Homo sapiens
gaagctcttctgctg

SEQ ID NO: 766715 - DNA, 15 bp, Homo sapiens
aagctcttctgctgc

SEQ ID NO: 766716 - DNA, 15 bp, Homo sapiens
agctcttctgctgcc

SEQ ID NO: 766717 - DNA, 15 bp, Homo sapiens
gctcttctgctgccc

SEQ ID NO: 766718 - DNA, 15 bp, Homo sapiens
ctcttctgctgccct

SEQ ID NO: 766719 - DNA, 15 bp, Homo sapiens
tcttctgctgcccta

SEQ ID NO: 766720 - DNA, 15 bp, Homo sapiens
cttctgctgccctac

SEQ ID NO: 766721 - DNA, 15 bp, Homo sapiens
ttctgctgccctacc

SEQ ID NO: 766722 - DNA, 15 bp, Homo sapiens
tctgctgccctaccc

SEQ ID NO: 766723 - DNA, 15 bp, Homo sapiens
ctgctgccctaccct

SEQ ID NO: 766724 - DNA, 15 bp, Homo sapiens
tgctgccctaccctc

SEQ ID NO: 766725 - DNA, 15 bp, Homo sapiens
gctgccctaccctcc

SEQ ID NO: 766726 - DNA, 15 bp, Homo sapiens
ctgccctaccctccc

SEQ ID NO: 766727 - DNA, 15 bp, Homo sapiens
tgccctaccctccct

SEQ ID NO: 766728 - DNA, 15 bp, Homo sapiens
gccctaccctccctc

SEQ ID NO: 766729 - DNA, 15 bp, Homo sapiens
ccctaccctccctct

SEQ ID NO: 766730 - DNA, 15 bp, Homo sapiens
cctaccctccctctg

SEQ ID NO: 766731 - DNA, 15 bp, Homo sapiens
ctaccctccctctgt

SEQ ID NO: 766732 - DNA, 15 bp, Homo sapiens
taccctccctctgtc

SEQ ID NO: 766733 - DNA, 15 bp, Homo sapiens
accctccctctgtct

SEQ ID NO: 766734 - DNA, 15 bp, Homo sapiens
ccctccctctgtctg

SEQ ID NO: 766735 - DNA, 15 bp, Homo sapiens
cctccctctgtctga

SEQ ID NO: 766736 - DNA, 15 bp, Homo sapiens
ctccctctgtctgag

SEQ ID NO: 766737 - DNA, 15 bp, Homo sapiens
tccctctgtctgagg

SEQ ID NO: 766738 - DNA, 15 bp, Homo sapiens
ccctctgtctgaggc

SEQ ID NO: 766739 - DNA, 15 bp, Homo sapiens
cctctgtctgaggcc

SEQ ID NO: 766740 - DNA, 15 bp, Homo sapiens
ctctgtctgaggcca

SEQ ID NO: 766741 - DNA, 15 bp, Homo sapiens
tctgtctgaggccac

SEQ ID NO: 766742 - DNA, 15 bp, Homo sapiens
ctgtctgaggccacc

SEQ ID NO: 766743 - DNA, 15 bp, Homo sapiens
tgtctgaggccaccc

SEQ ID NO: 766744 - DNA, 15 bp, Homo sapiens
gtctgaggccacccg

SEQ ID NO: 766745 - DNA, 15 bp, Homo sapiens
tctgaggccacccgg

SEQ ID NO: 766746 - DNA, 15 bp, Homo sapiens
ctgaggccacccgga

SEQ ID NO: 766747 - DNA, 15 bp, Homo sapiens
tgaggccacccggag

SEQ ID NO: 766748 - DNA, 15 bp, Homo sapiens
gaggccacccggagt

SEQ ID NO: 766749 - DNA, 15 bp, Homo sapiens
aggccacccggagtc

SEQ ID NO: 766750 - DNA, 15 bp, Homo sapiens
ggccacccggagtct

SEQ ID NO: 766751 - DNA, 15 bp, Homo sapiens
gccacccggagtctt

SEQ ID NO: 766752 - DNA, 15 bp, Homo sapiens
ccacccggagtcttc

SEQ ID NO: 766753 - DNA, 15 bp, Homo sapiens
cacccggagtcttcc

SEQ ID NO: 766754 - DNA, 15 bp, Homo sapiens
acccggagtcttccc

SEQ ID NO: 766755 - DNA, 15 bp, Homo sapiens
cccggagtcttccct

SEQ ID NO: 766756 - DNA, 15 bp, Homo sapiens
ccggagtcttccctt

SEQ ID NO: 766757 - DNA, 15 bp, Homo sapiens
cggagtcttcccttt

SEQ ID NO: 766758 - DNA, 15 bp, Homo sapiens
ggagtcttccctttg

SEQ ID NO: 766759 - DNA, 15 bp, Homo sapiens
gagtcttccctttgc

SEQ ID NO: 766760 - DNA, 15 bp, Homo sapiens
agtcttccctttgcg

SEQ ID NO: 766761 - DNA, 15 bp, Homo sapiens
gtcttccctttgcgg

SEQ ID NO: 766762 - DNA, 15 bp, Homo sapiens
tcttccctttgcggc

SEQ ID NO: 766763 - DNA, 15 bp, Homo sapiens
cttccctttgcggca

SEQ ID NO: 766764 - DNA, 15 bp, Homo sapiens
ttccctttgcggcac

SEQ ID NO: 766765 - DNA, 15 bp, Homo sapiens
tccctttgcggcaca

SEQ ID NO: 766766 - DNA, 15 bp, Homo sapiens
ccctttgcggcacac

SEQ ID NO: 766767 - DNA, 15 bp, Homo sapiens
cctttgcggcacaca

SEQ ID NO: 766768 - DNA, 15 bp, Homo sapiens
ctttgcggcacacag

SEQ ID NO: 766769 - DNA, 15 bp, Homo sapiens
tttgcggcacacagt

SEQ ID NO: 766770 - DNA, 15 bp, Homo sapiens
ttgcggcacacagta

SEQ ID NO: 766771 - DNA, 15 bp, Homo sapiens
tgcggcacacagtaa

SEQ ID NO: 766772 - DNA, 15 bp, Homo sapiens
gcggcacacagtaag

SEQ ID NO: 766773 - DNA, 15 bp, Homo sapiens
cggcacacagtaagc

SEQ ID NO: 766774 - DNA, 15 bp, Homo sapiens
ggcacacagtaagca

SEQ ID NO: 766775 - DNA, 15 bp, Homo sapiens
gcacacagtaagcag

SEQ ID NO: 766776 - DNA, 15 bp, Homo sapiens
cacacagtaagcagc

SEQ ID NO: 766777 - DNA, 15 bp, Homo sapiens
acacagtaagcagct

SEQ ID NO: 766778 - DNA, 15 bp, Homo sapiens
cacagtaagcagctt

SEQ ID NO: 766779 - DNA, 15 bp, Homo sapiens
acagtaagcagcttt

SEQ ID NO: 766780 - DNA, 15 bp, Homo sapiens
cagtaagcagcttta

SEQ ID NO: 766781 - DNA, 15 bp, Homo sapiens
agtaagcagctttag

SEQ ID NO: 766782 - DNA, 15 bp, Homo sapiens
gtaagcagctttagt

SEQ ID NO: 766783 - DNA, 15 bp, Homo sapiens
taagcagctttagtg

SEQ ID NO: 766784 - DNA, 15 bp, Homo sapiens
aagcagctttagtga

SEQ ID NO: 766785 - DNA, 15 bp, Homo sapiens
agcagctttagtgac

SEQ ID NO: 766786 - DNA, 15 bp, Homo sapiens
gcagctttagtgaca

SEQ ID NO: 766787 - DNA, 15 bp, Homo sapiens
cagctttagtgacac

SEQ ID NO: 766788 - DNA, 15 bp, Homo sapiens
agctttagtgacacg

SEQ ID NO: 766789 - DNA, 15 bp, Homo sapiens
gctttagtgacacgt

SEQ ID NO: 766790 - DNA, 15 bp, Homo sapiens
ctttagtgacacgtt

SEQ ID NO: 766791 - DNA, 15 bp, Homo sapiens
tttagtgacacgttt

SEQ ID NO: 766792 - DNA, 15 bp, Homo sapiens
ttagtgacacgtttc

SEQ ID NO: 766793 - DNA, 15 bp, Homo sapiens
tagtgacacgtttcc

SEQ ID NO: 766794 - DNA, 15 bp, Homo sapiens
agtgacacgtttccg

SEQ ID NO: 766795 - DNA, 15 bp, Homo sapiens
gtgacacgtttccgg

SEQ ID NO: 766796 - DNA, 15 bp, Homo sapiens
tgacacgtttccggg

SEQ ID NO: 766797 - DNA, 15 bp, Homo sapiens
gacacgtttccgggc

SEQ ID NO: 766798 - DNA, 15 bp, Homo sapiens
acacgtttccgggcc

SEQ ID NO: 766799 - DNA, 15 bp, Homo sapiens
cacgtttccgggcct

SEQ ID NO: 766800 - DNA, 15 bp, Homo sapiens
acgtttccgggcctc

SEQ ID NO: 766801 - DNA, 15 bp, Homo sapiens
cgtttccgggcctca

SEQ ID NO: 766802 - DNA, 15 bp, Homo sapiens
gtttccgggcctcac

SEQ ID NO: 766803 - DNA, 15 bp, Homo sapiens
tttccgggcctcacc

SEQ ID NO: 766804 - DNA, 15 bp, Homo sapiens
ttccgggcctcacct

SEQ ID NO: 766805 - DNA, 15 bp, Homo sapiens
tccgggcctcacctc

SEQ ID NO: 766806 - DNA, 15 bp, Homo sapiens
ccgggcctcacctcc

SEQ ID NO: 766807 - DNA, 15 bp, Homo sapiens
cgggcctcacctcct

SEQ ID NO: 766808 - DNA, 15 bp, Homo sapiens
gggcctcacctcctc

SEQ ID NO: 766809 - DNA, 15 bp, Homo sapiens
ggcctcacctcctca

SEQ ID NO: 766810 - DNA, 15 bp, Homo sapiens
gcctcacctcctcag

SEQ ID NO: 766811 - DNA, 15 bp, Homo sapiens
cctcacctcctcagt

SEQ ID NO: 766812 - DNA, 15 bp, Homo sapiens
ctcacctcctcagtt

SEQ ID NO: 766813 - DNA, 15 bp, Homo sapiens
tcacctcctcagttt

SEQ ID NO: 766814 - DNA, 15 bp, Homo sapiens
cacctcctcagtttg

SEQ ID NO: 766815 - DNA, 15 bp, Homo sapiens
acctcctcagtttgc

SEQ ID NO: 766816 - DNA, 15 bp, Homo sapiens
cctcctcagtttgct

SEQ ID NO: 766817 - DNA, 15 bp, Homo sapiens
ctcctcagtttgctg

SEQ ID NO: 766818 - DNA, 15 bp, Homo sapiens
tcctcagtttgctga

SEQ ID NO: 766819 - DNA, 15 bp, Homo sapiens
cctcagtttgctgag

SEQ ID NO: 766820 - DNA, 15 bp, Homo sapiens
ctcagtttgctgagt

SEQ ID NO: 766821 - DNA, 15 bp, Homo sapiens
tcagtttgctgagtc

SEQ ID NO: 766822 - DNA, 15 bp, Homo sapiens
cagtttgctgagtct

SEQ ID NO: 766823 - DNA, 15 bp, Homo sapiens
agtttgctgagtctc

SEQ ID NO: 766824 - DNA, 15 bp, Homo sapiens
gtttgctgagtctcc

SEQ ID NO: 766825 - DNA, 15 bp, Homo sapiens
tttgctgagtctcca

SEQ ID NO: 766826 - DNA, 15 bp, Homo sapiens
ttgctgagtctccat

SEQ ID NO: 766827 - DNA, 15 bp, Homo sapiens
tgctgagtctccatt

SEQ ID NO: 766828 - DNA, 15 bp, Homo sapiens
gctgagtctccatta

SEQ ID NO: 766829 - DNA, 15 bp, Homo sapiens
ctgagtctccattac

SEQ ID NO: 766830 - DNA, 15 bp, Homo sapiens
tgagtctccattaca

SEQ ID NO: 766831 - DNA, 15 bp, Homo sapiens
gagtctccattacat

SEQ ID NO: 766832 - DNA, 15 bp, Homo sapiens
agtctccattacatc

SEQ ID NO: 766833 - DNA, 15 bp, Homo sapiens
gtctccattacatct

SEQ ID NO: 766834 - DNA, 15 bp, Homo sapiens
tctccattacatctg

SEQ ID NO: 766835 - DNA, 15 bp, Homo sapiens
ctccattacatctgt

SEQ ID NO: 766836 - DNA, 15 bp, Homo sapiens
tccattacatctgtg

SEQ ID NO: 766837 - DNA, 15 bp, Homo sapiens
ccattacatctgtgg

SEQ ID NO: 766838 - DNA, 15 bp, Homo sapiens
cattacatctgtggc

SEQ ID NO: 766839 - DNA, 15 bp, Homo sapiens
attacatctgtggca

SEQ ID NO: 766840 - DNA, 15 bp, Homo sapiens
ttacatctgtggcac

SEQ ID NO: 766841 - DNA, 15 bp, Homo sapiens
tacatctgtggcacc

SEQ ID NO: 766842 - DNA, 15 bp, Homo sapiens
acatctgtggcaccg

SEQ ID NO: 766843 - DNA, 15 bp, Homo sapiens
catctgtggcaccgt

SEQ ID NO: 766844 - DNA, 15 bp, Homo sapiens
atctgtggcaccgtt

SEQ ID NO: 766845 - DNA, 15 bp, Homo sapiens
tctgtggcaccgttt

SEQ ID NO: 766846 - DNA, 15 bp, Homo sapiens
ctgtggcaccgttta

SEQ ID NO: 766847 - DNA, 15 bp, Homo sapiens
tgtggcaccgtttaa

SEQ ID NO: 766848 - DNA, 15 bp, Homo sapiens
gtggcaccgtttaag

SEQ ID NO: 766849 - DNA, 15 bp, Homo sapiens
tggcaccgtttaagc

SEQ ID NO: 766850 - DNA, 15 bp, Homo sapiens
ggcaccgtttaagca

SEQ ID NO: 766851 - DNA, 15 bp, Homo sapiens
gcaccgtttaagcag

SEQ ID NO: 766852 - DNA, 15 bp, Homo sapiens
caccgtttaagcagc

SEQ ID NO: 766853 - DNA, 15 bp, Homo sapiens
accgtttaagcagcc

SEQ ID NO: 766854 - DNA, 15 bp, Homo sapiens
ccgtttaagcagccc

SEQ ID NO: 766855 - DNA, 15 bp, Homo sapiens
cgtttaagcagccca

SEQ ID NO: 766856 - DNA, 15 bp, Homo sapiens
gtttaagcagcccat

SEQ ID NO: 766857 - DNA, 15 bp, Homo sapiens
tttaagcagcccata

SEQ ID NO: 766858 - DNA, 15 bp, Homo sapiens
ttaagcagcccataa

SEQ ID NO: 766859 - DNA, 15 bp, Homo sapiens
taagcagcccataat

SEQ ID NO: 766860 - DNA, 15 bp, Homo sapiens
aagcagcccataatc

SEQ ID NO: 766861 - DNA, 15 bp, Homo sapiens
agcagcccataatca

SEQ ID NO: 766862 - DNA, 15 bp, Homo sapiens
gcagcccataatcat

SEQ ID NO: 766863 - DNA, 15 bp, Homo sapiens
cagcccataatcatt

SEQ ID NO: 766864 - DNA, 15 bp, Homo sapiens
agcccataatcattt

SEQ ID NO: 766865 - DNA, 15 bp, Homo sapiens
gcccataatcatttg

SEQ ID NO: 766866 - DNA, 15 bp, Homo sapiens
cccataatcatttgt

SEQ ID NO: 766867 - DNA, 15 bp, Homo sapiens
ccataatcatttgtg

SEQ ID NO: 766868 - DNA, 15 bp, Homo sapiens
cataatcatttgtgg

SEQ ID NO: 766869 - DNA, 15 bp, Homo sapiens
ataatcatttgtggg

SEQ ID NO: 766870 - DNA, 15 bp, Homo sapiens
taatcatttgtgggg

SEQ ID NO: 766871 - DNA, 15 bp, Homo sapiens
aatcatttgtggggt

SEQ ID NO: 766872 - DNA, 15 bp, Homo sapiens
atcatttgtggggta

SEQ ID NO: 766873 - DNA, 15 bp, Homo sapiens
tcatttgtggggtaa

SEQ ID NO: 766874 - DNA, 15 bp, Homo sapiens
catttgtggggtaaa

SEQ ID NO: 766875 - DNA, 15 bp, Homo sapiens
atttgtggggtaaat

SEQ ID NO: 766876 - DNA, 15 bp, Homo sapiens
tttgtggggtaaatt

SEQ ID NO: 766877 - DNA, 15 bp, Homo sapiens
ttgtggggtaaatta

SEQ ID NO: 766878 - DNA, 15 bp, Homo sapiens
tgtggggtaaattaa

SEQ ID NO: 766879 - DNA, 15 bp, Homo sapiens
gtggggtaaattaat

SEQ ID NO: 766880 - DNA, 15 bp, Homo sapiens
tggggtaaattaata

SEQ ID NO: 766881 - DNA, 15 bp, Homo sapiens
ggggtaaattaatac

SEQ ID NO: 766882 - DNA, 15 bp, Homo sapiens
gggtaaattaataca

SEQ ID NO: 766883 - DNA, 15 bp, Homo sapiens
ggtaaattaatacag

SEQ ID NO: 766884 - DNA, 15 bp, Homo sapiens
gtaaattaatacagt

SEQ ID NO: 766885 - DNA, 15 bp, Homo sapiens
taaattaatacagta

SEQ ID NO: 766886 - DNA, 15 bp, Homo sapiens
aaattaatacagtac

SEQ ID NO: 766887 - DNA, 15 bp, Homo sapiens
aattaatacagtaca

SEQ ID NO: 766888 - DNA, 15 bp, Homo sapiens
attaatacagtacat

SEQ ID NO: 766889 - DNA, 15 bp, Homo sapiens
ttaatacagtacatg

SEQ ID NO: 766890 - DNA, 15 bp, Homo sapiens
taatacagtacatgt

SEQ ID NO: 766891 - DNA, 15 bp, Homo sapiens
aatacagtacatgtc

SEQ ID NO: 766892 - DNA, 15 bp, Homo sapiens
atacagtacatgtct

SEQ ID NO: 766893 - DNA, 15 bp, Homo sapiens
tacagtacatgtctc

SEQ ID NO: 766894 - DNA, 15 bp, Homo sapiens
acagtacatgtctca

SEQ ID NO: 766895 - DNA, 15 bp, Homo sapiens
cagtacatgtctcag

SEQ ID NO: 766896 - DNA, 15 bp, Homo sapiens
agtacatgtctcagg

SEQ ID NO: 766897 - DNA, 15 bp, Homo sapiens
gtacatgtctcaggc

SEQ ID NO: 766898 - DNA, 15 bp, Homo sapiens
tacatgtctcaggcc

SEQ ID NO: 766899 - DNA, 15 bp, Homo sapiens
acatgtctcaggccc

SEQ ID NO: 766900 - DNA, 15 bp, Homo sapiens
catgtctcaggccct

SEQ ID NO: 766901 - DNA, 15 bp, Homo sapiens
atgtctcaggccctc

SEQ ID NO: 766902 - DNA, 15 bp, Homo sapiens
tgtctcaggccctcc

SEQ ID NO: 766903 - DNA, 15 bp, Homo sapiens
gtctcaggccctccc

SEQ ID NO: 766904 - DNA, 15 bp, Homo sapiens
tctcaggccctcccc

SEQ ID NO: 766905 - DNA, 15 bp, Homo sapiens
ctcaggccctccccc

SEQ ID NO: 766906 - DNA, 15 bp, Homo sapiens
tcaggccctccccca

SEQ ID NO: 766907 - DNA, 15 bp, Homo sapiens
caggccctcccccag

SEQ ID NO: 766908 - DNA, 15 bp, Homo sapiens
aggccctcccccagg

SEQ ID NO: 766909 - DNA, 15 bp, Homo sapiens
ggccctcccccagga

SEQ ID NO: 766910 - DNA, 15 bp, Homo sapiens
gccctcccccaggat

SEQ ID NO: 766911 - DNA, 15 bp, Homo sapiens
ccctcccccaggatt

SEQ ID NO: 766912 - DNA, 15 bp, Homo sapiens
cctcccccaggattg

SEQ ID NO: 766913 - DNA, 15 bp, Homo sapiens
ctcccccaggattgg

SEQ ID NO: 766914 - DNA, 15 bp, Homo sapiens
tcccccaggattggc

SEQ ID NO: 766915 - DNA, 15 bp, Homo sapiens
cccccaggattggca

SEQ ID NO: 766916 - DNA, 15 bp, Homo sapiens
ccccaggattggcat

SEQ ID NO: 766917 - DNA, 15 bp, Homo sapiens
cccaggattggcata

SEQ ID NO: 766918 - DNA, 15 bp, Homo sapiens
ccaggattggcatag

SEQ ID NO: 766919 - DNA, 15 bp, Homo sapiens
caggattggcatagg

SEQ ID NO: 766920 - DNA, 15 bp, Homo sapiens
aggattggcataggg

SEQ ID NO: 766921 - DNA, 15 bp, Homo sapiens
ggattggcataggga

SEQ ID NO: 766922 - DNA, 15 bp, Homo sapiens
gattggcatagggaa

SEQ ID NO: 766923 - DNA, 15 bp, Homo sapiens
attggcatagggaac

SEQ ID NO: 766924 - DNA, 15 bp, Homo sapiens
ttggcatagggaact

SEQ ID NO: 766925 - DNA, 15 bp, Homo sapiens
tggcatagggaactg

SEQ ID NO: 766926 - DNA, 15 bp, Homo sapiens
ggcatagggaactga

SEQ ID NO: 766927 - DNA, 15 bp, Homo sapiens
gcatagggaactgag

SEQ ID NO: 766928 - DNA, 15 bp, Homo sapiens
catagggaactgaga

SEQ ID NO: 766929 - DNA, 15 bp, Homo sapiens
atagggaactgagaa

SEQ ID NO: 766930 - DNA, 15 bp, Homo sapiens
tagggaactgagaat

SEQ ID NO: 766931 - DNA, 15 bp, Homo sapiens
agggaactgagaatt

SEQ ID NO: 766932 - DNA, 15 bp, Homo sapiens
gggaactgagaattc

SEQ ID NO: 766933 - DNA, 15 bp, Homo sapiens
ggaactgagaattcc

SEQ ID NO: 766934 - DNA, 15 bp, Homo sapiens
gaactgagaattcca

SEQ ID NO: 766935 - DNA, 15 bp, Homo sapiens
aactgagaattccac

SEQ ID NO: 766936 - DNA, 15 bp, Homo sapiens
actgagaattccacc

SEQ ID NO: 766937 - DNA, 15 bp, Homo sapiens
ctgagaattccacct

SEQ ID NO: 766938 - DNA, 15 bp, Homo sapiens
tgagaattccacctg

SEQ ID NO: 766939 - DNA, 15 bp, Homo sapiens
gagaattccacctgt

SEQ ID NO: 766940 - DNA, 15 bp, Homo sapiens
agaattccacctgtt

SEQ ID NO: 766941 - DNA, 15 bp, Homo sapiens
gaattccacctgttt

SEQ ID NO: 766942 - DNA, 15 bp, Homo sapiens
aattccacctgtttc

SEQ ID NO: 766943 - DNA, 15 bp, Homo sapiens
attccacctgtttcc

SEQ ID NO: 766944 - DNA, 15 bp, Homo sapiens
ttccacctgtttccc

SEQ ID NO: 766945 - DNA, 15 bp, Homo sapiens
tccacctgtttccct

SEQ ID NO: 766946 - DNA, 15 bp, Homo sapiens
ccacctgtttccctt

SEQ ID NO: 766947 - DNA, 15 bp, Homo sapiens
cacctgtttcccttt

SEQ ID NO: 766948 - DNA, 15 bp, Homo sapiens
acctgtttccctttc

SEQ ID NO: 766949 - DNA, 15 bp, Homo sapiens
cctgtttccctttcc

SEQ ID NO: 766950 - DNA, 15 bp, Homo sapiens
ctgtttccctttcct

SEQ ID NO: 766951 - DNA, 15 bp, Homo sapiens
tgtttccctttcctg

SEQ ID NO: 766952 - DNA, 15 bp, Homo sapiens
gtttccctttcctgg

SEQ ID NO: 766953 - DNA, 15 bp, Homo sapiens
tttccctttcctgga

SEQ ID NO: 766954 - DNA, 15 bp, Homo sapiens
ttccctttcctggat

SEQ ID NO: 766955 - DNA, 15 bp, Homo sapiens
tccctttcctggatc

SEQ ID NO: 766956 - DNA, 15 bp, Homo sapiens
ccctttcctggatcc

SEQ ID NO: 766957 - DNA, 15 bp, Homo sapiens
cctttcctggatcct

SEQ ID NO: 766958 - DNA, 15 bp, Homo sapiens
ctttcctggatcctt

SEQ ID NO: 766959 - DNA, 15 bp, Homo sapiens
tttcctggatccttg

SEQ ID NO: 766960 - DNA, 15 bp, Homo sapiens
ttcctggatccttgc

SEQ ID NO: 766961 - DNA, 15 bp, Homo sapiens
tcctggatccttgca

SEQ ID NO: 766962 - DNA, 15 bp, Homo sapiens
cctggatccttgcag

SEQ ID NO: 766963 - DNA, 15 bp, Homo sapiens
ctggatccttgcagt

SEQ ID NO: 766964 - DNA, 15 bp, Homo sapiens
tggatccttgcagtt

SEQ ID NO: 766965 - DNA, 15 bp, Homo sapiens
ggatccttgcagttg

SEQ ID NO: 766966 - DNA, 15 bp, Homo sapiens
gatccttgcagttgg

SEQ ID NO: 766967 - DNA, 15 bp, Homo sapiens
atccttgcagttggt

SEQ ID NO: 766968 - DNA, 15 bp, Homo sapiens
tccttgcagttggtg

SEQ ID NO: 766969 - DNA, 15 bp, Homo sapiens
ccttgcagttggtga

SEQ ID NO: 766970 - DNA, 15 bp, Homo sapiens
cttgcagttggtgac

SEQ ID NO: 766971 - DNA, 15 bp, Homo sapiens
ttgcagttggtgacc

SEQ ID NO: 766972 - DNA, 15 bp, Homo sapiens
tgcagttggtgacca

SEQ ID NO: 766973 - DNA, 15 bp, Homo sapiens
gcagttggtgaccag

SEQ ID NO: 766974 - DNA, 15 bp, Homo sapiens
cagttggtgaccagt

SEQ ID NO: 766975 - DNA, 15 bp, Homo sapiens
agttggtgaccagtg

SEQ ID NO: 766976 - DNA, 15 bp, Homo sapiens
gttggtgaccagtgg

SEQ ID NO: 766977 - DNA, 15 bp, Homo sapiens
ttggtgaccagtgga

SEQ ID NO: 766978 - DNA, 15 bp, Homo sapiens
tggtgaccagtggag

SEQ ID NO: 766979 - DNA, 15 bp, Homo sapiens
ggtgaccagtggaga

SEQ ID NO: 766980 - DNA, 15 bp, Homo sapiens
gtgaccagtggagaa

SEQ ID NO: 766981 - DNA, 15 bp, Homo sapiens
tgaccagtggagaag

SEQ ID NO: 766982 - DNA, 15 bp, Homo sapiens
gaccagtggagaaga

SEQ ID NO: 766983 - DNA, 15 bp, Homo sapiens
accagtggagaagat

SEQ ID NO: 766984 - DNA, 15 bp, Homo sapiens
ccagtggagaagatg

SEQ ID NO: 766985 - DNA, 15 bp, Homo sapiens
cagtggagaagatgg

SEQ ID NO: 766986 - DNA, 15 bp, Homo sapiens
agtggagaagatggc

SEQ ID NO: 766987 - DNA, 15 bp, Homo sapiens
gtggagaagatggcc

SEQ ID NO: 766988 - DNA, 15 bp, Homo sapiens
tggagaagatggccc

SEQ ID NO: 766989 - DNA, 15 bp, Homo sapiens
ggagaagatggccct

SEQ ID NO: 766990 - DNA, 15 bp, Homo sapiens
gagaagatggccctg

SEQ ID NO: 766991 - DNA, 15 bp, Homo sapiens
agaagatggccctgg

SEQ ID NO: 766992 - DNA, 15 bp, Homo sapiens
gaagatggccctggg

SEQ ID NO: 766993 - DNA, 15 bp, Homo sapiens
aagatggccctgggg

SEQ ID NO: 766994 - DNA, 15 bp, Homo sapiens
agatggccctggggt

SEQ ID NO: 766995 - DNA, 15 bp, Homo sapiens
gatggccctggggtt

SEQ ID NO: 766996 - DNA, 15 bp, Homo sapiens
atggccctggggttt

SEQ ID NO: 766997 - DNA, 15 bp, Homo sapiens
tggccctggggtttc

SEQ ID NO: 766998 - DNA, 15 bp, Homo sapiens
ggccctggggtttcc

SEQ ID NO: 766999 - DNA, 15 bp, Homo sapiens
gccctggggtttcct

SEQ ID NO: 767000 - DNA, 15 bp, Homo sapiens
ccctggggtttcctc

SEQ ID NO: 767001 - DNA, 15 bp, Homo sapiens
cctggggtttcctcc

SEQ ID NO: 767002 - DNA, 15 bp, Homo sapiens
ctggggtttcctcct

SEQ ID NO: 767003 - DNA, 15 bp, Homo sapiens
tggggtttcctcctc

SEQ ID NO: 767004 - DNA, 15 bp, Homo sapiens
ggggtttcctcctca

SEQ ID NO: 767005 - DNA, 15 bp, Homo sapiens
gggtttcctcctcag

SEQ ID NO: 767006 - DNA, 15 bp, Homo sapiens
ggtttcctcctcagc

SEQ ID NO: 767007 - DNA, 15 bp, Homo sapiens
gtttcctcctcagcc

SEQ ID NO: 767008 - DNA, 15 bp, Homo sapiens
tttcctcctcagccc

SEQ ID NO: 767009 - DNA, 15 bp, Homo sapiens
ttcctcctcagcccc

SEQ ID NO: 767010 - DNA, 15 bp, Homo sapiens
tcctcctcagcccca

SEQ ID NO: 767011 - DNA, 15 bp, Homo sapiens
cctcctcagccccaa

SEQ ID NO: 767012 - DNA, 15 bp, Homo sapiens
ctcctcagccccaaa

SEQ ID NO: 767013 - DNA, 15 bp, Homo sapiens
tcctcagccccaaat

SEQ ID NO: 767014 - DNA, 15 bp, Homo sapiens
cctcagccccaaatt

SEQ ID NO: 767015 - DNA, 15 bp, Homo sapiens
ctcagccccaaattc

SEQ ID NO: 767016 - DNA, 15 bp, Homo sapiens
tcagccccaaattcc

SEQ ID NO: 767017 - DNA, 15 bp, Homo sapiens
cagccccaaattcct

SEQ ID NO: 767018 - DNA, 15 bp, Homo sapiens
agccccaaattccta

SEQ ID NO: 767019 - DNA, 15 bp, Homo sapiens
gccccaaattcctac

SEQ ID NO: 767020 - DNA, 15 bp, Homo sapiens
ccccaaattcctaca

SEQ ID NO: 767021 - DNA, 15 bp, Homo sapiens
cccaaattcctacat

SEQ ID NO: 767022 - DNA, 15 bp, Homo sapiens
ccaaattcctacatc

SEQ ID NO: 767023 - DNA, 15 bp, Homo sapiens
caaattcctacatcc

SEQ ID NO: 767024 - DNA, 15 bp, Homo sapiens
aaattcctacatccc

SEQ ID NO: 767025 - DNA, 15 bp, Homo sapiens
aattcctacatccct

SEQ ID NO: 767026 - DNA, 15 bp, Homo sapiens
attcctacatccctc

SEQ ID NO: 767027 - DNA, 15 bp, Homo sapiens
ttcctacatccctcc

SEQ ID NO: 767028 - DNA, 15 bp, Homo sapiens
tcctacatccctcca

SEQ ID NO: 767029 - DNA, 15 bp, Homo sapiens
cctacatccctccaa

SEQ ID NO: 767030 - DNA, 15 bp, Homo sapiens
ctacatccctccaaa

SEQ ID NO: 767031 - DNA, 15 bp, Homo sapiens
tacatccctccaaaa

SEQ ID NO: 767032 - DNA, 15 bp, Homo sapiens
acatccctccaaaag

SEQ ID NO: 767033 - DNA, 15 bp, Homo sapiens
catccctccaaaaga

SEQ ID NO: 767034 - DNA, 15 bp, Homo sapiens
atccctccaaaagaa

SEQ ID NO: 767035 - DNA, 15 bp, Homo sapiens
tccctccaaaagaac

SEQ ID NO: 767036 - DNA, 15 bp, Homo sapiens
ccctccaaaagaacc

SEQ ID NO: 767037 - DNA, 15 bp, Homo sapiens
cctccaaaagaacct

SEQ ID NO: 767038 - DNA, 15 bp, Homo sapiens
ctccaaaagaacctc

SEQ ID NO: 767039 - DNA, 15 bp, Homo sapiens
tccaaaagaacctca

SEQ ID NO: 767040 - DNA, 15 bp, Homo sapiens
ccaaaagaacctcag

SEQ ID NO: 767041 - DNA, 15 bp, Homo sapiens
caaaagaacctcaga

SEQ ID NO: 767042 - DNA, 15 bp, Homo sapiens
aaaagaacctcagag

SEQ ID NO: 767043 - DNA, 15 bp, Homo sapiens
aaagaacctcagaga

SEQ ID NO: 767044 - DNA, 15 bp, Homo sapiens
aagaacctcagagag

SEQ ID NO: 767045 - DNA, 15 bp, Homo sapiens
agaacctcagagagc

SEQ ID NO: 767046 - DNA, 15 bp, Homo sapiens
gaacctcagagagca

SEQ ID NO: 767047 - DNA, 15 bp, Homo sapiens
aacctcagagagcaa

SEQ ID NO: 767048 - DNA, 15 bp, Homo sapiens
acctcagagagcaaa

SEQ ID NO: 767049 - DNA, 15 bp, Homo sapiens
cctcagagagcaaag

SEQ ID NO: 767050 - DNA, 15 bp, Homo sapiens
ctcagagagcaaagg

SEQ ID NO: 767051 - DNA, 15 bp, Homo sapiens
tcagagagcaaaggc

SEQ ID NO: 767052 - DNA, 15 bp, Homo sapiens
cagagagcaaaggca

SEQ ID NO: 767053 - DNA, 15 bp, Homo sapiens
agagagcaaaggcag

SEQ ID NO: 767054 - DNA, 15 bp, Homo sapiens
gagagcaaaggcagc

SEQ ID NO: 767055 - DNA, 15 bp, Homo sapiens
agagcaaaggcagcc

SEQ ID NO: 767056 - DNA, 15 bp, Homo sapiens
gagcaaaggcagccg

SEQ ID NO: 767057 - DNA, 15 bp, Homo sapiens
agcaaaggcagccgg

SEQ ID NO: 767058 - DNA, 15 bp, Homo sapiens
gcaaaggcagccgga

SEQ ID NO: 767059 - DNA, 15 bp, Homo sapiens
caaaggcagccggac

SEQ ID NO: 767060 - DNA, 15 bp, Homo sapiens
aaaggcagccggacg

SEQ ID NO: 767061 - DNA, 15 bp, Homo sapiens
aaggcagccggacgc

SEQ ID NO: 767062 - DNA, 15 bp, Homo sapiens
aggcagccggacgca

SEQ ID NO: 767063 - DNA, 15 bp, Homo sapiens
ggcagccggacgcat

SEQ ID NO: 767064 - DNA, 15 bp, Homo sapiens
gcagccggacgcatc

SEQ ID NO: 767065 - DNA, 15 bp, Homo sapiens
cagccggacgcatcc

SEQ ID NO: 767066 - DNA, 15 bp, Homo sapiens
agccggacgcatccg

SEQ ID NO: 767067 - DNA, 15 bp, Homo sapiens
gccggacgcatccga

SEQ ID NO: 767068 - DNA, 15 bp, Homo sapiens
ccggacgcatccgac

SEQ ID NO: 767069 - DNA, 15 bp, Homo sapiens
cggacgcatccgacc

SEQ ID NO: 767070 - DNA, 15 bp, Homo sapiens
ggacgcatccgaccc

SEQ ID NO: 767071 - DNA, 15 bp, Homo sapiens
gacgcatccgaccct

SEQ ID NO: 767072 - DNA, 15 bp, Homo sapiens
acgcatccgaccctg

SEQ ID NO: 767073 - DNA, 15 bp, Homo sapiens
cgcatccgaccctgg

SEQ ID NO: 767074 - DNA, 15 bp, Homo sapiens
gcatccgaccctggc

SEQ ID NO: 767075 - DNA, 15 bp, Homo sapiens
catccgaccctggcc

SEQ ID NO: 767076 - DNA, 15 bp, Homo sapiens
atccgaccctggcct

SEQ ID NO: 767077 - DNA, 15 bp, Homo sapiens
tccgaccctggcctc

SEQ ID NO: 767078 - DNA, 15 bp, Homo sapiens
ccgaccctggcctcc

SEQ ID NO: 767079 - DNA, 15 bp, Homo sapiens
cgaccctggcctcct

SEQ ID NO: 767080 - DNA, 15 bp, Homo sapiens
gaccctggcctcctt

SEQ ID NO: 767081 - DNA, 15 bp, Homo sapiens
accctggcctccttc

SEQ ID NO: 767082 - DNA, 15 bp, Homo sapiens
ccctggcctccttct

SEQ ID NO: 767083 - DNA, 15 bp, Homo sapiens
cctggcctccttctc

SEQ ID NO: 767084 - DNA, 15 bp, Homo sapiens
ctggcctccttctca

SEQ ID NO: 767085 - DNA, 15 bp, Homo sapiens
tggcctccttctcac

SEQ ID NO: 767086 - DNA, 15 bp, Homo sapiens
ggcctccttctcacc

SEQ ID NO: 767087 - DNA, 15 bp, Homo sapiens
gcctccttctcacca

SEQ ID NO: 767088 - DNA, 15 bp, Homo sapiens
cctccttctcaccac

SEQ ID NO: 767089 - DNA, 15 bp, Homo sapiens
ctccttctcaccact

SEQ ID NO: 767090 - DNA, 15 bp, Homo sapiens
tccttctcaccactg

SEQ ID NO: 767091 - DNA, 15 bp, Homo sapiens
ccttctcaccactgc

SEQ ID NO: 767092 - DNA, 15 bp, Homo sapiens
cttctcaccactgct

SEQ ID NO: 767093 - DNA, 15 bp, Homo sapiens
ttctcaccactgctg

SEQ ID NO: 767094 - DNA, 15 bp, Homo sapiens
tctcaccactgctga

SEQ ID NO: 767095 - DNA, 15 bp, Homo sapiens
ctcaccactgctgac

SEQ ID NO: 767096 - DNA, 15 bp, Homo sapiens
tcaccactgctgaca

SEQ ID NO: 767097 - DNA, 15 bp, Homo sapiens
caccactgctgacag

SEQ ID NO: 767098 - DNA, 15 bp, Homo sapiens
accactgctgacaga

SEQ ID NO: 767099 - DNA, 15 bp, Homo sapiens
ccactgctgacagaa

SEQ ID NO: 767100 - DNA, 15 bp, Homo sapiens
cactgctgacagaag

SEQ ID NO: 767101 - DNA, 15 bp, Homo sapiens
actgctgacagaagg

SEQ ID NO: 767102 - DNA, 15 bp, Homo sapiens
ctgctgacagaagga

SEQ ID NO: 767103 - DNA, 15 bp, Homo sapiens
tgctgacagaaggag

SEQ ID NO: 767104 - DNA, 15 bp, Homo sapiens
gctgacagaaggagc

SEQ ID NO: 767105 - DNA, 15 bp, Homo sapiens
ctgacagaaggagca

SEQ ID NO: 767106 - DNA, 15 bp, Homo sapiens
tgacagaaggagcag

SEQ ID NO: 767107 - DNA, 15 bp, Homo sapiens
gacagaaggagcaga

SEQ ID NO: 767108 - DNA, 15 bp, Homo sapiens
acagaaggagcagaa

SEQ ID NO: 767109 - DNA, 15 bp, Homo sapiens
cagaaggagcagaat

SEQ ID NO: 767110 - DNA, 15 bp, Homo sapiens
agaaggagcagaatc

SEQ ID NO: 767111 - DNA, 15 bp, Homo sapiens
gaaggagcagaatct

SEQ ID NO: 767112 - DNA, 15 bp, Homo sapiens
aaggagcagaatctt

SEQ ID NO: 767113 - DNA, 15 bp, Homo sapiens
aggagcagaatcttg

SEQ ID NO: 767114 - DNA, 15 bp, Homo sapiens
ggagcagaatcttgg

SEQ ID NO: 767115 - DNA, 15 bp, Homo sapiens
gagcagaatcttggc

SEQ ID NO: 767116 - DNA, 15 bp, Homo sapiens
agcagaatcttggca

SEQ ID NO: 767117 - DNA, 15 bp, Homo sapiens
gcagaatcttggcag

SEQ ID NO: 767118 - DNA, 15 bp, Homo sapiens
cagaatcttggcagc

SEQ ID NO: 767119 - DNA, 15 bp, Homo sapiens
agaatcttggcagca

SEQ ID NO: 767120 - DNA, 15 bp, Homo sapiens
gaatcttggcagcat

SEQ ID NO: 767121 - DNA, 15 bp, Homo sapiens
aatcttggcagcatt

SEQ ID NO: 767122 - DNA, 15 bp, Homo sapiens
atcttggcagcattg

SEQ ID NO: 767123 - DNA, 15 bp, Homo sapiens
tcttggcagcattgt

SEQ ID NO: 767124 - DNA, 15 bp, Homo sapiens
cttggcagcattgtt

SEQ ID NO: 767125 - DNA, 15 bp, Homo sapiens
ttggcagcattgtta

SEQ ID NO: 767126 - DNA, 15 bp, Homo sapiens
tggcagcattgttag

SEQ ID NO: 767127 - DNA, 15 bp, Homo sapiens
ggcagcattgttagg

SEQ ID NO: 767128 - DNA, 15 bp, Homo sapiens
gcagcattgttaggt

SEQ ID NO: 767129 - DNA, 15 bp, Homo sapiens
cagcattgttaggtc

SEQ ID NO: 767130 - DNA, 15 bp, Homo sapiens
agcattgttaggtct

SEQ ID NO: 767131 - DNA, 15 bp, Homo sapiens
gcattgttaggtctt

SEQ ID NO: 767132 - DNA, 15 bp, Homo sapiens
cattgttaggtcttc

SEQ ID NO: 767133 - DNA, 15 bp, Homo sapiens
attgttaggtcttca

SEQ ID NO: 767134 - DNA, 15 bp, Homo sapiens
ttgttaggtcttcat

SEQ ID NO: 767135 - DNA, 15 bp, Homo sapiens
tgttaggtcttcatc

SEQ ID NO: 767136 - DNA, 15 bp, Homo sapiens
gttaggtcttcatct

SEQ ID NO: 767137 - DNA, 15 bp, Homo sapiens
ttaggtcttcatctg

SEQ ID NO: 767138 - DNA, 15 bp, Homo sapiens
taggtcttcatctgc

SEQ ID NO: 767139 - DNA, 15 bp, Homo sapiens
aggtcttcatctgct

SEQ ID NO: 767140 - DNA, 15 bp, Homo sapiens
ggtcttcatctgcta

SEQ ID NO: 767141 - DNA, 15 bp, Homo sapiens
gtcttcatctgctat

SEQ ID NO: 767142 - DNA, 15 bp, Homo sapiens
tcttcatctgctatt

SEQ ID NO: 767143 - DNA, 15 bp, Homo sapiens
cttcatctgctatta

SEQ ID NO: 767144 - DNA, 15 bp, Homo sapiens
ttcatctgctattag

SEQ ID NO: 767145 - DNA, 15 bp, Homo sapiens
tcatctgctattagc

SEQ ID NO: 767146 - DNA, 15 bp, Homo sapiens
catctgctattagct

SEQ ID NO: 767147 - DNA, 15 bp, Homo sapiens
atctgctattagctg

SEQ ID NO: 767148 - DNA, 15 bp, Homo sapiens
tctgctattagctga

SEQ ID NO: 767149 - DNA, 15 bp, Homo sapiens
ctgctattagctgat

SEQ ID NO: 767150 - DNA, 15 bp, Homo sapiens
tgctattagctgatt

SEQ ID NO: 767151 - DNA, 15 bp, Homo sapiens
gctattagctgatta

SEQ ID NO: 767152 - DNA, 15 bp, Homo sapiens
ctattagctgattaa

SEQ ID NO: 767153 - DNA, 15 bp, Homo sapiens
gcattcgagaagcca

SEQ ID NO: 767154 - DNA, 15 bp, Homo sapiens
cattcgagaagccag

SEQ ID NO: 767155 - DNA, 15 bp, Homo sapiens
attcgagaagccagt

SEQ ID NO: 767156 - DNA, 15 bp, Homo sapiens
ttcgagaagccagta

SEQ ID NO: 767157 - DNA, 15 bp, Homo sapiens
tcgagaagccagtac

SEQ ID NO: 767158 - DNA, 15 bp, Homo sapiens
cgagaagccagtaca

SEQ ID NO: 767159 - DNA, 15 bp, Homo sapiens
gagaagccagtacac

SEQ ID NO: 767160 - DNA, 15 bp, Homo sapiens
agaagccagtacact

SEQ ID NO: 767161 - DNA, 15 bp, Homo sapiens
gaagccagtacactg

SEQ ID NO: 767162 - DNA, 15 bp, Homo sapiens
aagccagtacactgg

SEQ ID NO: 767163 - DNA, 15 bp, Homo sapiens
agccagtacactggc

SEQ ID NO: 767164 - DNA, 15 bp, Homo sapiens
gccagtacactggct

SEQ ID NO: 767165 - DNA, 15 bp, Homo sapiens
ccagtacactggctg

SEQ ID NO: 767166 - DNA, 15 bp, Homo sapiens
cagtacactggctgc

SEQ ID NO: 767167 - DNA, 15 bp, Homo sapiens
agtacactggctgct

SEQ ID NO: 767168 - DNA, 15 bp, Homo sapiens
gtacactggctgcta

SEQ ID NO: 767169 - DNA, 15 bp, Homo sapiens
tacactggctgctaa

SEQ ID NO: 767170 - DNA, 15 bp, Homo sapiens
acactggctgctaat

SEQ ID NO: 767171 - DNA, 15 bp, Homo sapiens
cactggctgctaatt

SEQ ID NO: 767172 - DNA, 15 bp, Homo sapiens
actggctgctaattg

SEQ ID NO: 767173 - DNA, 15 bp, Homo sapiens
ctggctgctaattgt

SEQ ID NO: 767174 - DNA, 15 bp, Homo sapiens
tggctgctaattgtg

SEQ ID NO: 767175 - DNA, 15 bp, Homo sapiens
ggctgctaattgtgc

SEQ ID NO: 767176 - DNA, 15 bp, Homo sapiens
gctgctaattgtgct

SEQ ID NO: 767177 - DNA, 15 bp, Homo sapiens
ctgctaattgtgcta

SEQ ID NO: 767178 - DNA, 15 bp, Homo sapiens
tgctaattgtgctag

SEQ ID NO: 767179 - DNA, 15 bp, Homo sapiens
gctaattgtgctagc

SEQ ID NO: 767180 - DNA, 15 bp, Homo sapiens
ctaattgtgctagct

SEQ ID NO: 767181 - DNA, 15 bp, Homo sapiens
taattgtgctagctt

SEQ ID NO: 767182 - DNA, 15 bp, Homo sapiens
aattgtgctagcttg

SEQ ID NO: 767183 - DNA, 15 bp, Homo sapiens
attgtgctagcttgt

SEQ ID NO: 767184 - DNA, 15 bp, Homo sapiens
ttgtgctagcttgta

SEQ ID NO: 767185 - DNA, 15 bp, Homo sapiens
tgtgctagcttgtac

SEQ ID NO: 767186 - DNA, 15 bp, Homo sapiens
gtgctagcttgtacc

SEQ ID NO: 767187 - DNA, 15 bp, Homo sapiens
tgctagcttgtacct

SEQ ID NO: 767188 - DNA, 15 bp, Homo sapiens
gctagcttgtacctg

SEQ ID NO: 767189 - DNA, 15 bp, Homo sapiens
ctagcttgtacctgg

SEQ ID NO: 767190 - DNA, 15 bp, Homo sapiens
tagcttgtacctggg

SEQ ID NO: 767191 - DNA, 15 bp, Homo sapiens
agcttgtacctgggg

SEQ ID NO: 767192 - DNA, 15 bp, Homo sapiens
gcttgtacctggggc

SEQ ID NO: 767193 - DNA, 15 bp, Homo sapiens
cttgtacctggggct

SEQ ID NO: 767194 - DNA, 15 bp, Homo sapiens
ttgtacctggggctg

SEQ ID NO: 767195 - DNA, 15 bp, Homo sapiens
tgtacctggggctgg

SEQ ID NO: 767196 - DNA, 15 bp, Homo sapiens
gtacctggggctggg

SEQ ID NO: 767197 - DNA, 15 bp, Homo sapiens
tacctggggctgggt

SEQ ID NO: 767198 - DNA, 15 bp, Homo sapiens
acctggggctgggtt

SEQ ID NO: 767199 - DNA, 15 bp, Homo sapiens
cctggggctgggttt

SEQ ID NO: 767200 - DNA, 15 bp, Homo sapiens
ctggggctgggtttg

SEQ ID NO: 767201 - DNA, 15 bp, Homo sapiens
tggggctgggtttgg

SEQ ID NO: 767202 - DNA, 15 bp, Homo sapiens
ggggctgggtttggg

SEQ ID NO: 767203 - DNA, 15 bp, Homo sapiens
gggctgggtttgggt

SEQ ID NO: 767204 - DNA, 15 bp, Homo sapiens
ggctgggtttgggtt

SEQ ID NO: 767205 - DNA, 15 bp, Homo sapiens
gctgggtttgggttt

SEQ ID NO: 767206 - DNA, 15 bp, Homo sapiens
ctgggtttgggtttc

SEQ ID NO: 767207 - DNA, 15 bp, Homo sapiens
tgggtttgggtttca

SEQ ID NO: 767208 - DNA, 15 bp, Homo sapiens
gggtttgggtttcag

SEQ ID NO: 767209 - DNA, 15 bp, Homo sapiens
ggtttgggtttcagg

SEQ ID NO: 767210 - DNA, 15 bp, Homo sapiens
gtttgggtttcaggt

SEQ ID NO: 767211 - DNA, 15 bp, Homo sapiens
tttgggtttcaggtc

SEQ ID NO: 767212 - DNA, 15 bp, Homo sapiens
ttgggtttcaggtcc

SEQ ID NO: 767213 - DNA, 15 bp, Homo sapiens
tgggtttcaggtccc

SEQ ID NO: 767214 - DNA, 15 bp, Homo sapiens
gggtttcaggtccct

SEQ ID NO: 767215 - DNA, 15 bp, Homo sapiens
ggtttcaggtccctc

SEQ ID NO: 767216 - DNA, 15 bp, Homo sapiens
gtttcaggtccctcc

SEQ ID NO: 767217 - DNA, 15 bp, Homo sapiens
tttcaggtccctccc

SEQ ID NO: 767218 - DNA, 15 bp, Homo sapiens
ttcaggtccctccct

SEQ ID NO: 767219 - DNA, 15 bp, Homo sapiens
tcaggtccctccctt

SEQ ID NO: 767220 - DNA, 15 bp, Homo sapiens
caggtccctcccttc

SEQ ID NO: 767221 - DNA, 15 bp, Homo sapiens
aggtccctcccttcc

SEQ ID NO: 767222 - DNA, 15 bp, Homo sapiens
ggtccctcccttcct

SEQ ID NO: 767223 - DNA, 15 bp, Homo sapiens
gtccctcccttcctc

SEQ ID NO: 767224 - DNA, 15 bp, Homo sapiens
tccctcccttcctcc

SEQ ID NO: 767225 - DNA, 15 bp, Homo sapiens
ccctcccttcctccc

SEQ ID NO: 767226 - DNA, 15 bp, Homo sapiens
cctcccttcctccct

SEQ ID NO: 767227 - DNA, 15 bp, Homo sapiens
ctcccttcctccctt

SEQ ID NO: 767228 - DNA, 15 bp, Homo sapiens
tcccttcctcccttt

SEQ ID NO: 767229 - DNA, 15 bp, Homo sapiens
cccttcctccctttc

SEQ ID NO: 767230 - DNA, 15 bp, Homo sapiens
ccttcctccctttct

SEQ ID NO: 767231 - DNA, 15 bp, Homo sapiens
cttcctccctttctc

SEQ ID NO: 767232 - DNA, 15 bp, Homo sapiens
ttcctccctttctcc

SEQ ID NO: 767233 - DNA, 15 bp, Homo sapiens
tcctccctttctccc

SEQ ID NO: 767234 - DNA, 15 bp, Homo sapiens
cctccctttctccca

SEQ ID NO: 767235 - DNA, 15 bp, Homo sapiens
ctccctttctcccaa

SEQ ID NO: 767236 - DNA, 15 bp, Homo sapiens
tccctttctcccaat

SEQ ID NO: 767237 - DNA, 15 bp, Homo sapiens
ccctttctcccaatg

SEQ ID NO: 767238 - DNA, 15 bp, Homo sapiens
cctttctcccaatgc

SEQ ID NO: 767239 - DNA, 15 bp, Homo sapiens
ctttctcccaatgct

SEQ ID NO: 767240 - DNA, 15 bp, Homo sapiens
tttctcccaatgctt

SEQ ID NO: 767241 - DNA, 15 bp, Homo sapiens
ttctcccaatgcttg

SEQ ID NO: 767242 - DNA, 15 bp, Homo sapiens
tctcccaatgcttgg

SEQ ID NO: 767243 - DNA, 15 bp, Homo sapiens
ctcccaatgcttggt

SEQ ID NO: 767244 - DNA, 15 bp, Homo sapiens
tcccaatgcttggtc

SEQ ID NO: 767245 - DNA, 15 bp, Homo sapiens
cccaatgcttggtct

SEQ ID NO: 767246 - DNA, 15 bp, Homo sapiens
ccaatgcttggtctt

SEQ ID NO: 767247 - DNA, 15 bp, Homo sapiens
caatgcttggtctta

SEQ ID NO: 767248 - DNA, 15 bp, Homo sapiens
aatgcttggtcttat

SEQ ID NO: 767249 - DNA, 15 bp, Homo sapiens
atgcttggtcttatt

SEQ ID NO: 767250 - DNA, 15 bp, Homo sapiens
tgcttggtcttatta

SEQ ID NO: 767251 - DNA, 15 bp, Homo sapiens
gcttggtcttattag

SEQ ID NO: 767252 - DNA, 15 bp, Homo sapiens
cttggtcttattagg

SEQ ID NO: 767253 - DNA, 15 bp, Homo sapiens
ttggtcttattagga

SEQ ID NO: 767254 - DNA, 15 bp, Homo sapiens
tggtcttattaggaa

SEQ ID NO: 767255 - DNA, 15 bp, Homo sapiens
ggtcttattaggaaa

SEQ ID NO: 767256 - DNA, 15 bp, Homo sapiens
gtcttattaggaaac

SEQ ID NO: 767257 - DNA, 15 bp, Homo sapiens
tcttattaggaaaca

SEQ ID NO: 767258 - DNA, 15 bp, Homo sapiens
cttattaggaaacat

SEQ ID NO: 767259 - DNA, 15 bp, Homo sapiens
ttattaggaaacatt

SEQ ID NO: 767260 - DNA, 15 bp, Homo sapiens
tattaggaaacattg

SEQ ID NO: 767261 - DNA, 15 bp, Homo sapiens
attaggaaacattgc

SEQ ID NO: 767262 - DNA, 15 bp, Homo sapiens
ttaggaaacattgca

SEQ ID NO: 767263 - DNA, 15 bp, Homo sapiens
taggaaacattgcat

SEQ ID NO: 767264 - DNA, 15 bp, Homo sapiens
aggaaacattgcatc

SEQ ID NO: 767265 - DNA, 15 bp, Homo sapiens
ggaaacattgcatcg

SEQ ID NO: 767266 - DNA, 15 bp, Homo sapiens
gaaacattgcatcgc

SEQ ID NO: 767267 - DNA, 15 bp, Homo sapiens
aaacattgcatcgct

SEQ ID NO: 767268 - DNA, 15 bp, Homo sapiens
aacattgcatcgcta

SEQ ID NO: 767269 - DNA, 15 bp, Homo sapiens
acattgcatcgctaa

SEQ ID NO: 767270 - DNA, 15 bp, Homo sapiens
cattgcatcgctaaa

SEQ ID NO: 767271 - DNA, 15 bp, Homo sapiens
attgcatcgctaaaa

SEQ ID NO: 767272 - DNA, 15 bp, Homo sapiens
ttgcatcgctaaaat

SEQ ID NO: 767273 - DNA, 15 bp, Homo sapiens
tgcatcgctaaaata

SEQ ID NO: 767274 - DNA, 15 bp, Homo sapiens
gcatcgctaaaataa

SEQ ID NO: 767275 - DNA, 15 bp, Homo sapiens
catcgctaaaataac

SEQ ID NO: 767276 - DNA, 15 bp, Homo sapiens
atcgctaaaataaca

SEQ ID NO: 767277 - DNA, 15 bp, Homo sapiens
tcgctaaaataacaa

SEQ ID NO: 767278 - DNA, 15 bp, Homo sapiens
cgctaaaataacaat

SEQ ID NO: 767279 - DNA, 15 bp, Homo sapiens
gctaaaataacaatt

SEQ ID NO: 767280 - DNA, 15 bp, Homo sapiens
ctaaaataacaatta

SEQ ID NO: 767281 - DNA, 15 bp, Homo sapiens
taaaataacaattac

SEQ ID NO: 767282 - DNA, 15 bp, Homo sapiens
aaaataacaattact

SEQ ID NO: 767283 - DNA, 15 bp, Homo sapiens
aaataacaattactc

SEQ ID NO: 767284 - DNA, 15 bp, Homo sapiens
aataacaattactct

SEQ ID NO: 767285 - DNA, 15 bp, Homo sapiens
ataacaattactcta

SEQ ID NO: 767286 - DNA, 15 bp, Homo sapiens
taacaattactctac

SEQ ID NO: 767287 - DNA, 15 bp, Homo sapiens
aacaattactctaca

SEQ ID NO: 767288 - DNA, 15 bp, Homo sapiens
acaattactctacag

SEQ ID NO: 767289 - DNA, 15 bp, Homo sapiens
caattactctacaga

SEQ ID NO: 767290 - DNA, 15 bp, Homo sapiens
aattactctacagat

SEQ ID NO: 767291 - DNA, 15 bp, Homo sapiens
attactctacagata

SEQ ID NO: 767292 - DNA, 15 bp, Homo sapiens
ttactctacagatag

SEQ ID NO: 767293 - DNA, 15 bp, Homo sapiens
tactctacagataga

SEQ ID NO: 767294 - DNA, 15 bp, Homo sapiens
actctacagatagag

SEQ ID NO: 767295 - DNA, 15 bp, Homo sapiens
ctctacagatagagt

SEQ ID NO: 767296 - DNA, 15 bp, Homo sapiens
tctacagatagagta

SEQ ID NO: 767297 - DNA, 15 bp, Homo sapiens
ctacagatagagtaa

SEQ ID NO: 767298 - DNA, 15 bp, Homo sapiens
tacagatagagtaat

SEQ ID NO: 767299 - DNA, 15 bp, Homo sapiens
acagatagagtaata

SEQ ID NO: 767300 - DNA, 15 bp, Homo sapiens
cagatagagtaatag

SEQ ID NO: 767301 - DNA, 15 bp, Homo sapiens
agatagagtaataga

SEQ ID NO: 767302 - DNA, 15 bp, Homo sapiens
gatagagtaatagaa

SEQ ID NO: 767303 - DNA, 15 bp, Homo sapiens
atagagtaatagaag

SEQ ID NO: 767304 - DNA, 15 bp, Homo sapiens
tagagtaatagaagt

SEQ ID NO: 767305 - DNA, 15 bp, Homo sapiens
agagtaatagaagtg

SEQ ID NO: 767306 - DNA, 15 bp, Homo sapiens
gagtaatagaagtgt

SEQ ID NO: 767307 - DNA, 15 bp, Homo sapiens
agtaatagaagtgtt

SEQ ID NO: 767308 - DNA, 15 bp, Homo sapiens
gtaatagaagtgttc

SEQ ID NO: 767309 - DNA, 15 bp, Homo sapiens
taatagaagtgttca

SEQ ID NO: 767310 - DNA, 15 bp, Homo sapiens
aatagaagtgttcaa

SEQ ID NO: 767311 - DNA, 15 bp, Homo sapiens
atagaagtgttcaaa

SEQ ID NO: 767312 - DNA, 15 bp, Homo sapiens
tagaagtgttcaaag

SEQ ID NO: 767313 - DNA, 15 bp, Homo sapiens
agaagtgttcaaagg

SEQ ID NO: 767314 - DNA, 15 bp, Homo sapiens
gaagtgttcaaaggt

SEQ ID NO: 767315 - DNA, 15 bp, Homo sapiens
aagtgttcaaaggta

SEQ ID NO: 767316 - DNA, 15 bp, Homo sapiens
agtgttcaaaggtag

SEQ ID NO: 767317 - DNA, 15 bp, Homo sapiens
gtgttcaaaggtagg

SEQ ID NO: 767318 - DNA, 15 bp, Homo sapiens
tgttcaaaggtaggg

SEQ ID NO: 767319 - DNA, 15 bp, Homo sapiens
gttcaaaggtagggt

SEQ ID NO: 767320 - DNA, 15 bp, Homo sapiens
ttcaaaggtagggtt

SEQ ID NO: 767321 - DNA, 15 bp, Homo sapiens
tcaaaggtagggtta

SEQ ID NO: 767322 - DNA, 15 bp, Homo sapiens
caaaggtagggttaa

SEQ ID NO: 767323 - DNA, 15 bp, Homo sapiens
aaaggtagggttaat

SEQ ID NO: 767324 - DNA, 15 bp, Homo sapiens
aaggtagggttaatt

SEQ ID NO: 767325 - DNA, 15 bp, Homo sapiens
aggtagggttaatta

SEQ ID NO: 767326 - DNA, 15 bp, Homo sapiens
ggtagggttaattag

SEQ ID NO: 767327 - DNA, 15 bp, Homo sapiens
gtagggttaattaga

SEQ ID NO: 767328 - DNA, 15 bp, Homo sapiens
tagggttaattagaa

SEQ ID NO: 767329 - DNA, 15 bp, Homo sapiens
agggttaattagaaa

SEQ ID NO: 767330 - DNA, 15 bp, Homo sapiens
gggttaattagaaac

SEQ ID NO: 767331 - DNA, 15 bp, Homo sapiens
ggttaattagaaact

SEQ ID NO: 767332 - DNA, 15 bp, Homo sapiens
gttaattagaaactt

SEQ ID NO: 767333 - DNA, 15 bp, Homo sapiens
ttaattagaaacttt

SEQ ID NO: 767334 - DNA, 15 bp, Homo sapiens
taattagaaactttc

SEQ ID NO: 767335 - DNA, 15 bp, Homo sapiens
aattagaaactttca

SEQ ID NO: 767336 - DNA, 15 bp, Homo sapiens
attagaaactttcat

SEQ ID NO: 767337 - DNA, 15 bp, Homo sapiens
ttagaaactttcatt

SEQ ID NO: 767338 - DNA, 15 bp, Homo sapiens
tagaaactttcatta

SEQ ID NO: 767339 - DNA, 15 bp, Homo sapiens
agaaactttcattaa

SEQ ID NO: 767340 - DNA, 15 bp, Homo sapiens
gaaactttcattaaa

SEQ ID NO: 767341 - DNA, 15 bp, Homo sapiens
aaactttcattaaag

SEQ ID NO: 767342 - DNA, 15 bp, Homo sapiens
aactttcattaaagg

SEQ ID NO: 767343 - DNA, 15 bp, Homo sapiens
actttcattaaagga

SEQ ID NO: 767344 - DNA, 15 bp, Homo sapiens
ctttcattaaaggac

SEQ ID NO: 767345 - DNA, 15 bp, Homo sapiens
tttcattaaaggacc

SEQ ID NO: 767346 - DNA, 15 bp, Homo sapiens
ttcattaaaggacct

SEQ ID NO: 767347 - DNA, 15 bp, Homo sapiens
tcattaaaggacctt

SEQ ID NO: 767348 - DNA, 15 bp, Homo sapiens
cattaaaggaccttg

SEQ ID NO: 767349 - DNA, 15 bp, Homo sapiens
attaaaggaccttgg

SEQ ID NO: 767350 - DNA, 15 bp, Homo sapiens
ttaaaggaccttgga

SEQ ID NO: 767351 - DNA, 15 bp, Homo sapiens
taaaggaccttggac

SEQ ID NO: 767352 - DNA, 15 bp, Homo sapiens
aaaggaccttggacc

SEQ ID NO: 767353 - DNA, 15 bp, Homo sapiens
aaggaccttggacct

SEQ ID NO: 767354 - DNA, 15 bp, Homo sapiens
aggaccttggacctt

SEQ ID NO: 767355 - DNA, 15 bp, Homo sapiens
ggaccttggaccttg

SEQ ID NO: 767356 - DNA, 15 bp, Homo sapiens
gaccttggaccttgt

SEQ ID NO: 767357 - DNA, 15 bp, Homo sapiens
accttggaccttgtt

SEQ ID NO: 767358 - DNA, 15 bp, Homo sapiens
ccttggaccttgttg

SEQ ID NO: 767359 - DNA, 15 bp, Homo sapiens
cttggaccttgttgc

SEQ ID NO: 767360 - DNA, 15 bp, Homo sapiens
ttggaccttgttgca

SEQ ID NO: 767361 - DNA, 15 bp, Homo sapiens
tggaccttgttgcaa

SEQ ID NO: 767362 - DNA, 15 bp, Homo sapiens
ggaccttgttgcaat

SEQ ID NO: 767363 - DNA, 15 bp, Homo sapiens
gaccttgttgcaatt

SEQ ID NO: 767364 - DNA, 15 bp, Homo sapiens
accttgttgcaattg

SEQ ID NO: 767365 - DNA, 15 bp, Homo sapiens
ccttgttgcaattgg

SEQ ID NO: 767366 - DNA, 15 bp, Homo sapiens
cttgttgcaattggt

SEQ ID NO: 767367 - DNA, 15 bp, Homo sapiens
ttgttgcaattggtc

SEQ ID NO: 767368 - DNA, 15 bp, Homo sapiens
tgttgcaattggtca

SEQ ID NO: 767369 - DNA, 15 bp, Homo sapiens
gttgcaattggtcat

SEQ ID NO: 767370 - DNA, 15 bp, Homo sapiens
ttgcaattggtcatt

SEQ ID NO: 767371 - DNA, 15 bp, Homo sapiens
tgcaattggtcattc

SEQ ID NO: 767372 - DNA, 15 bp, Homo sapiens
gcaattggtcattca

SEQ ID NO: 767373 - DNA, 15 bp, Homo sapiens
caattggtcattcat

SEQ ID NO: 767374 - DNA, 15 bp, Homo sapiens
aattggtcattcatt

SEQ ID NO: 767375 - DNA, 15 bp, Homo sapiens
attggtcattcattg

SEQ ID NO: 767376 - DNA, 15 bp, Homo sapiens
ttggtcattcattga

SEQ ID NO: 767377 - DNA, 15 bp, Homo sapiens
tggtcattcattgat

SEQ ID NO: 767378 - DNA, 15 bp, Homo sapiens
ggtcattcattgata

SEQ ID NO: 767379 - DNA, 15 bp, Homo sapiens
gtcattcattgatat

SEQ ID NO: 767380 - DNA, 15 bp, Homo sapiens
tcattcattgatatt

SEQ ID NO: 767381 - DNA, 15 bp, Homo sapiens
cattcattgatattt

SEQ ID NO: 767382 - DNA, 15 bp, Homo sapiens
attcattgatatttt

SEQ ID NO: 767383 - DNA, 15 bp, Homo sapiens
ttcattgatattttt

SEQ ID NO: 767384 - DNA, 15 bp, Homo sapiens
tcattgatatttttc

SEQ ID NO: 767385 - DNA, 15 bp, Homo sapiens
cattgatatttttct

SEQ ID NO: 767386 - DNA, 15 bp, Homo sapiens
attgatatttttctg

SEQ ID NO: 767387 - DNA, 15 bp, Homo sapiens
ttgatatttttctga

SEQ ID NO: 767388 - DNA, 15 bp, Homo sapiens
tgatatttttctgat

SEQ ID NO: 767389 - DNA, 15 bp, Homo sapiens
gatatttttctgatc

SEQ ID NO: 767390 - DNA, 15 bp, Homo sapiens
atatttttctgatca

SEQ ID NO: 767391 - DNA, 15 bp, Homo sapiens
tatttttctgatcaa

SEQ ID NO: 767392 - DNA, 15 bp, Homo sapiens
atttttctgatcaac

SEQ ID NO: 767393 - DNA, 15 bp, Homo sapiens
tttttctgatcaaca

SEQ ID NO: 767394 - DNA, 15 bp, Homo sapiens
ttttctgatcaacaa

SEQ ID NO: 767395 - DNA, 15 bp, Homo sapiens
tttctgatcaacaaa

SEQ ID NO: 767396 - DNA, 15 bp, Homo sapiens
ttctgatcaacaaat

SEQ ID NO: 767397 - DNA, 15 bp, Homo sapiens
tctgatcaacaaatc

SEQ ID NO: 767398 - DNA, 15 bp, Homo sapiens
ctgatcaacaaatca

SEQ ID NO: 767399 - DNA, 15 bp, Homo sapiens
tgatcaacaaatcaa

SEQ ID NO: 767400 - DNA, 15 bp, Homo sapiens
gatcaacaaatcaac

SEQ ID NO: 767401 - DNA, 15 bp, Homo sapiens
atcaacaaatcaacc

SEQ ID NO: 767402 - DNA, 15 bp, Homo sapiens
tcaacaaatcaacca

SEQ ID NO: 767403 - DNA, 15 bp, Homo sapiens
caacaaatcaaccat

SEQ ID NO: 767404 - DNA, 15 bp, Homo sapiens
aacaaatcaaccata

SEQ ID NO: 767405 - DNA, 15 bp, Homo sapiens
acaaatcaaccatag

SEQ ID NO: 767406 - DNA, 15 bp, Homo sapiens
caaatcaaccatagt

SEQ ID NO: 767407 - DNA, 15 bp, Homo sapiens
aaatcaaccatagtt

SEQ ID NO: 767408 - DNA, 15 bp, Homo sapiens
aatcaaccatagttt

SEQ ID NO: 767409 - DNA, 15 bp, Homo sapiens
atcaaccatagtttc

SEQ ID NO: 767410 - DNA, 15 bp, Homo sapiens
tcaaccatagtttct

SEQ ID NO: 767411 - DNA, 15 bp, Homo sapiens
caaccatagtttctt

SEQ ID NO: 767412 - DNA, 15 bp, Homo sapiens
aaccatagtttcttt

SEQ ID NO: 767413 - DNA, 15 bp, Homo sapiens
accatagtttctttt

SEQ ID NO: 767414 - DNA, 15 bp, Homo sapiens
ccatagtttcttttg

SEQ ID NO: 767415 - DNA, 15 bp, Homo sapiens
catagtttcttttga

SEQ ID NO: 767416 - DNA, 15 bp, Homo sapiens
atagtttcttttgaa

SEQ ID NO: 767417 - DNA, 15 bp, Homo sapiens
tagtttcttttgaat

SEQ ID NO: 767418 - DNA, 15 bp, Homo sapiens
agtttcttttgaata

SEQ ID NO: 767419 - DNA, 15 bp, Homo sapiens
gtttcttttgaataa

SEQ ID NO: 767420 - DNA, 15 bp, Homo sapiens
tttcttttgaataat

SEQ ID NO: 767421 - DNA, 15 bp, Homo sapiens
ttcttttgaataatt

SEQ ID NO: 767422 - DNA, 15 bp, Homo sapiens
tcttttgaataattg

SEQ ID NO: 767423 - DNA, 15 bp, Homo sapiens
cttttgaataattgc

SEQ ID NO: 767424 - DNA, 15 bp, Homo sapiens
ttttgaataattgca

SEQ ID NO: 767425 - DNA, 15 bp, Homo sapiens
tttgaataattgcaa

SEQ ID NO: 767426 - DNA, 15 bp, Homo sapiens
ttgaataattgcaag

SEQ ID NO: 767427 - DNA, 15 bp, Homo sapiens
tgaataattgcaaga

SEQ ID NO: 767428 - DNA, 15 bp, Homo sapiens
gaataattgcaagat

SEQ ID NO: 767429 - DNA, 15 bp, Homo sapiens
aataattgcaagatt

SEQ ID NO: 767430 - DNA, 15 bp, Homo sapiens
ataattgcaagattt

SEQ ID NO: 767431 - DNA, 15 bp, Homo sapiens
taattgcaagatttt

SEQ ID NO: 767432 - DNA, 15 bp, Homo sapiens
aattgcaagattttt

SEQ ID NO: 767433 - DNA, 15 bp, Homo sapiens
attgcaagatttttt

SEQ ID NO: 767434 - DNA, 15 bp, Homo sapiens
ttgcaagattttttt

SEQ ID NO: 767435 - DNA, 15 bp, Homo sapiens
tgcaagatttttttt

SEQ ID NO: 767436 - DNA, 15 bp, Homo sapiens
gcaagatttttttta

SEQ ID NO: 767437 - DNA, 15 bp, Homo sapiens
caagattttttttat

SEQ ID NO: 767438 - DNA, 15 bp, Homo sapiens
aagattttttttatt

SEQ ID NO: 767439 - DNA, 15 bp, Homo sapiens
agattttttttattt

SEQ ID NO: 767440 - DNA, 15 bp, Homo sapiens
gattttttttatttt

SEQ ID NO: 767441 - DNA, 15 bp, Homo sapiens
attttttttattttt

SEQ ID NO: 767442 - DNA, 15 bp, Homo sapiens
ttttttttatttttc

SEQ ID NO: 767443 - DNA, 15 bp, Homo sapiens
tttttttatttttca

SEQ ID NO: 767444 - DNA, 15 bp, Homo sapiens
ttttttatttttcat

SEQ ID NO: 767445 - DNA, 15 bp, Homo sapiens
tttttatttttcata

SEQ ID NO: 767446 - DNA, 15 bp, Homo sapiens
ttttatttttcatat

SEQ ID NO: 767447 - DNA, 15 bp, Homo sapiens
tttatttttcatatg

SEQ ID NO: 767448 - DNA, 15 bp, Homo sapiens
ttatttttcatatgt

SEQ ID NO: 767449 - DNA, 15 bp, Homo sapiens
tatttttcatatgtg

SEQ ID NO: 767450 - DNA, 15 bp, Homo sapiens
atttttcatatgtgt

SEQ ID NO: 767451 - DNA, 15 bp, Homo sapiens
tttttcatatgtgtg

SEQ ID NO: 767452 - DNA, 15 bp, Homo sapiens
ttttcatatgtgtgt

SEQ ID NO: 767453 - DNA, 15 bp, Homo sapiens
tttcatatgtgtgtg

SEQ ID NO: 767454 - DNA, 15 bp, Homo sapiens
ttcatatgtgtgtgt

SEQ ID NO: 767455 - DNA, 15 bp, Homo sapiens
tcatatgtgtgtgtg

SEQ ID NO: 767456 - DNA, 15 bp, Homo sapiens
catatgtgtgtgtgt

SEQ ID NO: 767457 - DNA, 15 bp, Homo sapiens
gtgtgtgtgtgtgtc

SEQ ID NO: 767458 - DNA, 15 bp, Homo sapiens
tgtgtgtgtgtgtct

SEQ ID NO: 767459 - DNA, 15 bp, Homo sapiens
gtgtgtgtgtgtctg

SEQ ID NO: 767460 - DNA, 15 bp, Homo sapiens
tgtgtgtgtgtctgt

SEQ ID NO: 767461 - DNA, 15 bp, Homo sapiens
gtgtgtgtgtctgtg

SEQ ID NO: 767462 - DNA, 15 bp, Homo sapiens
tgtgtgtgtctgtgt

SEQ ID NO: 767463 - DNA, 15 bp, Homo sapiens
gtgtgtgtctgtgta

SEQ ID NO: 767464 - DNA, 15 bp, Homo sapiens
tgtgtgtctgtgtat

SEQ ID NO: 767465 - DNA, 15 bp, Homo sapiens
tgtctgtgtatgtgc

SEQ ID NO: 767466 - DNA, 15 bp, Homo sapiens
gtctgtgtatgtgcg

SEQ ID NO: 767467 - DNA, 15 bp, Homo sapiens
tctgtgtatgtgcgt

SEQ ID NO: 767468 - DNA, 15 bp, Homo sapiens
ctgtgtatgtgcgtg

SEQ ID NO: 767469 - DNA, 15 bp, Homo sapiens
tgtatgtgcgtgtga

SEQ ID NO: 767470 - DNA, 15 bp, Homo sapiens
gtatgtgcgtgtgag

SEQ ID NO: 767471 - DNA, 15 bp, Homo sapiens
tatgtgcgtgtgaga

SEQ ID NO: 767472 - DNA, 15 bp, Homo sapiens
atgtgcgtgtgagag

SEQ ID NO: 767473 - DNA, 15 bp, Homo sapiens
tgtgcgtgtgagaga

SEQ ID NO: 767474 - DNA, 15 bp, Homo sapiens
gtgcgtgtgagagag

SEQ ID NO: 767475 - DNA, 15 bp, Homo sapiens
tgcgtgtgagagaga

SEQ ID NO: 767476 - DNA, 15 bp, Homo sapiens
gcgtgtgagagagag

SEQ ID NO: 767477 - DNA, 15 bp, Homo sapiens
cgtgtgagagagaga

SEQ ID NO: 767478 - DNA, 15 bp, Homo sapiens
gtgtgagagagagag

SEQ ID NO: 767479 - DNA, 15 bp, Homo sapiens
agagagagagagaat

SEQ ID NO: 767480 - DNA, 15 bp, Homo sapiens
gagagagagagaata

SEQ ID NO: 767481 - DNA, 15 bp, Homo sapiens
agagagagagaatat

SEQ ID NO: 767482 - DNA, 15 bp, Homo sapiens
gagagagagaatatg

SEQ ID NO: 767483 - DNA, 15 bp, Homo sapiens
agagagagaatatgg

SEQ ID NO: 767484 - DNA, 15 bp, Homo sapiens
gagagagaatatgga

SEQ ID NO: 767485 - DNA, 15 bp, Homo sapiens
agagagaatatggac

SEQ ID NO: 767486 - DNA, 15 bp, Homo sapiens
gagagaatatggacg

SEQ ID NO: 767487 - DNA, 15 bp, Homo sapiens
agagaatatggacga

SEQ ID NO: 767488 - DNA, 15 bp, Homo sapiens
gagaatatggacgat

SEQ ID NO: 767489 - DNA, 15 bp, Homo sapiens
agaatatggacgatg

SEQ ID NO: 767490 - DNA, 15 bp, Homo sapiens
gaatatggacgatgc

SEQ ID NO: 767491 - DNA, 15 bp, Homo sapiens
aatatggacgatgca

SEQ ID NO: 767492 - DNA, 15 bp, Homo sapiens
atatggacgatgcag

SEQ ID NO: 767493 - DNA, 15 bp, Homo sapiens
tatggacgatgcaga

SEQ ID NO: 767494 - DNA, 15 bp, Homo sapiens
atggacgatgcagag

SEQ ID NO: 767495 - DNA, 15 bp, Homo sapiens
tggacgatgcagagg

SEQ ID NO: 767496 - DNA, 15 bp, Homo sapiens
ggacgatgcagaggt

SEQ ID NO: 767497 - DNA, 15 bp, Homo sapiens
gacgatgcagaggtg

SEQ ID NO: 767498 - DNA, 15 bp, Homo sapiens
acgatgcagaggtgg

SEQ ID NO: 767499 - DNA, 15 bp, Homo sapiens
cgatgcagaggtgga

SEQ ID NO: 767500 - DNA, 15 bp, Homo sapiens
gatgcagaggtggat

SEQ ID NO: 767501 - DNA, 15 bp, Homo sapiens
atgcagaggtggatg

SEQ ID NO: 767502 - DNA, 15 bp, Homo sapiens
tgcagaggtggatgg

SEQ ID NO: 767503 - DNA, 15 bp, Homo sapiens
gcagaggtggatgga

SEQ ID NO: 767504 - DNA, 15 bp, Homo sapiens
cagaggtggatggag

SEQ ID NO: 767505 - DNA, 15 bp, Homo sapiens
agaggtggatggagg

SEQ ID NO: 767506 - DNA, 15 bp, Homo sapiens
gaggtggatggagga

SEQ ID NO: 767507 - DNA, 15 bp, Homo sapiens
aggtggatggaggat

SEQ ID NO: 767508 - DNA, 15 bp, Homo sapiens
ggtggatggaggatt

SEQ ID NO: 767509 - DNA, 15 bp, Homo sapiens
gtggatggaggatta

SEQ ID NO: 767510 - DNA, 15 bp, Homo sapiens
tggatggaggattat

SEQ ID NO: 767511 - DNA, 15 bp, Homo sapiens
ggatggaggattatt

SEQ ID NO: 767512 - DNA, 15 bp, Homo sapiens
gatggaggattattt

SEQ ID NO: 767513 - DNA, 15 bp, Homo sapiens
atggaggattatttt

SEQ ID NO: 767514 - DNA, 15 bp, Homo sapiens
tggaggattattttc

SEQ ID NO: 767515 - DNA, 15 bp, Homo sapiens
ggaggattattttct

SEQ ID NO: 767516 - DNA, 15 bp, Homo sapiens
gaggattattttctg

SEQ ID NO: 767517 - DNA, 15 bp, Homo sapiens
aggattattttctgt

SEQ ID NO: 767518 - DNA, 15 bp, Homo sapiens
ggattattttctgtt

SEQ ID NO: 767519 - DNA, 15 bp, Homo sapiens
gattattttctgtta

SEQ ID NO: 767520 - DNA, 15 bp, Homo sapiens
attattttctgttaa

SEQ ID NO: 767521 - DNA, 15 bp, Homo sapiens
ttattttctgttaaa

SEQ ID NO: 767522 - DNA, 15 bp, Homo sapiens
tattttctgttaaaa

SEQ ID NO: 767523 - DNA, 15 bp, Homo sapiens
attttctgttaaaat

SEQ ID NO: 767524 - DNA, 15 bp, Homo sapiens
ttttctgttaaaatc

SEQ ID NO: 767525 - DNA, 15 bp, Homo sapiens
tttctgttaaaatcc

SEQ ID NO: 767526 - DNA, 15 bp, Homo sapiens
ttctgttaaaatccc

SEQ ID NO: 767527 - DNA, 15 bp, Homo sapiens
tctgttaaaatcccc

SEQ ID NO: 767528 - DNA, 15 bp, Homo sapiens
ctgttaaaatcccca

SEQ ID NO: 767529 - DNA, 15 bp, Homo sapiens
tgttaaaatccccag

SEQ ID NO: 767530 - DNA, 15 bp, Homo sapiens
gttaaaatccccagc

SEQ ID NO: 767531 - DNA, 15 bp, Homo sapiens
ttaaaatccccagcg

SEQ ID NO: 767532 - DNA, 15 bp, Homo sapiens
taaaatccccagcgt

SEQ ID NO: 767533 - DNA, 15 bp, Homo sapiens
aaaatccccagcgtg

SEQ ID NO: 767534 - DNA, 15 bp, Homo sapiens
aaatccccagcgtgg

SEQ ID NO: 767535 - DNA, 15 bp, Homo sapiens
aatccccagcgtggc

SEQ ID NO: 767536 - DNA, 15 bp, Homo sapiens
atccccagcgtggct

SEQ ID NO: 767537 - DNA, 15 bp, Homo sapiens
tccccagcgtggctc

SEQ ID NO: 767538 - DNA, 15 bp, Homo sapiens
ccccagcgtggctca

SEQ ID NO: 767539 - DNA, 15 bp, Homo sapiens
cccagcgtggctcag

SEQ ID NO: 767540 - DNA, 15 bp, Homo sapiens
ccagcgtggctcagc

SEQ ID NO: 767541 - DNA, 15 bp, Homo sapiens
cagcgtggctcagct

SEQ ID NO: 767542 - DNA, 15 bp, Homo sapiens
agcgtggctcagctc

SEQ ID NO: 767543 - DNA, 15 bp, Homo sapiens
gcgtggctcagctca

SEQ ID NO: 767544 - DNA, 15 bp, Homo sapiens
cgtggctcagctcac

SEQ ID NO: 767545 - DNA, 15 bp, Homo sapiens
gtggctcagctcacc

SEQ ID NO: 767546 - DNA, 15 bp, Homo sapiens
tggctcagctcacct

SEQ ID NO: 767547 - DNA, 15 bp, Homo sapiens
ggctcagctcacctg

SEQ ID NO: 767548 - DNA, 15 bp, Homo sapiens
gctcagctcacctgt

SEQ ID NO: 767549 - DNA, 15 bp, Homo sapiens
ctcagctcacctgtg

SEQ ID NO: 767550 - DNA, 15 bp, Homo sapiens
tcagctcacctgtgg

SEQ ID NO: 767551 - DNA, 15 bp, Homo sapiens
cagctcacctgtggg

SEQ ID NO: 767552 - DNA, 15 bp, Homo sapiens
agctcacctgtgggg

SEQ ID NO: 767553 - DNA, 15 bp, Homo sapiens
gctcacctgtggggc

SEQ ID NO: 767554 - DNA, 15 bp, Homo sapiens
ctcacctgtggggcc

SEQ ID NO: 767555 - DNA, 15 bp, Homo sapiens
tcacctgtggggcct

SEQ ID NO: 767556 - DNA, 15 bp, Homo sapiens
cacctgtggggcctg

SEQ ID NO: 767557 - DNA, 15 bp, Homo sapiens
acctgtggggcctgc

SEQ ID NO: 767558 - DNA, 15 bp, Homo sapiens
cctgtggggcctgcc

SEQ ID NO: 767559 - DNA, 15 bp, Homo sapiens
ctgtggggcctgcct

SEQ ID NO: 767560 - DNA, 15 bp, Homo sapiens
tgtggggcctgcctc

SEQ ID NO: 767561 - DNA, 15 bp, Homo sapiens
gtggggcctgcctca

SEQ ID NO: 767562 - DNA, 15 bp, Homo sapiens
tggggcctgcctcag

SEQ ID NO: 767563 - DNA, 15 bp, Homo sapiens
ggggcctgcctcagc

SEQ ID NO: 767564 - DNA, 15 bp, Homo sapiens
gggcctgcctcagct

SEQ ID NO: 767565 - DNA, 15 bp, Homo sapiens
ggcctgcctcagctc

SEQ ID NO: 767566 - DNA, 15 bp, Homo sapiens
gcctgcctcagctct

SEQ ID NO: 767567 - DNA, 15 bp, Homo sapiens
cctgcctcagctctg

SEQ ID NO: 767568 - DNA, 15 bp, Homo sapiens
ctgcctcagctctgc

SEQ ID NO: 767569 - DNA, 15 bp, Homo sapiens
tgcctcagctctgca

SEQ ID NO: 767570 - DNA, 15 bp, Homo sapiens
gcctcagctctgcat

SEQ ID NO: 767571 - DNA, 15 bp, Homo sapiens
cctcagctctgcatg

SEQ ID NO: 767572 - DNA, 15 bp, Homo sapiens
ctcagctctgcatgc

SEQ ID NO: 767573 - DNA, 15 bp, Homo sapiens
tcagctctgcatgcc

SEQ ID NO: 767574 - DNA, 15 bp, Homo sapiens
cagctctgcatgcca

SEQ ID NO: 767575 - DNA, 15 bp, Homo sapiens
agctctgcatgccag

SEQ ID NO: 767576 - DNA, 15 bp, Homo sapiens
gctctgcatgccagc

SEQ ID NO: 767577 - DNA, 15 bp, Homo sapiens
ctctgcatgccagct

SEQ ID NO: 767578 - DNA, 15 bp, Homo sapiens
tctgcatgccagctt

SEQ ID NO: 767579 - DNA, 15 bp, Homo sapiens
ctgcatgccagcttt

SEQ ID NO: 767580 - DNA, 15 bp, Homo sapiens
tgcatgccagctttg

SEQ ID NO: 767581 - DNA, 15 bp, Homo sapiens
gcatgccagctttgg

SEQ ID NO: 767582 - DNA, 15 bp, Homo sapiens
catgccagctttggg

SEQ ID NO: 767583 - DNA, 15 bp, Homo sapiens
atgccagctttgggc

SEQ ID NO: 767584 - DNA, 15 bp, Homo sapiens
tgccagctttgggct

SEQ ID NO: 767585 - DNA, 15 bp, Homo sapiens
gccagctttgggctg

SEQ ID NO: 767586 - DNA, 15 bp, Homo sapiens
ccagctttgggctgc

SEQ ID NO: 767587 - DNA, 15 bp, Homo sapiens
cagctttgggctgcc

SEQ ID NO: 767588 - DNA, 15 bp, Homo sapiens
agctttgggctgcca

SEQ ID NO: 767589 - DNA, 15 bp, Homo sapiens
gctttgggctgccag

SEQ ID NO: 767590 - DNA, 15 bp, Homo sapiens
ctttgggctgccaga

SEQ ID NO: 767591 - DNA, 15 bp, Homo sapiens
tttgggctgccagat

SEQ ID NO: 767592 - DNA, 15 bp, Homo sapiens
ttgggctgccagata

SEQ ID NO: 767593 - DNA, 15 bp, Homo sapiens
tgggctgccagatag

SEQ ID NO: 767594 - DNA, 15 bp, Homo sapiens
gggctgccagatagt

SEQ ID NO: 767595 - DNA, 15 bp, Homo sapiens
ggctgccagatagtc

SEQ ID NO: 767596 - DNA, 15 bp, Homo sapiens
gctgccagatagtct

SEQ ID NO: 767597 - DNA, 15 bp, Homo sapiens
ctgccagatagtctt

SEQ ID NO: 767598 - DNA, 15 bp, Homo sapiens
tgccagatagtcttg

SEQ ID NO: 767599 - DNA, 15 bp, Homo sapiens
gccagatagtcttgg

SEQ ID NO: 767600 - DNA, 15 bp, Homo sapiens
ccagatagtcttgga

SEQ ID NO: 767601 - DNA, 15 bp, Homo sapiens
cagatagtcttggag

SEQ ID NO: 767602 - DNA, 15 bp, Homo sapiens
agatagtcttggagc

SEQ ID NO: 767603 - DNA, 15 bp, Homo sapiens
gatagtcttggagct

SEQ ID NO: 767604 - DNA, 15 bp, Homo sapiens
atagtcttggagctt

SEQ ID NO: 767605 - DNA, 15 bp, Homo sapiens
tagtcttggagcttg

SEQ ID NO: 767606 - DNA, 15 bp, Homo sapiens
agtcttggagcttgc

SEQ ID NO: 767607 - DNA, 15 bp, Homo sapiens
gtcttggagcttgcc

SEQ ID NO: 767608 - DNA, 15 bp, Homo sapiens
tcttggagcttgcct

SEQ ID NO: 767609 - DNA, 15 bp, Homo sapiens
cttggagcttgcctt

SEQ ID NO: 767610 - DNA, 15 bp, Homo sapiens
ttggagcttgcctta

SEQ ID NO: 767611 - DNA, 15 bp, Homo sapiens
tggagcttgccttat

SEQ ID NO: 767612 - DNA, 15 bp, Homo sapiens
ggagcttgccttata

SEQ ID NO: 767613 - DNA, 15 bp, Homo sapiens
gagcttgccttatag

SEQ ID NO: 767614 - DNA, 15 bp, Homo sapiens
agcttgccttataga

SEQ ID NO: 767615 - DNA, 15 bp, Homo sapiens
gcttgccttatagaa

SEQ ID NO: 767616 - DNA, 15 bp, Homo sapiens
cttgccttatagaaa

SEQ ID NO: 767617 - DNA, 15 bp, Homo sapiens
ttgccttatagaaag

SEQ ID NO: 767618 - DNA, 15 bp, Homo sapiens
tgccttatagaaagt

SEQ ID NO: 767619 - DNA, 15 bp, Homo sapiens
gccttatagaaagtg

SEQ ID NO: 767620 - DNA, 15 bp, Homo sapiens
ccttatagaaagtgg

SEQ ID NO: 767621 - DNA, 15 bp, Homo sapiens
cttatagaaagtggg

SEQ ID NO: 767622 - DNA, 15 bp, Homo sapiens
ttatagaaagtgggg

SEQ ID NO: 767623 - DNA, 15 bp, Homo sapiens
tatagaaagtgggga

SEQ ID NO: 767624 - DNA, 15 bp, Homo sapiens
atagaaagtggggat

SEQ ID NO: 767625 - DNA, 15 bp, Homo sapiens
tagaaagtggggatc

SEQ ID NO: 767626 - DNA, 15 bp, Homo sapiens
agaaagtggggatcc

SEQ ID NO: 767627 - DNA, 15 bp, Homo sapiens
gaaagtggggatcct

SEQ ID NO: 767628 - DNA, 15 bp, Homo sapiens
aaagtggggatccta

SEQ ID NO: 767629 - DNA, 15 bp, Homo sapiens
aagtggggatcctag

SEQ ID NO: 767630 - DNA, 15 bp, Homo sapiens
agtggggatcctagc

SEQ ID NO: 767631 - DNA, 15 bp, Homo sapiens
gtggggatcctagcc

SEQ ID NO: 767632 - DNA, 15 bp, Homo sapiens
tggggatcctagccc

SEQ ID NO: 767633 - DNA, 15 bp, Homo sapiens
ggggatcctagcccc

SEQ ID NO: 767634 - DNA, 15 bp, Homo sapiens
gggatcctagcccca

SEQ ID NO: 767635 - DNA, 15 bp, Homo sapiens
ggatcctagccccat

SEQ ID NO: 767636 - DNA, 15 bp, Homo sapiens
gatcctagccccatt

SEQ ID NO: 767637 - DNA, 15 bp, Homo sapiens
atcctagccccattt

SEQ ID NO: 767638 - DNA, 15 bp, Homo sapiens
tcctagccccatttt

SEQ ID NO: 767639 - DNA, 15 bp, Homo sapiens
cctagccccattttt

SEQ ID NO: 767640 - DNA, 15 bp, Homo sapiens
ctagccccatttttt

SEQ ID NO: 767641 - DNA, 15 bp, Homo sapiens
tagccccattttttt

SEQ ID NO: 767642 - DNA, 15 bp, Homo sapiens
agccccatttttttc

SEQ ID NO: 767643 - DNA, 15 bp, Homo sapiens
gccccatttttttcc

SEQ ID NO: 767644 - DNA, 15 bp, Homo sapiens
ccccatttttttcct

SEQ ID NO: 767645 - DNA, 15 bp, Homo sapiens
cccatttttttcctg

SEQ ID NO: 767646 - DNA, 15 bp, Homo sapiens
ccatttttttcctgt

SEQ ID NO: 767647 - DNA, 15 bp, Homo sapiens
catttttttcctgtg

SEQ ID NO: 767648 - DNA, 15 bp, Homo sapiens
atttttttcctgtgg

SEQ ID NO: 767649 - DNA, 15 bp, Homo sapiens
tttttttcctgtggc

SEQ ID NO: 767650 - DNA, 15 bp, Homo sapiens
ttttttcctgtggct

SEQ ID NO: 767651 - DNA, 15 bp, Homo sapiens
tttttcctgtggctt

SEQ ID NO: 767652 - DNA, 15 bp, Homo sapiens
ttttcctgtggcttc

SEQ ID NO: 767653 - DNA, 15 bp, Homo sapiens
tttcctgtggcttcc

SEQ ID NO: 767654 - DNA, 15 bp, Homo sapiens
ttcctgtggcttccc

SEQ ID NO: 767655 - DNA, 15 bp, Homo sapiens
tcctgtggcttccct

SEQ ID NO: 767656 - DNA, 15 bp, Homo sapiens
cctgtggcttccctg

SEQ ID NO: 767657 - DNA, 15 bp, Homo sapiens
ctgtggcttccctgg

SEQ ID NO: 767658 - DNA, 15 bp, Homo sapiens
tgtggcttccctggg

SEQ ID NO: 767659 - DNA, 15 bp, Homo sapiens
gtggcttccctgggt

SEQ ID NO: 767660 - DNA, 15 bp, Homo sapiens
ggcttccctgggttt

SEQ ID NO: 767661 - DNA, 15 bp, Homo sapiens
gcttccctgggtttt

SEQ ID NO: 767662 - DNA, 15 bp, Homo sapiens
cttccctgggttttt

SEQ ID NO: 767663 - DNA, 15 bp, Homo sapiens
ttccctgggtttttc

SEQ ID NO: 767664 - DNA, 15 bp, Homo sapiens
tccctgggtttttct

SEQ ID NO: 767665 - DNA, 15 bp, Homo sapiens
ccctgggtttttctg

SEQ ID NO: 767666 - DNA, 15 bp, Homo sapiens
cctgggtttttctga

SEQ ID NO: 767667 - DNA, 15 bp, Homo sapiens
ctgggtttttctgaa

SEQ ID NO: 767668 - DNA, 15 bp, Homo sapiens
tgggtttttctgaac

SEQ ID NO: 767669 - DNA, 15 bp, Homo sapiens
gggtttttctgaaca

SEQ ID NO: 767670 - DNA, 15 bp, Homo sapiens
ggtttttctgaacat

SEQ ID NO: 767671 - DNA, 15 bp, Homo sapiens
gtttttctgaacatg

SEQ ID NO: 767672 - DNA, 15 bp, Homo sapiens
tttttctgaacatga

SEQ ID NO: 767673 - DNA, 15 bp, Homo sapiens
ttttctgaacatgaa

SEQ ID NO: 767674 - DNA, 15 bp, Homo sapiens
tttctgaacatgaac

SEQ ID NO: 767675 - DNA, 15 bp, Homo sapiens
ttctgaacatgaaca

SEQ ID NO: 767676 - DNA, 15 bp, Homo sapiens
tctgaacatgaacaa

SEQ ID NO: 767677 - DNA, 15 bp, Homo sapiens
ctgaacatgaacaaa

SEQ ID NO: 767678 - DNA, 15 bp, Homo sapiens
tgaacatgaacaaac

SEQ ID NO: 767679 - DNA, 15 bp, Homo sapiens
gaacatgaacaaacc

SEQ ID NO: 767680 - DNA, 15 bp, Homo sapiens
aacatgaacaaacct

SEQ ID NO: 767681 - DNA, 15 bp, Homo sapiens
acatgaacaaacctt

SEQ ID NO: 767682 - DNA, 15 bp, Homo sapiens
catgaacaaaccttg

SEQ ID NO: 767683 - DNA, 15 bp, Homo sapiens
atgaacaaaccttgc

SEQ ID NO: 767684 - DNA, 15 bp, Homo sapiens
tgaacaaaccttgct

SEQ ID NO: 767685 - DNA, 15 bp, Homo sapiens
gaacaaaccttgctt

SEQ ID NO: 767686 - DNA, 15 bp, Homo sapiens
aacaaaccttgcttt

SEQ ID NO: 767687 - DNA, 15 bp, Homo sapiens
acaaaccttgctttc

SEQ ID NO: 767688 - DNA, 15 bp, Homo sapiens
caaaccttgctttcc

SEQ ID NO: 767689 - DNA, 15 bp, Homo sapiens
aaaccttgctttcca

SEQ ID NO: 767690 - DNA, 15 bp, Homo sapiens
aaccttgctttccat

SEQ ID NO: 767691 - DNA, 15 bp, Homo sapiens
accttgctttccatc

SEQ ID NO: 767692 - DNA, 15 bp, Homo sapiens
ccttgctttccatct

SEQ ID NO: 767693 - DNA, 15 bp, Homo sapiens
cttgctttccatctc

SEQ ID NO: 767694 - DNA, 15 bp, Homo sapiens
ttgctttccatctct

SEQ ID NO: 767695 - DNA, 15 bp, Homo sapiens
tgctttccatctcta

SEQ ID NO: 767696 - DNA, 15 bp, Homo sapiens
gctttccatctctaa

SEQ ID NO: 767697 - DNA, 15 bp, Homo sapiens
ctttccatctctaaa

SEQ ID NO: 767698 - DNA, 15 bp, Homo sapiens
tttccatctctaaac

SEQ ID NO: 767699 - DNA, 15 bp, Homo sapiens
ttccatctctaaacg

SEQ ID NO: 767700 - DNA, 15 bp, Homo sapiens
tccatctctaaacgc

SEQ ID NO: 767701 - DNA, 15 bp, Homo sapiens
ccatctctaaacgct

SEQ ID NO: 767702 - DNA, 15 bp, Homo sapiens
catctctaaacgctg

SEQ ID NO: 767703 - DNA, 15 bp, Homo sapiens
atctctaaacgctgc

SEQ ID NO: 767704 - DNA, 15 bp, Homo sapiens
tctctaaacgctgct

SEQ ID NO: 767705 - DNA, 15 bp, Homo sapiens
ctctaaacgctgctg

SEQ ID NO: 767706 - DNA, 15 bp, Homo sapiens
tctaaacgctgctgg

SEQ ID NO: 767707 - DNA, 15 bp, Homo sapiens
ctaaacgctgctggg

SEQ ID NO: 767708 - DNA, 15 bp, Homo sapiens
taaacgctgctgggt

SEQ ID NO: 767709 - DNA, 15 bp, Homo sapiens
aaacgctgctgggtg

SEQ ID NO: 767710 - DNA, 15 bp, Homo sapiens
aacgctgctgggtgg

SEQ ID NO: 767711 - DNA, 15 bp, Homo sapiens
acgctgctgggtggt

SEQ ID NO: 767712 - DNA, 15 bp, Homo sapiens
cgctgctgggtggtc

SEQ ID NO: 767713 - DNA, 15 bp, Homo sapiens
gctgctgggtggtcc

SEQ ID NO: 767714 - DNA, 15 bp, Homo sapiens
ctgctgggtggtcct

SEQ ID NO: 767715 - DNA, 15 bp, Homo sapiens
tgctgggtggtcctt

SEQ ID NO: 767716 - DNA, 15 bp, Homo sapiens
gctgggtggtccttg

SEQ ID NO: 767717 - DNA, 15 bp, Homo sapiens
ctgggtggtccttgc

SEQ ID NO: 767718 - DNA, 15 bp, Homo sapiens
tgggtggtccttgcc

SEQ ID NO: 767719 - DNA, 15 bp, Homo sapiens
gggtggtccttgccg

SEQ ID NO: 767720 - DNA, 15 bp, Homo sapiens
ggtggtccttgccgt

SEQ ID NO: 767721 - DNA, 15 bp, Homo sapiens
gtggtccttgccgtt

SEQ ID NO: 767722 - DNA, 15 bp, Homo sapiens
tggtccttgccgttg

SEQ ID NO: 767723 - DNA, 15 bp, Homo sapiens
ggtccttgccgttgg

SEQ ID NO: 767724 - DNA, 15 bp, Homo sapiens
gtccttgccgttggg

SEQ ID NO: 767725 - DNA, 15 bp, Homo sapiens
tccttgccgttggga

SEQ ID NO: 767726 - DNA, 15 bp, Homo sapiens
ccttgccgttgggat

SEQ ID NO: 767727 - DNA, 15 bp, Homo sapiens
cttgccgttgggatt

SEQ ID NO: 767728 - DNA, 15 bp, Homo sapiens
ttgccgttgggattc

SEQ ID NO: 767729 - DNA, 15 bp, Homo sapiens
tgccgttgggattct

SEQ ID NO: 767730 - DNA, 15 bp, Homo sapiens
gccgttgggattctg

SEQ ID NO: 767731 - DNA, 15 bp, Homo sapiens
ccgttgggattctgg

SEQ ID NO: 767732 - DNA, 15 bp, Homo sapiens
cgttgggattctgga

SEQ ID NO: 767733 - DNA, 15 bp, Homo sapiens
gttgggattctggaa

SEQ ID NO: 767734 - DNA, 15 bp, Homo sapiens
ttgggattctggaat

SEQ ID NO: 767735 - DNA, 15 bp, Homo sapiens
tgggattctggaatt

SEQ ID NO: 767736 - DNA, 15 bp, Homo sapiens
gggattctggaattc

SEQ ID NO: 767737 - DNA, 15 bp, Homo sapiens
ggattctggaattct

SEQ ID NO: 767738 - DNA, 15 bp, Homo sapiens
gattctggaattctg

SEQ ID NO: 767739 - DNA, 15 bp, Homo sapiens
attctggaattctgg

SEQ ID NO: 767740 - DNA, 15 bp, Homo sapiens
ttctggaattctggc

SEQ ID NO: 767741 - DNA, 15 bp, Homo sapiens
tctggaattctggcc

SEQ ID NO: 767742 - DNA, 15 bp, Homo sapiens
ctggaattctggccc

SEQ ID NO: 767743 - DNA, 15 bp, Homo sapiens
tggaattctggccct

SEQ ID NO: 767744 - DNA, 15 bp, Homo sapiens
ggaattctggccctg

SEQ ID NO: 767745 - DNA, 15 bp, Homo sapiens
gaattctggccctgt

SEQ ID NO: 767746 - DNA, 15 bp, Homo sapiens
aattctggccctgtc

SEQ ID NO: 767747 - DNA, 15 bp, Homo sapiens
attctggccctgtct

SEQ ID NO: 767748 - DNA, 15 bp, Homo sapiens
ttctggccctgtctg

SEQ ID NO: 767749 - DNA, 15 bp, Homo sapiens
tctggccctgtctgg

SEQ ID NO: 767750 - DNA, 15 bp, Homo sapiens
ctggccctgtctggg

SEQ ID NO: 767751 - DNA, 15 bp, Homo sapiens
tggccctgtctgggg

SEQ ID NO: 767752 - DNA, 15 bp, Homo sapiens
ggccctgtctggggt

SEQ ID NO: 767753 - DNA, 15 bp, Homo sapiens
gccctgtctggggtg

SEQ ID NO: 767754 - DNA, 15 bp, Homo sapiens
ccctgtctggggtga

SEQ ID NO: 767755 - DNA, 15 bp, Homo sapiens
cctgtctggggtgag

SEQ ID NO: 767756 - DNA, 15 bp, Homo sapiens
ctgtctggggtgagc

SEQ ID NO: 767757 - DNA, 15 bp, Homo sapiens
tgtctggggtgagcc

SEQ ID NO: 767758 - DNA, 15 bp, Homo sapiens
gtctggggtgagcct

SEQ ID NO: 767759 - DNA, 15 bp, Homo sapiens
tctggggtgagcctt

SEQ ID NO: 767760 - DNA, 15 bp, Homo sapiens
ctggggtgagccttg

SEQ ID NO: 767761 - DNA, 15 bp, Homo sapiens
tggggtgagccttgg

SEQ ID NO: 767762 - DNA, 15 bp, Homo sapiens
ggggtgagccttggg

SEQ ID NO: 767763 - DNA, 15 bp, Homo sapiens
gggtgagccttgggc

SEQ ID NO: 767764 - DNA, 15 bp, Homo sapiens
ggtgagccttgggca

SEQ ID NO: 767765 - DNA, 15 bp, Homo sapiens
gtgagccttgggcat

SEQ ID NO: 767766 - DNA, 15 bp, Homo sapiens
tgagccttgggcatc

SEQ ID NO: 767767 - DNA, 15 bp, Homo sapiens
gagccttgggcatct

SEQ ID NO: 767768 - DNA, 15 bp, Homo sapiens
agccttgggcatcta

SEQ ID NO: 767769 - DNA, 15 bp, Homo sapiens
gccttgggcatctat

SEQ ID NO: 767770 - DNA, 15 bp, Homo sapiens
ccttgggcatctatc

SEQ ID NO: 767771 - DNA, 15 bp, Homo sapiens
cttgggcatctatct

SEQ ID NO: 767772 - DNA, 15 bp, Homo sapiens
ttgggcatctatctc

SEQ ID NO: 767773 - DNA, 15 bp, Homo sapiens
tgggcatctatctca

SEQ ID NO: 767774 - DNA, 15 bp, Homo sapiens
gggcatctatctcat

SEQ ID NO: 767775 - DNA, 15 bp, Homo sapiens
ggcatctatctcata

SEQ ID NO: 767776 - DNA, 15 bp, Homo sapiens
gcatctatctcatag

SEQ ID NO: 767777 - DNA, 15 bp, Homo sapiens
catctatctcatagg

SEQ ID NO: 767778 - DNA, 15 bp, Homo sapiens
atctatctcataggc

SEQ ID NO: 767779 - DNA, 15 bp, Homo sapiens
tctatctcataggca

SEQ ID NO: 767780 - DNA, 15 bp, Homo sapiens
ctatctcataggcac

SEQ ID NO: 767781 - DNA, 15 bp, Homo sapiens
tatctcataggcact

SEQ ID NO: 767782 - DNA, 15 bp, Homo sapiens
atctcataggcactc

SEQ ID NO: 767783 - DNA, 15 bp, Homo sapiens
tctcataggcactca

SEQ ID NO: 767784 - DNA, 15 bp, Homo sapiens
ctcataggcactcat

SEQ ID NO: 767785 - DNA, 15 bp, Homo sapiens
tcataggcactcatg

SEQ ID NO: 767786 - DNA, 15 bp, Homo sapiens
cataggcactcatgc

SEQ ID NO: 767787 - DNA, 15 bp, Homo sapiens
ataggcactcatgca

SEQ ID NO: 767788 - DNA, 15 bp, Homo sapiens
taggcactcatgcaa

SEQ ID NO: 767789 - DNA, 15 bp, Homo sapiens
aggcactcatgcaac

SEQ ID NO: 767790 - DNA, 15 bp, Homo sapiens
ggcactcatgcaacc

SEQ ID NO: 767791 - DNA, 15 bp, Homo sapiens
gcactcatgcaacct

SEQ ID NO: 767792 - DNA, 15 bp, Homo sapiens
cactcatgcaacctc

SEQ ID NO: 767793 - DNA, 15 bp, Homo sapiens
actcatgcaacctca

SEQ ID NO: 767794 - DNA, 15 bp, Homo sapiens
ctcatgcaacctcag

SEQ ID NO: 767795 - DNA, 15 bp, Homo sapiens
tcatgcaacctcagt

SEQ ID NO: 767796 - DNA, 15 bp, Homo sapiens
catgcaacctcagtt

SEQ ID NO: 767797 - DNA, 15 bp, Homo sapiens
atgcaacctcagttg

SEQ ID NO: 767798 - DNA, 15 bp, Homo sapiens
tgcaacctcagttgg

SEQ ID NO: 767799 - DNA, 15 bp, Homo sapiens
gcaacctcagttggg

SEQ ID NO: 767800 - DNA, 15 bp, Homo sapiens
caacctcagttgggt

SEQ ID NO: 767801 - DNA, 15 bp, Homo sapiens
aacctcagttgggtt

SEQ ID NO: 767802 - DNA, 15 bp, Homo sapiens
acctcagttgggttg

SEQ ID NO: 767803 - DNA, 15 bp, Homo sapiens
cctcagttgggttgc

SEQ ID NO: 767804 - DNA, 15 bp, Homo sapiens
ctcagttgggttgct

SEQ ID NO: 767805 - DNA, 15 bp, Homo sapiens
tcagttgggttgcta

SEQ ID NO: 767806 - DNA, 15 bp, Homo sapiens
cagttgggttgctat

SEQ ID NO: 767807 - DNA, 15 bp, Homo sapiens
agttgggttgctata

SEQ ID NO: 767808 - DNA, 15 bp, Homo sapiens
gttgggttgctatag

SEQ ID NO: 767809 - DNA, 15 bp, Homo sapiens
ttgggttgctataga

SEQ ID NO: 767810 - DNA, 15 bp, Homo sapiens
tgggttgctatagaa

SEQ ID NO: 767811 - DNA, 15 bp, Homo sapiens
gggttgctatagaaa

SEQ ID NO: 767812 - DNA, 15 bp, Homo sapiens
ggttgctatagaaac

SEQ ID NO: 767813 - DNA, 15 bp, Homo sapiens
gttgctatagaaacc

SEQ ID NO: 767814 - DNA, 15 bp, Homo sapiens
ttgctatagaaacca

SEQ ID NO: 767815 - DNA, 15 bp, Homo sapiens
tgctatagaaaccaa

SEQ ID NO: 767816 - DNA, 15 bp, Homo sapiens
gctatagaaaccaaa

SEQ ID NO: 767817 - DNA, 15 bp, Homo sapiens
ctatagaaaccaaat

SEQ ID NO: 767818 - DNA, 15 bp, Homo sapiens
tatagaaaccaaatc

SEQ ID NO: 767819 - DNA, 15 bp, Homo sapiens
atagaaaccaaatct

SEQ ID NO: 767820 - DNA, 15 bp, Homo sapiens
tagaaaccaaatctc

SEQ ID NO: 767821 - DNA, 15 bp, Homo sapiens
agaaaccaaatctca

SEQ ID NO: 767822 - DNA, 15 bp, Homo sapiens
gaaaccaaatctcat

SEQ ID NO: 767823 - DNA, 15 bp, Homo sapiens
aaaccaaatctcatg

SEQ ID NO: 767824 - DNA, 15 bp, Homo sapiens
aaccaaatctcatgg

SEQ ID NO: 767825 - DNA, 15 bp, Homo sapiens
accaaatctcatggc

SEQ ID NO: 767826 - DNA, 15 bp, Homo sapiens
ccaaatctcatggcc

SEQ ID NO: 767827 - DNA, 15 bp, Homo sapiens
caaatctcatggcct

SEQ ID NO: 767828 - DNA, 15 bp, Homo sapiens
aaatctcatggcctg

SEQ ID NO: 767829 - DNA, 15 bp, Homo sapiens
aatctcatggcctgc

SEQ ID NO: 767830 - DNA, 15 bp, Homo sapiens
atctcatggcctgct

SEQ ID NO: 767831 - DNA, 15 bp, Homo sapiens
tctcatggcctgctg

SEQ ID NO: 767832 - DNA, 15 bp, Homo sapiens
ctcatggcctgctgg

SEQ ID NO: 767833 - DNA, 15 bp, Homo sapiens
tcatggcctgctggg

SEQ ID NO: 767834 - DNA, 15 bp, Homo sapiens
catggcctgctgggg

SEQ ID NO: 767835 - DNA, 15 bp, Homo sapiens
atggcctgctggggg

SEQ ID NO: 767836 - DNA, 15 bp, Homo sapiens
tggcctgctgggggc

SEQ ID NO: 767837 - DNA, 15 bp, Homo sapiens
ggcctgctgggggcc

SEQ ID NO: 767838 - DNA, 15 bp, Homo sapiens
gcctgctgggggcct

SEQ ID NO: 767839 - DNA, 15 bp, Homo sapiens
cctgctgggggcctg

SEQ ID NO: 767840 - DNA, 15 bp, Homo sapiens
ctgctgggggcctgt

SEQ ID NO: 767841 - DNA, 15 bp, Homo sapiens
tgctgggggcctgtt

SEQ ID NO: 767842 - DNA, 15 bp, Homo sapiens
gctgggggcctgttt

SEQ ID NO: 767843 - DNA, 15 bp, Homo sapiens
ctgggggcctgttta

SEQ ID NO: 767844 - DNA, 15 bp, Homo sapiens
tgggggcctgtttag

SEQ ID NO: 767845 - DNA, 15 bp, Homo sapiens
gggggcctgtttagt

SEQ ID NO: 767846 - DNA, 15 bp, Homo sapiens
ggggcctgtttagtt

SEQ ID NO: 767847 - DNA, 15 bp, Homo sapiens
gggcctgtttagttc

SEQ ID NO: 767848 - DNA, 15 bp, Homo sapiens
ggcctgtttagttct

SEQ ID NO: 767849 - DNA, 15 bp, Homo sapiens
gcctgtttagttctt

SEQ ID NO: 767850 - DNA, 15 bp, Homo sapiens
cctgtttagttcttt

SEQ ID NO: 767851 - DNA, 15 bp, Homo sapiens
ctgtttagttcttta

SEQ ID NO: 767852 - DNA, 15 bp, Homo sapiens
tgtttagttctttat

SEQ ID NO: 767853 - DNA, 15 bp, Homo sapiens
gtttagttctttatg

SEQ ID NO: 767854 - DNA, 15 bp, Homo sapiens
tttagttctttatgt

SEQ ID NO: 767855 - DNA, 15 bp, Homo sapiens
ttagttctttatgtc

SEQ ID NO: 767856 - DNA, 15 bp, Homo sapiens
tagttctttatgtcc

SEQ ID NO: 767857 - DNA, 15 bp, Homo sapiens
agttctttatgtcct

SEQ ID NO: 767858 - DNA, 15 bp, Homo sapiens
gttctttatgtcctg

SEQ ID NO: 767859 - DNA, 15 bp, Homo sapiens
ttctttatgtcctgc

SEQ ID NO: 767860 - DNA, 15 bp, Homo sapiens
tctttatgtcctgcc

SEQ ID NO: 767861 - DNA, 15 bp, Homo sapiens
ctttatgtcctgcct

SEQ ID NO: 767862 - DNA, 15 bp, Homo sapiens
tttatgtcctgcctc

SEQ ID NO: 767863 - DNA, 15 bp, Homo sapiens
ttatgtcctgcctct

SEQ ID NO: 767864 - DNA, 15 bp, Homo sapiens
tatgtcctgcctctg

SEQ ID NO: 767865 - DNA, 15 bp, Homo sapiens
atgtcctgcctctgt

SEQ ID NO: 767866 - DNA, 15 bp, Homo sapiens
tgtcctgcctctgtc

SEQ ID NO: 767867 - DNA, 15 bp, Homo sapiens
gtcctgcctctgtct

SEQ ID NO: 767868 - DNA, 15 bp, Homo sapiens
tcctgcctctgtctg

SEQ ID NO: 767869 - DNA, 15 bp, Homo sapiens
cctgcctctgtctgg

SEQ ID NO: 767870 - DNA, 15 bp, Homo sapiens
ctgcctctgtctggg

SEQ ID NO: 767871 - DNA, 15 bp, Homo sapiens
tgcctctgtctgggg

SEQ ID NO: 767872 - DNA, 15 bp, Homo sapiens
gcctctgtctgggga

SEQ ID NO: 767873 - DNA, 15 bp, Homo sapiens
cctctgtctggggag

SEQ ID NO: 767874 - DNA, 15 bp, Homo sapiens
ctctgtctggggaga

SEQ ID NO: 767875 - DNA, 15 bp, Homo sapiens
tctgtctggggagat

SEQ ID NO: 767876 - DNA, 15 bp, Homo sapiens
ctgtctggggagata

SEQ ID NO: 767877 - DNA, 15 bp, Homo sapiens
tgtctggggagataa

SEQ ID NO: 767878 - DNA, 15 bp, Homo sapiens
gtctggggagataat

SEQ ID NO: 767879 - DNA, 15 bp, Homo sapiens
tctggggagataatg

SEQ ID NO: 767880 - DNA, 15 bp, Homo sapiens
ctggggagataatgt

SEQ ID NO: 767881 - DNA, 15 bp, Homo sapiens
tggggagataatgtg

SEQ ID NO: 767882 - DNA, 15 bp, Homo sapiens
ggggagataatgtgg

SEQ ID NO: 767883 - DNA, 15 bp, Homo sapiens
gggagataatgtgga

SEQ ID NO: 767884 - DNA, 15 bp, Homo sapiens
ggagataatgtggat

SEQ ID NO: 767885 - DNA, 15 bp, Homo sapiens
gagataatgtggatg

SEQ ID NO: 767886 - DNA, 15 bp, Homo sapiens
agataatgtggatgg

SEQ ID NO: 767887 - DNA, 15 bp, Homo sapiens
gataatgtggatggt

SEQ ID NO: 767888 - DNA, 15 bp, Homo sapiens
ataatgtggatggtg

SEQ ID NO: 767889 - DNA, 15 bp, Homo sapiens
taatgtggatggtga

SEQ ID NO: 767890 - DNA, 15 bp, Homo sapiens
aatgtggatggtgac

SEQ ID NO: 767891 - DNA, 15 bp, Homo sapiens
atgtggatggtgaca

SEQ ID NO: 767892 - DNA, 15 bp, Homo sapiens
tgtggatggtgacac

SEQ ID NO: 767893 - DNA, 15 bp, Homo sapiens
gtggatggtgacact

SEQ ID NO: 767894 - DNA, 15 bp, Homo sapiens
tggatggtgacactg

SEQ ID NO: 767895 - DNA, 15 bp, Homo sapiens
ggatggtgacactgt

SEQ ID NO: 767896 - DNA, 15 bp, Homo sapiens
gatggtgacactgtt

SEQ ID NO: 767897 - DNA, 15 bp, Homo sapiens
atggtgacactgttg

SEQ ID NO: 767898 - DNA, 15 bp, Homo sapiens
tggtgacactgttgt

SEQ ID NO: 767899 - DNA, 15 bp, Homo sapiens
ggtgacactgttgtt

SEQ ID NO: 767900 - DNA, 15 bp, Homo sapiens
gtgacactgttgttc

SEQ ID NO: 767901 - DNA, 15 bp, Homo sapiens
tgacactgttgttca

SEQ ID NO: 767902 - DNA, 15 bp, Homo sapiens
gacactgttgttcac

SEQ ID NO: 767903 - DNA, 15 bp, Homo sapiens
acactgttgttcact

SEQ ID NO: 767904 - DNA, 15 bp, Homo sapiens
cactgttgttcactg

SEQ ID NO: 767905 - DNA, 15 bp, Homo sapiens
actgttgttcactgc

SEQ ID NO: 767906 - DNA, 15 bp, Homo sapiens
ctgttgttcactgct

SEQ ID NO: 767907 - DNA, 15 bp, Homo sapiens
tgttgttcactgctc

SEQ ID NO: 767908 - DNA, 15 bp, Homo sapiens
gttgttcactgctca

SEQ ID NO: 767909 - DNA, 15 bp, Homo sapiens
ttgttcactgctcaa

SEQ ID NO: 767910 - DNA, 15 bp, Homo sapiens
tgttcactgctcaag

SEQ ID NO: 767911 - DNA, 15 bp, Homo sapiens
gttcactgctcaagt

SEQ ID NO: 767912 - DNA, 15 bp, Homo sapiens
ttcactgctcaagtg

SEQ ID NO: 767913 - DNA, 15 bp, Homo sapiens
tcactgctcaagtgg

SEQ ID NO: 767914 - DNA, 15 bp, Homo sapiens
cactgctcaagtgga

SEQ ID NO: 767915 - DNA, 15 bp, Homo sapiens
actgctcaagtggag

SEQ ID NO: 767916 - DNA, 15 bp, Homo sapiens
ctgctcaagtggaga

SEQ ID NO: 767917 - DNA, 15 bp, Homo sapiens
tgctcaagtggagaa

SEQ ID NO: 767918 - DNA, 15 bp, Homo sapiens
gctcaagtggagaat

SEQ ID NO: 767919 - DNA, 15 bp, Homo sapiens
ctcaagtggagaatt

SEQ ID NO: 767920 - DNA, 15 bp, Homo sapiens
tcaagtggagaattc

SEQ ID NO: 767921 - DNA, 15 bp, Homo sapiens
caagtggagaattcc

SEQ ID NO: 767922 - DNA, 15 bp, Homo sapiens
aagtggagaattccc

SEQ ID NO: 767923 - DNA, 15 bp, Homo sapiens
agtggagaattccct

SEQ ID NO: 767924 - DNA, 15 bp, Homo sapiens
gtggagaattccctc

SEQ ID NO: 767925 - DNA, 15 bp, Homo sapiens
tggagaattccctct

SEQ ID NO: 767926 - DNA, 15 bp, Homo sapiens
ggagaattccctcta

SEQ ID NO: 767927 - DNA, 15 bp, Homo sapiens
gagaattccctctat

SEQ ID NO: 767928 - DNA, 15 bp, Homo sapiens
agaattccctctatc

SEQ ID NO: 767929 - DNA, 15 bp, Homo sapiens
gaattccctctatca

SEQ ID NO: 767930 - DNA, 15 bp, Homo sapiens
aattccctctatcac

SEQ ID NO: 767931 - DNA, 15 bp, Homo sapiens
attccctctatcacc

SEQ ID NO: 767932 - DNA, 15 bp, Homo sapiens
ttccctctatcaccc

SEQ ID NO: 767933 - DNA, 15 bp, Homo sapiens
tccctctatcaccca

SEQ ID NO: 767934 - DNA, 15 bp, Homo sapiens
ccctctatcacccaa

SEQ ID NO: 767935 - DNA, 15 bp, Homo sapiens
cctctatcacccaac

SEQ ID NO: 767936 - DNA, 15 bp, Homo sapiens
ctctatcacccaaca

SEQ ID NO: 767937 - DNA, 15 bp, Homo sapiens
tctatcacccaacaa

SEQ ID NO: 767938 - DNA, 15 bp, Homo sapiens
ctatcacccaacaag

SEQ ID NO: 767939 - DNA, 15 bp, Homo sapiens
tatcacccaacaagg

SEQ ID NO: 767940 - DNA, 15 bp, Homo sapiens
atcacccaacaaggc

SEQ ID NO: 767941 - DNA, 15 bp, Homo sapiens
tcacccaacaaggct

SEQ ID NO: 767942 - DNA, 15 bp, Homo sapiens
cacccaacaaggctt

SEQ ID NO: 767943 - DNA, 15 bp, Homo sapiens
acccaacaaggcttt

SEQ ID NO: 767944 - DNA, 15 bp, Homo sapiens
cccaacaaggctttt

SEQ ID NO: 767945 - DNA, 15 bp, Homo sapiens
ccaacaaggcttttc

SEQ ID NO: 767946 - DNA, 15 bp, Homo sapiens
caacaaggcttttca

SEQ ID NO: 767947 - DNA, 15 bp, Homo sapiens
aacaaggcttttcaa

SEQ ID NO: 767948 - DNA, 15 bp, Homo sapiens
acaaggcttttcaag

SEQ ID NO: 767949 - DNA, 15 bp, Homo sapiens
caaggcttttcaagg

SEQ ID NO: 767950 - DNA, 15 bp, Homo sapiens
aaggcttttcaagga

SEQ ID NO: 767951 - DNA, 15 bp, Homo sapiens
aggcttttcaaggac

SEQ ID NO: 767952 - DNA, 15 bp, Homo sapiens
ggcttttcaaggacc

SEQ ID NO: 767953 - DNA, 15 bp, Homo sapiens
gcttttcaaggaccc

SEQ ID NO: 767954 - DNA, 15 bp, Homo sapiens
cttttcaaggaccca

SEQ ID NO: 767955 - DNA, 15 bp, Homo sapiens
ttttcaaggacccaa

SEQ ID NO: 767956 - DNA, 15 bp, Homo sapiens
tttcaaggacccaac

SEQ ID NO: 767957 - DNA, 15 bp, Homo sapiens
ttcaaggacccaacc

SEQ ID NO: 767958 - DNA, 15 bp, Homo sapiens
tcaaggacccaacca

SEQ ID NO: 767959 - DNA, 15 bp, Homo sapiens
caaggacccaaccac

SEQ ID NO: 767960 - DNA, 15 bp, Homo sapiens
aaggacccaaccaca

SEQ ID NO: 767961 - DNA, 15 bp, Homo sapiens
aggacccaaccacag

SEQ ID NO: 767962 - DNA, 15 bp, Homo sapiens
ggacccaaccacaga

SEQ ID NO: 767963 - DNA, 15 bp, Homo sapiens
gacccaaccacagaa

SEQ ID NO: 767964 - DNA, 15 bp, Homo sapiens
acccaaccacagaag

SEQ ID NO: 767965 - DNA, 15 bp, Homo sapiens
cccaaccacagaagg

SEQ ID NO: 767966 - DNA, 15 bp, Homo sapiens
ccaaccacagaaggg

SEQ ID NO: 767967 - DNA, 15 bp, Homo sapiens
caaccacagaaggga

SEQ ID NO: 767968 - DNA, 15 bp, Homo sapiens
aaccacagaagggac

SEQ ID NO: 767969 - DNA, 15 bp, Homo sapiens
accacagaagggact

SEQ ID NO: 767970 - DNA, 15 bp, Homo sapiens
ccacagaagggactc

SEQ ID NO: 767971 - DNA, 15 bp, Homo sapiens
cacagaagggactcg

SEQ ID NO: 767972 - DNA, 15 bp, Homo sapiens
acagaagggactcgg

SEQ ID NO: 767973 - DNA, 15 bp, Homo sapiens
cagaagggactcggt

SEQ ID NO: 767974 - DNA, 15 bp, Homo sapiens
agaagggactcggta

SEQ ID NO: 767975 - DNA, 15 bp, Homo sapiens
gaagggactcggtaa

SEQ ID NO: 767976 - DNA, 15 bp, Homo sapiens
aagggactcggtaac

SEQ ID NO: 767977 - DNA, 15 bp, Homo sapiens
agggactcggtaact

SEQ ID NO: 767978 - DNA, 15 bp, Homo sapiens
gggactcggtaactc

SEQ ID NO: 767979 - DNA, 15 bp, Homo sapiens
ggactcggtaactct

SEQ ID NO: 767980 - DNA, 15 bp, Homo sapiens
gactcggtaactctt

SEQ ID NO: 767981 - DNA, 15 bp, Homo sapiens
actcggtaactcttg

SEQ ID NO: 767982 - DNA, 15 bp, Homo sapiens
ctcggtaactcttgg

SEQ ID NO: 767983 - DNA, 15 bp, Homo sapiens
tcggtaactcttggg

SEQ ID NO: 767984 - DNA, 15 bp, Homo sapiens
cggtaactcttgggt

SEQ ID NO: 767985 - DNA, 15 bp, Homo sapiens
ggtaactcttgggtg

SEQ ID NO: 767986 - DNA, 15 bp, Homo sapiens
gtaactcttgggtgt

SEQ ID NO: 767987 - DNA, 15 bp, Homo sapiens
taactcttgggtgtg

SEQ ID NO: 767988 - DNA, 15 bp, Homo sapiens
aactcttgggtgtgt

SEQ ID NO: 767989 - DNA, 15 bp, Homo sapiens
actcttgggtgtgtt

SEQ ID NO: 767990 - DNA, 15 bp, Homo sapiens
ctcttgggtgtgttt

SEQ ID NO: 767991 - DNA, 15 bp, Homo sapiens
tcttgggtgtgtttt

SEQ ID NO: 767992 - DNA, 15 bp, Homo sapiens
cttgggtgtgttttt

SEQ ID NO: 767993 - DNA, 15 bp, Homo sapiens
ttgggtgtgtttttc

SEQ ID NO: 767994 - DNA, 15 bp, Homo sapiens
tgggtgtgtttttcc

SEQ ID NO: 767995 - DNA, 15 bp, Homo sapiens
gggtgtgtttttcct

SEQ ID NO: 767996 - DNA, 15 bp, Homo sapiens
ggtgtgtttttcctc

SEQ ID NO: 767997 - DNA, 15 bp, Homo sapiens
gtgtgtttttcctct

SEQ ID NO: 767998 - DNA, 15 bp, Homo sapiens
tgtgtttttcctctt

SEQ ID NO: 767999 - DNA, 15 bp, Homo sapiens
gtgtttttcctcttg

SEQ ID NO: 768000 - DNA, 15 bp, Homo sapiens
tgtttttcctcttgc

SEQ ID NO: 768001 - DNA, 15 bp, Homo sapiens
gtttttcctcttgct

SEQ ID NO: 768002 - DNA, 15 bp, Homo sapiens
tttttcctcttgctc

SEQ ID NO: 768003 - DNA, 15 bp, Homo sapiens
ttttcctcttgctcg

SEQ ID NO: 768004 - DNA, 15 bp, Homo sapiens
tttcctcttgctcgg

SEQ ID NO: 768005 - DNA, 15 bp, Homo sapiens
ttcctcttgctcggt

SEQ ID NO: 768006 - DNA, 15 bp, Homo sapiens
tcctcttgctcggtg

SEQ ID NO: 768007 - DNA, 15 bp, Homo sapiens
cctcttgctcggtgg

SEQ ID NO: 768008 - DNA, 15 bp, Homo sapiens
ctcttgctcggtggg

SEQ ID NO: 768009 - DNA, 15 bp, Homo sapiens
tcttgctcggtgggg

SEQ ID NO: 768010 - DNA, 15 bp, Homo sapiens
cttgctcggtggggg

SEQ ID NO: 768011 - DNA, 15 bp, Homo sapiens
ttgctcggtggggga

SEQ ID NO: 768012 - DNA, 15 bp, Homo sapiens
tgctcggtgggggaa

SEQ ID NO: 768013 - DNA, 15 bp, Homo sapiens
gctcggtgggggaat

SEQ ID NO: 768014 - DNA, 15 bp, Homo sapiens
ctcggtgggggaatc

SEQ ID NO: 768015 - DNA, 15 bp, Homo sapiens
tcggtgggggaatcc

SEQ ID NO: 768016 - DNA, 15 bp, Homo sapiens
cggtgggggaatcca

SEQ ID NO: 768017 - DNA, 15 bp, Homo sapiens
ggtgggggaatccac

SEQ ID NO: 768018 - DNA, 15 bp, Homo sapiens
gtgggggaatccacc

SEQ ID NO: 768019 - DNA, 15 bp, Homo sapiens
tgggggaatccacct

SEQ ID NO: 768020 - DNA, 15 bp, Homo sapiens
gggggaatccacctt

SEQ ID NO: 768021 - DNA, 15 bp, Homo sapiens
ggggaatccaccttc

SEQ ID NO: 768022 - DNA, 15 bp, Homo sapiens
gggaatccaccttca

SEQ ID NO: 768023 - DNA, 15 bp, Homo sapiens
ggaatccaccttcaa

SEQ ID NO: 768024 - DNA, 15 bp, Homo sapiens
gaatccaccttcaaa

SEQ ID NO: 768025 - DNA, 15 bp, Homo sapiens
aatccaccttcaaag

SEQ ID NO: 768026 - DNA, 15 bp, Homo sapiens
atccaccttcaaaga

SEQ ID NO: 768027 - DNA, 15 bp, Homo sapiens
tccaccttcaaagag

SEQ ID NO: 768028 - DNA, 15 bp, Homo sapiens
ccaccttcaaagagg

SEQ ID NO: 768029 - DNA, 15 bp, Homo sapiens
caccttcaaagaggc

SEQ ID NO: 768030 - DNA, 15 bp, Homo sapiens
accttcaaagaggct

SEQ ID NO: 768031 - DNA, 15 bp, Homo sapiens
ccttcaaagaggctg

SEQ ID NO: 768032 - DNA, 15 bp, Homo sapiens
cttcaaagaggctgc

SEQ ID NO: 768033 - DNA, 15 bp, Homo sapiens
ttcaaagaggctgcc

SEQ ID NO: 768034 - DNA, 15 bp, Homo sapiens
tcaaagaggctgccc

SEQ ID NO: 768035 - DNA, 15 bp, Homo sapiens
caaagaggctgccca

SEQ ID NO: 768036 - DNA, 15 bp, Homo sapiens
aaagaggctgcccag

SEQ ID NO: 768037 - DNA, 15 bp, Homo sapiens
aagaggctgcccagc

SEQ ID NO: 768038 - DNA, 15 bp, Homo sapiens
agaggctgcccagct

SEQ ID NO: 768039 - DNA, 15 bp, Homo sapiens
gaggctgcccagctg

SEQ ID NO: 768040 - DNA, 15 bp, Homo sapiens
aggctgcccagctgc

SEQ ID NO: 768041 - DNA, 15 bp, Homo sapiens
ggctgcccagctgct

SEQ ID NO: 768042 - DNA, 15 bp, Homo sapiens
gctgcccagctgctc

SEQ ID NO: 768043 - DNA, 15 bp, Homo sapiens
ctgcccagctgctcc

SEQ ID NO: 768044 - DNA, 15 bp, Homo sapiens
tgcccagctgctccc

SEQ ID NO: 768045 - DNA, 15 bp, Homo sapiens
gcccagctgctccct

SEQ ID NO: 768046 - DNA, 15 bp, Homo sapiens
cccagctgctccctg

SEQ ID NO: 768047 - DNA, 15 bp, Homo sapiens
ccagctgctccctgg

SEQ ID NO: 768048 - DNA, 15 bp, Homo sapiens
cagctgctccctggg

SEQ ID NO: 768049 - DNA, 15 bp, Homo sapiens
agctgctccctggga

SEQ ID NO: 768050 - DNA, 15 bp, Homo sapiens
gctgctccctgggac

SEQ ID NO: 768051 - DNA, 15 bp, Homo sapiens
ctgctccctgggact

SEQ ID NO: 768052 - DNA, 15 bp, Homo sapiens
tgctccctgggactc

SEQ ID NO: 768053 - DNA, 15 bp, Homo sapiens
gctccctgggactca

SEQ ID NO: 768054 - DNA, 15 bp, Homo sapiens
ctccctgggactcag

SEQ ID NO: 768055 - DNA, 15 bp, Homo sapiens
tccctgggactcagc

SEQ ID NO: 768056 - DNA, 15 bp, Homo sapiens
ccctgggactcagca

SEQ ID NO: 768057 - DNA, 15 bp, Homo sapiens
cctgggactcagcag

SEQ ID NO: 768058 - DNA, 15 bp, Homo sapiens
ctgggactcagcagg

SEQ ID NO: 768059 - DNA, 15 bp, Homo sapiens
tgggactcagcaggt

SEQ ID NO: 768060 - DNA, 15 bp, Homo sapiens
gggactcagcaggtt

SEQ ID NO: 768061 - DNA, 15 bp, Homo sapiens
ggactcagcaggttc

SEQ ID NO: 768062 - DNA, 15 bp, Homo sapiens
gactcagcaggttca

SEQ ID NO: 768063 - DNA, 15 bp, Homo sapiens
actcagcaggttcac

SEQ ID NO: 768064 - DNA, 15 bp, Homo sapiens
ctcagcaggttcact

SEQ ID NO: 768065 - DNA, 15 bp, Homo sapiens
tcagcaggttcactg

SEQ ID NO: 768066 - DNA, 15 bp, Homo sapiens
cagcaggttcactgg

SEQ ID NO: 768067 - DNA, 15 bp, Homo sapiens
agcaggttcactggg

SEQ ID NO: 768068 - DNA, 15 bp, Homo sapiens
gcaggttcactgggg

SEQ ID NO: 768069 - DNA, 15 bp, Homo sapiens
caggttcactggggc

SEQ ID NO: 768070 - DNA, 15 bp, Homo sapiens
aggttcactggggct

SEQ ID NO: 768071 - DNA, 15 bp, Homo sapiens
ggttcactggggctg

SEQ ID NO: 768072 - DNA, 15 bp, Homo sapiens
gttcactggggctgg

SEQ ID NO: 768073 - DNA, 15 bp, Homo sapiens
ttcactggggctggt

SEQ ID NO: 768074 - DNA, 15 bp, Homo sapiens
tcactggggctggtg

SEQ ID NO: 768075 - DNA, 15 bp, Homo sapiens
cactggggctggtgg

SEQ ID NO: 768076 - DNA, 15 bp, Homo sapiens
actggggctggtggt

SEQ ID NO: 768077 - DNA, 15 bp, Homo sapiens
ctggggctggtggtc

SEQ ID NO: 768078 - DNA, 15 bp, Homo sapiens
tggggctggtggtcc

SEQ ID NO: 768079 - DNA, 15 bp, Homo sapiens
ggggctggtggtcct

SEQ ID NO: 768080 - DNA, 15 bp, Homo sapiens
gggctggtggtcctc

SEQ ID NO: 768081 - DNA, 15 bp, Homo sapiens
ggctggtggtcctca

SEQ ID NO: 768082 - DNA, 15 bp, Homo sapiens
gctggtggtcctcaa

SEQ ID NO: 768083 - DNA, 15 bp, Homo sapiens
ctggtggtcctcaag

SEQ ID NO: 768084 - DNA, 15 bp, Homo sapiens
tggtggtcctcaagt

SEQ ID NO: 768085 - DNA, 15 bp, Homo sapiens
ggtggtcctcaagtc

SEQ ID NO: 768086 - DNA, 15 bp, Homo sapiens
gtggtcctcaagtct

SEQ ID NO: 768087 - DNA, 15 bp, Homo sapiens
tggtcctcaagtctt

SEQ ID NO: 768088 - DNA, 15 bp, Homo sapiens
ggtcctcaagtcttt

SEQ ID NO: 768089 - DNA, 15 bp, Homo sapiens
gtcctcaagtctttt

SEQ ID NO: 768090 - DNA, 15 bp, Homo sapiens
tcctcaagtcttttt

SEQ ID NO: 768091 - DNA, 15 bp, Homo sapiens
cctcaagtctttttg

SEQ ID NO: 768092 - DNA, 15 bp, Homo sapiens
ctcaagtctttttga

SEQ ID NO: 768093 - DNA, 15 bp, Homo sapiens
tcaagtctttttgaa

SEQ ID NO: 768094 - DNA, 15 bp, Homo sapiens
caagtctttttgaat

SEQ ID NO: 768095 - DNA, 15 bp, Homo sapiens
aagtctttttgaatg

SEQ ID NO: 768096 - DNA, 15 bp, Homo sapiens
agtctttttgaatgc

SEQ ID NO: 768097 - DNA, 15 bp, Homo sapiens
gtctttttgaatgcc

SEQ ID NO: 768098 - DNA, 15 bp, Homo sapiens
tctttttgaatgccg

SEQ ID NO: 768099 - DNA, 15 bp, Homo sapiens
ctttttgaatgccgg

SEQ ID NO: 768100 - DNA, 15 bp, Homo sapiens
tttttgaatgccggg

SEQ ID NO: 768101 - DNA, 15 bp, Homo sapiens
ttttgaatgccgggg

SEQ ID NO: 768102 - DNA, 15 bp, Homo sapiens
tttgaatgccgggga

SEQ ID NO: 768103 - DNA, 15 bp, Homo sapiens
ttgaatgccggggaa

SEQ ID NO: 768104 - DNA, 15 bp, Homo sapiens
tgaatgccggggaag

SEQ ID NO: 768105 - DNA, 15 bp, Homo sapiens
gaatgccggggaagt

SEQ ID NO: 768106 - DNA, 15 bp, Homo sapiens
aatgccggggaagtt

SEQ ID NO: 768107 - DNA, 15 bp, Homo sapiens
atgccggggaagttc

SEQ ID NO: 768108 - DNA, 15 bp, Homo sapiens
tgccggggaagttcc

SEQ ID NO: 768109 - DNA, 15 bp, Homo sapiens
gccggggaagttccc

SEQ ID NO: 768110 - DNA, 15 bp, Homo sapiens
ccggggaagttccca

SEQ ID NO: 768111 - DNA, 15 bp, Homo sapiens
cggggaagttcccag

SEQ ID NO: 768112 - DNA, 15 bp, Homo sapiens
ggggaagttcccagg

SEQ ID NO: 768113 - DNA, 15 bp, Homo sapiens
gggaagttcccagga

SEQ ID NO: 768114 - DNA, 15 bp, Homo sapiens
ggaagttcccaggac

SEQ ID NO: 768115 - DNA, 15 bp, Homo sapiens
gaagttcccaggaca

SEQ ID NO: 768116 - DNA, 15 bp, Homo sapiens
aagttcccaggacaa

SEQ ID NO: 768117 - DNA, 15 bp, Homo sapiens
agttcccaggacaat

SEQ ID NO: 768118 - DNA, 15 bp, Homo sapiens
gttcccaggacaatc

SEQ ID NO: 768119 - DNA, 15 bp, Homo sapiens
ttcccaggacaatct

SEQ ID NO: 768120 - DNA, 15 bp, Homo sapiens
tcccaggacaatctc

SEQ ID NO: 768121 - DNA, 15 bp, Homo sapiens
cccaggacaatctcc

SEQ ID NO: 768122 - DNA, 15 bp, Homo sapiens
ccaggacaatctcca

SEQ ID NO: 768123 - DNA, 15 bp, Homo sapiens
caggacaatctccag

SEQ ID NO: 768124 - DNA, 15 bp, Homo sapiens
aggacaatctccaga

SEQ ID NO: 768125 - DNA, 15 bp, Homo sapiens
ggacaatctccagag

SEQ ID NO: 768126 - DNA, 15 bp, Homo sapiens
gacaatctccagagt

SEQ ID NO: 768127 - DNA, 15 bp, Homo sapiens
acaatctccagagtg

SEQ ID NO: 768128 - DNA, 15 bp, Homo sapiens
caatctccagagtgg

SEQ ID NO: 768129 - DNA, 15 bp, Homo sapiens
aatctccagagtggt

SEQ ID NO: 768130 - DNA, 15 bp, Homo sapiens
atctccagagtggtt

SEQ ID NO: 768131 - DNA, 15 bp, Homo sapiens
tctccagagtggtta

SEQ ID NO: 768132 - DNA, 15 bp, Homo sapiens
ctccagagtggttag

SEQ ID NO: 768133 - DNA, 15 bp, Homo sapiens
tccagagtggttagg

SEQ ID NO: 768134 - DNA, 15 bp, Homo sapiens
ccagagtggttagga

SEQ ID NO: 768135 - DNA, 15 bp, Homo sapiens
cagagtggttaggag

SEQ ID NO: 768136 - DNA, 15 bp, Homo sapiens
agagtggttaggagg

SEQ ID NO: 768137 - DNA, 15 bp, Homo sapiens
gagtggttaggaggc

SEQ ID NO: 768138 - DNA, 15 bp, Homo sapiens
agtggttaggaggcc

SEQ ID NO: 768139 - DNA, 15 bp, Homo sapiens
gtggttaggaggcct

SEQ ID NO: 768140 - DNA, 15 bp, Homo sapiens
tggttaggaggcctg

SEQ ID NO: 768141 - DNA, 15 bp, Homo sapiens
ggttaggaggcctgg

SEQ ID NO: 768142 - DNA, 15 bp, Homo sapiens
gttaggaggcctgga

SEQ ID NO: 768143 - DNA, 15 bp, Homo sapiens
ttaggaggcctggaa

SEQ ID NO: 768144 - DNA, 15 bp, Homo sapiens
taggaggcctggaat

SEQ ID NO: 768145 - DNA, 15 bp, Homo sapiens
aggaggcctggaatt

SEQ ID NO: 768146 - DNA, 15 bp, Homo sapiens
ggaggcctggaattg

SEQ ID NO: 768147 - DNA, 15 bp, Homo sapiens
gaggcctggaattga

SEQ ID NO: 768148 - DNA, 15 bp, Homo sapiens
aggcctggaattgat

SEQ ID NO: 768149 - DNA, 15 bp, Homo sapiens
ggcctggaattgata

SEQ ID NO: 768150 - DNA, 15 bp, Homo sapiens
gcctggaattgataa

SEQ ID NO: 768151 - DNA, 15 bp, Homo sapiens
cctggaattgataac

SEQ ID NO: 768152 - DNA, 15 bp, Homo sapiens
ctggaattgataacc

SEQ ID NO: 768153 - DNA, 15 bp, Homo sapiens
tggaattgataacca

SEQ ID NO: 768154 - DNA, 15 bp, Homo sapiens
ggaattgataaccac

SEQ ID NO: 768155 - DNA, 15 bp, Homo sapiens
gaattgataaccacc

SEQ ID NO: 768156 - DNA, 15 bp, Homo sapiens
aattgataaccaccc

SEQ ID NO: 768157 - DNA, 15 bp, Homo sapiens
attgataaccaccct

SEQ ID NO: 768158 - DNA, 15 bp, Homo sapiens
ttgataaccaccctg

SEQ ID NO: 768159 - DNA, 15 bp, Homo sapiens
tgataaccaccctga

SEQ ID NO: 768160 - DNA, 15 bp, Homo sapiens
gataaccaccctgag

SEQ ID NO: 768161 - DNA, 15 bp, Homo sapiens
ataaccaccctgagg

SEQ ID NO: 768162 - DNA, 15 bp, Homo sapiens
taaccaccctgagga

SEQ ID NO: 768163 - DNA, 15 bp, Homo sapiens
aaccaccctgaggac

SEQ ID NO: 768164 - DNA, 15 bp, Homo sapiens
accaccctgaggaca

SEQ ID NO: 768165 - DNA, 15 bp, Homo sapiens
ccaccctgaggacag

SEQ ID NO: 768166 - DNA, 15 bp, Homo sapiens
caccctgaggacagc

SEQ ID NO: 768167 - DNA, 15 bp, Homo sapiens
accctgaggacagcc

SEQ ID NO: 768168 - DNA, 15 bp, Homo sapiens
ccctgaggacagccc

SEQ ID NO: 768169 - DNA, 15 bp, Homo sapiens
cctgaggacagcccc

SEQ ID NO: 768170 - DNA, 15 bp, Homo sapiens
ctgaggacagccccc

SEQ ID NO: 768171 - DNA, 15 bp, Homo sapiens
tgaggacagcccccg

SEQ ID NO: 768172 - DNA, 15 bp, Homo sapiens
gaggacagcccccgt

SEQ ID NO: 768173 - DNA, 15 bp, Homo sapiens
aggacagcccccgtc

SEQ ID NO: 768174 - DNA, 15 bp, Homo sapiens
ggacagcccccgtct

SEQ ID NO: 768175 - DNA, 15 bp, Homo sapiens
gacagcccccgtctc

SEQ ID NO: 768176 - DNA, 15 bp, Homo sapiens
acagcccccgtctca

SEQ ID NO: 768177 - DNA, 15 bp, Homo sapiens
cagcccccgtctcaa

SEQ ID NO: 768178 - DNA, 15 bp, Homo sapiens
agcccccgtctcaac

SEQ ID NO: 768179 - DNA, 15 bp, Homo sapiens
gcccccgtctcaaca

SEQ ID NO: 768180 - DNA, 15 bp, Homo sapiens
cccccgtctcaacat

SEQ ID NO: 768181 - DNA, 15 bp, Homo sapiens
ccccgtctcaacatg

SEQ ID NO: 768182 - DNA, 15 bp, Homo sapiens
cccgtctcaacatgg

SEQ ID NO: 768183 - DNA, 15 bp, Homo sapiens
ccgtctcaacatggg

SEQ ID NO: 768184 - DNA, 15 bp, Homo sapiens
cgtctcaacatggga

SEQ ID NO: 768185 - DNA, 15 bp, Homo sapiens
gtctcaacatgggag

SEQ ID NO: 768186 - DNA, 15 bp, Homo sapiens
tctcaacatgggaga

SEQ ID NO: 768187 - DNA, 15 bp, Homo sapiens
ctcaacatgggagac

SEQ ID NO: 768188 - DNA, 15 bp, Homo sapiens
tcaacatgggagaca

SEQ ID NO: 768189 - DNA, 15 bp, Homo sapiens
caacatgggagacaa

SEQ ID NO: 768190 - DNA, 15 bp, Homo sapiens
aacatgggagacaag

SEQ ID NO: 768191 - DNA, 15 bp, Homo sapiens
acatgggagacaaga

SEQ ID NO: 768192 - DNA, 15 bp, Homo sapiens
catgggagacaagag

SEQ ID NO: 768193 - DNA, 15 bp, Homo sapiens
atgggagacaagaga

SEQ ID NO: 768194 - DNA, 15 bp, Homo sapiens
tgggagacaagagag

SEQ ID NO: 768195 - DNA, 15 bp, Homo sapiens
gggagacaagagagg

SEQ ID NO: 768196 - DNA, 15 bp, Homo sapiens
ggagacaagagaggc

SEQ ID NO: 768197 - DNA, 15 bp, Homo sapiens
gagacaagagaggca

SEQ ID NO: 768198 - DNA, 15 bp, Homo sapiens
agacaagagaggcat

SEQ ID NO: 768199 - DNA, 15 bp, Homo sapiens
gacaagagaggcata

SEQ ID NO: 768200 - DNA, 15 bp, Homo sapiens
acaagagaggcatat

SEQ ID NO: 768201 - DNA, 15 bp, Homo sapiens
caagagaggcatatg

SEQ ID NO: 768202 - DNA, 15 bp, Homo sapiens
aagagaggcatatgg

SEQ ID NO: 768203 - DNA, 15 bp, Homo sapiens
agagaggcatatggc

SEQ ID NO: 768204 - DNA, 15 bp, Homo sapiens
gagaggcatatggca

SEQ ID NO: 768205 - DNA, 15 bp, Homo sapiens
agaggcatatggcat

SEQ ID NO: 768206 - DNA, 15 bp, Homo sapiens
gaggcatatggcatg

SEQ ID NO: 768207 - DNA, 15 bp, Homo sapiens
aggcatatggcatgg

SEQ ID NO: 768208 - DNA, 15 bp, Homo sapiens
ggcatatggcatggc

SEQ ID NO: 768209 - DNA, 15 bp, Homo sapiens
gcatatggcatggca

SEQ ID NO: 768210 - DNA, 15 bp, Homo sapiens
catatggcatggcat

SEQ ID NO: 768211 - DNA, 15 bp, Homo sapiens
atatggcatggcatt

SEQ ID NO: 768212 - DNA, 15 bp, Homo sapiens
tatggcatggcatta

SEQ ID NO: 768213 - DNA, 15 bp, Homo sapiens
atggcatggcattat

SEQ ID NO: 768214 - DNA, 15 bp, Homo sapiens
tggcatggcattata

SEQ ID NO: 768215 - DNA, 15 bp, Homo sapiens
ggcatggcattatag

SEQ ID NO: 768216 - DNA, 15 bp, Homo sapiens
gcatggcattatagc

SEQ ID NO: 768217 - DNA, 15 bp, Homo sapiens
catggcattatagca

SEQ ID NO: 768218 - DNA, 15 bp, Homo sapiens
atggcattatagcat

SEQ ID NO: 768219 - DNA, 15 bp, Homo sapiens
tggcattatagcatt

SEQ ID NO: 768220 - DNA, 15 bp, Homo sapiens
ggcattatagcattt

SEQ ID NO: 768221 - DNA, 15 bp, Homo sapiens
gcattatagcatttt

SEQ ID NO: 768222 - DNA, 15 bp, Homo sapiens
cattatagcatttta

SEQ ID NO: 768223 - DNA, 15 bp, Homo sapiens
attatagcattttac

SEQ ID NO: 768224 - DNA, 15 bp, Homo sapiens
ttatagcattttaca

SEQ ID NO: 768225 - DNA, 15 bp, Homo sapiens
tatagcattttacag

SEQ ID NO: 768226 - DNA, 15 bp, Homo sapiens
atagcattttacagc

SEQ ID NO: 768227 - DNA, 15 bp, Homo sapiens
tagcattttacagct

SEQ ID NO: 768228 - DNA, 15 bp, Homo sapiens
agcattttacagctc

SEQ ID NO: 768229 - DNA, 15 bp, Homo sapiens
gcattttacagctca

SEQ ID NO: 768230 - DNA, 15 bp, Homo sapiens
cattttacagctcat

SEQ ID NO: 768231 - DNA, 15 bp, Homo sapiens
attttacagctcatg

SEQ ID NO: 768232 - DNA, 15 bp, Homo sapiens
ttttacagctcatgg

SEQ ID NO: 768233 - DNA, 15 bp, Homo sapiens
tttacagctcatgga

SEQ ID NO: 768234 - DNA, 15 bp, Homo sapiens
ttacagctcatggac

SEQ ID NO: 768235 - DNA, 15 bp, Homo sapiens
tacagctcatggacc

SEQ ID NO: 768236 - DNA, 15 bp, Homo sapiens
acagctcatggacca

SEQ ID NO: 768237 - DNA, 15 bp, Homo sapiens
cagctcatggaccag

SEQ ID NO: 768238 - DNA, 15 bp, Homo sapiens
agctcatggaccagc

SEQ ID NO: 768239 - DNA, 15 bp, Homo sapiens
gctcatggaccagct

SEQ ID NO: 768240 - DNA, 15 bp, Homo sapiens
ctcatggaccagctg

SEQ ID NO: 768241 - DNA, 15 bp, Homo sapiens
tcatggaccagctga

SEQ ID NO: 768242 - DNA, 15 bp, Homo sapiens
catggaccagctgat

SEQ ID NO: 768243 - DNA, 15 bp, Homo sapiens
atggaccagctgata

SEQ ID NO: 768244 - DNA, 15 bp, Homo sapiens
tggaccagctgatag

SEQ ID NO: 768245 - DNA, 15 bp, Homo sapiens
ggaccagctgatagg

SEQ ID NO: 768246 - DNA, 15 bp, Homo sapiens
gaccagctgatagga

SEQ ID NO: 768247 - DNA, 15 bp, Homo sapiens
accagctgataggat

SEQ ID NO: 768248 - DNA, 15 bp, Homo sapiens
ccagctgataggata

SEQ ID NO: 768249 - DNA, 15 bp, Homo sapiens
cagctgataggatag

SEQ ID NO: 768250 - DNA, 15 bp, Homo sapiens
agctgataggatagt

SEQ ID NO: 768251 - DNA, 15 bp, Homo sapiens
gctgataggatagtg

SEQ ID NO: 768252 - DNA, 15 bp, Homo sapiens
ctgataggatagtga

SEQ ID NO: 768253 - DNA, 15 bp, Homo sapiens
tgataggatagtgaa

SEQ ID NO: 768254 - DNA, 15 bp, Homo sapiens
gataggatagtgaat

SEQ ID NO: 768255 - DNA, 15 bp, Homo sapiens
ataggatagtgaata

SEQ ID NO: 768256 - DNA, 15 bp, Homo sapiens
taggatagtgaatat

SEQ ID NO: 768257 - DNA, 15 bp, Homo sapiens
aggatagtgaatata

SEQ ID NO: 768258 - DNA, 15 bp, Homo sapiens
ggatagtgaatataa

SEQ ID NO: 768259 - DNA, 15 bp, Homo sapiens
gatagtgaatataat

SEQ ID NO: 768260 - DNA, 15 bp, Homo sapiens
atagtgaatataatt

SEQ ID NO: 768261 - DNA, 15 bp, Homo sapiens
tagtgaatataattg

SEQ ID NO: 768262 - DNA, 15 bp, Homo sapiens
agtgaatataattgc

SEQ ID NO: 768263 - DNA, 15 bp, Homo sapiens
gtgaatataattgcc

SEQ ID NO: 768264 - DNA, 15 bp, Homo sapiens
tgaatataattgcca

SEQ ID NO: 768265 - DNA, 15 bp, Homo sapiens
gaatataattgccat

SEQ ID NO: 768266 - DNA, 15 bp, Homo sapiens
aatataattgccatg

SEQ ID NO: 768267 - DNA, 15 bp, Homo sapiens
atataattgccatgt

SEQ ID NO: 768268 - DNA, 15 bp, Homo sapiens
tataattgccatgtg

SEQ ID NO: 768269 - DNA, 15 bp, Homo sapiens
ataattgccatgtga

SEQ ID NO: 768270 - DNA, 15 bp, Homo sapiens
taattgccatgtgac

SEQ ID NO: 768271 - DNA, 15 bp, Homo sapiens
aattgccatgtgaca

SEQ ID NO: 768272 - DNA, 15 bp, Homo sapiens
attgccatgtgacaa

SEQ ID NO: 768273 - DNA, 15 bp, Homo sapiens
ttgccatgtgacaaa

SEQ ID NO: 768274 - DNA, 15 bp, Homo sapiens
tgccatgtgacaaac

SEQ ID NO: 768275 - DNA, 15 bp, Homo sapiens
gccatgtgacaaact

SEQ ID NO: 768276 - DNA, 15 bp, Homo sapiens
ccatgtgacaaacta

SEQ ID NO: 768277 - DNA, 15 bp, Homo sapiens
catgtgacaaactaa

SEQ ID NO: 768278 - DNA, 15 bp, Homo sapiens
atgtgacaaactaaa

SEQ ID NO: 768279 - DNA, 15 bp, Homo sapiens
tgtgacaaactaaag

SEQ ID NO: 768280 - DNA, 15 bp, Homo sapiens
gtgacaaactaaagt

SEQ ID NO: 768281 - DNA, 15 bp, Homo sapiens
tgacaaactaaagtg

SEQ ID NO: 768282 - DNA, 15 bp, Homo sapiens
gacaaactaaagtgg

SEQ ID NO: 768283 - DNA, 15 bp, Homo sapiens
acaaactaaagtggc

SEQ ID NO: 768284 - DNA, 15 bp, Homo sapiens
caaactaaagtggct

SEQ ID NO: 768285 - DNA, 15 bp, Homo sapiens
aaactaaagtggcta

SEQ ID NO: 768286 - DNA, 15 bp, Homo sapiens
aactaaagtggctac

SEQ ID NO: 768287 - DNA, 15 bp, Homo sapiens
actaaagtggctaca

SEQ ID NO: 768288 - DNA, 15 bp, Homo sapiens
ctaaagtggctacaa

SEQ ID NO: 768289 - DNA, 15 bp, Homo sapiens
taaagtggctacaag

SEQ ID NO: 768290 - DNA, 15 bp, Homo sapiens
aaagtggctacaagt

SEQ ID NO: 768291 - DNA, 15 bp, Homo sapiens
aagtggctacaagtg

SEQ ID NO: 768292 - DNA, 15 bp, Homo sapiens
agtggctacaagtga

SEQ ID NO: 768293 - DNA, 15 bp, Homo sapiens
gtggctacaagtgag

SEQ ID NO: 768294 - DNA, 15 bp, Homo sapiens
tggctacaagtgagc

SEQ ID NO: 768295 - DNA, 15 bp, Homo sapiens
ggctacaagtgagct

SEQ ID NO: 768296 - DNA, 15 bp, Homo sapiens
gctacaagtgagcta

SEQ ID NO: 768297 - DNA, 15 bp, Homo sapiens
ctacaagtgagctaa

SEQ ID NO: 768298 - DNA, 15 bp, Homo sapiens
tacaagtgagctaac

SEQ ID NO: 768299 - DNA, 15 bp, Homo sapiens
acaagtgagctaaca

SEQ ID NO: 768300 - DNA, 15 bp, Homo sapiens
caagtgagctaacag

SEQ ID NO: 768301 - DNA, 15 bp, Homo sapiens
aagtgagctaacagg

SEQ ID NO: 768302 - DNA, 15 bp, Homo sapiens
agtgagctaacaggt

SEQ ID NO: 768303 - DNA, 15 bp, Homo sapiens
gtgagctaacaggtg

SEQ ID NO: 768304 - DNA, 15 bp, Homo sapiens
tgagctaacaggtgt

SEQ ID NO: 768305 - DNA, 15 bp, Homo sapiens
gagctaacaggtgtc

SEQ ID NO: 768306 - DNA, 15 bp, Homo sapiens
agctaacaggtgtcg

SEQ ID NO: 768307 - DNA, 15 bp, Homo sapiens
gctaacaggtgtcgt

SEQ ID NO: 768308 - DNA, 15 bp, Homo sapiens
ctaacaggtgtcgtt

SEQ ID NO: 768309 - DNA, 15 bp, Homo sapiens
taacaggtgtcgttt

SEQ ID NO: 768310 - DNA, 15 bp, Homo sapiens
aacaggtgtcgtttc

SEQ ID NO: 768311 - DNA, 15 bp, Homo sapiens
acaggtgtcgtttca

SEQ ID NO: 768312 - DNA, 15 bp, Homo sapiens
caggtgtcgtttcat

SEQ ID NO: 768313 - DNA, 15 bp, Homo sapiens
aggtgtcgtttcatt

SEQ ID NO: 768314 - DNA, 15 bp, Homo sapiens
ggtgtcgtttcatta

SEQ ID NO: 768315 - DNA, 15 bp, Homo sapiens
gtgtcgtttcattat

SEQ ID NO: 768316 - DNA, 15 bp, Homo sapiens
tgtcgtttcattatt

SEQ ID NO: 768317 - DNA, 15 bp, Homo sapiens
gtcgtttcattatta

SEQ ID NO: 768318 - DNA, 15 bp, Homo sapiens
tcgtttcattattaa

SEQ ID NO: 768319 - DNA, 15 bp, Homo sapiens
cgtttcattattaat

SEQ ID NO: 768320 - DNA, 15 bp, Homo sapiens
gtttcattattaatt

SEQ ID NO: 768321 - DNA, 15 bp, Homo sapiens
tttcattattaattt

SEQ ID NO: 768322 - DNA, 15 bp, Homo sapiens
ttcattattaatttc

SEQ ID NO: 768323 - DNA, 15 bp, Homo sapiens
tcattattaatttca

SEQ ID NO: 768324 - DNA, 15 bp, Homo sapiens
cattattaatttcaa

SEQ ID NO: 768325 - DNA, 15 bp, Homo sapiens
attattaatttcaat

SEQ ID NO: 768326 - DNA, 15 bp, Homo sapiens
ttattaatttcaatc

SEQ ID NO: 768327 - DNA, 15 bp, Homo sapiens
tattaatttcaatca

SEQ ID NO: 768328 - DNA, 15 bp, Homo sapiens
attaatttcaatcaa

SEQ ID NO: 768329 - DNA, 15 bp, Homo sapiens
ttaatttcaatcaaa

SEQ ID NO: 768330 - DNA, 15 bp, Homo sapiens
taatttcaatcaaag

SEQ ID NO: 768331 - DNA, 15 bp, Homo sapiens
aatttcaatcaaagt

SEQ ID NO: 768332 - DNA, 15 bp, Homo sapiens
atttcaatcaaagtc

SEQ ID NO: 768333 - DNA, 15 bp, Homo sapiens
tttcaatcaaagtca

SEQ ID NO: 768334 - DNA, 15 bp, Homo sapiens
ttcaatcaaagtcat

SEQ ID NO: 768335 - DNA, 15 bp, Homo sapiens
tcaatcaaagtcatt

SEQ ID NO: 768336 - DNA, 15 bp, Homo sapiens
caatcaaagtcatta

SEQ ID NO: 768337 - DNA, 15 bp, Homo sapiens
aatcaaagtcattag

SEQ ID NO: 768338 - DNA, 15 bp, Homo sapiens
atcaaagtcattagt

SEQ ID NO: 768339 - DNA, 15 bp, Homo sapiens
tcaaagtcattagtt

SEQ ID NO: 768340 - DNA, 15 bp, Homo sapiens
caaagtcattagttg

SEQ ID NO: 768341 - DNA, 15 bp, Homo sapiens
aaagtcattagttgc

SEQ ID NO: 768342 - DNA, 15 bp, Homo sapiens
aagtcattagttgct

SEQ ID NO: 768343 - DNA, 15 bp, Homo sapiens
agtcattagttgcta

SEQ ID NO: 768344 - DNA, 15 bp, Homo sapiens
gtcattagttgctat

SEQ ID NO: 768345 - DNA, 15 bp, Homo sapiens
tcattagttgctatt

SEQ ID NO: 768346 - DNA, 15 bp, Homo sapiens
cattagttgctattt

SEQ ID NO: 768347 - DNA, 15 bp, Homo sapiens
attagttgctattta

SEQ ID NO: 768348 - DNA, 15 bp, Homo sapiens
ttagttgctatttag

SEQ ID NO: 768349 - DNA, 15 bp, Homo sapiens
tagttgctatttagg

SEQ ID NO: 768350 - DNA, 15 bp, Homo sapiens
agttgctatttaggg

SEQ ID NO: 768351 - DNA, 15 bp, Homo sapiens
gttgctatttaggga

SEQ ID NO: 768352 - DNA, 15 bp, Homo sapiens
ttgctatttagggat

SEQ ID NO: 768353 - DNA, 15 bp, Homo sapiens
tgctatttagggatc

SEQ ID NO: 768354 - DNA, 15 bp, Homo sapiens
gctatttagggatct

SEQ ID NO: 768355 - DNA, 15 bp, Homo sapiens
ctatttagggatctg

SEQ ID NO: 768356 - DNA, 15 bp, Homo sapiens
tatttagggatctgg

SEQ ID NO: 768357 - DNA, 15 bp, Homo sapiens
atttagggatctggc

SEQ ID NO: 768358 - DNA, 15 bp, Homo sapiens
tttagggatctggct

SEQ ID NO: 768359 - DNA, 15 bp, Homo sapiens
ttagggatctggctg

SEQ ID NO: 768360 - DNA, 15 bp, Homo sapiens
tagggatctggctgc

SEQ ID NO: 768361 - DNA, 15 bp, Homo sapiens
agggatctggctgct

SEQ ID NO: 768362 - DNA, 15 bp, Homo sapiens
gggatctggctgctt

SEQ ID NO: 768363 - DNA, 15 bp, Homo sapiens
ggatctggctgcttg

SEQ ID NO: 768364 - DNA, 15 bp, Homo sapiens
gatctggctgcttgg

SEQ ID NO: 768365 - DNA, 15 bp, Homo sapiens
atctggctgcttggc

SEQ ID NO: 768366 - DNA, 15 bp, Homo sapiens
tctggctgcttggcc

SEQ ID NO: 768367 - DNA, 15 bp, Homo sapiens
ctggctgcttggcca

SEQ ID NO: 768368 - DNA, 15 bp, Homo sapiens
tggctgcttggccac

SEQ ID NO: 768369 - DNA, 15 bp, Homo sapiens
ggctgcttggccacc

SEQ ID NO: 768370 - DNA, 15 bp, Homo sapiens
gctgcttggccacct

SEQ ID NO: 768371 - DNA, 15 bp, Homo sapiens
ctgcttggccaccta

SEQ ID NO: 768372 - DNA, 15 bp, Homo sapiens
tgcttggccacctac

SEQ ID NO: 768373 - DNA, 15 bp, Homo sapiens
gcttggccacctaca

SEQ ID NO: 768374 - DNA, 15 bp, Homo sapiens
cttggccacctacac

SEQ ID NO: 768375 - DNA, 15 bp, Homo sapiens
ttggccacctacacc

SEQ ID NO: 768376 - DNA, 15 bp, Homo sapiens
tggccacctacaccg

SEQ ID NO: 768377 - DNA, 15 bp, Homo sapiens
ggccacctacaccgt

SEQ ID NO: 768378 - DNA, 15 bp, Homo sapiens
gccacctacaccgta

SEQ ID NO: 768379 - DNA, 15 bp, Homo sapiens
ccacctacaccgtac

SEQ ID NO: 768380 - DNA, 15 bp, Homo sapiens
cacctacaccgtact

SEQ ID NO: 768381 - DNA, 15 bp, Homo sapiens
acctacaccgtactt

SEQ ID NO: 768382 - DNA, 15 bp, Homo sapiens
cctacaccgtacttc

SEQ ID NO: 768383 - DNA, 15 bp, Homo sapiens
ctacaccgtacttca

SEQ ID NO: 768384 - DNA, 15 bp, Homo sapiens
tacaccgtacttcat

SEQ ID NO: 768385 - DNA, 15 bp, Homo sapiens
acaccgtacttcatc

SEQ ID NO: 768386 - DNA, 15 bp, Homo sapiens
caccgtacttcatct

SEQ ID NO: 768387 - DNA, 15 bp, Homo sapiens
accgtacttcatctg

SEQ ID NO: 768388 - DNA, 15 bp, Homo sapiens
ccgtacttcatctgg

SEQ ID NO: 768389 - DNA, 15 bp, Homo sapiens
cgtacttcatctggc

SEQ ID NO: 768390 - DNA, 15 bp, Homo sapiens
gtacttcatctggct

SEQ ID NO: 768391 - DNA, 15 bp, Homo sapiens
tacttcatctggctg

SEQ ID NO: 768392 - DNA, 15 bp, Homo sapiens
acttcatctggctgc

SEQ ID NO: 768393 - DNA, 15 bp, Homo sapiens
cttcatctggctgct

SEQ ID NO: 768394 - DNA, 15 bp, Homo sapiens
ttcatctggctgcta

SEQ ID NO: 768395 - DNA, 15 bp, Homo sapiens
tcatctggctgctac

SEQ ID NO: 768396 - DNA, 15 bp, Homo sapiens
catctggctgctaca

SEQ ID NO: 768397 - DNA, 15 bp, Homo sapiens
atctggctgctacag

SEQ ID NO: 768398 - DNA, 15 bp, Homo sapiens
tctggctgctacagc

SEQ ID NO: 768399 - DNA, 15 bp, Homo sapiens
ctggctgctacagct

SEQ ID NO: 768400 - DNA, 15 bp, Homo sapiens
tggctgctacagctt

SEQ ID NO: 768401 - DNA, 15 bp, Homo sapiens
ggctgctacagcttt

SEQ ID NO: 768402 - DNA, 15 bp, Homo sapiens
gctgctacagctttt

SEQ ID NO: 768403 - DNA, 15 bp, Homo sapiens
ctgctacagcttttg

SEQ ID NO: 768404 - DNA, 15 bp, Homo sapiens
tgctacagcttttga

SEQ ID NO: 768405 - DNA, 15 bp, Homo sapiens
gctacagcttttgaa

SEQ ID NO: 768406 - DNA, 15 bp, Homo sapiens
ctacagcttttgaag

SEQ ID NO: 768407 - DNA, 15 bp, Homo sapiens
tacagcttttgaaga

SEQ ID NO: 768408 - DNA, 15 bp, Homo sapiens
acagcttttgaagaa

SEQ ID NO: 768409 - DNA, 15 bp, Homo sapiens
cagcttttgaagaag

SEQ ID NO: 768410 - DNA, 15 bp, Homo sapiens
agcttttgaagaaga

SEQ ID NO: 768411 - DNA, 15 bp, Homo sapiens
gcttttgaagaagac

SEQ ID NO: 768412 - DNA, 15 bp, Homo sapiens
cttttgaagaagaca

SEQ ID NO: 768413 - DNA, 15 bp, Homo sapiens
ttttgaagaagacag

SEQ ID NO: 768414 - DNA, 15 bp, Homo sapiens
tttgaagaagacaga

SEQ ID NO: 768415 - DNA, 15 bp, Homo sapiens
ttgaagaagacagag

SEQ ID NO: 768416 - DNA, 15 bp, Homo sapiens
tgaagaagacagaga

SEQ ID NO: 768417 - DNA, 15 bp, Homo sapiens
gaagaagacagagaa

SEQ ID NO: 768418 - DNA, 15 bp, Homo sapiens
aagaagacagagaaa

SEQ ID NO: 768419 - DNA, 15 bp, Homo sapiens
agaagacagagaaaa

SEQ ID NO: 768420 - DNA, 15 bp, Homo sapiens
gaagacagagaaaag

SEQ ID NO: 768421 - DNA, 15 bp, Homo sapiens
aagacagagaaaagt

SEQ ID NO: 768422 - DNA, 15 bp, Homo sapiens
agacagagaaaagtt

SEQ ID NO: 768423 - DNA, 15 bp, Homo sapiens
gacagagaaaagttc

SEQ ID NO: 768424 - DNA, 15 bp, Homo sapiens
acagagaaaagttct

SEQ ID NO: 768425 - DNA, 15 bp, Homo sapiens
cagagaaaagttctc

SEQ ID NO: 768426 - DNA, 15 bp, Homo sapiens
agagaaaagttctct

SEQ ID NO: 768427 - DNA, 15 bp, Homo sapiens
gagaaaagttctctt

SEQ ID NO: 768428 - DNA, 15 bp, Homo sapiens
agaaaagttctcttt

SEQ ID NO: 768429 - DNA, 15 bp, Homo sapiens
gaaaagttctctttc

SEQ ID NO: 768430 - DNA, 15 bp, Homo sapiens
aaaagttctctttct

SEQ ID NO: 768431 - DNA, 15 bp, Homo sapiens
aaagttctctttctc

SEQ ID NO: 768432 - DNA, 15 bp, Homo sapiens
aagttctctttctct

SEQ ID NO: 768433 - DNA, 15 bp, Homo sapiens
agttctctttctctc

SEQ ID NO: 768434 - DNA, 15 bp, Homo sapiens
gttctctttctctcc

SEQ ID NO: 768435 - DNA, 15 bp, Homo sapiens
ttctctttctctcct

SEQ ID NO: 768436 - DNA, 15 bp, Homo sapiens
tctctttctctcctc

SEQ ID NO: 768437 - DNA, 15 bp, Homo sapiens
ctctttctctcctcc

SEQ ID NO: 768438 - DNA, 15 bp, Homo sapiens
tctttctctcctcct

SEQ ID NO: 768439 - DNA, 15 bp, Homo sapiens
ctttctctcctcctc

SEQ ID NO: 768440 - DNA, 15 bp, Homo sapiens
tttctctcctcctcc

SEQ ID NO: 768441 - DNA, 15 bp, Homo sapiens
ttctctcctcctcct

SEQ ID NO: 768442 - DNA, 15 bp, Homo sapiens
tctctcctcctcctt

SEQ ID NO: 768443 - DNA, 15 bp, Homo sapiens
ctctcctcctccttt

SEQ ID NO: 768444 - DNA, 15 bp, Homo sapiens
tctcctcctcctttc

SEQ ID NO: 768445 - DNA, 15 bp, Homo sapiens
ctcctcctcctttct

SEQ ID NO: 768446 - DNA, 15 bp, Homo sapiens
tcctcctcctttctt

SEQ ID NO: 768447 - DNA, 15 bp, Homo sapiens
cctcctcctttcttc

SEQ ID NO: 768448 - DNA, 15 bp, Homo sapiens
ctcctcctttcttca

SEQ ID NO: 768449 - DNA, 15 bp, Homo sapiens
tcctcctttcttcat

SEQ ID NO: 768450 - DNA, 15 bp, Homo sapiens
cctcctttcttcatc

SEQ ID NO: 768451 - DNA, 15 bp, Homo sapiens
ctcctttcttcatcc

SEQ ID NO: 768452 - DNA, 15 bp, Homo sapiens
tcctttcttcatcct

SEQ ID NO: 768453 - DNA, 15 bp, Homo sapiens
cctttcttcatcctt

SEQ ID NO: 768454 - DNA, 15 bp, Homo sapiens
ctttcttcatccttg

SEQ ID NO: 768455 - DNA, 15 bp, Homo sapiens
tttcttcatccttgg

SEQ ID NO: 768456 - DNA, 15 bp, Homo sapiens
ttcttcatccttgga

SEQ ID NO: 768457 - DNA, 15 bp, Homo sapiens
tcttcatccttggag

SEQ ID NO: 768458 - DNA, 15 bp, Homo sapiens
cttcatccttggaga

SEQ ID NO: 768459 - DNA, 15 bp, Homo sapiens
ttcatccttggagaa

SEQ ID NO: 768460 - DNA, 15 bp, Homo sapiens
tcatccttggagaat

SEQ ID NO: 768461 - DNA, 15 bp, Homo sapiens
catccttggagaatt

SEQ ID NO: 768462 - DNA, 15 bp, Homo sapiens
atccttggagaattt

SEQ ID NO: 768463 - DNA, 15 bp, Homo sapiens
tccttggagaattta

SEQ ID NO: 768464 - DNA, 15 bp, Homo sapiens
ccttggagaatttac

SEQ ID NO: 768465 - DNA, 15 bp, Homo sapiens
cttggagaatttact

SEQ ID NO: 768466 - DNA, 15 bp, Homo sapiens
ttggagaatttacta

SEQ ID NO: 768467 - DNA, 15 bp, Homo sapiens
tggagaatttactat

SEQ ID NO: 768468 - DNA, 15 bp, Homo sapiens
ggagaatttactatg

SEQ ID NO: 768469 - DNA, 15 bp, Homo sapiens
gagaatttactatgg

SEQ ID NO: 768470 - DNA, 15 bp, Homo sapiens
agaatttactatggc

SEQ ID NO: 768471 - DNA, 15 bp, Homo sapiens
gaatttactatggca

SEQ ID NO: 768472 - DNA, 15 bp, Homo sapiens
aatttactatggcaa

SEQ ID NO: 768473 - DNA, 15 bp, Homo sapiens
atttactatggcaaa

SEQ ID NO: 768474 - DNA, 15 bp, Homo sapiens
tttactatggcaaaa

SEQ ID NO: 768475 - DNA, 15 bp, Homo sapiens
ttactatggcaaaac

SEQ ID NO: 768476 - DNA, 15 bp, Homo sapiens
tactatggcaaaaca

SEQ ID NO: 768477 - DNA, 15 bp, Homo sapiens
actatggcaaaacat

SEQ ID NO: 768478 - DNA, 15 bp, Homo sapiens
ctatggcaaaacatt

SEQ ID NO: 768479 - DNA, 15 bp, Homo sapiens
tatggcaaaacattg

SEQ ID NO: 768480 - DNA, 15 bp, Homo sapiens
atggcaaaacattgg

SEQ ID NO: 768481 - DNA, 15 bp, Homo sapiens
tggcaaaacattggg

SEQ ID NO: 768482 - DNA, 15 bp, Homo sapiens
ggcaaaacattgggt

SEQ ID NO: 768483 - DNA, 15 bp, Homo sapiens
gcaaaacattgggta

SEQ ID NO: 768484 - DNA, 15 bp, Homo sapiens
caaaacattgggtaa

SEQ ID NO: 768485 - DNA, 15 bp, Homo sapiens
aaaacattgggtaag

SEQ ID NO: 768486 - DNA, 15 bp, Homo sapiens
aaacattgggtaagt

SEQ ID NO: 768487 - DNA, 15 bp, Homo sapiens
aacattgggtaagtc

SEQ ID NO: 768488 - DNA, 15 bp, Homo sapiens
acattgggtaagtct

SEQ ID NO: 768489 - DNA, 15 bp, Homo sapiens
cattgggtaagtctc

SEQ ID NO: 768490 - DNA, 15 bp, Homo sapiens
attgggtaagtctct

SEQ ID NO: 768491 - DNA, 15 bp, Homo sapiens
ttgggtaagtctctg

SEQ ID NO: 768492 - DNA, 15 bp, Homo sapiens
tgggtaagtctctgg

SEQ ID NO: 768493 - DNA, 15 bp, Homo sapiens
gggtaagtctctgga

SEQ ID NO: 768494 - DNA, 15 bp, Homo sapiens
ggtaagtctctggac

SEQ ID NO: 768495 - DNA, 15 bp, Homo sapiens
gtaagtctctggact

SEQ ID NO: 768496 - DNA, 15 bp, Homo sapiens
taagtctctggacta

SEQ ID NO: 768497 - DNA, 15 bp, Homo sapiens
aagtctctggactaa

SEQ ID NO: 768498 - DNA, 15 bp, Homo sapiens
agtctctggactaag

SEQ ID NO: 768499 - DNA, 15 bp, Homo sapiens
gtctctggactaagt

SEQ ID NO: 768500 - DNA, 15 bp, Homo sapiens
tctctggactaagtc

SEQ ID NO: 768501 - DNA, 15 bp, Homo sapiens
ctctggactaagtct

SEQ ID NO: 768502 - DNA, 15 bp, Homo sapiens
tctggactaagtctt

SEQ ID NO: 768503 - DNA, 15 bp, Homo sapiens
ctggactaagtcttt

SEQ ID NO: 768504 - DNA, 15 bp, Homo sapiens
tggactaagtctttt

SEQ ID NO: 768505 - DNA, 15 bp, Homo sapiens
ggactaagtcttttc

SEQ ID NO: 768506 - DNA, 15 bp, Homo sapiens
gactaagtcttttcc

SEQ ID NO: 768507 - DNA, 15 bp, Homo sapiens
actaagtcttttccc

SEQ ID NO: 768508 - DNA, 15 bp, Homo sapiens
ctaagtcttttccca

SEQ ID NO: 768509 - DNA, 15 bp, Homo sapiens
taagtcttttcccag

SEQ ID NO: 768510 - DNA, 15 bp, Homo sapiens
aagtcttttcccagt

SEQ ID NO: 768511 - DNA, 15 bp, Homo sapiens
agtcttttcccagtg

SEQ ID NO: 768512 - DNA, 15 bp, Homo sapiens
gtcttttcccagtgc

SEQ ID NO: 768513 - DNA, 15 bp, Homo sapiens
tcttttcccagtgca

SEQ ID NO: 768514 - DNA, 15 bp, Homo sapiens
cttttcccagtgcag

SEQ ID NO: 768515 - DNA, 15 bp, Homo sapiens
ttttcccagtgcagg

SEQ ID NO: 768516 - DNA, 15 bp, Homo sapiens
tttcccagtgcagga

SEQ ID NO: 768517 - DNA, 15 bp, Homo sapiens
ttcccagtgcaggag

SEQ ID NO: 768518 - DNA, 15 bp, Homo sapiens
tcccagtgcaggagt

SEQ ID NO: 768519 - DNA, 15 bp, Homo sapiens
cccagtgcaggagtc

SEQ ID NO: 768520 - DNA, 15 bp, Homo sapiens
ccagtgcaggagtct

SEQ ID NO: 768521 - DNA, 15 bp, Homo sapiens
cagtgcaggagtctg

SEQ ID NO: 768522 - DNA, 15 bp, Homo sapiens
agtgcaggagtctga

SEQ ID NO: 768523 - DNA, 15 bp, Homo sapiens
gtgcaggagtctgaa

SEQ ID NO: 768524 - DNA, 15 bp, Homo sapiens
tgcaggagtctgaac

SEQ ID NO: 768525 - DNA, 15 bp, Homo sapiens
gcaggagtctgaaca

SEQ ID NO: 768526 - DNA, 15 bp, Homo sapiens
caggagtctgaacaa

SEQ ID NO: 768527 - DNA, 15 bp, Homo sapiens
aggagtctgaacaag

SEQ ID NO: 768528 - DNA, 15 bp, Homo sapiens
ggagtctgaacaagt

SEQ ID NO: 768529 - DNA, 15 bp, Homo sapiens
gagtctgaacaagtc

SEQ ID NO: 768530 - DNA, 15 bp, Homo sapiens
agtctgaacaagtca

SEQ ID NO: 768531 - DNA, 15 bp, Homo sapiens
gtctgaacaagtcac

SEQ ID NO: 768532 - DNA, 15 bp, Homo sapiens
tctgaacaagtcact

SEQ ID NO: 768533 - DNA, 15 bp, Homo sapiens
ctgaacaagtcactg

SEQ ID NO: 768534 - DNA, 15 bp, Homo sapiens
tgaacaagtcactgc

SEQ ID NO: 768535 - DNA, 15 bp, Homo sapiens
gaacaagtcactgca

SEQ ID NO: 768536 - DNA, 15 bp, Homo sapiens
aacaagtcactgcag

SEQ ID NO: 768537 - DNA, 15 bp, Homo sapiens
acaagtcactgcagt

SEQ ID NO: 768538 - DNA, 15 bp, Homo sapiens
caagtcactgcagta

SEQ ID NO: 768539 - DNA, 15 bp, Homo sapiens
aagtcactgcagtaa

SEQ ID NO: 768540 - DNA, 15 bp, Homo sapiens
agtcactgcagtaat

SEQ ID NO: 768541 - DNA, 15 bp, Homo sapiens
gtcactgcagtaatt

SEQ ID NO: 768542 - DNA, 15 bp, Homo sapiens
tcactgcagtaattt

SEQ ID NO: 768543 - DNA, 15 bp, Homo sapiens
cactgcagtaatttt

SEQ ID NO: 768544 - DNA, 15 bp, Homo sapiens
actgcagtaattttg

SEQ ID NO: 768545 - DNA, 15 bp, Homo sapiens
ctgcagtaattttgt

SEQ ID NO: 768546 - DNA, 15 bp, Homo sapiens
tgcagtaattttgta

SEQ ID NO: 768547 - DNA, 15 bp, Homo sapiens
gcagtaattttgtat

SEQ ID NO: 768548 - DNA, 15 bp, Homo sapiens
cagtaattttgtatg

SEQ ID NO: 768549 - DNA, 15 bp, Homo sapiens
agtaattttgtatgc

SEQ ID NO: 768550 - DNA, 15 bp, Homo sapiens
gtaattttgtatgct

SEQ ID NO: 768551 - DNA, 15 bp, Homo sapiens
taattttgtatgctg

SEQ ID NO: 768552 - DNA, 15 bp, Homo sapiens
aattttgtatgctgg

SEQ ID NO: 768553 - DNA, 15 bp, Homo sapiens
attttgtatgctggc

SEQ ID NO: 768554 - DNA, 15 bp, Homo sapiens
ttttgtatgctggca

SEQ ID NO: 768555 - DNA, 15 bp, Homo sapiens
tttgtatgctggcaa

SEQ ID NO: 768556 - DNA, 15 bp, Homo sapiens
ttgtatgctggcaag

SEQ ID NO: 768557 - DNA, 15 bp, Homo sapiens
tgtatgctggcaagc

SEQ ID NO: 768558 - DNA, 15 bp, Homo sapiens
gtatgctggcaagcc

SEQ ID NO: 768559 - DNA, 15 bp, Homo sapiens
tatgctggcaagccc

SEQ ID NO: 768560 - DNA, 15 bp, Homo sapiens
atgctggcaagcccc

SEQ ID NO: 768561 - DNA, 15 bp, Homo sapiens
tgctggcaagcccca

SEQ ID NO: 768562 - DNA, 15 bp, Homo sapiens
gctggcaagccccag

SEQ ID NO: 768563 - DNA, 15 bp, Homo sapiens
ctggcaagccccagc

SEQ ID NO: 768564 - DNA, 15 bp, Homo sapiens
tggcaagccccagcc

SEQ ID NO: 768565 - DNA, 15 bp, Homo sapiens
ggcaagccccagccc

SEQ ID NO: 768566 - DNA, 15 bp, Homo sapiens
gcaagccccagccct

SEQ ID NO: 768567 - DNA, 15 bp, Homo sapiens
caagccccagcccta

SEQ ID NO: 768568 - DNA, 15 bp, Homo sapiens
aagccccagccctat

SEQ ID NO: 768569 - DNA, 15 bp, Homo sapiens
agccccagccctatt

SEQ ID NO: 768570 - DNA, 15 bp, Homo sapiens
gccccagccctatta

SEQ ID NO: 768571 - DNA, 15 bp, Homo sapiens
ccccagccctattaa

SEQ ID NO: 768572 - DNA, 15 bp, Homo sapiens
cccagccctattaag

SEQ ID NO: 768573 - DNA, 15 bp, Homo sapiens
ccagccctattaagt

SEQ ID NO: 768574 - DNA, 15 bp, Homo sapiens
cagccctattaagta

SEQ ID NO: 768575 - DNA, 15 bp, Homo sapiens
agccctattaagtaa

SEQ ID NO: 768576 - DNA, 15 bp, Homo sapiens
gccctattaagtaag

SEQ ID NO: 768577 - DNA, 15 bp, Homo sapiens
ccctattaagtaagg

SEQ ID NO: 768578 - DNA, 15 bp, Homo sapiens
cctattaagtaaggt

SEQ ID NO: 768579 - DNA, 15 bp, Homo sapiens
ctattaagtaaggtc

SEQ ID NO: 768580 - DNA, 15 bp, Homo sapiens
tattaagtaaggtcc

SEQ ID NO: 768581 - DNA, 15 bp, Homo sapiens
attaagtaaggtcct

SEQ ID NO: 768582 - DNA, 15 bp, Homo sapiens
ttaagtaaggtcctg

SEQ ID NO: 768583 - DNA, 15 bp, Homo sapiens
taagtaaggtcctgc

SEQ ID NO: 768584 - DNA, 15 bp, Homo sapiens
aagtaaggtcctgca

SEQ ID NO: 768585 - DNA, 15 bp, Homo sapiens
agtaaggtcctgcaa

SEQ ID NO: 768586 - DNA, 15 bp, Homo sapiens
gtaaggtcctgcaat

SEQ ID NO: 768587 - DNA, 15 bp, Homo sapiens
taaggtcctgcaatg

SEQ ID NO: 768588 - DNA, 15 bp, Homo sapiens
aaggtcctgcaatgt

SEQ ID NO: 768589 - DNA, 15 bp, Homo sapiens
aggtcctgcaatgtg

SEQ ID NO: 768590 - DNA, 15 bp, Homo sapiens
ggtcctgcaatgtgc

SEQ ID NO: 768591 - DNA, 15 bp, Homo sapiens
gtcctgcaatgtgct

SEQ ID NO: 768592 - DNA, 15 bp, Homo sapiens
tcctgcaatgtgctt

SEQ ID NO: 768593 - DNA, 15 bp, Homo sapiens
cctgcaatgtgcttg

SEQ ID NO: 768594 - DNA, 15 bp, Homo sapiens
ctgcaatgtgcttgt

SEQ ID NO: 768595 - DNA, 15 bp, Homo sapiens
tgcaatgtgcttgtc

SEQ ID NO: 768596 - DNA, 15 bp, Homo sapiens
gcaatgtgcttgtca

SEQ ID NO: 768597 - DNA, 15 bp, Homo sapiens
caatgtgcttgtcac

SEQ ID NO: 768598 - DNA, 15 bp, Homo sapiens
aatgtgcttgtcacc

SEQ ID NO: 768599 - DNA, 15 bp, Homo sapiens
atgtgcttgtcacct

SEQ ID NO: 768600 - DNA, 15 bp, Homo sapiens
tgtgcttgtcacctt

SEQ ID NO: 768601 - DNA, 15 bp, Homo sapiens
gtgcttgtcaccttt

SEQ ID NO: 768602 - DNA, 15 bp, Homo sapiens
tgcttgtcacctttc

SEQ ID NO: 768603 - DNA, 15 bp, Homo sapiens
gcttgtcacctttct

SEQ ID NO: 768604 - DNA, 15 bp, Homo sapiens
cttgtcacctttcta

SEQ ID NO: 768605 - DNA, 15 bp, Homo sapiens
ttgtcacctttctaa

SEQ ID NO: 768606 - DNA, 15 bp, Homo sapiens
tgtcacctttctaaa

SEQ ID NO: 768607 - DNA, 15 bp, Homo sapiens
gtcacctttctaaat

SEQ ID NO: 768608 - DNA, 15 bp, Homo sapiens
tcacctttctaaatt

SEQ ID NO: 768609 - DNA, 15 bp, Homo sapiens
cacctttctaaatta

SEQ ID NO: 768610 - DNA, 15 bp, Homo sapiens
acctttctaaattag

SEQ ID NO: 768611 - DNA, 15 bp, Homo sapiens
cctttctaaattaga

SEQ ID NO: 768612 - DNA, 15 bp, Homo sapiens
ctttctaaattagag

SEQ ID NO: 768613 - DNA, 15 bp, Homo sapiens
tttctaaattagagc

SEQ ID NO: 768614 - DNA, 15 bp, Homo sapiens
ttctaaattagagcc

SEQ ID NO: 768615 - DNA, 15 bp, Homo sapiens
tctaaattagagcct

SEQ ID NO: 768616 - DNA, 15 bp, Homo sapiens
ctaaattagagcctc

SEQ ID NO: 768617 - DNA, 15 bp, Homo sapiens
taaattagagcctca

SEQ ID NO: 768618 - DNA, 15 bp, Homo sapiens
aaattagagcctcat

SEQ ID NO: 768619 - DNA, 15 bp, Homo sapiens
aattagagcctcata

SEQ ID NO: 768620 - DNA, 15 bp, Homo sapiens
attagagcctcatag

SEQ ID NO: 768621 - DNA, 15 bp, Homo sapiens
ttagagcctcatagt

SEQ ID NO: 768622 - DNA, 15 bp, Homo sapiens
tagagcctcatagtc

SEQ ID NO: 768623 - DNA, 15 bp, Homo sapiens
agagcctcatagtct

SEQ ID NO: 768624 - DNA, 15 bp, Homo sapiens
gagcctcatagtctc

SEQ ID NO: 768625 - DNA, 15 bp, Homo sapiens
agcctcatagtctca

SEQ ID NO: 768626 - DNA, 15 bp, Homo sapiens
gcctcatagtctcaa

SEQ ID NO: 768627 - DNA, 15 bp, Homo sapiens
cctcatagtctcaaa

SEQ ID NO: 768628 - DNA, 15 bp, Homo sapiens
ctcatagtctcaaaa

SEQ ID NO: 768629 - DNA, 15 bp, Homo sapiens
tcatagtctcaaaac

SEQ ID NO: 768630 - DNA, 15 bp, Homo sapiens
catagtctcaaaacg

SEQ ID NO: 768631 - DNA, 15 bp, Homo sapiens
atagtctcaaaacgg

SEQ ID NO: 768632 - DNA, 15 bp, Homo sapiens
tagtctcaaaacggt

SEQ ID NO: 768633 - DNA, 15 bp, Homo sapiens
agtctcaaaacggtc

SEQ ID NO: 768634 - DNA, 15 bp, Homo sapiens
gtctcaaaacggtcc

SEQ ID NO: 768635 - DNA, 15 bp, Homo sapiens
tctcaaaacggtcct

SEQ ID NO: 768636 - DNA, 15 bp, Homo sapiens
ctcaaaacggtcctt

SEQ ID NO: 768637 - DNA, 15 bp, Homo sapiens
tcaaaacggtccttt

SEQ ID NO: 768638 - DNA, 15 bp, Homo sapiens
caaaacggtcctttg

SEQ ID NO: 768639 - DNA, 15 bp, Homo sapiens
aaaacggtcctttgc

SEQ ID NO: 768640 - DNA, 15 bp, Homo sapiens
aaacggtcctttgca

SEQ ID NO: 768641 - DNA, 15 bp, Homo sapiens
aacggtcctttgcag

SEQ ID NO: 768642 - DNA, 15 bp, Homo sapiens
acggtcctttgcaga

SEQ ID NO: 768643 - DNA, 15 bp, Homo sapiens
cggtcctttgcagaa

SEQ ID NO: 768644 - DNA, 15 bp, Homo sapiens
ggtcctttgcagaag

SEQ ID NO: 768645 - DNA, 15 bp, Homo sapiens
gtcctttgcagaagg

SEQ ID NO: 768646 - DNA, 15 bp, Homo sapiens
tcctttgcagaagga

SEQ ID NO: 768647 - DNA, 15 bp, Homo sapiens
cctttgcagaaggat

SEQ ID NO: 768648 - DNA, 15 bp, Homo sapiens
ctttgcagaaggatt

SEQ ID NO: 768649 - DNA, 15 bp, Homo sapiens
tttgcagaaggattt

SEQ ID NO: 768650 - DNA, 15 bp, Homo sapiens
ttgcagaaggatttc

SEQ ID NO: 768651 - DNA, 15 bp, Homo sapiens
tgcagaaggatttct

SEQ ID NO: 768652 - DNA, 15 bp, Homo sapiens
gcagaaggatttctt

SEQ ID NO: 768653 - DNA, 15 bp, Homo sapiens
cagaaggatttcttt

SEQ ID NO: 768654 - DNA, 15 bp, Homo sapiens
agaaggatttctttt

SEQ ID NO: 768655 - DNA, 15 bp, Homo sapiens
gaaggatttcttttt

SEQ ID NO: 768656 - DNA, 15 bp, Homo sapiens
aaggatttctttttt

SEQ ID NO: 768657 - DNA, 15 bp, Homo sapiens
aggatttcttttttt

SEQ ID NO: 768658 - DNA, 15 bp, Homo sapiens
ggatttcttttttta

SEQ ID NO: 768659 - DNA, 15 bp, Homo sapiens
gatttctttttttaa

SEQ ID NO: 768660 - DNA, 15 bp, Homo sapiens
atttctttttttaat

SEQ ID NO: 768661 - DNA, 15 bp, Homo sapiens
tttctttttttaatg

SEQ ID NO: 768662 - DNA, 15 bp, Homo sapiens
ttctttttttaatga

SEQ ID NO: 768663 - DNA, 15 bp, Homo sapiens
tctttttttaatgac

SEQ ID NO: 768664 - DNA, 15 bp, Homo sapiens
ctttttttaatgact

SEQ ID NO: 768665 - DNA, 15 bp, Homo sapiens
tttttttaatgactt

SEQ ID NO: 768666 - DNA, 15 bp, Homo sapiens
ttttttaatgactta

SEQ ID NO: 768667 - DNA, 15 bp, Homo sapiens
tttttaatgacttag

SEQ ID NO: 768668 - DNA, 15 bp, Homo sapiens
ttttaatgacttagc

SEQ ID NO: 768669 - DNA, 15 bp, Homo sapiens
tttaatgacttagca

SEQ ID NO: 768670 - DNA, 15 bp, Homo sapiens
ttaatgacttagcat

SEQ ID NO: 768671 - DNA, 15 bp, Homo sapiens
taatgacttagcata

SEQ ID NO: 768672 - DNA, 15 bp, Homo sapiens
aatgacttagcatac

SEQ ID NO: 768673 - DNA, 15 bp, Homo sapiens
atgacttagcataca

SEQ ID NO: 768674 - DNA, 15 bp, Homo sapiens
tgacttagcatacag

SEQ ID NO: 768675 - DNA, 15 bp, Homo sapiens
gacttagcatacagg

SEQ ID NO: 768676 - DNA, 15 bp, Homo sapiens
acttagcatacaggt

SEQ ID NO: 768677 - DNA, 15 bp, Homo sapiens
cttagcatacaggtc

SEQ ID NO: 768678 - DNA, 15 bp, Homo sapiens
ttagcatacaggtca

SEQ ID NO: 768679 - DNA, 15 bp, Homo sapiens
tagcatacaggtcag

SEQ ID NO: 768680 - DNA, 15 bp, Homo sapiens
agcatacaggtcagt

SEQ ID NO: 768681 - DNA, 15 bp, Homo sapiens
gcatacaggtcagta

SEQ ID NO: 768682 - DNA, 15 bp, Homo sapiens
catacaggtcagtat

SEQ ID NO: 768683 - DNA, 15 bp, Homo sapiens
atacaggtcagtatc

SEQ ID NO: 768684 - DNA, 15 bp, Homo sapiens
tacaggtcagtatcc

SEQ ID NO: 768685 - DNA, 15 bp, Homo sapiens
acaggtcagtatccc

SEQ ID NO: 768686 - DNA, 15 bp, Homo sapiens
caggtcagtatccca

SEQ ID NO: 768687 - DNA, 15 bp, Homo sapiens
aggtcagtatcccat

SEQ ID NO: 768688 - DNA, 15 bp, Homo sapiens
ggtcagtatcccatg

SEQ ID NO: 768689 - DNA, 15 bp, Homo sapiens
gtcagtatcccatgt

SEQ ID NO: 768690 - DNA, 15 bp, Homo sapiens
tcagtatcccatgtg

SEQ ID NO: 768691 - DNA, 15 bp, Homo sapiens
cagtatcccatgtgt

SEQ ID NO: 768692 - DNA, 15 bp, Homo sapiens
agtatcccatgtgta

SEQ ID NO: 768693 - DNA, 15 bp, Homo sapiens
gtatcccatgtgtac

SEQ ID NO: 768694 - DNA, 15 bp, Homo sapiens
tatcccatgtgtact

SEQ ID NO: 768695 - DNA, 15 bp, Homo sapiens
atcccatgtgtactt

SEQ ID NO: 768696 - DNA, 15 bp, Homo sapiens
tcccatgtgtactta

SEQ ID NO: 768697 - DNA, 15 bp, Homo sapiens
cccatgtgtacttag

SEQ ID NO: 768698 - DNA, 15 bp, Homo sapiens
ccatgtgtacttaga

SEQ ID NO: 768699 - DNA, 15 bp, Homo sapiens
catgtgtacttagaa

SEQ ID NO: 768700 - DNA, 15 bp, Homo sapiens
atgtgtacttagaaa

SEQ ID NO: 768701 - DNA, 15 bp, Homo sapiens
tgtgtacttagaaag

SEQ ID NO: 768702 - DNA, 15 bp, Homo sapiens
gtgtacttagaaagg

SEQ ID NO: 768703 - DNA, 15 bp, Homo sapiens
tgtacttagaaagga

SEQ ID NO: 768704 - DNA, 15 bp, Homo sapiens
gtacttagaaaggat

SEQ ID NO: 768705 - DNA, 15 bp, Homo sapiens
tacttagaaaggatt

SEQ ID NO: 768706 - DNA, 15 bp, Homo sapiens
acttagaaaggattt

SEQ ID NO: 768707 - DNA, 15 bp, Homo sapiens
cttagaaaggatttg

SEQ ID NO: 768708 - DNA, 15 bp, Homo sapiens
ttagaaaggatttgt

SEQ ID NO: 768709 - DNA, 15 bp, Homo sapiens
tagaaaggatttgta

SEQ ID NO: 768710 - DNA, 15 bp, Homo sapiens
agaaaggatttgtaa

SEQ ID NO: 768711 - DNA, 15 bp, Homo sapiens
gaaaggatttgtaat

SEQ ID NO: 768712 - DNA, 15 bp, Homo sapiens
aaaggatttgtaatc

SEQ ID NO: 768713 - DNA, 15 bp, Homo sapiens
aaggatttgtaatct

SEQ ID NO: 768714 - DNA, 15 bp, Homo sapiens
aggatttgtaatctc

SEQ ID NO: 768715 - DNA, 15 bp, Homo sapiens
ggatttgtaatctct

SEQ ID NO: 768716 - DNA, 15 bp, Homo sapiens
gatttgtaatctcta

SEQ ID NO: 768717 - DNA, 15 bp, Homo sapiens
atttgtaatctctat

SEQ ID NO: 768718 - DNA, 15 bp, Homo sapiens
tttgtaatctctatt

SEQ ID NO: 768719 - DNA, 15 bp, Homo sapiens
ttgtaatctctattt

SEQ ID NO: 768720 - DNA, 15 bp, Homo sapiens
tgtaatctctatttc

SEQ ID NO: 768721 - DNA, 15 bp, Homo sapiens
gtaatctctatttca

SEQ ID NO: 768722 - DNA, 15 bp, Homo sapiens
taatctctatttcat

SEQ ID NO: 768723 - DNA, 15 bp, Homo sapiens
aatctctatttcata

SEQ ID NO: 768724 - DNA, 15 bp, Homo sapiens
atctctatttcatat

SEQ ID NO: 768725 - DNA, 15 bp, Homo sapiens
tctctatttcatatg

SEQ ID NO: 768726 - DNA, 15 bp, Homo sapiens
ctctatttcatatgc

SEQ ID NO: 768727 - DNA, 15 bp, Homo sapiens
tctatttcatatgca

SEQ ID NO: 768728 - DNA, 15 bp, Homo sapiens
ctatttcatatgcag

SEQ ID NO: 768729 - DNA, 15 bp, Homo sapiens
tatttcatatgcagg

SEQ ID NO: 768730 - DNA, 15 bp, Homo sapiens
atttcatatgcagga

SEQ ID NO: 768731 - DNA, 15 bp, Homo sapiens
tttcatatgcaggaa

SEQ ID NO: 768732 - DNA, 15 bp, Homo sapiens
ttcatatgcaggaag

SEQ ID NO: 768733 - DNA, 15 bp, Homo sapiens
tcatatgcaggaagt

SEQ ID NO: 768734 - DNA, 15 bp, Homo sapiens
catatgcaggaagtc

SEQ ID NO: 768735 - DNA, 15 bp, Homo sapiens
atatgcaggaagtct

SEQ ID NO: 768736 - DNA, 15 bp, Homo sapiens
tatgcaggaagtctc

SEQ ID NO: 768737 - DNA, 15 bp, Homo sapiens
atgcaggaagtctct

SEQ ID NO: 768738 - DNA, 15 bp, Homo sapiens
tgcaggaagtctctc

SEQ ID NO: 768739 - DNA, 15 bp, Homo sapiens
gcaggaagtctctct

SEQ ID NO: 768740 - DNA, 15 bp, Homo sapiens
caggaagtctctctc

SEQ ID NO: 768741 - DNA, 15 bp, Homo sapiens
aggaagtctctctcc

SEQ ID NO: 768742 - DNA, 15 bp, Homo sapiens
ggaagtctctctccc

SEQ ID NO: 768743 - DNA, 15 bp, Homo sapiens
gaagtctctctccct

SEQ ID NO: 768744 - DNA, 15 bp, Homo sapiens
aagtctctctccctt

SEQ ID NO: 768745 - DNA, 15 bp, Homo sapiens
agtctctctcccttt

SEQ ID NO: 768746 - DNA, 15 bp, Homo sapiens
gtctctctccctttt

SEQ ID NO: 768747 - DNA, 15 bp, Homo sapiens
tctctctccctttta

SEQ ID NO: 768748 - DNA, 15 bp, Homo sapiens
ctctctcccttttat

SEQ ID NO: 768749 - DNA, 15 bp, Homo sapiens
tctctcccttttata

SEQ ID NO: 768750 - DNA, 15 bp, Homo sapiens
ctctcccttttataa

SEQ ID NO: 768751 - DNA, 15 bp, Homo sapiens
tctcccttttataat

SEQ ID NO: 768752 - DNA, 15 bp, Homo sapiens
ctcccttttataatt

SEQ ID NO: 768753 - DNA, 15 bp, Homo sapiens
tcccttttataattt

SEQ ID NO: 768754 - DNA, 15 bp, Homo sapiens
cccttttataatttt

SEQ ID NO: 768755 - DNA, 15 bp, Homo sapiens
ccttttataatttta

SEQ ID NO: 768756 - DNA, 15 bp, Homo sapiens
cttttataattttaa

SEQ ID NO: 768757 - DNA, 15 bp, Homo sapiens
ttttataattttaat

SEQ ID NO: 768758 - DNA, 15 bp, Homo sapiens
tttataattttaatt

SEQ ID NO: 768759 - DNA, 15 bp, Homo sapiens
ttataattttaattt

SEQ ID NO: 768760 - DNA, 15 bp, Homo sapiens
tataattttaatttt

SEQ ID NO: 768761 - DNA, 15 bp, Homo sapiens
ataattttaatttta

SEQ ID NO: 768762 - DNA, 15 bp, Homo sapiens
taattttaattttat

SEQ ID NO: 768763 - DNA, 15 bp, Homo sapiens
aattttaattttatt

SEQ ID NO: 768764 - DNA, 15 bp, Homo sapiens
attttaattttattt

SEQ ID NO: 768765 - DNA, 15 bp, Homo sapiens
ttttaattttatttt

SEQ ID NO: 768766 - DNA, 15 bp, Homo sapiens
tttaattttattttt

SEQ ID NO: 768767 - DNA, 15 bp, Homo sapiens
ttaattttattttta

SEQ ID NO: 768768 - DNA, 15 bp, Homo sapiens
taattttatttttac

SEQ ID NO: 768769 - DNA, 15 bp, Homo sapiens
aattttatttttact

SEQ ID NO: 768770 - DNA, 15 bp, Homo sapiens
attttatttttactg

SEQ ID NO: 768771 - DNA, 15 bp, Homo sapiens
ttttatttttactga

SEQ ID NO: 768772 - DNA, 15 bp, Homo sapiens
tttatttttactgat

SEQ ID NO: 768773 - DNA, 15 bp, Homo sapiens
ttatttttactgata

SEQ ID NO: 768774 - DNA, 15 bp, Homo sapiens
tatttttactgataa

SEQ ID NO: 768775 - DNA, 15 bp, Homo sapiens
atttttactgataaa

SEQ ID NO: 768776 - DNA, 15 bp, Homo sapiens
tttttactgataaat

SEQ ID NO: 768777 - DNA, 15 bp, Homo sapiens
ttttactgataaata

SEQ ID NO: 768778 - DNA, 15 bp, Homo sapiens
tttactgataaataa

SEQ ID NO: 768779 - DNA, 15 bp, Homo sapiens
ttactgataaataat

SEQ ID NO: 768780 - DNA, 15 bp, Homo sapiens
tactgataaataata

SEQ ID NO: 768781 - DNA, 15 bp, Homo sapiens
actgataaataataa

SEQ ID NO: 768782 - DNA, 15 bp, Homo sapiens
ctgataaataataaa

SEQ ID NO: 768783 - DNA, 15 bp, Homo sapiens
tgataaataataaat

SEQ ID NO: 768784 - DNA, 15 bp, Homo sapiens
gataaataataaatg

SEQ ID NO: 768785 - DNA, 15 bp, Homo sapiens
ataaataataaatgt

SEQ ID NO: 768786 - DNA, 15 bp, Homo sapiens
taaataataaatgta

SEQ ID NO: 768787 - DNA, 15 bp, Homo sapiens
aaataataaatgtac

SEQ ID NO: 768788 - DNA, 15 bp, Homo sapiens
aataataaatgtaca

SEQ ID NO: 768789 - DNA, 15 bp, Homo sapiens
ataataaatgtacat

SEQ ID NO: 768790 - DNA, 15 bp, Homo sapiens
taataaatgtacata

SEQ ID NO: 768791 - DNA, 15 bp, Homo sapiens
aataaatgtacatat

SEQ ID NO: 768792 - DNA, 15 bp, Homo sapiens
ataaatgtacatatg

SEQ ID NO: 768793 - DNA, 15 bp, Homo sapiens
taaatgtacatatgt

SEQ ID NO: 768794 - DNA, 15 bp, Homo sapiens
aaatgtacatatgta

SEQ ID NO: 768795 - DNA, 15 bp, Homo sapiens
aatgtacatatgtac

SEQ ID NO: 768796 - DNA, 15 bp, Homo sapiens
atgtacatatgtaca

SEQ ID NO: 768797 - DNA, 15 bp, Homo sapiens
tgtacatatgtacat

SEQ ID NO: 768798 - DNA, 15 bp, Homo sapiens
gtacatatgtacatg

SEQ ID NO: 768799 - DNA, 15 bp, Homo sapiens
tacatatgtacatgt

SEQ ID NO: 768800 - DNA, 15 bp, Homo sapiens
acatatgtacatgtg

SEQ ID NO: 768801 - DNA, 15 bp, Homo sapiens
catatgtacatgtga

SEQ ID NO: 768802 - DNA, 15 bp, Homo sapiens
atatgtacatgtgat

SEQ ID NO: 768803 - DNA, 15 bp, Homo sapiens
tatgtacatgtgata

SEQ ID NO: 768804 - DNA, 15 bp, Homo sapiens
atgtacatgtgatat

SEQ ID NO: 768805 - DNA, 15 bp, Homo sapiens
tgtacatgtgatatt

SEQ ID NO: 768806 - DNA, 15 bp, Homo sapiens
gtacatgtgatattt

SEQ ID NO: 768807 - DNA, 15 bp, Homo sapiens
tacatgtgatattta

SEQ ID NO: 768808 - DNA, 15 bp, Homo sapiens
acatgtgatatttaa

SEQ ID NO: 768809 - DNA, 15 bp, Homo sapiens
catgtgatatttaat

SEQ ID NO: 768810 - DNA, 15 bp, Homo sapiens
atgtgatatttaata

SEQ ID NO: 768811 - DNA, 15 bp, Homo sapiens
tgtgatatttaatat

SEQ ID NO: 768812 - DNA, 15 bp, Homo sapiens
gtgatatttaatata

SEQ ID NO: 768813 - DNA, 15 bp, Homo sapiens
tgatatttaatatag

SEQ ID NO: 768814 - DNA, 15 bp, Homo sapiens
gatatttaatatagt

SEQ ID NO: 768815 - DNA, 15 bp, Homo sapiens
atatttaatatagtc

SEQ ID NO: 768816 - DNA, 15 bp, Homo sapiens
tatttaatatagtca

SEQ ID NO: 768817 - DNA, 15 bp, Homo sapiens
atttaatatagtcat

SEQ ID NO: 768818 - DNA, 15 bp, Homo sapiens
tttaatatagtcata

SEQ ID NO: 768819 - DNA, 15 bp, Homo sapiens
ttaatatagtcatat

SEQ ID NO: 768820 - DNA, 15 bp, Homo sapiens
taatatagtcatata

SEQ ID NO: 768821 - DNA, 15 bp, Homo sapiens
aatatagtcatataa

SEQ ID NO: 768822 - DNA, 15 bp, Homo sapiens
atatagtcatataat

SEQ ID NO: 768823 - DNA, 15 bp, Homo sapiens
tatagtcatataatt

SEQ ID NO: 768824 - DNA, 15 bp, Homo sapiens
atagtcatataattt

SEQ ID NO: 768825 - DNA, 15 bp, Homo sapiens
tagtcatataatttg

SEQ ID NO: 768826 - DNA, 15 bp, Homo sapiens
agtcatataatttgt

SEQ ID NO: 768827 - DNA, 15 bp, Homo sapiens
gtcatataatttgta

SEQ ID NO: 768828 - DNA, 15 bp, Homo sapiens
tcatataatttgtaa

SEQ ID NO: 768829 - DNA, 15 bp, Homo sapiens
catataatttgtaaa

SEQ ID NO: 768830 - DNA, 15 bp, Homo sapiens
atataatttgtaaag

SEQ ID NO: 768831 - DNA, 15 bp, Homo sapiens
tataatttgtaaagg

SEQ ID NO: 768832 - DNA, 15 bp, Homo sapiens
ataatttgtaaaggt

SEQ ID NO: 768833 - DNA, 15 bp, Homo sapiens
taatttgtaaaggtc

SEQ ID NO: 768834 - DNA, 15 bp, Homo sapiens
aatttgtaaaggtca

SEQ ID NO: 768835 - DNA, 15 bp, Homo sapiens
atttgtaaaggtcaa

SEQ ID NO: 768836 - DNA, 15 bp, Homo sapiens
tttgtaaaggtcaaa

SEQ ID NO: 768837 - DNA, 15 bp, Homo sapiens
ttgtaaaggtcaaat

SEQ ID NO: 768838 - DNA, 15 bp, Homo sapiens
tgtaaaggtcaaatc

SEQ ID NO: 768839 - DNA, 15 bp, Homo sapiens
gtaaaggtcaaatca

SEQ ID NO: 768840 - DNA, 15 bp, Homo sapiens
taaaggtcaaatcag

SEQ ID NO: 768841 - DNA, 15 bp, Homo sapiens
aaaggtcaaatcagg

SEQ ID NO: 768842 - DNA, 15 bp, Homo sapiens
aaggtcaaatcaggg

SEQ ID NO: 768843 - DNA, 15 bp, Homo sapiens
aggtcaaatcagggt

SEQ ID NO: 768844 - DNA, 15 bp, Homo sapiens
ggtcaaatcagggtt

SEQ ID NO: 768845 - DNA, 15 bp, Homo sapiens
gtcaaatcagggtta

SEQ ID NO: 768846 - DNA, 15 bp, Homo sapiens
tcaaatcagggttat

SEQ ID NO: 768847 - DNA, 15 bp, Homo sapiens
caaatcagggttatt

SEQ ID NO: 768848 - DNA, 15 bp, Homo sapiens
aaatcagggttattg

SEQ ID NO: 768849 - DNA, 15 bp, Homo sapiens
aatcagggttattgg

SEQ ID NO: 768850 - DNA, 15 bp, Homo sapiens
atcagggttattggg

SEQ ID NO: 768851 - DNA, 15 bp, Homo sapiens
tcagggttattggga

SEQ ID NO: 768852 - DNA, 15 bp, Homo sapiens
cagggttattgggat

SEQ ID NO: 768853 - DNA, 15 bp, Homo sapiens
agggttattgggata

SEQ ID NO: 768854 - DNA, 15 bp, Homo sapiens
gggttattgggatat

SEQ ID NO: 768855 - DNA, 15 bp, Homo sapiens
ggttattgggatatc

SEQ ID NO: 768856 - DNA, 15 bp, Homo sapiens
gttattgggatatct

SEQ ID NO: 768857 - DNA, 15 bp, Homo sapiens
ttattgggatatcta

SEQ ID NO: 768858 - DNA, 15 bp, Homo sapiens
tattgggatatctat

SEQ ID NO: 768859 - DNA, 15 bp, Homo sapiens
attgggatatctatc

SEQ ID NO: 768860 - DNA, 15 bp, Homo sapiens
ttgggatatctatca

SEQ ID NO: 768861 - DNA, 15 bp, Homo sapiens
tgggatatctatcat

SEQ ID NO: 768862 - DNA, 15 bp, Homo sapiens
gggatatctatcata

SEQ ID NO: 768863 - DNA, 15 bp, Homo sapiens
ggatatctatcatat

SEQ ID NO: 768864 - DNA, 15 bp, Homo sapiens
gatatctatcatatt

SEQ ID NO: 768865 - DNA, 15 bp, Homo sapiens
atatctatcatatta

SEQ ID NO: 768866 - DNA, 15 bp, Homo sapiens
tatctatcatattaa

SEQ ID NO: 768867 - DNA, 15 bp, Homo sapiens
atctatcatattaaa

SEQ ID NO: 768868 - DNA, 15 bp, Homo sapiens
tctatcatattaaat

SEQ ID NO: 768869 - DNA, 15 bp, Homo sapiens
ctatcatattaaata

SEQ ID NO: 768870 - DNA, 15 bp, Homo sapiens
tatcatattaaatat

SEQ ID NO: 768871 - DNA, 15 bp, Homo sapiens
atcatattaaatatt

SEQ ID NO: 768872 - DNA, 15 bp, Homo sapiens
tcatattaaatattt

SEQ ID NO: 768873 - DNA, 15 bp, Homo sapiens
catattaaatatttg

SEQ ID NO: 768874 - DNA, 15 bp, Homo sapiens
atattaaatatttgt

SEQ ID NO: 768875 - DNA, 15 bp, Homo sapiens
tattaaatatttgtc

SEQ ID NO: 768876 - DNA, 15 bp, Homo sapiens
attaaatatttgtct

SEQ ID NO: 768877 - DNA, 15 bp, Homo sapiens
ttaaatatttgtctt

SEQ ID NO: 768878 - DNA, 15 bp, Homo sapiens
taaatatttgtcttt

SEQ ID NO: 768879 - DNA, 15 bp, Homo sapiens
aaatatttgtcttta

SEQ ID NO: 768880 - DNA, 15 bp, Homo sapiens
aatatttgtctttat

SEQ ID NO: 768881 - DNA, 15 bp, Homo sapiens
atatttgtctttatg

SEQ ID NO: 768882 - DNA, 15 bp, Homo sapiens
tatttgtctttatgc

SEQ ID NO: 768883 - DNA, 15 bp, Homo sapiens
atttgtctttatgct

SEQ ID NO: 768884 - DNA, 15 bp, Homo sapiens
tttgtctttatgcta

SEQ ID NO: 768885 - DNA, 15 bp, Homo sapiens
ttgtctttatgctag

SEQ ID NO: 768886 - DNA, 15 bp, Homo sapiens
tgtctttatgctaga

SEQ ID NO: 768887 - DNA, 15 bp, Homo sapiens
gtctttatgctagaa

SEQ ID NO: 768888 - DNA, 15 bp, Homo sapiens
tctttatgctagaaa

SEQ ID NO: 768889 - DNA, 15 bp, Homo sapiens
ctttatgctagaaac

SEQ ID NO: 768890 - DNA, 15 bp, Homo sapiens
tttatgctagaaacc

SEQ ID NO: 768891 - DNA, 15 bp, Homo sapiens
ttatgctagaaacct

SEQ ID NO: 768892 - DNA, 15 bp, Homo sapiens
tatgctagaaacctt

SEQ ID NO: 768893 - DNA, 15 bp, Homo sapiens
atgctagaaaccttt

SEQ ID NO: 768894 - DNA, 15 bp, Homo sapiens
tgctagaaacctttg

SEQ ID NO: 768895 - DNA, 15 bp, Homo sapiens
gctagaaacctttga

SEQ ID NO: 768896 - DNA, 15 bp, Homo sapiens
ctagaaacctttgaa

SEQ ID NO: 768897 - DNA, 15 bp, Homo sapiens
tagaaacctttgaat

SEQ ID NO: 768898 - DNA, 15 bp, Homo sapiens
agaaacctttgaatt

SEQ ID NO: 768899 - DNA, 15 bp, Homo sapiens
gaaacctttgaatta

SEQ ID NO: 768900 - DNA, 15 bp, Homo sapiens
aaacctttgaattat

SEQ ID NO: 768901 - DNA, 15 bp, Homo sapiens
aacctttgaattatt

SEQ ID NO: 768902 - DNA, 15 bp, Homo sapiens
acctttgaattattc

SEQ ID NO: 768903 - DNA, 15 bp, Homo sapiens
cctttgaattattct

SEQ ID NO: 768904 - DNA, 15 bp, Homo sapiens
ctttgaattattctc

SEQ ID NO: 768905 - DNA, 15 bp, Homo sapiens
tttgaattattctct

SEQ ID NO: 768906 - DNA, 15 bp, Homo sapiens
ttgaattattctctt

SEQ ID NO: 768907 - DNA, 15 bp, Homo sapiens
tgaattattctcttc

SEQ ID NO: 768908 - DNA, 15 bp, Homo sapiens
gaattattctcttct

SEQ ID NO: 768909 - DNA, 15 bp, Homo sapiens
aattattctcttcta

SEQ ID NO: 768910 - DNA, 15 bp, Homo sapiens
attattctcttctag

SEQ ID NO: 768911 - DNA, 15 bp, Homo sapiens
ttattctcttctagc

SEQ ID NO: 768912 - DNA, 15 bp, Homo sapiens
ctactttgaaatata

SEQ ID NO: 768913 - DNA, 15 bp, Homo sapiens
tactttgaaatatat

SEQ ID NO: 768914 - DNA, 15 bp, Homo sapiens
actttgaaatatata

SEQ ID NO: 768915 - DNA, 15 bp, Homo sapiens
ctttgaaatatataa

SEQ ID NO: 768916 - DNA, 15 bp, Homo sapiens
tttgaaatatataat

SEQ ID NO: 768917 - DNA, 15 bp, Homo sapiens
ttgaaatatataata

SEQ ID NO: 768918 - DNA, 15 bp, Homo sapiens
tgaaatatataatat

SEQ ID NO: 768919 - DNA, 15 bp, Homo sapiens
gaaatatataatatt

SEQ ID NO: 768920 - DNA, 15 bp, Homo sapiens
aaatatataatattt

SEQ ID NO: 768921 - DNA, 15 bp, Homo sapiens
aatatataatatttt

SEQ ID NO: 768922 - DNA, 15 bp, Homo sapiens
atatataatattttc

SEQ ID NO: 768923 - DNA, 15 bp, Homo sapiens
tatataatattttct

SEQ ID NO: 768924 - DNA, 15 bp, Homo sapiens
atataatattttcta

SEQ ID NO: 768925 - DNA, 15 bp, Homo sapiens
tataatattttctaa

SEQ ID NO: 768926 - DNA, 15 bp, Homo sapiens
ataatattttctaaa

SEQ ID NO: 768927 - DNA, 15 bp, Homo sapiens
taatattttctaaac

SEQ ID NO: 768928 - DNA, 15 bp, Homo sapiens
aatattttctaaact

SEQ ID NO: 768929 - DNA, 15 bp, Homo sapiens
atattttctaaacta

SEQ ID NO: 768930 - DNA, 15 bp, Homo sapiens
tattttctaaactat

SEQ ID NO: 768931 - DNA, 15 bp, Homo sapiens
attttctaaactata

SEQ ID NO: 768932 - DNA, 15 bp, Homo sapiens
ttttctaaactatag

SEQ ID NO: 768933 - DNA, 15 bp, Homo sapiens
tttctaaactatagt

SEQ ID NO: 768934 - DNA, 15 bp, Homo sapiens
ttctaaactatagtc

SEQ ID NO: 768935 - DNA, 15 bp, Homo sapiens
tctaaactatagtca

SEQ ID NO: 768936 - DNA, 15 bp, Homo sapiens
ctaaactatagtcac

SEQ ID NO: 768937 - DNA, 15 bp, Homo sapiens
taaactatagtcacc

SEQ ID NO: 768938 - DNA, 15 bp, Homo sapiens
aaactatagtcaccc

SEQ ID NO: 768939 - DNA, 15 bp, Homo sapiens
aactatagtcaccct

SEQ ID NO: 768940 - DNA, 15 bp, Homo sapiens
ctatagtcaccctac

SEQ ID NO: 768941 - DNA, 15 bp, Homo sapiens
tatagtcaccctact

SEQ ID NO: 768942 - DNA, 15 bp, Homo sapiens
atagtcaccctactg

SEQ ID NO: 768943 - DNA, 15 bp, Homo sapiens
tagtcaccctactga

SEQ ID NO: 768944 - DNA, 15 bp, Homo sapiens
agtcaccctactgat

SEQ ID NO: 768945 - DNA, 15 bp, Homo sapiens
gtcaccctactgatc

SEQ ID NO: 768946 - DNA, 15 bp, Homo sapiens
tcaccctactgatct

SEQ ID NO: 768947 - DNA, 15 bp, Homo sapiens
caccctactgatcta

SEQ ID NO: 768948 - DNA, 15 bp, Homo sapiens
accctactgatctat

SEQ ID NO: 768949 - DNA, 15 bp, Homo sapiens
ccctactgatctatc

SEQ ID NO: 768950 - DNA, 15 bp, Homo sapiens
cctactgatctatca

SEQ ID NO: 768951 - DNA, 15 bp, Homo sapiens
ctactgatctatcaa

SEQ ID NO: 768952 - DNA, 15 bp, Homo sapiens
tactgatctatcaaa

SEQ ID NO: 768953 - DNA, 15 bp, Homo sapiens
actgatctatcaaac

SEQ ID NO: 768954 - DNA, 15 bp, Homo sapiens
ctgatctatcaaact

SEQ ID NO: 768955 - DNA, 15 bp, Homo sapiens
tgatctatcaaactc

SEQ ID NO: 768956 - DNA, 15 bp, Homo sapiens
gatctatcaaactct

SEQ ID NO: 768957 - DNA, 15 bp, Homo sapiens
atctatcaaactcta

SEQ ID NO: 768958 - DNA, 15 bp, Homo sapiens
tctatcaaactctag

SEQ ID NO: 768959 - DNA, 15 bp, Homo sapiens
ctatcaaactctagg

SEQ ID NO: 768960 - DNA, 15 bp, Homo sapiens
tatcaaactctaggt

SEQ ID NO: 768961 - DNA, 15 bp, Homo sapiens
atcaaactctaggtc

SEQ ID NO: 768962 - DNA, 15 bp, Homo sapiens
tcaaactctaggtct

SEQ ID NO: 768963 - DNA, 15 bp, Homo sapiens
caaactctaggtctt

SEQ ID NO: 768964 - DNA, 15 bp, Homo sapiens
aaactctaggtctta

SEQ ID NO: 768965 - DNA, 15 bp, Homo sapiens
aactctaggtcttat

SEQ ID NO: 768966 - DNA, 15 bp, Homo sapiens
actctaggtcttatt

SEQ ID NO: 768967 - DNA, 15 bp, Homo sapiens
ctctaggtcttattt

SEQ ID NO: 768968 - DNA, 15 bp, Homo sapiens
tctaggtcttatttc

SEQ ID NO: 768969 - DNA, 15 bp, Homo sapiens
ctaggtcttatttct

SEQ ID NO: 768970 - DNA, 15 bp, Homo sapiens
taggtcttatttctg

SEQ ID NO: 768971 - DNA, 15 bp, Homo sapiens
aggtcttatttctgc

SEQ ID NO: 768972 - DNA, 15 bp, Homo sapiens
ggtcttatttctgca

SEQ ID NO: 768973 - DNA, 15 bp, Homo sapiens
gtcttatttctgcag

SEQ ID NO: 768974 - DNA, 15 bp, Homo sapiens
tcttatttctgcaga

SEQ ID NO: 768975 - DNA, 15 bp, Homo sapiens
cttatttctgcagaa

SEQ ID NO: 768976 - DNA, 15 bp, Homo sapiens
ttatttctgcagaag

SEQ ID NO: 768977 - DNA, 15 bp, Homo sapiens
tatttctgcagaaga

SEQ ID NO: 768978 - DNA, 15 bp, Homo sapiens
atttctgcagaagat

SEQ ID NO: 768979 - DNA, 15 bp, Homo sapiens
tttctgcagaagata

SEQ ID NO: 768980 - DNA, 15 bp, Homo sapiens
ttctgcagaagatat

SEQ ID NO: 768981 - DNA, 15 bp, Homo sapiens
tctgcagaagatatt

SEQ ID NO: 768982 - DNA, 15 bp, Homo sapiens
ctgcagaagatattt

SEQ ID NO: 768983 - DNA, 15 bp, Homo sapiens
tgcagaagatatttt

SEQ ID NO: 768984 - DNA, 15 bp, Homo sapiens
gcagaagatattttt

SEQ ID NO: 768985 - DNA, 15 bp, Homo sapiens
cagaagatattttta

SEQ ID NO: 768986 - DNA, 15 bp, Homo sapiens
agaagatatttttat

SEQ ID NO: 768987 - DNA, 15 bp, Homo sapiens
gaagatatttttatt

SEQ ID NO: 768988 - DNA, 15 bp, Homo sapiens
aagatatttttattt

SEQ ID NO: 768989 - DNA, 15 bp, Homo sapiens
agatatttttatttt

SEQ ID NO: 768990 - DNA, 15 bp, Homo sapiens
gatatttttattttc

SEQ ID NO: 768991 - DNA, 15 bp, Homo sapiens
atatttttattttca

SEQ ID NO: 768992 - DNA, 15 bp, Homo sapiens
tatttttattttcat

SEQ ID NO: 768993 - DNA, 15 bp, Homo sapiens
atttttattttcatt

SEQ ID NO: 768994 - DNA, 15 bp, Homo sapiens
tttttattttcattt

SEQ ID NO: 768995 - DNA, 15 bp, Homo sapiens
ttttattttcatttt

SEQ ID NO: 768996 - DNA, 15 bp, Homo sapiens
tttattttcatttta

SEQ ID NO: 768997 - DNA, 15 bp, Homo sapiens
ttattttcattttag

SEQ ID NO: 768998 - DNA, 15 bp, Homo sapiens
tattttcattttagc

SEQ ID NO: 768999 - DNA, 15 bp, Homo sapiens
attttcattttagca

SEQ ID NO: 769000 - DNA, 15 bp, Homo sapiens
ttttcattttagcat

SEQ ID NO: 769001 - DNA, 15 bp, Homo sapiens
tttcattttagcatt

SEQ ID NO: 769002 - DNA, 15 bp, Homo sapiens
ttcattttagcattc

SEQ ID NO: 769003 - DNA, 15 bp, Homo sapiens
tcattttagcattca

SEQ ID NO: 769004 - DNA, 15 bp, Homo sapiens
cattttagcattcag

SEQ ID NO: 769005 - DNA, 15 bp, Homo sapiens
attttagcattcagt

SEQ ID NO: 769006 - DNA, 15 bp, Homo sapiens
ttttagcattcagta

SEQ ID NO: 769007 - DNA, 15 bp, Homo sapiens
tttagcattcagtat

SEQ ID NO: 769008 - DNA, 15 bp, Homo sapiens
ttagcattcagtatt

SEQ ID NO: 769009 - DNA, 15 bp, Homo sapiens
tagcattcagtattt

SEQ ID NO: 769010 - DNA, 15 bp, Homo sapiens
agcattcagtatttc

SEQ ID NO: 769011 - DNA, 15 bp, Homo sapiens
gcattcagtatttct

SEQ ID NO: 769012 - DNA, 15 bp, Homo sapiens
cattcagtatttctt

SEQ ID NO: 769013 - DNA, 15 bp, Homo sapiens
attcagtatttcttt

SEQ ID NO: 769014 - DNA, 15 bp, Homo sapiens
ttcagtatttcttta

SEQ ID NO: 769015 - DNA, 15 bp, Homo sapiens
tcagtatttctttat

SEQ ID NO: 769016 - DNA, 15 bp, Homo sapiens
cagtatttctttatc

SEQ ID NO: 769017 - DNA, 15 bp, Homo sapiens
agtatttctttatca

SEQ ID NO: 769018 - DNA, 15 bp, Homo sapiens
gtatttctttatcac

SEQ ID NO: 769019 - DNA, 15 bp, Homo sapiens
tatttctttatcaca

SEQ ID NO: 769020 - DNA, 15 bp, Homo sapiens
atttctttatcacaa

SEQ ID NO: 769021 - DNA, 15 bp, Homo sapiens
tttctttatcacaaa

SEQ ID NO: 769022 - DNA, 15 bp, Homo sapiens
ttctttatcacaaat

SEQ ID NO: 769023 - DNA, 15 bp, Homo sapiens
tctttatcacaaatc

SEQ ID NO: 769024 - DNA, 15 bp, Homo sapiens
ctttatcacaaatct

SEQ ID NO: 769025 - DNA, 15 bp, Homo sapiens
tttatcacaaatcta

SEQ ID NO: 769026 - DNA, 15 bp, Homo sapiens
ttatcacaaatctat

SEQ ID NO: 769027 - DNA, 15 bp, Homo sapiens
tatcacaaatctatc

SEQ ID NO: 769028 - DNA, 15 bp, Homo sapiens
atcacaaatctatcc

SEQ ID NO: 769029 - DNA, 15 bp, Homo sapiens
tcacaaatctatcca

SEQ ID NO: 769030 - DNA, 15 bp, Homo sapiens
cacaaatctatccaa

SEQ ID NO: 769031 - DNA, 15 bp, Homo sapiens
acaaatctatccaaa

SEQ ID NO: 769032 - DNA, 15 bp, Homo sapiens
caaatctatccaaag

SEQ ID NO: 769033 - DNA, 15 bp, Homo sapiens
aaatctatccaaaga

SEQ ID NO: 769034 - DNA, 15 bp, Homo sapiens
aatctatccaaagat

SEQ ID NO: 769035 - DNA, 15 bp, Homo sapiens
atctatccaaagatt

SEQ ID NO: 769036 - DNA, 15 bp, Homo sapiens
tctatccaaagattg

SEQ ID NO: 769037 - DNA, 15 bp, Homo sapiens
ctatccaaagattgt

SEQ ID NO: 769038 - DNA, 15 bp, Homo sapiens
tatccaaagattgtc

SEQ ID NO: 769039 - DNA, 15 bp, Homo sapiens
atccaaagattgtct

SEQ ID NO: 769040 - DNA, 15 bp, Homo sapiens
tccaaagattgtctc

SEQ ID NO: 769041 - DNA, 15 bp, Homo sapiens
ccaaagattgtctcc

SEQ ID NO: 769042 - DNA, 15 bp, Homo sapiens
caaagattgtctcct

SEQ ID NO: 769043 - DNA, 15 bp, Homo sapiens
aaagattgtctcctt

SEQ ID NO: 769044 - DNA, 15 bp, Homo sapiens
aagattgtctccttt

SEQ ID NO: 769045 - DNA, 15 bp, Homo sapiens
agattgtctcctttg

SEQ ID NO: 769046 - DNA, 15 bp, Homo sapiens
gattgtctcctttgg

SEQ ID NO: 769047 - DNA, 15 bp, Homo sapiens
attgtctcctttggt

SEQ ID NO: 769048 - DNA, 15 bp, Homo sapiens
ttgtctcctttggtt

SEQ ID NO: 769049 - DNA, 15 bp, Homo sapiens
tgtctcctttggttc

SEQ ID NO: 769050 - DNA, 15 bp, Homo sapiens
gtctcctttggttcc

SEQ ID NO: 769051 - DNA, 15 bp, Homo sapiens
tctcctttggttcca

SEQ ID NO: 769052 - DNA, 15 bp, Homo sapiens
ctcctttggttccat

SEQ ID NO: 769053 - DNA, 15 bp, Homo sapiens
tcctttggttccatt

SEQ ID NO: 769054 - DNA, 15 bp, Homo sapiens
cctttggttccattt

SEQ ID NO: 769055 - DNA, 15 bp, Homo sapiens
ctttggttccatttg

SEQ ID NO: 769056 - DNA, 15 bp, Homo sapiens
tttggttccatttga

SEQ ID NO: 769057 - DNA, 15 bp, Homo sapiens
ttggttccatttgaa

SEQ ID NO: 769058 - DNA, 15 bp, Homo sapiens
tggttccatttgaaa

SEQ ID NO: 769059 - DNA, 15 bp, Homo sapiens
ggttccatttgaaaa

SEQ ID NO: 769060 - DNA, 15 bp, Homo sapiens
gttccatttgaaaag

SEQ ID NO: 769061 - DNA, 15 bp, Homo sapiens
ttccatttgaaaagc

SEQ ID NO: 769062 - DNA, 15 bp, Homo sapiens
tccatttgaaaagca

SEQ ID NO: 769063 - DNA, 15 bp, Homo sapiens
ccatttgaaaagcaa

SEQ ID NO: 769064 - DNA, 15 bp, Homo sapiens
catttgaaaagcaac

SEQ ID NO: 769065 - DNA, 15 bp, Homo sapiens
atttgaaaagcaacc

SEQ ID NO: 769066 - DNA, 15 bp, Homo sapiens
tttgaaaagcaacct

SEQ ID NO: 769067 - DNA, 15 bp, Homo sapiens
ttgaaaagcaaccta

SEQ ID NO: 769068 - DNA, 15 bp, Homo sapiens
tgaaaagcaacctag

SEQ ID NO: 769069 - DNA, 15 bp, Homo sapiens
gaaaagcaacctaga

SEQ ID NO: 769070 - DNA, 15 bp, Homo sapiens
aaaagcaacctagaa

SEQ ID NO: 769071 - DNA, 15 bp, Homo sapiens
aaagcaacctagaaa

SEQ ID NO: 769072 - DNA, 15 bp, Homo sapiens
aagcaacctagaaag

SEQ ID NO: 769073 - DNA, 15 bp, Homo sapiens
agcaacctagaaagc

SEQ ID NO: 769074 - DNA, 15 bp, Homo sapiens
gcaacctagaaagca

SEQ ID NO: 769075 - DNA, 15 bp, Homo sapiens
caacctagaaagcac

SEQ ID NO: 769076 - DNA, 15 bp, Homo sapiens
aacctagaaagcact

SEQ ID NO: 769077 - DNA, 15 bp, Homo sapiens
acctagaaagcactt

SEQ ID NO: 769078 - DNA, 15 bp, Homo sapiens
cctagaaagcacttt

SEQ ID NO: 769079 - DNA, 15 bp, Homo sapiens
ctagaaagcacttta

SEQ ID NO: 769080 - DNA, 15 bp, Homo sapiens
tagaaagcactttag

SEQ ID NO: 769081 - DNA, 15 bp, Homo sapiens
agaaagcactttaga

SEQ ID NO: 769082 - DNA, 15 bp, Homo sapiens
gaaagcactttagag

SEQ ID NO: 769083 - DNA, 15 bp, Homo sapiens
aaagcactttagagg

SEQ ID NO: 769084 - DNA, 15 bp, Homo sapiens
aagcactttagaggt

SEQ ID NO: 769085 - DNA, 15 bp, Homo sapiens
agcactttagaggtg

SEQ ID NO: 769086 - DNA, 15 bp, Homo sapiens
gcactttagaggtgg

SEQ ID NO: 769087 - DNA, 15 bp, Homo sapiens
cactttagaggtgga

SEQ ID NO: 769088 - DNA, 15 bp, Homo sapiens
actttagaggtggag

SEQ ID NO: 769089 - DNA, 15 bp, Homo sapiens
ctttagaggtggagc

SEQ ID NO: 769090 - DNA, 15 bp, Homo sapiens
tttagaggtggagct

SEQ ID NO: 769091 - DNA, 15 bp, Homo sapiens
ttagaggtggagctc

SEQ ID NO: 769092 - DNA, 15 bp, Homo sapiens
tagaggtggagctca

SEQ ID NO: 769093 - DNA, 15 bp, Homo sapiens
agaggtggagctcag

SEQ ID NO: 769094 - DNA, 15 bp, Homo sapiens
gaggtggagctcaga

SEQ ID NO: 769095 - DNA, 15 bp, Homo sapiens
aggtggagctcagat

SEQ ID NO: 769096 - DNA, 15 bp, Homo sapiens
ggtggagctcagatg

SEQ ID NO: 769097 - DNA, 15 bp, Homo sapiens
gtggagctcagatgt

SEQ ID NO: 769098 - DNA, 15 bp, Homo sapiens
tggagctcagatgtt

SEQ ID NO: 769099 - DNA, 15 bp, Homo sapiens
ggagctcagatgttg

SEQ ID NO: 769100 - DNA, 15 bp, Homo sapiens
gagctcagatgttgc

SEQ ID NO: 769101 - DNA, 15 bp, Homo sapiens
agctcagatgttgcc

SEQ ID NO: 769102 - DNA, 15 bp, Homo sapiens
gctcagatgttgcca

SEQ ID NO: 769103 - DNA, 15 bp, Homo sapiens
ctcagatgttgccat

SEQ ID NO: 769104 - DNA, 15 bp, Homo sapiens
tcagatgttgccatt

SEQ ID NO: 769105 - DNA, 15 bp, Homo sapiens
cagatgttgccattt

SEQ ID NO: 769106 - DNA, 15 bp, Homo sapiens
agatgttgccatttc

SEQ ID NO: 769107 - DNA, 15 bp, Homo sapiens
gatgttgccatttct

SEQ ID NO: 769108 - DNA, 15 bp, Homo sapiens
atgttgccatttctg

SEQ ID NO: 769109 - DNA, 15 bp, Homo sapiens
tgttgccatttctga

SEQ ID NO: 769110 - DNA, 15 bp, Homo sapiens
gttgccatttctgaa

SEQ ID NO: 769111 - DNA, 15 bp, Homo sapiens
ttgccatttctgaat

SEQ ID NO: 769112 - DNA, 15 bp, Homo sapiens
tgccatttctgaatt

SEQ ID NO: 769113 - DNA, 15 bp, Homo sapiens
gccatttctgaatta

SEQ ID NO: 769114 - DNA, 15 bp, Homo sapiens
ccatttctgaattag

SEQ ID NO: 769115 - DNA, 15 bp, Homo sapiens
catttctgaattaga

SEQ ID NO: 769116 - DNA, 15 bp, Homo sapiens
atttctgaattagaa

SEQ ID NO: 769117 - DNA, 15 bp, Homo sapiens
tttctgaattagaaa

SEQ ID NO: 769118 - DNA, 15 bp, Homo sapiens
ttctgaattagaaat

SEQ ID NO: 769119 - DNA, 15 bp, Homo sapiens
tctgaattagaaata

SEQ ID NO: 769120 - DNA, 15 bp, Homo sapiens
ctgaattagaaataa

SEQ ID NO: 769121 - DNA, 15 bp, Homo sapiens
tgaattagaaataat

SEQ ID NO: 769122 - DNA, 15 bp, Homo sapiens
gaattagaaataatt

SEQ ID NO: 769123 - DNA, 15 bp, Homo sapiens
aattagaaataattt

SEQ ID NO: 769124 - DNA, 15 bp, Homo sapiens
attagaaataatttg

SEQ ID NO: 769125 - DNA, 15 bp, Homo sapiens
ttagaaataatttgg

SEQ ID NO: 769126 - DNA, 15 bp, Homo sapiens
tagaaataatttggc

SEQ ID NO: 769127 - DNA, 15 bp, Homo sapiens
agaaataatttggct

SEQ ID NO: 769128 - DNA, 15 bp, Homo sapiens
gaaataatttggctc

SEQ ID NO: 769129 - DNA, 15 bp, Homo sapiens
aaataatttggctca

SEQ ID NO: 769130 - DNA, 15 bp, Homo sapiens
aataatttggctcag

SEQ ID NO: 769131 - DNA, 15 bp, Homo sapiens
ataatttggctcaga

SEQ ID NO: 769132 - DNA, 15 bp, Homo sapiens
taatttggctcagaa

SEQ ID NO: 769133 - DNA, 15 bp, Homo sapiens
aatttggctcagaaa

SEQ ID NO: 769134 - DNA, 15 bp, Homo sapiens
atttggctcagaaag

SEQ ID NO: 769135 - DNA, 15 bp, Homo sapiens
tttggctcagaaagg

SEQ ID NO: 769136 - DNA, 15 bp, Homo sapiens
ttggctcagaaaggt

SEQ ID NO: 769137 - DNA, 15 bp, Homo sapiens
tggctcagaaaggtt

SEQ ID NO: 769138 - DNA, 15 bp, Homo sapiens
ggctcagaaaggtta

SEQ ID NO: 769139 - DNA, 15 bp, Homo sapiens
gctcagaaaggttaa

SEQ ID NO: 769140 - DNA, 15 bp, Homo sapiens
ctcagaaaggttaaa

SEQ ID NO: 769141 - DNA, 15 bp, Homo sapiens
tcagaaaggttaaag

SEQ ID NO: 769142 - DNA, 15 bp, Homo sapiens
cagaaaggttaaagg

SEQ ID NO: 769143 - DNA, 15 bp, Homo sapiens
agaaaggttaaagga

SEQ ID NO: 769144 - DNA, 15 bp, Homo sapiens
gaaaggttaaaggaa

SEQ ID NO: 769145 - DNA, 15 bp, Homo sapiens
aaaggttaaaggaaa

SEQ ID NO: 769146 - DNA, 15 bp, Homo sapiens
aaggttaaaggaaac

SEQ ID NO: 769147 - DNA, 15 bp, Homo sapiens
aggttaaaggaaaca

SEQ ID NO: 769148 - DNA, 15 bp, Homo sapiens
ggttaaaggaaacag

SEQ ID NO: 769149 - DNA, 15 bp, Homo sapiens
gttaaaggaaacagc

SEQ ID NO: 769150 - DNA, 15 bp, Homo sapiens
ttaaaggaaacagca

SEQ ID NO: 769151 - DNA, 15 bp, Homo sapiens
taaaggaaacagcac

SEQ ID NO: 769152 - DNA, 15 bp, Homo sapiens
aaaggaaacagcaca

SEQ ID NO: 769153 - DNA, 15 bp, Homo sapiens
aaggaaacagcacag

SEQ ID NO: 769154 - DNA, 15 bp, Homo sapiens
aggaaacagcacagt

SEQ ID NO: 769155 - DNA, 15 bp, Homo sapiens
ggaaacagcacagtt

SEQ ID NO: 769156 - DNA, 15 bp, Homo sapiens
gaaacagcacagttg

SEQ ID NO: 769157 - DNA, 15 bp, Homo sapiens
aaacagcacagttga

SEQ ID NO: 769158 - DNA, 15 bp, Homo sapiens
aacagcacagttgac

SEQ ID NO: 769159 - DNA, 15 bp, Homo sapiens
acagcacagttgacc

SEQ ID NO: 769160 - DNA, 15 bp, Homo sapiens
cagcacagttgacct

SEQ ID NO: 769161 - DNA, 15 bp, Homo sapiens
agcacagttgaccta

SEQ ID NO: 769162 - DNA, 15 bp, Homo sapiens
gcacagttgacctag

SEQ ID NO: 769163 - DNA, 15 bp, Homo sapiens
cacagttgacctagc

SEQ ID NO: 769164 - DNA, 15 bp, Homo sapiens
acagttgacctagct

SEQ ID NO: 769165 - DNA, 15 bp, Homo sapiens
cagttgacctagcta

SEQ ID NO: 769166 - DNA, 15 bp, Homo sapiens
agttgacctagctag

SEQ ID NO: 769167 - DNA, 15 bp, Homo sapiens
gttgacctagctagg

SEQ ID NO: 769168 - DNA, 15 bp, Homo sapiens
ttgacctagctagga

SEQ ID NO: 769169 - DNA, 15 bp, Homo sapiens
tgacctagctaggaa

SEQ ID NO: 769170 - DNA, 15 bp, Homo sapiens
gacctagctaggaag

SEQ ID NO: 769171 - DNA, 15 bp, Homo sapiens
acctagctaggaagt

SEQ ID NO: 769172 - DNA, 15 bp, Homo sapiens
cctagctaggaagtg

SEQ ID NO: 769173 - DNA, 15 bp, Homo sapiens
ctagctaggaagtgg

SEQ ID NO: 769174 - DNA, 15 bp, Homo sapiens
tagctaggaagtggc

SEQ ID NO: 769175 - DNA, 15 bp, Homo sapiens
agctaggaagtggca

SEQ ID NO: 769176 - DNA, 15 bp, Homo sapiens
gctaggaagtggcac

SEQ ID NO: 769177 - DNA, 15 bp, Homo sapiens
ctaggaagtggcaca

SEQ ID NO: 769178 - DNA, 15 bp, Homo sapiens
taggaagtggcacag

SEQ ID NO: 769179 - DNA, 15 bp, Homo sapiens
aggaagtggcacagc

SEQ ID NO: 769180 - DNA, 15 bp, Homo sapiens
ggaagtggcacagct

SEQ ID NO: 769181 - DNA, 15 bp, Homo sapiens
gaagtggcacagcta

SEQ ID NO: 769182 - DNA, 15 bp, Homo sapiens
aagtggcacagctag

SEQ ID NO: 769183 - DNA, 15 bp, Homo sapiens
agtggcacagctagg

SEQ ID NO: 769184 - DNA, 15 bp, Homo sapiens
gtggcacagctagga

SEQ ID NO: 769185 - DNA, 15 bp, Homo sapiens
tggcacagctaggaa

SEQ ID NO: 769186 - DNA, 15 bp, Homo sapiens
ggcacagctaggaat

SEQ ID NO: 769187 - DNA, 15 bp, Homo sapiens
gcacagctaggaatt

SEQ ID NO: 769188 - DNA, 15 bp, Homo sapiens
cacagctaggaattg

SEQ ID NO: 769189 - DNA, 15 bp, Homo sapiens
acagctaggaattga

SEQ ID NO: 769190 - DNA, 15 bp, Homo sapiens
cagctaggaattgat

SEQ ID NO: 769191 - DNA, 15 bp, Homo sapiens
agctaggaattgatc

SEQ ID NO: 769192 - DNA, 15 bp, Homo sapiens
gctaggaattgatcc

SEQ ID NO: 769193 - DNA, 15 bp, Homo sapiens
ctaggaattgatccc

SEQ ID NO: 769194 - DNA, 15 bp, Homo sapiens
taggaattgatccct

SEQ ID NO: 769195 - DNA, 15 bp, Homo sapiens
aggaattgatccctg

SEQ ID NO: 769196 - DNA, 15 bp, Homo sapiens
ggaattgatccctgg

SEQ ID NO: 769197 - DNA, 15 bp, Homo sapiens
gaattgatccctggc

SEQ ID NO: 769198 - DNA, 15 bp, Homo sapiens
aattgatccctggcc

SEQ ID NO: 769199 - DNA, 15 bp, Homo sapiens
attgatccctggcct

SEQ ID NO: 769200 - DNA, 15 bp, Homo sapiens
ttgatccctggcctc

SEQ ID NO: 769201 - DNA, 15 bp, Homo sapiens
tgatccctggcctct

SEQ ID NO: 769202 - DNA, 15 bp, Homo sapiens
gatccctggcctctg

SEQ ID NO: 769203 - DNA, 15 bp, Homo sapiens
atccctggcctctga

SEQ ID NO: 769204 - DNA, 15 bp, Homo sapiens
tccctggcctctgat

SEQ ID NO: 769205 - DNA, 15 bp, Homo sapiens
ccctggcctctgatt

SEQ ID NO: 769206 - DNA, 15 bp, Homo sapiens
cctggcctctgattc

SEQ ID NO: 769207 - DNA, 15 bp, Homo sapiens
ctggcctctgattcc

SEQ ID NO: 769208 - DNA, 15 bp, Homo sapiens
tggcctctgattcca

SEQ ID NO: 769209 - DNA, 15 bp, Homo sapiens
ggcctctgattccaa

SEQ ID NO: 769210 - DNA, 15 bp, Homo sapiens
gcctctgattccaaa

SEQ ID NO: 769211 - DNA, 15 bp, Homo sapiens
cctctgattccaaag

SEQ ID NO: 769212 - DNA, 15 bp, Homo sapiens
ctctgattccaaagc

SEQ ID NO: 769213 - DNA, 15 bp, Homo sapiens
tctgattccaaagcc

SEQ ID NO: 769214 - DNA, 15 bp, Homo sapiens
ctgattccaaagccc

SEQ ID NO: 769215 - DNA, 15 bp, Homo sapiens
tgattccaaagccca

SEQ ID NO: 769216 - DNA, 15 bp, Homo sapiens
gattccaaagcccac

SEQ ID NO: 769217 - DNA, 15 bp, Homo sapiens
attccaaagcccact

SEQ ID NO: 769218 - DNA, 15 bp, Homo sapiens
ttccaaagcccactc

SEQ ID NO: 769219 - DNA, 15 bp, Homo sapiens
tccaaagcccactcc

SEQ ID NO: 769220 - DNA, 15 bp, Homo sapiens
ccaaagcccactccc

SEQ ID NO: 769221 - DNA, 15 bp, Homo sapiens
caaagcccactccct

SEQ ID NO: 769222 - DNA, 15 bp, Homo sapiens
aaagcccactccctc

SEQ ID NO: 769223 - DNA, 15 bp, Homo sapiens
aagcccactccctcc

SEQ ID NO: 769224 - DNA, 15 bp, Homo sapiens
agcccactccctcca

SEQ ID NO: 769225 - DNA, 15 bp, Homo sapiens
gcccactccctccat

SEQ ID NO: 769226 - DNA, 15 bp, Homo sapiens
cccactccctccatg

SEQ ID NO: 769227 - DNA, 15 bp, Homo sapiens
ccactccctccatgt

SEQ ID NO: 769228 - DNA, 15 bp, Homo sapiens
cactccctccatgtt

SEQ ID NO: 769229 - DNA, 15 bp, Homo sapiens
actccctccatgttc

SEQ ID NO: 769230 - DNA, 15 bp, Homo sapiens
ctccctccatgttcc

SEQ ID NO: 769231 - DNA, 15 bp, Homo sapiens
tccctccatgttcca

SEQ ID NO: 769232 - DNA, 15 bp, Homo sapiens
ccctccatgttccac

SEQ ID NO: 769233 - DNA, 15 bp, Homo sapiens
cctccatgttccacg

SEQ ID NO: 769234 - DNA, 15 bp, Homo sapiens
ctccatgttccacga

SEQ ID NO: 769235 - DNA, 15 bp, Homo sapiens
tccatgttccacgag

SEQ ID NO: 769236 - DNA, 15 bp, Homo sapiens
ccatgttccacgaga

SEQ ID NO: 769237 - DNA, 15 bp, Homo sapiens
catgttccacgagag

SEQ ID NO: 769238 - DNA, 15 bp, Homo sapiens
atgttccacgagagc

SEQ ID NO: 769239 - DNA, 15 bp, Homo sapiens
tgttccacgagagcc

SEQ ID NO: 769240 - DNA, 15 bp, Homo sapiens
gttccacgagagcca

SEQ ID NO: 769241 - DNA, 15 bp, Homo sapiens
ttccacgagagccaa

SEQ ID NO: 769242 - DNA, 15 bp, Homo sapiens
tccacgagagccaat

SEQ ID NO: 769243 - DNA, 15 bp, Homo sapiens
ccacgagagccaatg

SEQ ID NO: 769244 - DNA, 15 bp, Homo sapiens
cacgagagccaatgc

SEQ ID NO: 769245 - DNA, 15 bp, Homo sapiens
acgagagccaatgca

SEQ ID NO: 769246 - DNA, 15 bp, Homo sapiens
cgagagccaatgcag

SEQ ID NO: 769247 - DNA, 15 bp, Homo sapiens
gagagccaatgcagt

SEQ ID NO: 769248 - DNA, 15 bp, Homo sapiens
agagccaatgcagtg

SEQ ID NO: 769249 - DNA, 15 bp, Homo sapiens
gagccaatgcagtgc

SEQ ID NO: 769250 - DNA, 15 bp, Homo sapiens
agccaatgcagtgcc

SEQ ID NO: 769251 - DNA, 15 bp, Homo sapiens
gccaatgcagtgcca

SEQ ID NO: 769252 - DNA, 15 bp, Homo sapiens
ccaatgcagtgccag

SEQ ID NO: 769253 - DNA, 15 bp, Homo sapiens
caatgcagtgccagg

SEQ ID NO: 769254 - DNA, 15 bp, Homo sapiens
aatgcagtgccaggc

SEQ ID NO: 769255 - DNA, 15 bp, Homo sapiens
atgcagtgccaggca

SEQ ID NO: 769256 - DNA, 15 bp, Homo sapiens
tgcagtgccaggcag

SEQ ID NO: 769257 - DNA, 15 bp, Homo sapiens
gcagtgccaggcagg

SEQ ID NO: 769258 - DNA, 15 bp, Homo sapiens
cagtgccaggcaggg

SEQ ID NO: 769259 - DNA, 15 bp, Homo sapiens
agtgccaggcagggt

SEQ ID NO: 769260 - DNA, 15 bp, Homo sapiens
gtgccaggcagggta

SEQ ID NO: 769261 - DNA, 15 bp, Homo sapiens
tgccaggcagggtag

SEQ ID NO: 769262 - DNA, 15 bp, Homo sapiens
gccaggcagggtaga

SEQ ID NO: 769263 - DNA, 15 bp, Homo sapiens
ccaggcagggtagat

SEQ ID NO: 769264 - DNA, 15 bp, Homo sapiens
caggcagggtagatt

SEQ ID NO: 769265 - DNA, 15 bp, Homo sapiens
aggcagggtagattc

SEQ ID NO: 769266 - DNA, 15 bp, Homo sapiens
ggcagggtagattcc

SEQ ID NO: 769267 - DNA, 15 bp, Homo sapiens
gcagggtagattcct

SEQ ID NO: 769268 - DNA, 15 bp, Homo sapiens
cagggtagattcctc

SEQ ID NO: 769269 - DNA, 15 bp, Homo sapiens
agggtagattcctcg

SEQ ID NO: 769270 - DNA, 15 bp, Homo sapiens
gggtagattcctcgt

SEQ ID NO: 769271 - DNA, 15 bp, Homo sapiens
ggtagattcctcgtg

SEQ ID NO: 769272 - DNA, 15 bp, Homo sapiens
gtagattcctcgtgt

SEQ ID NO: 769273 - DNA, 15 bp, Homo sapiens
tagattcctcgtgtg

SEQ ID NO: 769274 - DNA, 15 bp, Homo sapiens
agattcctcgtgtgc

SEQ ID NO: 769275 - DNA, 15 bp, Homo sapiens
gattcctcgtgtgct

SEQ ID NO: 769276 - DNA, 15 bp, Homo sapiens
attcctcgtgtgctg

SEQ ID NO: 769277 - DNA, 15 bp, Homo sapiens
ttcctcgtgtgctgg

SEQ ID NO: 769278 - DNA, 15 bp, Homo sapiens
tcctcgtgtgctggg

SEQ ID NO: 769279 - DNA, 15 bp, Homo sapiens
cctcgtgtgctgggg

SEQ ID NO: 769280 - DNA, 15 bp, Homo sapiens
ctcgtgtgctggggt

SEQ ID NO: 769281 - DNA, 15 bp, Homo sapiens
tcgtgtgctggggtc

SEQ ID NO: 769282 - DNA, 15 bp, Homo sapiens
cgtgtgctggggtct

SEQ ID NO: 769283 - DNA, 15 bp, Homo sapiens
gtgtgctggggtctc

SEQ ID NO: 769284 - DNA, 15 bp, Homo sapiens
tgtgctggggtctct

SEQ ID NO: 769285 - DNA, 15 bp, Homo sapiens
gtgctggggtctctg

SEQ ID NO: 769286 - DNA, 15 bp, Homo sapiens
tgctggggtctctga

SEQ ID NO: 769287 - DNA, 15 bp, Homo sapiens
gctggggtctctgaa

SEQ ID NO: 769288 - DNA, 15 bp, Homo sapiens
ctggggtctctgaac

SEQ ID NO: 769289 - DNA, 15 bp, Homo sapiens
tggggtctctgaact

SEQ ID NO: 769290 - DNA, 15 bp, Homo sapiens
ggggtctctgaactt

SEQ ID NO: 769291 - DNA, 15 bp, Homo sapiens
gggtctctgaacttc

SEQ ID NO: 769292 - DNA, 15 bp, Homo sapiens
ggtctctgaacttca

SEQ ID NO: 769293 - DNA, 15 bp, Homo sapiens
gtctctgaacttcat

SEQ ID NO: 769294 - DNA, 15 bp, Homo sapiens
tctctgaacttcatg

SEQ ID NO: 769295 - DNA, 15 bp, Homo sapiens
ctctgaacttcatga

SEQ ID NO: 769296 - DNA, 15 bp, Homo sapiens
tctgaacttcatgag

SEQ ID NO: 769297 - DNA, 15 bp, Homo sapiens
ctgaacttcatgagg

SEQ ID NO: 769298 - DNA, 15 bp, Homo sapiens
tgaacttcatgaggg

SEQ ID NO: 769299 - DNA, 15 bp, Homo sapiens
gaacttcatgagggg

SEQ ID NO: 769300 - DNA, 15 bp, Homo sapiens
aacttcatgaggggc

SEQ ID NO: 769301 - DNA, 15 bp, Homo sapiens
acttcatgaggggct

SEQ ID NO: 769302 - DNA, 15 bp, Homo sapiens
cttcatgaggggctg

SEQ ID NO: 769303 - DNA, 15 bp, Homo sapiens
ttcatgaggggctgc

SEQ ID NO: 769304 - DNA, 15 bp, Homo sapiens
tcatgaggggctgcc

SEQ ID NO: 769305 - DNA, 15 bp, Homo sapiens
catgaggggctgcca

SEQ ID NO: 769306 - DNA, 15 bp, Homo sapiens
atgaggggctgccat

SEQ ID NO: 769307 - DNA, 15 bp, Homo sapiens
tgaggggctgccatt

SEQ ID NO: 769308 - DNA, 15 bp, Homo sapiens
gaggggctgccattc

SEQ ID NO: 769309 - DNA, 15 bp, Homo sapiens
aggggctgccattct

SEQ ID NO: 769310 - DNA, 15 bp, Homo sapiens
ggggctgccattctc

SEQ ID NO: 769311 - DNA, 15 bp, Homo sapiens
gggctgccattctct

SEQ ID NO: 769312 - DNA, 15 bp, Homo sapiens
ggctgccattctctc

SEQ ID NO: 769313 - DNA, 15 bp, Homo sapiens
gctgccattctctcc

SEQ ID NO: 769314 - DNA, 15 bp, Homo sapiens
ctgccattctctcca

SEQ ID NO: 769315 - DNA, 15 bp, Homo sapiens
tgccattctctccaa

SEQ ID NO: 769316 - DNA, 15 bp, Homo sapiens
gccattctctccaac

SEQ ID NO: 769317 - DNA, 15 bp, Homo sapiens
ccattctctccaact

SEQ ID NO: 769318 - DNA, 15 bp, Homo sapiens
cattctctccaactg

SEQ ID NO: 769319 - DNA, 15 bp, Homo sapiens
attctctccaactgg

SEQ ID NO: 769320 - DNA, 15 bp, Homo sapiens
ttctctccaactggc

SEQ ID NO: 769321 - DNA, 15 bp, Homo sapiens
tctctccaactggca

SEQ ID NO: 769322 - DNA, 15 bp, Homo sapiens
ctctccaactggcag

SEQ ID NO: 769323 - DNA, 15 bp, Homo sapiens
tctccaactggcagc

SEQ ID NO: 769324 - DNA, 15 bp, Homo sapiens
ctccaactggcagcg

SEQ ID NO: 769325 - DNA, 15 bp, Homo sapiens
tccaactggcagcgt

SEQ ID NO: 769326 - DNA, 15 bp, Homo sapiens
ccaactggcagcgtc

SEQ ID NO: 769327 - DNA, 15 bp, Homo sapiens
caactggcagcgtct

SEQ ID NO: 769328 - DNA, 15 bp, Homo sapiens
aactggcagcgtctc

SEQ ID NO: 769329 - DNA, 15 bp, Homo sapiens
actggcagcgtctca

SEQ ID NO: 769330 - DNA, 15 bp, Homo sapiens
ctggcagcgtctcac

SEQ ID NO: 769331 - DNA, 15 bp, Homo sapiens
tggcagcgtctcacc

SEQ ID NO: 769332 - DNA, 15 bp, Homo sapiens
ggcagcgtctcaccc

SEQ ID NO: 769333 - DNA, 15 bp, Homo sapiens
gcagcgtctcaccct

SEQ ID NO: 769334 - DNA, 15 bp, Homo sapiens
cagcgtctcaccctg

SEQ ID NO: 769335 - DNA, 15 bp, Homo sapiens
agcgtctcaccctgc

SEQ ID NO: 769336 - DNA, 15 bp, Homo sapiens
gcgtctcaccctgcc

SEQ ID NO: 769337 - DNA, 15 bp, Homo sapiens
cgtctcaccctgccc

SEQ ID NO: 769338 - DNA, 15 bp, Homo sapiens
gtctcaccctgccct

SEQ ID NO: 769339 - DNA, 15 bp, Homo sapiens
tctcaccctgccctc

SEQ ID NO: 769340 - DNA, 15 bp, Homo sapiens
ctcaccctgccctcc

SEQ ID NO: 769341 - DNA, 15 bp, Homo sapiens
tcaccctgccctccg

SEQ ID NO: 769342 - DNA, 15 bp, Homo sapiens
caccctgccctccgt

SEQ ID NO: 769343 - DNA, 15 bp, Homo sapiens
accctgccctccgtg

SEQ ID NO: 769344 - DNA, 15 bp, Homo sapiens
ccctgccctccgtgt

SEQ ID NO: 769345 - DNA, 15 bp, Homo sapiens
cctgccctccgtgtt

SEQ ID NO: 769346 - DNA, 15 bp, Homo sapiens
ctgccctccgtgttc

SEQ ID NO: 769347 - DNA, 15 bp, Homo sapiens
tgccctccgtgttct

SEQ ID NO: 769348 - DNA, 15 bp, Homo sapiens
gccctccgtgttctc

SEQ ID NO: 769349 - DNA, 15 bp, Homo sapiens
ccctccgtgttctct

SEQ ID NO: 769350 - DNA, 15 bp, Homo sapiens
cctccgtgttctctg

SEQ ID NO: 769351 - DNA, 15 bp, Homo sapiens
ctccgtgttctctgt

SEQ ID NO: 769352 - DNA, 15 bp, Homo sapiens
tccgtgttctctgtg

SEQ ID NO: 769353 - DNA, 15 bp, Homo sapiens
ccgtgttctctgtga

SEQ ID NO: 769354 - DNA, 15 bp, Homo sapiens
cgtgttctctgtgaa

SEQ ID NO: 769355 - DNA, 15 bp, Homo sapiens
gtgttctctgtgaag

SEQ ID NO: 769356 - DNA, 15 bp, Homo sapiens
tgttctctgtgaagc

SEQ ID NO: 769357 - DNA, 15 bp, Homo sapiens
gttctctgtgaagcc

SEQ ID NO: 769358 - DNA, 15 bp, Homo sapiens
ttctctgtgaagcct

SEQ ID NO: 769359 - DNA, 15 bp, Homo sapiens
tctctgtgaagccta

SEQ ID NO: 769360 - DNA, 15 bp, Homo sapiens
ctctgtgaagcctag

SEQ ID NO: 769361 - DNA, 15 bp, Homo sapiens
tctgtgaagcctagt

SEQ ID NO: 769362 - DNA, 15 bp, Homo sapiens
ctgtgaagcctagtc

SEQ ID NO: 769363 - DNA, 15 bp, Homo sapiens
tgtgaagcctagtcc

SEQ ID NO: 769364 - DNA, 15 bp, Homo sapiens
gtgaagcctagtcca

SEQ ID NO: 769365 - DNA, 15 bp, Homo sapiens
tgaagcctagtccag

SEQ ID NO: 769366 - DNA, 15 bp, Homo sapiens
gaagcctagtccagc

SEQ ID NO: 769367 - DNA, 15 bp, Homo sapiens
aagcctagtccagcc

SEQ ID NO: 769368 - DNA, 15 bp, Homo sapiens
agcctagtccagcca

SEQ ID NO: 769369 - DNA, 15 bp, Homo sapiens
gcctagtccagccat

SEQ ID NO: 769370 - DNA, 15 bp, Homo sapiens
cctagtccagccata

SEQ ID NO: 769371 - DNA, 15 bp, Homo sapiens
ctagtccagccatac

SEQ ID NO: 769372 - DNA, 15 bp, Homo sapiens
tagtccagccatact

SEQ ID NO: 769373 - DNA, 15 bp, Homo sapiens
agtccagccatactc

SEQ ID NO: 769374 - DNA, 15 bp, Homo sapiens
gtccagccatactcc

SEQ ID NO: 769375 - DNA, 15 bp, Homo sapiens
tccagccatactccc

SEQ ID NO: 769376 - DNA, 15 bp, Homo sapiens
ccagccatactccca

SEQ ID NO: 769377 - DNA, 15 bp, Homo sapiens
cagccatactcccag

SEQ ID NO: 769378 - DNA, 15 bp, Homo sapiens
agccatactcccagc

SEQ ID NO: 769379 - DNA, 15 bp, Homo sapiens
gccatactcccagcc

SEQ ID NO: 769380 - DNA, 15 bp, Homo sapiens
ccatactcccagcct

SEQ ID NO: 769381 - DNA, 15 bp, Homo sapiens
catactcccagccta

SEQ ID NO: 769382 - DNA, 15 bp, Homo sapiens
atactcccagcctaa

SEQ ID NO: 769383 - DNA, 15 bp, Homo sapiens
tactcccagcctaag

SEQ ID NO: 769384 - DNA, 15 bp, Homo sapiens
actcccagcctaaga

SEQ ID NO: 769385 - DNA, 15 bp, Homo sapiens
ctcccagcctaagaa

SEQ ID NO: 769386 - DNA, 15 bp, Homo sapiens
tcccagcctaagaat

SEQ ID NO: 769387 - DNA, 15 bp, Homo sapiens
cccagcctaagaata

SEQ ID NO: 769388 - DNA, 15 bp, Homo sapiens
ccagcctaagaataa

SEQ ID NO: 769389 - DNA, 15 bp, Homo sapiens
cagcctaagaataat

SEQ ID NO: 769390 - DNA, 15 bp, Homo sapiens
agcctaagaataatt

SEQ ID NO: 769391 - DNA, 15 bp, Homo sapiens
gcctaagaataattt

SEQ ID NO: 769392 - DNA, 15 bp, Homo sapiens
cctaagaataatttt

SEQ ID NO: 769393 - DNA, 15 bp, Homo sapiens
ctaagaataattttc

SEQ ID NO: 769394 - DNA, 15 bp, Homo sapiens
taagaataattttcc

SEQ ID NO: 769395 - DNA, 15 bp, Homo sapiens
aagaataattttcca

SEQ ID NO: 769396 - DNA, 15 bp, Homo sapiens
agaataattttccaa

SEQ ID NO: 769397 - DNA, 15 bp, Homo sapiens
gaataattttccaag

SEQ ID NO: 769398 - DNA, 15 bp, Homo sapiens
aataattttccaagt

SEQ ID NO: 769399 - DNA, 15 bp, Homo sapiens
ataattttccaagtc

SEQ ID NO: 769400 - DNA, 15 bp, Homo sapiens
taattttccaagtca

SEQ ID NO: 769401 - DNA, 15 bp, Homo sapiens
aattttccaagtcat

SEQ ID NO: 769402 - DNA, 15 bp, Homo sapiens
attttccaagtcatg

SEQ ID NO: 769403 - DNA, 15 bp, Homo sapiens
ttttccaagtcatga

SEQ ID NO: 769404 - DNA, 15 bp, Homo sapiens
tttccaagtcatgac

SEQ ID NO: 769405 - DNA, 15 bp, Homo sapiens
ttccaagtcatgacc

SEQ ID NO: 769406 - DNA, 15 bp, Homo sapiens
tccaagtcatgacca

SEQ ID NO: 769407 - DNA, 15 bp, Homo sapiens
ccaagtcatgaccac

SEQ ID NO: 769408 - DNA, 15 bp, Homo sapiens
caagtcatgaccaca

SEQ ID NO: 769409 - DNA, 15 bp, Homo sapiens
aagtcatgaccacaa

SEQ ID NO: 769410 - DNA, 15 bp, Homo sapiens
agtcatgaccacaac

SEQ ID NO: 769411 - DNA, 15 bp, Homo sapiens
gtcatgaccacaacc

SEQ ID NO: 769412 - DNA, 15 bp, Homo sapiens
tcatgaccacaaccc

SEQ ID NO: 769413 - DNA, 15 bp, Homo sapiens
catgaccacaaccca

SEQ ID NO: 769414 - DNA, 15 bp, Homo sapiens
atgaccacaacccat

SEQ ID NO: 769415 - DNA, 15 bp, Homo sapiens
tgaccacaacccatg

SEQ ID NO: 769416 - DNA, 15 bp, Homo sapiens
gaccacaacccatga

SEQ ID NO: 769417 - DNA, 15 bp, Homo sapiens
accacaacccatgaa

SEQ ID NO: 769418 - DNA, 15 bp, Homo sapiens
ccacaacccatgaat

SEQ ID NO: 769419 - DNA, 15 bp, Homo sapiens
cacaacccatgaatg

SEQ ID NO: 769420 - DNA, 15 bp, Homo sapiens
acaacccatgaatgc

SEQ ID NO: 769421 - DNA, 15 bp, Homo sapiens
caacccatgaatgct

SEQ ID NO: 769422 - DNA, 15 bp, Homo sapiens
aacccatgaatgctc

SEQ ID NO: 769423 - DNA, 15 bp, Homo sapiens
acccatgaatgctct

SEQ ID NO: 769424 - DNA, 15 bp, Homo sapiens
cccatgaatgctctg

SEQ ID NO: 769425 - DNA, 15 bp, Homo sapiens
ccatgaatgctctgc

SEQ ID NO: 769426 - DNA, 15 bp, Homo sapiens
catgaatgctctgca

SEQ ID NO: 769427 - DNA, 15 bp, Homo sapiens
atgaatgctctgcag

SEQ ID NO: 769428 - DNA, 15 bp, Homo sapiens
tgaatgctctgcaga

SEQ ID NO: 769429 - DNA, 15 bp, Homo sapiens
gaatgctctgcagat

SEQ ID NO: 769430 - DNA, 15 bp, Homo sapiens
aatgctctgcagatg

SEQ ID NO: 769431 - DNA, 15 bp, Homo sapiens
atgctctgcagatgc

SEQ ID NO: 769432 - DNA, 15 bp, Homo sapiens
tgctctgcagatgcc

SEQ ID NO: 769433 - DNA, 15 bp, Homo sapiens
gctctgcagatgccc

SEQ ID NO: 769434 - DNA, 15 bp, Homo sapiens
ctctgcagatgccca

SEQ ID NO: 769435 - DNA, 15 bp, Homo sapiens
tctgcagatgcccat

SEQ ID NO: 769436 - DNA, 15 bp, Homo sapiens
ctgcagatgcccatg

SEQ ID NO: 769437 - DNA, 15 bp, Homo sapiens
tgcagatgcccatga

SEQ ID NO: 769438 - DNA, 15 bp, Homo sapiens
gcagatgcccatgat

SEQ ID NO: 769439 - DNA, 15 bp, Homo sapiens
cagatgcccatgatg

SEQ ID NO: 769440 - DNA, 15 bp, Homo sapiens
agatgcccatgatgg

SEQ ID NO: 769441 - DNA, 15 bp, Homo sapiens
gatgcccatgatggg

SEQ ID NO: 769442 - DNA, 15 bp, Homo sapiens
atgcccatgatgggg

SEQ ID NO: 769443 - DNA, 15 bp, Homo sapiens
tgcccatgatggggg

SEQ ID NO: 769444 - DNA, 15 bp, Homo sapiens
gcccatgatgggggg

SEQ ID NO: 769445 - DNA, 15 bp, Homo sapiens
cccatgatgggggga

SEQ ID NO: 769446 - DNA, 15 bp, Homo sapiens
ccatgatggggggat

SEQ ID NO: 769447 - DNA, 15 bp, Homo sapiens
catgatggggggata

SEQ ID NO: 769448 - DNA, 15 bp, Homo sapiens
atgatggggggatag

SEQ ID NO: 769449 - DNA, 15 bp, Homo sapiens
tgatggggggatagt

SEQ ID NO: 769450 - DNA, 15 bp, Homo sapiens
gatggggggatagtg

SEQ ID NO: 769451 - DNA, 15 bp, Homo sapiens
atggggggatagtga

SEQ ID NO: 769452 - DNA, 15 bp, Homo sapiens
tggggggatagtgat

SEQ ID NO: 769453 - DNA, 15 bp, Homo sapiens
ggggggatagtgatg

SEQ ID NO: 769454 - DNA, 15 bp, Homo sapiens
gggggatagtgatgg

SEQ ID NO: 769455 - DNA, 15 bp, Homo sapiens
ggggatagtgatgga

SEQ ID NO: 769456 - DNA, 15 bp, Homo sapiens
gggatagtgatggat

SEQ ID NO: 769457 - DNA, 15 bp, Homo sapiens
ggatagtgatggatc

SEQ ID NO: 769458 - DNA, 15 bp, Homo sapiens
gatagtgatggatct

SEQ ID NO: 769459 - DNA, 15 bp, Homo sapiens
atagtgatggatctc

SEQ ID NO: 769460 - DNA, 15 bp, Homo sapiens
tagtgatggatctca

SEQ ID NO: 769461 - DNA, 15 bp, Homo sapiens
agtgatggatctcaa

SEQ ID NO: 769462 - DNA, 15 bp, Homo sapiens
gtgatggatctcaag

SEQ ID NO: 769463 - DNA, 15 bp, Homo sapiens
tgatggatctcaagg

SEQ ID NO: 769464 - DNA, 15 bp, Homo sapiens
gatggatctcaagga

SEQ ID NO: 769465 - DNA, 15 bp, Homo sapiens
atggatctcaaggag

SEQ ID NO: 769466 - DNA, 15 bp, Homo sapiens
tggatctcaaggagg

SEQ ID NO: 769467 - DNA, 15 bp, Homo sapiens
ggatctcaaggaggt

SEQ ID NO: 769468 - DNA, 15 bp, Homo sapiens
gatctcaaggaggtt

SEQ ID NO: 769469 - DNA, 15 bp, Homo sapiens
atctcaaggaggttg

SEQ ID NO: 769470 - DNA, 15 bp, Homo sapiens
tctcaaggaggttgg

SEQ ID NO: 769471 - DNA, 15 bp, Homo sapiens
ctcaaggaggttggt

SEQ ID NO: 769472 - DNA, 15 bp, Homo sapiens
tcaaggaggttggtg

SEQ ID NO: 769473 - DNA, 15 bp, Homo sapiens
caaggaggttggtgg

SEQ ID NO: 769474 - DNA, 15 bp, Homo sapiens
aaggaggttggtggc

SEQ ID NO: 769475 - DNA, 15 bp, Homo sapiens
aggaggttggtggct

SEQ ID NO: 769476 - DNA, 15 bp, Homo sapiens
ggaggttggtggcta

SEQ ID NO: 769477 - DNA, 15 bp, Homo sapiens
gaggttggtggctat

SEQ ID NO: 769478 - DNA, 15 bp, Homo sapiens
aggttggtggctatg

SEQ ID NO: 769479 - DNA, 15 bp, Homo sapiens
ggttggtggctatgc

SEQ ID NO: 769480 - DNA, 15 bp, Homo sapiens
gttggtggctatgct

SEQ ID NO: 769481 - DNA, 15 bp, Homo sapiens
ttggtggctatgcta

SEQ ID NO: 769482 - DNA, 15 bp, Homo sapiens
tggtggctatgctag

SEQ ID NO: 769483 - DNA, 15 bp, Homo sapiens
ggtggctatgctaga

SEQ ID NO: 769484 - DNA, 15 bp, Homo sapiens
gtggctatgctagac

SEQ ID NO: 769485 - DNA, 15 bp, Homo sapiens
tggctatgctagacc

SEQ ID NO: 769486 - DNA, 15 bp, Homo sapiens
ggctatgctagacca

SEQ ID NO: 769487 - DNA, 15 bp, Homo sapiens
gctatgctagaccat

SEQ ID NO: 769488 - DNA, 15 bp, Homo sapiens
ctatgctagaccatg

SEQ ID NO: 769489 - DNA, 15 bp, Homo sapiens
tatgctagaccatga

SEQ ID NO: 769490 - DNA, 15 bp, Homo sapiens
atgctagaccatgaa

SEQ ID NO: 769491 - DNA, 15 bp, Homo sapiens
tgctagaccatgaat

SEQ ID NO: 769492 - DNA, 15 bp, Homo sapiens
gctagaccatgaatg

SEQ ID NO: 769493 - DNA, 15 bp, Homo sapiens
ctagaccatgaatgc

SEQ ID NO: 769494 - DNA, 15 bp, Homo sapiens
tagaccatgaatgca

SEQ ID NO: 769495 - DNA, 15 bp, Homo sapiens
agaccatgaatgcag

SEQ ID NO: 769496 - DNA, 15 bp, Homo sapiens
gaccatgaatgcagg

SEQ ID NO: 769497 - DNA, 15 bp, Homo sapiens
accatgaatgcaggg

SEQ ID NO: 769498 - DNA, 15 bp, Homo sapiens
ccatgaatgcagggc

SEQ ID NO: 769499 - DNA, 15 bp, Homo sapiens
catgaatgcagggct

SEQ ID NO: 769500 - DNA, 15 bp, Homo sapiens
atgaatgcagggctt

SEQ ID NO: 769501 - DNA, 15 bp, Homo sapiens
tgaatgcagggcttc

SEQ ID NO: 769502 - DNA, 15 bp, Homo sapiens
gaatgcagggcttct

SEQ ID NO: 769503 - DNA, 15 bp, Homo sapiens
aatgcagggcttcta

SEQ ID NO: 769504 - DNA, 15 bp, Homo sapiens
atgcagggcttctag

SEQ ID NO: 769505 - DNA, 15 bp, Homo sapiens
tgcagggcttctaga

SEQ ID NO: 769506 - DNA, 15 bp, Homo sapiens
gcagggcttctagac

SEQ ID NO: 769507 - DNA, 15 bp, Homo sapiens
cagggcttctagaca

SEQ ID NO: 769508 - DNA, 15 bp, Homo sapiens
agggcttctagacaa

SEQ ID NO: 769509 - DNA, 15 bp, Homo sapiens
gggcttctagacaaa

SEQ ID NO: 769510 - DNA, 15 bp, Homo sapiens
ggcttctagacaaac

SEQ ID NO: 769511 - DNA, 15 bp, Homo sapiens
gcttctagacaaaca

SEQ ID NO: 769512 - DNA, 15 bp, Homo sapiens
cttctagacaaacag

SEQ ID NO: 769513 - DNA, 15 bp, Homo sapiens
ttctagacaaacaga

SEQ ID NO: 769514 - DNA, 15 bp, Homo sapiens
tctagacaaacagaa

SEQ ID NO: 769515 - DNA, 15 bp, Homo sapiens
ctagacaaacagaaa

SEQ ID NO: 769516 - DNA, 15 bp, Homo sapiens
tagacaaacagaaac

SEQ ID NO: 769517 - DNA, 15 bp, Homo sapiens
agacaaacagaaacc

SEQ ID NO: 769518 - DNA, 15 bp, Homo sapiens
gacaaacagaaacca

SEQ ID NO: 769519 - DNA, 15 bp, Homo sapiens
acaaacagaaaccag

SEQ ID NO: 769520 - DNA, 15 bp, Homo sapiens
caaacagaaaccagt

SEQ ID NO: 769521 - DNA, 15 bp, Homo sapiens
aaacagaaaccagtc

SEQ ID NO: 769522 - DNA, 15 bp, Homo sapiens
aacagaaaccagtcc

SEQ ID NO: 769523 - DNA, 15 bp, Homo sapiens
acagaaaccagtccc

SEQ ID NO: 769524 - DNA, 15 bp, Homo sapiens
cagaaaccagtccct

SEQ ID NO: 769525 - DNA, 15 bp, Homo sapiens
agaaaccagtccctg

SEQ ID NO: 769526 - DNA, 15 bp, Homo sapiens
gaaaccagtccctgg

SEQ ID NO: 769527 - DNA, 15 bp, Homo sapiens
aaaccagtccctggc

SEQ ID NO: 769528 - DNA, 15 bp, Homo sapiens
aaccagtccctggcc

SEQ ID NO: 769529 - DNA, 15 bp, Homo sapiens
accagtccctggcct

SEQ ID NO: 769530 - DNA, 15 bp, Homo sapiens
ccagtccctggcctg

SEQ ID NO: 769531 - DNA, 15 bp, Homo sapiens
cagtccctggcctgc

SEQ ID NO: 769532 - DNA, 15 bp, Homo sapiens
agtccctggcctgca

SEQ ID NO: 769533 - DNA, 15 bp, Homo sapiens
gtccctggcctgcag

SEQ ID NO: 769534 - DNA, 15 bp, Homo sapiens
tccctggcctgcagg

SEQ ID NO: 769535 - DNA, 15 bp, Homo sapiens
ccctggcctgcagga

SEQ ID NO: 769536 - DNA, 15 bp, Homo sapiens
cctggcctgcaggag

SEQ ID NO: 769537 - DNA, 15 bp, Homo sapiens
ctggcctgcaggagt

SEQ ID NO: 769538 - DNA, 15 bp, Homo sapiens
tggcctgcaggagtg

SEQ ID NO: 769539 - DNA, 15 bp, Homo sapiens
ggcctgcaggagtgt

SEQ ID NO: 769540 - DNA, 15 bp, Homo sapiens
gcctgcaggagtgtc

SEQ ID NO: 769541 - DNA, 15 bp, Homo sapiens
cctgcaggagtgtcc

SEQ ID NO: 769542 - DNA, 15 bp, Homo sapiens
ctgcaggagtgtcct

SEQ ID NO: 769543 - DNA, 15 bp, Homo sapiens
tgcaggagtgtcctg

SEQ ID NO: 769544 - DNA, 15 bp, Homo sapiens
gcaggagtgtcctgg

SEQ ID NO: 769545 - DNA, 15 bp, Homo sapiens
caggagtgtcctgga

SEQ ID NO: 769546 - DNA, 15 bp, Homo sapiens
aggagtgtcctggaa

SEQ ID NO: 769547 - DNA, 15 bp, Homo sapiens
ggagtgtcctggaag

SEQ ID NO: 769548 - DNA, 15 bp, Homo sapiens
gagtgtcctggaagc

SEQ ID NO: 769549 - DNA, 15 bp, Homo sapiens
agtgtcctggaagcc

SEQ ID NO: 769550 - DNA, 15 bp, Homo sapiens
gtgtcctggaagcct

SEQ ID NO: 769551 - DNA, 15 bp, Homo sapiens
tgtcctggaagcctg

SEQ ID NO: 769552 - DNA, 15 bp, Homo sapiens
gtcctggaagcctgc

SEQ ID NO: 769553 - DNA, 15 bp, Homo sapiens
tcctggaagcctgcc

SEQ ID NO: 769554 - DNA, 15 bp, Homo sapiens
cctggaagcctgccg

SEQ ID NO: 769555 - DNA, 15 bp, Homo sapiens
ctggaagcctgccgg

SEQ ID NO: 769556 - DNA, 15 bp, Homo sapiens
tggaagcctgccggg

SEQ ID NO: 769557 - DNA, 15 bp, Homo sapiens
ggaagcctgccggga

SEQ ID NO: 769558 - DNA, 15 bp, Homo sapiens
gaagcctgccgggac

SEQ ID NO: 769559 - DNA, 15 bp, Homo sapiens
aagcctgccgggacc

SEQ ID NO: 769560 - DNA, 15 bp, Homo sapiens
agcctgccgggacca

SEQ ID NO: 769561 - DNA, 15 bp, Homo sapiens
gcctgccgggaccac

SEQ ID NO: 769562 - DNA, 15 bp, Homo sapiens
cctgccgggaccact

SEQ ID NO: 769563 - DNA, 15 bp, Homo sapiens
ctgccgggaccactg

SEQ ID NO: 769564 - DNA, 15 bp, Homo sapiens
tgccgggaccactga

SEQ ID NO: 769565 - DNA, 15 bp, Homo sapiens
gccgggaccactgag

SEQ ID NO: 769566 - DNA, 15 bp, Homo sapiens
ccgggaccactgaga

SEQ ID NO: 769567 - DNA, 15 bp, Homo sapiens
cgggaccactgagaa

SEQ ID NO: 769568 - DNA, 15 bp, Homo sapiens
gggaccactgagaaa

SEQ ID NO: 769569 - DNA, 15 bp, Homo sapiens
ggaccactgagaaaa

SEQ ID NO: 769570 - DNA, 15 bp, Homo sapiens
gaccactgagaaaag

SEQ ID NO: 769571 - DNA, 15 bp, Homo sapiens
accactgagaaaagc

SEQ ID NO: 769572 - DNA, 15 bp, Homo sapiens
ccactgagaaaagct

SEQ ID NO: 769573 - DNA, 15 bp, Homo sapiens
cactgagaaaagctt

SEQ ID NO: 769574 - DNA, 15 bp, Homo sapiens
actgagaaaagcttt

SEQ ID NO: 769575 - DNA, 15 bp, Homo sapiens
ctgagaaaagctttc

SEQ ID NO: 769576 - DNA, 15 bp, Homo sapiens
tgagaaaagctttcc

SEQ ID NO: 769577 - DNA, 15 bp, Homo sapiens
gagaaaagctttcca

SEQ ID NO: 769578 - DNA, 15 bp, Homo sapiens
agaaaagctttccat

SEQ ID NO: 769579 - DNA, 15 bp, Homo sapiens
gaaaagctttccatt

SEQ ID NO: 769580 - DNA, 15 bp, Homo sapiens
aaaagctttccattg

SEQ ID NO: 769581 - DNA, 15 bp, Homo sapiens
aaagctttccattgg

SEQ ID NO: 769582 - DNA, 15 bp, Homo sapiens
aagctttccattggg

SEQ ID NO: 769583 - DNA, 15 bp, Homo sapiens
agctttccattggga

SEQ ID NO: 769584 - DNA, 15 bp, Homo sapiens
gctttccattgggaa

SEQ ID NO: 769585 - DNA, 15 bp, Homo sapiens
ctttccattgggaaa

SEQ ID NO: 769586 - DNA, 15 bp, Homo sapiens
tttccattgggaaaa

SEQ ID NO: 769587 - DNA, 15 bp, Homo sapiens
ttccattgggaaaac

SEQ ID NO: 769588 - DNA, 15 bp, Homo sapiens
tccattgggaaaaca

SEQ ID NO: 769589 - DNA, 15 bp, Homo sapiens
ccattgggaaaacat

SEQ ID NO: 769590 - DNA, 15 bp, Homo sapiens
cattgggaaaacata

SEQ ID NO: 769591 - DNA, 15 bp, Homo sapiens
attgggaaaacatat

SEQ ID NO: 769592 - DNA, 15 bp, Homo sapiens
ttgggaaaacatatg

SEQ ID NO: 769593 - DNA, 15 bp, Homo sapiens
tgggaaaacatatgt

SEQ ID NO: 769594 - DNA, 15 bp, Homo sapiens
gggaaaacatatgta

SEQ ID NO: 769595 - DNA, 15 bp, Homo sapiens
ggaaaacatatgtag

SEQ ID NO: 769596 - DNA, 15 bp, Homo sapiens
gaaaacatatgtagg

SEQ ID NO: 769597 - DNA, 15 bp, Homo sapiens
aaaacatatgtaggc

SEQ ID NO: 769598 - DNA, 15 bp, Homo sapiens
aaacatatgtaggcc

SEQ ID NO: 769599 - DNA, 15 bp, Homo sapiens
aacatatgtaggccc

SEQ ID NO: 769600 - DNA, 15 bp, Homo sapiens
acatatgtaggcccc

SEQ ID NO: 769601 - DNA, 15 bp, Homo sapiens
catatgtaggcccct

SEQ ID NO: 769602 - DNA, 15 bp, Homo sapiens
atatgtaggcccctg

SEQ ID NO: 769603 - DNA, 15 bp, Homo sapiens
tatgtaggcccctgg

SEQ ID NO: 769604 - DNA, 15 bp, Homo sapiens
atgtaggcccctggg

SEQ ID NO: 769605 - DNA, 15 bp, Homo sapiens
tgtaggcccctggga

SEQ ID NO: 769606 - DNA, 15 bp, Homo sapiens
gtaggcccctgggag

SEQ ID NO: 769607 - DNA, 15 bp, Homo sapiens
taggcccctgggagg

SEQ ID NO: 769608 - DNA, 15 bp, Homo sapiens
aggcccctgggaggg

SEQ ID NO: 769609 - DNA, 15 bp, Homo sapiens
ggcccctgggaggga

SEQ ID NO: 769610 - DNA, 15 bp, Homo sapiens
gcccctgggagggac

SEQ ID NO: 769611 - DNA, 15 bp, Homo sapiens
cccctgggagggaca

SEQ ID NO: 769612 - DNA, 15 bp, Homo sapiens
ccctgggagggacag

SEQ ID NO: 769613 - DNA, 15 bp, Homo sapiens
cctgggagggacagc

SEQ ID NO: 769614 - DNA, 15 bp, Homo sapiens
ctgggagggacagcc

SEQ ID NO: 769615 - DNA, 15 bp, Homo sapiens
tgggagggacagcct

SEQ ID NO: 769616 - DNA, 15 bp, Homo sapiens
gggagggacagcctt

SEQ ID NO: 769617 - DNA, 15 bp, Homo sapiens
ggagggacagccttt

SEQ ID NO: 769618 - DNA, 15 bp, Homo sapiens
gagggacagcctttc

SEQ ID NO: 769619 - DNA, 15 bp, Homo sapiens
agggacagcctttcc

SEQ ID NO: 769620 - DNA, 15 bp, Homo sapiens
gggacagcctttccc

SEQ ID NO: 769621 - DNA, 15 bp, Homo sapiens
ggacagcctttcccc

SEQ ID NO: 769622 - DNA, 15 bp, Homo sapiens
gacagcctttccccc

SEQ ID NO: 769623 - DNA, 15 bp, Homo sapiens
acagcctttccccct

SEQ ID NO: 769624 - DNA, 15 bp, Homo sapiens
cagcctttccccctc

SEQ ID NO: 769625 - DNA, 15 bp, Homo sapiens
agcctttccccctct

SEQ ID NO: 769626 - DNA, 15 bp, Homo sapiens
gcctttccccctctt

SEQ ID NO: 769627 - DNA, 15 bp, Homo sapiens
cctttccccctcttt

SEQ ID NO: 769628 - DNA, 15 bp, Homo sapiens
ctttccccctctttt

SEQ ID NO: 769629 - DNA, 15 bp, Homo sapiens
tttccccctcttttg

SEQ ID NO: 769630 - DNA, 15 bp, Homo sapiens
ttccccctcttttgg

SEQ ID NO: 769631 - DNA, 15 bp, Homo sapiens
tccccctcttttggg

SEQ ID NO: 769632 - DNA, 15 bp, Homo sapiens
ccccctcttttggga

SEQ ID NO: 769633 - DNA, 15 bp, Homo sapiens
cccctcttttgggag

SEQ ID NO: 769634 - DNA, 15 bp, Homo sapiens
ccctcttttgggagc

SEQ ID NO: 769635 - DNA, 15 bp, Homo sapiens
cctcttttgggagcc

SEQ ID NO: 769636 - DNA, 15 bp, Homo sapiens
ctcttttgggagcca

SEQ ID NO: 769637 - DNA, 15 bp, Homo sapiens
tcttttgggagccag

SEQ ID NO: 769638 - DNA, 15 bp, Homo sapiens
cttttgggagccagt

SEQ ID NO: 769639 - DNA, 15 bp, Homo sapiens
ttttgggagccagtc

SEQ ID NO: 769640 - DNA, 15 bp, Homo sapiens
tttgggagccagtct

SEQ ID NO: 769641 - DNA, 15 bp, Homo sapiens
ttgggagccagtctg

SEQ ID NO: 769642 - DNA, 15 bp, Homo sapiens
tgggagccagtctgg

SEQ ID NO: 769643 - DNA, 15 bp, Homo sapiens
gggagccagtctggc

SEQ ID NO: 769644 - DNA, 15 bp, Homo sapiens
ggagccagtctggcc

SEQ ID NO: 769645 - DNA, 15 bp, Homo sapiens
gagccagtctggccc

SEQ ID NO: 769646 - DNA, 15 bp, Homo sapiens
agccagtctggcccc

SEQ ID NO: 769647 - DNA, 15 bp, Homo sapiens
gccagtctggcccct

SEQ ID NO: 769648 - DNA, 15 bp, Homo sapiens
ccagtctggcccctc

SEQ ID NO: 769649 - DNA, 15 bp, Homo sapiens
cagtctggcccctcg

SEQ ID NO: 769650 - DNA, 15 bp, Homo sapiens
agtctggcccctcgt

SEQ ID NO: 769651 - DNA, 15 bp, Homo sapiens
gtctggcccctcgtg

SEQ ID NO: 769652 - DNA, 15 bp, Homo sapiens
tctggcccctcgtgg

SEQ ID NO: 769653 - DNA, 15 bp, Homo sapiens
ctggcccctcgtggg

SEQ ID NO: 769654 - DNA, 15 bp, Homo sapiens
tggcccctcgtggga

SEQ ID NO: 769655 - DNA, 15 bp, Homo sapiens
ggcccctcgtgggat

SEQ ID NO: 769656 - DNA, 15 bp, Homo sapiens
gcccctcgtgggatg

SEQ ID NO: 769657 - DNA, 15 bp, Homo sapiens
cccctcgtgggatga

SEQ ID NO: 769658 - DNA, 15 bp, Homo sapiens
ccctcgtgggatgat

SEQ ID NO: 769659 - DNA, 15 bp, Homo sapiens
cctcgtgggatgatg

SEQ ID NO: 769660 - DNA, 15 bp, Homo sapiens
ctcgtgggatgatgg

SEQ ID NO: 769661 - DNA, 15 bp, Homo sapiens
tcgtgggatgatggt

SEQ ID NO: 769662 - DNA, 15 bp, Homo sapiens
cgtgggatgatggtg

SEQ ID NO: 769663 - DNA, 15 bp, Homo sapiens
gtgggatgatggtgg

SEQ ID NO: 769664 - DNA, 15 bp, Homo sapiens
tgggatgatggtggc

SEQ ID NO: 769665 - DNA, 15 bp, Homo sapiens
gggatgatggtggcc

SEQ ID NO: 769666 - DNA, 15 bp, Homo sapiens
ggatgatggtggccc

SEQ ID NO: 769667 - DNA, 15 bp, Homo sapiens
gatgatggtggcccc

SEQ ID NO: 769668 - DNA, 15 bp, Homo sapiens
atgatggtggccccc

SEQ ID NO: 769669 - DNA, 15 bp, Homo sapiens
tgatggtggccccca

SEQ ID NO: 769670 - DNA, 15 bp, Homo sapiens
gatggtggcccccat

SEQ ID NO: 769671 - DNA, 15 bp, Homo sapiens
atggtggcccccatg

SEQ ID NO: 769672 - DNA, 15 bp, Homo sapiens
tggtggcccccatgg

SEQ ID NO: 769673 - DNA, 15 bp, Homo sapiens
ggtggcccccatggg

SEQ ID NO: 769674 - DNA, 15 bp, Homo sapiens
gtggcccccatgggc

SEQ ID NO: 769675 - DNA, 15 bp, Homo sapiens
tggcccccatgggct

SEQ ID NO: 769676 - DNA, 15 bp, Homo sapiens
ggcccccatgggctt

SEQ ID NO: 769677 - DNA, 15 bp, Homo sapiens
gcccccatgggcttt

SEQ ID NO: 769678 - DNA, 15 bp, Homo sapiens
cccccatgggctttt

SEQ ID NO: 769679 - DNA, 15 bp, Homo sapiens
ccccatgggcttttt

SEQ ID NO: 769680 - DNA, 15 bp, Homo sapiens
cccatgggctttttc

SEQ ID NO: 769681 - DNA, 15 bp, Homo sapiens
ccatgggctttttct

SEQ ID NO: 769682 - DNA, 15 bp, Homo sapiens
catgggctttttctt

SEQ ID NO: 769683 - DNA, 15 bp, Homo sapiens
atgggctttttcttt

SEQ ID NO: 769684 - DNA, 15 bp, Homo sapiens
tgggctttttctttc

SEQ ID NO: 769685 - DNA, 15 bp, Homo sapiens
gggctttttctttca

SEQ ID NO: 769686 - DNA, 15 bp, Homo sapiens
ggctttttctttcac

SEQ ID NO: 769687 - DNA, 15 bp, Homo sapiens
gctttttctttcact

SEQ ID NO: 769688 - DNA, 15 bp, Homo sapiens
ctttttctttcactt

SEQ ID NO: 769689 - DNA, 15 bp, Homo sapiens
tttttctttcacttg

SEQ ID NO: 769690 - DNA, 15 bp, Homo sapiens
ttttctttcacttga

SEQ ID NO: 769691 - DNA, 15 bp, Homo sapiens
tttctttcacttgat

SEQ ID NO: 769692 - DNA, 15 bp, Homo sapiens
ttctttcacttgatt

SEQ ID NO: 769693 - DNA, 15 bp, Homo sapiens
tctttcacttgattt

SEQ ID NO: 769694 - DNA, 15 bp, Homo sapiens
ctttcacttgatttc

SEQ ID NO: 769695 - DNA, 15 bp, Homo sapiens
tttcacttgatttcc

SEQ ID NO: 769696 - DNA, 15 bp, Homo sapiens
ttcacttgatttccc

SEQ ID NO: 769697 - DNA, 15 bp, Homo sapiens
tcacttgatttccct

SEQ ID NO: 769698 - DNA, 15 bp, Homo sapiens
cacttgatttccctg

SEQ ID NO: 769699 - DNA, 15 bp, Homo sapiens
acttgatttccctgt

SEQ ID NO: 769700 - DNA, 15 bp, Homo sapiens
cttgatttccctgtc

SEQ ID NO: 769701 - DNA, 15 bp, Homo sapiens
ttgatttccctgtct

SEQ ID NO: 769702 - DNA, 15 bp, Homo sapiens
tgatttccctgtcta

SEQ ID NO: 769703 - DNA, 15 bp, Homo sapiens
gatttccctgtctat

SEQ ID NO: 769704 - DNA, 15 bp, Homo sapiens
atttccctgtctatg

SEQ ID NO: 769705 - DNA, 15 bp, Homo sapiens
tttccctgtctatgt

SEQ ID NO: 769706 - DNA, 15 bp, Homo sapiens
ttccctgtctatgtg

SEQ ID NO: 769707 - DNA, 15 bp, Homo sapiens
tccctgtctatgtgt

SEQ ID NO: 769708 - DNA, 15 bp, Homo sapiens
ccctgtctatgtgtg

SEQ ID NO: 769709 - DNA, 15 bp, Homo sapiens
cctgtctatgtgtgt

SEQ ID NO: 769710 - DNA, 15 bp, Homo sapiens
ctgtctatgtgtgtg

SEQ ID NO: 769711 - DNA, 15 bp, Homo sapiens
tgtctatgtgtgtgt

SEQ ID NO: 769712 - DNA, 15 bp, Homo sapiens
gtctatgtgtgtgta

SEQ ID NO: 769713 - DNA, 15 bp, Homo sapiens
tctatgtgtgtgtac

SEQ ID NO: 769714 - DNA, 15 bp, Homo sapiens
ctatgtgtgtgtacc

SEQ ID NO: 769715 - DNA, 15 bp, Homo sapiens
tatgtgtgtgtaccc

SEQ ID NO: 769716 - DNA, 15 bp, Homo sapiens
atgtgtgtgtaccca

SEQ ID NO: 769717 - DNA, 15 bp, Homo sapiens
tgtgtgtgtacccag

SEQ ID NO: 769718 - DNA, 15 bp, Homo sapiens
gtgtgtgtacccagc

SEQ ID NO: 769719 - DNA, 15 bp, Homo sapiens
tgtgtgtacccagcc

SEQ ID NO: 769720 - DNA, 15 bp, Homo sapiens
gtgtgtacccagcca

SEQ ID NO: 769721 - DNA, 15 bp, Homo sapiens
tgtgtacccagccac

SEQ ID NO: 769722 - DNA, 15 bp, Homo sapiens
gtgtacccagccacc

SEQ ID NO: 769723 - DNA, 15 bp, Homo sapiens
tgtacccagccaccc

SEQ ID NO: 769724 - DNA, 15 bp, Homo sapiens
gtacccagccaccct

SEQ ID NO: 769725 - DNA, 15 bp, Homo sapiens
tacccagccaccctg

SEQ ID NO: 769726 - DNA, 15 bp, Homo sapiens
acccagccaccctgg

SEQ ID NO: 769727 - DNA, 15 bp, Homo sapiens
cccagccaccctgga

SEQ ID NO: 769728 - DNA, 15 bp, Homo sapiens
ccagccaccctggat

SEQ ID NO: 769729 - DNA, 15 bp, Homo sapiens
cagccaccctggatc

SEQ ID NO: 769730 - DNA, 15 bp, Homo sapiens
agccaccctggatcg

SEQ ID NO: 769731 - DNA, 15 bp, Homo sapiens
gccaccctggatcgt

SEQ ID NO: 769732 - DNA, 15 bp, Homo sapiens
ccaccctggatcgtg

SEQ ID NO: 769733 - DNA, 15 bp, Homo sapiens
caccctggatcgtgg

SEQ ID NO: 769734 - DNA, 15 bp, Homo sapiens
accctggatcgtggg

SEQ ID NO: 769735 - DNA, 15 bp, Homo sapiens
ccctggatcgtgggt

SEQ ID NO: 769736 - DNA, 15 bp, Homo sapiens
cctggatcgtgggtg

SEQ ID NO: 769737 - DNA, 15 bp, Homo sapiens
ctggatcgtgggtgt

SEQ ID NO: 769738 - DNA, 15 bp, Homo sapiens
tggatcgtgggtgtc

SEQ ID NO: 769739 - DNA, 15 bp, Homo sapiens
ggatcgtgggtgtca

SEQ ID NO: 769740 - DNA, 15 bp, Homo sapiens
gatcgtgggtgtcac

SEQ ID NO: 769741 - DNA, 15 bp, Homo sapiens
atcgtgggtgtcacc

SEQ ID NO: 769742 - DNA, 15 bp, Homo sapiens
tcgtgggtgtcacca

SEQ ID NO: 769743 - DNA, 15 bp, Homo sapiens
cgtgggtgtcaccat

SEQ ID NO: 769744 - DNA, 15 bp, Homo sapiens
gtgggtgtcaccatg

SEQ ID NO: 769745 - DNA, 15 bp, Homo sapiens
tgggtgtcaccatgg

SEQ ID NO: 769746 - DNA, 15 bp, Homo sapiens
gggtgtcaccatggt

SEQ ID NO: 769747 - DNA, 15 bp, Homo sapiens
ggtgtcaccatggta

SEQ ID NO: 769748 - DNA, 15 bp, Homo sapiens
gtgtcaccatggtat

SEQ ID NO: 769749 - DNA, 15 bp, Homo sapiens
tgtcaccatggtatc

SEQ ID NO: 769750 - DNA, 15 bp, Homo sapiens
gtcaccatggtatcc

SEQ ID NO: 769751 - DNA, 15 bp, Homo sapiens
tcaccatggtatcct

SEQ ID NO: 769752 - DNA, 15 bp, Homo sapiens
caccatggtatcctg

SEQ ID NO: 769753 - DNA, 15 bp, Homo sapiens
accatggtatcctgt

SEQ ID NO: 769754 - DNA, 15 bp, Homo sapiens
ccatggtatcctgtc

SEQ ID NO: 769755 - DNA, 15 bp, Homo sapiens
catggtatcctgtct

SEQ ID NO: 769756 - DNA, 15 bp, Homo sapiens
atggtatcctgtctc

SEQ ID NO: 769757 - DNA, 15 bp, Homo sapiens
tggtatcctgtctct

SEQ ID NO: 769758 - DNA, 15 bp, Homo sapiens
ggtatcctgtctctg

SEQ ID NO: 769759 - DNA, 15 bp, Homo sapiens
gtatcctgtctctga

SEQ ID NO: 769760 - DNA, 15 bp, Homo sapiens
tatcctgtctctgag

SEQ ID NO: 769761 - DNA, 15 bp, Homo sapiens
atcctgtctctgagc

SEQ ID NO: 769762 - DNA, 15 bp, Homo sapiens
tcctgtctctgagca

SEQ ID NO: 769763 - DNA, 15 bp, Homo sapiens
cctgtctctgagcaa

SEQ ID NO: 769764 - DNA, 15 bp, Homo sapiens
ctgtctctgagcaaa

SEQ ID NO: 769765 - DNA, 15 bp, Homo sapiens
tgtctctgagcaaac

SEQ ID NO: 769766 - DNA, 15 bp, Homo sapiens
gtctctgagcaaaca

SEQ ID NO: 769767 - DNA, 15 bp, Homo sapiens
tctctgagcaaacac

SEQ ID NO: 769768 - DNA, 15 bp, Homo sapiens
ctctgagcaaacaca

SEQ ID NO: 769769 - DNA, 15 bp, Homo sapiens
tctgagcaaacacat

SEQ ID NO: 769770 - DNA, 15 bp, Homo sapiens
ctgagcaaacacatg

SEQ ID NO: 769771 - DNA, 15 bp, Homo sapiens
tgagcaaacacatga

SEQ ID NO: 769772 - DNA, 15 bp, Homo sapiens
gagcaaacacatgag

SEQ ID NO: 769773 - DNA, 15 bp, Homo sapiens
agcaaacacatgagc

SEQ ID NO: 769774 - DNA, 15 bp, Homo sapiens
gcaaacacatgagcg

SEQ ID NO: 769775 - DNA, 15 bp, Homo sapiens
caaacacatgagcga

SEQ ID NO: 769776 - DNA, 15 bp, Homo sapiens
aaacacatgagcgaa

SEQ ID NO: 769777 - DNA, 15 bp, Homo sapiens
aacacatgagcgaaa

SEQ ID NO: 769778 - DNA, 15 bp, Homo sapiens
acacatgagcgaaaa

SEQ ID NO: 769779 - DNA, 15 bp, Homo sapiens
cacatgagcgaaaaa

SEQ ID NO: 769780 - DNA, 15 bp, Homo sapiens
acatgagcgaaaaaa

SEQ ID NO: 769781 - DNA, 15 bp, Homo sapiens
catgagcgaaaaaac

SEQ ID NO: 769782 - DNA, 15 bp, Homo sapiens
atgagcgaaaaaaca

SEQ ID NO: 769783 - DNA, 15 bp, Homo sapiens
tgagcgaaaaaacaa

SEQ ID NO: 769784 - DNA, 15 bp, Homo sapiens
gagcgaaaaaacaaa

SEQ ID NO: 769785 - DNA, 15 bp, Homo sapiens
agcgaaaaaacaaac

SEQ ID NO: 769786 - DNA, 15 bp, Homo sapiens
gcgaaaaaacaaaca

SEQ ID NO: 769787 - DNA, 15 bp, Homo sapiens
cgaaaaaacaaacaa

SEQ ID NO: 769788 - DNA, 15 bp, Homo sapiens
gaaaaaacaaacaag

SEQ ID NO: 769789 - DNA, 15 bp, Homo sapiens
aaaaaacaaacaagc

SEQ ID NO: 769790 - DNA, 15 bp, Homo sapiens
aaaaacaaacaagca

SEQ ID NO: 769791 - DNA, 15 bp, Homo sapiens
aaaacaaacaagcat

SEQ ID NO: 769792 - DNA, 15 bp, Homo sapiens
aaacaaacaagcatt

SEQ ID NO: 769793 - DNA, 15 bp, Homo sapiens
aacaaacaagcatta

SEQ ID NO: 769794 - DNA, 15 bp, Homo sapiens
acaaacaagcattag

SEQ ID NO: 769795 - DNA, 15 bp, Homo sapiens
caaacaagcattagg

SEQ ID NO: 769796 - DNA, 15 bp, Homo sapiens
aaacaagcattagga

SEQ ID NO: 769797 - DNA, 15 bp, Homo sapiens
aacaagcattaggaa

SEQ ID NO: 769798 - DNA, 15 bp, Homo sapiens
acaagcattaggaag

SEQ ID NO: 769799 - DNA, 15 bp, Homo sapiens
caagcattaggaagg

SEQ ID NO: 769800 - DNA, 15 bp, Homo sapiens
aagcattaggaagga

SEQ ID NO: 769801 - DNA, 15 bp, Homo sapiens
agcattaggaaggag

SEQ ID NO: 769802 - DNA, 15 bp, Homo sapiens
gcattaggaaggagg

SEQ ID NO: 769803 - DNA, 15 bp, Homo sapiens
cattaggaaggaggg

SEQ ID NO: 769804 - DNA, 15 bp, Homo sapiens
attaggaaggagggc

SEQ ID NO: 769805 - DNA, 15 bp, Homo sapiens
ttaggaaggagggct

SEQ ID NO: 769806 - DNA, 15 bp, Homo sapiens
taggaaggagggctc

SEQ ID NO: 769807 - DNA, 15 bp, Homo sapiens
aggaaggagggctct

SEQ ID NO: 769808 - DNA, 15 bp, Homo sapiens
ggaaggagggctctc

SEQ ID NO: 769809 - DNA, 15 bp, Homo sapiens
gaaggagggctctcc

SEQ ID NO: 769810 - DNA, 15 bp, Homo sapiens
aaggagggctctccc

SEQ ID NO: 769811 - DNA, 15 bp, Homo sapiens
aggagggctctcccc

SEQ ID NO: 769812 - DNA, 15 bp, Homo sapiens
ggagggctctccccc

SEQ ID NO: 769813 - DNA, 15 bp, Homo sapiens
gagggctctccccca

SEQ ID NO: 769814 - DNA, 15 bp, Homo sapiens
agggctctcccccac

SEQ ID NO: 769815 - DNA, 15 bp, Homo sapiens
gggctctcccccaca

SEQ ID NO: 769816 - DNA, 15 bp, Homo sapiens
ggctctcccccacac

SEQ ID NO: 769817 - DNA, 15 bp, Homo sapiens
gctctcccccacacc

SEQ ID NO: 769818 - DNA, 15 bp, Homo sapiens
ctctcccccacacct

SEQ ID NO: 769819 - DNA, 15 bp, Homo sapiens
tctcccccacacctt

SEQ ID NO: 769820 - DNA, 15 bp, Homo sapiens
ctcccccacaccttg

SEQ ID NO: 769821 - DNA, 15 bp, Homo sapiens
tcccccacaccttgg

SEQ ID NO: 769822 - DNA, 15 bp, Homo sapiens
cccccacaccttggc

SEQ ID NO: 769823 - DNA, 15 bp, Homo sapiens
ccccacaccttggcc

SEQ ID NO: 769824 - DNA, 15 bp, Homo sapiens
cccacaccttggcca

SEQ ID NO: 769825 - DNA, 15 bp, Homo sapiens
ccacaccttggccac

SEQ ID NO: 769826 - DNA, 15 bp, Homo sapiens
cacaccttggccacc

SEQ ID NO: 769827 - DNA, 15 bp, Homo sapiens
caccttggccaccta

SEQ ID NO: 769828 - DNA, 15 bp, Homo sapiens
accttggccacctat

SEQ ID NO: 769829 - DNA, 15 bp, Homo sapiens
ccttggccacctatg

SEQ ID NO: 769830 - DNA, 15 bp, Homo sapiens
cttggccacctatgc

SEQ ID NO: 769831 - DNA, 15 bp, Homo sapiens
ttggccacctatgcg

SEQ ID NO: 769832 - DNA, 15 bp, Homo sapiens
tggccacctatgcgg

SEQ ID NO: 769833 - DNA, 15 bp, Homo sapiens
ggccacctatgcgga

SEQ ID NO: 769834 - DNA, 15 bp, Homo sapiens
gccacctatgcggag

SEQ ID NO: 769835 - DNA, 15 bp, Homo sapiens
ccacctatgcggagt

SEQ ID NO: 769836 - DNA, 15 bp, Homo sapiens
cacctatgcggagtg

SEQ ID NO: 769837 - DNA, 15 bp, Homo sapiens
acctatgcggagtga

SEQ ID NO: 769838 - DNA, 15 bp, Homo sapiens
cctatgcggagtgag

SEQ ID NO: 769839 - DNA, 15 bp, Homo sapiens
ctatgcggagtgagg

SEQ ID NO: 769840 - DNA, 15 bp, Homo sapiens
tatgcggagtgaggg

SEQ ID NO: 769841 - DNA, 15 bp, Homo sapiens
atgcggagtgaggga

SEQ ID NO: 769842 - DNA, 15 bp, Homo sapiens
tgcggagtgagggac

SEQ ID NO: 769843 - DNA, 15 bp, Homo sapiens
gcggagtgagggacc

SEQ ID NO: 769844 - DNA, 15 bp, Homo sapiens
cggagtgagggaccc

SEQ ID NO: 769845 - DNA, 15 bp, Homo sapiens
ggagtgagggaccct

SEQ ID NO: 769846 - DNA, 15 bp, Homo sapiens
gagtgagggaccctg

SEQ ID NO: 769847 - DNA, 15 bp, Homo sapiens
agtgagggaccctga

SEQ ID NO: 769848 - DNA, 15 bp, Homo sapiens
gtgagggaccctgag

SEQ ID NO: 769849 - DNA, 15 bp, Homo sapiens
tgagggaccctgagc

SEQ ID NO: 769850 - DNA, 15 bp, Homo sapiens
gagggaccctgagcc

SEQ ID NO: 769851 - DNA, 15 bp, Homo sapiens
agggaccctgagcca

SEQ ID NO: 769852 - DNA, 15 bp, Homo sapiens
gggaccctgagccag

SEQ ID NO: 769853 - DNA, 15 bp, Homo sapiens
ggaccctgagccagg

SEQ ID NO: 769854 - DNA, 15 bp, Homo sapiens
gaccctgagccaggt

SEQ ID NO: 769855 - DNA, 15 bp, Homo sapiens
accctgagccaggta

SEQ ID NO: 769856 - DNA, 15 bp, Homo sapiens
ccctgagccaggtag

SEQ ID NO: 769857 - DNA, 15 bp, Homo sapiens
cctgagccaggtagg

SEQ ID NO: 769858 - DNA, 15 bp, Homo sapiens
ctgagccaggtagga

SEQ ID NO: 769859 - DNA, 15 bp, Homo sapiens
tgagccaggtaggag

SEQ ID NO: 769860 - DNA, 15 bp, Homo sapiens
gagccaggtaggagg

SEQ ID NO: 769861 - DNA, 15 bp, Homo sapiens
agccaggtaggagga

SEQ ID NO: 769862 - DNA, 15 bp, Homo sapiens
gccaggtaggaggag

SEQ ID NO: 769863 - DNA, 15 bp, Homo sapiens
ccaggtaggaggagg

SEQ ID NO: 769864 - DNA, 15 bp, Homo sapiens
caggtaggaggaggg

SEQ ID NO: 769865 - DNA, 15 bp, Homo sapiens
aggtaggaggaggga

SEQ ID NO: 769866 - DNA, 15 bp, Homo sapiens
ggtaggaggagggaa

SEQ ID NO: 769867 - DNA, 15 bp, Homo sapiens
gtaggaggagggaag

SEQ ID NO: 769868 - DNA, 15 bp, Homo sapiens
taggaggagggaagg

SEQ ID NO: 769869 - DNA, 15 bp, Homo sapiens
aggaggagggaaggt

SEQ ID NO: 769870 - DNA, 15 bp, Homo sapiens
ggaggagggaaggtg

SEQ ID NO: 769871 - DNA, 15 bp, Homo sapiens
gaggagggaaggtga

SEQ ID NO: 769872 - DNA, 15 bp, Homo sapiens
aggagggaaggtgat

SEQ ID NO: 769873 - DNA, 15 bp, Homo sapiens
ggagggaaggtgatg

SEQ ID NO: 769874 - DNA, 15 bp, Homo sapiens
gagggaaggtgatgg

SEQ ID NO: 769875 - DNA, 15 bp, Homo sapiens
agggaaggtgatgga

SEQ ID NO: 769876 - DNA, 15 bp, Homo sapiens
gggaaggtgatggag

SEQ ID NO: 769877 - DNA, 15 bp, Homo sapiens
ggaaggtgatggaga

SEQ ID NO: 769878 - DNA, 15 bp, Homo sapiens
gaaggtgatggagat

SEQ ID NO: 769879 - DNA, 15 bp, Homo sapiens
aaggtgatggagatt

SEQ ID NO: 769880 - DNA, 15 bp, Homo sapiens
aggtgatggagatta

SEQ ID NO: 769881 - DNA, 15 bp, Homo sapiens
ggtgatggagattaa

SEQ ID NO: 769882 - DNA, 15 bp, Homo sapiens
gtgatggagattaaa

SEQ ID NO: 769883 - DNA, 15 bp, Homo sapiens
tgatggagattaaac

SEQ ID NO: 769884 - DNA, 15 bp, Homo sapiens
gatggagattaaaca

SEQ ID NO: 769885 - DNA, 15 bp, Homo sapiens
atggagattaaacag

SEQ ID NO: 769886 - DNA, 15 bp, Homo sapiens
tggagattaaacagc

SEQ ID NO: 769887 - DNA, 15 bp, Homo sapiens
ggagattaaacagca

SEQ ID NO: 769888 - DNA, 15 bp, Homo sapiens
gagattaaacagcag

SEQ ID NO: 769889 - DNA, 15 bp, Homo sapiens
agattaaacagcagg

SEQ ID NO: 769890 - DNA, 15 bp, Homo sapiens
gattaaacagcaggt

SEQ ID NO: 769891 - DNA, 15 bp, Homo sapiens
attaaacagcaggtg

SEQ ID NO: 769892 - DNA, 15 bp, Homo sapiens
ttaaacagcaggtgt

SEQ ID NO: 769893 - DNA, 15 bp, Homo sapiens
taaacagcaggtgtc

SEQ ID NO: 769894 - DNA, 15 bp, Homo sapiens
aaacagcaggtgtca

SEQ ID NO: 769895 - DNA, 15 bp, Homo sapiens
aacagcaggtgtcag

SEQ ID NO: 769896 - DNA, 15 bp, Homo sapiens
acagcaggtgtcaga

SEQ ID NO: 769897 - DNA, 15 bp, Homo sapiens
cagcaggtgtcagac

SEQ ID NO: 769898 - DNA, 15 bp, Homo sapiens
agcaggtgtcagaca

SEQ ID NO: 769899 - DNA, 15 bp, Homo sapiens
gcaggtgtcagacag

SEQ ID NO: 769900 - DNA, 15 bp, Homo sapiens
caggtgtcagacagt

SEQ ID NO: 769901 - DNA, 15 bp, Homo sapiens
aggtgtcagacagtc

SEQ ID NO: 769902 - DNA, 15 bp, Homo sapiens
ggtgtcagacagtca

SEQ ID NO: 769903 - DNA, 15 bp, Homo sapiens
gtgtcagacagtcag

SEQ ID NO: 769904 - DNA, 15 bp, Homo sapiens
tgtcagacagtcagg

SEQ ID NO: 769905 - DNA, 15 bp, Homo sapiens
gtcagacagtcaggg

SEQ ID NO: 769906 - DNA, 15 bp, Homo sapiens
tcagacagtcaggga

SEQ ID NO: 769907 - DNA, 15 bp, Homo sapiens
cagacagtcagggaa

SEQ ID NO: 769908 - DNA, 15 bp, Homo sapiens
agacagtcagggaaa

SEQ ID NO: 769909 - DNA, 15 bp, Homo sapiens
gacagtcagggaaat

SEQ ID NO: 769910 - DNA, 15 bp, Homo sapiens
acagtcagggaaatg

SEQ ID NO: 769911 - DNA, 15 bp, Homo sapiens
cagtcagggaaatgc

SEQ ID NO: 769912 - DNA, 15 bp, Homo sapiens
agtcagggaaatgcg

SEQ ID NO: 769913 - DNA, 15 bp, Homo sapiens
gtcagggaaatgcgt

SEQ ID NO: 769914 - DNA, 15 bp, Homo sapiens
tcagggaaatgcgtt

SEQ ID NO: 769915 - DNA, 15 bp, Homo sapiens
cagggaaatgcgttt

SEQ ID NO: 769916 - DNA, 15 bp, Homo sapiens
agggaaatgcgtttg

SEQ ID NO: 769917 - DNA, 15 bp, Homo sapiens
gggaaatgcgtttgg

SEQ ID NO: 769918 - DNA, 15 bp, Homo sapiens
ggaaatgcgtttgga

SEQ ID NO: 769919 - DNA, 15 bp, Homo sapiens
gaaatgcgtttggat

SEQ ID NO: 769920 - DNA, 15 bp, Homo sapiens
aaatgcgtttggatt

SEQ ID NO: 769921 - DNA, 15 bp, Homo sapiens
aatgcgtttggattc

SEQ ID NO: 769922 - DNA, 15 bp, Homo sapiens
atgcgtttggattca

SEQ ID NO: 769923 - DNA, 15 bp, Homo sapiens
tgcgtttggattcac

SEQ ID NO: 769924 - DNA, 15 bp, Homo sapiens
gcgtttggattcaca

SEQ ID NO: 769925 - DNA, 15 bp, Homo sapiens
cgtttggattcacac

SEQ ID NO: 769926 - DNA, 15 bp, Homo sapiens
gtttggattcacact

SEQ ID NO: 769927 - DNA, 15 bp, Homo sapiens
tttggattcacactg

SEQ ID NO: 769928 - DNA, 15 bp, Homo sapiens
ttggattcacactgg

SEQ ID NO: 769929 - DNA, 15 bp, Homo sapiens
tggattcacactgga

SEQ ID NO: 769930 - DNA, 15 bp, Homo sapiens
ggattcacactggat

SEQ ID NO: 769931 - DNA, 15 bp, Homo sapiens
gattcacactggatg

SEQ ID NO: 769932 - DNA, 15 bp, Homo sapiens
attcacactggatgg

SEQ ID NO: 769933 - DNA, 15 bp, Homo sapiens
ttcacactggatggt

SEQ ID NO: 769934 - DNA, 15 bp, Homo sapiens
tcacactggatggtc

SEQ ID NO: 769935 - DNA, 15 bp, Homo sapiens
cacactggatggtca

SEQ ID NO: 769936 - DNA, 15 bp, Homo sapiens
acactggatggtcag

SEQ ID NO: 769937 - DNA, 15 bp, Homo sapiens
cactggatggtcagg

SEQ ID NO: 769938 - DNA, 15 bp, Homo sapiens
actggatggtcagga

SEQ ID NO: 769939 - DNA, 15 bp, Homo sapiens
ctggatggtcaggag

SEQ ID NO: 769940 - DNA, 15 bp, Homo sapiens
tggatggtcaggagc

SEQ ID NO: 769941 - DNA, 15 bp, Homo sapiens
ggatggtcaggagcc

SEQ ID NO: 769942 - DNA, 15 bp, Homo sapiens
gatggtcaggagccc

SEQ ID NO: 769943 - DNA, 15 bp, Homo sapiens
atggtcaggagcccc

SEQ ID NO: 769944 - DNA, 15 bp, Homo sapiens
tggtcaggagcccca

SEQ ID NO: 769945 - DNA, 15 bp, Homo sapiens
ggtcaggagccccag

SEQ ID NO: 769946 - DNA, 15 bp, Homo sapiens
gtcaggagccccagg

SEQ ID NO: 769947 - DNA, 15 bp, Homo sapiens
tcaggagccccaggt

SEQ ID NO: 769948 - DNA, 15 bp, Homo sapiens
caggagccccaggta

SEQ ID NO: 769949 - DNA, 15 bp, Homo sapiens
aggagccccaggtac

SEQ ID NO: 769950 - DNA, 15 bp, Homo sapiens
ggagccccaggtacc

SEQ ID NO: 769951 - DNA, 15 bp, Homo sapiens
gagccccaggtacca

SEQ ID NO: 769952 - DNA, 15 bp, Homo sapiens
agccccaggtaccaa

SEQ ID NO: 769953 - DNA, 15 bp, Homo sapiens
gccccaggtaccaaa

SEQ ID NO: 769954 - DNA, 15 bp, Homo sapiens
ccccaggtaccaaag

SEQ ID NO: 769955 - DNA, 15 bp, Homo sapiens
cccaggtaccaaagt

SEQ ID NO: 769956 - DNA, 15 bp, Homo sapiens
ccaggtaccaaagtc

SEQ ID NO: 769957 - DNA, 15 bp, Homo sapiens
caggtaccaaagtca

SEQ ID NO: 769958 - DNA, 15 bp, Homo sapiens
aggtaccaaagtcaa

SEQ ID NO: 769959 - DNA, 15 bp, Homo sapiens
ggtaccaaagtcaaa

SEQ ID NO: 769960 - DNA, 15 bp, Homo sapiens
gtaccaaagtcaaac

SEQ ID NO: 769961 - DNA, 15 bp, Homo sapiens
taccaaagtcaaaca

SEQ ID NO: 769962 - DNA, 15 bp, Homo sapiens
accaaagtcaaacat

SEQ ID NO: 769963 - DNA, 15 bp, Homo sapiens
ccaaagtcaaacatg

SEQ ID NO: 769964 - DNA, 15 bp, Homo sapiens
caaagtcaaacatgc

SEQ ID NO: 769965 - DNA, 15 bp, Homo sapiens
aaagtcaaacatgct

SEQ ID NO: 769966 - DNA, 15 bp, Homo sapiens
aagtcaaacatgctg

SEQ ID NO: 769967 - DNA, 15 bp, Homo sapiens
agtcaaacatgctga

SEQ ID NO: 769968 - DNA, 15 bp, Homo sapiens
gtcaaacatgctgac

SEQ ID NO: 769969 - DNA, 15 bp, Homo sapiens
tcaaacatgctgact

SEQ ID NO: 769970 - DNA, 15 bp, Homo sapiens
caaacatgctgactc

SEQ ID NO: 769971 - DNA, 15 bp, Homo sapiens
aaacatgctgactcc

SEQ ID NO: 769972 - DNA, 15 bp, Homo sapiens
aacatgctgactcct

SEQ ID NO: 769973 - DNA, 15 bp, Homo sapiens
acatgctgactcctg

SEQ ID NO: 769974 - DNA, 15 bp, Homo sapiens
catgctgactcctgt

SEQ ID NO: 769975 - DNA, 15 bp, Homo sapiens
atgctgactcctgtg

SEQ ID NO: 769976 - DNA, 15 bp, Homo sapiens
tgctgactcctgtgg

SEQ ID NO: 769977 - DNA, 15 bp, Homo sapiens
gctgactcctgtggc

SEQ ID NO: 769978 - DNA, 15 bp, Homo sapiens
ctgactcctgtggcc

SEQ ID NO: 769979 - DNA, 15 bp, Homo sapiens
tgactcctgtggcca

SEQ ID NO: 769980 - DNA, 15 bp, Homo sapiens
gactcctgtggccac

SEQ ID NO: 769981 - DNA, 15 bp, Homo sapiens
actcctgtggccacc

SEQ ID NO: 769982 - DNA, 15 bp, Homo sapiens
ctcctgtggccacct

SEQ ID NO: 769983 - DNA, 15 bp, Homo sapiens
tcctgtggccacctg

SEQ ID NO: 769984 - DNA, 15 bp, Homo sapiens
cctgtggccacctgg

SEQ ID NO: 769985 - DNA, 15 bp, Homo sapiens
ctgtggccacctggt

SEQ ID NO: 769986 - DNA, 15 bp, Homo sapiens
tgtggccacctggtc

SEQ ID NO: 769987 - DNA, 15 bp, Homo sapiens
gtggccacctggtca

SEQ ID NO: 769988 - DNA, 15 bp, Homo sapiens
tggccacctggtcat

SEQ ID NO: 769989 - DNA, 15 bp, Homo sapiens
ggccacctggtcatt

SEQ ID NO: 769990 - DNA, 15 bp, Homo sapiens
gccacctggtcattc

SEQ ID NO: 769991 - DNA, 15 bp, Homo sapiens
ccacctggtcattcc

SEQ ID NO: 769992 - DNA, 15 bp, Homo sapiens
cacctggtcattcct

SEQ ID NO: 769993 - DNA, 15 bp, Homo sapiens
acctggtcattcctc

SEQ ID NO: 769994 - DNA, 15 bp, Homo sapiens
cctggtcattcctct

SEQ ID NO: 769995 - DNA, 15 bp, Homo sapiens
ctggtcattcctctt

SEQ ID NO: 769996 - DNA, 15 bp, Homo sapiens
tggtcattcctcttg

SEQ ID NO: 769997 - DNA, 15 bp, Homo sapiens
ggtcattcctcttgg

SEQ ID NO: 769998 - DNA, 15 bp, Homo sapiens
gtcattcctcttggg

SEQ ID NO: 769999 - DNA, 15 bp, Homo sapiens
tcattcctcttgggt

SEQ ID NO: 770000 - DNA, 15 bp, Homo sapiens
cattcctcttgggtg

SEQ ID NO: 770001 - DNA, 15 bp, Homo sapiens
attcctcttgggtgt

SEQ ID NO: 770002 - DNA, 15 bp, Homo sapiens
ttcctcttgggtgtg

SEQ ID NO: 770003 - DNA, 15 bp, Homo sapiens
tcctcttgggtgtga

SEQ ID NO: 770004 - DNA, 15 bp, Homo sapiens
cctcttgggtgtgaa

SEQ ID NO: 770005 - DNA, 15 bp, Homo sapiens
ctcttgggtgtgaag

SEQ ID NO: 770006 - DNA, 15 bp, Homo sapiens
tcttgggtgtgaagg

SEQ ID NO: 770007 - DNA, 15 bp, Homo sapiens
cttgggtgtgaagga

SEQ ID NO: 770008 - DNA, 15 bp, Homo sapiens
ttgggtgtgaaggag

SEQ ID NO: 770009 - DNA, 15 bp, Homo sapiens
tgggtgtgaaggagg

SEQ ID NO: 770010 - DNA, 15 bp, Homo sapiens
gggtgtgaaggagga

SEQ ID NO: 770011 - DNA, 15 bp, Homo sapiens
ggtgtgaaggaggag

SEQ ID NO: 770012 - DNA, 15 bp, Homo sapiens
gtgtgaaggaggagg

SEQ ID NO: 770013 - DNA, 15 bp, Homo sapiens
tgtgaaggaggagga

SEQ ID NO: 770014 - DNA, 15 bp, Homo sapiens
gtgaaggaggaggag

SEQ ID NO: 770015 - DNA, 15 bp, Homo sapiens
tgaaggaggaggagg

SEQ ID NO: 770016 - DNA, 15 bp, Homo sapiens
gaaggaggaggaggg

SEQ ID NO: 770017 - DNA, 15 bp, Homo sapiens
aaggaggaggagggg

SEQ ID NO: 770018 - DNA, 15 bp, Homo sapiens
aggaggaggagggga

SEQ ID NO: 770019 - DNA, 15 bp, Homo sapiens
ggaggaggaggggag

SEQ ID NO: 770020 - DNA, 15 bp, Homo sapiens
gaggaggaggggagc

SEQ ID NO: 770021 - DNA, 15 bp, Homo sapiens
aggaggaggggagcg

SEQ ID NO: 770022 - DNA, 15 bp, Homo sapiens
ggaggaggggagcgt

SEQ ID NO: 770023 - DNA, 15 bp, Homo sapiens
gaggaggggagcgtg

SEQ ID NO: 770024 - DNA, 15 bp, Homo sapiens
aggaggggagcgtgg

SEQ ID NO: 770025 - DNA, 15 bp, Homo sapiens
ggaggggagcgtgga

SEQ ID NO: 770026 - DNA, 15 bp, Homo sapiens
gaggggagcgtggag

SEQ ID NO: 770027 - DNA, 15 bp, Homo sapiens
aggggagcgtggaga

SEQ ID NO: 770028 - DNA, 15 bp, Homo sapiens
ggggagcgtggagaa

SEQ ID NO: 770029 - DNA, 15 bp, Homo sapiens
gggagcgtggagaaa

SEQ ID NO: 770030 - DNA, 15 bp, Homo sapiens
ggagcgtggagaaac

SEQ ID NO: 770031 - DNA, 15 bp, Homo sapiens
gagcgtggagaaacc

SEQ ID NO: 770032 - DNA, 15 bp, Homo sapiens
agcgtggagaaacca

SEQ ID NO: 770033 - DNA, 15 bp, Homo sapiens
gcgtggagaaaccaa

SEQ ID NO: 770034 - DNA, 15 bp, Homo sapiens
cgtggagaaaccaac

SEQ ID NO: 770035 - DNA, 15 bp, Homo sapiens
gtggagaaaccaaca

SEQ ID NO: 770036 - DNA, 15 bp, Homo sapiens
tggagaaaccaacaa

SEQ ID NO: 770037 - DNA, 15 bp, Homo sapiens
ggagaaaccaacaac

SEQ ID NO: 770038 - DNA, 15 bp, Homo sapiens
gagaaaccaacaact

SEQ ID NO: 770039 - DNA, 15 bp, Homo sapiens
agaaaccaacaactt

SEQ ID NO: 770040 - DNA, 15 bp, Homo sapiens
gaaaccaacaactta

SEQ ID NO: 770041 - DNA, 15 bp, Homo sapiens
aaaccaacaacttag

SEQ ID NO: 770042 - DNA, 15 bp, Homo sapiens
aaccaacaacttagc

SEQ ID NO: 770043 - DNA, 15 bp, Homo sapiens
accaacaacttagca

SEQ ID NO: 770044 - DNA, 15 bp, Homo sapiens
ccaacaacttagcaa

SEQ ID NO: 770045 - DNA, 15 bp, Homo sapiens
caacaacttagcaaa

SEQ ID NO: 770046 - DNA, 15 bp, Homo sapiens
aacaacttagcaaat

SEQ ID NO: 770047 - DNA, 15 bp, Homo sapiens
acaacttagcaaatg

SEQ ID NO: 770048 - DNA, 15 bp, Homo sapiens
caacttagcaaatgt

SEQ ID NO: 770049 - DNA, 15 bp, Homo sapiens
aacttagcaaatgtg

SEQ ID NO: 770050 - DNA, 15 bp, Homo sapiens
acttagcaaatgtgt

SEQ ID NO: 770051 - DNA, 15 bp, Homo sapiens
cttagcaaatgtgtg

SEQ ID NO: 770052 - DNA, 15 bp, Homo sapiens
ttagcaaatgtgtgc

SEQ ID NO: 770053 - DNA, 15 bp, Homo sapiens
tagcaaatgtgtgct

SEQ ID NO: 770054 - DNA, 15 bp, Homo sapiens
agcaaatgtgtgctg

SEQ ID NO: 770055 - DNA, 15 bp, Homo sapiens
gcaaatgtgtgctga

SEQ ID NO: 770056 - DNA, 15 bp, Homo sapiens
caaatgtgtgctgag

SEQ ID NO: 770057 - DNA, 15 bp, Homo sapiens
aaatgtgtgctgagt

SEQ ID NO: 770058 - DNA, 15 bp, Homo sapiens
aatgtgtgctgagtc

SEQ ID NO: 770059 - DNA, 15 bp, Homo sapiens
atgtgtgctgagtcc

SEQ ID NO: 770060 - DNA, 15 bp, Homo sapiens
tgtgtgctgagtccc

SEQ ID NO: 770061 - DNA, 15 bp, Homo sapiens
gtgtgctgagtccca

SEQ ID NO: 770062 - DNA, 15 bp, Homo sapiens
tgtgctgagtcccat

SEQ ID NO: 770063 - DNA, 15 bp, Homo sapiens
gtgctgagtcccatg

SEQ ID NO: 770064 - DNA, 15 bp, Homo sapiens
tgctgagtcccatgc

SEQ ID NO: 770065 - DNA, 15 bp, Homo sapiens
gctgagtcccatgca

SEQ ID NO: 770066 - DNA, 15 bp, Homo sapiens
ctgagtcccatgcat

SEQ ID NO: 770067 - DNA, 15 bp, Homo sapiens
tgagtcccatgcata

SEQ ID NO: 770068 - DNA, 15 bp, Homo sapiens
gagtcccatgcatat

SEQ ID NO: 770069 - DNA, 15 bp, Homo sapiens
agtcccatgcatata

SEQ ID NO: 770070 - DNA, 15 bp, Homo sapiens
gtcccatgcatatag

SEQ ID NO: 770071 - DNA, 15 bp, Homo sapiens
tcccatgcatatagg

SEQ ID NO: 770072 - DNA, 15 bp, Homo sapiens
cccatgcatataggt

SEQ ID NO: 770073 - DNA, 15 bp, Homo sapiens
ccatgcatataggtg

SEQ ID NO: 770074 - DNA, 15 bp, Homo sapiens
catgcatataggtga

SEQ ID NO: 770075 - DNA, 15 bp, Homo sapiens
atgcatataggtgat

SEQ ID NO: 770076 - DNA, 15 bp, Homo sapiens
tgcatataggtgatg

SEQ ID NO: 770077 - DNA, 15 bp, Homo sapiens
gcatataggtgatgg

SEQ ID NO: 770078 - DNA, 15 bp, Homo sapiens
catataggtgatggg

SEQ ID NO: 770079 - DNA, 15 bp, Homo sapiens
atataggtgatggga

SEQ ID NO: 770080 - DNA, 15 bp, Homo sapiens
tataggtgatgggag

SEQ ID NO: 770081 - DNA, 15 bp, Homo sapiens
ataggtgatgggagt

SEQ ID NO: 770082 - DNA, 15 bp, Homo sapiens
taggtgatgggagtt

SEQ ID NO: 770083 - DNA, 15 bp, Homo sapiens
aggtgatgggagttg

SEQ ID NO: 770084 - DNA, 15 bp, Homo sapiens
ggtgatgggagttgg

SEQ ID NO: 770085 - DNA, 15 bp, Homo sapiens
gtgatgggagttgga

SEQ ID NO: 770086 - DNA, 15 bp, Homo sapiens
tgatgggagttggac

SEQ ID NO: 770087 - DNA, 15 bp, Homo sapiens
gatgggagttggact

SEQ ID NO: 770088 - DNA, 15 bp, Homo sapiens
atgggagttggactc

SEQ ID NO: 770089 - DNA, 15 bp, Homo sapiens
tgggagttggactca

SEQ ID NO: 770090 - DNA, 15 bp, Homo sapiens
gggagttggactcag

SEQ ID NO: 770091 - DNA, 15 bp, Homo sapiens
ggagttggactcaga

SEQ ID NO: 770092 - DNA, 15 bp, Homo sapiens
gagttggactcagag

SEQ ID NO: 770093 - DNA, 15 bp, Homo sapiens
agttggactcagaga

SEQ ID NO: 770094 - DNA, 15 bp, Homo sapiens
gttggactcagagaa

SEQ ID NO: 770095 - DNA, 15 bp, Homo sapiens
ttggactcagagaaa

SEQ ID NO: 770096 - DNA, 15 bp, Homo sapiens
tggactcagagaaaa

SEQ ID NO: 770097 - DNA, 15 bp, Homo sapiens
ggactcagagaaaag

SEQ ID NO: 770098 - DNA, 15 bp, Homo sapiens
gactcagagaaaagc

SEQ ID NO: 770099 - DNA, 15 bp, Homo sapiens
actcagagaaaagct

SEQ ID NO: 770100 - DNA, 15 bp, Homo sapiens
ctcagagaaaagctg

SEQ ID NO: 770101 - DNA, 15 bp, Homo sapiens
tcagagaaaagctgc

SEQ ID NO: 770102 - DNA, 15 bp, Homo sapiens
cagagaaaagctgcc

SEQ ID NO: 770103 - DNA, 15 bp, Homo sapiens
agagaaaagctgcca

SEQ ID NO: 770104 - DNA, 15 bp, Homo sapiens
gagaaaagctgccag

SEQ ID NO: 770105 - DNA, 15 bp, Homo sapiens
agaaaagctgccagt

SEQ ID NO: 770106 - DNA, 15 bp, Homo sapiens
gaaaagctgccagta

SEQ ID NO: 770107 - DNA, 15 bp, Homo sapiens
aaaagctgccagtaa

SEQ ID NO: 770108 - DNA, 15 bp, Homo sapiens
aaagctgccagtaac

SEQ ID NO: 770109 - DNA, 15 bp, Homo sapiens
aagctgccagtaaca

SEQ ID NO: 770110 - DNA, 15 bp, Homo sapiens
agctgccagtaacac

SEQ ID NO: 770111 - DNA, 15 bp, Homo sapiens
gctgccagtaacacc

SEQ ID NO: 770112 - DNA, 15 bp, Homo sapiens
ctgccagtaacaccc

SEQ ID NO: 770113 - DNA, 15 bp, Homo sapiens
tgccagtaacacccc

SEQ ID NO: 770114 - DNA, 15 bp, Homo sapiens
gccagtaacacccct

SEQ ID NO: 770115 - DNA, 15 bp, Homo sapiens
ccagtaacacccctt

SEQ ID NO: 770116 - DNA, 15 bp, Homo sapiens
cagtaacacccctta

SEQ ID NO: 770117 - DNA, 15 bp, Homo sapiens
agtaacaccccttag

SEQ ID NO: 770118 - DNA, 15 bp, Homo sapiens
gtaacaccccttagc

SEQ ID NO: 770119 - DNA, 15 bp, Homo sapiens
taacaccccttagca

SEQ ID NO: 770120 - DNA, 15 bp, Homo sapiens
aacaccccttagcaa

SEQ ID NO: 770121 - DNA, 15 bp, Homo sapiens
acaccccttagcaag

SEQ ID NO: 770122 - DNA, 15 bp, Homo sapiens
caccccttagcaagc

SEQ ID NO: 770123 - DNA, 15 bp, Homo sapiens
accccttagcaagca

SEQ ID NO: 770124 - DNA, 15 bp, Homo sapiens
ccccttagcaagcac

SEQ ID NO: 770125 - DNA, 15 bp, Homo sapiens
cccttagcaagcact

SEQ ID NO: 770126 - DNA, 15 bp, Homo sapiens
ccttagcaagcactt

SEQ ID NO: 770127 - DNA, 15 bp, Homo sapiens
cttagcaagcacttg

SEQ ID NO: 770128 - DNA, 15 bp, Homo sapiens
ttagcaagcacttgc

SEQ ID NO: 770129 - DNA, 15 bp, Homo sapiens
tagcaagcacttgct

SEQ ID NO: 770130 - DNA, 15 bp, Homo sapiens
agcaagcacttgctg

SEQ ID NO: 770131 - DNA, 15 bp, Homo sapiens
gcaagcacttgctgt

SEQ ID NO: 770132 - DNA, 15 bp, Homo sapiens
caagcacttgctgtg

SEQ ID NO: 770133 - DNA, 15 bp, Homo sapiens
aagcacttgctgtgt

SEQ ID NO: 770134 - DNA, 15 bp, Homo sapiens
agcacttgctgtgtg

SEQ ID NO: 770135 - DNA, 15 bp, Homo sapiens
gcacttgctgtgtgc

SEQ ID NO: 770136 - DNA, 15 bp, Homo sapiens
cacttgctgtgtgcc

SEQ ID NO: 770137 - DNA, 15 bp, Homo sapiens
acttgctgtgtgcca

SEQ ID NO: 770138 - DNA, 15 bp, Homo sapiens
cttgctgtgtgccag

SEQ ID NO: 770139 - DNA, 15 bp, Homo sapiens
ttgctgtgtgccagg

SEQ ID NO: 770140 - DNA, 15 bp, Homo sapiens
tgctgtgtgccaggc

SEQ ID NO: 770141 - DNA, 15 bp, Homo sapiens
gctgtgtgccaggct

SEQ ID NO: 770142 - DNA, 15 bp, Homo sapiens
ctgtgtgccaggctc

SEQ ID NO: 770143 - DNA, 15 bp, Homo sapiens
tgtgtgccaggctct

SEQ ID NO: 770144 - DNA, 15 bp, Homo sapiens
gtgtgccaggctcta

SEQ ID NO: 770145 - DNA, 15 bp, Homo sapiens
tgtgccaggctctag

SEQ ID NO: 770146 - DNA, 15 bp, Homo sapiens
gtgccaggctctaga

SEQ ID NO: 770147 - DNA, 15 bp, Homo sapiens
tgccaggctctagat

SEQ ID NO: 770148 - DNA, 15 bp, Homo sapiens
gccaggctctagatg

SEQ ID NO: 770149 - DNA, 15 bp, Homo sapiens
ccaggctctagatga

SEQ ID NO: 770150 - DNA, 15 bp, Homo sapiens
caggctctagatgac

SEQ ID NO: 770151 - DNA, 15 bp, Homo sapiens
aggctctagatgaca

SEQ ID NO: 770152 - DNA, 15 bp, Homo sapiens
ggctctagatgacaa

SEQ ID NO: 770153 - DNA, 15 bp, Homo sapiens
gctctagatgacaac

SEQ ID NO: 770154 - DNA, 15 bp, Homo sapiens
ctctagatgacaacc

SEQ ID NO: 770155 - DNA, 15 bp, Homo sapiens
tctagatgacaacct

SEQ ID NO: 770156 - DNA, 15 bp, Homo sapiens
ctagatgacaacctt

SEQ ID NO: 770157 - DNA, 15 bp, Homo sapiens
tagatgacaaccttt

SEQ ID NO: 770158 - DNA, 15 bp, Homo sapiens
agatgacaaccttta

SEQ ID NO: 770159 - DNA, 15 bp, Homo sapiens
gatgacaacctttac

SEQ ID NO: 770160 - DNA, 15 bp, Homo sapiens
atgacaacctttacc

SEQ ID NO: 770161 - DNA, 15 bp, Homo sapiens
tgacaacctttacct

SEQ ID NO: 770162 - DNA, 15 bp, Homo sapiens
gacaacctttacctg

SEQ ID NO: 770163 - DNA, 15 bp, Homo sapiens
acaacctttacctgc

SEQ ID NO: 770164 - DNA, 15 bp, Homo sapiens
caacctttacctgct

SEQ ID NO: 770165 - DNA, 15 bp, Homo sapiens
aacctttacctgctc

SEQ ID NO: 770166 - DNA, 15 bp, Homo sapiens
acctttacctgctct

SEQ ID NO: 770167 - DNA, 15 bp, Homo sapiens
cctttacctgctctc

SEQ ID NO: 770168 - DNA, 15 bp, Homo sapiens
ctttacctgctctct

SEQ ID NO: 770169 - DNA, 15 bp, Homo sapiens
tttacctgctctctc

SEQ ID NO: 770170 - DNA, 15 bp, Homo sapiens
ttacctgctctctcg

SEQ ID NO: 770171 - DNA, 15 bp, Homo sapiens
tacctgctctctcga

SEQ ID NO: 770172 - DNA, 15 bp, Homo sapiens
acctgctctctcgat

SEQ ID NO: 770173 - DNA, 15 bp, Homo sapiens
cctgctctctcgata

SEQ ID NO: 770174 - DNA, 15 bp, Homo sapiens
ctgctctctcgatag

SEQ ID NO: 770175 - DNA, 15 bp, Homo sapiens
tgctctctcgatagg

SEQ ID NO: 770176 - DNA, 15 bp, Homo sapiens
gctctctcgataggt

SEQ ID NO: 770177 - DNA, 15 bp, Homo sapiens
ctctctcgataggtc

SEQ ID NO: 770178 - DNA, 15 bp, Homo sapiens
tctctcgataggtcc

SEQ ID NO: 770179 - DNA, 15 bp, Homo sapiens
ctctcgataggtcct

SEQ ID NO: 770180 - DNA, 15 bp, Homo sapiens
tctcgataggtcctc

SEQ ID NO: 770181 - DNA, 15 bp, Homo sapiens
ctcgataggtcctca

SEQ ID NO: 770182 - DNA, 15 bp, Homo sapiens
tcgataggtcctcat

SEQ ID NO: 770183 - DNA, 15 bp, Homo sapiens
cgataggtcctcata

SEQ ID NO: 770184 - DNA, 15 bp, Homo sapiens
gataggtcctcataa

SEQ ID NO: 770185 - DNA, 15 bp, Homo sapiens
ataggtcctcataag

SEQ ID NO: 770186 - DNA, 15 bp, Homo sapiens
taggtcctcataagc

SEQ ID NO: 770187 - DNA, 15 bp, Homo sapiens
aggtcctcataagca

SEQ ID NO: 770188 - DNA, 15 bp, Homo sapiens
ggtcctcataagcag

SEQ ID NO: 770189 - DNA, 15 bp, Homo sapiens
gtcctcataagcagt

SEQ ID NO: 770190 - DNA, 15 bp, Homo sapiens
tcctcataagcagtc

SEQ ID NO: 770191 - DNA, 15 bp, Homo sapiens
cctcataagcagtcc

SEQ ID NO: 770192 - DNA, 15 bp, Homo sapiens
ctcataagcagtccc

SEQ ID NO: 770193 - DNA, 15 bp, Homo sapiens
tcataagcagtccct

SEQ ID NO: 770194 - DNA, 15 bp, Homo sapiens
cataagcagtcccta

SEQ ID NO: 770195 - DNA, 15 bp, Homo sapiens
ataagcagtccctag

SEQ ID NO: 770196 - DNA, 15 bp, Homo sapiens
taagcagtccctaga

SEQ ID NO: 770197 - DNA, 15 bp, Homo sapiens
aagcagtccctagag

SEQ ID NO: 770198 - DNA, 15 bp, Homo sapiens
agcagtccctagagg

SEQ ID NO: 770199 - DNA, 15 bp, Homo sapiens
gcagtccctagaggt

SEQ ID NO: 770200 - DNA, 15 bp, Homo sapiens
cagtccctagaggtc

SEQ ID NO: 770201 - DNA, 15 bp, Homo sapiens
agtccctagaggtca

SEQ ID NO: 770202 - DNA, 15 bp, Homo sapiens
gtccctagaggtcag

SEQ ID NO: 770203 - DNA, 15 bp, Homo sapiens
tccctagaggtcagt

SEQ ID NO: 770204 - DNA, 15 bp, Homo sapiens
ccctagaggtcagta

SEQ ID NO: 770205 - DNA, 15 bp, Homo sapiens
cctagaggtcagtat

SEQ ID NO: 770206 - DNA, 15 bp, Homo sapiens
ctagaggtcagtatc

SEQ ID NO: 770207 - DNA, 15 bp, Homo sapiens
tagaggtcagtatcg

SEQ ID NO: 770208 - DNA, 15 bp, Homo sapiens
agaggtcagtatcgt

SEQ ID NO: 770209 - DNA, 15 bp, Homo sapiens
gaggtcagtatcgtt

SEQ ID NO: 770210 - DNA, 15 bp, Homo sapiens
aggtcagtatcgtta

SEQ ID NO: 770211 - DNA, 15 bp, Homo sapiens
ggtcagtatcgttat

SEQ ID NO: 770212 - DNA, 15 bp, Homo sapiens
gtcagtatcgttatt

SEQ ID NO: 770213 - DNA, 15 bp, Homo sapiens
tcagtatcgttattg

SEQ ID NO: 770214 - DNA, 15 bp, Homo sapiens
cagtatcgttattgt

SEQ ID NO: 770215 - DNA, 15 bp, Homo sapiens
agtatcgttattgtg

SEQ ID NO: 770216 - DNA, 15 bp, Homo sapiens
gtatcgttattgtgc

SEQ ID NO: 770217 - DNA, 15 bp, Homo sapiens
tatcgttattgtgcc

SEQ ID NO: 770218 - DNA, 15 bp, Homo sapiens
atcgttattgtgccc

SEQ ID NO: 770219 - DNA, 15 bp, Homo sapiens
tcgttattgtgccca

SEQ ID NO: 770220 - DNA, 15 bp, Homo sapiens
cgttattgtgcccat

SEQ ID NO: 770221 - DNA, 15 bp, Homo sapiens
gttattgtgcccatt

SEQ ID NO: 770222 - DNA, 15 bp, Homo sapiens
ttattgtgcccattg

SEQ ID NO: 770223 - DNA, 15 bp, Homo sapiens
tattgtgcccattgt

SEQ ID NO: 770224 - DNA, 15 bp, Homo sapiens
attgtgcccattgta

SEQ ID NO: 770225 - DNA, 15 bp, Homo sapiens
ttgtgcccattgtac

SEQ ID NO: 770226 - DNA, 15 bp, Homo sapiens
tgtgcccattgtaca

SEQ ID NO: 770227 - DNA, 15 bp, Homo sapiens
gtgcccattgtacag

SEQ ID NO: 770228 - DNA, 15 bp, Homo sapiens
tgcccattgtacagg

SEQ ID NO: 770229 - DNA, 15 bp, Homo sapiens
gcccattgtacaggt

SEQ ID NO: 770230 - DNA, 15 bp, Homo sapiens
cccattgtacaggtg

SEQ ID NO: 770231 - DNA, 15 bp, Homo sapiens
ccattgtacaggtgg

SEQ ID NO: 770232 - DNA, 15 bp, Homo sapiens
cattgtacaggtggg

SEQ ID NO: 770233 - DNA, 15 bp, Homo sapiens
attgtacaggtgggg

SEQ ID NO: 770234 - DNA, 15 bp, Homo sapiens
ttgtacaggtgggga

SEQ ID NO: 770235 - DNA, 15 bp, Homo sapiens
tgtacaggtggggaa

SEQ ID NO: 770236 - DNA, 15 bp, Homo sapiens
gtacaggtggggaag

SEQ ID NO: 770237 - DNA, 15 bp, Homo sapiens
tacaggtggggaagc

SEQ ID NO: 770238 - DNA, 15 bp, Homo sapiens
acaggtggggaagct

SEQ ID NO: 770239 - DNA, 15 bp, Homo sapiens
caggtggggaagctg

SEQ ID NO: 770240 - DNA, 15 bp, Homo sapiens
aggtggggaagctga

SEQ ID NO: 770241 - DNA, 15 bp, Homo sapiens
ggtggggaagctgag

SEQ ID NO: 770242 - DNA, 15 bp, Homo sapiens
gtggggaagctgagg

SEQ ID NO: 770243 - DNA, 15 bp, Homo sapiens
tggggaagctgaggc

SEQ ID NO: 770244 - DNA, 15 bp, Homo sapiens
ggggaagctgaggca

SEQ ID NO: 770245 - DNA, 15 bp, Homo sapiens
gggaagctgaggcac

SEQ ID NO: 770246 - DNA, 15 bp, Homo sapiens
ggaagctgaggcact

SEQ ID NO: 770247 - DNA, 15 bp, Homo sapiens
gaagctgaggcactg

SEQ ID NO: 770248 - DNA, 15 bp, Homo sapiens
aagctgaggcactga

SEQ ID NO: 770249 - DNA, 15 bp, Homo sapiens
agctgaggcactgag

SEQ ID NO: 770250 - DNA, 15 bp, Homo sapiens
gctgaggcactgagc

SEQ ID NO: 770251 - DNA, 15 bp, Homo sapiens
ctgaggcactgagca

SEQ ID NO: 770252 - DNA, 15 bp, Homo sapiens
tgaggcactgagcaa

SEQ ID NO: 770253 - DNA, 15 bp, Homo sapiens
gaggcactgagcaat

SEQ ID NO: 770254 - DNA, 15 bp, Homo sapiens
aggcactgagcaatg

SEQ ID NO: 770255 - DNA, 15 bp, Homo sapiens
ggcactgagcaatga

SEQ ID NO: 770256 - DNA, 15 bp, Homo sapiens
gcactgagcaatgaa

SEQ ID NO: 770257 - DNA, 15 bp, Homo sapiens
cactgagcaatgaaa

SEQ ID NO: 770258 - DNA, 15 bp, Homo sapiens
actgagcaatgaaac

SEQ ID NO: 770259 - DNA, 15 bp, Homo sapiens
ctgagcaatgaaacc

SEQ ID NO: 770260 - DNA, 15 bp, Homo sapiens
tgagcaatgaaacct

SEQ ID NO: 770261 - DNA, 15 bp, Homo sapiens
gagcaatgaaacctc

SEQ ID NO: 770262 - DNA, 15 bp, Homo sapiens
agcaatgaaacctct

SEQ ID NO: 770263 - DNA, 15 bp, Homo sapiens
gcaatgaaacctctt

SEQ ID NO: 770264 - DNA, 15 bp, Homo sapiens
caatgaaacctcttg

SEQ ID NO: 770265 - DNA, 15 bp, Homo sapiens
aatgaaacctcttgc

SEQ ID NO: 770266 - DNA, 15 bp, Homo sapiens
atgaaacctcttgcc

SEQ ID NO: 770267 - DNA, 15 bp, Homo sapiens
tgaaacctcttgccc

SEQ ID NO: 770268 - DNA, 15 bp, Homo sapiens
gaaacctcttgccca

SEQ ID NO: 770269 - DNA, 15 bp, Homo sapiens
aaacctcttgcccat

SEQ ID NO: 770270 - DNA, 15 bp, Homo sapiens
aacctcttgcccatg

SEQ ID NO: 770271 - DNA, 15 bp, Homo sapiens
acctcttgcccatga

SEQ ID NO: 770272 - DNA, 15 bp, Homo sapiens
cctcttgcccatgat

SEQ ID NO: 770273 - DNA, 15 bp, Homo sapiens
ctcttgcccatgatc

SEQ ID NO: 770274 - DNA, 15 bp, Homo sapiens
tcttgcccatgatct

SEQ ID NO: 770275 - DNA, 15 bp, Homo sapiens
cttgcccatgatctt

SEQ ID NO: 770276 - DNA, 15 bp, Homo sapiens
ttgcccatgatctta

SEQ ID NO: 770277 - DNA, 15 bp, Homo sapiens
tgcccatgatcttac

SEQ ID NO: 770278 - DNA, 15 bp, Homo sapiens
gcccatgatcttaca

SEQ ID NO: 770279 - DNA, 15 bp, Homo sapiens
cccatgatcttacaa

SEQ ID NO: 770280 - DNA, 15 bp, Homo sapiens
ccatgatcttacaac

SEQ ID NO: 770281 - DNA, 15 bp, Homo sapiens
catgatcttacaact

SEQ ID NO: 770282 - DNA, 15 bp, Homo sapiens
atgatcttacaacta

SEQ ID NO: 770283 - DNA, 15 bp, Homo sapiens
tgatcttacaactag

SEQ ID NO: 770284 - DNA, 15 bp, Homo sapiens
gatcttacaactagt

SEQ ID NO: 770285 - DNA, 15 bp, Homo sapiens
atcttacaactagta

SEQ ID NO: 770286 - DNA, 15 bp, Homo sapiens
tcttacaactagtaa

SEQ ID NO: 770287 - DNA, 15 bp, Homo sapiens
cttacaactagtaaa

SEQ ID NO: 770288 - DNA, 15 bp, Homo sapiens
ttacaactagtaaag

SEQ ID NO: 770289 - DNA, 15 bp, Homo sapiens
tacaactagtaaagt

SEQ ID NO: 770290 - DNA, 15 bp, Homo sapiens
acaactagtaaagta

SEQ ID NO: 770291 - DNA, 15 bp, Homo sapiens
caactagtaaagtag

SEQ ID NO: 770292 - DNA, 15 bp, Homo sapiens
aactagtaaagtagc

SEQ ID NO: 770293 - DNA, 15 bp, Homo sapiens
actagtaaagtagca

SEQ ID NO: 770294 - DNA, 15 bp, Homo sapiens
ctagtaaagtagcag

SEQ ID NO: 770295 - DNA, 15 bp, Homo sapiens
tagtaaagtagcaga

SEQ ID NO: 770296 - DNA, 15 bp, Homo sapiens
agtaaagtagcagac

SEQ ID NO: 770297 - DNA, 15 bp, Homo sapiens
gtaaagtagcagacc

SEQ ID NO: 770298 - DNA, 15 bp, Homo sapiens
taaagtagcagaccc

SEQ ID NO: 770299 - DNA, 15 bp, Homo sapiens
aaagtagcagaccca

SEQ ID NO: 770300 - DNA, 15 bp, Homo sapiens
aagtagcagacccaa

SEQ ID NO: 770301 - DNA, 15 bp, Homo sapiens
agtagcagacccaag

SEQ ID NO: 770302 - DNA, 15 bp, Homo sapiens
gtagcagacccaaga

SEQ ID NO: 770303 - DNA, 15 bp, Homo sapiens
tagcagacccaagag

SEQ ID NO: 770304 - DNA, 15 bp, Homo sapiens
agcagacccaagagg

SEQ ID NO: 770305 - DNA, 15 bp, Homo sapiens
gcagacccaagaggc

SEQ ID NO: 770306 - DNA, 15 bp, Homo sapiens
cagacccaagaggcc

SEQ ID NO: 770307 - DNA, 15 bp, Homo sapiens
agacccaagaggcca

SEQ ID NO: 770308 - DNA, 15 bp, Homo sapiens
gacccaagaggccaa

SEQ ID NO: 770309 - DNA, 15 bp, Homo sapiens
acccaagaggccaag

SEQ ID NO: 770310 - DNA, 15 bp, Homo sapiens
cccaagaggccaagc

SEQ ID NO: 770311 - DNA, 15 bp, Homo sapiens
ccaagaggccaagcc

SEQ ID NO: 770312 - DNA, 15 bp, Homo sapiens
caagaggccaagcca

SEQ ID NO: 770313 - DNA, 15 bp, Homo sapiens
aagaggccaagccag

SEQ ID NO: 770314 - DNA, 15 bp, Homo sapiens
agaggccaagccagg

SEQ ID NO: 770315 - DNA, 15 bp, Homo sapiens
gaggccaagccaggc

SEQ ID NO: 770316 - DNA, 15 bp, Homo sapiens
aggccaagccaggct

SEQ ID NO: 770317 - DNA, 15 bp, Homo sapiens
ggccaagccaggctc

SEQ ID NO: 770318 - DNA, 15 bp, Homo sapiens
gccaagccaggctca

SEQ ID NO: 770319 - DNA, 15 bp, Homo sapiens
ccaagccaggctcat

SEQ ID NO: 770320 - DNA, 15 bp, Homo sapiens
caagccaggctcatc

SEQ ID NO: 770321 - DNA, 15 bp, Homo sapiens
aagccaggctcatct

SEQ ID NO: 770322 - DNA, 15 bp, Homo sapiens
agccaggctcatctg

SEQ ID NO: 770323 - DNA, 15 bp, Homo sapiens
gccaggctcatctga

SEQ ID NO: 770324 - DNA, 15 bp, Homo sapiens
ccaggctcatctgac

SEQ ID NO: 770325 - DNA, 15 bp, Homo sapiens
caggctcatctgact

SEQ ID NO: 770326 - DNA, 15 bp, Homo sapiens
aggctcatctgactt

SEQ ID NO: 770327 - DNA, 15 bp, Homo sapiens
ggctcatctgacttc

SEQ ID NO: 770328 - DNA, 15 bp, Homo sapiens
gctcatctgacttcc

SEQ ID NO: 770329 - DNA, 15 bp, Homo sapiens
ctcatctgacttcca

SEQ ID NO: 770330 - DNA, 15 bp, Homo sapiens
tcatctgacttccat

SEQ ID NO: 770331 - DNA, 15 bp, Homo sapiens
catctgacttccatg

SEQ ID NO: 770332 - DNA, 15 bp, Homo sapiens
atctgacttccatgc

SEQ ID NO: 770333 - DNA, 15 bp, Homo sapiens
tctgacttccatgcc

SEQ ID NO: 770334 - DNA, 15 bp, Homo sapiens
ctgacttccatgcca

SEQ ID NO: 770335 - DNA, 15 bp, Homo sapiens
tgacttccatgccag

SEQ ID NO: 770336 - DNA, 15 bp, Homo sapiens
gacttccatgccagg

SEQ ID NO: 770337 - DNA, 15 bp, Homo sapiens
acttccatgccaggt

SEQ ID NO: 770338 - DNA, 15 bp, Homo sapiens
cttccatgccaggtc

SEQ ID NO: 770339 - DNA, 15 bp, Homo sapiens
ttccatgccaggtcc

SEQ ID NO: 770340 - DNA, 15 bp, Homo sapiens
tccatgccaggtccc

SEQ ID NO: 770341 - DNA, 15 bp, Homo sapiens
ccatgccaggtccct

SEQ ID NO: 770342 - DNA, 15 bp, Homo sapiens
catgccaggtccctg

SEQ ID NO: 770343 - DNA, 15 bp, Homo sapiens
atgccaggtccctgc

SEQ ID NO: 770344 - DNA, 15 bp, Homo sapiens
tgccaggtccctgct

SEQ ID NO: 770345 - DNA, 15 bp, Homo sapiens
gccaggtccctgcta

SEQ ID NO: 770346 - DNA, 15 bp, Homo sapiens
ccaggtccctgctaa

SEQ ID NO: 770347 - DNA, 15 bp, Homo sapiens
caggtccctgctaag

SEQ ID NO: 770348 - DNA, 15 bp, Homo sapiens
aggtccctgctaaga

SEQ ID NO: 770349 - DNA, 15 bp, Homo sapiens
ggtccctgctaagat

SEQ ID NO: 770350 - DNA, 15 bp, Homo sapiens
gtccctgctaagatt

SEQ ID NO: 770351 - DNA, 15 bp, Homo sapiens
tccctgctaagatta

SEQ ID NO: 770352 - DNA, 15 bp, Homo sapiens
ccctgctaagattag

SEQ ID NO: 770353 - DNA, 15 bp, Homo sapiens
cctgctaagattagg

SEQ ID NO: 770354 - DNA, 15 bp, Homo sapiens
ctgctaagattaggg

SEQ ID NO: 770355 - DNA, 15 bp, Homo sapiens
tgctaagattagggg

SEQ ID NO: 770356 - DNA, 15 bp, Homo sapiens
gctaagattaggggt

SEQ ID NO: 770357 - DNA, 15 bp, Homo sapiens
ctaagattaggggta

SEQ ID NO: 770358 - DNA, 15 bp, Homo sapiens
taagattaggggtag

SEQ ID NO: 770359 - DNA, 15 bp, Homo sapiens
aagattaggggtagg

SEQ ID NO: 770360 - DNA, 15 bp, Homo sapiens
agattaggggtaggg

SEQ ID NO: 770361 - DNA, 15 bp, Homo sapiens
gattaggggtaggga

SEQ ID NO: 770362 - DNA, 15 bp, Homo sapiens
attaggggtagggag

SEQ ID NO: 770363 - DNA, 15 bp, Homo sapiens
ttaggggtagggaga

SEQ ID NO: 770364 - DNA, 15 bp, Homo sapiens
taggggtagggagaa

SEQ ID NO: 770365 - DNA, 15 bp, Homo sapiens
aggggtagggagaac

SEQ ID NO: 770366 - DNA, 15 bp, Homo sapiens
ggggtagggagaaca

SEQ ID NO: 770367 - DNA, 15 bp, Homo sapiens
gggtagggagaacag

SEQ ID NO: 770368 - DNA, 15 bp, Homo sapiens
ggtagggagaacagc

SEQ ID NO: 770369 - DNA, 15 bp, Homo sapiens
gtagggagaacagct

SEQ ID NO: 770370 - DNA, 15 bp, Homo sapiens
tagggagaacagctt

SEQ ID NO: 770371 - DNA, 15 bp, Homo sapiens
agggagaacagctta

SEQ ID NO: 770372 - DNA, 15 bp, Homo sapiens
gggagaacagcttag

SEQ ID NO: 770373 - DNA, 15 bp, Homo sapiens
ggagaacagcttagg

SEQ ID NO: 770374 - DNA, 15 bp, Homo sapiens
gagaacagcttagga

SEQ ID NO: 770375 - DNA, 15 bp, Homo sapiens
agaacagcttaggag

SEQ ID NO: 770376 - DNA, 15 bp, Homo sapiens
gaacagcttaggagc

SEQ ID NO: 770377 - DNA, 15 bp, Homo sapiens
aacagcttaggagct

SEQ ID NO: 770378 - DNA, 15 bp, Homo sapiens
acagcttaggagctg

SEQ ID NO: 770379 - DNA, 15 bp, Homo sapiens
cagcttaggagctgg

SEQ ID NO: 770380 - DNA, 15 bp, Homo sapiens
agcttaggagctggg

SEQ ID NO: 770381 - DNA, 15 bp, Homo sapiens
gcttaggagctgggg

SEQ ID NO: 770382 - DNA, 15 bp, Homo sapiens
cttaggagctggggc

SEQ ID NO: 770383 - DNA, 15 bp, Homo sapiens
ttaggagctggggca

SEQ ID NO: 770384 - DNA, 15 bp, Homo sapiens
taggagctggggcag

SEQ ID NO: 770385 - DNA, 15 bp, Homo sapiens
aggagctggggcagg

SEQ ID NO: 770386 - DNA, 15 bp, Homo sapiens
ggagctggggcagga

SEQ ID NO: 770387 - DNA, 15 bp, Homo sapiens
gagctggggcaggag

SEQ ID NO: 770388 - DNA, 15 bp, Homo sapiens
agctggggcaggaga

SEQ ID NO: 770389 - DNA, 15 bp, Homo sapiens
gctggggcaggagag

SEQ ID NO: 770390 - DNA, 15 bp, Homo sapiens
ctggggcaggagagt

SEQ ID NO: 770391 - DNA, 15 bp, Homo sapiens
tggggcaggagagtg

SEQ ID NO: 770392 - DNA, 15 bp, Homo sapiens
ggggcaggagagtgc

SEQ ID NO: 770393 - DNA, 15 bp, Homo sapiens
gggcaggagagtgct

SEQ ID NO: 770394 - DNA, 15 bp, Homo sapiens
ggcaggagagtgctt

SEQ ID NO: 770395 - DNA, 15 bp, Homo sapiens
gcaggagagtgctta

SEQ ID NO: 770396 - DNA, 15 bp, Homo sapiens
caggagagtgcttat

SEQ ID NO: 770397 - DNA, 15 bp, Homo sapiens
aggagagtgcttatg

SEQ ID NO: 770398 - DNA, 15 bp, Homo sapiens
ggagagtgcttatgt

SEQ ID NO: 770399 - DNA, 15 bp, Homo sapiens
gagagtgcttatgtg

SEQ ID NO: 770400 - DNA, 15 bp, Homo sapiens
agagtgcttatgtgt

SEQ ID NO: 770401 - DNA, 15 bp, Homo sapiens
gagtgcttatgtgtg

SEQ ID NO: 770402 - DNA, 15 bp, Homo sapiens
agtgcttatgtgtgg

SEQ ID NO: 770403 - DNA, 15 bp, Homo sapiens
gtgcttatgtgtgga

SEQ ID NO: 770404 - DNA, 15 bp, Homo sapiens
tgcttatgtgtggag

SEQ ID NO: 770405 - DNA, 15 bp, Homo sapiens
gcttatgtgtggagt

SEQ ID NO: 770406 - DNA, 15 bp, Homo sapiens
cttatgtgtggagta

SEQ ID NO: 770407 - DNA, 15 bp, Homo sapiens
ttatgtgtggagtag

SEQ ID NO: 770408 - DNA, 15 bp, Homo sapiens
tatgtgtggagtaga

SEQ ID NO: 770409 - DNA, 15 bp, Homo sapiens
atgtgtggagtagag

SEQ ID NO: 770410 - DNA, 15 bp, Homo sapiens
tgtgtggagtagaga

SEQ ID NO: 770411 - DNA, 15 bp, Homo sapiens
gtgtggagtagagaa

SEQ ID NO: 770412 - DNA, 15 bp, Homo sapiens
tgtggagtagagaaa

SEQ ID NO: 770413 - DNA, 15 bp, Homo sapiens
gtggagtagagaaag

SEQ ID NO: 770414 - DNA, 15 bp, Homo sapiens
tggagtagagaaagc

SEQ ID NO: 770415 - DNA, 15 bp, Homo sapiens
ggagtagagaaagcc

SEQ ID NO: 770416 - DNA, 15 bp, Homo sapiens
gagtagagaaagccc

SEQ ID NO: 770417 - DNA, 15 bp, Homo sapiens
agtagagaaagccca

SEQ ID NO: 770418 - DNA, 15 bp, Homo sapiens
gtagagaaagcccat

SEQ ID NO: 770419 - DNA, 15 bp, Homo sapiens
tagagaaagcccatc

SEQ ID NO: 770420 - DNA, 15 bp, Homo sapiens
agagaaagcccatcc

SEQ ID NO: 770421 - DNA, 15 bp, Homo sapiens
gagaaagcccatcct

SEQ ID NO: 770422 - DNA, 15 bp, Homo sapiens
agaaagcccatccta

SEQ ID NO: 770423 - DNA, 15 bp, Homo sapiens
gaaagcccatcctag

SEQ ID NO: 770424 - DNA, 15 bp, Homo sapiens
aaagcccatcctaga

SEQ ID NO: 770425 - DNA, 15 bp, Homo sapiens
aagcccatcctagat

SEQ ID NO: 770426 - DNA, 15 bp, Homo sapiens
agcccatcctagatg

SEQ ID NO: 770427 - DNA, 15 bp, Homo sapiens
gcccatcctagatgg

SEQ ID NO: 770428 - DNA, 15 bp, Homo sapiens
cccatcctagatggg

SEQ ID NO: 770429 - DNA, 15 bp, Homo sapiens
ccatcctagatgggg

SEQ ID NO: 770430 - DNA, 15 bp, Homo sapiens
catcctagatgggga

SEQ ID NO: 770431 - DNA, 15 bp, Homo sapiens
atcctagatggggag

SEQ ID NO: 770432 - DNA, 15 bp, Homo sapiens
tcctagatggggagg

SEQ ID NO: 770433 - DNA, 15 bp, Homo sapiens
cctagatggggaggt

SEQ ID NO: 770434 - DNA, 15 bp, Homo sapiens
ctagatggggaggtg

SEQ ID NO: 770435 - DNA, 15 bp, Homo sapiens
tagatggggaggtgg

SEQ ID NO: 770436 - DNA, 15 bp, Homo sapiens
agatggggaggtggc

SEQ ID NO: 770437 - DNA, 15 bp, Homo sapiens
gatggggaggtggcg

SEQ ID NO: 770438 - DNA, 15 bp, Homo sapiens
atggggaggtggcgg

SEQ ID NO: 770439 - DNA, 15 bp, Homo sapiens
tggggaggtggcggg

SEQ ID NO: 770440 - DNA, 15 bp, Homo sapiens
ggggaggtggcgggg

SEQ ID NO: 770441 - DNA, 15 bp, Homo sapiens
gggaggtggcggggg

SEQ ID NO: 770442 - DNA, 15 bp, Homo sapiens
ggaggtggcgggggt

SEQ ID NO: 770443 - DNA, 15 bp, Homo sapiens
gaggtggcgggggtc

SEQ ID NO: 770444 - DNA, 15 bp, Homo sapiens
aggtggcgggggtct

SEQ ID NO: 770445 - DNA, 15 bp, Homo sapiens
ggtggcgggggtcta

SEQ ID NO: 770446 - DNA, 15 bp, Homo sapiens
gtggcgggggtctag

SEQ ID NO: 770447 - DNA, 15 bp, Homo sapiens
tggcgggggtctagg

SEQ ID NO: 770448 - DNA, 15 bp, Homo sapiens
ggcgggggtctaggt

SEQ ID NO: 770449 - DNA, 15 bp, Homo sapiens
gcgggggtctaggtg

SEQ ID NO: 770450 - DNA, 15 bp, Homo sapiens
cgggggtctaggtgg

SEQ ID NO: 770451 - DNA, 15 bp, Homo sapiens
gggggtctaggtggc

SEQ ID NO: 770452 - DNA, 15 bp, Homo sapiens
ggggtctaggtggca

SEQ ID NO: 770453 - DNA, 15 bp, Homo sapiens
gggtctaggtggcaa

SEQ ID NO: 770454 - DNA, 15 bp, Homo sapiens
ggtctaggtggcaag

SEQ ID NO: 770455 - DNA, 15 bp, Homo sapiens
gtctaggtggcaagg

SEQ ID NO: 770456 - DNA, 15 bp, Homo sapiens
tctaggtggcaaggg

SEQ ID NO: 770457 - DNA, 15 bp, Homo sapiens
ctaggtggcaagggg

SEQ ID NO: 770458 - DNA, 15 bp, Homo sapiens
taggtggcaagggga

SEQ ID NO: 770459 - DNA, 15 bp, Homo sapiens
aggtggcaaggggaa

SEQ ID NO: 770460 - DNA, 15 bp, Homo sapiens
ggtggcaaggggaac

SEQ ID NO: 770461 - DNA, 15 bp, Homo sapiens
gtggcaaggggaacc

SEQ ID NO: 770462 - DNA, 15 bp, Homo sapiens
tggcaaggggaaccc

SEQ ID NO: 770463 - DNA, 15 bp, Homo sapiens
ggcaaggggaaccct

SEQ ID NO: 770464 - DNA, 15 bp, Homo sapiens
gcaaggggaaccctg

SEQ ID NO: 770465 - DNA, 15 bp, Homo sapiens
caaggggaaccctgg

SEQ ID NO: 770466 - DNA, 15 bp, Homo sapiens
aaggggaaccctggg

SEQ ID NO: 770467 - DNA, 15 bp, Homo sapiens
aggggaaccctgggt

SEQ ID NO: 770468 - DNA, 15 bp, Homo sapiens
ggggaaccctgggtg

SEQ ID NO: 770469 - DNA, 15 bp, Homo sapiens
gggaaccctgggtgc

SEQ ID NO: 770470 - DNA, 15 bp, Homo sapiens
ggaaccctgggtgcc

SEQ ID NO: 770471 - DNA, 15 bp, Homo sapiens
gaaccctgggtgcct

SEQ ID NO: 770472 - DNA, 15 bp, Homo sapiens
aaccctgggtgcctg

SEQ ID NO: 770473 - DNA, 15 bp, Homo sapiens
accctgggtgcctgg

SEQ ID NO: 770474 - DNA, 15 bp, Homo sapiens
ccctgggtgcctggc

SEQ ID NO: 770475 - DNA, 15 bp, Homo sapiens
cctgggtgcctggct

SEQ ID NO: 770476 - DNA, 15 bp, Homo sapiens
ctgggtgcctggctt

SEQ ID NO: 770477 - DNA, 15 bp, Homo sapiens
tgggtgcctggcttc

SEQ ID NO: 770478 - DNA, 15 bp, Homo sapiens
gggtgcctggcttcc

SEQ ID NO: 770479 - DNA, 15 bp, Homo sapiens
ggtgcctggcttcct

SEQ ID NO: 770480 - DNA, 15 bp, Homo sapiens
gtgcctggcttcctc

SEQ ID NO: 770481 - DNA, 15 bp, Homo sapiens
tgcctggcttcctcc

SEQ ID NO: 770482 - DNA, 15 bp, Homo sapiens
gcctggcttcctcct

SEQ ID NO: 770483 - DNA, 15 bp, Homo sapiens
cctggcttcctcctg

SEQ ID NO: 770484 - DNA, 15 bp, Homo sapiens
ctggcttcctcctgc

SEQ ID NO: 770485 - DNA, 15 bp, Homo sapiens
tggcttcctcctgca

SEQ ID NO: 770486 - DNA, 15 bp, Homo sapiens
ggcttcctcctgcag

SEQ ID NO: 770487 - DNA, 15 bp, Homo sapiens
gcttcctcctgcagg

SEQ ID NO: 770488 - DNA, 15 bp, Homo sapiens
cttcctcctgcaggc

SEQ ID NO: 770489 - DNA, 15 bp, Homo sapiens
ttcctcctgcaggca

SEQ ID NO: 770490 - DNA, 15 bp, Homo sapiens
tcctcctgcaggcac

SEQ ID NO: 770491 - DNA, 15 bp, Homo sapiens
cctcctgcaggcact

SEQ ID NO: 770492 - DNA, 15 bp, Homo sapiens
ctcctgcaggcactg

SEQ ID NO: 770493 - DNA, 15 bp, Homo sapiens
tcctgcaggcactgg

SEQ ID NO: 770494 - DNA, 15 bp, Homo sapiens
cctgcaggcactggg

SEQ ID NO: 770495 - DNA, 15 bp, Homo sapiens
aatcggggcaatgtg

SEQ ID NO: 770496 - DNA, 15 bp, Homo sapiens
atcggggcaatgtgt

SEQ ID NO: 770497 - DNA, 15 bp, Homo sapiens
tcggggcaatgtgtt

SEQ ID NO: 770498 - DNA, 15 bp, Homo sapiens
cggggcaatgtgttt

SEQ ID NO: 770499 - DNA, 15 bp, Homo sapiens
ggggcaatgtgttta

SEQ ID NO: 770500 - DNA, 15 bp, Homo sapiens
gggcaatgtgtttat

SEQ ID NO: 770501 - DNA, 15 bp, Homo sapiens
ggcaatgtgtttata

SEQ ID NO: 770502 - DNA, 15 bp, Homo sapiens
gcaatgtgtttatag

SEQ ID NO: 770503 - DNA, 15 bp, Homo sapiens
caatgtgtttataga

SEQ ID NO: 770504 - DNA, 15 bp, Homo sapiens
aatgtgtttatagat

SEQ ID NO: 770505 - DNA, 15 bp, Homo sapiens
atgtgtttatagata

SEQ ID NO: 770506 - DNA, 15 bp, Homo sapiens
tgtgtttatagataa

SEQ ID NO: 770507 - DNA, 15 bp, Homo sapiens
gtgtttatagataat

SEQ ID NO: 770508 - DNA, 15 bp, Homo sapiens
tgtttatagataatg

SEQ ID NO: 770509 - DNA, 15 bp, Homo sapiens
gtttatagataatgt

SEQ ID NO: 770510 - DNA, 15 bp, Homo sapiens
tttatagataatgtg

SEQ ID NO: 770511 - DNA, 15 bp, Homo sapiens
ttatagataatgtgc

SEQ ID NO: 770512 - DNA, 15 bp, Homo sapiens
tatagataatgtgct

SEQ ID NO: 770513 - DNA, 15 bp, Homo sapiens
atagataatgtgctc

SEQ ID NO: 770514 - DNA, 15 bp, Homo sapiens
tagataatgtgctct

SEQ ID NO: 770515 - DNA, 15 bp, Homo sapiens
agataatgtgctctc

SEQ ID NO: 770516 - DNA, 15 bp, Homo sapiens
gataatgtgctctcc

SEQ ID NO: 770517 - DNA, 15 bp, Homo sapiens
ataatgtgctctcct

SEQ ID NO: 770518 - DNA, 15 bp, Homo sapiens
taatgtgctctcctt

SEQ ID NO: 770519 - DNA, 15 bp, Homo sapiens
aatgtgctctccttc

SEQ ID NO: 770520 - DNA, 15 bp, Homo sapiens
atgtgctctccttct

SEQ ID NO: 770521 - DNA, 15 bp, Homo sapiens
tgtgctctccttctg

SEQ ID NO: 770522 - DNA, 15 bp, Homo sapiens
gtgctctccttctgc

SEQ ID NO: 770523 - DNA, 15 bp, Homo sapiens
tgctctccttctgca

SEQ ID NO: 770524 - DNA, 15 bp, Homo sapiens
gctctccttctgcaa

SEQ ID NO: 770525 - DNA, 15 bp, Homo sapiens
ctctccttctgcaag

SEQ ID NO: 770526 - DNA, 15 bp, Homo sapiens
tctccttctgcaagc

SEQ ID NO: 770527 - DNA, 15 bp, Homo sapiens
ctccttctgcaagct

SEQ ID NO: 770528 - DNA, 15 bp, Homo sapiens
tccttctgcaagctg

SEQ ID NO: 770529 - DNA, 15 bp, Homo sapiens
ccttctgcaagctgc

SEQ ID NO: 770530 - DNA, 15 bp, Homo sapiens
cttctgcaagctgcc

SEQ ID NO: 770531 - DNA, 15 bp, Homo sapiens
ttctgcaagctgcca

SEQ ID NO: 770532 - DNA, 15 bp, Homo sapiens
tctgcaagctgccac

SEQ ID NO: 770533 - DNA, 15 bp, Homo sapiens
ctgcaagctgccacc

SEQ ID NO: 770534 - DNA, 15 bp, Homo sapiens
tgcaagctgccacca

SEQ ID NO: 770535 - DNA, 15 bp, Homo sapiens
gcaagctgccaccag

SEQ ID NO: 770536 - DNA, 15 bp, Homo sapiens
caagctgccaccagc

SEQ ID NO: 770537 - DNA, 15 bp, Homo sapiens
aagctgccaccagcc

SEQ ID NO: 770538 - DNA, 15 bp, Homo sapiens
agctgccaccagcct

SEQ ID NO: 770539 - DNA, 15 bp, Homo sapiens
gctgccaccagcctg

SEQ ID NO: 770540 - DNA, 15 bp, Homo sapiens
ctgccaccagcctgc

SEQ ID NO: 770541 - DNA, 15 bp, Homo sapiens
tgccaccagcctgcc

SEQ ID NO: 770542 - DNA, 15 bp, Homo sapiens
gccaccagcctgcca

SEQ ID NO: 770543 - DNA, 15 bp, Homo sapiens
ccaccagcctgccaa

SEQ ID NO: 770544 - DNA, 15 bp, Homo sapiens
caccagcctgccaat

SEQ ID NO: 770545 - DNA, 15 bp, Homo sapiens
accagcctgccaata

SEQ ID NO: 770546 - DNA, 15 bp, Homo sapiens
ccagcctgccaatac

SEQ ID NO: 770547 - DNA, 15 bp, Homo sapiens
cagcctgccaatact

SEQ ID NO: 770548 - DNA, 15 bp, Homo sapiens
agcctgccaatactt

SEQ ID NO: 770549 - DNA, 15 bp, Homo sapiens
gcctgccaatactta

SEQ ID NO: 770550 - DNA, 15 bp, Homo sapiens
cctgccaatacttat

SEQ ID NO: 770551 - DNA, 15 bp, Homo sapiens
ctgccaatacttata

SEQ ID NO: 770552 - DNA, 15 bp, Homo sapiens
tgccaatacttatat

SEQ ID NO: 770553 - DNA, 15 bp, Homo sapiens
gccaatacttatatc

SEQ ID NO: 770554 - DNA, 15 bp, Homo sapiens
ccaatacttatatcc

SEQ ID NO: 770555 - DNA, 15 bp, Homo sapiens
caatacttatatcct

SEQ ID NO: 770556 - DNA, 15 bp, Homo sapiens
aatacttatatcctc

SEQ ID NO: 770557 - DNA, 15 bp, Homo sapiens
atacttatatcctca

SEQ ID NO: 770558 - DNA, 15 bp, Homo sapiens
tacttatatcctcat

SEQ ID NO: 770559 - DNA, 15 bp, Homo sapiens
acttatatcctcatc

SEQ ID NO: 770560 - DNA, 15 bp, Homo sapiens
cttatatcctcatcc

SEQ ID NO: 770561 - DNA, 15 bp, Homo sapiens
ttatatcctcatcca

SEQ ID NO: 770562 - DNA, 15 bp, Homo sapiens
tatatcctcatccat

SEQ ID NO: 770563 - DNA, 15 bp, Homo sapiens
atatcctcatccatc

SEQ ID NO: 770564 - DNA, 15 bp, Homo sapiens
tatcctcatccatcc

SEQ ID NO: 770565 - DNA, 15 bp, Homo sapiens
atcctcatccatcca

SEQ ID NO: 770566 - DNA, 15 bp, Homo sapiens
tcctcatccatccat

SEQ ID NO: 770567 - DNA, 15 bp, Homo sapiens
cctcatccatccatc

SEQ ID NO: 770568 - DNA, 15 bp, Homo sapiens
ctcatccatccatcc

SEQ ID NO: 770569 - DNA, 15 bp, Homo sapiens
tcatccatccatcca

SEQ ID NO: 770570 - DNA, 15 bp, Homo sapiens
catccatccatccat

SEQ ID NO: 770571 - DNA, 15 bp, Homo sapiens
atccatccatccatc

SEQ ID NO: 770572 - DNA, 15 bp, Homo sapiens
tccatccatccatcc

SEQ ID NO: 770573 - DNA, 15 bp, Homo sapiens
ccatccatccatcca

SEQ ID NO: 770574 - DNA, 15 bp, Homo sapiens
catccatccatccac

SEQ ID NO: 770575 - DNA, 15 bp, Homo sapiens
atccatccatccact

SEQ ID NO: 770576 - DNA, 15 bp, Homo sapiens
tccatccatccactc

SEQ ID NO: 770577 - DNA, 15 bp, Homo sapiens
ccatccatccactca

SEQ ID NO: 770578 - DNA, 15 bp, Homo sapiens
catccatccactcat

SEQ ID NO: 770579 - DNA, 15 bp, Homo sapiens
atccatccactcatc

SEQ ID NO: 770580 - DNA, 15 bp, Homo sapiens
tccatccactcatcc

SEQ ID NO: 770581 - DNA, 15 bp, Homo sapiens
ccatccactcatcca

SEQ ID NO: 770582 - DNA, 15 bp, Homo sapiens
catccactcatccat

SEQ ID NO: 770583 - DNA, 15 bp, Homo sapiens
atccactcatccatc

SEQ ID NO: 770584 - DNA, 15 bp, Homo sapiens
tccactcatccatcc

SEQ ID NO: 770585 - DNA, 15 bp, Homo sapiens
ccactcatccatcca

SEQ ID NO: 770586 - DNA, 15 bp, Homo sapiens
cactcatccatccat

SEQ ID NO: 770587 - DNA, 15 bp, Homo sapiens
actcatccatccatc

SEQ ID NO: 770588 - DNA, 15 bp, Homo sapiens
cactcatccatccac

SEQ ID NO: 770589 - DNA, 15 bp, Homo sapiens
actcatccatccacc

SEQ ID NO: 770590 - DNA, 15 bp, Homo sapiens
ctcatccatccaccc

SEQ ID NO: 770591 - DNA, 15 bp, Homo sapiens
tcatccatccaccca

SEQ ID NO: 770592 - DNA, 15 bp, Homo sapiens
catccatccacccat

SEQ ID NO: 770593 - DNA, 15 bp, Homo sapiens
atccatccacccatc

SEQ ID NO: 770594 - DNA, 15 bp, Homo sapiens
tccatccacccatcc

SEQ ID NO: 770595 - DNA, 15 bp, Homo sapiens
ccatccacccatcca

SEQ ID NO: 770596 - DNA, 15 bp, Homo sapiens
catccacccatccat

SEQ ID NO: 770597 - DNA, 15 bp, Homo sapiens
atccacccatccatc

SEQ ID NO: 770598 - DNA, 15 bp, Homo sapiens
tccacccatccatcc

SEQ ID NO: 770599 - DNA, 15 bp, Homo sapiens
ccacccatccatcca

SEQ ID NO: 770600 - DNA, 15 bp, Homo sapiens
cacccatccatccac

SEQ ID NO: 770601 - DNA, 15 bp, Homo sapiens
acccatccatccacc

SEQ ID NO: 770602 - DNA, 15 bp, Homo sapiens
cccatccatccaccc

SEQ ID NO: 770603 - DNA, 15 bp, Homo sapiens
ccatccatccaccca

SEQ ID NO: 770604 - DNA, 15 bp, Homo sapiens
cacccatccatccat

SEQ ID NO: 770605 - DNA, 15 bp, Homo sapiens
acccatccatccatt

SEQ ID NO: 770606 - DNA, 15 bp, Homo sapiens
cccatccatccattc

SEQ ID NO: 770607 - DNA, 15 bp, Homo sapiens
ccatccatccattca

SEQ ID NO: 770608 - DNA, 15 bp, Homo sapiens
catccatccattcat

SEQ ID NO: 770609 - DNA, 15 bp, Homo sapiens
atccatccattcatt

SEQ ID NO: 770610 - DNA, 15 bp, Homo sapiens
tccatccattcattt

SEQ ID NO: 770611 - DNA, 15 bp, Homo sapiens
ccatccattcattta

SEQ ID NO: 770612 - DNA, 15 bp, Homo sapiens
catccattcatttat

SEQ ID NO: 770613 - DNA, 15 bp, Homo sapiens
atccattcatttatt

SEQ ID NO: 770614 - DNA, 15 bp, Homo sapiens
tccattcatttattc

SEQ ID NO: 770615 - DNA, 15 bp, Homo sapiens
ccattcatttattca

SEQ ID NO: 770616 - DNA, 15 bp, Homo sapiens
cattcatttattcag

SEQ ID NO: 770617 - DNA, 15 bp, Homo sapiens
attcatttattcagc

SEQ ID NO: 770618 - DNA, 15 bp, Homo sapiens
ttcatttattcagca

SEQ ID NO: 770619 - DNA, 15 bp, Homo sapiens
tcatttattcagcac

SEQ ID NO: 770620 - DNA, 15 bp, Homo sapiens
catttattcagcaca

SEQ ID NO: 770621 - DNA, 15 bp, Homo sapiens
atttattcagcacat

SEQ ID NO: 770622 - DNA, 15 bp, Homo sapiens
tttattcagcacata

SEQ ID NO: 770623 - DNA, 15 bp, Homo sapiens
ttattcagcacatac

SEQ ID NO: 770624 - DNA, 15 bp, Homo sapiens
tattcagcacatacc

SEQ ID NO: 770625 - DNA, 15 bp, Homo sapiens
attcagcacatacct

SEQ ID NO: 770626 - DNA, 15 bp, Homo sapiens
ttcagcacatacctc

SEQ ID NO: 770627 - DNA, 15 bp, Homo sapiens
tcagcacatacctcc

SEQ ID NO: 770628 - DNA, 15 bp, Homo sapiens
cagcacatacctccc

SEQ ID NO: 770629 - DNA, 15 bp, Homo sapiens
agcacatacctccca

SEQ ID NO: 770630 - DNA, 15 bp, Homo sapiens
gcacatacctcccag

SEQ ID NO: 770631 - DNA, 15 bp, Homo sapiens
cacatacctcccagg

SEQ ID NO: 770632 - DNA, 15 bp, Homo sapiens
acatacctcccaggt

SEQ ID NO: 770633 - DNA, 15 bp, Homo sapiens
catacctcccaggtg

SEQ ID NO: 770634 - DNA, 15 bp, Homo sapiens
atacctcccaggtgc

SEQ ID NO: 770635 - DNA, 15 bp, Homo sapiens
tacctcccaggtgcc

SEQ ID NO: 770636 - DNA, 15 bp, Homo sapiens
acctcccaggtgcct

SEQ ID NO: 770637 - DNA, 15 bp, Homo sapiens
cctcccaggtgcctg

SEQ ID NO: 770638 - DNA, 15 bp, Homo sapiens
ctcccaggtgcctgc

SEQ ID NO: 770639 - DNA, 15 bp, Homo sapiens
tcccaggtgcctgcc

SEQ ID NO: 770640 - DNA, 15 bp, Homo sapiens
cccaggtgcctgccc

SEQ ID NO: 770641 - DNA, 15 bp, Homo sapiens
ccaggtgcctgccct

SEQ ID NO: 770642 - DNA, 15 bp, Homo sapiens
caggtgcctgccctg

SEQ ID NO: 770643 - DNA, 15 bp, Homo sapiens
aggtgcctgccctgg

SEQ ID NO: 770644 - DNA, 15 bp, Homo sapiens
ggtgcctgccctggc

SEQ ID NO: 770645 - DNA, 15 bp, Homo sapiens
gtgcctgccctggcc

SEQ ID NO: 770646 - DNA, 15 bp, Homo sapiens
tgcctgccctggccc

SEQ ID NO: 770647 - DNA, 15 bp, Homo sapiens
gcctgccctggccca

SEQ ID NO: 770648 - DNA, 15 bp, Homo sapiens
cctgccctggcccag

SEQ ID NO: 770649 - DNA, 15 bp, Homo sapiens
ctgccctggcccagg

SEQ ID NO: 770650 - DNA, 15 bp, Homo sapiens
tgccctggcccaggc

SEQ ID NO: 770651 - DNA, 15 bp, Homo sapiens
gccctggcccaggcc

SEQ ID NO: 770652 - DNA, 15 bp, Homo sapiens
ccctggcccaggccc

SEQ ID NO: 770653 - DNA, 15 bp, Homo sapiens
cctggcccaggccca

SEQ ID NO: 770654 - DNA, 15 bp, Homo sapiens
ctggcccaggcccag

SEQ ID NO: 770655 - DNA, 15 bp, Homo sapiens
tggcccaggcccagt

SEQ ID NO: 770656 - DNA, 15 bp, Homo sapiens
ggcccaggcccagtg

SEQ ID NO: 770657 - DNA, 15 bp, Homo sapiens
gcccaggcccagtgc

SEQ ID NO: 770658 - DNA, 15 bp, Homo sapiens
cccaggcccagtgct

SEQ ID NO: 770659 - DNA, 15 bp, Homo sapiens
ccaggcccagtgcta

SEQ ID NO: 770660 - DNA, 15 bp, Homo sapiens
caggcccagtgctag

SEQ ID NO: 770661 - DNA, 15 bp, Homo sapiens
aggcccagtgctagg

SEQ ID NO: 770662 - DNA, 15 bp, Homo sapiens
ggcccagtgctaggc

SEQ ID NO: 770663 - DNA, 15 bp, Homo sapiens
gcccagtgctaggcc

SEQ ID NO: 770664 - DNA, 15 bp, Homo sapiens
cccagtgctaggccc

SEQ ID NO: 770665 - DNA, 15 bp, Homo sapiens
ccagtgctaggccct

SEQ ID NO: 770666 - DNA, 15 bp, Homo sapiens
cagtgctaggccctg

SEQ ID NO: 770667 - DNA, 15 bp, Homo sapiens
agtgctaggccctgt

SEQ ID NO: 770668 - DNA, 15 bp, Homo sapiens
gtgctaggccctgtg

SEQ ID NO: 770669 - DNA, 15 bp, Homo sapiens
tgctaggccctgtgt

SEQ ID NO: 770670 - DNA, 15 bp, Homo sapiens
gctaggccctgtgta

SEQ ID NO: 770671 - DNA, 15 bp, Homo sapiens
ctaggccctgtgtag

SEQ ID NO: 770672 - DNA, 15 bp, Homo sapiens
taggccctgtgtaga

SEQ ID NO: 770673 - DNA, 15 bp, Homo sapiens
aggccctgtgtagac

SEQ ID NO: 770674 - DNA, 15 bp, Homo sapiens
ggccctgtgtagaca

SEQ ID NO: 770675 - DNA, 15 bp, Homo sapiens
gccctgtgtagacaa

SEQ ID NO: 770676 - DNA, 15 bp, Homo sapiens
ccctgtgtagacaac

SEQ ID NO: 770677 - DNA, 15 bp, Homo sapiens
cctgtgtagacaacg

SEQ ID NO: 770678 - DNA, 15 bp, Homo sapiens
ctgtgtagacaacga

SEQ ID NO: 770679 - DNA, 15 bp, Homo sapiens
tgtgtagacaacgag

SEQ ID NO: 770680 - DNA, 15 bp, Homo sapiens
gtgtagacaacgagc

SEQ ID NO: 770681 - DNA, 15 bp, Homo sapiens
tgtagacaacgagca

SEQ ID NO: 770682 - DNA, 15 bp, Homo sapiens
gtagacaacgagcac

SEQ ID NO: 770683 - DNA, 15 bp, Homo sapiens
tagacaacgagcaca

SEQ ID NO: 770684 - DNA, 15 bp, Homo sapiens
agacaacgagcacag

SEQ ID NO: 770685 - DNA, 15 bp, Homo sapiens
gacaacgagcacagt

SEQ ID NO: 770686 - DNA, 15 bp, Homo sapiens
acaacgagcacagtt

SEQ ID NO: 770687 - DNA, 15 bp, Homo sapiens
caacgagcacagttg

SEQ ID NO: 770688 - DNA, 15 bp, Homo sapiens
aacgagcacagttgc

SEQ ID NO: 770689 - DNA, 15 bp, Homo sapiens
acgagcacagttgca

SEQ ID NO: 770690 - DNA, 15 bp, Homo sapiens
cgagcacagttgcat

SEQ ID NO: 770691 - DNA, 15 bp, Homo sapiens
gagcacagttgcatg

SEQ ID NO: 770692 - DNA, 15 bp, Homo sapiens
agcacagttgcatgc

SEQ ID NO: 770693 - DNA, 15 bp, Homo sapiens
gcacagttgcatgct

SEQ ID NO: 770694 - DNA, 15 bp, Homo sapiens
cacagttgcatgctg

SEQ ID NO: 770695 - DNA, 15 bp, Homo sapiens
acagttgcatgctgc

SEQ ID NO: 770696 - DNA, 15 bp, Homo sapiens
cagttgcatgctgcc

SEQ ID NO: 770697 - DNA, 15 bp, Homo sapiens
agttgcatgctgcct

SEQ ID NO: 770698 - DNA, 15 bp, Homo sapiens
gttgcatgctgcctc

SEQ ID NO: 770699 - DNA, 15 bp, Homo sapiens
ttgcatgctgcctct

SEQ ID NO: 770700 - DNA, 15 bp, Homo sapiens
tgcatgctgcctctc

SEQ ID NO: 770701 - DNA, 15 bp, Homo sapiens
gcatgctgcctctcc

SEQ ID NO: 770702 - DNA, 15 bp, Homo sapiens
catgctgcctctcct

SEQ ID NO: 770703 - DNA, 15 bp, Homo sapiens
atgctgcctctcctt

SEQ ID NO: 770704 - DNA, 15 bp, Homo sapiens
tgctgcctctccttc

SEQ ID NO: 770705 - DNA, 15 bp, Homo sapiens
gctgcctctccttcc

SEQ ID NO: 770706 - DNA, 15 bp, Homo sapiens
ctgcctctccttcct

SEQ ID NO: 770707 - DNA, 15 bp, Homo sapiens
tgcctctccttcctg

SEQ ID NO: 770708 - DNA, 15 bp, Homo sapiens
gcctctccttcctgc

SEQ ID NO: 770709 - DNA, 15 bp, Homo sapiens
cctctccttcctgct

SEQ ID NO: 770710 - DNA, 15 bp, Homo sapiens
ctctccttcctgctc

SEQ ID NO: 770711 - DNA, 15 bp, Homo sapiens
tctccttcctgctca

SEQ ID NO: 770712 - DNA, 15 bp, Homo sapiens
ctccttcctgctcat

SEQ ID NO: 770713 - DNA, 15 bp, Homo sapiens
tccttcctgctcatg

SEQ ID NO: 770714 - DNA, 15 bp, Homo sapiens
ccttcctgctcatgg

SEQ ID NO: 770715 - DNA, 15 bp, Homo sapiens
cttcctgctcatggt

SEQ ID NO: 770716 - DNA, 15 bp, Homo sapiens
ttcctgctcatggtc

SEQ ID NO: 770717 - DNA, 15 bp, Homo sapiens
tcctgctcatggtct

SEQ ID NO: 770718 - DNA, 15 bp, Homo sapiens
cctgctcatggtcta

SEQ ID NO: 770719 - DNA, 15 bp, Homo sapiens
ctgctcatggtctag

SEQ ID NO: 770720 - DNA, 15 bp, Homo sapiens
tgctcatggtctagt

SEQ ID NO: 770721 - DNA, 15 bp, Homo sapiens
gctcatggtctagtg

SEQ ID NO: 770722 - DNA, 15 bp, Homo sapiens
ctcatggtctagtgt

SEQ ID NO: 770723 - DNA, 15 bp, Homo sapiens
tcatggtctagtgtg

SEQ ID NO: 770724 - DNA, 15 bp, Homo sapiens
catggtctagtgtgg

SEQ ID NO: 770725 - DNA, 15 bp, Homo sapiens
atggtctagtgtggg

SEQ ID NO: 770726 - DNA, 15 bp, Homo sapiens
tggtctagtgtggga

SEQ ID NO: 770727 - DNA, 15 bp, Homo sapiens
ggtctagtgtgggag

SEQ ID NO: 770728 - DNA, 15 bp, Homo sapiens
gtctagtgtgggaga

SEQ ID NO: 770729 - DNA, 15 bp, Homo sapiens
tctagtgtgggagac

SEQ ID NO: 770730 - DNA, 15 bp, Homo sapiens
ctagtgtgggagacc

SEQ ID NO: 770731 - DNA, 15 bp, Homo sapiens
tagtgtgggagacca

SEQ ID NO: 770732 - DNA, 15 bp, Homo sapiens
agtgtgggagaccag

SEQ ID NO: 770733 - DNA, 15 bp, Homo sapiens
gtgtgggagaccagc

SEQ ID NO: 770734 - DNA, 15 bp, Homo sapiens
tgtgggagaccagca

SEQ ID NO: 770735 - DNA, 15 bp, Homo sapiens
gtgggagaccagcat

SEQ ID NO: 770736 - DNA, 15 bp, Homo sapiens
tgggagaccagcatt

SEQ ID NO: 770737 - DNA, 15 bp, Homo sapiens
gggagaccagcattg

SEQ ID NO: 770738 - DNA, 15 bp, Homo sapiens
ggagaccagcattga

SEQ ID NO: 770739 - DNA, 15 bp, Homo sapiens
gagaccagcattgaa

SEQ ID NO: 770740 - DNA, 15 bp, Homo sapiens
agaccagcattgaac

SEQ ID NO: 770741 - DNA, 15 bp, Homo sapiens
gaccagcattgaaca

SEQ ID NO: 770742 - DNA, 15 bp, Homo sapiens
accagcattgaacaa

SEQ ID NO: 770743 - DNA, 15 bp, Homo sapiens
ccagcattgaacaaa

SEQ ID NO: 770744 - DNA, 15 bp, Homo sapiens
cagcattgaacaaat

SEQ ID NO: 770745 - DNA, 15 bp, Homo sapiens
agcattgaacaaata

SEQ ID NO: 770746 - DNA, 15 bp, Homo sapiens
gcattgaacaaataa

SEQ ID NO: 770747 - DNA, 15 bp, Homo sapiens
cattgaacaaataaa

SEQ ID NO: 770748 - DNA, 15 bp, Homo sapiens
attgaacaaataaat

SEQ ID NO: 770749 - DNA, 15 bp, Homo sapiens
ttgaacaaataaatc

SEQ ID NO: 770750 - DNA, 15 bp, Homo sapiens
tgaacaaataaatca

SEQ ID NO: 770751 - DNA, 15 bp, Homo sapiens
gaacaaataaatcag

SEQ ID NO: 770752 - DNA, 15 bp, Homo sapiens
aacaaataaatcagc

SEQ ID NO: 770753 - DNA, 15 bp, Homo sapiens
acaaataaatcagca

SEQ ID NO: 770754 - DNA, 15 bp, Homo sapiens
caaataaatcagcaa

SEQ ID NO: 770755 - DNA, 15 bp, Homo sapiens
aaataaatcagcaaa

SEQ ID NO: 770756 - DNA, 15 bp, Homo sapiens
aataaatcagcaaat

SEQ ID NO: 770757 - DNA, 15 bp, Homo sapiens
ataaatcagcaaata

SEQ ID NO: 770758 - DNA, 15 bp, Homo sapiens
taaatcagcaaatag

SEQ ID NO: 770759 - DNA, 15 bp, Homo sapiens
aaatcagcaaatagc

SEQ ID NO: 770760 - DNA, 15 bp, Homo sapiens
aatcagcaaatagct

SEQ ID NO: 770761 - DNA, 15 bp, Homo sapiens
atcagcaaatagctg

SEQ ID NO: 770762 - DNA, 15 bp, Homo sapiens
tcagcaaatagctgt

SEQ ID NO: 770763 - DNA, 15 bp, Homo sapiens
cagcaaatagctgtg

SEQ ID NO: 770764 - DNA, 15 bp, Homo sapiens
agcaaatagctgtga

SEQ ID NO: 770765 - DNA, 15 bp, Homo sapiens
gcaaatagctgtgaa

SEQ ID NO: 770766 - DNA, 15 bp, Homo sapiens
caaatagctgtgaaa

SEQ ID NO: 770767 - DNA, 15 bp, Homo sapiens
aaatagctgtgaaat

SEQ ID NO: 770768 - DNA, 15 bp, Homo sapiens
aatagctgtgaaatt

SEQ ID NO: 770769 - DNA, 15 bp, Homo sapiens
atagctgtgaaatta

SEQ ID NO: 770770 - DNA, 15 bp, Homo sapiens
tagctgtgaaattaa

SEQ ID NO: 770771 - DNA, 15 bp, Homo sapiens
agctgtgaaattaaa

SEQ ID NO: 770772 - DNA, 15 bp, Homo sapiens
gctgtgaaattaaaa

SEQ ID NO: 770773 - DNA, 15 bp, Homo sapiens
ctgtgaaattaaaat

SEQ ID NO: 770774 - DNA, 15 bp, Homo sapiens
tgtgaaattaaaatc

SEQ ID NO: 770775 - DNA, 15 bp, Homo sapiens
gtgaaattaaaatca

SEQ ID NO: 770776 - DNA, 15 bp, Homo sapiens
tgaaattaaaatcac

SEQ ID NO: 770777 - DNA, 15 bp, Homo sapiens
gaaattaaaatcaca

SEQ ID NO: 770778 - DNA, 15 bp, Homo sapiens
aaattaaaatcacag

SEQ ID NO: 770779 - DNA, 15 bp, Homo sapiens
aattaaaatcacagt

SEQ ID NO: 770780 - DNA, 15 bp, Homo sapiens
attaaaatcacagtg

SEQ ID NO: 770781 - DNA, 15 bp, Homo sapiens
ttaaaatcacagtga

SEQ ID NO: 770782 - DNA, 15 bp, Homo sapiens
taaaatcacagtgag

SEQ ID NO: 770783 - DNA, 15 bp, Homo sapiens
aaaatcacagtgagt

SEQ ID NO: 770784 - DNA, 15 bp, Homo sapiens
aaatcacagtgagtc

SEQ ID NO: 770785 - DNA, 15 bp, Homo sapiens
aatcacagtgagtcc

SEQ ID NO: 770786 - DNA, 15 bp, Homo sapiens
atcacagtgagtcca

SEQ ID NO: 770787 - DNA, 15 bp, Homo sapiens
tcacagtgagtccaa

SEQ ID NO: 770788 - DNA, 15 bp, Homo sapiens
cacagtgagtccaac

SEQ ID NO: 770789 - DNA, 15 bp, Homo sapiens
acagtgagtccaaca

SEQ ID NO: 770790 - DNA, 15 bp, Homo sapiens
cagtgagtccaacaa

SEQ ID NO: 770791 - DNA, 15 bp, Homo sapiens
agtgagtccaacaaa

SEQ ID NO: 770792 - DNA, 15 bp, Homo sapiens
gtgagtccaacaaag

SEQ ID NO: 770793 - DNA, 15 bp, Homo sapiens
tgagtccaacaaagg

SEQ ID NO: 770794 - DNA, 15 bp, Homo sapiens
gagtccaacaaagga

SEQ ID NO: 770795 - DNA, 15 bp, Homo sapiens
agtccaacaaaggaa

SEQ ID NO: 770796 - DNA, 15 bp, Homo sapiens
gtccaacaaaggaaa

SEQ ID NO: 770797 - DNA, 15 bp, Homo sapiens
tccaacaaaggaaat

SEQ ID NO: 770798 - DNA, 15 bp, Homo sapiens
ccaacaaaggaaatg

SEQ ID NO: 770799 - DNA, 15 bp, Homo sapiens
caacaaaggaaatga

SEQ ID NO: 770800 - DNA, 15 bp, Homo sapiens
aacaaaggaaatgaa

SEQ ID NO: 770801 - DNA, 15 bp, Homo sapiens
acaaaggaaatgaat

SEQ ID NO: 770802 - DNA, 15 bp, Homo sapiens
caaaggaaatgaatg

SEQ ID NO: 770803 - DNA, 15 bp, Homo sapiens
aaggaaatgaatggg

SEQ ID NO: 770804 - DNA, 15 bp, Homo sapiens
aggaaatgaatgggt

SEQ ID NO: 770805 - DNA, 15 bp, Homo sapiens
ggaaatgaatgggtt

SEQ ID NO: 770806 - DNA, 15 bp, Homo sapiens
gaaatgaatgggttg

SEQ ID NO: 770807 - DNA, 15 bp, Homo sapiens
aaatgaatgggttgt

SEQ ID NO: 770808 - DNA, 15 bp, Homo sapiens
aatgaatgggttgtg

SEQ ID NO: 770809 - DNA, 15 bp, Homo sapiens
atgaatgggttgtga

SEQ ID NO: 770810 - DNA, 15 bp, Homo sapiens
tgaatgggttgtgat

SEQ ID NO: 770811 - DNA, 15 bp, Homo sapiens
gaatgggttgtgatg

SEQ ID NO: 770812 - DNA, 15 bp, Homo sapiens
aatgggttgtgatga

SEQ ID NO: 770813 - DNA, 15 bp, Homo sapiens
atgggttgtgatgag

SEQ ID NO: 770814 - DNA, 15 bp, Homo sapiens
tgggttgtgatgaga

SEQ ID NO: 770815 - DNA, 15 bp, Homo sapiens
gggttgtgatgagaa

SEQ ID NO: 770816 - DNA, 15 bp, Homo sapiens
ggttgtgatgagaaa

SEQ ID NO: 770817 - DNA, 15 bp, Homo sapiens
gttgtgatgagaaag

SEQ ID NO: 770818 - DNA, 15 bp, Homo sapiens
ttgtgatgagaaaga

SEQ ID NO: 770819 - DNA, 15 bp, Homo sapiens
tgtgatgagaaagaa

SEQ ID NO: 770820 - DNA, 15 bp, Homo sapiens
gtgatgagaaagaac

SEQ ID NO: 770821 - DNA, 15 bp, Homo sapiens
tgatgagaaagaaca

SEQ ID NO: 770822 - DNA, 15 bp, Homo sapiens
gatgagaaagaacaa

SEQ ID NO: 770823 - DNA, 15 bp, Homo sapiens
atgagaaagaacaag

SEQ ID NO: 770824 - DNA, 15 bp, Homo sapiens
tgagaaagaacaagg

SEQ ID NO: 770825 - DNA, 15 bp, Homo sapiens
gagaaagaacaaggg

SEQ ID NO: 770826 - DNA, 15 bp, Homo sapiens
agaaagaacaagggg

SEQ ID NO: 770827 - DNA, 15 bp, Homo sapiens
gaaagaacaaggggg

SEQ ID NO: 770828 - DNA, 15 bp, Homo sapiens
aaagaacaagggggc

SEQ ID NO: 770829 - DNA, 15 bp, Homo sapiens
aagaacaagggggcc

SEQ ID NO: 770830 - DNA, 15 bp, Homo sapiens
agaacaagggggccc

SEQ ID NO: 770831 - DNA, 15 bp, Homo sapiens
gaacaagggggccct

SEQ ID NO: 770832 - DNA, 15 bp, Homo sapiens
aacaagggggcccta

SEQ ID NO: 770833 - DNA, 15 bp, Homo sapiens
acaagggggccctaa

SEQ ID NO: 770834 - DNA, 15 bp, Homo sapiens
caagggggccctaat

SEQ ID NO: 770835 - DNA, 15 bp, Homo sapiens
aagggggccctaatt

SEQ ID NO: 770836 - DNA, 15 bp, Homo sapiens
agggggccctaattt

SEQ ID NO: 770837 - DNA, 15 bp, Homo sapiens
gggggccctaatttg

SEQ ID NO: 770838 - DNA, 15 bp, Homo sapiens
ggggccctaatttgg

SEQ ID NO: 770839 - DNA, 15 bp, Homo sapiens
gggccctaatttgga

SEQ ID NO: 770840 - DNA, 15 bp, Homo sapiens
ggccctaatttggac

SEQ ID NO: 770841 - DNA, 15 bp, Homo sapiens
gccctaatttggact

SEQ ID NO: 770842 - DNA, 15 bp, Homo sapiens
ccctaatttggactg

SEQ ID NO: 770843 - DNA, 15 bp, Homo sapiens
cctaatttggactga

SEQ ID NO: 770844 - DNA, 15 bp, Homo sapiens
ctaatttggactgaa

SEQ ID NO: 770845 - DNA, 15 bp, Homo sapiens
taatttggactgaac

SEQ ID NO: 770846 - DNA, 15 bp, Homo sapiens
aatttggactgaacc

SEQ ID NO: 770847 - DNA, 15 bp, Homo sapiens
atttggactgaacca

SEQ ID NO: 770848 - DNA, 15 bp, Homo sapiens
tttggactgaaccag

SEQ ID NO: 770849 - DNA, 15 bp, Homo sapiens
ttggactgaaccagg

SEQ ID NO: 770850 - DNA, 15 bp, Homo sapiens
tggactgaaccaggc

SEQ ID NO: 770851 - DNA, 15 bp, Homo sapiens
ggactgaaccaggct

SEQ ID NO: 770852 - DNA, 15 bp, Homo sapiens
gactgaaccaggctg

SEQ ID NO: 770853 - DNA, 15 bp, Homo sapiens
actgaaccaggctga

SEQ ID NO: 770854 - DNA, 15 bp, Homo sapiens
ctgaaccaggctgag

SEQ ID NO: 770855 - DNA, 15 bp, Homo sapiens
tgaaccaggctgagt

SEQ ID NO: 770856 - DNA, 15 bp, Homo sapiens
gaaccaggctgagtg

SEQ ID NO: 770857 - DNA, 15 bp, Homo sapiens
aaccaggctgagtgc

SEQ ID NO: 770858 - DNA, 15 bp, Homo sapiens
accaggctgagtgca

SEQ ID NO: 770859 - DNA, 15 bp, Homo sapiens
ccaggctgagtgcat

SEQ ID NO: 770860 - DNA, 15 bp, Homo sapiens
caggctgagtgcatc

SEQ ID NO: 770861 - DNA, 15 bp, Homo sapiens
aggctgagtgcatct

SEQ ID NO: 770862 - DNA, 15 bp, Homo sapiens
ggctgagtgcatctg

SEQ ID NO: 770863 - DNA, 15 bp, Homo sapiens
gctgagtgcatctgt

SEQ ID NO: 770864 - DNA, 15 bp, Homo sapiens
ctgagtgcatctgtc

SEQ ID NO: 770865 - DNA, 15 bp, Homo sapiens
tgagtgcatctgtca

SEQ ID NO: 770866 - DNA, 15 bp, Homo sapiens
gagtgcatctgtcaa

SEQ ID NO: 770867 - DNA, 15 bp, Homo sapiens
agtgcatctgtcaaa

SEQ ID NO: 770868 - DNA, 15 bp, Homo sapiens
gtgcatctgtcaaaa

SEQ ID NO: 770869 - DNA, 15 bp, Homo sapiens
tgcatctgtcaaaat

SEQ ID NO: 770870 - DNA, 15 bp, Homo sapiens
gcatctgtcaaaatc

SEQ ID NO: 770871 - DNA, 15 bp, Homo sapiens
catctgtcaaaatca

SEQ ID NO: 770872 - DNA, 15 bp, Homo sapiens
atctgtcaaaatcat

SEQ ID NO: 770873 - DNA, 15 bp, Homo sapiens
tctgtcaaaatcatg

SEQ ID NO: 770874 - DNA, 15 bp, Homo sapiens
ctgtcaaaatcatgc

SEQ ID NO: 770875 - DNA, 15 bp, Homo sapiens
tgtcaaaatcatgcc

SEQ ID NO: 770876 - DNA, 15 bp, Homo sapiens
gtcaaaatcatgcct

SEQ ID NO: 770877 - DNA, 15 bp, Homo sapiens
tcaaaatcatgccta

SEQ ID NO: 770878 - DNA, 15 bp, Homo sapiens
caaaatcatgcctat

SEQ ID NO: 770879 - DNA, 15 bp, Homo sapiens
aaaatcatgcctatc

SEQ ID NO: 770880 - DNA, 15 bp, Homo sapiens
aaatcatgcctatcc

SEQ ID NO: 770881 - DNA, 15 bp, Homo sapiens
aatcatgcctatcct

SEQ ID NO: 770882 - DNA, 15 bp, Homo sapiens
atcatgcctatcctt

SEQ ID NO: 770883 - DNA, 15 bp, Homo sapiens
tcatgcctatccttt

SEQ ID NO: 770884 - DNA, 15 bp, Homo sapiens
catgcctatcctttg

SEQ ID NO: 770885 - DNA, 15 bp, Homo sapiens
atgcctatcctttga

SEQ ID NO: 770886 - DNA, 15 bp, Homo sapiens
tgcctatcctttgag

SEQ ID NO: 770887 - DNA, 15 bp, Homo sapiens
gcctatcctttgagg

SEQ ID NO: 770888 - DNA, 15 bp, Homo sapiens
cctatcctttgaggc

SEQ ID NO: 770889 - DNA, 15 bp, Homo sapiens
ctatcctttgaggct

SEQ ID NO: 770890 - DNA, 15 bp, Homo sapiens
tatcctttgaggctc

SEQ ID NO: 770891 - DNA, 15 bp, Homo sapiens
atcctttgaggctca

SEQ ID NO: 770892 - DNA, 15 bp, Homo sapiens
tcctttgaggctcag

SEQ ID NO: 770893 - DNA, 15 bp, Homo sapiens
cctttgaggctcagc

SEQ ID NO: 770894 - DNA, 15 bp, Homo sapiens
ctttgaggctcagca

SEQ ID NO: 770895 - DNA, 15 bp, Homo sapiens
tttgaggctcagcag

SEQ ID NO: 770896 - DNA, 15 bp, Homo sapiens
ttgaggctcagcaga

SEQ ID NO: 770897 - DNA, 15 bp, Homo sapiens
tgaggctcagcagaa

SEQ ID NO: 770898 - DNA, 15 bp, Homo sapiens
gaggctcagcagaaa

SEQ ID NO: 770899 - DNA, 15 bp, Homo sapiens
aggctcagcagaaat

SEQ ID NO: 770900 - DNA, 15 bp, Homo sapiens
ggctcagcagaaata

SEQ ID NO: 770901 - DNA, 15 bp, Homo sapiens
gctcagcagaaatac

SEQ ID NO: 770902 - DNA, 15 bp, Homo sapiens
ctcagcagaaatacc

SEQ ID NO: 770903 - DNA, 15 bp, Homo sapiens
tcagcagaaatacca

SEQ ID NO: 770904 - DNA, 15 bp, Homo sapiens
cagcagaaataccac

SEQ ID NO: 770905 - DNA, 15 bp, Homo sapiens
agcagaaataccacc

SEQ ID NO: 770906 - DNA, 15 bp, Homo sapiens
gcagaaataccacca

SEQ ID NO: 770907 - DNA, 15 bp, Homo sapiens
cagaaataccaccac

SEQ ID NO: 770908 - DNA, 15 bp, Homo sapiens
agaaataccaccacc

SEQ ID NO: 770909 - DNA, 15 bp, Homo sapiens
gaaataccaccacct

SEQ ID NO: 770910 - DNA, 15 bp, Homo sapiens
aaataccaccacctt

SEQ ID NO: 770911 - DNA, 15 bp, Homo sapiens
aataccaccaccttc

SEQ ID NO: 770912 - DNA, 15 bp, Homo sapiens
ataccaccaccttca

SEQ ID NO: 770913 - DNA, 15 bp, Homo sapiens
taccaccaccttcat

SEQ ID NO: 770914 - DNA, 15 bp, Homo sapiens
accaccaccttcatt

SEQ ID NO: 770915 - DNA, 15 bp, Homo sapiens
ccaccaccttcatta

SEQ ID NO: 770916 - DNA, 15 bp, Homo sapiens
caccaccttcattaa

SEQ ID NO: 770917 - DNA, 15 bp, Homo sapiens
accaccttcattaaa

SEQ ID NO: 770918 - DNA, 15 bp, Homo sapiens
ccaccttcattaaat

SEQ ID NO: 770919 - DNA, 15 bp, Homo sapiens
caccttcattaaatc

SEQ ID NO: 770920 - DNA, 15 bp, Homo sapiens
accttcattaaatca

SEQ ID NO: 770921 - DNA, 15 bp, Homo sapiens
ccttcattaaatcag

SEQ ID NO: 770922 - DNA, 15 bp, Homo sapiens
cttcattaaatcagt

SEQ ID NO: 770923 - DNA, 15 bp, Homo sapiens
ttcattaaatcagtc

SEQ ID NO: 770924 - DNA, 15 bp, Homo sapiens
tcattaaatcagtct

SEQ ID NO: 770925 - DNA, 15 bp, Homo sapiens
cattaaatcagtctg

SEQ ID NO: 770926 - DNA, 15 bp, Homo sapiens
attaaatcagtctgt

SEQ ID NO: 770927 - DNA, 15 bp, Homo sapiens
ttaaatcagtctgtt

SEQ ID NO: 770928 - DNA, 15 bp, Homo sapiens
taaatcagtctgttc

SEQ ID NO: 770929 - DNA, 15 bp, Homo sapiens
aaatcagtctgttcc

SEQ ID NO: 770930 - DNA, 15 bp, Homo sapiens
aatcagtctgttcct

SEQ ID NO: 770931 - DNA, 15 bp, Homo sapiens
atcagtctgttcctg

SEQ ID NO: 770932 - DNA, 15 bp, Homo sapiens
tcagtctgttcctgc

SEQ ID NO: 770933 - DNA, 15 bp, Homo sapiens
cagtctgttcctgcc

SEQ ID NO: 770934 - DNA, 15 bp, Homo sapiens
agtctgttcctgcca

SEQ ID NO: 770935 - DNA, 15 bp, Homo sapiens
gtctgttcctgccat

SEQ ID NO: 770936 - DNA, 15 bp, Homo sapiens
tctgttcctgccatt

SEQ ID NO: 770937 - DNA, 15 bp, Homo sapiens
ctgttcctgccattt

SEQ ID NO: 770938 - DNA, 15 bp, Homo sapiens
tgttcctgccattta

SEQ ID NO: 770939 - DNA, 15 bp, Homo sapiens
gttcctgccatttaa

SEQ ID NO: 770940 - DNA, 15 bp, Homo sapiens
ttcctgccatttaac

SEQ ID NO: 770941 - DNA, 15 bp, Homo sapiens
tcctgccatttaaca

SEQ ID NO: 770942 - DNA, 15 bp, Homo sapiens
cctgccatttaacag

SEQ ID NO: 770943 - DNA, 15 bp, Homo sapiens
ctgccatttaacagg

SEQ ID NO: 770944 - DNA, 15 bp, Homo sapiens
tgccatttaacaggt

SEQ ID NO: 770945 - DNA, 15 bp, Homo sapiens
gccatttaacaggtc

SEQ ID NO: 770946 - DNA, 15 bp, Homo sapiens
ccatttaacaggtcc

SEQ ID NO: 770947 - DNA, 15 bp, Homo sapiens
catttaacaggtcct

SEQ ID NO: 770948 - DNA, 15 bp, Homo sapiens
atttaacaggtcctc

SEQ ID NO: 770949 - DNA, 15 bp, Homo sapiens
tttaacaggtcctct

SEQ ID NO: 770950 - DNA, 15 bp, Homo sapiens
ttaacaggtcctctg

SEQ ID NO: 770951 - DNA, 15 bp, Homo sapiens
taacaggtcctctgc

SEQ ID NO: 770952 - DNA, 15 bp, Homo sapiens
aacaggtcctctgcc

SEQ ID NO: 770953 - DNA, 15 bp, Homo sapiens
acaggtcctctgcca

SEQ ID NO: 770954 - DNA, 15 bp, Homo sapiens
caggtcctctgccat

SEQ ID NO: 770955 - DNA, 15 bp, Homo sapiens
aggtcctctgccata

SEQ ID NO: 770956 - DNA, 15 bp, Homo sapiens
ggtcctctgccatac

SEQ ID NO: 770957 - DNA, 15 bp, Homo sapiens
gtcctctgccatact

SEQ ID NO: 770958 - DNA, 15 bp, Homo sapiens
tcctctgccatactc

SEQ ID NO: 770959 - DNA, 15 bp, Homo sapiens
cctctgccatactct

SEQ ID NO: 770960 - DNA, 15 bp, Homo sapiens
ctctgccatactctc

SEQ ID NO: 770961 - DNA, 15 bp, Homo sapiens
tctgccatactctct

SEQ ID NO: 770962 - DNA, 15 bp, Homo sapiens
ctgccatactctctt

SEQ ID NO: 770963 - DNA, 15 bp, Homo sapiens
tgccatactctcttc

SEQ ID NO: 770964 - DNA, 15 bp, Homo sapiens
gccatactctcttcc

SEQ ID NO: 770965 - DNA, 15 bp, Homo sapiens
ccatactctcttcct

SEQ ID NO: 770966 - DNA, 15 bp, Homo sapiens
catactctcttcctc

SEQ ID NO: 770967 - DNA, 15 bp, Homo sapiens
atactctcttcctcc

SEQ ID NO: 770968 - DNA, 15 bp, Homo sapiens
tactctcttcctccc

SEQ ID NO: 770969 - DNA, 15 bp, Homo sapiens
actctcttcctccct

SEQ ID NO: 770970 - DNA, 15 bp, Homo sapiens
ctctcttcctccctg

SEQ ID NO: 770971 - DNA, 15 bp, Homo sapiens
tctcttcctccctgg

SEQ ID NO: 770972 - DNA, 15 bp, Homo sapiens
ctcttcctccctggt

SEQ ID NO: 770973 - DNA, 15 bp, Homo sapiens
tcttcctccctggtg

SEQ ID NO: 770974 - DNA, 15 bp, Homo sapiens
cttcctccctggtgt

SEQ ID NO: 770975 - DNA, 15 bp, Homo sapiens
ttcctccctggtgtc

SEQ ID NO: 770976 - DNA, 15 bp, Homo sapiens
tcctccctggtgtca

SEQ ID NO: 770977 - DNA, 15 bp, Homo sapiens
cctccctggtgtcat

SEQ ID NO: 770978 - DNA, 15 bp, Homo sapiens
ctccctggtgtcata

SEQ ID NO: 770979 - DNA, 15 bp, Homo sapiens
tccctggtgtcatat

SEQ ID NO: 770980 - DNA, 15 bp, Homo sapiens
ccctggtgtcatatt

SEQ ID NO: 770981 - DNA, 15 bp, Homo sapiens
cctggtgtcatattc

SEQ ID NO: 770982 - DNA, 15 bp, Homo sapiens
ctggtgtcatattct

SEQ ID NO: 770983 - DNA, 15 bp, Homo sapiens
tggtgtcatattcta

SEQ ID NO: 770984 - DNA, 15 bp, Homo sapiens
ggtgtcatattctac

SEQ ID NO: 770985 - DNA, 15 bp, Homo sapiens
gtgtcatattctacc

SEQ ID NO: 770986 - DNA, 15 bp, Homo sapiens
tgtcatattctacct

SEQ ID NO: 770987 - DNA, 15 bp, Homo sapiens
gtcatattctacctt

SEQ ID NO: 770988 - DNA, 15 bp, Homo sapiens
tcatattctaccttg

SEQ ID NO: 770989 - DNA, 15 bp, Homo sapiens
catattctaccttga

SEQ ID NO: 770990 - DNA, 15 bp, Homo sapiens
atattctaccttgat

SEQ ID NO: 770991 - DNA, 15 bp, Homo sapiens
tattctaccttgatt

SEQ ID NO: 770992 - DNA, 15 bp, Homo sapiens
attctaccttgattt

SEQ ID NO: 770993 - DNA, 15 bp, Homo sapiens
ttctaccttgattta

SEQ ID NO: 770994 - DNA, 15 bp, Homo sapiens
tctaccttgatttag

SEQ ID NO: 770995 - DNA, 15 bp, Homo sapiens
ctaccttgatttagt

SEQ ID NO: 770996 - DNA, 15 bp, Homo sapiens
taccttgatttagtt

SEQ ID NO: 770997 - DNA, 15 bp, Homo sapiens
accttgatttagttt

SEQ ID NO: 770998 - DNA, 15 bp, Homo sapiens
ccttgatttagtttt

SEQ ID NO: 770999 - DNA, 15 bp, Homo sapiens
cttgatttagttttg

SEQ ID NO: 771000 - DNA, 15 bp, Homo sapiens
ttgatttagttttgg

SEQ ID NO: 771001 - DNA, 15 bp, Homo sapiens
tgatttagttttggg

SEQ ID NO: 771002 - DNA, 15 bp, Homo sapiens
gatttagttttgggt

SEQ ID NO: 771003 - DNA, 15 bp, Homo sapiens
atttagttttgggta

SEQ ID NO: 771004 - DNA, 15 bp, Homo sapiens
tttagttttgggtac

SEQ ID NO: 771005 - DNA, 15 bp, Homo sapiens
ttagttttgggtact

SEQ ID NO: 771006 - DNA, 15 bp, Homo sapiens
tagttttgggtactt

SEQ ID NO: 771007 - DNA, 15 bp, Homo sapiens
agttttgggtacttg

SEQ ID NO: 771008 - DNA, 15 bp, Homo sapiens
gttttgggtacttgt

SEQ ID NO: 771009 - DNA, 15 bp, Homo sapiens
ttttgggtacttgtc

SEQ ID NO: 771010 - DNA, 15 bp, Homo sapiens
tttgggtacttgtct

SEQ ID NO: 771011 - DNA, 15 bp, Homo sapiens
ttgggtacttgtctg

SEQ ID NO: 771012 - DNA, 15 bp, Homo sapiens
tgggtacttgtctgt

SEQ ID NO: 771013 - DNA, 15 bp, Homo sapiens
gggtacttgtctgtt

SEQ ID NO: 771014 - DNA, 15 bp, Homo sapiens
ggtacttgtctgttt

SEQ ID NO: 771015 - DNA, 15 bp, Homo sapiens
gtacttgtctgtttc

SEQ ID NO: 771016 - DNA, 15 bp, Homo sapiens
tacttgtctgtttcc

SEQ ID NO: 771017 - DNA, 15 bp, Homo sapiens
acttgtctgtttccc

SEQ ID NO: 771018 - DNA, 15 bp, Homo sapiens
cttgtctgtttcccc

SEQ ID NO: 771019 - DNA, 15 bp, Homo sapiens
ttgtctgtttcccct

SEQ ID NO: 771020 - DNA, 15 bp, Homo sapiens
tgtctgtttcccctg

SEQ ID NO: 771021 - DNA, 15 bp, Homo sapiens
gtctgtttcccctga

SEQ ID NO: 771022 - DNA, 15 bp, Homo sapiens
tctgtttcccctgag

SEQ ID NO: 771023 - DNA, 15 bp, Homo sapiens
ctgtttcccctgaga

SEQ ID NO: 771024 - DNA, 15 bp, Homo sapiens
tgtttcccctgagag

SEQ ID NO: 771025 - DNA, 15 bp, Homo sapiens
gtttcccctgagaga

SEQ ID NO: 771026 - DNA, 15 bp, Homo sapiens
tttcccctgagagat

SEQ ID NO: 771027 - DNA, 15 bp, Homo sapiens
ttcccctgagagatc

SEQ ID NO: 771028 - DNA, 15 bp, Homo sapiens
tcccctgagagatct

SEQ ID NO: 771029 - DNA, 15 bp, Homo sapiens
cccctgagagatctt

SEQ ID NO: 771030 - DNA, 15 bp, Homo sapiens
ccctgagagatcttc

SEQ ID NO: 771031 - DNA, 15 bp, Homo sapiens
cctgagagatcttca

SEQ ID NO: 771032 - DNA, 15 bp, Homo sapiens
ctgagagatcttcaa

SEQ ID NO: 771033 - DNA, 15 bp, Homo sapiens
tgagagatcttcaac

SEQ ID NO: 771034 - DNA, 15 bp, Homo sapiens
gagagatcttcaact

SEQ ID NO: 771035 - DNA, 15 bp, Homo sapiens
agagatcttcaactc

SEQ ID NO: 771036 - DNA, 15 bp, Homo sapiens
gagatcttcaactcc

SEQ ID NO: 771037 - DNA, 15 bp, Homo sapiens
agatcttcaactcct

SEQ ID NO: 771038 - DNA, 15 bp, Homo sapiens
gatcttcaactcctg

SEQ ID NO: 771039 - DNA, 15 bp, Homo sapiens
atcttcaactcctgg

SEQ ID NO: 771040 - DNA, 15 bp, Homo sapiens
tcttcaactcctgga

SEQ ID NO: 771041 - DNA, 15 bp, Homo sapiens
cttcaactcctggaa

SEQ ID NO: 771042 - DNA, 15 bp, Homo sapiens
ttcaactcctggaag

SEQ ID NO: 771043 - DNA, 15 bp, Homo sapiens
tcaactcctggaagg

SEQ ID NO: 771044 - DNA, 15 bp, Homo sapiens
caactcctggaagga

SEQ ID NO: 771045 - DNA, 15 bp, Homo sapiens
aactcctggaaggag

SEQ ID NO: 771046 - DNA, 15 bp, Homo sapiens
actcctggaaggaga

SEQ ID NO: 771047 - DNA, 15 bp, Homo sapiens
ctcctggaaggagag

SEQ ID NO: 771048 - DNA, 15 bp, Homo sapiens
tcctggaaggagaga

SEQ ID NO: 771049 - DNA, 15 bp, Homo sapiens
cctggaaggagagat

SEQ ID NO: 771050 - DNA, 15 bp, Homo sapiens
ctggaaggagagatt

SEQ ID NO: 771051 - DNA, 15 bp, Homo sapiens
tggaaggagagattg

SEQ ID NO: 771052 - DNA, 15 bp, Homo sapiens
ggaaggagagattgt

SEQ ID NO: 771053 - DNA, 15 bp, Homo sapiens
gaaggagagattgta

SEQ ID NO: 771054 - DNA, 15 bp, Homo sapiens
aaggagagattgtat

SEQ ID NO: 771055 - DNA, 15 bp, Homo sapiens
aggagagattgtatt

SEQ ID NO: 771056 - DNA, 15 bp, Homo sapiens
ggagagattgtattt

SEQ ID NO: 771057 - DNA, 15 bp, Homo sapiens
gagagattgtatttt

SEQ ID NO: 771058 - DNA, 15 bp, Homo sapiens
agagattgtattttt

SEQ ID NO: 771059 - DNA, 15 bp, Homo sapiens
gagattgtatttttt

SEQ ID NO: 771060 - DNA, 15 bp, Homo sapiens
agattgtattttttt

SEQ ID NO: 771061 - DNA, 15 bp, Homo sapiens
gattgtatttttttt

SEQ ID NO: 771062 - DNA, 15 bp, Homo sapiens
attgtattttttttt

SEQ ID NO: 771063 - DNA, 15 bp, Homo sapiens
ttgtatttttttttt

SEQ ID NO: 771064 - DNA, 15 bp, Homo sapiens
gtatttttttttttg

SEQ ID NO: 771065 - DNA, 15 bp, Homo sapiens
tatttttttttttgt

SEQ ID NO: 771066 - DNA, 15 bp, Homo sapiens
atttttttttttgtc

SEQ ID NO: 771067 - DNA, 15 bp, Homo sapiens
tttttttttttgtct

SEQ ID NO: 771068 - DNA, 15 bp, Homo sapiens
ttttttttttgtctg

SEQ ID NO: 771069 - DNA, 15 bp, Homo sapiens
tttttttttgtctga

SEQ ID NO: 771070 - DNA, 15 bp, Homo sapiens
ttttttttgtctgag

SEQ ID NO: 771071 - DNA, 15 bp, Homo sapiens
tttttttgtctgaga

SEQ ID NO: 771072 - DNA, 15 bp, Homo sapiens
ttttttgtctgagaa

SEQ ID NO: 771073 - DNA, 15 bp, Homo sapiens
tttttgtctgagaac

SEQ ID NO: 771074 - DNA, 15 bp, Homo sapiens
ttttgtctgagaacc

SEQ ID NO: 771075 - DNA, 15 bp, Homo sapiens
tttgtctgagaacct

SEQ ID NO: 771076 - DNA, 15 bp, Homo sapiens
ttgtctgagaacctg

SEQ ID NO: 771077 - DNA, 15 bp, Homo sapiens
tgtctgagaacctgt

SEQ ID NO: 771078 - DNA, 15 bp, Homo sapiens
gtctgagaacctgtt

SEQ ID NO: 771079 - DNA, 15 bp, Homo sapiens
tctgagaacctgttg

SEQ ID NO: 771080 - DNA, 15 bp, Homo sapiens
ctgagaacctgttgt

SEQ ID NO: 771081 - DNA, 15 bp, Homo sapiens
tgagaacctgttgtg

SEQ ID NO: 771082 - DNA, 15 bp, Homo sapiens
gagaacctgttgtga

SEQ ID NO: 771083 - DNA, 15 bp, Homo sapiens
agaacctgttgtgag

SEQ ID NO: 771084 - DNA, 15 bp, Homo sapiens
gaacctgttgtgagt

SEQ ID NO: 771085 - DNA, 15 bp, Homo sapiens
aacctgttgtgagta

SEQ ID NO: 771086 - DNA, 15 bp, Homo sapiens
acctgttgtgagtaa

SEQ ID NO: 771087 - DNA, 15 bp, Homo sapiens
cctgttgtgagtaat

SEQ ID NO: 771088 - DNA, 15 bp, Homo sapiens
ctgttgtgagtaatc

SEQ ID NO: 771089 - DNA, 15 bp, Homo sapiens
tgttgtgagtaatcc

SEQ ID NO: 771090 - DNA, 15 bp, Homo sapiens
gttgtgagtaatcct

SEQ ID NO: 771091 - DNA, 15 bp, Homo sapiens
ttgtgagtaatcctc

SEQ ID NO: 771092 - DNA, 15 bp, Homo sapiens
tgtgagtaatcctct

SEQ ID NO: 771093 - DNA, 15 bp, Homo sapiens
gtgagtaatcctctc

SEQ ID NO: 771094 - DNA, 15 bp, Homo sapiens
tgagtaatcctctct

SEQ ID NO: 771095 - DNA, 15 bp, Homo sapiens
gagtaatcctctctc

SEQ ID NO: 771096 - DNA, 15 bp, Homo sapiens
agtaatcctctctca

SEQ ID NO: 771097 - DNA, 15 bp, Homo sapiens
gtaatcctctctcag

SEQ ID NO: 771098 - DNA, 15 bp, Homo sapiens
taatcctctctcaga

SEQ ID NO: 771099 - DNA, 15 bp, Homo sapiens
aatcctctctcagag

SEQ ID NO: 771100 - DNA, 15 bp, Homo sapiens
atcctctctcagaga

SEQ ID NO: 771101 - DNA, 15 bp, Homo sapiens
tcctctctcagagat

SEQ ID NO: 771102 - DNA, 15 bp, Homo sapiens
cctctctcagagatg

SEQ ID NO: 771103 - DNA, 15 bp, Homo sapiens
ctctctcagagatgc

SEQ ID NO: 771104 - DNA, 15 bp, Homo sapiens
tctctcagagatgcc

SEQ ID NO: 771105 - DNA, 15 bp, Homo sapiens
ctctcagagatgccc

SEQ ID NO: 771106 - DNA, 15 bp, Homo sapiens
tctcagagatgccca

SEQ ID NO: 771107 - DNA, 15 bp, Homo sapiens
ctcagagatgcccag

SEQ ID NO: 771108 - DNA, 15 bp, Homo sapiens
tcagagatgcccagg

SEQ ID NO: 771109 - DNA, 15 bp, Homo sapiens
cagagatgcccaggt

SEQ ID NO: 771110 - DNA, 15 bp, Homo sapiens
agagatgcccaggtg

SEQ ID NO: 771111 - DNA, 15 bp, Homo sapiens
gagatgcccaggtga

SEQ ID NO: 771112 - DNA, 15 bp, Homo sapiens
agatgcccaggtgaa

SEQ ID NO: 771113 - DNA, 15 bp, Homo sapiens
gatgcccaggtgaat

SEQ ID NO: 771114 - DNA, 15 bp, Homo sapiens
atgcccaggtgaatt

SEQ ID NO: 771115 - DNA, 15 bp, Homo sapiens
tgcccaggtgaattg

SEQ ID NO: 771116 - DNA, 15 bp, Homo sapiens
gcccaggtgaattgt

SEQ ID NO: 771117 - DNA, 15 bp, Homo sapiens
cccaggtgaattgtt

SEQ ID NO: 771118 - DNA, 15 bp, Homo sapiens
ccaggtgaattgttg

SEQ ID NO: 771119 - DNA, 15 bp, Homo sapiens
caggtgaattgttga

SEQ ID NO: 771120 - DNA, 15 bp, Homo sapiens
aggtgaattgttgaa

SEQ ID NO: 771121 - DNA, 15 bp, Homo sapiens
ggtgaattgttgaat

SEQ ID NO: 771122 - DNA, 15 bp, Homo sapiens
gtgaattgttgaatg

SEQ ID NO: 771123 - DNA, 15 bp, Homo sapiens
tgaattgttgaatga

SEQ ID NO: 771124 - DNA, 15 bp, Homo sapiens
gaattgttgaatgaa

SEQ ID NO: 771125 - DNA, 15 bp, Homo sapiens
aattgttgaatgaat

SEQ ID NO: 771126 - DNA, 15 bp, Homo sapiens
attgttgaatgaatg

SEQ ID NO: 771127 - DNA, 15 bp, Homo sapiens
ttgttgaatgaatga

SEQ ID NO: 771128 - DNA, 15 bp, Homo sapiens
tgttgaatgaatgaa

SEQ ID NO: 771129 - DNA, 15 bp, Homo sapiens
gttgaatgaatgaat

SEQ ID NO: 771130 - DNA, 15 bp, Homo sapiens
ttgaatgaatgaatg

SEQ ID NO: 771131 - DNA, 15 bp, Homo sapiens
tgaatgaatgaatga

SEQ ID NO: 771132 - DNA, 15 bp, Homo sapiens
gaatgaatgaatgaa

SEQ ID NO: 771133 - DNA, 15 bp, Homo sapiens
aatgaatgaatgaat

SEQ ID NO: 771134 - DNA, 15 bp, Homo sapiens
atgaatgaatgaatg

SEQ ID NO: 771135 - DNA, 15 bp, Homo sapiens
aatgaatgaatgaac

SEQ ID NO: 771136 - DNA, 15 bp, Homo sapiens
atgaatgaatgaaca

SEQ ID NO: 771137 - DNA, 15 bp, Homo sapiens
tgaatgaatgaacac

SEQ ID NO: 771138 - DNA, 15 bp, Homo sapiens
gaatgaatgaacaca

SEQ ID NO: 771139 - DNA, 15 bp, Homo sapiens
aatgaatgaacacag

SEQ ID NO: 771140 - DNA, 15 bp, Homo sapiens
atgaatgaacacaga

SEQ ID NO: 771141 - DNA, 15 bp, Homo sapiens
tgaatgaacacagat

SEQ ID NO: 771142 - DNA, 15 bp, Homo sapiens
gaatgaacacagatc

SEQ ID NO: 771143 - DNA, 15 bp, Homo sapiens
aatgaacacagatct

SEQ ID NO: 771144 - DNA, 15 bp, Homo sapiens
atgaacacagatctt

SEQ ID NO: 771145 - DNA, 15 bp, Homo sapiens
tgaacacagatcttc

SEQ ID NO: 771146 - DNA, 15 bp, Homo sapiens
gaacacagatcttca

SEQ ID NO: 771147 - DNA, 15 bp, Homo sapiens
aacacagatcttcat

SEQ ID NO: 771148 - DNA, 15 bp, Homo sapiens
acacagatcttcatt

SEQ ID NO: 771149 - DNA, 15 bp, Homo sapiens
cacagatcttcattc

SEQ ID NO: 771150 - DNA, 15 bp, Homo sapiens
acagatcttcattcc

SEQ ID NO: 771151 - DNA, 15 bp, Homo sapiens
cagatcttcattcct

SEQ ID NO: 771152 - DNA, 15 bp, Homo sapiens
agatcttcattccta

SEQ ID NO: 771153 - DNA, 15 bp, Homo sapiens
gatcttcattcctag

SEQ ID NO: 771154 - DNA, 15 bp, Homo sapiens
atcttcattcctagc

SEQ ID NO: 771155 - DNA, 15 bp, Homo sapiens
tcttcattcctagcc

SEQ ID NO: 771156 - DNA, 15 bp, Homo sapiens
cttcattcctagccc

SEQ ID NO: 771157 - DNA, 15 bp, Homo sapiens
ttcattcctagcccc

SEQ ID NO: 771158 - DNA, 15 bp, Homo sapiens
tcattcctagcccca

SEQ ID NO: 771159 - DNA, 15 bp, Homo sapiens
cattcctagccccag

SEQ ID NO: 771160 - DNA, 15 bp, Homo sapiens
attcctagccccagg

SEQ ID NO: 771161 - DNA, 15 bp, Homo sapiens
ttcctagccccaggc

SEQ ID NO: 771162 - DNA, 15 bp, Homo sapiens
tcctagccccaggct

SEQ ID NO: 771163 - DNA, 15 bp, Homo sapiens
cctagccccaggctt

SEQ ID NO: 771164 - DNA, 15 bp, Homo sapiens
ctagccccaggcttc

SEQ ID NO: 771165 - DNA, 15 bp, Homo sapiens
tagccccaggcttcc

SEQ ID NO: 771166 - DNA, 15 bp, Homo sapiens
agccccaggcttcca

SEQ ID NO: 771167 - DNA, 15 bp, Homo sapiens
gccccaggcttccac

SEQ ID NO: 771168 - DNA, 15 bp, Homo sapiens
ccccaggcttccact

SEQ ID NO: 771169 - DNA, 15 bp, Homo sapiens
cccaggcttccacta

SEQ ID NO: 771170 - DNA, 15 bp, Homo sapiens
ccaggcttccactat

SEQ ID NO: 771171 - DNA, 15 bp, Homo sapiens
caggcttccactatg

SEQ ID NO: 771172 - DNA, 15 bp, Homo sapiens
aggcttccactatgg

SEQ ID NO: 771173 - DNA, 15 bp, Homo sapiens
ggcttccactatggg

SEQ ID NO: 771174 - DNA, 15 bp, Homo sapiens
gcttccactatgggt

SEQ ID NO: 771175 - DNA, 15 bp, Homo sapiens
cttccactatgggta

SEQ ID NO: 771176 - DNA, 15 bp, Homo sapiens
ttccactatgggtat

SEQ ID NO: 771177 - DNA, 15 bp, Homo sapiens
tccactatgggtata

SEQ ID NO: 771178 - DNA, 15 bp, Homo sapiens
ccactatgggtatat

SEQ ID NO: 771179 - DNA, 15 bp, Homo sapiens
cactatgggtatata

SEQ ID NO: 771180 - DNA, 15 bp, Homo sapiens
actatgggtatatag

SEQ ID NO: 771181 - DNA, 15 bp, Homo sapiens
ctatgggtatatagc

SEQ ID NO: 771182 - DNA, 15 bp, Homo sapiens
tatgggtatatagca

SEQ ID NO: 771183 - DNA, 15 bp, Homo sapiens
atgggtatatagcag

SEQ ID NO: 771184 - DNA, 15 bp, Homo sapiens
tgggtatatagcagt

SEQ ID NO: 771185 - DNA, 15 bp, Homo sapiens
gggtatatagcagtc

SEQ ID NO: 771186 - DNA, 15 bp, Homo sapiens
ggtatatagcagtcc

SEQ ID NO: 771187 - DNA, 15 bp, Homo sapiens
gtatatagcagtccc

SEQ ID NO: 771188 - DNA, 15 bp, Homo sapiens
tatatagcagtccct

SEQ ID NO: 771189 - DNA, 15 bp, Homo sapiens
atatagcagtccctg

SEQ ID NO: 771190 - DNA, 15 bp, Homo sapiens
tatagcagtccctgt

SEQ ID NO: 771191 - DNA, 15 bp, Homo sapiens
atagcagtccctgtg

SEQ ID NO: 771192 - DNA, 15 bp, Homo sapiens
tagcagtccctgtgg

SEQ ID NO: 771193 - DNA, 15 bp, Homo sapiens
agcagtccctgtggt

SEQ ID NO: 771194 - DNA, 15 bp, Homo sapiens
gcagtccctgtggtg

SEQ ID NO: 771195 - DNA, 15 bp, Homo sapiens
cagtccctgtggtga

SEQ ID NO: 771196 - DNA, 15 bp, Homo sapiens
agtccctgtggtgag

SEQ ID NO: 771197 - DNA, 15 bp, Homo sapiens
gtccctgtggtgaga

SEQ ID NO: 771198 - DNA, 15 bp, Homo sapiens
tccctgtggtgagag

SEQ ID NO: 771199 - DNA, 15 bp, Homo sapiens
ccctgtggtgagagc

SEQ ID NO: 771200 - DNA, 15 bp, Homo sapiens
cctgtggtgagagca

SEQ ID NO: 771201 - DNA, 15 bp, Homo sapiens
ctgtggtgagagcac

SEQ ID NO: 771202 - DNA, 15 bp, Homo sapiens
tgtggtgagagcacc

SEQ ID NO: 771203 - DNA, 15 bp, Homo sapiens
gtggtgagagcacca

SEQ ID NO: 771204 - DNA, 15 bp, Homo sapiens
tggtgagagcaccag

SEQ ID NO: 771205 - DNA, 15 bp, Homo sapiens
ggtgagagcaccagc

SEQ ID NO: 771206 - DNA, 15 bp, Homo sapiens
gtgagagcaccagct

SEQ ID NO: 771207 - DNA, 15 bp, Homo sapiens
tgagagcaccagctc

SEQ ID NO: 771208 - DNA, 15 bp, Homo sapiens
gagagcaccagctcc

SEQ ID NO: 771209 - DNA, 15 bp, Homo sapiens
agagcaccagctcca

SEQ ID NO: 771210 - DNA, 15 bp, Homo sapiens
gagcaccagctccag

SEQ ID NO: 771211 - DNA, 15 bp, Homo sapiens
agcaccagctccaga

SEQ ID NO: 771212 - DNA, 15 bp, Homo sapiens
gcaccagctccagaa

SEQ ID NO: 771213 - DNA, 15 bp, Homo sapiens
caccagctccagaat

SEQ ID NO: 771214 - DNA, 15 bp, Homo sapiens
accagctccagaatc

SEQ ID NO: 771215 - DNA, 15 bp, Homo sapiens
ccagctccagaatca

SEQ ID NO: 771216 - DNA, 15 bp, Homo sapiens
cagctccagaatcag

SEQ ID NO: 771217 - DNA, 15 bp, Homo sapiens
agctccagaatcagc

SEQ ID NO: 771218 - DNA, 15 bp, Homo sapiens
gctccagaatcagct

SEQ ID NO: 771219 - DNA, 15 bp, Homo sapiens
ctccagaatcagctg

SEQ ID NO: 771220 - DNA, 15 bp, Homo sapiens
tccagaatcagctgc

SEQ ID NO: 771221 - DNA, 15 bp, Homo sapiens
ccagaatcagctgct

SEQ ID NO: 771222 - DNA, 15 bp, Homo sapiens
cagaatcagctgctt

SEQ ID NO: 771223 - DNA, 15 bp, Homo sapiens
agaatcagctgctta

SEQ ID NO: 771224 - DNA, 15 bp, Homo sapiens
gaatcagctgcttac

SEQ ID NO: 771225 - DNA, 15 bp, Homo sapiens
aatcagctgcttact

SEQ ID NO: 771226 - DNA, 15 bp, Homo sapiens
atcagctgcttactg

SEQ ID NO: 771227 - DNA, 15 bp, Homo sapiens
tcagctgcttactga

SEQ ID NO: 771228 - DNA, 15 bp, Homo sapiens
cagctgcttactgac

SEQ ID NO: 771229 - DNA, 15 bp, Homo sapiens
agctgcttactgact

SEQ ID NO: 771230 - DNA, 15 bp, Homo sapiens
gctgcttactgactt

SEQ ID NO: 771231 - DNA, 15 bp, Homo sapiens
ctgcttactgacttt

SEQ ID NO: 771232 - DNA, 15 bp, Homo sapiens
tgcttactgactttg

SEQ ID NO: 771233 - DNA, 15 bp, Homo sapiens
gcttactgactttgt

SEQ ID NO: 771234 - DNA, 15 bp, Homo sapiens
cttactgactttgtg

SEQ ID NO: 771235 - DNA, 15 bp, Homo sapiens
ttactgactttgtga

SEQ ID NO: 771236 - DNA, 15 bp, Homo sapiens
tactgactttgtgac

SEQ ID NO: 771237 - DNA, 15 bp, Homo sapiens
actgactttgtgact

SEQ ID NO: 771238 - DNA, 15 bp, Homo sapiens
ctgactttgtgactg

SEQ ID NO: 771239 - DNA, 15 bp, Homo sapiens
tgactttgtgactgt

SEQ ID NO: 771240 - DNA, 15 bp, Homo sapiens
gactttgtgactgtg

SEQ ID NO: 771241 - DNA, 15 bp, Homo sapiens
actttgtgactgtgg

SEQ ID NO: 771242 - DNA, 15 bp, Homo sapiens
ctttgtgactgtggg

SEQ ID NO: 771243 - DNA, 15 bp, Homo sapiens
tttgtgactgtgggc

SEQ ID NO: 771244 - DNA, 15 bp, Homo sapiens
ttgtgactgtgggca

SEQ ID NO: 771245 - DNA, 15 bp, Homo sapiens
tgtgactgtgggcag

SEQ ID NO: 771246 - DNA, 15 bp, Homo sapiens
gtgactgtgggcagg

SEQ ID NO: 771247 - DNA, 15 bp, Homo sapiens
tgactgtgggcaggt

SEQ ID NO: 771248 - DNA, 15 bp, Homo sapiens
gactgtgggcaggtg

SEQ ID NO: 771249 - DNA, 15 bp, Homo sapiens
actgtgggcaggtgc

SEQ ID NO: 771250 - DNA, 15 bp, Homo sapiens
ctgtgggcaggtgcc

SEQ ID NO: 771251 - DNA, 15 bp, Homo sapiens
tgtgggcaggtgcct

SEQ ID NO: 771252 - DNA, 15 bp, Homo sapiens
gtgggcaggtgcctt

SEQ ID NO: 771253 - DNA, 15 bp, Homo sapiens
tgggcaggtgccttg

SEQ ID NO: 771254 - DNA, 15 bp, Homo sapiens
gggcaggtgccttga

SEQ ID NO: 771255 - DNA, 15 bp, Homo sapiens
ggcaggtgccttgac

SEQ ID NO: 771256 - DNA, 15 bp, Homo sapiens
gcaggtgccttgacc

SEQ ID NO: 771257 - DNA, 15 bp, Homo sapiens
caggtgccttgacct

SEQ ID NO: 771258 - DNA, 15 bp, Homo sapiens
aggtgccttgacctc

SEQ ID NO: 771259 - DNA, 15 bp, Homo sapiens
ggtgccttgacctct

SEQ ID NO: 771260 - DNA, 15 bp, Homo sapiens
gtgccttgacctctc

SEQ ID NO: 771261 - DNA, 15 bp, Homo sapiens
tgccttgacctctct

SEQ ID NO: 771262 - DNA, 15 bp, Homo sapiens
gccttgacctctctg

SEQ ID NO: 771263 - DNA, 15 bp, Homo sapiens
ccttgacctctctga

SEQ ID NO: 771264 - DNA, 15 bp, Homo sapiens
cttgacctctctgag

SEQ ID NO: 771265 - DNA, 15 bp, Homo sapiens
ttgacctctctgagc

SEQ ID NO: 771266 - DNA, 15 bp, Homo sapiens
tgacctctctgagcc

SEQ ID NO: 771267 - DNA, 15 bp, Homo sapiens
gacctctctgagcct

SEQ ID NO: 771268 - DNA, 15 bp, Homo sapiens
acctctctgagcctt

SEQ ID NO: 771269 - DNA, 15 bp, Homo sapiens
cctctctgagccttc

SEQ ID NO: 771270 - DNA, 15 bp, Homo sapiens
ctctctgagccttca

SEQ ID NO: 771271 - DNA, 15 bp, Homo sapiens
tctctgagccttcat

SEQ ID NO: 771272 - DNA, 15 bp, Homo sapiens
ctctgagccttcatt

SEQ ID NO: 771273 - DNA, 15 bp, Homo sapiens
tctgagccttcattt

SEQ ID NO: 771274 - DNA, 15 bp, Homo sapiens
ctgagccttcatttg

SEQ ID NO: 771275 - DNA, 15 bp, Homo sapiens
tgagccttcatttgc

SEQ ID NO: 771276 - DNA, 15 bp, Homo sapiens
gagccttcatttgcc

SEQ ID NO: 771277 - DNA, 15 bp, Homo sapiens
agccttcatttgcca

SEQ ID NO: 771278 - DNA, 15 bp, Homo sapiens
gccttcatttgccat

SEQ ID NO: 771279 - DNA, 15 bp, Homo sapiens
ccttcatttgccata

SEQ ID NO: 771280 - DNA, 15 bp, Homo sapiens
cttcatttgccatat

SEQ ID NO: 771281 - DNA, 15 bp, Homo sapiens
ttcatttgccatatg

SEQ ID NO: 771282 - DNA, 15 bp, Homo sapiens
tcatttgccatatgg

SEQ ID NO: 771283 - DNA, 15 bp, Homo sapiens
catttgccatatggg

SEQ ID NO: 771284 - DNA, 15 bp, Homo sapiens
atttgccatatgggg

SEQ ID NO: 771285 - DNA, 15 bp, Homo sapiens
tttgccatatggggg

SEQ ID NO: 771286 - DNA, 15 bp, Homo sapiens
ttgccatatgggggc

SEQ ID NO: 771287 - DNA, 15 bp, Homo sapiens
tgccatatgggggca

SEQ ID NO: 771288 - DNA, 15 bp, Homo sapiens
gccatatgggggcag

SEQ ID NO: 771289 - DNA, 15 bp, Homo sapiens
ccatatgggggcagt

SEQ ID NO: 771290 - DNA, 15 bp, Homo sapiens
catatgggggcagtg

SEQ ID NO: 771291 - DNA, 15 bp, Homo sapiens
atatgggggcagtgc

SEQ ID NO: 771292 - DNA, 15 bp, Homo sapiens
tatgggggcagtgct

SEQ ID NO: 771293 - DNA, 15 bp, Homo sapiens
atgggggcagtgcta

SEQ ID NO: 771294 - DNA, 15 bp, Homo sapiens
tgggggcagtgctat

SEQ ID NO: 771295 - DNA, 15 bp, Homo sapiens
gggggcagtgctata

SEQ ID NO: 771296 - DNA, 15 bp, Homo sapiens
ggggcagtgctataa

SEQ ID NO: 771297 - DNA, 15 bp, Homo sapiens
gggcagtgctataaa

SEQ ID NO: 771298 - DNA, 15 bp, Homo sapiens
ggcagtgctataaat

SEQ ID NO: 771299 - DNA, 15 bp, Homo sapiens
gcagtgctataaata

SEQ ID NO: 771300 - DNA, 15 bp, Homo sapiens
cagtgctataaatag

SEQ ID NO: 771301 - DNA, 15 bp, Homo sapiens
agtgctataaatagt

SEQ ID NO: 771302 - DNA, 15 bp, Homo sapiens
gtgctataaatagtt

SEQ ID NO: 771303 - DNA, 15 bp, Homo sapiens
tgctataaatagttg

SEQ ID NO: 771304 - DNA, 15 bp, Homo sapiens
gctataaatagttgt

SEQ ID NO: 771305 - DNA, 15 bp, Homo sapiens
ctataaatagttgta

SEQ ID NO: 771306 - DNA, 15 bp, Homo sapiens
tataaatagttgtaa

SEQ ID NO: 771307 - DNA, 15 bp, Homo sapiens
ataaatagttgtaag

SEQ ID NO: 771308 - DNA, 15 bp, Homo sapiens
taaatagttgtaagg

SEQ ID NO: 771309 - DNA, 15 bp, Homo sapiens
aaatagttgtaagga

SEQ ID NO: 771310 - DNA, 15 bp, Homo sapiens
aatagttgtaaggat

SEQ ID NO: 771311 - DNA, 15 bp, Homo sapiens
atagttgtaaggatg

SEQ ID NO: 771312 - DNA, 15 bp, Homo sapiens
tagttgtaaggatgg

SEQ ID NO: 771313 - DNA, 15 bp, Homo sapiens
agttgtaaggatgga

SEQ ID NO: 771314 - DNA, 15 bp, Homo sapiens
gttgtaaggatggaa

SEQ ID NO: 771315 - DNA, 15 bp, Homo sapiens
ttgtaaggatggaaa

SEQ ID NO: 771316 - DNA, 15 bp, Homo sapiens
tgtaaggatggaaaa

SEQ ID NO: 771317 - DNA, 15 bp, Homo sapiens
gtaaggatggaaaag

SEQ ID NO: 771318 - DNA, 15 bp, Homo sapiens
taaggatggaaaaga

SEQ ID NO: 771319 - DNA, 15 bp, Homo sapiens
aaggatggaaaagat

SEQ ID NO: 771320 - DNA, 15 bp, Homo sapiens
aggatggaaaagatt

SEQ ID NO: 771321 - DNA, 15 bp, Homo sapiens
ggatggaaaagatta

SEQ ID NO: 771322 - DNA, 15 bp, Homo sapiens
gatggaaaagattag

SEQ ID NO: 771323 - DNA, 15 bp, Homo sapiens
atggaaaagattagg

SEQ ID NO: 771324 - DNA, 15 bp, Homo sapiens
tggaaaagattaggg

SEQ ID NO: 771325 - DNA, 15 bp, Homo sapiens
ggaaaagattagggc

SEQ ID NO: 771326 - DNA, 15 bp, Homo sapiens
gaaaagattagggca

SEQ ID NO: 771327 - DNA, 15 bp, Homo sapiens
aaaagattagggcat

SEQ ID NO: 771328 - DNA, 15 bp, Homo sapiens
aaagattagggcatg

SEQ ID NO: 771329 - DNA, 15 bp, Homo sapiens
aagattagggcatgt

SEQ ID NO: 771330 - DNA, 15 bp, Homo sapiens
agattagggcatgtg

SEQ ID NO: 771331 - DNA, 15 bp, Homo sapiens
gattagggcatgtgc

SEQ ID NO: 771332 - DNA, 15 bp, Homo sapiens
attagggcatgtgca

SEQ ID NO: 771333 - DNA, 15 bp, Homo sapiens
ttagggcatgtgcat

SEQ ID NO: 771334 - DNA, 15 bp, Homo sapiens
tagggcatgtgcatt

SEQ ID NO: 771335 - DNA, 15 bp, Homo sapiens
agggcatgtgcatta

SEQ ID NO: 771336 - DNA, 15 bp, Homo sapiens
gggcatgtgcattac

SEQ ID NO: 771337 - DNA, 15 bp, Homo sapiens
ggcatgtgcattact

SEQ ID NO: 771338 - DNA, 15 bp, Homo sapiens
gcatgtgcattactt

SEQ ID NO: 771339 - DNA, 15 bp, Homo sapiens
catgtgcattactta

SEQ ID NO: 771340 - DNA, 15 bp, Homo sapiens
atgtgcattacttag

SEQ ID NO: 771341 - DNA, 15 bp, Homo sapiens
tgtgcattacttaga

SEQ ID NO: 771342 - DNA, 15 bp, Homo sapiens
gtgcattacttagat

SEQ ID NO: 771343 - DNA, 15 bp, Homo sapiens
tgcattacttagatt

SEQ ID NO: 771344 - DNA, 15 bp, Homo sapiens
gcattacttagattc

SEQ ID NO: 771345 - DNA, 15 bp, Homo sapiens
cattacttagattca

SEQ ID NO: 771346 - DNA, 15 bp, Homo sapiens
attacttagattcat

SEQ ID NO: 771347 - DNA, 15 bp, Homo sapiens
ttacttagattcata

SEQ ID NO: 771348 - DNA, 15 bp, Homo sapiens
tacttagattcatac

SEQ ID NO: 771349 - DNA, 15 bp, Homo sapiens
acttagattcatact

SEQ ID NO: 771350 - DNA, 15 bp, Homo sapiens
cttagattcatactt

SEQ ID NO: 771351 - DNA, 15 bp, Homo sapiens
ttagattcatacttg

SEQ ID NO: 771352 - DNA, 15 bp, Homo sapiens
tagattcatacttgg

SEQ ID NO: 771353 - DNA, 15 bp, Homo sapiens
agattcatacttggc

SEQ ID NO: 771354 - DNA, 15 bp, Homo sapiens
gattcatacttggca

SEQ ID NO: 771355 - DNA, 15 bp, Homo sapiens
attcatacttggcat

SEQ ID NO: 771356 - DNA, 15 bp, Homo sapiens
ttcatacttggcata

SEQ ID NO: 771357 - DNA, 15 bp, Homo sapiens
tcatacttggcatat

SEQ ID NO: 771358 - DNA, 15 bp, Homo sapiens
catacttggcatata

SEQ ID NO: 771359 - DNA, 15 bp, Homo sapiens
atacttggcatataa

SEQ ID NO: 771360 - DNA, 15 bp, Homo sapiens
tacttggcatataat

SEQ ID NO: 771361 - DNA, 15 bp, Homo sapiens
acttggcatataatg

SEQ ID NO: 771362 - DNA, 15 bp, Homo sapiens
cttggcatataatgc

SEQ ID NO: 771363 - DNA, 15 bp, Homo sapiens
ttggcatataatgct

SEQ ID NO: 771364 - DNA, 15 bp, Homo sapiens
tggcatataatgctt

SEQ ID NO: 771365 - DNA, 15 bp, Homo sapiens
ggcatataatgcttt

SEQ ID NO: 771366 - DNA, 15 bp, Homo sapiens
gcatataatgcttta

SEQ ID NO: 771367 - DNA, 15 bp, Homo sapiens
catataatgctttat

SEQ ID NO: 771368 - DNA, 15 bp, Homo sapiens
atataatgctttata

SEQ ID NO: 771369 - DNA, 15 bp, Homo sapiens
tataatgctttataa

SEQ ID NO: 771370 - DNA, 15 bp, Homo sapiens
ataatgctttataag

SEQ ID NO: 771371 - DNA, 15 bp, Homo sapiens
taatgctttataagt

SEQ ID NO: 771372 - DNA, 15 bp, Homo sapiens
aatgctttataagtt

SEQ ID NO: 771373 - DNA, 15 bp, Homo sapiens
atgctttataagtta

SEQ ID NO: 771374 - DNA, 15 bp, Homo sapiens
tgctttataagttag

SEQ ID NO: 771375 - DNA, 15 bp, Homo sapiens
gctttataagttaga

SEQ ID NO: 771376 - DNA, 15 bp, Homo sapiens
ctttataagttagaa

SEQ ID NO: 771377 - DNA, 15 bp, Homo sapiens
tttataagttagaag

SEQ ID NO: 771378 - DNA, 15 bp, Homo sapiens
ttataagttagaagg

SEQ ID NO: 771379 - DNA, 15 bp, Homo sapiens
tataagttagaagga

SEQ ID NO: 771380 - DNA, 15 bp, Homo sapiens
ataagttagaaggaa

SEQ ID NO: 771381 - DNA, 15 bp, Homo sapiens
taagttagaaggaat

SEQ ID NO: 771382 - DNA, 15 bp, Homo sapiens
aagttagaaggaatg

SEQ ID NO: 771383 - DNA, 15 bp, Homo sapiens
agttagaaggaatgt

SEQ ID NO: 771384 - DNA, 15 bp, Homo sapiens
gttagaaggaatgtg

SEQ ID NO: 771385 - DNA, 15 bp, Homo sapiens
ttagaaggaatgtgc

SEQ ID NO: 771386 - DNA, 15 bp, Homo sapiens
tagaaggaatgtgct

SEQ ID NO: 771387 - DNA, 15 bp, Homo sapiens
agaaggaatgtgcta

SEQ ID NO: 771388 - DNA, 15 bp, Homo sapiens
gaaggaatgtgctag

SEQ ID NO: 771389 - DNA, 15 bp, Homo sapiens
aaggaatgtgctaga

SEQ ID NO: 771390 - DNA, 15 bp, Homo sapiens
aggaatgtgctagac

SEQ ID NO: 771391 - DNA, 15 bp, Homo sapiens
ggaatgtgctagaca

SEQ ID NO: 771392 - DNA, 15 bp, Homo sapiens
gaatgtgctagacac

SEQ ID NO: 771393 - DNA, 15 bp, Homo sapiens
aatgtgctagacaca

SEQ ID NO: 771394 - DNA, 15 bp, Homo sapiens
atgtgctagacacat

SEQ ID NO: 771395 - DNA, 15 bp, Homo sapiens
tgtgctagacacatc

SEQ ID NO: 771396 - DNA, 15 bp, Homo sapiens
gtgctagacacatcc

SEQ ID NO: 771397 - DNA, 15 bp, Homo sapiens
tgctagacacatcca

SEQ ID NO: 771398 - DNA, 15 bp, Homo sapiens
gctagacacatccaa

SEQ ID NO: 771399 - DNA, 15 bp, Homo sapiens
ctagacacatccaac

SEQ ID NO: 771400 - DNA, 15 bp, Homo sapiens
tagacacatccaaca

SEQ ID NO: 771401 - DNA, 15 bp, Homo sapiens
agacacatccaacaa

SEQ ID NO: 771402 - DNA, 15 bp, Homo sapiens
gacacatccaacaac

SEQ ID NO: 771403 - DNA, 15 bp, Homo sapiens
acacatccaacaact

SEQ ID NO: 771404 - DNA, 15 bp, Homo sapiens
cacatccaacaactc

SEQ ID NO: 771405 - DNA, 15 bp, Homo sapiens
acatccaacaactct

SEQ ID NO: 771406 - DNA, 15 bp, Homo sapiens
catccaacaactctc

SEQ ID NO: 771407 - DNA, 15 bp, Homo sapiens
atccaacaactctca

SEQ ID NO: 771408 - DNA, 15 bp, Homo sapiens
tccaacaactctcag

SEQ ID NO: 771409 - DNA, 15 bp, Homo sapiens
ccaacaactctcaga

SEQ ID NO: 771410 - DNA, 15 bp, Homo sapiens
caacaactctcagaa

SEQ ID NO: 771411 - DNA, 15 bp, Homo sapiens
aacaactctcagaat

SEQ ID NO: 771412 - DNA, 15 bp, Homo sapiens
acaactctcagaatc

SEQ ID NO: 771413 - DNA, 15 bp, Homo sapiens
caactctcagaatcc

SEQ ID NO: 771414 - DNA, 15 bp, Homo sapiens
aactctcagaatcct

SEQ ID NO: 771415 - DNA, 15 bp, Homo sapiens
actctcagaatcctc

SEQ ID NO: 771416 - DNA, 15 bp, Homo sapiens
ctctcagaatcctca

SEQ ID NO: 771417 - DNA, 15 bp, Homo sapiens
tctcagaatcctcac

SEQ ID NO: 771418 - DNA, 15 bp, Homo sapiens
ctcagaatcctcaca

SEQ ID NO: 771419 - DNA, 15 bp, Homo sapiens
tcagaatcctcacaa

SEQ ID NO: 771420 - DNA, 15 bp, Homo sapiens
cagaatcctcacaaa

SEQ ID NO: 771421 - DNA, 15 bp, Homo sapiens
agaatcctcacaaat

SEQ ID NO: 771422 - DNA, 15 bp, Homo sapiens
gaatcctcacaaatc

SEQ ID NO: 771423 - DNA, 15 bp, Homo sapiens
aatcctcacaaatct

SEQ ID NO: 771424 - DNA, 15 bp, Homo sapiens
atcctcacaaatctg

SEQ ID NO: 771425 - DNA, 15 bp, Homo sapiens
tcctcacaaatctgc

SEQ ID NO: 771426 - DNA, 15 bp, Homo sapiens
cctcacaaatctgct

SEQ ID NO: 771427 - DNA, 15 bp, Homo sapiens
ctcacaaatctgctg

SEQ ID NO: 771428 - DNA, 15 bp, Homo sapiens
tcacaaatctgctgc

SEQ ID NO: 771429 - DNA, 15 bp, Homo sapiens
cacaaatctgctgca

SEQ ID NO: 771430 - DNA, 15 bp, Homo sapiens
acaaatctgctgcaa

SEQ ID NO: 771431 - DNA, 15 bp, Homo sapiens
caaatctgctgcaaa

SEQ ID NO: 771432 - DNA, 15 bp, Homo sapiens
aaatctgctgcaaag

SEQ ID NO: 771433 - DNA, 15 bp, Homo sapiens
aatctgctgcaaagc

SEQ ID NO: 771434 - DNA, 15 bp, Homo sapiens
atctgctgcaaagca

SEQ ID NO: 771435 - DNA, 15 bp, Homo sapiens
tctgctgcaaagcac

SEQ ID NO: 771436 - DNA, 15 bp, Homo sapiens
ctgctgcaaagcact

SEQ ID NO: 771437 - DNA, 15 bp, Homo sapiens
tgctgcaaagcactt

SEQ ID NO: 771438 - DNA, 15 bp, Homo sapiens
gctgcaaagcactta

SEQ ID NO: 771439 - DNA, 15 bp, Homo sapiens
ctgcaaagcacttat

SEQ ID NO: 771440 - DNA, 15 bp, Homo sapiens
tgcaaagcacttata

SEQ ID NO: 771441 - DNA, 15 bp, Homo sapiens
gcaaagcacttataa

SEQ ID NO: 771442 - DNA, 15 bp, Homo sapiens
caaagcacttataat

SEQ ID NO: 771443 - DNA, 15 bp, Homo sapiens
aaagcacttataatt

SEQ ID NO: 771444 - DNA, 15 bp, Homo sapiens
aagcacttataatta

SEQ ID NO: 771445 - DNA, 15 bp, Homo sapiens
agcacttataattat

SEQ ID NO: 771446 - DNA, 15 bp, Homo sapiens
gcacttataattatt

SEQ ID NO: 771447 - DNA, 15 bp, Homo sapiens
cacttataattattc

SEQ ID NO: 771448 - DNA, 15 bp, Homo sapiens
acttataattattcc

SEQ ID NO: 771449 - DNA, 15 bp, Homo sapiens
cttataattattcct

SEQ ID NO: 771450 - DNA, 15 bp, Homo sapiens
ttataattattcctg

SEQ ID NO: 771451 - DNA, 15 bp, Homo sapiens
tataattattcctgt

SEQ ID NO: 771452 - DNA, 15 bp, Homo sapiens
ataattattcctgta

SEQ ID NO: 771453 - DNA, 15 bp, Homo sapiens
taattattcctgtat

SEQ ID NO: 771454 - DNA, 15 bp, Homo sapiens
aattattcctgtatt

SEQ ID NO: 771455 - DNA, 15 bp, Homo sapiens
attattcctgtatta

SEQ ID NO: 771456 - DNA, 15 bp, Homo sapiens
ttattcctgtattat

SEQ ID NO: 771457 - DNA, 15 bp, Homo sapiens
tattcctgtattata

SEQ ID NO: 771458 - DNA, 15 bp, Homo sapiens
attcctgtattatag

SEQ ID NO: 771459 - DNA, 15 bp, Homo sapiens
ttcctgtattatagc

SEQ ID NO: 771460 - DNA, 15 bp, Homo sapiens
tcctgtattatagct

SEQ ID NO: 771461 - DNA, 15 bp, Homo sapiens
cctgtattatagctc

SEQ ID NO: 771462 - DNA, 15 bp, Homo sapiens
ctgtattatagctca

SEQ ID NO: 771463 - DNA, 15 bp, Homo sapiens
tgtattatagctcag

SEQ ID NO: 771464 - DNA, 15 bp, Homo sapiens
gtattatagctcaga

SEQ ID NO: 771465 - DNA, 15 bp, Homo sapiens
tattatagctcagaa

SEQ ID NO: 771466 - DNA, 15 bp, Homo sapiens
attatagctcagaaa

SEQ ID NO: 771467 - DNA, 15 bp, Homo sapiens
ttatagctcagaaac

SEQ ID NO: 771468 - DNA, 15 bp, Homo sapiens
tatagctcagaaacc

SEQ ID NO: 771469 - DNA, 15 bp, Homo sapiens
atagctcagaaacct

SEQ ID NO: 771470 - DNA, 15 bp, Homo sapiens
tagctcagaaacctg

SEQ ID NO: 771471 - DNA, 15 bp, Homo sapiens
agctcagaaacctga

SEQ ID NO: 771472 - DNA, 15 bp, Homo sapiens
gctcagaaacctgag

SEQ ID NO: 771473 - DNA, 15 bp, Homo sapiens
ctcagaaacctgagg

SEQ ID NO: 771474 - DNA, 15 bp, Homo sapiens
tcagaaacctgaggt

SEQ ID NO: 771475 - DNA, 15 bp, Homo sapiens
cagaaacctgaggtt

SEQ ID NO: 771476 - DNA, 15 bp, Homo sapiens
agaaacctgaggttt

SEQ ID NO: 771477 - DNA, 15 bp, Homo sapiens
gaaacctgaggtttc

SEQ ID NO: 771478 - DNA, 15 bp, Homo sapiens
aaacctgaggtttca

SEQ ID NO: 771479 - DNA, 15 bp, Homo sapiens
aacctgaggtttcaa

SEQ ID NO: 771480 - DNA, 15 bp, Homo sapiens
acctgaggtttcaaa

SEQ ID NO: 771481 - DNA, 15 bp, Homo sapiens
cctgaggtttcaaag

SEQ ID NO: 771482 - DNA, 15 bp, Homo sapiens
ctgaggtttcaaagg

SEQ ID NO: 771483 - DNA, 15 bp, Homo sapiens
tgaggtttcaaagga

SEQ ID NO: 771484 - DNA, 15 bp, Homo sapiens
gaggtttcaaaggat

SEQ ID NO: 771485 - DNA, 15 bp, Homo sapiens
aggtttcaaaggatt

SEQ ID NO: 771486 - DNA, 15 bp, Homo sapiens
ggtttcaaaggatta

SEQ ID NO: 771487 - DNA, 15 bp, Homo sapiens
gtttcaaaggattaa

SEQ ID NO: 771488 - DNA, 15 bp, Homo sapiens
tttcaaaggattaac

SEQ ID NO: 771489 - DNA, 15 bp, Homo sapiens
ttcaaaggattaact

SEQ ID NO: 771490 - DNA, 15 bp, Homo sapiens
tcaaaggattaacta

SEQ ID NO: 771491 - DNA, 15 bp, Homo sapiens
caaaggattaactaa

SEQ ID NO: 771492 - DNA, 15 bp, Homo sapiens
aaaggattaactaac

SEQ ID NO: 771493 - DNA, 15 bp, Homo sapiens
aaggattaactaacc

SEQ ID NO: 771494 - DNA, 15 bp, Homo sapiens
aggattaactaacct

SEQ ID NO: 771495 - DNA, 15 bp, Homo sapiens
ggattaactaacctg

SEQ ID NO: 771496 - DNA, 15 bp, Homo sapiens
gattaactaacctgc

SEQ ID NO: 771497 - DNA, 15 bp, Homo sapiens
attaactaacctgct

SEQ ID NO: 771498 - DNA, 15 bp, Homo sapiens
ttaactaacctgctg

SEQ ID NO: 771499 - DNA, 15 bp, Homo sapiens
taactaacctgctgt

SEQ ID NO: 771500 - DNA, 15 bp, Homo sapiens
aactaacctgctgta

SEQ ID NO: 771501 - DNA, 15 bp, Homo sapiens
actaacctgctgtag

SEQ ID NO: 771502 - DNA, 15 bp, Homo sapiens
ctaacctgctgtagt

SEQ ID NO: 771503 - DNA, 15 bp, Homo sapiens
taacctgctgtagtt

SEQ ID NO: 771504 - DNA, 15 bp, Homo sapiens
aacctgctgtagttt

SEQ ID NO: 771505 - DNA, 15 bp, Homo sapiens
acctgctgtagtttg

SEQ ID NO: 771506 - DNA, 15 bp, Homo sapiens
cctgctgtagtttgc

SEQ ID NO: 771507 - DNA, 15 bp, Homo sapiens
ctgctgtagtttgca

SEQ ID NO: 771508 - DNA, 15 bp, Homo sapiens
tgctgtagtttgcag

SEQ ID NO: 771509 - DNA, 15 bp, Homo sapiens
gctgtagtttgcaga

SEQ ID NO: 771510 - DNA, 15 bp, Homo sapiens
ctgtagtttgcagaa

SEQ ID NO: 771511 - DNA, 15 bp, Homo sapiens
tgtagtttgcagaat

SEQ ID NO: 771512 - DNA, 15 bp, Homo sapiens
gtagtttgcagaata

SEQ ID NO: 771513 - DNA, 15 bp, Homo sapiens
tagtttgcagaataa

SEQ ID NO: 771514 - DNA, 15 bp, Homo sapiens
agtttgcagaataaa

SEQ ID NO: 771515 - DNA, 15 bp, Homo sapiens
gtttgcagaataaat

SEQ ID NO: 771516 - DNA, 15 bp, Homo sapiens
tttgcagaataaatt

SEQ ID NO: 771517 - DNA, 15 bp, Homo sapiens
ttgcagaataaatta

SEQ ID NO: 771518 - DNA, 15 bp, Homo sapiens
tgcagaataaattag

SEQ ID NO: 771519 - DNA, 15 bp, Homo sapiens
gcagaataaattaga

SEQ ID NO: 771520 - DNA, 15 bp, Homo sapiens
cagaataaattagat

SEQ ID NO: 771521 - DNA, 15 bp, Homo sapiens
agaataaattagatt

SEQ ID NO: 771522 - DNA, 15 bp, Homo sapiens
gaataaattagattt

SEQ ID NO: 771523 - DNA, 15 bp, Homo sapiens
aataaattagatttt

SEQ ID NO: 771524 - DNA, 15 bp, Homo sapiens
ataaattagatttta

SEQ ID NO: 771525 - DNA, 15 bp, Homo sapiens
taaattagattttaa

SEQ ID NO: 771526 - DNA, 15 bp, Homo sapiens
aaattagattttaac

SEQ ID NO: 771527 - DNA, 15 bp, Homo sapiens
aattagattttaaca

SEQ ID NO: 771528 - DNA, 15 bp, Homo sapiens
attagattttaacac

SEQ ID NO: 771529 - DNA, 15 bp, Homo sapiens
ttagattttaacaca

SEQ ID NO: 771530 - DNA, 15 bp, Homo sapiens
tagattttaacacaa

SEQ ID NO: 771531 - DNA, 15 bp, Homo sapiens
agattttaacacaaa

SEQ ID NO: 771532 - DNA, 15 bp, Homo sapiens
gattttaacacaaag

SEQ ID NO: 771533 - DNA, 15 bp, Homo sapiens
attttaacacaaagc

SEQ ID NO: 771534 - DNA, 15 bp, Homo sapiens
ttttaacacaaagca

SEQ ID NO: 771535 - DNA, 15 bp, Homo sapiens
tttaacacaaagcaa

SEQ ID NO: 771536 - DNA, 15 bp, Homo sapiens
ttaacacaaagcaaa

SEQ ID NO: 771537 - DNA, 15 bp, Homo sapiens
taacacaaagcaaaa

SEQ ID NO: 771538 - DNA, 15 bp, Homo sapiens
aacacaaagcaaaac

SEQ ID NO: 771539 - DNA, 15 bp, Homo sapiens
acacaaagcaaaaca

SEQ ID NO: 771540 - DNA, 15 bp, Homo sapiens
cacaaagcaaaacaa

SEQ ID NO: 771541 - DNA, 15 bp, Homo sapiens
acaaagcaaaacaaa

SEQ ID NO: 771542 - DNA, 15 bp, Homo sapiens
caaagcaaaacaaac

SEQ ID NO: 771543 - DNA, 15 bp, Homo sapiens
aaagcaaaacaaacc

SEQ ID NO: 771544 - DNA, 15 bp, Homo sapiens
aagcaaaacaaacca

SEQ ID NO: 771545 - DNA, 15 bp, Homo sapiens
agcaaaacaaaccaa

SEQ ID NO: 771546 - DNA, 15 bp, Homo sapiens
gcaaaacaaaccaac

SEQ ID NO: 771547 - DNA, 15 bp, Homo sapiens
caaaacaaaccaaca

SEQ ID NO: 771548 - DNA, 15 bp, Homo sapiens
aaaacaaaccaacaa

SEQ ID NO: 771549 - DNA, 15 bp, Homo sapiens
aaacaaaccaacaaa

SEQ ID NO: 771550 - DNA, 15 bp, Homo sapiens
aacaaaccaacaaaa

SEQ ID NO: 771551 - DNA, 15 bp, Homo sapiens
acaaaccaacaaaac

SEQ ID NO: 771552 - DNA, 15 bp, Homo sapiens
caaaccaacaaaaca

SEQ ID NO: 771553 - DNA, 15 bp, Homo sapiens
aaaccaacaaaacaa

SEQ ID NO: 771554 - DNA, 15 bp, Homo sapiens
aaccaacaaaacaag

SEQ ID NO: 771555 - DNA, 15 bp, Homo sapiens
accaacaaaacaagg

SEQ ID NO: 771556 - DNA, 15 bp, Homo sapiens
ccaacaaaacaaggc

SEQ ID NO: 771557 - DNA, 15 bp, Homo sapiens
caacaaaacaaggcc

SEQ ID NO: 771558 - DNA, 15 bp, Homo sapiens
aacaaaacaaggcca

SEQ ID NO: 771559 - DNA, 15 bp, Homo sapiens
acaaaacaaggccaa

SEQ ID NO: 771560 - DNA, 15 bp, Homo sapiens
caaaacaaggccaat

SEQ ID NO: 771561 - DNA, 15 bp, Homo sapiens
aaaacaaggccaata

SEQ ID NO: 771562 - DNA, 15 bp, Homo sapiens
aaacaaggccaatat

SEQ ID NO: 771563 - DNA, 15 bp, Homo sapiens
aacaaggccaatatg

SEQ ID NO: 771564 - DNA, 15 bp, Homo sapiens
acaaggccaatatgc

SEQ ID NO: 771565 - DNA, 15 bp, Homo sapiens
caaggccaatatgca

SEQ ID NO: 771566 - DNA, 15 bp, Homo sapiens
aaggccaatatgcaa

SEQ ID NO: 771567 - DNA, 15 bp, Homo sapiens
aggccaatatgcaaa

SEQ ID NO: 771568 - DNA, 15 bp, Homo sapiens
ggccaatatgcaaac

SEQ ID NO: 771569 - DNA, 15 bp, Homo sapiens
gccaatatgcaaacc

SEQ ID NO: 771570 - DNA, 15 bp, Homo sapiens
ccaatatgcaaacct

SEQ ID NO: 771571 - DNA, 15 bp, Homo sapiens
caatatgcaaacctg

SEQ ID NO: 771572 - DNA, 15 bp, Homo sapiens
aatatgcaaacctgg

SEQ ID NO: 771573 - DNA, 15 bp, Homo sapiens
atatgcaaacctggg

SEQ ID NO: 771574 - DNA, 15 bp, Homo sapiens
tatgcaaacctggga

SEQ ID NO: 771575 - DNA, 15 bp, Homo sapiens
atgcaaacctgggat

SEQ ID NO: 771576 - DNA, 15 bp, Homo sapiens
tgcaaacctgggatt

SEQ ID NO: 771577 - DNA, 15 bp, Homo sapiens
gcaaacctgggattg

SEQ ID NO: 771578 - DNA, 15 bp, Homo sapiens
caaacctgggattgt

SEQ ID NO: 771579 - DNA, 15 bp, Homo sapiens
aaacctgggattgtc

SEQ ID NO: 771580 - DNA, 15 bp, Homo sapiens
aacctgggattgtct

SEQ ID NO: 771581 - DNA, 15 bp, Homo sapiens
acctgggattgtctg

SEQ ID NO: 771582 - DNA, 15 bp, Homo sapiens
cctgggattgtctga

SEQ ID NO: 771583 - DNA, 15 bp, Homo sapiens
ctgggattgtctgac

SEQ ID NO: 771584 - DNA, 15 bp, Homo sapiens
tgggattgtctgact

SEQ ID NO: 771585 - DNA, 15 bp, Homo sapiens
gggattgtctgactc

SEQ ID NO: 771586 - DNA, 15 bp, Homo sapiens
ggattgtctgactcc

SEQ ID NO: 771587 - DNA, 15 bp, Homo sapiens
gattgtctgactcca

SEQ ID NO: 771588 - DNA, 15 bp, Homo sapiens
attgtctgactccaa

SEQ ID NO: 771589 - DNA, 15 bp, Homo sapiens
ttgtctgactccaaa

SEQ ID NO: 771590 - DNA, 15 bp, Homo sapiens
tgtctgactccaaaa

SEQ ID NO: 771591 - DNA, 15 bp, Homo sapiens
gtctgactccaaaag

SEQ ID NO: 771592 - DNA, 15 bp, Homo sapiens
tctgactccaaaagc

SEQ ID NO: 771593 - DNA, 15 bp, Homo sapiens
ctgactccaaaagct

SEQ ID NO: 771594 - DNA, 15 bp, Homo sapiens
tgactccaaaagctt

SEQ ID NO: 771595 - DNA, 15 bp, Homo sapiens
gactccaaaagcttg

SEQ ID NO: 771596 - DNA, 15 bp, Homo sapiens
actccaaaagcttgt

SEQ ID NO: 771597 - DNA, 15 bp, Homo sapiens
ctccaaaagcttgtc

SEQ ID NO: 771598 - DNA, 15 bp, Homo sapiens
tccaaaagcttgtct

SEQ ID NO: 771599 - DNA, 15 bp, Homo sapiens
ccaaaagcttgtctt

SEQ ID NO: 771600 - DNA, 15 bp, Homo sapiens
caaaagcttgtcttc

SEQ ID NO: 771601 - DNA, 15 bp, Homo sapiens
aaaagcttgtcttcc

SEQ ID NO: 771602 - DNA, 15 bp, Homo sapiens
aaagcttgtcttcct

SEQ ID NO: 771603 - DNA, 15 bp, Homo sapiens
aagcttgtcttcctt

SEQ ID NO: 771604 - DNA, 15 bp, Homo sapiens
agcttgtcttccttg

SEQ ID NO: 771605 - DNA, 15 bp, Homo sapiens
gcttgtcttccttga

SEQ ID NO: 771606 - DNA, 15 bp, Homo sapiens
cttgtcttccttgac

SEQ ID NO: 771607 - DNA, 15 bp, Homo sapiens
ttgtcttccttgaca

SEQ ID NO: 771608 - DNA, 15 bp, Homo sapiens
tgtcttccttgacag

SEQ ID NO: 771609 - DNA, 15 bp, Homo sapiens
gtcttccttgacagt

SEQ ID NO: 771610 - DNA, 15 bp, Homo sapiens
tcttccttgacagtg

SEQ ID NO: 771611 - DNA, 15 bp, Homo sapiens
cttccttgacagtgt

SEQ ID NO: 771612 - DNA, 15 bp, Homo sapiens
ttccttgacagtgtc

SEQ ID NO: 771613 - DNA, 15 bp, Homo sapiens
tccttgacagtgtcc

SEQ ID NO: 771614 - DNA, 15 bp, Homo sapiens
ccttgacagtgtccc

SEQ ID NO: 771615 - DNA, 15 bp, Homo sapiens
cttgacagtgtccca

SEQ ID NO: 771616 - DNA, 15 bp, Homo sapiens
ttgacagtgtcccat

SEQ ID NO: 771617 - DNA, 15 bp, Homo sapiens
tgacagtgtcccatt

SEQ ID NO: 771618 - DNA, 15 bp, Homo sapiens
gacagtgtcccattc

SEQ ID NO: 771619 - DNA, 15 bp, Homo sapiens
acagtgtcccattcc

SEQ ID NO: 771620 - DNA, 15 bp, Homo sapiens
cagtgtcccattcct

SEQ ID NO: 771621 - DNA, 15 bp, Homo sapiens
agtgtcccattcctc

SEQ ID NO: 771622 - DNA, 15 bp, Homo sapiens
gtgtcccattcctct

SEQ ID NO: 771623 - DNA, 15 bp, Homo sapiens
tgtcccattcctctg

SEQ ID NO: 771624 - DNA, 15 bp, Homo sapiens
gtcccattcctctgc

SEQ ID NO: 771625 - DNA, 15 bp, Homo sapiens
tcccattcctctgcc

SEQ ID NO: 771626 - DNA, 15 bp, Homo sapiens
cccattcctctgcca

SEQ ID NO: 771627 - DNA, 15 bp, Homo sapiens
ccattcctctgccaa

SEQ ID NO: 771628 - DNA, 15 bp, Homo sapiens
cattcctctgccaag

SEQ ID NO: 771629 - DNA, 15 bp, Homo sapiens
attcctctgccaagc

SEQ ID NO: 771630 - DNA, 15 bp, Homo sapiens
ttcctctgccaagct

SEQ ID NO: 771631 - DNA, 15 bp, Homo sapiens
tcctctgccaagctg

SEQ ID NO: 771632 - DNA, 15 bp, Homo sapiens
cctctgccaagctga

SEQ ID NO: 771633 - DNA, 15 bp, Homo sapiens
ctctgccaagctgaa

SEQ ID NO: 771634 - DNA, 15 bp, Homo sapiens
tctgccaagctgaat

SEQ ID NO: 771635 - DNA, 15 bp, Homo sapiens
ctgccaagctgaatt

SEQ ID NO: 771636 - DNA, 15 bp, Homo sapiens
tgccaagctgaattc

SEQ ID NO: 771637 - DNA, 15 bp, Homo sapiens
gccaagctgaattct

SEQ ID NO: 771638 - DNA, 15 bp, Homo sapiens
ccaagctgaattctc

SEQ ID NO: 771639 - DNA, 15 bp, Homo sapiens
caagctgaattctca

SEQ ID NO: 771640 - DNA, 15 bp, Homo sapiens
aagctgaattctcac

SEQ ID NO: 771641 - DNA, 15 bp, Homo sapiens
agctgaattctcacc

SEQ ID NO: 771642 - DNA, 15 bp, Homo sapiens
gctgaattctcacct

SEQ ID NO: 771643 - DNA, 15 bp, Homo sapiens
ctgaattctcacctc

SEQ ID NO: 771644 - DNA, 15 bp, Homo sapiens
tgaattctcacctct

SEQ ID NO: 771645 - DNA, 15 bp, Homo sapiens
gaattctcacctctg

SEQ ID NO: 771646 - DNA, 15 bp, Homo sapiens
aattctcacctctgc

SEQ ID NO: 771647 - DNA, 15 bp, Homo sapiens
attctcacctctgca

SEQ ID NO: 771648 - DNA, 15 bp, Homo sapiens
ttctcacctctgcag

SEQ ID NO: 771649 - DNA, 15 bp, Homo sapiens
tctcacctctgcaga

SEQ ID NO: 771650 - DNA, 15 bp, Homo sapiens
ctcacctctgcagac

SEQ ID NO: 771651 - DNA, 15 bp, Homo sapiens
tcacctctgcagaca

SEQ ID NO: 771652 - DNA, 15 bp, Homo sapiens
cacctctgcagacag

SEQ ID NO: 771653 - DNA, 15 bp, Homo sapiens
acctctgcagacaga

SEQ ID NO: 771654 - DNA, 15 bp, Homo sapiens
cctctgcagacagag

SEQ ID NO: 771655 - DNA, 15 bp, Homo sapiens
ctctgcagacagagg

SEQ ID NO: 771656 - DNA, 15 bp, Homo sapiens
tctgcagacagaggc

SEQ ID NO: 771657 - DNA, 15 bp, Homo sapiens
ctgcagacagaggct

SEQ ID NO: 771658 - DNA, 15 bp, Homo sapiens
tgcagacagaggctg

SEQ ID NO: 771659 - DNA, 15 bp, Homo sapiens
gcagacagaggctga

SEQ ID NO: 771660 - DNA, 15 bp, Homo sapiens
cagacagaggctgag

SEQ ID NO: 771661 - DNA, 15 bp, Homo sapiens
agacagaggctgaga

SEQ ID NO: 771662 - DNA, 15 bp, Homo sapiens
gacagaggctgagat

SEQ ID NO: 771663 - DNA, 15 bp, Homo sapiens
acagaggctgagatg

SEQ ID NO: 771664 - DNA, 15 bp, Homo sapiens
cagaggctgagatgt

SEQ ID NO: 771665 - DNA, 15 bp, Homo sapiens
agaggctgagatgtt

SEQ ID NO: 771666 - DNA, 15 bp, Homo sapiens
gaggctgagatgttt

SEQ ID NO: 771667 - DNA, 15 bp, Homo sapiens
aggctgagatgtttg

SEQ ID NO: 771668 - DNA, 15 bp, Homo sapiens
ggctgagatgtttgc

SEQ ID NO: 771669 - DNA, 15 bp, Homo sapiens
gctgagatgtttgca

SEQ ID NO: 771670 - DNA, 15 bp, Homo sapiens
ctgagatgtttgcat

SEQ ID NO: 771671 - DNA, 15 bp, Homo sapiens
tgagatgtttgcatt

SEQ ID NO: 771672 - DNA, 15 bp, Homo sapiens
gagatgtttgcattt

SEQ ID NO: 771673 - DNA, 15 bp, Homo sapiens
agatgtttgcatttt

SEQ ID NO: 771674 - DNA, 15 bp, Homo sapiens
gatgtttgcattttg

SEQ ID NO: 771675 - DNA, 15 bp, Homo sapiens
atgtttgcattttgg

SEQ ID NO: 771676 - DNA, 15 bp, Homo sapiens
tgtttgcattttgga

SEQ ID NO: 771677 - DNA, 15 bp, Homo sapiens
gtttgcattttggaa

SEQ ID NO: 771678 - DNA, 15 bp, Homo sapiens
tttgcattttggaag

SEQ ID NO: 771679 - DNA, 15 bp, Homo sapiens
ttgcattttggaagc

SEQ ID NO: 771680 - DNA, 15 bp, Homo sapiens
tgcattttggaagct

SEQ ID NO: 771681 - DNA, 15 bp, Homo sapiens
gcattttggaagctc

SEQ ID NO: 771682 - DNA, 15 bp, Homo sapiens
cattttggaagctca

SEQ ID NO: 771683 - DNA, 15 bp, Homo sapiens
attttggaagctcac

SEQ ID NO: 771684 - DNA, 15 bp, Homo sapiens
ttttggaagctcacc

SEQ ID NO: 771685 - DNA, 15 bp, Homo sapiens
tttggaagctcaccg

SEQ ID NO: 771686 - DNA, 15 bp, Homo sapiens
ttggaagctcaccgc

SEQ ID NO: 771687 - DNA, 15 bp, Homo sapiens
tggaagctcaccgcc

SEQ ID NO: 771688 - DNA, 15 bp, Homo sapiens
ggaagctcaccgcct

SEQ ID NO: 771689 - DNA, 15 bp, Homo sapiens
gaagctcaccgcctg

SEQ ID NO: 771690 - DNA, 15 bp, Homo sapiens
aagctcaccgcctgg

SEQ ID NO: 771691 - DNA, 15 bp, Homo sapiens
agctcaccgcctggc

SEQ ID NO: 771692 - DNA, 15 bp, Homo sapiens
gctcaccgcctggcc

SEQ ID NO: 771693 - DNA, 15 bp, Homo sapiens
ctcaccgcctggcca

SEQ ID NO: 771694 - DNA, 15 bp, Homo sapiens
tcaccgcctggccaa

SEQ ID NO: 771695 - DNA, 15 bp, Homo sapiens
caccgcctggccaaa

SEQ ID NO: 771696 - DNA, 15 bp, Homo sapiens
accgcctggccaaag

SEQ ID NO: 771697 - DNA, 15 bp, Homo sapiens
ccgcctggccaaagg

SEQ ID NO: 771698 - DNA, 15 bp, Homo sapiens
cgcctggccaaaggc

SEQ ID NO: 771699 - DNA, 15 bp, Homo sapiens
gcctggccaaaggct

SEQ ID NO: 771700 - DNA, 15 bp, Homo sapiens
cctggccaaaggcta

SEQ ID NO: 771701 - DNA, 15 bp, Homo sapiens
ctggccaaaggctaa

SEQ ID NO: 771702 - DNA, 15 bp, Homo sapiens
tggccaaaggctaac

SEQ ID NO: 771703 - DNA, 15 bp, Homo sapiens
ggccaaaggctaaca

SEQ ID NO: 771704 - DNA, 15 bp, Homo sapiens
gccaaaggctaacat

SEQ ID NO: 771705 - DNA, 15 bp, Homo sapiens
ccaaaggctaacata

SEQ ID NO: 771706 - DNA, 15 bp, Homo sapiens
caaaggctaacatat

SEQ ID NO: 771707 - DNA, 15 bp, Homo sapiens
aaaggctaacatatt

SEQ ID NO: 771708 - DNA, 15 bp, Homo sapiens
aaggctaacatattg

SEQ ID NO: 771709 - DNA, 15 bp, Homo sapiens
aggctaacatattgt

SEQ ID NO: 771710 - DNA, 15 bp, Homo sapiens
ggctaacatattgtt

SEQ ID NO: 771711 - DNA, 15 bp, Homo sapiens
gctaacatattgttc

SEQ ID NO: 771712 - DNA, 15 bp, Homo sapiens
ctaacatattgttca

SEQ ID NO: 771713 - DNA, 15 bp, Homo sapiens
taacatattgttcat

SEQ ID NO: 771714 - DNA, 15 bp, Homo sapiens
aacatattgttcatg

SEQ ID NO: 771715 - DNA, 15 bp, Homo sapiens
acatattgttcatgg

SEQ ID NO: 771716 - DNA, 15 bp, Homo sapiens
catattgttcatgga

SEQ ID NO: 771717 - DNA, 15 bp, Homo sapiens
atattgttcatggat

SEQ ID NO: 771718 - DNA, 15 bp, Homo sapiens
tattgttcatggatg

SEQ ID NO: 771719 - DNA, 15 bp, Homo sapiens
attgttcatggatgg

SEQ ID NO: 771720 - DNA, 15 bp, Homo sapiens
ttgttcatggatgga

SEQ ID NO: 771721 - DNA, 15 bp, Homo sapiens
tgttcatggatggac

SEQ ID NO: 771722 - DNA, 15 bp, Homo sapiens
gttcatggatggact

SEQ ID NO: 771723 - DNA, 15 bp, Homo sapiens
ttcatggatggactg

SEQ ID NO: 771724 - DNA, 15 bp, Homo sapiens
tcatggatggactgg

SEQ ID NO: 771725 - DNA, 15 bp, Homo sapiens
catggatggactgga

SEQ ID NO: 771726 - DNA, 15 bp, Homo sapiens
atggatggactggac

SEQ ID NO: 771727 - DNA, 15 bp, Homo sapiens
tggatggactggaca

SEQ ID NO: 771728 - DNA, 15 bp, Homo sapiens
ggatggactggacat

SEQ ID NO: 771729 - DNA, 15 bp, Homo sapiens
gatggactggacatt

SEQ ID NO: 771730 - DNA, 15 bp, Homo sapiens
atggactggacattt

SEQ ID NO: 771731 - DNA, 15 bp, Homo sapiens
tggactggacatttg

SEQ ID NO: 771732 - DNA, 15 bp, Homo sapiens
ggactggacatttga

SEQ ID NO: 771733 - DNA, 15 bp, Homo sapiens
gactggacatttgaa

SEQ ID NO: 771734 - DNA, 15 bp, Homo sapiens
actggacatttgaaa

SEQ ID NO: 771735 - DNA, 15 bp, Homo sapiens
ctggacatttgaaat

SEQ ID NO: 771736 - DNA, 15 bp, Homo sapiens
tggacatttgaaatt

SEQ ID NO: 771737 - DNA, 15 bp, Homo sapiens
ggacatttgaaatta

SEQ ID NO: 771738 - DNA, 15 bp, Homo sapiens
gacatttgaaattac

SEQ ID NO: 771739 - DNA, 15 bp, Homo sapiens
acatttgaaattaca

SEQ ID NO: 771740 - DNA, 15 bp, Homo sapiens
catttgaaattacat

SEQ ID NO: 771741 - DNA, 15 bp, Homo sapiens
atttgaaattacatg

SEQ ID NO: 771742 - DNA, 15 bp, Homo sapiens
tttgaaattacatgc

SEQ ID NO: 771743 - DNA, 15 bp, Homo sapiens
ttgaaattacatgct

SEQ ID NO: 771744 - DNA, 15 bp, Homo sapiens
tgaaattacatgctg

SEQ ID NO: 771745 - DNA, 15 bp, Homo sapiens
gaaattacatgctgg

SEQ ID NO: 771746 - DNA, 15 bp, Homo sapiens
aaattacatgctggc

SEQ ID NO: 771747 - DNA, 15 bp, Homo sapiens
aattacatgctggcc

SEQ ID NO: 771748 - DNA, 15 bp, Homo sapiens
attacatgctggcct

SEQ ID NO: 771749 - DNA, 15 bp, Homo sapiens
ttacatgctggcctt

SEQ ID NO: 771750 - DNA, 15 bp, Homo sapiens
tacatgctggccttg

SEQ ID NO: 771751 - DNA, 15 bp, Homo sapiens
acatgctggccttgg

SEQ ID NO: 771752 - DNA, 15 bp, Homo sapiens
catgctggccttggg

SEQ ID NO: 771753 - DNA, 15 bp, Homo sapiens
atgctggccttggga

SEQ ID NO: 771754 - DNA, 15 bp, Homo sapiens
tgctggccttgggag

SEQ ID NO: 771755 - DNA, 15 bp, Homo sapiens
gctggccttgggagg

SEQ ID NO: 771756 - DNA, 15 bp, Homo sapiens
ctggccttgggaggg

SEQ ID NO: 771757 - DNA, 15 bp, Homo sapiens
tggccttgggaggga

SEQ ID NO: 771758 - DNA, 15 bp, Homo sapiens
ggccttgggagggaa

SEQ ID NO: 771759 - DNA, 15 bp, Homo sapiens
gccttgggagggaag

SEQ ID NO: 771760 - DNA, 15 bp, Homo sapiens
ccttgggagggaaga

SEQ ID NO: 771761 - DNA, 15 bp, Homo sapiens
cttgggagggaagag

SEQ ID NO: 771762 - DNA, 15 bp, Homo sapiens
ttgggagggaagaga

SEQ ID NO: 771763 - DNA, 15 bp, Homo sapiens
tgggagggaagagag

SEQ ID NO: 771764 - DNA, 15 bp, Homo sapiens
gggagggaagagaga

SEQ ID NO: 771765 - DNA, 15 bp, Homo sapiens
ggagggaagagagaa

SEQ ID NO: 771766 - DNA, 15 bp, Homo sapiens
gagggaagagagaag

SEQ ID NO: 771767 - DNA, 15 bp, Homo sapiens
agggaagagagaagg

SEQ ID NO: 771768 - DNA, 15 bp, Homo sapiens
gggaagagagaagga

SEQ ID NO: 771769 - DNA, 15 bp, Homo sapiens
ggaagagagaaggaa

SEQ ID NO: 771770 - DNA, 15 bp, Homo sapiens
gaagagagaaggaat

SEQ ID NO: 771771 - DNA, 15 bp, Homo sapiens
aagagagaaggaatg

SEQ ID NO: 771772 - DNA, 15 bp, Homo sapiens
agagagaaggaatgc

SEQ ID NO: 771773 - DNA, 15 bp, Homo sapiens
gagagaaggaatgct

SEQ ID NO: 771774 - DNA, 15 bp, Homo sapiens
agagaaggaatgctt

SEQ ID NO: 771775 - DNA, 15 bp, Homo sapiens
gagaaggaatgcttg

SEQ ID NO: 771776 - DNA, 15 bp, Homo sapiens
agaaggaatgcttga

SEQ ID NO: 771777 - DNA, 15 bp, Homo sapiens
gaaggaatgcttgac

SEQ ID NO: 771778 - DNA, 15 bp, Homo sapiens
aaggaatgcttgact

SEQ ID NO: 771779 - DNA, 15 bp, Homo sapiens
aggaatgcttgactt

SEQ ID NO: 771780 - DNA, 15 bp, Homo sapiens
ggaatgcttgacttc

SEQ ID NO: 771781 - DNA, 15 bp, Homo sapiens
gaatgcttgacttcc

SEQ ID NO: 771782 - DNA, 15 bp, Homo sapiens
aatgcttgacttcca

SEQ ID NO: 771783 - DNA, 15 bp, Homo sapiens
atgcttgacttccac

SEQ ID NO: 771784 - DNA, 15 bp, Homo sapiens
tgcttgacttccacg

SEQ ID NO: 771785 - DNA, 15 bp, Homo sapiens
gcttgacttccacgg

SEQ ID NO: 771786 - DNA, 15 bp, Homo sapiens
cttgacttccacggg

SEQ ID NO: 771787 - DNA, 15 bp, Homo sapiens
ttgacttccacgggg

SEQ ID NO: 771788 - DNA, 15 bp, Homo sapiens
tgacttccacggggt

SEQ ID NO: 771789 - DNA, 15 bp, Homo sapiens
gacttccacggggtg

SEQ ID NO: 771790 - DNA, 15 bp, Homo sapiens
acttccacggggtgc

SEQ ID NO: 771791 - DNA, 15 bp, Homo sapiens
cttccacggggtgcc

SEQ ID NO: 771792 - DNA, 15 bp, Homo sapiens
ttccacggggtgcct

SEQ ID NO: 771793 - DNA, 15 bp, Homo sapiens
tccacggggtgcctc

SEQ ID NO: 771794 - DNA, 15 bp, Homo sapiens
ccacggggtgcctct

SEQ ID NO: 771795 - DNA, 15 bp, Homo sapiens
cacggggtgcctctg

SEQ ID NO: 771796 - DNA, 15 bp, Homo sapiens
acggggtgcctctgc

SEQ ID NO: 771797 - DNA, 15 bp, Homo sapiens
cggggtgcctctgcc

SEQ ID NO: 771798 - DNA, 15 bp, Homo sapiens
ggggtgcctctgcct

SEQ ID NO: 771799 - DNA, 15 bp, Homo sapiens
gggtgcctctgcctt

SEQ ID NO: 771800 - DNA, 15 bp, Homo sapiens
ggtgcctctgcctta

SEQ ID NO: 771801 - DNA, 15 bp, Homo sapiens
gtgcctctgccttac

SEQ ID NO: 771802 - DNA, 15 bp, Homo sapiens
tgcctctgccttacc

SEQ ID NO: 771803 - DNA, 15 bp, Homo sapiens
gcctctgccttaccc

SEQ ID NO: 771804 - DNA, 15 bp, Homo sapiens
cctctgccttaccca

SEQ ID NO: 771805 - DNA, 15 bp, Homo sapiens
ctctgccttacccat

SEQ ID NO: 771806 - DNA, 15 bp, Homo sapiens
tctgccttacccatc

SEQ ID NO: 771807 - DNA, 15 bp, Homo sapiens
ctgccttacccatct

SEQ ID NO: 771808 - DNA, 15 bp, Homo sapiens
tgccttacccatctc

SEQ ID NO: 771809 - DNA, 15 bp, Homo sapiens
gccttacccatctca

SEQ ID NO: 771810 - DNA, 15 bp, Homo sapiens
ccttacccatctcaa

SEQ ID NO: 771811 - DNA, 15 bp, Homo sapiens
cttacccatctcaaa

SEQ ID NO: 771812 - DNA, 15 bp, Homo sapiens
ttacccatctcaaag

SEQ ID NO: 771813 - DNA, 15 bp, Homo sapiens
tacccatctcaaaga

SEQ ID NO: 771814 - DNA, 15 bp, Homo sapiens
acccatctcaaagaa

SEQ ID NO: 771815 - DNA, 15 bp, Homo sapiens
cccatctcaaagaat

SEQ ID NO: 771816 - DNA, 15 bp, Homo sapiens
ccatctcaaagaatc

SEQ ID NO: 771817 - DNA, 15 bp, Homo sapiens
catctcaaagaatca

SEQ ID NO: 771818 - DNA, 15 bp, Homo sapiens
atctcaaagaatcag

SEQ ID NO: 771819 - DNA, 15 bp, Homo sapiens
tctcaaagaatcaga

SEQ ID NO: 771820 - DNA, 15 bp, Homo sapiens
ctcaaagaatcagac

SEQ ID NO: 771821 - DNA, 15 bp, Homo sapiens
tcaaagaatcagacc

SEQ ID NO: 771822 - DNA, 15 bp, Homo sapiens
caaagaatcagaccc

SEQ ID NO: 771823 - DNA, 15 bp, Homo sapiens
aaagaatcagacccc

SEQ ID NO: 771824 - DNA, 15 bp, Homo sapiens
aagaatcagacccct

SEQ ID NO: 771825 - DNA, 15 bp, Homo sapiens
agaatcagacccctc

SEQ ID NO: 771826 - DNA, 15 bp, Homo sapiens
gaatcagacccctct

SEQ ID NO: 771827 - DNA, 15 bp, Homo sapiens
aatcagacccctctc

SEQ ID NO: 771828 - DNA, 15 bp, Homo sapiens
atcagacccctctct

SEQ ID NO: 771829 - DNA, 15 bp, Homo sapiens
tcagacccctctctc

SEQ ID NO: 771830 - DNA, 15 bp, Homo sapiens
cagacccctctctca

SEQ ID NO: 771831 - DNA, 15 bp, Homo sapiens
agacccctctctcat

SEQ ID NO: 771832 - DNA, 15 bp, Homo sapiens
gacccctctctcatt

SEQ ID NO: 771833 - DNA, 15 bp, Homo sapiens
acccctctctcattt

SEQ ID NO: 771834 - DNA, 15 bp, Homo sapiens
cccctctctcatttt

SEQ ID NO: 771835 - DNA, 15 bp, Homo sapiens
ccctctctcattttt

SEQ ID NO: 771836 - DNA, 15 bp, Homo sapiens
cctctctcatttttc

SEQ ID NO: 771837 - DNA, 15 bp, Homo sapiens
ctctctcatttttca

SEQ ID NO: 771838 - DNA, 15 bp, Homo sapiens
tctctcatttttcaa

SEQ ID NO: 771839 - DNA, 15 bp, Homo sapiens
ctctcatttttcaag

SEQ ID NO: 771840 - DNA, 15 bp, Homo sapiens
tctcatttttcaagg

SEQ ID NO: 771841 - DNA, 15 bp, Homo sapiens
ctcatttttcaaggg

SEQ ID NO: 771842 - DNA, 15 bp, Homo sapiens
tcatttttcaagggc

SEQ ID NO: 771843 - DNA, 15 bp, Homo sapiens
catttttcaagggcc

SEQ ID NO: 771844 - DNA, 15 bp, Homo sapiens
atttttcaagggcct

SEQ ID NO: 771845 - DNA, 15 bp, Homo sapiens
tttttcaagggcctt

SEQ ID NO: 771846 - DNA, 15 bp, Homo sapiens
ttttcaagggccttg

SEQ ID NO: 771847 - DNA, 15 bp, Homo sapiens
tttcaagggccttgg

SEQ ID NO: 771848 - DNA, 15 bp, Homo sapiens
ttcaagggccttggg

SEQ ID NO: 771849 - DNA, 15 bp, Homo sapiens
tcaagggccttgggg

SEQ ID NO: 771850 - DNA, 15 bp, Homo sapiens
caagggccttggggt

SEQ ID NO: 771851 - DNA, 15 bp, Homo sapiens
aagggccttggggtg

SEQ ID NO: 771852 - DNA, 15 bp, Homo sapiens
agggccttggggtga

SEQ ID NO: 771853 - DNA, 15 bp, Homo sapiens
gggccttggggtgag

SEQ ID NO: 771854 - DNA, 15 bp, Homo sapiens
ggccttggggtgagc

SEQ ID NO: 771855 - DNA, 15 bp, Homo sapiens
gccttggggtgagca

SEQ ID NO: 771856 - DNA, 15 bp, Homo sapiens
ccttggggtgagcat

SEQ ID NO: 771857 - DNA, 15 bp, Homo sapiens
cttggggtgagcatc

SEQ ID NO: 771858 - DNA, 15 bp, Homo sapiens
ttggggtgagcatcc

SEQ ID NO: 771859 - DNA, 15 bp, Homo sapiens
tggggtgagcatcct

SEQ ID NO: 771860 - DNA, 15 bp, Homo sapiens
ggggtgagcatccta

SEQ ID NO: 771861 - DNA, 15 bp, Homo sapiens
gggtgagcatcctaa

SEQ ID NO: 771862 - DNA, 15 bp, Homo sapiens
ggtgagcatcctaaa

SEQ ID NO: 771863 - DNA, 15 bp, Homo sapiens
gtgagcatcctaaaa

SEQ ID NO: 771864 - DNA, 15 bp, Homo sapiens
tgagcatcctaaaag

SEQ ID NO: 771865 - DNA, 15 bp, Homo sapiens
gagcatcctaaaagt

SEQ ID NO: 771866 - DNA, 15 bp, Homo sapiens
agcatcctaaaagtc

SEQ ID NO: 771867 - DNA, 15 bp, Homo sapiens
gcatcctaaaagtct

SEQ ID NO: 771868 - DNA, 15 bp, Homo sapiens
catcctaaaagtctc

SEQ ID NO: 771869 - DNA, 15 bp, Homo sapiens
atcctaaaagtctca

SEQ ID NO: 771870 - DNA, 15 bp, Homo sapiens
tcctaaaagtctcac

SEQ ID NO: 771871 - DNA, 15 bp, Homo sapiens
cctaaaagtctcaca

SEQ ID NO: 771872 - DNA, 15 bp, Homo sapiens
ctaaaagtctcacag

SEQ ID NO: 771873 - DNA, 15 bp, Homo sapiens
taaaagtctcacagt

SEQ ID NO: 771874 - DNA, 15 bp, Homo sapiens
aaaagtctcacagtc

SEQ ID NO: 771875 - DNA, 15 bp, Homo sapiens
aaagtctcacagtct

SEQ ID NO: 771876 - DNA, 15 bp, Homo sapiens
aagtctcacagtctg

SEQ ID NO: 771877 - DNA, 15 bp, Homo sapiens
agtctcacagtctgt

SEQ ID NO: 771878 - DNA, 15 bp, Homo sapiens
gtctcacagtctgtt

SEQ ID NO: 771879 - DNA, 15 bp, Homo sapiens
tctcacagtctgttg

SEQ ID NO: 771880 - DNA, 15 bp, Homo sapiens
ctcacagtctgttgc

SEQ ID NO: 771881 - DNA, 15 bp, Homo sapiens
tcacagtctgttgca

SEQ ID NO: 771882 - DNA, 15 bp, Homo sapiens
cacagtctgttgcag

SEQ ID NO: 771883 - DNA, 15 bp, Homo sapiens
acagtctgttgcagc

SEQ ID NO: 771884 - DNA, 15 bp, Homo sapiens
cagtctgttgcagca

SEQ ID NO: 771885 - DNA, 15 bp, Homo sapiens
agtctgttgcagcag

SEQ ID NO: 771886 - DNA, 15 bp, Homo sapiens
gtctgttgcagcaga

SEQ ID NO: 771887 - DNA, 15 bp, Homo sapiens
tctgttgcagcagaa

SEQ ID NO: 771888 - DNA, 15 bp, Homo sapiens
ctgttgcagcagaaa

SEQ ID NO: 771889 - DNA, 15 bp, Homo sapiens
tgttgcagcagaaag

SEQ ID NO: 771890 - DNA, 15 bp, Homo sapiens
gttgcagcagaaagc

SEQ ID NO: 771891 - DNA, 15 bp, Homo sapiens
ttgcagcagaaagcg

SEQ ID NO: 771892 - DNA, 15 bp, Homo sapiens
tgcagcagaaagcgt

SEQ ID NO: 771893 - DNA, 15 bp, Homo sapiens
gcagcagaaagcgtg

SEQ ID NO: 771894 - DNA, 15 bp, Homo sapiens
cagcagaaagcgtgg

SEQ ID NO: 771895 - DNA, 15 bp, Homo sapiens
agcagaaagcgtggc

SEQ ID NO: 771896 - DNA, 15 bp, Homo sapiens
gcagaaagcgtggct

SEQ ID NO: 771897 - DNA, 15 bp, Homo sapiens
cagaaagcgtggctt

SEQ ID NO: 771898 - DNA, 15 bp, Homo sapiens
agaaagcgtggcttt

SEQ ID NO: 771899 - DNA, 15 bp, Homo sapiens
gaaagcgtggctttg

SEQ ID NO: 771900 - DNA, 15 bp, Homo sapiens
aaagcgtggctttgt

SEQ ID NO: 771901 - DNA, 15 bp, Homo sapiens
aagcgtggctttgtc

SEQ ID NO: 771902 - DNA, 15 bp, Homo sapiens
agcgtggctttgtcc

SEQ ID NO: 771903 - DNA, 15 bp, Homo sapiens
gcgtggctttgtccc

SEQ ID NO: 771904 - DNA, 15 bp, Homo sapiens
cgtggctttgtcccc

SEQ ID NO: 771905 - DNA, 15 bp, Homo sapiens
gtggctttgtccccc

SEQ ID NO: 771906 - DNA, 15 bp, Homo sapiens
tggctttgtcccccc

SEQ ID NO: 771907 - DNA, 15 bp, Homo sapiens
ggctttgtcccccct

SEQ ID NO: 771908 - DNA, 15 bp, Homo sapiens
gctttgtccccccta

SEQ ID NO: 771909 - DNA, 15 bp, Homo sapiens
ctttgtcccccctat

SEQ ID NO: 771910 - DNA, 15 bp, Homo sapiens
tttgtcccccctata

SEQ ID NO: 771911 - DNA, 15 bp, Homo sapiens
ttgtcccccctataa

SEQ ID NO: 771912 - DNA, 15 bp, Homo sapiens
tgtcccccctataaa

SEQ ID NO: 771913 - DNA, 15 bp, Homo sapiens
gtcccccctataaaa

SEQ ID NO: 771914 - DNA, 15 bp, Homo sapiens
tcccccctataaaac

SEQ ID NO: 771915 - DNA, 15 bp, Homo sapiens
cccccctataaaaca

SEQ ID NO: 771916 - DNA, 15 bp, Homo sapiens
ccccctataaaacat

SEQ ID NO: 771917 - DNA, 15 bp, Homo sapiens
cccctataaaacatc

SEQ ID NO: 771918 - DNA, 15 bp, Homo sapiens
ccctataaaacatct

SEQ ID NO: 771919 - DNA, 15 bp, Homo sapiens
cctataaaacatctg

SEQ ID NO: 771920 - DNA, 15 bp, Homo sapiens
ctataaaacatctgg

SEQ ID NO: 771921 - DNA, 15 bp, Homo sapiens
tataaaacatctgga

SEQ ID NO: 771922 - DNA, 15 bp, Homo sapiens
ataaaacatctggag

SEQ ID NO: 771923 - DNA, 15 bp, Homo sapiens
taaaacatctggaga

SEQ ID NO: 771924 - DNA, 15 bp, Homo sapiens
aaaacatctggagat

SEQ ID NO: 771925 - DNA, 15 bp, Homo sapiens
aaacatctggagatt

SEQ ID NO: 771926 - DNA, 15 bp, Homo sapiens
aacatctggagattt

SEQ ID NO: 771927 - DNA, 15 bp, Homo sapiens
acatctggagatttt

SEQ ID NO: 771928 - DNA, 15 bp, Homo sapiens
catctggagattttc

SEQ ID NO: 771929 - DNA, 15 bp, Homo sapiens
atctggagattttca

SEQ ID NO: 771930 - DNA, 15 bp, Homo sapiens
tctggagattttcaa

SEQ ID NO: 771931 - DNA, 15 bp, Homo sapiens
ctggagattttcaag

SEQ ID NO: 771932 - DNA, 15 bp, Homo sapiens
tggagattttcaagt

SEQ ID NO: 771933 - DNA, 15 bp, Homo sapiens
ggagattttcaagtt

SEQ ID NO: 771934 - DNA, 15 bp, Homo sapiens
gagattttcaagttt

SEQ ID NO: 771935 - DNA, 15 bp, Homo sapiens
agattttcaagtttg

SEQ ID NO: 771936 - DNA, 15 bp, Homo sapiens
gattttcaagtttgt

SEQ ID NO: 771937 - DNA, 15 bp, Homo sapiens
attttcaagtttgtg

SEQ ID NO: 771938 - DNA, 15 bp, Homo sapiens
ttttcaagtttgtgc

SEQ ID NO: 771939 - DNA, 15 bp, Homo sapiens
tttcaagtttgtgca

SEQ ID NO: 771940 - DNA, 15 bp, Homo sapiens
ttcaagtttgtgcag

SEQ ID NO: 771941 - DNA, 15 bp, Homo sapiens
tcaagtttgtgcaga

SEQ ID NO: 771942 - DNA, 15 bp, Homo sapiens
caagtttgtgcagac

SEQ ID NO: 771943 - DNA, 15 bp, Homo sapiens
aagtttgtgcagacc

SEQ ID NO: 771944 - DNA, 15 bp, Homo sapiens
agtttgtgcagaccc

SEQ ID NO: 771945 - DNA, 15 bp, Homo sapiens
gtttgtgcagacccc

SEQ ID NO: 771946 - DNA, 15 bp, Homo sapiens
tttgtgcagacccca

SEQ ID NO: 771947 - DNA, 15 bp, Homo sapiens
ttgtgcagaccccat

SEQ ID NO: 771948 - DNA, 15 bp, Homo sapiens
tgtgcagaccccatg

SEQ ID NO: 771949 - DNA, 15 bp, Homo sapiens
gtgcagaccccatgt

SEQ ID NO: 771950 - DNA, 15 bp, Homo sapiens
tgcagaccccatgtg

SEQ ID NO: 771951 - DNA, 15 bp, Homo sapiens
gcagaccccatgtga

SEQ ID NO: 771952 - DNA, 15 bp, Homo sapiens
cagaccccatgtgag

SEQ ID NO: 771953 - DNA, 15 bp, Homo sapiens
agaccccatgtgagc

SEQ ID NO: 771954 - DNA, 15 bp, Homo sapiens
gaccccatgtgagca

SEQ ID NO: 771955 - DNA, 15 bp, Homo sapiens
accccatgtgagcag

SEQ ID NO: 771956 - DNA, 15 bp, Homo sapiens
ccccatgtgagcagc

SEQ ID NO: 771957 - DNA, 15 bp, Homo sapiens
cccatgtgagcagcc

SEQ ID NO: 771958 - DNA, 15 bp, Homo sapiens
ccatgtgagcagcca

SEQ ID NO: 771959 - DNA, 15 bp, Homo sapiens
catgtgagcagccag

SEQ ID NO: 771960 - DNA, 15 bp, Homo sapiens
atgtgagcagccagc

SEQ ID NO: 771961 - DNA, 15 bp, Homo sapiens
tgtgagcagccagcc

SEQ ID NO: 771962 - DNA, 15 bp, Homo sapiens
gtgagcagccagccc

SEQ ID NO: 771963 - DNA, 15 bp, Homo sapiens
tgagcagccagccct

SEQ ID NO: 771964 - DNA, 15 bp, Homo sapiens
gagcagccagccctg

SEQ ID NO: 771965 - DNA, 15 bp, Homo sapiens
agcagccagccctgg

SEQ ID NO: 771966 - DNA, 15 bp, Homo sapiens
gcagccagccctggg

SEQ ID NO: 771967 - DNA, 15 bp, Homo sapiens
cagccagccctgggt

SEQ ID NO: 771968 - DNA, 15 bp, Homo sapiens
agccagccctgggtt

SEQ ID NO: 771969 - DNA, 15 bp, Homo sapiens
gccagccctgggttg

SEQ ID NO: 771970 - DNA, 15 bp, Homo sapiens
ccagccctgggttgg

SEQ ID NO: 771971 - DNA, 15 bp, Homo sapiens
cagccctgggttggc

SEQ ID NO: 771972 - DNA, 15 bp, Homo sapiens
agccctgggttggca

SEQ ID NO: 771973 - DNA, 15 bp, Homo sapiens
gccctgggttggcat

SEQ ID NO: 771974 - DNA, 15 bp, Homo sapiens
ccctgggttggcatg

SEQ ID NO: 771975 - DNA, 15 bp, Homo sapiens
cctgggttggcatgg

SEQ ID NO: 771976 - DNA, 15 bp, Homo sapiens
ctgggttggcatgga

SEQ ID NO: 771977 - DNA, 15 bp, Homo sapiens
tgggttggcatggat

SEQ ID NO: 771978 - DNA, 15 bp, Homo sapiens
gggttggcatggatt

SEQ ID NO: 771979 - DNA, 15 bp, Homo sapiens
ggttggcatggattg

SEQ ID NO: 771980 - DNA, 15 bp, Homo sapiens
gttggcatggattgg

SEQ ID NO: 771981 - DNA, 15 bp, Homo sapiens
ttggcatggattgga

SEQ ID NO: 771982 - DNA, 15 bp, Homo sapiens
tggcatggattggag

SEQ ID NO: 771983 - DNA, 15 bp, Homo sapiens
ggcatggattggaga

SEQ ID NO: 771984 - DNA, 15 bp, Homo sapiens
gcatggattggagag

SEQ ID NO: 771985 - DNA, 15 bp, Homo sapiens
catggattggagagg

SEQ ID NO: 771986 - DNA, 15 bp, Homo sapiens
atggattggagaggc

SEQ ID NO: 771987 - DNA, 15 bp, Homo sapiens
tggattggagaggca

SEQ ID NO: 771988 - DNA, 15 bp, Homo sapiens
ggattggagaggcag

SEQ ID NO: 771989 - DNA, 15 bp, Homo sapiens
gattggagaggcaga

SEQ ID NO: 771990 - DNA, 15 bp, Homo sapiens
attggagaggcagag

SEQ ID NO: 771991 - DNA, 15 bp, Homo sapiens
ttggagaggcagaga

SEQ ID NO: 771992 - DNA, 15 bp, Homo sapiens
tggagaggcagagaa

SEQ ID NO: 771993 - DNA, 15 bp, Homo sapiens
ggagaggcagagaag

SEQ ID NO: 771994 - DNA, 15 bp, Homo sapiens
gagaggcagagaagg

SEQ ID NO: 771995 - DNA, 15 bp, Homo sapiens
agaggcagagaaggc

SEQ ID NO: 771996 - DNA, 15 bp, Homo sapiens
gaggcagagaaggca

SEQ ID NO: 771997 - DNA, 15 bp, Homo sapiens
aggcagagaaggcat

SEQ ID NO: 771998 - DNA, 15 bp, Homo sapiens
ggcagagaaggcatt

SEQ ID NO: 771999 - DNA, 15 bp, Homo sapiens
gcagagaaggcattc

SEQ ID NO: 772000 - DNA, 15 bp, Homo sapiens
cagagaaggcattca

SEQ ID NO: 772001 - DNA, 15 bp, Homo sapiens
agagaaggcattcac

SEQ ID NO: 772002 - DNA, 15 bp, Homo sapiens
gagaaggcattcact

SEQ ID NO: 772003 - DNA, 15 bp, Homo sapiens
agaaggcattcactt

SEQ ID NO: 772004 - DNA, 15 bp, Homo sapiens
gaaggcattcacttg

SEQ ID NO: 772005 - DNA, 15 bp, Homo sapiens
aaggcattcacttgg

SEQ ID NO: 772006 - DNA, 15 bp, Homo sapiens
aggcattcacttggc

SEQ ID NO: 772007 - DNA, 15 bp, Homo sapiens
ggcattcacttggct

SEQ ID NO: 772008 - DNA, 15 bp, Homo sapiens
gcattcacttggctc

SEQ ID NO: 772009 - DNA, 15 bp, Homo sapiens
cattcacttggctct

SEQ ID NO: 772010 - DNA, 15 bp, Homo sapiens
attcacttggctctg

SEQ ID NO: 772011 - DNA, 15 bp, Homo sapiens
ttcacttggctctga

SEQ ID NO: 772012 - DNA, 15 bp, Homo sapiens
tcacttggctctgat

SEQ ID NO: 772013 - DNA, 15 bp, Homo sapiens
cacttggctctgatt

SEQ ID NO: 772014 - DNA, 15 bp, Homo sapiens
acttggctctgattt

SEQ ID NO: 772015 - DNA, 15 bp, Homo sapiens
cttggctctgatttt

SEQ ID NO: 772016 - DNA, 15 bp, Homo sapiens
ttggctctgattttt

SEQ ID NO: 772017 - DNA, 15 bp, Homo sapiens
tggctctgatttttc

SEQ ID NO: 772018 - DNA, 15 bp, Homo sapiens
ggctctgatttttca

SEQ ID NO: 772019 - DNA, 15 bp, Homo sapiens
gctctgatttttcat

SEQ ID NO: 772020 - DNA, 15 bp, Homo sapiens
ctctgatttttcatc

SEQ ID NO: 772021 - DNA, 15 bp, Homo sapiens
tctgatttttcatcc

SEQ ID NO: 772022 - DNA, 15 bp, Homo sapiens
ctgatttttcatcct

SEQ ID NO: 772023 - DNA, 15 bp, Homo sapiens
tgatttttcatcctg

SEQ ID NO: 772024 - DNA, 15 bp, Homo sapiens
gatttttcatcctgt

SEQ ID NO: 772025 - DNA, 15 bp, Homo sapiens
atttttcatcctgtg

SEQ ID NO: 772026 - DNA, 15 bp, Homo sapiens
tttttcatcctgtgg

SEQ ID NO: 772027 - DNA, 15 bp, Homo sapiens
ttttcatcctgtggc

SEQ ID NO: 772028 - DNA, 15 bp, Homo sapiens
tttcatcctgtggcc

SEQ ID NO: 772029 - DNA, 15 bp, Homo sapiens
ttcatcctgtggcct

SEQ ID NO: 772030 - DNA, 15 bp, Homo sapiens
tcatcctgtggcctc

SEQ ID NO: 772031 - DNA, 15 bp, Homo sapiens
catcctgtggcctca

SEQ ID NO: 772032 - DNA, 15 bp, Homo sapiens
atcctgtggcctcag

SEQ ID NO: 772033 - DNA, 15 bp, Homo sapiens
tcctgtggcctcaga

SEQ ID NO: 772034 - DNA, 15 bp, Homo sapiens
cctgtggcctcagag

SEQ ID NO: 772035 - DNA, 15 bp, Homo sapiens
ctgtggcctcagagc

SEQ ID NO: 772036 - DNA, 15 bp, Homo sapiens
tgtggcctcagagct

SEQ ID NO: 772037 - DNA, 15 bp, Homo sapiens
gtggcctcagagctt

SEQ ID NO: 772038 - DNA, 15 bp, Homo sapiens
tggcctcagagcttc

SEQ ID NO: 772039 - DNA, 15 bp, Homo sapiens
ggcctcagagcttca

SEQ ID NO: 772040 - DNA, 15 bp, Homo sapiens
gcctcagagcttcag

SEQ ID NO: 772041 - DNA, 15 bp, Homo sapiens
cctcagagcttcaga

SEQ ID NO: 772042 - DNA, 15 bp, Homo sapiens
ctcagagcttcagaa

SEQ ID NO: 772043 - DNA, 15 bp, Homo sapiens
tcagagcttcagaat

SEQ ID NO: 772044 - DNA, 15 bp, Homo sapiens
cagagcttcagaata

SEQ ID NO: 772045 - DNA, 15 bp, Homo sapiens
agagcttcagaatac

SEQ ID NO: 772046 - DNA, 15 bp, Homo sapiens
gagcttcagaataca

SEQ ID NO: 772047 - DNA, 15 bp, Homo sapiens
agcttcagaatacag

SEQ ID NO: 772048 - DNA, 15 bp, Homo sapiens
gcttcagaatacaga

SEQ ID NO: 772049 - DNA, 15 bp, Homo sapiens
cttcagaatacagag

SEQ ID NO: 772050 - DNA, 15 bp, Homo sapiens
ttcagaatacagagt

SEQ ID NO: 772051 - DNA, 15 bp, Homo sapiens
tcagaatacagagtc

SEQ ID NO: 772052 - DNA, 15 bp, Homo sapiens
cagaatacagagtcc

SEQ ID NO: 772053 - DNA, 15 bp, Homo sapiens
agaatacagagtccc

SEQ ID NO: 772054 - DNA, 15 bp, Homo sapiens
gaatacagagtccct

SEQ ID NO: 772055 - DNA, 15 bp, Homo sapiens
aatacagagtcccta

SEQ ID NO: 772056 - DNA, 15 bp, Homo sapiens
atacagagtccctac

SEQ ID NO: 772057 - DNA, 15 bp, Homo sapiens
tacagagtccctacc

SEQ ID NO: 772058 - DNA, 15 bp, Homo sapiens
acagagtccctaccc

SEQ ID NO: 772059 - DNA, 15 bp, Homo sapiens
cagagtccctacccc

SEQ ID NO: 772060 - DNA, 15 bp, Homo sapiens
agagtccctacccct

SEQ ID NO: 772061 - DNA, 15 bp, Homo sapiens
gagtccctacccctg

SEQ ID NO: 772062 - DNA, 15 bp, Homo sapiens
agtccctacccctgg

SEQ ID NO: 772063 - DNA, 15 bp, Homo sapiens
gtccctacccctggt

SEQ ID NO: 772064 - DNA, 15 bp, Homo sapiens
tccctacccctggtg

SEQ ID NO: 772065 - DNA, 15 bp, Homo sapiens
ccctacccctggtgt

SEQ ID NO: 772066 - DNA, 15 bp, Homo sapiens
cctacccctggtgtc

SEQ ID NO: 772067 - DNA, 15 bp, Homo sapiens
ctacccctggtgtct

SEQ ID NO: 772068 - DNA, 15 bp, Homo sapiens
tacccctggtgtctc

SEQ ID NO: 772069 - DNA, 15 bp, Homo sapiens
acccctggtgtctcc

SEQ ID NO: 772070 - DNA, 15 bp, Homo sapiens
cccctggtgtctcct

SEQ ID NO: 772071 - DNA, 15 bp, Homo sapiens
ccctggtgtctcctt

SEQ ID NO: 772072 - DNA, 15 bp, Homo sapiens
cctggtgtctccttc

SEQ ID NO: 772073 - DNA, 15 bp, Homo sapiens
ctggtgtctccttcc

SEQ ID NO: 772074 - DNA, 15 bp, Homo sapiens
tggtgtctccttcct

SEQ ID NO: 772075 - DNA, 15 bp, Homo sapiens
ggtgtctccttcctc

SEQ ID NO: 772076 - DNA, 15 bp, Homo sapiens
gtgtctccttcctct

SEQ ID NO: 772077 - DNA, 15 bp, Homo sapiens
tgtctccttcctctc

SEQ ID NO: 772078 - DNA, 15 bp, Homo sapiens
gtctccttcctctcc

SEQ ID NO: 772079 - DNA, 15 bp, Homo sapiens
tctccttcctctcca

SEQ ID NO: 772080 - DNA, 15 bp, Homo sapiens
ctccttcctctccat

SEQ ID NO: 772081 - DNA, 15 bp, Homo sapiens
tccttcctctccatc

SEQ ID NO: 772082 - DNA, 15 bp, Homo sapiens
ccttcctctccatcc

SEQ ID NO: 772083 - DNA, 15 bp, Homo sapiens
cttcctctccatcca

SEQ ID NO: 772084 - DNA, 15 bp, Homo sapiens
ttcctctccatccac

SEQ ID NO: 772085 - DNA, 15 bp, Homo sapiens
tcctctccatccacc

SEQ ID NO: 772086 - DNA, 15 bp, Homo sapiens
cctctccatccacca

SEQ ID NO: 772087 - DNA, 15 bp, Homo sapiens
ctctccatccaccat

SEQ ID NO: 772088 - DNA, 15 bp, Homo sapiens
tctccatccaccatg

SEQ ID NO: 772089 - DNA, 15 bp, Homo sapiens
ctccatccaccatga

SEQ ID NO: 772090 - DNA, 15 bp, Homo sapiens
tccatccaccatgac

SEQ ID NO: 772091 - DNA, 15 bp, Homo sapiens
ccatccaccatgaca

SEQ ID NO: 772092 - DNA, 15 bp, Homo sapiens
catccaccatgacaa

SEQ ID NO: 772093 - DNA, 15 bp, Homo sapiens
atccaccatgacaag

SEQ ID NO: 772094 - DNA, 15 bp, Homo sapiens
tccaccatgacaagc

SEQ ID NO: 772095 - DNA, 15 bp, Homo sapiens
ccaccatgacaagct

SEQ ID NO: 772096 - DNA, 15 bp, Homo sapiens
caccatgacaagctg

SEQ ID NO: 772097 - DNA, 15 bp, Homo sapiens
accatgacaagctgt

SEQ ID NO: 772098 - DNA, 15 bp, Homo sapiens
ccatgacaagctgtg

SEQ ID NO: 772099 - DNA, 15 bp, Homo sapiens
catgacaagctgtgt

SEQ ID NO: 772100 - DNA, 15 bp, Homo sapiens
atgacaagctgtgtc

SEQ ID NO: 772101 - DNA, 15 bp, Homo sapiens
tgacaagctgtgtcc

SEQ ID NO: 772102 - DNA, 15 bp, Homo sapiens
gacaagctgtgtcca

SEQ ID NO: 772103 - DNA, 15 bp, Homo sapiens
acaagctgtgtccac

SEQ ID NO: 772104 - DNA, 15 bp, Homo sapiens
caagctgtgtccaca

SEQ ID NO: 772105 - DNA, 15 bp, Homo sapiens
aagctgtgtccacat

SEQ ID NO: 772106 - DNA, 15 bp, Homo sapiens
agctgtgtccacatt

SEQ ID NO: 772107 - DNA, 15 bp, Homo sapiens
gctgtgtccacattc

SEQ ID NO: 772108 - DNA, 15 bp, Homo sapiens
ctgtgtccacattct

SEQ ID NO: 772109 - DNA, 15 bp, Homo sapiens
tgtgtccacattctc

SEQ ID NO: 772110 - DNA, 15 bp, Homo sapiens
gtgtccacattctct

SEQ ID NO: 772111 - DNA, 15 bp, Homo sapiens
tgtccacattctctt

SEQ ID NO: 772112 - DNA, 15 bp, Homo sapiens
gtccacattctcttt

SEQ ID NO: 772113 - DNA, 15 bp, Homo sapiens
tccacattctctttt

SEQ ID NO: 772114 - DNA, 15 bp, Homo sapiens
ccacattctcttttt

SEQ ID NO: 772115 - DNA, 15 bp, Homo sapiens
cacattctctttttg

SEQ ID NO: 772116 - DNA, 15 bp, Homo sapiens
acattctctttttgg

SEQ ID NO: 772117 - DNA, 15 bp, Homo sapiens
cattctctttttggc

SEQ ID NO: 772118 - DNA, 15 bp, Homo sapiens
attctctttttggct

SEQ ID NO: 772119 - DNA, 15 bp, Homo sapiens
ttctctttttggctc

SEQ ID NO: 772120 - DNA, 15 bp, Homo sapiens
tctctttttggctct

SEQ ID NO: 772121 - DNA, 15 bp, Homo sapiens
ctctttttggctctt

SEQ ID NO: 772122 - DNA, 15 bp, Homo sapiens
tctttttggctcttt

SEQ ID NO: 772123 - DNA, 15 bp, Homo sapiens
ctttttggctctttc

SEQ ID NO: 772124 - DNA, 15 bp, Homo sapiens
tttttggctctttcc

SEQ ID NO: 772125 - DNA, 15 bp, Homo sapiens
ttttggctctttcct

SEQ ID NO: 772126 - DNA, 15 bp, Homo sapiens
tttggctctttccta

SEQ ID NO: 772127 - DNA, 15 bp, Homo sapiens
ttggctctttcctaa

SEQ ID NO: 772128 - DNA, 15 bp, Homo sapiens
tggctctttcctaag

SEQ ID NO: 772129 - DNA, 15 bp, Homo sapiens
ggctctttcctaagg

SEQ ID NO: 772130 - DNA, 15 bp, Homo sapiens
gctctttcctaaggt

SEQ ID NO: 772131 - DNA, 15 bp, Homo sapiens
ctctttcctaaggta

SEQ ID NO: 772132 - DNA, 15 bp, Homo sapiens
tctttcctaaggtat

SEQ ID NO: 772133 - DNA, 15 bp, Homo sapiens
ctttcctaaggtatc

SEQ ID NO: 772134 - DNA, 15 bp, Homo sapiens
tttcctaaggtatcg

SEQ ID NO: 772135 - DNA, 15 bp, Homo sapiens
ttcctaaggtatcgg

SEQ ID NO: 772136 - DNA, 15 bp, Homo sapiens
tcctaaggtatcggg

SEQ ID NO: 772137 - DNA, 15 bp, Homo sapiens
cctaaggtatcgggc

SEQ ID NO: 772138 - DNA, 15 bp, Homo sapiens
ctaaggtatcgggca

SEQ ID NO: 772139 - DNA, 15 bp, Homo sapiens
taaggtatcgggcac

SEQ ID NO: 772140 - DNA, 15 bp, Homo sapiens
aaggtatcgggcaca

SEQ ID NO: 772141 - DNA, 15 bp, Homo sapiens
aggtatcgggcacag

SEQ ID NO: 772142 - DNA, 15 bp, Homo sapiens
ggtatcgggcacagg

SEQ ID NO: 772143 - DNA, 15 bp, Homo sapiens
gtatcgggcacagga

SEQ ID NO: 772144 - DNA, 15 bp, Homo sapiens
tatcgggcacaggac

SEQ ID NO: 772145 - DNA, 15 bp, Homo sapiens
atcgggcacaggact

SEQ ID NO: 772146 - DNA, 15 bp, Homo sapiens
tcgggcacaggacta

SEQ ID NO: 772147 - DNA, 15 bp, Homo sapiens
cgggcacaggactat

SEQ ID NO: 772148 - DNA, 15 bp, Homo sapiens
gggcacaggactatg

SEQ ID NO: 772149 - DNA, 15 bp, Homo sapiens
ggcacaggactatgt

SEQ ID NO: 772150 - DNA, 15 bp, Homo sapiens
gcacaggactatgtc

SEQ ID NO: 772151 - DNA, 15 bp, Homo sapiens
cacaggactatgtct

SEQ ID NO: 772152 - DNA, 15 bp, Homo sapiens
acaggactatgtctg

SEQ ID NO: 772153 - DNA, 15 bp, Homo sapiens
caggactatgtctgc

SEQ ID NO: 772154 - DNA, 15 bp, Homo sapiens
aggactatgtctgcc

SEQ ID NO: 772155 - DNA, 15 bp, Homo sapiens
ggactatgtctgccc

SEQ ID NO: 772156 - DNA, 15 bp, Homo sapiens
gactatgtctgccca

SEQ ID NO: 772157 - DNA, 15 bp, Homo sapiens
actatgtctgcccaa

SEQ ID NO: 772158 - DNA, 15 bp, Homo sapiens
ctatgtctgcccaag

SEQ ID NO: 772159 - DNA, 15 bp, Homo sapiens
tatgtctgcccaaga

SEQ ID NO: 772160 - DNA, 15 bp, Homo sapiens
atgtctgcccaagaa

SEQ ID NO: 772161 - DNA, 15 bp, Homo sapiens
tgtctgcccaagaat

SEQ ID NO: 772162 - DNA, 15 bp, Homo sapiens
gtctgcccaagaata

SEQ ID NO: 772163 - DNA, 15 bp, Homo sapiens
tctgcccaagaataa

SEQ ID NO: 772164 - DNA, 15 bp, Homo sapiens
ctgcccaagaataaa

SEQ ID NO: 772165 - DNA, 15 bp, Homo sapiens
tgcccaagaataaaa

SEQ ID NO: 772166 - DNA, 15 bp, Homo sapiens
gcccaagaataaaaa

SEQ ID NO: 772167 - DNA, 15 bp, Homo sapiens
cccaagaataaaaat

SEQ ID NO: 772168 - DNA, 15 bp, Homo sapiens
ccaagaataaaaatt

SEQ ID NO: 772169 - DNA, 15 bp, Homo sapiens
caagaataaaaatta

SEQ ID NO: 772170 - DNA, 15 bp, Homo sapiens
aagaataaaaattat

SEQ ID NO: 772171 - DNA, 15 bp, Homo sapiens
agaataaaaattata

SEQ ID NO: 772172 - DNA, 15 bp, Homo sapiens
gaataaaaattatac

SEQ ID NO: 772173 - DNA, 15 bp, Homo sapiens
aataaaaattatacc

SEQ ID NO: 772174 - DNA, 15 bp, Homo sapiens
ataaaaattataccc

SEQ ID NO: 772175 - DNA, 15 bp, Homo sapiens
taaaaattatacccc

SEQ ID NO: 772176 - DNA, 15 bp, Homo sapiens
aaaaattatacccct

SEQ ID NO: 772177 - DNA, 15 bp, Homo sapiens
aaaattatacccctt

SEQ ID NO: 772178 - DNA, 15 bp, Homo sapiens
aaattatacccctta

SEQ ID NO: 772179 - DNA, 15 bp, Homo sapiens
aattataccccttat

SEQ ID NO: 772180 - DNA, 15 bp, Homo sapiens
attataccccttata

SEQ ID NO: 772181 - DNA, 15 bp, Homo sapiens
ttataccccttatat

SEQ ID NO: 772182 - DNA, 15 bp, Homo sapiens
tataccccttatatt

SEQ ID NO: 772183 - DNA, 15 bp, Homo sapiens
ataccccttatattt

SEQ ID NO: 772184 - DNA, 15 bp, Homo sapiens
taccccttatatttc

SEQ ID NO: 772185 - DNA, 15 bp, Homo sapiens
accccttatatttcc

SEQ ID NO: 772186 - DNA, 15 bp, Homo sapiens
ccccttatatttcca

SEQ ID NO: 772187 - DNA, 15 bp, Homo sapiens
cccttatatttccaa

SEQ ID NO: 772188 - DNA, 15 bp, Homo sapiens
ccttatatttccaaa

SEQ ID NO: 772189 - DNA, 15 bp, Homo sapiens
cttatatttccaaaa

SEQ ID NO: 772190 - DNA, 15 bp, Homo sapiens
ttatatttccaaaag

SEQ ID NO: 772191 - DNA, 15 bp, Homo sapiens
tatatttccaaaagg

SEQ ID NO: 772192 - DNA, 15 bp, Homo sapiens
atatttccaaaagga

SEQ ID NO: 772193 - DNA, 15 bp, Homo sapiens
tatttccaaaaggag

SEQ ID NO: 772194 - DNA, 15 bp, Homo sapiens
atttccaaaaggaga

SEQ ID NO: 772195 - DNA, 15 bp, Homo sapiens
tttccaaaaggagag

SEQ ID NO: 772196 - DNA, 15 bp, Homo sapiens
ttccaaaaggagagg

SEQ ID NO: 772197 - DNA, 15 bp, Homo sapiens
tccaaaaggagaggc

SEQ ID NO: 772198 - DNA, 15 bp, Homo sapiens
ccaaaaggagaggca

SEQ ID NO: 772199 - DNA, 15 bp, Homo sapiens
caaaaggagaggcat

SEQ ID NO: 772200 - DNA, 15 bp, Homo sapiens
aaaaggagaggcata

SEQ ID NO: 772201 - DNA, 15 bp, Homo sapiens
aaaggagaggcatat

SEQ ID NO: 772202 - DNA, 15 bp, Homo sapiens
aaggagaggcatata

SEQ ID NO: 772203 - DNA, 15 bp, Homo sapiens
aggagaggcatataa

SEQ ID NO: 772204 - DNA, 15 bp, Homo sapiens
ggagaggcatataat

SEQ ID NO: 772205 - DNA, 15 bp, Homo sapiens
gagaggcatataatt

SEQ ID NO: 772206 - DNA, 15 bp, Homo sapiens
agaggcatataattt

SEQ ID NO: 772207 - DNA, 15 bp, Homo sapiens
gaggcatataattta

SEQ ID NO: 772208 - DNA, 15 bp, Homo sapiens
aggcatataatttat

SEQ ID NO: 772209 - DNA, 15 bp, Homo sapiens
ggcatataatttatg

SEQ ID NO: 772210 - DNA, 15 bp, Homo sapiens
gcatataatttatga

SEQ ID NO: 772211 - DNA, 15 bp, Homo sapiens
catataatttatgac

SEQ ID NO: 772212 - DNA, 15 bp, Homo sapiens
atataatttatgact

SEQ ID NO: 772213 - DNA, 15 bp, Homo sapiens
tataatttatgacta

SEQ ID NO: 772214 - DNA, 15 bp, Homo sapiens
ataatttatgactaa

SEQ ID NO: 772215 - DNA, 15 bp, Homo sapiens
taatttatgactaaa

SEQ ID NO: 772216 - DNA, 15 bp, Homo sapiens
aatttatgactaaaa

SEQ ID NO: 772217 - DNA, 15 bp, Homo sapiens
atttatgactaaaac

SEQ ID NO: 772218 - DNA, 15 bp, Homo sapiens
tttatgactaaaact

SEQ ID NO: 772219 - DNA, 15 bp, Homo sapiens
ttatgactaaaactg

SEQ ID NO: 772220 - DNA, 15 bp, Homo sapiens
tatgactaaaactgg

SEQ ID NO: 772221 - DNA, 15 bp, Homo sapiens
atgactaaaactggg

SEQ ID NO: 772222 - DNA, 15 bp, Homo sapiens
tgactaaaactgggg

SEQ ID NO: 772223 - DNA, 15 bp, Homo sapiens
gactaaaactggggt

SEQ ID NO: 772224 - DNA, 15 bp, Homo sapiens
actaaaactggggta

SEQ ID NO: 772225 - DNA, 15 bp, Homo sapiens
ctaaaactggggtac

SEQ ID NO: 772226 - DNA, 15 bp, Homo sapiens
taaaactggggtact

SEQ ID NO: 772227 - DNA, 15 bp, Homo sapiens
aaaactggggtactc

SEQ ID NO: 772228 - DNA, 15 bp, Homo sapiens
aaactggggtactct

SEQ ID NO: 772229 - DNA, 15 bp, Homo sapiens
aactggggtactctg

SEQ ID NO: 772230 - DNA, 15 bp, Homo sapiens
actggggtactctga

SEQ ID NO: 772231 - DNA, 15 bp, Homo sapiens
ctggggtactctgac

SEQ ID NO: 772232 - DNA, 15 bp, Homo sapiens
tggggtactctgact

SEQ ID NO: 772233 - DNA, 15 bp, Homo sapiens
ggggtactctgactg

SEQ ID NO: 772234 - DNA, 15 bp, Homo sapiens
gggtactctgactga

SEQ ID NO: 772235 - DNA, 15 bp, Homo sapiens
ggtactctgactgaa

SEQ ID NO: 772236 - DNA, 15 bp, Homo sapiens
gtactctgactgaaa

SEQ ID NO: 772237 - DNA, 15 bp, Homo sapiens
tactctgactgaaaa

SEQ ID NO: 772238 - DNA, 15 bp, Homo sapiens
actctgactgaaaat

SEQ ID NO: 772239 - DNA, 15 bp, Homo sapiens
ctctgactgaaaata

SEQ ID NO: 772240 - DNA, 15 bp, Homo sapiens
tctgactgaaaatat

SEQ ID NO: 772241 - DNA, 15 bp, Homo sapiens
ctgactgaaaatatc

SEQ ID NO: 772242 - DNA, 15 bp, Homo sapiens
tgactgaaaatatct

SEQ ID NO: 772243 - DNA, 15 bp, Homo sapiens
gactgaaaatatcta

SEQ ID NO: 772244 - DNA, 15 bp, Homo sapiens
actgaaaatatctac

SEQ ID NO: 772245 - DNA, 15 bp, Homo sapiens
ctgaaaatatctact

SEQ ID NO: 772246 - DNA, 15 bp, Homo sapiens
tgaaaatatctactg

SEQ ID NO: 772247 - DNA, 15 bp, Homo sapiens
gaaaatatctactgc

SEQ ID NO: 772248 - DNA, 15 bp, Homo sapiens
aaaatatctactgct

SEQ ID NO: 772249 - DNA, 15 bp, Homo sapiens
aaatatctactgctt

SEQ ID NO: 772250 - DNA, 15 bp, Homo sapiens
aatatctactgctta

SEQ ID NO: 772251 - DNA, 15 bp, Homo sapiens
atatctactgcttag

SEQ ID NO: 772252 - DNA, 15 bp, Homo sapiens
tatctactgcttagc

SEQ ID NO: 772253 - DNA, 15 bp, Homo sapiens
atctactgcttagcc

SEQ ID NO: 772254 - DNA, 15 bp, Homo sapiens
tctactgcttagccg

SEQ ID NO: 772255 - DNA, 15 bp, Homo sapiens
ctactgcttagccgt

SEQ ID NO: 772256 - DNA, 15 bp, Homo sapiens
tactgcttagccgtt

SEQ ID NO: 772257 - DNA, 15 bp, Homo sapiens
actgcttagccgttt

SEQ ID NO: 772258 - DNA, 15 bp, Homo sapiens
ctgcttagccgtttc

SEQ ID NO: 772259 - DNA, 15 bp, Homo sapiens
tgcttagccgtttct

SEQ ID NO: 772260 - DNA, 15 bp, Homo sapiens
gcttagccgtttcta

SEQ ID NO: 772261 - DNA, 15 bp, Homo sapiens
cttagccgtttctat

SEQ ID NO: 772262 - DNA, 15 bp, Homo sapiens
ttagccgtttctatg

SEQ ID NO: 772263 - DNA, 15 bp, Homo sapiens
tagccgtttctatgt

SEQ ID NO: 772264 - DNA, 15 bp, Homo sapiens
agccgtttctatgtc

SEQ ID NO: 772265 - DNA, 15 bp, Homo sapiens
gccgtttctatgtcg

SEQ ID NO: 772266 - DNA, 15 bp, Homo sapiens
ccgtttctatgtcga

SEQ ID NO: 772267 - DNA, 15 bp, Homo sapiens
cgtttctatgtcgat

SEQ ID NO: 772268 - DNA, 15 bp, Homo sapiens
gtttctatgtcgatt

SEQ ID NO: 772269 - DNA, 15 bp, Homo sapiens
tttctatgtcgatta

SEQ ID NO: 772270 - DNA, 15 bp, Homo sapiens
ttctatgtcgattag

SEQ ID NO: 772271 - DNA, 15 bp, Homo sapiens
tctatgtcgattaga

SEQ ID NO: 772272 - DNA, 15 bp, Homo sapiens
ctatgtcgattagag

SEQ ID NO: 772273 - DNA, 15 bp, Homo sapiens
tatgtcgattagaga

SEQ ID NO: 772274 - DNA, 15 bp, Homo sapiens
atgtcgattagagaa

SEQ ID NO: 772275 - DNA, 15 bp, Homo sapiens
tgtcgattagagaag

SEQ ID NO: 772276 - DNA, 15 bp, Homo sapiens
gtcgattagagaagg

SEQ ID NO: 772277 - DNA, 15 bp, Homo sapiens
tcgattagagaaggt

SEQ ID NO: 772278 - DNA, 15 bp, Homo sapiens
cgattagagaaggtg

SEQ ID NO: 772279 - DNA, 15 bp, Homo sapiens
gattagagaaggtgt

SEQ ID NO: 772280 - DNA, 15 bp, Homo sapiens
attagagaaggtgtt

SEQ ID NO: 772281 - DNA, 15 bp, Homo sapiens
ttagagaaggtgttt

SEQ ID NO: 772282 - DNA, 15 bp, Homo sapiens
tagagaaggtgttta

SEQ ID NO: 772283 - DNA, 15 bp, Homo sapiens
agagaaggtgtttat

SEQ ID NO: 772284 - DNA, 15 bp, Homo sapiens
gagaaggtgtttata

SEQ ID NO: 772285 - DNA, 15 bp, Homo sapiens
agaaggtgtttatag

SEQ ID NO: 772286 - DNA, 15 bp, Homo sapiens
gaaggtgtttatagc

SEQ ID NO: 772287 - DNA, 15 bp, Homo sapiens
aaggtgtttatagct

SEQ ID NO: 772288 - DNA, 15 bp, Homo sapiens
aggtgtttatagctc

SEQ ID NO: 772289 - DNA, 15 bp, Homo sapiens
ggtgtttatagctca

SEQ ID NO: 772290 - DNA, 15 bp, Homo sapiens
gtgtttatagctcag

SEQ ID NO: 772291 - DNA, 15 bp, Homo sapiens
tgtttatagctcaga

SEQ ID NO: 772292 - DNA, 15 bp, Homo sapiens
gtttatagctcagaa

SEQ ID NO: 772293 - DNA, 15 bp, Homo sapiens
tttatagctcagaac

SEQ ID NO: 772294 - DNA, 15 bp, Homo sapiens
ttatagctcagaact

SEQ ID NO: 772295 - DNA, 15 bp, Homo sapiens
tatagctcagaacta

SEQ ID NO: 772296 - DNA, 15 bp, Homo sapiens
atagctcagaactag

SEQ ID NO: 772297 - DNA, 15 bp, Homo sapiens
tagctcagaactaga

SEQ ID NO: 772298 - DNA, 15 bp, Homo sapiens
agctcagaactagag

SEQ ID NO: 772299 - DNA, 15 bp, Homo sapiens
gctcagaactagagg

SEQ ID NO: 772300 - DNA, 15 bp, Homo sapiens
ctcagaactagagga

SEQ ID NO: 772301 - DNA, 15 bp, Homo sapiens
tcagaactagaggag

SEQ ID NO: 772302 - DNA, 15 bp, Homo sapiens
cagaactagaggaga

SEQ ID NO: 772303 - DNA, 15 bp, Homo sapiens
agaactagaggagaa

SEQ ID NO: 772304 - DNA, 15 bp, Homo sapiens
gaactagaggagaag

SEQ ID NO: 772305 - DNA, 15 bp, Homo sapiens
aactagaggagaaga

SEQ ID NO: 772306 - DNA, 15 bp, Homo sapiens
actagaggagaagaa

SEQ ID NO: 772307 - DNA, 15 bp, Homo sapiens
ctagaggagaagaaa

SEQ ID NO: 772308 - DNA, 15 bp, Homo sapiens
tagaggagaagaaac

SEQ ID NO: 772309 - DNA, 15 bp, Homo sapiens
agaggagaagaaacc

SEQ ID NO: 772310 - DNA, 15 bp, Homo sapiens
gaggagaagaaacca

SEQ ID NO: 772311 - DNA, 15 bp, Homo sapiens
aggagaagaaaccat

SEQ ID NO: 772312 - DNA, 15 bp, Homo sapiens
ggagaagaaaccatt

SEQ ID NO: 772313 - DNA, 15 bp, Homo sapiens
gagaagaaaccattt

SEQ ID NO: 772314 - DNA, 15 bp, Homo sapiens
agaagaaaccatttc

SEQ ID NO: 772315 - DNA, 15 bp, Homo sapiens
gaagaaaccatttct

SEQ ID NO: 772316 - DNA, 15 bp, Homo sapiens
aagaaaccatttctt

SEQ ID NO: 772317 - DNA, 15 bp, Homo sapiens
agaaaccatttcttt

SEQ ID NO: 772318 - DNA, 15 bp, Homo sapiens
gaaaccatttctttg

SEQ ID NO: 772319 - DNA, 15 bp, Homo sapiens
aaaccatttctttgt

SEQ ID NO: 772320 - DNA, 15 bp, Homo sapiens
aaccatttctttgtc

SEQ ID NO: 772321 - DNA, 15 bp, Homo sapiens
accatttctttgtca

SEQ ID NO: 772322 - DNA, 15 bp, Homo sapiens
ccatttctttgtcac

SEQ ID NO: 772323 - DNA, 15 bp, Homo sapiens
catttctttgtcact

SEQ ID NO: 772324 - DNA, 15 bp, Homo sapiens
atttctttgtcactg

SEQ ID NO: 772325 - DNA, 15 bp, Homo sapiens
tttctttgtcactga

SEQ ID NO: 772326 - DNA, 15 bp, Homo sapiens
ttctttgtcactgag

SEQ ID NO: 772327 - DNA, 15 bp, Homo sapiens
tctttgtcactgaga

SEQ ID NO: 772328 - DNA, 15 bp, Homo sapiens
ctttgtcactgagaa

SEQ ID NO: 772329 - DNA, 15 bp, Homo sapiens
tttgtcactgagaaa

SEQ ID NO: 772330 - DNA, 15 bp, Homo sapiens
ttgtcactgagaaac

SEQ ID NO: 772331 - DNA, 15 bp, Homo sapiens
tgtcactgagaaact

SEQ ID NO: 772332 - DNA, 15 bp, Homo sapiens
gtcactgagaaactc

SEQ ID NO: 772333 - DNA, 15 bp, Homo sapiens
tcactgagaaactcc

SEQ ID NO: 772334 - DNA, 15 bp, Homo sapiens
cactgagaaactcct

SEQ ID NO: 772335 - DNA, 15 bp, Homo sapiens
actgagaaactcctt

SEQ ID NO: 772336 - DNA, 15 bp, Homo sapiens
ctgagaaactccttg

SEQ ID NO: 772337 - DNA, 15 bp, Homo sapiens
tgagaaactccttgc

SEQ ID NO: 772338 - DNA, 15 bp, Homo sapiens
gagaaactccttgcc

SEQ ID NO: 772339 - DNA, 15 bp, Homo sapiens
agaaactccttgcca

SEQ ID NO: 772340 - DNA, 15 bp, Homo sapiens
gaaactccttgccag

SEQ ID NO: 772341 - DNA, 15 bp, Homo sapiens
aaactccttgccagg

SEQ ID NO: 772342 - DNA, 15 bp, Homo sapiens
aactccttgccaggg

SEQ ID NO: 772343 - DNA, 15 bp, Homo sapiens
actccttgccagggt

SEQ ID NO: 772344 - DNA, 15 bp, Homo sapiens
ctccttgccagggtc

SEQ ID NO: 772345 - DNA, 15 bp, Homo sapiens
tccttgccagggtct

SEQ ID NO: 772346 - DNA, 15 bp, Homo sapiens
ccttgccagggtctc

SEQ ID NO: 772347 - DNA, 15 bp, Homo sapiens
cttgccagggtctct

SEQ ID NO: 772348 - DNA, 15 bp, Homo sapiens
ttgccagggtctctc

SEQ ID NO: 772349 - DNA, 15 bp, Homo sapiens
tgccagggtctctca

SEQ ID NO: 772350 - DNA, 15 bp, Homo sapiens
gccagggtctctcag

SEQ ID NO: 772351 - DNA, 15 bp, Homo sapiens
ccagggtctctcagt

SEQ ID NO: 772352 - DNA, 15 bp, Homo sapiens
cagggtctctcagtg

SEQ ID NO: 772353 - DNA, 15 bp, Homo sapiens
agggtctctcagtga

SEQ ID NO: 772354 - DNA, 15 bp, Homo sapiens
gggtctctcagtgag

SEQ ID NO: 772355 - DNA, 15 bp, Homo sapiens
ggtctctcagtgaga

SEQ ID NO: 772356 - DNA, 15 bp, Homo sapiens
gtctctcagtgagaa

SEQ ID NO: 772357 - DNA, 15 bp, Homo sapiens
tctctcagtgagaaa

SEQ ID NO: 772358 - DNA, 15 bp, Homo sapiens
ctctcagtgagaaac

SEQ ID NO: 772359 - DNA, 15 bp, Homo sapiens
tctcagtgagaaaca

SEQ ID NO: 772360 - DNA, 15 bp, Homo sapiens
ctcagtgagaaacag

SEQ ID NO: 772361 - DNA, 15 bp, Homo sapiens
tcagtgagaaacagg

SEQ ID NO: 772362 - DNA, 15 bp, Homo sapiens
cagtgagaaacagga

SEQ ID NO: 772363 - DNA, 15 bp, Homo sapiens
agtgagaaacaggac

SEQ ID NO: 772364 - DNA, 15 bp, Homo sapiens
gtgagaaacaggaca

SEQ ID NO: 772365 - DNA, 15 bp, Homo sapiens
tgagaaacaggacat

SEQ ID NO: 772366 - DNA, 15 bp, Homo sapiens
gagaaacaggacatg

SEQ ID NO: 772367 - DNA, 15 bp, Homo sapiens
agaaacaggacatgt

SEQ ID NO: 772368 - DNA, 15 bp, Homo sapiens
gaaacaggacatgtg

SEQ ID NO: 772369 - DNA, 15 bp, Homo sapiens
aaacaggacatgtgg

SEQ ID NO: 772370 - DNA, 15 bp, Homo sapiens
aacaggacatgtgga

SEQ ID NO: 772371 - DNA, 15 bp, Homo sapiens
acaggacatgtggag

SEQ ID NO: 772372 - DNA, 15 bp, Homo sapiens
caggacatgtggagc

SEQ ID NO: 772373 - DNA, 15 bp, Homo sapiens
aggacatgtggagcc

SEQ ID NO: 772374 - DNA, 15 bp, Homo sapiens
ggacatgtggagccc

SEQ ID NO: 772375 - DNA, 15 bp, Homo sapiens
gacatgtggagccca

SEQ ID NO: 772376 - DNA, 15 bp, Homo sapiens
acatgtggagcccaa

SEQ ID NO: 772377 - DNA, 15 bp, Homo sapiens
catgtggagcccaag

SEQ ID NO: 772378 - DNA, 15 bp, Homo sapiens
atgtggagcccaaga

SEQ ID NO: 772379 - DNA, 15 bp, Homo sapiens
tgtggagcccaagat

SEQ ID NO: 772380 - DNA, 15 bp, Homo sapiens
gtggagcccaagata

SEQ ID NO: 772381 - DNA, 15 bp, Homo sapiens
tggagcccaagatag

SEQ ID NO: 772382 - DNA, 15 bp, Homo sapiens
ggagcccaagatagg

SEQ ID NO: 772383 - DNA, 15 bp, Homo sapiens
gagcccaagataggg

SEQ ID NO: 772384 - DNA, 15 bp, Homo sapiens
agcccaagatagggc

SEQ ID NO: 772385 - DNA, 15 bp, Homo sapiens
gcccaagatagggca

SEQ ID NO: 772386 - DNA, 15 bp, Homo sapiens
cccaagatagggcaa

SEQ ID NO: 772387 - DNA, 15 bp, Homo sapiens
ccaagatagggcaaa

SEQ ID NO: 772388 - DNA, 15 bp, Homo sapiens
caagatagggcaaag

SEQ ID NO: 772389 - DNA, 15 bp, Homo sapiens
aagatagggcaaagc

SEQ ID NO: 772390 - DNA, 15 bp, Homo sapiens
agatagggcaaagcc

SEQ ID NO: 772391 - DNA, 15 bp, Homo sapiens
gatagggcaaagcca

SEQ ID NO: 772392 - DNA, 15 bp, Homo sapiens
atagggcaaagccaa

SEQ ID NO: 772393 - DNA, 15 bp, Homo sapiens
tagggcaaagccaag

SEQ ID NO: 772394 - DNA, 15 bp, Homo sapiens
agggcaaagccaagt

SEQ ID NO: 772395 - DNA, 15 bp, Homo sapiens
gggcaaagccaagtc

SEQ ID NO: 772396 - DNA, 15 bp, Homo sapiens
ggcaaagccaagtct

SEQ ID NO: 772397 - DNA, 15 bp, Homo sapiens
gcaaagccaagtctc

SEQ ID NO: 772398 - DNA, 15 bp, Homo sapiens
caaagccaagtctcc

SEQ ID NO: 772399 - DNA, 15 bp, Homo sapiens
aaagccaagtctcct

SEQ ID NO: 772400 - DNA, 15 bp, Homo sapiens
aagccaagtctcctt

SEQ ID NO: 772401 - DNA, 15 bp, Homo sapiens
agccaagtctcctta

SEQ ID NO: 772402 - DNA, 15 bp, Homo sapiens
gccaagtctccttat

SEQ ID NO: 772403 - DNA, 15 bp, Homo sapiens
ccaagtctccttatc

SEQ ID NO: 772404 - DNA, 15 bp, Homo sapiens
caagtctccttatct

SEQ ID NO: 772405 - DNA, 15 bp, Homo sapiens
aagtctccttatctt

SEQ ID NO: 772406 - DNA, 15 bp, Homo sapiens
agtctccttatctta

SEQ ID NO: 772407 - DNA, 15 bp, Homo sapiens
gtctccttatcttat

SEQ ID NO: 772408 - DNA, 15 bp, Homo sapiens
tctccttatcttatt

SEQ ID NO: 772409 - DNA, 15 bp, Homo sapiens
ctccttatcttattt

SEQ ID NO: 772410 - DNA, 15 bp, Homo sapiens
tccttatcttattta

SEQ ID NO: 772411 - DNA, 15 bp, Homo sapiens
ccttatcttatttag

SEQ ID NO: 772412 - DNA, 15 bp, Homo sapiens
cttatcttatttagt

SEQ ID NO: 772413 - DNA, 15 bp, Homo sapiens
ttatcttatttagtg

SEQ ID NO: 772414 - DNA, 15 bp, Homo sapiens
tatcttatttagtga

SEQ ID NO: 772415 - DNA, 15 bp, Homo sapiens
atcttatttagtgac

SEQ ID NO: 772416 - DNA, 15 bp, Homo sapiens
tcttatttagtgaca

SEQ ID NO: 772417 - DNA, 15 bp, Homo sapiens
cttatttagtgacat

SEQ ID NO: 772418 - DNA, 15 bp, Homo sapiens
ttatttagtgacatt

SEQ ID NO: 772419 - DNA, 15 bp, Homo sapiens
tatttagtgacattt

SEQ ID NO: 772420 - DNA, 15 bp, Homo sapiens
atttagtgacatttt

SEQ ID NO: 772421 - DNA, 15 bp, Homo sapiens
tttagtgacattttt

SEQ ID NO: 772422 - DNA, 15 bp, Homo sapiens
ttagtgacatttttt

SEQ ID NO: 772423 - DNA, 15 bp, Homo sapiens
tagtgacattttttt

SEQ ID NO: 772424 - DNA, 15 bp, Homo sapiens
agtgacattttttta

SEQ ID NO: 772425 - DNA, 15 bp, Homo sapiens
gtgacatttttttaa

SEQ ID NO: 772426 - DNA, 15 bp, Homo sapiens
tgacatttttttaag

SEQ ID NO: 772427 - DNA, 15 bp, Homo sapiens
gacatttttttaaga

SEQ ID NO: 772428 - DNA, 15 bp, Homo sapiens
acatttttttaagag

SEQ ID NO: 772429 - DNA, 15 bp, Homo sapiens
catttttttaagagt

SEQ ID NO: 772430 - DNA, 15 bp, Homo sapiens
atttttttaagagta

SEQ ID NO: 772431 - DNA, 15 bp, Homo sapiens
tttttttaagagtaa

SEQ ID NO: 772432 - DNA, 15 bp, Homo sapiens
ttttttaagagtaaa

SEQ ID NO: 772433 - DNA, 15 bp, Homo sapiens
tttttaagagtaaaa

SEQ ID NO: 772434 - DNA, 15 bp, Homo sapiens
ttttaagagtaaaaa

SEQ ID NO: 772435 - DNA, 15 bp, Homo sapiens
tttaagagtaaaaaa

SEQ ID NO: 772436 - DNA, 15 bp, Homo sapiens
ttaagagtaaaaaat

SEQ ID NO: 772437 - DNA, 15 bp, Homo sapiens
taagagtaaaaaata

SEQ ID NO: 772438 - DNA, 15 bp, Homo sapiens
aagagtaaaaaataa

SEQ ID NO: 772439 - DNA, 15 bp, Homo sapiens
agagtaaaaaataat

SEQ ID NO: 772440 - DNA, 15 bp, Homo sapiens
gagtaaaaaataatc

SEQ ID NO: 772441 - DNA, 15 bp, Homo sapiens
agtaaaaaataatca

SEQ ID NO: 772442 - DNA, 15 bp, Homo sapiens
gtaaaaaataatcac

SEQ ID NO: 772443 - DNA, 15 bp, Homo sapiens
taaaaaataatcaca

SEQ ID NO: 772444 - DNA, 15 bp, Homo sapiens
aaaaaataatcacat

SEQ ID NO: 772445 - DNA, 15 bp, Homo sapiens
aaaaataatcacatg

SEQ ID NO: 772446 - DNA, 15 bp, Homo sapiens
aaaataatcacatgc

SEQ ID NO: 772447 - DNA, 15 bp, Homo sapiens
aaataatcacatgct

SEQ ID NO: 772448 - DNA, 15 bp, Homo sapiens
aataatcacatgctt

SEQ ID NO: 772449 - DNA, 15 bp, Homo sapiens
ataatcacatgcttt

SEQ ID NO: 772450 - DNA, 15 bp, Homo sapiens
taatcacatgctttt

SEQ ID NO: 772451 - DNA, 15 bp, Homo sapiens
aatcacatgcttttt

SEQ ID NO: 772452 - DNA, 15 bp, Homo sapiens
atcacatgctttttg

SEQ ID NO: 772453 - DNA, 15 bp, Homo sapiens
tcacatgctttttgc

SEQ ID NO: 772454 - DNA, 15 bp, Homo sapiens
cacatgctttttgcc

SEQ ID NO: 772455 - DNA, 15 bp, Homo sapiens
acatgctttttgcca

SEQ ID NO: 772456 - DNA, 15 bp, Homo sapiens
catgctttttgccaa

SEQ ID NO: 772457 - DNA, 15 bp, Homo sapiens
atgctttttgccaaa

SEQ ID NO: 772458 - DNA, 15 bp, Homo sapiens
tgctttttgccaaat

SEQ ID NO: 772459 - DNA, 15 bp, Homo sapiens
gctttttgccaaatc

SEQ ID NO: 772460 - DNA, 15 bp, Homo sapiens
ctttttgccaaatcc

SEQ ID NO: 772461 - DNA, 15 bp, Homo sapiens
tttttgccaaatcca

SEQ ID NO: 772462 - DNA, 15 bp, Homo sapiens
ttttgccaaatccag

SEQ ID NO: 772463 - DNA, 15 bp, Homo sapiens
tttgccaaatccagc

SEQ ID NO: 772464 - DNA, 15 bp, Homo sapiens
ttgccaaatccagcc

SEQ ID NO: 772465 - DNA, 15 bp, Homo sapiens
tgccaaatccagccc

SEQ ID NO: 772466 - DNA, 15 bp, Homo sapiens
gccaaatccagccct

SEQ ID NO: 772467 - DNA, 15 bp, Homo sapiens
ccaaatccagcccta

SEQ ID NO: 772468 - DNA, 15 bp, Homo sapiens
caaatccagccctaa

SEQ ID NO: 772469 - DNA, 15 bp, Homo sapiens
aaatccagccctaag

SEQ ID NO: 772470 - DNA, 15 bp, Homo sapiens
aatccagccctaagg

SEQ ID NO: 772471 - DNA, 15 bp, Homo sapiens
atccagccctaaggc

SEQ ID NO: 772472 - DNA, 15 bp, Homo sapiens
tccagccctaaggca

SEQ ID NO: 772473 - DNA, 15 bp, Homo sapiens
ccagccctaaggcat

SEQ ID NO: 772474 - DNA, 15 bp, Homo sapiens
cagccctaaggcatg

SEQ ID NO: 772475 - DNA, 15 bp, Homo sapiens
agccctaaggcatgg

SEQ ID NO: 772476 - DNA, 15 bp, Homo sapiens
gccctaaggcatgga

SEQ ID NO: 772477 - DNA, 15 bp, Homo sapiens
ccctaaggcatggat

SEQ ID NO: 772478 - DNA, 15 bp, Homo sapiens
cctaaggcatggatc

SEQ ID NO: 772479 - DNA, 15 bp, Homo sapiens
ctaaggcatggatcc

SEQ ID NO: 772480 - DNA, 15 bp, Homo sapiens
taaggcatggatcca

SEQ ID NO: 772481 - DNA, 15 bp, Homo sapiens
aaggcatggatccaa

SEQ ID NO: 772482 - DNA, 15 bp, Homo sapiens
aggcatggatccaac

SEQ ID NO: 772483 - DNA, 15 bp, Homo sapiens
ggcatggatccaaca

SEQ ID NO: 772484 - DNA, 15 bp, Homo sapiens
gcatggatccaacaa

SEQ ID NO: 772485 - DNA, 15 bp, Homo sapiens
catggatccaacaaa

SEQ ID NO: 772486 - DNA, 15 bp, Homo sapiens
atggatccaacaaaa

SEQ ID NO: 772487 - DNA, 15 bp, Homo sapiens
tggatccaacaaaac

SEQ ID NO: 772488 - DNA, 15 bp, Homo sapiens
ggatccaacaaaaca

SEQ ID NO: 772489 - DNA, 15 bp, Homo sapiens
gatccaacaaaacat

SEQ ID NO: 772490 - DNA, 15 bp, Homo sapiens
atccaacaaaacatc

SEQ ID NO: 772491 - DNA, 15 bp, Homo sapiens
tccaacaaaacatca

SEQ ID NO: 772492 - DNA, 15 bp, Homo sapiens
ccaacaaaacatcac

SEQ ID NO: 772493 - DNA, 15 bp, Homo sapiens
caacaaaacatcaca

SEQ ID NO: 772494 - DNA, 15 bp, Homo sapiens
aacaaaacatcacat

SEQ ID NO: 772495 - DNA, 15 bp, Homo sapiens
acaaaacatcacatt

SEQ ID NO: 772496 - DNA, 15 bp, Homo sapiens
caaaacatcacatta

SEQ ID NO: 772497 - DNA, 15 bp, Homo sapiens
aaaacatcacattaa

SEQ ID NO: 772498 - DNA, 15 bp, Homo sapiens
aaacatcacattaat

SEQ ID NO: 772499 - DNA, 15 bp, Homo sapiens
aacatcacattaatt

SEQ ID NO: 772500 - DNA, 15 bp, Homo sapiens
acatcacattaatta

SEQ ID NO: 772501 - DNA, 15 bp, Homo sapiens
catcacattaattag

SEQ ID NO: 772502 - DNA, 15 bp, Homo sapiens
atcacattaattaga

SEQ ID NO: 772503 - DNA, 15 bp, Homo sapiens
tcacattaattagat

SEQ ID NO: 772504 - DNA, 15 bp, Homo sapiens
cacattaattagata

SEQ ID NO: 772505 - DNA, 15 bp, Homo sapiens
acattaattagataa

SEQ ID NO: 772506 - DNA, 15 bp, Homo sapiens
cattaattagataat

SEQ ID NO: 772507 - DNA, 15 bp, Homo sapiens
attaattagataatc

SEQ ID NO: 772508 - DNA, 15 bp, Homo sapiens
ttaattagataatct

SEQ ID NO: 772509 - DNA, 15 bp, Homo sapiens
taattagataatcta

SEQ ID NO: 772510 - DNA, 15 bp, Homo sapiens
aattagataatctaa

SEQ ID NO: 772511 - DNA, 15 bp, Homo sapiens
attagataatctaat

SEQ ID NO: 772512 - DNA, 15 bp, Homo sapiens
ttagataatctaatt

SEQ ID NO: 772513 - DNA, 15 bp, Homo sapiens
tagataatctaattt

SEQ ID NO: 772514 - DNA, 15 bp, Homo sapiens
agataatctaatttc

SEQ ID NO: 772515 - DNA, 15 bp, Homo sapiens
gataatctaatttcc

SEQ ID NO: 772516 - DNA, 15 bp, Homo sapiens
ataatctaatttcca

SEQ ID NO: 772517 - DNA, 15 bp, Homo sapiens
taatctaatttccaa

SEQ ID NO: 772518 - DNA, 15 bp, Homo sapiens
aatctaatttccaaa

SEQ ID NO: 772519 - DNA, 15 bp, Homo sapiens
atctaatttccaaaa

SEQ ID NO: 772520 - DNA, 15 bp, Homo sapiens
tctaatttccaaaaa

SEQ ID NO: 772521 - DNA, 15 bp, Homo sapiens
ctaatttccaaaaac

SEQ ID NO: 772522 - DNA, 15 bp, Homo sapiens
taatttccaaaaaca

SEQ ID NO: 772523 - DNA, 15 bp, Homo sapiens
aatttccaaaaacag

SEQ ID NO: 772524 - DNA, 15 bp, Homo sapiens
atttccaaaaacaga

SEQ ID NO: 772525 - DNA, 15 bp, Homo sapiens
tttccaaaaacagac

SEQ ID NO: 772526 - DNA, 15 bp, Homo sapiens
ttccaaaaacagacc

SEQ ID NO: 772527 - DNA, 15 bp, Homo sapiens
tccaaaaacagaccc

SEQ ID NO: 772528 - DNA, 15 bp, Homo sapiens
ccaaaaacagacccc

SEQ ID NO: 772529 - DNA, 15 bp, Homo sapiens
caaaaacagacccca

SEQ ID NO: 772530 - DNA, 15 bp, Homo sapiens
aaaaacagaccccag

SEQ ID NO: 772531 - DNA, 15 bp, Homo sapiens
aaaacagaccccagc

SEQ ID NO: 772532 - DNA, 15 bp, Homo sapiens
aaacagaccccagcg

SEQ ID NO: 772533 - DNA, 15 bp, Homo sapiens
aacagaccccagcgc

SEQ ID NO: 772534 - DNA, 15 bp, Homo sapiens
acagaccccagcgca

SEQ ID NO: 772535 - DNA, 15 bp, Homo sapiens
cagaccccagcgcag

SEQ ID NO: 772536 - DNA, 15 bp, Homo sapiens
agaccccagcgcaga

SEQ ID NO: 772537 - DNA, 15 bp, Homo sapiens
gaccccagcgcagac

SEQ ID NO: 772538 - DNA, 15 bp, Homo sapiens
accccagcgcagaca

SEQ ID NO: 772539 - DNA, 15 bp, Homo sapiens
ccccagcgcagacac

SEQ ID NO: 772540 - DNA, 15 bp, Homo sapiens
cccagcgcagacacc

SEQ ID NO: 772541 - DNA, 15 bp, Homo sapiens
ccagcgcagacaccc

SEQ ID NO: 772542 - DNA, 15 bp, Homo sapiens
cagcgcagacaccca

SEQ ID NO: 772543 - DNA, 15 bp, Homo sapiens
agcgcagacacccac

SEQ ID NO: 772544 - DNA, 15 bp, Homo sapiens
gcgcagacacccact

SEQ ID NO: 772545 - DNA, 15 bp, Homo sapiens
cgcagacacccactg

SEQ ID NO: 772546 - DNA, 15 bp, Homo sapiens
gcagacacccactgt

SEQ ID NO: 772547 - DNA, 15 bp, Homo sapiens
cagacacccactgtc

SEQ ID NO: 772548 - DNA, 15 bp, Homo sapiens
agacacccactgtct

SEQ ID NO: 772549 - DNA, 15 bp, Homo sapiens
gacacccactgtcta

SEQ ID NO: 772550 - DNA, 15 bp, Homo sapiens
acacccactgtctag

SEQ ID NO: 772551 - DNA, 15 bp, Homo sapiens
cacccactgtctagc

SEQ ID NO: 772552 - DNA, 15 bp, Homo sapiens
acccactgtctagca

SEQ ID NO: 772553 - DNA, 15 bp, Homo sapiens
cccactgtctagcag

SEQ ID NO: 772554 - DNA, 15 bp, Homo sapiens
ccactgtctagcagt

SEQ ID NO: 772555 - DNA, 15 bp, Homo sapiens
cactgtctagcagtg

SEQ ID NO: 772556 - DNA, 15 bp, Homo sapiens
actgtctagcagtga

SEQ ID NO: 772557 - DNA, 15 bp, Homo sapiens
ctgtctagcagtgat

SEQ ID NO: 772558 - DNA, 15 bp, Homo sapiens
tgtctagcagtgatg

SEQ ID NO: 772559 - DNA, 15 bp, Homo sapiens
gtctagcagtgatga

SEQ ID NO: 772560 - DNA, 15 bp, Homo sapiens
tctagcagtgatgac

SEQ ID NO: 772561 - DNA, 15 bp, Homo sapiens
ctagcagtgatgaca

SEQ ID NO: 772562 - DNA, 15 bp, Homo sapiens
tagcagtgatgacaa

SEQ ID NO: 772563 - DNA, 15 bp, Homo sapiens
agcagtgatgacaaa

SEQ ID NO: 772564 - DNA, 15 bp, Homo sapiens
gcagtgatgacaaag

SEQ ID NO: 772565 - DNA, 15 bp, Homo sapiens
cagtgatgacaaagg

SEQ ID NO: 772566 - DNA, 15 bp, Homo sapiens
agtgatgacaaaggg

SEQ ID NO: 772567 - DNA, 15 bp, Homo sapiens
gtgatgacaaaggga

SEQ ID NO: 772568 - DNA, 15 bp, Homo sapiens
tgatgacaaagggaa

SEQ ID NO: 772569 - DNA, 15 bp, Homo sapiens
gatgacaaagggaac

SEQ ID NO: 772570 - DNA, 15 bp, Homo sapiens
atgacaaagggaaca

SEQ ID NO: 772571 - DNA, 15 bp, Homo sapiens
tgacaaagggaacag

SEQ ID NO: 772572 - DNA, 15 bp, Homo sapiens
gacaaagggaacaga

SEQ ID NO: 772573 - DNA, 15 bp, Homo sapiens
acaaagggaacagac

SEQ ID NO: 772574 - DNA, 15 bp, Homo sapiens
caaagggaacagaca

SEQ ID NO: 772575 - DNA, 15 bp, Homo sapiens
aaagggaacagacag

SEQ ID NO: 772576 - DNA, 15 bp, Homo sapiens
aagggaacagacagc

SEQ ID NO: 772577 - DNA, 15 bp, Homo sapiens
agggaacagacagct

SEQ ID NO: 772578 - DNA, 15 bp, Homo sapiens
gggaacagacagctg

SEQ ID NO: 772579 - DNA, 15 bp, Homo sapiens
ggaacagacagctga

SEQ ID NO: 772580 - DNA, 15 bp, Homo sapiens
gaacagacagctgac

SEQ ID NO: 772581 - DNA, 15 bp, Homo sapiens
aacagacagctgaca

SEQ ID NO: 772582 - DNA, 15 bp, Homo sapiens
acagacagctgacat

SEQ ID NO: 772583 - DNA, 15 bp, Homo sapiens
cagacagctgacatc

SEQ ID NO: 772584 - DNA, 15 bp, Homo sapiens
agacagctgacatcg

SEQ ID NO: 772585 - DNA, 15 bp, Homo sapiens
gacagctgacatcgt

SEQ ID NO: 772586 - DNA, 15 bp, Homo sapiens
acagctgacatcgtg

SEQ ID NO: 772587 - DNA, 15 bp, Homo sapiens
cagctgacatcgtgg

SEQ ID NO: 772588 - DNA, 15 bp, Homo sapiens
agctgacatcgtggc

SEQ ID NO: 772589 - DNA, 15 bp, Homo sapiens
gctgacatcgtggct

SEQ ID NO: 772590 - DNA, 15 bp, Homo sapiens
ctgacatcgtggctt

SEQ ID NO: 772591 - DNA, 15 bp, Homo sapiens
tgacatcgtggcttc

SEQ ID NO: 772592 - DNA, 15 bp, Homo sapiens
gacatcgtggcttcc

SEQ ID NO: 772593 - DNA, 15 bp, Homo sapiens
acatcgtggcttcct

SEQ ID NO: 772594 - DNA, 15 bp, Homo sapiens
catcgtggcttcctc

SEQ ID NO: 772595 - DNA, 15 bp, Homo sapiens
atcgtggcttcctcc

SEQ ID NO: 772596 - DNA, 15 bp, Homo sapiens
tcgtggcttcctcct

SEQ ID NO: 772597 - DNA, 15 bp, Homo sapiens
cgtggcttcctcctt

SEQ ID NO: 772598 - DNA, 15 bp, Homo sapiens
gtggcttcctccttc

SEQ ID NO: 772599 - DNA, 15 bp, Homo sapiens
tggcttcctccttca

SEQ ID NO: 772600 - DNA, 15 bp, Homo sapiens
ggcttcctccttcag

SEQ ID NO: 772601 - DNA, 15 bp, Homo sapiens
gcttcctccttcaga

SEQ ID NO: 772602 - DNA, 15 bp, Homo sapiens
cttcctccttcagag

SEQ ID NO: 772603 - DNA, 15 bp, Homo sapiens
ttcctccttcagagt

SEQ ID NO: 772604 - DNA, 15 bp, Homo sapiens
tcctccttcagagtt

SEQ ID NO: 772605 - DNA, 15 bp, Homo sapiens
cctccttcagagttc

SEQ ID NO: 772606 - DNA, 15 bp, Homo sapiens
ctccttcagagttca

SEQ ID NO: 772607 - DNA, 15 bp, Homo sapiens
tccttcagagttcat

SEQ ID NO: 772608 - DNA, 15 bp, Homo sapiens
ccttcagagttcatg

SEQ ID NO: 772609 - DNA, 15 bp, Homo sapiens
cttcagagttcatgt

SEQ ID NO: 772610 - DNA, 15 bp, Homo sapiens
ttcagagttcatgtg

SEQ ID NO: 772611 - DNA, 15 bp, Homo sapiens
tcagagttcatgtgg

SEQ ID NO: 772612 - DNA, 15 bp, Homo sapiens
cagagttcatgtgga

SEQ ID NO: 772613 - DNA, 15 bp, Homo sapiens
agagttcatgtggac

SEQ ID NO: 772614 - DNA, 15 bp, Homo sapiens
gagttcatgtggaca

SEQ ID NO: 772615 - DNA, 15 bp, Homo sapiens
agttcatgtggacac

SEQ ID NO: 772616 - DNA, 15 bp, Homo sapiens
gttcatgtggacacc

SEQ ID NO: 772617 - DNA, 15 bp, Homo sapiens
ttcatgtggacacct

SEQ ID NO: 772618 - DNA, 15 bp, Homo sapiens
tcatgtggacaccta

SEQ ID NO: 772619 - DNA, 15 bp, Homo sapiens
catgtggacacctac

SEQ ID NO: 772620 - DNA, 15 bp, Homo sapiens
atgtggacacctacc

SEQ ID NO: 772621 - DNA, 15 bp, Homo sapiens
tgtggacacctacca

SEQ ID NO: 772622 - DNA, 15 bp, Homo sapiens
gtggacacctaccaa

SEQ ID NO: 772623 - DNA, 15 bp, Homo sapiens
tggacacctaccaag

SEQ ID NO: 772624 - DNA, 15 bp, Homo sapiens
ggacacctaccaaga

SEQ ID NO: 772625 - DNA, 15 bp, Homo sapiens
gacacctaccaagaa

SEQ ID NO: 772626 - DNA, 15 bp, Homo sapiens
acacctaccaagaat

SEQ ID NO: 772627 - DNA, 15 bp, Homo sapiens
cacctaccaagaata

SEQ ID NO: 772628 - DNA, 15 bp, Homo sapiens
acctaccaagaataa

SEQ ID NO: 772629 - DNA, 15 bp, Homo sapiens
cctaccaagaataag

SEQ ID NO: 772630 - DNA, 15 bp, Homo sapiens
ctaccaagaataagg

SEQ ID NO: 772631 - DNA, 15 bp, Homo sapiens
taccaagaataaggc

SEQ ID NO: 772632 - DNA, 15 bp, Homo sapiens
accaagaataaggcc

SEQ ID NO: 772633 - DNA, 15 bp, Homo sapiens
ccaagaataaggcct

SEQ ID NO: 772634 - DNA, 15 bp, Homo sapiens
caagaataaggcctt

SEQ ID NO: 772635 - DNA, 15 bp, Homo sapiens
aagaataaggccttg

SEQ ID NO: 772636 - DNA, 15 bp, Homo sapiens
agaataaggccttgg

SEQ ID NO: 772637 - DNA, 15 bp, Homo sapiens
gaataaggccttggc

SEQ ID NO: 772638 - DNA, 15 bp, Homo sapiens
aataaggccttggcc

SEQ ID NO: 772639 - DNA, 15 bp, Homo sapiens
ataaggccttggcca

SEQ ID NO: 772640 - DNA, 15 bp, Homo sapiens
taaggccttggccag

SEQ ID NO: 772641 - DNA, 15 bp, Homo sapiens
aaggccttggccaga

SEQ ID NO: 772642 - DNA, 15 bp, Homo sapiens
aggccttggccagag

SEQ ID NO: 772643 - DNA, 15 bp, Homo sapiens
ggccttggccagagc

SEQ ID NO: 772644 - DNA, 15 bp, Homo sapiens
gccttggccagagct

SEQ ID NO: 772645 - DNA, 15 bp, Homo sapiens
ccttggccagagctt

SEQ ID NO: 772646 - DNA, 15 bp, Homo sapiens
cttggccagagcttt

SEQ ID NO: 772647 - DNA, 15 bp, Homo sapiens
ttggccagagcttta

SEQ ID NO: 772648 - DNA, 15 bp, Homo sapiens
tggccagagctttat

SEQ ID NO: 772649 - DNA, 15 bp, Homo sapiens
ggccagagctttatc

SEQ ID NO: 772650 - DNA, 15 bp, Homo sapiens
gccagagctttatct

SEQ ID NO: 772651 - DNA, 15 bp, Homo sapiens
ccagagctttatctg

SEQ ID NO: 772652 - DNA, 15 bp, Homo sapiens
cagagctttatctgt

SEQ ID NO: 772653 - DNA, 15 bp, Homo sapiens
agagctttatctgtc

SEQ ID NO: 772654 - DNA, 15 bp, Homo sapiens
gagctttatctgtcc

SEQ ID NO: 772655 - DNA, 15 bp, Homo sapiens
agctttatctgtcct

SEQ ID NO: 772656 - DNA, 15 bp, Homo sapiens
gctttatctgtcctt

SEQ ID NO: 772657 - DNA, 15 bp, Homo sapiens
ctttatctgtccttg

SEQ ID NO: 772658 - DNA, 15 bp, Homo sapiens
tttatctgtccttgg

SEQ ID NO: 772659 - DNA, 15 bp, Homo sapiens
ttatctgtccttgga

SEQ ID NO: 772660 - DNA, 15 bp, Homo sapiens
tatctgtccttggac

SEQ ID NO: 772661 - DNA, 15 bp, Homo sapiens
atctgtccttggact

SEQ ID NO: 772662 - DNA, 15 bp, Homo sapiens
tctgtccttggacta

SEQ ID NO: 772663 - DNA, 15 bp, Homo sapiens
ctgtccttggactag

SEQ ID NO: 772664 - DNA, 15 bp, Homo sapiens
tgtccttggactaga

SEQ ID NO: 772665 - DNA, 15 bp, Homo sapiens
gtccttggactagaa

SEQ ID NO: 772666 - DNA, 15 bp, Homo sapiens
tccttggactagaat

SEQ ID NO: 772667 - DNA, 15 bp, Homo sapiens
ccttggactagaatg

SEQ ID NO: 772668 - DNA, 15 bp, Homo sapiens
cttggactagaatgt

SEQ ID NO: 772669 - DNA, 15 bp, Homo sapiens
ttggactagaatgtt

SEQ ID NO: 772670 - DNA, 15 bp, Homo sapiens
tggactagaatgttt

SEQ ID NO: 772671 - DNA, 15 bp, Homo sapiens
ggactagaatgtttc

SEQ ID NO: 772672 - DNA, 15 bp, Homo sapiens
gactagaatgtttct

SEQ ID NO: 772673 - DNA, 15 bp, Homo sapiens
actagaatgtttctt

SEQ ID NO: 772674 - DNA, 15 bp, Homo sapiens
ctagaatgtttctta

SEQ ID NO: 772675 - DNA, 15 bp, Homo sapiens
tagaatgtttcttag

SEQ ID NO: 772676 - DNA, 15 bp, Homo sapiens
agaatgtttcttagt

SEQ ID NO: 772677 - DNA, 15 bp, Homo sapiens
gaatgtttcttagtg

SEQ ID NO: 772678 - DNA, 15 bp, Homo sapiens
aatgtttcttagtga

SEQ ID NO: 772679 - DNA, 15 bp, Homo sapiens
atgtttcttagtgat

SEQ ID NO: 772680 - DNA, 15 bp, Homo sapiens
tgtttcttagtgatg

SEQ ID NO: 772681 - DNA, 15 bp, Homo sapiens
gtttcttagtgatgc

SEQ ID NO: 772682 - DNA, 15 bp, Homo sapiens
tttcttagtgatgcc

SEQ ID NO: 772683 - DNA, 15 bp, Homo sapiens
ttcttagtgatgcca

SEQ ID NO: 772684 - DNA, 15 bp, Homo sapiens
tcttagtgatgccat

SEQ ID NO: 772685 - DNA, 15 bp, Homo sapiens
cttagtgatgccata

SEQ ID NO: 772686 - DNA, 15 bp, Homo sapiens
ttagtgatgccataa

SEQ ID NO: 772687 - DNA, 15 bp, Homo sapiens
tagtgatgccataac

SEQ ID NO: 772688 - DNA, 15 bp, Homo sapiens
agtgatgccataaca

SEQ ID NO: 772689 - DNA, 15 bp, Homo sapiens
gtgatgccataacaa

SEQ ID NO: 772690 - DNA, 15 bp, Homo sapiens
tgatgccataacaac

SEQ ID NO: 772691 - DNA, 15 bp, Homo sapiens
gatgccataacaacg

SEQ ID NO: 772692 - DNA, 15 bp, Homo sapiens
atgccataacaacgg

SEQ ID NO: 772693 - DNA, 15 bp, Homo sapiens
tgccataacaacggg

SEQ ID NO: 772694 - DNA, 15 bp, Homo sapiens
gccataacaacgggg

SEQ ID NO: 772695 - DNA, 15 bp, Homo sapiens
ccataacaacggggt

SEQ ID NO: 772696 - DNA, 15 bp, Homo sapiens
cataacaacggggtt

SEQ ID NO: 772697 - DNA, 15 bp, Homo sapiens
ataacaacggggttg

SEQ ID NO: 772698 - DNA, 15 bp, Homo sapiens
taacaacggggttga

SEQ ID NO: 772699 - DNA, 15 bp, Homo sapiens
aacaacggggttgac

SEQ ID NO: 772700 - DNA, 15 bp, Homo sapiens
acaacggggttgact

SEQ ID NO: 772701 - DNA, 15 bp, Homo sapiens
caacggggttgactt

SEQ ID NO: 772702 - DNA, 15 bp, Homo sapiens
aacggggttgactta

SEQ ID NO: 772703 - DNA, 15 bp, Homo sapiens
acggggttgacttaa

SEQ ID NO: 772704 - DNA, 15 bp, Homo sapiens
cggggttgacttaaa

SEQ ID NO: 772705 - DNA, 15 bp, Homo sapiens
ggggttgacttaaaa

SEQ ID NO: 772706 - DNA, 15 bp, Homo sapiens
gggttgacttaaaac

SEQ ID NO: 772707 - DNA, 15 bp, Homo sapiens
ggttgacttaaaaca

SEQ ID NO: 772708 - DNA, 15 bp, Homo sapiens
gttgacttaaaacaa

SEQ ID NO: 772709 - DNA, 15 bp, Homo sapiens
ttgacttaaaacaat

SEQ ID NO: 772710 - DNA, 15 bp, Homo sapiens
tgacttaaaacaatg

SEQ ID NO: 772711 - DNA, 15 bp, Homo sapiens
gacttaaaacaatgt

SEQ ID NO: 772712 - DNA, 15 bp, Homo sapiens
acttaaaacaatgtt

SEQ ID NO: 772713 - DNA, 15 bp, Homo sapiens
cttaaaacaatgtta

SEQ ID NO: 772714 - DNA, 15 bp, Homo sapiens
ttaaaacaatgttaa

SEQ ID NO: 772715 - DNA, 15 bp, Homo sapiens
taaaacaatgttaat

SEQ ID NO: 772716 - DNA, 15 bp, Homo sapiens
aaaacaatgttaatt

SEQ ID NO: 772717 - DNA, 15 bp, Homo sapiens
aaacaatgttaattt

SEQ ID NO: 772718 - DNA, 15 bp, Homo sapiens
aacaatgttaattta

SEQ ID NO: 772719 - DNA, 15 bp, Homo sapiens
acaatgttaatttat

SEQ ID NO: 772720 - DNA, 15 bp, Homo sapiens
caatgttaatttatt

SEQ ID NO: 772721 - DNA, 15 bp, Homo sapiens
aatgttaatttattg

SEQ ID NO: 772722 - DNA, 15 bp, Homo sapiens
atgttaatttattgt

SEQ ID NO: 772723 - DNA, 15 bp, Homo sapiens
tgttaatttattgtc

SEQ ID NO: 772724 - DNA, 15 bp, Homo sapiens
gttaatttattgtct

SEQ ID NO: 772725 - DNA, 15 bp, Homo sapiens
ttaatttattgtctc

SEQ ID NO: 772726 - DNA, 15 bp, Homo sapiens
taatttattgtctca

SEQ ID NO: 772727 - DNA, 15 bp, Homo sapiens
aatttattgtctcac

SEQ ID NO: 772728 - DNA, 15 bp, Homo sapiens
atttattgtctcaca

SEQ ID NO: 772729 - DNA, 15 bp, Homo sapiens
tttattgtctcacag

SEQ ID NO: 772730 - DNA, 15 bp, Homo sapiens
ttattgtctcacagt

SEQ ID NO: 772731 - DNA, 15 bp, Homo sapiens
tattgtctcacagtt

SEQ ID NO: 772732 - DNA, 15 bp, Homo sapiens
attgtctcacagttc

SEQ ID NO: 772733 - DNA, 15 bp, Homo sapiens
ttgtctcacagttca

SEQ ID NO: 772734 - DNA, 15 bp, Homo sapiens
tgtctcacagttcag

SEQ ID NO: 772735 - DNA, 15 bp, Homo sapiens
gtctcacagttcaga

SEQ ID NO: 772736 - DNA, 15 bp, Homo sapiens
tctcacagttcagaa

SEQ ID NO: 772737 - DNA, 15 bp, Homo sapiens
ctcacagttcagaag

SEQ ID NO: 772738 - DNA, 15 bp, Homo sapiens
tcacagttcagaagg

SEQ ID NO: 772739 - DNA, 15 bp, Homo sapiens
cacagttcagaaggc

SEQ ID NO: 772740 - DNA, 15 bp, Homo sapiens
acagttcagaaggct

SEQ ID NO: 772741 - DNA, 15 bp, Homo sapiens
cagttcagaaggctg

SEQ ID NO: 772742 - DNA, 15 bp, Homo sapiens
agttcagaaggctgg

SEQ ID NO: 772743 - DNA, 15 bp, Homo sapiens
gttcagaaggctgga

SEQ ID NO: 772744 - DNA, 15 bp, Homo sapiens
ttcagaaggctggaa

SEQ ID NO: 772745 - DNA, 15 bp, Homo sapiens
tcagaaggctggaag

SEQ ID NO: 772746 - DNA, 15 bp, Homo sapiens
cagaaggctggaagg

SEQ ID NO: 772747 - DNA, 15 bp, Homo sapiens
agaaggctggaaggc

SEQ ID NO: 772748 - DNA, 15 bp, Homo sapiens
gaaggctggaaggct

SEQ ID NO: 772749 - DNA, 15 bp, Homo sapiens
aaggctggaaggctt

SEQ ID NO: 772750 - DNA, 15 bp, Homo sapiens
aggctggaaggctta

SEQ ID NO: 772751 - DNA, 15 bp, Homo sapiens
ggctggaaggcttaa

SEQ ID NO: 772752 - DNA, 15 bp, Homo sapiens
gctggaaggcttaaa

SEQ ID NO: 772753 - DNA, 15 bp, Homo sapiens
ctggaaggcttaaat

SEQ ID NO: 772754 - DNA, 15 bp, Homo sapiens
tggaaggcttaaatc

SEQ ID NO: 772755 - DNA, 15 bp, Homo sapiens
ggaaggcttaaatca

SEQ ID NO: 772756 - DNA, 15 bp, Homo sapiens
gaaggcttaaatcaa

SEQ ID NO: 772757 - DNA, 15 bp, Homo sapiens
aaggcttaaatcaag

SEQ ID NO: 772758 - DNA, 15 bp, Homo sapiens
aggcttaaatcaaga

SEQ ID NO: 772759 - DNA, 15 bp, Homo sapiens
ggcttaaatcaagat

SEQ ID NO: 772760 - DNA, 15 bp, Homo sapiens
gcttaaatcaagatg

SEQ ID NO: 772761 - DNA, 15 bp, Homo sapiens
cttaaatcaagatgt

SEQ ID NO: 772762 - DNA, 15 bp, Homo sapiens
ttaaatcaagatgtc

SEQ ID NO: 772763 - DNA, 15 bp, Homo sapiens
taaatcaagatgtca

SEQ ID NO: 772764 - DNA, 15 bp, Homo sapiens
aaatcaagatgtcag

SEQ ID NO: 772765 - DNA, 15 bp, Homo sapiens
aatcaagatgtcagc

SEQ ID NO: 772766 - DNA, 15 bp, Homo sapiens
atcaagatgtcagca

SEQ ID NO: 772767 - DNA, 15 bp, Homo sapiens
tcaagatgtcagcag

SEQ ID NO: 772768 - DNA, 15 bp, Homo sapiens
caagatgtcagcagg

SEQ ID NO: 772769 - DNA, 15 bp, Homo sapiens
aagatgtcagcaggg

SEQ ID NO: 772770 - DNA, 15 bp, Homo sapiens
agatgtcagcagggc

SEQ ID NO: 772771 - DNA, 15 bp, Homo sapiens
gatgtcagcagggcc

SEQ ID NO: 772772 - DNA, 15 bp, Homo sapiens
atgtcagcagggcca

SEQ ID NO: 772773 - DNA, 15 bp, Homo sapiens
tgtcagcagggccag

SEQ ID NO: 772774 - DNA, 15 bp, Homo sapiens
gtcagcagggccagc

SEQ ID NO: 772775 - DNA, 15 bp, Homo sapiens
tcagcagggccagcc

SEQ ID NO: 772776 - DNA, 15 bp, Homo sapiens
cagcagggccagcct

SEQ ID NO: 772777 - DNA, 15 bp, Homo sapiens
agcagggccagcctc

SEQ ID NO: 772778 - DNA, 15 bp, Homo sapiens
gcagggccagcctcc

SEQ ID NO: 772779 - DNA, 15 bp, Homo sapiens
cagggccagcctccc

SEQ ID NO: 772780 - DNA, 15 bp, Homo sapiens
agggccagcctccct

SEQ ID NO: 772781 - DNA, 15 bp, Homo sapiens
gggccagcctccctc

SEQ ID NO: 772782 - DNA, 15 bp, Homo sapiens
ggccagcctccctct

SEQ ID NO: 772783 - DNA, 15 bp, Homo sapiens
gccagcctccctctg

SEQ ID NO: 772784 - DNA, 15 bp, Homo sapiens
ccagcctccctctga

SEQ ID NO: 772785 - DNA, 15 bp, Homo sapiens
cagcctccctctgaa

SEQ ID NO: 772786 - DNA, 15 bp, Homo sapiens
agcctccctctgaag

SEQ ID NO: 772787 - DNA, 15 bp, Homo sapiens
gcctccctctgaagc

SEQ ID NO: 772788 - DNA, 15 bp, Homo sapiens
cctccctctgaagcc

SEQ ID NO: 772789 - DNA, 15 bp, Homo sapiens
ctccctctgaagcct

SEQ ID NO: 772790 - DNA, 15 bp, Homo sapiens
tccctctgaagcctg

SEQ ID NO: 772791 - DNA, 15 bp, Homo sapiens
ccctctgaagcctgt

SEQ ID NO: 772792 - DNA, 15 bp, Homo sapiens
cctctgaagcctgta

SEQ ID NO: 772793 - DNA, 15 bp, Homo sapiens
ctctgaagcctgtag

SEQ ID NO: 772794 - DNA, 15 bp, Homo sapiens
tctgaagcctgtagg

SEQ ID NO: 772795 - DNA, 15 bp, Homo sapiens
ctgaagcctgtaggg

SEQ ID NO: 772796 - DNA, 15 bp, Homo sapiens
tgaagcctgtagggt

SEQ ID NO: 772797 - DNA, 15 bp, Homo sapiens
gaagcctgtagggtt

SEQ ID NO: 772798 - DNA, 15 bp, Homo sapiens
aagcctgtagggttt

SEQ ID NO: 772799 - DNA, 15 bp, Homo sapiens
agcctgtagggtttc

SEQ ID NO: 772800 - DNA, 15 bp, Homo sapiens
gcctgtagggtttct

SEQ ID NO: 772801 - DNA, 15 bp, Homo sapiens
cctgtagggtttctc

SEQ ID NO: 772802 - DNA, 15 bp, Homo sapiens
ctgtagggtttctcc

SEQ ID NO: 772803 - DNA, 15 bp, Homo sapiens
tgtagggtttctcct

SEQ ID NO: 772804 - DNA, 15 bp, Homo sapiens
gtagggtttctcctt

SEQ ID NO: 772805 - DNA, 15 bp, Homo sapiens
tagggtttctccttc

SEQ ID NO: 772806 - DNA, 15 bp, Homo sapiens
agggtttctccttcc

SEQ ID NO: 772807 - DNA, 15 bp, Homo sapiens
gggtttctccttcct

SEQ ID NO: 772808 - DNA, 15 bp, Homo sapiens
ggtttctccttcctt

SEQ ID NO: 772809 - DNA, 15 bp, Homo sapiens
gtttctccttccttg

SEQ ID NO: 772810 - DNA, 15 bp, Homo sapiens
tttctccttccttgc

SEQ ID NO: 772811 - DNA, 15 bp, Homo sapiens
ttctccttccttgca

SEQ ID NO: 772812 - DNA, 15 bp, Homo sapiens
tctccttccttgcat

SEQ ID NO: 772813 - DNA, 15 bp, Homo sapiens
ctccttccttgcatc

SEQ ID NO: 772814 - DNA, 15 bp, Homo sapiens
tccttccttgcatct

SEQ ID NO: 772815 - DNA, 15 bp, Homo sapiens
ccttccttgcatctt

SEQ ID NO: 772816 - DNA, 15 bp, Homo sapiens
cttccttgcatcttc

SEQ ID NO: 772817 - DNA, 15 bp, Homo sapiens
ttccttgcatcttcc

SEQ ID NO: 772818 - DNA, 15 bp, Homo sapiens
tccttgcatcttccg

SEQ ID NO: 772819 - DNA, 15 bp, Homo sapiens
ccttgcatcttccgt

SEQ ID NO: 772820 - DNA, 15 bp, Homo sapiens
cttgcatcttccgtg

SEQ ID NO: 772821 - DNA, 15 bp, Homo sapiens
ttgcatcttccgtgt

SEQ ID NO: 772822 - DNA, 15 bp, Homo sapiens
tgcatcttccgtgtt

SEQ ID NO: 772823 - DNA, 15 bp, Homo sapiens
gcatcttccgtgttt

SEQ ID NO: 772824 - DNA, 15 bp, Homo sapiens
catcttccgtgtttc

SEQ ID NO: 772825 - DNA, 15 bp, Homo sapiens
atcttccgtgtttct

SEQ ID NO: 772826 - DNA, 15 bp, Homo sapiens
tcttccgtgtttctg

SEQ ID NO: 772827 - DNA, 15 bp, Homo sapiens
cttccgtgtttctgc

SEQ ID NO: 772828 - DNA, 15 bp, Homo sapiens
ttccgtgtttctgct

SEQ ID NO: 772829 - DNA, 15 bp, Homo sapiens
tccgtgtttctgctg

SEQ ID NO: 772830 - DNA, 15 bp, Homo sapiens
ccgtgtttctgctgg

SEQ ID NO: 772831 - DNA, 15 bp, Homo sapiens
cgtgtttctgctggt

SEQ ID NO: 772832 - DNA, 15 bp, Homo sapiens
gtgtttctgctggtg

SEQ ID NO: 772833 - DNA, 15 bp, Homo sapiens
tgtttctgctggtgg

SEQ ID NO: 772834 - DNA, 15 bp, Homo sapiens
gtttctgctggtggc

SEQ ID NO: 772835 - DNA, 15 bp, Homo sapiens
tttctgctggtggct

SEQ ID NO: 772836 - DNA, 15 bp, Homo sapiens
ttctgctggtggctg

SEQ ID NO: 772837 - DNA, 15 bp, Homo sapiens
tctgctggtggctgg

SEQ ID NO: 772838 - DNA, 15 bp, Homo sapiens
ctgctggtggctggc

SEQ ID NO: 772839 - DNA, 15 bp, Homo sapiens
tgctggtggctggca

SEQ ID NO: 772840 - DNA, 15 bp, Homo sapiens
gctggtggctggcag

SEQ ID NO: 772841 - DNA, 15 bp, Homo sapiens
ctggtggctggcagt

SEQ ID NO: 772842 - DNA, 15 bp, Homo sapiens
tggtggctggcagtc

SEQ ID NO: 772843 - DNA, 15 bp, Homo sapiens
ggtggctggcagtct

SEQ ID NO: 772844 - DNA, 15 bp, Homo sapiens
gtggctggcagtctt

SEQ ID NO: 772845 - DNA, 15 bp, Homo sapiens
tggctggcagtcttt

SEQ ID NO: 772846 - DNA, 15 bp, Homo sapiens
ggctggcagtctttg

SEQ ID NO: 772847 - DNA, 15 bp, Homo sapiens
gctggcagtctttga

SEQ ID NO: 772848 - DNA, 15 bp, Homo sapiens
ctggcagtctttgac

SEQ ID NO: 772849 - DNA, 15 bp, Homo sapiens
tggcagtctttgact

SEQ ID NO: 772850 - DNA, 15 bp, Homo sapiens
ggcagtctttgactt

SEQ ID NO: 772851 - DNA, 15 bp, Homo sapiens
gcagtctttgacttg

SEQ ID NO: 772852 - DNA, 15 bp, Homo sapiens
cagtctttgacttgc

SEQ ID NO: 772853 - DNA, 15 bp, Homo sapiens
agtctttgacttgca

SEQ ID NO: 772854 - DNA, 15 bp, Homo sapiens
gtctttgacttgcag

SEQ ID NO: 772855 - DNA, 15 bp, Homo sapiens
tctttgacttgcagc

SEQ ID NO: 772856 - DNA, 15 bp, Homo sapiens
ctttgacttgcagcc

SEQ ID NO: 772857 - DNA, 15 bp, Homo sapiens
tttgacttgcagcca

SEQ ID NO: 772858 - DNA, 15 bp, Homo sapiens
ttgacttgcagccac

SEQ ID NO: 772859 - DNA, 15 bp, Homo sapiens
tgacttgcagccacc

SEQ ID NO: 772860 - DNA, 15 bp, Homo sapiens
gacttgcagccacca

SEQ ID NO: 772861 - DNA, 15 bp, Homo sapiens
acttgcagccaccac

SEQ ID NO: 772862 - DNA, 15 bp, Homo sapiens
cttgcagccaccact

SEQ ID NO: 772863 - DNA, 15 bp, Homo sapiens
ttgcagccaccactc

SEQ ID NO: 772864 - DNA, 15 bp, Homo sapiens
tgcagccaccactcc

SEQ ID NO: 772865 - DNA, 15 bp, Homo sapiens
gcagccaccactcca

SEQ ID NO: 772866 - DNA, 15 bp, Homo sapiens
cagccaccactccag

SEQ ID NO: 772867 - DNA, 15 bp, Homo sapiens
agccaccactccagt

SEQ ID NO: 772868 - DNA, 15 bp, Homo sapiens
gccaccactccagtc

SEQ ID NO: 772869 - DNA, 15 bp, Homo sapiens
ccaccactccagtct

SEQ ID NO: 772870 - DNA, 15 bp, Homo sapiens
caccactccagtctc

SEQ ID NO: 772871 - DNA, 15 bp, Homo sapiens
accactccagtctct

SEQ ID NO: 772872 - DNA, 15 bp, Homo sapiens
ccactccagtctctg

SEQ ID NO: 772873 - DNA, 15 bp, Homo sapiens
cactccagtctctgc

SEQ ID NO: 772874 - DNA, 15 bp, Homo sapiens
actccagtctctgct

SEQ ID NO: 772875 - DNA, 15 bp, Homo sapiens
ctccagtctctgctt

SEQ ID NO: 772876 - DNA, 15 bp, Homo sapiens
tccagtctctgcttc

SEQ ID NO: 772877 - DNA, 15 bp, Homo sapiens
ccagtctctgcttct

SEQ ID NO: 772878 - DNA, 15 bp, Homo sapiens
cagtctctgcttctt

SEQ ID NO: 772879 - DNA, 15 bp, Homo sapiens
agtctctgcttcttt

SEQ ID NO: 772880 - DNA, 15 bp, Homo sapiens
gtctctgcttctttg

SEQ ID NO: 772881 - DNA, 15 bp, Homo sapiens
tctctgcttctttgg

SEQ ID NO: 772882 - DNA, 15 bp, Homo sapiens
ctctgcttctttggt

SEQ ID NO: 772883 - DNA, 15 bp, Homo sapiens
tctgcttctttggtc

SEQ ID NO: 772884 - DNA, 15 bp, Homo sapiens
ctgcttctttggtca

SEQ ID NO: 772885 - DNA, 15 bp, Homo sapiens
tgcttctttggtcat

SEQ ID NO: 772886 - DNA, 15 bp, Homo sapiens
gcttctttggtcatg

SEQ ID NO: 772887 - DNA, 15 bp, Homo sapiens
cttctttggtcatgg

SEQ ID NO: 772888 - DNA, 15 bp, Homo sapiens
ttctttggtcatggg

SEQ ID NO: 772889 - DNA, 15 bp, Homo sapiens
tctttggtcatgggg

SEQ ID NO: 772890 - DNA, 15 bp, Homo sapiens
ctttggtcatggggc

SEQ ID NO: 772891 - DNA, 15 bp, Homo sapiens
tttggtcatggggcg

SEQ ID NO: 772892 - DNA, 15 bp, Homo sapiens
ttggtcatggggcgt

SEQ ID NO: 772893 - DNA, 15 bp, Homo sapiens
tggtcatggggcgtt

SEQ ID NO: 772894 - DNA, 15 bp, Homo sapiens
ggtcatggggcgttc

SEQ ID NO: 772895 - DNA, 15 bp, Homo sapiens
gtcatggggcgttct

SEQ ID NO: 772896 - DNA, 15 bp, Homo sapiens
tcatggggcgttctc

SEQ ID NO: 772897 - DNA, 15 bp, Homo sapiens
catggggcgttctcc

SEQ ID NO: 772898 - DNA, 15 bp, Homo sapiens
atggggcgttctccc

SEQ ID NO: 772899 - DNA, 15 bp, Homo sapiens
tggggcgttctccct

SEQ ID NO: 772900 - DNA, 15 bp, Homo sapiens
ggggcgttctcccta

SEQ ID NO: 772901 - DNA, 15 bp, Homo sapiens
gggcgttctccctat

SEQ ID NO: 772902 - DNA, 15 bp, Homo sapiens
ggcgttctccctatg

SEQ ID NO: 772903 - DNA, 15 bp, Homo sapiens
gcgttctccctatgt

SEQ ID NO: 772904 - DNA, 15 bp, Homo sapiens
cgttctccctatgtg

SEQ ID NO: 772905 - DNA, 15 bp, Homo sapiens
gttctccctatgtgt

SEQ ID NO: 772906 - DNA, 15 bp, Homo sapiens
ttctccctatgtgtg

SEQ ID NO: 772907 - DNA, 15 bp, Homo sapiens
tctccctatgtgtgt

SEQ ID NO: 772908 - DNA, 15 bp, Homo sapiens
ctccctatgtgtgtc

SEQ ID NO: 772909 - DNA, 15 bp, Homo sapiens
tccctatgtgtgtct

SEQ ID NO: 772910 - DNA, 15 bp, Homo sapiens
ccctatgtgtgtctc

SEQ ID NO: 772911 - DNA, 15 bp, Homo sapiens
cctatgtgtgtctct

SEQ ID NO: 772912 - DNA, 15 bp, Homo sapiens
ctatgtgtgtctctt

SEQ ID NO: 772913 - DNA, 15 bp, Homo sapiens
tatgtgtgtctcttt

SEQ ID NO: 772914 - DNA, 15 bp, Homo sapiens
atgtgtgtctctttc

SEQ ID NO: 772915 - DNA, 15 bp, Homo sapiens
tgtgtgtctctttcc

SEQ ID NO: 772916 - DNA, 15 bp, Homo sapiens
gtgtgtctctttcct

SEQ ID NO: 772917 - DNA, 15 bp, Homo sapiens
tgtgtctctttcctc

SEQ ID NO: 772918 - DNA, 15 bp, Homo sapiens
gtgtctctttcctcc

SEQ ID NO: 772919 - DNA, 15 bp, Homo sapiens
tgtctctttcctcct

SEQ ID NO: 772920 - DNA, 15 bp, Homo sapiens
gtctctttcctcctc

SEQ ID NO: 772921 - DNA, 15 bp, Homo sapiens
tctctttcctcctct

SEQ ID NO: 772922 - DNA, 15 bp, Homo sapiens
ctctttcctcctctc

SEQ ID NO: 772923 - DNA, 15 bp, Homo sapiens
tctttcctcctctcc

SEQ ID NO: 772924 - DNA, 15 bp, Homo sapiens
ctttcctcctctcct

SEQ ID NO: 772925 - DNA, 15 bp, Homo sapiens
tttcctcctctccta

SEQ ID NO: 772926 - DNA, 15 bp, Homo sapiens
ttcctcctctcctag

SEQ ID NO: 772927 - DNA, 15 bp, Homo sapiens
tcctcctctcctagg

SEQ ID NO: 772928 - DNA, 15 bp, Homo sapiens
cctcctctcctaggg

SEQ ID NO: 772929 - DNA, 15 bp, Homo sapiens
ctcctctcctaggga

SEQ ID NO: 772930 - DNA, 15 bp, Homo sapiens
tcctctcctagggac

SEQ ID NO: 772931 - DNA, 15 bp, Homo sapiens
cctctcctagggaca

SEQ ID NO: 772932 - DNA, 15 bp, Homo sapiens
ctctcctagggacac

SEQ ID NO: 772933 - DNA, 15 bp, Homo sapiens
tctcctagggacacc

SEQ ID NO: 772934 - DNA, 15 bp, Homo sapiens
ctcctagggacacca

SEQ ID NO: 772935 - DNA, 15 bp, Homo sapiens
tcctagggacaccag

SEQ ID NO: 772936 - DNA, 15 bp, Homo sapiens
cctagggacaccagt

SEQ ID NO: 772937 - DNA, 15 bp, Homo sapiens
ctagggacaccagtc

SEQ ID NO: 772938 - DNA, 15 bp, Homo sapiens
tagggacaccagtca

SEQ ID NO: 772939 - DNA, 15 bp, Homo sapiens
agggacaccagtcat

SEQ ID NO: 772940 - DNA, 15 bp, Homo sapiens
gggacaccagtcata

SEQ ID NO: 772941 - DNA, 15 bp, Homo sapiens
caccagtcatattgg

SEQ ID NO: 772942 - DNA, 15 bp, Homo sapiens
accagtcatattgga

SEQ ID NO: 772943 - DNA, 15 bp, Homo sapiens
ccagtcatattggat

SEQ ID NO: 772944 - DNA, 15 bp, Homo sapiens
cagtcatattggatt

SEQ ID NO: 772945 - DNA, 15 bp, Homo sapiens
agtcatattggatta

SEQ ID NO: 772946 - DNA, 15 bp, Homo sapiens
gtcatattggattag

SEQ ID NO: 772947 - DNA, 15 bp, Homo sapiens
tcatattggattagg

SEQ ID NO: 772948 - DNA, 15 bp, Homo sapiens
catattggattagga

SEQ ID NO: 772949 - DNA, 15 bp, Homo sapiens
atattggattaggag

SEQ ID NO: 772950 - DNA, 15 bp, Homo sapiens
tattggattaggagc

SEQ ID NO: 772951 - DNA, 15 bp, Homo sapiens
attggattaggagct

SEQ ID NO: 772952 - DNA, 15 bp, Homo sapiens
ttggattaggagctc

SEQ ID NO: 772953 - DNA, 15 bp, Homo sapiens
tggattaggagctca

SEQ ID NO: 772954 - DNA, 15 bp, Homo sapiens
ggattaggagctcac

SEQ ID NO: 772955 - DNA, 15 bp, Homo sapiens
gattaggagctcacc

SEQ ID NO: 772956 - DNA, 15 bp, Homo sapiens
attaggagctcaccc

SEQ ID NO: 772957 - DNA, 15 bp, Homo sapiens
ttaggagctcaccct

SEQ ID NO: 772958 - DNA, 15 bp, Homo sapiens
taggagctcacccta

SEQ ID NO: 772959 - DNA, 15 bp, Homo sapiens
aggagctcaccctac

SEQ ID NO: 772960 - DNA, 15 bp, Homo sapiens
ggagctcaccctact

SEQ ID NO: 772961 - DNA, 15 bp, Homo sapiens
gagctcaccctactc

SEQ ID NO: 772962 - DNA, 15 bp, Homo sapiens
agctcaccctactcc

SEQ ID NO: 772963 - DNA, 15 bp, Homo sapiens
gctcaccctactcca

SEQ ID NO: 772964 - DNA, 15 bp, Homo sapiens
ctcaccctactccag

SEQ ID NO: 772965 - DNA, 15 bp, Homo sapiens
tcaccctactccagt

SEQ ID NO: 772966 - DNA, 15 bp, Homo sapiens
caccctactccagta

SEQ ID NO: 772967 - DNA, 15 bp, Homo sapiens
accctactccagtat

SEQ ID NO: 772968 - DNA, 15 bp, Homo sapiens
ccctactccagtatg

SEQ ID NO: 772969 - DNA, 15 bp, Homo sapiens
cctactccagtatga

SEQ ID NO: 772970 - DNA, 15 bp, Homo sapiens
ctactccagtatgac

SEQ ID NO: 772971 - DNA, 15 bp, Homo sapiens
tactccagtatgacc

SEQ ID NO: 772972 - DNA, 15 bp, Homo sapiens
actccagtatgacct

SEQ ID NO: 772973 - DNA, 15 bp, Homo sapiens
ctccagtatgacctc

SEQ ID NO: 772974 - DNA, 15 bp, Homo sapiens
tccagtatgacctca

SEQ ID NO: 772975 - DNA, 15 bp, Homo sapiens
ccagtatgacctcat

SEQ ID NO: 772976 - DNA, 15 bp, Homo sapiens
cagtatgacctcatt

SEQ ID NO: 772977 - DNA, 15 bp, Homo sapiens
agtatgacctcattt

SEQ ID NO: 772978 - DNA, 15 bp, Homo sapiens
gtatgacctcatttt

SEQ ID NO: 772979 - DNA, 15 bp, Homo sapiens
tatgacctcatttta

SEQ ID NO: 772980 - DNA, 15 bp, Homo sapiens
cctcattttaacttg

SEQ ID NO: 772981 - DNA, 15 bp, Homo sapiens
ctcattttaacttga

SEQ ID NO: 772982 - DNA, 15 bp, Homo sapiens
tcattttaacttgat

SEQ ID NO: 772983 - DNA, 15 bp, Homo sapiens
cattttaacttgatt

SEQ ID NO: 772984 - DNA, 15 bp, Homo sapiens
attttaacttgatta

SEQ ID NO: 772985 - DNA, 15 bp, Homo sapiens
ttttaacttgattac

SEQ ID NO: 772986 - DNA, 15 bp, Homo sapiens
tttaacttgattaca

SEQ ID NO: 772987 - DNA, 15 bp, Homo sapiens
ttaacttgattacat

SEQ ID NO: 772988 - DNA, 15 bp, Homo sapiens
taacttgattacatc

SEQ ID NO: 772989 - DNA, 15 bp, Homo sapiens
aacttgattacatct

SEQ ID NO: 772990 - DNA, 15 bp, Homo sapiens
acttgattacatctg

SEQ ID NO: 772991 - DNA, 15 bp, Homo sapiens
cttgattacatctgc

SEQ ID NO: 772992 - DNA, 15 bp, Homo sapiens
ttgattacatctgca

SEQ ID NO: 772993 - DNA, 15 bp, Homo sapiens
tgattacatctgcaa

SEQ ID NO: 772994 - DNA, 15 bp, Homo sapiens
gattacatctgcaaa

SEQ ID NO: 772995 - DNA, 15 bp, Homo sapiens
attacatctgcaaag

SEQ ID NO: 772996 - DNA, 15 bp, Homo sapiens
ttacatctgcaaaga

SEQ ID NO: 772997 - DNA, 15 bp, Homo sapiens
tacatctgcaaagac

SEQ ID NO: 772998 - DNA, 15 bp, Homo sapiens
acatctgcaaagacc

SEQ ID NO: 772999 - DNA, 15 bp, Homo sapiens
catctgcaaagacct

SEQ ID NO: 773000 - DNA, 15 bp, Homo sapiens
atctgcaaagacctt

SEQ ID NO: 773001 - DNA, 15 bp, Homo sapiens
tctgcaaagaccttc

SEQ ID NO: 773002 - DNA, 15 bp, Homo sapiens
ctgcaaagaccttct

SEQ ID NO: 773003 - DNA, 15 bp, Homo sapiens
tgcaaagaccttctt

SEQ ID NO: 773004 - DNA, 15 bp, Homo sapiens
gcaaagaccttcttt

SEQ ID NO: 773005 - DNA, 15 bp, Homo sapiens
caaagaccttctttc

SEQ ID NO: 773006 - DNA, 15 bp, Homo sapiens
aaagaccttctttcc

SEQ ID NO: 773007 - DNA, 15 bp, Homo sapiens
aagaccttctttcca

SEQ ID NO: 773008 - DNA, 15 bp, Homo sapiens
agaccttctttccaa

SEQ ID NO: 773009 - DNA, 15 bp, Homo sapiens
gaccttctttccaaa

SEQ ID NO: 773010 - DNA, 15 bp, Homo sapiens
accttctttccaaat

SEQ ID NO: 773011 - DNA, 15 bp, Homo sapiens
ccttctttccaaata

SEQ ID NO: 773012 - DNA, 15 bp, Homo sapiens
cttctttccaaataa

SEQ ID NO: 773013 - DNA, 15 bp, Homo sapiens
ttctttccaaataag

SEQ ID NO: 773014 - DNA, 15 bp, Homo sapiens
tctttccaaataagg

SEQ ID NO: 773015 - DNA, 15 bp, Homo sapiens
ctttccaaataaggc

SEQ ID NO: 773016 - DNA, 15 bp, Homo sapiens
tttccaaataaggct

SEQ ID NO: 773017 - DNA, 15 bp, Homo sapiens
ttccaaataaggctt

SEQ ID NO: 773018 - DNA, 15 bp, Homo sapiens
tccaaataaggctta

SEQ ID NO: 773019 - DNA, 15 bp, Homo sapiens
ccaaataaggcttac

SEQ ID NO: 773020 - DNA, 15 bp, Homo sapiens
caaataaggcttacc

SEQ ID NO: 773021 - DNA, 15 bp, Homo sapiens
aaataaggcttacct

SEQ ID NO: 773022 - DNA, 15 bp, Homo sapiens
aataaggcttacctt

SEQ ID NO: 773023 - DNA, 15 bp, Homo sapiens
ataaggcttaccttc

SEQ ID NO: 773024 - DNA, 15 bp, Homo sapiens
taaggcttaccttca

SEQ ID NO: 773025 - DNA, 15 bp, Homo sapiens
aaggcttaccttcac

SEQ ID NO: 773026 - DNA, 15 bp, Homo sapiens
aggcttaccttcaca

SEQ ID NO: 773027 - DNA, 15 bp, Homo sapiens
ggcttaccttcacag

SEQ ID NO: 773028 - DNA, 15 bp, Homo sapiens
gcttaccttcacagg

SEQ ID NO: 773029 - DNA, 15 bp, Homo sapiens
cttaccttcacagga

SEQ ID NO: 773030 - DNA, 15 bp, Homo sapiens
ttaccttcacaggaa

SEQ ID NO: 773031 - DNA, 15 bp, Homo sapiens
taccttcacaggaac

SEQ ID NO: 773032 - DNA, 15 bp, Homo sapiens
accttcacaggaact

SEQ ID NO: 773033 - DNA, 15 bp, Homo sapiens
ccttcacaggaactg

SEQ ID NO: 773034 - DNA, 15 bp, Homo sapiens
cttcacaggaactgg

SEQ ID NO: 773035 - DNA, 15 bp, Homo sapiens
ttcacaggaactggg

SEQ ID NO: 773036 - DNA, 15 bp, Homo sapiens
tcacaggaactgggg

SEQ ID NO: 773037 - DNA, 15 bp, Homo sapiens
cacaggaactgggga

SEQ ID NO: 773038 - DNA, 15 bp, Homo sapiens
acaggaactggggat

SEQ ID NO: 773039 - DNA, 15 bp, Homo sapiens
caggaactggggatt

SEQ ID NO: 773040 - DNA, 15 bp, Homo sapiens
aggaactggggatta

SEQ ID NO: 773041 - DNA, 15 bp, Homo sapiens
ggaactggggattac

SEQ ID NO: 773042 - DNA, 15 bp, Homo sapiens
gaactggggattact

SEQ ID NO: 773043 - DNA, 15 bp, Homo sapiens
aactggggattacta

SEQ ID NO: 773044 - DNA, 15 bp, Homo sapiens
actggggattactat

SEQ ID NO: 773045 - DNA, 15 bp, Homo sapiens
ctggggattactatt

SEQ ID NO: 773046 - DNA, 15 bp, Homo sapiens
tggggattactattg

SEQ ID NO: 773047 - DNA, 15 bp, Homo sapiens
ggggattactattga

SEQ ID NO: 773048 - DNA, 15 bp, Homo sapiens
gggattactattgaa

SEQ ID NO: 773049 - DNA, 15 bp, Homo sapiens
ggattactattgaaa

SEQ ID NO: 773050 - DNA, 15 bp, Homo sapiens
gattactattgaaac

SEQ ID NO: 773051 - DNA, 15 bp, Homo sapiens
attactattgaaaca

SEQ ID NO: 773052 - DNA, 15 bp, Homo sapiens
ttactattgaaacaa

SEQ ID NO: 773053 - DNA, 15 bp, Homo sapiens
tactattgaaacaaa

SEQ ID NO: 773054 - DNA, 15 bp, Homo sapiens
actattgaaacaaat

SEQ ID NO: 773055 - DNA, 15 bp, Homo sapiens
ctattgaaacaaatc

SEQ ID NO: 773056 - DNA, 15 bp, Homo sapiens
tattgaaacaaatct

SEQ ID NO: 773057 - DNA, 15 bp, Homo sapiens
attgaaacaaatctt

SEQ ID NO: 773058 - DNA, 15 bp, Homo sapiens
ttgaaacaaatcttt

SEQ ID NO: 773059 - DNA, 15 bp, Homo sapiens
tgaaacaaatctttt

SEQ ID NO: 773060 - DNA, 15 bp, Homo sapiens
gaaacaaatcttttg

SEQ ID NO: 773061 - DNA, 15 bp, Homo sapiens
aaacaaatcttttgg

SEQ ID NO: 773062 - DNA, 15 bp, Homo sapiens
aacaaatcttttgga

SEQ ID NO: 773063 - DNA, 15 bp, Homo sapiens
acaaatcttttggaa

SEQ ID NO: 773064 - DNA, 15 bp, Homo sapiens
caaatcttttggaaa

SEQ ID NO: 773065 - DNA, 15 bp, Homo sapiens
aaatcttttggaaaa

SEQ ID NO: 773066 - DNA, 15 bp, Homo sapiens
aatcttttggaaaaa

SEQ ID NO: 773067 - DNA, 15 bp, Homo sapiens
atcttttggaaaaaa

SEQ ID NO: 773068 - DNA, 15 bp, Homo sapiens
tcttttggaaaaaaa

SEQ ID NO: 773069 - DNA, 15 bp, Homo sapiens
cttttggaaaaaaac

SEQ ID NO: 773070 - DNA, 15 bp, Homo sapiens
ttttggaaaaaaaca

SEQ ID NO: 773071 - DNA, 15 bp, Homo sapiens
tttggaaaaaaacac

SEQ ID NO: 773072 - DNA, 15 bp, Homo sapiens
ttggaaaaaaacact

SEQ ID NO: 773073 - DNA, 15 bp, Homo sapiens
tggaaaaaaacactg

SEQ ID NO: 773074 - DNA, 15 bp, Homo sapiens
ggaaaaaaacactgc

SEQ ID NO: 773075 - DNA, 15 bp, Homo sapiens
gaaaaaaacactgca

SEQ ID NO: 773076 - DNA, 15 bp, Homo sapiens
aaaaaaacactgcaa

SEQ ID NO: 773077 - DNA, 15 bp, Homo sapiens
aaaaaacactgcaac

SEQ ID NO: 773078 - DNA, 15 bp, Homo sapiens
aaaaacactgcaacc

SEQ ID NO: 773079 - DNA, 15 bp, Homo sapiens
aaaacactgcaaccc

SEQ ID NO: 773080 - DNA, 15 bp, Homo sapiens
aaacactgcaaccca

SEQ ID NO: 773081 - DNA, 15 bp, Homo sapiens
aacactgcaacccat

SEQ ID NO: 773082 - DNA, 15 bp, Homo sapiens
acactgcaacccatt

SEQ ID NO: 773083 - DNA, 15 bp, Homo sapiens
cactgcaacccatta

SEQ ID NO: 773084 - DNA, 15 bp, Homo sapiens
actgcaacccattac

SEQ ID NO: 773085 - DNA, 15 bp, Homo sapiens
ctgcaacccattaca

SEQ ID NO: 773086 - DNA, 15 bp, Homo sapiens
tgcaacccattacag

SEQ ID NO: 773087 - DNA, 15 bp, Homo sapiens
gcaacccattacagg

SEQ ID NO: 773088 - DNA, 15 bp, Homo sapiens
caacccattacaggt

SEQ ID NO: 773089 - DNA, 15 bp, Homo sapiens
aacccattacaggtg

SEQ ID NO: 773090 - DNA, 15 bp, Homo sapiens
acccattacaggtgc

SEQ ID NO: 773091 - DNA, 15 bp, Homo sapiens
cccattacaggtgcc

SEQ ID NO: 773092 - DNA, 15 bp, Homo sapiens
ccattacaggtgcct

SEQ ID NO: 773093 - DNA, 15 bp, Homo sapiens
cattacaggtgccta

SEQ ID NO: 773094 - DNA, 15 bp, Homo sapiens
attacaggtgcctaa

SEQ ID NO: 773095 - DNA, 15 bp, Homo sapiens
ttacaggtgcctaag

SEQ ID NO: 773096 - DNA, 15 bp, Homo sapiens
tacaggtgcctaaga

SEQ ID NO: 773097 - DNA, 15 bp, Homo sapiens
acaggtgcctaagac

SEQ ID NO: 773098 - DNA, 15 bp, Homo sapiens
caggtgcctaagact

SEQ ID NO: 773099 - DNA, 15 bp, Homo sapiens
aggtgcctaagacta

SEQ ID NO: 773100 - DNA, 15 bp, Homo sapiens
ggtgcctaagactag

SEQ ID NO: 773101 - DNA, 15 bp, Homo sapiens
gtgcctaagactaga

SEQ ID NO: 773102 - DNA, 15 bp, Homo sapiens
tgcctaagactagaa

SEQ ID NO: 773103 - DNA, 15 bp, Homo sapiens
gcctaagactagaaa

SEQ ID NO: 773104 - DNA, 15 bp, Homo sapiens
cctaagactagaaag

SEQ ID NO: 773105 - DNA, 15 bp, Homo sapiens
ctaagactagaaaga

SEQ ID NO: 773106 - DNA, 15 bp, Homo sapiens
taagactagaaagat

SEQ ID NO: 773107 - DNA, 15 bp, Homo sapiens
aagactagaaagatg

SEQ ID NO: 773108 - DNA, 15 bp, Homo sapiens
agactagaaagatgg

SEQ ID NO: 773109 - DNA, 15 bp, Homo sapiens
gactagaaagatggg

SEQ ID NO: 773110 - DNA, 15 bp, Homo sapiens
actagaaagatgggt

SEQ ID NO: 773111 - DNA, 15 bp, Homo sapiens
ctagaaagatgggtc

SEQ ID NO: 773112 - DNA, 15 bp, Homo sapiens
tagaaagatgggtca

SEQ ID NO: 773113 - DNA, 15 bp, Homo sapiens
agaaagatgggtcag

SEQ ID NO: 773114 - DNA, 15 bp, Homo sapiens
gaaagatgggtcaga

SEQ ID NO: 773115 - DNA, 15 bp, Homo sapiens
aaagatgggtcagag

SEQ ID NO: 773116 - DNA, 15 bp, Homo sapiens
aagatgggtcagagc

SEQ ID NO: 773117 - DNA, 15 bp, Homo sapiens
agatgggtcagagct

SEQ ID NO: 773118 - DNA, 15 bp, Homo sapiens
gatgggtcagagctg

SEQ ID NO: 773119 - DNA, 15 bp, Homo sapiens
atgggtcagagctgc

SEQ ID NO: 773120 - DNA, 15 bp, Homo sapiens
tgggtcagagctgct

SEQ ID NO: 773121 - DNA, 15 bp, Homo sapiens
gggtcagagctgcta

SEQ ID NO: 773122 - DNA, 15 bp, Homo sapiens
ggtcagagctgctac

SEQ ID NO: 773123 - DNA, 15 bp, Homo sapiens
gtcagagctgctact

SEQ ID NO: 773124 - DNA, 15 bp, Homo sapiens
tcagagctgctactg

SEQ ID NO: 773125 - DNA, 15 bp, Homo sapiens
cagagctgctactgc

SEQ ID NO: 773126 - DNA, 15 bp, Homo sapiens
agagctgctactgcc

SEQ ID NO: 773127 - DNA, 15 bp, Homo sapiens
gagctgctactgcca

SEQ ID NO: 773128 - DNA, 15 bp, Homo sapiens
agctgctactgccag

SEQ ID NO: 773129 - DNA, 15 bp, Homo sapiens
gctgctactgccagt

SEQ ID NO: 773130 - DNA, 15 bp, Homo sapiens
ctgctactgccagtg

SEQ ID NO: 773131 - DNA, 15 bp, Homo sapiens
tgctactgccagtgt

SEQ ID NO: 773132 - DNA, 15 bp, Homo sapiens
gctactgccagtgtg

SEQ ID NO: 773133 - DNA, 15 bp, Homo sapiens
ctactgccagtgtga

SEQ ID NO: 773134 - DNA, 15 bp, Homo sapiens
tactgccagtgtgag

SEQ ID NO: 773135 - DNA, 15 bp, Homo sapiens
actgccagtgtgaga

SEQ ID NO: 773136 - DNA, 15 bp, Homo sapiens
ctgccagtgtgagaa

SEQ ID NO: 773137 - DNA, 15 bp, Homo sapiens
tgccagtgtgagaaa

SEQ ID NO: 773138 - DNA, 15 bp, Homo sapiens
gccagtgtgagaaag

SEQ ID NO: 773139 - DNA, 15 bp, Homo sapiens
ccagtgtgagaaagt

SEQ ID NO: 773140 - DNA, 15 bp, Homo sapiens
cagtgtgagaaagtg

SEQ ID NO: 773141 - DNA, 15 bp, Homo sapiens
agtgtgagaaagtgg

SEQ ID NO: 773142 - DNA, 15 bp, Homo sapiens
gtgtgagaaagtgga

SEQ ID NO: 773143 - DNA, 15 bp, Homo sapiens
tgtgagaaagtggac

SEQ ID NO: 773144 - DNA, 15 bp, Homo sapiens
gtgagaaagtggaca

SEQ ID NO: 773145 - DNA, 15 bp, Homo sapiens
tgagaaagtggacaa

SEQ ID NO: 773146 - DNA, 15 bp, Homo sapiens
gagaaagtggacaag

SEQ ID NO: 773147 - DNA, 15 bp, Homo sapiens
agaaagtggacaagt

SEQ ID NO: 773148 - DNA, 15 bp, Homo sapiens
gaaagtggacaagtt

SEQ ID NO: 773149 - DNA, 15 bp, Homo sapiens
aaagtggacaagttg

SEQ ID NO: 773150 - DNA, 15 bp, Homo sapiens
aagtggacaagttgg

SEQ ID NO: 773151 - DNA, 15 bp, Homo sapiens
agtggacaagttgga

SEQ ID NO: 773152 - DNA, 15 bp, Homo sapiens
gtggacaagttggag

SEQ ID NO: 773153 - DNA, 15 bp, Homo sapiens
tggacaagttggagt

SEQ ID NO: 773154 - DNA, 15 bp, Homo sapiens
ggacaagttggagtt

SEQ ID NO: 773155 - DNA, 15 bp, Homo sapiens
gacaagttggagttc

SEQ ID NO: 773156 - DNA, 15 bp, Homo sapiens
acaagttggagttca

SEQ ID NO: 773157 - DNA, 15 bp, Homo sapiens
caagttggagttcac

SEQ ID NO: 773158 - DNA, 15 bp, Homo sapiens
aagttggagttcacc

SEQ ID NO: 773159 - DNA, 15 bp, Homo sapiens
agttggagttcacct

SEQ ID NO: 773160 - DNA, 15 bp, Homo sapiens
gttggagttcacctg

SEQ ID NO: 773161 - DNA, 15 bp, Homo sapiens
ttggagttcacctgg

SEQ ID NO: 773162 - DNA, 15 bp, Homo sapiens
tggagttcacctggg

SEQ ID NO: 773163 - DNA, 15 bp, Homo sapiens
ggagttcacctggga

SEQ ID NO: 773164 - DNA, 15 bp, Homo sapiens
gagttcacctgggaa

SEQ ID NO: 773165 - DNA, 15 bp, Homo sapiens
agttcacctgggaat

SEQ ID NO: 773166 - DNA, 15 bp, Homo sapiens
gttcacctgggaata

SEQ ID NO: 773167 - DNA, 15 bp, Homo sapiens
ttcacctgggaataa

SEQ ID NO: 773168 - DNA, 15 bp, Homo sapiens
tcacctgggaataag

SEQ ID NO: 773169 - DNA, 15 bp, Homo sapiens
cacctgggaataaga

SEQ ID NO: 773170 - DNA, 15 bp, Homo sapiens
acctgggaataagat

SEQ ID NO: 773171 - DNA, 15 bp, Homo sapiens
cctgggaataagatc

SEQ ID NO: 773172 - DNA, 15 bp, Homo sapiens
ctgggaataagatcc

SEQ ID NO: 773173 - DNA, 15 bp, Homo sapiens
tgggaataagatcct

SEQ ID NO: 773174 - DNA, 15 bp, Homo sapiens
gggaataagatcctt

SEQ ID NO: 773175 - DNA, 15 bp, Homo sapiens
ggaataagatccttg

SEQ ID NO: 773176 - DNA, 15 bp, Homo sapiens
gaataagatccttgg

SEQ ID NO: 773177 - DNA, 15 bp, Homo sapiens
aataagatccttgga

SEQ ID NO: 773178 - DNA, 15 bp, Homo sapiens
ataagatccttggat

SEQ ID NO: 773179 - DNA, 15 bp, Homo sapiens
taagatccttggatg

SEQ ID NO: 773180 - DNA, 15 bp, Homo sapiens
aagatccttggatgg

SEQ ID NO: 773181 - DNA, 15 bp, Homo sapiens
agatccttggatgga

SEQ ID NO: 773182 - DNA, 15 bp, Homo sapiens
gatccttggatggag

SEQ ID NO: 773183 - DNA, 15 bp, Homo sapiens
atccttggatggagg

SEQ ID NO: 773184 - DNA, 15 bp, Homo sapiens
tccttggatggagga

SEQ ID NO: 773185 - DNA, 15 bp, Homo sapiens
ccttggatggaggag

SEQ ID NO: 773186 - DNA, 15 bp, Homo sapiens
cttggatggaggagc

SEQ ID NO: 773187 - DNA, 15 bp, Homo sapiens
ttggatggaggagca

SEQ ID NO: 773188 - DNA, 15 bp, Homo sapiens
tggatggaggagcaa

SEQ ID NO: 773189 - DNA, 15 bp, Homo sapiens
ggatggaggagcaaa

SEQ ID NO: 773190 - DNA, 15 bp, Homo sapiens
gatggaggagcaaac

SEQ ID NO: 773191 - DNA, 15 bp, Homo sapiens
atggaggagcaaact

SEQ ID NO: 773192 - DNA, 15 bp, Homo sapiens
tggaggagcaaactc

SEQ ID NO: 773193 - DNA, 15 bp, Homo sapiens
ggaggagcaaactcc

SEQ ID NO: 773194 - DNA, 15 bp, Homo sapiens
gaggagcaaactcca

SEQ ID NO: 773195 - DNA, 15 bp, Homo sapiens
aggagcaaactccag

SEQ ID NO: 773196 - DNA, 15 bp, Homo sapiens
ggagcaaactccagc

SEQ ID NO: 773197 - DNA, 15 bp, Homo sapiens
gagcaaactccagct

SEQ ID NO: 773198 - DNA, 15 bp, Homo sapiens
agcaaactccagcta

SEQ ID NO: 773199 - DNA, 15 bp, Homo sapiens
gcaaactccagctag

SEQ ID NO: 773200 - DNA, 15 bp, Homo sapiens
caaactccagctaga

SEQ ID NO: 773201 - DNA, 15 bp, Homo sapiens
aaactccagctagag

SEQ ID NO: 773202 - DNA, 15 bp, Homo sapiens
aactccagctagagg

SEQ ID NO: 773203 - DNA, 15 bp, Homo sapiens
actccagctagagga

SEQ ID NO: 773204 - DNA, 15 bp, Homo sapiens
ctccagctagaggac

SEQ ID NO: 773205 - DNA, 15 bp, Homo sapiens
tccagctagaggacc

SEQ ID NO: 773206 - DNA, 15 bp, Homo sapiens
ccagctagaggaccg

SEQ ID NO: 773207 - DNA, 15 bp, Homo sapiens
cagctagaggaccga

SEQ ID NO: 773208 - DNA, 15 bp, Homo sapiens
agctagaggaccgaa

SEQ ID NO: 773209 - DNA, 15 bp, Homo sapiens
gctagaggaccgaag

SEQ ID NO: 773210 - DNA, 15 bp, Homo sapiens
ctagaggaccgaagc

SEQ ID NO: 773211 - DNA, 15 bp, Homo sapiens
tagaggaccgaagcc

SEQ ID NO: 773212 - DNA, 15 bp, Homo sapiens
agaggaccgaagcct

SEQ ID NO: 773213 - DNA, 15 bp, Homo sapiens
gaggaccgaagcctt

SEQ ID NO: 773214 - DNA, 15 bp, Homo sapiens
aggaccgaagccttg

SEQ ID NO: 773215 - DNA, 15 bp, Homo sapiens
ggaccgaagccttga

SEQ ID NO: 773216 - DNA, 15 bp, Homo sapiens
gaccgaagccttgaa

SEQ ID NO: 773217 - DNA, 15 bp, Homo sapiens
accgaagccttgaaa

SEQ ID NO: 773218 - DNA, 15 bp, Homo sapiens
ccgaagccttgaaat

SEQ ID NO: 773219 - DNA, 15 bp, Homo sapiens
cgaagccttgaaatc

SEQ ID NO: 773220 - DNA, 15 bp, Homo sapiens
gaagccttgaaatca

SEQ ID NO: 773221 - DNA, 15 bp, Homo sapiens
aagccttgaaatcat

SEQ ID NO: 773222 - DNA, 15 bp, Homo sapiens
agccttgaaatcatt

SEQ ID NO: 773223 - DNA, 15 bp, Homo sapiens
gccttgaaatcattt

SEQ ID NO: 773224 - DNA, 15 bp, Homo sapiens
ccttgaaatcattta

SEQ ID NO: 773225 - DNA, 15 bp, Homo sapiens
cttgaaatcatttat

SEQ ID NO: 773226 - DNA, 15 bp, Homo sapiens
ttgaaatcatttatt

SEQ ID NO: 773227 - DNA, 15 bp, Homo sapiens
tgaaatcatttattc

SEQ ID NO: 773228 - DNA, 15 bp, Homo sapiens
gaaatcatttattct

SEQ ID NO: 773229 - DNA, 15 bp, Homo sapiens
aaatcatttattctg

SEQ ID NO: 773230 - DNA, 15 bp, Homo sapiens
aatcatttattctgc

SEQ ID NO: 773231 - DNA, 15 bp, Homo sapiens
atcatttattctgca

SEQ ID NO: 773232 - DNA, 15 bp, Homo sapiens
tcatttattctgcag

SEQ ID NO: 773233 - DNA, 15 bp, Homo sapiens
catttattctgcaga

SEQ ID NO: 773234 - DNA, 15 bp, Homo sapiens
atttattctgcagat

SEQ ID NO: 773235 - DNA, 15 bp, Homo sapiens
tttattctgcagatc

SEQ ID NO: 773236 - DNA, 15 bp, Homo sapiens
ttattctgcagatca

SEQ ID NO: 773237 - DNA, 15 bp, Homo sapiens
tattctgcagatcag

SEQ ID NO: 773238 - DNA, 15 bp, Homo sapiens
attctgcagatcagt

SEQ ID NO: 773239 - DNA, 15 bp, Homo sapiens
ttctgcagatcagtg

SEQ ID NO: 773240 - DNA, 15 bp, Homo sapiens
tctgcagatcagtgt

SEQ ID NO: 773241 - DNA, 15 bp, Homo sapiens
ctgcagatcagtgtt

SEQ ID NO: 773242 - DNA, 15 bp, Homo sapiens
tgcagatcagtgttt

SEQ ID NO: 773243 - DNA, 15 bp, Homo sapiens
gcagatcagtgtttc

SEQ ID NO: 773244 - DNA, 15 bp, Homo sapiens
cagatcagtgtttct

SEQ ID NO: 773245 - DNA, 15 bp, Homo sapiens
agatcagtgtttctc

SEQ ID NO: 773246 - DNA, 15 bp, Homo sapiens
gatcagtgtttctca

SEQ ID NO: 773247 - DNA, 15 bp, Homo sapiens
atcagtgtttctcaa

SEQ ID NO: 773248 - DNA, 15 bp, Homo sapiens
tcagtgtttctcaaa

SEQ ID NO: 773249 - DNA, 15 bp, Homo sapiens
cagtgtttctcaaaa

SEQ ID NO: 773250 - DNA, 15 bp, Homo sapiens
agtgtttctcaaaac

SEQ ID NO: 773251 - DNA, 15 bp, Homo sapiens
gtgtttctcaaaacg

SEQ ID NO: 773252 - DNA, 15 bp, Homo sapiens
tgtttctcaaaacgg

SEQ ID NO: 773253 - DNA, 15 bp, Homo sapiens
gtttctcaaaacggg

SEQ ID NO: 773254 - DNA, 15 bp, Homo sapiens
tttctcaaaacgggg

SEQ ID NO: 773255 - DNA, 15 bp, Homo sapiens
ttctcaaaacggggt

SEQ ID NO: 773256 - DNA, 15 bp, Homo sapiens
tctcaaaacggggtt

SEQ ID NO: 773257 - DNA, 15 bp, Homo sapiens
ctcaaaacggggttc

SEQ ID NO: 773258 - DNA, 15 bp, Homo sapiens
tcaaaacggggttcc

SEQ ID NO: 773259 - DNA, 15 bp, Homo sapiens
caaaacggggttccc

SEQ ID NO: 773260 - DNA, 15 bp, Homo sapiens
aaaacggggttcccc

SEQ ID NO: 773261 - DNA, 15 bp, Homo sapiens
aaacggggttcccct

SEQ ID NO: 773262 - DNA, 15 bp, Homo sapiens
aacggggttccccta

SEQ ID NO: 773263 - DNA, 15 bp, Homo sapiens
acggggttcccctag

SEQ ID NO: 773264 - DNA, 15 bp, Homo sapiens
cggggttcccctagc

SEQ ID NO: 773265 - DNA, 15 bp, Homo sapiens
ggggttcccctagcc

SEQ ID NO: 773266 - DNA, 15 bp, Homo sapiens
gggttcccctagcca

SEQ ID NO: 773267 - DNA, 15 bp, Homo sapiens
ggttcccctagccat

SEQ ID NO: 773268 - DNA, 15 bp, Homo sapiens
gttcccctagccatc

SEQ ID NO: 773269 - DNA, 15 bp, Homo sapiens
ttcccctagccatca

SEQ ID NO: 773270 - DNA, 15 bp, Homo sapiens
tcccctagccatcag

SEQ ID NO: 773271 - DNA, 15 bp, Homo sapiens
cccctagccatcagc

SEQ ID NO: 773272 - DNA, 15 bp, Homo sapiens
ccctagccatcagca

SEQ ID NO: 773273 - DNA, 15 bp, Homo sapiens
cctagccatcagcat

SEQ ID NO: 773274 - DNA, 15 bp, Homo sapiens
ctagccatcagcatt

SEQ ID NO: 773275 - DNA, 15 bp, Homo sapiens
tagccatcagcatta

SEQ ID NO: 773276 - DNA, 15 bp, Homo sapiens
agccatcagcattag

SEQ ID NO: 773277 - DNA, 15 bp, Homo sapiens
gccatcagcattagc

SEQ ID NO: 773278 - DNA, 15 bp, Homo sapiens
ccatcagcattagcg

SEQ ID NO: 773279 - DNA, 15 bp, Homo sapiens
catcagcattagcgt

SEQ ID NO: 773280 - DNA, 15 bp, Homo sapiens
atcagcattagcgtc

SEQ ID NO: 773281 - DNA, 15 bp, Homo sapiens
tcagcattagcgtca

SEQ ID NO: 773282 - DNA, 15 bp, Homo sapiens
cagcattagcgtcag

SEQ ID NO: 773283 - DNA, 15 bp, Homo sapiens
agcattagcgtcagc

SEQ ID NO: 773284 - DNA, 15 bp, Homo sapiens
gcattagcgtcagct

SEQ ID NO: 773285 - DNA, 15 bp, Homo sapiens
cattagcgtcagctg

SEQ ID NO: 773286 - DNA, 15 bp, Homo sapiens
attagcgtcagctga

SEQ ID NO: 773287 - DNA, 15 bp, Homo sapiens
ttagcgtcagctgag

SEQ ID NO: 773288 - DNA, 15 bp, Homo sapiens
tagcgtcagctgaga

SEQ ID NO: 773289 - DNA, 15 bp, Homo sapiens
agcgtcagctgagaa

SEQ ID NO: 773290 - DNA, 15 bp, Homo sapiens
gcgtcagctgagaaa

SEQ ID NO: 773291 - DNA, 15 bp, Homo sapiens
cgtcagctgagaaac

SEQ ID NO: 773292 - DNA, 15 bp, Homo sapiens
gtcagctgagaaaca

SEQ ID NO: 773293 - DNA, 15 bp, Homo sapiens
tcagctgagaaacat

SEQ ID NO: 773294 - DNA, 15 bp, Homo sapiens
cagctgagaaacatg

SEQ ID NO: 773295 - DNA, 15 bp, Homo sapiens
agctgagaaacatgt

SEQ ID NO: 773296 - DNA, 15 bp, Homo sapiens
gctgagaaacatgta

SEQ ID NO: 773297 - DNA, 15 bp, Homo sapiens
ctgagaaacatgtaa

SEQ ID NO: 773298 - DNA, 15 bp, Homo sapiens
tgagaaacatgtaag

SEQ ID NO: 773299 - DNA, 15 bp, Homo sapiens
gagaaacatgtaagg

SEQ ID NO: 773300 - DNA, 15 bp, Homo sapiens
agaaacatgtaaggc

SEQ ID NO: 773301 - DNA, 15 bp, Homo sapiens
gaaacatgtaaggca

SEQ ID NO: 773302 - DNA, 15 bp, Homo sapiens
aaacatgtaaggcat

SEQ ID NO: 773303 - DNA, 15 bp, Homo sapiens
aacatgtaaggcatg

SEQ ID NO: 773304 - DNA, 15 bp, Homo sapiens
acatgtaaggcatgt

SEQ ID NO: 773305 - DNA, 15 bp, Homo sapiens
catgtaaggcatgta

SEQ ID NO: 773306 - DNA, 15 bp, Homo sapiens
atgtaaggcatgtaa

SEQ ID NO: 773307 - DNA, 15 bp, Homo sapiens
tgtaaggcatgtaaa

SEQ ID NO: 773308 - DNA, 15 bp, Homo sapiens
gtaaggcatgtaaat

SEQ ID NO: 773309 - DNA, 15 bp, Homo sapiens
taaggcatgtaaatt

SEQ ID NO: 773310 - DNA, 15 bp, Homo sapiens
aaggcatgtaaattc

SEQ ID NO: 773311 - DNA, 15 bp, Homo sapiens
aggcatgtaaattct

SEQ ID NO: 773312 - DNA, 15 bp, Homo sapiens
ggcatgtaaattctt

SEQ ID NO: 773313 - DNA, 15 bp, Homo sapiens
gcatgtaaattctta

SEQ ID NO: 773314 - DNA, 15 bp, Homo sapiens
catgtaaattcttat

SEQ ID NO: 773315 - DNA, 15 bp, Homo sapiens
atgtaaattcttatg

SEQ ID NO: 773316 - DNA, 15 bp, Homo sapiens
tgtaaattcttatgc

SEQ ID NO: 773317 - DNA, 15 bp, Homo sapiens
gtaaattcttatgct

SEQ ID NO: 773318 - DNA, 15 bp, Homo sapiens
taaattcttatgctc

SEQ ID NO: 773319 - DNA, 15 bp, Homo sapiens
aaattcttatgctcc

SEQ ID NO: 773320 - DNA, 15 bp, Homo sapiens
aattcttatgctcca

SEQ ID NO: 773321 - DNA, 15 bp, Homo sapiens
attcttatgctccaa

SEQ ID NO: 773322 - DNA, 15 bp, Homo sapiens
ttcttatgctccaac

SEQ ID NO: 773323 - DNA, 15 bp, Homo sapiens
tcttatgctccaacc

SEQ ID NO: 773324 - DNA, 15 bp, Homo sapiens
cttatgctccaacct

SEQ ID NO: 773325 - DNA, 15 bp, Homo sapiens
ttatgctccaaccta

SEQ ID NO: 773326 - DNA, 15 bp, Homo sapiens
tatgctccaacctaa

SEQ ID NO: 773327 - DNA, 15 bp, Homo sapiens
atgctccaacctaag

SEQ ID NO: 773328 - DNA, 15 bp, Homo sapiens
tgctccaacctaagc

SEQ ID NO: 773329 - DNA, 15 bp, Homo sapiens
gctccaacctaagcc

SEQ ID NO: 773330 - DNA, 15 bp, Homo sapiens
ctccaacctaagcct

SEQ ID NO: 773331 - DNA, 15 bp, Homo sapiens
tccaacctaagccta

SEQ ID NO: 773332 - DNA, 15 bp, Homo sapiens
ccaacctaagcctac

SEQ ID NO: 773333 - DNA, 15 bp, Homo sapiens
caacctaagcctact

SEQ ID NO: 773334 - DNA, 15 bp, Homo sapiens
aacctaagcctactg

SEQ ID NO: 773335 - DNA, 15 bp, Homo sapiens
acctaagcctactga

SEQ ID NO: 773336 - DNA, 15 bp, Homo sapiens
cctaagcctactgaa

SEQ ID NO: 773337 - DNA, 15 bp, Homo sapiens
ctaagcctactgaat

SEQ ID NO: 773338 - DNA, 15 bp, Homo sapiens
taagcctactgaatt

SEQ ID NO: 773339 - DNA, 15 bp, Homo sapiens
aagcctactgaattg

SEQ ID NO: 773340 - DNA, 15 bp, Homo sapiens
agcctactgaattgg

SEQ ID NO: 773341 - DNA, 15 bp, Homo sapiens
gcctactgaattgga

SEQ ID NO: 773342 - DNA, 15 bp, Homo sapiens
cctactgaattggaa

SEQ ID NO: 773343 - DNA, 15 bp, Homo sapiens
ctactgaattggaaa

SEQ ID NO: 773344 - DNA, 15 bp, Homo sapiens
tactgaattggaaac

SEQ ID NO: 773345 - DNA, 15 bp, Homo sapiens
actgaattggaaact

SEQ ID NO: 773346 - DNA, 15 bp, Homo sapiens
ctgaattggaaactc

SEQ ID NO: 773347 - DNA, 15 bp, Homo sapiens
tgaattggaaactct

SEQ ID NO: 773348 - DNA, 15 bp, Homo sapiens
gaattggaaactctg

SEQ ID NO: 773349 - DNA, 15 bp, Homo sapiens
aattggaaactctgg

SEQ ID NO: 773350 - DNA, 15 bp, Homo sapiens
attggaaactctggg

SEQ ID NO: 773351 - DNA, 15 bp, Homo sapiens
ttggaaactctgggc

SEQ ID NO: 773352 - DNA, 15 bp, Homo sapiens
tggaaactctgggct

SEQ ID NO: 773353 - DNA, 15 bp, Homo sapiens
ggaaactctgggctg

SEQ ID NO: 773354 - DNA, 15 bp, Homo sapiens
gaaactctgggctgg

SEQ ID NO: 773355 - DNA, 15 bp, Homo sapiens
aaactctgggctggg

SEQ ID NO: 773356 - DNA, 15 bp, Homo sapiens
aactctgggctgggg

SEQ ID NO: 773357 - DNA, 15 bp, Homo sapiens
actctgggctggggt

SEQ ID NO: 773358 - DNA, 15 bp, Homo sapiens
ctctgggctggggta

SEQ ID NO: 773359 - DNA, 15 bp, Homo sapiens
tctgggctggggtag

SEQ ID NO: 773360 - DNA, 15 bp, Homo sapiens
ctgggctggggtagt

SEQ ID NO: 773361 - DNA, 15 bp, Homo sapiens
tgggctggggtagtt

SEQ ID NO: 773362 - DNA, 15 bp, Homo sapiens
gggctggggtagttt

SEQ ID NO: 773363 - DNA, 15 bp, Homo sapiens
ggctggggtagtttc

SEQ ID NO: 773364 - DNA, 15 bp, Homo sapiens
gctggggtagtttct

SEQ ID NO: 773365 - DNA, 15 bp, Homo sapiens
ctggggtagtttctt

SEQ ID NO: 773366 - DNA, 15 bp, Homo sapiens
tggggtagtttctta

SEQ ID NO: 773367 - DNA, 15 bp, Homo sapiens
ggggtagtttcttat

SEQ ID NO: 773368 - DNA, 15 bp, Homo sapiens
gggtagtttcttatt

SEQ ID NO: 773369 - DNA, 15 bp, Homo sapiens
ggtagtttcttattt

SEQ ID NO: 773370 - DNA, 15 bp, Homo sapiens
gtagtttcttatttt

SEQ ID NO: 773371 - DNA, 15 bp, Homo sapiens
tagtttcttatttta

SEQ ID NO: 773372 - DNA, 15 bp, Homo sapiens
agtttcttattttaa

SEQ ID NO: 773373 - DNA, 15 bp, Homo sapiens
gtttcttattttaat

SEQ ID NO: 773374 - DNA, 15 bp, Homo sapiens
tttcttattttaata

SEQ ID NO: 773375 - DNA, 15 bp, Homo sapiens
ttcttattttaataa

SEQ ID NO: 773376 - DNA, 15 bp, Homo sapiens
tcttattttaataag

SEQ ID NO: 773377 - DNA, 15 bp, Homo sapiens
cttattttaataagc

SEQ ID NO: 773378 - DNA, 15 bp, Homo sapiens
ttattttaataagcc

SEQ ID NO: 773379 - DNA, 15 bp, Homo sapiens
tattttaataagcct

SEQ ID NO: 773380 - DNA, 15 bp, Homo sapiens
attttaataagcctt

SEQ ID NO: 773381 - DNA, 15 bp, Homo sapiens
ttttaataagccttc

SEQ ID NO: 773382 - DNA, 15 bp, Homo sapiens
tttaataagccttcc

SEQ ID NO: 773383 - DNA, 15 bp, Homo sapiens
ttaataagccttcct

SEQ ID NO: 773384 - DNA, 15 bp, Homo sapiens
taataagccttcctg

SEQ ID NO: 773385 - DNA, 15 bp, Homo sapiens
aataagccttcctgg

SEQ ID NO: 773386 - DNA, 15 bp, Homo sapiens
ataagccttcctggt

SEQ ID NO: 773387 - DNA, 15 bp, Homo sapiens
taagccttcctggtg

SEQ ID NO: 773388 - DNA, 15 bp, Homo sapiens
agccttcctggtgac

SEQ ID NO: 773389 - DNA, 15 bp, Homo sapiens
gccttcctggtgact

SEQ ID NO: 773390 - DNA, 15 bp, Homo sapiens
ccttcctggtgactc

SEQ ID NO: 773391 - DNA, 15 bp, Homo sapiens
cttcctggtgactct

SEQ ID NO: 773392 - DNA, 15 bp, Homo sapiens
ttcctggtgactctg

SEQ ID NO: 773393 - DNA, 15 bp, Homo sapiens
tcctggtgactctga

SEQ ID NO: 773394 - DNA, 15 bp, Homo sapiens
cctggtgactctgat

SEQ ID NO: 773395 - DNA, 15 bp, Homo sapiens
ctggtgactctgatg

SEQ ID NO: 773396 - DNA, 15 bp, Homo sapiens
tggtgactctgatgc

SEQ ID NO: 773397 - DNA, 15 bp, Homo sapiens
ggtgactctgatgca

SEQ ID NO: 773398 - DNA, 15 bp, Homo sapiens
gtgactctgatgcac

SEQ ID NO: 773399 - DNA, 15 bp, Homo sapiens
tgactctgatgcaca

SEQ ID NO: 773400 - DNA, 15 bp, Homo sapiens
gactctgatgcacac

SEQ ID NO: 773401 - DNA, 15 bp, Homo sapiens
actctgatgcacact

SEQ ID NO: 773402 - DNA, 15 bp, Homo sapiens
ctctgatgcacacta

SEQ ID NO: 773403 - DNA, 15 bp, Homo sapiens
tctgatgcacactaa

SEQ ID NO: 773404 - DNA, 15 bp, Homo sapiens
ctgatgcacactaaa

SEQ ID NO: 773405 - DNA, 15 bp, Homo sapiens
tgatgcacactaaag

SEQ ID NO: 773406 - DNA, 15 bp, Homo sapiens
gatgcacactaaagt

SEQ ID NO: 773407 - DNA, 15 bp, Homo sapiens
atgcacactaaagtt

SEQ ID NO: 773408 - DNA, 15 bp, Homo sapiens
tgcacactaaagttt

SEQ ID NO: 773409 - DNA, 15 bp, Homo sapiens
gcacactaaagtttg

SEQ ID NO: 773410 - DNA, 15 bp, Homo sapiens
cacactaaagtttga

SEQ ID NO: 773411 - DNA, 15 bp, Homo sapiens
acactaaagtttgag

SEQ ID NO: 773412 - DNA, 15 bp, Homo sapiens
cactaaagtttgaga

SEQ ID NO: 773413 - DNA, 15 bp, Homo sapiens
actaaagtttgagac

SEQ ID NO: 773414 - DNA, 15 bp, Homo sapiens
ctaaagtttgagacc

SEQ ID NO: 773415 - DNA, 15 bp, Homo sapiens
taaagtttgagaccc

SEQ ID NO: 773416 - DNA, 15 bp, Homo sapiens
aaagtttgagaccca

SEQ ID NO: 773417 - DNA, 15 bp, Homo sapiens
aagtttgagacccat

SEQ ID NO: 773418 - DNA, 15 bp, Homo sapiens
agtttgagacccatt

SEQ ID NO: 773419 - DNA, 15 bp, Homo sapiens
gtttgagacccattc

SEQ ID NO: 773420 - DNA, 15 bp, Homo sapiens
tttgagacccattcc

SEQ ID NO: 773421 - DNA, 15 bp, Homo sapiens
ttgagacccattcct

SEQ ID NO: 773422 - DNA, 15 bp, Homo sapiens
tgagacccattcctc

SEQ ID NO: 773423 - DNA, 15 bp, Homo sapiens
gagacccattcctct

SEQ ID NO: 773424 - DNA, 15 bp, Homo sapiens
agacccattcctcta

SEQ ID NO: 773425 - DNA, 15 bp, Homo sapiens
gacccattcctctaa

SEQ ID NO: 773426 - DNA, 15 bp, Homo sapiens
acccattcctctaaa

SEQ ID NO: 773427 - DNA, 15 bp, Homo sapiens
cccattcctctaaat

SEQ ID NO: 773428 - DNA, 15 bp, Homo sapiens
ccattcctctaaatt

SEQ ID NO: 773429 - DNA, 15 bp, Homo sapiens
cattcctctaaattc

SEQ ID NO: 773430 - DNA, 15 bp, Homo sapiens
attcctctaaattct

SEQ ID NO: 773431 - DNA, 15 bp, Homo sapiens
ttcctctaaattctg

SEQ ID NO: 773432 - DNA, 15 bp, Homo sapiens
tcctctaaattctgc

SEQ ID NO: 773433 - DNA, 15 bp, Homo sapiens
cctctaaattctgcc

SEQ ID NO: 773434 - DNA, 15 bp, Homo sapiens
ctctaaattctgccg

SEQ ID NO: 773435 - DNA, 15 bp, Homo sapiens
tctaaattctgccgt

SEQ ID NO: 773436 - DNA, 15 bp, Homo sapiens
ctaaattctgccgtc

SEQ ID NO: 773437 - DNA, 15 bp, Homo sapiens
taaattctgccgtct

SEQ ID NO: 773438 - DNA, 15 bp, Homo sapiens
aaattctgccgtctc

SEQ ID NO: 773439 - DNA, 15 bp, Homo sapiens
aattctgccgtctct

SEQ ID NO: 773440 - DNA, 15 bp, Homo sapiens
attctgccgtctctc

SEQ ID NO: 773441 - DNA, 15 bp, Homo sapiens
ttctgccgtctctcc

SEQ ID NO: 773442 - DNA, 15 bp, Homo sapiens
tctgccgtctctcct

SEQ ID NO: 773443 - DNA, 15 bp, Homo sapiens
ctgccgtctctcctc

SEQ ID NO: 773444 - DNA, 15 bp, Homo sapiens
tgccgtctctcctca

SEQ ID NO: 773445 - DNA, 15 bp, Homo sapiens
gccgtctctcctcac

SEQ ID NO: 773446 - DNA, 15 bp, Homo sapiens
ccgtctctcctcact

SEQ ID NO: 773447 - DNA, 15 bp, Homo sapiens
cgtctctcctcactg

SEQ ID NO: 773448 - DNA, 15 bp, Homo sapiens
gtctctcctcactgc

SEQ ID NO: 773449 - DNA, 15 bp, Homo sapiens
tctctcctcactgca

SEQ ID NO: 773450 - DNA, 15 bp, Homo sapiens
ctctcctcactgcat

SEQ ID NO: 773451 - DNA, 15 bp, Homo sapiens
tctcctcactgcatc

SEQ ID NO: 773452 - DNA, 15 bp, Homo sapiens
ctcctcactgcatca

SEQ ID NO: 773453 - DNA, 15 bp, Homo sapiens
tcctcactgcatcac

SEQ ID NO: 773454 - DNA, 15 bp, Homo sapiens
cctcactgcatcact

SEQ ID NO: 773455 - DNA, 15 bp, Homo sapiens
ctcactgcatcactt

SEQ ID NO: 773456 - DNA, 15 bp, Homo sapiens
tcactgcatcacttt

SEQ ID NO: 773457 - DNA, 15 bp, Homo sapiens
cactgcatcactttt

SEQ ID NO: 773458 - DNA, 15 bp, Homo sapiens
actgcatcacttttc

SEQ ID NO: 773459 - DNA, 15 bp, Homo sapiens
ctgcatcacttttca

SEQ ID NO: 773460 - DNA, 15 bp, Homo sapiens
tgcatcacttttcag

SEQ ID NO: 773461 - DNA, 15 bp, Homo sapiens
gcatcacttttcagt

SEQ ID NO: 773462 - DNA, 15 bp, Homo sapiens
catcacttttcagtg

SEQ ID NO: 773463 - DNA, 15 bp, Homo sapiens
atcacttttcagtgg

SEQ ID NO: 773464 - DNA, 15 bp, Homo sapiens
tcacttttcagtggg

SEQ ID NO: 773465 - DNA, 15 bp, Homo sapiens
cacttttcagtgggg

SEQ ID NO: 773466 - DNA, 15 bp, Homo sapiens
acttttcagtggggc

SEQ ID NO: 773467 - DNA, 15 bp, Homo sapiens
cttttcagtggggct

SEQ ID NO: 773468 - DNA, 15 bp, Homo sapiens
ttttcagtggggctg

SEQ ID NO: 773469 - DNA, 15 bp, Homo sapiens
tttcagtggggctgc

SEQ ID NO: 773470 - DNA, 15 bp, Homo sapiens
ttcagtggggctgcc

SEQ ID NO: 773471 - DNA, 15 bp, Homo sapiens
tcagtggggctgccc

SEQ ID NO: 773472 - DNA, 15 bp, Homo sapiens
cagtggggctgccct

SEQ ID NO: 773473 - DNA, 15 bp, Homo sapiens
agtggggctgccctt

SEQ ID NO: 773474 - DNA, 15 bp, Homo sapiens
gtggggctgcccttg

SEQ ID NO: 773475 - DNA, 15 bp, Homo sapiens
tggggctgcccttgg

SEQ ID NO: 773476 - DNA, 15 bp, Homo sapiens
ggggctgcccttgga

SEQ ID NO: 773477 - DNA, 15 bp, Homo sapiens
gggctgcccttggac

SEQ ID NO: 773478 - DNA, 15 bp, Homo sapiens
ggctgcccttggaca

SEQ ID NO: 773479 - DNA, 15 bp, Homo sapiens
gctgcccttggacac

SEQ ID NO: 773480 - DNA, 15 bp, Homo sapiens
ctgcccttggacact

SEQ ID NO: 773481 - DNA, 15 bp, Homo sapiens
tgcccttggacactg

SEQ ID NO: 773482 - DNA, 15 bp, Homo sapiens
gcccttggacactgg

SEQ ID NO: 773483 - DNA, 15 bp, Homo sapiens
cccttggacactggc

SEQ ID NO: 773484 - DNA, 15 bp, Homo sapiens
ccttggacactggca

SEQ ID NO: 773485 - DNA, 15 bp, Homo sapiens
cttggacactggcag

SEQ ID NO: 773486 - DNA, 15 bp, Homo sapiens
ttggacactggcaga

SEQ ID NO: 773487 - DNA, 15 bp, Homo sapiens
tggacactggcagat

SEQ ID NO: 773488 - DNA, 15 bp, Homo sapiens
ggacactggcagata

SEQ ID NO: 773489 - DNA, 15 bp, Homo sapiens
gacactggcagatat

SEQ ID NO: 773490 - DNA, 15 bp, Homo sapiens
acactggcagatatt

SEQ ID NO: 773491 - DNA, 15 bp, Homo sapiens
cactggcagatattt

SEQ ID NO: 773492 - DNA, 15 bp, Homo sapiens
actggcagatatttt

SEQ ID NO: 773493 - DNA, 15 bp, Homo sapiens
ctggcagatattttg

SEQ ID NO: 773494 - DNA, 15 bp, Homo sapiens
tggcagatattttgg

SEQ ID NO: 773495 - DNA, 15 bp, Homo sapiens
ggcagatattttggg

SEQ ID NO: 773496 - DNA, 15 bp, Homo sapiens
gcagatattttgggt

SEQ ID NO: 773497 - DNA, 15 bp, Homo sapiens
cagatattttgggtt

SEQ ID NO: 773498 - DNA, 15 bp, Homo sapiens
agatattttgggtta

SEQ ID NO: 773499 - DNA, 15 bp, Homo sapiens
gatattttgggttaa

SEQ ID NO: 773500 - DNA, 15 bp, Homo sapiens
atattttgggttaaa

SEQ ID NO: 773501 - DNA, 15 bp, Homo sapiens
tattttgggttaaag

SEQ ID NO: 773502 - DNA, 15 bp, Homo sapiens
attttgggttaaaga

SEQ ID NO: 773503 - DNA, 15 bp, Homo sapiens
ttttgggttaaagaa

SEQ ID NO: 773504 - DNA, 15 bp, Homo sapiens
tttgggttaaagaag

SEQ ID NO: 773505 - DNA, 15 bp, Homo sapiens
ttgggttaaagaaga

SEQ ID NO: 773506 - DNA, 15 bp, Homo sapiens
tgggttaaagaagaa

SEQ ID NO: 773507 - DNA, 15 bp, Homo sapiens
gggttaaagaagaaa

SEQ ID NO: 773508 - DNA, 15 bp, Homo sapiens
ggttaaagaagaaag

SEQ ID NO: 773509 - DNA, 15 bp, Homo sapiens
gttaaagaagaaagt

SEQ ID NO: 773510 - DNA, 15 bp, Homo sapiens
ttaaagaagaaagtt

SEQ ID NO: 773511 - DNA, 15 bp, Homo sapiens
taaagaagaaagtta

SEQ ID NO: 773512 - DNA, 15 bp, Homo sapiens
aaagaagaaagttat

SEQ ID NO: 773513 - DNA, 15 bp, Homo sapiens
aagaagaaagttatt

SEQ ID NO: 773514 - DNA, 15 bp, Homo sapiens
agaagaaagttattt

SEQ ID NO: 773515 - DNA, 15 bp, Homo sapiens
gaagaaagttatttg

SEQ ID NO: 773516 - DNA, 15 bp, Homo sapiens
aagaaagttatttgg

SEQ ID NO: 773517 - DNA, 15 bp, Homo sapiens
agaaagttatttggt

SEQ ID NO: 773518 - DNA, 15 bp, Homo sapiens
gaaagttatttggtc

SEQ ID NO: 773519 - DNA, 15 bp, Homo sapiens
aaagttatttggtca

SEQ ID NO: 773520 - DNA, 15 bp, Homo sapiens
aagttatttggtcaa

SEQ ID NO: 773521 - DNA, 15 bp, Homo sapiens
agttatttggtcaaa

SEQ ID NO: 773522 - DNA, 15 bp, Homo sapiens
gttatttggtcaaaa

SEQ ID NO: 773523 - DNA, 15 bp, Homo sapiens
ttatttggtcaaaat

SEQ ID NO: 773524 - DNA, 15 bp, Homo sapiens
tatttggtcaaaatg

SEQ ID NO: 773525 - DNA, 15 bp, Homo sapiens
atttggtcaaaatga

SEQ ID NO: 773526 - DNA, 15 bp, Homo sapiens
tttggtcaaaatgag

SEQ ID NO: 773527 - DNA, 15 bp, Homo sapiens
ttggtcaaaatgagt

SEQ ID NO: 773528 - DNA, 15 bp, Homo sapiens
tggtcaaaatgagtg

SEQ ID NO: 773529 - DNA, 15 bp, Homo sapiens
ggtcaaaatgagtgt

SEQ ID NO: 773530 - DNA, 15 bp, Homo sapiens
gtcaaaatgagtgtg

SEQ ID NO: 773531 - DNA, 15 bp, Homo sapiens
tcaaaatgagtgtgg

SEQ ID NO: 773532 - DNA, 15 bp, Homo sapiens
caaaatgagtgtggg

SEQ ID NO: 773533 - DNA, 15 bp, Homo sapiens
aaaatgagtgtgggc

SEQ ID NO: 773534 - DNA, 15 bp, Homo sapiens
aaatgagtgtgggca

SEQ ID NO: 773535 - DNA, 15 bp, Homo sapiens
aatgagtgtgggcag

SEQ ID NO: 773536 - DNA, 15 bp, Homo sapiens
atgagtgtgggcagc

SEQ ID NO: 773537 - DNA, 15 bp, Homo sapiens
tgagtgtgggcagca

SEQ ID NO: 773538 - DNA, 15 bp, Homo sapiens
gagtgtgggcagcat

SEQ ID NO: 773539 - DNA, 15 bp, Homo sapiens
agtgtgggcagcatt

SEQ ID NO: 773540 - DNA, 15 bp, Homo sapiens
gtgtgggcagcattg

SEQ ID NO: 773541 - DNA, 15 bp, Homo sapiens
tgtgggcagcattgt

SEQ ID NO: 773542 - DNA, 15 bp, Homo sapiens
gtgggcagcattgta

SEQ ID NO: 773543 - DNA, 15 bp, Homo sapiens
tgggcagcattgtat

SEQ ID NO: 773544 - DNA, 15 bp, Homo sapiens
gggcagcattgtatt

SEQ ID NO: 773545 - DNA, 15 bp, Homo sapiens
ggcagcattgtattg

SEQ ID NO: 773546 - DNA, 15 bp, Homo sapiens
gcagcattgtattgg

SEQ ID NO: 773547 - DNA, 15 bp, Homo sapiens
cagcattgtattggt

SEQ ID NO: 773548 - DNA, 15 bp, Homo sapiens
agcattgtattggtc

SEQ ID NO: 773549 - DNA, 15 bp, Homo sapiens
gcattgtattggtct

SEQ ID NO: 773550 - DNA, 15 bp, Homo sapiens
cattgtattggtcta

SEQ ID NO: 773551 - DNA, 15 bp, Homo sapiens
attgtattggtctat

SEQ ID NO: 773552 - DNA, 15 bp, Homo sapiens
ttgtattggtctatg

SEQ ID NO: 773553 - DNA, 15 bp, Homo sapiens
tgtattggtctatgt

SEQ ID NO: 773554 - DNA, 15 bp, Homo sapiens
gtattggtctatgtt

SEQ ID NO: 773555 - DNA, 15 bp, Homo sapiens
tattggtctatgttg

SEQ ID NO: 773556 - DNA, 15 bp, Homo sapiens
attggtctatgttga

SEQ ID NO: 773557 - DNA, 15 bp, Homo sapiens
ttggtctatgttgaa

SEQ ID NO: 773558 - DNA, 15 bp, Homo sapiens
tggtctatgttgaac

SEQ ID NO: 773559 - DNA, 15 bp, Homo sapiens
ggtctatgttgaaca

SEQ ID NO: 773560 - DNA, 15 bp, Homo sapiens
gtctatgttgaacag

SEQ ID NO: 773561 - DNA, 15 bp, Homo sapiens
tctatgttgaacagg

SEQ ID NO: 773562 - DNA, 15 bp, Homo sapiens
ctatgttgaacaggt

SEQ ID NO: 773563 - DNA, 15 bp, Homo sapiens
tatgttgaacaggtt

SEQ ID NO: 773564 - DNA, 15 bp, Homo sapiens
atgttgaacaggttc

SEQ ID NO: 773565 - DNA, 15 bp, Homo sapiens
tgttgaacaggttcc

SEQ ID NO: 773566 - DNA, 15 bp, Homo sapiens
gttgaacaggttcct

SEQ ID NO: 773567 - DNA, 15 bp, Homo sapiens
ttgaacaggttcctt

SEQ ID NO: 773568 - DNA, 15 bp, Homo sapiens
tgaacaggttccttg

SEQ ID NO: 773569 - DNA, 15 bp, Homo sapiens
gaacaggttccttga

SEQ ID NO: 773570 - DNA, 15 bp, Homo sapiens
aacaggttccttgac

SEQ ID NO: 773571 - DNA, 15 bp, Homo sapiens
acaggttccttgact

SEQ ID NO: 773572 - DNA, 15 bp, Homo sapiens
caggttccttgactg

SEQ ID NO: 773573 - DNA, 15 bp, Homo sapiens
aggttccttgactga

SEQ ID NO: 773574 - DNA, 15 bp, Homo sapiens
ggttccttgactgaa

SEQ ID NO: 773575 - DNA, 15 bp, Homo sapiens
gttccttgactgaag

SEQ ID NO: 773576 - DNA, 15 bp, Homo sapiens
ttccttgactgaagg

SEQ ID NO: 773577 - DNA, 15 bp, Homo sapiens
tccttgactgaaggc

SEQ ID NO: 773578 - DNA, 15 bp, Homo sapiens
ccttgactgaaggct

SEQ ID NO: 773579 - DNA, 15 bp, Homo sapiens
cttgactgaaggcta

SEQ ID NO: 773580 - DNA, 15 bp, Homo sapiens
ttgactgaaggctat

SEQ ID NO: 773581 - DNA, 15 bp, Homo sapiens
tgactgaaggctatc

SEQ ID NO: 773582 - DNA, 15 bp, Homo sapiens
gactgaaggctatct

SEQ ID NO: 773583 - DNA, 15 bp, Homo sapiens
actgaaggctatctc

SEQ ID NO: 773584 - DNA, 15 bp, Homo sapiens
ctgaaggctatctct

SEQ ID NO: 773585 - DNA, 15 bp, Homo sapiens
tgaaggctatctctg

SEQ ID NO: 773586 - DNA, 15 bp, Homo sapiens
gaaggctatctctga

SEQ ID NO: 773587 - DNA, 15 bp, Homo sapiens
aaggctatctctgag

SEQ ID NO: 773588 - DNA, 15 bp, Homo sapiens
aggctatctctgagc

SEQ ID NO: 773589 - DNA, 15 bp, Homo sapiens
ggctatctctgagct

SEQ ID NO: 773590 - DNA, 15 bp, Homo sapiens
gctatctctgagctt

SEQ ID NO: 773591 - DNA, 15 bp, Homo sapiens
ctatctctgagcttt

SEQ ID NO: 773592 - DNA, 15 bp, Homo sapiens
tatctctgagctttt

SEQ ID NO: 773593 - DNA, 15 bp, Homo sapiens
atctctgagcttttg

SEQ ID NO: 773594 - DNA, 15 bp, Homo sapiens
tctctgagcttttgc

SEQ ID NO: 773595 - DNA, 15 bp, Homo sapiens
ctctgagcttttgct

SEQ ID NO: 773596 - DNA, 15 bp, Homo sapiens
tctgagcttttgcta

SEQ ID NO: 773597 - DNA, 15 bp, Homo sapiens
ctgagcttttgctat

SEQ ID NO: 773598 - DNA, 15 bp, Homo sapiens
tgagcttttgctatg

SEQ ID NO: 773599 - DNA, 15 bp, Homo sapiens
gagcttttgctatgc

SEQ ID NO: 773600 - DNA, 15 bp, Homo sapiens
agcttttgctatgct

SEQ ID NO: 773601 - DNA, 15 bp, Homo sapiens
gcttttgctatgctg

SEQ ID NO: 773602 - DNA, 15 bp, Homo sapiens
cttttgctatgctgt

SEQ ID NO: 773603 - DNA, 15 bp, Homo sapiens
ttttgctatgctgta

SEQ ID NO: 773604 - DNA, 15 bp, Homo sapiens
tttgctatgctgtat

SEQ ID NO: 773605 - DNA, 15 bp, Homo sapiens
ttgctatgctgtatg

SEQ ID NO: 773606 - DNA, 15 bp, Homo sapiens
tgctatgctgtatgc

SEQ ID NO: 773607 - DNA, 15 bp, Homo sapiens
gctatgctgtatgca

SEQ ID NO: 773608 - DNA, 15 bp, Homo sapiens
ctatgctgtatgcag

SEQ ID NO: 773609 - DNA, 15 bp, Homo sapiens
tatgctgtatgcagt

SEQ ID NO: 773610 - DNA, 15 bp, Homo sapiens
atgctgtatgcagtg

SEQ ID NO: 773611 - DNA, 15 bp, Homo sapiens
tgctgtatgcagtga

SEQ ID NO: 773612 - DNA, 15 bp, Homo sapiens
gctgtatgcagtgag

SEQ ID NO: 773613 - DNA, 15 bp, Homo sapiens
ctgtatgcagtgagc

SEQ ID NO: 773614 - DNA, 15 bp, Homo sapiens
tgtatgcagtgagca

SEQ ID NO: 773615 - DNA, 15 bp, Homo sapiens
gtatgcagtgagcat

SEQ ID NO: 773616 - DNA, 15 bp, Homo sapiens
tatgcagtgagcatt

SEQ ID NO: 773617 - DNA, 15 bp, Homo sapiens
atgcagtgagcattg

SEQ ID NO: 773618 - DNA, 15 bp, Homo sapiens
tgcagtgagcattga

SEQ ID NO: 773619 - DNA, 15 bp, Homo sapiens
gcagtgagcattgaa

SEQ ID NO: 773620 - DNA, 15 bp, Homo sapiens
cagtgagcattgaac

SEQ ID NO: 773621 - DNA, 15 bp, Homo sapiens
agtgagcattgaaca

SEQ ID NO: 773622 - DNA, 15 bp, Homo sapiens
gtgagcattgaacat

SEQ ID NO: 773623 - DNA, 15 bp, Homo sapiens
tgagcattgaacatt

SEQ ID NO: 773624 - DNA, 15 bp, Homo sapiens
gagcattgaacattt

SEQ ID NO: 773625 - DNA, 15 bp, Homo sapiens
agcattgaacatttg

SEQ ID NO: 773626 - DNA, 15 bp, Homo sapiens
gcattgaacatttgt

SEQ ID NO: 773627 - DNA, 15 bp, Homo sapiens
cattgaacatttgtt

SEQ ID NO: 773628 - DNA, 15 bp, Homo sapiens
attgaacatttgtta

SEQ ID NO: 773629 - DNA, 15 bp, Homo sapiens
ttgaacatttgttag

SEQ ID NO: 773630 - DNA, 15 bp, Homo sapiens
tgaacatttgttaga

SEQ ID NO: 773631 - DNA, 15 bp, Homo sapiens
gaacatttgttagaa

SEQ ID NO: 773632 - DNA, 15 bp, Homo sapiens
aacatttgttagaag

SEQ ID NO: 773633 - DNA, 15 bp, Homo sapiens
acatttgttagaaga

SEQ ID NO: 773634 - DNA, 15 bp, Homo sapiens
catttgttagaagag

SEQ ID NO: 773635 - DNA, 15 bp, Homo sapiens
atttgttagaagagg

SEQ ID NO: 773636 - DNA, 15 bp, Homo sapiens
tttgttagaagagga

SEQ ID NO: 773637 - DNA, 15 bp, Homo sapiens
ttgttagaagaggaa

SEQ ID NO: 773638 - DNA, 15 bp, Homo sapiens
tgttagaagaggaat

SEQ ID NO: 773639 - DNA, 15 bp, Homo sapiens
gttagaagaggaatg

SEQ ID NO: 773640 - DNA, 15 bp, Homo sapiens
ttagaagaggaatga

SEQ ID NO: 773641 - DNA, 15 bp, Homo sapiens
tagaagaggaatgat

SEQ ID NO: 773642 - DNA, 15 bp, Homo sapiens
agaagaggaatgatg

SEQ ID NO: 773643 - DNA, 15 bp, Homo sapiens
gaagaggaatgatgg

SEQ ID NO: 773644 - DNA, 15 bp, Homo sapiens
aagaggaatgatggc

SEQ ID NO: 773645 - DNA, 15 bp, Homo sapiens
agaggaatgatggca

SEQ ID NO: 773646 - DNA, 15 bp, Homo sapiens
gaggaatgatggcat

SEQ ID NO: 773647 - DNA, 15 bp, Homo sapiens
aggaatgatggcatt

SEQ ID NO: 773648 - DNA, 15 bp, Homo sapiens
ggaatgatggcattt

SEQ ID NO: 773649 - DNA, 15 bp, Homo sapiens
gaatgatggcatttc

SEQ ID NO: 773650 - DNA, 15 bp, Homo sapiens
aatgatggcatttcc

SEQ ID NO: 773651 - DNA, 15 bp, Homo sapiens
atgatggcatttcca

SEQ ID NO: 773652 - DNA, 15 bp, Homo sapiens
tgatggcatttccag

SEQ ID NO: 773653 - DNA, 15 bp, Homo sapiens
gatggcatttccaga

SEQ ID NO: 773654 - DNA, 15 bp, Homo sapiens
atggcatttccagat

SEQ ID NO: 773655 - DNA, 15 bp, Homo sapiens
tggcatttccagatt

SEQ ID NO: 773656 - DNA, 15 bp, Homo sapiens
ggcatttccagattt

SEQ ID NO: 773657 - DNA, 15 bp, Homo sapiens
gcatttccagatttc

SEQ ID NO: 773658 - DNA, 15 bp, Homo sapiens
catttccagatttca

SEQ ID NO: 773659 - DNA, 15 bp, Homo sapiens
atttccagatttcac

SEQ ID NO: 773660 - DNA, 15 bp, Homo sapiens
tttccagatttcact

SEQ ID NO: 773661 - DNA, 15 bp, Homo sapiens
ttccagatttcactg

SEQ ID NO: 773662 - DNA, 15 bp, Homo sapiens
tccagatttcactgc

SEQ ID NO: 773663 - DNA, 15 bp, Homo sapiens
ccagatttcactgca

SEQ ID NO: 773664 - DNA, 15 bp, Homo sapiens
cagatttcactgcaa

SEQ ID NO: 773665 - DNA, 15 bp, Homo sapiens
agatttcactgcaaa

SEQ ID NO: 773666 - DNA, 15 bp, Homo sapiens
gatttcactgcaaag

SEQ ID NO: 773667 - DNA, 15 bp, Homo sapiens
atttcactgcaaaga

SEQ ID NO: 773668 - DNA, 15 bp, Homo sapiens
tttcactgcaaagag

SEQ ID NO: 773669 - DNA, 15 bp, Homo sapiens
ttcactgcaaagaga

SEQ ID NO: 773670 - DNA, 15 bp, Homo sapiens
tcactgcaaagagaa

SEQ ID NO: 773671 - DNA, 15 bp, Homo sapiens
cactgcaaagagaag

SEQ ID NO: 773672 - DNA, 15 bp, Homo sapiens
actgcaaagagaagt

SEQ ID NO: 773673 - DNA, 15 bp, Homo sapiens
ctgcaaagagaagtg

SEQ ID NO: 773674 - DNA, 15 bp, Homo sapiens
tgcaaagagaagtgt

SEQ ID NO: 773675 - DNA, 15 bp, Homo sapiens
gcaaagagaagtgtc

SEQ ID NO: 773676 - DNA, 15 bp, Homo sapiens
caaagagaagtgtcc

SEQ ID NO: 773677 - DNA, 15 bp, Homo sapiens
aaagagaagtgtccc

SEQ ID NO: 773678 - DNA, 15 bp, Homo sapiens
aagagaagtgtccct

SEQ ID NO: 773679 - DNA, 15 bp, Homo sapiens
agagaagtgtccctt

SEQ ID NO: 773680 - DNA, 15 bp, Homo sapiens
gagaagtgtcccttt

SEQ ID NO: 773681 - DNA, 15 bp, Homo sapiens
agaagtgtccctttt

SEQ ID NO: 773682 - DNA, 15 bp, Homo sapiens
gaagtgtcccttttg

SEQ ID NO: 773683 - DNA, 15 bp, Homo sapiens
aagtgtcccttttgt

SEQ ID NO: 773684 - DNA, 15 bp, Homo sapiens
agtgtcccttttgta

SEQ ID NO: 773685 - DNA, 15 bp, Homo sapiens
gtgtcccttttgtat

SEQ ID NO: 773686 - DNA, 15 bp, Homo sapiens
tgtcccttttgtatg

SEQ ID NO: 773687 - DNA, 15 bp, Homo sapiens
gtcccttttgtatgg

SEQ ID NO: 773688 - DNA, 15 bp, Homo sapiens
tcccttttgtatgga

SEQ ID NO: 773689 - DNA, 15 bp, Homo sapiens
cccttttgtatggag

SEQ ID NO: 773690 - DNA, 15 bp, Homo sapiens
ccttttgtatggagt

SEQ ID NO: 773691 - DNA, 15 bp, Homo sapiens
cttttgtatggagtt

SEQ ID NO: 773692 - DNA, 15 bp, Homo sapiens
ttttgtatggagttt

SEQ ID NO: 773693 - DNA, 15 bp, Homo sapiens
tttgtatggagtttc

SEQ ID NO: 773694 - DNA, 15 bp, Homo sapiens
ttgtatggagtttcc

SEQ ID NO: 773695 - DNA, 15 bp, Homo sapiens
tgtatggagtttccc

SEQ ID NO: 773696 - DNA, 15 bp, Homo sapiens
gtatggagtttccca

SEQ ID NO: 773697 - DNA, 15 bp, Homo sapiens
tatggagtttcccat

SEQ ID NO: 773698 - DNA, 15 bp, Homo sapiens
atggagtttcccatc

SEQ ID NO: 773699 - DNA, 15 bp, Homo sapiens
tggagtttcccatca

SEQ ID NO: 773700 - DNA, 15 bp, Homo sapiens
ggagtttcccatcag

SEQ ID NO: 773701 - DNA, 15 bp, Homo sapiens
gagtttcccatcaga

SEQ ID NO: 773702 - DNA, 15 bp, Homo sapiens
agtttcccatcagac

SEQ ID NO: 773703 - DNA, 15 bp, Homo sapiens
gtttcccatcagact

SEQ ID NO: 773704 - DNA, 15 bp, Homo sapiens
tttcccatcagactg

SEQ ID NO: 773705 - DNA, 15 bp, Homo sapiens
ttcccatcagactgg

SEQ ID NO: 773706 - DNA, 15 bp, Homo sapiens
tcccatcagactggt

SEQ ID NO: 773707 - DNA, 15 bp, Homo sapiens
cccatcagactggtg

SEQ ID NO: 773708 - DNA, 15 bp, Homo sapiens
ccatcagactggtgt

SEQ ID NO: 773709 - DNA, 15 bp, Homo sapiens
catcagactggtgtt

SEQ ID NO: 773710 - DNA, 15 bp, Homo sapiens
atcagactggtgttc

SEQ ID NO: 773711 - DNA, 15 bp, Homo sapiens
tcagactggtgttcc

SEQ ID NO: 773712 - DNA, 15 bp, Homo sapiens
cagactggtgttccg

SEQ ID NO: 773713 - DNA, 15 bp, Homo sapiens
agactggtgttccgt

SEQ ID NO: 773714 - DNA, 15 bp, Homo sapiens
gactggtgttccgtg

SEQ ID NO: 773715 - DNA, 15 bp, Homo sapiens
actggtgttccgtga

SEQ ID NO: 773716 - DNA, 15 bp, Homo sapiens
ctggtgttccgtgaa

SEQ ID NO: 773717 - DNA, 15 bp, Homo sapiens
tggtgttccgtgaat

SEQ ID NO: 773718 - DNA, 15 bp, Homo sapiens
ggtgttccgtgaatt

SEQ ID NO: 773719 - DNA, 15 bp, Homo sapiens
gtgttccgtgaattt

SEQ ID NO: 773720 - DNA, 15 bp, Homo sapiens
tgttccgtgaattta

SEQ ID NO: 773721 - DNA, 15 bp, Homo sapiens
gttccgtgaatttac

SEQ ID NO: 773722 - DNA, 15 bp, Homo sapiens
ttccgtgaatttaca

SEQ ID NO: 773723 - DNA, 15 bp, Homo sapiens
tccgtgaatttacac

SEQ ID NO: 773724 - DNA, 15 bp, Homo sapiens
ccgtgaatttacact

SEQ ID NO: 773725 - DNA, 15 bp, Homo sapiens
cgtgaatttacactg

SEQ ID NO: 773726 - DNA, 15 bp, Homo sapiens
gtgaatttacactgg

SEQ ID NO: 773727 - DNA, 15 bp, Homo sapiens
tgaatttacactggg

SEQ ID NO: 773728 - DNA, 15 bp, Homo sapiens
gaatttacactggga

SEQ ID NO: 773729 - DNA, 15 bp, Homo sapiens
aatttacactgggaa

SEQ ID NO: 773730 - DNA, 15 bp, Homo sapiens
atttacactgggaaa

SEQ ID NO: 773731 - DNA, 15 bp, Homo sapiens
tttacactgggaaac

SEQ ID NO: 773732 - DNA, 15 bp, Homo sapiens
ttacactgggaaaca

SEQ ID NO: 773733 - DNA, 15 bp, Homo sapiens
tacactgggaaacat

SEQ ID NO: 773734 - DNA, 15 bp, Homo sapiens
acactgggaaacatg

SEQ ID NO: 773735 - DNA, 15 bp, Homo sapiens
cactgggaaacatgg

SEQ ID NO: 773736 - DNA, 15 bp, Homo sapiens
actgggaaacatggc

SEQ ID NO: 773737 - DNA, 15 bp, Homo sapiens
ctgggaaacatggct

SEQ ID NO: 773738 - DNA, 15 bp, Homo sapiens
tgggaaacatggctc

SEQ ID NO: 773739 - DNA, 15 bp, Homo sapiens
gggaaacatggctct

SEQ ID NO: 773740 - DNA, 15 bp, Homo sapiens
ggaaacatggctcta

SEQ ID NO: 773741 - DNA, 15 bp, Homo sapiens
gaaacatggctctag

SEQ ID NO: 773742 - DNA, 15 bp, Homo sapiens
aaacatggctctagt

SEQ ID NO: 773743 - DNA, 15 bp, Homo sapiens
aacatggctctagtc

SEQ ID NO: 773744 - DNA, 15 bp, Homo sapiens
acatggctctagtcc

SEQ ID NO: 773745 - DNA, 15 bp, Homo sapiens
catggctctagtcca

SEQ ID NO: 773746 - DNA, 15 bp, Homo sapiens
atggctctagtccac

SEQ ID NO: 773747 - DNA, 15 bp, Homo sapiens
tggctctagtccaca

SEQ ID NO: 773748 - DNA, 15 bp, Homo sapiens
ggctctagtccacat

SEQ ID NO: 773749 - DNA, 15 bp, Homo sapiens
gctctagtccacata

SEQ ID NO: 773750 - DNA, 15 bp, Homo sapiens
ctctagtccacatat

SEQ ID NO: 773751 - DNA, 15 bp, Homo sapiens
tctagtccacatatc

SEQ ID NO: 773752 - DNA, 15 bp, Homo sapiens
ctagtccacatatca

SEQ ID NO: 773753 - DNA, 15 bp, Homo sapiens
tagtccacatatcaa

SEQ ID NO: 773754 - DNA, 15 bp, Homo sapiens
agtccacatatcaag

SEQ ID NO: 773755 - DNA, 15 bp, Homo sapiens
gtccacatatcaagg

SEQ ID NO: 773756 - DNA, 15 bp, Homo sapiens
tccacatatcaaggc

SEQ ID NO: 773757 - DNA, 15 bp, Homo sapiens
ccacatatcaaggca

SEQ ID NO: 773758 - DNA, 15 bp, Homo sapiens
cacatatcaaggcat

SEQ ID NO: 773759 - DNA, 15 bp, Homo sapiens
acatatcaaggcatt

SEQ ID NO: 773760 - DNA, 15 bp, Homo sapiens
catatcaaggcattc

SEQ ID NO: 773761 - DNA, 15 bp, Homo sapiens
atatcaaggcattca

SEQ ID NO: 773762 - DNA, 15 bp, Homo sapiens
tatcaaggcattcag

SEQ ID NO: 773763 - DNA, 15 bp, Homo sapiens
atcaaggcattcagt

SEQ ID NO: 773764 - DNA, 15 bp, Homo sapiens
tcaaggcattcagtg

SEQ ID NO: 773765 - DNA, 15 bp, Homo sapiens
caaggcattcagtga

SEQ ID NO: 773766 - DNA, 15 bp, Homo sapiens
aaggcattcagtgaa

SEQ ID NO: 773767 - DNA, 15 bp, Homo sapiens
aggcattcagtgaat

SEQ ID NO: 773768 - DNA, 15 bp, Homo sapiens
ggcattcagtgaatt

SEQ ID NO: 773769 - DNA, 15 bp, Homo sapiens
gcattcagtgaattt

SEQ ID NO: 773770 - DNA, 15 bp, Homo sapiens
cattcagtgaatttt

SEQ ID NO: 773771 - DNA, 15 bp, Homo sapiens
attcagtgaattttt

SEQ ID NO: 773772 - DNA, 15 bp, Homo sapiens
ttcagtgaattttta

SEQ ID NO: 773773 - DNA, 15 bp, Homo sapiens
tcagtgaatttttat

SEQ ID NO: 773774 - DNA, 15 bp, Homo sapiens
cagtgaatttttatg

SEQ ID NO: 773775 - DNA, 15 bp, Homo sapiens
agtgaatttttatga

SEQ ID NO: 773776 - DNA, 15 bp, Homo sapiens
gtgaatttttatgaa

SEQ ID NO: 773777 - DNA, 15 bp, Homo sapiens
tgaatttttatgaac

SEQ ID NO: 773778 - DNA, 15 bp, Homo sapiens
gaatttttatgaacc

SEQ ID NO: 773779 - DNA, 15 bp, Homo sapiens
aatttttatgaaccg

SEQ ID NO: 773780 - DNA, 15 bp, Homo sapiens
atttttatgaaccgc

SEQ ID NO: 773781 - DNA, 15 bp, Homo sapiens
tttttatgaaccgcc

SEQ ID NO: 773782 - DNA, 15 bp, Homo sapiens
ttttatgaaccgcct

SEQ ID NO: 773783 - DNA, 15 bp, Homo sapiens
tttatgaaccgcctt

SEQ ID NO: 773784 - DNA, 15 bp, Homo sapiens
ttatgaaccgccttg

SEQ ID NO: 773785 - DNA, 15 bp, Homo sapiens
tatgaaccgccttgt

SEQ ID NO: 773786 - DNA, 15 bp, Homo sapiens
atgaaccgccttgtg

SEQ ID NO: 773787 - DNA, 15 bp, Homo sapiens
tgaaccgccttgtga

SEQ ID NO: 773788 - DNA, 15 bp, Homo sapiens
gaaccgccttgtgag

SEQ ID NO: 773789 - DNA, 15 bp, Homo sapiens
aaccgccttgtgaga

SEQ ID NO: 773790 - DNA, 15 bp, Homo sapiens
accgccttgtgagaa

SEQ ID NO: 773791 - DNA, 15 bp, Homo sapiens
ccgccttgtgagaac

SEQ ID NO: 773792 - DNA, 15 bp, Homo sapiens
cgccttgtgagaaca

SEQ ID NO: 773793 - DNA, 15 bp, Homo sapiens
gccttgtgagaacaa

SEQ ID NO: 773794 - DNA, 15 bp, Homo sapiens
ccttgtgagaacaag

SEQ ID NO: 773795 - DNA, 15 bp, Homo sapiens
cttgtgagaacaaga

SEQ ID NO: 773796 - DNA, 15 bp, Homo sapiens
ttgtgagaacaagac

SEQ ID NO: 773797 - DNA, 15 bp, Homo sapiens
tgtgagaacaagaca

SEQ ID NO: 773798 - DNA, 15 bp, Homo sapiens
gtgagaacaagacac

SEQ ID NO: 773799 - DNA, 15 bp, Homo sapiens
tgagaacaagacact

SEQ ID NO: 773800 - DNA, 15 bp, Homo sapiens
gagaacaagacactg

SEQ ID NO: 773801 - DNA, 15 bp, Homo sapiens
agaacaagacactgt

SEQ ID NO: 773802 - DNA, 15 bp, Homo sapiens
gaacaagacactgtg

SEQ ID NO: 773803 - DNA, 15 bp, Homo sapiens
aacaagacactgtgc

SEQ ID NO: 773804 - DNA, 15 bp, Homo sapiens
acaagacactgtgct

SEQ ID NO: 773805 - DNA, 15 bp, Homo sapiens
caagacactgtgctg

SEQ ID NO: 773806 - DNA, 15 bp, Homo sapiens
aagacactgtgctgg

SEQ ID NO: 773807 - DNA, 15 bp, Homo sapiens
agacactgtgctgga

SEQ ID NO: 773808 - DNA, 15 bp, Homo sapiens
gacactgtgctggag

SEQ ID NO: 773809 - DNA, 15 bp, Homo sapiens
acactgtgctggaga

SEQ ID NO: 773810 - DNA, 15 bp, Homo sapiens
cactgtgctggagag

SEQ ID NO: 773811 - DNA, 15 bp, Homo sapiens
actgtgctggagaga

SEQ ID NO: 773812 - DNA, 15 bp, Homo sapiens
ctgtgctggagagat

SEQ ID NO: 773813 - DNA, 15 bp, Homo sapiens
tgtgctggagagata

SEQ ID NO: 773814 - DNA, 15 bp, Homo sapiens
gtgctggagagatac

SEQ ID NO: 773815 - DNA, 15 bp, Homo sapiens
tgctggagagataca

SEQ ID NO: 773816 - DNA, 15 bp, Homo sapiens
gctggagagatacat

SEQ ID NO: 773817 - DNA, 15 bp, Homo sapiens
ctggagagatacatc

SEQ ID NO: 773818 - DNA, 15 bp, Homo sapiens
tggagagatacatct

SEQ ID NO: 773819 - DNA, 15 bp, Homo sapiens
ggagagatacatctg

SEQ ID NO: 773820 - DNA, 15 bp, Homo sapiens
gagagatacatctgt

SEQ ID NO: 773821 - DNA, 15 bp, Homo sapiens
agagatacatctgtg

SEQ ID NO: 773822 - DNA, 15 bp, Homo sapiens
gagatacatctgtga

SEQ ID NO: 773823 - DNA, 15 bp, Homo sapiens
agatacatctgtgaa

SEQ ID NO: 773824 - DNA, 15 bp, Homo sapiens
gatacatctgtgaac

SEQ ID NO: 773825 - DNA, 15 bp, Homo sapiens
atacatctgtgaaca

SEQ ID NO: 773826 - DNA, 15 bp, Homo sapiens
tacatctgtgaacaa

SEQ ID NO: 773827 - DNA, 15 bp, Homo sapiens
acatctgtgaacaag

SEQ ID NO: 773828 - DNA, 15 bp, Homo sapiens
catctgtgaacaaga

SEQ ID NO: 773829 - DNA, 15 bp, Homo sapiens
atctgtgaacaagac

SEQ ID NO: 773830 - DNA, 15 bp, Homo sapiens
tctgtgaacaagacg

SEQ ID NO: 773831 - DNA, 15 bp, Homo sapiens
ctgtgaacaagacgt

SEQ ID NO: 773832 - DNA, 15 bp, Homo sapiens
tgtgaacaagacgtg

SEQ ID NO: 773833 - DNA, 15 bp, Homo sapiens
gtgaacaagacgtgg

SEQ ID NO: 773834 - DNA, 15 bp, Homo sapiens
tgaacaagacgtggc

SEQ ID NO: 773835 - DNA, 15 bp, Homo sapiens
gaacaagacgtggct

SEQ ID NO: 773836 - DNA, 15 bp, Homo sapiens
aacaagacgtggctt

SEQ ID NO: 773837 - DNA, 15 bp, Homo sapiens
acaagacgtggcttc

SEQ ID NO: 773838 - DNA, 15 bp, Homo sapiens
caagacgtggcttcc

SEQ ID NO: 773839 - DNA, 15 bp, Homo sapiens
aagacgtggcttccg

SEQ ID NO: 773840 - DNA, 15 bp, Homo sapiens
agacgtggcttccgt

SEQ ID NO: 773841 - DNA, 15 bp, Homo sapiens
gacgtggcttccgtc

SEQ ID NO: 773842 - DNA, 15 bp, Homo sapiens
acgtggcttccgtct

SEQ ID NO: 773843 - DNA, 15 bp, Homo sapiens
cgtggcttccgtctc

SEQ ID NO: 773844 - DNA, 15 bp, Homo sapiens
gtggcttccgtctct

SEQ ID NO: 773845 - DNA, 15 bp, Homo sapiens
tggcttccgtctcta

SEQ ID NO: 773846 - DNA, 15 bp, Homo sapiens
ggcttccgtctctag

SEQ ID NO: 773847 - DNA, 15 bp, Homo sapiens
gcttccgtctctagg

SEQ ID NO: 773848 - DNA, 15 bp, Homo sapiens
cttccgtctctagga

SEQ ID NO: 773849 - DNA, 15 bp, Homo sapiens
ttccgtctctaggaa

SEQ ID NO: 773850 - DNA, 15 bp, Homo sapiens
tccgtctctaggaaa

SEQ ID NO: 773851 - DNA, 15 bp, Homo sapiens
ccgtctctaggaaac

SEQ ID NO: 773852 - DNA, 15 bp, Homo sapiens
cgtctctaggaaact

SEQ ID NO: 773853 - DNA, 15 bp, Homo sapiens
gtctctaggaaactg

SEQ ID NO: 773854 - DNA, 15 bp, Homo sapiens
tctctaggaaactga

SEQ ID NO: 773855 - DNA, 15 bp, Homo sapiens
ctctaggaaactgat

SEQ ID NO: 773856 - DNA, 15 bp, Homo sapiens
tctaggaaactgata

SEQ ID NO: 773857 - DNA, 15 bp, Homo sapiens
ctaggaaactgatag

SEQ ID NO: 773858 - DNA, 15 bp, Homo sapiens
taggaaactgatagt

SEQ ID NO: 773859 - DNA, 15 bp, Homo sapiens
aggaaactgatagtc

SEQ ID NO: 773860 - DNA, 15 bp, Homo sapiens
ggaaactgatagtct

SEQ ID NO: 773861 - DNA, 15 bp, Homo sapiens
gaaactgatagtcta

SEQ ID NO: 773862 - DNA, 15 bp, Homo sapiens
aaactgatagtctag

SEQ ID NO: 773863 - DNA, 15 bp, Homo sapiens
aactgatagtctagt

SEQ ID NO: 773864 - DNA, 15 bp, Homo sapiens
actgatagtctagtg

SEQ ID NO: 773865 - DNA, 15 bp, Homo sapiens
ctgatagtctagtgc

SEQ ID NO: 773866 - DNA, 15 bp, Homo sapiens
tgatagtctagtgca

SEQ ID NO: 773867 - DNA, 15 bp, Homo sapiens
gatagtctagtgcag

SEQ ID NO: 773868 - DNA, 15 bp, Homo sapiens
atagtctagtgcagg

SEQ ID NO: 773869 - DNA, 15 bp, Homo sapiens
tagtctagtgcagga

SEQ ID NO: 773870 - DNA, 15 bp, Homo sapiens
agtctagtgcaggag

SEQ ID NO: 773871 - DNA, 15 bp, Homo sapiens
gtctagtgcaggagc

SEQ ID NO: 773872 - DNA, 15 bp, Homo sapiens
tctagtgcaggagct

SEQ ID NO: 773873 - DNA, 15 bp, Homo sapiens
ctagtgcaggagctg

SEQ ID NO: 773874 - DNA, 15 bp, Homo sapiens
tagtgcaggagctgg

SEQ ID NO: 773875 - DNA, 15 bp, Homo sapiens
agtgcaggagctggc

SEQ ID NO: 773876 - DNA, 15 bp, Homo sapiens
gtgcaggagctggca

SEQ ID NO: 773877 - DNA, 15 bp, Homo sapiens
tgcaggagctggcac

SEQ ID NO: 773878 - DNA, 15 bp, Homo sapiens
gcaggagctggcaca

SEQ ID NO: 773879 - DNA, 15 bp, Homo sapiens
caggagctggcacac

SEQ ID NO: 773880 - DNA, 15 bp, Homo sapiens
aggagctggcacacc

SEQ ID NO: 773881 - DNA, 15 bp, Homo sapiens
ggagctggcacacca

SEQ ID NO: 773882 - DNA, 15 bp, Homo sapiens
gagctggcacaccac

SEQ ID NO: 773883 - DNA, 15 bp, Homo sapiens
agctggcacaccaca

SEQ ID NO: 773884 - DNA, 15 bp, Homo sapiens
gctggcacaccacag

SEQ ID NO: 773885 - DNA, 15 bp, Homo sapiens
ctggcacaccacagg

SEQ ID NO: 773886 - DNA, 15 bp, Homo sapiens
tggcacaccacaggc

SEQ ID NO: 773887 - DNA, 15 bp, Homo sapiens
ggcacaccacaggct

SEQ ID NO: 773888 - DNA, 15 bp, Homo sapiens
gcacaccacaggctg

SEQ ID NO: 773889 - DNA, 15 bp, Homo sapiens
cacaccacaggctgt

SEQ ID NO: 773890 - DNA, 15 bp, Homo sapiens
acaccacaggctgtg

SEQ ID NO: 773891 - DNA, 15 bp, Homo sapiens
caccacaggctgtgg

SEQ ID NO: 773892 - DNA, 15 bp, Homo sapiens
accacaggctgtggg

SEQ ID NO: 773893 - DNA, 15 bp, Homo sapiens
ccacaggctgtgggc

SEQ ID NO: 773894 - DNA, 15 bp, Homo sapiens
cacaggctgtgggcc

SEQ ID NO: 773895 - DNA, 15 bp, Homo sapiens
acaggctgtgggcca

SEQ ID NO: 773896 - DNA, 15 bp, Homo sapiens
caggctgtgggccaa

SEQ ID NO: 773897 - DNA, 15 bp, Homo sapiens
aggctgtgggccaag

SEQ ID NO: 773898 - DNA, 15 bp, Homo sapiens
ggctgtgggccaagt

SEQ ID NO: 773899 - DNA, 15 bp, Homo sapiens
gctgtgggccaagtc

SEQ ID NO: 773900 - DNA, 15 bp, Homo sapiens
ctgtgggccaagtct

SEQ ID NO: 773901 - DNA, 15 bp, Homo sapiens
tgtgggccaagtctg

SEQ ID NO: 773902 - DNA, 15 bp, Homo sapiens
gtgggccaagtctgg

SEQ ID NO: 773903 - DNA, 15 bp, Homo sapiens
tgggccaagtctggc

SEQ ID NO: 773904 - DNA, 15 bp, Homo sapiens
gggccaagtctggcc

SEQ ID NO: 773905 - DNA, 15 bp, Homo sapiens
ggccaagtctggcct

SEQ ID NO: 773906 - DNA, 15 bp, Homo sapiens
gccaagtctggcctg

SEQ ID NO: 773907 - DNA, 15 bp, Homo sapiens
ccaagtctggcctgc

SEQ ID NO: 773908 - DNA, 15 bp, Homo sapiens
caagtctggcctgcc

SEQ ID NO: 773909 - DNA, 15 bp, Homo sapiens
aagtctggcctgcca

SEQ ID NO: 773910 - DNA, 15 bp, Homo sapiens
agtctggcctgccat

SEQ ID NO: 773911 - DNA, 15 bp, Homo sapiens
gtctggcctgccatc

SEQ ID NO: 773912 - DNA, 15 bp, Homo sapiens
tctggcctgccatct

SEQ ID NO: 773913 - DNA, 15 bp, Homo sapiens
ctggcctgccatctg

SEQ ID NO: 773914 - DNA, 15 bp, Homo sapiens
ggcctgccatctgtt

SEQ ID NO: 773915 - DNA, 15 bp, Homo sapiens
gcctgccatctgttt

SEQ ID NO: 773916 - DNA, 15 bp, Homo sapiens
cctgccatctgtttt

SEQ ID NO: 773917 - DNA, 15 bp, Homo sapiens
ctgccatctgttttt

SEQ ID NO: 773918 - DNA, 15 bp, Homo sapiens
tgccatctgtttttg

SEQ ID NO: 773919 - DNA, 15 bp, Homo sapiens
gccatctgtttttgt

SEQ ID NO: 773920 - DNA, 15 bp, Homo sapiens
ccatctgtttttgta

SEQ ID NO: 773921 - DNA, 15 bp, Homo sapiens
catctgtttttgtat

SEQ ID NO: 773922 - DNA, 15 bp, Homo sapiens
atctgtttttgtatg

SEQ ID NO: 773923 - DNA, 15 bp, Homo sapiens
tctgtttttgtatgg

SEQ ID NO: 773924 - DNA, 15 bp, Homo sapiens
ctgtttttgtatggc

SEQ ID NO: 773925 - DNA, 15 bp, Homo sapiens
tgtttttgtatggcc

SEQ ID NO: 773926 - DNA, 15 bp, Homo sapiens
gtttttgtatggccc

SEQ ID NO: 773927 - DNA, 15 bp, Homo sapiens
tttttgtatggccca

SEQ ID NO: 773928 - DNA, 15 bp, Homo sapiens
ttttgtatggcccat

SEQ ID NO: 773929 - DNA, 15 bp, Homo sapiens
tttgtatggcccatt

SEQ ID NO: 773930 - DNA, 15 bp, Homo sapiens
ttgtatggcccatta

SEQ ID NO: 773931 - DNA, 15 bp, Homo sapiens
tgtatggcccattag

SEQ ID NO: 773932 - DNA, 15 bp, Homo sapiens
gtatggcccattagc

SEQ ID NO: 773933 - DNA, 15 bp, Homo sapiens
tatggcccattagct

SEQ ID NO: 773934 - DNA, 15 bp, Homo sapiens
atggcccattagcta

SEQ ID NO: 773935 - DNA, 15 bp, Homo sapiens
tggcccattagctaa

SEQ ID NO: 773936 - DNA, 15 bp, Homo sapiens
ggcccattagctaag

SEQ ID NO: 773937 - DNA, 15 bp, Homo sapiens
gcccattagctaaga

SEQ ID NO: 773938 - DNA, 15 bp, Homo sapiens
cccattagctaagaa

SEQ ID NO: 773939 - DNA, 15 bp, Homo sapiens
ccattagctaagaat

SEQ ID NO: 773940 - DNA, 15 bp, Homo sapiens
cattagctaagaatg

SEQ ID NO: 773941 - DNA, 15 bp, Homo sapiens
attagctaagaatgg

SEQ ID NO: 773942 - DNA, 15 bp, Homo sapiens
ttagctaagaatggt

SEQ ID NO: 773943 - DNA, 15 bp, Homo sapiens
tagctaagaatggtt

SEQ ID NO: 773944 - DNA, 15 bp, Homo sapiens
agctaagaatggttt

SEQ ID NO: 773945 - DNA, 15 bp, Homo sapiens
gctaagaatggtttt

SEQ ID NO: 773946 - DNA, 15 bp, Homo sapiens
ctaagaatggttttc

SEQ ID NO: 773947 - DNA, 15 bp, Homo sapiens
taagaatggttttca

SEQ ID NO: 773948 - DNA, 15 bp, Homo sapiens
aagaatggttttcac

SEQ ID NO: 773949 - DNA, 15 bp, Homo sapiens
agaatggttttcaca

SEQ ID NO: 773950 - DNA, 15 bp, Homo sapiens
gaatggttttcacat

SEQ ID NO: 773951 - DNA, 15 bp, Homo sapiens
aatggttttcacatt

SEQ ID NO: 773952 - DNA, 15 bp, Homo sapiens
atggttttcacattt

SEQ ID NO: 773953 - DNA, 15 bp, Homo sapiens
tggttttcacatttt

SEQ ID NO: 773954 - DNA, 15 bp, Homo sapiens
ggttttcacattttt

SEQ ID NO: 773955 - DNA, 15 bp, Homo sapiens
gttttcacattttta

SEQ ID NO: 773956 - DNA, 15 bp, Homo sapiens
ttttcacatttttaa

SEQ ID NO: 773957 - DNA, 15 bp, Homo sapiens
tttcacatttttaaa

SEQ ID NO: 773958 - DNA, 15 bp, Homo sapiens
ttcacatttttaaat

SEQ ID NO: 773959 - DNA, 15 bp, Homo sapiens
tcacatttttaaata

SEQ ID NO: 773960 - DNA, 15 bp, Homo sapiens
cacatttttaaatag

SEQ ID NO: 773961 - DNA, 15 bp, Homo sapiens
acatttttaaatagt

SEQ ID NO: 773962 - DNA, 15 bp, Homo sapiens
catttttaaatagtt

SEQ ID NO: 773963 - DNA, 15 bp, Homo sapiens
atttttaaatagttg

SEQ ID NO: 773964 - DNA, 15 bp, Homo sapiens
tttttaaatagttga

SEQ ID NO: 773965 - DNA, 15 bp, Homo sapiens
ttttaaatagttgaa

SEQ ID NO: 773966 - DNA, 15 bp, Homo sapiens
tttaaatagttgaac

SEQ ID NO: 773967 - DNA, 15 bp, Homo sapiens
ttaaatagttgaaca

SEQ ID NO: 773968 - DNA, 15 bp, Homo sapiens
taaatagttgaacaa

SEQ ID NO: 773969 - DNA, 15 bp, Homo sapiens
aaatagttgaacaaa

SEQ ID NO: 773970 - DNA, 15 bp, Homo sapiens
aatagttgaacaaaa

SEQ ID NO: 773971 - DNA, 15 bp, Homo sapiens
atagttgaacaaaaa

SEQ ID NO: 773972 - DNA, 15 bp, Homo sapiens
tagttgaacaaaaat

SEQ ID NO: 773973 - DNA, 15 bp, Homo sapiens
agttgaacaaaaatt

SEQ ID NO: 773974 - DNA, 15 bp, Homo sapiens
gttgaacaaaaattt

SEQ ID NO: 773975 - DNA, 15 bp, Homo sapiens
ttgaacaaaaatttt

SEQ ID NO: 773976 - DNA, 15 bp, Homo sapiens
tgaacaaaaatttta

SEQ ID NO: 773977 - DNA, 15 bp, Homo sapiens
gaacaaaaattttaa

SEQ ID NO: 773978 - DNA, 15 bp, Homo sapiens
aacaaaaattttaaa

SEQ ID NO: 773979 - DNA, 15 bp, Homo sapiens
acaaaaattttaaat

SEQ ID NO: 773980 - DNA, 15 bp, Homo sapiens
caaaaattttaaatg

SEQ ID NO: 773981 - DNA, 15 bp, Homo sapiens
aaaaattttaaatga

SEQ ID NO: 773982 - DNA, 15 bp, Homo sapiens
aaaattttaaatgaa

SEQ ID NO: 773983 - DNA, 15 bp, Homo sapiens
aaattttaaatgaag

SEQ ID NO: 773984 - DNA, 15 bp, Homo sapiens
aattttaaatgaaga

SEQ ID NO: 773985 - DNA, 15 bp, Homo sapiens
attttaaatgaagaa

SEQ ID NO: 773986 - DNA, 15 bp, Homo sapiens
ttttaaatgaagaat

SEQ ID NO: 773987 - DNA, 15 bp, Homo sapiens
tttaaatgaagaata

SEQ ID NO: 773988 - DNA, 15 bp, Homo sapiens
ttaaatgaagaatat

SEQ ID NO: 773989 - DNA, 15 bp, Homo sapiens
taaatgaagaatatt

SEQ ID NO: 773990 - DNA, 15 bp, Homo sapiens
aaatgaagaatattt

SEQ ID NO: 773991 - DNA, 15 bp, Homo sapiens
aatgaagaatatttc

SEQ ID NO: 773992 - DNA, 15 bp, Homo sapiens
atgaagaatatttca

SEQ ID NO: 773993 - DNA, 15 bp, Homo sapiens
tgaagaatatttcat

SEQ ID NO: 773994 - DNA, 15 bp, Homo sapiens
gaagaatatttcatg

SEQ ID NO: 773995 - DNA, 15 bp, Homo sapiens
aagaatatttcatga

SEQ ID NO: 773996 - DNA, 15 bp, Homo sapiens
agaatatttcatgaa

SEQ ID NO: 773997 - DNA, 15 bp, Homo sapiens
gaatatttcatgaaa

SEQ ID NO: 773998 - DNA, 15 bp, Homo sapiens
aatatttcatgaaac

SEQ ID NO: 773999 - DNA, 15 bp, Homo sapiens
atatttcatgaaaca

SEQ ID NO: 774000 - DNA, 15 bp, Homo sapiens
tatttcatgaaacat

SEQ ID NO: 774001 - DNA, 15 bp, Homo sapiens
atttcatgaaacatg

SEQ ID NO: 774002 - DNA, 15 bp, Homo sapiens
tttcatgaaacatga

SEQ ID NO: 774003 - DNA, 15 bp, Homo sapiens
ttcatgaaacatgaa

SEQ ID NO: 774004 - DNA, 15 bp, Homo sapiens
tcatgaaacatgaaa

SEQ ID NO: 774005 - DNA, 15 bp, Homo sapiens
catgaaacatgaaat

SEQ ID NO: 774006 - DNA, 15 bp, Homo sapiens
atgaaacatgaaatg

SEQ ID NO: 774007 - DNA, 15 bp, Homo sapiens
tgaaacatgaaatgg

SEQ ID NO: 774008 - DNA, 15 bp, Homo sapiens
gaaacatgaaatggt

SEQ ID NO: 774009 - DNA, 15 bp, Homo sapiens
aaacatgaaatggta

SEQ ID NO: 774010 - DNA, 15 bp, Homo sapiens
aacatgaaatggtat

SEQ ID NO: 774011 - DNA, 15 bp, Homo sapiens
acatgaaatggtatg

SEQ ID NO: 774012 - DNA, 15 bp, Homo sapiens
catgaaatggtatga

SEQ ID NO: 774013 - DNA, 15 bp, Homo sapiens
atgaaatggtatgaa

SEQ ID NO: 774014 - DNA, 15 bp, Homo sapiens
tgaaatggtatgaaa

SEQ ID NO: 774015 - DNA, 15 bp, Homo sapiens
gaaatggtatgaaat

SEQ ID NO: 774016 - DNA, 15 bp, Homo sapiens
aaatggtatgaaatt

SEQ ID NO: 774017 - DNA, 15 bp, Homo sapiens
aatggtatgaaattc

SEQ ID NO: 774018 - DNA, 15 bp, Homo sapiens
atggtatgaaattct

SEQ ID NO: 774019 - DNA, 15 bp, Homo sapiens
tggtatgaaattctg

SEQ ID NO: 774020 - DNA, 15 bp, Homo sapiens
ggtatgaaattctga

SEQ ID NO: 774021 - DNA, 15 bp, Homo sapiens
gtatgaaattctgat

SEQ ID NO: 774022 - DNA, 15 bp, Homo sapiens
tatgaaattctgatt

SEQ ID NO: 774023 - DNA, 15 bp, Homo sapiens
atgaaattctgattt

SEQ ID NO: 774024 - DNA, 15 bp, Homo sapiens
tgaaattctgatttc

SEQ ID NO: 774025 - DNA, 15 bp, Homo sapiens
gaaattctgatttca

SEQ ID NO: 774026 - DNA, 15 bp, Homo sapiens
aaattctgatttcaa

SEQ ID NO: 774027 - DNA, 15 bp, Homo sapiens
aattctgatttcaat

SEQ ID NO: 774028 - DNA, 15 bp, Homo sapiens
attctgatttcaatg

SEQ ID NO: 774029 - DNA, 15 bp, Homo sapiens
ttctgatttcaatgt

SEQ ID NO: 774030 - DNA, 15 bp, Homo sapiens
tctgatttcaatgtc

SEQ ID NO: 774031 - DNA, 15 bp, Homo sapiens
ctgatttcaatgtct

SEQ ID NO: 774032 - DNA, 15 bp, Homo sapiens
tgatttcaatgtctc

SEQ ID NO: 774033 - DNA, 15 bp, Homo sapiens
gatttcaatgtctct

SEQ ID NO: 774034 - DNA, 15 bp, Homo sapiens
atttcaatgtctcta

SEQ ID NO: 774035 - DNA, 15 bp, Homo sapiens
tttcaatgtctctaa

SEQ ID NO: 774036 - DNA, 15 bp, Homo sapiens
ttcaatgtctctaaa

SEQ ID NO: 774037 - DNA, 15 bp, Homo sapiens
tcaatgtctctaaat

SEQ ID NO: 774038 - DNA, 15 bp, Homo sapiens
caatgtctctaaata

SEQ ID NO: 774039 - DNA, 15 bp, Homo sapiens
aatgtctctaaataa

SEQ ID NO: 774040 - DNA, 15 bp, Homo sapiens
atgtctctaaataaa

SEQ ID NO: 774041 - DNA, 15 bp, Homo sapiens
tgtctctaaataaaa

SEQ ID NO: 774042 - DNA, 15 bp, Homo sapiens
gtctctaaataaaat

SEQ ID NO: 774043 - DNA, 15 bp, Homo sapiens
tctctaaataaaatt

SEQ ID NO: 774044 - DNA, 15 bp, Homo sapiens
ctctaaataaaattc

SEQ ID NO: 774045 - DNA, 15 bp, Homo sapiens
tctaaataaaattcc

SEQ ID NO: 774046 - DNA, 15 bp, Homo sapiens
ctaaataaaattccg

SEQ ID NO: 774047 - DNA, 15 bp, Homo sapiens
taaataaaattccgc

SEQ ID NO: 774048 - DNA, 15 bp, Homo sapiens
aaataaaattccgct

SEQ ID NO: 774049 - DNA, 15 bp, Homo sapiens
aataaaattccgctg

SEQ ID NO: 774050 - DNA, 15 bp, Homo sapiens
ataaaattccgctgg

SEQ ID NO: 774051 - DNA, 15 bp, Homo sapiens
taaaattccgctgga

SEQ ID NO: 774052 - DNA, 15 bp, Homo sapiens
aaaattccgctggaa

SEQ ID NO: 774053 - DNA, 15 bp, Homo sapiens
aaattccgctggaat

SEQ ID NO: 774054 - DNA, 15 bp, Homo sapiens
aattccgctggaata

SEQ ID NO: 774055 - DNA, 15 bp, Homo sapiens
attccgctggaatac

SEQ ID NO: 774056 - DNA, 15 bp, Homo sapiens
ttccgctggaataca

SEQ ID NO: 774057 - DNA, 15 bp, Homo sapiens
tccgctggaatacaa

SEQ ID NO: 774058 - DNA, 15 bp, Homo sapiens
ccgctggaatacaac

SEQ ID NO: 774059 - DNA, 15 bp, Homo sapiens
cgctggaatacaacc

SEQ ID NO: 774060 - DNA, 15 bp, Homo sapiens
gctggaatacaacca

SEQ ID NO: 774061 - DNA, 15 bp, Homo sapiens
ctggaatacaaccac

SEQ ID NO: 774062 - DNA, 15 bp, Homo sapiens
tggaatacaaccaca

SEQ ID NO: 774063 - DNA, 15 bp, Homo sapiens
ggaatacaaccacac

SEQ ID NO: 774064 - DNA, 15 bp, Homo sapiens
gaatacaaccacact

SEQ ID NO: 774065 - DNA, 15 bp, Homo sapiens
aatacaaccacactc

SEQ ID NO: 774066 - DNA, 15 bp, Homo sapiens
atacaaccacactcc

SEQ ID NO: 774067 - DNA, 15 bp, Homo sapiens
tacaaccacactcct

SEQ ID NO: 774068 - DNA, 15 bp, Homo sapiens
acaaccacactcctt

SEQ ID NO: 774069 - DNA, 15 bp, Homo sapiens
caaccacactccttt

SEQ ID NO: 774070 - DNA, 15 bp, Homo sapiens
aaccacactcctttg

SEQ ID NO: 774071 - DNA, 15 bp, Homo sapiens
accacactcctttgt

SEQ ID NO: 774072 - DNA, 15 bp, Homo sapiens
ccacactcctttgtt

SEQ ID NO: 774073 - DNA, 15 bp, Homo sapiens
cacactcctttgttt

SEQ ID NO: 774074 - DNA, 15 bp, Homo sapiens
acactcctttgttta

SEQ ID NO: 774075 - DNA, 15 bp, Homo sapiens
cactcctttgtttat

SEQ ID NO: 774076 - DNA, 15 bp, Homo sapiens
actcctttgtttata

SEQ ID NO: 774077 - DNA, 15 bp, Homo sapiens
ctcctttgtttatat

SEQ ID NO: 774078 - DNA, 15 bp, Homo sapiens
tcctttgtttatata

SEQ ID NO: 774079 - DNA, 15 bp, Homo sapiens
cctttgtttatatat

SEQ ID NO: 774080 - DNA, 15 bp, Homo sapiens
ctttgtttatatatt

SEQ ID NO: 774081 - DNA, 15 bp, Homo sapiens
tttgtttatatattg

SEQ ID NO: 774082 - DNA, 15 bp, Homo sapiens
ttgtttatatattgt

SEQ ID NO: 774083 - DNA, 15 bp, Homo sapiens
tgtttatatattgtc

SEQ ID NO: 774084 - DNA, 15 bp, Homo sapiens
gtttatatattgtct

SEQ ID NO: 774085 - DNA, 15 bp, Homo sapiens
tttatatattgtcta

SEQ ID NO: 774086 - DNA, 15 bp, Homo sapiens
ttatatattgtctaa

SEQ ID NO: 774087 - DNA, 15 bp, Homo sapiens
tatatattgtctaag

SEQ ID NO: 774088 - DNA, 15 bp, Homo sapiens
atatattgtctaagg

SEQ ID NO: 774089 - DNA, 15 bp, Homo sapiens
tatattgtctaaggc

SEQ ID NO: 774090 - DNA, 15 bp, Homo sapiens
atattgtctaaggcc

SEQ ID NO: 774091 - DNA, 15 bp, Homo sapiens
tattgtctaaggcca

SEQ ID NO: 774092 - DNA, 15 bp, Homo sapiens
attgtctaaggccac

SEQ ID NO: 774093 - DNA, 15 bp, Homo sapiens
ttgtctaaggccact

SEQ ID NO: 774094 - DNA, 15 bp, Homo sapiens
tgtctaaggccactt

SEQ ID NO: 774095 - DNA, 15 bp, Homo sapiens
gtctaaggccacttt

SEQ ID NO: 774096 - DNA, 15 bp, Homo sapiens
tctaaggccactttt

SEQ ID NO: 774097 - DNA, 15 bp, Homo sapiens
ctaaggccacttttg

SEQ ID NO: 774098 - DNA, 15 bp, Homo sapiens
taaggccacttttgc

SEQ ID NO: 774099 - DNA, 15 bp, Homo sapiens
aaggccacttttgcc

SEQ ID NO: 774100 - DNA, 15 bp, Homo sapiens
aggccacttttgccc

SEQ ID NO: 774101 - DNA, 15 bp, Homo sapiens
ggccacttttgcccc

SEQ ID NO: 774102 - DNA, 15 bp, Homo sapiens
gccacttttgccccc

SEQ ID NO: 774103 - DNA, 15 bp, Homo sapiens
ccacttttgcccccc

SEQ ID NO: 774104 - DNA, 15 bp, Homo sapiens
cacttttgcccccca

SEQ ID NO: 774105 - DNA, 15 bp, Homo sapiens
acttttgccccccag

SEQ ID NO: 774106 - DNA, 15 bp, Homo sapiens
cttttgccccccagc

SEQ ID NO: 774107 - DNA, 15 bp, Homo sapiens
ttttgccccccagca

SEQ ID NO: 774108 - DNA, 15 bp, Homo sapiens
tttgccccccagcaa

SEQ ID NO: 774109 - DNA, 15 bp, Homo sapiens
ttgccccccagcaac

SEQ ID NO: 774110 - DNA, 15 bp, Homo sapiens
tgccccccagcaaca

SEQ ID NO: 774111 - DNA, 15 bp, Homo sapiens
gccccccagcaacag

SEQ ID NO: 774112 - DNA, 15 bp, Homo sapiens
ccccccagcaacaga

SEQ ID NO: 774113 - DNA, 15 bp, Homo sapiens
cccccagcaacagag

SEQ ID NO: 774114 - DNA, 15 bp, Homo sapiens
ccccagcaacagagc

SEQ ID NO: 774115 - DNA, 15 bp, Homo sapiens
cccagcaacagagct

SEQ ID NO: 774116 - DNA, 15 bp, Homo sapiens
ccagcaacagagctg

SEQ ID NO: 774117 - DNA, 15 bp, Homo sapiens
cagcaacagagctga

SEQ ID NO: 774118 - DNA, 15 bp, Homo sapiens
agcaacagagctgaa

SEQ ID NO: 774119 - DNA, 15 bp, Homo sapiens
gcaacagagctgaat

SEQ ID NO: 774120 - DNA, 15 bp, Homo sapiens
caacagagctgaata

SEQ ID NO: 774121 - DNA, 15 bp, Homo sapiens
aacagagctgaatag

SEQ ID NO: 774122 - DNA, 15 bp, Homo sapiens
acagagctgaatagt

SEQ ID NO: 774123 - DNA, 15 bp, Homo sapiens
cagagctgaatagtt

SEQ ID NO: 774124 - DNA, 15 bp, Homo sapiens
agagctgaatagttg

SEQ ID NO: 774125 - DNA, 15 bp, Homo sapiens
gagctgaatagttgc

SEQ ID NO: 774126 - DNA, 15 bp, Homo sapiens
agctgaatagttgca

SEQ ID NO: 774127 - DNA, 15 bp, Homo sapiens
gctgaatagttgcaa

SEQ ID NO: 774128 - DNA, 15 bp, Homo sapiens
ctgaatagttgcaac

SEQ ID NO: 774129 - DNA, 15 bp, Homo sapiens
tgaatagttgcaaca

SEQ ID NO: 774130 - DNA, 15 bp, Homo sapiens
gaatagttgcaacag

SEQ ID NO: 774131 - DNA, 15 bp, Homo sapiens
aatagttgcaacaga

SEQ ID NO: 774132 - DNA, 15 bp, Homo sapiens
atagttgcaacagag

SEQ ID NO: 774133 - DNA, 15 bp, Homo sapiens
tagttgcaacagaga

SEQ ID NO: 774134 - DNA, 15 bp, Homo sapiens
agttgcaacagagac

SEQ ID NO: 774135 - DNA, 15 bp, Homo sapiens
gttgcaacagagacc

SEQ ID NO: 774136 - DNA, 15 bp, Homo sapiens
ttgcaacagagacca

SEQ ID NO: 774137 - DNA, 15 bp, Homo sapiens
tgcaacagagaccat

SEQ ID NO: 774138 - DNA, 15 bp, Homo sapiens
gcaacagagaccata

SEQ ID NO: 774139 - DNA, 15 bp, Homo sapiens
caacagagaccatat

SEQ ID NO: 774140 - DNA, 15 bp, Homo sapiens
aacagagaccatatg

SEQ ID NO: 774141 - DNA, 15 bp, Homo sapiens
acagagaccatatgc

SEQ ID NO: 774142 - DNA, 15 bp, Homo sapiens
cagagaccatatgct

SEQ ID NO: 774143 - DNA, 15 bp, Homo sapiens
agagaccatatgcta

SEQ ID NO: 774144 - DNA, 15 bp, Homo sapiens
gagaccatatgctaa

SEQ ID NO: 774145 - DNA, 15 bp, Homo sapiens
agaccatatgctaaa

SEQ ID NO: 774146 - DNA, 15 bp, Homo sapiens
gaccatatgctaaag

SEQ ID NO: 774147 - DNA, 15 bp, Homo sapiens
accatatgctaaagc

SEQ ID NO: 774148 - DNA, 15 bp, Homo sapiens
ccatatgctaaagcc

SEQ ID NO: 774149 - DNA, 15 bp, Homo sapiens
catatgctaaagcct

SEQ ID NO: 774150 - DNA, 15 bp, Homo sapiens
atatgctaaagccta

SEQ ID NO: 774151 - DNA, 15 bp, Homo sapiens
tatgctaaagcctaa

SEQ ID NO: 774152 - DNA, 15 bp, Homo sapiens
atgctaaagcctaaa

SEQ ID NO: 774153 - DNA, 15 bp, Homo sapiens
tgctaaagcctaaaa

SEQ ID NO: 774154 - DNA, 15 bp, Homo sapiens
gctaaagcctaaaat

SEQ ID NO: 774155 - DNA, 15 bp, Homo sapiens
ctaaagcctaaaata

SEQ ID NO: 774156 - DNA, 15 bp, Homo sapiens
taaagcctaaaatat

SEQ ID NO: 774157 - DNA, 15 bp, Homo sapiens
aaagcctaaaatatt

SEQ ID NO: 774158 - DNA, 15 bp, Homo sapiens
aagcctaaaatattt

SEQ ID NO: 774159 - DNA, 15 bp, Homo sapiens
agcctaaaatatttc

SEQ ID NO: 774160 - DNA, 15 bp, Homo sapiens
gcctaaaatatttcc

SEQ ID NO: 774161 - DNA, 15 bp, Homo sapiens
cctaaaatatttcct

SEQ ID NO: 774162 - DNA, 15 bp, Homo sapiens
ctaaaatatttccta

SEQ ID NO: 774163 - DNA, 15 bp, Homo sapiens
taaaatatttcctat

SEQ ID NO: 774164 - DNA, 15 bp, Homo sapiens
aaaatatttcctatc

SEQ ID NO: 774165 - DNA, 15 bp, Homo sapiens
aaatatttcctatct

SEQ ID NO: 774166 - DNA, 15 bp, Homo sapiens
aatatttcctatctg

SEQ ID NO: 774167 - DNA, 15 bp, Homo sapiens
atatttcctatctgg

SEQ ID NO: 774168 - DNA, 15 bp, Homo sapiens
tatttcctatctggc

SEQ ID NO: 774169 - DNA, 15 bp, Homo sapiens
atttcctatctggcc

SEQ ID NO: 774170 - DNA, 15 bp, Homo sapiens
tttcctatctggccc

SEQ ID NO: 774171 - DNA, 15 bp, Homo sapiens
ttcctatctggccct

SEQ ID NO: 774172 - DNA, 15 bp, Homo sapiens
tcctatctggccctt

SEQ ID NO: 774173 - DNA, 15 bp, Homo sapiens
cctatctggcccttt

SEQ ID NO: 774174 - DNA, 15 bp, Homo sapiens
ctatctggcccttta

SEQ ID NO: 774175 - DNA, 15 bp, Homo sapiens
tatctggccctttac

SEQ ID NO: 774176 - DNA, 15 bp, Homo sapiens
atctggccctttaca

SEQ ID NO: 774177 - DNA, 15 bp, Homo sapiens
tctggccctttacag

SEQ ID NO: 774178 - DNA, 15 bp, Homo sapiens
ctggccctttacaga

SEQ ID NO: 774179 - DNA, 15 bp, Homo sapiens
tggccctttacagaa

SEQ ID NO: 774180 - DNA, 15 bp, Homo sapiens
ggccctttacagaaa

SEQ ID NO: 774181 - DNA, 15 bp, Homo sapiens
gccctttacagaaac

SEQ ID NO: 774182 - DNA, 15 bp, Homo sapiens
ccctttacagaaaca

SEQ ID NO: 774183 - DNA, 15 bp, Homo sapiens
cctttacagaaacaa

SEQ ID NO: 774184 - DNA, 15 bp, Homo sapiens
ctttacagaaacaat

SEQ ID NO: 774185 - DNA, 15 bp, Homo sapiens
tttacagaaacaatt

SEQ ID NO: 774186 - DNA, 15 bp, Homo sapiens
ttacagaaacaattt

SEQ ID NO: 774187 - DNA, 15 bp, Homo sapiens
tacagaaacaatttg

SEQ ID NO: 774188 - DNA, 15 bp, Homo sapiens
acagaaacaatttgc

SEQ ID NO: 774189 - DNA, 15 bp, Homo sapiens
cagaaacaatttgcc

SEQ ID NO: 774190 - DNA, 15 bp, Homo sapiens
agaaacaatttgccc

SEQ ID NO: 774191 - DNA, 15 bp, Homo sapiens
gaaacaatttgccca

SEQ ID NO: 774192 - DNA, 15 bp, Homo sapiens
aaacaatttgcccac

SEQ ID NO: 774193 - DNA, 15 bp, Homo sapiens
aacaatttgcccacc

SEQ ID NO: 774194 - DNA, 15 bp, Homo sapiens
acaatttgcccacct

SEQ ID NO: 774195 - DNA, 15 bp, Homo sapiens
caatttgcccacctc

SEQ ID NO: 774196 - DNA, 15 bp, Homo sapiens
aatttgcccacctct

SEQ ID NO: 774197 - DNA, 15 bp, Homo sapiens
atttgcccacctcta

SEQ ID NO: 774198 - DNA, 15 bp, Homo sapiens
tttgcccacctctag

SEQ ID NO: 774199 - DNA, 15 bp, Homo sapiens
ttgcccacctctagt

SEQ ID NO: 774200 - DNA, 15 bp, Homo sapiens
tgcccacctctagtc

SEQ ID NO: 774201 - DNA, 15 bp, Homo sapiens
gcccacctctagtct

SEQ ID NO: 774202 - DNA, 15 bp, Homo sapiens
cccacctctagtcta

SEQ ID NO: 774203 - DNA, 15 bp, Homo sapiens
ccacctctagtctag

SEQ ID NO: 774204 - DNA, 15 bp, Homo sapiens
cacctctagtctagt

SEQ ID NO: 774205 - DNA, 15 bp, Homo sapiens
acctctagtctagtg

SEQ ID NO: 774206 - DNA, 15 bp, Homo sapiens
cctctagtctagtga

SEQ ID NO: 774207 - DNA, 15 bp, Homo sapiens
ctctagtctagtgaa

SEQ ID NO: 774208 - DNA, 15 bp, Homo sapiens
tctagtctagtgaag

SEQ ID NO: 774209 - DNA, 15 bp, Homo sapiens
ctagtctagtgaagc

SEQ ID NO: 774210 - DNA, 15 bp, Homo sapiens
tagtctagtgaagca

SEQ ID NO: 774211 - DNA, 15 bp, Homo sapiens
agtctagtgaagcaa

SEQ ID NO: 774212 - DNA, 15 bp, Homo sapiens
gtctagtgaagcaaa

SEQ ID NO: 774213 - DNA, 15 bp, Homo sapiens
tctagtgaagcaaag

SEQ ID NO: 774214 - DNA, 15 bp, Homo sapiens
ctagtgaagcaaaga

SEQ ID NO: 774215 - DNA, 15 bp, Homo sapiens
tagtgaagcaaagag

SEQ ID NO: 774216 - DNA, 15 bp, Homo sapiens
agtgaagcaaagagg

SEQ ID NO: 774217 - DNA, 15 bp, Homo sapiens
gtgaagcaaagaggc

SEQ ID NO: 774218 - DNA, 15 bp, Homo sapiens
tgaagcaaagaggcc

SEQ ID NO: 774219 - DNA, 15 bp, Homo sapiens
gaagcaaagaggccc

SEQ ID NO: 774220 - DNA, 15 bp, Homo sapiens
aagcaaagaggccct

SEQ ID NO: 774221 - DNA, 15 bp, Homo sapiens
agcaaagaggccctg

SEQ ID NO: 774222 - DNA, 15 bp, Homo sapiens
gcaaagaggccctga

SEQ ID NO: 774223 - DNA, 15 bp, Homo sapiens
caaagaggccctgaa

SEQ ID NO: 774224 - DNA, 15 bp, Homo sapiens
aaagaggccctgaac

SEQ ID NO: 774225 - DNA, 15 bp, Homo sapiens
aagaggccctgaaca

SEQ ID NO: 774226 - DNA, 15 bp, Homo sapiens
agaggccctgaacaa

SEQ ID NO: 774227 - DNA, 15 bp, Homo sapiens
gaggccctgaacaag

SEQ ID NO: 774228 - DNA, 15 bp, Homo sapiens
aggccctgaacaagt

SEQ ID NO: 774229 - DNA, 15 bp, Homo sapiens
ggccctgaacaagta

SEQ ID NO: 774230 - DNA, 15 bp, Homo sapiens
gccctgaacaagtac

SEQ ID NO: 774231 - DNA, 15 bp, Homo sapiens
ccctgaacaagtact

SEQ ID NO: 774232 - DNA, 15 bp, Homo sapiens
cctgaacaagtactt

SEQ ID NO: 774233 - DNA, 15 bp, Homo sapiens
ctgaacaagtacttg

SEQ ID NO: 774234 - DNA, 15 bp, Homo sapiens
tgaacaagtacttgc

SEQ ID NO: 774235 - DNA, 15 bp, Homo sapiens
gaacaagtacttgca

SEQ ID NO: 774236 - DNA, 15 bp, Homo sapiens
aacaagtacttgcaa

SEQ ID NO: 774237 - DNA, 15 bp, Homo sapiens
acaagtacttgcaaa

SEQ ID NO: 774238 - DNA, 15 bp, Homo sapiens
caagtacttgcaaat

SEQ ID NO: 774239 - DNA, 15 bp, Homo sapiens
aagtacttgcaaatg

SEQ ID NO: 774240 - DNA, 15 bp, Homo sapiens
agtacttgcaaatgc

SEQ ID NO: 774241 - DNA, 15 bp, Homo sapiens
gtacttgcaaatgcc

SEQ ID NO: 774242 - DNA, 15 bp, Homo sapiens
tacttgcaaatgcct

SEQ ID NO: 774243 - DNA, 15 bp, Homo sapiens
acttgcaaatgcctt

SEQ ID NO: 774244 - DNA, 15 bp, Homo sapiens
cttgcaaatgccttg

SEQ ID NO: 774245 - DNA, 15 bp, Homo sapiens
ttgcaaatgccttga

SEQ ID NO: 774246 - DNA, 15 bp, Homo sapiens
tgcaaatgccttgag

SEQ ID NO: 774247 - DNA, 15 bp, Homo sapiens
gcaaatgccttgagt

SEQ ID NO: 774248 - DNA, 15 bp, Homo sapiens
caaatgccttgagtg

SEQ ID NO: 774249 - DNA, 15 bp, Homo sapiens
aaatgccttgagtgt

SEQ ID NO: 774250 - DNA, 15 bp, Homo sapiens
aatgccttgagtgtt

SEQ ID NO: 774251 - DNA, 15 bp, Homo sapiens
atgccttgagtgtta

SEQ ID NO: 774252 - DNA, 15 bp, Homo sapiens
tgccttgagtgttat

SEQ ID NO: 774253 - DNA, 15 bp, Homo sapiens
gccttgagtgttatg

SEQ ID NO: 774254 - DNA, 15 bp, Homo sapiens
ccttgagtgttatga

SEQ ID NO: 774255 - DNA, 15 bp, Homo sapiens
cttgagtgttatgaa

SEQ ID NO: 774256 - DNA, 15 bp, Homo sapiens
ttgagtgttatgaag

SEQ ID NO: 774257 - DNA, 15 bp, Homo sapiens
tgagtgttatgaagg

SEQ ID NO: 774258 - DNA, 15 bp, Homo sapiens
gagtgttatgaagga

SEQ ID NO: 774259 - DNA, 15 bp, Homo sapiens
agtgttatgaaggag

SEQ ID NO: 774260 - DNA, 15 bp, Homo sapiens
gtgttatgaaggagc

SEQ ID NO: 774261 - DNA, 15 bp, Homo sapiens
tgttatgaaggagca

SEQ ID NO: 774262 - DNA, 15 bp, Homo sapiens
gttatgaaggagcag

SEQ ID NO: 774263 - DNA, 15 bp, Homo sapiens
ttatgaaggagcagt

SEQ ID NO: 774264 - DNA, 15 bp, Homo sapiens
tatgaaggagcagtg

SEQ ID NO: 774265 - DNA, 15 bp, Homo sapiens
atgaaggagcagtgc

SEQ ID NO: 774266 - DNA, 15 bp, Homo sapiens
tgaaggagcagtgca

SEQ ID NO: 774267 - DNA, 15 bp, Homo sapiens
gaaggagcagtgcaa

SEQ ID NO: 774268 - DNA, 15 bp, Homo sapiens
aaggagcagtgcaaa

SEQ ID NO: 774269 - DNA, 15 bp, Homo sapiens
aggagcagtgcaaag

SEQ ID NO: 774270 - DNA, 15 bp, Homo sapiens
ggagcagtgcaaaga

SEQ ID NO: 774271 - DNA, 15 bp, Homo sapiens
gagcagtgcaaagac

SEQ ID NO: 774272 - DNA, 15 bp, Homo sapiens
agcagtgcaaagacc

SEQ ID NO: 774273 - DNA, 15 bp, Homo sapiens
gcagtgcaaagacca

SEQ ID NO: 774274 - DNA, 15 bp, Homo sapiens
cagtgcaaagaccac

SEQ ID NO: 774275 - DNA, 15 bp, Homo sapiens
agtgcaaagaccaca

SEQ ID NO: 774276 - DNA, 15 bp, Homo sapiens
gtgcaaagaccacat

SEQ ID NO: 774277 - DNA, 15 bp, Homo sapiens
tgcaaagaccacatg

SEQ ID NO: 774278 - DNA, 15 bp, Homo sapiens
gcaaagaccacatga

SEQ ID NO: 774279 - DNA, 15 bp, Homo sapiens
caaagaccacatgat

SEQ ID NO: 774280 - DNA, 15 bp, Homo sapiens
aaagaccacatgatt

SEQ ID NO: 774281 - DNA, 15 bp, Homo sapiens
aagaccacatgattg

SEQ ID NO: 774282 - DNA, 15 bp, Homo sapiens
agaccacatgattgg

SEQ ID NO: 774283 - DNA, 15 bp, Homo sapiens
gaccacatgattgga

SEQ ID NO: 774284 - DNA, 15 bp, Homo sapiens
accacatgattggaa

SEQ ID NO: 774285 - DNA, 15 bp, Homo sapiens
ccacatgattggaag

SEQ ID NO: 774286 - DNA, 15 bp, Homo sapiens
cacatgattggaagg

SEQ ID NO: 774287 - DNA, 15 bp, Homo sapiens
acatgattggaaggt

SEQ ID NO: 774288 - DNA, 15 bp, Homo sapiens
catgattggaaggtt

SEQ ID NO: 774289 - DNA, 15 bp, Homo sapiens
atgattggaaggttt

SEQ ID NO: 774290 - DNA, 15 bp, Homo sapiens
tgattggaaggtttt

SEQ ID NO: 774291 - DNA, 15 bp, Homo sapiens
gattggaaggtttta

SEQ ID NO: 774292 - DNA, 15 bp, Homo sapiens
attggaaggttttat

SEQ ID NO: 774293 - DNA, 15 bp, Homo sapiens
ttggaaggttttatt

SEQ ID NO: 774294 - DNA, 15 bp, Homo sapiens
tggaaggttttattg

SEQ ID NO: 774295 - DNA, 15 bp, Homo sapiens
ggaaggttttattga

SEQ ID NO: 774296 - DNA, 15 bp, Homo sapiens
gaaggttttattgac

SEQ ID NO: 774297 - DNA, 15 bp, Homo sapiens
aaggttttattgact

SEQ ID NO: 774298 - DNA, 15 bp, Homo sapiens
aggttttattgactg

SEQ ID NO: 774299 - DNA, 15 bp, Homo sapiens
ggttttattgactga

SEQ ID NO: 774300 - DNA, 15 bp, Homo sapiens
gttttattgactgat

SEQ ID NO: 774301 - DNA, 15 bp, Homo sapiens
ttttattgactgata

SEQ ID NO: 774302 - DNA, 15 bp, Homo sapiens
tttattgactgatag

SEQ ID NO: 774303 - DNA, 15 bp, Homo sapiens
ttattgactgatagc

SEQ ID NO: 774304 - DNA, 15 bp, Homo sapiens
tattgactgatagca

SEQ ID NO: 774305 - DNA, 15 bp, Homo sapiens
attgactgatagcaa

SEQ ID NO: 774306 - DNA, 15 bp, Homo sapiens
ttgactgatagcaat

SEQ ID NO: 774307 - DNA, 15 bp, Homo sapiens
tgactgatagcaatg

SEQ ID NO: 774308 - DNA, 15 bp, Homo sapiens
gactgatagcaatgg

SEQ ID NO: 774309 - DNA, 15 bp, Homo sapiens
actgatagcaatggt

SEQ ID NO: 774310 - DNA, 15 bp, Homo sapiens
ctgatagcaatggtg

SEQ ID NO: 774311 - DNA, 15 bp, Homo sapiens
tgatagcaatggtgg

SEQ ID NO: 774312 - DNA, 15 bp, Homo sapiens
gatagcaatggtggt

SEQ ID NO: 774313 - DNA, 15 bp, Homo sapiens
atagcaatggtggtg

SEQ ID NO: 774314 - DNA, 15 bp, Homo sapiens
tagcaatggtggtgg

SEQ ID NO: 774315 - DNA, 15 bp, Homo sapiens
agcaatggtggtggt

SEQ ID NO: 774316 - DNA, 15 bp, Homo sapiens
gcaatggtggtggtg

SEQ ID NO: 774317 - DNA, 15 bp, Homo sapiens
caatggtggtggtgg

SEQ ID NO: 774318 - DNA, 15 bp, Homo sapiens
aatggtggtggtgga

SEQ ID NO: 774319 - DNA, 15 bp, Homo sapiens
tggtggtggtggagt

SEQ ID NO: 774320 - DNA, 15 bp, Homo sapiens
ggtggtggtggagtg

SEQ ID NO: 774321 - DNA, 15 bp, Homo sapiens
gtggtggtggagtgg

SEQ ID NO: 774322 - DNA, 15 bp, Homo sapiens
tggtggtggagtgga

SEQ ID NO: 774323 - DNA, 15 bp, Homo sapiens
ggtggtggagtggag

SEQ ID NO: 774324 - DNA, 15 bp, Homo sapiens
gtggtggagtggagg

SEQ ID NO: 774325 - DNA, 15 bp, Homo sapiens
tggtggagtggaggt

SEQ ID NO: 774326 - DNA, 15 bp, Homo sapiens
ggtggagtggaggtg

SEQ ID NO: 774327 - DNA, 15 bp, Homo sapiens
gtggagtggaggtgg

SEQ ID NO: 774328 - DNA, 15 bp, Homo sapiens
tggagtggaggtgga

SEQ ID NO: 774329 - DNA, 15 bp, Homo sapiens
ggagtggaggtggag

SEQ ID NO: 774330 - DNA, 15 bp, Homo sapiens
gagtggaggtggagg

SEQ ID NO: 774331 - DNA, 15 bp, Homo sapiens
agtggaggtggaggg

SEQ ID NO: 774332 - DNA, 15 bp, Homo sapiens
gtggaggtggagggt

SEQ ID NO: 774333 - DNA, 15 bp, Homo sapiens
tggaggtggagggtg

SEQ ID NO: 774334 - DNA, 15 bp, Homo sapiens
ggaggtggagggtga

SEQ ID NO: 774335 - DNA, 15 bp, Homo sapiens
gaggtggagggtgag

SEQ ID NO: 774336 - DNA, 15 bp, Homo sapiens
aggtggagggtgagt

SEQ ID NO: 774337 - DNA, 15 bp, Homo sapiens
ggtggagggtgagtt

SEQ ID NO: 774338 - DNA, 15 bp, Homo sapiens
gtggagggtgagtta

SEQ ID NO: 774339 - DNA, 15 bp, Homo sapiens
tggagggtgagttag

SEQ ID NO: 774340 - DNA, 15 bp, Homo sapiens
ggagggtgagttagg

SEQ ID NO: 774341 - DNA, 15 bp, Homo sapiens
gagggtgagttagga

SEQ ID NO: 774342 - DNA, 15 bp, Homo sapiens
agggtgagttaggaa

SEQ ID NO: 774343 - DNA, 15 bp, Homo sapiens
gggtgagttaggaaa

SEQ ID NO: 774344 - DNA, 15 bp, Homo sapiens
ggtgagttaggaaag

SEQ ID NO: 774345 - DNA, 15 bp, Homo sapiens
gtgagttaggaaagg

SEQ ID NO: 774346 - DNA, 15 bp, Homo sapiens
tgagttaggaaaggc

SEQ ID NO: 774347 - DNA, 15 bp, Homo sapiens
gagttaggaaaggct

SEQ ID NO: 774348 - DNA, 15 bp, Homo sapiens
agttaggaaaggctt

SEQ ID NO: 774349 - DNA, 15 bp, Homo sapiens
gttaggaaaggcttc

SEQ ID NO: 774350 - DNA, 15 bp, Homo sapiens
ttaggaaaggcttcc

SEQ ID NO: 774351 - DNA, 15 bp, Homo sapiens
taggaaaggcttcct

SEQ ID NO: 774352 - DNA, 15 bp, Homo sapiens
aggaaaggcttcctg

SEQ ID NO: 774353 - DNA, 15 bp, Homo sapiens
ggaaaggcttcctgg

SEQ ID NO: 774354 - DNA, 15 bp, Homo sapiens
gaaaggcttcctggg

SEQ ID NO: 774355 - DNA, 15 bp, Homo sapiens
aaaggcttcctgggg

SEQ ID NO: 774356 - DNA, 15 bp, Homo sapiens
aaggcttcctgggga

SEQ ID NO: 774357 - DNA, 15 bp, Homo sapiens
aggcttcctggggag

SEQ ID NO: 774358 - DNA, 15 bp, Homo sapiens
ggcttcctggggaga

SEQ ID NO: 774359 - DNA, 15 bp, Homo sapiens
gcttcctggggagag

SEQ ID NO: 774360 - DNA, 15 bp, Homo sapiens
cttcctggggagaga

SEQ ID NO: 774361 - DNA, 15 bp, Homo sapiens
ttcctggggagagat

SEQ ID NO: 774362 - DNA, 15 bp, Homo sapiens
tcctggggagagatc

SEQ ID NO: 774363 - DNA, 15 bp, Homo sapiens
cctggggagagatct

SEQ ID NO: 774364 - DNA, 15 bp, Homo sapiens
ctggggagagatctt

SEQ ID NO: 774365 - DNA, 15 bp, Homo sapiens
tggggagagatctta

SEQ ID NO: 774366 - DNA, 15 bp, Homo sapiens
ggggagagatcttaa

SEQ ID NO: 774367 - DNA, 15 bp, Homo sapiens
gggagagatcttaaa

SEQ ID NO: 774368 - DNA, 15 bp, Homo sapiens
ggagagatcttaaat

SEQ ID NO: 774369 - DNA, 15 bp, Homo sapiens
gagagatcttaaata

SEQ ID NO: 774370 - DNA, 15 bp, Homo sapiens
agagatcttaaatat

SEQ ID NO: 774371 - DNA, 15 bp, Homo sapiens
gagatcttaaatatg

SEQ ID NO: 774372 - DNA, 15 bp, Homo sapiens
agatcttaaatatga

SEQ ID NO: 774373 - DNA, 15 bp, Homo sapiens
gatcttaaatatgag

SEQ ID NO: 774374 - DNA, 15 bp, Homo sapiens
atcttaaatatgagt

SEQ ID NO: 774375 - DNA, 15 bp, Homo sapiens
tcttaaatatgagta

SEQ ID NO: 774376 - DNA, 15 bp, Homo sapiens
cttaaatatgagtag

SEQ ID NO: 774377 - DNA, 15 bp, Homo sapiens
ttaaatatgagtagg

SEQ ID NO: 774378 - DNA, 15 bp, Homo sapiens
taaatatgagtagga

SEQ ID NO: 774379 - DNA, 15 bp, Homo sapiens
aaatatgagtaggac

SEQ ID NO: 774380 - DNA, 15 bp, Homo sapiens
aatatgagtaggaca

SEQ ID NO: 774381 - DNA, 15 bp, Homo sapiens
atatgagtaggacat

SEQ ID NO: 774382 - DNA, 15 bp, Homo sapiens
tatgagtaggacatc

SEQ ID NO: 774383 - DNA, 15 bp, Homo sapiens
atgagtaggacatct

SEQ ID NO: 774384 - DNA, 15 bp, Homo sapiens
tgagtaggacatctg

SEQ ID NO: 774385 - DNA, 15 bp, Homo sapiens
gagtaggacatctgg

SEQ ID NO: 774386 - DNA, 15 bp, Homo sapiens
agtaggacatctgga

SEQ ID NO: 774387 - DNA, 15 bp, Homo sapiens
gtaggacatctggaa

SEQ ID NO: 774388 - DNA, 15 bp, Homo sapiens
taggacatctggaat

SEQ ID NO: 774389 - DNA, 15 bp, Homo sapiens
aggacatctggaata

SEQ ID NO: 774390 - DNA, 15 bp, Homo sapiens
ggacatctggaatat

SEQ ID NO: 774391 - DNA, 15 bp, Homo sapiens
gacatctggaatatg

SEQ ID NO: 774392 - DNA, 15 bp, Homo sapiens
acatctggaatatga

SEQ ID NO: 774393 - DNA, 15 bp, Homo sapiens
catctggaatatgac

SEQ ID NO: 774394 - DNA, 15 bp, Homo sapiens
atctggaatatgact

SEQ ID NO: 774395 - DNA, 15 bp, Homo sapiens
tctggaatatgactg

SEQ ID NO: 774396 - DNA, 15 bp, Homo sapiens
ctggaatatgactgt

SEQ ID NO: 774397 - DNA, 15 bp, Homo sapiens
tggaatatgactgtg

SEQ ID NO: 774398 - DNA, 15 bp, Homo sapiens
ggaatatgactgtgt

SEQ ID NO: 774399 - DNA, 15 bp, Homo sapiens
gaatatgactgtgtg

SEQ ID NO: 774400 - DNA, 15 bp, Homo sapiens
aatatgactgtgtga

SEQ ID NO: 774401 - DNA, 15 bp, Homo sapiens
atatgactgtgtgaa

SEQ ID NO: 774402 - DNA, 15 bp, Homo sapiens
tatgactgtgtgaag

SEQ ID NO: 774403 - DNA, 15 bp, Homo sapiens
atgactgtgtgaaga

SEQ ID NO: 774404 - DNA, 15 bp, Homo sapiens
tgactgtgtgaagaa

SEQ ID NO: 774405 - DNA, 15 bp, Homo sapiens
gactgtgtgaagaag

SEQ ID NO: 774406 - DNA, 15 bp, Homo sapiens
actgtgtgaagaagg

SEQ ID NO: 774407 - DNA, 15 bp, Homo sapiens
ctgtgtgaagaaggt

SEQ ID NO: 774408 - DNA, 15 bp, Homo sapiens
tgtgtgaagaaggtt

SEQ ID NO: 774409 - DNA, 15 bp, Homo sapiens
gtgtgaagaaggttg

SEQ ID NO: 774410 - DNA, 15 bp, Homo sapiens
tgtgaagaaggttgt

SEQ ID NO: 774411 - DNA, 15 bp, Homo sapiens
gtgaagaaggttgtt

SEQ ID NO: 774412 - DNA, 15 bp, Homo sapiens
tgaagaaggttgtta

SEQ ID NO: 774413 - DNA, 15 bp, Homo sapiens
gaagaaggttgttac

SEQ ID NO: 774414 - DNA, 15 bp, Homo sapiens
aagaaggttgttaca

SEQ ID NO: 774415 - DNA, 15 bp, Homo sapiens
agaaggttgttacag

SEQ ID NO: 774416 - DNA, 15 bp, Homo sapiens
gaaggttgttacagg

SEQ ID NO: 774417 - DNA, 15 bp, Homo sapiens
aaggttgttacagga

SEQ ID NO: 774418 - DNA, 15 bp, Homo sapiens
aggttgttacaggaa

SEQ ID NO: 774419 - DNA, 15 bp, Homo sapiens
ggttgttacaggaaa

SEQ ID NO: 774420 - DNA, 15 bp, Homo sapiens
gttgttacaggaaaa

SEQ ID NO: 774421 - DNA, 15 bp, Homo sapiens
ttgttacaggaaaag

SEQ ID NO: 774422 - DNA, 15 bp, Homo sapiens
tgttacaggaaaagg

SEQ ID NO: 774423 - DNA, 15 bp, Homo sapiens
gttacaggaaaagga

SEQ ID NO: 774424 - DNA, 15 bp, Homo sapiens
ttacaggaaaaggaa

SEQ ID NO: 774425 - DNA, 15 bp, Homo sapiens
tacaggaaaaggaaa

SEQ ID NO: 774426 - DNA, 15 bp, Homo sapiens
acaggaaaaggaaac

SEQ ID NO: 774427 - DNA, 15 bp, Homo sapiens
caggaaaaggaaacc

SEQ ID NO: 774428 - DNA, 15 bp, Homo sapiens
aggaaaaggaaacct

SEQ ID NO: 774429 - DNA, 15 bp, Homo sapiens
ggaaaaggaaaccta

SEQ ID NO: 774430 - DNA, 15 bp, Homo sapiens
gaaaaggaaacctag

SEQ ID NO: 774431 - DNA, 15 bp, Homo sapiens
aaaaggaaacctagg

SEQ ID NO: 774432 - DNA, 15 bp, Homo sapiens
aaaggaaacctagga

SEQ ID NO: 774433 - DNA, 15 bp, Homo sapiens
aaggaaacctaggac

SEQ ID NO: 774434 - DNA, 15 bp, Homo sapiens
aggaaacctaggaca

SEQ ID NO: 774435 - DNA, 15 bp, Homo sapiens
ggaaacctaggacat

SEQ ID NO: 774436 - DNA, 15 bp, Homo sapiens
gaaacctaggacatg

SEQ ID NO: 774437 - DNA, 15 bp, Homo sapiens
aaacctaggacatgc

SEQ ID NO: 774438 - DNA, 15 bp, Homo sapiens
aacctaggacatgca

SEQ ID NO: 774439 - DNA, 15 bp, Homo sapiens
acctaggacatgcag

SEQ ID NO: 774440 - DNA, 15 bp, Homo sapiens
cctaggacatgcaga

SEQ ID NO: 774441 - DNA, 15 bp, Homo sapiens
ctaggacatgcagat

SEQ ID NO: 774442 - DNA, 15 bp, Homo sapiens
taggacatgcagatc

SEQ ID NO: 774443 - DNA, 15 bp, Homo sapiens
aggacatgcagatcc

SEQ ID NO: 774444 - DNA, 15 bp, Homo sapiens
ggacatgcagatccc

SEQ ID NO: 774445 - DNA, 15 bp, Homo sapiens
gacatgcagatccct

SEQ ID NO: 774446 - DNA, 15 bp, Homo sapiens
acatgcagatccctg

SEQ ID NO: 774447 - DNA, 15 bp, Homo sapiens
catgcagatccctga

SEQ ID NO: 774448 - DNA, 15 bp, Homo sapiens
atgcagatccctgaa

SEQ ID NO: 774449 - DNA, 15 bp, Homo sapiens
tgcagatccctgaat

SEQ ID NO: 774450 - DNA, 15 bp, Homo sapiens
gcagatccctgaatt

SEQ ID NO: 774451 - DNA, 15 bp, Homo sapiens
cagatccctgaatta

SEQ ID NO: 774452 - DNA, 15 bp, Homo sapiens
agatccctgaattag

SEQ ID NO: 774453 - DNA, 15 bp, Homo sapiens
gatccctgaattaga

SEQ ID NO: 774454 - DNA, 15 bp, Homo sapiens
atccctgaattagaa

SEQ ID NO: 774455 - DNA, 15 bp, Homo sapiens
tccctgaattagaaa

SEQ ID NO: 774456 - DNA, 15 bp, Homo sapiens
ccctgaattagaaaa

SEQ ID NO: 774457 - DNA, 15 bp, Homo sapiens
cctgaattagaaaag

SEQ ID NO: 774458 - DNA, 15 bp, Homo sapiens
ctgaattagaaaaga

SEQ ID NO: 774459 - DNA, 15 bp, Homo sapiens
tgaattagaaaagag

SEQ ID NO: 774460 - DNA, 15 bp, Homo sapiens
gaattagaaaagagg

SEQ ID NO: 774461 - DNA, 15 bp, Homo sapiens
aattagaaaagagga

SEQ ID NO: 774462 - DNA, 15 bp, Homo sapiens
attagaaaagaggag

SEQ ID NO: 774463 - DNA, 15 bp, Homo sapiens
ttagaaaagaggagt

SEQ ID NO: 774464 - DNA, 15 bp, Homo sapiens
tagaaaagaggagtg

SEQ ID NO: 774465 - DNA, 15 bp, Homo sapiens
agaaaagaggagtgc

SEQ ID NO: 774466 - DNA, 15 bp, Homo sapiens
gaaaagaggagtgct

SEQ ID NO: 774467 - DNA, 15 bp, Homo sapiens
aaaagaggagtgctc

SEQ ID NO: 774468 - DNA, 15 bp, Homo sapiens
aaagaggagtgctca

SEQ ID NO: 774469 - DNA, 15 bp, Homo sapiens
aagaggagtgctcat

SEQ ID NO: 774470 - DNA, 15 bp, Homo sapiens
agaggagtgctcatt

SEQ ID NO: 774471 - DNA, 15 bp, Homo sapiens
gaggagtgctcattg

SEQ ID NO: 774472 - DNA, 15 bp, Homo sapiens
aggagtgctcattga

SEQ ID NO: 774473 - DNA, 15 bp, Homo sapiens
ggagtgctcattgaa

SEQ ID NO: 774474 - DNA, 15 bp, Homo sapiens
gagtgctcattgaag

SEQ ID NO: 774475 - DNA, 15 bp, Homo sapiens
agtgctcattgaagg

SEQ ID NO: 774476 - DNA, 15 bp, Homo sapiens
ggagggcagccggca

SEQ ID NO: 774477 - DNA, 15 bp, Homo sapiens
gagggcagccggcag

SEQ ID NO: 774478 - DNA, 15 bp, Homo sapiens
agggcagccggcagc

SEQ ID NO: 774479 - DNA, 15 bp, Homo sapiens
gggcagccggcagcc

SEQ ID NO: 774480 - DNA, 15 bp, Homo sapiens
ggcagccggcagcct

SEQ ID NO: 774481 - DNA, 15 bp, Homo sapiens
gcagccggcagcctc

SEQ ID NO: 774482 - DNA, 15 bp, Homo sapiens
cagccggcagcctca

SEQ ID NO: 774483 - DNA, 15 bp, Homo sapiens
agccggcagcctcag

SEQ ID NO: 774484 - DNA, 15 bp, Homo sapiens
gccggcagcctcagc

SEQ ID NO: 774485 - DNA, 15 bp, Homo sapiens
ccggcagcctcagct

SEQ ID NO: 774486 - DNA, 15 bp, Homo sapiens
cggcagcctcagctc

SEQ ID NO: 774487 - DNA, 15 bp, Homo sapiens
ggcagcctcagctcc

SEQ ID NO: 774488 - DNA, 15 bp, Homo sapiens
gcagcctcagctcca

SEQ ID NO: 774489 - DNA, 15 bp, Homo sapiens
cagcctcagctccag

SEQ ID NO: 774490 - DNA, 15 bp, Homo sapiens
agcctcagctccagg

SEQ ID NO: 774491 - DNA, 15 bp, Homo sapiens
gcctcagctccaggc

SEQ ID NO: 774492 - DNA, 15 bp, Homo sapiens
cctcagctccaggcc

SEQ ID NO: 774493 - DNA, 15 bp, Homo sapiens
ctcagctccaggcct

SEQ ID NO: 774494 - DNA, 15 bp, Homo sapiens
tcagctccaggcctt

SEQ ID NO: 774495 - DNA, 15 bp, Homo sapiens
cagctccaggccttg

SEQ ID NO: 774496 - DNA, 15 bp, Homo sapiens
agctccaggccttga

SEQ ID NO: 774497 - DNA, 15 bp, Homo sapiens
gctccaggccttgaa

SEQ ID NO: 774498 - DNA, 15 bp, Homo sapiens
ctccaggccttgaag

SEQ ID NO: 774499 - DNA, 15 bp, Homo sapiens
tccaggccttgaaga

SEQ ID NO: 774500 - DNA, 15 bp, Homo sapiens
ccaggccttgaagat

SEQ ID NO: 774501 - DNA, 15 bp, Homo sapiens
caggccttgaagatc

SEQ ID NO: 774502 - DNA, 15 bp, Homo sapiens
aggccttgaagatca

SEQ ID NO: 774503 - DNA, 15 bp, Homo sapiens
ggccttgaagatcag

SEQ ID NO: 774504 - DNA, 15 bp, Homo sapiens
gccttgaagatcagg

SEQ ID NO: 774505 - DNA, 15 bp, Homo sapiens
ccttgaagatcaggc

SEQ ID NO: 774506 - DNA, 15 bp, Homo sapiens
cttgaagatcaggcc

SEQ ID NO: 774507 - DNA, 15 bp, Homo sapiens
ttgaagatcaggcct

SEQ ID NO: 774508 - DNA, 15 bp, Homo sapiens
tgaagatcaggcctt

SEQ ID NO: 774509 - DNA, 15 bp, Homo sapiens
gaagatcaggccttg

SEQ ID NO: 774510 - DNA, 15 bp, Homo sapiens
aagatcaggccttga

SEQ ID NO: 774511 - DNA, 15 bp, Homo sapiens
agatcaggccttgag

SEQ ID NO: 774512 - DNA, 15 bp, Homo sapiens
gatcaggccttgagg

SEQ ID NO: 774513 - DNA, 15 bp, Homo sapiens
atcaggccttgagga

SEQ ID NO: 774514 - DNA, 15 bp, Homo sapiens
tcaggccttgaggag

SEQ ID NO: 774515 - DNA, 15 bp, Homo sapiens
caggccttgaggagt

SEQ ID NO: 774516 - DNA, 15 bp, Homo sapiens
aggccttgaggagtt

SEQ ID NO: 774517 - DNA, 15 bp, Homo sapiens
ggccttgaggagttt

SEQ ID NO: 774518 - DNA, 15 bp, Homo sapiens
gccttgaggagtttg

SEQ ID NO: 774519 - DNA, 15 bp, Homo sapiens
ccttgaggagtttga

SEQ ID NO: 774520 - DNA, 15 bp, Homo sapiens
cttgaggagtttgac

SEQ ID NO: 774521 - DNA, 15 bp, Homo sapiens
ttgaggagtttgact

SEQ ID NO: 774522 - DNA, 15 bp, Homo sapiens
tgaggagtttgactt

SEQ ID NO: 774523 - DNA, 15 bp, Homo sapiens
gaggagtttgacttc

SEQ ID NO: 774524 - DNA, 15 bp, Homo sapiens
aggagtttgacttct

SEQ ID NO: 774525 - DNA, 15 bp, Homo sapiens
ggagtttgacttcta

SEQ ID NO: 774526 - DNA, 15 bp, Homo sapiens
gagtttgacttctat

SEQ ID NO: 774527 - DNA, 15 bp, Homo sapiens
agtttgacttctatg

SEQ ID NO: 774528 - DNA, 15 bp, Homo sapiens
gtttgacttctatgc

SEQ ID NO: 774529 - DNA, 15 bp, Homo sapiens
tttgacttctatgct

SEQ ID NO: 774530 - DNA, 15 bp, Homo sapiens
ttgacttctatgctt

SEQ ID NO: 774531 - DNA, 15 bp, Homo sapiens
tgacttctatgctta

SEQ ID NO: 774532 - DNA, 15 bp, Homo sapiens
gacttctatgcttag

SEQ ID NO: 774533 - DNA, 15 bp, Homo sapiens
acttctatgcttagg

SEQ ID NO: 774534 - DNA, 15 bp, Homo sapiens
cttctatgcttaggg

SEQ ID NO: 774535 - DNA, 15 bp, Homo sapiens
ttctatgcttagggc

SEQ ID NO: 774536 - DNA, 15 bp, Homo sapiens
tctatgcttagggca

SEQ ID NO: 774537 - DNA, 15 bp, Homo sapiens
ctatgcttagggcat

SEQ ID NO: 774538 - DNA, 15 bp, Homo sapiens
tatgcttagggcatt

SEQ ID NO: 774539 - DNA, 15 bp, Homo sapiens
atgcttagggcattg

SEQ ID NO: 774540 - DNA, 15 bp, Homo sapiens
tgcttagggcattgt

SEQ ID NO: 774541 - DNA, 15 bp, Homo sapiens
gcttagggcattgtg

SEQ ID NO: 774542 - DNA, 15 bp, Homo sapiens
cttagggcattgtgg

SEQ ID NO: 774543 - DNA, 15 bp, Homo sapiens
ttagggcattgtgga

SEQ ID NO: 774544 - DNA, 15 bp, Homo sapiens
tagggcattgtggac

SEQ ID NO: 774545 - DNA, 15 bp, Homo sapiens
agggcattgtggact

SEQ ID NO: 774546 - DNA, 15 bp, Homo sapiens
gggcattgtggactt

SEQ ID NO: 774547 - DNA, 15 bp, Homo sapiens
ggcattgtggacttg

SEQ ID NO: 774548 - DNA, 15 bp, Homo sapiens
gcattgtggacttgg

SEQ ID NO: 774549 - DNA, 15 bp, Homo sapiens
cattgtggacttggc

SEQ ID NO: 774550 - DNA, 15 bp, Homo sapiens
attgtggacttggca

SEQ ID NO: 774551 - DNA, 15 bp, Homo sapiens
ttgtggacttggcag

SEQ ID NO: 774552 - DNA, 15 bp, Homo sapiens
tgtggacttggcagg

SEQ ID NO: 774553 - DNA, 15 bp, Homo sapiens
gtggacttggcagga

SEQ ID NO: 774554 - DNA, 15 bp, Homo sapiens
tggacttggcaggat

SEQ ID NO: 774555 - DNA, 15 bp, Homo sapiens
ggacttggcaggatt

SEQ ID NO: 774556 - DNA, 15 bp, Homo sapiens
gacttggcaggattt

SEQ ID NO: 774557 - DNA, 15 bp, Homo sapiens
acttggcaggatttt

SEQ ID NO: 774558 - DNA, 15 bp, Homo sapiens
cttggcaggattttt

SEQ ID NO: 774559 - DNA, 15 bp, Homo sapiens
ttggcaggatttttg

SEQ ID NO: 774560 - DNA, 15 bp, Homo sapiens
tggcaggatttttga

SEQ ID NO: 774561 - DNA, 15 bp, Homo sapiens
ggcaggatttttgag

SEQ ID NO: 774562 - DNA, 15 bp, Homo sapiens
gcaggatttttgaga

SEQ ID NO: 774563 - DNA, 15 bp, Homo sapiens
caggatttttgagat

SEQ ID NO: 774564 - DNA, 15 bp, Homo sapiens
aggatttttgagatt

SEQ ID NO: 774565 - DNA, 15 bp, Homo sapiens
ggatttttgagattc

SEQ ID NO: 774566 - DNA, 15 bp, Homo sapiens
gatttttgagattcc

SEQ ID NO: 774567 - DNA, 15 bp, Homo sapiens
atttttgagattcca

SEQ ID NO: 774568 - DNA, 15 bp, Homo sapiens
tttttgagattccag

SEQ ID NO: 774569 - DNA, 15 bp, Homo sapiens
ttttgagattccaga

SEQ ID NO: 774570 - DNA, 15 bp, Homo sapiens
tttgagattccagaa

SEQ ID NO: 774571 - DNA, 15 bp, Homo sapiens
ttgagattccagaag

SEQ ID NO: 774572 - DNA, 15 bp, Homo sapiens
tgagattccagaaga

SEQ ID NO: 774573 - DNA, 15 bp, Homo sapiens
gagattccagaagat

SEQ ID NO: 774574 - DNA, 15 bp, Homo sapiens
agattccagaagata

SEQ ID NO: 774575 - DNA, 15 bp, Homo sapiens
gattccagaagatat

SEQ ID NO: 774576 - DNA, 15 bp, Homo sapiens
attccagaagatatg

SEQ ID NO: 774577 - DNA, 15 bp, Homo sapiens
ttccagaagatatga

SEQ ID NO: 774578 - DNA, 15 bp, Homo sapiens
tccagaagatatgag

SEQ ID NO: 774579 - DNA, 15 bp, Homo sapiens
ccagaagatatgagc

SEQ ID NO: 774580 - DNA, 15 bp, Homo sapiens
cagaagatatgagcg

SEQ ID NO: 774581 - DNA, 15 bp, Homo sapiens
agaagatatgagcga

SEQ ID NO: 774582 - DNA, 15 bp, Homo sapiens
gaagatatgagcgaa

SEQ ID NO: 774583 - DNA, 15 bp, Homo sapiens
aagatatgagcgaag

SEQ ID NO: 774584 - DNA, 15 bp, Homo sapiens
agatatgagcgaaga

SEQ ID NO: 774585 - DNA, 15 bp, Homo sapiens
gatatgagcgaagag

SEQ ID NO: 774586 - DNA, 15 bp, Homo sapiens
atatgagcgaagagt

SEQ ID NO: 774587 - DNA, 15 bp, Homo sapiens
tatgagcgaagagtg

SEQ ID NO: 774588 - DNA, 15 bp, Homo sapiens
atgagcgaagagtga

SEQ ID NO: 774589 - DNA, 15 bp, Homo sapiens
tgagcgaagagtgaa

SEQ ID NO: 774590 - DNA, 15 bp, Homo sapiens
gagcgaagagtgaaa

SEQ ID NO: 774591 - DNA, 15 bp, Homo sapiens
agcgaagagtgaaaa

SEQ ID NO: 774592 - DNA, 15 bp, Homo sapiens
gcgaagagtgaaaac

SEQ ID NO: 774593 - DNA, 15 bp, Homo sapiens
cgaagagtgaaaaca

SEQ ID NO: 774594 - DNA, 15 bp, Homo sapiens
gaagagtgaaaacaa

SEQ ID NO: 774595 - DNA, 15 bp, Homo sapiens
aagagtgaaaacaaa

SEQ ID NO: 774596 - DNA, 15 bp, Homo sapiens
agagtgaaaacaaag

SEQ ID NO: 774597 - DNA, 15 bp, Homo sapiens
gagtgaaaacaaagc

SEQ ID NO: 774598 - DNA, 15 bp, Homo sapiens
agtgaaaacaaagca

SEQ ID NO: 774599 - DNA, 15 bp, Homo sapiens
gtgaaaacaaagcag

SEQ ID NO: 774600 - DNA, 15 bp, Homo sapiens
tgaaaacaaagcagg

SEQ ID NO: 774601 - DNA, 15 bp, Homo sapiens
gaaaacaaagcagga

SEQ ID NO: 774602 - DNA, 15 bp, Homo sapiens
aaaacaaagcaggac

SEQ ID NO: 774603 - DNA, 15 bp, Homo sapiens
aaacaaagcaggaca

SEQ ID NO: 774604 - DNA, 15 bp, Homo sapiens
aacaaagcaggacag

SEQ ID NO: 774605 - DNA, 15 bp, Homo sapiens
acaaagcaggacaga

SEQ ID NO: 774606 - DNA, 15 bp, Homo sapiens
caaagcaggacagaa

SEQ ID NO: 774607 - DNA, 15 bp, Homo sapiens
aaagcaggacagaac

SEQ ID NO: 774608 - DNA, 15 bp, Homo sapiens
aagcaggacagaaca

SEQ ID NO: 774609 - DNA, 15 bp, Homo sapiens
agcaggacagaacaa

SEQ ID NO: 774610 - DNA, 15 bp, Homo sapiens
gcaggacagaacaaa

SEQ ID NO: 774611 - DNA, 15 bp, Homo sapiens
caggacagaacaaaa

SEQ ID NO: 774612 - DNA, 15 bp, Homo sapiens
aggacagaacaaaaa

SEQ ID NO: 774613 - DNA, 15 bp, Homo sapiens
ggacagaacaaaaaa

SEQ ID NO: 774614 - DNA, 15 bp, Homo sapiens
gacagaacaaaaaac

SEQ ID NO: 774615 - DNA, 15 bp, Homo sapiens
acagaacaaaaaaca

SEQ ID NO: 774616 - DNA, 15 bp, Homo sapiens
cagaacaaaaaacag

SEQ ID NO: 774617 - DNA, 15 bp, Homo sapiens
agaacaaaaaacaga

SEQ ID NO: 774618 - DNA, 15 bp, Homo sapiens
gaacaaaaaacagaa

SEQ ID NO: 774619 - DNA, 15 bp, Homo sapiens
aacaaaaaacagaat

SEQ ID NO: 774620 - DNA, 15 bp, Homo sapiens
acaaaaaacagaatt

SEQ ID NO: 774621 - DNA, 15 bp, Homo sapiens
caaaaaacagaattt

SEQ ID NO: 774622 - DNA, 15 bp, Homo sapiens
aaaaaacagaatttc

SEQ ID NO: 774623 - DNA, 15 bp, Homo sapiens
aaaaacagaatttct

SEQ ID NO: 774624 - DNA, 15 bp, Homo sapiens
aaaacagaatttctt

SEQ ID NO: 774625 - DNA, 15 bp, Homo sapiens
aaacagaatttcttc

SEQ ID NO: 774626 - DNA, 15 bp, Homo sapiens
aacagaatttcttca

SEQ ID NO: 774627 - DNA, 15 bp, Homo sapiens
acagaatttcttcat

SEQ ID NO: 774628 - DNA, 15 bp, Homo sapiens
cagaatttcttcatt

SEQ ID NO: 774629 - DNA, 15 bp, Homo sapiens
agaatttcttcattt

SEQ ID NO: 774630 - DNA, 15 bp, Homo sapiens
gaatttcttcattta

SEQ ID NO: 774631 - DNA, 15 bp, Homo sapiens
aatttcttcatttat

SEQ ID NO: 774632 - DNA, 15 bp, Homo sapiens
atttcttcatttatt

SEQ ID NO: 774633 - DNA, 15 bp, Homo sapiens
tttcttcatttatta

SEQ ID NO: 774634 - DNA, 15 bp, Homo sapiens
ttcttcatttattat

SEQ ID NO: 774635 - DNA, 15 bp, Homo sapiens
tcttcatttattatt

SEQ ID NO: 774636 - DNA, 15 bp, Homo sapiens
cttcatttattattt

SEQ ID NO: 774637 - DNA, 15 bp, Homo sapiens
ttcatttattatttc

SEQ ID NO: 774638 - DNA, 15 bp, Homo sapiens
tcatttattatttca

SEQ ID NO: 774639 - DNA, 15 bp, Homo sapiens
catttattatttcag

SEQ ID NO: 774640 - DNA, 15 bp, Homo sapiens
atttattatttcagt

SEQ ID NO: 774641 - DNA, 15 bp, Homo sapiens
tttattatttcagtg

SEQ ID NO: 774642 - DNA, 15 bp, Homo sapiens
ttattatttcagtgc

SEQ ID NO: 774643 - DNA, 15 bp, Homo sapiens
tattatttcagtgca

SEQ ID NO: 774644 - DNA, 15 bp, Homo sapiens
attatttcagtgcac

SEQ ID NO: 774645 - DNA, 15 bp, Homo sapiens
ttatttcagtgcact

SEQ ID NO: 774646 - DNA, 15 bp, Homo sapiens
tatttcagtgcactg

SEQ ID NO: 774647 - DNA, 15 bp, Homo sapiens
atttcagtgcactgt

SEQ ID NO: 774648 - DNA, 15 bp, Homo sapiens
tttcagtgcactgtg

SEQ ID NO: 774649 - DNA, 15 bp, Homo sapiens
ttcagtgcactgtga

SEQ ID NO: 774650 - DNA, 15 bp, Homo sapiens
tcagtgcactgtgaa

SEQ ID NO: 774651 - DNA, 15 bp, Homo sapiens
cagtgcactgtgaaa

SEQ ID NO: 774652 - DNA, 15 bp, Homo sapiens
agtgcactgtgaaat

SEQ ID NO: 774653 - DNA, 15 bp, Homo sapiens
gtgcactgtgaaatg

SEQ ID NO: 774654 - DNA, 15 bp, Homo sapiens
tgcactgtgaaatgc

SEQ ID NO: 774655 - DNA, 15 bp, Homo sapiens
gcactgtgaaatgct

SEQ ID NO: 774656 - DNA, 15 bp, Homo sapiens
cactgtgaaatgctc

SEQ ID NO: 774657 - DNA, 15 bp, Homo sapiens
actgtgaaatgctca

SEQ ID NO: 774658 - DNA, 15 bp, Homo sapiens
ctgtgaaatgctcac

SEQ ID NO: 774659 - DNA, 15 bp, Homo sapiens
tgtgaaatgctcacc

SEQ ID NO: 774660 - DNA, 15 bp, Homo sapiens
gtgaaatgctcaccg

SEQ ID NO: 774661 - DNA, 15 bp, Homo sapiens
tgaaatgctcaccgt

SEQ ID NO: 774662 - DNA, 15 bp, Homo sapiens
gaaatgctcaccgtg

SEQ ID NO: 774663 - DNA, 15 bp, Homo sapiens
aaatgctcaccgtgt

SEQ ID NO: 774664 - DNA, 15 bp, Homo sapiens
aatgctcaccgtgtg

SEQ ID NO: 774665 - DNA, 15 bp, Homo sapiens
atgctcaccgtgtgc

SEQ ID NO: 774666 - DNA, 15 bp, Homo sapiens
tgctcaccgtgtgct

SEQ ID NO: 774667 - DNA, 15 bp, Homo sapiens
gctcaccgtgtgcta

SEQ ID NO: 774668 - DNA, 15 bp, Homo sapiens
ctcaccgtgtgctag

SEQ ID NO: 774669 - DNA, 15 bp, Homo sapiens
tcaccgtgtgctagg

SEQ ID NO: 774670 - DNA, 15 bp, Homo sapiens
caccgtgtgctaggt

SEQ ID NO: 774671 - DNA, 15 bp, Homo sapiens
accgtgtgctaggtg

SEQ ID NO: 774672 - DNA, 15 bp, Homo sapiens
ccgtgtgctaggtgc

SEQ ID NO: 774673 - DNA, 15 bp, Homo sapiens
cgtgtgctaggtgct

SEQ ID NO: 774674 - DNA, 15 bp, Homo sapiens
tgtgctaggtgctgt

SEQ ID NO: 774675 - DNA, 15 bp, Homo sapiens
gtgctaggtgctgtt

SEQ ID NO: 774676 - DNA, 15 bp, Homo sapiens
tgctaggtgctgttc

SEQ ID NO: 774677 - DNA, 15 bp, Homo sapiens
gctaggtgctgttca

SEQ ID NO: 774678 - DNA, 15 bp, Homo sapiens
ctaggtgctgttcag

SEQ ID NO: 774679 - DNA, 15 bp, Homo sapiens
taggtgctgttcagg

SEQ ID NO: 774680 - DNA, 15 bp, Homo sapiens
aggtgctgttcaggc

SEQ ID NO: 774681 - DNA, 15 bp, Homo sapiens
ggtgctgttcaggct

SEQ ID NO: 774682 - DNA, 15 bp, Homo sapiens
gtgctgttcaggctt

SEQ ID NO: 774683 - DNA, 15 bp, Homo sapiens
tgctgttcaggcttt

SEQ ID NO: 774684 - DNA, 15 bp, Homo sapiens
gctgttcaggctttg

SEQ ID NO: 774685 - DNA, 15 bp, Homo sapiens
ctgttcaggctttga

SEQ ID NO: 774686 - DNA, 15 bp, Homo sapiens
tgttcaggctttgag

SEQ ID NO: 774687 - DNA, 15 bp, Homo sapiens
gttcaggctttgagg

SEQ ID NO: 774688 - DNA, 15 bp, Homo sapiens
ttcaggctttgagga

SEQ ID NO: 774689 - DNA, 15 bp, Homo sapiens
tcaggctttgaggat

SEQ ID NO: 774690 - DNA, 15 bp, Homo sapiens
caggctttgaggatg

SEQ ID NO: 774691 - DNA, 15 bp, Homo sapiens
aggctttgaggatgt

SEQ ID NO: 774692 - DNA, 15 bp, Homo sapiens
ggctttgaggatgtg

SEQ ID NO: 774693 - DNA, 15 bp, Homo sapiens
gctttgaggatgtgg

SEQ ID NO: 774694 - DNA, 15 bp, Homo sapiens
ctttgaggatgtgga

SEQ ID NO: 774695 - DNA, 15 bp, Homo sapiens
tttgaggatgtggag

SEQ ID NO: 774696 - DNA, 15 bp, Homo sapiens
ttgaggatgtggagt

SEQ ID NO: 774697 - DNA, 15 bp, Homo sapiens
tgaggatgtggagtg

SEQ ID NO: 774698 - DNA, 15 bp, Homo sapiens
gaggatgtggagtgg

SEQ ID NO: 774699 - DNA, 15 bp, Homo sapiens
aggatgtggagtggg

SEQ ID NO: 774700 - DNA, 15 bp, Homo sapiens
ggatgtggagtgggc

SEQ ID NO: 774701 - DNA, 15 bp, Homo sapiens
gatgtggagtgggca

SEQ ID NO: 774702 - DNA, 15 bp, Homo sapiens
atgtggagtgggcaa

SEQ ID NO: 774703 - DNA, 15 bp, Homo sapiens
tgtggagtgggcaaa

SEQ ID NO: 774704 - DNA, 15 bp, Homo sapiens
gtggagtgggcaaat

SEQ ID NO: 774705 - DNA, 15 bp, Homo sapiens
tggagtgggcaaatc

SEQ ID NO: 774706 - DNA, 15 bp, Homo sapiens
ggagtgggcaaatca

SEQ ID NO: 774707 - DNA, 15 bp, Homo sapiens
gagtgggcaaatcag

SEQ ID NO: 774708 - DNA, 15 bp, Homo sapiens
agtgggcaaatcagg

SEQ ID NO: 774709 - DNA, 15 bp, Homo sapiens
gtgggcaaatcaggc

SEQ ID NO: 774710 - DNA, 15 bp, Homo sapiens
tgggcaaatcaggca

SEQ ID NO: 774711 - DNA, 15 bp, Homo sapiens
gggcaaatcaggcag

SEQ ID NO: 774712 - DNA, 15 bp, Homo sapiens
ggcaaatcaggcaga

SEQ ID NO: 774713 - DNA, 15 bp, Homo sapiens
gcaaatcaggcagac

SEQ ID NO: 774714 - DNA, 15 bp, Homo sapiens
caaatcaggcagact

SEQ ID NO: 774715 - DNA, 15 bp, Homo sapiens
aaatcaggcagactc

SEQ ID NO: 774716 - DNA, 15 bp, Homo sapiens
aatcaggcagactct

SEQ ID NO: 774717 - DNA, 15 bp, Homo sapiens
atcaggcagactctg

SEQ ID NO: 774718 - DNA, 15 bp, Homo sapiens
tcaggcagactctgc

SEQ ID NO: 774719 - DNA, 15 bp, Homo sapiens
caggcagactctgcc

SEQ ID NO: 774720 - DNA, 15 bp, Homo sapiens
aggcagactctgccc

SEQ ID NO: 774721 - DNA, 15 bp, Homo sapiens
ggcagactctgccct

SEQ ID NO: 774722 - DNA, 15 bp, Homo sapiens
gcagactctgccctg

SEQ ID NO: 774723 - DNA, 15 bp, Homo sapiens
cagactctgccctga

SEQ ID NO: 774724 - DNA, 15 bp, Homo sapiens
agactctgccctgac

SEQ ID NO: 774725 - DNA, 15 bp, Homo sapiens
gactctgccctgact

SEQ ID NO: 774726 - DNA, 15 bp, Homo sapiens
actctgccctgactg

SEQ ID NO: 774727 - DNA, 15 bp, Homo sapiens
ctctgccctgactgc

SEQ ID NO: 774728 - DNA, 15 bp, Homo sapiens
tctgccctgactgct

SEQ ID NO: 774729 - DNA, 15 bp, Homo sapiens
ctgccctgactgcta

SEQ ID NO: 774730 - DNA, 15 bp, Homo sapiens
tgccctgactgctag

SEQ ID NO: 774731 - DNA, 15 bp, Homo sapiens
gccctgactgctaga

SEQ ID NO: 774732 - DNA, 15 bp, Homo sapiens
ccctgactgctagag

SEQ ID NO: 774733 - DNA, 15 bp, Homo sapiens
cctgactgctagaga

SEQ ID NO: 774734 - DNA, 15 bp, Homo sapiens
ctgactgctagagaa

SEQ ID NO: 774735 - DNA, 15 bp, Homo sapiens
tgactgctagagaat

SEQ ID NO: 774736 - DNA, 15 bp, Homo sapiens
gactgctagagaata

SEQ ID NO: 774737 - DNA, 15 bp, Homo sapiens
actgctagagaataa

SEQ ID NO: 774738 - DNA, 15 bp, Homo sapiens
ctgctagagaataag

SEQ ID NO: 774739 - DNA, 15 bp, Homo sapiens
tgctagagaataagc

SEQ ID NO: 774740 - DNA, 15 bp, Homo sapiens
gctagagaataagca

SEQ ID NO: 774741 - DNA, 15 bp, Homo sapiens
ctagagaataagcac

SEQ ID NO: 774742 - DNA, 15 bp, Homo sapiens
tagagaataagcaca

SEQ ID NO: 774743 - DNA, 15 bp, Homo sapiens
agagaataagcacac

SEQ ID NO: 774744 - DNA, 15 bp, Homo sapiens
gagaataagcacacg

SEQ ID NO: 774745 - DNA, 15 bp, Homo sapiens
agaataagcacacgt

SEQ ID NO: 774746 - DNA, 15 bp, Homo sapiens
gaataagcacacgtg

SEQ ID NO: 774747 - DNA, 15 bp, Homo sapiens
aataagcacacgtgt

SEQ ID NO: 774748 - DNA, 15 bp, Homo sapiens
ataagcacacgtgtg

SEQ ID NO: 774749 - DNA, 15 bp, Homo sapiens
taagcacacgtgtgt

SEQ ID NO: 774750 - DNA, 15 bp, Homo sapiens
aagcacacgtgtgtg

SEQ ID NO: 774751 - DNA, 15 bp, Homo sapiens
agcacacgtgtgtga

SEQ ID NO: 774752 - DNA, 15 bp, Homo sapiens
gcacacgtgtgtgat

SEQ ID NO: 774753 - DNA, 15 bp, Homo sapiens
cacacgtgtgtgatg

SEQ ID NO: 774754 - DNA, 15 bp, Homo sapiens
acacgtgtgtgatga

SEQ ID NO: 774755 - DNA, 15 bp, Homo sapiens
cacgtgtgtgatgaa

SEQ ID NO: 774756 - DNA, 15 bp, Homo sapiens
acgtgtgtgatgaag

SEQ ID NO: 774757 - DNA, 15 bp, Homo sapiens
cgtgtgtgatgaagg

SEQ ID NO: 774758 - DNA, 15 bp, Homo sapiens
gtgtgtgatgaaggt

SEQ ID NO: 774759 - DNA, 15 bp, Homo sapiens
tgtgtgatgaaggtg

SEQ ID NO: 774760 - DNA, 15 bp, Homo sapiens
gtgtgatgaaggtgg

SEQ ID NO: 774761 - DNA, 15 bp, Homo sapiens
tgtgatgaaggtggt

SEQ ID NO: 774762 - DNA, 15 bp, Homo sapiens
gtgatgaaggtggta

SEQ ID NO: 774763 - DNA, 15 bp, Homo sapiens
tgatgaaggtggtag

SEQ ID NO: 774764 - DNA, 15 bp, Homo sapiens
gatgaaggtggtagt

SEQ ID NO: 774765 - DNA, 15 bp, Homo sapiens
atgaaggtggtagtg

SEQ ID NO: 774766 - DNA, 15 bp, Homo sapiens
tgaaggtggtagtgg

SEQ ID NO: 774767 - DNA, 15 bp, Homo sapiens
gaaggtggtagtggt

SEQ ID NO: 774768 - DNA, 15 bp, Homo sapiens
aaggtggtagtggtg

SEQ ID NO: 774769 - DNA, 15 bp, Homo sapiens
aggtggtagtggtgg

SEQ ID NO: 774770 - DNA, 15 bp, Homo sapiens
ggtggtagtggtggg

SEQ ID NO: 774771 - DNA, 15 bp, Homo sapiens
gtggtagtggtggga

SEQ ID NO: 774772 - DNA, 15 bp, Homo sapiens
tggtagtggtgggaa

SEQ ID NO: 774773 - DNA, 15 bp, Homo sapiens
ggtagtggtgggaag

SEQ ID NO: 774774 - DNA, 15 bp, Homo sapiens
gtagtggtgggaagc

SEQ ID NO: 774775 - DNA, 15 bp, Homo sapiens
tagtggtgggaagca

SEQ ID NO: 774776 - DNA, 15 bp, Homo sapiens
agtggtgggaagcaa

SEQ ID NO: 774777 - DNA, 15 bp, Homo sapiens
gtggtgggaagcaaa

SEQ ID NO: 774778 - DNA, 15 bp, Homo sapiens
tggtgggaagcaaag

SEQ ID NO: 774779 - DNA, 15 bp, Homo sapiens
ggtgggaagcaaaga

SEQ ID NO: 774780 - DNA, 15 bp, Homo sapiens
gtgggaagcaaagaa

SEQ ID NO: 774781 - DNA, 15 bp, Homo sapiens
tgggaagcaaagaac

SEQ ID NO: 774782 - DNA, 15 bp, Homo sapiens
gggaagcaaagaaca

SEQ ID NO: 774783 - DNA, 15 bp, Homo sapiens
ggaagcaaagaacag

SEQ ID NO: 774784 - DNA, 15 bp, Homo sapiens
gaagcaaagaacagc

SEQ ID NO: 774785 - DNA, 15 bp, Homo sapiens
aagcaaagaacagca

SEQ ID NO: 774786 - DNA, 15 bp, Homo sapiens
agcaaagaacagcag

SEQ ID NO: 774787 - DNA, 15 bp, Homo sapiens
gcaaagaacagcagc

SEQ ID NO: 774788 - DNA, 15 bp, Homo sapiens
caaagaacagcagcg

SEQ ID NO: 774789 - DNA, 15 bp, Homo sapiens
aaagaacagcagcga

SEQ ID NO: 774790 - DNA, 15 bp, Homo sapiens
aagaacagcagcgaa

SEQ ID NO: 774791 - DNA, 15 bp, Homo sapiens
agaacagcagcgaag

SEQ ID NO: 774792 - DNA, 15 bp, Homo sapiens
gaacagcagcgaagg

SEQ ID NO: 774793 - DNA, 15 bp, Homo sapiens
aacagcagcgaaggg

SEQ ID NO: 774794 - DNA, 15 bp, Homo sapiens
acagcagcgaagggg

SEQ ID NO: 774795 - DNA, 15 bp, Homo sapiens
cagcagcgaagggga

SEQ ID NO: 774796 - DNA, 15 bp, Homo sapiens
agcagcgaaggggat

SEQ ID NO: 774797 - DNA, 15 bp, Homo sapiens
gcagcgaaggggatg

SEQ ID NO: 774798 - DNA, 15 bp, Homo sapiens
cagcgaaggggatga

SEQ ID NO: 774799 - DNA, 15 bp, Homo sapiens
agcgaaggggatgac

SEQ ID NO: 774800 - DNA, 15 bp, Homo sapiens
gcgaaggggatgacc

SEQ ID NO: 774801 - DNA, 15 bp, Homo sapiens
cgaaggggatgaccg

SEQ ID NO: 774802 - DNA, 15 bp, Homo sapiens
gaaggggatgaccgt

SEQ ID NO: 774803 - DNA, 15 bp, Homo sapiens
aaggggatgaccgtg

SEQ ID NO: 774804 - DNA, 15 bp, Homo sapiens
aggggatgaccgtgt

SEQ ID NO: 774805 - DNA, 15 bp, Homo sapiens
ggggatgaccgtgtt

SEQ ID NO: 774806 - DNA, 15 bp, Homo sapiens
gggatgaccgtgttc

SEQ ID NO: 774807 - DNA, 15 bp, Homo sapiens
ggatgaccgtgttcc

SEQ ID NO: 774808 - DNA, 15 bp, Homo sapiens
gatgaccgtgttccc

SEQ ID NO: 774809 - DNA, 15 bp, Homo sapiens
atgaccgtgttccct

SEQ ID NO: 774810 - DNA, 15 bp, Homo sapiens
tgaccgtgttccctt

SEQ ID NO: 774811 - DNA, 15 bp, Homo sapiens
gaccgtgttcccttc

SEQ ID NO: 774812 - DNA, 15 bp, Homo sapiens
accgtgttcccttcc

SEQ ID NO: 774813 - DNA, 15 bp, Homo sapiens
ccgtgttcccttccg

SEQ ID NO: 774814 - DNA, 15 bp, Homo sapiens
cgtgttcccttccgt

SEQ ID NO: 774815 - DNA, 15 bp, Homo sapiens
gtgttcccttccgtg

SEQ ID NO: 774816 - DNA, 15 bp, Homo sapiens
tgttcccttccgtgt

SEQ ID NO: 774817 - DNA, 15 bp, Homo sapiens
gttcccttccgtgtg

SEQ ID NO: 774818 - DNA, 15 bp, Homo sapiens
ttcccttccgtgtgg

SEQ ID NO: 774819 - DNA, 15 bp, Homo sapiens
tcccttccgtgtggg

SEQ ID NO: 774820 - DNA, 15 bp, Homo sapiens
cccttccgtgtgggg

SEQ ID NO: 774821 - DNA, 15 bp, Homo sapiens
ccttccgtgtggggc

SEQ ID NO: 774822 - DNA, 15 bp, Homo sapiens
cttccgtgtggggca

SEQ ID NO: 774823 - DNA, 15 bp, Homo sapiens
ttccgtgtggggcac

SEQ ID NO: 774824 - DNA, 15 bp, Homo sapiens
tccgtgtggggcact

SEQ ID NO: 774825 - DNA, 15 bp, Homo sapiens
ccgtgtggggcactg

SEQ ID NO: 774826 - DNA, 15 bp, Homo sapiens
cgtgtggggcactgg

SEQ ID NO: 774827 - DNA, 15 bp, Homo sapiens
gtgtggggcactggg

SEQ ID NO: 774828 - DNA, 15 bp, Homo sapiens
tgtggggcactgggc

SEQ ID NO: 774829 - DNA, 15 bp, Homo sapiens
gtggggcactgggct

SEQ ID NO: 774830 - DNA, 15 bp, Homo sapiens
tggggcactgggctg

SEQ ID NO: 774831 - DNA, 15 bp, Homo sapiens
ggggcactgggctgt

SEQ ID NO: 774832 - DNA, 15 bp, Homo sapiens
gggcactgggctgtg

SEQ ID NO: 774833 - DNA, 15 bp, Homo sapiens
ggcactgggctgtga

SEQ ID NO: 774834 - DNA, 15 bp, Homo sapiens
gcactgggctgtgac

SEQ ID NO: 774835 - DNA, 15 bp, Homo sapiens
cactgggctgtgact

SEQ ID NO: 774836 - DNA, 15 bp, Homo sapiens
actgggctgtgactt

SEQ ID NO: 774837 - DNA, 15 bp, Homo sapiens
ctgggctgtgactta

SEQ ID NO: 774838 - DNA, 15 bp, Homo sapiens
tgggctgtgacttac

SEQ ID NO: 774839 - DNA, 15 bp, Homo sapiens
gggctgtgacttaca

SEQ ID NO: 774840 - DNA, 15 bp, Homo sapiens
ggctgtgacttacat

SEQ ID NO: 774841 - DNA, 15 bp, Homo sapiens
gctgtgacttacatt

SEQ ID NO: 774842 - DNA, 15 bp, Homo sapiens
ctgtgacttacattg

SEQ ID NO: 774843 - DNA, 15 bp, Homo sapiens
tgtgacttacattgc

SEQ ID NO: 774844 - DNA, 15 bp, Homo sapiens
gtgacttacattgct

SEQ ID NO: 774845 - DNA, 15 bp, Homo sapiens
tgacttacattgctc

SEQ ID NO: 774846 - DNA, 15 bp, Homo sapiens
gacttacattgctct

SEQ ID NO: 774847 - DNA, 15 bp, Homo sapiens
acttacattgctctc

SEQ ID NO: 774848 - DNA, 15 bp, Homo sapiens
cttacattgctctcg

SEQ ID NO: 774849 - DNA, 15 bp, Homo sapiens
ttacattgctctcgg

SEQ ID NO: 774850 - DNA, 15 bp, Homo sapiens
tacattgctctcggg

SEQ ID NO: 774851 - DNA, 15 bp, Homo sapiens
acattgctctcgggt

SEQ ID NO: 774852 - DNA, 15 bp, Homo sapiens
cattgctctcgggtt

SEQ ID NO: 774853 - DNA, 15 bp, Homo sapiens
attgctctcgggtta

SEQ ID NO: 774854 - DNA, 15 bp, Homo sapiens
ttgctctcgggttac

SEQ ID NO: 774855 - DNA, 15 bp, Homo sapiens
tgctctcgggttact

SEQ ID NO: 774856 - DNA, 15 bp, Homo sapiens
gctctcgggttactc

SEQ ID NO: 774857 - DNA, 15 bp, Homo sapiens
ctctcgggttactca

SEQ ID NO: 774858 - DNA, 15 bp, Homo sapiens
acttatatggagatg

SEQ ID NO: 774859 - DNA, 15 bp, Homo sapiens
cttatatggagatgt

SEQ ID NO: 774860 - DNA, 15 bp, Homo sapiens
ttatatggagatgta

SEQ ID NO: 774861 - DNA, 15 bp, Homo sapiens
tatatggagatgtaa

SEQ ID NO: 774862 - DNA, 15 bp, Homo sapiens
atatggagatgtaaa

SEQ ID NO: 774863 - DNA, 15 bp, Homo sapiens
tatggagatgtaaat

SEQ ID NO: 774864 - DNA, 15 bp, Homo sapiens
atggagatgtaaatt

SEQ ID NO: 774865 - DNA, 15 bp, Homo sapiens
tggagatgtaaatta

SEQ ID NO: 774866 - DNA, 15 bp, Homo sapiens
ggagatgtaaattag

SEQ ID NO: 774867 - DNA, 15 bp, Homo sapiens
gagatgtaaattagt

SEQ ID NO: 774868 - DNA, 15 bp, Homo sapiens
agatgtaaattagta

SEQ ID NO: 774869 - DNA, 15 bp, Homo sapiens
gatgtaaattagtac

SEQ ID NO: 774870 - DNA, 15 bp, Homo sapiens
atgtaaattagtaca

SEQ ID NO: 774871 - DNA, 15 bp, Homo sapiens
tgtaaattagtacaa

SEQ ID NO: 774872 - DNA, 15 bp, Homo sapiens
gtaaattagtacaac

SEQ ID NO: 774873 - DNA, 15 bp, Homo sapiens
taaattagtacaacc

SEQ ID NO: 774874 - DNA, 15 bp, Homo sapiens
aaattagtacaacct

SEQ ID NO: 774875 - DNA, 15 bp, Homo sapiens
aattagtacaacctc

SEQ ID NO: 774876 - DNA, 15 bp, Homo sapiens
attagtacaacctct

SEQ ID NO: 774877 - DNA, 15 bp, Homo sapiens
ttagtacaacctcta

SEQ ID NO: 774878 - DNA, 15 bp, Homo sapiens
tagtacaacctctat

SEQ ID NO: 774879 - DNA, 15 bp, Homo sapiens
agtacaacctctatg

SEQ ID NO: 774880 - DNA, 15 bp, Homo sapiens
gtacaacctctatga

SEQ ID NO: 774881 - DNA, 15 bp, Homo sapiens
tacaacctctatgaa

SEQ ID NO: 774882 - DNA, 15 bp, Homo sapiens
acaacctctatgaaa

SEQ ID NO: 774883 - DNA, 15 bp, Homo sapiens
caacctctatgaaaa

SEQ ID NO: 774884 - DNA, 15 bp, Homo sapiens
aacctctatgaaaaa

SEQ ID NO: 774885 - DNA, 15 bp, Homo sapiens
acctctatgaaaaac

SEQ ID NO: 774886 - DNA, 15 bp, Homo sapiens
cctctatgaaaaaca

SEQ ID NO: 774887 - DNA, 15 bp, Homo sapiens
ctctatgaaaaacag

SEQ ID NO: 774888 - DNA, 15 bp, Homo sapiens
tctatgaaaaacagc

SEQ ID NO: 774889 - DNA, 15 bp, Homo sapiens
ctatgaaaaacagca

SEQ ID NO: 774890 - DNA, 15 bp, Homo sapiens
tatgaaaaacagcac

SEQ ID NO: 774891 - DNA, 15 bp, Homo sapiens
atgaaaaacagcaca

SEQ ID NO: 774892 - DNA, 15 bp, Homo sapiens
tgaaaaacagcacag

SEQ ID NO: 774893 - DNA, 15 bp, Homo sapiens
gaaaaacagcacaga

SEQ ID NO: 774894 - DNA, 15 bp, Homo sapiens
aaaaacagcacagaa

SEQ ID NO: 774895 - DNA, 15 bp, Homo sapiens
aaaacagcacagaaa

SEQ ID NO: 774896 - DNA, 15 bp, Homo sapiens
aaacagcacagaaat

SEQ ID NO: 774897 - DNA, 15 bp, Homo sapiens
aacagcacagaaatt

SEQ ID NO: 774898 - DNA, 15 bp, Homo sapiens
acagcacagaaattt

SEQ ID NO: 774899 - DNA, 15 bp, Homo sapiens
cagcacagaaatttc

SEQ ID NO: 774900 - DNA, 15 bp, Homo sapiens
agcacagaaatttct

SEQ ID NO: 774901 - DNA, 15 bp, Homo sapiens
gcacagaaatttctc

SEQ ID NO: 774902 - DNA, 15 bp, Homo sapiens
cacagaaatttctca

SEQ ID NO: 774903 - DNA, 15 bp, Homo sapiens
acagaaatttctcaa

SEQ ID NO: 774904 - DNA, 15 bp, Homo sapiens
cagaaatttctcaaa

SEQ ID NO: 774905 - DNA, 15 bp, Homo sapiens
agaaatttctcaaag

SEQ ID NO: 774906 - DNA, 15 bp, Homo sapiens
gaaatttctcaaaga

SEQ ID NO: 774907 - DNA, 15 bp, Homo sapiens
aaatttctcaaagaa

SEQ ID NO: 774908 - DNA, 15 bp, Homo sapiens
aatttctcaaagaag

SEQ ID NO: 774909 - DNA, 15 bp, Homo sapiens
atttctcaaagaagt

SEQ ID NO: 774910 - DNA, 15 bp, Homo sapiens
tttctcaaagaagtg

SEQ ID NO: 774911 - DNA, 15 bp, Homo sapiens
ttctcaaagaagtga

SEQ ID NO: 774912 - DNA, 15 bp, Homo sapiens
tctcaaagaagtgaa

SEQ ID NO: 774913 - DNA, 15 bp, Homo sapiens
ctcaaagaagtgaaa

SEQ ID NO: 774914 - DNA, 15 bp, Homo sapiens
tcaaagaagtgaaaa

SEQ ID NO: 774915 - DNA, 15 bp, Homo sapiens
caaagaagtgaaaac

SEQ ID NO: 774916 - DNA, 15 bp, Homo sapiens
aaagaagtgaaaaca

SEQ ID NO: 774917 - DNA, 15 bp, Homo sapiens
aagaagtgaaaacag

SEQ ID NO: 774918 - DNA, 15 bp, Homo sapiens
agaagtgaaaacaga

SEQ ID NO: 774919 - DNA, 15 bp, Homo sapiens
gaagtgaaaacagaa

SEQ ID NO: 774920 - DNA, 15 bp, Homo sapiens
aagtgaaaacagaac

SEQ ID NO: 774921 - DNA, 15 bp, Homo sapiens
agtgaaaacagaact

SEQ ID NO: 774922 - DNA, 15 bp, Homo sapiens
gtgaaaacagaactt

SEQ ID NO: 774923 - DNA, 15 bp, Homo sapiens
tgaaaacagaacttc

SEQ ID NO: 774924 - DNA, 15 bp, Homo sapiens
gaaaacagaacttcc

SEQ ID NO: 774925 - DNA, 15 bp, Homo sapiens
aaaacagaacttcca

SEQ ID NO: 774926 - DNA, 15 bp, Homo sapiens
aaacagaacttccat

SEQ ID NO: 774927 - DNA, 15 bp, Homo sapiens
aacagaacttccatt

SEQ ID NO: 774928 - DNA, 15 bp, Homo sapiens
acagaacttccattt

SEQ ID NO: 774929 - DNA, 15 bp, Homo sapiens
cagaacttccatttg

SEQ ID NO: 774930 - DNA, 15 bp, Homo sapiens
agaacttccatttga

SEQ ID NO: 774931 - DNA, 15 bp, Homo sapiens
gaacttccatttgat

SEQ ID NO: 774932 - DNA, 15 bp, Homo sapiens
aacttccatttgatc

SEQ ID NO: 774933 - DNA, 15 bp, Homo sapiens
acttccatttgatcc

SEQ ID NO: 774934 - DNA, 15 bp, Homo sapiens
cttccatttgatcca

SEQ ID NO: 774935 - DNA, 15 bp, Homo sapiens
ttccatttgatccag

SEQ ID NO: 774936 - DNA, 15 bp, Homo sapiens
tccatttgatccagc

SEQ ID NO: 774937 - DNA, 15 bp, Homo sapiens
ccatttgatccagca

SEQ ID NO: 774938 - DNA, 15 bp, Homo sapiens
catttgatccagcat

SEQ ID NO: 774939 - DNA, 15 bp, Homo sapiens
atttgatccagcatt

SEQ ID NO: 774940 - DNA, 15 bp, Homo sapiens
tttgatccagcattt

SEQ ID NO: 774941 - DNA, 15 bp, Homo sapiens
ttgatccagcatttc

SEQ ID NO: 774942 - DNA, 15 bp, Homo sapiens
tgatccagcatttct

SEQ ID NO: 774943 - DNA, 15 bp, Homo sapiens
gatccagcatttcta

SEQ ID NO: 774944 - DNA, 15 bp, Homo sapiens
atccagcatttctac

SEQ ID NO: 774945 - DNA, 15 bp, Homo sapiens
tccagcatttctact

SEQ ID NO: 774946 - DNA, 15 bp, Homo sapiens
ccagcatttctacta

SEQ ID NO: 774947 - DNA, 15 bp, Homo sapiens
cagcatttctactaa

SEQ ID NO: 774948 - DNA, 15 bp, Homo sapiens
agcatttctactaat

SEQ ID NO: 774949 - DNA, 15 bp, Homo sapiens
gcatttctactaatt

SEQ ID NO: 774950 - DNA, 15 bp, Homo sapiens
catttctactaattg

SEQ ID NO: 774951 - DNA, 15 bp, Homo sapiens
atttctactaattgg

SEQ ID NO: 774952 - DNA, 15 bp, Homo sapiens
tttctactaattggt

SEQ ID NO: 774953 - DNA, 15 bp, Homo sapiens
ttctactaattggtg

SEQ ID NO: 774954 - DNA, 15 bp, Homo sapiens
tctactaattggtgg

SEQ ID NO: 774955 - DNA, 15 bp, Homo sapiens
ctactaattggtggc

SEQ ID NO: 774956 - DNA, 15 bp, Homo sapiens
tactaattggtggct

SEQ ID NO: 774957 - DNA, 15 bp, Homo sapiens
actaattggtggcta

SEQ ID NO: 774958 - DNA, 15 bp, Homo sapiens
ctaattggtggctac

SEQ ID NO: 774959 - DNA, 15 bp, Homo sapiens
taattggtggctacc

SEQ ID NO: 774960 - DNA, 15 bp, Homo sapiens
aattggtggctaccc

SEQ ID NO: 774961 - DNA, 15 bp, Homo sapiens
attggtggctaccca

SEQ ID NO: 774962 - DNA, 15 bp, Homo sapiens
ttggtggctacccat

SEQ ID NO: 774963 - DNA, 15 bp, Homo sapiens
tggtggctacccata

SEQ ID NO: 774964 - DNA, 15 bp, Homo sapiens
ggtggctacccatag

SEQ ID NO: 774965 - DNA, 15 bp, Homo sapiens
gtggctacccatagg

SEQ ID NO: 774966 - DNA, 15 bp, Homo sapiens
tggctacccatagga

SEQ ID NO: 774967 - DNA, 15 bp, Homo sapiens
ggctacccataggaa

SEQ ID NO: 774968 - DNA, 15 bp, Homo sapiens
gctacccataggaaa

SEQ ID NO: 774969 - DNA, 15 bp, Homo sapiens
ctacccataggaaaa

SEQ ID NO: 774970 - DNA, 15 bp, Homo sapiens
tacccataggaaaag

SEQ ID NO: 774971 - DNA, 15 bp, Homo sapiens
acccataggaaaaga

SEQ ID NO: 774972 - DNA, 15 bp, Homo sapiens
cccataggaaaagaa

SEQ ID NO: 774973 - DNA, 15 bp, Homo sapiens
ccataggaaaagaaa

SEQ ID NO: 774974 - DNA, 15 bp, Homo sapiens
cataggaaaagaaat

SEQ ID NO: 774975 - DNA, 15 bp, Homo sapiens
ataggaaaagaaatc

SEQ ID NO: 774976 - DNA, 15 bp, Homo sapiens
taggaaaagaaatca

SEQ ID NO: 774977 - DNA, 15 bp, Homo sapiens
aggaaaagaaatcat

SEQ ID NO: 774978 - DNA, 15 bp, Homo sapiens
ggaaaagaaatcatt

SEQ ID NO: 774979 - DNA, 15 bp, Homo sapiens
gaaaagaaatcatta

SEQ ID NO: 774980 - DNA, 15 bp, Homo sapiens
aaaagaaatcattat

SEQ ID NO: 774981 - DNA, 15 bp, Homo sapiens
aaagaaatcattata

SEQ ID NO: 774982 - DNA, 15 bp, Homo sapiens
aagaaatcattatat

SEQ ID NO: 774983 - DNA, 15 bp, Homo sapiens
agaaatcattatata

SEQ ID NO: 774984 - DNA, 15 bp, Homo sapiens
gaaatcattatataa

SEQ ID NO: 774985 - DNA, 15 bp, Homo sapiens
aaatcattatataag

SEQ ID NO: 774986 - DNA, 15 bp, Homo sapiens
aatcattatataaga

SEQ ID NO: 774987 - DNA, 15 bp, Homo sapiens
atcattatataagaa

SEQ ID NO: 774988 - DNA, 15 bp, Homo sapiens
tcattatataagaaa

SEQ ID NO: 774989 - DNA, 15 bp, Homo sapiens
cattatataagaaag

SEQ ID NO: 774990 - DNA, 15 bp, Homo sapiens
attatataagaaaga

SEQ ID NO: 774991 - DNA, 15 bp, Homo sapiens
ttatataagaaagat

SEQ ID NO: 774992 - DNA, 15 bp, Homo sapiens
tatataagaaagata

SEQ ID NO: 774993 - DNA, 15 bp, Homo sapiens
atataagaaagatac

SEQ ID NO: 774994 - DNA, 15 bp, Homo sapiens
tataagaaagatacc

SEQ ID NO: 774995 - DNA, 15 bp, Homo sapiens
ataagaaagatacct

SEQ ID NO: 774996 - DNA, 15 bp, Homo sapiens
taagaaagatacctg

SEQ ID NO: 774997 - DNA, 15 bp, Homo sapiens
aagaaagatacctga

SEQ ID NO: 774998 - DNA, 15 bp, Homo sapiens
agaaagatacctgaa

SEQ ID NO: 774999 - DNA, 15 bp, Homo sapiens
gaaagatacctgaac

SEQ ID NO: 775000 - DNA, 15 bp, Homo sapiens
aaagatacctgaact

SEQ ID NO: 775001 - DNA, 15 bp, Homo sapiens
aagatacctgaactc

SEQ ID NO: 775002 - DNA, 15 bp, Homo sapiens
agatacctgaactcc

SEQ ID NO: 775003 - DNA, 15 bp, Homo sapiens
gatacctgaactcct

SEQ ID NO: 775004 - DNA, 15 bp, Homo sapiens
atacctgaactccta

SEQ ID NO: 775005 - DNA, 15 bp, Homo sapiens
tacctgaactcctat

SEQ ID NO: 775006 - DNA, 15 bp, Homo sapiens
acctgaactcctatg

SEQ ID NO: 775007 - DNA, 15 bp, Homo sapiens
cctgaactcctatgt

SEQ ID NO: 775008 - DNA, 15 bp, Homo sapiens
ctgaactcctatgtt

SEQ ID NO: 775009 - DNA, 15 bp, Homo sapiens
tgaactcctatgttt

SEQ ID NO: 775010 - DNA, 15 bp, Homo sapiens
gaactcctatgttta

SEQ ID NO: 775011 - DNA, 15 bp, Homo sapiens
aactcctatgtttat

SEQ ID NO: 775012 - DNA, 15 bp, Homo sapiens
actcctatgtttatc

SEQ ID NO: 775013 - DNA, 15 bp, Homo sapiens
ctcctatgtttatca

SEQ ID NO: 775014 - DNA, 15 bp, Homo sapiens
tcctatgtttatcac

SEQ ID NO: 775015 - DNA, 15 bp, Homo sapiens
cctatgtttatcaca

SEQ ID NO: 775016 - DNA, 15 bp, Homo sapiens
ctatgtttatcacaa

SEQ ID NO: 775017 - DNA, 15 bp, Homo sapiens
tatgtttatcacaac

SEQ ID NO: 775018 - DNA, 15 bp, Homo sapiens
atgtttatcacaaca

SEQ ID NO: 775019 - DNA, 15 bp, Homo sapiens
tgtttatcacaacac

SEQ ID NO: 775020 - DNA, 15 bp, Homo sapiens
gtttatcacaacact

SEQ ID NO: 775021 - DNA, 15 bp, Homo sapiens
tttatcacaacacta

SEQ ID NO: 775022 - DNA, 15 bp, Homo sapiens
ttatcacaacactac

SEQ ID NO: 775023 - DNA, 15 bp, Homo sapiens
tatcacaacactact

SEQ ID NO: 775024 - DNA, 15 bp, Homo sapiens
atcacaacactactc

SEQ ID NO: 775025 - DNA, 15 bp, Homo sapiens
tcacaacactactca

SEQ ID NO: 775026 - DNA, 15 bp, Homo sapiens
cacaacactactcac

SEQ ID NO: 775027 - DNA, 15 bp, Homo sapiens
acaacactactcaca

SEQ ID NO: 775028 - DNA, 15 bp, Homo sapiens
caacactactcacaa

SEQ ID NO: 775029 - DNA, 15 bp, Homo sapiens
aacactactcacaat

SEQ ID NO: 775030 - DNA, 15 bp, Homo sapiens
acactactcacaata

SEQ ID NO: 775031 - DNA, 15 bp, Homo sapiens
cactactcacaatag

SEQ ID NO: 775032 - DNA, 15 bp, Homo sapiens
actactcacaatagc

SEQ ID NO: 775033 - DNA, 15 bp, Homo sapiens
ctactcacaatagca

SEQ ID NO: 775034 - DNA, 15 bp, Homo sapiens
tactcacaatagcaa

SEQ ID NO: 775035 - DNA, 15 bp, Homo sapiens
actcacaatagcaaa

SEQ ID NO: 775036 - DNA, 15 bp, Homo sapiens
ctcacaatagcaaag

SEQ ID NO: 775037 - DNA, 15 bp, Homo sapiens
tcacaatagcaaagc

SEQ ID NO: 775038 - DNA, 15 bp, Homo sapiens
cacaatagcaaagct

SEQ ID NO: 775039 - DNA, 15 bp, Homo sapiens
acaatagcaaagcta

SEQ ID NO: 775040 - DNA, 15 bp, Homo sapiens
caatagcaaagctat

SEQ ID NO: 775041 - DNA, 15 bp, Homo sapiens
aatagcaaagctatg

SEQ ID NO: 775042 - DNA, 15 bp, Homo sapiens
atagcaaagctatgg

SEQ ID NO: 775043 - DNA, 15 bp, Homo sapiens
tagcaaagctatgga

SEQ ID NO: 775044 - DNA, 15 bp, Homo sapiens
agcaaagctatggaa

SEQ ID NO: 775045 - DNA, 15 bp, Homo sapiens
gcaaagctatggaat

SEQ ID NO: 775046 - DNA, 15 bp, Homo sapiens
caaagctatggaatc

SEQ ID NO: 775047 - DNA, 15 bp, Homo sapiens
aaagctatggaatca

SEQ ID NO: 775048 - DNA, 15 bp, Homo sapiens
aagctatggaatcaa

SEQ ID NO: 775049 - DNA, 15 bp, Homo sapiens
agctatggaatcaac

SEQ ID NO: 775050 - DNA, 15 bp, Homo sapiens
gctatggaatcaacc

SEQ ID NO: 775051 - DNA, 15 bp, Homo sapiens
ctatggaatcaaccc

SEQ ID NO: 775052 - DNA, 15 bp, Homo sapiens
tatggaatcaaccca

SEQ ID NO: 775053 - DNA, 15 bp, Homo sapiens
atggaatcaacccaa

SEQ ID NO: 775054 - DNA, 15 bp, Homo sapiens
tggaatcaacccaag

SEQ ID NO: 775055 - DNA, 15 bp, Homo sapiens
ggaatcaacccaagg

SEQ ID NO: 775056 - DNA, 15 bp, Homo sapiens
gaatcaacccaaggg

SEQ ID NO: 775057 - DNA, 15 bp, Homo sapiens
aatcaacccaagggt

SEQ ID NO: 775058 - DNA, 15 bp, Homo sapiens
atcaacccaagggtc

SEQ ID NO: 775059 - DNA, 15 bp, Homo sapiens
tcaacccaagggtcc

SEQ ID NO: 775060 - DNA, 15 bp, Homo sapiens
caacccaagggtcca

SEQ ID NO: 775061 - DNA, 15 bp, Homo sapiens
aacccaagggtccat

SEQ ID NO: 775062 - DNA, 15 bp, Homo sapiens
acccaagggtccatc

SEQ ID NO: 775063 - DNA, 15 bp, Homo sapiens
cccaagggtccatca

SEQ ID NO: 775064 - DNA, 15 bp, Homo sapiens
ccaagggtccatcag

SEQ ID NO: 775065 - DNA, 15 bp, Homo sapiens
caagggtccatcagt

SEQ ID NO: 775066 - DNA, 15 bp, Homo sapiens
aagggtccatcagtg

SEQ ID NO: 775067 - DNA, 15 bp, Homo sapiens
agggtccatcagtgg

SEQ ID NO: 775068 - DNA, 15 bp, Homo sapiens
gggtccatcagtgga

SEQ ID NO: 775069 - DNA, 15 bp, Homo sapiens
ggtccatcagtggat

SEQ ID NO: 775070 - DNA, 15 bp, Homo sapiens
gtccatcagtggatg

SEQ ID NO: 775071 - DNA, 15 bp, Homo sapiens
tccatcagtggatga

SEQ ID NO: 775072 - DNA, 15 bp, Homo sapiens
ccatcagtggatgat

SEQ ID NO: 775073 - DNA, 15 bp, Homo sapiens
catcagtggatgatt

SEQ ID NO: 775074 - DNA, 15 bp, Homo sapiens
atcagtggatgatta

SEQ ID NO: 775075 - DNA, 15 bp, Homo sapiens
tcagtggatgattaa

SEQ ID NO: 775076 - DNA, 15 bp, Homo sapiens
cagtggatgattaaa

SEQ ID NO: 775077 - DNA, 15 bp, Homo sapiens
agtggatgattaaat

SEQ ID NO: 775078 - DNA, 15 bp, Homo sapiens
gtggatgattaaata

SEQ ID NO: 775079 - DNA, 15 bp, Homo sapiens
tggatgattaaataa

SEQ ID NO: 775080 - DNA, 15 bp, Homo sapiens
ggatgattaaataaa

SEQ ID NO: 775081 - DNA, 15 bp, Homo sapiens
gatgattaaataaag

SEQ ID NO: 775082 - DNA, 15 bp, Homo sapiens
atgattaaataaaga

SEQ ID NO: 775083 - DNA, 15 bp, Homo sapiens
tgattaaataaagaa

SEQ ID NO: 775084 - DNA, 15 bp, Homo sapiens
gattaaataaagaaa

SEQ ID NO: 775085 - DNA, 15 bp, Homo sapiens
attaaataaagaaaa

SEQ ID NO: 775086 - DNA, 15 bp, Homo sapiens
ttaaataaagaaaaa

SEQ ID NO: 775087 - DNA, 15 bp, Homo sapiens
taaataaagaaaaaa

SEQ ID NO: 775088 - DNA, 15 bp, Homo sapiens
aaataaagaaaaaaa

SEQ ID NO: 775089 - DNA, 15 bp, Homo sapiens
aataaagaaaaaaaa

SEQ ID NO: 775090 - DNA, 15 bp, Homo sapiens
ataaagaaaaaaaaa

SEQ ID NO: 775091 - DNA, 15 bp, Homo sapiens
taaagaaaaaaaaaa

SEQ ID NO: 775092 - DNA, 15 bp, Homo sapiens
aaagaaaaaaaaaat

SEQ ID NO: 775093 - DNA, 15 bp, Homo sapiens
aagaaaaaaaaaata

SEQ ID NO: 775094 - DNA, 15 bp, Homo sapiens
agaaaaaaaaaatac

SEQ ID NO: 775095 - DNA, 15 bp, Homo sapiens
gaaaaaaaaaataca

SEQ ID NO: 775096 - DNA, 15 bp, Homo sapiens
aaaaaaaaaatacac

SEQ ID NO: 775097 - DNA, 15 bp, Homo sapiens
aaaaaaaaatacaca

SEQ ID NO: 775098 - DNA, 15 bp, Homo sapiens
aaaaaaaatacacac

SEQ ID NO: 775099 - DNA, 15 bp, Homo sapiens
aaaaaaatacacaca

SEQ ID NO: 775100 - DNA, 15 bp, Homo sapiens
aaaaaatacacacac

SEQ ID NO: 775101 - DNA, 15 bp, Homo sapiens
aaaaatacacacaca

SEQ ID NO: 775102 - DNA, 15 bp, Homo sapiens
aaaatacacacacac

SEQ ID NO: 775103 - DNA, 15 bp, Homo sapiens
aaatacacacacaca

SEQ ID NO: 775104 - DNA, 15 bp, Homo sapiens
aatacacacacacac

SEQ ID NO: 775105 - DNA, 15 bp, Homo sapiens
atacacacacacaca

SEQ ID NO: 775106 - DNA, 15 bp, Homo sapiens
tacacacacacacac

SEQ ID NO: 775107 - DNA, 15 bp, Homo sapiens
cacacacacacacat

SEQ ID NO: 775108 - DNA, 15 bp, Homo sapiens
acacacacacacata

SEQ ID NO: 775109 - DNA, 15 bp, Homo sapiens
cacacacacacatac

SEQ ID NO: 775110 - DNA, 15 bp, Homo sapiens
acacacacacataca

SEQ ID NO: 775111 - DNA, 15 bp, Homo sapiens
cacacacacatacac

SEQ ID NO: 775112 - DNA, 15 bp, Homo sapiens
acacacacatacaca

SEQ ID NO: 775113 - DNA, 15 bp, Homo sapiens
cacacacatacacac

SEQ ID NO: 775114 - DNA, 15 bp, Homo sapiens
acacacatacacaca

SEQ ID NO: 775115 - DNA, 15 bp, Homo sapiens
cacacatacacacat

SEQ ID NO: 775116 - DNA, 15 bp, Homo sapiens
acacatacacacata

SEQ ID NO: 775117 - DNA, 15 bp, Homo sapiens
cacatacacacatat

SEQ ID NO: 775118 - DNA, 15 bp, Homo sapiens
acatacacacatata

SEQ ID NO: 775119 - DNA, 15 bp, Homo sapiens
catacacacatatat

SEQ ID NO: 775120 - DNA, 15 bp, Homo sapiens
atacacacatatata

SEQ ID NO: 775121 - DNA, 15 bp, Homo sapiens
tacacacatatatac

SEQ ID NO: 775122 - DNA, 15 bp, Homo sapiens
acacacatatataca

SEQ ID NO: 775123 - DNA, 15 bp, Homo sapiens
cacacatatatacac

SEQ ID NO: 775124 - DNA, 15 bp, Homo sapiens
acacatatatacaca

SEQ ID NO: 775125 - DNA, 15 bp, Homo sapiens
cacatatatacacac

SEQ ID NO: 775126 - DNA, 15 bp, Homo sapiens
acatatatacacaca

SEQ ID NO: 775127 - DNA, 15 bp, Homo sapiens
catatatacacacac

SEQ ID NO: 775128 - DNA, 15 bp, Homo sapiens
atatatacacacaca

SEQ ID NO: 775129 - DNA, 15 bp, Homo sapiens
tatatacacacacat

SEQ ID NO: 775130 - DNA, 15 bp, Homo sapiens
atatacacacacatg

SEQ ID NO: 775131 - DNA, 15 bp, Homo sapiens
tatacacacacatgc

SEQ ID NO: 775132 - DNA, 15 bp, Homo sapiens
atacacacacatgca

SEQ ID NO: 775133 - DNA, 15 bp, Homo sapiens
tacacacacatgcat

SEQ ID NO: 775134 - DNA, 15 bp, Homo sapiens
acacacacatgcata

SEQ ID NO: 775135 - DNA, 15 bp, Homo sapiens
cacacacatgcatat

SEQ ID NO: 775136 - DNA, 15 bp, Homo sapiens
acacacatgcatata

SEQ ID NO: 775137 - DNA, 15 bp, Homo sapiens
cacacatgcatatat

SEQ ID NO: 775138 - DNA, 15 bp, Homo sapiens
acacatgcatatata

SEQ ID NO: 775139 - DNA, 15 bp, Homo sapiens
cacatgcatatatat

SEQ ID NO: 775140 - DNA, 15 bp, Homo sapiens
acatgcatatatatc

SEQ ID NO: 775141 - DNA, 15 bp, Homo sapiens
catgcatatatatca

SEQ ID NO: 775142 - DNA, 15 bp, Homo sapiens
atgcatatatatcac

SEQ ID NO: 775143 - DNA, 15 bp, Homo sapiens
tgcatatatatcaca

SEQ ID NO: 775144 - DNA, 15 bp, Homo sapiens
gcatatatatcacat

SEQ ID NO: 775145 - DNA, 15 bp, Homo sapiens
catatatatcacatt

SEQ ID NO: 775146 - DNA, 15 bp, Homo sapiens
atatatatcacatta

SEQ ID NO: 775147 - DNA, 15 bp, Homo sapiens
tatatatcacattat

SEQ ID NO: 775148 - DNA, 15 bp, Homo sapiens
atatatcacattata

SEQ ID NO: 775149 - DNA, 15 bp, Homo sapiens
tatatcacattatat

SEQ ID NO: 775150 - DNA, 15 bp, Homo sapiens
atatcacattatata

SEQ ID NO: 775151 - DNA, 15 bp, Homo sapiens
tatcacattatatat

SEQ ID NO: 775152 - DNA, 15 bp, Homo sapiens
atcacattatatatg

SEQ ID NO: 775153 - DNA, 15 bp, Homo sapiens
tcacattatatatgt

SEQ ID NO: 775154 - DNA, 15 bp, Homo sapiens
cacattatatatgta

SEQ ID NO: 775155 - DNA, 15 bp, Homo sapiens
acattatatatgtat

SEQ ID NO: 775156 - DNA, 15 bp, Homo sapiens
cattatatatgtata

SEQ ID NO: 775157 - DNA, 15 bp, Homo sapiens
attatatatgtatat

SEQ ID NO: 775158 - DNA, 15 bp, Homo sapiens
ttatatatgtatata

SEQ ID NO: 775159 - DNA, 15 bp, Homo sapiens
tatatatgtatatat

SEQ ID NO: 775160 - DNA, 15 bp, Homo sapiens
atatatgtatatata

SEQ ID NO: 775161 - DNA, 15 bp, Homo sapiens
tatatgtatatatat

SEQ ID NO: 775162 - DNA, 15 bp, Homo sapiens
atatgtatatatatt

SEQ ID NO: 775163 - DNA, 15 bp, Homo sapiens
tatgtatatatatta

SEQ ID NO: 775164 - DNA, 15 bp, Homo sapiens
atgtatatatattac

SEQ ID NO: 775165 - DNA, 15 bp, Homo sapiens
tgtatatatattaca

SEQ ID NO: 775166 - DNA, 15 bp, Homo sapiens
gtatatatattacat

SEQ ID NO: 775167 - DNA, 15 bp, Homo sapiens
tatatatattacatt

SEQ ID NO: 775168 - DNA, 15 bp, Homo sapiens
atatatattacattt

SEQ ID NO: 775169 - DNA, 15 bp, Homo sapiens
tatatattacattta

SEQ ID NO: 775170 - DNA, 15 bp, Homo sapiens
atatattacatttat

SEQ ID NO: 775171 - DNA, 15 bp, Homo sapiens
tatattacatttata

SEQ ID NO: 775172 - DNA, 15 bp, Homo sapiens
atattacatttatat

SEQ ID NO: 775173 - DNA, 15 bp, Homo sapiens
tattacatttatata

SEQ ID NO: 775174 - DNA, 15 bp, Homo sapiens
attacatttatatat

SEQ ID NO: 775175 - DNA, 15 bp, Homo sapiens
ttacatttatatata

SEQ ID NO: 775176 - DNA, 15 bp, Homo sapiens
tacatttatatatat

SEQ ID NO: 775177 - DNA, 15 bp, Homo sapiens
acatttatatatata

SEQ ID NO: 775178 - DNA, 15 bp, Homo sapiens
catttatatatatac

SEQ ID NO: 775179 - DNA, 15 bp, Homo sapiens
atttatatatataca

SEQ ID NO: 775180 - DNA, 15 bp, Homo sapiens
tttatatatatacaa

SEQ ID NO: 775181 - DNA, 15 bp, Homo sapiens
ttatatatatacaaa

SEQ ID NO: 775182 - DNA, 15 bp, Homo sapiens
tatatatatacaaac

SEQ ID NO: 775183 - DNA, 15 bp, Homo sapiens
atatatatacaaaca

SEQ ID NO: 775184 - DNA, 15 bp, Homo sapiens
tatatatacaaacac

SEQ ID NO: 775185 - DNA, 15 bp, Homo sapiens
atatatacaaacaca

SEQ ID NO: 775186 - DNA, 15 bp, Homo sapiens
tatatacaaacacac

SEQ ID NO: 775187 - DNA, 15 bp, Homo sapiens
atatacaaacacaca

SEQ ID NO: 775188 - DNA, 15 bp, Homo sapiens
tatacaaacacacac

SEQ ID NO: 775189 - DNA, 15 bp, Homo sapiens
atacaaacacacaca

SEQ ID NO: 775190 - DNA, 15 bp, Homo sapiens
tacaaacacacacaa

SEQ ID NO: 775191 - DNA, 15 bp, Homo sapiens
acaaacacacacaat

SEQ ID NO: 775192 - DNA, 15 bp, Homo sapiens
caaacacacacaata

SEQ ID NO: 775193 - DNA, 15 bp, Homo sapiens
aaacacacacaataa

SEQ ID NO: 775194 - DNA, 15 bp, Homo sapiens
aacacacacaataag

SEQ ID NO: 775195 - DNA, 15 bp, Homo sapiens
acacacacaataaga

SEQ ID NO: 775196 - DNA, 15 bp, Homo sapiens
cacacacaataagat

SEQ ID NO: 775197 - DNA, 15 bp, Homo sapiens
acacacaataagata

SEQ ID NO: 775198 - DNA, 15 bp, Homo sapiens
cacacaataagatac

SEQ ID NO: 775199 - DNA, 15 bp, Homo sapiens
acacaataagatact

SEQ ID NO: 775200 - DNA, 15 bp, Homo sapiens
cacaataagatacta

SEQ ID NO: 775201 - DNA, 15 bp, Homo sapiens
acaataagatactat

SEQ ID NO: 775202 - DNA, 15 bp, Homo sapiens
caataagatactatt

SEQ ID NO: 775203 - DNA, 15 bp, Homo sapiens
aataagatactattc

SEQ ID NO: 775204 - DNA, 15 bp, Homo sapiens
ataagatactattca

SEQ ID NO: 775205 - DNA, 15 bp, Homo sapiens
taagatactattcag

SEQ ID NO: 775206 - DNA, 15 bp, Homo sapiens
aagatactattcagc

SEQ ID NO: 775207 - DNA, 15 bp, Homo sapiens
agatactattcagcc

SEQ ID NO: 775208 - DNA, 15 bp, Homo sapiens
gatactattcagcca

SEQ ID NO: 775209 - DNA, 15 bp, Homo sapiens
atactattcagccat

SEQ ID NO: 775210 - DNA, 15 bp, Homo sapiens
tactattcagccata

SEQ ID NO: 775211 - DNA, 15 bp, Homo sapiens
actattcagccataa

SEQ ID NO: 775212 - DNA, 15 bp, Homo sapiens
ctattcagccataaa

SEQ ID NO: 775213 - DNA, 15 bp, Homo sapiens
tattcagccataaaa

SEQ ID NO: 775214 - DNA, 15 bp, Homo sapiens
attcagccataaaaa

SEQ ID NO: 775215 - DNA, 15 bp, Homo sapiens
ttcagccataaaaaa

SEQ ID NO: 775216 - DNA, 15 bp, Homo sapiens
tcagccataaaaaag

SEQ ID NO: 775217 - DNA, 15 bp, Homo sapiens
cagccataaaaaaga

SEQ ID NO: 775218 - DNA, 15 bp, Homo sapiens
agccataaaaaagaa

SEQ ID NO: 775219 - DNA, 15 bp, Homo sapiens
gccataaaaaagaat

SEQ ID NO: 775220 - DNA, 15 bp, Homo sapiens
ccataaaaaagaatg

SEQ ID NO: 775221 - DNA, 15 bp, Homo sapiens
cataaaaaagaatga

SEQ ID NO: 775222 - DNA, 15 bp, Homo sapiens
ataaaaaagaatgaa

SEQ ID NO: 775223 - DNA, 15 bp, Homo sapiens
taaaaaagaatgaaa

SEQ ID NO: 775224 - DNA, 15 bp, Homo sapiens
aaaaaagaatgaaat

SEQ ID NO: 775225 - DNA, 15 bp, Homo sapiens
aaaaagaatgaaatc

SEQ ID NO: 775226 - DNA, 15 bp, Homo sapiens
aaaagaatgaaatca

SEQ ID NO: 775227 - DNA, 15 bp, Homo sapiens
aaagaatgaaatcat

SEQ ID NO: 775228 - DNA, 15 bp, Homo sapiens
aagaatgaaatcatg

SEQ ID NO: 775229 - DNA, 15 bp, Homo sapiens
agaatgaaatcatgt

SEQ ID NO: 775230 - DNA, 15 bp, Homo sapiens
gaatgaaatcatgtc

SEQ ID NO: 775231 - DNA, 15 bp, Homo sapiens
aatgaaatcatgtct

SEQ ID NO: 775232 - DNA, 15 bp, Homo sapiens
atgaaatcatgtctt

SEQ ID NO: 775233 - DNA, 15 bp, Homo sapiens
tgaaatcatgtcttt

SEQ ID NO: 775234 - DNA, 15 bp, Homo sapiens
gaaatcatgtctttt

SEQ ID NO: 775235 - DNA, 15 bp, Homo sapiens
aaatcatgtcttttg

SEQ ID NO: 775236 - DNA, 15 bp, Homo sapiens
aatcatgtcttttgc

SEQ ID NO: 775237 - DNA, 15 bp, Homo sapiens
atcatgtcttttgca

SEQ ID NO: 775238 - DNA, 15 bp, Homo sapiens
tcatgtcttttgcag

SEQ ID NO: 775239 - DNA, 15 bp, Homo sapiens
catgtcttttgcagc

SEQ ID NO: 775240 - DNA, 15 bp, Homo sapiens
atgtcttttgcagca

SEQ ID NO: 775241 - DNA, 15 bp, Homo sapiens
tgtcttttgcagcaa

SEQ ID NO: 775242 - DNA, 15 bp, Homo sapiens
gtcttttgcagcaac

SEQ ID NO: 775243 - DNA, 15 bp, Homo sapiens
tcttttgcagcaaca

SEQ ID NO: 775244 - DNA, 15 bp, Homo sapiens
cttttgcagcaacat

SEQ ID NO: 775245 - DNA, 15 bp, Homo sapiens
ttttgcagcaacatg

SEQ ID NO: 775246 - DNA, 15 bp, Homo sapiens
tttgcagcaacatgg

SEQ ID NO: 775247 - DNA, 15 bp, Homo sapiens
ttgcagcaacatgga

SEQ ID NO: 775248 - DNA, 15 bp, Homo sapiens
tgcagcaacatggat

SEQ ID NO: 775249 - DNA, 15 bp, Homo sapiens
gcagcaacatggatg

SEQ ID NO: 775250 - DNA, 15 bp, Homo sapiens
cagcaacatggatgg

SEQ ID NO: 775251 - DNA, 15 bp, Homo sapiens
agcaacatggatgga

SEQ ID NO: 775252 - DNA, 15 bp, Homo sapiens
gcaacatggatggaa

SEQ ID NO: 775253 - DNA, 15 bp, Homo sapiens
caacatggatggaac

SEQ ID NO: 775254 - DNA, 15 bp, Homo sapiens
aacatggatggaact

SEQ ID NO: 775255 - DNA, 15 bp, Homo sapiens
acatggatggaacta

SEQ ID NO: 775256 - DNA, 15 bp, Homo sapiens
catggatggaactag

SEQ ID NO: 775257 - DNA, 15 bp, Homo sapiens
atggatggaactaga

SEQ ID NO: 775258 - DNA, 15 bp, Homo sapiens
tggatggaactagac

SEQ ID NO: 775259 - DNA, 15 bp, Homo sapiens
ggatggaactagaca

SEQ ID NO: 775260 - DNA, 15 bp, Homo sapiens
gatggaactagacac

SEQ ID NO: 775261 - DNA, 15 bp, Homo sapiens
atggaactagacacc

SEQ ID NO: 775262 - DNA, 15 bp, Homo sapiens
tggaactagacacca

SEQ ID NO: 775263 - DNA, 15 bp, Homo sapiens
ggaactagacaccat

SEQ ID NO: 775264 - DNA, 15 bp, Homo sapiens
gaactagacaccatt

SEQ ID NO: 775265 - DNA, 15 bp, Homo sapiens
aactagacaccatta

SEQ ID NO: 775266 - DNA, 15 bp, Homo sapiens
actagacaccattat

SEQ ID NO: 775267 - DNA, 15 bp, Homo sapiens
ctagacaccattatc

SEQ ID NO: 775268 - DNA, 15 bp, Homo sapiens
tagacaccattatct

SEQ ID NO: 775269 - DNA, 15 bp, Homo sapiens
agacaccattatctt

SEQ ID NO: 775270 - DNA, 15 bp, Homo sapiens
gacaccattatctta

SEQ ID NO: 775271 - DNA, 15 bp, Homo sapiens
acaccattatcttaa

SEQ ID NO: 775272 - DNA, 15 bp, Homo sapiens
caccattatcttaag

SEQ ID NO: 775273 - DNA, 15 bp, Homo sapiens
accattatcttaagt

SEQ ID NO: 775274 - DNA, 15 bp, Homo sapiens
ccattatcttaagtg

SEQ ID NO: 775275 - DNA, 15 bp, Homo sapiens
cattatcttaagtgg

SEQ ID NO: 775276 - DNA, 15 bp, Homo sapiens
attatcttaagtgga

SEQ ID NO: 775277 - DNA, 15 bp, Homo sapiens
ttatcttaagtggaa

SEQ ID NO: 775278 - DNA, 15 bp, Homo sapiens
tatcttaagtggaac

SEQ ID NO: 775279 - DNA, 15 bp, Homo sapiens
atcttaagtggaaca

SEQ ID NO: 775280 - DNA, 15 bp, Homo sapiens
tcttaagtggaacaa

SEQ ID NO: 775281 - DNA, 15 bp, Homo sapiens
cttaagtggaacaac

SEQ ID NO: 775282 - DNA, 15 bp, Homo sapiens
ttaagtggaacaact

SEQ ID NO: 775283 - DNA, 15 bp, Homo sapiens
taagtggaacaactc

SEQ ID NO: 775284 - DNA, 15 bp, Homo sapiens
aagtggaacaactca

SEQ ID NO: 775285 - DNA, 15 bp, Homo sapiens
agtggaacaactcag

SEQ ID NO: 775286 - DNA, 15 bp, Homo sapiens
gtggaacaactcaga

SEQ ID NO: 775287 - DNA, 15 bp, Homo sapiens
tggaacaactcagaa

SEQ ID NO: 775288 - DNA, 15 bp, Homo sapiens
ggaacaactcagaaa

SEQ ID NO: 775289 - DNA, 15 bp, Homo sapiens
gaacaactcagaaac

SEQ ID NO: 775290 - DNA, 15 bp, Homo sapiens
aacaactcagaaacg

SEQ ID NO: 775291 - DNA, 15 bp, Homo sapiens
acaactcagaaacga

SEQ ID NO: 775292 - DNA, 15 bp, Homo sapiens
caactcagaaacgaa

SEQ ID NO: 775293 - DNA, 15 bp, Homo sapiens
aactcagaaacgaag

SEQ ID NO: 775294 - DNA, 15 bp, Homo sapiens
actcagaaacgaagt

SEQ ID NO: 775295 - DNA, 15 bp, Homo sapiens
ctcagaaacgaagtc

SEQ ID NO: 775296 - DNA, 15 bp, Homo sapiens
tcagaaacgaagtca

SEQ ID NO: 775297 - DNA, 15 bp, Homo sapiens
cagaaacgaagtcaa

SEQ ID NO: 775298 - DNA, 15 bp, Homo sapiens
agaaacgaagtcaaa

SEQ ID NO: 775299 - DNA, 15 bp, Homo sapiens
gaaacgaagtcaaat

SEQ ID NO: 775300 - DNA, 15 bp, Homo sapiens
aaacgaagtcaaata

SEQ ID NO: 775301 - DNA, 15 bp, Homo sapiens
aacgaagtcaaatac

SEQ ID NO: 775302 - DNA, 15 bp, Homo sapiens
acgaagtcaaatacc

SEQ ID NO: 775303 - DNA, 15 bp, Homo sapiens
cgaagtcaaatacca

SEQ ID NO: 775304 - DNA, 15 bp, Homo sapiens
gaagtcaaataccac

SEQ ID NO: 775305 - DNA, 15 bp, Homo sapiens
aagtcaaataccaca

SEQ ID NO: 775306 - DNA, 15 bp, Homo sapiens
agtcaaataccacat

SEQ ID NO: 775307 - DNA, 15 bp, Homo sapiens
gtcaaataccacatg

SEQ ID NO: 775308 - DNA, 15 bp, Homo sapiens
tcaaataccacatgt

SEQ ID NO: 775309 - DNA, 15 bp, Homo sapiens
caaataccacatgtt

SEQ ID NO: 775310 - DNA, 15 bp, Homo sapiens
aaataccacatgttc

SEQ ID NO: 775311 - DNA, 15 bp, Homo sapiens
aataccacatgttct

SEQ ID NO: 775312 - DNA, 15 bp, Homo sapiens
ataccacatgttctc

SEQ ID NO: 775313 - DNA, 15 bp, Homo sapiens
taccacatgttctca

SEQ ID NO: 775314 - DNA, 15 bp, Homo sapiens
accacatgttctcat

SEQ ID NO: 775315 - DNA, 15 bp, Homo sapiens
ccacatgttctcatg

SEQ ID NO: 775316 - DNA, 15 bp, Homo sapiens
cacatgttctcatga

SEQ ID NO: 775317 - DNA, 15 bp, Homo sapiens
acatgttctcatgaa

SEQ ID NO: 775318 - DNA, 15 bp, Homo sapiens
catgttctcatgaat

SEQ ID NO: 775319 - DNA, 15 bp, Homo sapiens
atgttctcatgaata

SEQ ID NO: 775320 - DNA, 15 bp, Homo sapiens
tgttctcatgaataa

SEQ ID NO: 775321 - DNA, 15 bp, Homo sapiens
gttctcatgaataag

SEQ ID NO: 775322 - DNA, 15 bp, Homo sapiens
ttctcatgaataagt

SEQ ID NO: 775323 - DNA, 15 bp, Homo sapiens
tctcatgaataagtg

SEQ ID NO: 775324 - DNA, 15 bp, Homo sapiens
ctcatgaataagtgg

SEQ ID NO: 775325 - DNA, 15 bp, Homo sapiens
tcatgaataagtggg

SEQ ID NO: 775326 - DNA, 15 bp, Homo sapiens
catgaataagtggga

SEQ ID NO: 775327 - DNA, 15 bp, Homo sapiens
atgaataagtgggag

SEQ ID NO: 775328 - DNA, 15 bp, Homo sapiens
tgaataagtgggagc

SEQ ID NO: 775329 - DNA, 15 bp, Homo sapiens
gaataagtgggagct

SEQ ID NO: 775330 - DNA, 15 bp, Homo sapiens
aataagtgggagcta

SEQ ID NO: 775331 - DNA, 15 bp, Homo sapiens
ataagtgggagctaa

SEQ ID NO: 775332 - DNA, 15 bp, Homo sapiens
taagtgggagctaaa

SEQ ID NO: 775333 - DNA, 15 bp, Homo sapiens
aagtgggagctaaat

SEQ ID NO: 775334 - DNA, 15 bp, Homo sapiens
agtgggagctaaata

SEQ ID NO: 775335 - DNA, 15 bp, Homo sapiens
gtgggagctaaatag

SEQ ID NO: 775336 - DNA, 15 bp, Homo sapiens
tgggagctaaatagt

SEQ ID NO: 775337 - DNA, 15 bp, Homo sapiens
gggagctaaatagtg

SEQ ID NO: 775338 - DNA, 15 bp, Homo sapiens
ggagctaaatagtgt

SEQ ID NO: 775339 - DNA, 15 bp, Homo sapiens
gagctaaatagtgtg

SEQ ID NO: 775340 - DNA, 15 bp, Homo sapiens
agctaaatagtgtgt

SEQ ID NO: 775341 - DNA, 15 bp, Homo sapiens
gctaaatagtgtgta

SEQ ID NO: 775342 - DNA, 15 bp, Homo sapiens
ctaaatagtgtgtac

SEQ ID NO: 775343 - DNA, 15 bp, Homo sapiens
taaatagtgtgtaca

SEQ ID NO: 775344 - DNA, 15 bp, Homo sapiens
aaatagtgtgtacac

SEQ ID NO: 775345 - DNA, 15 bp, Homo sapiens
aatagtgtgtacaca

SEQ ID NO: 775346 - DNA, 15 bp, Homo sapiens
atagtgtgtacacat

SEQ ID NO: 775347 - DNA, 15 bp, Homo sapiens
tagtgtgtacacatg

SEQ ID NO: 775348 - DNA, 15 bp, Homo sapiens
agtgtgtacacatgg

SEQ ID NO: 775349 - DNA, 15 bp, Homo sapiens
gtgtgtacacatgga

SEQ ID NO: 775350 - DNA, 15 bp, Homo sapiens
tgtgtacacatggac

SEQ ID NO: 775351 - DNA, 15 bp, Homo sapiens
gtgtacacatggaca

SEQ ID NO: 775352 - DNA, 15 bp, Homo sapiens
tgtacacatggacag

SEQ ID NO: 775353 - DNA, 15 bp, Homo sapiens
gtacacatggacaga

SEQ ID NO: 775354 - DNA, 15 bp, Homo sapiens
tacacatggacagag

SEQ ID NO: 775355 - DNA, 15 bp, Homo sapiens
acacatggacagaga

SEQ ID NO: 775356 - DNA, 15 bp, Homo sapiens
cacatggacagagag

SEQ ID NO: 775357 - DNA, 15 bp, Homo sapiens
acatggacagagagt

SEQ ID NO: 775358 - DNA, 15 bp, Homo sapiens
catggacagagagtg

SEQ ID NO: 775359 - DNA, 15 bp, Homo sapiens
atggacagagagtgg

SEQ ID NO: 775360 - DNA, 15 bp, Homo sapiens
tggacagagagtgga

SEQ ID NO: 775361 - DNA, 15 bp, Homo sapiens
ggacagagagtggaa

SEQ ID NO: 775362 - DNA, 15 bp, Homo sapiens
gacagagagtggaat

SEQ ID NO: 775363 - DNA, 15 bp, Homo sapiens
acagagagtggaata

SEQ ID NO: 775364 - DNA, 15 bp, Homo sapiens
cagagagtggaatag

SEQ ID NO: 775365 - DNA, 15 bp, Homo sapiens
agagagtggaatagt

SEQ ID NO: 775366 - DNA, 15 bp, Homo sapiens
gagagtggaatagta

SEQ ID NO: 775367 - DNA, 15 bp, Homo sapiens
agagtggaatagtag

SEQ ID NO: 775368 - DNA, 15 bp, Homo sapiens
gagtggaatagtagt

SEQ ID NO: 775369 - DNA, 15 bp, Homo sapiens
agtggaatagtagtc

SEQ ID NO: 775370 - DNA, 15 bp, Homo sapiens
gtggaatagtagtca

SEQ ID NO: 775371 - DNA, 15 bp, Homo sapiens
tggaatagtagtcaa

SEQ ID NO: 775372 - DNA, 15 bp, Homo sapiens
ggaatagtagtcaat

SEQ ID NO: 775373 - DNA, 15 bp, Homo sapiens
gaatagtagtcaatg

SEQ ID NO: 775374 - DNA, 15 bp, Homo sapiens
aatagtagtcaatgg

SEQ ID NO: 775375 - DNA, 15 bp, Homo sapiens
atagtagtcaatgga

SEQ ID NO: 775376 - DNA, 15 bp, Homo sapiens
tagtagtcaatggag

SEQ ID NO: 775377 - DNA, 15 bp, Homo sapiens
agtagtcaatggaga

SEQ ID NO: 775378 - DNA, 15 bp, Homo sapiens
gtagtcaatggagac

SEQ ID NO: 775379 - DNA, 15 bp, Homo sapiens
tagtcaatggagact

SEQ ID NO: 775380 - DNA, 15 bp, Homo sapiens
agtcaatggagactc

SEQ ID NO: 775381 - DNA, 15 bp, Homo sapiens
gtcaatggagactca

SEQ ID NO: 775382 - DNA, 15 bp, Homo sapiens
tcaatggagactcag

SEQ ID NO: 775383 - DNA, 15 bp, Homo sapiens
caatggagactcaga

SEQ ID NO: 775384 - DNA, 15 bp, Homo sapiens
aatggagactcagaa

SEQ ID NO: 775385 - DNA, 15 bp, Homo sapiens
atggagactcagaat

SEQ ID NO: 775386 - DNA, 15 bp, Homo sapiens
tggagactcagaatg

SEQ ID NO: 775387 - DNA, 15 bp, Homo sapiens
ggagactcagaatgg

SEQ ID NO: 775388 - DNA, 15 bp, Homo sapiens
gagactcagaatggt

SEQ ID NO: 775389 - DNA, 15 bp, Homo sapiens
agactcagaatggtg

SEQ ID NO: 775390 - DNA, 15 bp, Homo sapiens
gactcagaatggtgg

SEQ ID NO: 775391 - DNA, 15 bp, Homo sapiens
actcagaatggtgga

SEQ ID NO: 775392 - DNA, 15 bp, Homo sapiens
ctcagaatggtggaa

SEQ ID NO: 775393 - DNA, 15 bp, Homo sapiens
tcagaatggtggaag

SEQ ID NO: 775394 - DNA, 15 bp, Homo sapiens
cagaatggtggaagg

SEQ ID NO: 775395 - DNA, 15 bp, Homo sapiens
agaatggtggaaggg

SEQ ID NO: 775396 - DNA, 15 bp, Homo sapiens
gaatggtggaagggt

SEQ ID NO: 775397 - DNA, 15 bp, Homo sapiens
aatggtggaagggtg

SEQ ID NO: 775398 - DNA, 15 bp, Homo sapiens
atggtggaagggtgg

SEQ ID NO: 775399 - DNA, 15 bp, Homo sapiens
tggtggaagggtggg

SEQ ID NO: 775400 - DNA, 15 bp, Homo sapiens
ggtggaagggtggga

SEQ ID NO: 775401 - DNA, 15 bp, Homo sapiens
gtggaagggtgggag

SEQ ID NO: 775402 - DNA, 15 bp, Homo sapiens
tggaagggtgggagg

SEQ ID NO: 775403 - DNA, 15 bp, Homo sapiens
ggaagggtgggaggt

SEQ ID NO: 775404 - DNA, 15 bp, Homo sapiens
gaagggtgggaggtg

SEQ ID NO: 775405 - DNA, 15 bp, Homo sapiens
aagggtgggaggtgg

SEQ ID NO: 775406 - DNA, 15 bp, Homo sapiens
agggtgggaggtggc

SEQ ID NO: 775407 - DNA, 15 bp, Homo sapiens
gggtgggaggtggcg

SEQ ID NO: 775408 - DNA, 15 bp, Homo sapiens
ggtgggaggtggcga

SEQ ID NO: 775409 - DNA, 15 bp, Homo sapiens
gtgggaggtggcgat

SEQ ID NO: 775410 - DNA, 15 bp, Homo sapiens
tgggaggtggcgatg

SEQ ID NO: 775411 - DNA, 15 bp, Homo sapiens
gggaggtggcgatga

SEQ ID NO: 775412 - DNA, 15 bp, Homo sapiens
ggaggtggcgatgag

SEQ ID NO: 775413 - DNA, 15 bp, Homo sapiens
gaggtggcgatgagt

SEQ ID NO: 775414 - DNA, 15 bp, Homo sapiens
aggtggcgatgagtg

SEQ ID NO: 775415 - DNA, 15 bp, Homo sapiens
ggtggcgatgagtga

SEQ ID NO: 775416 - DNA, 15 bp, Homo sapiens
gtggcgatgagtgat

SEQ ID NO: 775417 - DNA, 15 bp, Homo sapiens
tggcgatgagtgatg

SEQ ID NO: 775418 - DNA, 15 bp, Homo sapiens
ggcgatgagtgatga

SEQ ID NO: 775419 - DNA, 15 bp, Homo sapiens
gcgatgagtgatgag

SEQ ID NO: 775420 - DNA, 15 bp, Homo sapiens
cgatgagtgatgaga

SEQ ID NO: 775421 - DNA, 15 bp, Homo sapiens
gatgagtgatgagaa

SEQ ID NO: 775422 - DNA, 15 bp, Homo sapiens
atgagtgatgagaaa

SEQ ID NO: 775423 - DNA, 15 bp, Homo sapiens
tgagtgatgagaaat

SEQ ID NO: 775424 - DNA, 15 bp, Homo sapiens
gagtgatgagaaatt

SEQ ID NO: 775425 - DNA, 15 bp, Homo sapiens
agtgatgagaaatta

SEQ ID NO: 775426 - DNA, 15 bp, Homo sapiens
gtgatgagaaattac

SEQ ID NO: 775427 - DNA, 15 bp, Homo sapiens
tgatgagaaattact

SEQ ID NO: 775428 - DNA, 15 bp, Homo sapiens
gatgagaaattactt

SEQ ID NO: 775429 - DNA, 15 bp, Homo sapiens
atgagaaattactta

SEQ ID NO: 775430 - DNA, 15 bp, Homo sapiens
tgagaaattacttaa

SEQ ID NO: 775431 - DNA, 15 bp, Homo sapiens
gagaaattacttaat

SEQ ID NO: 775432 - DNA, 15 bp, Homo sapiens
agaaattacttaatg

SEQ ID NO: 775433 - DNA, 15 bp, Homo sapiens
gaaattacttaatgg

SEQ ID NO: 775434 - DNA, 15 bp, Homo sapiens
aaattacttaatggt

SEQ ID NO: 775435 - DNA, 15 bp, Homo sapiens
aattacttaatggtt

SEQ ID NO: 775436 - DNA, 15 bp, Homo sapiens
attacttaatggttg

SEQ ID NO: 775437 - DNA, 15 bp, Homo sapiens
ttacttaatggttgc

SEQ ID NO: 775438 - DNA, 15 bp, Homo sapiens
tacttaatggttgca

SEQ ID NO: 775439 - DNA, 15 bp, Homo sapiens
acttaatggttgcaa

SEQ ID NO: 775440 - DNA, 15 bp, Homo sapiens
cttaatggttgcaat

SEQ ID NO: 775441 - DNA, 15 bp, Homo sapiens
ttaatggttgcaatg

SEQ ID NO: 775442 - DNA, 15 bp, Homo sapiens
taatggttgcaatgc

SEQ ID NO: 775443 - DNA, 15 bp, Homo sapiens
aatggttgcaatgca

SEQ ID NO: 775444 - DNA, 15 bp, Homo sapiens
atggttgcaatgcac

SEQ ID NO: 775445 - DNA, 15 bp, Homo sapiens
tggttgcaatgcacg

SEQ ID NO: 775446 - DNA, 15 bp, Homo sapiens
ggttgcaatgcacgc

SEQ ID NO: 775447 - DNA, 15 bp, Homo sapiens
gttgcaatgcacgct

SEQ ID NO: 775448 - DNA, 15 bp, Homo sapiens
ttgcaatgcacgcta

SEQ ID NO: 775449 - DNA, 15 bp, Homo sapiens
tgcaatgcacgctat

SEQ ID NO: 775450 - DNA, 15 bp, Homo sapiens
gcaatgcacgctatt

SEQ ID NO: 775451 - DNA, 15 bp, Homo sapiens
caatgcacgctattt

SEQ ID NO: 775452 - DNA, 15 bp, Homo sapiens
aatgcacgctatttg

SEQ ID NO: 775453 - DNA, 15 bp, Homo sapiens
atgcacgctatttgg

SEQ ID NO: 775454 - DNA, 15 bp, Homo sapiens
tgcacgctatttgga

SEQ ID NO: 775455 - DNA, 15 bp, Homo sapiens
gcacgctatttggat

SEQ ID NO: 775456 - DNA, 15 bp, Homo sapiens
cacgctatttggatg

SEQ ID NO: 775457 - DNA, 15 bp, Homo sapiens
acgctatttggatga

SEQ ID NO: 775458 - DNA, 15 bp, Homo sapiens
cgctatttggatgac

SEQ ID NO: 775459 - DNA, 15 bp, Homo sapiens
gctatttggatgacg

SEQ ID NO: 775460 - DNA, 15 bp, Homo sapiens
ctatttggatgacgg

SEQ ID NO: 775461 - DNA, 15 bp, Homo sapiens
tatttggatgacggt

SEQ ID NO: 775462 - DNA, 15 bp, Homo sapiens
atttggatgacggtt

SEQ ID NO: 775463 - DNA, 15 bp, Homo sapiens
tttggatgacggtta

SEQ ID NO: 775464 - DNA, 15 bp, Homo sapiens
ttggatgacggttac

SEQ ID NO: 775465 - DNA, 15 bp, Homo sapiens
tggatgacggttaca

SEQ ID NO: 775466 - DNA, 15 bp, Homo sapiens
ggatgacggttacac

SEQ ID NO: 775467 - DNA, 15 bp, Homo sapiens
gatgacggttacact

SEQ ID NO: 775468 - DNA, 15 bp, Homo sapiens
atgacggttacacta

SEQ ID NO: 775469 - DNA, 15 bp, Homo sapiens
tgacggttacactaa

SEQ ID NO: 775470 - DNA, 15 bp, Homo sapiens
gacggttacactaaa

SEQ ID NO: 775471 - DNA, 15 bp, Homo sapiens
acggttacactaaaa

SEQ ID NO: 775472 - DNA, 15 bp, Homo sapiens
cggttacactaaaag

SEQ ID NO: 775473 - DNA, 15 bp, Homo sapiens
ggttacactaaaagc

SEQ ID NO: 775474 - DNA, 15 bp, Homo sapiens
gttacactaaaagcc

SEQ ID NO: 775475 - DNA, 15 bp, Homo sapiens
ttacactaaaagccc

SEQ ID NO: 775476 - DNA, 15 bp, Homo sapiens
tacactaaaagccca

SEQ ID NO: 775477 - DNA, 15 bp, Homo sapiens
acactaaaagcccag

SEQ ID NO: 775478 - DNA, 15 bp, Homo sapiens
cactaaaagcccaga

SEQ ID NO: 775479 - DNA, 15 bp, Homo sapiens
actaaaagcccagac

SEQ ID NO: 775480 - DNA, 15 bp, Homo sapiens
ctaaaagcccagact

SEQ ID NO: 775481 - DNA, 15 bp, Homo sapiens
taaaagcccagactt

SEQ ID NO: 775482 - DNA, 15 bp, Homo sapiens
aaaagcccagacttc

SEQ ID NO: 775483 - DNA, 15 bp, Homo sapiens
aaagcccagacttca

SEQ ID NO: 775484 - DNA, 15 bp, Homo sapiens
aagcccagacttcac

SEQ ID NO: 775485 - DNA, 15 bp, Homo sapiens
agcccagacttcacc

SEQ ID NO: 775486 - DNA, 15 bp, Homo sapiens
gcccagacttcacca

SEQ ID NO: 775487 - DNA, 15 bp, Homo sapiens
cccagacttcaccac

SEQ ID NO: 775488 - DNA, 15 bp, Homo sapiens
ccagacttcaccact

SEQ ID NO: 775489 - DNA, 15 bp, Homo sapiens
cagacttcaccactg

SEQ ID NO: 775490 - DNA, 15 bp, Homo sapiens
agacttcaccactgt

SEQ ID NO: 775491 - DNA, 15 bp, Homo sapiens
gacttcaccactgtg

SEQ ID NO: 775492 - DNA, 15 bp, Homo sapiens
acttcaccactgtgc

SEQ ID NO: 775493 - DNA, 15 bp, Homo sapiens
cttcaccactgtgca

SEQ ID NO: 775494 - DNA, 15 bp, Homo sapiens
ttcaccactgtgcaa

SEQ ID NO: 775495 - DNA, 15 bp, Homo sapiens
tcaccactgtgcaaa

SEQ ID NO: 775496 - DNA, 15 bp, Homo sapiens
caccactgtgcaaaa

SEQ ID NO: 775497 - DNA, 15 bp, Homo sapiens
accactgtgcaaaat

SEQ ID NO: 775498 - DNA, 15 bp, Homo sapiens
ccactgtgcaaaata

SEQ ID NO: 775499 - DNA, 15 bp, Homo sapiens
cactgtgcaaaatat

SEQ ID NO: 775500 - DNA, 15 bp, Homo sapiens
actgtgcaaaatatc

SEQ ID NO: 775501 - DNA, 15 bp, Homo sapiens
ctgtgcaaaatatcc

SEQ ID NO: 775502 - DNA, 15 bp, Homo sapiens
tgtgcaaaatatcca

SEQ ID NO: 775503 - DNA, 15 bp, Homo sapiens
gtgcaaaatatccat

SEQ ID NO: 775504 - DNA, 15 bp, Homo sapiens
tgcaaaatatccatg

SEQ ID NO: 775505 - DNA, 15 bp, Homo sapiens
gcaaaatatccatgt

SEQ ID NO: 775506 - DNA, 15 bp, Homo sapiens
caaaatatccatgtg

SEQ ID NO: 775507 - DNA, 15 bp, Homo sapiens
aaaatatccatgtga

SEQ ID NO: 775508 - DNA, 15 bp, Homo sapiens
aaatatccatgtgac

SEQ ID NO: 775509 - DNA, 15 bp, Homo sapiens
aatatccatgtgaca

SEQ ID NO: 775510 - DNA, 15 bp, Homo sapiens
atatccatgtgacaa

SEQ ID NO: 775511 - DNA, 15 bp, Homo sapiens
tatccatgtgacaaa

SEQ ID NO: 775512 - DNA, 15 bp, Homo sapiens
atccatgtgacaaaa

SEQ ID NO: 775513 - DNA, 15 bp, Homo sapiens
tccatgtgacaaaac

SEQ ID NO: 775514 - DNA, 15 bp, Homo sapiens
ccatgtgacaaaact

SEQ ID NO: 775515 - DNA, 15 bp, Homo sapiens
catgtgacaaaactg

SEQ ID NO: 775516 - DNA, 15 bp, Homo sapiens
atgtgacaaaactgc

SEQ ID NO: 775517 - DNA, 15 bp, Homo sapiens
tgtgacaaaactgca

SEQ ID NO: 775518 - DNA, 15 bp, Homo sapiens
gtgacaaaactgcac

SEQ ID NO: 775519 - DNA, 15 bp, Homo sapiens
tgacaaaactgcact

SEQ ID NO: 775520 - DNA, 15 bp, Homo sapiens
gacaaaactgcactc

SEQ ID NO: 775521 - DNA, 15 bp, Homo sapiens
acaaaactgcactca

SEQ ID NO: 775522 - DNA, 15 bp, Homo sapiens
caaaactgcactcat

SEQ ID NO: 775523 - DNA, 15 bp, Homo sapiens
aaaactgcactcata

SEQ ID NO: 775524 - DNA, 15 bp, Homo sapiens
aaactgcactcatac

SEQ ID NO: 775525 - DNA, 15 bp, Homo sapiens
aactgcactcatact

SEQ ID NO: 775526 - DNA, 15 bp, Homo sapiens
actgcactcatactc

SEQ ID NO: 775527 - DNA, 15 bp, Homo sapiens
ctgcactcatactcc

SEQ ID NO: 775528 - DNA, 15 bp, Homo sapiens
tgcactcatactcct

SEQ ID NO: 775529 - DNA, 15 bp, Homo sapiens
gcactcatactcctt

SEQ ID NO: 775530 - DNA, 15 bp, Homo sapiens
cactcatactcctta

SEQ ID NO: 775531 - DNA, 15 bp, Homo sapiens
actcatactccttac

SEQ ID NO: 775532 - DNA, 15 bp, Homo sapiens
ctcatactccttaca

SEQ ID NO: 775533 - DNA, 15 bp, Homo sapiens
tcatactccttacat

SEQ ID NO: 775534 - DNA, 15 bp, Homo sapiens
catactccttacatt

SEQ ID NO: 775535 - DNA, 15 bp, Homo sapiens
atactccttacattt

SEQ ID NO: 775536 - DNA, 15 bp, Homo sapiens
tactccttacattta

SEQ ID NO: 775537 - DNA, 15 bp, Homo sapiens
actccttacatttat

SEQ ID NO: 775538 - DNA, 15 bp, Homo sapiens
ctccttacatttata

SEQ ID NO: 775539 - DNA, 15 bp, Homo sapiens
tccttacatttatac

SEQ ID NO: 775540 - DNA, 15 bp, Homo sapiens
ccttacatttataca

SEQ ID NO: 775541 - DNA, 15 bp, Homo sapiens
cttacatttatacaa

SEQ ID NO: 775542 - DNA, 15 bp, Homo sapiens
ttacatttatacaaa

SEQ ID NO: 775543 - DNA, 15 bp, Homo sapiens
tacatttatacaaat

SEQ ID NO: 775544 - DNA, 15 bp, Homo sapiens
acatttatacaaata

SEQ ID NO: 775545 - DNA, 15 bp, Homo sapiens
catttatacaaataa

SEQ ID NO: 775546 - DNA, 15 bp, Homo sapiens
atttatacaaataaa

SEQ ID NO: 775547 - DNA, 15 bp, Homo sapiens
tttatacaaataaac

SEQ ID NO: 775548 - DNA, 15 bp, Homo sapiens
ttatacaaataaact

SEQ ID NO: 775549 - DNA, 15 bp, Homo sapiens
tatacaaataaactg

SEQ ID NO: 775550 - DNA, 15 bp, Homo sapiens
atacaaataaactgt

SEQ ID NO: 775551 - DNA, 15 bp, Homo sapiens
tacaaataaactgta

SEQ ID NO: 775552 - DNA, 15 bp, Homo sapiens
acaaataaactgtat

SEQ ID NO: 775553 - DNA, 15 bp, Homo sapiens
caaataaactgtatt

SEQ ID NO: 775554 - DNA, 15 bp, Homo sapiens
aaataaactgtattt

SEQ ID NO: 775555 - DNA, 15 bp, Homo sapiens
aataaactgtattta

SEQ ID NO: 775556 - DNA, 15 bp, Homo sapiens
ataaactgtatttat

SEQ ID NO: 775557 - DNA, 15 bp, Homo sapiens
taaactgtatttata

SEQ ID NO: 775558 - DNA, 15 bp, Homo sapiens
aaactgtatttatag

SEQ ID NO: 775559 - DNA, 15 bp, Homo sapiens
aactgtatttataga

SEQ ID NO: 775560 - DNA, 15 bp, Homo sapiens
actgtatttatagaa

SEQ ID NO: 775561 - DNA, 15 bp, Homo sapiens
ctgtatttatagaaa

SEQ ID NO: 775562 - DNA, 15 bp, Homo sapiens
tgtatttatagaaat

SEQ ID NO: 775563 - DNA, 15 bp, Homo sapiens
gtatttatagaaata

SEQ ID NO: 775564 - DNA, 15 bp, Homo sapiens
tatttatagaaatag

SEQ ID NO: 775565 - DNA, 15 bp, Homo sapiens
atttatagaaatagg

SEQ ID NO: 775566 - DNA, 15 bp, Homo sapiens
tttatagaaataggg

SEQ ID NO: 775567 - DNA, 15 bp, Homo sapiens
ttatagaaatagggg

SEQ ID NO: 775568 - DNA, 15 bp, Homo sapiens
tatagaaataggggg

SEQ ID NO: 775569 - DNA, 15 bp, Homo sapiens
atagaaatagggggt

SEQ ID NO: 775570 - DNA, 15 bp, Homo sapiens
tagaaatagggggta

SEQ ID NO: 775571 - DNA, 15 bp, Homo sapiens
agaaatagggggtag

SEQ ID NO: 775572 - DNA, 15 bp, Homo sapiens
gaaatagggggtaga

SEQ ID NO: 775573 - DNA, 15 bp, Homo sapiens
aaatagggggtagag

SEQ ID NO: 775574 - DNA, 15 bp, Homo sapiens
aatagggggtagaga

SEQ ID NO: 775575 - DNA, 15 bp, Homo sapiens
atagggggtagagaa

SEQ ID NO: 775576 - DNA, 15 bp, Homo sapiens
tagggggtagagaaa

SEQ ID NO: 775577 - DNA, 15 bp, Homo sapiens
agggggtagagaaaa

SEQ ID NO: 775578 - DNA, 15 bp, Homo sapiens
gggggtagagaaaac

SEQ ID NO: 775579 - DNA, 15 bp, Homo sapiens
ggggtagagaaaaca

SEQ ID NO: 775580 - DNA, 15 bp, Homo sapiens
gggtagagaaaacag

SEQ ID NO: 775581 - DNA, 15 bp, Homo sapiens
ggtagagaaaacagt

SEQ ID NO: 775582 - DNA, 15 bp, Homo sapiens
gtagagaaaacagtt

SEQ ID NO: 775583 - DNA, 15 bp, Homo sapiens
tagagaaaacagttg

SEQ ID NO: 775584 - DNA, 15 bp, Homo sapiens
agagaaaacagttga

SEQ ID NO: 775585 - DNA, 15 bp, Homo sapiens
gagaaaacagttgac

SEQ ID NO: 775586 - DNA, 15 bp, Homo sapiens
agaaaacagttgact

SEQ ID NO: 775587 - DNA, 15 bp, Homo sapiens
gaaaacagttgactg

SEQ ID NO: 775588 - DNA, 15 bp, Homo sapiens
aaaacagttgactgg

SEQ ID NO: 775589 - DNA, 15 bp, Homo sapiens
aaacagttgactgga

SEQ ID NO: 775590 - DNA, 15 bp, Homo sapiens
aacagttgactggaa

SEQ ID NO: 775591 - DNA, 15 bp, Homo sapiens
acagttgactggaag

SEQ ID NO: 775592 - DNA, 15 bp, Homo sapiens
cagttgactggaagg

SEQ ID NO: 775593 - DNA, 15 bp, Homo sapiens
agttgactggaagga

SEQ ID NO: 775594 - DNA, 15 bp, Homo sapiens
gttgactggaaggaa

SEQ ID NO: 775595 - DNA, 15 bp, Homo sapiens
ttgactggaaggaat

SEQ ID NO: 775596 - DNA, 15 bp, Homo sapiens
tgactggaaggaata

SEQ ID NO: 775597 - DNA, 15 bp, Homo sapiens
gactggaaggaataa

SEQ ID NO: 775598 - DNA, 15 bp, Homo sapiens
actggaaggaataag

SEQ ID NO: 775599 - DNA, 15 bp, Homo sapiens
ctggaaggaataagt

SEQ ID NO: 775600 - DNA, 15 bp, Homo sapiens
tggaaggaataagtt

SEQ ID NO: 775601 - DNA, 15 bp, Homo sapiens
ggaaggaataagttc

SEQ ID NO: 775602 - DNA, 15 bp, Homo sapiens
gaaggaataagttcc

SEQ ID NO: 775603 - DNA, 15 bp, Homo sapiens
aaggaataagttcca

SEQ ID NO: 775604 - DNA, 15 bp, Homo sapiens
aggaataagttccag

SEQ ID NO: 775605 - DNA, 15 bp, Homo sapiens
ggaataagttccagc

SEQ ID NO: 775606 - DNA, 15 bp, Homo sapiens
gaataagttccagca

SEQ ID NO: 775607 - DNA, 15 bp, Homo sapiens
aataagttccagcat

SEQ ID NO: 775608 - DNA, 15 bp, Homo sapiens
ataagttccagcatg

SEQ ID NO: 775609 - DNA, 15 bp, Homo sapiens
taagttccagcatgt

SEQ ID NO: 775610 - DNA, 15 bp, Homo sapiens
aagttccagcatgtg

SEQ ID NO: 775611 - DNA, 15 bp, Homo sapiens
agttccagcatgtga

SEQ ID NO: 775612 - DNA, 15 bp, Homo sapiens
gttccagcatgtgat

SEQ ID NO: 775613 - DNA, 15 bp, Homo sapiens
ttccagcatgtgata

SEQ ID NO: 775614 - DNA, 15 bp, Homo sapiens
tccagcatgtgatag

SEQ ID NO: 775615 - DNA, 15 bp, Homo sapiens
ccagcatgtgatagt

SEQ ID NO: 775616 - DNA, 15 bp, Homo sapiens
cagcatgtgatagta

SEQ ID NO: 775617 - DNA, 15 bp, Homo sapiens
agcatgtgatagtac

SEQ ID NO: 775618 - DNA, 15 bp, Homo sapiens
gcatgtgatagtaca

SEQ ID NO: 775619 - DNA, 15 bp, Homo sapiens
catgtgatagtacaa

SEQ ID NO: 775620 - DNA, 15 bp, Homo sapiens
atgtgatagtacaat

SEQ ID NO: 775621 - DNA, 15 bp, Homo sapiens
tgtgatagtacaata

SEQ ID NO: 775622 - DNA, 15 bp, Homo sapiens
gtgatagtacaatag

SEQ ID NO: 775623 - DNA, 15 bp, Homo sapiens
tgatagtacaatagg

SEQ ID NO: 775624 - DNA, 15 bp, Homo sapiens
gatagtacaataggg

SEQ ID NO: 775625 - DNA, 15 bp, Homo sapiens
atagtacaataggga

SEQ ID NO: 775626 - DNA, 15 bp, Homo sapiens
tagtacaatagggag

SEQ ID NO: 775627 - DNA, 15 bp, Homo sapiens
agtacaatagggaga

SEQ ID NO: 775628 - DNA, 15 bp, Homo sapiens
gtacaatagggagat

SEQ ID NO: 775629 - DNA, 15 bp, Homo sapiens
tacaatagggagatt

SEQ ID NO: 775630 - DNA, 15 bp, Homo sapiens
acaatagggagatta

SEQ ID NO: 775631 - DNA, 15 bp, Homo sapiens
caatagggagattat

SEQ ID NO: 775632 - DNA, 15 bp, Homo sapiens
aatagggagattata

SEQ ID NO: 775633 - DNA, 15 bp, Homo sapiens
atagggagattatag

SEQ ID NO: 775634 - DNA, 15 bp, Homo sapiens
tagggagattatagt

SEQ ID NO: 775635 - DNA, 15 bp, Homo sapiens
agggagattatagtt

SEQ ID NO: 775636 - DNA, 15 bp, Homo sapiens
gggagattatagtta

SEQ ID NO: 775637 - DNA, 15 bp, Homo sapiens
ggagattatagttaa

SEQ ID NO: 775638 - DNA, 15 bp, Homo sapiens
gagattatagttaac

SEQ ID NO: 775639 - DNA, 15 bp, Homo sapiens
agattatagttaaca

SEQ ID NO: 775640 - DNA, 15 bp, Homo sapiens
gattatagttaacag

SEQ ID NO: 775641 - DNA, 15 bp, Homo sapiens
attatagttaacagt

SEQ ID NO: 775642 - DNA, 15 bp, Homo sapiens
ttatagttaacagta

SEQ ID NO: 775643 - DNA, 15 bp, Homo sapiens
tatagttaacagtaa

SEQ ID NO: 775644 - DNA, 15 bp, Homo sapiens
atagttaacagtaat

SEQ ID NO: 775645 - DNA, 15 bp, Homo sapiens
tagttaacagtaatt

SEQ ID NO: 775646 - DNA, 15 bp, Homo sapiens
agttaacagtaattt

SEQ ID NO: 775647 - DNA, 15 bp, Homo sapiens
gttaacagtaattta

SEQ ID NO: 775648 - DNA, 15 bp, Homo sapiens
ttaacagtaatttat

SEQ ID NO: 775649 - DNA, 15 bp, Homo sapiens
taacagtaatttatt

SEQ ID NO: 775650 - DNA, 15 bp, Homo sapiens
aacagtaatttattg

SEQ ID NO: 775651 - DNA, 15 bp, Homo sapiens
acagtaatttattgt

SEQ ID NO: 775652 - DNA, 15 bp, Homo sapiens
cagtaatttattgta

SEQ ID NO: 775653 - DNA, 15 bp, Homo sapiens
agtaatttattgtac

SEQ ID NO: 775654 - DNA, 15 bp, Homo sapiens
gtaatttattgtaca

SEQ ID NO: 775655 - DNA, 15 bp, Homo sapiens
taatttattgtacat

SEQ ID NO: 775656 - DNA, 15 bp, Homo sapiens
aatttattgtacatc

SEQ ID NO: 775657 - DNA, 15 bp, Homo sapiens
atttattgtacatct

SEQ ID NO: 775658 - DNA, 15 bp, Homo sapiens
tttattgtacatctc

SEQ ID NO: 775659 - DNA, 15 bp, Homo sapiens
ttattgtacatctca

SEQ ID NO: 775660 - DNA, 15 bp, Homo sapiens
tattgtacatctcaa

SEQ ID NO: 775661 - DNA, 15 bp, Homo sapiens
attgtacatctcaaa

SEQ ID NO: 775662 - DNA, 15 bp, Homo sapiens
ttgtacatctcaaaa

SEQ ID NO: 775663 - DNA, 15 bp, Homo sapiens
tgtacatctcaaaat

SEQ ID NO: 775664 - DNA, 15 bp, Homo sapiens
gtacatctcaaaata

SEQ ID NO: 775665 - DNA, 15 bp, Homo sapiens
tacatctcaaaatag

SEQ ID NO: 775666 - DNA, 15 bp, Homo sapiens
acatctcaaaatagc

SEQ ID NO: 775667 - DNA, 15 bp, Homo sapiens
catctcaaaatagct

SEQ ID NO: 775668 - DNA, 15 bp, Homo sapiens
atctcaaaatagcta

SEQ ID NO: 775669 - DNA, 15 bp, Homo sapiens
tctcaaaatagctag

SEQ ID NO: 775670 - DNA, 15 bp, Homo sapiens
ctcaaaatagctaga

SEQ ID NO: 775671 - DNA, 15 bp, Homo sapiens
tcaaaatagctagaa

SEQ ID NO: 775672 - DNA, 15 bp, Homo sapiens
caaaatagctagaaa

SEQ ID NO: 775673 - DNA, 15 bp, Homo sapiens
aaaatagctagaaaa

SEQ ID NO: 775674 - DNA, 15 bp, Homo sapiens
aaatagctagaaaag

SEQ ID NO: 775675 - DNA, 15 bp, Homo sapiens
aatagctagaaaaga

SEQ ID NO: 775676 - DNA, 15 bp, Homo sapiens
atagctagaaaagaa

SEQ ID NO: 775677 - DNA, 15 bp, Homo sapiens
tagctagaaaagaat

SEQ ID NO: 775678 - DNA, 15 bp, Homo sapiens
agctagaaaagaatt

SEQ ID NO: 775679 - DNA, 15 bp, Homo sapiens
gctagaaaagaatta

SEQ ID NO: 775680 - DNA, 15 bp, Homo sapiens
ctagaaaagaattag

SEQ ID NO: 775681 - DNA, 15 bp, Homo sapiens
tagaaaagaattaga

SEQ ID NO: 775682 - DNA, 15 bp, Homo sapiens
agaaaagaattagaa

SEQ ID NO: 775683 - DNA, 15 bp, Homo sapiens
gaaaagaattagaat

SEQ ID NO: 775684 - DNA, 15 bp, Homo sapiens
aaaagaattagaatg

SEQ ID NO: 775685 - DNA, 15 bp, Homo sapiens
aaagaattagaatgt

SEQ ID NO: 775686 - DNA, 15 bp, Homo sapiens
aagaattagaatgtt

SEQ ID NO: 775687 - DNA, 15 bp, Homo sapiens
agaattagaatgttc

SEQ ID NO: 775688 - DNA, 15 bp, Homo sapiens
gaattagaatgttcc

SEQ ID NO: 775689 - DNA, 15 bp, Homo sapiens
aattagaatgttccc

SEQ ID NO: 775690 - DNA, 15 bp, Homo sapiens
attagaatgttccca

SEQ ID NO: 775691 - DNA, 15 bp, Homo sapiens
ttagaatgttcccaa

SEQ ID NO: 775692 - DNA, 15 bp, Homo sapiens
tagaatgttcccaac

SEQ ID NO: 775693 - DNA, 15 bp, Homo sapiens
agaatgttcccaaca

SEQ ID NO: 775694 - DNA, 15 bp, Homo sapiens
gaatgttcccaacac

SEQ ID NO: 775695 - DNA, 15 bp, Homo sapiens
aatgttcccaacaca

SEQ ID NO: 775696 - DNA, 15 bp, Homo sapiens
atgttcccaacacaa

SEQ ID NO: 775697 - DNA, 15 bp, Homo sapiens
tgttcccaacacaaa

SEQ ID NO: 775698 - DNA, 15 bp, Homo sapiens
gttcccaacacaaag

SEQ ID NO: 775699 - DNA, 15 bp, Homo sapiens
ttcccaacacaaaga

SEQ ID NO: 775700 - DNA, 15 bp, Homo sapiens
tcccaacacaaagat

SEQ ID NO: 775701 - DNA, 15 bp, Homo sapiens
cccaacacaaagata

SEQ ID NO: 775702 - DNA, 15 bp, Homo sapiens
ccaacacaaagataa

SEQ ID NO: 775703 - DNA, 15 bp, Homo sapiens
caacacaaagataaa

SEQ ID NO: 775704 - DNA, 15 bp, Homo sapiens
aacacaaagataaat

SEQ ID NO: 775705 - DNA, 15 bp, Homo sapiens
acacaaagataaatg

SEQ ID NO: 775706 - DNA, 15 bp, Homo sapiens
cacaaagataaatgt

SEQ ID NO: 775707 - DNA, 15 bp, Homo sapiens
acaaagataaatgtt

SEQ ID NO: 775708 - DNA, 15 bp, Homo sapiens
caaagataaatgttt

SEQ ID NO: 775709 - DNA, 15 bp, Homo sapiens
aaagataaatgtttg

SEQ ID NO: 775710 - DNA, 15 bp, Homo sapiens
aagataaatgtttga

SEQ ID NO: 775711 - DNA, 15 bp, Homo sapiens
agataaatgtttgag

SEQ ID NO: 775712 - DNA, 15 bp, Homo sapiens
gataaatgtttgagg

SEQ ID NO: 775713 - DNA, 15 bp, Homo sapiens
ataaatgtttgaggt

SEQ ID NO: 775714 - DNA, 15 bp, Homo sapiens
taaatgtttgaggtg

SEQ ID NO: 775715 - DNA, 15 bp, Homo sapiens
aaatgtttgaggtga

SEQ ID NO: 775716 - DNA, 15 bp, Homo sapiens
aatgtttgaggtgat

SEQ ID NO: 775717 - DNA, 15 bp, Homo sapiens
atgtttgaggtgatg

SEQ ID NO: 775718 - DNA, 15 bp, Homo sapiens
tgtttgaggtgatgg

SEQ ID NO: 775719 - DNA, 15 bp, Homo sapiens
gtttgaggtgatggt

SEQ ID NO: 775720 - DNA, 15 bp, Homo sapiens
tttgaggtgatggtt

SEQ ID NO: 775721 - DNA, 15 bp, Homo sapiens
ttgaggtgatggttt

SEQ ID NO: 775722 - DNA, 15 bp, Homo sapiens
tgaggtgatggtttt

SEQ ID NO: 775723 - DNA, 15 bp, Homo sapiens
gaggtgatggttttc

SEQ ID NO: 775724 - DNA, 15 bp, Homo sapiens
aggtgatggttttct

SEQ ID NO: 775725 - DNA, 15 bp, Homo sapiens
ggtgatggttttctg

SEQ ID NO: 775726 - DNA, 15 bp, Homo sapiens
gtgatggttttctgt

SEQ ID NO: 775727 - DNA, 15 bp, Homo sapiens
tgatggttttctgtt

SEQ ID NO: 775728 - DNA, 15 bp, Homo sapiens
gatggttttctgtta

SEQ ID NO: 775729 - DNA, 15 bp, Homo sapiens
atggttttctgttac

SEQ ID NO: 775730 - DNA, 15 bp, Homo sapiens
tggttttctgttacc

SEQ ID NO: 775731 - DNA, 15 bp, Homo sapiens
ggttttctgttaccc

SEQ ID NO: 775732 - DNA, 15 bp, Homo sapiens
gttttctgttaccct

SEQ ID NO: 775733 - DNA, 15 bp, Homo sapiens
ttttctgttaccctg

SEQ ID NO: 775734 - DNA, 15 bp, Homo sapiens
tttctgttaccctga

SEQ ID NO: 775735 - DNA, 15 bp, Homo sapiens
ttctgttaccctgat

SEQ ID NO: 775736 - DNA, 15 bp, Homo sapiens
tctgttaccctgatc

SEQ ID NO: 775737 - DNA, 15 bp, Homo sapiens
ctgttaccctgatct

SEQ ID NO: 775738 - DNA, 15 bp, Homo sapiens
tgttaccctgatcta

SEQ ID NO: 775739 - DNA, 15 bp, Homo sapiens
gttaccctgatctaa

SEQ ID NO: 775740 - DNA, 15 bp, Homo sapiens
ttaccctgatctaat

SEQ ID NO: 775741 - DNA, 15 bp, Homo sapiens
taccctgatctaatc

SEQ ID NO: 775742 - DNA, 15 bp, Homo sapiens
accctgatctaatca

SEQ ID NO: 775743 - DNA, 15 bp, Homo sapiens
ccctgatctaatcat

SEQ ID NO: 775744 - DNA, 15 bp, Homo sapiens
cctgatctaatcatt

SEQ ID NO: 775745 - DNA, 15 bp, Homo sapiens
ctgatctaatcatta

SEQ ID NO: 775746 - DNA, 15 bp, Homo sapiens
tgatctaatcattat

SEQ ID NO: 775747 - DNA, 15 bp, Homo sapiens
gatctaatcattata

SEQ ID NO: 775748 - DNA, 15 bp, Homo sapiens
atctaatcattatac

SEQ ID NO: 775749 - DNA, 15 bp, Homo sapiens
tctaatcattataca

SEQ ID NO: 775750 - DNA, 15 bp, Homo sapiens
ctaatcattatacat

SEQ ID NO: 775751 - DNA, 15 bp, Homo sapiens
taatcattatacatg

SEQ ID NO: 775752 - DNA, 15 bp, Homo sapiens
aatcattatacatgt

SEQ ID NO: 775753 - DNA, 15 bp, Homo sapiens
atcattatacatgta

SEQ ID NO: 775754 - DNA, 15 bp, Homo sapiens
tcattatacatgtac

SEQ ID NO: 775755 - DNA, 15 bp, Homo sapiens
cattatacatgtacc

SEQ ID NO: 775756 - DNA, 15 bp, Homo sapiens
attatacatgtacca

SEQ ID NO: 775757 - DNA, 15 bp, Homo sapiens
ttatacatgtaccaa

SEQ ID NO: 775758 - DNA, 15 bp, Homo sapiens
tatacatgtaccaaa

SEQ ID NO: 775759 - DNA, 15 bp, Homo sapiens
atacatgtaccaaaa

SEQ ID NO: 775760 - DNA, 15 bp, Homo sapiens
tacatgtaccaaaat

SEQ ID NO: 775761 - DNA, 15 bp, Homo sapiens
acatgtaccaaaata

SEQ ID NO: 775762 - DNA, 15 bp, Homo sapiens
catgtaccaaaatat

SEQ ID NO: 775763 - DNA, 15 bp, Homo sapiens
atgtaccaaaatatc

SEQ ID NO: 775764 - DNA, 15 bp, Homo sapiens
tgtaccaaaatatca

SEQ ID NO: 775765 - DNA, 15 bp, Homo sapiens
gtaccaaaatatcac

SEQ ID NO: 775766 - DNA, 15 bp, Homo sapiens
taccaaaatatcaca

SEQ ID NO: 775767 - DNA, 15 bp, Homo sapiens
accaaaatatcacat

SEQ ID NO: 775768 - DNA, 15 bp, Homo sapiens
ccaaaatatcacatg

SEQ ID NO: 775769 - DNA, 15 bp, Homo sapiens
caaaatatcacatgc

SEQ ID NO: 775770 - DNA, 15 bp, Homo sapiens
aaaatatcacatgca

SEQ ID NO: 775771 - DNA, 15 bp, Homo sapiens
aaatatcacatgcat

SEQ ID NO: 775772 - DNA, 15 bp, Homo sapiens
aatatcacatgcatc

SEQ ID NO: 775773 - DNA, 15 bp, Homo sapiens
atatcacatgcatcc

SEQ ID NO: 775774 - DNA, 15 bp, Homo sapiens
tatcacatgcatccc

SEQ ID NO: 775775 - DNA, 15 bp, Homo sapiens
atcacatgcatcccc

SEQ ID NO: 775776 - DNA, 15 bp, Homo sapiens
tcacatgcatccccc

SEQ ID NO: 775777 - DNA, 15 bp, Homo sapiens
cacatgcatccccca

SEQ ID NO: 775778 - DNA, 15 bp, Homo sapiens
acatgcatcccccaa

SEQ ID NO: 775779 - DNA, 15 bp, Homo sapiens
catgcatcccccaaa

SEQ ID NO: 775780 - DNA, 15 bp, Homo sapiens
atgcatcccccaaaa

SEQ ID NO: 775781 - DNA, 15 bp, Homo sapiens
tgcatcccccaaaat

SEQ ID NO: 775782 - DNA, 15 bp, Homo sapiens
gcatcccccaaaata

SEQ ID NO: 775783 - DNA, 15 bp, Homo sapiens
catcccccaaaatat

SEQ ID NO: 775784 - DNA, 15 bp, Homo sapiens
atcccccaaaatatg

SEQ ID NO: 775785 - DNA, 15 bp, Homo sapiens
tcccccaaaatatgt

SEQ ID NO: 775786 - DNA, 15 bp, Homo sapiens
cccccaaaatatgta

SEQ ID NO: 775787 - DNA, 15 bp, Homo sapiens
ccccaaaatatgtac

SEQ ID NO: 775788 - DNA, 15 bp, Homo sapiens
cccaaaatatgtaca

SEQ ID NO: 775789 - DNA, 15 bp, Homo sapiens
ccaaaatatgtacac

SEQ ID NO: 775790 - DNA, 15 bp, Homo sapiens
caaaatatgtacact

SEQ ID NO: 775791 - DNA, 15 bp, Homo sapiens
aaaatatgtacacta

SEQ ID NO: 775792 - DNA, 15 bp, Homo sapiens
aaatatgtacactat

SEQ ID NO: 775793 - DNA, 15 bp, Homo sapiens
aatatgtacactatt

SEQ ID NO: 775794 - DNA, 15 bp, Homo sapiens
atatgtacactatta

SEQ ID NO: 775795 - DNA, 15 bp, Homo sapiens
tatgtacactattat

SEQ ID NO: 775796 - DNA, 15 bp, Homo sapiens
atgtacactattata

SEQ ID NO: 775797 - DNA, 15 bp, Homo sapiens
tgtacactattatat

SEQ ID NO: 775798 - DNA, 15 bp, Homo sapiens
gtacactattatatg

SEQ ID NO: 775799 - DNA, 15 bp, Homo sapiens
tacactattatatgt

SEQ ID NO: 775800 - DNA, 15 bp, Homo sapiens
acactattatatgtc

SEQ ID NO: 775801 - DNA, 15 bp, Homo sapiens
cactattatatgtca

SEQ ID NO: 775802 - DNA, 15 bp, Homo sapiens
actattatatgtcaa

SEQ ID NO: 775803 - DNA, 15 bp, Homo sapiens
ctattatatgtcaat

SEQ ID NO: 775804 - DNA, 15 bp, Homo sapiens
tattatatgtcaata

SEQ ID NO: 775805 - DNA, 15 bp, Homo sapiens
attatatgtcaatac

SEQ ID NO: 775806 - DNA, 15 bp, Homo sapiens
ttatatgtcaataca

SEQ ID NO: 775807 - DNA, 15 bp, Homo sapiens
tatatgtcaatacaa

SEQ ID NO: 775808 - DNA, 15 bp, Homo sapiens
atatgtcaatacaac

SEQ ID NO: 775809 - DNA, 15 bp, Homo sapiens
tatgtcaatacaacg

SEQ ID NO: 775810 - DNA, 15 bp, Homo sapiens
atgtcaatacaacgt

SEQ ID NO: 775811 - DNA, 15 bp, Homo sapiens
tgtcaatacaacgtt

SEQ ID NO: 775812 - DNA, 15 bp, Homo sapiens
gtcaatacaacgttt

SEQ ID NO: 775813 - DNA, 15 bp, Homo sapiens
tcaatacaacgtttt

SEQ ID NO: 775814 - DNA, 15 bp, Homo sapiens
caatacaacgtttta

SEQ ID NO: 775815 - DNA, 15 bp, Homo sapiens
aatacaacgttttaa

SEQ ID NO: 775816 - DNA, 15 bp, Homo sapiens
atacaacgttttaaa

SEQ ID NO: 775817 - DNA, 15 bp, Homo sapiens
tacaacgttttaaaa

SEQ ID NO: 775818 - DNA, 15 bp, Homo sapiens
acaacgttttaaaaa

SEQ ID NO: 775819 - DNA, 15 bp, Homo sapiens
caacgttttaaaaaa

SEQ ID NO: 775820 - DNA, 15 bp, Homo sapiens
aacgttttaaaaaaa

SEQ ID NO: 775821 - DNA, 15 bp, Homo sapiens
acgttttaaaaaaag

SEQ ID NO: 775822 - DNA, 15 bp, Homo sapiens
cgttttaaaaaaaga

SEQ ID NO: 775823 - DNA, 15 bp, Homo sapiens
gttttaaaaaaagaa

SEQ ID NO: 775824 - DNA, 15 bp, Homo sapiens
ttttaaaaaaagaaa

SEQ ID NO: 775825 - DNA, 15 bp, Homo sapiens
tttaaaaaaagaaac

SEQ ID NO: 775826 - DNA, 15 bp, Homo sapiens
ttaaaaaaagaaaca

SEQ ID NO: 775827 - DNA, 15 bp, Homo sapiens
taaaaaaagaaacag

SEQ ID NO: 775828 - DNA, 15 bp, Homo sapiens
aaaaaaagaaacagg

SEQ ID NO: 775829 - DNA, 15 bp, Homo sapiens
aaaaaagaaacaggt

SEQ ID NO: 775830 - DNA, 15 bp, Homo sapiens
aaaaagaaacaggtg

SEQ ID NO: 775831 - DNA, 15 bp, Homo sapiens
aaaagaaacaggtgg

SEQ ID NO: 775832 - DNA, 15 bp, Homo sapiens
aaagaaacaggtggt

SEQ ID NO: 775833 - DNA, 15 bp, Homo sapiens
aagaaacaggtggtg

SEQ ID NO: 775834 - DNA, 15 bp, Homo sapiens
agaaacaggtggtgg

SEQ ID NO: 775835 - DNA, 15 bp, Homo sapiens
gaaacaggtggtggg

SEQ ID NO: 775836 - DNA, 15 bp, Homo sapiens
aaacaggtggtgggc

SEQ ID NO: 775837 - DNA, 15 bp, Homo sapiens
aacaggtggtgggcc

SEQ ID NO: 775838 - DNA, 15 bp, Homo sapiens
acaggtggtgggcca

SEQ ID NO: 775839 - DNA, 15 bp, Homo sapiens
caggtggtgggccag

SEQ ID NO: 775840 - DNA, 15 bp, Homo sapiens
aggtggtgggccaga

SEQ ID NO: 775841 - DNA, 15 bp, Homo sapiens
ggtggtgggccagat

SEQ ID NO: 775842 - DNA, 15 bp, Homo sapiens
gtggtgggccagatt

SEQ ID NO: 775843 - DNA, 15 bp, Homo sapiens
tggtgggccagattt

SEQ ID NO: 775844 - DNA, 15 bp, Homo sapiens
ggtgggccagatttg

SEQ ID NO: 775845 - DNA, 15 bp, Homo sapiens
gtgggccagatttgt

SEQ ID NO: 775846 - DNA, 15 bp, Homo sapiens
tgggccagatttgtt

SEQ ID NO: 775847 - DNA, 15 bp, Homo sapiens
gggccagatttgttt

SEQ ID NO: 775848 - DNA, 15 bp, Homo sapiens
ggccagatttgtttc

SEQ ID NO: 775849 - DNA, 15 bp, Homo sapiens
gccagatttgtttca

SEQ ID NO: 775850 - DNA, 15 bp, Homo sapiens
ccagatttgtttcac

SEQ ID NO: 775851 - DNA, 15 bp, Homo sapiens
cagatttgtttcaca

SEQ ID NO: 775852 - DNA, 15 bp, Homo sapiens
agatttgtttcacac

SEQ ID NO: 775853 - DNA, 15 bp, Homo sapiens
gatttgtttcacaca

SEQ ID NO: 775854 - DNA, 15 bp, Homo sapiens
atttgtttcacacac

SEQ ID NO: 775855 - DNA, 15 bp, Homo sapiens
tttgtttcacacacc

SEQ ID NO: 775856 - DNA, 15 bp, Homo sapiens
ttgtttcacacacca

SEQ ID NO: 775857 - DNA, 15 bp, Homo sapiens
tgtttcacacaccat

SEQ ID NO: 775858 - DNA, 15 bp, Homo sapiens
gtttcacacaccata

SEQ ID NO: 775859 - DNA, 15 bp, Homo sapiens
tttcacacaccatag

SEQ ID NO: 775860 - DNA, 15 bp, Homo sapiens
ttcacacaccatagt

SEQ ID NO: 775861 - DNA, 15 bp, Homo sapiens
tcacacaccatagtt

SEQ ID NO: 775862 - DNA, 15 bp, Homo sapiens
cacacaccatagttt

SEQ ID NO: 775863 - DNA, 15 bp, Homo sapiens
acacaccatagtttg

SEQ ID NO: 775864 - DNA, 15 bp, Homo sapiens
cacaccatagtttgc

SEQ ID NO: 775865 - DNA, 15 bp, Homo sapiens
acaccatagtttgct

SEQ ID NO: 775866 - DNA, 15 bp, Homo sapiens
caccatagtttgctg

SEQ ID NO: 775867 - DNA, 15 bp, Homo sapiens
accatagtttgctga

SEQ ID NO: 775868 - DNA, 15 bp, Homo sapiens
ccatagtttgctgac

SEQ ID NO: 775869 - DNA, 15 bp, Homo sapiens
catagtttgctgact

SEQ ID NO: 775870 - DNA, 15 bp, Homo sapiens
atagtttgctgactc

SEQ ID NO: 775871 - DNA, 15 bp, Homo sapiens
tagtttgctgactca

SEQ ID NO: 775872 - DNA, 15 bp, Homo sapiens
agtttgctgactcag

SEQ ID NO: 775873 - DNA, 15 bp, Homo sapiens
gtttgctgactcagt

SEQ ID NO: 775874 - DNA, 15 bp, Homo sapiens
tttgctgactcagtc

SEQ ID NO: 775875 - DNA, 15 bp, Homo sapiens
ttgctgactcagtct

SEQ ID NO: 775876 - DNA, 15 bp, Homo sapiens
tgctgactcagtcta

SEQ ID NO: 775877 - DNA, 15 bp, Homo sapiens
gctgactcagtctaa

SEQ ID NO: 775878 - DNA, 15 bp, Homo sapiens
ctgactcagtctaat

SEQ ID NO: 775879 - DNA, 15 bp, Homo sapiens
tgactcagtctaatt

SEQ ID NO: 775880 - DNA, 15 bp, Homo sapiens
gactcagtctaattt

SEQ ID NO: 775881 - DNA, 15 bp, Homo sapiens
actcagtctaattta

SEQ ID NO: 775882 - DNA, 15 bp, Homo sapiens
ctcagtctaatttat

SEQ ID NO: 775883 - DNA, 15 bp, Homo sapiens
tcagtctaatttatc

SEQ ID NO: 775884 - DNA, 15 bp, Homo sapiens
cagtctaatttatcc

SEQ ID NO: 775885 - DNA, 15 bp, Homo sapiens
agtctaatttatccc

SEQ ID NO: 775886 - DNA, 15 bp, Homo sapiens
gtctaatttatcccc

SEQ ID NO: 775887 - DNA, 15 bp, Homo sapiens
tctaatttatcccct

SEQ ID NO: 775888 - DNA, 15 bp, Homo sapiens
ctaatttatcccctt

SEQ ID NO: 775889 - DNA, 15 bp, Homo sapiens
taatttatccccttg

SEQ ID NO: 775890 - DNA, 15 bp, Homo sapiens
aatttatccccttgt

SEQ ID NO: 775891 - DNA, 15 bp, Homo sapiens
atttatccccttgtt

SEQ ID NO: 775892 - DNA, 15 bp, Homo sapiens
tttatccccttgttt

SEQ ID NO: 775893 - DNA, 15 bp, Homo sapiens
ttatccccttgtttt

SEQ ID NO: 775894 - DNA, 15 bp, Homo sapiens
tatccccttgtttta

SEQ ID NO: 775895 - DNA, 15 bp, Homo sapiens
atccccttgttttat

SEQ ID NO: 775896 - DNA, 15 bp, Homo sapiens
tccccttgttttata

SEQ ID NO: 775897 - DNA, 15 bp, Homo sapiens
ccccttgttttatat

SEQ ID NO: 775898 - DNA, 15 bp, Homo sapiens
cccttgttttatata

SEQ ID NO: 775899 - DNA, 15 bp, Homo sapiens
ccttgttttatatat

SEQ ID NO: 775900 - DNA, 15 bp, Homo sapiens
cttgttttatatata

SEQ ID NO: 775901 - DNA, 15 bp, Homo sapiens
ttgttttatatataa

SEQ ID NO: 775902 - DNA, 15 bp, Homo sapiens
tgttttatatataaa

SEQ ID NO: 775903 - DNA, 15 bp, Homo sapiens
gttttatatataaag

SEQ ID NO: 775904 - DNA, 15 bp, Homo sapiens
ttttatatataaaga

SEQ ID NO: 775905 - DNA, 15 bp, Homo sapiens
tttatatataaagaa

SEQ ID NO: 775906 - DNA, 15 bp, Homo sapiens
ttatatataaagaaa

SEQ ID NO: 775907 - DNA, 15 bp, Homo sapiens
tatatataaagaaat

SEQ ID NO: 775908 - DNA, 15 bp, Homo sapiens
atatataaagaaatt

SEQ ID NO: 775909 - DNA, 15 bp, Homo sapiens
tatataaagaaattg

SEQ ID NO: 775910 - DNA, 15 bp, Homo sapiens
atataaagaaattga

SEQ ID NO: 775911 - DNA, 15 bp, Homo sapiens
tataaagaaattgaa

SEQ ID NO: 775912 - DNA, 15 bp, Homo sapiens
ataaagaaattgaaa

SEQ ID NO: 775913 - DNA, 15 bp, Homo sapiens
taaagaaattgaaag

SEQ ID NO: 775914 - DNA, 15 bp, Homo sapiens
aaagaaattgaaagt

SEQ ID NO: 775915 - DNA, 15 bp, Homo sapiens
aagaaattgaaagtc

SEQ ID NO: 775916 - DNA, 15 bp, Homo sapiens
agaaattgaaagtct

SEQ ID NO: 775917 - DNA, 15 bp, Homo sapiens
gaaattgaaagtctg

SEQ ID NO: 775918 - DNA, 15 bp, Homo sapiens
aaattgaaagtctgg

SEQ ID NO: 775919 - DNA, 15 bp, Homo sapiens
aattgaaagtctggg

SEQ ID NO: 775920 - DNA, 15 bp, Homo sapiens
attgaaagtctgggg

SEQ ID NO: 775921 - DNA, 15 bp, Homo sapiens
ttgaaagtctggggc

SEQ ID NO: 775922 - DNA, 15 bp, Homo sapiens
tgaaagtctggggct

SEQ ID NO: 775923 - DNA, 15 bp, Homo sapiens
gaaagtctggggctg

SEQ ID NO: 775924 - DNA, 15 bp, Homo sapiens
aaagtctggggctgg

SEQ ID NO: 775925 - DNA, 15 bp, Homo sapiens
aagtctggggctgga

SEQ ID NO: 775926 - DNA, 15 bp, Homo sapiens
agtctggggctggag

SEQ ID NO: 775927 - DNA, 15 bp, Homo sapiens
gtctggggctggagg

SEQ ID NO: 775928 - DNA, 15 bp, Homo sapiens
tctggggctggaggc

SEQ ID NO: 775929 - DNA, 15 bp, Homo sapiens
ctggggctggaggcg

SEQ ID NO: 775930 - DNA, 15 bp, Homo sapiens
tggggctggaggcga

SEQ ID NO: 775931 - DNA, 15 bp, Homo sapiens
ggggctggaggcgaa

SEQ ID NO: 775932 - DNA, 15 bp, Homo sapiens
gggctggaggcgaag

SEQ ID NO: 775933 - DNA, 15 bp, Homo sapiens
ggctggaggcgaaga

SEQ ID NO: 775934 - DNA, 15 bp, Homo sapiens
gctggaggcgaagag

SEQ ID NO: 775935 - DNA, 15 bp, Homo sapiens
ctggaggcgaagaga

SEQ ID NO: 775936 - DNA, 15 bp, Homo sapiens
tggaggcgaagagat

SEQ ID NO: 775937 - DNA, 15 bp, Homo sapiens
ggaggcgaagagatt

SEQ ID NO: 775938 - DNA, 15 bp, Homo sapiens
gaggcgaagagattc

SEQ ID NO: 775939 - DNA, 15 bp, Homo sapiens
aggcgaagagattct

SEQ ID NO: 775940 - DNA, 15 bp, Homo sapiens
ggcgaagagattctc

SEQ ID NO: 775941 - DNA, 15 bp, Homo sapiens
gcgaagagattctct

SEQ ID NO: 775942 - DNA, 15 bp, Homo sapiens
cgaagagattctcta

SEQ ID NO: 775943 - DNA, 15 bp, Homo sapiens
gaagagattctctaa

SEQ ID NO: 775944 - DNA, 15 bp, Homo sapiens
aagagattctctaag

SEQ ID NO: 775945 - DNA, 15 bp, Homo sapiens
agagattctctaagg

SEQ ID NO: 775946 - DNA, 15 bp, Homo sapiens
gagattctctaaggt

SEQ ID NO: 775947 - DNA, 15 bp, Homo sapiens
agattctctaaggtc

SEQ ID NO: 775948 - DNA, 15 bp, Homo sapiens
gattctctaaggtcg

SEQ ID NO: 775949 - DNA, 15 bp, Homo sapiens
attctctaaggtcga

SEQ ID NO: 775950 - DNA, 15 bp, Homo sapiens
ttctctaaggtcgag

SEQ ID NO: 775951 - DNA, 15 bp, Homo sapiens
tctctaaggtcgagt

SEQ ID NO: 775952 - DNA, 15 bp, Homo sapiens
ctctaaggtcgagta

SEQ ID NO: 775953 - DNA, 15 bp, Homo sapiens
tctaaggtcgagtag

SEQ ID NO: 775954 - DNA, 15 bp, Homo sapiens
ctaaggtcgagtagc

SEQ ID NO: 775955 - DNA, 15 bp, Homo sapiens
taaggtcgagtagca

SEQ ID NO: 775956 - DNA, 15 bp, Homo sapiens
aaggtcgagtagcaa

SEQ ID NO: 775957 - DNA, 15 bp, Homo sapiens
aggtcgagtagcaag

SEQ ID NO: 775958 - DNA, 15 bp, Homo sapiens
ggtcgagtagcaaga

SEQ ID NO: 775959 - DNA, 15 bp, Homo sapiens
gtcgagtagcaagag

SEQ ID NO: 775960 - DNA, 15 bp, Homo sapiens
tcgagtagcaagagt

SEQ ID NO: 775961 - DNA, 15 bp, Homo sapiens
cgagtagcaagagtg

SEQ ID NO: 775962 - DNA, 15 bp, Homo sapiens
gagtagcaagagtgt

SEQ ID NO: 775963 - DNA, 15 bp, Homo sapiens
agtagcaagagtgtc

SEQ ID NO: 775964 - DNA, 15 bp, Homo sapiens
gtagcaagagtgtca

SEQ ID NO: 775965 - DNA, 15 bp, Homo sapiens
tagcaagagtgtcac

SEQ ID NO: 775966 - DNA, 15 bp, Homo sapiens
agcaagagtgtcaca

SEQ ID NO: 775967 - DNA, 15 bp, Homo sapiens
gcaagagtgtcacac

SEQ ID NO: 775968 - DNA, 15 bp, Homo sapiens
caagagtgtcacact

SEQ ID NO: 775969 - DNA, 15 bp, Homo sapiens
aagagtgtcacactc

SEQ ID NO: 775970 - DNA, 15 bp, Homo sapiens
agagtgtcacactct

SEQ ID NO: 775971 - DNA, 15 bp, Homo sapiens
gagtgtcacactctt

SEQ ID NO: 775972 - DNA, 15 bp, Homo sapiens
agtgtcacactcttt

SEQ ID NO: 775973 - DNA, 15 bp, Homo sapiens
gtgtcacactctttg

SEQ ID NO: 775974 - DNA, 15 bp, Homo sapiens
tgtcacactctttgt

SEQ ID NO: 775975 - DNA, 15 bp, Homo sapiens
gtcacactctttgta

SEQ ID NO: 775976 - DNA, 15 bp, Homo sapiens
tcacactctttgtaa

SEQ ID NO: 775977 - DNA, 15 bp, Homo sapiens
cacactctttgtaaa

SEQ ID NO: 775978 - DNA, 15 bp, Homo sapiens
acactctttgtaaag

SEQ ID NO: 775979 - DNA, 15 bp, Homo sapiens
cactctttgtaaagg

SEQ ID NO: 775980 - DNA, 15 bp, Homo sapiens
actctttgtaaagga

SEQ ID NO: 775981 - DNA, 15 bp, Homo sapiens
ctctttgtaaaggag

SEQ ID NO: 775982 - DNA, 15 bp, Homo sapiens
tctttgtaaaggagc

SEQ ID NO: 775983 - DNA, 15 bp, Homo sapiens
ctttgtaaaggagcg

SEQ ID NO: 775984 - DNA, 15 bp, Homo sapiens
tttgtaaaggagcgt

SEQ ID NO: 775985 - DNA, 15 bp, Homo sapiens
ttgtaaaggagcgtt

SEQ ID NO: 775986 - DNA, 15 bp, Homo sapiens
tgtaaaggagcgtta

SEQ ID NO: 775987 - DNA, 15 bp, Homo sapiens
gtaaaggagcgttac

SEQ ID NO: 775988 - DNA, 15 bp, Homo sapiens
taaaggagcgttaca

SEQ ID NO: 775989 - DNA, 15 bp, Homo sapiens
aaaggagcgttacag

SEQ ID NO: 775990 - DNA, 15 bp, Homo sapiens
aaggagcgttacaga

SEQ ID NO: 775991 - DNA, 15 bp, Homo sapiens
aggagcgttacagac

SEQ ID NO: 775992 - DNA, 15 bp, Homo sapiens
ggagcgttacagact

SEQ ID NO: 775993 - DNA, 15 bp, Homo sapiens
gagcgttacagactc

SEQ ID NO: 775994 - DNA, 15 bp, Homo sapiens
agcgttacagactca

SEQ ID NO: 775995 - DNA, 15 bp, Homo sapiens
gcgttacagactcag

SEQ ID NO: 775996 - DNA, 15 bp, Homo sapiens
cgttacagactcagt

SEQ ID NO: 775997 - DNA, 15 bp, Homo sapiens
gttacagactcagtg

SEQ ID NO: 775998 - DNA, 15 bp, Homo sapiens
ttacagactcagtga

SEQ ID NO: 775999 - DNA, 15 bp, Homo sapiens
tacagactcagtgat

SEQ ID NO: 776000 - DNA, 15 bp, Homo sapiens
acagactcagtgata

SEQ ID NO: 776001 - DNA, 15 bp, Homo sapiens
cagactcagtgatac

SEQ ID NO: 776002 - DNA, 15 bp, Homo sapiens
agactcagtgataca

SEQ ID NO: 776003 - DNA, 15 bp, Homo sapiens
gactcagtgatacac

SEQ ID NO: 776004 - DNA, 15 bp, Homo sapiens
actcagtgatacaca

SEQ ID NO: 776005 - DNA, 15 bp, Homo sapiens
ctcagtgatacacac

SEQ ID NO: 776006 - DNA, 15 bp, Homo sapiens
tcagtgatacacaca

SEQ ID NO: 776007 - DNA, 15 bp, Homo sapiens
cagtgatacacacac

SEQ ID NO: 776008 - DNA, 15 bp, Homo sapiens
agtgatacacacaca

SEQ ID NO: 776009 - DNA, 15 bp, Homo sapiens
gtgatacacacacaa

SEQ ID NO: 776010 - DNA, 15 bp, Homo sapiens
tgatacacacacaaa

SEQ ID NO: 776011 - DNA, 15 bp, Homo sapiens
gatacacacacaaag

SEQ ID NO: 776012 - DNA, 15 bp, Homo sapiens
atacacacacaaaga

SEQ ID NO: 776013 - DNA, 15 bp, Homo sapiens
tacacacacaaagat

SEQ ID NO: 776014 - DNA, 15 bp, Homo sapiens
acacacacaaagata

SEQ ID NO: 776015 - DNA, 15 bp, Homo sapiens
cacacacaaagataa

SEQ ID NO: 776016 - DNA, 15 bp, Homo sapiens
acacacaaagataaa

SEQ ID NO: 776017 - DNA, 15 bp, Homo sapiens
cacacaaagataaat

SEQ ID NO: 776018 - DNA, 15 bp, Homo sapiens
acacaaagataaata

SEQ ID NO: 776019 - DNA, 15 bp, Homo sapiens
cacaaagataaatac

SEQ ID NO: 776020 - DNA, 15 bp, Homo sapiens
acaaagataaataca

SEQ ID NO: 776021 - DNA, 15 bp, Homo sapiens
caaagataaatacag

SEQ ID NO: 776022 - DNA, 15 bp, Homo sapiens
aaagataaatacagg

SEQ ID NO: 776023 - DNA, 15 bp, Homo sapiens
aagataaatacaggc

SEQ ID NO: 776024 - DNA, 15 bp, Homo sapiens
agataaatacaggca

SEQ ID NO: 776025 - DNA, 15 bp, Homo sapiens
gataaatacaggcac

SEQ ID NO: 776026 - DNA, 15 bp, Homo sapiens
ataaatacaggcaca

SEQ ID NO: 776027 - DNA, 15 bp, Homo sapiens
taaatacaggcacac

SEQ ID NO: 776028 - DNA, 15 bp, Homo sapiens
aaatacaggcacaca

SEQ ID NO: 776029 - DNA, 15 bp, Homo sapiens
aatacaggcacacac

SEQ ID NO: 776030 - DNA, 15 bp, Homo sapiens
atacaggcacacaca

SEQ ID NO: 776031 - DNA, 15 bp, Homo sapiens
tacaggcacacacac

SEQ ID NO: 776032 - DNA, 15 bp, Homo sapiens
acaggcacacacaca

SEQ ID NO: 776033 - DNA, 15 bp, Homo sapiens
caggcacacacacat

SEQ ID NO: 776034 - DNA, 15 bp, Homo sapiens
aggcacacacacata

SEQ ID NO: 776035 - DNA, 15 bp, Homo sapiens
ggcacacacacatac

SEQ ID NO: 776036 - DNA, 15 bp, Homo sapiens
gcacacacacatact

SEQ ID NO: 776037 - DNA, 15 bp, Homo sapiens
cacacacacatactc

SEQ ID NO: 776038 - DNA, 15 bp, Homo sapiens
acacacacatactct

SEQ ID NO: 776039 - DNA, 15 bp, Homo sapiens
cacacacatactctc

SEQ ID NO: 776040 - DNA, 15 bp, Homo sapiens
acacacatactctca

SEQ ID NO: 776041 - DNA, 15 bp, Homo sapiens
cacacatactctcac

SEQ ID NO: 776042 - DNA, 15 bp, Homo sapiens
acacatactctcact

SEQ ID NO: 776043 - DNA, 15 bp, Homo sapiens
cacatactctcacta

SEQ ID NO: 776044 - DNA, 15 bp, Homo sapiens
acatactctcactat

SEQ ID NO: 776045 - DNA, 15 bp, Homo sapiens
catactctcactatc

SEQ ID NO: 776046 - DNA, 15 bp, Homo sapiens
atactctcactatcc

SEQ ID NO: 776047 - DNA, 15 bp, Homo sapiens
tactctcactatcca

SEQ ID NO: 776048 - DNA, 15 bp, Homo sapiens
actctcactatccac

SEQ ID NO: 776049 - DNA, 15 bp, Homo sapiens
ctctcactatccaca

SEQ ID NO: 776050 - DNA, 15 bp, Homo sapiens
tctcactatccacat

SEQ ID NO: 776051 - DNA, 15 bp, Homo sapiens
ctcactatccacatt

SEQ ID NO: 776052 - DNA, 15 bp, Homo sapiens
tcactatccacattg

SEQ ID NO: 776053 - DNA, 15 bp, Homo sapiens
cactatccacattgt

SEQ ID NO: 776054 - DNA, 15 bp, Homo sapiens
actatccacattgtc

SEQ ID NO: 776055 - DNA, 15 bp, Homo sapiens
ctatccacattgtca

SEQ ID NO: 776056 - DNA, 15 bp, Homo sapiens
tatccacattgtcac

SEQ ID NO: 776057 - DNA, 15 bp, Homo sapiens
atccacattgtcact

SEQ ID NO: 776058 - DNA, 15 bp, Homo sapiens
tccacattgtcactt

SEQ ID NO: 776059 - DNA, 15 bp, Homo sapiens
ccacattgtcactta

SEQ ID NO: 776060 - DNA, 15 bp, Homo sapiens
cacattgtcacttag

SEQ ID NO: 776061 - DNA, 15 bp, Homo sapiens
acattgtcacttagt

SEQ ID NO: 776062 - DNA, 15 bp, Homo sapiens
cattgtcacttagtt

SEQ ID NO: 776063 - DNA, 15 bp, Homo sapiens
attgtcacttagttt

SEQ ID NO: 776064 - DNA, 15 bp, Homo sapiens
ttgtcacttagtttc

SEQ ID NO: 776065 - DNA, 15 bp, Homo sapiens
tgtcacttagtttct

SEQ ID NO: 776066 - DNA, 15 bp, Homo sapiens
gtcacttagtttctg

SEQ ID NO: 776067 - DNA, 15 bp, Homo sapiens
tcacttagtttctgc

SEQ ID NO: 776068 - DNA, 15 bp, Homo sapiens
cacttagtttctgca

SEQ ID NO: 776069 - DNA, 15 bp, Homo sapiens
acttagtttctgcat

SEQ ID NO: 776070 - DNA, 15 bp, Homo sapiens
cttagtttctgcatg

SEQ ID NO: 776071 - DNA, 15 bp, Homo sapiens
ttagtttctgcatgt

SEQ ID NO: 776072 - DNA, 15 bp, Homo sapiens
tagtttctgcatgtt

SEQ ID NO: 776073 - DNA, 15 bp, Homo sapiens
agtttctgcatgttc

SEQ ID NO: 776074 - DNA, 15 bp, Homo sapiens
gtttctgcatgttca

SEQ ID NO: 776075 - DNA, 15 bp, Homo sapiens
tttctgcatgttcat

SEQ ID NO: 776076 - DNA, 15 bp, Homo sapiens
ttctgcatgttcata

SEQ ID NO: 776077 - DNA, 15 bp, Homo sapiens
tctgcatgttcatat

SEQ ID NO: 776078 - DNA, 15 bp, Homo sapiens
ctgcatgttcatatt

SEQ ID NO: 776079 - DNA, 15 bp, Homo sapiens
tgcatgttcatattc

SEQ ID NO: 776080 - DNA, 15 bp, Homo sapiens
gcatgttcatattca

SEQ ID NO: 776081 - DNA, 15 bp, Homo sapiens
catgttcatattcat

SEQ ID NO: 776082 - DNA, 15 bp, Homo sapiens
atgttcatattcatt

SEQ ID NO: 776083 - DNA, 15 bp, Homo sapiens
tgttcatattcattt

SEQ ID NO: 776084 - DNA, 15 bp, Homo sapiens
gttcatattcatttc

SEQ ID NO: 776085 - DNA, 15 bp, Homo sapiens
ttcatattcatttcc

SEQ ID NO: 776086 - DNA, 15 bp, Homo sapiens
tcatattcatttcca

SEQ ID NO: 776087 - DNA, 15 bp, Homo sapiens
catattcatttccat

SEQ ID NO: 776088 - DNA, 15 bp, Homo sapiens
atattcatttccatg

SEQ ID NO: 776089 - DNA, 15 bp, Homo sapiens
tattcatttccatgt

SEQ ID NO: 776090 - DNA, 15 bp, Homo sapiens
attcatttccatgtt

SEQ ID NO: 776091 - DNA, 15 bp, Homo sapiens
ttcatttccatgttg

SEQ ID NO: 776092 - DNA, 15 bp, Homo sapiens
tcatttccatgttga

SEQ ID NO: 776093 - DNA, 15 bp, Homo sapiens
catttccatgttgat

SEQ ID NO: 776094 - DNA, 15 bp, Homo sapiens
atttccatgttgatc

SEQ ID NO: 776095 - DNA, 15 bp, Homo sapiens
tttccatgttgatct

SEQ ID NO: 776096 - DNA, 15 bp, Homo sapiens
ttccatgttgatctc

SEQ ID NO: 776097 - DNA, 15 bp, Homo sapiens
tccatgttgatctca

SEQ ID NO: 776098 - DNA, 15 bp, Homo sapiens
ccatgttgatctcac

SEQ ID NO: 776099 - DNA, 15 bp, Homo sapiens
catgttgatctcaca

SEQ ID NO: 776100 - DNA, 15 bp, Homo sapiens
atgttgatctcacag

SEQ ID NO: 776101 - DNA, 15 bp, Homo sapiens
tgttgatctcacagc

SEQ ID NO: 776102 - DNA, 15 bp, Homo sapiens
gttgatctcacagca

SEQ ID NO: 776103 - DNA, 15 bp, Homo sapiens
ttgatctcacagcaa

SEQ ID NO: 776104 - DNA, 15 bp, Homo sapiens
tgatctcacagcaac

SEQ ID NO: 776105 - DNA, 15 bp, Homo sapiens
gatctcacagcaact

SEQ ID NO: 776106 - DNA, 15 bp, Homo sapiens
atctcacagcaactg

SEQ ID NO: 776107 - DNA, 15 bp, Homo sapiens
tctcacagcaactgt

SEQ ID NO: 776108 - DNA, 15 bp, Homo sapiens
ctcacagcaactgtc

SEQ ID NO: 776109 - DNA, 15 bp, Homo sapiens
tcacagcaactgtct

SEQ ID NO: 776110 - DNA, 15 bp, Homo sapiens
cacagcaactgtctc

SEQ ID NO: 776111 - DNA, 15 bp, Homo sapiens
acagcaactgtctcc

SEQ ID NO: 776112 - DNA, 15 bp, Homo sapiens
cagcaactgtctccc

SEQ ID NO: 776113 - DNA, 15 bp, Homo sapiens
agcaactgtctccct

SEQ ID NO: 776114 - DNA, 15 bp, Homo sapiens
gcaactgtctcccta

SEQ ID NO: 776115 - DNA, 15 bp, Homo sapiens
caactgtctccctag

SEQ ID NO: 776116 - DNA, 15 bp, Homo sapiens
aactgtctccctagg

SEQ ID NO: 776117 - DNA, 15 bp, Homo sapiens
actgtctccctaggg

SEQ ID NO: 776118 - DNA, 15 bp, Homo sapiens
ctgtctccctaggga

SEQ ID NO: 776119 - DNA, 15 bp, Homo sapiens
tgtctccctagggaa

SEQ ID NO: 776120 - DNA, 15 bp, Homo sapiens
gtctccctagggaaa

SEQ ID NO: 776121 - DNA, 15 bp, Homo sapiens
tctccctagggaaac

SEQ ID NO: 776122 - DNA, 15 bp, Homo sapiens
ctccctagggaaact

SEQ ID NO: 776123 - DNA, 15 bp, Homo sapiens
tccctagggaaacta

SEQ ID NO: 776124 - DNA, 15 bp, Homo sapiens
ccctagggaaactat

SEQ ID NO: 776125 - DNA, 15 bp, Homo sapiens
cctagggaaactatg

SEQ ID NO: 776126 - DNA, 15 bp, Homo sapiens
ctagggaaactatgt

SEQ ID NO: 776127 - DNA, 15 bp, Homo sapiens
tagggaaactatgtc

SEQ ID NO: 776128 - DNA, 15 bp, Homo sapiens
agggaaactatgtcc

SEQ ID NO: 776129 - DNA, 15 bp, Homo sapiens
gggaaactatgtcct

SEQ ID NO: 776130 - DNA, 15 bp, Homo sapiens
ggaaactatgtcctg

SEQ ID NO: 776131 - DNA, 15 bp, Homo sapiens
gaaactatgtcctgt

SEQ ID NO: 776132 - DNA, 15 bp, Homo sapiens
aaactatgtcctgtg

SEQ ID NO: 776133 - DNA, 15 bp, Homo sapiens
aactatgtcctgtgg

SEQ ID NO: 776134 - DNA, 15 bp, Homo sapiens
actatgtcctgtggt

SEQ ID NO: 776135 - DNA, 15 bp, Homo sapiens
ctatgtcctgtggtg

SEQ ID NO: 776136 - DNA, 15 bp, Homo sapiens
tatgtcctgtggtga

SEQ ID NO: 776137 - DNA, 15 bp, Homo sapiens
atgtcctgtggtgaa

SEQ ID NO: 776138 - DNA, 15 bp, Homo sapiens
tgtcctgtggtgaag

SEQ ID NO: 776139 - DNA, 15 bp, Homo sapiens
gtcctgtggtgaagg

SEQ ID NO: 776140 - DNA, 15 bp, Homo sapiens
tcctgtggtgaagga

SEQ ID NO: 776141 - DNA, 15 bp, Homo sapiens
cctgtggtgaaggac

SEQ ID NO: 776142 - DNA, 15 bp, Homo sapiens
ctgtggtgaaggaca

SEQ ID NO: 776143 - DNA, 15 bp, Homo sapiens
tgtggtgaaggacag

SEQ ID NO: 776144 - DNA, 15 bp, Homo sapiens
gtggtgaaggacagc

SEQ ID NO: 776145 - DNA, 15 bp, Homo sapiens
tggtgaaggacagcc

SEQ ID NO: 776146 - DNA, 15 bp, Homo sapiens
ggtgaaggacagcct

SEQ ID NO: 776147 - DNA, 15 bp, Homo sapiens
gtgaaggacagcctc

SEQ ID NO: 776148 - DNA, 15 bp, Homo sapiens
tgaaggacagcctca

SEQ ID NO: 776149 - DNA, 15 bp, Homo sapiens
gaaggacagcctcac

SEQ ID NO: 776150 - DNA, 15 bp, Homo sapiens
aaggacagcctcacc

SEQ ID NO: 776151 - DNA, 15 bp, Homo sapiens
aggacagcctcacct

SEQ ID NO: 776152 - DNA, 15 bp, Homo sapiens
ggacagcctcacctc

SEQ ID NO: 776153 - DNA, 15 bp, Homo sapiens
gacagcctcacctca

SEQ ID NO: 776154 - DNA, 15 bp, Homo sapiens
acagcctcacctcaa

SEQ ID NO: 776155 - DNA, 15 bp, Homo sapiens
cagcctcacctcaac

SEQ ID NO: 776156 - DNA, 15 bp, Homo sapiens
agcctcacctcaact

SEQ ID NO: 776157 - DNA, 15 bp, Homo sapiens
gcctcacctcaactt

SEQ ID NO: 776158 - DNA, 15 bp, Homo sapiens
cctcacctcaacttg

SEQ ID NO: 776159 - DNA, 15 bp, Homo sapiens
ctcacctcaacttgg

SEQ ID NO: 776160 - DNA, 15 bp, Homo sapiens
tcacctcaacttggg

SEQ ID NO: 776161 - DNA, 15 bp, Homo sapiens
cacctcaacttggga

SEQ ID NO: 776162 - DNA, 15 bp, Homo sapiens
acctcaacttgggag

SEQ ID NO: 776163 - DNA, 15 bp, Homo sapiens
cctcaacttgggagc

SEQ ID NO: 776164 - DNA, 15 bp, Homo sapiens
ctcaacttgggagcg

SEQ ID NO: 776165 - DNA, 15 bp, Homo sapiens
tcaacttgggagcga

SEQ ID NO: 776166 - DNA, 15 bp, Homo sapiens
caacttgggagcgac

SEQ ID NO: 776167 - DNA, 15 bp, Homo sapiens
aacttgggagcgaca

SEQ ID NO: 776168 - DNA, 15 bp, Homo sapiens
acttgggagcgacat

SEQ ID NO: 776169 - DNA, 15 bp, Homo sapiens
cttgggagcgacatc

SEQ ID NO: 776170 - DNA, 15 bp, Homo sapiens
ttgggagcgacatct

SEQ ID NO: 776171 - DNA, 15 bp, Homo sapiens
tgggagcgacatcta

SEQ ID NO: 776172 - DNA, 15 bp, Homo sapiens
gggagcgacatctac

SEQ ID NO: 776173 - DNA, 15 bp, Homo sapiens
ggagcgacatctaca

SEQ ID NO: 776174 - DNA, 15 bp, Homo sapiens
gagcgacatctacac

SEQ ID NO: 776175 - DNA, 15 bp, Homo sapiens
agcgacatctacact

SEQ ID NO: 776176 - DNA, 15 bp, Homo sapiens
gcgacatctacactg

SEQ ID NO: 776177 - DNA, 15 bp, Homo sapiens
cgacatctacactgc

SEQ ID NO: 776178 - DNA, 15 bp, Homo sapiens
gacatctacactgcc

SEQ ID NO: 776179 - DNA, 15 bp, Homo sapiens
acatctacactgcct

SEQ ID NO: 776180 - DNA, 15 bp, Homo sapiens
catctacactgccta

SEQ ID NO: 776181 - DNA, 15 bp, Homo sapiens
atctacactgcctag

SEQ ID NO: 776182 - DNA, 15 bp, Homo sapiens
tctacactgcctaga

SEQ ID NO: 776183 - DNA, 15 bp, Homo sapiens
ctacactgcctagac

SEQ ID NO: 776184 - DNA, 15 bp, Homo sapiens
tacactgcctagact

SEQ ID NO: 776185 - DNA, 15 bp, Homo sapiens
acactgcctagactt

SEQ ID NO: 776186 - DNA, 15 bp, Homo sapiens
cactgcctagacttt

SEQ ID NO: 776187 - DNA, 15 bp, Homo sapiens
actgcctagacttta

SEQ ID NO: 776188 - DNA, 15 bp, Homo sapiens
ctgcctagactttac

SEQ ID NO: 776189 - DNA, 15 bp, Homo sapiens
tgcctagactttacc

SEQ ID NO: 776190 - DNA, 15 bp, Homo sapiens
gcctagactttacct

SEQ ID NO: 776191 - DNA, 15 bp, Homo sapiens
cctagactttacctc

SEQ ID NO: 776192 - DNA, 15 bp, Homo sapiens
ctagactttacctca

SEQ ID NO: 776193 - DNA, 15 bp, Homo sapiens
tagactttacctcaa

SEQ ID NO: 776194 - DNA, 15 bp, Homo sapiens
agactttacctcaac

SEQ ID NO: 776195 - DNA, 15 bp, Homo sapiens
gactttacctcaacc

SEQ ID NO: 776196 - DNA, 15 bp, Homo sapiens
actttacctcaaccc

SEQ ID NO: 776197 - DNA, 15 bp, Homo sapiens
ctttacctcaacccc

SEQ ID NO: 776198 - DNA, 15 bp, Homo sapiens
tttacctcaaccccc

SEQ ID NO: 776199 - DNA, 15 bp, Homo sapiens
ttacctcaaccccct

SEQ ID NO: 776200 - DNA, 15 bp, Homo sapiens
tacctcaaccccctg

SEQ ID NO: 776201 - DNA, 15 bp, Homo sapiens
acctcaaccccctga

SEQ ID NO: 776202 - DNA, 15 bp, Homo sapiens
cctcaaccccctgac

SEQ ID NO: 776203 - DNA, 15 bp, Homo sapiens
ctcaaccccctgaca

SEQ ID NO: 776204 - DNA, 15 bp, Homo sapiens
tcaaccccctgacag

SEQ ID NO: 776205 - DNA, 15 bp, Homo sapiens
caaccccctgacaga

SEQ ID NO: 776206 - DNA, 15 bp, Homo sapiens
aaccccctgacagat

SEQ ID NO: 776207 - DNA, 15 bp, Homo sapiens
accccctgacagatt

SEQ ID NO: 776208 - DNA, 15 bp, Homo sapiens
ccccctgacagattc

SEQ ID NO: 776209 - DNA, 15 bp, Homo sapiens
cccctgacagattca

SEQ ID NO: 776210 - DNA, 15 bp, Homo sapiens
ccctgacagattcaa

SEQ ID NO: 776211 - DNA, 15 bp, Homo sapiens
cctgacagattcaat

SEQ ID NO: 776212 - DNA, 15 bp, Homo sapiens
ctgacagattcaatg

SEQ ID NO: 776213 - DNA, 15 bp, Homo sapiens
tgacagattcaatgt

SEQ ID NO: 776214 - DNA, 15 bp, Homo sapiens
gacagattcaatgtt

SEQ ID NO: 776215 - DNA, 15 bp, Homo sapiens
acagattcaatgttt

SEQ ID NO: 776216 - DNA, 15 bp, Homo sapiens
cagattcaatgtttt

SEQ ID NO: 776217 - DNA, 15 bp, Homo sapiens
agattcaatgttttg

SEQ ID NO: 776218 - DNA, 15 bp, Homo sapiens
gattcaatgttttgt

SEQ ID NO: 776219 - DNA, 15 bp, Homo sapiens
attcaatgttttgtg

SEQ ID NO: 776220 - DNA, 15 bp, Homo sapiens
ttcaatgttttgtgt

SEQ ID NO: 776221 - DNA, 15 bp, Homo sapiens
tcaatgttttgtgtg

SEQ ID NO: 776222 - DNA, 15 bp, Homo sapiens
caatgttttgtgtgt

SEQ ID NO: 776223 - DNA, 15 bp, Homo sapiens
aatgttttgtgtgtc

SEQ ID NO: 776224 - DNA, 15 bp, Homo sapiens
atgttttgtgtgtct

SEQ ID NO: 776225 - DNA, 15 bp, Homo sapiens
tgttttgtgtgtctc

SEQ ID NO: 776226 - DNA, 15 bp, Homo sapiens
gttttgtgtgtctct

SEQ ID NO: 776227 - DNA, 15 bp, Homo sapiens
ttttgtgtgtctctt

SEQ ID NO: 776228 - DNA, 15 bp, Homo sapiens
tttgtgtgtctcttc

SEQ ID NO: 776229 - DNA, 15 bp, Homo sapiens
ttgtgtgtctcttca

SEQ ID NO: 776230 - DNA, 15 bp, Homo sapiens
tgtgtgtctcttcaa

SEQ ID NO: 776231 - DNA, 15 bp, Homo sapiens
gtgtgtctcttcaaa

SEQ ID NO: 776232 - DNA, 15 bp, Homo sapiens
tgtgtctcttcaaag

SEQ ID NO: 776233 - DNA, 15 bp, Homo sapiens
gtgtctcttcaaaga

SEQ ID NO: 776234 - DNA, 15 bp, Homo sapiens
tgtctcttcaaagac

SEQ ID NO: 776235 - DNA, 15 bp, Homo sapiens
gtctcttcaaagact

SEQ ID NO: 776236 - DNA, 15 bp, Homo sapiens
tctcttcaaagactg

SEQ ID NO: 776237 - DNA, 15 bp, Homo sapiens
ctcttcaaagactgg

SEQ ID NO: 776238 - DNA, 15 bp, Homo sapiens
tcttcaaagactggt

SEQ ID NO: 776239 - DNA, 15 bp, Homo sapiens
cttcaaagactggtc

SEQ ID NO: 776240 - DNA, 15 bp, Homo sapiens
ttcaaagactggtct

SEQ ID NO: 776241 - DNA, 15 bp, Homo sapiens
tcaaagactggtctt

SEQ ID NO: 776242 - DNA, 15 bp, Homo sapiens
caaagactggtcttg

SEQ ID NO: 776243 - DNA, 15 bp, Homo sapiens
aaagactggtcttgc

SEQ ID NO: 776244 - DNA, 15 bp, Homo sapiens
aagactggtcttgcc

SEQ ID NO: 776245 - DNA, 15 bp, Homo sapiens
agactggtcttgcca

SEQ ID NO: 776246 - DNA, 15 bp, Homo sapiens
gactggtcttgccaa

SEQ ID NO: 776247 - DNA, 15 bp, Homo sapiens
actggtcttgccaaa

SEQ ID NO: 776248 - DNA, 15 bp, Homo sapiens
ctggtcttgccaaaa

SEQ ID NO: 776249 - DNA, 15 bp, Homo sapiens
tggtcttgccaaaat

SEQ ID NO: 776250 - DNA, 15 bp, Homo sapiens
ggtcttgccaaaata

SEQ ID NO: 776251 - DNA, 15 bp, Homo sapiens
gtcttgccaaaatag

SEQ ID NO: 776252 - DNA, 15 bp, Homo sapiens
tcttgccaaaatagc

SEQ ID NO: 776253 - DNA, 15 bp, Homo sapiens
cttgccaaaatagct

SEQ ID NO: 776254 - DNA, 15 bp, Homo sapiens
ttgccaaaatagcta

SEQ ID NO: 776255 - DNA, 15 bp, Homo sapiens
tgccaaaatagctac

SEQ ID NO: 776256 - DNA, 15 bp, Homo sapiens
gccaaaatagctacc

SEQ ID NO: 776257 - DNA, 15 bp, Homo sapiens
ccaaaatagctacca

SEQ ID NO: 776258 - DNA, 15 bp, Homo sapiens
caaaatagctaccag

SEQ ID NO: 776259 - DNA, 15 bp, Homo sapiens
aaaatagctaccagc

SEQ ID NO: 776260 - DNA, 15 bp, Homo sapiens
aaatagctaccagct

SEQ ID NO: 776261 - DNA, 15 bp, Homo sapiens
aatagctaccagctc

SEQ ID NO: 776262 - DNA, 15 bp, Homo sapiens
atagctaccagctcc

SEQ ID NO: 776263 - DNA, 15 bp, Homo sapiens
tagctaccagctcct

SEQ ID NO: 776264 - DNA, 15 bp, Homo sapiens
agctaccagctcctg

SEQ ID NO: 776265 - DNA, 15 bp, Homo sapiens
gctaccagctcctga

SEQ ID NO: 776266 - DNA, 15 bp, Homo sapiens
ctaccagctcctgag

SEQ ID NO: 776267 - DNA, 15 bp, Homo sapiens
taccagctcctgagc

SEQ ID NO: 776268 - DNA, 15 bp, Homo sapiens
accagctcctgagca

SEQ ID NO: 776269 - DNA, 15 bp, Homo sapiens
ccagctcctgagcaa

SEQ ID NO: 776270 - DNA, 15 bp, Homo sapiens
cagctcctgagcaaa

SEQ ID NO: 776271 - DNA, 15 bp, Homo sapiens
agctcctgagcaaag

SEQ ID NO: 776272 - DNA, 15 bp, Homo sapiens
gctcctgagcaaagc

SEQ ID NO: 776273 - DNA, 15 bp, Homo sapiens
ctcctgagcaaagct

SEQ ID NO: 776274 - DNA, 15 bp, Homo sapiens
tcctgagcaaagcta

SEQ ID NO: 776275 - DNA, 15 bp, Homo sapiens
cctgagcaaagctag

SEQ ID NO: 776276 - DNA, 15 bp, Homo sapiens
ctgagcaaagctaga

SEQ ID NO: 776277 - DNA, 15 bp, Homo sapiens
tgagcaaagctagag

SEQ ID NO: 776278 - DNA, 15 bp, Homo sapiens
gagcaaagctagaga

SEQ ID NO: 776279 - DNA, 15 bp, Homo sapiens
agcaaagctagagag

SEQ ID NO: 776280 - DNA, 15 bp, Homo sapiens
gcaaagctagagaga

SEQ ID NO: 776281 - DNA, 15 bp, Homo sapiens
caaagctagagagag

SEQ ID NO: 776282 - DNA, 15 bp, Homo sapiens
aaagctagagagagc

SEQ ID NO: 776283 - DNA, 15 bp, Homo sapiens
aagctagagagagcc

SEQ ID NO: 776284 - DNA, 15 bp, Homo sapiens
agctagagagagccc

SEQ ID NO: 776285 - DNA, 15 bp, Homo sapiens
gctagagagagccct

SEQ ID NO: 776286 - DNA, 15 bp, Homo sapiens
ctagagagagccctt

SEQ ID NO: 776287 - DNA, 15 bp, Homo sapiens
tagagagagccctta

SEQ ID NO: 776288 - DNA, 15 bp, Homo sapiens
agagagagcccttag

SEQ ID NO: 776289 - DNA, 15 bp, Homo sapiens
gagagagcccttaga

SEQ ID NO: 776290 - DNA, 15 bp, Homo sapiens
agagagcccttagaa

SEQ ID NO: 776291 - DNA, 15 bp, Homo sapiens
gagagcccttagaat

SEQ ID NO: 776292 - DNA, 15 bp, Homo sapiens
agagcccttagaatc

SEQ ID NO: 776293 - DNA, 15 bp, Homo sapiens
gagcccttagaatca

SEQ ID NO: 776294 - DNA, 15 bp, Homo sapiens
agcccttagaatcac

SEQ ID NO: 776295 - DNA, 15 bp, Homo sapiens
gcccttagaatcact

SEQ ID NO: 776296 - DNA, 15 bp, Homo sapiens
cccttagaatcactc

SEQ ID NO: 776297 - DNA, 15 bp, Homo sapiens
ccttagaatcactct

SEQ ID NO: 776298 - DNA, 15 bp, Homo sapiens
cttagaatcactctt

SEQ ID NO: 776299 - DNA, 15 bp, Homo sapiens
ttagaatcactcttt

SEQ ID NO: 776300 - DNA, 15 bp, Homo sapiens
tagaatcactctttg

SEQ ID NO: 776301 - DNA, 15 bp, Homo sapiens
agaatcactctttgt

SEQ ID NO: 776302 - DNA, 15 bp, Homo sapiens
gaatcactctttgta

SEQ ID NO: 776303 - DNA, 15 bp, Homo sapiens
aatcactctttgtag

SEQ ID NO: 776304 - DNA, 15 bp, Homo sapiens
atcactctttgtagt

SEQ ID NO: 776305 - DNA, 15 bp, Homo sapiens
tcactctttgtagtt

SEQ ID NO: 776306 - DNA, 15 bp, Homo sapiens
cactctttgtagtta

SEQ ID NO: 776307 - DNA, 15 bp, Homo sapiens
actctttgtagttac

SEQ ID NO: 776308 - DNA, 15 bp, Homo sapiens
ctctttgtagttact

SEQ ID NO: 776309 - DNA, 15 bp, Homo sapiens
tctttgtagttactt

SEQ ID NO: 776310 - DNA, 15 bp, Homo sapiens
ctttgtagttacttt

SEQ ID NO: 776311 - DNA, 15 bp, Homo sapiens
tttgtagttactttc

SEQ ID NO: 776312 - DNA, 15 bp, Homo sapiens
ttgtagttactttcc

SEQ ID NO: 776313 - DNA, 15 bp, Homo sapiens
tgtagttactttccc

SEQ ID NO: 776314 - DNA, 15 bp, Homo sapiens
gtagttactttcccc

SEQ ID NO: 776315 - DNA, 15 bp, Homo sapiens
tagttactttcccca

SEQ ID NO: 776316 - DNA, 15 bp, Homo sapiens
agttactttccccat

SEQ ID NO: 776317 - DNA, 15 bp, Homo sapiens
gttactttccccata

SEQ ID NO: 776318 - DNA, 15 bp, Homo sapiens
ttactttccccatat

SEQ ID NO: 776319 - DNA, 15 bp, Homo sapiens
tactttccccatatt

SEQ ID NO: 776320 - DNA, 15 bp, Homo sapiens
actttccccatattc

SEQ ID NO: 776321 - DNA, 15 bp, Homo sapiens
ctttccccatattcc

SEQ ID NO: 776322 - DNA, 15 bp, Homo sapiens
tttccccatattcct

SEQ ID NO: 776323 - DNA, 15 bp, Homo sapiens
ttccccatattccta

SEQ ID NO: 776324 - DNA, 15 bp, Homo sapiens
tccccatattcctat

SEQ ID NO: 776325 - DNA, 15 bp, Homo sapiens
ccccatattcctatg

SEQ ID NO: 776326 - DNA, 15 bp, Homo sapiens
cccatattcctatgc

SEQ ID NO: 776327 - DNA, 15 bp, Homo sapiens
ccatattcctatgct

SEQ ID NO: 776328 - DNA, 15 bp, Homo sapiens
catattcctatgctg

SEQ ID NO: 776329 - DNA, 15 bp, Homo sapiens
atattcctatgctgt

SEQ ID NO: 776330 - DNA, 15 bp, Homo sapiens
tattcctatgctgtt

SEQ ID NO: 776331 - DNA, 15 bp, Homo sapiens
attcctatgctgtta

SEQ ID NO: 776332 - DNA, 15 bp, Homo sapiens
ttcctatgctgttac

SEQ ID NO: 776333 - DNA, 15 bp, Homo sapiens
tcctatgctgttaca

SEQ ID NO: 776334 - DNA, 15 bp, Homo sapiens
cctatgctgttacat

SEQ ID NO: 776335 - DNA, 15 bp, Homo sapiens
ctatgctgttacatc

SEQ ID NO: 776336 - DNA, 15 bp, Homo sapiens
tatgctgttacatct

SEQ ID NO: 776337 - DNA, 15 bp, Homo sapiens
atgctgttacatctg

SEQ ID NO: 776338 - DNA, 15 bp, Homo sapiens
tgctgttacatctgt

SEQ ID NO: 776339 - DNA, 15 bp, Homo sapiens
gctgttacatctgtg

SEQ ID NO: 776340 - DNA, 15 bp, Homo sapiens
ctgttacatctgtgt

SEQ ID NO: 776341 - DNA, 15 bp, Homo sapiens
tgttacatctgtgta

SEQ ID NO: 776342 - DNA, 15 bp, Homo sapiens
gttacatctgtgtat

SEQ ID NO: 776343 - DNA, 15 bp, Homo sapiens
ttacatctgtgtatt

SEQ ID NO: 776344 - DNA, 15 bp, Homo sapiens
tacatctgtgtattg

SEQ ID NO: 776345 - DNA, 15 bp, Homo sapiens
acatctgtgtattgc

SEQ ID NO: 776346 - DNA, 15 bp, Homo sapiens
catctgtgtattgct

SEQ ID NO: 776347 - DNA, 15 bp, Homo sapiens
atctgtgtattgctc

SEQ ID NO: 776348 - DNA, 15 bp, Homo sapiens
tctgtgtattgctcc

SEQ ID NO: 776349 - DNA, 15 bp, Homo sapiens
ctgtgtattgctcca

SEQ ID NO: 776350 - DNA, 15 bp, Homo sapiens
tgtgtattgctccag

SEQ ID NO: 776351 - DNA, 15 bp, Homo sapiens
gtgtattgctccagg

SEQ ID NO: 776352 - DNA, 15 bp, Homo sapiens
tgtattgctccagga

SEQ ID NO: 776353 - DNA, 15 bp, Homo sapiens
gtattgctccaggaa

SEQ ID NO: 776354 - DNA, 15 bp, Homo sapiens
tattgctccaggaag

SEQ ID NO: 776355 - DNA, 15 bp, Homo sapiens
attgctccaggaagc

SEQ ID NO: 776356 - DNA, 15 bp, Homo sapiens
ttgctccaggaagct

SEQ ID NO: 776357 - DNA, 15 bp, Homo sapiens
tgctccaggaagctt

SEQ ID NO: 776358 - DNA, 15 bp, Homo sapiens
gctccaggaagctta

SEQ ID NO: 776359 - DNA, 15 bp, Homo sapiens
ctccaggaagcttac

SEQ ID NO: 776360 - DNA, 15 bp, Homo sapiens
tccaggaagcttaca

SEQ ID NO: 776361 - DNA, 15 bp, Homo sapiens
ccaggaagcttacac

SEQ ID NO: 776362 - DNA, 15 bp, Homo sapiens
caggaagcttacaca

SEQ ID NO: 776363 - DNA, 15 bp, Homo sapiens
aggaagcttacacag

SEQ ID NO: 776364 - DNA, 15 bp, Homo sapiens
ggaagcttacacagc

SEQ ID NO: 776365 - DNA, 15 bp, Homo sapiens
gaagcttacacagct

SEQ ID NO: 776366 - DNA, 15 bp, Homo sapiens
aagcttacacagcta

SEQ ID NO: 776367 - DNA, 15 bp, Homo sapiens
agcttacacagctaa

SEQ ID NO: 776368 - DNA, 15 bp, Homo sapiens
gcttacacagctaat

SEQ ID NO: 776369 - DNA, 15 bp, Homo sapiens
cttacacagctaatt

SEQ ID NO: 776370 - DNA, 15 bp, Homo sapiens
ttacacagctaattc

SEQ ID NO: 776371 - DNA, 15 bp, Homo sapiens
tacacagctaattct

SEQ ID NO: 776372 - DNA, 15 bp, Homo sapiens
acacagctaattcta

SEQ ID NO: 776373 - DNA, 15 bp, Homo sapiens
cacagctaattctat

SEQ ID NO: 776374 - DNA, 15 bp, Homo sapiens
acagctaattctatg

SEQ ID NO: 776375 - DNA, 15 bp, Homo sapiens
cagctaattctatga

SEQ ID NO: 776376 - DNA, 15 bp, Homo sapiens
agctaattctatgaa

SEQ ID NO: 776377 - DNA, 15 bp, Homo sapiens
gctaattctatgaac

SEQ ID NO: 776378 - DNA, 15 bp, Homo sapiens
ctaattctatgaact

SEQ ID NO: 776379 - DNA, 15 bp, Homo sapiens
taattctatgaactg

SEQ ID NO: 776380 - DNA, 15 bp, Homo sapiens
aattctatgaactga

SEQ ID NO: 776381 - DNA, 15 bp, Homo sapiens
attctatgaactgaa

SEQ ID NO: 776382 - DNA, 15 bp, Homo sapiens
ttctatgaactgaaa

SEQ ID NO: 776383 - DNA, 15 bp, Homo sapiens
tctatgaactgaaag

SEQ ID NO: 776384 - DNA, 15 bp, Homo sapiens
ctatgaactgaaagc

SEQ ID NO: 776385 - DNA, 15 bp, Homo sapiens
tatgaactgaaagca

SEQ ID NO: 776386 - DNA, 15 bp, Homo sapiens
atgaactgaaagcat

SEQ ID NO: 776387 - DNA, 15 bp, Homo sapiens
tgaactgaaagcata

SEQ ID NO: 776388 - DNA, 15 bp, Homo sapiens
gaactgaaagcatat

SEQ ID NO: 776389 - DNA, 15 bp, Homo sapiens
aactgaaagcatatg

SEQ ID NO: 776390 - DNA, 15 bp, Homo sapiens
actgaaagcatatgc

SEQ ID NO: 776391 - DNA, 15 bp, Homo sapiens
ctgaaagcatatgct

SEQ ID NO: 776392 - DNA, 15 bp, Homo sapiens
tgaaagcatatgcta

SEQ ID NO: 776393 - DNA, 15 bp, Homo sapiens
gaaagcatatgctac

SEQ ID NO: 776394 - DNA, 15 bp, Homo sapiens
aaagcatatgctact

SEQ ID NO: 776395 - DNA, 15 bp, Homo sapiens
aagcatatgctactt

SEQ ID NO: 776396 - DNA, 15 bp, Homo sapiens
agcatatgctacttg

SEQ ID NO: 776397 - DNA, 15 bp, Homo sapiens
gcatatgctacttgc

SEQ ID NO: 776398 - DNA, 15 bp, Homo sapiens
catatgctacttgct

SEQ ID NO: 776399 - DNA, 15 bp, Homo sapiens
atatgctacttgctt

SEQ ID NO: 776400 - DNA, 15 bp, Homo sapiens
tatgctacttgcttg

SEQ ID NO: 776401 - DNA, 15 bp, Homo sapiens
atgctacttgcttga

SEQ ID NO: 776402 - DNA, 15 bp, Homo sapiens
tgctacttgcttgaa

SEQ ID NO: 776403 - DNA, 15 bp, Homo sapiens
gctacttgcttgaat

SEQ ID NO: 776404 - DNA, 15 bp, Homo sapiens
ctacttgcttgaatg

SEQ ID NO: 776405 - DNA, 15 bp, Homo sapiens
tacttgcttgaatgt

SEQ ID NO: 776406 - DNA, 15 bp, Homo sapiens
acttgcttgaatgta

SEQ ID NO: 776407 - DNA, 15 bp, Homo sapiens
cttgcttgaatgtat

SEQ ID NO: 776408 - DNA, 15 bp, Homo sapiens
ttgcttgaatgtata

SEQ ID NO: 776409 - DNA, 15 bp, Homo sapiens
tgcttgaatgtatag

SEQ ID NO: 776410 - DNA, 15 bp, Homo sapiens
gcttgaatgtatagg

SEQ ID NO: 776411 - DNA, 15 bp, Homo sapiens
cttgaatgtataggg

SEQ ID NO: 776412 - DNA, 15 bp, Homo sapiens
ttgaatgtataggga

SEQ ID NO: 776413 - DNA, 15 bp, Homo sapiens
tgaatgtatagggat

SEQ ID NO: 776414 - DNA, 15 bp, Homo sapiens
gaatgtatagggatg

SEQ ID NO: 776415 - DNA, 15 bp, Homo sapiens
aatgtatagggatga

SEQ ID NO: 776416 - DNA, 15 bp, Homo sapiens
atgtatagggatgat

SEQ ID NO: 776417 - DNA, 15 bp, Homo sapiens
tgtatagggatgatt

SEQ ID NO: 776418 - DNA, 15 bp, Homo sapiens
gtatagggatgattt

SEQ ID NO: 776419 - DNA, 15 bp, Homo sapiens
tatagggatgattta

SEQ ID NO: 776420 - DNA, 15 bp, Homo sapiens
atagggatgatttat

SEQ ID NO: 776421 - DNA, 15 bp, Homo sapiens
tagggatgatttatc

SEQ ID NO: 776422 - DNA, 15 bp, Homo sapiens
agggatgatttatcg

SEQ ID NO: 776423 - DNA, 15 bp, Homo sapiens
gggatgatttatcga

SEQ ID NO: 776424 - DNA, 15 bp, Homo sapiens
ggatgatttatcgat

SEQ ID NO: 776425 - DNA, 15 bp, Homo sapiens
gatgatttatcgatg

SEQ ID NO: 776426 - DNA, 15 bp, Homo sapiens
atgatttatcgatgt

SEQ ID NO: 776427 - DNA, 15 bp, Homo sapiens
tgatttatcgatgta

SEQ ID NO: 776428 - DNA, 15 bp, Homo sapiens
gatttatcgatgtaa

SEQ ID NO: 776429 - DNA, 15 bp, Homo sapiens
atttatcgatgtaag

SEQ ID NO: 776430 - DNA, 15 bp, Homo sapiens
tttatcgatgtaaga

SEQ ID NO: 776431 - DNA, 15 bp, Homo sapiens
ttatcgatgtaagaa

SEQ ID NO: 776432 - DNA, 15 bp, Homo sapiens
tatcgatgtaagaag

SEQ ID NO: 776433 - DNA, 15 bp, Homo sapiens
atcgatgtaagaaga

SEQ ID NO: 776434 - DNA, 15 bp, Homo sapiens
tcgatgtaagaagaa

SEQ ID NO: 776435 - DNA, 15 bp, Homo sapiens
cgatgtaagaagaaa

SEQ ID NO: 776436 - DNA, 15 bp, Homo sapiens
gatgtaagaagaaag

SEQ ID NO: 776437 - DNA, 15 bp, Homo sapiens
atgtaagaagaaaga

SEQ ID NO: 776438 - DNA, 15 bp, Homo sapiens
tgtaagaagaaagaa

SEQ ID NO: 776439 - DNA, 15 bp, Homo sapiens
gtaagaagaaagaaa

SEQ ID NO: 776440 - DNA, 15 bp, Homo sapiens
taagaagaaagaaaa

SEQ ID NO: 776441 - DNA, 15 bp, Homo sapiens
aagaagaaagaaaaa

SEQ ID NO: 776442 - DNA, 15 bp, Homo sapiens
agaagaaagaaaaat

SEQ ID NO: 776443 - DNA, 15 bp, Homo sapiens
gaagaaagaaaaata

SEQ ID NO: 776444 - DNA, 15 bp, Homo sapiens
aagaaagaaaaatat

SEQ ID NO: 776445 - DNA, 15 bp, Homo sapiens
agaaagaaaaatatc

SEQ ID NO: 776446 - DNA, 15 bp, Homo sapiens
gaaagaaaaatatca

SEQ ID NO: 776447 - DNA, 15 bp, Homo sapiens
aaagaaaaatatcag

SEQ ID NO: 776448 - DNA, 15 bp, Homo sapiens
aagaaaaatatcagc

SEQ ID NO: 776449 - DNA, 15 bp, Homo sapiens
agaaaaatatcagcc

SEQ ID NO: 776450 - DNA, 15 bp, Homo sapiens
gaaaaatatcagcct

SEQ ID NO: 776451 - DNA, 15 bp, Homo sapiens
aaaaatatcagcctc

SEQ ID NO: 776452 - DNA, 15 bp, Homo sapiens
aaaatatcagcctct

SEQ ID NO: 776453 - DNA, 15 bp, Homo sapiens
aaatatcagcctctc

SEQ ID NO: 776454 - DNA, 15 bp, Homo sapiens
aatatcagcctctct

SEQ ID NO: 776455 - DNA, 15 bp, Homo sapiens
atatcagcctctctc

SEQ ID NO: 776456 - DNA, 15 bp, Homo sapiens
tatcagcctctctct

SEQ ID NO: 776457 - DNA, 15 bp, Homo sapiens
atcagcctctctctt

SEQ ID NO: 776458 - DNA, 15 bp, Homo sapiens
tcagcctctctcttt

SEQ ID NO: 776459 - DNA, 15 bp, Homo sapiens
cagcctctctcttta

SEQ ID NO: 776460 - DNA, 15 bp, Homo sapiens
agcctctctctttat

SEQ ID NO: 776461 - DNA, 15 bp, Homo sapiens
gcctctctctttatc

SEQ ID NO: 776462 - DNA, 15 bp, Homo sapiens
cctctctctttatcc

SEQ ID NO: 776463 - DNA, 15 bp, Homo sapiens
ctctctctttatccc

SEQ ID NO: 776464 - DNA, 15 bp, Homo sapiens
tctctctttatcccc

SEQ ID NO: 776465 - DNA, 15 bp, Homo sapiens
ctctctttatccccc

SEQ ID NO: 776466 - DNA, 15 bp, Homo sapiens
tctctttatccccct

SEQ ID NO: 776467 - DNA, 15 bp, Homo sapiens
ctctttatcccccta

SEQ ID NO: 776468 - DNA, 15 bp, Homo sapiens
tctttatccccctaa

SEQ ID NO: 776469 - DNA, 15 bp, Homo sapiens
ctttatccccctaaa

SEQ ID NO: 776470 - DNA, 15 bp, Homo sapiens
tttatccccctaaat

SEQ ID NO: 776471 - DNA, 15 bp, Homo sapiens
ttatccccctaaata

SEQ ID NO: 776472 - DNA, 15 bp, Homo sapiens
tatccccctaaatat

SEQ ID NO: 776473 - DNA, 15 bp, Homo sapiens
atccccctaaatatg

SEQ ID NO: 776474 - DNA, 15 bp, Homo sapiens
tccccctaaatatgt

SEQ ID NO: 776475 - DNA, 15 bp, Homo sapiens
ccccctaaatatgtt

SEQ ID NO: 776476 - DNA, 15 bp, Homo sapiens
cccctaaatatgttg

SEQ ID NO: 776477 - DNA, 15 bp, Homo sapiens
ccctaaatatgttgc

SEQ ID NO: 776478 - DNA, 15 bp, Homo sapiens
cctaaatatgttgca

SEQ ID NO: 776479 - DNA, 15 bp, Homo sapiens
ctaaatatgttgcat

SEQ ID NO: 776480 - DNA, 15 bp, Homo sapiens
taaatatgttgcatg

SEQ ID NO: 776481 - DNA, 15 bp, Homo sapiens
aaatatgttgcatgt

SEQ ID NO: 776482 - DNA, 15 bp, Homo sapiens
aatatgttgcatgtg

SEQ ID NO: 776483 - DNA, 15 bp, Homo sapiens
atatgttgcatgtgt

SEQ ID NO: 776484 - DNA, 15 bp, Homo sapiens
tatgttgcatgtgtg

SEQ ID NO: 776485 - DNA, 15 bp, Homo sapiens
atgttgcatgtgtgg

SEQ ID NO: 776486 - DNA, 15 bp, Homo sapiens
tgttgcatgtgtggc

SEQ ID NO: 776487 - DNA, 15 bp, Homo sapiens
gttgcatgtgtggca

SEQ ID NO: 776488 - DNA, 15 bp, Homo sapiens
ttgcatgtgtggcat

SEQ ID NO: 776489 - DNA, 15 bp, Homo sapiens
tgcatgtgtggcatt

SEQ ID NO: 776490 - DNA, 15 bp, Homo sapiens
gcatgtgtggcattt

SEQ ID NO: 776491 - DNA, 15 bp, Homo sapiens
catgtgtggcatttt

SEQ ID NO: 776492 - DNA, 15 bp, Homo sapiens
atgtgtggcatttta

SEQ ID NO: 776493 - DNA, 15 bp, Homo sapiens
tgtgtggcattttac

SEQ ID NO: 776494 - DNA, 15 bp, Homo sapiens
gtgtggcattttaca

SEQ ID NO: 776495 - DNA, 15 bp, Homo sapiens
tgtggcattttacat

SEQ ID NO: 776496 - DNA, 15 bp, Homo sapiens
gtggcattttacatt

SEQ ID NO: 776497 - DNA, 15 bp, Homo sapiens
tggcattttacatta

SEQ ID NO: 776498 - DNA, 15 bp, Homo sapiens
ggcattttacattaa

SEQ ID NO: 776499 - DNA, 15 bp, Homo sapiens
gcattttacattaac

SEQ ID NO: 776500 - DNA, 15 bp, Homo sapiens
cattttacattaacg

SEQ ID NO: 776501 - DNA, 15 bp, Homo sapiens
attttacattaacgt

SEQ ID NO: 776502 - DNA, 15 bp, Homo sapiens
ttttacattaacgtt

SEQ ID NO: 776503 - DNA, 15 bp, Homo sapiens
tttacattaacgtta

SEQ ID NO: 776504 - DNA, 15 bp, Homo sapiens
ttacattaacgttat

SEQ ID NO: 776505 - DNA, 15 bp, Homo sapiens
tacattaacgttata

SEQ ID NO: 776506 - DNA, 15 bp, Homo sapiens
acattaacgttatat

SEQ ID NO: 776507 - DNA, 15 bp, Homo sapiens
cattaacgttatata

SEQ ID NO: 776508 - DNA, 15 bp, Homo sapiens
attaacgttatatac

SEQ ID NO: 776509 - DNA, 15 bp, Homo sapiens
ttaacgttatataca

SEQ ID NO: 776510 - DNA, 15 bp, Homo sapiens
taacgttatatacat

SEQ ID NO: 776511 - DNA, 15 bp, Homo sapiens
aacgttatatacata

SEQ ID NO: 776512 - DNA, 15 bp, Homo sapiens
acgttatatacatag

SEQ ID NO: 776513 - DNA, 15 bp, Homo sapiens
cgttatatacatagc

SEQ ID NO: 776514 - DNA, 15 bp, Homo sapiens
gttatatacatagcc

SEQ ID NO: 776515 - DNA, 15 bp, Homo sapiens
ttatatacatagcct

SEQ ID NO: 776516 - DNA, 15 bp, Homo sapiens
tatatacatagcctg

SEQ ID NO: 776517 - DNA, 15 bp, Homo sapiens
atatacatagcctgg

SEQ ID NO: 776518 - DNA, 15 bp, Homo sapiens
tatacatagcctgga

SEQ ID NO: 776519 - DNA, 15 bp, Homo sapiens
atacatagcctggac

SEQ ID NO: 776520 - DNA, 15 bp, Homo sapiens
tacatagcctggacc

SEQ ID NO: 776521 - DNA, 15 bp, Homo sapiens
acatagcctggacca

SEQ ID NO: 776522 - DNA, 15 bp, Homo sapiens
catagcctggaccat

SEQ ID NO: 776523 - DNA, 15 bp, Homo sapiens
atagcctggaccatt

SEQ ID NO: 776524 - DNA, 15 bp, Homo sapiens
tagcctggaccattt

SEQ ID NO: 776525 - DNA, 15 bp, Homo sapiens
agcctggaccatttc

SEQ ID NO: 776526 - DNA, 15 bp, Homo sapiens
gcctggaccatttca

SEQ ID NO: 776527 - DNA, 15 bp, Homo sapiens
cctggaccatttcat

SEQ ID NO: 776528 - DNA, 15 bp, Homo sapiens
ctggaccatttcatc

SEQ ID NO: 776529 - DNA, 15 bp, Homo sapiens
tggaccatttcatct

SEQ ID NO: 776530 - DNA, 15 bp, Homo sapiens
ggaccatttcatctt

SEQ ID NO: 776531 - DNA, 15 bp, Homo sapiens
gaccatttcatcttt

SEQ ID NO: 776532 - DNA, 15 bp, Homo sapiens
accatttcatcttta

SEQ ID NO: 776533 - DNA, 15 bp, Homo sapiens
ccatttcatctttat

SEQ ID NO: 776534 - DNA, 15 bp, Homo sapiens
catttcatctttatc

SEQ ID NO: 776535 - DNA, 15 bp, Homo sapiens
atttcatctttatct

SEQ ID NO: 776536 - DNA, 15 bp, Homo sapiens
tttcatctttatctc

SEQ ID NO: 776537 - DNA, 15 bp, Homo sapiens
ttcatctttatctcc

SEQ ID NO: 776538 - DNA, 15 bp, Homo sapiens
tcatctttatctcca

SEQ ID NO: 776539 - DNA, 15 bp, Homo sapiens
ctttatctccaaggg

SEQ ID NO: 776540 - DNA, 15 bp, Homo sapiens
tttatctccaagggc

SEQ ID NO: 776541 - DNA, 15 bp, Homo sapiens
ttatctccaagggcc

SEQ ID NO: 776542 - DNA, 15 bp, Homo sapiens
tatctccaagggccc

SEQ ID NO: 776543 - DNA, 15 bp, Homo sapiens
atctccaagggccca

SEQ ID NO: 776544 - DNA, 15 bp, Homo sapiens
tctccaagggcccaa

SEQ ID NO: 776545 - DNA, 15 bp, Homo sapiens
ctccaagggcccaaa

SEQ ID NO: 776546 - DNA, 15 bp, Homo sapiens
tccaagggcccaaaa

SEQ ID NO: 776547 - DNA, 15 bp, Homo sapiens
ccaagggcccaaaag

SEQ ID NO: 776548 - DNA, 15 bp, Homo sapiens
caagggcccaaaaga

SEQ ID NO: 776549 - DNA, 15 bp, Homo sapiens
aagggcccaaaagaa

SEQ ID NO: 776550 - DNA, 15 bp, Homo sapiens
agggcccaaaagaaa

SEQ ID NO: 776551 - DNA, 15 bp, Homo sapiens
gggcccaaaagaaaa

SEQ ID NO: 776552 - DNA, 15 bp, Homo sapiens
ggcccaaaagaaaat

SEQ ID NO: 776553 - DNA, 15 bp, Homo sapiens
gcccaaaagaaaata

SEQ ID NO: 776554 - DNA, 15 bp, Homo sapiens
cccaaaagaaaatat

SEQ ID NO: 776555 - DNA, 15 bp, Homo sapiens
ccaaaagaaaatatg

SEQ ID NO: 776556 - DNA, 15 bp, Homo sapiens
caaaagaaaatatgt

SEQ ID NO: 776557 - DNA, 15 bp, Homo sapiens
aaaagaaaatatgtg

SEQ ID NO: 776558 - DNA, 15 bp, Homo sapiens
aaagaaaatatgtgt

SEQ ID NO: 776559 - DNA, 15 bp, Homo sapiens
aagaaaatatgtgtc

SEQ ID NO: 776560 - DNA, 15 bp, Homo sapiens
agaaaatatgtgtca

SEQ ID NO: 776561 - DNA, 15 bp, Homo sapiens
gaaaatatgtgtcaa

SEQ ID NO: 776562 - DNA, 15 bp, Homo sapiens
aaaatatgtgtcaaa

SEQ ID NO: 776563 - DNA, 15 bp, Homo sapiens
aaatatgtgtcaaat

SEQ ID NO: 776564 - DNA, 15 bp, Homo sapiens
aatatgtgtcaaata

SEQ ID NO: 776565 - DNA, 15 bp, Homo sapiens
atatgtgtcaaatat

SEQ ID NO: 776566 - DNA, 15 bp, Homo sapiens
tatgtgtcaaatatg

SEQ ID NO: 776567 - DNA, 15 bp, Homo sapiens
atgtgtcaaatatgc

SEQ ID NO: 776568 - DNA, 15 bp, Homo sapiens
tgtgtcaaatatgcc

SEQ ID NO: 776569 - DNA, 15 bp, Homo sapiens
gtgtcaaatatgcct

SEQ ID NO: 776570 - DNA, 15 bp, Homo sapiens
tgtcaaatatgcctt

SEQ ID NO: 776571 - DNA, 15 bp, Homo sapiens
gtcaaatatgccttt

SEQ ID NO: 776572 - DNA, 15 bp, Homo sapiens
tcaaatatgcctttc

SEQ ID NO: 776573 - DNA, 15 bp, Homo sapiens
caaatatgcctttca

SEQ ID NO: 776574 - DNA, 15 bp, Homo sapiens
aaatatgcctttcaa

SEQ ID NO: 776575 - DNA, 15 bp, Homo sapiens
aatatgcctttcaaa

SEQ ID NO: 776576 - DNA, 15 bp, Homo sapiens
atatgcctttcaaat

SEQ ID NO: 776577 - DNA, 15 bp, Homo sapiens
tatgcctttcaaata

SEQ ID NO: 776578 - DNA, 15 bp, Homo sapiens
atgcctttcaaatag

SEQ ID NO: 776579 - DNA, 15 bp, Homo sapiens
tgcctttcaaatagg

SEQ ID NO: 776580 - DNA, 15 bp, Homo sapiens
gcctttcaaatagga

SEQ ID NO: 776581 - DNA, 15 bp, Homo sapiens
cctttcaaataggaa

SEQ ID NO: 776582 - DNA, 15 bp, Homo sapiens
ctttcaaataggaat

SEQ ID NO: 776583 - DNA, 15 bp, Homo sapiens
tttcaaataggaata

SEQ ID NO: 776584 - DNA, 15 bp, Homo sapiens
ttcaaataggaataa

SEQ ID NO: 776585 - DNA, 15 bp, Homo sapiens
tcaaataggaataat

SEQ ID NO: 776586 - DNA, 15 bp, Homo sapiens
caaataggaataatc

SEQ ID NO: 776587 - DNA, 15 bp, Homo sapiens
aaataggaataatcc

SEQ ID NO: 776588 - DNA, 15 bp, Homo sapiens
aataggaataatcct

SEQ ID NO: 776589 - DNA, 15 bp, Homo sapiens
ataggaataatccta

SEQ ID NO: 776590 - DNA, 15 bp, Homo sapiens
taggaataatcctat

SEQ ID NO: 776591 - DNA, 15 bp, Homo sapiens
aggaataatcctatt

SEQ ID NO: 776592 - DNA, 15 bp, Homo sapiens
ggaataatcctattg

SEQ ID NO: 776593 - DNA, 15 bp, Homo sapiens
gaataatcctattgg

SEQ ID NO: 776594 - DNA, 15 bp, Homo sapiens
aataatcctattggt

SEQ ID NO: 776595 - DNA, 15 bp, Homo sapiens
ataatcctattggtt

SEQ ID NO: 776596 - DNA, 15 bp, Homo sapiens
taatcctattggttt

SEQ ID NO: 776597 - DNA, 15 bp, Homo sapiens
aatcctattggttta

SEQ ID NO: 776598 - DNA, 15 bp, Homo sapiens
atcctattggtttaa

SEQ ID NO: 776599 - DNA, 15 bp, Homo sapiens
tcctattggtttaac

SEQ ID NO: 776600 - DNA, 15 bp, Homo sapiens
cctattggtttaaca

SEQ ID NO: 776601 - DNA, 15 bp, Homo sapiens
ctattggtttaacag

SEQ ID NO: 776602 - DNA, 15 bp, Homo sapiens
tattggtttaacaga

SEQ ID NO: 776603 - DNA, 15 bp, Homo sapiens
attggtttaacagag

SEQ ID NO: 776604 - DNA, 15 bp, Homo sapiens
ttggtttaacagagt

SEQ ID NO: 776605 - DNA, 15 bp, Homo sapiens
tggtttaacagagtt

SEQ ID NO: 776606 - DNA, 15 bp, Homo sapiens
ggtttaacagagtta

SEQ ID NO: 776607 - DNA, 15 bp, Homo sapiens
gtttaacagagttaa

SEQ ID NO: 776608 - DNA, 15 bp, Homo sapiens
tttaacagagttaaa

SEQ ID NO: 776609 - DNA, 15 bp, Homo sapiens
ttaacagagttaaat

SEQ ID NO: 776610 - DNA, 15 bp, Homo sapiens
taacagagttaaata

SEQ ID NO: 776611 - DNA, 15 bp, Homo sapiens
aacagagttaaatag

SEQ ID NO: 776612 - DNA, 15 bp, Homo sapiens
acagagttaaataga

SEQ ID NO: 776613 - DNA, 15 bp, Homo sapiens
cagagttaaatagat

SEQ ID NO: 776614 - DNA, 15 bp, Homo sapiens
agagttaaatagatg

SEQ ID NO: 776615 - DNA, 15 bp, Homo sapiens
gagttaaatagatgt

SEQ ID NO: 776616 - DNA, 15 bp, Homo sapiens
agttaaatagatgta

SEQ ID NO: 776617 - DNA, 15 bp, Homo sapiens
gttaaatagatgtac

SEQ ID NO: 776618 - DNA, 15 bp, Homo sapiens
ttaaatagatgtaca

SEQ ID NO: 776619 - DNA, 15 bp, Homo sapiens
taaatagatgtacat

SEQ ID NO: 776620 - DNA, 15 bp, Homo sapiens
aaatagatgtacatt

SEQ ID NO: 776621 - DNA, 15 bp, Homo sapiens
aatagatgtacattc

SEQ ID NO: 776622 - DNA, 15 bp, Homo sapiens
atagatgtacattca

SEQ ID NO: 776623 - DNA, 15 bp, Homo sapiens
tagatgtacattcac

SEQ ID NO: 776624 - DNA, 15 bp, Homo sapiens
agatgtacattcact

SEQ ID NO: 776625 - DNA, 15 bp, Homo sapiens
gatgtacattcactg

SEQ ID NO: 776626 - DNA, 15 bp, Homo sapiens
atgtacattcactga

SEQ ID NO: 776627 - DNA, 15 bp, Homo sapiens
tgtacattcactgat

SEQ ID NO: 776628 - DNA, 15 bp, Homo sapiens
gtacattcactgatg

SEQ ID NO: 776629 - DNA, 15 bp, Homo sapiens
tacattcactgatgt

SEQ ID NO: 776630 - DNA, 15 bp, Homo sapiens
acattcactgatgtg

SEQ ID NO: 776631 - DNA, 15 bp, Homo sapiens
cattcactgatgtgc

SEQ ID NO: 776632 - DNA, 15 bp, Homo sapiens
attcactgatgtgct

SEQ ID NO: 776633 - DNA, 15 bp, Homo sapiens
ttcactgatgtgctg

SEQ ID NO: 776634 - DNA, 15 bp, Homo sapiens
tcactgatgtgctgt

SEQ ID NO: 776635 - DNA, 15 bp, Homo sapiens
cactgatgtgctgtt

SEQ ID NO: 776636 - DNA, 15 bp, Homo sapiens
actgatgtgctgttt

SEQ ID NO: 776637 - DNA, 15 bp, Homo sapiens
ctgatgtgctgtttg

SEQ ID NO: 776638 - DNA, 15 bp, Homo sapiens
tgatgtgctgtttgc

SEQ ID NO: 776639 - DNA, 15 bp, Homo sapiens
gatgtgctgtttgcg

SEQ ID NO: 776640 - DNA, 15 bp, Homo sapiens
atgtgctgtttgcgc

SEQ ID NO: 776641 - DNA, 15 bp, Homo sapiens
tgtgctgtttgcgca

SEQ ID NO: 776642 - DNA, 15 bp, Homo sapiens
gtgctgtttgcgcat

SEQ ID NO: 776643 - DNA, 15 bp, Homo sapiens
tgctgtttgcgcatg

SEQ ID NO: 776644 - DNA, 15 bp, Homo sapiens
gctgtttgcgcatga

SEQ ID NO: 776645 - DNA, 15 bp, Homo sapiens
ctgtttgcgcatgaa

SEQ ID NO: 776646 - DNA, 15 bp, Homo sapiens
tgtttgcgcatgaaa

SEQ ID NO: 776647 - DNA, 15 bp, Homo sapiens
gtttgcgcatgaaat

SEQ ID NO: 776648 - DNA, 15 bp, Homo sapiens
tttgcgcatgaaatt

SEQ ID NO: 776649 - DNA, 15 bp, Homo sapiens
ttgcgcatgaaatta

SEQ ID NO: 776650 - DNA, 15 bp, Homo sapiens
tgcgcatgaaattag

SEQ ID NO: 776651 - DNA, 15 bp, Homo sapiens
gcgcatgaaattaga

SEQ ID NO: 776652 - DNA, 15 bp, Homo sapiens
cgcatgaaattagac

SEQ ID NO: 776653 - DNA, 15 bp, Homo sapiens
gcatgaaattagact

SEQ ID NO: 776654 - DNA, 15 bp, Homo sapiens
catgaaattagactg

SEQ ID NO: 776655 - DNA, 15 bp, Homo sapiens
atgaaattagactgg

SEQ ID NO: 776656 - DNA, 15 bp, Homo sapiens
tgaaattagactggt

SEQ ID NO: 776657 - DNA, 15 bp, Homo sapiens
gaaattagactggtt

SEQ ID NO: 776658 - DNA, 15 bp, Homo sapiens
aaattagactggttg

SEQ ID NO: 776659 - DNA, 15 bp, Homo sapiens
aattagactggttga

SEQ ID NO: 776660 - DNA, 15 bp, Homo sapiens
attagactggttgaa

SEQ ID NO: 776661 - DNA, 15 bp, Homo sapiens
ttagactggttgaac

SEQ ID NO: 776662 - DNA, 15 bp, Homo sapiens
tagactggttgaacc

SEQ ID NO: 776663 - DNA, 15 bp, Homo sapiens
agactggttgaaccc

SEQ ID NO: 776664 - DNA, 15 bp, Homo sapiens
gactggttgaaccca

SEQ ID NO: 776665 - DNA, 15 bp, Homo sapiens
actggttgaacccag

SEQ ID NO: 776666 - DNA, 15 bp, Homo sapiens
ctggttgaacccagt

SEQ ID NO: 776667 - DNA, 15 bp, Homo sapiens
tggttgaacccagtg

SEQ ID NO: 776668 - DNA, 15 bp, Homo sapiens
ggttgaacccagtgg

SEQ ID NO: 776669 - DNA, 15 bp, Homo sapiens
gttgaacccagtggg

SEQ ID NO: 776670 - DNA, 15 bp, Homo sapiens
ttgaacccagtggga

SEQ ID NO: 776671 - DNA, 15 bp, Homo sapiens
tgaacccagtgggag

SEQ ID NO: 776672 - DNA, 15 bp, Homo sapiens
gaacccagtgggagt

SEQ ID NO: 776673 - DNA, 15 bp, Homo sapiens
aacccagtgggagta

SEQ ID NO: 776674 - DNA, 15 bp, Homo sapiens
acccagtgggagtac

SEQ ID NO: 776675 - DNA, 15 bp, Homo sapiens
cccagtgggagtaca

SEQ ID NO: 776676 - DNA, 15 bp, Homo sapiens
ccagtgggagtacac

SEQ ID NO: 776677 - DNA, 15 bp, Homo sapiens
cagtgggagtacaca

SEQ ID NO: 776678 - DNA, 15 bp, Homo sapiens
agtgggagtacacat

SEQ ID NO: 776679 - DNA, 15 bp, Homo sapiens
gtgggagtacacatg

SEQ ID NO: 776680 - DNA, 15 bp, Homo sapiens
tgggagtacacatgg

SEQ ID NO: 776681 - DNA, 15 bp, Homo sapiens
gggagtacacatggg

SEQ ID NO: 776682 - DNA, 15 bp, Homo sapiens
ggagtacacatgggc

SEQ ID NO: 776683 - DNA, 15 bp, Homo sapiens
gagtacacatgggca

SEQ ID NO: 776684 - DNA, 15 bp, Homo sapiens
agtacacatgggcac

SEQ ID NO: 776685 - DNA, 15 bp, Homo sapiens
gtacacatgggcaca

SEQ ID NO: 776686 - DNA, 15 bp, Homo sapiens
tacacatgggcacac

SEQ ID NO: 776687 - DNA, 15 bp, Homo sapiens
acacatgggcacaca

SEQ ID NO: 776688 - DNA, 15 bp, Homo sapiens
cacatgggcacacac

SEQ ID NO: 776689 - DNA, 15 bp, Homo sapiens
acatgggcacacaca

SEQ ID NO: 776690 - DNA, 15 bp, Homo sapiens
catgggcacacacat

SEQ ID NO: 776691 - DNA, 15 bp, Homo sapiens
atgggcacacacata

SEQ ID NO: 776692 - DNA, 15 bp, Homo sapiens
tgggcacacacataa

SEQ ID NO: 776693 - DNA, 15 bp, Homo sapiens
gggcacacacataat

SEQ ID NO: 776694 - DNA, 15 bp, Homo sapiens
ggcacacacataatc

SEQ ID NO: 776695 - DNA, 15 bp, Homo sapiens
gcacacacataatca

SEQ ID NO: 776696 - DNA, 15 bp, Homo sapiens
cacacacataatcaa

SEQ ID NO: 776697 - DNA, 15 bp, Homo sapiens
acacacataatcaaa

SEQ ID NO: 776698 - DNA, 15 bp, Homo sapiens
cacacataatcaaat

SEQ ID NO: 776699 - DNA, 15 bp, Homo sapiens
acacataatcaaata

SEQ ID NO: 776700 - DNA, 15 bp, Homo sapiens
cacataatcaaatat

SEQ ID NO: 776701 - DNA, 15 bp, Homo sapiens
acataatcaaatata

SEQ ID NO: 776702 - DNA, 15 bp, Homo sapiens
cataatcaaatatat

SEQ ID NO: 776703 - DNA, 15 bp, Homo sapiens
ataatcaaatatatc

SEQ ID NO: 776704 - DNA, 15 bp, Homo sapiens
taatcaaatatatca

SEQ ID NO: 776705 - DNA, 15 bp, Homo sapiens
aatcaaatatatcac

SEQ ID NO: 776706 - DNA, 15 bp, Homo sapiens
atcaaatatatcaca

SEQ ID NO: 776707 - DNA, 15 bp, Homo sapiens
tcaaatatatcacat

SEQ ID NO: 776708 - DNA, 15 bp, Homo sapiens
caaatatatcacatt

SEQ ID NO: 776709 - DNA, 15 bp, Homo sapiens
aaatatatcacattc

SEQ ID NO: 776710 - DNA, 15 bp, Homo sapiens
aatatatcacattca

SEQ ID NO: 776711 - DNA, 15 bp, Homo sapiens
atatatcacattcat

SEQ ID NO: 776712 - DNA, 15 bp, Homo sapiens
tatatcacattcatt

SEQ ID NO: 776713 - DNA, 15 bp, Homo sapiens
atatcacattcattg

SEQ ID NO: 776714 - DNA, 15 bp, Homo sapiens
tatcacattcattgc

SEQ ID NO: 776715 - DNA, 15 bp, Homo sapiens
atcacattcattgca

SEQ ID NO: 776716 - DNA, 15 bp, Homo sapiens
tcacattcattgcat

SEQ ID NO: 776717 - DNA, 15 bp, Homo sapiens
cacattcattgcatt

SEQ ID NO: 776718 - DNA, 15 bp, Homo sapiens
acattcattgcattc

SEQ ID NO: 776719 - DNA, 15 bp, Homo sapiens
cattcattgcattca

SEQ ID NO: 776720 - DNA, 15 bp, Homo sapiens
attcattgcattcac

SEQ ID NO: 776721 - DNA, 15 bp, Homo sapiens
ttcattgcattcact

SEQ ID NO: 776722 - DNA, 15 bp, Homo sapiens
tcattgcattcactt

SEQ ID NO: 776723 - DNA, 15 bp, Homo sapiens
cattgcattcacttc

SEQ ID NO: 776724 - DNA, 15 bp, Homo sapiens
attgcattcacttct

SEQ ID NO: 776725 - DNA, 15 bp, Homo sapiens
ttgcattcacttctg

SEQ ID NO: 776726 - DNA, 15 bp, Homo sapiens
tgcattcacttctgt

SEQ ID NO: 776727 - DNA, 15 bp, Homo sapiens
gcattcacttctgtt

SEQ ID NO: 776728 - DNA, 15 bp, Homo sapiens
cattcacttctgtta

SEQ ID NO: 776729 - DNA, 15 bp, Homo sapiens
attcacttctgttag

SEQ ID NO: 776730 - DNA, 15 bp, Homo sapiens
ttcacttctgttagg

SEQ ID NO: 776731 - DNA, 15 bp, Homo sapiens
tcacttctgttaggt

SEQ ID NO: 776732 - DNA, 15 bp, Homo sapiens
cacttctgttaggtg

SEQ ID NO: 776733 - DNA, 15 bp, Homo sapiens
acttctgttaggtgc

SEQ ID NO: 776734 - DNA, 15 bp, Homo sapiens
cttctgttaggtgcc

SEQ ID NO: 776735 - DNA, 15 bp, Homo sapiens
ttctgttaggtgccc

SEQ ID NO: 776736 - DNA, 15 bp, Homo sapiens
tctgttaggtgccct

SEQ ID NO: 776737 - DNA, 15 bp, Homo sapiens
ctgttaggtgcccta

SEQ ID NO: 776738 - DNA, 15 bp, Homo sapiens
tgttaggtgccctat

SEQ ID NO: 776739 - DNA, 15 bp, Homo sapiens
gttaggtgccctatg

SEQ ID NO: 776740 - DNA, 15 bp, Homo sapiens
ttaggtgccctatgg

SEQ ID NO: 776741 - DNA, 15 bp, Homo sapiens
taggtgccctatgga

SEQ ID NO: 776742 - DNA, 15 bp, Homo sapiens
aggtgccctatggag

SEQ ID NO: 776743 - DNA, 15 bp, Homo sapiens
ggtgccctatggagg

SEQ ID NO: 776744 - DNA, 15 bp, Homo sapiens
gtgccctatggaggt

SEQ ID NO: 776745 - DNA, 15 bp, Homo sapiens
tgccctatggaggtt

SEQ ID NO: 776746 - DNA, 15 bp, Homo sapiens
gccctatggaggttg

SEQ ID NO: 776747 - DNA, 15 bp, Homo sapiens
ccctatggaggttgt

SEQ ID NO: 776748 - DNA, 15 bp, Homo sapiens
cctatggaggttgtg

SEQ ID NO: 776749 - DNA, 15 bp, Homo sapiens
ctatggaggttgtga

SEQ ID NO: 776750 - DNA, 15 bp, Homo sapiens
tatggaggttgtgac

SEQ ID NO: 776751 - DNA, 15 bp, Homo sapiens
atggaggttgtgaca

SEQ ID NO: 776752 - DNA, 15 bp, Homo sapiens
tggaggttgtgacat

SEQ ID NO: 776753 - DNA, 15 bp, Homo sapiens
ggaggttgtgacatt

SEQ ID NO: 776754 - DNA, 15 bp, Homo sapiens
gaggttgtgacattt

SEQ ID NO: 776755 - DNA, 15 bp, Homo sapiens
aggttgtgacatttc

SEQ ID NO: 776756 - DNA, 15 bp, Homo sapiens
ggttgtgacatttcc

SEQ ID NO: 776757 - DNA, 15 bp, Homo sapiens
gttgtgacatttccc

SEQ ID NO: 776758 - DNA, 15 bp, Homo sapiens
ttgtgacatttccca

SEQ ID NO: 776759 - DNA, 15 bp, Homo sapiens
tgtgacatttcccat

SEQ ID NO: 776760 - DNA, 15 bp, Homo sapiens
gtgacatttcccatc

SEQ ID NO: 776761 - DNA, 15 bp, Homo sapiens
tgacatttcccatca

SEQ ID NO: 776762 - DNA, 15 bp, Homo sapiens
gacatttcccatcag

SEQ ID NO: 776763 - DNA, 15 bp, Homo sapiens
acatttcccatcagt

SEQ ID NO: 776764 - DNA, 15 bp, Homo sapiens
catttcccatcagta

SEQ ID NO: 776765 - DNA, 15 bp, Homo sapiens
atttcccatcagtat

SEQ ID NO: 776766 - DNA, 15 bp, Homo sapiens
tttcccatcagtatc

SEQ ID NO: 776767 - DNA, 15 bp, Homo sapiens
ttcccatcagtatcc

SEQ ID NO: 776768 - DNA, 15 bp, Homo sapiens
tcccatcagtatcct

SEQ ID NO: 776769 - DNA, 15 bp, Homo sapiens
cccatcagtatcctc

SEQ ID NO: 776770 - DNA, 15 bp, Homo sapiens
ccatcagtatcctct

SEQ ID NO: 776771 - DNA, 15 bp, Homo sapiens
catcagtatcctcta

SEQ ID NO: 776772 - DNA, 15 bp, Homo sapiens
atcagtatcctctac

SEQ ID NO: 776773 - DNA, 15 bp, Homo sapiens
tcagtatcctctact

SEQ ID NO: 776774 - DNA, 15 bp, Homo sapiens
cagtatcctctactt

SEQ ID NO: 776775 - DNA, 15 bp, Homo sapiens
agtatcctctacttt

SEQ ID NO: 776776 - DNA, 15 bp, Homo sapiens
gtatcctctactttt

SEQ ID NO: 776777 - DNA, 15 bp, Homo sapiens
tatcctctacttttc

SEQ ID NO: 776778 - DNA, 15 bp, Homo sapiens
atcctctacttttct

SEQ ID NO: 776779 - DNA, 15 bp, Homo sapiens
tcctctacttttctt

SEQ ID NO: 776780 - DNA, 15 bp, Homo sapiens
cctctacttttcttt

SEQ ID NO: 776781 - DNA, 15 bp, Homo sapiens
ctctacttttctttc

SEQ ID NO: 776782 - DNA, 15 bp, Homo sapiens
tctacttttctttct

SEQ ID NO: 776783 - DNA, 15 bp, Homo sapiens
ctacttttctttctc

SEQ ID NO: 776784 - DNA, 15 bp, Homo sapiens
tacttttctttctca

SEQ ID NO: 776785 - DNA, 15 bp, Homo sapiens
acttttctttctcag

SEQ ID NO: 776786 - DNA, 15 bp, Homo sapiens
cttttctttctcagt

SEQ ID NO: 776787 - DNA, 15 bp, Homo sapiens
ttttctttctcagtg

SEQ ID NO: 776788 - DNA, 15 bp, Homo sapiens
tttctttctcagtgg

SEQ ID NO: 776789 - DNA, 15 bp, Homo sapiens
ttctttctcagtggt

SEQ ID NO: 776790 - DNA, 15 bp, Homo sapiens
tctttctcagtggtg

SEQ ID NO: 776791 - DNA, 15 bp, Homo sapiens
ctttctcagtggtgc

SEQ ID NO: 776792 - DNA, 15 bp, Homo sapiens
tttctcagtggtgcc

SEQ ID NO: 776793 - DNA, 15 bp, Homo sapiens
ttctcagtggtgcct

SEQ ID NO: 776794 - DNA, 15 bp, Homo sapiens
tctcagtggtgcctg

SEQ ID NO: 776795 - DNA, 15 bp, Homo sapiens
ctcagtggtgcctgg

SEQ ID NO: 776796 - DNA, 15 bp, Homo sapiens
tcagtggtgcctggt

SEQ ID NO: 776797 - DNA, 15 bp, Homo sapiens
cagtggtgcctggtg

SEQ ID NO: 776798 - DNA, 15 bp, Homo sapiens
agtggtgcctggtgg

SEQ ID NO: 776799 - DNA, 15 bp, Homo sapiens
gtggtgcctggtggc

SEQ ID NO: 776800 - DNA, 15 bp, Homo sapiens
tggtgcctggtggca

SEQ ID NO: 776801 - DNA, 15 bp, Homo sapiens
ggtgcctggtggcaa

SEQ ID NO: 776802 - DNA, 15 bp, Homo sapiens
gtgcctggtggcaaa

SEQ ID NO: 776803 - DNA, 15 bp, Homo sapiens
tgcctggtggcaaat

SEQ ID NO: 776804 - DNA, 15 bp, Homo sapiens
gcctggtggcaaatt

SEQ ID NO: 776805 - DNA, 15 bp, Homo sapiens
cctggtggcaaattc

SEQ ID NO: 776806 - DNA, 15 bp, Homo sapiens
ctggtggcaaattca

SEQ ID NO: 776807 - DNA, 15 bp, Homo sapiens
tggtggcaaattcac

SEQ ID NO: 776808 - DNA, 15 bp, Homo sapiens
ggtggcaaattcaca

SEQ ID NO: 776809 - DNA, 15 bp, Homo sapiens
gtggcaaattcacac

SEQ ID NO: 776810 - DNA, 15 bp, Homo sapiens
tggcaaattcacaca

SEQ ID NO: 776811 - DNA, 15 bp, Homo sapiens
ggcaaattcacacac

SEQ ID NO: 776812 - DNA, 15 bp, Homo sapiens
gcaaattcacacaca

SEQ ID NO: 776813 - DNA, 15 bp, Homo sapiens
caaattcacacacac

SEQ ID NO: 776814 - DNA, 15 bp, Homo sapiens
aaattcacacacact

SEQ ID NO: 776815 - DNA, 15 bp, Homo sapiens
aattcacacacactt

SEQ ID NO: 776816 - DNA, 15 bp, Homo sapiens
attcacacacacttc

SEQ ID NO: 776817 - DNA, 15 bp, Homo sapiens
ttcacacacacttct

SEQ ID NO: 776818 - DNA, 15 bp, Homo sapiens
tcacacacacttctc

SEQ ID NO: 776819 - DNA, 15 bp, Homo sapiens
cacacacacttctct

SEQ ID NO: 776820 - DNA, 15 bp, Homo sapiens
acacacacttctctc

SEQ ID NO: 776821 - DNA, 15 bp, Homo sapiens
cacacacttctctct

SEQ ID NO: 776822 - DNA, 15 bp, Homo sapiens
acacacttctctctc

SEQ ID NO: 776823 - DNA, 15 bp, Homo sapiens
cacacttctctctct

SEQ ID NO: 776824 - DNA, 15 bp, Homo sapiens
acacttctctctctc

SEQ ID NO: 776825 - DNA, 15 bp, Homo sapiens
cacttctctctctct

SEQ ID NO: 776826 - DNA, 15 bp, Homo sapiens
acttctctctctctc

SEQ ID NO: 776827 - DNA, 15 bp, Homo sapiens
cttctctctctctct

SEQ ID NO: 776828 - DNA, 15 bp, Homo sapiens
ttctctctctctctg

SEQ ID NO: 776829 - DNA, 15 bp, Homo sapiens
tctctctctctctgt

SEQ ID NO: 776830 - DNA, 15 bp, Homo sapiens
ctctctctctctgtc

SEQ ID NO: 776831 - DNA, 15 bp, Homo sapiens
tctctctctctgtct

SEQ ID NO: 776832 - DNA, 15 bp, Homo sapiens
ctctctctctgtctc

SEQ ID NO: 776833 - DNA, 15 bp, Homo sapiens
ctctctctgtctctg

SEQ ID NO: 776834 - DNA, 15 bp, Homo sapiens
tctctctgtctctgt

SEQ ID NO: 776835 - DNA, 15 bp, Homo sapiens
ctctctgtctctgtc

SEQ ID NO: 776836 - DNA, 15 bp, Homo sapiens
tctctgtctctgtct

SEQ ID NO: 776837 - DNA, 15 bp, Homo sapiens
ctctgtctctgtctc

SEQ ID NO: 776838 - DNA, 15 bp, Homo sapiens
tctgtctctgtctct

SEQ ID NO: 776839 - DNA, 15 bp, Homo sapiens
ctgtctctgtctctg

SEQ ID NO: 776840 - DNA, 15 bp, Homo sapiens
tgtctctgtctctgt

SEQ ID NO: 776841 - DNA, 15 bp, Homo sapiens
gtctctgtctctgtc

SEQ ID NO: 776842 - DNA, 15 bp, Homo sapiens
ctgtctctgtctctc

SEQ ID NO: 776843 - DNA, 15 bp, Homo sapiens
tgtctctgtctctca

SEQ ID NO: 776844 - DNA, 15 bp, Homo sapiens
gtctctgtctctcac

SEQ ID NO: 776845 - DNA, 15 bp, Homo sapiens
tctctgtctctcacc

SEQ ID NO: 776846 - DNA, 15 bp, Homo sapiens
ctctgtctctcaccc

SEQ ID NO: 776847 - DNA, 15 bp, Homo sapiens
tctgtctctcacccc

SEQ ID NO: 776848 - DNA, 15 bp, Homo sapiens
ctgtctctcaccccc

SEQ ID NO: 776849 - DNA, 15 bp, Homo sapiens
tgtctctcacccccc

SEQ ID NO: 776850 - DNA, 15 bp, Homo sapiens
gtctctcacccccct

SEQ ID NO: 776851 - DNA, 15 bp, Homo sapiens
tctctcacccccctc

SEQ ID NO: 776852 - DNA, 15 bp, Homo sapiens
ctctcacccccctca

SEQ ID NO: 776853 - DNA, 15 bp, Homo sapiens
tctcacccccctcat

SEQ ID NO: 776854 - DNA, 15 bp, Homo sapiens
ctcacccccctcatc

SEQ ID NO: 776855 - DNA, 15 bp, Homo sapiens
tcacccccctcatct

SEQ ID NO: 776856 - DNA, 15 bp, Homo sapiens
cacccccctcatcta

SEQ ID NO: 776857 - DNA, 15 bp, Homo sapiens
acccccctcatctat

SEQ ID NO: 776858 - DNA, 15 bp, Homo sapiens
cccccctcatctatg

SEQ ID NO: 776859 - DNA, 15 bp, Homo sapiens
ccccctcatctatgc

SEQ ID NO: 776860 - DNA, 15 bp, Homo sapiens
cccctcatctatgcc

SEQ ID NO: 776861 - DNA, 15 bp, Homo sapiens
ccctcatctatgccc

SEQ ID NO: 776862 - DNA, 15 bp, Homo sapiens
cctcatctatgcccc

SEQ ID NO: 776863 - DNA, 15 bp, Homo sapiens
ctcatctatgcccca

SEQ ID NO: 776864 - DNA, 15 bp, Homo sapiens
tcatctatgccccag

SEQ ID NO: 776865 - DNA, 15 bp, Homo sapiens
catctatgccccagc

SEQ ID NO: 776866 - DNA, 15 bp, Homo sapiens
atctatgccccagct

SEQ ID NO: 776867 - DNA, 15 bp, Homo sapiens
tctatgccccagctt

SEQ ID NO: 776868 - DNA, 15 bp, Homo sapiens
ctatgccccagcttt

SEQ ID NO: 776869 - DNA, 15 bp, Homo sapiens
tatgccccagctttt

SEQ ID NO: 776870 - DNA, 15 bp, Homo sapiens
atgccccagctttta

SEQ ID NO: 776871 - DNA, 15 bp, Homo sapiens
tgccccagcttttat

SEQ ID NO: 776872 - DNA, 15 bp, Homo sapiens
gccccagcttttatt

SEQ ID NO: 776873 - DNA, 15 bp, Homo sapiens
ccccagcttttatta

SEQ ID NO: 776874 - DNA, 15 bp, Homo sapiens
cccagcttttattat

SEQ ID NO: 776875 - DNA, 15 bp, Homo sapiens
ccagcttttattata

SEQ ID NO: 776876 - DNA, 15 bp, Homo sapiens
cagcttttattatat

SEQ ID NO: 776877 - DNA, 15 bp, Homo sapiens
agcttttattatatt

SEQ ID NO: 776878 - DNA, 15 bp, Homo sapiens
gcttttattatattt

SEQ ID NO: 776879 - DNA, 15 bp, Homo sapiens
cttttattatatttt

SEQ ID NO: 776880 - DNA, 15 bp, Homo sapiens
ttttattatatttta

SEQ ID NO: 776881 - DNA, 15 bp, Homo sapiens
tttattatattttag

SEQ ID NO: 776882 - DNA, 15 bp, Homo sapiens
ttattatattttagg

SEQ ID NO: 776883 - DNA, 15 bp, Homo sapiens
tattatattttaggc

SEQ ID NO: 776884 - DNA, 15 bp, Homo sapiens
attatattttaggca

SEQ ID NO: 776885 - DNA, 15 bp, Homo sapiens
ttatattttaggcaa

SEQ ID NO: 776886 - DNA, 15 bp, Homo sapiens
tatattttaggcaaa

SEQ ID NO: 776887 - DNA, 15 bp, Homo sapiens
atattttaggcaaat

SEQ ID NO: 776888 - DNA, 15 bp, Homo sapiens
tattttaggcaaatc

SEQ ID NO: 776889 - DNA, 15 bp, Homo sapiens
attttaggcaaatct

SEQ ID NO: 776890 - DNA, 15 bp, Homo sapiens
ttttaggcaaatcta

SEQ ID NO: 776891 - DNA, 15 bp, Homo sapiens
tttaggcaaatctat

SEQ ID NO: 776892 - DNA, 15 bp, Homo sapiens
ttaggcaaatctatg

SEQ ID NO: 776893 - DNA, 15 bp, Homo sapiens
taggcaaatctatgt

SEQ ID NO: 776894 - DNA, 15 bp, Homo sapiens
aggcaaatctatgta

SEQ ID NO: 776895 - DNA, 15 bp, Homo sapiens
ggcaaatctatgtaa

SEQ ID NO: 776896 - DNA, 15 bp, Homo sapiens
gcaaatctatgtaaa

SEQ ID NO: 776897 - DNA, 15 bp, Homo sapiens
caaatctatgtaaaa

SEQ ID NO: 776898 - DNA, 15 bp, Homo sapiens
aaatctatgtaaaat

SEQ ID NO: 776899 - DNA, 15 bp, Homo sapiens
aatctatgtaaaatt

SEQ ID NO: 776900 - DNA, 15 bp, Homo sapiens
atctatgtaaaattc

SEQ ID NO: 776901 - DNA, 15 bp, Homo sapiens
tctatgtaaaattct

SEQ ID NO: 776902 - DNA, 15 bp, Homo sapiens
ctatgtaaaattctt

SEQ ID NO: 776903 - DNA, 15 bp, Homo sapiens
tatgtaaaattctta

SEQ ID NO: 776904 - DNA, 15 bp, Homo sapiens
atgtaaaattcttac

SEQ ID NO: 776905 - DNA, 15 bp, Homo sapiens
tgtaaaattcttaca

SEQ ID NO: 776906 - DNA, 15 bp, Homo sapiens
gtaaaattcttacat

SEQ ID NO: 776907 - DNA, 15 bp, Homo sapiens
taaaattcttacatc

SEQ ID NO: 776908 - DNA, 15 bp, Homo sapiens
aaaattcttacatca

SEQ ID NO: 776909 - DNA, 15 bp, Homo sapiens
aaattcttacatcat

SEQ ID NO: 776910 - DNA, 15 bp, Homo sapiens
aattcttacatcatt

SEQ ID NO: 776911 - DNA, 15 bp, Homo sapiens
attcttacatcattg

SEQ ID NO: 776912 - DNA, 15 bp, Homo sapiens
ttcttacatcattgg

SEQ ID NO: 776913 - DNA, 15 bp, Homo sapiens
tcttacatcattggc

SEQ ID NO: 776914 - DNA, 15 bp, Homo sapiens
cttacatcattggcc

SEQ ID NO: 776915 - DNA, 15 bp, Homo sapiens
ttacatcattggcca

SEQ ID NO: 776916 - DNA, 15 bp, Homo sapiens
tacatcattggccaa

SEQ ID NO: 776917 - DNA, 15 bp, Homo sapiens
acatcattggccaat

SEQ ID NO: 776918 - DNA, 15 bp, Homo sapiens
catcattggccaatg

SEQ ID NO: 776919 - DNA, 15 bp, Homo sapiens
atcattggccaatgc

SEQ ID NO: 776920 - DNA, 15 bp, Homo sapiens
tcattggccaatgcc

SEQ ID NO: 776921 - DNA, 15 bp, Homo sapiens
cattggccaatgcct

SEQ ID NO: 776922 - DNA, 15 bp, Homo sapiens
attggccaatgcctt

SEQ ID NO: 776923 - DNA, 15 bp, Homo sapiens
ttggccaatgccttg

SEQ ID NO: 776924 - DNA, 15 bp, Homo sapiens
tggccaatgccttgt

SEQ ID NO: 776925 - DNA, 15 bp, Homo sapiens
ggccaatgccttgtg

SEQ ID NO: 776926 - DNA, 15 bp, Homo sapiens
gccaatgccttgtgt

SEQ ID NO: 776927 - DNA, 15 bp, Homo sapiens
ccaatgccttgtgta

SEQ ID NO: 776928 - DNA, 15 bp, Homo sapiens
caatgccttgtgtag

SEQ ID NO: 776929 - DNA, 15 bp, Homo sapiens
aatgccttgtgtagc

SEQ ID NO: 776930 - DNA, 15 bp, Homo sapiens
atgccttgtgtagca

SEQ ID NO: 776931 - DNA, 15 bp, Homo sapiens
tgccttgtgtagcag

SEQ ID NO: 776932 - DNA, 15 bp, Homo sapiens
gccttgtgtagcaga

SEQ ID NO: 776933 - DNA, 15 bp, Homo sapiens
ccttgtgtagcagaa

SEQ ID NO: 776934 - DNA, 15 bp, Homo sapiens
cttgtgtagcagaaa

SEQ ID NO: 776935 - DNA, 15 bp, Homo sapiens
ttgtgtagcagaaag

SEQ ID NO: 776936 - DNA, 15 bp, Homo sapiens
tgtgtagcagaaaga

SEQ ID NO: 776937 - DNA, 15 bp, Homo sapiens
gtgtagcagaaagac

SEQ ID NO: 776938 - DNA, 15 bp, Homo sapiens
tgtagcagaaagact

SEQ ID NO: 776939 - DNA, 15 bp, Homo sapiens
gtagcagaaagacta

SEQ ID NO: 776940 - DNA, 15 bp, Homo sapiens
tagcagaaagactag

SEQ ID NO: 776941 - DNA, 15 bp, Homo sapiens
agcagaaagactaga

SEQ ID NO: 776942 - DNA, 15 bp, Homo sapiens
gcagaaagactagag

SEQ ID NO: 776943 - DNA, 15 bp, Homo sapiens
cagaaagactagagg

SEQ ID NO: 776944 - DNA, 15 bp, Homo sapiens
agaaagactagaggt

SEQ ID NO: 776945 - DNA, 15 bp, Homo sapiens
gaaagactagaggtt

SEQ ID NO: 776946 - DNA, 15 bp, Homo sapiens
aaagactagaggttt

SEQ ID NO: 776947 - DNA, 15 bp, Homo sapiens
aagactagaggtttc

SEQ ID NO: 776948 - DNA, 15 bp, Homo sapiens
agactagaggtttca

SEQ ID NO: 776949 - DNA, 15 bp, Homo sapiens
gactagaggtttcac

SEQ ID NO: 776950 - DNA, 15 bp, Homo sapiens
actagaggtttcaca

SEQ ID NO: 776951 - DNA, 15 bp, Homo sapiens
ctagaggtttcacag

SEQ ID NO: 776952 - DNA, 15 bp, Homo sapiens
tagaggtttcacagg

SEQ ID NO: 776953 - DNA, 15 bp, Homo sapiens
agaggtttcacagga

SEQ ID NO: 776954 - DNA, 15 bp, Homo sapiens
gaggtttcacaggac

SEQ ID NO: 776955 - DNA, 15 bp, Homo sapiens
aggtttcacaggact

SEQ ID NO: 776956 - DNA, 15 bp, Homo sapiens
ggtttcacaggactg

SEQ ID NO: 776957 - DNA, 15 bp, Homo sapiens
gtttcacaggactgt

SEQ ID NO: 776958 - DNA, 15 bp, Homo sapiens
tttcacaggactgta

SEQ ID NO: 776959 - DNA, 15 bp, Homo sapiens
ttcacaggactgtac

SEQ ID NO: 776960 - DNA, 15 bp, Homo sapiens
tcacaggactgtact

SEQ ID NO: 776961 - DNA, 15 bp, Homo sapiens
cacaggactgtactt

SEQ ID NO: 776962 - DNA, 15 bp, Homo sapiens
acaggactgtacttt

SEQ ID NO: 776963 - DNA, 15 bp, Homo sapiens
caggactgtactttt

SEQ ID NO: 776964 - DNA, 15 bp, Homo sapiens
aggactgtactttta

SEQ ID NO: 776965 - DNA, 15 bp, Homo sapiens
ggactgtacttttag

SEQ ID NO: 776966 - DNA, 15 bp, Homo sapiens
gactgtacttttagt

SEQ ID NO: 776967 - DNA, 15 bp, Homo sapiens
actgtacttttagta

SEQ ID NO: 776968 - DNA, 15 bp, Homo sapiens
ctgtacttttagtaa

SEQ ID NO: 776969 - DNA, 15 bp, Homo sapiens
tgtacttttagtaag

SEQ ID NO: 776970 - DNA, 15 bp, Homo sapiens
gtacttttagtaaga

SEQ ID NO: 776971 - DNA, 15 bp, Homo sapiens
tacttttagtaagaa

SEQ ID NO: 776972 - DNA, 15 bp, Homo sapiens
acttttagtaagaat

SEQ ID NO: 776973 - DNA, 15 bp, Homo sapiens
cttttagtaagaatg

SEQ ID NO: 776974 - DNA, 15 bp, Homo sapiens
ttttagtaagaatgt

SEQ ID NO: 776975 - DNA, 15 bp, Homo sapiens
tttagtaagaatgtc

SEQ ID NO: 776976 - DNA, 15 bp, Homo sapiens
ttagtaagaatgtcc

SEQ ID NO: 776977 - DNA, 15 bp, Homo sapiens
tagtaagaatgtccc

SEQ ID NO: 776978 - DNA, 15 bp, Homo sapiens
agtaagaatgtccca

SEQ ID NO: 776979 - DNA, 15 bp, Homo sapiens
gtaagaatgtcccat

SEQ ID NO: 776980 - DNA, 15 bp, Homo sapiens
taagaatgtcccata

SEQ ID NO: 776981 - DNA, 15 bp, Homo sapiens
aagaatgtcccatag

SEQ ID NO: 776982 - DNA, 15 bp, Homo sapiens
agaatgtcccatagt

SEQ ID NO: 776983 - DNA, 15 bp, Homo sapiens
gaatgtcccatagtg

SEQ ID NO: 776984 - DNA, 15 bp, Homo sapiens
aatgtcccatagtga

SEQ ID NO: 776985 - DNA, 15 bp, Homo sapiens
atgtcccatagtgaa

SEQ ID NO: 776986 - DNA, 15 bp, Homo sapiens
tgtcccatagtgaat

SEQ ID NO: 776987 - DNA, 15 bp, Homo sapiens
gtcccatagtgaata

SEQ ID NO: 776988 - DNA, 15 bp, Homo sapiens
tcccatagtgaatag

SEQ ID NO: 776989 - DNA, 15 bp, Homo sapiens
cccatagtgaatagg

SEQ ID NO: 776990 - DNA, 15 bp, Homo sapiens
ccatagtgaataggt

SEQ ID NO: 776991 - DNA, 15 bp, Homo sapiens
catagtgaataggta

SEQ ID NO: 776992 - DNA, 15 bp, Homo sapiens
atagtgaataggtat

SEQ ID NO: 776993 - DNA, 15 bp, Homo sapiens
tagtgaataggtatg

SEQ ID NO: 776994 - DNA, 15 bp, Homo sapiens
agtgaataggtatgt

SEQ ID NO: 776995 - DNA, 15 bp, Homo sapiens
gtgaataggtatgtc

SEQ ID NO: 776996 - DNA, 15 bp, Homo sapiens
tgaataggtatgtcc

SEQ ID NO: 776997 - DNA, 15 bp, Homo sapiens
gaataggtatgtcct

SEQ ID NO: 776998 - DNA, 15 bp, Homo sapiens
aataggtatgtcctg

SEQ ID NO: 776999 - DNA, 15 bp, Homo sapiens
ataggtatgtcctgc

SEQ ID NO: 777000 - DNA, 15 bp, Homo sapiens
taggtatgtcctgct

SEQ ID NO: 777001 - DNA, 15 bp, Homo sapiens
aggtatgtcctgctc

SEQ ID NO: 777002 - DNA, 15 bp, Homo sapiens
ggtatgtcctgctct

SEQ ID NO: 777003 - DNA, 15 bp, Homo sapiens
gtatgtcctgctctc

SEQ ID NO: 777004 - DNA, 15 bp, Homo sapiens
tatgtcctgctctct

SEQ ID NO: 777005 - DNA, 15 bp, Homo sapiens
atgtcctgctctctg

SEQ ID NO: 777006 - DNA, 15 bp, Homo sapiens
tgtcctgctctctgc

SEQ ID NO: 777007 - DNA, 15 bp, Homo sapiens
gtcctgctctctgct

SEQ ID NO: 777008 - DNA, 15 bp, Homo sapiens
tcctgctctctgcta

SEQ ID NO: 777009 - DNA, 15 bp, Homo sapiens
cctgctctctgctat

SEQ ID NO: 777010 - DNA, 15 bp, Homo sapiens
ctgctctctgctatt

SEQ ID NO: 777011 - DNA, 15 bp, Homo sapiens
tgctctctgctattg

SEQ ID NO: 777012 - DNA, 15 bp, Homo sapiens
gctctctgctattgg

SEQ ID NO: 777013 - DNA, 15 bp, Homo sapiens
ctctctgctattggg

SEQ ID NO: 777014 - DNA, 15 bp, Homo sapiens
tctctgctattggga

SEQ ID NO: 777015 - DNA, 15 bp, Homo sapiens
ctctgctattgggaa

SEQ ID NO: 777016 - DNA, 15 bp, Homo sapiens
tctgctattgggaat

SEQ ID NO: 777017 - DNA, 15 bp, Homo sapiens
ctgctattgggaatc

SEQ ID NO: 777018 - DNA, 15 bp, Homo sapiens
tgctattgggaatca

SEQ ID NO: 777019 - DNA, 15 bp, Homo sapiens
gctattgggaatcag

SEQ ID NO: 777020 - DNA, 15 bp, Homo sapiens
ctattgggaatcagt

SEQ ID NO: 777021 - DNA, 15 bp, Homo sapiens
tattgggaatcagtt

SEQ ID NO: 777022 - DNA, 15 bp, Homo sapiens
attgggaatcagttg

SEQ ID NO: 777023 - DNA, 15 bp, Homo sapiens
ttgggaatcagttgg

SEQ ID NO: 777024 - DNA, 15 bp, Homo sapiens
tgggaatcagttgga

SEQ ID NO: 777025 - DNA, 15 bp, Homo sapiens
gggaatcagttggag

SEQ ID NO: 777026 - DNA, 15 bp, Homo sapiens
ggaatcagttggagt

SEQ ID NO: 777027 - DNA, 15 bp, Homo sapiens
gaatcagttggagtt

SEQ ID NO: 777028 - DNA, 15 bp, Homo sapiens
aatcagttggagttt

SEQ ID NO: 777029 - DNA, 15 bp, Homo sapiens
atcagttggagtttt

SEQ ID NO: 777030 - DNA, 15 bp, Homo sapiens
tcagttggagtttta

SEQ ID NO: 777031 - DNA, 15 bp, Homo sapiens
cagttggagttttat

SEQ ID NO: 777032 - DNA, 15 bp, Homo sapiens
agttggagttttatt

SEQ ID NO: 777033 - DNA, 15 bp, Homo sapiens
gttggagttttattg

SEQ ID NO: 777034 - DNA, 15 bp, Homo sapiens
ttggagttttattgg

SEQ ID NO: 777035 - DNA, 15 bp, Homo sapiens
tggagttttattggc

SEQ ID NO: 777036 - DNA, 15 bp, Homo sapiens
ggagttttattggca

SEQ ID NO: 777037 - DNA, 15 bp, Homo sapiens
gagttttattggcat

SEQ ID NO: 777038 - DNA, 15 bp, Homo sapiens
agttttattggcatt

SEQ ID NO: 777039 - DNA, 15 bp, Homo sapiens
gttttattggcattg

SEQ ID NO: 777040 - DNA, 15 bp, Homo sapiens
ttttattggcattgt

SEQ ID NO: 777041 - DNA, 15 bp, Homo sapiens
tttattggcattgtt

SEQ ID NO: 777042 - DNA, 15 bp, Homo sapiens
ttattggcattgttt

SEQ ID NO: 777043 - DNA, 15 bp, Homo sapiens
tattggcattgtttt

SEQ ID NO: 777044 - DNA, 15 bp, Homo sapiens
attggcattgtttta

SEQ ID NO: 777045 - DNA, 15 bp, Homo sapiens
ttggcattgttttaa

SEQ ID NO: 777046 - DNA, 15 bp, Homo sapiens
tggcattgttttaac

SEQ ID NO: 777047 - DNA, 15 bp, Homo sapiens
ggcattgttttaaca

SEQ ID NO: 777048 - DNA, 15 bp, Homo sapiens
gcattgttttaacac

SEQ ID NO: 777049 - DNA, 15 bp, Homo sapiens
cattgttttaacact

SEQ ID NO: 777050 - DNA, 15 bp, Homo sapiens
attgttttaacactc

SEQ ID NO: 777051 - DNA, 15 bp, Homo sapiens
ttgttttaacactcc

SEQ ID NO: 777052 - DNA, 15 bp, Homo sapiens
tgttttaacactcct

SEQ ID NO: 777053 - DNA, 15 bp, Homo sapiens
gttttaacactccta

SEQ ID NO: 777054 - DNA, 15 bp, Homo sapiens
ttttaacactcctaa

SEQ ID NO: 777055 - DNA, 15 bp, Homo sapiens
tttaacactcctaag

SEQ ID NO: 777056 - DNA, 15 bp, Homo sapiens
ttaacactcctaagg

SEQ ID NO: 777057 - DNA, 15 bp, Homo sapiens
taacactcctaaggg

SEQ ID NO: 777058 - DNA, 15 bp, Homo sapiens
aacactcctaaggga

SEQ ID NO: 777059 - DNA, 15 bp, Homo sapiens
acactcctaagggag

SEQ ID NO: 777060 - DNA, 15 bp, Homo sapiens
cactcctaagggagg

SEQ ID NO: 777061 - DNA, 15 bp, Homo sapiens
actcctaagggaggc

SEQ ID NO: 777062 - DNA, 15 bp, Homo sapiens
ctcctaagggaggct

SEQ ID NO: 777063 - DNA, 15 bp, Homo sapiens
tcctaagggaggctt

SEQ ID NO: 777064 - DNA, 15 bp, Homo sapiens
cctaagggaggcttc

SEQ ID NO: 777065 - DNA, 15 bp, Homo sapiens
ctaagggaggcttct

SEQ ID NO: 777066 - DNA, 15 bp, Homo sapiens
taagggaggcttctg

SEQ ID NO: 777067 - DNA, 15 bp, Homo sapiens
aagggaggcttctgt

SEQ ID NO: 777068 - DNA, 15 bp, Homo sapiens
agggaggcttctgtt

SEQ ID NO: 777069 - DNA, 15 bp, Homo sapiens
gggaggcttctgttt

SEQ ID NO: 777070 - DNA, 15 bp, Homo sapiens
ggaggcttctgttta

SEQ ID NO: 777071 - DNA, 15 bp, Homo sapiens
gaggcttctgtttaa

SEQ ID NO: 777072 - DNA, 15 bp, Homo sapiens
aggcttctgtttaaa

SEQ ID NO: 777073 - DNA, 15 bp, Homo sapiens
ggcttctgtttaaag

SEQ ID NO: 777074 - DNA, 15 bp, Homo sapiens
gcttctgtttaaagg

SEQ ID NO: 777075 - DNA, 15 bp, Homo sapiens
cttctgtttaaagga

SEQ ID NO: 777076 - DNA, 15 bp, Homo sapiens
ttctgtttaaaggaa

SEQ ID NO: 777077 - DNA, 15 bp, Homo sapiens
tctgtttaaaggaac

SEQ ID NO: 777078 - DNA, 15 bp, Homo sapiens
ctgtttaaaggaacc

SEQ ID NO: 777079 - DNA, 15 bp, Homo sapiens
tgtttaaaggaacca

SEQ ID NO: 777080 - DNA, 15 bp, Homo sapiens
gtttaaaggaaccat

SEQ ID NO: 777081 - DNA, 15 bp, Homo sapiens
tttaaaggaaccata

SEQ ID NO: 777082 - DNA, 15 bp, Homo sapiens
ttaaaggaaccatat

SEQ ID NO: 777083 - DNA, 15 bp, Homo sapiens
taaaggaaccatatg

SEQ ID NO: 777084 - DNA, 15 bp, Homo sapiens
aaaggaaccatatga

SEQ ID NO: 777085 - DNA, 15 bp, Homo sapiens
aaggaaccatatgat

SEQ ID NO: 777086 - DNA, 15 bp, Homo sapiens
aggaaccatatgata

SEQ ID NO: 777087 - DNA, 15 bp, Homo sapiens
ggaaccatatgataa

SEQ ID NO: 777088 - DNA, 15 bp, Homo sapiens
gaaccatatgataat

SEQ ID NO: 777089 - DNA, 15 bp, Homo sapiens
aaccatatgataatt

SEQ ID NO: 777090 - DNA, 15 bp, Homo sapiens
accatatgataattt

SEQ ID NO: 777091 - DNA, 15 bp, Homo sapiens
ccatatgataatttc

SEQ ID NO: 777092 - DNA, 15 bp, Homo sapiens
catatgataatttcc

SEQ ID NO: 777093 - DNA, 15 bp, Homo sapiens
atatgataatttcct

SEQ ID NO: 777094 - DNA, 15 bp, Homo sapiens
tatgataatttcctt

SEQ ID NO: 777095 - DNA, 15 bp, Homo sapiens
atgataatttccttc

SEQ ID NO: 777096 - DNA, 15 bp, Homo sapiens
tgataatttccttcc

SEQ ID NO: 777097 - DNA, 15 bp, Homo sapiens
gataatttccttcca

SEQ ID NO: 777098 - DNA, 15 bp, Homo sapiens
ataatttccttccag

SEQ ID NO: 777099 - DNA, 15 bp, Homo sapiens
taatttccttccagg

SEQ ID NO: 777100 - DNA, 15 bp, Homo sapiens
aatttccttccagga

SEQ ID NO: 777101 - DNA, 15 bp, Homo sapiens
atttccttccaggac

SEQ ID NO: 777102 - DNA, 15 bp, Homo sapiens
tttccttccaggact

SEQ ID NO: 777103 - DNA, 15 bp, Homo sapiens
ttccttccaggactt

SEQ ID NO: 777104 - DNA, 15 bp, Homo sapiens
tccttccaggactta

SEQ ID NO: 777105 - DNA, 15 bp, Homo sapiens
ccttccaggacttaa

SEQ ID NO: 777106 - DNA, 15 bp, Homo sapiens
cttccaggacttaat

SEQ ID NO: 777107 - DNA, 15 bp, Homo sapiens
ttccaggacttaata

SEQ ID NO: 777108 - DNA, 15 bp, Homo sapiens
tccaggacttaatag

SEQ ID NO: 777109 - DNA, 15 bp, Homo sapiens
ccaggacttaatagt

SEQ ID NO: 777110 - DNA, 15 bp, Homo sapiens
caggacttaatagtg

SEQ ID NO: 777111 - DNA, 15 bp, Homo sapiens
aggacttaatagtgg

SEQ ID NO: 777112 - DNA, 15 bp, Homo sapiens
ggacttaatagtggt

SEQ ID NO: 777113 - DNA, 15 bp, Homo sapiens
gacttaatagtggtt

SEQ ID NO: 777114 - DNA, 15 bp, Homo sapiens
acttaatagtggttc

SEQ ID NO: 777115 - DNA, 15 bp, Homo sapiens
cttaatagtggttct

SEQ ID NO: 777116 - DNA, 15 bp, Homo sapiens
ttaatagtggttctg

SEQ ID NO: 777117 - DNA, 15 bp, Homo sapiens
taatagtggttctgt

SEQ ID NO: 777118 - DNA, 15 bp, Homo sapiens
aatagtggttctgta

SEQ ID NO: 777119 - DNA, 15 bp, Homo sapiens
atagtggttctgtat

SEQ ID NO: 777120 - DNA, 15 bp, Homo sapiens
tagtggttctgtatt

SEQ ID NO: 777121 - DNA, 15 bp, Homo sapiens
agtggttctgtattt

SEQ ID NO: 777122 - DNA, 15 bp, Homo sapiens
gtggttctgtatttc

SEQ ID NO: 777123 - DNA, 15 bp, Homo sapiens
tggttctgtatttca

SEQ ID NO: 777124 - DNA, 15 bp, Homo sapiens
ggttctgtatttcat

SEQ ID NO: 777125 - DNA, 15 bp, Homo sapiens
gttctgtatttcatc

SEQ ID NO: 777126 - DNA, 15 bp, Homo sapiens
ttctgtatttcatcc

SEQ ID NO: 777127 - DNA, 15 bp, Homo sapiens
tctgtatttcatccc

SEQ ID NO: 777128 - DNA, 15 bp, Homo sapiens
ctgtatttcatccca

SEQ ID NO: 777129 - DNA, 15 bp, Homo sapiens
tgtatttcatcccat

SEQ ID NO: 777130 - DNA, 15 bp, Homo sapiens
gtatttcatcccatg

SEQ ID NO: 777131 - DNA, 15 bp, Homo sapiens
tatttcatcccatgc

SEQ ID NO: 777132 - DNA, 15 bp, Homo sapiens
atttcatcccatgca

SEQ ID NO: 777133 - DNA, 15 bp, Homo sapiens
tttcatcccatgcat

SEQ ID NO: 777134 - DNA, 15 bp, Homo sapiens
ttcatcccatgcata

SEQ ID NO: 777135 - DNA, 15 bp, Homo sapiens
tcatcccatgcatag

SEQ ID NO: 777136 - DNA, 15 bp, Homo sapiens
catcccatgcataga

SEQ ID NO: 777137 - DNA, 15 bp, Homo sapiens
atcccatgcatagat

SEQ ID NO: 777138 - DNA, 15 bp, Homo sapiens
tcccatgcatagata

SEQ ID NO: 777139 - DNA, 15 bp, Homo sapiens
cccatgcatagatac

SEQ ID NO: 777140 - DNA, 15 bp, Homo sapiens
ccatgcatagatact

SEQ ID NO: 777141 - DNA, 15 bp, Homo sapiens
catgcatagatactg

SEQ ID NO: 777142 - DNA, 15 bp, Homo sapiens
atgcatagatactga

SEQ ID NO: 777143 - DNA, 15 bp, Homo sapiens
tgcatagatactgaa

SEQ ID NO: 777144 - DNA, 15 bp, Homo sapiens
gcatagatactgaaa

SEQ ID NO: 777145 - DNA, 15 bp, Homo sapiens
catagatactgaaat

SEQ ID NO: 777146 - DNA, 15 bp, Homo sapiens
atagatactgaaatc

SEQ ID NO: 777147 - DNA, 15 bp, Homo sapiens
tagatactgaaatca

SEQ ID NO: 777148 - DNA, 15 bp, Homo sapiens
agatactgaaatcac

SEQ ID NO: 777149 - DNA, 15 bp, Homo sapiens
gatactgaaatcaca

SEQ ID NO: 777150 - DNA, 15 bp, Homo sapiens
atactgaaatcacat

SEQ ID NO: 777151 - DNA, 15 bp, Homo sapiens
tactgaaatcacatt

SEQ ID NO: 777152 - DNA, 15 bp, Homo sapiens
actgaaatcacatta

SEQ ID NO: 777153 - DNA, 15 bp, Homo sapiens
ctgaaatcacattat

SEQ ID NO: 777154 - DNA, 15 bp, Homo sapiens
tgaaatcacattatg

SEQ ID NO: 777155 - DNA, 15 bp, Homo sapiens
gaaatcacattatgg

SEQ ID NO: 777156 - DNA, 15 bp, Homo sapiens
aaatcacattatggg

SEQ ID NO: 777157 - DNA, 15 bp, Homo sapiens
aatcacattatgggt

SEQ ID NO: 777158 - DNA, 15 bp, Homo sapiens
atcacattatgggta

SEQ ID NO: 777159 - DNA, 15 bp, Homo sapiens
tcacattatgggtat

SEQ ID NO: 777160 - DNA, 15 bp, Homo sapiens
cacattatgggtatc

SEQ ID NO: 777161 - DNA, 15 bp, Homo sapiens
acattatgggtatca

SEQ ID NO: 777162 - DNA, 15 bp, Homo sapiens
cattatgggtatcag

SEQ ID NO: 777163 - DNA, 15 bp, Homo sapiens
attatgggtatcagt

SEQ ID NO: 777164 - DNA, 15 bp, Homo sapiens
ttatgggtatcagtc

SEQ ID NO: 777165 - DNA, 15 bp, Homo sapiens
tatgggtatcagtca

SEQ ID NO: 777166 - DNA, 15 bp, Homo sapiens
atgggtatcagtcaa

SEQ ID NO: 777167 - DNA, 15 bp, Homo sapiens
tgggtatcagtcaaa

SEQ ID NO: 777168 - DNA, 15 bp, Homo sapiens
gggtatcagtcaaaa

SEQ ID NO: 777169 - DNA, 15 bp, Homo sapiens
ggtatcagtcaaaaa

SEQ ID NO: 777170 - DNA, 15 bp, Homo sapiens
gtatcagtcaaaaag

SEQ ID NO: 777171 - DNA, 15 bp, Homo sapiens
tatcagtcaaaaagt

SEQ ID NO: 777172 - DNA, 15 bp, Homo sapiens
atcagtcaaaaagtc

SEQ ID NO: 777173 - DNA, 15 bp, Homo sapiens
tcagtcaaaaagtca

SEQ ID NO: 777174 - DNA, 15 bp, Homo sapiens
cagtcaaaaagtcaa

SEQ ID NO: 777175 - DNA, 15 bp, Homo sapiens
agtcaaaaagtcaaa

SEQ ID NO: 777176 - DNA, 15 bp, Homo sapiens
gtcaaaaagtcaaag

SEQ ID NO: 777177 - DNA, 15 bp, Homo sapiens
tcaaaaagtcaaaga

SEQ ID NO: 777178 - DNA, 15 bp, Homo sapiens
caaaaagtcaaagaa

SEQ ID NO: 777179 - DNA, 15 bp, Homo sapiens
aaaaagtcaaagaag

SEQ ID NO: 777180 - DNA, 15 bp, Homo sapiens
aaaagtcaaagaaga

SEQ ID NO: 777181 - DNA, 15 bp, Homo sapiens
aaagtcaaagaagat

SEQ ID NO: 777182 - DNA, 15 bp, Homo sapiens
aagtcaaagaagata

SEQ ID NO: 777183 - DNA, 15 bp, Homo sapiens
agtcaaagaagatac

SEQ ID NO: 777184 - DNA, 15 bp, Homo sapiens
gtcaaagaagataca

SEQ ID NO: 777185 - DNA, 15 bp, Homo sapiens
tcaaagaagatacat

SEQ ID NO: 777186 - DNA, 15 bp, Homo sapiens
caaagaagatacatt

SEQ ID NO: 777187 - DNA, 15 bp, Homo sapiens
aaagaagatacattc

SEQ ID NO: 777188 - DNA, 15 bp, Homo sapiens
aagaagatacattct

SEQ ID NO: 777189 - DNA, 15 bp, Homo sapiens
agaagatacattctt

SEQ ID NO: 777190 - DNA, 15 bp, Homo sapiens
gaagatacattcttt

SEQ ID NO: 777191 - DNA, 15 bp, Homo sapiens
aagatacattctttt

SEQ ID NO: 777192 - DNA, 15 bp, Homo sapiens
agatacattcttttt

SEQ ID NO: 777193 - DNA, 15 bp, Homo sapiens
gatacattctttttt

SEQ ID NO: 777194 - DNA, 15 bp, Homo sapiens
atacattcttttttt

SEQ ID NO: 777195 - DNA, 15 bp, Homo sapiens
tacattcttttttta

SEQ ID NO: 777196 - DNA, 15 bp, Homo sapiens
acattctttttttac

SEQ ID NO: 777197 - DNA, 15 bp, Homo sapiens
cattctttttttact

SEQ ID NO: 777198 - DNA, 15 bp, Homo sapiens
attctttttttacta

SEQ ID NO: 777199 - DNA, 15 bp, Homo sapiens
ttctttttttactat

SEQ ID NO: 777200 - DNA, 15 bp, Homo sapiens
tctttttttactatt

SEQ ID NO: 777201 - DNA, 15 bp, Homo sapiens
ctttttttactatta

SEQ ID NO: 777202 - DNA, 15 bp, Homo sapiens
tttttttactattaa

SEQ ID NO: 777203 - DNA, 15 bp, Homo sapiens
ttttttactattaaa

SEQ ID NO: 777204 - DNA, 15 bp, Homo sapiens
tttttactattaaac

SEQ ID NO: 777205 - DNA, 15 bp, Homo sapiens
ttttactattaaaca

SEQ ID NO: 777206 - DNA, 15 bp, Homo sapiens
tttactattaaacat

SEQ ID NO: 777207 - DNA, 15 bp, Homo sapiens
ttactattaaacatg

SEQ ID NO: 777208 - DNA, 15 bp, Homo sapiens
tactattaaacatga

SEQ ID NO: 777209 - DNA, 15 bp, Homo sapiens
actattaaacatgaa

SEQ ID NO: 777210 - DNA, 15 bp, Homo sapiens
ctattaaacatgaaa

SEQ ID NO: 777211 - DNA, 15 bp, Homo sapiens
tattaaacatgaaat

SEQ ID NO: 777212 - DNA, 15 bp, Homo sapiens
attaaacatgaaatt

SEQ ID NO: 777213 - DNA, 15 bp, Homo sapiens
ttaaacatgaaattt

SEQ ID NO: 777214 - DNA, 15 bp, Homo sapiens
taaacatgaaatttt

SEQ ID NO: 777215 - DNA, 15 bp, Homo sapiens
aaacatgaaattttg

SEQ ID NO: 777216 - DNA, 15 bp, Homo sapiens
aacatgaaattttgt

SEQ ID NO: 777217 - DNA, 15 bp, Homo sapiens
acatgaaattttgtc

SEQ ID NO: 777218 - DNA, 15 bp, Homo sapiens
catgaaattttgtct

SEQ ID NO: 777219 - DNA, 15 bp, Homo sapiens
atgaaattttgtctt

SEQ ID NO: 777220 - DNA, 15 bp, Homo sapiens
tgaaattttgtcttt

SEQ ID NO: 777221 - DNA, 15 bp, Homo sapiens
gaaattttgtcttta

SEQ ID NO: 777222 - DNA, 15 bp, Homo sapiens
aaattttgtctttat

SEQ ID NO: 777223 - DNA, 15 bp, Homo sapiens
aattttgtctttatc

SEQ ID NO: 777224 - DNA, 15 bp, Homo sapiens
attttgtctttatct

SEQ ID NO: 777225 - DNA, 15 bp, Homo sapiens
ttttgtctttatcta

SEQ ID NO: 777226 - DNA, 15 bp, Homo sapiens
tttgtctttatctaa

SEQ ID NO: 777227 - DNA, 15 bp, Homo sapiens
ttgtctttatctaat

SEQ ID NO: 777228 - DNA, 15 bp, Homo sapiens
tgtctttatctaatg

SEQ ID NO: 777229 - DNA, 15 bp, Homo sapiens
gtctttatctaatga

SEQ ID NO: 777230 - DNA, 15 bp, Homo sapiens
tctttatctaatgaa

SEQ ID NO: 777231 - DNA, 15 bp, Homo sapiens
ctttatctaatgaaa

SEQ ID NO: 777232 - DNA, 15 bp, Homo sapiens
tttatctaatgaaag

SEQ ID NO: 777233 - DNA, 15 bp, Homo sapiens
ttatctaatgaaaga

SEQ ID NO: 777234 - DNA, 15 bp, Homo sapiens
tatctaatgaaagat

SEQ ID NO: 777235 - DNA, 15 bp, Homo sapiens
atctaatgaaagata

SEQ ID NO: 777236 - DNA, 15 bp, Homo sapiens
tctaatgaaagatac

SEQ ID NO: 777237 - DNA, 15 bp, Homo sapiens
ctaatgaaagataca

SEQ ID NO: 777238 - DNA, 15 bp, Homo sapiens
taatgaaagatacac

SEQ ID NO: 777239 - DNA, 15 bp, Homo sapiens
aatgaaagatacact

SEQ ID NO: 777240 - DNA, 15 bp, Homo sapiens
atgaaagatacacta

SEQ ID NO: 777241 - DNA, 15 bp, Homo sapiens
tgaaagatacactag

SEQ ID NO: 777242 - DNA, 15 bp, Homo sapiens
gaaagatacactaga

SEQ ID NO: 777243 - DNA, 15 bp, Homo sapiens
aaagatacactagat

SEQ ID NO: 777244 - DNA, 15 bp, Homo sapiens
aagatacactagatt

SEQ ID NO: 777245 - DNA, 15 bp, Homo sapiens
agatacactagattt

SEQ ID NO: 777246 - DNA, 15 bp, Homo sapiens
gatacactagatttg

SEQ ID NO: 777247 - DNA, 15 bp, Homo sapiens
atacactagatttgc

SEQ ID NO: 777248 - DNA, 15 bp, Homo sapiens
tacactagatttgca

SEQ ID NO: 777249 - DNA, 15 bp, Homo sapiens
acactagatttgcac

SEQ ID NO: 777250 - DNA, 15 bp, Homo sapiens
cactagatttgcact

SEQ ID NO: 777251 - DNA, 15 bp, Homo sapiens
actagatttgcacta

SEQ ID NO: 777252 - DNA, 15 bp, Homo sapiens
ctagatttgcactag

SEQ ID NO: 777253 - DNA, 15 bp, Homo sapiens
tagatttgcactaga

SEQ ID NO: 777254 - DNA, 15 bp, Homo sapiens
agatttgcactagat

SEQ ID NO: 777255 - DNA, 15 bp, Homo sapiens
gatttgcactagatt

SEQ ID NO: 777256 - DNA, 15 bp, Homo sapiens
atttgcactagattt

SEQ ID NO: 777257 - DNA, 15 bp, Homo sapiens
tttgcactagatttg

SEQ ID NO: 777258 - DNA, 15 bp, Homo sapiens
ttgcactagatttgt

SEQ ID NO: 777259 - DNA, 15 bp, Homo sapiens
tgcactagatttgtt

SEQ ID NO: 777260 - DNA, 15 bp, Homo sapiens
gcactagatttgtta

SEQ ID NO: 777261 - DNA, 15 bp, Homo sapiens
cactagatttgttat

SEQ ID NO: 777262 - DNA, 15 bp, Homo sapiens
actagatttgttatt

SEQ ID NO: 777263 - DNA, 15 bp, Homo sapiens
ctagatttgttattt

SEQ ID NO: 777264 - DNA, 15 bp, Homo sapiens
tagatttgttatttt

SEQ ID NO: 777265 - DNA, 15 bp, Homo sapiens
agatttgttattttt

SEQ ID NO: 777266 - DNA, 15 bp, Homo sapiens
gatttgttatttttg

SEQ ID NO: 777267 - DNA, 15 bp, Homo sapiens
atttgttatttttga

SEQ ID NO: 777268 - DNA, 15 bp, Homo sapiens
tttgttatttttgac

SEQ ID NO: 777269 - DNA, 15 bp, Homo sapiens
ttgttatttttgact

SEQ ID NO: 777270 - DNA, 15 bp, Homo sapiens
tgttatttttgactc

SEQ ID NO: 777271 - DNA, 15 bp, Homo sapiens
gttatttttgactca

SEQ ID NO: 777272 - DNA, 15 bp, Homo sapiens
ttatttttgactcaa

SEQ ID NO: 777273 - DNA, 15 bp, Homo sapiens
tatttttgactcaac

SEQ ID NO: 777274 - DNA, 15 bp, Homo sapiens
atttttgactcaaca

SEQ ID NO: 777275 - DNA, 15 bp, Homo sapiens
tttttgactcaacat

SEQ ID NO: 777276 - DNA, 15 bp, Homo sapiens
ttttgactcaacatc

SEQ ID NO: 777277 - DNA, 15 bp, Homo sapiens
tttgactcaacatca

SEQ ID NO: 777278 - DNA, 15 bp, Homo sapiens
ttgactcaacatcat

SEQ ID NO: 777279 - DNA, 15 bp, Homo sapiens
tgactcaacatcatt

SEQ ID NO: 777280 - DNA, 15 bp, Homo sapiens
gactcaacatcattt

SEQ ID NO: 777281 - DNA, 15 bp, Homo sapiens
actcaacatcattta

SEQ ID NO: 777282 - DNA, 15 bp, Homo sapiens
ctcaacatcatttac

SEQ ID NO: 777283 - DNA, 15 bp, Homo sapiens
tcaacatcatttacc

SEQ ID NO: 777284 - DNA, 15 bp, Homo sapiens
caacatcatttaccc

SEQ ID NO: 777285 - DNA, 15 bp, Homo sapiens
aacatcatttaccca

SEQ ID NO: 777286 - DNA, 15 bp, Homo sapiens
acatcatttacccag

SEQ ID NO: 777287 - DNA, 15 bp, Homo sapiens
catcatttacccaga

SEQ ID NO: 777288 - DNA, 15 bp, Homo sapiens
atcatttacccagat

SEQ ID NO: 777289 - DNA, 15 bp, Homo sapiens
tcatttacccagatg

SEQ ID NO: 777290 - DNA, 15 bp, Homo sapiens
catttacccagatga

SEQ ID NO: 777291 - DNA, 15 bp, Homo sapiens
atttacccagatgag

SEQ ID NO: 777292 - DNA, 15 bp, Homo sapiens
tttacccagatgaga

SEQ ID NO: 777293 - DNA, 15 bp, Homo sapiens
ttacccagatgagaa

SEQ ID NO: 777294 - DNA, 15 bp, Homo sapiens
tacccagatgagaaa

SEQ ID NO: 777295 - DNA, 15 bp, Homo sapiens
acccagatgagaaaa

SEQ ID NO: 777296 - DNA, 15 bp, Homo sapiens
cccagatgagaaaac

SEQ ID NO: 777297 - DNA, 15 bp, Homo sapiens
ccagatgagaaaaca

SEQ ID NO: 777298 - DNA, 15 bp, Homo sapiens
cagatgagaaaacat

SEQ ID NO: 777299 - DNA, 15 bp, Homo sapiens
agatgagaaaacatg

SEQ ID NO: 777300 - DNA, 15 bp, Homo sapiens
gatgagaaaacatga

SEQ ID NO: 777301 - DNA, 15 bp, Homo sapiens
atgagaaaacatgag

SEQ ID NO: 777302 - DNA, 15 bp, Homo sapiens
tgagaaaacatgagt

SEQ ID NO: 777303 - DNA, 15 bp, Homo sapiens
gagaaaacatgagtc

SEQ ID NO: 777304 - DNA, 15 bp, Homo sapiens
agaaaacatgagtca

SEQ ID NO: 777305 - DNA, 15 bp, Homo sapiens
gaaaacatgagtcag

SEQ ID NO: 777306 - DNA, 15 bp, Homo sapiens
aaaacatgagtcaga

SEQ ID NO: 777307 - DNA, 15 bp, Homo sapiens
aaacatgagtcagag

SEQ ID NO: 777308 - DNA, 15 bp, Homo sapiens
aacatgagtcagaga

SEQ ID NO: 777309 - DNA, 15 bp, Homo sapiens
acatgagtcagagaa

SEQ ID NO: 777310 - DNA, 15 bp, Homo sapiens
catgagtcagagaaa

SEQ ID NO: 777311 - DNA, 15 bp, Homo sapiens
atgagtcagagaaat

SEQ ID NO: 777312 - DNA, 15 bp, Homo sapiens
tgagtcagagaaata

SEQ ID NO: 777313 - DNA, 15 bp, Homo sapiens
gagtcagagaaataa

SEQ ID NO: 777314 - DNA, 15 bp, Homo sapiens
agtcagagaaataat

SEQ ID NO: 777315 - DNA, 15 bp, Homo sapiens
gtcagagaaataatt

SEQ ID NO: 777316 - DNA, 15 bp, Homo sapiens
tcagagaaataattg

SEQ ID NO: 777317 - DNA, 15 bp, Homo sapiens
cagagaaataattga

SEQ ID NO: 777318 - DNA, 15 bp, Homo sapiens
agagaaataattgaa

SEQ ID NO: 777319 - DNA, 15 bp, Homo sapiens
gagaaataattgaat

SEQ ID NO: 777320 - DNA, 15 bp, Homo sapiens
agaaataattgaatt

SEQ ID NO: 777321 - DNA, 15 bp, Homo sapiens
gaaataattgaattg

SEQ ID NO: 777322 - DNA, 15 bp, Homo sapiens
aaataattgaattga

SEQ ID NO: 777323 - DNA, 15 bp, Homo sapiens
aataattgaattgag

SEQ ID NO: 777324 - DNA, 15 bp, Homo sapiens
ataattgaattgagc

SEQ ID NO: 777325 - DNA, 15 bp, Homo sapiens
taattgaattgagca

SEQ ID NO: 777326 - DNA, 15 bp, Homo sapiens
aattgaattgagcag

SEQ ID NO: 777327 - DNA, 15 bp, Homo sapiens
attgaattgagcagt

SEQ ID NO: 777328 - DNA, 15 bp, Homo sapiens
ttgaattgagcagtc

SEQ ID NO: 777329 - DNA, 15 bp, Homo sapiens
tgaattgagcagtct

SEQ ID NO: 777330 - DNA, 15 bp, Homo sapiens
gaattgagcagtctc

SEQ ID NO: 777331 - DNA, 15 bp, Homo sapiens
aattgagcagtctcc

SEQ ID NO: 777332 - DNA, 15 bp, Homo sapiens
attgagcagtctccc

SEQ ID NO: 777333 - DNA, 15 bp, Homo sapiens
ttgagcagtctcccc

SEQ ID NO: 777334 - DNA, 15 bp, Homo sapiens
tgagcagtctccccc

SEQ ID NO: 777335 - DNA, 15 bp, Homo sapiens
gagcagtctcccccg

SEQ ID NO: 777336 - DNA, 15 bp, Homo sapiens
agcagtctcccccga

SEQ ID NO: 777337 - DNA, 15 bp, Homo sapiens
gcagtctcccccgac

SEQ ID NO: 777338 - DNA, 15 bp, Homo sapiens
cagtctcccccgaca

SEQ ID NO: 777339 - DNA, 15 bp, Homo sapiens
agtctcccccgacag

SEQ ID NO: 777340 - DNA, 15 bp, Homo sapiens
gtctcccccgacagg

SEQ ID NO: 777341 - DNA, 15 bp, Homo sapiens
tctcccccgacaggt

SEQ ID NO: 777342 - DNA, 15 bp, Homo sapiens
ctcccccgacaggta

SEQ ID NO: 777343 - DNA, 15 bp, Homo sapiens
tcccccgacaggtag

SEQ ID NO: 777344 - DNA, 15 bp, Homo sapiens
cccccgacaggtagt

SEQ ID NO: 777345 - DNA, 15 bp, Homo sapiens
ccccgacaggtagtg

SEQ ID NO: 777346 - DNA, 15 bp, Homo sapiens
cccgacaggtagtga

SEQ ID NO: 777347 - DNA, 15 bp, Homo sapiens
ccgacaggtagtgag

SEQ ID NO: 777348 - DNA, 15 bp, Homo sapiens
cgacaggtagtgagc

SEQ ID NO: 777349 - DNA, 15 bp, Homo sapiens
gacaggtagtgagct

SEQ ID NO: 777350 - DNA, 15 bp, Homo sapiens
acaggtagtgagctg

SEQ ID NO: 777351 - DNA, 15 bp, Homo sapiens
caggtagtgagctgc

SEQ ID NO: 777352 - DNA, 15 bp, Homo sapiens
aggtagtgagctgcc

SEQ ID NO: 777353 - DNA, 15 bp, Homo sapiens
ggtagtgagctgcct

SEQ ID NO: 777354 - DNA, 15 bp, Homo sapiens
gtagtgagctgcctg

SEQ ID NO: 777355 - DNA, 15 bp, Homo sapiens
tagtgagctgcctgt

SEQ ID NO: 777356 - DNA, 15 bp, Homo sapiens
agtgagctgcctgtt

SEQ ID NO: 777357 - DNA, 15 bp, Homo sapiens
gtgagctgcctgtta

SEQ ID NO: 777358 - DNA, 15 bp, Homo sapiens
tgagctgcctgttac

SEQ ID NO: 777359 - DNA, 15 bp, Homo sapiens
gagctgcctgttact

SEQ ID NO: 777360 - DNA, 15 bp, Homo sapiens
agctgcctgttacta

SEQ ID NO: 777361 - DNA, 15 bp, Homo sapiens
gctgcctgttactag

SEQ ID NO: 777362 - DNA, 15 bp, Homo sapiens
ctgcctgttactaga

SEQ ID NO: 777363 - DNA, 15 bp, Homo sapiens
tgcctgttactagaa

SEQ ID NO: 777364 - DNA, 15 bp, Homo sapiens
gcctgttactagaaa

SEQ ID NO: 777365 - DNA, 15 bp, Homo sapiens
cctgttactagaaat

SEQ ID NO: 777366 - DNA, 15 bp, Homo sapiens
ctgttactagaaata

SEQ ID NO: 777367 - DNA, 15 bp, Homo sapiens
tgttactagaaatat

SEQ ID NO: 777368 - DNA, 15 bp, Homo sapiens
gttactagaaatatt

SEQ ID NO: 777369 - DNA, 15 bp, Homo sapiens
ttactagaaatattc

SEQ ID NO: 777370 - DNA, 15 bp, Homo sapiens
tactagaaatattca

SEQ ID NO: 777371 - DNA, 15 bp, Homo sapiens
actagaaatattcaa

SEQ ID NO: 777372 - DNA, 15 bp, Homo sapiens
ctagaaatattcaaa

SEQ ID NO: 777373 - DNA, 15 bp, Homo sapiens
tagaaatattcaaag

SEQ ID NO: 777374 - DNA, 15 bp, Homo sapiens
agaaatattcaaaga

SEQ ID NO: 777375 - DNA, 15 bp, Homo sapiens
gaaatattcaaagag

SEQ ID NO: 777376 - DNA, 15 bp, Homo sapiens
aaatattcaaagagc

SEQ ID NO: 777377 - DNA, 15 bp, Homo sapiens
aatattcaaagagca

SEQ ID NO: 777378 - DNA, 15 bp, Homo sapiens
atattcaaagagcag

SEQ ID NO: 777379 - DNA, 15 bp, Homo sapiens
tattcaaagagcagc

SEQ ID NO: 777380 - DNA, 15 bp, Homo sapiens
attcaaagagcagca

SEQ ID NO: 777381 - DNA, 15 bp, Homo sapiens
ttcaaagagcagcag

SEQ ID NO: 777382 - DNA, 15 bp, Homo sapiens
tcaaagagcagcagg

SEQ ID NO: 777383 - DNA, 15 bp, Homo sapiens
caaagagcagcagga

SEQ ID NO: 777384 - DNA, 15 bp, Homo sapiens
aaagagcagcaggat

SEQ ID NO: 777385 - DNA, 15 bp, Homo sapiens
aagagcagcaggatc

SEQ ID NO: 777386 - DNA, 15 bp, Homo sapiens
agagcagcaggatcg

SEQ ID NO: 777387 - DNA, 15 bp, Homo sapiens
gagcagcaggatcgc

SEQ ID NO: 777388 - DNA, 15 bp, Homo sapiens
agcagcaggatcgca

SEQ ID NO: 777389 - DNA, 15 bp, Homo sapiens
gcagcaggatcgcat

SEQ ID NO: 777390 - DNA, 15 bp, Homo sapiens
cagcaggatcgcatt

SEQ ID NO: 777391 - DNA, 15 bp, Homo sapiens
agcaggatcgcattt

SEQ ID NO: 777392 - DNA, 15 bp, Homo sapiens
gcaggatcgcatttc

SEQ ID NO: 777393 - DNA, 15 bp, Homo sapiens
caggatcgcatttca

SEQ ID NO: 777394 - DNA, 15 bp, Homo sapiens
aggatcgcatttcat

SEQ ID NO: 777395 - DNA, 15 bp, Homo sapiens
ggatcgcatttcata

SEQ ID NO: 777396 - DNA, 15 bp, Homo sapiens
gatcgcatttcatag

SEQ ID NO: 777397 - DNA, 15 bp, Homo sapiens
atcgcatttcatagt

SEQ ID NO: 777398 - DNA, 15 bp, Homo sapiens
tcgcatttcatagtg

SEQ ID NO: 777399 - DNA, 15 bp, Homo sapiens
cgcatttcatagtgc

SEQ ID NO: 777400 - DNA, 15 bp, Homo sapiens
gcatttcatagtgct

SEQ ID NO: 777401 - DNA, 15 bp, Homo sapiens
catttcatagtgctg

SEQ ID NO: 777402 - DNA, 15 bp, Homo sapiens
atttcatagtgctgt

SEQ ID NO: 777403 - DNA, 15 bp, Homo sapiens
tttcatagtgctgtt

SEQ ID NO: 777404 - DNA, 15 bp, Homo sapiens
ttcatagtgctgttg

SEQ ID NO: 777405 - DNA, 15 bp, Homo sapiens
tcatagtgctgttgc

SEQ ID NO: 777406 - DNA, 15 bp, Homo sapiens
catagtgctgttgct

SEQ ID NO: 777407 - DNA, 15 bp, Homo sapiens
atagtgctgttgctg

SEQ ID NO: 777408 - DNA, 15 bp, Homo sapiens
tagtgctgttgctga

SEQ ID NO: 777409 - DNA, 15 bp, Homo sapiens
agtgctgttgctgac

SEQ ID NO: 777410 - DNA, 15 bp, Homo sapiens
gtgctgttgctgaca

SEQ ID NO: 777411 - DNA, 15 bp, Homo sapiens
tgctgttgctgacag

SEQ ID NO: 777412 - DNA, 15 bp, Homo sapiens
gctgttgctgacagt

SEQ ID NO: 777413 - DNA, 15 bp, Homo sapiens
ctgttgctgacagtt

SEQ ID NO: 777414 - DNA, 15 bp, Homo sapiens
tgttgctgacagttg

SEQ ID NO: 777415 - DNA, 15 bp, Homo sapiens
gttgctgacagttgg

SEQ ID NO: 777416 - DNA, 15 bp, Homo sapiens
ttgctgacagttggt

SEQ ID NO: 777417 - DNA, 15 bp, Homo sapiens
tgctgacagttggtt

SEQ ID NO: 777418 - DNA, 15 bp, Homo sapiens
gctgacagttggtta

SEQ ID NO: 777419 - DNA, 15 bp, Homo sapiens
ctgacagttggttag

SEQ ID NO: 777420 - DNA, 15 bp, Homo sapiens
tgacagttggttaga

SEQ ID NO: 777421 - DNA, 15 bp, Homo sapiens
gacagttggttagac

SEQ ID NO: 777422 - DNA, 15 bp, Homo sapiens
acagttggttagact

SEQ ID NO: 777423 - DNA, 15 bp, Homo sapiens
cagttggttagactt

SEQ ID NO: 777424 - DNA, 15 bp, Homo sapiens
agttggttagacttt

SEQ ID NO: 777425 - DNA, 15 bp, Homo sapiens
gttggttagacttta

SEQ ID NO: 777426 - DNA, 15 bp, Homo sapiens
ttggttagactttat

SEQ ID NO: 777427 - DNA, 15 bp, Homo sapiens
tggttagactttatc

SEQ ID NO: 777428 - DNA, 15 bp, Homo sapiens
ggttagactttatcc

SEQ ID NO: 777429 - DNA, 15 bp, Homo sapiens
gttagactttatcct

SEQ ID NO: 777430 - DNA, 15 bp, Homo sapiens
ttagactttatcctc

SEQ ID NO: 777431 - DNA, 15 bp, Homo sapiens
tagactttatcctca

SEQ ID NO: 777432 - DNA, 15 bp, Homo sapiens
agactttatcctcat

SEQ ID NO: 777433 - DNA, 15 bp, Homo sapiens
gactttatcctcatg

SEQ ID NO: 777434 - DNA, 15 bp, Homo sapiens
actttatcctcatgg

SEQ ID NO: 777435 - DNA, 15 bp, Homo sapiens
ctttatcctcatggc

SEQ ID NO: 777436 - DNA, 15 bp, Homo sapiens
tttatcctcatggct

SEQ ID NO: 777437 - DNA, 15 bp, Homo sapiens
ttatcctcatggctt

SEQ ID NO: 777438 - DNA, 15 bp, Homo sapiens
tatcctcatggcttt

SEQ ID NO: 777439 - DNA, 15 bp, Homo sapiens
atcctcatggcttta

SEQ ID NO: 777440 - DNA, 15 bp, Homo sapiens
tcctcatggctttaa

SEQ ID NO: 777441 - DNA, 15 bp, Homo sapiens
cctcatggctttaat

SEQ ID NO: 777442 - DNA, 15 bp, Homo sapiens
ctcatggctttaatt

SEQ ID NO: 777443 - DNA, 15 bp, Homo sapiens
tcatggctttaatta

SEQ ID NO: 777444 - DNA, 15 bp, Homo sapiens
catggctttaattag

SEQ ID NO: 777445 - DNA, 15 bp, Homo sapiens
atggctttaattagg

SEQ ID NO: 777446 - DNA, 15 bp, Homo sapiens
tggctttaattaggt

SEQ ID NO: 777447 - DNA, 15 bp, Homo sapiens
ggctttaattaggtt

SEQ ID NO: 777448 - DNA, 15 bp, Homo sapiens
gctttaattaggttc

SEQ ID NO: 777449 - DNA, 15 bp, Homo sapiens
ctttaattaggttcc

SEQ ID NO: 777450 - DNA, 15 bp, Homo sapiens
tttaattaggttcca

SEQ ID NO: 777451 - DNA, 15 bp, Homo sapiens
ttaattaggttccat

SEQ ID NO: 777452 - DNA, 15 bp, Homo sapiens
taattaggttccata

SEQ ID NO: 777453 - DNA, 15 bp, Homo sapiens
aattaggttccatag

SEQ ID NO: 777454 - DNA, 15 bp, Homo sapiens
attaggttccataga

SEQ ID NO: 777455 - DNA, 15 bp, Homo sapiens
ttaggttccatagaa

SEQ ID NO: 777456 - DNA, 15 bp, Homo sapiens
taggttccatagaac

SEQ ID NO: 777457 - DNA, 15 bp, Homo sapiens
aggttccatagaaca

SEQ ID NO: 777458 - DNA, 15 bp, Homo sapiens
ggttccatagaacac

SEQ ID NO: 777459 - DNA, 15 bp, Homo sapiens
gttccatagaacact

SEQ ID NO: 777460 - DNA, 15 bp, Homo sapiens
ttccatagaacacta

SEQ ID NO: 777461 - DNA, 15 bp, Homo sapiens
tccatagaacactag

SEQ ID NO: 777462 - DNA, 15 bp, Homo sapiens
ccatagaacactaga

SEQ ID NO: 777463 - DNA, 15 bp, Homo sapiens
catagaacactagac

SEQ ID NO: 777464 - DNA, 15 bp, Homo sapiens
atagaacactagacc

SEQ ID NO: 777465 - DNA, 15 bp, Homo sapiens
tagaacactagaccc

SEQ ID NO: 777466 - DNA, 15 bp, Homo sapiens
agaacactagaccca

SEQ ID NO: 777467 - DNA, 15 bp, Homo sapiens
gaacactagacccac

SEQ ID NO: 777468 - DNA, 15 bp, Homo sapiens
aacactagacccacg

SEQ ID NO: 777469 - DNA, 15 bp, Homo sapiens
acactagacccacga

SEQ ID NO: 777470 - DNA, 15 bp, Homo sapiens
cactagacccacgaa

SEQ ID NO: 777471 - DNA, 15 bp, Homo sapiens
actagacccacgaat

SEQ ID NO: 777472 - DNA, 15 bp, Homo sapiens
ctagacccacgaatt

SEQ ID NO: 777473 - DNA, 15 bp, Homo sapiens
tagacccacgaattg

SEQ ID NO: 777474 - DNA, 15 bp, Homo sapiens
agacccacgaattgt

SEQ ID NO: 777475 - DNA, 15 bp, Homo sapiens
gacccacgaattgtt

SEQ ID NO: 777476 - DNA, 15 bp, Homo sapiens
acccacgaattgttc

SEQ ID NO: 777477 - DNA, 15 bp, Homo sapiens
cccacgaattgttcc

SEQ ID NO: 777478 - DNA, 15 bp, Homo sapiens
ccacgaattgttccc

SEQ ID NO: 777479 - DNA, 15 bp, Homo sapiens
cacgaattgttcccg

SEQ ID NO: 777480 - DNA, 15 bp, Homo sapiens
acgaattgttcccgg

SEQ ID NO: 777481 - DNA, 15 bp, Homo sapiens
cgaattgttcccgga

SEQ ID NO: 777482 - DNA, 15 bp, Homo sapiens
gaattgttcccggat

SEQ ID NO: 777483 - DNA, 15 bp, Homo sapiens
aattgttcccggata

SEQ ID NO: 777484 - DNA, 15 bp, Homo sapiens
attgttcccggataa

SEQ ID NO: 777485 - DNA, 15 bp, Homo sapiens
ttgttcccggataaa

SEQ ID NO: 777486 - DNA, 15 bp, Homo sapiens
tgttcccggataaaa

SEQ ID NO: 777487 - DNA, 15 bp, Homo sapiens
gttcccggataaaaa

SEQ ID NO: 777488 - DNA, 15 bp, Homo sapiens
ttcccggataaaaat

SEQ ID NO: 777489 - DNA, 15 bp, Homo sapiens
tcccggataaaaatg

SEQ ID NO: 777490 - DNA, 15 bp, Homo sapiens
cccggataaaaatgg

SEQ ID NO: 777491 - DNA, 15 bp, Homo sapiens
ccggataaaaatggt

SEQ ID NO: 777492 - DNA, 15 bp, Homo sapiens
cggataaaaatggtt

SEQ ID NO: 777493 - DNA, 15 bp, Homo sapiens
ggataaaaatggttc

SEQ ID NO: 777494 - DNA, 15 bp, Homo sapiens
gataaaaatggttcc

SEQ ID NO: 777495 - DNA, 15 bp, Homo sapiens
ataaaaatggttccc

SEQ ID NO: 777496 - DNA, 15 bp, Homo sapiens
taaaaatggttccct

SEQ ID NO: 777497 - DNA, 15 bp, Homo sapiens
aaaaatggttccctg

SEQ ID NO: 777498 - DNA, 15 bp, Homo sapiens
aaaatggttccctgg

SEQ ID NO: 777499 - DNA, 15 bp, Homo sapiens
aaatggttccctggg

SEQ ID NO: 777500 - DNA, 15 bp, Homo sapiens
aatggttccctggga

SEQ ID NO: 777501 - DNA, 15 bp, Homo sapiens
atggttccctgggaa

SEQ ID NO: 777502 - DNA, 15 bp, Homo sapiens
tggttccctgggaac

SEQ ID NO: 777503 - DNA, 15 bp, Homo sapiens
ggttccctgggaact

SEQ ID NO: 777504 - DNA, 15 bp, Homo sapiens
gttccctgggaactt

SEQ ID NO: 777505 - DNA, 15 bp, Homo sapiens
ttccctgggaacttg

SEQ ID NO: 777506 - DNA, 15 bp, Homo sapiens
tccctgggaacttgg

SEQ ID NO: 777507 - DNA, 15 bp, Homo sapiens
ccctgggaacttgga

SEQ ID NO: 777508 - DNA, 15 bp, Homo sapiens
cctgggaacttggat

SEQ ID NO: 777509 - DNA, 15 bp, Homo sapiens
ctgggaacttggata

SEQ ID NO: 777510 - DNA, 15 bp, Homo sapiens
tgggaacttggatag

SEQ ID NO: 777511 - DNA, 15 bp, Homo sapiens
gggaacttggataga

SEQ ID NO: 777512 - DNA, 15 bp, Homo sapiens
ggaacttggatagac

SEQ ID NO: 777513 - DNA, 15 bp, Homo sapiens
gaacttggatagact

SEQ ID NO: 777514 - DNA, 15 bp, Homo sapiens
aacttggatagactt

SEQ ID NO: 777515 - DNA, 15 bp, Homo sapiens
acttggatagacttc

SEQ ID NO: 777516 - DNA, 15 bp, Homo sapiens
cttggatagacttca

SEQ ID NO: 777517 - DNA, 15 bp, Homo sapiens
ttggatagacttcat

SEQ ID NO: 777518 - DNA, 15 bp, Homo sapiens
tggatagacttcatt

SEQ ID NO: 777519 - DNA, 15 bp, Homo sapiens
ggatagacttcattt

SEQ ID NO: 777520 - DNA, 15 bp, Homo sapiens
gatagacttcatttc

SEQ ID NO: 777521 - DNA, 15 bp, Homo sapiens
atagacttcatttct

SEQ ID NO: 777522 - DNA, 15 bp, Homo sapiens
tagacttcatttctc

SEQ ID NO: 777523 - DNA, 15 bp, Homo sapiens
agacttcatttctca

SEQ ID NO: 777524 - DNA, 15 bp, Homo sapiens
gacttcatttctcat

SEQ ID NO: 777525 - DNA, 15 bp, Homo sapiens
acttcatttctcatc

SEQ ID NO: 777526 - DNA, 15 bp, Homo sapiens
cttcatttctcatcc

SEQ ID NO: 777527 - DNA, 15 bp, Homo sapiens
ttcatttctcatccc

SEQ ID NO: 777528 - DNA, 15 bp, Homo sapiens
tcatttctcatcccc

SEQ ID NO: 777529 - DNA, 15 bp, Homo sapiens
catttctcatccccc

SEQ ID NO: 777530 - DNA, 15 bp, Homo sapiens
atttctcatccccct

SEQ ID NO: 777531 - DNA, 15 bp, Homo sapiens
tttctcatccccctc

SEQ ID NO: 777532 - DNA, 15 bp, Homo sapiens
ttctcatccccctcc

SEQ ID NO: 777533 - DNA, 15 bp, Homo sapiens
tctcatccccctcct

SEQ ID NO: 777534 - DNA, 15 bp, Homo sapiens
ctcatccccctcctc

SEQ ID NO: 777535 - DNA, 15 bp, Homo sapiens
tcatccccctcctcg

SEQ ID NO: 777536 - DNA, 15 bp, Homo sapiens
catccccctcctcga

SEQ ID NO: 777537 - DNA, 15 bp, Homo sapiens
atccccctcctcgag

SEQ ID NO: 777538 - DNA, 15 bp, Homo sapiens
tccccctcctcgaga

SEQ ID NO: 777539 - DNA, 15 bp, Homo sapiens
ccccctcctcgagat

SEQ ID NO: 777540 - DNA, 15 bp, Homo sapiens
cccctcctcgagatt

SEQ ID NO: 777541 - DNA, 15 bp, Homo sapiens
ccctcctcgagattg

SEQ ID NO: 777542 - DNA, 15 bp, Homo sapiens
cctcctcgagattgc

SEQ ID NO: 777543 - DNA, 15 bp, Homo sapiens
ctcctcgagattgcc

SEQ ID NO: 777544 - DNA, 15 bp, Homo sapiens
tcctcgagattgcca

SEQ ID NO: 777545 - DNA, 15 bp, Homo sapiens
cctcgagattgccaa

SEQ ID NO: 777546 - DNA, 15 bp, Homo sapiens
ctcgagattgccaat

SEQ ID NO: 777547 - DNA, 15 bp, Homo sapiens
tcgagattgccaatg

SEQ ID NO: 777548 - DNA, 15 bp, Homo sapiens
cgagattgccaatgc

SEQ ID NO: 777549 - DNA, 15 bp, Homo sapiens
gagattgccaatgca

SEQ ID NO: 777550 - DNA, 15 bp, Homo sapiens
agattgccaatgcat

SEQ ID NO: 777551 - DNA, 15 bp, Homo sapiens
gattgccaatgcata

SEQ ID NO: 777552 - DNA, 15 bp, Homo sapiens
attgccaatgcatat

SEQ ID NO: 777553 - DNA, 15 bp, Homo sapiens
ttgccaatgcatatc

SEQ ID NO: 777554 - DNA, 15 bp, Homo sapiens
tgccaatgcatatca

SEQ ID NO: 777555 - DNA, 15 bp, Homo sapiens
gccaatgcatatcag

SEQ ID NO: 777556 - DNA, 15 bp, Homo sapiens
ccaatgcatatcagc

SEQ ID NO: 777557 - DNA, 15 bp, Homo sapiens
caatgcatatcagca

SEQ ID NO: 777558 - DNA, 15 bp, Homo sapiens
aatgcatatcagcat

SEQ ID NO: 777559 - DNA, 15 bp, Homo sapiens
atgcatatcagcata

SEQ ID NO: 777560 - DNA, 15 bp, Homo sapiens
tgcatatcagcatat

SEQ ID NO: 777561 - DNA, 15 bp, Homo sapiens
gcatatcagcatata

SEQ ID NO: 777562 - DNA, 15 bp, Homo sapiens
catatcagcatataa

SEQ ID NO: 777563 - DNA, 15 bp, Homo sapiens
atatcagcatataaa

SEQ ID NO: 777564 - DNA, 15 bp, Homo sapiens
tatcagcatataaat

SEQ ID NO: 777565 - DNA, 15 bp, Homo sapiens
atcagcatataaata

SEQ ID NO: 777566 - DNA, 15 bp, Homo sapiens
tcagcatataaatac

SEQ ID NO: 777567 - DNA, 15 bp, Homo sapiens
cagcatataaatact

SEQ ID NO: 777568 - DNA, 15 bp, Homo sapiens
agcatataaatactt

SEQ ID NO: 777569 - DNA, 15 bp, Homo sapiens
gcatataaatactta

SEQ ID NO: 777570 - DNA, 15 bp, Homo sapiens
catataaatacttac

SEQ ID NO: 777571 - DNA, 15 bp, Homo sapiens
atataaatacttaca

SEQ ID NO: 777572 - DNA, 15 bp, Homo sapiens
tataaatacttacag

SEQ ID NO: 777573 - DNA, 15 bp, Homo sapiens
ataaatacttacaga

SEQ ID NO: 777574 - DNA, 15 bp, Homo sapiens
taaatacttacagaa

SEQ ID NO: 777575 - DNA, 15 bp, Homo sapiens
aaatacttacagaag

SEQ ID NO: 777576 - DNA, 15 bp, Homo sapiens
aatacttacagaagt

SEQ ID NO: 777577 - DNA, 15 bp, Homo sapiens
atacttacagaagtc

SEQ ID NO: 777578 - DNA, 15 bp, Homo sapiens
tacttacagaagtcc

SEQ ID NO: 777579 - DNA, 15 bp, Homo sapiens
acttacagaagtcct

SEQ ID NO: 777580 - DNA, 15 bp, Homo sapiens
cttacagaagtcctg

SEQ ID NO: 777581 - DNA, 15 bp, Homo sapiens
ttacagaagtcctgc

SEQ ID NO: 777582 - DNA, 15 bp, Homo sapiens
tacagaagtcctgca

SEQ ID NO: 777583 - DNA, 15 bp, Homo sapiens
acagaagtcctgcag

SEQ ID NO: 777584 - DNA, 15 bp, Homo sapiens
cagaagtcctgcagt

SEQ ID NO: 777585 - DNA, 15 bp, Homo sapiens
agaagtcctgcagtc

SEQ ID NO: 777586 - DNA, 15 bp, Homo sapiens
gaagtcctgcagtca

SEQ ID NO: 777587 - DNA, 15 bp, Homo sapiens
aagtcctgcagtcag

SEQ ID NO: 777588 - DNA, 15 bp, Homo sapiens
agtcctgcagtcaga

SEQ ID NO: 777589 - DNA, 15 bp, Homo sapiens
gtcctgcagtcagaa

SEQ ID NO: 777590 - DNA, 15 bp, Homo sapiens
tcctgcagtcagaaa

SEQ ID NO: 777591 - DNA, 15 bp, Homo sapiens
cctgcagtcagaaag

SEQ ID NO: 777592 - DNA, 15 bp, Homo sapiens
ctgcagtcagaaagc

SEQ ID NO: 777593 - DNA, 15 bp, Homo sapiens
tgcagtcagaaagcg

SEQ ID NO: 777594 - DNA, 15 bp, Homo sapiens
gcagtcagaaagcgg

SEQ ID NO: 777595 - DNA, 15 bp, Homo sapiens
cagtcagaaagcgga

SEQ ID NO: 777596 - DNA, 15 bp, Homo sapiens
agtcagaaagcggaa

SEQ ID NO: 777597 - DNA, 15 bp, Homo sapiens
gtcagaaagcggaaa

SEQ ID NO: 777598 - DNA, 15 bp, Homo sapiens
tcagaaagcggaaag

SEQ ID NO: 777599 - DNA, 15 bp, Homo sapiens
cagaaagcggaaagg

SEQ ID NO: 777600 - DNA, 15 bp, Homo sapiens
agaaagcggaaaggc

SEQ ID NO: 777601 - DNA, 15 bp, Homo sapiens
gaaagcggaaaggct

SEQ ID NO: 777602 - DNA, 15 bp, Homo sapiens
aaagcggaaaggctc

SEQ ID NO: 777603 - DNA, 15 bp, Homo sapiens
aagcggaaaggctct

SEQ ID NO: 777604 - DNA, 15 bp, Homo sapiens
agcggaaaggctctg

SEQ ID NO: 777605 - DNA, 15 bp, Homo sapiens
gcggaaaggctctgt

SEQ ID NO: 777606 - DNA, 15 bp, Homo sapiens
cggaaaggctctgtt

SEQ ID NO: 777607 - DNA, 15 bp, Homo sapiens
ggaaaggctctgttt

SEQ ID NO: 777608 - DNA, 15 bp, Homo sapiens
gaaaggctctgtttt

SEQ ID NO: 777609 - DNA, 15 bp, Homo sapiens
aaaggctctgttttg

SEQ ID NO: 777610 - DNA, 15 bp, Homo sapiens
aaggctctgttttgc

SEQ ID NO: 777611 - DNA, 15 bp, Homo sapiens
aggctctgttttgcc

SEQ ID NO: 777612 - DNA, 15 bp, Homo sapiens
ggctctgttttgccc

SEQ ID NO: 777613 - DNA, 15 bp, Homo sapiens
gctctgttttgccca

SEQ ID NO: 777614 - DNA, 15 bp, Homo sapiens
ctctgttttgcccag

SEQ ID NO: 777615 - DNA, 15 bp, Homo sapiens
tctgttttgcccagc

SEQ ID NO: 777616 - DNA, 15 bp, Homo sapiens
ctgttttgcccagca

SEQ ID NO: 777617 - DNA, 15 bp, Homo sapiens
tgttttgcccagcat

SEQ ID NO: 777618 - DNA, 15 bp, Homo sapiens
gttttgcccagcatt

SEQ ID NO: 777619 - DNA, 15 bp, Homo sapiens
ttttgcccagcattt

SEQ ID NO: 777620 - DNA, 15 bp, Homo sapiens
tttgcccagcatttt

SEQ ID NO: 777621 - DNA, 15 bp, Homo sapiens
ttgcccagcattttc

SEQ ID NO: 777622 - DNA, 15 bp, Homo sapiens
tgcccagcattttcc

SEQ ID NO: 777623 - DNA, 15 bp, Homo sapiens
gcccagcattttcca

SEQ ID NO: 777624 - DNA, 15 bp, Homo sapiens
cccagcattttccat

SEQ ID NO: 777625 - DNA, 15 bp, Homo sapiens
ccagcattttccatt

SEQ ID NO: 777626 - DNA, 15 bp, Homo sapiens
cagcattttccattt

SEQ ID NO: 777627 - DNA, 15 bp, Homo sapiens
agcattttccatttt

SEQ ID NO: 777628 - DNA, 15 bp, Homo sapiens
gcattttccattttc

SEQ ID NO: 777629 - DNA, 15 bp, Homo sapiens
cattttccattttca

SEQ ID NO: 777630 - DNA, 15 bp, Homo sapiens
attttccattttcat

SEQ ID NO: 777631 - DNA, 15 bp, Homo sapiens
ttttccattttcatt

SEQ ID NO: 777632 - DNA, 15 bp, Homo sapiens
tttccattttcattt

SEQ ID NO: 777633 - DNA, 15 bp, Homo sapiens
ttccattttcatttc

SEQ ID NO: 777634 - DNA, 15 bp, Homo sapiens
tccattttcatttcc

SEQ ID NO: 777635 - DNA, 15 bp, Homo sapiens
ccattttcatttccc

SEQ ID NO: 777636 - DNA, 15 bp, Homo sapiens
cattttcatttccct

SEQ ID NO: 777637 - DNA, 15 bp, Homo sapiens
attttcatttccctg

SEQ ID NO: 777638 - DNA, 15 bp, Homo sapiens
ttttcatttccctgt

SEQ ID NO: 777639 - DNA, 15 bp, Homo sapiens
tttcatttccctgtg

SEQ ID NO: 777640 - DNA, 15 bp, Homo sapiens
ttcatttccctgtgg

SEQ ID NO: 777641 - DNA, 15 bp, Homo sapiens
tcatttccctgtgga

SEQ ID NO: 777642 - DNA, 15 bp, Homo sapiens
catttccctgtggaa

SEQ ID NO: 777643 - DNA, 15 bp, Homo sapiens
atttccctgtggaat

SEQ ID NO: 777644 - DNA, 15 bp, Homo sapiens
tttccctgtggaatc

SEQ ID NO: 777645 - DNA, 15 bp, Homo sapiens
ttccctgtggaatcc

SEQ ID NO: 777646 - DNA, 15 bp, Homo sapiens
tccctgtggaatcct

SEQ ID NO: 777647 - DNA, 15 bp, Homo sapiens
ccctgtggaatcctt

SEQ ID NO: 777648 - DNA, 15 bp, Homo sapiens
cctgtggaatccttt

SEQ ID NO: 777649 - DNA, 15 bp, Homo sapiens
ctgtggaatcctttc

SEQ ID NO: 777650 - DNA, 15 bp, Homo sapiens
tgtggaatcctttcc

SEQ ID NO: 777651 - DNA, 15 bp, Homo sapiens
gtggaatcctttccc

SEQ ID NO: 777652 - DNA, 15 bp, Homo sapiens
tggaatcctttcccc

SEQ ID NO: 777653 - DNA, 15 bp, Homo sapiens
ggaatcctttcccca

SEQ ID NO: 777654 - DNA, 15 bp, Homo sapiens
gaatcctttccccat

SEQ ID NO: 777655 - DNA, 15 bp, Homo sapiens
aatcctttccccatg

SEQ ID NO: 777656 - DNA, 15 bp, Homo sapiens
atcctttccccatgt

SEQ ID NO: 777657 - DNA, 15 bp, Homo sapiens
tcctttccccatgta

SEQ ID NO: 777658 - DNA, 15 bp, Homo sapiens
cctttccccatgtaa

SEQ ID NO: 777659 - DNA, 15 bp, Homo sapiens
ctttccccatgtaat

SEQ ID NO: 777660 - DNA, 15 bp, Homo sapiens
tttccccatgtaata

SEQ ID NO: 777661 - DNA, 15 bp, Homo sapiens
ttccccatgtaatac

SEQ ID NO: 777662 - DNA, 15 bp, Homo sapiens
tccccatgtaatacc

SEQ ID NO: 777663 - DNA, 15 bp, Homo sapiens
ccccatgtaatacct

SEQ ID NO: 777664 - DNA, 15 bp, Homo sapiens
cccatgtaatacctg

SEQ ID NO: 777665 - DNA, 15 bp, Homo sapiens
ccatgtaatacctgt

SEQ ID NO: 777666 - DNA, 15 bp, Homo sapiens
catgtaatacctgtg

SEQ ID NO: 777667 - DNA, 15 bp, Homo sapiens
atgtaatacctgtgg

SEQ ID NO: 777668 - DNA, 15 bp, Homo sapiens
tgtaatacctgtggg

SEQ ID NO: 777669 - DNA, 15 bp, Homo sapiens
gtaatacctgtgggc

SEQ ID NO: 777670 - DNA, 15 bp, Homo sapiens
taatacctgtgggca

SEQ ID NO: 777671 - DNA, 15 bp, Homo sapiens
aatacctgtgggcat

SEQ ID NO: 777672 - DNA, 15 bp, Homo sapiens
atacctgtgggcatc

SEQ ID NO: 777673 - DNA, 15 bp, Homo sapiens
tacctgtgggcatca

SEQ ID NO: 777674 - DNA, 15 bp, Homo sapiens
acctgtgggcatcac

SEQ ID NO: 777675 - DNA, 15 bp, Homo sapiens
cctgtgggcatcaca

SEQ ID NO: 777676 - DNA, 15 bp, Homo sapiens
ctgtgggcatcacat

SEQ ID NO: 777677 - DNA, 15 bp, Homo sapiens
tgtgggcatcacata

SEQ ID NO: 777678 - DNA, 15 bp, Homo sapiens
gtgggcatcacatag

SEQ ID NO: 777679 - DNA, 15 bp, Homo sapiens
tgggcatcacatagc

SEQ ID NO: 777680 - DNA, 15 bp, Homo sapiens
gggcatcacatagca

SEQ ID NO: 777681 - DNA, 15 bp, Homo sapiens
ggcatcacatagcac

SEQ ID NO: 777682 - DNA, 15 bp, Homo sapiens
gcatcacatagcact

SEQ ID NO: 777683 - DNA, 15 bp, Homo sapiens
catcacatagcactc

SEQ ID NO: 777684 - DNA, 15 bp, Homo sapiens
atcacatagcactca

SEQ ID NO: 777685 - DNA, 15 bp, Homo sapiens
tcacatagcactcac

SEQ ID NO: 777686 - DNA, 15 bp, Homo sapiens
cacatagcactcact

SEQ ID NO: 777687 - DNA, 15 bp, Homo sapiens
acatagcactcactt

SEQ ID NO: 777688 - DNA, 15 bp, Homo sapiens
catagcactcacttt

SEQ ID NO: 777689 - DNA, 15 bp, Homo sapiens
atagcactcactttg

SEQ ID NO: 777690 - DNA, 15 bp, Homo sapiens
tagcactcactttgg

SEQ ID NO: 777691 - DNA, 15 bp, Homo sapiens
agcactcactttggg

SEQ ID NO: 777692 - DNA, 15 bp, Homo sapiens
gcactcactttggga

SEQ ID NO: 777693 - DNA, 15 bp, Homo sapiens
cactcactttgggaa

SEQ ID NO: 777694 - DNA, 15 bp, Homo sapiens
actcactttgggaaa

SEQ ID NO: 777695 - DNA, 15 bp, Homo sapiens
ctcactttgggaaac

SEQ ID NO: 777696 - DNA, 15 bp, Homo sapiens
tcactttgggaaaca

SEQ ID NO: 777697 - DNA, 15 bp, Homo sapiens
cactttgggaaacat

SEQ ID NO: 777698 - DNA, 15 bp, Homo sapiens
actttgggaaacatt

SEQ ID NO: 777699 - DNA, 15 bp, Homo sapiens
ctttgggaaacattt

SEQ ID NO: 777700 - DNA, 15 bp, Homo sapiens
tttgggaaacattta

SEQ ID NO: 777701 - DNA, 15 bp, Homo sapiens
ttgggaaacatttaa

SEQ ID NO: 777702 - DNA, 15 bp, Homo sapiens
tgggaaacatttaat

SEQ ID NO: 777703 - DNA, 15 bp, Homo sapiens
gggaaacatttaatt

SEQ ID NO: 777704 - DNA, 15 bp, Homo sapiens
ggaaacatttaatta

SEQ ID NO: 777705 - DNA, 15 bp, Homo sapiens
gaaacatttaattag

SEQ ID NO: 777706 - DNA, 15 bp, Homo sapiens
aaacatttaattagc

SEQ ID NO: 777707 - DNA, 15 bp, Homo sapiens
aacatttaattagcc

SEQ ID NO: 777708 - DNA, 15 bp, Homo sapiens
acatttaattagccc

SEQ ID NO: 777709 - DNA, 15 bp, Homo sapiens
catttaattagccca

SEQ ID NO: 777710 - DNA, 15 bp, Homo sapiens
atttaattagcccag

SEQ ID NO: 777711 - DNA, 15 bp, Homo sapiens
tttaattagcccagg

SEQ ID NO: 777712 - DNA, 15 bp, Homo sapiens
ttaattagcccaggg

SEQ ID NO: 777713 - DNA, 15 bp, Homo sapiens
taattagcccaggga

SEQ ID NO: 777714 - DNA, 15 bp, Homo sapiens
aattagcccagggat

SEQ ID NO: 777715 - DNA, 15 bp, Homo sapiens
attagcccagggatc

SEQ ID NO: 777716 - DNA, 15 bp, Homo sapiens
ttagcccagggatca

SEQ ID NO: 777717 - DNA, 15 bp, Homo sapiens
tagcccagggatcag

SEQ ID NO: 777718 - DNA, 15 bp, Homo sapiens
agcccagggatcagt

SEQ ID NO: 777719 - DNA, 15 bp, Homo sapiens
gcccagggatcagtt

SEQ ID NO: 777720 - DNA, 15 bp, Homo sapiens
cccagggatcagtta

SEQ ID NO: 777721 - DNA, 15 bp, Homo sapiens
ccagggatcagttag

SEQ ID NO: 777722 - DNA, 15 bp, Homo sapiens
cagggatcagttagt

SEQ ID NO: 777723 - DNA, 15 bp, Homo sapiens
agggatcagttagtt

SEQ ID NO: 777724 - DNA, 15 bp, Homo sapiens
gggatcagttagtta

SEQ ID NO: 777725 - DNA, 15 bp, Homo sapiens
ggatcagttagttat

SEQ ID NO: 777726 - DNA, 15 bp, Homo sapiens
gatcagttagttata

SEQ ID NO: 777727 - DNA, 15 bp, Homo sapiens
atcagttagttatag

SEQ ID NO: 777728 - DNA, 15 bp, Homo sapiens
tcagttagttatagc

SEQ ID NO: 777729 - DNA, 15 bp, Homo sapiens
cagttagttatagcc

SEQ ID NO: 777730 - DNA, 15 bp, Homo sapiens
agttagttatagcct

SEQ ID NO: 777731 - DNA, 15 bp, Homo sapiens
gttagttatagcctg

SEQ ID NO: 777732 - DNA, 15 bp, Homo sapiens
ttagttatagcctgt

SEQ ID NO: 777733 - DNA, 15 bp, Homo sapiens
tagttatagcctgtg

SEQ ID NO: 777734 - DNA, 15 bp, Homo sapiens
agttatagcctgtgg

SEQ ID NO: 777735 - DNA, 15 bp, Homo sapiens
gttatagcctgtggg

SEQ ID NO: 777736 - DNA, 15 bp, Homo sapiens
ttatagcctgtggga

SEQ ID NO: 777737 - DNA, 15 bp, Homo sapiens
tatagcctgtgggac

SEQ ID NO: 777738 - DNA, 15 bp, Homo sapiens
atagcctgtgggaca

SEQ ID NO: 777739 - DNA, 15 bp, Homo sapiens
tagcctgtgggacag

SEQ ID NO: 777740 - DNA, 15 bp, Homo sapiens
agcctgtgggacagt

SEQ ID NO: 777741 - DNA, 15 bp, Homo sapiens
gcctgtgggacagtc

SEQ ID NO: 777742 - DNA, 15 bp, Homo sapiens
cctgtgggacagtct

SEQ ID NO: 777743 - DNA, 15 bp, Homo sapiens
ctgtgggacagtctg

SEQ ID NO: 777744 - DNA, 15 bp, Homo sapiens
tgtgggacagtctgg

SEQ ID NO: 777745 - DNA, 15 bp, Homo sapiens
gtgggacagtctggc

SEQ ID NO: 777746 - DNA, 15 bp, Homo sapiens
tgggacagtctggct

SEQ ID NO: 777747 - DNA, 15 bp, Homo sapiens
gggacagtctggctc

SEQ ID NO: 777748 - DNA, 15 bp, Homo sapiens
ggacagtctggctca

SEQ ID NO: 777749 - DNA, 15 bp, Homo sapiens
gacagtctggctcat

SEQ ID NO: 777750 - DNA, 15 bp, Homo sapiens
acagtctggctcatt

SEQ ID NO: 777751 - DNA, 15 bp, Homo sapiens
cagtctggctcattg

SEQ ID NO: 777752 - DNA, 15 bp, Homo sapiens
agtctggctcattgc

SEQ ID NO: 777753 - DNA, 15 bp, Homo sapiens
gtctggctcattgcc

SEQ ID NO: 777754 - DNA, 15 bp, Homo sapiens
tctggctcattgcct

SEQ ID NO: 777755 - DNA, 15 bp, Homo sapiens
ctggctcattgcctc

SEQ ID NO: 777756 - DNA, 15 bp, Homo sapiens
tggctcattgcctct

SEQ ID NO: 777757 - DNA, 15 bp, Homo sapiens
ggctcattgcctctt

SEQ ID NO: 777758 - DNA, 15 bp, Homo sapiens
gctcattgcctcttt

SEQ ID NO: 777759 - DNA, 15 bp, Homo sapiens
ctcattgcctctttt

SEQ ID NO: 777760 - DNA, 15 bp, Homo sapiens
tcattgcctcttttg

SEQ ID NO: 777761 - DNA, 15 bp, Homo sapiens
cattgcctcttttgt

SEQ ID NO: 777762 - DNA, 15 bp, Homo sapiens
attgcctcttttgtg

SEQ ID NO: 777763 - DNA, 15 bp, Homo sapiens
ttgcctcttttgtgt

SEQ ID NO: 777764 - DNA, 15 bp, Homo sapiens
tgcctcttttgtgtg

SEQ ID NO: 777765 - DNA, 15 bp, Homo sapiens
gcctcttttgtgtgg

SEQ ID NO: 777766 - DNA, 15 bp, Homo sapiens
cctcttttgtgtggt

SEQ ID NO: 777767 - DNA, 15 bp, Homo sapiens
ctcttttgtgtggtt

SEQ ID NO: 777768 - DNA, 15 bp, Homo sapiens
tcttttgtgtggttc

SEQ ID NO: 777769 - DNA, 15 bp, Homo sapiens
cttttgtgtggttca

SEQ ID NO: 777770 - DNA, 15 bp, Homo sapiens
ttttgtgtggttcat

SEQ ID NO: 777771 - DNA, 15 bp, Homo sapiens
tttgtgtggttcata

SEQ ID NO: 777772 - DNA, 15 bp, Homo sapiens
ttgtgtggttcataa

SEQ ID NO: 777773 - DNA, 15 bp, Homo sapiens
tgtgtggttcataag

SEQ ID NO: 777774 - DNA, 15 bp, Homo sapiens
gtgtggttcataagc

SEQ ID NO: 777775 - DNA, 15 bp, Homo sapiens
tgtggttcataagct

SEQ ID NO: 777776 - DNA, 15 bp, Homo sapiens
gtggttcataagcta

SEQ ID NO: 777777 - DNA, 15 bp, Homo sapiens
tggttcataagctaa

SEQ ID NO: 777778 - DNA, 15 bp, Homo sapiens
ggttcataagctaag

SEQ ID NO: 777779 - DNA, 15 bp, Homo sapiens
gttcataagctaagg

SEQ ID NO: 777780 - DNA, 15 bp, Homo sapiens
ttcataagctaagga

SEQ ID NO: 777781 - DNA, 15 bp, Homo sapiens
tcataagctaaggat

SEQ ID NO: 777782 - DNA, 15 bp, Homo sapiens
cataagctaaggatg

SEQ ID NO: 777783 - DNA, 15 bp, Homo sapiens
ataagctaaggatgg

SEQ ID NO: 777784 - DNA, 15 bp, Homo sapiens
taagctaaggatggt

SEQ ID NO: 777785 - DNA, 15 bp, Homo sapiens
aagctaaggatggtt

SEQ ID NO: 777786 - DNA, 15 bp, Homo sapiens
agctaaggatggttt

SEQ ID NO: 777787 - DNA, 15 bp, Homo sapiens
gctaaggatggtttt

SEQ ID NO: 777788 - DNA, 15 bp, Homo sapiens
ctaaggatggttttt

SEQ ID NO: 777789 - DNA, 15 bp, Homo sapiens
taaggatggttttta

SEQ ID NO: 777790 - DNA, 15 bp, Homo sapiens
aaggatggtttttac

SEQ ID NO: 777791 - DNA, 15 bp, Homo sapiens
aggatggtttttaca

SEQ ID NO: 777792 - DNA, 15 bp, Homo sapiens
ggatggtttttacat

SEQ ID NO: 777793 - DNA, 15 bp, Homo sapiens
gatggtttttacatt

SEQ ID NO: 777794 - DNA, 15 bp, Homo sapiens
atggtttttacattt

SEQ ID NO: 777795 - DNA, 15 bp, Homo sapiens
tggtttttacatttt

SEQ ID NO: 777796 - DNA, 15 bp, Homo sapiens
ggtttttacattttt

SEQ ID NO: 777797 - DNA, 15 bp, Homo sapiens
gtttttacatttttt

SEQ ID NO: 777798 - DNA, 15 bp, Homo sapiens
tttttacattttttt

SEQ ID NO: 777799 - DNA, 15 bp, Homo sapiens
ttttacattttttta

SEQ ID NO: 777800 - DNA, 15 bp, Homo sapiens
tttacatttttttat

SEQ ID NO: 777801 - DNA, 15 bp, Homo sapiens
ttacatttttttatt

SEQ ID NO: 777802 - DNA, 15 bp, Homo sapiens
tacatttttttattt

SEQ ID NO: 777803 - DNA, 15 bp, Homo sapiens
acatttttttatttt

SEQ ID NO: 777804 - DNA, 15 bp, Homo sapiens
catttttttattttt

SEQ ID NO: 777805 - DNA, 15 bp, Homo sapiens
atttttttatttttt

SEQ ID NO: 777806 - DNA, 15 bp, Homo sapiens
tttttttattttttt

SEQ ID NO: 777807 - DNA, 15 bp, Homo sapiens
ttttttatttttttt

SEQ ID NO: 777808 - DNA, 15 bp, Homo sapiens
tttttattttttttt

SEQ ID NO: 777809 - DNA, 15 bp, Homo sapiens
ttttatttttttttc

SEQ ID NO: 777810 - DNA, 15 bp, Homo sapiens
tttatttttttttca

SEQ ID NO: 777811 - DNA, 15 bp, Homo sapiens
ttatttttttttcag

SEQ ID NO: 777812 - DNA, 15 bp, Homo sapiens
tatttttttttcaga

SEQ ID NO: 777813 - DNA, 15 bp, Homo sapiens
atttttttttcagag

SEQ ID NO: 777814 - DNA, 15 bp, Homo sapiens
ttttttttcagagac

SEQ ID NO: 777815 - DNA, 15 bp, Homo sapiens
tttttttcagagaca

SEQ ID NO: 777816 - DNA, 15 bp, Homo sapiens
ttttttcagagacaa

SEQ ID NO: 777817 - DNA, 15 bp, Homo sapiens
tttttcagagacaag

SEQ ID NO: 777818 - DNA, 15 bp, Homo sapiens
ttttcagagacaagg

SEQ ID NO: 777819 - DNA, 15 bp, Homo sapiens
tttcagagacaaggt

SEQ ID NO: 777820 - DNA, 15 bp, Homo sapiens
ttcagagacaaggtt

SEQ ID NO: 777821 - DNA, 15 bp, Homo sapiens
tcagagacaaggttt

SEQ ID NO: 777822 - DNA, 15 bp, Homo sapiens
cagagacaaggtttc

SEQ ID NO: 777823 - DNA, 15 bp, Homo sapiens
agagacaaggtttca

SEQ ID NO: 777824 - DNA, 15 bp, Homo sapiens
gagacaaggtttcac

SEQ ID NO: 777825 - DNA, 15 bp, Homo sapiens
agacaaggtttcact

SEQ ID NO: 777826 - DNA, 15 bp, Homo sapiens
gacaaggtttcactc

SEQ ID NO: 777827 - DNA, 15 bp, Homo sapiens
acaaggtttcactct

SEQ ID NO: 777828 - DNA, 15 bp, Homo sapiens
caaggtttcactcta

SEQ ID NO: 777829 - DNA, 15 bp, Homo sapiens
aaggtttcactctat

SEQ ID NO: 777830 - DNA, 15 bp, Homo sapiens
aggtttcactctatt

SEQ ID NO: 777831 - DNA, 15 bp, Homo sapiens
ggtttcactctattg

SEQ ID NO: 777832 - DNA, 15 bp, Homo sapiens
gtttcactctattgc

SEQ ID NO: 777833 - DNA, 15 bp, Homo sapiens
tttcactctattgct

SEQ ID NO: 777834 - DNA, 15 bp, Homo sapiens
ttcactctattgctc

SEQ ID NO: 777835 - DNA, 15 bp, Homo sapiens
tcactctattgctca

SEQ ID NO: 777836 - DNA, 15 bp, Homo sapiens
cactctattgctcag

SEQ ID NO: 777837 - DNA, 15 bp, Homo sapiens
actctattgctcagg

SEQ ID NO: 777838 - DNA, 15 bp, Homo sapiens
ctctattgctcaggc

SEQ ID NO: 777839 - DNA, 15 bp, Homo sapiens
tctattgctcaggct

SEQ ID NO: 777840 - DNA, 15 bp, Homo sapiens
ctattgctcaggctg

SEQ ID NO: 777841 - DNA, 15 bp, Homo sapiens
tattgctcaggctgg

SEQ ID NO: 777842 - DNA, 15 bp, Homo sapiens
attgctcaggctgga

SEQ ID NO: 777843 - DNA, 15 bp, Homo sapiens
caggctggagtgcat

SEQ ID NO: 777844 - DNA, 15 bp, Homo sapiens
aggctggagtgcatt

SEQ ID NO: 777845 - DNA, 15 bp, Homo sapiens
ggctggagtgcattg

SEQ ID NO: 777846 - DNA, 15 bp, Homo sapiens
gctggagtgcattgg

SEQ ID NO: 777847 - DNA, 15 bp, Homo sapiens
ctggagtgcattggt

SEQ ID NO: 777848 - DNA, 15 bp, Homo sapiens
tggagtgcattggtg

SEQ ID NO: 777849 - DNA, 15 bp, Homo sapiens
ggagtgcattggtgc

SEQ ID NO: 777850 - DNA, 15 bp, Homo sapiens
gagtgcattggtgca

SEQ ID NO: 777851 - DNA, 15 bp, Homo sapiens
agtgcattggtgcaa

SEQ ID NO: 777852 - DNA, 15 bp, Homo sapiens
gtgcattggtgcaat

SEQ ID NO: 777853 - DNA, 15 bp, Homo sapiens
tgcattggtgcaatc

SEQ ID NO: 777854 - DNA, 15 bp, Homo sapiens
gcattggtgcaatca

SEQ ID NO: 777855 - DNA, 15 bp, Homo sapiens
cattggtgcaatcat

SEQ ID NO: 777856 - DNA, 15 bp, Homo sapiens
attggtgcaatcata

SEQ ID NO: 777857 - DNA, 15 bp, Homo sapiens
ttggtgcaatcatag

SEQ ID NO: 777858 - DNA, 15 bp, Homo sapiens
tgcaatcatagctcc

SEQ ID NO: 777859 - DNA, 15 bp, Homo sapiens
gcaatcatagctccc

SEQ ID NO: 777860 - DNA, 15 bp, Homo sapiens
caatcatagctccct

SEQ ID NO: 777861 - DNA, 15 bp, Homo sapiens
aatcatagctccctg

SEQ ID NO: 777862 - DNA, 15 bp, Homo sapiens
atcatagctccctgc

SEQ ID NO: 777863 - DNA, 15 bp, Homo sapiens
tcatagctccctgca

SEQ ID NO: 777864 - DNA, 15 bp, Homo sapiens
catagctccctgcaa

SEQ ID NO: 777865 - DNA, 15 bp, Homo sapiens
atagctccctgcaac

SEQ ID NO: 777866 - DNA, 15 bp, Homo sapiens
tagctccctgcaacc

SEQ ID NO: 777867 - DNA, 15 bp, Homo sapiens
agctccctgcaacct

SEQ ID NO: 777868 - DNA, 15 bp, Homo sapiens
gctccctgcaacctc

SEQ ID NO: 777869 - DNA, 15 bp, Homo sapiens
ctccctgcaacctca

SEQ ID NO: 777870 - DNA, 15 bp, Homo sapiens
tccctgcaacctcaa

SEQ ID NO: 777871 - DNA, 15 bp, Homo sapiens
ccctgcaacctcaaa

SEQ ID NO: 777872 - DNA, 15 bp, Homo sapiens
cctgcaacctcaaac

SEQ ID NO: 777873 - DNA, 15 bp, Homo sapiens
ctgcaacctcaaact

SEQ ID NO: 777874 - DNA, 15 bp, Homo sapiens
tgcaacctcaaactc

SEQ ID NO: 777875 - DNA, 15 bp, Homo sapiens
gcaacctcaaactcc

SEQ ID NO: 777876 - DNA, 15 bp, Homo sapiens
caacctcaaactcct

SEQ ID NO: 777877 - DNA, 15 bp, Homo sapiens
aacctcaaactcctg

SEQ ID NO: 777878 - DNA, 15 bp, Homo sapiens
acctcaaactcctgg

SEQ ID NO: 777879 - DNA, 15 bp, Homo sapiens
cctcaaactcctggg

SEQ ID NO: 777880 - DNA, 15 bp, Homo sapiens
ctcaaactcctgggt

SEQ ID NO: 777881 - DNA, 15 bp, Homo sapiens
tcaaactcctgggtt

SEQ ID NO: 777882 - DNA, 15 bp, Homo sapiens
caaactcctgggttc

SEQ ID NO: 777883 - DNA, 15 bp, Homo sapiens
aaactcctgggttca

SEQ ID NO: 777884 - DNA, 15 bp, Homo sapiens
tgggttcaagcgatc

SEQ ID NO: 777885 - DNA, 15 bp, Homo sapiens
gggttcaagcgatcc

SEQ ID NO: 777886 - DNA, 15 bp, Homo sapiens
ggttcaagcgatcct

SEQ ID NO: 777887 - DNA, 15 bp, Homo sapiens
gttcaagcgatcctt

SEQ ID NO: 777888 - DNA, 15 bp, Homo sapiens
ttcaagcgatccttc

SEQ ID NO: 777889 - DNA, 15 bp, Homo sapiens
tcaagcgatccttct

SEQ ID NO: 777890 - DNA, 15 bp, Homo sapiens
caagcgatccttctg

SEQ ID NO: 777891 - DNA, 15 bp, Homo sapiens
aagcgatccttctgc

SEQ ID NO: 777892 - DNA, 15 bp, Homo sapiens
agcgatccttctgcc

SEQ ID NO: 777893 - DNA, 15 bp, Homo sapiens
gcgatccttctgcct

SEQ ID NO: 777894 - DNA, 15 bp, Homo sapiens
cgatccttctgcctc

SEQ ID NO: 777895 - DNA, 15 bp, Homo sapiens
gatccttctgcctca

SEQ ID NO: 777896 - DNA, 15 bp, Homo sapiens
atccttctgcctcag

SEQ ID NO: 777897 - DNA, 15 bp, Homo sapiens
tccttctgcctcagc

SEQ ID NO: 777898 - DNA, 15 bp, Homo sapiens
ccttctgcctcagcc

SEQ ID NO: 777899 - DNA, 15 bp, Homo sapiens
tgcctcagcctccct

SEQ ID NO: 777900 - DNA, 15 bp, Homo sapiens
gcctcagcctccctg

SEQ ID NO: 777901 - DNA, 15 bp, Homo sapiens
cctcagcctccctga

SEQ ID NO: 777902 - DNA, 15 bp, Homo sapiens
ctcagcctccctgat

SEQ ID NO: 777903 - DNA, 15 bp, Homo sapiens
tcagcctccctgata

SEQ ID NO: 777904 - DNA, 15 bp, Homo sapiens
cagcctccctgatag

SEQ ID NO: 777905 - DNA, 15 bp, Homo sapiens
agcctccctgatagc

SEQ ID NO: 777906 - DNA, 15 bp, Homo sapiens
gcctccctgatagct

SEQ ID NO: 777907 - DNA, 15 bp, Homo sapiens
cctccctgatagctg

SEQ ID NO: 777908 - DNA, 15 bp, Homo sapiens
ctccctgatagctgg

SEQ ID NO: 777909 - DNA, 15 bp, Homo sapiens
tccctgatagctggg

SEQ ID NO: 777910 - DNA, 15 bp, Homo sapiens
ccctgatagctggga

SEQ ID NO: 777911 - DNA, 15 bp, Homo sapiens
cctgatagctgggat

SEQ ID NO: 777912 - DNA, 15 bp, Homo sapiens
ctgatagctgggatt

SEQ ID NO: 777913 - DNA, 15 bp, Homo sapiens
tgatagctgggatta

SEQ ID NO: 777914 - DNA, 15 bp, Homo sapiens
gatagctgggattac

SEQ ID NO: 777915 - DNA, 15 bp, Homo sapiens
atagctgggattaca

SEQ ID NO: 777916 - DNA, 15 bp, Homo sapiens
gggattacaggtgca

SEQ ID NO: 777917 - DNA, 15 bp, Homo sapiens
ggattacaggtgcag

SEQ ID NO: 777918 - DNA, 15 bp, Homo sapiens
gattacaggtgcagg

SEQ ID NO: 777919 - DNA, 15 bp, Homo sapiens
attacaggtgcaggc

SEQ ID NO: 777920 - DNA, 15 bp, Homo sapiens
ttacaggtgcaggcc

SEQ ID NO: 777921 - DNA, 15 bp, Homo sapiens
tacaggtgcaggcca

SEQ ID NO: 777922 - DNA, 15 bp, Homo sapiens
acaggtgcaggccac

SEQ ID NO: 777923 - DNA, 15 bp, Homo sapiens
caggtgcaggccacc

SEQ ID NO: 777924 - DNA, 15 bp, Homo sapiens
aggtgcaggccacca

SEQ ID NO: 777925 - DNA, 15 bp, Homo sapiens
ggtgcaggccaccat

SEQ ID NO: 777926 - DNA, 15 bp, Homo sapiens
gtgcaggccaccatg

SEQ ID NO: 777927 - DNA, 15 bp, Homo sapiens
tgcaggccaccatga

SEQ ID NO: 777928 - DNA, 15 bp, Homo sapiens
gcaggccaccatgac

SEQ ID NO: 777929 - DNA, 15 bp, Homo sapiens
caggccaccatgaca

SEQ ID NO: 777930 - DNA, 15 bp, Homo sapiens
aggccaccatgacat

SEQ ID NO: 777931 - DNA, 15 bp, Homo sapiens
ggccaccatgacatg

SEQ ID NO: 777932 - DNA, 15 bp, Homo sapiens
gccaccatgacatgc

SEQ ID NO: 777933 - DNA, 15 bp, Homo sapiens
ccaccatgacatgct

SEQ ID NO: 777934 - DNA, 15 bp, Homo sapiens
caccatgacatgcta

SEQ ID NO: 777935 - DNA, 15 bp, Homo sapiens
accatgacatgctat

SEQ ID NO: 777936 - DNA, 15 bp, Homo sapiens
ccatgacatgctatg

SEQ ID NO: 777937 - DNA, 15 bp, Homo sapiens
catgacatgctatgt

SEQ ID NO: 777938 - DNA, 15 bp, Homo sapiens
atgacatgctatgtt

SEQ ID NO: 777939 - DNA, 15 bp, Homo sapiens
tgacatgctatgttt

SEQ ID NO: 777940 - DNA, 15 bp, Homo sapiens
gacatgctatgtttt

SEQ ID NO: 777941 - DNA, 15 bp, Homo sapiens
acatgctatgttttc

SEQ ID NO: 777942 - DNA, 15 bp, Homo sapiens
catgctatgttttct

SEQ ID NO: 777943 - DNA, 15 bp, Homo sapiens
atgctatgttttctt

SEQ ID NO: 777944 - DNA, 15 bp, Homo sapiens
tgctatgttttctta

SEQ ID NO: 777945 - DNA, 15 bp, Homo sapiens
gctatgttttcttaa

SEQ ID NO: 777946 - DNA, 15 bp, Homo sapiens
ctatgttttcttaaa

SEQ ID NO: 777947 - DNA, 15 bp, Homo sapiens
tatgttttcttaaat

SEQ ID NO: 777948 - DNA, 15 bp, Homo sapiens
atgttttcttaaatt

SEQ ID NO: 777949 - DNA, 15 bp, Homo sapiens
tgttttcttaaattt

SEQ ID NO: 777950 - DNA, 15 bp, Homo sapiens
gttttcttaaatttt

SEQ ID NO: 777951 - DNA, 15 bp, Homo sapiens
ttttcttaaattttt

SEQ ID NO: 777952 - DNA, 15 bp, Homo sapiens
tttcttaaatttttt

SEQ ID NO: 777953 - DNA, 15 bp, Homo sapiens
ttcttaaattttttg

SEQ ID NO: 777954 - DNA, 15 bp, Homo sapiens
tcttaaattttttgt

SEQ ID NO: 777955 - DNA, 15 bp, Homo sapiens
cttaaattttttgta

SEQ ID NO: 777956 - DNA, 15 bp, Homo sapiens
ttaaattttttgtac

SEQ ID NO: 777957 - DNA, 15 bp, Homo sapiens
taaattttttgtact

SEQ ID NO: 777958 - DNA, 15 bp, Homo sapiens
aaattttttgtactg

SEQ ID NO: 777959 - DNA, 15 bp, Homo sapiens
aattttttgtactga

SEQ ID NO: 777960 - DNA, 15 bp, Homo sapiens
attttttgtactgat

SEQ ID NO: 777961 - DNA, 15 bp, Homo sapiens
ttttttgtactgatg

SEQ ID NO: 777962 - DNA, 15 bp, Homo sapiens
tttttgtactgatgg

SEQ ID NO: 777963 - DNA, 15 bp, Homo sapiens
ttttgtactgatggg

SEQ ID NO: 777964 - DNA, 15 bp, Homo sapiens
tttgtactgatgggg

SEQ ID NO: 777965 - DNA, 15 bp, Homo sapiens
ttgtactgatggggt

SEQ ID NO: 777966 - DNA, 15 bp, Homo sapiens
tgtactgatggggtt

SEQ ID NO: 777967 - DNA, 15 bp, Homo sapiens
gtactgatggggttc

SEQ ID NO: 777968 - DNA, 15 bp, Homo sapiens
tactgatggggttct

SEQ ID NO: 777969 - DNA, 15 bp, Homo sapiens
actgatggggttcta

SEQ ID NO: 777970 - DNA, 15 bp, Homo sapiens
ctgatggggttctac

SEQ ID NO: 777971 - DNA, 15 bp, Homo sapiens
tgatggggttctact

SEQ ID NO: 777972 - DNA, 15 bp, Homo sapiens
gatggggttctactg

SEQ ID NO: 777973 - DNA, 15 bp, Homo sapiens
atggggttctactgt

SEQ ID NO: 777974 - DNA, 15 bp, Homo sapiens
tggggttctactgtg

SEQ ID NO: 777975 - DNA, 15 bp, Homo sapiens
ggggttctactgtgt

SEQ ID NO: 777976 - DNA, 15 bp, Homo sapiens
gggttctactgtgtt

SEQ ID NO: 777977 - DNA, 15 bp, Homo sapiens
ggttctactgtgttg

SEQ ID NO: 777978 - DNA, 15 bp, Homo sapiens
gttctactgtgttgc

SEQ ID NO: 777979 - DNA, 15 bp, Homo sapiens
ttctactgtgttgcc

SEQ ID NO: 777980 - DNA, 15 bp, Homo sapiens
tctactgtgttgccc

SEQ ID NO: 777981 - DNA, 15 bp, Homo sapiens
ctactgtgttgccca

SEQ ID NO: 777982 - DNA, 15 bp, Homo sapiens
tactgtgttgcccag

SEQ ID NO: 777983 - DNA, 15 bp, Homo sapiens
actgtgttgcccagg

SEQ ID NO: 777984 - DNA, 15 bp, Homo sapiens
ctgtgttgcccaggt

SEQ ID NO: 777985 - DNA, 15 bp, Homo sapiens
tgtgttgcccaggtt

SEQ ID NO: 777986 - DNA, 15 bp, Homo sapiens
gtgttgcccaggttg

SEQ ID NO: 777987 - DNA, 15 bp, Homo sapiens
tgttgcccaggttgg

SEQ ID NO: 777988 - DNA, 15 bp, Homo sapiens
gttgcccaggttggt

SEQ ID NO: 777989 - DNA, 15 bp, Homo sapiens
ttgcccaggttggtc

SEQ ID NO: 777990 - DNA, 15 bp, Homo sapiens
tgcccaggttggtct

SEQ ID NO: 777991 - DNA, 15 bp, Homo sapiens
gcccaggttggtctt

SEQ ID NO: 777992 - DNA, 15 bp, Homo sapiens
cccaggttggtcttg

SEQ ID NO: 777993 - DNA, 15 bp, Homo sapiens
ccaggttggtcttga

SEQ ID NO: 777994 - DNA, 15 bp, Homo sapiens
caggttggtcttgaa

SEQ ID NO: 777995 - DNA, 15 bp, Homo sapiens
aggttggtcttgaac

SEQ ID NO: 777996 - DNA, 15 bp, Homo sapiens
ggttggtcttgaacc

SEQ ID NO: 777997 - DNA, 15 bp, Homo sapiens
gttggtcttgaaccc

SEQ ID NO: 777998 - DNA, 15 bp, Homo sapiens
ttggtcttgaacccc

SEQ ID NO: 777999 - DNA, 15 bp, Homo sapiens
tggtcttgaacccct

SEQ ID NO: 778000 - DNA, 15 bp, Homo sapiens
ggtcttgaacccctg

SEQ ID NO: 778001 - DNA, 15 bp, Homo sapiens
gtcttgaacccctgg

SEQ ID NO: 778002 - DNA, 15 bp, Homo sapiens
tcttgaacccctggg

SEQ ID NO: 778003 - DNA, 15 bp, Homo sapiens
cttgaacccctgggc

SEQ ID NO: 778004 - DNA, 15 bp, Homo sapiens
ttgaacccctgggcc

SEQ ID NO: 778005 - DNA, 15 bp, Homo sapiens
tgaacccctgggccc

SEQ ID NO: 778006 - DNA, 15 bp, Homo sapiens
gaacccctgggccca

SEQ ID NO: 778007 - DNA, 15 bp, Homo sapiens
aacccctgggcccag

SEQ ID NO: 778008 - DNA, 15 bp, Homo sapiens
acccctgggcccagg

SEQ ID NO: 778009 - DNA, 15 bp, Homo sapiens
cccctgggcccaggc

SEQ ID NO: 778010 - DNA, 15 bp, Homo sapiens
ccctgggcccaggca

SEQ ID NO: 778011 - DNA, 15 bp, Homo sapiens
cctgggcccaggcaa

SEQ ID NO: 778012 - DNA, 15 bp, Homo sapiens
ctgggcccaggcaat

SEQ ID NO: 778013 - DNA, 15 bp, Homo sapiens
tgggcccaggcaatc

SEQ ID NO: 778014 - DNA, 15 bp, Homo sapiens
gggcccaggcaatcc

SEQ ID NO: 778015 - DNA, 15 bp, Homo sapiens
ggcccaggcaatcct

SEQ ID NO: 778016 - DNA, 15 bp, Homo sapiens
gcccaggcaatcctc

SEQ ID NO: 778017 - DNA, 15 bp, Homo sapiens
cccaggcaatcctct

SEQ ID NO: 778018 - DNA, 15 bp, Homo sapiens
ccaggcaatcctctc

SEQ ID NO: 778019 - DNA, 15 bp, Homo sapiens
caggcaatcctctca

SEQ ID NO: 778020 - DNA, 15 bp, Homo sapiens
aggcaatcctctcac

SEQ ID NO: 778021 - DNA, 15 bp, Homo sapiens
ggcaatcctctcacc

SEQ ID NO: 778022 - DNA, 15 bp, Homo sapiens
gcaatcctctcacct

SEQ ID NO: 778023 - DNA, 15 bp, Homo sapiens
caatcctctcacctt

SEQ ID NO: 778024 - DNA, 15 bp, Homo sapiens
aatcctctcaccttg

SEQ ID NO: 778025 - DNA, 15 bp, Homo sapiens
atcctctcaccttga

SEQ ID NO: 778026 - DNA, 15 bp, Homo sapiens
tcctctcaccttgac

SEQ ID NO: 778027 - DNA, 15 bp, Homo sapiens
cctctcaccttgacc

SEQ ID NO: 778028 - DNA, 15 bp, Homo sapiens
ctctcaccttgacct

SEQ ID NO: 778029 - DNA, 15 bp, Homo sapiens
tctcaccttgacctc

SEQ ID NO: 778030 - DNA, 15 bp, Homo sapiens
ctcaccttgacctcc

SEQ ID NO: 778031 - DNA, 15 bp, Homo sapiens
tcaccttgacctccc

SEQ ID NO: 778032 - DNA, 15 bp, Homo sapiens
caccttgacctccca

SEQ ID NO: 778033 - DNA, 15 bp, Homo sapiens
accttgacctcccaa

SEQ ID NO: 778034 - DNA, 15 bp, Homo sapiens
ccttgacctcccaaa

SEQ ID NO: 778035 - DNA, 15 bp, Homo sapiens
cttgacctcccaaag

SEQ ID NO: 778036 - DNA, 15 bp, Homo sapiens
ttgacctcccaaagt

SEQ ID NO: 778037 - DNA, 15 bp, Homo sapiens
tgacctcccaaagtg

SEQ ID NO: 778038 - DNA, 15 bp, Homo sapiens
tgctgggattacaga

SEQ ID NO: 778039 - DNA, 15 bp, Homo sapiens
gctgggattacagat

SEQ ID NO: 778040 - DNA, 15 bp, Homo sapiens
ctgggattacagatg

SEQ ID NO: 778041 - DNA, 15 bp, Homo sapiens
tgggattacagatgt

SEQ ID NO: 778042 - DNA, 15 bp, Homo sapiens
gggattacagatgtg

SEQ ID NO: 778043 - DNA, 15 bp, Homo sapiens
ggattacagatgtga

SEQ ID NO: 778044 - DNA, 15 bp, Homo sapiens
gattacagatgtgag

SEQ ID NO: 778045 - DNA, 15 bp, Homo sapiens
attacagatgtgagc

SEQ ID NO: 778046 - DNA, 15 bp, Homo sapiens
ttacagatgtgagcc

SEQ ID NO: 778047 - DNA, 15 bp, Homo sapiens
tacagatgtgagcca

SEQ ID NO: 778048 - DNA, 15 bp, Homo sapiens
acagatgtgagccac

SEQ ID NO: 778049 - DNA, 15 bp, Homo sapiens
cagatgtgagccacc

SEQ ID NO: 778050 - DNA, 15 bp, Homo sapiens
agatgtgagccacca

SEQ ID NO: 778051 - DNA, 15 bp, Homo sapiens
gatgtgagccaccat

SEQ ID NO: 778052 - DNA, 15 bp, Homo sapiens
atgtgagccaccata

SEQ ID NO: 778053 - DNA, 15 bp, Homo sapiens
tgtgagccaccatac

SEQ ID NO: 778054 - DNA, 15 bp, Homo sapiens
gtgagccaccatacc

SEQ ID NO: 778055 - DNA, 15 bp, Homo sapiens
tgagccaccatacct

SEQ ID NO: 778056 - DNA, 15 bp, Homo sapiens
gagccaccatacctg

SEQ ID NO: 778057 - DNA, 15 bp, Homo sapiens
agccaccatacctgg

SEQ ID NO: 778058 - DNA, 15 bp, Homo sapiens
gccaccatacctggc

SEQ ID NO: 778059 - DNA, 15 bp, Homo sapiens
ccaccatacctggcc

SEQ ID NO: 778060 - DNA, 15 bp, Homo sapiens
caccatacctggcct

SEQ ID NO: 778061 - DNA, 15 bp, Homo sapiens
accatacctggccta

SEQ ID NO: 778062 - DNA, 15 bp, Homo sapiens
ccatacctggcctaa

SEQ ID NO: 778063 - DNA, 15 bp, Homo sapiens
catacctggcctaaa

SEQ ID NO: 778064 - DNA, 15 bp, Homo sapiens
atacctggcctaaat

SEQ ID NO: 778065 - DNA, 15 bp, Homo sapiens
tacctggcctaaatg

SEQ ID NO: 778066 - DNA, 15 bp, Homo sapiens
acctggcctaaatgg

SEQ ID NO: 778067 - DNA, 15 bp, Homo sapiens
cctggcctaaatggt

SEQ ID NO: 778068 - DNA, 15 bp, Homo sapiens
ctggcctaaatggtt

SEQ ID NO: 778069 - DNA, 15 bp, Homo sapiens
tggcctaaatggtta

SEQ ID NO: 778070 - DNA, 15 bp, Homo sapiens
ggcctaaatggttat

SEQ ID NO: 778071 - DNA, 15 bp, Homo sapiens
gcctaaatggttatt

SEQ ID NO: 778072 - DNA, 15 bp, Homo sapiens
cctaaatggttattt

SEQ ID NO: 778073 - DNA, 15 bp, Homo sapiens
ctaaatggttatttt

SEQ ID NO: 778074 - DNA, 15 bp, Homo sapiens
taaatggttattttt

SEQ ID NO: 778075 - DNA, 15 bp, Homo sapiens
aaatggttatttttt

SEQ ID NO: 778076 - DNA, 15 bp, Homo sapiens
aatggttatttttta

SEQ ID NO: 778077 - DNA, 15 bp, Homo sapiens
atggttattttttaa

SEQ ID NO: 778078 - DNA, 15 bp, Homo sapiens
tggttattttttaaa

SEQ ID NO: 778079 - DNA, 15 bp, Homo sapiens
ggttattttttaaaa

SEQ ID NO: 778080 - DNA, 15 bp, Homo sapiens
gttattttttaaaaa

SEQ ID NO: 778081 - DNA, 15 bp, Homo sapiens
ttattttttaaaaat

SEQ ID NO: 778082 - DNA, 15 bp, Homo sapiens
tattttttaaaaatc

SEQ ID NO: 778083 - DNA, 15 bp, Homo sapiens
attttttaaaaatca

SEQ ID NO: 778084 - DNA, 15 bp, Homo sapiens
ttttttaaaaatcaa

SEQ ID NO: 778085 - DNA, 15 bp, Homo sapiens
tttttaaaaatcaaa

SEQ ID NO: 778086 - DNA, 15 bp, Homo sapiens
ttttaaaaatcaaaa

SEQ ID NO: 778087 - DNA, 15 bp, Homo sapiens
tttaaaaatcaaaat

SEQ ID NO: 778088 - DNA, 15 bp, Homo sapiens
ttaaaaatcaaaata

SEQ ID NO: 778089 - DNA, 15 bp, Homo sapiens
taaaaatcaaaataa

SEQ ID NO: 778090 - DNA, 15 bp, Homo sapiens
aaaaatcaaaataag

SEQ ID NO: 778091 - DNA, 15 bp, Homo sapiens
aaaatcaaaataagt

SEQ ID NO: 778092 - DNA, 15 bp, Homo sapiens
aaatcaaaataagtg

SEQ ID NO: 778093 - DNA, 15 bp, Homo sapiens
aatcaaaataagtgt

SEQ ID NO: 778094 - DNA, 15 bp, Homo sapiens
atcaaaataagtgta

SEQ ID NO: 778095 - DNA, 15 bp, Homo sapiens
tcaaaataagtgtat

SEQ ID NO: 778096 - DNA, 15 bp, Homo sapiens
caaaataagtgtatt

SEQ ID NO: 778097 - DNA, 15 bp, Homo sapiens
aaaataagtgtattt

SEQ ID NO: 778098 - DNA, 15 bp, Homo sapiens
aaataagtgtatttt

SEQ ID NO: 778099 - DNA, 15 bp, Homo sapiens
aataagtgtattttg

SEQ ID NO: 778100 - DNA, 15 bp, Homo sapiens
ataagtgtattttgt

SEQ ID NO: 778101 - DNA, 15 bp, Homo sapiens
taagtgtattttgtg

SEQ ID NO: 778102 - DNA, 15 bp, Homo sapiens
aagtgtattttgtga

SEQ ID NO: 778103 - DNA, 15 bp, Homo sapiens
agtgtattttgtgac

SEQ ID NO: 778104 - DNA, 15 bp, Homo sapiens
gtgtattttgtgaca

SEQ ID NO: 778105 - DNA, 15 bp, Homo sapiens
tgtattttgtgacat

SEQ ID NO: 778106 - DNA, 15 bp, Homo sapiens
gtattttgtgacatg

SEQ ID NO: 778107 - DNA, 15 bp, Homo sapiens
tattttgtgacatgt

SEQ ID NO: 778108 - DNA, 15 bp, Homo sapiens
attttgtgacatgtg

SEQ ID NO: 778109 - DNA, 15 bp, Homo sapiens
ttttgtgacatgtga

SEQ ID NO: 778110 - DNA, 15 bp, Homo sapiens
tttgtgacatgtgaa

SEQ ID NO: 778111 - DNA, 15 bp, Homo sapiens
ttgtgacatgtgaaa

SEQ ID NO: 778112 - DNA, 15 bp, Homo sapiens
tgtgacatgtgaaag

SEQ ID NO: 778113 - DNA, 15 bp, Homo sapiens
gtgacatgtgaaagc

SEQ ID NO: 778114 - DNA, 15 bp, Homo sapiens
tgacatgtgaaagct

SEQ ID NO: 778115 - DNA, 15 bp, Homo sapiens
gacatgtgaaagcta

SEQ ID NO: 778116 - DNA, 15 bp, Homo sapiens
acatgtgaaagctat

SEQ ID NO: 778117 - DNA, 15 bp, Homo sapiens
catgtgaaagctata

SEQ ID NO: 778118 - DNA, 15 bp, Homo sapiens
atgtgaaagctatat

SEQ ID NO: 778119 - DNA, 15 bp, Homo sapiens
tgtgaaagctatatg

SEQ ID NO: 778120 - DNA, 15 bp, Homo sapiens
gtgaaagctatatga

SEQ ID NO: 778121 - DNA, 15 bp, Homo sapiens
tgaaagctatatgaa

SEQ ID NO: 778122 - DNA, 15 bp, Homo sapiens
gaaagctatatgaaa

SEQ ID NO: 778123 - DNA, 15 bp, Homo sapiens
aaagctatatgaaat

SEQ ID NO: 778124 - DNA, 15 bp, Homo sapiens
aagctatatgaaatt

SEQ ID NO: 778125 - DNA, 15 bp, Homo sapiens
agctatatgaaattc

SEQ ID NO: 778126 - DNA, 15 bp, Homo sapiens
gctatatgaaattca

SEQ ID NO: 778127 - DNA, 15 bp, Homo sapiens
ctatatgaaattcaa

SEQ ID NO: 778128 - DNA, 15 bp, Homo sapiens
tatatgaaattcaaa

SEQ ID NO: 778129 - DNA, 15 bp, Homo sapiens
atatgaaattcaaat

SEQ ID NO: 778130 - DNA, 15 bp, Homo sapiens
tatgaaattcaaatt

SEQ ID NO: 778131 - DNA, 15 bp, Homo sapiens
atgaaattcaaattt

SEQ ID NO: 778132 - DNA, 15 bp, Homo sapiens
tgaaattcaaatttc

SEQ ID NO: 778133 - DNA, 15 bp, Homo sapiens
gaaattcaaatttca

SEQ ID NO: 778134 - DNA, 15 bp, Homo sapiens
aaattcaaatttcag

SEQ ID NO: 778135 - DNA, 15 bp, Homo sapiens
aattcaaatttcagc

SEQ ID NO: 778136 - DNA, 15 bp, Homo sapiens
attcaaatttcagcg

SEQ ID NO: 778137 - DNA, 15 bp, Homo sapiens
ttcaaatttcagcgt

SEQ ID NO: 778138 - DNA, 15 bp, Homo sapiens
tcaaatttcagcgtc

SEQ ID NO: 778139 - DNA, 15 bp, Homo sapiens
caaatttcagcgtcc

SEQ ID NO: 778140 - DNA, 15 bp, Homo sapiens
aaatttcagcgtcca

SEQ ID NO: 778141 - DNA, 15 bp, Homo sapiens
aatttcagcgtccat

SEQ ID NO: 778142 - DNA, 15 bp, Homo sapiens
atttcagcgtccata

SEQ ID NO: 778143 - DNA, 15 bp, Homo sapiens
tttcagcgtccataa

SEQ ID NO: 778144 - DNA, 15 bp, Homo sapiens
ttcagcgtccataaa

SEQ ID NO: 778145 - DNA, 15 bp, Homo sapiens
tcagcgtccataaac

SEQ ID NO: 778146 - DNA, 15 bp, Homo sapiens
cagcgtccataaaca

SEQ ID NO: 778147 - DNA, 15 bp, Homo sapiens
agcgtccataaacaa

SEQ ID NO: 778148 - DNA, 15 bp, Homo sapiens
gcgtccataaacaaa

SEQ ID NO: 778149 - DNA, 15 bp, Homo sapiens
cgtccataaacaaag

SEQ ID NO: 778150 - DNA, 15 bp, Homo sapiens
gtccataaacaaagt

SEQ ID NO: 778151 - DNA, 15 bp, Homo sapiens
tccataaacaaagtt

SEQ ID NO: 778152 - DNA, 15 bp, Homo sapiens
ccataaacaaagttg

SEQ ID NO: 778153 - DNA, 15 bp, Homo sapiens
cataaacaaagttgc

SEQ ID NO: 778154 - DNA, 15 bp, Homo sapiens
ataaacaaagttgca

SEQ ID NO: 778155 - DNA, 15 bp, Homo sapiens
taaacaaagttgcat

SEQ ID NO: 778156 - DNA, 15 bp, Homo sapiens
aaacaaagttgcatt

SEQ ID NO: 778157 - DNA, 15 bp, Homo sapiens
aacaaagttgcattg

SEQ ID NO: 778158 - DNA, 15 bp, Homo sapiens
acaaagttgcattgg

SEQ ID NO: 778159 - DNA, 15 bp, Homo sapiens
caaagttgcattgga

SEQ ID NO: 778160 - DNA, 15 bp, Homo sapiens
aaagttgcattggaa

SEQ ID NO: 778161 - DNA, 15 bp, Homo sapiens
aagttgcattggaat

SEQ ID NO: 778162 - DNA, 15 bp, Homo sapiens
agttgcattggaata

SEQ ID NO: 778163 - DNA, 15 bp, Homo sapiens
gttgcattggaatac

SEQ ID NO: 778164 - DNA, 15 bp, Homo sapiens
ttgcattggaataca

SEQ ID NO: 778165 - DNA, 15 bp, Homo sapiens
tgcattggaatacag

SEQ ID NO: 778166 - DNA, 15 bp, Homo sapiens
gcattggaatacagc

SEQ ID NO: 778167 - DNA, 15 bp, Homo sapiens
cattggaatacagcc

SEQ ID NO: 778168 - DNA, 15 bp, Homo sapiens
attggaatacagcca

SEQ ID NO: 778169 - DNA, 15 bp, Homo sapiens
ttggaatacagccat

SEQ ID NO: 778170 - DNA, 15 bp, Homo sapiens
tggaatacagccatg

SEQ ID NO: 778171 - DNA, 15 bp, Homo sapiens
ggaatacagccatgc

SEQ ID NO: 778172 - DNA, 15 bp, Homo sapiens
gaatacagccatgct

SEQ ID NO: 778173 - DNA, 15 bp, Homo sapiens
aatacagccatgctc

SEQ ID NO: 778174 - DNA, 15 bp, Homo sapiens
atacagccatgctca

SEQ ID NO: 778175 - DNA, 15 bp, Homo sapiens
tacagccatgctcac

SEQ ID NO: 778176 - DNA, 15 bp, Homo sapiens
acagccatgctcact

SEQ ID NO: 778177 - DNA, 15 bp, Homo sapiens
cagccatgctcactc

SEQ ID NO: 778178 - DNA, 15 bp, Homo sapiens
agccatgctcactca

SEQ ID NO: 778179 - DNA, 15 bp, Homo sapiens
gccatgctcactcat

SEQ ID NO: 778180 - DNA, 15 bp, Homo sapiens
ccatgctcactcatt

SEQ ID NO: 778181 - DNA, 15 bp, Homo sapiens
catgctcactcattt

SEQ ID NO: 778182 - DNA, 15 bp, Homo sapiens
atgctcactcattta

SEQ ID NO: 778183 - DNA, 15 bp, Homo sapiens
tgctcactcatttac

SEQ ID NO: 778184 - DNA, 15 bp, Homo sapiens
gctcactcatttacg

SEQ ID NO: 778185 - DNA, 15 bp, Homo sapiens
ctcactcatttacgt

SEQ ID NO: 778186 - DNA, 15 bp, Homo sapiens
tcactcatttacgta

SEQ ID NO: 778187 - DNA, 15 bp, Homo sapiens
cactcatttacgtat

SEQ ID NO: 778188 - DNA, 15 bp, Homo sapiens
actcatttacgtatc

SEQ ID NO: 778189 - DNA, 15 bp, Homo sapiens
ctcatttacgtatcg

SEQ ID NO: 778190 - DNA, 15 bp, Homo sapiens
tcatttacgtatcgt

SEQ ID NO: 778191 - DNA, 15 bp, Homo sapiens
catttacgtatcgtc

SEQ ID NO: 778192 - DNA, 15 bp, Homo sapiens
atttacgtatcgtct

SEQ ID NO: 778193 - DNA, 15 bp, Homo sapiens
tttacgtatcgtctg

SEQ ID NO: 778194 - DNA, 15 bp, Homo sapiens
ttacgtatcgtctgt

SEQ ID NO: 778195 - DNA, 15 bp, Homo sapiens
tacgtatcgtctgtg

SEQ ID NO: 778196 - DNA, 15 bp, Homo sapiens
acgtatcgtctgtgg

SEQ ID NO: 778197 - DNA, 15 bp, Homo sapiens
cgtatcgtctgtggc

SEQ ID NO: 778198 - DNA, 15 bp, Homo sapiens
gtatcgtctgtggct

SEQ ID NO: 778199 - DNA, 15 bp, Homo sapiens
tatcgtctgtggctg

SEQ ID NO: 778200 - DNA, 15 bp, Homo sapiens
atcgtctgtggctgc

SEQ ID NO: 778201 - DNA, 15 bp, Homo sapiens
tcgtctgtggctgct

SEQ ID NO: 778202 - DNA, 15 bp, Homo sapiens
cgtctgtggctgctt

SEQ ID NO: 778203 - DNA, 15 bp, Homo sapiens
gtctgtggctgcttc

SEQ ID NO: 778204 - DNA, 15 bp, Homo sapiens
tctgtggctgcttct

SEQ ID NO: 778205 - DNA, 15 bp, Homo sapiens
ctgtggctgcttctg

SEQ ID NO: 778206 - DNA, 15 bp, Homo sapiens
tgtggctgcttctgt

SEQ ID NO: 778207 - DNA, 15 bp, Homo sapiens
gtggctgcttctgta

SEQ ID NO: 778208 - DNA, 15 bp, Homo sapiens
tggctgcttctgtaa

SEQ ID NO: 778209 - DNA, 15 bp, Homo sapiens
ggctgcttctgtaag

SEQ ID NO: 778210 - DNA, 15 bp, Homo sapiens
gctgcttctgtaaga

SEQ ID NO: 778211 - DNA, 15 bp, Homo sapiens
ctgcttctgtaagaa

SEQ ID NO: 778212 - DNA, 15 bp, Homo sapiens
tgcttctgtaagaag

SEQ ID NO: 778213 - DNA, 15 bp, Homo sapiens
gcttctgtaagaagc

SEQ ID NO: 778214 - DNA, 15 bp, Homo sapiens
cttctgtaagaagct

SEQ ID NO: 778215 - DNA, 15 bp, Homo sapiens
ttctgtaagaagcta

SEQ ID NO: 778216 - DNA, 15 bp, Homo sapiens
tctgtaagaagctac

SEQ ID NO: 778217 - DNA, 15 bp, Homo sapiens
ctgtaagaagctaca

SEQ ID NO: 778218 - DNA, 15 bp, Homo sapiens
tgtaagaagctacaa

SEQ ID NO: 778219 - DNA, 15 bp, Homo sapiens
gtaagaagctacaaa

SEQ ID NO: 778220 - DNA, 15 bp, Homo sapiens
taagaagctacaaag

SEQ ID NO: 778221 - DNA, 15 bp, Homo sapiens
aagaagctacaaagg

SEQ ID NO: 778222 - DNA, 15 bp, Homo sapiens
agaagctacaaaggc

SEQ ID NO: 778223 - DNA, 15 bp, Homo sapiens
gaagctacaaaggca

SEQ ID NO: 778224 - DNA, 15 bp, Homo sapiens
aagctacaaaggcag

SEQ ID NO: 778225 - DNA, 15 bp, Homo sapiens
agctacaaaggcaga

SEQ ID NO: 778226 - DNA, 15 bp, Homo sapiens
gctacaaaggcagag

SEQ ID NO: 778227 - DNA, 15 bp, Homo sapiens
ctacaaaggcagagt

SEQ ID NO: 778228 - DNA, 15 bp, Homo sapiens
tacaaaggcagagtt

SEQ ID NO: 778229 - DNA, 15 bp, Homo sapiens
acaaaggcagagttg

SEQ ID NO: 778230 - DNA, 15 bp, Homo sapiens
caaaggcagagttga

SEQ ID NO: 778231 - DNA, 15 bp, Homo sapiens
aaaggcagagttgag

SEQ ID NO: 778232 - DNA, 15 bp, Homo sapiens
aaggcagagttgagt

SEQ ID NO: 778233 - DNA, 15 bp, Homo sapiens
aggcagagttgagta

SEQ ID NO: 778234 - DNA, 15 bp, Homo sapiens
ggcagagttgagtag

SEQ ID NO: 778235 - DNA, 15 bp, Homo sapiens
gcagagttgagtagt

SEQ ID NO: 778236 - DNA, 15 bp, Homo sapiens
cagagttgagtagta

SEQ ID NO: 778237 - DNA, 15 bp, Homo sapiens
agagttgagtagtat

SEQ ID NO: 778238 - DNA, 15 bp, Homo sapiens
gagttgagtagtatc

SEQ ID NO: 778239 - DNA, 15 bp, Homo sapiens
agttgagtagtatcc

SEQ ID NO: 778240 - DNA, 15 bp, Homo sapiens
gttgagtagtatccg

SEQ ID NO: 778241 - DNA, 15 bp, Homo sapiens
ttgagtagtatccgg

SEQ ID NO: 778242 - DNA, 15 bp, Homo sapiens
tgagtagtatccgga

SEQ ID NO: 778243 - DNA, 15 bp, Homo sapiens
gagtagtatccggag

SEQ ID NO: 778244 - DNA, 15 bp, Homo sapiens
agtagtatccggagt

SEQ ID NO: 778245 - DNA, 15 bp, Homo sapiens
gtagtatccggagtc

SEQ ID NO: 778246 - DNA, 15 bp, Homo sapiens
tagtatccggagtcc

SEQ ID NO: 778247 - DNA, 15 bp, Homo sapiens
agtatccggagtcca

SEQ ID NO: 778248 - DNA, 15 bp, Homo sapiens
gtatccggagtccaa

SEQ ID NO: 778249 - DNA, 15 bp, Homo sapiens
tatccggagtccaaa

SEQ ID NO: 778250 - DNA, 15 bp, Homo sapiens
atccggagtccaaaa

SEQ ID NO: 778251 - DNA, 15 bp, Homo sapiens
tccggagtccaaaac

SEQ ID NO: 778252 - DNA, 15 bp, Homo sapiens
ccggagtccaaaaca

SEQ ID NO: 778253 - DNA, 15 bp, Homo sapiens
cggagtccaaaacac

SEQ ID NO: 778254 - DNA, 15 bp, Homo sapiens
ggagtccaaaacacc

SEQ ID NO: 778255 - DNA, 15 bp, Homo sapiens
gagtccaaaacaccc

SEQ ID NO: 778256 - DNA, 15 bp, Homo sapiens
agtccaaaacaccca

SEQ ID NO: 778257 - DNA, 15 bp, Homo sapiens
gtccaaaacacccac

SEQ ID NO: 778258 - DNA, 15 bp, Homo sapiens
tccaaaacacccacc

SEQ ID NO: 778259 - DNA, 15 bp, Homo sapiens
ccaaaacacccacca

SEQ ID NO: 778260 - DNA, 15 bp, Homo sapiens
caaaacacccaccag

SEQ ID NO: 778261 - DNA, 15 bp, Homo sapiens
aaaacacccaccagc

SEQ ID NO: 778262 - DNA, 15 bp, Homo sapiens
aaacacccaccagcc

SEQ ID NO: 778263 - DNA, 15 bp, Homo sapiens
aacacccaccagcct

SEQ ID NO: 778264 - DNA, 15 bp, Homo sapiens
acacccaccagccta

SEQ ID NO: 778265 - DNA, 15 bp, Homo sapiens
cacccaccagcctaa

SEQ ID NO: 778266 - DNA, 15 bp, Homo sapiens
acccaccagcctaaa

SEQ ID NO: 778267 - DNA, 15 bp, Homo sapiens
cccaccagcctaaaa

SEQ ID NO: 778268 - DNA, 15 bp, Homo sapiens
ccaccagcctaaaat

SEQ ID NO: 778269 - DNA, 15 bp, Homo sapiens
caccagcctaaaata

SEQ ID NO: 778270 - DNA, 15 bp, Homo sapiens
accagcctaaaataa

SEQ ID NO: 778271 - DNA, 15 bp, Homo sapiens
ccagcctaaaataat

SEQ ID NO: 778272 - DNA, 15 bp, Homo sapiens
cagcctaaaataatt

SEQ ID NO: 778273 - DNA, 15 bp, Homo sapiens
agcctaaaataatta

SEQ ID NO: 778274 - DNA, 15 bp, Homo sapiens
gcctaaaataattac

SEQ ID NO: 778275 - DNA, 15 bp, Homo sapiens
cctaaaataattacc

SEQ ID NO: 778276 - DNA, 15 bp, Homo sapiens
ctaaaataattacca

SEQ ID NO: 778277 - DNA, 15 bp, Homo sapiens
taaaataattaccat

SEQ ID NO: 778278 - DNA, 15 bp, Homo sapiens
aaaataattaccatc

SEQ ID NO: 778279 - DNA, 15 bp, Homo sapiens
aaataattaccatct

SEQ ID NO: 778280 - DNA, 15 bp, Homo sapiens
aataattaccatctg

SEQ ID NO: 778281 - DNA, 15 bp, Homo sapiens
ataattaccatctgt

SEQ ID NO: 778282 - DNA, 15 bp, Homo sapiens
taattaccatctgtc

SEQ ID NO: 778283 - DNA, 15 bp, Homo sapiens
aattaccatctgtcc

SEQ ID NO: 778284 - DNA, 15 bp, Homo sapiens
attaccatctgtccc

SEQ ID NO: 778285 - DNA, 15 bp, Homo sapiens
ttaccatctgtccct

SEQ ID NO: 778286 - DNA, 15 bp, Homo sapiens
taccatctgtccctg

SEQ ID NO: 778287 - DNA, 15 bp, Homo sapiens
accatctgtccctgt

SEQ ID NO: 778288 - DNA, 15 bp, Homo sapiens
ccatctgtccctgta

SEQ ID NO: 778289 - DNA, 15 bp, Homo sapiens
catctgtccctgtaa

SEQ ID NO: 778290 - DNA, 15 bp, Homo sapiens
atctgtccctgtaaa

SEQ ID NO: 778291 - DNA, 15 bp, Homo sapiens
tctgtccctgtaaag

SEQ ID NO: 778292 - DNA, 15 bp, Homo sapiens
ctgtccctgtaaaga

SEQ ID NO: 778293 - DNA, 15 bp, Homo sapiens
tgtccctgtaaagaa

SEQ ID NO: 778294 - DNA, 15 bp, Homo sapiens
gtccctgtaaagaaa

SEQ ID NO: 778295 - DNA, 15 bp, Homo sapiens
tccctgtaaagaaac

SEQ ID NO: 778296 - DNA, 15 bp, Homo sapiens
ccctgtaaagaaaca

SEQ ID NO: 778297 - DNA, 15 bp, Homo sapiens
cctgtaaagaaacaa

SEQ ID NO: 778298 - DNA, 15 bp, Homo sapiens
ctgtaaagaaacaat

SEQ ID NO: 778299 - DNA, 15 bp, Homo sapiens
tgtaaagaaacaatt

SEQ ID NO: 778300 - DNA, 15 bp, Homo sapiens
gtaaagaaacaattg

SEQ ID NO: 778301 - DNA, 15 bp, Homo sapiens
taaagaaacaattgc

SEQ ID NO: 778302 - DNA, 15 bp, Homo sapiens
aaagaaacaattgcc

SEQ ID NO: 778303 - DNA, 15 bp, Homo sapiens
aagaaacaattgcca

SEQ ID NO: 778304 - DNA, 15 bp, Homo sapiens
agaaacaattgccac

SEQ ID NO: 778305 - DNA, 15 bp, Homo sapiens
gaaacaattgccact

SEQ ID NO: 778306 - DNA, 15 bp, Homo sapiens
aaacaattgccactc

SEQ ID NO: 778307 - DNA, 15 bp, Homo sapiens
aacaattgccactcc

SEQ ID NO: 778308 - DNA, 15 bp, Homo sapiens
acaattgccactccc

SEQ ID NO: 778309 - DNA, 15 bp, Homo sapiens
caattgccactccct

SEQ ID NO: 778310 - DNA, 15 bp, Homo sapiens
aattgccactccctg

SEQ ID NO: 778311 - DNA, 15 bp, Homo sapiens
attgccactccctgt

SEQ ID NO: 778312 - DNA, 15 bp, Homo sapiens
ttgccactccctgta

SEQ ID NO: 778313 - DNA, 15 bp, Homo sapiens
tgccactccctgtat

SEQ ID NO: 778314 - DNA, 15 bp, Homo sapiens
gccactccctgtatg

SEQ ID NO: 778315 - DNA, 15 bp, Homo sapiens
ccactccctgtatgc

SEQ ID NO: 778316 - DNA, 15 bp, Homo sapiens
cactccctgtatgcc

SEQ ID NO: 778317 - DNA, 15 bp, Homo sapiens
actccctgtatgcct

SEQ ID NO: 778318 - DNA, 15 bp, Homo sapiens
ctccctgtatgcctg

SEQ ID NO: 778319 - DNA, 15 bp, Homo sapiens
tccctgtatgcctgt

SEQ ID NO: 778320 - DNA, 15 bp, Homo sapiens
ccctgtatgcctgtc

SEQ ID NO: 778321 - DNA, 15 bp, Homo sapiens
cctgtatgcctgtca

SEQ ID NO: 778322 - DNA, 15 bp, Homo sapiens
ctgtatgcctgtcaa

SEQ ID NO: 778323 - DNA, 15 bp, Homo sapiens
tgtatgcctgtcaat

SEQ ID NO: 778324 - DNA, 15 bp, Homo sapiens
gtatgcctgtcaata

SEQ ID NO: 778325 - DNA, 15 bp, Homo sapiens
tatgcctgtcaatat

SEQ ID NO: 778326 - DNA, 15 bp, Homo sapiens
atgcctgtcaatatt

SEQ ID NO: 778327 - DNA, 15 bp, Homo sapiens
tgcctgtcaatattc

SEQ ID NO: 778328 - DNA, 15 bp, Homo sapiens
gcctgtcaatattcc

SEQ ID NO: 778329 - DNA, 15 bp, Homo sapiens
cctgtcaatattcct

SEQ ID NO: 778330 - DNA, 15 bp, Homo sapiens
ctgtcaatattcctc

SEQ ID NO: 778331 - DNA, 15 bp, Homo sapiens
tgtcaatattcctct

SEQ ID NO: 778332 - DNA, 15 bp, Homo sapiens
gtcaatattcctctt

SEQ ID NO: 778333 - DNA, 15 bp, Homo sapiens
tcaatattcctcttc

SEQ ID NO: 778334 - DNA, 15 bp, Homo sapiens
caatattcctcttca

SEQ ID NO: 778335 - DNA, 15 bp, Homo sapiens
aatattcctcttcaa

SEQ ID NO: 778336 - DNA, 15 bp, Homo sapiens
atattcctcttcaag

SEQ ID NO: 778337 - DNA, 15 bp, Homo sapiens
tattcctcttcaagt

SEQ ID NO: 778338 - DNA, 15 bp, Homo sapiens
attcctcttcaagtg

SEQ ID NO: 778339 - DNA, 15 bp, Homo sapiens
ttcctcttcaagtgg

SEQ ID NO: 778340 - DNA, 15 bp, Homo sapiens
tcctcttcaagtggc

SEQ ID NO: 778341 - DNA, 15 bp, Homo sapiens
cctcttcaagtggcc

SEQ ID NO: 778342 - DNA, 15 bp, Homo sapiens
ctcttcaagtggcct

SEQ ID NO: 778343 - DNA, 15 bp, Homo sapiens
tcttcaagtggccta

SEQ ID NO: 778344 - DNA, 15 bp, Homo sapiens
cttcaagtggcctac

SEQ ID NO: 778345 - DNA, 15 bp, Homo sapiens
ttcaagtggcctaca

SEQ ID NO: 778346 - DNA, 15 bp, Homo sapiens
tcaagtggcctacag

SEQ ID NO: 778347 - DNA, 15 bp, Homo sapiens
caagtggcctacagg

SEQ ID NO: 778348 - DNA, 15 bp, Homo sapiens
aagtggcctacagga

SEQ ID NO: 778349 - DNA, 15 bp, Homo sapiens
agtggcctacaggac

SEQ ID NO: 778350 - DNA, 15 bp, Homo sapiens
gtggcctacaggact

SEQ ID NO: 778351 - DNA, 15 bp, Homo sapiens
tggcctacaggactt

SEQ ID NO: 778352 - DNA, 15 bp, Homo sapiens
ggcctacaggacttg

SEQ ID NO: 778353 - DNA, 15 bp, Homo sapiens
gcctacaggacttgc

SEQ ID NO: 778354 - DNA, 15 bp, Homo sapiens
cctacaggacttgct

SEQ ID NO: 778355 - DNA, 15 bp, Homo sapiens
ctacaggacttgctc

SEQ ID NO: 778356 - DNA, 15 bp, Homo sapiens
tacaggacttgctcc

SEQ ID NO: 778357 - DNA, 15 bp, Homo sapiens
acaggacttgctcca

SEQ ID NO: 778358 - DNA, 15 bp, Homo sapiens
caggacttgctccat

SEQ ID NO: 778359 - DNA, 15 bp, Homo sapiens
aggacttgctccata

SEQ ID NO: 778360 - DNA, 15 bp, Homo sapiens
ggacttgctccataa

SEQ ID NO: 778361 - DNA, 15 bp, Homo sapiens
gacttgctccataag

SEQ ID NO: 778362 - DNA, 15 bp, Homo sapiens
acttgctccataagt

SEQ ID NO: 778363 - DNA, 15 bp, Homo sapiens
cttgctccataagtt

SEQ ID NO: 778364 - DNA, 15 bp, Homo sapiens
ttgctccataagtta

SEQ ID NO: 778365 - DNA, 15 bp, Homo sapiens
tgctccataagttac

SEQ ID NO: 778366 - DNA, 15 bp, Homo sapiens
gctccataagttacc

SEQ ID NO: 778367 - DNA, 15 bp, Homo sapiens
ctccataagttacct

SEQ ID NO: 778368 - DNA, 15 bp, Homo sapiens
tccataagttaccta

SEQ ID NO: 778369 - DNA, 15 bp, Homo sapiens
ccataagttacctat

SEQ ID NO: 778370 - DNA, 15 bp, Homo sapiens
cataagttacctatg

SEQ ID NO: 778371 - DNA, 15 bp, Homo sapiens
ataagttacctatgg

SEQ ID NO: 778372 - DNA, 15 bp, Homo sapiens
taagttacctatggc

SEQ ID NO: 778373 - DNA, 15 bp, Homo sapiens
aagttacctatggca

SEQ ID NO: 778374 - DNA, 15 bp, Homo sapiens
agttacctatggcat

SEQ ID NO: 778375 - DNA, 15 bp, Homo sapiens
gttacctatggcata

SEQ ID NO: 778376 - DNA, 15 bp, Homo sapiens
ttacctatggcatag

SEQ ID NO: 778377 - DNA, 15 bp, Homo sapiens
tacctatggcatagg

SEQ ID NO: 778378 - DNA, 15 bp, Homo sapiens
acctatggcataggt

SEQ ID NO: 778379 - DNA, 15 bp, Homo sapiens
cctatggcataggta

SEQ ID NO: 778380 - DNA, 15 bp, Homo sapiens
ctatggcataggtaa

SEQ ID NO: 778381 - DNA, 15 bp, Homo sapiens
tatggcataggtaat

SEQ ID NO: 778382 - DNA, 15 bp, Homo sapiens
atggcataggtaata

SEQ ID NO: 778383 - DNA, 15 bp, Homo sapiens
tggcataggtaatag

SEQ ID NO: 778384 - DNA, 15 bp, Homo sapiens
ggcataggtaataga

SEQ ID NO: 778385 - DNA, 15 bp, Homo sapiens
gcataggtaatagat

SEQ ID NO: 778386 - DNA, 15 bp, Homo sapiens
cataggtaatagata

SEQ ID NO: 778387 - DNA, 15 bp, Homo sapiens
ataggtaatagataa

SEQ ID NO: 778388 - DNA, 15 bp, Homo sapiens
taggtaatagataag

SEQ ID NO: 778389 - DNA, 15 bp, Homo sapiens
aggtaatagataaga

SEQ ID NO: 778390 - DNA, 15 bp, Homo sapiens
ggtaatagataagat

SEQ ID NO: 778391 - DNA, 15 bp, Homo sapiens
gtaatagataagata

SEQ ID NO: 778392 - DNA, 15 bp, Homo sapiens
taatagataagatat

SEQ ID NO: 778393 - DNA, 15 bp, Homo sapiens
aatagataagatata

SEQ ID NO: 778394 - DNA, 15 bp, Homo sapiens
atagataagatataa

SEQ ID NO: 778395 - DNA, 15 bp, Homo sapiens
tagataagatataac

SEQ ID NO: 778396 - DNA, 15 bp, Homo sapiens
agataagatataaca

SEQ ID NO: 778397 - DNA, 15 bp, Homo sapiens
gataagatataacat

SEQ ID NO: 778398 - DNA, 15 bp, Homo sapiens
ataagatataacatc

SEQ ID NO: 778399 - DNA, 15 bp, Homo sapiens
taagatataacatct

SEQ ID NO: 778400 - DNA, 15 bp, Homo sapiens
aagatataacatctg

SEQ ID NO: 778401 - DNA, 15 bp, Homo sapiens
agatataacatctgt

SEQ ID NO: 778402 - DNA, 15 bp, Homo sapiens
gatataacatctgtc

SEQ ID NO: 778403 - DNA, 15 bp, Homo sapiens
atataacatctgtcc

SEQ ID NO: 778404 - DNA, 15 bp, Homo sapiens
tataacatctgtccc

SEQ ID NO: 778405 - DNA, 15 bp, Homo sapiens
ataacatctgtcccc

SEQ ID NO: 778406 - DNA, 15 bp, Homo sapiens
taacatctgtcccct

SEQ ID NO: 778407 - DNA, 15 bp, Homo sapiens
aacatctgtcccctt

SEQ ID NO: 778408 - DNA, 15 bp, Homo sapiens
acatctgtccccttc

SEQ ID NO: 778409 - DNA, 15 bp, Homo sapiens
catctgtccccttct

SEQ ID NO: 778410 - DNA, 15 bp, Homo sapiens
atctgtccccttctc

SEQ ID NO: 778411 - DNA, 15 bp, Homo sapiens
tctgtccccttctca

SEQ ID NO: 778412 - DNA, 15 bp, Homo sapiens
ctgtccccttctcat

SEQ ID NO: 778413 - DNA, 15 bp, Homo sapiens
tgtccccttctcatg

SEQ ID NO: 778414 - DNA, 15 bp, Homo sapiens
gtccccttctcatgg

SEQ ID NO: 778415 - DNA, 15 bp, Homo sapiens
tccccttctcatggg

SEQ ID NO: 778416 - DNA, 15 bp, Homo sapiens
ccccttctcatgggg

SEQ ID NO: 778417 - DNA, 15 bp, Homo sapiens
cccttctcatgggga

SEQ ID NO: 778418 - DNA, 15 bp, Homo sapiens
ccttctcatggggac

SEQ ID NO: 778419 - DNA, 15 bp, Homo sapiens
cttctcatggggacg

SEQ ID NO: 778420 - DNA, 15 bp, Homo sapiens
ttctcatggggacgt

SEQ ID NO: 778421 - DNA, 15 bp, Homo sapiens
tctcatggggacgtg

SEQ ID NO: 778422 - DNA, 15 bp, Homo sapiens
ctcatggggacgtgt

SEQ ID NO: 778423 - DNA, 15 bp, Homo sapiens
tcatggggacgtgtc

SEQ ID NO: 778424 - DNA, 15 bp, Homo sapiens
catggggacgtgtct

SEQ ID NO: 778425 - DNA, 15 bp, Homo sapiens
atggggacgtgtcta

SEQ ID NO: 778426 - DNA, 15 bp, Homo sapiens
tggggacgtgtctac

SEQ ID NO: 778427 - DNA, 15 bp, Homo sapiens
ggggacgtgtctaca

SEQ ID NO: 778428 - DNA, 15 bp, Homo sapiens
gggacgtgtctacat

SEQ ID NO: 778429 - DNA, 15 bp, Homo sapiens
ggacgtgtctacatt

SEQ ID NO: 778430 - DNA, 15 bp, Homo sapiens
gacgtgtctacattc

SEQ ID NO: 778431 - DNA, 15 bp, Homo sapiens
acgtgtctacattca

SEQ ID NO: 778432 - DNA, 15 bp, Homo sapiens
cgtgtctacattcac

SEQ ID NO: 778433 - DNA, 15 bp, Homo sapiens
gtgtctacattcact

SEQ ID NO: 778434 - DNA, 15 bp, Homo sapiens
tgtctacattcactt

SEQ ID NO: 778435 - DNA, 15 bp, Homo sapiens
gtctacattcacttc

SEQ ID NO: 778436 - DNA, 15 bp, Homo sapiens
tctacattcacttcc

SEQ ID NO: 778437 - DNA, 15 bp, Homo sapiens
ctacattcacttccc

SEQ ID NO: 778438 - DNA, 15 bp, Homo sapiens
tacattcacttcccc

SEQ ID NO: 778439 - DNA, 15 bp, Homo sapiens
acattcacttcccca

SEQ ID NO: 778440 - DNA, 15 bp, Homo sapiens
cattcacttccccaa

SEQ ID NO: 778441 - DNA, 15 bp, Homo sapiens
attcacttccccaag

SEQ ID NO: 778442 - DNA, 15 bp, Homo sapiens
ttcacttccccaagc

SEQ ID NO: 778443 - DNA, 15 bp, Homo sapiens
tcacttccccaagct

SEQ ID NO: 778444 - DNA, 15 bp, Homo sapiens
cacttccccaagctc

SEQ ID NO: 778445 - DNA, 15 bp, Homo sapiens
acttccccaagctca

SEQ ID NO: 778446 - DNA, 15 bp, Homo sapiens
cttccccaagctcaa

SEQ ID NO: 778447 - DNA, 15 bp, Homo sapiens
ttccccaagctcaac

SEQ ID NO: 778448 - DNA, 15 bp, Homo sapiens
tccccaagctcaact

SEQ ID NO: 778449 - DNA, 15 bp, Homo sapiens
ccccaagctcaacta

SEQ ID NO: 778450 - DNA, 15 bp, Homo sapiens
cccaagctcaactaa

SEQ ID NO: 778451 - DNA, 15 bp, Homo sapiens
ccaagctcaactaag

SEQ ID NO: 778452 - DNA, 15 bp, Homo sapiens
caagctcaactaagt

SEQ ID NO: 778453 - DNA, 15 bp, Homo sapiens
aagctcaactaagta

SEQ ID NO: 778454 - DNA, 15 bp, Homo sapiens
agctcaactaagtac

SEQ ID NO: 778455 - DNA, 15 bp, Homo sapiens
gctcaactaagtact

SEQ ID NO: 778456 - DNA, 15 bp, Homo sapiens
ctcaactaagtactg

SEQ ID NO: 778457 - DNA, 15 bp, Homo sapiens
tcaactaagtactgc

SEQ ID NO: 778458 - DNA, 15 bp, Homo sapiens
caactaagtactgca

SEQ ID NO: 778459 - DNA, 15 bp, Homo sapiens
aactaagtactgcat

SEQ ID NO: 778460 - DNA, 15 bp, Homo sapiens
actaagtactgcatt

SEQ ID NO: 778461 - DNA, 15 bp, Homo sapiens
ctaagtactgcatta

SEQ ID NO: 778462 - DNA, 15 bp, Homo sapiens
taagtactgcattag

SEQ ID NO: 778463 - DNA, 15 bp, Homo sapiens
aagtactgcattaga

SEQ ID NO: 778464 - DNA, 15 bp, Homo sapiens
agtactgcattagag

SEQ ID NO: 778465 - DNA, 15 bp, Homo sapiens
gtactgcattagaga

SEQ ID NO: 778466 - DNA, 15 bp, Homo sapiens
tactgcattagagat

SEQ ID NO: 778467 - DNA, 15 bp, Homo sapiens
actgcattagagatg

SEQ ID NO: 778468 - DNA, 15 bp, Homo sapiens
ctgcattagagatgg

SEQ ID NO: 778469 - DNA, 15 bp, Homo sapiens
tgcattagagatgga

SEQ ID NO: 778470 - DNA, 15 bp, Homo sapiens
gcattagagatggag

SEQ ID NO: 778471 - DNA, 15 bp, Homo sapiens
cattagagatggaga

SEQ ID NO: 778472 - DNA, 15 bp, Homo sapiens
attagagatggagag

SEQ ID NO: 778473 - DNA, 15 bp, Homo sapiens
ttagagatggagagg

SEQ ID NO: 778474 - DNA, 15 bp, Homo sapiens
tagagatggagaggc

SEQ ID NO: 778475 - DNA, 15 bp, Homo sapiens
agagatggagaggcc

SEQ ID NO: 778476 - DNA, 15 bp, Homo sapiens
gagatggagaggcca

SEQ ID NO: 778477 - DNA, 15 bp, Homo sapiens
agatggagaggccag

SEQ ID NO: 778478 - DNA, 15 bp, Homo sapiens
gatggagaggccaga

SEQ ID NO: 778479 - DNA, 15 bp, Homo sapiens
atggagaggccagag

SEQ ID NO: 778480 - DNA, 15 bp, Homo sapiens
tggagaggccagagc

SEQ ID NO: 778481 - DNA, 15 bp, Homo sapiens
ggagaggccagagcc

SEQ ID NO: 778482 - DNA, 15 bp, Homo sapiens
gagaggccagagcca

SEQ ID NO: 778483 - DNA, 15 bp, Homo sapiens
agaggccagagccag

SEQ ID NO: 778484 - DNA, 15 bp, Homo sapiens
gaggccagagccagg

SEQ ID NO: 778485 - DNA, 15 bp, Homo sapiens
aggccagagccaggt

SEQ ID NO: 778486 - DNA, 15 bp, Homo sapiens
ggccagagccaggtg

SEQ ID NO: 778487 - DNA, 15 bp, Homo sapiens
gccagagccaggtgg

SEQ ID NO: 778488 - DNA, 15 bp, Homo sapiens
ccagagccaggtggg

SEQ ID NO: 778489 - DNA, 15 bp, Homo sapiens
cagagccaggtgggt

SEQ ID NO: 778490 - DNA, 15 bp, Homo sapiens
agagccaggtgggtc

SEQ ID NO: 778491 - DNA, 15 bp, Homo sapiens
gagccaggtgggtcc

SEQ ID NO: 778492 - DNA, 15 bp, Homo sapiens
agccaggtgggtccc

SEQ ID NO: 778493 - DNA, 15 bp, Homo sapiens
gccaggtgggtcccc

SEQ ID NO: 778494 - DNA, 15 bp, Homo sapiens
ccaggtgggtcccca

SEQ ID NO: 778495 - DNA, 15 bp, Homo sapiens
caggtgggtccccaa

SEQ ID NO: 778496 - DNA, 15 bp, Homo sapiens
aggtgggtccccaag

SEQ ID NO: 778497 - DNA, 15 bp, Homo sapiens
ggtgggtccccaagt

SEQ ID NO: 778498 - DNA, 15 bp, Homo sapiens
gtgggtccccaagtt

SEQ ID NO: 778499 - DNA, 15 bp, Homo sapiens
tgggtccccaagttc

SEQ ID NO: 778500 - DNA, 15 bp, Homo sapiens
gggtccccaagttcc

SEQ ID NO: 778501 - DNA, 15 bp, Homo sapiens
ggtccccaagttcca

SEQ ID NO: 778502 - DNA, 15 bp, Homo sapiens
gtccccaagttccat

SEQ ID NO: 778503 - DNA, 15 bp, Homo sapiens
tccccaagttccata

SEQ ID NO: 778504 - DNA, 15 bp, Homo sapiens
ccccaagttccatag

SEQ ID NO: 778505 - DNA, 15 bp, Homo sapiens
cccaagttccatagc

SEQ ID NO: 778506 - DNA, 15 bp, Homo sapiens
ccaagttccatagca

SEQ ID NO: 778507 - DNA, 15 bp, Homo sapiens
caagttccatagcag

SEQ ID NO: 778508 - DNA, 15 bp, Homo sapiens
aagttccatagcaga

SEQ ID NO: 778509 - DNA, 15 bp, Homo sapiens
agttccatagcagat

SEQ ID NO: 778510 - DNA, 15 bp, Homo sapiens
gttccatagcagatt

SEQ ID NO: 778511 - DNA, 15 bp, Homo sapiens
ttccatagcagattc

SEQ ID NO: 778512 - DNA, 15 bp, Homo sapiens
tccatagcagattcc

SEQ ID NO: 778513 - DNA, 15 bp, Homo sapiens
ccatagcagattccc

SEQ ID NO: 778514 - DNA, 15 bp, Homo sapiens
catagcagattccca

SEQ ID NO: 778515 - DNA, 15 bp, Homo sapiens
atagcagattcccag

SEQ ID NO: 778516 - DNA, 15 bp, Homo sapiens
tagcagattcccagc

SEQ ID NO: 778517 - DNA, 15 bp, Homo sapiens
agcagattcccagct

SEQ ID NO: 778518 - DNA, 15 bp, Homo sapiens
gcagattcccagctg

SEQ ID NO: 778519 - DNA, 15 bp, Homo sapiens
cagattcccagctgg

SEQ ID NO: 778520 - DNA, 15 bp, Homo sapiens
agattcccagctggg

SEQ ID NO: 778521 - DNA, 15 bp, Homo sapiens
gattcccagctgggg

SEQ ID NO: 778522 - DNA, 15 bp, Homo sapiens
attcccagctggggt

SEQ ID NO: 778523 - DNA, 15 bp, Homo sapiens
ttcccagctggggtg

SEQ ID NO: 778524 - DNA, 15 bp, Homo sapiens
tcccagctggggtga

SEQ ID NO: 778525 - DNA, 15 bp, Homo sapiens
cccagctggggtgaa

SEQ ID NO: 778526 - DNA, 15 bp, Homo sapiens
ccagctggggtgaac

SEQ ID NO: 778527 - DNA, 15 bp, Homo sapiens
cagctggggtgaaca

SEQ ID NO: 778528 - DNA, 15 bp, Homo sapiens
agctggggtgaacat

SEQ ID NO: 778529 - DNA, 15 bp, Homo sapiens
gctggggtgaacata

SEQ ID NO: 778530 - DNA, 15 bp, Homo sapiens
ctggggtgaacatat

SEQ ID NO: 778531 - DNA, 15 bp, Homo sapiens
tggggtgaacatatg

SEQ ID NO: 778532 - DNA, 15 bp, Homo sapiens
ggggtgaacatatgg

SEQ ID NO: 778533 - DNA, 15 bp, Homo sapiens
gggtgaacatatgga

SEQ ID NO: 778534 - DNA, 15 bp, Homo sapiens
ggtgaacatatggat

SEQ ID NO: 778535 - DNA, 15 bp, Homo sapiens
gtgaacatatggatt

SEQ ID NO: 778536 - DNA, 15 bp, Homo sapiens
tgaacatatggattt

SEQ ID NO: 778537 - DNA, 15 bp, Homo sapiens
gaacatatggatttc

SEQ ID NO: 778538 - DNA, 15 bp, Homo sapiens
aacatatggatttcc

SEQ ID NO: 778539 - DNA, 15 bp, Homo sapiens
acatatggatttcca

SEQ ID NO: 778540 - DNA, 15 bp, Homo sapiens
catatggatttccac

SEQ ID NO: 778541 - DNA, 15 bp, Homo sapiens
atatggatttccact

SEQ ID NO: 778542 - DNA, 15 bp, Homo sapiens
tatggatttccactt

SEQ ID NO: 778543 - DNA, 15 bp, Homo sapiens
atggatttccacttc

SEQ ID NO: 778544 - DNA, 15 bp, Homo sapiens
tggatttccacttcg

SEQ ID NO: 778545 - DNA, 15 bp, Homo sapiens
ggatttccacttcgc

SEQ ID NO: 778546 - DNA, 15 bp, Homo sapiens
gatttccacttcgca

SEQ ID NO: 778547 - DNA, 15 bp, Homo sapiens
atttccacttcgcaa

SEQ ID NO: 778548 - DNA, 15 bp, Homo sapiens
tttccacttcgcaag

SEQ ID NO: 778549 - DNA, 15 bp, Homo sapiens
ttccacttcgcaagg

SEQ ID NO: 778550 - DNA, 15 bp, Homo sapiens
tccacttcgcaaggt

SEQ ID NO: 778551 - DNA, 15 bp, Homo sapiens
ccacttcgcaaggtc

SEQ ID NO: 778552 - DNA, 15 bp, Homo sapiens
cacttcgcaaggtca

SEQ ID NO: 778553 - DNA, 15 bp, Homo sapiens
acttcgcaaggtcag

SEQ ID NO: 778554 - DNA, 15 bp, Homo sapiens
cttcgcaaggtcagg

SEQ ID NO: 778555 - DNA, 15 bp, Homo sapiens
ttcgcaaggtcagga

SEQ ID NO: 778556 - DNA, 15 bp, Homo sapiens
tcgcaaggtcaggag

SEQ ID NO: 778557 - DNA, 15 bp, Homo sapiens
cgcaaggtcaggaga

SEQ ID NO: 778558 - DNA, 15 bp, Homo sapiens
gcaaggtcaggagaa

SEQ ID NO: 778559 - DNA, 15 bp, Homo sapiens
caaggtcaggagaat

SEQ ID NO: 778560 - DNA, 15 bp, Homo sapiens
aaggtcaggagaata

SEQ ID NO: 778561 - DNA, 15 bp, Homo sapiens
aggtcaggagaatat

SEQ ID NO: 778562 - DNA, 15 bp, Homo sapiens
ggtcaggagaatatg

SEQ ID NO: 778563 - DNA, 15 bp, Homo sapiens
gtcaggagaatatgt

SEQ ID NO: 778564 - DNA, 15 bp, Homo sapiens
tcaggagaatatgtc

SEQ ID NO: 778565 - DNA, 15 bp, Homo sapiens
caggagaatatgtct

SEQ ID NO: 778566 - DNA, 15 bp, Homo sapiens
aggagaatatgtctg

SEQ ID NO: 778567 - DNA, 15 bp, Homo sapiens
ggagaatatgtctga

SEQ ID NO: 778568 - DNA, 15 bp, Homo sapiens
gagaatatgtctgag

SEQ ID NO: 778569 - DNA, 15 bp, Homo sapiens
agaatatgtctgaga

SEQ ID NO: 778570 - DNA, 15 bp, Homo sapiens
gaatatgtctgagaa

SEQ ID NO: 778571 - DNA, 15 bp, Homo sapiens
aatatgtctgagaat

SEQ ID NO: 778572 - DNA, 15 bp, Homo sapiens
atatgtctgagaatt

SEQ ID NO: 778573 - DNA, 15 bp, Homo sapiens
tatgtctgagaattt

SEQ ID NO: 778574 - DNA, 15 bp, Homo sapiens
atgtctgagaatttt

SEQ ID NO: 778575 - DNA, 15 bp, Homo sapiens
tgtctgagaattttg

SEQ ID NO: 778576 - DNA, 15 bp, Homo sapiens
gtctgagaattttgt

SEQ ID NO: 778577 - DNA, 15 bp, Homo sapiens
tctgagaattttgta

SEQ ID NO: 778578 - DNA, 15 bp, Homo sapiens
ctgagaattttgtag

SEQ ID NO: 778579 - DNA, 15 bp, Homo sapiens
tgagaattttgtagc

SEQ ID NO: 778580 - DNA, 15 bp, Homo sapiens
gagaattttgtagca

SEQ ID NO: 778581 - DNA, 15 bp, Homo sapiens
agaattttgtagcag

SEQ ID NO: 778582 - DNA, 15 bp, Homo sapiens
gaattttgtagcagc

SEQ ID NO: 778583 - DNA, 15 bp, Homo sapiens
aattttgtagcagca

SEQ ID NO: 778584 - DNA, 15 bp, Homo sapiens
attttgtagcagcat

SEQ ID NO: 778585 - DNA, 15 bp, Homo sapiens
ttttgtagcagcatc

SEQ ID NO: 778586 - DNA, 15 bp, Homo sapiens
tttgtagcagcatca

SEQ ID NO: 778587 - DNA, 15 bp, Homo sapiens
ttgtagcagcatcat

SEQ ID NO: 778588 - DNA, 15 bp, Homo sapiens
tgtagcagcatcatt

SEQ ID NO: 778589 - DNA, 15 bp, Homo sapiens
gtagcagcatcattc

SEQ ID NO: 778590 - DNA, 15 bp, Homo sapiens
tagcagcatcattcc

SEQ ID NO: 778591 - DNA, 15 bp, Homo sapiens
agcagcatcattcct

SEQ ID NO: 778592 - DNA, 15 bp, Homo sapiens
gcagcatcattcctt

SEQ ID NO: 778593 - DNA, 15 bp, Homo sapiens
cagcatcattccttg

SEQ ID NO: 778594 - DNA, 15 bp, Homo sapiens
agcatcattccttga

SEQ ID NO: 778595 - DNA, 15 bp, Homo sapiens
gcatcattccttgag

SEQ ID NO: 778596 - DNA, 15 bp, Homo sapiens
catcattccttgagt

SEQ ID NO: 778597 - DNA, 15 bp, Homo sapiens
atcattccttgagtt

SEQ ID NO: 778598 - DNA, 15 bp, Homo sapiens
tcattccttgagttt

SEQ ID NO: 778599 - DNA, 15 bp, Homo sapiens
cattccttgagtttc

SEQ ID NO: 778600 - DNA, 15 bp, Homo sapiens
attccttgagtttct

SEQ ID NO: 778601 - DNA, 15 bp, Homo sapiens
ttccttgagtttctc

SEQ ID NO: 778602 - DNA, 15 bp, Homo sapiens
tccttgagtttctcc

SEQ ID NO: 778603 - DNA, 15 bp, Homo sapiens
ccttgagtttctcca

SEQ ID NO: 778604 - DNA, 15 bp, Homo sapiens
cttgagtttctccat

SEQ ID NO: 778605 - DNA, 15 bp, Homo sapiens
ttgagtttctccatc

SEQ ID NO: 778606 - DNA, 15 bp, Homo sapiens
tgagtttctccatcc

SEQ ID NO: 778607 - DNA, 15 bp, Homo sapiens
gagtttctccatcca

SEQ ID NO: 778608 - DNA, 15 bp, Homo sapiens
agtttctccatccac

SEQ ID NO: 778609 - DNA, 15 bp, Homo sapiens
gtttctccatccacc

SEQ ID NO: 778610 - DNA, 15 bp, Homo sapiens
tttctccatccacct

SEQ ID NO: 778611 - DNA, 15 bp, Homo sapiens
ttctccatccacctg

SEQ ID NO: 778612 - DNA, 15 bp, Homo sapiens
tctccatccacctgc

SEQ ID NO: 778613 - DNA, 15 bp, Homo sapiens
ctccatccacctgcc

SEQ ID NO: 778614 - DNA, 15 bp, Homo sapiens
tccatccacctgccc

SEQ ID NO: 778615 - DNA, 15 bp, Homo sapiens
ccatccacctgccca

SEQ ID NO: 778616 - DNA, 15 bp, Homo sapiens
catccacctgcccac

SEQ ID NO: 778617 - DNA, 15 bp, Homo sapiens
atccacctgcccact

SEQ ID NO: 778618 - DNA, 15 bp, Homo sapiens
tccacctgcccactg

SEQ ID NO: 778619 - DNA, 15 bp, Homo sapiens
ccacctgcccactgc

SEQ ID NO: 778620 - DNA, 15 bp, Homo sapiens
cacctgcccactgct

SEQ ID NO: 778621 - DNA, 15 bp, Homo sapiens
acctgcccactgctt

SEQ ID NO: 778622 - DNA, 15 bp, Homo sapiens
cctgcccactgcttc

SEQ ID NO: 778623 - DNA, 15 bp, Homo sapiens
ctgcccactgcttcg

SEQ ID NO: 778624 - DNA, 15 bp, Homo sapiens
tgcccactgcttcgg

SEQ ID NO: 778625 - DNA, 15 bp, Homo sapiens
gcccactgcttcggc

SEQ ID NO: 778626 - DNA, 15 bp, Homo sapiens
cccactgcttcggca

SEQ ID NO: 778627 - DNA, 15 bp, Homo sapiens
ccactgcttcggcag

SEQ ID NO: 778628 - DNA, 15 bp, Homo sapiens
cactgcttcggcagc

SEQ ID NO: 778629 - DNA, 15 bp, Homo sapiens
actgcttcggcagcc

SEQ ID NO: 778630 - DNA, 15 bp, Homo sapiens
ctgcttcggcagccc

SEQ ID NO: 778631 - DNA, 15 bp, Homo sapiens
tgcttcggcagcccc

SEQ ID NO: 778632 - DNA, 15 bp, Homo sapiens
gcttcggcagccccc

SEQ ID NO: 778633 - DNA, 15 bp, Homo sapiens
cttcggcagccccca

SEQ ID NO: 778634 - DNA, 15 bp, Homo sapiens
ttcggcagcccccac

SEQ ID NO: 778635 - DNA, 15 bp, Homo sapiens
tcggcagcccccaca

SEQ ID NO: 778636 - DNA, 15 bp, Homo sapiens
cggcagcccccacac

SEQ ID NO: 778637 - DNA, 15 bp, Homo sapiens
ggcagcccccacacc

SEQ ID NO: 778638 - DNA, 15 bp, Homo sapiens
gcagcccccacaccc

SEQ ID NO: 778639 - DNA, 15 bp, Homo sapiens
cagcccccacacccc

SEQ ID NO: 778640 - DNA, 15 bp, Homo sapiens
agcccccacacccca

SEQ ID NO: 778641 - DNA, 15 bp, Homo sapiens
gcccccacaccccag

SEQ ID NO: 778642 - DNA, 15 bp, Homo sapiens
cccccacaccccagg

SEQ ID NO: 778643 - DNA, 15 bp, Homo sapiens
ccccacaccccaggc

SEQ ID NO: 778644 - DNA, 15 bp, Homo sapiens
cccacaccccaggcc

SEQ ID NO: 778645 - DNA, 15 bp, Homo sapiens
ccacaccccaggccc

SEQ ID NO: 778646 - DNA, 15 bp, Homo sapiens
cacaccccaggccct

SEQ ID NO: 778647 - DNA, 15 bp, Homo sapiens
acaccccaggccctg

SEQ ID NO: 778648 - DNA, 15 bp, Homo sapiens
caccccaggccctgc

SEQ ID NO: 778649 - DNA, 15 bp, Homo sapiens
accccaggccctgct

SEQ ID NO: 778650 - DNA, 15 bp, Homo sapiens
ccccaggccctgctg

SEQ ID NO: 778651 - DNA, 15 bp, Homo sapiens
cccaggccctgctgg

SEQ ID NO: 778652 - DNA, 15 bp, Homo sapiens
ccaggccctgctggc

SEQ ID NO: 778653 - DNA, 15 bp, Homo sapiens
caggccctgctggca

SEQ ID NO: 778654 - DNA, 15 bp, Homo sapiens
aggccctgctggcag

SEQ ID NO: 778655 - DNA, 15 bp, Homo sapiens
ggccctgctggcagc

SEQ ID NO: 778656 - DNA, 15 bp, Homo sapiens
gccctgctggcagct

SEQ ID NO: 778657 - DNA, 15 bp, Homo sapiens
ccctgctggcagctc

SEQ ID NO: 778658 - DNA, 15 bp, Homo sapiens
cctgctggcagctca

SEQ ID NO: 778659 - DNA, 15 bp, Homo sapiens
ctgctggcagctcag

SEQ ID NO: 778660 - DNA, 15 bp, Homo sapiens
tgctggcagctcaga

SEQ ID NO: 778661 - DNA, 15 bp, Homo sapiens
gctggcagctcagag

SEQ ID NO: 778662 - DNA, 15 bp, Homo sapiens
ctggcagctcagagt

SEQ ID NO: 778663 - DNA, 15 bp, Homo sapiens
tggcagctcagagtc

SEQ ID NO: 778664 - DNA, 15 bp, Homo sapiens
ggcagctcagagtct

SEQ ID NO: 778665 - DNA, 15 bp, Homo sapiens
gcagctcagagtcta

SEQ ID NO: 778666 - DNA, 15 bp, Homo sapiens
cagctcagagtctaa

SEQ ID NO: 778667 - DNA, 15 bp, Homo sapiens
agctcagagtctaag

SEQ ID NO: 778668 - DNA, 15 bp, Homo sapiens
gctcagagtctaagc

SEQ ID NO: 778669 - DNA, 15 bp, Homo sapiens
ctcagagtctaagcc

SEQ ID NO: 778670 - DNA, 15 bp, Homo sapiens
tcagagtctaagcct

SEQ ID NO: 778671 - DNA, 15 bp, Homo sapiens
cagagtctaagcctt

SEQ ID NO: 778672 - DNA, 15 bp, Homo sapiens
agagtctaagcctta

SEQ ID NO: 778673 - DNA, 15 bp, Homo sapiens
gagtctaagccttac

SEQ ID NO: 778674 - DNA, 15 bp, Homo sapiens
agtctaagccttacc

SEQ ID NO: 778675 - DNA, 15 bp, Homo sapiens
gtctaagccttaccc

SEQ ID NO: 778676 - DNA, 15 bp, Homo sapiens
tctaagccttacccc

SEQ ID NO: 778677 - DNA, 15 bp, Homo sapiens
ctaagccttaccccc

SEQ ID NO: 778678 - DNA, 15 bp, Homo sapiens
taagccttaccccca

SEQ ID NO: 778679 - DNA, 15 bp, Homo sapiens
aagccttacccccaa

SEQ ID NO: 778680 - DNA, 15 bp, Homo sapiens
agccttacccccaag

SEQ ID NO: 778681 - DNA, 15 bp, Homo sapiens
gccttacccccaaga

SEQ ID NO: 778682 - DNA, 15 bp, Homo sapiens
ccttacccccaagag

SEQ ID NO: 778683 - DNA, 15 bp, Homo sapiens
cttacccccaagagg

SEQ ID NO: 778684 - DNA, 15 bp, Homo sapiens
ttacccccaagagga

SEQ ID NO: 778685 - DNA, 15 bp, Homo sapiens
tacccccaagaggac

SEQ ID NO: 778686 - DNA, 15 bp, Homo sapiens
acccccaagaggacc

SEQ ID NO: 778687 - DNA, 15 bp, Homo sapiens
cccccaagaggaccc

SEQ ID NO: 778688 - DNA, 15 bp, Homo sapiens
ccccaagaggacccc

SEQ ID NO: 778689 - DNA, 15 bp, Homo sapiens
cccaagaggacccct

SEQ ID NO: 778690 - DNA, 15 bp, Homo sapiens
ccaagaggacccctg

SEQ ID NO: 778691 - DNA, 15 bp, Homo sapiens
caagaggacccctga

SEQ ID NO: 778692 - DNA, 15 bp, Homo sapiens
aagaggacccctgat

SEQ ID NO: 778693 - DNA, 15 bp, Homo sapiens
agaggacccctgatc

SEQ ID NO: 778694 - DNA, 15 bp, Homo sapiens
gaggacccctgatca

SEQ ID NO: 778695 - DNA, 15 bp, Homo sapiens
aggacccctgatcag

SEQ ID NO: 778696 - DNA, 15 bp, Homo sapiens
ggacccctgatcagg

SEQ ID NO: 778697 - DNA, 15 bp, Homo sapiens
gacccctgatcaggg

SEQ ID NO: 778698 - DNA, 15 bp, Homo sapiens
acccctgatcagggc

SEQ ID NO: 778699 - DNA, 15 bp, Homo sapiens
cccctgatcagggcc

SEQ ID NO: 778700 - DNA, 15 bp, Homo sapiens
ccctgatcagggcct

SEQ ID NO: 778701 - DNA, 15 bp, Homo sapiens
cctgatcagggcctg

SEQ ID NO: 778702 - DNA, 15 bp, Homo sapiens
ctgatcagggcctgc

SEQ ID NO: 778703 - DNA, 15 bp, Homo sapiens
tgatcagggcctgca

SEQ ID NO: 778704 - DNA, 15 bp, Homo sapiens
gatcagggcctgcag

SEQ ID NO: 778705 - DNA, 15 bp, Homo sapiens
atcagggcctgcagg

SEQ ID NO: 778706 - DNA, 15 bp, Homo sapiens
tcagggcctgcaggc

SEQ ID NO: 778707 - DNA, 15 bp, Homo sapiens
cagggcctgcaggcc

SEQ ID NO: 778708 - DNA, 15 bp, Homo sapiens
agggcctgcaggcca

SEQ ID NO: 778709 - DNA, 15 bp, Homo sapiens
gggcctgcaggccag

SEQ ID NO: 778710 - DNA, 15 bp, Homo sapiens
ggcctgcaggccagg

SEQ ID NO: 778711 - DNA, 15 bp, Homo sapiens
gcctgcaggccaggc

SEQ ID NO: 778712 - DNA, 15 bp, Homo sapiens
cctgcaggccaggca

SEQ ID NO: 778713 - DNA, 15 bp, Homo sapiens
ctgcaggccaggcac

SEQ ID NO: 778714 - DNA, 15 bp, Homo sapiens
tgcaggccaggcacc

SEQ ID NO: 778715 - DNA, 15 bp, Homo sapiens
gcaggccaggcacct

SEQ ID NO: 778716 - DNA, 15 bp, Homo sapiens
caggccaggcacctc

SEQ ID NO: 778717 - DNA, 15 bp, Homo sapiens
aggccaggcacctca

SEQ ID NO: 778718 - DNA, 15 bp, Homo sapiens
ggccaggcacctcag

SEQ ID NO: 778719 - DNA, 15 bp, Homo sapiens
gccaggcacctcagc

SEQ ID NO: 778720 - DNA, 15 bp, Homo sapiens
ccaggcacctcagct

SEQ ID NO: 778721 - DNA, 15 bp, Homo sapiens
caggcacctcagctc

SEQ ID NO: 778722 - DNA, 15 bp, Homo sapiens
aggcacctcagctcg

SEQ ID NO: 778723 - DNA, 15 bp, Homo sapiens
ggcacctcagctcgc

SEQ ID NO: 778724 - DNA, 15 bp, Homo sapiens
gcacctcagctcgca

SEQ ID NO: 778725 - DNA, 15 bp, Homo sapiens
cacctcagctcgcag

SEQ ID NO: 778726 - DNA, 15 bp, Homo sapiens
acctcagctcgcagc

SEQ ID NO: 778727 - DNA, 15 bp, Homo sapiens
cctcagctcgcagca

SEQ ID NO: 778728 - DNA, 15 bp, Homo sapiens
ctcagctcgcagcag

SEQ ID NO: 778729 - DNA, 15 bp, Homo sapiens
tcagctcgcagcagc

SEQ ID NO: 778730 - DNA, 15 bp, Homo sapiens
cagctcgcagcagct

SEQ ID NO: 778731 - DNA, 15 bp, Homo sapiens
agctcgcagcagctt

SEQ ID NO: 778732 - DNA, 15 bp, Homo sapiens
gctcgcagcagcttc

SEQ ID NO: 778733 - DNA, 15 bp, Homo sapiens
ctcgcagcagcttct

SEQ ID NO: 778734 - DNA, 15 bp, Homo sapiens
tcgcagcagcttctg

SEQ ID NO: 778735 - DNA, 15 bp, Homo sapiens
cgcagcagcttctgg

SEQ ID NO: 778736 - DNA, 15 bp, Homo sapiens
gcagcagcttctggt

SEQ ID NO: 778737 - DNA, 15 bp, Homo sapiens
cagcagcttctggtc

SEQ ID NO: 778738 - DNA, 15 bp, Homo sapiens
agcagcttctggtct

SEQ ID NO: 778739 - DNA, 15 bp, Homo sapiens
gcagcttctggtctg

SEQ ID NO: 778740 - DNA, 15 bp, Homo sapiens
cagcttctggtctgc

SEQ ID NO: 778741 - DNA, 15 bp, Homo sapiens
agcttctggtctgca

SEQ ID NO: 778742 - DNA, 15 bp, Homo sapiens
gcttctggtctgcag

SEQ ID NO: 778743 - DNA, 15 bp, Homo sapiens
cttctggtctgcagg

SEQ ID NO: 778744 - DNA, 15 bp, Homo sapiens
ttctggtctgcaggc

SEQ ID NO: 778745 - DNA, 15 bp, Homo sapiens
tctggtctgcaggcc

SEQ ID NO: 778746 - DNA, 15 bp, Homo sapiens
ctggtctgcaggcct

SEQ ID NO: 778747 - DNA, 15 bp, Homo sapiens
tggtctgcaggcctc

SEQ ID NO: 778748 - DNA, 15 bp, Homo sapiens
ggtctgcaggcctcg

SEQ ID NO: 778749 - DNA, 15 bp, Homo sapiens
gtctgcaggcctcga

SEQ ID NO: 778750 - DNA, 15 bp, Homo sapiens
tctgcaggcctcgag

SEQ ID NO: 778751 - DNA, 15 bp, Homo sapiens
ctgcaggcctcgagc

SEQ ID NO: 778752 - DNA, 15 bp, Homo sapiens
tgcaggcctcgagcc

SEQ ID NO: 778753 - DNA, 15 bp, Homo sapiens
gcaggcctcgagcca

SEQ ID NO: 778754 - DNA, 15 bp, Homo sapiens
caggcctcgagccat

SEQ ID NO: 778755 - DNA, 15 bp, Homo sapiens
aggcctcgagccatg

SEQ ID NO: 778756 - DNA, 15 bp, Homo sapiens
ggcctcgagccatgt

SEQ ID NO: 778757 - DNA, 15 bp, Homo sapiens
gcctcgagccatgtg

SEQ ID NO: 778758 - DNA, 15 bp, Homo sapiens
cctcgagccatgtgc

SEQ ID NO: 778759 - DNA, 15 bp, Homo sapiens
ctcgagccatgtgct

SEQ ID NO: 778760 - DNA, 15 bp, Homo sapiens
tcgagccatgtgctg

SEQ ID NO: 778761 - DNA, 15 bp, Homo sapiens
cgagccatgtgctgg

SEQ ID NO: 778762 - DNA, 15 bp, Homo sapiens
gagccatgtgctggg

SEQ ID NO: 778763 - DNA, 15 bp, Homo sapiens
agccatgtgctgggc

SEQ ID NO: 778764 - DNA, 15 bp, Homo sapiens
gccatgtgctgggct

SEQ ID NO: 778765 - DNA, 15 bp, Homo sapiens
ccatgtgctgggctc

SEQ ID NO: 778766 - DNA, 15 bp, Homo sapiens
catgtgctgggctct

SEQ ID NO: 778767 - DNA, 15 bp, Homo sapiens
atgtgctgggctctc

SEQ ID NO: 778768 - DNA, 15 bp, Homo sapiens
tgtgctgggctctcc

SEQ ID NO: 778769 - DNA, 15 bp, Homo sapiens
gtgctgggctctccg

SEQ ID NO: 778770 - DNA, 15 bp, Homo sapiens
tgctgggctctccgg

SEQ ID NO: 778771 - DNA, 15 bp, Homo sapiens
gctgggctctccggc

SEQ ID NO: 778772 - DNA, 15 bp, Homo sapiens
ctgggctctccggca

SEQ ID NO: 778773 - DNA, 15 bp, Homo sapiens
tgggctctccggcac

SEQ ID NO: 778774 - DNA, 15 bp, Homo sapiens
gggctctccggcacg

SEQ ID NO: 778775 - DNA, 15 bp, Homo sapiens
ggctctccggcacgc

SEQ ID NO: 778776 - DNA, 15 bp, Homo sapiens
gctctccggcacgcc

SEQ ID NO: 778777 - DNA, 15 bp, Homo sapiens
ctctccggcacgccc

SEQ ID NO: 778778 - DNA, 15 bp, Homo sapiens
tctccggcacgccct

SEQ ID NO: 778779 - DNA, 15 bp, Homo sapiens
ctccggcacgccctg

SEQ ID NO: 778780 - DNA, 15 bp, Homo sapiens
tccggcacgccctgt

SEQ ID NO: 778781 - DNA, 15 bp, Homo sapiens
ccggcacgccctgta

SEQ ID NO: 778782 - DNA, 15 bp, Homo sapiens
cggcacgccctgtaa

SEQ ID NO: 778783 - DNA, 15 bp, Homo sapiens
ggcacgccctgtaaa

SEQ ID NO: 778784 - DNA, 15 bp, Homo sapiens
gcacgccctgtaaag

SEQ ID NO: 778785 - DNA, 15 bp, Homo sapiens
cacgccctgtaaaga

SEQ ID NO: 778786 - DNA, 15 bp, Homo sapiens
acgccctgtaaagag

SEQ ID NO: 778787 - DNA, 15 bp, Homo sapiens
cgccctgtaaagagc

SEQ ID NO: 778788 - DNA, 15 bp, Homo sapiens
gccctgtaaagagca

SEQ ID NO: 778789 - DNA, 15 bp, Homo sapiens
ccctgtaaagagcag

SEQ ID NO: 778790 - DNA, 15 bp, Homo sapiens
cctgtaaagagcagc

SEQ ID NO: 778791 - DNA, 15 bp, Homo sapiens
ctgtaaagagcagct

SEQ ID NO: 778792 - DNA, 15 bp, Homo sapiens
tgtaaagagcagctg

SEQ ID NO: 778793 - DNA, 15 bp, Homo sapiens
gtaaagagcagctgt

SEQ ID NO: 778794 - DNA, 15 bp, Homo sapiens
taaagagcagctgtt

SEQ ID NO: 778795 - DNA, 15 bp, Homo sapiens
aaagagcagctgtta

SEQ ID NO: 778796 - DNA, 15 bp, Homo sapiens
aagagcagctgttaa

SEQ ID NO: 778797 - DNA, 15 bp, Homo sapiens
agagcagctgttaat

SEQ ID NO: 778798 - DNA, 15 bp, Homo sapiens
gagcagctgttaatt

SEQ ID NO: 778799 - DNA, 15 bp, Homo sapiens
agcagctgttaattt

SEQ ID NO: 778800 - DNA, 15 bp, Homo sapiens
gcagctgttaatttt

SEQ ID NO: 778801 - DNA, 15 bp, Homo sapiens
cagctgttaatttta

SEQ ID NO: 778802 - DNA, 15 bp, Homo sapiens
agctgttaattttac

SEQ ID NO: 778803 - DNA, 15 bp, Homo sapiens
gctgttaattttact

SEQ ID NO: 778804 - DNA, 15 bp, Homo sapiens
ctgttaattttacta

SEQ ID NO: 778805 - DNA, 15 bp, Homo sapiens
tgttaattttactag

SEQ ID NO: 778806 - DNA, 15 bp, Homo sapiens
gttaattttactagc

SEQ ID NO: 778807 - DNA, 15 bp, Homo sapiens
ttaattttactagct

SEQ ID NO: 778808 - DNA, 15 bp, Homo sapiens
taattttactagctg

SEQ ID NO: 778809 - DNA, 15 bp, Homo sapiens
aattttactagctgg

SEQ ID NO: 778810 - DNA, 15 bp, Homo sapiens
attttactagctggt

SEQ ID NO: 778811 - DNA, 15 bp, Homo sapiens
ttttactagctggtg

SEQ ID NO: 778812 - DNA, 15 bp, Homo sapiens
tttactagctggtgt

SEQ ID NO: 778813 - DNA, 15 bp, Homo sapiens
ttactagctggtgtg

SEQ ID NO: 778814 - DNA, 15 bp, Homo sapiens
tactagctggtgtgt

SEQ ID NO: 778815 - DNA, 15 bp, Homo sapiens
actagctggtgtgtt

SEQ ID NO: 778816 - DNA, 15 bp, Homo sapiens
ctagctggtgtgttg

SEQ ID NO: 778817 - DNA, 15 bp, Homo sapiens
tagctggtgtgttgg

SEQ ID NO: 778818 - DNA, 15 bp, Homo sapiens
agctggtgtgttggc

SEQ ID NO: 778819 - DNA, 15 bp, Homo sapiens
gctggtgtgttggct

SEQ ID NO: 778820 - DNA, 15 bp, Homo sapiens
ctggtgtgttggctc

SEQ ID NO: 778821 - DNA, 15 bp, Homo sapiens
tggtgtgttggctcc

SEQ ID NO: 778822 - DNA, 15 bp, Homo sapiens
ggtgtgttggctcct

SEQ ID NO: 778823 - DNA, 15 bp, Homo sapiens
gtgtgttggctcctc

SEQ ID NO: 778824 - DNA, 15 bp, Homo sapiens
tgtgttggctcctct

SEQ ID NO: 778825 - DNA, 15 bp, Homo sapiens
gtgttggctcctctg

SEQ ID NO: 778826 - DNA, 15 bp, Homo sapiens
tgttggctcctctgc

SEQ ID NO: 778827 - DNA, 15 bp, Homo sapiens
gttggctcctctgcc

SEQ ID NO: 778828 - DNA, 15 bp, Homo sapiens
ttggctcctctgccc

SEQ ID NO: 778829 - DNA, 15 bp, Homo sapiens
tggctcctctgccct

SEQ ID NO: 778830 - DNA, 15 bp, Homo sapiens
ggctcctctgccctc

SEQ ID NO: 778831 - DNA, 15 bp, Homo sapiens
gctcctctgccctcc

SEQ ID NO: 778832 - DNA, 15 bp, Homo sapiens
tcctctgccctcccc

SEQ ID NO: 778833 - DNA, 15 bp, Homo sapiens
cctctgccctcccca

SEQ ID NO: 778834 - DNA, 15 bp, Homo sapiens
ctctgccctccccag

SEQ ID NO: 778835 - DNA, 15 bp, Homo sapiens
tctgccctccccagg

SEQ ID NO: 778836 - DNA, 15 bp, Homo sapiens
ctgccctccccaggg

SEQ ID NO: 778837 - DNA, 15 bp, Homo sapiens
tgccctccccagggc

SEQ ID NO: 778838 - DNA, 15 bp, Homo sapiens
gccctccccagggct

SEQ ID NO: 778839 - DNA, 15 bp, Homo sapiens
ccctccccagggctg

SEQ ID NO: 778840 - DNA, 15 bp, Homo sapiens
cctccccagggctgc

SEQ ID NO: 778841 - DNA, 15 bp, Homo sapiens
ctccccagggctgct

SEQ ID NO: 778842 - DNA, 15 bp, Homo sapiens
tccccagggctgctg

SEQ ID NO: 778843 - DNA, 15 bp, Homo sapiens
ccccagggctgctgt

SEQ ID NO: 778844 - DNA, 15 bp, Homo sapiens
cccagggctgctgtg

SEQ ID NO: 778845 - DNA, 15 bp, Homo sapiens
ccagggctgctgtga

SEQ ID NO: 778846 - DNA, 15 bp, Homo sapiens
cagggctgctgtgaa

SEQ ID NO: 778847 - DNA, 15 bp, Homo sapiens
agggctgctgtgaaa

SEQ ID NO: 778848 - DNA, 15 bp, Homo sapiens
gggctgctgtgaaaa

SEQ ID NO: 778849 - DNA, 15 bp, Homo sapiens
ggctgctgtgaaaat

SEQ ID NO: 778850 - DNA, 15 bp, Homo sapiens
gctgctgtgaaaatg

SEQ ID NO: 778851 - DNA, 15 bp, Homo sapiens
ctgctgtgaaaatga

SEQ ID NO: 778852 - DNA, 15 bp, Homo sapiens
tgctgtgaaaatgaa

SEQ ID NO: 778853 - DNA, 15 bp, Homo sapiens
gctgtgaaaatgaag

SEQ ID NO: 778854 - DNA, 15 bp, Homo sapiens
ctgtgaaaatgaagg

SEQ ID NO: 778855 - DNA, 15 bp, Homo sapiens
tgtgaaaatgaagga

SEQ ID NO: 778856 - DNA, 15 bp, Homo sapiens
gtgaaaatgaaggag

SEQ ID NO: 778857 - DNA, 15 bp, Homo sapiens
tgaaaatgaaggaga

SEQ ID NO: 778858 - DNA, 15 bp, Homo sapiens
gaaaatgaaggagag

SEQ ID NO: 778859 - DNA, 15 bp, Homo sapiens
aaaatgaaggagagt

SEQ ID NO: 778860 - DNA, 15 bp, Homo sapiens
aaatgaaggagagtt

SEQ ID NO: 778861 - DNA, 15 bp, Homo sapiens
aatgaaggagagttt

SEQ ID NO: 778862 - DNA, 15 bp, Homo sapiens
atgaaggagagtttc

SEQ ID NO: 778863 - DNA, 15 bp, Homo sapiens
tgaaggagagtttca

SEQ ID NO: 778864 - DNA, 15 bp, Homo sapiens
gaaggagagtttcag

SEQ ID NO: 778865 - DNA, 15 bp, Homo sapiens
aaggagagtttcaga

SEQ ID NO: 778866 - DNA, 15 bp, Homo sapiens
aggagagtttcagaa

SEQ ID NO: 778867 - DNA, 15 bp, Homo sapiens
ggagagtttcagaaa

SEQ ID NO: 778868 - DNA, 15 bp, Homo sapiens
gagagtttcagaaat

SEQ ID NO: 778869 - DNA, 15 bp, Homo sapiens
agagtttcagaaatc

SEQ ID NO: 778870 - DNA, 15 bp, Homo sapiens
gagtttcagaaatca

SEQ ID NO: 778871 - DNA, 15 bp, Homo sapiens
agtttcagaaatcaa

SEQ ID NO: 778872 - DNA, 15 bp, Homo sapiens
tgatgtttgctctgt

SEQ ID NO: 778873 - DNA, 15 bp, Homo sapiens
gatgtttgctctgtg

SEQ ID NO: 778874 - DNA, 15 bp, Homo sapiens
atgtttgctctgtgc

SEQ ID NO: 778875 - DNA, 15 bp, Homo sapiens
tgtttgctctgtgca

SEQ ID NO: 778876 - DNA, 15 bp, Homo sapiens
gtttgctctgtgcac

SEQ ID NO: 778877 - DNA, 15 bp, Homo sapiens
tttgctctgtgcaca

SEQ ID NO: 778878 - DNA, 15 bp, Homo sapiens
ttgctctgtgcacac

SEQ ID NO: 778879 - DNA, 15 bp, Homo sapiens
tgctctgtgcacaca

SEQ ID NO: 778880 - DNA, 15 bp, Homo sapiens
gctctgtgcacacac

SEQ ID NO: 778881 - DNA, 15 bp, Homo sapiens
ctctgtgcacacact

SEQ ID NO: 778882 - DNA, 15 bp, Homo sapiens
tctgtgcacacactt

SEQ ID NO: 778883 - DNA, 15 bp, Homo sapiens
ctgtgcacacactta

SEQ ID NO: 778884 - DNA, 15 bp, Homo sapiens
tgtgcacacacttaa

SEQ ID NO: 778885 - DNA, 15 bp, Homo sapiens
gtgcacacacttaat

SEQ ID NO: 778886 - DNA, 15 bp, Homo sapiens
tgcacacacttaatt

SEQ ID NO: 778887 - DNA, 15 bp, Homo sapiens
gcacacacttaattc

SEQ ID NO: 778888 - DNA, 15 bp, Homo sapiens
cacacacttaattca

SEQ ID NO: 778889 - DNA, 15 bp, Homo sapiens
acacacttaattcag

SEQ ID NO: 778890 - DNA, 15 bp, Homo sapiens
cacacttaattcagg

SEQ ID NO: 778891 - DNA, 15 bp, Homo sapiens
acacttaattcaggc

SEQ ID NO: 778892 - DNA, 15 bp, Homo sapiens
cacttaattcaggct

SEQ ID NO: 778893 - DNA, 15 bp, Homo sapiens
acttaattcaggctt

SEQ ID NO: 778894 - DNA, 15 bp, Homo sapiens
cttaattcaggcttg

SEQ ID NO: 778895 - DNA, 15 bp, Homo sapiens
ttaattcaggcttgt

SEQ ID NO: 778896 - DNA, 15 bp, Homo sapiens
taattcaggcttgtc

SEQ ID NO: 778897 - DNA, 15 bp, Homo sapiens
aattcaggcttgtcc

SEQ ID NO: 778898 - DNA, 15 bp, Homo sapiens
attcaggcttgtcca

SEQ ID NO: 778899 - DNA, 15 bp, Homo sapiens
ttcaggcttgtccag

SEQ ID NO: 778900 - DNA, 15 bp, Homo sapiens
tcaggcttgtccagg

SEQ ID NO: 778901 - DNA, 15 bp, Homo sapiens
caggcttgtccaggc

SEQ ID NO: 778902 - DNA, 15 bp, Homo sapiens
aggcttgtccaggct

SEQ ID NO: 778903 - DNA, 15 bp, Homo sapiens
ggcttgtccaggctg

SEQ ID NO: 778904 - DNA, 15 bp, Homo sapiens
gcttgtccaggctgc

SEQ ID NO: 778905 - DNA, 15 bp, Homo sapiens
cttgtccaggctgcg

SEQ ID NO: 778906 - DNA, 15 bp, Homo sapiens
ttgtccaggctgcgt

SEQ ID NO: 778907 - DNA, 15 bp, Homo sapiens
tgtccaggctgcgtc

SEQ ID NO: 778908 - DNA, 15 bp, Homo sapiens
gtccaggctgcgtcc

SEQ ID NO: 778909 - DNA, 15 bp, Homo sapiens
tccaggctgcgtcct

SEQ ID NO: 778910 - DNA, 15 bp, Homo sapiens
ccaggctgcgtcctc

SEQ ID NO: 778911 - DNA, 15 bp, Homo sapiens
caggctgcgtcctct

SEQ ID NO: 778912 - DNA, 15 bp, Homo sapiens
aggctgcgtcctctt

SEQ ID NO: 778913 - DNA, 15 bp, Homo sapiens
ggctgcgtcctcttt

SEQ ID NO: 778914 - DNA, 15 bp, Homo sapiens
gctgcgtcctctttg

SEQ ID NO: 778915 - DNA, 15 bp, Homo sapiens
ctgcgtcctctttgc

SEQ ID NO: 778916 - DNA, 15 bp, Homo sapiens
tgcgtcctctttgca

SEQ ID NO: 778917 - DNA, 15 bp, Homo sapiens
gcgtcctctttgcag

SEQ ID NO: 778918 - DNA, 15 bp, Homo sapiens
cgtcctctttgcagc

SEQ ID NO: 778919 - DNA, 15 bp, Homo sapiens
gtcctctttgcagct

SEQ ID NO: 778920 - DNA, 15 bp, Homo sapiens
tcctctttgcagctg

SEQ ID NO: 778921 - DNA, 15 bp, Homo sapiens
cctctttgcagctgg

SEQ ID NO: 778922 - DNA, 15 bp, Homo sapiens
ctctttgcagctggc

SEQ ID NO: 778923 - DNA, 15 bp, Homo sapiens
tctttgcagctggct

SEQ ID NO: 778924 - DNA, 15 bp, Homo sapiens
ctttgcagctggctc

SEQ ID NO: 778925 - DNA, 15 bp, Homo sapiens
tttgcagctggctca

SEQ ID NO: 778926 - DNA, 15 bp, Homo sapiens
ttgcagctggctcat

SEQ ID NO: 778927 - DNA, 15 bp, Homo sapiens
tgcagctggctcatg

SEQ ID NO: 778928 - DNA, 15 bp, Homo sapiens
gcagctggctcatgc

SEQ ID NO: 778929 - DNA, 15 bp, Homo sapiens
cagctggctcatgcc

SEQ ID NO: 778930 - DNA, 15 bp, Homo sapiens
agctggctcatgcca

SEQ ID NO: 778931 - DNA, 15 bp, Homo sapiens
gctggctcatgccag

SEQ ID NO: 778932 - DNA, 15 bp, Homo sapiens
ctggctcatgccagc

SEQ ID NO: 778933 - DNA, 15 bp, Homo sapiens
tggctcatgccagcc

SEQ ID NO: 778934 - DNA, 15 bp, Homo sapiens
ggctcatgccagcct

SEQ ID NO: 778935 - DNA, 15 bp, Homo sapiens
gctcatgccagcctg

SEQ ID NO: 778936 - DNA, 15 bp, Homo sapiens
ctcatgccagcctga

SEQ ID NO: 778937 - DNA, 15 bp, Homo sapiens
tcatgccagcctgac

SEQ ID NO: 778938 - DNA, 15 bp, Homo sapiens
catgccagcctgact

SEQ ID NO: 778939 - DNA, 15 bp, Homo sapiens
atgccagcctgactc

SEQ ID NO: 778940 - DNA, 15 bp, Homo sapiens
tgccagcctgactca

SEQ ID NO: 778941 - DNA, 15 bp, Homo sapiens
gccagcctgactcac

SEQ ID NO: 778942 - DNA, 15 bp, Homo sapiens
ccagcctgactcacc

SEQ ID NO: 778943 - DNA, 15 bp, Homo sapiens
cagcctgactcacca

SEQ ID NO: 778944 - DNA, 15 bp, Homo sapiens
agcctgactcaccat

SEQ ID NO: 778945 - DNA, 15 bp, Homo sapiens
gcctgactcaccatt

SEQ ID NO: 778946 - DNA, 15 bp, Homo sapiens
cctgactcaccattg

SEQ ID NO: 778947 - DNA, 15 bp, Homo sapiens
ctgactcaccattgt

SEQ ID NO: 778948 - DNA, 15 bp, Homo sapiens
tgactcaccattgtc

SEQ ID NO: 778949 - DNA, 15 bp, Homo sapiens
gactcaccattgtca

SEQ ID NO: 778950 - DNA, 15 bp, Homo sapiens
actcaccattgtcaa

SEQ ID NO: 778951 - DNA, 15 bp, Homo sapiens
ctcaccattgtcaaa

SEQ ID NO: 778952 - DNA, 15 bp, Homo sapiens
tcaccattgtcaaat

SEQ ID NO: 778953 - DNA, 15 bp, Homo sapiens
caccattgtcaaatt

SEQ ID NO: 778954 - DNA, 15 bp, Homo sapiens
accattgtcaaattg

SEQ ID NO: 778955 - DNA, 15 bp, Homo sapiens
ccattgtcaaattgg

SEQ ID NO: 778956 - DNA, 15 bp, Homo sapiens
cattgtcaaattggc

SEQ ID NO: 778957 - DNA, 15 bp, Homo sapiens
attgtcaaattggcc

SEQ ID NO: 778958 - DNA, 15 bp, Homo sapiens
ttgtcaaattggcca

SEQ ID NO: 778959 - DNA, 15 bp, Homo sapiens
tgtcaaattggccag

SEQ ID NO: 778960 - DNA, 15 bp, Homo sapiens
gtcaaattggccagg

SEQ ID NO: 778961 - DNA, 15 bp, Homo sapiens
tcaaattggccagga

SEQ ID NO: 778962 - DNA, 15 bp, Homo sapiens
caaattggccaggaa

SEQ ID NO: 778963 - DNA, 15 bp, Homo sapiens
aaattggccaggaaa

SEQ ID NO: 778964 - DNA, 15 bp, Homo sapiens
aattggccaggaaat

SEQ ID NO: 778965 - DNA, 15 bp, Homo sapiens
attggccaggaaatt

SEQ ID NO: 778966 - DNA, 15 bp, Homo sapiens
ttggccaggaaattc

SEQ ID NO: 778967 - DNA, 15 bp, Homo sapiens
tggccaggaaattct

SEQ ID NO: 778968 - DNA, 15 bp, Homo sapiens
ggccaggaaattctc

SEQ ID NO: 778969 - DNA, 15 bp, Homo sapiens
gccaggaaattctca

SEQ ID NO: 778970 - DNA, 15 bp, Homo sapiens
ccaggaaattctcac

SEQ ID NO: 778971 - DNA, 15 bp, Homo sapiens
caggaaattctcact

SEQ ID NO: 778972 - DNA, 15 bp, Homo sapiens
aggaaattctcactt

SEQ ID NO: 778973 - DNA, 15 bp, Homo sapiens
ggaaattctcacttc

SEQ ID NO: 778974 - DNA, 15 bp, Homo sapiens
gaaattctcacttca

SEQ ID NO: 778975 - DNA, 15 bp, Homo sapiens
aaattctcacttcat

SEQ ID NO: 778976 - DNA, 15 bp, Homo sapiens
aattctcacttcata

SEQ ID NO: 778977 - DNA, 15 bp, Homo sapiens
attctcacttcatat

SEQ ID NO: 778978 - DNA, 15 bp, Homo sapiens
ttctcacttcatata

SEQ ID NO: 778979 - DNA, 15 bp, Homo sapiens
tctcacttcatatag

SEQ ID NO: 778980 - DNA, 15 bp, Homo sapiens
ctcacttcatatagc

SEQ ID NO: 778981 - DNA, 15 bp, Homo sapiens
tcacttcatatagcc

SEQ ID NO: 778982 - DNA, 15 bp, Homo sapiens
cacttcatatagcct

SEQ ID NO: 778983 - DNA, 15 bp, Homo sapiens
acttcatatagcctc

SEQ ID NO: 778984 - DNA, 15 bp, Homo sapiens
cttcatatagcctcc

SEQ ID NO: 778985 - DNA, 15 bp, Homo sapiens
ttcatatagcctccc

SEQ ID NO: 778986 - DNA, 15 bp, Homo sapiens
tcatatagcctccct

SEQ ID NO: 778987 - DNA, 15 bp, Homo sapiens
catatagcctccctg

SEQ ID NO: 778988 - DNA, 15 bp, Homo sapiens
atatagcctccctga

SEQ ID NO: 778989 - DNA, 15 bp, Homo sapiens
tatagcctccctgag

SEQ ID NO: 778990 - DNA, 15 bp, Homo sapiens
atagcctccctgagc

SEQ ID NO: 778991 - DNA, 15 bp, Homo sapiens
tagcctccctgagct

SEQ ID NO: 778992 - DNA, 15 bp, Homo sapiens
agcctccctgagctg

SEQ ID NO: 778993 - DNA, 15 bp, Homo sapiens
gcctccctgagctgg

SEQ ID NO: 778994 - DNA, 15 bp, Homo sapiens
cctccctgagctggc

SEQ ID NO: 778995 - DNA, 15 bp, Homo sapiens
ctccctgagctggct

SEQ ID NO: 778996 - DNA, 15 bp, Homo sapiens
tccctgagctggctg

SEQ ID NO: 778997 - DNA, 15 bp, Homo sapiens
ccctgagctggctgg

SEQ ID NO: 778998 - DNA, 15 bp, Homo sapiens
cctgagctggctggg

SEQ ID NO: 778999 - DNA, 15 bp, Homo sapiens
ctgagctggctgggg

SEQ ID NO: 779000 - DNA, 15 bp, Homo sapiens
tgagctggctgggga

SEQ ID NO: 779001 - DNA, 15 bp, Homo sapiens
gagctggctggggac

SEQ ID NO: 779002 - DNA, 15 bp, Homo sapiens
agctggctggggact

SEQ ID NO: 779003 - DNA, 15 bp, Homo sapiens
gctggctggggactg

SEQ ID NO: 779004 - DNA, 15 bp, Homo sapiens
ctggctggggactgg

SEQ ID NO: 779005 - DNA, 15 bp, Homo sapiens
tggctggggactgga

SEQ ID NO: 779006 - DNA, 15 bp, Homo sapiens
ggctggggactggag

SEQ ID NO: 779007 - DNA, 15 bp, Homo sapiens
gctggggactggaga

SEQ ID NO: 779008 - DNA, 15 bp, Homo sapiens
ctggggactggagaa

SEQ ID NO: 779009 - DNA, 15 bp, Homo sapiens
tggggactggagaac

SEQ ID NO: 779010 - DNA, 15 bp, Homo sapiens
ggggactggagaacg

SEQ ID NO: 779011 - DNA, 15 bp, Homo sapiens
gggactggagaacgg

SEQ ID NO: 779012 - DNA, 15 bp, Homo sapiens
ggactggagaacggg

SEQ ID NO: 779013 - DNA, 15 bp, Homo sapiens
gactggagaacgggc

SEQ ID NO: 779014 - DNA, 15 bp, Homo sapiens
actggagaacgggct

SEQ ID NO: 779015 - DNA, 15 bp, Homo sapiens
ctggagaacgggctg

SEQ ID NO: 779016 - DNA, 15 bp, Homo sapiens
tggagaacgggctgg

SEQ ID NO: 779017 - DNA, 15 bp, Homo sapiens
ggagaacgggctggg

SEQ ID NO: 779018 - DNA, 15 bp, Homo sapiens
gagaacgggctgggc

SEQ ID NO: 779019 - DNA, 15 bp, Homo sapiens
agaacgggctgggct

SEQ ID NO: 779020 - DNA, 15 bp, Homo sapiens
gaacgggctgggctc

SEQ ID NO: 779021 - DNA, 15 bp, Homo sapiens
aacgggctgggctct

SEQ ID NO: 779022 - DNA, 15 bp, Homo sapiens
acgggctgggctctc

SEQ ID NO: 779023 - DNA, 15 bp, Homo sapiens
cgggctgggctctcc

SEQ ID NO: 779024 - DNA, 15 bp, Homo sapiens
gggctgggctctccc

SEQ ID NO: 779025 - DNA, 15 bp, Homo sapiens
ggctgggctctccct

SEQ ID NO: 779026 - DNA, 15 bp, Homo sapiens
gctgggctctccctg

SEQ ID NO: 779027 - DNA, 15 bp, Homo sapiens
ctgggctctccctgg

SEQ ID NO: 779028 - DNA, 15 bp, Homo sapiens
tgggctctccctgga

SEQ ID NO: 779029 - DNA, 15 bp, Homo sapiens
gggctctccctggag

SEQ ID NO: 779030 - DNA, 15 bp, Homo sapiens
ggctctccctggagc

SEQ ID NO: 779031 - DNA, 15 bp, Homo sapiens
gctctccctggagct

SEQ ID NO: 779032 - DNA, 15 bp, Homo sapiens
ctctccctggagctg

SEQ ID NO: 779033 - DNA, 15 bp, Homo sapiens
tctccctggagctgt

SEQ ID NO: 779034 - DNA, 15 bp, Homo sapiens
ctccctggagctgta

SEQ ID NO: 779035 - DNA, 15 bp, Homo sapiens
tccctggagctgtac

SEQ ID NO: 779036 - DNA, 15 bp, Homo sapiens
ccctggagctgtacg

SEQ ID NO: 779037 - DNA, 15 bp, Homo sapiens
cctggagctgtacgt

SEQ ID NO: 779038 - DNA, 15 bp, Homo sapiens
ctggagctgtacgtt

SEQ ID NO: 779039 - DNA, 15 bp, Homo sapiens
tggagctgtacgttg

SEQ ID NO: 779040 - DNA, 15 bp, Homo sapiens
ggagctgtacgttgt

SEQ ID NO: 779041 - DNA, 15 bp, Homo sapiens
gagctgtacgttgtg

SEQ ID NO: 779042 - DNA, 15 bp, Homo sapiens
agctgtacgttgtgg

SEQ ID NO: 779043 - DNA, 15 bp, Homo sapiens
gctgtacgttgtggg

SEQ ID NO: 779044 - DNA, 15 bp, Homo sapiens
ctgtacgttgtgggc

SEQ ID NO: 779045 - DNA, 15 bp, Homo sapiens
tgtacgttgtgggcg

SEQ ID NO: 779046 - DNA, 15 bp, Homo sapiens
gtacgttgtgggcgc

SEQ ID NO: 779047 - DNA, 15 bp, Homo sapiens
tacgttgtgggcgca

SEQ ID NO: 779048 - DNA, 15 bp, Homo sapiens
acgttgtgggcgcat

SEQ ID NO: 779049 - DNA, 15 bp, Homo sapiens
cgttgtgggcgcatg

SEQ ID NO: 779050 - DNA, 15 bp, Homo sapiens
gttgtgggcgcatgt

SEQ ID NO: 779051 - DNA, 15 bp, Homo sapiens
ttgtgggcgcatgtg

SEQ ID NO: 779052 - DNA, 15 bp, Homo sapiens
tgtgggcgcatgtgt

SEQ ID NO: 779053 - DNA, 15 bp, Homo sapiens
gtgggcgcatgtgtc

SEQ ID NO: 779054 - DNA, 15 bp, Homo sapiens
tgggcgcatgtgtca

SEQ ID NO: 779055 - DNA, 15 bp, Homo sapiens
gggcgcatgtgtcac

SEQ ID NO: 779056 - DNA, 15 bp, Homo sapiens
ggcgcatgtgtcaca

SEQ ID NO: 779057 - DNA, 15 bp, Homo sapiens
gcgcatgtgtcacag

SEQ ID NO: 779058 - DNA, 15 bp, Homo sapiens
cgcatgtgtcacagg

SEQ ID NO: 779059 - DNA, 15 bp, Homo sapiens
gcatgtgtcacagga

SEQ ID NO: 779060 - DNA, 15 bp, Homo sapiens
catgtgtcacaggaa

SEQ ID NO: 779061 - DNA, 15 bp, Homo sapiens
atgtgtcacaggaaa

SEQ ID NO: 779062 - DNA, 15 bp, Homo sapiens
tgtgtcacaggaaat

SEQ ID NO: 779063 - DNA, 15 bp, Homo sapiens
gtgtcacaggaaatg

SEQ ID NO: 779064 - DNA, 15 bp, Homo sapiens
tgtcacaggaaatgc

SEQ ID NO: 779065 - DNA, 15 bp, Homo sapiens
gtcacaggaaatgcc

SEQ ID NO: 779066 - DNA, 15 bp, Homo sapiens
tcacaggaaatgcct

SEQ ID NO: 779067 - DNA, 15 bp, Homo sapiens
cacaggaaatgcctt

SEQ ID NO: 779068 - DNA, 15 bp, Homo sapiens
acaggaaatgccttg

SEQ ID NO: 779069 - DNA, 15 bp, Homo sapiens
caggaaatgccttgg

SEQ ID NO: 779070 - DNA, 15 bp, Homo sapiens
aggaaatgccttggc

SEQ ID NO: 779071 - DNA, 15 bp, Homo sapiens
ggaaatgccttggca

SEQ ID NO: 779072 - DNA, 15 bp, Homo sapiens
gaaatgccttggcag

SEQ ID NO: 779073 - DNA, 15 bp, Homo sapiens
aaatgccttggcagg

SEQ ID NO: 779074 - DNA, 15 bp, Homo sapiens
aatgccttggcagga

SEQ ID NO: 779075 - DNA, 15 bp, Homo sapiens
atgccttggcaggac

SEQ ID NO: 779076 - DNA, 15 bp, Homo sapiens
tgccttggcaggaca

SEQ ID NO: 779077 - DNA, 15 bp, Homo sapiens
gccttggcaggacaa

SEQ ID NO: 779078 - DNA, 15 bp, Homo sapiens
ccttggcaggacaac

SEQ ID NO: 779079 - DNA, 15 bp, Homo sapiens
cttggcaggacaaca

SEQ ID NO: 779080 - DNA, 15 bp, Homo sapiens
ttggcaggacaacag

SEQ ID NO: 779081 - DNA, 15 bp, Homo sapiens
tggcaggacaacaga

SEQ ID NO: 779082 - DNA, 15 bp, Homo sapiens
ggcaggacaacagat

SEQ ID NO: 779083 - DNA, 15 bp, Homo sapiens
gcaggacaacagatg

SEQ ID NO: 779084 - DNA, 15 bp, Homo sapiens
caggacaacagatga

SEQ ID NO: 779085 - DNA, 15 bp, Homo sapiens
aggacaacagatgag

SEQ ID NO: 779086 - DNA, 15 bp, Homo sapiens
ggacaacagatgagt

SEQ ID NO: 779087 - DNA, 15 bp, Homo sapiens
gacaacagatgagtc

SEQ ID NO: 779088 - DNA, 15 bp, Homo sapiens
acaacagatgagtct

SEQ ID NO: 779089 - DNA, 15 bp, Homo sapiens
caacagatgagtctt

SEQ ID NO: 779090 - DNA, 15 bp, Homo sapiens
aacagatgagtctta

SEQ ID NO: 779091 - DNA, 15 bp, Homo sapiens
acagatgagtcttaa

SEQ ID NO: 779092 - DNA, 15 bp, Homo sapiens
cagatgagtcttaag

SEQ ID NO: 779093 - DNA, 15 bp, Homo sapiens
agatgagtcttaagg

SEQ ID NO: 779094 - DNA, 15 bp, Homo sapiens
gatgagtcttaagga

SEQ ID NO: 779095 - DNA, 15 bp, Homo sapiens
atgagtcttaaggaa

SEQ ID NO: 779096 - DNA, 15 bp, Homo sapiens
tgagtcttaaggaaa

SEQ ID NO: 779097 - DNA, 15 bp, Homo sapiens
gagtcttaaggaaaa

SEQ ID NO: 779098 - DNA, 15 bp, Homo sapiens
agtcttaaggaaaaa

SEQ ID NO: 779099 - DNA, 15 bp, Homo sapiens
gtcttaaggaaaaag

SEQ ID NO: 779100 - DNA, 15 bp, Homo sapiens
tcttaaggaaaaagg

SEQ ID NO: 779101 - DNA, 15 bp, Homo sapiens
cttaaggaaaaaggg

SEQ ID NO: 779102 - DNA, 15 bp, Homo sapiens
ttaaggaaaaagggt

SEQ ID NO: 779103 - DNA, 15 bp, Homo sapiens
taaggaaaaagggtc

SEQ ID NO: 779104 - DNA, 15 bp, Homo sapiens
aaggaaaaagggtca

SEQ ID NO: 779105 - DNA, 15 bp, Homo sapiens
aggaaaaagggtcaa

SEQ ID NO: 779106 - DNA, 15 bp, Homo sapiens
ggaaaaagggtcaag

SEQ ID NO: 779107 - DNA, 15 bp, Homo sapiens
gaaaaagggtcaagt

SEQ ID NO: 779108 - DNA, 15 bp, Homo sapiens
aaaaagggtcaagtg

SEQ ID NO: 779109 - DNA, 15 bp, Homo sapiens
aaaagggtcaagtgc

SEQ ID NO: 779110 - DNA, 15 bp, Homo sapiens
aaagggtcaagtgca

SEQ ID NO: 779111 - DNA, 15 bp, Homo sapiens
aagggtcaagtgcac

SEQ ID NO: 779112 - DNA, 15 bp, Homo sapiens
agggtcaagtgcact

SEQ ID NO: 779113 - DNA, 15 bp, Homo sapiens
gggtcaagtgcactt

SEQ ID NO: 779114 - DNA, 15 bp, Homo sapiens
ggtcaagtgcactta

SEQ ID NO: 779115 - DNA, 15 bp, Homo sapiens
gtcaagtgcacttac

SEQ ID NO: 779116 - DNA, 15 bp, Homo sapiens
tcaagtgcacttact

SEQ ID NO: 779117 - DNA, 15 bp, Homo sapiens
caagtgcacttactg

SEQ ID NO: 779118 - DNA, 15 bp, Homo sapiens
aagtgcacttactgt

SEQ ID NO: 779119 - DNA, 15 bp, Homo sapiens
agtgcacttactgtg

SEQ ID NO: 779120 - DNA, 15 bp, Homo sapiens
gtgcacttactgtgg

SEQ ID NO: 779121 - DNA, 15 bp, Homo sapiens
tgcacttactgtggt

SEQ ID NO: 779122 - DNA, 15 bp, Homo sapiens
gcacttactgtggtc

SEQ ID NO: 779123 - DNA, 15 bp, Homo sapiens
cacttactgtggtct

SEQ ID NO: 779124 - DNA, 15 bp, Homo sapiens
acttactgtggtctc

SEQ ID NO: 779125 - DNA, 15 bp, Homo sapiens
cttactgtggtctcc

SEQ ID NO: 779126 - DNA, 15 bp, Homo sapiens
ttactgtggtctccg

SEQ ID NO: 779127 - DNA, 15 bp, Homo sapiens
tactgtggtctccgt

SEQ ID NO: 779128 - DNA, 15 bp, Homo sapiens
actgtggtctccgta

SEQ ID NO: 779129 - DNA, 15 bp, Homo sapiens
ctgtggtctccgtat

SEQ ID NO: 779130 - DNA, 15 bp, Homo sapiens
tgtggtctccgtatc

SEQ ID NO: 779131 - DNA, 15 bp, Homo sapiens
gtggtctccgtatcc

SEQ ID NO: 779132 - DNA, 15 bp, Homo sapiens
tggtctccgtatcca

SEQ ID NO: 779133 - DNA, 15 bp, Homo sapiens
ggtctccgtatccac

SEQ ID NO: 779134 - DNA, 15 bp, Homo sapiens
gtctccgtatccact

SEQ ID NO: 779135 - DNA, 15 bp, Homo sapiens
tctccgtatccactt

SEQ ID NO: 779136 - DNA, 15 bp, Homo sapiens
ctccgtatccacttc

SEQ ID NO: 779137 - DNA, 15 bp, Homo sapiens
tccgtatccacttct

SEQ ID NO: 779138 - DNA, 15 bp, Homo sapiens
ccgtatccacttctc

SEQ ID NO: 779139 - DNA, 15 bp, Homo sapiens
cgtatccacttctcc

SEQ ID NO: 779140 - DNA, 15 bp, Homo sapiens
gtatccacttctccc

SEQ ID NO: 779141 - DNA, 15 bp, Homo sapiens
tatccacttctccct

SEQ ID NO: 779142 - DNA, 15 bp, Homo sapiens
atccacttctccctg

SEQ ID NO: 779143 - DNA, 15 bp, Homo sapiens
tccacttctccctgg

SEQ ID NO: 779144 - DNA, 15 bp, Homo sapiens
ccacttctccctgga

SEQ ID NO: 779145 - DNA, 15 bp, Homo sapiens
cacttctccctggag

SEQ ID NO: 779146 - DNA, 15 bp, Homo sapiens
acttctccctggagg

SEQ ID NO: 779147 - DNA, 15 bp, Homo sapiens
cttctccctggaggt

SEQ ID NO: 779148 - DNA, 15 bp, Homo sapiens
ttctccctggaggtg

SEQ ID NO: 779149 - DNA, 15 bp, Homo sapiens
tctccctggaggtgg

SEQ ID NO: 779150 - DNA, 15 bp, Homo sapiens
ctccctggaggtggg

SEQ ID NO: 779151 - DNA, 15 bp, Homo sapiens
tccctggaggtgggg

SEQ ID NO: 779152 - DNA, 15 bp, Homo sapiens
ccctggaggtggggc

SEQ ID NO: 779153 - DNA, 15 bp, Homo sapiens
cctggaggtggggcg

SEQ ID NO: 779154 - DNA, 15 bp, Homo sapiens
ctggaggtggggcga

SEQ ID NO: 779155 - DNA, 15 bp, Homo sapiens
tggaggtggggcgag

SEQ ID NO: 779156 - DNA, 15 bp, Homo sapiens
ggaggtggggcgagg

SEQ ID NO: 779157 - DNA, 15 bp, Homo sapiens
gaggtggggcgaggc

SEQ ID NO: 779158 - DNA, 15 bp, Homo sapiens
aggtggggcgaggct

SEQ ID NO: 779159 - DNA, 15 bp, Homo sapiens
ggtggggcgaggctg

SEQ ID NO: 779160 - DNA, 15 bp, Homo sapiens
gtggggcgaggctga

SEQ ID NO: 779161 - DNA, 15 bp, Homo sapiens
tggggcgaggctgac

SEQ ID NO: 779162 - DNA, 15 bp, Homo sapiens
ggggcgaggctgaca

SEQ ID NO: 779163 - DNA, 15 bp, Homo sapiens
gggcgaggctgacag

SEQ ID NO: 779164 - DNA, 15 bp, Homo sapiens
ggcgaggctgacagg

SEQ ID NO: 779165 - DNA, 15 bp, Homo sapiens
gcgaggctgacaggg

SEQ ID NO: 779166 - DNA, 15 bp, Homo sapiens
cgaggctgacagggc

SEQ ID NO: 779167 - DNA, 15 bp, Homo sapiens
gaggctgacagggca

SEQ ID NO: 779168 - DNA, 15 bp, Homo sapiens
aggctgacagggcag

SEQ ID NO: 779169 - DNA, 15 bp, Homo sapiens
ggctgacagggcagg

SEQ ID NO: 779170 - DNA, 15 bp, Homo sapiens
gctgacagggcaggg

SEQ ID NO: 779171 - DNA, 15 bp, Homo sapiens
ctgacagggcaggga

SEQ ID NO: 779172 - DNA, 15 bp, Homo sapiens
tgacagggcagggac

SEQ ID NO: 779173 - DNA, 15 bp, Homo sapiens
gacagggcagggaca

SEQ ID NO: 779174 - DNA, 15 bp, Homo sapiens
acagggcagggacag

SEQ ID NO: 779175 - DNA, 15 bp, Homo sapiens
cagggcagggacagg

SEQ ID NO: 779176 - DNA, 15 bp, Homo sapiens
agggcagggacaggc

SEQ ID NO: 779177 - DNA, 15 bp, Homo sapiens
gggcagggacaggct

SEQ ID NO: 779178 - DNA, 15 bp, Homo sapiens
ggcagggacaggctg

SEQ ID NO: 779179 - DNA, 15 bp, Homo sapiens
gcagggacaggctgg

SEQ ID NO: 779180 - DNA, 15 bp, Homo sapiens
cagggacaggctggt

SEQ ID NO: 779181 - DNA, 15 bp, Homo sapiens
agggacaggctggtt

SEQ ID NO: 779182 - DNA, 15 bp, Homo sapiens
gggacaggctggttt

SEQ ID NO: 779183 - DNA, 15 bp, Homo sapiens
ggacaggctggtttc

SEQ ID NO: 779184 - DNA, 15 bp, Homo sapiens
gacaggctggtttcg

SEQ ID NO: 779185 - DNA, 15 bp, Homo sapiens
acaggctggtttcgg

SEQ ID NO: 779186 - DNA, 15 bp, Homo sapiens
caggctggtttcgga

SEQ ID NO: 779187 - DNA, 15 bp, Homo sapiens
aggctggtttcggag

SEQ ID NO: 779188 - DNA, 15 bp, Homo sapiens
ggctggtttcggagg

SEQ ID NO: 779189 - DNA, 15 bp, Homo sapiens
gctggtttcggaggg

SEQ ID NO: 779190 - DNA, 15 bp, Homo sapiens
ctggtttcggagggc

SEQ ID NO: 779191 - DNA, 15 bp, Homo sapiens
tggtttcggagggca

SEQ ID NO: 779192 - DNA, 15 bp, Homo sapiens
ggtttcggagggcac

SEQ ID NO: 779193 - DNA, 15 bp, Homo sapiens
gtttcggagggcaca

SEQ ID NO: 779194 - DNA, 15 bp, Homo sapiens
tttcggagggcacat

SEQ ID NO: 779195 - DNA, 15 bp, Homo sapiens
ttcggagggcacatc

SEQ ID NO: 779196 - DNA, 15 bp, Homo sapiens
tcggagggcacatct

SEQ ID NO: 779197 - DNA, 15 bp, Homo sapiens
cggagggcacatctg

SEQ ID NO: 779198 - DNA, 15 bp, Homo sapiens
ggagggcacatctgc

SEQ ID NO: 779199 - DNA, 15 bp, Homo sapiens
gagggcacatctgca

SEQ ID NO: 779200 - DNA, 15 bp, Homo sapiens
agggcacatctgcac

SEQ ID NO: 779201 - DNA, 15 bp, Homo sapiens
gggcacatctgcacc

SEQ ID NO: 779202 - DNA, 15 bp, Homo sapiens
ggcacatctgcacca

SEQ ID NO: 779203 - DNA, 15 bp, Homo sapiens
gcacatctgcaccag

SEQ ID NO: 779204 - DNA, 15 bp, Homo sapiens
cacatctgcaccagt

SEQ ID NO: 779205 - DNA, 15 bp, Homo sapiens
acatctgcaccagta

SEQ ID NO: 779206 - DNA, 15 bp, Homo sapiens
catctgcaccagtat

SEQ ID NO: 779207 - DNA, 15 bp, Homo sapiens
atctgcaccagtatt

SEQ ID NO: 779208 - DNA, 15 bp, Homo sapiens
tctgcaccagtattt

SEQ ID NO: 779209 - DNA, 15 bp, Homo sapiens
ctgcaccagtatttg

SEQ ID NO: 779210 - DNA, 15 bp, Homo sapiens
tgcaccagtatttgg

SEQ ID NO: 779211 - DNA, 15 bp, Homo sapiens
gcaccagtatttggg

SEQ ID NO: 779212 - DNA, 15 bp, Homo sapiens
caccagtatttgggg

SEQ ID NO: 779213 - DNA, 15 bp, Homo sapiens
accagtatttgggga

SEQ ID NO: 779214 - DNA, 15 bp, Homo sapiens
ccagtatttggggag

SEQ ID NO: 779215 - DNA, 15 bp, Homo sapiens
cagtatttggggagg

SEQ ID NO: 779216 - DNA, 15 bp, Homo sapiens
agtatttggggaggt

SEQ ID NO: 779217 - DNA, 15 bp, Homo sapiens
gtatttggggaggtg

SEQ ID NO: 779218 - DNA, 15 bp, Homo sapiens
tatttggggaggtgg

SEQ ID NO: 779219 - DNA, 15 bp, Homo sapiens
atttggggaggtggg

SEQ ID NO: 779220 - DNA, 15 bp, Homo sapiens
tttggggaggtgggt

SEQ ID NO: 779221 - DNA, 15 bp, Homo sapiens
ttggggaggtgggtt

SEQ ID NO: 779222 - DNA, 15 bp, Homo sapiens
tggggaggtgggttt

SEQ ID NO: 779223 - DNA, 15 bp, Homo sapiens
ggggaggtgggtttg

SEQ ID NO: 779224 - DNA, 15 bp, Homo sapiens
gggaggtgggtttga

SEQ ID NO: 779225 - DNA, 15 bp, Homo sapiens
ggaggtgggtttgat

SEQ ID NO: 779226 - DNA, 15 bp, Homo sapiens
gaggtgggtttgatg

SEQ ID NO: 779227 - DNA, 15 bp, Homo sapiens
aggtgggtttgatgt

SEQ ID NO: 779228 - DNA, 15 bp, Homo sapiens
ggtgggtttgatgta

SEQ ID NO: 779229 - DNA, 15 bp, Homo sapiens
gtgggtttgatgtac

SEQ ID NO: 779230 - DNA, 15 bp, Homo sapiens
tgggtttgatgtaca

SEQ ID NO: 779231 - DNA, 15 bp, Homo sapiens
gggtttgatgtacat

SEQ ID NO: 779232 - DNA, 15 bp, Homo sapiens
ggtttgatgtacatt

SEQ ID NO: 779233 - DNA, 15 bp, Homo sapiens
gtttgatgtacattt

SEQ ID NO: 779234 - DNA, 15 bp, Homo sapiens
tttgatgtacatttt

SEQ ID NO: 779235 - DNA, 15 bp, Homo sapiens
ttgatgtacattttg

SEQ ID NO: 779236 - DNA, 15 bp, Homo sapiens
tgatgtacattttga

SEQ ID NO: 779237 - DNA, 15 bp, Homo sapiens
gatgtacattttgac

SEQ ID NO: 779238 - DNA, 15 bp, Homo sapiens
atgtacattttgaca

SEQ ID NO: 779239 - DNA, 15 bp, Homo sapiens
tgtacattttgacag

SEQ ID NO: 779240 - DNA, 15 bp, Homo sapiens
gtacattttgacagg

SEQ ID NO: 779241 - DNA, 15 bp, Homo sapiens
tacattttgacaggt

SEQ ID NO: 779242 - DNA, 15 bp, Homo sapiens
acattttgacaggta

SEQ ID NO: 779243 - DNA, 15 bp, Homo sapiens
cattttgacaggtag

SEQ ID NO: 779244 - DNA, 15 bp, Homo sapiens
attttgacaggtagt

SEQ ID NO: 779245 - DNA, 15 bp, Homo sapiens
ttttgacaggtagtg

SEQ ID NO: 779246 - DNA, 15 bp, Homo sapiens
tttgacaggtagtga

SEQ ID NO: 779247 - DNA, 15 bp, Homo sapiens
ttgacaggtagtgac

SEQ ID NO: 779248 - DNA, 15 bp, Homo sapiens
tgacaggtagtgacc

SEQ ID NO: 779249 - DNA, 15 bp, Homo sapiens
gacaggtagtgacca

SEQ ID NO: 779250 - DNA, 15 bp, Homo sapiens
acaggtagtgaccac

SEQ ID NO: 779251 - DNA, 15 bp, Homo sapiens
caggtagtgaccaca

SEQ ID NO: 779252 - DNA, 15 bp, Homo sapiens
aggtagtgaccacac

SEQ ID NO: 779253 - DNA, 15 bp, Homo sapiens
ggtagtgaccacaca

SEQ ID NO: 779254 - DNA, 15 bp, Homo sapiens
gtagtgaccacacat

SEQ ID NO: 779255 - DNA, 15 bp, Homo sapiens
tagtgaccacacatt

SEQ ID NO: 779256 - DNA, 15 bp, Homo sapiens
agtgaccacacattc

SEQ ID NO: 779257 - DNA, 15 bp, Homo sapiens
gtgaccacacattca

SEQ ID NO: 779258 - DNA, 15 bp, Homo sapiens
tgaccacacattcat

SEQ ID NO: 779259 - DNA, 15 bp, Homo sapiens
gaccacacattcatt

SEQ ID NO: 779260 - DNA, 15 bp, Homo sapiens
accacacattcattg

SEQ ID NO: 779261 - DNA, 15 bp, Homo sapiens
ccacacattcattga

SEQ ID NO: 779262 - DNA, 15 bp, Homo sapiens
cacacattcattgaa

SEQ ID NO: 779263 - DNA, 15 bp, Homo sapiens
acacattcattgaaa

SEQ ID NO: 779264 - DNA, 15 bp, Homo sapiens
cacattcattgaaag

SEQ ID NO: 779265 - DNA, 15 bp, Homo sapiens
acattcattgaaagg

SEQ ID NO: 779266 - DNA, 15 bp, Homo sapiens
cattcattgaaagga

SEQ ID NO: 779267 - DNA, 15 bp, Homo sapiens
attcattgaaaggag

SEQ ID NO: 779268 - DNA, 15 bp, Homo sapiens
ttcattgaaaggaga

SEQ ID NO: 779269 - DNA, 15 bp, Homo sapiens
tcattgaaaggagat

SEQ ID NO: 779270 - DNA, 15 bp, Homo sapiens
cattgaaaggagatg

SEQ ID NO: 779271 - DNA, 15 bp, Homo sapiens
attgaaaggagatgg

SEQ ID NO: 779272 - DNA, 15 bp, Homo sapiens
ttgaaaggagatggg

SEQ ID NO: 779273 - DNA, 15 bp, Homo sapiens
tgaaaggagatggga

SEQ ID NO: 779274 - DNA, 15 bp, Homo sapiens
gaaaggagatgggaa

SEQ ID NO: 779275 - DNA, 15 bp, Homo sapiens
aaaggagatgggaaa

SEQ ID NO: 779276 - DNA, 15 bp, Homo sapiens
aaggagatgggaaag

SEQ ID NO: 779277 - DNA, 15 bp, Homo sapiens
aggagatgggaaagc

SEQ ID NO: 779278 - DNA, 15 bp, Homo sapiens
ggagatgggaaagcg

SEQ ID NO: 779279 - DNA, 15 bp, Homo sapiens
gagatgggaaagcgt

SEQ ID NO: 779280 - DNA, 15 bp, Homo sapiens
agatgggaaagcgtg

SEQ ID NO: 779281 - DNA, 15 bp, Homo sapiens
gatgggaaagcgtgt

SEQ ID NO: 779282 - DNA, 15 bp, Homo sapiens
atgggaaagcgtgtg

SEQ ID NO: 779283 - DNA, 15 bp, Homo sapiens
tgggaaagcgtgtga

SEQ ID NO: 779284 - DNA, 15 bp, Homo sapiens
gggaaagcgtgtgag

SEQ ID NO: 779285 - DNA, 15 bp, Homo sapiens
ggaaagcgtgtgagg

SEQ ID NO: 779286 - DNA, 15 bp, Homo sapiens
gaaagcgtgtgaggt

SEQ ID NO: 779287 - DNA, 15 bp, Homo sapiens
aaagcgtgtgaggtc

SEQ ID NO: 779288 - DNA, 15 bp, Homo sapiens
aagcgtgtgaggtca

SEQ ID NO: 779289 - DNA, 15 bp, Homo sapiens
agcgtgtgaggtcac

SEQ ID NO: 779290 - DNA, 15 bp, Homo sapiens
gcgtgtgaggtcacc

SEQ ID NO: 779291 - DNA, 15 bp, Homo sapiens
cgtgtgaggtcacca

SEQ ID NO: 779292 - DNA, 15 bp, Homo sapiens
gtgtgaggtcaccag

SEQ ID NO: 779293 - DNA, 15 bp, Homo sapiens
tgtgaggtcaccaga

SEQ ID NO: 779294 - DNA, 15 bp, Homo sapiens
gtgaggtcaccagaa

SEQ ID NO: 779295 - DNA, 15 bp, Homo sapiens
tgaggtcaccagaag

SEQ ID NO: 779296 - DNA, 15 bp, Homo sapiens
gaggtcaccagaaga

SEQ ID NO: 779297 - DNA, 15 bp, Homo sapiens
aggtcaccagaagat

SEQ ID NO: 779298 - DNA, 15 bp, Homo sapiens
ggtcaccagaagata

SEQ ID NO: 779299 - DNA, 15 bp, Homo sapiens
gtcaccagaagataa

SEQ ID NO: 779300 - DNA, 15 bp, Homo sapiens
tcaccagaagataaa

SEQ ID NO: 779301 - DNA, 15 bp, Homo sapiens
caccagaagataaag

SEQ ID NO: 779302 - DNA, 15 bp, Homo sapiens
accagaagataaaga

SEQ ID NO: 779303 - DNA, 15 bp, Homo sapiens
ccagaagataaagac

SEQ ID NO: 779304 - DNA, 15 bp, Homo sapiens
cagaagataaagacc

SEQ ID NO: 779305 - DNA, 15 bp, Homo sapiens
agaagataaagaccc

SEQ ID NO: 779306 - DNA, 15 bp, Homo sapiens
gaagataaagaccca

SEQ ID NO: 779307 - DNA, 15 bp, Homo sapiens
aagataaagacccag

SEQ ID NO: 779308 - DNA, 15 bp, Homo sapiens
agataaagacccaga

SEQ ID NO: 779309 - DNA, 15 bp, Homo sapiens
gataaagacccagat

SEQ ID NO: 779310 - DNA, 15 bp, Homo sapiens
ataaagacccagatt

SEQ ID NO: 779311 - DNA, 15 bp, Homo sapiens
taaagacccagattc

SEQ ID NO: 779312 - DNA, 15 bp, Homo sapiens
aaagacccagattct

SEQ ID NO: 779313 - DNA, 15 bp, Homo sapiens
aagacccagattcta

SEQ ID NO: 779314 - DNA, 15 bp, Homo sapiens
agacccagattctac

SEQ ID NO: 779315 - DNA, 15 bp, Homo sapiens
gacccagattctact

SEQ ID NO: 779316 - DNA, 15 bp, Homo sapiens
acccagattctactg

SEQ ID NO: 779317 - DNA, 15 bp, Homo sapiens
cccagattctactgc

SEQ ID NO: 779318 - DNA, 15 bp, Homo sapiens
ccagattctactgca

SEQ ID NO: 779319 - DNA, 15 bp, Homo sapiens
cagattctactgcac

SEQ ID NO: 779320 - DNA, 15 bp, Homo sapiens
agattctactgcaca

SEQ ID NO: 779321 - DNA, 15 bp, Homo sapiens
gattctactgcacat

SEQ ID NO: 779322 - DNA, 15 bp, Homo sapiens
attctactgcacatg

SEQ ID NO: 779323 - DNA, 15 bp, Homo sapiens
ttctactgcacatgc

SEQ ID NO: 779324 - DNA, 15 bp, Homo sapiens
tctactgcacatgcg

SEQ ID NO: 779325 - DNA, 15 bp, Homo sapiens
ctactgcacatgcga

SEQ ID NO: 779326 - DNA, 15 bp, Homo sapiens
tactgcacatgcgag

SEQ ID NO: 779327 - DNA, 15 bp, Homo sapiens
actgcacatgcgagg

SEQ ID NO: 779328 - DNA, 15 bp, Homo sapiens
ctgcacatgcgaggc

SEQ ID NO: 779329 - DNA, 15 bp, Homo sapiens
tgcacatgcgaggca

SEQ ID NO: 779330 - DNA, 15 bp, Homo sapiens
gcacatgcgaggcag

SEQ ID NO: 779331 - DNA, 15 bp, Homo sapiens
cacatgcgaggcagc

SEQ ID NO: 779332 - DNA, 15 bp, Homo sapiens
acatgcgaggcagct

SEQ ID NO: 779333 - DNA, 15 bp, Homo sapiens
catgcgaggcagctc

SEQ ID NO: 779334 - DNA, 15 bp, Homo sapiens
atgcgaggcagctcc

SEQ ID NO: 779335 - DNA, 15 bp, Homo sapiens
tgcgaggcagctcct

SEQ ID NO: 779336 - DNA, 15 bp, Homo sapiens
gcgaggcagctcctc

SEQ ID NO: 779337 - DNA, 15 bp, Homo sapiens
cgaggcagctcctct

SEQ ID NO: 779338 - DNA, 15 bp, Homo sapiens
gaggcagctcctctg

SEQ ID NO: 779339 - DNA, 15 bp, Homo sapiens
aggcagctcctctga

SEQ ID NO: 779340 - DNA, 15 bp, Homo sapiens
ggcagctcctctgag

SEQ ID NO: 779341 - DNA, 15 bp, Homo sapiens
gcagctcctctgagc

SEQ ID NO: 779342 - DNA, 15 bp, Homo sapiens
cagctcctctgagct

SEQ ID NO: 779343 - DNA, 15 bp, Homo sapiens
agctcctctgagcta

SEQ ID NO: 779344 - DNA, 15 bp, Homo sapiens
gctcctctgagctat

SEQ ID NO: 779345 - DNA, 15 bp, Homo sapiens
ctcctctgagctatt

SEQ ID NO: 779346 - DNA, 15 bp, Homo sapiens
tcctctgagctattc

SEQ ID NO: 779347 - DNA, 15 bp, Homo sapiens
cctctgagctattcc

SEQ ID NO: 779348 - DNA, 15 bp, Homo sapiens
ctctgagctattcct

SEQ ID NO: 779349 - DNA, 15 bp, Homo sapiens
tctgagctattcctc

SEQ ID NO: 779350 - DNA, 15 bp, Homo sapiens
ctgagctattcctcc

SEQ ID NO: 779351 - DNA, 15 bp, Homo sapiens
tgagctattcctcca

SEQ ID NO: 779352 - DNA, 15 bp, Homo sapiens
gagctattcctccat

SEQ ID NO: 779353 - DNA, 15 bp, Homo sapiens
agctattcctccatc

SEQ ID NO: 779354 - DNA, 15 bp, Homo sapiens
gctattcctccatcc

SEQ ID NO: 779355 - DNA, 15 bp, Homo sapiens
ctattcctccatccc

SEQ ID NO: 779356 - DNA, 15 bp, Homo sapiens
tattcctccatccct

SEQ ID NO: 779357 - DNA, 15 bp, Homo sapiens
attcctccatccctt

SEQ ID NO: 779358 - DNA, 15 bp, Homo sapiens
ttcctccatcccttc

SEQ ID NO: 779359 - DNA, 15 bp, Homo sapiens
tcctccatcccttca

SEQ ID NO: 779360 - DNA, 15 bp, Homo sapiens
cctccatcccttcat

SEQ ID NO: 779361 - DNA, 15 bp, Homo sapiens
ctccatcccttcatc

SEQ ID NO: 779362 - DNA, 15 bp, Homo sapiens
tccatcccttcatcc

SEQ ID NO: 779363 - DNA, 15 bp, Homo sapiens
ccatcccttcatcca

SEQ ID NO: 779364 - DNA, 15 bp, Homo sapiens
catcccttcatccat

SEQ ID NO: 779365 - DNA, 15 bp, Homo sapiens
atcccttcatccatt

SEQ ID NO: 779366 - DNA, 15 bp, Homo sapiens
tcccttcatccattc

SEQ ID NO: 779367 - DNA, 15 bp, Homo sapiens
cccttcatccattcc

SEQ ID NO: 779368 - DNA, 15 bp, Homo sapiens
ccttcatccattcct

SEQ ID NO: 779369 - DNA, 15 bp, Homo sapiens
cttcatccattcctt

SEQ ID NO: 779370 - DNA, 15 bp, Homo sapiens
ttcatccattccttc

SEQ ID NO: 779371 - DNA, 15 bp, Homo sapiens
tcatccattccttca

SEQ ID NO: 779372 - DNA, 15 bp, Homo sapiens
catccattccttcaa

SEQ ID NO: 779373 - DNA, 15 bp, Homo sapiens
atccattccttcaaa

SEQ ID NO: 779374 - DNA, 15 bp, Homo sapiens
tccattccttcaaac

SEQ ID NO: 779375 - DNA, 15 bp, Homo sapiens
ccattccttcaaaca

SEQ ID NO: 779376 - DNA, 15 bp, Homo sapiens
cattccttcaaacat

SEQ ID NO: 779377 - DNA, 15 bp, Homo sapiens
attccttcaaacatt

SEQ ID NO: 779378 - DNA, 15 bp, Homo sapiens
ttccttcaaacattc

SEQ ID NO: 779379 - DNA, 15 bp, Homo sapiens
tccttcaaacattct

SEQ ID NO: 779380 - DNA, 15 bp, Homo sapiens
ccttcaaacattctg

SEQ ID NO: 779381 - DNA, 15 bp, Homo sapiens
cttcaaacattctgg

SEQ ID NO: 779382 - DNA, 15 bp, Homo sapiens
ttcaaacattctgga

SEQ ID NO: 779383 - DNA, 15 bp, Homo sapiens
tcaaacattctggag

SEQ ID NO: 779384 - DNA, 15 bp, Homo sapiens
caaacattctggagc

SEQ ID NO: 779385 - DNA, 15 bp, Homo sapiens
aaacattctggagca

SEQ ID NO: 779386 - DNA, 15 bp, Homo sapiens
aacattctggagcac

SEQ ID NO: 779387 - DNA, 15 bp, Homo sapiens
acattctggagcacc

SEQ ID NO: 779388 - DNA, 15 bp, Homo sapiens
cattctggagcacct

SEQ ID NO: 779389 - DNA, 15 bp, Homo sapiens
attctggagcacctg

SEQ ID NO: 779390 - DNA, 15 bp, Homo sapiens
ttctggagcacctgc

SEQ ID NO: 779391 - DNA, 15 bp, Homo sapiens
tctggagcacctgct

SEQ ID NO: 779392 - DNA, 15 bp, Homo sapiens
ctggagcacctgctc

SEQ ID NO: 779393 - DNA, 15 bp, Homo sapiens
tggagcacctgctcg

SEQ ID NO: 779394 - DNA, 15 bp, Homo sapiens
ggagcacctgctcgg

SEQ ID NO: 779395 - DNA, 15 bp, Homo sapiens
gagcacctgctcggg

SEQ ID NO: 779396 - DNA, 15 bp, Homo sapiens
agcacctgctcgggg

SEQ ID NO: 779397 - DNA, 15 bp, Homo sapiens
gcacctgctcggggt

SEQ ID NO: 779398 - DNA, 15 bp, Homo sapiens
cacctgctcggggtc

SEQ ID NO: 779399 - DNA, 15 bp, Homo sapiens
acctgctcggggtca

SEQ ID NO: 779400 - DNA, 15 bp, Homo sapiens
cctgctcggggtcag

SEQ ID NO: 779401 - DNA, 15 bp, Homo sapiens
ctgctcggggtcaga

SEQ ID NO: 779402 - DNA, 15 bp, Homo sapiens
tgctcggggtcagat

SEQ ID NO: 779403 - DNA, 15 bp, Homo sapiens
gctcggggtcagata

SEQ ID NO: 779404 - DNA, 15 bp, Homo sapiens
ctcggggtcagatac

SEQ ID NO: 779405 - DNA, 15 bp, Homo sapiens
tcggggtcagatact

SEQ ID NO: 779406 - DNA, 15 bp, Homo sapiens
cggggtcagatactg

SEQ ID NO: 779407 - DNA, 15 bp, Homo sapiens
ggggtcagatactgt

SEQ ID NO: 779408 - DNA, 15 bp, Homo sapiens
gggtcagatactgtt

SEQ ID NO: 779409 - DNA, 15 bp, Homo sapiens
ggtcagatactgttc

SEQ ID NO: 779410 - DNA, 15 bp, Homo sapiens
gtcagatactgttca

SEQ ID NO: 779411 - DNA, 15 bp, Homo sapiens
tcagatactgttcaa

SEQ ID NO: 779412 - DNA, 15 bp, Homo sapiens
cagatactgttcaat

SEQ ID NO: 779413 - DNA, 15 bp, Homo sapiens
agatactgttcaatg

SEQ ID NO: 779414 - DNA, 15 bp, Homo sapiens
gatactgttcaatgt

SEQ ID NO: 779415 - DNA, 15 bp, Homo sapiens
atactgttcaatgtg

SEQ ID NO: 779416 - DNA, 15 bp, Homo sapiens
tactgttcaatgtgc

SEQ ID NO: 779417 - DNA, 15 bp, Homo sapiens
actgttcaatgtgct

SEQ ID NO: 779418 - DNA, 15 bp, Homo sapiens
ctgttcaatgtgctg

SEQ ID NO: 779419 - DNA, 15 bp, Homo sapiens
tgttcaatgtgctgg

SEQ ID NO: 779420 - DNA, 15 bp, Homo sapiens
gttcaatgtgctgga

SEQ ID NO: 779421 - DNA, 15 bp, Homo sapiens
ttcaatgtgctggac

SEQ ID NO: 779422 - DNA, 15 bp, Homo sapiens
tcaatgtgctggaca

SEQ ID NO: 779423 - DNA, 15 bp, Homo sapiens
caatgtgctggacat

SEQ ID NO: 779424 - DNA, 15 bp, Homo sapiens
aatgtgctggacata

SEQ ID NO: 779425 - DNA, 15 bp, Homo sapiens
atgtgctggacatat

SEQ ID NO: 779426 - DNA, 15 bp, Homo sapiens
tgtgctggacatatg

SEQ ID NO: 779427 - DNA, 15 bp, Homo sapiens
gtgctggacatatgt

SEQ ID NO: 779428 - DNA, 15 bp, Homo sapiens
tgctggacatatgtt

SEQ ID NO: 779429 - DNA, 15 bp, Homo sapiens
gctggacatatgttg

SEQ ID NO: 779430 - DNA, 15 bp, Homo sapiens
ctggacatatgttgg

SEQ ID NO: 779431 - DNA, 15 bp, Homo sapiens
tggacatatgttggt

SEQ ID NO: 779432 - DNA, 15 bp, Homo sapiens
ggacatatgttggtt

SEQ ID NO: 779433 - DNA, 15 bp, Homo sapiens
gacatatgttggttc

SEQ ID NO: 779434 - DNA, 15 bp, Homo sapiens
acatatgttggttca

SEQ ID NO: 779435 - DNA, 15 bp, Homo sapiens
catatgttggttcat

SEQ ID NO: 779436 - DNA, 15 bp, Homo sapiens
atatgttggttcatt

SEQ ID NO: 779437 - DNA, 15 bp, Homo sapiens
tatgttggttcattc

SEQ ID NO: 779438 - DNA, 15 bp, Homo sapiens
atgttggttcattca

SEQ ID NO: 779439 - DNA, 15 bp, Homo sapiens
tgttggttcattcag

SEQ ID NO: 779440 - DNA, 15 bp, Homo sapiens
gttggttcattcagc

SEQ ID NO: 779441 - DNA, 15 bp, Homo sapiens
ttggttcattcagca

SEQ ID NO: 779442 - DNA, 15 bp, Homo sapiens
tggttcattcagcaa

SEQ ID NO: 779443 - DNA, 15 bp, Homo sapiens
ggttcattcagcaaa

SEQ ID NO: 779444 - DNA, 15 bp, Homo sapiens
gttcattcagcaaaa

SEQ ID NO: 779445 - DNA, 15 bp, Homo sapiens
ttcattcagcaaaag

SEQ ID NO: 779446 - DNA, 15 bp, Homo sapiens
tcattcagcaaaagc

SEQ ID NO: 779447 - DNA, 15 bp, Homo sapiens
cattcagcaaaagct

SEQ ID NO: 779448 - DNA, 15 bp, Homo sapiens
attcagcaaaagctg

SEQ ID NO: 779449 - DNA, 15 bp, Homo sapiens
ttcagcaaaagctgc

SEQ ID NO: 779450 - DNA, 15 bp, Homo sapiens
tcagcaaaagctgca

SEQ ID NO: 779451 - DNA, 15 bp, Homo sapiens
cagcaaaagctgcaa

SEQ ID NO: 779452 - DNA, 15 bp, Homo sapiens
agcaaaagctgcaaa

SEQ ID NO: 779453 - DNA, 15 bp, Homo sapiens
gcaaaagctgcaaag

SEQ ID NO: 779454 - DNA, 15 bp, Homo sapiens
caaaagctgcaaagt

SEQ ID NO: 779455 - DNA, 15 bp, Homo sapiens
aaaagctgcaaagtg

SEQ ID NO: 779456 - DNA, 15 bp, Homo sapiens
aaagctgcaaagtgc

SEQ ID NO: 779457 - DNA, 15 bp, Homo sapiens
aagctgcaaagtgca

SEQ ID NO: 779458 - DNA, 15 bp, Homo sapiens
agctgcaaagtgcag

SEQ ID NO: 779459 - DNA, 15 bp, Homo sapiens
gctgcaaagtgcagt

SEQ ID NO: 779460 - DNA, 15 bp, Homo sapiens
ctgcaaagtgcagtc

SEQ ID NO: 779461 - DNA, 15 bp, Homo sapiens
tgcaaagtgcagtca

SEQ ID NO: 779462 - DNA, 15 bp, Homo sapiens
gcaaagtgcagtcat

SEQ ID NO: 779463 - DNA, 15 bp, Homo sapiens
caaagtgcagtcatc

SEQ ID NO: 779464 - DNA, 15 bp, Homo sapiens
aaagtgcagtcatcc

SEQ ID NO: 779465 - DNA, 15 bp, Homo sapiens
aagtgcagtcatcca

SEQ ID NO: 779466 - DNA, 15 bp, Homo sapiens
agtgcagtcatccaa

SEQ ID NO: 779467 - DNA, 15 bp, Homo sapiens
gtgcagtcatccaaa

SEQ ID NO: 779468 - DNA, 15 bp, Homo sapiens
tgcagtcatccaaag

SEQ ID NO: 779469 - DNA, 15 bp, Homo sapiens
gcagtcatccaaagt

SEQ ID NO: 779470 - DNA, 15 bp, Homo sapiens
cagtcatccaaagtg

SEQ ID NO: 779471 - DNA, 15 bp, Homo sapiens
agtcatccaaagtgt

SEQ ID NO: 779472 - DNA, 15 bp, Homo sapiens
gtcatccaaagtgtt

SEQ ID NO: 779473 - DNA, 15 bp, Homo sapiens
tcatccaaagtgttg

SEQ ID NO: 779474 - DNA, 15 bp, Homo sapiens
catccaaagtgttga

SEQ ID NO: 779475 - DNA, 15 bp, Homo sapiens
atccaaagtgttgaa

SEQ ID NO: 779476 - DNA, 15 bp, Homo sapiens
tccaaagtgttgaag

SEQ ID NO: 779477 - DNA, 15 bp, Homo sapiens
ccaaagtgttgaagg

SEQ ID NO: 779478 - DNA, 15 bp, Homo sapiens
caaagtgttgaaggt

SEQ ID NO: 779479 - DNA, 15 bp, Homo sapiens
aaagtgttgaaggtg

SEQ ID NO: 779480 - DNA, 15 bp, Homo sapiens
aagtgttgaaggtgg

SEQ ID NO: 779481 - DNA, 15 bp, Homo sapiens
agtgttgaaggtgga

SEQ ID NO: 779482 - DNA, 15 bp, Homo sapiens
gtgttgaaggtggaa

SEQ ID NO: 779483 - DNA, 15 bp, Homo sapiens
tgttgaaggtggaaa

SEQ ID NO: 779484 - DNA, 15 bp, Homo sapiens
gttgaaggtggaaat

SEQ ID NO: 779485 - DNA, 15 bp, Homo sapiens
ttgaaggtggaaatg

SEQ ID NO: 779486 - DNA, 15 bp, Homo sapiens
tgaaggtggaaatgt

SEQ ID NO: 779487 - DNA, 15 bp, Homo sapiens
gaaggtggaaatgtt

SEQ ID NO: 779488 - DNA, 15 bp, Homo sapiens
aaggtggaaatgtta

SEQ ID NO: 779489 - DNA, 15 bp, Homo sapiens
aggtggaaatgttat

SEQ ID NO: 779490 - DNA, 15 bp, Homo sapiens
ggtggaaatgttatg

SEQ ID NO: 779491 - DNA, 15 bp, Homo sapiens
gtggaaatgttatgc

SEQ ID NO: 779492 - DNA, 15 bp, Homo sapiens
tggaaatgttatgct

SEQ ID NO: 779493 - DNA, 15 bp, Homo sapiens
ggaaatgttatgctt

SEQ ID NO: 779494 - DNA, 15 bp, Homo sapiens
gaaatgttatgcttg

SEQ ID NO: 779495 - DNA, 15 bp, Homo sapiens
aaatgttatgcttgc

SEQ ID NO: 779496 - DNA, 15 bp, Homo sapiens
aatgttatgcttgca

SEQ ID NO: 779497 - DNA, 15 bp, Homo sapiens
atgttatgcttgcat

SEQ ID NO: 779498 - DNA, 15 bp, Homo sapiens
tgttatgcttgcatt

SEQ ID NO: 779499 - DNA, 15 bp, Homo sapiens
gttatgcttgcattt

SEQ ID NO: 779500 - DNA, 15 bp, Homo sapiens
ttatgcttgcatttt

SEQ ID NO: 779501 - DNA, 15 bp, Homo sapiens
tatgcttgcattttc

SEQ ID NO: 779502 - DNA, 15 bp, Homo sapiens
atgcttgcattttct

SEQ ID NO: 779503 - DNA, 15 bp, Homo sapiens
tgcttgcattttcta

SEQ ID NO: 779504 - DNA, 15 bp, Homo sapiens
gcttgcattttctag

SEQ ID NO: 779505 - DNA, 15 bp, Homo sapiens
cttgcattttctaga

SEQ ID NO: 779506 - DNA, 15 bp, Homo sapiens
ttgcattttctagaa

SEQ ID NO: 779507 - DNA, 15 bp, Homo sapiens
tgcattttctagaat

SEQ ID NO: 779508 - DNA, 15 bp, Homo sapiens
gcattttctagaatg

SEQ ID NO: 779509 - DNA, 15 bp, Homo sapiens
cattttctagaatga

SEQ ID NO: 779510 - DNA, 15 bp, Homo sapiens
attttctagaatgat

SEQ ID NO: 779511 - DNA, 15 bp, Homo sapiens
ttttctagaatgatt

SEQ ID NO: 779512 - DNA, 15 bp, Homo sapiens
tttctagaatgattt

SEQ ID NO: 779513 - DNA, 15 bp, Homo sapiens
ttctagaatgatttg

SEQ ID NO: 779514 - DNA, 15 bp, Homo sapiens
tctagaatgatttgg

SEQ ID NO: 779515 - DNA, 15 bp, Homo sapiens
ctagaatgatttggg

SEQ ID NO: 779516 - DNA, 15 bp, Homo sapiens
tagaatgatttgggg

SEQ ID NO: 779517 - DNA, 15 bp, Homo sapiens
agaatgatttggggt

SEQ ID NO: 779518 - DNA, 15 bp, Homo sapiens
gaatgatttggggtg

SEQ ID NO: 779519 - DNA, 15 bp, Homo sapiens
aatgatttggggtgg

SEQ ID NO: 779520 - DNA, 15 bp, Homo sapiens
atgatttggggtggc

SEQ ID NO: 779521 - DNA, 15 bp, Homo sapiens
tgatttggggtggca

SEQ ID NO: 779522 - DNA, 15 bp, Homo sapiens
gatttggggtggcaa

SEQ ID NO: 779523 - DNA, 15 bp, Homo sapiens
atttggggtggcaag

SEQ ID NO: 779524 - DNA, 15 bp, Homo sapiens
tttggggtggcaagg

SEQ ID NO: 779525 - DNA, 15 bp, Homo sapiens
ttggggtggcaaggt

SEQ ID NO: 779526 - DNA, 15 bp, Homo sapiens
tggggtggcaaggtt

SEQ ID NO: 779527 - DNA, 15 bp, Homo sapiens
ggggtggcaaggttt

SEQ ID NO: 779528 - DNA, 15 bp, Homo sapiens
gggtggcaaggtttc

SEQ ID NO: 779529 - DNA, 15 bp, Homo sapiens
ggtggcaaggtttct

SEQ ID NO: 779530 - DNA, 15 bp, Homo sapiens
gtggcaaggtttctg

SEQ ID NO: 779531 - DNA, 15 bp, Homo sapiens
tggcaaggtttctga

SEQ ID NO: 779532 - DNA, 15 bp, Homo sapiens
ggcaaggtttctgaa

SEQ ID NO: 779533 - DNA, 15 bp, Homo sapiens
gcaaggtttctgaag

SEQ ID NO: 779534 - DNA, 15 bp, Homo sapiens
caaggtttctgaagt

SEQ ID NO: 779535 - DNA, 15 bp, Homo sapiens
aaggtttctgaagta

SEQ ID NO: 779536 - DNA, 15 bp, Homo sapiens
aggtttctgaagtag

SEQ ID NO: 779537 - DNA, 15 bp, Homo sapiens
ggtttctgaagtagg

SEQ ID NO: 779538 - DNA, 15 bp, Homo sapiens
gtttctgaagtaggg

SEQ ID NO: 779539 - DNA, 15 bp, Homo sapiens
tttctgaagtagggt

SEQ ID NO: 779540 - DNA, 15 bp, Homo sapiens
ttctgaagtagggtt

SEQ ID NO: 779541 - DNA, 15 bp, Homo sapiens
tctgaagtagggttt

SEQ ID NO: 779542 - DNA, 15 bp, Homo sapiens
ctgaagtagggttta

SEQ ID NO: 779543 - DNA, 15 bp, Homo sapiens
tgaagtagggtttag

SEQ ID NO: 779544 - DNA, 15 bp, Homo sapiens
gaagtagggtttagt

SEQ ID NO: 779545 - DNA, 15 bp, Homo sapiens
aagtagggtttagtg

SEQ ID NO: 779546 - DNA, 15 bp, Homo sapiens
agtagggtttagtga

SEQ ID NO: 779547 - DNA, 15 bp, Homo sapiens
gtagggtttagtgat

SEQ ID NO: 779548 - DNA, 15 bp, Homo sapiens
tagggtttagtgata

SEQ ID NO: 779549 - DNA, 15 bp, Homo sapiens
agggtttagtgataa

SEQ ID NO: 779550 - DNA, 15 bp, Homo sapiens
gggtttagtgataag

SEQ ID NO: 779551 - DNA, 15 bp, Homo sapiens
ggtttagtgataagt

SEQ ID NO: 779552 - DNA, 15 bp, Homo sapiens
gtttagtgataagtc

SEQ ID NO: 779553 - DNA, 15 bp, Homo sapiens
tttagtgataagtca

SEQ ID NO: 779554 - DNA, 15 bp, Homo sapiens
ttagtgataagtcag

SEQ ID NO: 779555 - DNA, 15 bp, Homo sapiens
tagtgataagtcaga

SEQ ID NO: 779556 - DNA, 15 bp, Homo sapiens
agtgataagtcagaa

SEQ ID NO: 779557 - DNA, 15 bp, Homo sapiens
gtgataagtcagaac

SEQ ID NO: 779558 - DNA, 15 bp, Homo sapiens
tgataagtcagaacc

SEQ ID NO: 779559 - DNA, 15 bp, Homo sapiens
gataagtcagaacct

SEQ ID NO: 779560 - DNA, 15 bp, Homo sapiens
ataagtcagaacctg

SEQ ID NO: 779561 - DNA, 15 bp, Homo sapiens
taagtcagaacctgt

SEQ ID NO: 779562 - DNA, 15 bp, Homo sapiens
aagtcagaacctgtg

SEQ ID NO: 779563 - DNA, 15 bp, Homo sapiens
agtcagaacctgtga

SEQ ID NO: 779564 - DNA, 15 bp, Homo sapiens
gtcagaacctgtgac

SEQ ID NO: 779565 - DNA, 15 bp, Homo sapiens
tcagaacctgtgacc

SEQ ID NO: 779566 - DNA, 15 bp, Homo sapiens
cagaacctgtgaccc

SEQ ID NO: 779567 - DNA, 15 bp, Homo sapiens
agaacctgtgaccca

SEQ ID NO: 779568 - DNA, 15 bp, Homo sapiens
gaacctgtgacccat

SEQ ID NO: 779569 - DNA, 15 bp, Homo sapiens
aacctgtgacccatc

SEQ ID NO: 779570 - DNA, 15 bp, Homo sapiens
acctgtgacccatct

SEQ ID NO: 779571 - DNA, 15 bp, Homo sapiens
cctgtgacccatctc

SEQ ID NO: 779572 - DNA, 15 bp, Homo sapiens
ctgtgacccatctct

SEQ ID NO: 779573 - DNA, 15 bp, Homo sapiens
tgtgacccatctctc

SEQ ID NO: 779574 - DNA, 15 bp, Homo sapiens
gtgacccatctctca

SEQ ID NO: 779575 - DNA, 15 bp, Homo sapiens
tgacccatctctcag

SEQ ID NO: 779576 - DNA, 15 bp, Homo sapiens
gacccatctctcagt

SEQ ID NO: 779577 - DNA, 15 bp, Homo sapiens
acccatctctcagtc

SEQ ID NO: 779578 - DNA, 15 bp, Homo sapiens
cccatctctcagtcc

SEQ ID NO: 779579 - DNA, 15 bp, Homo sapiens
ccatctctcagtccc

SEQ ID NO: 779580 - DNA, 15 bp, Homo sapiens
catctctcagtccct

SEQ ID NO: 779581 - DNA, 15 bp, Homo sapiens
atctctcagtccctt

SEQ ID NO: 779582 - DNA, 15 bp, Homo sapiens
tctctcagtcccttg

SEQ ID NO: 779583 - DNA, 15 bp, Homo sapiens
ctctcagtcccttgg

SEQ ID NO: 779584 - DNA, 15 bp, Homo sapiens
tctcagtcccttgga

SEQ ID NO: 779585 - DNA, 15 bp, Homo sapiens
ctcagtcccttggac

SEQ ID NO: 779586 - DNA, 15 bp, Homo sapiens
tcagtcccttggaca

SEQ ID NO: 779587 - DNA, 15 bp, Homo sapiens
cagtcccttggacag

SEQ ID NO: 779588 - DNA, 15 bp, Homo sapiens
agtcccttggacagg

SEQ ID NO: 779589 - DNA, 15 bp, Homo sapiens
gtcccttggacaggc

SEQ ID NO: 779590 - DNA, 15 bp, Homo sapiens
tcccttggacaggcc

SEQ ID NO: 779591 - DNA, 15 bp, Homo sapiens
cccttggacaggcct

SEQ ID NO: 779592 - DNA, 15 bp, Homo sapiens
ccttggacaggcctg

SEQ ID NO: 779593 - DNA, 15 bp, Homo sapiens
cttggacaggcctgg

SEQ ID NO: 779594 - DNA, 15 bp, Homo sapiens
ttggacaggcctggg

SEQ ID NO: 779595 - DNA, 15 bp, Homo sapiens
tggacaggcctggga

SEQ ID NO: 779596 - DNA, 15 bp, Homo sapiens
ggacaggcctgggag

SEQ ID NO: 779597 - DNA, 15 bp, Homo sapiens
gacaggcctgggagc

SEQ ID NO: 779598 - DNA, 15 bp, Homo sapiens
acaggcctgggagct

SEQ ID NO: 779599 - DNA, 15 bp, Homo sapiens
caggcctgggagctc

SEQ ID NO: 779600 - DNA, 15 bp, Homo sapiens
aggcctgggagctca

SEQ ID NO: 779601 - DNA, 15 bp, Homo sapiens
ggcctgggagctcag

SEQ ID NO: 779602 - DNA, 15 bp, Homo sapiens
gcctgggagctcaga

SEQ ID NO: 779603 - DNA, 15 bp, Homo sapiens
cctgggagctcagac

SEQ ID NO: 779604 - DNA, 15 bp, Homo sapiens
ctgggagctcagaca

SEQ ID NO: 779605 - DNA, 15 bp, Homo sapiens
tgggagctcagacat

SEQ ID NO: 779606 - DNA, 15 bp, Homo sapiens
gggagctcagacatt

SEQ ID NO: 779607 - DNA, 15 bp, Homo sapiens
ggagctcagacattc

SEQ ID NO: 779608 - DNA, 15 bp, Homo sapiens
gagctcagacattct

SEQ ID NO: 779609 - DNA, 15 bp, Homo sapiens
agctcagacattcta

SEQ ID NO: 779610 - DNA, 15 bp, Homo sapiens
gctcagacattctag

SEQ ID NO: 779611 - DNA, 15 bp, Homo sapiens
ctcagacattctagt

SEQ ID NO: 779612 - DNA, 15 bp, Homo sapiens
tcagacattctagtc

SEQ ID NO: 779613 - DNA, 15 bp, Homo sapiens
cagacattctagtcc

SEQ ID NO: 779614 - DNA, 15 bp, Homo sapiens
agacattctagtcct

SEQ ID NO: 779615 - DNA, 15 bp, Homo sapiens
gacattctagtcctg

SEQ ID NO: 779616 - DNA, 15 bp, Homo sapiens
acattctagtcctga

SEQ ID NO: 779617 - DNA, 15 bp, Homo sapiens
cattctagtcctgat

SEQ ID NO: 779618 - DNA, 15 bp, Homo sapiens
attctagtcctgatt

SEQ ID NO: 779619 - DNA, 15 bp, Homo sapiens
ttctagtcctgattg

SEQ ID NO: 779620 - DNA, 15 bp, Homo sapiens
tctagtcctgattgc

SEQ ID NO: 779621 - DNA, 15 bp, Homo sapiens
ctagtcctgattgca

SEQ ID NO: 779622 - DNA, 15 bp, Homo sapiens
tagtcctgattgcac

SEQ ID NO: 779623 - DNA, 15 bp, Homo sapiens
agtcctgattgcaca

SEQ ID NO: 779624 - DNA, 15 bp, Homo sapiens
gtcctgattgcacat

SEQ ID NO: 779625 - DNA, 15 bp, Homo sapiens
tcctgattgcacatc

SEQ ID NO: 779626 - DNA, 15 bp, Homo sapiens
cctgattgcacatcc

SEQ ID NO: 779627 - DNA, 15 bp, Homo sapiens
ctgattgcacatcct

SEQ ID NO: 779628 - DNA, 15 bp, Homo sapiens
tgattgcacatcctg

SEQ ID NO: 779629 - DNA, 15 bp, Homo sapiens
gattgcacatcctgt

SEQ ID NO: 779630 - DNA, 15 bp, Homo sapiens
attgcacatcctgtg

SEQ ID NO: 779631 - DNA, 15 bp, Homo sapiens
ttgcacatcctgtgc

SEQ ID NO: 779632 - DNA, 15 bp, Homo sapiens
tgcacatcctgtgca

SEQ ID NO: 779633 - DNA, 15 bp, Homo sapiens
gcacatcctgtgcag

SEQ ID NO: 779634 - DNA, 15 bp, Homo sapiens
cacatcctgtgcagt

SEQ ID NO: 779635 - DNA, 15 bp, Homo sapiens
acatcctgtgcagtt

SEQ ID NO: 779636 - DNA, 15 bp, Homo sapiens
catcctgtgcagttc

SEQ ID NO: 779637 - DNA, 15 bp, Homo sapiens
atcctgtgcagttct

SEQ ID NO: 779638 - DNA, 15 bp, Homo sapiens
tcctgtgcagttctg

SEQ ID NO: 779639 - DNA, 15 bp, Homo sapiens
cctgtgcagttctgc

SEQ ID NO: 779640 - DNA, 15 bp, Homo sapiens
ctgtgcagttctgca

SEQ ID NO: 779641 - DNA, 15 bp, Homo sapiens
tgtgcagttctgcag

SEQ ID NO: 779642 - DNA, 15 bp, Homo sapiens
gtgcagttctgcagc

SEQ ID NO: 779643 - DNA, 15 bp, Homo sapiens
tgcagttctgcagct

SEQ ID NO: 779644 - DNA, 15 bp, Homo sapiens
gcagttctgcagctg

SEQ ID NO: 779645 - DNA, 15 bp, Homo sapiens
cagttctgcagctga

SEQ ID NO: 779646 - DNA, 15 bp, Homo sapiens
agttctgcagctgaa

SEQ ID NO: 779647 - DNA, 15 bp, Homo sapiens
gttctgcagctgaat

SEQ ID NO: 779648 - DNA, 15 bp, Homo sapiens
ttctgcagctgaatc

SEQ ID NO: 779649 - DNA, 15 bp, Homo sapiens
tctgcagctgaatcc

SEQ ID NO: 779650 - DNA, 15 bp, Homo sapiens
ctgcagctgaatccc

SEQ ID NO: 779651 - DNA, 15 bp, Homo sapiens
tgcagctgaatccca

SEQ ID NO: 779652 - DNA, 15 bp, Homo sapiens
gcagctgaatcccag

SEQ ID NO: 779653 - DNA, 15 bp, Homo sapiens
cagctgaatcccagg

SEQ ID NO: 779654 - DNA, 15 bp, Homo sapiens
agctgaatcccaggg

SEQ ID NO: 779655 - DNA, 15 bp, Homo sapiens
gctgaatcccagggg

SEQ ID NO: 779656 - DNA, 15 bp, Homo sapiens
ctgaatcccaggggc

SEQ ID NO: 779657 - DNA, 15 bp, Homo sapiens
tgaatcccaggggcc

SEQ ID NO: 779658 - DNA, 15 bp, Homo sapiens
gaatcccaggggcct

SEQ ID NO: 779659 - DNA, 15 bp, Homo sapiens
aatcccaggggcctg

SEQ ID NO: 779660 - DNA, 15 bp, Homo sapiens
atcccaggggcctgg

SEQ ID NO: 779661 - DNA, 15 bp, Homo sapiens
tcccaggggcctggg

SEQ ID NO: 779662 - DNA, 15 bp, Homo sapiens
cccaggggcctgggc

SEQ ID NO: 779663 - DNA, 15 bp, Homo sapiens
ccaggggcctgggca

SEQ ID NO: 779664 - DNA, 15 bp, Homo sapiens
caggggcctgggcaa

SEQ ID NO: 779665 - DNA, 15 bp, Homo sapiens
aggggcctgggcaaa

SEQ ID NO: 779666 - DNA, 15 bp, Homo sapiens
ggggcctgggcaaat

SEQ ID NO: 779667 - DNA, 15 bp, Homo sapiens
gggcctgggcaaata

SEQ ID NO: 779668 - DNA, 15 bp, Homo sapiens
ggcctgggcaaatat

SEQ ID NO: 779669 - DNA, 15 bp, Homo sapiens
gcctgggcaaatatg

SEQ ID NO: 779670 - DNA, 15 bp, Homo sapiens
cctgggcaaatatgt

SEQ ID NO: 779671 - DNA, 15 bp, Homo sapiens
ctgggcaaatatgtg

SEQ ID NO: 779672 - DNA, 15 bp, Homo sapiens
tgggcaaatatgtga

SEQ ID NO: 779673 - DNA, 15 bp, Homo sapiens
gggcaaatatgtgag

SEQ ID NO: 779674 - DNA, 15 bp, Homo sapiens
ggcaaatatgtgagt

SEQ ID NO: 779675 - DNA, 15 bp, Homo sapiens
gcaaatatgtgagta

SEQ ID NO: 779676 - DNA, 15 bp, Homo sapiens
caaatatgtgagtag

SEQ ID NO: 779677 - DNA, 15 bp, Homo sapiens
aaatatgtgagtagt

SEQ ID NO: 779678 - DNA, 15 bp, Homo sapiens
aatatgtgagtagtt

SEQ ID NO: 779679 - DNA, 15 bp, Homo sapiens
atatgtgagtagttg

SEQ ID NO: 779680 - DNA, 15 bp, Homo sapiens
tatgtgagtagttgg

SEQ ID NO: 779681 - DNA, 15 bp, Homo sapiens
atgtgagtagttggt

SEQ ID NO: 779682 - DNA, 15 bp, Homo sapiens
tgtgagtagttggtt

SEQ ID NO: 779683 - DNA, 15 bp, Homo sapiens
gtgagtagttggttt

SEQ ID NO: 779684 - DNA, 15 bp, Homo sapiens
tgagtagttggtttc

SEQ ID NO: 779685 - DNA, 15 bp, Homo sapiens
gagtagttggtttcc

SEQ ID NO: 779686 - DNA, 15 bp, Homo sapiens
agtagttggtttccc

SEQ ID NO: 779687 - DNA, 15 bp, Homo sapiens
gtagttggtttccct

SEQ ID NO: 779688 - DNA, 15 bp, Homo sapiens
tagttggtttccctc

SEQ ID NO: 779689 - DNA, 15 bp, Homo sapiens
agttggtttccctcc

SEQ ID NO: 779690 - DNA, 15 bp, Homo sapiens
gttggtttccctccc

SEQ ID NO: 779691 - DNA, 15 bp, Homo sapiens
ttggtttccctccct

SEQ ID NO: 779692 - DNA, 15 bp, Homo sapiens
tggtttccctccctg

SEQ ID NO: 779693 - DNA, 15 bp, Homo sapiens
ggtttccctccctgc

SEQ ID NO: 779694 - DNA, 15 bp, Homo sapiens
gtttccctccctgcc

SEQ ID NO: 779695 - DNA, 15 bp, Homo sapiens
tttccctccctgcct

SEQ ID NO: 779696 - DNA, 15 bp, Homo sapiens
ttccctccctgcctc

SEQ ID NO: 779697 - DNA, 15 bp, Homo sapiens
tccctccctgcctcc

SEQ ID NO: 779698 - DNA, 15 bp, Homo sapiens
ccctccctgcctccc

SEQ ID NO: 779699 - DNA, 15 bp, Homo sapiens
cctccctgcctccct

SEQ ID NO: 779700 - DNA, 15 bp, Homo sapiens
ctccctgcctccctc

SEQ ID NO: 779701 - DNA, 15 bp, Homo sapiens
tccctgcctccctcc

SEQ ID NO: 779702 - DNA, 15 bp, Homo sapiens
ccctgcctccctccc

SEQ ID NO: 779703 - DNA, 15 bp, Homo sapiens
cctgcctccctccct

SEQ ID NO: 779704 - DNA, 15 bp, Homo sapiens
ctgcctccctccctt

SEQ ID NO: 779705 - DNA, 15 bp, Homo sapiens
tgcctccctcccttc

SEQ ID NO: 779706 - DNA, 15 bp, Homo sapiens
gcctccctcccttcc

SEQ ID NO: 779707 - DNA, 15 bp, Homo sapiens
cctccctcccttccc

SEQ ID NO: 779708 - DNA, 15 bp, Homo sapiens
ctccctcccttccct

SEQ ID NO: 779709 - DNA, 15 bp, Homo sapiens
tccctcccttccctc

SEQ ID NO: 779710 - DNA, 15 bp, Homo sapiens
ccctcccttccctcc

SEQ ID NO: 779711 - DNA, 15 bp, Homo sapiens
cctcccttccctccc

SEQ ID NO: 779712 - DNA, 15 bp, Homo sapiens
ctcccttccctccct

SEQ ID NO: 779713 - DNA, 15 bp, Homo sapiens
tcccttccctccctt

SEQ ID NO: 779714 - DNA, 15 bp, Homo sapiens
cccttccctcccttg

SEQ ID NO: 779715 - DNA, 15 bp, Homo sapiens
ccttccctcccttgc

SEQ ID NO: 779716 - DNA, 15 bp, Homo sapiens
cttccctcccttgcc

SEQ ID NO: 779717 - DNA, 15 bp, Homo sapiens
ttccctcccttgcct

SEQ ID NO: 779718 - DNA, 15 bp, Homo sapiens
tccctcccttgcctc

SEQ ID NO: 779719 - DNA, 15 bp, Homo sapiens
ccctcccttgcctcc

SEQ ID NO: 779720 - DNA, 15 bp, Homo sapiens
cctcccttgcctccc

SEQ ID NO: 779721 - DNA, 15 bp, Homo sapiens
ctcccttgcctccct

SEQ ID NO: 779722 - DNA, 15 bp, Homo sapiens
tcccttgcctccctt

SEQ ID NO: 779723 - DNA, 15 bp, Homo sapiens
cccttgcctccctta

SEQ ID NO: 779724 - DNA, 15 bp, Homo sapiens
ccttgcctcccttac

SEQ ID NO: 779725 - DNA, 15 bp, Homo sapiens
cttgcctcccttacc

SEQ ID NO: 779726 - DNA, 15 bp, Homo sapiens
ttgcctcccttacct

SEQ ID NO: 779727 - DNA, 15 bp, Homo sapiens
tgcctcccttacctt

SEQ ID NO: 779728 - DNA, 15 bp, Homo sapiens
gcctcccttaccttc

SEQ ID NO: 779729 - DNA, 15 bp, Homo sapiens
cctcccttaccttcc

SEQ ID NO: 779730 - DNA, 15 bp, Homo sapiens
ctcccttaccttcct

SEQ ID NO: 779731 - DNA, 15 bp, Homo sapiens
tcccttaccttcctt

SEQ ID NO: 779732 - DNA, 15 bp, Homo sapiens
cccttaccttccttc

SEQ ID NO: 779733 - DNA, 15 bp, Homo sapiens
ccttaccttccttcc

SEQ ID NO: 779734 - DNA, 15 bp, Homo sapiens
cttaccttccttccc

SEQ ID NO: 779735 - DNA, 15 bp, Homo sapiens
ttaccttccttccct

SEQ ID NO: 779736 - DNA, 15 bp, Homo sapiens
taccttccttccctt

SEQ ID NO: 779737 - DNA, 15 bp, Homo sapiens
accttccttcccttc

SEQ ID NO: 779738 - DNA, 15 bp, Homo sapiens
ttccttcccttccct

SEQ ID NO: 779739 - DNA, 15 bp, Homo sapiens
tccttcccttccctc

SEQ ID NO: 779740 - DNA, 15 bp, Homo sapiens
ccttcccttccctcc

SEQ ID NO: 779741 - DNA, 15 bp, Homo sapiens
cttcccttccctccc

SEQ ID NO: 779742 - DNA, 15 bp, Homo sapiens
ttcccttccctccct

SEQ ID NO: 779743 - DNA, 15 bp, Homo sapiens
cccttccctcccttc

SEQ ID NO: 779744 - DNA, 15 bp, Homo sapiens
ccttccctcccttcc

SEQ ID NO: 779745 - DNA, 15 bp, Homo sapiens
cttccctcccttcct

SEQ ID NO: 779746 - DNA, 15 bp, Homo sapiens
ttccctcccttcctt

SEQ ID NO: 779747 - DNA, 15 bp, Homo sapiens
tccctcccttccttt

SEQ ID NO: 779748 - DNA, 15 bp, Homo sapiens
ccctcccttcctttc

SEQ ID NO: 779749 - DNA, 15 bp, Homo sapiens
cctcccttcctttcc

SEQ ID NO: 779750 - DNA, 15 bp, Homo sapiens
ctcccttcctttccc

SEQ ID NO: 779751 - DNA, 15 bp, Homo sapiens
tcccttcctttccct

SEQ ID NO: 779752 - DNA, 15 bp, Homo sapiens
cccttcctttccctc

SEQ ID NO: 779753 - DNA, 15 bp, Homo sapiens
ccttcctttccctcc

SEQ ID NO: 779754 - DNA, 15 bp, Homo sapiens
cttcctttccctccc

SEQ ID NO: 779755 - DNA, 15 bp, Homo sapiens
ttcctttccctccct

SEQ ID NO: 779756 - DNA, 15 bp, Homo sapiens
tcctttccctccctt

SEQ ID NO: 779757 - DNA, 15 bp, Homo sapiens
cctttccctcccttc

SEQ ID NO: 779758 - DNA, 15 bp, Homo sapiens
ctttccctcccttcc

SEQ ID NO: 779759 - DNA, 15 bp, Homo sapiens
tttccctcccttccc

SEQ ID NO: 779760 - DNA, 15 bp, Homo sapiens
ttccctcccttccct

SEQ ID NO: 779761 - DNA, 15 bp, Homo sapiens
tccctcccttccctt

SEQ ID NO: 779762 - DNA, 15 bp, Homo sapiens
ccctcccttcccttc

SEQ ID NO: 779763 - DNA, 15 bp, Homo sapiens
cctcccttcccttcc

SEQ ID NO: 779764 - DNA, 15 bp, Homo sapiens
ctcccttcccttccc

SEQ ID NO: 779765 - DNA, 15 bp, Homo sapiens
tcccttcccttccct

SEQ ID NO: 779766 - DNA, 15 bp, Homo sapiens
cccttcccttccctc

SEQ ID NO: 779767 - DNA, 15 bp, Homo sapiens
ccttcccttccctct

SEQ ID NO: 779768 - DNA, 15 bp, Homo sapiens
cttcccttccctctc

SEQ ID NO: 779769 - DNA, 15 bp, Homo sapiens
ttcccttccctctct

SEQ ID NO: 779770 - DNA, 15 bp, Homo sapiens
tcccttccctctctc

SEQ ID NO: 779771 - DNA, 15 bp, Homo sapiens
cccttccctctctcc

SEQ ID NO: 779772 - DNA, 15 bp, Homo sapiens
ccttccctctctccc

SEQ ID NO: 779773 - DNA, 15 bp, Homo sapiens
cttccctctctccct

SEQ ID NO: 779774 - DNA, 15 bp, Homo sapiens
ttccctctctccctt

SEQ ID NO: 779775 - DNA, 15 bp, Homo sapiens
tccctctctcccttc

SEQ ID NO: 779776 - DNA, 15 bp, Homo sapiens
ccctctctcccttcc

SEQ ID NO: 779777 - DNA, 15 bp, Homo sapiens
cctctctcccttcct

SEQ ID NO: 779778 - DNA, 15 bp, Homo sapiens
ctctctcccttcctt

SEQ ID NO: 779779 - DNA, 15 bp, Homo sapiens
tctctcccttccttc

SEQ ID NO: 779780 - DNA, 15 bp, Homo sapiens
ctctcccttccttct

SEQ ID NO: 779781 - DNA, 15 bp, Homo sapiens
tctcccttccttctt

SEQ ID NO: 779782 - DNA, 15 bp, Homo sapiens
ctcccttccttcttt

SEQ ID NO: 779783 - DNA, 15 bp, Homo sapiens
tcccttccttctttc

SEQ ID NO: 779784 - DNA, 15 bp, Homo sapiens
cccttccttctttcc

SEQ ID NO: 779785 - DNA, 15 bp, Homo sapiens
ccttccttctttccc

SEQ ID NO: 779786 - DNA, 15 bp, Homo sapiens
cttccttctttccct

SEQ ID NO: 779787 - DNA, 15 bp, Homo sapiens
ttccttctttccctc

SEQ ID NO: 779788 - DNA, 15 bp, Homo sapiens
tccttctttccctct

SEQ ID NO: 779789 - DNA, 15 bp, Homo sapiens
ccttctttccctctc

SEQ ID NO: 779790 - DNA, 15 bp, Homo sapiens
cttctttccctctct

SEQ ID NO: 779791 - DNA, 15 bp, Homo sapiens
ttctttccctctctc

SEQ ID NO: 779792 - DNA, 15 bp, Homo sapiens
ctttccctctctccc

SEQ ID NO: 779793 - DNA, 15 bp, Homo sapiens
tttccctctctccct

SEQ ID NO: 779794 - DNA, 15 bp, Homo sapiens
ctctcccttccttcc

SEQ ID NO: 779795 - DNA, 15 bp, Homo sapiens
tctcccttccttcct

SEQ ID NO: 779796 - DNA, 15 bp, Homo sapiens
ctcccttccttcctt

SEQ ID NO: 779797 - DNA, 15 bp, Homo sapiens
tcccttccttccttc

SEQ ID NO: 779798 - DNA, 15 bp, Homo sapiens
cccttccttccttcc

SEQ ID NO: 779799 - DNA, 15 bp, Homo sapiens
ccttccttccttcct

SEQ ID NO: 779800 - DNA, 15 bp, Homo sapiens
cttccttccttcctc

SEQ ID NO: 779801 - DNA, 15 bp, Homo sapiens
ttccttccttcctcc

SEQ ID NO: 779802 - DNA, 15 bp, Homo sapiens
tccttccttcctccc

SEQ ID NO: 779803 - DNA, 15 bp, Homo sapiens
ccttccttcctcccc

SEQ ID NO: 779804 - DNA, 15 bp, Homo sapiens
cttccttcctcccca

SEQ ID NO: 779805 - DNA, 15 bp, Homo sapiens
ttccttcctccccac

SEQ ID NO: 779806 - DNA, 15 bp, Homo sapiens
tccttcctccccact

SEQ ID NO: 779807 - DNA, 15 bp, Homo sapiens
ccttcctccccactg

SEQ ID NO: 779808 - DNA, 15 bp, Homo sapiens
cttcctccccactgc

SEQ ID NO: 779809 - DNA, 15 bp, Homo sapiens
ttcctccccactgcc

SEQ ID NO: 779810 - DNA, 15 bp, Homo sapiens
tcctccccactgccc

SEQ ID NO: 779811 - DNA, 15 bp, Homo sapiens
cctccccactgcccc

SEQ ID NO: 779812 - DNA, 15 bp, Homo sapiens
ctccccactgccccc

SEQ ID NO: 779813 - DNA, 15 bp, Homo sapiens
tccccactgccccct

SEQ ID NO: 779814 - DNA, 15 bp, Homo sapiens
ccccactgccccctc

SEQ ID NO: 779815 - DNA, 15 bp, Homo sapiens
cccactgccccctcc

SEQ ID NO: 779816 - DNA, 15 bp, Homo sapiens
ccactgccccctccc

SEQ ID NO: 779817 - DNA, 15 bp, Homo sapiens
cactgccccctccca

SEQ ID NO: 779818 - DNA, 15 bp, Homo sapiens
actgccccctcccac

SEQ ID NO: 779819 - DNA, 15 bp, Homo sapiens
ctgccccctcccacc

SEQ ID NO: 779820 - DNA, 15 bp, Homo sapiens
tgccccctcccacct

SEQ ID NO: 779821 - DNA, 15 bp, Homo sapiens
gccccctcccacctc

SEQ ID NO: 779822 - DNA, 15 bp, Homo sapiens
ccccctcccacctcc

SEQ ID NO: 779823 - DNA, 15 bp, Homo sapiens
cccctcccacctccc

SEQ ID NO: 779824 - DNA, 15 bp, Homo sapiens
ccctcccacctcccc

SEQ ID NO: 779825 - DNA, 15 bp, Homo sapiens
cctcccacctccccc

SEQ ID NO: 779826 - DNA, 15 bp, Homo sapiens
ctcccacctccccca

SEQ ID NO: 779827 - DNA, 15 bp, Homo sapiens
tcccacctcccccac

SEQ ID NO: 779828 - DNA, 15 bp, Homo sapiens
cccacctcccccact

SEQ ID NO: 779829 - DNA, 15 bp, Homo sapiens
ccacctcccccactc

SEQ ID NO: 779830 - DNA, 15 bp, Homo sapiens
cacctcccccactcc

SEQ ID NO: 779831 - DNA, 15 bp, Homo sapiens
acctcccccactcct

SEQ ID NO: 779832 - DNA, 15 bp, Homo sapiens
cctcccccactcctc

SEQ ID NO: 779833 - DNA, 15 bp, Homo sapiens
ctcccccactcctcc

SEQ ID NO: 779834 - DNA, 15 bp, Homo sapiens
tcccccactcctccc

SEQ ID NO: 779835 - DNA, 15 bp, Homo sapiens
cccccactcctccct

SEQ ID NO: 779836 - DNA, 15 bp, Homo sapiens
ccccactcctccctc

SEQ ID NO: 779837 - DNA, 15 bp, Homo sapiens
cccactcctccctcc

SEQ ID NO: 779838 - DNA, 15 bp, Homo sapiens
ccactcctccctcct

SEQ ID NO: 779839 - DNA, 15 bp, Homo sapiens
cactcctccctcctc

SEQ ID NO: 779840 - DNA, 15 bp, Homo sapiens
actcctccctcctcc

SEQ ID NO: 779841 - DNA, 15 bp, Homo sapiens
ctcctccctcctccc

SEQ ID NO: 779842 - DNA, 15 bp, Homo sapiens
tcctccctcctccct

SEQ ID NO: 779843 - DNA, 15 bp, Homo sapiens
cctccctcctccctc

SEQ ID NO: 779844 - DNA, 15 bp, Homo sapiens
ctccctcctccctcc

SEQ ID NO: 779845 - DNA, 15 bp, Homo sapiens
tccctcctccctccc

SEQ ID NO: 779846 - DNA, 15 bp, Homo sapiens
ccctcctccctccct

SEQ ID NO: 779847 - DNA, 15 bp, Homo sapiens
cctcctccctccctc

SEQ ID NO: 779848 - DNA, 15 bp, Homo sapiens
ctcctccctccctcc

SEQ ID NO: 779849 - DNA, 15 bp, Homo sapiens
tcctccctccctccc

SEQ ID NO: 779850 - DNA, 15 bp, Homo sapiens
cctccctccctccct

SEQ ID NO: 779851 - DNA, 15 bp, Homo sapiens
ctccctccctccctt

SEQ ID NO: 779852 - DNA, 15 bp, Homo sapiens
tccctccctcccttc

SEQ ID NO: 779853 - DNA, 15 bp, Homo sapiens
ccctccctcccttcc

SEQ ID NO: 779854 - DNA, 15 bp, Homo sapiens
cctccctcccttcct

SEQ ID NO: 779855 - DNA, 15 bp, Homo sapiens
ctccctcccttcctc

SEQ ID NO: 779856 - DNA, 15 bp, Homo sapiens
ctcccttcctccctc

SEQ ID NO: 779857 - DNA, 15 bp, Homo sapiens
tcccttcctccctcc

SEQ ID NO: 779858 - DNA, 15 bp, Homo sapiens
cccttcctccctccc

SEQ ID NO: 779859 - DNA, 15 bp, Homo sapiens
ccttcctccctccct

SEQ ID NO: 779860 - DNA, 15 bp, Homo sapiens
cttcctccctccctc

SEQ ID NO: 779861 - DNA, 15 bp, Homo sapiens
ttcctccctccctcc

SEQ ID NO: 779862 - DNA, 15 bp, Homo sapiens
ctccctcccttcctt

SEQ ID NO: 779863 - DNA, 15 bp, Homo sapiens
tccctcccttccttc

SEQ ID NO: 779864 - DNA, 15 bp, Homo sapiens
ccctcccttccttcc

SEQ ID NO: 779865 - DNA, 15 bp, Homo sapiens
cctcccttccttcct

SEQ ID NO: 779866 - DNA, 15 bp, Homo sapiens
ctcccttccttcctc

SEQ ID NO: 779867 - DNA, 15 bp, Homo sapiens
tcccttccttcctcg

SEQ ID NO: 779868 - DNA, 15 bp, Homo sapiens
cccttccttcctcgc

SEQ ID NO: 779869 - DNA, 15 bp, Homo sapiens
ccttccttcctcgcc

SEQ ID NO: 779870 - DNA, 15 bp, Homo sapiens
cttccttcctcgcct

SEQ ID NO: 779871 - DNA, 15 bp, Homo sapiens
ttccttcctcgcctc

SEQ ID NO: 779872 - DNA, 15 bp, Homo sapiens
tccttcctcgcctca

SEQ ID NO: 779873 - DNA, 15 bp, Homo sapiens
ccttcctcgcctcat

SEQ ID NO: 779874 - DNA, 15 bp, Homo sapiens
cttcctcgcctcatt

SEQ ID NO: 779875 - DNA, 15 bp, Homo sapiens
ttcctcgcctcattc

SEQ ID NO: 779876 - DNA, 15 bp, Homo sapiens
tcctcgcctcattcc

SEQ ID NO: 779877 - DNA, 15 bp, Homo sapiens
cctcgcctcattcca

SEQ ID NO: 779878 - DNA, 15 bp, Homo sapiens
ctcgcctcattccat

SEQ ID NO: 779879 - DNA, 15 bp, Homo sapiens
tcgcctcattccatt

SEQ ID NO: 779880 - DNA, 15 bp, Homo sapiens
cgcctcattccattc

SEQ ID NO: 779881 - DNA, 15 bp, Homo sapiens
gcctcattccattcc

SEQ ID NO: 779882 - DNA, 15 bp, Homo sapiens
cctcattccattcct

SEQ ID NO: 779883 - DNA, 15 bp, Homo sapiens
ctcattccattcctc

SEQ ID NO: 779884 - DNA, 15 bp, Homo sapiens
tcattccattcctcc

SEQ ID NO: 779885 - DNA, 15 bp, Homo sapiens
cattccattcctccg

SEQ ID NO: 779886 - DNA, 15 bp, Homo sapiens
attccattcctccgt

SEQ ID NO: 779887 - DNA, 15 bp, Homo sapiens
ttccattcctccgtc

SEQ ID NO: 779888 - DNA, 15 bp, Homo sapiens
tccattcctccgtcc

SEQ ID NO: 779889 - DNA, 15 bp, Homo sapiens
ccattcctccgtcct

SEQ ID NO: 779890 - DNA, 15 bp, Homo sapiens
cattcctccgtcctt

SEQ ID NO: 779891 - DNA, 15 bp, Homo sapiens
attcctccgtccttc

SEQ ID NO: 779892 - DNA, 15 bp, Homo sapiens
ttcctccgtccttcc

SEQ ID NO: 779893 - DNA, 15 bp, Homo sapiens
tcctccgtccttccc

SEQ ID NO: 779894 - DNA, 15 bp, Homo sapiens
cctccgtccttccct

SEQ ID NO: 779895 - DNA, 15 bp, Homo sapiens
ctccgtccttccctc

SEQ ID NO: 779896 - DNA, 15 bp, Homo sapiens
tccgtccttccctcc

SEQ ID NO: 779897 - DNA, 15 bp, Homo sapiens
ccgtccttccctccc

SEQ ID NO: 779898 - DNA, 15 bp, Homo sapiens
cgtccttccctccct

SEQ ID NO: 779899 - DNA, 15 bp, Homo sapiens
gtccttccctccctc

SEQ ID NO: 779900 - DNA, 15 bp, Homo sapiens
tccttccctccctcc

SEQ ID NO: 779901 - DNA, 15 bp, Homo sapiens
ccttccctccctcct

SEQ ID NO: 779902 - DNA, 15 bp, Homo sapiens
cttccctccctcctt

SEQ ID NO: 779903 - DNA, 15 bp, Homo sapiens
ttccctccctccttc

SEQ ID NO: 779904 - DNA, 15 bp, Homo sapiens
tccctccctccttcc

SEQ ID NO: 779905 - DNA, 15 bp, Homo sapiens
ccctccctccttccc

SEQ ID NO: 779906 - DNA, 15 bp, Homo sapiens
cctccctccttccca

SEQ ID NO: 779907 - DNA, 15 bp, Homo sapiens
ctccctccttcccaa

SEQ ID NO: 779908 - DNA, 15 bp, Homo sapiens
tccctccttcccaac

SEQ ID NO: 779909 - DNA, 15 bp, Homo sapiens
ccctccttcccaacc

SEQ ID NO: 779910 - DNA, 15 bp, Homo sapiens
cctccttcccaaccc

SEQ ID NO: 779911 - DNA, 15 bp, Homo sapiens
ctccttcccaaccca

SEQ ID NO: 779912 - DNA, 15 bp, Homo sapiens
tccttcccaacccat

SEQ ID NO: 779913 - DNA, 15 bp, Homo sapiens
ccttcccaacccatg

SEQ ID NO: 779914 - DNA, 15 bp, Homo sapiens
cttcccaacccatga

SEQ ID NO: 779915 - DNA, 15 bp, Homo sapiens
ttcccaacccatgaa

SEQ ID NO: 779916 - DNA, 15 bp, Homo sapiens
tcccaacccatgaaa

SEQ ID NO: 779917 - DNA, 15 bp, Homo sapiens
cccaacccatgaaag

SEQ ID NO: 779918 - DNA, 15 bp, Homo sapiens
ccaacccatgaaagc

SEQ ID NO: 779919 - DNA, 15 bp, Homo sapiens
caacccatgaaagct

SEQ ID NO: 779920 - DNA, 15 bp, Homo sapiens
aacccatgaaagctg

SEQ ID NO: 779921 - DNA, 15 bp, Homo sapiens
acccatgaaagctgg

SEQ ID NO: 779922 - DNA, 15 bp, Homo sapiens
cccatgaaagctggc

SEQ ID NO: 779923 - DNA, 15 bp, Homo sapiens
ccatgaaagctggcg

SEQ ID NO: 779924 - DNA, 15 bp, Homo sapiens
catgaaagctggcgc

SEQ ID NO: 779925 - DNA, 15 bp, Homo sapiens
atgaaagctggcgcc

SEQ ID NO: 779926 - DNA, 15 bp, Homo sapiens
tgaaagctggcgccc

SEQ ID NO: 779927 - DNA, 15 bp, Homo sapiens
gaaagctggcgcccc

SEQ ID NO: 779928 - DNA, 15 bp, Homo sapiens
aaagctggcgccccc

SEQ ID NO: 779929 - DNA, 15 bp, Homo sapiens
aagctggcgccccct

SEQ ID NO: 779930 - DNA, 15 bp, Homo sapiens
agctggcgccccctg

SEQ ID NO: 779931 - DNA, 15 bp, Homo sapiens
gctggcgccccctgg

SEQ ID NO: 779932 - DNA, 15 bp, Homo sapiens
ctggcgccccctgga

SEQ ID NO: 779933 - DNA, 15 bp, Homo sapiens
tggcgccccctggag

SEQ ID NO: 779934 - DNA, 15 bp, Homo sapiens
ggcgccccctggagg

SEQ ID NO: 779935 - DNA, 15 bp, Homo sapiens
gcgccccctggaggc

SEQ ID NO: 779936 - DNA, 15 bp, Homo sapiens
cgccccctggaggca

SEQ ID NO: 779937 - DNA, 15 bp, Homo sapiens
gccccctggaggcat

SEQ ID NO: 779938 - DNA, 15 bp, Homo sapiens
ccccctggaggcatt

SEQ ID NO: 779939 - DNA, 15 bp, Homo sapiens
cccctggaggcattt

SEQ ID NO: 779940 - DNA, 15 bp, Homo sapiens
ccctggaggcatttc

SEQ ID NO: 779941 - DNA, 15 bp, Homo sapiens
cctggaggcatttca

SEQ ID NO: 779942 - DNA, 15 bp, Homo sapiens
ctggaggcatttcag

SEQ ID NO: 779943 - DNA, 15 bp, Homo sapiens
tggaggcatttcagg

SEQ ID NO: 779944 - DNA, 15 bp, Homo sapiens
ggaggcatttcagga

SEQ ID NO: 779945 - DNA, 15 bp, Homo sapiens
gaggcatttcaggaa

SEQ ID NO: 779946 - DNA, 15 bp, Homo sapiens
aggcatttcaggaaa

SEQ ID NO: 779947 - DNA, 15 bp, Homo sapiens
ggcatttcaggaaat

SEQ ID NO: 779948 - DNA, 15 bp, Homo sapiens
gcatttcaggaaatg

SEQ ID NO: 779949 - DNA, 15 bp, Homo sapiens
catttcaggaaatga

SEQ ID NO: 779950 - DNA, 15 bp, Homo sapiens
atttcaggaaatgaa

SEQ ID NO: 779951 - DNA, 15 bp, Homo sapiens
tttcaggaaatgaaa

SEQ ID NO: 779952 - DNA, 15 bp, Homo sapiens
ttcaggaaatgaaat

SEQ ID NO: 779953 - DNA, 15 bp, Homo sapiens
tcaggaaatgaaatg

SEQ ID NO: 779954 - DNA, 15 bp, Homo sapiens
caggaaatgaaatgt

SEQ ID NO: 779955 - DNA, 15 bp, Homo sapiens
aggaaatgaaatgtc

SEQ ID NO: 779956 - DNA, 15 bp, Homo sapiens
ggaaatgaaatgtct

SEQ ID NO: 779957 - DNA, 15 bp, Homo sapiens
gaaatgaaatgtctg

SEQ ID NO: 779958 - DNA, 15 bp, Homo sapiens
aaatgaaatgtctgt

SEQ ID NO: 779959 - DNA, 15 bp, Homo sapiens
aatgaaatgtctgta

SEQ ID NO: 779960 - DNA, 15 bp, Homo sapiens
atgaaatgtctgtat

SEQ ID NO: 779961 - DNA, 15 bp, Homo sapiens
tgaaatgtctgtatt

SEQ ID NO: 779962 - DNA, 15 bp, Homo sapiens
gaaatgtctgtattt

SEQ ID NO: 779963 - DNA, 15 bp, Homo sapiens
aaatgtctgtatttg

SEQ ID NO: 779964 - DNA, 15 bp, Homo sapiens
aatgtctgtatttgc

SEQ ID NO: 779965 - DNA, 15 bp, Homo sapiens
atgtctgtatttgcg

SEQ ID NO: 779966 - DNA, 15 bp, Homo sapiens
tgtctgtatttgcgg

SEQ ID NO: 779967 - DNA, 15 bp, Homo sapiens
gtctgtatttgcggc

SEQ ID NO: 779968 - DNA, 15 bp, Homo sapiens
tctgtatttgcggct

SEQ ID NO: 779969 - DNA, 15 bp, Homo sapiens
ctgtatttgcggcta

SEQ ID NO: 779970 - DNA, 15 bp, Homo sapiens
tgtatttgcggctac

SEQ ID NO: 779971 - DNA, 15 bp, Homo sapiens
gtatttgcggctact

SEQ ID NO: 779972 - DNA, 15 bp, Homo sapiens
tatttgcggctactg

SEQ ID NO: 779973 - DNA, 15 bp, Homo sapiens
atttgcggctactga

SEQ ID NO: 779974 - DNA, 15 bp, Homo sapiens
tttgcggctactgag

SEQ ID NO: 779975 - DNA, 15 bp, Homo sapiens
ttgcggctactgagt

SEQ ID NO: 779976 - DNA, 15 bp, Homo sapiens
tgcggctactgagtt

SEQ ID NO: 779977 - DNA, 15 bp, Homo sapiens
gcggctactgagttg

SEQ ID NO: 779978 - DNA, 15 bp, Homo sapiens
cggctactgagttgg

SEQ ID NO: 779979 - DNA, 15 bp, Homo sapiens
ggctactgagttggg

SEQ ID NO: 779980 - DNA, 15 bp, Homo sapiens
gctactgagttgggc

SEQ ID NO: 779981 - DNA, 15 bp, Homo sapiens
ctactgagttgggct

SEQ ID NO: 779982 - DNA, 15 bp, Homo sapiens
tactgagttgggctg

SEQ ID NO: 779983 - DNA, 15 bp, Homo sapiens
actgagttgggctgg

SEQ ID NO: 779984 - DNA, 15 bp, Homo sapiens
ctgagttgggctggg

SEQ ID NO: 779985 - DNA, 15 bp, Homo sapiens
tgagttgggctggga

SEQ ID NO: 779986 - DNA, 15 bp, Homo sapiens
gagttgggctgggag

SEQ ID NO: 779987 - DNA, 15 bp, Homo sapiens
agttgggctgggaga

SEQ ID NO: 779988 - DNA, 15 bp, Homo sapiens
gttgggctgggagac

SEQ ID NO: 779989 - DNA, 15 bp, Homo sapiens
ttgggctgggagact

SEQ ID NO: 779990 - DNA, 15 bp, Homo sapiens
tgggctgggagactt

SEQ ID NO: 779991 - DNA, 15 bp, Homo sapiens
gggctgggagacttt

SEQ ID NO: 779992 - DNA, 15 bp, Homo sapiens
ggctgggagactttt

SEQ ID NO: 779993 - DNA, 15 bp, Homo sapiens
gctgggagacttttc

SEQ ID NO: 779994 - DNA, 15 bp, Homo sapiens
ctgggagacttttct

SEQ ID NO: 779995 - DNA, 15 bp, Homo sapiens
tgggagacttttctt

SEQ ID NO: 779996 - DNA, 15 bp, Homo sapiens
gggagacttttctta

SEQ ID NO: 779997 - DNA, 15 bp, Homo sapiens
ggagacttttcttac

SEQ ID NO: 779998 - DNA, 15 bp, Homo sapiens
gagacttttcttacc

SEQ ID NO: 779999 - DNA, 15 bp, Homo sapiens
agacttttcttaccc

SEQ ID NO: 780000 - DNA, 15 bp, Homo sapiens
gacttttcttaccca

SEQ ID NO: 780001 - DNA, 15 bp, Homo sapiens
acttttcttacccag

SEQ ID NO: 780002 - DNA, 15 bp, Homo sapiens
cttttcttacccagg

SEQ ID NO: 780003 - DNA, 15 bp, Homo sapiens
ttttcttacccaggt

SEQ ID NO: 780004 - DNA, 15 bp, Homo sapiens
tttcttacccaggtt

SEQ ID NO: 780005 - DNA, 15 bp, Homo sapiens
ttcttacccaggttt

SEQ ID NO: 780006 - DNA, 15 bp, Homo sapiens
tcttacccaggtttt

SEQ ID NO: 780007 - DNA, 15 bp, Homo sapiens
cttacccaggttttc

SEQ ID NO: 780008 - DNA, 15 bp, Homo sapiens
ttacccaggttttcc

SEQ ID NO: 780009 - DNA, 15 bp, Homo sapiens
tacccaggttttccc

SEQ ID NO: 780010 - DNA, 15 bp, Homo sapiens
acccaggttttcccc

SEQ ID NO: 780011 - DNA, 15 bp, Homo sapiens
cccaggttttccccc

SEQ ID NO: 780012 - DNA, 15 bp, Homo sapiens
ccaggttttccccca

SEQ ID NO: 780013 - DNA, 15 bp, Homo sapiens
caggttttcccccaa

SEQ ID NO: 780014 - DNA, 15 bp, Homo sapiens
aggttttcccccaag

SEQ ID NO: 780015 - DNA, 15 bp, Homo sapiens
ggttttcccccaagg

SEQ ID NO: 780016 - DNA, 15 bp, Homo sapiens
gttttcccccaaggc

SEQ ID NO: 780017 - DNA, 15 bp, Homo sapiens
ttttcccccaaggcc

SEQ ID NO: 780018 - DNA, 15 bp, Homo sapiens
tttcccccaaggcct

SEQ ID NO: 780019 - DNA, 15 bp, Homo sapiens
ttcccccaaggcctt

SEQ ID NO: 780020 - DNA, 15 bp, Homo sapiens
tcccccaaggccttc

SEQ ID NO: 780021 - DNA, 15 bp, Homo sapiens
cccccaaggccttca

SEQ ID NO: 780022 - DNA, 15 bp, Homo sapiens
ccccaaggccttcag

SEQ ID NO: 780023 - DNA, 15 bp, Homo sapiens
cccaaggccttcaga

SEQ ID NO: 780024 - DNA, 15 bp, Homo sapiens
ccaaggccttcagag

SEQ ID NO: 780025 - DNA, 15 bp, Homo sapiens
caaggccttcagagg

SEQ ID NO: 780026 - DNA, 15 bp, Homo sapiens
aaggccttcagaggg

SEQ ID NO: 780027 - DNA, 15 bp, Homo sapiens
aggccttcagagggt

SEQ ID NO: 780028 - DNA, 15 bp, Homo sapiens
ggccttcagagggtg

SEQ ID NO: 780029 - DNA, 15 bp, Homo sapiens
gccttcagagggtgc

SEQ ID NO: 780030 - DNA, 15 bp, Homo sapiens
ccttcagagggtgct

SEQ ID NO: 780031 - DNA, 15 bp, Homo sapiens
cttcagagggtgctg

SEQ ID NO: 780032 - DNA, 15 bp, Homo sapiens
ttcagagggtgctga

SEQ ID NO: 780033 - DNA, 15 bp, Homo sapiens
tcagagggtgctgat

SEQ ID NO: 780034 - DNA, 15 bp, Homo sapiens
cagagggtgctgatg

SEQ ID NO: 780035 - DNA, 15 bp, Homo sapiens
agagggtgctgatgg

SEQ ID NO: 780036 - DNA, 15 bp, Homo sapiens
gagggtgctgatggc

SEQ ID NO: 780037 - DNA, 15 bp, Homo sapiens
agggtgctgatggct

SEQ ID NO: 780038 - DNA, 15 bp, Homo sapiens
gggtgctgatggctt

SEQ ID NO: 780039 - DNA, 15 bp, Homo sapiens
ggtgctgatggctta

SEQ ID NO: 780040 - DNA, 15 bp, Homo sapiens
gtgctgatggcttag

SEQ ID NO: 780041 - DNA, 15 bp, Homo sapiens
tgctgatggcttagc

SEQ ID NO: 780042 - DNA, 15 bp, Homo sapiens
gctgatggcttagca

SEQ ID NO: 780043 - DNA, 15 bp, Homo sapiens
ctgatggcttagcac

SEQ ID NO: 780044 - DNA, 15 bp, Homo sapiens
tgatggcttagcact

SEQ ID NO: 780045 - DNA, 15 bp, Homo sapiens
gatggcttagcactc

SEQ ID NO: 780046 - DNA, 15 bp, Homo sapiens
atggcttagcactcc

SEQ ID NO: 780047 - DNA, 15 bp, Homo sapiens
tggcttagcactccg

SEQ ID NO: 780048 - DNA, 15 bp, Homo sapiens
ggcttagcactccgt

SEQ ID NO: 780049 - DNA, 15 bp, Homo sapiens
gcttagcactccgtt

SEQ ID NO: 780050 - DNA, 15 bp, Homo sapiens
cttagcactccgttt

SEQ ID NO: 780051 - DNA, 15 bp, Homo sapiens
ttagcactccgtttt

SEQ ID NO: 780052 - DNA, 15 bp, Homo sapiens
tagcactccgttttt

SEQ ID NO: 780053 - DNA, 15 bp, Homo sapiens
agcactccgtttttg

SEQ ID NO: 780054 - DNA, 15 bp, Homo sapiens
gcactccgtttttgt

SEQ ID NO: 780055 - DNA, 15 bp, Homo sapiens
cactccgtttttgtc

SEQ ID NO: 780056 - DNA, 15 bp, Homo sapiens
actccgtttttgtca

SEQ ID NO: 780057 - DNA, 15 bp, Homo sapiens
ctccgtttttgtcag

SEQ ID NO: 780058 - DNA, 15 bp, Homo sapiens
tccgtttttgtcaga

SEQ ID NO: 780059 - DNA, 15 bp, Homo sapiens
ccgtttttgtcagaa

SEQ ID NO: 780060 - DNA, 15 bp, Homo sapiens
cgtttttgtcagaaa

SEQ ID NO: 780061 - DNA, 15 bp, Homo sapiens
gtttttgtcagaaaa

SEQ ID NO: 780062 - DNA, 15 bp, Homo sapiens
tttttgtcagaaaaa

SEQ ID NO: 780063 - DNA, 15 bp, Homo sapiens
ttttgtcagaaaaat

SEQ ID NO: 780064 - DNA, 15 bp, Homo sapiens
tttgtcagaaaaata

SEQ ID NO: 780065 - DNA, 15 bp, Homo sapiens
ttgtcagaaaaatat

SEQ ID NO: 780066 - DNA, 15 bp, Homo sapiens
tgtcagaaaaatatc

SEQ ID NO: 780067 - DNA, 15 bp, Homo sapiens
gtcagaaaaatatcc

SEQ ID NO: 780068 - DNA, 15 bp, Homo sapiens
tcagaaaaatatcct

SEQ ID NO: 780069 - DNA, 15 bp, Homo sapiens
cagaaaaatatcctt

SEQ ID NO: 780070 - DNA, 15 bp, Homo sapiens
agaaaaatatcctta

SEQ ID NO: 780071 - DNA, 15 bp, Homo sapiens
gaaaaatatccttag

SEQ ID NO: 780072 - DNA, 15 bp, Homo sapiens
aaaaatatccttaga

SEQ ID NO: 780073 - DNA, 15 bp, Homo sapiens
aaaatatccttagag

SEQ ID NO: 780074 - DNA, 15 bp, Homo sapiens
aaatatccttagagc

SEQ ID NO: 780075 - DNA, 15 bp, Homo sapiens
aatatccttagagcc

SEQ ID NO: 780076 - DNA, 15 bp, Homo sapiens
atatccttagagcct

SEQ ID NO: 780077 - DNA, 15 bp, Homo sapiens
tatccttagagcctc

SEQ ID NO: 780078 - DNA, 15 bp, Homo sapiens
atccttagagcctcc

SEQ ID NO: 780079 - DNA, 15 bp, Homo sapiens
tccttagagcctcca

SEQ ID NO: 780080 - DNA, 15 bp, Homo sapiens
ccttagagcctccat

SEQ ID NO: 780081 - DNA, 15 bp, Homo sapiens
cttagagcctccatt

SEQ ID NO: 780082 - DNA, 15 bp, Homo sapiens
ttagagcctccattt

SEQ ID NO: 780083 - DNA, 15 bp, Homo sapiens
tagagcctccatttc

SEQ ID NO: 780084 - DNA, 15 bp, Homo sapiens
agagcctccatttca

SEQ ID NO: 780085 - DNA, 15 bp, Homo sapiens
gagcctccatttcag

SEQ ID NO: 780086 - DNA, 15 bp, Homo sapiens
agcctccatttcagc

SEQ ID NO: 780087 - DNA, 15 bp, Homo sapiens
gcctccatttcagct

SEQ ID NO: 780088 - DNA, 15 bp, Homo sapiens
cctccatttcagctg

SEQ ID NO: 780089 - DNA, 15 bp, Homo sapiens
ctccatttcagctgc

SEQ ID NO: 780090 - DNA, 15 bp, Homo sapiens
tccatttcagctgcg

SEQ ID NO: 780091 - DNA, 15 bp, Homo sapiens
ccatttcagctgcga

SEQ ID NO: 780092 - DNA, 15 bp, Homo sapiens
catttcagctgcgag

SEQ ID NO: 780093 - DNA, 15 bp, Homo sapiens
atttcagctgcgaga

SEQ ID NO: 780094 - DNA, 15 bp, Homo sapiens
tttcagctgcgagaa

SEQ ID NO: 780095 - DNA, 15 bp, Homo sapiens
ttcagctgcgagaaa

SEQ ID NO: 780096 - DNA, 15 bp, Homo sapiens
tcagctgcgagaaag

SEQ ID NO: 780097 - DNA, 15 bp, Homo sapiens
cagctgcgagaaagt

SEQ ID NO: 780098 - DNA, 15 bp, Homo sapiens
agctgcgagaaagtt

SEQ ID NO: 780099 - DNA, 15 bp, Homo sapiens
gctgcgagaaagttt

SEQ ID NO: 780100 - DNA, 15 bp, Homo sapiens
ctgcgagaaagtttg

SEQ ID NO: 780101 - DNA, 15 bp, Homo sapiens
tgcgagaaagtttgt

SEQ ID NO: 780102 - DNA, 15 bp, Homo sapiens
gcgagaaagtttgtt

SEQ ID NO: 780103 - DNA, 15 bp, Homo sapiens
cgagaaagtttgttt

SEQ ID NO: 780104 - DNA, 15 bp, Homo sapiens
gagaaagtttgttta

SEQ ID NO: 780105 - DNA, 15 bp, Homo sapiens
agaaagtttgtttag

SEQ ID NO: 780106 - DNA, 15 bp, Homo sapiens
gaaagtttgtttagc

SEQ ID NO: 780107 - DNA, 15 bp, Homo sapiens
aaagtttgtttagca

SEQ ID NO: 780108 - DNA, 15 bp, Homo sapiens
aagtttgtttagcag

SEQ ID NO: 780109 - DNA, 15 bp, Homo sapiens
agtttgtttagcagg

SEQ ID NO: 780110 - DNA, 15 bp, Homo sapiens
gtttgtttagcaggg

SEQ ID NO: 780111 - DNA, 15 bp, Homo sapiens
tttgtttagcaggga

SEQ ID NO: 780112 - DNA, 15 bp, Homo sapiens
ttgtttagcagggag

SEQ ID NO: 780113 - DNA, 15 bp, Homo sapiens
tgtttagcagggaga

SEQ ID NO: 780114 - DNA, 15 bp, Homo sapiens
gtttagcagggagac

SEQ ID NO: 780115 - DNA, 15 bp, Homo sapiens
tttagcagggagact

SEQ ID NO: 780116 - DNA, 15 bp, Homo sapiens
ttagcagggagactc

SEQ ID NO: 780117 - DNA, 15 bp, Homo sapiens
tagcagggagactca

SEQ ID NO: 780118 - DNA, 15 bp, Homo sapiens
agcagggagactcaa

SEQ ID NO: 780119 - DNA, 15 bp, Homo sapiens
gcagggagactcaaa

SEQ ID NO: 780120 - DNA, 15 bp, Homo sapiens
cagggagactcaaaa

SEQ ID NO: 780121 - DNA, 15 bp, Homo sapiens
agggagactcaaaaa

SEQ ID NO: 780122 - DNA, 15 bp, Homo sapiens
gggagactcaaaaat

SEQ ID NO: 780123 - DNA, 15 bp, Homo sapiens
ggagactcaaaaata

SEQ ID NO: 780124 - DNA, 15 bp, Homo sapiens
gagactcaaaaatag

SEQ ID NO: 780125 - DNA, 15 bp, Homo sapiens
agactcaaaaataga

SEQ ID NO: 780126 - DNA, 15 bp, Homo sapiens
gactcaaaaatagag

SEQ ID NO: 780127 - DNA, 15 bp, Homo sapiens
actcaaaaatagaga

SEQ ID NO: 780128 - DNA, 15 bp, Homo sapiens
ctcaaaaatagagat

SEQ ID NO: 780129 - DNA, 15 bp, Homo sapiens
tcaaaaatagagatg

SEQ ID NO: 780130 - DNA, 15 bp, Homo sapiens
caaaaatagagatga

SEQ ID NO: 780131 - DNA, 15 bp, Homo sapiens
aaaaatagagatgat

SEQ ID NO: 780132 - DNA, 15 bp, Homo sapiens
aaaatagagatgatg

SEQ ID NO: 780133 - DNA, 15 bp, Homo sapiens
aaatagagatgatga

SEQ ID NO: 780134 - DNA, 15 bp, Homo sapiens
aatagagatgatgat

SEQ ID NO: 780135 - DNA, 15 bp, Homo sapiens
atagagatgatgatg

SEQ ID NO: 780136 - DNA, 15 bp, Homo sapiens
tagagatgatgatga

SEQ ID NO: 780137 - DNA, 15 bp, Homo sapiens
agagatgatgatgac

SEQ ID NO: 780138 - DNA, 15 bp, Homo sapiens
gagatgatgatgaca

SEQ ID NO: 780139 - DNA, 15 bp, Homo sapiens
agatgatgatgacaa

SEQ ID NO: 780140 - DNA, 15 bp, Homo sapiens
gatgatgatgacaaa

SEQ ID NO: 780141 - DNA, 15 bp, Homo sapiens
atgatgatgacaaag

SEQ ID NO: 780142 - DNA, 15 bp, Homo sapiens
tgatgatgacaaagt

SEQ ID NO: 780143 - DNA, 15 bp, Homo sapiens
gatgatgacaaagtc

SEQ ID NO: 780144 - DNA, 15 bp, Homo sapiens
atgatgacaaagtca

SEQ ID NO: 780145 - DNA, 15 bp, Homo sapiens
tgatgacaaagtcat

SEQ ID NO: 780146 - DNA, 15 bp, Homo sapiens
gatgacaaagtcatc

SEQ ID NO: 780147 - DNA, 15 bp, Homo sapiens
atgacaaagtcatca

SEQ ID NO: 780148 - DNA, 15 bp, Homo sapiens
tgacaaagtcatcag

SEQ ID NO: 780149 - DNA, 15 bp, Homo sapiens
gacaaagtcatcagc

SEQ ID NO: 780150 - DNA, 15 bp, Homo sapiens
acaaagtcatcagcc

SEQ ID NO: 780151 - DNA, 15 bp, Homo sapiens
caaagtcatcagcct

SEQ ID NO: 780152 - DNA, 15 bp, Homo sapiens
aaagtcatcagcctt

SEQ ID NO: 780153 - DNA, 15 bp, Homo sapiens
aagtcatcagccttt

SEQ ID NO: 780154 - DNA, 15 bp, Homo sapiens
agtcatcagcctttg

SEQ ID NO: 780155 - DNA, 15 bp, Homo sapiens
gtcatcagcctttgt

SEQ ID NO: 780156 - DNA, 15 bp, Homo sapiens
tcatcagcctttgtc

SEQ ID NO: 780157 - DNA, 15 bp, Homo sapiens
catcagcctttgtcg

SEQ ID NO: 780158 - DNA, 15 bp, Homo sapiens
atcagcctttgtcgt

SEQ ID NO: 780159 - DNA, 15 bp, Homo sapiens
tcagcctttgtcgtt

SEQ ID NO: 780160 - DNA, 15 bp, Homo sapiens
cagcctttgtcgttg

SEQ ID NO: 780161 - DNA, 15 bp, Homo sapiens
agcctttgtcgttgc

SEQ ID NO: 780162 - DNA, 15 bp, Homo sapiens
gcctttgtcgttgca

SEQ ID NO: 780163 - DNA, 15 bp, Homo sapiens
cctttgtcgttgcag

SEQ ID NO: 780164 - DNA, 15 bp, Homo sapiens
ctttgtcgttgcagg

SEQ ID NO: 780165 - DNA, 15 bp, Homo sapiens
tttgtcgttgcaggg

SEQ ID NO: 780166 - DNA, 15 bp, Homo sapiens
ttgtcgttgcagggg

SEQ ID NO: 780167 - DNA, 15 bp, Homo sapiens
tgtcgttgcagggga

SEQ ID NO: 780168 - DNA, 15 bp, Homo sapiens
gtcgttgcaggggag

SEQ ID NO: 780169 - DNA, 15 bp, Homo sapiens
tcgttgcaggggagt

SEQ ID NO: 780170 - DNA, 15 bp, Homo sapiens
cgttgcaggggagtg

SEQ ID NO: 780171 - DNA, 15 bp, Homo sapiens
gttgcaggggagtgc

SEQ ID NO: 780172 - DNA, 15 bp, Homo sapiens
ttgcaggggagtgca

SEQ ID NO: 780173 - DNA, 15 bp, Homo sapiens
tgcaggggagtgcat

SEQ ID NO: 780174 - DNA, 15 bp, Homo sapiens
gcaggggagtgcatg

SEQ ID NO: 780175 - DNA, 15 bp, Homo sapiens
caggggagtgcatgc

SEQ ID NO: 780176 - DNA, 15 bp, Homo sapiens
aggggagtgcatgct

SEQ ID NO: 780177 - DNA, 15 bp, Homo sapiens
ggggagtgcatgctt

SEQ ID NO: 780178 - DNA, 15 bp, Homo sapiens
gggagtgcatgcttg

SEQ ID NO: 780179 - DNA, 15 bp, Homo sapiens
ggagtgcatgcttgg

SEQ ID NO: 780180 - DNA, 15 bp, Homo sapiens
gagtgcatgcttgga

SEQ ID NO: 780181 - DNA, 15 bp, Homo sapiens
agtgcatgcttggaa

SEQ ID NO: 780182 - DNA, 15 bp, Homo sapiens
gtgcatgcttggaaa

SEQ ID NO: 780183 - DNA, 15 bp, Homo sapiens
tgcatgcttggaaag

SEQ ID NO: 780184 - DNA, 15 bp, Homo sapiens
gcatgcttggaaagt

SEQ ID NO: 780185 - DNA, 15 bp, Homo sapiens
catgcttggaaagtc

SEQ ID NO: 780186 - DNA, 15 bp, Homo sapiens
atgcttggaaagtca

SEQ ID NO: 780187 - DNA, 15 bp, Homo sapiens
tgcttggaaagtcac

SEQ ID NO: 780188 - DNA, 15 bp, Homo sapiens
gcttggaaagtcaca

SEQ ID NO: 780189 - DNA, 15 bp, Homo sapiens
cttggaaagtcacac

SEQ ID NO: 780190 - DNA, 15 bp, Homo sapiens
ttggaaagtcacact

SEQ ID NO: 780191 - DNA, 15 bp, Homo sapiens
tggaaagtcacactc

SEQ ID NO: 780192 - DNA, 15 bp, Homo sapiens
ggaaagtcacactcg

SEQ ID NO: 780193 - DNA, 15 bp, Homo sapiens
gaaagtcacactcgg

SEQ ID NO: 780194 - DNA, 15 bp, Homo sapiens
aaagtcacactcggg

SEQ ID NO: 780195 - DNA, 15 bp, Homo sapiens
aagtcacactcggga

SEQ ID NO: 780196 - DNA, 15 bp, Homo sapiens
agtcacactcgggac

SEQ ID NO: 780197 - DNA, 15 bp, Homo sapiens
gtcacactcgggacc

SEQ ID NO: 780198 - DNA, 15 bp, Homo sapiens
tcacactcgggacca

SEQ ID NO: 780199 - DNA, 15 bp, Homo sapiens
cacactcgggaccac

SEQ ID NO: 780200 - DNA, 15 bp, Homo sapiens
acactcgggaccaca

SEQ ID NO: 780201 - DNA, 15 bp, Homo sapiens
cactcgggaccacac

SEQ ID NO: 780202 - DNA, 15 bp, Homo sapiens
actcgggaccacacg

SEQ ID NO: 780203 - DNA, 15 bp, Homo sapiens
ctcgggaccacacgc

SEQ ID NO: 780204 - DNA, 15 bp, Homo sapiens
tcgggaccacacgca

SEQ ID NO: 780205 - DNA, 15 bp, Homo sapiens
cgggaccacacgcaa

SEQ ID NO: 780206 - DNA, 15 bp, Homo sapiens
gggaccacacgcaag

SEQ ID NO: 780207 - DNA, 15 bp, Homo sapiens
ggaccacacgcaagc

SEQ ID NO: 780208 - DNA, 15 bp, Homo sapiens
gaccacacgcaagct

SEQ ID NO: 780209 - DNA, 15 bp, Homo sapiens
accacacgcaagctg

SEQ ID NO: 780210 - DNA, 15 bp, Homo sapiens
ccacacgcaagctga

SEQ ID NO: 780211 - DNA, 15 bp, Homo sapiens
cacacgcaagctgat

SEQ ID NO: 780212 - DNA, 15 bp, Homo sapiens
acacgcaagctgatg

SEQ ID NO: 780213 - DNA, 15 bp, Homo sapiens
cacgcaagctgatgc

SEQ ID NO: 780214 - DNA, 15 bp, Homo sapiens
acgcaagctgatgct

SEQ ID NO: 780215 - DNA, 15 bp, Homo sapiens
cgcaagctgatgctt

SEQ ID NO: 780216 - DNA, 15 bp, Homo sapiens
gcaagctgatgcttc

SEQ ID NO: 780217 - DNA, 15 bp, Homo sapiens
caagctgatgcttcc

SEQ ID NO: 780218 - DNA, 15 bp, Homo sapiens
aagctgatgcttcca

SEQ ID NO: 780219 - DNA, 15 bp, Homo sapiens
agctgatgcttccaa

SEQ ID NO: 780220 - DNA, 15 bp, Homo sapiens
gctgatgcttccaag

SEQ ID NO: 780221 - DNA, 15 bp, Homo sapiens
ctgatgcttccaagt

SEQ ID NO: 780222 - DNA, 15 bp, Homo sapiens
tgatgcttccaagtt

SEQ ID NO: 780223 - DNA, 15 bp, Homo sapiens
gatgcttccaagttt

SEQ ID NO: 780224 - DNA, 15 bp, Homo sapiens
atgcttccaagttta

SEQ ID NO: 780225 - DNA, 15 bp, Homo sapiens
tgcttccaagtttag

SEQ ID NO: 780226 - DNA, 15 bp, Homo sapiens
gcttccaagtttagt

SEQ ID NO: 780227 - DNA, 15 bp, Homo sapiens
cttccaagtttagtt

SEQ ID NO: 780228 - DNA, 15 bp, Homo sapiens
ttccaagtttagttt

SEQ ID NO: 780229 - DNA, 15 bp, Homo sapiens
tccaagtttagttta

SEQ ID NO: 780230 - DNA, 15 bp, Homo sapiens
ccaagtttagtttac

SEQ ID NO: 780231 - DNA, 15 bp, Homo sapiens
caagtttagtttacg

SEQ ID NO: 780232 - DNA, 15 bp, Homo sapiens
aagtttagtttacga

SEQ ID NO: 780233 - DNA, 15 bp, Homo sapiens
agtttagtttacgag

SEQ ID NO: 780234 - DNA, 15 bp, Homo sapiens
gtttagtttacgagg

SEQ ID NO: 780235 - DNA, 15 bp, Homo sapiens
tttagtttacgaggc

SEQ ID NO: 780236 - DNA, 15 bp, Homo sapiens
ttagtttacgaggct

SEQ ID NO: 780237 - DNA, 15 bp, Homo sapiens
tagtttacgaggcta

SEQ ID NO: 780238 - DNA, 15 bp, Homo sapiens
agtttacgaggctat

SEQ ID NO: 780239 - DNA, 15 bp, Homo sapiens
gtttacgaggctatg

SEQ ID NO: 780240 - DNA, 15 bp, Homo sapiens
tttacgaggctatgt

SEQ ID NO: 780241 - DNA, 15 bp, Homo sapiens
ttacgaggctatgtt

SEQ ID NO: 780242 - DNA, 15 bp, Homo sapiens
tacgaggctatgttt

SEQ ID NO: 780243 - DNA, 15 bp, Homo sapiens
acgaggctatgttta

SEQ ID NO: 780244 - DNA, 15 bp, Homo sapiens
cgaggctatgtttag

SEQ ID NO: 780245 - DNA, 15 bp, Homo sapiens
gaggctatgtttagg

SEQ ID NO: 780246 - DNA, 15 bp, Homo sapiens
aggctatgtttagga

SEQ ID NO: 780247 - DNA, 15 bp, Homo sapiens
ggctatgtttaggag

SEQ ID NO: 780248 - DNA, 15 bp, Homo sapiens
gctatgtttaggagg

SEQ ID NO: 780249 - DNA, 15 bp, Homo sapiens
ctatgtttaggagga

SEQ ID NO: 780250 - DNA, 15 bp, Homo sapiens
tatgtttaggaggag

SEQ ID NO: 780251 - DNA, 15 bp, Homo sapiens
atgtttaggaggagg

SEQ ID NO: 780252 - DNA, 15 bp, Homo sapiens
tgtttaggaggaggc

SEQ ID NO: 780253 - DNA, 15 bp, Homo sapiens
gtttaggaggaggca

SEQ ID NO: 780254 - DNA, 15 bp, Homo sapiens
tttaggaggaggcag

SEQ ID NO: 780255 - DNA, 15 bp, Homo sapiens
ttaggaggaggcaga

SEQ ID NO: 780256 - DNA, 15 bp, Homo sapiens
taggaggaggcagac

SEQ ID NO: 780257 - DNA, 15 bp, Homo sapiens
aggaggaggcagact

SEQ ID NO: 780258 - DNA, 15 bp, Homo sapiens
ggaggaggcagactg

SEQ ID NO: 780259 - DNA, 15 bp, Homo sapiens
gaggaggcagactga

SEQ ID NO: 780260 - DNA, 15 bp, Homo sapiens
aggaggcagactgac

SEQ ID NO: 780261 - DNA, 15 bp, Homo sapiens
ggaggcagactgact

SEQ ID NO: 780262 - DNA, 15 bp, Homo sapiens
gaggcagactgactc

SEQ ID NO: 780263 - DNA, 15 bp, Homo sapiens
aggcagactgactcg

SEQ ID NO: 780264 - DNA, 15 bp, Homo sapiens
ggcagactgactcgt

SEQ ID NO: 780265 - DNA, 15 bp, Homo sapiens
gcagactgactcgtg

SEQ ID NO: 780266 - DNA, 15 bp, Homo sapiens
cagactgactcgtgc

SEQ ID NO: 780267 - DNA, 15 bp, Homo sapiens
agactgactcgtgcc

SEQ ID NO: 780268 - DNA, 15 bp, Homo sapiens
gactgactcgtgcct

SEQ ID NO: 780269 - DNA, 15 bp, Homo sapiens
actgactcgtgccta

SEQ ID NO: 780270 - DNA, 15 bp, Homo sapiens
ctgactcgtgcctac

SEQ ID NO: 780271 - DNA, 15 bp, Homo sapiens
tgactcgtgcctacg

SEQ ID NO: 780272 - DNA, 15 bp, Homo sapiens
gactcgtgcctacgg

SEQ ID NO: 780273 - DNA, 15 bp, Homo sapiens
actcgtgcctacggg

SEQ ID NO: 780274 - DNA, 15 bp, Homo sapiens
ctcgtgcctacgggc

SEQ ID NO: 780275 - DNA, 15 bp, Homo sapiens
tcgtgcctacgggcc

SEQ ID NO: 780276 - DNA, 15 bp, Homo sapiens
cgtgcctacgggccc

SEQ ID NO: 780277 - DNA, 15 bp, Homo sapiens
gtgcctacgggcccc

SEQ ID NO: 780278 - DNA, 15 bp, Homo sapiens
tgcctacgggcccca

SEQ ID NO: 780279 - DNA, 15 bp, Homo sapiens
gcctacgggccccaa

SEQ ID NO: 780280 - DNA, 15 bp, Homo sapiens
cctacgggccccaaa

SEQ ID NO: 780281 - DNA, 15 bp, Homo sapiens
ctacgggccccaaac

SEQ ID NO: 780282 - DNA, 15 bp, Homo sapiens
tacgggccccaaaca

SEQ ID NO: 780283 - DNA, 15 bp, Homo sapiens
acgggccccaaacag

SEQ ID NO: 780284 - DNA, 15 bp, Homo sapiens
cgggccccaaacagc

SEQ ID NO: 780285 - DNA, 15 bp, Homo sapiens
gggccccaaacagcc

SEQ ID NO: 780286 - DNA, 15 bp, Homo sapiens
ggccccaaacagccc

SEQ ID NO: 780287 - DNA, 15 bp, Homo sapiens
gccccaaacagccca

SEQ ID NO: 780288 - DNA, 15 bp, Homo sapiens
ccccaaacagcccaa

SEQ ID NO: 780289 - DNA, 15 bp, Homo sapiens
cccaaacagcccaat

SEQ ID NO: 780290 - DNA, 15 bp, Homo sapiens
ccaaacagcccaatt

SEQ ID NO: 780291 - DNA, 15 bp, Homo sapiens
caaacagcccaattt

SEQ ID NO: 780292 - DNA, 15 bp, Homo sapiens
aaacagcccaatttg

SEQ ID NO: 780293 - DNA, 15 bp, Homo sapiens
aacagcccaatttgg

SEQ ID NO: 780294 - DNA, 15 bp, Homo sapiens
acagcccaatttggt

SEQ ID NO: 780295 - DNA, 15 bp, Homo sapiens
cagcccaatttggtg

SEQ ID NO: 780296 - DNA, 15 bp, Homo sapiens
agcccaatttggtgc

SEQ ID NO: 780297 - DNA, 15 bp, Homo sapiens
gcccaatttggtgca

SEQ ID NO: 780298 - DNA, 15 bp, Homo sapiens
cccaatttggtgcac

SEQ ID NO: 780299 - DNA, 15 bp, Homo sapiens
ccaatttggtgcact

SEQ ID NO: 780300 - DNA, 15 bp, Homo sapiens
caatttggtgcacta

SEQ ID NO: 780301 - DNA, 15 bp, Homo sapiens
aatttggtgcactaa

SEQ ID NO: 780302 - DNA, 15 bp, Homo sapiens
atttggtgcactaaa

SEQ ID NO: 780303 - DNA, 15 bp, Homo sapiens
tttggtgcactaaaa

SEQ ID NO: 780304 - DNA, 15 bp, Homo sapiens
ttggtgcactaaaag

SEQ ID NO: 780305 - DNA, 15 bp, Homo sapiens
tggtgcactaaaagc

SEQ ID NO: 780306 - DNA, 15 bp, Homo sapiens
ggtgcactaaaagcc

SEQ ID NO: 780307 - DNA, 15 bp, Homo sapiens
gtgcactaaaagcct

SEQ ID NO: 780308 - DNA, 15 bp, Homo sapiens
tgcactaaaagcctc

SEQ ID NO: 780309 - DNA, 15 bp, Homo sapiens
gcactaaaagcctca

SEQ ID NO: 780310 - DNA, 15 bp, Homo sapiens
cactaaaagcctcat

SEQ ID NO: 780311 - DNA, 15 bp, Homo sapiens
actaaaagcctcatt

SEQ ID NO: 780312 - DNA, 15 bp, Homo sapiens
ctaaaagcctcattt

SEQ ID NO: 780313 - DNA, 15 bp, Homo sapiens
taaaagcctcatttt

SEQ ID NO: 780314 - DNA, 15 bp, Homo sapiens
aaaagcctcattttt

SEQ ID NO: 780315 - DNA, 15 bp, Homo sapiens
aaagcctcattttta

SEQ ID NO: 780316 - DNA, 15 bp, Homo sapiens
aagcctcatttttag

SEQ ID NO: 780317 - DNA, 15 bp, Homo sapiens
agcctcatttttaga

SEQ ID NO: 780318 - DNA, 15 bp, Homo sapiens
gcctcatttttagac

SEQ ID NO: 780319 - DNA, 15 bp, Homo sapiens
cctcatttttagact

SEQ ID NO: 780320 - DNA, 15 bp, Homo sapiens
ctcatttttagactc

SEQ ID NO: 780321 - DNA, 15 bp, Homo sapiens
tcatttttagactct

SEQ ID NO: 780322 - DNA, 15 bp, Homo sapiens
catttttagactctg

SEQ ID NO: 780323 - DNA, 15 bp, Homo sapiens
atttttagactctgg

SEQ ID NO: 780324 - DNA, 15 bp, Homo sapiens
tttttagactctggg

SEQ ID NO: 780325 - DNA, 15 bp, Homo sapiens
ttttagactctgggt

SEQ ID NO: 780326 - DNA, 15 bp, Homo sapiens
tttagactctgggtc

SEQ ID NO: 780327 - DNA, 15 bp, Homo sapiens
ttagactctgggtcc

SEQ ID NO: 780328 - DNA, 15 bp, Homo sapiens
tagactctgggtcca

SEQ ID NO: 780329 - DNA, 15 bp, Homo sapiens
agactctgggtccag

SEQ ID NO: 780330 - DNA, 15 bp, Homo sapiens
gactctgggtccaga

SEQ ID NO: 780331 - DNA, 15 bp, Homo sapiens
actctgggtccagag

SEQ ID NO: 780332 - DNA, 15 bp, Homo sapiens
ctctgggtccagagt

SEQ ID NO: 780333 - DNA, 15 bp, Homo sapiens
tctgggtccagagtg

SEQ ID NO: 780334 - DNA, 15 bp, Homo sapiens
ctgggtccagagtga

SEQ ID NO: 780335 - DNA, 15 bp, Homo sapiens
tgggtccagagtgag

SEQ ID NO: 780336 - DNA, 15 bp, Homo sapiens
gggtccagagtgagg

SEQ ID NO: 780337 - DNA, 15 bp, Homo sapiens
ggtccagagtgaggc

SEQ ID NO: 780338 - DNA, 15 bp, Homo sapiens
gtccagagtgaggct

SEQ ID NO: 780339 - DNA, 15 bp, Homo sapiens
tccagagtgaggctt

SEQ ID NO: 780340 - DNA, 15 bp, Homo sapiens
ccagagtgaggcttt

SEQ ID NO: 780341 - DNA, 15 bp, Homo sapiens
cagagtgaggctttt

SEQ ID NO: 780342 - DNA, 15 bp, Homo sapiens
agagtgaggcttttt

SEQ ID NO: 780343 - DNA, 15 bp, Homo sapiens
gagtgaggctttttc

SEQ ID NO: 780344 - DNA, 15 bp, Homo sapiens
agtgaggctttttcc

SEQ ID NO: 780345 - DNA, 15 bp, Homo sapiens
gtgaggctttttcca

SEQ ID NO: 780346 - DNA, 15 bp, Homo sapiens
tgaggctttttccag

SEQ ID NO: 780347 - DNA, 15 bp, Homo sapiens
gaggctttttccaga

SEQ ID NO: 780348 - DNA, 15 bp, Homo sapiens
aggctttttccagaa

SEQ ID NO: 780349 - DNA, 15 bp, Homo sapiens
ggctttttccagaaa

SEQ ID NO: 780350 - DNA, 15 bp, Homo sapiens
gctttttccagaaaa

SEQ ID NO: 780351 - DNA, 15 bp, Homo sapiens
ctttttccagaaaaa

SEQ ID NO: 780352 - DNA, 15 bp, Homo sapiens
tttttccagaaaaaa

SEQ ID NO: 780353 - DNA, 15 bp, Homo sapiens
ttttccagaaaaaaa

SEQ ID NO: 780354 - DNA, 15 bp, Homo sapiens
tttccagaaaaaaac

SEQ ID NO: 780355 - DNA, 15 bp, Homo sapiens
ttccagaaaaaaaca

SEQ ID NO: 780356 - DNA, 15 bp, Homo sapiens
tccagaaaaaaacaa

SEQ ID NO: 780357 - DNA, 15 bp, Homo sapiens
ccagaaaaaaacaaa

SEQ ID NO: 780358 - DNA, 15 bp, Homo sapiens
cagaaaaaaacaaac

SEQ ID NO: 780359 - DNA, 15 bp, Homo sapiens
agaaaaaaacaaaca

SEQ ID NO: 780360 - DNA, 15 bp, Homo sapiens
gaaaaaaacaaacaa

SEQ ID NO: 780361 - DNA, 15 bp, Homo sapiens
aaaaaaacaaacaaa

SEQ ID NO: 780362 - DNA, 15 bp, Homo sapiens
aaaaaacaaacaaac

SEQ ID NO: 780363 - DNA, 15 bp, Homo sapiens
aaaaacaaacaaaca

SEQ ID NO: 780364 - DNA, 15 bp, Homo sapiens
aaaacaaacaaacaa

SEQ ID NO: 780365 - DNA, 15 bp, Homo sapiens
aaacaaacaaacaaa

SEQ ID NO: 780366 - DNA, 15 bp, Homo sapiens
aacaaacaaacaaac

SEQ ID NO: 780367 - DNA, 15 bp, Homo sapiens
acaaacaaacaaaca

SEQ ID NO: 780368 - DNA, 15 bp, Homo sapiens
caaacaaacaaacaa

SEQ ID NO: 780369 - DNA, 15 bp, Homo sapiens
aacaaacaaacaaaa

SEQ ID NO: 780370 - DNA, 15 bp, Homo sapiens
acaaacaaacaaaaa

SEQ ID NO: 780371 - DNA, 15 bp, Homo sapiens
caaacaaacaaaaaa

SEQ ID NO: 780372 - DNA, 15 bp, Homo sapiens
aaacaaacaaaaaac

SEQ ID NO: 780373 - DNA, 15 bp, Homo sapiens
aacaaacaaaaaacc

SEQ ID NO: 780374 - DNA, 15 bp, Homo sapiens
acaaacaaaaaacct

SEQ ID NO: 780375 - DNA, 15 bp, Homo sapiens
caaacaaaaaaccta

SEQ ID NO: 780376 - DNA, 15 bp, Homo sapiens
aaacaaaaaacctac

SEQ ID NO: 780377 - DNA, 15 bp, Homo sapiens
aacaaaaaacctact

SEQ ID NO: 780378 - DNA, 15 bp, Homo sapiens
acaaaaaacctactt

SEQ ID NO: 780379 - DNA, 15 bp, Homo sapiens
caaaaaacctacttc

SEQ ID NO: 780380 - DNA, 15 bp, Homo sapiens
aaaaaacctacttca

SEQ ID NO: 780381 - DNA, 15 bp, Homo sapiens
aaaaacctacttcag

SEQ ID NO: 780382 - DNA, 15 bp, Homo sapiens
aaaacctacttcagg

SEQ ID NO: 780383 - DNA, 15 bp, Homo sapiens
aaacctacttcaggg

SEQ ID NO: 780384 - DNA, 15 bp, Homo sapiens
aacctacttcaggga

SEQ ID NO: 780385 - DNA, 15 bp, Homo sapiens
acctacttcagggaa

SEQ ID NO: 780386 - DNA, 15 bp, Homo sapiens
cctacttcagggaaa

SEQ ID NO: 780387 - DNA, 15 bp, Homo sapiens
ctacttcagggaaat

SEQ ID NO: 780388 - DNA, 15 bp, Homo sapiens
tacttcagggaaatg

SEQ ID NO: 780389 - DNA, 15 bp, Homo sapiens
acttcagggaaatga

SEQ ID NO: 780390 - DNA, 15 bp, Homo sapiens
cttcagggaaatgac

SEQ ID NO: 780391 - DNA, 15 bp, Homo sapiens
ttcagggaaatgaca

SEQ ID NO: 780392 - DNA, 15 bp, Homo sapiens
tcagggaaatgacaa

SEQ ID NO: 780393 - DNA, 15 bp, Homo sapiens
cagggaaatgacaac

SEQ ID NO: 780394 - DNA, 15 bp, Homo sapiens
agggaaatgacaaca

SEQ ID NO: 780395 - DNA, 15 bp, Homo sapiens
gggaaatgacaacaa

SEQ ID NO: 780396 - DNA, 15 bp, Homo sapiens
ggaaatgacaacaac

SEQ ID NO: 780397 - DNA, 15 bp, Homo sapiens
gaaatgacaacaaca

SEQ ID NO: 780398 - DNA, 15 bp, Homo sapiens
aaatgacaacaacag

SEQ ID NO: 780399 - DNA, 15 bp, Homo sapiens
aatgacaacaacaga

SEQ ID NO: 780400 - DNA, 15 bp, Homo sapiens
atgacaacaacagaa

SEQ ID NO: 780401 - DNA, 15 bp, Homo sapiens
tgacaacaacagaaa

SEQ ID NO: 780402 - DNA, 15 bp, Homo sapiens
gacaacaacagaaag

SEQ ID NO: 780403 - DNA, 15 bp, Homo sapiens
acaacaacagaaagc

SEQ ID NO: 780404 - DNA, 15 bp, Homo sapiens
caacaacagaaagcc

SEQ ID NO: 780405 - DNA, 15 bp, Homo sapiens
aacaacagaaagcca

SEQ ID NO: 780406 - DNA, 15 bp, Homo sapiens
acaacagaaagccac

SEQ ID NO: 780407 - DNA, 15 bp, Homo sapiens
caacagaaagccacc

SEQ ID NO: 780408 - DNA, 15 bp, Homo sapiens
aacagaaagccacca

SEQ ID NO: 780409 - DNA, 15 bp, Homo sapiens
acagaaagccaccat

SEQ ID NO: 780410 - DNA, 15 bp, Homo sapiens
cagaaagccaccatt

SEQ ID NO: 780411 - DNA, 15 bp, Homo sapiens
agaaagccaccattt

SEQ ID NO: 780412 - DNA, 15 bp, Homo sapiens
gaaagccaccatttg

SEQ ID NO: 780413 - DNA, 15 bp, Homo sapiens
aaagccaccatttgc

SEQ ID NO: 780414 - DNA, 15 bp, Homo sapiens
aagccaccatttgcc

SEQ ID NO: 780415 - DNA, 15 bp, Homo sapiens
agccaccatttgccc

SEQ ID NO: 780416 - DNA, 15 bp, Homo sapiens
gccaccatttgccct

SEQ ID NO: 780417 - DNA, 15 bp, Homo sapiens
ccaccatttgcccta

SEQ ID NO: 780418 - DNA, 15 bp, Homo sapiens
caccatttgccctaa

SEQ ID NO: 780419 - DNA, 15 bp, Homo sapiens
accatttgccctaaa

SEQ ID NO: 780420 - DNA, 15 bp, Homo sapiens
ccatttgccctaaaa

SEQ ID NO: 780421 - DNA, 15 bp, Homo sapiens
catttgccctaaaat

SEQ ID NO: 780422 - DNA, 15 bp, Homo sapiens
atttgccctaaaatt

SEQ ID NO: 780423 - DNA, 15 bp, Homo sapiens
tttgccctaaaattt

SEQ ID NO: 780424 - DNA, 15 bp, Homo sapiens
ttgccctaaaatttt

SEQ ID NO: 780425 - DNA, 15 bp, Homo sapiens
tgccctaaaattttt

SEQ ID NO: 780426 - DNA, 15 bp, Homo sapiens
gccctaaaattttta

SEQ ID NO: 780427 - DNA, 15 bp, Homo sapiens
ccctaaaatttttat

SEQ ID NO: 780428 - DNA, 15 bp, Homo sapiens
cctaaaatttttatt

SEQ ID NO: 780429 - DNA, 15 bp, Homo sapiens
ctaaaatttttattg

SEQ ID NO: 780430 - DNA, 15 bp, Homo sapiens
taaaatttttattgt

SEQ ID NO: 780431 - DNA, 15 bp, Homo sapiens
aaaatttttattgta

SEQ ID NO: 780432 - DNA, 15 bp, Homo sapiens
aaatttttattgtaa

SEQ ID NO: 780433 - DNA, 15 bp, Homo sapiens
aatttttattgtaaa

SEQ ID NO: 780434 - DNA, 15 bp, Homo sapiens
atttttattgtaaaa

SEQ ID NO: 780435 - DNA, 15 bp, Homo sapiens
tttttattgtaaaaa

SEQ ID NO: 780436 - DNA, 15 bp, Homo sapiens
ttttattgtaaaaac

SEQ ID NO: 780437 - DNA, 15 bp, Homo sapiens
tttattgtaaaaact

SEQ ID NO: 780438 - DNA, 15 bp, Homo sapiens
ttattgtaaaaacta

SEQ ID NO: 780439 - DNA, 15 bp, Homo sapiens
tattgtaaaaactat

SEQ ID NO: 780440 - DNA, 15 bp, Homo sapiens
attgtaaaaactatt

SEQ ID NO: 780441 - DNA, 15 bp, Homo sapiens
ttgtaaaaactattc

SEQ ID NO: 780442 - DNA, 15 bp, Homo sapiens
tgtaaaaactattct

SEQ ID NO: 780443 - DNA, 15 bp, Homo sapiens
gtaaaaactattctc

SEQ ID NO: 780444 - DNA, 15 bp, Homo sapiens
taaaaactattctct

SEQ ID NO: 780445 - DNA, 15 bp, Homo sapiens
aaaaactattctctc

SEQ ID NO: 780446 - DNA, 15 bp, Homo sapiens
aaaactattctctcc

SEQ ID NO: 780447 - DNA, 15 bp, Homo sapiens
aaactattctctcct

SEQ ID NO: 780448 - DNA, 15 bp, Homo sapiens
aactattctctcctg

SEQ ID NO: 780449 - DNA, 15 bp, Homo sapiens
actattctctcctgt

SEQ ID NO: 780450 - DNA, 15 bp, Homo sapiens
ctattctctcctgtt

SEQ ID NO: 780451 - DNA, 15 bp, Homo sapiens
tattctctcctgttt

SEQ ID NO: 780452 - DNA, 15 bp, Homo sapiens
attctctcctgtttg

SEQ ID NO: 780453 - DNA, 15 bp, Homo sapiens
ttctctcctgtttga

SEQ ID NO: 780454 - DNA, 15 bp, Homo sapiens
tctctcctgtttgag

SEQ ID NO: 780455 - DNA, 15 bp, Homo sapiens
ctctcctgtttgagt

SEQ ID NO: 780456 - DNA, 15 bp, Homo sapiens
tctcctgtttgagta

SEQ ID NO: 780457 - DNA, 15 bp, Homo sapiens
ctcctgtttgagtag

SEQ ID NO: 780458 - DNA, 15 bp, Homo sapiens
tcctgtttgagtagt

SEQ ID NO: 780459 - DNA, 15 bp, Homo sapiens
cctgtttgagtagtg

SEQ ID NO: 780460 - DNA, 15 bp, Homo sapiens
ctgtttgagtagtga

SEQ ID NO: 780461 - DNA, 15 bp, Homo sapiens
tgtttgagtagtgag

SEQ ID NO: 780462 - DNA, 15 bp, Homo sapiens
gtttgagtagtgagg

SEQ ID NO: 780463 - DNA, 15 bp, Homo sapiens
tttgagtagtgaggg

SEQ ID NO: 780464 - DNA, 15 bp, Homo sapiens
ttgagtagtgaggga

SEQ ID NO: 780465 - DNA, 15 bp, Homo sapiens
tgagtagtgagggat

SEQ ID NO: 780466 - DNA, 15 bp, Homo sapiens
gagtagtgagggatc

SEQ ID NO: 780467 - DNA, 15 bp, Homo sapiens
agtagtgagggatct

SEQ ID NO: 780468 - DNA, 15 bp, Homo sapiens
gtagtgagggatcta

SEQ ID NO: 780469 - DNA, 15 bp, Homo sapiens
tagtgagggatctag

SEQ ID NO: 780470 - DNA, 15 bp, Homo sapiens
agtgagggatctagg

SEQ ID NO: 780471 - DNA, 15 bp, Homo sapiens
gtgagggatctagga

SEQ ID NO: 780472 - DNA, 15 bp, Homo sapiens
tgagggatctaggac

SEQ ID NO: 780473 - DNA, 15 bp, Homo sapiens
gagggatctaggaca

SEQ ID NO: 780474 - DNA, 15 bp, Homo sapiens
agggatctaggacat

SEQ ID NO: 780475 - DNA, 15 bp, Homo sapiens
gggatctaggacata

SEQ ID NO: 780476 - DNA, 15 bp, Homo sapiens
ggatctaggacataa

SEQ ID NO: 780477 - DNA, 15 bp, Homo sapiens
gatctaggacataac

SEQ ID NO: 780478 - DNA, 15 bp, Homo sapiens
atctaggacataaca

SEQ ID NO: 780479 - DNA, 15 bp, Homo sapiens
tctaggacataacag

SEQ ID NO: 780480 - DNA, 15 bp, Homo sapiens
ctaggacataacagt

SEQ ID NO: 780481 - DNA, 15 bp, Homo sapiens
taggacataacagtg

SEQ ID NO: 780482 - DNA, 15 bp, Homo sapiens
aggacataacagtgg

SEQ ID NO: 780483 - DNA, 15 bp, Homo sapiens
ggacataacagtggc

SEQ ID NO: 780484 - DNA, 15 bp, Homo sapiens
gacataacagtggct

SEQ ID NO: 780485 - DNA, 15 bp, Homo sapiens
acataacagtggctt

SEQ ID NO: 780486 - DNA, 15 bp, Homo sapiens
cataacagtggcttc

SEQ ID NO: 780487 - DNA, 15 bp, Homo sapiens
ataacagtggcttct

SEQ ID NO: 780488 - DNA, 15 bp, Homo sapiens
taacagtggcttctc

SEQ ID NO: 780489 - DNA, 15 bp, Homo sapiens
aacagtggcttctct

SEQ ID NO: 780490 - DNA, 15 bp, Homo sapiens
acagtggcttctctg

SEQ ID NO: 780491 - DNA, 15 bp, Homo sapiens
cagtggcttctctgg

SEQ ID NO: 780492 - DNA, 15 bp, Homo sapiens
agtggcttctctggc

SEQ ID NO: 780493 - DNA, 15 bp, Homo sapiens
gtggcttctctggct

SEQ ID NO: 780494 - DNA, 15 bp, Homo sapiens
tggcttctctggctt

SEQ ID NO: 780495 - DNA, 15 bp, Homo sapiens
ggcttctctggcttt

SEQ ID NO: 780496 - DNA, 15 bp, Homo sapiens
gcttctctggctttc

SEQ ID NO: 780497 - DNA, 15 bp, Homo sapiens
cttctctggctttct

SEQ ID NO: 780498 - DNA, 15 bp, Homo sapiens
ttctctggctttctt

SEQ ID NO: 780499 - DNA, 15 bp, Homo sapiens
tctctggctttctta

SEQ ID NO: 780500 - DNA, 15 bp, Homo sapiens
ctctggctttcttaa

SEQ ID NO: 780501 - DNA, 15 bp, Homo sapiens
tctggctttcttaag

SEQ ID NO: 780502 - DNA, 15 bp, Homo sapiens
ctggctttcttaagg

SEQ ID NO: 780503 - DNA, 15 bp, Homo sapiens
tggctttcttaagga

SEQ ID NO: 780504 - DNA, 15 bp, Homo sapiens
ggctttcttaaggaa

SEQ ID NO: 780505 - DNA, 15 bp, Homo sapiens
gctttcttaaggaat

SEQ ID NO: 780506 - DNA, 15 bp, Homo sapiens
ctttcttaaggaatc

SEQ ID NO: 780507 - DNA, 15 bp, Homo sapiens
tttcttaaggaatca

SEQ ID NO: 780508 - DNA, 15 bp, Homo sapiens
ttcttaaggaatcag

SEQ ID NO: 780509 - DNA, 15 bp, Homo sapiens
tcttaaggaatcagg

SEQ ID NO: 780510 - DNA, 15 bp, Homo sapiens
cttaaggaatcaggg

SEQ ID NO: 780511 - DNA, 15 bp, Homo sapiens
ttaaggaatcagggc

SEQ ID NO: 780512 - DNA, 15 bp, Homo sapiens
taaggaatcagggca

SEQ ID NO: 780513 - DNA, 15 bp, Homo sapiens
aaggaatcagggcac

SEQ ID NO: 780514 - DNA, 15 bp, Homo sapiens
aggaatcagggcact

SEQ ID NO: 780515 - DNA, 15 bp, Homo sapiens
ggaatcagggcactt

SEQ ID NO: 780516 - DNA, 15 bp, Homo sapiens
gaatcagggcacttg

SEQ ID NO: 780517 - DNA, 15 bp, Homo sapiens
aatcagggcacttgg

SEQ ID NO: 780518 - DNA, 15 bp, Homo sapiens
atcagggcacttgga

SEQ ID NO: 780519 - DNA, 15 bp, Homo sapiens
tcagggcacttggaa

SEQ ID NO: 780520 - DNA, 15 bp, Homo sapiens
cagggcacttggaaa

SEQ ID NO: 780521 - DNA, 15 bp, Homo sapiens
agggcacttggaaac

SEQ ID NO: 780522 - DNA, 15 bp, Homo sapiens
gggcacttggaaact

SEQ ID NO: 780523 - DNA, 15 bp, Homo sapiens
ggcacttggaaactc

SEQ ID NO: 780524 - DNA, 15 bp, Homo sapiens
gcacttggaaactca

SEQ ID NO: 780525 - DNA, 15 bp, Homo sapiens
cacttggaaactcaa

SEQ ID NO: 780526 - DNA, 15 bp, Homo sapiens
acttggaaactcaat

SEQ ID NO: 780527 - DNA, 15 bp, Homo sapiens
cttggaaactcaatt

SEQ ID NO: 780528 - DNA, 15 bp, Homo sapiens
ttggaaactcaatta

SEQ ID NO: 780529 - DNA, 15 bp, Homo sapiens
tggaaactcaattaa

SEQ ID NO: 780530 - DNA, 15 bp, Homo sapiens
ggaaactcaattaaa

SEQ ID NO: 780531 - DNA, 15 bp, Homo sapiens
gaaactcaattaaat

SEQ ID NO: 780532 - DNA, 15 bp, Homo sapiens
aaactcaattaaatg

SEQ ID NO: 780533 - DNA, 15 bp, Homo sapiens
aactcaattaaatgt

SEQ ID NO: 780534 - DNA, 15 bp, Homo sapiens
actcaattaaatgta

SEQ ID NO: 780535 - DNA, 15 bp, Homo sapiens
ctcaattaaatgtac

SEQ ID NO: 780536 - DNA, 15 bp, Homo sapiens
tcaattaaatgtacc

SEQ ID NO: 780537 - DNA, 15 bp, Homo sapiens
caattaaatgtaccc

SEQ ID NO: 780538 - DNA, 15 bp, Homo sapiens
aattaaatgtaccca

SEQ ID NO: 780539 - DNA, 15 bp, Homo sapiens
attaaatgtacccaa

SEQ ID NO: 780540 - DNA, 15 bp, Homo sapiens
ttaaatgtacccaag

SEQ ID NO: 780541 - DNA, 15 bp, Homo sapiens
taaatgtacccaagc

SEQ ID NO: 780542 - DNA, 15 bp, Homo sapiens
aaatgtacccaagcc

SEQ ID NO: 780543 - DNA, 15 bp, Homo sapiens
aatgtacccaagcct

SEQ ID NO: 780544 - DNA, 15 bp, Homo sapiens
atgtacccaagcctc

SEQ ID NO: 780545 - DNA, 15 bp, Homo sapiens
tgtacccaagcctct

SEQ ID NO: 780546 - DNA, 15 bp, Homo sapiens
gtacccaagcctctt

SEQ ID NO: 780547 - DNA, 15 bp, Homo sapiens
tacccaagcctctta

SEQ ID NO: 780548 - DNA, 15 bp, Homo sapiens
acccaagcctcttaa

SEQ ID NO: 780549 - DNA, 15 bp, Homo sapiens
cccaagcctcttaag

SEQ ID NO: 780550 - DNA, 15 bp, Homo sapiens
ccaagcctcttaagc

SEQ ID NO: 780551 - DNA, 15 bp, Homo sapiens
caagcctcttaagca

SEQ ID NO: 780552 - DNA, 15 bp, Homo sapiens
aagcctcttaagcac

SEQ ID NO: 780553 - DNA, 15 bp, Homo sapiens
agcctcttaagcacc

SEQ ID NO: 780554 - DNA, 15 bp, Homo sapiens
gcctcttaagcacca

SEQ ID NO: 780555 - DNA, 15 bp, Homo sapiens
cctcttaagcaccaa

SEQ ID NO: 780556 - DNA, 15 bp, Homo sapiens
ctcttaagcaccaag

SEQ ID NO: 780557 - DNA, 15 bp, Homo sapiens
tcttaagcaccaagg

SEQ ID NO: 780558 - DNA, 15 bp, Homo sapiens
cttaagcaccaaggc

SEQ ID NO: 780559 - DNA, 15 bp, Homo sapiens
ttaagcaccaaggct

SEQ ID NO: 780560 - DNA, 15 bp, Homo sapiens
taagcaccaaggcta

SEQ ID NO: 780561 - DNA, 15 bp, Homo sapiens
aagcaccaaggctat

SEQ ID NO: 780562 - DNA, 15 bp, Homo sapiens
agcaccaaggctatc

SEQ ID NO: 780563 - DNA, 15 bp, Homo sapiens
gcaccaaggctatct

SEQ ID NO: 780564 - DNA, 15 bp, Homo sapiens
caccaaggctatctt

SEQ ID NO: 780565 - DNA, 15 bp, Homo sapiens
accaaggctatcttt

SEQ ID NO: 780566 - DNA, 15 bp, Homo sapiens
ccaaggctatctttt

SEQ ID NO: 780567 - DNA, 15 bp, Homo sapiens
caaggctatcttttt

SEQ ID NO: 780568 - DNA, 15 bp, Homo sapiens
aaggctatctttttg

SEQ ID NO: 780569 - DNA, 15 bp, Homo sapiens
aggctatctttttgc

SEQ ID NO: 780570 - DNA, 15 bp, Homo sapiens
ggctatctttttgct

SEQ ID NO: 780571 - DNA, 15 bp, Homo sapiens
gctatctttttgctc

SEQ ID NO: 780572 - DNA, 15 bp, Homo sapiens
ctatctttttgctca

SEQ ID NO: 780573 - DNA, 15 bp, Homo sapiens
tatctttttgctcat

SEQ ID NO: 780574 - DNA, 15 bp, Homo sapiens
atctttttgctcatc

SEQ ID NO: 780575 - DNA, 15 bp, Homo sapiens
tctttttgctcatcc

SEQ ID NO: 780576 - DNA, 15 bp, Homo sapiens
ctttttgctcatcca

SEQ ID NO: 780577 - DNA, 15 bp, Homo sapiens
tttttgctcatccag

SEQ ID NO: 780578 - DNA, 15 bp, Homo sapiens
ttttgctcatccagt

SEQ ID NO: 780579 - DNA, 15 bp, Homo sapiens
tttgctcatccagtt

SEQ ID NO: 780580 - DNA, 15 bp, Homo sapiens
ttgctcatccagtta

SEQ ID NO: 780581 - DNA, 15 bp, Homo sapiens
tgctcatccagttaa

SEQ ID NO: 780582 - DNA, 15 bp, Homo sapiens
gctcatccagttaat

SEQ ID NO: 780583 - DNA, 15 bp, Homo sapiens
ctcatccagttaatt

SEQ ID NO: 780584 - DNA, 15 bp, Homo sapiens
tcatccagttaattt

SEQ ID NO: 780585 - DNA, 15 bp, Homo sapiens
catccagttaatttc

SEQ ID NO: 780586 - DNA, 15 bp, Homo sapiens
atccagttaatttca

SEQ ID NO: 780587 - DNA, 15 bp, Homo sapiens
tccagttaatttcag

SEQ ID NO: 780588 - DNA, 15 bp, Homo sapiens
ccagttaatttcagt

SEQ ID NO: 780589 - DNA, 15 bp, Homo sapiens
cagttaatttcagtt

SEQ ID NO: 780590 - DNA, 15 bp, Homo sapiens
agttaatttcagttt

SEQ ID NO: 780591 - DNA, 15 bp, Homo sapiens
gttaatttcagtttg

SEQ ID NO: 780592 - DNA, 15 bp, Homo sapiens
ttaatttcagtttgt

SEQ ID NO: 780593 - DNA, 15 bp, Homo sapiens
taatttcagtttgta

SEQ ID NO: 780594 - DNA, 15 bp, Homo sapiens
aatttcagtttgtaa

SEQ ID NO: 780595 - DNA, 15 bp, Homo sapiens
atttcagtttgtaaa

SEQ ID NO: 780596 - DNA, 15 bp, Homo sapiens
tttcagtttgtaaaa

SEQ ID NO: 780597 - DNA, 15 bp, Homo sapiens
ttcagtttgtaaaat

SEQ ID NO: 780598 - DNA, 15 bp, Homo sapiens
tcagtttgtaaaatt

SEQ ID NO: 780599 - DNA, 15 bp, Homo sapiens
cagtttgtaaaattg

SEQ ID NO: 780600 - DNA, 15 bp, Homo sapiens
agtttgtaaaattgg

SEQ ID NO: 780601 - DNA, 15 bp, Homo sapiens
gtttgtaaaattggc

SEQ ID NO: 780602 - DNA, 15 bp, Homo sapiens
tttgtaaaattggcc

SEQ ID NO: 780603 - DNA, 15 bp, Homo sapiens
ttgtaaaattggcct

SEQ ID NO: 780604 - DNA, 15 bp, Homo sapiens
tgtaaaattggcctt

SEQ ID NO: 780605 - DNA, 15 bp, Homo sapiens
gtaaaattggccttg

SEQ ID NO: 780606 - DNA, 15 bp, Homo sapiens
taaaattggccttgt

SEQ ID NO: 780607 - DNA, 15 bp, Homo sapiens
aaaattggccttgtg

SEQ ID NO: 780608 - DNA, 15 bp, Homo sapiens
aaattggccttgtgc

SEQ ID NO: 780609 - DNA, 15 bp, Homo sapiens
aattggccttgtgct

SEQ ID NO: 780610 - DNA, 15 bp, Homo sapiens
attggccttgtgctg

SEQ ID NO: 780611 - DNA, 15 bp, Homo sapiens
ttggccttgtgctga

SEQ ID NO: 780612 - DNA, 15 bp, Homo sapiens
tggccttgtgctgac

SEQ ID NO: 780613 - DNA, 15 bp, Homo sapiens
ggccttgtgctgaca

SEQ ID NO: 780614 - DNA, 15 bp, Homo sapiens
gccttgtgctgacat

SEQ ID NO: 780615 - DNA, 15 bp, Homo sapiens
ccttgtgctgacatg

SEQ ID NO: 780616 - DNA, 15 bp, Homo sapiens
cttgtgctgacatga

SEQ ID NO: 780617 - DNA, 15 bp, Homo sapiens
ttgtgctgacatgat

SEQ ID NO: 780618 - DNA, 15 bp, Homo sapiens
tgtgctgacatgatg

SEQ ID NO: 780619 - DNA, 15 bp, Homo sapiens
gtgctgacatgatgg

SEQ ID NO: 780620 - DNA, 15 bp, Homo sapiens
tgctgacatgatgga

SEQ ID NO: 780621 - DNA, 15 bp, Homo sapiens
gctgacatgatggag

SEQ ID NO: 780622 - DNA, 15 bp, Homo sapiens
ctgacatgatggaga

SEQ ID NO: 780623 - DNA, 15 bp, Homo sapiens
tgacatgatggagac

SEQ ID NO: 780624 - DNA, 15 bp, Homo sapiens
gacatgatggagacg

SEQ ID NO: 780625 - DNA, 15 bp, Homo sapiens
acatgatggagacgg

SEQ ID NO: 780626 - DNA, 15 bp, Homo sapiens
catgatggagacggg

SEQ ID NO: 780627 - DNA, 15 bp, Homo sapiens
atgatggagacgggg

SEQ ID NO: 780628 - DNA, 15 bp, Homo sapiens
tgatggagacggggt

SEQ ID NO: 780629 - DNA, 15 bp, Homo sapiens
gatggagacggggtg

SEQ ID NO: 780630 - DNA, 15 bp, Homo sapiens
atggagacggggtga

SEQ ID NO: 780631 - DNA, 15 bp, Homo sapiens
tggagacggggtgag

SEQ ID NO: 780632 - DNA, 15 bp, Homo sapiens
ggagacggggtgagg

SEQ ID NO: 780633 - DNA, 15 bp, Homo sapiens
gagacggggtgaggg

SEQ ID NO: 780634 - DNA, 15 bp, Homo sapiens
agacggggtgagggt

SEQ ID NO: 780635 - DNA, 15 bp, Homo sapiens
gacggggtgagggtg

SEQ ID NO: 780636 - DNA, 15 bp, Homo sapiens
acggggtgagggtgg

SEQ ID NO: 780637 - DNA, 15 bp, Homo sapiens
cggggtgagggtggg

SEQ ID NO: 780638 - DNA, 15 bp, Homo sapiens
ggggtgagggtggga

SEQ ID NO: 780639 - DNA, 15 bp, Homo sapiens
gggtgagggtgggaa

SEQ ID NO: 780640 - DNA, 15 bp, Homo sapiens
ggtgagggtgggaag

SEQ ID NO: 780641 - DNA, 15 bp, Homo sapiens
gtgagggtgggaagc

SEQ ID NO: 780642 - DNA, 15 bp, Homo sapiens
tgagggtgggaagcc

SEQ ID NO: 780643 - DNA, 15 bp, Homo sapiens
gagggtgggaagcca

SEQ ID NO: 780644 - DNA, 15 bp, Homo sapiens
agggtgggaagccag

SEQ ID NO: 780645 - DNA, 15 bp, Homo sapiens
gggtgggaagccagg

SEQ ID NO: 780646 - DNA, 15 bp, Homo sapiens
ggtgggaagccaggg

SEQ ID NO: 780647 - DNA, 15 bp, Homo sapiens
gtgggaagccagggt

SEQ ID NO: 780648 - DNA, 15 bp, Homo sapiens
tgggaagccagggtc

SEQ ID NO: 780649 - DNA, 15 bp, Homo sapiens
gggaagccagggtcc

SEQ ID NO: 780650 - DNA, 15 bp, Homo sapiens
ggaagccagggtcct

SEQ ID NO: 780651 - DNA, 15 bp, Homo sapiens
gaagccagggtcctc

SEQ ID NO: 780652 - DNA, 15 bp, Homo sapiens
aagccagggtcctct

SEQ ID NO: 780653 - DNA, 15 bp, Homo sapiens
agccagggtcctctg

SEQ ID NO: 780654 - DNA, 15 bp, Homo sapiens
gccagggtcctctgt

SEQ ID NO: 780655 - DNA, 15 bp, Homo sapiens
ccagggtcctctgtg

SEQ ID NO: 780656 - DNA, 15 bp, Homo sapiens
cagggtcctctgtga

SEQ ID NO: 780657 - DNA, 15 bp, Homo sapiens
agggtcctctgtgag

SEQ ID NO: 780658 - DNA, 15 bp, Homo sapiens
gggtcctctgtgagc

SEQ ID NO: 780659 - DNA, 15 bp, Homo sapiens
ggtcctctgtgagcg

SEQ ID NO: 780660 - DNA, 15 bp, Homo sapiens
gtcctctgtgagcgg

SEQ ID NO: 780661 - DNA, 15 bp, Homo sapiens
tcctctgtgagcgga

SEQ ID NO: 780662 - DNA, 15 bp, Homo sapiens
cctctgtgagcggaa

SEQ ID NO: 780663 - DNA, 15 bp, Homo sapiens
ctctgtgagcggaag

SEQ ID NO: 780664 - DNA, 15 bp, Homo sapiens
tctgtgagcggaagc

SEQ ID NO: 780665 - DNA, 15 bp, Homo sapiens
ctgtgagcggaagct

SEQ ID NO: 780666 - DNA, 15 bp, Homo sapiens
tgtgagcggaagctt

SEQ ID NO: 780667 - DNA, 15 bp, Homo sapiens
gtgagcggaagcttg

SEQ ID NO: 780668 - DNA, 15 bp, Homo sapiens
tgagcggaagcttgc

SEQ ID NO: 780669 - DNA, 15 bp, Homo sapiens
gagcggaagcttgct

SEQ ID NO: 780670 - DNA, 15 bp, Homo sapiens
agcggaagcttgctt

SEQ ID NO: 780671 - DNA, 15 bp, Homo sapiens
gcggaagcttgcttc

SEQ ID NO: 780672 - DNA, 15 bp, Homo sapiens
cggaagcttgcttct

SEQ ID NO: 780673 - DNA, 15 bp, Homo sapiens
ggaagcttgcttctc

SEQ ID NO: 780674 - DNA, 15 bp, Homo sapiens
gaagcttgcttctct

SEQ ID NO: 780675 - DNA, 15 bp, Homo sapiens
aagcttgcttctctg

SEQ ID NO: 780676 - DNA, 15 bp, Homo sapiens
agcttgcttctctgt

SEQ ID NO: 780677 - DNA, 15 bp, Homo sapiens
gcttgcttctctgtt

SEQ ID NO: 780678 - DNA, 15 bp, Homo sapiens
cttgcttctctgttc

SEQ ID NO: 780679 - DNA, 15 bp, Homo sapiens
ttgcttctctgttca

SEQ ID NO: 780680 - DNA, 15 bp, Homo sapiens
tgcttctctgttcac

SEQ ID NO: 780681 - DNA, 15 bp, Homo sapiens
gcttctctgttcaca

SEQ ID NO: 780682 - DNA, 15 bp, Homo sapiens
cttctctgttcacaa

SEQ ID NO: 780683 - DNA, 15 bp, Homo sapiens
ttctctgttcacaag

SEQ ID NO: 780684 - DNA, 15 bp, Homo sapiens
tctctgttcacaagc

SEQ ID NO: 780685 - DNA, 15 bp, Homo sapiens
ctctgttcacaagcc

SEQ ID NO: 780686 - DNA, 15 bp, Homo sapiens
tctgttcacaagcct

SEQ ID NO: 780687 - DNA, 15 bp, Homo sapiens
ctgttcacaagcctc

SEQ ID NO: 780688 - DNA, 15 bp, Homo sapiens
tgttcacaagcctcc

SEQ ID NO: 780689 - DNA, 15 bp, Homo sapiens
gttcacaagcctcca

SEQ ID NO: 780690 - DNA, 15 bp, Homo sapiens
ttcacaagcctccaa

SEQ ID NO: 780691 - DNA, 15 bp, Homo sapiens
tcacaagcctccaag

SEQ ID NO: 780692 - DNA, 15 bp, Homo sapiens
cacaagcctccaagg

SEQ ID NO: 780693 - DNA, 15 bp, Homo sapiens
acaagcctccaaggg

SEQ ID NO: 780694 - DNA, 15 bp, Homo sapiens
caagcctccaagggc

SEQ ID NO: 780695 - DNA, 15 bp, Homo sapiens
aagcctccaagggca

SEQ ID NO: 780696 - DNA, 15 bp, Homo sapiens
agcctccaagggcac

SEQ ID NO: 780697 - DNA, 15 bp, Homo sapiens
gcctccaagggcaca

SEQ ID NO: 780698 - DNA, 15 bp, Homo sapiens
cctccaagggcacac

SEQ ID NO: 780699 - DNA, 15 bp, Homo sapiens
ctccaagggcacaca

SEQ ID NO: 780700 - DNA, 15 bp, Homo sapiens
tccaagggcacacat

SEQ ID NO: 780701 - DNA, 15 bp, Homo sapiens
ccaagggcacacatc

SEQ ID NO: 780702 - DNA, 15 bp, Homo sapiens
caagggcacacatcc

SEQ ID NO: 780703 - DNA, 15 bp, Homo sapiens
aagggcacacatcct

SEQ ID NO: 780704 - DNA, 15 bp, Homo sapiens
agggcacacatcctt

SEQ ID NO: 780705 - DNA, 15 bp, Homo sapiens
gggcacacatccttc

SEQ ID NO: 780706 - DNA, 15 bp, Homo sapiens
ggcacacatccttcc

SEQ ID NO: 780707 - DNA, 15 bp, Homo sapiens
gcacacatccttccc

SEQ ID NO: 780708 - DNA, 15 bp, Homo sapiens
cacacatccttccct

SEQ ID NO: 780709 - DNA, 15 bp, Homo sapiens
acacatccttccctg

SEQ ID NO: 780710 - DNA, 15 bp, Homo sapiens
cacatccttccctgg

SEQ ID NO: 780711 - DNA, 15 bp, Homo sapiens
acatccttccctggg

SEQ ID NO: 780712 - DNA, 15 bp, Homo sapiens
catccttccctgggg

SEQ ID NO: 780713 - DNA, 15 bp, Homo sapiens
atccttccctggggc

SEQ ID NO: 780714 - DNA, 15 bp, Homo sapiens
tccttccctggggca

SEQ ID NO: 780715 - DNA, 15 bp, Homo sapiens
ccttccctggggcat

SEQ ID NO: 780716 - DNA, 15 bp, Homo sapiens
cttccctggggcatc

SEQ ID NO: 780717 - DNA, 15 bp, Homo sapiens
ttccctggggcatca

SEQ ID NO: 780718 - DNA, 15 bp, Homo sapiens
tccctggggcatcaa

SEQ ID NO: 780719 - DNA, 15 bp, Homo sapiens
ccctggggcatcaag

SEQ ID NO: 780720 - DNA, 15 bp, Homo sapiens
cctggggcatcaagg

SEQ ID NO: 780721 - DNA, 15 bp, Homo sapiens
ctggggcatcaaggg

SEQ ID NO: 780722 - DNA, 15 bp, Homo sapiens
tggggcatcaagggg

SEQ ID NO: 780723 - DNA, 15 bp, Homo sapiens
ggggcatcaaggggg

SEQ ID NO: 780724 - DNA, 15 bp, Homo sapiens
gggcatcaaggggga

SEQ ID NO: 780725 - DNA, 15 bp, Homo sapiens
ggcatcaagggggac

SEQ ID NO: 780726 - DNA, 15 bp, Homo sapiens
gcatcaagggggacc

SEQ ID NO: 780727 - DNA, 15 bp, Homo sapiens
catcaagggggacca

SEQ ID NO: 780728 - DNA, 15 bp, Homo sapiens
atcaagggggaccat

SEQ ID NO: 780729 - DNA, 15 bp, Homo sapiens
tcaagggggaccatt

SEQ ID NO: 780730 - DNA, 15 bp, Homo sapiens
caagggggaccatta

SEQ ID NO: 780731 - DNA, 15 bp, Homo sapiens
aagggggaccattaa

SEQ ID NO: 780732 - DNA, 15 bp, Homo sapiens
agggggaccattaaa

SEQ ID NO: 780733 - DNA, 15 bp, Homo sapiens
gggggaccattaaac

SEQ ID NO: 780734 - DNA, 15 bp, Homo sapiens
ggggaccattaaacc

SEQ ID NO: 780735 - DNA, 15 bp, Homo sapiens
gggaccattaaacct

SEQ ID NO: 780736 - DNA, 15 bp, Homo sapiens
ggaccattaaacctg

SEQ ID NO: 780737 - DNA, 15 bp, Homo sapiens
gaccattaaacctgt

SEQ ID NO: 780738 - DNA, 15 bp, Homo sapiens
accattaaacctgtt

SEQ ID NO: 780739 - DNA, 15 bp, Homo sapiens
ccattaaacctgttt

SEQ ID NO: 780740 - DNA, 15 bp, Homo sapiens
cattaaacctgtttg

SEQ ID NO: 780741 - DNA, 15 bp, Homo sapiens
attaaacctgtttgc

SEQ ID NO: 780742 - DNA, 15 bp, Homo sapiens
ttaaacctgtttgca

SEQ ID NO: 780743 - DNA, 15 bp, Homo sapiens
taaacctgtttgcac

SEQ ID NO: 780744 - DNA, 15 bp, Homo sapiens
aaacctgtttgcacc

SEQ ID NO: 780745 - DNA, 15 bp, Homo sapiens
aacctgtttgcacca

SEQ ID NO: 780746 - DNA, 15 bp, Homo sapiens
acctgtttgcaccac

SEQ ID NO: 780747 - DNA, 15 bp, Homo sapiens
cctgtttgcaccacg

SEQ ID NO: 780748 - DNA, 15 bp, Homo sapiens
ctgtttgcaccacgt

SEQ ID NO: 780749 - DNA, 15 bp, Homo sapiens
tgtttgcaccacgtc

SEQ ID NO: 780750 - DNA, 15 bp, Homo sapiens
gtttgcaccacgtcc

SEQ ID NO: 780751 - DNA, 15 bp, Homo sapiens
tttgcaccacgtccc

SEQ ID NO: 780752 - DNA, 15 bp, Homo sapiens
ttgcaccacgtccct

SEQ ID NO: 780753 - DNA, 15 bp, Homo sapiens
tgcaccacgtccctg

SEQ ID NO: 780754 - DNA, 15 bp, Homo sapiens
gcaccacgtccctgg

SEQ ID NO: 780755 - DNA, 15 bp, Homo sapiens
caccacgtccctggg

SEQ ID NO: 780756 - DNA, 15 bp, Homo sapiens
accacgtccctggga

SEQ ID NO: 780757 - DNA, 15 bp, Homo sapiens
ccacgtccctgggag

SEQ ID NO: 780758 - DNA, 15 bp, Homo sapiens
cacgtccctgggaga

SEQ ID NO: 780759 - DNA, 15 bp, Homo sapiens
acgtccctgggagag

SEQ ID NO: 780760 - DNA, 15 bp, Homo sapiens
cgtccctgggagagc

SEQ ID NO: 780761 - DNA, 15 bp, Homo sapiens
gtccctgggagagca

SEQ ID NO: 780762 - DNA, 15 bp, Homo sapiens
tccctgggagagcaa

SEQ ID NO: 780763 - DNA, 15 bp, Homo sapiens
ccctgggagagcaaa

SEQ ID NO: 780764 - DNA, 15 bp, Homo sapiens
cctgggagagcaaac

SEQ ID NO: 780765 - DNA, 15 bp, Homo sapiens
ctgggagagcaaact

SEQ ID NO: 780766 - DNA, 15 bp, Homo sapiens
tgggagagcaaactt

SEQ ID NO: 780767 - DNA, 15 bp, Homo sapiens
gggagagcaaacttc

SEQ ID NO: 780768 - DNA, 15 bp, Homo sapiens
ggagagcaaacttct

SEQ ID NO: 780769 - DNA, 15 bp, Homo sapiens
gagagcaaacttctg

SEQ ID NO: 780770 - DNA, 15 bp, Homo sapiens
agagcaaacttctgg

SEQ ID NO: 780771 - DNA, 15 bp, Homo sapiens
gagcaaacttctggg

SEQ ID NO: 780772 - DNA, 15 bp, Homo sapiens
agcaaacttctgggc

SEQ ID NO: 780773 - DNA, 15 bp, Homo sapiens
gcaaacttctgggcc

SEQ ID NO: 780774 - DNA, 15 bp, Homo sapiens
caaacttctgggcct

SEQ ID NO: 780775 - DNA, 15 bp, Homo sapiens
aaacttctgggcctt

SEQ ID NO: 780776 - DNA, 15 bp, Homo sapiens
aacttctgggccttc

SEQ ID NO: 780777 - DNA, 15 bp, Homo sapiens
acttctgggccttcc

SEQ ID NO: 780778 - DNA, 15 bp, Homo sapiens
cttctgggccttcct

SEQ ID NO: 780779 - DNA, 15 bp, Homo sapiens
ttctgggccttcctt

SEQ ID NO: 780780 - DNA, 15 bp, Homo sapiens
tctgggccttccttg

SEQ ID NO: 780781 - DNA, 15 bp, Homo sapiens
ctgggccttccttgt

SEQ ID NO: 780782 - DNA, 15 bp, Homo sapiens
tgggccttccttgtt

SEQ ID NO: 780783 - DNA, 15 bp, Homo sapiens
gggccttccttgttt

SEQ ID NO: 780784 - DNA, 15 bp, Homo sapiens
ggccttccttgttta

SEQ ID NO: 780785 - DNA, 15 bp, Homo sapiens
gccttccttgtttac

SEQ ID NO: 780786 - DNA, 15 bp, Homo sapiens
ccttccttgtttact

SEQ ID NO: 780787 - DNA, 15 bp, Homo sapiens
cttccttgtttactg

SEQ ID NO: 780788 - DNA, 15 bp, Homo sapiens
ttccttgtttactgg

SEQ ID NO: 780789 - DNA, 15 bp, Homo sapiens
tccttgtttactgga

SEQ ID NO: 780790 - DNA, 15 bp, Homo sapiens
ccttgtttactggag

SEQ ID NO: 780791 - DNA, 15 bp, Homo sapiens
cttgtttactggagg

SEQ ID NO: 780792 - DNA, 15 bp, Homo sapiens
ttgtttactggaggt

SEQ ID NO: 780793 - DNA, 15 bp, Homo sapiens
tgtttactggaggtt

SEQ ID NO: 780794 - DNA, 15 bp, Homo sapiens
gtttactggaggttg

SEQ ID NO: 780795 - DNA, 15 bp, Homo sapiens
tttactggaggttgg

SEQ ID NO: 780796 - DNA, 15 bp, Homo sapiens
ttactggaggttggt

SEQ ID NO: 780797 - DNA, 15 bp, Homo sapiens
tactggaggttggtt

SEQ ID NO: 780798 - DNA, 15 bp, Homo sapiens
actggaggttggtta

SEQ ID NO: 780799 - DNA, 15 bp, Homo sapiens
ctggaggttggttaa

SEQ ID NO: 780800 - DNA, 15 bp, Homo sapiens
tggaggttggttaat

SEQ ID NO: 780801 - DNA, 15 bp, Homo sapiens
ggaggttggttaatt

SEQ ID NO: 780802 - DNA, 15 bp, Homo sapiens
gaggttggttaattc

SEQ ID NO: 780803 - DNA, 15 bp, Homo sapiens
aggttggttaattcg

SEQ ID NO: 780804 - DNA, 15 bp, Homo sapiens
ggttggttaattcgg

SEQ ID NO: 780805 - DNA, 15 bp, Homo sapiens
gttggttaattcgga

SEQ ID NO: 780806 - DNA, 15 bp, Homo sapiens
ttggttaattcggaa

SEQ ID NO: 780807 - DNA, 15 bp, Homo sapiens
tggttaattcggaag

SEQ ID NO: 780808 - DNA, 15 bp, Homo sapiens
ggttaattcggaagg

SEQ ID NO: 780809 - DNA, 15 bp, Homo sapiens
gttaattcggaaggt

SEQ ID NO: 780810 - DNA, 15 bp, Homo sapiens
ttaattcggaaggta

SEQ ID NO: 780811 - DNA, 15 bp, Homo sapiens
taattcggaaggtag

SEQ ID NO: 780812 - DNA, 15 bp, Homo sapiens
aattcggaaggtaga

SEQ ID NO: 780813 - DNA, 15 bp, Homo sapiens
attcggaaggtagat

SEQ ID NO: 780814 - DNA, 15 bp, Homo sapiens
ttcggaaggtagatg

SEQ ID NO: 780815 - DNA, 15 bp, Homo sapiens
tcggaaggtagatgg

SEQ ID NO: 780816 - DNA, 15 bp, Homo sapiens
cggaaggtagatgga

SEQ ID NO: 780817 - DNA, 15 bp, Homo sapiens
ggaaggtagatggac

SEQ ID NO: 780818 - DNA, 15 bp, Homo sapiens
gaaggtagatggact

SEQ ID NO: 780819 - DNA, 15 bp, Homo sapiens
aaggtagatggactg

SEQ ID NO: 780820 - DNA, 15 bp, Homo sapiens
aggtagatggactgg

SEQ ID NO: 780821 - DNA, 15 bp, Homo sapiens
ggtagatggactggg

SEQ ID NO: 780822 - DNA, 15 bp, Homo sapiens
gtagatggactgggc

SEQ ID NO: 780823 - DNA, 15 bp, Homo sapiens
tagatggactgggca

SEQ ID NO: 780824 - DNA, 15 bp, Homo sapiens
agatggactgggcat

SEQ ID NO: 780825 - DNA, 15 bp, Homo sapiens
gatggactgggcata

SEQ ID NO: 780826 - DNA, 15 bp, Homo sapiens
atggactgggcatat

SEQ ID NO: 780827 - DNA, 15 bp, Homo sapiens
tggactgggcatatt

SEQ ID NO: 780828 - DNA, 15 bp, Homo sapiens
ggactgggcatattg

SEQ ID NO: 780829 - DNA, 15 bp, Homo sapiens
gactgggcatattgg

SEQ ID NO: 780830 - DNA, 15 bp, Homo sapiens
actgggcatattggt

SEQ ID NO: 780831 - DNA, 15 bp, Homo sapiens
ctgggcatattggtt

SEQ ID NO: 780832 - DNA, 15 bp, Homo sapiens
tgggcatattggttc

SEQ ID NO: 780833 - DNA, 15 bp, Homo sapiens
gggcatattggttcc

SEQ ID NO: 780834 - DNA, 15 bp, Homo sapiens
ggcatattggttccc

SEQ ID NO: 780835 - DNA, 15 bp, Homo sapiens
gcatattggttcccc

SEQ ID NO: 780836 - DNA, 15 bp, Homo sapiens
catattggttcccca

SEQ ID NO: 780837 - DNA, 15 bp, Homo sapiens
atattggttccccac

SEQ ID NO: 780838 - DNA, 15 bp, Homo sapiens
tattggttccccact

SEQ ID NO: 780839 - DNA, 15 bp, Homo sapiens
attggttccccactg

SEQ ID NO: 780840 - DNA, 15 bp, Homo sapiens
ttggttccccactgg

SEQ ID NO: 780841 - DNA, 15 bp, Homo sapiens
tggttccccactggc

SEQ ID NO: 780842 - DNA, 15 bp, Homo sapiens
ggttccccactggca

SEQ ID NO: 780843 - DNA, 15 bp, Homo sapiens
gttccccactggcag

SEQ ID NO: 780844 - DNA, 15 bp, Homo sapiens
ttccccactggcagg

SEQ ID NO: 780845 - DNA, 15 bp, Homo sapiens
tccccactggcagga

SEQ ID NO: 780846 - DNA, 15 bp, Homo sapiens
ccccactggcaggag

SEQ ID NO: 780847 - DNA, 15 bp, Homo sapiens
cccactggcaggagc

SEQ ID NO: 780848 - DNA, 15 bp, Homo sapiens
ccactggcaggagca

SEQ ID NO: 780849 - DNA, 15 bp, Homo sapiens
cactggcaggagcag

SEQ ID NO: 780850 - DNA, 15 bp, Homo sapiens
actggcaggagcagc

SEQ ID NO: 780851 - DNA, 15 bp, Homo sapiens
ctggcaggagcagcc

SEQ ID NO: 780852 - DNA, 15 bp, Homo sapiens
tggcaggagcagccc

SEQ ID NO: 780853 - DNA, 15 bp, Homo sapiens
ggcaggagcagccca

SEQ ID NO: 780854 - DNA, 15 bp, Homo sapiens
gcaggagcagcccag

SEQ ID NO: 780855 - DNA, 15 bp, Homo sapiens
caggagcagcccagg

SEQ ID NO: 780856 - DNA, 15 bp, Homo sapiens
aggagcagcccagga

SEQ ID NO: 780857 - DNA, 15 bp, Homo sapiens
ggagcagcccaggat

SEQ ID NO: 780858 - DNA, 15 bp, Homo sapiens
gagcagcccaggatt

SEQ ID NO: 780859 - DNA, 15 bp, Homo sapiens
agcagcccaggattc

SEQ ID NO: 780860 - DNA, 15 bp, Homo sapiens
gcagcccaggattca

SEQ ID NO: 780861 - DNA, 15 bp, Homo sapiens
cagcccaggattcag

SEQ ID NO: 780862 - DNA, 15 bp, Homo sapiens
agcccaggattcagc

SEQ ID NO: 780863 - DNA, 15 bp, Homo sapiens
gcccaggattcagca

SEQ ID NO: 780864 - DNA, 15 bp, Homo sapiens
cccaggattcagcag

SEQ ID NO: 780865 - DNA, 15 bp, Homo sapiens
ccaggattcagcagg

SEQ ID NO: 780866 - DNA, 15 bp, Homo sapiens
caggattcagcaggt

SEQ ID NO: 780867 - DNA, 15 bp, Homo sapiens
aggattcagcaggtt

SEQ ID NO: 780868 - DNA, 15 bp, Homo sapiens
ggattcagcaggtta

SEQ ID NO: 780869 - DNA, 15 bp, Homo sapiens
gattcagcaggttaa

SEQ ID NO: 780870 - DNA, 15 bp, Homo sapiens
attcagcaggttaac

SEQ ID NO: 780871 - DNA, 15 bp, Homo sapiens
ttcagcaggttaacg

SEQ ID NO: 780872 - DNA, 15 bp, Homo sapiens
tcagcaggttaacgc

SEQ ID NO: 780873 - DNA, 15 bp, Homo sapiens
cagcaggttaacgca

SEQ ID NO: 780874 - DNA, 15 bp, Homo sapiens
agcaggttaacgcaa

SEQ ID NO: 780875 - DNA, 15 bp, Homo sapiens
gcaggttaacgcaaa

SEQ ID NO: 780876 - DNA, 15 bp, Homo sapiens
caggttaacgcaaag

SEQ ID NO: 780877 - DNA, 15 bp, Homo sapiens
aggttaacgcaaagg

SEQ ID NO: 780878 - DNA, 15 bp, Homo sapiens
ggttaacgcaaagga

SEQ ID NO: 780879 - DNA, 15 bp, Homo sapiens
gttaacgcaaaggat

SEQ ID NO: 780880 - DNA, 15 bp, Homo sapiens
ttaacgcaaaggatc

SEQ ID NO: 780881 - DNA, 15 bp, Homo sapiens
taacgcaaaggatcg

SEQ ID NO: 780882 - DNA, 15 bp, Homo sapiens
aacgcaaaggatcga

SEQ ID NO: 780883 - DNA, 15 bp, Homo sapiens
acgcaaaggatcgag

SEQ ID NO: 780884 - DNA, 15 bp, Homo sapiens
cgcaaaggatcgaga

SEQ ID NO: 780885 - DNA, 15 bp, Homo sapiens
gcaaaggatcgagaa

SEQ ID NO: 780886 - DNA, 15 bp, Homo sapiens
caaaggatcgagaaa

SEQ ID NO: 780887 - DNA, 15 bp, Homo sapiens
aaaggatcgagaaac

SEQ ID NO: 780888 - DNA, 15 bp, Homo sapiens
aaggatcgagaaact

SEQ ID NO: 780889 - DNA, 15 bp, Homo sapiens
aggatcgagaaacta

SEQ ID NO: 780890 - DNA, 15 bp, Homo sapiens
ggatcgagaaactat

SEQ ID NO: 780891 - DNA, 15 bp, Homo sapiens
gatcgagaaactatc

SEQ ID NO: 780892 - DNA, 15 bp, Homo sapiens
atcgagaaactatca

SEQ ID NO: 780893 - DNA, 15 bp, Homo sapiens
tcgagaaactatcac

SEQ ID NO: 780894 - DNA, 15 bp, Homo sapiens
cgagaaactatcacc

SEQ ID NO: 780895 - DNA, 15 bp, Homo sapiens
gagaaactatcacct

SEQ ID NO: 780896 - DNA, 15 bp, Homo sapiens
agaaactatcacctt

SEQ ID NO: 780897 - DNA, 15 bp, Homo sapiens
gaaactatcaccttc

SEQ ID NO: 780898 - DNA, 15 bp, Homo sapiens
aaactatcaccttcc

SEQ ID NO: 780899 - DNA, 15 bp, Homo sapiens
aactatcaccttcct

SEQ ID NO: 780900 - DNA, 15 bp, Homo sapiens
actatcaccttccta

SEQ ID NO: 780901 - DNA, 15 bp, Homo sapiens
ctatcaccttcctag

SEQ ID NO: 780902 - DNA, 15 bp, Homo sapiens
tatcaccttcctaga

SEQ ID NO: 780903 - DNA, 15 bp, Homo sapiens
atcaccttcctagaa

SEQ ID NO: 780904 - DNA, 15 bp, Homo sapiens
tcaccttcctagaac

SEQ ID NO: 780905 - DNA, 15 bp, Homo sapiens
caccttcctagaact

SEQ ID NO: 780906 - DNA, 15 bp, Homo sapiens
accttcctagaactg

SEQ ID NO: 780907 - DNA, 15 bp, Homo sapiens
ccttcctagaactgt

SEQ ID NO: 780908 - DNA, 15 bp, Homo sapiens
cttcctagaactgtt

SEQ ID NO: 780909 - DNA, 15 bp, Homo sapiens
ttcctagaactgttc

SEQ ID NO: 780910 - DNA, 15 bp, Homo sapiens
tcctagaactgttcc

SEQ ID NO: 780911 - DNA, 15 bp, Homo sapiens
cctagaactgttccc

SEQ ID NO: 780912 - DNA, 15 bp, Homo sapiens
ctagaactgttccca

SEQ ID NO: 780913 - DNA, 15 bp, Homo sapiens
tagaactgttcccag

SEQ ID NO: 780914 - DNA, 15 bp, Homo sapiens
agaactgttcccaga

SEQ ID NO: 780915 - DNA, 15 bp, Homo sapiens
gaactgttcccagac

SEQ ID NO: 780916 - DNA, 15 bp, Homo sapiens
aactgttcccagact

SEQ ID NO: 780917 - DNA, 15 bp, Homo sapiens
actgttcccagactt

SEQ ID NO: 780918 - DNA, 15 bp, Homo sapiens
ctgttcccagacttt

SEQ ID NO: 780919 - DNA, 15 bp, Homo sapiens
tgttcccagactttt

SEQ ID NO: 780920 - DNA, 15 bp, Homo sapiens
gttcccagactttta

SEQ ID NO: 780921 - DNA, 15 bp, Homo sapiens
ttcccagacttttag

SEQ ID NO: 780922 - DNA, 15 bp, Homo sapiens
tcccagacttttagc

SEQ ID NO: 780923 - DNA, 15 bp, Homo sapiens
cccagacttttagca

SEQ ID NO: 780924 - DNA, 15 bp, Homo sapiens
ccagacttttagcaa

SEQ ID NO: 780925 - DNA, 15 bp, Homo sapiens
cagacttttagcaaa

SEQ ID NO: 780926 - DNA, 15 bp, Homo sapiens
agacttttagcaaac

SEQ ID NO: 780927 - DNA, 15 bp, Homo sapiens
gacttttagcaaaca

SEQ ID NO: 780928 - DNA, 15 bp, Homo sapiens
acttttagcaaacag

SEQ ID NO: 780929 - DNA, 15 bp, Homo sapiens
cttttagcaaacagg

SEQ ID NO: 780930 - DNA, 15 bp, Homo sapiens
ttttagcaaacaggc

SEQ ID NO: 780931 - DNA, 15 bp, Homo sapiens
tttagcaaacaggct

SEQ ID NO: 780932 - DNA, 15 bp, Homo sapiens
ttagcaaacaggctg

SEQ ID NO: 780933 - DNA, 15 bp, Homo sapiens
tagcaaacaggctga

SEQ ID NO: 780934 - DNA, 15 bp, Homo sapiens
agcaaacaggctgaa

SEQ ID NO: 780935 - DNA, 15 bp, Homo sapiens
gcaaacaggctgaat

SEQ ID NO: 780936 - DNA, 15 bp, Homo sapiens
caaacaggctgaatt

SEQ ID NO: 780937 - DNA, 15 bp, Homo sapiens
aaacaggctgaattt

SEQ ID NO: 780938 - DNA, 15 bp, Homo sapiens
aacaggctgaatttt

SEQ ID NO: 780939 - DNA, 15 bp, Homo sapiens
acaggctgaattttg

SEQ ID NO: 780940 - DNA, 15 bp, Homo sapiens
caggctgaattttga

SEQ ID NO: 780941 - DNA, 15 bp, Homo sapiens
aggctgaattttgac

SEQ ID NO: 780942 - DNA, 15 bp, Homo sapiens
ggctgaattttgacc

SEQ ID NO: 780943 - DNA, 15 bp, Homo sapiens
gctgaattttgacct

SEQ ID NO: 780944 - DNA, 15 bp, Homo sapiens
ctgaattttgacctt

SEQ ID NO: 780945 - DNA, 15 bp, Homo sapiens
tgaattttgaccttt

SEQ ID NO: 780946 - DNA, 15 bp, Homo sapiens
gaattttgacctttt

SEQ ID NO: 780947 - DNA, 15 bp, Homo sapiens
aattttgaccttttt

SEQ ID NO: 780948 - DNA, 15 bp, Homo sapiens
attttgacctttttc

SEQ ID NO: 780949 - DNA, 15 bp, Homo sapiens
ttttgacctttttcc

SEQ ID NO: 780950 - DNA, 15 bp, Homo sapiens
tttgacctttttccc

SEQ ID NO: 780951 - DNA, 15 bp, Homo sapiens
ttgacctttttccca

SEQ ID NO: 780952 - DNA, 15 bp, Homo sapiens
tgacctttttcccat

SEQ ID NO: 780953 - DNA, 15 bp, Homo sapiens
gacctttttcccatt

SEQ ID NO: 780954 - DNA, 15 bp, Homo sapiens
acctttttcccattt

SEQ ID NO: 780955 - DNA, 15 bp, Homo sapiens
cctttttcccatttt

SEQ ID NO: 780956 - DNA, 15 bp, Homo sapiens
ctttttcccattttt

SEQ ID NO: 780957 - DNA, 15 bp, Homo sapiens
tttttcccatttttc

SEQ ID NO: 780958 - DNA, 15 bp, Homo sapiens
ttttcccatttttct

SEQ ID NO: 780959 - DNA, 15 bp, Homo sapiens
tttcccatttttctt

SEQ ID NO: 780960 - DNA, 15 bp, Homo sapiens
ttcccatttttcttt

SEQ ID NO: 780961 - DNA, 15 bp, Homo sapiens
tcccatttttctttt

SEQ ID NO: 780962 - DNA, 15 bp, Homo sapiens
cccatttttcttttt

SEQ ID NO: 780963 - DNA, 15 bp, Homo sapiens
ccatttttcttttta

SEQ ID NO: 780964 - DNA, 15 bp, Homo sapiens
catttttctttttaa

SEQ ID NO: 780965 - DNA, 15 bp, Homo sapiens
atttttctttttaat

SEQ ID NO: 780966 - DNA, 15 bp, Homo sapiens
tttttctttttaatc

SEQ ID NO: 780967 - DNA, 15 bp, Homo sapiens
ttttctttttaatcc

SEQ ID NO: 780968 - DNA, 15 bp, Homo sapiens
tttctttttaatcct

SEQ ID NO: 780969 - DNA, 15 bp, Homo sapiens
ttctttttaatcctc

SEQ ID NO: 780970 - DNA, 15 bp, Homo sapiens
tctttttaatcctcc

SEQ ID NO: 780971 - DNA, 15 bp, Homo sapiens
ctttttaatcctccc

SEQ ID NO: 780972 - DNA, 15 bp, Homo sapiens
tttttaatcctccct

SEQ ID NO: 780973 - DNA, 15 bp, Homo sapiens
ttttaatcctccctc

SEQ ID NO: 780974 - DNA, 15 bp, Homo sapiens
tttaatcctccctcc

SEQ ID NO: 780975 - DNA, 15 bp, Homo sapiens
ttaatcctccctccc

SEQ ID NO: 780976 - DNA, 15 bp, Homo sapiens
taatcctccctcccc

SEQ ID NO: 780977 - DNA, 15 bp, Homo sapiens
aatcctccctcccca

SEQ ID NO: 780978 - DNA, 15 bp, Homo sapiens
atcctccctccccac

SEQ ID NO: 780979 - DNA, 15 bp, Homo sapiens
tcctccctccccaca

SEQ ID NO: 780980 - DNA, 15 bp, Homo sapiens
cctccctccccacat

SEQ ID NO: 780981 - DNA, 15 bp, Homo sapiens
ctccctccccacatg

SEQ ID NO: 780982 - DNA, 15 bp, Homo sapiens
tccctccccacatgt

SEQ ID NO: 780983 - DNA, 15 bp, Homo sapiens
ccctccccacatgtt

SEQ ID NO: 780984 - DNA, 15 bp, Homo sapiens
cctccccacatgttt

SEQ ID NO: 780985 - DNA, 15 bp, Homo sapiens
ctccccacatgtttt

SEQ ID NO: 780986 - DNA, 15 bp, Homo sapiens
tccccacatgttttg

SEQ ID NO: 780987 - DNA, 15 bp, Homo sapiens
ccccacatgttttgt

SEQ ID NO: 780988 - DNA, 15 bp, Homo sapiens
cccacatgttttgtg

SEQ ID NO: 780989 - DNA, 15 bp, Homo sapiens
ccacatgttttgtgg

SEQ ID NO: 780990 - DNA, 15 bp, Homo sapiens
cacatgttttgtggc

SEQ ID NO: 780991 - DNA, 15 bp, Homo sapiens
acatgttttgtggct

SEQ ID NO: 780992 - DNA, 15 bp, Homo sapiens
catgttttgtggctt

SEQ ID NO: 780993 - DNA, 15 bp, Homo sapiens
atgttttgtggcttt

SEQ ID NO: 780994 - DNA, 15 bp, Homo sapiens
tgttttgtggctttt

SEQ ID NO: 780995 - DNA, 15 bp, Homo sapiens
gttttgtggcttttg

SEQ ID NO: 780996 - DNA, 15 bp, Homo sapiens
ttttgtggcttttgg

SEQ ID NO: 780997 - DNA, 15 bp, Homo sapiens
tttgtggcttttggt

SEQ ID NO: 780998 - DNA, 15 bp, Homo sapiens
ttgtggcttttggtg

SEQ ID NO: 780999 - DNA, 15 bp, Homo sapiens
tgtggcttttggtga

SEQ ID NO: 781000 - DNA, 15 bp, Homo sapiens
gtggcttttggtgaa

SEQ ID NO: 781001 - DNA, 15 bp, Homo sapiens
tggcttttggtgaaa

SEQ ID NO: 781002 - DNA, 15 bp, Homo sapiens
ggcttttggtgaaat

SEQ ID NO: 781003 - DNA, 15 bp, Homo sapiens
gcttttggtgaaatg

SEQ ID NO: 781004 - DNA, 15 bp, Homo sapiens
cttttggtgaaatgg

SEQ ID NO: 781005 - DNA, 15 bp, Homo sapiens
ttttggtgaaatggc

SEQ ID NO: 781006 - DNA, 15 bp, Homo sapiens
tttggtgaaatggct

SEQ ID NO: 781007 - DNA, 15 bp, Homo sapiens
ttggtgaaatggctg

SEQ ID NO: 781008 - DNA, 15 bp, Homo sapiens
tggtgaaatggctgt

SEQ ID NO: 781009 - DNA, 15 bp, Homo sapiens
ggtgaaatggctgtc

SEQ ID NO: 781010 - DNA, 15 bp, Homo sapiens
gtgaaatggctgtcc

SEQ ID NO: 781011 - DNA, 15 bp, Homo sapiens
tgaaatggctgtcct

SEQ ID NO: 781012 - DNA, 15 bp, Homo sapiens
gaaatggctgtccta

SEQ ID NO: 781013 - DNA, 15 bp, Homo sapiens
aaatggctgtcctaa

SEQ ID NO: 781014 - DNA, 15 bp, Homo sapiens
aatggctgtcctaag

SEQ ID NO: 781015 - DNA, 15 bp, Homo sapiens
atggctgtcctaagg

SEQ ID NO: 781016 - DNA, 15 bp, Homo sapiens
tggctgtcctaaggg

SEQ ID NO: 781017 - DNA, 15 bp, Homo sapiens
ggctgtcctaaggga

SEQ ID NO: 781018 - DNA, 15 bp, Homo sapiens
gctgtcctaagggaa

SEQ ID NO: 781019 - DNA, 15 bp, Homo sapiens
ctgtcctaagggaaa

SEQ ID NO: 781020 - DNA, 15 bp, Homo sapiens
tgtcctaagggaaac

SEQ ID NO: 781021 - DNA, 15 bp, Homo sapiens
gtcctaagggaaaca

SEQ ID NO: 781022 - DNA, 15 bp, Homo sapiens
tcctaagggaaacag

SEQ ID NO: 781023 - DNA, 15 bp, Homo sapiens
cctaagggaaacagg

SEQ ID NO: 781024 - DNA, 15 bp, Homo sapiens
ctaagggaaacagga

SEQ ID NO: 781025 - DNA, 15 bp, Homo sapiens
taagggaaacaggac

SEQ ID NO: 781026 - DNA, 15 bp, Homo sapiens
aagggaaacaggaca

SEQ ID NO: 781027 - DNA, 15 bp, Homo sapiens
agggaaacaggacag

SEQ ID NO: 781028 - DNA, 15 bp, Homo sapiens
gggaaacaggacagt

SEQ ID NO: 781029 - DNA, 15 bp, Homo sapiens
ggaaacaggacagtt

SEQ ID NO: 781030 - DNA, 15 bp, Homo sapiens
gaaacaggacagttc

SEQ ID NO: 781031 - DNA, 15 bp, Homo sapiens
aaacaggacagttca

SEQ ID NO: 781032 - DNA, 15 bp, Homo sapiens
aacaggacagttcat

SEQ ID NO: 781033 - DNA, 15 bp, Homo sapiens
acaggacagttcatt

SEQ ID NO: 781034 - DNA, 15 bp, Homo sapiens
caggacagttcattg

SEQ ID NO: 781035 - DNA, 15 bp, Homo sapiens
aggacagttcattga

SEQ ID NO: 781036 - DNA, 15 bp, Homo sapiens
ggacagttcattgaa

SEQ ID NO: 781037 - DNA, 15 bp, Homo sapiens
gacagttcattgaaa

SEQ ID NO: 781038 - DNA, 15 bp, Homo sapiens
acagttcattgaaaa

SEQ ID NO: 781039 - DNA, 15 bp, Homo sapiens
cagttcattgaaaag

SEQ ID NO: 781040 - DNA, 15 bp, Homo sapiens
agttcattgaaaagg

SEQ ID NO: 781041 - DNA, 15 bp, Homo sapiens
gttcattgaaaagga

SEQ ID NO: 781042 - DNA, 15 bp, Homo sapiens
cattgaaaaggagag

SEQ ID NO: 781043 - DNA, 15 bp, Homo sapiens
attgaaaaggagaga

SEQ ID NO: 781044 - DNA, 15 bp, Homo sapiens
ttgaaaaggagagag

SEQ ID NO: 781045 - DNA, 15 bp, Homo sapiens
tgaaaaggagagaga

SEQ ID NO: 781046 - DNA, 15 bp, Homo sapiens
gaaaaggagagagaa

SEQ ID NO: 781047 - DNA, 15 bp, Homo sapiens
aaaaggagagagaaa

SEQ ID NO: 781048 - DNA, 15 bp, Homo sapiens
aaaggagagagaaag

SEQ ID NO: 781049 - DNA, 15 bp, Homo sapiens
aaggagagagaaagt

SEQ ID NO: 781050 - DNA, 15 bp, Homo sapiens
aggagagagaaagta

SEQ ID NO: 781051 - DNA, 15 bp, Homo sapiens
ggagagagaaagtaa

SEQ ID NO: 781052 - DNA, 15 bp, Homo sapiens
gagagagaaagtaaa

SEQ ID NO: 781053 - DNA, 15 bp, Homo sapiens
agagagaaagtaaag

SEQ ID NO: 781054 - DNA, 15 bp, Homo sapiens
gagagaaagtaaaga

SEQ ID NO: 781055 - DNA, 15 bp, Homo sapiens
agagaaagtaaagac

SEQ ID NO: 781056 - DNA, 15 bp, Homo sapiens
gagaaagtaaagacc

SEQ ID NO: 781057 - DNA, 15 bp, Homo sapiens
agaaagtaaagaccc

SEQ ID NO: 781058 - DNA, 15 bp, Homo sapiens
gaaagtaaagacccc

SEQ ID NO: 781059 - DNA, 15 bp, Homo sapiens
aaagtaaagacccct

SEQ ID NO: 781060 - DNA, 15 bp, Homo sapiens
aagtaaagacccctt

SEQ ID NO: 781061 - DNA, 15 bp, Homo sapiens
agtaaagaccccttt

SEQ ID NO: 781062 - DNA, 15 bp, Homo sapiens
gtaaagacccctttc

SEQ ID NO: 781063 - DNA, 15 bp, Homo sapiens
taaagacccctttcc

SEQ ID NO: 781064 - DNA, 15 bp, Homo sapiens
aaagacccctttccc

SEQ ID NO: 781065 - DNA, 15 bp, Homo sapiens
aagacccctttccca

SEQ ID NO: 781066 - DNA, 15 bp, Homo sapiens
agacccctttcccac

SEQ ID NO: 781067 - DNA, 15 bp, Homo sapiens
gacccctttcccaca

SEQ ID NO: 781068 - DNA, 15 bp, Homo sapiens
acccctttcccacac

SEQ ID NO: 781069 - DNA, 15 bp, Homo sapiens
cccctttcccacacc

SEQ ID NO: 781070 - DNA, 15 bp, Homo sapiens
ccctttcccacacca

SEQ ID NO: 781071 - DNA, 15 bp, Homo sapiens
cctttcccacaccac

SEQ ID NO: 781072 - DNA, 15 bp, Homo sapiens
ctttcccacaccacc

SEQ ID NO: 781073 - DNA, 15 bp, Homo sapiens
tttcccacaccacct

SEQ ID NO: 781074 - DNA, 15 bp, Homo sapiens
ttcccacaccacctt

SEQ ID NO: 781075 - DNA, 15 bp, Homo sapiens
tcccacaccaccttc

SEQ ID NO: 781076 - DNA, 15 bp, Homo sapiens
cccacaccaccttcc

SEQ ID NO: 781077 - DNA, 15 bp, Homo sapiens
ccacaccaccttccc

SEQ ID NO: 781078 - DNA, 15 bp, Homo sapiens
cacaccaccttccct

SEQ ID NO: 781079 - DNA, 15 bp, Homo sapiens
acaccaccttccctc

SEQ ID NO: 781080 - DNA, 15 bp, Homo sapiens
caccaccttccctca

SEQ ID NO: 781081 - DNA, 15 bp, Homo sapiens
accaccttccctcag

SEQ ID NO: 781082 - DNA, 15 bp, Homo sapiens
ccaccttccctcaga

SEQ ID NO: 781083 - DNA, 15 bp, Homo sapiens
caccttccctcagat

SEQ ID NO: 781084 - DNA, 15 bp, Homo sapiens
accttccctcagatg

SEQ ID NO: 781085 - DNA, 15 bp, Homo sapiens
ccttccctcagatgc

SEQ ID NO: 781086 - DNA, 15 bp, Homo sapiens
cttccctcagatgca

SEQ ID NO: 781087 - DNA, 15 bp, Homo sapiens
ttccctcagatgcag

SEQ ID NO: 781088 - DNA, 15 bp, Homo sapiens
tccctcagatgcagc

SEQ ID NO: 781089 - DNA, 15 bp, Homo sapiens
ccctcagatgcagcc

SEQ ID NO: 781090 - DNA, 15 bp, Homo sapiens
cctcagatgcagcct

SEQ ID NO: 781091 - DNA, 15 bp, Homo sapiens
ctcagatgcagcctt

SEQ ID NO: 781092 - DNA, 15 bp, Homo sapiens
tcagatgcagccttt

SEQ ID NO: 781093 - DNA, 15 bp, Homo sapiens
cagatgcagcctttg

SEQ ID NO: 781094 - DNA, 15 bp, Homo sapiens
agatgcagcctttgc

SEQ ID NO: 781095 - DNA, 15 bp, Homo sapiens
gatgcagcctttgct

SEQ ID NO: 781096 - DNA, 15 bp, Homo sapiens
atgcagcctttgctt

SEQ ID NO: 781097 - DNA, 15 bp, Homo sapiens
tgcagcctttgctta

SEQ ID NO: 781098 - DNA, 15 bp, Homo sapiens
gcagcctttgcttac

SEQ ID NO: 781099 - DNA, 15 bp, Homo sapiens
cagcctttgcttaca

SEQ ID NO: 781100 - DNA, 15 bp, Homo sapiens
agcctttgcttacac

SEQ ID NO: 781101 - DNA, 15 bp, Homo sapiens
gcctttgcttacact

SEQ ID NO: 781102 - DNA, 15 bp, Homo sapiens
cctttgcttacacta

SEQ ID NO: 781103 - DNA, 15 bp, Homo sapiens
ctttgcttacactaa

SEQ ID NO: 781104 - DNA, 15 bp, Homo sapiens
tttgcttacactaaa

SEQ ID NO: 781105 - DNA, 15 bp, Homo sapiens
ttgcttacactaaaa

SEQ ID NO: 781106 - DNA, 15 bp, Homo sapiens
tgcttacactaaaaa

SEQ ID NO: 781107 - DNA, 15 bp, Homo sapiens
gcttacactaaaaat

SEQ ID NO: 781108 - DNA, 15 bp, Homo sapiens
cttacactaaaaata

SEQ ID NO: 781109 - DNA, 15 bp, Homo sapiens
ttacactaaaaatag

SEQ ID NO: 781110 - DNA, 15 bp, Homo sapiens
tacactaaaaatagc

SEQ ID NO: 781111 - DNA, 15 bp, Homo sapiens
acactaaaaatagct

SEQ ID NO: 781112 - DNA, 15 bp, Homo sapiens
cactaaaaatagctt

SEQ ID NO: 781113 - DNA, 15 bp, Homo sapiens
actaaaaatagcttg

SEQ ID NO: 781114 - DNA, 15 bp, Homo sapiens
ctaaaaatagcttga

SEQ ID NO: 781115 - DNA, 15 bp, Homo sapiens
taaaaatagcttgaa

SEQ ID NO: 781116 - DNA, 15 bp, Homo sapiens
aaaaatagcttgaaa

SEQ ID NO: 781117 - DNA, 15 bp, Homo sapiens
aaaatagcttgaaac

SEQ ID NO: 781118 - DNA, 15 bp, Homo sapiens
aaatagcttgaaaca

SEQ ID NO: 781119 - DNA, 15 bp, Homo sapiens
aatagcttgaaacag

SEQ ID NO: 781120 - DNA, 15 bp, Homo sapiens
atagcttgaaacaga

SEQ ID NO: 781121 - DNA, 15 bp, Homo sapiens
tagcttgaaacagag

SEQ ID NO: 781122 - DNA, 15 bp, Homo sapiens
agcttgaaacagagg

SEQ ID NO: 781123 - DNA, 15 bp, Homo sapiens
gcttgaaacagaggc

SEQ ID NO: 781124 - DNA, 15 bp, Homo sapiens
cttgaaacagaggct

SEQ ID NO: 781125 - DNA, 15 bp, Homo sapiens
ttgaaacagaggctg

SEQ ID NO: 781126 - DNA, 15 bp, Homo sapiens
tgaaacagaggctga

SEQ ID NO: 781127 - DNA, 15 bp, Homo sapiens
gaaacagaggctgaa

SEQ ID NO: 781128 - DNA, 15 bp, Homo sapiens
aaacagaggctgaat

SEQ ID NO: 781129 - DNA, 15 bp, Homo sapiens
aacagaggctgaatc

SEQ ID NO: 781130 - DNA, 15 bp, Homo sapiens
acagaggctgaatca

SEQ ID NO: 781131 - DNA, 15 bp, Homo sapiens
cagaggctgaatcac

SEQ ID NO: 781132 - DNA, 15 bp, Homo sapiens
agaggctgaatcaca

SEQ ID NO: 781133 - DNA, 15 bp, Homo sapiens
gaggctgaatcacaa

SEQ ID NO: 781134 - DNA, 15 bp, Homo sapiens
aggctgaatcacaaa

SEQ ID NO: 781135 - DNA, 15 bp, Homo sapiens
ggctgaatcacaaaa

SEQ ID NO: 781136 - DNA, 15 bp, Homo sapiens
gctgaatcacaaaaa

SEQ ID NO: 781137 - DNA, 15 bp, Homo sapiens
ctgaatcacaaaaaa

SEQ ID NO: 781138 - DNA, 15 bp, Homo sapiens
tgaatcacaaaaaaa

SEQ ID NO: 781139 - DNA, 15 bp, Homo sapiens
gaatcacaaaaaaaa

SEQ ID NO: 781140 - DNA, 15 bp, Homo sapiens
aatcacaaaaaaaaa

SEQ ID NO: 781141 - DNA, 15 bp, Homo sapiens
atcacaaaaaaaaaa

SEQ ID NO: 781142 - DNA, 15 bp, Homo sapiens
tcacaaaaaaaaaag

SEQ ID NO: 781143 - DNA, 15 bp, Homo sapiens
cacaaaaaaaaaagt

SEQ ID NO: 781144 - DNA, 15 bp, Homo sapiens
acaaaaaaaaaagtg

SEQ ID NO: 781145 - DNA, 15 bp, Homo sapiens
caaaaaaaaaagtgg

SEQ ID NO: 781146 - DNA, 15 bp, Homo sapiens
aaaaaaaaaagtggc

SEQ ID NO: 781147 - DNA, 15 bp, Homo sapiens
aaaaaaaaagtggca

SEQ ID NO: 781148 - DNA, 15 bp, Homo sapiens
aaaaaaaagtggcat

SEQ ID NO: 781149 - DNA, 15 bp, Homo sapiens
aaaaaaagtggcatt

SEQ ID NO: 781150 - DNA, 15 bp, Homo sapiens
aaaaaagtggcattt

SEQ ID NO: 781151 - DNA, 15 bp, Homo sapiens
aaaaagtggcatttc

SEQ ID NO: 781152 - DNA, 15 bp, Homo sapiens
aaaagtggcatttca

SEQ ID NO: 781153 - DNA, 15 bp, Homo sapiens
aaagtggcatttcag

SEQ ID NO: 781154 - DNA, 15 bp, Homo sapiens
aagtggcatttcagg

SEQ ID NO: 781155 - DNA, 15 bp, Homo sapiens
agtggcatttcaggg

SEQ ID NO: 781156 - DNA, 15 bp, Homo sapiens
gtggcatttcagggg

SEQ ID NO: 781157 - DNA, 15 bp, Homo sapiens
ggcatttcaggggac

SEQ ID NO: 781158 - DNA, 15 bp, Homo sapiens
gcatttcaggggaca

SEQ ID NO: 781159 - DNA, 15 bp, Homo sapiens
catttcaggggacag

SEQ ID NO: 781160 - DNA, 15 bp, Homo sapiens
atttcaggggacaga

SEQ ID NO: 781161 - DNA, 15 bp, Homo sapiens
tttcaggggacagag

SEQ ID NO: 781162 - DNA, 15 bp, Homo sapiens
ttcaggggacagagg

SEQ ID NO: 781163 - DNA, 15 bp, Homo sapiens
tcaggggacagaggc

SEQ ID NO: 781164 - DNA, 15 bp, Homo sapiens
caggggacagaggct

SEQ ID NO: 781165 - DNA, 15 bp, Homo sapiens
aggggacagaggctg

SEQ ID NO: 781166 - DNA, 15 bp, Homo sapiens
ggggacagaggctgc

SEQ ID NO: 781167 - DNA, 15 bp, Homo sapiens
gggacagaggctgcc

SEQ ID NO: 781168 - DNA, 15 bp, Homo sapiens
ggacagaggctgcca

SEQ ID NO: 781169 - DNA, 15 bp, Homo sapiens
gacagaggctgccag

SEQ ID NO: 781170 - DNA, 15 bp, Homo sapiens
acagaggctgccagc

SEQ ID NO: 781171 - DNA, 15 bp, Homo sapiens
cagaggctgccagct

SEQ ID NO: 781172 - DNA, 15 bp, Homo sapiens
agaggctgccagctc

SEQ ID NO: 781173 - DNA, 15 bp, Homo sapiens
gaggctgccagctcc

SEQ ID NO: 781174 - DNA, 15 bp, Homo sapiens
aggctgccagctccc

SEQ ID NO: 781175 - DNA, 15 bp, Homo sapiens
ggctgccagctccct

SEQ ID NO: 781176 - DNA, 15 bp, Homo sapiens
gctgccagctccctg

SEQ ID NO: 781177 - DNA, 15 bp, Homo sapiens
ctgccagctccctgg

SEQ ID NO: 781178 - DNA, 15 bp, Homo sapiens
tgccagctccctggc

SEQ ID NO: 781179 - DNA, 15 bp, Homo sapiens
gccagctccctggct

SEQ ID NO: 781180 - DNA, 15 bp, Homo sapiens
ccagctccctggctg

SEQ ID NO: 781181 - DNA, 15 bp, Homo sapiens
cagctccctggctgc

SEQ ID NO: 781182 - DNA, 15 bp, Homo sapiens
agctccctggctgct

SEQ ID NO: 781183 - DNA, 15 bp, Homo sapiens
gctccctggctgctg

SEQ ID NO: 781184 - DNA, 15 bp, Homo sapiens
ctccctggctgctgc

SEQ ID NO: 781185 - DNA, 15 bp, Homo sapiens
tccctggctgctgct

SEQ ID NO: 781186 - DNA, 15 bp, Homo sapiens
ccctggctgctgctg

SEQ ID NO: 781187 - DNA, 15 bp, Homo sapiens
cctggctgctgctga

SEQ ID NO: 781188 - DNA, 15 bp, Homo sapiens
ctggctgctgctgaa

SEQ ID NO: 781189 - DNA, 15 bp, Homo sapiens
tggctgctgctgaag

SEQ ID NO: 781190 - DNA, 15 bp, Homo sapiens
ggctgctgctgaagt

SEQ ID NO: 781191 - DNA, 15 bp, Homo sapiens
gctgctgctgaagtc

SEQ ID NO: 781192 - DNA, 15 bp, Homo sapiens
ctgctgctgaagtct

SEQ ID NO: 781193 - DNA, 15 bp, Homo sapiens
tgctgctgaagtctg

SEQ ID NO: 781194 - DNA, 15 bp, Homo sapiens
gctgctgaagtctgt

SEQ ID NO: 781195 - DNA, 15 bp, Homo sapiens
ctgctgaagtctgtt

SEQ ID NO: 781196 - DNA, 15 bp, Homo sapiens
tgctgaagtctgttg

SEQ ID NO: 781197 - DNA, 15 bp, Homo sapiens
gctgaagtctgttgg

SEQ ID NO: 781198 - DNA, 15 bp, Homo sapiens
ctgaagtctgttggg

SEQ ID NO: 781199 - DNA, 15 bp, Homo sapiens
tgaagtctgttgggt

SEQ ID NO: 781200 - DNA, 15 bp, Homo sapiens
gaagtctgttgggtt

SEQ ID NO: 781201 - DNA, 15 bp, Homo sapiens
aagtctgttgggttt

SEQ ID NO: 781202 - DNA, 15 bp, Homo sapiens
agtctgttgggtttg

SEQ ID NO: 781203 - DNA, 15 bp, Homo sapiens
gtctgttgggtttgt

SEQ ID NO: 781204 - DNA, 15 bp, Homo sapiens
tctgttgggtttgtt

SEQ ID NO: 781205 - DNA, 15 bp, Homo sapiens
ctgttgggtttgttg

SEQ ID NO: 781206 - DNA, 15 bp, Homo sapiens
tgttgggtttgttgg

SEQ ID NO: 781207 - DNA, 15 bp, Homo sapiens
gttgggtttgttggt

SEQ ID NO: 781208 - DNA, 15 bp, Homo sapiens
ttgggtttgttggtc

SEQ ID NO: 781209 - DNA, 15 bp, Homo sapiens
tgggtttgttggtct

SEQ ID NO: 781210 - DNA, 15 bp, Homo sapiens
gggtttgttggtctc

SEQ ID NO: 781211 - DNA, 15 bp, Homo sapiens
ggtttgttggtctct

SEQ ID NO: 781212 - DNA, 15 bp, Homo sapiens
gtttgttggtctctg

SEQ ID NO: 781213 - DNA, 15 bp, Homo sapiens
tttgttggtctctga

SEQ ID NO: 781214 - DNA, 15 bp, Homo sapiens
ttgttggtctctgag

SEQ ID NO: 781215 - DNA, 15 bp, Homo sapiens
tgttggtctctgagc

SEQ ID NO: 781216 - DNA, 15 bp, Homo sapiens
gttggtctctgagcc

SEQ ID NO: 781217 - DNA, 15 bp, Homo sapiens
ttggtctctgagccc

SEQ ID NO: 781218 - DNA, 15 bp, Homo sapiens
tggtctctgagcccc

SEQ ID NO: 781219 - DNA, 15 bp, Homo sapiens
ggtctctgagccccg

SEQ ID NO: 781220 - DNA, 15 bp, Homo sapiens
gtctctgagccccga

SEQ ID NO: 781221 - DNA, 15 bp, Homo sapiens
tctctgagccccgac

SEQ ID NO: 781222 - DNA, 15 bp, Homo sapiens
ctctgagccccgact

SEQ ID NO: 781223 - DNA, 15 bp, Homo sapiens
tctgagccccgactt

SEQ ID NO: 781224 - DNA, 15 bp, Homo sapiens
ctgagccccgacttg

SEQ ID NO: 781225 - DNA, 15 bp, Homo sapiens
tgagccccgacttgc

SEQ ID NO: 781226 - DNA, 15 bp, Homo sapiens
gagccccgacttgcc

SEQ ID NO: 781227 - DNA, 15 bp, Homo sapiens
agccccgacttgccc

SEQ ID NO: 781228 - DNA, 15 bp, Homo sapiens
gccccgacttgccca

SEQ ID NO: 781229 - DNA, 15 bp, Homo sapiens
ccccgacttgcccag

SEQ ID NO: 781230 - DNA, 15 bp, Homo sapiens
cccgacttgcccagg

SEQ ID NO: 781231 - DNA, 15 bp, Homo sapiens
ccgacttgcccagga

SEQ ID NO: 781232 - DNA, 15 bp, Homo sapiens
cgacttgcccaggaa

SEQ ID NO: 781233 - DNA, 15 bp, Homo sapiens
gacttgcccaggaag

SEQ ID NO: 781234 - DNA, 15 bp, Homo sapiens
acttgcccaggaagg

SEQ ID NO: 781235 - DNA, 15 bp, Homo sapiens
cttgcccaggaaggc

SEQ ID NO: 781236 - DNA, 15 bp, Homo sapiens
ttgcccaggaaggcg

SEQ ID NO: 781237 - DNA, 15 bp, Homo sapiens
tgcccaggaaggcgt

SEQ ID NO: 781238 - DNA, 15 bp, Homo sapiens
gcccaggaaggcgtg

SEQ ID NO: 781239 - DNA, 15 bp, Homo sapiens
cccaggaaggcgtgg

SEQ ID NO: 781240 - DNA, 15 bp, Homo sapiens
ccaggaaggcgtggg

SEQ ID NO: 781241 - DNA, 15 bp, Homo sapiens
caggaaggcgtgggg

SEQ ID NO: 781242 - DNA, 15 bp, Homo sapiens
aggaaggcgtggggt

SEQ ID NO: 781243 - DNA, 15 bp, Homo sapiens
ggaaggcgtggggtt

SEQ ID NO: 781244 - DNA, 15 bp, Homo sapiens
gaaggcgtggggttt

SEQ ID NO: 781245 - DNA, 15 bp, Homo sapiens
aaggcgtggggtttg

SEQ ID NO: 781246 - DNA, 15 bp, Homo sapiens
aggcgtggggtttgg

SEQ ID NO: 781247 - DNA, 15 bp, Homo sapiens
ggcgtggggtttgga

SEQ ID NO: 781248 - DNA, 15 bp, Homo sapiens
gcgtggggtttggaa

SEQ ID NO: 781249 - DNA, 15 bp, Homo sapiens
cgtggggtttggaag

SEQ ID NO: 781250 - DNA, 15 bp, Homo sapiens
gtggggtttggaagt

SEQ ID NO: 781251 - DNA, 15 bp, Homo sapiens
tggggtttggaagtg

SEQ ID NO: 781252 - DNA, 15 bp, Homo sapiens
ggggtttggaagtgt

SEQ ID NO: 781253 - DNA, 15 bp, Homo sapiens
gggtttggaagtgta

SEQ ID NO: 781254 - DNA, 15 bp, Homo sapiens
ggtttggaagtgtac

SEQ ID NO: 781255 - DNA, 15 bp, Homo sapiens
gtttggaagtgtact

SEQ ID NO: 781256 - DNA, 15 bp, Homo sapiens
tttggaagtgtactg

SEQ ID NO: 781257 - DNA, 15 bp, Homo sapiens
ttggaagtgtactgg

SEQ ID NO: 781258 - DNA, 15 bp, Homo sapiens
tggaagtgtactggg

SEQ ID NO: 781259 - DNA, 15 bp, Homo sapiens
ggaagtgtactggga

SEQ ID NO: 781260 - DNA, 15 bp, Homo sapiens
gaagtgtactgggat

SEQ ID NO: 781261 - DNA, 15 bp, Homo sapiens
aagtgtactgggata

SEQ ID NO: 781262 - DNA, 15 bp, Homo sapiens
agtgtactgggatag

SEQ ID NO: 781263 - DNA, 15 bp, Homo sapiens
gtgtactgggatagg

SEQ ID NO: 781264 - DNA, 15 bp, Homo sapiens
tgtactgggataggt

SEQ ID NO: 781265 - DNA, 15 bp, Homo sapiens
gtactgggataggtc

SEQ ID NO: 781266 - DNA, 15 bp, Homo sapiens
tactgggataggtcc

SEQ ID NO: 781267 - DNA, 15 bp, Homo sapiens
actgggataggtcca

SEQ ID NO: 781268 - DNA, 15 bp, Homo sapiens
ctgggataggtccag

SEQ ID NO: 781269 - DNA, 15 bp, Homo sapiens
tgggataggtccaga

SEQ ID NO: 781270 - DNA, 15 bp, Homo sapiens
gggataggtccagaa

SEQ ID NO: 781271 - DNA, 15 bp, Homo sapiens
ggataggtccagaac

SEQ ID NO: 781272 - DNA, 15 bp, Homo sapiens
gataggtccagaaca

SEQ ID NO: 781273 - DNA, 15 bp, Homo sapiens
ataggtccagaacat

SEQ ID NO: 781274 - DNA, 15 bp, Homo sapiens
taggtccagaacatt

SEQ ID NO: 781275 - DNA, 15 bp, Homo sapiens
aggtccagaacattc

SEQ ID NO: 781276 - DNA, 15 bp, Homo sapiens
ggtccagaacattct

SEQ ID NO: 781277 - DNA, 15 bp, Homo sapiens
gtccagaacattctt

SEQ ID NO: 781278 - DNA, 15 bp, Homo sapiens
tccagaacattcttt

SEQ ID NO: 781279 - DNA, 15 bp, Homo sapiens
ccagaacattctttt

SEQ ID NO: 781280 - DNA, 15 bp, Homo sapiens
cagaacattcttttt

SEQ ID NO: 781281 - DNA, 15 bp, Homo sapiens
agaacattctttttg

SEQ ID NO: 781282 - DNA, 15 bp, Homo sapiens
gaacattctttttgt

SEQ ID NO: 781283 - DNA, 15 bp, Homo sapiens
aacattctttttgtt

SEQ ID NO: 781284 - DNA, 15 bp, Homo sapiens
acattctttttgttt

SEQ ID NO: 781285 - DNA, 15 bp, Homo sapiens
cattctttttgtttc

SEQ ID NO: 781286 - DNA, 15 bp, Homo sapiens
attctttttgtttct

SEQ ID NO: 781287 - DNA, 15 bp, Homo sapiens
ttctttttgtttcta

SEQ ID NO: 781288 - DNA, 15 bp, Homo sapiens
tctttttgtttctag

SEQ ID NO: 781289 - DNA, 15 bp, Homo sapiens
ctttttgtttctaga

SEQ ID NO: 781290 - DNA, 15 bp, Homo sapiens
tttttgtttctagag

SEQ ID NO: 781291 - DNA, 15 bp, Homo sapiens
ttttgtttctagagc

SEQ ID NO: 781292 - DNA, 15 bp, Homo sapiens
tttgtttctagagca

SEQ ID NO: 781293 - DNA, 15 bp, Homo sapiens
ttgtttctagagcaa

SEQ ID NO: 781294 - DNA, 15 bp, Homo sapiens
tgtttctagagcaag

SEQ ID NO: 781295 - DNA, 15 bp, Homo sapiens
gtttctagagcaagg

SEQ ID NO: 781296 - DNA, 15 bp, Homo sapiens
tttctagagcaaggg

SEQ ID NO: 781297 - DNA, 15 bp, Homo sapiens
ttctagagcaagggc

SEQ ID NO: 781298 - DNA, 15 bp, Homo sapiens
tctagagcaagggcc

SEQ ID NO: 781299 - DNA, 15 bp, Homo sapiens
ctagagcaagggcct

SEQ ID NO: 781300 - DNA, 15 bp, Homo sapiens
tagagcaagggcctg

SEQ ID NO: 781301 - DNA, 15 bp, Homo sapiens
agagcaagggcctgg

SEQ ID NO: 781302 - DNA, 15 bp, Homo sapiens
gagcaagggcctggt

SEQ ID NO: 781303 - DNA, 15 bp, Homo sapiens
agcaagggcctggtt

SEQ ID NO: 781304 - DNA, 15 bp, Homo sapiens
gcaagggcctggttg

SEQ ID NO: 781305 - DNA, 15 bp, Homo sapiens
caagggcctggttgt

SEQ ID NO: 781306 - DNA, 15 bp, Homo sapiens
aagggcctggttgtg

SEQ ID NO: 781307 - DNA, 15 bp, Homo sapiens
agggcctggttgtgt

SEQ ID NO: 781308 - DNA, 15 bp, Homo sapiens
gggcctggttgtgtc

SEQ ID NO: 781309 - DNA, 15 bp, Homo sapiens
ggcctggttgtgtct

SEQ ID NO: 781310 - DNA, 15 bp, Homo sapiens
gcctggttgtgtctg

SEQ ID NO: 781311 - DNA, 15 bp, Homo sapiens
cctggttgtgtctgc

SEQ ID NO: 781312 - DNA, 15 bp, Homo sapiens
ctggttgtgtctgcc

SEQ ID NO: 781313 - DNA, 15 bp, Homo sapiens
tggttgtgtctgcct

SEQ ID NO: 781314 - DNA, 15 bp, Homo sapiens
ggttgtgtctgcctt

SEQ ID NO: 781315 - DNA, 15 bp, Homo sapiens
gttgtgtctgccttg

SEQ ID NO: 781316 - DNA, 15 bp, Homo sapiens
ttgtgtctgccttgg

SEQ ID NO: 781317 - DNA, 15 bp, Homo sapiens
tgtgtctgccttggt

SEQ ID NO: 781318 - DNA, 15 bp, Homo sapiens
gtgtctgccttggtt

SEQ ID NO: 781319 - DNA, 15 bp, Homo sapiens
tgtctgccttggttg

SEQ ID NO: 781320 - DNA, 15 bp, Homo sapiens
gtctgccttggttgg

SEQ ID NO: 781321 - DNA, 15 bp, Homo sapiens
tctgccttggttgga

SEQ ID NO: 781322 - DNA, 15 bp, Homo sapiens
ctgccttggttggag

SEQ ID NO: 781323 - DNA, 15 bp, Homo sapiens
tgccttggttggaga

SEQ ID NO: 781324 - DNA, 15 bp, Homo sapiens
gccttggttggagag

SEQ ID NO: 781325 - DNA, 15 bp, Homo sapiens
ccttggttggagagt

SEQ ID NO: 781326 - DNA, 15 bp, Homo sapiens
cttggttggagagtc

SEQ ID NO: 781327 - DNA, 15 bp, Homo sapiens
ttggttggagagtct

SEQ ID NO: 781328 - DNA, 15 bp, Homo sapiens
tggttggagagtctg

SEQ ID NO: 781329 - DNA, 15 bp, Homo sapiens
ggttggagagtctgt

SEQ ID NO: 781330 - DNA, 15 bp, Homo sapiens
gttggagagtctgtc

SEQ ID NO: 781331 - DNA, 15 bp, Homo sapiens
ttggagagtctgtcc

SEQ ID NO: 781332 - DNA, 15 bp, Homo sapiens
tggagagtctgtcca

SEQ ID NO: 781333 - DNA, 15 bp, Homo sapiens
ggagagtctgtccag

SEQ ID NO: 781334 - DNA, 15 bp, Homo sapiens
gagagtctgtccaga

SEQ ID NO: 781335 - DNA, 15 bp, Homo sapiens
agagtctgtccagag

SEQ ID NO: 781336 - DNA, 15 bp, Homo sapiens
gagtctgtccagagc

SEQ ID NO: 781337 - DNA, 15 bp, Homo sapiens
agtctgtccagagct

SEQ ID NO: 781338 - DNA, 15 bp, Homo sapiens
gtctgtccagagcta

SEQ ID NO: 781339 - DNA, 15 bp, Homo sapiens
tctgtccagagctaa

SEQ ID NO: 781340 - DNA, 15 bp, Homo sapiens
ctgtccagagctaat

SEQ ID NO: 781341 - DNA, 15 bp, Homo sapiens
tgtccagagctaatt

SEQ ID NO: 781342 - DNA, 15 bp, Homo sapiens
gtccagagctaatta

SEQ ID NO: 781343 - DNA, 15 bp, Homo sapiens
tccagagctaattat

SEQ ID NO: 781344 - DNA, 15 bp, Homo sapiens
ccagagctaattata

SEQ ID NO: 781345 - DNA, 15 bp, Homo sapiens
cagagctaattatat

SEQ ID NO: 781346 - DNA, 15 bp, Homo sapiens
agagctaattatatc

SEQ ID NO: 781347 - DNA, 15 bp, Homo sapiens
gagctaattatatca

SEQ ID NO: 781348 - DNA, 15 bp, Homo sapiens
agctaattatatcag

SEQ ID NO: 781349 - DNA, 15 bp, Homo sapiens
gctaattatatcagc

SEQ ID NO: 781350 - DNA, 15 bp, Homo sapiens
ctaattatatcagca

SEQ ID NO: 781351 - DNA, 15 bp, Homo sapiens
taattatatcagcag

SEQ ID NO: 781352 - DNA, 15 bp, Homo sapiens
aattatatcagcagg

SEQ ID NO: 781353 - DNA, 15 bp, Homo sapiens
attatatcagcaggc

SEQ ID NO: 781354 - DNA, 15 bp, Homo sapiens
ttatatcagcaggca

SEQ ID NO: 781355 - DNA, 15 bp, Homo sapiens
tatatcagcaggcac

SEQ ID NO: 781356 - DNA, 15 bp, Homo sapiens
atatcagcaggcact

SEQ ID NO: 781357 - DNA, 15 bp, Homo sapiens
tatcagcaggcactg

SEQ ID NO: 781358 - DNA, 15 bp, Homo sapiens
atcagcaggcactga

SEQ ID NO: 781359 - DNA, 15 bp, Homo sapiens
tcagcaggcactgat

SEQ ID NO: 781360 - DNA, 15 bp, Homo sapiens
cagcaggcactgata

SEQ ID NO: 781361 - DNA, 15 bp, Homo sapiens
agcaggcactgatag

SEQ ID NO: 781362 - DNA, 15 bp, Homo sapiens
gcaggcactgataga

SEQ ID NO: 781363 - DNA, 15 bp, Homo sapiens
caggcactgatagag

SEQ ID NO: 781364 - DNA, 15 bp, Homo sapiens
aggcactgatagagc

SEQ ID NO: 781365 - DNA, 15 bp, Homo sapiens
ggcactgatagagcc

SEQ ID NO: 781366 - DNA, 15 bp, Homo sapiens
gcactgatagagcct

SEQ ID NO: 781367 - DNA, 15 bp, Homo sapiens
cactgatagagcctc

SEQ ID NO: 781368 - DNA, 15 bp, Homo sapiens
actgatagagcctct

SEQ ID NO: 781369 - DNA, 15 bp, Homo sapiens
ctgatagagcctctg

SEQ ID NO: 781370 - DNA, 15 bp, Homo sapiens
tgatagagcctctgc

SEQ ID NO: 781371 - DNA, 15 bp, Homo sapiens
gatagagcctctgcc

SEQ ID NO: 781372 - DNA, 15 bp, Homo sapiens
atagagcctctgcct

SEQ ID NO: 781373 - DNA, 15 bp, Homo sapiens
tagagcctctgcctg

SEQ ID NO: 781374 - DNA, 15 bp, Homo sapiens
agagcctctgcctgg

SEQ ID NO: 781375 - DNA, 15 bp, Homo sapiens
gagcctctgcctggt

SEQ ID NO: 781376 - DNA, 15 bp, Homo sapiens
agcctctgcctggtg

SEQ ID NO: 781377 - DNA, 15 bp, Homo sapiens
gcctctgcctggtgt

SEQ ID NO: 781378 - DNA, 15 bp, Homo sapiens
cctctgcctggtgtt

SEQ ID NO: 781379 - DNA, 15 bp, Homo sapiens
ctctgcctggtgtta

SEQ ID NO: 781380 - DNA, 15 bp, Homo sapiens
tctgcctggtgttat

SEQ ID NO: 781381 - DNA, 15 bp, Homo sapiens
ctgcctggtgttatg

SEQ ID NO: 781382 - DNA, 15 bp, Homo sapiens
tgcctggtgttatgc

SEQ ID NO: 781383 - DNA, 15 bp, Homo sapiens
gcctggtgttatgcc

SEQ ID NO: 781384 - DNA, 15 bp, Homo sapiens
cctggtgttatgcct

SEQ ID NO: 781385 - DNA, 15 bp, Homo sapiens
ctggtgttatgcctc

SEQ ID NO: 781386 - DNA, 15 bp, Homo sapiens
tggtgttatgcctca

SEQ ID NO: 781387 - DNA, 15 bp, Homo sapiens
ggtgttatgcctcag

SEQ ID NO: 781388 - DNA, 15 bp, Homo sapiens
gtgttatgcctcagg

SEQ ID NO: 781389 - DNA, 15 bp, Homo sapiens
tgttatgcctcaggg

SEQ ID NO: 781390 - DNA, 15 bp, Homo sapiens
gttatgcctcagggg

SEQ ID NO: 781391 - DNA, 15 bp, Homo sapiens
ttatgcctcaggggt

SEQ ID NO: 781392 - DNA, 15 bp, Homo sapiens
tatgcctcaggggtg

SEQ ID NO: 781393 - DNA, 15 bp, Homo sapiens
atgcctcaggggtgg

SEQ ID NO: 781394 - DNA, 15 bp, Homo sapiens
tgcctcaggggtgga

SEQ ID NO: 781395 - DNA, 15 bp, Homo sapiens
gcctcaggggtggaa

SEQ ID NO: 781396 - DNA, 15 bp, Homo sapiens
cctcaggggtggaaa

SEQ ID NO: 781397 - DNA, 15 bp, Homo sapiens
ctcaggggtggaaaa

SEQ ID NO: 781398 - DNA, 15 bp, Homo sapiens
tcaggggtggaaaat

SEQ ID NO: 781399 - DNA, 15 bp, Homo sapiens
caggggtggaaaatc

SEQ ID NO: 781400 - DNA, 15 bp, Homo sapiens
aggggtggaaaatca

SEQ ID NO: 781401 - DNA, 15 bp, Homo sapiens
ggggtggaaaatcac

SEQ ID NO: 781402 - DNA, 15 bp, Homo sapiens
gggtggaaaatcact

SEQ ID NO: 781403 - DNA, 15 bp, Homo sapiens
ggtggaaaatcactt

SEQ ID NO: 781404 - DNA, 15 bp, Homo sapiens
gtggaaaatcacttc

SEQ ID NO: 781405 - DNA, 15 bp, Homo sapiens
tggaaaatcacttcc

SEQ ID NO: 781406 - DNA, 15 bp, Homo sapiens
ggaaaatcacttcct

SEQ ID NO: 781407 - DNA, 15 bp, Homo sapiens
gaaaatcacttcctg

SEQ ID NO: 781408 - DNA, 15 bp, Homo sapiens
aaaatcacttcctgc

SEQ ID NO: 781409 - DNA, 15 bp, Homo sapiens
aaatcacttcctgca

SEQ ID NO: 781410 - DNA, 15 bp, Homo sapiens
aatcacttcctgcaa

SEQ ID NO: 781411 - DNA, 15 bp, Homo sapiens
atcacttcctgcaaa

SEQ ID NO: 781412 - DNA, 15 bp, Homo sapiens
tcacttcctgcaaag

SEQ ID NO: 781413 - DNA, 15 bp, Homo sapiens
cacttcctgcaaagg

SEQ ID NO: 781414 - DNA, 15 bp, Homo sapiens
acttcctgcaaagga

SEQ ID NO: 781415 - DNA, 15 bp, Homo sapiens
cttcctgcaaaggaa

SEQ ID NO: 781416 - DNA, 15 bp, Homo sapiens
ttcctgcaaaggaaa

SEQ ID NO: 781417 - DNA, 15 bp, Homo sapiens
tcctgcaaaggaaag

SEQ ID NO: 781418 - DNA, 15 bp, Homo sapiens
cctgcaaaggaaagg

SEQ ID NO: 781419 - DNA, 15 bp, Homo sapiens
ctgcaaaggaaagga

SEQ ID NO: 781420 - DNA, 15 bp, Homo sapiens
tgcaaaggaaaggag

SEQ ID NO: 781421 - DNA, 15 bp, Homo sapiens
gcaaaggaaaggagt

SEQ ID NO: 781422 - DNA, 15 bp, Homo sapiens
caaaggaaaggagtt

SEQ ID NO: 781423 - DNA, 15 bp, Homo sapiens
aaaggaaaggagttg

SEQ ID NO: 781424 - DNA, 15 bp, Homo sapiens
aaggaaaggagttgt

SEQ ID NO: 781425 - DNA, 15 bp, Homo sapiens
aggaaaggagttgtt

SEQ ID NO: 781426 - DNA, 15 bp, Homo sapiens
ggaaaggagttgttt

SEQ ID NO: 781427 - DNA, 15 bp, Homo sapiens
gaaaggagttgtttt

SEQ ID NO: 781428 - DNA, 15 bp, Homo sapiens
aaaggagttgttttc

SEQ ID NO: 781429 - DNA, 15 bp, Homo sapiens
aaggagttgttttca

SEQ ID NO: 781430 - DNA, 15 bp, Homo sapiens
aggagttgttttcag

SEQ ID NO: 781431 - DNA, 15 bp, Homo sapiens
ggagttgttttcagg

SEQ ID NO: 781432 - DNA, 15 bp, Homo sapiens
gagttgttttcagga

SEQ ID NO: 781433 - DNA, 15 bp, Homo sapiens
agttgttttcaggag

SEQ ID NO: 781434 - DNA, 15 bp, Homo sapiens
gttgttttcaggagc

SEQ ID NO: 781435 - DNA, 15 bp, Homo sapiens
ttgttttcaggagct

SEQ ID NO: 781436 - DNA, 15 bp, Homo sapiens
tgttttcaggagctc

SEQ ID NO: 781437 - DNA, 15 bp, Homo sapiens
gttttcaggagctcc

SEQ ID NO: 781438 - DNA, 15 bp, Homo sapiens
ttttcaggagctcct

SEQ ID NO: 781439 - DNA, 15 bp, Homo sapiens
tttcaggagctcctt

SEQ ID NO: 781440 - DNA, 15 bp, Homo sapiens
ttcaggagctcctta

SEQ ID NO: 781441 - DNA, 15 bp, Homo sapiens
tcaggagctccttaa

SEQ ID NO: 781442 - DNA, 15 bp, Homo sapiens
caggagctccttaat

SEQ ID NO: 781443 - DNA, 15 bp, Homo sapiens
aggagctccttaatc

SEQ ID NO: 781444 - DNA, 15 bp, Homo sapiens
ggagctccttaatcc

SEQ ID NO: 781445 - DNA, 15 bp, Homo sapiens
gagctccttaatccc

SEQ ID NO: 781446 - DNA, 15 bp, Homo sapiens
agctccttaatccct

SEQ ID NO: 781447 - DNA, 15 bp, Homo sapiens
gctccttaatccctg

SEQ ID NO: 781448 - DNA, 15 bp, Homo sapiens
ctccttaatccctga

SEQ ID NO: 781449 - DNA, 15 bp, Homo sapiens
tccttaatccctgag

SEQ ID NO: 781450 - DNA, 15 bp, Homo sapiens
ccttaatccctgagg

SEQ ID NO: 781451 - DNA, 15 bp, Homo sapiens
cttaatccctgaggc

SEQ ID NO: 781452 - DNA, 15 bp, Homo sapiens
ttaatccctgaggca

SEQ ID NO: 781453 - DNA, 15 bp, Homo sapiens
taatccctgaggcac

SEQ ID NO: 781454 - DNA, 15 bp, Homo sapiens
aatccctgaggcacc

SEQ ID NO: 781455 - DNA, 15 bp, Homo sapiens
atccctgaggcacct

SEQ ID NO: 781456 - DNA, 15 bp, Homo sapiens
tccctgaggcacctg

SEQ ID NO: 781457 - DNA, 15 bp, Homo sapiens
ccctgaggcacctgc

SEQ ID NO: 781458 - DNA, 15 bp, Homo sapiens
cctgaggcacctgca

SEQ ID NO: 781459 - DNA, 15 bp, Homo sapiens
ctgaggcacctgcat

SEQ ID NO: 781460 - DNA, 15 bp, Homo sapiens
tgaggcacctgcatg

SEQ ID NO: 781461 - DNA, 15 bp, Homo sapiens
gaggcacctgcatgg

SEQ ID NO: 781462 - DNA, 15 bp, Homo sapiens
aggcacctgcatggg

SEQ ID NO: 781463 - DNA, 15 bp, Homo sapiens
ggcacctgcatgggc

SEQ ID NO: 781464 - DNA, 15 bp, Homo sapiens
gcacctgcatgggct

SEQ ID NO: 781465 - DNA, 15 bp, Homo sapiens
cacctgcatgggctc

SEQ ID NO: 781466 - DNA, 15 bp, Homo sapiens
acctgcatgggctcc

SEQ ID NO: 781467 - DNA, 15 bp, Homo sapiens
cctgcatgggctccc

SEQ ID NO: 781468 - DNA, 15 bp, Homo sapiens
ctgcatgggctccca

SEQ ID NO: 781469 - DNA, 15 bp, Homo sapiens
tgcatgggctcccag

SEQ ID NO: 781470 - DNA, 15 bp, Homo sapiens
gcatgggctcccagg

SEQ ID NO: 781471 - DNA, 15 bp, Homo sapiens
catgggctcccaggg

SEQ ID NO: 781472 - DNA, 15 bp, Homo sapiens
tgggctcccagggaa

SEQ ID NO: 781473 - DNA, 15 bp, Homo sapiens
gggctcccagggaag

SEQ ID NO: 781474 - DNA, 15 bp, Homo sapiens
ggctcccagggaagc

SEQ ID NO: 781475 - DNA, 15 bp, Homo sapiens
gctcccagggaagct

SEQ ID NO: 781476 - DNA, 15 bp, Homo sapiens
ctcccagggaagctg

SEQ ID NO: 781477 - DNA, 15 bp, Homo sapiens
tcccagggaagctgc

SEQ ID NO: 781478 - DNA, 15 bp, Homo sapiens
cccagggaagctgcc

SEQ ID NO: 781479 - DNA, 15 bp, Homo sapiens
ccagggaagctgcca

SEQ ID NO: 781480 - DNA, 15 bp, Homo sapiens
cagggaagctgccag

SEQ ID NO: 781481 - DNA, 15 bp, Homo sapiens
agggaagctgccagg

SEQ ID NO: 781482 - DNA, 15 bp, Homo sapiens
gggaagctgccagga

SEQ ID NO: 781483 - DNA, 15 bp, Homo sapiens
ggaagctgccaggag

SEQ ID NO: 781484 - DNA, 15 bp, Homo sapiens
gaagctgccaggagg

SEQ ID NO: 781485 - DNA, 15 bp, Homo sapiens
aagctgccaggaggt

SEQ ID NO: 781486 - DNA, 15 bp, Homo sapiens
agctgccaggaggtt

SEQ ID NO: 781487 - DNA, 15 bp, Homo sapiens
gctgccaggaggtta

SEQ ID NO: 781488 - DNA, 15 bp, Homo sapiens
ctgccaggaggttat

SEQ ID NO: 781489 - DNA, 15 bp, Homo sapiens
tgccaggaggttatt

SEQ ID NO: 781490 - DNA, 15 bp, Homo sapiens
gccaggaggttattg

SEQ ID NO: 781491 - DNA, 15 bp, Homo sapiens
ccaggaggttattgt

SEQ ID NO: 781492 - DNA, 15 bp, Homo sapiens
caggaggttattgtt

SEQ ID NO: 781493 - DNA, 15 bp, Homo sapiens
aggaggttattgttt

SEQ ID NO: 781494 - DNA, 15 bp, Homo sapiens
ggaggttattgtttc

SEQ ID NO: 781495 - DNA, 15 bp, Homo sapiens
gaggttattgtttcc

SEQ ID NO: 781496 - DNA, 15 bp, Homo sapiens
aggttattgtttcct

SEQ ID NO: 781497 - DNA, 15 bp, Homo sapiens
ggttattgtttcctc

SEQ ID NO: 781498 - DNA, 15 bp, Homo sapiens
gttattgtttcctct

SEQ ID NO: 781499 - DNA, 15 bp, Homo sapiens
ttattgtttcctctg

SEQ ID NO: 781500 - DNA, 15 bp, Homo sapiens
tattgtttcctctga

SEQ ID NO: 781501 - DNA, 15 bp, Homo sapiens
attgtttcctctgaa

SEQ ID NO: 781502 - DNA, 15 bp, Homo sapiens
ttgtttcctctgaac

SEQ ID NO: 781503 - DNA, 15 bp, Homo sapiens
tgtttcctctgaacc

SEQ ID NO: 781504 - DNA, 15 bp, Homo sapiens
gtttcctctgaacca

SEQ ID NO: 781505 - DNA, 15 bp, Homo sapiens
tttcctctgaaccat

SEQ ID NO: 781506 - DNA, 15 bp, Homo sapiens
ttcctctgaaccatg

SEQ ID NO: 781507 - DNA, 15 bp, Homo sapiens
tcctctgaaccatga

SEQ ID NO: 781508 - DNA, 15 bp, Homo sapiens
cctctgaaccatgag

SEQ ID NO: 781509 - DNA, 15 bp, Homo sapiens
ctctgaaccatgagg

SEQ ID NO: 781510 - DNA, 15 bp, Homo sapiens
tctgaaccatgaggt

SEQ ID NO: 781511 - DNA, 15 bp, Homo sapiens
ctgaaccatgaggtg

SEQ ID NO: 781512 - DNA, 15 bp, Homo sapiens
tgaaccatgaggtgg

SEQ ID NO: 781513 - DNA, 15 bp, Homo sapiens
gaaccatgaggtggg

SEQ ID NO: 781514 - DNA, 15 bp, Homo sapiens
aaccatgaggtgggc

SEQ ID NO: 781515 - DNA, 15 bp, Homo sapiens
accatgaggtgggca

SEQ ID NO: 781516 - DNA, 15 bp, Homo sapiens
ccatgaggtgggcaa

SEQ ID NO: 781517 - DNA, 15 bp, Homo sapiens
catgaggtgggcaac

SEQ ID NO: 781518 - DNA, 15 bp, Homo sapiens
atgaggtgggcaact

SEQ ID NO: 781519 - DNA, 15 bp, Homo sapiens
tgaggtgggcaactt

SEQ ID NO: 781520 - DNA, 15 bp, Homo sapiens
gaggtgggcaacttg

SEQ ID NO: 781521 - DNA, 15 bp, Homo sapiens
aggtgggcaacttgg

SEQ ID NO: 781522 - DNA, 15 bp, Homo sapiens
ggtgggcaacttggt

SEQ ID NO: 781523 - DNA, 15 bp, Homo sapiens
gtgggcaacttggtt

SEQ ID NO: 781524 - DNA, 15 bp, Homo sapiens
tgggcaacttggttt

SEQ ID NO: 781525 - DNA, 15 bp, Homo sapiens
gggcaacttggtttc

SEQ ID NO: 781526 - DNA, 15 bp, Homo sapiens
ggcaacttggtttct

SEQ ID NO: 781527 - DNA, 15 bp, Homo sapiens
gcaacttggtttctt

SEQ ID NO: 781528 - DNA, 15 bp, Homo sapiens
caacttggtttcttg

SEQ ID NO: 781529 - DNA, 15 bp, Homo sapiens
aacttggtttcttgg

SEQ ID NO: 781530 - DNA, 15 bp, Homo sapiens
acttggtttcttggc

SEQ ID NO: 781531 - DNA, 15 bp, Homo sapiens
cttggtttcttggcc

SEQ ID NO: 781532 - DNA, 15 bp, Homo sapiens
ttggtttcttggcca

SEQ ID NO: 781533 - DNA, 15 bp, Homo sapiens
tggtttcttggccac

SEQ ID NO: 781534 - DNA, 15 bp, Homo sapiens
ggtttcttggccacc

SEQ ID NO: 781535 - DNA, 15 bp, Homo sapiens
gtttcttggccacct

SEQ ID NO: 781536 - DNA, 15 bp, Homo sapiens
tttcttggccacctg

SEQ ID NO: 781537 - DNA, 15 bp, Homo sapiens
ttcttggccacctga

SEQ ID NO: 781538 - DNA, 15 bp, Homo sapiens
tcttggccacctgag

SEQ ID NO: 781539 - DNA, 15 bp, Homo sapiens
cttggccacctgaga

SEQ ID NO: 781540 - DNA, 15 bp, Homo sapiens
ttggccacctgagat

SEQ ID NO: 781541 - DNA, 15 bp, Homo sapiens
tggccacctgagatc

SEQ ID NO: 781542 - DNA, 15 bp, Homo sapiens
ggccacctgagatct

SEQ ID NO: 781543 - DNA, 15 bp, Homo sapiens
gccacctgagatctc

SEQ ID NO: 781544 - DNA, 15 bp, Homo sapiens
ccacctgagatctct

SEQ ID NO: 781545 - DNA, 15 bp, Homo sapiens
cacctgagatctctc

SEQ ID NO: 781546 - DNA, 15 bp, Homo sapiens
acctgagatctctcc

SEQ ID NO: 781547 - DNA, 15 bp, Homo sapiens
cctgagatctctcca

SEQ ID NO: 781548 - DNA, 15 bp, Homo sapiens
ctgagatctctccag

SEQ ID NO: 781549 - DNA, 15 bp, Homo sapiens
tgagatctctccagg

SEQ ID NO: 781550 - DNA, 15 bp, Homo sapiens
gagatctctccagga

SEQ ID NO: 781551 - DNA, 15 bp, Homo sapiens
agatctctccaggaa

SEQ ID NO: 781552 - DNA, 15 bp, Homo sapiens
gatctctccaggaaa

SEQ ID NO: 781553 - DNA, 15 bp, Homo sapiens
atctctccaggaaaa

SEQ ID NO: 781554 - DNA, 15 bp, Homo sapiens
tctctccaggaaaaa

SEQ ID NO: 781555 - DNA, 15 bp, Homo sapiens
ctctccaggaaaaag

SEQ ID NO: 781556 - DNA, 15 bp, Homo sapiens
tctccaggaaaaagc

SEQ ID NO: 781557 - DNA, 15 bp, Homo sapiens
ctccaggaaaaagct

SEQ ID NO: 781558 - DNA, 15 bp, Homo sapiens
tccaggaaaaagctc

SEQ ID NO: 781559 - DNA, 15 bp, Homo sapiens
ccaggaaaaagctca

SEQ ID NO: 781560 - DNA, 15 bp, Homo sapiens
caggaaaaagctcag

SEQ ID NO: 781561 - DNA, 15 bp, Homo sapiens
aggaaaaagctcaga

SEQ ID NO: 781562 - DNA, 15 bp, Homo sapiens
ggaaaaagctcagat

SEQ ID NO: 781563 - DNA, 15 bp, Homo sapiens
gaaaaagctcagatc

SEQ ID NO: 781564 - DNA, 15 bp, Homo sapiens
aaaaagctcagatca

SEQ ID NO: 781565 - DNA, 15 bp, Homo sapiens
aaaagctcagatcat

SEQ ID NO: 781566 - DNA, 15 bp, Homo sapiens
aaagctcagatcatc

SEQ ID NO: 781567 - DNA, 15 bp, Homo sapiens
aagctcagatcatca

SEQ ID NO: 781568 - DNA, 15 bp, Homo sapiens
agctcagatcatcag

SEQ ID NO: 781569 - DNA, 15 bp, Homo sapiens
gctcagatcatcaga

SEQ ID NO: 781570 - DNA, 15 bp, Homo sapiens
ctcagatcatcagaa

SEQ ID NO: 781571 - DNA, 15 bp, Homo sapiens
tcagatcatcagaaa

SEQ ID NO: 781572 - DNA, 15 bp, Homo sapiens
cagatcatcagaaag

SEQ ID NO: 781573 - DNA, 15 bp, Homo sapiens
agatcatcagaaaga

SEQ ID NO: 781574 - DNA, 15 bp, Homo sapiens
gatcatcagaaagag

SEQ ID NO: 781575 - DNA, 15 bp, Homo sapiens
atcatcagaaagaga

SEQ ID NO: 781576 - DNA, 15 bp, Homo sapiens
tcatcagaaagagag

SEQ ID NO: 781577 - DNA, 15 bp, Homo sapiens
catcagaaagagaga

SEQ ID NO: 781578 - DNA, 15 bp, Homo sapiens
atcagaaagagagaa

SEQ ID NO: 781579 - DNA, 15 bp, Homo sapiens
tcagaaagagagaaa

SEQ ID NO: 781580 - DNA, 15 bp, Homo sapiens
cagaaagagagaaaa

SEQ ID NO: 781581 - DNA, 15 bp, Homo sapiens
agaaagagagaaaac

SEQ ID NO: 781582 - DNA, 15 bp, Homo sapiens
gaaagagagaaaaca

SEQ ID NO: 781583 - DNA, 15 bp, Homo sapiens
aaagagagaaaacag

SEQ ID NO: 781584 - DNA, 15 bp, Homo sapiens
aagagagaaaacagt

SEQ ID NO: 781585 - DNA, 15 bp, Homo sapiens
agagagaaaacagtt

SEQ ID NO: 781586 - DNA, 15 bp, Homo sapiens
gagagaaaacagttt

SEQ ID NO: 781587 - DNA, 15 bp, Homo sapiens
agagaaaacagttta

SEQ ID NO: 781588 - DNA, 15 bp, Homo sapiens
gagaaaacagtttac

SEQ ID NO: 781589 - DNA, 15 bp, Homo sapiens
agaaaacagtttact

SEQ ID NO: 781590 - DNA, 15 bp, Homo sapiens
gaaaacagtttactc

SEQ ID NO: 781591 - DNA, 15 bp, Homo sapiens
aaaacagtttactca

SEQ ID NO: 781592 - DNA, 15 bp, Homo sapiens
aaacagtttactcac

SEQ ID NO: 781593 - DNA, 15 bp, Homo sapiens
aacagtttactcacc

SEQ ID NO: 781594 - DNA, 15 bp, Homo sapiens
acagtttactcacct

SEQ ID NO: 781595 - DNA, 15 bp, Homo sapiens
cagtttactcacctt

SEQ ID NO: 781596 - DNA, 15 bp, Homo sapiens
agtttactcaccttg

SEQ ID NO: 781597 - DNA, 15 bp, Homo sapiens
gtttactcaccttgg

SEQ ID NO: 781598 - DNA, 15 bp, Homo sapiens
tttactcaccttggt

SEQ ID NO: 781599 - DNA, 15 bp, Homo sapiens
ttactcaccttggtc

SEQ ID NO: 781600 - DNA, 15 bp, Homo sapiens
tactcaccttggtct

SEQ ID NO: 781601 - DNA, 15 bp, Homo sapiens
actcaccttggtcta

SEQ ID NO: 781602 - DNA, 15 bp, Homo sapiens
ctcaccttggtctat

SEQ ID NO: 781603 - DNA, 15 bp, Homo sapiens
tcaccttggtctatg

SEQ ID NO: 781604 - DNA, 15 bp, Homo sapiens
caccttggtctatgc

SEQ ID NO: 781605 - DNA, 15 bp, Homo sapiens
accttggtctatgct

SEQ ID NO: 781606 - DNA, 15 bp, Homo sapiens
ccttggtctatgctg

SEQ ID NO: 781607 - DNA, 15 bp, Homo sapiens
cttggtctatgctgt

SEQ ID NO: 781608 - DNA, 15 bp, Homo sapiens
ttggtctatgctgtg

SEQ ID NO: 781609 - DNA, 15 bp, Homo sapiens
tggtctatgctgtgt

SEQ ID NO: 781610 - DNA, 15 bp, Homo sapiens
ggtctatgctgtgtg

SEQ ID NO: 781611 - DNA, 15 bp, Homo sapiens
gtctatgctgtgtgt

SEQ ID NO: 781612 - DNA, 15 bp, Homo sapiens
tctatgctgtgtgtc

SEQ ID NO: 781613 - DNA, 15 bp, Homo sapiens
ctatgctgtgtgtct

SEQ ID NO: 781614 - DNA, 15 bp, Homo sapiens
tatgctgtgtgtctc

SEQ ID NO: 781615 - DNA, 15 bp, Homo sapiens
atgctgtgtgtctct

SEQ ID NO: 781616 - DNA, 15 bp, Homo sapiens
tgctgtgtgtctctc

SEQ ID NO: 781617 - DNA, 15 bp, Homo sapiens
gctgtgtgtctctct

SEQ ID NO: 781618 - DNA, 15 bp, Homo sapiens
ctgtgtgtctctctg

SEQ ID NO: 781619 - DNA, 15 bp, Homo sapiens
tgtgtgtctctctgg

SEQ ID NO: 781620 - DNA, 15 bp, Homo sapiens
gtgtgtctctctggc

SEQ ID NO: 781621 - DNA, 15 bp, Homo sapiens
tgtgtctctctggcc

SEQ ID NO: 781622 - DNA, 15 bp, Homo sapiens
gtgtctctctggccc

SEQ ID NO: 781623 - DNA, 15 bp, Homo sapiens
tgtctctctggccct

SEQ ID NO: 781624 - DNA, 15 bp, Homo sapiens
gtctctctggccctt

SEQ ID NO: 781625 - DNA, 15 bp, Homo sapiens
tctctctggcccttg

SEQ ID NO: 781626 - DNA, 15 bp, Homo sapiens
ctctctggcccttgg

SEQ ID NO: 781627 - DNA, 15 bp, Homo sapiens
tctctggcccttggg

SEQ ID NO: 781628 - DNA, 15 bp, Homo sapiens
ctctggcccttgggg

SEQ ID NO: 781629 - DNA, 15 bp, Homo sapiens
tctggcccttgggga

SEQ ID NO: 781630 - DNA, 15 bp, Homo sapiens
ctggcccttggggat

SEQ ID NO: 781631 - DNA, 15 bp, Homo sapiens
tggcccttggggatt

SEQ ID NO: 781632 - DNA, 15 bp, Homo sapiens
ggcccttggggattc

SEQ ID NO: 781633 - DNA, 15 bp, Homo sapiens
gcccttggggattca

SEQ ID NO: 781634 - DNA, 15 bp, Homo sapiens
cccttggggattcat

SEQ ID NO: 781635 - DNA, 15 bp, Homo sapiens
ccttggggattcatg

SEQ ID NO: 781636 - DNA, 15 bp, Homo sapiens
cttggggattcatga

SEQ ID NO: 781637 - DNA, 15 bp, Homo sapiens
ttggggattcatgac

SEQ ID NO: 781638 - DNA, 15 bp, Homo sapiens
tggggattcatgaca

SEQ ID NO: 781639 - DNA, 15 bp, Homo sapiens
ggggattcatgacag

SEQ ID NO: 781640 - DNA, 15 bp, Homo sapiens
gggattcatgacagt

SEQ ID NO: 781641 - DNA, 15 bp, Homo sapiens
ggattcatgacagtg

SEQ ID NO: 781642 - DNA, 15 bp, Homo sapiens
gattcatgacagtgt

SEQ ID NO: 781643 - DNA, 15 bp, Homo sapiens
attcatgacagtgtt

SEQ ID NO: 781644 - DNA, 15 bp, Homo sapiens
ttcatgacagtgttt

SEQ ID NO: 781645 - DNA, 15 bp, Homo sapiens
tcatgacagtgtttg

SEQ ID NO: 781646 - DNA, 15 bp, Homo sapiens
catgacagtgtttga

SEQ ID NO: 781647 - DNA, 15 bp, Homo sapiens
atgacagtgtttgag

SEQ ID NO: 781648 - DNA, 15 bp, Homo sapiens
tgacagtgtttgaga

SEQ ID NO: 781649 - DNA, 15 bp, Homo sapiens
gacagtgtttgagat

SEQ ID NO: 781650 - DNA, 15 bp, Homo sapiens
acagtgtttgagatc

SEQ ID NO: 781651 - DNA, 15 bp, Homo sapiens
cagtgtttgagatca

SEQ ID NO: 781652 - DNA, 15 bp, Homo sapiens
agtgtttgagatcaa

SEQ ID NO: 781653 - DNA, 15 bp, Homo sapiens
gtgtttgagatcaat

SEQ ID NO: 781654 - DNA, 15 bp, Homo sapiens
tgtttgagatcaatt

SEQ ID NO: 781655 - DNA, 15 bp, Homo sapiens
gtttgagatcaattc

SEQ ID NO: 781656 - DNA, 15 bp, Homo sapiens
tttgagatcaattct

SEQ ID NO: 781657 - DNA, 15 bp, Homo sapiens
ttgagatcaattctg

SEQ ID NO: 781658 - DNA, 15 bp, Homo sapiens
tgagatcaattctgg

SEQ ID NO: 781659 - DNA, 15 bp, Homo sapiens
gagatcaattctgga

SEQ ID NO: 781660 - DNA, 15 bp, Homo sapiens
agatcaattctggat

SEQ ID NO: 781661 - DNA, 15 bp, Homo sapiens
gatcaattctggata

SEQ ID NO: 781662 - DNA, 15 bp, Homo sapiens
atcaattctggatat

SEQ ID NO: 781663 - DNA, 15 bp, Homo sapiens
tcaattctggatatg

SEQ ID NO: 781664 - DNA, 15 bp, Homo sapiens
caattctggatatgg

SEQ ID NO: 781665 - DNA, 15 bp, Homo sapiens
aattctggatatggg

SEQ ID NO: 781666 - DNA, 15 bp, Homo sapiens
attctggatatggga

SEQ ID NO: 781667 - DNA, 15 bp, Homo sapiens
ttctggatatgggag

SEQ ID NO: 781668 - DNA, 15 bp, Homo sapiens
tctggatatgggaga

SEQ ID NO: 781669 - DNA, 15 bp, Homo sapiens
ctggatatgggagaa

SEQ ID NO: 781670 - DNA, 15 bp, Homo sapiens
tggatatgggagaag

SEQ ID NO: 781671 - DNA, 15 bp, Homo sapiens
ggatatgggagaaga

SEQ ID NO: 781672 - DNA, 15 bp, Homo sapiens
gatatgggagaagag

SEQ ID NO: 781673 - DNA, 15 bp, Homo sapiens
atatgggagaagaga

SEQ ID NO: 781674 - DNA, 15 bp, Homo sapiens
tatgggagaagagag

SEQ ID NO: 781675 - DNA, 15 bp, Homo sapiens
atgggagaagagagg

SEQ ID NO: 781676 - DNA, 15 bp, Homo sapiens
tgggagaagagaggc

SEQ ID NO: 781677 - DNA, 15 bp, Homo sapiens
gggagaagagaggca

SEQ ID NO: 781678 - DNA, 15 bp, Homo sapiens
ggagaagagaggcaa

SEQ ID NO: 781679 - DNA, 15 bp, Homo sapiens
gagaagagaggcaag

SEQ ID NO: 781680 - DNA, 15 bp, Homo sapiens
agaagagaggcaagt

SEQ ID NO: 781681 - DNA, 15 bp, Homo sapiens
gaagagaggcaagtc

SEQ ID NO: 781682 - DNA, 15 bp, Homo sapiens
aagagaggcaagtca

SEQ ID NO: 781683 - DNA, 15 bp, Homo sapiens
agagaggcaagtcac

SEQ ID NO: 781684 - DNA, 15 bp, Homo sapiens
gagaggcaagtcact

SEQ ID NO: 781685 - DNA, 15 bp, Homo sapiens
agaggcaagtcactt

SEQ ID NO: 781686 - DNA, 15 bp, Homo sapiens
gaggcaagtcactta

SEQ ID NO: 781687 - DNA, 15 bp, Homo sapiens
aggcaagtcacttac

SEQ ID NO: 781688 - DNA, 15 bp, Homo sapiens
ggcaagtcacttact

SEQ ID NO: 781689 - DNA, 15 bp, Homo sapiens
gcaagtcacttactt

SEQ ID NO: 781690 - DNA, 15 bp, Homo sapiens
caagtcacttacttt

SEQ ID NO: 781691 - DNA, 15 bp, Homo sapiens
aagtcacttactttt

SEQ ID NO: 781692 - DNA, 15 bp, Homo sapiens
agtcacttactttta

SEQ ID NO: 781693 - DNA, 15 bp, Homo sapiens
gtcacttacttttat

SEQ ID NO: 781694 - DNA, 15 bp, Homo sapiens
tcacttacttttatc

SEQ ID NO: 781695 - DNA, 15 bp, Homo sapiens
cacttacttttatct

SEQ ID NO: 781696 - DNA, 15 bp, Homo sapiens
acttacttttatctg

SEQ ID NO: 781697 - DNA, 15 bp, Homo sapiens
cttacttttatctga

SEQ ID NO: 781698 - DNA, 15 bp, Homo sapiens
ttacttttatctgag

SEQ ID NO: 781699 - DNA, 15 bp, Homo sapiens
tacttttatctgagg

SEQ ID NO: 781700 - DNA, 15 bp, Homo sapiens
acttttatctgagga

SEQ ID NO: 781701 - DNA, 15 bp, Homo sapiens
cttttatctgaggag

SEQ ID NO: 781702 - DNA, 15 bp, Homo sapiens
ttttatctgaggagc

SEQ ID NO: 781703 - DNA, 15 bp, Homo sapiens
tttatctgaggagct

SEQ ID NO: 781704 - DNA, 15 bp, Homo sapiens
ttatctgaggagctg

SEQ ID NO: 781705 - DNA, 15 bp, Homo sapiens
tatctgaggagctgc

SEQ ID NO: 781706 - DNA, 15 bp, Homo sapiens
atctgaggagctgca

SEQ ID NO: 781707 - DNA, 15 bp, Homo sapiens
tctgaggagctgcaa

SEQ ID NO: 781708 - DNA, 15 bp, Homo sapiens
ctgaggagctgcaat

SEQ ID NO: 781709 - DNA, 15 bp, Homo sapiens
tgaggagctgcaatc

SEQ ID NO: 781710 - DNA, 15 bp, Homo sapiens
gaggagctgcaatca

SEQ ID NO: 781711 - DNA, 15 bp, Homo sapiens
aggagctgcaatcag

SEQ ID NO: 781712 - DNA, 15 bp, Homo sapiens
ggagctgcaatcagc

SEQ ID NO: 781713 - DNA, 15 bp, Homo sapiens
gagctgcaatcagca

SEQ ID NO: 781714 - DNA, 15 bp, Homo sapiens
agctgcaatcagcag

SEQ ID NO: 781715 - DNA, 15 bp, Homo sapiens
gctgcaatcagcaga

SEQ ID NO: 781716 - DNA, 15 bp, Homo sapiens
ctgcaatcagcagaa

SEQ ID NO: 781717 - DNA, 15 bp, Homo sapiens
tgcaatcagcagaaa

SEQ ID NO: 781718 - DNA, 15 bp, Homo sapiens
gcaatcagcagaaac

SEQ ID NO: 781719 - DNA, 15 bp, Homo sapiens
caatcagcagaaacc

SEQ ID NO: 781720 - DNA, 15 bp, Homo sapiens
aatcagcagaaacct

SEQ ID NO: 781721 - DNA, 15 bp, Homo sapiens
atcagcagaaacctg

SEQ ID NO: 781722 - DNA, 15 bp, Homo sapiens
tcagcagaaacctgg

SEQ ID NO: 781723 - DNA, 15 bp, Homo sapiens
cagcagaaacctgga

SEQ ID NO: 781724 - DNA, 15 bp, Homo sapiens
agcagaaacctggat

SEQ ID NO: 781725 - DNA, 15 bp, Homo sapiens
gcagaaacctggata

SEQ ID NO: 781726 - DNA, 15 bp, Homo sapiens
cagaaacctggatac

SEQ ID NO: 781727 - DNA, 15 bp, Homo sapiens
agaaacctggatact

SEQ ID NO: 781728 - DNA, 15 bp, Homo sapiens
gaaacctggatacta

SEQ ID NO: 781729 - DNA, 15 bp, Homo sapiens
aaacctggatactaa

SEQ ID NO: 781730 - DNA, 15 bp, Homo sapiens
aacctggatactaac

SEQ ID NO: 781731 - DNA, 15 bp, Homo sapiens
acctggatactaacc

SEQ ID NO: 781732 - DNA, 15 bp, Homo sapiens
cctggatactaaccc

SEQ ID NO: 781733 - DNA, 15 bp, Homo sapiens
ctggatactaaccct

SEQ ID NO: 781734 - DNA, 15 bp, Homo sapiens
tggatactaaccctg

SEQ ID NO: 781735 - DNA, 15 bp, Homo sapiens
ggatactaaccctgg

SEQ ID NO: 781736 - DNA, 15 bp, Homo sapiens
gatactaaccctggc

SEQ ID NO: 781737 - DNA, 15 bp, Homo sapiens
atactaaccctggct

SEQ ID NO: 781738 - DNA, 15 bp, Homo sapiens
tactaaccctggctt

SEQ ID NO: 781739 - DNA, 15 bp, Homo sapiens
actaaccctggcttt

SEQ ID NO: 781740 - DNA, 15 bp, Homo sapiens
ctaaccctggctttg

SEQ ID NO: 781741 - DNA, 15 bp, Homo sapiens
taaccctggctttgc

SEQ ID NO: 781742 - DNA, 15 bp, Homo sapiens
aaccctggctttgct

SEQ ID NO: 781743 - DNA, 15 bp, Homo sapiens
accctggctttgcta

SEQ ID NO: 781744 - DNA, 15 bp, Homo sapiens
ccctggctttgctat

SEQ ID NO: 781745 - DNA, 15 bp, Homo sapiens
cctggctttgctatc

SEQ ID NO: 781746 - DNA, 15 bp, Homo sapiens
ctggctttgctatca

SEQ ID NO: 781747 - DNA, 15 bp, Homo sapiens
tggctttgctatcac

SEQ ID NO: 781748 - DNA, 15 bp, Homo sapiens
ggctttgctatcact

SEQ ID NO: 781749 - DNA, 15 bp, Homo sapiens
gctttgctatcactt

SEQ ID NO: 781750 - DNA, 15 bp, Homo sapiens
ctttgctatcacttt

SEQ ID NO: 781751 - DNA, 15 bp, Homo sapiens
tttgctatcactttt

SEQ ID NO: 781752 - DNA, 15 bp, Homo sapiens
ttgctatcacttttc

SEQ ID NO: 781753 - DNA, 15 bp, Homo sapiens
tgctatcacttttct

SEQ ID NO: 781754 - DNA, 15 bp, Homo sapiens
gctatcacttttctg

SEQ ID NO: 781755 - DNA, 15 bp, Homo sapiens
ctatcacttttctgg

SEQ ID NO: 781756 - DNA, 15 bp, Homo sapiens
tatcacttttctggt

SEQ ID NO: 781757 - DNA, 15 bp, Homo sapiens
atcacttttctggtt

SEQ ID NO: 781758 - DNA, 15 bp, Homo sapiens
tcacttttctggttg

SEQ ID NO: 781759 - DNA, 15 bp, Homo sapiens
cacttttctggttga

SEQ ID NO: 781760 - DNA, 15 bp, Homo sapiens
acttttctggttgac

SEQ ID NO: 781761 - DNA, 15 bp, Homo sapiens
cttttctggttgacc

SEQ ID NO: 781762 - DNA, 15 bp, Homo sapiens
ttttctggttgacct

SEQ ID NO: 781763 - DNA, 15 bp, Homo sapiens
tttctggttgacctt

SEQ ID NO: 781764 - DNA, 15 bp, Homo sapiens
ttctggttgaccttg

SEQ ID NO: 781765 - DNA, 15 bp, Homo sapiens
tctggttgaccttgg

SEQ ID NO: 781766 - DNA, 15 bp, Homo sapiens
ctggttgaccttgga

SEQ ID NO: 781767 - DNA, 15 bp, Homo sapiens
tggttgaccttggac

SEQ ID NO: 781768 - DNA, 15 bp, Homo sapiens
ggttgaccttggaca

SEQ ID NO: 781769 - DNA, 15 bp, Homo sapiens
gttgaccttggacaa

SEQ ID NO: 781770 - DNA, 15 bp, Homo sapiens
ttgaccttggacaag

SEQ ID NO: 781771 - DNA, 15 bp, Homo sapiens
tgaccttggacaagt

SEQ ID NO: 781772 - DNA, 15 bp, Homo sapiens
gaccttggacaagtc

SEQ ID NO: 781773 - DNA, 15 bp, Homo sapiens
accttggacaagtca

SEQ ID NO: 781774 - DNA, 15 bp, Homo sapiens
ccttggacaagtcaa

SEQ ID NO: 781775 - DNA, 15 bp, Homo sapiens
cttggacaagtcaat

SEQ ID NO: 781776 - DNA, 15 bp, Homo sapiens
ttggacaagtcaatt

SEQ ID NO: 781777 - DNA, 15 bp, Homo sapiens
tggacaagtcaattc

SEQ ID NO: 781778 - DNA, 15 bp, Homo sapiens
ggacaagtcaattcc

SEQ ID NO: 781779 - DNA, 15 bp, Homo sapiens
gacaagtcaattccc

SEQ ID NO: 781780 - DNA, 15 bp, Homo sapiens
acaagtcaattccct

SEQ ID NO: 781781 - DNA, 15 bp, Homo sapiens
caagtcaattccctc

SEQ ID NO: 781782 - DNA, 15 bp, Homo sapiens
aagtcaattccctct

SEQ ID NO: 781783 - DNA, 15 bp, Homo sapiens
agtcaattccctctc

SEQ ID NO: 781784 - DNA, 15 bp, Homo sapiens
gtcaattccctctcc

SEQ ID NO: 781785 - DNA, 15 bp, Homo sapiens
tcaattccctctcca

SEQ ID NO: 781786 - DNA, 15 bp, Homo sapiens
caattccctctccaa

SEQ ID NO: 781787 - DNA, 15 bp, Homo sapiens
aattccctctccaag

SEQ ID NO: 781788 - DNA, 15 bp, Homo sapiens
attccctctccaagg

SEQ ID NO: 781789 - DNA, 15 bp, Homo sapiens
ttccctctccaaggc

SEQ ID NO: 781790 - DNA, 15 bp, Homo sapiens
tccctctccaaggcc

SEQ ID NO: 781791 - DNA, 15 bp, Homo sapiens
ccctctccaaggcct

SEQ ID NO: 781792 - DNA, 15 bp, Homo sapiens
cctctccaaggcctc

SEQ ID NO: 781793 - DNA, 15 bp, Homo sapiens
ctctccaaggcctca

SEQ ID NO: 781794 - DNA, 15 bp, Homo sapiens
tctccaaggcctcag

SEQ ID NO: 781795 - DNA, 15 bp, Homo sapiens
ctccaaggcctcagc

SEQ ID NO: 781796 - DNA, 15 bp, Homo sapiens
tccaaggcctcagca

SEQ ID NO: 781797 - DNA, 15 bp, Homo sapiens
ccaaggcctcagcat

SEQ ID NO: 781798 - DNA, 15 bp, Homo sapiens
caaggcctcagcatc

SEQ ID NO: 781799 - DNA, 15 bp, Homo sapiens
aaggcctcagcatct

SEQ ID NO: 781800 - DNA, 15 bp, Homo sapiens
aggcctcagcatctc

SEQ ID NO: 781801 - DNA, 15 bp, Homo sapiens
ggcctcagcatctcc

SEQ ID NO: 781802 - DNA, 15 bp, Homo sapiens
gcctcagcatctcca

SEQ ID NO: 781803 - DNA, 15 bp, Homo sapiens
cctcagcatctccat

SEQ ID NO: 781804 - DNA, 15 bp, Homo sapiens
ctcagcatctccata

SEQ ID NO: 781805 - DNA, 15 bp, Homo sapiens
tcagcatctccataa

SEQ ID NO: 781806 - DNA, 15 bp, Homo sapiens
cagcatctccataaa

SEQ ID NO: 781807 - DNA, 15 bp, Homo sapiens
agcatctccataaat

SEQ ID NO: 781808 - DNA, 15 bp, Homo sapiens
gcatctccataaata

SEQ ID NO: 781809 - DNA, 15 bp, Homo sapiens
catctccataaatag

SEQ ID NO: 781810 - DNA, 15 bp, Homo sapiens
atctccataaataga

SEQ ID NO: 781811 - DNA, 15 bp, Homo sapiens
tctccataaatagag

SEQ ID NO: 781812 - DNA, 15 bp, Homo sapiens
ctccataaatagagg

SEQ ID NO: 781813 - DNA, 15 bp, Homo sapiens
tccataaatagaggg

SEQ ID NO: 781814 - DNA, 15 bp, Homo sapiens
ccataaatagagggg

SEQ ID NO: 781815 - DNA, 15 bp, Homo sapiens
cataaatagaggggg

SEQ ID NO: 781816 - DNA, 15 bp, Homo sapiens
ataaatagagggggc

SEQ ID NO: 781817 - DNA, 15 bp, Homo sapiens
taaatagagggggcc

SEQ ID NO: 781818 - DNA, 15 bp, Homo sapiens
aaatagagggggccg

SEQ ID NO: 781819 - DNA, 15 bp, Homo sapiens
aatagagggggccgc

SEQ ID NO: 781820 - DNA, 15 bp, Homo sapiens
atagagggggccgca

SEQ ID NO: 781821 - DNA, 15 bp, Homo sapiens
tagagggggccgcag

SEQ ID NO: 781822 - DNA, 15 bp, Homo sapiens
agagggggccgcagt

SEQ ID NO: 781823 - DNA, 15 bp, Homo sapiens
gagggggccgcagta

SEQ ID NO: 781824 - DNA, 15 bp, Homo sapiens
agggggccgcagtag

SEQ ID NO: 781825 - DNA, 15 bp, Homo sapiens
gggggccgcagtagt

SEQ ID NO: 781826 - DNA, 15 bp, Homo sapiens
ggggccgcagtagtt

SEQ ID NO: 781827 - DNA, 15 bp, Homo sapiens
gggccgcagtagttt

SEQ ID NO: 781828 - DNA, 15 bp, Homo sapiens
ggccgcagtagtttt

SEQ ID NO: 781829 - DNA, 15 bp, Homo sapiens
gccgcagtagttttt

SEQ ID NO: 781830 - DNA, 15 bp, Homo sapiens
ccgcagtagtttttc

SEQ ID NO: 781831 - DNA, 15 bp, Homo sapiens
cgcagtagtttttca

SEQ ID NO: 781832 - DNA, 15 bp, Homo sapiens
gcagtagtttttcag

SEQ ID NO: 781833 - DNA, 15 bp, Homo sapiens
cagtagtttttcagt

SEQ ID NO: 781834 - DNA, 15 bp, Homo sapiens
agtagtttttcagta

SEQ ID NO: 781835 - DNA, 15 bp, Homo sapiens
gtagtttttcagtag

SEQ ID NO: 781836 - DNA, 15 bp, Homo sapiens
tagtttttcagtagt

SEQ ID NO: 781837 - DNA, 15 bp, Homo sapiens
agtttttcagtagtt

SEQ ID NO: 781838 - DNA, 15 bp, Homo sapiens
gtttttcagtagttc

SEQ ID NO: 781839 - DNA, 15 bp, Homo sapiens
tttttcagtagttcg

SEQ ID NO: 781840 - DNA, 15 bp, Homo sapiens
ttttcagtagttcgt

SEQ ID NO: 781841 - DNA, 15 bp, Homo sapiens
tttcagtagttcgtt

SEQ ID NO: 781842 - DNA, 15 bp, Homo sapiens
ttcagtagttcgttc

SEQ ID NO: 781843 - DNA, 15 bp, Homo sapiens
tcagtagttcgttcc

SEQ ID NO: 781844 - DNA, 15 bp, Homo sapiens
cagtagttcgttccc

SEQ ID NO: 781845 - DNA, 15 bp, Homo sapiens
agtagttcgttccct

SEQ ID NO: 781846 - DNA, 15 bp, Homo sapiens
gtagttcgttccctt

SEQ ID NO: 781847 - DNA, 15 bp, Homo sapiens
tagttcgttcccttg

SEQ ID NO: 781848 - DNA, 15 bp, Homo sapiens
agttcgttcccttgc

SEQ ID NO: 781849 - DNA, 15 bp, Homo sapiens
gttcgttcccttgca

SEQ ID NO: 781850 - DNA, 15 bp, Homo sapiens
ttcgttcccttgcag

SEQ ID NO: 781851 - DNA, 15 bp, Homo sapiens
tcgttcccttgcagc

SEQ ID NO: 781852 - DNA, 15 bp, Homo sapiens
cgttcccttgcagcc

SEQ ID NO: 781853 - DNA, 15 bp, Homo sapiens
gttcccttgcagccc

SEQ ID NO: 781854 - DNA, 15 bp, Homo sapiens
ttcccttgcagccca

SEQ ID NO: 781855 - DNA, 15 bp, Homo sapiens
tcccttgcagcccaa

SEQ ID NO: 781856 - DNA, 15 bp, Homo sapiens
cccttgcagcccaaa

SEQ ID NO: 781857 - DNA, 15 bp, Homo sapiens
ccttgcagcccaaaa

SEQ ID NO: 781858 - DNA, 15 bp, Homo sapiens
cttgcagcccaaaat

SEQ ID NO: 781859 - DNA, 15 bp, Homo sapiens
ttgcagcccaaaata

SEQ ID NO: 781860 - DNA, 15 bp, Homo sapiens
tgcagcccaaaatat

SEQ ID NO: 781861 - DNA, 15 bp, Homo sapiens
gcagcccaaaatatc

SEQ ID NO: 781862 - DNA, 15 bp, Homo sapiens
cagcccaaaatatct

SEQ ID NO: 781863 - DNA, 15 bp, Homo sapiens
agcccaaaatatctt

SEQ ID NO: 781864 - DNA, 15 bp, Homo sapiens
gcccaaaatatcttt

SEQ ID NO: 781865 - DNA, 15 bp, Homo sapiens
cccaaaatatcttta

SEQ ID NO: 781866 - DNA, 15 bp, Homo sapiens
ccaaaatatctttat

SEQ ID NO: 781867 - DNA, 15 bp, Homo sapiens
caaaatatctttatg

SEQ ID NO: 781868 - DNA, 15 bp, Homo sapiens
aaaatatctttatgt

SEQ ID NO: 781869 - DNA, 15 bp, Homo sapiens
aaatatctttatgtt

SEQ ID NO: 781870 - DNA, 15 bp, Homo sapiens
aatatctttatgttt

SEQ ID NO: 781871 - DNA, 15 bp, Homo sapiens
atatctttatgtttt

SEQ ID NO: 781872 - DNA, 15 bp, Homo sapiens
tatctttatgttttc

SEQ ID NO: 781873 - DNA, 15 bp, Homo sapiens
atctttatgttttct

SEQ ID NO: 781874 - DNA, 15 bp, Homo sapiens
tctttatgttttctt

SEQ ID NO: 781875 - DNA, 15 bp, Homo sapiens
ctttatgttttctta

SEQ ID NO: 781876 - DNA, 15 bp, Homo sapiens
tttatgttttcttat

SEQ ID NO: 781877 - DNA, 15 bp, Homo sapiens
ttatgttttcttatc

SEQ ID NO: 781878 - DNA, 15 bp, Homo sapiens
tatgttttcttatcc

SEQ ID NO: 781879 - DNA, 15 bp, Homo sapiens
atgttttcttatccc

SEQ ID NO: 781880 - DNA, 15 bp, Homo sapiens
tgttttcttatcccc

SEQ ID NO: 781881 - DNA, 15 bp, Homo sapiens
gttttcttatcccct

SEQ ID NO: 781882 - DNA, 15 bp, Homo sapiens
ttttcttatcccctt

SEQ ID NO: 781883 - DNA, 15 bp, Homo sapiens
tttcttatccccttc

SEQ ID NO: 781884 - DNA, 15 bp, Homo sapiens
ttcttatccccttca

SEQ ID NO: 781885 - DNA, 15 bp, Homo sapiens
tcttatccccttcac

SEQ ID NO: 781886 - DNA, 15 bp, Homo sapiens
cttatccccttcact

SEQ ID NO: 781887 - DNA, 15 bp, Homo sapiens
ttatccccttcactg

SEQ ID NO: 781888 - DNA, 15 bp, Homo sapiens
tatccccttcactgt

SEQ ID NO: 781889 - DNA, 15 bp, Homo sapiens
atccccttcactgtc

SEQ ID NO: 781890 - DNA, 15 bp, Homo sapiens
tccccttcactgtcc

SEQ ID NO: 781891 - DNA, 15 bp, Homo sapiens
ccccttcactgtcct

SEQ ID NO: 781892 - DNA, 15 bp, Homo sapiens
cccttcactgtcctt

SEQ ID NO: 781893 - DNA, 15 bp, Homo sapiens
ccttcactgtccttc

SEQ ID NO: 781894 - DNA, 15 bp, Homo sapiens
cttcactgtccttca

SEQ ID NO: 781895 - DNA, 15 bp, Homo sapiens
ttcactgtccttcat

SEQ ID NO: 781896 - DNA, 15 bp, Homo sapiens
tcactgtccttcatc

SEQ ID NO: 781897 - DNA, 15 bp, Homo sapiens
cactgtccttcatca

SEQ ID NO: 781898 - DNA, 15 bp, Homo sapiens
actgtccttcatcag

SEQ ID NO: 781899 - DNA, 15 bp, Homo sapiens
ctgtccttcatcagc

SEQ ID NO: 781900 - DNA, 15 bp, Homo sapiens
tgtccttcatcagca

SEQ ID NO: 781901 - DNA, 15 bp, Homo sapiens
gtccttcatcagcaa

SEQ ID NO: 781902 - DNA, 15 bp, Homo sapiens
tccttcatcagcaaa

SEQ ID NO: 781903 - DNA, 15 bp, Homo sapiens
ccttcatcagcaaag

SEQ ID NO: 781904 - DNA, 15 bp, Homo sapiens
cttcatcagcaaagg

SEQ ID NO: 781905 - DNA, 15 bp, Homo sapiens
ttcatcagcaaaggc

SEQ ID NO: 781906 - DNA, 15 bp, Homo sapiens
tcatcagcaaaggcc

SEQ ID NO: 781907 - DNA, 15 bp, Homo sapiens
catcagcaaaggcca

SEQ ID NO: 781908 - DNA, 15 bp, Homo sapiens
atcagcaaaggccac

SEQ ID NO: 781909 - DNA, 15 bp, Homo sapiens
tcagcaaaggccaca

SEQ ID NO: 781910 - DNA, 15 bp, Homo sapiens
cagcaaaggccacaa

SEQ ID NO: 781911 - DNA, 15 bp, Homo sapiens
agcaaaggccacaag

SEQ ID NO: 781912 - DNA, 15 bp, Homo sapiens
gcaaaggccacaagt

SEQ ID NO: 781913 - DNA, 15 bp, Homo sapiens
caaaggccacaagtg

SEQ ID NO: 781914 - DNA, 15 bp, Homo sapiens
aaaggccacaagtgt

SEQ ID NO: 781915 - DNA, 15 bp, Homo sapiens
aaggccacaagtgtt

SEQ ID NO: 781916 - DNA, 15 bp, Homo sapiens
aggccacaagtgtta

SEQ ID NO: 781917 - DNA, 15 bp, Homo sapiens
ggccacaagtgttag

SEQ ID NO: 781918 - DNA, 15 bp, Homo sapiens
gccacaagtgttagg

SEQ ID NO: 781919 - DNA, 15 bp, Homo sapiens
ccacaagtgttaggc

SEQ ID NO: 781920 - DNA, 15 bp, Homo sapiens
cacaagtgttaggct

SEQ ID NO: 781921 - DNA, 15 bp, Homo sapiens
acaagtgttaggctc

SEQ ID NO: 781922 - DNA, 15 bp, Homo sapiens
caagtgttaggctca

SEQ ID NO: 781923 - DNA, 15 bp, Homo sapiens
aagtgttaggctcac

SEQ ID NO: 781924 - DNA, 15 bp, Homo sapiens
agtgttaggctcaca

SEQ ID NO: 781925 - DNA, 15 bp, Homo sapiens
gtgttaggctcacat

SEQ ID NO: 781926 - DNA, 15 bp, Homo sapiens
tgttaggctcacatc

SEQ ID NO: 781927 - DNA, 15 bp, Homo sapiens
gttaggctcacatct

SEQ ID NO: 781928 - DNA, 15 bp, Homo sapiens
ttaggctcacatcta

SEQ ID NO: 781929 - DNA, 15 bp, Homo sapiens
taggctcacatctac

SEQ ID NO: 781930 - DNA, 15 bp, Homo sapiens
aggctcacatctact

SEQ ID NO: 781931 - DNA, 15 bp, Homo sapiens
ggctcacatctactg

SEQ ID NO: 781932 - DNA, 15 bp, Homo sapiens
gctcacatctactgt

SEQ ID NO: 781933 - DNA, 15 bp, Homo sapiens
ctcacatctactgtg

SEQ ID NO: 781934 - DNA, 15 bp, Homo sapiens
tcacatctactgtgc

SEQ ID NO: 781935 - DNA, 15 bp, Homo sapiens
cacatctactgtgcc

SEQ ID NO: 781936 - DNA, 15 bp, Homo sapiens
acatctactgtgccc

SEQ ID NO: 781937 - DNA, 15 bp, Homo sapiens
catctactgtgccct

SEQ ID NO: 781938 - DNA, 15 bp, Homo sapiens
atctactgtgccctt

SEQ ID NO: 781939 - DNA, 15 bp, Homo sapiens
tctactgtgcccttg

SEQ ID NO: 781940 - DNA, 15 bp, Homo sapiens
ctactgtgcccttgg

SEQ ID NO: 781941 - DNA, 15 bp, Homo sapiens
tactgtgcccttggc

SEQ ID NO: 781942 - DNA, 15 bp, Homo sapiens
actgtgcccttggcc

SEQ ID NO: 781943 - DNA, 15 bp, Homo sapiens
ctgtgcccttggccc

SEQ ID NO: 781944 - DNA, 15 bp, Homo sapiens
tgtgcccttggccct

SEQ ID NO: 781945 - DNA, 15 bp, Homo sapiens
gtgcccttggccctg

SEQ ID NO: 781946 - DNA, 15 bp, Homo sapiens
tgcccttggccctgt

SEQ ID NO: 781947 - DNA, 15 bp, Homo sapiens
gcccttggccctgtg

SEQ ID NO: 781948 - DNA, 15 bp, Homo sapiens
cccttggccctgtgc

SEQ ID NO: 781949 - DNA, 15 bp, Homo sapiens
ccttggccctgtgct

SEQ ID NO: 781950 - DNA, 15 bp, Homo sapiens
cttggccctgtgcta

SEQ ID NO: 781951 - DNA, 15 bp, Homo sapiens
ttggccctgtgctag

SEQ ID NO: 781952 - DNA, 15 bp, Homo sapiens
tggccctgtgctagg

SEQ ID NO: 781953 - DNA, 15 bp, Homo sapiens
ggccctgtgctaggc

SEQ ID NO: 781954 - DNA, 15 bp, Homo sapiens
gccctgtgctaggca

SEQ ID NO: 781955 - DNA, 15 bp, Homo sapiens
ccctgtgctaggcac

SEQ ID NO: 781956 - DNA, 15 bp, Homo sapiens
cctgtgctaggcacc

SEQ ID NO: 781957 - DNA, 15 bp, Homo sapiens
ctgtgctaggcacca

SEQ ID NO: 781958 - DNA, 15 bp, Homo sapiens
tgtgctaggcaccag

SEQ ID NO: 781959 - DNA, 15 bp, Homo sapiens
gtgctaggcaccagg

SEQ ID NO: 781960 - DNA, 15 bp, Homo sapiens
tgctaggcaccagga

SEQ ID NO: 781961 - DNA, 15 bp, Homo sapiens
gctaggcaccaggag

SEQ ID NO: 781962 - DNA, 15 bp, Homo sapiens
ctaggcaccaggaga

SEQ ID NO: 781963 - DNA, 15 bp, Homo sapiens
taggcaccaggagaa

SEQ ID NO: 781964 - DNA, 15 bp, Homo sapiens
aggcaccaggagaac

SEQ ID NO: 781965 - DNA, 15 bp, Homo sapiens
ggcaccaggagaact

SEQ ID NO: 781966 - DNA, 15 bp, Homo sapiens
gcaccaggagaactg

SEQ ID NO: 781967 - DNA, 15 bp, Homo sapiens
caccaggagaactgc

SEQ ID NO: 781968 - DNA, 15 bp, Homo sapiens
accaggagaactgca

SEQ ID NO: 781969 - DNA, 15 bp, Homo sapiens
ccaggagaactgcaa

SEQ ID NO: 781970 - DNA, 15 bp, Homo sapiens
caggagaactgcaaa

SEQ ID NO: 781971 - DNA, 15 bp, Homo sapiens
aggagaactgcaaaa

SEQ ID NO: 781972 - DNA, 15 bp, Homo sapiens
ggagaactgcaaaag

SEQ ID NO: 781973 - DNA, 15 bp, Homo sapiens
gagaactgcaaaagg

SEQ ID NO: 781974 - DNA, 15 bp, Homo sapiens
agaactgcaaaagga

SEQ ID NO: 781975 - DNA, 15 bp, Homo sapiens
gaactgcaaaaggag

SEQ ID NO: 781976 - DNA, 15 bp, Homo sapiens
aactgcaaaaggaga

SEQ ID NO: 781977 - DNA, 15 bp, Homo sapiens
actgcaaaaggagag

SEQ ID NO: 781978 - DNA, 15 bp, Homo sapiens
ctgcaaaaggagaga

SEQ ID NO: 781979 - DNA, 15 bp, Homo sapiens
tgcaaaaggagagag

SEQ ID NO: 781980 - DNA, 15 bp, Homo sapiens
gcaaaaggagagaga

SEQ ID NO: 781981 - DNA, 15 bp, Homo sapiens
caaaaggagagagaa

SEQ ID NO: 781982 - DNA, 15 bp, Homo sapiens
aaaaggagagagaat

SEQ ID NO: 781983 - DNA, 15 bp, Homo sapiens
aaaggagagagaatg

SEQ ID NO: 781984 - DNA, 15 bp, Homo sapiens
aaggagagagaatgc

SEQ ID NO: 781985 - DNA, 15 bp, Homo sapiens
aggagagagaatgca

SEQ ID NO: 781986 - DNA, 15 bp, Homo sapiens
ggagagagaatgcac

SEQ ID NO: 781987 - DNA, 15 bp, Homo sapiens
gagagagaatgcact

SEQ ID NO: 781988 - DNA, 15 bp, Homo sapiens
agagagaatgcactt

SEQ ID NO: 781989 - DNA, 15 bp, Homo sapiens
gagagaatgcacttt

SEQ ID NO: 781990 - DNA, 15 bp, Homo sapiens
agagaatgcactttt

SEQ ID NO: 781991 - DNA, 15 bp, Homo sapiens
gagaatgcacttttc

SEQ ID NO: 781992 - DNA, 15 bp, Homo sapiens
agaatgcacttttct

SEQ ID NO: 781993 - DNA, 15 bp, Homo sapiens
gaatgcacttttctt

SEQ ID NO: 781994 - DNA, 15 bp, Homo sapiens
aatgcacttttctta

SEQ ID NO: 781995 - DNA, 15 bp, Homo sapiens
atgcacttttcttag

SEQ ID NO: 781996 - DNA, 15 bp, Homo sapiens
tgcacttttcttagc

SEQ ID NO: 781997 - DNA, 15 bp, Homo sapiens
gcacttttcttagct

SEQ ID NO: 781998 - DNA, 15 bp, Homo sapiens
cacttttcttagctg

SEQ ID NO: 781999 - DNA, 15 bp, Homo sapiens
acttttcttagctgc

SEQ ID NO: 782000 - DNA, 15 bp, Homo sapiens
cttttcttagctgcc

SEQ ID NO: 782001 - DNA, 15 bp, Homo sapiens
ttttcttagctgcca

SEQ ID NO: 782002 - DNA, 15 bp, Homo sapiens
tttcttagctgccag

SEQ ID NO: 782003 - DNA, 15 bp, Homo sapiens
ttcttagctgccaga

SEQ ID NO: 782004 - DNA, 15 bp, Homo sapiens
tcttagctgccagag

SEQ ID NO: 782005 - DNA, 15 bp, Homo sapiens
cttagctgccagagt

SEQ ID NO: 782006 - DNA, 15 bp, Homo sapiens
ttagctgccagagtg

SEQ ID NO: 782007 - DNA, 15 bp, Homo sapiens
tagctgccagagtga

SEQ ID NO: 782008 - DNA, 15 bp, Homo sapiens
agctgccagagtgat

SEQ ID NO: 782009 - DNA, 15 bp, Homo sapiens
gctgccagagtgatt

SEQ ID NO: 782010 - DNA, 15 bp, Homo sapiens
ctgccagagtgattg

SEQ ID NO: 782011 - DNA, 15 bp, Homo sapiens
tgccagagtgattgg

SEQ ID NO: 782012 - DNA, 15 bp, Homo sapiens
gccagagtgattggc

SEQ ID NO: 782013 - DNA, 15 bp, Homo sapiens
ccagagtgattggcg

SEQ ID NO: 782014 - DNA, 15 bp, Homo sapiens
cagagtgattggcgt

SEQ ID NO: 782015 - DNA, 15 bp, Homo sapiens
agagtgattggcgtg

SEQ ID NO: 782016 - DNA, 15 bp, Homo sapiens
gagtgattggcgtga

SEQ ID NO: 782017 - DNA, 15 bp, Homo sapiens
agtgattggcgtgaa

SEQ ID NO: 782018 - DNA, 15 bp, Homo sapiens
gtgattggcgtgaag

SEQ ID NO: 782019 - DNA, 15 bp, Homo sapiens
tgattggcgtgaagc

SEQ ID NO: 782020 - DNA, 15 bp, Homo sapiens
gattggcgtgaagca

SEQ ID NO: 782021 - DNA, 15 bp, Homo sapiens
attggcgtgaagcag

SEQ ID NO: 782022 - DNA, 15 bp, Homo sapiens
ttggcgtgaagcaga

SEQ ID NO: 782023 - DNA, 15 bp, Homo sapiens
tggcgtgaagcagag

SEQ ID NO: 782024 - DNA, 15 bp, Homo sapiens
ggcgtgaagcagagt

SEQ ID NO: 782025 - DNA, 15 bp, Homo sapiens
gcgtgaagcagagtt

SEQ ID NO: 782026 - DNA, 15 bp, Homo sapiens
cgtgaagcagagttc

SEQ ID NO: 782027 - DNA, 15 bp, Homo sapiens
gtgaagcagagttca

SEQ ID NO: 782028 - DNA, 15 bp, Homo sapiens
tgaagcagagttcat

SEQ ID NO: 782029 - DNA, 15 bp, Homo sapiens
gaagcagagttcatc

SEQ ID NO: 782030 - DNA, 15 bp, Homo sapiens
aagcagagttcatca

SEQ ID NO: 782031 - DNA, 15 bp, Homo sapiens
agcagagttcatcaa

SEQ ID NO: 782032 - DNA, 15 bp, Homo sapiens
gcagagttcatcaag

SEQ ID NO: 782033 - DNA, 15 bp, Homo sapiens
cagagttcatcaagg

SEQ ID NO: 782034 - DNA, 15 bp, Homo sapiens
agagttcatcaaggg

SEQ ID NO: 782035 - DNA, 15 bp, Homo sapiens
gagttcatcaagggg

SEQ ID NO: 782036 - DNA, 15 bp, Homo sapiens
agttcatcaaggggt

SEQ ID NO: 782037 - DNA, 15 bp, Homo sapiens
gttcatcaaggggtg

SEQ ID NO: 782038 - DNA, 15 bp, Homo sapiens
ttcatcaaggggtgt

SEQ ID NO: 782039 - DNA, 15 bp, Homo sapiens
tcatcaaggggtgtc

SEQ ID NO: 782040 - DNA, 15 bp, Homo sapiens
catcaaggggtgtct

SEQ ID NO: 782041 - DNA, 15 bp, Homo sapiens
atcaaggggtgtctc

SEQ ID NO: 782042 - DNA, 15 bp, Homo sapiens
tcaaggggtgtctct

SEQ ID NO: 782043 - DNA, 15 bp, Homo sapiens
caaggggtgtctctg

SEQ ID NO: 782044 - DNA, 15 bp, Homo sapiens
aaggggtgtctctgc

SEQ ID NO: 782045 - DNA, 15 bp, Homo sapiens
aggggtgtctctgca

SEQ ID NO: 782046 - DNA, 15 bp, Homo sapiens
ggggtgtctctgcat

SEQ ID NO: 782047 - DNA, 15 bp, Homo sapiens
gggtgtctctgcatg

SEQ ID NO: 782048 - DNA, 15 bp, Homo sapiens
ggtgtctctgcatgg

SEQ ID NO: 782049 - DNA, 15 bp, Homo sapiens
gtgtctctgcatggc

SEQ ID NO: 782050 - DNA, 15 bp, Homo sapiens
tgtctctgcatggct

SEQ ID NO: 782051 - DNA, 15 bp, Homo sapiens
gtctctgcatggctc

SEQ ID NO: 782052 - DNA, 15 bp, Homo sapiens
tctctgcatggctct

SEQ ID NO: 782053 - DNA, 15 bp, Homo sapiens
ctctgcatggctctc

SEQ ID NO: 782054 - DNA, 15 bp, Homo sapiens
tctgcatggctctcc

SEQ ID NO: 782055 - DNA, 15 bp, Homo sapiens
ctgcatggctctccc

SEQ ID NO: 782056 - DNA, 15 bp, Homo sapiens
tgcatggctctccca

SEQ ID NO: 782057 - DNA, 15 bp, Homo sapiens
gcatggctctcccat

SEQ ID NO: 782058 - DNA, 15 bp, Homo sapiens
catggctctcccatg

SEQ ID NO: 782059 - DNA, 15 bp, Homo sapiens
atggctctcccatgg

SEQ ID NO: 782060 - DNA, 15 bp, Homo sapiens
tggctctcccatggt

SEQ ID NO: 782061 - DNA, 15 bp, Homo sapiens
ggctctcccatggtt

SEQ ID NO: 782062 - DNA, 15 bp, Homo sapiens
gctctcccatggttt

SEQ ID NO: 782063 - DNA, 15 bp, Homo sapiens
ctctcccatggtttt

SEQ ID NO: 782064 - DNA, 15 bp, Homo sapiens
tctcccatggttttg

SEQ ID NO: 782065 - DNA, 15 bp, Homo sapiens
ctcccatggttttgc

SEQ ID NO: 782066 - DNA, 15 bp, Homo sapiens
tcccatggttttgcc

SEQ ID NO: 782067 - DNA, 15 bp, Homo sapiens
cccatggttttgcct

SEQ ID NO: 782068 - DNA, 15 bp, Homo sapiens
ccatggttttgcctc

SEQ ID NO: 782069 - DNA, 15 bp, Homo sapiens
catggttttgcctcc

SEQ ID NO: 782070 - DNA, 15 bp, Homo sapiens
atggttttgcctcca

SEQ ID NO: 782071 - DNA, 15 bp, Homo sapiens
tggttttgcctccat

SEQ ID NO: 782072 - DNA, 15 bp, Homo sapiens
ggttttgcctccatt

SEQ ID NO: 782073 - DNA, 15 bp, Homo sapiens
gttttgcctccattt

SEQ ID NO: 782074 - DNA, 15 bp, Homo sapiens
ttttgcctccatttg

SEQ ID NO: 782075 - DNA, 15 bp, Homo sapiens
tttgcctccatttga

SEQ ID NO: 782076 - DNA, 15 bp, Homo sapiens
ttgcctccatttgaa

SEQ ID NO: 782077 - DNA, 15 bp, Homo sapiens
tgcctccatttgaag

SEQ ID NO: 782078 - DNA, 15 bp, Homo sapiens
gcctccatttgaagt

SEQ ID NO: 782079 - DNA, 15 bp, Homo sapiens
cctccatttgaagta

SEQ ID NO: 782080 - DNA, 15 bp, Homo sapiens
ctccatttgaagtaa

SEQ ID NO: 782081 - DNA, 15 bp, Homo sapiens
tccatttgaagtaaa

SEQ ID NO: 782082 - DNA, 15 bp, Homo sapiens
ccatttgaagtaaaa

SEQ ID NO: 782083 - DNA, 15 bp, Homo sapiens
catttgaagtaaaat

SEQ ID NO: 782084 - DNA, 15 bp, Homo sapiens
atttgaagtaaaatc

SEQ ID NO: 782085 - DNA, 15 bp, Homo sapiens
tttgaagtaaaatct

SEQ ID NO: 782086 - DNA, 15 bp, Homo sapiens
ttgaagtaaaatctg

SEQ ID NO: 782087 - DNA, 15 bp, Homo sapiens
tgaagtaaaatctga

SEQ ID NO: 782088 - DNA, 15 bp, Homo sapiens
gaagtaaaatctgaa

SEQ ID NO: 782089 - DNA, 15 bp, Homo sapiens
aagtaaaatctgaaa

SEQ ID NO: 782090 - DNA, 15 bp, Homo sapiens
agtaaaatctgaaac

SEQ ID NO: 782091 - DNA, 15 bp, Homo sapiens
gtaaaatctgaaact

SEQ ID NO: 782092 - DNA, 15 bp, Homo sapiens
taaaatctgaaactg

SEQ ID NO: 782093 - DNA, 15 bp, Homo sapiens
aaaatctgaaactgt

SEQ ID NO: 782094 - DNA, 15 bp, Homo sapiens
aaatctgaaactgtg

SEQ ID NO: 782095 - DNA, 15 bp, Homo sapiens
aatctgaaactgtgt

SEQ ID NO: 782096 - DNA, 15 bp, Homo sapiens
atctgaaactgtgtc

SEQ ID NO: 782097 - DNA, 15 bp, Homo sapiens
tctgaaactgtgtcc

SEQ ID NO: 782098 - DNA, 15 bp, Homo sapiens
ctgaaactgtgtccc

SEQ ID NO: 782099 - DNA, 15 bp, Homo sapiens
tgaaactgtgtccct

SEQ ID NO: 782100 - DNA, 15 bp, Homo sapiens
gaaactgtgtccctg

SEQ ID NO: 782101 - DNA, 15 bp, Homo sapiens
aaactgtgtccctgg

SEQ ID NO: 782102 - DNA, 15 bp, Homo sapiens
aactgtgtccctggc

SEQ ID NO: 782103 - DNA, 15 bp, Homo sapiens
actgtgtccctggct

SEQ ID NO: 782104 - DNA, 15 bp, Homo sapiens
ctgtgtccctggctt

SEQ ID NO: 782105 - DNA, 15 bp, Homo sapiens
tgtgtccctggctta

SEQ ID NO: 782106 - DNA, 15 bp, Homo sapiens
gtgtccctggcttac

SEQ ID NO: 782107 - DNA, 15 bp, Homo sapiens
tgtccctggcttaca

SEQ ID NO: 782108 - DNA, 15 bp, Homo sapiens
gtccctggcttacaa

SEQ ID NO: 782109 - DNA, 15 bp, Homo sapiens
tccctggcttacaag

SEQ ID NO: 782110 - DNA, 15 bp, Homo sapiens
ccctggcttacaagg

SEQ ID NO: 782111 - DNA, 15 bp, Homo sapiens
cctggcttacaaggc

SEQ ID NO: 782112 - DNA, 15 bp, Homo sapiens
ctggcttacaaggcc

SEQ ID NO: 782113 - DNA, 15 bp, Homo sapiens
tggcttacaaggccc

SEQ ID NO: 782114 - DNA, 15 bp, Homo sapiens
ggcttacaaggcccc

SEQ ID NO: 782115 - DNA, 15 bp, Homo sapiens
gcttacaaggccccg

SEQ ID NO: 782116 - DNA, 15 bp, Homo sapiens
cttacaaggccccgt

SEQ ID NO: 782117 - DNA, 15 bp, Homo sapiens
ttacaaggccccgtg

SEQ ID NO: 782118 - DNA, 15 bp, Homo sapiens
tacaaggccccgtga

SEQ ID NO: 782119 - DNA, 15 bp, Homo sapiens
acaaggccccgtgag

SEQ ID NO: 782120 - DNA, 15 bp, Homo sapiens
caaggccccgtgagt

SEQ ID NO: 782121 - DNA, 15 bp, Homo sapiens
aaggccccgtgagtt

SEQ ID NO: 782122 - DNA, 15 bp, Homo sapiens
aggccccgtgagtta

SEQ ID NO: 782123 - DNA, 15 bp, Homo sapiens
ggccccgtgagttac

SEQ ID NO: 782124 - DNA, 15 bp, Homo sapiens
gccccgtgagttacg

SEQ ID NO: 782125 - DNA, 15 bp, Homo sapiens
ccccgtgagttacgg

SEQ ID NO: 782126 - DNA, 15 bp, Homo sapiens
cccgtgagttacggt

SEQ ID NO: 782127 - DNA, 15 bp, Homo sapiens
ccgtgagttacggtg

SEQ ID NO: 782128 - DNA, 15 bp, Homo sapiens
cgtgagttacggtgc

SEQ ID NO: 782129 - DNA, 15 bp, Homo sapiens
gtgagttacggtgcc

SEQ ID NO: 782130 - DNA, 15 bp, Homo sapiens
tgagttacggtgcct

SEQ ID NO: 782131 - DNA, 15 bp, Homo sapiens
gagttacggtgcctg

SEQ ID NO: 782132 - DNA, 15 bp, Homo sapiens
agttacggtgcctgc

SEQ ID NO: 782133 - DNA, 15 bp, Homo sapiens
gttacggtgcctgct

SEQ ID NO: 782134 - DNA, 15 bp, Homo sapiens
ttacggtgcctgctt

SEQ ID NO: 782135 - DNA, 15 bp, Homo sapiens
tacggtgcctgcttt

SEQ ID NO: 782136 - DNA, 15 bp, Homo sapiens
acggtgcctgctttt

SEQ ID NO: 782137 - DNA, 15 bp, Homo sapiens
cggtgcctgcttttg

SEQ ID NO: 782138 - DNA, 15 bp, Homo sapiens
ggtgcctgcttttga

SEQ ID NO: 782139 - DNA, 15 bp, Homo sapiens
gtgcctgcttttgac

SEQ ID NO: 782140 - DNA, 15 bp, Homo sapiens
tgcctgcttttgact

SEQ ID NO: 782141 - DNA, 15 bp, Homo sapiens
gcctgcttttgactc

SEQ ID NO: 782142 - DNA, 15 bp, Homo sapiens
cctgcttttgactca

SEQ ID NO: 782143 - DNA, 15 bp, Homo sapiens
ctgcttttgactcac

SEQ ID NO: 782144 - DNA, 15 bp, Homo sapiens
tgcttttgactcacc

SEQ ID NO: 782145 - DNA, 15 bp, Homo sapiens
gcttttgactcacct

SEQ ID NO: 782146 - DNA, 15 bp, Homo sapiens
cttttgactcacctc

SEQ ID NO: 782147 - DNA, 15 bp, Homo sapiens
ttttgactcacctcc

SEQ ID NO: 782148 - DNA, 15 bp, Homo sapiens
tttgactcacctcca

SEQ ID NO: 782149 - DNA, 15 bp, Homo sapiens
ttgactcacctccaa

SEQ ID NO: 782150 - DNA, 15 bp, Homo sapiens
tgactcacctccaat

SEQ ID NO: 782151 - DNA, 15 bp, Homo sapiens
gactcacctccaatg

SEQ ID NO: 782152 - DNA, 15 bp, Homo sapiens
actcacctccaatga

SEQ ID NO: 782153 - DNA, 15 bp, Homo sapiens
ctcacctccaatgat

SEQ ID NO: 782154 - DNA, 15 bp, Homo sapiens
tcacctccaatgatt

SEQ ID NO: 782155 - DNA, 15 bp, Homo sapiens
cacctccaatgattc

SEQ ID NO: 782156 - DNA, 15 bp, Homo sapiens
acctccaatgattct

SEQ ID NO: 782157 - DNA, 15 bp, Homo sapiens
cctccaatgattctt

SEQ ID NO: 782158 - DNA, 15 bp, Homo sapiens
ctccaatgattcttt

SEQ ID NO: 782159 - DNA, 15 bp, Homo sapiens
tccaatgattctttt

SEQ ID NO: 782160 - DNA, 15 bp, Homo sapiens
ccaatgattcttttc

SEQ ID NO: 782161 - DNA, 15 bp, Homo sapiens
caatgattcttttcc

SEQ ID NO: 782162 - DNA, 15 bp, Homo sapiens
aatgattcttttcct

SEQ ID NO: 782163 - DNA, 15 bp, Homo sapiens
atgattcttttcctt

SEQ ID NO: 782164 - DNA, 15 bp, Homo sapiens
tgattcttttccttc

SEQ ID NO: 782165 - DNA, 15 bp, Homo sapiens
gattcttttccttct

SEQ ID NO: 782166 - DNA, 15 bp, Homo sapiens
attcttttccttctt

SEQ ID NO: 782167 - DNA, 15 bp, Homo sapiens
ttcttttccttcttt

SEQ ID NO: 782168 - DNA, 15 bp, Homo sapiens
tcttttccttctttg

SEQ ID NO: 782169 - DNA, 15 bp, Homo sapiens
cttttccttctttgc

SEQ ID NO: 782170 - DNA, 15 bp, Homo sapiens
ttttccttctttgct

SEQ ID NO: 782171 - DNA, 15 bp, Homo sapiens
tttccttctttgctc

SEQ ID NO: 782172 - DNA, 15 bp, Homo sapiens
ttccttctttgctcc

SEQ ID NO: 782173 - DNA, 15 bp, Homo sapiens
tccttctttgctcct

SEQ ID NO: 782174 - DNA, 15 bp, Homo sapiens
ccttctttgctcctt

SEQ ID NO: 782175 - DNA, 15 bp, Homo sapiens
cttctttgctccttt

SEQ ID NO: 782176 - DNA, 15 bp, Homo sapiens
ttctttgctcctttc

SEQ ID NO: 782177 - DNA, 15 bp, Homo sapiens
tctttgctcctttct

SEQ ID NO: 782178 - DNA, 15 bp, Homo sapiens
ctttgctcctttcta

SEQ ID NO: 782179 - DNA, 15 bp, Homo sapiens
tttgctcctttctag

SEQ ID NO: 782180 - DNA, 15 bp, Homo sapiens
ttgctcctttctaga

SEQ ID NO: 782181 - DNA, 15 bp, Homo sapiens
tgctcctttctagag

SEQ ID NO: 782182 - DNA, 15 bp, Homo sapiens
gctcctttctagaga

SEQ ID NO: 782183 - DNA, 15 bp, Homo sapiens
ctcctttctagagaa

SEQ ID NO: 782184 - DNA, 15 bp, Homo sapiens
tcctttctagagaag

SEQ ID NO: 782185 - DNA, 15 bp, Homo sapiens
cctttctagagaaga

SEQ ID NO: 782186 - DNA, 15 bp, Homo sapiens
ctttctagagaagaa

SEQ ID NO: 782187 - DNA, 15 bp, Homo sapiens
tttctagagaagaag

SEQ ID NO: 782188 - DNA, 15 bp, Homo sapiens
ttctagagaagaagc

SEQ ID NO: 782189 - DNA, 15 bp, Homo sapiens
tctagagaagaagca

SEQ ID NO: 782190 - DNA, 15 bp, Homo sapiens
ctagagaagaagcaa

SEQ ID NO: 782191 - DNA, 15 bp, Homo sapiens
tagagaagaagcaaa

SEQ ID NO: 782192 - DNA, 15 bp, Homo sapiens
agagaagaagcaaag

SEQ ID NO: 782193 - DNA, 15 bp, Homo sapiens
gagaagaagcaaagc

SEQ ID NO: 782194 - DNA, 15 bp, Homo sapiens
agaagaagcaaagcc

SEQ ID NO: 782195 - DNA, 15 bp, Homo sapiens
gaagaagcaaagcct

SEQ ID NO: 782196 - DNA, 15 bp, Homo sapiens
aagaagcaaagccta

SEQ ID NO: 782197 - DNA, 15 bp, Homo sapiens
agaagcaaagcctat

SEQ ID NO: 782198 - DNA, 15 bp, Homo sapiens
gaagcaaagcctata

SEQ ID NO: 782199 - DNA, 15 bp, Homo sapiens
aagcaaagcctatag

SEQ ID NO: 782200 - DNA, 15 bp, Homo sapiens
agcaaagcctatagg

SEQ ID NO: 782201 - DNA, 15 bp, Homo sapiens
gcaaagcctataggt

SEQ ID NO: 782202 - DNA, 15 bp, Homo sapiens
caaagcctataggta

SEQ ID NO: 782203 - DNA, 15 bp, Homo sapiens
aaagcctataggtag

SEQ ID NO: 782204 - DNA, 15 bp, Homo sapiens
aagcctataggtaga

SEQ ID NO: 782205 - DNA, 15 bp, Homo sapiens
agcctataggtagaa

SEQ ID NO: 782206 - DNA, 15 bp, Homo sapiens
gcctataggtagaag

SEQ ID NO: 782207 - DNA, 15 bp, Homo sapiens
cctataggtagaagc

SEQ ID NO: 782208 - DNA, 15 bp, Homo sapiens
ctataggtagaagca

SEQ ID NO: 782209 - DNA, 15 bp, Homo sapiens
tataggtagaagcat

SEQ ID NO: 782210 - DNA, 15 bp, Homo sapiens
ataggtagaagcatg

SEQ ID NO: 782211 - DNA, 15 bp, Homo sapiens
taggtagaagcatgt

SEQ ID NO: 782212 - DNA, 15 bp, Homo sapiens
aggtagaagcatgta

SEQ ID NO: 782213 - DNA, 15 bp, Homo sapiens
ggtagaagcatgtag

SEQ ID NO: 782214 - DNA, 15 bp, Homo sapiens
gtagaagcatgtaga

SEQ ID NO: 782215 - DNA, 15 bp, Homo sapiens
tagaagcatgtagat

SEQ ID NO: 782216 - DNA, 15 bp, Homo sapiens
agaagcatgtagatg

SEQ ID NO: 782217 - DNA, 15 bp, Homo sapiens
gaagcatgtagatgg

SEQ ID NO: 782218 - DNA, 15 bp, Homo sapiens
aagcatgtagatggg

SEQ ID NO: 782219 - DNA, 15 bp, Homo sapiens
agcatgtagatgggc

SEQ ID NO: 782220 - DNA, 15 bp, Homo sapiens
gcatgtagatgggcc

SEQ ID NO: 782221 - DNA, 15 bp, Homo sapiens
catgtagatgggcct

SEQ ID NO: 782222 - DNA, 15 bp, Homo sapiens
atgtagatgggcctg

SEQ ID NO: 782223 - DNA, 15 bp, Homo sapiens
tgtagatgggcctga

SEQ ID NO: 782224 - DNA, 15 bp, Homo sapiens
gtagatgggcctgag

SEQ ID NO: 782225 - DNA, 15 bp, Homo sapiens
tagatgggcctgagg

SEQ ID NO: 782226 - DNA, 15 bp, Homo sapiens
agatgggcctgaggc

SEQ ID NO: 782227 - DNA, 15 bp, Homo sapiens
gatgggcctgaggca

SEQ ID NO: 782228 - DNA, 15 bp, Homo sapiens
atgggcctgaggcac

SEQ ID NO: 782229 - DNA, 15 bp, Homo sapiens
tgggcctgaggcact

SEQ ID NO: 782230 - DNA, 15 bp, Homo sapiens
gggcctgaggcactg

SEQ ID NO: 782231 - DNA, 15 bp, Homo sapiens
ggcctgaggcactgg

SEQ ID NO: 782232 - DNA, 15 bp, Homo sapiens
gcctgaggcactggg

SEQ ID NO: 782233 - DNA, 15 bp, Homo sapiens
cctgaggcactgggc

SEQ ID NO: 782234 - DNA, 15 bp, Homo sapiens
ctgaggcactgggca

SEQ ID NO: 782235 - DNA, 15 bp, Homo sapiens
tgaggcactgggcag

SEQ ID NO: 782236 - DNA, 15 bp, Homo sapiens
gaggcactgggcagg

SEQ ID NO: 782237 - DNA, 15 bp, Homo sapiens
aggcactgggcaggg

SEQ ID NO: 782238 - DNA, 15 bp, Homo sapiens
ggcactgggcagggg

SEQ ID NO: 782239 - DNA, 15 bp, Homo sapiens
gcactgggcaggggg

SEQ ID NO: 782240 - DNA, 15 bp, Homo sapiens
cactgggcaggggga

SEQ ID NO: 782241 - DNA, 15 bp, Homo sapiens
actgggcagggggaa

SEQ ID NO: 782242 - DNA, 15 bp, Homo sapiens
ctgggcagggggaag

SEQ ID NO: 782243 - DNA, 15 bp, Homo sapiens
tgggcagggggaagg

SEQ ID NO: 782244 - DNA, 15 bp, Homo sapiens
gggcagggggaagga

SEQ ID NO: 782245 - DNA, 15 bp, Homo sapiens
ggcagggggaaggat

SEQ ID NO: 782246 - DNA, 15 bp, Homo sapiens
gcagggggaaggatg

SEQ ID NO: 782247 - DNA, 15 bp, Homo sapiens
cagggggaaggatgc

SEQ ID NO: 782248 - DNA, 15 bp, Homo sapiens
agggggaaggatgcc

SEQ ID NO: 782249 - DNA, 15 bp, Homo sapiens
gggggaaggatgccg

SEQ ID NO: 782250 - DNA, 15 bp, Homo sapiens
ggggaaggatgccgt

SEQ ID NO: 782251 - DNA, 15 bp, Homo sapiens
gggaaggatgccgtg

SEQ ID NO: 782252 - DNA, 15 bp, Homo sapiens
ggaaggatgccgtgg

SEQ ID NO: 782253 - DNA, 15 bp, Homo sapiens
gaaggatgccgtggg

SEQ ID NO: 782254 - DNA, 15 bp, Homo sapiens
aaggatgccgtggga

SEQ ID NO: 782255 - DNA, 15 bp, Homo sapiens
aggatgccgtgggag

SEQ ID NO: 782256 - DNA, 15 bp, Homo sapiens
ggatgccgtgggagg

SEQ ID NO: 782257 - DNA, 15 bp, Homo sapiens
gatgccgtgggagga

SEQ ID NO: 782258 - DNA, 15 bp, Homo sapiens
atgccgtgggaggag

SEQ ID NO: 782259 - DNA, 15 bp, Homo sapiens
tgccgtgggaggagg

SEQ ID NO: 782260 - DNA, 15 bp, Homo sapiens
gccgtgggaggaggg

SEQ ID NO: 782261 - DNA, 15 bp, Homo sapiens
ccgtgggaggagggg

SEQ ID NO: 782262 - DNA, 15 bp, Homo sapiens
cgtgggaggaggggg

SEQ ID NO: 782263 - DNA, 15 bp, Homo sapiens
gtgggaggagggggc

SEQ ID NO: 782264 - DNA, 15 bp, Homo sapiens
tgggaggagggggcc

SEQ ID NO: 782265 - DNA, 15 bp, Homo sapiens
gggaggagggggcca

SEQ ID NO: 782266 - DNA, 15 bp, Homo sapiens
ggaggagggggccat

SEQ ID NO: 782267 - DNA, 15 bp, Homo sapiens
gaggagggggccata

SEQ ID NO: 782268 - DNA, 15 bp, Homo sapiens
aggagggggccatat

SEQ ID NO: 782269 - DNA, 15 bp, Homo sapiens
ggagggggccatatt

SEQ ID NO: 782270 - DNA, 15 bp, Homo sapiens
gagggggccatattc

SEQ ID NO: 782271 - DNA, 15 bp, Homo sapiens
agggggccatattcc

SEQ ID NO: 782272 - DNA, 15 bp, Homo sapiens
gggggccatattcca

SEQ ID NO: 782273 - DNA, 15 bp, Homo sapiens
ggggccatattccaa

SEQ ID NO: 782274 - DNA, 15 bp, Homo sapiens
gggccatattccaaa

SEQ ID NO: 782275 - DNA, 15 bp, Homo sapiens
ggccatattccaaag

SEQ ID NO: 782276 - DNA, 15 bp, Homo sapiens
gccatattccaaagg

SEQ ID NO: 782277 - DNA, 15 bp, Homo sapiens
ccatattccaaaggg

SEQ ID NO: 782278 - DNA, 15 bp, Homo sapiens
catattccaaagggc

SEQ ID NO: 782279 - DNA, 15 bp, Homo sapiens
atattccaaagggcc

SEQ ID NO: 782280 - DNA, 15 bp, Homo sapiens
tattccaaagggcca

SEQ ID NO: 782281 - DNA, 15 bp, Homo sapiens
attccaaagggccag

SEQ ID NO: 782282 - DNA, 15 bp, Homo sapiens
ttccaaagggccagc

SEQ ID NO: 782283 - DNA, 15 bp, Homo sapiens
tccaaagggccagct

SEQ ID NO: 782284 - DNA, 15 bp, Homo sapiens
ccaaagggccagctc

SEQ ID NO: 782285 - DNA, 15 bp, Homo sapiens
caaagggccagctca

SEQ ID NO: 782286 - DNA, 15 bp, Homo sapiens
aaagggccagctcaa

SEQ ID NO: 782287 - DNA, 15 bp, Homo sapiens
aagggccagctcaat

SEQ ID NO: 782288 - DNA, 15 bp, Homo sapiens
agggccagctcaatg

SEQ ID NO: 782289 - DNA, 15 bp, Homo sapiens
gggccagctcaatga

SEQ ID NO: 782290 - DNA, 15 bp, Homo sapiens
ggccagctcaatgag

SEQ ID NO: 782291 - DNA, 15 bp, Homo sapiens
gccagctcaatgaga

SEQ ID NO: 782292 - DNA, 15 bp, Homo sapiens
ccagctcaatgagaa

SEQ ID NO: 782293 - DNA, 15 bp, Homo sapiens
cagctcaatgagaag

SEQ ID NO: 782294 - DNA, 15 bp, Homo sapiens
agctcaatgagaagg

SEQ ID NO: 782295 - DNA, 15 bp, Homo sapiens
gctcaatgagaagga

SEQ ID NO: 782296 - DNA, 15 bp, Homo sapiens
ctcaatgagaaggag

SEQ ID NO: 782297 - DNA, 15 bp, Homo sapiens
tcaatgagaaggagt

SEQ ID NO: 782298 - DNA, 15 bp, Homo sapiens
caatgagaaggagtt

SEQ ID NO: 782299 - DNA, 15 bp, Homo sapiens
aatgagaaggagttg

SEQ ID NO: 782300 - DNA, 15 bp, Homo sapiens
atgagaaggagttgg

SEQ ID NO: 782301 - DNA, 15 bp, Homo sapiens
tgagaaggagttggc

SEQ ID NO: 782302 - DNA, 15 bp, Homo sapiens
gagaaggagttggct

SEQ ID NO: 782303 - DNA, 15 bp, Homo sapiens
agaaggagttggctt

SEQ ID NO: 782304 - DNA, 15 bp, Homo sapiens
gaaggagttggcttc

SEQ ID NO: 782305 - DNA, 15 bp, Homo sapiens
aaggagttggcttct

SEQ ID NO: 782306 - DNA, 15 bp, Homo sapiens
aggagttggcttctt

SEQ ID NO: 782307 - DNA, 15 bp, Homo sapiens
ggagttggcttcttt

SEQ ID NO: 782308 - DNA, 15 bp, Homo sapiens
gagttggcttctttt

SEQ ID NO: 782309 - DNA, 15 bp, Homo sapiens
agttggcttcttttg

SEQ ID NO: 782310 - DNA, 15 bp, Homo sapiens
gttggcttcttttga

SEQ ID NO: 782311 - DNA, 15 bp, Homo sapiens
ttggcttcttttgaa

SEQ ID NO: 782312 - DNA, 15 bp, Homo sapiens
tggcttcttttgaat

SEQ ID NO: 782313 - DNA, 15 bp, Homo sapiens
ggcttcttttgaatc

SEQ ID NO: 782314 - DNA, 15 bp, Homo sapiens
gcttcttttgaatca

SEQ ID NO: 782315 - DNA, 15 bp, Homo sapiens
cttcttttgaatcat

SEQ ID NO: 782316 - DNA, 15 bp, Homo sapiens
ttcttttgaatcatt

SEQ ID NO: 782317 - DNA, 15 bp, Homo sapiens
tcttttgaatcattt

SEQ ID NO: 782318 - DNA, 15 bp, Homo sapiens
cttttgaatcatttc

SEQ ID NO: 782319 - DNA, 15 bp, Homo sapiens
ttttgaatcatttca

SEQ ID NO: 782320 - DNA, 15 bp, Homo sapiens
tttgaatcatttcag

SEQ ID NO: 782321 - DNA, 15 bp, Homo sapiens
ttgaatcatttcagc

SEQ ID NO: 782322 - DNA, 15 bp, Homo sapiens
tgaatcatttcagcc

SEQ ID NO: 782323 - DNA, 15 bp, Homo sapiens
gaatcatttcagcca

SEQ ID NO: 782324 - DNA, 15 bp, Homo sapiens
aatcatttcagccat

SEQ ID NO: 782325 - DNA, 15 bp, Homo sapiens
atcatttcagccatg

SEQ ID NO: 782326 - DNA, 15 bp, Homo sapiens
tcatttcagccatgg

SEQ ID NO: 782327 - DNA, 15 bp, Homo sapiens
catttcagccatgga

SEQ ID NO: 782328 - DNA, 15 bp, Homo sapiens
atttcagccatggag

SEQ ID NO: 782329 - DNA, 15 bp, Homo sapiens
tttcagccatggagc

SEQ ID NO: 782330 - DNA, 15 bp, Homo sapiens
ttcagccatggagct

SEQ ID NO: 782331 - DNA, 15 bp, Homo sapiens
tcagccatggagctc

SEQ ID NO: 782332 - DNA, 15 bp, Homo sapiens
cagccatggagctct

SEQ ID NO: 782333 - DNA, 15 bp, Homo sapiens
agccatggagctctc

SEQ ID NO: 782334 - DNA, 15 bp, Homo sapiens
gccatggagctctct

SEQ ID NO: 782335 - DNA, 15 bp, Homo sapiens
ccatggagctctctt

SEQ ID NO: 782336 - DNA, 15 bp, Homo sapiens
catggagctctcttt

SEQ ID NO: 782337 - DNA, 15 bp, Homo sapiens
atggagctctctttt

SEQ ID NO: 782338 - DNA, 15 bp, Homo sapiens
tggagctctcttttg

SEQ ID NO: 782339 - DNA, 15 bp, Homo sapiens
ggagctctcttttgg

SEQ ID NO: 782340 - DNA, 15 bp, Homo sapiens
gagctctcttttgga

SEQ ID NO: 782341 - DNA, 15 bp, Homo sapiens
agctctcttttggaa

SEQ ID NO: 782342 - DNA, 15 bp, Homo sapiens
gctctcttttggaac

SEQ ID NO: 782343 - DNA, 15 bp, Homo sapiens
ctctcttttggaacc

SEQ ID NO: 782344 - DNA, 15 bp, Homo sapiens
tctcttttggaacct

SEQ ID NO: 782345 - DNA, 15 bp, Homo sapiens
ctcttttggaacctt

SEQ ID NO: 782346 - DNA, 15 bp, Homo sapiens
tcttttggaaccttc

SEQ ID NO: 782347 - DNA, 15 bp, Homo sapiens
cttttggaaccttcc

SEQ ID NO: 782348 - DNA, 15 bp, Homo sapiens
ttttggaaccttcct

SEQ ID NO: 782349 - DNA, 15 bp, Homo sapiens
tttggaaccttcctc

SEQ ID NO: 782350 - DNA, 15 bp, Homo sapiens
ttggaaccttcctca

SEQ ID NO: 782351 - DNA, 15 bp, Homo sapiens
tggaaccttcctcag

SEQ ID NO: 782352 - DNA, 15 bp, Homo sapiens
ggaaccttcctcagt

SEQ ID NO: 782353 - DNA, 15 bp, Homo sapiens
gaaccttcctcagtt

SEQ ID NO: 782354 - DNA, 15 bp, Homo sapiens
aaccttcctcagttg

SEQ ID NO: 782355 - DNA, 15 bp, Homo sapiens
accttcctcagttgg

SEQ ID NO: 782356 - DNA, 15 bp, Homo sapiens
ccttcctcagttgga

SEQ ID NO: 782357 - DNA, 15 bp, Homo sapiens
cttcctcagttggaa

SEQ ID NO: 782358 - DNA, 15 bp, Homo sapiens
ttcctcagttggaag

SEQ ID NO: 782359 - DNA, 15 bp, Homo sapiens
tcctcagttggaagc

SEQ ID NO: 782360 - DNA, 15 bp, Homo sapiens
cctcagttggaagcc

SEQ ID NO: 782361 - DNA, 15 bp, Homo sapiens
ctcagttggaagcct

SEQ ID NO: 782362 - DNA, 15 bp, Homo sapiens
tcagttggaagcctc

SEQ ID NO: 782363 - DNA, 15 bp, Homo sapiens
cagttggaagcctct

SEQ ID NO: 782364 - DNA, 15 bp, Homo sapiens
agttggaagcctcta

SEQ ID NO: 782365 - DNA, 15 bp, Homo sapiens
gttggaagcctctaa

SEQ ID NO: 782366 - DNA, 15 bp, Homo sapiens
ttggaagcctctaag

SEQ ID NO: 782367 - DNA, 15 bp, Homo sapiens
tggaagcctctaagg

SEQ ID NO: 782368 - DNA, 15 bp, Homo sapiens
ggaagcctctaaggg

SEQ ID NO: 782369 - DNA, 15 bp, Homo sapiens
gaagcctctaagggg

SEQ ID NO: 782370 - DNA, 15 bp, Homo sapiens
aagcctctaagggga

SEQ ID NO: 782371 - DNA, 15 bp, Homo sapiens
agcctctaaggggat

SEQ ID NO: 782372 - DNA, 15 bp, Homo sapiens
gcctctaaggggatg

SEQ ID NO: 782373 - DNA, 15 bp, Homo sapiens
cctctaaggggatgt

SEQ ID NO: 782374 - DNA, 15 bp, Homo sapiens
ctctaaggggatgtt

SEQ ID NO: 782375 - DNA, 15 bp, Homo sapiens
tctaaggggatgttg

SEQ ID NO: 782376 - DNA, 15 bp, Homo sapiens
ctaaggggatgttgt

SEQ ID NO: 782377 - DNA, 15 bp, Homo sapiens
taaggggatgttgtt

SEQ ID NO: 782378 - DNA, 15 bp, Homo sapiens
aaggggatgttgttc

SEQ ID NO: 782379 - DNA, 15 bp, Homo sapiens
aggggatgttgttcc

SEQ ID NO: 782380 - DNA, 15 bp, Homo sapiens
ggggatgttgttcct

SEQ ID NO: 782381 - DNA, 15 bp, Homo sapiens
gggatgttgttccta

SEQ ID NO: 782382 - DNA, 15 bp, Homo sapiens
ggatgttgttcctag

SEQ ID NO: 782383 - DNA, 15 bp, Homo sapiens
gatgttgttcctagt

SEQ ID NO: 782384 - DNA, 15 bp, Homo sapiens
atgttgttcctagtt

SEQ ID NO: 782385 - DNA, 15 bp, Homo sapiens
tgttgttcctagttg

SEQ ID NO: 782386 - DNA, 15 bp, Homo sapiens
gttgttcctagttgg

SEQ ID NO: 782387 - DNA, 15 bp, Homo sapiens
ttgttcctagttggt

SEQ ID NO: 782388 - DNA, 15 bp, Homo sapiens
tgttcctagttggta

SEQ ID NO: 782389 - DNA, 15 bp, Homo sapiens
gttcctagttggtat

SEQ ID NO: 782390 - DNA, 15 bp, Homo sapiens
ttcctagttggtatc

SEQ ID NO: 782391 - DNA, 15 bp, Homo sapiens
tcctagttggtatca

SEQ ID NO: 782392 - DNA, 15 bp, Homo sapiens
cctagttggtatcaa

SEQ ID NO: 782393 - DNA, 15 bp, Homo sapiens
ctagttggtatcaaa

SEQ ID NO: 782394 - DNA, 15 bp, Homo sapiens
tagttggtatcaaac

SEQ ID NO: 782395 - DNA, 15 bp, Homo sapiens
agttggtatcaaacg

SEQ ID NO: 782396 - DNA, 15 bp, Homo sapiens
gttggtatcaaacgt

SEQ ID NO: 782397 - DNA, 15 bp, Homo sapiens
ttggtatcaaacgtg

SEQ ID NO: 782398 - DNA, 15 bp, Homo sapiens
tggtatcaaacgtgg

SEQ ID NO: 782399 - DNA, 15 bp, Homo sapiens
ggtatcaaacgtggt

SEQ ID NO: 782400 - DNA, 15 bp, Homo sapiens
gtatcaaacgtggtg

SEQ ID NO: 782401 - DNA, 15 bp, Homo sapiens
tatcaaacgtggtga

SEQ ID NO: 782402 - DNA, 15 bp, Homo sapiens
atcaaacgtggtgac

SEQ ID NO: 782403 - DNA, 15 bp, Homo sapiens
tcaaacgtggtgacc

SEQ ID NO: 782404 - DNA, 15 bp, Homo sapiens
caaacgtggtgaccc

SEQ ID NO: 782405 - DNA, 15 bp, Homo sapiens
aaacgtggtgacccc

SEQ ID NO: 782406 - DNA, 15 bp, Homo sapiens
aacgtggtgacccca

SEQ ID NO: 782407 - DNA, 15 bp, Homo sapiens
acgtggtgaccccac

SEQ ID NO: 782408 - DNA, 15 bp, Homo sapiens
cgtggtgaccccact

SEQ ID NO: 782409 - DNA, 15 bp, Homo sapiens
gtggtgaccccacta

SEQ ID NO: 782410 - DNA, 15 bp, Homo sapiens
tggtgaccccactag

SEQ ID NO: 782411 - DNA, 15 bp, Homo sapiens
ggtgaccccactagc

SEQ ID NO: 782412 - DNA, 15 bp, Homo sapiens
gtgaccccactagcc

SEQ ID NO: 782413 - DNA, 15 bp, Homo sapiens
tgaccccactagccc

SEQ ID NO: 782414 - DNA, 15 bp, Homo sapiens
gaccccactagcccc

SEQ ID NO: 782415 - DNA, 15 bp, Homo sapiens
accccactagcccca

SEQ ID NO: 782416 - DNA, 15 bp, Homo sapiens
ccccactagccccaa

SEQ ID NO: 782417 - DNA, 15 bp, Homo sapiens
cccactagccccaaa

SEQ ID NO: 782418 - DNA, 15 bp, Homo sapiens
ccactagccccaaat

SEQ ID NO: 782419 - DNA, 15 bp, Homo sapiens
cactagccccaaatt

SEQ ID NO: 782420 - DNA, 15 bp, Homo sapiens
actagccccaaattt

SEQ ID NO: 782421 - DNA, 15 bp, Homo sapiens
ctagccccaaatttg

SEQ ID NO: 782422 - DNA, 15 bp, Homo sapiens
tagccccaaatttga

SEQ ID NO: 782423 - DNA, 15 bp, Homo sapiens
agccccaaatttgac

SEQ ID NO: 782424 - DNA, 15 bp, Homo sapiens
gccccaaatttgact

SEQ ID NO: 782425 - DNA, 15 bp, Homo sapiens
ccccaaatttgactg

SEQ ID NO: 782426 - DNA, 15 bp, Homo sapiens
cccaaatttgactgg

SEQ ID NO: 782427 - DNA, 15 bp, Homo sapiens
ccaaatttgactgga

SEQ ID NO: 782428 - DNA, 15 bp, Homo sapiens
caaatttgactggaa

SEQ ID NO: 782429 - DNA, 15 bp, Homo sapiens
aaatttgactggaag

SEQ ID NO: 782430 - DNA, 15 bp, Homo sapiens
aatttgactggaaga

SEQ ID NO: 782431 - DNA, 15 bp, Homo sapiens
atttgactggaagag

SEQ ID NO: 782432 - DNA, 15 bp, Homo sapiens
tttgactggaagagc

SEQ ID NO: 782433 - DNA, 15 bp, Homo sapiens
ttgactggaagagcc

SEQ ID NO: 782434 - DNA, 15 bp, Homo sapiens
tgactggaagagcct

SEQ ID NO: 782435 - DNA, 15 bp, Homo sapiens
gactggaagagcctc

SEQ ID NO: 782436 - DNA, 15 bp, Homo sapiens
actggaagagcctcc

SEQ ID NO: 782437 - DNA, 15 bp, Homo sapiens
ctggaagagcctcct

SEQ ID NO: 782438 - DNA, 15 bp, Homo sapiens
tggaagagcctcctt

SEQ ID NO: 782439 - DNA, 15 bp, Homo sapiens
ggaagagcctccttt

SEQ ID NO: 782440 - DNA, 15 bp, Homo sapiens
gaagagcctcctttc

SEQ ID NO: 782441 - DNA, 15 bp, Homo sapiens
aagagcctcctttcc

SEQ ID NO: 782442 - DNA, 15 bp, Homo sapiens
agagcctcctttcca

SEQ ID NO: 782443 - DNA, 15 bp, Homo sapiens
gagcctcctttccaa

SEQ ID NO: 782444 - DNA, 15 bp, Homo sapiens
agcctcctttccaat

SEQ ID NO: 782445 - DNA, 15 bp, Homo sapiens
gcctcctttccaatt

SEQ ID NO: 782446 - DNA, 15 bp, Homo sapiens
cctcctttccaattg

SEQ ID NO: 782447 - DNA, 15 bp, Homo sapiens
ctcctttccaattga

SEQ ID NO: 782448 - DNA, 15 bp, Homo sapiens
tcctttccaattgag

SEQ ID NO: 782449 - DNA, 15 bp, Homo sapiens
cctttccaattgagt

SEQ ID NO: 782450 - DNA, 15 bp, Homo sapiens
ctttccaattgagta

SEQ ID NO: 782451 - DNA, 15 bp, Homo sapiens
tttccaattgagtat

SEQ ID NO: 782452 - DNA, 15 bp, Homo sapiens
ttccaattgagtatc

SEQ ID NO: 782453 - DNA, 15 bp, Homo sapiens
tccaattgagtatcc

SEQ ID NO: 782454 - DNA, 15 bp, Homo sapiens
ccaattgagtatcct

SEQ ID NO: 782455 - DNA, 15 bp, Homo sapiens
caattgagtatcctc

SEQ ID NO: 782456 - DNA, 15 bp, Homo sapiens
aattgagtatcctct

SEQ ID NO: 782457 - DNA, 15 bp, Homo sapiens
attgagtatcctctg

SEQ ID NO: 782458 - DNA, 15 bp, Homo sapiens
ttgagtatcctctgc

SEQ ID NO: 782459 - DNA, 15 bp, Homo sapiens
tgagtatcctctgct

SEQ ID NO: 782460 - DNA, 15 bp, Homo sapiens
gagtatcctctgctt

SEQ ID NO: 782461 - DNA, 15 bp, Homo sapiens
agtatcctctgcttg

SEQ ID NO: 782462 - DNA, 15 bp, Homo sapiens
gtatcctctgcttga

SEQ ID NO: 782463 - DNA, 15 bp, Homo sapiens
tatcctctgcttgag

SEQ ID NO: 782464 - DNA, 15 bp, Homo sapiens
atcctctgcttgagg

SEQ ID NO: 782465 - DNA, 15 bp, Homo sapiens
tcctctgcttgagga

SEQ ID NO: 782466 - DNA, 15 bp, Homo sapiens
cctctgcttgaggag

SEQ ID NO: 782467 - DNA, 15 bp, Homo sapiens
ctctgcttgaggagc

SEQ ID NO: 782468 - DNA, 15 bp, Homo sapiens
tctgcttgaggagct

SEQ ID NO: 782469 - DNA, 15 bp, Homo sapiens
ctgcttgaggagctc

SEQ ID NO: 782470 - DNA, 15 bp, Homo sapiens
tgcttgaggagctct

SEQ ID NO: 782471 - DNA, 15 bp, Homo sapiens
gcttgaggagctctt

SEQ ID NO: 782472 - DNA, 15 bp, Homo sapiens
cttgaggagctcttg

SEQ ID NO: 782473 - DNA, 15 bp, Homo sapiens
ttgaggagctcttgg

SEQ ID NO: 782474 - DNA, 15 bp, Homo sapiens
tgaggagctcttggg

SEQ ID NO: 782475 - DNA, 15 bp, Homo sapiens
gaggagctcttgggt

SEQ ID NO: 782476 - DNA, 15 bp, Homo sapiens
aggagctcttgggtg

SEQ ID NO: 782477 - DNA, 15 bp, Homo sapiens
ggagctcttgggtga

SEQ ID NO: 782478 - DNA, 15 bp, Homo sapiens
gagctcttgggtgag

SEQ ID NO: 782479 - DNA, 15 bp, Homo sapiens
agctcttgggtgaga

SEQ ID NO: 782480 - DNA, 15 bp, Homo sapiens
gctcttgggtgagat

SEQ ID NO: 782481 - DNA, 15 bp, Homo sapiens
ctcttgggtgagata

SEQ ID NO: 782482 - DNA, 15 bp, Homo sapiens
tcttgggtgagataa

SEQ ID NO: 782483 - DNA, 15 bp, Homo sapiens
cttgggtgagataac

SEQ ID NO: 782484 - DNA, 15 bp, Homo sapiens
ttgggtgagataaca

SEQ ID NO: 782485 - DNA, 15 bp, Homo sapiens
tgggtgagataacag

SEQ ID NO: 782486 - DNA, 15 bp, Homo sapiens
gggtgagataacagc

SEQ ID NO: 782487 - DNA, 15 bp, Homo sapiens
ggtgagataacagcc

SEQ ID NO: 782488 - DNA, 15 bp, Homo sapiens
gtgagataacagccc

SEQ ID NO: 782489 - DNA, 15 bp, Homo sapiens
tgagataacagcccc

SEQ ID NO: 782490 - DNA, 15 bp, Homo sapiens
gagataacagcccct

SEQ ID NO: 782491 - DNA, 15 bp, Homo sapiens
agataacagccccta

SEQ ID NO: 782492 - DNA, 15 bp, Homo sapiens
gataacagcccctat

SEQ ID NO: 782493 - DNA, 15 bp, Homo sapiens
ataacagcccctatc

SEQ ID NO: 782494 - DNA, 15 bp, Homo sapiens
taacagcccctatcc

SEQ ID NO: 782495 - DNA, 15 bp, Homo sapiens
aacagcccctatcct

SEQ ID NO: 782496 - DNA, 15 bp, Homo sapiens
acagcccctatcctt

SEQ ID NO: 782497 - DNA, 15 bp, Homo sapiens
cagcccctatccttt

SEQ ID NO: 782498 - DNA, 15 bp, Homo sapiens
agcccctatcctttg

SEQ ID NO: 782499 - DNA, 15 bp, Homo sapiens
gcccctatcctttgc

SEQ ID NO: 782500 - DNA, 15 bp, Homo sapiens
cccctatcctttgct

SEQ ID NO: 782501 - DNA, 15 bp, Homo sapiens
ccctatcctttgctc

SEQ ID NO: 782502 - DNA, 15 bp, Homo sapiens
cctatcctttgctct

SEQ ID NO: 782503 - DNA, 15 bp, Homo sapiens
ctatcctttgctctt

SEQ ID NO: 782504 - DNA, 15 bp, Homo sapiens
tatcctttgctcttt

SEQ ID NO: 782505 - DNA, 15 bp, Homo sapiens
atcctttgctctttg

SEQ ID NO: 782506 - DNA, 15 bp, Homo sapiens
tcctttgctctttgt

SEQ ID NO: 782507 - DNA, 15 bp, Homo sapiens
cctttgctctttgta

SEQ ID NO: 782508 - DNA, 15 bp, Homo sapiens
ctttgctctttgtat

SEQ ID NO: 782509 - DNA, 15 bp, Homo sapiens
tttgctctttgtatt

SEQ ID NO: 782510 - DNA, 15 bp, Homo sapiens
ttgctctttgtattg

SEQ ID NO: 782511 - DNA, 15 bp, Homo sapiens
tgctctttgtattgc

SEQ ID NO: 782512 - DNA, 15 bp, Homo sapiens
gctctttgtattgct

SEQ ID NO: 782513 - DNA, 15 bp, Homo sapiens
ctctttgtattgctt

SEQ ID NO: 782514 - DNA, 15 bp, Homo sapiens
tctttgtattgcttt

SEQ ID NO: 782515 - DNA, 15 bp, Homo sapiens
ctttgtattgctttt

SEQ ID NO: 782516 - DNA, 15 bp, Homo sapiens
tttgtattgcttttg

SEQ ID NO: 782517 - DNA, 15 bp, Homo sapiens
ttgtattgcttttga

SEQ ID NO: 782518 - DNA, 15 bp, Homo sapiens
tgtattgcttttgac

SEQ ID NO: 782519 - DNA, 15 bp, Homo sapiens
gtattgcttttgact

SEQ ID NO: 782520 - DNA, 15 bp, Homo sapiens
tattgcttttgactg

SEQ ID NO: 782521 - DNA, 15 bp, Homo sapiens
attgcttttgactga

SEQ ID NO: 782522 - DNA, 15 bp, Homo sapiens
ttgcttttgactgaa

SEQ ID NO: 782523 - DNA, 15 bp, Homo sapiens
tgcttttgactgaac

SEQ ID NO: 782524 - DNA, 15 bp, Homo sapiens
gcttttgactgaact

SEQ ID NO: 782525 - DNA, 15 bp, Homo sapiens
cttttgactgaactg

SEQ ID NO: 782526 - DNA, 15 bp, Homo sapiens
ttttgactgaactgc

SEQ ID NO: 782527 - DNA, 15 bp, Homo sapiens
tttgactgaactgct

SEQ ID NO: 782528 - DNA, 15 bp, Homo sapiens
ttgactgaactgctg

SEQ ID NO: 782529 - DNA, 15 bp, Homo sapiens
tgactgaactgctgc

SEQ ID NO: 782530 - DNA, 15 bp, Homo sapiens
gactgaactgctgca

SEQ ID NO: 782531 - DNA, 15 bp, Homo sapiens
actgaactgctgcaa

SEQ ID NO: 782532 - DNA, 15 bp, Homo sapiens
ctgaactgctgcaaa

SEQ ID NO: 782533 - DNA, 15 bp, Homo sapiens
tgaactgctgcaaat

SEQ ID NO: 782534 - DNA, 15 bp, Homo sapiens
gaactgctgcaaatc

SEQ ID NO: 782535 - DNA, 15 bp, Homo sapiens
aactgctgcaaatca

SEQ ID NO: 782536 - DNA, 15 bp, Homo sapiens
actgctgcaaatcat

SEQ ID NO: 782537 - DNA, 15 bp, Homo sapiens
ctgctgcaaatcatg

SEQ ID NO: 782538 - DNA, 15 bp, Homo sapiens
tgctgcaaatcatgg

SEQ ID NO: 782539 - DNA, 15 bp, Homo sapiens
gctgcaaatcatggg

SEQ ID NO: 782540 - DNA, 15 bp, Homo sapiens
ctgcaaatcatgggg

SEQ ID NO: 782541 - DNA, 15 bp, Homo sapiens
tgcaaatcatggggc

SEQ ID NO: 782542 - DNA, 15 bp, Homo sapiens
gcaaatcatggggcc

SEQ ID NO: 782543 - DNA, 15 bp, Homo sapiens
caaatcatggggccc

SEQ ID NO: 782544 - DNA, 15 bp, Homo sapiens
aaatcatggggcccc

SEQ ID NO: 782545 - DNA, 15 bp, Homo sapiens
aatcatggggcccct

SEQ ID NO: 782546 - DNA, 15 bp, Homo sapiens
atcatggggcccctg

SEQ ID NO: 782547 - DNA, 15 bp, Homo sapiens
tcatggggcccctga

SEQ ID NO: 782548 - DNA, 15 bp, Homo sapiens
catggggcccctgaa

SEQ ID NO: 782549 - DNA, 15 bp, Homo sapiens
atggggcccctgaaa

SEQ ID NO: 782550 - DNA, 15 bp, Homo sapiens
tggggcccctgaaag

SEQ ID NO: 782551 - DNA, 15 bp, Homo sapiens
ggggcccctgaaagt

SEQ ID NO: 782552 - DNA, 15 bp, Homo sapiens
gggcccctgaaagtc

SEQ ID NO: 782553 - DNA, 15 bp, Homo sapiens
ggcccctgaaagtcc

SEQ ID NO: 782554 - DNA, 15 bp, Homo sapiens
gcccctgaaagtcca

SEQ ID NO: 782555 - DNA, 15 bp, Homo sapiens
cccctgaaagtccat

SEQ ID NO: 782556 - DNA, 15 bp, Homo sapiens
ccctgaaagtccatc

SEQ ID NO: 782557 - DNA, 15 bp, Homo sapiens
cctgaaagtccatcc

SEQ ID NO: 782558 - DNA, 15 bp, Homo sapiens
ctgaaagtccatccc

SEQ ID NO: 782559 - DNA, 15 bp, Homo sapiens
tgaaagtccatccct

SEQ ID NO: 782560 - DNA, 15 bp, Homo sapiens
gaaagtccatccctc

SEQ ID NO: 782561 - DNA, 15 bp, Homo sapiens
aaagtccatccctcc

SEQ ID NO: 782562 - DNA, 15 bp, Homo sapiens
aagtccatccctcct

SEQ ID NO: 782563 - DNA, 15 bp, Homo sapiens
agtccatccctcctc

SEQ ID NO: 782564 - DNA, 15 bp, Homo sapiens
gtccatccctcctcc

SEQ ID NO: 782565 - DNA, 15 bp, Homo sapiens
tccatccctcctcca

SEQ ID NO: 782566 - DNA, 15 bp, Homo sapiens
ccatccctcctccag

SEQ ID NO: 782567 - DNA, 15 bp, Homo sapiens
catccctcctccaga

SEQ ID NO: 782568 - DNA, 15 bp, Homo sapiens
atccctcctccagag

SEQ ID NO: 782569 - DNA, 15 bp, Homo sapiens
tccctcctccagagg

SEQ ID NO: 782570 - DNA, 15 bp, Homo sapiens
ccctcctccagaggt

SEQ ID NO: 782571 - DNA, 15 bp, Homo sapiens
cctcctccagaggta

SEQ ID NO: 782572 - DNA, 15 bp, Homo sapiens
ctcctccagaggtag

SEQ ID NO: 782573 - DNA, 15 bp, Homo sapiens
tcctccagaggtaga

SEQ ID NO: 782574 - DNA, 15 bp, Homo sapiens
cctccagaggtagaa

SEQ ID NO: 782575 - DNA, 15 bp, Homo sapiens
ctccagaggtagaag

SEQ ID NO: 782576 - DNA, 15 bp, Homo sapiens
tccagaggtagaagc

SEQ ID NO: 782577 - DNA, 15 bp, Homo sapiens
ccagaggtagaagcg

SEQ ID NO: 782578 - DNA, 15 bp, Homo sapiens
cagaggtagaagcgc

SEQ ID NO: 782579 - DNA, 15 bp, Homo sapiens
agaggtagaagcgcc

SEQ ID NO: 782580 - DNA, 15 bp, Homo sapiens
gaggtagaagcgcct

SEQ ID NO: 782581 - DNA, 15 bp, Homo sapiens
aggtagaagcgcctc

SEQ ID NO: 782582 - DNA, 15 bp, Homo sapiens
ggtagaagcgcctcc

SEQ ID NO: 782583 - DNA, 15 bp, Homo sapiens
gtagaagcgcctcca

SEQ ID NO: 782584 - DNA, 15 bp, Homo sapiens
tagaagcgcctccat

SEQ ID NO: 782585 - DNA, 15 bp, Homo sapiens
agaagcgcctccatc

SEQ ID NO: 782586 - DNA, 15 bp, Homo sapiens
gaagcgcctccatct

SEQ ID NO: 782587 - DNA, 15 bp, Homo sapiens
aagcgcctccatctc

SEQ ID NO: 782588 - DNA, 15 bp, Homo sapiens
agcgcctccatctct

SEQ ID NO: 782589 - DNA, 15 bp, Homo sapiens
gcgcctccatctctg

SEQ ID NO: 782590 - DNA, 15 bp, Homo sapiens
cgcctccatctctgt

SEQ ID NO: 782591 - DNA, 15 bp, Homo sapiens
gcctccatctctgtg

SEQ ID NO: 782592 - DNA, 15 bp, Homo sapiens
cctccatctctgtgt

SEQ ID NO: 782593 - DNA, 15 bp, Homo sapiens
ctccatctctgtgta

SEQ ID NO: 782594 - DNA, 15 bp, Homo sapiens
tccatctctgtgtac

SEQ ID NO: 782595 - DNA, 15 bp, Homo sapiens
ccatctctgtgtacc

SEQ ID NO: 782596 - DNA, 15 bp, Homo sapiens
catctctgtgtacct

SEQ ID NO: 782597 - DNA, 15 bp, Homo sapiens
atctctgtgtacctg

SEQ ID NO: 782598 - DNA, 15 bp, Homo sapiens
tctctgtgtacctga

SEQ ID NO: 782599 - DNA, 15 bp, Homo sapiens
ctctgtgtacctgaa

SEQ ID NO: 782600 - DNA, 15 bp, Homo sapiens
tctgtgtacctgaaa

SEQ ID NO: 782601 - DNA, 15 bp, Homo sapiens
ctgtgtacctgaaaa

SEQ ID NO: 782602 - DNA, 15 bp, Homo sapiens
tgtgtacctgaaaac

SEQ ID NO: 782603 - DNA, 15 bp, Homo sapiens
gtgtacctgaaaaca

SEQ ID NO: 782604 - DNA, 15 bp, Homo sapiens
tgtacctgaaaacaa

SEQ ID NO: 782605 - DNA, 15 bp, Homo sapiens
gtacctgaaaacaat

SEQ ID NO: 782606 - DNA, 15 bp, Homo sapiens
tacctgaaaacaata

SEQ ID NO: 782607 - DNA, 15 bp, Homo sapiens
acctgaaaacaataa

SEQ ID NO: 782608 - DNA, 15 bp, Homo sapiens
cctgaaaacaataaa

SEQ ID NO: 782609 - DNA, 15 bp, Homo sapiens
ctgaaaacaataaaa

SEQ ID NO: 782610 - DNA, 15 bp, Homo sapiens
tgaaaacaataaaag

SEQ ID NO: 782611 - DNA, 15 bp, Homo sapiens
gaaaacaataaaagg

SEQ ID NO: 782612 - DNA, 15 bp, Homo sapiens
aaaacaataaaaggc

SEQ ID NO: 782613 - DNA, 15 bp, Homo sapiens
aaacaataaaaggca

SEQ ID NO: 782614 - DNA, 15 bp, Homo sapiens
aacaataaaaggcat

SEQ ID NO: 782615 - DNA, 15 bp, Homo sapiens
acaataaaaggcatg

SEQ ID NO: 782616 - DNA, 15 bp, Homo sapiens
caataaaaggcatgt

SEQ ID NO: 782617 - DNA, 15 bp, Homo sapiens
aataaaaggcatgtt

SEQ ID NO: 782618 - DNA, 15 bp, Homo sapiens
ataaaaggcatgttt

SEQ ID NO: 782619 - DNA, 15 bp, Homo sapiens
taaaaggcatgttta

SEQ ID NO: 782620 - DNA, 15 bp, Homo sapiens
aaaaggcatgtttat

SEQ ID NO: 782621 - DNA, 15 bp, Homo sapiens
aaaggcatgtttatt

SEQ ID NO: 782622 - DNA, 15 bp, Homo sapiens
aaggcatgtttattt

SEQ ID NO: 782623 - DNA, 15 bp, Homo sapiens
aggcatgtttattta

SEQ ID NO: 782624 - DNA, 15 bp, Homo sapiens
ggcatgtttatttaa

SEQ ID NO: 782625 - DNA, 15 bp, Homo sapiens
gcatgtttatttaaa

SEQ ID NO: 782626 - DNA, 15 bp, Homo sapiens
catgtttatttaaaa

SEQ ID NO: 782627 - DNA, 15 bp, Homo sapiens
atgtttatttaaaat

SEQ ID NO: 782628 - DNA, 15 bp, Homo sapiens
tgtttatttaaaata

SEQ ID NO: 782629 - DNA, 15 bp, Homo sapiens
gtttatttaaaataa

SEQ ID NO: 782630 - DNA, 15 bp, Homo sapiens
tttatttaaaataat

SEQ ID NO: 782631 - DNA, 15 bp, Homo sapiens
ttatttaaaataatg

SEQ ID NO: 782632 - DNA, 15 bp, Homo sapiens
tatttaaaataatga

SEQ ID NO: 782633 - DNA, 15 bp, Homo sapiens
atttaaaataatgac

SEQ ID NO: 782634 - DNA, 15 bp, Homo sapiens
tttaaaataatgact

SEQ ID NO: 782635 - DNA, 15 bp, Homo sapiens
ttaaaataatgactg

SEQ ID NO: 782636 - DNA, 15 bp, Homo sapiens
taaaataatgactgc

SEQ ID NO: 782637 - DNA, 15 bp, Homo sapiens
aaaataatgactgcc

SEQ ID NO: 782638 - DNA, 15 bp, Homo sapiens
aaataatgactgccg

SEQ ID NO: 782639 - DNA, 15 bp, Homo sapiens
aataatgactgccgg

SEQ ID NO: 782640 - DNA, 15 bp, Homo sapiens
ataatgactgccgga

SEQ ID NO: 782641 - DNA, 15 bp, Homo sapiens
taatgactgccggag

SEQ ID NO: 782642 - DNA, 15 bp, Homo sapiens
aatgactgccggagg

SEQ ID NO: 782643 - DNA, 15 bp, Homo sapiens
atgactgccggaggc

SEQ ID NO: 782644 - DNA, 15 bp, Homo sapiens
tgactgccggaggcc

SEQ ID NO: 782645 - DNA, 15 bp, Homo sapiens
gactgccggaggccc

SEQ ID NO: 782646 - DNA, 15 bp, Homo sapiens
actgccggaggcccc

SEQ ID NO: 782647 - DNA, 15 bp, Homo sapiens
ctgccggaggccccc

SEQ ID NO: 782648 - DNA, 15 bp, Homo sapiens
tgccggaggccccca

SEQ ID NO: 782649 - DNA, 15 bp, Homo sapiens
gccggaggcccccag

SEQ ID NO: 782650 - DNA, 15 bp, Homo sapiens
ccggaggcccccagg

SEQ ID NO: 782651 - DNA, 15 bp, Homo sapiens
cggaggcccccagga

SEQ ID NO: 782652 - DNA, 15 bp, Homo sapiens
ggaggcccccaggag

SEQ ID NO: 782653 - DNA, 15 bp, Homo sapiens
gaggcccccaggagg

SEQ ID NO: 782654 - DNA, 15 bp, Homo sapiens
aggcccccaggaggg

SEQ ID NO: 782655 - DNA, 15 bp, Homo sapiens
ggcccccaggagggg

SEQ ID NO: 782656 - DNA, 15 bp, Homo sapiens
gcccccaggaggggc

SEQ ID NO: 782657 - DNA, 15 bp, Homo sapiens
cccccaggaggggct

SEQ ID NO: 782658 - DNA, 15 bp, Homo sapiens
ccccaggaggggctg

SEQ ID NO: 782659 - DNA, 15 bp, Homo sapiens
cccaggaggggctga

SEQ ID NO: 782660 - DNA, 15 bp, Homo sapiens
ccaggaggggctgag

SEQ ID NO: 782661 - DNA, 15 bp, Homo sapiens
caggaggggctgagg

SEQ ID NO: 782662 - DNA, 15 bp, Homo sapiens
aggaggggctgagga

SEQ ID NO: 782663 - DNA, 15 bp, Homo sapiens
ggaggggctgaggat

SEQ ID NO: 782664 - DNA, 15 bp, Homo sapiens
gaggggctgaggatc

SEQ ID NO: 782665 - DNA, 15 bp, Homo sapiens
aggggctgaggatcg

SEQ ID NO: 782666 - DNA, 15 bp, Homo sapiens
ggggctgaggatcga

SEQ ID NO: 782667 - DNA, 15 bp, Homo sapiens
gggctgaggatcgag

SEQ ID NO: 782668 - DNA, 15 bp, Homo sapiens
ggctgaggatcgagg

SEQ ID NO: 782669 - DNA, 15 bp, Homo sapiens
gctgaggatcgagga

SEQ ID NO: 782670 - DNA, 15 bp, Homo sapiens
ctgaggatcgaggaa

SEQ ID NO: 782671 - DNA, 15 bp, Homo sapiens
tgaggatcgaggaaa

SEQ ID NO: 782672 - DNA, 15 bp, Homo sapiens
gaggatcgaggaaac

SEQ ID NO: 782673 - DNA, 15 bp, Homo sapiens
aggatcgaggaaaca

SEQ ID NO: 782674 - DNA, 15 bp, Homo sapiens
ggatcgaggaaacat

SEQ ID NO: 782675 - DNA, 15 bp, Homo sapiens
gatcgaggaaacatt

SEQ ID NO: 782676 - DNA, 15 bp, Homo sapiens
atcgaggaaacatta

SEQ ID NO: 782677 - DNA, 15 bp, Homo sapiens
tcgaggaaacattac

SEQ ID NO: 782678 - DNA, 15 bp, Homo sapiens
cgaggaaacattact

SEQ ID NO: 782679 - DNA, 15 bp, Homo sapiens
gaggaaacattactg

SEQ ID NO: 782680 - DNA, 15 bp, Homo sapiens
aggaaacattactgt

SEQ ID NO: 782681 - DNA, 15 bp, Homo sapiens
ggaaacattactgtg

SEQ ID NO: 782682 - DNA, 15 bp, Homo sapiens
gaaacattactgtgg

SEQ ID NO: 782683 - DNA, 15 bp, Homo sapiens
aaacattactgtggc

SEQ ID NO: 782684 - DNA, 15 bp, Homo sapiens
aacattactgtggcc

SEQ ID NO: 782685 - DNA, 15 bp, Homo sapiens
acattactgtggcca

SEQ ID NO: 782686 - DNA, 15 bp, Homo sapiens
cattactgtggccaa

SEQ ID NO: 782687 - DNA, 15 bp, Homo sapiens
attactgtggccaaa

SEQ ID NO: 782688 - DNA, 15 bp, Homo sapiens
ttactgtggccaaag

SEQ ID NO: 782689 - DNA, 15 bp, Homo sapiens
tactgtggccaaagt

SEQ ID NO: 782690 - DNA, 15 bp, Homo sapiens
actgtggccaaagtc

SEQ ID NO: 782691 - DNA, 15 bp, Homo sapiens
ctgtggccaaagtca

SEQ ID NO: 782692 - DNA, 15 bp, Homo sapiens
tgtggccaaagtcat

SEQ ID NO: 782693 - DNA, 15 bp, Homo sapiens
gtggccaaagtcatt

SEQ ID NO: 782694 - DNA, 15 bp, Homo sapiens
tggccaaagtcattt

SEQ ID NO: 782695 - DNA, 15 bp, Homo sapiens
ggccaaagtcatttt

SEQ ID NO: 782696 - DNA, 15 bp, Homo sapiens
gccaaagtcattttt

SEQ ID NO: 782697 - DNA, 15 bp, Homo sapiens
ccaaagtcatttttt

SEQ ID NO: 782698 - DNA, 15 bp, Homo sapiens
caaagtcatttttta

SEQ ID NO: 782699 - DNA, 15 bp, Homo sapiens
aaagtcattttttat

SEQ ID NO: 782700 - DNA, 15 bp, Homo sapiens
aagtcattttttatt

SEQ ID NO: 782701 - DNA, 15 bp, Homo sapiens
agtcattttttattt

SEQ ID NO: 782702 - DNA, 15 bp, Homo sapiens
gtcattttttatttc

SEQ ID NO: 782703 - DNA, 15 bp, Homo sapiens
tcattttttatttct

SEQ ID NO: 782704 - DNA, 15 bp, Homo sapiens
cattttttatttctg

SEQ ID NO: 782705 - DNA, 15 bp, Homo sapiens
attttttatttctgg

SEQ ID NO: 782706 - DNA, 15 bp, Homo sapiens
ttttttatttctgga

SEQ ID NO: 782707 - DNA, 15 bp, Homo sapiens
tttttatttctggag

SEQ ID NO: 782708 - DNA, 15 bp, Homo sapiens
ttttatttctggagc

SEQ ID NO: 782709 - DNA, 15 bp, Homo sapiens
tttatttctggagca

SEQ ID NO: 782710 - DNA, 15 bp, Homo sapiens
ttatttctggagcaa

SEQ ID NO: 782711 - DNA, 15 bp, Homo sapiens
tatttctggagcaag

SEQ ID NO: 782712 - DNA, 15 bp, Homo sapiens
atttctggagcaagg

SEQ ID NO: 782713 - DNA, 15 bp, Homo sapiens
tttctggagcaaggt

SEQ ID NO: 782714 - DNA, 15 bp, Homo sapiens
ttctggagcaaggta

SEQ ID NO: 782715 - DNA, 15 bp, Homo sapiens
tctggagcaaggtag

SEQ ID NO: 782716 - DNA, 15 bp, Homo sapiens
ctggagcaaggtagc

SEQ ID NO: 782717 - DNA, 15 bp, Homo sapiens
tggagcaaggtagca

SEQ ID NO: 782718 - DNA, 15 bp, Homo sapiens
ggagcaaggtagcag

SEQ ID NO: 782719 - DNA, 15 bp, Homo sapiens
gagcaaggtagcaga

SEQ ID NO: 782720 - DNA, 15 bp, Homo sapiens
agcaaggtagcagac

SEQ ID NO: 782721 - DNA, 15 bp, Homo sapiens
gcaaggtagcagact

SEQ ID NO: 782722 - DNA, 15 bp, Homo sapiens
caaggtagcagactc

SEQ ID NO: 782723 - DNA, 15 bp, Homo sapiens
aaggtagcagactca

SEQ ID NO: 782724 - DNA, 15 bp, Homo sapiens
aggtagcagactcag

SEQ ID NO: 782725 - DNA, 15 bp, Homo sapiens
ggtagcagactcagg

SEQ ID NO: 782726 - DNA, 15 bp, Homo sapiens
gtagcagactcaggg

SEQ ID NO: 782727 - DNA, 15 bp, Homo sapiens
tagcagactcagggg

SEQ ID NO: 782728 - DNA, 15 bp, Homo sapiens
agcagactcaggggg

SEQ ID NO: 782729 - DNA, 15 bp, Homo sapiens
gcagactcagggggg

SEQ ID NO: 782730 - DNA, 15 bp, Homo sapiens
cagactcaggggggt

SEQ ID NO: 782731 - DNA, 15 bp, Homo sapiens
agactcaggggggtg

SEQ ID NO: 782732 - DNA, 15 bp, Homo sapiens
gactcaggggggtgg

SEQ ID NO: 782733 - DNA, 15 bp, Homo sapiens
actcaggggggtggc

SEQ ID NO: 782734 - DNA, 15 bp, Homo sapiens
ctcaggggggtggca

SEQ ID NO: 782735 - DNA, 15 bp, Homo sapiens
tcaggggggtggcag

SEQ ID NO: 782736 - DNA, 15 bp, Homo sapiens
caggggggtggcagg

SEQ ID NO: 782737 - DNA, 15 bp, Homo sapiens
aggggggtggcagga

SEQ ID NO: 782738 - DNA, 15 bp, Homo sapiens
ggggggtggcaggag

SEQ ID NO: 782739 - DNA, 15 bp, Homo sapiens
gggggtggcaggagc

SEQ ID NO: 782740 - DNA, 15 bp, Homo sapiens
ggggtggcaggagct

SEQ ID NO: 782741 - DNA, 15 bp, Homo sapiens
gggtggcaggagctg

SEQ ID NO: 782742 - DNA, 15 bp, Homo sapiens
ggtggcaggagctgc

SEQ ID NO: 782743 - DNA, 15 bp, Homo sapiens
gtggcaggagctgcc

SEQ ID NO: 782744 - DNA, 15 bp, Homo sapiens
tggcaggagctgcca

SEQ ID NO: 782745 - DNA, 15 bp, Homo sapiens
ggcaggagctgccaa

SEQ ID NO: 782746 - DNA, 15 bp, Homo sapiens
gcaggagctgccaag

SEQ ID NO: 782747 - DNA, 15 bp, Homo sapiens
caggagctgccaagc

SEQ ID NO: 782748 - DNA, 15 bp, Homo sapiens
aggagctgccaagct

SEQ ID NO: 782749 - DNA, 15 bp, Homo sapiens
ggagctgccaagcta

SEQ ID NO: 782750 - DNA, 15 bp, Homo sapiens
gagctgccaagctag

SEQ ID NO: 782751 - DNA, 15 bp, Homo sapiens
agctgccaagctagc

SEQ ID NO: 782752 - DNA, 15 bp, Homo sapiens
gctgccaagctagcc

SEQ ID NO: 782753 - DNA, 15 bp, Homo sapiens
ctgccaagctagccc

SEQ ID NO: 782754 - DNA, 15 bp, Homo sapiens
tgccaagctagcccc

SEQ ID NO: 782755 - DNA, 15 bp, Homo sapiens
gccaagctagccccc

SEQ ID NO: 782756 - DNA, 15 bp, Homo sapiens
ccaagctagccccca

SEQ ID NO: 782757 - DNA, 15 bp, Homo sapiens
caagctagcccccaa

SEQ ID NO: 782758 - DNA, 15 bp, Homo sapiens
aagctagcccccaaa

SEQ ID NO: 782759 - DNA, 15 bp, Homo sapiens
agctagcccccaaat

SEQ ID NO: 782760 - DNA, 15 bp, Homo sapiens
gctagcccccaaatt

SEQ ID NO: 782761 - DNA, 15 bp, Homo sapiens
ctagcccccaaattt

SEQ ID NO: 782762 - DNA, 15 bp, Homo sapiens
tagcccccaaattta

SEQ ID NO: 782763 - DNA, 15 bp, Homo sapiens
agcccccaaatttat

SEQ ID NO: 782764 - DNA, 15 bp, Homo sapiens
gcccccaaatttata

SEQ ID NO: 782765 - DNA, 15 bp, Homo sapiens
cccccaaatttatag

SEQ ID NO: 782766 - DNA, 15 bp, Homo sapiens
ccccaaatttatagc

SEQ ID NO: 782767 - DNA, 15 bp, Homo sapiens
cccaaatttatagca

SEQ ID NO: 782768 - DNA, 15 bp, Homo sapiens
ccaaatttatagcaa

SEQ ID NO: 782769 - DNA, 15 bp, Homo sapiens
caaatttatagcaag

SEQ ID NO: 782770 - DNA, 15 bp, Homo sapiens
aaatttatagcaagg

SEQ ID NO: 782771 - DNA, 15 bp, Homo sapiens
aatttatagcaaggg

SEQ ID NO: 782772 - DNA, 15 bp, Homo sapiens
atttatagcaagggt

SEQ ID NO: 782773 - DNA, 15 bp, Homo sapiens
tttatagcaagggtg

SEQ ID NO: 782774 - DNA, 15 bp, Homo sapiens
ttatagcaagggtgt

SEQ ID NO: 782775 - DNA, 15 bp, Homo sapiens
tatagcaagggtgtt

SEQ ID NO: 782776 - DNA, 15 bp, Homo sapiens
atagcaagggtgtta

SEQ ID NO: 782777 - DNA, 15 bp, Homo sapiens
tagcaagggtgttaa

SEQ ID NO: 782778 - DNA, 15 bp, Homo sapiens
agcaagggtgttaaa

SEQ ID NO: 782779 - DNA, 15 bp, Homo sapiens
gcaagggtgttaaac

SEQ ID NO: 782780 - DNA, 15 bp, Homo sapiens
caagggtgttaaaca

SEQ ID NO: 782781 - DNA, 15 bp, Homo sapiens
aagggtgttaaacac

SEQ ID NO: 782782 - DNA, 15 bp, Homo sapiens
agggtgttaaacact

SEQ ID NO: 782783 - DNA, 15 bp, Homo sapiens
gggtgttaaacactg

SEQ ID NO: 782784 - DNA, 15 bp, Homo sapiens
ggtgttaaacactgt

SEQ ID NO: 782785 - DNA, 15 bp, Homo sapiens
gtgttaaacactgtg

SEQ ID NO: 782786 - DNA, 15 bp, Homo sapiens
tgttaaacactgtgg

SEQ ID NO: 782787 - DNA, 15 bp, Homo sapiens
gttaaacactgtggg

SEQ ID NO: 782788 - DNA, 15 bp, Homo sapiens
ttaaacactgtgggt

SEQ ID NO: 782789 - DNA, 15 bp, Homo sapiens
taaacactgtgggtg

SEQ ID NO: 782790 - DNA, 15 bp, Homo sapiens
aaacactgtgggtga

SEQ ID NO: 782791 - DNA, 15 bp, Homo sapiens
aacactgtgggtgat

SEQ ID NO: 782792 - DNA, 15 bp, Homo sapiens
acactgtgggtgatc

SEQ ID NO: 782793 - DNA, 15 bp, Homo sapiens
cactgtgggtgatca

SEQ ID NO: 782794 - DNA, 15 bp, Homo sapiens
actgtgggtgatcag

SEQ ID NO: 782795 - DNA, 15 bp, Homo sapiens
ctgtgggtgatcagt

SEQ ID NO: 782796 - DNA, 15 bp, Homo sapiens
tgtgggtgatcagtg

SEQ ID NO: 782797 - DNA, 15 bp, Homo sapiens
gtgggtgatcagtgg

SEQ ID NO: 782798 - DNA, 15 bp, Homo sapiens
tgggtgatcagtgga

SEQ ID NO: 782799 - DNA, 15 bp, Homo sapiens
gggtgatcagtggag

SEQ ID NO: 782800 - DNA, 15 bp, Homo sapiens
ggtgatcagtggagt

SEQ ID NO: 782801 - DNA, 15 bp, Homo sapiens
gtgatcagtggagtt

SEQ ID NO: 782802 - DNA, 15 bp, Homo sapiens
tgatcagtggagttg

SEQ ID NO: 782803 - DNA, 15 bp, Homo sapiens
gatcagtggagttga

SEQ ID NO: 782804 - DNA, 15 bp, Homo sapiens
atcagtggagttgac

SEQ ID NO: 782805 - DNA, 15 bp, Homo sapiens
tcagtggagttgaca

SEQ ID NO: 782806 - DNA, 15 bp, Homo sapiens
cagtggagttgacat

SEQ ID NO: 782807 - DNA, 15 bp, Homo sapiens
agtggagttgacatt

SEQ ID NO: 782808 - DNA, 15 bp, Homo sapiens
gtggagttgacattg

SEQ ID NO: 782809 - DNA, 15 bp, Homo sapiens
tggagttgacattgc

SEQ ID NO: 782810 - DNA, 15 bp, Homo sapiens
ggagttgacattgca

SEQ ID NO: 782811 - DNA, 15 bp, Homo sapiens
gagttgacattgcag

SEQ ID NO: 782812 - DNA, 15 bp, Homo sapiens
agttgacattgcaga

SEQ ID NO: 782813 - DNA, 15 bp, Homo sapiens
gttgacattgcagaa

SEQ ID NO: 782814 - DNA, 15 bp, Homo sapiens
ttgacattgcagaaa

SEQ ID NO: 782815 - DNA, 15 bp, Homo sapiens
tgacattgcagaaat

SEQ ID NO: 782816 - DNA, 15 bp, Homo sapiens
gacattgcagaaatt

SEQ ID NO: 782817 - DNA, 15 bp, Homo sapiens
acattgcagaaattc

SEQ ID NO: 782818 - DNA, 15 bp, Homo sapiens
cattgcagaaattcc

SEQ ID NO: 782819 - DNA, 15 bp, Homo sapiens
attgcagaaattccc

SEQ ID NO: 782820 - DNA, 15 bp, Homo sapiens
ttgcagaaattcccc

SEQ ID NO: 782821 - DNA, 15 bp, Homo sapiens
tgcagaaattcccca

SEQ ID NO: 782822 - DNA, 15 bp, Homo sapiens
gcagaaattccccaa

SEQ ID NO: 782823 - DNA, 15 bp, Homo sapiens
cagaaattccccaaa

SEQ ID NO: 782824 - DNA, 15 bp, Homo sapiens
agaaattccccaaat

SEQ ID NO: 782825 - DNA, 15 bp, Homo sapiens
gaaattccccaaatg

SEQ ID NO: 782826 - DNA, 15 bp, Homo sapiens
aaattccccaaatga

SEQ ID NO: 782827 - DNA, 15 bp, Homo sapiens
aattccccaaatgaa

SEQ ID NO: 782828 - DNA, 15 bp, Homo sapiens
attccccaaatgaaa

SEQ ID NO: 782829 - DNA, 15 bp, Homo sapiens
ttccccaaatgaaaa

SEQ ID NO: 782830 - DNA, 15 bp, Homo sapiens
tccccaaatgaaaat

SEQ ID NO: 782831 - DNA, 15 bp, Homo sapiens
ccccaaatgaaaatt

SEQ ID NO: 782832 - DNA, 15 bp, Homo sapiens
cccaaatgaaaattc

SEQ ID NO: 782833 - DNA, 15 bp, Homo sapiens
ccaaatgaaaattcc

SEQ ID NO: 782834 - DNA, 15 bp, Homo sapiens
caaatgaaaattcct

SEQ ID NO: 782835 - DNA, 15 bp, Homo sapiens
aaatgaaaattcctt

SEQ ID NO: 782836 - DNA, 15 bp, Homo sapiens
aatgaaaattccttg

SEQ ID NO: 782837 - DNA, 15 bp, Homo sapiens
atgaaaattccttgt

SEQ ID NO: 782838 - DNA, 15 bp, Homo sapiens
tgaaaattccttgta

SEQ ID NO: 782839 - DNA, 15 bp, Homo sapiens
gaaaattccttgtag

SEQ ID NO: 782840 - DNA, 15 bp, Homo sapiens
aaaattccttgtagg

SEQ ID NO: 782841 - DNA, 15 bp, Homo sapiens
aaattccttgtaggt

SEQ ID NO: 782842 - DNA, 15 bp, Homo sapiens
aattccttgtaggtt

SEQ ID NO: 782843 - DNA, 15 bp, Homo sapiens
attccttgtaggtta

SEQ ID NO: 782844 - DNA, 15 bp, Homo sapiens
ttccttgtaggttaa

SEQ ID NO: 782845 - DNA, 15 bp, Homo sapiens
tccttgtaggttaac

SEQ ID NO: 782846 - DNA, 15 bp, Homo sapiens
ccttgtaggttaact

SEQ ID NO: 782847 - DNA, 15 bp, Homo sapiens
cttgtaggttaactt

SEQ ID NO: 782848 - DNA, 15 bp, Homo sapiens
ttgtaggttaacttt

SEQ ID NO: 782849 - DNA, 15 bp, Homo sapiens
tgtaggttaactttt

SEQ ID NO: 782850 - DNA, 15 bp, Homo sapiens
gtaggttaactttta

SEQ ID NO: 782851 - DNA, 15 bp, Homo sapiens
taggttaacttttag

SEQ ID NO: 782852 - DNA, 15 bp, Homo sapiens
aggttaacttttaga

SEQ ID NO: 782853 - DNA, 15 bp, Homo sapiens
ggttaacttttagat

SEQ ID NO: 782854 - DNA, 15 bp, Homo sapiens
gttaacttttagatg

SEQ ID NO: 782855 - DNA, 15 bp, Homo sapiens
ttaacttttagatga

SEQ ID NO: 782856 - DNA, 15 bp, Homo sapiens
taacttttagatgaa

SEQ ID NO: 782857 - DNA, 15 bp, Homo sapiens
aacttttagatgaac

SEQ ID NO: 782858 - DNA, 15 bp, Homo sapiens
acttttagatgaact

SEQ ID NO: 782859 - DNA, 15 bp, Homo sapiens
cttttagatgaactt

SEQ ID NO: 782860 - DNA, 15 bp, Homo sapiens
ttttagatgaacttt

SEQ ID NO: 782861 - DNA, 15 bp, Homo sapiens
tttagatgaacttta

SEQ ID NO: 782862 - DNA, 15 bp, Homo sapiens
ttagatgaactttaa

SEQ ID NO: 782863 - DNA, 15 bp, Homo sapiens
tagatgaactttaaa

SEQ ID NO: 782864 - DNA, 15 bp, Homo sapiens
agatgaactttaaaa

SEQ ID NO: 782865 - DNA, 15 bp, Homo sapiens
gatgaactttaaaaa

SEQ ID NO: 782866 - DNA, 15 bp, Homo sapiens
atgaactttaaaaaa

SEQ ID NO: 782867 - DNA, 15 bp, Homo sapiens
tgaactttaaaaaac

SEQ ID NO: 782868 - DNA, 15 bp, Homo sapiens
gaactttaaaaaaca

SEQ ID NO: 782869 - DNA, 15 bp, Homo sapiens
aactttaaaaaacag

SEQ ID NO: 782870 - DNA, 15 bp, Homo sapiens
actttaaaaaacagg

SEQ ID NO: 782871 - DNA, 15 bp, Homo sapiens
ctttaaaaaacaggg

SEQ ID NO: 782872 - DNA, 15 bp, Homo sapiens
tttaaaaaacagggg

SEQ ID NO: 782873 - DNA, 15 bp, Homo sapiens
ttaaaaaacaggggc

SEQ ID NO: 782874 - DNA, 15 bp, Homo sapiens
taaaaaacaggggca

SEQ ID NO: 782875 - DNA, 15 bp, Homo sapiens
aaaaaacaggggcaa

SEQ ID NO: 782876 - DNA, 15 bp, Homo sapiens
aaaaacaggggcaac

SEQ ID NO: 782877 - DNA, 15 bp, Homo sapiens
aaaacaggggcaaca

SEQ ID NO: 782878 - DNA, 15 bp, Homo sapiens
aaacaggggcaacag

SEQ ID NO: 782879 - DNA, 15 bp, Homo sapiens
aacaggggcaacaga

SEQ ID NO: 782880 - DNA, 15 bp, Homo sapiens
ccttgtagttccacc

SEQ ID NO: 782881 - DNA, 15 bp, Homo sapiens
cttgtagttccacct

SEQ ID NO: 782882 - DNA, 15 bp, Homo sapiens
ttgtagttccacctt

SEQ ID NO: 782883 - DNA, 15 bp, Homo sapiens
tgtagttccacctta

SEQ ID NO: 782884 - DNA, 15 bp, Homo sapiens
gtagttccaccttat

SEQ ID NO: 782885 - DNA, 15 bp, Homo sapiens
tagttccaccttata

SEQ ID NO: 782886 - DNA, 15 bp, Homo sapiens
agttccaccttatac

SEQ ID NO: 782887 - DNA, 15 bp, Homo sapiens
gttccaccttatact

SEQ ID NO: 782888 - DNA, 15 bp, Homo sapiens
ttccaccttatactg

SEQ ID NO: 782889 - DNA, 15 bp, Homo sapiens
tccaccttatactgc

SEQ ID NO: 782890 - DNA, 15 bp, Homo sapiens
ccaccttatactgcc

SEQ ID NO: 782891 - DNA, 15 bp, Homo sapiens
caccttatactgccg

SEQ ID NO: 782892 - DNA, 15 bp, Homo sapiens
accttatactgccga

SEQ ID NO: 782893 - DNA, 15 bp, Homo sapiens
ccttatactgccgag

SEQ ID NO: 782894 - DNA, 15 bp, Homo sapiens
cttatactgccgaga

SEQ ID NO: 782895 - DNA, 15 bp, Homo sapiens
ttatactgccgagaa

SEQ ID NO: 782896 - DNA, 15 bp, Homo sapiens
tatactgccgagaag

SEQ ID NO: 782897 - DNA, 15 bp, Homo sapiens
atactgccgagaagg

SEQ ID NO: 782898 - DNA, 15 bp, Homo sapiens
tactgccgagaagga

SEQ ID NO: 782899 - DNA, 15 bp, Homo sapiens
actgccgagaaggaa

SEQ ID NO: 782900 - DNA, 15 bp, Homo sapiens
ctgccgagaaggaaa

SEQ ID NO: 782901 - DNA, 15 bp, Homo sapiens
tgccgagaaggaaac

SEQ ID NO: 782902 - DNA, 15 bp, Homo sapiens
gccgagaaggaaacc

SEQ ID NO: 782903 - DNA, 15 bp, Homo sapiens
ccgagaaggaaaccg

SEQ ID NO: 782904 - DNA, 15 bp, Homo sapiens
cgagaaggaaaccga

SEQ ID NO: 782905 - DNA, 15 bp, Homo sapiens
gagaaggaaaccgag

SEQ ID NO: 782906 - DNA, 15 bp, Homo sapiens
agaaggaaaccgagg

SEQ ID NO: 782907 - DNA, 15 bp, Homo sapiens
gaaggaaaccgaggc

SEQ ID NO: 782908 - DNA, 15 bp, Homo sapiens
aaggaaaccgaggcc

SEQ ID NO: 782909 - DNA, 15 bp, Homo sapiens
aggaaaccgaggcct

SEQ ID NO: 782910 - DNA, 15 bp, Homo sapiens
ggaaaccgaggcctg

SEQ ID NO: 782911 - DNA, 15 bp, Homo sapiens
gaaaccgaggcctgg

SEQ ID NO: 782912 - DNA, 15 bp, Homo sapiens
aaaccgaggcctgga

SEQ ID NO: 782913 - DNA, 15 bp, Homo sapiens
aaccgaggcctggag

SEQ ID NO: 782914 - DNA, 15 bp, Homo sapiens
accgaggcctggagg

SEQ ID NO: 782915 - DNA, 15 bp, Homo sapiens
ccgaggcctggaggg

SEQ ID NO: 782916 - DNA, 15 bp, Homo sapiens
cgaggcctggaggga

SEQ ID NO: 782917 - DNA, 15 bp, Homo sapiens
gaggcctggagggag

SEQ ID NO: 782918 - DNA, 15 bp, Homo sapiens
aggcctggagggagc

SEQ ID NO: 782919 - DNA, 15 bp, Homo sapiens
ggcctggagggagcc

SEQ ID NO: 782920 - DNA, 15 bp, Homo sapiens
gcctggagggagccc

SEQ ID NO: 782921 - DNA, 15 bp, Homo sapiens
cctggagggagccca

SEQ ID NO: 782922 - DNA, 15 bp, Homo sapiens
ctggagggagcccat

SEQ ID NO: 782923 - DNA, 15 bp, Homo sapiens
tggagggagcccatg

SEQ ID NO: 782924 - DNA, 15 bp, Homo sapiens
ggagggagcccatga

SEQ ID NO: 782925 - DNA, 15 bp, Homo sapiens
gagggagcccatgat

SEQ ID NO: 782926 - DNA, 15 bp, Homo sapiens
agggagcccatgatg

SEQ ID NO: 782927 - DNA, 15 bp, Homo sapiens
gggagcccatgatgt

SEQ ID NO: 782928 - DNA, 15 bp, Homo sapiens
ggagcccatgatgtg

SEQ ID NO: 782929 - DNA, 15 bp, Homo sapiens
gagcccatgatgtgt

SEQ ID NO: 782930 - DNA, 15 bp, Homo sapiens
agcccatgatgtgtt

SEQ ID NO: 782931 - DNA, 15 bp, Homo sapiens
gcccatgatgtgttc

SEQ ID NO: 782932 - DNA, 15 bp, Homo sapiens
cccatgatgtgttca

SEQ ID NO: 782933 - DNA, 15 bp, Homo sapiens
ccatgatgtgttcat

SEQ ID NO: 782934 - DNA, 15 bp, Homo sapiens
catgatgtgttcatg

SEQ ID NO: 782935 - DNA, 15 bp, Homo sapiens
atgatgtgttcatgt

SEQ ID NO: 782936 - DNA, 15 bp, Homo sapiens
tgatgtgttcatgtt

SEQ ID NO: 782937 - DNA, 15 bp, Homo sapiens
gatgtgttcatgttt

SEQ ID NO: 782938 - DNA, 15 bp, Homo sapiens
atgtgttcatgttta

SEQ ID NO: 782939 - DNA, 15 bp, Homo sapiens
tgtgttcatgtttac

SEQ ID NO: 782940 - DNA, 15 bp, Homo sapiens
gtgttcatgtttaca

SEQ ID NO: 782941 - DNA, 15 bp, Homo sapiens
tgttcatgtttacac

SEQ ID NO: 782942 - DNA, 15 bp, Homo sapiens
gttcatgtttacacc

SEQ ID NO: 782943 - DNA, 15 bp, Homo sapiens
ttcatgtttacaccg

SEQ ID NO: 782944 - DNA, 15 bp, Homo sapiens
tcatgtttacaccgc

SEQ ID NO: 782945 - DNA, 15 bp, Homo sapiens
catgtttacaccgca

SEQ ID NO: 782946 - DNA, 15 bp, Homo sapiens
atgtttacaccgcaa

SEQ ID NO: 782947 - DNA, 15 bp, Homo sapiens
tgtttacaccgcaag

SEQ ID NO: 782948 - DNA, 15 bp, Homo sapiens
gtttacaccgcaagt

SEQ ID NO: 782949 - DNA, 15 bp, Homo sapiens
tttacaccgcaagtt

SEQ ID NO: 782950 - DNA, 15 bp, Homo sapiens
ttacaccgcaagtta

SEQ ID NO: 782951 - DNA, 15 bp, Homo sapiens
tacaccgcaagttag

SEQ ID NO: 782952 - DNA, 15 bp, Homo sapiens
acaccgcaagttagt

SEQ ID NO: 782953 - DNA, 15 bp, Homo sapiens
caccgcaagttagtg

SEQ ID NO: 782954 - DNA, 15 bp, Homo sapiens
accgcaagttagtgt

SEQ ID NO: 782955 - DNA, 15 bp, Homo sapiens
ccgcaagttagtgtt

SEQ ID NO: 782956 - DNA, 15 bp, Homo sapiens
cgcaagttagtgtta

SEQ ID NO: 782957 - DNA, 15 bp, Homo sapiens
gcaagttagtgttaa

SEQ ID NO: 782958 - DNA, 15 bp, Homo sapiens
caagttagtgttaaa

SEQ ID NO: 782959 - DNA, 15 bp, Homo sapiens
aagttagtgttaaat

SEQ ID NO: 782960 - DNA, 15 bp, Homo sapiens
agttagtgttaaata

SEQ ID NO: 782961 - DNA, 15 bp, Homo sapiens
gttagtgttaaatat

SEQ ID NO: 782962 - DNA, 15 bp, Homo sapiens
ttagtgttaaatatt

SEQ ID NO: 782963 - DNA, 15 bp, Homo sapiens
tagtgttaaatattc

SEQ ID NO: 782964 - DNA, 15 bp, Homo sapiens
agtgttaaatattcc

SEQ ID NO: 782965 - DNA, 15 bp, Homo sapiens
gtgttaaatattcca

SEQ ID NO: 782966 - DNA, 15 bp, Homo sapiens
tgttaaatattccat

SEQ ID NO: 782967 - DNA, 15 bp, Homo sapiens
gttaaatattccatt

SEQ ID NO: 782968 - DNA, 15 bp, Homo sapiens
ttaaatattccattt

SEQ ID NO: 782969 - DNA, 15 bp, Homo sapiens
taaatattccatttt

SEQ ID NO: 782970 - DNA, 15 bp, Homo sapiens
aaatattccattttt

SEQ ID NO: 782971 - DNA, 15 bp, Homo sapiens
aatattccatttttt

SEQ ID NO: 782972 - DNA, 15 bp, Homo sapiens
atattccattttttg

SEQ ID NO: 782973 - DNA, 15 bp, Homo sapiens
tattccattttttgg

SEQ ID NO: 782974 - DNA, 15 bp, Homo sapiens
attccattttttgga

SEQ ID NO: 782975 - DNA, 15 bp, Homo sapiens
ttccattttttggaa

SEQ ID NO: 782976 - DNA, 15 bp, Homo sapiens
tccattttttggaag

SEQ ID NO: 782977 - DNA, 15 bp, Homo sapiens
ccattttttggaagg

SEQ ID NO: 782978 - DNA, 15 bp, Homo sapiens
cattttttggaagga

SEQ ID NO: 782979 - DNA, 15 bp, Homo sapiens
attttttggaaggaa

SEQ ID NO: 782980 - DNA, 15 bp, Homo sapiens
ttttttggaaggaat

SEQ ID NO: 782981 - DNA, 15 bp, Homo sapiens
tttttggaaggaatt

SEQ ID NO: 782982 - DNA, 15 bp, Homo sapiens
ttttggaaggaattt

SEQ ID NO: 782983 - DNA, 15 bp, Homo sapiens
tttggaaggaatttt

SEQ ID NO: 782984 - DNA, 15 bp, Homo sapiens
ttggaaggaatttta

SEQ ID NO: 782985 - DNA, 15 bp, Homo sapiens
tggaaggaattttac

SEQ ID NO: 782986 - DNA, 15 bp, Homo sapiens
ggaaggaattttact

SEQ ID NO: 782987 - DNA, 15 bp, Homo sapiens
gaaggaattttactt

SEQ ID NO: 782988 - DNA, 15 bp, Homo sapiens
aaggaattttactta

SEQ ID NO: 782989 - DNA, 15 bp, Homo sapiens
aggaattttacttac

SEQ ID NO: 782990 - DNA, 15 bp, Homo sapiens
ggaattttacttaca

SEQ ID NO: 782991 - DNA, 15 bp, Homo sapiens
gaattttacttacat

SEQ ID NO: 782992 - DNA, 15 bp, Homo sapiens
aattttacttacatg

SEQ ID NO: 782993 - DNA, 15 bp, Homo sapiens
attttacttacatgc

SEQ ID NO: 782994 - DNA, 15 bp, Homo sapiens
ttttacttacatgca

SEQ ID NO: 782995 - DNA, 15 bp, Homo sapiens
tttacttacatgcat

SEQ ID NO: 782996 - DNA, 15 bp, Homo sapiens
ttacttacatgcata

SEQ ID NO: 782997 - DNA, 15 bp, Homo sapiens
tacttacatgcatat

SEQ ID NO: 782998 - DNA, 15 bp, Homo sapiens
acttacatgcatatt

SEQ ID NO: 782999 - DNA, 15 bp, Homo sapiens
cttacatgcatattt

SEQ ID NO: 783000 - DNA, 15 bp, Homo sapiens
ttacatgcatatttt

SEQ ID NO: 783001 - DNA, 15 bp, Homo sapiens
tacatgcatattttc

SEQ ID NO: 783002 - DNA, 15 bp, Homo sapiens
acatgcatattttcc

SEQ ID NO: 783003 - DNA, 15 bp, Homo sapiens
catgcatattttcca

SEQ ID NO: 783004 - DNA, 15 bp, Homo sapiens
atgcatattttccat

SEQ ID NO: 783005 - DNA, 15 bp, Homo sapiens
tgcatattttccatt

SEQ ID NO: 783006 - DNA, 15 bp, Homo sapiens
gcatattttccatta

SEQ ID NO: 783007 - DNA, 15 bp, Homo sapiens
catattttccattat

SEQ ID NO: 783008 - DNA, 15 bp, Homo sapiens
atattttccattatg

SEQ ID NO: 783009 - DNA, 15 bp, Homo sapiens
tattttccattatgt

SEQ ID NO: 783010 - DNA, 15 bp, Homo sapiens
attttccattatgtt

SEQ ID NO: 783011 - DNA, 15 bp, Homo sapiens
ttttccattatgttt

SEQ ID NO: 783012 - DNA, 15 bp, Homo sapiens
tttccattatgttta

SEQ ID NO: 783013 - DNA, 15 bp, Homo sapiens
ttccattatgtttat

SEQ ID NO: 783014 - DNA, 15 bp, Homo sapiens
tccattatgtttata

SEQ ID NO: 783015 - DNA, 15 bp, Homo sapiens
ccattatgtttataa

SEQ ID NO: 783016 - DNA, 15 bp, Homo sapiens
cattatgtttataaa

SEQ ID NO: 783017 - DNA, 15 bp, Homo sapiens
attatgtttataaat

SEQ ID NO: 783018 - DNA, 15 bp, Homo sapiens
ttatgtttataaatt

SEQ ID NO: 783019 - DNA, 15 bp, Homo sapiens
tatgtttataaattt

SEQ ID NO: 783020 - DNA, 15 bp, Homo sapiens
atgtttataaatttc

SEQ ID NO: 783021 - DNA, 15 bp, Homo sapiens
tgtttataaatttcc

SEQ ID NO: 783022 - DNA, 15 bp, Homo sapiens
gtttataaatttccc

SEQ ID NO: 783023 - DNA, 15 bp, Homo sapiens
tttataaatttcccc

SEQ ID NO: 783024 - DNA, 15 bp, Homo sapiens
ttataaatttccccc

SEQ ID NO: 783025 - DNA, 15 bp, Homo sapiens
tataaatttccccct

SEQ ID NO: 783026 - DNA, 15 bp, Homo sapiens
ataaatttcccccta

SEQ ID NO: 783027 - DNA, 15 bp, Homo sapiens
taaatttccccctat

SEQ ID NO: 783028 - DNA, 15 bp, Homo sapiens
aaatttccccctatt

SEQ ID NO: 783029 - DNA, 15 bp, Homo sapiens
aatttccccctattt

SEQ ID NO: 783030 - DNA, 15 bp, Homo sapiens
atttccccctatttt

SEQ ID NO: 783031 - DNA, 15 bp, Homo sapiens
tttccccctatttta

SEQ ID NO: 783032 - DNA, 15 bp, Homo sapiens
ttccccctattttaa

SEQ ID NO: 783033 - DNA, 15 bp, Homo sapiens
tccccctattttaaa

SEQ ID NO: 783034 - DNA, 15 bp, Homo sapiens
ccccctattttaaat

SEQ ID NO: 783035 - DNA, 15 bp, Homo sapiens
cccctattttaaatt

SEQ ID NO: 783036 - DNA, 15 bp, Homo sapiens
ccctattttaaatta

SEQ ID NO: 783037 - DNA, 15 bp, Homo sapiens
cctattttaaattat

SEQ ID NO: 783038 - DNA, 15 bp, Homo sapiens
ctattttaaattatc

SEQ ID NO: 783039 - DNA, 15 bp, Homo sapiens
tattttaaattatcc

SEQ ID NO: 783040 - DNA, 15 bp, Homo sapiens
attttaaattatccc

SEQ ID NO: 783041 - DNA, 15 bp, Homo sapiens
ttttaaattatcccc

SEQ ID NO: 783042 - DNA, 15 bp, Homo sapiens
tttaaattatcccca

SEQ ID NO: 783043 - DNA, 15 bp, Homo sapiens
ttaaattatccccat

SEQ ID NO: 783044 - DNA, 15 bp, Homo sapiens
taaattatccccatt

SEQ ID NO: 783045 - DNA, 15 bp, Homo sapiens
aaattatccccattc

SEQ ID NO: 783046 - DNA, 15 bp, Homo sapiens
aattatccccattcc

SEQ ID NO: 783047 - DNA, 15 bp, Homo sapiens
attatccccattccc

SEQ ID NO: 783048 - DNA, 15 bp, Homo sapiens
ttatccccattccct

SEQ ID NO: 783049 - DNA, 15 bp, Homo sapiens
tatccccattcccta

SEQ ID NO: 783050 - DNA, 15 bp, Homo sapiens
atccccattccctac

SEQ ID NO: 783051 - DNA, 15 bp, Homo sapiens
tccccattccctact

SEQ ID NO: 783052 - DNA, 15 bp, Homo sapiens
ccccattccctacta

SEQ ID NO: 783053 - DNA, 15 bp, Homo sapiens
cccattccctactaa

SEQ ID NO: 783054 - DNA, 15 bp, Homo sapiens
ccattccctactaat

SEQ ID NO: 783055 - DNA, 15 bp, Homo sapiens
cattccctactaatt

SEQ ID NO: 783056 - DNA, 15 bp, Homo sapiens
attccctactaattg

SEQ ID NO: 783057 - DNA, 15 bp, Homo sapiens
ttccctactaattgt

SEQ ID NO: 783058 - DNA, 15 bp, Homo sapiens
tccctactaattgta

SEQ ID NO: 783059 - DNA, 15 bp, Homo sapiens
ccctactaattgtat

SEQ ID NO: 783060 - DNA, 15 bp, Homo sapiens
cctactaattgtatc

SEQ ID NO: 783061 - DNA, 15 bp, Homo sapiens
ctactaattgtatct

SEQ ID NO: 783062 - DNA, 15 bp, Homo sapiens
tactaattgtatctt

SEQ ID NO: 783063 - DNA, 15 bp, Homo sapiens
actaattgtatcttt

SEQ ID NO: 783064 - DNA, 15 bp, Homo sapiens
ctaattgtatctttc

SEQ ID NO: 783065 - DNA, 15 bp, Homo sapiens
taattgtatctttca

SEQ ID NO: 783066 - DNA, 15 bp, Homo sapiens
aattgtatctttcat

SEQ ID NO: 783067 - DNA, 15 bp, Homo sapiens
attgtatctttcatt

SEQ ID NO: 783068 - DNA, 15 bp, Homo sapiens
ttgtatctttcattt

SEQ ID NO: 783069 - DNA, 15 bp, Homo sapiens
tgtatctttcatttt

SEQ ID NO: 783070 - DNA, 15 bp, Homo sapiens
gtatctttcattttt

SEQ ID NO: 783071 - DNA, 15 bp, Homo sapiens
tatctttcatttttt

SEQ ID NO: 783072 - DNA, 15 bp, Homo sapiens
atctttcattttttc

SEQ ID NO: 783073 - DNA, 15 bp, Homo sapiens
tctttcattttttct

SEQ ID NO: 783074 - DNA, 15 bp, Homo sapiens
ctttcattttttctt

SEQ ID NO: 783075 - DNA, 15 bp, Homo sapiens
tttcattttttcttt

SEQ ID NO: 783076 - DNA, 15 bp, Homo sapiens
ttcattttttcttta

SEQ ID NO: 783077 - DNA, 15 bp, Homo sapiens
tcattttttctttat

SEQ ID NO: 783078 - DNA, 15 bp, Homo sapiens
cattttttctttata

SEQ ID NO: 783079 - DNA, 15 bp, Homo sapiens
attttttctttataa

SEQ ID NO: 783080 - DNA, 15 bp, Homo sapiens
ttttttctttataaa

SEQ ID NO: 783081 - DNA, 15 bp, Homo sapiens
tttttctttataaac

SEQ ID NO: 783082 - DNA, 15 bp, Homo sapiens
ttttctttataaacc

SEQ ID NO: 783083 - DNA, 15 bp, Homo sapiens
tttctttataaacct

SEQ ID NO: 783084 - DNA, 15 bp, Homo sapiens
ttctttataaacctt

SEQ ID NO: 783085 - DNA, 15 bp, Homo sapiens
tctttataaacctta

SEQ ID NO: 783086 - DNA, 15 bp, Homo sapiens
ctttataaaccttat

SEQ ID NO: 783087 - DNA, 15 bp, Homo sapiens
tttataaaccttata

SEQ ID NO: 783088 - DNA, 15 bp, Homo sapiens
ttataaaccttataa

SEQ ID NO: 783089 - DNA, 15 bp, Homo sapiens
tataaaccttataat

SEQ ID NO: 783090 - DNA, 15 bp, Homo sapiens
ataaaccttataatt

SEQ ID NO: 783091 - DNA, 15 bp, Homo sapiens
taaaccttataattc

SEQ ID NO: 783092 - DNA, 15 bp, Homo sapiens
aaaccttataattct

SEQ ID NO: 783093 - DNA, 15 bp, Homo sapiens
aaccttataattctc

SEQ ID NO: 783094 - DNA, 15 bp, Homo sapiens
accttataattctct

SEQ ID NO: 783095 - DNA, 15 bp, Homo sapiens
ccttataattctcta

SEQ ID NO: 783096 - DNA, 15 bp, Homo sapiens
cttataattctctaa

SEQ ID NO: 783097 - DNA, 15 bp, Homo sapiens
ttataattctctaat

SEQ ID NO: 783098 - DNA, 15 bp, Homo sapiens
tataattctctaata

SEQ ID NO: 783099 - DNA, 15 bp, Homo sapiens
ataattctctaatat

SEQ ID NO: 783100 - DNA, 15 bp, Homo sapiens
taattctctaatata

SEQ ID NO: 783101 - DNA, 15 bp, Homo sapiens
aattctctaatatac

SEQ ID NO: 783102 - DNA, 15 bp, Homo sapiens
attctctaatatact

SEQ ID NO: 783103 - DNA, 15 bp, Homo sapiens
ttctctaatatacta

SEQ ID NO: 783104 - DNA, 15 bp, Homo sapiens
tctctaatatactat

SEQ ID NO: 783105 - DNA, 15 bp, Homo sapiens
ctctaatatactata

SEQ ID NO: 783106 - DNA, 15 bp, Homo sapiens
tctaatatactatat

SEQ ID NO: 783107 - DNA, 15 bp, Homo sapiens
ctaatatactatata

SEQ ID NO: 783108 - DNA, 15 bp, Homo sapiens
taatatactatatat

SEQ ID NO: 783109 - DNA, 15 bp, Homo sapiens
aatatactatatata

SEQ ID NO: 783110 - DNA, 15 bp, Homo sapiens
atatactatatatac

SEQ ID NO: 783111 - DNA, 15 bp, Homo sapiens
tatactatatatact

SEQ ID NO: 783112 - DNA, 15 bp, Homo sapiens
atactatatatactt

SEQ ID NO: 783113 - DNA, 15 bp, Homo sapiens
tactatatatacttt

SEQ ID NO: 783114 - DNA, 15 bp, Homo sapiens
actatatatacttta

SEQ ID NO: 783115 - DNA, 15 bp, Homo sapiens
ctatatatactttat

SEQ ID NO: 783116 - DNA, 15 bp, Homo sapiens
tatatatactttatt

SEQ ID NO: 783117 - DNA, 15 bp, Homo sapiens
atatatactttattt

SEQ ID NO: 783118 - DNA, 15 bp, Homo sapiens
tatatactttattta

SEQ ID NO: 783119 - DNA, 15 bp, Homo sapiens
atatactttatttat

SEQ ID NO: 783120 - DNA, 15 bp, Homo sapiens
tatactttatttatt

SEQ ID NO: 783121 - DNA, 15 bp, Homo sapiens
atactttatttattt

SEQ ID NO: 783122 - DNA, 15 bp, Homo sapiens
tactttatttatttt

SEQ ID NO: 783123 - DNA, 15 bp, Homo sapiens
actttatttatttta

SEQ ID NO: 783124 - DNA, 15 bp, Homo sapiens
ctttatttattttac

SEQ ID NO: 783125 - DNA, 15 bp, Homo sapiens
tttatttattttact

SEQ ID NO: 783126 - DNA, 15 bp, Homo sapiens
ttatttattttactt

SEQ ID NO: 783127 - DNA, 15 bp, Homo sapiens
tatttattttactta

SEQ ID NO: 783128 - DNA, 15 bp, Homo sapiens
atttattttacttat

SEQ ID NO: 783129 - DNA, 15 bp, Homo sapiens
tttattttacttatc

SEQ ID NO: 783130 - DNA, 15 bp, Homo sapiens
ttattttacttatca

SEQ ID NO: 783131 - DNA, 15 bp, Homo sapiens
tattttacttatcat

SEQ ID NO: 783132 - DNA, 15 bp, Homo sapiens
attttacttatcatc

SEQ ID NO: 783133 - DNA, 15 bp, Homo sapiens
ttttacttatcatct

SEQ ID NO: 783134 - DNA, 15 bp, Homo sapiens
tttacttatcatcta

SEQ ID NO: 783135 - DNA, 15 bp, Homo sapiens
ttacttatcatctat

SEQ ID NO: 783136 - DNA, 15 bp, Homo sapiens
tacttatcatctatc

SEQ ID NO: 783137 - DNA, 15 bp, Homo sapiens
acttatcatctatct

SEQ ID NO: 783138 - DNA, 15 bp, Homo sapiens
cttatcatctatctt

SEQ ID NO: 783139 - DNA, 15 bp, Homo sapiens
ttatcatctatcttc

SEQ ID NO: 783140 - DNA, 15 bp, Homo sapiens
tatcatctatcttcc

SEQ ID NO: 783141 - DNA, 15 bp, Homo sapiens
atcatctatcttccc

SEQ ID NO: 783142 - DNA, 15 bp, Homo sapiens
tcatctatcttcccc

SEQ ID NO: 783143 - DNA, 15 bp, Homo sapiens
catctatcttcccct

SEQ ID NO: 783144 - DNA, 15 bp, Homo sapiens
atctatcttcccctg

SEQ ID NO: 783145 - DNA, 15 bp, Homo sapiens
tctatcttcccctgt

SEQ ID NO: 783146 - DNA, 15 bp, Homo sapiens
ctatcttcccctgtc

SEQ ID NO: 783147 - DNA, 15 bp, Homo sapiens
tatcttcccctgtct

SEQ ID NO: 783148 - DNA, 15 bp, Homo sapiens
atcttcccctgtctc

SEQ ID NO: 783149 - DNA, 15 bp, Homo sapiens
tcttcccctgtctcc

SEQ ID NO: 783150 - DNA, 15 bp, Homo sapiens
cttcccctgtctcca

SEQ ID NO: 783151 - DNA, 15 bp, Homo sapiens
ttcccctgtctccac

SEQ ID NO: 783152 - DNA, 15 bp, Homo sapiens
tcccctgtctccact

SEQ ID NO: 783153 - DNA, 15 bp, Homo sapiens
cccctgtctccacta

SEQ ID NO: 783154 - DNA, 15 bp, Homo sapiens
ccctgtctccactaa

SEQ ID NO: 783155 - DNA, 15 bp, Homo sapiens
cctgtctccactaaa

SEQ ID NO: 783156 - DNA, 15 bp, Homo sapiens
ctgtctccactaaaa

SEQ ID NO: 783157 - DNA, 15 bp, Homo sapiens
tgtctccactaaaat

SEQ ID NO: 783158 - DNA, 15 bp, Homo sapiens
gtctccactaaaatc

SEQ ID NO: 783159 - DNA, 15 bp, Homo sapiens
tctccactaaaatcc

SEQ ID NO: 783160 - DNA, 15 bp, Homo sapiens
ctccactaaaatcca

SEQ ID NO: 783161 - DNA, 15 bp, Homo sapiens
tccactaaaatccaa

SEQ ID NO: 783162 - DNA, 15 bp, Homo sapiens
ccactaaaatccaaa

SEQ ID NO: 783163 - DNA, 15 bp, Homo sapiens
cactaaaatccaaac

SEQ ID NO: 783164 - DNA, 15 bp, Homo sapiens
actaaaatccaaact

SEQ ID NO: 783165 - DNA, 15 bp, Homo sapiens
ctaaaatccaaacta

SEQ ID NO: 783166 - DNA, 15 bp, Homo sapiens
taaaatccaaactaa

SEQ ID NO: 783167 - DNA, 15 bp, Homo sapiens
aaaatccaaactaac

SEQ ID NO: 783168 - DNA, 15 bp, Homo sapiens
aaatccaaactaact

SEQ ID NO: 783169 - DNA, 15 bp, Homo sapiens
aatccaaactaactc

SEQ ID NO: 783170 - DNA, 15 bp, Homo sapiens
atccaaactaactcc

SEQ ID NO: 783171 - DNA, 15 bp, Homo sapiens
tccaaactaactcca

SEQ ID NO: 783172 - DNA, 15 bp, Homo sapiens
ccaaactaactccat

SEQ ID NO: 783173 - DNA, 15 bp, Homo sapiens
caaactaactccata

SEQ ID NO: 783174 - DNA, 15 bp, Homo sapiens
aaactaactccataa

SEQ ID NO: 783175 - DNA, 15 bp, Homo sapiens
aactaactccataaa

SEQ ID NO: 783176 - DNA, 15 bp, Homo sapiens
actaactccataaaa

SEQ ID NO: 783177 - DNA, 15 bp, Homo sapiens
ctaactccataaaag

SEQ ID NO: 783178 - DNA, 15 bp, Homo sapiens
taactccataaaagc

SEQ ID NO: 783179 - DNA, 15 bp, Homo sapiens
aactccataaaagca

SEQ ID NO: 783180 - DNA, 15 bp, Homo sapiens
actccataaaagcag

SEQ ID NO: 783181 - DNA, 15 bp, Homo sapiens
ctccataaaagcagg

SEQ ID NO: 783182 - DNA, 15 bp, Homo sapiens
tccataaaagcaggg

SEQ ID NO: 783183 - DNA, 15 bp, Homo sapiens
ccataaaagcagggc

SEQ ID NO: 783184 - DNA, 15 bp, Homo sapiens
cataaaagcagggct

SEQ ID NO: 783185 - DNA, 15 bp, Homo sapiens
ataaaagcagggctt

SEQ ID NO: 783186 - DNA, 15 bp, Homo sapiens
taaaagcagggcttt

SEQ ID NO: 783187 - DNA, 15 bp, Homo sapiens
aaaagcagggctttt

SEQ ID NO: 783188 - DNA, 15 bp, Homo sapiens
aaagcagggcttttt

SEQ ID NO: 783189 - DNA, 15 bp, Homo sapiens
aagcagggctttttg

SEQ ID NO: 783190 - DNA, 15 bp, Homo sapiens
agcagggctttttgt

SEQ ID NO: 783191 - DNA, 15 bp, Homo sapiens
gcagggctttttgtc

SEQ ID NO: 783192 - DNA, 15 bp, Homo sapiens
cagggctttttgtct

SEQ ID NO: 783193 - DNA, 15 bp, Homo sapiens
agggctttttgtctg

SEQ ID NO: 783194 - DNA, 15 bp, Homo sapiens
gggctttttgtctgg

SEQ ID NO: 783195 - DNA, 15 bp, Homo sapiens
ggctttttgtctggg

SEQ ID NO: 783196 - DNA, 15 bp, Homo sapiens
gctttttgtctgggt

SEQ ID NO: 783197 - DNA, 15 bp, Homo sapiens
ctttttgtctgggtc

SEQ ID NO: 783198 - DNA, 15 bp, Homo sapiens
tttttgtctgggtca

SEQ ID NO: 783199 - DNA, 15 bp, Homo sapiens
ttttgtctgggtcac

SEQ ID NO: 783200 - DNA, 15 bp, Homo sapiens
tttgtctgggtcact

SEQ ID NO: 783201 - DNA, 15 bp, Homo sapiens
ttgtctgggtcactc

SEQ ID NO: 783202 - DNA, 15 bp, Homo sapiens
tgtctgggtcactcc

SEQ ID NO: 783203 - DNA, 15 bp, Homo sapiens
gtctgggtcactcct

SEQ ID NO: 783204 - DNA, 15 bp, Homo sapiens
tctgggtcactcctg

SEQ ID NO: 783205 - DNA, 15 bp, Homo sapiens
ctgggtcactcctgt

SEQ ID NO: 783206 - DNA, 15 bp, Homo sapiens
tgggtcactcctgta

SEQ ID NO: 783207 - DNA, 15 bp, Homo sapiens
gggtcactcctgtat

SEQ ID NO: 783208 - DNA, 15 bp, Homo sapiens
ggtcactcctgtatg

SEQ ID NO: 783209 - DNA, 15 bp, Homo sapiens
gtcactcctgtatgg

SEQ ID NO: 783210 - DNA, 15 bp, Homo sapiens
tcactcctgtatggt

SEQ ID NO: 783211 - DNA, 15 bp, Homo sapiens
cactcctgtatggtt

SEQ ID NO: 783212 - DNA, 15 bp, Homo sapiens
actcctgtatggttg

SEQ ID NO: 783213 - DNA, 15 bp, Homo sapiens
ctcctgtatggttga

SEQ ID NO: 783214 - DNA, 15 bp, Homo sapiens
tcctgtatggttgac

SEQ ID NO: 783215 - DNA, 15 bp, Homo sapiens
cctgtatggttgaca

SEQ ID NO: 783216 - DNA, 15 bp, Homo sapiens
ctgtatggttgacac

SEQ ID NO: 783217 - DNA, 15 bp, Homo sapiens
tgtatggttgacact

SEQ ID NO: 783218 - DNA, 15 bp, Homo sapiens
gtatggttgacactt

SEQ ID NO: 783219 - DNA, 15 bp, Homo sapiens
tatggttgacactta

SEQ ID NO: 783220 - DNA, 15 bp, Homo sapiens
atggttgacacttat

SEQ ID NO: 783221 - DNA, 15 bp, Homo sapiens
tggttgacacttatt

SEQ ID NO: 783222 - DNA, 15 bp, Homo sapiens
ggttgacacttattt

SEQ ID NO: 783223 - DNA, 15 bp, Homo sapiens
gttgacacttatttc

SEQ ID NO: 783224 - DNA, 15 bp, Homo sapiens
ttgacacttatttcc

SEQ ID NO: 783225 - DNA, 15 bp, Homo sapiens
tgacacttatttcct

SEQ ID NO: 783226 - DNA, 15 bp, Homo sapiens
gacacttatttcctg

SEQ ID NO: 783227 - DNA, 15 bp, Homo sapiens
acacttatttcctgg

SEQ ID NO: 783228 - DNA, 15 bp, Homo sapiens
cacttatttcctgga

SEQ ID NO: 783229 - DNA, 15 bp, Homo sapiens
acttatttcctggaa

SEQ ID NO: 783230 - DNA, 15 bp, Homo sapiens
cttatttcctggaac

SEQ ID NO: 783231 - DNA, 15 bp, Homo sapiens
ttatttcctggaaca

SEQ ID NO: 783232 - DNA, 15 bp, Homo sapiens
tatttcctggaacac

SEQ ID NO: 783233 - DNA, 15 bp, Homo sapiens
atttcctggaacaca

SEQ ID NO: 783234 - DNA, 15 bp, Homo sapiens
tttcctggaacacag

SEQ ID NO: 783235 - DNA, 15 bp, Homo sapiens
ttcctggaacacagt

SEQ ID NO: 783236 - DNA, 15 bp, Homo sapiens
tcctggaacacagta

SEQ ID NO: 783237 - DNA, 15 bp, Homo sapiens
cctggaacacagtag

SEQ ID NO: 783238 - DNA, 15 bp, Homo sapiens
ctggaacacagtagg

SEQ ID NO: 783239 - DNA, 15 bp, Homo sapiens
tggaacacagtaggg

SEQ ID NO: 783240 - DNA, 15 bp, Homo sapiens
ggaacacagtagggg

SEQ ID NO: 783241 - DNA, 15 bp, Homo sapiens
gaacacagtaggggc

SEQ ID NO: 783242 - DNA, 15 bp, Homo sapiens
aacacagtaggggct

SEQ ID NO: 783243 - DNA, 15 bp, Homo sapiens
acacagtaggggctg

SEQ ID NO: 783244 - DNA, 15 bp, Homo sapiens
cacagtaggggctga

SEQ ID NO: 783245 - DNA, 15 bp, Homo sapiens
acagtaggggctgaa

SEQ ID NO: 783246 - DNA, 15 bp, Homo sapiens
cagtaggggctgaat

SEQ ID NO: 783247 - DNA, 15 bp, Homo sapiens
agtaggggctgaatg

SEQ ID NO: 783248 - DNA, 15 bp, Homo sapiens
gtaggggctgaatga

SEQ ID NO: 783249 - DNA, 15 bp, Homo sapiens
taggggctgaatgaa

SEQ ID NO: 783250 - DNA, 15 bp, Homo sapiens
aggggctgaatgaat

SEQ ID NO: 783251 - DNA, 15 bp, Homo sapiens
ggggctgaatgaatg

SEQ ID NO: 783252 - DNA, 15 bp, Homo sapiens
gggctgaatgaatga

SEQ ID NO: 783253 - DNA, 15 bp, Homo sapiens
ggctgaatgaatgaa

SEQ ID NO: 783254 - DNA, 15 bp, Homo sapiens
gctgaatgaatgaat

SEQ ID NO: 783255 - DNA, 15 bp, Homo sapiens
ctgaatgaatgaatc

SEQ ID NO: 783256 - DNA, 15 bp, Homo sapiens
tgaatgaatgaatct

SEQ ID NO: 783257 - DNA, 15 bp, Homo sapiens
gaatgaatgaatctg

SEQ ID NO: 783258 - DNA, 15 bp, Homo sapiens
aatgaatgaatctgt

SEQ ID NO: 783259 - DNA, 15 bp, Homo sapiens
atgaatgaatctgtt

SEQ ID NO: 783260 - DNA, 15 bp, Homo sapiens
tgaatgaatctgttg

SEQ ID NO: 783261 - DNA, 15 bp, Homo sapiens
gaatgaatctgttga

SEQ ID NO: 783262 - DNA, 15 bp, Homo sapiens
aatgaatctgttgaa

SEQ ID NO: 783263 - DNA, 15 bp, Homo sapiens
atgaatctgttgaac

SEQ ID NO: 783264 - DNA, 15 bp, Homo sapiens
tgaatctgttgaacg

SEQ ID NO: 783265 - DNA, 15 bp, Homo sapiens
gaatctgttgaacga

SEQ ID NO: 783266 - DNA, 15 bp, Homo sapiens
aatctgttgaacgaa

SEQ ID NO: 783267 - DNA, 15 bp, Homo sapiens
atctgttgaacgaat

SEQ ID NO: 783268 - DNA, 15 bp, Homo sapiens
tctgttgaacgaatg

SEQ ID NO: 783269 - DNA, 15 bp, Homo sapiens
ctgttgaacgaatgg

SEQ ID NO: 783270 - DNA, 15 bp, Homo sapiens
tgttgaacgaatgga

SEQ ID NO: 783271 - DNA, 15 bp, Homo sapiens
gttgaacgaatggat

SEQ ID NO: 783272 - DNA, 15 bp, Homo sapiens
ttgaacgaatggatg

SEQ ID NO: 783273 - DNA, 15 bp, Homo sapiens
tgaacgaatggatga

SEQ ID NO: 783274 - DNA, 15 bp, Homo sapiens
gaacgaatggatgag

SEQ ID NO: 783275 - DNA, 15 bp, Homo sapiens
aacgaatggatgaga

SEQ ID NO: 783276 - DNA, 15 bp, Homo sapiens
acgaatggatgagag

SEQ ID NO: 783277 - DNA, 15 bp, Homo sapiens
cgaatggatgagagc

SEQ ID NO: 783278 - DNA, 15 bp, Homo sapiens
gaatggatgagagcc

SEQ ID NO: 783279 - DNA, 15 bp, Homo sapiens
aatggatgagagcct

SEQ ID NO: 783280 - DNA, 15 bp, Homo sapiens
atggatgagagcctg

SEQ ID NO: 783281 - DNA, 15 bp, Homo sapiens
tggatgagagcctga

SEQ ID NO: 783282 - DNA, 15 bp, Homo sapiens
ggatgagagcctgaa

SEQ ID NO: 783283 - DNA, 15 bp, Homo sapiens
gatgagagcctgaat

SEQ ID NO: 783284 - DNA, 15 bp, Homo sapiens
atgagagcctgaatg

SEQ ID NO: 783285 - DNA, 15 bp, Homo sapiens
tgagagcctgaatgg

SEQ ID NO: 783286 - DNA, 15 bp, Homo sapiens
gagagcctgaatggg

SEQ ID NO: 783287 - DNA, 15 bp, Homo sapiens
agagcctgaatgggt

SEQ ID NO: 783288 - DNA, 15 bp, Homo sapiens
gagcctgaatgggtc

SEQ ID NO: 783289 - DNA, 15 bp, Homo sapiens
agcctgaatgggtct

SEQ ID NO: 783290 - DNA, 15 bp, Homo sapiens
gcctgaatgggtctc

SEQ ID NO: 783291 - DNA, 15 bp, Homo sapiens
cctgaatgggtctca

SEQ ID NO: 783292 - DNA, 15 bp, Homo sapiens
ctgaatgggtctcat

SEQ ID NO: 783293 - DNA, 15 bp, Homo sapiens
tgaatgggtctcata

SEQ ID NO: 783294 - DNA, 15 bp, Homo sapiens
gaatgggtctcatag

SEQ ID NO: 783295 - DNA, 15 bp, Homo sapiens
aatgggtctcataga

SEQ ID NO: 783296 - DNA, 15 bp, Homo sapiens
atgggtctcatagac

SEQ ID NO: 783297 - DNA, 15 bp, Homo sapiens
tgggtctcatagacc

SEQ ID NO: 783298 - DNA, 15 bp, Homo sapiens
gggtctcatagaccc

SEQ ID NO: 783299 - DNA, 15 bp, Homo sapiens
ggtctcatagaccca

SEQ ID NO: 783300 - DNA, 15 bp, Homo sapiens
gtctcatagacccat

SEQ ID NO: 783301 - DNA, 15 bp, Homo sapiens
tctcatagacccatc

SEQ ID NO: 783302 - DNA, 15 bp, Homo sapiens
ctcatagacccatct

SEQ ID NO: 783303 - DNA, 15 bp, Homo sapiens
tcatagacccatctt

SEQ ID NO: 783304 - DNA, 15 bp, Homo sapiens
catagacccatcttg

SEQ ID NO: 783305 - DNA, 15 bp, Homo sapiens
atagacccatcttgg

SEQ ID NO: 783306 - DNA, 15 bp, Homo sapiens
tagacccatcttggt

SEQ ID NO: 783307 - DNA, 15 bp, Homo sapiens
agacccatcttggta

SEQ ID NO: 783308 - DNA, 15 bp, Homo sapiens
gacccatcttggtag

SEQ ID NO: 783309 - DNA, 15 bp, Homo sapiens
acccatcttggtaga

SEQ ID NO: 783310 - DNA, 15 bp, Homo sapiens
cccatcttggtagaa

SEQ ID NO: 783311 - DNA, 15 bp, Homo sapiens
ccatcttggtagaag

SEQ ID NO: 783312 - DNA, 15 bp, Homo sapiens
catcttggtagaagt

SEQ ID NO: 783313 - DNA, 15 bp, Homo sapiens
atcttggtagaagta

SEQ ID NO: 783314 - DNA, 15 bp, Homo sapiens
tcttggtagaagtaa

SEQ ID NO: 783315 - DNA, 15 bp, Homo sapiens
cttggtagaagtaag

SEQ ID NO: 783316 - DNA, 15 bp, Homo sapiens
ttggtagaagtaagt

SEQ ID NO: 783317 - DNA, 15 bp, Homo sapiens
tggtagaagtaagtt

SEQ ID NO: 783318 - DNA, 15 bp, Homo sapiens
ggtagaagtaagttc

SEQ ID NO: 783319 - DNA, 15 bp, Homo sapiens
gtagaagtaagttct

SEQ ID NO: 783320 - DNA, 15 bp, Homo sapiens
tagaagtaagttctc

SEQ ID NO: 783321 - DNA, 15 bp, Homo sapiens
agaagtaagttctcc

SEQ ID NO: 783322 - DNA, 15 bp, Homo sapiens
gaagtaagttctcct

SEQ ID NO: 783323 - DNA, 15 bp, Homo sapiens
aagtaagttctcctt

SEQ ID NO: 783324 - DNA, 15 bp, Homo sapiens
agtaagttctccttt

SEQ ID NO: 783325 - DNA, 15 bp, Homo sapiens
gtaagttctcctttg

SEQ ID NO: 783326 - DNA, 15 bp, Homo sapiens
taagttctcctttgg

SEQ ID NO: 783327 - DNA, 15 bp, Homo sapiens
aagttctcctttggt

SEQ ID NO: 783328 - DNA, 15 bp, Homo sapiens
agttctcctttggtc

SEQ ID NO: 783329 - DNA, 15 bp, Homo sapiens
gttctcctttggtca

SEQ ID NO: 783330 - DNA, 15 bp, Homo sapiens
ttctcctttggtcat

SEQ ID NO: 783331 - DNA, 15 bp, Homo sapiens
tctcctttggtcatc

SEQ ID NO: 783332 - DNA, 15 bp, Homo sapiens
ctcctttggtcatct

SEQ ID NO: 783333 - DNA, 15 bp, Homo sapiens
tcctttggtcatcta

SEQ ID NO: 783334 - DNA, 15 bp, Homo sapiens
cctttggtcatctaa

SEQ ID NO: 783335 - DNA, 15 bp, Homo sapiens
ctttggtcatctaat

SEQ ID NO: 783336 - DNA, 15 bp, Homo sapiens
tttggtcatctaatt

SEQ ID NO: 783337 - DNA, 15 bp, Homo sapiens
ttggtcatctaattc

SEQ ID NO: 783338 - DNA, 15 bp, Homo sapiens
tggtcatctaattca

SEQ ID NO: 783339 - DNA, 15 bp, Homo sapiens
ggtcatctaattcag

SEQ ID NO: 783340 - DNA, 15 bp, Homo sapiens
gtcatctaattcaga

SEQ ID NO: 783341 - DNA, 15 bp, Homo sapiens
tcatctaattcagag

SEQ ID NO: 783342 - DNA, 15 bp, Homo sapiens
catctaattcagaga

SEQ ID NO: 783343 - DNA, 15 bp, Homo sapiens
atctaattcagagaa

SEQ ID NO: 783344 - DNA, 15 bp, Homo sapiens
tctaattcagagaac

SEQ ID NO: 783345 - DNA, 15 bp, Homo sapiens
ctaattcagagaacc

SEQ ID NO: 783346 - DNA, 15 bp, Homo sapiens
taattcagagaacct

SEQ ID NO: 783347 - DNA, 15 bp, Homo sapiens
aattcagagaacctt

SEQ ID NO: 783348 - DNA, 15 bp, Homo sapiens
attcagagaaccttg

SEQ ID NO: 783349 - DNA, 15 bp, Homo sapiens
ttcagagaaccttgg

SEQ ID NO: 783350 - DNA, 15 bp, Homo sapiens
tcagagaaccttggg

SEQ ID NO: 783351 - DNA, 15 bp, Homo sapiens
cagagaaccttgggg

SEQ ID NO: 783352 - DNA, 15 bp, Homo sapiens
agagaaccttgggga

SEQ ID NO: 783353 - DNA, 15 bp, Homo sapiens
gagaaccttggggag

SEQ ID NO: 783354 - DNA, 15 bp, Homo sapiens
agaaccttggggaga

SEQ ID NO: 783355 - DNA, 15 bp, Homo sapiens
gaaccttggggagaa

SEQ ID NO: 783356 - DNA, 15 bp, Homo sapiens
aaccttggggagaaa

SEQ ID NO: 783357 - DNA, 15 bp, Homo sapiens
accttggggagaaat

SEQ ID NO: 783358 - DNA, 15 bp, Homo sapiens
ccttggggagaaata

SEQ ID NO: 783359 - DNA, 15 bp, Homo sapiens
cttggggagaaatag

SEQ ID NO: 783360 - DNA, 15 bp, Homo sapiens
ttggggagaaataga

SEQ ID NO: 783361 - DNA, 15 bp, Homo sapiens
tggggagaaatagaa

SEQ ID NO: 783362 - DNA, 15 bp, Homo sapiens
ggggagaaatagaaa

SEQ ID NO: 783363 - DNA, 15 bp, Homo sapiens
gggagaaatagaaaa

SEQ ID NO: 783364 - DNA, 15 bp, Homo sapiens
ggagaaatagaaaag

SEQ ID NO: 783365 - DNA, 15 bp, Homo sapiens
gagaaatagaaaagc

SEQ ID NO: 783366 - DNA, 15 bp, Homo sapiens
agaaatagaaaagcc

SEQ ID NO: 783367 - DNA, 15 bp, Homo sapiens
gaaatagaaaagcca

SEQ ID NO: 783368 - DNA, 15 bp, Homo sapiens
aaatagaaaagccat

SEQ ID NO: 783369 - DNA, 15 bp, Homo sapiens
aatagaaaagccatt

SEQ ID NO: 783370 - DNA, 15 bp, Homo sapiens
atagaaaagccattt

SEQ ID NO: 783371 - DNA, 15 bp, Homo sapiens
tagaaaagccatttc

SEQ ID NO: 783372 - DNA, 15 bp, Homo sapiens
agaaaagccatttcc

SEQ ID NO: 783373 - DNA, 15 bp, Homo sapiens
gaaaagccatttcca

SEQ ID NO: 783374 - DNA, 15 bp, Homo sapiens
aaaagccatttccac

SEQ ID NO: 783375 - DNA, 15 bp, Homo sapiens
aaagccatttccact

SEQ ID NO: 783376 - DNA, 15 bp, Homo sapiens
aagccatttccactc

SEQ ID NO: 783377 - DNA, 15 bp, Homo sapiens
agccatttccactcc

SEQ ID NO: 783378 - DNA, 15 bp, Homo sapiens
gccatttccactcca

SEQ ID NO: 783379 - DNA, 15 bp, Homo sapiens
ccatttccactccaa

SEQ ID NO: 783380 - DNA, 15 bp, Homo sapiens
catttccactccaaa

SEQ ID NO: 783381 - DNA, 15 bp, Homo sapiens
atttccactccaaat

SEQ ID NO: 783382 - DNA, 15 bp, Homo sapiens
tttccactccaaatg

SEQ ID NO: 783383 - DNA, 15 bp, Homo sapiens
ttccactccaaatgg

SEQ ID NO: 783384 - DNA, 15 bp, Homo sapiens
tccactccaaatggg

SEQ ID NO: 783385 - DNA, 15 bp, Homo sapiens
ccactccaaatggga

SEQ ID NO: 783386 - DNA, 15 bp, Homo sapiens
cactccaaatgggaa

SEQ ID NO: 783387 - DNA, 15 bp, Homo sapiens
actccaaatgggaat

SEQ ID NO: 783388 - DNA, 15 bp, Homo sapiens
ctccaaatgggaatc

SEQ ID NO: 783389 - DNA, 15 bp, Homo sapiens
tccaaatgggaatct

SEQ ID NO: 783390 - DNA, 15 bp, Homo sapiens
ccaaatgggaatcta

SEQ ID NO: 783391 - DNA, 15 bp, Homo sapiens
caaatgggaatctaa

SEQ ID NO: 783392 - DNA, 15 bp, Homo sapiens
aaatgggaatctaag

SEQ ID NO: 783393 - DNA, 15 bp, Homo sapiens
aatgggaatctaagg

SEQ ID NO: 783394 - DNA, 15 bp, Homo sapiens
atgggaatctaaggt

SEQ ID NO: 783395 - DNA, 15 bp, Homo sapiens
tgggaatctaaggtc

SEQ ID NO: 783396 - DNA, 15 bp, Homo sapiens
gggaatctaaggtca

SEQ ID NO: 783397 - DNA, 15 bp, Homo sapiens
ggaatctaaggtcag

SEQ ID NO: 783398 - DNA, 15 bp, Homo sapiens
gaatctaaggtcaga

SEQ ID NO: 783399 - DNA, 15 bp, Homo sapiens
aatctaaggtcagaa

SEQ ID NO: 783400 - DNA, 15 bp, Homo sapiens
atctaaggtcagaaa

SEQ ID NO: 783401 - DNA, 15 bp, Homo sapiens
tctaaggtcagaaaa

SEQ ID NO: 783402 - DNA, 15 bp, Homo sapiens
ctaaggtcagaaaag

SEQ ID NO: 783403 - DNA, 15 bp, Homo sapiens
taaggtcagaaaagc

SEQ ID NO: 783404 - DNA, 15 bp, Homo sapiens
aaggtcagaaaagca

SEQ ID NO: 783405 - DNA, 15 bp, Homo sapiens
aggtcagaaaagcac

SEQ ID NO: 783406 - DNA, 15 bp, Homo sapiens
ggtcagaaaagcaca

SEQ ID NO: 783407 - DNA, 15 bp, Homo sapiens
gtcagaaaagcacag

SEQ ID NO: 783408 - DNA, 15 bp, Homo sapiens
tcagaaaagcacagg

SEQ ID NO: 783409 - DNA, 15 bp, Homo sapiens
cagaaaagcacaggg

SEQ ID NO: 783410 - DNA, 15 bp, Homo sapiens
agaaaagcacagggt

SEQ ID NO: 783411 - DNA, 15 bp, Homo sapiens
gaaaagcacagggtt

SEQ ID NO: 783412 - DNA, 15 bp, Homo sapiens
aaaagcacagggttg

SEQ ID NO: 783413 - DNA, 15 bp, Homo sapiens
aaagcacagggttgc

SEQ ID NO: 783414 - DNA, 15 bp, Homo sapiens
aagcacagggttgcc

SEQ ID NO: 783415 - DNA, 15 bp, Homo sapiens
agcacagggttgccc

SEQ ID NO: 783416 - DNA, 15 bp, Homo sapiens
gcacagggttgccca

SEQ ID NO: 783417 - DNA, 15 bp, Homo sapiens
cacagggttgcccag

SEQ ID NO: 783418 - DNA, 15 bp, Homo sapiens
acagggttgcccagg

SEQ ID NO: 783419 - DNA, 15 bp, Homo sapiens
cagggttgcccaggg

SEQ ID NO: 783420 - DNA, 15 bp, Homo sapiens
agggttgcccagggc

SEQ ID NO: 783421 - DNA, 15 bp, Homo sapiens
gggttgcccagggct

SEQ ID NO: 783422 - DNA, 15 bp, Homo sapiens
ggttgcccagggcta

SEQ ID NO: 783423 - DNA, 15 bp, Homo sapiens
gttgcccagggctaa

SEQ ID NO: 783424 - DNA, 15 bp, Homo sapiens
ttgcccagggctaag

SEQ ID NO: 783425 - DNA, 15 bp, Homo sapiens
tgcccagggctaagc

SEQ ID NO: 783426 - DNA, 15 bp, Homo sapiens
gcccagggctaagct

SEQ ID NO: 783427 - DNA, 15 bp, Homo sapiens
cccagggctaagctg

SEQ ID NO: 783428 - DNA, 15 bp, Homo sapiens
ccagggctaagctgt

SEQ ID NO: 783429 - DNA, 15 bp, Homo sapiens
cagggctaagctgta

SEQ ID NO: 783430 - DNA, 15 bp, Homo sapiens
agggctaagctgtaa

SEQ ID NO: 783431 - DNA, 15 bp, Homo sapiens
gggctaagctgtaaa

SEQ ID NO: 783432 - DNA, 15 bp, Homo sapiens
ggctaagctgtaaat

SEQ ID NO: 783433 - DNA, 15 bp, Homo sapiens
gctaagctgtaaata

SEQ ID NO: 783434 - DNA, 15 bp, Homo sapiens
ctaagctgtaaatat

SEQ ID NO: 783435 - DNA, 15 bp, Homo sapiens
taagctgtaaatatt

SEQ ID NO: 783436 - DNA, 15 bp, Homo sapiens
aagctgtaaatattg

SEQ ID NO: 783437 - DNA, 15 bp, Homo sapiens
agctgtaaatattgg

SEQ ID NO: 783438 - DNA, 15 bp, Homo sapiens
gctgtaaatattggc

SEQ ID NO: 783439 - DNA, 15 bp, Homo sapiens
ctgtaaatattggca

SEQ ID NO: 783440 - DNA, 15 bp, Homo sapiens
tgtaaatattggcat

SEQ ID NO: 783441 - DNA, 15 bp, Homo sapiens
gtaaatattggcatt

SEQ ID NO: 783442 - DNA, 15 bp, Homo sapiens
taaatattggcattc

SEQ ID NO: 783443 - DNA, 15 bp, Homo sapiens
aaatattggcattct

SEQ ID NO: 783444 - DNA, 15 bp, Homo sapiens
aatattggcattctg

SEQ ID NO: 783445 - DNA, 15 bp, Homo sapiens
atattggcattctga

SEQ ID NO: 783446 - DNA, 15 bp, Homo sapiens
tattggcattctgag

SEQ ID NO: 783447 - DNA, 15 bp, Homo sapiens
attggcattctgaga

SEQ ID NO: 783448 - DNA, 15 bp, Homo sapiens
ttggcattctgagaa

SEQ ID NO: 783449 - DNA, 15 bp, Homo sapiens
tggcattctgagaaa

SEQ ID NO: 783450 - DNA, 15 bp, Homo sapiens
ggcattctgagaaag

SEQ ID NO: 783451 - DNA, 15 bp, Homo sapiens
gcattctgagaaaga

SEQ ID NO: 783452 - DNA, 15 bp, Homo sapiens
cattctgagaaagag

SEQ ID NO: 783453 - DNA, 15 bp, Homo sapiens
attctgagaaagagg

SEQ ID NO: 783454 - DNA, 15 bp, Homo sapiens
ttctgagaaagaggt

SEQ ID NO: 783455 - DNA, 15 bp, Homo sapiens
tctgagaaagaggtc

SEQ ID NO: 783456 - DNA, 15 bp, Homo sapiens
ctgagaaagaggtca

SEQ ID NO: 783457 - DNA, 15 bp, Homo sapiens
tgagaaagaggtcat

SEQ ID NO: 783458 - DNA, 15 bp, Homo sapiens
gagaaagaggtcata

SEQ ID NO: 783459 - DNA, 15 bp, Homo sapiens
agaaagaggtcataa

SEQ ID NO: 783460 - DNA, 15 bp, Homo sapiens
gaaagaggtcataag

SEQ ID NO: 783461 - DNA, 15 bp, Homo sapiens
aaagaggtcataagt

SEQ ID NO: 783462 - DNA, 15 bp, Homo sapiens
aagaggtcataagtt

SEQ ID NO: 783463 - DNA, 15 bp, Homo sapiens
agaggtcataagttt

SEQ ID NO: 783464 - DNA, 15 bp, Homo sapiens
gaggtcataagtttg

SEQ ID NO: 783465 - DNA, 15 bp, Homo sapiens
aggtcataagtttgg

SEQ ID NO: 783466 - DNA, 15 bp, Homo sapiens
ggtcataagtttgga

SEQ ID NO: 783467 - DNA, 15 bp, Homo sapiens
gtcataagtttggag

SEQ ID NO: 783468 - DNA, 15 bp, Homo sapiens
tcataagtttggaga

SEQ ID NO: 783469 - DNA, 15 bp, Homo sapiens
cataagtttggagac

SEQ ID NO: 783470 - DNA, 15 bp, Homo sapiens
ataagtttggagact

SEQ ID NO: 783471 - DNA, 15 bp, Homo sapiens
taagtttggagactt

SEQ ID NO: 783472 - DNA, 15 bp, Homo sapiens
aagtttggagacttt

SEQ ID NO: 783473 - DNA, 15 bp, Homo sapiens
agtttggagactttg

SEQ ID NO: 783474 - DNA, 15 bp, Homo sapiens
gtttggagactttgc

SEQ ID NO: 783475 - DNA, 15 bp, Homo sapiens
tttggagactttgca

SEQ ID NO: 783476 - DNA, 15 bp, Homo sapiens
ttggagactttgcac

SEQ ID NO: 783477 - DNA, 15 bp, Homo sapiens
tggagactttgcact

SEQ ID NO: 783478 - DNA, 15 bp, Homo sapiens
ggagactttgcactt

SEQ ID NO: 783479 - DNA, 15 bp, Homo sapiens
gagactttgcacttt

SEQ ID NO: 783480 - DNA, 15 bp, Homo sapiens
agactttgcactttc

SEQ ID NO: 783481 - DNA, 15 bp, Homo sapiens
gactttgcactttct

SEQ ID NO: 783482 - DNA, 15 bp, Homo sapiens
actttgcactttctc

SEQ ID NO: 783483 - DNA, 15 bp, Homo sapiens
ctttgcactttctct

SEQ ID NO: 783484 - DNA, 15 bp, Homo sapiens
tttgcactttctctt

SEQ ID NO: 783485 - DNA, 15 bp, Homo sapiens
ttgcactttctcttt

SEQ ID NO: 783486 - DNA, 15 bp, Homo sapiens
tgcactttctctttg

SEQ ID NO: 783487 - DNA, 15 bp, Homo sapiens
gcactttctctttgg

SEQ ID NO: 783488 - DNA, 15 bp, Homo sapiens
cactttctctttgga

SEQ ID NO: 783489 - DNA, 15 bp, Homo sapiens
actttctctttggaa

SEQ ID NO: 783490 - DNA, 15 bp, Homo sapiens
ctttctctttggaaa

SEQ ID NO: 783491 - DNA, 15 bp, Homo sapiens
tttctctttggaaat

SEQ ID NO: 783492 - DNA, 15 bp, Homo sapiens
ttctctttggaaatg

SEQ ID NO: 783493 - DNA, 15 bp, Homo sapiens
tctctttggaaatgg

SEQ ID NO: 783494 - DNA, 15 bp, Homo sapiens
ctctttggaaatgga

SEQ ID NO: 783495 - DNA, 15 bp, Homo sapiens
tctttggaaatggaa

SEQ ID NO: 783496 - DNA, 15 bp, Homo sapiens
ctttggaaatggaaa

SEQ ID NO: 783497 - DNA, 15 bp, Homo sapiens
tttggaaatggaaaa

SEQ ID NO: 783498 - DNA, 15 bp, Homo sapiens
ttggaaatggaaaag

SEQ ID NO: 783499 - DNA, 15 bp, Homo sapiens
tggaaatggaaaagt

SEQ ID NO: 783500 - DNA, 15 bp, Homo sapiens
ggaaatggaaaagtc

SEQ ID NO: 783501 - DNA, 15 bp, Homo sapiens
gaaatggaaaagtca

SEQ ID NO: 783502 - DNA, 15 bp, Homo sapiens
aaatggaaaagtcat

SEQ ID NO: 783503 - DNA, 15 bp, Homo sapiens
aatggaaaagtcatt

SEQ ID NO: 783504 - DNA, 15 bp, Homo sapiens
atggaaaagtcattt

SEQ ID NO: 783505 - DNA, 15 bp, Homo sapiens
tggaaaagtcatttc

SEQ ID NO: 783506 - DNA, 15 bp, Homo sapiens
ggaaaagtcatttca

SEQ ID NO: 783507 - DNA, 15 bp, Homo sapiens
gaaaagtcatttcat

SEQ ID NO: 783508 - DNA, 15 bp, Homo sapiens
aaaagtcatttcatt

SEQ ID NO: 783509 - DNA, 15 bp, Homo sapiens
aaagtcatttcattt

SEQ ID NO: 783510 - DNA, 15 bp, Homo sapiens
aagtcatttcatttc

SEQ ID NO: 783511 - DNA, 15 bp, Homo sapiens
agtcatttcatttca

SEQ ID NO: 783512 - DNA, 15 bp, Homo sapiens
gtcatttcatttcac

SEQ ID NO: 783513 - DNA, 15 bp, Homo sapiens
tcatttcatttcacc

SEQ ID NO: 783514 - DNA, 15 bp, Homo sapiens
catttcatttcacca

SEQ ID NO: 783515 - DNA, 15 bp, Homo sapiens
atttcatttcaccac

SEQ ID NO: 783516 - DNA, 15 bp, Homo sapiens
tttcatttcaccaca

SEQ ID NO: 783517 - DNA, 15 bp, Homo sapiens
ttcatttcaccacat

SEQ ID NO: 783518 - DNA, 15 bp, Homo sapiens
tcatttcaccacatc

SEQ ID NO: 783519 - DNA, 15 bp, Homo sapiens
catttcaccacatcc

SEQ ID NO: 783520 - DNA, 15 bp, Homo sapiens
atttcaccacatcca

SEQ ID NO: 783521 - DNA, 15 bp, Homo sapiens
tttcaccacatccac

SEQ ID NO: 783522 - DNA, 15 bp, Homo sapiens
ttcaccacatccact

SEQ ID NO: 783523 - DNA, 15 bp, Homo sapiens
tcaccacatccacta

SEQ ID NO: 783524 - DNA, 15 bp, Homo sapiens
caccacatccactaa

SEQ ID NO: 783525 - DNA, 15 bp, Homo sapiens
accacatccactaag

SEQ ID NO: 783526 - DNA, 15 bp, Homo sapiens
ccacatccactaagg

SEQ ID NO: 783527 - DNA, 15 bp, Homo sapiens
cacatccactaaggt

SEQ ID NO: 783528 - DNA, 15 bp, Homo sapiens
acatccactaaggtg

SEQ ID NO: 783529 - DNA, 15 bp, Homo sapiens
catccactaaggtgc

SEQ ID NO: 783530 - DNA, 15 bp, Homo sapiens
atccactaaggtgca

SEQ ID NO: 783531 - DNA, 15 bp, Homo sapiens
tccactaaggtgcat

SEQ ID NO: 783532 - DNA, 15 bp, Homo sapiens
ccactaaggtgcatg

SEQ ID NO: 783533 - DNA, 15 bp, Homo sapiens
cactaaggtgcatga

SEQ ID NO: 783534 - DNA, 15 bp, Homo sapiens
actaaggtgcatgaa

SEQ ID NO: 783535 - DNA, 15 bp, Homo sapiens
ctaaggtgcatgaag

SEQ ID NO: 783536 - DNA, 15 bp, Homo sapiens
taaggtgcatgaagt

SEQ ID NO: 783537 - DNA, 15 bp, Homo sapiens
aaggtgcatgaagta

SEQ ID NO: 783538 - DNA, 15 bp, Homo sapiens
aggtgcatgaagtaa

SEQ ID NO: 783539 - DNA, 15 bp, Homo sapiens
ggtgcatgaagtaaa

SEQ ID NO: 783540 - DNA, 15 bp, Homo sapiens
gtgcatgaagtaaac

SEQ ID NO: 783541 - DNA, 15 bp, Homo sapiens
tgcatgaagtaaaca

SEQ ID NO: 783542 - DNA, 15 bp, Homo sapiens
gcatgaagtaaacag

SEQ ID NO: 783543 - DNA, 15 bp, Homo sapiens
catgaagtaaacagc

SEQ ID NO: 783544 - DNA, 15 bp, Homo sapiens
atgaagtaaacagca

SEQ ID NO: 783545 - DNA, 15 bp, Homo sapiens
tgaagtaaacagcag

SEQ ID NO: 783546 - DNA, 15 bp, Homo sapiens
gaagtaaacagcaga

SEQ ID NO: 783547 - DNA, 15 bp, Homo sapiens
aagtaaacagcagac

SEQ ID NO: 783548 - DNA, 15 bp, Homo sapiens
agtaaacagcagaca

SEQ ID NO: 783549 - DNA, 15 bp, Homo sapiens
gtaaacagcagacac

SEQ ID NO: 783550 - DNA, 15 bp, Homo sapiens
taaacagcagacacg

SEQ ID NO: 783551 - DNA, 15 bp, Homo sapiens
aaacagcagacacgc

SEQ ID NO: 783552 - DNA, 15 bp, Homo sapiens
aacagcagacacgct

SEQ ID NO: 783553 - DNA, 15 bp, Homo sapiens
acagcagacacgctg

SEQ ID NO: 783554 - DNA, 15 bp, Homo sapiens
cagcagacacgctgg

SEQ ID NO: 783555 - DNA, 15 bp, Homo sapiens
agcagacacgctgga

SEQ ID NO: 783556 - DNA, 15 bp, Homo sapiens
gcagacacgctggat

SEQ ID NO: 783557 - DNA, 15 bp, Homo sapiens
cagacacgctggatg

SEQ ID NO: 783558 - DNA, 15 bp, Homo sapiens
agacacgctggatgc

SEQ ID NO: 783559 - DNA, 15 bp, Homo sapiens
gacacgctggatgct

SEQ ID NO: 783560 - DNA, 15 bp, Homo sapiens
acacgctggatgctt

SEQ ID NO: 783561 - DNA, 15 bp, Homo sapiens
cacgctggatgcttg

SEQ ID NO: 783562 - DNA, 15 bp, Homo sapiens
acgctggatgcttgg

SEQ ID NO: 783563 - DNA, 15 bp, Homo sapiens
cgctggatgcttggg

SEQ ID NO: 783564 - DNA, 15 bp, Homo sapiens
gctggatgcttgggg

SEQ ID NO: 783565 - DNA, 15 bp, Homo sapiens
ctggatgcttggggc

SEQ ID NO: 783566 - DNA, 15 bp, Homo sapiens
tggatgcttggggca

SEQ ID NO: 783567 - DNA, 15 bp, Homo sapiens
ggatgcttggggcat

SEQ ID NO: 783568 - DNA, 15 bp, Homo sapiens
gatgcttggggcatc

SEQ ID NO: 783569 - DNA, 15 bp, Homo sapiens
atgcttggggcatca

SEQ ID NO: 783570 - DNA, 15 bp, Homo sapiens
tgcttggggcatcat

SEQ ID NO: 783571 - DNA, 15 bp, Homo sapiens
gcttggggcatcatt

SEQ ID NO: 783572 - DNA, 15 bp, Homo sapiens
cttggggcatcattc

SEQ ID NO: 783573 - DNA, 15 bp, Homo sapiens
ttggggcatcattcc

SEQ ID NO: 783574 - DNA, 15 bp, Homo sapiens
tggggcatcattcct

SEQ ID NO: 783575 - DNA, 15 bp, Homo sapiens
ggggcatcattcctt

SEQ ID NO: 783576 - DNA, 15 bp, Homo sapiens
gggcatcattccttc

SEQ ID NO: 783577 - DNA, 15 bp, Homo sapiens
ggcatcattccttca

SEQ ID NO: 783578 - DNA, 15 bp, Homo sapiens
gcatcattccttcaa

SEQ ID NO: 783579 - DNA, 15 bp, Homo sapiens
catcattccttcaac

SEQ ID NO: 783580 - DNA, 15 bp, Homo sapiens
atcattccttcaaca

SEQ ID NO: 783581 - DNA, 15 bp, Homo sapiens
tcattccttcaacag

SEQ ID NO: 783582 - DNA, 15 bp, Homo sapiens
cattccttcaacagg

SEQ ID NO: 783583 - DNA, 15 bp, Homo sapiens
attccttcaacaggg

SEQ ID NO: 783584 - DNA, 15 bp, Homo sapiens
ttccttcaacaggga

SEQ ID NO: 783585 - DNA, 15 bp, Homo sapiens
tccttcaacagggac

SEQ ID NO: 783586 - DNA, 15 bp, Homo sapiens
ccttcaacagggaca

SEQ ID NO: 783587 - DNA, 15 bp, Homo sapiens
cttcaacagggacaa

SEQ ID NO: 783588 - DNA, 15 bp, Homo sapiens
ttcaacagggacaac

SEQ ID NO: 783589 - DNA, 15 bp, Homo sapiens
tcaacagggacaaca

SEQ ID NO: 783590 - DNA, 15 bp, Homo sapiens
caacagggacaacag

SEQ ID NO: 783591 - DNA, 15 bp, Homo sapiens
aacagggacaacagc

SEQ ID NO: 783592 - DNA, 15 bp, Homo sapiens
acagggacaacagct

SEQ ID NO: 783593 - DNA, 15 bp, Homo sapiens
cagggacaacagctt

SEQ ID NO: 783594 - DNA, 15 bp, Homo sapiens
agggacaacagcttt

SEQ ID NO: 783595 - DNA, 15 bp, Homo sapiens
gggacaacagctttc

SEQ ID NO: 783596 - DNA, 15 bp, Homo sapiens
ggacaacagctttca

SEQ ID NO: 783597 - DNA, 15 bp, Homo sapiens
gacaacagctttcat

SEQ ID NO: 783598 - DNA, 15 bp, Homo sapiens
acaacagctttcatg

SEQ ID NO: 783599 - DNA, 15 bp, Homo sapiens
caacagctttcatga

SEQ ID NO: 783600 - DNA, 15 bp, Homo sapiens
aacagctttcatgag

SEQ ID NO: 783601 - DNA, 15 bp, Homo sapiens
acagctttcatgagg

SEQ ID NO: 783602 - DNA, 15 bp, Homo sapiens
cagctttcatgaggg

SEQ ID NO: 783603 - DNA, 15 bp, Homo sapiens
agctttcatgagggt

SEQ ID NO: 783604 - DNA, 15 bp, Homo sapiens
gctttcatgagggtt

SEQ ID NO: 783605 - DNA, 15 bp, Homo sapiens
ctttcatgagggttc

SEQ ID NO: 783606 - DNA, 15 bp, Homo sapiens
tttcatgagggttct

SEQ ID NO: 783607 - DNA, 15 bp, Homo sapiens
ttcatgagggttcta

SEQ ID NO: 783608 - DNA, 15 bp, Homo sapiens
tcatgagggttctac

SEQ ID NO: 783609 - DNA, 15 bp, Homo sapiens
catgagggttctact

SEQ ID NO: 783610 - DNA, 15 bp, Homo sapiens
atgagggttctacta

SEQ ID NO: 783611 - DNA, 15 bp, Homo sapiens
tgagggttctactag

SEQ ID NO: 783612 - DNA, 15 bp, Homo sapiens
gagggttctactagg

SEQ ID NO: 783613 - DNA, 15 bp, Homo sapiens
agggttctactaggt

SEQ ID NO: 783614 - DNA, 15 bp, Homo sapiens
gggttctactaggtt

SEQ ID NO: 783615 - DNA, 15 bp, Homo sapiens
ggttctactaggtta

SEQ ID NO: 783616 - DNA, 15 bp, Homo sapiens
gttctactaggttaa

SEQ ID NO: 783617 - DNA, 15 bp, Homo sapiens
ttctactaggttaag

SEQ ID NO: 783618 - DNA, 15 bp, Homo sapiens
tctactaggttaagt

SEQ ID NO: 783619 - DNA, 15 bp, Homo sapiens
ctactaggttaagta

SEQ ID NO: 783620 - DNA, 15 bp, Homo sapiens
tactaggttaagtag

SEQ ID NO: 783621 - DNA, 15 bp, Homo sapiens
actaggttaagtaga

SEQ ID NO: 783622 - DNA, 15 bp, Homo sapiens
ctaggttaagtagag

SEQ ID NO: 783623 - DNA, 15 bp, Homo sapiens
taggttaagtagaga

SEQ ID NO: 783624 - DNA, 15 bp, Homo sapiens
aggttaagtagagag

SEQ ID NO: 783625 - DNA, 15 bp, Homo sapiens
ggttaagtagagagg

SEQ ID NO: 783626 - DNA, 15 bp, Homo sapiens
gttaagtagagagga

SEQ ID NO: 783627 - DNA, 15 bp, Homo sapiens
ttaagtagagaggag

SEQ ID NO: 783628 - DNA, 15 bp, Homo sapiens
taagtagagaggagc

SEQ ID NO: 783629 - DNA, 15 bp, Homo sapiens
aagtagagaggagca

SEQ ID NO: 783630 - DNA, 15 bp, Homo sapiens
agtagagaggagcag

SEQ ID NO: 783631 - DNA, 15 bp, Homo sapiens
gtagagaggagcaga

SEQ ID NO: 783632 - DNA, 15 bp, Homo sapiens
tagagaggagcagat

SEQ ID NO: 783633 - DNA, 15 bp, Homo sapiens
agagaggagcagatt

SEQ ID NO: 783634 - DNA, 15 bp, Homo sapiens
gagaggagcagattt

SEQ ID NO: 783635 - DNA, 15 bp, Homo sapiens
agaggagcagatttt

SEQ ID NO: 783636 - DNA, 15 bp, Homo sapiens
gaggagcagattttt

SEQ ID NO: 783637 - DNA, 15 bp, Homo sapiens
aggagcagatttttc

SEQ ID NO: 783638 - DNA, 15 bp, Homo sapiens
ggagcagatttttca

SEQ ID NO: 783639 - DNA, 15 bp, Homo sapiens
gagcagatttttcag

SEQ ID NO: 783640 - DNA, 15 bp, Homo sapiens
agcagatttttcagg

SEQ ID NO: 783641 - DNA, 15 bp, Homo sapiens
gcagatttttcaggg

SEQ ID NO: 783642 - DNA, 15 bp, Homo sapiens
cagatttttcagggg

SEQ ID NO: 783643 - DNA, 15 bp, Homo sapiens
agatttttcagggga

SEQ ID NO: 783644 - DNA, 15 bp, Homo sapiens
gatttttcaggggaa

SEQ ID NO: 783645 - DNA, 15 bp, Homo sapiens
atttttcaggggaag

SEQ ID NO: 783646 - DNA, 15 bp, Homo sapiens
tttttcaggggaagg

SEQ ID NO: 783647 - DNA, 15 bp, Homo sapiens
ttttcaggggaaggg

SEQ ID NO: 783648 - DNA, 15 bp, Homo sapiens
tttcaggggaaggga

SEQ ID NO: 783649 - DNA, 15 bp, Homo sapiens
ttcaggggaagggat

SEQ ID NO: 783650 - DNA, 15 bp, Homo sapiens
tcaggggaagggatg

SEQ ID NO: 783651 - DNA, 15 bp, Homo sapiens
caggggaagggatgg

SEQ ID NO: 783652 - DNA, 15 bp, Homo sapiens
aggggaagggatggc

SEQ ID NO: 783653 - DNA, 15 bp, Homo sapiens
ggggaagggatggca

SEQ ID NO: 783654 - DNA, 15 bp, Homo sapiens
gggaagggatggcag

SEQ ID NO: 783655 - DNA, 15 bp, Homo sapiens
ggaagggatggcaga

SEQ ID NO: 783656 - DNA, 15 bp, Homo sapiens
gaagggatggcagaa

SEQ ID NO: 783657 - DNA, 15 bp, Homo sapiens
aagggatggcagaag

SEQ ID NO: 783658 - DNA, 15 bp, Homo sapiens
agggatggcagaagc

SEQ ID NO: 783659 - DNA, 15 bp, Homo sapiens
gggatggcagaagca

SEQ ID NO: 783660 - DNA, 15 bp, Homo sapiens
ggatggcagaagcaa

SEQ ID NO: 783661 - DNA, 15 bp, Homo sapiens
gatggcagaagcaag

SEQ ID NO: 783662 - DNA, 15 bp, Homo sapiens
atggcagaagcaagg

SEQ ID NO: 783663 - DNA, 15 bp, Homo sapiens
tggcagaagcaaggc

SEQ ID NO: 783664 - DNA, 15 bp, Homo sapiens
ggcagaagcaaggct

SEQ ID NO: 783665 - DNA, 15 bp, Homo sapiens
gcagaagcaaggctg

SEQ ID NO: 783666 - DNA, 15 bp, Homo sapiens
cagaagcaaggctga

SEQ ID NO: 783667 - DNA, 15 bp, Homo sapiens
agaagcaaggctgag

SEQ ID NO: 783668 - DNA, 15 bp, Homo sapiens
gaagcaaggctgaga

SEQ ID NO: 783669 - DNA, 15 bp, Homo sapiens
aagcaaggctgagaa

SEQ ID NO: 783670 - DNA, 15 bp, Homo sapiens
agcaaggctgagaag

SEQ ID NO: 783671 - DNA, 15 bp, Homo sapiens
gcaaggctgagaagt

SEQ ID NO: 783672 - DNA, 15 bp, Homo sapiens
caaggctgagaagtc

SEQ ID NO: 783673 - DNA, 15 bp, Homo sapiens
aaggctgagaagtca

SEQ ID NO: 783674 - DNA, 15 bp, Homo sapiens
aggctgagaagtcag

SEQ ID NO: 783675 - DNA, 15 bp, Homo sapiens
ggctgagaagtcagg

SEQ ID NO: 783676 - DNA, 15 bp, Homo sapiens
gctgagaagtcaggc

SEQ ID NO: 783677 - DNA, 15 bp, Homo sapiens
ctgagaagtcaggcg

SEQ ID NO: 783678 - DNA, 15 bp, Homo sapiens
tgagaagtcaggcgt

SEQ ID NO: 783679 - DNA, 15 bp, Homo sapiens
gagaagtcaggcgtg

SEQ ID NO: 783680 - DNA, 15 bp, Homo sapiens
agaagtcaggcgtga

SEQ ID NO: 783681 - DNA, 15 bp, Homo sapiens
gaagtcaggcgtgat

SEQ ID NO: 783682 - DNA, 15 bp, Homo sapiens
aagtcaggcgtgatc

SEQ ID NO: 783683 - DNA, 15 bp, Homo sapiens
agtcaggcgtgatca

SEQ ID NO: 783684 - DNA, 15 bp, Homo sapiens
gtcaggcgtgatcat

SEQ ID NO: 783685 - DNA, 15 bp, Homo sapiens
tcaggcgtgatcatt

SEQ ID NO: 783686 - DNA, 15 bp, Homo sapiens
caggcgtgatcattc

SEQ ID NO: 783687 - DNA, 15 bp, Homo sapiens
aggcgtgatcattca

SEQ ID NO: 783688 - DNA, 15 bp, Homo sapiens
ggcgtgatcattcat

SEQ ID NO: 783689 - DNA, 15 bp, Homo sapiens
gcgtgatcattcatc

SEQ ID NO: 783690 - DNA, 15 bp, Homo sapiens
cgtgatcattcatct

SEQ ID NO: 783691 - DNA, 15 bp, Homo sapiens
gtgatcattcatctg

SEQ ID NO: 783692 - DNA, 15 bp, Homo sapiens
tgatcattcatctga

SEQ ID NO: 783693 - DNA, 15 bp, Homo sapiens
gatcattcatctgag

SEQ ID NO: 783694 - DNA, 15 bp, Homo sapiens
atcattcatctgagc

SEQ ID NO: 783695 - DNA, 15 bp, Homo sapiens
tcattcatctgagct

SEQ ID NO: 783696 - DNA, 15 bp, Homo sapiens
cattcatctgagctc

SEQ ID NO: 783697 - DNA, 15 bp, Homo sapiens
attcatctgagctcc

SEQ ID NO: 783698 - DNA, 15 bp, Homo sapiens
ttcatctgagctcct

SEQ ID NO: 783699 - DNA, 15 bp, Homo sapiens
tcatctgagctccta

SEQ ID NO: 783700 - DNA, 15 bp, Homo sapiens
catctgagctcctac

SEQ ID NO: 783701 - DNA, 15 bp, Homo sapiens
atctgagctcctact

SEQ ID NO: 783702 - DNA, 15 bp, Homo sapiens
tctgagctcctacta

SEQ ID NO: 783703 - DNA, 15 bp, Homo sapiens
ctgagctcctactat

SEQ ID NO: 783704 - DNA, 15 bp, Homo sapiens
tgagctcctactatg

SEQ ID NO: 783705 - DNA, 15 bp, Homo sapiens
gagctcctactatgt

SEQ ID NO: 783706 - DNA, 15 bp, Homo sapiens
agctcctactatgtg

SEQ ID NO: 783707 - DNA, 15 bp, Homo sapiens
gctcctactatgtgc

SEQ ID NO: 783708 - DNA, 15 bp, Homo sapiens
ctcctactatgtgct

SEQ ID NO: 783709 - DNA, 15 bp, Homo sapiens
tcctactatgtgctg

SEQ ID NO: 783710 - DNA, 15 bp, Homo sapiens
cctactatgtgctgg

SEQ ID NO: 783711 - DNA, 15 bp, Homo sapiens
ctactatgtgctggg

SEQ ID NO: 783712 - DNA, 15 bp, Homo sapiens
tactatgtgctgggc

SEQ ID NO: 783713 - DNA, 15 bp, Homo sapiens
actatgtgctgggct

SEQ ID NO: 783714 - DNA, 15 bp, Homo sapiens
ctatgtgctgggctc

SEQ ID NO: 783715 - DNA, 15 bp, Homo sapiens
tatgtgctgggctca

SEQ ID NO: 783716 - DNA, 15 bp, Homo sapiens
atgtgctgggctcag

SEQ ID NO: 783717 - DNA, 15 bp, Homo sapiens
tgtgctgggctcaga

SEQ ID NO: 783718 - DNA, 15 bp, Homo sapiens
gtgctgggctcagaa

SEQ ID NO: 783719 - DNA, 15 bp, Homo sapiens
tgctgggctcagaac

SEQ ID NO: 783720 - DNA, 15 bp, Homo sapiens
gctgggctcagaacc

SEQ ID NO: 783721 - DNA, 15 bp, Homo sapiens
ctgggctcagaacca

SEQ ID NO: 783722 - DNA, 15 bp, Homo sapiens
tgggctcagaaccag

SEQ ID NO: 783723 - DNA, 15 bp, Homo sapiens
gggctcagaaccaga

SEQ ID NO: 783724 - DNA, 15 bp, Homo sapiens
ggctcagaaccagat

SEQ ID NO: 783725 - DNA, 15 bp, Homo sapiens
gctcagaaccagatg

SEQ ID NO: 783726 - DNA, 15 bp, Homo sapiens
ctcagaaccagatgt

SEQ ID NO: 783727 - DNA, 15 bp, Homo sapiens
tcagaaccagatgtg

SEQ ID NO: 783728 - DNA, 15 bp, Homo sapiens
cagaaccagatgtgg

SEQ ID NO: 783729 - DNA, 15 bp, Homo sapiens
agaaccagatgtgga

SEQ ID NO: 783730 - DNA, 15 bp, Homo sapiens
gaaccagatgtggat

SEQ ID NO: 783731 - DNA, 15 bp, Homo sapiens
aaccagatgtggatc

SEQ ID NO: 783732 - DNA, 15 bp, Homo sapiens
accagatgtggatct

SEQ ID NO: 783733 - DNA, 15 bp, Homo sapiens
ccagatgtggatcta

SEQ ID NO: 783734 - DNA, 15 bp, Homo sapiens
cagatgtggatctac

SEQ ID NO: 783735 - DNA, 15 bp, Homo sapiens
agatgtggatctaca

SEQ ID NO: 783736 - DNA, 15 bp, Homo sapiens
gatgtggatctacag

SEQ ID NO: 783737 - DNA, 15 bp, Homo sapiens
atgtggatctacagc

SEQ ID NO: 783738 - DNA, 15 bp, Homo sapiens
tgtggatctacagct

SEQ ID NO: 783739 - DNA, 15 bp, Homo sapiens
gtggatctacagctt

SEQ ID NO: 783740 - DNA, 15 bp, Homo sapiens
tggatctacagctta

SEQ ID NO: 783741 - DNA, 15 bp, Homo sapiens
ggatctacagcttat

SEQ ID NO: 783742 - DNA, 15 bp, Homo sapiens
gatctacagcttatt

SEQ ID NO: 783743 - DNA, 15 bp, Homo sapiens
atctacagcttattt

SEQ ID NO: 783744 - DNA, 15 bp, Homo sapiens
tctacagcttattta

SEQ ID NO: 783745 - DNA, 15 bp, Homo sapiens
ctacagcttatttat

SEQ ID NO: 783746 - DNA, 15 bp, Homo sapiens
tacagcttatttatg

SEQ ID NO: 783747 - DNA, 15 bp, Homo sapiens
acagcttatttatgg

SEQ ID NO: 783748 - DNA, 15 bp, Homo sapiens
cagcttatttatggg

SEQ ID NO: 783749 - DNA, 15 bp, Homo sapiens
agcttatttatgggt

SEQ ID NO: 783750 - DNA, 15 bp, Homo sapiens
gcttatttatgggtg

SEQ ID NO: 783751 - DNA, 15 bp, Homo sapiens
cttatttatgggtgc

SEQ ID NO: 783752 - DNA, 15 bp, Homo sapiens
ttatttatgggtgca

SEQ ID NO: 783753 - DNA, 15 bp, Homo sapiens
tatttatgggtgcat

SEQ ID NO: 783754 - DNA, 15 bp, Homo sapiens
atttatgggtgcatt

SEQ ID NO: 783755 - DNA, 15 bp, Homo sapiens
tttatgggtgcattt

SEQ ID NO: 783756 - DNA, 15 bp, Homo sapiens
ttatgggtgcatttg

SEQ ID NO: 783757 - DNA, 15 bp, Homo sapiens
tatgggtgcatttga

SEQ ID NO: 783758 - DNA, 15 bp, Homo sapiens
atgggtgcatttgag

SEQ ID NO: 783759 - DNA, 15 bp, Homo sapiens
tgggtgcatttgagg

SEQ ID NO: 783760 - DNA, 15 bp, Homo sapiens
gggtgcatttgaggg

SEQ ID NO: 783761 - DNA, 15 bp, Homo sapiens
ggtgcatttgaggga

SEQ ID NO: 783762 - DNA, 15 bp, Homo sapiens
gtgcatttgagggag

SEQ ID NO: 783763 - DNA, 15 bp, Homo sapiens
tgcatttgagggagt

SEQ ID NO: 783764 - DNA, 15 bp, Homo sapiens
gcatttgagggagta

SEQ ID NO: 783765 - DNA, 15 bp, Homo sapiens
catttgagggagtaa

SEQ ID NO: 783766 - DNA, 15 bp, Homo sapiens
atttgagggagtaag

SEQ ID NO: 783767 - DNA, 15 bp, Homo sapiens
tttgagggagtaagc

SEQ ID NO: 783768 - DNA, 15 bp, Homo sapiens
ttgagggagtaagcg

SEQ ID NO: 783769 - DNA, 15 bp, Homo sapiens
tgagggagtaagcgt

SEQ ID NO: 783770 - DNA, 15 bp, Homo sapiens
gagggagtaagcgtt

SEQ ID NO: 783771 - DNA, 15 bp, Homo sapiens
agggagtaagcgttt

SEQ ID NO: 783772 - DNA, 15 bp, Homo sapiens
gggagtaagcgttta

SEQ ID NO: 783773 - DNA, 15 bp, Homo sapiens
ggagtaagcgtttat

SEQ ID NO: 783774 - DNA, 15 bp, Homo sapiens
gagtaagcgtttatg

SEQ ID NO: 783775 - DNA, 15 bp, Homo sapiens
agtaagcgtttatga

SEQ ID NO: 783776 - DNA, 15 bp, Homo sapiens
gtaagcgtttatgag

SEQ ID NO: 783777 - DNA, 15 bp, Homo sapiens
taagcgtttatgagt

SEQ ID NO: 783778 - DNA, 15 bp, Homo sapiens
aagcgtttatgagta

SEQ ID NO: 783779 - DNA, 15 bp, Homo sapiens
agcgtttatgagtag

SEQ ID NO: 783780 - DNA, 15 bp, Homo sapiens
gcgtttatgagtagg

SEQ ID NO: 783781 - DNA, 15 bp, Homo sapiens
cgtttatgagtagga

SEQ ID NO: 783782 - DNA, 15 bp, Homo sapiens
gtttatgagtaggac

SEQ ID NO: 783783 - DNA, 15 bp, Homo sapiens
tttatgagtaggaca

SEQ ID NO: 783784 - DNA, 15 bp, Homo sapiens
ttatgagtaggacaa

SEQ ID NO: 783785 - DNA, 15 bp, Homo sapiens
tatgagtaggacaat

SEQ ID NO: 783786 - DNA, 15 bp, Homo sapiens
atgagtaggacaatg

SEQ ID NO: 783787 - DNA, 15 bp, Homo sapiens
tgagtaggacaatga

SEQ ID NO: 783788 - DNA, 15 bp, Homo sapiens
gagtaggacaatgag

SEQ ID NO: 783789 - DNA, 15 bp, Homo sapiens
agtaggacaatgagg

SEQ ID NO: 783790 - DNA, 15 bp, Homo sapiens
gtaggacaatgaggg

SEQ ID NO: 783791 - DNA, 15 bp, Homo sapiens
taggacaatgaggga

SEQ ID NO: 783792 - DNA, 15 bp, Homo sapiens
aggacaatgagggag

SEQ ID NO: 783793 - DNA, 15 bp, Homo sapiens
ggacaatgagggaga

SEQ ID NO: 783794 - DNA, 15 bp, Homo sapiens
gacaatgagggagag

SEQ ID NO: 783795 - DNA, 15 bp, Homo sapiens
acaatgagggagaga

SEQ ID NO: 783796 - DNA, 15 bp, Homo sapiens
caatgagggagagaa

SEQ ID NO: 783797 - DNA, 15 bp, Homo sapiens
aatgagggagagaag

SEQ ID NO: 783798 - DNA, 15 bp, Homo sapiens
atgagggagagaagg

SEQ ID NO: 783799 - DNA, 15 bp, Homo sapiens
tgagggagagaagga

SEQ ID NO: 783800 - DNA, 15 bp, Homo sapiens
gagggagagaaggat

SEQ ID NO: 783801 - DNA, 15 bp, Homo sapiens
agggagagaaggatt

SEQ ID NO: 783802 - DNA, 15 bp, Homo sapiens
gggagagaaggatta

SEQ ID NO: 783803 - DNA, 15 bp, Homo sapiens
ggagagaaggattaa

SEQ ID NO: 783804 - DNA, 15 bp, Homo sapiens
gagagaaggattaac

SEQ ID NO: 783805 - DNA, 15 bp, Homo sapiens
agagaaggattaaca

SEQ ID NO: 783806 - DNA, 15 bp, Homo sapiens
gagaaggattaacat

SEQ ID NO: 783807 - DNA, 15 bp, Homo sapiens
agaaggattaacatt

SEQ ID NO: 783808 - DNA, 15 bp, Homo sapiens
gaaggattaacattt

SEQ ID NO: 783809 - DNA, 15 bp, Homo sapiens
aaggattaacatttt

SEQ ID NO: 783810 - DNA, 15 bp, Homo sapiens
aggattaacattttc

SEQ ID NO: 783811 - DNA, 15 bp, Homo sapiens
ggattaacattttct

SEQ ID NO: 783812 - DNA, 15 bp, Homo sapiens
gattaacattttctg

SEQ ID NO: 783813 - DNA, 15 bp, Homo sapiens
attaacattttctgc

SEQ ID NO: 783814 - DNA, 15 bp, Homo sapiens
ttaacattttctgcc

SEQ ID NO: 783815 - DNA, 15 bp, Homo sapiens
taacattttctgccc

SEQ ID NO: 783816 - DNA, 15 bp, Homo sapiens
aacattttctgcccg

SEQ ID NO: 783817 - DNA, 15 bp, Homo sapiens
acattttctgcccgt

SEQ ID NO: 783818 - DNA, 15 bp, Homo sapiens
cattttctgcccgtt

SEQ ID NO: 783819 - DNA, 15 bp, Homo sapiens
attttctgcccgttt

SEQ ID NO: 783820 - DNA, 15 bp, Homo sapiens
ttttctgcccgtttc

SEQ ID NO: 783821 - DNA, 15 bp, Homo sapiens
tttctgcccgtttcc

SEQ ID NO: 783822 - DNA, 15 bp, Homo sapiens
ttctgcccgtttcct

SEQ ID NO: 783823 - DNA, 15 bp, Homo sapiens
tctgcccgtttcctg

SEQ ID NO: 783824 - DNA, 15 bp, Homo sapiens
ctgcccgtttcctga

SEQ ID NO: 783825 - DNA, 15 bp, Homo sapiens
tgcccgtttcctgaa

SEQ ID NO: 783826 - DNA, 15 bp, Homo sapiens
gcccgtttcctgaaa

SEQ ID NO: 783827 - DNA, 15 bp, Homo sapiens
cccgtttcctgaaat

SEQ ID NO: 783828 - DNA, 15 bp, Homo sapiens
ccgtttcctgaaatg

SEQ ID NO: 783829 - DNA, 15 bp, Homo sapiens
cgtttcctgaaatgt

SEQ ID NO: 783830 - DNA, 15 bp, Homo sapiens
gtttcctgaaatgtg

SEQ ID NO: 783831 - DNA, 15 bp, Homo sapiens
tttcctgaaatgtgt

SEQ ID NO: 783832 - DNA, 15 bp, Homo sapiens
ttcctgaaatgtgtc

SEQ ID NO: 783833 - DNA, 15 bp, Homo sapiens
tcctgaaatgtgtct

SEQ ID NO: 783834 - DNA, 15 bp, Homo sapiens
cctgaaatgtgtctt

SEQ ID NO: 783835 - DNA, 15 bp, Homo sapiens
ctgaaatgtgtctta

SEQ ID NO: 783836 - DNA, 15 bp, Homo sapiens
tgaaatgtgtcttaa

SEQ ID NO: 783837 - DNA, 15 bp, Homo sapiens
gaaatgtgtcttaat

SEQ ID NO: 783838 - DNA, 15 bp, Homo sapiens
aaatgtgtcttaatt

SEQ ID NO: 783839 - DNA, 15 bp, Homo sapiens
aatgtgtcttaattc

SEQ ID NO: 783840 - DNA, 15 bp, Homo sapiens
atgtgtcttaattcc

SEQ ID NO: 783841 - DNA, 15 bp, Homo sapiens
tgtgtcttaattcct

SEQ ID NO: 783842 - DNA, 15 bp, Homo sapiens
gtgtcttaattcctt

SEQ ID NO: 783843 - DNA, 15 bp, Homo sapiens
tgtcttaattccttc

SEQ ID NO: 783844 - DNA, 15 bp, Homo sapiens
gtcttaattccttcc

SEQ ID NO: 783845 - DNA, 15 bp, Homo sapiens
tcttaattccttcct

SEQ ID NO: 783846 - DNA, 15 bp, Homo sapiens
cttaattccttccta

SEQ ID NO: 783847 - DNA, 15 bp, Homo sapiens
ttaattccttcctaa

SEQ ID NO: 783848 - DNA, 15 bp, Homo sapiens
taattccttcctaag

SEQ ID NO: 783849 - DNA, 15 bp, Homo sapiens
aattccttcctaagg

SEQ ID NO: 783850 - DNA, 15 bp, Homo sapiens
attccttcctaagga

SEQ ID NO: 783851 - DNA, 15 bp, Homo sapiens
ttccttcctaaggaa

SEQ ID NO: 783852 - DNA, 15 bp, Homo sapiens
tccttcctaaggaag

SEQ ID NO: 783853 - DNA, 15 bp, Homo sapiens
ccttcctaaggaagg

SEQ ID NO: 783854 - DNA, 15 bp, Homo sapiens
cttcctaaggaaggc

SEQ ID NO: 783855 - DNA, 15 bp, Homo sapiens
ttcctaaggaaggct

SEQ ID NO: 783856 - DNA, 15 bp, Homo sapiens
tcctaaggaaggctg

SEQ ID NO: 783857 - DNA, 15 bp, Homo sapiens
cctaaggaaggctga

SEQ ID NO: 783858 - DNA, 15 bp, Homo sapiens
ctaaggaaggctgac

SEQ ID NO: 783859 - DNA, 15 bp, Homo sapiens
taaggaaggctgacc

SEQ ID NO: 783860 - DNA, 15 bp, Homo sapiens
aaggaaggctgacca

SEQ ID NO: 783861 - DNA, 15 bp, Homo sapiens
aggaaggctgaccaa

SEQ ID NO: 783862 - DNA, 15 bp, Homo sapiens
ggaaggctgaccaag

SEQ ID NO: 783863 - DNA, 15 bp, Homo sapiens
gaaggctgaccaaga

SEQ ID NO: 783864 - DNA, 15 bp, Homo sapiens
aaggctgaccaagaa

SEQ ID NO: 783865 - DNA, 15 bp, Homo sapiens
aggctgaccaagaaa

SEQ ID NO: 783866 - DNA, 15 bp, Homo sapiens
ggctgaccaagaaaa

SEQ ID NO: 783867 - DNA, 15 bp, Homo sapiens
gctgaccaagaaaat

SEQ ID NO: 783868 - DNA, 15 bp, Homo sapiens
ctgaccaagaaaata

SEQ ID NO: 783869 - DNA, 15 bp, Homo sapiens
tgaccaagaaaataa

SEQ ID NO: 783870 - DNA, 15 bp, Homo sapiens
gaccaagaaaataat

SEQ ID NO: 783871 - DNA, 15 bp, Homo sapiens
accaagaaaataatg

SEQ ID NO: 783872 - DNA, 15 bp, Homo sapiens
ccaagaaaataatgc

SEQ ID NO: 783873 - DNA, 15 bp, Homo sapiens
caagaaaataatgca

SEQ ID NO: 783874 - DNA, 15 bp, Homo sapiens
aagaaaataatgcaa

SEQ ID NO: 783875 - DNA, 15 bp, Homo sapiens
agaaaataatgcaag

SEQ ID NO: 783876 - DNA, 15 bp, Homo sapiens
gaaaataatgcaaga

SEQ ID NO: 783877 - DNA, 15 bp, Homo sapiens
aaaataatgcaagaa

SEQ ID NO: 783878 - DNA, 15 bp, Homo sapiens
aaataatgcaagaag

SEQ ID NO: 783879 - DNA, 15 bp, Homo sapiens
aataatgcaagaaga

SEQ ID NO: 783880 - DNA, 15 bp, Homo sapiens
ataatgcaagaagag

SEQ ID NO: 783881 - DNA, 15 bp, Homo sapiens
taatgcaagaagaga

SEQ ID NO: 783882 - DNA, 15 bp, Homo sapiens
aatgcaagaagagaa

SEQ ID NO: 783883 - DNA, 15 bp, Homo sapiens
atgcaagaagagaaa

SEQ ID NO: 783884 - DNA, 15 bp, Homo sapiens
tgcaagaagagaaag

SEQ ID NO: 783885 - DNA, 15 bp, Homo sapiens
gcaagaagagaaagt

SEQ ID NO: 783886 - DNA, 15 bp, Homo sapiens
caagaagagaaagtc

SEQ ID NO: 783887 - DNA, 15 bp, Homo sapiens
aagaagagaaagtct

SEQ ID NO: 783888 - DNA, 15 bp, Homo sapiens
agaagagaaagtctc

SEQ ID NO: 783889 - DNA, 15 bp, Homo sapiens
gaagagaaagtctct

SEQ ID NO: 783890 - DNA, 15 bp, Homo sapiens
aagagaaagtctctt

SEQ ID NO: 783891 - DNA, 15 bp, Homo sapiens
agagaaagtctcttc

SEQ ID NO: 783892 - DNA, 15 bp, Homo sapiens
gagaaagtctcttca

SEQ ID NO: 783893 - DNA, 15 bp, Homo sapiens
agaaagtctcttcaa

SEQ ID NO: 783894 - DNA, 15 bp, Homo sapiens
gaaagtctcttcaaa

SEQ ID NO: 783895 - DNA, 15 bp, Homo sapiens
aaagtctcttcaaag

SEQ ID NO: 783896 - DNA, 15 bp, Homo sapiens
aagtctcttcaaagg

SEQ ID NO: 783897 - DNA, 15 bp, Homo sapiens
agtctcttcaaagga

SEQ ID NO: 783898 - DNA, 15 bp, Homo sapiens
gtctcttcaaaggag

SEQ ID NO: 783899 - DNA, 15 bp, Homo sapiens
tctcttcaaaggagc

SEQ ID NO: 783900 - DNA, 15 bp, Homo sapiens
ctcttcaaaggagcc

SEQ ID NO: 783901 - DNA, 15 bp, Homo sapiens
tcttcaaaggagccc

SEQ ID NO: 783902 - DNA, 15 bp, Homo sapiens
cttcaaaggagccca

SEQ ID NO: 783903 - DNA, 15 bp, Homo sapiens
ttcaaaggagcccag

SEQ ID NO: 783904 - DNA, 15 bp, Homo sapiens
tcaaaggagcccagc

SEQ ID NO: 783905 - DNA, 15 bp, Homo sapiens
caaaggagcccagct

SEQ ID NO: 783906 - DNA, 15 bp, Homo sapiens
aaaggagcccagcta

SEQ ID NO: 783907 - DNA, 15 bp, Homo sapiens
aaggagcccagctag

SEQ ID NO: 783908 - DNA, 15 bp, Homo sapiens
aggagcccagctagg

SEQ ID NO: 783909 - DNA, 15 bp, Homo sapiens
ggagcccagctaggg

SEQ ID NO: 783910 - DNA, 15 bp, Homo sapiens
gagcccagctagggg

SEQ ID NO: 783911 - DNA, 15 bp, Homo sapiens
agcccagctaggggc

SEQ ID NO: 783912 - DNA, 15 bp, Homo sapiens
gcccagctaggggct

SEQ ID NO: 783913 - DNA, 15 bp, Homo sapiens
cccagctaggggctg

SEQ ID NO: 783914 - DNA, 15 bp, Homo sapiens
ccagctaggggctgt

SEQ ID NO: 783915 - DNA, 15 bp, Homo sapiens
cagctaggggctgta

SEQ ID NO: 783916 - DNA, 15 bp, Homo sapiens
agctaggggctgtag

SEQ ID NO: 783917 - DNA, 15 bp, Homo sapiens
gctaggggctgtaga

SEQ ID NO: 783918 - DNA, 15 bp, Homo sapiens
ctaggggctgtagat

SEQ ID NO: 783919 - DNA, 15 bp, Homo sapiens
taggggctgtagatg

SEQ ID NO: 783920 - DNA, 15 bp, Homo sapiens
aggggctgtagatga

SEQ ID NO: 783921 - DNA, 15 bp, Homo sapiens
ggggctgtagatgaa

SEQ ID NO: 783922 - DNA, 15 bp, Homo sapiens
gggctgtagatgaaa

SEQ ID NO: 783923 - DNA, 15 bp, Homo sapiens
ggctgtagatgaaag

SEQ ID NO: 783924 - DNA, 15 bp, Homo sapiens
gctgtagatgaaagg

SEQ ID NO: 783925 - DNA, 15 bp, Homo sapiens
ctgtagatgaaagga

SEQ ID NO: 783926 - DNA, 15 bp, Homo sapiens
tgtagatgaaaggat

SEQ ID NO: 783927 - DNA, 15 bp, Homo sapiens
gtagatgaaaggatt

SEQ ID NO: 783928 - DNA, 15 bp, Homo sapiens
tagatgaaaggattc

SEQ ID NO: 783929 - DNA, 15 bp, Homo sapiens
agatgaaaggattcc

SEQ ID NO: 783930 - DNA, 15 bp, Homo sapiens
gatgaaaggattcct

SEQ ID NO: 783931 - DNA, 15 bp, Homo sapiens
atgaaaggattcctt

SEQ ID NO: 783932 - DNA, 15 bp, Homo sapiens
tgaaaggattccttt

SEQ ID NO: 783933 - DNA, 15 bp, Homo sapiens
gaaaggattcctttg

SEQ ID NO: 783934 - DNA, 15 bp, Homo sapiens
aaaggattcctttgt

SEQ ID NO: 783935 - DNA, 15 bp, Homo sapiens
aaggattcctttgtg

SEQ ID NO: 783936 - DNA, 15 bp, Homo sapiens
aggattcctttgtga

SEQ ID NO: 783937 - DNA, 15 bp, Homo sapiens
ggattcctttgtgaa

SEQ ID NO: 783938 - DNA, 15 bp, Homo sapiens
gattcctttgtgaat

SEQ ID NO: 783939 - DNA, 15 bp, Homo sapiens
attcctttgtgaata

SEQ ID NO: 783940 - DNA, 15 bp, Homo sapiens
ttcctttgtgaataa

SEQ ID NO: 783941 - DNA, 15 bp, Homo sapiens
tcctttgtgaataaa

SEQ ID NO: 783942 - DNA, 15 bp, Homo sapiens
cctttgtgaataaaa

SEQ ID NO: 783943 - DNA, 15 bp, Homo sapiens
ctttgtgaataaaat

SEQ ID NO: 783944 - DNA, 15 bp, Homo sapiens
tttgtgaataaaatg

SEQ ID NO: 783945 - DNA, 15 bp, Homo sapiens
ttgtgaataaaatga

SEQ ID NO: 783946 - DNA, 15 bp, Homo sapiens
tgtgaataaaatgaa

SEQ ID NO: 783947 - DNA, 15 bp, Homo sapiens
gtgaataaaatgaag

SEQ ID NO: 783948 - DNA, 15 bp, Homo sapiens
tgaataaaatgaagg

SEQ ID NO: 783949 - DNA, 15 bp, Homo sapiens
gaataaaatgaagga

SEQ ID NO: 783950 - DNA, 15 bp, Homo sapiens
aataaaatgaaggaa

SEQ ID NO: 783951 - DNA, 15 bp, Homo sapiens
ataaaatgaaggaag

SEQ ID NO: 783952 - DNA, 15 bp, Homo sapiens
taaaatgaaggaagg

SEQ ID NO: 783953 - DNA, 15 bp, Homo sapiens
aaaatgaaggaagga

SEQ ID NO: 783954 - DNA, 15 bp, Homo sapiens
aaatgaaggaaggaa

SEQ ID NO: 783955 - DNA, 15 bp, Homo sapiens
aatgaaggaaggaaa

SEQ ID NO: 783956 - DNA, 15 bp, Homo sapiens
atgaaggaaggaaac

SEQ ID NO: 783957 - DNA, 15 bp, Homo sapiens
tgaaggaaggaaact

SEQ ID NO: 783958 - DNA, 15 bp, Homo sapiens
gaaggaaggaaactg

SEQ ID NO: 783959 - DNA, 15 bp, Homo sapiens
aaggaaggaaactga

SEQ ID NO: 783960 - DNA, 15 bp, Homo sapiens
aggaaggaaactgaa

SEQ ID NO: 783961 - DNA, 15 bp, Homo sapiens
ggaaggaaactgaag

SEQ ID NO: 783962 - DNA, 15 bp, Homo sapiens
gaaggaaactgaagt

SEQ ID NO: 783963 - DNA, 15 bp, Homo sapiens
aaggaaactgaagtg

SEQ ID NO: 783964 - DNA, 15 bp, Homo sapiens
aggaaactgaagtgg

SEQ ID NO: 783965 - DNA, 15 bp, Homo sapiens
ggaaactgaagtggt

SEQ ID NO: 783966 - DNA, 15 bp, Homo sapiens
gaaactgaagtggtt

SEQ ID NO: 783967 - DNA, 15 bp, Homo sapiens
aaactgaagtggttc

SEQ ID NO: 783968 - DNA, 15 bp, Homo sapiens
aactgaagtggttca

SEQ ID NO: 783969 - DNA, 15 bp, Homo sapiens
actgaagtggttcag

SEQ ID NO: 783970 - DNA, 15 bp, Homo sapiens
ctgaagtggttcagt

SEQ ID NO: 783971 - DNA, 15 bp, Homo sapiens
tgaagtggttcagtg

SEQ ID NO: 783972 - DNA, 15 bp, Homo sapiens
gaagtggttcagtgg

SEQ ID NO: 783973 - DNA, 15 bp, Homo sapiens
aagtggttcagtggt

SEQ ID NO: 783974 - DNA, 15 bp, Homo sapiens
agtggttcagtggtt

SEQ ID NO: 783975 - DNA, 15 bp, Homo sapiens
gtggttcagtggttg

SEQ ID NO: 783976 - DNA, 15 bp, Homo sapiens
tggttcagtggttga

SEQ ID NO: 783977 - DNA, 15 bp, Homo sapiens
ggttcagtggttgaa

SEQ ID NO: 783978 - DNA, 15 bp, Homo sapiens
gttcagtggttgaac

SEQ ID NO: 783979 - DNA, 15 bp, Homo sapiens
ttcagtggttgaacc

SEQ ID NO: 783980 - DNA, 15 bp, Homo sapiens
tcagtggttgaacca

SEQ ID NO: 783981 - DNA, 15 bp, Homo sapiens
cagtggttgaaccac

SEQ ID NO: 783982 - DNA, 15 bp, Homo sapiens
agtggttgaaccact

SEQ ID NO: 783983 - DNA, 15 bp, Homo sapiens
gtggttgaaccactg

SEQ ID NO: 783984 - DNA, 15 bp, Homo sapiens
tggttgaaccactgg

SEQ ID NO: 783985 - DNA, 15 bp, Homo sapiens
ggttgaaccactggc

SEQ ID NO: 783986 - DNA, 15 bp, Homo sapiens
gttgaaccactggct

SEQ ID NO: 783987 - DNA, 15 bp, Homo sapiens
ttgaaccactggctg

SEQ ID NO: 783988 - DNA, 15 bp, Homo sapiens
tgaaccactggctga

SEQ ID NO: 783989 - DNA, 15 bp, Homo sapiens
gaaccactggctgaa

SEQ ID NO: 783990 - DNA, 15 bp, Homo sapiens
aaccactggctgaat

SEQ ID NO: 783991 - DNA, 15 bp, Homo sapiens
accactggctgaatg

SEQ ID NO: 783992 - DNA, 15 bp, Homo sapiens
ccactggctgaatga

SEQ ID NO: 783993 - DNA, 15 bp, Homo sapiens
cactggctgaatgaa

SEQ ID NO: 783994 - DNA, 15 bp, Homo sapiens
actggctgaatgaag

SEQ ID NO: 783995 - DNA, 15 bp, Homo sapiens
ctggctgaatgaaga

SEQ ID NO: 783996 - DNA, 15 bp, Homo sapiens
tggctgaatgaagac

SEQ ID NO: 783997 - DNA, 15 bp, Homo sapiens
ggctgaatgaagacc

SEQ ID NO: 783998 - DNA, 15 bp, Homo sapiens
gctgaatgaagacct

SEQ ID NO: 783999 - DNA, 15 bp, Homo sapiens
ctgaatgaagacctg

SEQ ID NO: 784000 - DNA, 15 bp, Homo sapiens
tgaatgaagacctga

SEQ ID NO: 784001 - DNA, 15 bp, Homo sapiens
gaatgaagacctgaa

SEQ ID NO: 784002 - DNA, 15 bp, Homo sapiens
aatgaagacctgaaa

SEQ ID NO: 784003 - DNA, 15 bp, Homo sapiens
atgaagacctgaaat

SEQ ID NO: 784004 - DNA, 15 bp, Homo sapiens
tgaagacctgaaata

SEQ ID NO: 784005 - DNA, 15 bp, Homo sapiens
gaagacctgaaataa

SEQ ID NO: 784006 - DNA, 15 bp, Homo sapiens
aagacctgaaataag

SEQ ID NO: 784007 - DNA, 15 bp, Homo sapiens
agacctgaaataagg

SEQ ID NO: 784008 - DNA, 15 bp, Homo sapiens
gacctgaaataaggg

SEQ ID NO: 784009 - DNA, 15 bp, Homo sapiens
acctgaaataaggga

SEQ ID NO: 784010 - DNA, 15 bp, Homo sapiens
cctgaaataagggaa

SEQ ID NO: 784011 - DNA, 15 bp, Homo sapiens
ctgaaataagggaaa

SEQ ID NO: 784012 - DNA, 15 bp, Homo sapiens
tgaaataagggaaat

SEQ ID NO: 784013 - DNA, 15 bp, Homo sapiens
gaaataagggaaatg

SEQ ID NO: 784014 - DNA, 15 bp, Homo sapiens
aaataagggaaatgc

SEQ ID NO: 784015 - DNA, 15 bp, Homo sapiens
aataagggaaatgct

SEQ ID NO: 784016 - DNA, 15 bp, Homo sapiens
ataagggaaatgctt

SEQ ID NO: 784017 - DNA, 15 bp, Homo sapiens
taagggaaatgcttc

SEQ ID NO: 784018 - DNA, 15 bp, Homo sapiens
aagggaaatgcttct

SEQ ID NO: 784019 - DNA, 15 bp, Homo sapiens
agggaaatgcttctc

SEQ ID NO: 784020 - DNA, 15 bp, Homo sapiens
gggaaatgcttctca

SEQ ID NO: 784021 - DNA, 15 bp, Homo sapiens
ggaaatgcttctcaa

SEQ ID NO: 784022 - DNA, 15 bp, Homo sapiens
gaaatgcttctcaaa

SEQ ID NO: 784023 - DNA, 15 bp, Homo sapiens
aaatgcttctcaaaa

SEQ ID NO: 784024 - DNA, 15 bp, Homo sapiens
aatgcttctcaaaat

SEQ ID NO: 784025 - DNA, 15 bp, Homo sapiens
atgcttctcaaaatt

SEQ ID NO: 784026 - DNA, 15 bp, Homo sapiens
tgcttctcaaaatta

SEQ ID NO: 784027 - DNA, 15 bp, Homo sapiens
gcttctcaaaattag

SEQ ID NO: 784028 - DNA, 15 bp, Homo sapiens
cttctcaaaattaga

SEQ ID NO: 784029 - DNA, 15 bp, Homo sapiens
ttctcaaaattagag

SEQ ID NO: 784030 - DNA, 15 bp, Homo sapiens
tctcaaaattagaga

SEQ ID NO: 784031 - DNA, 15 bp, Homo sapiens
ctcaaaattagagac

SEQ ID NO: 784032 - DNA, 15 bp, Homo sapiens
tcaaaattagagacc

SEQ ID NO: 784033 - DNA, 15 bp, Homo sapiens
caaaattagagacca

SEQ ID NO: 784034 - DNA, 15 bp, Homo sapiens
aaaattagagaccag

SEQ ID NO: 784035 - DNA, 15 bp, Homo sapiens
aaattagagaccagg

SEQ ID NO: 784036 - DNA, 15 bp, Homo sapiens
aattagagaccaggc

SEQ ID NO: 784037 - DNA, 15 bp, Homo sapiens
attagagaccaggct

SEQ ID NO: 784038 - DNA, 15 bp, Homo sapiens
ttagagaccaggctg

SEQ ID NO: 784039 - DNA, 15 bp, Homo sapiens
tagagaccaggctgg

SEQ ID NO: 784040 - DNA, 15 bp, Homo sapiens
agagaccaggctggg

SEQ ID NO: 784041 - DNA, 15 bp, Homo sapiens
gagaccaggctgggc

SEQ ID NO: 784042 - DNA, 15 bp, Homo sapiens
agaccaggctgggct

SEQ ID NO: 784043 - DNA, 15 bp, Homo sapiens
gaccaggctgggctt

SEQ ID NO: 784044 - DNA, 15 bp, Homo sapiens
accaggctgggcttc

SEQ ID NO: 784045 - DNA, 15 bp, Homo sapiens
ccaggctgggcttcc

SEQ ID NO: 784046 - DNA, 15 bp, Homo sapiens
caggctgggcttcct

SEQ ID NO: 784047 - DNA, 15 bp, Homo sapiens
aggctgggcttccta

SEQ ID NO: 784048 - DNA, 15 bp, Homo sapiens
ggctgggcttcctaa

SEQ ID NO: 784049 - DNA, 15 bp, Homo sapiens
gctgggcttcctaaa

SEQ ID NO: 784050 - DNA, 15 bp, Homo sapiens
ctgggcttcctaaag

SEQ ID NO: 784051 - DNA, 15 bp, Homo sapiens
tgggcttcctaaaga

SEQ ID NO: 784052 - DNA, 15 bp, Homo sapiens
gggcttcctaaagac

SEQ ID NO: 784053 - DNA, 15 bp, Homo sapiens
ggcttcctaaagacg

SEQ ID NO: 784054 - DNA, 15 bp, Homo sapiens
gcttcctaaagacga

SEQ ID NO: 784055 - DNA, 15 bp, Homo sapiens
cttcctaaagacgac

SEQ ID NO: 784056 - DNA, 15 bp, Homo sapiens
ttcctaaagacgact

SEQ ID NO: 784057 - DNA, 15 bp, Homo sapiens
tcctaaagacgactc

SEQ ID NO: 784058 - DNA, 15 bp, Homo sapiens
cctaaagacgactca

SEQ ID NO: 784059 - DNA, 15 bp, Homo sapiens
ctaaagacgactcat

SEQ ID NO: 784060 - DNA, 15 bp, Homo sapiens
taaagacgactcatg

SEQ ID NO: 784061 - DNA, 15 bp, Homo sapiens
aaagacgactcatgc

SEQ ID NO: 784062 - DNA, 15 bp, Homo sapiens
aagacgactcatgcg

SEQ ID NO: 784063 - DNA, 15 bp, Homo sapiens
agacgactcatgcgg

SEQ ID NO: 784064 - DNA, 15 bp, Homo sapiens
gacgactcatgcgga

SEQ ID NO: 784065 - DNA, 15 bp, Homo sapiens
acgactcatgcggag

SEQ ID NO: 784066 - DNA, 15 bp, Homo sapiens
cgactcatgcggagg

SEQ ID NO: 784067 - DNA, 15 bp, Homo sapiens
gactcatgcggaggg

SEQ ID NO: 784068 - DNA, 15 bp, Homo sapiens
actcatgcggaggga

SEQ ID NO: 784069 - DNA, 15 bp, Homo sapiens
ctcatgcggagggag

SEQ ID NO: 784070 - DNA, 15 bp, Homo sapiens
tcatgcggagggagg

SEQ ID NO: 784071 - DNA, 15 bp, Homo sapiens
catgcggagggaggc

SEQ ID NO: 784072 - DNA, 15 bp, Homo sapiens
atgcggagggaggcc

SEQ ID NO: 784073 - DNA, 15 bp, Homo sapiens
tgcggagggaggccc

SEQ ID NO: 784074 - DNA, 15 bp, Homo sapiens
gcggagggaggcccc

SEQ ID NO: 784075 - DNA, 15 bp, Homo sapiens
cggagggaggcccct

SEQ ID NO: 784076 - DNA, 15 bp, Homo sapiens
ggagggaggcccctt

SEQ ID NO: 784077 - DNA, 15 bp, Homo sapiens
gagggaggccccttg

SEQ ID NO: 784078 - DNA, 15 bp, Homo sapiens
agggaggccccttga

SEQ ID NO: 784079 - DNA, 15 bp, Homo sapiens
gggaggccccttgag

SEQ ID NO: 784080 - DNA, 15 bp, Homo sapiens
ggaggccccttgagc

SEQ ID NO: 784081 - DNA, 15 bp, Homo sapiens
gaggccccttgagct

SEQ ID NO: 784082 - DNA, 15 bp, Homo sapiens
aggccccttgagctg

SEQ ID NO: 784083 - DNA, 15 bp, Homo sapiens
ggccccttgagctgg

SEQ ID NO: 784084 - DNA, 15 bp, Homo sapiens
gccccttgagctgga

SEQ ID NO: 784085 - DNA, 15 bp, Homo sapiens
ccccttgagctggag

SEQ ID NO: 784086 - DNA, 15 bp, Homo sapiens
cccttgagctggagg

SEQ ID NO: 784087 - DNA, 15 bp, Homo sapiens
ccttgagctggaggg

SEQ ID NO: 784088 - DNA, 15 bp, Homo sapiens
cttgagctggagggc

SEQ ID NO: 784089 - DNA, 15 bp, Homo sapiens
ttgagctggagggct

SEQ ID NO: 784090 - DNA, 15 bp, Homo sapiens
tgagctggagggctc

SEQ ID NO: 784091 - DNA, 15 bp, Homo sapiens
gagctggagggctca

SEQ ID NO: 784092 - DNA, 15 bp, Homo sapiens
agctggagggctcag

SEQ ID NO: 784093 - DNA, 15 bp, Homo sapiens
gctggagggctcagt

SEQ ID NO: 784094 - DNA, 15 bp, Homo sapiens
ctggagggctcagtg

SEQ ID NO: 784095 - DNA, 15 bp, Homo sapiens
tggagggctcagtgg

SEQ ID NO: 784096 - DNA, 15 bp, Homo sapiens
ggagggctcagtgga

SEQ ID NO: 784097 - DNA, 15 bp, Homo sapiens
gagggctcagtggaa

SEQ ID NO: 784098 - DNA, 15 bp, Homo sapiens
agggctcagtggaaa

SEQ ID NO: 784099 - DNA, 15 bp, Homo sapiens
gggctcagtggaaac

SEQ ID NO: 784100 - DNA, 15 bp, Homo sapiens
ggctcagtggaaacc

SEQ ID NO: 784101 - DNA, 15 bp, Homo sapiens
gctcagtggaaacct

SEQ ID NO: 784102 - DNA, 15 bp, Homo sapiens
ctcagtggaaaccta

SEQ ID NO: 784103 - DNA, 15 bp, Homo sapiens
tcagtggaaacctag

SEQ ID NO: 784104 - DNA, 15 bp, Homo sapiens
cagtggaaacctaga

SEQ ID NO: 784105 - DNA, 15 bp, Homo sapiens
agtggaaacctagag

SEQ ID NO: 784106 - DNA, 15 bp, Homo sapiens
gtggaaacctagaga

SEQ ID NO: 784107 - DNA, 15 bp, Homo sapiens
tggaaacctagagac

SEQ ID NO: 784108 - DNA, 15 bp, Homo sapiens
ggaaacctagagaca

SEQ ID NO: 784109 - DNA, 15 bp, Homo sapiens
gaaacctagagacag

SEQ ID NO: 784110 - DNA, 15 bp, Homo sapiens
aaacctagagacaga

SEQ ID NO: 784111 - DNA, 15 bp, Homo sapiens
aacctagagacagaa

SEQ ID NO: 784112 - DNA, 15 bp, Homo sapiens
acctagagacagaaa

SEQ ID NO: 784113 - DNA, 15 bp, Homo sapiens
cctagagacagaaat

SEQ ID NO: 784114 - DNA, 15 bp, Homo sapiens
ctagagacagaaatg

SEQ ID NO: 784115 - DNA, 15 bp, Homo sapiens
tagagacagaaatga

SEQ ID NO: 784116 - DNA, 15 bp, Homo sapiens
agagacagaaatgag

SEQ ID NO: 784117 - DNA, 15 bp, Homo sapiens
gagacagaaatgaga

SEQ ID NO: 784118 - DNA, 15 bp, Homo sapiens
agacagaaatgagat

SEQ ID NO: 784119 - DNA, 15 bp, Homo sapiens
gacagaaatgagatg

SEQ ID NO: 784120 - DNA, 15 bp, Homo sapiens
acagaaatgagatgt

SEQ ID NO: 784121 - DNA, 15 bp, Homo sapiens
cagaaatgagatgta

SEQ ID NO: 784122 - DNA, 15 bp, Homo sapiens
agaaatgagatgtag

SEQ ID NO: 784123 - DNA, 15 bp, Homo sapiens
gaaatgagatgtagc

SEQ ID NO: 784124 - DNA, 15 bp, Homo sapiens
aaatgagatgtagca

SEQ ID NO: 784125 - DNA, 15 bp, Homo sapiens
aatgagatgtagcag

SEQ ID NO: 784126 - DNA, 15 bp, Homo sapiens
atgagatgtagcagt

SEQ ID NO: 784127 - DNA, 15 bp, Homo sapiens
tgagatgtagcagtc

SEQ ID NO: 784128 - DNA, 15 bp, Homo sapiens
gagatgtagcagtca

SEQ ID NO: 784129 - DNA, 15 bp, Homo sapiens
agatgtagcagtcaa

SEQ ID NO: 784130 - DNA, 15 bp, Homo sapiens
gatgtagcagtcaag

SEQ ID NO: 784131 - DNA, 15 bp, Homo sapiens
atgtagcagtcaagc

SEQ ID NO: 784132 - DNA, 15 bp, Homo sapiens
tgtagcagtcaagca

SEQ ID NO: 784133 - DNA, 15 bp, Homo sapiens
gtagcagtcaagcag

SEQ ID NO: 784134 - DNA, 15 bp, Homo sapiens
tagcagtcaagcaga

SEQ ID NO: 784135 - DNA, 15 bp, Homo sapiens
agcagtcaagcagaa

SEQ ID NO: 784136 - DNA, 15 bp, Homo sapiens
gcagtcaagcagaaa

SEQ ID NO: 784137 - DNA, 15 bp, Homo sapiens
cagtcaagcagaaat

SEQ ID NO: 784138 - DNA, 15 bp, Homo sapiens
agtcaagcagaaatt

SEQ ID NO: 784139 - DNA, 15 bp, Homo sapiens
gtcaagcagaaattg

SEQ ID NO: 784140 - DNA, 15 bp, Homo sapiens
tcaagcagaaattga

SEQ ID NO: 784141 - DNA, 15 bp, Homo sapiens
caagcagaaattgaa

SEQ ID NO: 784142 - DNA, 15 bp, Homo sapiens
aagcagaaattgaag

SEQ ID NO: 784143 - DNA, 15 bp, Homo sapiens
agcagaaattgaaga

SEQ ID NO: 784144 - DNA, 15 bp, Homo sapiens
gcagaaattgaagaa

SEQ ID NO: 784145 - DNA, 15 bp, Homo sapiens
cagaaattgaagaat

SEQ ID NO: 784146 - DNA, 15 bp, Homo sapiens
agaaattgaagaatg

SEQ ID NO: 784147 - DNA, 15 bp, Homo sapiens
gaaattgaagaatgt

SEQ ID NO: 784148 - DNA, 15 bp, Homo sapiens
aaattgaagaatgtt

SEQ ID NO: 784149 - DNA, 15 bp, Homo sapiens
aattgaagaatgttc

SEQ ID NO: 784150 - DNA, 15 bp, Homo sapiens
attgaagaatgttct

SEQ ID NO: 784151 - DNA, 15 bp, Homo sapiens
ttgaagaatgttctt

SEQ ID NO: 784152 - DNA, 15 bp, Homo sapiens
tgaagaatgttcttt

SEQ ID NO: 784153 - DNA, 15 bp, Homo sapiens
gaagaatgttcttta

SEQ ID NO: 784154 - DNA, 15 bp, Homo sapiens
aagaatgttctttat

SEQ ID NO: 784155 - DNA, 15 bp, Homo sapiens
agaatgttctttata

SEQ ID NO: 784156 - DNA, 15 bp, Homo sapiens
gaatgttctttatat

SEQ ID NO: 784157 - DNA, 15 bp, Homo sapiens
aatgttctttatatt

SEQ ID NO: 784158 - DNA, 15 bp, Homo sapiens
atgttctttatattg

SEQ ID NO: 784159 - DNA, 15 bp, Homo sapiens
tgttctttatattga

SEQ ID NO: 784160 - DNA, 15 bp, Homo sapiens
gttctttatattgat

SEQ ID NO: 784161 - DNA, 15 bp, Homo sapiens
ttctttatattgata

SEQ ID NO: 784162 - DNA, 15 bp, Homo sapiens
tctttatattgatac

SEQ ID NO: 784163 - DNA, 15 bp, Homo sapiens
ctttatattgatacc

SEQ ID NO: 784164 - DNA, 15 bp, Homo sapiens
tttatattgataccc

SEQ ID NO: 784165 - DNA, 15 bp, Homo sapiens
ttatattgataccca

SEQ ID NO: 784166 - DNA, 15 bp, Homo sapiens
tatattgatacccac

SEQ ID NO: 784167 - DNA, 15 bp, Homo sapiens
atattgatacccacc

SEQ ID NO: 784168 - DNA, 15 bp, Homo sapiens
tattgatacccacca

SEQ ID NO: 784169 - DNA, 15 bp, Homo sapiens
attgatacccaccat

SEQ ID NO: 784170 - DNA, 15 bp, Homo sapiens
ttgatacccaccatg

SEQ ID NO: 784171 - DNA, 15 bp, Homo sapiens
tgatacccaccatgt

SEQ ID NO: 784172 - DNA, 15 bp, Homo sapiens
gatacccaccatgtg

SEQ ID NO: 784173 - DNA, 15 bp, Homo sapiens
atacccaccatgtga

SEQ ID NO: 784174 - DNA, 15 bp, Homo sapiens
tacccaccatgtgaa

SEQ ID NO: 784175 - DNA, 15 bp, Homo sapiens
acccaccatgtgaag

SEQ ID NO: 784176 - DNA, 15 bp, Homo sapiens
cccaccatgtgaaga

SEQ ID NO: 784177 - DNA, 15 bp, Homo sapiens
ccaccatgtgaagag

SEQ ID NO: 784178 - DNA, 15 bp, Homo sapiens
caccatgtgaagagg

SEQ ID NO: 784179 - DNA, 15 bp, Homo sapiens
accatgtgaagaggg

SEQ ID NO: 784180 - DNA, 15 bp, Homo sapiens
ccatgtgaagagggt

SEQ ID NO: 784181 - DNA, 15 bp, Homo sapiens
catgtgaagagggtg

SEQ ID NO: 784182 - DNA, 15 bp, Homo sapiens
atgtgaagagggtga

SEQ ID NO: 784183 - DNA, 15 bp, Homo sapiens
tgtgaagagggtgac

SEQ ID NO: 784184 - DNA, 15 bp, Homo sapiens
gtgaagagggtgaca

SEQ ID NO: 784185 - DNA, 15 bp, Homo sapiens
tgaagagggtgacag

SEQ ID NO: 784186 - DNA, 15 bp, Homo sapiens
gaagagggtgacagt

SEQ ID NO: 784187 - DNA, 15 bp, Homo sapiens
aagagggtgacagtg

SEQ ID NO: 784188 - DNA, 15 bp, Homo sapiens
agagggtgacagtga

SEQ ID NO: 784189 - DNA, 15 bp, Homo sapiens
gagggtgacagtgag

SEQ ID NO: 784190 - DNA, 15 bp, Homo sapiens
agggtgacagtgagt

SEQ ID NO: 784191 - DNA, 15 bp, Homo sapiens
gggtgacagtgagtg

SEQ ID NO: 784192 - DNA, 15 bp, Homo sapiens
ggtgacagtgagtgt

SEQ ID NO: 784193 - DNA, 15 bp, Homo sapiens
gtgacagtgagtgtg

SEQ ID NO: 784194 - DNA, 15 bp, Homo sapiens
tgacagtgagtgtga

SEQ ID NO: 784195 - DNA, 15 bp, Homo sapiens
gacagtgagtgtgat

SEQ ID NO: 784196 - DNA, 15 bp, Homo sapiens
acagtgagtgtgatg

SEQ ID NO: 784197 - DNA, 15 bp, Homo sapiens
cagtgagtgtgatgc

SEQ ID NO: 784198 - DNA, 15 bp, Homo sapiens
agtgagtgtgatgcc

SEQ ID NO: 784199 - DNA, 15 bp, Homo sapiens
gtgagtgtgatgcct

SEQ ID NO: 784200 - DNA, 15 bp, Homo sapiens
tgagtgtgatgcctt

SEQ ID NO: 784201 - DNA, 15 bp, Homo sapiens
gagtgtgatgccttt

SEQ ID NO: 784202 - DNA, 15 bp, Homo sapiens
agtgtgatgccttta

SEQ ID NO: 784203 - DNA, 15 bp, Homo sapiens
gtgtgatgcctttag

SEQ ID NO: 784204 - DNA, 15 bp, Homo sapiens
tgtgatgcctttaga

SEQ ID NO: 784205 - DNA, 15 bp, Homo sapiens
gtgatgcctttagat

SEQ ID NO: 784206 - DNA, 15 bp, Homo sapiens
tgatgcctttagatg

SEQ ID NO: 784207 - DNA, 15 bp, Homo sapiens
gatgcctttagatgc

SEQ ID NO: 784208 - DNA, 15 bp, Homo sapiens
atgcctttagatgca

SEQ ID NO: 784209 - DNA, 15 bp, Homo sapiens
tgcctttagatgcac

SEQ ID NO: 784210 - DNA, 15 bp, Homo sapiens
gcctttagatgcaca

SEQ ID NO: 784211 - DNA, 15 bp, Homo sapiens
cctttagatgcacat

SEQ ID NO: 784212 - DNA, 15 bp, Homo sapiens
ctttagatgcacatg

SEQ ID NO: 784213 - DNA, 15 bp, Homo sapiens
tttagatgcacatga

SEQ ID NO: 784214 - DNA, 15 bp, Homo sapiens
ttagatgcacatgaa

SEQ ID NO: 784215 - DNA, 15 bp, Homo sapiens
tagatgcacatgaaa

SEQ ID NO: 784216 - DNA, 15 bp, Homo sapiens
agatgcacatgaaag

SEQ ID NO: 784217 - DNA, 15 bp, Homo sapiens
gatgcacatgaaaga

SEQ ID NO: 784218 - DNA, 15 bp, Homo sapiens
atgcacatgaaagaa

SEQ ID NO: 784219 - DNA, 15 bp, Homo sapiens
tgcacatgaaagaac

SEQ ID NO: 784220 - DNA, 15 bp, Homo sapiens
gcacatgaaagaact

SEQ ID NO: 784221 - DNA, 15 bp, Homo sapiens
cacatgaaagaactt

SEQ ID NO: 784222 - DNA, 15 bp, Homo sapiens
acatgaaagaacttt

SEQ ID NO: 784223 - DNA, 15 bp, Homo sapiens
catgaaagaactttc

SEQ ID NO: 784224 - DNA, 15 bp, Homo sapiens
atgaaagaactttca

SEQ ID NO: 784225 - DNA, 15 bp, Homo sapiens
tgaaagaactttcag

SEQ ID NO: 784226 - DNA, 15 bp, Homo sapiens
gaaagaactttcaga

SEQ ID NO: 784227 - DNA, 15 bp, Homo sapiens
aaagaactttcagac

SEQ ID NO: 784228 - DNA, 15 bp, Homo sapiens
aagaactttcagacg

SEQ ID NO: 784229 - DNA, 15 bp, Homo sapiens
agaactttcagacga

SEQ ID NO: 784230 - DNA, 15 bp, Homo sapiens
gaactttcagacgac

SEQ ID NO: 784231 - DNA, 15 bp, Homo sapiens
aactttcagacgaca

SEQ ID NO: 784232 - DNA, 15 bp, Homo sapiens
actttcagacgacaa

SEQ ID NO: 784233 - DNA, 15 bp, Homo sapiens
ctttcagacgacaac

SEQ ID NO: 784234 - DNA, 15 bp, Homo sapiens
tttcagacgacaaca

SEQ ID NO: 784235 - DNA, 15 bp, Homo sapiens
ttcagacgacaacat

SEQ ID NO: 784236 - DNA, 15 bp, Homo sapiens
tcagacgacaacata

SEQ ID NO: 784237 - DNA, 15 bp, Homo sapiens
cagacgacaacataa

SEQ ID NO: 784238 - DNA, 15 bp, Homo sapiens
agacgacaacataaa

SEQ ID NO: 784239 - DNA, 15 bp, Homo sapiens
gacgacaacataaaa

SEQ ID NO: 784240 - DNA, 15 bp, Homo sapiens
acgacaacataaaat

SEQ ID NO: 784241 - DNA, 15 bp, Homo sapiens
cgacaacataaaatt

SEQ ID NO: 784242 - DNA, 15 bp, Homo sapiens
gacaacataaaattt

SEQ ID NO: 784243 - DNA, 15 bp, Homo sapiens
acaacataaaatttc

SEQ ID NO: 784244 - DNA, 15 bp, Homo sapiens
caacataaaatttcc

SEQ ID NO: 784245 - DNA, 15 bp, Homo sapiens
aacataaaatttcca

SEQ ID NO: 784246 - DNA, 15 bp, Homo sapiens
acataaaatttccaa

SEQ ID NO: 784247 - DNA, 15 bp, Homo sapiens
cataaaatttccaaa

SEQ ID NO: 784248 - DNA, 15 bp, Homo sapiens
ataaaatttccaaaa

SEQ ID NO: 784249 - DNA, 15 bp, Homo sapiens
taaaatttccaaaat

SEQ ID NO: 784250 - DNA, 15 bp, Homo sapiens
aaaatttccaaaata

SEQ ID NO: 784251 - DNA, 15 bp, Homo sapiens
aaatttccaaaatat

SEQ ID NO: 784252 - DNA, 15 bp, Homo sapiens
aatttccaaaatatt

SEQ ID NO: 784253 - DNA, 15 bp, Homo sapiens
atttccaaaatattt

SEQ ID NO: 784254 - DNA, 15 bp, Homo sapiens
tttccaaaatatttt

SEQ ID NO: 784255 - DNA, 15 bp, Homo sapiens
ttccaaaatattttg

SEQ ID NO: 784256 - DNA, 15 bp, Homo sapiens
tccaaaatattttgt

SEQ ID NO: 784257 - DNA, 15 bp, Homo sapiens
ccaaaatattttgtt

SEQ ID NO: 784258 - DNA, 15 bp, Homo sapiens
caaaatattttgttt

SEQ ID NO: 784259 - DNA, 15 bp, Homo sapiens
aaaatattttgttta

SEQ ID NO: 784260 - DNA, 15 bp, Homo sapiens
aaatattttgtttaa

SEQ ID NO: 784261 - DNA, 15 bp, Homo sapiens
aatattttgtttaac

SEQ ID NO: 784262 - DNA, 15 bp, Homo sapiens
atattttgtttaacc

SEQ ID NO: 784263 - DNA, 15 bp, Homo sapiens
tattttgtttaacct

SEQ ID NO: 784264 - DNA, 15 bp, Homo sapiens
attttgtttaacctg

SEQ ID NO: 784265 - DNA, 15 bp, Homo sapiens
ttttgtttaacctgt

SEQ ID NO: 784266 - DNA, 15 bp, Homo sapiens
tttgtttaacctgtt

SEQ ID NO: 784267 - DNA, 15 bp, Homo sapiens
ttgtttaacctgttc

SEQ ID NO: 784268 - DNA, 15 bp, Homo sapiens
tgtttaacctgttca

SEQ ID NO: 784269 - DNA, 15 bp, Homo sapiens
gtttaacctgttcac

SEQ ID NO: 784270 - DNA, 15 bp, Homo sapiens
tttaacctgttcaca

SEQ ID NO: 784271 - DNA, 15 bp, Homo sapiens
ttaacctgttcacac

SEQ ID NO: 784272 - DNA, 15 bp, Homo sapiens
taacctgttcacaca

SEQ ID NO: 784273 - DNA, 15 bp, Homo sapiens
aacctgttcacacac

SEQ ID NO: 784274 - DNA, 15 bp, Homo sapiens
acctgttcacacact

SEQ ID NO: 784275 - DNA, 15 bp, Homo sapiens
cctgttcacacactt

SEQ ID NO: 784276 - DNA, 15 bp, Homo sapiens
ctgttcacacacttt

SEQ ID NO: 784277 - DNA, 15 bp, Homo sapiens
tgttcacacactttc

SEQ ID NO: 784278 - DNA, 15 bp, Homo sapiens
gttcacacactttca

SEQ ID NO: 784279 - DNA, 15 bp, Homo sapiens
ttcacacactttcat

SEQ ID NO: 784280 - DNA, 15 bp, Homo sapiens
tcacacactttcatt

SEQ ID NO: 784281 - DNA, 15 bp, Homo sapiens
cacacactttcattc

SEQ ID NO: 784282 - DNA, 15 bp, Homo sapiens
acacactttcattca

SEQ ID NO: 784283 - DNA, 15 bp, Homo sapiens
cacactttcattcat

SEQ ID NO: 784284 - DNA, 15 bp, Homo sapiens
acactttcattcatt

SEQ ID NO: 784285 - DNA, 15 bp, Homo sapiens
cactttcattcattt

SEQ ID NO: 784286 - DNA, 15 bp, Homo sapiens
actttcattcatttt

SEQ ID NO: 784287 - DNA, 15 bp, Homo sapiens
ctttcattcattttt

SEQ ID NO: 784288 - DNA, 15 bp, Homo sapiens
tttcattcatttttc

SEQ ID NO: 784289 - DNA, 15 bp, Homo sapiens
ttcattcatttttcc

SEQ ID NO: 784290 - DNA, 15 bp, Homo sapiens
tcattcatttttccc

SEQ ID NO: 784291 - DNA, 15 bp, Homo sapiens
cattcatttttcccc

SEQ ID NO: 784292 - DNA, 15 bp, Homo sapiens
attcatttttccccc

SEQ ID NO: 784293 - DNA, 15 bp, Homo sapiens
ttcatttttccccct

SEQ ID NO: 784294 - DNA, 15 bp, Homo sapiens
tcatttttccccctc

SEQ ID NO: 784295 - DNA, 15 bp, Homo sapiens
catttttccccctct

SEQ ID NO: 784296 - DNA, 15 bp, Homo sapiens
atttttccccctctg

SEQ ID NO: 784297 - DNA, 15 bp, Homo sapiens
tttttccccctctga

SEQ ID NO: 784298 - DNA, 15 bp, Homo sapiens
ttttccccctctgag

SEQ ID NO: 784299 - DNA, 15 bp, Homo sapiens
tttccccctctgaga

SEQ ID NO: 784300 - DNA, 15 bp, Homo sapiens
ttccccctctgagag

SEQ ID NO: 784301 - DNA, 15 bp, Homo sapiens
tccccctctgagagt

SEQ ID NO: 784302 - DNA, 15 bp, Homo sapiens
ccccctctgagagta

SEQ ID NO: 784303 - DNA, 15 bp, Homo sapiens
cccctctgagagtaa

SEQ ID NO: 784304 - DNA, 15 bp, Homo sapiens
ccctctgagagtaac

SEQ ID NO: 784305 - DNA, 15 bp, Homo sapiens
cctctgagagtaact

SEQ ID NO: 784306 - DNA, 15 bp, Homo sapiens
ctctgagagtaacta

SEQ ID NO: 784307 - DNA, 15 bp, Homo sapiens
tctgagagtaactat

SEQ ID NO: 784308 - DNA, 15 bp, Homo sapiens
ctgagagtaactatt

SEQ ID NO: 784309 - DNA, 15 bp, Homo sapiens
tgagagtaactattt

SEQ ID NO: 784310 - DNA, 15 bp, Homo sapiens
gagagtaactatttg

SEQ ID NO: 784311 - DNA, 15 bp, Homo sapiens
agagtaactatttgt

SEQ ID NO: 784312 - DNA, 15 bp, Homo sapiens
gagtaactatttgta

SEQ ID NO: 784313 - DNA, 15 bp, Homo sapiens
agtaactatttgtaa

SEQ ID NO: 784314 - DNA, 15 bp, Homo sapiens
gtaactatttgtaac

SEQ ID NO: 784315 - DNA, 15 bp, Homo sapiens
taactatttgtaacc

SEQ ID NO: 784316 - DNA, 15 bp, Homo sapiens
aactatttgtaaccc

SEQ ID NO: 784317 - DNA, 15 bp, Homo sapiens
actatttgtaacccc

SEQ ID NO: 784318 - DNA, 15 bp, Homo sapiens
ctatttgtaacccca

SEQ ID NO: 784319 - DNA, 15 bp, Homo sapiens
tatttgtaaccccaa

SEQ ID NO: 784320 - DNA, 15 bp, Homo sapiens
atttgtaaccccaac

SEQ ID NO: 784321 - DNA, 15 bp, Homo sapiens
tttgtaaccccaact

SEQ ID NO: 784322 - DNA, 15 bp, Homo sapiens
ttgtaaccccaacta

SEQ ID NO: 784323 - DNA, 15 bp, Homo sapiens
tgtaaccccaactaa

SEQ ID NO: 784324 - DNA, 15 bp, Homo sapiens
gtaaccccaactaat

SEQ ID NO: 784325 - DNA, 15 bp, Homo sapiens
taaccccaactaata

SEQ ID NO: 784326 - DNA, 15 bp, Homo sapiens
aaccccaactaataa

SEQ ID NO: 784327 - DNA, 15 bp, Homo sapiens
accccaactaataat

SEQ ID NO: 784328 - DNA, 15 bp, Homo sapiens
ccccaactaataatg

SEQ ID NO: 784329 - DNA, 15 bp, Homo sapiens
cccaactaataatga

SEQ ID NO: 784330 - DNA, 15 bp, Homo sapiens
ccaactaataatgaa

SEQ ID NO: 784331 - DNA, 15 bp, Homo sapiens
caactaataatgaac

SEQ ID NO: 784332 - DNA, 15 bp, Homo sapiens
aactaataatgaaca

SEQ ID NO: 784333 - DNA, 15 bp, Homo sapiens
actaataatgaacac

SEQ ID NO: 784334 - DNA, 15 bp, Homo sapiens
ctaataatgaacact

SEQ ID NO: 784335 - DNA, 15 bp, Homo sapiens
taataatgaacacta

SEQ ID NO: 784336 - DNA, 15 bp, Homo sapiens
aataatgaacactag

SEQ ID NO: 784337 - DNA, 15 bp, Homo sapiens
ataatgaacactagt

SEQ ID NO: 784338 - DNA, 15 bp, Homo sapiens
taatgaacactagtg

SEQ ID NO: 784339 - DNA, 15 bp, Homo sapiens
aatgaacactagtgt

SEQ ID NO: 784340 - DNA, 15 bp, Homo sapiens
atgaacactagtgtt

SEQ ID NO: 784341 - DNA, 15 bp, Homo sapiens
tgaacactagtgttt

SEQ ID NO: 784342 - DNA, 15 bp, Homo sapiens
gaacactagtgttta

SEQ ID NO: 784343 - DNA, 15 bp, Homo sapiens
aacactagtgtttat

SEQ ID NO: 784344 - DNA, 15 bp, Homo sapiens
acactagtgtttatg

SEQ ID NO: 784345 - DNA, 15 bp, Homo sapiens
cactagtgtttatga

SEQ ID NO: 784346 - DNA, 15 bp, Homo sapiens
actagtgtttatgaa

SEQ ID NO: 784347 - DNA, 15 bp, Homo sapiens
ctagtgtttatgaag

SEQ ID NO: 784348 - DNA, 15 bp, Homo sapiens
tagtgtttatgaagg

SEQ ID NO: 784349 - DNA, 15 bp, Homo sapiens
agtgtttatgaagga

SEQ ID NO: 784350 - DNA, 15 bp, Homo sapiens
gtgtttatgaaggat

SEQ ID NO: 784351 - DNA, 15 bp, Homo sapiens
tgtttatgaaggatt

SEQ ID NO: 784352 - DNA, 15 bp, Homo sapiens
gtttatgaaggattt

SEQ ID NO: 784353 - DNA, 15 bp, Homo sapiens
tttatgaaggattta

SEQ ID NO: 784354 - DNA, 15 bp, Homo sapiens
ttatgaaggatttac

SEQ ID NO: 784355 - DNA, 15 bp, Homo sapiens
tatgaaggatttact

SEQ ID NO: 784356 - DNA, 15 bp, Homo sapiens
atgaaggatttacta

SEQ ID NO: 784357 - DNA, 15 bp, Homo sapiens
tgaaggatttactaa

SEQ ID NO: 784358 - DNA, 15 bp, Homo sapiens
gaaggatttactaaa

SEQ ID NO: 784359 - DNA, 15 bp, Homo sapiens
aaggatttactaaat

SEQ ID NO: 784360 - DNA, 15 bp, Homo sapiens
aggatttactaaatg

SEQ ID NO: 784361 - DNA, 15 bp, Homo sapiens
ggatttactaaatgc

SEQ ID NO: 784362 - DNA, 15 bp, Homo sapiens
gatttactaaatgcc

SEQ ID NO: 784363 - DNA, 15 bp, Homo sapiens
atttactaaatgcca

SEQ ID NO: 784364 - DNA, 15 bp, Homo sapiens
tttactaaatgccac

SEQ ID NO: 784365 - DNA, 15 bp, Homo sapiens
ttactaaatgccacc

SEQ ID NO: 784366 - DNA, 15 bp, Homo sapiens
tactaaatgccacct

SEQ ID NO: 784367 - DNA, 15 bp, Homo sapiens
actaaatgccaccta

SEQ ID NO: 784368 - DNA, 15 bp, Homo sapiens
ctaaatgccacctac

SEQ ID NO: 784369 - DNA, 15 bp, Homo sapiens
taaatgccacctaca

SEQ ID NO: 784370 - DNA, 15 bp, Homo sapiens
aaatgccacctacaa

SEQ ID NO: 784371 - DNA, 15 bp, Homo sapiens
aatgccacctacaat

SEQ ID NO: 784372 - DNA, 15 bp, Homo sapiens
atgccacctacaata

SEQ ID NO: 784373 - DNA, 15 bp, Homo sapiens
tgccacctacaatac

SEQ ID NO: 784374 - DNA, 15 bp, Homo sapiens
gccacctacaatacc

SEQ ID NO: 784375 - DNA, 15 bp, Homo sapiens
ccacctacaatacca

SEQ ID NO: 784376 - DNA, 15 bp, Homo sapiens
cacctacaataccag

SEQ ID NO: 784377 - DNA, 15 bp, Homo sapiens
acctacaataccagg

SEQ ID NO: 784378 - DNA, 15 bp, Homo sapiens
cctacaataccaggt

SEQ ID NO: 784379 - DNA, 15 bp, Homo sapiens
ctacaataccaggtg

SEQ ID NO: 784380 - DNA, 15 bp, Homo sapiens
tacaataccaggtga

SEQ ID NO: 784381 - DNA, 15 bp, Homo sapiens
acaataccaggtgat

SEQ ID NO: 784382 - DNA, 15 bp, Homo sapiens
caataccaggtgatt

SEQ ID NO: 784383 - DNA, 15 bp, Homo sapiens
aataccaggtgattt

SEQ ID NO: 784384 - DNA, 15 bp, Homo sapiens
ataccaggtgatttt

SEQ ID NO: 784385 - DNA, 15 bp, Homo sapiens
taccaggtgattttt

SEQ ID NO: 784386 - DNA, 15 bp, Homo sapiens
accaggtgatttttc

SEQ ID NO: 784387 - DNA, 15 bp, Homo sapiens
ccaggtgatttttct

SEQ ID NO: 784388 - DNA, 15 bp, Homo sapiens
caggtgatttttcta

SEQ ID NO: 784389 - DNA, 15 bp, Homo sapiens
aggtgatttttctac

SEQ ID NO: 784390 - DNA, 15 bp, Homo sapiens
ggtgatttttctaca

SEQ ID NO: 784391 - DNA, 15 bp, Homo sapiens
gtgatttttctacat

SEQ ID NO: 784392 - DNA, 15 bp, Homo sapiens
tgatttttctacatc

SEQ ID NO: 784393 - DNA, 15 bp, Homo sapiens
gatttttctacatca

SEQ ID NO: 784394 - DNA, 15 bp, Homo sapiens
atttttctacatcac

SEQ ID NO: 784395 - DNA, 15 bp, Homo sapiens
tttttctacatcacc

SEQ ID NO: 784396 - DNA, 15 bp, Homo sapiens
ttttctacatcacct

SEQ ID NO: 784397 - DNA, 15 bp, Homo sapiens
tttctacatcacctc

SEQ ID NO: 784398 - DNA, 15 bp, Homo sapiens
ttctacatcacctca

SEQ ID NO: 784399 - DNA, 15 bp, Homo sapiens
tctacatcacctcat

SEQ ID NO: 784400 - DNA, 15 bp, Homo sapiens
ctacatcacctcatt

SEQ ID NO: 784401 - DNA, 15 bp, Homo sapiens
tacatcacctcatta

SEQ ID NO: 784402 - DNA, 15 bp, Homo sapiens
acatcacctcattaa

SEQ ID NO: 784403 - DNA, 15 bp, Homo sapiens
catcacctcattaat

SEQ ID NO: 784404 - DNA, 15 bp, Homo sapiens
atcacctcattaatc

SEQ ID NO: 784405 - DNA, 15 bp, Homo sapiens
tcacctcattaatcc

SEQ ID NO: 784406 - DNA, 15 bp, Homo sapiens
cacctcattaatcct

SEQ ID NO: 784407 - DNA, 15 bp, Homo sapiens
acctcattaatcctc

SEQ ID NO: 784408 - DNA, 15 bp, Homo sapiens
cctcattaatcctca

SEQ ID NO: 784409 - DNA, 15 bp, Homo sapiens
ctcattaatcctcat

SEQ ID NO: 784410 - DNA, 15 bp, Homo sapiens
tcattaatcctcata

SEQ ID NO: 784411 - DNA, 15 bp, Homo sapiens
cattaatcctcatat

SEQ ID NO: 784412 - DNA, 15 bp, Homo sapiens
attaatcctcatatc

SEQ ID NO: 784413 - DNA, 15 bp, Homo sapiens
ttaatcctcatatcc

SEQ ID NO: 784414 - DNA, 15 bp, Homo sapiens
taatcctcatatccc

SEQ ID NO: 784415 - DNA, 15 bp, Homo sapiens
aatcctcatatccct

SEQ ID NO: 784416 - DNA, 15 bp, Homo sapiens
atcctcatatcccta

SEQ ID NO: 784417 - DNA, 15 bp, Homo sapiens
tcctcatatccctac

SEQ ID NO: 784418 - DNA, 15 bp, Homo sapiens
cctcatatccctact

SEQ ID NO: 784419 - DNA, 15 bp, Homo sapiens
ctcatatccctacta

SEQ ID NO: 784420 - DNA, 15 bp, Homo sapiens
tcatatccctactat

SEQ ID NO: 784421 - DNA, 15 bp, Homo sapiens
catatccctactatg

SEQ ID NO: 784422 - DNA, 15 bp, Homo sapiens
atatccctactatga

SEQ ID NO: 784423 - DNA, 15 bp, Homo sapiens
tatccctactatgag

SEQ ID NO: 784424 - DNA, 15 bp, Homo sapiens
atccctactatgaga

SEQ ID NO: 784425 - DNA, 15 bp, Homo sapiens
tccctactatgagag

SEQ ID NO: 784426 - DNA, 15 bp, Homo sapiens
ccctactatgagagt

SEQ ID NO: 784427 - DNA, 15 bp, Homo sapiens
cctactatgagagta

SEQ ID NO: 784428 - DNA, 15 bp, Homo sapiens
ctactatgagagtag

SEQ ID NO: 784429 - DNA, 15 bp, Homo sapiens
tactatgagagtagg

SEQ ID NO: 784430 - DNA, 15 bp, Homo sapiens
actatgagagtaggt

SEQ ID NO: 784431 - DNA, 15 bp, Homo sapiens
ctatgagagtaggta

SEQ ID NO: 784432 - DNA, 15 bp, Homo sapiens
tatgagagtaggtac

SEQ ID NO: 784433 - DNA, 15 bp, Homo sapiens
atgagagtaggtacc

SEQ ID NO: 784434 - DNA, 15 bp, Homo sapiens
tgagagtaggtaccg

SEQ ID NO: 784435 - DNA, 15 bp, Homo sapiens
gagagtaggtaccgc

SEQ ID NO: 784436 - DNA, 15 bp, Homo sapiens
agagtaggtaccgca

SEQ ID NO: 784437 - DNA, 15 bp, Homo sapiens
gagtaggtaccgcat

SEQ ID NO: 784438 - DNA, 15 bp, Homo sapiens
agtaggtaccgcatt

SEQ ID NO: 784439 - DNA, 15 bp, Homo sapiens
gtaggtaccgcattc

SEQ ID NO: 784440 - DNA, 15 bp, Homo sapiens
taggtaccgcattca

SEQ ID NO: 784441 - DNA, 15 bp, Homo sapiens
aggtaccgcattcat

SEQ ID NO: 784442 - DNA, 15 bp, Homo sapiens
ggtaccgcattcatc

SEQ ID NO: 784443 - DNA, 15 bp, Homo sapiens
gtaccgcattcatcc

SEQ ID NO: 784444 - DNA, 15 bp, Homo sapiens
taccgcattcatccc

SEQ ID NO: 784445 - DNA, 15 bp, Homo sapiens
accgcattcatcccc

SEQ ID NO: 784446 - DNA, 15 bp, Homo sapiens
ccgcattcatcccca

SEQ ID NO: 784447 - DNA, 15 bp, Homo sapiens
cgcattcatccccat

SEQ ID NO: 784448 - DNA, 15 bp, Homo sapiens
gcattcatccccatt

SEQ ID NO: 784449 - DNA, 15 bp, Homo sapiens
cattcatccccattc

SEQ ID NO: 784450 - DNA, 15 bp, Homo sapiens
attcatccccattca

SEQ ID NO: 784451 - DNA, 15 bp, Homo sapiens
ttcatccccattcag

SEQ ID NO: 784452 - DNA, 15 bp, Homo sapiens
tcatccccattcagt

SEQ ID NO: 784453 - DNA, 15 bp, Homo sapiens
catccccattcagtg

SEQ ID NO: 784454 - DNA, 15 bp, Homo sapiens
atccccattcagtgg

SEQ ID NO: 784455 - DNA, 15 bp, Homo sapiens
tccccattcagtgga

SEQ ID NO: 784456 - DNA, 15 bp, Homo sapiens
ccccattcagtggag

SEQ ID NO: 784457 - DNA, 15 bp, Homo sapiens
cccattcagtggagc

SEQ ID NO: 784458 - DNA, 15 bp, Homo sapiens
ccattcagtggagcc

SEQ ID NO: 784459 - DNA, 15 bp, Homo sapiens
cattcagtggagccc

SEQ ID NO: 784460 - DNA, 15 bp, Homo sapiens
attcagtggagccca

SEQ ID NO: 784461 - DNA, 15 bp, Homo sapiens
ttcagtggagcccat

SEQ ID NO: 784462 - DNA, 15 bp, Homo sapiens
tcagtggagcccata

SEQ ID NO: 784463 - DNA, 15 bp, Homo sapiens
cagtggagcccatag

SEQ ID NO: 784464 - DNA, 15 bp, Homo sapiens
agtggagcccatagg

SEQ ID NO: 784465 - DNA, 15 bp, Homo sapiens
gtggagcccataggg

SEQ ID NO: 784466 - DNA, 15 bp, Homo sapiens
tggagcccatagggg

SEQ ID NO: 784467 - DNA, 15 bp, Homo sapiens
ggagcccatagggga

SEQ ID NO: 784468 - DNA, 15 bp, Homo sapiens
gagcccataggggag

SEQ ID NO: 784469 - DNA, 15 bp, Homo sapiens
agcccataggggagg

SEQ ID NO: 784470 - DNA, 15 bp, Homo sapiens
gcccataggggagga

SEQ ID NO: 784471 - DNA, 15 bp, Homo sapiens
cccataggggaggaa

SEQ ID NO: 784472 - DNA, 15 bp, Homo sapiens
ccataggggaggaaa

SEQ ID NO: 784473 - DNA, 15 bp, Homo sapiens
cataggggaggaaac

SEQ ID NO: 784474 - DNA, 15 bp, Homo sapiens
ataggggaggaaact

SEQ ID NO: 784475 - DNA, 15 bp, Homo sapiens
taggggaggaaactg

SEQ ID NO: 784476 - DNA, 15 bp, Homo sapiens
aggggaggaaactga

SEQ ID NO: 784477 - DNA, 15 bp, Homo sapiens
ggggaggaaactgac

SEQ ID NO: 784478 - DNA, 15 bp, Homo sapiens
gggaggaaactgacg

SEQ ID NO: 784479 - DNA, 15 bp, Homo sapiens
ggaggaaactgacgt

SEQ ID NO: 784480 - DNA, 15 bp, Homo sapiens
gaggaaactgacgtg

SEQ ID NO: 784481 - DNA, 15 bp, Homo sapiens
aggaaactgacgtgg

SEQ ID NO: 784482 - DNA, 15 bp, Homo sapiens
ggaaactgacgtggg

SEQ ID NO: 784483 - DNA, 15 bp, Homo sapiens
gaaactgacgtggga

SEQ ID NO: 784484 - DNA, 15 bp, Homo sapiens
aaactgacgtgggag

SEQ ID NO: 784485 - DNA, 15 bp, Homo sapiens
aactgacgtgggagg

SEQ ID NO: 784486 - DNA, 15 bp, Homo sapiens
actgacgtgggaggc

SEQ ID NO: 784487 - DNA, 15 bp, Homo sapiens
ctgacgtgggaggct

SEQ ID NO: 784488 - DNA, 15 bp, Homo sapiens
tgacgtgggaggctg

SEQ ID NO: 784489 - DNA, 15 bp, Homo sapiens
gacgtgggaggctgg

SEQ ID NO: 784490 - DNA, 15 bp, Homo sapiens
acgtgggaggctggc

SEQ ID NO: 784491 - DNA, 15 bp, Homo sapiens
cgtgggaggctggct

SEQ ID NO: 784492 - DNA, 15 bp, Homo sapiens
gtgggaggctggctc

SEQ ID NO: 784493 - DNA, 15 bp, Homo sapiens
tgggaggctggctca

SEQ ID NO: 784494 - DNA, 15 bp, Homo sapiens
gggaggctggctcag

SEQ ID NO: 784495 - DNA, 15 bp, Homo sapiens
ggaggctggctcagt

SEQ ID NO: 784496 - DNA, 15 bp, Homo sapiens
gaggctggctcagtt

SEQ ID NO: 784497 - DNA, 15 bp, Homo sapiens
aggctggctcagttc

SEQ ID NO: 784498 - DNA, 15 bp, Homo sapiens
ggctggctcagttcc

SEQ ID NO: 784499 - DNA, 15 bp, Homo sapiens
gctggctcagttccc

SEQ ID NO: 784500 - DNA, 15 bp, Homo sapiens
ctggctcagttccct

SEQ ID NO: 784501 - DNA, 15 bp, Homo sapiens
tggctcagttccctt

SEQ ID NO: 784502 - DNA, 15 bp, Homo sapiens
ggctcagttccctta

SEQ ID NO: 784503 - DNA, 15 bp, Homo sapiens
gctcagttcccttag

SEQ ID NO: 784504 - DNA, 15 bp, Homo sapiens
ctcagttcccttagt

SEQ ID NO: 784505 - DNA, 15 bp, Homo sapiens
tcagttcccttagtg

SEQ ID NO: 784506 - DNA, 15 bp, Homo sapiens
cagttcccttagtga

SEQ ID NO: 784507 - DNA, 15 bp, Homo sapiens
agttcccttagtgat

SEQ ID NO: 784508 - DNA, 15 bp, Homo sapiens
gttcccttagtgatg

SEQ ID NO: 784509 - DNA, 15 bp, Homo sapiens
ttcccttagtgatgg

SEQ ID NO: 784510 - DNA, 15 bp, Homo sapiens
tcccttagtgatggc

SEQ ID NO: 784511 - DNA, 15 bp, Homo sapiens
cccttagtgatggca

SEQ ID NO: 784512 - DNA, 15 bp, Homo sapiens
ccttagtgatggcag

SEQ ID NO: 784513 - DNA, 15 bp, Homo sapiens
cttagtgatggcagt

SEQ ID NO: 784514 - DNA, 15 bp, Homo sapiens
ttagtgatggcagtc

SEQ ID NO: 784515 - DNA, 15 bp, Homo sapiens
tagtgatggcagtct

SEQ ID NO: 784516 - DNA, 15 bp, Homo sapiens
agtgatggcagtctg

SEQ ID NO: 784517 - DNA, 15 bp, Homo sapiens
gtgatggcagtctga

SEQ ID NO: 784518 - DNA, 15 bp, Homo sapiens
tgatggcagtctgat

SEQ ID NO: 784519 - DNA, 15 bp, Homo sapiens
gatggcagtctgatg

SEQ ID NO: 784520 - DNA, 15 bp, Homo sapiens
atggcagtctgatgg

SEQ ID NO: 784521 - DNA, 15 bp, Homo sapiens
tggcagtctgatgga

SEQ ID NO: 784522 - DNA, 15 bp, Homo sapiens
ggcagtctgatggag

SEQ ID NO: 784523 - DNA, 15 bp, Homo sapiens
gcagtctgatggagg

SEQ ID NO: 784524 - DNA, 15 bp, Homo sapiens
cagtctgatggaggt

SEQ ID NO: 784525 - DNA, 15 bp, Homo sapiens
agtctgatggaggtg

SEQ ID NO: 784526 - DNA, 15 bp, Homo sapiens
gtctgatggaggtgc

SEQ ID NO: 784527 - DNA, 15 bp, Homo sapiens
tctgatggaggtgct

SEQ ID NO: 784528 - DNA, 15 bp, Homo sapiens
ctgatggaggtgctg

SEQ ID NO: 784529 - DNA, 15 bp, Homo sapiens
tgatggaggtgctga

SEQ ID NO: 784530 - DNA, 15 bp, Homo sapiens
gatggaggtgctgac

SEQ ID NO: 784531 - DNA, 15 bp, Homo sapiens
atggaggtgctgacc

SEQ ID NO: 784532 - DNA, 15 bp, Homo sapiens
tggaggtgctgaccc

SEQ ID NO: 784533 - DNA, 15 bp, Homo sapiens
ggaggtgctgaccca

SEQ ID NO: 784534 - DNA, 15 bp, Homo sapiens
gaggtgctgacccaa

SEQ ID NO: 784535 - DNA, 15 bp, Homo sapiens
aggtgctgacccaag

SEQ ID NO: 784536 - DNA, 15 bp, Homo sapiens
ggtgctgacccaagt

SEQ ID NO: 784537 - DNA, 15 bp, Homo sapiens
gtgctgacccaagtg

SEQ ID NO: 784538 - DNA, 15 bp, Homo sapiens
tgctgacccaagtgg

SEQ ID NO: 784539 - DNA, 15 bp, Homo sapiens
gctgacccaagtgga

SEQ ID NO: 784540 - DNA, 15 bp, Homo sapiens
ctgacccaagtggac

SEQ ID NO: 784541 - DNA, 15 bp, Homo sapiens
tgacccaagtggaca

SEQ ID NO: 784542 - DNA, 15 bp, Homo sapiens
gacccaagtggacac

SEQ ID NO: 784543 - DNA, 15 bp, Homo sapiens
acccaagtggacacc

SEQ ID NO: 784544 - DNA, 15 bp, Homo sapiens
cccaagtggacacca

SEQ ID NO: 784545 - DNA, 15 bp, Homo sapiens
ccaagtggacaccaa

SEQ ID NO: 784546 - DNA, 15 bp, Homo sapiens
caagtggacaccaaa

SEQ ID NO: 784547 - DNA, 15 bp, Homo sapiens
aagtggacaccaaat

SEQ ID NO: 784548 - DNA, 15 bp, Homo sapiens
agtggacaccaaatg

SEQ ID NO: 784549 - DNA, 15 bp, Homo sapiens
gtggacaccaaatgt

SEQ ID NO: 784550 - DNA, 15 bp, Homo sapiens
tggacaccaaatgtt

SEQ ID NO: 784551 - DNA, 15 bp, Homo sapiens
ggacaccaaatgttt

SEQ ID NO: 784552 - DNA, 15 bp, Homo sapiens
gacaccaaatgtttt

SEQ ID NO: 784553 - DNA, 15 bp, Homo sapiens
acaccaaatgttttg

SEQ ID NO: 784554 - DNA, 15 bp, Homo sapiens
caccaaatgttttgt

SEQ ID NO: 784555 - DNA, 15 bp, Homo sapiens
accaaatgttttgta

SEQ ID NO: 784556 - DNA, 15 bp, Homo sapiens
ccaaatgttttgtat

SEQ ID NO: 784557 - DNA, 15 bp, Homo sapiens
caaatgttttgtatt

SEQ ID NO: 784558 - DNA, 15 bp, Homo sapiens
aaatgttttgtattg

SEQ ID NO: 784559 - DNA, 15 bp, Homo sapiens
aatgttttgtattga

SEQ ID NO: 784560 - DNA, 15 bp, Homo sapiens
atgttttgtattgaa

SEQ ID NO: 784561 - DNA, 15 bp, Homo sapiens
tgttttgtattgaaa

SEQ ID NO: 784562 - DNA, 15 bp, Homo sapiens
gttttgtattgaaac

SEQ ID NO: 784563 - DNA, 15 bp, Homo sapiens
ttttgtattgaaaca

SEQ ID NO: 784564 - DNA, 15 bp, Homo sapiens
tttgtattgaaacat

SEQ ID NO: 784565 - DNA, 15 bp, Homo sapiens
ttgtattgaaacata

SEQ ID NO: 784566 - DNA, 15 bp, Homo sapiens
tgtattgaaacataa

SEQ ID NO: 784567 - DNA, 15 bp, Homo sapiens
gtattgaaacataat

SEQ ID NO: 784568 - DNA, 15 bp, Homo sapiens
tattgaaacataata

SEQ ID NO: 784569 - DNA, 15 bp, Homo sapiens
attgaaacataatac

SEQ ID NO: 784570 - DNA, 15 bp, Homo sapiens
ttgaaacataataca

SEQ ID NO: 784571 - DNA, 15 bp, Homo sapiens
tgaaacataatacag

SEQ ID NO: 784572 - DNA, 15 bp, Homo sapiens
gaaacataatacagt

SEQ ID NO: 784573 - DNA, 15 bp, Homo sapiens
aaacataatacagtg

SEQ ID NO: 784574 - DNA, 15 bp, Homo sapiens
aacataatacagtgc

SEQ ID NO: 784575 - DNA, 15 bp, Homo sapiens
acataatacagtgca

SEQ ID NO: 784576 - DNA, 15 bp, Homo sapiens
cataatacagtgcag

SEQ ID NO: 784577 - DNA, 15 bp, Homo sapiens
ataatacagtgcagc

SEQ ID NO: 784578 - DNA, 15 bp, Homo sapiens
taatacagtgcagca

SEQ ID NO: 784579 - DNA, 15 bp, Homo sapiens
aatacagtgcagcat

SEQ ID NO: 784580 - DNA, 15 bp, Homo sapiens
atacagtgcagcatt

SEQ ID NO: 784581 - DNA, 15 bp, Homo sapiens
tacagtgcagcatta

SEQ ID NO: 784582 - DNA, 15 bp, Homo sapiens
acagtgcagcattat

SEQ ID NO: 784583 - DNA, 15 bp, Homo sapiens
cagtgcagcattatg

SEQ ID NO: 784584 - DNA, 15 bp, Homo sapiens
agtgcagcattatgg

SEQ ID NO: 784585 - DNA, 15 bp, Homo sapiens
gtgcagcattatggg

SEQ ID NO: 784586 - DNA, 15 bp, Homo sapiens
tgcagcattatgggg

SEQ ID NO: 784587 - DNA, 15 bp, Homo sapiens
gcagcattatggggc

SEQ ID NO: 784588 - DNA, 15 bp, Homo sapiens
cagcattatggggca

SEQ ID NO: 784589 - DNA, 15 bp, Homo sapiens
agcattatggggcag

SEQ ID NO: 784590 - DNA, 15 bp, Homo sapiens
gcattatggggcagg

SEQ ID NO: 784591 - DNA, 15 bp, Homo sapiens
cattatggggcaggg

SEQ ID NO: 784592 - DNA, 15 bp, Homo sapiens
attatggggcaggga

SEQ ID NO: 784593 - DNA, 15 bp, Homo sapiens
ttatggggcagggat

SEQ ID NO: 784594 - DNA, 15 bp, Homo sapiens
tatggggcagggatg

SEQ ID NO: 784595 - DNA, 15 bp, Homo sapiens
atggggcagggatgg

SEQ ID NO: 784596 - DNA, 15 bp, Homo sapiens
tggggcagggatggg

SEQ ID NO: 784597 - DNA, 15 bp, Homo sapiens
ggggcagggatgggg

SEQ ID NO: 784598 - DNA, 15 bp, Homo sapiens
gggcagggatgggga

SEQ ID NO: 784599 - DNA, 15 bp, Homo sapiens
ggcagggatggggag

SEQ ID NO: 784600 - DNA, 15 bp, Homo sapiens
gcagggatggggagc

SEQ ID NO: 784601 - DNA, 15 bp, Homo sapiens
cagggatggggagct

SEQ ID NO: 784602 - DNA, 15 bp, Homo sapiens
agggatggggagctg

SEQ ID NO: 784603 - DNA, 15 bp, Homo sapiens
gggatggggagctgc

SEQ ID NO: 784604 - DNA, 15 bp, Homo sapiens
ggatggggagctgct

SEQ ID NO: 784605 - DNA, 15 bp, Homo sapiens
gatggggagctgctg

SEQ ID NO: 784606 - DNA, 15 bp, Homo sapiens
atggggagctgctgg

SEQ ID NO: 784607 - DNA, 15 bp, Homo sapiens
tggggagctgctggc

SEQ ID NO: 784608 - DNA, 15 bp, Homo sapiens
ggggagctgctggcc

SEQ ID NO: 784609 - DNA, 15 bp, Homo sapiens
gggagctgctggccc

SEQ ID NO: 784610 - DNA, 15 bp, Homo sapiens
ggagctgctggccca

SEQ ID NO: 784611 - DNA, 15 bp, Homo sapiens
gagctgctggcccat

SEQ ID NO: 784612 - DNA, 15 bp, Homo sapiens
agctgctggcccatg

SEQ ID NO: 784613 - DNA, 15 bp, Homo sapiens
gctgctggcccatga

SEQ ID NO: 784614 - DNA, 15 bp, Homo sapiens
ctgctggcccatgag

SEQ ID NO: 784615 - DNA, 15 bp, Homo sapiens
tgctggcccatgagc

SEQ ID NO: 784616 - DNA, 15 bp, Homo sapiens
gctggcccatgagct

SEQ ID NO: 784617 - DNA, 15 bp, Homo sapiens
ctggcccatgagctg

SEQ ID NO: 784618 - DNA, 15 bp, Homo sapiens
tggcccatgagctgg

SEQ ID NO: 784619 - DNA, 15 bp, Homo sapiens
ggcccatgagctgga

SEQ ID NO: 784620 - DNA, 15 bp, Homo sapiens
gcccatgagctggat

SEQ ID NO: 784621 - DNA, 15 bp, Homo sapiens
cccatgagctggata

SEQ ID NO: 784622 - DNA, 15 bp, Homo sapiens
ccatgagctggatat

SEQ ID NO: 784623 - DNA, 15 bp, Homo sapiens
catgagctggatata

SEQ ID NO: 784624 - DNA, 15 bp, Homo sapiens
atgagctggatatag

SEQ ID NO: 784625 - DNA, 15 bp, Homo sapiens
tgagctggatatagt

SEQ ID NO: 784626 - DNA, 15 bp, Homo sapiens
gagctggatatagtc

SEQ ID NO: 784627 - DNA, 15 bp, Homo sapiens
agctggatatagtct

SEQ ID NO: 784628 - DNA, 15 bp, Homo sapiens
gctggatatagtctt

SEQ ID NO: 784629 - DNA, 15 bp, Homo sapiens
ctggatatagtcttg

SEQ ID NO: 784630 - DNA, 15 bp, Homo sapiens
tggatatagtcttga

SEQ ID NO: 784631 - DNA, 15 bp, Homo sapiens
ggatatagtcttgat

SEQ ID NO: 784632 - DNA, 15 bp, Homo sapiens
gatatagtcttgatg

SEQ ID NO: 784633 - DNA, 15 bp, Homo sapiens
atatagtcttgatgt

SEQ ID NO: 784634 - DNA, 15 bp, Homo sapiens
tatagtcttgatgtg

SEQ ID NO: 784635 - DNA, 15 bp, Homo sapiens
atagtcttgatgtga

SEQ ID NO: 784636 - DNA, 15 bp, Homo sapiens
tagtcttgatgtgat

SEQ ID NO: 784637 - DNA, 15 bp, Homo sapiens
agtcttgatgtgatt

SEQ ID NO: 784638 - DNA, 15 bp, Homo sapiens
gtcttgatgtgattt

SEQ ID NO: 784639 - DNA, 15 bp, Homo sapiens
tcttgatgtgatttt

SEQ ID NO: 784640 - DNA, 15 bp, Homo sapiens
cttgatgtgatttta

SEQ ID NO: 784641 - DNA, 15 bp, Homo sapiens
ttgatgtgattttat

SEQ ID NO: 784642 - DNA, 15 bp, Homo sapiens
tgatgtgattttatg

SEQ ID NO: 784643 - DNA, 15 bp, Homo sapiens
gatgtgattttatgt

SEQ ID NO: 784644 - DNA, 15 bp, Homo sapiens
atgtgattttatgtc

SEQ ID NO: 784645 - DNA, 15 bp, Homo sapiens
tgtgattttatgtca

SEQ ID NO: 784646 - DNA, 15 bp, Homo sapiens
gtgattttatgtcat

SEQ ID NO: 784647 - DNA, 15 bp, Homo sapiens
tgattttatgtcatt

SEQ ID NO: 784648 - DNA, 15 bp, Homo sapiens
gattttatgtcatta

SEQ ID NO: 784649 - DNA, 15 bp, Homo sapiens
attttatgtcattaa

SEQ ID NO: 784650 - DNA, 15 bp, Homo sapiens
ttttatgtcattaag

SEQ ID NO: 784651 - DNA, 15 bp, Homo sapiens
tttatgtcattaagg

SEQ ID NO: 784652 - DNA, 15 bp, Homo sapiens
ttatgtcattaagga

SEQ ID NO: 784653 - DNA, 15 bp, Homo sapiens
tatgtcattaaggaa

SEQ ID NO: 784654 - DNA, 15 bp, Homo sapiens
atgtcattaaggaaa

SEQ ID NO: 784655 - DNA, 15 bp, Homo sapiens
tgtcattaaggaaac

SEQ ID NO: 784656 - DNA, 15 bp, Homo sapiens
gtcattaaggaaaca

SEQ ID NO: 784657 - DNA, 15 bp, Homo sapiens
tcattaaggaaacaa

SEQ ID NO: 784658 - DNA, 15 bp, Homo sapiens
cattaaggaaacaat

SEQ ID NO: 784659 - DNA, 15 bp, Homo sapiens
attaaggaaacaatt

SEQ ID NO: 784660 - DNA, 15 bp, Homo sapiens
ttaaggaaacaatta

SEQ ID NO: 784661 - DNA, 15 bp, Homo sapiens
taaggaaacaattac

SEQ ID NO: 784662 - DNA, 15 bp, Homo sapiens
aaggaaacaattact

SEQ ID NO: 784663 - DNA, 15 bp, Homo sapiens
aggaaacaattacta

SEQ ID NO: 784664 - DNA, 15 bp, Homo sapiens
ggaaacaattactaa

SEQ ID NO: 784665 - DNA, 15 bp, Homo sapiens
gaaacaattactaag

SEQ ID NO: 784666 - DNA, 15 bp, Homo sapiens
aaacaattactaaga

SEQ ID NO: 784667 - DNA, 15 bp, Homo sapiens
aacaattactaagag

SEQ ID NO: 784668 - DNA, 15 bp, Homo sapiens
acaattactaagagt

SEQ ID NO: 784669 - DNA, 15 bp, Homo sapiens
caattactaagagta

SEQ ID NO: 784670 - DNA, 15 bp, Homo sapiens
aattactaagagtaa

SEQ ID NO: 784671 - DNA, 15 bp, Homo sapiens
attactaagagtaac

SEQ ID NO: 784672 - DNA, 15 bp, Homo sapiens
ttactaagagtaaca

SEQ ID NO: 784673 - DNA, 15 bp, Homo sapiens
tactaagagtaacac

SEQ ID NO: 784674 - DNA, 15 bp, Homo sapiens
actaagagtaacaca

SEQ ID NO: 784675 - DNA, 15 bp, Homo sapiens
ctaagagtaacacac

SEQ ID NO: 784676 - DNA, 15 bp, Homo sapiens
taagagtaacacacc

SEQ ID NO: 784677 - DNA, 15 bp, Homo sapiens
aagagtaacacaccc

SEQ ID NO: 784678 - DNA, 15 bp, Homo sapiens
agagtaacacaccct

SEQ ID NO: 784679 - DNA, 15 bp, Homo sapiens
gagtaacacaccctt

SEQ ID NO: 784680 - DNA, 15 bp, Homo sapiens
agtaacacacccttt

SEQ ID NO: 784681 - DNA, 15 bp, Homo sapiens
gtaacacacccttta

SEQ ID NO: 784682 - DNA, 15 bp, Homo sapiens
taacacaccctttac

SEQ ID NO: 784683 - DNA, 15 bp, Homo sapiens
aacacaccctttact

SEQ ID NO: 784684 - DNA, 15 bp, Homo sapiens
acacaccctttactc

SEQ ID NO: 784685 - DNA, 15 bp, Homo sapiens
cacaccctttactcc

SEQ ID NO: 784686 - DNA, 15 bp, Homo sapiens
acaccctttactcct

SEQ ID NO: 784687 - DNA, 15 bp, Homo sapiens
caccctttactcctg

SEQ ID NO: 784688 - DNA, 15 bp, Homo sapiens
accctttactcctgt

SEQ ID NO: 784689 - DNA, 15 bp, Homo sapiens
ccctttactcctgta

SEQ ID NO: 784690 - DNA, 15 bp, Homo sapiens
cctttactcctgtag

SEQ ID NO: 784691 - DNA, 15 bp, Homo sapiens
ctttactcctgtagt

SEQ ID NO: 784692 - DNA, 15 bp, Homo sapiens
tttactcctgtagtc

SEQ ID NO: 784693 - DNA, 15 bp, Homo sapiens
ttactcctgtagtca

SEQ ID NO: 784694 - DNA, 15 bp, Homo sapiens
tactcctgtagtcat

SEQ ID NO: 784695 - DNA, 15 bp, Homo sapiens
actcctgtagtcata

SEQ ID NO: 784696 - DNA, 15 bp, Homo sapiens
ctcctgtagtcataa

SEQ ID NO: 784697 - DNA, 15 bp, Homo sapiens
tcctgtagtcataaa

SEQ ID NO: 784698 - DNA, 15 bp, Homo sapiens
cctgtagtcataaat

SEQ ID NO: 784699 - DNA, 15 bp, Homo sapiens
ctgtagtcataaatc

SEQ ID NO: 784700 - DNA, 15 bp, Homo sapiens
tgtagtcataaatct

SEQ ID NO: 784701 - DNA, 15 bp, Homo sapiens
gtagtcataaatctg

SEQ ID NO: 784702 - DNA, 15 bp, Homo sapiens
tagtcataaatctgt

SEQ ID NO: 784703 - DNA, 15 bp, Homo sapiens
agtcataaatctgta

SEQ ID NO: 784704 - DNA, 15 bp, Homo sapiens
gtcataaatctgtag

SEQ ID NO: 784705 - DNA, 15 bp, Homo sapiens
tcataaatctgtagt

SEQ ID NO: 784706 - DNA, 15 bp, Homo sapiens
cataaatctgtagtc

SEQ ID NO: 784707 - DNA, 15 bp, Homo sapiens
ataaatctgtagtct

SEQ ID NO: 784708 - DNA, 15 bp, Homo sapiens
taaatctgtagtcta

SEQ ID NO: 784709 - DNA, 15 bp, Homo sapiens
aaatctgtagtctac

SEQ ID NO: 784710 - DNA, 15 bp, Homo sapiens
aatctgtagtctact

SEQ ID NO: 784711 - DNA, 15 bp, Homo sapiens
atctgtagtctactt

SEQ ID NO: 784712 - DNA, 15 bp, Homo sapiens
tctgtagtctacttt

SEQ ID NO: 784713 - DNA, 15 bp, Homo sapiens
ctgtagtctactttt

SEQ ID NO: 784714 - DNA, 15 bp, Homo sapiens
tgtagtctactttta

SEQ ID NO: 784715 - DNA, 15 bp, Homo sapiens
gtagtctacttttaa

SEQ ID NO: 784716 - DNA, 15 bp, Homo sapiens
tagtctacttttaaa

SEQ ID NO: 784717 - DNA, 15 bp, Homo sapiens
agtctacttttaaaa

SEQ ID NO: 784718 - DNA, 15 bp, Homo sapiens
gtctacttttaaaat

SEQ ID NO: 784719 - DNA, 15 bp, Homo sapiens
tctacttttaaaatc

SEQ ID NO: 784720 - DNA, 15 bp, Homo sapiens
ctacttttaaaatct

SEQ ID NO: 784721 - DNA, 15 bp, Homo sapiens
tacttttaaaatcta

SEQ ID NO: 784722 - DNA, 15 bp, Homo sapiens
acttttaaaatctac

SEQ ID NO: 784723 - DNA, 15 bp, Homo sapiens
cttttaaaatctact

SEQ ID NO: 784724 - DNA, 15 bp, Homo sapiens
ttttaaaatctactg

SEQ ID NO: 784725 - DNA, 15 bp, Homo sapiens
tttaaaatctactga

SEQ ID NO: 784726 - DNA, 15 bp, Homo sapiens
ttaaaatctactgat

SEQ ID NO: 784727 - DNA, 15 bp, Homo sapiens
taaaatctactgata

SEQ ID NO: 784728 - DNA, 15 bp, Homo sapiens
aaaatctactgataa

SEQ ID NO: 784729 - DNA, 15 bp, Homo sapiens
aaatctactgataag

SEQ ID NO: 784730 - DNA, 15 bp, Homo sapiens
aatctactgataagc

SEQ ID NO: 784731 - DNA, 15 bp, Homo sapiens
atctactgataagct

SEQ ID NO: 784732 - DNA, 15 bp, Homo sapiens
tctactgataagctt

SEQ ID NO: 784733 - DNA, 15 bp, Homo sapiens
ctactgataagcttc

SEQ ID NO: 784734 - DNA, 15 bp, Homo sapiens
tactgataagcttcc

SEQ ID NO: 784735 - DNA, 15 bp, Homo sapiens
actgataagcttcca

SEQ ID NO: 784736 - DNA, 15 bp, Homo sapiens
ctgataagcttccaa

SEQ ID NO: 784737 - DNA, 15 bp, Homo sapiens
tgataagcttccaaa

SEQ ID NO: 784738 - DNA, 15 bp, Homo sapiens
gataagcttccaaaa

SEQ ID NO: 784739 - DNA, 15 bp, Homo sapiens
ataagcttccaaaat

SEQ ID NO: 784740 - DNA, 15 bp, Homo sapiens
taagcttccaaaatt

SEQ ID NO: 784741 - DNA, 15 bp, Homo sapiens
aagcttccaaaatta

SEQ ID NO: 784742 - DNA, 15 bp, Homo sapiens
agcttccaaaattat

SEQ ID NO: 784743 - DNA, 15 bp, Homo sapiens
gcttccaaaattatg

SEQ ID NO: 784744 - DNA, 15 bp, Homo sapiens
cttccaaaattatgg

SEQ ID NO: 784745 - DNA, 15 bp, Homo sapiens
ttccaaaattatggg

SEQ ID NO: 784746 - DNA, 15 bp, Homo sapiens
tccaaaattatgggt

SEQ ID NO: 784747 - DNA, 15 bp, Homo sapiens
ccaaaattatgggtt

SEQ ID NO: 784748 - DNA, 15 bp, Homo sapiens
caaaattatgggttc

SEQ ID NO: 784749 - DNA, 15 bp, Homo sapiens
aaaattatgggttcc

SEQ ID NO: 784750 - DNA, 15 bp, Homo sapiens
aaattatgggttcct

SEQ ID NO: 784751 - DNA, 15 bp, Homo sapiens
aattatgggttcctt

SEQ ID NO: 784752 - DNA, 15 bp, Homo sapiens
attatgggttccttt

SEQ ID NO: 784753 - DNA, 15 bp, Homo sapiens
ttatgggttccttta

SEQ ID NO: 784754 - DNA, 15 bp, Homo sapiens
tatgggttcctttaa

SEQ ID NO: 784755 - DNA, 15 bp, Homo sapiens
atgggttcctttaag

SEQ ID NO: 784756 - DNA, 15 bp, Homo sapiens
tgggttcctttaaga

SEQ ID NO: 784757 - DNA, 15 bp, Homo sapiens
gggttcctttaagaa

SEQ ID NO: 784758 - DNA, 15 bp, Homo sapiens
ggttcctttaagaaa

SEQ ID NO: 784759 - DNA, 15 bp, Homo sapiens
gttcctttaagaaag

SEQ ID NO: 784760 - DNA, 15 bp, Homo sapiens
ttcctttaagaaagt

SEQ ID NO: 784761 - DNA, 15 bp, Homo sapiens
tcctttaagaaagtt

SEQ ID NO: 784762 - DNA, 15 bp, Homo sapiens
cctttaagaaagttt

SEQ ID NO: 784763 - DNA, 15 bp, Homo sapiens
ctttaagaaagtttc

SEQ ID NO: 784764 - DNA, 15 bp, Homo sapiens
tttaagaaagtttct

SEQ ID NO: 784765 - DNA, 15 bp, Homo sapiens
ttaagaaagtttctc

SEQ ID NO: 784766 - DNA, 15 bp, Homo sapiens
taagaaagtttctct

SEQ ID NO: 784767 - DNA, 15 bp, Homo sapiens
aagaaagtttctctt

SEQ ID NO: 784768 - DNA, 15 bp, Homo sapiens
agaaagtttctcttt

SEQ ID NO: 784769 - DNA, 15 bp, Homo sapiens
gaaagtttctcttta

SEQ ID NO: 784770 - DNA, 15 bp, Homo sapiens
aaagtttctctttag

SEQ ID NO: 784771 - DNA, 15 bp, Homo sapiens
aagtttctctttagt

SEQ ID NO: 784772 - DNA, 15 bp, Homo sapiens
agtttctctttagtt

SEQ ID NO: 784773 - DNA, 15 bp, Homo sapiens
gtttctctttagttc

SEQ ID NO: 784774 - DNA, 15 bp, Homo sapiens
tttctctttagttct

SEQ ID NO: 784775 - DNA, 15 bp, Homo sapiens
ttctctttagttcta

SEQ ID NO: 784776 - DNA, 15 bp, Homo sapiens
tctctttagttctaa

SEQ ID NO: 784777 - DNA, 15 bp, Homo sapiens
ctctttagttctaat

SEQ ID NO: 784778 - DNA, 15 bp, Homo sapiens
tctttagttctaatt

SEQ ID NO: 784779 - DNA, 15 bp, Homo sapiens
ctttagttctaattt

SEQ ID NO: 784780 - DNA, 15 bp, Homo sapiens
tttagttctaatttt

SEQ ID NO: 784781 - DNA, 15 bp, Homo sapiens
ttagttctaatttta

SEQ ID NO: 784782 - DNA, 15 bp, Homo sapiens
tagttctaattttat

SEQ ID NO: 784783 - DNA, 15 bp, Homo sapiens
agttctaattttatt

SEQ ID NO: 784784 - DNA, 15 bp, Homo sapiens
gttctaattttatta

SEQ ID NO: 784785 - DNA, 15 bp, Homo sapiens
ttctaattttattat

SEQ ID NO: 784786 - DNA, 15 bp, Homo sapiens
tctaattttattatt

SEQ ID NO: 784787 - DNA, 15 bp, Homo sapiens
ctaattttattattg

SEQ ID NO: 784788 - DNA, 15 bp, Homo sapiens
taattttattattgt

SEQ ID NO: 784789 - DNA, 15 bp, Homo sapiens
aattttattattgtt

SEQ ID NO: 784790 - DNA, 15 bp, Homo sapiens
attttattattgttg

SEQ ID NO: 784791 - DNA, 15 bp, Homo sapiens
ttttattattgttgt

SEQ ID NO: 784792 - DNA, 15 bp, Homo sapiens
tttattattgttgtt

SEQ ID NO: 784793 - DNA, 15 bp, Homo sapiens
ttattattgttgttt

SEQ ID NO: 784794 - DNA, 15 bp, Homo sapiens
tattattgttgtttg

SEQ ID NO: 784795 - DNA, 15 bp, Homo sapiens
attattgttgtttgt

SEQ ID NO: 784796 - DNA, 15 bp, Homo sapiens
ttattgttgtttgtt

SEQ ID NO: 784797 - DNA, 15 bp, Homo sapiens
tattgttgtttgttt

SEQ ID NO: 784798 - DNA, 15 bp, Homo sapiens
attgttgtttgtttg

SEQ ID NO: 784799 - DNA, 15 bp, Homo sapiens
ttgttgtttgtttga

SEQ ID NO: 784800 - DNA, 15 bp, Homo sapiens
tgttgtttgtttgat

SEQ ID NO: 784801 - DNA, 15 bp, Homo sapiens
gttgtttgtttgatt

SEQ ID NO: 784802 - DNA, 15 bp, Homo sapiens
ttgtttgtttgattg

SEQ ID NO: 784803 - DNA, 15 bp, Homo sapiens
tgtttgtttgattgt

SEQ ID NO: 784804 - DNA, 15 bp, Homo sapiens
gtttgtttgattgtt

SEQ ID NO: 784805 - DNA, 15 bp, Homo sapiens
tttgtttgattgttt

SEQ ID NO: 784806 - DNA, 15 bp, Homo sapiens
ttgtttgattgtttt

SEQ ID NO: 784807 - DNA, 15 bp, Homo sapiens
tgtttgattgttttc

SEQ ID NO: 784808 - DNA, 15 bp, Homo sapiens
gtttgattgttttct

SEQ ID NO: 784809 - DNA, 15 bp, Homo sapiens
tttgattgttttctt

SEQ ID NO: 784810 - DNA, 15 bp, Homo sapiens
ttgattgttttcttt

SEQ ID NO: 784811 - DNA, 15 bp, Homo sapiens
tgattgttttctttt

SEQ ID NO: 784812 - DNA, 15 bp, Homo sapiens
gattgttttcttttc

SEQ ID NO: 784813 - DNA, 15 bp, Homo sapiens
attgttttcttttct

SEQ ID NO: 784814 - DNA, 15 bp, Homo sapiens
ttgttttcttttctg

SEQ ID NO: 784815 - DNA, 15 bp, Homo sapiens
tgttttcttttctgc

SEQ ID NO: 784816 - DNA, 15 bp, Homo sapiens
gttttcttttctgcc

SEQ ID NO: 784817 - DNA, 15 bp, Homo sapiens
ttttcttttctgcct

SEQ ID NO: 784818 - DNA, 15 bp, Homo sapiens
tttcttttctgccta

SEQ ID NO: 784819 - DNA, 15 bp, Homo sapiens
ttcttttctgcctac

SEQ ID NO: 784820 - DNA, 15 bp, Homo sapiens
tcttttctgcctaca

SEQ ID NO: 784821 - DNA, 15 bp, Homo sapiens
cttttctgcctacat

SEQ ID NO: 784822 - DNA, 15 bp, Homo sapiens
ttttctgcctacata

SEQ ID NO: 784823 - DNA, 15 bp, Homo sapiens
tttctgcctacatat

SEQ ID NO: 784824 - DNA, 15 bp, Homo sapiens
ttctgcctacatatg

SEQ ID NO: 784825 - DNA, 15 bp, Homo sapiens
tctgcctacatatgt

SEQ ID NO: 784826 - DNA, 15 bp, Homo sapiens
ctgcctacatatgtc

SEQ ID NO: 784827 - DNA, 15 bp, Homo sapiens
tgcctacatatgtct

SEQ ID NO: 784828 - DNA, 15 bp, Homo sapiens
gcctacatatgtctg

SEQ ID NO: 784829 - DNA, 15 bp, Homo sapiens
cctacatatgtctga

SEQ ID NO: 784830 - DNA, 15 bp, Homo sapiens
ctacatatgtctgat

SEQ ID NO: 784831 - DNA, 15 bp, Homo sapiens
tacatatgtctgatt

SEQ ID NO: 784832 - DNA, 15 bp, Homo sapiens
acatatgtctgattt

SEQ ID NO: 784833 - DNA, 15 bp, Homo sapiens
catatgtctgatttt

SEQ ID NO: 784834 - DNA, 15 bp, Homo sapiens
atatgtctgattttc

SEQ ID NO: 784835 - DNA, 15 bp, Homo sapiens
tatgtctgattttct

SEQ ID NO: 784836 - DNA, 15 bp, Homo sapiens
atgtctgattttctc

SEQ ID NO: 784837 - DNA, 15 bp, Homo sapiens
tgtctgattttctct

SEQ ID NO: 784838 - DNA, 15 bp, Homo sapiens
gtctgattttctctt

SEQ ID NO: 784839 - DNA, 15 bp, Homo sapiens
tctgattttctcttc

SEQ ID NO: 784840 - DNA, 15 bp, Homo sapiens
ctgattttctcttca

SEQ ID NO: 784841 - DNA, 15 bp, Homo sapiens
tgattttctcttcac

SEQ ID NO: 784842 - DNA, 15 bp, Homo sapiens
gattttctcttcaca

SEQ ID NO: 784843 - DNA, 15 bp, Homo sapiens
attttctcttcacaa

SEQ ID NO: 784844 - DNA, 15 bp, Homo sapiens
ttttctcttcacaac

SEQ ID NO: 784845 - DNA, 15 bp, Homo sapiens
tttctcttcacaact

SEQ ID NO: 784846 - DNA, 15 bp, Homo sapiens
ttctcttcacaactg

SEQ ID NO: 784847 - DNA, 15 bp, Homo sapiens
tctcttcacaactgc

SEQ ID NO: 784848 - DNA, 15 bp, Homo sapiens
ctcttcacaactgca

SEQ ID NO: 784849 - DNA, 15 bp, Homo sapiens
tcttcacaactgcat

SEQ ID NO: 784850 - DNA, 15 bp, Homo sapiens
cttcacaactgcatc

SEQ ID NO: 784851 - DNA, 15 bp, Homo sapiens
ttcacaactgcatcc

SEQ ID NO: 784852 - DNA, 15 bp, Homo sapiens
tcacaactgcatcct

SEQ ID NO: 784853 - DNA, 15 bp, Homo sapiens
cacaactgcatccta

SEQ ID NO: 784854 - DNA, 15 bp, Homo sapiens
acaactgcatcctag

SEQ ID NO: 784855 - DNA, 15 bp, Homo sapiens
caactgcatcctaga

SEQ ID NO: 784856 - DNA, 15 bp, Homo sapiens
aactgcatcctagat

SEQ ID NO: 784857 - DNA, 15 bp, Homo sapiens
actgcatcctagatg

SEQ ID NO: 784858 - DNA, 15 bp, Homo sapiens
ctgcatcctagatgc

SEQ ID NO: 784859 - DNA, 15 bp, Homo sapiens
tgcatcctagatgcc

SEQ ID NO: 784860 - DNA, 15 bp, Homo sapiens
gcatcctagatgcct

SEQ ID NO: 784861 - DNA, 15 bp, Homo sapiens
catcctagatgcctt

SEQ ID NO: 784862 - DNA, 15 bp, Homo sapiens
atcctagatgccttc

SEQ ID NO: 784863 - DNA, 15 bp, Homo sapiens
tcctagatgccttcc

SEQ ID NO: 784864 - DNA, 15 bp, Homo sapiens
cctagatgccttcct

SEQ ID NO: 784865 - DNA, 15 bp, Homo sapiens
ctagatgccttcctt

SEQ ID NO: 784866 - DNA, 15 bp, Homo sapiens
tagatgccttcctta

SEQ ID NO: 784867 - DNA, 15 bp, Homo sapiens
agatgccttccttag

SEQ ID NO: 784868 - DNA, 15 bp, Homo sapiens
gatgccttccttagt

SEQ ID NO: 784869 - DNA, 15 bp, Homo sapiens
atgccttccttagtc

SEQ ID NO: 784870 - DNA, 15 bp, Homo sapiens
tgccttccttagtct

SEQ ID NO: 784871 - DNA, 15 bp, Homo sapiens
gccttccttagtctc

SEQ ID NO: 784872 - DNA, 15 bp, Homo sapiens
ccttccttagtctct

SEQ ID NO: 784873 - DNA, 15 bp, Homo sapiens
cttccttagtctctt

SEQ ID NO: 784874 - DNA, 15 bp, Homo sapiens
ttccttagtctcttc

SEQ ID NO: 784875 - DNA, 15 bp, Homo sapiens
tccttagtctcttct

SEQ ID NO: 784876 - DNA, 15 bp, Homo sapiens
ccttagtctcttctg

SEQ ID NO: 784877 - DNA, 15 bp, Homo sapiens
cttagtctcttctgc

SEQ ID NO: 784878 - DNA, 15 bp, Homo sapiens
ttagtctcttctgct

SEQ ID NO: 784879 - DNA, 15 bp, Homo sapiens
tagtctcttctgctt

SEQ ID NO: 784880 - DNA, 15 bp, Homo sapiens
agtctcttctgcttc

SEQ ID NO: 784881 - DNA, 15 bp, Homo sapiens
gtctcttctgcttct

SEQ ID NO: 784882 - DNA, 15 bp, Homo sapiens
tctcttctgcttctc

SEQ ID NO: 784883 - DNA, 15 bp, Homo sapiens
ctcttctgcttctct

SEQ ID NO: 784884 - DNA, 15 bp, Homo sapiens
tcttctgcttctctt

SEQ ID NO: 784885 - DNA, 15 bp, Homo sapiens
cttctgcttctcttc

SEQ ID NO: 784886 - DNA, 15 bp, Homo sapiens
ttctgcttctcttct

SEQ ID NO: 784887 - DNA, 15 bp, Homo sapiens
tctgcttctcttctg

SEQ ID NO: 784888 - DNA, 15 bp, Homo sapiens
ctgcttctcttctgt

SEQ ID NO: 784889 - DNA, 15 bp, Homo sapiens
tgcttctcttctgtt

SEQ ID NO: 784890 - DNA, 15 bp, Homo sapiens
gcttctcttctgtta

SEQ ID NO: 784891 - DNA, 15 bp, Homo sapiens
cttctcttctgttac

SEQ ID NO: 784892 - DNA, 15 bp, Homo sapiens
ttctcttctgttact

SEQ ID NO: 784893 - DNA, 15 bp, Homo sapiens
tctcttctgttactc

SEQ ID NO: 784894 - DNA, 15 bp, Homo sapiens
ctcttctgttactct

SEQ ID NO: 784895 - DNA, 15 bp, Homo sapiens
tcttctgttactctt

SEQ ID NO: 784896 - DNA, 15 bp, Homo sapiens
cttctgttactcttg

SEQ ID NO: 784897 - DNA, 15 bp, Homo sapiens
ttctgttactcttgt

SEQ ID NO: 784898 - DNA, 15 bp, Homo sapiens
tctgttactcttgtt

SEQ ID NO: 784899 - DNA, 15 bp, Homo sapiens
ctgttactcttgttt

SEQ ID NO: 784900 - DNA, 15 bp, Homo sapiens
tgttactcttgtttt

SEQ ID NO: 784901 - DNA, 15 bp, Homo sapiens
gttactcttgttttc

SEQ ID NO: 784902 - DNA, 15 bp, Homo sapiens
ttactcttgttttct

SEQ ID NO: 784903 - DNA, 15 bp, Homo sapiens
tactcttgttttctg

SEQ ID NO: 784904 - DNA, 15 bp, Homo sapiens
actcttgttttctgc

SEQ ID NO: 784905 - DNA, 15 bp, Homo sapiens
ctcttgttttctgct

SEQ ID NO: 784906 - DNA, 15 bp, Homo sapiens
tcttgttttctgctt

SEQ ID NO: 784907 - DNA, 15 bp, Homo sapiens
cttgttttctgcttc

SEQ ID NO: 784908 - DNA, 15 bp, Homo sapiens
ttgttttctgcttct

SEQ ID NO: 784909 - DNA, 15 bp, Homo sapiens
tgttttctgcttcta

SEQ ID NO: 784910 - DNA, 15 bp, Homo sapiens
gttttctgcttctat

SEQ ID NO: 784911 - DNA, 15 bp, Homo sapiens
ttttctgcttctata

SEQ ID NO: 784912 - DNA, 15 bp, Homo sapiens
tttctgcttctatat

SEQ ID NO: 784913 - DNA, 15 bp, Homo sapiens
ttctgcttctatata

SEQ ID NO: 784914 - DNA, 15 bp, Homo sapiens
tctgcttctatatat

SEQ ID NO: 784915 - DNA, 15 bp, Homo sapiens
ctgcttctatatatt

SEQ ID NO: 784916 - DNA, 15 bp, Homo sapiens
tgcttctatatattt

SEQ ID NO: 784917 - DNA, 15 bp, Homo sapiens
gcttctatatattta

SEQ ID NO: 784918 - DNA, 15 bp, Homo sapiens
cttctatatatttat

SEQ ID NO: 784919 - DNA, 15 bp, Homo sapiens
ttctatatatttatc

SEQ ID NO: 784920 - DNA, 15 bp, Homo sapiens
tctatatatttatct

SEQ ID NO: 784921 - DNA, 15 bp, Homo sapiens
ctatatatttatctg

SEQ ID NO: 784922 - DNA, 15 bp, Homo sapiens
tatatatttatctgc

SEQ ID NO: 784923 - DNA, 15 bp, Homo sapiens
atatatttatctgct

SEQ ID NO: 784924 - DNA, 15 bp, Homo sapiens
tatatttatctgctg

SEQ ID NO: 784925 - DNA, 15 bp, Homo sapiens
atatttatctgctgt

SEQ ID NO: 784926 - DNA, 15 bp, Homo sapiens
tatttatctgctgtt

SEQ ID NO: 784927 - DNA, 15 bp, Homo sapiens
atttatctgctgttt

SEQ ID NO: 784928 - DNA, 15 bp, Homo sapiens
tttatctgctgtttt

SEQ ID NO: 784929 - DNA, 15 bp, Homo sapiens
ttatctgctgttttc

SEQ ID NO: 784930 - DNA, 15 bp, Homo sapiens
tatctgctgttttcc

SEQ ID NO: 784931 - DNA, 15 bp, Homo sapiens
atctgctgttttcct

SEQ ID NO: 784932 - DNA, 15 bp, Homo sapiens
tctgctgttttcctt

SEQ ID NO: 784933 - DNA, 15 bp, Homo sapiens
ctgctgttttccttt

SEQ ID NO: 784934 - DNA, 15 bp, Homo sapiens
tgctgttttcctttc

SEQ ID NO: 784935 - DNA, 15 bp, Homo sapiens
gctgttttcctttct

SEQ ID NO: 784936 - DNA, 15 bp, Homo sapiens
ctgttttcctttctg

SEQ ID NO: 784937 - DNA, 15 bp, Homo sapiens
tgttttcctttctgt

SEQ ID NO: 784938 - DNA, 15 bp, Homo sapiens
gttttcctttctgta

SEQ ID NO: 784939 - DNA, 15 bp, Homo sapiens
ttttcctttctgtac

SEQ ID NO: 784940 - DNA, 15 bp, Homo sapiens
tttcctttctgtact

SEQ ID NO: 784941 - DNA, 15 bp, Homo sapiens
ttcctttctgtactt

SEQ ID NO: 784942 - DNA, 15 bp, Homo sapiens
tcctttctgtacttt

SEQ ID NO: 784943 - DNA, 15 bp, Homo sapiens
cctttctgtactttt

SEQ ID NO: 784944 - DNA, 15 bp, Homo sapiens
ctttctgtacttttc

SEQ ID NO: 784945 - DNA, 15 bp, Homo sapiens
tttctgtacttttcc

SEQ ID NO: 784946 - DNA, 15 bp, Homo sapiens
ttctgtacttttccc

SEQ ID NO: 784947 - DNA, 15 bp, Homo sapiens
tctgtacttttccct

SEQ ID NO: 784948 - DNA, 15 bp, Homo sapiens
ctgtacttttccctc

SEQ ID NO: 784949 - DNA, 15 bp, Homo sapiens
tgtacttttccctct

SEQ ID NO: 784950 - DNA, 15 bp, Homo sapiens
gtacttttccctctt

SEQ ID NO: 784951 - DNA, 15 bp, Homo sapiens
tacttttccctcttc

SEQ ID NO: 784952 - DNA, 15 bp, Homo sapiens
acttttccctcttct

SEQ ID NO: 784953 - DNA, 15 bp, Homo sapiens
cttttccctcttctg

SEQ ID NO: 784954 - DNA, 15 bp, Homo sapiens
ttttccctcttctgt

SEQ ID NO: 784955 - DNA, 15 bp, Homo sapiens
tttccctcttctgtc

SEQ ID NO: 784956 - DNA, 15 bp, Homo sapiens
ttccctcttctgtct

SEQ ID NO: 784957 - DNA, 15 bp, Homo sapiens
tccctcttctgtctg

SEQ ID NO: 784958 - DNA, 15 bp, Homo sapiens
ccctcttctgtctgt

SEQ ID NO: 784959 - DNA, 15 bp, Homo sapiens
cctcttctgtctgta

SEQ ID NO: 784960 - DNA, 15 bp, Homo sapiens
ctcttctgtctgtac

SEQ ID NO: 784961 - DNA, 15 bp, Homo sapiens
tcttctgtctgtacc

SEQ ID NO: 784962 - DNA, 15 bp, Homo sapiens
cttctgtctgtaccc

SEQ ID NO: 784963 - DNA, 15 bp, Homo sapiens
ttctgtctgtaccca

SEQ ID NO: 784964 - DNA, 15 bp, Homo sapiens
tctgtctgtacccat

SEQ ID NO: 784965 - DNA, 15 bp, Homo sapiens
ctgtctgtacccatt

SEQ ID NO: 784966 - DNA, 15 bp, Homo sapiens
tgtctgtacccatta

SEQ ID NO: 784967 - DNA, 15 bp, Homo sapiens
gtctgtacccattag

SEQ ID NO: 784968 - DNA, 15 bp, Homo sapiens
tctgtacccattagt

SEQ ID NO: 784969 - DNA, 15 bp, Homo sapiens
ctgtacccattagta

SEQ ID NO: 784970 - DNA, 15 bp, Homo sapiens
tgtacccattagtat

SEQ ID NO: 784971 - DNA, 15 bp, Homo sapiens
gtacccattagtatc

SEQ ID NO: 784972 - DNA, 15 bp, Homo sapiens
tacccattagtatcc

SEQ ID NO: 784973 - DNA, 15 bp, Homo sapiens
acccattagtatccc

SEQ ID NO: 784974 - DNA, 15 bp, Homo sapiens
cccattagtatccct

SEQ ID NO: 784975 - DNA, 15 bp, Homo sapiens
ccattagtatccctt

SEQ ID NO: 784976 - DNA, 15 bp, Homo sapiens
cattagtatccctta

SEQ ID NO: 784977 - DNA, 15 bp, Homo sapiens
attagtatcccttaa

SEQ ID NO: 784978 - DNA, 15 bp, Homo sapiens
ttagtatcccttaaa

SEQ ID NO: 784979 - DNA, 15 bp, Homo sapiens
tagtatcccttaaat

SEQ ID NO: 784980 - DNA, 15 bp, Homo sapiens
agtatcccttaaatg

SEQ ID NO: 784981 - DNA, 15 bp, Homo sapiens
gtatcccttaaatgc

SEQ ID NO: 784982 - DNA, 15 bp, Homo sapiens
tatcccttaaatgcc

SEQ ID NO: 784983 - DNA, 15 bp, Homo sapiens
atcccttaaatgcct

SEQ ID NO: 784984 - DNA, 15 bp, Homo sapiens
tcccttaaatgcctg

SEQ ID NO: 784985 - DNA, 15 bp, Homo sapiens
cccttaaatgcctgt

SEQ ID NO: 784986 - DNA, 15 bp, Homo sapiens
ccttaaatgcctgtg

SEQ ID NO: 784987 - DNA, 15 bp, Homo sapiens
cttaaatgcctgtga

SEQ ID NO: 784988 - DNA, 15 bp, Homo sapiens
ttaaatgcctgtgaa

SEQ ID NO: 784989 - DNA, 15 bp, Homo sapiens
taaatgcctgtgaaa

SEQ ID NO: 784990 - DNA, 15 bp, Homo sapiens
aaatgcctgtgaaaa

SEQ ID NO: 784991 - DNA, 15 bp, Homo sapiens
aatgcctgtgaaaag

SEQ ID NO: 784992 - DNA, 15 bp, Homo sapiens
atgcctgtgaaaagg

SEQ ID NO: 784993 - DNA, 15 bp, Homo sapiens
tgcctgtgaaaagga

SEQ ID NO: 784994 - DNA, 15 bp, Homo sapiens
gcctgtgaaaaggaa

SEQ ID NO: 784995 - DNA, 15 bp, Homo sapiens
cctgtgaaaaggaat

SEQ ID NO: 784996 - DNA, 15 bp, Homo sapiens
ctgtgaaaaggaatt

SEQ ID NO: 784997 - DNA, 15 bp, Homo sapiens
tgtgaaaaggaattc

SEQ ID NO: 784998 - DNA, 15 bp, Homo sapiens
gtgaaaaggaattca

SEQ ID NO: 784999 - DNA, 15 bp, Homo sapiens
tgaaaaggaattcaa

SEQ ID NO: 785000 - DNA, 15 bp, Homo sapiens
gaaaaggaattcaag

SEQ ID NO: 785001 - DNA, 15 bp, Homo sapiens
aaaaggaattcaagt

SEQ ID NO: 785002 - DNA, 15 bp, Homo sapiens
aaaggaattcaagtg

SEQ ID NO: 785003 - DNA, 15 bp, Homo sapiens
aaggaattcaagtga

SEQ ID NO: 785004 - DNA, 15 bp, Homo sapiens
aggaattcaagtgag

SEQ ID NO: 785005 - DNA, 15 bp, Homo sapiens
ggaattcaagtgagt

SEQ ID NO: 785006 - DNA, 15 bp, Homo sapiens
gaattcaagtgagtt

SEQ ID NO: 785007 - DNA, 15 bp, Homo sapiens
aattcaagtgagttc

SEQ ID NO: 785008 - DNA, 15 bp, Homo sapiens
attcaagtgagttct

SEQ ID NO: 785009 - DNA, 15 bp, Homo sapiens
ttcaagtgagttctt

SEQ ID NO: 785010 - DNA, 15 bp, Homo sapiens
tcaagtgagttctta

SEQ ID NO: 785011 - DNA, 15 bp, Homo sapiens
caagtgagttcttat

SEQ ID NO: 785012 - DNA, 15 bp, Homo sapiens
aagtgagttcttatt

SEQ ID NO: 785013 - DNA, 15 bp, Homo sapiens
agtgagttcttattg

SEQ ID NO: 785014 - DNA, 15 bp, Homo sapiens
gtgagttcttattgc

SEQ ID NO: 785015 - DNA, 15 bp, Homo sapiens
tgagttcttattgct

SEQ ID NO: 785016 - DNA, 15 bp, Homo sapiens
gagttcttattgctt

SEQ ID NO: 785017 - DNA, 15 bp, Homo sapiens
agttcttattgctta

SEQ ID NO: 785018 - DNA, 15 bp, Homo sapiens
gttcttattgcttat

SEQ ID NO: 785019 - DNA, 15 bp, Homo sapiens
ttcttattgcttatt

SEQ ID NO: 785020 - DNA, 15 bp, Homo sapiens
tcttattgcttattg

SEQ ID NO: 785021 - DNA, 15 bp, Homo sapiens
cttattgcttattgg

SEQ ID NO: 785022 - DNA, 15 bp, Homo sapiens
ttattgcttattggg

SEQ ID NO: 785023 - DNA, 15 bp, Homo sapiens
tattgcttattgggt

SEQ ID NO: 785024 - DNA, 15 bp, Homo sapiens
attgcttattgggta

SEQ ID NO: 785025 - DNA, 15 bp, Homo sapiens
ttgcttattgggtag

SEQ ID NO: 785026 - DNA, 15 bp, Homo sapiens
tgcttattgggtaga

SEQ ID NO: 785027 - DNA, 15 bp, Homo sapiens
gcttattgggtagaa

SEQ ID NO: 785028 - DNA, 15 bp, Homo sapiens
cttattgggtagaag

SEQ ID NO: 785029 - DNA, 15 bp, Homo sapiens
ttattgggtagaaga

SEQ ID NO: 785030 - DNA, 15 bp, Homo sapiens
tattgggtagaagag

SEQ ID NO: 785031 - DNA, 15 bp, Homo sapiens
attgggtagaagagg

SEQ ID NO: 785032 - DNA, 15 bp, Homo sapiens
ttgggtagaagaggg

SEQ ID NO: 785033 - DNA, 15 bp, Homo sapiens
tgggtagaagagggt

SEQ ID NO: 785034 - DNA, 15 bp, Homo sapiens
gggtagaagagggtt

SEQ ID NO: 785035 - DNA, 15 bp, Homo sapiens
ggtagaagagggttt

SEQ ID NO: 785036 - DNA, 15 bp, Homo sapiens
gtagaagagggtttt

SEQ ID NO: 785037 - DNA, 15 bp, Homo sapiens
tagaagagggtttta

SEQ ID NO: 785038 - DNA, 15 bp, Homo sapiens
agaagagggttttat

SEQ ID NO: 785039 - DNA, 15 bp, Homo sapiens
gaagagggttttatg

SEQ ID NO: 785040 - DNA, 15 bp, Homo sapiens
aagagggttttatgc

SEQ ID NO: 785041 - DNA, 15 bp, Homo sapiens
agagggttttatgct

SEQ ID NO: 785042 - DNA, 15 bp, Homo sapiens
gagggttttatgctt

SEQ ID NO: 785043 - DNA, 15 bp, Homo sapiens
agggttttatgcttt

SEQ ID NO: 785044 - DNA, 15 bp, Homo sapiens
gggttttatgcttta

SEQ ID NO: 785045 - DNA, 15 bp, Homo sapiens
ggttttatgctttaa

SEQ ID NO: 785046 - DNA, 15 bp, Homo sapiens
gttttatgctttaat

SEQ ID NO: 785047 - DNA, 15 bp, Homo sapiens
ttttatgctttaatt

SEQ ID NO: 785048 - DNA, 15 bp, Homo sapiens
tttatgctttaattt

SEQ ID NO: 785049 - DNA, 15 bp, Homo sapiens
ttatgctttaattta

SEQ ID NO: 785050 - DNA, 15 bp, Homo sapiens
tatgctttaatttaa

SEQ ID NO: 785051 - DNA, 15 bp, Homo sapiens
atgctttaatttaaa

SEQ ID NO: 785052 - DNA, 15 bp, Homo sapiens
tgctttaatttaaaa

SEQ ID NO: 785053 - DNA, 15 bp, Homo sapiens
gctttaatttaaaaa

SEQ ID NO: 785054 - DNA, 15 bp, Homo sapiens
ctttaatttaaaaat

SEQ ID NO: 785055 - DNA, 15 bp, Homo sapiens
tttaatttaaaaatg

SEQ ID NO: 785056 - DNA, 15 bp, Homo sapiens
ttaatttaaaaatgg

SEQ ID NO: 785057 - DNA, 15 bp, Homo sapiens
taatttaaaaatggt

SEQ ID NO: 785058 - DNA, 15 bp, Homo sapiens
aatttaaaaatggtt

SEQ ID NO: 785059 - DNA, 15 bp, Homo sapiens
atttaaaaatggttg

SEQ ID NO: 785060 - DNA, 15 bp, Homo sapiens
tttaaaaatggttga

SEQ ID NO: 785061 - DNA, 15 bp, Homo sapiens
taaaaatggttgagg

SEQ ID NO: 785062 - DNA, 15 bp, Homo sapiens
aaaaatggttgagga

SEQ ID NO: 785063 - DNA, 15 bp, Homo sapiens
aaaatggttgaggat

SEQ ID NO: 785064 - DNA, 15 bp, Homo sapiens
aaatggttgaggatt

SEQ ID NO: 785065 - DNA, 15 bp, Homo sapiens
aatggttgaggattt

SEQ ID NO: 785066 - DNA, 15 bp, Homo sapiens
atggttgaggattta

SEQ ID NO: 785067 - DNA, 15 bp, Homo sapiens
tggttgaggatttaa

SEQ ID NO: 785068 - DNA, 15 bp, Homo sapiens
ggttgaggatttaat

SEQ ID NO: 785069 - DNA, 15 bp, Homo sapiens
gttgaggatttaata

SEQ ID NO: 785070 - DNA, 15 bp, Homo sapiens
ttgaggatttaatag

SEQ ID NO: 785071 - DNA, 15 bp, Homo sapiens
tgaggatttaatagt

SEQ ID NO: 785072 - DNA, 15 bp, Homo sapiens
gaggatttaatagta

SEQ ID NO: 785073 - DNA, 15 bp, Homo sapiens
aggatttaatagtat

SEQ ID NO: 785074 - DNA, 15 bp, Homo sapiens
ggatttaatagtatt

SEQ ID NO: 785075 - DNA, 15 bp, Homo sapiens
gatttaatagtattt

SEQ ID NO: 785076 - DNA, 15 bp, Homo sapiens
atttaatagtatttc

SEQ ID NO: 785077 - DNA, 15 bp, Homo sapiens
tttaatagtatttct

SEQ ID NO: 785078 - DNA, 15 bp, Homo sapiens
ttaatagtatttctg

SEQ ID NO: 785079 - DNA, 15 bp, Homo sapiens
taatagtatttctgt

SEQ ID NO: 785080 - DNA, 15 bp, Homo sapiens
aatagtatttctgtc

SEQ ID NO: 785081 - DNA, 15 bp, Homo sapiens
atagtatttctgtct

SEQ ID NO: 785082 - DNA, 15 bp, Homo sapiens
tagtatttctgtctt

SEQ ID NO: 785083 - DNA, 15 bp, Homo sapiens
agtatttctgtcttt

SEQ ID NO: 785084 - DNA, 15 bp, Homo sapiens
gtatttctgtcttta

SEQ ID NO: 785085 - DNA, 15 bp, Homo sapiens
tatttctgtctttaa

SEQ ID NO: 785086 - DNA, 15 bp, Homo sapiens
atttctgtctttaaa

SEQ ID NO: 785087 - DNA, 15 bp, Homo sapiens
tttctgtctttaaaa

SEQ ID NO: 785088 - DNA, 15 bp, Homo sapiens
ttctgtctttaaaag

SEQ ID NO: 785089 - DNA, 15 bp, Homo sapiens
tctgtctttaaaaga

SEQ ID NO: 785090 - DNA, 15 bp, Homo sapiens
ctgtctttaaaagat

SEQ ID NO: 785091 - DNA, 15 bp, Homo sapiens
tgtctttaaaagata

SEQ ID NO: 785092 - DNA, 15 bp, Homo sapiens
gtctttaaaagataa

SEQ ID NO: 785093 - DNA, 15 bp, Homo sapiens
tctttaaaagataat

SEQ ID NO: 785094 - DNA, 15 bp, Homo sapiens
ctttaaaagataata

SEQ ID NO: 785095 - DNA, 15 bp, Homo sapiens
tttaaaagataataa

SEQ ID NO: 785096 - DNA, 15 bp, Homo sapiens
ttaaaagataataac

SEQ ID NO: 785097 - DNA, 15 bp, Homo sapiens
taaaagataataaca

SEQ ID NO: 785098 - DNA, 15 bp, Homo sapiens
aaaagataataacat

SEQ ID NO: 785099 - DNA, 15 bp, Homo sapiens
aaagataataacatt

SEQ ID NO: 785100 - DNA, 15 bp, Homo sapiens
aagataataacatta

SEQ ID NO: 785101 - DNA, 15 bp, Homo sapiens
agataataacattac

SEQ ID NO: 785102 - DNA, 15 bp, Homo sapiens
gataataacattaca

SEQ ID NO: 785103 - DNA, 15 bp, Homo sapiens
ataataacattacat

SEQ ID NO: 785104 - DNA, 15 bp, Homo sapiens
taataacattacatt

SEQ ID NO: 785105 - DNA, 15 bp, Homo sapiens
aataacattacattg

SEQ ID NO: 785106 - DNA, 15 bp, Homo sapiens
ataacattacattgc

SEQ ID NO: 785107 - DNA, 15 bp, Homo sapiens
taacattacattgct

SEQ ID NO: 785108 - DNA, 15 bp, Homo sapiens
aacattacattgctt

SEQ ID NO: 785109 - DNA, 15 bp, Homo sapiens
acattacattgcttt

SEQ ID NO: 785110 - DNA, 15 bp, Homo sapiens
cattacattgctttt

SEQ ID NO: 785111 - DNA, 15 bp, Homo sapiens
attacattgcttttt

SEQ ID NO: 785112 - DNA, 15 bp, Homo sapiens
ttacattgctttttt

SEQ ID NO: 785113 - DNA, 15 bp, Homo sapiens
tacattgctttttta

SEQ ID NO: 785114 - DNA, 15 bp, Homo sapiens
acattgcttttttac

SEQ ID NO: 785115 - DNA, 15 bp, Homo sapiens
cattgcttttttact

SEQ ID NO: 785116 - DNA, 15 bp, Homo sapiens
attgcttttttactt

SEQ ID NO: 785117 - DNA, 15 bp, Homo sapiens
ttgcttttttacttt

SEQ ID NO: 785118 - DNA, 15 bp, Homo sapiens
tgcttttttacttta

SEQ ID NO: 785119 - DNA, 15 bp, Homo sapiens
gcttttttactttat

SEQ ID NO: 785120 - DNA, 15 bp, Homo sapiens
cttttttactttatt

SEQ ID NO: 785121 - DNA, 15 bp, Homo sapiens
ttttttactttattt

SEQ ID NO: 785122 - DNA, 15 bp, Homo sapiens
tttttactttatttg

SEQ ID NO: 785123 - DNA, 15 bp, Homo sapiens
ttttactttatttgt

SEQ ID NO: 785124 - DNA, 15 bp, Homo sapiens
tttactttatttgta

SEQ ID NO: 785125 - DNA, 15 bp, Homo sapiens
ttactttatttgtat

SEQ ID NO: 785126 - DNA, 15 bp, Homo sapiens
tactttatttgtatt

SEQ ID NO: 785127 - DNA, 15 bp, Homo sapiens
actttatttgtatta

SEQ ID NO: 785128 - DNA, 15 bp, Homo sapiens
ctttatttgtattag

SEQ ID NO: 785129 - DNA, 15 bp, Homo sapiens
tttatttgtattaga

SEQ ID NO: 785130 - DNA, 15 bp, Homo sapiens
ttatttgtattagaa

SEQ ID NO: 785131 - DNA, 15 bp, Homo sapiens
tatttgtattagaaa

SEQ ID NO: 785132 - DNA, 15 bp, Homo sapiens
atttgtattagaaaa

SEQ ID NO: 785133 - DNA, 15 bp, Homo sapiens
tttgtattagaaaaa

SEQ ID NO: 785134 - DNA, 15 bp, Homo sapiens
ttgtattagaaaaat

SEQ ID NO: 785135 - DNA, 15 bp, Homo sapiens
tgtattagaaaaata

SEQ ID NO: 785136 - DNA, 15 bp, Homo sapiens
gtattagaaaaatat

SEQ ID NO: 785137 - DNA, 15 bp, Homo sapiens
tattagaaaaatatt

SEQ ID NO: 785138 - DNA, 15 bp, Homo sapiens
attagaaaaatattc

SEQ ID NO: 785139 - DNA, 15 bp, Homo sapiens
ttagaaaaatattct

SEQ ID NO: 785140 - DNA, 15 bp, Homo sapiens
tagaaaaatattctg

SEQ ID NO: 785141 - DNA, 15 bp, Homo sapiens
agaaaaatattctga

SEQ ID NO: 785142 - DNA, 15 bp, Homo sapiens
gaaaaatattctgac

SEQ ID NO: 785143 - DNA, 15 bp, Homo sapiens
aaaaatattctgact

SEQ ID NO: 785144 - DNA, 15 bp, Homo sapiens
aaaatattctgactc

SEQ ID NO: 785145 - DNA, 15 bp, Homo sapiens
aaatattctgactct

SEQ ID NO: 785146 - DNA, 15 bp, Homo sapiens
aatattctgactctc

SEQ ID NO: 785147 - DNA, 15 bp, Homo sapiens
atattctgactctcc

SEQ ID NO: 785148 - DNA, 15 bp, Homo sapiens
tattctgactctcca

SEQ ID NO: 785149 - DNA, 15 bp, Homo sapiens
attctgactctccat

SEQ ID NO: 785150 - DNA, 15 bp, Homo sapiens
ttctgactctccatt

SEQ ID NO: 785151 - DNA, 15 bp, Homo sapiens
tctgactctccatta

SEQ ID NO: 785152 - DNA, 15 bp, Homo sapiens
ctgactctccattag

SEQ ID NO: 785153 - DNA, 15 bp, Homo sapiens
tgactctccattagg

SEQ ID NO: 785154 - DNA, 15 bp, Homo sapiens
gactctccattaggc

SEQ ID NO: 785155 - DNA, 15 bp, Homo sapiens
actctccattaggca

SEQ ID NO: 785156 - DNA, 15 bp, Homo sapiens
ctctccattaggcag

SEQ ID NO: 785157 - DNA, 15 bp, Homo sapiens
tctccattaggcagt

SEQ ID NO: 785158 - DNA, 15 bp, Homo sapiens
ctccattaggcagtt

SEQ ID NO: 785159 - DNA, 15 bp, Homo sapiens
tccattaggcagttg

SEQ ID NO: 785160 - DNA, 15 bp, Homo sapiens
ccattaggcagttgt

SEQ ID NO: 785161 - DNA, 15 bp, Homo sapiens
cattaggcagttgtc

SEQ ID NO: 785162 - DNA, 15 bp, Homo sapiens
attaggcagttgtcc

SEQ ID NO: 785163 - DNA, 15 bp, Homo sapiens
ttaggcagttgtcct

SEQ ID NO: 785164 - DNA, 15 bp, Homo sapiens
taggcagttgtcctt

SEQ ID NO: 785165 - DNA, 15 bp, Homo sapiens
aggcagttgtccttg

SEQ ID NO: 785166 - DNA, 15 bp, Homo sapiens
ggcagttgtccttga

SEQ ID NO: 785167 - DNA, 15 bp, Homo sapiens
gcagttgtccttgat

SEQ ID NO: 785168 - DNA, 15 bp, Homo sapiens
cagttgtccttgata

SEQ ID NO: 785169 - DNA, 15 bp, Homo sapiens
agttgtccttgatag

SEQ ID NO: 785170 - DNA, 15 bp, Homo sapiens
gttgtccttgataga

SEQ ID NO: 785171 - DNA, 15 bp, Homo sapiens
ttgtccttgatagag

SEQ ID NO: 785172 - DNA, 15 bp, Homo sapiens
tgtccttgatagagt

SEQ ID NO: 785173 - DNA, 15 bp, Homo sapiens
gtccttgatagagtg

SEQ ID NO: 785174 - DNA, 15 bp, Homo sapiens
tccttgatagagtgg

SEQ ID NO: 785175 - DNA, 15 bp, Homo sapiens
ccttgatagagtggg

SEQ ID NO: 785176 - DNA, 15 bp, Homo sapiens
cttgatagagtggga

SEQ ID NO: 785177 - DNA, 15 bp, Homo sapiens
ttgatagagtgggaa

SEQ ID NO: 785178 - DNA, 15 bp, Homo sapiens
tgatagagtgggaaa

SEQ ID NO: 785179 - DNA, 15 bp, Homo sapiens
gatagagtgggaaaa

SEQ ID NO: 785180 - DNA, 15 bp, Homo sapiens
atagagtgggaaaaa

SEQ ID NO: 785181 - DNA, 15 bp, Homo sapiens
tagagtgggaaaaag

SEQ ID NO: 785182 - DNA, 15 bp, Homo sapiens
agagtgggaaaaagg

SEQ ID NO: 785183 - DNA, 15 bp, Homo sapiens
gagtgggaaaaaggc

SEQ ID NO: 785184 - DNA, 15 bp, Homo sapiens
agtgggaaaaaggct

SEQ ID NO: 785185 - DNA, 15 bp, Homo sapiens
gtgggaaaaaggctc

SEQ ID NO: 785186 - DNA, 15 bp, Homo sapiens
tgggaaaaaggctca

SEQ ID NO: 785187 - DNA, 15 bp, Homo sapiens
gggaaaaaggctcag

SEQ ID NO: 785188 - DNA, 15 bp, Homo sapiens
ggaaaaaggctcaga

SEQ ID NO: 785189 - DNA, 15 bp, Homo sapiens
gaaaaaggctcagaa

SEQ ID NO: 785190 - DNA, 15 bp, Homo sapiens
aaaaaggctcagaat

SEQ ID NO: 785191 - DNA, 15 bp, Homo sapiens
aaaaggctcagaatt

SEQ ID NO: 785192 - DNA, 15 bp, Homo sapiens
aaaggctcagaattc

SEQ ID NO: 785193 - DNA, 15 bp, Homo sapiens
aaggctcagaattcc

SEQ ID NO: 785194 - DNA, 15 bp, Homo sapiens
aggctcagaattccg

SEQ ID NO: 785195 - DNA, 15 bp, Homo sapiens
ggctcagaattccgt

SEQ ID NO: 785196 - DNA, 15 bp, Homo sapiens
gctcagaattccgtc

SEQ ID NO: 785197 - DNA, 15 bp, Homo sapiens
ctcagaattccgtca

SEQ ID NO: 785198 - DNA, 15 bp, Homo sapiens
tcagaattccgtcaa

SEQ ID NO: 785199 - DNA, 15 bp, Homo sapiens
cagaattccgtcaag

SEQ ID NO: 785200 - DNA, 15 bp, Homo sapiens
agaattccgtcaagc

SEQ ID NO: 785201 - DNA, 15 bp, Homo sapiens
gaattccgtcaagca

SEQ ID NO: 785202 - DNA, 15 bp, Homo sapiens
aattccgtcaagcag

SEQ ID NO: 785203 - DNA, 15 bp, Homo sapiens
attccgtcaagcagg

SEQ ID NO: 785204 - DNA, 15 bp, Homo sapiens
ttccgtcaagcaggt

SEQ ID NO: 785205 - DNA, 15 bp, Homo sapiens
tccgtcaagcaggtg

SEQ ID NO: 785206 - DNA, 15 bp, Homo sapiens
ccgtcaagcaggtgt

SEQ ID NO: 785207 - DNA, 15 bp, Homo sapiens
cgtcaagcaggtgta

SEQ ID NO: 785208 - DNA, 15 bp, Homo sapiens
gtcaagcaggtgtat

SEQ ID NO: 785209 - DNA, 15 bp, Homo sapiens
tcaagcaggtgtatc

SEQ ID NO: 785210 - DNA, 15 bp, Homo sapiens
caagcaggtgtatca

SEQ ID NO: 785211 - DNA, 15 bp, Homo sapiens
aagcaggtgtatcaa

SEQ ID NO: 785212 - DNA, 15 bp, Homo sapiens
agcaggtgtatcaag

SEQ ID NO: 785213 - DNA, 15 bp, Homo sapiens
gcaggtgtatcaaga

SEQ ID NO: 785214 - DNA, 15 bp, Homo sapiens
caggtgtatcaagaa

SEQ ID NO: 785215 - DNA, 15 bp, Homo sapiens
aggtgtatcaagaag

SEQ ID NO: 785216 - DNA, 15 bp, Homo sapiens
ggtgtatcaagaagt

SEQ ID NO: 785217 - DNA, 15 bp, Homo sapiens
gtgtatcaagaagtt

SEQ ID NO: 785218 - DNA, 15 bp, Homo sapiens
tgtatcaagaagttg

SEQ ID NO: 785219 - DNA, 15 bp, Homo sapiens
gtatcaagaagttgc

SEQ ID NO: 785220 - DNA, 15 bp, Homo sapiens
tatcaagaagttgct

SEQ ID NO: 785221 - DNA, 15 bp, Homo sapiens
atcaagaagttgcta

SEQ ID NO: 785222 - DNA, 15 bp, Homo sapiens
tcaagaagttgctat

SEQ ID NO: 785223 - DNA, 15 bp, Homo sapiens
caagaagttgctatt

SEQ ID NO: 785224 - DNA, 15 bp, Homo sapiens
aagaagttgctattt

SEQ ID NO: 785225 - DNA, 15 bp, Homo sapiens
agaagttgctatttg

SEQ ID NO: 785226 - DNA, 15 bp, Homo sapiens
gaagttgctatttgg

SEQ ID NO: 785227 - DNA, 15 bp, Homo sapiens
aagttgctatttggt

SEQ ID NO: 785228 - DNA, 15 bp, Homo sapiens
agttgctatttggtc

SEQ ID NO: 785229 - DNA, 15 bp, Homo sapiens
gttgctatttggtct

SEQ ID NO: 785230 - DNA, 15 bp, Homo sapiens
ttgctatttggtctg

SEQ ID NO: 785231 - DNA, 15 bp, Homo sapiens
tgctatttggtctgt

SEQ ID NO: 785232 - DNA, 15 bp, Homo sapiens
gctatttggtctgtt

SEQ ID NO: 785233 - DNA, 15 bp, Homo sapiens
ctatttggtctgttg

SEQ ID NO: 785234 - DNA, 15 bp, Homo sapiens
tatttggtctgttgt

SEQ ID NO: 785235 - DNA, 15 bp, Homo sapiens
atttggtctgttgtc

SEQ ID NO: 785236 - DNA, 15 bp, Homo sapiens
tttggtctgttgtct

SEQ ID NO: 785237 - DNA, 15 bp, Homo sapiens
ttggtctgttgtctt

SEQ ID NO: 785238 - DNA, 15 bp, Homo sapiens
tggtctgttgtcttt

SEQ ID NO: 785239 - DNA, 15 bp, Homo sapiens
ggtctgttgtctttc

SEQ ID NO: 785240 - DNA, 15 bp, Homo sapiens
gtctgttgtctttcc

SEQ ID NO: 785241 - DNA, 15 bp, Homo sapiens
tctgttgtctttcct

SEQ ID NO: 785242 - DNA, 15 bp, Homo sapiens
ctgttgtctttcctg

SEQ ID NO: 785243 - DNA, 15 bp, Homo sapiens
tgttgtctttcctgg

SEQ ID NO: 785244 - DNA, 15 bp, Homo sapiens
gttgtctttcctggt

SEQ ID NO: 785245 - DNA, 15 bp, Homo sapiens
ttgtctttcctggtt

SEQ ID NO: 785246 - DNA, 15 bp, Homo sapiens
tgtctttcctggtta

SEQ ID NO: 785247 - DNA, 15 bp, Homo sapiens
gtctttcctggttat

SEQ ID NO: 785248 - DNA, 15 bp, Homo sapiens
tctttcctggttatt

SEQ ID NO: 785249 - DNA, 15 bp, Homo sapiens
ctttcctggttattc

SEQ ID NO: 785250 - DNA, 15 bp, Homo sapiens
tttcctggttattca

SEQ ID NO: 785251 - DNA, 15 bp, Homo sapiens
ttcctggttattcat

SEQ ID NO: 785252 - DNA, 15 bp, Homo sapiens
tcctggttattcatt

SEQ ID NO: 785253 - DNA, 15 bp, Homo sapiens
cctggttattcatta

SEQ ID NO: 785254 - DNA, 15 bp, Homo sapiens
ctggttattcattat

SEQ ID NO: 785255 - DNA, 15 bp, Homo sapiens
tggttattcattatt

SEQ ID NO: 785256 - DNA, 15 bp, Homo sapiens
ggttattcattattc

SEQ ID NO: 785257 - DNA, 15 bp, Homo sapiens
gttattcattattca

SEQ ID NO: 785258 - DNA, 15 bp, Homo sapiens
ttattcattattcag

SEQ ID NO: 785259 - DNA, 15 bp, Homo sapiens
tattcattattcagt

SEQ ID NO: 785260 - DNA, 15 bp, Homo sapiens
attcattattcagtt

SEQ ID NO: 785261 - DNA, 15 bp, Homo sapiens
ttcattattcagttt

SEQ ID NO: 785262 - DNA, 15 bp, Homo sapiens
tcattattcagttta

SEQ ID NO: 785263 - DNA, 15 bp, Homo sapiens
cattattcagtttaa

SEQ ID NO: 785264 - DNA, 15 bp, Homo sapiens
attattcagtttaac

SEQ ID NO: 785265 - DNA, 15 bp, Homo sapiens
ttattcagtttaaca

SEQ ID NO: 785266 - DNA, 15 bp, Homo sapiens
tattcagtttaacac

SEQ ID NO: 785267 - DNA, 15 bp, Homo sapiens
attcagtttaacaca

SEQ ID NO: 785268 - DNA, 15 bp, Homo sapiens
ttcagtttaacacag

SEQ ID NO: 785269 - DNA, 15 bp, Homo sapiens
tcagtttaacacaga

SEQ ID NO: 785270 - DNA, 15 bp, Homo sapiens
cagtttaacacagaa

SEQ ID NO: 785271 - DNA, 15 bp, Homo sapiens
agtttaacacagaaa

SEQ ID NO: 785272 - DNA, 15 bp, Homo sapiens
gtttaacacagaaat

SEQ ID NO: 785273 - DNA, 15 bp, Homo sapiens
tttaacacagaaatc

SEQ ID NO: 785274 - DNA, 15 bp, Homo sapiens
ttaacacagaaatca

SEQ ID NO: 785275 - DNA, 15 bp, Homo sapiens
taacacagaaatcat

SEQ ID NO: 785276 - DNA, 15 bp, Homo sapiens
aacacagaaatcatt

SEQ ID NO: 785277 - DNA, 15 bp, Homo sapiens
acacagaaatcatta

SEQ ID NO: 785278 - DNA, 15 bp, Homo sapiens
cacagaaatcattaa

SEQ ID NO: 785279 - DNA, 15 bp, Homo sapiens
acagaaatcattaaa

SEQ ID NO: 785280 - DNA, 15 bp, Homo sapiens
cagaaatcattaaac

SEQ ID NO: 785281 - DNA, 15 bp, Homo sapiens
agaaatcattaaaca

SEQ ID NO: 785282 - DNA, 15 bp, Homo sapiens
gaaatcattaaacat

SEQ ID NO: 785283 - DNA, 15 bp, Homo sapiens
aaatcattaaacata

SEQ ID NO: 785284 - DNA, 15 bp, Homo sapiens
aatcattaaacatac

SEQ ID NO: 785285 - DNA, 15 bp, Homo sapiens
atcattaaacataca

SEQ ID NO: 785286 - DNA, 15 bp, Homo sapiens
tcattaaacatacac

SEQ ID NO: 785287 - DNA, 15 bp, Homo sapiens
cattaaacatacact

SEQ ID NO: 785288 - DNA, 15 bp, Homo sapiens
attaaacatacactg

SEQ ID NO: 785289 - DNA, 15 bp, Homo sapiens
ttaaacatacactgt

SEQ ID NO: 785290 - DNA, 15 bp, Homo sapiens
taaacatacactgtt

SEQ ID NO: 785291 - DNA, 15 bp, Homo sapiens
aaacatacactgttt

SEQ ID NO: 785292 - DNA, 15 bp, Homo sapiens
aacatacactgtttt

SEQ ID NO: 785293 - DNA, 15 bp, Homo sapiens
acatacactgttttc

SEQ ID NO: 785294 - DNA, 15 bp, Homo sapiens
catacactgttttct

SEQ ID NO: 785295 - DNA, 15 bp, Homo sapiens
atacactgttttcta

SEQ ID NO: 785296 - DNA, 15 bp, Homo sapiens
tacactgttttctat

SEQ ID NO: 785297 - DNA, 15 bp, Homo sapiens
acactgttttctatg

SEQ ID NO: 785298 - DNA, 15 bp, Homo sapiens
cactgttttctatgg

SEQ ID NO: 785299 - DNA, 15 bp, Homo sapiens
actgttttctatggt

SEQ ID NO: 785300 - DNA, 15 bp, Homo sapiens
ctgttttctatggtg

SEQ ID NO: 785301 - DNA, 15 bp, Homo sapiens
tgttttctatggtgc

SEQ ID NO: 785302 - DNA, 15 bp, Homo sapiens
gttttctatggtgcc

SEQ ID NO: 785303 - DNA, 15 bp, Homo sapiens
ttttctatggtgcca

SEQ ID NO: 785304 - DNA, 15 bp, Homo sapiens
tttctatggtgccaa

SEQ ID NO: 785305 - DNA, 15 bp, Homo sapiens
ttctatggtgccaaa

SEQ ID NO: 785306 - DNA, 15 bp, Homo sapiens
tctatggtgccaaac

SEQ ID NO: 785307 - DNA, 15 bp, Homo sapiens
ctatggtgccaaaca

SEQ ID NO: 785308 - DNA, 15 bp, Homo sapiens
tatggtgccaaacat

SEQ ID NO: 785309 - DNA, 15 bp, Homo sapiens
atggtgccaaacatc

SEQ ID NO: 785310 - DNA, 15 bp, Homo sapiens
tggtgccaaacatca

SEQ ID NO: 785311 - DNA, 15 bp, Homo sapiens
ggtgccaaacatcaa

SEQ ID NO: 785312 - DNA, 15 bp, Homo sapiens
gtgccaaacatcaaa

SEQ ID NO: 785313 - DNA, 15 bp, Homo sapiens
tgccaaacatcaaat

SEQ ID NO: 785314 - DNA, 15 bp, Homo sapiens
gccaaacatcaaatg

SEQ ID NO: 785315 - DNA, 15 bp, Homo sapiens
ccaaacatcaaatga

SEQ ID NO: 785316 - DNA, 15 bp, Homo sapiens
caaacatcaaatgaa

SEQ ID NO: 785317 - DNA, 15 bp, Homo sapiens
aaacatcaaatgaaa

SEQ ID NO: 785318 - DNA, 15 bp, Homo sapiens
aacatcaaatgaaac

SEQ ID NO: 785319 - DNA, 15 bp, Homo sapiens
acatcaaatgaaaca

SEQ ID NO: 785320 - DNA, 15 bp, Homo sapiens
catcaaatgaaacat

SEQ ID NO: 785321 - DNA, 15 bp, Homo sapiens
atcaaatgaaacatg

SEQ ID NO: 785322 - DNA, 15 bp, Homo sapiens
tcaaatgaaacatgc

SEQ ID NO: 785323 - DNA, 15 bp, Homo sapiens
caaatgaaacatgct

SEQ ID NO: 785324 - DNA, 15 bp, Homo sapiens
aaatgaaacatgctt

SEQ ID NO: 785325 - DNA, 15 bp, Homo sapiens
aatgaaacatgctta

SEQ ID NO: 785326 - DNA, 15 bp, Homo sapiens
atgaaacatgcttag

SEQ ID NO: 785327 - DNA, 15 bp, Homo sapiens
tgaaacatgcttagg

SEQ ID NO: 785328 - DNA, 15 bp, Homo sapiens
gaaacatgcttaggc

SEQ ID NO: 785329 - DNA, 15 bp, Homo sapiens
aaacatgcttaggcc

SEQ ID NO: 785330 - DNA, 15 bp, Homo sapiens
aacatgcttaggcct

SEQ ID NO: 785331 - DNA, 15 bp, Homo sapiens
acatgcttaggcctg

SEQ ID NO: 785332 - DNA, 15 bp, Homo sapiens
catgcttaggcctgt

SEQ ID NO: 785333 - DNA, 15 bp, Homo sapiens
atgcttaggcctgtg

SEQ ID NO: 785334 - DNA, 15 bp, Homo sapiens
tgcttaggcctgtga

SEQ ID NO: 785335 - DNA, 15 bp, Homo sapiens
gcttaggcctgtgaa

SEQ ID NO: 785336 - DNA, 15 bp, Homo sapiens
cttaggcctgtgaac

SEQ ID NO: 785337 - DNA, 15 bp, Homo sapiens
ttaggcctgtgaacc

SEQ ID NO: 785338 - DNA, 15 bp, Homo sapiens
taggcctgtgaacca

SEQ ID NO: 785339 - DNA, 15 bp, Homo sapiens
aggcctgtgaaccaa

SEQ ID NO: 785340 - DNA, 15 bp, Homo sapiens
ggcctgtgaaccaag

SEQ ID NO: 785341 - DNA, 15 bp, Homo sapiens
gcctgtgaaccaaga

SEQ ID NO: 785342 - DNA, 15 bp, Homo sapiens
cctgtgaaccaagaa

SEQ ID NO: 785343 - DNA, 15 bp, Homo sapiens
ctgtgaaccaagaac

SEQ ID NO: 785344 - DNA, 15 bp, Homo sapiens
tgtgaaccaagaact

SEQ ID NO: 785345 - DNA, 15 bp, Homo sapiens
gtgaaccaagaactt

SEQ ID NO: 785346 - DNA, 15 bp, Homo sapiens
tgaaccaagaacttc

SEQ ID NO: 785347 - DNA, 15 bp, Homo sapiens
gaaccaagaacttct

SEQ ID NO: 785348 - DNA, 15 bp, Homo sapiens
aaccaagaacttcta

SEQ ID NO: 785349 - DNA, 15 bp, Homo sapiens
accaagaacttctag

SEQ ID NO: 785350 - DNA, 15 bp, Homo sapiens
ccaagaacttctaga

SEQ ID NO: 785351 - DNA, 15 bp, Homo sapiens
caagaacttctagaa

SEQ ID NO: 785352 - DNA, 15 bp, Homo sapiens
aagaacttctagaaa

SEQ ID NO: 785353 - DNA, 15 bp, Homo sapiens
agaacttctagaaac

SEQ ID NO: 785354 - DNA, 15 bp, Homo sapiens
gaacttctagaaacc

SEQ ID NO: 785355 - DNA, 15 bp, Homo sapiens
aacttctagaaacca

SEQ ID NO: 785356 - DNA, 15 bp, Homo sapiens
acttctagaaaccag

SEQ ID NO: 785357 - DNA, 15 bp, Homo sapiens
cttctagaaaccaga

SEQ ID NO: 785358 - DNA, 15 bp, Homo sapiens
ttctagaaaccagac

SEQ ID NO: 785359 - DNA, 15 bp, Homo sapiens
tctagaaaccagaca

SEQ ID NO: 785360 - DNA, 15 bp, Homo sapiens
ctagaaaccagacaa

SEQ ID NO: 785361 - DNA, 15 bp, Homo sapiens
tagaaaccagacaat

SEQ ID NO: 785362 - DNA, 15 bp, Homo sapiens
agaaaccagacaatt

SEQ ID NO: 785363 - DNA, 15 bp, Homo sapiens
gaaaccagacaatta

SEQ ID NO: 785364 - DNA, 15 bp, Homo sapiens
aaaccagacaattac

SEQ ID NO: 785365 - DNA, 15 bp, Homo sapiens
aaccagacaattacc

SEQ ID NO: 785366 - DNA, 15 bp, Homo sapiens
accagacaattacca

SEQ ID NO: 785367 - DNA, 15 bp, Homo sapiens
ccagacaattaccaa

SEQ ID NO: 785368 - DNA, 15 bp, Homo sapiens
cagacaattaccaag

SEQ ID NO: 785369 - DNA, 15 bp, Homo sapiens
agacaattaccaagg

SEQ ID NO: 785370 - DNA, 15 bp, Homo sapiens
gacaattaccaaggg

SEQ ID NO: 785371 - DNA, 15 bp, Homo sapiens
acaattaccaagggc

SEQ ID NO: 785372 - DNA, 15 bp, Homo sapiens
caattaccaagggcg

SEQ ID NO: 785373 - DNA, 15 bp, Homo sapiens
aattaccaagggcgt

SEQ ID NO: 785374 - DNA, 15 bp, Homo sapiens
attaccaagggcgtc

SEQ ID NO: 785375 - DNA, 15 bp, Homo sapiens
ttaccaagggcgtca

SEQ ID NO: 785376 - DNA, 15 bp, Homo sapiens
taccaagggcgtcaa

SEQ ID NO: 785377 - DNA, 15 bp, Homo sapiens
accaagggcgtcaaa

SEQ ID NO: 785378 - DNA, 15 bp, Homo sapiens
ccaagggcgtcaaaa

SEQ ID NO: 785379 - DNA, 15 bp, Homo sapiens
caagggcgtcaaaat

SEQ ID NO: 785380 - DNA, 15 bp, Homo sapiens
aagggcgtcaaaatg

SEQ ID NO: 785381 - DNA, 15 bp, Homo sapiens
agggcgtcaaaatgt

SEQ ID NO: 785382 - DNA, 15 bp, Homo sapiens
gggcgtcaaaatgtc

SEQ ID NO: 785383 - DNA, 15 bp, Homo sapiens
ggcgtcaaaatgtct

SEQ ID NO: 785384 - DNA, 15 bp, Homo sapiens
gcgtcaaaatgtctc

SEQ ID NO: 785385 - DNA, 15 bp, Homo sapiens
cgtcaaaatgtctca

SEQ ID NO: 785386 - DNA, 15 bp, Homo sapiens
gtcaaaatgtctcat

SEQ ID NO: 785387 - DNA, 15 bp, Homo sapiens
tcaaaatgtctcatc

SEQ ID NO: 785388 - DNA, 15 bp, Homo sapiens
caaaatgtctcatct

SEQ ID NO: 785389 - DNA, 15 bp, Homo sapiens
aaaatgtctcatctt

SEQ ID NO: 785390 - DNA, 15 bp, Homo sapiens
aaatgtctcatcttg

SEQ ID NO: 785391 - DNA, 15 bp, Homo sapiens
aatgtctcatcttgt

SEQ ID NO: 785392 - DNA, 15 bp, Homo sapiens
atgtctcatcttgtt

SEQ ID NO: 785393 - DNA, 15 bp, Homo sapiens
tgtctcatcttgttg

SEQ ID NO: 785394 - DNA, 15 bp, Homo sapiens
gtctcatcttgttgc

SEQ ID NO: 785395 - DNA, 15 bp, Homo sapiens
tctcatcttgttgct

SEQ ID NO: 785396 - DNA, 15 bp, Homo sapiens
ctcatcttgttgctt

SEQ ID NO: 785397 - DNA, 15 bp, Homo sapiens
tcatcttgttgcttg

SEQ ID NO: 785398 - DNA, 15 bp, Homo sapiens
catcttgttgcttgt

SEQ ID NO: 785399 - DNA, 15 bp, Homo sapiens
atcttgttgcttgta

SEQ ID NO: 785400 - DNA, 15 bp, Homo sapiens
tcttgttgcttgtaa

SEQ ID NO: 785401 - DNA, 15 bp, Homo sapiens
cttgttgcttgtaac

SEQ ID NO: 785402 - DNA, 15 bp, Homo sapiens
ttgttgcttgtaact

SEQ ID NO: 785403 - DNA, 15 bp, Homo sapiens
gctaatgccagcctt

SEQ ID NO: 785404 - DNA, 15 bp, Homo sapiens
ctaatgccagccttc

SEQ ID NO: 785405 - DNA, 15 bp, Homo sapiens
taatgccagccttct

SEQ ID NO: 785406 - DNA, 15 bp, Homo sapiens
aatgccagccttctc

SEQ ID NO: 785407 - DNA, 15 bp, Homo sapiens
atgccagccttctct

SEQ ID NO: 785408 - DNA, 15 bp, Homo sapiens
tgccagccttctctg

SEQ ID NO: 785409 - DNA, 15 bp, Homo sapiens
gccagccttctctgg

SEQ ID NO: 785410 - DNA, 15 bp, Homo sapiens
ccagccttctctgga

SEQ ID NO: 785411 - DNA, 15 bp, Homo sapiens
cagccttctctggaa

SEQ ID NO: 785412 - DNA, 15 bp, Homo sapiens
agccttctctggaag

SEQ ID NO: 785413 - DNA, 15 bp, Homo sapiens
gccttctctggaagt

SEQ ID NO: 785414 - DNA, 15 bp, Homo sapiens
ccttctctggaagtc

SEQ ID NO: 785415 - DNA, 15 bp, Homo sapiens
cttctctggaagtct

SEQ ID NO: 785416 - DNA, 15 bp, Homo sapiens
ttctctggaagtctg

SEQ ID NO: 785417 - DNA, 15 bp, Homo sapiens
tctctggaagtctgt

SEQ ID NO: 785418 - DNA, 15 bp, Homo sapiens
ctctggaagtctgtc

SEQ ID NO: 785419 - DNA, 15 bp, Homo sapiens
tctggaagtctgtct

SEQ ID NO: 785420 - DNA, 15 bp, Homo sapiens
ctggaagtctgtctc

SEQ ID NO: 785421 - DNA, 15 bp, Homo sapiens
tggaagtctgtctct

SEQ ID NO: 785422 - DNA, 15 bp, Homo sapiens
ggaagtctgtctctt

SEQ ID NO: 785423 - DNA, 15 bp, Homo sapiens
gaagtctgtctcttt

SEQ ID NO: 785424 - DNA, 15 bp, Homo sapiens
aagtctgtctctttg

SEQ ID NO: 785425 - DNA, 15 bp, Homo sapiens
agtctgtctctttga

SEQ ID NO: 785426 - DNA, 15 bp, Homo sapiens
gtctgtctctttgaa

SEQ ID NO: 785427 - DNA, 15 bp, Homo sapiens
tctgtctctttgaag

SEQ ID NO: 785428 - DNA, 15 bp, Homo sapiens
ctgtctctttgaagt

SEQ ID NO: 785429 - DNA, 15 bp, Homo sapiens
tgtctctttgaagtt

SEQ ID NO: 785430 - DNA, 15 bp, Homo sapiens
gtctctttgaagttg

SEQ ID NO: 785431 - DNA, 15 bp, Homo sapiens
tctctttgaagttga

SEQ ID NO: 785432 - DNA, 15 bp, Homo sapiens
ctctttgaagttgag

SEQ ID NO: 785433 - DNA, 15 bp, Homo sapiens
tctttgaagttgagg

SEQ ID NO: 785434 - DNA, 15 bp, Homo sapiens
ctttgaagttgaggt

SEQ ID NO: 785435 - DNA, 15 bp, Homo sapiens
tttgaagttgaggtc

SEQ ID NO: 785436 - DNA, 15 bp, Homo sapiens
ttgaagttgaggtca

SEQ ID NO: 785437 - DNA, 15 bp, Homo sapiens
tgaagttgaggtcat

SEQ ID NO: 785438 - DNA, 15 bp, Homo sapiens
gaagttgaggtcatt

SEQ ID NO: 785439 - DNA, 15 bp, Homo sapiens
aagttgaggtcattt

SEQ ID NO: 785440 - DNA, 15 bp, Homo sapiens
agttgaggtcatttc

SEQ ID NO: 785441 - DNA, 15 bp, Homo sapiens
gttgaggtcatttcc

SEQ ID NO: 785442 - DNA, 15 bp, Homo sapiens
ttgaggtcatttcca

SEQ ID NO: 785443 - DNA, 15 bp, Homo sapiens
tgaggtcatttccac

SEQ ID NO: 785444 - DNA, 15 bp, Homo sapiens
gaggtcatttccacc

SEQ ID NO: 785445 - DNA, 15 bp, Homo sapiens
aggtcatttccacca

SEQ ID NO: 785446 - DNA, 15 bp, Homo sapiens
ggtcatttccaccac

SEQ ID NO: 785447 - DNA, 15 bp, Homo sapiens
gtcatttccaccaca

SEQ ID NO: 785448 - DNA, 15 bp, Homo sapiens
tcatttccaccacac

SEQ ID NO: 785449 - DNA, 15 bp, Homo sapiens
catttccaccacacc

SEQ ID NO: 785450 - DNA, 15 bp, Homo sapiens
atttccaccacaccc

SEQ ID NO: 785451 - DNA, 15 bp, Homo sapiens
tttccaccacacccc

SEQ ID NO: 785452 - DNA, 15 bp, Homo sapiens
ttccaccacacccca

SEQ ID NO: 785453 - DNA, 15 bp, Homo sapiens
tccaccacaccccag

SEQ ID NO: 785454 - DNA, 15 bp, Homo sapiens
ccaccacaccccaga

SEQ ID NO: 785455 - DNA, 15 bp, Homo sapiens
caccacaccccagag

SEQ ID NO: 785456 - DNA, 15 bp, Homo sapiens
accacaccccagagg

SEQ ID NO: 785457 - DNA, 15 bp, Homo sapiens
ccacaccccagaggg

SEQ ID NO: 785458 - DNA, 15 bp, Homo sapiens
cacaccccagaggga

SEQ ID NO: 785459 - DNA, 15 bp, Homo sapiens
acaccccagagggac

SEQ ID NO: 785460 - DNA, 15 bp, Homo sapiens
caccccagagggacc

SEQ ID NO: 785461 - DNA, 15 bp, Homo sapiens
accccagagggaccc

SEQ ID NO: 785462 - DNA, 15 bp, Homo sapiens
ccccagagggaccca

SEQ ID NO: 785463 - DNA, 15 bp, Homo sapiens
cccagagggacccat

SEQ ID NO: 785464 - DNA, 15 bp, Homo sapiens
ccagagggacccatc

SEQ ID NO: 785465 - DNA, 15 bp, Homo sapiens
cagagggacccatct

SEQ ID NO: 785466 - DNA, 15 bp, Homo sapiens
agagggacccatcta

SEQ ID NO: 785467 - DNA, 15 bp, Homo sapiens
gagggacccatctag

SEQ ID NO: 785468 - DNA, 15 bp, Homo sapiens
agggacccatctagt

SEQ ID NO: 785469 - DNA, 15 bp, Homo sapiens
gggacccatctagtc

SEQ ID NO: 785470 - DNA, 15 bp, Homo sapiens
ggacccatctagtcg

SEQ ID NO: 785471 - DNA, 15 bp, Homo sapiens
gacccatctagtcga

SEQ ID NO: 785472 - DNA, 15 bp, Homo sapiens
acccatctagtcgac

SEQ ID NO: 785473 - DNA, 15 bp, Homo sapiens
cccatctagtcgacg

SEQ ID NO: 785474 - DNA, 15 bp, Homo sapiens
ccatctagtcgacgc

SEQ ID NO: 785475 - DNA, 15 bp, Homo sapiens
catctagtcgacgcc

SEQ ID NO: 785476 - DNA, 15 bp, Homo sapiens
atctagtcgacgcct

SEQ ID NO: 785477 - DNA, 15 bp, Homo sapiens
tctagtcgacgcctg

SEQ ID NO: 785478 - DNA, 15 bp, Homo sapiens
ctagtcgacgcctgc

SEQ ID NO: 785479 - DNA, 15 bp, Homo sapiens
tagtcgacgcctgcc

SEQ ID NO: 785480 - DNA, 15 bp, Homo sapiens
agtcgacgcctgcct

SEQ ID NO: 785481 - DNA, 15 bp, Homo sapiens
gtcgacgcctgcctg

SEQ ID NO: 785482 - DNA, 15 bp, Homo sapiens
tcgacgcctgcctgc

SEQ ID NO: 785483 - DNA, 15 bp, Homo sapiens
cgacgcctgcctgcc

SEQ ID NO: 785484 - DNA, 15 bp, Homo sapiens
gacgcctgcctgcct

SEQ ID NO: 785485 - DNA, 15 bp, Homo sapiens
acgcctgcctgcctg

SEQ ID NO: 785486 - DNA, 15 bp, Homo sapiens
cgcctgcctgcctgg

SEQ ID NO: 785487 - DNA, 15 bp, Homo sapiens
gcctgcctgcctggc

SEQ ID NO: 785488 - DNA, 15 bp, Homo sapiens
cctgcctgcctggcc

SEQ ID NO: 785489 - DNA, 15 bp, Homo sapiens
ctgcctgcctggcca

SEQ ID NO: 785490 - DNA, 15 bp, Homo sapiens
tgcctgcctggccac

SEQ ID NO: 785491 - DNA, 15 bp, Homo sapiens
gcctgcctggccacc

SEQ ID NO: 785492 - DNA, 15 bp, Homo sapiens
cctgcctggccacca

SEQ ID NO: 785493 - DNA, 15 bp, Homo sapiens
ctgcctggccaccac

SEQ ID NO: 785494 - DNA, 15 bp, Homo sapiens
tgcctggccaccact

SEQ ID NO: 785495 - DNA, 15 bp, Homo sapiens
gcctggccaccactt

SEQ ID NO: 785496 - DNA, 15 bp, Homo sapiens
cctggccaccacttc

SEQ ID NO: 785497 - DNA, 15 bp, Homo sapiens
ctggccaccacttcc

SEQ ID NO: 785498 - DNA, 15 bp, Homo sapiens
tggccaccacttccc

SEQ ID NO: 785499 - DNA, 15 bp, Homo sapiens
ggccaccacttccct

SEQ ID NO: 785500 - DNA, 15 bp, Homo sapiens
gccaccacttcccta

SEQ ID NO: 785501 - DNA, 15 bp, Homo sapiens
ccaccacttccctac

SEQ ID NO: 785502 - DNA, 15 bp, Homo sapiens
caccacttccctact

SEQ ID NO: 785503 - DNA, 15 bp, Homo sapiens
accacttccctactg

SEQ ID NO: 785504 - DNA, 15 bp, Homo sapiens
ccacttccctactgg

SEQ ID NO: 785505 - DNA, 15 bp, Homo sapiens
cacttccctactgga

SEQ ID NO: 785506 - DNA, 15 bp, Homo sapiens
acttccctactggaa

SEQ ID NO: 785507 - DNA, 15 bp, Homo sapiens
cttccctactggaaa

SEQ ID NO: 785508 - DNA, 15 bp, Homo sapiens
ttccctactggaaaa

SEQ ID NO: 785509 - DNA, 15 bp, Homo sapiens
tccctactggaaaat

SEQ ID NO: 785510 - DNA, 15 bp, Homo sapiens
ccctactggaaaatc

SEQ ID NO: 785511 - DNA, 15 bp, Homo sapiens
cctactggaaaatca

SEQ ID NO: 785512 - DNA, 15 bp, Homo sapiens
ctactggaaaatcat

SEQ ID NO: 785513 - DNA, 15 bp, Homo sapiens
tactggaaaatcatc

SEQ ID NO: 785514 - DNA, 15 bp, Homo sapiens
actggaaaatcatca

SEQ ID NO: 785515 - DNA, 15 bp, Homo sapiens
ctggaaaatcatcat

SEQ ID NO: 785516 - DNA, 15 bp, Homo sapiens
tggaaaatcatcatt

SEQ ID NO: 785517 - DNA, 15 bp, Homo sapiens
ggaaaatcatcattt

SEQ ID NO: 785518 - DNA, 15 bp, Homo sapiens
gaaaatcatcatttc

SEQ ID NO: 785519 - DNA, 15 bp, Homo sapiens
aaaatcatcatttcc

SEQ ID NO: 785520 - DNA, 15 bp, Homo sapiens
aaatcatcatttccc

SEQ ID NO: 785521 - DNA, 15 bp, Homo sapiens
aatcatcatttccca

SEQ ID NO: 785522 - DNA, 15 bp, Homo sapiens
atcatcatttcccat

SEQ ID NO: 785523 - DNA, 15 bp, Homo sapiens
tcatcatttcccatg

SEQ ID NO: 785524 - DNA, 15 bp, Homo sapiens
catcatttcccatgt

SEQ ID NO: 785525 - DNA, 15 bp, Homo sapiens
atcatttcccatgtt

SEQ ID NO: 785526 - DNA, 15 bp, Homo sapiens
tcatttcccatgttc

SEQ ID NO: 785527 - DNA, 15 bp, Homo sapiens
catttcccatgttct

SEQ ID NO: 785528 - DNA, 15 bp, Homo sapiens
atttcccatgttcta

SEQ ID NO: 785529 - DNA, 15 bp, Homo sapiens
tttcccatgttctag

SEQ ID NO: 785530 - DNA, 15 bp, Homo sapiens
ttcccatgttctagt

SEQ ID NO: 785531 - DNA, 15 bp, Homo sapiens
tcccatgttctagtt

SEQ ID NO: 785532 - DNA, 15 bp, Homo sapiens
cccatgttctagttg

SEQ ID NO: 785533 - DNA, 15 bp, Homo sapiens
ccatgttctagttgg

SEQ ID NO: 785534 - DNA, 15 bp, Homo sapiens
catgttctagttggg

SEQ ID NO: 785535 - DNA, 15 bp, Homo sapiens
atgttctagttgggg

SEQ ID NO: 785536 - DNA, 15 bp, Homo sapiens
tgttctagttgggga

SEQ ID NO: 785537 - DNA, 15 bp, Homo sapiens
gttctagttggggaa

SEQ ID NO: 785538 - DNA, 15 bp, Homo sapiens
ttctagttggggaag

SEQ ID NO: 785539 - DNA, 15 bp, Homo sapiens
tctagttggggaagg

SEQ ID NO: 785540 - DNA, 15 bp, Homo sapiens
ctagttggggaagga

SEQ ID NO: 785541 - DNA, 15 bp, Homo sapiens
tagttggggaaggac

SEQ ID NO: 785542 - DNA, 15 bp, Homo sapiens
agttggggaaggacc

SEQ ID NO: 785543 - DNA, 15 bp, Homo sapiens
gttggggaaggaccc

SEQ ID NO: 785544 - DNA, 15 bp, Homo sapiens
ttggggaaggaccca

SEQ ID NO: 785545 - DNA, 15 bp, Homo sapiens
tggggaaggacccag

SEQ ID NO: 785546 - DNA, 15 bp, Homo sapiens
ggggaaggacccagc

SEQ ID NO: 785547 - DNA, 15 bp, Homo sapiens
gggaaggacccagca

SEQ ID NO: 785548 - DNA, 15 bp, Homo sapiens
ggaaggacccagcag

SEQ ID NO: 785549 - DNA, 15 bp, Homo sapiens
gaaggacccagcagc

SEQ ID NO: 785550 - DNA, 15 bp, Homo sapiens
aaggacccagcagct

SEQ ID NO: 785551 - DNA, 15 bp, Homo sapiens
aggacccagcagctc

SEQ ID NO: 785552 - DNA, 15 bp, Homo sapiens
ggacccagcagctct

SEQ ID NO: 785553 - DNA, 15 bp, Homo sapiens
gacccagcagctctt

SEQ ID NO: 785554 - DNA, 15 bp, Homo sapiens
acccagcagctcttt

SEQ ID NO: 785555 - DNA, 15 bp, Homo sapiens
cccagcagctctttc

SEQ ID NO: 785556 - DNA, 15 bp, Homo sapiens
ccagcagctctttct

SEQ ID NO: 785557 - DNA, 15 bp, Homo sapiens
cagcagctctttctc

SEQ ID NO: 785558 - DNA, 15 bp, Homo sapiens
agcagctctttctct

SEQ ID NO: 785559 - DNA, 15 bp, Homo sapiens
gcagctctttctctt

SEQ ID NO: 785560 - DNA, 15 bp, Homo sapiens
cagctctttctcttt

SEQ ID NO: 785561 - DNA, 15 bp, Homo sapiens
agctctttctctttg

SEQ ID NO: 785562 - DNA, 15 bp, Homo sapiens
gctctttctctttgg

SEQ ID NO: 785563 - DNA, 15 bp, Homo sapiens
ctctttctctttggc

SEQ ID NO: 785564 - DNA, 15 bp, Homo sapiens
tctttctctttggcc

SEQ ID NO: 785565 - DNA, 15 bp, Homo sapiens
ctttctctttggccc

SEQ ID NO: 785566 - DNA, 15 bp, Homo sapiens
tttctctttggccca

SEQ ID NO: 785567 - DNA, 15 bp, Homo sapiens
ttctctttggcccat

SEQ ID NO: 785568 - DNA, 15 bp, Homo sapiens
tctctttggcccatc

SEQ ID NO: 785569 - DNA, 15 bp, Homo sapiens
ctctttggcccatct

SEQ ID NO: 785570 - DNA, 15 bp, Homo sapiens
tctttggcccatctc

SEQ ID NO: 785571 - DNA, 15 bp, Homo sapiens
ctttggcccatctct

SEQ ID NO: 785572 - DNA, 15 bp, Homo sapiens
tttggcccatctctc

SEQ ID NO: 785573 - DNA, 15 bp, Homo sapiens
ttggcccatctctct

SEQ ID NO: 785574 - DNA, 15 bp, Homo sapiens
tggcccatctctctt

SEQ ID NO: 785575 - DNA, 15 bp, Homo sapiens
ggcccatctctcttc

SEQ ID NO: 785576 - DNA, 15 bp, Homo sapiens
gcccatctctcttcc

SEQ ID NO: 785577 - DNA, 15 bp, Homo sapiens
cccatctctcttcct

SEQ ID NO: 785578 - DNA, 15 bp, Homo sapiens
ccatctctcttcctt

SEQ ID NO: 785579 - DNA, 15 bp, Homo sapiens
catctctcttccttt

SEQ ID NO: 785580 - DNA, 15 bp, Homo sapiens
atctctcttcctttt

SEQ ID NO: 785581 - DNA, 15 bp, Homo sapiens
tctctcttcctttta

SEQ ID NO: 785582 - DNA, 15 bp, Homo sapiens
ctctcttccttttat

SEQ ID NO: 785583 - DNA, 15 bp, Homo sapiens
tctcttccttttatg

SEQ ID NO: 785584 - DNA, 15 bp, Homo sapiens
ctcttccttttatga

SEQ ID NO: 785585 - DNA, 15 bp, Homo sapiens
tcttccttttatgag

SEQ ID NO: 785586 - DNA, 15 bp, Homo sapiens
cttccttttatgagc

SEQ ID NO: 785587 - DNA, 15 bp, Homo sapiens
ttccttttatgagcc

SEQ ID NO: 785588 - DNA, 15 bp, Homo sapiens
tccttttatgagcca

SEQ ID NO: 785589 - DNA, 15 bp, Homo sapiens
ccttttatgagccag

SEQ ID NO: 785590 - DNA, 15 bp, Homo sapiens
cttttatgagccagc

SEQ ID NO: 785591 - DNA, 15 bp, Homo sapiens
ttttatgagccagct

SEQ ID NO: 785592 - DNA, 15 bp, Homo sapiens
tttatgagccagcta

SEQ ID NO: 785593 - DNA, 15 bp, Homo sapiens
ttatgagccagctaa

SEQ ID NO: 785594 - DNA, 15 bp, Homo sapiens
tatgagccagctaaa

SEQ ID NO: 785595 - DNA, 15 bp, Homo sapiens
atgagccagctaaaa

SEQ ID NO: 785596 - DNA, 15 bp, Homo sapiens
tgagccagctaaaag

SEQ ID NO: 785597 - DNA, 15 bp, Homo sapiens
gagccagctaaaagg

SEQ ID NO: 785598 - DNA, 15 bp, Homo sapiens
agccagctaaaagga

SEQ ID NO: 785599 - DNA, 15 bp, Homo sapiens
gccagctaaaaggaa

SEQ ID NO: 785600 - DNA, 15 bp, Homo sapiens
ccagctaaaaggaat

SEQ ID NO: 785601 - DNA, 15 bp, Homo sapiens
cagctaaaaggaatc

SEQ ID NO: 785602 - DNA, 15 bp, Homo sapiens
agctaaaaggaatcc

SEQ ID NO: 785603 - DNA, 15 bp, Homo sapiens
gctaaaaggaatccc

SEQ ID NO: 785604 - DNA, 15 bp, Homo sapiens
ctaaaaggaatcccc

SEQ ID NO: 785605 - DNA, 15 bp, Homo sapiens
taaaaggaatccccc

SEQ ID NO: 785606 - DNA, 15 bp, Homo sapiens
aaaaggaatccccca

SEQ ID NO: 785607 - DNA, 15 bp, Homo sapiens
aaaggaatcccccag

SEQ ID NO: 785608 - DNA, 15 bp, Homo sapiens
aaggaatcccccaga

SEQ ID NO: 785609 - DNA, 15 bp, Homo sapiens
aggaatcccccagag

SEQ ID NO: 785610 - DNA, 15 bp, Homo sapiens
ggaatcccccagagg

SEQ ID NO: 785611 - DNA, 15 bp, Homo sapiens
gaatcccccagaggt

SEQ ID NO: 785612 - DNA, 15 bp, Homo sapiens
aatcccccagaggtc

SEQ ID NO: 785613 - DNA, 15 bp, Homo sapiens
atcccccagaggtca

SEQ ID NO: 785614 - DNA, 15 bp, Homo sapiens
tcccccagaggtcat

SEQ ID NO: 785615 - DNA, 15 bp, Homo sapiens
cccccagaggtcatc

SEQ ID NO: 785616 - DNA, 15 bp, Homo sapiens
ccccagaggtcatct

SEQ ID NO: 785617 - DNA, 15 bp, Homo sapiens
cccagaggtcatctt

SEQ ID NO: 785618 - DNA, 15 bp, Homo sapiens
ccagaggtcatcttt

SEQ ID NO: 785619 - DNA, 15 bp, Homo sapiens
cagaggtcatctttg

SEQ ID NO: 785620 - DNA, 15 bp, Homo sapiens
agaggtcatctttgt

SEQ ID NO: 785621 - DNA, 15 bp, Homo sapiens
gaggtcatctttgtc

SEQ ID NO: 785622 - DNA, 15 bp, Homo sapiens
aggtcatctttgtcc

SEQ ID NO: 785623 - DNA, 15 bp, Homo sapiens
ggtcatctttgtcct

SEQ ID NO: 785624 - DNA, 15 bp, Homo sapiens
gtcatctttgtcctt

SEQ ID NO: 785625 - DNA, 15 bp, Homo sapiens
tcatctttgtccttg

SEQ ID NO: 785626 - DNA, 15 bp, Homo sapiens
catctttgtccttgg

SEQ ID NO: 785627 - DNA, 15 bp, Homo sapiens
atctttgtccttggc

SEQ ID NO: 785628 - DNA, 15 bp, Homo sapiens
tctttgtccttggcg

SEQ ID NO: 785629 - DNA, 15 bp, Homo sapiens
ctttgtccttggcgt

SEQ ID NO: 785630 - DNA, 15 bp, Homo sapiens
tttgtccttggcgtg

SEQ ID NO: 785631 - DNA, 15 bp, Homo sapiens
ttgtccttggcgtgg

SEQ ID NO: 785632 - DNA, 15 bp, Homo sapiens
tgtccttggcgtggg

SEQ ID NO: 785633 - DNA, 15 bp, Homo sapiens
gtccttggcgtggga

SEQ ID NO: 785634 - DNA, 15 bp, Homo sapiens
tccttggcgtgggaa

SEQ ID NO: 785635 - DNA, 15 bp, Homo sapiens
ccttggcgtgggaaa

SEQ ID NO: 785636 - DNA, 15 bp, Homo sapiens
cttggcgtgggaaag

SEQ ID NO: 785637 - DNA, 15 bp, Homo sapiens
ttggcgtgggaaaga

SEQ ID NO: 785638 - DNA, 15 bp, Homo sapiens
tggcgtgggaaagag

SEQ ID NO: 785639 - DNA, 15 bp, Homo sapiens
ggcgtgggaaagaga
